United States Patent Application Publication US 2014/0057251 A1 - sequence listing, part 55

SEQ ID NO: 74759 - DNA, 1095 bp, Cannabis sativa
aaggtaaatacatattgttatgaattaataacaaccagaagaagcacatcaacaagtagactaaaccagcagaggacaagataacagagtaaaacaaatgcagcataactcaatgaaataagcagtaaaaatggcagtatacgcagagcaaaaatggcagtaaaaattgcataaatttatttcctgtcccttaaaaagtaatctttgagacgaacataaaggcaaaacaattgtaataatttttactgattagtacgaaacaactcaaataaaaggtatataaatttgtatatatcatatgtcaaagaaggtattactgagatgagcattgtgatttgcagagctagtgatatatagagatggaaatcttatgatttaaagagctcaaaattcagaacaacaaataatgccctctgtttcaagatgctaaacagtggccaatgaccatgttcacaaaagctaaagtgatggagctttaaacagttattcattggaccaacttttgcacaattacaacattcaaaactagggaaattttcatagtaatgctagaagtataaaaaagtgcatgacaaatcttgatgttgatgatgttgccatgttgaaaagagaacacaatttcacaattaaactaaattatgacactttcctcttggcctgctcttgaaccccacaaacaaatccttacactctcacaaagtggctatagtgtttgctccagctcagaaccaaaaagaaaaaagtaataaggtatattctaaaacaatatcatagataactcgttagtcaattacatcgaactcttgaatgacattgatcaatgagacatttcatcaaaatttacttcataacaattgaggcatttaatcaaacaggtaacaaatactagaaaggcaaattaatacatacaattttttttttaacaaaacctatacaccacaaagctgtttttatgtttggtatactagaatcagcatatgtaaaaaaaccaaaccaaatgaaatattaaaatacaactagaaattcttcccaaaacaaaacgaagaaagaaactaaactagaaccaaaaaaaaatggcaccagtagaatcagcat

SEQ ID NO: 74760 - DNA, 952 bp, Cannabis sativa
  modified_base (905)..(923): a, c, t, g, unknown or other
tcaagattcaagtaccattcaaacatggatttatcttctgcaagatttgatcttgagaggtttgatggatcaagaaactttagtctatggaaggagaagatgatggccaattaatatactaaaaacttaattcagcatttgaagaaagtattgaggaatcagagaaggaaaattcaaccaagaaaaaagaaatcgatattatgatgaagcaagctcaaccttaataataatgaacattgtagacaatgtgttgagacaagttattggagagaaaactgttcgtgaattcggagctagctcgatcaactctacatggccaagtcactgtcacatagatcttcttaaaagggaaattttatggtttcaaattaaatgctactatttattttgaacagaatatagatgatgtgaatagaattgttttggctctactaacatgaggaaaccattgatgaagaagattaagttgtgattgttcttaatggtttgcctaaccaatttaaagaaatggaaatttttataatgtatagtagggacactctcactttggaagacataatgagaactctgagatcaagggatgcttaattgaattggcaaaaggcagcaaagcaagaatcaagatctgatgaagctttaatggctcgagaaagacaacatagaagaggaaattaaagatcgagagacaattcaagatccagaggaaatttaagatccaaatcaagaccaagggaaaccattaagtgtcaccattgtggcaaagtgggtcacttaattagaaactgttgggaatgaagagacaagaaaaagaagaataaggaagaagaagacaagggcagtgattccaatgttgtagtggatgataactacaattctgatggagatgttgttgggttttatgcccnnnnnnnnnnnnnnnnnnntataatcaaatttacttattaatatagat

SEQ ID NO: 74761 - DNA, 586 bp, Cannabis sativa
aaggtcctctattgtcggtagaccttcttcttcatcctcatattcacgaacaatgataggctgatgagattggctccaccaatttttcagacatatcaaagcttccacatatgtcggattcaatgagctcttaaaaggatctaaaatacgccctccaatggagaaagccgcctcagaagcaagtgtagaagctggaacagctaagacgtcacgagcaatttttgacaaggtcgggtatttggatgaatttacacaccaccatttcagtatatcaaagtgctcaagctgacccattttaaaaggttcagtaccatcagaaaagtacttatccaattcattttttgtcacttcaccattttgcttgatcctttcttgctcaaactcatcttgaatgtcatcccaaagaaatgagaaaaaatctgatgcatttgtagtagtagtactagtgtcttgaccttggctcagtggaactgatagttgtaactgtgattgctcattcccaccaccatacacctcaaacaatgttctaagagtcgtttcaatcttattcactatcaacttggacttgattgggccatgcaattta

SEQ ID NO: 74762 - DNA, 818 bp, Cannabis sativa
aactttattgtcttgcatagacttattctcttcatttatggtatcattctactttttagagtatatatacacaattttcttgaattgtgtataatttataaaagaaaaaaagtagaaaaaaaaaaactttgaaatgaatataatgggtcaggcttcgacgaggaatcagaattaaagaaacacaataactgtaatgagaaaattacattctatacttattttacttgttttaatttttatttttattgatatattcatttttatagatgatatcttcattagaaggataatgtaaattatatgctaaatttaaatgaagagtgagtttatatttggcagcctactcataaaaattgatacattttaataaaatataatatgagattatttttgattaatagatatagaaaaaaaggtattactcagattatcccaaatgacaataatttatcgtttatgtaatgattaacactaactataatttcatttccattcaaatagtcaaaacaaattccaccgcccatcatatatattctttatataaaacaaaacaaaatcaaaactagtataaatatatcaccgaacgtgtaaaattctaagggttaagttgaaaaatgcctcttttatttatcaattaattaaatttacttctaattttatatttatttgaaatataactgtttttatatgtattgtacttaaaatgcccttacataataagaggatcacatagagagtatcttgaagtgataagggcaaaattggtacaatgtttaaaaaaagaggtaaaaataaaagaaaataatataaaaagggta

SEQ ID NO: 74763 - DNA, 1550 bp, Cannabis sativa
  modified_base (122)..(122): a, c, t, g, unknown or other
agaatttaggaatcgtatttttgtcgtaactttttatttgggtgtctattttggacgtttaataccgtttcgaagcttgcagcaagcttacgatataatgtatgttttagagccaaaatatnagttttattttagtgtatttgtattacaagatttagtatgaaaccttaagttgtcttttgcaactgttaagcagtgttttgggataaacacttattggtttattattgttataacacagggatggtgttcatcaatcgttctccaagaaggtcggccaacatacccggactaaaacttgagataagaaaagtataatgtaccacacggcatgacaggttctgtaaatgccaattgtctgattaagcaataataatgtgatgataccataaatgtgagtactaggagtaggtataggctcacctgattaggtgatgcgatatgttgggtgtcgtgcattattaggtacgggcgacggtgacatatgagtaccgagcgtagttacattgacctatgagtaccgagcataggtacagtgacctatgagtaccgagcgtaggtacagtgacatatgagtaccgagtgtaggtacagtgacatttgagtaccgaggggtaggtacagtgacatgtaagtaccgaccgttggtacagtgacatgtgagtactgagcgtaggtacgggctcgtctgattaggcgatacgatatattggtgctaggttgtgacacgggctcacctgattaggtggtgcagtgatattatatatgatgttgtattacgacacgggcttgcctgattaggcaatgcaaatatatgagcatatctatatctatgcaatgcatatggctggttatattatctattattgaatgttatggtttaatcacttatgataatgaaacgtataattagttatttaatgtattcttctttattacttttcttgctgagtctgtgtgactcacgggtgctctgtggcgcaggtaagggcaagaaaaagttagagcagccatgaggtgactaccttctccaagaatgtacatattgaccccaccgccctatgtgccgagttgccaggagttgttttgcactggctgtatctgctgtgcattttgattttgtagtttgcactattgtcgtatagtcttttgtaaactttttataacaaagatctccggaaatacttttttactgtcgttatgatgttcgtttttagtattttattgtagtcaaatttttattatcctcacagtttttaataattaattaatctattagtattaaactagtttataaaattacacacgtggtgttatagggcgttacatatcctatattgatcctataattacacgactattttcaaaataagtaaaaaataatatgcaaaaatagcttactaataatatctcaagaatagcaagattctcgtaatactaaaaattcatatagctaatattttgatattcttcatggttaagattcacaagtgatcaatttgactattaaattattattttacttaatgttgttctttttagttttataa

SEQ ID NO: 74764 - DNA, 1079 bp, Cannabis sativa
ttggtttaaaacctaagtcctcggatgtgatttagcgtgtcactcacccgtgttatgaaagatgtgatttaggggcctataattcgtcgagtagttgttccaatctggttggccggaaaacctaaatttggaaacgaggtaagaatagtataatgttatgcatatgtgtttacatgtttagcgtacatgttaattatgcctgttagagtacattgatagtagtatcaatatacgtagagttatacgggataatgatagatgtatgtttggctcaaatactgatcgatgctatcacattagtatggttagagtatgactagcatattgagtataggctgatattatggtctatagtattgtcgtatgaacgttctagactcagcaccctgtgggacacgaggataaggttatggttgggtgtatgggtgcctgattataatcagggttattattatgttattatttatgcttttcttactgagtttgttgactcatagttgctatttccatgtgtaggtaagggcaaggctaacgctgagcagctgcgagagcgagtagatggagattgtacatgtcggggtggttaggcctagagtgtacggtctttgggacatcagggtttatatccaggtagatcgtaactgatttcggttcaatttatggcgatgacgccagctcgcagatcactgacgatagggaagacacctctttctacatcaaggaaagcagctcagagaacactaacaccaaaggaaatagtcttagctccatcgactaatactagcaccagtcaatacttcacctgtaatatcctaagattaagaaaatagattaccgaaccctaacaagtttcgtaattatgatataagaagggtaaaattatgaatttaatttaattgcatgcttatagactatattgttatgtagtatacttgtattttccttttgcaggtgttttttgacaagtcggcccagataggggtgagcatggattggaaatgggccgactaacccgaccaacactacccaaaatgggccgaaacatggtcacatttagtgggccgaacctcacatgggtt

SEQ ID NO: 74765 - DNA, 766 bp, Cannabis sativa
aaaagtaacagctacagatgaatgtctagaatccgctgtgaggtttgagtataaagttaatattaatattatcaactggttgcttattcatgctatacaagtgagtcctttttcttttttctgttattggatgttattagaacaattatttatattacgaacttgttattaaacaagatttttcatgtaaataaaactaaaggcaaatggctctatatatagcctaagaattgccaactttttacttcaaaaaagatgtgggattaaaacccattaattttttcacacaaaaaatagttgacaaagtcaacttttccaacaaatccccacatgtgaaaaatgacttgagaataaccaacaaatagttagaccttgtaatagagtttaacgtttaaaacctgcataggataggtaggttttaccttttgaacatttccttgtatgagtacatttactttactagctgctcagtagacgcgatgtctttgaactgttctgccgttcatgtaaacgataatataccacacacaagaatctctcctggcatacttagttctcactaatatgtttatctggccctgaacatttccttggttctgcgagagatattctaagaattaagccttaattaattcctatagaagtggcccatcttctctttcacataggtaattacttatttaagagtaactcgtattactctgctcgacgtttcgacgcataagaatcattaaaagcatagcttaacctttccttacgagtatca

SEQ ID NO: 74766 - DNA, 579 bp, Cannabis sativa
atgaaccattgaaggactacattctacgatctacggccgagggcacaaaggttaaaggcttgatagaagaaggtcgatatatgccatactcggaggtatcctaccattgagtgacttctagaaagatattaggaggatctcaacgaacaaccttgaggagtttcttgagcgagttgatggcttcttaaagttggaagaagatatctgacaagcctagacaagagggtacgtcaatgatgaacaaacacagggcctcgtagagccccaagtcctatccgacgcactgactagcccaaacaatctctaccaattctctaacaatgagaatggttgaggcaaacacattaacgatggcaatgaccaagatcattgcaagagagggaaatttaatgattcccttattccatgaagtccaagaaagaaggaagagaatttttcatgcttcaccctcctaccaaaactcataaagcaaagcatgccaagaagtcccaacagggcatgtcagtaacaggcaggacaaggctaccttctacctttgatggctggccaccatgttcgtgttgagttttatgccctaaa

SEQ ID NO: 74767 - DNA, 558 bp, Cannabis sativa
atcctttgtaatgaccgcgaggtctaatgttttctttatctatgcaacgttttattttcaaaaaaaaaaaaaaactgatgtttcttcttgctaagggagtgtttcttaatttttttgtcatttatctcaagtatggattgcggtctactaaggtttaaaaataatgacttagaattgaggattatcgaattcaacaaagtctgggcattcataatcttgatcagaatgaggcttggtcttggttacaaaaaagatgtctcaaaattctagaaatgcagaacataaaaacttaggacatgcaaatcatgtaaccctaaatttctagccctaagttgctaaaaaaaactcatacaaagacaatcacatacaagaaattgatgatatagaaatatatggaaagcattaggaaaataatgaatagtcaagagaacaatggtaaaaaatacacttattggtttgctagaagaaagaaagtctcgaacaattccccattgagaacttttgatgtcgagggattggttcgtgatgatgttgagattgaaaagaaaaattggcaga

SEQ ID NO: 74768 - DNA, 726 bp, Cannabis sativa
tgtaaatttattagagcataaattcttatgtggtttatctttttgtacttatatctttatgtacttttgttgttaacaactgaggaattaatattgcatcaaatatgcaacggttaagatttttgcggctaaatatgaactatataagaatttttaccgtttaaatatttacataagaatttaaatgcaataaataaactatataaggatttttgcttttaaaaaatttatataaatattcaagtgaaacaaaatgaactacataataatcaagtcagctaaataagcataatcaagtcaaaacatctctaggaaaatggcttcttctacagtcattaaaaatgcttaataagaaactaactagtatcaaacccaaatttcaagtaagttgcttaattaaaaggctaatcaagatttttctcccttaaactttaacatatactaaatcatgcctcctgaacttttttgactgttaaaaatccacattaactattgagattattggatttaaagacttttatttaattttactaattgagtgattgtttacttactaaatcatgctccctagacttagatatctaccaaatcacaccctcgaactttgatatgtaacaaattaacattgagaaaaaaatttaactagacaaaaatattaattagcctaattaaaataaggttcaaccacaaactactaatattgattctaaattatacccactaaat

SEQ ID NO: 74769 - DNA, 719 bp, Cannabis sativa
aaaaaaaaaagtgaactttatgaactggacaaagaagaatcagataccgtgaaagagggtcttgcttgaaaacgttaagaggaggcttattatgggagacggcaaagtcgatgagccctaaacgacactgtttgctgttagagtaggagtccttgtctttgtcgaaaacttcatgacctgtctcaacacacttgaaccggccattatcgagaactttgaaagttggagaacccagtaagttggttccttctttctcttcaaccatgtctgtttctacttgatctgagaacgcgcgcggctgttagagagagaagactagaattggcgaaaggagcagatgggttagggcctcgaatcatcgaaggctaagttgacaactaccatttttaaagtatagtcatgtaattacctctttatattattctcaaattttataaactcagaaaaggagagttaagtatatggttagtaattaagcttaactttctgctaaaataaaataaaatgagataaaatgcacacagatactaattggatcgtgcttatgaaatctctctcaattgtacaaaaaaataaacaaggtagatgattaccactaaatgatgaactccaactactgtgctaacagttgcagtggctcataacattaaaaaaactttcaaaattcgtctacagtgattcagaaggtagctcaactcaaattactgtgttaatggcgg

SEQ ID NO: 74770 - DNA, 587 bp, Cannabis sativa
agttttttgataggttctcgattatttattgaaatggtgaatggtttttcatttgtaaccatccttgacatgttatctacgtgttctcgattgtttgtcggtagtttttgaatggtgtgtatagttgtcttttcaaacttccttgtcccatgttatcgacgatttctcgactgattatcaactatttttttatgattgattattttttatttttcaacagttatcaattgctttctgacaggttctcgattgtttatcgacagtgtttcccattgttgtaattttttgtcatttttgttattatgattcagttatttttagtttgcattgaattgcaagatcgtctgtgtttctggttgtattgtatgatggtgtttagagtgttgaggaatttaattgggtgtataaaagcaaaggaagtatgtcgttaatggttaaaattgacacaaccttataaaaaatgtgcaatagtttatatgaagagttggaggttgacccattgaagtatggtttaaaattggtgataaagtagtaacacaatctcgaaattgcagcaattatgaaagcttcagccacaacagagctac

SEQ ID NO: 74771 - DNA, 1824 bp, Cannabis sativa
  modified_base (613)..(629): a, c, t, g, unknown or other
  modified_base (898)..(902): a, c, t, g, unknown or other
tttttttttttatgaaaaatagatgaaagttgaaaatttataatttcaattaattttacatcaacttaaatcaagcaattttttcattaatgatttattaaaataaatagactaaaatataatatattttaattagaaaataagtaattagctagtaaaatatctagatagttattttctgtatgcttgtgttatttgtctagttatattaatatttaatagaaaattaatatttaagttaattttattcaagatacttaaatatgtgaaaataaatttactaattaattttggacaaacataaattagaataatatttcaagatttattttattttattttatataaattttgaaaatgtatttattttaaaatgcattggatttcgaatttttctatatatatttatagaaaatgaaatttaagttgaaaaataaatttaattaattttggaccaacttaaattgagtaattttcaaaatatttattgagaattattactaagaaagaaaaataattttacttattttcaaatctatctaagtataattttataaatattaaattaaaatgtatatttagaataaccaaaattagtaattttaattaaatnnnnnnnnnnnnnnnnnaatagattaaaataaatataaaatgaaaatacactttaaataatgagctttataatagggatattcgatctccaatgttggttctacatagttcttattttagtgagtaatcatccctaatggaataacgttcattagcaatttaacgccgtagaatctcgaaatataagtattattgaaagtgttttattcttagtaatgtccaccccaatagtggcagctaagagtaagacttacatggtaggaaacaatagtggaagctcataagnnnnnatgaccttgactctcgcctaaacaggacaatgctggtttctcatcttgattgaataaaggttgctagaatgtttttcattttagatgagttgtctgctctattcagtgaatgatatcttttcttgtcgcctaaagtgtaggagtttgttggaaaccttggaaattatttaagattgtatgtttttgtatttttacttgtcaccctgacttgctaagtgctaataatttctgaatgtgtatgattttgtattaaaccgtatttgatttctatttattgatatttgtagtatctaatatgagtatgaacaaccccatggtgtcactgttgactaacaacaagctttctggagctaactttgtcaaatggaaaaagaacattaatattgcactcatatatgaaagtgccccgtttgcgttcacttaagaggctcttgagtagccaggtgagaatgcgaccaagacagtcaaggaaaagtttgagcattggcagaatgctaacaacaaagctcggtactttatgctgtctctcatggtcaacaccttgaaaacaaggtttgctaatactctcacggttgcagtaatcatgaactagttaactgaaatgttcacgatggggttggatcaagctcggtttgaggcgatgaagaatttttatcaatgcacaaataaaacctcattagaatgtttgtgatcacctgctctagatggatagttatttccaggaagctgagaatcatggagctattattggtcaggaaactcaaatgaggttgctagaataaaaatcacatatcatagttttatttaggcccaattagtatggggcttattcaataaataatatttatttatttaattgttaaattcctttcctttgggcctggtgtgagagttaggggccattagtagtgggtacgatata

SEQ ID NO: 74772 - DNA, 1351 bp, Cannabis sativa
cctcaagaagtataacatgaaactcaatcccttaaattgttccttgagagttagctcaggtatgtttctaggctttattgtcaacgcctgaggaattaaagctaatctagagaagattcaagtcctcctagatatgaaatcctcaacaagaaccaaggaagtttaaagtttgactggtcgaattacctcactcagtagatttttttcgaaatcaacaaacaagtgtgttccgttcttcaacatcttgtgaggaaataagttatttgagtgcacggaggaatgtgaaaaagcttttcaagagctaaaaatgcaactcgcaaaacctcctgtactctcgaaacctttggatggagaagaacttcgcatatacttggttgtcatggagcatactgttagtgcaagattcaatatccggtctattatatcagtaaaagactcattgaggccgaaggctgatatccattgataaaaaaactcacttactgcctgattctagtaacaagaaagctaaggccctactttcaagctcatcctgttcgggtatacactgactaaccgttacgctaaatattggaaaaatcggatgcctctaaatggttactcaaatggggtagtggagttgggccaatatgagattatcttccaacaccaaacagcaattaagggccaagccttagcaaactttgtagtagagtgcgcgggcaaggaagaaagcgtatcagaaagcaaccctgagccagaacaaatacctcagccaagtaagaatgaagacaagccgacttggatactacatgtagacgggtcagctacaaatcagctatctcgtgcaagaatcgcccttgtcaaacctggggagcaaaacttgcatgctgcagtcaattttggatttaaggcatccaataatgaggccgaatatgaagttttgatcgctggtctaaaactagctcggtaaatgaaggccaaacatattgagatctgtagtgattcacagctggtggtaaatcgtgtatctggagaatacgaggatcgggaagaaaagatgatagcatatctgagcaaaatacacgatcttcttgcacagttcaaaagctatgcactcagaaaaattcaaagagaagaaaacacgactactaaagcattagctccgcttacgagtagtaatgtaagtgatagagcaaatctagttcctattgaatttctcgaagaacctagcatcattggcacggaagagattgaaatgattgatacttccccaaactggacgatgccaatagcaacctacgtcaacactggggaactcctagataatcaaaatgaggcacaaaagatgagaaggaaggctgcacaatat

SEQ ID NO: 74773 - DNA, 1293 bp, Cannabis sativa
  modified_base (907)..(912): a, c, t, g, unknown or other
tgttagaaaaagaataacggcaacgatccaacattaaaatttaaatttagtattaaattactactaaaacaatataattttagcactaattttttgttattctatccataatactaaaatttatattaaaaaatattttttattaatatattattttattaaactatcctacattataatatatatatatataaatatgaatttaatcataaatacattattttcatattaaaaactaaaaaaaaaaaaagaaattagtctacatcccactaatattagtgtgggaaactatagacttttacatgatgtatagaataacaattagagttctattggagcaatttggttcacatatatattgaatcaattttgtgtctaaaatcttacaaatttagctgcaaattaaatcttacaaaattgttaatttttatttttggataacttaatatgatctctaacatattcataatatatattttttggttatcttactttatatgttcattataattcaattattttactagtgatgtatatattacatatatatatccacatgtatataattatataatattgttgactaatttcttgttaaaaaaactatatttcttgtacttaagcactaagaaaaatggaatcactgcaaaaatttttatttttagtcacaataaaacttatgactaaaagtgaaaaagttgtgactaattataaatcatcattcttatgtcgtgattaaaagatctttgactaaatgtattagtcacaaaaattacaatttattgtgactaaatgtatttttagtcacaacactagtcacaacaagtgttgtgactaaaactaaattagtggcaacttatatccaaatactatgttttagtgacaagtaatattttattgtgactannnnnnacatttagtcataaaaaaattatgttgtgactaaaaaattgtcaccaaagataacagttttttgtaatgaatcaaatttaaagaaagctataagagcatctccaatggtagtatattagaaaatgcttgatgaaatggaaagcttagatgacaaaatataataatgatataccatttgagataaaaaaaaataaattatattcttgaaatttgcattaatgccccataataacattgatgatatttttttttaataaaaaattaaaagtgtaatatatataatagtttgataaaaaaaaatatttatatataataatgtgtgagattataattatattatttttataatatactatattatataaatatttttaaaaataa

SEQ ID NO: 74774 - DNA, 605 bp, Cannabis sativa
aaatgaaatttaagatagggaaagcaacaatttgaaatttaagatgcggaaaatgacatttcagatctgaaatgcatataattaaagcatgagaatttccacagtcaaatcgtcgcctatagtatagccgacagttttaaaccgttggcaattttcttttacaaatacatgggagtttttaaggcacgtttaaaaatcgtcatctatactttccaatagtttaaaaccgtcaggagtatcctatttttcccgacggttttaaatactcacttaatttttttagcgacggttccccaaaaaagcgttttgaaaccgccgcgaatattttttttgtagtgtagtgtaccttctatcaaagtctctgctacaatatattgttagaatattttcacaatcaattctaaaatttaaatcgggtaactaaaatatttagtaattaaatttgaccataattaaaatattttaattaattagtaaataattaattatattttttaaatcaaatcaaataaaatatttaatttgttaccgtataaaaaaaaattctaataaaagatatatgataacaatttcacttaaaaaaaaaaaaagtacatgataacaag

SEQ ID NO: 74775 - DNA, 905 bp, Cannabis sativa
aataggtcacaaataggtgtgatcagttaacttttggattctttgaatataatgtgggttagagctagaattctaactttatactcttaagaaaattataaatacaaaatttcaaaattcaaaggtaaaaaaattactaaaattcaatggtatttaattgcaatattttaaataaatggttttttgtcttcaaaatataataatcattatgtatcttagtagctcactaaaataattgagaatttaaagtaattaagctttagttttatataggtaataaaaaaggtaattgaatttgaaatcatcaacaacaactcgtagtaatcaaattagtataataatgggtgatcaattcagtaaatcattagtaactcatttaaattaaccaaattagtaaatcatttaaacttaattaataagtaagtttttaaaattcttcatcactcataaaatatgtaataataacattcaattctataaataaatatattacaaaatattataagtgaataaccataaatttaaaaacatatctttattgattcaaaaaaaagaacttaaatagctaaagggtaatgattttttaaaaatataagacttaaggttctctagttttctctctcgggtaagattgagaatagagtgactcttgtttcttagagaccactacctatatatatataacctcatagatatgttattaatataaaatatttctatttagtccctcaaaaaattagaaatatcttttaaggtatctgcacatttagtctatcacactttaataccaaacgatttactaatactacaatgatcactttatttgagtcaaacttcaaataataatataccaaactgtagactgttgttttcacaacaacattatattagaatattttatttat

SEQ ID NO: 74776 - DNA, 800 bp, Cannabis sativa
tttgtcggatttttcaatttgcgtattttgtcggtctcgatttaatttaggcagattattcggatttggtaatttataaaaaattatgtccacccttaatcacaacattatttttgtttgaataaattacttttttttttttttgaatgaagtagcaacttcattaaattaaaggcattcagaaaataacaagatatctctcaaatcgggccagatatcttgttttaaaatgcaaccaccagagataaatcgagagtgccttgcaattgcatgggcaactcgatttggtgatcaacaaaatgtaagttaacatcctttaagaaagataataacaaacgacattcctctataacaataccaaagtagaagacatctttgaataaattacttaatcaaagtatgttttgtatattgttacatgagttagttataattttattacttttattattaattacaattttaagttattaagttatttgacttataaaattattgatgttattggagttatataattatttaaatgattgactgaatgctcgtggatctactacagacactaattgcatttaacaagataagttagttccacattttctttttagttttttccgttggaaatattttatttatggtaactattgtttgtaatttctataatttttatttattgatgcttattttggttatttaaaagaataaatttacaataatatttatttatttattatttttatgtttaatcccactaatatatagtttgtttatgtgcggttaaaatactaatgtcccttgat

SEQ ID NO: 74777 - DNA, 1130 bp, Cannabis sativa
caagttaatcacacgatcgagttgttcggatgtccaccaatgactctgctcgaacatcttaccatgcatgtatcttggatctccacatcaatctttatgggttgctaggagtaaaaccatccacccaggttaaacaatataagacaataactgtttaattgttgaaatttaggattaattatattatgaaatttaacaagtaataaatttcaaatcatgaattaagaagaagtcttaataacatgatcaaggataatggagtactatagttgtctaattgagtaggagtattaaatatgctttgagtatattaaaataactattctagtggtgaaactatttataacacattattagaatttaagattaaggagataattaataaaagaatatatattggagcatcgtttatgaaatgagaaataaatatttttattaatgaagtaatcttaaatattagaatcacttgatattatcagtgatctaaacaagataggatgtaaattgaaatcatttattttaatatctgacatgattaatcatgggatttaacaaatttattaattatcataattaatagaattaattagatatgactaatataaagttcaagattaattaatttaaagataattattttgaataaataaatatttaatatttaagaatattaaatgattaatcagaagatgaacctgaaaaaaataaaagaataaataagcaaaatacacaaatcaaattctgtgtatttgtccaataataatgtggtggtatccaggatctataactattcatgtggagagtctcattcacaagacttagcctgaataatgagaaataacatctataagttgtcttgatgctcaagttttgtaactttataaatatatgttttgtgtgtagagaaaaatagtgagttgtgaaaagagaagtgtgtatgagtttgttgtgtggtgagagtgaggaggaagtaaaatggtgtattgggatttgggtgaggagattgagatagaaaacatatataattttgaagtaataagtgaaatatatctctctttgtgggtttggtagttttaccaaactgggtaaattgttttgcttcatttctttatttcgttgcgcttgaaggt

SEQ ID NO: 74778 - DNA, 815 bp, Cannabis sativa
tattttcactttttcaattttaaaaataaaaaactgattaaaaaagtgctaccaaatggcaaatatttaaaattctgcacattttttttttttacatatttgtgaaataatccctttcttttgttaagcatatctcctattataggttttgggtcttggcccattaaagagcttcataagttcttttcaaaaagacaccaactgtaaatataattaggatcttccaaaaatactactcaaaatttcattatattattcttgttctaaactacttaaaatgacaagtctattgcaagatcacatatcctagtctttcaccaataattagattttgcaaatactactttcattgtcttgtgacattaaaaaggaattagcctacctatttaatttattcgcttggccctaatctatttttaagaaaataaatcggtttaaaatataaaataattaaaaataatattttattatgctgtttactcaactgttagtaaataaaattggaatcattttattttgtttaagagaaatataattaaaatgctttaatttgacaaaaagtattattattattagaacgtgtaattattttttatttagatttttgagaaacatatgtgtattttcaatttttaattaatacatgtaaaattaaaataaaataagttatgtcactatttaaattggagaatttttttttctttattttctttttctttctaatttgtgtggctactacaaatttgtccctttttaaattttacttaacaattgtaagagaatcaatactatacaatttatttccattccactca

SEQ ID NO: 74779 - DNA, 953 bp, Cannabis sativa
  modified_base (659)..(663): a, c, t, g, unknown or other
acaaagaagggatcaaacaactataattttttatttgaaacctatccgatggaaaaggaaaatcaaaagttataacttgcgtataaaactaaatactaccggttctcgcgaggtagaaaagtacaaaacgaggcatcacgacgccttgataaaagtacttgaacctagaaaagggatagataatataactattcatacgagcaaattataaatatagaaggtgataaaaccattaaagtatatttaagtttccttaagacagattgtaattggtatagcaaggcagaattaacaactgctcaaaaattaaaaagttttgtagatcaccaactacttaaagaggacgagtatgagcaatggaaaaacccaaaagtattgtacatttgatcaaaatatagttgtttatattttgaataaaaacgcaagcaaacacaaatgtattaagttcaaatgaaaaaagtacaagacatttaagataagaaaaaacataaattgggttacaaacttgtctttacaaaaataccactagggacaaaccattaattcatgttcctaaacaaaggatgagaggagaagtcaaaaacttgagaaagaccatcttcatatagcctgagaaagaccgtctacacgtagctcggagaaagaccgactacacatannnnnagaaagaccggctacatgtagagagccttgatttctgcacagacctcactctcttcatcatcagaagatcccatttcataaagccgagatccctttcccaacctcaggaaattcctcgatactagaaagaggttggcataaagatcttctggcacaggtttgggtcttggattggttgggttctttgatagaaacaacgccaacctccttcctggatttatctgaaaccacgctagcttccctctggaattctttatgagcctgaagaggaccttttaaatcgcccacaa

SEQ ID NO: 74780 - DNA, 1498 bp, Cannabis sativa
tattaggcttatcgggatattacaattatatttactttcaataaagatcagaaatcataccatgacaaagtcataagctttgttcacatatttcacacatgattataagtttaatatataagtgttatactcgaaatttggctagcacatcaggagaggacatgtatcaaattcggatgaatacaaatcaacgaatgtaatgataattatatttgaaactagaataactcattaaatgtggaattgacagagtatatttataacttgctgaatgtaaggtcttacgcgagataaagatatacaaactgttgcctcgcacattaatgagaaaccatatgacgtcagatgtacaaggcaaggcatcaacctcactacatattaaaagacgagacatgatgtctggtaagacacttattgtataatacacactatacaaactaagtataacagttgagtaaatccaaatagccaatagtgactcatccacctctataggaaggtgtgctcatggcacctttattaatcagcgccaaacacctttcaatgggtttcacagctccgtcgtgtcagttctctcaaatagaagctgacatacaaatgatgttgactgcggaggttcaccttgtcactaagaaccgtgattttcagatggagcattatgtcttcaagcgcaagaacgatgaggcttagattatcaacctcgaaaagacatgggaaaagctcctgctcactaccaaggttaatgttgctatgattcccagtgagacgttccagaacgacgtgatttacaacatatttaacacatgtttacattgacccggtaaaagtagacctatcgcagctgtgtgatttttaaatattaatcgcatttattttacgtggtatgtaaacaaataccatgacttcaggagataattgttgtaaaatatcagttaactatgtaattaactgtcctcctatgtaattataaataggagcaggttatactaaaaaggggacaaaaaattcatgagaaaaaaggcctgagagctatattagaaatccaataagattgactcgtggactatgtagcattttaactgcaaaactacgtaaagacctttgtgttcttaccttttctttacagcttttaatttgtgtgcaagtctatcacaatttaggcttaaatatagttaacgaaaatctgtgttaacagtttggtgctttcattgagagctttcgcgaaaaaagctcagaaaaaacctcgttacgtacaaaaaactattttctccatggctggcaacggagaaaacattgacgcacctcatgaagaaacaacttaccgtcctggaaaagagctaataggctctcagaggccttttaactcacaatctaattggaccactcgcccaagtgaacccaacctgagggtggcccaagtttacggaccacacattcaaggagaacccaaaatccgggaacaaggtaggatgaacctagaatgaacattggtaggcct

SEQ ID NO: 74781 - DNA, 1067 bp, Cannabis sativa
tctaagatcctggtaaagtaaattccaacagcatttccacaaaaggacaagccctagtagacttcataacgaaatgtaatgaagcaaaggccagctctaatatgccagccccgcgaatgccggcatggaaggtgttcaaggatggggtgtcaaatgaaaatgaatttggagccggggtagcaatgatagacgaactccggatccagggcgtcctgcactttgcatttccagcttccaacaatgaagctgaatacgaagcactaattgtaggactgagattggccaaagctgtgggggctgcaagggtagaagtcttcagtgattcacagttagtggtcaatcaggtgtaaggggaataccaaacgcgtggagaaaaaatggccacttacgtagcgattgtcagggaattgctccaagagttcacagaatacaaagtggaaaggatcccacgagaaaagaatgctcacgcggactgtctggcaaagctagcctcagacagcaaaatagaaaaactgggggtggtacccgttgaacaccccaaggaaacggtagctagaaatgagcaaggacggagttgtatggactccatcatcaaatacataacgaaaggagaattgcctcaggaaagagctgtatccaggaggttatagtattaggcacaccgatacgtaatgatggataatatcctttatcggagaggactcagcatgccgtacttaaggtttgtgccggaccctgaagctagatggatcatgcagagggtccatgaagggttctatatagatcacaccggaggttcgagtctctcaacaaaaatattgagacaaggatacttttggccaacaatgaagaaagattgtgtagactacgtcctaaaatgtgattcgtgccaaagatttgcgaacatatcgagagccccgcccaacgaaattactctaatgactagcaaatggccctttgcggtgtgaggaataaatctcattgggtccttaccaactggaaagggaggggtaaagtatgccatagtggtcgtagactactttacgaaatggacggaggctgatcct

SEQ ID NO: 74782 - DNA, 644 bp, Cannabis sativa
  modified_base (577)..(584): a, c, t, g, unknown or other
tattatgtggactaatgaattttcgccacgtatacacttgtgtataccatagcacttcactttgacacttaacagaccaaaatgaatagaatgactacagagcaaaacgattgtcaagtgcagggagtttagccataatttctcgagtaagaagttaaaccgtaacaaacataaaaatttatgaagtttgaccacaaattttccttaaaaaaaaccctatttcaagaattaatacttactgagaatttaaagaaatttatctcatcactccaaacttgtggagattgtatatgtgattatataagatataacatttcccttatataaatcaatcaatcacccataaataattctacgccaactttgatttggcagatgtgaagaattagatttgggtatatatctccatttcaaatccaataattcttcaataaaatatatatatatatgtacattctcaacttaattaatttctttcccttctaatatatatttgcttcttttcgatccctttatattcttttcgtgtgggatatttttcaatgtgactatattatatatatgggtgactattcannnnnnnnatttttattgtaactatatggttacatttttctttgacttgtaatagcaggttactaata

SEQ ID NO: 74783 - DNA, 933 bp, Cannabis sativa
catttttcttcttaggaataagaacaatattagtctcatttaaagaaagaggaaaagaacctgaagcaaaaaatgaccgaacaatacgcaaacatattttaatatatatatatataaatataattatattttcagtgcaagagtatatgctgaaataaaagacgacactagaagtgtaactgtaattatgtttggtcacaaaacataattaattttagattgttatgcaacaaaaataataaaatattctgaagagatatgattttaatctacacataattatttatttagtatatactaaaataattaataattgtagactaatataccaacttttataatttatttttcacgaaaagactaaatatgttgaaagtgtttctaatgaattgacaactaaatgttggatactataaatttatgctcatcaagagaagatgctcaaagatacaagaatttcaatgcatactatatcgaagaagtaaaacaagaagaagttactaaattttcatcttaaattataaattacatataactaatattttaagaattagaataacaacactaattatgtaatattttaaaataattaaatattttatctaaagaaatagaacttaaaacttacataataagtaaaataatattttatgtaaatatatacaataaaacttataaataatattcatattattatatcaaataaaaaatacatttacaattaagatgcatccatttagtgcaagaatatatagtcaaataattgacaatactaccaacatttataagttatttatcaagaaagaactaaatatattaaaagtatttttaatcaattgttaacaaagtgttgggtgttagactttttatttgggcttacattaagttttattggttttattaaaacttgggttgattggatagttctttgct

SEQ ID NO: 74784 - DNA, 805 bp, Cannabis sativa
aaagaaagaaagaaagctcagtaagaagatgaacaagagagagtgggctaaagcctaaagcctaaagtgggttctctgtggaaaagtgaggacctttaaagaaagagaaagaaataaagaaaaaaaaaacactcaaagattatggtgagaagaagaagaatcatgactcatatggcatcatacaaatcaacaatggtttgatgtttctggttagagttttgcttttacttaccaaagtttcaacctttaattacatatatatacatatatgtgttagtgcatgattttggtttatggttttggatcaaattttttgctttattggtgggttagagtgattacagccaagtatttaagtaatatgccttttacccaataaagaaaaagactttgagtcatgaaatgttgtttattgatatgatgatatcttatttggaaaatgaaaaggaaattgtacaagtggtgaagactaagagcattgtgatatcttagtgcatttttaagaaaaacaaatacattaatgggtttttttttaaaaaaaaaaaagatcatggaaaaagataatattagtgggtgttattaagagaactccaacccagccaaagaatgttcgccaacactctactcaaatggtttgagaaaattggagcctaaggccacaataaaaattatgacactcttatataaatgcatatgtatatatatttattataatacatatatttatatgttatatgaggttgttgggattttaaccatgatcgggagaaaataaaaattctgacagttagtaattccgtaaatc

SEQ ID NO: 74785 - DNA, 1133 bp, Cannabis sativa
gctctcacggctgctccgccttagtcttccccttacctacacatggaaatagcaactgtgagttaacatactcagtaagaaaagcataaataaaacataataatgacccgggttataatcaggcatccatacacccaaccataaccctatccatgtgtcccatacgatgctgagtctagaacgttcatacgacatactatcgaccataatatcaacctatacttaatatgctagtcatactctagccatactgatgtgatagcattgatcagtatttgagccaaacatacatttatcaatatccagtacaactctgtgtatattgatactgctatcaatgtactctaacaggcataaataatatgtatgctaaacatgtaaacacatatgcataacattatactaatcttaccttgtttctgaattcaggtgtgtcgaccaacctgagtggaacaactgctcggtgaattacaggcccctaaatcacataatttgtaacacgggtaagtaacacgctaaatcacatccgtggacttaggttttaaaccaaaagttttcctactgaaagttaacatggaaatgccctaaactgtcaaggaattaaccaactaaagctctgaaactaacacgaatcgacaacacgaaaagttcgggaacccagctgctgatccggttaaccagttttacagggtctgtaaaaccagttaaccggttttacactaggtaaaccaaaaatttcgaaacttgaccaatttgaacccaaatcaaaccaaaccttccagacctgcttaatactccccaataaacatattccaagcaacaaaacaactaaacaagcccagaataaaaatctaccattaaagagccaaacttgagttcttaaactcaaagtttgctcaaaccctaaaagaaccaccaaaaccacttcaattcaacatataaaaccctaaataaacttcagaaaacaaactcaaacactgcatactaccacagactcctaaatcaagcaattcatgcaaaaaacccaactataaacataagaaaactaaagagaaaggtgtcaaagctattaccttcaaaggattcaccaagaatcaactatacaccagcaaaaacaagatgaagaacaccac

SEQ ID NO: 74786 - DNA, 1216 bp, Cannabis sativa
agaaagtatatttcaaaaataaactcgataaacgaaaagggtatgatcatcttacatctcgactcttcctcatcctcatcagaccacttgttccaatcaactttcaggtaaggtgcttgtttttcttctgttttcaataatcttttccaccaacctttttgttctttccggattgaacatattatgttccttaatccaggttttgtcttacaaccctgcatcagtataataatatgaacaattataacagcaacagaatcaaacaaataacagtgtcaaccatcaacaaaaataaagaagctcggttaatagtctctaaaatttatctcagaaacagaacaaaagggtgtccaaaacatagtacagttcacaaataaactaaacacaaatctctgaatacataactaacataagacatctgctataaactattgagacatttttacacaacccaatttgatttgactttggaaaacctcatccaccatgaataggggtacaatcaactcaacaacaattagtaaaatgggggacactactgttgggggaccggagttaccagcggagcaggaaacgaagacgccgtgttgggatgccccgaatgccccaactgcgatcgagtacaaatagtacagcagcatgtccattgccccaacggaaagagaaattatatggacaccatcggaaatctcttggtccatggctgctaagatatctgaatcgaaacatcccaatttttcaaccatgtgggcagtgctaagatatacgtgatgaatttttcgaaagatgtgggcagtgcaaattttgatggtataaagaaatatttaatatcagttcaaatattaatagaatttgttttattattattttattaaataaaaataaaaattcacccataaatttctcataaaccaaaaatttcagttatatagacacactttatatagaatagatatataacaatcaattgttcattttattacatttgttagtttaaattttgttaatgcagtataaaatttattttgttacattttagaattagaatattatatatataaaaaatactgtcaagattttatatatataaaaaaattcaaataacaatttctttttcatattcacagtataaaaatatatttaaatatatatataaattattttattaatggtaacacttataataaaagtgttacataatatttatttatttatt

SEQ ID NO: 74787 - DNA, 853 bp, Cannabis sativa
ctgagaggaacaaagaaaagaacagcgaaggtaaaaatgaaagtttttttagatgaataaaagtggaagttgaatcaaataaaattatatatttttttatttattaaattatataatatttaacaatatttaaaaccatataaaatatttaattgaggtgtaatctatttctactagaaatttaggtctactaaatattcaaagatggtaccaaatgtgtaggatttgtaaaaaaagggcaccaagtgatcattattagaaacttaaggtactacgtttgtattttaaaaaaaacacagagtaccaaatagttatttaccgcttaacaaatttattttagaaagggtacgtagaagtctatttttaataaaaaaaaaatgagaatttattacaaatattataatcaaatggtttgaatattataataaaatataatagggacttagaaataaaactaaaattatttataaatattaattattaaaaagtctataaaatatatttaattaattaattatttatgtatataaagaatgtttacctattagctaataataagaaaatataactatcataattatataaaaaatataaacattgaatagtgacacatatataaatgagaaatgctaaacatcacaagtgatgtctagcactctcctatgtgtcaatatcgttattggtctaactaagtatcaggtctcatatagtttaagataatagctttttgggagtattgctagtcaatcgcaacgcgacatgtcgataaggtattaagcaccattgatgtctaatatagaaatgctctctataaatatagggatatgattttgtcccgtcattgtactttcac

SEQ ID NO: 74788 - DNA, 1298 bp, Cannabis sativa
gaacagaacagacatcccatcaggtcccggagctttatggttagtcatggtaaacagaacttttttaatttcatctggactcgggccactaaccagggccacagcatcttcaggagagattctttcaggaataaattgagcacaattgtaatcaacatcattgacagatcccacaaaaatacctttaaaatactccatgaattcacaaccaatagctcctcggcccgtaatccagatgttatccttattcaaaatactctcaatggcatttcttctgcctttaatggcagccgaaagaaagaaaaacttggaacacttatccccatcctttagccacgacactctagctctctgcttccagtagatcgcctttctttccaaagattcattcaactcccggcgaatgtgactttcctgattccagtcccgggacccagcggggaggctttgaagagagttgagcttatgttcaagctcctttatggttacatccagctttccaaattgggaccgattccagttcaggagggccaccctagtggcaccaactttcttaaaagggcgagagggagcccaattgtgattgacagaattccaagcatgggcaactacaaggttgcttcggatgtcacgagtccatccttcctcaaatttgaagcacctcttgaatttgggttccatgcccgccgagaagagataaaggggtctgtggtccgaattactcgtatgggcagataaaagaacagccttcggaaataaattaatccaggccccattcacaaggcctttatccagagcagactttacatggtgtctcccagaccgatggttatcccaagtcaagaagtccccctgaatgggcaggttgatcagacctctactctcaatgagagtagaaatgattggaataaaaggatcacggccagaggagccttccctttccgatccactgagaacaaaattagtatctcccaaaattaaccaaggtccaccaaacctatcccctattttcaagaactcagtccagaatttcttcttggcattcaagtaaggaggaccatacacacacgaaaggagccacggggaagacggggggtccgagtaaacaagacccgaaatatgattaagcgagcaagagatacattcaaaactaaaacccgacttccaagccaaaatgataccacccgcattgccaacagacggaacacaaatattaaagtaaaagtgtaaagactttaagatacgtaccagaggattagcatccactttgagctcagaaagaaacacaaaatccggag

SEQ ID NO: 74789 - DNA, 1380 bp, Cannabis sativa
gagtcattgtactgatcttgtcttctattttccattcattaagacaagatcttagtgcctcaagtagtgctggagcatcgtgaggacacgaaaaatacttaaaactcaagatctaactatgcaattccaagaatcatcaataaaatgagctgttacagccacatatcccctcttctgatgattcacagtccacatgtcactggttatggctattctgctcctactttttttccaaactttgcctgcatttttctcaattatatacatttgcatgataccagacctaaccgtattccttgacactatttgaaacatgggacacaaagtactttaatattctataaacccactatgctcaaccatggacaaggaatatttatgcttagcgatcatttgagccaatttgatcctttccaaatcaggattaaaattgaaagtaactgaagggcttacagttgcactagaattagcagcaagttgggcctttcttactggacacctctctacgtgagaatttaaatgcctagttcccttagaactttctcccaccagcttacgctcgcagtaattgcaaactgctttaattttttcatcaatattttatcgtgtaaaatgatcccatgcacgagaggttctttttttttccgtgtccctatagtttgattttcatctattgcattactaatagattgtacttcagttgcagttgatggcacaaaatcaacatcatcctcaaaattagaatcgatttgaccagacattctattttagcctacattaacatcatattctgatatatatatatatcaattaatgcatgcgattgcttagaaaatatgataaacatatctacgaaaaatcagacaacattttccctatgttattaacctaaccatctgtcaatttcaactgcaaacaatcatatagcacaagttttcatccttatatcaccgcagcacacaaatttcacagatcttacttcactaaaataggcaagttatcaaccttccattatcaccacaacatgcaaagtctcaaaacctatttcggtatggataatataacaattatagaagaatatacctctgaggaatcgagattgaaattcccacttaacttcgattcttttcaaacacttgcaaagtgccaaagcctataaatattgaatttcaagtaccatttttcatgtcagttcataactgatatgatcttaatgaactcaactgattttatcataacaagtacttaccaagaaattgtaggaaggttacttaagtttgagaaagttagtcccttttaggaagccaaagccatgacttgtgatccatgatttatatttttctgtaattggagtgaaaaagcaagactgtaaataaatac

SEQ ID NO: 74790 - DNA, 707 bp, Cannabis sativa
acattataaattactagaaattttttgaaaatttacaagtaattaatcctaaataattataatatacacgatcataaaaaaatagactaaaaaaatttcatgaatattcaaataaataaagtgtctatcgaaacaaccctttaggaaatgtactgtctagtacaccccctaaaggtgtgttttagtagaccccctctatgcttcaacattcagaaattttttctagtctaatttttttcatcataaccgtgtacattgtacatatatttagaatcacatttaaatttttaaaattttttgaatagtttacagtgctaaaaataatattcaaataattacttactacacgtttatactaactcagtaaaaaaattacaaatatgtatattccctacgcagcactccaccaaataatattagaagagtactaattacaacttgttagaacttccacgtctgaaatcacatgttgaaaatatttttttaaaattttttttatagcgacattctctgtaaatttttaaaaaattttgaataatttacaatatcgaaaacagagttcttgatattctagttcatcacttatattaaaaaaaatcaaatattttttcattattgtaaactattcgaaaattttcaaaaatatacagaaaagatgttgtatttataatgaacatcgccgtgaaaaaaaattatttaaaaaaaaa

SEQ ID NO: 74791 - DNA, 1170 bp, Cannabis sativa
atacatgacctataccgtaggcattttaggggttaggggttaggtggatataatcttttatcctcccttgattgatgtgattcctcatattgtagccttcactagactcatcgattgttgtgtaatcgtcgtaaaaaggggcttaagccatctgtcaaatccttttatggaggttctgatacgttttcccccatgcgccattaaatgcgaagtgactgttcgaacaatctctttccttcccggagatgccttgttatagttccagcctcccggagagtgaaggcgtgtcttatgctcttccttcgggaggctcactccctgagatgtacttccctgcttaagacttaatttgatttttcgtgcgtggaacctttttggatccacgtgtcaccttcggccactgccacgtattttgaaaaaaatttgagacaacatttacccaagtctcatttagtgcagggtaaatgaggcttgtacgaggcctccgattagcttattgatatagcggcacgtcccctaggcgcgtgggttgtatttatgactgtcatcattaatatttatttctttttccatgcaacaattcgcttcccgtctgttgatagaccggtgcatttaatcctggtgtcagagaggtgctcaaacgtttctaactgccctggcacccattcatcccatctgttggatcatagaatgtgaatcgattccaattcccaccgtacgatggtgtctggtcacagctgccttgaaccttttatgggtctataaaagccaacattttcccttccttgggctactttcgctactctgccatttcaacccaaataacccctttgagaaaatttcaacaaccatagatttcttgccgctattcctccgtcgttgcaagtctaaattctaccgtcagacgacatcaacttccagctcattagctttgtgtaagttgtctcggtacatttcgcttttattattcatttgcatgttagggcaaagtttagggtagtgcttttagtcgtatttaatttctacggtgagacagtcatggtgaaggccgtcgtgcatcgtagtttcttgtctgtgctccgttgtttcctttctttcttttgttttttttttattttgaaagcaacttcttcacttagggactgccgagagtatgaaacgattttcata

SEQ ID NO: 74792 - DNA, 841 bp, Cannabis sativa
atttgagaaaaatatctatgcctctatgaagagatattttggagagttgtccaattcctttatcattcttaattatttagatatagagatcatgcatttcttttttccttttttttccttttttctttttaaaattatgactaaatgcatttcaagggacccattttggataattgatgtatacgatctttttagaggaaaaaaaatcaatattatattatttttatgattttaaataatgaatattgcaacagtaaaatttgaactaatatttatctatagaaacttggtacactaaatttaaatatatcaaaattaattagatagacaattttttcattaaacctgaaaatattcatctcataaatcactcctcctttctcttttcttctattctctcagtctctctcgctctctttttttcacacacacaaagaccctaacaacctactgttgtcaaccaccgcgcctccaatcgaagaccattaatccactgacacctaccaacccaaggcagtattgggtctgatactgtctatttttttcaagttttctatgtttggtctaataagactaatgtagggctcgatatagggtcaaatagtttgtccaatttttcaagtttgtgggttaagcccaataagaactatgtagggctcaatagtcggtctaattttttaagtttatgtgttaggccctataggatcgatatagagtctgatcatagtctgtgcaattttttaagtttgtgtgttaggcctgataggaccgatgtagggtctaatatagtatctgtgttggaatttattttaccagtatcttaaatctactcacaagtatg

SEQ ID NO: 74793 - DNA, 981 bp, Cannabis sativa
ataaatacccgacgagagagacagagaactcctatggagaccatatcataaacacggacgcaataatacaatttggtgtcatttaatcgtacattcagagggttttcgtattattgttcttcgtttcaaatccattcaggtttcaagggcaactcaaaggtggaaaattcatagaatgcacaaattgaaacagatgcaagatcaaaatcataaaagattatctattttgatattataataaagagatgatcttcttcgtttaagtgcaagggcatagatattcaccgggatgaacggaaagcttttcaattttaagaaagaaattgagttttggatttggattcaattttcgaaagtaagaattgaaattttaataccagaaaaaacaagaaaaacaacacaaaaacttaaatcaacaaatccaaaattaatggaggcgagatcgaaattagtgtttttcttacctgaggcgataagcgatgatgagacggagaaagagacgggcgatgactatacgatataactcgactcgattcagaaattattattgagcttgttaaatctctatttcaccgcttgggcttgggcttgggcttgggcttgggcttggaggaaagggtttcggactttcggtccgctagagattttagaaaaaatataggtgaattttaaggaattgagtgtatagtttactttttttattgacataaataaataatactataaggttatgattatttttatttatttttatatatttatatgagttttttttatgccatatttttgtgaaaaaaatagaaattttatatttgtaaaataataataagttttgccgaaaaaatcactagtattggaaaaatcgtcggcaaagttactggcactggaaaagtcaccgaaaaaatcactgtcactggaatagtcaccatcgctggcaaagtcactggaaaagtcaccaaaattaaatgtctcagatataac

SEQ ID NO: 74794 - DNA, 1020 bp, Cannabis sativa
tatcttttatattaaacgtggttacttttttatgagctatctaacagattttttaatatcacatagaaaaaattaatttttaagtgtttaattggattaatatgatctgagggcctacgcttgttgttactggtgagtgacttgtgaattataaatgatttgtggatattgtttagtctgatgatggtaggggcaccaatggccgatgtcgaggatattgtgacaataacaagcaagttgggagtggagcaagaagaggaatgagaggaaaacactaaggttgtgactacgtttgggggaagctctctggtggggaaagagtgaatttttaggtatatatctgatataatgaactcagctcaatagagactgaggcagagcatttcatttatagacagagtcgattacagggcaaaaggcaaacgccaatacaaatacaacagatggcagtatacaattgcataaggaataacggaaagatttcctgaagatagggacagctagtgaatcttgtactgcaatgaaaacgtgatgaattgtgccaatgattaggtgagctccgaatattcaggaatagggtatgactcagcagatgacatgtcaattggttttactattcctttacactccccctcaaactgaagggtgagatacggatacccagtttgtcaacaaggaaagtaaaacgtgatggtgacagacccttggtgaggcaatcagcaatttggtcatgagatggaacatatcttacttctaattgcttttgtaggaccttgtcacgaacgtagtgagcatcaatttcgatgtgcttggtgcgtgcgtgatagacgggatttgaggcaagagctcctgtactgatgttatcgcaccaagtgatcgaaggagcagagaagggtacacttaattcactgagtagagactcaatccacgacatttctgctactacatgtgctagagcacggtattcggattttgtacttgatctcgacaccaccggttgcttctttgaagaccaagata

SEQ ID NO: 74795 - DNA, 1774 bp, Cannabis sativa
caaaccttccagaacagtttaatatagcaaatataacataaccaaacaactaattcattacaatttatcaatttgctcaaaatcaccctttaaagtgagaaaatccaactttggcttcaacaaaccacactcaattcaagaagccatgaaaaccctctcaaccaatctctaacatactcaaaaacctagcctaaacataacccaaactcagtctaatccctacagccacagaaagacaaaactctaaccttaaaccaaccaaaattcataaaaaatcacaacctataaggtgtaaacttacctcaatcacttctaggttgagcttaggttgaataatatgctccaaaggcaaaataaaatggcgaggagagcctctcttgttggcttgttggcttgcacgaaggggagaagaagaatgaagtgctaacttgccatgtaagctaatcctttaaatagggttttcatttttttttctttttctttcttttttttttctttcttattttaaaagtcagccaataataaaaaaaataactattctaaagaatgactaaattacccctagagaaacttaatttttttttaaaaaaaaaagctgaggggcattttggtaatttcactaatccattaaaccgacattctaaaaattctaacctagtccggaatattctcaaaataatccctccattaatgtcgtgacatttctaaccacaatgctaaattttcacagtcgccgggcccgataaattatttttatttcaaaaatggtatcttcgatgcacacatatcccaatacaatctccgtaattaataaattacgctttatgatcattcaatgaatccttacaatctagatcacatgaatgaataaaatggtcgacaactaattaaagttttagaattctttaattggggttgtaagtgtaggttactcagtatcatgttggtacaaataatctagattcagattattgatgtggttagacatctcagtaaaggtatttatataatatgagtatatataacaagaaacgatatgaatcaaagtctttatacaaaagccatttaataataaaaactttattcatatcataatagatgatcatttatagattaacctaaatcctaagtattgatgaactcttgttcatgtaaattgaatttttaattcacttgttaatgcctctcttaagaatgaggttaatgacttttgtcttagagatttaattacatggatggcaaaaaatgaatcagatccttcttaacagattgtatattagtttccttaaaggttaattctaatactaaatgattttgagcttaaatctatattaggttatagaataaatcactggtgaattaatggtacttaagaaataagatataaattagaagggtaaaatactaattcttccattctaatttatgaactaatttattggagagttgaactattgtaagatgattatatcgatggattaagaaaagattattataaaagtatctctataacataaagagttcaattctgaatttatagtagaagaatattataattaataaattaaataatataattaaagagtttaattatttagttttagtttattagagcttaatgttataggttcatgatcctgaaatatctcaattagaaactaacaaaggtaaatacaagtattaggcaaaaagagacttatataagtaaaatattttactataaataattatgagtatttaattaattcagaattaattgaaatacataaatata

SEQ ID NO: 74796 - DNA, 1158 bp, Cannabis sativa
ttctatgtagaattccataaaaaagcaaaaaaaaaaaaaaaaaaaaacttttttgaatgtaaaaatgaaaaactcatattttatattattttttttttcagaattaattgaatattataatttttaaaattacttttttttaaaaaaaagggagcaaaattttgtattggtcatacttcaggggtaaaaaatgctactttttaacggtaaaagaaacagaacctaacaggaagtgcataattatataactgttatattttagaagaaatttttaacaaggcgtatattttagatagtagtgtcgaaagtttaagggacaaaaatgctaattattctatcaaaaatctgaagcatttgaagatttttttttctcacaatctcatcctcccccttttcaaactacgaaacccattgacattcccacactattagatgtttagctttgtcttaattctattgtaaagttagttatacattctgttaacactctgttagttgttaggtctgttatcctcaccgactctatttgttttgggtatatatacccttagctcttgtaaaaggttcaatacagtgaataaagaaataataagactttgtctttttctttccaagactctgtttctcatatggtatcagaagaaaacgcctccatggccagaccatccacaagatctcaagatggtgttccaccatcaacaaacaactctaatcttcctccggatgttacctcagctcctcttgccgaaccagtaaccaccaatcgtcgaccagctactgctcgatccagatctcagctttaagatgaaatcgaaactcaatcaccaagaatcgacacccagcttcctgctcaagaacggataaccagtaataaacacatcaccaatgatgtctccagccccttcttcctcagctccggtgaccatctcggtcttgttctcgtgtccactgtccttaatggcagcaactaccagtcgtggaaacgtggaattacgatggccttagctgcgaagaacaagcttccattcatcgacgactctcttcctcggcctgaacctagtaacaatctcctaaactcttggcttcgctgtaacaatattgtaacgccctgactctcagggacgccacgtgtgtgcttttataaacttattattatta

SEQ ID NO: 74797 - DNA, 1479 bp, Cannabis sativa
cggcgaagatggtctccatgatgggcgacgatgagctccaacgccacctgcaaaaaaatgagaaagagagagttagagtttgagaggttcatgctttgggttgggtcaagaagaaaggaagaagatgaagatgatgatggatgaagagagggagttaggttagagagagagatagatgagagaggggtgactgagaagaaaattagggttagaagtgttttattttagggttagatttttttgaaaatgggctaaagcccataactaattttttttaatgcatttttgcttcaattgtgcaccgacgctaataatttatataatgactttttccgtcggttgtagattgacgctaatagtgtataaaatttttttatatttcatcttttgcttcggtttttgttttagcgtcggatatataaccgatgctaattaataattatttgtgtcggtggataactgaaggaaaaaagtgtgggttgacttttgagtcggtcaacaagtttgagcaaattctttgaccgacgcaaaatcccctttttgtagtaatgggatgatgggaagtactcaagtgaatttcagttcctaaggcttattggaaggccttccaaaaccttgatgtaaatcgaggatctctataaaaaaaaatgttgtaaggcactccatgtagtgtaaacatatattctacataaagtcgagctagcctggtaagcttgtaatcttttctgactggaataaaatgagaagacttagtcaaacgatcacctatcacccaaacagtgtcatgcttcaaaggtcttaatggcaatccagtaaataaagtccattgtaatcgtatcccacttctatactggaataggcaaaggttgaagtaaacttgaaggtctctgatactcgaccttaacttgctgacaaactatacacttaactacaaagctagccacatctctttccatacatttccaccaatattgcctcctcaaatcgtggtacatctttgtacttatagaatgtacaataaactttgacctatgggccttgatcaaaatggactccctaagatcagggatatctacaacaactagtcttcccttatattataggtacccttttccattaactgtccacccatctagctgctcaacattatggattcagttcgaaataagtctcagtttttcatcttgccactgacgttgcttaaattattgaagtaagaatggtgtagccactatattagagatacaagctacctcttccccttcatagtattgcaacttttaatcacccattatcattgtctttttctagtcctcagccaaacatgccaaagtaccatgaggctttctacttagtgcatcagctacaacattagctttcctacggtggttttgcgaagtgaaatcatagtcctccgtatacttaacccatcttctttgcctcaaattcgagtccctttgagtaaaaagatacttcaag

SEQ ID NO: 74798 - DNA, 1115 bp, Cannabis sativa
tctgtccatgaaaggcttcatgcgattaaccacaaccttagttatgattttataggacacattacacagagcaattggccgaagttgggtcatgttctcaggtttcttgttcttcgggattaggacaatattagcatcagcgcagctctcttcaaactcaccagtagcaagaaaattgtgaaccatttgagttacatccttgcctacaattgaccaacttttttggtaaaaagctggtgtcattccgtctgggcctgggcttttgtcggggtgcatttgaaacactgctcttttgacctcttcttctgtaactggttggcggaattcttcatgagctatttcaggaatggaggtgttgacacaatcaatgatctcttgaaaagtacctcctgccgattggaaaagactattaaagtaactagtaatttccattggtaatccattctcccaatctacccaattaccatggccatcttgcaatcgatcaatctgattatgcctttttcgagtagtagctgttttgtggaaatagctactgttttgatccccctctttcaaccataactgttttgaacgttgtttccagaaagcttctctttggtcaagcactttaaacaattgtttttttacttcactatatctctgaaccgagtgagaatctctcttgtttttcaggttggcaagttcaactttacactttctaattctcagtttaaaactacctgtgatttcttttccccatggaccaagcacatcggcacacttctttatttttgttgctaaattattgtcgactgaagcagcccagcagtctcggataatctcaaagcacaacggctctttgaaccaggcattttcaaatttaaaggtacggccaggagtgaattgttgaacaatgtcgggttccaatagaattgggcaatggtcagaagatgataattctaaattagtgagaacagcaagaggaaaaacctgggaaaaaattgggttgattaacgctctgtcaagccgcacctcgacccagttttgagtgcctcggcctttctcccatgtgaatggataacccgtcaattccatgtcttgtaaattaaagtccgtcaatgcttgttggaaac

SEQ ID NO: 74799 - DNA, 1662 bp, Cannabis sativa
  modified_base (128)..(134): a, c, t, g, unknown or other
aaatatatagtgtagggcccacatcatggccggccactaagtcctcacttttgctattattttatcattttttattccatataattcaattctaaccctaagtgaattagtataaaaagaaaagagtnnnnnnntaatccaactaatgactctaaacctagtttacatcttatcagacaactagagagtttgagacttcttcttcttcttcttcctaattttgaaatcctatagagttcttcacataaaaatttgagccttagtgattgagtgcatgcccacccataggaagttagtcctcaatcatagtgtgtaagactgttaagaatccaaacaactgaaggagtgtcgggctcaaatcttgattatactctgcgacagaaaggaacaaggattagagatctgagcggaaggagtcatttaatttcattgcaactaatgtaaaggtttctcatactttatatgtgtttaagtgtcattgttttagaaattcaaattcaggatgttaaaaacatacttgttagtaaatctagttcttggtaaaatatattccaacacttacacctttggccggccaaccttctgaaggttgcccagtgcatggaagctagcactactggccgactagctataagtctagctaggaccttgatggtaggtacatggattcttgttggcctatatatgtcatgcaacataaagtttccaggtctaggaaattgctcgacactaatccttgtaggttagtgccgagttgtcttctacatacttgatgcttgtttccacatggaggagccacatcaggtggacaaaatttaggataacaattgtcaacaacgtgttcttcgtacgtacaaacaaaaaaagatcaatcaaccaaatgaatgtgagtaggttacgttcgtatcaatctcgaatatcaaatttttagcttggttataaaccctatctctaccctcaagctcgcaaacaccattatacataacaaatgtaaaataataattgaacccgtcatccacggacataaaaaacaaaacataattaaaaatttaaaacaaaaatttaacagaaaagtgataaaaagttcttaaaaagccatatattggccaaacatctgacctatatcagaccatctaaactcaaattaaaagtaaaattattggaccacactatcgaaccaacatcagacacaacattggacctgacccctaaaagtcacaaacaaatggccatcggacacccatccgacatatatcagaccctctatactcaacttcatcataaaactattagaacacaccatcagaccaacatcagacaccctatcgggcggatatagacatcgtccctaacctcaaatttgaaccaatcatcgaacaatcatcagacccttatcgggcaccatcggactaagcgaaaaaaactaggaaccagtaaaaagaaaaaaaacttgaagaacaactattttcacacaaaaaatagcaacaatcaacagatcaaacatcaaaacaacattctaaaacaaatataacaaccaacaacaaaatgaaacaaaaaacaccaattacccattgattcccgtggatgcttctcgtggttccatttagcttagcgtctacctcatcccacctccaatctgtgctttggtgcaacaaaaatgat

SEQ ID NO: 74800 - DNA, 1005 bp, Cannabis sativa
tgctaaccttgccaatcaatgatgagaaatttttgatttattgcaatgcttcaaaacaagggttaagttgtgtttttatgcagtctggtaaagttattgcctatgcgtctaggaaactgaaggactataaacaacggtatcccacacatgatatttaattggcagtggtggttttcactttgaaagtttagcatcattatttgtatggcgagaaatgcgaaatttacacggatcacaaaagcctcaaatacttttttcactctgaaggatttgaatatgaggtagtgacgatggttggaattggttaaggactatgactgcgagatcttctaccatcttggaaaagtaaatgtggtaacagatgctctaagttgaaaaggtccaggacaagtttatgaactgaaaaagatctcaccagagttggcagaggatatgaccagagcaaagattgattttgtagttgggaaacaagccaatattacgttacagtctaatttgttggagagaatctagacaaaccattaaagtgacccagaactataagagtataaaaagaagcttgaagttgggtcagcaaaggatttctcaatttcatcagatgggttattgtggtataaaggcagggtttgtgtaccagctgacgatagtattaaacaggagattctagacgaatctcataccacgccatacttattacatccagggacaactaaaatgtatcaagatgtaaaagtcctgtactggtggccaaatatgaaaagtgatatagtaaaattatagtacattactcatttactctctatcattattaattatatatctcactatatatataatatgcatgtttttctttgttgtattggcgtaatttattgtttaatttatcaattttttttcccgaactttgacatgtactaaatcgtgctccctgaacttttttggccgttaaaaatttcccttgaactattaagattgtttacggtgtttttaattattgaatgtttc

SEQ ID NO: 74801 - DNA, 645 bp, Cannabis sativa
cccagcccttgtggggccgcggcccgccccctaaactccacaagaattgtctttttctctcacgtgggttttggtggttttccaattcgaataggcatttaacatgtgcatttttatatctttttagtccctgaaagcctatataaagggtgaactggagttaatttcagtgaagcaattcaaaaagaaacaggagtatgaatttcagagaccgaagtcaatactggaggcattctacagagggttttcagcattattgtattctctatcttcttctattttctaaagttaatatgtgtgattttgctttccatgaacatgtgtagctaaacacttgattatggtttagatggatgttgtttgacattgctttatgattttaatatgatttattttccccttaatttctatgtattctatattttattcgtgcttaattatttttaattgtctggccatcaattaactattttatgatttcgatacgagatctgagaagtgagtgtcgattatgctatagtgaaatagaactaaaatttgatatagaacgagagtacctgtatagtttagatagcttatagggtttctatgtttaatgcatgttgcatgttaatatatttatcacgagagtagaaagtttgcatg

SEQ ID NO: 74802 - DNA, 545 bp, Cannabis sativa
attatattttaagccataaatatttaatatggaattatttacttatttaggaaataaataagtagtatagagattgcatgcattttttttttaaaaaaaaaaactatggttgcttttaatgctagtcttattttctcctataacgctagggcatatatataatgggagtgccaaattagtgagagtatttttgaacaaaaataattctccaaaatattatgttgaaagttgtatttaacacatactaaaaatattatgtcaatttagtatagatgacactatatcaaattttacacacaataaatattatatgttaattatagttttgtaatttaactattttaataataataattttatattattaataatctttaatgatattttatttaggctaattagaaattttattcctgaactttgacatgtacgtaccaaatcaggtagttaaaaatgttcttgaactattgaaattgttggatttaaggacttttgttcaattttagtaaaaaagtctaacatagatgaaagtttagggggcatga

SEQ ID NO: 74803 - DNA, 1419 bp, Cannabis sativa
tctctctctctctctctctatttaaaatatggaagtaaacgatcggagccacagccacaggcatgagcaaaggctgtaaaaaaaaacataattggttttgggtctgaaaaaaacaagaagtccattttaatatacaaatatattaaaaaaatgtatagaagtttaaatcatgtcttaaaagataaacttaattgacccatcatcatcatcaatgcaggaaacaacttgttcttcctatgcatcggattgggagtgtaattctgctcctctatttgctgatgcggatggtggtggtcgttgttatcgctacccccaaactcgccatcgttggtggtctccaagccgtggtcattgtccatttgggaagaagagggttttgcatgagtcgaacccgatcgtgattttctttactgagtttggtcgtgattttcttgaattgggatattttaaagccaaatttcagtgaaacgcatcaaacaaaagagaatactaaccttatcagtagtagattgattagggatttccacaaggatgggggaaggagttgtaccagcggtggttggaggagacggcggggctgcttgcggccattgctggtggtaaggatgaattttggcaccgaccattgccgtttgaaaaatggacgatgaagactaatggttttttgtcattgagattggggtttgggtttccttttttggattgggattgaaagtgagactctgcgattgaaaatatggaaaagatctgttgtgaaatgtagaaatatagagtaggagatggtatgccattagaatttctacaaatgggttcagatccaaaaaaaaaaatcatactcgtttgggactgggattgagagtgaggttctgtaactttaggtcatttagaaaaaatggtatcaatatagagaaagggatggttaacgcttcacgttaatgttccttatattttcttgaaaaaaaaaattataacgttaaaaaaaaaagaaatttttacattaaaaatacaaaatgcaatctttattacactaatacccctacacggctatatcaacttttttactcttcttttttattttattactattttaccacatgcacactcattccatgcatgagtatacatgcttgacttatgacccttatcaatcaaccatccatcatttccctttctttttttcttctttctccttttattttccatttcttttcagtttttttttttaaaaaatttagtaacctccattgctgaacattccctctccatgatcccaccattttccctcctctttgtgctcttcaatttttttttaaaaatcccaataacctaaccgttttccctctttctatttctttctcaatccgtatatatatggctattacctgttcttcatcatctccttcccccgttcaaaagaaa

SEQ ID NO: 74804 - DNA, 689 bp, Cannabis sativa
aagactggaaaattagtttcagatcgagaatctgatcatagtaattatattagctactacatacttcttcttaatgtctacgtacgatcttaaatgtaaatctcactcttctatatatatatactttagaaaaatagataacagtaccttttcatatcgatgcagtagatatagtactatatatatacaagtgtttaataataatattctacttgaaaatttaacccctcaaacatgtgtagtgcgttggacaccacgtgccacatgtcattaataataattatcgtaattatataactacaaattcagacgttctctcattaagtatgcatgctgcatgtttttagtgttacacatatataatatgtcttgagaattttcccttttttttgaaacaaaataatttcattaaaagtcacaaataaatataagtaaagaacaaataaacctcaaaaattaaacaactagggaaatccggtcactaaacatgtaattcatctaaattaagatcttacttaactaaagaatgaattaacagtaaagtttttaaaccttacaataagataaagaaatattaataaaaaaatttgtgataccaattgacatgtaaatactgtattgtggacaatgtcccacatgaaataaatggtagagaattgagccatatataagaacatgagctactccac

SEQ ID NO: 74805 - DNA, 731 bp, Cannabis sativa
atttttaactcaaaaccaccacaaattcaacaagaaaacatcaaaactagtcccatgactacccaagaacaattctataaggtcataatcatcttaactattctaattcacaaaacccctacacaaaaacaactatttttaaatttaaaacgagattaaaccataccctcttcaaggattttctatcctgctactaccggagaaaatggttatagggagaggaggttttaaagaaggggggagaacgagggtttcattcgttctttatttactgtgttatatgttacttgatatatataatataaacgtaaattgataaaatttattagctaatatattataataaaataataataatattaataaaaataaaataataatgtaatattaataaaaactttattgttaatagttatcttatcatttttagcctctaagaaatctatatttctaaggtatttggccagcttcgagtaccccataataccttggtattctaaaatcaacttatcctaataatcccgtcaatatttctaacaaaaatcgttgtgacatttttggcctccaatcagggctccagggtcgccgaaccaaaaaatatttttatttcacaaataactcatattatatccacgtatttcaaataaatcttcataattaacaaattacgcttatttatccacttatcagatcttcagggtcgccggacttgaaaatatttttatcccaca

SEQ ID NO: 74806 - DNA, 751 bp, Cannabis sativa
ctcttcttgaacctcttccaaatcgacttgcgctatcttaatcccgtctctgattagaggctcagtgaacaaaagttgttggtcccgattcagagatttctcattcgtgaacgcctcccaggtttgcttagcagatctcagagtttgttgtttctccacattcatcttcattgcatcctcaacctcctccacccaactctgagttcgaacgctgccagatctgctcatattctctgtttcaaggatatcctgagatcgaaccatctctgctatcaggttgaacccctcggctgaatgaacttcatcaatgtcctctgtttcatcctctctctcagtgaaactttcttcaactgtaacatgagtgactggttttcttcttacttttttcttcctcaccatggaaggagaaagcagagggaacggaaactattattgatagtaaaaattttaaactttttttttgtttcaatattttttttattattaaagatatcataaataatacttactaaataaacgattctacgacattacaattaaatcatacatattgatgtgccttagttttggtatcctcgtctaaagtctcggtatctatttttcccaaatttcgacctattatttggaaaaataggtagcatttctctatttgaatttgggttactgtaatttttaggcttatgattaatttttgtccctacaccttctatatatctttagcaaaatgtcaaatattcattagctaaatatt

SEQ ID NO: 74807 - DNA, 1028 bp, Cannabis sativa
aaatgtttaaatgtaaactaaaaaaatcatctgcaacacttttgttttaatttattgctattatttatggagcgcctctcaaggggagaggtaagatctataattagttctccgttgcaaggctaataagaatactcaaaacaatagttatataattataaaaaaataataattaaattaaaaaaaaataaaactaacaatctaatatatataaaatattaattagattaaaaatgatattttaattatttatatgtgattacaaatatttttttatttcattcttaccaattataatcaaatctttctaaaacaatttgtaaatagataatctttttatattctatacaaataaactttttaatcgtagaaaacaataataatgaaaaaatatatatatttataaattaccgacgtatttatttataatatatgatcagtgtaaaaaaatggtctcaaacaaaacttctatatatttttttgtttacattattctctctctttttttttttttttttttttctaaaatgatttcttaaactcattaataagggtaagcaattgtgtctatacaacttacatttaaaagaaaaaaattgcatataaaaaacaaacatgttttaattagtatgtttccaattattacatcctgaatgttgattgaatgttttttttttttttttgctttctctcatcatattattccactcatctcaaaatctttaatcaaataattaaaatgtgtgttcaattgtaaggaaaagtttaaaaaaaaaaaaaaagactaacacaatatatagtcaaaatatatacataaataatatacattctacacaaataatttaataggaaatatctatcaatgtctaaatagaaataatatacctatatattgtgaattttatatgtaaaaataaaataatttattaaaaaaaattgttcgtggataaaattttacaaacctctttaaataaatctataataaagttgcaaagcataatatacaataataaatgactaatattgta

SEQ ID NO: 74808 - DNA, 1335 bp, Cannabis sativa
tagttgttctactgttattttgagttgttctgttttgtgttttattggtgttttataaaaacacagtatttttgaaaactttccgtgtgacagttttttttgtaaaaattaatctaaattccagtatttttgtaagttttcttgaggaaattaaattgtacacttattttactttatatgttttaatttttactttcatttaatttttttttttcaaatatactcactttaatagatgatgttcttattatacccttagattaatgcaaattatgtgttagacttaagtagaggtgatggtgtattggtcaacccactcataaaaatgggaatattttaatgaagtatattttgaaggtatttttgattaatggatacgattaatggatacaataatggatacaaaaaaaagatacaaaaaaaagtattaaaaaagtatttctcaaaagtatttctcaacttatccatgtgagggtcaagtttgaagagcttacaaaaatactagaatttaggttaatttttacaaaaatagcgtcatatgaaatttttttcaaaatttacattttcttaaaacaacagtgaaacacaaaacagaataactaaaaacaacagtgaaataactaaaatataaggagacaaatttgggctccacaatattctatgacgtgtgagggtcaagtttgaagaacttacaaaaatactagaatttaggttactttttacaaaaatactgtcatataatttttttttcaaagatacatttttataaaacaacagtgaaatacaaaactaaacaactaaaagcaacaatgaaacaactaaaaaataatagtggaacaacagaaaaaacttaacacagtataaaaatacacaatatttttataaaaaattccaccccacaagtaaaaagaaaaaaaagtagaaaatttcagtatgcggtgtaaaaaactctttaatattgtaattgcaaacttgatgtaagataagatgttttttttttctaagtgtaaggtagtagtactcagtagttcacttgtgatattttgtttttccaagatgaagtgtttcatctatcttgctaacttagtcttctaagatgaatgtccagtttagtttccttctatctttgctattctgctcttccaatataaagtctttcatcgatctgtcttattaatttgcttaattccaatataaagtgtttcatctatattactatcttggttttctgatatgaagttttagaaatgtttgtttcttcctatcttattatatgttcttcttcatttacttttctcttagtcttttgatatgaagtgttcctttcctcctatc

SEQ ID NO: 74809 - DNA, 792 bp, Cannabis sativa
gaacatcaacatagtcatgtccatcagcaatatttggttctccattcttcttgtttcttgtctgttagccctctcttttcaacttttcttttagagttaggcaattatctctgaaatggcctttctttttgtaatagtagcaaaacattgtttaccagttgtagcccttgaatttgaatgtcctcttgagtttgacttggattgatttcctttgtatccatttgagtgattctggtttcccttgtaatctctcttttgaaatttttcttgacaatgagaagtccctcaccattgctctcatttctatcttctcccttcttctgaatttattttgaattgaaagctgcttaacttctgtcatggtaagagtgtctttcccatacagaattgtatcaataaagtgctcatacatctttggcaaagatctgagcaatatgattgcttgatcctcatcctcaatcttcacaccaagattgttcagattaaggatgattttgttgaactcatttaaatgttttcttagtttgtctcatccatctgaagtgagtacagtcttttcttgaggtgtaacttatttgctaaagatttcttcatgtagattgaaaaaaaattgttccataggccgagggccttttcctcatttgagacttctcttaacacttcatcactaaagctcaagaggatgacattgtgtgcctttaattcgatctcattcttcttcttcatgtcttcgatctgatctatggcttctgtttataatgcctctgagatccctttatgaattagaaaggc

SEQ ID NO: 74810 - DNA, 544 bp, Cannabis sativa
aagcatggtaaactagaatatcggaaattctgttttcgatattgtgaactatttaaaattttttaaaaattcacaggaataataccataacataacgaataccactataatttttttttttttttagaaaaatattctgatatgtgactttaaacgtagaagttgtactataaagttgtaattaacacttatctttaaaattttaatcttactttaaaagttaaaagataaaattaggtttaccaaaaataaaaatatttttacttttcattgaattctataaagatgtggtattgagcgcgctcttgggctgaacacggtagtgggtaacattaattacttggacctcccgttgtttcagagccgtaataaatatgcagagttcaacttcattctcgataaccttgtatcaaaactgcatgggtggaagttgaaatccttgtctaaagctggtcgtgctactttgataaaatcggtggggctttctttaccagtctatgctatgcaaactacgaagttatccaagaaacttacagctaaaatc

SEQ ID NO: 74811 - DNA, 1920 bp, Cannabis sativa
ggttgaattatacggattaatcttagaataaaattatttatcatcaaaatctcaattttcacataataaaaaaaaaatcaaactcacataaacacaacatgaaccatccaaatcaacccaaaaacaatatatgaatcttttaaaattttaatacatatttcatgaatgaaaataattaccaataaaattgagttttatgtagtgcataaaatcccattattacatgatttaatagatagaatcgatttaatccaaaatccaatggatgtggaatcgatcggacgactgtaattaattgaatcagattgaataacggtaaaatttgatatcccaaaaatattggatgtgaacaaataaacactcttaataataatatttgtttaagacataattgatgtgagagatttttttttttaaaaaaaaatgtatatacatatatatatatgatgttatcctatcacaatattgatttagattttgacattaatttagctctaattaattgtcttctttgccgttgaaacttcgaaagaatatgtcttatgatagtagaaggctattaattagaggtaattaattatcgagcattgttattaaacaccagtggtacctaatatttctagacatgtcgcattgcaattggttagcaatactccctaaaaattattacattaaattatatgaaatctagtacttaattagtccaattaataacgataataatacataaaagagtgttagacatcattggttctttttagcatttctctaccctatcacagtattgatagcacatagttgatgatcgattaaattcaaaaagactatacttcttcatttttcatcagaaggtttagtaaacttattctttttcttcttgattttatatattactattaattgttcatccaaagacgcgctaatcccatattatagtctttgattaatataaattcaaatcgatgggattatattgtctcgttattaggagcaacattctattcatcctaaaacttttgaatccgtagtttgtattgttaagattaattaatattaaaccaagttgaaaatgccttaaattttaatgtcaacacataaagcgttggttgttaaagcaagaaattaataaatgtctataatatcatttgactagtcttcttaactccaaaagttctattctataaaccaccattgacttagtcaaaagacttggtctgatttatactattaatttatgatcagttttgatcaagagcttaagaacttgagcatgtaggaccaaaacagaagaaaaatggtgactcgtggtcttagtcccatttggagtgaccagaccatgactgaagacatcaaaattttagagcttcgaaatgaaatggtcaaaccaaaaattgtactcattcgtttaattatacggttcactttcatagtaggaaaaaattaatcttaattaaattaattgtattaagaaatgtctaatgattcagtctaaacacaaatcaaatgttctcgaaattgagaaagaaaaagaatatttgtattaaaatagaaaaaaaactatggatgagacaaatttgtgatgctatttttcaaatggcacttgtaaagtgttaaagttttgaaatataataagtttgtgggtgggttgggagttgtctatggtagagtagcctatttttcgtagttttgaaatataattacacatatgatgtactgtcttccataagtttttattttaatttttttaaaaaaattattttagagtgtttgaataaaaataaaaataaattaattaaaaagtctttttggaagaaattacattttgtagcttcttctgaaaaaaaatttaaaaaattatttttaaaattaagataatctacataatttacttataatttttttttaatatctaaatatttt

SEQ ID NO: 74812 - DNA, 930 bp, Cannabis sativa
gattattttttatatgtttttgtgtatgttatgttatagtatggtactttttgttttgttttatttattttatttggtgactatacatggaggttgtcaaagtcaattttggagttacttacatgagataagtttttgtttttctttgcttattttatgattatttctatagttattttacttgatgttactagatattttgtagaactcattctttgttttgttatttttgtagggaaattttcaattattcaatcaaagaacagttattgtgatggaagggctagagtggtctctcttgtttgttagagttttctattcatttaaagagtccgattgtttagttttgatctctgctttttctaagtgtttcacttgatgtaatgatttggacgctttcttagctgatttggctagtttattttccagttttcttgaggcatccctagttcatgtctccgttcatgaattagttgcgcatgaacttagggtggattgtgaacgagcttggattgatacttttttatcattttctattgatgtattaaactcgattattattaataagagtttaatttcaaaaaaaaaattaggggatttttcatatatatgggaactaataaacatcccgtttcgaggcggatatataaaatattttaaattatatataacaaaataaattgtgtattttaattaataataattacttagtaaaattatattaaaattttaactttattatagaaaaaaattgtaacataaatatttaaaatattaaatttgttactaataaataccgaaatttgaaaaatagtagcataaattcttatttatggtttaatggttattctgatgtgtgtgttaagttttgagttcgaattttattgtgtgtttttaatgtttgagttttaatattttactggagttcta

SEQ ID NO: 74813 - DNA, 867 bp, Cannabis sativa
aagaaaggaggccccacggatactagaagaacttttctacgttttctactaacttcagcatatccatccatatataaacaccctcagcccttgataacagcacacaccttcaacaaatgcacacagccccaacttgtacacattgtcggccacatcgcacgcctcaaaagctagccaaagggtttagaaagtgaccattttggcattgttgaggtagtcccgcaatatccgatcagactcacatagtgtactcaattcttttgtcgaggggccaccgctcatctttaggccggtcatcaaaccaaactcagaccgcccaaatctggcttcgattttacccacgtaaaaccacacttcatcaatttttgacctcactgactttctttttcctcaatagcagctgatgcacaatcaccccagagaatttcagatcattggcattccaaaaaactccaaagggagttcccttcaccctctcagtcaagttgaaggcttcaaacttagcttttattgaagcaaagtattcgtttcctttatatgtgatacaacctggaaaatgctcagccaaggggagaataagttttggagccatctgcaattacaaacaaaagttcttattaattataaatcgcaaaaattacgaaggtacaaaatggttcatatctcatcgcacaaaaatcgcacaggtttcgccaaaaaattgcataattttccaaactcaatttaactatatctatgtcgcacaaaatcatataatatcgctcaaaattcccaaaaactaacaaaatcttaacgacattctcacatcacacaaaatcgcataaatatcgctccaaaatccccaaaaacttaactacattgtcacat

SEQ ID NO: 74814 - DNA, 1224 bp, Cannabis sativa
  modified_base (983)..(987): a, c, t, g, unknown or other
  modified_base (1187)..(1187): a, c, t, g, unknown or other
tcattaatgcaaatagaagagtactgtgagaaaaaatgcatctaacacttaacattctttcctattaagatggataagaaggagaactcatgtttgacgaggtgtaaccttcctagtcagcatagccgtctaaaggataaagataaggagtggttggatagttattagatactattccatgtatgaataaatgaaacgtgaggaacgtccacgtttcatcaacaattgtaaatgaatcaatcctaataaaaatatctaccaacctatatttctataaataggagcagaatctatagaaatagagatgacaaaaaatagatagaaattctattattttcaaatattaagatttgtattttgtatcccaaaaaatattcctaataataagaactcgtagagtatgttgattttaaatacaaaactattaacacagattttcgttgacgatgatgagcctattttgtaataggttcagcacagaaattatcaaagattaaagaaaagtagtagcgaaagatataacactaggttttttatgtagtttttcaattaactctgcatagtccacgagtcaatattactcaaacttttctgatacaaactagggttctttacagctagtgtattcttttttctctcaaggattttccctctcttttttggtataatctgcccctatttataataacatagcttggaagttaattacattcaacttcgaatcccacaataatattttcttgaaattgtgggccttcattatgctccatgtaaataaatgcagttattatttgaaaatttcacagctgtgatttaaaccgcttttaaagggtcaacacttaggtggattaagatatgctgcaaaacgtatctcgctgaggcgtctcgcttggtacatgaagagcttggtttatcgatgattcttccagcaatggcatgagcaccaatgtattgaacaaacttaagaactgctctttgaccannnnnccttgcagactggacaatcatgtgttaggggttctcaatagcaacaataaccctggtaaggagctggagtttaccagaagtacgcattcttatagcgagatggatatctccctatccgttatatatgtccttcaatgtaacgccctaatgctaatgcacgctacagtgctttttcaattatagtgcaatctttgctaatnaaagaattttctcgaaaaacgtatcaaattaaaactt

SEQ ID NO: 74815 - DNA, 1041 bp, Cannabis sativa
tatattattgttgatttagatgagaaacttgcatattcattttttttatacttaactgaagaaattcagtaaacaatacatagatatgagtttgtaaatatatagaagtttgaatctgattgtttaagtaaacataaaattttagaaaaaaattaaatgttcttagaaatatttttgaattttcaatactactaataataaataataattaatataagattaattttttaaaaaatataaaaatagacataaataaataaactgtttgaaccttgtttctggcatgttaaattattttgaatttattgaaaatttataagatgttttaaaaaattacgatttgcattgtcatataaaataattaagattaaaaactatctgaatatcaaaaatacgaaaggaatgtttggtacacttaattttagagagtgaaacattgaatttcactaaattaattatattattttattattatcgatatttaatttctcataattttttgagttgtatgtttatttttttttcataagtttattttttagctttaattataaatttaaaagaatgagaatataatattatatttctttatttaagtaataattatttaccaatagtgttattatagtagaaaagtaattacataataaacttattttatgttgttaataaaattaaatatgttttatgtattttttataaatagattatttagaaaaaaaatcgttaatatataatatatatatgtgatgagagagaaagacactaactctttcaaaatagttaaatagttaagggacttttttgtaaattaatagatggaggacgaaagcttttgtcacttttattatagttatagaattatttgctaattttatagggacttttttgtaaattaatagatggaggactaaagcttttgtcacttttattatagttagatttatttgctaattttataactatttaggtatcaagttacaacctgaattagtagttatgtgatcaaacgttagtaaattgaattaacatcgggtagcc

SEQ ID NO: 74816 - DNA, 740 bp, Cannabis sativa
  modified_base (26)..(30): a, c, t, g, unknown or other
gttttactggtgttttataaaaacannnnntttttgaaaaaaaaaatcgtgtgacagtatttttataagaattaacccaaatttcaatatttttgtaaatttctcatattaatatatagaaaagtgctaagcactaatggtctttaccatttctctaattatatacacctatgtcaggtcaatcacgtgtaatgttacgttattaattaaagatgtgtttactgtttataatattattaggtgggtattctttagaaatcttacagatataattaatgtgtcaattattcttgaaaatattatataataataggaagtctaatttcgatctttaattaacaacttcttttccaaaagaaaaaataaaataaaaaatgtgttcatggtgctggtggcctttatataaagagaaatactaaagggtactagtggtgtctagcacctttctatgtgttagtgtcgctattggtccaactaagtatcgagtcccacataatttaatataatagcttttagggagtatggctagccaattacaacgtgacatgtcgagaaagtactggtaccttgtagtaatgctcttatataaatgctacaaatacaaggctaaggtgtcctgcacaagctgcactgcatcccacgtatatgcattatatattcctaaatcctatgccatcttcctcttgtcttggctataaatatctctaggtctcacactttcacttcacactactcattcc

SEQ ID NO: 74817 - DNA, 950 bp, Cannabis sativa
aaacctctgcgctactcttggactaatgcaagctcataccaacaccttacatcatgatcagtaggaactccacgctgcggtaaatcttgcgttcgaggaacacagacgcatgtttgtcgaatggagggacaaagaaatggaagcgttaagggctcatcatgcagagattgacaatcataatcggcaagttattgtgctgatacgaaaagcttaccaaactgtcgggcagcaacccccgaatgtcatccgcctcggtgaaacagatgaagatccaacgatgaatacttcccagactataaatggtcagccgccaaatctccggtcacaggttctgcctgtgggccaagtagtaggtgggcataccttgtctagtaattcatcaagagaagtcgtactcgatggttccaacaaggccaacggtgcaattccacctatcaacaaagttaatcaacaaccaaggtagctaggtgtttctgtataggaaaggttggggaggactcatgatctcagaaacgatctaaaattctcgaaacccggaacccgtgctcaaattcccgctcaaaaagatactgacgtgactcaaattggccaaaatgttgaacaggttactcaagttgtgcaggcacagctagatgaactaaagagtatgttccaaggcatggccgagcagagaaacaatgatctcgagttggaccgagcacgtagaacccctttctctcccgagatcaatctcctggcgttgccccacaagttgaaaatgccaaccaggaaattgtacactggaagagaagatcctctttcccacctcaagtattttgagatgcaaatggatctgtagggggtatgaggtgacgtgtgttgcagaatttttcctgcaaccctctgtgaagccgcccagcaatggtattttaagctggtccctggaaagttcaactcatggaaagccttct

SEQ ID NO: 74818 - DNA, 832 bp, Cannabis sativa
agattgatgtacttttggaccctcttctggaaatcttggagattggctgctcccttctattgtaattcgttctagaatggggtccccgtacaaatcccaacttgaagaagtgcaagctgttgttcgtcatccaccttcttggtctttgaagcttcctctttaaacctttttatgaagttctttaaggtttccgctcgcaattgctttatgttagtcagggcgctgacttcgaggttaatcttccttgcagcggcaaattgtctccagaagcttacttgtagtttgttccagcagtacactgatcctggttccgactttttgaaccattcctcagcggaaccgcttaatgttaatggaaagcataacttggcatcattgctgaccctcatgactgtcattacctggttgaaacaggataaatgatcactagggtccgaggcccggtatatgctgccatctcaggcatcttaaaattcttggggagctctgcctccaatatgtgccgggtgcatggctcccggttctcgcaattggaatctgagtcgtcctctttttgcctctgggagacccgagcaatgtccttgcgcagtgttgccaactcagccagaattccttaatttagtgtccccgtggagaccgctagtaaatgtttcttcttgtctaggtgatctcgtagatcaccgtatttttcgttgattttttgtcttaagtcaactggagagtatctccagtttttccttcctctctctttgggctcctagtgcacggatacgctctttcgatcctctcgatcctgagggccaagactcgctttcgggagcttgcccctctg

SEQ ID NO: 74819 - DNA, 634 bp, Cannabis sativa
aatggactagtacattaataaattaaggatttatggtaacctccaaaaatacgagatcctgtgggggcttgaaagtattctggggttgtactggaataggctctctatccatagagagaaaccaagtaaatgtgttgattggggcttcgacatctggagctgggtccatgtggagatgggtgcacagattccgctaaggtgttacttcactaatttctgtgtggtggtcgaagttgtgcccttctagtttatcccacaggtgtactgtctcctatctagatggtacattttgtgttcacaacacaagaaagtagtaccaacacctgaggagatcttgtatttctacaagattaaatcttaacccatgaggggtaataaggagaacactgtcttctacgctgtaaagatactccaaaaaggtggcctacacaatcagttaagtgaagtatgcacacgacttttgggactattggttctatacttccagcttctcgttgaggagagttccaacactcagcttggactttaacatagccagtaagtatttgattttcgtccttgttttacttcttgtctttacaaatcttcatattcagatgtatatttttattctttttagattgcatttcacagt

SEQ ID NO: 74820 - DNA, 748 bp, Cannabis sativa
ataaatatgacacatacctatgtggtaagtcactttaactaattatttttatttaaattagatctcacctattaaaagttatttgccacggtatgtctcacttttatttgtaatttatatgtgcacatatcattactcaaatctaaaaatatttagctaaacactactcatgaactaaaacttattcattggatgacttttttaaacacattttttttattcttaactatatttttatctttgtagttattttacattaattattataataatatcggatcttacatatttatatatttaaattaatttaatttaaataatgtgaaattcacattactagtagcccttacattaagtgagctatactactctttttttcacaattgagaagagaaagatgaaaaaatatcaaaaaagtggcttcatcgtatatgaactattttaactcaaattttaaagaaagttatcgtgtttctttattttcaaacaatattttaataatatatttaatttatattgtattcatacttaattattatgtattttatatgcattaataaaataataattaattgaatgtagcgaaaaaataaaaaatttaatgagcgatgtaatgtaaaaaatttagaaataaaaataaaaataaaataaaatttaataaagtattttaaaaaataaattataaatgctggtatgaatgttcttaatttatgtattctaaagtattgggtatcatattgttgtgtat

SEQ ID NO: 74821 - DNA, 782 bp, Cannabis sativa
tctaccaaaattttggcaacataaaactataattgaacgttcccaaaaaaatttaaagttattaataacaacaaaatacaatccaaaattatattaaataatcgcaacaacatttagcgatccaaaaatttaccacccatccgactgcagtacatgtattcgtagaacctactttactacggatgaatatttaagatattcaaactcatctaacatgcatattattctacccatccgattgtagtataatatatcgcagaacctacttcactaccgataaatatttaaaatattcaaactttactaaatattaataattaattaataattaaagttagtaaatatatacctcgaggtagttagaaaccaatcaacaccaaataagtcagatccttgttaattgacctccgaacctacaacataataaaatactacaaaattaatattttttttatttaactacttactagttatacaatttataagtaactagttactaattagtttatttattactaactagttcctaatgagtaactagttagtaataaaaatacatgaaaaggaataaaaattaataacttgttaagtaattttaactaacttttactagctactaaaaaaaatacatgaataaaattgaaaataataaaaaatagaattaatttctaaatttttgtttataaactaatttttttaaaaattaatttctatacttctgttttaacactctcctatctcattctcattcataatacttaacaaaactattagtttaaaat

SEQ ID NO: 74822 - DNA, 1044 bp, Cannabis sativa
  modified_base (874)..(881): a, c, t, g, unknown or other
attcatcccaaagtattttttttccactcctttaaaggagcgtaccaagacaaaatgtccatttggatttggtaggctggtttacttttttcttgtttgaaaaaagactgtatagtagtgtgaagagccatagtttggacttcaatagtcatcatacagatgcatgttaggtactaaaaaagatgagctatggattttggagtgaaaagtgcagttcggaaggggaccagattggaaaaaggatactttggttagattagaaaataatgttgacaatagggtccaagtttagagagaatttggttgtgagtataaatagccctgtgggggccctttcttttgctaactttttggatttagaatggatgagcttttcatctcatggaaatgagcagggaaatgagcaattcttttatgatggtgatgatgatgtcattatatatatgtatggaatggtatgcggagagttgtggctaattaaggggatggttttgagtggatgtgacgagaccatatttatagatatagttttagataaaaggtcggccaaaatattttcttttctaggaaggtattttatttcaaagagtaatgatcaaaccatgttcccagtctcaaaagttgagcattggtgttgtcttatactttcgcaggtttatcattccttttgatgcattaaaattgatttctactaagaagtgatggtcgatgaggtggaactcaaattttgtgattcccatcttgattgcaattagctctttgagtgttgaatgataatggagctgggaatctttgaagtgtccactcttatatccacatattcatccttttccctggtcatctttgtaacgccctgaccctcagggacgccacnnnnnnnnttttataaacttattatcactaatatataattttggaaaaaaaatgtggtttaatttaaacctttaataaaattgaaaataaagacttccattttaaatactatcgtaatatagggatcccctgtttataaaacaaaactcttttacaatagattacatttcc

SEQ ID NO: 74823 - DNA, 1050 bp, Cannabis sativa
  modified_base (48)..(50): a, c, t, g, unknown or other
  modified_base (145)..(146): a, c, t, g, unknown or other
aattttataaattaaaggaaattaactatttattagttttttattttnnnttaaaaaaataatatttaaaataaatataatgtttaagaatattaaatttgaaatatactcttaatattctaaataataatattacaaataatannttaatatttatatatatttaaatcaatttaaaatcgatataagttcaattatcctaaaacaaataatattaatatttatatatatttttaaaactaacatcgttaaatttaacggaatattataatattctcttaaaccaacaaaaattattaataatcacacatttgtatatagaaatatatatgccatatcatttcatattgcactccagataaaaaatatacaattcgtaattaatatacagattaaaggaaaatctatcacctgtgtgtttcatataaagaatatataaattaatcttttagtaaagaactatatattaattttttattcgtttatgtttctattttttattttctagtaataattgtgattataattttttttttgttgtgagtaatttgttgacctaaggactcatcaattagataggctggaaaaccaaagactcaatatcaaaaatgaaagcaaagcttaaagaacttgaagtaagagaaaaaagaatgttgtattacttgaatatgtttgggattactatgattttccaatctgttttcaaacttgaaaagagggtatttataggggctttattggccctagtttacaagataatactctcgtggtcccaaagggacaagtaagatatcgtacatctacggatgataggatgcagtaggtggtcttccaccaagtactgactgtcgggtgtcaggtggtctggtcatgcatgagtaagttgcagcgtaccctttgtcaggatatcagggtatgtaggcgaggtgcctccactactcgtactggacataccttctcgcacaacaagttttaggtctcgtaagtgacatggtcgtacactgacatgtactgtaatgaccgctttagtaatttggattagtaaaggca

SEQ ID NO: 74824 - DNA, 1205 bp, Cannabis sativa
  modified_base (28)..(44): a, c, t, g, unknown or other
tagtatatgtattagacttttaaattannnnnnnnnnnnnnnnnaaatattatttgtatatataatttgtttatttttttttagaaatatgtgtagattggaatgaatcgaattggttatttttatatgtcaattaacatccaatccacacaagtgctgattttgaatttttcaatccaatccgcacaagtgcggatatccgtactttgcggattggattggattggattgtgcagattggattggataaactattttataaaataacgataacaaagtaaaattttaatgatatatttttttgacattaccatccatcattttcctagaataactaatgaggtgttgttcattatttatattaagatgataatcttgtctaggagttaagtataattttttgtgagtgaaattcttgtgttgggccaatgccattattcaataatgtttatgacactttttttattcgttcatttttttttttttggttaaagttttcttcattggttttgttcttatagattttggtaagcccatgtattttaaaaaaaaaaataataacatataaatgattgttaattattatgaaattaaagattataggtttagaaaaaaaattatacattccatatgtattagagcttaaagtttaaaattatttttattttgttcttagtaatacagcttagaattctagtttcagcaaattttataaaaagataaatatacactttttttcttttaatctttaaaataatttttattaaaaaaaaatagtttattaatttttttcgggtgttttacttcttaaataacaattccatatataaatttttttatttctattaatagtattattattttaggaatagagagaataaaaaaaaatcaaagaaagaagtggcaaaataggaaatattaatttttttaatatttaattgatgattataaatatcaaccatcattagatttaatttaatgatcaataatgaaatacccatagataatacccattaaaagcatatccatatatatatagatatatattcaacatactcatatttgagttagtgtttacattcccttgtaattgtttcgtattttttatatatacgagatagatgttacgtgacaagtcacgtatgttaattttattttagtttttagttttttttttaatatcataattttaaaattaataatat

SEQ ID NO: 74825 - DNA, 1068 bp, Cannabis sativa
gatcacattcaatatttttaggcctatttagatccgattcaattatatattagatgttagattttaccatgcgattcgatctaattgattcaagtcatccaatcgatccaatattcatgggatgttggattagatcgattctatccgttggatgtatatcaatatatttattggtttaatttgaatttatttaatattttagactagtatttttggatcggatcggatccatctaatattttagattcaatatatattagattagactgaatccatctgatccaagaaaaaaagaatacaattttaatattaatttttatgtatacatatatatgttacgtataatattataaaatctaattactcatccaaactaaatcaaaatactaattagtttaattacatgtttgatgtattagatttttagacacaacattcaacatccgatccaatctaattggatatttaaaaataatatccaatccgatctgatcacaattacatatctaatatttgggtgtacaattgttcatgtaactttttggtcaagaatgactttgaaagtatgactttgaatgtgtgtacaattgttcaaaacaattaatatgtacaaaagtagctattttttttcaccacatttttttattttattttattttatgtaaaatatatattttttaatttttacttattttttttaaggaaaaagaaaacttctttatcacgttctaaaaaaacagtaaaataaaaataaaatacatttttaaatattaaaaaaatgaactaaaagttatataagaaattttattaaatttaaaataaaaaatataagaaaaaaattaaaaaacttaatgaaatcaatacaaattaatatgaaagagtatgccctaaaaaataatttagttgattctactggagtgcttttataattttttaataaatttttaaattgtaaattaaaaaaatgattaataataataattcgccaactttgaaaatttaattgaaaaacaaatacatttttagaatttaatttattgataactttttttttttttgaaatgggaa

SEQ ID NO: 74826 - DNA, 916 bp, Cannabis sativa
tatggaacacttctcaatgggtaatacccattgatggatactaaaaatattaatgatgtggcaatctaattacttactatagcaggttaccaatatatatttttaagtaaaattatatttgtatttttatgaaattagaaataataatttcaaccaataaaattaaaaaattagaagttatttttagaaactagtatttatattgttgaaattaattactactttctaatattcccaatttataaatctgcaataatgttgaagaatcttataccttggtttctagtatatataccatgatcttgctagaattgtaacaatcgatgcatcaagttcactaaatctcaagtactatttagtttcttatttataagtaatgcttaagttttcttttttaatcttattcatagctttgggaaaggtttattttttcactcaagccaattaaatctaatattctgtagtaattgattgccacctctcttctctagcattttgtagtaatggattgccaatcttataatcaagtcaaatagaagaaccaatgaattacaagagaagaagagattttttaaatttgaggatgcaaagctagttcttttaattaatttaatgtctggttctacaaaaattccttagcaaaatttaattctaaaactagttgatttcttatgacaggatatgatttttagaagggtgtagcctttattattattattattattattattatttaattttacaagttttaaagaaaatatattttctggaagagtcttgccaataatgaacatgattaaaagtagagaagatctttttatcaatgaatgaagacataaaatattatttttaaaaaagaaaaataatcaaataaataataataaaattctttacatattatgtataaatacttatt

SEQ ID NO: 74827 - DNA, 715 bp, Cannabis sativa
attaatttatttttgaataaaaaattttacgagtgcgaaattcttaaaattgttcatcataatgtctcacaaactaataagttttaggattaatttggcacaactgtgttgtggagaaaacaattatagttgtattaagaaaaaaaaaaagaaacaactgagtagagtgtttgataaattattaagtgtaaaacttttgtattgttaagtgttaagtaagagtttttagcggctaaagcctcccaactataacattacttgcacttaactctccaagtgtggtaaaacccttcaaactattgaaccgttagcaaatttaatgtgtcatccatttatctcagtttgataacataaactgtttatgtgtacactcttatgtacgtagcacacatatattgatacacctgatataattatttaaaaaaacacaaataaataatttcaaaattaaacattttattaataataaaaaaaattactttgaaaattaaaaaattcaaaataattttttccccaactcccattttaatatcaaggagaggaagaaagaaagtgtgtaattctcattagattacaaaactgttacgtgaatgcttatatacacacactaacagcaaaggaaaataaaatagagttagttattgagacaataactaactcagctgacacaacacacattaactaactcaaatacacaacattttacaatctaata

SEQ ID NO: 74828 - DNA, 821 bp, Cannabis sativa
tttcttatttttatttttgctgcagatcgttttttatttttctgccataaaattaactacagtcactacctagtcccaacacagatgatgaaaaaccctttattaaaggcaagagaagaactcataaataaataaaacacaaagacacaagggaaaatgcccaatatagaaggaataattattgatgtcaatatatagctagagtaaaccaacaacaacaaatgtcccaagggcacattttattgtaatgactaattaacaaaccacaccatacatgaccaactagctagtacatgtcttaacatagagccatgcggcaatataagaacaataataagaaacataaaacacgtacagtattacatatatatagatataacattaaacagccaagctagtcaataattcttttattataataagattaagagtaggtatgtaggtagtagagtacaaataagttgaaatattttctaatgaagcactgtgttgaacatcatctaaaggctttccaaagacttgacatgtcccttgtccgagacagatctgcatattgccgggtagcaacaagggtttgataaaaaattgcacctactaccagttttgatacaatcttggataggggcacaatatcgattctcaccccaaaaccattcgccttcgcaatacagtccgctacagcaaaccttggcttatgcaacatgacaatgttacagaggaaaattatggacggtaaattatgcagggtacttttgtcattactccaatgagatgtactcccaggttgttggaacttttccaatccctaggcaatcattaca

SEQ ID NO: 74829 - DNA, 1082 bp, Cannabis sativa
aaataatgctttcttacatggagacctaaatgaagatgtgtacatgtctttacctcaaacatatagacctaagggtgagttgccacccaatcctgtttgcaagctacaaaagtcactttatggtctaaagcaagcttctaggaaatggtttgtcaagttttctagtgctttgggtgatgaaggttttcaccattctgcaatagatcactcataattcatcaaacactttaatggaaatttcatttttctattggtgtatgttgatgatgttattctagcaagtaataacctagatgaacttcaagccctgaaagtgagattggatgacaaattttagctaaaggatttggggaaactaaaatactttctaggcttggaagttgttcgatctaaacagggcatttttgtttcccgaagacattatgccttgcaattgcttgaggattttggacacctaggctgcaagcctatgaacacacctatggaagctaacctcaagcttggacaagatgaaaaagaaaaattagcagacccaactctttacaggagaattatgggaaattaagttgcagtatttgacaatcactaggcctgacatctccttctcagttaacaagctaagccaattcctagcaacacctcgactcactcccttacatgctgcaaaagggtgctgcaatatgttaagagcagcgctggtcggcctgttctttgctgcataaacagagatgaaattgcatgcctatactgattctgactgagcttattgtctagacacaaggagatctaccacgggcttttacattttcattagaacatcaataatttcatggaaaagcaaaaaataacatactgtttcaagatcttcttcagaagccgagtataaggcaatgtcaaacactacatgtgagattgtttggcttttatctgttttgaagcagcttaaagttgaacatgaggggcttgttcttatattgtgacgacaaatctgcacaacacatagctgacaattcagcgttccatgaaagaacaaaacatattgagattgattgtcactcggtgaggaaaaaagttcaagaaag

SEQ ID NO: 74830 - DNA, 1066 bp, Cannabis sativa
  modified_base (472)..(473): a, c, t, g, unknown or other
  modified_base (529)..(549): a, c, t, g, unknown or other
  modified_base (672)..(675): a, c, t, g, unknown or other
tgttattctaaacataaagaacactatttctggtaatttgttgaagatgttctgagatacacagttgggttattttttagatatttcggagtacaaattccatctccaaattatgcatagccttttattgagggaggttaatcagcctaattcgaaagaattttgggcaaaggttgctggctgttgtattcggtttagtgcagaggagttctatttgatatctgattcagaatgttttggtgattgcaataaaatatttattagccaagaatcaaaccagtttgtcgatatatactattctggaactaaaagaattgatcacaagtatattgacaatgcattttttggcactaggtggggcaatgatgaatctcttggtttgaagttgattgttttgtattttcattgtttccttttaagtaacactcctaagaaggaagtgttggaaaaatattttaccaagatctagatnnactaactaaaaatatatgaaattttttaaaacaatggaatttaaacacatataaannnnnnnnnnnnnnnnnnnnntgcagcgaaatataatgactcctcccactcagatctctaaatcttgtttctttcttcgcatagtattatcaagatctgagcccgacactccttcaggttgttggattcttcacagtcttacannnnatgattgagtactagacttgctatgggcagacatgcactcattcactacaggtttgaaattttatgaagagcaatgaaggagattcgaaatagaagaaggaagaaggaggtctcaatcactctctaattgtctaagagaatgtaaactaagttatgagagattaggttattggataatgagaccatcctattccttttatacaatttcacttagggttaggattaaagtatatggaataaaaaataataaaataatggtaaattatacactaagtggccgaccatatagatgggccccacttgttataattttgtcatttttcaaccatttatcttttatttcacatatgccatattttctaattttaatcctaataatgccaaaactatt

SEQ ID NO: 74831 - DNA, 928 bp, Cannabis sativa
gataatactttgttgatttagaagaagaatcacaatggttggaaatcagacaaatggagacgccaatgatggatcaatcaacattgggactatgaatgtcccacttccgggaaatagggtacctcccatcgataccatcaacgacagagtaggacggacgagcgtaaggccactcaatttgttcccaaaactgctgctcacattggggaaacgtccacgccagcaaccacaataggacaattcccacctatcacacctgttgtggtgtctaaaggcattgttcaattaaccacccaccagtgcccgacagtataggaccaaatgcaagctttgcaggctgaaatagacggacggaaccaaacacggagttctcctcgagtaccaactacccgctcggataacccataggtaacaacatctagacgacgaactaaccgtactcgcagggagcgaaggataggtcgggaagatctcaatttaaatcagccgatgtcaagggatcaattcacgagaaatttcaaccgcgaggctcaatcggaagaagatccagagcgacgtaaccctcgcactagaccccgaccacaaaacgaggagaatgacattgagtccggctcttcgtcttcacaaagtcgtactcctagcaagtacaccaggtcaggttcggtggaaacaccccaagggtaccaatcataggggtgatctttgtgatcatcttaacgctatttttagggcgcgttccaagatgacctggaacgatgaagaccctcgtggtccccgtttgggcgatcagggcataaacaaccacaccaacctgcctaacgcaccagctgcgactactggagttgttatccctacgattatagttgttgtggaaactgcagctgcaacgaatcagggcaacggcacccttacaggaggcatcgataat

SEQ ID NO: 74832 - DNA, 736 bp, Cannabis sativa
cctttcattaaataattgttattacttgaataagcctaatattaattgggcctaaataaaactatcataggtgatattctattcgcaacgtagtccatttaaatttctagaatgaaataggcttctgctaacgcagattttcgttagccaaaattaataagccttaagtaataaatacttaacagaaataaaataataaataactctaaatatttttacggggttttacagttaaatctgcatactccacgagtcttttttattaatgatatttgtcgagtacaaaatacaatatcaaaatgatagtatttctctctcaaattttccatcccattttctgtggaatctacccctatttataggagtataggttggcagttgttcttttgggatcaattcaaatgtaattgttcaagaaacgtaaacaatccccacattttatttaatcatatgtgggataatatctaatgactacatgactactctttgtttttatcttttagacaattattgctgaattgaaatttggtttcttgcttgacatgaattgtcctccttatccatcttagtaaggaaaaaatgctaagtgttggcaggtagttcacctcgtcatctctcttcttttgagtcagtattgcgaggtgactgtctctcaatatgtaacccgaggctgttgtatgtgattatatttgttctgctccagtggatgaatatcctcttttggtctatgtatatc

SEQ ID NO: 74833 - DNA, 708 bp, Cannabis sativa
tgactagtggactttcgccaagaatataattggcatgatcaatcttgtcaatataccagataacattttatgtaatgaccatatataaggtctaatttatggtattaatctaaaacgttgttattcaaaacaaaaaccactcttgcttcactaagagacaatcaagagactgatcattatttacagagtaattacaaaataaaattttaaaaacattaagttctaatttgtaagtcagtactttatttaattaatattaatattacatgttacacaaaaaatacaaaaacaagttatttatttatttattttattttgataaattccgattacatatgtatcaatattaataattatctataattattaaatttttattatgaacagatccatcttaagctaattagaggtcttgtgcttttttatctttatatatatatagtggtaaaattttaaaatataatattttgaaaatataattatacattttttcttaataaaatatgaaatgtagcattactgcaaattaaagggagatgtatatctcttttagttgaacttcctatccactctaagactacatatatggagacttctaattatccactccatatgaatgagttaatgagttttttgatgattttaattcgaatccactctaagactttgtaaagtccttttttggcaagttagttgacaaaatatttt

SEQ ID NO: 74834 - DNA, 674 bp, Cannabis sativa
  modified_base (95)..(107): a, c, t, g, unknown or other
cccccccccccatcccttttttttttttaattcttgtttctaaattgtgaataattaaataaatatagtactcgtgggattgacccttacttacnnnnnnnnnnnnntaattggaggtattggaattaaaatattagtaaatttgttgtggtttacgacacgcatcaatattaattcatttatattgttattataaatttataatatataatttgaactaaaaaaaattaaatattaatttttattttttttgaaaaaaaaaatgcatagatacagtgacacacattgagagtagttgttacttttataatctaacatggtctgactctaaaacatattttgtggtatttttattatattgatttcttctttgtagtcaaattaaaacatattaactcatttaaattattattataaatttataatatatattttgaactaaaaaaaatattagcgatacattgagaatagttgttacttttacaatctaatatggtctggttctaaaagcctacgtgtggtgaggtactctaaatagttttaatgatccacactaatagttttttttttttcaaaaagaaaaataggtttagtgactccaaggattactaaatgctactttttctgtcacccccattagtgacgtactgtgaagggtcactaaatgattttag

SEQ ID NO: 74835 - DNA, 953 bp, Cannabis sativa
cttagcgtaaaggttgtgatctcgtaatcgttgaagtactaatctaagatgtaactcatgttcttcctctaattcagaataaaccagaatatcatcaatgaatactatcacaaacttgtccaggtaatctttgaatacttggttcataagatccataaatgcaaccagggccttggtgagtccgaaagacatcaccagaaactcataatgtccataccgagtacggaacgtagtctttgggatatccacctctcgaattctcagttgatggtaacctgggcaaagatcgatctctgaaaagactgtcttacccttcaattgatcaaacaaatggtcaattcggggtagaggatatttattctttgtagtgagtttattcagttctcgatagtcgatacacatttgaagtgacccatctttctttttcaggaataacattctagcacccaagggagaatcacttggttttgtaaatcccaagttaagtaacatctggagttagatcttcaattattttaattctgctagagccattcgatacggtgcctttgatactggatcagctcccggaactaaatctattacgaactcaatttctcgggaaggtggtaatccatgtatgtcctctggaaatacatttggaaattcacacaatagtctcgtatttttagctccagatgacataggttggctagtatccactgtagttactaggaatcctagacaacctctgcgcatcagatctttagcttttaggattgtgattctaggtatgcgcgatccttgtaccttacccacaaacatcgctgaattggcagtgttaggttcaaacaccaccatcttcagcttgcagtcaattgttgccccatacttagacaagaaatccattcccatgattatataaaaattagacaattgttgctcaatctggttggcggttaattcataactgt

SEQ ID NO: 74836 - DNA, 962 bp, Cannabis sativa
gtttgtaatttttatcggtttttcagtttggtttgggtgggttgttcggtttgggcggttcacgaatttttttgtacaaccctagctcgatgtttacaattttttgtgtgacacatggaatcataaaaagtttctctgcggtggcacacccttaaacaaatggtcaggtcgaggaagtcagcaatatgctcaaagacactactaaaaaaagacttgaaaaagctacaaggaactagctagaggaactaccagaagtattgttgtcataccgaacaatagagaaaacaacaatggggcaaatggcatttgctatggcctatggttatgaagccatggtgcccgtggattagaacctctatcccacacgcgattaacctacgatcaagaaaccaatcatgccctcctggcagaatcacttgacgagattaaagaaaaatgaaccttagaaaacctaaacctagtggctcatcagcaaaaggtggctcagtacttcaacaagcaagtgagggctagaaaattctttgtgggagatatggtccttagaagagtattcttgaacacaaaagagagtgcaactagcatgcttagacctaacttggaagggccatacaaggtggttaaactcatggactctggagcataaaagctgggacaatatgacaagaatatggagctcgttctagtaccaagatattagaatgggaaacatttgaggaaatactagcagtaagtgtacaaggtctaatgatcctctcaagtatacaatgctagaacatttactcttaagtagattactcaggttggatgaccatctttaaagtagtacagttaaaaaaatatatgcaattgttttatttttttaattagctaaagatcagttagatcatataatagctttcataattcaataaatgtaagttactatggtaacaaaattattttgaccaataaatgaataaaga

SEQ ID NO: 74837 - DNA, 632 bp, Cannabis sativa
cgtagcagagtggtcagcaaaaccacatcgatatcttctcccgttacttctatttggttcttctcattctgaagtgttgcctgtgttactcctgatcattccatcaaaatcaattaataatttctttcttgttagtaataattataaattgattgatcttgtattattaattaccatcaattccgactgcagtcttaatggctttggtgcgggacttcttgtcgtccagggccaccttgatcaccacatttagctgcacgaaattgataatgaacaataaaaatcagaattacatgcgacacataaaaaatacaaattggaatttcgatactaaggtttatttgtaccttcatgtcgatggtgattggttttcttgttatttttggaacaaagaaagagagatttatattgttatagatatattgaatttgctagttctggttttgtgagttatattgtggtagctagtagtgtatttatagtgaagagagtagaaaagatggagagtaaagagtcaagagtcaagagtcaagggggtcttcgcgtcaacttaaagtggggccagtatctatagtgtccaagttatctcctctctcgaaactaccaagaatattgtattatattttttatat

SEQ ID NO: 74838 - DNA, 662 bp, Cannabis sativa
aatgctaaccaggtacctactccttcatctagactcaagtatactaaacctatttgtgtaggtgatcagattgtggccaaacttgacctagaagagattgaggttgaggctttgctttggaaaaatgctattctatgtatcgtcttaggtgttaaccctccttttacggtttttgaaggatttatcaaaagaatttggggcaatttgggtgttgagaagattgtaagaatgcactcgagctgcactcttgttaattttagggatgaggcaactcgtgatctaattcttgaagctggagttattcacttcgacaaaaaacctgtggtgcctcgacaatgatcaactgaaattgattctgcccaaatagtgaattatgtacctgtttggattcggctgaatgggttggggctttaatattggggaagaaataatcttaacgctttggtaagcacaattgggaaaccggtgatgattgataaggtttctcaagagcgatctatggtgaagtttgcttgtttcctcgttgaaattgagattttacatgatccaccaaagaccatatccttcattaatgaaaggaaacaattggctgagaagccgattgagtatgagtggctcccaactaaatgctcagtttgtgctaatttggggcatactactgc

SEQ ID NO: 74839 - DNA, 596 bp, Cannabis sativa
ttatttattaactataaattattccactaaaaatttatagttgcactaacaaaactacaatcttacattaatagaagctataatcataaagagattgtgaaagactatatacccataatctcttttcatatcaacataatgcaacaaggtatatttttgattctataaattaatcttaataagtttaagatcaatctatgtacttaaattaaatcaagggctagtcctaagttgaaatgagccttaaaaaaatcaatccttattataagaataaatagtatttttaaaaatcattaaccaaatatatatttttttatttgggctcctaagatagatggactttaggtataaatctagttcgccttatcctatagtcagccctacttagatctaatcctaacatgtaaagttatttactaacactcatcattagctttaataaggatattttccgaaaatatatctaacttatttattaacacttaaatatgttcagaaaaaaattaggctattaatttttataatcaatgtttactagtaaaaaaaaaattacatattaaaatattactttaccaaaaatatataatacacgcaaa

SEQ ID NO: 74840 - DNA, 950 bp, Cannabis sativa
tcctttgccaagaattgatgactaattgttcgttcaacttcaaggaaaatagttttctccaagattgatttgcgctcagggtatcaatagttgagaattcgagaggaagacatttcaaaaattgcatatcagactaggtgtgactattatgagttcttggtgatgttgtttgggttaacaaatgctccaccaacctctatggaccttataaataggatgttcaaggatttcctcaataattgtgttatagtatttatcgatgatattcttgtatactctcagtgagaaggggagcacgagcaacatctttgaatagtttttctacgacttagagatcacaaggtgtatgcaaagtttaaaaaatgcgagttttggttatcaccagtatccttcttaggacatattgtaggacaagatggaatattgttgatccggggaaaattgaattagttgagaattggcataggccaaagacagttacagaggttcaaatttttcatggattggtaggatattatcgatgttttgtggaagggttttcttagatttctatgtcattaacagaattgactaagaagaatgaacagtttgtatggtttgataagtgcaaaacaagttttcaagaattaaagcagcgactgatttcagctttagtgttagctttaccatcatattaagagaaatttatggtgtattgtaatgcatccagccaaggtctgagatgcgttttgatgcaagttggcagggtcattgcttatgcttctcgttagttgaatgagtatgagcagcgctacccgacacatgatttagaacttgctattgttgtattccttgaagatctggtagcattacttgtacagaaaaaagagtgaaatttatgccaatcacaaaagtctcaagtacttcttcactcaaaaagacttgaacatgagacaaaggcggtggttgga

SEQ ID NO: 74841 - DNA, 1305 bp, Cannabis sativa
caaaggttttcatcaacaagctggtttcgattttaatgaaaccttcagccctgttgtgaagcatgttactattagagttgttctaactctagctgtcacacaaaattggacaattcgacaattggatgtgtgtggataatgcatttctcaatgaatggtgaattgcaagaagaaatctatctttatggttcagcctcctggttttgaggatccacaacatccaacacatgtttgtaagcttaccaaagctttatatgggctcaaacaagcacctcgtgcttggtttgagaagctatctggtacactcactgatctcgggtttacctctgctcagtcagatcactccttatttgtgaaattcaacaacaaccactgcttatatgttctagtatatgtggacgatatcctcattacaggaaatagctcaaatcaagttaccaatctcattgctgccttgagtagcaaatttgccctcaaagaccttggtaatcttgattatttcttaggcattcaagcagttcccacggctacagggcttctactatcacaaaagaaatatcttcaagacattctttgtcgtgctcagatgcaaggtgttaaaacacaaagctctcccatgaactcgggtctaagactttctcaatatgggagtgatactgtcactgatccacatctctacagatccattgtgggtgcacttcagtatgccacaattactctgccagaccttgcatatagtgtcaacaaagtctcacaattcatgcataatccattgcagtgtcattgggttgctgtaaaacgaattcttcgctatgtggcaggcactcttgactttggtttgcacttacaaaaaggttccccactggatatcacaacattttgtgatgctgactgggcggctgatccagatgatcgacgctctacgaccggtttctgcatttatcttggtcccaacctcatcacttggcaatccaagaaacaaactaccatttccaggtcttcctctgaggctgaattcaggagcttggctgcagtcgttacagaactcacatggcttcaatcactcatgactgaactcaaaattaaacctccctcagctcctacggtttggtgtgacaatctcagttcagtcatgatggcttctaatcctgtgttgcatgcccgaactaagcacatagagatcgatctctattttgtgcgtgataaagttctcaccaaacagattcagatcaaccatgttccctctgaacatcagctggcagatgggttcaccaagcctatttccagtaataggttctctctaat

SEQ ID NO: 74842 - DNA, 721 bp, Cannabis sativa
aataacattaattattagatcgccaatttcaaagcatggaagttctcgaaaagatatacatagcatagcaagtcattttgttgaaagttaaaacgtaattaattagtggagtagttgttaaatatttaatatatatttattttaatcaaaactaaattagattacaatatttagatgtgacatttcaattgattaaattaccttattaattaattaaacatggcctcatcatgtgatggctatggctctatataatatatctatctttgtcacactagctacactacactacactacaattatcactaactcacaattctcaccaactcaccacaaacaagaactttttaattataatataaatttgttaggattaaaaattatttttttttagttataacaaaaaattatttgtgattaaaatatattgcgtatttaattatgttatttattagttttaatttataataaatattacaactaaaaatatattttaatcataataaattataatttttgtaactaatatctttaactacaaatattttaattaattaacaattttatttagttttactcacaaaaataattttttttttataatgtttagtttgtattcatatacatattcaaatcactcctttttgcttcctatctaagaattattatttattaattggtacgtactattttgccacatttcaaataatattaattaata

SEQ ID NO: 74843 - DNA, 833 bp, Cannabis sativa
atagtgaagaatcaagtgtctttgagggaagcttgatggagatgtactcttgatttcaaggggaactccgaaatcaaattttgttgtgttctcttttattttctgtagtgttttttttttttcggtttctctcttctaaaccaacaaagatcattttagatctttgttgctactgtttttctctctctctctctctctctctctctcggttttatgtgtgttgcaggttttgaaggggtacaagtttttggccattgaagctactgctgtagcttgaagaaggaaggaagaagaaaggaagaaggctgctgcattttcaaagcttgaaggagaaaagaagcctgctgcgtttttttctagcaagagagaaggaaggaagaagaagaggttcggctgggtttgttgatctgtagcaagagagaaggaaggagaagaagctgctgggttggtctactgttcaaagaaaatagaagaaggagaggagaagaaggaggccggctgtgtgatttgaagagagtgtttgtgctagggttttggaaaagaaaagaatggttttatatgggaataaaaggcattaggttttgaaaatagatctgatattcaaaaagggggcatattcggttttgggaaagaatattccctttggatccgtatcaaaggaaaaagacagtcttgccgttggtttataactgttaggtgttggtgtaggggggcagttttgggattgccataatttcctacagtggtatcagagctcggggaagcaagaagattcaacaacacatggaaacaacgtcaagaaacaagaaagatcatcaaaacattgaagaagc

SEQ ID NO: 74844 - DNA, 641 bp, Cannabis sativa
tcacaaataattttttattgtgattaaaaattacatttacaaaaaaattatattataactaaaaaattgtcactaaaaatagttatttttttaacaataacttaaataaaaaatttaaacatatatgtattgtgtccattctagattcttttattctcaccataagtagttattatagattaaattattccgagagatcagacatgagaagcatctttgacaatatttgtatagtggaaaagagacctaggtcattcatgggacaataatattaatattattggtagtggacctaaaaaaacagcatatttatattatattattatacattaaggtattagtggtgtaccaatttttttttttttacgtattttagattccatgttttgtaaaagttactaattagattttctattttgttaaatgataaaatatattttttatttttcaaaattatacagatagaaccctgagctcaatttttaactattttatttttttaatataactaactttaagatagtttttaatacgaatagatattattaatgtaaccagttttatcataatatttttagatcggtttattattaagttttattttgacaaacaatcagttcagggtcttatttatacaattt

SEQ ID NO: 74845 - DNA, 1479 bp, Cannabis sativa
caggaaataaaatagcaatctttgcaaagttgtgagccactatattaacagatcgtttaacaaaagagacagaaacaataccaatagaatcaagcaaaaatttacagtcatgaataactaaaccaaataaagaaattatttttaaagaactccgtagagcttgaatcctgcatagacaattggattctagacaaacattctgccattgcctttctttgatccagctgagaatctctttgatgcctatattttcagcaagagatggttcaaccatactaaggggaaaggaagttctaccttcaataagcatcctattagaatctcgggccacaaggccatgccaaaactatgaccgccctcgaacaatgtcgcgtccatgttaatcttgatactattgacatttggtggtgtccaatgctctctcccattacctatctgatattcagaccatgatgcatccatgttggattttctagcattcttccattgatcaagatacgacttagcaaacacaacaacgttacctgggttaaattctttattttgccaaacgagattatttcgggctccccatatagcccaacaaacagcagccataagacctttctgctccgaacttactgcttgaaaagtagtgatgcaccggtcgagaaatgatgcaccaggtgttggagttgtgccaattcctacacagttccaatagacttgaaccgccctgcaagtgaccaagcaatgcagagttatttcctctgattcacggcataacgggcatagggtacaaacaaccactctcttaacacgaagttgtaccaatgtggggagacactcagagcaagcacgccacagcaagttagctattttcggcggcaccttcaagctccaagctccaaagcttatgtcagaagtcgatacagtgtcttcataccaaaactcttttttaaatttcatatataaacatcagtcaatttttatagaaaatatgtatatgaagataataacactttgagaaactacaatttttttttagagattacttcataaattttcaaaaataataaaaaatttatatttttacggatttataatatttacctttttatggattttaattttttttttttataaaaatacaacgtgttattttgtaaaaaaactaattttatttttacgttgttactaggaaaaaaataatgtgtttaaaataacgtttctctaaaaaaaatatacgtgaaaaacaaaaaccgtaaaaaagaaaaagaagttttttatacaaatgctatgcttggcctgtataaaccttgcatcttgtgattgcataatgcatttaatttgaggaatcataatgaaattagataaagttactattgctatttaccatttgctacactttaaacattaattaaataagattttaattgcacttcaagtcttcaacctcataaataaaaccctttatgccatattacactcaatattaat

SEQ ID NO: 74846 - DNA, 2010 bp, Cannabis sativa
ggacctattacctgaacctagaccaagacttgaacctagcacccagctcgtgacccggcacctgaaatggaacaagaccgggactcaagattgggatccagatctggactcgacgcatggactgaacctgtagtcagtgtttggatctaggacacacctccggacccaaacccagacccagacttgaatccagtccctaacccaaacttgaacccagtcccagacccaaacccataccttgtgacccaaaatttgaaccgaaactggaagtagaccaggacccaagattaggaccggaactaggacttggacctagaactgtaactggacctggatctaaggccccagttttggtcctagtttgggggcccgtttcccgggtctgggtccccaatctatgttcgagtcctaggtcctagtttgggtccaagtttgtgttctagtttgggtaaaggtctcgggttctcggcccgggtccaggtctcggttagggtttaggtctgagttctagtcccagtcccagtcccagtttaggtccaggttttgggtcccaagaccgagtttggttcttgggtcctggtttccggccctaatttttcggtctgggtttgggtccgggtcccagactggttctaggtctcggtcttagtttaggtcctaagtcacaggtcccgattctggtccttgtcgcggtatgggttctggttgagtttgggtttaggtttgtgtcctgttacagtcccaggtcttggttctcgttccaatcctggttcgattctgattgtgggtccaagatcgagtcttgatcccggttcgagtctaggtctgggtacgaatctagctccgtgtcttggatataaagactgattacgggtcaggtcaaagcctcaggttcaaattcagatctcggtcttggatcccagtcgtattcaagttcgtgtcccaggtcttgggccgagtcctaagtttgagtttgggttcgagtttggggttgtgtcccggtagtcaggtcttgggtttcgggtctaaggtcgggtcctatgtctcgagtttggcgttgagttttgggtctcgaaccccagttttggggcgtagttttgggtccaagtcccccatctaggtcaagatcattggtccaagtctgggtccaggttcaggtttagggcctaggtcccccatctaggtcatagagttcggttcccacgtctcaagtctgaatcttgggtcttgggtctcggtcccgatatagggttccaggtcctgatcccaatccaagttctagtctcggtctaggtttagggctcggtcctagtctaggtctgtgtcccagtcctgatctcgatccgggtctgagtctcgggtttgagtctgagtcctaggttcgagttcgaattctagtatgagtctgggtttgggtttgggtctgggtttcggtttgggtctgggactaggtcttggtcttggtctgggtctgggtctgggtctaggttttggtacgggtctaggttctagtctaggtcccgggtcccgggtcctaggctccatgttctcggtcgcaggtcctggcgcaattctaggttcaggtttgggtcttggtccgggtatcgatcccaatctgggtccacgttcgtgtttggttcggtgtctagatctagttatgtgtccaggtccaattcctgttttaaggtcctgaatttgagtatgggtttgtgtccacgtctagaaatggttccatgttcgggtcttggtacgattaaaagatcgagacaccgactacgggttgtgtccaagctttaggttgtgggtcaagatccggatcccaatcttgggtccagatcttgttctgattcagatcccaggtcctagttcgtgtccgtgtccaagtctgggtctgggacagagacgggggtcgggtcttgggtccaagtcccaatcttgggtctcgattctagttctaatttcgggtttgggtcaccaatctaggtctgggacttgggtacaagtctgaat

SEQ ID NO: 74847 - DNA, 541 bp, Cannabis sativa
taacgctataagtacctaaagttttaagtttgtaagcggcatagaaccaatatttatttttagcagtatattaacacagagtttgtactaatgaaattagaaaaaaaattacaattttataaatattgggtacttatgccgcgaaaaataaacattaagtttataccccttacaaacctcaaactttaagtacttatgtcactacatttttcttaataaataaaatatagatacacaaaaaaaaaaggaccaaagagattcgaaacatgagcatcttcacgaatttgttctaattaacttatatatatatatatatatatatatatgaaagtagcaattgtatattaatatattggataaatagcgatataagtatccaaagttttaagtttgtaagcagtataaagctaatgtttatttctagcggcatattaacacagagactatactgacgaaattagagaaaaattacaatgttacaaatattgggtacttatactgctaaaaatagatattaagtttttgtaacaccctaactacc

SEQ ID NO: 74848 - DNA, 1012 bp, Cannabis sativa
aaatttagaaatttcatagatttggatgcgaatttgtgtatgttcttcagataacattgttttagattgtgtatgcgaatttggatgttgttctgcatgttcattagtgttgtttgtttgttgaaactaagttatcgataagatatcgacaggttatcgatataatgtcgaccaaaattgaatgcagtataacctgttgaactgtctgtgatggtaatgtatgtcgataggttgtcgtaggtatgtcgataggatgtcgacatgactagaatagcaatgtttgaaccataatgtcgatgatgtgtcgacagtatgtcgacatgttatcgacggtaggatgtgaatttttaaatgtttgttaatatcgatcttgtcgatagtatgtcgacagtgtgttgatagtgtggattgcttagttcgagtggtcacttatttggaatatcgacctcttgtcgatagtatgtcgacacattgtcgataattgttgtaattgttgttgtatgccaatgtttgaaccataatgtcgatgatgtgtcgacagtatgtcgatcgacatgttatcgacggtaggatgtgaatttttaaatgtttgttaatatcgatcttgtcgatagtatgtcgaaatgttgtcgacagtgtgtcgatagtgtggattgcttagttcgagtggtcacttatttggaatatcgacctcttgtcgatagtatctcgacacgttgtcgataattgttgttattgttgttgtatgccatatgtgtgttagtatcgataggtggtcgacaggttgtcgctgaaatcatgttggtgttcactgtttgataatgtcgatatcgtggtttcaaatataaaatatcgatattattcaacaaaaataactattaaacctaaaaataattcaaatattcaaaaaatattcagcctcgacattattttaaagcagtttcgaacctaaaatagaaaacatgttattacaacgaataagtacactacgcctcaaatgcgggctttgcat

SEQ ID NO: 74849 - DNA, 843 bp, Cannabis sativa
atcgaatgttggaaagtaaaaagttcagactttttaaaattgctcgaatcacccaaagttttcaacatcaacaaataaacaaacattactcacttacttagtagtgtttatggaagcaagtaataaaacttactatagtagttcaagtgagaaagtatttgaaacacttgtactataatggctcattgttgtcaaatgtcaacaagcttactcaaagagaaatccaagctaggaaagaactttacaaatctcctgtgaattaatagaaagagaaatccaagttagaaaagagtatcaaagaattcacaaagcaatgctttcttttcttcatcaaaagtctaaggtgcaatggctcaaagatggagacgagaacactgcaatatttcatgcctcaatccgaactagaagagcagccaatagaatatattccatcaccgacatggagggacattggacggatcaaccaaaagaggtgagcaaggctttcctaaactattataatgacttgttgggcactaaaatggagagaagaatacctgtgataccaagcattataaagcaagggcagattattacagagcaacacaagcagatgttgatggtagagatcactccagcagaggttaaacaagtaatttttgcaattcctaaagacaaatccccagctcttgacgattttggcagcattttctttcatgataactgagaattagtaggaagggaagtaacggaggcagtgattgattttctgaagacaaagaaattattgaaggaacttaactcaacactactcacattagtgctgaaaaagaaatgccctgcaaatgtaagtgaatatagacc

SEQ ID NO: 74850 - DNA, 686 bp, Cannabis sativa
gagcgtacagtctttgggacatcatgacttattttgtatagtcgctaggcgacaaactttactatatgcacagtaaaatttttgtatatacttttgtaaacgggatcccgatttatataagtatattatttcagtgtttataattaattaagtaaaaatttaattaatcacgattttcaataaattcgttgattagcaacgagatgcacatttagttaaacatcacgttaacatgcctaaactggtagggtgttacaatccagaataagaaaagacaaactatgcccctaaaacaatcacaaaataaataaatcgcttttgaaagatgcaacaaagcttcaaatcgtctcgacgaacctaccttaaaaaaagcatacttcaaatgataaaattactaattaattaataaaagtaacggatttttttttaaataaatacctaagtttgattttgggtggtaaatacttaagttatgttgttggaactctatagatatatgacggttaaatattaagatattatccacgtgtcattttcttattgttatatttaattttttttaaaaaaaaatgaaaatttaataatcaatcaaaaattgtcacgtatttaacagctaagtacctataaaagttctaaaattataaaatattaggggaattaccccatatactattttttattttttt

SEQ ID NO: 74851 - DNA, 1447 bp, Cannabis sativa
  modified_base (872)..(876): a, c, t, g, unknown or other
ggtaaatcacatgatcgaaaaccctaatccgggaaacccaaacccaccgctctaggttctgttatattctctagggattacactaactcaagaaataggtaaatacccaactacttcactaaaatggacgagaatttaggaaatggaacattcggggaaccctgcaaaaattggcggctagccagttcacccaaaaattttaatttcttgctcaatcctccaccaaatgcaaccaaaccttcaagagtacctaattagggtatacacaatattttccaaccagtaattcacagaaaaactcattgaaactcaacatgccattaaagaccaaagcaaagctcaaagttgcataaagtcatcacaacccaaccaaaccagttgcttggagctaaaattaactcaaatcaaacttagatttcgaaccttaacacccaccaataccaaaaatcacatacacaaagtaatttcaaagttttaaaaacacaagtgtatggtaggattaccttagctggaatctcacttgaattccttgctgaaaacaacaaagatcaacagcaatctcccttgttctagctggtttcgaagagagagggaaggaaagagagagcttgttcttgaatttttggctttttcttatttttctacaaatgaaatgagattgactaattaatctcttgctgaatatattagttgctaggtgtcatataattgggcagccacctaactctcccctttagcaaatgactaaaatgcttttagcttaaaactagggtattttcaagattaggaataaaatggtcaaattccataaccctgcttcaccccggtattttattttcttcaatatatatcccactaagaaataaggttcnnnnnttacccatgtgatcaaactagctatccttcgcataatccattgtcgctgagcaaaaattacaaaaataatatatttcacatataagtcagataatagccctagagtttaataaaattttcgaaattgagaagttataactctaatgcccatttctaacaatgggggccgcaagtaattaaattcataaataattataaaaataatagaaattagtgctaattgcctttactaaaccaatttaataaagcggggtcattacaattatccccccatttaaaggatttcgtcctcaaaatctaacctgaatagctctggatgttaagtcctcatatcagactccaactcccaggtggcttcctccaccttgctatttctttagaccactcactttctttcaccaaagaaagaaatggtcttgtttcgaagaactttctcctttctatctagattctgaataggctgctcttcataggatgagtctaacagcagttcaaggggttcataactcaagatgtgagtcgggtctgaaacatatttcctcaacattgaaatatggaatacatcatggac

SEQ ID NO: 74852 - DNA, 924 bp, Cannabis sativa
  modified_base (741)..(741): a, c, t, g, unknown or other
ttggtatgaatttgctttgatctgtttcaaaaacactaaataacaacctattatgaagaaaaatatttaaagtattggtaccttatatatatatatatattttcagattcttccaagttgtttttgggtaaggtctgaatcttcttctgggttgttatcaaattctctgcataatagaattcgaattattattttggtttgttattgtgtgatttcaaattaatagaggttgtaatctttttttttttttctggtttaccttttgatttaaattttccagaattattttgttttgttgttgagatcttcattgcgcccttttcatttgtacaatttttttgaacttgaaatcgtgccttagttgagaacgaaaatggaggagatatagaagctttggtgtagctggaaatagaggagaaggagagatgaagatgggggctgttttgtttcagtccgtatatttgaaaaataaaatttataatatccttttttgtttatttttttcttaataagataaaaatgtaaattttggacctagaaagtctattaaagaaaaaatttaataatacatgaatttaaactaaattaaaacttgataattatatgaaagtattaatacaagaaattttgttgaatgctacagatgatttgaagtagttaaatagtgcctgtaacagtcgcaggtaggtgttaggtagtctttattcccaatctaacacactaataataataataataatnataataataataataatagttgtgattagcaaaaatagataacaaatagaaatgcaagatattattaacttgtagcactacagaatataatcaagaattaattttatagaaaaacagtttaaagaaaactattgtgacattcaatgaaagaaaacaatcatcaatattaataaaacataaaaa

SEQ ID NO: 74853 - DNA, 709 bp, Cannabis sativa
aaatgaatgagttgttagaataaattgaatctcaaggtatatatgaacaaatcatatgaatgcataataaccttttttcttattgaaaaactataaaatctcataatttaatatataagcatattattaatacattattttatagacgatattatattaaattagattatttagaattaaacttatatatttttattttttatcatgcattttaattgaattaacattaatatcattattatttcttttaattgtttgttatatttattaaataaattattcattatttttataataataattagtttgtaagtatataaaaagtcatttaataatttttaataaaaatattatattaataagagtgaatctcacaaaggctttaacaaacacaaataataatatattgtataatttatattagtgcgagactctgatactgtaagcttgtgtgtagcaccagttgtataaattttgggttcaatttaaggtgggattttttttctttaaaaaataagataattctctaaaacatttgttcaaaattaattaataaaatggatacaaacttatgatttaaataaatataacaaaaacttatgtagaacaataaaataatttaataaagagtgagtctaatagttaagttgctaaacataatttattttatatatatttataaagatgcctacttaatagttatattttt

SEQ ID NO: 74854 - DNA, 844 bp, Cannabis sativa
  modified_base (50)..(51): a, c, t, g, unknown or other
actattaaatgtaatttatatattatgttataaataattttagtaaaaannatgtaaatcggtttattcgggttatttgggtaggttagaataatatccaacccgtctaatatagtcattgagcggtttgagtttttcgtaaagttattcgggttgtattttttgtcggtttattcggtttggtttgagcgatttattcgaattgggtggtttgttaatttttttttgaacagccctacgtaccatatgtttgcaattgatgaaaagtgaggaaaataaatataagagagaaaagttgaaaaaaaaaataataaggctatgtttgaaaattaatttttaatagtgaaaaaataaagaaagaaaaatatagaagaaaaaaagatttttacaataatattggattttaggcaaaaatttataattttactatcacacagaattttttataaaaatattgtcttttttaaaaaacaaccgtaaaacaacaaaacagaacaattaaaacaaccgtaaaaacttaacacagtacacaatataaaacttatgcagtatttaaaaaaacagtatttttttaaaaaaaatcttcctcatagtaaaaaaattaaaaatttcagtatgtggtgtaaaaatctcaagagaaaaagtgttagaaaattaataatttctcatgttttgttaaagaagaattttatggaaaaaaattgattcaataaactttcccataccaaaaaagaatattttttttttcattacattttgtttatttttttttgttctctgttaaaattaaacttccaaacataatctgaaggtttggtaagaaagaaatttggagtgaagaata

SEQ ID NO: 74855 - DNA, 742 bp, Cannabis sativa
agataaattattatattgagtgtttgtttatttacattgttataattcatttttgctcatatatatattttcaattcgtaagtagaggaagattcaaattcaaacgactccaaatgccatcccgagttaaataaatctcaataattatcatacctattgacatcacttctttaaatattttcgtgtattaaaatcatttttttatgataaaaaattcattcaaacttttaatatatatcacttttggaatattaaatatccatttttttttaagaatattaaatattcttttaattatatgtttaatggatataacataatgggaaaaaaatagaaaaatacaaaaaacaaaaaaaaatgggaattttacatttatatacctacaatttaaattatttacaaaaatatttctaacaaaactattaataaacatataccgatgtaatatgttttatatgaacgaataccgatgtaatatgttgaatgatataccggtcatacattaatcctttttgtatttttaatcaattttcctgtactcctttcttttttttctttttttttttttttgccacatccacacaagcaacaactaaaatttcacagaagaccttctctctctggaactttctagtgggttgcatcccgttacagtgttctggttcacttccagtgtaatctctcccttgtggtgattctaagcctcatttcagctctttcgattacttgttttgtaatcttg

SEQ ID NO: 74856 - DNA, 921 bp, Cannabis sativa
agtcatacagaacctaaaccccaaaattgcataaccaaacataactttatcacttagaaatcaaagagaaataggagtagaagcataccttgggtaatctcttcattagatgcttaaattcttgctctaaacactcaagattttggttttaattggaggagaaaatctgatttctcttaggttctatggtagacgaaggtgaagaaagagaaagagtgagataagtttgaattcttgtttttagtttaatgcggataacactaaatgtcctttgtcctattctaaacataattcagctagaataacttagataactcaaacaattttcattaaattcaatataccactatcttaggtgaaataccaaaatgccccttaccatcacacttaaataatctttaaaatctaaatgtaaaatagtaataattctaacattccaaatgtctaattagcttgcttcgctaatttcaagatacctaatcataattaagtgtctctaatggccaaatcattacgctctactattaccggacataaagtataaaaatcataaaaaactcatatattacatatataatacatctagaatcaataaaatctccgtaaatgagaaattattttttaaaagtctatttctgactataaacactaatttctactatgaatcatataattatataataataattaaatctttatgttattaatttagtatatgtgaaattgcttcgctaattctaagatactcaagcataattacttgtctttaatggccaaatcgttgcgctctactgttaccggacatacagtatgaaaatcataaaagcttatatataacatatataatacatctagaatatataaaatctctgtaaataagaaattatttatttaaggtctatttctaactataagcactaa

SEQ ID NO: 74857 - DNA, 666 bp, Cannabis sativa
aagacaaaattaagtgcaatacaatttaaatcaattgtaaaatattgaccaccaagaaaacataggtgtaatggattcacatacaagaaaaaatattcttcaaaatcaatatcaaacacaaaacaaaataaatagaataatgagtatttcttctagattttagatcaagcaaacacaatatcaacattacattaacccctttaaatcttaccaacgatgatcaagttgaacataatccaaaggaaatcaaagaatataaagagcatttgaaagaaaacaacaacaacaacagcaaatgggtgaacaaaacccatgttgttgtaacagtaagaacaaaaaaaaaaaaaaaaaactgtgggaaaagtgatgaggtgagagtacctttggttgaacctgagaacgttgaaaggcggcaccgttggttctttttctgagaaagttggcttaggctctgacctgattagggacagagctgcaggacctgcacaagccgagatgggatgcaacggtaagagaagtggcataacaatggtaattatgaagaaatgggttgtttttgaggagagagtgacaaaaaaaaagagataggtttatgatgagatgagaggggagagtgatggggaagtagataaaatcagatctaaatcaataataataaaaaaaaaa

SEQ ID NO: 74858 - DNA, 1115 bp, Cannabis sativa
tgaccacgttcacacacaatggatatcttgtgaagtcatgttctttcagttttagttgtatatgtataagaataggcttggatcttcttttatcctcaagggttcgtatccttctttcacctcgtgtttcacttgtagttcactgtgctcttggttgtattccagcacttgtttcaacttgtgtactagttcttcatatttgcaattaatagatgaattgaccacaaacttcgtgatttgcataattcattccttgattaaattgtctattaataaatatgaaaaacaaaattgtgcttttttcctgacagtcaaaaatttaagcattgtaagtcaactatgggataactgtcataaaactgtaatgcaacagctatatttgcggtgaggcaactaatattaaaccttaaaacaactaaataatgcccctatgtaatacaaataaaacttaccacaatcgagttttctctgtatgagtcgtgtattgctaatttcaatatattgtagtagcactacaagaaatatccctattgccagcacatttttatgttggcaaaagtttggtattgcgctggtaaaataaaatttacttttgatgtgttggtaaaaggggttggcaaatcaacgttgatattagaacttttgccagcacaaaatgaaaagtgctagccaaaatgactcttcccaacacgtaaatacggtggtaaaagttagattttggccactacaaatgtgcgctagtaaaactttgaccgttttgccagtgcagtttgcaaaatgcgttagtaaaagttacttttaccagcgtagtagcgaactgtgttgataaaagtgatatttcttgtagtgtagcacactattgttcaactaatatacaacttaattagaactagaaatagaaaattttaatgggcatcgtcatgaaaaaaattgttagtatttttattcactgattaacaatcaattatactataataatattatgtggagaaataattgttagaattctctaaaccaacttaataacaaccaaatgaatatatattaataaactaatcatgttatagtttttttaaagagatttgtgttgaattgtcgatatgaaatacctgtaa

SEQ ID NO: 74859 - DNA, 725 bp, Cannabis sativa
gctccgcctagtcagtagattatcttctccatgacttggattcatgagaaagcccaattgtattatttattgtaaactctccaatagagggaaatgagaaaccaaatgtaattctcaaactactataaatatcccactaattttattgattaagggttggacactcttgtaaactttgctcatgcaaacttgagaacatacattttgtgtatttcctaagacatttacaaggaaaagacttattgaataataatgactcgtggactaaggctagttaatgccccaaccatgttaaaaactatttatctcattttatactttctcttttgatcattattcatttcagttcttattatttttattctgcttttgaaaatttcggtaaataaatactgattagttgtctaaaaaaatattgtagttagtttactcaaatttatatttatgttatgtatattatatagaataatttactttatatgcaaactatttatagtatatgacaattcatgaatttttataataaacttgaaagttactaaaatgtatcttaaacataaattatacagtgactcccaatataataaactatataaataactaaaaaaaatctattaatatgtaatatgctttaatagtagtctttttaacttttcatatttaaattattaatttttttttttaaaaaaaatagtcttagataatttattttaggctaattagga

SEQ ID NO: 74860 - DNA, 638 bp, Cannabis sativa
ataaatttaatatgtgaaaaacatatatttctttaccgtcatcaaataaaatattcaaaatcaaaaaaagtcctttgtagtttattttatattattgctaaatattattgaaaaataagacagtaatttttttattttcaagttatatatgtaagatttgttgatcaagatataattatatttttttaatagcaatttttatgtcatcttcaaatacattaaaaatctaatgagttataataaaataaaatttagaaaaaaaaaagaattactttctatactattttttaattttttttttcaaatttacgattcgggttgtttttgtagctagtttctccggtagtttctatgtgggttattatacggattttagttgcgatttaagttgctccgttaattgttatagagatttctatgtggaattctgtaaaaatatatatatatataaaaataaaaaataaaaactgttttaaggtgtgaaaataaaaaaactcctaaaaaaataccaaataatttattgacaaaataaatacacttttttttttgctaatttaatcattgtatgatgtttaagatattatttagtttctttatttatttttattagaaaaaagacttgttgaaatttctctatg

SEQ ID NO: 74861 - DNA, 659 bp, Cannabis sativa
  modified_base (62)..(65): a, c, t, g, unknown or other
ttttacatataacaatataaaatttaattactcattcaaactaaatgaaaatactaattagnnnnattggatgttggatgtattagatttttggacgccccatccagaatctgatccgatccaattggatattaaaaaatatcatccaatctgacccgatctcaattggatatccaatatttgacggtcgattgtaattgaatcggtcaattgtcattgaattggataatttatgcaaccctaagcaaaccaattgtttttattaattctctctctcaattctattattttaaaaaatattaataaatgttaaatattaaggtgattattttaatttgtgaaaagcatatatttaatcaccattacaaaattaaatatttcaattttaagttataatatataacatatatatattacttttttttatgtaattagtaatttttttaatataattcattatgtatacgataatattttatttcttaagtttttatttttaaagatctattaaaattgctcgataaaaataacttagataaaatgctatgtggtaaaatttaaaagtgaattaaaaatactttttaataacccatatgaagttggttacttatttaacgttaattttttttagcaactttttatgttaattttaaatattt

SEQ ID NO: 74862 - DNA, 1126 bp, Cannabis sativa
tctttttaaaataaaatttaaatattttattgtatgtacgtgtgtgctaagtaattattttaaatttattttttagtattgtgaattattaaaaaaaaaattaaaaatttatacgtaattttaaataactactttgtacgtaattatgaaaaaaaaaattaaactaaaaaaatatttaaatatcgaaacaaataaaaatatactgaaacaccttaatagtagccttgagaaggtattctagcataccaccaaattacataattctgattgattaaaatgtgaagacataatatctatatgatggggtatttcaactacttcttatataaacatttaaaatatttagatataaatataaataagtgaaacacgtgtatgtcaccacatatatatacatcaaattttaattatattaatataatgtattttgtatcatgcatcaataaatgttagcaatcatttcttatattcttctttttttagaaaaacttcacctcattaaaatcttccgaatcattttttattattggacactactaattaatttaatttgtggtgtttttatattatatattatttttttttaatttttttttctttttaattgtgggatagaattttttttcaaaaaaattgtatatttttttatactgtatactgtgttaagtttttactgttatttttcagttgttgcgcggttttttctaattgttttattttattattttacggttggttataaaaaatatatatatttttataaaaaatttcgtacagtaatataattataaacttttgtctaaaattcagtatttttgtaaaaactcctaaatttatttatagtagaagagacctttcactaagaactagggatatatatttataaaatagctgatccaatccgcacgatccaattcaatccaatttgcaaagtgcggatattcgcacttgtgcggattagattggattgaaaaattcaaaattcagtacagattgaatgttatttgacatgtaaaagtaacagatcaaatccaatccacacacatttataaaaaaaattaaaaaattatatatacaattaatattttaatgtgaaaaaatagtaatttaaaagtctaatgcatat

SEQ ID NO: 74863 - DNA, 1107 bp, Cannabis sativa
gaactattgcgatagagcttaactaagaactttattgtcaaaacaagtcttagcgaccggaccaacttatcacattaatgttaattacgtgcatattataaaacaaatatttgtaatatgatagatattttaataaagttggtaccatcagagtcggtctaggcgtagcctgcttatgaccagggggtgtgctgggtaccatcttgaaagttataaaaaaatatattatgttactataatgttttaatgtagggtaaatattatttggtatgttttatggagatacaaactttgtaagtttatatttttaataatacttatttagtatgttttttttgacaataatacttatttagtatgttgtaatttaaaattatacatattttaaattaaatttatttaataaaatttataatataatcaaatttccttcatttctgagtttaaatttaattaattgtatatggtaagactagatgagtattatcaaaacacaagttttttttttgaaattgatcaaaacacaagttaagaaatgagtatttactctattttgtgccaatatcattattttaatattgttattgctatatttttgtttatatatttgagtaatttgcggtataaatacctaggttaaactcttagttgtaaataaatacttaaatttaatttttggcggtaataatacctaagttatactgaaactctgtaggtacctcaacgttaaatattaagtcattatccacgtgttattttcttagtggtacacaaaaattatttttttttaaaaaaaattaaaaattcatgacttggatcaatcagggattgccatgtggcattttacttaatatttaacaaacaggtacctacaaagttctaaaagtataatttaggtattattgccgccaaaaattaaacttaggtatttatttgcaacaaagagctaaacttaagtatttataccgcaaattactttatatattttaacaatttcggtgatatataaaatactcttgagatacatttatacatttacaatatacaaaatgaagtattaatatttggggacagttattatcgcaaatataatgcattagtttcaca

SEQ ID NO: 74864 - DNA, 740 bp, Cannabis sativa
gtaatgggttttatttagggcacaaaatccaacaggggaaagggaccccaaatatccatgtggataagatcaaaaattttggcagccatgttattttgagaaataaatggaagctttttttgttttgcaaaatggcaagtttgacaatgaaaatgatgagaatgatgaataggtaaattgaacattttattgattttattggtaatcaatacagaagggtgtccaaggcgagaatgccattggtttttattacatgaaatgttgcagaaagtaaaaacattgtttgtagaacatgcttcctgctgtatgtaatagaggttgttgatattattagcaatcccaatcctcaatgttggagaatgcccctggattaaacaattgttagtagtaaaaatcatagtattggagcaggtttttaagagagcactaatagagagcaaattgaacctaaactgtggcacatataggacattagtaagagttatgtgtttattgataacaacagtaccaattttagcaattttaataggtgtgccatcaggtaaagtgacaaagtgattgtgtttgtgtgtttgaaatgattgaaaacatcggttatcataacaaacatggtgaattgctccactatctacaatccaaaaattgtaaggaaaatcagtatttttaccaaaaaaattggtgacaacaggggtgtcatttgaggtggaagctgtaacaacctaactagcataggcgtatta

SEQ ID NO: 74865 - DNA, 727 bp, Cannabis sativa
aaattggattgaatactaaaagataaattctaattggattgagtcgtttattaaatgttattctcaaaatctaattaaatataactatttacatgtcaaaacaaaaacaacgggcgcatcataaaattttccattaatgtatgtatgtatagatttttttgcagtaacagttaggagtgagtaacatctaattcaatccacttgaatttaataacataaaaattagatatccaattacaattggattgggttagataaagttagattctaattggattgaatcgtttattgaatgtcattctcaaaatttaattaaaatcttatccaatctaattacatttatgtatatcaaaaaaattatttatatttatttatgtataataaaaaaaacatatcttaattatatttttagtgtttttttttgttgttgttgaattcgtaacatttggttatttttgtatatttgttgtgatcatgatcttttgttctattttattaattggtaatgttgttgttttactggttttaaatttttagatgcactacacttgtaacaatgatatttttatggagtattaaacttaaataaagagtgatatttagtttctacgtatttttctttatatttttaagttaatattaaaaattagttgtgtaattagatatctaattaaaaaatcgattcaatctaattaacaattaaattagattggattgcattgaattt

SEQ ID NO: 74866 - DNA, 634 bp, Cannabis sativa
acatcgtgacccagaaaagaaaaaccacatatcctttaaaattcatcattggaaaatcaccataagatcaaaactaaatagattggtaaaaccaaatactggaataaggatattaagagatgcaataatactattcaggaaaaccaacaacaaaactgagatttaattctataatttggaactacctatgcttacttcaaaagaaactgaagaaaaaaaacgaaagcaaattctgggatcccagcgaagaattaaaacatccataaatttaaaacagcatccaaaaacattttaacagagaaaaaactcttgaaccaaagccgggatatcagattaaacaaaagagggcaacataaacaagcaaattaaattacaaattcaaaaggaaatctgactcaaaattatgcttcaaaacatttccaaagtaaataaaaggtaaaacaaaattaagaaaaaaacctaaccttttccaaaatagataatgacctaaaaaatttcaacacttctcaattgcttctgagaatcagcagaagaaagagtgacccaaattaccatctcccaaggccaaccgagctctccatctccgattgcccatcctaagccgaccccaaaacatcccaaatccctcacagaa

SEQ ID NO: 74867 - DNA, 596 bp, Cannabis sativa
atattgttgggaaatttttaaaaatattattttttatgttttatttacagttttacaacctaaaagttttatgtaaaaaaatacacttttaaagttttaaaattacaaaaatatattttgctcaacaaaaagtaaaaaaagaactaaaaaaccatctagaaatcaatctcacaataattataaaacaaccagaataataatttcatgacaactattaataaacccattataaataaattataacacaacaaaaaaataatttattatttttactgaaaatgtattttagtaaataaaaaaattcaaagagtaaaaatgaaaaaaaaaaatcgtgttgaagtatttttttaatttttttttttcaaattattggtctgttttgtaattttttctaggggtgttcataaaatagtctatccaatccaatctgtaagatccaatccaattcaatctgcaaagtgtggatattcgtacttgtgcggattggattagattgaaaaatttaaaatccgcacttatgcggattggatgttaaatgacatgtaaatgtaactgatctaatcttatccacacatatttataaaaaaaattaaaaa

SEQ ID NO: 74868 - DNA, 1223 bp, Cannabis sativa
ttctaaaccaaaaacttgagcaatcttccactgttcaagataactcaccgcagaagaaacgacttccaatgcaacaacatttttttgattccaaaccttgtcattacgggctccccaaattaagcaacattttacaatctttaatcaaatcaccaaacactgaaatcattctaaaaaagctcgttaacgattgtaccacaaccaaacagtcggtttccacaaagacacgctgccacaaacttgagttttgttttacccaactaagcgcctctctgaagctcatggcttcagcaaccacattcccttggaaaagcttggtccttccttcaataaggaatcctttgtcatctcgcgcaaccaagccaaggccgaatccatttaaatctgcaaagatagctccatctacgttgatcttaacactatttgacggtggtaacctccattgctccgccccatcatccttggttagaccggacaatgtagcttctaaaccaaaaacttgagcaatcttccactgttcaagataactcaccgcagaagaaacgacttccaatggaacaacattttttttgattccaaaccttgtcattacgggctccccaaattgatatctacaattacaaaatttgggcaccagcaacctgtcaagaacaaagagagagataaaagtttaattgggagcactggtggggtgtcagccaaagggactccgacgctcaagtcagtacgattgtagtaaaaaataaatgaaatgtaaatggtagtcgatcggatgagtggacaagcgtacagacggattaaaggaacaattacagtggagaggcttaagagaaaagtttagaaaagacgactgtttgcttgagtaagtgagtagtgtgagtatcaaatgttcgatgccctgtgtctgccgtatggtttcttttatcgtgtgtcctcagtaccgttgccctccgtccacgtcacccgttagactcgttcaagttggttgattccttaatttttagggagtagtaaccgtctttctgactagttcaatatatacttggttccacccgtttggctgaccggctgggctcaaacccggttgtttggatccattattgatgggctcgtctgacttgcatattggacttctcaaaaatatcgcaaatattaagtaaatttttacctctatagtcatcatcacatctcgtttataatcactacaacatattaccctatta

SEQ ID NO: 74869 - DNA, 1064 bp, Cannabis sativa
tttttgtgtttgtaattgtattttcaagtttgaattagaagttaatagagtttatatgaggtagatattcctctttctcaagaagttttagcaatatttagtattagcattgccataagaagcttgttttcaggacagtttataaggttgagaaaatctgacctacatgctagacatggtattagcataagtagtatgtacgctttacaatcattaatattaatattgccattaagaagcttattttctagagagattttataacttcatattttgtgtagagtagatagatactgcatattagggtatctatatggttttcaacaggctaatcctagtaatttcatcattttttattttattttattattattttttttttgtcataagtcatctggcttacctttttgtatattttagttgaagatatgtcactccactagttgctagctattcggttatatccttcacttggatctaagccaaaaagatgatgtttgtgcaaagttctatgctttacctggtgaataatgaggcaaagttctatgctttaggtggtgaagaatggtgcaaaattttatgatgttgatttctcacaaatccttgatgatttagaaaaaggaaaaaaagaatacatggtttctccaatttgatgtcagttcttagcttgccttttttaaagtccattgtcattagttagactgtcctatagctaatgtaattgattcaacaacttcgtattgtactaccttctgtgtctacgagatagaggatggcaaattagttgctatcctccatatagcaactgttattttcaacaattcgggtggaaactcatgattcataattcatgcatgactttattgtgtgcaagtaaggcaattagttttttggctcctggctgatgagtattcaatcctattagaatagtagtgattttcagctctcacgtattatataaagtacacaatttgatacagtggttttatagtaggcacatttatctagaacaagttttctccacaaaatgtttgttccaccgttgcttataatgaaacctaatg

SEQ ID NO: 74870 - DNA, 1110 bp, Cannabis sativa
  modified_base (223)..(225): a, c, t, g, unknown or other
agtaaggtgcaaagggaacgttcgacaaaaatccaatccaaacatcgaagtggtcggagtggaatggtgaacgtaaggaaagttgtggtaagtaatcaacgaattctaataatgtgctttaaaatgtaatttgtactcatgtaattgttataaaataatgtagaaaaaggacctcgacgttcaagatcccccatgccaccgtgtttggatcaaatctcggacnnngagaacaaaacttgtcactgattacgacaaaaaaattgctgaaatgatagtaagtatatagtaattcttaattgagtactactaacgagttagtatatataatatatactaattgcttgaatatatgcgtgcattaggctcaattagaggagcaacttactgagggacaaatttaggtccagggccaaaacgatatcctgacgcaggcgctcaggacaccagagcatcctggacgtgtcagggctgctaggtatgctagtacttgaattgttgtttccttagttatacaaaaaaaaaaaaaaaacatagctaatttgcctttcatgatttgtaggttcctgaccagggcatctaaactgttcggcaggaagaaaaggaagtttttgatgttggggctcggcaacagaaggagattgataaattaaaagctgaaatccaatcccttaaagagaaggaaaacactgtcgaacaagagaaagaagaagaggtggctgattaggcgtatgttccaaacaatatgctcgtgaggatgagggtcgaccctatgctgaggagtttgttttcctcaacgtgccacctctcatgtacgtacgatttcgatgaccagagggcccttgatcagcaagtatatctctgctctgacaatatcgacaacattgtggcccgagcgtatctgtacgagcatgagggtccaatcactgttcattgcaaggactacgataattcacatgcctaggttctgatttcgaaaatggtacaagaggatgctgaaatcccaatctcaattgaagggtgcagatatgttagggaacatgttccttccttggcctaaattgcaacagccaaggtaacttttgttagaaattatatttaattaataattag

SEQ ID NO: 74871 - DNA, 732 bp, Cannabis sativa
  modified_base (168)..(172): a, c, t, g, unknown or other
ggtttgagttattacgtgttacttgtttgtattcattgttatataattggttctattttagttataactcgtttgagttgtttcgtgttatttgtttttattcatgataacactgttatagaactgtatctattttaattgtaactgatttgagttattttgtgttannnnnttttattcattatgttacagaacaagttatatttcaattacaactagtttgaattatttgcttttattcattatgttatagaatcagttctattttttgtttatatctgagagatatttacttctggtgacttttcctgtgactttttctagtgacggtgatttttttgacgatttttctagcgacagtgacttttctggtgacgctaacttctccggtgccagtgacttttttggtgatttttccggcaccaaagactttcccagcgacttttccagcaaaccttattattacaagttttattaaatttatttattgtttttttttttcatattttaaactttaattactttttaatcccatactttttttacattatttatttatgccataaaaatataaactctactatatttttccatatttatgaagaaaaaacccctaattattattataattttcattattaagggtatttataaggaataattacataaattattttttttacttattttatatttgaagatttttttttatatatttttatattatttaat

SEQ ID NO: 74872 - DNA, 1025 bp, Cannabis sativa
  modified_base (52)..(63): a, c, t, g, unknown or other
tggactattttatttatttccgtttagaaaaaaaaacttaaattaaaataannnnnnnnnnnnataaataaataaaaatgaataatttgttgcaaaaaaaaaattaaattaattaaattacataatttaataatataaaataatatatccaatataatcaagtatatatcataaatatataaaatattttatcatattttttatttaataaatataattgaataatataaaatggtttatgttaaatactaatttaatcactaatttgatataaatattaatttttgaaaatatttatataagttttctagtaattcaaaaacaatatataattttattgtcatattgtttctcttagaatcaatataactaactattgtttaattaataatattttaaattttgaaaacttatgtataataatttaaaatgatacattttcattaattttaatgaacaagtttttgacaaaaaaaaattataaaataaatgtgtgataattctttcattttaattcttattaaatttaaaatatataaataaaatcaaaattaaaaaaaaacgataaaaaaaactcgcctgcgagggattatttatcccaccgtgttggatgggataaataatcccagacagatgagattagctggattagttatctagacttctaacttgcccaaacattgaattggacaaattagccgatttaatctaatccagtgctgcgtaccaaacgggccattagagtttaataaaatttccaaaattgagaaattataactctaatgcccgtttctaataataggacctacaacatagtaaaatcttgcataattataaaaaatcattaattaatgctaattgcctttattaatccatattctaacatgcaatcattacatattctgttgaaagattatcattggaatccccttcctccaggtccccaaacattcttcaaaggcggtccaatactttttccatttttgagagaatttctcctgacaggctagcttttactgagtttc

SEQ ID NO: 74873 - DNA, 808 bp, Cannabis sativa
aattattttatatacaatatattccttttttttttaatctattctagtttttttttctttttttttttataaaatatacatatataaaataaatatagtatacaaaaaattaaaaataaaaaattatataaaattttattaaaattaataacaaaattatatattatttttcaggaaaaaaaatatgggaacaaaataatgtgttttttttttttttgttgttatttgaatatttaagaaccctttaattatcacgtgttaccaatcgttctcatatgacctttttttttaacttacaacaccttttttttttatctgactgttataattaataccttaatcttaattacccctttataagaactatgtataatctactactttgaattcttctaatcgaagttaataattttcatttacttttaatgagttcttttaaaacataataaacaattgataaatgtatctgatcaatttttgttaaataaataaatattattattcttcccaaatacctaattaaagggcattttacataaatgtatacattttttttcaaataattacaaaaaatgtgcaaaaaaacacaatttcaaaaatgtacatatttacaaaatttcatacaaattcttaattaaattataatagatatattaatgattcaactttctatatttaggtttgtataacaatttttttatgactaattgatgtggtattagagccaatttaataacatatcattttttaattaaaaaatcattatcaaatttgaaatgattttatattgtataatttgatcttgata

SEQ ID NO: 74874 - DNA, 938 bp, Cannabis sativa
  modified_base (304)..(313): a, c, t, g, unknown or other
  modified_base (344)..(344): a, c, t, g, unknown or other
  modified_base (692)..(698): a, c, t, g, unknown or other
  modified_base (771)..(777): a, c, t, g, unknown or other
aaaggaatttttaacggaacaagttatctccataattcaatataaaagtcttgttaaacataaagatccggagtgttccacaattccatttattatcggtgatcatgtgattaacaaagctttacttgatttaggagctagtgtgaatttgttgccttattctttttataagcaacttggtctaggaaaactgaaaccaacatctattacacttcagttagttgatcgatctgtgaaaattcctagagaatatctaaaaattccctagaccacaaaagttatttcgacctcctgattgggacannnnnnnnnntcccgataagttacgttctaaatggactggnccatttactgttcgtactatttttcctcacggagctattgaaattgaaaattatgaaattggtaacatattcttagtccatggtcaaagattgaaaccatttttagaattaagacaatttgaagtggaggaaacgatccttcacgacccgatttaccaaggttagtgaattcattcactatcggtcctatctttaagtgcattctttatttttcaatattttattttattttttgttatttatttttgtagaaaattaacatcaatcactgtgcatattctctattttttcggttctcatctcatattcttatcatatacatatttagacgttgaggacactgtctcnnnnnnnttgggggtactgagtatattcttgcgttaggtttgataaatttcttacctttttgaaaattttgagtcaaatnnnnnnnctaattatgtgaataaataaatattgtattaaactagtttataatatatttagttacctagatagtaattccagtaaaaattgcacaaaccaaacatatgatttgattgtttttaacacatttaattgagaaaaatcttaagttaaaagatttcttttttt

SEQ ID NO: 74875 - DNA, 826 bp, Cannabis sativa
atgaacactaaactcacctagcatctcgactgtccaagccaaccaaagaacaccatcgtcccctcagatcacccatgcaaccccacaaaccccctaccggcaatcacaggagcgttaatggccaatgaaaaacacccaatagctagtggcatgcatccactccacaggccgacaaacaaccagagctggggaagagcctggtgttctcgaaactcaaacaaatggttttaggcaagctccaggataacatcaagtctcgactgagcaccaccaaataacatagagttacgatcgtaccagagccacaaaaacaccaccattaccatctcaaaatactcacatgctagctgatcaaagaggaaaattataatctccaataacgggcctgtgccgcaacgacaaagcaatggccaaacctctcaattaaccctcattggaactaagacagaacagaacaccaacacatgttctggagtttccgaatcctcaccacatctcaaacacactgtcggcacctgaacttttcgagacacaagttcagtagccactgttagcgcctgattatgaaacatacgacaaacgaggaccttagcatttggcgacactttaagcttccaaaccccattccaccatcgaacaattttaattgaatcaaccactccctccttaaaccgcagtgaccatgcctgtgaatagcgactttttacaacgccatcacgatcaaaataccaacaccaaccatcacccacaacccctatatagctaacgaaatagaaagaataatctcaacatccataggaagaaacatgttttgaagcttaccaac

SEQ ID NO: 74876 - DNA, 1008 bp, Cannabis sativa
agtttgcttccctatggggaatctcagtacctactcctcactgagtagtggcatgactaccaagagtggtagtattactttgcatattcatttattattgcttgcttgaatttatgaattcctttcagaataaagctcctagcaaagaacttaaataagaacttggaactcgagttgtggctctcaatgaaaccacaaaaatattgatactaaaaaatggccaatactagctcgctagattagcgagatgaatattgagttaagtaagtaatgtagagagacacacaatttatagtagctcacttcttattgtcgcgatagtaatagaactaagtctacttcgagtttgtatttctcacgagaattacaagagaattaactaaggaaagagcttaaatttctagatagatcgtacaaagagatgctctaaccttaaggagacttagaagaatgtaaaaaataagctagaagagctctccttttataggctatgaggtcctattaaaatattaataaaataatacaaaaaatatataaaaaaaattaactttaggctgatcttggccattgatgatgatataatggcgaaaatttactcttgatgaaaatcgtcaatttttagagtttggatcgcatccgttggaacattttcaggcaatctgtggaataaattgtacttgcctttgacacaaatttcggacatgaaatctttaaaattgcgatatgagtgtgagacataacttgcaagagctttaaaaggcaagttgaatcgcgccaatcgaatcaatattgagtgagttatgaccactttactaaaggttattcagcaccctacgcccaggttgacatcctggcgtcaacctggaagcaggataagtgaaaaaatatcacagacttgtattttttgatgcctaagtgataggggtgagcaacggtcgttttggtcagttttttacacaaaaaaatccaaaattcggttttcggttttcatgattataatccgaaaac

SEQ ID NO: 74877 - DNA, 1033 bp, Cannabis sativa
tagatattttatataaaaaaaaattaatgaaattttaatttaaatttaaaatacttaaaatattataaatatttttaatcatatttttgaatttattgacttaagtttaaattaaaataaaaagaaattatgtagatatttatataaagaaatttaaatttaaaatattataaatattttttactatgtaattttattattatttattttatattttaaattgaaatggttgtaatatagaattgattgttttttattttagttatagtaaacggattcagacaccatatttttcgtaaagtttgagaataaaaaaagctttatgtcaaatttacgaatccagtctatacataaacacaatcaaatttagttatgtgagtttcggttaagaatatagtaaattacaatatatgaattatcagattcgttacctaattaaaaataaaattaaaaattaaaaaatatatatggaatcatgttcaaataacacacaaatgtaacaatagttaaaaaaaaattcttaaagattaaaatttcaaactctatttcaaaaattttaaaaaaaaatacattacataattaaaaaattaaacatatatacattgcacttaacatcacctaattaaaattaattaaaaataaaactaattacgtgcgttgcacgtaacatcaacctagtttacacataaatatgtatacataaaaaaattatattattattattttacatatttaaaaatgtattattataattgatgttaagtgaggtgacacgacattatgagttttttttttcatatttttttagatttttttaaacttttaattaataataatttattattgtaatattaaaaattaaatttatttcttattatgaaaatgagcattagctttattatagtcattaataataatgataacactaattaatcatacatattttacccgtccttattactttattttatgtaataaaattttaatattttataacttattaaaattaattttctattttttacaattatac

SEQ ID NO: 74878 - DNA, 954 bp, Cannabis sativa
caaataaaatggtggctcagaccagggatgatagtagagctttcgcaaatattttgttcaaagtaacatatgaaaatattgggcttcatctcaaggatctggttccttacactcagtttttatatggattcttcggccaaggcattgctccacttagatagatccacctaccacttacagtgggataagctctaacaagaacaatagtaatggctcaattcttagtgatcgacgtgccttctagttttaatgtcatgttaggtcgaccttctttatatgacctgaaggctgctacttcagtattccacttatgtgtaaaatttccaataagaaatagagtgggttgtctaaaagaaaaccaaagagttgtacgagaatgctacaacgtcactctatttaaggccaaaaagaaagacaactcctaccagagttcagaaaagggtaaaagcattgcccaataggaatccgcccaagtggggatgaagatatagaccctcgccttgggaacctaatacaaatgttgggctattggaagagttataaaaagttgaaataaaacccaccatgccgaccaagaagctcaaaattggaaaaggtttgttgcttgaaataaaattagttttaataaaatttctaagaccaaacctcaatatttttcctggttgcacgaagacatggtcacggtcgatccagatgtaatgtctcatgctataaatattgatctagactttcatctcgtccagagaaaaggagattgatggatcaagagtgtgcacaagaattaaaagaatacatagaacgactccacataaatagatttatagttgaagccttctacccgacatgggtagctaaccccgtactagtaccctagccgaacaaaaaatggtgagtgtgcattgatttcactgacctcaacaaggtgtgccttaaagactattttctacttccaag

SEQ ID NO: 74879 - DNA, 1237 bp, Cannabis sativa
  modified_base (44)..(62): a, c, t, g, unknown or other
  modified_base (280)..(284): a, c, t, g, unknown or other
  modified_base (909)..(912): a, c, t, g, unknown or other
taaatattggggtccacatataaaattaattcacaaataataannnnnnnnnnnnnnnnnnngctaattgcctttactaatccacattactagatcggtcatcacaaaaaacataggctcacacaggtcaaattgatttagatgggccctatcatgtttctaggtttacacagatgaaagatatacaaaatttacatgtaacaaattattaataagatctattgacaattggactatgattaaaatcggattatttgatttgtcaacaagttaatcatannnnnttagatcaaataaataataggattttttaaaaaaaaaagtttttgaataaacaatttaaattaaacaaataatgcccatgtaacaaatgtaaaataagatatttacacttatataattaaattattatttaactaaacaattattttaaaattttagagttgtttaaaacaaccttaaatatcttttaaaaaaaataacaaaaaaactaattttaaaaatatataggtttattagaattattttataagattaaattaaatatcttataagataaataatttgaaaataaccaaaaagatattttcaatatcattttttaatcttataatttaataaaattaaaataaaaatataaaccaattttaaaatagatatggttaggtaattattatttcaagaataaaataataaacaaataataattatcctaattatatgttaaaatatctcaaattaagtctttttcaaatttttacaacagtatctaagttatttaaatattttaaatattttttataaatgtctcataagtaaaatgatataaaatatcttttttctaatttatgatttataaaaaataaactgtttaataaaataaccaattttaaatttgaaaatattatnnnnagaatatctataaaaatatctaggttaatttaaaaatttattaatcatttaattcatcttatatgataatttcaatataattttttaaattaaaagataaagttatcatttaatttaaatatgcccaatattaaattacctaatcttataatgaaataatatataaatattaaagaaattaacaaaattttaaaatgtgactataatttaaaggggttatttcattgttatacttcaaaacaattttttttgtatttttacgaaattctacatagaaatccctattgcaactagcgctacaactactctagaaactcaaaccgta

SEQ ID NO: 74880 - DNA, 918 bp, Cannabis sativa
ccaaatcaatccatttcataaaaatggaatctgctcaaacttgtaacctgaaattcaatcacctcacctccactcttctctatatttttcgagctttgttcgatcatgcttaattgttcatcctcttctcccttttggagtttatcaagatactccttgttcactttcttaattgcttctcttatctttttaacaatcccattagtaatggaagcttccccattaatactcgaggccggaatatgtgtgcctgcgaatactaagaagtttccaaatgagttttcagccaagggtggattcatccttggatgaagattcacagtgtgcaaaatagtatataccctttcttttttcggcttcgctacttctgttgctgctgacaatgcggcctcaaacctacttattatgaaagtagataaagtctcaacacgagaaggtcgaacattattttctttgtcccaatacattgctcttaaggcctcaatagcgaaaccattgaaaacaaaaatctttgttatgataccctttttcatgacacaagtttcggcttcaatcatggattgaggtctaggaggaaacaaagctgaggagacaaactcagggcggagcgattttggtaacacggtggttgttccacctcgagccatcagtgcccaagttttgacaaacttcatccatgacaaagcatccgcaatcttatcagaaaggctcataccaaccgcgattcctccacactcgaacgtgttaagttgaactgcaaatagaatttgatgagcgtcatcactttcatcatgacgagaaattaaaggacaaaaaatgtcgagttcttgagctattggattggacataacgtgggaaagtcgcccattcacttgagcttccacgaagggaacaccctcgtcgttgcaatggatgaat

SEQ ID NO: 74881 - DNA, 910 bp, Cannabis sativa
aggtggcctcttcactttggaacaagctctggaacagtaaagtcttgaagagacataaggtgctttggtggagtattctctctaatgttctgcctttgcgagccatcctcaataagagattccaggtggatgatgtctattgcccaatttacgggatggaggaggaatcaatggagcatttgttccttaagtgtaactttgttttctacttttggagatcttcttcgtggggtatttatccagtgttggactctgatattcgtgtgtgggattgggtcaagttcatccggggtttaaaaaataagggcattaatgcggatgaagtctttaactatgcttctattgtgatggatactatttggggcgtcaatgaaaaggtgaacaataatttgttaaataatgtgaaccaatgtattgagtatatccacttttctttcgcaaatttgcaaggtactctccttcccgttgtttcctcgatctagagagaggattgacaacctcctcctcaggattggctaaaacttaattgtgatgttaaagtggaattagaaagttcctgcattacagtggttgctagaaactattttggtaaggtggtttggaccaatacgactagaatggattttgtggatgcttgctatggctcaaggggcacaagtccatcatcgtggtgatcaatgctctcaatcatttttcttcgtgttgggagattgagaactattcttctttttatttgaaactctctagatgttttgatggctgcgtttttacttgtatacctagaatttgtaattttaccgttcataatgtgcctaagtacccacaaatagtatggtagcttgaatgtttcttctattctgcaaaacttattttctaatgaccataagatctaatattaatcgatgaacgc

SEQ ID NO: 74882 - DNA, 1013 bp, Cannabis sativa
gtaaccgtaggtggaataacatttagaacatgttgcagtgcccaatggtcttcagtttgagcttgaaaaagattttcaaaataagcagcaaccaaaccagaaatttcattctttgacgtgtggacagtgccctcttcatctgttataaacttgatcttattgttggaaaatcttgcagaagctttcgcatgaaaaaacttcgtgttttgatctccagattacaaccaatcaatccttgcacgctgtttccaatatttttcttctgaagcaagcaaatcatacaaaattgcttctgcctgctgtacttgctggtagtgagaagtcgagtgtattgatgtgttagagagagctgtgacagtagcttgagctgaggtaatttgttgattaaaatttccatacttagccctgtgccacgatcgcaggtctgatgcacactgagataagtttccatttagaacctcaattggattagctgtagaggaattccagcaatgagagataatgtgagaacattcggcatccttaatccacatcttttcaaaacgaaatcgcgaacgatatttgaactctgaaatggtagattgcaagttaatagtactcaggattgcacgatgatctgatccgtagtagccaaggtgtgtcacatgtggtgtggcaaaacgatcattccaaaccatattaataaagacccagtctagacgttcctgtagagcttgaggatctcgtctgtttttgcaccaggtgaagtctggacaagcaaaaggaatttcaaggagagcgcaaaggtctaaagaagtacggaatgccatcatatgattgtcagatcttaaaggaccagagtttttgtgcgaatgtgaaaaaatttcattcaaatctcccactagtagccacggatccaaaggagaaacatcagcaagtctctctaaaagtgtccaagtgtgttttttattgattgcttcaggaaaaccatatacagccgaaaagtgccatcgagggccatcattgtacgagat

SEQ ID NO: 74883 - DNA, 513 bp, Cannabis sativa
caagtgagctataggtggagtttccaaaaataacaagaaaaagtgtgaatatgtggtagttgtggtaggtataattatttgatgaatattattggtgctcaatattttttataggtgacgctctacgattagttcacgatattctttaaaaattattttctgacccgatacttaattatacttattaacaccgagaagagtattaaacaccaataatactttttagcaataactaactcaatctagttgacttttgatatattcttccttgtaggctatttcatcttcacactaatacatgtctaaattttgaccattacaaacataaaggtagtatgtttggtaacatgtataacaactacatatactatataacttagatattgacagtttcattaaactaaaaaaacataaataaagccaagtcctagacttaatttgccggctggctccaaactcatatacttggttattttttatatacatatcataatatacacacatatgtgtata

SEQ ID NO: 74884 - DNA, 744 bp, Cannabis sativa
aaaggatcaacctccaactcttcatataaaatttggcgcatttgttgtagggttgtgtcaattgtaactgtcaacgtcaagcttctttgttaacccaattataaccctcaacacaccaaacaccatcgtacaatacaacaagaaacactgtcgatactgcaatttcaaacaaaacaaggtgagtataggaaaaaatactaaaaaataacaaatatcgacatcccatcgatatccatcgacattatgtcgaagaaaacaacaacaaaaagtgtgacagtttccatcgacacataaacgacatactatcgacattatgtcgataacattatcaaacaaaagggtggcagtcctcatcgatatatcatcgacacaccgtcgacataatatcgacatagcctccacaatgcaattcgcatgtcaaacacgtgtacaatggtaattaatccattcaactatcgacaagctatcgacattgtatcgatattcactcgataaatacactttggatgcgtttcatttgtatggttacacatttaattttaataaattttacctatgttcccagcaactcttcccaactgccacattgcatgttagacacgtttattatcgataagctatcgacataacgtcgacattgtatcgaaaaatatgtatgctgtttcatttgttttgcatgttgtcgacaagttatcgacatagtatcgatattctgtcgacaaatacacacttcatgcgttgcac

SEQ ID NO: 74885 - DNA, 693 bp, Cannabis sativa
  modified_base (50)..(61): a, c, t, g, unknown or other
  modified_base (304)..(308): a, c, t, g, unknown or other
cttttgtttcaaggagaccaattatcccacatttttaggttagaagaacnnnnnnnnnnnntgttttttttttttttttttcgagtgggaggagagaaagacttatgaggattaaggcttggaatataaagagggaatatacagagaatggaaagacagttatttcttttacgttttctaatttattgattggttgagaaaaacataaatacttaagtttaacttctagtggtaaataaatatctaaatttactttttgacggtaataatacttaatttataattctagaacttttgtaagtannnnnactgttaagtattaagtaaattgacacgtgtaaatttttaattggtgcaagttatcaaatttttatttttttaaaaaaaaataatttaaatatactaataaaaaaatgacacgtgcataatgacttatgtaactcataatataaatgaagtattattactattaaaaattaaattagatattattactattaaaaattaaacttatgtatttatttacattaatcttcaaaaaaaacaatatgttgttaatggcaatacagaatcatttaatgacaaacgacatgtcttaagtttgtgttttcaggtaacacgataagtatctaccctcttcattgatttttttttttttttaattagcttgcataattcatcattttcctatag

SEQ ID NO: 74886 - DNA, 933 bp, Cannabis sativa
gctatcccaactttcaactcttttattataagttagttatattattagtatactaatgtaaatagtataaattattatattttttttaagtaaaacatatttattatgttacatgtttagtataaattgtcagaggtgttgcactaaagtaactaaattttctataaaattaataaaagaaaatacatcaaaatagtacaaccgttcaagatgatcaaagtgtcataaatagaaaacggtcttacatgataatttttctaaaaagaaataatatagggaaaaagaaatttttttaaaaaattcaataaaatcactttctaaaaaaggtctactgatgcaccccatatctgttttggtatttgaaagaattttttttaaggtcgtctacgttatagttatttgattagggtatcctgtaaaatattaagtaatttaaaacaatttaatacattgaaaataaggttcaaataatctattttacaagtgtataaaataaaatagtcacttgtaacatactatttgaatcctatttttagcatgctaaatttttttgaatctcttaaaattttacaagatgtcttaaataattacaacgtaaataattataaaaaaattaaaataaaatattcttttaaatatcgaaataaataagaatataacagtagtccttttattaagtgtgtatctttgaaagccactaaggctagcttagtggtgaaggagagatgggaaaaaaggagaggtcatgggttcgaactcaaaacccttaagctattaaattaatatataattgtaaaataccattacgctaacactaaaaaaaaaaaaaaaagtgtgtatctttgaagtatcctaacctttttatggattaatatcaaaagagagaggaatatattatgagtttgattgtgtgaacaagtaactatctttata

SEQ ID NO: 74887 - DNA, 1135 bp, Cannabis sativa
gccacctcctctcttcttcgtctgctgcttaatcgggcggtgacccaaccaccatcttcggcctccttctccaattggtttttagaaggtatacttattttgtattccaatatatatatatatatatatatatatattatcaaaaatcgtatcatttcgtatcatttaaaagtttgaaaatagtgaatttttatttttacattgattacttagttgttattattattagtcaattttgtcatgatcggtcgatgaatgaaaactgaggtcctttaatagtgaatgagatgtgtagatatttagaaatttaatttttgttttggaattttagaatgttattgaattcatagatttgattaaatatggaaaatactgtaattcatacttggtcgtaaagtttagttttttatagatgaaatggaggtgctttttactttgaatgaggtgtgtagttgttcaaaaatttgatttttgttttgggattttgagaatgttactgtattgataattcaactaaatggaaatgattgtaatttgtaatacgatccattatgcacatgatactccaaaccatttgctatccctagacatatattgaattcagtatcctagtcgagtgtgattttcttgttttggtatacaatcagtaaattattatacatgtgatatatataatccattatgtaggaatataattaaaagtgaaattagtatattaggtaaattaattaagaaggattagtaattgagtacttacaaaacaagacatctgccacagatttattttctatgtattcataaattagaaagcacgagctttctttcaagtgaaaatcaaagagttgaaaagtcattttggtattatttttttttctattattagctacttatatatgtataaagaaaatgagtgtttggttgtttcactttgacttaatgaaagcagatgagaatatttgattctgatatctaatggtatcaaaagtagttcagttattacttattgtgtcattgtttgttcattgattcctctttaagatttttataatagaactaaagtgattttgttgtctttagataattatctcaattgtttacttaatgggtttataagtaaattatagcaaaaaaaaaa

SEQ ID NO: 74888 - DNA, 1004 bp, Cannabis sativa
aagatctgaatcccaatcacgggtcacagtctggtatcacgggtcacagtctggtttcggttcatgtcccaggtctcgatctaggtctcagtctaggtctgagatcgaggcttgcatgcaattcttggtcttgatcccaattttgggtctcgagtcgtgttccatgttcgggtctatgtttaggtcttggttcgggtcccgcatcccggttcaggtttggattcgggtttgggacccaatcctagggtgggtttgtgtttgagtgtgggtcctcgtccggttatagtttaaggtatgggtctaggtcctggtcctgttcctaagtcgtgatctgcttctggttttggttctagtttcaagtcacagggtatgggttcaggtcgagttttggttcgagtctgggttcgggtcctgatttttatctagggcgaggttcaggtctgggtttcggtctcggttagggttcgcgtttgcgtccggtgccgggtttaggtctgagtccaggtcccggtcctattccaagatccccgcccggctccagttcaagtttttattttggttcccgactgtgggtctcggtttgcgttcaggtcatggatctcgatccaagttcggaggccacagttcttgtcctagtttgtgggcccaattcccaggtctaggtccccaatctatgttcaagtccaaggtcctggcccgggtccatgttcgtgttccggttcaagttcgggtctcgagtcccgatctgagtccaggtcccagtttttgttatggtcccagtttgggttcgagtcctagtgcgactttgaggttcgagttcctagtctgagtctggttcttaggtcctaggtccggccccaatttttgggttgggtctaggtctaggttcgggtcccggtcttggtcaatgtctcggtcttgttttacgtcctaagacataggttctgatctaggtccaagtcccggtatgggttctggtatgagtttgggtttaggttttggtc

SEQ ID NO: 74889 - DNA, 1067 bp, Cannabis sativa
aaaaaaaaaaactgttacttttttgaatagaaaatgttaaaaaaaaaatcacccaataattgtatagtcacatctatctatatatataaaggagaagtatgaggcggtgacatgacatattatatcactctaaatgcatcaatcatttctctccgtcattctctcattttttgaatattttattagagcttaaatttataaattaatattttactattattttaataaatttttataaaaaatctagtataatttttttttttttttgaaaaaaacctctatatataaactacacttaccgatagtatatctaaataataataataatttataaaccagggtatacatattcttgagtgtcgtagtcgcagaataaagtttgtcatccctctcataactgcaaatcgacagtgaggaagatatcttacaattcggtgaagtacttgcactgcttcctcacgaacaccgggatcaatacttatgccatgttgaggaattatttttgcaattttatcacttcggccaacctcttcaataagatatggtatgcatttaagcacagaccagaagtgatatccttgagatttttcttttgtaacaacatctatagcagtctttgaagaagttagaagtgcctgactataggatttatggcaagaccacaaaacttactggtagccttcacctttggaatatagtgaccaatatcgtgacctttaaatatttccaagccaacatattgggttgaaggtgacatgacaattccaagcaaagcacgaagacctataaccttcacttcactaagactatcttgcttaaacagttctaatatcatatgattcatggcaaaattaagattgtgttctgctatggtctcacagaactccacaagtttatcatgttggacatcttgggtaagcatcccttttatttatttattttttttttgttaaactccacaatttactaattgtcctttttttttgttgcatatctattttttttaagttttttaatcattttttaatagagaaattttatatacaccccaaaaatttctaaagaca

SEQ ID NO: 74890 - DNA, 2116 bp, Cannabis sativa
ttttttttgcaccaaaaggggttaataaaatgaatgtaaattcgggtggagtgattttaaaatgaacattattatggacacaaacaactagttaaatatagtgtatttacattttgttgccgttgttatcttaacctattttggttacctcaataaaaaaaaatatagtgtatctacattttcatcgttatcataactatttaaattattatataattaatatgtagtggttaggacatgtgttttttttagaggtgtggacatatgttaaatgcacctataacattagttcgcactgatgcaatattttataattaattagtgatttttatgttatttatcaaattaaaataataaaatttaatattaaaagtaatatattatcatctttcacttagcatttctcaatttattaactcttgaaactttttataaagtaaatgaattttttggcaaaatataaaagtgtactaatgtatgtgtgatgtggagaaagtcctacatgaataaggacacacaattaattttattattttatttatttgagaaatatattaattaaaatagaataataatattttttcaatccatttatatctatataatgcagtcgtatactctatctgcaatattatattttgagagtatatttaatgtttcttaacgtattagttggaatgtgatatagtatacgattgtgttgttttatcttgggacaaccgataatttttcaattgcttgcacattcatgaacagtgttgcgaacgtcttaaagagagcgacctaatctgcgactcaaccgaaaaatttcatttagtaatattgttactcttttatttttagtagcagcgtttacaacaatttgaagatgttattactgccatgactactgtcgatgatttttttggttctattgctgaaatgaacaagtatttttcgttttgaaggtttgcattttaagcattgaagacagaagatattatttttttccactatgaaaaaggttgcgtttgtattgactattttaaaatcagttgtgtctgagactccacctcctgcagagaaaaaggatgaactcgagaaacatgaatcgcaggttaaggaaagggactcctgagtagagaataattttcttttaagaattttattttgaatggtctgtctgatgatttgtatgataattataattttaaaacacttccagttgcctccaagataaaacaggccacttgcatactgtattagatccccattgaactgtagagaaccgttgaatacaccctcaaaatatgatatcacagatggagttctttgtttttttatttttgaggaaattgtgtttgtgttttaggtatgaaaatgatgtaattctcctatcagttcaatcccattcttgggcagtgtcacgaatgtctaaaagagagtgacctagtctgcgactcaacctagaaatttcattcggtaatatcattgcacttttattttcagtagcagtacttacaacagttttaagacattattattgccatgactactactgatgatgttaactcgaaaactttccatggtgacatagacatcaatgtttgacacatggcaagaaggatgacacagagttgagtagacctgaatcatagcagttgacctgggaggggaccctagccctgcgcccatattgacttcgagagctccgggattgaagtttggactttaataacttgaatccaactcattatctttgattattctgtaccattaagacatgaagcaacccaatccaagccccaggagctaaaactacacaaacctgcaacccaaaaactaacctgggcacctagagtttcacccaatgcccaagttgacattccaactagggtttcagtttctgggactgtcttagtgcaaatgggttaaaatttgcataaggacatcaactacacataccataaacatatttgaggcattagaatcaaattcaaagtaagttaatttttgagcactcggtgctcgagcacctaacgcccaagttgataatttttcaatctgggtgccttccaagtatcaaattaatgattcgacttttgcatcttcatcttcttatcaaaaaggaggaaat

SEQ ID NO: 74891 - DNA, 657 bp, Cannabis sativa
  modified_base (56)..(61): a, c, t, g, unknown or other
gtacataaacaatcactgaaatagaaaaattaaataaaattagacaaaagtccttnnnnnnaacaatctcaatagtttagagggaattttcagcgggcaaaagagttcagggagcatgatttggtacatgttaaagttcgggggaaaaaaagatcctaattagctagcctaataattattaaaaattgagaactttgtaacgaattcacaaaaagagagttctatgaaaaaacttaccatagaatgtcaaacttgcaacgaattcaccagttttcttttcgattgagttcttctaattattgttgcatcaagatactaaaccttgcatgtatctagtaaaacaattattagtttctatgggttaaaatttttagaactacatataatatatatatcaatataattaattaatcaaacataacaataaataattatgtatattgtgtatgtggtagaaaaatagagactatattgaattggtggtttaagcttcaatgtttaatgctataactaataatttaaattgctttatgttatagaaaaaaataataggagtagagaaagaatgagaatggagagcttgtaaaaattattagatttagagttaatatggtttaaaatatatactttagttaattgataaaaaattattaaatg

SEQ ID NO: 74892 - DNA, 697 bp, Cannabis sativa
attgttttggtacatctagaaaaatttttagtcaaatttatatatatttttttttaatttcggtgtagttttttaagatgatcacttgtaaatttttaaaaaattttaaatagtttacattactgaaaataaaatttaaacaattatttactacgagtataaataaatattcgcgtgtaataaaatatttgaactttattatagctattcattttttatacaaaaaaattatatataattttaaataactatatcatgtaaataaaatttcaacttaaaatctcttctaaatatttaaatagataaaaaatacactgaaagaatcattttaagaaagtgcactataaaattattctattttatatatatgaaaaaattctacaatgcacctcttaaaaggggtctactaatacactctttatttgttcgatatttagaataattttttagtctaatttttttcatagtcgtctacgttgtagttatttaggatatcttgcaaaatttagcacactaaaaataggattcaaacaatttattttacatgcgtataaaataaaagagtctctcgtgcaacagactaaatttctattttcggcgtgttaagttgttctaaatctctcaaaattgtataaaatatcttaaataactacaaaccatacgactataaatgagcacactaaaaataggattcaaa

SEQ ID NO: 74893 - DNA, 669 bp, Cannabis sativa
attataccaaaattagtattatatttatatttatcacatttaattacaaatatatgttataactaaagcgagcaactaactacctctcgactctatgtgggtctacccatggtctgaagtaatcctagtcagtaatggcaagatattggtggatggaattcacctcaagaaagctccaaattggcgatttactgaatctttttggattgtttttgccattaatggcaatggtcataattttgctgtaagacatctttctttgactttttgagtaaagaggaggtgagaccccttgttcccacgttaaactttggttcttcagcttttgttgtgaagctgatggtttttaatgttaaaataactattactcataattattgaagccaagatcagtatttatttagagcatcaaagacaataaaatacatacctcccataccatccatgagagtgattatccttcaatgtcttcaaagaaatcaccaccaaaattcctaaccttgagcaaaagtctagagaacactttgtggagctaaccctctttcactcattaccatttacccacactaccactttacttaagacatacacacatatatatatatatatatatatcatgcccctctaaccctaaagggttatttaccaattgggcttaagtggtccaat

SEQ ID NO: 74894 - DNA, 798 bp, Cannabis sativa
gactaaacatattaaaattgatggctaatacattatttaatattttgttattttgcataaatctattgattttgtttggttttgtattgagttatatcacgattttttttgtatgaactctttaaggacttttatgatgtgattcaccatggaaatatgtattgtatatcattataatttggtctttgtattaggtactaaatgatgataatggtgttaatgaggaacaacctcttcttgatgaaaatcctacggataatggtatcgataagggtaagctaagggtactaaaaaaaaggatagacctcctactgtacttattcctaatcctaacaagaaaggaaagtcttatatttggcttcatttcactaaggaagacaatcctccccgagctacagaggatgatgatgaagaacctcaacctcgtgctcctaagtgtgtgcaattattgtgggagtgattttcattgtgacactaaaaaatatgggactagtcatctatggagtcatttgaaaaagtgtgtgagcttagtctattcaaaaatgaagatgaaaaatagaagattttaagttttaagcttcttaagggtggcaaggagggggaaacaaatttagtaggtatggtctataacaatgaagcttgtaggaccgccctcacacaatcaattgtgttagatgagttatcattttgacatgttaagggtgaaggtttcaaaagatgtgtgaaaatactctaacctagatttgagatcccttctcgaatgactgttgctcgagatgttttgaagttgtatcaaaa

SEQ ID NO: 74895 - DNA, 512 bp, Cannabis sativa
ttctctctctacttaattatactcgtgttattttaagaaatacgatttttttttataaaattaatatatatgtattttctttgttattagataaaaaaaaagtgtataaaaaattatttattgaaagtaaataattactaataatttatttagttactaattgatatttatttttatattttcttgttatcatttattattttagctttggaaaattcataaaagttacaaactaaatatattttttattgataattagtattattttacacactcttgtatagtgatatatgtatatatatacactagacgacaactacgtgcaaggcacattctatctttttttgagttttttttttataatttttttatctgtttaaaagaaatacataggataagtatttttattataatttttaaattataacttatatgtaatttataggatttaataattttttcttattttgcttcttcaatagagtatacattaaaattcttgtatctttgag

SEQ ID NO: 74896 - DNA, 756 bp, Cannabis sativa
acagacttatcctatgaggaacagtcagtttagatccttgattataggaaagaaaaagttcttcgaaataagactatagttttggtcaaggtgctttggaagaacagcaaggttgaggaagccacctgggaattagagtctggcatgagaactcaatatccaaagttattcaggttagattttggggacaaaatccttttaacgagggataattgtaatgactgcatgttagaatatggattagtaaaggcaattagcgttaattattgatatttttataattatgtatgattttattatgttgtgggtcccattattagaaatggacattggagttataatttctcaattctagagattttattaaactctaggagtattaattttattaaatatgaattatgcaaattttatgatttttgctcgacgacgacggaaaatgcgatggatggccatttgtgtcacatgggtaagtttagaacttttttcttagcaggacaaacttataagatatttagaatgtcgagtttaagcggggttatggcttttgaccatttcacccctagacttactattgtttaacttaaggaattaaagggcatttttggtatttcctatttgaggattatgtgggatttccgaagggtggcagctggccttttggcaccacttcagcctaaggtttatccagcaactagatgaattaaaattaaaaagaaaaagaagaaaaaactcaaattctctctctctctctct

SEQ ID NO: 74897 - DNA, 721 bp, Cannabis sativa
tcccggtcctggtcttgggtcccgagttcggtcccaagttcgatctcgggtcccggttcggggtcgggtcggatctgggttcgggtccaggtcctggtcccgagtccaggtctgggtctgggtctcgggtcctggtccgagtctgggtcctgggtctcgagtttgagtcccgggtccgagttcgagtcccagtctgggtccaggtccgagtccagatcaggtttgggtcccaagtcccggtttcggttcgggtcaaggtctaggttcgggcttgggtcccgggtcccggtcccgggtcagggtccaggtccgggtcctgagtcatgatccggatcccgatcctagtcccggtcttgggtctcgggtccgggtcccgatctcggtcctggtcttgggtcccgggtttgtctcgatctcggtctgggtctgggtttgggtccgagtccaggtccaggactggacctggcatcgtgacccgaacccgagaccaggaccgcgaccgacacccgggacccgaaacccagaccctaacccgaaatcagactcgagacccggactcgaacccagacctggaccaagacccgaacccaggaccctgattcggacccaaagtcagactcggatccaaacttagacccagacccgacccgttgttggtgtatgggtagagttttattaaaaatatattatctttacacaatttattaatacatgtcaatac

SEQ ID NO: 74898 - DNA, 1081 bp, Cannabis sativa
tataagagctagaaattaattgcttttgactaataacaagttaattatgaacgtgatttgtcatgatcatgaataaaaacattacattttgtaataagactgaatgtttctttgaaattctttttattaaaaaaatgtatagacattgaaaatatacaaatataaattatgacaaaaaataggaatggctcccataaacttctatccacatgtcctcatcgatctcctcttaattaaataattttcttatgtggttgttcatatgcccatatatactactaatataagtagatgttattggagttcactaatatagatatatgagcagcttgaaaatatgtatctatcgttgacaaataataatgtttattatttccgattacgacaatttgcgtagacattctgtttgtctttattatttgtagtgacaacacaaaggcaacgttcgtaaaattaaacaaagagactgagagagagacatttcagacaatgacaatttttacaattaagaccatgatagaagtgtataatttgagttaaattaacctaaaattataagtcagatattatctttgattcaaattttataataagtgttttaatgcataaaattaacttttctttttatatatatatatagaattgtgtaaaaaaaattaataaaacattaaatttttattaaaaatatatatatatataaaaaaaactctattaaatatataaaaaataaaataatattaattatatttataagttacaaaagagtctctttaatttagaccaatttatacactactatatcatttagaattctcttttataaagatgaataaaaatataatatataccatacttttagcactctattattagagatctaattatgcttatattgtgtggttagtagccctacatcagttagaaacatttttttaaaaaatatatatatatattcaatttattatgtaagactacgtataggatcgatcgaatttagttatttatatgcactttaattttagtggtcaaatccccctagactccatctccattgagactcgtctctgaatttgaaaaaaaa

SEQ ID NO: 74899 - DNA, 602 bp, Cannabis sativa
cagtacaaggcggtccccattacccaactgctacatgcacaagcatgatgctacccacaggatcaacaagtcagctccacattgtatgtaatttaccacaatagtggaatttaagatgagactctaggtggttcgtggggcgaaccacacccatcacttaagcctataaatatcccttccattttcatgtaaagggacaagccaacaaaacacatagcaaaaactcccctaaaatcatccttgatttttttcttctaaaaaaaaaattaatgaaaaagagttaggtttcctgcataactttgtatattcatcaacattgcccaacgaggccaatagactgactcgtggactagggtttgttagcacccaaaccatgtaaaaaatcttcctctcttatattctgccatttttattgtctttagctcttaatatttagtttttgaaaatctcgataaaaattttggtactttcatttagagccgatgaaagacaaaaaccattgccattaccatggtatccacacgaaaaaatagttcacaaaagaaattcacagggtggcctcgagatggttgtgtagaaagtaaaccccctctcgctggagc

SEQ ID NO: 74900 - DNA, 784 bp, Cannabis sativa
  modified_base (445)..(452): a, c, t, g, unknown or other
  modified_base (722)..(744): a, c, t, g, unknown or other
agcaaaacccccactatgccttgtaacattgatacccaaaatagtatccacttctccaaggtctttcattttaaaggttgaagaaagaaacatcttaatttcttctattcctttcatgttatcactaaggattaacatgtcatccacatataggcaaacaattattacataacttttacaagtttttgaacacagacacttgtctccattattatacaagccatttgaaagaatagcattgtcaaacttgacatgccattgtttcagagcttactttaatccatataagaatttcttcaacttacacactttatgttcattgtttggtaggacaaacctcttgggttgttccatatagacctcctcatcaaggtcaccatttaggaatgccatttttacatccatttggtgaacatacaagttgtgtaatgaagccaatgcaaannnnnnnnttatggtagttgttctagcaacatgagcataagtttcaagataattaataccctccatttgcataaaacctttagctattaacctagctttaaatgtttgtatagagcgatcagtgtgatatttcttgctaagtatctatttacacccaattgctttgcattcttgtggatgatccacaatatcataggtgtcattggagagaattgggtccatctcatcattaaccgcttctctcgaaaatgcagtatctctagattgcatggcttctnnnnnnnnnnnnnnnnnnnnnnnaataagaagtattaaaggaattttccttattacttcttct

SEQ ID NO: 74901 - DNA, 737 bp, Cannabis sativa
ctgtcaggggctttggtctgtctcttttctctgtctcttactaatagatactcacttagatcatgctggcttcatctttcatcacttttagtagtctcagttttactttgaattgcaggtgtaggtgtagattgaggctccacctcaatttgtacattttcatctggtgtagtttcattgttcttagaattgtggactgctttgagggccatttcatattccttgaacactacatccctactgatcatacattttttaaatccagattctagacaccatagcctgtaacctttgactcctttagggtaacccacaaacatgcatctcaatgctctagtacaaccataaactcttaaatgttctaggttaggagctttacctgcccacatttcttgaggagtgttaaagttgttaggcactaagggtgatctgttgattaaatagcatgcagttttgatggcttctcccataaatgatttgtccatttcagcactcagtaacatgcatcttaccctttcaagtagtgtattctctcagcaacaccattttgctgaggtgttttgatcactgttctatgcctttggattcccaacctgctacacaactcattaaactcatttgaacagaactcaaggccattgtccgtcctcaataccttgattttgcttcctgtttgattttccagtagccttttccaagtgtcaaaggtaggtagtgcttcatccttgcttttcaat

SEQ ID NO: 74902 - DNA, 1022 bp, Cannabis sativa
gagttttttttttttttttaatagaaattctttcattgaaattaacaattaaattctactatcaaacaaggtagcaagtcaattggaacatcctccaaactgaaacgacgaccagaatataatatagaagctctagcaagtaatgagtcaccatatgagctaatcgcttaacaaagacaatagaaatattttgcaaaatagaaagtaaacttctacaattgttaatcacttgtccaaaagtcaaaatcatttgaacgaaacttcgtaaagcctgcacaacggtcaaacaattggtttctataatcgcatgatgtcattgacactctttgatctagcttaaagcctcacgaaatacatatgctaaaaaatacatatacaccatctttatagcactctattggagatgatcgaacaaatcgtgtgccaaatttggcacaatatttactataatgcaaaatttgcttcataataaatatactattttttatttatatttatgtcatttgtattattatattagtatatttaagtgtacattaaattataaagtatttatattcttttttattgtcttacatattaaaataataataaaattgataaaaaatattaattagatatttattttttacatcaagttttgtaattatatattggaacacaatgttaaaatttaatataaatctattagaaattcattttttgtgccaaatatttgggtgtcacatttacaccttaaaacccacccacccgtgtcaaaacccaaaaaactggaaaaaaaaatgagttcgagtttatgaattttgaaaactcaaaacccaaaactcgattaccattttatatatatatatatattaccttaataaattatggactatggtatggattttattttgtttgtactttagactatgtaatatgtatgaactttattttttagattttggagtttggactatgaactttttaaaaaaaatatataataactttataagtatttaaggattaggaataggagtaat

SEQ ID NO: 74903 - DNA, 564 bp, Cannabis sativa
tgaagacgacatatcaagtatcctacgctttactattgatttgggcctagcacacaaatgggctaagagagctattatcatttaggctaaaaacattttgggttgaaattagttttttatctcttatattttgtgcttaattcgatacaattaataattgtatcatataataaaaaagaattatcaacttatcccagtaataagcatatataaataatgaatcaaccagtaaagtccgatactatttgcatgggctataaacgacatgcaaattaattaaggaagtacgctggtaataatatatatataataaaaaggaattaatagtaagtggaaaaatgaattggccacttcccatgcaagctagtgagtgggtattacgtggagtagtttctctttgtagaatgttaaggggattgaaatatataatttcttaagttgtttttgctttttattcttgacgcatatataagataatcaaatatatatatctttcaaatatgagatcaattttgtacgtctatgactttcattttttaatttaatgatcagatatatatatat

SEQ ID NO: 74904 - DNA, 1039 bp, Cannabis sativa
  modified_base (357)..(359): a, c, t, g, unknown or other
aaactcccacttgcactaatattacactaaaagtgcatttcaattaatcttaacaccttgatatccatatcatgtgtagtatgttgtattctctttgtaataggatatgacaggttgtattcaataccaactttatccaccattacatatcctttatcacaaaattcttgatattgtcaaattcctctctatatgtctaatcctctaggcatactagattctatagtatttagaaactacttctgtgttagtcaggaagtaacactagtagttaattcattattagtacaatgccaaaaactatagaaaactttccataggatgaataagtatttttcctgcaactttaacattcannntcactggtagagttagagactccagataggtttttacacttctcaaaaatcactgctccaccccagagtaatcaccatctcatcagtaaactttctagcatcaacgcaagtctagaaacctgatttggtgtagtctaagagtgttaaaacaccacccttaccaactaacatatagttcctctttttgatcttaagattctcttgattgtcttccaatgttcctctcctaaattaatctgatacctactcattactcccactcaacaataggtgtcttgtttaatgcatataaaagcatacatgagacctctcactgttgatcctaaggaattctttccttggcttttatcttttttggaacagttaaaactttcctgagataaataaaatctatgtctaagagccaaaaggcttcctatagacttagccattagaaaaaaaaatgcttcagcatcttacaaaagtaagttgcttgtactagaataagtaaattaccaggtataccacatgctataggtttagataatctcaaacctgttatagtaggatcagaaagttttgttaagtccattggatagacttctaataaaaaatttccttcttgtccttgtaatagaaaaccttttggttactccatatgaatgtttttaaccatagttctctttgctttgcttcttagt

SEQ ID NO: 74905 - DNA, 634 bp, Cannabis sativa
tattgtcgacagtttaaaatcatcaggtatagtatacccaatagttttaaactaccaaggttatcgttttaactcgttttttaattttaaaattatgaatattttgcacagttcgggattctaaaatacttgtttaaatttgtcgagaatagttgaatattcccaacaattttaaacattcacttaactttattagcgacggttctagaaaaattaatttaaaaaccgacatgaataagtcttgtagtagtatcaacaccccacgccgtttatattattgtaataattgataagcactcttcatgttgagaaatagaaattcatggtatctggtgtagacctttggtaatgtagtgtgctccttcatactgtcgattacagccctctctatggacagatgtcattcctctgttgtggtccaagaatcttggactaatgattacacctttttcaattctgttaggatattctctcctatgtaatcttctttggaaattggcattgccacctgtatagagccgttgctctactcatctcttttgtaacaaccttcacttaatataaatactgcactctggctcatggttgaaatgggctgagaaaacattttccatattgattctaaaatcaaact

SEQ ID NO: 74906 - DNA, 510 bp, Cannabis sativa
ctttaactaaattgaaacaacttcatttcttttaagatgagtggtttgttattcttatgcgtttctttatttatttgcttgtaaattgtatgaattctgttttgtcaactcgaaaagccgtaacgtttgaatatcttctctgcaactctattctctaaataaatatttacagccagaaaccacccagtaagttccttatatgtgcattcaattgatgcgatacaatgtactttctgcatagttgaatcttagagtttatacagctataaatctaagcgtgaatatatgtttctgtatttcggaatgaatatcattgtctccaaggactgaatttatatagttattgaatatctatttcttgcagaatttaggtatattatccttaaacagacttttttttacttctgttttttttttttatattttatttggctgtatctcttacaattatggtgtcttttcttttattatgtttataggttgaatattttatagattgaagtttcaaat

SEQ ID NO: 74907 - DNA, 579 bp, Cannabis sativa
ttaagggttcgtttggaacgtcgtgttagggtgtattttattgtattatattaaattagattatatattatatttttatataatactatattaaacattgatttatactaaaatattacatatttaggtacccataaaaattaatatcacatatagttttacataaaaatattgcataaaatacaattcaatatattactatacaaaatacagtgtaatacgacttaccaaacgaaccatgaccttctgagtacagatctttagtaagtgcaagactatccctcgcctagtatatacccagtcataggagtcataccttttcttgttgtttggataagagtcatggtttcatccattttagctcgagaatgtgctccaaacagattctcaagagcagtactccaaaatgttacagatgaaacatatggcccatgacctcagttgctacagattaaaacatggagctatagatccaccccatgagcaatcggtcattgactatacaatgttcatagaggattgagtttcacttcaatacttagttggccttctgtagtagctactacaaggatgaactca

SEQ ID NO: 74908 - DNA, 549 bp, Cannabis sativa
tgtacggatcgacgatttggggagatggccggagttaatgttgattcgactggagtggttgagtcgagtctgtctgatacggctggaatgactcgggtgagtcgagctactttgggattcggtggagaggagtcggagccaccttgatcagcgaatttgggacttggcatcggtttcactgtgtggaaaagcttaaggtgtgaacaccctgaggaagtagaagaagctctgttcatactatgcatggagagagagcaaaagaagagtctcgaaagtcttggagatatgaaattttatgagttttttttttttttttttttgaatcaatcattatttttttcatgtaattggggtctcttttatttcactatttgaattttatatataaaagtatatgtaaaatgaaatgtcttgtaagtatttgttcaaatgcattttatctctcttcagatatataatcaaataaacagctaagggtaaattgagattttacttataatagtgggtataaattaaataatatataaggaaaggtaaaaataaaaggag

SEQ ID NO: 74909 - DNA, 1117 bp, Cannabis sativa
attctgtctgctttggaataaacaatcttggattatctcggttacgaaacattgatctggcttcgaatgtggggtttgggattctgacctctttgctcaatggacgctgcttgcgttatatggcaccccatatgaagaggagaaatatttgttttgggaagaatgctctgatgtagtcaagaattgggatgaaccgtgggctgtaatgggagacttaaatgtgatttcgtcaagtcatgagaaatctgggggccgagttttactcgcaaggatgggttttatctcaatcggtttttgtgtgatactgggggaattgatctgggggcttttggaggaaaatttacttggaaaaacaagagggggaatggcgggttaataagggaaagattggatagggtggtggttgattcaagttgggtgaatttttttcccaatggaggagttcgcaatcttccaattctagcttcgggtcatggccctcttatctttgattcgaatcttcttaaacagagggggagaagacccttccggttctatgaggcgtggttgagagaagaaagttgctttgaagtgattaagttggcatggtaccattctcgtgatgttggagatccgggggacattgtgagaagactccaaaaggtgcaacagaaagttctaacctggagtaagagaaattttggggactgtaacgagaaattgaaattacttgagtctaaactgatggatcttcagagtagagaagtgactgtgtcgatttctcaagaagaagaattaattgagaaggagatcgctgaaatttggcttcgtcaggaatcgatttggcgccaaagatcaagggaaacttggatgctcagggggatagaaatacaaactttttccatgcctccactcagatcaggagaaaacgtaattacatatggtctcttctggatgatcatggaaaccacgtgtttaaagagagggagaagggagttattcttaacaattacttccaacaactttttgaaagctcaaatgtgagtctgaacatagaacttcaagagttaatcagcccaacggtgactgctgtggagaatgcaatgctcacaggtatcccgtcctatgatgaaataac

SEQ ID NO: 74910 - DNA, 1700 bp, Cannabis sativa
aaattgtcaactcacatatcctgtccaatgcatgagagttcatcacataatgaagctttggtcggacgtcacttggtgactctgctcggacatctgtctacgtatagatgaatggacctctctaccagtcttcgggggcagctaggtgtgtaacctttcgcccaggtaggaaaatatgagacacatgtcatccaactaactgccacatcatagtgcaaaaaataggacaacaactttcaagttagggcagttcgtcaaaacaaaacctacaggcgtccccggggaagagtccccttctaaagctgtttggaaggaggggtctagctctaccacctctggtcttcctctacctcctccctatgcccctctggccacccaacccatggtgggatgtttagacggacgtcctcctgctcctgggaggtccagtaaagaatgttagaaatctagttgggaaggtaccccagcctgggcaaaaaaagtcaaggaggttgtccacaactacctagacatgtgtttagtccaggtagacaagcagctgcaagagacagataggaatctggccttttgaagggtcaggctttggtaagttatcttccctcttctgaagctttatcattactaatcatgtaacttttactctaacttgccatttttaatgctaagatgtctttgaagtttgtgcacgcctatggccgtctcaaagggacaggtgttgctaccaataagaagattaagcatttagaggcccaacttggtgaggtgaacaaaaaactattttccaccaacaatgagataacagagctcaagaggcaaatcgaagatatgccctctattgcaaagcaagaggagggtttggaggatgctgacaggcgagtgagtgagatgactggcgagaaagaggctctgggtcgactattgtttgcttaggatgaggagtttgcaagaatcaaggagttcgaagctgagaggaccaacttggaagaaaaattggcataatcagagcagacctgagatgtagagaaggaatagtatggtaatttagacattgaaaccttctacgagttctagaaacggaaccccaagggtgactacagttacatgaagcctgacttgcttgaagcgctgatagccaaaggttaggagatagaatagaggcatccaaaccccctagggagaataatttttcccaagatcatgtcggccagcctggtgatgctgttgggcagcttgctgatgctgttggctagcttgctactcccttagaccctcctatcgagacaccttctgaatctgtcacccaggagcaatccaatgataacatgaacccgccgaccccttttgatatacttgagctttaaagcttttttttttttgtttttctttctctttattttctgcacaaccaaaaaggccattacatttgagacatatagctggccagtcggcttttaatcctgactttattttttattaagacatatggttggccagccaatctttaatcgtggacagcttaccttttatgtttaacaaaaccatattttcacacacttagcctttaatttttttttattatctttacttaagtttttttgcttaagtattttcattgtgcttgtcttatgctgtgcgggtgtaggtgcccccaagtgattaagaagatttatagtctcttggtcacttacaattaaccaagt

SEQ ID NO: 74911 - DNA, 1180 bp, Cannabis sativa
accaacaacttggatgggctatctatgttcaaaaaatcccttgatgcctaattaaaattaaaagaccttggaagtctaagatttttttttaggtttggaaatagcgcggtgtgaaacggggatttctgtatctcaaagacctttcacactcaactcctaaaagaaaccggtcaattaggcaccaaacctgcctcaacaccaatggagccaaacctaaaactcaacaaagacacaggtcctcttcccacaaatccaactcaatatcgaagtctaataggcaaactcatttacctcacaatcacaaggccaggtataaattatgttgtcaataaacttagctaatacatacaacaaccaagacagccgcaccttgatgcagcctgcataattctgcagtacctaaaaaattctacttgccaagggttattctatcatgccacagccccaccaaaactcacacttcaagcatttgctgatgccgattggggtgcctgccccgacactagaagatcaatctctggctattgtgtgttctttggacactctcttatttcatggaaataaaaaaacagcaaattgtttctcgttcttctgcagaaggagaatatcgagccatggcgaatgcaacatgtgagttaacttggcttatatcacttctcaaagacttccagatccctatatcgcttcgtgctcttctattctgcgacaacaacgcttctctacacatatctgaaaacccagtgtttcatgaacgcacgaaacacgtgaaaatcaactgtcacatcgttcgagagaagctcaccaccgacatactcaagctcaaccatgtaccctccaagatgaacctggctgatatattcacaaaaccaactttccccactgttttcaacgaccttgtatccaagttaggtgtaaaaaatttgtacactccaacttgaaggggttgttaggattagttagttaattaggttcagttctttatcagttatttctgttataagtcggctgtacattagttgagcctatatatatgctcttctcctcactttgtaaattcattcaatattgaataaagacagagattttctttcccctgttttctcttctaatatacttttacaattatttaatcaatgttgaaaaaccgtgtttttgcaaatgtcagttgtatataagaaaa

SEQ ID NO: 74912 - DNA, 1414 bp, Cannabis sativa
  modified_base (154)..(155): a, c, t, g, unknown or other
ttatttatggcatcttattttacggaagtaagggcgttacactaggatgtgattctatttgataaacaccgcgttccaatgttaacgggcactgaatatgccaaaaattatgaatttctatatgtgacaaaaaaatgcattctgaattcaaatnnatcatcataaattaataatttaaaattaataaataatttcaataattaaaccctaattatctattaatttctaaattaaagctaagcggtctttacgacatcggtaccagagcaataaaaacgacatattcttcgaggggagagggaggaaggaccgggctggggtttttgaggaagagaaatccatttatgggatctgtttggggcaagggtcatcaaagttgctttatcgagtggagcagggcgctgcgtgcggaggagaaattggagaggaagaggtagtcgagatcagggagttcgacaatttctacttgaaggaaaaaggaaagtcccaaatttagggtttttggaaaaagaaaaaacttataaatgaatatgcaaatgataataaaatggatttatgaaaaaaaagttttatagaagtggaaaacataaattaaaaacgtaaaaacgtaaaaacattaggaaactagcgagtattgggtaaattcccaaaattatttgtctcacatacattctatgcaaaattaagttataaaatatatgataatagttgaaaatcccataagattttaaatttattatacttaaagtatttacataatatattttgttacaaagtttttacaattaagaatttgtatagtttattgtcaaattttgttaaagtatgactaaagagacacatgttactattatattggcccaataattgttttaattcaataaatattataaaaatcaatttaatatttattctaaacattaataaattttgttaattattgaatttataaatcaaataacaaatatatattataatgtagatgtcaataaaaaatggataaataaaaattaaattaattattaaaagataaagttaaaaattatatttgcgtcaaattttcttaattttaactttaagaaaatatttaaaagaaactatttattttaaataaatatgttggctttatttttattattattaattaaggtgacgtttggtaacaattttttaatcagtgttctgttttttttttaaattggaaaagtgaaaatgttttccaaaagcacgttctattaaattgttttcaatttttaattttttaattgagaatcaaaatattttaaaaaaaaaaactcactttaaatattcttttaaatagtttttttttcttaaataatattttggactctgaccagacccggacccaaatgcccccacgccctggcgctgaacccagcatttgaccccaacc

SEQ ID NO: 74913 - DNA, 971 bp, Cannabis sativa
gaatttctctatcaatctatattgagaagattctaaagaaatataattatttttactataaacctgcttgtacctcatataacccaagtgtaaaattatttaagaacaatggagatggagtaagacaatcagattatgctaacataatcgatatcctctgatatgctactaactatactagacctcacattgcctatgtcttaggattattgtgcaggtttaccagtagacctagtatagagcattgaaatgctattgagagggtcataagatacgtaaagagaaccatgaaccttagagtacattatcaaaagtttcctactatccttgaaggaacatcgatgctgactggaacactttattaaatgactccaaagtaactattgactatatttttagtatagctagtggcgttgtttcttggaaatcaaaggaacaaactattttggcaaagtccaccatggagtctgaaatgatagcactagctactgctagtgaagaagtaggttggttgagaagtctgctagctgagatcccttaatgggaaataccgataccaactatgttgatccactataatagtaccgcgactattgcaaaagtttaaatccattattatagcggtaagagacgacattcgtcgtaaatataatactgttagacagttcctctctattggagcagtaagagtggatcaagtacgcattgatgaaaacttagccgatcctttaatgaaaagactagctagagagaaagtccttaaaacctcaaaaggaatgagattatttcccttagaatgatgagtctctcataatggtaacctgacctatagactggagatcccaaaaaataagttctataagtaataacaagttatgatgtgataaaaatgagatcatgctattgttataagaaatgtgaagcatgaattcctaaagcgatagaaggttgagataatagaaactcttaat

SEQ ID NO: 74914 - DNA, 533 bp, Cannabis sativa
  modified_base (505)..(508): a, c, t, g, unknown or other
tttcctgtcatgttaaaggctagctagattatgccttgtatgagtgtcatattagatgtgcaaactttaaaatgacaacccttaaattaatttttgggatattgcaatgtcgcccaaggtatggtgcttcttcttggacgacatagtgtatgccttctaggtgtgtggactccaccttgtggtttattctgagcataccagagtttacttcttttctttctgcggggtgtaccttgcaaatcttcttcttgatgatgtgttctctacttaactacgtgtcatatcatttagccaaaatattaaataatatttactatataaacattttataataaattaaaataactttttataatagaaaaaaatatataattatatgaaaataaattattatatatatatgggaattttagtatggggctgcttcttttgctcctatgttatagggaaacaaattgacccaattacatgttatattatttataataatataatatatagattnnnnatgtgtaataaactaataatatgta

SEQ ID NO: 74915 - DNA, 689 bp, Cannabis sativa
atacttggccacaaagcatcagcttcctgaatccttgctacctcgtgagcctaagtctctcaaatttgctctaaaagacccagcttggaatgcggctatgaacaaagaaattttagctctcaagaaaaatggtacctggactcttgtgccttatcaatctcatatgcatctaattgataataaatgggttcatcgtatcaaattaaactcagatggtagtgttgatcgatacaaatctaggcttgttgcaagaggttatttacaagcaccagggattgactatgctgaaactttcagccccgttgtaaagcctgtcacagttcggatggtgctaactcttgctgtctcttttcaatgggaagtcaaacaactagatgtgacaaatgtctttctcaatggtacgcttgaagagactgtatatatggtgcaacctaagggattcgaagacccaactaagcctgaccatgtgtgtcatttacacaaagccatttatggtcttaaacaagctcctcgagcttggaatgacaagttaaaaaccactcttcttgactggggttttactgcatcaagggctgattcctcattgtttgtttatggttctggttcaactatgatcatctttttagtctatgttgacgatatccttattactggacctaatacttcattgattaccaagttaatttctg

SEQ ID NO: 74916 - DNA, 794 bp, Cannabis sativa
ttcggggatcattgcgttgataagagtatgagtttcggggatcagtgtgttgatatgagtttcggttatctgactcaggcacactgacactcgatagcgatgacgtctccaagcttcttccttctggctcttcaagaaacttgttgtcttctatgtaggactgaatttctgtaatgagcaagttcaaggccggattttcctgagatcttagagcattcaaaaagttgtcagagataatgctcaaaatctttctgaactgggatttgtatcttttgaagagagcatatcctgccatctgttcaagttaacaaattttagagggtgttcctgttttgtttcagagtaaaagaaaatgtatttggttttcgatgacttacacgcaggaatgcatttagtgcaacagcagtatctctattagcagggagagtgtttaagaatcttgcaatccaagcccaaccttctttcaacccatgcgtgttttgaaagccgtttatttcagtctaacaaccaaataacatttgttagcttttttccaaatagtgaaacagaaaaaagtatggcagagaactgatttgatttgagctgcgtgacaattcaaattatcaataattgggcgaaaataaacactgccttacctgaaccagagcgccgtatagtttcatgtatgattctactcgtattaaatagtccttaacattctcaatctttccttcgtcttctcgaaatccaagagtcttcagatatgcttcttttgattcgaatgctgactgcagtattaaataatctttaatgat

SEQ ID NO: 74917 - DNA, 865 bp, Cannabis sativa
ttattaaataaaaattaaaagtgacccataaatttctcataaaccaagaatttcagttatataagcacactttatatagaatagatatacacatatatatacacatatattacacatatattactttaaaattaaaaagctagtcataaactacatttatcaagcttgtattttcatggtcaagacactgtcactcattctctcctaggatgttctagagctaggaaaatttggaagaaaacaagtctagctggtttttttaacgctcatcaatttcaggacattaaagattttctcctttcaggttatgaatacttaccaaaataccagttgtctctttgttttactttgctgtggaccatttggaacaggcgcaaccagactctttttcaatccaaatcccctcctctagatgatgttgaaggatatgctgtcagcttcttgaaggagtacacaaatagccagcaacaaattgacacttcgactccaactccatcagctgctggatttcaacctccacctcccccatcgggcatgtacaccttatactctgatgcagctatttcaaaatcaagttcaacaatgggtttcggtgccgtgattcaagactccactggtcatactattgctgctattagcactcctcaaacaggtgctctatctcctactttggctgaggctcatgctcttcttcaagcaattcagtggtgtgtcacagttgaccttcctctgcattcaattcattctgactgtttggagttggtgaacaaaatcaacaagcgttccaaagatagatcacccacatctgacctcgtctggaaaatcattgaatctttatcatcttttcctagtgctaaaatttcac

SEQ ID NO: 74918 - DNA, 816 bp, Cannabis sativa
tccaccaacgcatgttgaataatttcagtactagagttgcacaaagggcagtcggcattgacaggaacttgacgcttttggagttgaaaacaagttggaagcacaaccgagcagctcgccataaaaatttactgatcttaggaggaatttttaatgaccaaagccgcttccaaaaatcagtattggcatctcggcatcaagcacccttagattcttcaaataatttatacttgtaattaattattttaaattttatttttaatatcgtaaattattaattttttaaaaacatgtgaaatgtgtgttatacctataatgtagaatgttatttttaaaaaaaatagctataggatataatttttctaagagtcaaaaatagaaaaattcattagggtagaaaaaaaatgatgtctctatagttaagaaatagagtactttgtggtataaatattgaagtttaatctttagttacagataaatatttaagtttaattttagacggtgataatacttaagttatatatttttgaaatttttgtaaatataccttataaatgtcaatagtcgcatagcagtctttgattggtcaagctcattcaaattttatttttatttaaaaattcatttaaaaataccaataaaaaaatgacacgtggatattaactcagctaagtacctaccaaaattttagaaatataatttaaatattattatcgtaaaaaattaaatttgtattagagaattaaatttaaatatttacgccacaaattattacccttaacaaaaaaactctcatatattcatacattacttaga

SEQ ID NO: 74919 - DNA, 555 bp, Cannabis sativa
tgtaccatgaagacatgaagcaacaaagagtaggtcccaagagctgaaaatacacaaatcactcaaaaatcaacttgggcacctagggtttcacccagcacccaagttgacaaccctaacaagggtttcagtttctgagaccgtcttcgtgcaaataggtcaaagtttgtattaggacatgaactagacataccacgaacaaatttgaggaatcaaaatcaatttcagagaacttttatttttgagcacctggtgcctgggcacccaatgcccagattgacccaggttgacaatttgtcaacctgggccacttccaagcattggatcaaaattcaactcgcgcatcttctcttattcatcaaaaatagggaaataagtgcttttagggaagaaaaggaccaacctgggtgttagaacaaagtgaccagcacccacgttgacacctagtgctggcctagcaccaggttgacattttgtcaacctgggccgattctgatgagtttttctaaaaagtcttctgagaatatttcttgttttcatcaaagataaagagtc

SEQ ID NO: 74920 - DNA, 638 bp, Cannabis sativa
gcactaactagtaagtattaatttctttagtaactcttttaatttataagaatatatagttttaaagatgatcaaagttctaaatataactaacttaatatagaatttttttttattgtattcttttgcagagattctattgtgaagataagaattaagaaggtaaatatttaacactaattattctacttcgtagctaaagcactcaaatcatcaatttatttacttataatcttttaatatacataaaagtttcacctatttttttatttttttattttacatcaaatttatatattaaactgtgcatcaaattttattatttttgttctctatactactttaataatacatatctctaaaaatttaacttttagcatattttctattgatttatattttttttatagatatatcttgtggatgaagatgtaagttcgagatggaatgaagatatatcttgagaatcaattaatttggatctctattttagcttgtttttcatttggtttttcagtttgtttgtcatgatcatcaataatttgtattttaatttcacaattgttcttttagagtgtatttgtgcttgcttagtctataataataaagtgtaaaattttctttgtcatgtatataat

SEQ ID NO: 74921 - DNA, 855 bp, Cannabis sativa
ttcgtactgtgttttacttggattggtcgttttttataaataggtcagcttattttcttacacgagctcgaattcaggttttatttttccactatttttttttttacaattaatgagttaatcattaaattatatgtatttttttatagtttcaattatttttatataaattttcaacaatgcattacacataatcatatagaaaattaaatagaatgattagaatataaaatttattaataaatacataagtattattgttatagaaatttttaacgtgtcatatttttggactattttattcgtgcttacgtgttgtgccttcgagcttatagtatcatgtcatgcttaagtccactttttttgtgttgtgctatgccaatgtatagcatcgtgtcgtatcgtttcgtgcccaaattcatatttctttgtgtcaagtcgtgctcgtgccggtttcgttgttgccactaagaatcgttataggtaattatttagaggggatctccaaagccttgatccgatctgagagaggtgaacgtctctcttgttctagctcaaactcagtttgttttagggctgtaatacttcttaccaaggcaacaaaaggtatcgaatttggccctacagacatcacgagtggtgatgtgtgtatcaatttgtcattcctggctaatgtcacttcgtaggttctttcttcttccaagtcgatcaaagacgttgatcgacctgggccttatatggttgcaacctggtcgtgtggccttattggtaactataggaatttatctcgtacaacgacagagttgtctatcgagcgtttgcttcgtgagtggtttctcgtagtactatactgaa

SEQ ID NO: 74922 - DNA, 1130 bp, Cannabis sativa
gtccaaatcgcccaaagtgtacaaaagagttgctcaagttcagctttgttgtagactaatgagagatggatcaagaaatcaccatttctcattgaagtacacgcatgccaatcgaagttgtagttgagagatctccaaactgctttagcgtacttacagttaaatagagcgtgtcccgttgtttcccaagcttgtttgcagatggagcatgtgaaatcagtgataattttccttcgaacaagtgaggtggccacgggaagagcatcatgagtgatatgccaagcaaaaatcttgaccttttgagggatttgaagtgaccggaacagtttccaccaagctaattccgatgtggagctggaaatgagatttttgtctgcaagcgatgtagcaagatgataggcactttgaaccgtgaaaatactcgaagattgatgatgtcatataaatttatcactagtgtcgaagtagctcaaaggaattgtgagaattctctccaaatcaagttggcaaaaatactgctgcaataaagggatattccattgtctctcttcggtgatgagattccccacaacaccatgtgaaggccccgagtagaagattggaaggaaagtagaatgaccttggatcaaagggtcaaggccacatcgaatagatctaccttcaccaattttccatctcagctctttaatcaacaactctcgaccccatcttattccttgccaagttagagatggtgaatggcccatattagcatctaggaaggaattgtgtggaaaatatttgcttttaagaaactatcccaggagtgaagtcgagttgtctaggagacgccaagcttgtttggccaataaagcttggttaaattgaatgaagaacctaaaccccataccaccttcgcctttatttttacaaagcaagttccatgatctccaatgaatttttgagccattttcattcataccccaccagaagttagccatgatactttcaagttgtttgcaaaagtattcaggcaaacggaagcaactcatagcataggttcggattgattggacaaccgctttaagaaggacttccttaccaccagctgagaagattttttcattccatgactgcattagtttccaaat

SEQ ID NO: 74923 - DNA, 675 bp, Cannabis sativa
atagccattttttggtttccttttcacttagattttggtggagtatatataatgtcaattgctttggccaactataataaaacaggaaaatattaaatttaatgagattttacactaaatttattctaaccacactttaaaatctatcttattatttataacattaaatgtctagtgtcttactattgttagtgtggcactatatatttaatgtttttttgtatatttattatttgtgtttatttataatttaataaaataatataataataaagaatataattttagtgtacttttagtgttgtaattggaattgaagaacaaattaatactaaaattttattattttgttattaacatttattacgttgtctttatatcaaaaacaaaattacaatgtaaataaataaatatatacatataaagagaaaaataataattaataatgtatagggtaaatttgaaaaaaaaataaataaaaaagtatatgagataattcccaataatatatagggtaattatcctttattttaagtatataatttattataattattttcagtctaaaagtaaaatcttttaccagttaataacttgttatagccagtaataaaactataatcatcttaattatattttttaatgtaattattaaataatcactctattaatatt

SEQ ID NO: 74924 - DNA, 898 bp, Cannabis sativa
tacctctgattgtacttgtaatatagatcaatcttgtactgaacaatgtgtttctacacacaattcttgtaataaccagtcaatcaataaaagttcagtttcttccccttatgagcattctgtttttcatgtttctaaaccttctgatgtcaatctttggcactgtaaattaggacatcctgctatgtccacattacaaaagctattaccatcaattccacacagtggaacattgaaacaattacacttttgtaatgcctgtcaacaaggtaagagtcataggttacccttttcattatcacccacccgtgcttctaaaccattacaactcattcataccgatctttggggtccttcccatgaaccttctaaagatggttttcggtattacattcatttcctagatgatttcagtcgattcacgtggatttatccacttaccatgaaatctcaagcttttgagaaattcattcagtttaaaagcatggttgagttgcaattcgggttacctatcaaaagtgttcatgctgatggtggtggtgagtacaaaccgtttgctagattcctagctgatcaagggattctattctctcatccatgccctcacactcaccaacagaatggtagggccgaaaggaagcatcgccacataactgagacagggcttaccatgcttgcacaagctaagttggatcttaggtactggtggcatgcttttcaatgtgccacctataccatcaatcgattgccaagtcctgtgattggcaatatcagtccatacgagtgcttgttctctactaaacctgattacacaatattaaaatcatttgggtgtgcctgctggcctcacttgagaccttatcactcgcataagcttgattacaggtctgagcaatgt

SEQ ID NO: 74925 - DNA, 536 bp, Cannabis sativa
tttcattgttttagagatattcatatgtaggatgttaattcaacatatttgttaataaatctagatcttggtaaaatattcccaacatggtgatgcattaggtacagtaggagcaggtgatgaagatgtgtgagatgattctgcagacttttttgtaagaaaaatcattttcattgaagagtacattcctggacttataaactctaccatcaggagggaggcagttatagcctttttgtgtaaggtctgagatttgaaaaacatagacaaccaaaggttttgatagtagagtaaattagtattgtttgaaataatttttcatgaagggtaagcttgtgtagcacacgagtaggaagttttattgattaagtatgcaacaacactataggcttcattccaacattttgaaggtaaaatagagtgtgcaaatagagttaaacgagtttctacaatgtgtctatgctttctttcaactacaccattttgctcatgagaatgaggacatgttaatttatgaataatatcattactctcta

SEQ ID NO: 74926 - DNA, 601 bp, Cannabis sativa
taattttgttagcattgtatataccttttgagtattaatttactaattttacttttgttaaaaaaaaaattgttgtatataattttattactacggttattgactctttcgctacaatatttttgtatatcttatatttatttatttaatataattataataaattaatatagtaatagtaaatttatataatataattttatcatcatataatttttttaaaacattagacatgaatgaaggtatttttataattttcattatttcatttattatatttgactattgatagttggaaacttctcttttgggtcttggacccttgagagttttcgggtctcgtacccttgagagctagagacctctctttggtgtctcggacccttgaaagttaaaaaccactctttaggttctaggaccctagacagttgggaacctctctttgaggtctcagactcgttagagctagagacctttgttgaaggtctcagatcctttagagttggagatctctttttggggtctcgaacccttaagaggtaaatatctcatcttgagatcttggacctctttagttttactcgttcctccttattacatt

SEQ ID NO: 74927 - DNA, 556 bp, Cannabis sativa
atcagaacattaatttttaataattatcataacgtacgtattctcaagatcatacattagtttatcaaaagaattaaaaagtgcacacttatagacataaaatagttcagaataataattttattaattttctcttctattttattaagaaaacataaattatatatatttttgcttaacgtgtcaatcttatgaatgtgaaatgttttaggtcactaataatgtctaacactaattagaaatggtaatctaaggtcgacccaaacagtttaggaaccttaagcaaaaaaaattaaaattgaatctcttattaaaaaaatcaatcaatattttataaattcaaaatttaaaaaaataaataaatactttatttttttttttttgaaacaataaatactttattaattttaaaataggtaaaatttttagaatcacacgtatttagattataagtttttttttttgtaagtgtatgtttgttaatataaacattttattatatactaggtaggagttacgtgccgaggcacgtaaatgttagttttaggtaaagttt

SEQ ID NO: 74928 - DNA, 1378 bp, Cannabis sativa
gagattgacaactgtctcgaagagtgtattttaaaaatttgtcttgtctcgaagaggatccgttacctatcagatatgctcatgaagattaatatgcatccattgtctaatatagacaatgacttttctatcttgaactttttcattcctcctcattgttgagaatcatgtggttccatctcaaaataaattggtaaaaccaattggtgatgagtggagtagtccatgttcttatatatggctcaatactttactatttattcaatgtgggacaatgtccacaatattctccctcaagatggtggctatttttttttttgctcaccaatcttgaaccatatccgcaagggatatgactctaataccatgttgagaatcatggagttccatctcaaaactcattggtaaaaccaattggtgatgagtggagtagtccatgtatatatagctcaatactttaccatttattcaatgtgggacaatgtccacaatatttctcctagcgggctttcgatccacacctatcaaagagttagccagccgcaagcgagcacaatagtactcccagtagtagtatttgcgctaaagatttgacaacattacttatatggtgagaaatgtgagatatacactaatcataagagtctaagctacttcttcacccagaaagacctgaacacgagacaaaggcgttggcttgaattagtaaaggatatttacgactgtgagatcctttatcatcctgggaaggccgatgttgtggctgatgccttgggtagaaaaggccagagttagtgaagaagatctcccagcaactaccagatgaaatgacccaagctaaaattaagttcgttgtagggaaattggctaatattaccctgtaatctactctttttaatcaaatcaaagaagcacaatttcaagatccagagatagtgaaatcccaagatagggttttggctggaaaaactagtgactttacagtggataacacgtgaatgctacgatttatgaatcgtgtttgtgtgcctatggatgataacattaaaagagaaatcttaaacgagtcttatacgactccttactcagttcacccgggaacaacgaagatgtaccaagacctcaagaccatgttctggtggccaggcatgaagaatgatattgctaaatatgttacaagatgtttaacttgtcaacaagtgaaatgaacaccagaggcctacagggttgctgcagccactgaatcttccagagtggaaatgggaatacatttccatggactttgtggttggattgcctagaacctcgggacaataggactctgtgtgggtctattggatatattttaccagggtctagatttactaacaagtatgtt

SEQ ID NO: 74929 - DNA, 825 bp, Cannabis sativa
catatttcctcaagattatgcgtcttcgataaaatcttgcatatatcctgaagattatgcaaaaataatattcatctttatataattgactgaaatataatgaaaaaaaataaatacatattcatatatatataaatactctataaaatttttatatatatatcttgaagattatgcaaatataatatttatcaatgtataattgattgaaatataataaaaagtgaatatgtattatcatatatttgataataatgaaaataattataatattcttatagatttcataaatatttcttgaagtaaatattttatatttgttaaaaaaaaatattatatttatgtgaatacaatcaaagaattattaaaatgattattattgatgcaattttatagtgggttttgattactcaaaaaaataataagaaaattgcattgaaacaacaaagtgtaagaataataatgaaaatgactaatgttatttaaatacacgagacatgtatttattgttcatcatttcctacagagaatgataaatgaattcatttaattttaaagagcggtcatattctatatattagtcatgttattatacatatgtattgttattacttataatatatattaaaaattattacatatgatatatattaaagattagattttgcatacgtcttgaagattatacaaaatttatattcatatattctttgaaatattgtaaaagagattgctgaataattttttgtatttttatggatgaacaattaataaatttttaagatttataataatgttctacttgttcaacgtcattccccgaag

SEQ ID NO: 74930 - DNA, 1483 bp, Cannabis sativa
  modified_base (448)..(449): a, c, t, g, unknown or other
catgttttgatgctttggaaatatctatcagatacaactcatgtcttaagttatgaagacattgagcttcacaacgacctgtcatatgaagaacaaccagtacaaattttagaagggaaagaaaaggtattgcggaacaagactattccgctagttaaagtgttgtggcggaacagcaaggttgaagaagtgatttggaaattagagtcgcagatgcgagagctgtatcccgagcttttcaggtaaatttcaaggacaaaattcctataaggggggatagttgtaatatccttaaaaataaaataatatttaaatagacatattttattaaatatgatcttacttagggtaactactaagaatttattgaatgatatatatagcgtaatttattaattactgggattatattgggatatgcgtgtatcgaggatactatttttgaaannaaaatattttatcgggcccaacgactgtggaaatttagcaaagtggttagaaatgtcacgacattaatatgagaattattttgaggatatttcgtactagtttagaatttttagaatgtcggtttggtggattagcaaaaaattacaaaaattcccctaggttactttaaagtttaatttttgggggaggggtaaattagtcattctttaaaataggttttatgttttaattgttttgtgggctggatattaattaattaaaaagaaagaaagaaagataacttacaaagcaaggaaaaaccaaaagcttctccttctttcaagccaaaaccagcccaccttgaggatttttcttcagcttctaccctcatttcagagctagttcttgtcccaagtcaacctagaaggacttgaaggtaggttcttaacctttttggattgaaaacattatttttgagttggttttcatgaagggttttataattctatggctgtgtgagttaaactaggtttggggtgtatttagggtaggttttgagcatgttgggaatggttttaagtggtctctatggctgcttgaattgaatttggtttgttgaagcaaaaaataagttttcttcactttaaagtgtgactttgagcaaattgataaattgtgatgaattagttgtttggttatgttatattcgctatattaaactattctggaaggtttgagcaggtttggtcgaggttagatcagtttttggggtgaaaaactagaaatccccatggctccccaagaaaaactggtcgaccggtttttcaagcaactggcaaatcggtcgaccagtttggccagcaagggggattttgggtttttctcctcaagtccgatctgattcagggtatcttccggagtgaaattcagggtgttttaaagatgtttaagctagtttgattccggggaaagtagggtgtgtctgattatgagaattagagtctattatcagaaatttgattaaggtttttattgagttttggttgtcgtgaca

SEQ ID NO: 74931 - DNA, 660 bp, Cannabis sativa
aaaaatacataaaaataactataacacaattgtagaacaactaaacgacaatataaaaacaactataaaatcaacaaaaagacagctacaaagcaactaaaatataacatgacatcgacctcgttgcaatataaaaattattcatagattaactccgaataaactacgaaatatctaaaaaacactactttattaatcttgtaagagagagaaagatataggaggagcgcctaatttttttgtaagagagagaaagaatactaaaaaatatatatgagaaaaagtgtgtaagtatgtaacgcccttctaggataggcacgtcaccatattttataatttattgtgcactcctttgctaattaaagagtttattaaaaaacgtaaataattaaaactttttaaataaatttaaacttttaataaacaagtactaaatatttaaagttacatattgttgtgatcacaagtttgttttacaaatataaccaaaatctgagcctaaatattttatatacaaaagtatcactcgaagattaacaaaatctaagcctactgtcccaaagacgtgaacactttaggcctaaccatcccgatatgtacaatcttcaactgactctggactcactactgcttaggctttaccttgcccttacctacaca

SEQ ID NO: 74932 - DNA, 522 bp, Cannabis sativa
ctttatgttgggctatttgggatggaagaaatgagatggtatggcgtaagaaagaaacttcagtagaaagcatagtaatgtcggcaaaaggttatcttgatcactggacaagtgctcaaaattctctcattgagacatcatggactggtttacagtcgggtgatggggcagagctttggtgtcctcccatggaaaatagtatcaagatcaatgtggacgctgctatgtttagtgaagcaaattcttatggcattggtttagtggcaagagatagacacagccctttattggaagctcgtacagaatgctttattggtagagttaatcctgaagttgctgaggctatcagtgtgagagaagctttaagttggatcaaaaatcgtaactggccaagagttgttgtggaaattgactgcttaacagtggttcaggctctacgcagctctatccatatggtttctttatttggtcaaattaatgaatgtaaacaactcatgttagagttgggtcatgttagtgttt

SEQ ID NO: 74933 - DNA, 905 bp, Cannabis sativa
  modified_base (363)..(366): a, c, t, g, unknown or other
cctatggaaatgagttttccaataataataaacaaaccaaacacttgaaagatctttctttaggaatagcaattatattcctacacccattcatgtaaaccaaacactatatcataataaaaatagttttaaataaatataatatttatgtattttttaaggaagctcattttattcattattataggtgtgttaatatagtagttcatacattagctaaatatgctatttcagtgtctcttagttctatttgatggcttgattacaatatgaatcacatgattatggctaagactattagggcttgtttggtacgtcgtattgtattgtgttggattgtgttgtattgtattagtattattnnnnacaatactatatttggtattgacttatattaatagattgtgtaaaattataatatatttttagtacactcgaccccaacactaactacgagtacgggtccgggtccaagtctgagtcccgagtttgggtattgggtccgcgtccgagttcgagtccgggtattcaagtttcgggtccaggtctcgagtttgggtccgggtccgggttcgagtcccaggtttgggtccgggttccgggtttgggtccatgcttaggtctcggtccgagtctcatgtccaagttcgggtcgtagatttgtgttgaccccgaatcatttataaatattataatacaagctaatacggatcgtttgttatgtattaaataatacaacatacattgtattaaaaagtttggtcgtaataattaatacaatacattcctttatccaaaatagagttatttattatttaatacaatacaatttttatacagcctaccaaaagaacccgttaatgaataaatttattcttcggaacccctttctttagatcatattg

SEQ ID NO: 74934 - DNA, 858 bp, Cannabis sativa
aagtcacaatccaaaggctcaacaaaaggagttccgtgggtgagttggagtaaactctgcagacataaagatgctggagggttgggatttaggagtttacgagagtataatttggcgtacttgggaaaacaaggctggcgtttaattacgaatgaggagtcattggttgctaagctgtgcaaggcaagatattatccaaaaggcaatttcttgaatgctgagttgggtccgaatccaagcttcatatggcgtagtatactggaggcaaaagagctactacaggctggcattcgaagatccatttgtgatggtaaaacaacttctatccttcaagatccttggctaccaggtatagacaataagtttgtcacaacttatcaccccaatcttgttgatagatcggttgatagcttgttacagatgggaaggagagcttgggatgttaagttgattaaagatatgtttgttccacatgatcaggacttaattctgtccattcaattgagtgattcaagtaggggtgactgctggtattggtcgaaggaaacaagtggggtgtactctgttcgaagtgcttacaaactgttgcagcaacaaaatggagactggccgattgatggtgctgatgctttttggaagagaatttggcagctgcatgttccaccaaaagtgcagcatctggtgtggcgagtaacttctggttcattaccaaccaaagttcaactctccaataagcatatacacgttgatctcacttgtcctctctacactaagtccccagaatcaacatcacatgtcctctttggttgcgagtttgcaaggtcttgctggaacacatgtttaccagctggtttagcg

SEQ ID NO: 74935 - DNA, 802 bp, Cannabis sativa
tataaatatgtgaattagggtactcaaacaaactcaatatttattgttcattcaaaatttgtgtagatgacaaccgataacattcggaagccattgaaagatcattgtgatcccgcttatcggaaaggtgttcacaaccgagaagtgggcagcaaattaaagggtcaatcctcaactcagtgcacccagcccgatcagacacagacgcctacccaacaaacaccttcagaaaaaagaatggagcgaatggcttctaaaatgcaaagacaaggcggcggcatagctccaacacattcaactgggttttctcaacctcacatgtctaaagatggatttggttcatcttctcagcctacaactactcagtatcaacagtcgatgtcgctaccatcgcagcagattccttttcccttcatgtttggccagccgtcacaaaatccattgtcgcaacagcctcatattggtttgcctggatcatcatcatctcctcagcagatgtcgccctttgcttgtccgataacaccgatgtcgcagatgcaacagatgcaaatgatgatgcagatgcagcagatgatgcagatgcaacatacaccacagaaacagtagacacatcgatgtcaagactcaagggataacgatgtggatgaggagtttatagatttggaattttagtgttagtatttactcaagtatgaatttatgatttaagtaggaatttttataatttgttgtagtttgaatgttttattatgatatttttggactaattaatataaaacaatgtaatatttgatatatatat

SEQ ID NO: 74936 - DNA, 1493 bp, Cannabis sativa
aggagctcccacatgtactctggtactatataggacctcacaccgaaccgctgcagggcatagtcccttctgactcacctttgggagtgaggccatgctcccagtttagacctaagttacctcacaccgaaatcaatactatgaactacatcgtaaccacctactcttagaggaagcgctacacttactcgatgaaaaaagagaggaatctaaattacataatgttgctcaacaacaatgggtaaagaagtattatgactctcgtgtttgaaatagggagtttataataggcgactttttgttaagaagggtgttctcagtgacacgtgacccgacggctgggggccttagacccaattgggaaggaccatatcggatcgaaacagtgagcttgtataaattgggtaaccgattttacccgtacctgtaaagctggttagccagtttttgcagggttccctgagtgtctcattttcgcaattctcgtccatttcagtgccatatttgagtgtttcgctacttcctgatttagtgtaatccctagaaagtataatagaacctagagttgcgggtttgggtttcttggattagggtttcgatcatgtgatttagtaggttttattatgtgattagggcatccatttagcacaaaactttatgttcaggtcagccaacacacttgaatctagaaagaaggtaagaattgtatctaatgtgtgatatggatatgcgaatgtatgtatatgtttagtgtatatgcatgcttatatgatgtgattcatacactaccaacacttgtacaattgcggtacaaagggcattggtaaagtgtacgatgtctgaaagtacatcgtggtgttaccagcacttgtacgggaaggtacaaggtgtctgtggtacaacacttaatagtactaaaggtgcgctccataccctaactacactagtgcgaaggtatactgagtgcatgtggtacatggtacatggtcgtatcgtagttagagcattcttattcatctgttaagccttgtaaataggtgtatgggcgcctggatacaagtcggtattgcatgatgtgttatacgctcttcttaatgagtttgtcgactcacagttttgcttccatgtgtaggtaaaggaaaggcgaaagctgaacaggagtgagcctggctgagatgatgttgtacatatcgtggcggcgcgacctagagtgttcggtctcgggacatctggggatattattttgtagtcactgtgcgacctagttatgtattttggcatattttgtacaaaagtttagaaaggggatcctggtgtttgtaaatgattatgtaaattataaaatttaatatttattataaaagttttaatttgacatatttttcgagaaaattgtttcattagcaaagatagcactataattgaaaaagcactgtagcgtgccttagcattagggcattacaactagaacctaactatctcaagattgagat

SEQ ID NO: 74937 - DNA, 660 bp, Cannabis sativa
ataatatttcttagggactattacctatttataggctcataatataatgagttttgagtatttataatttgacccctcaataaattataaattaacttgtggtatccacctatgacaatttaaactctttttatactcataacagaattaattatttaattttgtatcacactttactataactatatatatgtgtaggcaataatttaatccaacatttcatgctagctagttgaatttcatacatatataaaaaccgtattaagtggaaaaggaaaggcaatgggcctagaataaattgaagaaagaaactctgataggatgctcttctatttctttgttcaagtcaaaattggttgatggatcgggtcactttctgcgactgccaagtcccaatacacattaccacttgaataccagtacaactactcagacgcaaccactacaagttgagctgacactaacagaccatgttatcttctatgaaaaaagctaaacatcacggctatattattattaatcgtacctgtcacggggctttgatgggttgagtttctaaaaggaaatttgatttttcatgcttacatattcttgaaatttttcccttaaactcataatatttgatatttgtgggatatgacacattttataatattccta

SEQ ID NO: 74938 - DNA, 716 bp, Cannabis sativa
gagagagagagagagaccaaaagaatgaatatccaagagatgggcaagtgaggggggtcggggttgttggtttcttgcttgggcactgccgcccaaagcaagagaagaggagaaaggaatcgggaatagagagatgaggtgtttatttagggttttgaaaattaagaatacaaacttttatataaaaaaaattcgatttataataattattatttttttctaaaattgacacgtatcagtaacaatttagtcgtcattgatagtataattagtgacgaccgtcactaatagtccaacattttaaaaaaaattgcatattatatatgatcaatgaagacatcgtcgtcattgatgtttgttttcagtgacgactttgaatatcgtcattgatacttaattactttcgacgagtatcactgacaattttttagtaacgatctatgttcccattgacatcactaatgaaaaaggtactcttcactgacgaaatttatcctcattgaagcttattttttttgtagtgtatgactaaaaatatatttatttataataaattataaattttgtgactaatacttttaatcataaattattagtcacaagaattagttaagtattttttcacttttagtgctaaattttattgtgattaaaaataaattttttttataccaatcatttttagaaatattccatatataaatatgtatatatat

SEQ ID NO: 74939 - DNA, 706 bp, Cannabis sativa
tttttttattaatgtacaaattttcattaatcaaacatgcacattacaccaaaggcataccccaccatcctccaacctaaaaaaataaaatctactaaagagctatgtatattttactagcttcacagtttctctatcttttctagacaaattgctctcattaagaaaattaacattggtcttgttattcgtgtttcaagtaagtgacatgtcgactcaaatagaaacttaaagcctattagtgagcccaaataacataaattgggctaagcccaaatgttatctggccttctggtagaacaattacacgtcttgtcagatgaaagttacgtcaagcctagttaacatacaaaagagtgtcaactttgtgtacctagaatgggttctcagtgtgtatccaaaagctggtctcagttttccatttactgctcccaacagaataagggatacttttctaaaatcttggacaaagtatattattctgcctaaaaaggaaaactgaataaattgaagattaagtaattaatatcagattaattacccacgattataggacacgatatgaacaactattatgtgattagatctccacatcagcatacacatgttgctcttgggttgggcttcgtcagataagcccaaatctatgaattatctctaaacttccccttaaagggaaagggtaactaagtagggcctctattac

SEQ ID NO: 74940 - DNA, 985 bp, Cannabis sativa
atatattaattgcttgtaatatattgataataaaaaataaagtgtccaccataatacattatttttacatcgaacactcaagttttacaattttagaataagaaataacggaaagatgtgaaagaaataatgttggtggagattacaatagtcaagataaatcatataagggagtgactatgtcaaacagatgagaagaaactcaaaaaattttctatgatttatggattccgaaaaatcatcaaaaattatttttaataattttttaactcaaaactatcattaaaataataataattattaaacggagtcaaaaaattatttaaaaatcatagaaaaatcagaaattaaattctaagcacgctggaaaaaagaaacgtcaaaaaacgacgtcataagtggccgcacgtgcccccacgcgctgttgccaagagtgggcatcgcagaggagggtcttcttcttcctccagccggatcctcatgcgggtcacgcgacccaattcgtgcgcaggcgggtcggagctacttttcggccaaaaacgcgacaaaaacttcgggaaaacgaggggttttattcgggattgaatttctactctatctatggattcaattcggggtaaaacatccaaaacaacggtagatctggtaatttaatccgaaaatttcaaatgaaagaaaatcattaaacctactgattttggactaaatcggtaatggaaataggtagccgtattagaaaataatgtagaatcatttattcataatcaattttagtcaattatagttataataaaaaaatctaaatataatttcatcattaagaacacaacaaccctaaaagtttaatcttcaaattctcctaatttactcaacaattttatgcaaataatatatcaaaagaaagagaatttaatgaggaataaatcccctaagcttttaagactgaaaaaaaaattcaacataaaataataacgaaattaatatg

SEQ ID NO: 74941 - DNA, 839 bp, Cannabis sativa
atcttgataagaaaatacaccaagtgttgggaaggttcccatctcgctatattctttttgtgatatttgtaatacgaggtgatcttctccttgtatgaaatgcgagacatcttatgttgatacactcacttcgctcgaatggatgaatatttctttcttatcggtatactccaaggcatgcatatgtctcattaatctaagatcaatagttattattcttgtctcactattgactataaagttaatgagtttttgaatattatatatttaacctttaatcaataaacaagttatttaatatgcatttaatgatatcgctgtatcatctaaaattgtttcgtattccttctattgaacacgtgtcaacttctgaagtgtagtcgattttcgggataagggagtgttcaattttaaaattttttaactttatatttatttttcttaaatttttaaacctttaaatatttttttcaaaaaataaaattaaaaaattaattaatttcatttaatttataaaattttaaaaatacaccacaaaaaaaactaaaaaaatataactaagtataaatcaaacatgatgactttaaaattataaattagttttttaattaatggtagtctatatataatacattaattggttaataaaaaaaatatacaattaattgtggaatatttggcactatatgttgttacctttaattcaagggcacaacccaaatattgtatgtaatcaaatttggaaactgtatttctgattatatgtttacaagtttaaatcatattattgttctaacgccaaaacaaatgtattgtactatatgtgtgcatgtgtagtc

SEQ ID NO: 74942 - DNA, 859 bp, Cannabis sativa
attgtgtatctctagtttctaaaaccatattccaataaataggaattgagtaacaatctttcaaacttaatcatcaagctgtggaattcagaatcagataatgtatttacaaagatttaaataacataatgtacaattaagcaaccttaaaaaaaatgcagagctaaagcgattcaattgaactaaaaaaagatatatattgttcacctcaatcaaacactaatttatcataaatatgacaacaacaaaaataacagtttatcatattgattgaacaggatagtagttacaagattttgatttcattattcattaacataagccaaattggcattgcagttacataatataagagcatgaaattaaaatttcacctcagtcaaacactaatttatcataaatatgagaacaacaaacataactacaatcaacacatgttttttcaaagtttttaacacccatggatgaaaacaacactcatgaacatgaccaattaaccctcttttattttccaatccttcatttgcttcataatccatcaattgatgctcattcatcaatcattcttctcataatccatcaattagccctctctgcacctcacacaacatttcatgtccacccattcaaagaaatcacacacccctcaacctaaaattacaacataaaatcccaaaaatcaacataaatgaattagtgcaaatcacatccccttcaaagccttggttttagaagaaaaagaagacaaaactccctttgttgcaccataccacctcttccttccactttcctttttcttcaacttgtaaatggcgtttcaagctgctcatcactctcggaaaggattacatttctgggt

SEQ ID NO: 74943 - DNA, 615 bp, Cannabis sativa
cgttctctctctctgaacttcggtgcccatttcgtttcagcccccattttgtccaccttgaactccgacgccgctctatctttctgatttttccatcggtccgtctcaacctccattactcgataagaaaattaggagatttcggcgtggccaaatattcgaacaccactggccacgaaaggtatcatccctattcctaattatgtatatagttgtgtgtaatcaaaatccctaggtcagtttcgttagcaggttttcaattttatgaactgggttgatagatattttatactctatgaaatctaatttcaactttaatggcatagtgatttttatataaatatacatatatatatattcatggtattattttggactttgtggatgctttttagattgaccagaggattatttttggatttaatttaggaacattaagaattggtaaatgataagatatagaaaaaattttaacatatcaaacttcactatgacaatgaataaagtttggtttgaagcctaagccaatggctttgatcaagaagctatgatttttaaaggctaattagtaatattttcccttgaattttgacatgtaccaaatcatgcccttga

SEQ ID NO: 74944 - DNA, 621 bp, Cannabis sativa
ctcatttgagatttgttgaggtgaatgtcctcatttgacaatttcgaggtgaatgaccccactttgagttttgttgaggttaacagcctcatttgaattttgctgaggtgaatgatctcatttgagattttttttaaaaaattgcgattgtacctaagtttagcaattaggttgcctacgtatccttttgaaatgaatcaaatcgaatgtagttcacgagttattgataacttgtgatcatgtattctaagagtgaatagagtttgttttaagaaggaaactcacttttaatctcatttgaatagatttaaagatcacttgaattacaattctattttgatgagaattgtaaaaataattcaaatttactgaagactttttgtctttatgaaaatacatgtatattacttaagatatatgtttaatcatcatattatatatacatgtattttcatgatagatatctcatctaagttgatgaatgtttatgatgtgtatttatggtcgattttattttgtcgaccaaacatatatataattttggaaacttttagaagttatgctcacggtatgaatcgttccaccacacaatttgaatttttcaatcttttatatgctttt

SEQ ID NO: 74945 - DNA, 846 bp, Cannabis sativa
tttcttattttaattttctctcttaattttatttagtcaaatagaagtaagaatttaattttaaagtacttaactacaatcctcgtgggatcgacctcattcttgtaagcctattacttgttaatcatacgtatacttgcgtgttgaaaatactacaacaataaaccctaatgggttcgggtttcacccaaaaacccaaatctggcctataaataaggtattcaccctacatgcaaagggctacgaattttgggtacaattaaaaatttggtaagaatactagcataaaataccctatagctaaatggttcaataatattgactcgtgggtaagacttattaacacctcaaccacataaaaatatttatttctcaatcggtttctaaaaaatttgatatacgattgtgattcgataaaaaaaactacatgaacaatttatatcacacagtgataaaattattttgttaataattctctcttataaacttattttacttaaaaaaacccaaaatttcataatggctaacacttttttcacacaaaatttacatcttttgtattttattattagaaagtaatttggcttcttaatctaattttaatcctagttatgtctcgatagagatgatgtcccaattaaattacaaactattattttaactaattattattaataaaattagggaactaagccgcgcttcgcgcaatgttgcccaacttatgtaagattatataaatatatattatacttattgagtgatataatctaaaatataacatttagatgtgtgtattataaacaaagtaataatattgaaattaaaacatgaccatgaatagcactt

SEQ ID NO: 74946 - DNA, 791 bp, Cannabis sativa
tgttgtataggctcatgtgatgtaggctcaggctgctggtgtatgtcagatgactgattggtatttataggttgctgaagggaaaatgcagaccgagtatttatgggtaaggacatagtgtttggtgtaggtaatgtggggttagaaatggtaggtgggaaggcatgtatagcagcttgttgattaatattggcagtggtagagggcatgggagtggttaaaacagcaacaggcacatcagaaacaacattagaagttgagacaatagtaggaaacacaagatcagcagaacaagaatgtgaagaatgtacctgagaggagaaggcagggaaggaaccctcattgaacaccacatttcttgcaatataaagtctgcccttggaattttcacacaagtatcctttgtgatgagaagaataaccaagaaagatgcattgatcagatctgaattcaagtttgtgactattgtaaggtctcaaatgtgggaagcaggcacacccaaaaggtttgagtatcttgtaatcgggtaggctcccaaataaactttcatagggactcttgaaaccaagaacagctgtatgaagtctattaatggtaaacacggcacattgaaaagcataccaccaataagacaaagaaagactagattgagcgagtaaaaccaaaccagttttagtaatgtgtctatgcttgctctcagctcgtccattttgttcatggtcatgaggacaaggatgttgaaaatgaattccttgatcatgtaaaaatctagcaaatggtctgtattcccc

SEQ ID NO: 74947 - DNA, 795 bp, Cannabis sativa
taaagttttacaatcttgaacaatgaagccaaaaatagaacataaagtagagtggctccagattgcttgaatggagagcaggctatcggattcaatctaaacgaagctaaaacatgagctatagtgagaaatttgtctttccaaataatagaatttcttactttccacaaagaccaacaaaccatcaccactttacacacgattgtcatcaagttgttggaaaagagactctaaccaacccccgaaagaggcagcaagggaaactccagcaggaagactcgtactattccagcaagaagtagcaaaagggcaagacaataaaatgtgagaagtagattcagtagaagcattacataccagaaaaatagtaaggacatccatgtttcgattggaggtttagccgacttagaagacaaccagaagctacccgccgtagatttttaacttttggcgggattttaagttgccacagtcgctgccaaaagccagagttgttattgccaatccttggatccttggatttttgaaggaggtaatagggttgtacataaaattttgtaaacccgtccaaatcaaactgagataactcgatgaaaaatacaaactgaaaaattcgacaaaaatataatccgccaaatctttatattaggcacattgaaaataataccaacccgctcaattaattcgaaataactcgactaagattaagaagttttttttatatataatctatatgtaatataatttaaatacatatttataaaaaatagaaagtttaaactactatatttcttt

SEQ ID NO: 74948 - DNA, 512 bp, Cannabis sativa
gtcgattgctcataatatcctcatttttcaagacttaataaagaactgtgggaggaaaaacacctcggctaggtgtgctataaaaattgatcttagtaaggcgtatgacacggtcaattggaactttcttgaaaactggctgaactttctgtgctttccttctcgttttgtcaaatggattatggtgtgcattaggggtacttcctataacctaatgttgaatgggagattgcaaggaagctttgaagggaagaagggcttgagacaaggggatcctatgtctccgttattgtttgttttggttatggagtttctaacaaggaggcttcataaagaaactgaaatggagactttcaggtatcaccctatgtgtaaaaagctgaatcttgtcaatttgagttttgcagatgatctcttattgttcagcaaaggttctcgggcagcagtcaatcatctcaagaatgctctagatgacttttgtaaccaaacagggctttgtgtgaatctggcca

SEQ ID NO: 74949 - DNA, 741 bp, Cannabis sativa
aaatccttatttgcttcgaccatcttcccagcttcctccaacttcttggcccaataaagcatcagctgaatctcaactggtctaggaaacttcggggcagatccaaatccaccatattttgaatcatagttttcagaaagctaaaagaaatgaaagcaaataagaattttaaagacaacaaatacatcatgtcacaaggcaggtgtccaataatagacaaattacttaagtaagacataagagaatgacaggattagataaaattgaacaaaaaaaaaatcctgtgtttcagatatgaattagagaataatgggaagattaatcctaccatgaggaactcagaattgatttaatactaataaaatattttatcagggaaataaaatttgtaactttacatcattcttatttagcataattataatttttgacaatagcatattataatttacaaatgatcaactcactttttttttcctctttagttttcttatccaaatccatctcacacatcaaatgatgccaaattaatttacaaagttaagggaaaaaagacaaacacaacttcatcctcactgtgtacaagttctatgtttccttttcagtgtctttcttttctagatcttagtaaacataggggaaatcttctgtactaataatgccttagttgtgtatttttacatttattcgctattttcttttccatgtttgatttgctttttcataattttctaagctgta

SEQ ID NO: 74950 - DNA, 1365 bp, Cannabis sativa
atttatttaaaataaatctaaactattttgtgacacactccgattaaattcggtactctgataccattttttttgtcacgacctgagtcctaggccgtggcaaatatgtaatatccataacttgggttgtcaaaggtcacactttgacatttgttggaagataacgcttataaatgatctttgaatttatatatatcacaaaatactaatttaaaaataatgtattaactcctatattagtaagaaaatattagtaacaaaaaagacttctcaatataaaagaacaataatatgcagtcattacagattgtgttttatacatttgtgataaaatgacaatataaaaaaaaatacaaagtcactccttatagaaagttagttgattatacagttgaatacttttttgataatggtgtagttgtatgcacttgtaagacattcgagttcataggagttttatgtgcacatgctttcaaatttctttctacaaataatatttcaaaaatacatgatcgttatatattaaaaacgtggacaaagcatgcaaaggttggaatcaaagcaaagctcattgaagaatacaagttttgaggattctaagactagaatgggattgcactataaggatttgtgtagaatgcagacacaagtatcaacaaagtcagtaggatacgaagaaacatatgtgattgccttagatagttataaatatttttttggaagatgtggatgaattcataagacaaaaataagccaataaaatatttggctctagcaacttgcaagataaatcgttgtccgaaattactatcaataaaggtaaaaataacattaaggtagtcaaacttaaggaaaattgaatgaaaaatttactaggactaaatgtgctctttaaaagactaaaaagaagaaaaaaacaaaaacattgttcaatctcctgaggcatattaatatcttattataattgttatgatatgtattatatatttttaaaaataattataattgtatttttattcattatcattttcattttagattccttccaatgataccaataattaatctaatgataaattttttttctctcaacaaaatttatcaaatacattgctctatatgccatcaataccatcaaacttcaatcaagtatgagttatatttatttttatttttttttcttgaaaattaaatattattaatataattgctacatttttatttttaattttttattataacatctaattgtatatagattcacagtatacatggagatcaaaagcatagttaaatttatgcagcaggtatatatataatagtgaaatttgtaaaactaattaataatgtgaaagattaaaattt

SEQ ID NO: 74951 - DNA, 792 bp, Cannabis sativa
taaaaagagtacactgatatactttttatatttttagtctatttttttttttttttatagtagtgcatattataattatttaagatattttgtaaaattttaagaaaatttatataattaatttacaatttaaaaagtaatattcaaatagtctatttcacacgcgtgtttgaaccttattttcaacgtattaaatttcttcgaattaatgtctcaaaattttgcaagagattttaaataactacaacttttacgactataaaaagtaaactaaaaaattctctcggatgccgaaatagatagaggtgcattagtccatcccttttaagaaagagcattgtgaaattttctcatagtagcggcgacaaaaaaaaaaaatatttctacaatgtatcctattaaaagtgcactcatgtgaagaaaaatatccgtaactgaatatattgtgtaaaataattgtgttgagtgtttggtaaatatattttaaaatattattaattgtgaagattttaattataatgatagtagtattataatataatttattataatcacaaatatataaaaatttactttatagtttatgcaaaatttcattttatatcattatttattattttattttactaaagtatgaattataattatttgaacaaaaaaaattaatttgaaaataatttatagtatttttaaattatataattcacaagggcaaaaataatatttaaatatttaatagcatgtctaattattcttttttatgtgcttagtaactattcggatcttattttt

SEQ ID NO: 74952 - DNA, 973 bp, Cannabis sativa
  modified_base (54)..(61): a, c, t, g, unknown or other
tttaacatagtattatataaaaatatgacatataatccaattcaatataatacnnnnnnnnacaatacgacctaatacggcgttctaaacgagccccaaaagatcaacttaatgtgcaataatggaaataattttctgataaacttaatacttagctatgctgtttatattctgcacaactatgtcttttcgttaactctttagtaggcttcttctacttttccaattataaaagttttatgacaactattgaaaaacgattcacaattttattttcttttcctccattaaacagtatccccattaatagtcataaacaattaccaattttctgtaagtcctaacttttttagtgaattgtgctctaataaacgacagacataaatctaagtgaaggtgaggaataattccttagtattcagccaccaaagcttatttttatcatcttggactcaactacttgatgtagtaatataatttcaaacaatgtttttttaagccatacaaagcaaatgcagatgactcgtgtttttctagaactgaacagcggctaacttatcgtgcaagtaacttaacatttaagtgtataacttacctgttgatgatgcaatgccagagagacctccacaagttaaactgaccacggcagtggaatcgttcggcctgagtaaaaaataaaatgatattaaatcaaatgcacacagaggtcacattcacatagaacaagtatgtcttgtaaagtgctttcattctccgttattggtaatgagacctctattgagtcagcatcactatcggagacttcctcagccgaaatctccatctgggtaatgtgtgtgacacataatcttgggtaatcttgggtgagctcgaataatcgttgtttaggggcatagtttaaaaggggaagaagaaggttgaggaagtgtactgggggaggagcgcagcacggctgcaatgaaagaggaattct

SEQ ID NO: 74953 - DNA, 830 bp, Cannabis sativa
tgtgaacacagttattaatttaatttataacttattatagatttagatccaactgttagaactctcaaaattaacactttaagggagctaatatttaatctgttaggaaagtttggattccaatattgtatgtcatgttgccagccactcatgttagtagatttccaaaacagaagttgtatgaatcaccttctttgagaaactttaacgaatgaatcaaagaacataatgaacacaatcaggagttcacgaatactcgagattcagatatatctaccaatgatcatcattatgatatgaataattctttcatggtaaatgacatgttaatgaaagatattatttcatatcgatccagacatgcataatcaatttatacacaatacctttactacatgtctatccacatatgtaatctgtataaaaatcacacacactagaagtatagtgtatagtaaaccgtacttggcagttccatattaaagattctttaactttaatgcactactgacttgttttatttatatcgtataatcttaattcttttgtacatccttactagataataccttctccatatgaataaagaatttgctgatatttattaattatacttctataattaatgtattcatttatcttattattgtattttatatattttgtaatatattatccattagttacttattttgaaggcataaatcccaacaacctagtcaaaaaagatcatgacttgtgagaactcttccgccaacactcctatagggagcattgaagatgtttaaaaggtaaacccaatggcgtccattcttccaattagacataag

SEQ ID NO: 74954 - DNA, 1330 bp, Cannabis sativa
ttattactttatcatttttgctctctttttattatgttattaatcgctttataatagactcactgtctctggctaaaatcgtggtcaatactttggtgctttcattgagagcagaaacccaagttttttctgtcttaagtgttaacaggcatacaggatggtagtacaaacttgtagaggccttgttgatcagggtgtgccccaaggactgttttctacttccaaggataaatcagctcgtggatgcaacaggcgggcacgagatcctgagcttcatggacgcctattcggggtgtaattaaatcagaatgcatccaccagaccaagagcatacaagttttcaaacatatatatgtctgtactgttataaggtcatgccgtttggtctaaaaaatattggagctacctagcagaggttggtgaacaaaatgtttaaagaccagatcggacaaaatacggaggtatacgttgatgacatgctcgtcaaatccaggaaggctgggggcatatagaggacctggatgaatgcttcaaaatccataaaaaagacaactcaatcccttaaagtcctgctttagagtcagctcaggtaagtttctttgttttattgttaatgctcggggtatcgaagacaatctagagaaaatacaagtctgcttggatatgaaatcaccaaaaaaaactaaagaagtctaaagcttaactggtcggatagccgcactcagtagatttgtttcaaagtcaacagacaagtgtgctcctttcttgaacatcctttgaggtaacaagaaatttgaatggacggaagaatacaaaagcgcctttcaagaactaaaaagacaacttgaaaagcctcacgtactctcaaaacccctggacggagaagaattaggaatatacctggctgctacagaatacactataagtgttgtactgataagagaagagaacaatgtccaacatctagtctactataacaacaaaagactcgttgaagctgaaggacgatatcctttgatagaaaagcttacttactgcctaatcttagcaacaaggcaattaaggccttacttccaggctcaccctgttcgggtatacactgaccagccattacgccaagtattgtagaaacccgacatttttggatggttacttaaatgggcgatagagttgggtcaatatgaaataatctttcaaccctgaatagtagtcaaaggacaggccctagcttactttgtagttgattccacgggtaaagaagaaagaaacttaagggacaacctggagccagtacaagaatccctgccgaacaacaatgaagacagaccta

SEQ ID NO: 74955 - DNA, 1085 bp, Cannabis sativa
gagggatacacaaccagaaaattcttttttgttttcctcaaaattcaatttgtcaaacatagaaattagaggtcaaatgaccaaaatgccccaagggccaattaacatgcatgcatgcacacttccaaggacaatattgtcatttcatacccatttaatatccaaactaatttcagattatcaaatataaaataacatgccaacacttaatccaaaattgtatttcgggcccgaatctagttcggcccgaaatacccggctgtgactatactgcgccaacctgtcaaaatacacctgaaaagacaacacacgcatactatataataatatacttccattaagcacgtaattaaattaatttcatcattttacccttctcgggtcacaattactaaaatgcccctgactttccaacagggtcttaccatataattaatcaaataaattctcatatattgaacgatataatattataattcctcaattattcacaatgatctaattagggttttgctaatctatttcttaatgctaaggtattacgtaattaatttaccaaattaaaaattttccataattattttttactaaataacatatataaaaatatgtgttaaataaaagtggaaagtttaaacaaatgtaatttaattgactaaattaacaaaaataagaaaataaaaaaattccaaaataaatcaaaataataaaatttcaattttttaaaatttttttaaattttttcttttttttttttgaaaaaatctaccaagaaaatgacacgtcgtttttatccttaagaaaatgacacattgtttttaaaccacaaaaaatacagtaatgaagggggaatgacatgtcgttttccaatatggagggaacacgacttgtcgtttaggtcgtcttcaagtctttgagtaggtcactttgacccgttttctgcaactcgggtcgttcggacctgacccatacccgattggaactctcaattccgacgactaaattttgtattttcaattcaaaaataatctacatgcaataataaggagatccatgtaggttttaggtatcgaaaacacgaaaaa

SEQ ID NO: 74956 - DNA, 680 bp, Cannabis sativa
tcttcaatttcatcaattccatgtgcctaaaatgtgcagttgaattaggcataccagatattatcaacaactatggaaaacccatgaccatttctcaactcacacttgcactctccatcaacaaaaacaaattccattgtctctatcgccttatgcgacttttaactcactctggctttttcgctttagaaaaagtcgaaatagaaggagaaaaagaagaagaaggttatgtaattactgaagcgtccaaattactcctcaaggacaatcctatgagcgtcacacccttcttgctactagtgctcaaccctatcttgaccaaatctttcgatgttctcgatacttggttccaaaatgacagtccaaccccatttgacacggccaacgggaggacgttttgggattatggaagccatgagccgaaattagcgcaattattcaatgatggaatggctagtgatgcgcgattggtgacaagtgtggtgattgagaagtgtaagggtgtgtttgagggagttgaaaggttggttgatgttggaggaggcactggaactgttgccaagtctattgcaactgcttttcctcaaattaagtgtagtgtattggatttaccacatgtggttgctgatttagaagatgagaataacctcaaattcattggtggagacatgtttgttgaa

SEQ ID NO: 74957 - DNA, 809 bp, Cannabis sativa
attattaccaggggtttagcctctgtccatttggtgaagtactctactccgacgacaacaaattgtacccctcctttcccctttgggagctgaccaattaggtatatcccccacacggggaaggaccaaggagactacatcatcatgagcttgttgggtggagctcttgtgatttttgaaaatctctagcacttgtcacattttctgacatagtccatcaagtcttcaatcattgttggccaaaagtacccctgacggagtatcttcttggataggcttttcccccgacatggttgccacagaagccttcatgcactttctaccattagccattaaactaaggatttagtgacacacctcaagagaggccttgaaaagctctgtctgtactttatcccatctaggatcaggtaccttgcagcttttcttctcaatttgtttgcttcatttttttcttctggcaaggctccggttcggaggaatgttacgataggtgtcatccaacatgtcaacttcttctgggatagtaatgctaggttcctctaagaattgtataggcaccaagtttgctttgccagcaatggtgctgcttgctagaccgacaagtacatctgctgtagcattatgctctctggggatcggcctgattgtgtagcctttgagctaacttagcaagtatttgatttttctcaagtaggccaccattttcttacctcgaggtgtatattcacctagaacttgttcacaataagttgagaatcactgaatatgtctaggtggttagttcgtactttatgtgccagcttgag

SEQ ID NO: 74958 - DNA, 981 bp, Cannabis sativa
cgaaacagtattaactattaagtggtcgccctgaaaaaaaaatacagtgggcatgcatcacttttgttcttattcggaagtttttggagtttggtactctcacaaattatatatcaattaggtaacgtagccgcccgtgatctcaaataatttattttgcaataatttagatatgttaacttaaggtttatttatatttattgaattattattaatgataaagtactgtaaacttaacatgataaattaaaaacgtaaatttaaaattttaaaatatctaatttatttaaaatattaaaaactagtaaacaggttgtactttgtgtgtagctatttataaaaatttcaaattatatataaatattaattatacaataaaattgtattacataatttcaaacttatttttatatataattttaaaatatatatttattaaaaataatgataatttttttttctttctttaaaaagtttaaactatcattataaattaatagtcataacaatagtataaagaggatgaggaatttgtcctatccaagacatgtcttgatccaactctaaagcatgttttgccaaatcatgaacagcatggttagcattcctcatagtatgagaaataacaacttcagggaaaaaagataaaagataacgaacatctgattaaatcagagaaactagataaatccttagatgtagagtttaaagcatcaacaacacgtaatgcatcagtttcaatatgtgtaatttgcacttgcatctccattacccagttaaggctgtgaaaaagtgcttttgcttctattttgtcaaaacgaaaaacaaccttgtactggtttagaaagtgcttctataacatggccattgtgatctctaattaacaccccaatgccaagtacctttgtggtggagtttagtttggattttgtgccttaaataaaactcatttcaatataatcagacttactaattaataaa

SEQ ID NO: 74959 - DNA, 1052 bp, Cannabis sativa
gaacttggactcggacgaaaagaccaagagactaggatcgaaatgttggacctagacccagcccaaaacccgtacacaaaactcagacccagaccgaggattccgaagtcggaaccagacccggacccaaaaccttcctcggactcaaactaggacaagaacgtagacatgaacccataccaggaccaaacccaaactcagacccagaaccgaacctagacctgcacccggacccgaactcgaaccagactgggattggaagccaagacttagacccggaactttcccagactcagatcgagattgaaacctgggactcagaccagaacttggacccagaccaaggaccctaacccacacctggagcccgatctgaacctagaccgagatctggacccgaaccaaaactcggaccaggactcgagctccaaccagaactagaaaccaaactcgaattcagaattgaaactggagctcgaatgggactaggactaggaccaaagaccaagaccaagaccaggacctagacccgaactcaaacccaaataaaaacctagaccgacacccaaacccaaatcgtgactaggacccaaacccgaacctagaccgggacccaaacccagactagaaccgggacttggaaccagaatcgggacagggacctaggcatttgaacaaggactgggatccaagacctgaccccagacccgcacttaaaactaggaccaagctcgtgatccgacacccgaaatggaaccagaccaggactcgagatcggtgttttgatctaggagccagcccaaacctcgacccagaccaggactcgagatcggtgttttgatctaggacccgaactcaaacccattcccagcccaaacctagacccgaacgcgtaccatgcagcccaaaattagaactcaaactagaagtagaccaggactcgagaatgggtccagaactagaactttgacctggacctgaaaccgtaaccagacctgcgtgtagacccggaaccgtaatcggaccaggaccacgactctaacccagaccta

SEQ ID NO: 74960 - DNA, 549 bp, Cannabis sativa
aggggtttggtaatggtggatgaccattactactatgagctaagacccttgaagaatgttgcactataataacaagtgtcccaggagagatctaaggtggaaattgttaaattaaatctcccctggaccacttgtttttacagtttaccagaagaaagaaaaatacaaagtaaaacggctcgtggctttacccactcaccagacacaacaacttattgactaagtgtaactgaatttctgttttgcaacagaaattctgttacacacctacaactaaagaaacagaagctatagaagggggaggaggacttaccaatctctcagttgagagataccagaaatagaaatcctagatttgagagatgagctctcgatgttgttcacccaagtgttcatgcaaagaaaagaaagagagttagtgagaaatcaaaagaaaatacagaaaaagaaagattgagagaaaatcagaaataccagtcaagcttgtgacttggatttctcacttgtttgtaatttcttcttcaatagtgcagatcctaagaaacatct

SEQ ID NO: 74961 - DNA, 523 bp, Cannabis sativa
tataacaaatttattagttacatggtttaaaatatgtaaatatatttacttattgtttaaaaaaatgagttaaatatattttttataaataaatttaaaatagattaaattttatatatttaaaaaatatagttaaattgtatcggatttaattttttattattattattatttaaattaataattaagtgataacaactctaatacaaatctaagcaaacatactttgcatatatatatatatatacataaaaaaattttgaaaacaaaacacgtgcatagatataaattagatctcgcggtcattatataaaatattgtttgggatagacgaagcactgaacttatcaaaatggttgttagtgaacgtccacttggccacattatgtgccataaaattacaacttctactaacaaattgaaaattacaagtatcgaaaatccgagagagttttaaacaaaatttagagtagttctcaatatttcagcgaaagtttcaattgttgatggagttgataaccac

SEQ ID NO: 74962 - DNA, 681 bp, Cannabis sativa
  modified_base (366)..(368): a, c, t, g, unknown or other
gtttatatgtattatcatgtcattgttgaaaatgaatatttgcaaattaagtgaataataaaaaaaaactgtgggatggtctaagattgtgacacttttcagattggcatcaccatacaaagcttgacccaccaaatgcattgtagaaccctaatttgtgataccactaaatgtgattggacaacactaaggagaataaaagaaaaaaaaaaatacaaaaaattatcatttttttagaaaaattaaaattaaatacaaataaataaaataaaataaaagcaacacttatagggtggtcatattttaaagagtaatttttggcataaacatctaaatttaatttttcagttataaataaatatttannnttaatttttaacggtaataatatataaactacatttttaaaattttgtaagtgttaagtataagttattattcacgtattatttttttttattggcatatttaaattactttttaaataaaaataaaaatttaataacttagaccaattaagaattatggtaattaatttgatacttaacattcatgtatctacaaaaacttacaaatataacttacgcattattactgtaaaaaattaaacttatacatttatgtcacaaattactctattttaaatggaacaaccatttattaaaaggaataaaaaaatga

SEQ ID NO: 74963 - DNA, 723 bp, Cannabis sativa
aatactgattgcaactgattattataaaaatgcattacttgattaaaattgtcacacaatcaggtaaattgacaattttgatttgttgtgaacatttgaaccaattgtttttgatcaataattcctaaaagtagaacaaagtgaaagtaaattcaagcctttgggttggtttgggattgtaaatttgagtttctatggtgattccaacaacaaaagaatgaaatttatgctaatcttatctttgttctaaaattactcctatttgagacttaaaattatttaaaggacgaataagatatgggagttgaattgtatctctgaatatatatcttattagggtttataatacacattttatttcgaaaactaagtaataaaataataatataggaattaagttctaactgcctatttttcaaatcttttttttttttaaaaagaagtggaaatatttatatatatgtatatgatcccgtattgagtaagcctcaattgtagccacattaaaagatctaagaaacttcaacaaattatattccaaaagagttcataaggttcttacaatgagttacataatttttaatttttttatctcggatttaaacttttaaccgctttaataaccatgttaaaatcactttcacaataacaaattgcaagtctttcttcactgcaaattctaactccattagacaagaggttgctttcccacacaaagcatta

SEQ ID NO: 74964 - DNA, 917 bp, Cannabis sativa
  modified_base (849)..(892): a, c, t, g, unknown or other
aaatataaaaataatatgacactctcacacaaatgaccccaatatttagactctctaccatatatgctcaactcataccaaacaattttacaaactaatttttcaatatacttgcaccatttaaccatctctactaatgtcaacaacaaatactttgaaatgagcatgactttaagaggttatgacattaggcttaagtaaaggtagataaaaatgtcacttaggcttaggctcaactataccatagtttttttgtattccaataaccttaatttcatcacaaaactatatcattcattccccatttaatacaatgcaagagagaaatttatatttttgcaacccaaactaagaactgtttactattcttttttttttgcccatttttttaatttttattaaattgaattttgaagataaattgacataggagacaaagattgcaacacattaaaatattctctctcattatttttaagattttagcttctcaaaacacaatacttaattacaattttccccaaacttatctaaaaactcatggtatagttagggcaaagaaaaataataaatgagtcaattttttagctcaaaaagtgtgcaacaaaagaactttcggtttaaggctcaaaaagggaataattaggataatcacaatataagttagcttgaaaggcacaaacattcccaaaaaaattgcctaaatcattcttcaaagcataagacatgaaggatttcacctcaaaggccaaacaatgcaagttctatcaaattcaaattatcatattgccaattctagtaaagcatatataataaaatccaacatattgttggaatatgttttaccannnnnnnnnnnnnnnnnnnnnnnnnnnnnnnnnnnnnnnnnnnntgaatttctaaaacaatgaaattaa

SEQ ID NO: 74965 - DNA, 942 bp, Cannabis sativa
  modified_base (908)..(916): a, c, t, g, unknown or other
ctatgttgttgattctggctatccaaatatgtcggggtttctagcaccatatcgtggtgaacgttatcacttgtgtcgttttagaggaagagggaatcaccgcagaggtgtaatggagttattaaattataggcactcatcattgcataatgtgattgaacgttgttttggacttctaaaagataaattcccaattttaaaggcaatgcctccatatttgcttggaaagcaatgtagaataccaatagcatgttgtcctatccacaactggattaaaatgcaatatattgatgatagaatgtttgaccaatactccgttgatgccacaccattagaagatattgaaggcattcaaaactaacaaggaggagatgaagcagaaatttatgagacaccagagattaattttagtcaagcttatatggctcggatggaaaatgtcagagatgacattgctggacaaatgtggcttacttataacaataacaatagaacatagttatttttttttttttttttaaaaaaaaaatgtaactttaacttaaagaaaatgatgttgtgatactatttttatgaattttaattagttaaattttaaaattacataactaaatttatatatataaatgaaagtttgttatcatacattattatttaaaattaaattgttttcaaattcagttaaaccaatcacatattctgatactgttatatttttaaattttgtaccaatcacagatttacaattttaaaatttaaaaatagtttacaaatactgaaccaatcatattttcagaaacatattttcagccacaattttcagattttcatttcagaatcacggattttgaaaataaagttttcaaatactgaaccaatcagcccctaagtgttttaaggataaaatnnnnnnnnnggtagaacggtaaatttgtccatatt

SEQ ID NO: 74966 - DNA, 1086 bp, Cannabis sativa
aattttaaccgttagatcatcatctacggtcaaaaatatccaacttgtattttcccatattttttttggattttttattcacatttaataggacctctttcacctataaaaggcgagctcctctggctcattttttatattcagaaaagtatccataaggtcagagcatctctctctaggttatctctctacaaattagagaatctgacttagccattttttttgtaatctataagaagacgtagctccagtattgtcacaatatatgaagtgaactattaaaattttttgtgtctctctatttatacttaacatatatttcattctcgccaatctagagagtaggtgtggcttaggaatctctatcagaatttctgagttaagagaatcaatgcacccaaaaagtttcatggttctctatgaaagaattatttgaaagaagaatcctttaccctttctcataattttaattcctcaaatttatatttaatcctcggatagtaaaaactaatgcaacgacaagtgacatggcctgtatagtgctctaacacatgatgtgtaaggcgtggggttcttgaattcttaaaaaagaaaaaaaaaacacacaataaaatggaagttatacaatctgtagcaaagcatgggacggacatctgaccagtaccaaacacagacaaaatgataaaaaataaaaaaattgcaataacaattagacccattatcgagctcaccattcctctatcgaacctacaagtattcgatcaaaaaataaaaaattacaataacaatcggacccacaatcgagcccaccatcgtcctctatcaaacctatatcttcaaccactatccttttttcaaagaacatgtatcagacctacattggacctacatcagacctaacctaaaaacaatatttatagtagtaccacagatcagacccaaatcaaaaaccctagatcaaaccaaactcatagatcatatattaggaaaatacataacaaaattctaccctaaatcagtgaacaattaaactctaacaaccaaaaatacaatttatttcaaaaagctagggattcaaaacttacc

SEQ ID NO: 74967 - DNA, 809 bp, Cannabis sativa
ggtactcagtaatattttataccagttactagcacattgtaggtaaattagttacaagtgctgtcttgaaaattcttaatgatggtggtgatttttcaatctttaacaagacattgattattttaatccctaaagtcaagaagcgcacttcaatgtcataactgcatccgatcagcctttgcaacgtcttgtataaactggtgtctaaaactattgtgcttcgtttgaaaccatatctctcacaagttatatcagaatcccaaagtgcttttcttcagtctagactcataatggataatgtgctggtggcttttgagttattacattccattaacacatttaaaaagaggcaaaaaggggtatgtagcaatcaagcttgatatgagtaaagcttttgacagagtagaatggcattttattcagagcatgataagtgctatgggctttgatcatgttattgtggggcttattatgagatgcttaactagtgtgtcgttcaccttttcagttaatggtacagttcaaggccatgtcacgcctactagtggaataagacaaggagaccctttgtctccttatctattcacaatttgtgctgaaggtcttttaaaactctttcaatttgaagaacacagtggaaatcttcataatttatgtgtttctcgaggtgctcctttagtttctcacctattttttgtcgatgatagtctggttctttgtcgtgcaaataagcatttgttgggctttgtgcccaaaataaaactttatttcaatgtaatcttttatatttatttatcaataaagaaaca

SEQ ID NO: 74968 - DNA, 1023 bp, Cannabis sativa
aataaaataatgttacctaaaataaataaaaaagtaataaaaagtaacaaaaatgtagcttaatcaatataaatacatactttaacatattgaaactataattttaacagtaactaactgaataagtaatcaaaagttacttaatagataattttgtatttagtttaaagtttgtttattttatctcttcataaaatattaaagtaactaaaatgtagcttttaattactctaatcttcatccgcgaagataataatgttattataaaaactaacttataattatcttaaataacaatccaacataataatacttaaattgatttttttttaaaaaaatataattaattatatgttatttaactttaagatatcaattagtttcattgattaagagatatttttataattacatgtaattagcatatatatattgaatgatgtttaaatttaaagtttagttacttttttataaataaaatataaaagaaattaagaggttattttttataatggttatattttttttttgtaacaataaaaaaattatatgttccaacatatcaaaatgatcacttaaaaagtaaatcacaatgatattatttttaaattattataaataacgatgtgatcggaaaatgattttgaaataatagataagagagagaataaaaagaaaaaataataattaaaaattagaaattagaaacaaaaagtcctattgtagaagaaaagccctcgtagataatttacatggaaaaaaaaactaactgtacacatatatgtagggagagttcaaaatatatatatatagagagagagagagaattattttaatttttcggtatatagcgtcacacgctatgcgctgtttgcatcatttaaattaatggaactttttttgtaactaatttaaaaattacgtatataaataaaaaaattcccttatttatttaatggttaaattcctctcctttgagccttgtgtgagagttagggggccaatagtagcgggtacaacata

SEQ ID NO: 74969 - DNA, 830 bp, Cannabis sativa
aggttattagattcaaggaactctatcaaatttcattttatttaataacatgatgattttccaagtgctaaatagtgctctcttaattttgaaatctatcgaatcgtacttctaaactttgacatataccaaattgtaatattccatctttaagccgccattgtgtactcgcacgtttcttgaaaaacttcacaggaggtcacccatcctaaaattatcccaaatcaagcacgcttaattgtggaatttttccgtgatgagctaccagaaaacaagatgcaccttattgatattggcagtaccaatcaatcaattgaagctctcttcagctgtatagtcccaaacctacacagtctcagaatcatcacacttaaccttctctaagaaatgtgagattggatatcttacttggtatttttcttgttacaagtctccattgagcccttacatccacagaatgatctcttatcaacgaataagaccaacacgactgttttcagcatactttgtcctcactcgcacgcttttgagaaaactttcgaggagttcacctatcctgaaattacctcaagagatacaccttgttaatatatgtagtaccaatcaatctacttaagtcctcttcaactgtataatctcatacccaaggacggaggcacttaagtcattgtgtaggcttaagccctcactcaattttataatatataaaaaaaatttatgttatatatatgcatttaaatttttgtttattataaatgtgtattaagccctcactcaatttgttcctacccaattttaaaggtaataccactaaaatttaacaccaaatt

SEQ ID NO: 74970 - DNA, 694 bp, Cannabis sativa
cgtgctttatcctcactcgcatgccttttgggaattctttctaggaggtcaccaatcttgaaattatcacaggtcaagcacgcttaataacggagttctttcgtgatgagctaccaaaaaacaagatgtgcacattgttgatataggtagtaccaatcaatctatataagtcatcttcaactgtgtattccatacccacacagtctcagaatcatcacacttaaccttcctcagacgatgtgagatcggacagcttacctgatattaatagttacggatcacgggactactgattgtcataatcattcccttacggggtccaatgtccccgtcgaccacacttttggctgggtcaagactctaatatcatttgtaatgttcttgcttcaagcctccattgggccttccttcacggatttatggctcttatacacgagtacattactctagctactttctggactgacgactagccctacagaccaacacgagtgtttctagtatgctttgtccttactcgcacgcttcctacaaaaactttccaagaggtcactcattttgaaattaccccaggtgaagcacgcttagctgtggagatctttcgtgatgagctactagaaaataagatgcaccttgttgatatatgcagtatcaatcaatccatttaagtcatattcaactgtgtagtcccata

SEQ ID NO: 74971 - DNA, 843 bp, Cannabis sativa
aacaagccaaattgttttcaaaaacaattttctatttttaaaaacaaaaaataattttttaattatgatgccaaacatgcaataagttttccgtttgtgtttttctttcttcaatccaaagaattctctttgaagtttaagttactttaagtattaaaagtcacgtcaattattgcaaatcgatttgtaagccttttctcttgtttattttcatcttgtgcatttgacttagatttgttcaatagatttgtaagcctttagttcttctagttttattttatgatctttttttttttttttcaatagatttgttcttagccatgtcccctcctatatatagttctgtgtttttgtgcaattttagggctatagaattttaatttaagtatttatctaacaatcttgacatttaattattcatgaaatgatgaacatctttttcaaagtagttattttggtgatagtatgtttcatttccatattctctgttttagttttcatgaaatgataaagattttttccaaagtagttattttggtgggtgtatgtttttttatgtatatagaaattaccattacacaaacaatctaccacttattctaatttctaattttctatgcaatgcaactatatgtgtttcgacaatatttcccctctttggttgttgttggcatatcaaaaatgggcatcgtaataggactccacttctgattcaaattgaataaaaactccaacaaccacttgagacttaggtgggtgtgtgagtgttggaggttttgggttcgagtctcaggcaaaatatggttgtaatatataaacgctaaaaaaaaaaaaaaaaaaaaa

SEQ ID NO: 74972 - DNA, 662 bp, Cannabis sativa
atataatactatacaatataataccgtgttatatgacgtaccaaatgaacccttataccgtctaatactatatttttctcttccttttatttataccaccttttatttttctaaaaaataaattgtataaataattaattttctataaaaatatcattatattttattttctctatttattatttcaaaaataacatttattttgcaaattatttttctaaaataaataaataaataatattttattattttattgtgctaaataaattaatattttatagatttatttttcataaatagtaaccattattatttttctagttttaccaaatactttgtttgtattatgaagctagtttgatgactgatggagctgtagttctgagctctaataacttaattatctcactaattttggctcactaataaataatagttgcactctcaaaacatatagtctatgtattattttgaagcaatcaattacgttactttatgtccattgatttaatcattacataagttatgatcttccacaaaatattcataattagagctaagtatcttcgcttgttaacatttctaattacgtgtttatcaatcagttgatatttgatgaacatttctgtaagttattacaatactgtaaggaatatttaatc

SEQ ID NO: 74973 - DNA, 687 bp, Cannabis sativa
acgaaggttgctgtgatgatccagccatatcagtcaaacctggaaagaaagcagaaggacgttgttgtgaaattccttcgtacatgtatggatgtgtgtacggtggtccatacatgtaagggtaaggcggtggagggtgcaatggttgtggcaagggctgcgagagcggctgtagttgatgttgaggctgtgatgtcgaatatttttgcatgtcagatgatgccgctgaatgttgagaatgtgcaggggatccttgagacatgtttctctgagacggttgaggcactggagtggagtacttattcttaagcatattaagcattgctagctttgcagggtccatatttgatgggtctatttgagatgagaagagagtaaacatcacactcatgtcatttaccaaatcttgtgaaggtgcctgtgattgggtggattgggcacgactacttgaagatgaacccttcaatctacgaccaattccacgaacgtgaccccgcctctgacccaacacctcttcgaagatgctgacatgatcagttgatgacccagattcagaatctatctgagaacgagcatctcgagctgcttgcaactgctcctatattaaatcaaaaaattagaacaatatgacactaatattgggaaaatattgacaaagtcttacataatcttgtcttgcatattcat

SEQ ID NO: 74974 - DNA, 641 bp, Cannabis sativa
atacacaaatttaaaacatatttatgtgccatatagtatatatagatttaaacaaatattaatttattatgatatattcaaatttctacatgtgtattaatattattagatttcacaattttaaaaaatcctctcaatcatgggagagaaatgcagttggaatcgatgaattttttttaaaaaataatccttgcacaaagtgtataagaacgatatagttcaaaattatgtatggcaactgtaaattaatattattcaaagttgagttagaatgagtctaaaatacttaaagtgttaatgaacaatgtaaaaatgattaataaatattcatttgatttgtcctgaagatgttaaatctagagatactcatggatatatcttaatgttttaaaatattaataatttaaaaataataatcgaaaataatactctagaagagacaccctagagaagctagacacataatcatagttaaacccttgaagtagtgttatataggtacctataaatgatataaatatttaaaaaaatatataatttaaagagatttatataagttatgtcaatatggggaaagttattatataatagaatttttattgaatgtttgcatatgtaataaattaacatgagatagcaag

SEQ ID NO: 74975 - DNA, 600 bp, Cannabis sativa
  modified_base (180)..(180): a, c, t, g, unknown or other
gcagattatgggtttgatttgaaaactttaactattttctatgataatactagtgctataaacatttcaaaacactttgttgaacactctcgcaaaaagtacatagacatttgtcattactttattagagagcttgtggaaaatgaaacacttgtcttagaatatgttgaaactaccaancaaatagcagatatttttactaaagcttttaacttggtttgttttatctatataaggaaatccttagggatctgtactgtttaatgtatatattgttcttagtccttaatttttgcatcgacttaaggttcataatgtcttgtctttgttctagaagaaaatctcaaccttaagagactcacagtcattctttttgttgctaattcttttaagtgttatggtttcatgcaggtttctttcaagaaaactgttcactcatccaaggaatatttaggttcttcaaatagtgttatgtcagctaccattttcagaaagtaaaataaaagtttaaaaactgcgtgctcaagatccattggattaatagagctacctatctcaatgtgtgaaagccgtctctgagtaagttgaaactatgtaatt

SEQ ID NO: 74976 - DNA, 1370 bp, Cannabis sativa
  modified_base (884)..(894): a, c, t, g, unknown or other
taactaataatataatataatatattaatttaaaaattgagatatttctaatattatattttatatcttataatttaataaattaaatttaacagaataaacaatttaaaaataaaatttttatagttaggatattatcaattttattttaaaataaataaataaaataaaatatcttaatttgaaaattttatggtgagaaaaccctaaaatatctattcaaacaaaactaaccaattattcaaaattgcatgtcattttaacaaaaaaatataaattttattaagataaatatcataataagataaaatataaaataattaacatttatctaatctataatttaaattaataaaatatattttaaaataataaattttgaaaaaactgatatggttagtgatttgaaatttatttagattatctttaagttttatgaatacttttaatatcaaaataagattattttatattttactaataaaatatgtaaatatctaatcttataattaaaattaataaatttaaataaaaataatcaaatttcaaaataagtttgtagaaaaattaatttttcaaattcaaaactcactaatatctaaaattaatttaaattaataaaaattaattttaatctgataattaaatttttattttaaatttaaaatacacaaaattccaccaaaattatgatagccctaactgtaaggtcataaaatgataaaatgatatttgtaatctgctctttaagatcacaaaattccacccataaaaaacaaaaaatgagttgactttgacttaaacgatagtatcaaagacgaatgggggtagaagtaggcgcacgtcatgctattattataaccacaaataataataataataannnnnnnnnnnataataataataataatatctatgatgaggagtgtgattaatgtgtggtgtatgaatattacacttaataatattatttgggggcgtttggtacgttcaaaataatttgattatagggaatattatgaaaaagaatatgattgtagggaaatgtgtaagctgtgtttggttgtgtagggtaatatgtaatcatattcctgttaattaaattaaactgtttggttgagtacaagaattttatatattattttaaaaaatttaattaaaaatattttttgatatatttatttaatgttaattatatataaaaataaaataattatgtaatcaagaaatttatttattaattagtaaatattaaattggggagttacctcatataatgtttttttaactttttttttttaaaaaaaatttacggtttgagtttctaaactggttgcagcgctagttgcaatatgggttttatacgattt

SEQ ID NO: 74977 - DNA, 614 bp, Cannabis sativa
atatgtttatctatagaattgaattttattgttgcatattttatgagtgatatagaaactaacacttactaatagtacaattaattttaaaataaaagtctttgactagaaaatgagctactctatttacagatagtttaacaaatacaacatacacattacataaaactgacaataatagtttggactggtcaactaaaatgtcatatgacaaagcatatgaattttactattgatagcattaataacatttaggcaatctgactcccccacgacattgtgacattcttgtattttgatccaactcagagcatctttgattctcaccactttagcaatatttgcatgaacaacccatagtttacttgctaagattgcttaaatgaaagtcccatcatgatcccttgccacaataccataggggaagcttttattttgtgcaaacatagctctatcaacattaactttgatcatatataagttcggtttagtcaactgctccactctttcttcgtttgatgaattgtgagaaagaaatactgacttgacttgagtagatttccattagtatacgtgtattgtatatacatttttactgtttagtatagaattat

SEQ ID NO: 74978 - DNA, 835 bp, Cannabis sativa
ttgatatgccttagcaactagctcaactattatttctttaggagaaatactaaaagagaccactaatacaactagcaccactcaacattatccaaagtacaattattatagaatatcgtaaattatgcattacaccatatcgtgataattagacatcagtgataccttataattaagatgaacaagaagaccaataaaccacatttagagcaacaatatatctaagtatataatatatatacacaaatatatatacacacatacaatacataaatggctaattttagtgagatttgagcccacaaccttagcaaaagtaccaaaaccacttcttcaacaaactcattcctcataaatgagaagatccttgcttatctattgcttatatcaaggttggcacaagtggtttggaggctttggacgaaaaattaaaattgagtcttttattaaaaaaaataccaatcaatactttatagattcagttttttaaaaaataaaaaatacttcataaattctaaaagttttagaattatgtgtatttattatattatatatataaaataataaaaaaatactttttaatataagggactttctgcaaaggtccaagcactcatatacttgggccgactttgacttctatataatatacaaatcttgaaagtatttatctttcatcaaaacttgatttttattagtttatctttctttcctattatcttctgattaaaaaattattactaaaagattattttttttaatttttcgtttggtgtgtatttaaaaaaaaaaattgctgaaaaaataattcgattagtaaaatttttatacacac

SEQ ID NO: 74979 - DNA, 1020 bp, Cannabis sativa
cagtgaattcttctttccgctttgcaccacgaccgcctcattataatatttggcattgaacaagtctcgaaattcttcctaagtcatggtagtgacgtctcgggtgagggacactaattcccaccacacgagcgcatcttcctgaaatcaaaatgtagtgcaagtcactcagtcatttccaacgactcccatgaatttgaagattttttcaatctcggtgagcaattgctcaaccttcataacattcgggcctcctagaaaaactggaggcgccttcttgcaaaactttccataccgtggcttcatacggttgccagcaagaggttattctgctggaaccactggaactaaagcgacttgaacttgtggtagaggcactacaggaggaccttgctgtctcagcctcaaaatcactttgtcttgttgtcgaatttaagcttgcatttttgcaaatctctcctcccaatcctgaggagcttgaggtgattttcatgtctaccaccttgaaaccttcatggcctttgccgtatccacggggatttaggggattttgacctccccgaccgcctccgacctcgactctgttaccccgactccttgtattttgctaggcatccatttaataggacttagcttgcaaacccataagttatgtagatcaaacaacgatcacataaattctatgtaccgcacttattgattttagggcaatgcattcaaataaataattgtaagctattatgcttcctaacatgatcttctaatcacatacattactaaataagtaaaggcttatggaatcatgatctcaacttttctctgacgatgattgtacatgtgttgacgatattcagtagacaaacctggtggctctaataccaaaattgtaacgcccttatacttaggcgcgctacaaagattttctaattaatgtgtcacatttgctaatcaaatggttttcctcaaaaatcgtgctaaattaaatctttgataaattttaaactttacaaacttatatat

SEQ ID NO: 74980 - DNA, 1422 bp, Cannabis sativa
  modified_base (566)..(567): a, c, t, g, unknown or other
gtttaagatgccaacctggaagatgtatactgggaaggaagatcccttatcccaccttaagtagctcgagatgcaaatggatctgcaaggaatacaaggagatgtacactgcagtgtttttcatgccaccctttcagaagccgcccaataatggtatttcaagttgccgcctgaaaagtaactcatggaaggctttctcctcgcagttccatgaaaagttcaagtttgagccccattttctttagagtctccttataaaggttatttaccgagcgcccattgtctattaatactctcttgattcttttaatgacgagttgaatggtaatcaccaatggatcgacgtgaggatacctcacgtttttctcatattcttccgtgaatacaatgggacgctccttagttttcaccttcttcgaaggttctagggtaaaggccgactacttcttttttatctctttcatgtatcttttctgggcattattgctttctcctacaatatgtggccctcctgaaataaccaagatgttctctccctcaacgggaataggttgtaacccctggtnntttgggttattgggcagactgggctgggttgtatccatggccctgtcttttcacgtactacttaaaaggtcctcgagtaatgagactttctatctcatattttagttggcgacattcgtcggttgtatgcccaatatccttatggaatttacaatacttgttaggatccctcttactcctcgaattgctcatgggttcaggcttaccgaaagccactttcggctcatgtgcgaggtaaatattgactcgagtttcattgagctcggtataaatagtatacacttgcacgtatttgtcatgcttcttttttttctttttatttttagacggttccttaactctgtcctttctcttcgaaccagaagcccccgagttatcaattctcgtagaaatagttcctattgaaacattgctgggttttcctcccgagcttgttttcaacaaattcatttccttttgggcttcttccttttgaacgaacacctgagccctttcgttgaactcagttgatgattctcactaggcgtccttgtaagtcatcccacaactcgccccctacagtcaatggatcagtagagatccccgcctgaagggctgtgtgttggatgctgtcatccaaatttataaccctagctgtagccgtgctaaaacaatttaagtaagccttaagtgtcttgccgagcttctgctctatattggttagtgaggctgctttgggtcatctgtccttagcagcctggaaatttttcttgaaatccctggacagctgatcctaggaagttattgaatgatgagtaaacttattaaaccagctactcgctgctccaacaagtgaggtggggaacaaaatacagc

SEQ ID NO: 74981 - DNA, 984 bp, Cannabis sativa
tatatgagaaagaaattgacctgaaaagtttcatggatgttattgagatgaagactgagaatctgaaaaaggcggtctctctcagttcttcccatctcttctctctttcgtcttcttaggccaactttctcagaactgtaatggaaactctactaggtattttttttatttgcatattagtcctcaatagtttttttttgcattttagtccttctttgtttttaacggccttaaaagttcatgggcatgatttagtattgtcaaagttcagaagacaaaaatcttaattagtcttttttttttacttgcaaatagtaacatctttttttagtgtagcgtaatagtattttataattaattaatagtttaatagttaaaggttttgagttcgaagctataacttctccattttttcatctctccctcaacactgagctagtcttagtggttttacaaattagaacatctcgagtgttataagtagttataaatgtggtgtatatgtatttttttagtctatattcataaaagtgaattttaagagtgtgtttggaagtaactgtgtaattactgtgtagtgtaattattagagtatgagaattagaaagaataattaaggtctcgtaattacctcaaattacataattagtgtaattacgtgactagacaaacacatcaaactgtataattactttaattattatatttatgatttttgaagtataagttggtaaaaatataattttttttctcaaaaatattattgtacgagaaaaattcaaaagaatattaaaaaatatggcaaacacagcataacgtactcgttacccccttatagtacttggttacctttacttgattttcttatattttttaatttttttctttaattttttcataaaataatatatatattttttttttttaaaaaaaggcatatttttcacacaaaaaagtataaaaaaaaaccgtaaatttgtaatt

SEQ ID NO: 74982 - DNA, 1018 bp, Cannabis sativa
atgtttaaaattccgtgaaaccgtttgttttttttgttgtttttgtgcatttttgaaattatcccaaataattaagctttaacttatttatccgaagcttaattttatcactttttttttcttgagttattttatctcatcgtgtagtcacaagtcacaaatcacaaaaataaaataatcaatttactggaatgagcctcttttggattcattaccccatcaaaacttgactgttattattattattgttttttttttgttattattactaggaataatagcggcaaaagtccccaaaaagttaaggttgatgcagattagtccccaacctcgaaaattgtcagtaatagtccccaaggtcaccatttttgttagtccgttggtccctaagttaaaaggtccgttaattgctacaacaattaccacgtgtcaaagcattattggtacacttaataaatattattaaaaatttaaataattagaaattataactaaaaaaaataaaaactataatatttatttattttctttttcttttattaaaattaaaaaaacattatctaagaaaataatatttatccccagatcccacccaccctgattctcctcttcttcttcttcttagaatttatcaatgtttcaggaaaaaaaattaatattcagatctaactcatcatcacccacaaatctctcacaaactcaccatcatgaccatggctccggtcgtcgatgactgaaacaaactccaaatccgacaatgggtcccttctatttcgcaaggtagttaggctccggtcattgatgacaaaaaccaacccacaaccggttcattaatggcctccaaatctcgacatcccggcgataagctctggaacgatatcggcgtggtcccgatctcaaatctgagcatggtgttggtgaggatttttttttttgttcttgttgtggggatactgtaggagaagaaataaaatggggggtgaggcttggcatagggacgatgttgttatcttagggt

SEQ ID NO: 74983 - DNA, 742 bp, Cannabis sativa
agtttaataaaacttatgaatatttattcaaaaaaaaaatactcatatattaataaatatatatatataaaaaataaatatctagttttaaataaacatttcacaaataataataaaagtcttaagggcttggttattacacaataagtgaagctctaaactctagggttgttcaacaaaatttacaaaccgcccaacccgaataaaccgtctaaaccaaactgaataaaccgacaaaaaatacaatccgaaatcatacaataaaaattcaaaccgctcaatgaatattgggtggtttacaaattattctaaacttcccaattaacccgaataaacgaattaaaccgatttatatatttttttaataaaattatatataatatattaaataaattacatttattagtcaaactattttgtatttaaagttttgacatcttagtgtttaacttaaaatctagactttataattaatcatttttattgtatttggatattaaaggtgaagtttaaaatctatacaatattattattttatgtttactccattatatatcttatattaaagttcttaaaattaatttaaattattttttagcttgaaatataaataatatatttaattttttgaattagaaactaacaataataattaaaaaaagtgaagaacagtttggacggtttaacccgaccaaaccggtaaaattattggacgggttggacttctaatttttaattaagt

SEQ ID NO: 74984 - DNA, 1041 bp, Cannabis sativa
aaaataatttccaacaattatttgagacgtggtattgaaattattcagatgagcgactggatctgtagtcccatcatactgcaagacgtgagggtttttgaatccctgagggaatttagagttcataatatcaggatggaaaggcttgggctcctcatccaggtcataaccaggtaacttcccatattccccatcttggtatctcctgaacttatcctccaactcaatgattctcaattggatgggatcctcttgctattggttagcattaagctgttggcgtaaagtcaggtgcattctgatttagtcgctcgcatagatcggcttgccttcgattcaaatgctcacaaagatatagttttcttcgttcataattgctcacggacctcgtatctgagtaactctcagattgatacctcctcgtattgctcgtattctcttgatcagcataatgccgaggtctacttccctctcgtgtttgccttcctaatcgactttacccttgggaccttgaatgtcccgagctagaacttgccttgtcttgtattgctttctccttctgaaaaggttggatacacgcccttcatttaggtatgtgtatgcctcctccctctcagattgagaaggacgctgaggttgtcttggtggtaacccacttattctaggttgagtcccagaatttctctcgttattatgagggatttcctggaccctagtccggggttgccttatattctcatttttgcgagaagcgtctgacacatcattatgttcatccctttgattcgtaaatccttggggtctttgaggtactcctcgatgattttcttggttataatgttgttcatctactggaacatccctagttctcagaagttgctcctcctgggtgttttgggtatttcctttatttgcttcctgcctcctggttcttgaaccctgatgttaagaccgcttagtttaattcggaaattagcagttaatcttgtttaattatgaaattatttatagctattaaaataattatttatactgttatta

SEQ ID NO: 74985 - DNA, 613 bp, Cannabis sativa
atttcacgatccaaaccaccacaaagacgaacctaaaatacaaaactctcgccaaccaccgcccaaaacacccatatttcaccattttcaaccatttttactctttaaaaaaaaactttcatttttcacactcaaaaatatatcctcggtgtttgatcgtgtttttcttagatttttagtataaatcgagaggagtaattagttgttagttgtagctctggtcaccgattttgggcataaaattattgaatctcaacgtccattaaagtataaattaaatttctaataatttttttaatgtgcattgctttattttttttattttttaaattttcttaaggtttttctatgttgttattaagattttatttgttgtgattttgattttgattttgtacattagtttattagttttatgtaatattaatatgttagaaatattaaatattgtatatgtgaaatatatgttatatattttattattttgtgataaaatatattaaatatgttaaatagtgcttgtatattaaatattggatattagaattacaagtatttcgctcaaatatttatatatatatatactagcaaaaaactacgtgcgaggcacgta

SEQ ID NO: 74986 - DNA, 697 bp, Cannabis sativa
ttaacaatttcaatagttcgggaaaaatttttaacggccaaaaaagttcaagggtcacaatttaatacatgtcaaaattcaggggaaaaattactaattagcttaaaattaattggtaaaatgagaaaaatagttcatatatattatatattctattttctttcaatatattaacaatgtgagacttttaaaatgatagctacattttattacatgtaattgcaattatcaacttgccataagtacacagtgtagtaattcctaaataatagtaaaaaatcaaattgagatttgaggataaaatcattattgtgtgagcagtatgggccggactgttgttacccaccgagactgggctggtccaatttagaaactatggaccatcttttttaacaaatgaaataaaaacacacacctaaaactagtcttatacaattacaaggcacaccactagtgcctagaagctagaacatgatcaaagaaaaaataaataaataaattagtataaagtggggttgtgaaagctcagttttggaatattgcacttggtttctcatctctagcttggaatttcatatatagaccgtataatagccaaggcattaggcatgtctgtcttcatttttatttattattttcttcatggtgattaacctgttccattattaaaattggccgtaaaaatggcttattttat

SEQ ID NO: 74987 - DNA, 940 bp, Cannabis sativa
gatatcaataaagatatggctactgctgttccaaccgagatgtagagcattgcacatggctctaactcgttaaacctagtgttgctcttttctgtcttactacttaattcattatcttgaattcttgagatctcttggtatttagtttcttgattgtgttgtgtgtttgttggtactataaactatatcgtaagtcattgattgttctattttgcacaacaaacactgatatcagagtttggtttgtaatcacgagtgccacaaaatacgatgtcaaaaagtttaccggtacaaatgactttggatatggagaatgaagatgaaggcgttgttggttcatcaagggttgtatgaggatctcataggagaaaagtcttttcctgatttgatgtctgaaaaagacaagaaacagactcttacaaaggctcatagtgtgatcattttaaatcttagagataaggttatgagaaagttgcaaaaaaagatacaaccacaattgtgtggtggaatattgaaagtctgtatatgactaaatcattagtgaatagattatatttgaaataggccatgtattcattcaagatgatggaagataaatctgttgggaatagattgatgaatttaacaagttgattctcaatcttgaaaatattggtgtcaccattgaagacgaagatcaagccttgttgttgctcagttctttaccaaagtcctttgcacactttaaagatacaatattgtatggaagagaatcaatcacactcaatgatgtgcaatcaccttgaattcaaaagagttgaatcagaggagtgagtcaaagaattctagaagtggtgatggattgtatacaaggggcataagtgagaaaagagaaagtcacaaatgttcaaaagtaaaatcaagatctgaatcatagtctgataactagaagaatcttaaa

SEQ ID NO: 74988 - DNA, 1153 bp, Cannabis sativa
  modified_base (872)..(873): a, c, t, g, unknown or other
gttttgaagcttgagatatgttgttttatagctattatactgttctaaaaagtttggttaggtttggaggagttttgggtcgaaattggagaagagaacccttaagttcttggtctgccagaaccgttcgaccggtggttctggtgcaccagaactagtcgaccagttgccctgcaggggaaatttctaggttttcttccagatctgttttggctccaggtgttgcgtggtacctgttttaggttgcttatgggttgtttgacctattttagagttgtttggagttaggttatgtttggttttgaactagggttttattccagaatttcaatttaaggtattcatgagttttggttgtcgtgacataggaccgagatcacccagctttctttccactcaagtcgacccatatgcttgagttctgaattgaggtaagaaaagtggtaagcaccatatgtggctaaatgttaacggttgaatggttatagccttgattattatcatgattctgattaaatatttgttgagcctcggttatgacctagggttagaaacggttattacagttacaagtaattactcttgaaaccgcagatagtttttttacttatcgtttgcttcatcgggcaacaatagtgacatattcagctcgtggttcacgagtggtaaaggggtactttataaagtaccaggattatatttataatattgtgtaaatgtgtatgcaagttaatttaagattgaattgctgaatatgactggttattattttattcacttttcttgctgagtctctgtgactcacgggtgctttatggtgcaggtaaagggcaagcaaaggttgagtagccattagttcgaggtcgtagcannaatgtacatatcagtcgcagtggcacgacccagtaaacaggatgctctattttgaatgtattttgggaatacaaagtttatgttgtaaagcactatcaaaccagtttgtaaatatttttgaaaacagggggacctcgtagttaatattgcttatcttttattataaagaaggtttatatgtctatttttaattatcgaaatttaattacccatacttttggtatatttatatagtatataaagtaggggtgttcgtggtgcgggtggtgcggtttttgac

SEQ ID NO: 74989 - DNA, 642 bp, Cannabis sativa
tgtctttctcatttattttcaaacttttattatatatacattataacaaattagaagatcatgatatggataagcaaaatgaagggagagataaacaagaagaatattgactaataattattaaagagatgatcatatcatgattatcaccaatatagcatattttgacctcttaatatatataagaggagtaaattaagaacatctccataagacattcttatatattatgtagtatacataaatatatattatttattccaatcataacatatggtaaattgtttagtattttgactaaacatacaaggaccagaacggtttattttccaatcataatgctcacaacgttcgcattgtttgttatcccttttttcgtcgtaaatatcaaaccaatgagtgacaagtggagtttcgggccatttcatgctacagaagaagagagtgttgtcccacacacttggatagaacacaatctcgtacgagctattgaaagggattacatggacaccgagatcatcgtcttttgacttacaatgaacggtcagatcagctcgatcggaatcaagatagttggttatggctacatgggttttgtgtataaaaaacccactaactctcacttttgtggctgaatatgaa

SEQ ID NO: 74990 - DNA, 696 bp, Cannabis sativa
catccgattatagatgtagatatcttgcatcaaagatggttttgaggcccatctctccgtgtactcttggcccattatctcgccgtgcttctgaggatgccttatcaattaattttgtattggaaatgtctttattttagaaatatggataatattttatatatttatatatagaatacttcttaatggataataatagatattaggaaaatttacaataatataaatttttgtatcaaatttacaataatagcgttactactattactgacatgccatgtaagttaattctaatgtacttgatgctttctattttttaattattattttattttcttgctttttctaaaagttacttttttgttactaatagtgttgatacgaaaccaggtaactacctttacataacctttacataaaaaactttacgttcatatcatataatttgagatacattttggttacttccaaaacttattgtaaacatcttagtaattaattagttatttttaagttctattattgtagcttataatttaaaacacattaagttaactttaaattttatttatttatttatttatttatttgatgaatcaggacattatattgcacaaaacgttatttacaagctattagcaccctaaccaggcccaaaccatctatacatcaattcttatctatttttctacatta

SEQ ID NO: 74991 - DNA, 684 bp, Cannabis sativa
caatagtaatattataccaaaacaaaactcaccattgatgatattatttcttaggctctgcaaaaaaaatgcatacgagcctcacacgtctctgtttttcatgtatttgtcctgatacccataaaaaagatataacatatgatatccatgacaatattactacatgcatgagtacttgcaaatattttggattctttttcacatcttagcattcaaacattacaaaaataaacacaagggcataagtgaagtaccttgatattctcacaggatgatatatacagttagctatgtaaggatgatatacagttagttatgtacataaatatcgactttggattttatagactttaaagaaataattatttgaataaaaaaaataatttttttaaagagttgaccgggtcaacccgccaacccggtcaatccggtcaactcggccaacagaaacctgccaatccgtgacccgtcaacccgcaccatattcgggtccgggttcggtttcatttttttgaacccgaaacccgtgaactcgaaacccgcgaacccgaatcccggtaaacccgcccaatattcaaccctacttttgaggccattaaaaacccctgaactattgagatttttagatttaaggacttttgtctaattttaataaaaaaagtctaatatggatgaaagttcaag

SEQ ID NO: 74992 - DNA, 685 bp, Cannabis sativa
taacacagaaataatatatatataaatatgcctaaaaaatcaatggtaaccttacccaataattattcaatatatatatatcttacatacataacaaaatatacatgtctcaggaggaattttttttttcttttaccgcatatgtatcttatatcataatagtactgccattgtgtttatcgataaaaaaatacagcagtacatcaaaacaaaaaagaaatcaccaatatatatataaaatccataaacgaaaaacaaaataatatgaatagttacagaagtcaaacggaacccaaaatcatttatatactaaatatatacagtaatcaaaatagtatatatatatatatcaatgaaatccactaacatcaatcaaaagatatatatacaaataaacatactttgaccgaaaccacaaaccgactgaagccatatatcgattacacatattcaagagcgaagcccaaaaattaattcatacgcatatatatatatatatatataaatgtaagtagatcaaaactctaattttaaaatccccaaattttataaaccaaatcatcagatcttcaattaattcaacaaaagtagctctagtaccacttgttagggtttataaaacacttaagaaatatataaatcacagatctaaacatattcttaaagtgctttaatatagaaaacc

SEQ ID NO: 74993 - DNA, 686 bp, Cannabis sativa
tactgctcttcaggcagggatcaccactgatctctccactgctggaggcgagctatggaatgatctataaggttgcccaataaatacattactgagttcaatgaaaggactcaagaatttgttcggaaagaggaagttaggaaggagatgaagttgttgcagactggctcaggaaataaacacaacaaatgtctcaacaagtaccgtctcgaccaaggctgataatccaggagcctctagtttaaagaggaaggataactctaaggagtcatacaaggataagaaaatgcaaaagaagcacgacaagtacgtgccgatctacaccatttacaccgagcttaatgaaactcgagaaaacatttatctcgtgcatgagcacagggtggcattttgtaaacttgagctaggaggcacgggagacataagagagatgcaaccaaattttgcaagtaccacaaagacattgggcatatgacagatgagtgtcgtcaactgaaggatgagatagagagtctcatcgcgcgaggacacttcaagcaatatgtgaaaaggcagagcaatggacacaaccagcccaatctgcccaataacccagacaatcagggattacaacctcctcctcttgaaggagaggatatcctggttatctcaggagggccacatattgcaggagagagcaataatgc

SEQ ID NO: 74994 - DNA, 839 bp, Cannabis sativa
  modified_base (67)..(70): a, c, t, g, unknown or other
tcagtccatgaagcagacagagtgatgtactcatgtataaaagccatttatttcgtgggtgtaaggnnnnaatggaggcttgaagcgagaacgttacacgaggagtattctcttaggatcttattcttgtaaccgttcatgaaacgtgggggaaatccccacgtttcacatatacatcatatagaataatgacaaataattgttcttttagttgtaaaaggttatgctgactatgccttattcttctcgcaatgcaagcaatctccttaagacgctttattctgaagaggattgtcaatgcctaagtatatttcaagtaatacttctcgcgttcttctataaatgttgagtgaagcagatgcaagacgcttgtcatagaatgacaattgcgagatgaaccatgctgagaatgttgcccttagtctttcaacatactcaagagtatgtgggtgaatgagatgtgggctctttgaataattcgttatcttccatttccaaagtcattctgttgtttatattcattgtatctcgagatggaccttatttgtttgttgttcatctcgctggtctcatcaaccagtagttactatttatagctcgccattttaaaaaagggcaatttaaatatttcaaccgactgtacttttcgaggggagttgtttgaacatatttattgctttataattcgtgctagtttattttctagcttttttacacgtgtcaataccatattattgctcgaaatatgggtataataataccagttgttagttttatgttactaaattaggtacgcaacgaaagagttttgtattaactaattatcgttgtaccaatta

SEQ ID NO: 74995 - DNA, 1156 bp, Cannabis sativa
gaaaaagatctaacggatgagaacatggaagaattggaaaagatgggaaattaatgctaatgatgtgcctcaaaatcatgaaccaccaaaactcaaagcatgtaattttttaaaattggattaacaaaaatactcttgcaatcatttaaaaagctctttttattaaaaaaagaactgtttaagggacaattgttatactcaaaattcggctacacttcaaagattgacacgtgtcttacagtggaatatgaaccacctgatttaataaaattatatcattaaatgcaaagaaaaagaataactcattaaataaagaattaatagaaaatattcataacttgctgactatgtagtcttaagcgagacaaggatagaagactattaaaacctatattgacgagatacatgcatgcctcggaatacacaggcccaagaagataattcatttattcgaaggagtgaatacatatatgcaaagaaacctcgggttatgaatagcgagacaatcacctcgctattctaaagaaacttgacgatgagaatcatttgctaacacttagcgttttttctacattataatagccaaggataataactcggaaataagcgagatacaattgtctaaatcagcattaatcatctataaggataagaattaccagtagttaagcggttatctagtattatccacatacaatttaaatgaaacgtaggaattgattacgtttcatcaacggttatattttgaattgaatgtaaataactgccaacttatattcttataaataggggcagattctttagaaaaagggacggagaatttgagagagaaaatacatacgatcaattgtatattgtatcttgtattcaaaaaataatcttaaataaaatagactcgtggagtatgcttatttaactgcaaaactacgtaaaaatatctcatgttatttatatattatttatttctcattatttctgtattacatttattacaaaaaaagcttaataattattggttaacgaaaatctgcgttaacatatttatatatacactaggttattgttacgtccattgcacatatacttagttatatttttaattttaatttttgttatgtgtatttttaaaatattataaattaaaagaaaccactta

SEQ ID NO: 74996 - DNA, 818 bp, Cannabis sativa
agtatctcatgagttaagaatatatatatctgtggttacataattatacttatcctatagaatctaatagtccactctattcctgagtgttgaggtttcttagaagattgtagtgtgaactctttagcaaaattcttagattggatgttcgataataatacgaaaagatagcgaggatcttttgatagactacaagaggtattgtctctctatttattagtttagatttagtctatatatatatatatatatattatattgagatcattaaagttatgcttcatattgattaaattatttttaatccgtttctacttttctaaccataacataaaccataaaaatcagtagttacatcaccgcctatttaactaagatatatgttccatagattataagtgttaaattactattatttttttagcttatattaatatattttttattatataacataatatatctaaataaattatacatgacattacttaatataacaattaaaaaattaaagtacttcacctaaaagaaaaattaagcatatacgtgcaacattaatctagtaacgtatacttaattaacctaaatttaatcattaaaaaagtagtattcaatacattattgaaaaattgtaaaaaaaaattgaggtattctaggcaatttcaataatcgaattaaataaataatttgttttaaaattgaattagagtaagtaaatttctcataattgttatatatatatatatatactagtatactgttacgtgcgatgcacgtatgttatgttttatattaagtattatattatgagttcggaa

SEQ ID NO: 74997 - DNA, 632 bp, Cannabis sativa
accatttgatggtgaaaactctttagatttaagaatttttgtctaattttagtaagaaaaatttaacatagatgaaagttcaggagtatgatttaacacctgtcaaagttcgatgagcatgcttcggtagatatcaaaatttggaaagcaagatttagtacatgggcaattaccgaattagtaaaattaaataaaattagaaaacagtctttaaattccacaatttcaatagtttaaggataaacaagataatattagaaatttgctgcatgtatcatattagtgacaagctttaattattgtttttaagatataaaattatataggacaccttgatcaacaagcaccagtggtctagtggtagaatagtaccctgccacggtacagacccgggttcgattcccggctggtgcatttgagctgtgaggaatatctagcgttatctgtgatagaggggtctatctcaaccgtctgattataggacgaaaagtcaacgcttctgagctcatttataatttttttcaaagcaatatttttaaatcgcatattattagtttgtaccaacgaatctttttttgttttttttttagaaattaattttaataccaataatttggagtgatgacttttaa

SEQ ID NO: 74998 - DNA, 853 bp, Cannabis sativa
  modified_base (89)..(98): a, c, t, g, unknown or other
aattatactattttaattattattaaaataaaaaactaaaatattaaataaaactaacactacgtggcttggcacgtaacaatcacctnnnnnnnnnntatatatatatttttttttgctattttataaaagaaactatttggttactaatatagtgattagtaattgttttacaatttttttaaatcttaattagcattgattttagaattttgttaattgaattatattattttatatcatatctaattaactttcaaaataataaaaaggtatataaaataattactatgtaaaaatagtagcttgctatattacatgacaattcattaatttcaaaaataatttttaaagttgtataaatatattttaaattataatctactataatataacttaaaaataactaattaattactaaaatatatacaaataaattttaaaagtaaccaaaatgtatctcaaattatataaaataaaaatatatttttttttatataaaggtaattaattagttttttattaacaatattagtaaaaaaaaatacttttaaaaatataaaagaataaaaaaaaacgaaaaacatcaaaaaaaaaaatatatatatatatatatcaaatttaactcatatgacaagtcagtaataacaataatgttattgttataaattagatgaaaaaaatatatattattatcaactttcctttaaaaatttatgcattaaaaatttatgcagcaaatttttctaattgtaacttttacaaatatataaaattttgccacaaagatcataaagtttcgaaaaatgccaagtttttctagaaaaatatagggaaatttatataaaaaaaa

SEQ ID NO: 74999 - DNA, 863 bp, Cannabis sativa
caacacaaaacttcccctcaaagcccgaatcccttcctactcaatccactctattctttaagcactttgtttcacaaaaaaaaaaaaaaaaaaactcgggcctcttttgagatacaatctctttaaagaattgaaaagtctataggttcccaaacccacagtaattccaacttagaacattcataatccttggcgggcttgcgaaccagaacccgcgccaattaagtttttttgcaaaaaatcattagtgtgttccatatctaagttatctactaaagtcaagtcttggttatcaaggcccatatccatattcccggctaagactttgttgaagtttcagattacacatttttttctctaaattgataaaagagtattttaaagtggtaagtgttataaaaagtagtattattatatgtgggtgtattttaatatggttaaggtattaagctcgtatattgttattagttgtatgataagaagtaactcaaaatgccaaacacaagagatatagtatattattattaatgtattttaatattaaaaaaattaactattataaaatatcacatcaataaactcctcttttctttttctttaattaccatttttttattggttttacatatatgaattgaaagccattaaggtacaattaacatttaagaaatttaaccactgagtaacggtgtttagtgggctgtaattgttataattgaactttttagatttgtattttagactgttctttagtataccaactaggaactaagccgcgcttcacgcggtgttgtctaatttttgtaatctttatatatatattgcaattatattgagtgatataatctaaaatataatatttt

SEQ ID NO: 75000 - DNA, 559 bp, Cannabis sativa
aagaagtctcaaactcactagttgcctctcaagaagaaaactaggtcaagagttaatgttttcattagttggataaagaaactttcttttctttttatactacttcacatagggttaggattgatctatttggaataaaaaatgataaaaatggagcaaaaatagggacctagtggccgaccattagtggccccaacactagtgacagtaactaaaatggaggattaggcctatgtcaaataaatttttagtacaattttcattgatttttattttttttataattgtttgtatttaacatttatatttttgggatttgtttatattgagtttattgtatgtattttttattttgtactggttgtgaaattgataaattgttatgagaaaaatttatgtgttttaacaacttttgaaaataagaaacgttcattttactgttgttataatgccaaattttttataaaaattaactaattaaatgttaatgagtttgataggttcttaagtttaataatttcagaattactaaaacctatttttaacaattatttttttt

SEQ ID NO: 75001 - DNA, 834 bp, Cannabis sativa
gagagagaatgattgctatgaggagtgagaaaaaaaaatttaaacctataaaattaatatattagggttaggtttagaaaagtgagtattttttagttgtattgaaataaatagttaaaactcttttaaaataaataaatagctaataaagctaggcggttttaactatagatattgatatttttaactatatattaatattaattttttttttttgatgaaaacgtgaggttcaaatttagtagtgagagagtgtatataatagattttatttttaaaattgccacattgttattaataattattaatttaaaatattagaaattatagaaaattagtagattaattaattgattaatatttatcaatctaataaaaaataaaaaaatatgagagaattaatgagagaatagattaagctatttagagtaattatagagtaccatgtcactgttttatatctgtcctttatatataaagattaataattattaatttaaatattagaaattatagaaaattagtagattaattaattgattaatatttatcaatcttttaaaaaataaaaaatatgagagaattaaggatagaataaattaagctatttagagtgattatagagtgtcatgtcactgttttatgtctttcctttatatatatagatatagattatcacatagtttgtttttttagaaaaactaatgaattactaaagagactaataaaagctgattatattttattattttatagaaataataaattcaaataactcattcaaaaacagctcatacaatgaaataaaaaaatgtttaattttaatatatatat

SEQ ID NO: 75002 - DNA, 574 bp, Cannabis sativa
agaacgaacagggcagacagatacttgatgcccttgggagtgaattgggtcagacaaagacagaaaaagtctgccaccttcctaaagtatagatgcaaaggtagtagtgcctcttgtttgggatgagcacccaatcaggcacacatcccctttttcagattggaggcttggttgttcgaggtaggagcataacattccagctcgccacgatagccgccctggtcgagatcccgtaagcgtgccttattgaccttggacggaggactcacctacctggcaccgaaggcactttgtctcctttggggaactgcagtagtaagctcttaagtgacgtagtccactccttcgacaaggacatcgccatccgcgtctactggctccctagcctcgttgtatcctccaaagtttgggggtgcaacctcctcctcttcatccgcctcggtagaactcccaggacggacatttccctgttcctctatctcctggacttcagcgtccccttcgtgatccccctcctcctgcatgagtgggtctgttgagttttgtgcccaaaataaaacccatttcaatataa

SEQ ID NO: 75003 - DNA, 942 bp, Cannabis sativa
ggaagaattagaccaacctggaggaaaaaacaagggaccagcgcccaagttaatatttttgtcgacctcagccatttttgaggagtttgtcacaaaatttcttttagacatattctacaatttttgtcaaagtttaagattcaagtatttctggggatcaaatggaactttctaagggcctgaaaataggacccagcaccacattaacacctgccactgggcccaacagataggttgtcatattttcaacctgggtcgtttccaatcagttttctagaaaagtattctgggccttttttctgtcattataaataatgaagatacaagtaaactggggttgaaaatgacaattccaggggcatcaagactgagcttaatgcccaggttgacaatcaacctggtgcgctagttttcatcattcaaatgcaaattcttctttgagaattctctttgaaatggtcaaaaattgggtagcggaccttgtcctcaatttaaagaactttggaattataaaaacagcatcctagaagatttgaaaagagcacccaatgcccaggttgactagtttttatagtaattgagagctatgaagttataagagccaaattcaaaacattatattttcacttttttttagtaaagttacttgctcggaaattgggtagttttgagtctcccatttttgcaaaacatcatctctgagaattggtgaccaactttactagaacacaaactgccaacacgatgtcaaaagatcacatttgcttcaaaaattgcatcctatacactgttttcccttggcctagcatccaagttgacatcacatgtcaaccggaatgctagacatcaacctagtcgatgagagcgaaataacattcagtaaacaaccataactcactcaatattgagctaattgatgtgattcaaattgcatcttgaagc

SEQ ID NO: 75004 - DNA, 726 bp, Cannabis sativa
aaaagtggcaaaaactattggcgccaacagtcagattggcgccaatagttttgtgcgccggcaaaagctggttttcttgtagtgttaatttataccgtgggtccatttatttaatgttttgttttttaatcttaagaaatctacttttttttttttattatacaatgattaaactggaaggtttatcaaaaaaaaaaaaaaatcagaagaatacaatatgtaaacaaattttagtttgagttgaagagttgttgagtaaaaagagaaaaaaaaaatctactgttgaaataccaattttcaaatcaagaagaaaatttaataatatgattaataaaactacaaagaattggtgaaatttttaagcccatttattttcaccctcttatagaaatgagaaaggatgagatccacatattaacattaatttttttatcttataattttgattcccaaatgtttcatcactgagtaaaagttattattttacattatatatttttttcccactgtgtttttccttccttttttttttttttttgagaaaagttcactattattaaaatacttaatcgtttacaacaatagtgcaaataggatagggaatttcccctagccaacaaacatcttgatccaactctaaaacatgtttagccaaatcatgtgccgcatggttagcatttctcttgtcatgagagatacgtgcttcaggaaaaaagaataaaagac

SEQ ID NO: 75005 - DNA, 671 bp, Cannabis sativa
tatttgccaatcccaacaacaagaagaagagtacaactacagttatagtcctttggagttgaaaccttttttcgacagaactgtaattgtggactcgaaagggattgatgcaatcatagcggaacaacttcgagaattagatggaggacctcacaatagaagcttaataccatggaagaaggaagttccatcaggtacagttaggggcactttccaagtgacaagagagaacataaacaaattgagacaattgttgaatgttcataataatagccttcttcacttatctagcttttgcctcacattttcatatatactagttagtttagctaaggcaaaaggattgcacaaagatggccaaaaaatattttttggctttgctgtggatgctaggtctcgctttgagcctcctttgcctggaacatacttgggaaactgtgttgtaggaaagtttgcagaagcatatgcaaaagatttggctggggaagatggtcttttcctcgctgtaaaagccattagtgatgccataagaagttatgagacggcgaaggagactattttgtatggactagaaaatttggttcctgtgtttttaaagtcgcatgaagaaggtaaaggtagtcatgatgaattatacaccatagctagttcacctaagtttgagccttaca

SEQ ID NO: 75006 - DNA, 877 bp, Cannabis sativa
ttcatatttgtaaagattataaatctaaacttttaattttttttttatttgattttgaattgttctgatttatttgtttatgaatttattaaaatacttgaatatttgtttgttttgaattgttctgatttattcatacttgaatatttatattgatgatttttaataaaattagtctgtagttttatgtttctagaaaaaaaaaaatatattttaatatagagtttaaacaaaaacttgagtaaaagattaccaaaacaatcttaataactaaattggtataaacaaagtaaaattgaaggaataattcaaaatgattataagttcagattacaatggatattttgctaaaattcattacacgtaattgtgtgtttagcattactcactcaccctgtaatatggttttgtacttgtgttccaaaaataaatcccttcagttttactttgtttataccaatttagttattaagattgttttggtaatagcataaaaataataaaaaaaatatgaaaatttaggagttcatttgttagagagatatatgtggctataatgattttttttaaaattaaaaaaatgtttaattttttgagtttaattattgggtttatttgttaacggaagatcaaatctattaatcgttaaatttaacagaatattcttttatttttaagatatattctgttaaaccaagaaatgacgttagatagacactttaatatataaagatataataaataagcttcttttttatgcagataatagaaaatacttattctagttcaattgagaattcaaaataaataagaaatcacataataatagatcactacttaaaatagacaacatacatactttttgcaaacaacaaca

SEQ ID NO: 75007 - DNA, 739 bp, Cannabis sativa
  modified_base (31)..(44): a, c, t, g, unknown or other
tgcatcttatttttcggtagcccatcacgannnnnnnnnnnnnntaagcgtgcttgacttggagtaattttaggatgggtgatctcttggaaagatttcataggaagcttgcgcgagtgaggacaaagcacactggaaacactcgtgttgatctgtagggtcagttgtcaatccatgaagcagccagagtgatgtactcatgtaagggcttaataaaaacttgaagcggggacgttatatttaccgtcgtttatggatgcgaaagatacttatttgtttgctattcctctctttctagaggaatttgatatactcgagaagaaagttaggccgaaagtcttggtcaacactatttacgagttggagagagaggctttcggttatgtagtaagccaattaaatttgattggaattggacctttgattccaacatcttttcttgatggaaaagatgtcacttctaataatgatgacccgtcgaaagagaagtacattgagtggcttaactcgaagcctgaaacaacagttgtttatgtgtcgtttgggagtatggcgattttgtctgagcaacaaatgaaggaaatggctaaagggttgttggaatttggtcgcccgttgttgtgggtcattagggaaagtaaagataataataataataacgagttgagttgtagagaagagttggataagcttggaatgatagttccgtggtgttctcaaatggaggttttgagtaatg

SEQ ID NO: 75008 - DNA, 666 bp, Cannabis sativa
gtggtccacggtctgatgacaaccggttttttgtcaaaatggatgacccctgtttccagaacaatgtctctagtagcctcatctcggaagttaaccaaagtatatccagagttcattcgcacaattctgtcaatacccagatttccccatatccgtttcaagcagccctcaaaaacccgaaatggtgggttggctccgagaacaacacaaacaatcgagttcttccagtatgtcgcttcaactttgacctcttccaaatctatattcgcaatcagttggtccccaagttttattggttcagtaaattcaagcttagtagagggggttctaacctgatttgttttgaatttactccagatttcttttgctgaagtttggaattcttctgtcgactacacttaatcttctgcccaggtcttcttatcagaacgtaggagatattcaacaatcaaatccccctgttcacctctttcctctgcccaagtcttcttctcggatcgcaggagatcttcatcattcagggcccccaggtcaccacctagctccgattgagtgtcatgaaaaacctccgcctgactctgtacctcagcaactttctggatcgaagagagctcctgctccggctccggagtcaccttcccgatggtctgaatgttgagcttcaga

SEQ ID NO: 75009 - DNA, 901 bp, Cannabis sativa
gatattctatcctcagccatggacattggttctaagtctccctctgttgtatgctgctcttttaatctttttgtagccataataactaggaattataataccaaaactagtaatacctagttgattcactcatgattcatatctacaatctggaaaatgagaaaatgaatcaaatttcacacacatgatcataactagtaactaaattaaaataaagaacagctaaattaacacaaaaatgcagctgacgatcatcaaacccagagtttaaattcggttatcgggcacatagagctagttcacttaaatgattatacataaaataataatataattggaatggataggagttactgatatctaaatataccagtcaaattcaataatcaatatgtgttaaaatatataaataaatacagaatattcaaactccccatcccaaaatcaaacatagttcaaaacccttttaacagaaatgcttggaagattcataacaaaacaaagttggacgaaacaaaaaaaattcaacaacataccataaagggaccaagtcgaatagactgggcagatctgacttggtattccattggaaccaccggctttcctccaactttccctccggggagtttactccaccgttgactggtgtaatttcgtctgggtgggatttcgtgggtgtgggagtcgagtagtgatagatctgattttgggatttgtttctttttctttttctctttttcttatttatttattttttggcatttaggatttcttttttgtgcggcctaaagtttatttatttattataggccaattatctaatagttcaacaacttttgaagaattacttccctcaaataatacaaaataattataggttgagtgtttttttttttttttt

SEQ ID NO: 75010 - DNA, 932 bp, Cannabis sativa
tctctttttgttgtgtttttttttttttttttgttattgatcaattactttattgacatatatttgtctttgctatgcttttacgagtgttactagtaattttatgtgtaattttcttattcttttgagagtttcttagtttgtttggctcgttttatattcttgtaataacaagccaaatgaattctagcttctctattattgttttttcattataaaatattttgttcatatatacatgaaactatatatatatattcatctatattttttttcttttaattaatataataataatgagtcaaatactaactattccctaagttgaatttaattagtgtgatttctcttggtatttgagtgctctttggctagtcttagttctattttcgaatttcttattgatcagagcttctaaacattaaaggattatggcgatttgtttactactataattttgtttcttctatgtaaataaaatattagaatgcctatagtacttaacttagttcgtttgaaaagtgagtagtataaatagaaattatgatgtattgatataaatttttttttataggataatatattcttaagttaaatttatttgttgcattttagacaaaattttatttttataattgggcataaagctaaagagttagtaaaaaaaaatttaatttttctctttgttttttagaatttttaggaagttgttcatggaaatatttttcaaatatatgaagtgattttatatataaacttttgagttgtgtgttgacttatatcaataaattttcttgattgcagaaagttgattacaaagcttgaggcaacacttataccaataaattttacagagaagatgatgaagaatagaagtaatattaatttagatgatattaagaattattaaggttaaaactaggagaaccatt

SEQ ID NO: 75011 - DNA, 670 bp, Cannabis sativa
aatgtgagaactatgattgttagagtttgttaagatagactctctaacattccttcaagatggtaattatcttttttgctcacaaattttgcagattacaagtgactcgacgactcttttggttcattatttggacaatatttttggatttagattgaataccctttagagtttagtttggtaaggtacatgaagttcatctcaaaactaattgacaacaaaaggagtaacacatacatcgtatgtatggtatttagttttcacacattattaatgcgagactctctaacaataactagtgaggtggtaggctctatttcaccaaatgtaatttatctaaatgaccgagtggttcaaacccagtgctggcattatcaaagtcaatgtggttgctgctttgaatatcggaagagcacaagtggggtagggtttggtggtttgtgactgtcatggtggcattttggcatctgctacttggttcttgcaaaccactttctctctaatgttgagcaagcaatgtcaattattttttgttttagtgagcatcctcagtttggttgtaagatttttctttttttaggcgtaagaatttagttgtgcttttgataatgtttcattggtgtattgttctagaattattaatgggatagcaaagcacacctttattatt

SEQ ID NO: 75012 - DNA, 649 bp, Cannabis sativa
gcaagcttgtactaaaagtgaaatcatttttttaaacaaaaaaaaaatgtattatattatataaaattagatctcgccatcgttacaaataaagttggctgataatattggaagattgaacatactagttgagttttaagcatacaataatttaatcacattatagatagtaaaattgcaaaatatagtaacaaaaaaacacaactagaaaattcgagaatgaaatcatttactaacaaaatttattttgtaaagagaaattttttatcatgatattatgattaaatgtcttctgtcttatgccaaaaatattaatttgtactaaatcatattattattaattatatatatatatatatatattttgttgtcgatgtagaaaattaacttactaaaatatatgattgtcaaatactaataaaaaagaatcttttttattatcaaatgattcactgatgtttgattaattgatttctttttattttttaaaaactcaaaattaataaagtcaaaatgacaatttcatattcttatttggattatttgtagctaaactttgtaaagtttactttttgtaacatttatatttttatgtgaacaatacctaatatacaagagcactcacatgaagtactttgctagttgtttg

SEQ ID NO: 75013 - DNA, 1502 bp, Cannabis sativa
atatataatttatgatattattatcattattgattgcatgatattgaatttctaacaattaaatttaattgcttaacatatttttgtattaaaactattttataattatatgaaaaatgtatttggtatagaacttttacacaagaataaattaatggccccccctaatattttctcctggctctgccccaaaatctctctaattagcattatttgttcttttcttaattctctcatttcttttaaatattttttattagttttataaatattaattaatataatatatatttatttatttattttctcaataattctcttattttttattatatttttttaaaaaataataactctttttttttttttttttcaggccttttgccttttctcttcatcacgttttatttttatcttttgaaattaagattgatgtatttttttttctcgtgcttttgttttttttttaaacaaaaaaataagatatttaaaaatgacattttttaaaaaatagataactctaaaatctatcatcatgttttgactttttacctttgtttatgttttttaggatatttaaaaaataattatactacaagtgaaatacggtgaagacgactgttttgaaattatttgtaatttttttagatctcaattttgtgtgaggatttttcgttcattatcttttttatatgaagagcaagcctatttttttttacgtgagagagcaagcctattaagaaggaaagtgaggactatgagatacactgattatgatgatgacaataattttaaaaatatttcctattaaatatatatatcaattattatagatatatatttttaattttaatttaatttatgtgtatattttaaaaacttataatatatatatgtataataaataatataataaaagatatttattaagttcaaaacaattagaaaatttatactttacaatatcaaaattatttttattaaatacgaagaaaaaattaattaatagttactcatattattataaaaatacatcaaatatataaaaaatttaaaaatttaatataattttaatatttaattaccactaaataaattacaaccgcacgcaaggcgcagtttgtttcctagtttatctatatagcatggggctccaaaatttattttaaagctaattttctcttctctctttaattctcttattttttattttttttatttggtttataaattttaattaattaattaattcattaattattgtatatatgttgttattatttttcctaaccttttattatttttatttttttattattaattcataaaaaaaaaattgttggaaaaacgtttttaataaataactaaatatatatatatttacttaataatattaataattctaaattattttttattaattaaataattaaaaaaaaaagaattattacatagaaaatataaattgacattttatttacaaaaatatctccataaggtaa

SEQ ID NO: 75014 - DNA, 1107 bp, Cannabis sativa
aaaattacaaaaatataatatttttagaaaaagtaagaaaataactaaaaaataataaaaaattaacttcacaataactataaattaattataaaacaacttcaaaaaataacgaaaaaattaatatcatgacaactataaatacactaataaacaataaaaaaataaaataatatcgaatagtttagtgatcaattagtctatatttttatgagtatcttcactcttccaaataaagtcatagctgccattgatagaagatgcagagaatttttatggggtaccactgggaaccgatcgaaactgcattttccttcgtgggagaaggagtgtctccttaaaaagtatggaggagttggctttcgcgagggtacgtaaaaagtgcaataaagccttgatgactaagttcctttgggccattgctagaaaacaagatagtctttgggtgaaatggataaattctatatacctaaagggccaaaatgtgtggagctatcctatcaagcaggatgtgagctggtatttcaaaaagctaatgaagatacgatctagtacagatgagatatccattttgcttgctgaaaaaggaggtaagttttgtgctaaacttttctataatttacaagtggaagctcaggaagtgaagtatagtagagctgtctggaacaagctcattgttccaaagcacagatttattttttggcaggcttgcaatgttcaacttctcacccgtgatcacttaagcaagtttttaagccttccctcgactctctgtccagtttgtgagaatgacatagagacacacacacaccttttctttgattgtgtgtttgccaggaaaacgtttgttgagattggaagctggttgggagttgtggactggccaaaggatgttgagcacatctagcagtgttgtaccagggcagggggccccttgatttcaagaaccgagtgataaactcagtgcatgcagcttcgatctacatgctttggaaaaatagaaatagatgtatttttgatttagtttgtacttcccctcttaagttgagcatggagattaggaagatcactcattatagaatcttgagtttgacttgtgatacctct

SEQ ID NO: 75015 - DNA, 694 bp, Cannabis sativa
gtcagtccattgtttagtgtgccttgaccagtgactactcacaagaccgaaagaggttccctcttgtagcaaaatgacaaccagtgacaaagaatctatcagacaacagagattcctctggtcatctgaaaatttcgtctgtttgtagttaataaaaaaaaataaaaaaagagtctggaataccagagattccctacctagggaaagatgtaactcaagtctttatcgttttctgtctgtaataatttcagtttgtgtgttgagagcctctatatatggcctctcatttctgttaagggtatcaagtttgcaaataataaaaatcttatctatctttctaaatatgtctttctaaatctcttctgtgggctatttctcttctagggtagattataagaatattatcagtagctccgaaactatcacccagaagatatataatagcaaagtctatatagtaggtgtcaatctcaagatcatatccttcagaggctaaaaggaaacgccagcgttaaggaaaatcttgaatttgattatgactatatagatcagcgttatatctcttcaaatctatataatataattcagcgttatatcactcatggtatctcaaaaaattatataaaggggtgttaagtataaggtgttttttttttttgggaccttttttatttttatacttcaaaacagtttt

SEQ ID NO: 75016 - DNA, 873 bp, Cannabis sativa
attttgtggtgcatcatacttgctatgtgagcacctgtggtgataccaaggattcaatgcatattgtgtctcacatgggttaggtttcttttgtatggcttttgaattctggtctggatgaaagcgtggtctctttttattttcagatcctaataaattttttggatatgtgaactattactgttgaattatgcaatcttttgttaagtcaggatatggttatgcttagagtacgtaaaatgttaaatatggaattttagatccaaaatagaagactgtactagttagtagatctgttttaaatgactgataaaataaaattaattcgacggcgtaaaaaaatggggcattccgagaatcgaactcgggacctctcgcacccaaagcgagaatcataccactagaccaaatgcccactgatgtatatgctaacatagattgatagattgatttctttagttcaaaaatttcttttgttactatgcataattgacttctttcatgtagtttgtttgttttgaaactcagtgcagcttttgccttggtgttgtaaaactcaaatacagtagggaatttttatatactccaaagggaaaaaaaacttgttctgagattaataaacaagttggtctaggaatttggtggtgcatcatacttgctttgtgagcacctgtggtgttaccaaggattcaatgtatattgtatcttaataaaaatttgtgatgtgtgaactattactgttgaattatgcaatcttttgctaaagtcaggacaaggttattcttatagtacgtgaaatgttaaatgtggaagctgtttgttgttttcatattaaaaaatcgatggcataatattttagattccaaatagaaa

SEQ ID NO: 75017 - DNA, 735 bp, Cannabis sativa
gtaaaataaactttattttaataggtagattaaaaaagtcaataaaaatatttaatttttattgaaagtacataaatactatattaaatataataaataaaagagttattttcagcaaaatttctttatgtttacttttcttgtaaatttgaggtgttagctggatattaccattaaatatcaactggattattactgtattactttcaaagttaaagttttaccacaaaaaataagagattaagtgtataaaaattaaaacataaccagatttgaccgtcaattactctaaataaaaatataaaaaattactaattatattaatgaggagtaaacaagtaaataaaaaataatattgtggtgtaaagtttagctgctgctatattttgtaacaaatttaaaacaacttttatattatatacactactaaccaaaaaaatgcatttatactatttttaaaatactcggagatgctcaaaagaataaaattaactaatataaaatattgtggctaagtagaaaataaagactaaaatatcaagatccagatataattaagagcaaataaagtggctaaagggaaataaagtaaaatatgaagatctagctcaataaatataaataagaacaaataaagtggctaaaatgaaataaagtaaaatataaagatcgaactcaataagtaaataagagaaaatcaagtgggtaaagtgaaataaagtaaaatatgaagat

SEQ ID NO: 75018 - DNA, 883 bp, Cannabis sativa
gatccttgggttccctcttctaaccgtacccccacgcctctcaaggatgtgtctcacgggatagcttgggttaaacaattcgtcctaagtaacaacagatggaatgctcaaatgatcaaagagtggttcagcccggtggatgcttctgcaatcctaaacattgatctaccggatgaggcaatcgaagactcctgggtttggatgggtgaaccgaatggtaaattcagcataaggtcagcgtgtcgaattttgaaaagagatacagaggttaatggcgatagtgaggtctggaaacttatttggaactcgccactacacacaagattgaaatttgtttggtggcaactcattcgagacatcttccccacgaaagataagctggcccctttcctcgatggcatcacgggcacatgtctcctttgtagggaagaagctgaaaactctctacatctcttttggaaatgtactttcaccaaagccatttggtttagtattggatggggtattcgaactgaaatggtgactgcaaccgactggaagcaatggatggaggggttctggaagggcctaaacctccctcctaatattgatttctatgatttcatggtcacgtgtctgtgtattgtggaatcagtgtggaaagaaagaaaccgcagagtccatggagagatggaaaaggatataatgcagatttcaaggtctatacggcaaaagattaatgatcatatcatggtctctaagaagatagttcatgaaatcactgagtggaggccaccccctttggattgggtctgttgcaactcggatgtcgcagtctctcctgttgggtctatcctctctgccgtaattcgagatgatatgggaaatattatctctatttcct

SEQ ID NO: 75019 - DNA, 565 bp, Cannabis sativa
ataatcatatacaaaataatcacattttcgaatagaaaaaacaacaaaaatggaaaaataatctgaaatggaaaaaaaaaacccaacagtcatatataaatctgaaatggaaagttctctcaaaaaaaaaaatctgaaatggaaaaaaaaaataaaagaaaatgaataaaatttcttacatgcgttcgtctgctgcgcctaagagggaggacctcgcaccggtctctgcctgagagggaggacctcgcaccggtctccgtctgctgcgccggcttcagctggggaaaattttaatgtctgcaggttgagggtatcgtgcgagagagctctaggtgtggggatacaatttgtgggggaagaattactttagggctgctgatatatattttattttttttataaataaaatggtatagtgacgtgccacgcgtgtgaccaaagcggaatccccacgctttttgcgcgtcgctaaagccacctttagcaacgcgcagaaagcgtggggatccctctttggtcacacacgtggcatgtcaccataggccttgcttcttttttttttttt

SEQ ID NO: 75020 - DNA, 549 bp, Cannabis sativa
gctcaaatacaattaaaaataaaagaaagaaaaaggcatgaaaattaaaaccaagtgaaaagatagaatgtaaaataaagataaaaacataatgaaatgtgtatgagaaagtttctcaattttttaatttttaattttaattaaaaaaaaaaaaaaagaaacgttgtcacaaaagtgacatgatcggttacatcaaaactttaacttctacaaaatttaaaattaataaaaatatattataataagttttagcaatacacattaattaaattgaacaaaatgtgtaatttttcattaaaaacaagtcagtacttgaaagtagaaaaatttaacagtataaaagaaaaaaaaaattaaaaatacagtactgggtgtaattttctaaaaaaaaaaaatgcatacacacttatgaatcatgatcacctaaccactgacccgattttactctgagtttgagaatcttttttcacactttgtgagttatagcaagcctgcacaacttgatagtgtgatcatgttcacgtacgactgggcagaacctctcagcct

SEQ ID NO: 75021 - DNA, 1019 bp, Cannabis sativa
  modified_base (358)..(363): a, c, t, g, unknown or other
ttatgtttatagttcttaaaatttccacatatcaaacatttattagttcaccgcataaaaattatttaaaaaatacaaaattattaaaaactttaataatttttttcctttccttttattaaagcttaaccattcacccattttagtggtggaggtttgtcaccgacaagtgtcattccttcatcttcactttctttttcgttccatcccacgatctcatgcagaaaatatattaagtaaaaagaggaccaacaaacttacatgaatttaaaaactattataattactattttaattataaaattaaagactattagaattagtctcatatttttaatgtgtggaaataaattgtgannnnnnagatgaatgagctactcctcctattgttaattaattttaagatagaacctcattcatcttattctcaaattttaaaaagatttttttgaatgaaaataaattttttaaaaatttttgccgcattttattccttctatttattaggcaagtgtgctacttacgtaatctattattaatatatatacagctttttattatatatattcacatggacacgccgtggtcctctactaaattttggactaaatattgattagtcaaattgcatacttttcacagtagtgactggttggtgaagactgaggtagatagaaaacaattgtgttcagatgtcatataagaattaactttcatttaaaatgtgttctttcaaagtatcactacgcatattggatatttccttggcaaaaagtccatgttttgttttgagtaaaattctttcatctttagggtgctgagactttagcttgacccaactatcaatttaaattaggtaaatactatcttagattttatgtttagcaaaaattataaattgaactctctattttgttaaatggcaaaataaaccttatattttataaaataataaaattaagactctggacttaattttcgacaacttttttttctaatataactaacttgaagacaat

SEQ ID NO: 75022 - DNA, 981 bp, Cannabis sativa
ccatgaggtgacagacttctctagtaatgtacatattgaccccactggcccgtgtgtcgagttgccaagagttgttttgggttatatctgctgtgtatcttgattttgtattttaaattgtcattgtacatagtccttttgtaaaacttttataacaggtatccttgaaacacgtttttagtgtcgttatgacgtctgtttggaaattcataagagatcagaaattatatttttgtcataacttttcgctcgggtgtccgttttagacattctatacattgtttcgaagcttgcgatgagctctacgatatggtgtatgttttagagccaaatataatatttattttagtttatttatactacgaggtttggtagaaaactctagattgtctaacgcgagtgttaagtagtgttttgggataaatacttattggtttatcattgttatgacatagggcctgggattatcgatcgttctccaagtaggtcagccaacatacctgaaccaggacttgaggtaagaaaagtataacgtaccacatggcatgataggttctgaaattatcgattgtctgattaggcattgataatgtaatgattctatttacataatatatgggctcacttgattaggtgcgcgatatacttggttacgtaccgggcgtagatatgggcattagtgacaaattatgagtaccgagcataggtacggcttcacctggttaggtgatgtaatattattggcgacgtattgagcataggtacgggcgtcagtgatatgaaattgactggttatgattgaaaccattattgggttttttcctggtgacatatcgggcgtaagtacgagcgttagtgacatattataagtactgggcgtaggtacggctcgtctgattagacgatgttatttattggtgccaagttgtggcacggctcgcctgattaggtggcgcaatgatattatatatgatattacat

SEQ ID NO: 75023 - DNA, 1105 bp, Cannabis sativa
cttcgtgagctagtcgatcaagaagagaccttcgagtgggttgagttgcgttgtcagctggaggagtaggagaagattgcactggttcgtgtttttcctcattttgagacctagatctggagcttggatttcaatgaggaacaactggaatgttggctgctggtgcagaagtggaattgggaatggattctgatggattgtgctcagttgcagctggatgaacaccatcctgggagcgtgtggagggccttgccattgaagagttggctagggtttctactgatacaatatgagaaacagagagattggagaagaagaagagagaagcagagttaacgctctgttatttctctgttatgttcttattaattgaattagaaaatgaattacaaaggtttatatactgaatagctaatcgacatttaaccaaggtataaaagaggataaggcagttgtaacagtagacaactgtcataactaacaactaacaaacttcctaactttctaatcttgacacgattgaatctgaggatacggttagaattacctattttgatgacaaattatattttgttattagcattttttattaatatttattaccttataagttattttttaatttttataagaaaataaataagttattactgaaaagcgattaacaaactaaatctttttcgtgagaataggaaggtttgatttgaaatattttaaaagcgttaaaaaataacaaaattagttaaaccaagaattctgttatataggcacttttaatatataaagatataacctcaacccttatgtttttatctctcacacgctctttctattttttttttcttttgttttgtagtgtacattcataaaccagattaaaaatcttccaccaccattaatgtgctgactgtggttataatagtgcagaacaaatggatttatcgaattaaattcaatgcaaatggttctgtagaaagactaaaagctcgtgtagttgccaaagattttcaacaaactacagggattgattattttgaaacttatagtcctgttattaaaccatgcactattagaataatgtttacattggcagtcacacaagaat

SEQ ID NO: 75024 - DNA, 1063 bp, Cannabis sativa
tctctactttagttaatatgaaaatttgtgttcttgcaaatgcctataattttctttaatatcagtaaaaaaaaatagaaataatagtgcagaatttaaaacttgacacaagagatttgtatgtggtatcagtgtttctccaaacgctactagtccatggggccacgcccagaaaatgaaatcaattagtaaagtatcaaagattacaaaagcaattgacttaagcaaatttatactccctctaatgattgggcacaatcctttgtaatccaccttgctaatctgatatttaaaacacaccaagtagtgaactcccttcagctattgatgggttcttacttcctcccaaaataaggcttaaaacaaatctttctgaagatatatgcccactttctcccaaaatgagagttggaaaagtcttttcccgaagacacacacttgttcatagcttctcttcaacctattttatgaatagtatgagatcataataagaaaactaaaacttagttgaacactctatatttttacaaatgaaacactcttctcacaaagaaagatatgacaatatgagactagaagagataataacgtttggttgctctctaggtcctatttatagaatataacaaccttagagacagccacaaaaataatttctcaactgtacaaaattttcttaaatgatttcttgatttctaagctgtacaaggtcgtaaataatatttagccctttaaaaaatatgattaattataccatcattatttttaaataattatttttatttatattaagttcaactctttgtaggtaaaatatatggttactaacgacaactaatggataaggcagataaggcggtcagcaggtgcacgaaagcacagccaaaagatattttgtttaatttttaatttttaatttgtcgatttaccattcgctttcaaaatacaattggcaggaacgggaaacaaatagaaggatgccacgtgtcaaaaaaccattggtatagcgtctaactactgaccaccttcgaggaaggtgggtcgtcgtgattaaatatcccat

SEQ ID NO: 75025 - DNA, 883 bp, Cannabis sativa
ttattttttttaaaaaaagaattaattaataaatctattaataaataaaacacggcctaaacatataattaactaattttttaaatattgaaatacaaataatattttaatatatattaattataatttgattagattaatttttaattaactttttagattaatatataataatgatcaaattcaattagacatctaacttttgacatccaattaaattgtaattagatatctatttttcggtaattaaattaaattagattgaattaattcggtttaattaaattagattggatcttgtccagtcctagaatgagtttattgaagattaaagtattgtttgttattatttaaaaagctttaatgttatttattttattttattttttgaaagggatagagataatgaatgaatatgaatggttgtctctaaaactattctcaactcaaactgcgcatgctatttgaacatactccaaaatcaaatcaactttataattattgtggctaattttgacaaacactatgggacaccaacactatacatccctaactacccggattagacttatatttataatataatccttatatatatatattttttctttatttaaagaagtttacgtacattaatatatagttgttatagtatgaatttttcgagtagaaattggagaacaatttttttataaaattgacatgtagatttaacttttgatcaaaaaatagatgagtttttaattaatgacttttaaagagttaattttgcttgatccgaactcgcgagatgatgcgattttgatagagtctagtcgcatactatgatttacgtagtgtaagataagcaggaccgaaatgatttatacaagtcgcgcatata

SEQ ID NO: 75026 - DNA, 854 bp, Cannabis sativa
tgaggatatttgcaacattttcttctgttgagactaactttgccacttgagattatagatctaaggaagtgtaaattcttaaatcgatatgcttagtcctttcatgaaatattataaaatactttgttcctgaagtgtgtaccttgatcaactcgctctcatgtgattctttctagccataaggcttccttgatcacaacttctgtacatgctatgtactcttgcttagtagtaaaaaaggtcgggacaaacccatggcaatggaaaggagtctgggctcctcccaatttttttttttattgtatttttcaaaacttttattagttttctttagaaaatttatattttgctccccttaattttttttgatactttgctcccccgccccaatattattgcaattttgatttctagccggtacatccatggaatgtgaattcaaactgagatcttctagtgtccagaccacctacatagtaagagtctatcgtgatccatttggttgcattacaatgtgggataattccataaagtattatttttttataaaaataacaagaaaattatataaaagtaacatgaaaataacatctaaataacattaaaacaacaataaaaaaaaagatacatataacaaaaaaattaataaaagtataacataaaaaagctgtattgtttgtaattaaaattacaaaaatcgtgaaaatatttaaaatttcgtacaaccatatttttatatatttgtgaaattatcccttacaatgtttcttgcaacaatactagttgttacaatttgagaagggaaatttgattttctatacttagaaaataaaaaaaaaatttccctaaaccaa

SEQ ID NO: 75027 - DNA, 926 bp, Cannabis sativa
gtagtttttagggttaaactgtatttaggtccatactagggttcagacaatacataggttttttttttcctgaatctccaactcaccatcttcgggtttgataaaattctttccagggattgggactactttctgcttacagcaatgtctcactctggtttaggaatttatcgtctagaagatttagaatttgagttccctacagaatcagccatcccgtatagacccaaccattcaaaatccacctctaaattagagttgaacgaggctagggttagggaacacgtagtgaaaactcacgatgaagagaatactaaacactacaggtgtttcttgcgagaaacctctgaaggcaaacgccgattcttgcgagatgcagcctggccagaacctcccaacatgtcctttattccttgtttttacccaacatcacgattgattttgaaccaggtgacttgaattttgaaataatgcctcccaatccacgtatatcaaagactccccaggaccccagtgtcacttttgatgctaagttgatagaatcgaaggtgcgatctatcccaggctacacgagcgatatgatgaagacatgtgggatcaaacttgggcaatcatgccaagttagatcagtatgagagggtgagtttagttgtttccctcctgcgtgtttttcaagcagtaccccaaggaccagtggtgagactagtactagtggttcgactggtatgggcgcttggagccttgagcatatcattgtaggagccacacttcctcttcgagactacttcaaggactacataaatcaccttggagttgccccattccagctgactgactcccatccatctcctatatataggaaggattttctcgctagtttgaaagtcttgtaccaaattcttaactgggggtgtcccacaccagta

SEQ ID NO: 75028 - DNA, 704 bp, Cannabis sativa
aaataatctcaaacaccattaaaattattctcatcgtacttaataaatctaccaatataattcctagcatcccgaacaacccgctctgttttgaagcccgacctaatatcatgtagttgcacccatatatcgagatgatgcgaaggaacctcccgaggaacatcccctagtttcagccatttaaagatgagatgagcattcttgaacatccaagggctcctatccatcaccctttgaatgccaatttcatgatagaattgaaagatatatttcttacctcttaactccttcacatacatgcccataccaggcttccaaagcacagccatcatgtttcgcatcaccatgaaatcaattggcgtattcgtcaagaaacatcccacaatactccatcgagtatcaacctcagcctcgtcaataaggggcccctcattgactgcaggctcttctcctcctccagaggaatgatcgatacatgctccaagctaaggtccaccggagatgacgatgaagccatgactgaaaccgactatcaaaacaccaaaccaggaacaaacgcaaaccaaaaaaaaccaaaccaggaccaatcacaaaccagaaacacaattgcaaactagaaaaagctaaaccatgaacaatcgcacaccaggaacaaatcgcacactagcaacaatcacaagctagaaaaaaatcataaaccagaa

SEQ ID NO: 75029 - DNA, 655 bp, Cannabis sativa
cttccgcctctgtccgacccagttcactcccaagggtattaagtatctgcctaccatctttgttctctatccgtccagaagtgggatatgccttctcccaacaaggttagctggtttttttatttgaagtccccctaagcaaggcaggtctgcgtacttctatttctctcaaccagacataaagtggttgacaggcaccggggattcggccatcagcaaaattgggcattttgatgatgggtacttcatggtggatggcatgggcaccacccacacttggttccagcagatccctacatatcaccgccctcccctcactcttactcttagggatagagctcaagagcttgctcaactggcgggggatgaccagaatatcatccagttgacctccgaggataactttatgaagtacaggatctattcgaatgatttcattcctaagccagtgaaggggaggaaaaggaaatcttgtgctggacgggctgagagagcttatcaggaggatgaactaattcaacttaagagtgaggctaagttgaagggaggtgcaagggccaagaaatatgctcaggagcccttaaatctagaagatgaagttgaggaagagcaggcgactccgctcaaaaggaggaagaaacttccagcccagccc

SEQ ID NO: 75030 - DNA, 848 bp, Cannabis sativa
gccccatctatccattccctggcccgacggattgcctcccttcaaaatagccgagacagtatcactatcgaacaatcctgttaatatgggaatgtcccaatcaccagaattggtgattagattagccacccaaattaagtttggcgggatttctcccattggtttcggaacccaagggtctctccaaatgcaggtgtctctaccatgacccactagcttacaagcccctttcctcagaattgcattagctttgaccacattcttccagaaccacgagtcagactctttgtaattgcaattgaggaaatcttgtcctcgaagatatttggctctaagaactctgcagcaaagagattgacaaccattcaacatcttccaatcccatttggccaagaaagccaggttcatttctttcgttttccgaaacacaagccctcctaaagacttagaaaggcagagtttatcccaagcttttagatgcaggccatgatttcctctctcaaaaccccaccaaaaatccctgacgagcccatctatccttttccccaatttatcaaaaagtttggtggtttgcatagcataaaagaggaagcgaaagaccaactgacttaattagagtggcccgccctgctttggatatcgtcttcgctttccaaccttgtaactttgaagttagcccttcaaggatgaagttgaagtccgcatccttttgttttgatctaaacagagacagacccaagtacttgatgataccttccagagagccaatacccaaagcttcctttatgcttcttctcatcccattggaagtattcttactaaaaaatattgacgttttgagcttgttc

SEQ ID NO: 75031 - DNA, 612 bp, Cannabis sativa
cacgatcactcaagacttctcccacagatgcaagaagatctaccgtttgtttaactttcaagagatagtcattgagacttagatttcctttcttcaaattctgcaattttgtgcgaaactcaagaattttcgaggacacttgtaatgtgaaatgcttctctagagtagaccagatttgctgtgctgaatcgcaccccaccattcgagtcaagagactctcagtcatcgaagacagtaaccacgacacgaggagttgatcttgaatctcccaatcgatgaaggcttgatttactctgttttgcactcgatcttcaggagtttggaattcagctggtggcggatctttgatgaactttagaaggcgattgcctttgattgcagctaagacctgttgcttccacaaaaggaaattgtgattattcaaacgaattgaaatactgtgattaaagtataccggctcttgatgagttgaaatccgaggttgtgttgtttgaccaccattgaagccagctgtgttgtttgagttgccaccaccagatccgagagtagccatgttagcattgagcggaggccaccgctctgataccatgttaaatctctggttcatagctg

SEQ ID NO: 75032 - DNA, 846 bp, Cannabis sativa
aaacaaccacaccaccccgcctactgcaccagctgtgactattggagttgttatccctgaagatatcgccgcagtagtaagtgcacctgcgacgacccaaggcaacaccgccctagctggaggtatcgattagggtatgcttctacaagctttgaagataatcgaacaacagagaaagcacagatgcaagctgcatgggacttctccctttaccacggaagtgcgacaagctcgtttacctaagggatttcgtttatccgagtctctgaaatataaaggtaccactaatcctatagactatttagaaaaatttaatactattatggaagtggaccatgtatcccagcttgcgaaatgtcgcattcttgtggcaaccctagaggacaatgctcacaactggttcagccagttgcctgaagcatctgtatcgacctgggagaccttcgtcgacctctttctcacgcactttcaggccacaatgacgtataggccaccctataccactctggctaatattaaacaggagatcggtgagtctttacaagattactttaaacattttaatgctgaagtaacgaaagtagagaaggcccccgagtctttgttagtgtgtatgttgataacaggtttgtctttcttgcccaacaacaaaacttccatcatagcccaataaagctctaacacaatcaactttgtctttcttgcaaattgtctcacacaaaaaaattaaattgggtctcttttgaaaaactatttctgtaaggaattgaacaaccggttcccaagcccactacaattccaactcaacaaactcataactcacaaaaattacacaccactcaacag

SEQ ID NO: 75033 - DNA, 1469 bp, Cannabis sativa
tgattttaatattagtattatgttggtattagttttttttacgtagtgattagaatcactcatgaatttacgatgcagatattcgcaaactgcggaataactttctcgaacaaggatagctcattgtctaaccgaaaggcaagcttgccaaaccatgaattgtaaaagtaaacgagcaacatgagacaaactgcccccataaatttagacaataaaactataacgtcctcaaatagcacaccaaaataactagagcttcaacttgtaacatcaaaaactacacgccaactcattgacatatcaaaatgctccacaaactatctacaaaacaaaaagatagagaaaagtggattaacccctaacgatgatattaaaaactaaaagaaaatatcaatagtagaaagatgacaactctcaaataaattatatttaaaagcttatcagcaaagtctttgtaacagcaggccctccacaaaatcgatctacaaaataacaataaaactctattaccacacaatttaatgaaaaaaaagtaatgtgaataaagattgtaaaacaattcatataataatatcaagacttgaaaaatttatcggttaaatctcaaaagtcgtttgcacaagctatgaataccaaatatgaaacctttctcttacccatattgattgtactacaaatctaccttaaacaattaggggcaagctataaaaatggcacaaaagccataaaaagcatccaaaccataaaaaatagtgcaaaaacaaagctaataaagtactaacaaaagtataaaaacaaaataaatatttcaagtaaatataaataatctcaaaaatatgaattgtaaaaataatactaataatctctaaatataattatcatttaaaaacaataaattagaaaagtgaggatattacacaaactacctaaacaatttgacttttatcacatgaaaatctaattaaatacataataacaaattagttttagtaatgggctaatgatcaagtttttataagaaacatgtaaaatttatatgagttttgatatttgtataactgaatttttattaaaaaaataattttgattatacggaagaaattattttgttaatttattgccttactaaaattatattgttattattttaacttatggatatttttttaaataagttttttataattacaatatttgtgtaaataattggttattttatatgataaaaatagaaatcacaattttacaatttttatatggcattcattcttatttataataattttgtctatatttaaagtttcttttttaataaatatcatatttaatataattaaatttgaatgtaatacatatcaaaactttttttcgtatttttataaaggataattaccttatacactgtttttttattttttttttcaaatttacggtttggttttctaaagtggttgcagcgctaattgcaa

SEQ ID NO: 75034 - DNA, 699 bp, Cannabis sativa
ttgctcaaaatttactttaagaaaaacgtgtttcacgtgccttaacttttcttttgattattggttttgtattttattattttatatttatatttttgttctttaattaatgatatattattatgtttgttaattttcctcattctctttatatttaattctaataatcttaaagcacatttttttttagaagattaacaggttgaaggacatatttcgttgattataaataaattttggtgacatattattttttcatttatatgtattattatatatactatgaactattaatctcggtttcattacagtgtttacaaccattttatattactagttggaacaacacgtgctacgcatatacaattttagtgtatcatgtaatgtaattaatagtaaaataaatttcatttagcatattcattataaaatataattatcatatggtcattagtatgacactcacacgataatgatatattatctattaaagagttgcataagtatatctctaatggcgatgcatcaaataggtgatgtgtatagcttatcttgtaaaaaatttgttccaacagtattttaaaaattatgccaaaattgatacattgcaaaaaatatactaaatttagcacataatatagcataatctaatatttatatcactataaatacataatttttcatttatttttatgtttt

SEQ ID NO: 75035 - DNA, 722 bp, Cannabis sativa
ggggctggccggtccacttgcttaggaagtggccagccaggatattgaccaccaggctggccaaattgttgacgctagggccagccttaactctagtgatcctgatcttgtgacttcaaactcggctccacctagccctaccacacatagatagtatttttcacttattagtatttaacatcatgtttgtatattatagacaatattttcatgttctgtagggcctgtggcattttacttttagagcattacttattttcatgttctgcatggcctgtggcctttttagaacactacttattttcagcctcagggccttcatgttcgtatatttggcctataggccctctatttttgaacactactattctttggccctgttgctttttttttttttatcatggattgtgtgatcgaccaagcggtctttaatcatggctatcttcttatggccttgacatgtaagggtctggatttactttgtcaagctaaagtatgcctggacgacttagaggtaggtttagtaacttattctaagcattaaaatttctctacgtaaattctttgtgctagtttgatgcattgtacggtgtgggtgccccctaagtgaccatgcagactggtctcttggtcacttgctattcaccaagtttcacagaccttgcctgggttctttcttggggtgctgcccattgtacgcatgtggaactaaaaaaataact

SEQ ID NO: 75036 - DNA, 1096 bp, Cannabis sativa
tgttaacggttaaaaaaatagataattcatgtggcaagttcctttaaaattttaccatagtggacaccttaataaatgacatataagtcctatggaagagagtaatttttccactattctattttataatttttttttacaagattttataacgtttattacatgattttatgattctttttaattatttatttattttttcactatcttttataaatttttatagtcccataatcgatttagcaatttactcacactcttctattaatacactactacagaaaggggttttcgtgtcgataaatgcatcaggtcaaactcgttgatcgacgccaataataactaatttgtgtcggttgctacttagacactaaaacaaaagctaacgctaaagatgaatttttttaaaaaaaatactcaaatatagggtcaaattttacgtcaattgtgcactgatgcaaaatttgcataagttgaaaatcgacaataaattacttacaaacaattgaatatatatatatctataactccatcatgtcaaaccctaatatcttatctctccagccgtcaaaccctctcaaacccaacaacccagcatctcaacctcacctcgcacacatgacgacacatgatgaaaaatatatcaacatctcactccttctctcgtgttctctggcttcaagctcccttcatcttctgtcgatggcttcaagctccccggcaacgacgtcaaaaacttgttgtgaaaattatgtacgcaagtgtacacagtcaaacaagtaataaaatggtaagtaagatcgtctccaaagggattgcaaacaaaaatatgttgtaaaacaaactaagtacaacttaaagtaaaagaaaataacatgaaaatgagtgagcaatgattcaaaatgaaaatgacagtaattaaacttgttaaaattagtgctattgttgcttgaaaaacactttcaaaaagtataatatggtaaaaagtggcttgaataactaatccttcctgttggtttttcccagatgttatagcattacatcagcattcctgccagtgataacagaatttttatgtgtttatgagaattttcca

SEQ ID NO: 75037 - DNA, 630 bp, Cannabis sativa
acctccgatattttatggtactcgttagtatttttttttatacaagtggtatacaactatttacatatttatatatttatgggtatatatattaatgcaactgtttacatactcattaatgcggatttcttattaaactcaaacctttatagttcttacgtttacaggcaagatcccaagaagctagatgcatcttactagtattacttttcatactttacaaaaaatctatgcataatctatcaacattcttgattactttctacggaagcataaaaatactcattcaataacaacgaatgcccaataatattaattgaatcaagtgcactctacctacaaacaagaaatgctgctagctcatttgtgaagcttcaattaaatctcttaaaaaaacaattacaatccacaactttccattttattagtctcattatcacactgagatacttgagagggaaatgactattttcataaggaaccagattagtttacttacataactacatacttaatctaaaacattagcaaatttattttgtaatagtatttaaattttattttgataaaaaaaaatatttctagatattatactaaaatcttgggtttgacgtctaatttattacatat

SEQ ID NO: 75038 - DNA, 861 bp, Cannabis sativa
  modified_base (180)..(181): a, c, t, g, unknown or other
atcctgatcatactctacaatagaaaggatcaagggctagagatctgaaaagaatgagtcattatattccgttgccaccaatgtaaggctttctataacattatatgtttttatttccttgttttaggaaattcaaatttaggattttagattatagattataatcaaacatacatgttnntaaatctagatcctggtaaaatacgttctaacagacagtggtacatgcgatttgatagcttcatcagagaacaaaagtacacccccagacaatatgaccattatgtatacttttggaaaatctaagatggtaccttcatttatttgctcttatatgttgatgatatgttaattgcatctaagagcaaggtggagattttcaggctaaaaactcatttaagttcagaatttgaaatgaaagatcttggagaagctaagaaaattcttgcgattgagatcacaagaaaattagttgcaagtaaagtctgtctgacacagactcagtatctgaagaaagtattgcaaaggtttgacatgaatgagaagactaaacctatcagtacatcacttgcacctcattttaagttgagtgcaaagatgtcacctagcaccgccaatgagaagaagcaaatggagtgtattccatatgcaaatgttgttggtgccttaatgtatgcaatggtatgcataagacctgatatttcgcatgctgtcaatatggtaagtcactacatgcacaatcccggtaaaggtcattggcaagtagtgaagtggattctacgatatatttatggtactgtatatatttgtttgaagtttaagagagagaagactgacggtaatcatcttgtaaaatatgtt

SEQ ID NO: 75039 - DNA, 2044 bp, Cannabis sativa
  modified_base (1611)..(1612): a, c, t, g, unknown or other
gtgggatgagttttcgggatctgcgttatttaatcaagttcttcttgctaaaaaaacttttcgtacttacaatgttcctgactctttggttggtcgtgtgttaaagggtttgtacttccgaaacaggccttaattttgccaaattaagaagtctaagcgaggctcttttgtgtggaagaatattttatggggcaatgagctttttaattcgggggtgatctgacgtgttgtggatggaaacgacattgccatttacacaaataattgaattcttttaatgtcaccctctactttttaagtccccccattgacttgatgagtcaagcaaggtctctttgttaagggatgtttcaaggggtggggtgggataaagacttgatttgttccagctttttggctagtgaagctgaggctatcctttctattctatgatcttctatcaatgtgccaaataagattatttggaactttgagaagtcatgatatagttttctgttaagagtggttattggctagctctttgcaacttggcagtgcttcgagtttctccatctgggggtttgttgggtttgtgaaaaaatatttggtctcttaatcactctccaaaggttagacctttttcttggtaagtgtccgataattggattcctattaagatcaatttgtcttgtcatggtctcttatctgatgggttatgtcctttgtgtgggttggaaattgaaactactcatcatgctctttgaggttgtagttctctgctttagtgtaggaaaatctgtgagggagattctcttgttcattgtgtagattttcttgactttattcatcaatttattaatctactctcaatgagatgattgaattagttatggtgatcatgtggagggtttggttcaagcgtaatgaaatagttcataataatgttattttgtctctcgctcttactatttattggactcgtgattttttggggacgtttcacaataggcagggtctgaagactattacctatcctcccacactagcggtgactggctcttcttgtttacctctgttgcagcacgtacatttcaaattcttaatcagctcccaaatggacaactcctcttggtagtctcaaagtcaatactgacacaactctaagctctacaagtaattgtagtggctatgattattaaagatgattcgggtgttgtctatgcttcgatgagttagcgtttggatggttgtttcattcccgaggtggctgaagcgtcagctattggaaaaactttgttccaacatctctcttttgggtatgacaaatcattattgaatttgattgtttgagtattgtgctgaaaattaaaaataatgtcgcttttattacttttttaggtctagtgttggttgatattcttggtcattgtatataggctcaaaattgttagaccatctccaatagaatatttgaaatttgtggtaaaaaaaattagtttgtgttatatttggcttactgtttataattgtgctccaatgcacaagatgtaaaataaaaaaaaataattgattatattgatggtcatttaatattttattaagaatatataaaaattatttttttttattttnntattatttaaataatggtaatatgataaataaagaatgtcaagtgtagtaaaagttcatgaataataattagtggtattatagtaaataaaaaagtaatatttattgtgggttaaatttggttatatcttgtgctaatttaatacaatttagaataccattagagcagtaatttttttaagtgtactaaaatataataatacactattttttttggcactttattggagatgctcttaatattgttcattataataagttttgtaatggtgttactcataccaaacttgctttgacgacaagtagtagtttgatttactgaccggagagtcctaattgcattcagcatctgttgataatagatactattttttaaagtatttattgtttttagtgtttaatggttgacacattttttgtaaaaaaaaaaaaa

SEQ ID NO: 75040 - DNA, 928 bp, Cannabis sativa
caagttgaaactaggaagaactcaagagagatacttaaattgatcttggaattgcttcaggtagagttattgcatttcatgttactgcttcgattactaagtttcttgttgtgcctccaacacaggcctcatattgtttcatattaacagtctgtgagccaggagtagaagacatagtaagtgctcttttggccccaaatgcccttaattcttgagatgcccaaagccttgcagatgtcgagatcactcaccaagtacttgcgtaataacaggcagatctcgtgggtactgtgtgggatctatatcatcctaagcagattgatatcatcagtgggtgctggttgatttgcagccaattaaaccatttaatttctcctacaaaaatcaaataaattaaatagtcaatttgaatgcaaaacaaattgaaagaagtatcataaattaataaatatcaatataaacttccataagcttgttgtgtatattcattgcaccaaatgttgtctttatggtagaactttcaaaaagtgtctacagcagttaaaagttctcctgtcatagaattagcctatatttaaataaaaataagtgtgattatcattttttacaagaaaatataatatttatcaatcacaaataaatataaaaatccatctcataaaaaatatgtactacagtaggttttgattcccttccaccttgaatttccatcttaccccgactttattttttattgatcttgccttgaattaacatatttgtgttgcatgcagttaattatttattattgactaaaacgtaaagtataactaacattgataattgcatacttgttctttatctgtgccccattataagcaatgcaatcactccacacctcttgagttactccttctagaggtgtcttgtttgtcctctcctctccaag

SEQ ID NO: 75041 - DNA, 761 bp, Cannabis sativa
tgaatatttgaggcagaagaagaaatgggctggcctactagccttggcaggggagccataccccgaatcgcaactggtaacgaatgttctctctggcctcgatgtcattacctcactattgttctgcagattgaagcaaggcctaaaacttcctggcaagagcttcaggaactgcttttgagcttcgaccgtaaaatcgaaaggctccaggctctctcatcgaataacaaaatcagtaccaacttgtctgaaccgcaagcaaactttgctcaaaaacctcaaggcagtggtcaaggcagaggatcaagccagtattctcagcattatggaggtcgacactccaacagaggaggaaatcgtgcaagaggaaggggcaggttcaacggtagaacaaacaactcgaaaccaacttgtcaggtatgtggcaagtatggacattcagcggctgtttgctacaaccgttttgatgaacattacatgggcagtgatccaaacagtggaactcagaccaaaaacaacaatccctttgcatttgtcgcaactcctaaaattctcgagagtgaagcttggtttgctgacagcagagcaagcaatcacattacctcagatgctgcctcaatgacacaaaaacaggactatggtggtaaggagaaagtgatagttggtaatggtactcaacttaccatttctcatctggtagtggtgtgatattaactaatactggtaaaaaatttttgtaaaagaaatgcttcttgttcctg

SEQ ID NO: 75042 - DNA, 1120 bp, Cannabis sativa
acttctgcttacaaaatttgaagaacaagttaaattcaatatttaaatgttaattggaattgtcactgtgtacacatgtatatagatcaatggtaatgttttggtaatttgaagtcttttatatatatttatataactatccttttatttttatatggttctaactatattttggtattattatatatattggtagatttggtttagaattattcttcaatgagatctcattaaaatcataggtatgtattcctaaattaattttgtgattaaagtgaatgcttattttgtttattattagttttctcttttgtttcttttctaataatgttaagaaatttcctgcactctatagcaattagaaagaatgcgagtttttaaagtgcaattagagaaattgataagctgaatggattgagttgaaaaacaagtaatacattaaaaaatatactctcttcatcgaagataaagaaggcgattattagcttttttttttcttttttttttatatatataattaattgtttttattttctaagttagttaagtctccattacattgtttgatgtcaaatttatgtgtttcattatcttaccacatcaattgttgatattatatataaaataaaaataatattcgtaaacatagtgttatattataattaaatttttaataattagaatttaaattatagattgattattatagatattagatattttgaataaatattttatactaatattattaccttaattaattaaggtaaagaaaataaaggaaaatttaaatatttaaggtgaacaagaaaaattatttaatatctattaattaaagtatataaattataaaaaaaaaattaaagatataacaaaatatcataaataaaaattgatattatattgaaaatatttaattaatggaggtaaaatagtatctataacaataataaaaaattcaaattatttatatagtttaaatttagggcttagataaatatcataaagggcttgaatctacaccttgaattaagatttggacttgaattgtatattgaaatattattaaaacactttacaactaaattctccatattcatattatttagagattaaaatt

SEQ ID NO: 75043 - DNA, 566 bp, Cannabis sativa
caaaagtatcatcacacccaccatcaccatagccattcaccacaaccgctagcagaaagcacaaccacccaccaccaccacttttattttagatccaaaataaatgtcaccacctccagccccacaaccaccatgaccacgacaccaccacccccaaaatcacagtaaagaaattaaataaaaatgaaactaaagttagatctaacaaaataaacacacacatataaataaaattctcatatctaaatcccaaacctaaaatctatttctaaaaaagtgaaaggggaaaatcgtgactgaaagagagagactctgatgagaaacttataacagggaaatggggacgaaatttcggcttagggagttttgagaggtcccgagttcgatggtggcctttgttgcaccgtcttgtggccgaagaaggcacaattgtatttttttttagagatcatgagtggagaaatgcagagatgatattcacggggaggagcatagttcaaaggtggtgtttggttactaagtgaaaatggaatgggaatgggaatgtgaataggaataagaatgga

SEQ ID NO: 75044 - DNA, 556 bp, Cannabis sativa
atatacacatatctcatacaaaaaataaatagtattcatgtagagcataaatagtaaatttaaaaaaacaaaaaaaaatagaacattattttcttaataccattctttcaaaagttattgtgagtgagtttttttaaaaaaagaaaataaaataaaatgtagtgtaaggggtataaagaggttagagtgtggtgtagcacagatgataatatgtgagggaagatgtatgtatgttggattgtttttggaaggtagggtttccagtgactctgacgtagcgtgtgttgaatggtgtgcagagcatcctatcggataatacccttttttttatttttattttttattttttaatttcctctttccaatttattcctttcactaattttataattaattccccttttaatttttcatggctttgcattctttatatccactcaattaatatctcattatttactatctttcggactattttaacccttaagtccccaccaatttggatgataagtttgagattaaacaataataattattatagggtaaatactatttt

SEQ ID NO: 75045 - DNA, 844 bp, Cannabis sativa
ggtcagacaaacatgccaaattgtgtaattacctccaattacacacaaattcaattatattatggctttccaaacgcaccctaacaggttgtttaaggcattccttatagaacaagccaccatgattgcctcctccaccaattccgctcgaccatgggacaaaagctctacaaaccagtcacggaaactagcagcaacaacagtccccatatcaattgcagaccaattccagcaagacttagcaaaagaacacagaatcagcacatggtgaattgattcctcacagcggtaaaagggacaagcaaatattatcgattatcttttattaaactcattagacattacattacacaatgagtttttattatgtttgtatttggaacaatattttcatttgtgacacatatattagatattttaattgacatatatgaattatattagattttatcaaattgtaattacattaaattttatttgtgacaaataatagttattatttgatttaataattttattctaaaaatattaaaagaaaataaaaaattaacatcaacaaagtgttagcattaagaaattgtaacattaatcaatagttattgttaagcaattataacaacattaaaatataatattttttcatatataacacaataataatgtaattaaaacttataagattacattttgaaaatgttattagtgaatgtaacataatgaattaaattaatgtgaactatttataatttataacactaaaatattgttataatatgctatttaataatatgtgaaaatataattacataagttgtcttaacagttactaaaatgttataaaata

SEQ ID NO: 75046 - DNA, 834 bp, Cannabis sativa
  modified_base (321)..(322): a, c, t, g, unknown or other
gtgagcaactagatgggtcgacaataaatggtgaagcatgcctataccatatgggaagactagttgttgcagatatccctaatcttaaggagtccattttgattgaagccatagacttgaatttgctatacatcctggaagtaagaagatgtacaaagatttgaagcgacaatattggtgggaaggtatgaaaagtgatgtggctagctttgttgctaagtgtgtagtttgttaaaaagtaaaggctgagcatcagagaccttcaggtttacttcaacctttgcctataccagaatgaaagtgggacaagattacaatggnntttgttactgggttgccattgacacctttgaagcatgacgctatttgggtgattttgatcgttttactaagtctactcattttattccaattagaaaagattataagcttaccaggctagctcaactttatgtagacaatatagttcaactacattgagggccttcaagtattgtttctaatagagatcctcgatttacatcaaggttttggaaggtcttgcaacaagccttaggaactaaacttcacttgagtatttgcccatcatccacagacagatggacagtctgagaggaccatacagactttggaagacatgccttgctcttttgttttggattttggaggtagttggggagaacatttgtcactggtggaattcacatacaacaatagctaccaagccagcataggcatggctccttatgaggctttatatggaagaccgtgcaaatcttcattatgttgggtagaactagatgagcatgtcactattggaccccagattatcac

SEQ ID NO: 75047 - DNA, 1033 bp, Cannabis sativa
caaagagcaacacacactattctattaacataatcatgcataaaacacccaattcttcaaattctcatatacatgcaatccaacaagctatgaacattaaatactcatgaagatcaacatcaaagttcagcaaccgcactcaaagtaaagaggtggaaaaactacctcacgttcctcacaaatccaagcaccacaatcttcaatcaccaagcaaaatcaccaacatcaatttgaagaagattaggaaagtatgtatatagagaaaaagagggagaaggtttggttaagttctataaaaccataaatatgtttttaattttctctaaaaatctcttttgttgaaaataaaatcaaatagtcaaatgaccaaaatgcccctaaggccaatataccacatatgcatacaacaaggggcaaagttgtcatttcatcacacaccaaacttaaataaattttagaatattcaattatttataaaatgctaaaataaaatctcgaaaatgcattttgggccccttctcgggtcaaaattacgaaaatgcccctagctcaccaacggggtcttaacatatcttttattagtataattcatatatattaagttatataataatataattcaacattaatacacatttaaatagttaggatttgctaatttgattccttaatcttagggtattacaattatcccctccttatagaaatttcgtcccaaaatttacctaaacaactccggatatttttgctgcatatccatcttgagttcataggtagcctcttctactttgttgtttctccacaacactttgatcagtgcaattgtcttgtttctcaagactttttcactcctatcaagtacttgcactagttgttcctcgtatgatagacctaactgaagttctagtgcttcataacttagaatatgagattggtctgagacatactttcgaagcatcaaaacatggaacacttcatgtacagctaccagcgctgggggcatagccaactgtacgcgacttgccctatcctc

SEQ ID NO: 75048 - DNA, 548 bp, Cannabis sativa
gataaaattaatttgattttaaagcatcgtgttactgtcttatatctctgttatattgattcttataaaaaaaatataaaaaactgaaattttattttctgttttcaaaaataattttatttttttctcattttttttttatatattctttcgcatatttgggttcgagtttggagctggtgttcggggctagagttgggttctgggtctaagttcaggatttggagctaggtccaagtctaaatatgggatatgtggtctaagtttatgttcaaggtttgagatttgagttcggggtcgatgtttggagcccgtgacgaagtaagggtcagagttgttcgcggtgcgggtggtacggtttttgactattttttcaaaccaacccgcacatgcagtttttttaatttttcaaactgcacctgcaccgcgaaactaaaaaaatcgctgaaattgcaccgcaaaaaaaatagtgtggtgcagtgcaatttttgcggtttgaactatcaccaaataactaaattatcacaaatacaacaaagtttgagcaa

SEQ ID NO: 75049 - DNA, 795 bp, Cannabis sativa
tgttaagacatgagctcactgttacattgctgcaccatcactacagagtaacatttatcctactgtacacctcagcaatccttgtgcagagaatattctccccaacggttttattggatcctactacaatcatttggtcatgattttcccaaatcttttctgttatgattgtcccaattgttagctgacatctgtctaatttgtattcatctctgtttgtaattttcatctataaattcaatacaatgcctcagtatcaatttgagctgagtttatcctttttagtatttctggtttttctatcttggtatcagagcgggcgtatcgttctccggccatgtcgaccaaccaatctcagactcccaatccaccaactcctggaaccaataatggaatccctctctccagtaacccagaaattaccacaaacagaccttcggcacaaccgagtcacaccagcaacttcacccaaccatttaacaccctaaaccaaccattcccactgaaactcgacagaaacaactataccctctggaaaacgatggtgtctaccatcatcagagggcatagactcgatggctttgttcacggaacacgtgtttgtcctactgaatttatttctgttgatattgatgcaggggaagaaggaaccgaagctgctgttcaaatcaacccagattttgaacactggatcgtgagtgaccagcttctaatgggctggctttatagctctatgacagaagctattgcaacggaggtgatgggttgcaccacatctgcatcactttggagagc

SEQ ID NO: 75050 - DNA, 1384 bp, Cannabis sativa
tccccagattttcctcagtttccttaggtgtgtctcctgagagttctgaatatatctctgggttgtcttctgccccttggtttgtgagctgcaaggtttgcctcgtgaatctcttctcccaaggtcaggttggttctgggtaccattttcatgcactgcccttaccgcggctatttcacgctctaactcagtattacgccagtttgcttcctccaattgacacctaagatggcaattttctaattccacgattggtatgtatcttgttgggtcataggcaccatcctcatcaacctggttagtaagtggccgatcattgtttacccaaggtccatcaaaccagggaccccaatactgggttttcctggggcttgcagtctgttcatgcgatcactcaatagatccgtgaggacttaatggtgcttttccagggcgatgactgattccttctagcagactattatcttcaatgtcatccattacttttaggttaagaggccttttctgagcttgttcacagaggcttataatgaaagcaccaaactgttaacgcagatttttcgttaactaaaattgagcctcacaatactgatctcacacaaaaaataaaagctattgaaaaataatatatgaacacagggttttttacatggtttttcatttaaaattctgcatagtccacaagccaatcttattcagatttctaattgttgttttttttaggaactctcttgtatgagtttttttgtcccccttcttgatcttttctaccactatttataattacatagtggcagtaaattataaaagttgactataatctatacagtaattattccctcaaatcatggaattggattacaaatcacactaagtaaacgcggttttcatttagaattcacacagctgtgagtatcccgcttttattgggccgagatgaacgcataattaaggatatacggtaagccttatctcatggggatgcctctctggtaatggagccgagttaactttgatggcgagcagttgcttgtcatctgacttcccgagattaatattgttttaactctgatatctatattctctggtgtcgagatgacgttcctcgcatgcatgccatcttccagggagatagacgcctcgctgtctattatcttgattcaccaaactgtttttacttagttgtatatcatgcaatatacgctaagttttgtttctctttcacgcagtgaggttgaacccttgtcatgcacacttgtactcacatggtttctcgtcgatacatgagttagtagtttgcacgttcctatctcgcggaagacttttcaaccagccgagttataaacatactctgctaatcatgtttctaacgagttgttccatg

SEQ ID NO: 75051 - DNA, 982 bp, Cannabis sativa
ttttttttttttaatttaaggtttaacttgtttaacaaagtggttgactagtactatcattattggttaattttgctattattgtctagttttattttgttctttactactccattactaaaaaatatagatttcttgacagtttaaaacagtcaaaaaaatatatttctatcaggttttaaaactatcgcctattcgagtgtcgtaaatactgagtagaataggagatagttgaaaaatatcgacaaaatgaaatcctgacagtttaaaaccattggccatactgtagtcgacaagtttaaaccgtcggatacaccaaaaaataaaaataaaatatcaaaatttgagattatcttagatctacaacaacttaacaacaacaataatccatctccgctgctctctttgtgtagaaattctctctgagaactagattatctcatcacattttgtttcaatacaacaaatgtatagatatatattcgttacaaatacatatatatattataaatacatagaaagaatagaaagatgattgggaatcccgtgtgcgactaagaaaacaatcggagtgttggtttttatggttaattatatcagagttagaaaagtgaaagtagatttgatgaaaattaattttatccaatatgaactatagcccaagaatgtcaacataatgtatatagtttaaatctagactaatgatagagagagaatacctcttgtagcctatcaggggatcctcactatctttcagtattgtaatcaaacattcaatccaaaaactttactgacaagttcgcaccaaaatcttccaagtcagtctcaacatccagggatagactagtgggctattagtaactataggatgagtataatgtgtgtcacaatatattcttaaatcatgagatactgtgatgatgtgatgagataaagttgatcacaaaactcacaccacacttgaatgtatgtgacgtgtaag

SEQ ID NO: 75052 - DNA, 663 bp, Cannabis sativa
cttcccaactgaggccggtatccccaggtattttgtatggcagtccaccagcttcactcccaacattgcagcaagaaatatgccatctccttgatttatctgtttacctacacacaattcagacttgtcaaaatttattctttgacccgagagcaaagagtattcatccaatattgatttcaagctttgacaatctgaaggagttgcatctagaaatatgaaactgtcatccgcaaagaataggtgagatagttttatgttgtctcggccaaacctgagcccatgaagtctattggctctcttggcttcctggatgaggcaagacaacccttctgaacaaagtaagaacatgtatggtgatagggggtctccctgacgtataccacggctaggatgaatttggccactgacttctccattaagaagtattgagaaggaaattgactttctgcaattcataatcttatccacccaacgcttgtcataacccaaacatatcatcattgtttcaaggaaccgccactcgactctatcataggctttcgacatttctagcttgagagccatctttcttccatttccaaatcggccttttttcatgcaatgaaggctttcgaatcccaatatggcgttatcttggatgagacgacccctaataaatgc

SEQ ID NO: 75053 - DNA, 1309 bp, Cannabis sativa
atttgggctgtatatttgttatttggccagctggaagtatttttgtaatattgttattttttttttttggttaaaattgaaaaaaagtcattttttaagtatattttcatattaataacattaactattaaatttttttgagcaaatatgtgtaggtctaaaaacaatacttgacattatgatatttctaaattctatatgcattctgatgccaccccgattaaaaaactttgaattaaaatttttaaaatactttaatattgaatagtgtgttggttgatatttcaccaatatatgtgataattcatcaacacaataaataaaattttatgatgaagcaaaataaaaaaaatcatatatcatatattccaataaaaaagaagataaaagaaaaggcttaaaatattgaaaagaagaaaataagagtcaaggatttgtttgggaaagatgagatcatatagggtttacgtttagaattttccaaaaaatatcattttttttcttccaaaattaatcttgttgttgttgttgctcgaatctatagtatcatcatcaactttcttatcactgcaatttatgtaatgccacatgctttcttataatatttttcgctccaaacaataaagcaagaaaaaaatattagattaaagcatgaacatattcttcaaagctctaaattctaaaaaataacaaaaataaagaataaaaataaacaaagattaattgaaagagaaaaaaataaaaatcacaatatatataagaaaatattcatagatttaatgcttttgttgtttaattgattcaaaattattttatacatgtacttttatgtatacatataaaaattcacaaatataattcttaaattgcaatagccccatacactattttttaacttttattttcaaatttacggtttgactttttaaggtagtttctccggtagtttctatgtgtgttattatacggattttgtttgcaatttagtttgctccgttagttgcaatatgagttttcatgtagaattccgtaaaaatacaaaaatacaaaaaaaaaatatatatatattttgaagtgtaaaaaataaaaaggctcttaataataataaaatgataaaaaaatatgagaaaataaataaatattaataaacctaataaaaattaaaaaaaaaaaagaagagagaactaaggagagaagagataaagctatttgaagtgatttaaaataccatatccgcatctcatacctcttatttatatatatctttatatattaaaagtgtctatctaacggcatttcttggtttaac

SEQ ID NO: 75054 - DNA, 878 bp, Cannabis sativa
tgtggatataaaatggtctcttacaagtaatcacacaattaaagctcctattaattaattaaattaattagtaataatatagtatagtactactgtattattatgactgacaagattatatattaatgttaaaaattactcttttctttattatttagtaacaagataatgtaattaatagtgagaatgatgtaacaactaataatttagtttcttttttctatttactatgaaaaatgaccaataaaccttaataataatacctattcatgaatttaccaaaagcctaactaatttacaagttaattatattttttaaagctattaataaaattggtcagtgatttttttatttacaaaaataatgacagaaatttatagttagactaaatatttaaaatagaatgttacttaaaacaatttttttaattgaaaaccaaaaatatctcataatattcttgtaacataagtgattataaattaatcatgtgcataaaatgttacttaaaacattttgttaactaaaaaccaaaaatatgtaagtttcatctgataatattcttgtaaaatagatgattaaaaattaatcatatgcatcaaatttgttaggatcaaatcaatccagagatcacaagaacacaatcgaacacaacacaatcaacaaactctccacacagaaatcgaattaattaagacactataatgaattaatactttgaatctctatatttaagaatttgaactggacaaatttagaatcaatgtgagattacacaacaaaaaataactacatttactgataactctttagtcacaacataaattttttgtggctaaatgtgatttttagtcacaacaaaaagttacttatgactaaa

SEQ ID NO: 75055 - DNA, 504 bp, Cannabis sativa
gctacttcaagcctcatatcaaatccatttaaagagaaaagtgaacccttcttaaacagcatgtgggaaacatatctttatatggataagggaaaaagagcaaacagtttacctattgtctctatcataaaggattatttgatgcgtatcccagattttgttggtctgcactgaataattaagattaatagtattttcaatagtagtactcttcaaaaagttttaaaaaatttacataatatttaaaaatataatattttattttatcattctttcatatcgcttttgacactcttacttttaaaaatactttaataatataatatctttaaaaatattattataatcacatattatttaatatattatatattttttgattataaatattatcatactaaattttaaagagaaaatcattatatatcatactaagaaccaataagtccttttaaggaaattggtatattgatcttctcataaaattcctaatgaatctttttt

SEQ ID NO: 75056 - DNA, 940 bp, Cannabis sativa
ctatacaagacaagatttaacaaccaacaacatgtataacaacaagatcattgaccaaaggatcagagtaagggacacccaattcaaatatatcagatccacactaatcaagaaccttcaaagcttttcccatggtctcaagatcaggatcaccagcaatgataaaagggataatttccacctacaaattagacacttgtttgattataaacattctcaaaaactactttcttcaaccacgacaaaattaggtgttctcaatgtcacctaacaatcattttttttcttaccggagggcaattacagtcaattgatgagactgtgaagagtttcttcaaacaggtgtccaacttttgattgaacgtgacaaccttgatttaagaaacataacccaacaagtaggaaacttacatggaaaatttcctttagctttttgaaatattttacatcttcaaagagcatcccttttagctttttcaaagaaacattagcttcttctctgacttaagggcagtaacaaacagatcaacaccaaaagaatcaatattataggagagaagaggattgagagacatgcgaaaatgaggatcaatttaccttgagactgccatggatgtttgaagcggtcattcgctgacgtcgttttcttgttgctaggctagaccgatgaaaactcttcaaaaattcaaaaaggatgtagctatataatacttaactacttttcaggtttttaggcagtagctaaattgaataaaaatttttatcttttcagttcaaatatctataatttttacattttttttattagaataatttataaaagaatataaatttaattatggatattctgttaaagaatggtatattctgttaaaataaacagataaaccaaaaataatcgttaaaccaagaattgacgtttgatagacacttttaatat

SEQ ID NO: 75057 - DNA, 1547 bp, Cannabis sativa
tgctacctggtcatgcctttcggattaaagaacgctggtgcaacatatcaacgaatggtgaaccggatgtttaaaggccttctgagacggaacatggaagtgaacatggatgacatgttggtcaagtcaaaggcatacgcgagccatgcagatgacctcgaagaatgctttgaagtggttcggagatacgggatgaaacttaacccaaagaaatgcacctttggggtcaaattaggaaagtttctgggctttattgtcagccaacgagggatagaggcaaacgagaaaaaaattcaagctctcctaaacatgcattcccccaagaaacacaaagatgtacagagcttaattggaaaggttgctaccctgagccagtttatctcccgatccacagacaagtgcattcttttcttcaacatccagaagaaatgccaaaaattcgaatggtccgacgagtgcgaggaggcattcaaaaaactagaaaaacacatggctaaacccccgatcctatcaaaacctgttctcgaagaagacttgttcctatacttggccgtctccgagaatgtgttcagtgcgaccttagtgcgggaagaggaaaaaactcagcatcccgtgtactatgttagcaaacgcatgataggggtggagacacgatactcggttatcgagaaactagttttttgcctcctaatggcctcgagaagctaagaccttgtttccaggctcacccaatcaaagtattaaccaaccacccgctctaacaagttctacaaaaataagaggcgcccgggagacttctcaaatgggccatggagttaagccaatttgatcttcattacataccacacacctccataaaagggcaggcattagcagacttcatcacggagtgccatgaggcagagggtaacgcaagcatgcccacaacgcaagtcccagcatggaaagtatttgtggatggcgcctccaacgaaaatggatttggagcgggggtagcaatgatatccccaaacggacttcgactccaggcagccctacggttcaaattcacagcctctaacaatgagaccgaatacgaagccttgatagcagggctgaggttagcaaaagctgtgggggctagaagattagaagtcttcagtgattcacagctggtactgaaccaagtatcaggggaatatcaaacgcgcggagaaaaaatggccgcgtacgtagcattagtccgagagttgctccacgagttcacggactacaaagtagaaagaatccccagggaaaagaacgctcacgcgaactgtttggctaagtgagcctcaggcagcgaaattgagaaactaagggtagtacccgtggaacgccttgtggaaccaagcatcaaagccaagagtaccgtagcggcagttgaacaagagctcaactggatgacccccatcattgaatacataacaaaaggcgactttccctaagaaaaggcactatcccgaaggatacagtaccaagtgcaccgttatgtgatgatggacaatattctctaccgaagaggactc

SEQ ID NO: 75058 - DNA, 788 bp, Cannabis sativa
tatggtgtcgagaaggggtgcatcacacgaatagaccctcagacaagacgaggtcgcgcatagatttagacatttcatgtctgaagacacggttagctccacgttcggacacgaggatgcacgcccagcaccctgctagcaatagcaaggtcttttgcgcgtggatcagcttctaaatcctctcatgcgcacacgttgaaggctggcatcagcctgtccctcggtagccaagctgctatgcacctaaaattcgattttcgggggatttttccacaaattttgaatttttttcaatttcaaatcttaaaaatctaaataaaatataatttttaatatttaaacataaatatcaaaattttaaattaataatatttcatttttttaatagattattattaattttagatattttgaattttaaatttaaaaattggttactttatttttaaataatggttattttttaaaaatttgttaatttctttaaatttacagattatttaattacaaagataaatattttaaattaaaaaatagcatcatcattttaatttgaaattttatattaaaattttcttatatgacaaattaaataataataaatttgaaattaacctagatatttttatagatatccaaaccataatattttcaaattcataaattgattattttgttaaatattttattatttattaactataagttacataaaaaatatttatgacaatattatatcattttacttataagaaagtcataaataataagggctttttcatttttac

SEQ ID NO: 75059 - DNA, 1184 bp, Cannabis sativa
gaattcctggatgtgtttcctgagaaattaccaggaataccaccttagtgggagatagatttcattattgacctgatacctgcggaagaacctgtttcaaaggtaccctaccatatggctcctgcagaattaaaagagctaaagatacaactccaagggatgctggatctagagttcacccgacctagtgtgttgccctggggaactctagttttgtttgtaaagaagaaggatgggactcttcgaatgtgtattgactatcgggagctaaacaagttaacaattaaaatcaagtaccctttgcctagagttgatgatctatttgatcaacttcagggtaagacagtgttttccaagattgattgaagatctggttatcatcaactcagaattcgggaagaagacataccgaggacaacttttcgtactaggtatggtcattatgaattcctaggtatgtcgtttgggttaacaaatgctccaaaaacctttatggatctcatgaatagggtattcaaggattttctcgataactttataattgtgtttatcgatgatattcttgtgtattctcgattgaaagcagaacatgagtagcatctttgtataattctgcaacgacttaaagatcataaaatctatgcaaaattcaagaagtgtgagttttggctatcacatgtgtcttttttggtacatattttcggtaaagatgggattatggtagacccagggaagattgaaacaatgaagaacttgcctagaccgaaaacagttactgcggtatgaagtttcctcggtttagcaggctactactggcattttgtagaagaattctccaagatttctttgccattgtttgagttaacgagaaagaatcaacagtttgtgtggtcagataaatgtgagaaaagcttccaagaattgaaacaacgattgagtacaactccagttttagccttgccgtctgatcaagagaggtttgtggtgttgtgatgcatctagacaaggtttgggttgtgtgttaatgcaagcagacaaggttatagcttatgcctcactgcaacaattagattacgagtagcattgtccaactcatgatttggaacttgcagcagtggtgttcgcgttgaatatttggcgacactacttatatggtgaacagtgtgagatttatactgaccaca

SEQ ID NO: 75060 - DNA, 821 bp, Cannabis sativa
tgtgtaggcactaaaattcactcgattttgtccatatcgaccccatttgatcctcattcctaagctgaatccctaaaggttgaatagagatcagtagaggtgcctagaaaccaaccatataatggaggacgacgatagtaaaggtacaatcccatttctctttttcttgattatttatagtttattttgtaatttgagtgaatcaaaatggtttttactatattttttctttctgttttactaaaaaaaatggtttgtatgttttactctctcctttttttttttttgtttctcattcactgtatgaaaatagtttttccagatggagtttaataattatattgggttgaatatattgtagtaggtgtacacatttatttgatgtatattgtttttgtaggggcatgataaagtaagtattaaactatttctcaattttttggggggtataggctttgactagcatgtgagcatctttgcacatggttttaggcttcatgtcatcaagaaactggtttcttggtgattttctgacgactatgctgattccgacaacttttttgaagtttgccgttagttccggaaaagtcatcggagaagctgccgatgtcagaattggcattgtcgccagaaaaattaccaagactgtggtttcttcatcaagaaatcggtttcttgctgatttttccattaattttttcggcgacaatgccaatttcgacgactttttcagtgtcgacagcaattctgacgacttttccgtcaccggcagctactccaatgatttttctggcaccgacagcaacctccgacgatttttt

SEQ ID NO: 75061 - DNA, 724 bp, Cannabis sativa
  modified_base (456)..(460): a, c, t, g, unknown or other
ttaaagaaattcaaatttttaataaatcttaccatattttaaaaaataaaataataagcacgaaaaattatttaatttaattctgataattagattgaaatatgaaaaataaaaatttaaatacaaaattacacaaaaaattcgaagttaattccatgaaaatccataaaaaaatgaaaaattgaaaaaaagttggctttggtacggatggtatgcattccataccattcgtgcgggtcctggaggtgcacagctgaggaaactcgacgctggaggctgcttgtagcctgtccgcgcgcgcaggggcccttcagataggatcaacccatcttgtctgaggaaacgtggacatggttgtgtccgaatgcgcgtgaacccctaaaaataggggaatccatgcgcgtatggggtgtcaccacccctaagacttttccaatttttaaaaattcataactnnnnnaaataaaatcgaaattaagttctgcaaaaaatgaattgcttaatttttcccatactatccaacaaaaataattttagaataaaattctaattattttacgtaaaaaatttgcaaacatcaaacaattatcaataaacagatagatcaacatgaatcacatccaaatcatacatccatcattttaagtcccaatttcttgaaagtaaatcaattcccatggctctgagtccagtttttggaatatatattttaccaggatctaga

SEQ ID NO: 75062 - DNA, 1028 bp, Cannabis sativa
ttactaaactgtctgaaaaaaaaactaatatatcagtttaaaataaaataataaaaaataatattttattatgatgtttactaaactgtccgaaaaaaaaaactaaaagtaatcgaaataccttaatttgacaaaattattattattaaaatatgtaattattttatatttatagatttttaatgagtatatttatcttttttatttttaattaataaaattataattataataaattaagtaagaaaaggaaaatgcagtccctgtaaaaatggggagaacctttctctttgttttctctttaatttgtgtaaatcccactagttttctcctttttaaaatttaataaataattatataggaatcaatacaataccattcattcccattctctttaagtaaacatactattaaagagcagaaattactactactattattttagcgacgacttttaattacactataatttttgtgtgactaaatgtgacttttagtcacaaaaaaatactatttgtgattaaaatataatatttagttacatattgtcactaatttaatttttaattaattaatgtaattaaaaatatatttaattacaataaattataatttttgtaactaatacttttagtcacgaatcttttagtccaacataaaaataataatttataattaatcacaattattttaaaatttatgactaaaagtaacatattttttttttagtgactcctaggatcgtcgttggtcgcacaaattgcaaatctttgaaatttattgatgatgttgagtgggcaatttccaatttgttccattatctagatgatgttcatgagatgggcaattatgtcccctttcaatttgttaaacgttgttttccttaactaattgatcataacaacacaagttacaactatgtaagtagccaggaatctattaattcttaaagcaaaagatatttttcaatcatagctatttattataaataccttttcttggacggtggccttggttttatccatgcc

SEQ ID NO: 75063 - DNA, 932 bp, Cannabis sativa
cccatgtgcatccctaccaacactaggtagtgtcctacaattagttagcaatattcgttaaaactattacattaaaggaaattacgacataagccttcaaaaacttatgtttgatgaagataagttatcaacctcaaaaattgacgataatagtccatacatagtataaaattttctcattttccatttgaatctcatggccatgacctttggtttcttcaaagttcttcaagagagacttttcataagtcacatgaatggcagtacacgtacgtatcacaccacaatcattgaaccttgccatgtattgcattgacctcactgaaggttgcagccaattcatctctagtttaattgaccttaagatttgttgaaggaatccttcctaaatttcaattctcttgcaaagtgaccacttctcccacaaacaaaacaaagtcctctcacaccatagaatttcactccatctttctcaggacctaagtggttttctttcttcttttggtgcttcttgaaactctttcatttggattgagtaggcttagtagtcacattagccttagaggtcctatctttggactcatccacacttttatctttaaagcgagattcttcctcaatcctcaaatatttgagaatttcctccatagaaatcttttcatttgtgtgaagaattttcttcctataacctctccaagcaagaggtaatttggctataatcgtaccaataagaaaagcttcgggtattacaatattaaaagtataaaatttattaacaatgatttgcatctcatgtacttgtggtaaaagagatttttcatcgtaaaacttaaattccatatattgagtaataaggaacttctctgtaccttcttctttcgatttgtactttgaatttaacgagtcccaaatctcctagccatcctcatatt

SEQ ID NO: 75064 - DNA, 879 bp, Cannabis sativa
aactctttaattcttcacttctcacccggtttcatcatcattttcttttgtctctttttcatttattacaaattttccatatcttctttcagaaaacccctcttggttactgtaaattggaggcggacgactagtttcccgaaacccttcaaaagtttttcatcattaaggcctccatggatgagactagggatgtgactagggcggttccaaggagcgttcttcgtggcttatggtttttcatatatatatatatatgtatatccaagcccaagtatggcttttcttattcccttcctttgttaatttcctcttttgttgacctctttgaaaccttgttctttctcaaaatggatgaatttctcaactcagtctctaatgctttatctattctatctgatgaatcaactgtttttacctatgatgttgggtcttctagttctactcctgtgtctattagtttacttctgaagattcatactattcgtccctataatagaccttccctcatgaaaactctttcgggtatctggtcatcgcaatgtcatttcccggtcgtcatgtctgagcatgcggatggtctgtttctagtcacatttggttgtgaaggggataagggtagagttttagagggtcaaccttggcactttgcgctcagagtataaccatatttttgctgctcctgatagctctttccctctaactcctgaaaatctacactatgttcctttttggatccaagtgtatggcattccatttatgtgtaaatcttatgaccttgctaggttcatagccatggaaataggtgaccttattgaggtggataaggatactaatagggagggtactggaccctatttgcggattagagttcttctg

SEQ ID NO: 75065 - DNA, 655 bp, Cannabis sativa
taagaacaaggcccatagacccttcaaaaccaccaagggtcttttccatcaacttgaatcaaagttgaaatcaaaaaatcactaccatcgagtcgaaaatcatgatgcttttactgtcccacactatcaaagtaccacccgagctccctatagctgggataagaatccaagctttgaaacaagacctccaaataatcccaataatgcttcagtccactacttctctttttacttgtaaaataattagttcggctcttcgtttctatctatccccactgcccctaatatccatgtaagaatcttcattgtaatctttttttggaaccctggacttcttctgacttttatcatagtttatgttaaaattcaaatttttaatttcttgcttttctttttcacttctttctcattacactcctccactacctctgcttcctcattagatactattgtcattcccatgtttgtcaaagttgccacaattatgccaagaggacttgctcaatttagattcccctttatcaactccatcatttctgctatcgatctttataggaagtttatgttgctgttctgcctcactaacacattcttttcctctttcttcatgccacaattcatcccctcgattcaccatgatgttatcctcatgcca

SEQ ID NO: 75066 - DNA, 911 bp, Cannabis sativa
acctgcatgatcagaatcaacataaccagttacatctccatgtagttggtctctgctatcaaataccagatcagtgttcaatgttcctttaatgtatctcattgtccacttgagtgcagaccagtgtttttctccagggttggctaaatatctacttgtaacactcatagcatgagcaatatctggtcttgtgcccaccattgagtacattaaacttcccacacagcttgcatagggtatctgactcatgtgcttcctttcagcatcagttgttggagcttgagtaatggatagtttgaaatgctgtgctaatggtgttgatacaactttagagttgatcattccaaacttgtcaagcaccttcttgaggtagttgctttgagacataaagatcttgtgaggcctttctcttctgatgtcaatacctagtattctttttgctgtccccagatccttcattttgaattctttgtacaggagctgcttgagcttgtcaatctcagatctttcctttccaacaatcaatatgccatcaacatatagtagtaggtagatcttatttgtaaaatacacacaagggtcatatttgctcttgatatacccattcttgttcatgtattcatcaaactttaagttccattatcttggagcttgcttaagaccatatagggatttccttaagaggcaaacctagtctttgtctttgcttttaaaaccttcaggtaattgcatgtagatctcttcttctagattaccatgtaagaaggttgttttaacatccatttgatccacctcaagatcaaatttggcagccttagacagaatcattcttgttaaggcttgtttaactactggtgagaaaatttcattgaaatctacacccacttgctgagtgaaacccttagctacca

SEQ ID NO: 75067 - DNA, 1120 bp, Cannabis sativa
aagtagcaacatcccctctgcatcctctaaagcttcatagtcattgctggtggttgcttcttgttgcggcctaatgacatacttagtaccttttcttttaggagtcacccactgctcattgctgggttgtatattcgtatttttcaaatcccctactccctctggaaaagtctcccctatcccctttactatcaccagtaggtatagtaatattgttggcagatataccagtatttttagaatcagtaacattcttttcaaagtccttgacactatccattggtatctcattgttacgaacttcctgttcagcagcattgttcttactcccttgctggtttctcttccatataatcggtttccctttattacagttggaaatggagtgtccaagcatatcgcaagccgtacacttgctaggtaaccactcatattcaacaggttgttccattaattgcttcttctcattaacataagcgatagttttcgggggtcttccttaatctcaacatccactaacaccctagcatacttgatcatagacctctcaagagtaaccttgtctgccatgatcggttttcctatcgtactaacaagagcactcaagttcttcttcccccaatattgaagccccaaaccatttaacctcacccaaaccgggaccgatttgaccatccgtgctgtgtccatatcctcggaccaaggcctaagaatcacaagctttctatcaaattgaattactccagtttcaagaatgacattccgagtaacctcatccttgaaactaaaaagagtgaaccctgagtgcattctaagaatcctttccactcccaaattcccccaaattcttttgataaaaccttcaaacactctaaatggaggattagcccctaatacaatacatactatcgatgacctttagtatgatgcttctatttccacttcatccaaatctaaattcgcaaacacctgatccccaactttagatggttcagtaaaagagagttgggaggaaggggtttttacctgattcagattgaatttactccaagtgaactgagcagatgcctgaaaatccatcgcctccgtatcgtccgcccaagccgtcgatttaggaatc

SEQ ID NO: 75068 - DNA, 844 bp, Cannabis sativa
gaaatactagaacaattcaacatcatatctaaactctcatttcttctgtatatcttcaaactaaatgttttagacacaacttgaaaacaaactaatgatttcatatatgtatatttttatcagtaacacatattcgagatcaataactagtaaataatgtactaattttattgacgatacataaccaataactttattaataattaataatagtgaataacatcagttgctaaatttatcaagaatacatgttcaagatccataacctatagtgtgatctattgctcatttgattgtttctttgctaaagatttcgatgcgtcatctcctcacacattcttgtaagttggtagacttattaatattttgattacttatgagaattgtgagaaggtactgccaaaattttgacaagaaagaagcaatctcaagagcatagattatattatatgtatattacaaacttgaatgagataggttcattacccttttagtaatggaatgagaatgtggatttggacacttgcacattttcaactttgttttgaactttctctttttatattatgtagaaatatggtgagcaacaaaagttggatgactttaaacagacgatgtgtagagtttcgtaggggtgtggatgagtttattggagttgctcgaatgtaaataaattctaatggagttactcgatgcccttgcatgagatgtttgaatttgaactttgagactcccgataatattagggtacgtttgtttatggatggcatccaacgatcgtacacgacctggtatttttaaggagagtcgttcatgcaatcgactatggaaatagtagacaacg

SEQ ID NO: 75069 - DNA, 750 bp, Cannabis sativa
tcaatcaaacacatatccatatcccacctactactcatatatatacatatatataaataaatatacgtatattcataatatataatatgtattagcaaacatagatcaaaaagaaaggggcactaaagaaaaatacctttagtgacaatcttttagttacaacatacaaatgttgttactaaatgtgacttttagttacaatattgatcaatttcataattaggatttttgtcatctgaattttgacataaatcatgtcccctaaagttttcaagcaatataataatttctcttgaactattcaaattgttggatttaaggacttctgtctaatttcattcaattttgctaatgcggtgattgtccaagtactaaattgtaccccccaaaatttgatatctaccaaacatggcccaaactttgacatgtacaaaatcatgttccctgaactttcagccacatcaggctttggttagcgaaattcgacaaaactccttaaattcaacattcacaatagttcagggggccggccaggggccgagggggatttcaactcaagaagaataatttggtacatatgaaagttcaaggggcgaaaattcaaattagcttttttttttatatccctgttaatatatagacatttctatatactttttacattaattgaaagaaatcataaatcaattttatatattcataaattataaattatatttatttattgtacctttgtattgcttcagttaa

SEQ ID NO: 75070 - DNA, 1327 bp, Cannabis sativa
ttttaaaattgtgttagtgtgatatataattgattatctatgtatatgtatatgttatatttttcaaaaattaatctatataatttagtaactagtaacttgttacattttttaacagctagtaagtaattaaataattaaaattctaatttcgttgtatttcattatattgtaggttgtgagctaatttttgaggttcgacatatttcagtgttgatcggattttaacttgctataggtatatacattcactaactttttgttattataattacttttcaatgcatgcttagtggagtttgaatatcttaaatattcatccgtagtgaattcgcgaatacatgtactgcagtcggatgggtagataaattttgtattgttattgttattttgtttgttcagtattattttatttgtattatttgttactttaggtatttttaaaaaatttgggaacgtctaattatagctgttatgttgtcaaaatttcgatagaattaggataaatttctaaaaaaaaatataaatattgaaggaaaaagttataacacaaataactagttaattactcgctattggtaagaaatcaggtgacataacacaaataattatatacacattcatataaacttatcaattattataaatgacaaactaaacaaataaatggattcactttaggaaaagccattccattcccagatccattccactaattaaacactagcctaattagttaattacaacttatacaacttaataacatgaatcaaactaaaacaagaattatagtaatatataaattaatatgatataattgtgagaaacctagttagttacattgtctaagtagtaactagttataattagttactaaatactgaatttttttggttagaatatttgttatggataaatcatggatgcgtgaggagagagacacattgcgatttcaagtagggttcgatgcatttttagaattttccttgaaaaattctaaaaatcccgaacgtcttcattgatcgtgtgtagattattgaaatggatctaaaggaaatattatgattaagaaaatattacaatgatctgaagaagttatactacttagtattgacatgacgaacatttagctgatgatccatatccattagggaagcggggggtagatgatatagggcgtaatgatttcgatgatcatccattggacttgccttaaagaattctaaaacccctattcgatggttgtaaaaaaaattaaaattaccaacaatggtaaagttttacaacattaaagcagaaaatagagtgagcaataaatgttttactc

SEQ ID NO: 75071 - DNA, 804 bp, Cannabis sativa
atattaaattcgtaatattagtatatatgtatataagtctgtttaaaattaattaatattctttaagaaatttaatagtgtaaatatatataattatatatactgatataattatacatgacgttaatttaagagaaattaattaataaaagactttttgatattcttggagagaaaaaagttagcaattaatgtgaagagaaaataccaattttattagtttagccgttaaagttaacataatttttattgaataattaaattaaattaaattaatgaggtagatctaattaattgattggacaagaaagagacaacatattcagtacaggtgatttttttccagcaattctatagtacaaattacatattagaaactttattattattttattaatacaagagtaagacaaacttgtgacatcaatagcacttgaggtgcttgtgtcattattacgattaagcaatgaaataacatttcatcctttcttactttcaagtagtactacaggctccttactcttgcagcctgcctctctattggccacctaataaataaatatctataaacaacatttttctatatatatacatatatatatggactttttttttatatatatacaataaaaacaacataattaaaaaaaatatgaaaaaaaattattttatttatatatatatatatatatttatatataaaaagttggactatttttaaggatagtttgtggcttcaacatgagaagaagtaaagaggcattcagcaaaagaaaaaagaagaggcatactcaccagtcacca

SEQ ID NO: 75072 - DNA, 506 bp, Cannabis sativa
acagagtaaaaaagtcaaaaatatcctttagcctatttgagagaatacaaaagcccattaacagtaacaaaagaaaaaaaaaaactaaagcccaaaacataagaaacacacgggaaaaaacaatggtagaatcaattttgatgaataccatgtgaaaacaaaaatgcttaacctgacaatactgaaagaactcagacactagaaacttgacactaatgctcagcttgacccaaagaaagacacctacacatcaaacacaacatagagcaaaaaaataggaaagtcagtcaataaaagttggataatactaagaataagatcacatatatgtattgtcaatgaaaacatatatgtgatctatttatgaaaagaaccaacaattattgaaaaacaatcctaagacataaagacagttgtgaagatggtaagatgcaactttcttaagatcagatggtacacaccccaattgaatttcagagattagctaatatgtgagcatctaatac

SEQ ID NO: 75073 - DNA, 1490 bp, Cannabis sativa
aatttagaggaatattttacatcggtaataattaagtgacttaattctttcaactatgaatcaggaaacaatatattaacttatttatttttataataatttaagtggtatcacaactataaaataactattaatttaaacaatataatatgtaatatttaatataaaaaaaaaatatattttttaatacaagaaattctcaattcttataaaaatcattcgaaatgcggtattattttctagttaaataataaaacaaattagtttggcaataagaccattgcaatcaacttttagggcttgctatgtgaacacagaaatttcttggtcattgcccatttggccaagttatagactacataattaaagtatctagcaacaaaaaagaaaggtacaccccaagaaagaagccttcaatttcttgtttttatcagaaagttatgaattttctatctataattctcacactgaggtgtgcaatactatatgtagtgacattttataattagttagtaattttttatattatttattaaatctaaatacatgggatacgatattcaaatacactaatattgcatatttcgtaatgtttgacaccttaaaataatactccttagcaattctcatcataaaatgatacatgttaactcaatcaacacttaacagagtgtagcacatggatactaacactattcagtatttctttttgctaaaaaataatttaaataatttcagttactaatgcaacgtatgccacaaatagtgccatacaagttagaaagtctaaatatttaagataaaataagaatagtagaagtagtttattcattttaagagcatgcaaaattaattcatgtgtagctacatgatgacaatcctattataaaatgatcttcagtagtgacacgtcaaaaatgttcatattatctaaaaataatctaatttattttatctccttttcaaattatttttgtgttttttgttctaataatatttttgaaaaaaatgctaatctagcttctctctttctctttccatggtgaagaagaagagggttcttagaaagccgatcacgagatcgtcggagctaatttcaggtgagaaacatgcagtatgaatcgaggatggtggagctccagccaaggacgaagtcatggatgtctttatggacatgaatcaaccagaagaggttgacgtcgatggagattcggagaaagctctgtacgttgatgaagatgctaaggctgaaagaagcttaaattgggtagaggaagtagatcgggaagaggattttctttcaagtgctcagaatcaatggaagaaattcacagatggtaagctgttctattctgaccctaagctttcttttacaaaacctttggctatgaatggattaaaaatcgctaaagtagatattgaggaagcaaagattgaagaggcgcactggagttcgattgtgattcgtatggttcttggagccaatgttc

SEQ ID NO: 75074 - DNA, 824 bp, Cannabis sativa
tgtcaaatgtaagcaactcttctcttaagagtcaaaccaaaaagctaacaagagaagataaataagttagctacattggtttcttattattaatatattaatatttttttaggtggattgtcaaatcttatactatctttaacaaatttttacaaattgaaatagaaggtctttttgtaagagattgaaaaaccaacttaataccaattaatactaagtggagtaacttaatccttatttttttttttaacaacttaatccttatattaagttataatgtttctcatatattctcaatatatatgggactatatctaattcaccttcctcaagtttaagtataaaaatatgagtataataaattatctttaaaagaatataagggcgaatatgacatttaaaagaatctcacaaggctaaattaaaaaatttgtgggtatacacatcaaaaaaattgtgaattttttttaaataagttaaagacgccaacactaaaaactagcatacattggtcgaaagtcccacatggaagttaaaggctaagaccgtgaaaactttgaatttttctaataccattttaagaatgaaaaagtgttgatagaaagtaaaaaaaatgtgaagtgtaggtaagatttatgggattctatctcaaaactaattggcagagagaggaataacgcatgcatcttatatatggtactcattaacaccccacttcaagatggtgcaattttttttttctcaccaatcttgtttttttgattggcgacacttttggcacaatgggtattcttggttcgctatccccgaatcacaagcaattc

SEQ ID NO: 75075 - DNA, 830 bp, Cannabis sativa
atatcaccgttcaatattaactaactgagtactatgtacagaggtgtgtacgtgaaaataaaatttcaaagtcaatacaataataatctaattggtattaacagtgatatctaactgacactttaaatttataaagaaaaataaatataaatgcattttgagagtgttaagtgtaaaaaatcaaaatataacagagtttcgttgcaaataaacattagagtaatttgtggtataaatacttaagtttaactctcggttgtaaatgaatacctacgtttaatttttagcagtaataatattgaagttatatttttggaactccataagtacctgaccattaaatgtcaaattattatctacctattattttcttattgatatatttaaactatttttttaaaaaaataaatatttaatgacataaaccaattaaaaattaccacctgtcaaattacttaatactttaacaccttattttaatacttaacaacttattagtaagatttgggctttaagcccaaacaaacaagatgctccagcttctttggttagtcagtcaatcaaagctctgtcttttaagcttttatggatgttttcgttgaggttcatgtttcaatgtcaaaccccagtagtttttaaatctctgttcttcccatcctcgtatacaaattcaatctagtacgatgagaagcattgatttagcagccacttccactcagctcatgctcgataaacaaataaagacaattcctttatcaaggtaaggtatttattttaaccaatctcatctcatttatgtaattatctgtggagttttttttttttttttt

SEQ ID NO: 75076 - DNA, 693 bp, Cannabis sativa
cttttgcaactaagcgcgctttatgtctttcaacctcacctttggagttatatttgattttgtacacccatttgtttccaattacatggcatccaggaggaagagatactattgtccatgtattgtttttctttagagcaaagaactcattgtccatagcttttagccattgagagtattgcttggcctggctataagaagttggttcaagttcgatgtatgcttgaagtatagcatttcgaaaatttttgtgaagtctattgtaagacaggtatttgtcaagggggtgtgcagtggaatattgacacacatagtccttgagatggcctggtttagttatgtgtctgccttttttagttgtagtggcagcagggatttgaatggggtcaaatggtgctggaggctcaacagatcttagtcctggaatgggcgattttgaatgttgctggtgtgatattccaggctcgatttctgtagtaatggtgccattttgtgccttagaagacttggatactgctggttctatgttgggtgctgcggttgcagcaggagcaacagagcacggcttggatgtagacataactggtaccattttggatgctgttgttgcatcaatagtaccaggacactgcagagatttagaaactgctggtgttgcagtatgttgagaaaaaaatgtgtccagatcctgag

SEQ ID NO: 75077 - DNA, 1104 bp, Cannabis sativa
gtggggctcctccggattcgaagctgatgacccagcccacgggtcgagaacttgctgagggaacggcgggaacttgcgctcaaatagtggcgtcaccctcctaaatgcacgctccataactgcgtcgcgcttttgctcatattcccacatagcgtgcaaacgaccacacatttgctgttgcacttgctcaaagtgagcaaagcgatctgcgggaggctccgtggctgaggtcgaagcagaagcaggagttgttttcagagctttgtggtggaccaaaactgataggcccccggggattcaatgctccttcttcgttccacatcggtacacccgcctcgcgacagagagcaatgatagtaactggcagaaataattttcctttcccccggtgcgcacaatcggcaatttcttgggctacgacaaccactacatcaacatcccaacccatcttaatgcagtacaacatccatgcacgatctctgctgacagtggaatcatgtgaggtggggcatagggaggtttgcacgaatgtgtaaagacatttcagatcgtgctccaagtcagtgcgccgaaatcgaaggtttccataatcatcgaggtccactcggactctggcttggtgatcacaggcatcatgtcagtcaatgtctaatcgcccacttgacctttgagggaggagtaatggcattcgattgattgtaacctaaacaagttgttgattgcttcagttgagaatgacaccggtacttcacgcacaatcacttcagtatgccattcttgggacaaaaaattggcgtagaattctttgacaacatccattaccgcatgtcctcgctgcttgaccaaaagtccccaattcctcttatgaaccatttcactaacccattcaggtaactcgtcaatgtcctctatatctgccactaatcctcgcgccatataaattcccgattgtccaccttatcgtaatactttgtctcggttgcctagcaatgaaatttaggaacttcatgaagtgacttctatttttttctgttggcaaccctcttgacatttggcattttctcttctttttctcttttttttttcaattgcacactaccccaa

SEQ ID NO: 75078 - DNA, 594 bp, Cannabis sativa
  modified_base (35)..(71): a, c, t, g, unknown or other
gtgtttatttcatcgtttagaaagttcatatttannnnnnnnnnnnnnnnnnnnnnnnnnnnnnnnnnnnncctagtaaaataattccaacagtggaagggttggcggatgattttgatgcttagtggtgtttggtgggcagattactgtctgataaaccggcaaatttcaattcactccgaaacgtaatggcgtcactgtggcgttccggtaagggcgtgtatgtaaaggaattagagaccaataagtatttgtttcagttctttcatgaagtcgatatcagtagggctcttgagggcacaccatagacattcaacaggatacctttgatcattgaaaggcttaaggaaggtgataatcccaagctatgtgtattgaatactatagaaatatgggtccaactttatgatttacaagtagggttcaagagtgaacattatgttttaagagcgaacggggcttacgtcggaaagtttgtgtcttcatgcatgaatatcgatcgaccgacctcttaaaaggagaatgaaaatatttaagaacaaggaagagtggttatgggaaaatttcaagtatatatgaacgggtgccgacgtt

SEQ ID NO: 75079 - DNA, 590 bp, Cannabis sativa
ggttttatcgatttaatcaattctgagtgggttgtgctgatctatattggtgtaattttttttctagaaaactaatccacttcgagattcatctcattgtgcaacgtagtttcttgttctattgtgtgcagattgataggaaatggaaatgttcagagaaggtagatctacctctcgtcctcccatgttagaaggatccaattaccctattgaaagactaaaataagagctctcttgaaggctatggatggcagtagccaaaggttgatccccaccttttgtgctcgatgaagaagaagaaaagattaagaagtccagtgaatgatctgttgtagagatggaacgagctaatttcaattccaaagctctacatgctctttttaatgctgtttccacgaatcaactcaaagtaaattctaactgtgaggttgttaaagatgcttgggaaaagctaaaaatcaagaatgaaggtactgaagctgttacaaaggcttgactaagagctttagctaaatcttttgagaacctatctatggaggaagatgagtccatttctgaagttcattctaagctatgtgacatctctaatg

SEQ ID NO: 75080 - DNA, 1132 bp, Cannabis sativa
gccagagatccctagccggccccccatgtcgttggttgctgagatctggctgttctcgaggtttgacctttgaggaaaggtctgtcctccctctggcaggggataatttgtcctagttcttgaggaacttggtggcagaatcccttggagtggacctttaaggagatcctagcctcttatatcggttctctaattgaaccgtcttattagatcactggcctcccagttgcggcaatctaattctgcttggtgagatcgaaggatgtactcttggtcatccatccatcttttccgtctctacgaagcaaaaacactacaattagtagcgcattctgttaggcctgcacgacctacaacttccttaagtctggcaaactcaaggtcttctcctaggtcttggtaaggctcgccaacgctcaggcctatctctcctgcatagaacaggagttgagatccaattgttgtttcagggggttgtcgcctctaggtccttcattcagtgggagacgccaatggttggtctgctcttggaggcataggcctgccacttggacccaccgaggtgctcgtaccagtttggctagctgtagtggccagacttgtagaacctgttgtggtgataggattcaccacatctgtagtgctaatggggattccagttgtggcttgaacctaagtgcctagatctggcaatctgtgggtcttgagggagactcgaagatgcaaatggtgcgacaggagttctccttgtgttcaccatggcgtttgatcagattacaatatccatgctctcaatgaaagcaccaaactattgatctcaaaaagtgatcaaccgacagcggggtcgtataaatctgatgcttgccatgtatttgcacaaataagaacaaaaaacaataaacataggatttgttatagaggttcggcccccttgtgatagtgggtaattaactacaccccttttcgttgtatttataccaagggagatactatctagatcactataaatgggatctgctacaacacccttaggattacaaggtatggatcaataatggaaaaactcaaattcttagatgatgctagggtaggcgtgtgagagagagagtaagagatagagagagagagagag

SEQ ID NO: 75081 - DNA, 683 bp, Cannabis sativa
  modified_base (150)..(176): a, c, t, g, unknown or other
tcaattatgtaatacatttttgatcaattatgtaatatatttttatattgttatacattaatattaaatcaattattagtaaatttgtataattatttttaggggaattaccctaaatactgttttttatttttttttttttcaaatttnnnnnnnnnnnnnnnnnnnnnnnnnnngcgctagttgcaataagagtttttttacgatttttttgttgtgatttaggttgcaacactagttgcaataggggtttctattttatttttaactgattgactataacttatatttgaatattttttttttggtggtttattcttttatatgattatatatatgtgtgtttcaagtaatataagtagtcattgttatcaaatttttatttctctaagaatatttatattagattttattaatgtgcgttctgattataagatctattttttttctttttgattataatacaacttaaatattattttgtaattgatccatacaccaaaaataaagaggatttaatataattaaaggcacgccctaaagttaatttatttttgtttgtgatatatgaattaacaagtaattattttttcttttattttcttctaaatatgaaatattttatttttaatatccggtaaggtatatagagataacacattacaaaagatgactcatttcat

SEQ ID NO: 75082 - DNA, 715 bp, Cannabis sativa
actcggattaattatacattttttctcattatacacaaaacttatcttcaatatgatcaccttagacctctttatatagtgtttaggatatcaccatttgaaattcaaattcataagtcataaccttcatggatattatagactcaataaagagatgtaactcatgcacaccataactcctatagagatgtaactcatacacacaccataactcctatagcattaaaaatttcaaattaagatgtgtaacaccttttacacttttaatgttggtgataatggtggagattactcatagtaacaagtaactccctcaaatattataaaaagatgactattatcatatattacatattaatttattacacgtatttaatctatatattattgataaataatataacaatattaaaatctcaaaatgacaacaataaattcaaaagattaatggacccatatttggtaaggtttttaacacttctgcaatatacagccaagccatcattaatatgggaacaatgtcatcaacctattatattttactgaaattttactttcttggtatacttttttttttttttaattattagatggtattatagtaaaatttcaaattattatttactttcaaacaaaaaaaattaatatatttatttttattgactttttgaacattttagttttattaattacaacaaatataattgtttaaaaa

SEQ ID NO: 75083 - DNA, 1181 bp, Cannabis sativa
  modified_base (356)..(358): a, c, t, g, unknown or other
  modified_base (576)..(605): a, c, t, g, unknown or other
atagggttgaaagtgcaaaagtggtatttgtgaaaaatagataaaattgttgagaaaaatggccaaaaactagctagtgtaggacccatcacatggccggccactaggtgctatttttgccctatttttattaattttttattctaaataaatcaaccctaaccctaggtaaaattagtataaaaggaaagatatggtctcattatccaactaatgcttctaaagctaaaaacctagttttctctcttaggcaactaggtttatgagagttcatcttcttccttcttcttctaatttcgaaatcatatagccatcttcacaaactgaattcaagtcttagtgattgagtgcatgcnnncacataacaagtgagtcctcaatcgtagtgtgtaagattgtgaagaatccatttaagtgaagtagaatcaggctcagatcttgttgatattctggtacagaaaggatacaaaggttagagatctgagcggaaggagtcatttaattccgctgcaaccaatataaggtttcttgaactttatatgtatttaaattctattgttttagaaattcatattnnnnnnnnnnnnnnnnnnnnnnnnnnnnnnatctagatcctggtaaataatccccaacaactgacctcagagccatggtatgatttactttcatgacatatggatttaaaacgaagtttgcgttgatttggatggtttcatgttggtttatgtgcatgtttgatgattgtatggaaatcacaatgtctattgtaaaaaattttttgtttcgtcttgaaaatatttttactggaaagtagatgaaaagtttatgaatttaggcttttatataacctaatttggattttttatgaattatttatgattttttaaagtttgaaaacaaaatatcttagtgatactcatccgcgcgcgcatgggggacacgaccgagtgttctcgtgcggctcgctcagacaaaacccctttagaaaggggcatgtccaaagtttgtcccccacctgaccgtgtctacgcagccttgcgtctcggctggaccccctattctgcgcgcgcaggggtatgcaaccaatacccttgtgccccaattttgttttttgtaataactttttattcaaaaaatatttttcattgaaaaaaaactcaaactttggtagaattttgtgt

SEQ ID NO: 75084 - DNA, 2381 bp, Cannabis sativa
ccaatgtaatgtttcttgaactttatatgtgtttaaattctattgttttataaattcatatttaggatgttaaataacatacgtgatagtaaatctagatcctggtaaaataatccccaacaggcctacagcttccttgagtctggccaactcaaggtcttgtcccatgtccagataaggctcgctaattatcggttcgcccactcccaggcctatttcttcagcataaaaccagatttgaggtctagttgttgttccaagaggatgtcgcccctgggtccttccttcagtgggatgcgccaatggtggatctactgctggaggcgtgggcctgccacttggattcactgagatgctcacgtcaggctagccaactgtggtcgccatacttgttgcacctcaccacatctgcaatattcatggggatcccagttgtgactcgaactcgagcgtctggatttacaatctgtgggtcttgaaggagacccaaagatgcagatggtgcaacaagagttcttcatgtgtttaccatggcgtttgatcagatcgcaatatccacgctctcaatgaaagtaccaaattgttgaccctaaaaagtaatcaaccgaaagcgaggtcgataaatatgatgattgccacctgtatgcacaaataagagtaagaaacaatagacaacgggatttgttatagaggttctgcccccttgtgatagcgggaatgacctactctgcttttaattatattgatatcgagggaatcactatccagatcgctatatgtgggatctactatagtgccctttggattacaatgtatagatcaatgcctggcagactcaagtgttgaacagcctagggtgttgtgcagcctaggcttgggcgtgtgagagagtgaggaagggagagagagagagagtctgacacttagaggatatgagatttctagcttagaggaggcttaggcaacttaaattttcagccagaggttaatgcctttatataggacgcctaaaccctaggtttacaacttaaatcccttgaaaataggatagttagctagatatttatgtaagaccaaaatgcccctagattctaaatacttctcagcctatttgttgggcttttatggcccaattcgtagcccattcttgctgtgcacgtgtaggtgtgtcctgtgggacccactaagcaatccttggctgaccatggccttgtgttggccaggctagccaaccatgaagttgtttcctagcttggccgaccatagggctggccaggggtggctggccagcttccaagaacgaactggtttgtcacttgatccccgtttgagtgtcgaggtcttcgttggtttggatgctgacttggccttccttttagtgaactgtactaccacgtggcaaagattctatccccgtaagcatgccatgatatgaagataaaaattgggataacaatttatatcatcaaaaactaaatatattcaatatttgcatatatcactaaattatatctaattatcaaatattataagataagtttgttttaagattgttacacaataaaatgggactaatataatatttgacataaaatacaattaatgtacatttattaatatgcttaattgtactctttacatcaatatatataaaggaaggtttaaacaaatgtgaggtgacatcacataatttttttattgtattatatcttttttcttattttttacatttttaatttgtttttatacttttagtagtgtgggatttcttttgaaaaaagtcccacatagtttataaactattgtgggtgttatatttttaagttatatatagatgattgaactttcaattgaattgtgccaaaattaatattattaatttttatatgagtgattaataaatttaatcttgcccaattaattataatttttgtgaatgataaatttaattttgagtatttttttaaataaatacaatacatatttttttacacataaacttaaataagtatgagtgatagttttatagtttttatctttaaaacaaagataagtttaatttttttgatgatatattaattttatttagttattttatttatcatttacttaaaaatttaattataattcttattttaatgatctttgaagaatattttttaatatttttttgatatacttcgagtatttctcacttgctataaataattattttaaatactaattttaaaaattatgtaaacgtaatcataaaataattatgaatatatatatgttgcctatgattttatccaaaatacgtggaccaaccggattgagacacgtagactgaagaggtttaactttgggataattccactaagtctctttaatcaaaggga

SEQ ID NO: 75085 - DNA, 803 bp, Cannabis sativa
catgctggtgacacgtggaatcgactccacatatctgcccgaaggagatatgccgaatagaacaccacatatacctgcacagacgaggtcctcctagccgagtagtggataatccgaacaacatatcaacacttagcaacttcagcacttgcatcgtgaatcacaaaaacaatccctataaatctaggatcatatcacaaagatatgccaagctgtccaaatccctcaatcagtgcattctatatatttaatgtataatcttaccaattatagacattgtaaacaaaagggaaaccttccctcaagcacatagccctattgttgcttttgacttttcccaaaatacgtggacgcggataaatgtgacacgtggacctgaaagaaccatcactcatgaaaatcaactaagtcttagacaaaaaaggaacacctcagggaaggtgcctcccggaggagagcataaggcacatctttactcttcgggaggctagagccatgctaaggcagttctgggaggtatagagattacttgaaacttcacttcgcatttaatgccgcatgggggaagatgtattgaaacctccataaatgacatgacaaatggcgtaagccccttctacggcgattacactacaatcgatgagtttagtgacggctacattatgaggaatcacatcagtcatgaggggataatgttgggctttataccctaaataaaaactctatttcaatgtaatctctatcatttaaatatcaataaagagacaaaagtattttcttcacttatttaatgtgtcttttgg

SEQ ID NO: 75086 - DNA, 681 bp, Cannabis sativa
ccttggagtttgaagaccacgaggcagacctcatggctcacgaactaggagacaagaaaatgctcaggaagaacaaactggggagaatgaggttccccctgaaaatcttaatgatcagtcggaaccctctcatagaaatgagaatggtaggcaaccagaaactaacgagtaggaaattcctcatggaaatgaggaagaccctgagacacagcccggggaacataggtcaccggtgaggaatcaccagcgttcttcctgaactcaagagagagggctcgtacaaaccctagaggggaaaatatgacaaaccacgctcaggggggaaaaatagggcgtaaagaagcaagtgtgacctcaaggagctcaaggacccacagtcagtcaactcgaggaagagaaagtgctcgtcgcgttgatgaccgagaaagcacgggaaccagtaaatctacaagtcactcaaagatgaggtccatgagtaggacgaaatccatgagcaagacgagatccataagtaggacacattctgtgagtagaacgaggtctgctagtaattatttccaatcgggtctccgagagcacttgaaccaaaaaaaacctaatctttgccaacaactcagtccaaagcaagaggatccaatccaattgcgaatagatgagttgtaggataagttcagaaggtat

SEQ ID NO: 75087 - DNA, 706 bp, Cannabis sativa
aaatgtgaaacaatttaatgtaaatacaaaaaatcaaagaatattatttttaataaaatgtacccaagcattaataatttctatcaaaaatacatgatattaaagatgaaagaaattattttaagaagcgaaaatcataagcatatattgtactgagaatcaaaataaaaataaatgcttaattaaatacactaagtttcaccgtccacctgcataataagggaacttggaaacccataagaaaattaactaagaaaagcgataaactaacactgagcgttttgagcgttttctctgaatttttctgtgtaaaactgtatagaattctaaaaatcaagcttctatttataggatggtaaaaggatgaatgcgtaattaaacttattataaattgtatgtggtaaaaaaatataaatacacaaagttaaaaccggagcgtcatgtgttgtgctctgatttaatgacttgggtaacctcggccacgtgtcacacacggattggttaaaaaatagtgtgcaaatttgactttttgggttgtttagcaccagagccaaacgaagcccagtcgcgggctggggcgtgaggcgcacacacggccagggtgaggtcgtgcgcctcacgcgcgagtgatggatgggaaggggacaaagcccctgtggctgcgtaggcatgggacccgatgataactctaagatttagagttatt

SEQ ID NO: 75088 - DNA, 773 bp, Cannabis sativa
gcagtggaagaatttgtattgtctcattatcatcataccatatctcacatgatctctagatgtgtgtacactaaatcaaaataataaaaaaaatatgtttcgaatatacctctttaagcctattagggtatcctcgaaacttctcgtatgttatatcccttaatcctgatgatgaggaaattgcaattagactcacacaagtgtcttccaaatcattccaccacacacaaggaatagtgtgggctattattataaactgtataacctttgttcttgttgagttctcaacacatgagcaagaacaaatgagagaaaaataatttcctttttctctctataaattttgaaaatttagttcaggaagagtgtaagtgtattccaatttctcaaatcaggctcttatttatagtagttaaaatttaattaaatcatatttaattatttaaataataaatatctataactgaattcagttactgatatttatgagggaatctttcaaccacatgagagaatatcttaacaaccttgaaatatctataaccacatttcaaatttgatatttacctaattgaattaattaaacgattaattaacacaacaaaaaactacatagagatagcataaaactataggcccctactattgtctttaggacaaggttagtatcttttgtcctaacaacttttgtcttgacaaattttgtctttaaaatctttatttttttcctatttaattaattggaaaaatttattttttattacaaaaataaa

SEQ ID NO: 75089 - DNA, 1271 bp, Cannabis sativa
  modified_base (42)..(43): a, c, t, g, unknown or other
taaattcatgaataataataaaataacagaaattagtgctanntgcctttactaatccaaattactaaagtggtcattacatcctgggtcccagtcctggtccaggtctaggtcctaagtctcgggtcccgagtcccgagtcccgggtctaggtccggggtcaaggtgaggtccggatccgggtccgggtcccaagtctgggtcatttgtcctgggtcctgggtcccgggtcccgggtcttgggtccgggtttgggtcaaggtccgggttcgagttcgggtctgggtctgagtctgggtctgagtcccgggtccaggtccaggtctgggtccgaatctgggtctgggtccgggtccgggtccaggtcccaagggatccaagttggagtccgagtcttgaattaagttttttttaaataaattgaaatcgggttggatcagatccgatctagaaaaaaattaggtgggtggagcggatctgatccaagatccagtaagtatctgaatgtttcggatcagaggtgatccgtctgatcggaactcccatccattccaactaaatggatctttttgacatgcctattcaaaacaaaaaatcattaaatgactcgtctattaatgtctagactagaagtagaaacatggtaggtaacaaacaccaccaaacaacagtaaaggcaacaaagacaaacaaccctttaaaggctacatcaaataaaagtcgtcaaggctacatcaaacaaaagccctcaaggctacatagacgtgaatcaaaactaacgaaattcatctcattgataaactaattgttagaattgacatagtgacaccaatcgagagccacgacatgaaaaacctcaagaaaactcatatatgggtccccaaatgcctaaatgttgattcaaaaaaactgttaatgatgtaaagtcaaaattacaacaatattgtgtactagatttatgaaagctaagaatttgaaaactaacgacacaagaatttatagaagttcgatcctagtatttagtaatgacctagtcccttattgttaggggtgttcgcggtgtgagtggtgcggtttttgaccttttttttcttctaaaaaactaagtttttgcaaatatcaataaatattatagaaatataaaaaaaaaaatatatgactgcaatagtctgcaacagcagaatgtaattctgttactgcagaaaacagttttgcaaaatcaaaccagaaccagcagaatattaaacataattgcagaaaattaaatcact

SEQ ID NO: 75090 - DNA, 678 bp, Cannabis sativa
taattattgtctcatcattttaaagtttacaatgctgaagaatttttagaataatcgtaggtttattcctctaaaatatttgcctatcaataggctagttacaaagaattgttaagacaaaattttacaactaactacaactcacatcctaaaaatcagggatatataataaataagaaaataaacataatcactaaatttgtttccctaataattgatactgaattaaatacataaaatatttacataattttacactcccccctcaagttgggttatgtatatcaaacattcccagcttgcacattaattcatcaaaagtaatcttgggaagcgctttggtgagaatatcaattgtttgaagttttgatggagtatagatggtttgaattgtggcattttcaatcttctcaatgatgaagtgttgatttatctcaatatgttttgtcttgtcacggtgaacacgatatttagcgatactaatagcaacctgattgtcacaaaacatccttatagatccttctgtgaagagtctcagctcaactaataatattttgagccaaatcccttcacagataccaagagctagagctctaagttctgccttagcaaaacttttagaaaccacagattgtttcttacttcttcatgttactaggttaccccaaacataagagc

SEQ ID NO: 75091 - DNA, 1002 bp, Cannabis sativa
tacgggctcaaattcatgctctatgtttttgtattttaattacaattgagaagctaattacttaaatatatgtgtattttatagcttaaattacttttatataattttttaacaataattacacacaataatatacaaaattaattataattattaaaatttaaaaataaatagcattttaataaataaataaatatttattattgttatttttatcaaattattgagattttaaatttatcgtgcttttgaactaatatatttgtgcttatgtgtcaggcttttgagcttgtcgtgtcgtgcttttatcaatttaattgcaacaccatatgttgtgtcatgcctaaggatatttttttgcgtgtcggatcgtgtttgtatcatgttaaatagttcgacctatatttacaacattattcaaaagactaatgaggcaatagataaaattaaagctcggatgcttgcttcgcaaagcatgaaaaaaaagttactctgatcctaaacgcagagacatagaattttaggtgggagaacatgttttcttacgaatctcactaatgaagagtgtaaagcgttttggaaagcggggcaagttaagtgctaggtttataggaccattcaagatactcgagaaggtcgggtaggtagcatatcgaatagacttgcctccagtgttatcagttgtgcataatgtatttcatatttcaatattgaggaaacatgtatcagatctgactcatgtcttgagctatgaagccctagatttatagtctgatgtatcatatgaggaacaaccaattcatatccttgataggaaggaaaagattcttcggaataagaccatagcgttggtcaaggtactctggaagaacagtaaggtggaggaaaccacttaggagctagagtctggcatgagggctcaatatccagagttgttcagattagatttcgtgagcaaaatccttttaacaggaggataattgtaatgaccgcatgattaaa

SEQ ID NO: 75092 - DNA, 654 bp, Cannabis sativa
tttctcttgtttttttgtcggtgcaaatctatcctacaaaattaagaatgtgatcgagatttgaatgctttaacacttatagaaagtatctttgaagatatttcaaccgcatttaccctggtcggtgtatgcaatcttattcttttaataagttgtttctgagaaataaccaccctagacgacatgccaaggatagtatcattcgctcaggtcttaaaacgtctcccgtgtcacccaaatgaatatcacgtcacctcatgcataatttgggataatagaagccttaaaaaaggttaatcaagctttaattattattccctcggagaaaaaaattattatggtaaaattattcttgctcatgtgttgagatatcccaataacacatgagttatacaattttatcataattagcccacattaatccttgtgtgtagtgaaagatctgaaagatcacagtgtgagttcgtcatcactattataggatacaaacttacgaaaagattcaatgatgcactgattcgcttcaagaggtaaatatatcctatcatctcttatttcaaatttaatatatgtacatatgtggatcctagagtttggtacaataataatctattaaatgtttttgctacgcacctgatttaataccacaaaacc

SEQ ID NO: 75093 - DNA, 1179 bp, Cannabis sativa
aaaaaaaactaaactttacctaaaactaatatttacgtgcctcagcacgtaactcctacctagtatatatatatatatagataattttacattcatataatcttgaacatatatatactttcatattcacatttatatatttatatatatattatatatacatattcatatatgcatatatatatatattttttttatatatatgtttatatattatactcattcatttattgatttcattccatatattgattataatttattataatttattgtatatatttatgatatttttatatggtttaatatgtgtatacaagtatatatacatgaaagttttatttttaggtcagttgctcgtatttgcatctttacattcataagacaatgtagatagattttgtgcatcaaaacaattttgaacactataaaacttgattttttttttctttctaaaaatacacgtttggactccaatttttttttgtgaatttaaagtttcattttgatgtgttttcgatgcatgcaattcatatgaatgtcttaatttttgtatttaaatttatttagaatttatttgggttgttttggtcatcggaattgaaaattctaatcaggtttcagatcgggtccactgtgaccccctgtagaaaaacgagtcaaagtgacccggttggaggttgaaggtggatccatatgacgtgtcatttttcatgtttataaggcagccatcttcggctaaaatggcgtgtcatttataggtagtgagattttttaaaaaaaaaatagaaaaaaaaatctaaattttttttatgtattaattacaatgataaaattgtttatttcattattttaaaaaaattcatatttaggatgttagattataaaactataatcaaatatacatattaataaatttagatcctggtaaaataagaaaattggattttattttcttttctcatcactttctttatataggcattcacatagggctagatttagataagatgggcttaaaataaagaattggactaaagtctaactctcttagggttgaatacatcatatgggcttagagttagatttttgccactttatttcatctaatgaaactaaagtgtcttttcaaatttgaccacttataaatactaattttattttaattattaataatta

SEQ ID NO: 75094 - DNA, 877 bp, Cannabis sativa
ctctctctcacctgctggcttgcatttcttgcgatcctgcaaaaacaaaaagaaaccatttttaactcagatatatataatccatgaatctatggcaaaatcacagactttttattacaatttcagatatttttaaggagctaaagatcgaaacaaaagcaaattcttttacagttacagtcgttgtgaattgtttacgttggtacattttctcgataaccaaacggaagaatgtgtagaaatgaaaagcaaatgagatcaaaagcgtaagagaaacctacctagctttgttggcgaggtttgcagcgtagcggtacatgttggagaactgtagggagactaagtgagatgaagagaggtgaatagtactgtaaaggagaatgggagaagagaaatgggtttttggtttatattttctagaggaagaagaagactctagaaccagccccttctagggtttagggttttatgaataatctcaaaattaacttatttttctttttttctttctaaaatattagtattgtattttactttatttttgttaaaaagaaaaagtacaattattctatttttttaaataaattaattttattaatagcaatctattaagataccatcaagattaaaattagaaaaataagccgcttaattcttaaatcgtttgacaaaataattaaatataaaattataaaaaatattgtcgtatcgaaccttaaaaacacatatattaagttttatctacttatcagaagacacaataatataaaattgttgttaggggtgtgcagaaagtcatccaatctaattccaaccgaccgatccaatcccaatcgatccaatagaatcggaaatctaatcataattggatcggatc

SEQ ID NO: 75095 - DNA, 801 bp, Cannabis sativa
tcctaagccaatttaccttgcttaccccttctagcataagtaaacttaataggaggcctcacattcgtatcaatatccaaatcaaataccagcaccttttgacttatgtgttacatatgtgaagatatttatcttaagttgtttttatttgtgattgaatttttaaataataaataaaagatcctattttttaaaaaaaaaaataaaagaaagaagagtcaatcttttttccaaatttcttttttggttggacataaagagatcttttttttgcacgtgatatagggtcaactgatgcaaatgactatgatggctacacccaacatcaacaaagagctgcattaccttaacaaggaagatcggttgctgcgctggcttgtggtcaaacaccgagatgcaaaatatgggctggaatttcttagcgaagaggacagcacaagtgaactcagtaagtttcctcgaagcgctttatttgataatgaagatattgacgaggaagatgacaacgatgatgaatatgccgtggaagaagaagaaggcaagcaggcataaggttagtagaatagaattttgcggtggttcttacgtctgttttcatacatttgcattttgctcgaaacccggatgtaattactgtccaaattttggttacaaataaatgtaatccacaattatccccatattatttgccatgctctagaatgtagatcctcataaagtatttcgggtttttgtgttagtaaatgatatttactctcgtattatctcttctatagtaattagaatactaatggcagatga

SEQ ID NO: 75096 - DNA, 795 bp, Cannabis sativa
aaataaggtatcatctgcaaattgaagatggcttatatgaaccttctctttccaacctaaaacccagagaagctgcctaaacttactgccttaaccaccaacctccctagaacgtccgcgactagagtaaacaaaaagggtgatcgtgggtcaccttgtctgagaccccgagagctagagaacttccctctcggtcttccattaatgaaaactgagaatgaggtagaagacaaacacccattgatccattttctccaagtgactccaaaacccttgttgcacaataccaaatccaagaaattccaatccactcgatcataggctttttcaaaatcaatcttcaggaccagcccgcttttgcctctacttctatagtcttctactgtttcattagcaataagaaccgagccaagaatttgtctgccttcaacaaaggcagattgagtttcatgtatggtcttctccaacacccctctaagtctgatggagagcattttaacaattatcttatagacgcttgttatgaggctgattggtctgtaatcttttaccctacaactgtttagtttttttgggataagacatatgaaagtctcgttgatgctaccttggatgattccttctttctcaaatgacttaacaactaacataaggtcttccttaattacctcccagtgagattgaaagacagccaaactaaaaccatctggtcctagggccttacttccttcgccgctaaacactgcctccttcacttcctctatcttaaagggcctctccagatccatggcggag

SEQ ID NO: 75097 - DNA, 571 bp, Cannabis sativa
gagaccttgactaggactgggatccgaacgtggaccgggacctagacctgacctggtcctaaaccttcgacaggacccaaacaaggatctagaccataacagggacccgaactcgaacccagaccaagacaaggaccaagacctagagtcgaacccagatcgggacctagactcaaaccaagactctatacctaaaccgaaacctcggccaagaccaggacctaggaaccagacttagatgggggacctagaccagggacctaggccacggaaccaagaccaagatcaaaattcagtactcaaacccaaaccaagacctgagctggaccaaagaatctgaagtcagacccatacccgaacccaaaacctggcccatacccaaactaggacaggaacctggacacggacatggaccaaacccaaacccagacccgaacccaaaatctgacctgaacctgggacccaaactcaaacccagacctagcatcagacccaaaccttgacctagacccagacccaaactcgaacccagaccgagatcgaaagtaaagacttagacccggaactaaac

SEQ ID NO: 75098 - DNA, 1358 bp, Cannabis sativa
gttttgataaaacttgtcttagtgactgatcaattaagacttttatgggatgcacctggaaataaggtcgtagtttgcgagatgtatgaatcaagcataaggcaagtttttcaagagggggatatcttgactctaccccaagtaaccttttactaacatagtaaacaggttgctagtgctttccctcttctcgcactaaggctgcactaattgcattctccgacacagctaaataaaagtataaagtttctctagttattggtttggccaaaactggaggtgttgataaatgcttctttatgcctttaaaagcttcctcgcattcttctatccattcaaacttcttatttccttgtaaaacattaaagaatggtaaatatttttctgttgactttgaaatgaatctgtttaatgatgccattcttcctgttaaggcctggacttcttccggcatcgttggtgaaggcatctcgattagggccttgattttttttgggttgggttcaattcctctcgcatttactatgaaaccaagaaatttctccgaggagaccccaaaagagcatttcttcgagttaagcttcatattgtattttctaagtatcccaaagcattcttcgaggtccctcatgtgatcttcactttttatcgactttaccgacatattatcgacatagacttccatatttcgtccaatctttttttttttcaaacatcccatttactagtcgttgatacgttgccccaacattttttaaactaaaaggcgtgactttataacaataaagtctcatatttgttacaaaacttgtgtgttcttgattagggacatgcattttgatctggttatatccagaatatgcttccataaatgtcattagctcgtgttctgcagttgcatccgctaactagtcaatccttggtagtgggaaacaatcttttggacatgccttattcaagtccaaaaaatcaatgcaagttctccaggtgtcgtttggtttcgggacgagaacaagatttgaaatccacaagggataaaaagcctcacaaataaagtcatttgtcaataatttgtccacctcttctttaagtgccccttgtctctcggaatctaagggtcaccgcttttgtctttttgctgggtaatagggatcgatattcaaatgatgacaaatcaccttagggtcaatccctatcatatatgaatggctctaggaaaattgatcctgctttgccttcaaaaagttaattagctgcttttttagtttttcatccatatttttcccaataaacacaaatttagtgagattgtgtggatctaaaataacttcttccagctcttcaattggttttagctg

SEQ ID NO: 75099 - DNA, 846 bp, Cannabis sativa
taatctacctaatttaaataatgtcaaactactatacattatttaaataacataacaatcataactaaataatgtgaatcttataaacacactatttatatacatacttaaagaacttgaattttaaaaacatattatttaaatatgtatctttagcaatgtccatgcgctaatactgtaaacatacataaataatacgaatcttataaatatattatttaaatatatattatacagtacattaaataacaaacaataaagagtctgacagaaaaccttagttaacttctcttttactattcccactcttcttatgaatgttattacacacagaaaacttatattttttttacttaatttccttacctcaaatgtggagtcctagctttgattgtagtgagagtgatcattgaaaaataattgtcttacgcaaaaccaaaatttcatacttattaattagaatttatcacaatggtacatatatataaagcctaaccttgaattaatctgcacatctcaaaagtaagataacatgataaccataccttaacttgaaaggaaaactctagtcgagtctatgaacaattattgagcccaaaatttgtagaaattatccaaggttgatcaaagaataacatcgagaaacaacatatcgataataatgataaggcatgtttaagataatggtgatgttgagaggataatgttgatgtaatggagaagagtgaaccttgaatgatagtagtatttgactattagagatgacaaaatatactaaagtttagttttagaatgatgagaggaaaagatatgagaaacgtcaagacttggggatgatactatagt

SEQ ID NO: 75100 - DNA, 1082 bp, Cannabis sativa
tcgatctccacccacccctcctcctgtcggtgaccctctcctctccgtcgcatacatcgaaccaccactacctctcttcagtgtccctctcatctctgtctcatacatcgaaccaccaccacctaccgtccgtctccctctctctccaagctcaatataaatacatttatttatatatatatacttttttatttattatatatatttattttgttattgtataaatctaatgtgttttaaagttagttgttattgtaacaaaattaattagtcattttattttaatttaggtaaaataacaaaactaatgcaggaaaaaaatgggagaaaaatctatattttttcctctttttttttttacattcctgacagtttataattgtctcctattataaggtataggtgacaattttaaatcgtgccctatactataggtgacagtttaaacagtggcctatactatacgcgacttaaaaccatcgtgtataccttgttataggcgatagttttaagccgttgggaagtcgacattagcaacagtttttaatagtcgcctgtttttctcattttgcgacggtcgtgtaggcgacggttatagaaactgacaagaatattactttaaatgacggtttaaaaacgttaggaaacactatttttgtagtagtgaacttagagacacacaaaaaatttaaagtagttcactccccatgtcgtgatggtaatggagctacatctattttgagtttttatttctcatgagaatcacagaaaaaggctaagtgtttgagctctagtttctagagagagatgctctgaccttgtgggtagttttaaaatgtgaaaaatgacctaagcgagctctccgtttatacgtgaaaaaggcccacaaaaataaggaaaaatactaattagacttttttttaccttagatgataatctaacggtaaaaattagcttctagtggtgatggccattttttggagtctgacaggttctggtacaagttacccaaagcttattttcgtaactctcttgggggtgaattttaacgatgataacttcagaattacgtctggggtgtg

SEQ ID NO: 75101 - DNA, 673 bp, Cannabis sativa
atcttgatgactttaataagatcactctagttctatgtaacatcggggttaagcttgaagaagaggatttggaaataatcttgatcagttcattgccaaagacttatgagcattttgtagacccagtgctctatgataaagagactctcaccatgtctgaggtgagagttgcattgagttctaaagaaatgcacaagataacaaatgacaaagaagatgacaatggtgaaggcttgtttaccaaaggaagaccacaaagcagatataacaagactaaaaatcataagaatagtgaaaagctaagataaaattccaactcaagaggaaccatgtaacagtctactagattaggtgtattacagtgctttctaaatactgtgcatgcatttgctaatcaaatggtataacaaaaacgtgaatgattaaaactttattaaatagccttactttaatatttaaacgtaataaattacataattcgggatcccgtttaaaaatttacataaatttataaactaattatatttcaaaaatcatcgtctaatgaccaacaaaagtgagccaacattgttctgaagaccctgaacgctccaagtctaaccgtccttcatccttagctttagactcttcaatggttcgatttctagctcatacatgcacatacacataataa

SEQ ID NO: 75102 - DNA, 828 bp, Cannabis sativa
acctctgggagcaattcaggccatatgtctttcgcttcctcaaggcgcttcttcagggtgcccttgagggttttattgatagcttctagtttcccatttacttgaggatgggccatagttgagaatctcttgatggtgccatgtttgttgcagaaatcagtgaacatgtcactatcaaaatgcttgttgttgtccaacagaatattctggggaaggccgaaccgacatatgatgtttttgacaacaaagtcagggacattcttggaggtgattgtcggtaggagttcaacttctgtccatttggttaagtagtctactacaacaaaatcaaactatgcctctccttttcccctttggagatggccattaggtctatcccccacactgtgatgggcctaggagactagatcatcgtgagctcattgggtggagctcttggtatcttcaaaaatctctagtacttgtgacattttatgacgtagtccattgagtcttcgatcatcgttggcccaaagtacccctatcagagtatcttttttgataggcttttcccctggcatggttttcatagaagccttcatgacttgtaccatcaatcgttcaacttcggccttggtgacacacctcaagagaggcatggagaagctccatctgtatattatcccgtctatgatcaggtacctagcaacttttcttctcagtttgcttgcatcatttttgtcttctagaaaggctccatttggagataagttgcaatatgtgtcatctatcttggagtgtcatccaacatgttgacttcttctgcgacaacaatgttgggttcctctt

SEQ ID NO: 75103 - DNA, 711 bp, Cannabis sativa
tcacaagctcgagaagagaatagaatgctcatattcattgtaatccctaagctttttcagcctatctatctatatatctatataaaagagaaaaataaggggtgacgtgacgtcttctgtgagttctattgtaatatatcttttatcttattttgtttttacattttttattaactttttcaaattttattgatttcactctttagtgagttattttgaaaaaaaaaattcacattatttaaaaataaatgtggtaatgcacttagagcctatttatatagatcactatatttttcacattggtttgtacaaaattaatattacatagtttttgtatgtgtaattaataattcttgcttataattagttataatttcttaaacaaatgcaacaagtattattggattttttaaattttgtcaaaacttcaaatttctttaattatttttaaaaaaatagaaatattttattaaattttggttattttaattttttttattttgttattattattatttaataatctatatctatctatatacctatataaaagagaaaaataaggcgctgacgtgacgtcttttatgagttatattctaatttatcttttatcttattttttaaattttttatttactttttaaaattttattaatttaattattttactgagttatttagatcggaagagcgtcgtgtagggaaagagtg

SEQ ID NO: 75104 - DNA, 1117 bp, Cannabis sativa
  modified_base (129)..(132): a, c, t, g, unknown or other
  modified_base (664)..(673): a, c, t, g, unknown or other
tgttcttcttctttgtacattgaatacagactcaaggcaatactaaatacaaataacatttctaaaaaaaaatacaaataacagagtaagagtcgaacaagctcttctctacaaaacaaagacactctnnnnttaagatatgaatacaattctaagtgtatgaaagagatataaaacctagctactataaggtgtatttataatcaatatacaccttattgacagcttacacatggtttgaacaagaccccagcccactagaaaatttcctaaaataaatcttcaatcagcccaggaatttccatttttgtacctatagaatcgtgggcagtaagtacaactttctttttataggaaaggaaagttcagatccaattttctctttaagaaatctgatctaacaaaatggaaaactcacacaagatcaaaatttatttagatgaataaattgtgcaatcaaacttgctatttttacctcaattttcataaataggaaagctaaacaattttccttccaagtttagatacacaaaatatggacacaaattaagacacaccagctgaaatataaaataaataataaaatatttttgtcaattaaatatcccaaaaataaaattaataatctccccctttggcactttgattgataaaatattttatnnnnnnnnnncctgcatcaagtgttagaaaccaaagcgaatatctttttaaagataaaagagtatagaaaacactcctcctgcatgaaagcactctaacacataaaacaaaataacttttttttatactgaaaagcttatcaaccgaaacaaagcaacttcttaaacagaaatgtgcacaaaccacaaacaagacaactccccctaaaacaagggtccagagttgtaacacacaatccaaaaataaaataaatactgctcaccctttttgtctatcaaggagccatagataataaaagaacatgaacaaagtcataatagttcaatcacacataaattaaaagcaagagatgaaaaatggacctcttattcatcatcattggatcgaaagaattttatgatgttgtccttcctcttgagaagtaaggattgacttgtctccattcttcccaaac

SEQ ID NO: 75105 - DNA, 832 bp, Cannabis sativa
tccaaagctgattctgacagctctaggttgcttgtggcacgtcttatttgtgtgagtacaaattttgagtaggtttccctaagatggggctagaaattaaaacctatggtcaaatgtcaacctagattctaaatgaaatcctaggtgcccgggttggctttcgggatgtaaaattgacatcttttagcttccacacttgtgacttagagtcttcttgacttattagttcaaaacattgaaggatggtgtttaccaggaaactgacccttatgacatggacatcaatatttgacacatggcaagaagaaaaatattcatggagtacttaagtgcctcgagttatagcagtcaactctgggaagggtccctagccatgtgcactagttgactttggaagctccataatgggtgtttagatcccaccaaattgttttcaaatcaccatccttcactattttgaaccaacaagttaagaagactccaagttataagcctgaaaagtgaaagatgtcaatgtaacatctcagaagccaacctaggtgcctagggtttcacccactgccaggttgacacatggactagggtttcagtttttaagtccgtcttaatgcaaattgctcaaacttttaacttacgcatgaataagaactatcacaaacagctaaaggcaaattaatttcattaggcctacaggttaaatctcatctttattattttgaaacctaaacatctcaaattatccttttcaaaatataaattgtgtttggtcaagttaacaactaacgacatggaagcttagttgtactttgtgagtgtaacccattatttcaaa

SEQ ID NO: 75106 - DNA, 1182 bp, Cannabis sativa
  modified_base (716)..(716): a, c, t, g, unknown or other
gtggaaccagtgaccggggattggacggctgaccgttatgagtttgggcggtatgcccaacaggaatttcttatgtgccgcctagcgggatactcaatgttgcatctggttgctgattagcaacttgataggctttccgtatcagtacggtggcctgacttgttcggtcatcgatggttgcctgttgagccttcaatgtttctatctctctatccctccattcaatgaactgacgcctctgctcttcgaacgcaaggttcattgcagcacagagctcttcttaatcatgatgcaaggtattagtgtgaccttgcatgagtccaagagcattgtagaggttctgaatctcagtatcatcttctattgtcgtctgagcattggttgtggatgggattccaatgctgggagtgctctgattggctgccgaactggtgttcccagtctcttgcacaccgggtgtgatcccgaccagaggggatgtcacaccttggcccacaataggtggctgcgtgtttggttattcaagattggttccttgtgggactcttgtattcctaggagtctgcaatgcaggatatgttaacagtggatcactctggtcaaccacgcctctacgagtttgcaccaccattttgtgtgtttgataaaacttaaggcaaagagcaaacttgagttttgctctcaatgaaagaactaaaatgttgacctcgcttttngccaacgacagtgagtcaattaataagcgataggaaatgtaattaagatagagcaaaaaatagtaagcaataaagaacacaagattttaaagaggttcggctcctttagttcggtaatagcctactccccttagattgtattgacttgagaacaaagaatataatgtttcccctctcaaagttctcacaatgaaatctctgagtgttttctcttagatctctctgaagcaattctttcgacctcttttacaatgaggatggatcactatttatagggctaaatgcatgaggaaaggtttcccttttgcttacaatatctataattggtaagaacatacattacatatttagaatacataaaatgagggattcgaacagcttgacatatcaatcttaaagtagttattaagtcttgatgcacggtctagagagatgactttatttgttgttcggatcatctgccttt

SEQ ID NO: 75107 - DNA, 1302 bp, Cannabis sativa
ttgtgtattttgattttgtgtttatatgattgtcagatatatttctttagcaagactttttataatagggatccccggaaaacactttttatgccgttataatgtttgtttttagtattttattttagtcaagttttttatattatcatggttttaataattaattattctattaatattaaactagtttatgaaatcacacacgtggcgtccctattgattagggcgttacagccgacttgaagtcacattagcatctctttgagcctggattttgagtgcgggttctgggctgtacaattggcgcgtcatgttggtcgtccaatgctctcctcctattcaatcatttctaagatcgtgaactgtccccaatctatcaaatatagaaacgcctgcctgtctcaatgactggtttgtttggccaactagctggccgacaccattaacttggttggaattgttaggtatgacttctcctgatgaattgctagacagagtttttccgcctaccgattggcccacaggtggaaactgtgaccggggattggacggttgaccatttataatctgagaggtgttcatggctgggtcttcgtctgtctcgcccagggggatgacggttacaggctgttgtccggtagcctgataggctttttgcattaacacgatggcttgtcgcgttcggtcgtcaatggctgcttgttgggcccttaatgtttccatctccttgtccctcgattcagtgaacatgcgcatttgctcttcgaatgggagatttaatacagctcggagttcctccagatcgtgatgtagggtgttgctatgacctggcatgactccaggagcagcactgaggttctagatttcggtgtcatctcgaatagttgttcgaacattggttacttgcggaacgaaagtgttaggaatgccctggttggctgctgaactggtattcctagtctcttgcacaccaggtgcaatttcactcaggagtcgtcacactgtgacctacagttgatggttgtctgggattcgtggttggtggaacccttgtgttttctgggttctgcagtgcaggatccactatctgtgtatttgctggatcaaccacgcctctacgagtttataacacaattgtatttgcgactagatttgagataaagagcgatccttgatcctgctctcaatgaaagcacgaacatgtttacgtcgcttttggccaacgacagtgagtctaaattgtaagcgacaagtagtataatgtgtatataataaagtaaataaagacatgagaattttata

SEQ ID NO: 75108 - DNA, 1446 bp, Cannabis sativa
tcaagctattgtccttcatggacgcctatgtcggctacaaccagatcaagatgcacattgcggatcaagaatgcactagctttaggaccgataaggggtatacaactacctggtcatgcctttcggactaaaaaatgctggtgcaacatataaacgaatggttaaccggatgtttaaaggccttttgggacaaaacatggaggtgtacgtggacgacatgtttgtcaaatcaaaggcatgtgcaagccatgcagatcacctcgaggaatgctttgaagtggttcagagatatggaatgaaacttaacccgaagaagtgcactttcggggttaagtcaggaaagtttttgggatttatagttagccagcgagggatagaggcaaacccggaaaaaattcaagccctcctgaacatgccttctcccaagaagcacaaagacgtacaaagcttaaccagaaaggttgccgccctgagccagtttatttcttgggccacagacaaatgcattcccttcttcaacatcctaaagaaatgccaaaaattcgaatggaccgaaaaatgcgaggaggcattcaaaaaattaaaagagcacatggctaaacctccaatcctgtcaaaacccgttctcggagaagacttgttactatacttagtcgtcttcgagaatgcggttagtgcagccctagtccgggaagaggaaaaaactcagcactccatgtactattatgttagcaaacacatgatagaggcagaaacacggtatccagtgatcgaaaaactagttttttgcctcctgatagccttaagaaagttaagaccctactttcaggctcacccgatcatggtgttgactaacaatccactgcggcaagtcctacagaaaccgaaggcatccgggagactcctcaaatgagaaatggaattaagccagtttgatctacactatataccgcgcacttccataaaaggacaagcactagcggacttcataacagagtgcaatgaagcagaggctagtgcaaatgttccaacaccacaaaccccagcatggaaagttttcgtggacggtgcctccaatgaaaatggatctggagctggggtagcaatgatatctccgaacggacttcgactccaggcggccctacattttgaattcacagcttccgacaccgaggctgaatatgaagctctgattgcagggctgaggttagcaaaagccgtaggtgccacaagagtagaagtcttcaatgattcacagttggtggtaaactaagtgtcgagagaatatcaaacgcgtggagaaaaaatggctgcatatgtagcgattgtccaggaactgctccacgagttcacggactacaaagtggaaagaatgccaacacagactggttggctaagttagcatcagatagcgaaattaataaactaggggtggtacccgttgaa

SEQ ID NO: 75109 - DNA, 851 bp, Cannabis sativa
  modified_base (38)..(42): a, c, t, g, unknown or other
gatttctgatcttacattaattagtaaatctgattatnnnnnaatgaattttatttagggcacaacacccgacaataacaccatacctagcttataaacatcctcctttttagtgcaactctcaaagacgctgcacagtcaactaatgttgatggatggatccccactaaagtattctactatcaatgggtccgacgttgccttctcttcaatctcgaactcagtaggtccacataacatgttaagcctagtcaccagagcaaacccagctcgacctaatcgtcatctcatccttgtaatgtaaaggtgcacttcgtcatccttatctgatttgatgttatgaatgaacaactgatagataagtgcacccgaaaaagctaaggactctccctcaaaaaattacttgaaagaggattcgtccttcacccttttcaacaactgcattttcataaattttacttttactttcggtaataccaactactgtcccaccaagtgaactagtgtaatggtctgacatggaagtaaaaggcgtggaactttgtaagattgcaaaaaaacacaaaaaatggtagtgggaaattttgtacataagcatcaaaccactattggtccaaatatcgggcctatcgagccctaacaaaaaatagatttcagcaaggcaatcgggccctatattgtgcccatattgggccataacaaaaaaaataaaatttaacattactatcaggccctacgtcgggcctatttattgtgaattattttaccaggatctagatttactactatgtatgttgtttaacatcccaaatatgaatttttaaaataataaaatttaaacacatataaag

SEQ ID NO: 75110 - DNA, 988 bp, Cannabis sativa
gtcacctaaaaggatccaaggcttaaccaggaatctcagagtggctaggcccttccataacaactcccgctcctctaaaccattcatcccatacacaaacgtagcacaaaaagcctccgtgtgacttgccaacttcacatagcaatggacatattggctagtttcttcaataactatcactctagcaaaagtcttcttccaaattaataacagtctaccctctattgttgggctagtatagctctcccaaccacaaaacgtttttcacatcatttcttgaaccttctcacttttcagcttagtttcaaccaaagctccaaccccaatttccttttttttacaaactttaaccactgcctcttgtttcttctctttattgaggcctctaacattccaacacattacattgcaacaattcataaaaaatgaaccatagacccatctccctgtgtcccactctccctattttgcaacatttcgaaagtattcttaggtttgtgatgctccccatgctccctaaccacttgcttagccttgagaagatgtgctctttttggtgtttcccaactttcctcagtctctcccactctttcaactccagacttcatagccccaagacttgaatctctttctacctctcggcctcttacttcccctgccttctgttggggaatagctccatccttccccccttctttacccaatcttacctctacattattcttgccatcatctcccattactataaccttcttagcattagtttgagcatcattttcacctttcttctcctcaccagcccctcctcctttcacatcctttttaacccattgcttagcctcacctttcctacactcggccatgatatgcccaaaacccccacaacttttgcacttaactggaaaccattcatagtccacccctgctcaaccaatctccctttctcattaagatagtgaataactttcagaggattttcagttatatc

SEQ ID NO: 75111 - DNA, 656 bp, Cannabis sativa
ctataataccagaggttacctagaggctctttctactggaaaatgtggaaaaggactccgggattcccattaataaaactgctatcaacagggattagaagtcacaagtgctccaagatggtagcgagttaacctggtttgggaaagctttagctagacgttcctagaactcacttggatatgcccttttcggagccaaacccgacggttgcataccttttaacaccaaatcagactttgtcctctgcctcagacttcgcaaggtgaaactttgggcgacacatgtccttagtcccacgagttgggttgcagcagccgtgcaccacacgatgaggaggctccctacctaccaacaatcagatcgccatgttgtaaacaccagctattaaaatgtgctaagtaagaaaccctaggtggtgaagggtatgcccttacccaaatatgtgcatataaatactcctatttttcatgtgcaaagggtgaacaattttatttacagaaccttcgccaaaatttgtaaaagctttcttcttctccaagggaaacaaaataaatacatagttaatattcatactgtaaacacttgtaatacttaaacactcactggcaaggctaatacaacagactcgtaagttagggattattaacgcccaaac

SEQ ID NO: 75112 - DNA, 854 bp, Cannabis sativa
  modified_base (546)..(554): a, c, t, g, unknown or other
gatgaaaatatcaatttaggagaagtaatcacagcttcaactaagctcatgaaacgaacccgtgtcgatgactgacgagagcgtatacggtccaaatccggtaaattagctcctaatccctaaggatctagtattaattccctccacattatttgttatgatctttaactgataattattcttaatttgttgtcattattataattgatatgaaaaacttataaatataggtccatcacacaaagtgaggatacaaaaaaaatcacatagcactagcaccactaaaatctctatacaatttttcttacaccaggagtgaccataagtaactatagaccttaggaataaaaaaaatcattgggccctcatagaagaaatatataatattttcaaaaattagtaaaaaaaaaaatatgcatattttaaaaagatttttttttgggccctaggcaaagtgggttctaggcagtggcggacccaggatttaagttgaggggggcgacactttttttttttttataagtgagggggtgcgtcttttttttnnnnnnnnngcataacatgttaaaaattaatgtaaatttatgttttagtattaaatatagtataaagtaaaaaaaaaagtaacaataaaatatatttggttcaataatggtagaggttcaaaaagtaaaataaaaatactaaaataaacatgcttttattaagattagaactcatgacctcattgagatgtatgaaatatctttaccattataccaaagcttattttatgtgtataaatatcacttttatttataaatatatgttgtaactaactaaaatgcatgtatatttttttcctgatttttttt

SEQ ID NO: 75113 - DNA, 816 bp, Cannabis sativa
atatatatatatacatttattgtgtatagactaagcaatatgtcagtgcagtttccaagttaaaaaaaaatactcacctcgtcaagattgccattcttatgaatgttttgatacttcagcagacaccagtttaagttaattaggattttaaatttggtgtactgactactgaggtataagttactcaaaaataggttggtcacagtcaaaaaagtgatctaactttatctccactaatagcaaaaataaaagaaagctataaactataatcactactccatgtcatacttcactttatgcgcacagatcaattttgcttcaaattaaaccatagcagtgtttgtttttgggcagagaattcatgagatttctacaataatatttaatttgagaaaattttacaaaaacaaaacatactattaaaatttaatattaatgtccatgtcggttcaaatagtttcactcgagccacgagttatgtataagtctggaaagagtttgtttgttttgttttgtgttgtttttttttttttaattaatgttaattttaaatttttaaattattttttttcaaaacaaaagaacatcctagttttgacattactcagaaagaaaatttggaagttagataaatgttgctgggaaggactgaaagtataaatataaagaatgagaatgaaaataagaatttgttaaataccattctaaattttacattggaagaatatgcaacaattttttttttttgatactagtgttttatttattccattatagtattagtataatgttttttaagaaagtgtttaaagtgga

SEQ ID NO: 75114 - DNA, 1020 bp, Cannabis sativa
tcaaaacttgttgactatatagtcaaaagcgagacaaggataataactattgagctgagattaacgagatatatgcatgcctcggaatatacagacaagaagggagatattcatccacttgagtagaatgaatgtaacaacataactgccccacattacacatagcgagaagatcacctcgcattattaaatgccaataaaagaatatgacgagacaaactactccccaacacttagtattttttcttattaagacggacaaggaggataactcaaatcaagcgagatacaaccttccaatccagcaataactgtctaaagtataagagtaaaaagttgttaagtagttataagatattaatccacatgtgattaaatgaaacgtggggattatccacgtttcatgaaccgttaaattttgaatcaaacccaaaaagagtaactgccaacctatattcctataaataggggcagattctataggaaaagggacggtaaattggagagaaaggaatatcattcaaattctgatattgtattctgtactcaataaatatccctaataataaggactcgtggagtatgtagattttaactacaaaacaacgtaaaaagtatctggtgttatctgatcatttattacttatatatatatttttgtagagaatttattacataaaggctattatattttggttaacaggaatctacattaatagtttagtgctttcattgagagccttagtgataaaactcagaaaaatatctccttataaacttgatctaatcacatttaatagctaatgacaatcaaaacgatgaaaattgccgtaaagaaacaactcgtcgccctagaaaagaacccatgggatctttaagaccctataccactggaacatcatgttcaagaaggaaggatggtggtggcgatcaaattcttgaaagaaggaatgaagatgctaataattctactagatacgtgttacaccctaactaataaaggcgtattacgtgattttt

SEQ ID NO: 75115 - DNA, 611 bp, Cannabis sativa
  modified_base (36)..(38): a, c, t, g, unknown or other
atttggaacatctttcaagaaatgggttggtttggnnnatatagagttaaaatgtgtccaacccataaccaacccataattataaggcctatcatttttcaacccaatgagccatggcctactcttagcataaccctttactacaagaaatgggttgggttggccgagttgaatggtccgacatatattttgtgcactcctagcctatagtgtaggccacagtttttaaccgtcggcaattcccctttaaaaaaattataatttataaggcacgcttaaaaatcgtcgggaatacatcatgagtatttaaaaccgtcaagaatacccaatttttccagacaattttaaacactcacttaagtttttttgcagtggtccccaaaaaaatatttttagggtcgtcgggaatagtggcttatgtagtagtgtaaatactttaaagatattaatatttaaaaaaaaaaaaagataaggaatttttacgtagttttatagttaaaatctacatactccacgagttattcttatttcaggatttattatttacaaaatataatttgacagaatttgtctaagtcaaaaaattggttgtgccttctacaatatgaggg

SEQ ID NO: 75116 - DNA, 1843 bp, Cannabis sativa
  modified_base (300)..(307): a, c, t, g, unknown or other
  modified_base (855)..(858): a, c, t, g, unknown or other
  modified_base (1506)..(1510): a, c, t, g, unknown or other
ggtatggtttaattacgttttaagttaaaaatgattagttttatataagggtttcatgaattagaatagttatagagattccgactttgtagaattatttttcggtacctatgggactagtatcgatgtttatttgttgaatttgaggtgattttgagttagaaattgagttttgaactttttaaagcttagtttgaacattaatgatatttttcatttaagggctcgattttaatttctattacacaaggatggtaatatttatggtatatattcgccatgtgaagtttggagtgattnnnnnnnnttttggtagtgtttcggtgagtgcgaaaattagaattttcgagtttcatagtttttagaaattcctagaagatcagaaatcgtatttttgtcataacttttgactcgggtgtccgttttagatgtttaatataccattttgaagcttgcaatgagctctacaatatggtatatgttttttttttaaaaaaaaatataagttttattttaatgtatatatacaacgggatttggtagaaaactttagattgtcttatgagaatattaagtagtgttttgggataaacacttattggtttaccgttgttgtgacatagggccgagattatcggggataattctccacttgggttggctgacatgtatgaaccaagattaaaggttaaaaagtatatagtacaatatagtatgttgtatgtaatacatttagtattgttctgaattgattaatattgagatatagttaatattcttatataatgaatagactgattgattgagtattgataatatactaataatattatgcatgtgatatatgggctcacnnnnttaggtgatgcgattttcctagcggtgtactaggcgtaagtacgagcgtcagtgatatatgatgagtattgagcgtaggtacgggcttgcttgattaggtgatgcgattttcttggcgatgtactgggcattagtatgggcgtcagtgacatatgataagtaccgggcataggtataggctcgtctgattagacgatgcaatatattggtcctagattatggtacggggtcacctaatttggtgatgcagttatatgatatatgggcataggtttttggcacaggctcacctaattagatgatgaagttatgcgatatatgggttccaggctatggcacgggcttgcctgcttagacaatgcaatacaggattatcaaattaaagcagggacttgcctaattaggcaacatgatgttatgaagataattactttatgaggtaacatatatatattatttatataattaaatgaatatgaattctattattggtataatagttttgtatgaccagatatatgtgtactactgcttattcatggcatatactagtagtgatttgaatttcatcttatgaacaatgcgtagtgatttgataatggttatgtataaatgataacatttgaataataaactatatgattattnnnnntacttttcttgctgagtccttgtgacttacgggtgttatgtagtgcgggtaaatgcaaggaaaaactaggtcaaccatgaggtgacagtcttctccagcaatgtacatattgatctcgccggccagcgtgtcaggttaccaagagttgttttaggctgtatctattgtatattttggttttatatttttgaggcatcattacatatagtttttttttgtaaacctctttataacagggatacccaaaacacgttttttatgccgttataatgtccgtttttagtattttattttagtcaagttattattatcacagtttttaataattaatta

SEQ ID NO: 75117 - DNA, 665 bp, Cannabis sativa
tattttaatgattaaaaatatatccaataatttttttcttctatggtattttcttctttatatctttttttataattttattattatttgtaattaaaaaattaaaaataatttttatcatttgttaggctttgtgtggttcttgattttactaattaattaattaaggaaattttattttatgagaaaaatagtatgaaaatattaaaaaaaataatttttttataaatttggtatgagacttttttttaatgttttcttttttgaatatatttatatttattaaatttcataaaattataaatactatgtttagtgtgttctataaaaaaaactcaaattatttttttagggaattatatcaatttacatatattaaatcgaaatacgaaagttttatttttctctctctgttttaaattatttagaatctaaacaaaacctaataatcaatttatagcattcctcatcacatttctttgttatgtaatacattttttttttgacgtggtgaacatagtcacacaagattaacaatgcagcaaactacagtcagcggtggaacctcctcgaaccagaatagctcattgtctaaccgaaagacatgttttgtcagaccatgagctgcagaaatctaaacacaagccacatgggacaaaactacc

SEQ ID NO: 75118 - DNA, 915 bp, Cannabis sativa
agcaatagtctctactcactaacaacacaaataaatgagataattatcctcgcaccattaatattccaaaaaaaattaattactattttaatcttgatattacagactctaaattgaaacgataatcaaagataaaatatagagattcttacaaagttacgagtcaccatatttactgatcgtttaacaaaataaatagaaatattttctaaaatattaagtaaagttttacaatcattaattacttgaccaaacatgaaaatcacaacaatagagctacgcaaagcttgtaccacggaaagacaatccgttttaaaaactacttgtggccgatgttgctcttttatccatcttaaagcttctcgaattgccatagcttcagcaacttctagggaaattgagccctgaaagcatttggtgcaacctttacttagtaagtcgcttgcatcatgggtcacaaaaccaacaccatactgttgagcctcattaaacaaatattaggggaacctttggagataaaaattattctcgttcctgtcccattctccattcaggcaagtaatccctatcttattaagggtgaaacccatttattattagaaacaaaagaaattataaataaaaaagatgattgtatcaaaattaaaatattaataattaatatatataatattatttaaactaaaatgaaaatatttatttttttaataaactacaaaaacacataaaaatatatgtgtaataattagaaataatattataaaataaataaaaaaactaaatgggttcccgaggcgggggacgctaaccccatccctgcctcgtttaacattcagagataaaaattgtccccgtccctgctctattcctcattcaagaaaataatccacatcttattaggagcgggtacccaga

SEQ ID NO: 75119 - DNA, 606 bp, Cannabis sativa
tcatttctaaaaacaattttttttaaaacaaaaaacagaaaataataccaaacatgctcttatattttctgattttctacttaaactgtttttaaaatttatttgcgcttttaaaaaagtgtacaacaaatgtttgaaagattgactcttgttaaatattcaactttaggaagctcatgttattgtataagtgaggatgtaatggtttgtgtcttgatgattattatatcgaaaaaagatcaaaaaaaaaaaaaaaaataccaccatatttgtttgttaatgtatatattatataaaataatatttatgtagaatatacatctgcatataacatagtatcacttttgaagtctaataaaatatagtatttggacaatttttttttttttttttgtacaagttgaaatgtgaatctaccataaccctatgagtgtattaattgtggacagcttgtatggttccctgttttgtttctgcattgataaatatgtatatttttggttttggagtgaaaagaattacagatccaaactagcctagcctatttagagttaatataccaaattgaaatatcggttaagcatcttcttcttgaagcttcctaca

SEQ ID NO: 75120 - DNA, 907 bp, Cannabis sativa
aagaatcttcatagtattatttgactaactaaattttgtgactaaaattattgtcagcgaaactatatattatttgattatttatttgtttggtcggtttatttgtatgttaagtttaattagtattttgttaagggactagcaaaatctaagtgtgggggaatttgataagagcattttaggttctaaaattgttaaattttccatatttaaagggtgttgtttcttgacattttaaatatttttcatattgttttataaattttttggggtttgaaggtaaattgaattttatgagtaaaagttagtggatttgttggttttatgactaggtgatgttggaggatgacaagactcaccaaataatattttcctagtgctcgttttgtacgcaggattagactggattagacatgctaatttgtctagtctagtgtttggacatgttggaagtctggataactaatccaactaatctcatttgtttgggattatttatcccatctaacaggtgggataaataatcccataaaagtgagattttttttattgttttttttttattattttagttttgttaatatattttaaatttaataagaactctaacgaaagaattattacaaatttatttatagattttttatcaaaaacttatttatgaaaattagtgaaaatgtataattttgaattatcatacataagctttcaaaatttaaaataaaattaattaaacaattgctacttaaattaattatagaagaataatatgataataaaattatatattctttttaaattactaaaaaatttatattatcaatttagaaaactaatatttgtattaaattagttaaattattatttagcataaataaatatatattattgtaattatttattaaat

SEQ ID NO: 75121 - DNA, 850 bp, Cannabis sativa
aacgtgattttaattttagtcacacattttttttgcaaccaaaaactactaaacaaaataaacaaacaacatactaacaatctcaatacaaaataataactatgaatcaccactacatgattaactttcaaaaaaatcttctttcttaaatttgtttgattgatatttttagcaaataaaatcacattataaagaagaaaaaaaaaggttacccaccattaaaaattaaggatgacagaagcctcatcttttacaggcaattgaaaaaaaaaaaaaaaagatgtgcagagcctaacaagacgaattgctgcacttagcatattcgtctttaaggaaaccgacaagtgtattcccttctttaatttacttaaaggaagcaacaaggggtttgaatggactaatgaatgcgagcaagccttctaagctctcaaacatcatctagccaagcctcccatcttatccaagccaatagatggtgaagaactatacatctatttgacaatcaccgagcatgcaactagtgctactctggtatgtgaggaagaagtgctacaacatcctgtctactacatcagcaagtgtctcattggggccaagacaaggtatcctcccattgagaagctagcctagtgcttggtcttggcctcgagaaagctaaggccatacttccaagctcacacagtcaaggtgttaacagaccaaccacttagacaagttctaatgaaccagaagtatcagggcacctaatcaagtgggcagttaaactaggtcagtttaagatcacctaacaacctcgaacagtaatcaagggacagatattagcagatttcattgctgaatgtactggcct

SEQ ID NO: 75122 - DNA, 954 bp, Cannabis sativa
aaatggttaaataattatcatcatcgcattctacattcaaaattgagtccaccgacatataatatgactatatttaaaatttggggttccaaaacctcacctatgcagtacacattaaaaatcggtggcggtaaaaatcggtgtaccggaaacatcgccgaaaatagatgtagtgtatatcaaaatgaccacctcgatgagtagatcacacccatgccaactatttgttaaaacggtacacgatattgctggaaaggggcggagctaatgtcactgggaaaagtagcgaactgggaaaatggtttagtgtaggttgttttcccgacgagctgagtttagtggtgaagacgtctcatcaaacggacaccgctggtgaccagaaaattcgttcaaagtttgaacccccaaactttgacttgggatcccgagctaatggtagcgaaagaagtggcaccgcttgggggtgaggtcgccggcaccaagtggttcattttgtccggcgcgtggggctagtcagtggctagaggtgggtcgccagagagtggtggtcatggtggtttgtgggtttctcttttgtgtttgaagagagagaaagagagagggagagtgaggaagaggacgaaatgggggggttaatatgattcatttttttgaatgtacttttttgaatgtacatatatatattatttatttatttattattattgtatatatacttttttttctttgactcggtcaaccgagttcttacattctcccctccttaaagaaatttcatcccgaaatttcaaagtacaacctcaagttgaaaattaaacaagtgaggatacttcatatacatcttggactctaactcccaatttagcctcgtcttctctgtggttcttccataagaccttgactactggaatctctctgttccttaacacttttagctctctcgccaagattttg

SEQ ID NO: 75123 - DNA, 1196 bp, Cannabis sativa
ctttgaaatggttccagtccctcaatgtttcctctgtcagcctttcaacgatggtccctctctatcataaatggtaaagtcagtacaaaatttacacatagaaagttaaacagcacatgacaaaatgatattcacctccggatcatcgagaagtctaagaggagtgttatctgcacttagtaggtctctcacagattcattgtagatctccatggccgaaagcttcataacataatctctttcattgtgctacattcataaaatattgttttgtgtaagaaaacaaaagtccaaatccaggaaaaggcaaagaccatttatattgtataaaaacttaccttctctacgtgatcatatatatctgctactgtatactcagtgataccactcatggtgtatgtctttccactacttgtttgtccatatgcaaaaatgctcgctgcagagcgagtttcataaaataagattatctattttcaataattatgttcaagaaaagttcatgacacaatagcaatgggaaaaaatcaaaaggaacaaggtgttatgcgcttgtcctgtactcaccatttataccaccgacaactgaaagagcaacatccttggctccttcttgatacacctgccttgtggaagaatcaaagctaaatactctgtctagtaccagaaagaagaaaagtcagatcagaaattcccattgttgaaaaattgtcaaacaaaaaacatcctataattgagtttatatccaatctaaccagcaatgtggagtactttcaactgaccaattgagaaaaagagagagaaagagagatttgattgacaaaaaagaacttatttcacagaaagtaatgccgtaatgaaagcacccttaccaaatgtataagcagttgggtacatggaacgctcagaaactgaaagattattcctgtaaatgatggttgtatcattgatacactcccaatctgacacatcatttcttgcagcctccttctgattcaaaggtcgaagccgaattgaaacaaagattttctcatcacattctccctgtccttgcaattgctcccctccaccaaaagaccccatgtctacaccttaatttatcttcaacaaaaaacccacctccaaatctccaagtaagatttctacgagacaataagtcaagaaaccgtatgttctaatggataccattaatcatt

SEQ ID NO: 75124 - DNA, 930 bp, Cannabis sativa
  modified_base (888)..(889): a, c, t, g, unknown or other
tcatcatcctttgaaacaacttcgacaacaacaacacccttatcattacgatcatctccaataggagcctcatcctgcccaacaccaactccagctccatctagatcatcatcttcatcatccgtaccatcctcatgatcttcatctcctttgtcatcctcaattttagcatcgtcgtcttcctctgaaatagaatcttcatcatcatcatttttcagaaaagcgaagagcatcttcagaatgagatccagtgtgagtatgaccagcatgggaggactgaaaatataccagcataaaaaattcataaaatgtagaaaaaaaatatgaaaacactagtaaaaaaatgacaaaaaatcagttaaggacaataaaaaacaacacctcaataagaatgtccaacttcttgttcatttcagcaacagatttcataagaatcccttgctggctgacaacaacagagatactttttttttaattcctcaaactcaagtcaggagacattcttatgagccaatgatgaagaaacacccacaaagtcaggttcaccaacagacttggatacacctttaactttgaatttaacaacgtcctgagtagtgtcaccgaagaagaagtcatcaagcctcaaactcactctcaactgaagttcgagagatgtttcgtaattttaactgcaacaacaacaaccaaaaaaattatgcacataaatctgacaacttaaaataacaaaaaaaaaatgaaacatgaattataacaaaggtgtacaaaaataacataaaaactgttgggttttgtgccctaaacaaaacccatttcaatataatcagatttactaattagtaaagatcagaattcatttcatgttgcatggttcatatgatttatttnntgattataaattctattaagtcctaaacatatgtatttgtt

SEQ ID NO: 75125 - DNA, 918 bp, Cannabis sativa
acgtgtctttttaataggagtccgatctcgagtttctaggtgagaaaaatctcactataacacttagttttgcataaatattagttttagcatttctagattcattttagttaatttttgtaatattttatcaattttatttagttttccatattaaaaatattattatcaaaattgtttatttttgtaggaacttaaatgtacattttgggctagttatcaaaattgagagaacgtatatgaaagatgtttcatcaaagtcattggactcattaaagccaaatacttcgtgcagaataattacgaatttataaaagcccaaaactattatttctattggagaaatgcatcatcaattaaaagttaaaaaggacaaaataaaatgggcagcccacgaagggttttgtagggtattgtgagatgttgctcatattatatacatatatataatggtgctcatattatatacatatatataatggtgaatgggagtagaaggggtggcgtgaaaagaaggaaagaggtggttgctacacctacagcaagaaatgaagaaaaagaagaaaaaaaagaaagagagttttatttgagtgttagtttttagtatttatttttgagattggcaaatatcaagaggaagaagaagagaaatttggagaagaagcttaaagtcttgtgacaactctaaaatgggtttttatttctatcttttttttcatttaaattttgtaatttttttcacaatctattataaattaatttttattttgctaaaattattttattgattttaattgtgatttgatattttgtttctatgtttagtgaattgattttgttcattcaagagtattttatgtaattgcttacttttgcttgatcactattagtaagtgctagctaatcttgattttggaa

SEQ ID NO: 75126 - DNA, 1009 bp, Cannabis sativa
tttaagcataaaatgtcaaatttccctaaataaaatgacaaacaaccctcaactattataatcaataattattatcaagtactattttatatatataaagaaaaatgtgtcaaccatcgcatctttttgcaaattgcaatgagaaaaatcgatacatttcaaaagaaaaaaaaaacattagaaaagtttatcagaagaattgtaaaagggagataaagtttggaaagaaaagtaagatatatggaagaggaaactttatttatttggttgaaaagaaaagatgaaattaatactcgcaagattcggctcacttaagcctgtactctaaaaaaaatgattaacaaattaaaaaaaaatcgaacaaaaaaatgttcaatcatatacaaatatacaggtagcgatatgtaaattgctatgatacatgcaacagttaaattaaaatgaaaactacaggtatatagattgaatatacatagaggattaaaccttcagttaagggtgttaattagatcacatttaatagatttggacttaactgatccaatccaattatttattggatattgaattttgtcatccgatcgaatccaattgaattgagtcatccgatccgatctaatattggatctgttccaaccattgaatgcattaattggtttttcattggattgaattaaaggacttttataagttttaatcaaaacaaaaaaaaaaaaaaataatagtattacaaaaatatttttcagctgaccaaataaataaatatacagcccaaataaaaaaatttatacaaagaccacttacacacaccttcaaccgaggatccatgcttcctgggtaactattgcgcaaccatcgcgcaactacgcagcaacctaacactaccaaaacgaaaattcaaccagaaagagaatcaatgaaaacaaaggttgtttcgaattcataaaaaagtgtggaaaaactattatgaaactaaaattcaactggaaatccaatttaatttacataa

SEQ ID NO: 75127 - DNA, 867 bp, Cannabis sativa
tgacttgccagggttgtgagtctcacttccgttagttggatgaaactataggaagtttcctcgtagcgagatggtcgtctcacattcttgtattttgagctagtttgacttttatacttattttgcttattgcaatctgaggtatgtgttactcttctctggtgtctcactattatcccttagcgacatattgtttctcattaatagtctaagtaccagttcgtacattgattcctcgccatggcaccgattcacattccctttaacttgacacgtgtcctccagcggaattttgggtataacaataacacagttacgaactttcttcagttgaacaactttttagtgcttttcaaaagtaattaagttgtgtagtttcactgattgagcttaaattactatagatgggttttacatccttctagaataatttatccacccctagagtaaccaccatctcaaatatgttatgaattggtgtagatataaggattctaacactacaagaaaaggtacttttgtcgtcgcttaaactcgccaacaaaagtaagagtaactcaccggcgaagctttaccggtgacatttctcgccgacaaaagttaccggcaatggcttgtcggcgtatgaccttttgccagcgacatgacgaattgcatcggcaaaagtacttatgccggtgcatttgtttgctggtataagggcttcgccggcaatagctccgtcggctgatgtgtccctgacgacgttttgctggcgagttaagtcgctggcaaaacttttggcggggattaggcgccaaattggcatttggctcctaatttttgttagcgagtttagtcgccggcaaaactaaattaagaaaataa

SEQ ID NO: 75128 - DNA, 879 bp, Cannabis sativa
tttttttaaaaaaaaacatataattattcatatttccaaataaataaacaataaagttacaactttaatttatattattttttcttatttgctaattatatataatagtataagcacaggggtagtcgcatcttttgatacgtttttgctgtctctctggtttttgagagtttgttttgagtgctttgtgtttgtttggtctgtttgtttgtttgttttcttctggtgatttagtccaatgatggcatcaagtagcagtgaggggagagtcttagaggcagagaaagaagccatccctttggatgaggaagagacggcagtgttacgactcccaggcagcagtactgaagaagtggcgattgacaccagatggtgtctggtgggaaagcttttaacaggcagagtttctgatttcaacgtgttccaaaacatgatggctttcctttggcagccggggatgggaatgtatgttaaggaactcaacccgaacttgtttctttttcaattccaccatgagattgatattcaaagggtaatcgatgggagcccgtggacttacgatcgaaagccttttatctttacgaggttgaaggaaggtgataacccaaggcttgttgaaattaacaatcttgatatgtgggttcaaatacacaatttacaaacgggtaatatgacacttagtgttgtgatggctcttggaaattacattggtactttcatcgaatcggatcctaataattttgtgggagtgtggcgggattaccttcgtgtgagagtccgaataaatgttgacaagcctattaaacggagaatgaagataagcattgataatcgttcttggtactgggctaatttcaagtatgaaaaaatcccaacctt

SEQ ID NO: 75129 - DNA, 592 bp, Cannabis sativa
tatttaataaataatataagaaacaactaaccacttaccacgcgtcacaatcagtatgcttaataacattcaatagttttgttcaaaaagtctacttggtcacaaaggttataatagaagtaggttttcttatgtttatatagattcttaagatgattttgtgaacggttttatcctaataaaatgtattagagccttgatctagccgaaagtatgatcgacgaggacgtcggaccccaaagggaattgcgacaatcagaatcccgtgatccgtaaggggaaagattgggtgcaatcccacacgcctgggaaggtcaagtgataattcttaaattgtgtaggtatgagactacatagttgaagagggcttaaatagattgattggtactaccaatattaacaagatacatcttcttttcggtattctatcatgaaagaactctaaaattaagtgtgcttgacctgtgataatttcaagatggttgacttcctaagaataagttttcccaagaagcgggcgagtgaggacaaagcacgctggaaagactcgtgttagtttgcagggtcagtcgtcattctatgaagcaactaa

SEQ ID NO: 75130 - DNA, 636 bp, Cannabis sativa
gtttaagctgaaggaattggttcgacggatagatggtatccccttttctctgctccaacatctttttgtttttttatatgtgttttcttcttaaagtaatttacatgtgcatatggttaggcttgacacaagaattgaacaaatttatactatcttcctcttcctcaatgctttgacattatagtttttaactattatgtttattgattctgctgtttggacaaggacttatgttttcctgttaactgcactagaacctgtttctaaacatgtggaggaacaagggctggaatttctacaatttgccttccgctggttcaactgtcttttaatacgcgaggttagctgttacagacacttgtattgaacattatactgcattagctaaagctttcttaattatcagtctaattttaaattatttttcacatttgattagtgaaaaacttctcaattcttttcatatgttgctaaggaaattcgggccttttgttctgttttgaaaaaattaactagtaaacaagtacaaagtgatagaacctataatcctaagatgtcttaggaatgaccttatgagttcattaattcactaaagctcattagtttggtttcttacagatcccattccatcttgtt

SEQ ID NO: 75131 - DNA, 643 bp, Cannabis sativa
gttccacgtcagtgaaataccgtatcgaaaaaacttttgcttattctattagtgcaactgcaatgagagttgctatacttgtgactctcagaaagtgtgggtccattagcccaaaattgctaactttttaaatgattaatataagcatattgctcctgcctagcaccgatgttcatatttttttaatttttaatttttttttttttggttggttagtgtaaaagcttaataattataaaactaaaaatgggccctagcaacgttgctaggtgcccttagagactattatcacttagtagttagtagttaaaagtcaaactttagaaaaacatgtgcagtccttacacgttctctcttttttttttttttctttttaacaaaattagatgtcttcaaaataataatttctctcttaataggtgttttaaaaaagaattttaatgataccgctaattattttggcaaaaaaaaaaaaagtattatcataatttattctttaagatgataattttgatatagaagaaatgttaaaattactttacaatattgagcattatgaaaacataaatacataaatgatttaaatattagcaattacaatgttcaacaattaactcaaaattaaatcattatatttagagta

SEQ ID NO: 75132 - DNA, 672 bp, Cannabis sativa
gatactgacacatagaagggtgctagacaccactaatagcccttagcatttctcataaataaattacaactaattaattaacatttcagatcaagagctatacgattactataatcacacatttccctattataagtagataataattaattaagtatgaaaagtaggtaccatgttcgttctaaataagttgagaaattattaattaataagtcaataaattaataatatcacaaataaagtatattataattaacctaaaagtaatttgtatatattaattaatattatttgaaatgaagcaaaatagtacgtaccaattaataaataataattcttagataggaagcaaaaaggagtgatgtgaatatatatgaatacaaactaagcattataaaaaaatttatttttgtgagttaaactaaataaaattataattaattataaattattattcttttattgtgattaattagaatatttgtagtagttaaaaatattagttataaaaattataatttattatgattaaatatatttttagttgtaatatttattgtaattaaaactaatcagtaacataattaaatatgtattatattttaattacaaataattttttgttataactaaaagtaattttaatcgtaacaaatttatattataattaaa

SEQ ID NO: 75133 - DNA, 1201 bp, Cannabis sativa
  modified_base (762)..(762): a, c, t, g, unknown or other
tatgttatatgcatttcttactgattctgttgactcatagatattattttccttgtgtaggtaaaggaagggtgaaagctaaactggagtgacaactgagctcagaggatgattatacatgtcaagacggtgcacctagagtgtttagtctcgggacgacttaggctgtattttgtagttgttgtgtgacatgtctgtaaaagttattttgattatgattgtaaaattttaaacacgggatcaaaatttatgtaaatatatatgcttataaagtttaatagtttaaatcaaaaaatttattttggcacgattttcaagaaaaaatctttcgataagcaaatgtggcacaataattaaaaattattgtagcgcacctaagtatcagggcattacacatttactattggctaccagggcgactcttatggggtgcaagctgggctattgtacagggccccaaaaaactaaagggcctaatatatatttttttaatgcttttcaagttttttaatgaactcaattttttaaaaggctaataacttatcaatgattatttctatgtcaattttcaaaatctattttcaattctattactgcgttttagcaaaaagataaaaattcattattgctatatatttttttttaaaaaaaactttttattattttttctataattttttattgtattgcaatcaataataatttttataaattaattggagttttttggtgttttttaaaatatataaccgtatgataatntttaaaaatattatttataaattgtatatttttttatagaggctcaatttttaaaattaaaacagaacttccaaaatatttaagacggccctgctcgttaccaatatatttattaaacaacgaattacaaatttgaactccaacattattctcattattatataaaataattcattcacattgataatacaaaaaaagaaaaaaagatattaagtataaagataatgaagaacttaattaacacaaacatgcattaatacaagtcttttgataacaaaacaaaccgaaacaaaaacaaattgaaatgaaagtaagggaatgtggatggatatggtcacataattaattaagaattaactcaattaattaagttaattattgtgggggcttgtaagcaatgaaactgatgcactggacttggcgaacgttgtcgaatcca

SEQ ID NO: 75134 - DNA, 936 bp, Cannabis sativa
  modified_base (867)..(903): a, c, t, g, unknown or other
cgtcatctccatttcttaatccgtattacaagtaagtattcctcagcttttaaactattttttccaatgcttaattgaaatatagtcctcgtattcgagggaatctgccacttttcatgcgtagggtttaattttaggaattagggttatttgtgtctagaattagcttgcctgattcattagggaacacctttggggttggggttttgaagagttattttcctttatgtttggtttgagatgcatgcttgttatttaggattttttggttcagagaattaggctaaatatttttgagttatcagtaatctctttgagtacgcccttcttgatttattatgcgtactcgttttgcttcatctgtagaagagagaatttgggctttgttgttgttgttgtatgttgggttcctgattcgttaccatagcaagatacttgaaggtagtgaccttggtggtgacgattccagaggggacctctcctagcagtcttggggtggcttccctaggtaccatatttgtcatttggatgtagggtattgagtgcttggactttcctactaattttttagtgtttggtgaaggcagcaatttccagccggccttagtgaatcttgaagagattcctaagacatttcccatagaagtacctcctacagagggggacctcaaagaccccattctagatgagagaccttctgaatccattcgatccaagcgatatcgtaagggcacccacgttgtgtcttcaattcctttagttctcaatgattctatctgggagatagaccaaaggccaaatcagcttaggaactacggtcttctggaaacatattcaattgatggaggtgttgggattttatgcccnnnnnnnnnnnnnnnnnnnnnnnnnnnnnnnnnnnnnttaataaaagattagaaatcattttatgttgca

SEQ ID NO: 75135 - DNA, 707 bp, Cannabis sativa
  modified_base (658)..(666): a, c, t, g, unknown or other
tagggcacaaaacccaacacacgtggcactaattttgtccatgtaagcatgccacatcaggtaagcaaaacccagtgcaccaggccatatgtcaacatgggtggtgggtgctctttacagagattttgggatgtcattttgacacttccaaggttcttgaacttgaggataaggtatcctaccctgtttttgacaattttaaagagaacgcttgaagcagaatttgcattagagtgatagaaaccaatgcaccaggttgattatcaacctgggcgctaggccaagcactaggtcaacatgggcgatgggctcagttttgatgcccctagacttgtcattttctttccaatgtttccttgtatcttctttatttttgatgatgtaaaaaatgcccgttaatttttttagaaatagcaatggaaattgtcaacataggcattaggcctagtgttaggtgtcaacctgggcactgggtccagtttaaggcctcttggaagttctgttttctccctgaaaatagttgaatcttaatctttgatgaaaatggagaatatgcctggaataattatcagaaaagctccttagaattggcctaggttgacaaaatgtaaacttaggcattggtctcttattttggctgttgggttttatgccctannnnnnnnncatttcatataatcagatttactcattaataaagatcagaa

SEQ ID NO: 75136 - DNA, 1028 bp, Cannabis sativa
tcaagcttagacttcgcatgaaaagatcaaagggaaagcatcatggagggtaggatagacttcaagcagtctttccaatccaggaaagagggctgaagatgcatcgtacccttggtgatctttcctgctcgaaaaacaacgtgcatgcgagagtcatattgaatttttatgtaacaagcttcgacttctaggaagaaaggctgaagttgtataaattcaagcttagacttcgcttgaaaagatcaaagggaaagcatcacggagggtaggataaacttcaagcagtccttccaattcgagaaagagggttgaatacgtatcgtacccccagtgatctttcttgcacgaaaacaacatgcatgcaagagtcatattgaatttttatgtaacaagctttggctttcgggaaggaagactaaagttgtataaaaatttaagcttaggcttcgcttgaaaatatcaaagggaaagcatcacggagggtaggatagacttcaagcagtccttcccatccgggaaagagagttgaagacgtatcgtactcctggtgatctttcctgcacgaaaacaacgtgcatgcgagagtcatgttgaatttttatgtaaaaaggttcggcttcaaggaatgaaagctaaagttgtatagaaattcaagcttacacttcgcttgaaaagattaaaggggaagcatcacagagggtaggatagacttcaagctgtcctttcaatccgggaaagagggttgaagacgtatcgtaccccttgtgatcattcctacacgaaaacaacgtgcatgcgtgagtgatgttgaatttttaagtaacaatcttcggctttggggaaggaaggctgaatttgtataaaattcaagcttagacttcgcttgaaaagatcaaaggtaaagcatcacgaagggtaggatagacttcaagtagtccttccaatatgggaatgagggttgaagacgttgttggaaatattttaccaggatctatatttactaccaagtatgtttcattagcatccta

SEQ ID NO: 75137 - DNA, 865 bp, Cannabis sativa
cgaagagccccaaaagctccattaaactttcttcctctgcaaatcagaccttgaagaagaagaagaagaagaggtatagaagggtcagcgcgagacactttataagactaatacgaaacaatgcacggaaccacacgtggcggaagaaacacggttctgtacgcagctaattgagtacagagagagaatccaacgaactgatagctgtacatacatgcatacatatatataatacgtatacataaattcattcatcattattcatggcgttcgcatatttaaagatgtttatagattattaactaaaaggagtttattatcccgctataatcggatgacccttctctgaattgatttgaattaggactacatatatatctatctatatgacagttttaaattacttaaaatacatctatttgatttttctttcattcttttaattacttaaattttttattaaatttataaatattaattaattaattaattaaaaaaaatattcatatacaattaaaaaaataattgtattgtttaaaaaaaataattagtattaaattaagctctaaatatcaacataatctgtacatataatagttagtattaaattaagcccaaaatataatagccataaatatctatataaacaaaggaaacttacaaaaatattggaatttggattaacttttaaaaaatactgtcacacgaattttttttcaaaaatattgtgtttttataaaatactagtaaaacacaaaacaaaacaactcaaaacaacagtagaacaattaaaaacacaagtagaatactagtgaaaacttaacacagtatactgcaatatgaaacttataaaaaatacagtaaa

SEQ ID NO: 75138 - DNA, 1365 bp, Cannabis sativa
tattgcaaatttaatcacaagtacgatggtggtacaaactcgtaggggcgtggttgatccagcaaatccacagacggtggatcctgcactgtagattccaggaaacacaagggttctgctagcggttaatgccagacaaccatcaattgcgggtcacggtgtgacgactcctgtgaatgagattgcgcctggtgtgcaagagactgggaataccagttcagtagccgaccagggcattcatagcacaaccattctgcccgccaccaatgttaaaacaaccattggagatgacactgagatccagaacctctgtgctgctcttggactcatgcagggtcataccaacaccctccatcatgatcatgaggaactccgcgctgctgtaaatctcgcgttagaagagtagagacgcatgttttctgaatggagggacaaagagatggaagcgttaagggctcatcatgcaatcattcacaatcgtagttggcaagccattgtgctgatacaaaaagcctatcaatctgtcgggcagcaacccgcgaatgtcatccccctgggtgaaacagatgaagatccagcgatgaatacctctcagactataaatggtaagccgccaaatctccggtcacaggttccacctgtgggccaagtggtaggtgggcagatcttgtctagtaattcatcggaagaagtcatacccaacaattccaaccaggttaatggtgtcggtcagtacattagccaaactaaccaatcattaagacagccagcatttctgtatttgatacattggggactactcatgatctcaaaaatgatctgaataggaggagaggagtagacgatcagcttgacacgccgatcgtacagcccagaacctgcactcaaattcccgctctgaaagatactgacgtgactcagatcggccaaaatgccgaacaggttagtctagctgtgcaggcacagctagacgaactaaagaatatgttccaaggcatgaccgattagagaaacaatgattttgagttggaccgagcacgtggaacccctttctcccccgagatcaatctcctgacactgccccacaaatttaaaatgccaacctggaagatgtacactggaaaagaagatcctctttcccacttcaagtatttcgagatgcaaatggatcggcagggagtacgaggagacgtatgttgcagaatttttcttgccaccctctcagaagccacccagcaatggtacttcaagctgggacctggaaagttcaattcatgaaaagctttctccttggaattccatgcacaattttcctcctctcgccaacttctgttgcaccttggagacctggttgaagtcaagcaa

SEQ ID NO: 75139 - DNA, 551 bp, Cannabis sativa
  modified_base (86)..(101): a, c, t, g, unknown or other
  modified_base (436)..(450): a, c, t, g, unknown or other
accaataagaaaataacacgtagataatgagttaacacttggcagctaagtacctaagaaattctagaaatataacttaagtattnnnnnnnnnnnnnnnnaaacttaagtatttatttatagctaaaaattaaacttaagtatatatgccacaaattactctaaaaaaatattcatataataaaaaatactcactttctatttttagtaaataaaactatactttaattttaagattaatttaaacaattttatatattttcctattaatttcatgatttttataagttaaaatatatttttattaatttttattgggtaaatatcattttgaatcctgtgttttgcaaaagttactaattagaccttttattttgttaaatgacaaaattgaccctatattttttaagctagtacaaataggaccctgaactgnnnnnnnnnnnnnnnaaaatttaataataattcgatctataaatattatgacaaaactgtttacattttctatatctgttcgtgttaggaattgtctttaagctggttatattaaa

SEQ ID NO: 75140 - DNA, 1408 bp, Cannabis sativa
ttacgatgtaatactcatcgcatgggaactcagtttttattaagtaaaattaaaaataataataaaaaaatccatctttgcatgtaattttattgttttcatactaaaattcacaattgaaaagctttcgcaactttcttccccttcaacatcagaaagctttcttctcctttctttgatgacaatttaggtgcaaattagtattctttttcagaaactttcaactgttcaccacttctgaaacatctcactttctagtggtacaagggcagggccagttctaagcataagcgggctatgcctgcgcttaggactcacttattttagaggcccaaataaaaaaattgtcttttaaaaaatatacatattttttaaaatactatttatctttatagtaagggcccaaaattttttgttgcctatagcctatttcaactcaaaactgaaactatacaaggctaaatgaaatttgcataagccatccttcaaaactcagccatatagaattttgagcataaactacataaacatgtactcatgtcttcattgtttttccaaaatccatcatatgtaatattaagttgtttagaaagacacatctgaaaattcaacaacttatttggaaattcaaaagtggtctctaaactttagacggatagttaaaaatatccgagtgctactatacaagtaagggagagacgaaggcgctcaagtggatttttgggttgcgccgatagtttgaggggagaagctcacatgtgttcctagagaggccttgccgcttgtgagtaaggatattcattcaatccaatccgtaccgtccgcaaaagtgtaaattggataaattattttgaatttgttaatttttttaattaaattatctaatatttattaaaaaaatcacataactaaaagaaaataaattaatattattttatatcttcaacaataaattaaaataaataaaataaaaaaataccaattcaatgaaaaaaaaaatgatatggataaagaaatatttaattttctttataatgaaatgtacatttgatctattaagttttaaaatatatttgtatcatgatatatattagatttttaaattatacattttttacattaaaatattatttttacatgtgaatcaaattccaatcttcacaagtgcggtccacacttggattggatgtgcaaattaaattagttgtgacttgtgagttcagaaagggatagagaatgagaaataggttagaaaggtatagagggggaaaattatagaagggatattttgatgaaaaagaatagagtaatttgcggcgaaacttctttatgttttaatttttacacttaatcttcttattttttttttgtgtggcaaaacccccttatatattaatttttatacact

SEQ ID NO: 75141 - DNA, 765 bp, Cannabis sativa
tatatcagttggtagtcgagtaactcttgtatgctgcaacaatagtgtctccaaattatacaagttacaaattgtattaggtatctcctcaatctctatacaatctaacttcaaatatcttaaatacttcaattttcctattgaatcaggaaggtttgtaatccgaacatcatatatggatagtactctcaagcctcggaatgacttatccaagtccttcatttttaacaactttagacaagcatcaacccttgaccacaatatagtccgcaagcacttggctttaaatagctcctcaaattccttaggttcaatgtcttttgcatatggttgcatgtacgaaaaatgacgaaccttgtgagaacatttactgatattattcatcattaaacaaaactcaccagaaacaaatattgccaaatcatgtataagatcatgcatgagaaaagtcggctcctcctcataattgttatttgatggttgaaaaaatgacatagaaattagatcttcgaaatactcttctccaacttcttctactctctttttatttgaagactgtaaaagaccttcggtcatccataacaacaccattacttcttttctaaaatgataatcttttggaaataaggagcagtaagcgaaacattgctttaattctgggcgtagagtaaaataactcaaccacaaagctggaagaattttaacttcatttctctcgtacaactcccatatatcatttcttagaattttatcccattcctcctt

SEQ ID NO: 75142 - DNA, 641 bp, Cannabis sativa
atgatatgtaattaacataatattcctaattctaaatcaactttgatttgaattttttgttttttttgttaatttgattttgctcccaatttatttatatatttatataaaggaaagaaaaaaataaattaaataccattttatatgatttttttttatttttactaatttgggagggtttatcattttatgaaaaaaaaaaattgatgataaatgttttagaaaaaaatctcacattgtttaggaaccgtttttttatgttgtggcctatatagaataaataagtctattaatttttatttttatttctcatgaagttaattttttatatcacatataattattgaataaaatatttttattattcaatctaatattgtttaattagttatattttttttagttattcttttttatcaatgttttagcattaagaaaaaaaaaatatatattataaaataataactgtaaaaaaattactattcacaacatgattatttgacaccttagtaaaaaaaatctcacatgttttgactagggtggtatcataaataggggtgtacatcaaaccgctcaaaccgctcaaaccgcccgcaccgcaccgcaccgcaaaaaaaatgcggtttgaaattcttcgcggt

SEQ ID NO: 75143 - DNA, 681 bp, Cannabis sativa
agaagaaaaaggtccttaccttagaaaaatacttgagtgaagattgttgaattcctcaagaaatgatctacttagacgagaaaatttgatttttcttcttgggttcttggtggccgactcaaagcaaagagagagagaattgttctcttcaattttctaattttagtaaatgatgtaaaatggtttaagtattctaatatcagccaaaaaagatttaattaaaaatcaattaaattttcaataaaagacaaaatcccttaaggcaaaaaagaccataatgcccttgcccacacaaaaccattataaaaactacttaggggtatttttgtaacttctaaaatctcaactattcccgacattcccaatgtctaactatatcgccccgctatactaaaaatactaagatgtaattctaatagccaaacaccgcgttccaatgttgaggggcactgaatatgcaaaattatgaaatttctatatatgtcatataaaatgcattctgaattcaaatcaattaccataaattaataattctatactaataaataattttcataattaagcaataattatctactaatttctaaattaaagctaagcggtctttacaattatctcccccatttaaaaagatttcgtcctcgaaatctaactgaacaactctggatattgagctctcat

SEQ ID NO: 75144 - DNA, 966 bp, Cannabis sativa
ccgacccggacctcagacctcggaacccgaccccaacccggaccccgaccccaacccggacccagaccccggactcggacccttactcggacccggacccagacccgtagttggtgttgggatcgaatgtattataactttacacaatcaattaatacaagtcaacaccaaacattatattgtattaaataatactaatacaatacaatacaacacaatctaactcaatacaatacaatacattacaatacggtgtaccaaacgaaccccaatacgctattattatttatgtgctaattaaaaaatcataaaaaatggttacatattttgttgataagatagaaaattaagtattaatcattaattttattgtaaaaaattttgtgttaattttgtgtttacacttattatatttttaatagtaatacatcacatttgttcttgccgactattttttatttttagtatatggagatattataattaaaaaaatttatatgacaatatattattagttataataagagttttactcgttttcagaaaatatcaaattatttaccgtactaaaaatataatttaaatagttagctgcaagtgtctatttttgttatctgtgagcttggttattttgaacattataatttatttaaaattcttcaaaatggatgagatatctgttataactataatatataacatcacaattgaaaaaaaaaaaaaaagacataattttttctaagggctgaaaatagagaaagcttgtatggtaagtgcaaaagtattgatgtcttcgattaaataatttcatataattcaaatagttagttgcaagtgtctatttttgttatatgtgtgcaatattggttattttgaatattataatttatttaaaattcttaaaaatggatgagatatttgttataactatagggcccgtttggtacgcaggattggactggattg

SEQ ID NO: 75145 - DNA, 697 bp, Cannabis sativa
gtaggctattaccacactaacggggtcgaacctctttaaaatctggtgctctttattacttatatgcttttgctctattttaattatattcttaatagtttaataattgactcattgtcgttggctaaaagcgaggtcaatattttggtactttcattaagagcaacaacccaagtttgttctttgtcttaagtcttaataggcgtacacaatggtggtgcaaactcacagaggcctggtcgatcaaagagatccaatggtcaaatatcctaacatacaaacccctaggaatacgagagaaccaccagggactaatgccaaaaaggccaatacacaaccacctactatgggccatggcgtgacttcccctccagctaggatcacataaggtgtgcaagagactgggaataccagttctgcagctgaccaatccactcccaatactggtgtcccgtccaccaccaatgctcagacgacggttggggatgatactgagatccaaaacctccgtaaaacccttggactcgtgcaaggccataataactctttgcatcatcatcaagaggatctccgtgctgcaataaacctcacgttcgatgagcagagatgccagtttatacagtggagggacagagagatggaaactttgaaggcttagtaagcaaccatcgatgatcgcccaaggcaggccaccata

SEQ ID NO: 75146 - DNA, 701 bp, Cannabis sativa
ataatcgatcttacattttcttttacaagttttgcaggttgagttatccatgcttctcaggttcaagccatgtttttaattgcagcttacccatcaaatttgtttacaggttgttggtgtaacatcgagagcttgaggatgcttgcgatggaggctcgactggggcagctcggaagacggcggaggctagattgttgtctccattgacctgttcctttttttttttttgttgaggagccgtgactatagtgagaagagaaagtcgaaacccaacctccgtattatttgaaaacaaaatgtaaatgtggttagatttttatattaaggtatatttaaaaataaattaaatcataaatgtaaaagtgaaaactcccctagtttttttagtgtgctttattttttaaataacttctatgtataaattttttatttctattaatagttttatctattttaagaatatagagaatgataaaattagcaaaatatgaaatattaattttttaatatttaattaatgattataaatatcaaccattagatatttgatccaatgatcaagaataaaatactcatacataggtaatacccattaaagtaatataattcttcaaagaaagagaaaaaattgtccaataattttattacaaaatatttattggggaataatatatgaatgaatagtcttttccaagtaatct

SEQ ID NO: 75147 - DNA, 1531 bp, Cannabis sativa
tgtttacctaacaaagatatggctatatgatgtttgccttttccttttcaacaataaatatatttattattagcaaaactatgtgcttgctataaagtgatttaaatagggtcactctcctatttaactgcccccataaaaaaatgtctccatatcatttttaaaacatatttatatatattgaaataattgcaacctcttggactaaaaaaataaaattgcccttatattcaagttttagacacatctagatccataaaaatatttttaacttttaatattttttacagaagttaagatttctaacttactaaaaaaaatatatattaagaagttacaattataaacaaaatatataccaatattaaaaatatatatttttagtgataattttttagttataatataattttttttgttattaaatgtgaatttttagccacaacaaaaaattacttctgactaaaatatagtatttagatgcaagttgtcactaaattaattttagtcacaacaagtattgtactaaaaatatatttagacacagatcttttagtcacaacataagaatgataatttataattactcacaactttttcacttttaatcataaattttattgcaactaaaagtaaaaaattttgtagtgcaaacaaaatcggtgaaaaaaaatttgtaagtatatatagtaatgggtaatttgcagtcaaactacccatttttatgtttgttacggtttaactccttactcaaaaaattatagctaaactctctggactcgacaatcattttgctctgtagtctttcaatccattttgatctgttaagtgccaaagtggactgccacaatgtatacaagtgtacacgtggcaaaatttcattagtccacctaattttaataattaaaaattaaaaaattgtttaaaaattaaaatttcaaaaaaaaaaattaaaaaaataattttttcttatcctttttttctttatttccttttcctgtttttctttatgtttcttcttcttcacattgcctagaaaactacccccaaaaacacccaccacccaccaaccaccaacccaaaacccagcaccaccccggccagaccccaatcccgacgagaccacgtctcttttttccttctctccattgtctctcttttgatcccaacgagaccaccacccagagaacaaataacccaaatatgaaacccataacccattataaaaaattctttggtctcttttatttgacaaagacacggcgggttcgggtttgcacgggagcagcaacatttcggttccaggagtcgacctgtttgggttcccaaggggtcgacgatgttttgatttacaggagatcgatgacgtttgggggttgaggcgtttgggtccgtagagggtcgaggtttttggggtacgttgtgggttttggggaaaatggacgagaggagggtcggagcacagtattcataatccgtccgtcgctagtgtcgctcaagcagagagagagatagatagatagagagagag

SEQ ID NO: 75148 - DNA, 1021 bp, Cannabis sativa
aagtggctcaaatttagttaacgaaaatatgcgttaacatatatcatagtagattgcatatgaaatttaataataatcatcaatattcaatatatctatctatatatataaaggagaaatatgaggcggtgacgtggcggtctaaaaaatactttaaagtcatttttttctctccttaattctctctcttttttaatttttaattctcttctcttttaattttttttatttatttttaattctatttacaaacatttaaatatatttagttgaatattcaatcttagttcgatattttatttcttctttacaaatgttaaaaaatatggcataacaattagctaataattttcataattcaagataactaacgagaaaactactaattattaatactaagttgccatgatcattcaatatggaggtggtcactcgggttgtacttcataatttttcatggtgtaaattttgttacagccttttgtgccaacctctctaataagcctaaagactgatgaaactgagtttggtgtggttgatgactctccaacaaaggtataaaagaactttaattttattttattttttataataaaaaattcttataatttaaagttttaaaaacagaattttagtaaatttgaaatatatattacgtcatatatttattagactcttcactatttatatgagggaaatttcattatttagctctaataaaacacatatcaaattttataccccttatcaatttgtacaaaacaattctacttttttcaaattctacccaaaataccccttacatttaattttcctgctctctctttccctctccctctctctgtctttccatttctctctctatctttccctctttgtcccttcccacgaaacgaaagaacccaacaacccaacccaacccgaccacgaccacgccgaacccaacaacccacgccgatgacgacccaaccatctctctatctttccccctctctctctctcggtcgctctcgaattcgac

SEQ ID NO: 75149 - DNA, 1044 bp, Cannabis sativa
ctctcgaacaatgtggcagtcaatttccacatattttgtgcgctcgtggagcatggttatatgaatgcattgttgtcagaaaagaggagagcagggagagatatatccacttgaaactgaagcccacaggtgacattggccatagctctatactctgcttcagcaaaggatctggatatggtttgttgttttttttattttcatgagatgagggaatctcccaagaaaacacagtagccaaatatggatctcctagtgtcaagacaagcaccccagtcagcatctgcaaaagcttggagggtgagttttgatggtgctgaagcatgaaagaagaggccttgaccaggagagttcttcaggtagtgcaatactctgtatgcagcgtctaaataaggttgtcgaggtgattgagtgtattgactgagtttgttgacagcaaaagtgatgtttggtcgtgtaattgtgagataggttaattttccaattagacttctgtattgtgttggatgttgcagcagtgttcccgagtccttgtgcagcttgaggttgggttccatgggggtagaagttggtttagaacctaagcagcctgtctcttctagaatttgcagggtgaaaggccaatgagaaacaaatatgccctttgaatatctaactacttctagtcccaggaagaatcgaaggctgccaaggtctttcaatttgaactaagaatcaaggttgcttttaaagtttgttatagttcattgaggttattagaggcaacaagtatatcatcaacataaatgagcaaggcaagaaaaacacctgatttgtgtctcagaaataaagagtgatcagattttgagtggtgaaagcctttctgaatgaggtggcttatgagtttagcgtaccactgtcttgatgcctgttttaaaccatacaaactcttttgtaatttataaactgcattttttggaatcactcctttaggagtgtatccttgaggtagtttcatgtaaacatcctcatttaaatcatcatggaggaatgcattattgatat

SEQ ID NO: 75150 - DNA, 801 bp, Cannabis sativa
gttactaaacgccacctataacgaaaatctgtgttaacacaaggtgtagttgctcttggccccttggtcacggtagaacaaaggaaaaaattgcaagcattttttactaaagatgaagtgaagatggaaatttttgatatctcgagtagatgggtttggaagctgcttttttttttttttaagataattgggatatagttggggagaatatgtgtaatgtagtactttcttttcttcattcgagtattattttgatggaaattaattcaacaatcattactcttatttcgaagatcaaatgcccagctaatgtaagtgaatgccaaccaatagcttattgtaatctcatatataaagttgccactaaatttttttgtttcagattaatagagatcctactagaactaagctctcacaatcaaagtgggtttgtttaggaaagattcattgcttacaatgtaatgatatgtcaagacttggttcgccattatgggtagagtaatgcaaggctcagctgtatgattaaactagatttatagaaagcctatcatacaattgaatggggcttcatagagaagatgttgaaagctattgctttaaatgctctattatttgcttcattatgttgtgtataagtaccctcagattcagtttgatgatgaatggccagctccttggattctttgcagctaaaaggggtctccgacatggtggctcaatgtctccttcattatttgttttcggcattgagtatttatcaagaataataaagaaagtggggcaaaaagaagagtttaaatt

SEQ ID NO: 75151 - DNA, 646 bp, Cannabis sativa
ccgtcttgcttgggtctcgaatgcggtcgaatcttgctccccaacttgtgtttcttcgacctcatccaagcccatttccactgtggggacctcaccctcacacttggtctttcaataatcaacctcccaattccgaggatataaaatttgaagaacaaccatctccaaaaagtgaatattacgttaaatcgcaaatatgtcgcatataaatcgcaaattaatcgcacaataataaataaaatcgcatagtaatcgcactatatcgctaaaaatctattactttaaagtagaaaagtaataagctaatgtcattgtaaatcgcacaaagatcgcacagtaatcgcataaagtcaccaaaaaaatataaaacaatacaagtgaaaatttatacgggacttccaacaaaatcgcacaaaaatcgctcaatcgcataaagtcgccaaaaaaataaaacaatgcaagtgcaaatttataaagagactgccagaaaaattgcacaaaattgctcacaaatcgcctaaagtcgccaaaaaaacatactaaataactgaacaattataatgcactgtaaagtaaatcgcacaaacatcgcacaatgtcgcatcaaatatcgcatataacacagattacacttaaagcaaaaaat

SEQ ID NO: 75152 - DNA, 735 bp, Cannabis sativa
tcgcaactcactcacccctcactcgttgcccgagtcatcgacccctttcttcttcctgaccactcacttgcacttggatttttcaactggacagcccaacaaccaggtttcaatcacacattcataacgtaccaatcaatccttaaatctctttcttgttccccccaattcaatgccattgatactctcctcaagaaagtgaaaacctaaaaagttactctgcattattcttttacggctctgttagatttagatccaaaatatgtaactctttattagctactttagtttttgctggttattttgagcatgctcagaaggtgttcgatgaaatgtcttaaaaaatgctccttttacgactctaggatttggtgtgtttatatggagatatgtgagaaagttgaattgggtgttgttttaagtgtgttagatggaggttaaatgatgtgcgtcattgattaatgagaaccgtaaacttgattgtgtttgaagtatttcaatcaataaaaaatgtgtttgagatagagaaggtttttttaatatataaaaaaaaaagcatagagcaatgataaaatagaaacccaactcttatataatataatatcatatagaacagaagagaacagagcattcatgcaagaaaattcaaaattacaccttcagttcttccattccatctgtcgaaaccttagctatcaccttaacacatgtacttcaaccattacatgcacataa

SEQ ID NO: 75153 - DNA, 579 bp, Cannabis sativa
  modified_base (125)..(125): a, c, t, g, unknown or other
gaacgagttaaccgtgtttgagaaccttaacaaggataagtccaaggaaggggaatcaaacactattaaagcaaaatccaattctccttcttcttcttgcaataaaaggaaatggaacattaagnacaacagcggtggcaagcccaaagacaagaagtcaactaaggccaacaagaataaagctagccctaagtccaaggacaagaagggtaaaggcaagtgtttccattgtggcgtaatggaacattagaagagaaactgtaacaagtatcgctccgagcttaagaaagttaaatgtgatttattaattcttgaaggtaacttagtgaaagatgataaacacttatggattgttgattctgatgccactaatcatatttgttcttctatgcagattcttgaattgtcaagggaactggccgatggaggggtgactatgcgagtgggtaatggagcacacgtgtctgccaagggtgttggtagagtctttttgaaatttgataataaatttttgttattgaacaatatttattttattcttaaatgtaacaggaatatttttttatctcttttgcatga

SEQ ID NO: 75154 - DNA, 1697 bp, Cannabis sativa
tgtgttcctcctcaatagtaggccgggcctgctctgcactcgacattgtggcaagtcgagctatgtgagggtcagtcagagaagatattcgcattgtttgtttggtgcgtgccatcatcatattcctggacggagcttgattggtatgtctagcaatggttacaacaaaagtggctatggatgtacctacaactgtagggtccggacagcctacaagtaaggtattgattgtatatggtcagacaatatatgtccagttggacggtaagtattgcctccactccttcttgagctcccagataaaacatccgttgcctccaccttcgatctggcaagggtaaaaattgtgttgcacctcgggttttggagaaggtgtatgctcgttgcttatctcccagtcttcaaagcttgagttggagagaccgtcaattgatgaggacggactggcacagagacgagggtaatcctcgtacaaaagttgaagaagatcctggtggatatgatgttcgcctccccaaaactcaccaggattcatctacaaaaggtaggacacaagatgagtatttggccaggataacgaacataaatagattggttataccgaccaggtccgatcgaagaattaaaaataagaattttgcatgatattaaggtttacaatctagactttaaaaacttcgaattaagggttaattttcactaaaccccgaatgaacaagtgaaactgaatatcgtggagtcaaaatcaaagcacagttataatcaagccacatggtaaaacatagtcaaaatctcacattcctaaacttaaattttctacggttttcctagaacaagttcaagaactatcaattttcctatagtggaaactcagaaaatcaaatattcaagcataaaagaggaaagaaatgaagaacttactcactttttaaagctttagggttgctcagatgacagtgatcagtgtttccttgggattcttcgaagaatttgagaggaaaaaatttcttactctgaattcttcaagaatgaaaaatgctaaaagtagtttattaaggattttttccctatttataagctaattagtgaggcaaataataattttaaaatttgaatatctcgatttccccccaaaagtgaacgttatgcacttaagtacttgaagagtaatcgtcaaacatgatattttttgggtgtaattcgaggtatatgtcagtcaacattaatgagctaaaaactgaaaaagaccattggtcaatgtcacatcagatcaccaacagacgctttgaacacgtgccacccgtccagataaggatccagaccgagtgaagtccacgtgcgacctcggaggtctcgcgcagacttgggcaaatgttatcctattttttgcactataacgtggcaacgcatacgagtgacacgtgtccaacattctttgcacttgggcggagaggaatatcccgaacagacttcaagtagcacatctgcacacacaacgtttacttacccgaatagggtgaaggggagactatccgagctgagaacaagtttggttttccgaactacttaccagtacttgactatttcagaatggcatcgtggtttctaagtacgaaggcgatccctacaatcatgggattgaattagagggatatgacaagttgtttcaatcccccatttcatgtattctatttatg

SEQ ID NO: 75155 - DNA, 917 bp, Cannabis sativa
caacaaacccaaagggagccagtgcgcctgatagttcctacggggaatctcacaatggatacccctcactaagccactagcaagaatctcgctaaaggccccataaaaaagagtaaaagcaggagagacacaactgtctccttgtgatctcgcatccaatatctccagctcaaaagactgctctaagacatgatctagtccaagctctaagggccaattgagccaatttagtgggttaccattggcgttatagcgacccaagggacaatctctagactagattcagtatcagaactctcagcctcttagtcaatctctggctcaacatcagcacggggctaagcggtctcctccaccatcttaacttgactcattgtggccaccctggccacatgagggtcatatggaggcgccgtacggagggtttgttttgttcttgccacaaaagcaaagtaaataagggacctacacggctgtcacctcacctattcaatacccggtgatacctacatggaagaaataaggggaggtgagcaacatgaaaaaagctacaagcacattcaagtgaagagtacccaaaggtaccttccaggtaaaacataatgtacaaggtcaataatcgacaacatacggtgttaaatgtacttactaagaaagatattaagtgctaagttgtataattcactataatggactcactacctagacttatataaagtttccaaaagaaaccatgcataaggccacaattgtataagcctccaaggccgtcatgagaccctagttgaggtcaaaagagggaaaaactggttgcccacttggagccttggccttggccgacaagggttccaagccttagtagtcggccaaacccaagatcaagtctagtggccgatgaggagccctaattctaggca

SEQ ID NO: 75156 - DNA, 718 bp, Cannabis sativa
cgaagatgatccttctagctagacagtggtctggtatgcttctaatctgctcttaaacaatgctttcccttgggccaatgtgctctctaggaaagaagcatccctcatgtaagaaagatcagctttggggttgcgcagcttgaactcgtagatgagttccaaagataagccgacgtattcatctcttatggcatgctggccatcgagggttgcgtcagctctcctcacacctcctgaggtcagtctccaacctggagttgtcagtagcaagcaaggtgttctcctgattcctagtgtcgagcatgacctctaaaccaaaaatcatgttctggttctgctggccaagagcctccatatcaaccaaagccttgcccctcgctaagagatcagcctctaaggtctctacttgctcctaaagagcactcaaggaccccctagagttgccatgcaaaaagtccagcttcataaaggcttaaaaatactataaggcttgaaaattaatatgaaaaaaagttttaagtttcatcaaaacaataattagtgggttttgggttgggcctttacatattagacctaaataaatataaaatggggataattacataaaacaccattttttgtaaaaaaaaaaattatgtttttacgtattaagaattctttttacatttttacggtttttcataaaaaacaacatgaaattaacaagaaaactacataa

SEQ ID NO: 75157 - DNA, 704 bp, Cannabis sativa
tttgttttcataaatttttatttactgtttttagattttctgtggaagtttgtcactgttaggctcatatctggttaacgaaaatctgcgctaatagtttggtgatttcattgagagccttcatgaaaaagcttagaaaaaatcctcctgacattaaaaaaataaataagataataattttctttatgtttgacaacgaagaaaataatcctcacagagaaacccctcattgtccttgaaaatagccaatgagtccccagggaactatcgacttatcatttgaacatcctacatgttcaataaaaacacaaaatctgggaaccaaacttgaagggcctcagatgagaattggctgatctcttcccaatctagttgatgaggacgacgcctatgatccaacaaagtacatacaaatcgtcgaattagaaaactaccatctcaaggatcgattggaggaagcaaatcgtcgtaatgctgaattaaagcatgaggtagctacagctagggcggcataagggaatagctcccaaaatcaacctaaccttggagaaagagaaccacgaggcaaacctcgagacttgcaaaccagggggcaggaggtagcccaaaggaacccttagaatgctcaggaaagacaacctgggaaaactgggggataccttgaaggcgagatgccatatgatcaaccaggaaccagggaacaa

SEQ ID NO: 75158 - DNA, 747 bp, Cannabis sativa
agtccgataaatcgatgtgatctattctggaacaccactgtaatccttctttattgattgagcaagaataggtacaatacagtcgagacgagcttctttaatgagttttcacaaagtgtttcaactcttacactttacacccaaaaattttcttcatctacagaagattcttcttacaaaacccaaactcaatctctctctcttttctctgtacctcactctctacctttcaatcttttctctgtcaaactctcaatctcatatgaacagagtactcaaactcgtatctcaatcgtgtcttcaagtgttgagtcaaggtggtatttatagccttaggatcaagatcctaaagtcggtgagtgcaagaaacgaggttgttaagttagttagaaaataactaacttaatcatcctcatttagcgaagtctccacgtcagcatgagcactaaggcctccgggaacatgaatgagcttccgggctcgaggatcacagaccctagctgaagacgctttcggataggatataagtctactgaagtcaactatccggaactatcaatctaggagggataactagccagctggaactcctttccaggaaagggctagctaccatgaagactaatcttggagagggcatgatagtcatccgggaacatctttccggactcgactatcattccacaagacaccttcttggattgatgacagtgagtaaacaacttctcaaagataacgattgcggaa

SEQ ID NO: 75159 - DNA, 769 bp, Cannabis sativa
tccaaacccttctcaatgtttacatatttactgggattatttatatctaaattcaactcttccaactcttcgataggcttgagttagttgttttcatcatagatctgaggatccaaatcttccatctctttctcgttttattctgtcaaaatcaccatcaattaatgattttcccttctaattttcaattccacactatagcagtgtcgagctaatagcttgtcacctttaatagtacctactccaaaatgagtggagaattttagcgacaaatctttgattaagcttatttccctcattcctattaaggttgggtgatccatcagcaagttgtaaatagaagggatatcgacaactagaatttcttgtatttgagttgtggataatggtggttctcccatggttagtgggagctcaattgagcctaagcttgcgacactgtcgcctgtgagcctgcacaagttaaccatacagagtttcaaccttacttcctctaagcccatcttctttaaagtctctttgtaaagaatattgattgaactcccattatctacgagaatcctctttatcctcttattagcgaactgcaccattattactagaggggttgtgtgaggaaaccatacgtgtgatgtgtcttcatcagtaaagacaatgggaggttcattagatttggctctttttagaagttttggaacgaaggctaatttttttgtttttcacttcatatatatacctcttctgtgcattattgttgtttcctacgagg

SEQ ID NO: 75160 - DNA, 987 bp, Cannabis sativa
agacaaattaaatctcaccaaacacctataaccatcccaaatacaacatgaaaagtagacaatcatgccctaagatcaaatttgagaaattgtgcaaatcatggttcatacaaacacaacaatagtgaccttttaccactattacgaaccaataaataccccaatgaagcataggaaaagggattagaaaattctctgcaataaatactcttattaataacagtgactcgtggattaaaactcattaattccccaactacgtaaaaattctcttctcgaatactcatttattgcttcacacagctctaattaatagtgtcaaaaatctcaatcaacacataaataacagtctaataatgaattgtgagagcatgtatgtgcattattaaagttagtgtcatgtatgtttaatatcaacaaactggattttaggtaccttaaagctattaaatgcccttttattataattattcttgcaacttatagcaacataagaaaattattttaaaagatgagcaaaaaataactagagagtgatatttgtaacgatttacataatttaagaaaaatttttgcatcagagaaaagttcataaggcaaaattctatatggatcataatttaaagaaaaaaaaaatcatatttattctattttttaagtggcataccaaatattaatatactataatttttgtattaaaagtaattgatacatttttctttccagacttagtaattaagaagttgacccttatattacacgtgcatacactgacgaaaattataattttacaaatatgagatatttatgtcgctaaaaaaaaattagttgatttatattgtttataattcaaaaatttaattatttatgccactatttattcataataaaataaatatattattttaaaagtatattttataaaaaaaaagtattaaaatcagttttaatattaaataacaaggttatattttagataaaataaaa

SEQ ID NO: 75161 - DNA, 918 bp, Cannabis sativa
  modified_base (479)..(481): a, c, t, g, unknown or other
gtaccgggtgtaggtacgggctcatctgattagacgatgcgatatactagtgccaagttgtggcatgggctcacctgattaggtgaagtgatatttctggtgacgtatcgagcgtaggtacgggcgttagtgatatgaaaatacttagttatggcatagatcaaaaccattattgggtttcttcctggcaacgtatcgggcgtaggtacgagcatcaatgacatatattaagtaccgggcataggtacgggctcgtctgattagacgatgcgatatactagtgccaagttatggtagctcacctgattaggtggtgcaatgatatcatatatgatattgcattatgacacgggcttgcctgattaggcaatgcaaatatgtgagcatatctatttatgcatatgactgattatattacctactgttgaatgttatggtttaatcatttataataatgaaatgtataattagctatttannntatcattctttattacttttcttgctgagtctatgtgaattacgggtgctctgtggtgctggtaagggcaaagaaaagttaggacaacctttatctttattttctatttagtaagctagcttttaagtcttgtacaaattattatttttagttgtgtttatttaattaaatattgcttgtttgttgttgggaaagaagagttaaagtgatagggaaaagggaaggatgcaaggacaaagtggcatagaagctgaaactgggctgaattgctgagaaattactgtaacaaattcagcattctaggcagtgacgtggacagagtgtaccagaattttctttagctgaatcaacatccatgtggcagccatttaaatacacaccagctggctattttggagagaggagacaaaacttattgggccaagaatggaaagaaa

SEQ ID NO: 75162 - DNA, 1153 bp, Cannabis sativa
  modified_base (435)..(442): a, c, t, g, unknown or other
ctcacaagtaacttgagcctatttcacctgagcagtcatcaacttcgtcagggcctccacttgggctgtcaacttggtgatggcgtctacctcgtgcataccatcaacttttcttcgcttggcttctttcagttggccattgttggttattcatgaccatttcttctagcagatcacaggcctcgtttgtagtttttctcataaatgtcccaccagctgcggcatctataatcgttctggtattaccaatcagcccgttgtagaaattatgaaccaacatctacttttcaatcccatgatgtagacattttctgatgagatccttgaacctctcccaagcctcatagagagattcattgtccagttggcaaaaaatattaatttcccctcccatcttggcagcttttccaggaggaaaaaacttggacaagaacnnnnnnnncaaatcagtccatgttgcaatagagttcgctggcaaggagatcagccaactcttagctcgctcttttagcgagaatgggaaaaatctcaagtggatggcatcatcactaactccattgactttgaaagtctaacataactccatgaaatttgacaagtgcaaattgtggtcttcagaggggagtccaccaaactagactgaagactgcaccatttggagattggctgactttatttctaagttgttggcatctacgacgggtggtcttatacaagactgaacccccgtcaaagttggaagaatgtagtcccttagactatgaccatttgcttgatcttcaatggcaccactgttattaccattgttgcctccactgttaccgccattggcattatcagccatgatttcttctgtttcagcagttgctaaaactctttcttgcctcttgtttcttctatttcttctacaagtcttttcaatttcaagatcaaccggcagtattacactttgtccttgacgtcgcatgcactcccaatgcctcaaataagacaatctaaaagaaatagattagcaataagcaagaaaaattaaccaaagtagaatttaatctaatttttaatttgtaatatcaatttttaaacaattccccggcaacagcgccaaaaacttgttacgaaaattatgaacaatacgcaagtgcacgtaatcaag

SEQ ID NO: 75163 - DNA, 1133 bp, Cannabis sativa
gatttgaaaatcatatagatgtgatttttccgcttttactgggtcaaaacaatcgtgtattaaacacatctttaattgttgtatctggagatgcctcgacaaacttggttacagtgatcccaatagcaagctggggctattctcccttcaaaggtcgacaatgcatgtctgatgtcgatcgcggttcttaaagagttgttcgaggctcatttgaatgttatcttccggcttaccaggattgtaggcctcggtaatgctcactggatgaaacttataggtagtcttcccatagcgagacgggcacctcgcttactcggttttgagtcgaaacgatcgttgcacttagtttgtactctaagggctttcacaattgatatatatatgtcgctttcaccttccaatgtgttctgtcctcctattcgtaataagtgacatatggtttctcgctaatatactaagtgcaagtttgtacattgattcctcgcctaagaccttacagccagcggggtacaaatatactctgatacttacataattgatgagttattctataaaaagtaattgcatcgattcacattccctttatccttacacgtgtccttcattgagatagcagttgaattttgggtataacactaatcaacattaaatttttttactaagaaaaacatagaaaatttggcaagtaattaagcgttcatggagatctgcatccatcgtgatcttctctcatcaacttttcatggagatatctatcgttggtcgtgctgtcttggctaatcagaaaaagctttttgccggagttcatggtgattggtaaaagttttctcgtcggcattcatagtaatcggaaaaaacttctacattgtttgtggtattgtttggagaagctacctcgattattgagtaaagtttaaattgtttgggtgagttcatgatgatttcagatctgaaatgttcaaaaaacctattttgggaaagttattgtagaaaccgtattttttttttaaaaaattaagttttctttatttgtttaattttctatatgagaacaaaaaagtaaatttttatcagctatatgagaaaaaatgccattatgttttgtattttagtggtcaccataattgaccaga

SEQ ID NO: 75164 - DNA, 619 bp, Cannabis sativa
tttttttttttttgaatagaactatgaaaagttcattagattaaataagttggaatcacaaaaggggatccctccctatccgaaaaaacatcattacaaaaccatgttctagcccttctagctaaggcatcacattccaaattgtcaagacggtcttatatatatatatatatatatatgaatggatatggtggctgcattgatttaatgggttaaaaatcctacgtacgtgtaggagggtcctatattatatatatataaaaattcaaacagcaattcaattttaattacaacacaatcacatgcatgtttcaaattgaaaggccttaatttcttcttttctataggaaaattaaacggctgaattttaacttgggaccggaatagttttattataccaagtaataatctacaataattctaatacaaattacaaattaaaatagaagaaaaacaacaatcaacaaacaagttaataactattattgatgtgacttttcttttttaaattttattttttctaatttttagtgttttaaaaaaataatatatatatgtataacatttacttattacaataataattaattaataattataattaaaagttttttcactt

SEQ ID NO: 75165 - DNA, 745 bp, Cannabis sativa
accataattttaatgtttcttgttcaaagaaaaaaagaaatattttaaaccataattttaatatttcttgttcaaaaaaaaaaatattacttatgttttggtagttacttgtttcttttctattatttttaaataaaataacataataacaagagtataacataaaaataacataaaaacataaaaagtctttttactttaaataaaatttaaaaattgtaagtgtaaaaaatttcgtacaactatatttttgtaattttttactgtatttaggtatattatgaaattattccttaaaaaaaaagcaatgaatatttgttgaattaggtttttcatttttatgacaaccatatttttcaatatgagaaaattttagagggccgaatcaatagagtataaacagtatattttcaattgaatggtcttttgtacacatataaaaaataaaatgacattttcctaaacaaattgggccctttaattctgagcaagaaaaaacaaaacttttggcatgatttttaaaattgggtaagtaccattttggatcatgtgttttgcaaaaattaccaatcagaccttctatattattaaataacaaaatagaccctgtatttttcaaaatggtacacataggaccttgaactgattttttgtcaaaatttggaaaatgccccacaaggatgacctccaaagatgataagctagcttacaatggaagaagaggtgctccattgattatgatttc

SEQ ID NO: 75166 - DNA, 747 bp, Cannabis sativa
catgttaccaaagggattgaacccatcggtggccaatcccaatctcacatttctaggctcaagtgcaaaggatggatgacgtctgtcaaactacttccactcttctccatctgcagggtgtctaagcacgccatcctctttaggtctcttagagtaatgccacctcatgtcttctgacgagtgtcttgaactatataacctcttcagtctcggaattaaaggaaagtaccgcaaaacttttctagcaatgaacaaaaattgaaaactttccaaaaattctctctcttttcggggttcaccaaagctatggcaagaagggggaaaatggctggaaaggggaattcgaaagggaagaagacggggcctacatcttcggatagggttattaagaccagatccatggatgcagtgcttggagtaaaggaattagagatagcagaagaggatttacttcatgaacaggtcgagcaatcaatggaacagtgttctgatgcaatggaacagtgtctcgctgggaagatttactcgcctgaagagacggaagccctctttcagaggtgaagtgaaatcaggcacgatttctccgattggttacaggtagctaatcgaactactcaggatgtcaactctcagaagaagatttctcccccgattctgcgttctggtattgttcgaaatctaaatactagctttgataactctgttcagcaacctgaggtaagacctgcaacttcaaaagttaaaata

SEQ ID NO: 75167 - DNA, 1896 bp, Cannabis sativa
aatattatatttaagtaattgtttgttaaataaatgtagcgataatttcataaaaatacaaaaataataaaaattaataaaatacagtttgtacggaattttcaatatttttacgatttttcaaattttatttatataaaatacgattttttagttgtatttttatattgtactcttgttattttgtagttgattttttattatttgtatattatttttttatgttgtttagatattgttctcttcttaatttcatgtgatctttttgttatttttttgtatttttataaaatactgcaaaaatataaaaaaaaaaataataaaaataaattgaacataaatatataaaaaaatttacaaaatattagtatattatataataatctcataaatataatagctacagccaatatcaataaagttttacaaaatacaaaaattattacatcataagtcaaatgttctaccatgatatattaatatttttgttaagttttagtatatatatttagattattataatttttgcaacttgaattatgatctatttattattgtacttttaaaattttcagcccgttaaaaatagttcacaaactattcacattctaaattggttattctctcaaattttaacacatgtagcaactagaatgatgatgtggttgtttagacaattgccacatagtgtcatgttaaccccacatgtataattaatatgaaaaataatttaaaaaattttaatttattttacataatttttttatcattaatttatttttaatttaataattttaaattatacacgtggcgctaacatacaaccacatcatcattttatttaacacatgtaaccaaaatttgacacatgtaacaaagtgaatagttcaaagctatttttgacagctaaaaatttcaagagataaaataatgcatatgctatatttcaaggggcgaaaattctaaatagtcatatatttataaagaaatactaagcgtgcctaatatcacttaaggtatcataatgcaattaagtattaaattttatataatttaatttaataattatttaaatagagtaatttgtagtataaatacttaagtttaactttcgattgtaaataaatatataaatttaatttttggcagtgacaatgccagttatatttttagaaatctgtaggtacctagttattaaatgtcaagtaattattcacgtgtcattttttattggtatatttaaattattttttttttaaaaaaaaaataaaaattcataacctggactaatcaaggattactatatgtcaatttacttaacacttaacaactagttatctatcgagttttacaaatataacttaagtattattagtgtcaaaaattaaaattaaatatttatttacaactgataattaaagttaagtattataccatgaattactccttaaaacttctagaaaaaatttactctttaaaatatcactcaacctaatatcaatgctcaaatatttatgtcattatgtaaacatatcttttcataattattttacaataataataataataataataattaaattggaaagtaatgtagaaatagcacgtggggtatatcatcaaattacacaaggaattgaatttcttatgatgacattgtcgggcaatgtctttcacattattttgcaaacatgatacaaagggaaatttatgtatcgaaaattgtaaacattaacaataataagcttaggccattagagagcttgatggcttatcccatcatcgttaagctttgtgttgataatgctttcagagtggagcagggccggtcctcagttgaaatgatctataaacaaataaaaacttttgggttcttattataaagataaataatat

SEQ ID NO: 75168 - DNA, 1158 bp, Cannabis sativa
ctcgttataaagtcatttgactaaacttatccacttcctgttttagcgccccttgcctctgggaatccaagggtctcctttttttgcctctttgctgggtagtttggatcgacatttaaatgatggcagataatattagggtcaatttctatcatatctccatggttccaggcgaattgatcctggttggcccttaagaaacttattagctgctatttcaactgctcgtccaggttcttcccaatgtacacacactttgtgggatttcttgggtcgagaataacttcttccatttcttcaattggtattaacaagtttgtttcatcttgaattcgaggatcaagatcttcatccttcttttcgctttcttctgccaaaaccaccattaacgggtgactagcttttctgtgttgtagctctatgcaatagccatcacgagctagcatttgatcgcctcgcaccactcccacacctttcggtgtttgaaacttcagggataggtgcttgatcgaactaactgcccctaatatgatcaatgatggatgacccagtaatatattgtaagccgatggcaggtcgacaaccagaaagtcttgcataattatggtagataagggtgcttcgcccagggttaatgctagctcgattataccttggctggcgatagtgtcgccagtaaatccgtatagattcaccatgcaaggtctcaatttggctttttcaagccccattttcttcagtgtttccctgtaaaggatgttcactgaactctcgttatctaccaacaccctctttatccttttattggcgagctagatagtaatcaccaatacatcgacgtgagaataccacacgttcttctcatcttcctccgtgaatatgattggaggttcttcagtttttaccttcttggaaggttctagagcaaataatgactgctcattttttatttccttcacatacctcttttgggcattgttgctctctcctgcgatatgtggtcctctcgaaatagctaggatgtcctctccttcaacaggaggaggctgtaatccctagctgttcgggttgttgggcagattgggctagttatgtccattgccgtgtctcttcacatacttcttgaagtggccctgagcgatgagactttctatctca

SEQ ID NO: 75169 - DNA, 563 bp, Cannabis sativa
aagattaaaaggtatttgcctaaactaaagtagctaaaaatggcaatatccatttttcattacatacacaaacaaacaatatctttttattctcatacttttttattaaaaaaattaaaacatatcgttagtgctttcccacattttttttttcaaaataaaagctcactttttaaaatatatttttttctcataaaattaacaaataaacataaaaaataaaagaaatacagttgtaccctaaacttaattactgtcctctttttctaattaccgcattcaatcttcaaatcaaaccttcaatttttattattattactatcttttttccctaaagaagaaagtatccaaacttctacttaccacttataataatctatcgtaatcaattggaaaataatatcaattgtgttatttattatttattatcatacattaatgtgatgaataattataatcctggtttgagggtctcttaaaacagtcaaaaacccctctttaagcaattacaaagcaaacttacacctctctctctctctctctcaactaccttaaccaaccgc

SEQ ID NO: 75170 - DNA, 1081 bp, Cannabis sativa
accctctctatgcagtgtttcagtctctggccatttactttgaatattctcccatagggcgagtcgttgacctaaccaacaccgtcgagaatgaaattttttacaatgtatgaccaatctacctagatctcaatttctcagggtggagatgcaggtgagtgtcatataggtgcactcgctgatttggctcaaattctttccttaggatcttcttgtcatgtgccgctttcattctagccttgtagatcctagagttgttatacgcatcattccttgactccttaatttcttatagttgaagcttacaattaaggcgtgatgcattgagatcaaaatttaggcttttatcagcccaatatattttatgttccaaattaacgggaagatgataggcctgccttgcctgccatagactagtctatatataaggaggcatgcctagcttatttttttaagcagtgcagtatgcccaaagagcatcgagaagtcaggaatacctatgtttacggtcagggttaaccgtactttctattatttgcttaatttcacgtttatctaattcatcttgaccatttgtttgtgggtgataaggcagtgctgtttgttttttatggtactaaattaggtcagcggaagagttttgtatcatctgattatcattgtaccatatctcattggatctctagatgtgtggacattaaatcaaaataataaaataataagtttagagtataactcttgaagcctattagggtatccccaaaacttctcatatgttgtatcccttaatccagatgatgaggaaattgcaattggactcacaccagtgtcttccgaatcgatccaccacacacaaggaatagtatgggctattaggataaagtgtataagcttttgttcttgttgagttctcaacagagcaagaacaattgagagaaaaatcgatttcctttttctctctaaattttgaaaatttaagtttgggaagagtgttctgatttttttaaatcaagcttctatttataatagttaaatccccttaattaaatcatatttaattatttaaataaataaatatcta

SEQ ID NO: 75171 - DNA, 838 bp, Cannabis sativa
aaataaaaagttgaaaaactttaagttaatacaaatgatttggcagtagagtaataaaaaatatgttattcattgtagtgtaaattaaatttatgttatattagttaacgtaaccatgtctcgcgcggttattataataattaattgaaacatagtttaatttgtaagtatttaagtttttttttataaatagaaatacccatttagtttacaatatttataaatatatatgtacccgtttactaataatatattttttgatttaagaatgaaaacttattattgtatcaggacggagccacaaccatgacaagagtgatcatggcctcccaacatatatacatcttgttaattttatacatacacaaaaaacaaaattaatgataaataacatataaaacatatatagtctctaatagtgcataatctaaagtatatattataaaatataaattaactatttagaaagaattaacactttaaattaaatttatacatatagaaagtaaataaaataaaataatagcttattaaatatatattttctattacttaacattttctttaattgtttaccaatgatttattattattattactacatatacatgattttttttagaatagaatataatgtacgtgatatatttaaaattaaaaaaaaaatatatttatttatgtatcttgactataaataaagaaaaaaaaaaggtaaagaagctaattcaaggatatatttcagttttagttattattattaattttatgaaagaatattatgataaaatataatttaaataatattttgaaatacttctttgtaaacaatattttttat

SEQ ID NO: 75172 - DNA, 817 bp, Cannabis sativa
aaagcctactaattattgtattattgaaacttatttattttttcatatttattttcaagccttatggtatttttgataaattttgcttaagctttggtgtatttgtgatagtttaattatcggtgatagtccaaactgcagaaattgtaaaaaccgcaccgcaccgcaccgcactattttttgtggtgtgatttctacaattttttagtttcgtggtgcgggtgcggtttgaaaaattaaaaaaattgcatgtgcgggttggtttgaaaaaaatggtcaaaaactgcaccacccgcaccacgaacacccctactcaaaaatgtttgagacttaatctcgatcgttatttgtcttctctgagagacaccctagggtttccagcacaaacacgatctcatagatcacgcacacacacgaaacagaaatcacaacactaagacacaaacgcacacttagtaacattgagagatgagagttagggctaaagaaaacaaacagaaatagagatttgatctcgaagttcaccccagaacgatgggctacgtctctgtcaagcttgcctcagagtagcttgattcttcactataaacctcatgtattacaagtgtttcctatttcgaaccacaaattctttggttgattaggttttttttcctctatgttttctttttctcgatctctatctaactcttttttttttctttgaatgtgattacaaatgagttcgaggagcttctctctctggtacactctcactctaaaaaacaacccacgaatggaatgaaggccacatgtatcaatcttcttttgaatttgg

SEQ ID NO: 75173 - DNA, 870 bp, Cannabis sativa
tgatttgttacatgtcaaaatttgagaagtaaaaatcctaattagctttttaatttatactttcactattaattagtatttcttttttaatactttcataaaattgcagatttttttaatttgttttttatataaaaaaaataatgtagtgttaatgacaaaattcaaaatagaatgtttcacacatgcaattattatttgtttttcttattaattaatggtaataatgtaaattatatttttagtaagtttttctaagaaaaattatgtttggaatttttttttgaatggaaattcatcttttattagataaccatatcagtcaccaaagtaggtaacaaaacagttggaatggaatccaaactgaaattacaatcagggaacgatacagaggctcgagcgaactcatgagctaccgtatttgctgatcgacgaataaaataaatagaaacattttttagttcagtaagtaaagccttacaatcatttaccacttgaccaaaagtggaaatcataacaattgaactccttaaggcttgaacaacagacaagcaatccgtttcaattaccacctgctgcaaacggctggtttttatccagctcaaaacctccctaattccgacagcttcagccaattctggtgtagcttgaacattgaacaatcttatatggccactgataagaattcccctagtgtccctggcagcccaaccaattccaaactgtcgggttgattcaaagatcgctgcgtcaacatttaccttaataatattctctgttggaggcacccaatgctcggctccgtccccattgatcaaaccagtggacaacagctctaaaccagaggaatgagcatttttccattgtgaa

SEQ ID NO: 75174 - DNA, 547 bp, Cannabis sativa
gtgtcccctgtatctccgaattcaatcccttcaagaacgctgactccaacagtggctccgccaccgcccccaatgacgccgtcaaagcttcgaactgttgccggtattcctgaacggtggacgtctgctgcaacgccaaaaaccgatcgtacgccgatccatcgtgcgcagggaggaatcgccggagaacgaggtccttcaactcgccccagctgcggatttcacgccgtcgattctcccatctgaaccagcgaagagccggtccttctaaacacaagacagccgcctccaactgctcctccgccgttaacctctccaatccgaaatacctctcttcccgatacttccaatcatcggggtccgaaccagcgaacagaggcagctcgatattccttgggcggaatttaggtcgtcgtcccctataaccaccagtctcatcccgctccactagacccgatcggaggttgaacggacctcccaattgggcttcgcagaccatcggtaagctctgtagccattctctcttgtccccggagtagcagatcca

SEQ ID NO: 75175 - DNA, 995 bp, Cannabis sativa
  modified_base (940)..(954): a, c, t, g, unknown or other
aaaaaatcataacaaaaaatgttccatacgagttaaatcagttaatccttttccttaaagttagatcccaattaaaatgttctcattcaccaagtatttttacaactacaatattctaaaaaaatcagtataaattctcggatatgattctctccattcaggtcaggtgagatttacagttctttagttgtaaaatctttacagataaaagggtgagagaacaacttcgatgcaaaccatctttttttacttgattcaatctgcaaacgaagctctataaactcatcagaaacgctttttggcagacttggcagctcactgaaacatatagcgcacattaatgtaggccaatcaggtttctaacctgtcgaaagtagcagtaaatgacccatataaagctccattagagtcagatccaaactccagatatcttcagcgtaactatcgtaatttttgcaataagtctgcgaatcgaacctatccgaactcatgtaagcacacattcagacgaaggattttgcttaccccaaaattgacgatcttaacttccatttttgaattcactaacagattggctggtttgatatcatgatgaataattctgtgtgagtgaaggtagtgaagatcgttgagtactttctttgctatgtcagcaactttggattcagagaaagctccttatgacttgagaacattctctatggttcctgaatccatatatactccatgactataccaaactctcccgatggtttttggaagatgttgtggcatttgaccacatgaggtgagtccttatggcagaggatctccatctcgcggtagagctggcgataaaaatttgaattggaattgtcgtgggtgattttcagcagcgtagatttttgaggtttccttgtggcagactttgtagactgtgttaggttttgtgccctaaatnnnnnnnnnnnnnnnataatcagatttattagttaataaagatcagaaataaagat

SEQ ID NO: 75176 - DNA, 884 bp, Cannabis sativa
actttgccaatgttctggaaaagaacataacacttatccaaggtgtaagtatactttatcattgattatcacataaatgtaaatccaagtcactgctgaatcaagggacattatcttttgaagcatataatcacaattaccttccagtgtgttgacatcactctaattgtgaataactatatgttctggactaaacaaattttgtacacatgaaaccataaacataaaaactacatgtgtaacataaataacttctaatcttctattgataacaaattagattagattaaatgggttatatttagggcataaaatcccaacaataacacattaaacaagtaatgaaataaaatctgtttctttattgataattgaatagaaaagattgtattgaaatagagttttatttagggcacaaagctcaacaactatatcctggtaaaatattcccaacaactgtcctcaaagccatggtaatgatttactttcatgaaatatagatttaaaacgatgaatattgtttgtgtgttaatttggatgtgctcatgttggtttatttgataatttgatgattgaatgtgatttacaaaaattttccatgaaaataatttattttacgttatgaaaataatttatttggattccttgtgaaaaattaagcaactttctttttcacggaactcaattccaataagaaatgagaaagttatgaaggtttaaaaaatcaggtgcatgtggtgtccaagatggtgctccttggacaagatgagtgaagcccgcgcgggtaaccacctaggtttaggttagaattatttggcactaaaataatgaaaaataaatggtaattgcttagtgtggccggccataggatgtggattgggccc

SEQ ID NO: 75177 - DNA, 1131 bp, Cannabis sativa
gtcccttaacgaagctcttagacagaaggccctctattggcaaaaaagatctcaggtctcctagatcaaggagggagataagtgttctaagttcatcttcacctctgccacaatcaaaaatacaagaaatgagatcggggctatcatgaacaaagatggagtgtggctgagcaatagaagagacattggtaacgaattctcggagtttctgggaaccatttttaaacaaacggtccatggaccgttggagaggctggaccacctgacttcagaccatctgaccctctaggagcaaacagacttggtaagcattccgaatttcgagtaaattagacaaaccctcttttccatgggcagtctgaaagccccgggtccggatggtatgtctgtactgttctataaacactattggaattctgttggtagtgatttttgtgatgctgtggaggatttctttctgtctggctccatgcacagcggcattaattctacgaatgtaatacttatccctaaggtggccaaccctaagaaagtctctcagtttaggcctatctctctttgtaatgtggtctataaggtcatttctaaaatcattgctaatagaattcgaccggtgctgcctagactgattttccctactcatgcagcttttgttccgggtcgaagcattaatgacaataatgtactggtccaggagattattcactcgttcaagcgtaagaaagggaaagtaggttttttcaccatcaagattgatctggtgaaagcttacgataaacttagctggaactttattgatcacgtacttagtagctttaaggctccgaacatttttcgtaagtggattacctagttcattactactacttcctttaacatccaccttaatgggggaaaggttagcagtttttctcctaaatgtgggttacagcaaggcgaccccctctccccgtacctattcatttgggctgtagacattctttcccgcatcttggaaagggccattgacacgggcactattaaaggtatcagattgagtaggaatggccccaggttgtcccatcttttctttgcggatgacctgatttttgtgggtggagcaactattgacgaggccaaaggctattggag

SEQ ID NO: 75178 - DNA, 588 bp, Cannabis sativa
  modified_base (422)..(434): a, c, t, g, unknown or other
gttttaacaattaataataaaatattaatatgacataaataataaatattaaatagtatgtcttttggatttttttattgaattgaattaaagataaagttaaattagtaaaattagtttaaaaaataaaaaattagaaaaactacaaaatagagaaagtagaaaattagaaggagatgaaaccactttaactttttttagtagaaaaatacaaattgttttaacaattaataataaaatattaatataacataaataataaataataaatactaaatagtatgtctttcgaatttttttatggaattgaattaaagatgaaattaaattagtaaaaatagtttaaaaaatgaaaaaattagaaaaactaaaagaaaaagatagatgtatatattttgttgaataataataataataataannnnnnnnnnnnnaataataataataataataggtgttataaatggtgtgagttataaaaattaaaagatattataatttaatgatacaaaaatatatgttttgtataattaagatgagagaaataatataaaaaaataattaaaattagaaaaaatgagagaagaa

SEQ ID NO: 75179 - DNA, 693 bp, Cannabis sativa
tatagttagccacaacttttttttatttttaatgacaaattttgttgtgactaaaagtaagattttttatattgaatgtgtaaagatattttctaaacagtagaagaagatgagtttagaagttattatagttattgggtgatattgcatgtattaaattaagagaaatgatgaaaggtactagctagtggtgttactttacgtgttttgatgtaattaagtatcagatatatatatagtttaatgtaatagtttttaaagagtatcgttaaccaattgcaacgtctaaaaagtattaaacaccactgtaagtacccaatagcaatgctcttaaattagagcattgagaatataaaaagcctcctatatatctccacctgactaattaaattgatgtttttagtatttttttaaaacaaaaataaaaatataataaaacaattggtctagattagataattagataattagttctgggagttagattttgatattgttatagtatgatttaacatcctttcatagtatatgagattattttatatatatatatatataaatatattgatgtaagcaaatagaaatttcctttaattgatagccaaataataataataataataatttggatcgatgatcattataatacttcaattttattatgcccacacgaaacacacaacaaaataaata

SEQ ID NO: 75180 - DNA, 802 bp, Cannabis sativa
taataaatatattaattttaattagtaaattattattgaacagttacacggttacttaattttaaaattaactactaaaataattaataaactattgcctataaccttatattaaaatttagttgattggtggttttaaaacaaatttagtaatttagtctttgagaaagaaaagatataattttgttaatgttaaagcaatttttttgttgattaataaatgaatcttaattgataattaaataatattgaaaaatgactgtaaataatatagacaaataagttttacgtgattttgaagttaaattttttataatttacaagtccatgttatttttgagtattttgtgtatacataatacaagtatcatataagtattgatggtaagaatctttagtatcttcaaattggtcgttcttttgtctagtgatttctacccctatttataaggatcaagaaatttgattaattatgtatttatgggtcaaaattatttttttaaacttaaactattcaatattggtagaataagtcatttttcttaaaatcctattctcccatttgaacaatcatctctctctttctaaacacgtatacggaagagcacacaattagaccacccacatgacccacgactcacggaccacctcgacctcacgcagggccgtctcaatttttttttttttttttgaaagaactgtctcaaatattttagagtccctgttctaatattaaaaagtaggccctaacaaaaaaaaattataatttgtaaataacatttttaaatattattatattaca

SEQ ID NO: 75181 - DNA, 595 bp, Cannabis sativa
ttttttatttgatttaattttatgtcttcttgcaaaagtgtattttgtcattcttaaaataaaataaatttgaagcaaaaaatatgaaatgggaaaataaaatgtcaactaagagtgttcgcgatgcgggtggtgcgggttatagcctttttttttttaaaccaaactgcatatgcggtttttgtaatttctcaaaccgcaaccgcaccgcaagatcttaaaaccacaaaaactacactatgaaaatgcagtgtggtgcaatgcgatttaagcgatttacactatcataattatcaaacattataataaaaatttataaattaatctaataaaattttaacaacacaaaaaaacaaattattaaaattttaccattataatatatatactaattatcaaatcattttattagattgtctttaaaaaataatgtaatatacacatatattatatatatttgttcttctatgaaaaaatgaataaaaatcatattaaaaagttggtaactttgtaatatatagtgcggtgcggtttgaactgcaaatattaaattccaaatcacaaattatactacatcgtgtgatttggtaaaatg

SEQ ID NO: 75182 - DNA, 1032 bp, Cannabis sativa
tttgaggattttgaagcattcatcaaatcaaaatcttctatttgccctgcccccccccaaccttcctagatttgacgagcacgtcttccacatatacttccatatctcgtccgatctaatttttaaacattttgtttactagcctctggtaagtagctccaacattcttcagactgaacgatgttactttaaaatagtatagacccatatctgttcagaaatagtcgagtagatgcattttgatttggttataccctgaataggggtccataaagctcaagatttcatgtccggttgttgcatccatgagttgatcaaatcttggaagtggaaaatagtccttgggacatgccttgttgaggtcgctaaaatcaatacatactcgccattttttgttcggcttgggcactagtatggggttagccacccaaggcgagtagaaagcttcaatgatgaacttatttatgcatagtctttctacatcttctttcagtgcttgtgcccattctttgtctagtagtcttcttttctgctagacgggacaaaagtttgggttaatgttcagggcatgagacataacagtgaggtcaatactaaccatatcctcatgtgacagaagtctcaaaattttattaaagctaattttattttgagcagcaagcctttaccgatttttagtttcttggtcgggatatctggattaatttccacttcttccagttcttcaattggcccaacatctttaataatttccccaagttaaagatccatgtctttgtccccgccttgggcaatttcttatggggcaatgattttcccttttttttttgaactctggctagagaggtattttccttcttgactttagttacagcaacgttatagcattctcatgtaattctttgatttcctttgagatattccactccactttttgttgggaaaactgatgtgacaacttttaagtcatatagggccggtcggcataacatgacattgaaactcaaagggacatcaattatcagaaattgc

SEQ ID NO: 75183 - DNA, 844 bp, Cannabis sativa
attagtaaacgacatattacaaatgttgattccgattatttttcatttattctgtttacatttttccattaatttattccaattctgaatactgtacagtaaatgtgcatactttcacatcacttacaaatatattattttattttatttttcttttacattatttttggtatttttttattctaaaataatcaataataaaaattataaaaaaatattatattattatttaatatatattaaatattttttttttattttataacaaaataataacaataaaataagaaagaaaagatgtaaaagatgctatagtatggtattcttttgtggtattcttttttatttcaatggtaagtatcaatcaaaaaatattaaatatatatatatatatattattaagtatctccattggagatgctctttaagagatggaaaaaatgagaaatgagaatcagtgtcaatttgtcgtatctctattagtacaattaaatattaggtctcataaaattaggcccaacttcaggtataggtaggctaggcctgtgccagaggccacttaactcaaggacccaaaaaaaatttatccccttttaaaattatacattttctttatttattttaaaaaaatactattttttttttctaaataaaggcctaaaaatatttttttatctatgacccattaaatttcaggatcaaccctggatataacttaagataataataacttttaaaaaatattgttaactaatcgtaaaacattacccctaaatggtgctagatactattggtgtctaatagtaatactttagagaaagagaaatgctacaagacacaagtg

SEQ ID NO: 75184 - DNA, 1852 bp, Cannabis sativa
  modified_base (27)..(40): a, c, t, g, unknown or other
  modified_base (924)..(925): a, c, t, g, unknown or other
taggatgttaatcaaacatacttggtnnnnnnnnnnnnnnctggtaaaataattccaacatcttctgtggggtctatgaagcgcacaggttcgactttcacttggactaataagcaagataataggatttttttctcgaatcgaccatgtatttcacaatgaggagtgggttgattattttccgaatacttttgctcatttcacttgggagacctgttctgatcactgtctttgtgtggttcattcggttgctacaaaaagtattggaagcaaaccgttccggttctataatttctggattaatcatctggattacaagaacattgtgttagatagttggggcaagcctcttagatgtggtgggttgaaggagatttatttaaaaaccatgaggctcaaacacaagctaaaagctttcaataggcactcgattaggaacattggagatgcttatgagaaggccaaggataattacaaagaggctcagttccaatgtcaagcaaacccgaacaacaatcagttccttgaattggagcaggcggctgctaaccaatttcacattcaggaaaaaatatacttgaactttctccaccaaagaagcaaggttaattggattcaaaaaggagatagtaacacaacttattttcatgccatgttgaagaagcggaaggaagataacaggattgtttcatttactaccgagcaaggggtcataaatgatcactttcctgatgttgtgcaacactttcttagacattttaaaggcctaatggggaaagctaagcctaccaccatggagatacaacctgattgcatagccacgggctccaaactcacccttgatcagcaagttcacctcttaaaacctttctctctcaaagaagtcagagccgtgatgtttagtatccctaatactaaatctcnnggccctgatggatttggttcggggttttttaagtcagtttggcctgaggtgggaaaggatatccatagggatataactcattttttgacactaatcagttcttggaagagctccatagaacaactctctctcttatcccaaagattgatagtccttctaaagctatggattaccggcctattgcctgatgcactacattatacaagtgtgtttctaaactgatttgttcctggcttgctaatgtgcttcctgctttagtgagtcagaaccagggagcttttgtcaagggacgatccattgcttacaatattctaattcttcaggacatcttaaagaactaacgaaggaagaattgctcccctagatgcactatcaaaattgatatcagtaaagcttatgatgcggttaattgggacttccttgaaaagcatctgctggcctattgcttccctgctaagtttgtcaagtggatcatgaattgtgtgagaaatacatcttattatttactactaaatggtagaattcaggggtcttttaaaggagagcaggggctaagacaaggggatcccatctctccccttctctttgttcttgtcatggagtatctttcccgaaggatccaacaagcagccagagaaaaggatttcagttaccatcctttatgcaaaaaaaaaaaaatgaaactcacaaatctttatttcgcagatgatttagttatcttttgtaaagggaatgagggctctttaagtgctatcaagtttatgcttgatgagtttagcaagacttagaggctttccatcaattttgctaaatctcaagtttactttggtggggttgctcaaccgattcctctcgcccaaaagataaatctttctatcagtgagttccctcttaagtatcttgggatccctctaagaccaacaaaat

SEQ ID NO: 75185 - DNA, 1020 bp, Cannabis sativa
ttgtaaatggcctctcatgtgtttaatttagagagtcactagtgagacacattgtaaggagcaagactccaatgagtgaagggttttgaccatggttttgtaacctttgatcagacataataaagttcatctccccatccaatttaaggttgctttctcccgtggattaagctcatgatcatcttgattgtgtagcccaaccacgtaagttcttggggttgattttatgctttcatttgttgttattgttgctagtttatgttgcttgttttatgttcagttattgttcttgatcattgagttctgttttttgtgttgtgttggttcttgtttggagtttgagactccacaaaattatataaatttatgataattaaacttaaaagtaaacaaacatttgttgtaaccttcttgtttttgccaataattttaaatttatttttttcacaggatgagtctacttctcaaactcttgtttttttttttttttttgttgtaaaattgacatcaaccaaatctaatctcctccaacaattgagtcttgctctatattgacatcaaccaatatacacatttacaaacttaacgttcaaggactaacgttctcactaaggttggcgtttgattagaatgaataaaaacataggaataaaaatagaaataagaatagattttagaaatgaaatggaataaaatttaaaatgcataaaaaaaaaatttataaaaaatcattacatttttatcatgttacattagaatgatattttttttctatttcaaaatggaatagttattctaccaaaatgataaaaagtgcattccattagaatgatattccaatactttaaaatacaaccaaataaagaaataaaataaaaattatttcgtttctattttattccattttattacttctaatcaaatatcacataaatgtataacaatcaataacaataagtattgttgccaatttttttactcaagcattagtgccacaacactaaataattattaatacca

SEQ ID NO: 75186 - DNA, 1120 bp, Cannabis sativa
  modified_base (298)..(299): a, c, t, g, unknown or other
acctaaactcaatgacatacataaggaaatactctctgccccttactctgctgaggaagtgaaagaagctgtattctctatccctgggaacaaggctcctgacccagatggttttggtagtgccttttaccaggattgttggcaaatagttggtaaagagattgaggaagctgtattatcctttttgaattctgggaagattctcaaagaaataaatgctactaccatcacactcattcccaaatcagtttgtcctaaaagtgtagctaacttcaggcctatctcctgctgtaatgtnntatataaggttgctaccaaggttatctgcaataggcttaggaatatcctttctgatcttattgcagaaaaccaaggtggctttgttcatgggagatatatagcacataacatcttggtttgtcaggactggtcagattatatggaaggaagcattgtaagcgtagttgtatgatcaagattgatctaaggaaggcctatgacactattgattgggactttttggaggagatgttaactgcatttgagtttcctatgcaattcatacaattaattatgagttgcattaggaccccaaagttttctcttctccttaatggttccgtgtgtggattttttgaagcaaagagagggttaaggcaaggagaccccatgtcccctcttctttttgttcttggcatggaatatttgtctcgaatatttaagaagattggggaatggccaggattcaagttccatgacagatgttcatctcttaaactgaatcacctctgttttgctgatgacttgttggtgttttgccatggggactttatttcaataacgctcatgcttaaaggcctgaaacttttctcttcaacttctggtttggagcctaatattcagaagacttcggtgtattgttctggaatgccagaattggaggtgctaaggattttagaagcatcaaatttctctagaagcacactacctttcagatatttggggataccgatttgttcgaaaaggctatctagagtggaatgccaagagcttctagaaaaaatgacaggaaggataagaatatggagttctagggaacttgtcttacatggggagagca

SEQ ID NO: 75187 - DNA, 802 bp, Cannabis sativa
tctccaccagtacgtcccctcttatgatatattccctgatgatgtggtatttcttctcaatttgtttgattctcttgtggcttcgaggctctttactgttggctatagtgccagtgttgtcacaaagtaaaaccagtggtttttccattgcaggaacaacaccaagttctgtgtagaacattcttagctagactagttccttagtagcctcagtgaaagctacatggtagagtctgatattgtagattgcttgacacttctccaaataagtgctccaccccctagtgtaaataccatccagaatgtagacttcctttcattaagacaagcatagaaatctaaatcggtatagcctactagatttaaagcaccagccttgtggactaacacataatgccttgtatatttcaaatatttaagaatatgcttaactgcagtgtaatgttcctcccctgggtttgtgtgatacctgctcacaattcctactacatagcaaatgtcttgtctagtgcataagataacatacattagactttcatctgtcgataaggaacctttctcatgtcttctatctcttgggatgagtgggacattgttccttagatagacggataccaggcctagaaggcataacttcccctatggtgttagtcattgagaatcgctctagcaccttatcaaagtaagctgcttgcaagagagcaagtgatctgttctcttggtttctaattatttgaataccaagagcattaccagcttcacccaaatctttaatttcgaattgagtgttaagccattcctt

SEQ ID NO: 75188 - DNA, 946 bp, Cannabis sativa
attgatatatatttctagaaatttttatggtaccactccgagaaaatgagtatagagaattaatagatagttttaattttaattttttcttaggatatttaggatttttaattctcaactatgacctatgtattattgtgtctttaaatttctcggctagataaaaatagctcataaactattcacggtgttgtaaatatagtgatatctatgagaatggttgatcaatatcattttaattaatcttaaaaatgtaaaaaattagcctaatagagactagaatttacattttagttttaaaaaaagacatacttaatttttaagatagatatattcaaaaaatactaatatcagcattcatcattacaaatatggctaattaagaattttgtttcctgaactttgacatgtaccaaatcatgctctttaaacttttaaggtcgttaaaaatgctccacaaactattgagatggatttaagggcttttgtctaattttagtaaaaatgtctaacatagatgaaaattcaaggggcatgatttagtacatttcaaagttcaagaggtatgatttggtatatatcaaaatttaaggagcataatttaatacataaacaatcactaaaatgataaaactgaatgaaattagacaaaagtctttaaatccaacaatctcaatagttcatggggtatttttaacgactttaaaagttcaagggcatgatttggtacatatcaaaattcagaaaataaaaatcataattagcctaaacatattaatttttttttattttaatagtttctcactattattatattatactaataatagtacatatcaaactgtacaaattaatataaaattagatttaatgtaataacattaattgtatattacattatttaaaaataaatttatttgttcaaaactagttaattgtataaatt

SEQ ID NO: 75189 - DNA, 1225 bp, Cannabis sativa
  modified_base (235)..(236): a, c, t, g, unknown or other
tttttgttatacggtatattttgttatacggtatatcgttatacggtatatcatttttttttaaaaaaaaattatatttaagttctattttctattgtttaattgacatgacatataattttattagcattctacatatttttacttttatttgttgttattatatatattactattataaagtatatatttctttgttatatgatatataaattttattgtatagtatatcatnntattttagatcatgcatgttttagatcatgcatgtttaatcatgcatgtttaattttaattttttaattttaattttattattttaattttattatatataaaggtgatatataattttgtaagtatgttagaattattttatggtcgtatataattttattaatgtagtatatataattgtttttaataatattatattattttattttttattgtagatatacatattttgttgtatgatatatgatttttgttgtgtacagtatatcattcatttaagatgaaatttagtttctattttattatatataataattatgtataatttttttggtatgtttacatattttaataatggtatatataattttgttagcatgatatatattttttaagtattaatttagtattattataatttttttgtggcatataattttgttactatggtatattagtgtttaatgatacgatatatcaaatattgttgtatacatttattcgtttttcttacaatatattaatatgctgttatcacattttttgcattatgacgtggcagcacatgctggtgacacgtggacctgattccccatatttggctgaaagagatgttccgaacacgacacagcatacacctgcacggataatgtctccccagcgaagcagtgcatcaatacttagcaatttcagaacttgcatcatgaagcataaaagcaattcctataaatttgggattgtatcacagagatatggcaagctgtccaaattccacaatctgtgtattctaaatatgtaatatatgttcttgttgggattttatgccctaaataaaacccattacaatacaatctgatttgttatcaataaaagattaaaattagtcatttatgtttacatgtatttttcatgtctatagtttaatgtgtacaaaatctgttaaatccagaacatatagttatccacaattatagtgaattgaacacag

SEQ ID NO: 75190 - DNA, 666 bp, Cannabis sativa
  modified_base (158)..(162): a, c, t, g, unknown or other
gtttcgttcttcaatctctcggaaagaagaagaggtccctagttgatccgtgtatttaacattttttaatgttccttcttctcctctgctttttctctggcctaggagttgagctcagttcaggcccttgattcttgccgctcatgccttgccttttnnnnncttaatttagctaatctgctaatcatgaatccccgtgttcttatcttgcacggctcgttctttgagctctgcttctcccttcctcctctccttgttctaccgtccaaaataaggccgtatggagtatagacaagtggtaaggcattagtttttggtaccagcatgcaaaggttagaatccttttactccagattatgaacactcgatcagatctttcaagaacgagctaaagactacaggggaagcaactgactacagtccctgagcccacaagccaaaagttttacttgaacctacttggctaagagaagacatagaagggaaagacagacggctggttggacccactatcttgtctttgctaggattggtagatacgcgactgaaagaagctagctaggcaactaagggaggcagagaaatctttgtgtgccgggtgttgagctgacaatgaagtcagtgtccatgttccaccctctattcgtcaattcaccctaccgcctt

SEQ ID NO: 75191 - DNA, 1544 bp, Cannabis sativa
taccttgtctttgattatttcaaccaaatatataggtattttcttaagaaaaaaaaaaattaatatttataccataaactaaagccgccattcaacaccgctgccgccgagcccttaaacccacaaaaccttaaaatcaaaaaattatttttctaactttaaacccacttaatcctacacaattatataaattattaataggtttcaacaataaatccttaaacaacattattttcggattgaaattaaaggttagaaatttttacttgatttttcaatcaccactaataaaatttttgagcaccgtcgttgattttccggccaacaccgtgagtatccaaaccctatacaacacaaaaaaaatcaaaatcataaaaaaaaattagcaatttcgccccctgaactttcgacaatactgattttctctcctaaaatatacggctcgttaaaaatccccctgaacttttacatttacacaaatttagtcattctgttacgtttcgtctcattattccatctaaatgctaacgtgtcttggtaaattatgaactttgccccctaaattttgacaactatcaaatcataccctctcaaaataaaaataaaaatattcaatattttttttttagttaatcttaaaaaattaatttagatcttaaattacaaatcattttaaatgattaagaaaatatttaacaaattaagcgacttaaaaaattatttatttttgttaaaaaatctattgagatataaaaaaaatattaaaaattcaatttttgtaaaaacaaaattttacatgaacaagtttgagtctattttttttttccaaaaatttagatttgttaaagtaaacataacatttgtttagtttgatttctaactcttttttcttcaaaataattttatatttttatcgaatttttaattatttttctttattttttaagatatgagtttataaatataaataagcttgattttttcttcaaaaaattttagtttgtgtaaattatttattgaattttcataattttttgtttgattttctaagatacgtgtttataaataaaataaagttttaaaatatttttttttaataaatttatagatttttttaaataaatttaatatttatttattagttaaatattattaggtttattaagaatttttgttatttttttccaaaattaatagaacattataatttttaaaattattttttaaaaaaataaaaggtgaaggaattttgtattggtcaaaattttgggagtaaaaacactaaattttaatggtaaaagaaacataacataacagaaatgatataattatgtaactgttatattttaggaagaatttttaaaagaccatatattttaagagataaaatcagatagtatcgaaagttcagagtgtaaaaatactaattattcttatttattcgatttgtacacttgcacataatactattaaaattatttggggactcctattttttcaaaataaatttaaaaaatatacctaaatgcaaaaaaaaaaaaaaa

SEQ ID NO: 75192 - DNA, 854 bp, Cannabis sativa
caatttgtctagagtggtaccttcagggagcattgcttttgtgcgaagagagaaaggaattcctcttggaagccaagcatcttcattgattcgaatagtacaaccgtttccaacacaccactgagaacctttaaataagatctgcctaccccaaagaatgcttcgccacactgttgacccgtagtgtcctagactagcttccataaaggtaccatgaggaaagtagagagctttaatcactttagtcattaaactatttggttcggtcattaacttccaaccttgcttagccaacattgcttggttaaaatcttctaaatcccgaaaaccaatgccaccttgctccttaagtctacataatttcttccaattaccccaatggagcttgtgtttattagaggtagaaccccaccaaaacctcgcaatcatactctctatatccttgagaatgccttttgaaattctaaagcaactcatgatataacaagggatagcttggatcacagctttaatcaaaatttccttccccgcttgggagaaaagccctatcttccaaccttgaagttaagcttccaccttatctctaattatgccaaaaacttgctttttattccttcccacaaaagaaggcatacccagatatttagtatgatttttaaccaatgaaacgcccaagtaagcagctagattctccgccatggttgtgtcgatcttgctgcccacacacatttcagatttctcaaaatttatacattggccagataatttttcatacctttccagaacttctttgatcgccttacactcctccatagtagcatctagagagaaaaggctatcatctgcaaagaata

SEQ ID NO: 75193 - DNA, 1137 bp, Cannabis sativa
  modified_base (1083)..(1085): a, c, t, g, unknown or other
cgcaccaaggcacaacaagggcgtgtgagataatcaaaccaaaagctagtaaatttgagaaacccaaaagtctacggtctgcctaaaccctaaaatttacccataagaaattcaaccctaaatcgctaaaaacagataaggagataaaggtgcaaactaagaaagcaatgatcaaagccataaataagaaataaacagcatgtaagaaaacaaagaaagaggatcacttactgtttgaagtcgatttttagcgtgatgaatggttctgcaatcgacggtacaacgaacagtgtggtgatctctctgaatgcttgaggtcaaaaatcaaatcggacaaaactcgcaagaagaatgttaaagtcagagatggcatgcaaagcttcaaaaagtctaggtgtgggtttttgcagaaaagctcgaaaaatttctagaatttttgaaatggcaaagatattgaaaaggtggttccttttttcgttttataccattgacttgatttccgtcagattaaggagataattgatccaatgggtaaaatttaaaaaaaagtgcaaaagatggttattaaatgctgatgtgcctcgaagccacaaaactgccaaaatcagaggacatgcgtttttttaaaatgaatcatggaaaaataccctccgtgatcatttagaaagcaccttttcactgaaaaggactttttaaggagcaataattatgcccaaaatttggctagcacttcagaggagaacacgtgtcaaccttggagaatacgaatcaatgaatataatgacaattatattaaaggatattaaaatggaataactcattaaatgtagaattaatagggcatatctataacttgctgaccgtatagtcttaagcgagtcaaggatgtacgaactattgattcacgcattgacgagaaaccgtttcgcgttaggagacacaatcataaggatgacatcaataatgcatagcgaggcaccaacctcgctacgtataaaaaggtgatgacgagacatgttgactgatagaacacctagtgtaaaatatacactgtactaactaagtatcacagctggaagaacnnnagtgacggatagcgaggcatccatctcgctataggaaggcatactcatggaa

SEQ ID NO: 75194 - DNA, 629 bp, Cannabis sativa
atatcaatattctacctaaagttgattttgtcaaaaaaaaaatatattaagtatatataataattatacggattggtttggtttgaaccgctactgagatttttaaaaccgtgactaaactagagaataaaaaatagtccgaattgatcaaattattcacaccagattcttttggtcggatctcaaataatagtttggtccaaattgattagggtttagaaccacgaattacaaattatatgaacacccctaccaccatccaaaatcttcttcaagcgcttgaacaatagccatagccatgatcacaacaaaacccacaaataggtcggtgaaccatggctgaagaggagaaagaaaaacactggtggcgataatacatgcatgcaaatttttatatattatttttgcatcaatgtataattaatataaaccatataattagatttaatgtgaaataatctttatttaaaattaattatgtatagttaaaattataagaaaaatcaccaaggtgtgctacacactcttattatttgttttgaaatctaagagaattttttaatttattttaatattatgatccatcgtgtatttttagttatacttagaatcatctataaatttttaaa

SEQ ID NO: 75195 - DNA, 831 bp, Cannabis sativa
  modified_base (294)..(296): a, c, t, g, unknown or other
aacgataataaccaaccagacctatgaaacttataacttctgaaactgtctttggtcttggccaatccctaacgaattcaatctttcctggatcaaccttgattccatctttactgacattgtgtccaaggaaagacacctgaaatatccaaaactcgcacttctggaattcgacatacagtgtatgttctcgtaatcattctagaaccatctgaagatgttgctcgtgctcctattctaattgagagtgtataaggatatcatcgtaaatacaataacacagatatcgaggannnccttgaataccctattcattagatccataaatgttggaggagcattggttaatccaaaatacataactaaaaatttatagtgcccatacctagtgcggaaagctatctttagaatgtcctcctcttggattctcaattgatgataggtcgattggagatcaatatttgagaagaccgtcttctcatgaagttgatcgaaaagatcatcgatcctaggtaaaggatgcttgttcatgacagtcagtttattcaattgtcggtagtcaatgcacatacgcaaggatccatctttcttcttgacaaataaaacgggagctccccatggtgacacactaggtcgtggaaaccctaggtgaagcaacccctgaagctgaatttttaattttttaagttctgctggagccattctgtaaggggccttagaaatcgattctgctccaggttccaaagaaataataaaatcaatttctctctgtggtggtaaacctagaagctcatcaggaaaaacatctaaaaattcctgaaccaccctgat

SEQ ID NO: 75196 - DNA, 681 bp, Cannabis sativa
attagtgctgccttgcttgcctaccacaaattcattagatatatttttatttttttttcacaataaaaacgagttattattattattattatattttaaaaaataaataaaatgctaagtgacaccctaaaatggtggcatgctatgtcgtaattatagaacacactacaacaaataaaatattttgggccactaaaaatctcaaattggcttctaaaattatattagagacaacaaattattgctaatgtaaagcctctaaatatattagatagtttagtagaaataatgactctacttaattaacataattggctattaaaagtacaacataattaatataccagaaatcttgactattttataatcttttttatgggaatgataatttttacattacaatatttggtatgaaatttttatggaaaaattattacattgaaaacaaaattatccactattggggtaatcttaaatactatttattttgtttttaataacatttcacaatactttatcaaactaaaaatataatcaaattaacagtaatttaactacatattttcatacaaaacttctaattataaatttacatacaatcatattctttgttttattattccaatcaatgacattatttatagtaatattttctataattaacaaattgagagaatataa

SEQ ID NO: 75197 - DNA, 1422 bp, Cannabis sativa
ttataaattattttattaagaatttagttataagtttcatatatatataaatattgttaacatagaatttcgttcacaacaataagattctttaaatgaaatcaaaggaattacttttatagaataaataataataataataataataaacaactcaatttcttaatgagattgtttctcaaagaaagccctctttacttttctatgtaaaacgttttgtgatacaaatcacattaataaacttggttgtcatttggaatttgaggggatattttcggttgatgatgtgggacactcagggaatatcgcaatgttgtggaagaatgctgatgagacaaaggttattaggtattcttggcatcatatagatattgtggtgcgtgtggttggtttagatgattggcgcttgacgggagtttatgggcaagctaattaggtacttcggcacaacacttggtctttattaataactcttaaagatgaatcttcgttgccttactgtctaatggggactttaataatgttatgtatcaaagaggatgagttccttatccgttgtggttggtagaggggtttcaatcggttattttagactatgctttgtatgagttggagcttcatggacatcaattcacttgggagaggtgtagaggaacaagccgatgggtggaagtaaggttggatagggcctttgctaactcaaattggatgtctgggttctattcagctaagctttttaatcttaattttgggcattcagaccattggcctatttttcttgatccggtggttcagactagcggcaggagaaataagacgtctcgatttgaaaatgtgtggcttaaggaggaaatgtgtggattgattgtgcaagacacttggattttgcttcaaggcccgtcaattaatatgaaggttgctacttgtaggcagaggttaatggatcggagaggagaaattattggaaattttaaagcaaggattgctgccactcgggttgctataaagaaactacaggacaggcgcgatgaggtctcttatcagtagtttaacaaagcaaagaaaaatctggcggtaatactagattagcaggaacgccagagatcgaagcaatcgtagctcaaagatagagatcaaaacacaaagtattttcactctaaggccacgactagatggaagaattatacaattcaccaactgaaaaattctatgtgtcaatgggctgtctaagagcatggcttgggaggtcatggtggattatttttccaacattttctcatcatctatcattcaatggtaggagattgttgattgcatttctttggatattacagatgatcataatttggtcttgttgaaagccgttttagatgaagaggttaaagagtcattgttttagatgcatcctgaaaaatctccagg

SEQ ID NO: 75198 - DNA, 736 bp, Cannabis sativa
ggtgatgacaacagatccaattccttgtacactacaggctttattgtttcccaatagaacagtaccccctgggactttcttgaagtcactgaacatctcaatcttgggacacatatggaatgaacaacctgaatccatgatccattcctcttcacaagccttactagagactaccaaaacattagctgatgtgtagtcttgtgaagcaatgtcagcttcacccttactcttgccttgttccctggctaacttggcttttagtgccctgcactcatctctaaaatgtccttctttttgacagtagtagcattttttccctgacttgaattgagacttagattgaccactagacttggacttgttatggtggttcttgaaacctttcttgtcagatctccctttggtgaatagaccttctccattgctctctcctgattcatcacttttcttttgaatttctttcgagttgagggcagactttacatctgtcattgttagtgattattttccatacaaaatagtatccgcaaagtattcaaaagatttaggcagagaggataagagaataataccttggtctttttcatcaatcttgacccctatattacttaattccaagatgatcttgttaaattcatcaaggtgcttccttagttctttgttttcatccatcttcaatgtgtatagcttcttcttgagatacaatttgttggctaatgattttttcaggtaaatt

SEQ ID NO: 75199 - DNA, 711 bp, Cannabis sativa
gaatatgagactcgcatcgatgatcaaatccctctcttgaggctagttcaactctagataagtgatacaccacagtaagaagatatagaaatagaagaaaagagaatgatctttattgataattctagaaaatttgagagttcttgttcctctcccaaaagccaaagctcattcaaaattagaataagcatacccttaacctttactctcgtacaatatattctccaaaacattccaaataaaatagatacgaaattataatcttattaattctaaaataggccatataaatccatataaatccttccttaccctattgcatacgcctatcataggtgtatctgatttgaggtctatcattacccccgcccaaacttaaaaagaaggaaattgatgtagaatgttgttgtaattctcccaagtggcttaaaagagtggcaagtccttccatttgatgagcacttccatttccttgcgaccatctgaatgggtactacgaatacccaataattctacaggttcaaccaaaagctctaaatctgaagtcaaatgtgggggcatcaaaggagaagaattgttgttaccaagtgcgacgatgctgcgaagtatgaaaaataaggtgcactaagtatgtaagtggtaaatccaacttataagatacctcacaaaaacgagacatcaccttaaaaggaccataaaattgtagagaaa

SEQ ID NO: 75200 - DNA, 1335 bp, Cannabis sativa
gtctagtcttctctggggtagggaacttctcaaggatgggcttatttggaaagtgggaaatggtcagaatattcgtactctgcaggattcctggatccctgatcttaggactcttagatttaagggtaactcctctcctccttctgataaagtcaatttttttattaactctaatggttcttgggatttaaaccggttggctatttactttgatcatgacatagttgctaatatccttaaagttcctattggaggtcatgacaaaaatgatttccttatttggaaaggagatccttctggtcttctcacagtcaaatccgcctatcatctcatcaatacttcctctctaccaccatcttcttctaatacaaacttttacaatcgatggtagaaattcttctagtatcaaggtattcctcctaaagttaaaaattttggctggcgaaatttttaccacattttgcctactgcatttaatctttttaggaggtaagttgttccctctccttcttgccccttctgtggttgctctctagaaactgtaacacatgcacttttagactgttccagggcgagacaggtttggaaactttctcctttatatcatttttatctcttgcataggaattctgatgttaaagatttaatgttatctgcatatactgatctgacaagtgatgatttctctttactcatgtgtacactctggtctatttgggagtttagaaacaaaaaacttttcagaaatgctaacccagatgcaggtgatgtagtccaatggaccagcacttttttgtctcaatacagggaagcacaggtcaagaggattgatattgagccagcctaccaaccgggtgtttcatcttcagcctcccaagcaagggaaggatcttaccaacagatgcaaccattcaagatagagatggtaagattgggcttggtgcagttgttaaggactggaatgggcaggttattgctggtttctttgtacctatgttagccaagatcaaacctattttggcagaggcttgggcacttaggctaggcttaaactggtgcagcattatcaagcttcctctctccaaggttttctcagattgccaacagctgatcggcaaagtttccagtcgaaagaaggagctctcggctcttgcagatgtcgttttggacatcaagaattccttatcacacttccctaatgcttcagtctcttacatttcgaggggccacaacatacatgcacatcaaatggcaaaaggagctttagggcttgatgaggaattagtttggaaaaactattatccaagctttctctttgtaacttgagcttattgt

SEQ ID NO: 75201 - DNA, 678 bp, Cannabis sativa
catattattatttgacgtgctcaaaactgtaatactttactcagcagttttaaaaattatttattatattaaattgtgaaattggatattaaaatactttaataataatttgtctattttttttttgtttggttttaagcaccttaaagtcctccaaaacattctcaatagctactctactctactccatcttttaaaatactttataaaaaaattattttttatattttacctcaactcacacatttacattactccaaaaattagattttctttatttttttttaaattatttaagtattatatctttaaatttgtttattaattaaatataatgaaaataataataataaactaaaatattaatttttgtaaagaaaagacaaaacaacaaggtatacaaataatagaaaatatttttgactcacaaattgtttgtagctacatttaaccaaacaaatagctcaacaattcttgagttaaaatactcatttattagagaaaaaaaatatcgagttatagtatagttttaccaatcccatgtaaatatcaggttgtaaatatttaattataatctgcccaattaaaaattaaaaaaaattcaacctgccaaataattttgtcaatttggttggattaactcgtccaaaccgttggttatttttttttatttttttt

SEQ ID NO: 75202 - DNA, 696 bp, Cannabis sativa
tagttattttgtctttaattttttggatcctctttttacttatattttttttctctatttataggcaaagaaataagatatgtttgaattattggtacatcttccctttattcctatgctttacatggccttttttataagtgtataaaatgatgtatgttatgtgtgtaaaaaataagctccaaagtaaacatttggtgaaacaagacttatcttctatgggattgataggatagcacaatttagtcatcaattggcgtccataagtaagtacgatgtcagaacagtgactaaatttcaaagatatcctctttttaggaattaagtttattttgccatctacgctagaagagtcatctacaatactttgtcttagaagatgtgtcagacaccttggtaactctcagatgctatatgatccaagaggctctcagatattcttttagaatttttgttcactctcaaatgcccggtgtctttagaacatttataaaatttgatatgctaatattgatctttcaagtttaccacgtgggctccaaggacaagtggtattttctacttgccacttattttagtaaaaaatatagacaataataataataataataaaaaaggctcttaaaacctgaggcataaagacttatcttccatggaccatggctaattggctagggaaatttgaaattccatact

SEQ ID NO: 75203 - DNA, 984 bp, Cannabis sativa
  modified_base (283)..(283): a, c, t, g, unknown or other
tcaatttttaaaaattcatagctatttcaaattaaaatgaaattaagttctgtaaaaaaatgaattgcttaatttttttccatactatccaaataaaatagttttagatcgtgaatccaattattttacgtaaaaatttcataaacatcaagcaatcatcaataaacacatagatcaacatgaatcacatccaaattacacatacatcgttttaaattcatatttcttgaaagtaaattattactatggttctgaggccagttgttgaaatttattttaccangatctagatttattaacaagtatgtttattaacatcctaaatatgaatttataaaataatagaatttaaacacatataaagtttgagtaaccttacattgattgcagcggtatctaatgactcctcccattcgaatctctaacccttattcttctctgtcccagagtattatcaagatttgagcccgattctccttcaggtgtttggattctttatagtcttacacactatgattgatactagacttgctatgggtggacatacactcactcactaatagctcgaaaattttatgaagaacactaaagagatttcgaaatagaagaagaaggaagaaggaaggaggaggtgtcaaaattctagttggttgacagaatgtaaactaggttataataggttattggataatgaaaccatcctattctttttatactatttcacttagatttaagattgaattatatgaaataaaaaataataaaataataacaaaaataaggacttagttatatgggtcccactaattatatttttgtcatttttacttatttatctattatttcacaaatgctatattttataatttgaatcctataaatatcaaaattatttatttaataatataataaattatcatttatattatttattaattagacttcataaaatcacttaactaacaaatataatatatgtgtaat

SEQ ID NO: 75204 - DNA, 1125 bp, Cannabis sativa
catctcaaaggacaccctttggacgtttatacacttatataacgtccaggttgacgttagatgtcaacttgggcgctgggatgtcaacctagacgttggatgtcaacttgggagttgggacctgaattgcctttagtaaaacaaccataactcactcattttttatccggttgatgcgattcaacttgcattttgaagctatttaaacactctatcaagtcatgtctcacacccatgcataattctgaagctatcatcgtcaaaattcaccctcaagggagttttaaaaataagctctgagtaactcgcagcgggactcatcaggcaccaaaaattggttatcaccaccagaagctaattttcacttttagatcattatcaatggtgaaaaaagttatttaaaatttcctcctacttttgtgggcctcctttacctataaaaggagagctcacttagcttatttttcacttttagaaaactacccacaaggtcacaacttctctatctaggctttctctctctagaatttagagttttcaatacttagtctattgttgtaattaccatctcgtgataaataaaatttgaagtagacatagtctcattactatagcaatataggggtgaagtattataaattgatgtgtctctcttaattattacttaacaaattttttattcttatcaatctagcgagcgagtgtgtcttagaagtctagtccagatttctaattaacaatacaatattaaacttaaatgaaggtttatatatagtttttaggtatttttcttcatattttttgagataacattaaagattaagcgtgtaattggatatctaattaaaaaatcgattcaatccaaaattgtattggattttgagttttaattttagttatttcaaatttttggttgcattaaacttgtaaggatggtatatttatacaatattaaacctaaatgaaggtttatatataattttataggtatttttcttcatgtttttaagataatattataaattaagtgtgtaattagatattcaactaaaaaactaaattgattggattgaattttgagttctaattacattggatcaaatgatgattttataaatttaatta

SEQ ID NO: 75205 - DNA, 505 bp, Cannabis sativa
ctatcttcgtacatctttatttgggcagcgaaaatcctctcgcgcatccttgagcacgcccttgataacggtacaatctctggtataaagctaagccgagaggaccccaaactctcccatcttttctttgccgatgatttgatccttattggcagggcaaaccttgatgaagcaaggggtatgtggcattgcctggaaaagttttgcgattggtctggtcagagaattaacaagctcaaaacctccatttcctttagctgtaacacaagtgatggtatgaagcgaggcataaggcaggctctgggattgaactgtgaaatgggtaacataaactatttgggcctctcgctttttagatcccgccaaaaggatgcggactttaacttcatccttgataacctggtgtcaaaactccacaggtgaaaattaaaatcggtatcaaaggccggtcgtgctacgttgatcaaatcggtggggcttgctttgcctgtttacacgatgcaga

SEQ ID NO: 75206 - DNA, 712 bp, Cannabis sativa
tattttttatttacacttttgacaataagtattacttactttgtatacattaaacaatagcatcactttggagtgaaccacataaaatgaaaacatataattttttgataactgaaaacatataattgatatgaatgagaatatgaagtaacatattcttccgacacacaaggccatgtgttctcacgtgacaatcatccctaaaacactggaaccagattgaccccatctcctgctttggcatatgatatgatgtgtcagctactgtttctggcacgtgggaatgtttggcaatacaccagtgggcctggcccagtggacccaacttaagttgggcttcgtctagttggtctaagtccaactaagacaaggatgggtaaaggtggtccaggcctcgaaggatgatttatgcaatgtttatgctaatggttcacagaatcaaaaattaaagggtttattacattttggaatgagaaatggaagtaaacgaccctatttctaactctatagatagttaatgtttttttttttaaaataataaaaacaaatgcccttttttactttttaatacctaaaataccattcattatataaaatgtattatatgttttattcctctaatagaaattataaaaaacaacaaatcaaaacctctctattgaatttttgtcaactattttttcattatataaaaggtattatatattttatt

SEQ ID NO: 75207 - DNA, 696 bp, Cannabis sativa
atttcataacatttgaattccatcatcaattgtgtaatatctcttttattacacaaaatatgatcaaccaaaagaagttacaaaataattaatactgtaactcctctccatattacaaagtgtagattacaactttatattacataatttatttaccaaacatttaatatattattcacataataatatatattaccacattttaatctacttttattatattataaaataatataatatttacatttatactttccctatcaattttttttttgtttattaaagtttgtagaaagccttaattttttattttcttatatctctttgtgtttttcagtaacttctttttttttcttctttttcttccgtcacattggcactttttttttttcttctttctttttcttaagttagtgttggttgactttttttttctttctcttatctctctatttatcttttataaaattttattttattattttaattaaaaaaagcctcttattatatttcttttttctttttctcttttttcattttcttactatcaacactcaaactatttcatactattttataaactaatcatatttaataaaaaaatttaattaatttcttttaatctttactaaaatatgattcttttactttcacacattttctcatttttttaacttttctctctctctctctctc

SEQ ID NO: 75208 - DNA, 821 bp, Cannabis sativa
tttatcttttatcagatactatcttaaatttagatttaaattgatcaatttaagataatatcttattttataatccaaatttagtttcctattccaatttggaaactttaaatgataatatatgtgcttgtttaaaatggtcacatcgtgagtatatatatagatcaaagcttgtcatttaattttcaccagactctttaacccttcacataacacatacgcatatatttataggaagaggagagttgaatttagttgaccaaacccattcttacgataggaggatttagtatttatatacttgaagcacatatatccattataaatttctttggccattatatctcaaatattcttctgccagctcatttatacaaggtacatataaactaaatatatatattatatataatatcagcacatgtaccgagacccacatcaaacctctattttcataattttggtgccattattgaattcataccaatatatatattcacaaagattaaaatttggcatgtatatatattgtatacaatatttttaaaaggaatgatttcttccttgggatcactttgcacatcgtgaattaatatttttttttttttctataacatatatattgagcctttgtttttttttgcttgggcgatttggaatcaacagggttaatcgccaaccctttttttttacagcaacttgtgcagtgaggtatgaatgtaattagtgtatttattatattattttttttcttaaaaaaaataattttgataataaatctgtgaatgaggaaattcattttttttttttgtggaatgagg

SEQ ID NO: 75209 - DNA, 1062 bp, Cannabis sativa
tcgcaaagtaggcaacttgttgcgtttctttccgtcgggatagataactgcttccatcccgtataccactgagaacggagtttcacctgtactagtacgtggcgtggttcggttggcccacagtacgctaggcaattcttgggcccatcttcctttagcgctttcgagtcgctttttaatgttgtttatgatgactttatttgatgactctgcctacccattgctctgcggatagcgtggtgtggagaatatgagcttaattttccattgttcaccgaaacttctgaacttgtggctgatgaactgggaactattatgcgctataatctcctggggcagcccgaacctgcatattatgtttttccagacaaacccttctacttctttgtcttttatttgagcgaatgagtcggcttcgatccactttgagaaatagtcggtgagggccaacatgaattttttctgagccggcgctgttggcaagggacctactatatccatcccccatttcatgaatggccacgggctttcgacggtggtcagctccgttgggggggctaggatggatggagaatgtttctggcatttttcgcatgttcgtgagtgatttgacgaatcctcctggactgtgggccagtagtacccctgcctttgcaccctctgggcggtcactcgtccgccggagtggctcccacattctccttcatgggcctctgctaagattagcttaccctcctacttcgttatgcactttaagtacggcccgtggtaagatcttttatataattggttccgaagtattgtatatcttgacgccctaactacgatttttctcgcctgcttggggtccggtgacaacttatcatccttcaagtattcgaggattggttgtctccagtcttagaatgtgtccgccggaatttcagcgcacttaacttcttcctccgttgagatactaggttccgagataaagtcgaatggtattgtcctcgtaatgtggaggggggaagaggaccccaagccggccaaagtgtcggcatgcatatttgcttcacgggggat

SEQ ID NO: 75210 - DNA, 1737 bp, Cannabis sativa
attaattttgaaatggaatctcattcatcttatcccaaattctggtatcagagccacttgtgatacgttgtgagcccaaagtaccacctgtccaaaaagtcgtttgtgatccgttgtgagccaaagtgctgctggtctaaaaagatgttgtctcccttttaacctttataggtccaatgtgtgtcaatttccagtgtttggatttttgacctgttccaaaatccacaaatttttcgacgtgtgcacccacaaatttctcgatatttagccttgtgggattctttcaaatgtcacgttcggtcctgtggtctcttaaaggtcgttcggtatatccacattttctaagcccagacatgaggagggtgtattagagttagtcatgtgtggaaataaattgtcatatataagatgaatgagctactcctcccattaccaattagttttgagataaaacatcattcatcttatcacaaattctaacaaaaacagctaagaatagcaaaaatagtggtccaacgacggtggatttttaagtgtttgagagctttttctttcagtgtagaagagaaaaggtgaaaagaaagtctcaaggaaaatggttctgcgaaaaatatataacgaactacatcttcggttattccaaataactaaagacacatgcctatgtcttcagttattcctaaataactgaagacataagtcttcgacatttcagctccgcaagcaaagctatgtcttcggtgttaggcctatacaaatttgtatttttagttttttttttatatatattttttataaaaatcccaaaaataaatcatatatttatagtagtagtgtatatatgtcctattgtttgatgaagtccaaaagttgtcgcaatatgtatagtagttattgtcttaggaaattagagaggaatctcatatttataaacttaataccatttatataatcatgaaccaactaatcataataaactaaaaatatacccaatacaatctcctaaaatactatatatatacattataccataaaatgacctaaataagattaatgcaatcaattaatcaactgatcaacacttctgacaaaaattctataatctttataattgaaacattcttcatccttaacatggctctgtttagtactaaggttaaaaatttgtaagtttcccatataaataggaagaaatatattagtatagtagtgcaaatgatcatcagaatgacttgtcaaatccaaattatattcaacataaatttgaagatccaatagatatatttaagatgtgatgagagagctatgattatggcccccactacacatacaaacactatatattatacataaacatcccatgtgttgtccttttatctgtttctttttgggaggtcaatgtatatatattcacttcctcaatgcagagcaatggcctttactgtctcttatttatcagttagctagatgtataatatatatgttgatggtttagggtttaaggattttagggtcattatataatatatggttattctttgattctataaggcaacaccaaacattcagcaactgttaatgtcatttaattaatgagattgtttcagaaatatccaaaaacaataataaaatatttatgttgttacaaatttttggatatttttttttttataattttacagacggttgtttatacgttattctaaaaaaattgttatttacacgttgttttcacat

SEQ ID NO: 75211 - DNA, 826 bp, Cannabis sativa
aattttttattttaatttttctcaaataaataaattatttataaaataataaatatttttccaccaaaaaatattaaattaaatagaaaatatatattaaatcaaaaataatttttttatctttcaatttaatattaatgttaaatcataatttattaaaaataacatttttatatttatatattcacattgatcaattcaatatcccatcaatatatacactactacaatttagaattatagtgacacacacaaaattacgagtcactaaagagttagaagtaattttcagtgacatgcataattagactctaaatatctagggttaatctcatgtattgtggatcactaaaagtatagagtatcactaaaaagtaaaacccaaaattatttaatttttgttaattaaaaaatattgatctataatgacacaccagacatgactgggtatatatgtcccgatccacttagtgcgtcactatatcataatcttaattttttttaataaaaagtacagctattttttttcaaaaaaaaaaaaatatagctattattaataagtaaataacaaataatttataaataataaaaaggaagtatggactgaaaggggatttatttcttaaaaaaatagtaaaataaaaaaaggcagtactgcctctttctctctcgcttgaataaaagaaaaccctaatattgtgtttaacaattatctctctctctctctcaaagctataaccagcagcacgcctctccctttctttctctcaatcagagctactgctcttcttctccgacaaccaacaatactctctctctctctctc

SEQ ID NO: 75212 - DNA, 1432 bp, Cannabis sativa
ttaaaccttttactaataagtagtatgctccttctgtattagttcttggggatcaaagaggacggctacatctctggaagagagtgaaagccatgtttgggtactagattaagagccagagtgtttttttttaaaaaaaaaggcattatattaaaaaaaaaacattcttagatattcacatatcactttatgcttaattgagagagtagaagatctcctctcttcctggaccacatgagatcactgctcacacacgtatggagattcaagtcttagtgatcccatgagtatcattgtggatgggcgtgatgaaatgatctgttgctcaaggtgtgcatttttttaatactcagaagctctactcatgttcattgatcagttgattcctgtttgtttttctaaaattttgagtatctctaagtgtctatttttttatctgatttgtcaagtgtgggttgtgtgcatatattgctggcatatttaaaatatttcaggtcactatactactctcattgcctgatgactttgggtttgtttcgttttgtgtgtcgtattatgtggtggaaattattcaatttgggcgtgtacgttttttttttggcaaagatcttttttaaaaaaatcatcattctttttctttgcatggtcagctggtatcagggagcctatacttaaggcctaaggaaagtgaatagtctcactctttcacgattactctcagaaaccctaagtcctgcaacattcacaactctctctaaaatggagaacaccactcccattgcagtaacacctgttgacatgctcgttcctccattgtcaactactgttgatcctacagtcgccactcaagttgagtctagtatgcctaatctctatcatgacattattctttaccaattggaggttggtgcatctgttcgccctgcgagtcctgagtcaactccgtctccgccttcacctccagtaattcagaaacctcgaatgtttcacggtaaggctgctccactttttaaaaaattagtccaccaactgtgtctaaacgagtaactcgttcatcctcgagtctacatcccccttcttcacctgttcaggctcaatctttgcctaaatagaaacccataggacctcctcgtcctccatctaaggtctttattccttctcaaaccagtgaaagggttcagccaaaaagaaagtcttcccgtgataccacgtataaactacctgaaaagaaatccaagaccaaacccagtccagttccatctccagtctcgtctcccaaacagtcgtctagaggctctaaaaaatccaaacttcctaaagcccctatatctattgtcgacccagcctctgtacaatgctttgttgatgcctccaaagcttctgtttatcaaagatggtttggtagtcgtgagctttggtttgaacaagtggt

SEQ ID NO: 75213 - DNA, 861 bp, Cannabis sativa
cttatcactttattacttgtgtgactgcgtatacttgcgtataataattttcacaacagttagttaaaaactgttaggacccgatatacttcgaatgccaactcataacaggtgagagaaatatttttaatctccaaatggtgatttgacaaagtaaagaaaataaatcccaaatcctaaatgtatccgacaggttaatagataatactaacaaataatttaccacacacgacacttccaaaagtaaatatgtgataatgaatagtacgcttgcatcaaatctttgcttcacacacattttaatatttaaactcttaatcttacaattaaactaatgcgtttactcctatatttgatgctaaattaaaactcaataaaatatttcacactttaatttggattctttaatgggaatatcattatttgggatataaagttgcatatcaaacaaggagagaatctgaagatgcatgcatgggctcttgagataacacctttattttcttatcctgaaatcattcttttcctttattattattatttattattattataggaatacgattttgtcttatgtactttcacggaatgtattccgtggtacattagataggtcttagggtactttagatgggtctcagggtacgttaccatttttaaaccctaattacccctagatcaaccccagctctcagatcaaataatttcctcatctaatggctgtcgtacatcacggaatacattccgtaaaagtacatcactggacaaaatcgtgtccctattattatatattattattgttattatagtagtagtatgtaattatttatctgacaatgtgccacctgcccacagacatca

SEQ ID NO: 75214 - DNA, 1532 bp, Cannabis sativa
aaagacttgtggactaaggttcattaatgccccaaccacgtaaaaatcccaggcattaaacttcctacagctcatcttacattttatttaactggttgccgaaaacgtcagtcaacatttaggtgctttcattgagagctgaaggaagcgtcttcaaacagacagtaaccttagaagttgagacaacaatggtggaaagtcgcaacaacacacgtcaaccccgtcctcctctagatgctcaaaatccagagaacgaggaagtggcctcaagagtgaacgtggactctgaggaacgagatgaggccaacggtgacgagtacgagggaaactttgatgagtacgacgcctacgatgagggcagttatacagagttgttgctattaaggcaaaaggccgctaatcatgaagctgaaatcgcggcccaaaaggagcagaatagaaagatgcaagaggtgctggtcggcatgcaaaaagccatggagacagcagggattcgtatacaccctaaggccatcccgataggactcgaagatacgctggaagaatcctctccgagaacccagaaacacaagagtagggaaccaagtcctatacagaacccttccaaagaaaaccaaagaaaagaccctacttctatcccagggagaaagaaaaaggtgcaggattcgcgaaaggtccactcagatttcctgaaagggaaaggtccgcagagggaaaaactccagaaagggagtcttggccctcaggatcgagaggacgaaagaccgtgtccgtgcaccaagagcccggggagagagggaggggaaaccggagatgacctcccgttgatttaagacggcaaatcaacgaaaagcacggtgatctgtgggaccacctggacaaaacgaagcaaatatcagcggtctccgcggggacactgaatgaaggaattttaccagagttggcaacattgttcaaagacatcgctcgagtctcccgaaggcaaaaaggggatgactcagactccgactgcgaggaccgagagccatgtgcccggcacgtattggaggtagagcttcctaaaaactttaagatgccaagatggcatcatacactagagactcagaccccagcaaccatttgtctcgttttaaccgagtaatgacggttatgagggtcagtattgatgccaaatgtttatgctttccactaacattgagcggctccgcggaggaatggttcaagaaattagaaccaggatcggtggattgctggaacaagttgcatgttagtttccgaagacagtttgtcgcggcgagaaagattaatctcaaagttagcgccttgactaacatcaagcaactacccacagaaaccttgaagaatttcataaagaggttcaaagaagaagcctcgaaaataagaaagttgatgacggacaacaacttgcacttcttcaagccgggatccgtacagggacctcattctagaatgaattacaacaggaaggagctgctaatctccaagacttccagaagagggttcaaaagtac

SEQ ID NO: 75215 - DNA, 1181 bp, Cannabis sativa
  modified_base (1152)..(1154): a, c, t, g, unknown or other
tcaaaaatatgtttagtgatcggttttaggtctcgtgttaatcagatgtgatcggtcatatgactcgatgtagtgttttggtacatattttatgtacatgtatcgttactctaaaagcaataaaaataaaacttggacctgagctaagatgaattaggcacgcgcttaaagcccacccaaaaggaccaaataattttgctgttacccaaagtgtaattagtttcagagtcggcccaataattaactactcgttactaaaaggaaatcatgtaaataaatcatcgaaaatatttaaagagtaatgtaactttgtttgttcgccttaactaaatgtgattcgttgaattataatgtcgcgttttggtgcatattttgtgtgaaaaaataccaaaaaataaacatgtcatgttgaagaattaggtgtaataaaaagagagtgaaaatccaagtgaagtgagtgtttttttacctcttcaacattgacatcagaagcagtaacaccaggctgagctttaccactaaacacaatttcagcagagacttcatcaggttttacaatgccaccactgatactaatatatatattttcttcatcagtttttaatggataaatatacaagttcctcaaaactggtgttagaactcttagaaccgggttttttgggtaccattccttcacttctccggttcgaagatcgaatgtgctctcggttgatgggcaaactatacatccatccttttaaaacaacaacaacaacaaaagtacaatatttaaatacatatacaagatagggtcagatttgagctaaggcgaactagtatcaagtgtattggtaacttaattcttctctttacaaagcaaaaaatgtaaaaaaaagtgaaaattttgacataaaaaattagtaaatgttgatacaacgccttttataattgtactctaatacacaataacaaattaagatgtaaactgacataaaaaaatattatcactttgataatcaataatgaaatatatttttcaaagaaataatgacaattaaagaaagagaaatgttaaagggcaccagtagtgcctaccactgcctaccaccctcttatgtgtcaatattgctattggtccaactaagtatcggatcccatataatttaatannntagcttttagggagtatcgctaactaa

SEQ ID NO: 75216 - DNA, 577 bp, Cannabis sativa
caaagcaaattcataccaaaaattggttgatctaaataaattagtgtaaataattcacatttgaaaaaatagtgatacatttaaggtcatatactgaacactgttatggaacagttgtttatatgttgttctcgtgtattaaaatggttgtttaataatattaaaaaatcgatacgctagtttcatgtatggaatctctgcaaatttgggtacaaaacaatggtcattgggatgacaacaagtactatgttgattgcgaatcaagtgaagaattaaaattaatagattgcacttttgctgaactagtacagataatgatggatgaactacaatgcaaccgtgaaacaacttaaatatacaactgaaacacttaactcaacaaaatgtagtagccaggcaaacaccagtaacaacattgttggagtgcttgcgtacacaaatgcaataatggacatataatagcagaaaagaggcacaaaagtgcacgacaagattgaccccatcctcctaaaaaaactcatagacaaccatgtatactcgttgcaattaactgtaacttaaaattatatgtagcatc

SEQ ID NO: 75217 - DNA, 911 bp, Cannabis sativa
  modified_base (707)..(711): a, c, t, g, unknown or other
  modified_base (799)..(811): a, c, t, g, unknown or other
cgagatatcaaggagcttgtagcttattgacccacataattgggagtaagagcgtgcaacttattgacccacatatttgtacatggagaaaaactacattcatccatctcgcattctacgcgacggagaagccacctcgctagtatcactataaaacgaagagcactgcgaggagaagcatattcgtacttagcatttttttctgtaaagacggtgaagaaggacaactcacatttcacgagaaacaaccttcatagccaacataatcgtttaaggataaagacaaaagattggttttgtagttattaaccattatcccatgtgcataaaaatgaaacatgggaaatgtccacgtttcatgagtagttgtaaatgattagatcctaatgaagataactgtcatcctatacacctaaaaataaggacaaaatccaaggaaaaagggatgacaaacttgagaaattgagagaattgtaatttgtatccagatcatcatccgtattaagaaggactcgtggagtatgtagattttaactgcaaaatcatgtaaaatatttggtgttcatttattattatcatcaattctatagtatatttattacgtaaaaggtttatatatttagttaacgaaaatctgcatattaaaacaatagttaaataaaaaaataaaatcttttattttcatattttttctttttttctttttnnnnntcttttttttttcttcttcttctgcctgcgagacccaacccccaaccgctaaccctaattccatttcttcttcctctctctctctctnnnnnnnnnnnnntctctctctttctctctctcacttctctattgcgcggtggtgctgtcctaacaaacatgaagctcgtggtgagattcggtgccgtcgaaaactccccaaa

SEQ ID NO: 75218 - DNA, 775 bp, Cannabis sativa
atgaccaagatacccctaggtggtttagaagctttttagtttaagtaagggtaaaatggtatttttggccttttatgcttttgtctttttgtgagtttagattaaatagtataatcggatattatttggtattgaagttaagaaaaatcaagacataaaccaaaaaactcaccttctctctcttcactccatctctctctctcatcccttggagaaccagtagaaaattggtgtttcttcaactgattcagggtagtttagcaagctttttagtgattcaacacaaggtaaaactccctagcctcttcctttatgttttcttaagctcaaagttaaggtgtttccatgattttcttaagttagggttccatgattgtaagtagtgtttgtaattgtattctgaagttaaattaaggtttaataggttgatttgagttaggtttatgggctatggtgaggtttgagtaagctttgagtttaagaactcaagctttgctctttaatggtgattttatattttgggtttattgcttgatgttattgcatggattatgtttgttatggtataattagctgatctggaagttattgtgaggtttgggtttgaattgaagtgtgtaggtggtttttggtggtttctgcactgaaccgaaatttcgattcagagggatatgtaggaaccagaattctggttggtcgtccccaggaaaccccacacaaccagaattccgattggggaaccagtctacctgttggggcattttagagaacccta

SEQ ID NO: 75219 - DNA, 667 bp, Cannabis sativa
cctacaaaccaacacgagtatttcgagcgtgctttgtcctcactcacacactttctgggaaaacttcccaagaattatcccaggtcaagcactcttaaccgtggagttctttcgtgatggactactaaaaaacaagatgtactttgttgatataggtagtaccaatcaatccatttaagccctcttcaactgtgtaatctcatacctacacagtctcaaaatcatcacacttgaccttccccaagcgatgtgggattgtataacttaccctgtattttcccttatgaatcacgggactactgactgtcacaatcacccccttacggggtctgatatcctcatcgaccatactttcggctaggtcaaggctctaatactatttgaaatatccccacttcaagcctccattggacccttacacccacagaatatgatggctcttatacatgaatacatcactctggctgcttcctggaatgacgactaaccctacaaaccaacacaagtatttccagcatgctttgttctcattcgcacgcttcctggaggtcacccatccttgaaattaccccaggtcaagcacgcttatccgtggagttctttcatgatgggttccaaaacataagatgcaccttgttgacataggtagtaccaattaatccattta

SEQ ID NO: 75220 - DNA, 894 bp, Cannabis sativa
gagaagggatggagataaactcaatcggttttgcttttgtacctatcaaaaaaccatcaagcatgtgtcctcgaataatggatgtaaccattgtcttccacagtgagaaattcttcctatccaatttgagagggaagggttgattgagcgtgctcccaaactgtggtacgacaacatttgaagtagaccctgcattttgggccgtgaacatctagtttgcaacactgctaccaacgagagcttgaggagtacgattgtcggtggacatagcgtcagatacccgctatgataccaaattcaaaaaaaaaaaaaagaattgttaatgagtgaaactttgctcaatgagctacaggctgtagggctccttttatatagaggataaaattggttacagagaaatctagaaattgtacacctcaataacaaacttgtcagagaattacaaaaaagggaatattcccaaaaggataaaaaataaaatgagcagctgcacggattgttgatgtaagcactaacattgaggatgatttggctgctgagttggatgcagagttggacataagagcgtacttggacagggtcatattctaacatacattgataaaacactactataaatatacaataagctttttccttttgttagtccacaagacggtcataactgacggtaaagcatcatttttttttaaaaaatcattatatatactctactaggccaagcccattaattaactaaaacataaatatataatcctaaccctaaccctaatatctgtatcttcgtcaccccaaccccatcgtcggacccccaaccccacgtcggaccccccaacaccagcacattgagtcgtcggatgcccacacacgttgtccgaccccattacaccaaca

SEQ ID NO: 75221 - DNA, 578 bp, Cannabis sativa
cacgaggagattaaaattcaatttcattaaaggattatataattttattacactataattaggattatgtgtaattaaaagtaattaattatacaattttacatatttatctaactacgtaattataatataattgtgtaattaaagataatcgagaggtctcaattacacattttaattatcatgcccagtgagaattaagcgtaattactcaaatttttttactttaaatattaagtattaatttttttttatataattactaactattttcccgaacaaagcattaaaatttcataaataataatcacctcaaatctaaataagtgttatattttaaaatatagtattattactatgtgatttattttttaaataaaggtttataaataaaagtaaaaacccacaaaaaaataaaataaaataaaagtagaagatagcaatccaatttatcaagaggtaacctcctgcagcaaaacgttgggattgagcctaaattactactttgataattacattatttaataattacataattacttttaaacaaacccttataaaaatacaaaataaaaaca

SEQ ID NO: 75222 - DNA, 693 bp, Cannabis sativa
  modified_base (64)..(65): a, c, t, g, unknown or other
cttgaaaataaatcattaccatgattattttactaggatgttattttaccaggatctagatttnntaacatgtatgtttgattataatactataatctaatatcctaaatatgaattccctaaaacaattaaataaacacataaaagaatatgtaaaatcttacaatagttgcagcagaattatatgattccttctattcagatctctagccctgtttgtagcagagcatcatcaagatctgaacatggatcttctcctccttcgattgtgttcaacacagtcttccacaaaggtctgagtatcaccttgaatagagtgggctaatactcaaacatctttggaacaatatttttgagagagaatacatgtaatttttgaaatatacaaagaaacaagagaagagcgtaatctgacaataaaattacttaagttcattctctcttctcatcactttctttatataggcttcacttagggctaggtcagatgagattgggcttaaaatagagacttgggctgaagtctaactctacgaccgaatttctcatgggctttagagtaagatttatgtcactttatttcatttaaataaatgtgtttcctattttaccacttatctcttttaataatttaaatagtaattttattttaatagttataaggaattatcaaataaaatacaatttaaatat

SEQ ID NO: 75223 - DNA, 791 bp, Cannabis sativa
  modified_base (48)..(56): a, c, t, g, unknown or other
agattaaaaaaaattgagttatataattcatgggtgactttttatttnnnnnnnnnataaaatgatttattattaaaaataaattaatttatgagaaatttatgagtcacatgtcaaattaataaactacagttattattataatatcaaacatatatttattggactgtgcagaacgtgggatcaagtaatgtacgtgggatcaagtaatgtttataatttataaacaattatatgtggccttcgtatataaaacaatagtgctcatcatattcattcatcaatttatatccttcattttaagctatctatatgtatagatagttttatagataaatcaaacttaaatatatatagtattaattgtattacatggctcgcctcatgttaaatctcatatcccttttgctcctatcttcattactgattacggcttctgctaatttttattaaattgctaatcaacaggatcatgattttatatttaatccacctcatctgaatgacccaaatttaaatcatcatctctttgatcatgatatgtacccacaaggaacccaaaacgttgttcctccagtggtaggaggaggaggagtaatccccaccatcactcatggcaaatttatgacttggtatatggcttcttaatttcgccatttatctttttgtatgggagttttaaattattaatgtatttttttattaaatctttctttcaaatatatggcatttaaattattactatataaagatactttcataaaaaaataaataaataaataaagacaaca

SEQ ID NO: 75224 - DNA, 832 bp, Cannabis sativa
taaataacatagccacatgttgacattctatcatcaacacagctagcccatcaacatctgagtagctttcaagagtcatgacagtggctggtgtaagtaataaaccatcagagatggttcccttgagatatcgtagtaatctcttgcaggcttcccaatgtgatacagtaagggctttgagaaattgattgagtttgttgatcacacaacatcaggtctggttagggtgatatattgaagagctcctatggtgcttctttagagagtaggatcttcaaacaattctccatcattcaatgatagtttggtggtgttactaatcgaattggaacaaaccttagcaccttccatatgcaatttaacttataaatctgtgatatatttagtttgagacaaaagcattcctttggaatctctgaagatttcaactccaagaaaataatgaacatcaccaagatctttaagtgagaacttatggttaagatcagtaactaatttggagattagatgttgatttggacctgttattaaaatatcatcaacatatacgagtggatgatgagattgttaccagagccatgtgcaaaaagtgatgtgtcagatttggaagcagtgaaaccccattgaagtagactagttttgagtttgtcattccaagctcatggagcttgtttgaggccataaaagggccttgtgaagaagagacacatgatcaggtttggattgatctatgaagcctggtggttggttcataaacacagtttcagttagctcaccattgagaaagccattacttacatctaactgtgttactttccaatttgaagtgaca

SEQ ID NO: 75225 - DNA, 547 bp, Cannabis sativa
tgtttgactgttcatttttagaaccaaactcttagtatatttaaagttgtgatttttgcaagaaaaccataaaatatggaatcttttattttgatagttttaagtatagttttgaaaaatttataacaaggaatttttgtatgagatttgttggaagttaaagttaaaaccatctagttttatttcccactggtttggaaaatttggcccaaaattacagattggatcgactctaaggcggaactttaatctttggataatcttatcgtgaaatttctaaattatcttatgtgtttttcctaaatgtgctcatgcatcatatttagattacaaacttgatatttatttttttatttataatacttatattgcatttatatcttatttcttatgtctcgctttatttaattttattttggtctaataattacaaaatgacacactaacaatataacatggacaattattcctacaacatggtaactgaatttgatggtaattgcatatctgattggatagtaaaaataaaacttctacttctcaaaga

SEQ ID NO: 75226 - DNA, 520 bp, Cannabis sativa
tttactttaatatcctctcctttgtaaatcaaatccaaatgagggagcccatttttgtacatgtttctgtgctccccttttacctcttacgctccatgttttacaatttttatgtaaaattatattagtattgatttgtatgtacacataaatatataatgttgtgatataaatcaaaatttaatataatattctataaaatacaatttaatataatattatattatgtaatacaatactatctgatacattctaccaaatgaacttttattttcttggtaagtcataaaacatagaaaacccgaaggggtagtctagtggtaaaaaggagtggtgaaacagctggtttgcatttgttccaagaaagtctctctgtcgaatggctatggctaaaaattaataatttaaacaaaacagaaagtcacaaaacatactatcattatcgctaggacaattagatacctaacctttagtggcaacgacccaattgcaagagtggagctctactgtttgagctata

SEQ ID NO: 75227 - DNA, 1207 bp, Cannabis sativa
gccggcaaaagtttgccggcgagttacacgtacttttgccggcaagcttacgcgctggcaaaagtagcttttcttgtagtgtgataaggtagttcaatgagagaattgctagaagaggttaggatatgataagagatcctttacaaggaaggcttgtagacagatcaagtagggtctacaagaatttagagcatggacagacaatccaacaaagttcttcgaacatgagaacaacccatttattgcctaacgacagtcaaatcttaccatatagacagtatagcacaaacagccagttcttagcaccaggagggattggagaacgacaaagcaaccttggagagagggtgttacatgccagccaggccctagctgaccagcattatgactctctctcccagggtatccgagaacaagttatttcaaggcctagagaccctgttcttcacaagctaggtggatcaaccaaactcaagaaattggtacgatcaacctctattaccccgcaaaccaaccttatcaactaggagaatcttgtagatctggcaagctaaggaagcataaccagccaacggctggtggccatggccctttacttggacagaggctggccgaccaagacttattgactagctagaggttggttggccaagggccaatgttcagcaaaggccagttgcccagcactgagctggcaaggaaagcatacctctctagccaagaagtttaggtcggtcaaggaatgctaactggagaagaaaacatcaaagtggacctatctataaaagcacaactggatcaactcaaagacatgatcaaagacctatccagcccaaatctgtcagacctagaacttgacaagtcgagaaagtcaccatattctctgcatacattaatgcatatttcccctataccaaggatgccaacttggaagatgtacatagagaaagaagatccccaatcacacataaaatacttcttgacccaaatagatctctaaggactaactagagatgtgcaatcacaaatcattctggcaaccctatttgaaataggcaaacaatgaattatccttagaattctatactcaattctccgcatcaagacaaataccttccaaattggaggatcttgtcgaagtaaacaaaagtcaagatgagcctttaaaaggctacattcaaagatttttggacgaggccaccaagat

SEQ ID NO: 75228 - DNA, 621 bp, Cannabis sativa
gaacaccagaaacaaaatgaaatctacaataatacagaaaattttagatatttgcccatataaaaaataattacataaagcattattttttacaaaatttttacatttttacgtttaaaaaatattttttttttttacaattttatgtaaataaaatcttaaattaaaagtatttaaaattctatataactgtatttttgtaatttttttgttgtttttgtattattttttttaaacaatccctagatctagccatatcttttccaaataggcaaatttgggcctatagtatgttagtttactcataaaatgattgaaccaaccaactatgaatattatgtgttatgtctcccttttatattgggattttgtatttaacaaaaagtttacatttttatgaattttgattgtttgtattattcatgcatttttctaactttaaaatgaaaagctttaaaagatttttcactacaaaaaaacaagatataagtaggggtgttcattgaatcacattcaatattttttgacgtatccagatttgatccaattatatattagatgttagattttaccatccgatccgatccaattaatttcagtgatccaatcgatctaacatcc

SEQ ID NO: 75229 - DNA, 1128 bp, Cannabis sativa
ttggggacccaagcagcaatgttggacttgtggaagagttagaagagatcgagattgatccagatatctcgatcagaaagctgaagatcggaaagggtttgttgctcgaagtaaaattagaattgataaaatttctgagagcaaacctagacgtttttgcctggtgacatgctgatatggtcggaattgatccttctataatttcacacgttctgaatattgatcccaatttctggccagttcaacaaaagtgaaggctattagacaaagagcaagcactaaccctaaaggaagaagtagaaaagctacgcaacaaataatttcataattgaagctttctacccagcttgggtcgcaaatcctgtattggtgcccaggtcgaacaagaaatggtgagtctgtattgatttcacaaacctcaacaaagcatgcccgaaagactgttttccacttccaatgatcgatcagctcgtggatgcaatagcagggcatgaaatattaagcttcatggatgcttattcgggctacaatcaaattaaaatacatcccccaaaccaagaacatacaagtttccggacagatatgggtctatattgttacaaagtaatgtcgtttggtctaaaaaacgctggagcgacataccaaagattggtaaacaaaatgtttaaagaccaaatcgggtgaaatatggaagtgtatgtggatgacatgctcgtcaaatccaggaaggctggggggcacatagacgacctggacgaatgcttcaatgtcctcagaaagtacaatatgaaactaaatccctcaaaatgttcctttggagtcaactagggaaagtttctgggcttcatcgtcaatgcccgaggaatcgaagccaatccagagaagattcgagccctcctggatatgaagtcgccaactaaaaccaaggaagtgcaaagtttgactggtcgaatagctgcactcagcagatttgtttcaaaatcaacagataagtgtgtcccattctttaatatcttgcaaggaaacaggcagttcgagtggacggaggaatgtgaaaaagctttccaagagctaaaagcacaactttcaaaacctcccgtactctcaaaacctctgaacggagaagaa

SEQ ID NO: 75230 - DNA, 618 bp, Cannabis sativa
aagtttgaggggcatgatttggtagatatcaaagtctgaggtgcatgatttagtacataaacaatcactgaaacagtaaaattgaatgaaataatacaaaattccttaaattgaacaatctcaatagttcgatgaggatttttaacggccaaaaaagttcagagagcacgatttactacatgtcaaagttcagggagaaaaattactaattaacctattaaatttatggcattaaatttatttctacagtaataatatttctatcttttgaggaaaaatatttctatccttaagagaatcaaaaatctcgtactaaacacgaaaaatgtaaaagattttcacattaactcagaccaaacaacaagtagatttgtagtagtacctcatcaaaggagaagtgaccactaattgaattttcttggaaagtccgctcttttcaatttggtttcgcaaattttcaacctataacaacacatatttccattccatgtatataataaaccaactttattacaaacataattatgattatataagccttagtggcaaagaatatgtactcaagaaagacaatacaaataaaaatgagttaataagttaaaagattttactacaaac

SEQ ID NO: 75231 - DNA, 1802 bp, Cannabis sativa
  modified_base (35)..(40): a, c, t, g, unknown or other
gttttagaagttcatacttgtgagtagatctaagnnnnnngtaaaataaattccaacagggttatacccaataactcttcccagactagcggttttggccaagtgctcggctaaacaaaccagtcactgaggcaacctggtgcttcagtatttaatagattgggaacagctcatgatctcagagatgatctaaatagaatgagagggttagatgaacaatatgttcaaccaaccactcagcccggggtccccattcaagatcgagctcaaagagatcctaaggtgacactgatcgaccaagaggccgaacaagttcatccatccgtgcaagcacagttggatgaactgaaaaatatgttccaacgcctggctggtcaaaagctcaatgatctcgagttagaccgagcacgtggattcctttttactccagagatcaatgttttagaactaccccacaagttcaagatgccgacctggaagatgtatatagggaaagaggatcccttatcgcatctcaagtattttgaaatgcaaatggacttgcaaggggtatgaggagatgtgcgatgcagagttttccctgccacactctcagaagccgttcaacaatggtaattcaagttgacaccaagaaggttcaaatcttggaaggccttctcctcggagtttcatgcacaattctcttcttctcgccaactcccattacatttagaagacctggtcaaagtgaatcaaagaccaagagagcctcttcaagcttacataagcagattcatgacggaggcaacgaaagtagcgcgattaactgaagaggggaaataagctgccatattggggggcattgagattctcggagagctatggaaagacatcaagaaaagtagtccagtagattctatgagtgattttctcgaccgcgcagatggtttcataaagcttgaagaagccattcaacgagcaaatgtcgagcccaaactgggcaattcacaagctccttcagctagaacgtctgttcaaaacccctaataccctagtagttcaaactcgggcggtaaaagatctaaaaaaacaacaacagacaaggcaatggaaaaaagggaaagttcgcaggcaaagccgaacagaaccctagagaaaatccttccaaattcactgctttctcaaacctgactgacgacttggagaccatctacatggctactcagtcagtagtttcgtacaagaaacctgctcccataaaaaaggacataagtaagcgagacatgtctaaattttgcctttttcatggagattatggccatgataccaatgaatgcaacaatttgaagcgagaaattgaattcctaataagaaaaaataactcgcatgtgcaaaaatatgtcaaggctgaccagaatcaaagggccacccaagcatacaataactaagatttgttactacctccaccagtagacgggcatttacaagtcatcattgggggcccgcatatagctggagattcgggcatagctcaggaaaggtatgcccaaaccttacaacacgagcaaaaaagaagaggtcatgtccataaaagaaaggaagccaaaaataccacgagtaggagaacctactataacgttcaatgaagacgatgatgtcaaggttcgtttcccacaaaatgatccattagttgtggaagtacagatagctaacaaaacagtggcccgaactatgatagacaatggagccttaataaatatcctgtttaaaacaccatatgaacaaatggggctccaactcaaagatctgatcccctgcctcca

SEQ ID NO: 75232 - DNA, 522 bp, Cannabis sativa
ttagttcggccactttggtctcagcaacaaggagcttcttattgacctcttccagctctatccgcacagccccaagttgaacgcgggcttccttggcgtcctacttggccaagtccacttcgattcgcattgtgttagaaattgcaaggctcttaacaagagtcgacttagctcgggaataggcataagccatcttcaggccagtctgtgcgaaaagaagacattaaaatccaaactagttaaagaagaacaagaggaaagtgtaagagaaggcttaccctcgaaagctcgttcaggattcctcccataaccagctccaaagacaagtcgttgtccgccctagccagctgttcgttcacctcagggactgaccgattcacatagtgggtgagcatatctctgcctcttttagtctcctagtacattactagaggtggcgcaggggccttaacctgtttagacaagcttttgatcagcttggatccaccctccgcttgttcaggcctgtccgaactacctcct

SEQ ID NO: 75233 - DNA, 744 bp, Cannabis sativa
gtatatttttattccaaattcttagctaatgtggttttaaccaatgtactgtatcattgttgtgtatctgctattggtttttgtatagaagagtttgtgatacttgtgttcaattatgcagaattttataaatctctctctctctctctctctctctgtctctctcactctctgttttttgttttttgttcaatctgctatcttatttgttttccattcataaaaatacaaagttgttacgtttctaagaaaacaaagtcctagattgtatcgccgctctttgtttttcttttggttttgtatgcaaatactcttatctggtgtatgcagttctatttttccttgatggtgttctaaggtttctttctaaattttagaacactggatttctgggcagagtctttggaatcattcgttttagaattcgactgcctcttggtctccttattgggttcttcttctttatttactccaagcccaagaaagttgaggtaatgtatataaatgtgtatatgtatatgccatatatcttcttagaggagttcatatgagtcgtgaatatgtttgaaatggtaaactggttactttacgttttagtctttcaacatctatatctaaagttctgcttttttcttaaggcacagttattattgaaaatttgttagagcagaaatggattggtatgagtagtattcaatattctcaccctcttataaaaattgtcttttataattttgtgctctt

SEQ ID NO: 75234 - DNA, 642 bp, Cannabis sativa
  modified_base (359)..(361): a, c, t, g, unknown or other
tttttacaccacatcaaattttattctttttctcttttctattgtagggctgaatttttttaaaaaaatattatatattttatatactctgttttgtgttaaatttcatctattattatattgttattttttagttatttaattgttatgtttggtattttatagttgttttataaaaaatagtatttttataaaaaatgtctgtataacaataaaattgtaaactttgctagaatctaatatttttgtaaaattcactaattatatttacgactgtatttatctatcggctaattaagatttttgtaaccagaactttgacatgtaccaaatcatgttcctgaactattgagattgtnnnatttaaggacttttgtctaacttcattcaattttactatttcagttattatttatgtactaaaccatgctcaccagactttgatatctaccaaatcatgtccctagaactttgacatgtattaaattattatgtccccttaactttcattctaattaaccttatctattataaagaattcatctttcaaaaaaaatataattaaatacagtggcggacccaagatttaagttgaggtagggcgatacttttttttttataagtgaggggtgcatctttttt

SEQ ID NO: 75235 - DNA, 1058 bp, Cannabis sativa
gagagagagagagagatctagagaaagagaaaagaaaaaagaagcagaaaagcaaaactcaattattaacagaacaatacataagtatttatagagatacaaatacactcattacaagaagactaaaaactaagaaaaggaaaataacaaatagattctgttatgcaacagtaactaacaataacagaatttttaatatgattttatattaacatcccctgcaaacgaaatggtgtggacaacattttttgtttggacttcaagtaaagaaaacattctgttgtaagagctttagtgaggacatcaacagcttgatcataagcaggaacataatggacagacaattgcttgtcgatgatttaatccctgacaaaatggaggtcaatttttatgtgtttggaccaagcattgaagagagggttagctgctaaagctgttacactttgattatcaacctaaatgacaggactgtgaataattggtacatgtaactcttttagtagagactgaattcatttgaactcaggatacaacatacgataagtttcttgtgtgtggtggatcgatttggaagactacggtgtaagtttctaatcaactaaaaggatacaacatacgataaattttgaggataccctaatagtcatcaagaggtatatattcttatattgtattttatgtttagatttaatgtataaacatcttgagatcaaatgggctatggtacaatgataatcagataatatgaattttcccactgcgtacctaatttagtaccattaaaaccaacaagtttaatggtggagagcgactttgccttagttagaaagctagtttatgaggttgagactttaaagattaaatgtgaccaagctattaaagctttgagcgatgtcaaggcatgtgatcaaacaaagagttgaagcttctctcaacaatgttgtctccaactacaagacttctgctaaggcggtgaaagagcgtgccagtaaatacaaggattcttacaaacaggctcattctcacttttccactcttgaggtgaaagtaactgatct

SEQ ID NO: 75236 - DNA, 1875 bp, Cannabis sativa
  modified_base (1158)..(1177): a, c, t, g, unknown or other
  modified_base (1391)..(1398): a, c, t, g, unknown or other
ttttaaaaaaaaaaaagttcggtttggtcggtttaaaccaaccaaaccgtggattaaaacggtcggtttttttatatttttattatggtcggttggttttcggattagaaccgtaaaagtcgaaaaccgaatttcgaattttttttgtgtaaaaaccgatcaaaccgaccattgctcacccttaagaaataccaaaagaaaaataaaaagaaaaagaaaaagtggggtcctttacgttgtcattattcagtatatagttaataccttgactagaaatgaaataaaagaaagagagcatcttaaatgttttgactgtcttaccttcaataagagagagaaagagagtctgcagagtgtaagcctgtacgtcgttcagacttagaccaaggaccattctattccagtattatctctttctcttttcttcatgaagaaactcaaaaacagggtatccactttgcaattgaccatctccttttacttctttatttctgtacaccccaacataaattttagtttggaaaatttgttatttcaatatatctatatatattaatataaaggaaagcacaaaatactgtacgtggctttttataatttttttttttttttcatatttgtgtaattttttaagagtaccatattaatgtactaagaaaatataattattcaattaaatttatttttttgtaatagtctcacattatttagaaagtatagtaaaacattacacatacactataaataaattttttctcgtagtattttaatttgtgtcaaaatatgtattttcttccttgagtccttgactaattgattaaattagtttattcatttagtatgtggctttctataattttttctgaataaatattattgggtgattctacaatgcacccccttaaaagggatgtactgatgcaacccctacttgttttggcatctagaaaaaattttgagtctaattttttttcatattcctgtacgttatagctacttaagatatcttacaaaattttaagaaattcggaataatttacaatatagaaaacaatgttcaaacagtcaattttacacgcgtataaaataaaatagtcacgcgtggaacacactgcttgaatataattttcggcgtgttaaactttttcgaatttcttnnnnnnnnnnnnnnnnnnnnaaataactataatttacatgatcataagaaaaaaatggactaaaatttatttcggatactaaaatagatagagatgtatcgatatatctctttcggatactaaattagtttattcatttagtatgtggctttctataattttttttctagataaatactattctgggtcttgagttttgtaaaagttatcgattggaccctctattttgttaannnnnnnnatagaccttgtattttctaaaattatactaataggaccctgaactaatttttttatcaaaataaaacttaataataatctgatatctgatctagagatgttatgacaaaactagttaaattttttgtatctgttcgtattaaaaattgtcttaaagttggttatactaaaaaaataaaattattaaaaattgaactcaggatcctatttttaccattttataaaatataaggtcaattttgtcatttaacaaaacagagtatcatggtctaaaatggtatttacctattttttcttcgagaaaattacataaatatgggattttgtaaaaaagttacaaaaatatggcatttataggtgtgccacttttctaaggcatttttcacatttaagactttttatggtatttgatatgccatatttttgtaaacctattatccatacccatattcatgtttttgtttctaatttaattagt

SEQ ID NO: 75237 - DNA, 852 bp, Cannabis sativa
aagtgtgaatctgatgaagtaaaacgtgtaaaaaaatagaattttttgcagctaaacctcctcaactatcatttcacttgcacttaactttttaagctcaaattttagtagtaaaatcctctaaactattgaattgttagcaaatttaaaatgacatttattttttacagttaactaccaacaatatgggttgcttatactcttgttcacgtgataagtttatattagtacacctactattattttttaaaaattatttcaaaatatatcacattttttattttttaaatattttactttttattttgataatttaatttaattttaaaatgaattcttaaataatttttaaataataataatattaggtgtatcaatataaacatgtcacgtgtacaagagtatacacataatcagtccatagtggtagttaactggatgacactttaaatttgctaacagttcagtaatttggaaagttttacctccaaaatttgagcttaaaaattaagtactagtgaaacgatagttaaaaaaatttaactgctaaaaactcgtaaaaatataaaattgcacccacttgtgtagagtgtcaattttttttttctctcttacacaccactcctctccctctctcccaacccggcccctactctctctctctttcccacttaatatatatatatatatatttatataaaaaaaaatatatgctaaaaaaaaaaaaaatctagacaaatgtgaagttataaaagctagagagcttacgtatgaaatgaaagctacatttgatggaataatataagcctagtatgtatcatagttgtgggtcatctagcttctattcaagta

SEQ ID NO: 75238 - DNA, 1946 bp, Cannabis sativa
ggcctcgtggctcacaaactaggatacaggaaactgctcgagagaaccctcaaaatgctcaggaagaagaacctagggaaaatgaggttcctcctgaaaaacccaaatgatcagccagaagtatctcatagaaatgagatgggaggcgaccaaaaactagggagcaggttattcctcatggaaacgaggaaaatcctgggacacaacctggggaacggaggaaccaccagcattcttcctagatccatagggaaggggcttgtacaaatcccagtggggcaaacacaacgaaccacgcccaagggggaagaacggggcatgaagaagcaagtgtgacctcggggcgctcaaggacccatagttgatccactcgaaggggagaaggtactcgtcgcaataatgatcaagaaagcacgagaaccagtatgactgcaagtcactcaaggacgaggtccatgagcaaggcgaggtccgttagtagggtgcaatctgtgagtagaacgacgtcctctagtaactataaccaatcggatctgcgagagcaattgaaccagaaaaaacctaatcttcgccaacaactcggtccaaagcaagatgatcctatccaattgtgaatagacgagttggaggataagttcaaaaggtatcaagtaggggagttagaaaaataatctggatacgactcaaatgaggaacttgagtcgtaccatccagatatcatgaatactccttttcccaagggtttaaaaaccctcatgtctcgttgtattatgggaccaccgatctggtcttgcatttgaataatttcaacactataatgtgagctggtaatgttacaaacaatttacgttgtattttgtttcccacctcactatttggggcagcaagcaactgatttaataaatttactcttcattcgattacttcttgggaacagttgtccaaggacattaaaaagcagttccaggctacaaggaataggcgacccgaggcttcgtcgctaaccaacataaaaaaatagcccggcgagacacttaaggtgtatttaagtcgttttagcacagttgctccaagattaagaaatctttgattgctggcttgaaaatagccgaggcgttgaaggtcaagaatctcatatgtcatagtgatttgcaactgattgtaaaatcaagtcctcggggaatactaggctaagggcctaaaacttggtaagtacttagagaaggttcaaaagaacttggaaaagtttgattactttaaaatcgcacaaataacaagagaacaaaactctaacgctgatgccttagcaaaactggccttgcagagcgatttggatgaattaaacttagttccagtagaagtgctaaacgagccaagtatatgtgaaaaagaagatgtcgagattgtagatacctcacctacttggatgacccacagaagaggttatgccatgccactactttggtgcgttctttctacagaagcaaatgagattatcaaacaaattcatgagggcttttgcggagaccatgcaggttggcagagcctatttaaaaagatcattagacaaggatattactggccagcaattttcacatataccttgcgtaccaccaacggaattaaggatgatgacctcgccttacccatttgctatatgggggactgatttaatcggggcacttcccacagggcaagggggagccaagtacgctgtggtagccgttaatctcttcactaaatggacagaggctgagcctcttgtctccataacttgcaaaaaattcctcgactttgttgtcaaaaacattgtttgctggtttggaattgccatgaaggtagtatctgatagcggaactcagttcgatggtgacttgttcactgagttctgcaagacgaacaaaataattaaaagcttctcaccagtatccaggcctcaggcgaat

SEQ ID NO: 75239 - DNA, 1324 bp, Cannabis sativa
ttcaccactaccattcttcctgatatgggcgatgatgatctttggtatgtggacactggagctaccaaccatgttagctgtggaaaccccaatttggactcaatcactccctaccaaggcactgagacattagccgtgggaaatggtaagcaattaatcatttctcatattggtcaattgtctatcccttctccacattcctcctctttacacttaaacaacatcttacatgtccctgctattaagaaaaaacttgttagtgtttctcagctcactactgacaatgatgtctatcttgaatttcataaatcttgttgttttgttaaggacaaataacagggacagtgcttcttaaagggagagccaaagatggtttatatcagcttggagaaacatccagttctgccattcagtgtcaccttaccacccattctagtatagataaatcttgttgtaaatgttcttgtcattgtcactctaatgtacaaaaagattcttgtaattctcaagattttaataaaggcaatcaagatttttctgatgtttctccacaagcttattctgtttcaaagttcaatgatataaattgttggcactctaaattgggacatcctgctgagaacactttggctaaacttttacctcatatttcccacactggatctctcaaagcattacgattttgcaatgcttgtcatcaaggaaaaagccataaacttccttttccattgtctaatagtcgggccacccaacctttagcactaatccataccgatctgtggggtccctctcatattgtctccaaagatggcttcaaatattatgttcacttccttgatgactatagtcgatactgttggatttttccattaacacacaaaaatcatgcctttgatgtgttcctcaagtttaaaagtcttgttgaaaaacaatttaacttgcctatcaaaagtgtccaagccgattgggggggtgaatataggcctttcgctcgctttcttactgatcagggaattcatttccaacacccttgtcctaggacaagtgaacaaaatggtcgcgctgagcgcaaacaccgtcatatcacagaaactggtctcactttgttagctcatgcgggtctcggtatggaatactggtggtatgctatggcttgtgctgtgttcactattaatagacttccaacacccgttcttggcaatgtgagtccatatgaatgtctatttggcacaaaaccagattataatattctcaagtcttttggttgcagttgtttcccacatttgagaccatataataatcataaacttgaattgagatcaca

SEQ ID NO: 75240 - DNA, 1457 bp, Cannabis sativa
ttagaaccagatggctctgcagcatcacccattcccttcttcgcaatgtctttcaaacccattttaggatcaactttagaggactttctttgtattttttgaaatttttttaaggtgaaggggacttggaacccgacctagtcgtggccatttatagaagaagaaaattaactgtaagaggaaaaaaatgcaactatggaagacaggggagatcatagcataaatgggaggttgaaattcgtgggttagggtttcacaggggatgatagtgggttatggaaaaagaaaaaaaaactaacagaaaataaaagaaaaataaaaaaaaaaatgaatgaaagagaagaaggtggcagagatagagtgtaatataggagaaaacccataacataatcatgcataggtattttgtaattatcaaactttttaaaatataatattgaaaaacaaattttttgaaaatgtttaaataaccgaataaagaaaaaaaatgtaaaataatggcaaaaaaggacaccacgtgtaaaaattcttattttttttttcttcacaaaaatgcttaaatatatagcacattaaattagcttatggcacgagaaaaattatttgtcctagtttgaatagttcatttatataatagaagacacttgttatagatatatatttgttttaaatttttcattaaattaatatttacatattagaataaaaaaaattatattttctatttttttctttttttgacaaaatattttttctacttaaaagaattaatgggcgcaacaaagtggtgcctataaaatttcttatcgtgcttacaatagggtagaatggggaattgcgaattaaatcgggcacaaaatttggctataggtacactactgtgtcgagccaaagagtagcctttaggcacgaaacaaaaagctttactcactaatgttttcgtgccaatagcacttatatcttgtagtgtgagttttgctcttgaaaattgaaattatgatgtggactttagttgtcgaaaagtaatagataaaaaagaaaaatgctaaagggcaccagtggtgcctagtaccttcctacatgtaaatatcgctattggtccaactaagtatcaggtcccatataatttaatataataacttttagaaaatatcactaatcaatcgcaacacgacatgtcgagaaggtgctaggcacactggtgcgtcatagcaataagagactaacaatatctaagcataatacaattaaaaatgtaccgtagtccaaatttttttgtattcattaatatcaatgattcatataagttacaaatgattacaaaattaaatgtttcatatcaatagatatgaataaaaaaataaatatttaatctacatagaatgtctttatttggatttaattggacatgaatatgtccaagtataaactttttttattcttctcaaaatgatttt

SEQ ID NO: 75241 - DNA, 907 bp, Cannabis sativa
acacagacacggactaggacccagtatccaaatcggaacgagaccgggacccgagattgggatccgaatctcgacccacgtcccggggcttacgacccaacccgtagtcagtttctcgatcttggaatcgtaccaagaaccaaacctggaaccatttctacaccaagaaccaaatccagactcaaactcgggacccgaaataggaacaagaatcggaatgaggaccttggaactggaattggacctggacccaaaatcagatctagatgcagaaccgaacatgaacccggacccaaactaggatcgataccaagacccaaacctgaacccgaaccgacacttgcgccaggacctgcgacccaaaaccttgaaccttggacccgtgacccaagacctggaccagaacccaaacccataccaaaacctagacataaacccagacccagacccagaccaagacccggacccaaactcagaccgaaaaccggacccagaccttgaccaagagccggactctttccaaaactcagactcgaacccaagacttggatccggaccgagatcaggacaaggacccagacacagactaggaccgagccctgaacctcgactgggaccaaaacttggattgggaccgggacccaggaacgagacccgagacccaagactcaaacctgggacctaagaatcgaatcgtgacctagatgggggactttggccccaaacccgaacctggaccaagacttggacaaaggattcgaacctagatgggggacttggacccaatactgggcctcagaaacggtgtttgagacccaaaatttgaccctaaactcgagacacaggacccgaccttagacttggaacccaggacctcactaccaggacacaaccccaaactcggacc

SEQ ID NO: 75242 - DNA, 737 bp, Cannabis sativa
actctttagggataaaatccatttttgagttgaagcttgtttacaatatttggtaaattgtcactgtttagcatactgggagattctctgtaaagagcaaagcataggaaatgttgtcgagaatcatattccaaccatatctctaatcatcttgatatgtaacccaaagctgccctgctcaaaattttctataaaaaataaagaaatcccatcatcaatagctaatatcatgactatattagataaaaaatagataataagaacaatcatatatgggcaagaaatcagaaaaaccatatcagaaaaaccagtagcttaagaaaaatagatacaaattgtcatgtattgtatgattttcaatatagtgactcacgttgaagagagtaaatgcgacctcccatggatgaaatgcaccatctataggacccaaaaagttacaataatcgaacgacggaagagggtcgtggtggttgtcagtgatgaaggtgttgccagaattccctggctgcatacaaaactacgacagtgatgctacgattcctcgggtcggtttgtctccttaacgggcaaaggtctatgaacgggctgaaccctcttcgttgctgcgatcgattccaggtattatgtatatagtatcaatatacatatgaaagaatatatattaccctattttaaaggtgaattaccttttcgatgattgcagtgagactttgcttaaggtaaagcaagcttttttc

SEQ ID NO: 75243 - DNA, 793 bp, Cannabis sativa
gcagacggttgacagcaggccgtgaaggaggaatgttgagattggaaagattaataacttccctttctcggattgacagagcatcagacatggtagggatgaagctttccatgattggaaccagtagcagagaagtttttgctgttgattttgtgtttttttttaaaaaagatgcaggcgggaacagttaaatttaagcaaggatggaagaaaaaactggaaaggtagttaaaaaagaaaataatagactaactgccacagagcaatattaagggcagacaatgctaaccaaaacaacacaggtcatccagaattttagaataattaaacctttaaatttcttcctcaatttatgaattaaattaagcagaattttcaaaaatagttttttaatgttttatttacattttgtaggggctaaactctctattctttcctactcaatctttttggcacagtgtgcacaaggatataaatgggtttttattggtccagttattttattatttaaataattgtaaaaaataatagaaaatatctaaaattaataacattaaaaataaatgataaaaaaatttaaaaataaaattaaaattattgagtgatcttataatgcacccaaaaaaatacactgatgcacctcttatttgttggaataatttacaatataaaaaatagtattcaaacaatctattttacacacatataaaataaaagagcgtgcaacagactctattttgctatttccacattcaataaaagctacacaattacatatttactaggtaacgat

SEQ ID NO: 75244 - DNA, 1157 bp, Cannabis sativa
  modified_base (47)..(57): a, c, t, g, unknown or other
ctctccaagccttctcatcttgtgacttgatgaatgctctcatcctnnnnnnnnnnnatggataattcaaatcattcaacagaggtggtccagtaatggagcttctctctgtaaacaaagacatctcacagaaaataaattaaacaaaataatctcaagatctcactaagagtttagtgacctgctctgataccaattgaaattttgtattttaatagtcctaaatttattatttaattaaatacttaattaaatgcataataatgaaacgggtactaaaactatttttctatagctacaaaacacaactatgtaactccagaagaaactagaaaaacaaacaatatagaaaagtaaaacacacaaggtttttgtacgtggtttaaacaatcctttcagattgttactagtcgacggggccacgcccagagataagaattattaaatagatctcaaaaatacaaagtaattgacttatgcataaataaactgcctcttattatatgccgcaagcttgatgtattctatcttctaatcgaatcttgctgaaacttcaagtgctcgaagtcccttcgatctccttgaagagtgcttgctttctctcgaggcaagacttaaaaaacaatctcccgaaagctttgtaaaaccttctcccgaaggtagcactattgttcttattctttgtaggcttgaatacaaattcaggacaatacaacatagaaataaacatagtaagaggcgaacaagctcttctttataaaacaaagactctcttttctaaagatatgagtgaaaatcaaaaatacaaaagaggtacttgacttagctgctataaggtgtatttataatcaacatataacttattaacagctcatacacggtctgaacaagaccatagcccactacacaattccctaaaatagatcttcaatcagcccgagaatttccatttctatacctacaaaattgtgagcagtaagtgtgactttccttttatagaaaaggaaagttttgctctggttttctcctcaaaaaatctgatcaatcaaaatgggaaactcacaagtgatcagaatatcttagctggttagatagaaaagaattgaataactaaacttaccctttttaccttattttccataaataggaaagctaga

SEQ ID NO: 75245 - DNA, 1110 bp, Cannabis sativa
gatatactggagacggacaagaaagtaaccatttcaaaaggtggagaaaggtggaaggattggaaaaataccctaatagatggtatttttaaattcaaagatgcggctccccatcttctcgagaagccaccgaaactgtatcaaagcataattgatgaggaacaatggagagagtttgtggcttcgaggttgactccagaatttgcggcaagaagaaaaaaaggcccaacagagcagcgcaaaaaatatttacaaccatcgcaccagacaaggtggtgtaagaatagttcaagaccaaatggagaaagaggcaggccaccaaattatcaattttgatagatgtgaagtatggaaaagacttcacgtgaacacaaaaggagaggtggagggcccaactacgaaaatcgttaaacggattgtaagttaaaaatataatttcatttatattgttatgtttcataatttatttttaactctatttgttatgtttgtaggacgactttcgtaagcaagtggaacagagcgttgtgcatgtgaaaaggaagagggacgtgttgaccatggcgctagggacagatgagcatggtggtcgggttcgagccatgggttacaacattgctcagaccaaatattttaacactccatgccctaaaagaaaaaacacagatgggtcgaacaaggcattatcaaatttggagagacgcatataagagacagaggagagcaatagacagttgcgggagcaaatggttgagctccttcatctagttcgttccaagcataacagcattgcgtgtacatcttatgcgtctggttctagtgtttgaggagcatcgaatgaacaagcacatgctgaccttgcctccgatcctgtagcataaccatcgggtgctgccaatgtctctactccatcactgccactgagttccaggaaggtttttgctccagcaacaccactgccacctactagtggtagttcagaagaggcaatcttaatattattttacaaattgatctaatgcaaaattataaatatggtcaatttacaaactaaattgttgcttgtttgatttgaatatgcagacttttccgtgttagatgcactgtcgg

SEQ ID NO: 75246 - DNA, 704 bp, Cannabis sativa
  modified_base (632)..(637): a, c, t, g, unknown or other
gccttgttctctcctacaatttctccgaacccgcaaatgaactccctccctctatttattctacactaataaaccctagctaggtccatttctgatttagaggcgcgaacatgtatttttttgttgtggaaaacatataagtctgtatagatttattatatacaatttcaaatcaaactaacaatatgaaaaaaaaattatgaagaattaatgaaaaatatcaaacaacaaatagggtgtcgtaagcaatacatggtttgaaggatgaataaaaggacgttgatgagatatggcttgaaggatgaagggaaaatagagagagagagtcttaccggagagaggttgctgcttgcggttggggcaacgacaaaggcagaggcttgctgctcgcagttgggtctcgtagatgatgaacaaagatatgaaaaatcaaaatgaaaccaaacaaattgatgtgatcaattgagaacgacaaagaacagtttgagagtgagggagaggaattggatggggtgtttataaaaccgttcaaaccgcccacaccacactgcaattctttgcggtacggtcgcagtttgaattttatttaaactgcgcggtgtggtgtagtttgcagttttgaattgttaatnnnnnnttcaaaccgcaccgcaccgcatattataaaaataccaatttttatatgggaaacttacaaaaatact

SEQ ID NO: 75247 - DNA, 539 bp, Cannabis sativa
tttacaccaaaataatataagattggtctatttgtgacacttaacccaacaaattgatttttttttttttaaaaaaaaatacagaatttattaagaaaaatcaactattagagatgaactccaaaatcaagataagcatttgtccaaatacactcccctaaattagtaatagagattgtcagtgtatgggcaacaccattcgctaatcgtgaaatggtactgcaagaaccatcgtcaacaatagctaataaataatagatatctaataaaatagactgaaaaataaaaattaatgtaaaacttattaatccaactaattgtcacaatggaatcactattaataatggagatattgaaactaaagtgatgtgcaagaaccaagcttagacgaatggctagtagctctgccaccttagtagagaaatcacctaacacacttgatgaccatgccaaccaaaccacaccctctctatcccgtatcactcctcgcaatccaacaaagcctctccgcggaatcactgaagcatccgtcgctagag

SEQ ID NO: 75248 - DNA, 665 bp, Cannabis sativa
cgtggtcgctccaggttgaggagaaagtcataaattcatccaagttatcttgttggtggaatagagcatggaatcttaatatgctaccaaaggtgaaagtgttttcttgacgtatgttccatttgtctttaccagtagaaacacaaacttatctcccaaaaagtttgggttctctatgttgttctcgttgcggagaagaatctaaaattcctgagcatgctctactttcctgttttggcttgattccagagcggcatcagttggggtgcggttggtgctctgtcaatgtgtatatgaaccaatgtaggaaattctcctatttctctttgataggataccccatgaggtttttaaattgatgatgacaactctttggtggttgtggtatgataggaactcagtactatttaggagcaaggagtcaagattggatgttattctaaatttagccaataacaatctggtggagttgaaggagtatggtcaatgaggtcttcatttgggattggaccatgcaatctagctgtaaaccgagctactcaatggacgacacctcctcctgaatcttttactttagcgacggatgctttggtagtgctggggaggggctttgttagattggggagtgatatgggatgcaaagggtgtggtttggttggcgtggt

SEQ ID NO: 75249 - DNA, 768 bp, Cannabis sativa
  modified_base (147)..(149): a, c, t, g, unknown or other
  modified_base (285)..(290): a, c, t, g, unknown or other
caccattagcggcggaggagttcgccgctaatggtattgaatgttgtagtgatcattcagctacatcgagagttattgaaaagacttaaaccaattcttgaaaattcaatagatgagtagtaaaaatggttcaaggtataatatatnnntcttgaatttcttgaattaaaatgtttagatagaaattgtttatttgtttgaaataataattataattataataataataataataataataataataaactttgtttataatggtagaattacttaggagcactnnnnnnaactcatattagagtgagagtacctatggatgataaaccaaaatagcatacccaaaaaggtgaaatagctacaaatgtcttaggtgtatgctccaagacatgcaattcatatatgtgttacctggttgggaaggctctacaacaaatggtagaattttatgtgatgtcatacatagaacaaatggtttgtggattccaaaaatggtaagcttggtgttttagattgtacattttttatttttgattagtagctcatttaggagacaacttaatccctatttttatttcattttaggttattattaccttgtagatgttggatatactaattgcaaagaatttttttgcttcatatcgaggctaacgttatcacctcaactaatgggaagatggaaatcctcctaaaaatccacaagaattttttaatatgaagcattcaactactaggaatgtcatcgagagatgttttgatgcaatt

SEQ ID NO: 75250 - DNA, 954 bp, Cannabis sativa
  modified_base (891)..(913): a, c, t, g, unknown or other
gccatagcagtgagaacatcaatgactgatttttcaaagcgacgttgcctgagttgatcacgagcataggaagtggccagatcagtaactgtggtgattaactttctacggtatagacacaattttagtggttattgatcgactcaattaatatgctaatttcatttccttaaagcacccttgatcagcttgaatacccttagagaaaatcatagagaaaagagagaaagaagaagagaatgaataaatggcacatttttttcatttcttcaataagtgtgacttttatacaacaactgaagttagttacaatcctaactaacttaaagtaacacaaagtgactgcctaattttaatatgtaggattattcaatcattaggctttagttatgaaattaagttattaattatgacctacacgtttgtggggatttatttaaatttagtatgtactgattatgttatacatgtgaatttcttgtttttcgtacttgtgcttggtagtagtggaacgcgacgttgggccattagagagtcacttttcatatggtttagaattttattagtagcgaggcaacatggttaaatactagaagtgtcaggaaattgtcgggatttggaaatgaccaaactacccttggttatcacttaacatttgaattttgattagggctaaatggtcattttgttaggaaatttattttgtccttttgtgcacattagtaatctgatattaggtttcaattgttaaatgttttaattcatattaatcttagcaataaagtaataagctacaaaaaacttagaactctctctaccattctgtctctctttcgaaccatctagggccaacaagaattgagggtttttgtgttggatatattttaccannnnnnnnnnnnnnnnnnnnnnntgtttcattaacatcctaacatgaattctaaaacaatgaaa

SEQ ID NO: 75251 - DNA, 643 bp, Cannabis sativa
  modified_base (380)..(384): a, c, t, g, unknown or other
ccaagcaaatacatctttgttctcgcgaaggacttgtatgtactgtggtaactcttcttcagataataaagcactgacaaacacaggcttcggatcatcctcggttgatctctactaaatcatccacagttgcttgtcctccatcttcgaattcctgaggtgctggttgaaagatgtctataaaatcttctgaagggtttgagctcgagccttcatcttctactgtcatactttcttcagaagagatgtaattgacttgagcaaaattttcttcatcttcttgtgtttcatgcccctgaatagtaattctcaaagatttcttctgttttggcacccactatttttacttttttgttccctttgactgtggagcacttggnnnnncaagcctttcgaatgctgacactcatggggtggatgtgcttgcttcaagtctatcaaataccgacacctgtggggaaggtgtaggaacatcgtcgctatgaaacattttttgttcctcctttgttaacttgtctggttcaaaagaagcttttaaacaatcactattttgatggattgtgaatcttttttgcttcttgaaatgaacctttttcttcgctgttttgaaggttttcggagttacagaagtggaggacgtttt

SEQ ID NO: 75252 - DNA, 865 bp, Cannabis sativa
ctctctctctctctcttttcttcagctgaagggcaattcagaagacaattggagtttttcttcaattctttggttagttctagcagaagataatcttaaaataaacctagaatcttgaggtaagtcttcttctattgctcttggtgattttttaggtttttaagttaggttttgttagttgttcatggattttcttggctgtaggtttagataagtttttagcatgatttctatgtagaattgagtttgtttatgcatgatttaattgatctgatggctgtttggtttgaattgtgttagttgaagctaaaagaattaggttttctttcctagagcatatgattttgattcaatgacttcattactgtgttttaaagcttgggatttgttgtatttgtgatattggactgttttggaaagttatagcaggtttggtggaggtttgatcagtttttggggtgaaaaaccaagtttcctcatggctgcccagaaaactggtcgaccggtttttcaggcaactggcaaaccggtcgaccagtttggccagcagggggaaatttcaagtttttcctctcaaatctgatttggttcggggtattttctggagtgtgattcagagtattttagagatattttgggttagtttggtccaggggaaaatagagtgtttggttatgtgaattaaggtttatttttgagaatctagtaaagatttttattaagtttgggttgtcgtcacataggaccgacagtgcccagctttttttccactcaggtcagcccgcacacttaagttctggactgaggtaagaaaaagtattaagtatcacttagggttaagtgattaatttgagtattctaggtc

SEQ ID NO: 75253 - DNA, 741 bp, Cannabis sativa
atatatagtgtatatattgtatattatattgttgtaacatttatttaatctctttgttggtccttgtattgtattacaatagagttgtaatatcttgatgttcttccattgtaataaaatctctaacatccacccctaaaagaaaaaaatcaattattgcaaaaatttctgtgtgtttttccttctttttcgttttttggtagagaagaaaattggatataaagggtcaaagagaatttaaggaaatatcccctcaaagttgaaggaatatttatgtatataaaatgcatgtcaatcatatatattaggggaattaccctctccaaaaatatacgtaagattatttttctgattttttattttatgaccatatttattgtagtaataatgaatttttattaattttttaaaaaaatttaaaaataataccagtcatttggaatatactgccagtcatttcgactcaaaaataataccatcacgattcacgatttataattcaagattttaatatgacaaaagcataaattttgttgcccaaaccttaaacttaaaataaatataatatactagctaactttatgagttactttatgtcgcaaattatatttaattatatagttgagattaattaattgggaaattaagagggtaataaattacagttaaattacaaatgtaatgcatatatcataatatctaatttgattgtgcaatttaagagtgtatttatcattgttt

SEQ ID NO: 75254 - DNA, 533 bp, Cannabis sativa
gagatcttggcctcttttgtcggttctctaattaaattgtcttattagatcgttagcctcccgattgcagcaatctaattctgcctggtgaaatcgatggatgtactcttggtcatccatccatctatagaatttacatctctactgagtgaatacatcataatcaatagctcatggttcttcagttaggcctgcacaacctacaacttccatgagtctaactatgtcaaggtcttctcctaggtctaggtgaggctcgccaattgctggctcgcccacccctgggcctgtttctccatcatagaattggctttgaggtccaattatcgttataggaggctatcacccctaggtccttcattttgtgggaggtgcaaatggtggatctactgctagaggtgtaggcctgccaattggatccattgggatgctcacatcaggctggccaactgttgtcgctagacttgttgcatctgttgtcactactacaaaaagatgaatttgcaacggtccccaaaaggattttttttgct

SEQ ID NO: 75255 - DNA, 667 bp, Cannabis sativa
aagtatcggactatcatcggggccctatcggaccccatcggactagaggaaaaaaattgcagaacccaaaaaaatgtagtatttacaggtacatcaaccatttgatcaaacaaaatagcaaaataatagtaacaacccacaaatcaagcatcaaaataacattgtaaatataacaactaccaagattaaacaaagaaaaataattaccaattgaattcgtgtatgatgctttgtccaagaataagtgaaaagaatgtagtatagcttgtagtgtagtgaatagaagtgaagagaatgagtgaagagaagggaatgtagtattttttgtggtggaggagtgctcggatgaaaaatgggagggggttgtttgtttcagtggtgagacaaaaagagggaaagagagaagaaagagtgggtgatgtaaatagggagggcattttggggttaacacatttgttggcctatcctaccattattgggtatcataagtttaaggtattaattttaacttaatgtaagcatataaaatcaattttcccttccctaatttattatcaaaatattctgacaattaattgtggtagagattttgatgaaatgtctcacctatataaatttagggtatggaagtccgattacccacactgatcagtttcattttcatttg

SEQ ID NO: 75256 - DNA, 1056 bp, Cannabis sativa
gccaattgctcctatgccagccacactttttcactccttgttgtccaattattgtataataggcaagctaaggctgtggatagctagaaccttcaacctgaaacttcctatttttgttttttcaatccatcttagtagtctttgcaatgagtgtgtacaagcttcccattgcagccacttctttacttggtccaagcaatctcgagtaaagtcacactcaaagaatatgtgttgaaccgattcttcctgtaagccacaaagaacacaggtggggcaatcatctataatgtggaaccgatataatctcctctctctaagtttttaacttgttaagtacaacaattgacaaaataaaataatgcttaggcaaattatatcggcaccaaacttctttgcatcatctcacattttcctaaggaggtcgtaacagcttatacccatcagcaatttggtatttctgtgccatgaactgtattgggtccacatattggatcactttgttcttgacctccactatttttctccagtaccagttgctttgagagtttgttttgaattgccaccagtcatcatcttgtatatatacacgacttacccattttagccataggctatcttttttggtagctatagcccaaacatatttcatcatcgatgttgtattccatgttgaaatgtccttgaatccaatccccctcgtggatttggtttggcatagtgtgttccaggccatattgctcctggtctagaggttgcggcgtgacctttccataagtaagcacgacaaatactctcaatttctgcaatagtcttctttggcaatatcataatttggctccaataggtgtgtattgccattaagaccgagttgatcaaggcagcttgtcttgcgaatgataaattcctggtacttcgtggtctaactcggacagtcattttctccgcaaaagatttgtattctactgctgaaattctctttgcacaaattggaatttcaagatacttgaagggcatctcactcctgcaaaagccaaaaatatctatgattctttgaca

SEQ ID NO: 75257 - DNA, 1187 bp, Cannabis sativa
  modified_base (55)..(62): a, c, t, g, unknown or other
tagaaatttgaaaaaataaagcattttctctgtcaaactctctctctctctctcnnnnnnnntctctctctctcttttgaacccactgagaacaagctagggttgggttgttcttcagcatttcaagcagattatagcaggttttaagtgaacccaagctaaggtaagcccttaagaaactccctctttagtttcttgagttttatgaaagtggatttatgcatgttttgtgattttggctacactatttgttgttcttgtttagtttgtgtttttgaagttagaatatggttagatatgttgaattaagcatgttttaaaggctgattttttgattgagcaagctttgagttttagagctcaagcttggctcttaagggtgattttttgattttgagcatgggtagtggttttattgcttggactatgtctattggggtacaatatgcaggtctagaaggtttggtaaagtttgaaattgatttggttaggctttggaatgttttgggtttcttattgtaaatcggctaacctgttttacaggacctgtaaaaccggttacccggatttgctactgggttccttgaaaaatttgtgttgtcagttcgtgctagtttcagagttttggttgattaattccctactagtttagggtatttccatgttaagtttcagtagataggtttttagtttaaaacctatgtccccggttgtgatttagcgtgtcacttatccatgttgttattgatgtgatttaggagcctataatccgccgagcagttgttccacacaggttggccggtgcacctaaaattggaattaaggtaggattagtataatgatattcatacgtgtgtacatgtttagcgtacatgttagttgccgtcagaataacatatcagggcatcagtgaggtgtacatagagttgcatcgagataccaacagatatatgttaggaaaatctatagccatcagattagcataccagggcatcggtgacgtgtacatagagttgcaccgagatgccaacacttgtatgctaggctatcagatagtatgagttatctgctaccacatcagtacgactagagtacttagtataggctagatttgcagttagacataccttgtcgtatgaatgttctagactcattactgtgtgggacacggggatagggttataatc

SEQ ID NO: 75258 - DNA, 906 bp, Cannabis sativa
acgctacctgcccgaccttctcaagtatctgaaatgcccaattaatctagggcttaacttacccctcttcccaaagcatcttataccctttataggagaaacccgcaggaaaacatgtttccctacctgaaatgtgacatctttgtgcttcggatcagcataacttttctatctgctttgggaagcaagcatcctagccttgatcttattaatagattcgttggttctctgaactaactccggacctaagtacatcctttctccagttttgtcccaatgaataggggagtgacatttcctaccatatagcatctcatagggagccatccctattgtactctggtagctattatagtaatagaattcaattagaggcaagtacttactccatgaaccctcaaagtccatgatacaggctggcaacaaatcctctagtatctgaattggtctttctaattggccatgtgtctgaggatgaaaagctgtactaaacgtcagcttcgtgcccatagctttctaaagactcacaaaaaactttgatgtaaactttggatctctgtctgaaacaatggattttggagctccatggagacaaactatctcctttacatacagttcagcgtactgattcactgaatatttaactttcactggcacaaagtgagctgattttgtaaatctatccactatgacccataccgaatcatacattccggtggttctaggtaaaccgattataaaatccatcacaatgtcctcccacttccactcaggaagggataaaggctacaataacgctgtcggcaattgatgttcaacttttatttgctggcaggttaagcacttggacacgtagtctaccacatctcttttcatcccataccaccagaagtatggttttaaatc

SEQ ID NO: 75259 - DNA, 1111 bp, Cannabis sativa
  modified_base (1085)..(1085): a, c, t, g, unknown or other
tctctctctctctctctctctctctctctctctctctctctctctctctctctctctcttcgttatggtcgccggagttgaagctccacgtcacttctctctcttgatctgcccagccattaatgttggccctaatttaatttttatttttctttgatttagaaaacagtggcatggtggtaatgggtgggttgtgtggtggtgatgatgataacgagatgaataacacagaaaagaaaaagaaagaaaaaagagataggagaggcagttgggatggataagaagatgtagggtttttttttattctcttaagaagaagaagaagaagaaaggaaaaaaaataaagaaaaaaataaaatgcaataatttttttaaatatttttttttattttaaatttttttaaatatttaaaattattttttaataattaatactgcgtggaccactaaaaatttgccacgtgtacacaagtgtgccacgtgtacacacgtgtacacgtaggcaggacactgtgacacttaactgaggttttttaacagaagtactgcaaagagaaaaacgaatgggagttcagtaggttttgcagtcaaaattttaattttcgtggttaagtgttaaaaaatttaaagttcaagtgatttagccgtcaatatcccctcatatttttttattatgaaaggaatcaacacatggtaaaatggcaatttttgatcgtagaagagatttattgatggaagcctaataccaataaattaatagtaatttcttttctcttttctctttttattttatattaatatattgtttattaaattattggtaattaaaatcatttttcatcacttttttttttctttcaatcatacatgcattatcaatattatttatattttattgtacttttatatttttgttattggaattaccatgtctctaaatcatgcatacaaatcatattataagaccttttatttaatatttttgaaaaaaatcttttatttataaattttatagctagagttttattcttaattcactctaatattaaattcatagtacccaatatatctttatatattaaaantgcctatctaacggcaattcttggtt

SEQ ID NO: 75260 - DNA, 585 bp, Cannabis sativa
acaatctcaatagttcaggaagaatttttaacggctaaaaaagtttaggggacatgatttagtacatgtcaaagttcagaggaaaaaattactaatttggcttaaaattataaaaaaaaaattattttaattacttgatcaggagggattgtaagtcaatattaatagaaaggacatgatattgataattatttatcaaaatacaaagaaaatgagaatatagtatttttctttttggattttttaaaattcatttaagtagatatatagaacatgatatgataatataatagaattgacttatacattgggttgtcatgcctctaggctacgtaagaaattaattgatttatatttatctagcattgccacatttattttaatcatcattctttgagtgtgtatgtatatcattaatgatttgtgacacttttttttttcctttaaaaataataatttttttgtaatttatgtatatatataaatggtttttttcacaaatacacaaaaataataaaaaaaaattataaaaatacgattttacggaatttttaatatttgtacaattttttttaattttattta

SEQ ID NO: 75261 - DNA, 1050 bp, Cannabis sativa
ggcttttgtggagaccatgcaggttggcaaatcttgtcaaagaaaataattcgacaaggatactattggccaactataaataaaggcacacacgattttatcaaaaaatgcgataaatgtctaaggttttcacgtatacctcgcgtaccaccaataaagctaagagtgatgacctcgcctcacccatttgcaatatgggggattgatttgattggggcactccccacagggtgaggaggagcaaagtacgtagtggtggcagtcgacttcttcacaaagtggacagaggcggaacctcttgtttccataacctgcaagaaagttattcactgagttatgcgagagaaacaagattattaagagcttctcgtcagtattaaggcctcaagcgaatgggcaggtagaagctgttaacaaaaccttgaaggatactatcaaaaagaagttggccgctgcaaaaggtacatggatcaatgaactaccacaagtactttgggctcacagaacaactaagaaaatagcaacagggcatactccattctcgctggcacttggctcgaaggcaatgttgccagtagaagtcaatattgtgaccaaaagacgagatttctttaattaagaagaaaactaagaactcttgaaattgcccttggatctacttgaggaaaaacatactgagtcgcaaattactaatgcaacataccaacaccgagtgacaagatatttcaacaaaaaagtgaagaagaggctctttaacgttggtgatttggtgctaaggcgagtatttgcaaatacgagagatgcatctacaggagtatttaacccaaaatgggaagggccttatgtgatcgaagcaatagttagaaccagggtttataaattagctcggcttaacaactcgctattaaagaaccactagaatgtagagcatttgcgaccctactacaagtaaattaatgttgtaatctctctttctgatgtaatattttgaacttcagttattaataaagttaattcttttctaagtacaaagtcttattctttaaaatt

SEQ ID NO: 75262 - DNA, 526 bp, Cannabis sativa
tttaatgcctaaccgacccaaaacacatagatctagaacttgacctgaccagaggatcactgttctcaccaaaaatcaatgctctcgacctacaacccaagttcaaaatgccaacgtggaaaatatatacgggcaaagaggatcctttatgtcacattaaatattttaaaatgcaaatggacttacaagtggtgagaggtgacatacggtgtagagttttctcagctaccttggcggaggtcgcctatcagtgtacctacaagctggcttcatagaaattttcttcatggaactccttcatggtagaatttcacgcgcaattctcctcctctaggcaactcccatctcacttaaaagacttggtcgaagtgaaacaaatactaggacaactctcaagagcttacatcagtagattcatgaatgaagctacaaaaagtgaagggattaaccgaggaagggaggctggccgcaatcctaggaggtattgaacctctaggacaattatagaaagacataaaaagactta

SEQ ID NO: 75263 - DNA, 712 bp, Cannabis sativa
tattttttttatatagaaattaaagataaattttaacacaatatcaattttaattattttatctctatgtaataaataagtttttgccgtataagctaactcgataaactaatatttaattaccaataaacatctctattgaagtgttatatattttagcactttttttttaaaaaaaaaaaataatatgaaaagttatataatttttacatatatataatttttttaaaaaatacataataaatataaattatttattattagtagtaagtatataaatatcttaaaaaagtatataaatatcttaaaaataaaagaattatagtatattttttttttttgaaacagtttaatacaaatatttaaaatatagtattattataaatttattttaaaatatttaatttatttcttatcatctttatagtcttttttccttttagtcatgactttaaaatgcaaaaacataacatatatgcatgtcggaaggaccgaaccaatgatctcattgaatagaacaatccgcgtaccatttgagctacttgattttcacgacttgtgttacattaaatatttatatattataagcttttacatatgtatatctactaattataatttttttggggcctcgaaaattatggagcctggggcctatgccctggctgccccaccctctggccggccgtgatcttgataatactctgcgaca

SEQ ID NO: 75264 - DNA, 610 bp, Cannabis sativa
ggcttgaagcgggaacgttacatgattactcctatgtttaaggttgtaagcaaactcaagagactaaagttgttgttaagagagtttaataagcatgtggtgggcgatgtttaagccaaagatttgaaagctcaacagcaattgaaaaatatccaagagaaaattcagtataacccgatgtaagaaaagttgatttaggaaaaagttaattaggttgaagatggcgattcaaacatgcaatttattcctgcgagtaattgtgcttggacagccaagaattgtatttttttcaattaaaaacatgtctggtagtgggttgatgaatcagagtaggttaacccttcttgagttatcatatagataagcttggttctagattgtcgtttcaaaaggctgtgataaaaaggctagtaattcaaggagaagttttgagttttcaataggagagacgattggtggagagctacactaagaaggaggttaaagaaactctatttaacatacctggtcataaagcttctagcccatattggtttagcaactatttttaaatttataattaggacattattggcaatgagataactgaagcggcattgttatttatgca

SEQ ID NO: 75265 - DNA, 1155 bp, Cannabis sativa
aaattaatgatcattaactattttcgctcctcgttgaaatcatctttatcaatcgaaagattgtaaaaagaattatcagagtagattaccaattaattgaatttgttgcttcttttttacaaataagcataactgtaggaaaataacaagcaaattattaaaaactaaggaaaaatctaactgtagctcgttgaatagagaaatgagtttttggcaaagatgtaggagattgtatcgaaatgaaaaattcacaaatgttaggttgggacaaaccgaaatcttataaaggaagaagataggtcaagaggttgttgcaaaataataattagatgtaattttttaaaattaattaagtattcaaaaatttattttagaagggatggaagtctaaattttgtaaaaaaaaaatagaattttattgtaagtattatagttaaatggtttaaatgttaaaaataatataatagggacttaaacataaaacaaaattatttataaatattaattggtaacaaaaggtgttattaaatatttaaattgaaattaattattttagaaatattattaattatgataattttaatcctaaaaaaaaggaatttttacctattggtaacctgctattacaggtcagaaaaatgtaaccatcgtggttagaataaaaatataaccactgagtaatcaccttttattatttgtatgtttatataatttatctcttctaaattttatttaattatttatatattgtttaaatattttatattatttaatttagaataattaatatttttgccacctaaacttttgacactacctgattttaccccctaaaatatatgacttattaaaaatctcccctaaaatatagaagttacataattatgtcagttctgctaggttctatttcttttacagttaaaacttagtatttttttaccacgttaactttgatcaataaattttttttccctctttaataaaaaaaattaattttaaaaattataatgttatattaattatgaaaaaaaaaattataaaaattattaaaaagcttgataaaaataccaattttgctagtttttatcactcagaatccaattttgctctgggaattatctgcaaaatggtaaaaaaaaatagggttggctacct

SEQ ID NO: 75266 - DNA, 1376 bp, Cannabis sativa
tttttaataaataaataatttttcaaattaattaaatagggacaaagacaaaagttgttaagaaaaaatttgttgagacaaaagttatcaggatgaaaaatactattcttgtcctaaataggacaaggtaggcgcctaccttatagtaggatgtccctattagttttatctttttgggttaattaattcaattagattaatatttaaatttaaatagtagttaaagatatttcaagttagttgagatattccctcaaagttagttgagagattctctcatctgagatatcagtaaccgaatttggttataaatatttatttaaataattaaatataatttaattaatgagaaattaactactataaatagaagcctgatttgaaaatcaagagatgattttttactattattttcaaaatatagaggagaaaagaaaaattatttttctcagttcttgattatgtgttgagaatttatcaagaaaagattatacactttatcataatagcccacaatattcttttgtgtggttgatcgatttgaaagactacaatgtgagtttttaatcaaccaaaaggattcaacttacgagtatttttttagggtaccctgatagtcatcaagatgtatatattaattccttttctgtaatttatattttgatttaatgtttatacatctggtgatctattgggactatagtacaatgatattcagatttacgaattctttccctgagtaaaacaacagttagtatgaagagcagttccatgaatgtataaacattaattgatgtgtgggttttatgcatttatatatatgtgatatgtatgtgaatggatggttatattattataaatctataagaggtgatgaatctttaattatatagtaaaattgactgtaggtttcattattattttttctagaaaataatgtaagccattatggggcataggaattatttaagtaattataattttatgaaaattaatttttatgtaaattatattctatgtaatgtacattgtatgtgagctcgatttctaaacatgaaacccgtccatgcacgaaaaaatcacatgcatgcgaccttaggaatttttccccggccatgctcgacttcgggtttcgtgcccttatactcgtgcatgcatgcatgcatgtggccataatggacatacaacatcctacccatgcattgcaaaatgatcctagacattcgaatgtagcaggccgactagtcccgaccaaggctagctataaaccttagtcctcctttatgcctggtcgaggtcggtgcacctcaagaagcctcaagggattttgtgttgggttttacgccctaaataaaactctttacaatctgattagt

SEQ ID NO: 75267 - DNA, 666 bp, Cannabis sativa
ctatagcaaatattttaaactttttttttaatttgaaaatttctttaaaatttactaggtatgctcatataattcacaattcgtggtttcaaaatctaaccaatttgaaccaaattatttaagaccggaccaaatggtgtcaacggtttggtcaattcggaccatttataattctttggttcggtcacaattttaaaattctcacatgtagttcaaaccaaaccaaaccgcttaattcttgatatatacttaatataattttttttattgaatattgatatttggcaacaattttaagcctaatattgataatatcttaacattgtgttaagattatttactttcattgttatttatgtattataaactttaaagtaaacataattagtaaaagaatatttaaaaaattacgaattacaaatcatagtttggtttggttcgactttgaattttaaaaaaccaacattactagtttggttcaaaaaaattaaaatttggaccaaactagactgaacatgcttaaaatatactattcatgctctacatttatagaatattatttattgcttgaaatatattttattagttgttttaaattttaataattaattttgtataggaatatgtgtataaaattttaaaaagtaaggtttttgtgatgtattt

SEQ ID NO: 75268 - DNA, 638 bp, Cannabis sativa
gttaaactaatcttgactatcctcttatgcttacaactcttttaagaaagctattttgtaaggtgcaagacattattagtgaaaagtgagttttctttattgtgaccttgtattccatcattgtgaacatcaataaagtttggtcaaaaagcattattgattagtcactacaaaatgggtggtgaaccacactcgtgtcaatttctttaatcttcattctattgcattttctggttttgtccattacttgatgacatgttttattacttcagttcgtgttattttggaattttggtaaatgttaattcaccacatatttaaacacaccaagattcacctataattctattaacacaggaataaagtaataaaaaacttagcatatataataaaagaaaaattggacagaagaaaattattatacttatataaatcacaacaaagcttccgtatatatgaaaacaaagtttacacacactaatatgactcaatagatagagaacaaagtttgcgtacacacactacacttgagtacacatacactcaagtgagccattattccttatttcccttatatattagtaatgatatgacatagcattactaatatgatagagattattatgagatttatatat

SEQ ID NO: 75269 - DNA, 1295 bp, Cannabis sativa
tccagggtccaggtctgggttcgagtcctaggtccgggtccgggtcttgggtcctggtcctgggtccgcgtctgggtccgggtcccagtccggattggagattggtgttgaccccaaatcctttgtaaatattataatacaagctaatacgcaccatgtgttatgtattaaataatacaacatacattatattaaaacatttgatcgtaataattaatacaatacattgctttatccaaatttagtgatatttattatttaatataatacgacccttatacggcatagcaaacgagccctaaatgtataaaactatacaaaatattttctaatacaaggacactgttattttaatttattctactgctcttttaggctgcctttcaaaaatagtaaggtcatgggcgtcatattcatgatgcctctcatcaacacccatctcaatcactatctcaacatcattgtatgtgattgtcctagcatacacttcttcatctaggtaagaaaataaccctctcataacaatcaattactgttgaagaaagaacttaaaataaatgttagaatcctatcgaaaacatatcaacaaccaatcgaaaacctttcaacaaatagacataacacaacagagggaaaaaaaaaaacacaacttatcaatgatatcaacaaaagttaaacattacaataataatagaaataaaatgcaaacatgaaataaaaaaatgcaatactaaatcctattgaaaacctactaagaatccatcgataatcagtagacaatcactaaacatgacaattaaaaaaataattctcaatcctattgagaacctatcgacaatatgtcgataatcaagcaacaataaccaacataacaacaaaaaaataaaattctcactcttatcgagaacctattgataacttgtttataataacaaaatttcttattttttggtaaaacttgaactatcgataacatgtcgagaacttctcgataattagtcaataatttatcaataatcaagcgagaataaccaagataacgacaacaaaaagaattctcactcatattgataatctatcgaaaacatgtcgataatcaatcaataataaacaaattccaagttttttttgcaaaacttgaactatcaaaaaaatgttgataaatgtcttccctgaccttaggacatctgcatcgagaactcgtcgagaacgtatcgataaagctttgagaaaattacgaacacacagaatacttaagaaaactagatctaatgatttcagcgaagaatacatca

SEQ ID NO: 75270 - DNA, 751 bp, Cannabis sativa
gagtatcattataataattggtttaatcattatttttactattagtaacttttgtacaataattttttaacatgaaaaatgtaaaatgtaattattaaatatttagagtttacacacaaaaagaaaagaaatagatagtttaagatgttgaaatcgtaatttaatcgaaataataaaataaataaaatagtgaaaaattaaataaggtaaaaataataataaaacaataaatacataaataaaagactataaatttattctcatgcgcaaaataagtcatgctatataagaaataaagtttcaaatttaggtccttaataaatttacatatttgatattcatactcttagtctttacacttatatattgggattttatgccttaaataaaactcattccaatacaatcttatttattatcaatagaagattagaaattattaatgtttacatatagtttttatgtttatggtttaatatatacaatttttgttaaatacacaacttatagttattcacaataacaatgatgttcacacagtagaatgtaattattattacatgcttcaaaagataatgtctcatgattcatgagtgaactggatttatactgatttgatagtcagcgataaagtttacttacaccttcgataagttttatgttctttcaggatattgtcaaagtatgctagtatggatgtatagagtatatatcggattgggaccgatattgatcttggtaaagatattat

SEQ ID NO: 75271 - DNA, 670 bp, Cannabis sativa
catcaattcgaggtaaaggatacttgttcttgatggtaagcttgttcaactctcggtaatcaacacacattcggagagacccgtccctcgttttcataaataataccgaagcaccccaagacgagtaactcggtccaatgaatcccagattcaataactcttgcagttgtatctttcattctttcgattccgctggagccattcaatacagtgcctttgatactggatccactcccggaaccaactctattacaaactcaatttctcgagtaggtggcgatccctgaaaatcttctagaaagacgtcaaggaactcacacaccaatcttatattgttaggtccagatttcacaggttgactagtatccactgcagtgactatgagtccctggcaacctctgccaatcaagtccttagctttcaacagtgttattcttgttatgcgtgtcctctgaactttacccacgaatactgctgggttagcactatcgggttcaaacaccaccatctttcgcttgctgtcgatcattgccccatacttagacagaaaatccattcccatgattatgtcaaaatcagagagttgcaattcaattagattggcggtcaattaaaaacagtcaatctagaaggacaaagaccgaatccacctagtggatactataaggtc

SEQ ID NO: 75272 - DNA, 814 bp, Cannabis sativa
gtaattatttttggtcaaattactgttttacccttataattacttctttatcccttagtaccattaattcactagtaaaagtataatttagatcccatctagacttatgcacaactttctagttctagaattaacacttaaaggagggaacaaatattcgatcagttaagaaagtcaatattctataattgtagatcatgttcccagccatcaacattattagatttccaaaatagaagttgtaagaatcattgtctctaagaaactttaacgagtgaattaaaaaaaaaaactaataacacaaacaggagtttatgattactcaagatttagactgatttaccattgatcatcattatgatatgaattagatcttttagtaaatggcatgttagataaaaacaactccattcatatcagtccttgtcatatataatctctattatatacagcaccttcacttcgatgttatactacattcataattcgagccgagattacttgcactgaagaacgggtattagtgaaccatactaccaaccactaattaaagattccataactttaatctgactattttattcatagctaagtgatcttagttctctgtacaactataagtcacagcctcatatatgaataaggaattttctaatttttatataaaaattattcaataataaatattaataatttaatattcatgtatatatcaaaatatttaactctttattaataatcaaaaatatctttgtaagtttttcattgcataaaccctaacatcctcttctagaaaacttacaactcacttaga

SEQ ID NO: 75273 - DNA, 696 bp, Cannabis sativa
ctttatgtttttttcaaaaaaaaatttgctatgaaatatttttttttttgttgagaaaaaattatatttttgtaaatttatataattttttttattttggagaagggaaaattcgaacttgaaacctcttctttataagcagaagtatggaattactaggctatgtctatcaccactacaaatttatactttaaaaccataaaaataaaaattatcttttattttttttataattgcgtatgttatagatatttaagaacacttttaaaaattttaaaaaattctgaatagtctaccgtatcaaaaataaggttcaaacaattacttaccatgcttataagaaaaattaatcatgcatacaacaaaatatttaaacattatattcaccactgtaaactatttagatttttttaaaaatttactgataatcttaataaataactataatgtacacgatcatgaaaagaagttaaattaaaatactctcttagatgctagaccagataagaagtctaccataataaacatttaagggggtgtattataaacatactctacctttttatgttttcattacttttcggaaatatatgtaatatatataggaaatttttgtagtacactccctaaaagggtattttagcagaccatttatctgtttcgataacgggaaaagttctttagtttttttttttt

SEQ ID NO: 75274 - DNA, 872 bp, Cannabis sativa
tggtttgcttagcctatatgaagcctcacatttgagttgtgttggagaaaatatacttgatgaagcacttgctttcacaacaacacacttgaccgagtttttggcaaagaaaaaaagaacactatgatgacgatgatttcttgtcaaaagaaatatctcgagccctagagagacccttaagaaagaccctagtaaatgttcatgctaagcatttcatttcgatatgtgaaaaagatgcctcacataacaaagtattgctacaacttgcaaagccagattttaatctactacaatcccagcacaaaaaggagcttagtgaaatcagcaggtatataatatatatatattaattatgattaagtatatttttttattaagaataaataggatttttacttctcaaagacacttataggattttctcctcataattataaatttgcgcctttcatttgcaatatttagttcattttgccacacattttcctaatgtgtaagaccaatgatctagagctaatttaatgtaatttgaaagttaaaaaaaaaataataattgtatagatcataatactaatctaatataaaatctggggttgtattcataattttacagttaatttttcaatatttgaaatcattataattgatttcaattagcttaaattagttgaataaacccttatattgtaattatacacgtagctcgagatcacattataataaattatcttaaaaatgagcaaaatagaatcgaaagagaaaattcgtagctacctcaatagttcgaacaaaaaataaaaataataattaattgaggaaaattctacaagtatcatagtttaggagtttaaattttatttttattaatttat

SEQ ID NO: 75275 - DNA, 833 bp, Cannabis sativa
  modified_base (264)..(270): a, c, t, g, unknown or other
atacataaattttggtttaaacaatttaattgaaattttagtgttggtttatgtctaatatttgagtaaattaattgaaactatatgtcgctaaagtgacctcttttgtgtagattgatttatttaaatattaggatggttgcgtgtttgtaattgatgtatagattgactagcccaaaggtaagtgaatatttcgctaactttcaaacatacatgtggcaataaatgtgtgacaattataagatattttgtgtgagcaatacnnnnnnncaaagattaatctattgtttgacacaattttattgttaatgtttgattgctagagtatcacttacagttaatattactgtccaaagacttgatattgatgtgtgtttggtatcttgagatgggattgactaatttttgaatttattgtgagcttgttttatgcatattaatgtgagcttattttatttgttctatattcagctagttcatcttcagttgctacaatatttgctaatattaattctatttctatgcttaatgggaccaatgtcaaggattggaaaaggaatttacttatagttctgggatgtatgcatttagaccatacactaaggaatgaacaacctgcacctctcactaaagaaagttcccatgatgatagaagggaatttgagaggttggatcgttcaaatcgcgtgagtctaatgattatgaaacacagcattcaagaagccatttggggcacaaaatctgaaagggttactatggccaagaagttccttgaacaaattgagaacgttttgctaaaaacgataaggttgaaatgacaatacttcttggtt

SEQ ID NO: 75276 - DNA, 587 bp, Cannabis sativa
aattattaaattcaaaattacaaatcgtaccactgctgtttggtaaaaatgcaaaccacaacaacatcgtataagatttcaaactgtatattttatgtagtgcagatagtttgtgttgtgtgagctgtttgataaacacccttcggtaaatttataatgcacctcaaaatatataattatttcggtacaaaccctgtttatttcagtattaagaagagtttttttaatttattgtttttgtaattatttacgttagaattatttgtaaatttttcaaaaaaatttaaataatttataatgccgaaatattaaatgtaaatattttattacattatcattgaatttataatacatctctaaaaatcgttttgatgcattcttgcatctccaaaagttattcactttaattattttttttgtgatcatgtttattatagttattaaaattatttttaaattttaaataatttatagtgtttaaaatattttaatttaatttttttttagtaatttcagattatttttcaaaactataatatacgtagttataaaaattgaataaaaatttgttcagatgcagaaagagt

SEQ ID NO: 75277 - DNA, 573 bp, Cannabis sativa
ctttctaccaatttggtggaatgactattccataaaaaaaaaaaaaaaatctctaatgtaagattttaaaaaaatgaataatttattttattatttttttttttaatgtattttaaattttatttcattaccattcttattcctccgaccaaagtcacctgaattctcgtgtaaaatacaatgcccagaattgcaaccagttggatatttggtattatggtgttctcagttaacaataaaaataaacaaataattggcaaacataaaaaaaaaaaaaaaaaactcagataaaattaccttgtgagatcggaaaaaacagaggagagtcggaaaggcagtgatggccagaactgaagggaaggccagaaggacgaggccggtgagttacagagcaaaatgaaaaggaaaatctccttcagaaaagaggcctgagaggaccaaattcttcgttggccagcgttttcggagcgtgagagagatgatgaagattgaagaatagacgaatagggttttgagtgggaaatgataattgcatcgatatcatacaccacttttaccgactaaacaaccctt

SEQ ID NO: 75278 - DNA, 555 bp, Cannabis sativa
  modified_base (131)..(134): a, c, t, g, unknown or other
atttaaactatttttttttaaaaataataaaaatgacttagaccaatctaggattgtcacgtgataatttacttaaccatgtacttataaaagttcaaaaattataatttaagtattattaccgccaaaannnnaacttaggtatttatttacaactgtgagttaaacttaagtatttataccgcaaattactcctataaaaatacataaaatgataaattttaaaaaatggagtgggatcatgtgccccacatgactcgggtcccttcgcaaccaaacattctcccactaccataatataagctatttttgtttctttttgaaaaagataaagtaatggggcgaatatataaagcaaacactcttgacttcaagttcttttttttttttaatatatagttgacaaccaatagaattactcgccttctttgagaaggggctatataatatactcgtcttctttcacaaccatggtctccggatatggtgtatattatagccttgtagtacataacttttgtttttttttttttgttttttacctgtccaactcaa

SEQ ID NO: 75279 - DNA, 589 bp, Cannabis sativa
acttgtgggagagaccttgggttcttggggtgtctatcgaggaagttcgaagcaatttcacctactctagaagacatgtcttcgtcaaaatttctgatctttttgtggatgggacacgtgagtggaactcagagattatcaaagattgttttgaggaggatgtggctcaagctatcctgagcattcgacctttgatatctactaatgataggttgttttggaaagcctcaaagtcgggaaaattttcggtaaagagcagttacggggtgagtcaacaagataggttcaaggacccgaataaggtgtgggaaaagctctggcgttcatcaattcatcctaggctgaaacttttactttggaaaatatggtctgatattttgcccactaagtcgagaattgggagactggaggaggattgtgtgctctgtcataatgcaaatgaaactgttttgcatctgtttggtgcctgtagtgcacttaaggcagttttgtttcacagtaaatggggcatttgaattgatgatctgctttggaattctattatggattttggtttgtggtagacttctgtgaaggatgagagtttgca

SEQ ID NO: 75280 - DNA, 653 bp, Cannabis sativa
tagaggagtacgtcgtgccccccgacatcacccttactccgatcccctttgatgaggagaggcagcaactttgaattgccaaacataattatgccatggatgactgcagcagggggaatgctgaggtggaagccctgaagaaggtcttgtgggaggctcaacaaaattatttacgcgaggaggccttcaaaaacgcctgggacgtgaacatggaccccctgacggactggttcaaccgcttcgtcggccctgctcttgctcccttcgcctccgaacaaacgagccaattcgtttcccatctgacccaactcccggccaaaagatacgcagcctgcacttccacgaacgctatttgtcaggttcaggacatcagcgctgccatgaccgcggtgagtttttgttattcatttttctctttttgcttgtgctttatcctatggcatttgatctcatactagttttcttttccaaatcgctgcagagactggtcgcctctcaaagaccctgatagatcatgggtacgtcatgtccgaattcgggggcatggacgaggccatgaagagtcagagagacctggcggcctggcggccgagaggaaagcgttctgggaggaggcccaatagagggaggcacaggcggaggagaggcaccgg

SEQ ID NO: 75281 - DNA, 840 bp, Cannabis sativa
  modified_base (127)..(127): a, c, t, g, unknown or other
tgtgttttgtaaaagttactgatttgactctgtattttgttaaataacaaaatagaccctatattttctaaagtagtacaaataggaccctgagattgatttttgacaactttttttttaatataancaacttgaagacaattcttaatacaaacaaatacagaaaatataaaacgttttgtgataacacttttagatcggattataattaaattttattcgacaaaaaattaattcaagatcctatttgtaccattttaaaaaatacagagtccattttatgattttacaaaacagaaggtattggtaactgttacaaaatatagggtccaaaatattatttaccctataatgtatgaatgtttaattatgttgtactcatacttctcatttgaattaataagaaaagttaagttgttgggaagtatatgtctcgtttaatttgaaagtaaaaatagatttgtacattttctattaatattagtggagcacaaaaaaattatgtattcttaaattagtattagtagatgtagttttttcatttcttctttatcaaaaattgtgatattaccaattacaagtctcaaaaatactatctaactactttggttgaatgtttaaaaataaatataaatatgcgttaatttatgtagaatgacaaacatagtatatgagactcataactaactatacgtgaatacctttcatcaattaacacacactactcaaaaaagagctttaatcacaaaatttcttgccacaaaaaaatttcgtatatatatgttttgtttaaccttggccccctaccatttgatactggctccgtccttggttatgtat

SEQ ID NO: 75282 - DNA, 974 bp, Cannabis sativa
aaccttacccaaacagtcaagaataaggacagcgtagaagccaaaattgtctctcacagcagcatccacgaatatattcacccgattgcctgaaccgagatcaaccgaaaacaaggagttgcacggcaccagatgctggccttaagttgaaatgagctataggcaaaaaaaaattaagctcttattataaaaataaatggtatttttaaaaattattaaaaagaaaaatgaatgggccctaggcacaaacttaacccgcgtatacttaaggccaaccctgctctattggtatggtctgtacgaaattagcataattttgcatttaagttttgattttatgactatttacattataattatagtcaacctccaataagtttaaaaaaaaaaaaaattgaaataaaattcaaaacaaacgcttttaagggcatataaaaaatatacatgcaactagctttttgaacatgattttatagtccaataaaatattaagagtttctaaaaattatgagtttacggtataaatacttaagtttaatttttaatggtaataatacttaagttataattatagaacttatgtaggtaactgactgttaattgttaagtaaattgtcacataacaattcctcattggttcagatcattaaatttttattttttaagaaaaaaaatagtttaaatatactaataaaaaatggcatgaggataataacttgacatttaatggctagttacctataaaaattccaaaaatataacttaagtattattatcaccgaaaattaaatttaagtatttttttataattactcaaaaaatttattaaaagtttcaaatatatatatatatataaaataaacccctttttttttgagtaaaaatcataaaatttattaattaataaattcgttcaaaacaatagaaggcacttcagatgaacaatcctccaactgaagcacacaacctgtaga

SEQ ID NO: 75283 - DNA, 745 bp, Cannabis sativa
gataagtttggtgtaattaaattggtaagaaagagaattttggtaattgggtaaatgttgtgtttggtgtaatttaactgattaaaataaatcacattcttaatcatttgggttttaggatactaaaaagtccttaagagtgttttttaaaaagttttggattttgttgatttgttgcaactgtggtttatgcagtgttgttttaatacctactttcacaggcagggaaaactctaagcccaagaagatggaatgttgctttctctgaagatggtcatctcgatattgccaaagttcttagaaggatccaaagaggggtacccttttttctgaactagcttgtaccagtcttcttgttgtgtttaagaattggtacaatactaaattgttttacatgactttctacgccagggcgttcatccttcgattaaaggagcggtatgagaattcttgttaggttgttatgatccaaatagcacctttgaagagcgaaatatccttaggcagcgacggaggtaaggtatttgtttaactgtattttgatcttaaaatatactttaaacatctgaaggggcttctttgttatcatccaagatagtgttcaagtgggggggttgggttcatgttgtatctgatattatgctgcaatatttcgggtgtagaaagagatcgctatgctgcaagatagtgttaaatgcttgctttacttgcactatgggatctaaagattacatttttcctgtcc

SEQ ID NO: 75284 - DNA, 1007 bp, Cannabis sativa
accaataatgtctttcaacaattctcttaattacattactttagaatcggaatagattttaagttacaaatatatttaattaaaatttatatgtatataaaattgataaaggtatttctgcatacaatttgcaagttctttttcatttagatgaaggttagtgttatggcttttgcagttttaagttttaacattgatttgtgagtttttgatttatttatttttttcattttttaggccatattgctttctacgagaaaatggatgaatttcatgtaaatggttggatgatttaattaaagagaacaagaagactcaaaaaccgatgttaaagttttggagtatgttgaagtctcaaaacctgaaagttgatgttgcagcaaagtttagagagcgccgttacggtgaaaaaaataaagaaaaagttgttgggagatgtcaccgctacaaggagtgaactacaacaaattttcgaagatagaaaattttgccaccaaatattttacatagagagttaagtgttacaaacacgattacaaaggaagtttcactgttcttatcccttataaaccgtccaactcgaataaacgcttaaattaaaccaaataaaccgacaaaaaatacaactcaaaaaaatctaataaaaattcaaactgtccaataaatatattgggtggatttaaaactattcgaaactgcccaattaacctgaataaatgaattaaagtgaattttatatcttttaataaaagtgtatataatatattacataaattagatttagtaaaattatttgtatttaaagtttagaatttgtagtgtttaacttgaaatttagattttataataaattggataatgaagttaaaacttaaaatctacaccatatgattactcgaatgtttgtatactattttaatatttactcaattatatttgtcttatgttcaagttcttaaaattaatttagactatagcacttttaaacttaaaatataaataatata

SEQ ID NO: 75285 - DNA, 831 bp, Cannabis sativa
ccaaaaagtgaaattttcctaaattggttgtttactaactaatttattaattcttctactacaacttttactccaaggcgtagtttggcacagttgtgctgtgggaaaaaatagttgtagctgtgatgcgagaaaaacggttgtagcaaacctgtagaaaaaaattgagctgagtgtttggtaaattataaatttcaaagtattgtgagttattaaaatttattatgatgataatgatcgttttatgatctagtttattataatcacaaatatataaaaatttattttatataatatttttttaaaatataaatttatatgcattggataaaaataatttatagcatttttatatcatgttttatcaaatgtaaaaaaaattagaaactcaataagaaaaaatttaggttgatattgtttgttaatattaaaataaaatataaattatttaaaaaaaataagaaatttaattattatttattataaatatttttattttttaatatataataaataagtaaatatagttttagtataaataaatttattatagtcttttaatcaaaacaactttttttaaaagttaggttagagcagattttagctgtaacttctccaaaaaaaaattaaaaaaaattgtttttttgacatcttaacaaacatatttttatcatagttttttcaaaaagtagttttaacatttccaaaaactgtgtcaaacggacccctagttaggggtgttcataaaatagtcgattcaatccaatttaatccgcaaagtgcggatatccgcacttgtacggatttgattgaattgaaaaattctaaatc

SEQ ID NO: 75286 - DNA, 848 bp, Cannabis sativa
attttttgtcttttcgttttctaaatattagaagtttctaaaggaaagctctttccatattagaaggctcagacttgagctagaatgaattaggctcacacttagggctcacccagtatggctcagaaatatatatatatatattttaaaaatatatatttattttagtagttttcaaaaaatacaacatatattgggaattaactaaacggtctaataatttttattttcataaagcccacccaatctcagggtcggccagtagctaaattaggcttaaacctggactaatccccttagtactacgctttacaattttcctgcaattgaataaaagataaagctcatgcctgcaatcttcaactagctgcttagcagctttcaattctcggttcaaaatcaccaaagtattatttaagttctctgaatggtcaagattttgtttcgaaaattctttcaagatggtttttttttctaagtgtgttgagaatgtagtaaagtttttttttttttttctaaaacataaccttttggctaattgtgcagtttcaaataaatcaaggacaacgtgagagagcaactaaaaaactggaatcactgcagcactaataatcacatcatttgccatgttcttgatgaagattgatgatttcaaaaaagtccctttaatttataattgaactacaattcaacaccaaaattttctggtaataaaaaaacaaaacccaaattaaaatttgaccataaataaacagaaatttgtaatatacatatatataaatatataatataactaccaattgtgtgaacaaaagaaattaaggacataaaaaaggtgtgaacatctt

SEQ ID NO: 75287 - DNA, 960 bp, Cannabis sativa
tttctaaatacagtttgatttatttatggtggaattttaattttttttttgtttattactatttaatgtagtttaatatttttagtcaattatcttttattagtatttattaattttgattacattcataattattatcattgttatagcttgtgctatattttggactagtttttaccttttatttggctattttcactatgttgttggctcgtttgatagtgaatacaatctcaaagagtgctactgtaaattttgacagataaattttaaatcttgcttttaattatatttattaatttcgagaaattttttttctattattttgtatcattattttattattttgttatctaattgagtttgttattttttaacaaaataataaattttagttgagatttgatttattaaatttaattaatttctcaaattttatgtatggtgtaggtttaattgactagtatttttctaccattggaaaactttgctctaatagttggacataacaaagtagtttctatacaatggtgacatgctgagtgaaaaaagacttcaaagataagttttctcgtcaaaataacaaatgtgtattatccttaatttaaaaatttacaatattatcgttgtatggtgtgctaatccacttttctatgtttgtttgttttgtaggtagttttggtccagttggttatttatatcgaatgcttcttgaaggtggtctcaagttgttttgtctaaatttctgagataacttagtcttatataagttgctctgcttgtagtgactcatattctgactttgtatatctttggctagacaattagcttattgactggaagttcctccacgtcgacaattatcatagtgtgattcaaatcactctctcaaaatatatatatatatatatatataccttaacaaacaaaaaaataaaataataatatgacatataaact

SEQ ID NO: 75288 - DNA, 744 bp, Cannabis sativa
gcttgtggtatagcttgtgatttaattactctagagcgagcaacttactttagtaagatgctggtggattttctttttaatggctacatctataaaagctttttgacttctagatatagattttagttatctaaggaaaagtttcaactattctagaaatgataaaagtcatgaaagaattccttaggatcaacagtgagaagtctcagatatgctttagtatgcattagaccggacacttgctgttgagtgggagtaatgagtaggtatcagattatccaggataggaacattggaagataattaagagtatctaaagatcaagaagaggtactatatgttagtcaataagggtggtatttttaatactcttagactacaccaaattagatttctagacttgcgttagtgttagaaagtcaactatgagatgatgattactctaggggtggaacaattgttttggagaaatgtaaaaatcgatctagagtctctaactctaccagtgagattggctgttaaagttgcaggaaggacacttattcagcctaagagaagttctatacagtttttagcattgtgccaataatttattaactactagtgttacttcctgactgacacaaaagtaattgccaaaaagaaaagaatcaagtatccctagaggagtagacatatagaaaggaatttcacaatatcaaggatgttttgattaaggaaatgtaatagtggagaaaggttgta

SEQ ID NO: 75289 - DNA, 836 bp, Cannabis sativa
aatattagcaagagctatttttcatagcatatataaatgtgattgaacaatatcttcaaaatatctataaaatataaactatatatatgtatcagtgttcatatatatattaaatttgtgatatgaaattttgttgtggtgtattaaaaatgccataaaaaatcagaaatagaataggcgttgcacaacatacctcaaaaaccagagaaaagcgtaacactccaagcaacaacctgctagaagaaaaatacaaaatcaaataaaaaaaaaaagagaaagcaaacaaaaacaatagtagcaagggagctacaaaaacaacagcaaaactcataccaaaacaaactaaagtacaactaatgctaatactaatggtttataaagagacaaataagacaatttgtaatcttaatccaatataaatcaacttacacattcaagcctcttttaagtttttaagctttatcattctttgataagccttttccaacctaaaaaagtaatcaagtattcaagtgaataattaaaaaagaattatttgtctccattcctttcttggcagtcatgtgtttgctataaaatatattttatactcaagaaatgcttattttttaaaaataataagaagacacgttttaaaagcattaaatcattattcattttttttatgaagaaaattgtttctacatattaataatcaattcacaattaacaaccacttaattgaggaacataaaaaatcaaaagttttcaatagctggcattaaattttaatgtttgcatagagaaacttatatacacgctcctagaaaaatgaataaaatcaaaaaaaaaaaaaa

SEQ ID NO: 75290 - DNA, 687 bp, Cannabis sativa
ccaaactggtcctatgaacactattgtcagtactagtactgtaaataattcaatttttttaaaaaaatatatagatttgatattaaagtacaatgaatattgctatgaaaaatataaaaaaaaatatttcgacagagtaaaaggttaaaatacaagatcgacagttaatgatttaaaaattcgtgtggggtacaaattttattccaaaaatttgtttatttttttcatgagaattcaaaaattctagttgaaaagtgaatttagtcaaattttaaacctacttaaaacttatatactaccaaactcaatacaacccctagttaagtgtaatgaaaaaattaagcgcattaaggtgtcttatatctttgaaaatttcacatgatcaaaatgtgaacttggatataatgtagaatataattaataatttattttttttttgggtttaaaatgaccttatagagtgtataagattacccaaaaattcttgaatcatttgaaaaatatcaaaaatgacatttaaacacaatcagtggtccgtatcatctataacaaggcgacatgatgcctggacaatgcatgcaatatatacagaaaacagagcttcgcaaaatattctaggcgacatgttgtctggcggccattaaatggtattttttagctttccgtaaattaagtgttttagctcca

SEQ ID NO: 75291 - DNA, 1016 bp, Cannabis sativa
actcacttcgagcttgataatcatatatagttatcattgcaaactaccaagtaaaaaaatgtcataataatttcataataatccaattaaaaaaaggatgtgctctcatagttaacctttttgaatttctctgattgaaattttgtagctcgggtgtggtgaaaggggtatatcaatcacttaagagtgagagtgagattctaattgatcatttcaaaataatcatgtgaaaatggtatagaaagatgtgttaatgtctaaattgcacgacgcataaagatttttcattagatgaattcaatcttaactaaaacaccaataagcattactacaattaattcattatacattttctctaatgtattggaatgcactaataaagtaagagaatttaaagtttgattaatattaccatatacattaaataattattcactctaataaactaattcatttgaaacaacattaataaatcaaacgcacctttgctggcaccaatgaggaagaactcattgggcgtgatgggactataaaacaaatcgaccacagaatgcgaatgggcatagcaaacaagtggaacgaatccttcttattcatattgctcaaaactccaaatcagataaaaacccaaaaaacaaaaccaaaacaactaatccttcttctgatctatattccaagggcaacgaaaaaaatcctaaaaccaacacatagaaagttttaatttttactctcctaaataatcaatctaaaaaggcaaaataggcaataaatagaaacaaaataattagctaaacagaataggaattacgttgataaatttgagattatacagagaaatttaagtgcaaataaaaattggcaatatatttaagaaccgatcccccttcacaatggctctgaaatctataattaaattgcccagaaacaaattacaaagttctaaagaaaaaaaaaaaagcaaaaagaaaaatataagaacaaaataatcgagtgattatgataaattcttatattat

SEQ ID NO: 75292 - DNA, 751 bp, Cannabis sativa
agtattaaactagtttataaaatcacacacgtggcgtccctatagattagggcgttacataaattctttgttgtgcggtcgcgctttgaatttttcctaaactgcgcagtgcggtgcagtttgcgattttgaattgttaatatgcggttcaaatcgcaccgcacattataaaaaaactaatttttatatttatttaggttcaatatgtgaatgtccaacccaaaacccactaattattttatcattgaaacttaatttttttatatttattttcatgcattatggtatttttgagaagtgttactcaaactttattgtatttgtgatagtttaattattggtgatagtccgaatcgcaaaaactgcaccgtaccgcaacattttttgcggtgcagtgcggtttggaaaattaaaaaaactgcatgtacgtatgttggtttcaaaaaatggtcaaaaattacaccacccgtactgcgaacacccctattaattaccactataaatacttgattactctaattatatttttgtataaataagagttcacttcattgaaataaaaaaaaaaaaaatcattcactctctcattctcttctttttttgtcttttctgttttcttattttttcttgtttaatttatatgattttataacattattaacacttaatagtaattattaaagtttttcttttaagttataaaagacttcatttattataaataaaattttgaactcattagaataaaagg

SEQ ID NO: 75293 - DNA, 797 bp, Cannabis sativa
agatcctgataaaatattcccaacacaccaggctttcaacttgcaattcttggggcgcgaaggatttgtagaacttaactctttcttccagcttcggagtctaggtggactgaggaaggcagtctagcatactgaaaatagtggcaaatcagtataatgagtatgaagggaaaacatggttttgtgagttaaaattacaatcaaaacttacttgcaagattgaagtccaaactgagggtgggaaccctcctcaagaggaagccggaggcgaagaagtaataatcccggaagtcttgcgcaggctgtgtgtgactagttgggcaagggacacttgtgttgtatctttacaaccgatagaagccgaccttgtccttgtgacccctcattggttgggatttgatctggtagaagtacaagatttctttcggcattggcatagggttgccttgtttaacacaaaaaacataccatatcgctagaaggcaatatacttgggggataatctgaaagggcgctactccagccaaggcacatattaagcaaaatagcacctcaggggcaagtgtgctcccatcacgatatgggcccaactccacatgacgaagccttcttttgcgcactggctaggtctctctccaagtgcagagagcttgttctagaatagcccgggaacactttgaaggccccgttgggtttcctatttcctcaggtttttgtacttcctgaatgagttgacgtgctagttgttggaatttgtgccctaaataaaactctatttcaatgtaatcttttacatt

SEQ ID NO: 75294 - DNA, 688 bp, Cannabis sativa
aaaggacggagttaaggaaccgtcgaaggataaaaaaaaggagaagaaggatgataagtacgtacaagtgtaaaatattaatatatcgagcttaatgaaactcgggagaatatttacctctcacatgagcaaaaggttacctttggcaagcccgagcccatgaggaattcgaggagcaaaagagatcctaacaagtattgcgaattccacaaggatggtggcataggaccgacgaatgtcgccaattgaaagatgagatagagagtctcatcgctcaaggccattttaaacagtacgtgaaaagatagggccatggatacaaccagcccagtttgtctaataacccaaacaacttggggttacaacctcttcctgttgaaggagaggacatcctggttatttttggagtgccacatatcgcaggggaaagcaagaacacccagaaaagatatgcgaaagagataaagaatgagtagtcggcctttgccccaaaaccttccaacaaggtgaaaaccgaggaacctcccattgtattcacagaggaagacgagaaaaacgtgaggtatcctcacgtcgatccattggtgattaccattcaactcgccaataaaaggatcaagagcgtgttaatagacaatgggagcatggtaaatatcctttataaggagactctacgaaaaatggggct

SEQ ID NO: 75295 - DNA, 1048 bp, Cannabis sativa
tgaaagtttgcattttaggagtggtcaatatataaaattacgtgttgttatatattgagttttacattggtgtatatttccttttaattgggttttagattaaaaattgccttagaaatatttttcctcaccttataagattggttgttctacttaaaataatttagttgttcattaataattattttaagatttattcaagatgagataattaccttaaacacctcaagcataatatgaatgaaataaaattatgatttttgaagcagtgattagtgtcataaaagttaaaacattaatgagtaaactagctagtaatatgattcaatgtggtatgactcttgtgtagaggcagggggtccgtaaatacgcattggtattgtcattgaatgagtcaactcttgcctcattgttggtagattgttgacggttcgggcaccgacaataatcatgggtggatgagcgaaaaatttgacaatgtctggagtttcttgggattttctccccgtttggtccttcccttgtatttcccgtacccttggttctcacaacttcaggttcttgaataatgttggagttgttacgatatcttcccaattgtggtgtctcaccttccgaattgtagctcaactcaaattcttccttgaacatttgtgttagtcattcaatctcttcctttgcatgtttatacgaagtttctgattttgctgcatagaaagtcatgttataagttagtgaagagggggatccaaacatagccatctcatacatgtgttgttgttgtggtgctggctggttaaaatgtaggtggagatttgtcttcgcggtttttctccatcgcttaatgagaagagtattaaaaattcttctaatgtttaatcttttcattgtagcccataaatatctacaagggtatccctgactttcatataacatgcagctacactgtagtgctcgttggctttcagactaatgaacttggtactgtacttttagatgttgaaactttccaatattaaatatctgccactctccttcatccacctaa

SEQ ID NO: 75296 - DNA, 721 bp, Cannabis sativa
ggaatataacaagattattaaaataggttcaacaacatattatgaatgaaggcagaagaataacttgagacattaggagaggaggattcccaacttcgaatattgtcctcacttaagaaaagtaaattatgatctaggatgatggaataaaaacaataactgtcaaaattttagatagaaataaaaagccaaaaaaaggccgaaaaaatacagtatttgtttatagacttttgtatatacagatgtaattgatacctaaatgtttgatattttcttgatatttgtcattgaagtcttgagttagtcacttacaatcatatctacaatgagaagaaaagaaaattagaatgaaagactaaataaaactatgaaataacaaataaatgaactaaagtaaaaagaaaatagaagataccataactgaagaaattattgagagatagatatgcaacttataaaattaaagatagtatttcatgatatacaatattttgagtatgcctataatcgcttggatttgctaagtcaggtcggataagaatttttacaagattagatgactttgctcttgataaagcaacatatagttgtccatgtgaaaatacaggttctggtagataaattccaacataatctaatgtttggccttgagctttatttattgtcattgcaaaacataaacgaactggaaattgggttcgtttaaaaggaaatactgttc

SEQ ID NO: 75297 - DNA, 530 bp, Cannabis sativa
tttttttttttcttatcaatcattgtagccgttgtgggaagttataacacccatgtgaaaccaaagtcagttcataccaatttgcttactttcacctgtttctgctttgtccttttacatctttatttaaaactatattattgtatctgtgggcttatatatatatatactacttggtcatcactggtcaaaagttcattaatttgtgtctatgtaactaaattaacgatcaggattttgaataaactagttttaaacttaaaaagaggaattacagaaaaatgttcattaaagtaattatattggtatacttgagttgagttgagtttaaggagtggttgaaaaataattgtaactttgaatataagagatacaattattaattgagagaataattaaaatattcttagacagtttgataattaagctggtggataacagcttttagatgggccacacattaaataagtcaatcacagcccttaacgtttgaccatctaatatggtaattcaagctaaaacaccaactc

SEQ ID NO: 75298 - DNA, 502 bp, Cannabis sativa
gtgatgcacaccagttacaagaaacggagctcaaaagctgtttaaaaacttgaaccagaacagcctaataacatcctcaaatctgaagagaattcatatcacaatagttctctttcatctttgtgtattaacctcactcctccaacttgatttctctctctctttctttctattgttgaatgcatatatatagcagtaggttagtaaccacttaaccgaaataactgccaaccgaaataactgtcaactgtcgaggcagtagagttggttgattcagtgttctaaatctcacattttgagtaaatactattttgaatcgcgtagtttataaaagttactgattgaattctatgttttgttaaatgataattcagatcatgtattcttgaacttatttttttatcaaattaaaacttaataataaccaattaaaggtgttatgaccaaattagttaatttttttttggctaattaggattttttttttctcccgaactttgac

SEQ ID NO: 75299 - DNA, 1052 bp, Cannabis sativa
aaatgtgtcttcatagtcaatccctggagttttaagatagcctttggcaaccaatcttgatttacatctgtccagtgagccatctttattgagtttgactctatgaatccatttgttggttattacctgcatatctttggtagagggaaccaatgtgtccatatgttttttggtttgtaagggctttgaactcagtgttcatggcagcaagccatttaggatcactaagagcagctttgagggactttggttctgtgggaatgagagattcagggagagggtgtcttgtagcaagatatgcttttggtttagtaatgccactttgagatctggttttcatttggtgagtacggcctacaaaaggagttgggatgatatttgttttatctaatgaaatagtggtaggagtaggatcattgggaagtgaagatgggacactaggatgtattggtaaagcatcagagtaggttggcaagggaatagacaagtcattgtttggagataaggtggaggaagggacacgggtttcattatgtgtagagtgtataggtatagtacaaggtggtacagtgataggcatggacatgtcattgttgggagacaaagttgaggaaggagccgttggaatagtgacatgtgatgaatcaggtctaggtaggtgtggtgtctcggttgaagggtgggaatttggtaaaggtggggacacattatggtcaaaagtagcaggtacattagtgtttgaatataaaggtgtagtattaaatgtattaaatgggaaagaggtggagtgagaagattgtacctgatggtcaataggagaactttttgcaggataaagttgttcattaaaaacaacatttcttgcaatgtagacacgctcttcatgactttcacaaatatatcccttatggtgattggagtatcccaaaaatagacattgttgagacctataatccatcttatggtgattgtaaggccatagatgaggatagcatgcacatccaatggactttagaatattgtaatcgggtttggtatgaaatagagtttca

SEQ ID NO: 75300 - DNA, 526 bp, Cannabis sativa
gtgggctcctttcatgaagatcttccagatctaaaacttacggtgggtcatggcggtggtttagaggagataaactggttgtggtgatgggatggtggaagctatggaggttttagagaagggagaggtacgggggaagggattagggatttggttttaaaaaacgggacaatattttttattttagaaaaaaaaaatgatgtttgaaatttgtggggaattaaaatggtgtattgatggtggtggggagagtgggagttacagagagaggaatggtttttggggagagagaaatagtggttactggttatggtgggagtggttttgggaagagagagagagttatgaagagagaagaaagaaataattatgtacttttttttaatttttaatttttaattttaatacgattatttttatttttattattttaaaatgttatttttatttttttaaataatgatattacgtggactaataagattgcgccacgtgtatattgtatacacgtggataatctaacatg

SEQ ID NO: 75301 - DNA, 725 bp, Cannabis sativa
  modified_base (166)..(174): a, c, t, g, unknown or other
aaggtagtacaataccgctagtcatagatatggaatctataacttctataagttcatagaagtgaaacgataattttcttagagcttggctaaactcgtttaaatgattgaggcctcgtttcgacaaacacattaatttcctaaaatattatttacaagtagctannnnnnnnnaggataaaatacattgaaggataaaactgtaatatagtccctattcaatataaaccatctatggagtaccattgattatttagattgaaataatggataacttatagcgtatctaatcctgaagaatagaacattctatgtaatcaagagtgcaattctgaatctatagtgggtcaggaagaattaataagatagataatttacttggttaattctagaactacttattaggagcttgactatataggtccatggtccccaaactacctaagataatgttcccttgtagactcaattaattagttttaattaatcaaatagaattctaaatgagactagatcttatttataaattttactaagcaaatacaaatttgaaaagaaaaaggaaataaaaggtttatttgttatataagagactttgttaagtctaattaatagataagatcaatggtaattttatttgaaagttatttataattattaaatagacaaaattaatttttatagacttagaatagaaaaatataagtttaaataaaatggcaatt

SEQ ID NO: 75302 - DNA, 880 bp, Cannabis sativa
tatataatggaaggttcagctcataattgattagagcttttacaattctttgtgtccagtttaaaattgttccagataggaattgtattgataagctactccttcatggtatcagattgccattgacttgcgttgattatggatcctcgccacccagaacatacctcatccaatccttccgctcctgctactcttccacaccattggaacccatttcagaactctcttaactcctcccttactgttcgattagatcgcaacaattatcttgcgtggaaatcacaggtgattcccacagtcatcggtcacaggctcgatgacattcttctcaccggagttgctcctgttgaacgcctcctcaatggtgctctcaaccccgaattcacggcctggaaacgaaaagaccagcttctcctcagttggttacgctcatcaatgtccgaaacagttcttggttctttggctcactacgaatcctcgttcgaagcttggcgcgctctagctcaacgtttctccagtcaatccaaggctcgacttcttcaaataaaatcccagctctcaacaattcaaaagggtaatctctccatctctgactactatgataaagtaaaattgttggctgattccctttccacagctggtcatccgattgatgaaagcgatttaatcatgcatttactaaatggattagggcctgagtatgaccctgtggtggttcatgttactagtcttgttgataacctctcttttgagtccattcaatcattgttactaactcatgaaagccgaattgaaagacacaactcgattcttgatttttcttccaagatttctgctaatctcagtatcaacaacccaagaaatggtcctcctgccccaa

SEQ ID NO: 75303 - DNA, 913 bp, Cannabis sativa
  modified_base (33)..(44): a, c, t, g, unknown or other
tgtgggattgtacagcttacccggtatttcccnnnnnnnnnnnngggactactgactgtcacaaagtcctagaaggtttcttgtccttccgggaagggtccttaggctatctattcctcttaaaaaggcatttcagatagttgactacatctggctttttcctatcccgaaagctcctcctacgagtgctttggtctgtgattccggaagctcttatacacactcttggaagcaactatacttaagttgacgtggagatctctctcataacagagtttgttaagtttgttaaatcttaactaacttaacaacttaagttcttataggcaccaacttttaagttcttaagttcaaacacgacgatcaaattgagtttcgagagggggagagatatattgagaggtagagagagaaatttacaaagcaaaaataaagattgagattggttttgtatgaaaaaatttttgtaaataaaaaagatttttggataaaagtgtgagagttaaaacactttaaaaattgttaaccttattttaattatttaaaatttagttaatttaattctccctcagtaatttcttacaccatttttttattgatttttttgtaaaacagatgttgattgagttttatgttagtaaacattgaaattgtattttgttttatttattttacataaatatgagtacttatttaattgtcttgttttggcagctgggtagcaccttattccattgcaaaaatctattagtcacgttacttcaccatttttcatgaaattcttcttcaaacgccattgcagcgctctcccttacttcaatactcaaaataccataaacccattagccaaagaatcccaaattcgccaactttgcaggataggttctcttccggaagcatttcagattctgaa

SEQ ID NO: 75304 - DNA, 1078 bp, Cannabis sativa
ttgatcaaaggctgggacatgcttgacttgaacttgttgctgaacaattttctctctgacaaaatataaatccaattctatatgctttgttcgagcatgtaaaacgggattagcagtgaggagaatggtgcttaagttgtcacaccacacagttgggactttgggaagcacgatgtgtaactctgtgaacaaggaatgaagccatgtgagttcagttacagtgtgagctaagcttcgaaactcagcttcggtgctgctgcgagagactgtgtgctgctttttacactgccaggcaataagattgttgccgaaatagatggcaaaaccagaggtcgatcgcctgtcatcggggtccgtggcccagtcggcatcacaaaaggcagtaagctcataatgtggtggttttctgagatgaagaccataatcccgagtgccacttagatacctaagaatgcgtttgacagcattccaatgggattggagaggattagccatgaactgacacactttgttaacactataggaaatctcaggccgagtgattacaagatattgtaaagcacccacaattgatcgataatgttgaggatcatcaacaggtgggctgccataggcagataacttgagaccactaaccattggggtgttagatgacttggcctcatccatatcagctttgtgaagtaagtcccgaatgtatttggcctgagataagagtaaaccagcttcagtattagtgacttcaatgccaagaaagaaatgaagcttgccaagatccttaagagcaaattgagcattgagggctgctgtgtaatgggatatcaggttgggatcactgccagtgatgatgatatcatccacataaacaaggatgaaagtgacagacaatggtgtatgtctaatgaatagactatggtcagacttggaagagacaaagccaagatgcagcagactagtgtgaagtttctcaaaccaagctcgaggagcttgtttgaggccatacaaggctttatggagcttacaaacaagatcaggagagtcgggatcctcaaatccaggaggttgaaccatataaact

SEQ ID NO: 75305 - DNA, 847 bp, Cannabis sativa
ggcacaaaacccaacaagtacaagattcaaaatgtagggtccaaactaataattagtaaaaatacagagtttaaaatgatataaaccttataatttagttgtttcttaatgtttcaatgttagagtgactccttaattttaaaattttattctaatattattttgtctaacaacataataatcacaaataaaccaaactcaattgatgttgtcttataaaaggatattttttgttatcttactatataatatgagcatatctatcttgcaaaataaaaattagtatgatcttttcaatgtattctaatagtaattcttttttttttttggaattttaaatgttataggtttattaagtcaaaatattactttttttttattactatatggagaaataaacaaaaatagaaaaacttaacttttctttttgaaaatatggtctataggagaccttccctaaatgacttcttctagtaaatagaataaacaagttgctctataattgacaaagtttctccaaacgattttatatctgaaatcaacaatactaccaacgatgtaaaagtttttattgattaccataaatgctagcaaaaagcttttgtcaatcttcatgaacaccgacgaggaactttgctttgatattaagccatgacaaggtgatcaatgataagagatctctatgaaagctcacgagagaagatcaacaattgaggggaaatctctataaatgtgtatctgcccaaaaattttggggatattttttatttaatgaaaagaaaatagaaacaaacatgatgttatttagtatgtttgctttaattaatttattagccaattgttttta

SEQ ID NO: 75306 - DNA, 1259 bp, Cannabis sativa
taaaatagtactacttatttatagaaaagaaggtgaataatactatctattcaaatttattttgcaaccatggctaataaattaaaattgatacaattttcttaaataataattgatacgaaaaaattttactattagaaataatttcttttgaactacataaaatgagcttaaatatatcttatgaaaattaataaaacattataaaatgctacaaatttaaagatatttaaaaatatgaaaatataaaaaatgtattaataaatattaaaaaaaaattattgaacattactaatattttaggaggcagtactaactataatctcttagtcatttttatactcgaaatcaaatgtcggaatatttttttcaattttttttttcataacggtatccgttatagttacagtatcatccatgtaaatttttgtaaaaatctgaatagtttacaatgctgaaaatagagttcctgatattctagtttaccactcgtgttcaaaaaactttaaatgtatttttcggcactctaaactatttaaaaatttttgaaaagttacaggaataatgttgaaagcataacgaacaacgaaaaaattaaaaaaaaaaaattctgacatgtgttttcgaaaacagaggttgactaagaggttataatgaggttgacggtaacacttctcatattttaaagaaagtgtgtagtctgggacaacaaagcttcttctccttctcagattctcactttagcttggactactcttgaccactggcgtaaagctcaagacacttgtttgttatcatcttctcttttgagtgatggtaacaaccttgagcagtggatgaaacccgttacaaatacgatcaagatcaacgttgatggtgccacctttgagaaagataatgcctacaggtttggtgttgttgcttgtgactcggatggcaaggttattgattttgttgccaagtactaccacgggtcttaccatgctgaggttgttaaggccttaggggttaaggaggcacttagttggttaaatgtaagagttggaacatggtagaggtggaaaccgatagtttgctcactgttcaggcaatctttagtaagcagcaaatgtcttctgtctttggtttgattattaatgattgtaaaattcttttatcctctctacctaatactagtctacgttttattagacgatgaacaaatcaagtcgcccactttgtggctaggcgctctcggtcttactttgattctggcattc

SEQ ID NO: 75307 - DNA, 950 bp, Cannabis sativa
atcatcaggtcgtgtttgattttgggattcaacccattcagatacttctctttcttactaaagtcgattggcacaattttcaaggccaacataggcaatctagcgaactgagttgtgtactcggtattggtcatattctctttgaacttttgactacctcattataatactctgcattgaaaaattcttggaactcttcccaggtaatgccagtgacatcccgagtcaaagccaccatatcccaccacaccaaggcatcctcttggagttggaatgtggcacaagccactctgtcgttgccagtgactcctataaaattcaaaaaccgtgtaataacagtcagccactattctgctttcatcacatatggacctcccagaaagactagaggtgcttgcttgcagaaccttccatacagtggttctatccggttcttaatagcaaccaacccttcctgccttagatgcttgatctcttcatcttgttcatggattctagcttacataactgtaaatttatttttctcaatcctgggtaacccacagtgagttcaaatctccctgaccgcgtgctttgcctcttggcctctttctcggccacatctatttgggggaaactaaactccccgaccgccactggacttgaccaagctaccctagcctctcgtatttcgcctggcattcattctaacagaaaggcgcacgaaaccaagaagtagcctagtcagattgcggtcaagaataatttactaatgagtgcttatttagaaactaaaatatgcacctattcaactatcatgctactaacatgattcctattaggattttcttttaacatactaataaaataaactactaaagcaataaaggcttacaaaaccgtgagtcgatcttatctctgatgatgattatatgtgtacaatcttcggaagacaacctggcggctctgat

SEQ ID NO: 75308 - DNA, 664 bp, Cannabis sativa
ataaaaacttattgaaattttgtagttaattctaataatattaaaagttatgtaaaaaagagcttaccaataatattaagaatatcaagattcttaaaatattatattagtatttttattattttttattttgtacttttaaatatattagtattttaaattaattagtagtttttgtaataaattttagttttgagaattataatataagattattttttaaaataaaataaaataaagattaaatgtaaaaaaaatttacactaataataattggtatataaattaatgtatatcagtttagtatataatctagtatgtcattgaataaaaattaataaaatttcatactaatttagtgaaatgatgtactattaaaaataatctaggtactcttgccatacttcgtgttgtggaggaagccccctcttggtgggtttcactgttggcgggttaggtgggtattgggcgtcgctttgtgttcggttccatggtgcctgttttttcaggtgaccgatcactgttcttggaggttgtctgtctctgttgagatggttcttgccgcaggtcagaggtttttggtggttctatcctattgggcagcatggtggcgctggtggtgggcttcttttggctctcaccatttcggttttgagggtaatgg

SEQ ID NO: 75309 - DNA, 702 bp, Cannabis sativa
tatctaaagtaacttcttgcataattgtataatgtttgtttgtaaattatgtgtatatcattattttaataataaggataaatagcggtatatctaaagttttaaatttgtaagtgtcatacatctaatatttattttaacagtataaatattacataaattaatatttatatcgcttataaatttaaaactttgagtatttataattctattttattataataataataataataatgaaagaaagagaggccaacgtgttaattccttttgtatttataaaaattagaaaacatattttattgtggtttttaatttctcacttttgggcaactcgaaacgccaaacttaaaaaaagtggaaaagacaaaaagttcaattccttttcccttttatcttgttttttttttcctttcatcttgttttatgtttttttaattttcctttttatttaaaaaataaaaataaaaagcttcgaactgatcgaaggggtaaagagaaagacacgtggtcccatcgatcgggaagatgtggtcacgcgactttcggcacattggcaaggcttcttgtgacgcgcctactccacgatctctaaaccaatcagaagaaaatagatggcgcgtgtagattaattcgcgtggggtttaagtccccaaatatacgcacaaaatatttagatattaaaagtgtcgtcatttttat

SEQ ID NO: 75310 - DNA, 647 bp, Cannabis sativa
aaggttgtcgtttgtcctttttttattatcattattttattttattttttcaatttttgggtttttaatttattatttaattaccaataatttaccatataattccttgtagtaatgttaaaagaattacaagcaatattctttaaaaattattttttaaaattatataagacttgatacttaattacaccaataacagtatgattatgatagaagtattaggcactaacggtgccttttagcatttctctaaaaaatattagtagtgtctagcactctcctacgtgtgaatatcacttttggcgtaattaaatatcggggtctcatatagcttaatgaaataacttttagagattatcgataaccaattgtaaggtgatacgtctagaaggtgctaggtaacagtggtacccaataacaatgctcaaatacttaaagagaattgttaagggacattatgcctataacttttaactccagctttaaataaatacatgagtttaattttttattgtaataatacttaagttataattttgaaatttttgtatatagctggctattaagtgtaagtaaattaccacttgacaatttcttattagtccaaacttttaaattttaattttttatttaaaattaatttaaat

SEQ ID NO: 75311 - DNA, 739 bp, Cannabis sativa
cgacctggggcatggacctaacccataatcggtgtctagatcttgcaatcgtaccaagacccgaacctggaacttttcccaaaccaggacccaaacactaactcaaacccgaaacgcaaaattagaacaagaaccgaaatcaggaccctagaataggaattggacctcaaccaaaagctggatctagatgcagaaccaaacacggacccggacccaggccgggatcgatacccggacccctaccccaacctagacctagacttgcgccaggacttgcaacccagaacccgaacccaggacccgtgactcgggaactagaccagtacccaaacccagacccagaacaagaccaagacctctacccagacacagacttaaacccggaccaagacccagacctagacccagactcagacacagacccagacacataccagaactcgaactcaaacccaggactcgaacccagaccaagatcaggactaagacccagacctggactaggaacgagacctgaacttggactgggactagaacctagactgggaccgggaccgggatatgggaccaagactgggacccgggacctgatactcggacctaggacttaagaactaaaccttgagcaagacccaaacaaggccaagacccaagtcaaggacaagtagcaaacacagaccgggacctgcactcagactaggaccctaacccagaccgggacctaggaccctgacctgaa

SEQ ID NO: 75312 - DNA, 776 bp, Cannabis sativa
tcattttgtgctaagtcatctcctgcttttatttgttgtaattttgagtatgttagtagaacttgtaattttgcagcccataatgtggcaaattgggattttattcacaagttgtatgggattattccggtttcttcggttccggagaaccttttatgtaatgaccgtgaggtccaacgttatttagtaatggtacgattacgcttattttcaaaaaaaaaagatactttgagtgatatttttaatttattgaggaattaaattataaatatttaaaattaataacctacgtatgaggttatataatggtagtagtcctaacgaaacaagggcaattctattcttagtttctctcatcaagagaaaaaattagaaaatttaaatcttgttttcttggaagatcattactcaaaatcatcatcactaaaccaattatctccgttaaggaattaaggtacgcttaagctattcatgttctttttctctttgaatgaacaaatacattttttagatctatagttatacacttataagaaagagaaatttgcggtaaaagtcctcataaagttcagtttaatacagataagttcccaacctccaaaaatagcggtaatagtcctcaaagtcatgtttttcatttgtccgttagtcctaattttgactgagcagtctacttttttaaaagtaccacgtgtcaaaatattattggtccaaattatcattttaattaaaaaaaatatataatttaaaaataatttctttttttctttttcttt

SEQ ID NO: 75313 - DNA, 1347 bp, Cannabis sativa
gcttactcttctgatgtcggggtaacatttggagtcacttggggctcctgaaggaatttcacagcaccttcggctctcaaagctttttcaaccatttcgccataagtggttgcttcattagtagtaatcaccagatcatgcctaatcttcacattcaaacccgccaagtacttttctttcttactaaaatcttttggcacaatacccatggtgagcatggccagacggtcaaactttgtagtatattcagtaaccgacagcccctcattttgtgctaacttagtgaactctttccgcttagcactgtggacagctttattgtaatatttggcattgaatagttctcgaaattcttcccaggtcataacagtgacgtcccgagtgagggttatcaactcccacaacacgagagcatcctcatgaaactgaaaagtggcacaggtcacccgatcattaccaaccacccccataaaattcagaatttgttcgatcactgtgagccattacttagcgttcatgacatctggacctcccagaaacactggaggtgcctgcttatgaaacctttcgtataacggctccatacggttaccagcaacatgttgttctgctggcatcgctggagctacaacgacctgagcttgctgaggaggcacagtaggaagaccttgctgcctcaatctttgaatttcttcatcttgctggcggattcgatcttgcatttccgcaaacctctactcccaatccggaggagcttgtggtggatttacaggatgaccaccttgagctctaccacagccacgggtgcgaccacggggattctagggattttgatttccctgaccgcctccggtctcaaccatattaccctgacttcttgtatttcaatgggtgtccatttttataggacttagcctacaaacccataagacaagaaggttagacagcgatcacaaaacttaataccattcttaaggacttgaaggcaacacacgtaaaataaataattataatctaatatgcttcctatcatgctttagtaatcacatataatactaaacaagtacaggcttactgaaccgtgaaccgagctttctctgatgaagattatacatgtcttggcaagcttcggtaaacaaacctggcggctctgataccaaaattgtaacgccctaatactaaggcatgctacagtgctttttcaattacagtgttgtgtttgctaatcaaataattttcctaaaaaacgtgtcaaattaaaacttttatattaattaataaactttataatttacaaaactatttacaagtatcgggatctcgtttaaaagcttttatacacaatat

SEQ ID NO: 75314 - DNA, 962 bp, Cannabis sativa
gacagtttttagtgacacttcacaagtgtcactgaacccttttatattcactttttgtgcgtcactataggcgtgtagagttaggctttgtcagactgaaaagtaacaaccacacacatgaagtgtcactatatcccttttttttattttttttttattttttattaacattttcggagctatagagacacataaaaatagttactatacttattcatttatttattttaataatttctttgatatagggttttatttttttattttaatatttatttatttatttatttatcttaataattaatgtacttatatatcaaatttattttattttaattttcatataaaaaaacttaaaaagtgtatatataaatttgcattaatttacagaaagaaaaaataagaaaagtaaagtatattgaacaaaaaatattcctttgaatcaatataatataagtattgttcaatacacatttttttactaaaatatttatagaacaatgggagtgggtattaacacttagatgaaaagaaaaacccaaaaatgggcatgaacacatctgtaaaaaaaattagaaacctaaaaaaaatcaaaatcagattacaatagtccaccgtaaacaacataaccctgacctccatcaaccaaaaactcaaagccgctgtgggaggagagggattcgaagggtctcaaattctagtaaagtaaaacggacgaccttacaaacccccaagcactggtcaatcccctgcaaagaaatagatgaagtagagaagggaaagacttcagatctaccgttgaaaaatgaaaggaactaaaacaaattaaacttgggaaattgacgatgagaaggagctcaccatcgtgtcatgtcgacgggtgttgcatgttaggttatatttagcctatgttttgggtctttaaagttagcattttctcgtctattggtgtcttttggagc

SEQ ID NO: 75315 - DNA, 1015 bp, Cannabis sativa
  modified_base (477)..(483): a, c, t, g, unknown or other
  modified_base (720)..(720): a, c, t, g, unknown or other
tcccgtgtcccacatgatactgagtctagaatgttcatacgacaaagtatgactaactgcgaatccagcctatactcagtactctagttgtaatgatgtggtaggagataactcatactatttgattgcctagcatatatatgttggcatctcggtgcatatctctgtacacctcaccgatgccctgatatgctaatttgataactatagatttgcctattctgacggcagctaacatgtacgctaaacatatataaatatatgcatatcattatactaatcttaccttcttttcgaattcaggtgtgctggccaacctgagtggaacaactgctcggcgaattacaggcccctaaatcacatcgatcataacatggataagtgacatactaaaacacaaccggggacttaggttttaaaccaaaaacctacctattgtaagttaacatggaaataccctaaactaacagggaattnnnnnnnaaagctctgaaactaacacgaatcaacaacacgaaattttacaggatctgtaaaaccggttaaccggtttacaccagataacccaaacaattcgaaaacctaattaatttgaatccaatccataccaaaccttctagaccttcatattataccccaatagacatattccaagcaataaaacaactaccaagctcagaaacaaaaatcactattaaagagccaagcttgagttctaanactcaaagcttgctcaaacaacactacagtccttaaaatcagctcaatacaacataaataatcatcaactaacttcagaaaacagaattaagcactatcaacaagaatagcaactaaaacaaagaaaagccatgaataacaaacttgaactctaagaacacaacatgaacaagcttagaatcaataccttgacttaaaaccactacaaccttgctgaatttcccttaattgagcaacaaaaacaagcaaaccctagctggttctaggggatttcaaaagagagagagagagagag

SEQ ID NO: 75316 - DNA, 949 bp, Cannabis sativa
  modified_base (31)..(39): a, c, t, g, unknown or other
agctaataagctttttgaaggcgaaccaggnnnnnnnnncctggagccatggagatatgatagggatcgaccctaatattatttgccatcatttacatgttgatctaagctacccaacgaagagacagaaaatgagacccttagattccgagaggcaaggggcactaaaacaggaagtggacaagttgttagttaacaattttatacgtgaggtgttctatccctcgtggatagccaatcctgttctcgttctgaagcctaacggaacttggagaacttgtattgacttctatgatctaaataaggcgtgtccaaaagattgttttccacttcccgggatcaacaagttggtggatgcaactgttggacacgagcttatgtcatttatggacgcatatattggatataaccagataaaaatgtatgtcccagatcaagagcatacaagcttcgtaaccgacatgagactctattgttataaagtcatgtcgttcggactgaagaacgttggggtaacgtatcagcgattggtaaacaaaatgttcgcaaaccaaatagggcgaaacatggaggtttacgtcgatgatatgttggtaaaataaaaaaaaaagtaagggtcatacctcagacctcgcggaatgctttaagatattaaagaagtataagattgaagcaaatcctgaaaaaatcaaggcattaatagacatgccatcaccaacaaagcctaaggaagtacaagccttgataggaagaatggttgcacttaacagattcattacgaagtcaactggtaagtgtgtgccatttttcaacatattgcgaggtaacaaaaagttcaagtggacaaaagagtgcaaagaggcctttcagaacataaaaaggcatctagcaacgcctcctgttttggcaaaaccaatgactagagagatgttgtttctgttgggtttta

SEQ ID NO: 75317 - DNA, 830 bp, Cannabis sativa
gagttcccgttataagctgccatttcgggcatcttaaaatttttggggagctctgcatccaggatgtgcctggcgcatggctcttggtcttcacactcagaatctgagtcatcacctttttgtctccgggagactcgagcaatgtctttgcgcattatggcaagctcagccataattacgtcgttcaacgttcccgtggagaccgcaggtgcatgtttcttttggtccaagtgatcctggaggtcaccatgttttccgttaatctgatgtcttagatcaacggggggtatctttggttccttcttcgtctctctctctcgggttcctggtgcacagaaacgctttttcggtcctctcgatcttgaggccaagactccctttttggagttttcccctctgcggacctttccctttcgagaaatctgagcggaactttagcggatcctgcacttttttctttttaccgggggtggaagtaggatttttctgctggttcccttcagagggataccgtatagtgctaggctccttggacttatgcttttgggtgccttgtgaggactcttctggtgtttctccaagttttgcagggatggctttagggtgtacatggatccctgcttcctccatggctttctgcatggcgagcatcacctcttgcatccttttgttttgttctttttgggttgtgatttcagcttcatgatcaacaaccttttgtctcaagagcactaattctatgtaactacattcgtcataggcgtcgtactcgtcgaagtttccttcatattcgtcgccgttggttccttctcctgttgggttttgtgccc

SEQ ID NO: 75318 - DNA, 748 bp, Cannabis sativa
ctagctagttgtcttgaaacaaaaggaagtattaccaagtttgaaagccgcttggtcaactatattgtacaggaaaacggcccatgggccgaactggaaaaaaataagaaaaataaacttcaaacggctggagtccttggctctttgtacgggtcacaggtatcggcagtggctaggttggctggtcggggttggctgcctcgaattcttctttgtctttttgacgctcacaaaaactaagatatgcatctttgttttcattgaggtaatcaaagttttcttctgagctcgccttccaaaattcatagtttacatccagggcggccatctacaagctatccacctccttcttaagcacctctcgctctgcctgttgagagttgagactctcctccaaaatattcttctccttggttaaattggaaagaagggtctgaaggctctccctctcatccttcaaagagttgacgtccttggtagagcctcattgtcccttcaagctgagcggtggacagcatatccttaatctcctgctacagttcctcaacaaggttgttagcagccagaagttgcttattaacctcacccaggttcagactcttctcctcggcctcctttttggcttctgtaatatctgctttcttgggtaattaattttctttatacttttagtttattttgtttgccaatggggataattaatcatttcgaatatttattagtttagtggtgtatgagattttttttt

SEQ ID NO: 75319 - DNA, 719 bp, Cannabis sativa
ccatgggctagtcgcgaccagctgacaaaatttctataaaaatccaattttccccccattcaaccctaaaccaatttcaaaattttcaaaccctcctcagccgcccctcatctcttctcaaccaaaaactaacttttctcatctccattcttcaattttctcatcttctcttcaatttctagatcccaatccatcccaaaacccactttcactcatcaatcctcattttccatcaaaaaccatcccaaaaatcaccaatatttccccaaatccaaaaataacattattcttcatcttcaacctcaagctttcaaggatattcaacaatggaggtggagtagtagcatcttcgggtttgtaagtagattcctctattacatttgagaaattgcataagaactttgagtatttttgtgaaaatagtgcttattctgaaattattggttgatagagggatttttgggattgtggactatgcatgtatttgttttgattatcttggtgtagttttaaatttttgggaagtagaaattcaaggggaggtgctgcccaattttttttagaattattttgaaaaaacaagataaaaaaaaagaaaaaaatatttatttctaagttaatgggaccaaaaagaacaaggcatgttgaagaaggttcgtcgtcaaacccgccagctacgggttttgatagaacccgatttgtaaatgaggaggctcaaa

SEQ ID NO: 75320 - DNA, 766 bp, Cannabis sativa
agatagattcaagagggaattggactgcatttctgttgttcatgctagctatatattgggagcttgttcaatcatcaataggttcacccgtattgttggagagttgtttggtctctttatgcagcaggctattaaagtaagaacacttaatagcacaaactttagctttagtgtactgtttaatgcagcacttgaattaattaactctatgcctttgtactttttggtgtactagggaattgtggacgagtttcgcataccaaagagagaaaatcctaactcaacacagtttataccttcatggagattttcaaatggaatgtttgctttagttctctcctatggccttttgatcactgcattaagaagtagaaaagcaaggtcatggagatatggctctagtatgatgaagtccaaaataaagtgtttatgaaacattttctcatatatatatatatatatattattttgaacattttaagttgatgatgagcattaatgtatcgactttttttaatttcattaatttgacaagctcctctaatattcacaggtatcttttctgtgcctctaatatttatacgtgtattgtttattcaaattgtaaactcaaataaaagatctaatatagctaatgacttcgcaaagcctaaataatttttgagtgtgattgggtaaactgtgcctaaaatactataggctacggtttaaaatcgtggcctagtataggccacggtttaaaactgtgcctaaaacactataggcg

SEQ ID NO: 75321 - DNA, 518 bp, Cannabis sativa
tcattttgggcatttgacacaatggctatattgtgtagttaaacacacacaacatccttgtttttacatacaatacattaacacaattacatatcaaatctgtgtagtacatttcctaaaagggtgtttctggagacaaactatttgtttcgatatttagaggaaccttttaatttgtttttttacatgatcgtgtacattgtagttattttaaaattattatttgaataatttatagtgccgaaaaataaagctcaaataattacgcgtacagcaaaatatttagactttattttcgacactataaactaattgaaattttttgaaaatttataggtgtagccctaaataagtacaatgtataccttcatgaacttttctttttgactaaataaaaggtcaaccaaaagtactttactgtagatttaccctaagagtctcttattattattactaagatcataatataatgatgatggggaaacaggatgaattaagggatgctgttctgcttgtgt

SEQ ID NO: 75322 - DNA, 1325 bp, Cannabis sativa
ttcaacaccttttataggtgatgctccatgattgcttattgatattttctaagagttattttcttaagttatatgagatctaatacttaactatataccaataacggtatagcactgaggaggattttaagcacaatgaaagtaacttttagcaattctatatttataacctgtagacgtaatgtgaaagttattgctttgaaattaaggtctctcttcagtctcccccacctgctgttagctaattttgatactaatcttccaaaagaaaaaaacatctgagaatgtattgtgttgattccactttgcttttttagagaagtatttgtcaaaaaaaaaaaaataataataataaaataatgatacgtactacaatgtataatcaatattgtacaaattaaaaaagtgtgtattattattattactcatataataaaagtatagagttagagatattttgcttgatttaatgtacaaattatattagaggtatttttttctaagaagaaaaagaaaaacacacctttgtaactgatacataatttatataatttgatgaataaaattgttataatacttatgggtgtatcggcatatcatatcatatgtcgtagaattattataaatccatacacagaatatcatttatatatattatttgtatattatatccgtagcatcttctctaatcttagtatcctaattaacatttttagatgaacatggcacactgtacaagtgagcagtatatattatattgatacattatgggcaatattgatatatattgtctgtaaataaatgggcatatagatacagagatacgacaaaaaagatgaaaaaaaggccaaaatatgagttgtgttgagtcacggacaaaacgcacagcacaacgatggctcttgtttttgtctgttgcatcttcttccccactatatatgccctataatgttccttcgctttctcctaattttcatttgttattatatatacatatgagttagttcattaattaatttactgcaatcaagcagagaaacacgagtactgtcatttttcaaccacgcaataatcggagtttttgagccctacttgttttggatcttgttattattggtcactcttgtatggctgagcgagactgaatccaattaactgtaatgataaaaagaaaatgtgtttctcttacttatattgtacttgacttacccaattattattatcaacattttcatatgcatctgaatttgtccattgtactcttaccactgtcccgtgattagtcagtccatccatcctcgaacacacacacacatatatatata

SEQ ID NO: 75323 - DNA, 717 bp, Cannabis sativa
cagtttcctgctttttttttttttttgatgaactggagttctctgttcttgctccatttgcacctctgattttcgatctgcctaaactcgctcccgatctctgcacctcctaacctaggcttgtccaactccgcgcccatcctcctcgccgtgaaatctcgcttagcaaccaatctttatcgtcgcagagatcaaaagctggaaagattacccttcaacgaagatagaagcttagtggagttgacgacttgggttgtaaatggagatttgttactgggtattgtataaacattagttgggcattaaatttataagatgatttattaatcttctttgtgaaaattgaaaagttaatgaatttttataaaagaaaaccaaaaatttatgggtgtgtgtagctgagtggcatagatatggctgccaagattcgttttacttcaaatacatgaaatatttcatggggttggttcatggagtcatgagtcgttctgagaagaagaataattaatatatattatttaaaattttatttaattagttttttattttaaatttatttaataaaaagtatgaattagaccaattatgaatcaacatgtggcattctttttgagctattaaaggggctgttaagtgggtactaacgggagtaaccgaaaaatataatttgatgatttttaccgctattttcagaaattaggtacttattagcaacaa

SEQ ID NO: 75324 - DNA, 773 bp, Cannabis sativa
attacattcacttcttagatgactttagtcgttttacatggatatatcctctcacattgaaatcccaggcctttgacagctttattaaattcaaaagtatggtggaaaaacaatttgggttacccattaagagtgtccaagctgatggtggtggtgagtacaagccttttgctagatttctagctgatcaaggcatcttatattcccatccttgtcctcacactcaccaacagaatggtcgtgctgaatgaaagcatcaacacattactgaaacagggcttaccttgctttcacaagcgaacttagatctctcatactggtgcatgccttccaatgtgccacattcaccatcaacaggttacccacacctgttcttggcaatttaagtccctatgaatgtttgtttaacaccaaacctgactattctatcctaaaaccttttggctgtgcttgctgccctcatttaagaccttacaattctcacaagttagatttcagatctgagcaatgtttattcctggggtactctccaatgcataaaggatacttgtgtgaaaacaagaatggaagaatattcatagccagaaatgtcatctttaatgaacttttataccctggcatgtctcaactcagcaacatcacagaggtaactcatgcaccttctactcattttactcctactgcaagtttttttactaaaccttgcactaatactggttctgctatgtttcccaacattgttcctgaggcaatggcaccttctactggccaaa

SEQ ID NO: 75325 - DNA, 914 bp, Cannabis sativa
gtaccttttaaaggtgtcattttaaaattctctagcgatactctctaaaagttattatcttattttaaattatataagatccaataaattacactaataaaaatattgaaatgtaaaaaaatgttagagattactgatgccttttagctttttaagcatttttaaaaaacaatgttatatttataaatatatatattaataaaaagaaaagttatagaaagagaatagagccttacaaaatgtaattatatagacgatatataattaacaagttgcactatactccgtttaccttgtgaagtgtctcagctgaaacactaaaaatatatatattttctttttctcatttatttcattgtttcttatacgactcatttaattgctttttggctgcacacatgtatttcatgtaccctcaaaaatcattaaacaaaataatatcaaattcacattaattttgcccacatatcctatattaccatatatattgtatgtatatactcacaagtcacacccaataataactattttacttcattatcaaaaatatcgtttctcactcttttactcacaccaaataagtaatcattatcgtataccatatagtattatattatgggcatggtaatatgttttaacttggtaaggatagacttgtacataagtgaatatgtataatgaaatatctaatacataggatgaactttgacgtgtcaaatacatgaaaatatcttcatttcaagataaggaaaaagaaaaaataaaaatatcttacagtgatatatgtatatactatatattacaggtaatgaatacactaattatggaaatttattctttcaagaatcttaatataataatgaaaggaggattttagctgctataagagttgcatataattattattatgataa

SEQ ID NO: 75326 - DNA, 867 bp, Cannabis sativa
tagagtatagagtgtagagaatgtcctttgtatttatatatatgttacataagtatagcattatatataaggtttgtaagaagtggtgtgtggagaatgaggatacgtggtcaattttggagcacaaaaaccaagttgttgacgctacatttaagaaggtgtcacgtgctcaattttggtgcacagccacaaactaaaaatataagtacatttatacctaccgaaaagactcaaaaaattaggataagtttttctaaataattaatgttttaaattttatacacttaaatattttatttttatttttttgaaacaaaaatacttaatgttacgattcttttacatttgttactactactttcataataactcatatatatacacacgtgaagggtctaaatacattacatttattttcctttttttttttattttaaaactttatattcttaatattagaaacttaatgctacttgtttcaaaaaaaaaaaaaaaaaatagttctcaaaacaattttaacatagtattagcacttcaattcaataatcgtgttccatatattgcattggttcacatagctatggtaatttggtattgcatctccctcatttttttaaacaagtagagcatttagtttctaataattggccttcttgttcaagagtgcaaaagtctccttctatctttggaaaatgtcaaaatttgtcatattaaacggtctgctaacaaagctgcccattgtctggcgtgtggctcttgtttctggtctgaccgtattttctctgagagcagtattccttctgctcttcaaacaattgtaatagcggatttagctatttaataaagtttctacttttattcaaaaaa

SEQ ID NO: 75327 - DNA, 877 bp, Cannabis sativa
tttcctcttgagccaacaagtcatcaaggatgttttcactagatttaagctcttcatagtgcatacggctaacatttgatgagttattgagagctgctaccttttcttcggagattttaatttttttaggaaaatctctgaatttgttcctatgctaggattgcaactgttgagagcaccctgcaaaattttgcagaagttaagaaatcgaattaccagtaacagtgttccaatttatttgtaataatgtcagagcatgcatcatcttcaagccaaagcctttcaaatctaaaacgagatttgaacttaggtgctggttcttgttgaaggtaagagattgagactttaattgccttgtgatttgattggtaaaagtccaagtgggaaatggttggaaccgtgagaacattcatccaagaggagtttataaagccaaaatccaagcactccttaacattgattccattaacattattattgtaccaagtgaaacaatcaccatcaaagattaattcttgcaatccacaaaaatcaattgtgcttcaaaaatcatcaatctgtgactcattctctaaaagacctcctaccttatctgaatgtgaaattatttcattgaaatcacccataataagccaaggcattaaaggtgctgaatccctcaatttccttagaagtttccatgtgaattttctttgaataacaatcggagaaccataaaagcccgagaagtgccaagaggggccatcattgagagcaatgtaacagtcaataatttttttttctataatttaggataatacatttacattagatttccaaagaaacattaaactaccactaaaacctattctaggaacttcaatacaattagggaaat

SEQ ID NO: 75328 - DNA, 1082 bp, Cannabis sativa
tgagtaataatgttgaggaaaattgttggttttggtggaaggaagttgttgcaatgatttgttggtgtatttagaacgtttgtacggactttagagatagtaagatcggcaagaaatttggtaactaagttgtgataatttagtaagcttaatgttgatgctactatattcgaagatgagattaagtttggggtcgggtgtgttgcttgagatcatgagttaaggctggtgcaatgtgattgtagagtctgatagtcttgtgagtgttcttatggtctctcaatttagttttttggttgaagattctcgtttattattattcgaattgtccaatatttctttacgttttgttaagtactgtgctaagagtcattatatttttatacatttttttctcatattgtattgtggtatgtagtagaaattacaaaataataattttcattaaaataatatatataatttagtgactcctttttgaaattttcgaaccctccttctagtgaattttattttttaatattacattacattatcgccttgagttgactaaacagccgattcatatgcttttttttattaataaaatttattataattttttcacaaaaatagttttttttttatttttatcaacaaatatgaatattaattaaatctaataagttggtagttagcatatatgacttgaattttcactctgtttcaattttcatttttcactatctttctccgtattcaattttgccaattttattatttattattatttattataagatatgatatttcaattatttattaaatatgaaataagctccaaccacaattttcttattctacatatattttatatctaaaaaatagacacatatttttcaccctataaccgaatttcattaataaaaaattttgggataatcatcacctgaaaaatcgaataaatttaaactaaacagataatttatatacaattttaaagatttttattaaataaggataaatataattaataactgaatagagtaattttctctcccaaataacagtattttctcaggataaatataggcgtataccaa

SEQ ID NO: 75329 - DNA, 700 bp, Cannabis sativa
caagttctttgcatccaaacactactaataataactttcaaactgctaaaaaggtaagcatatatgcatgcacatgcaccaatattaatttcattttattacgttgttgatgtatactatatatactatagtactttttgttttgattttaacatgttacatcatcttgttgtatgaagatcattaagagtagatcagataaaattgagtatgatttggcccaggctcgagcagctattcatgaagcaattgttaccaaaagtttcaaatctgataagaatgagagctttataccaagaggttcggcttacagaaatccctatgcttttcatcagtaagtatatatatatatatatgtacttctataattaaatcatgcttaatatcaaataaaggaaaagaaacactaatacaaaagaaaaaataagaggtttctatttcaatttattttatagtggaataaataaatgaatataaaaataattaaaaagtaaatactactcctttcaaagttttaatttcacttttgaatttcgccttaaaaaattgaatatatatatatttttatattacttcagttttttataaagtagaaaatgaaaggatcgatgaggctcgttattcaaacggcgtgttttttaagcatttttcacacttgggtttacaaaataaaaataaaaaaatctaaattgtaagaagc

SEQ ID NO: 75330 - DNA, 1078 bp, Cannabis sativa
ctactgttggctctttaattttttcttttgcaatgatcttccccgcaattattgatgctttttttttgtagtaaacattgcagtgcacgttcaagtgagttgtttatacattgatcctgcaataatgtaaaagatcaatttatttatacgttttacacatagatcaagtatatctagcaatacaatacaataataataattatgtgagagcacacatttacgtatacatgttaaatttatctcatttgtaactacatttttcccttgtcagaggcctttgtgcgcttagcaagtgacttgtcatcttccttgacactgcgctttcccaatgaaatctacaacaaacatttaaatcattaaaactaaatatcaacaaacatttcaagcccaagaaaaccatatttttttgtcacttgctgatattgtagaaaaagagtgcttataaggatggaaaaataagttatgatgagtttgttgcgatgatgaggtttgatataaaatggagaaaatcatcaacgaagtaatcacaagagcggttcaacaacagtctcagtctgaattggaagaaccatggagtaattttcttttgttattgttttcaaatgcttcaaacttgattttctgatttgagacatattctgtttttatgttttgaagagggttacacaaagtgttgtttgtttttgagtgtttgatatgtttcatttctaccaaaagaatagctctattagaatcattgtcttttgttactctttctcctattatttagatgaaaaaacaaaaacctattaatgattagttagtttaatctggttgttaggtagttagagttcagttagtgttagttagctttgttggtgtgaagctgtaataactgaattttgttacatttgtagctctctctatcttgatctctccattgaatataatgatactagctagtgtgtgttacattaaatgagattgtttccctagtcttcttctttctcaaatttatattgaactaaaaagttacacacaaatgcaatcataaaagaaccccaaaataacagttgaaaaccaagatcggaagagcggt

SEQ ID NO: 75331 - DNA, 1343 bp, Cannabis sativa
  modified_base (71)..(71): a, c, t, g, unknown or other
  modified_base (1298)..(1310): a, c, t, g, unknown or other
tgtgtttatttcattgtttaagaattcatattaggatgttaataaaacatatttggtagtaaatctagatnctggtaaaatatttccaacaacctagctattacagaacatgctatgagtgttgtgctgattaggaaagaaaacaatgtccagcatccggtctattacatcaacaaaagacttgttgaggttgaaggacgatattccctgatagaaaagcttacttactgcctaatcttagcaacaaggaagttaaggccttactgcctaatcctacgcttctagacggttactacaatgggcagtggaattgggtcaatatgagataatctttcaaccgcgaacaacaatcaaaggacaggctttagcggactttgtagttgagtgtacgggcaaagaagaaagcattttaaaaggcaacccagagctagtacaagaactttagccgagcaacaatgaagataaacctacctggaaattacacgtggataggttggctacagatcaactgtcttgtgcagggattgcccttgtcacaccttgggggcaacacctgcatggggcattcaaatttgggttcagagcctccaacaatgaagtacagtacgaagccctcattgtcgatctaaaacttgcacgggagctacatgctgaacacatcgagatctgtagtgacttgtaattggtagtaaatcatgtgtctgaagaatacgaggcccagggggaaaaatgatagcatagcaaaatgatctacttgcacaattcaagagctacgttctcaagcaaatcctaagagaagaaaatacaaccgttgatgccctagcccgacttgtaagtagcaacatagctgataaggctaatctaatcccaattcaatttcttgaagaacccaacatcacgtgtgcagaataaattgaaatgattgacgcatctccaaactggatgacaccaatagcagccaacctcaatactggggaacttccaaataacagaaatgaagctcggagaatgaggagaaaggctgcacggtatatcatcctagaaggagttatgtatagaaggggattctccatgccactacttagatgtgttacacaagaagaagctacacgactcttgtttgaggtacacgatagattctgtggcaatcacgcagcaagaaatactaaggcaaggatatttctagccgactatgattgaagattcaaaagcctatgttaagaaatgtgataaatgccaaagattttaggaggtaccctgtgcaccgcccaatgaactgttggatatattttaccagnnnnnnnnnnnnntaacaagtatgtttcattaacatcgtaatatga

SEQ ID NO: 75332 - DNA, 1129 bp, Cannabis sativa
gcataagaaaaaaaagattaaaaaatataaaattcactccgtcaatcacaaactgaaaccacgaaccaaggatgagctagaaccgaaagcatggatgagcttcaaatgcaaccaagaaccagctccaaacgtcgtcgacttctcggaaaacggtggaaaccgagatctctgcacagaagagagagagagaggaagaaacaaaaaaattaaacagagattcgaccgattaccttgggtttcttgggatcttcggtcgtcggagagaaatgaggagatgacgagcgagagagacgacaacaaatcgagtagaggcggcggccaattcccaagatccctgcactggagacaagaggcggagccgatgaccgtccgaccaaaattttgggagatggaaagctcaaatcggtggggccatggatgccattcgccggaggagacctgctctggaggacaccattcgctggaggagcttgctctcgaagacgccattcactggagaagaagaagaggcagtggagagggagaagaaagagaaatgtgttttgtcttgtcgaataatgtgtaaaccctaattattatccaccttttatttttttatttttttatttattaaatacattatattttacagctgtttacattttaacaaaattacagctattggttataccgtgtgtggggtattgtgtggttattgataatttttttttttttttttgttttgttgatttttgtaaaggtatgtgtatttattatttatttattaatgtctttacatattggttcacgcatggttctattttttatcatgatattttctttttttattattaacatatagtgacgcgcataatgcgattgggtatatatttcccaacgtgtttggcgcgtcactataccatattttaaagtttatttaaaataattaaataaataattataatatagtgacgcgctaggaaagtcgggatatacattcccaaacgtcccaggcatgactctataagtcagcatttttaaaaataaaaaaaaaaattagaaacttataggtattactctttagtgacacttcatatttttagtgactcacattacaagtgtctaacactaaaagtttagagtctaattt

SEQ ID NO: 75333 - DNA, 990 bp, Cannabis sativa
tttttttttttgagaataaacaatactattataaattaaagagtcatttacaataatagagaaaatggaaggagaaaaattctcccaccaaaagcaaacctcatctaaccctaatgcaaattttgtcaaactatctgcaactgaactagcatttcgcttaacatgagttacaaaagtattaagaaaaaaggaaatgagataagagatatctctaattaaatcatacagttaattaatttaattttatcgtttgataaaaaaattactttcagttactacaaaactcataactaaaaataaaaaaaatatgactaattataaattataattcttatattttcattcaaagtttcgctactaaatttataaaaatcgtaatttgtcgtgactaaatctaaattggtgataatttatatttaaataatatatttttagtcacaaataattttttattataactaaaagttacatttagtgacaaatttttatattatgactaaaaagctatcatactaagagcatctctaatagtaacattctttaaagatgctaaaaatttacacatcatctaaaaatataatattttattttatctcattttcacatcatatttgacacttttatttctaaaaacactctaatgtataacactctttaaaaatactataattatgatctcacacattattatttaatatatatatcctaatttttagatacaataacttttaacttcaattctttattaaaaaataatgaatagcatcaatgctacaacatagcatccatgtaataatttttaaatagtatcgctaatcaactataaaataatatatcgagaaagtgttagctagacaccattaaaccccacgataatgctctataaatatagctagactatagtaaaatgaatttattttttgtaagaacaattacaattgtatagataaagaaacattataaatgagaaaaattaatatgaaatgtgtg

SEQ ID NO: 75334 - DNA, 849 bp, Cannabis sativa
acaaagctcatgctgaagtgttgcgagtgaaacttggttttagtggctgttttacggttgaggctagggggaagagtggcggtcttattctgttttggtcagcagatattgagactcaagttctttccttctccccattccatattgattctttcattagaatggaggaggggcagtggtggagatttacggggttttatggcgatccggaccctactcaaagaactcattcttggaagcttttgagaagactaagccggatgtatgctgggccgtgggttgtaggaggtgactttaatgaaattttgagccaaaaagagaaaatgggtggctcatctaaaccaagctatctcattaataacttcaggaaggcccttgattactgccaattaagggaggtggagtttgaaggcagtgactttacatggtgtaatgggagaaagcaaaatctgatttttgaaaggttggatcgggtatgtggaaacttggactggtttgagatgttctcacacgcaactgtcaaacatcttgatcgcatcaactcggaccattgcccgcttctcattacaaggaaggatccattgtccaaaatgcaaggcacgatgagatggcgatctagatttcattttgagaatgcttgggcagaggatgaagagtgtatggagatagtgcaatcgacttggttaaggaaagatctgattgaacagcctacagatcttaagaaccgaataagggagtgtggggctgctcttcaaagatggaatcaagttaaaaagagagagatgacaaagcaattgaatgaatataaggaaaaaattggccaaataacaagctgaaccgggagggaag

SEQ ID NO: 75335 - DNA, 810 bp, Cannabis sativa
gccactatttgggcctcttcaatgttaatgtatttttggactctcttctggaagtcctgaaggtttgaagctccttcttgttgtagttcgttccagaatggagtctctgtacggttgcctgcttcgagaagagcaagttgttgtctgtcatctactttcttggttttagaggcttcttcccggaacctatttgtgaaattcttgagtgtctgcgtaggcagctgcttgatgttagtcaaggcgctgacctctaggttgactttccttgcggcgacaaattgtctccagaagttagtttttaacttattccagcaacccacggatcctggttccaatttcttgaaccattcttccgcggacccgcttagagtaagcgggaagcacaaacacttagcttcattgccgactctcatgactgtcatgactcggttgaaccgtgacaggtaatcacatggatcatagttcccggtataagctgccattttgggcatcttaaagtttttggggagctctgcttcgaggatgtgcttggcacatggctccatgtcctcacagtctgagtcggagtcgtcgcctttctatctcggggagactcgagcgatgtctttttgaagtatggtgtgttccgccaagattccttcgtttagcgttcccatggagaccgcgggtccgtatttcttttggtcaaggttatcccggaggtaaccttggttcccgttaatatgattcctcagatcaatgggaggacatttctatccccttcttcctctccctccgggctcttggtgcacggaaatgcttttttggtcc

SEQ ID NO: 75336 - DNA, 1278 bp, Cannabis sativa
  modified_base (1216)..(1234): a, c, t, g, unknown or other
aactagccgtttatagccgttagcacatttttcaaaaagaatcctgggaaaaacagactacctattttaaaacagactacctattttgtgaaaaatggactacctattgaaaaagggtaggccgaaaatcaggctggttcaaaacatacattttctggcactaaaatgcgcgtaactctttactcgattatccgttttcaaaaattccaatttttttctcttagttacgcaaaatgtgatttagaaattcaataaaaaaattttttgaatcatttggtgaaaaaacttgtcgcacaagttagtgagtggaccaaaatttgtacttataaaccctagtgtattatgtaaattactttaacaagactaaagtaaatttatactttgattgtgtgtagtcttaatgtagatgagattcctagcttgctttgtatgttttgatccaaagttgacatttttcgagagttgactttgactttgactttcagttgacttttgactttgaacttttgaagacctcttttgaatagggtcttaaattcttgattccttgatgaatcttttgctcttatgaagtatgaagtagttggtatacttgttgaatctatttctttgattatgtttgactttaccgagcaaatattgatactttgtgaatttgcttgcaaaatgatcaagaatagattagtaacaactaataatcaaatatttgtttatcatcaaaataagtgagtgattgacttttgatcaacagatatggaaaactcagattcagactcacattcagatttagacccaacagtagagcgtcctagggggatccctaaacgtggtagaactgagatgaacgaaattattatgttaatggaccaaggaaaaagaccagcaaaatgaagctccctttatggcgttagttgtgtttaacccctacaacatcgcctggaacaacatcagtagcaaatttttccaaaaccgacactgaaaggcctaaaaaactgcctttaaagtctaattttgttgtagtgcaacattatttttttcaaatctttttcaaatagtgtaattttattcttactttataattaaatatttattaaatcatttttttatataaaaatagttatatatttcattatttaaaatgttcattaattattatttatttaaaaaataaagtattactaattatatttctattaatgggtgactattcaatggnnnnnnnnnnnnnnnnnnnatatggttacatttttctttaacctgtaatagcaggttactaat

SEQ ID NO: 75337 - DNA, 729 bp, Cannabis sativa
aaagagaattaaggagaaagttgatagaataaaaaaaatgagataattaaagagagaatataaaataaaaaaataaataaaagatttaagcaagtatttgatgcaaatttagatagatagatatataaatatctaattgaagatggaattcaaatgatatatgttattaaaaataagaaaatagattaaatctatagattaaaaatctttctgaatttttatatttatagaaatttaattcttatgttagtttttgtctcattattttgtttatatgctaaggtgtctttatatttagtaattttgcttttcaaattttgacaactatcaaatcgtactctttcaaaataaaaatgagaaggattaattttttttttcagtaaatcttaaaaaattaatttagaacttaaaaaaaaaattattttgaataattaaattaaattttaaaactaattaagcgatttaaaaattatttatttattattaagaaaatgcatttagatgtaaaaaaaatattttaaaattttaatttttgtaaaaaaataatttttacgggaataagtttgagtcttttttttttttttttttgagaaaatctagatttgtttaagtaaacatagcattttttagtctaatttctatttttttaaataattttatatttttatttaattttgaatatttttctttatttttttagatatgaatttatttaatttttaattattt

SEQ ID NO: 75338 - DNA, 964 bp, Cannabis sativa
  modified_base (880)..(881): a, c, t, g, unknown or other
gccttccatgagttgaactttccaagtgccaacttgaaataccattgtgggcggcttctgagagggtggtaggaaaaattttgcaacatacatttcctcggttgggatattcctttccagtatacatcttccaggttggcatcttaaacatgcgaggcaactccaggatattgatctcatgggagaaaggggttccacgttctcgatccaactcgagatcgttgttcctctgactggccaggccttggaacgtaaactttagtttgtccagttgtacctatacggttggactaacttgttcagcctcttggccaatctagtcacatcagcatctttttgagcgagaatttgagcgcgagttccgcgctgcacaatcggcgtgtcaatctgatcgtctactcctctcctactattcaaatcgtttctgagatcatgagtcgttcccagtctatcaaatacagaaacgcatggttgtctcagtgactggttggtttggctaatgtgctgaccgacaccattatcctagctggaattgttgggtatgacttctcttgatgaattactagacaaggtctactcgcctaccacttggcccacaggaggaacctgtgaccgtggatttgacggctgaccatttatagtctgagtggtattcatctgtggatctttgtctgtttcacccaagcgaatgacattcgcaggctcttgcccaacagtttgataggcatttcgtatcagcacagtggcatgccgactgcgatcgtcaatgactgctcgctgagcccttaacgtttccaactctttgtccctccattcggcaaacatgcgcctctactgttcaaacacgagatttaccacagcacggagttcctcctgatcnngatgtagggtgttggtatgaccctacacgattccaagagcggcacagagtttatggatttcagtgtcatcttcaatggttgtt

SEQ ID NO: 75339 - DNA, 1162 bp, Cannabis sativa
aaaaaaaaaaaaaaaaagtcaccctgaggggtttgagaacatgcatggccgagcactaaccatttagccatgtcagtgctcgcaactggtaagttcttcaagtaaatatcacactaaactaaaaacaaatgaacaaagacaaacaaattaagccttaaaattttattcacaccacaccaccatgacttgcaagactcaatttttgtaaaactagattttcaatccaattgctccaacaactaaccttaacattcagattagaaaaaagaatatgactgataattgaaaataaataattaaaaatcaccatacatgcacgaatcaatccaaataatttcacaaaccaattataaataagcttgcatcatttaaccttctccactaattttaataacatgcacaaaatgttttctcaactatgttggatggccctccaaaagagtattagggacgtctgtgcagaccttgtatgtccacgcggctagaagattctgcctctagtctctatttagctcccaaataaatctaatgtacccctctgtattgatccggatgaggtagtggtgatgttgtacggtaggttttggagatcaactagatcctcccactcagaaaagctagaagaagatgaattttcacttgaagacgatggtgactttgcctggagtcttggttgatcttcaaagagtcttgggagggcacatgggattagatacgggtcacccaaacgagcaacctaaagacaagaagttcacgcacgaaaaactatttccacgcagacttaggggcaaatgttagcccaatttctacacaggatgacgtggcattcaatagggtgacatgtcaaaaacatatgaagatcgagacgggctatacttgctcgatgtttcgtccagaaggaatcaagctcaaagtggttgtttaagtcttcaacatgcaatatccgaacaagttctgaatctcataatgttctgagcaaaacacatatatccagcgaagcattatcccccgcgtagaaggacgcaataattatagaatctctaagatattttcttcaaatatctctacaattgtagcataattaaatccctatatttatgtgattgattgaggtcatccgagagatttgagagaattaatacttagtttcctgtttcttttc

SEQ ID NO: 75340 - DNA, 1317 bp, Cannabis sativa
ttagagaaatgttaaggggtttgattggcgtctagtactttttttacgtgtcaatattactattggcttaattaaatattgtgttttatataatttaatataatagtttttaaagagtatcgctagctaatcgcaacgcgacatgtcaagaagatgctaggcacattttagtgggccatagaaaaaaaattattttggactcttatttagaaacaaatgttccataagtaaacattattccaaatctcaattctaattttttatacatgcatgtaacataatatttaaattctaatttcaacactataaattatttaaaatttttcaaaaaaattaataaaatacctactataattacaatatacataatcatataaaaaattaaaattaataaagtacccactataatattttttttatatatataattataaataaaaatatatttttaaataacatttttatatatataatttaaattttagaatattttatatttattaattatttaatatttaaaatttttattatcttcatatatcatgtctatcaatactggactagaaatatttttctattccaacaatagtagactagaaaaatattgcttttcaagtccaatattattggactagaaattttttttctagtctaataattaagtttcacgttgtgggaccgttttttaagcccaagaatgttggactagaaacgtttttctagtctaatattgttggactagaaaaatacatcttttatctcccaagctattatgtctaacataaaatggactcaaaaaatctatctagtccaacattgatggacttaaaaagagattttggtagtagtgtgaatatgttcatttatattcttttgcaactttttttagaaataaagcaaaatattagagtcaaatcatataatcttaatatcaaatatagtatttgttattgagataaattctctcgcaagagggactttatagaaaactcgcagtattgaaaatgacttgcaatattatgtaagataggactcgcagtaccaaaaggatcctgtagtattagctacaagagatcttgttgtatcaaggaagacacctcacacatttaataaaattgcagaattaacaggaaaagacacgaacatactaatcgacgagaataaaacgatcaagcatttagaacgcaattaaagcaagtgttacattattttgtaatcgttgtaattagtgtaattaagtgcctattattattatcattattattattattattattattatttgtatcggtctcattatggtcattattttgtaac

SEQ ID NO: 75341 - DNA, 913 bp, Cannabis sativa
aatcaagttttggggtgaacaactggaaatgggattctgtaattttactcaaatagccattgataatagtttagaagaagaaagatgagattttggggtgaacccagttgaagaaatgtgaaatggtgagagagaaagagaagaacttacagatgaaaagatgggatttgaaggtggtggaagataaggtgaggtaccggtggaactgtggtctggaaaccaaacatggtattggtcggtcttttggattttgggtattattttccttttctcctaaaactcctaactaaaatcaaaaaaatgtttaagatatcttactcaattagggatggcagttgtacccacgggtacccgaccctaataaaataggggcggagtcgaattttagaaatgggagtaggtatgagtttaaatatttatatttgagttggattcggagtggagtgagatatttcagtttttatgaaaatacttgcagacttgcagtaatgcatattaataatcacacttaattgcttttaaaaaaaaaaataacacttaaccacttattttcgattgtcaattttatatttacttacttcagttattatacacactattctacttatgtttgcttttctaatgagtttttatgatttttttttttaattttatttgaaacattatttttaaaaatatatataacgggtactagatgggaattcttccccgccgagtaatctctgccctgttcctgctttaatttaaactaatattggggcgagtatgtgagtgaatttaagaagcgggtatgaggatgggagagcaatttccgcccctactttgtcccgtttatcattattatacgagtaatttacaatgtaaatacttaattttaactctcggttgaagataaataactaagtttaatttt

SEQ ID NO: 75342 - DNA, 620 bp, Cannabis sativa
acttcaagtttttatttctcacaagatggtgattacagaaaaaggctaaatgtttaagctctagtttctagagatagatactctgacattgtgggtagttttctaactgtgaaaaatgaagtaagggagttctccttttataggtgaaagaggctcttaaaaatatgaataaaataattaaaaaataaaagttggatatttttgactgtaaatgatgatctaagggtgaaaattaacttctgcggatgatcgtcaatttttggagcccaggtcgtgatgacgggacccgcttcaggtaagctggagttattttcgtaatacccttgggggtgaaatttggagtcaatcacttcaaaatttcgatttaagtgtcatacatgatttgatagagcaatgaattagcttcgaaacgcaaattgaatcacgtcaatcagatcaatattgagtgagttatggtcattttactgaaggttgttcgtgacccagcgcccaggttgacgtatgacgtcaacctggacgataggtaagtgaaaaaacgtccaggggtgtactttatgatgtctaattgatattttgacatcacttagtctgattctgtgttctggcgaagctggtcacca

SEQ ID NO: 75343 - DNA, 926 bp, Cannabis sativa
gtattgtgtataattagcttatgcatgactagaccaatatgtaataaacatctttcatcaagcttgccatttaccatgaaaagtgtttatcatatcacaatgatgatcattagtagatgagtctgaattctgagtatacatgaactcttgtttttatacattaagttctttgatttactcgctaaagtttctcagagaagatgattcttacaacttaaattttgggaccttaataatatgagtggctgggaacatgttatacaatagtggaatcaaaactttcctaacagatcgaatattagttcccttatagtgttaattcttggagtgctaacaattggatccaaatctataatacttataggttaactgttcacattgaattaatggtacataaggaatcaagagataattagaagggtaaaacagtattttgaccaactctaattatgaactaatatttagagggagagctacttatattgatcatatccatagactacaagtaagaattttgtaaatataactttagattgtcaaagagtgcaattctatatttatagtagattaataatggaattaataaactagattaatatgttaatgagattagtggtaaactttgataaattggagaatataggtccatggtccctgagctacttctatacaatcctatacaggggaaggttttatttgatgaatgaattttgtgtgagaattaatttttgtgagaaataatttcttaagaaaaaaatactaatttgtgaaattattatttttgattaattatgtcaattatgaattgtaaaattaatagtatttaattagttaaatatattaatattattaaataatattaaagagagaaatagaagatagaaacatattattttagaaaaaataatatttattttaattcttat

SEQ ID NO: 75344 - DNA, 733 bp, Cannabis sativa
tcaccgatctcaacaaggcctgccgaaaagaattcttccctttacctcgaattgaccaaatagtggatgccacctcaggatttaagctgatgtccttcatggacgcctactctagatacaaccagatcaagatgcatgtcacagattaagaatgtactagcttcaggaccgacaaaggggtatactcttacttagttatgctcttcggattacaaagcacttgtgcaacttatcaaagaatggtgaactagatgtttaaaggcctcctaggaagaaatatggaggtgtacgtggacgacatgctagttaaatccaagacatgcatggaccacacaaacgacctcacagaatgcttcgaagtggtccggaggtatgggatgaagcttaatccaaagaagtgtacttttggcatcaaatcgagaaaatttttgggatttatcgtcaatcaacggggaatagaggcaaaccccaaaaaaattcaagctttactaaacatgccttcccccaagaaacacaaggatatgcaaagcttgactgaaaaggttgttgccttgagtcgattcatttcccggtcaactgacaagtgcatctcgttcttcaatattttgaagaaatgccaaaaatttgaatggactgaagaatgggaggaggctttcaaaaaactaaaaaagtacatggcaaaaccaccggtactatcaaaaccagttcacggagaggacttgttactatactt

SEQ ID NO: 75345 - DNA, 766 bp, Cannabis sativa
ccacaaaagtgagctgcaatgcctatgtatttgtgaacatcaggcatgtcaacttatttgagcaacaaaaatatgagagagctcagaattgtccaaaaaacaaatctaaaaataatcaaatctaaaaaaaaatctaaataacattaaataagaaagtataaataaaatcaattttaaaactcgaataatttagtcaaataactttatttaaaaaataataatcattaatacatttagtggtattagagaaagatagtacaattatattagaaaacaaaagtttaaataagtaaatatagtaatgtgaaattgttaatagtacaaattgtaattatattttaggcaagtttacgtgtcaaaatttattgataaaatttctaaaaaaaaatattacccaatttagggtaatgtaggttatataataatgagttggcaaaatatagtaatcaataatttataccgcaagtattaattcacccaatttaagttaatctatgttatatatcatccgtgtgtcacaacttttaaaaatggaaatccatttctcattttcagggaagcatttagatcatagaatttgcaatggaacccccaccccaccacctcccttagtattaatactgagtttttcttattttgatggtggatgcgcagtgagacctcctctcaatatgttcaactgaagtatgacacagaattgacgcacgcccggtgtttaataatgtgccagttactgctcaattttttttctaaatataactcaaag

SEQ ID NO: 75346 - DNA, 599 bp, Cannabis sativa
tttcatatgcagccgatactttgcgaacgtgtccgtgagagacgaacatttcaagacgaaacgtcacaggaagcggtaagggttacctgttctcttatccttttaatgtattttttcttaatacttctagatgtttgttgctagtttacttagtagtattaagagaaccacttatattaaagaataaagattgtaaattatttaaattgatgactttgagtttgtcaatgcctttacggtgggtagtagcattttgatgggttttacctagtccaggagtcacattttcattttgatgggtttgccaccatgaactttcccacaagacctgttccagttagttatgtaaccttctacttctatatggttgtgataagttacaatcacttgggttttaagatggatagtggcgttttgaagggttttattgaatccatatacaatacaatttagcatattccttatgttgggcatgtgaatatatttgtattaacttttctagtaccaagcatgggtattgaacattaactggattttagacaattagaatagtgcagcagtgtcatttgcagtgagctctctgaatcattgctctccga

SEQ ID NO: 75347 - DNA, 831 bp, Cannabis sativa
tgatagttgtcaaaatttaagggagaaattgctaatttacaaagatacgttaatatttgaacaaaataataagacgaaacctaacaaatgactaaatttctgtaaatgtaaaagttcagaaaattattttaacaacccgtatattttaggggacaggatcagatagtgtcaaaaatttaggagacaaaattagtaattatttttttttatttaatttgtctcagtgccaactaaatttgtaaagagtttaatttttcagctaaatgggaccaaaataataatagagatcactcataaattatatacatattattaaaactttttttttcattgaaagttcattgtattattaattaaaatgtaattctgctaataaaatagcatgaagattagtcgggataaatctcccactgaatcgacaacctaaaaaagaataagcgacaacctaaaaaagaataagcagcacgagccaaaaaattaactaccttattcgcaaatcatttaacaaaaataataaagacattgttttaagtaaaaaaaaaaaatatatgtttacaatcataaataatcaacccacatggagaagtcatttggagagtatgacacacttgacacatcaacaaaatatctacatgttttcctagaagctgcatggatgtgggcaagatacatgagcaagctctccataacacatgatggacttttggagggattttaatattctaaagattctgccaaaacgagaactagttgttcatcccacctcccattcaaaacttgaagatacttgtaggcactcttttacactatatatatccaaactaccaaact

SEQ ID NO: 75348 - DNA, 588 bp, Cannabis sativa
caatctcagctcaatagctaagtcgaactccctcaccatctgaaatgcattcagttgttgctctgcataaactggccatgttacaatgggaaccccgaaccataagctctccaatatagaattccacccacaatgggacacaaagccacccacagcattgtgagccaagacttccacctgaggcgcccactcattgcatatcattcctttacttccaatcctctccaagaatccttctggcaagatttcgtctattattgtcggttgttgaactcgtatagaccataagaatctatggccactgtattccaatccaaatgcaatctctctcaactgtgaagcatcaaaagtaccaacactcccaaagcagagaaacactacagatgactgaggctgctcatcaagccattcgaagattctattgttctgaacaagatctgtacttgagtgaggttgtcccttgaagttaaccaccggtccaaccatgtaaattggaggtgtttccccatcattaaaggagttagcaccatgagcctccagtcccccaaaagaattcactataactccttttgtctctctgaacctttg

SEQ ID NO: 75349 - DNA, 840 bp, Cannabis sativa
cacgggaggagcagaccatcttcttcgaccactccattagcgccgaggagagagaaatcgttgggcgagaggaccacggcaacccgccaacagctacggtacgttggattttcatcttctccgaccacggcgaacgatcgagagagcaggcttagaaaaatagggcgatgggtatgtaattgcgaaccaccacaagaagtcacgattcgtacctcaaagacggtgaagaacccaggtcgaatgttcaagtgttgccataaattcaaggtttgaattgctgccccatttttttcttttttttcgtggtccaattttttgggtatggattttcttgatctgatctagaacttttatatgaggtaaccaaattgtaaactaataccaaaaaaaaaaaaaaaacagaaagaaaaaccttgttaaagacgatggaacaaagaaggcatatgtacaagtaaggagttctgtttgatattgtagtgtcttttgtacaagtaccagcttctcagtaaattgtatctgggccaatttcctgctacatcctcagttgctcaatcgatggattcataaaatcctcccgattatttgattatgatcaatgtaatacatgcctttaatcacaggttaatggggattctttctccttctgattcaaaaaaaaaatctaaatagtgtagcctctgtttgttttgagcaagttattcttttcttagtgtcacagttttgtttggaggaatgcaaggattttgagataagctgaagtagtttcaagactcatatttgagaagggagaacgcaaaataaataaataaattaatgaataaaacactactaatatagaaa

SEQ ID NO: 75350 - DNA, 661 bp, Cannabis sativa
ttttttttttttttgaattataattttctgtttctttaaggcagctaacatgaatatacacacataaacggagttaattttctttatacgtggacaaacaacaattttcacatttgaacaataatgctatataaatttatttagatgtttctcacgtataccatatatataaatcattttcaacgacatatactatacatcccccactttgttgtgcatacatgattggttattatagatatcctgacacgatgtagttatgtccaaatacaaataatagtactactagtcttgtagtaccgtacaaatttctttttaaatttctagaaagtgcagagacacattctatgatacactttaaacaataaccactattaacattgtattaattaattttattttatttatttttcctgtcaaacgaccgtaggttaacttttgccaatttttctgatagggttttgaaaaaggaaatcatgggctccatttaaaagcttaggacaagttgtgccttcctaaatctcttggcggcctcgagttccgaaaaactagagaaatgaatcaggcgtttctggcaaagtgggggtggcatatccttactggtagccaatcgctgtgttgcagagttttaacggcgaaatacttaaaagggaaggatttc

SEQ ID NO: 75351 - DNA, 658 bp, Cannabis sativa
taactttgaccttcgtcttcctttctaccccaaggttgaggaagttttatgtcgttttcgggagaaaaacaagaggcttgatgcggaattagaggagcgcaggggtcttggtcttcctccccgagctgattaagtattgtttatttttattttttcttattttgtccttccctttacttataagacatttctattttcttttaaggggagactttttacggcccggccccaggcctttacagttttttcttttgaacaatttgtacgacttttgattttatttagcattttactttcctatattgatcatgttttttgcccatatgttatgccttaataccccctaagtgacatgaaaggaaatttttaggtcacttagctttgaaaattacataggagattgcataaatttgtccagcacatgttattttacagaacataaacttttgtttttaactactgattgtatttctggaggtagtcggaaatccaggccctaggcactgtggatctatcaattattttcagcttataggtcctggagccaatttcgtcctcgatttcatatggtccttcccaatttggctcaagtacccccaatttgggttcttgggtggctggaaagacccttcatggactagtttgccaatggtgaatt

SEQ ID NO: 75352 - DNA, 523 bp, Cannabis sativa
atacactttatttatttaatttatttattattttcttctataatgaatttatttaatttcttagtttcagtgcacgtattatggtcgatccaaattacagtgtctgcctgtctggttttgaattatccacctgtaaacaaattcttcttctctttttttttctttttttttttaagtcacaattttattattatttttttattatttgtttaaaatgtaaagaacaatttaattacttactaaatacttaacatattaacatatataacacaataggaatgacaatggtattggagagacggtttttaaattacaattcctatctctgtaggtattgttgatagtgaaagtattaactagtagactattatggaaaaatcatgattacccttaactattaatagtagtcattttctaaaaaaaaaaatataataatttaatgcaatttgaatgaaatctaattaaataaaattctaaatattttctaaaagctagcgatactttctaaaagctattatattaa

SEQ ID NO: 75353 - DNA, 2029 bp, Cannabis sativa
tatctttattatattatttatttttgtgttgttgaaattcctccaacaacatttggcatttcctgtctcttccttcttggtttgctcgtagtatgccaacatctctccagggttggcaaaccaagctcgataaatagatcgcctggcgattgtattgaacttggctttggcatcagccttggtctcttcaagctttctgtcagcttcgacctaggtagtcttgttcgcctctttaagctcctggatattcatctggaacagcctcaaggtctgtcttgagagtcttttgttgctctttggcctctttcttaattttagagatttttgactgctaatcaaaccattgcttagccaaaacctcgcgatgttccctagatttgcgaagttcgtcgttatgcatctctgcattttggagacgtctctattgagccacaaaggacaagagagatgtcttcaagaagtaaaactagaggaagatgtgtactaggggaaatataataaaaagaggaaagaagaagagaaattaaaaactaacggactgcataaggtcgtagctccttgtcaaaagactctcaaagatacccttgtgaattaagtaccagttgctttatttaaaagtcttgtaatgatgccagttattggtgtcatgcaacgagcaaatctgcgagccttctgtgctagcataaattgacagggggcaagaaggctctagcagtgccatctcaggatgagaaccaaaaaacttaacttaatgaatgaatagacccaatagcctattcaccagcgctcgcaacaactagagcagttgaatcatctagagaattttctggctcgatgctttattgggtcgaggccttttttttgttggcggtaatcttgatccttttggaagattccttagttgatctcgaggcatctccatgttaagttgtgtgcttcttggatttcctgatgagggggtaggattgcgcaacatatattcaagatttaggtctatatctgcaagacagagaaacatatcaacactaattcaaaataaataacaaaaatgtggagagataatcccacacttaagaaaattaccacaatcattagacgaggatgtagtactaaaatcattactaaacaccctagaaccattgatcatgaaaatgtcaaaggtatttagaggagacgtgttccattctggatggttcgccctatcaaagttagtgccataatgtttggctattctgaagtaagaactattaaatcttaattgtacgtgatgcttggggtaccagctatcaaatctatgggcaatgcgatctacataattccaaatgtaaaaattgtattgactatccctaaatttaactagtgaggtacgctcggccctaagtacaatcaggcactatccacaagtactaggtttattacctcgggaggcatcatcttcagcttctcgaggggttatgtttctcagataatgggtgcgagccacataattcctatcttcctcgtcaacaggcaatagaacctactgctagtctgagtactttgggacttttgaagtctctagtggattgcttgccgctgagaacaatgtaggtcttcaagttatttttgtgcaacaagaaattagctactcgcagcctgaaaggaagaccaacaaagattttgtgtttcctttcaatctcgagagtcgcaataggcctcctcataatcattgtcaaacaacataaataaaataagtaaaagcctacatttattgaatataaaactcgaaaccaagttttacagttaaggcaatacttatgtattatgcgaatcacagttgtgtttatgggggcaacaccagctgtccaaaagaattcatccttgaatttatttttatttggcaacctgacaatgatctttggatcattagtgtaggtcttgagatagtagaaaccacctgctcctcgcttccttgcgggacaggccttcactgagtaaaaatagaaaattttgagtggagtttgacactcccacttcaaaatatgatata

SEQ ID NO: 75354 - DNA, 971 bp, Cannabis sativa
tattaattagtaaatctgattatgttgaaatgagttttatttacggcacaaaaccctcaatggttacatttttattgttatcgtgatggttgaaatttttttgatctgtaacagcatgtaaccaataggtaaaagttccttttttagaattaaattaatcataattaacaattttcttaaaataaataattttaatttaaatatttaataagactctttcaacaattaatatctataagtaattttatttttatattcaagttcctattataacatttttaacatttaaactattttactgtaatatttaaaataaattctattattttttttacaaaatttcgacttccaccccttctaatataaatttttaaatacttaactaacaaccacttgactcatcttcgtcctttataaaaaatattaaaaattaaggtttcaatttgtcctaacctatttcacttcgatgtaatctcttacatctctgccacaaacccatttctctattcttttttttttttgttaagtcccatttctctattctactagctacagttagatttcttcttaatttttaataatttgtttgctgttttcctactgtttcgcttatttgtgaaaaagaagcaacaatttcaattaattgttgatctactttgataatttttcttttataatctttagattgatgaagatgatttcaacgaggagcgaaaataattaacaatcattaattttatagttgttatgatattttttaacttaatttttaattttttaacagaaaaaaactaaataacttgaactaatcttggactgacacactaatttggcacttaaaggtgttaaaaaataagatagactgtaaattacctctaattagaggtcattcatactattttttattaattaaggttatgtgtgtagtaattttaaattataaagacttttgttgcaattatttaaattat

SEQ ID NO: 75355 - DNA, 935 bp, Cannabis sativa
tgttagatttagggttcgatttaggttcagatctccgatttggggaaatcacgatttggggaagacgatggcccgatggggaccctgattgggtccgatgcatgtgcaaaaaatcattttttgttgggtccgactagtcccatgtgtaacccgatggggtccgatgcatgcttaaaaatcaattttttgtgtgtccgatgggtccgatatgcctgatttgctatgttaaaattcaattttttgtattgtgtcagatggttccgatttggaacccaatgggtccgatgggtatgttacatttcaatttttttgaaatatgtctgatgggtctgttgtgtaacccgatgggcccgattgctgtgtcaaatttcaaatttttttgcattgggtctgatgtgtccgatggtgattctgatagggtccgatgcctatgtgttttttattttttagtgtttgggtccgatggacccgatggcattgttaaaattttaatttttaaatttttctaactttcattttgttgttttttgcagagacctgcacatctaataatttcagtgtcggagcattacacaggtcgtgtcacatgacggggcggtagttattactacccaaagattaaggccaaatttgaagaattcaaactatgggatagggtgagtgaatcccctttcaaacaatttatcgagagagagcctttacaattttcaagagcattgattcatcagttgatgttgcacaaaatcaaatctgacaagccggacgaggtaaatttttatgtgggaaggaagagatgtagatttggtagggtggagtttggtttgatgaccgggttaaacttgtcgcccggacctactaaggaagaaattaaagagaaaggaagttcggactggtttattatggaatattttaacggtaatccttccatcaacttt

SEQ ID NO: 75356 - DNA, 869 bp, Cannabis sativa
aagagcgtgttagatcataccacaaggtaacatgaaaattaactaagtgttaaaatgtgcgacgtactaggtcgacgattaaaatcagtcctaattcctggaatgttaaacacataaaacaacttagatttccaatctcccatattggaaaccatgcctttcaccccgtggatttcagaagtagcccatttattgaagcaatagaagccgtggtgaagacccacgctctttatgtcataaaaatagctgaagtcctccatcgatggctccttatgtgcatattccatgaacatcacataaaacccgagggctatgcgataactgtttggggttaattgaaagggggatacatcatatcgcttgagaatagcagcgatgaatgggtgaaaaggaagcgatacccacaacggagaatgggtatagaaacaaccacattctttgtaggaattatcgcgggattggtgaaaggtagatgcggtctctgggtaggacgaggatgcatggtgctaaggcgtagtagatttaaccttgtaaaagcagttaggtcggacttggtgactcacgaaaccgaatcctcgcatgagaaaggctcgtccagttgagtgttgtccaccgagtaagtcccactcccttctgcgtcctcctcttcctctgactcacgatttggagcctcccactcctcgcccatctcctcaacttcggcatcaggagcatgcctgaaatgagcaaggtgttcacgagctaacaccgtagactcgctattgcgaatctcgatggttcctggttcagcgagctcttgacccatcctttcgatatctgcggaggacaacgggcctagctccgcgtctccagcaattggggtctcctct

SEQ ID NO: 75357 - DNA, 631 bp, Cannabis sativa
tttaattgtaatgacttgcaataaaaaatttgctactgcagaacacgaacttccattaacaagataaaaacataaataaattgtacaaaatttaacacttgatataagagactatagaacacgaacttccagtaacaaaatagaaacataaataaattgtacaaaatttaacactttatataagagaattatacatatattagtattctttcaaatactgctagtttacggagtcatactcagagaataaaatcaattagtaaagtcacaataattacaaatataattgacttaaataaatttaaactccctctaaaaaaattttgaaatcctttgtaattccctttgtcaatctgatctctgaacataccaaatagtgaattctcttcagcttttgaagtgtactcacttacttcctcccaaagtgaatatttgacaagtcttctccagaagactcttatcttgttcaatgaagttcttcaacttattctaaaaacagtcaaagaataataatataaaaatcaaaacttagtagaatactctaagtttttacacaatgaactctcttttcacaaaaataaaatacaaaacaataagaatagaagaaataatttgtatgactgctctctaa

SEQ ID NO: 75358 - DNA, 707 bp, Cannabis sativa
acaaggtaagaaatcggttatgaatgcaaaagaatcttaccataaatgaaaaaatattttgtcaactaacttgccaaaaaatgactttacaatagtgatgatgaaaataacaatcagacgcgattgaaaatatagtgtatttagtgttattgtaatccatcttatgtagtccttctgttttaaattttagggttaattacggcaaaacccctaatgttttcattttgcttgcatttaacccttaaaattcattttttggcggcaaaacccccaaaatcacgataccgttagcaatttacagtttgcatttaaatttagttgttaagtattatgttggattgtccatatgcacacagtatacacgtgacacaattttattgctccacttaaaaatatatatttaaaaaaataaaaaaaaaaatcattaaagaataattttttttccctaaaatatcatatttttcatacattttttttcaagttttcattcttcttcttcttccttcttcttcttttagtcacaaactatcaccaccaccaccatccatagccaccgaaactaccacccaccacttctaaaacaccaccacctattggtgctgaaaccaccaccactacctattttcaaatccaaatcatacaaaaaaaaaaaaaaaaaaccacccaccactaccgaaatcaccacataacctatttttcaaatccaa

SEQ ID NO: 75359 - DNA, 1009 bp, Cannabis sativa
ccacctacaaaataagattgtttattacttagctattaatatttttatatataaatatatatatattatatatataagtgtaataatacgaacttgattgacagagggagggatattggcgaaagagagaatgttttgaagcttcttgcaagaaaaattgctaacaccaatggacttagtgaggccaagtctttgacattcttccatggctttccatacagatttaaaatccattggcattaggtctttttcatcagtgggaaatacagccctccctggctttgcacttatgggcgagtgtatcagatacaaatcaaggtactctagctgaagattcctaataatcaacaacaacaagaataaaataaattaaaagaaagaacaaaaggggatacataataatttgaaagtgaaaactgaattacccaagtgatgttttaagagaagggagaacgagatgagggtggttatcagtaatccaaagcttggaagtgatgaaaagttcatctcgagaagcaacaaggccaagttttagagcttcagctatggcttccccaagaccctgttctgatccatatacagaggccgtgtcaaagtgcgtgtaaccaagcttaatagcttccaagactgcatttttaaggggaattgagtctttgtcgtttgaagctgttccaagaccaattacagggatgctcctcaggcctgtggaggaacccaaacccagctttggaatggtggtcgatgccattattttttgcttcgttgacttttagatcaaatttctttagctaggccaactggggttggttttttatatagttttctctctttttctcagaacttttcttccgttcctcattcgtccaccatacacttacagggcacatttgctttgccacatgtcagcagaagagagcagcaccaataaattgaatattcccttgtcatgatttgctggccggtttagttgggttaatatgtcttagcattttgctattaggcaccagtg

SEQ ID NO: 75360 - DNA, 1094 bp, Cannabis sativa
atttttgtttttaaaaataaaattatataaacacaaattctactttcatttttgtgattaaaaattaaaaaataaaaatattaccaaacgtcaccataagtaaacagtataagtatataaggtaattggttatctctaattaccctaatgatacttggttacccttatctaattttctcatatttttcaacattttctttaatttttcccattaattttttttttctgaaaaaaagctatatttgaaataaaaattataaaaattcataaaatttataattatttttattcttatttataattaactcaaattgagccttatattattttttataataaattagaattattataaaatatttttatataaggttctacggcattacgaaagtttaaagtcttttcatatatggaaagaaagaacaattaattatatattaatttaaaagaacaaatttgaaactttccaaccagaaaacactggtttttcccaatatatatatcaactgatttttggaaaagacattgttgaaatatatataaataggggacttatataaaacctcacttgagtttgaggtttgacatgcttcaaatgggacaaaaataattttactgtagctatagtgatattaacttggtaaaaccggttttgataaccggatggtacacaatttttaataagagaaataattttttaatgtcttttattcttttgagtaaattagtacaatgacaaggttagatgtgtaatttacttttattgggtagatgtatttatcttttaacacttagtattttctacgaaggagtttgtattccttcgactatatgttagacagcccagcaaaaaagactatataaatacagtagatctttttctatttcattatcaagaaattttatttattctaaagaaagtcaaaaatttcaaaatattacaatactagtaaagaaaactaacaacaatgggaaaccagaatgtgaaatgcaattgcattcaaattattatgagcagagaataaatgatctattgtaacattaattacaacaaatcttgtaaaaaagaaaaattcttttacaatgtccaaaca

SEQ ID NO: 75361 - DNA, 1213 bp, Cannabis sativa
  modified_base (1149)..(1149): a, c, t, g, unknown or other
gccgatcgggttattgcctatgcctctcgtcagttgaaagagtgacatataattgccacattatttattttgattattttattaaatagattaatatcaaaataaataaatttgtaattaattagtaaaatattttatatgatacaatatttattattgaatgattaaataaaataaatataaactaatatgtatattcaattattatttttttgagtcaattatttattttaattttaaattaaataaataattatttatctttattttgttggattaatagagtattttaagaacaaaaaatattccgttaaatttaacagtgttagtagggttaattttataaatataaatattatttattttagtttaatttaaatatataaatattaaaatattatttataaccttattattttgtattgttatttttaatattgagagtatttttaattttaatattctctaattatatatttatttttctcaaattgtaaaattttaaatattatttttttaaataaaaaataaaaaattaataagtaatttcctttttattataaaattttaaaaatatgcataacaaaaataaaactaaaaatgtaactaaatatacgtgccatatacataataataaattaatatatatatatatatgatatataacatatatacacgatgtaagatttttgatggacttttttttttcataaaaaaaaaaaaaagccatatagccaaatagactctctttatccaaattgtatgatttagttagagtctcttcctctctctcatcatcatagtgtcttatgagttgagtacacactatgatattaaataattattcttgattaattctacaagcccacacttatcctgtagttttgatgattggtctggaagatctttggtgtgagttcttcacaaatcaattggcattggattagatgctcgttaatttatatgaaaatatttaaagataccctgatagtctacaaaaggtaaattgttcttatcatggagctagatttcttattttttttttaatataaaattgattctccattgtactctgatttggatcataaaaactaacaagtggtactaatgttatctctatatagattaaatattaggctaattagtaanttttctcctcgaactttgacatgtactaaatcgtgtcccgtaaactttttttgccgttaaaaat

SEQ ID NO: 75362 - DNA, 779 bp, Cannabis sativa
gttaaatcgtaactaacttaacagctttaaatcgcaaccaccgactttgagatccatatccttaatctataaatatcacctaccttatcattttgatgcaagtgatcaaaagttttgtgagatgattttgaagagagggattgagaggtaaagagagagaggtacaaagaaaagagagagattaggcttgaattttgtatgtagaatcttctcttgatgaagacgatttttggataagagtgtgagagataaaatacttttagaggatccaacagagaatcgatctcgactgtattgtacgctactcttgcttaatcaataaagaagaattggtggtgttccagagctggagtagagccatagatcatatcaatctagaggacttgaaccaatatatatcttagtgttgattttattactttattgtttgtggttttaatactctgttcattcatattttttttatttcctagtattgtttgtgtattgttaatcttgtcattgctaattgtttgttgttgattaagttttagttgttttgattccgcacattagttgtaattttcccataaatcaaagcttggcagtcgattaagaatgcaaaatcaagattctttttgctgcaattcctaagatcttcgtcaatggcgagattcaaagttcgatggaacaagaaattttgcgctatggagagaaagatttaaaggaatcctagtgcaccagaaggtctccaataactaaaaaaataaaatttctattctattctatttcattctaac

SEQ ID NO: 75363 - DNA, 1122 bp, Cannabis sativa
  modified_base (783)..(787): a, c, t, g, unknown or other
aaggggtaaaaatcgagaaagacaaagtcttctctgtacccttgaaggtcatcatgtaaagaacaaatgggcctttggaaaaatataatgtgcaaaataagagtgactcaaacaccagaaaagagaaatctaaacgtgttgcacagaaactcaaggcgaaaaattcctagaaacttcgaacattaaacccagaaaagcagatgaacagtaaagcatgccatgaacacaaacagtaaagtgagggatgcgaaaaacttacataaagttttagaactgggagttgttgttgatcgacgatgaaatgttgactgacagtaacgaatgaagattggtaagaaacctatagagtttgaggttctggtttgagggttttctttctctctggaaaattcgaagaaatttggtgaaaggctgaaagtaaccaaatgaaggaagtatggtggcttttataggcaaaggtgcatgtggaacaaggcaatcacctaccaatcgaacgactggggaggcgcacgattcgaattcccaagatccaacggctagattggttcgtcatcaaggcggtggaaacgcttgagtgtccgtctgacacccattaatgcgccgtatcaattaaaggacttgaaatgaatcgacgcctgcaaaaagtgaatcgctgcattaatggctatcattaattacaccttcacgcgcccaaagcacgtgccaggaaattgaggagccaaccggaggcatctgaacaagccttgttcaatttttcaattaaacaaggcttggggggtaaannnnncccctgattttgcccaatatatgtggaccaaccaaacagggacacgtgggcacgaaggtcttaacactcaaattatcagctaagtctttataaagactggcgttatccgggagttacctcccggagaaggcatacaaagtcctctatgcacccggaggcctaattgatatcaaagtacctccgggagatgtcaggcttcctctgagcagacatatcgtatttaatgctgcatgggaggaagcgtgttggaactgccgcacgcaataaagtctgacgacacaatgttaaagaaaatgaagcagaggagtacacatgaggctgctgtactctgcact

SEQ ID NO: 75364 - DNA, 860 bp, Cannabis sativa
  modified_base (140)..(146): a, c, t, g, unknown or other
acaaaatagattatgtattttttaaaactatacaaataggaccatgaactgatttgttgtcaaaataaaacttaataataatatgatctagagatactataaaaaaaaatttctgtatttgttcgtgttagaaattgtcnnnnnnntagttatattaaaaaaataaattgttgaaaattgagctcaggatcctatttttactattttggaaaatataaggttaattttgtcatttaacaaaatagaggatccaattggtaaattttacaaaacacagcgtccaaaataatatctaccctatgtttagttccactttttgccatgtaattgatttatatattcttctattctatcatttaacttagtttttttattcaaaaaatactaatttattaaataaaaataataatcgaaacattaaaaaaaaggactttaacaatatctacgattctatgtatgtatgccaaaatacaataattgtataggtgaaaatttatactacggcatctgtccttaatagggtgggaattttctatcttgatggttaataaggtagtagtgagggacaatttcaatactcgaagcggggataagacaagagcgagaataatactatccatagaacagggacaatttataaaattgtaattttttttttcagtttcgttagtacagtttcagttttaagtttattagaagaacacttagaagtagctgatactacatgtttatatctagagctaatgatctagaatttaagtcttatatgtgccctgtttaacacaataacagagtctgtattgacaaaattagagaaaaattacaattttacatagaatgggtacttatgccgctaaaaa

SEQ ID NO: 75365 - DNA, 989 bp, Cannabis sativa
aacacttttggggacttaaattcacaacaaaaagttttcctattaataaataacatggaaatatcctagttattgagaaaacactcaatcgaggtcctaggaaaagtcttaaaatggacccccaaattttgcctaaatcggacggtttgaaactccattgccttattttaaaacttgcataactcatttaattctaagccaaaccttaccgaattttgcataactcattgccttattgtaataaatattttttatggagaaacctcaatcaaattctcaacataaatcaaactaaatggccgtcataaaactgcctaaataggatggctcgaaacctctctgtccaagtttggaaatctcataactcatccattcctgatccaaacattaccaaattttgtaaagcacctaaaaacatcataatgaacatatttcatgaagaaaacttaacccaactcccaatagaattcaagttatcacaaccaagtcaattttgagttcttcaaacttaaacttgcataactttcgctacaagcacccaaaacacttcaaaccacttctaaacagtcctaaataaccttaagaagcttttcctaaactttataaacttcttcaacatgttttattacaaacatccattgaaaacaaacaaaaaccctagaaaactaataaattttgggttaggttttaccttagaagtttggaggagctaggggttgaactccttgataaaattcagaaagaaagatgcttgaaaatggtataaacttctggtttttggccttggttcagaagccacgaaggagaggaagaaggagaatgtgatttggtgttttttatttttactttcctttttgcttttaacttaggtttttgtttttggttcctttttactttattttgcttttccttatttgttttcttcctaagaaactaattatcctcaaaaggatgagccacaaacacctatcccttccaaaaagagtgac

SEQ ID NO: 75366 - DNA, 1726 bp, Cannabis sativa
aaataaagggaaattataaaaaaatactcaaatttttgaagattaaaaatattaaaaatttgaaatttaaaaaaaaaaagaattacaaaaatatgaaggagtaaagtagtatttacatattttattttttataataataaaaccttacaaatctatataaatgtcttttttttcgtaatgttgacccgaaaaatagttaattggcacggaatcacaaaagcgacgataaaataaaaaataaataacaacaaagacaaaaataacaatgacgatactaaattttatagaggtttagctcacattttaacggtaatactttattctccttttaattgtatttattcttagttttacactcaagatcacaaaaatagcttaaataaatttttttagagcaatgagaataacaaatttgcgtaactataagttacgtacctcattagtcaccaacaatgttgtgactatgagttaattactaatggtttggtttggtttagctatctatttatctaaattttaacaacaatgacgtgtcaagagtagcaacacgtgacacaaaaatactgggattaaattaatgaagaatatgtaaaatcataaccgttgggatggtcgtcaaccatgaagtgtgtcatgaccgttaggatagaagtcagacggtcgcccttacccctagcttgagtaaggtgggcatctttaagaaggcaaaacgatggactaacgccttcgtaagcggaatgaacaatcaccacacacctatgggagtcaaaccagtctagggggtatatattactacccctacctaaactgcaatgatctatatagggtttagtctaggggtacacccctcttaaccccaagggggttagtctaggggtacaccacttatggtatacccctacaccttcatggtacaagtcatgcattttaccatagacacaatgacattctcaaaggtatatggggacatccactttacactatatcactactgacaacggacaaggagtcttggggggtcaccccgagatgatgattgtcacccccctcaagttgggtctcagggggtcaccccacgatgacaattgtcgccctccttaagttggatctcgggacgtcaccccacgatgacgattgtcgccctcctcaagttgggtctcgagggtgttgcccccaagtatgggcttcatccccgaaagtggtcgacgaccatgtcacacccataagagaccctcgtcgtcagtaactctttcaaatgttcaaatcccatgaaaggctcaaagacaattgtcaatccacaaaaatagcaggatattatcataaaaatcagacttcaactacctccaaaaatcaaggagacggttgaagtagctccgtgttggtggcgtctcctgaagcgagaagcaccgactctttcccctatataaagggtcatccatgacctgagaaagggatccgcaattttgagcacttagaaaaataaacactttatcattgtttgcaatcaagagtctgttcttgacttttgcaactcagatcaataaaactcaaggggagtaggctattatcgatattcggggccaaacctctttaaactccggtgtcttttatttacatttattgcaaattttagtgttattaactgcatttattactgtgattttagtttaaatcttatttattacgacgctgcgtcggttaactaaaaatctagtcaacactatca

SEQ ID NO: 75367 - DNA, 502 bp, Cannabis sativa
tagaatcaatcatggattgatacacttatttggcacataaagtattgataataggattggtgtagaattatattttattagaggtcaatcttgctattttttattaattaagattaagagtgtaataattttaaattataaggagtttattacaattttttaataatttaagtgtaaaataattaatttctaaaagatttagtaacaaattacaaaaaattaattattaattattagtaatttaatatttaaatataattacttttaattaaaattttattttaaaaaaataaagtagcctgttagaagctattaattaattaatttatttattttatcatacaaaaaaggcgtgtggtgcttctctctctccccattggtaggaagaaaaaagaagtgctgaagccggcggtgactgtggctgttgttgatgaaatttgatttgatagtgaactcccttcgatccaagaagagattctgactgagaatcagtctgaggttt

SEQ ID NO: 75368 - DNA, 723 bp, Cannabis sativa
aaggagcaagctataggtcagcttctccatgcgtgggtatcaacttttagcgtcgattagccttttacttatctagtatattgggtactacacaccgtcttcttctcttatgaggataggactcacaacatgttctataattcctaggtacacgcctagctcttcattgtctaagggtttagaaaacacaagtggtttagccaattatttcttcagctgcaggaatgtgttttcacattcctctattcactcaaattttttgttgcctctgagaatgttgaagaagggtacatatttatctgtagacttggacacaaattttcttaatgaagcaatgcatcctgtgaggctgtgtactatcttcacagttgagggcgactttatgtccaaaagggcatggatcttgtctggatttgcttctattcctctggcgttgactttaaagccaaggaattttcccaagcttacactaaaagagcattatagggggttgagcttcatattgtagttgcaaaggattttgaagcactttcataggtcctccacgtgccacctagcatttttggacttgacaagcatgtagtccacatacacctccatgttatggccgatgagattcgtgaacatcatgttccccagcctttgatatgtggcccctacatttttaagcctaaatgacatgactatgtagcagtactagcctaggttcgtcatgaagctagt

SEQ ID NO: 75369 - DNA, 892 bp, Cannabis sativa
caagaccctgatcgatcatgggtttgtcatgtctgaatttgggggcatagacaaggtcgtgaggatcctacgggacttgtttaccgaaaggcgggcattccaggaggaggccctgcaaagggaggcccttgtggaggcgaagtaccaggaggaggcccagcagaaggagcctcaggcggaggcgaggcaccaggaggagctgaaggcggaaggcgaggctacagttagggccaagcgggagcttcgggaagccagggaggctatggacgaaatggctgccaagttaaagtccttggaggagttgcatcaggcggacttgcagtcgacggccatcctgattgtggaggtgaaagagctaagggattttaaggatcaggccttgaaaaaggccaaaagaaatgagctcctgaccccagttgtctgcaagcattgcgtcaagcgctttgacgatggcgtctatatggcctggcagtcgaatggccagagtatcaagtttgacttttatcccgaacctcaggaagctcttgctaagttccaggagaagaagaggaggcttgatgctttgctcgaagaacgctagggccctcgtcttcctcctcgtattgaataggccgagcagtccaaccaatttcaccattaaaactatatttttttcttcttttacatttacagtatcttttctttcctttcagacaatttgaattattatcttctaaggggagacagttattatggcccgtccccaggcccttaatatatttttttggacctgtttttgggtcaggatatttaaatatatattttcactttgatatatattaagcttgattttgtttttacttttggtttgttttacatttgtccatgtggtatgccttagtaccccctgagt

SEQ ID NO: 75370 - DNA, 641 bp, Cannabis sativa
aaaaaaaaaaaaaaaaaaactttcatttcaatatttttttttaatttttaaaacagtaacagttttttttcttaatcaatcttttagattacggccttcatttcaaaccatctgtagcacttcaactaactgcctaaacaaatgccgattgggcaagttccatagacgacaaacgttcaacatcaggttattgtgtctatcttggtggcaatctcataatgtggagctctcgaaaacagactgttgtggctcgttcaagtacagagtctgaatatcgtgcaatttcccttgccactactgttgtgaaaattgtgtacgcaagtatacgcaatcgtaacaagtaataaagtgataaatcgagtattgtctccacagggattgtaaattggaaattgatttataagactaattactcacaaattggtttcaacaaaaaaataaaataaaataaaatgatgagaatacgtaaaaaaaattaacaaacacaaactatgaagaaaacaaataagctagaactattaaattggcctaaaaatgcaatgtcgatataatggtgccaatgagtattgttgtaaactgatgatgtcaactaggaatttaaaatgtcataatcctttttccaaagtgtttatgatttgatt

SEQ ID NO: 75371 - DNA, 736 bp, Cannabis sativa
gcattaaatgagatattaaattttacatcaagatttataattatgtattgaagcataatagtaaaaattgatacaaaaatattatttgtacaaaatatgaaaatgtagattaacttttacatcttccattagaaatggtttaaaaatatgtatatatataaattcccttattagactaactatgtatcatgcatgtattttttgttagaacacttaaattgtggtagattaatattacattagagctatattagaaattatttgaaaaaaaaaaattaacaaaatttaactaaaaaaaaaatcgcgaccatttttaacaatatttttttttgaaaaaaaaataaaagaaaaaaaaataaaaaagacaagtttttttttttttttaaatggaaccacaagttgtttaaagttagggtaatgtccatatatgtactagtgatgcacatggactccattggttaagttagagatgttttgacgggccaactcaataattgcagtttgaagaagctataaactattaaaaaaaattatttacaacacaaccctacttagtagatggaattttactgtttgcacagaatgagtgaagagctcggggacagagaccttatattcataggtgagatacttcgttagtatctgcgccacattaattgtcagaatattttgacaattaattcaagaaatcaaatcagataatgaatattaaaatttgaccatatatagaatatta

SEQ ID NO: 75372 - DNA, 648 bp, Cannabis sativa
  modified_base (416)..(416): a, c, t, g, unknown or other
aatacatataaaaagaggtatgtttcaaataaatataaaattagaggtaaatttaattaattgatgaataaaagaggcatttttcaacttacccggcctacaacgttgtcacaataggttggggttaattgaaaaatacttttttatttatcaattaactaaatctaccttcaatttatgtttaattaaaacatacttctttttatgtgtactatacccaaaatactctaacataagggaatcacatggaaaatatcttgaagtaacagaagtaaaatcagtacaatctttaaaaagggagataaactttaaaaagagggtaaaaataaaagaggataaactgtcacactaatttttttaaaaaaaatactgtgtttttataaaacaacagtagaatacaaaacagaacaactaanaacaacagtggaacaactaaaaacaaccgtaaaacaacagtaaaaacttaacacagtacacagtattttttaaaaaaattctgcctcacagtataaaagtaaaaaagttagaaattttgtgtaattatcttataaaaaagggctaagttgaaaaataccctttttattaaataattaatcaaatttacctctagttttatatttatttgaaatatacctctttttatatgta

SEQ ID NO: 75373 - DNA, 983 bp, Cannabis sativa
  modified_base (508)..(508): a, c, t, g, unknown or other
taaatgcctttgcaaatgaactctatagtgtgaaaatgcttcctggaaagagcattaattcacactagttaatgatgaatctgaagttccagaaagcgaatatgcttaaaattgatttatctagagagcaatgggttcaattaattcttaagagtcctcctcctgagtacaatagatttgttgtatcttacatggacaagctagaagcagaattgcgtgcttatgaacggagcttacctgcaaggacgccaccctccagttttgcagacttaagtaagaggaaaagaattaagtatgaagcttctaacagtgctgcttcttcaagtaaaaatcgttaaacaattgatggtagtacacttcaatgttcaaattgtaatgagaagggacatgaggaataacgatgtcccatacttctaaaaattcgaatgaaggtaatgcttttgtttttgaatcatgtgttttagagaatgacaaatccttctttattgttgattctggatctactaancatgtttgttcttcattgcagctgcttgaaacttgggattatttaaatcaagcggagttgaagctcaaacttggaaatggcgaattagtatcagtccaagctaaaggaaaagctcgcctcacgtttcaaaagaaatttttagttttagacaatattttgtttattctgaattttagtagaaacttgattagtgtttcatgtttacaaatacaattttatcaattgaatttttcaagttctattgcataatttctcgtaatggatttcaattatgtgttgcttacatggaataagggctctatgttttaagaccggaaatacaaatcgcacttaacaacaaacttttcaatgttgttaaaccgagaaaccataaaagagaaaagatcgataacaataatgaaacatatctatggcatttatgattaggtcatataggctatgatagacttcacaggttaaccaaagacggtccatt

SEQ ID NO: 75374 - DNA, 704 bp, Cannabis sativa
attttgtcttctactaagccgtgaacggaccaaacgttggaggtgagtcattatgtcgcacttggggtccttgactgaaaaaaggtcttgaaaatggtcacaaatggtcttttcaatctcttctttagagctcagccagttcagattttgatcaaaaaagccatggatacgatttttcttcctacaaaaagacgccttttggtgaaaatatcttgtgtttcggtcaccatgagcaagccaaatcgccctactacgttgtttccaaaaaagttcctcttttgctaagtggccattcaggtctctctccctttctttcaattgggtaaagccttggctggaatgatcccgagacaaaatttctacttctttttttaattctttaatctgagcttggccttctcttctttgttgtttgttccattgccccaacacttctccacaaagatccaacctggttcccaaatctgttgctgaactaatcattctgccctcctcccaactctcctttatgattctgtggcaatcttctttatcagcccaagcgctttcatagtgaaatcgatacccccatgattgttgctgattattatctgttggaatggctttaaaagtcacctatagaggacaatgatcgaagcaccaacgacttaaatgtttaaccttggcaattacaaaatgatttcaccatctattatttgccatga

SEQ ID NO: 75375 - DNA, 671 bp, Cannabis sativa
ggccactattctcttcccttgagtcaacctcacaaaatcttccatatgcgatgtgtttgatggaaatgttataaatttttcttcaaacaggctcttgaattcttccaaggacataatgctgacatcttgggtctgtcccataatatcccacgagatgcaagcgtgctcttgaaacatcaaagcagcacaattagctcattcagttcccatcactccccatgttatccagaatgtgggtaacaatgctcatccacttctctaactcaataatatcaatacctctcagaaacgttagagattgcaacttgtcaaaacactcaaacacccagtcacgatgtgaccgaataaatccttgctacccaccactagaacatgagttggtggtaacacttattctgctggtacttcctggggcggttgcctaaatcaaccaactcatcttcttgacgaagtataatgcttcaaatttcaaggaacatgtagtgtcagtcggtatgtggattagcattattaaccccctacattattcccccagattctatggagacgcaagcagttccggtggatttgtttggtgattacaaggttctacgtgctcgccttgtggtttagatgattgtggagggtcaactctctttcaaatagccctaaaatcaacaacctcgacgagt

SEQ ID NO: 75376 - DNA, 993 bp, Cannabis sativa
ctgtttagtttaggtaccagaaccaggctggccaaccactctgggtaatacacgtcccgaataaaaatattggataataatttgtcaacctccttttctaaggtgtcaaccttcaccaggtctagtgggtgtcttttttgttataccagaggcatatctgggttgacgttcaggacatgagtgatcacatggggacttattccggtcatatccccatgacaccaggcaaaagctgcctttataatgtctatgatttgactccgctccaccagttctaggtttttccctagcgaataattttggatgcgtcgaggtcacacaccctcccttcctcaatatcctccatgggctctaacaccgctttagacccaatacgagggtccaactcgtcctgttcttctgccaaaactggtcatggccttgtatcatcaggaccgacaaatgtactgcaatgttgtaacactttcttacttctccttgatttcccctcactgtccctactctggcctcctgggtagggaatttaaggtacaagtgtcgaatggaggtaattgctccaaaattgaccaaggccggcctgccgagaatggcattataggcaatagggcagtctactgccacgaaggtgcagtacttgaaggtgctttaggggtgtcagggcataagataatcgggagccacaactttcccattgggatgagggtcatcccgtagaatcttgtgagctgcgaaccgctgggagaaaggtctttgtcggtgagcctaatgggcataaaagcgtccttgaatagtaagttcacggagcttcctttatccactagtatcctggacatgaccttattcgcaatgggagtttctatgactaaggggtcatggtgcgggaaacgcactggcttcgcatcttcctccgtgaaggtgatgggttgatccatgagcctgggcctttgggctggaagttgagtaacttctcatacctcctcgtcatgttttagg

SEQ ID NO: 75377 - DNA, 738 bp, Cannabis sativa
aggctcaattcctgaattattacactcaagttgaggtttgcaaatgtataacataatcatttttatatttatttagaaaaagagacagagtattaaggtattagtattacctttggctagtaaggaatctaagagattattgtaatgatcaactcctcgttgattgatttttccacttccatctatttatatatataattagtcacaagttttatagcgcacaaatatatataaatatatatataaatacatattattttgattttgctggataagtttaattaactactcaagtataaaataaacatataaatcgaatgaaggaacatgaaaaagacctaatgtaaaatttgagttcacaaacaaatgattttttctaaggatagatcatattcgtgcttaaatattgatcaagataattgtttgtatgaatagtacgtgggataaaataattattgaacaatgttgtgttggttattaaaaaaattacatagtacatcaaaaattaaaaaaaaaaattataaaaatacgttaacacaaaaaaaaaaattcatttttattttttgaatttttttatttacgagcattttcagtaaaaataataaactatttttttgttattttatattttatctattgttgtattataattgttatgagattttttttgtcgttcttggttgttttatagtttacttatggtcgatttgtagttgtcgtgaagttgatttcgcgtta

SEQ ID NO: 75378 - DNA, 1009 bp, Cannabis sativa
attgtgattctcaattaaaaaattgaaaagtgaaaacatcatatagaacatgtttttagaaaatatttttacttttctaataaaaaaacagaaaacttattaaaatagtgttaccaaacgcacccttagctaataaaaattataaaaatacatttactacttattatttatttaaaaatatataataattaaatgaagttataaatttttttagtattgcatattatcatattataacaataaggaatcaatatattagattattaaatatatagaacaatatttgatatatcgtattactaataatcgcacgcccatccaagtcccacaccgtcaagttttgggctcctaccgtccaagggccactattacgctctctcgcacaacgcctatatggtggtggccactcgaactaaaaccactgtgcgacgagaggtgatgttctctctctcactctctttctctcttcagatctctctctacctctctcgttctttcgagatctctctcataaatttgatgttttcctattttttttgcagggccttatgtcaacggcaggagctcgcgtggtgtttgcacaattttttcgttggttttttgatttattatatggtaaaaactgtatataatttctatctttaatgtttctgatgtgtggagggatttgaatagagctagacttgattttttttttattatttagtatgtgtcggtacaaaaccgaaggaaatatagtaaaaattttgatttttcctctatttatgtcggttccaaaatgacgtgattttttaataccgacatataaaaaaggacgcaaaataatatttatttgcgtcaatgacatatacgtcggttataaaccgatgacaaaagtttaaatgttagttagaaactgaaaaaaaaaaatatttgtagtagtgaaaaaaattattaattttttatgtggcaaaagacaaccgttaacgcagatttttgttaagcaaatttgagcctcacgataataatt

SEQ ID NO: 75379 - DNA, 533 bp, Cannabis sativa
tggtttcaaaaataataaaaaagtagtaattgtaaaaaatgctaactggagtctgaatggtctaagcttatagaactgggaccttaggaatctaggagtaagttacttttatacattctattttttaaaaaaatgagcaggttgagattaaattcaccaaaaccccaaggcctaggttattggaaccaagacttgagggaatctagaagtaaacaatttcaataaacaacttgaaacaaaagactaagtgtaaaattgaaactctaaggtctaagccattggaaccgggatctcatggcatgtggaagtaaattcacttaacaagaaattcatctaaacacatgcgatttgtatggctctaaagtgggcaattcaaactcatggaaaatcactttctttcagattgtagtgaagtagttcgagctttagctcagaaggcttgtcccccgtattgggatttttttgaatttatctttattggttttagacttagttaatcaagttttagattgtaagtttttatttgttaatcg

SEQ ID NO: 75380 - DNA, 721 bp, Cannabis sativa
tacgtgtaattacgtactcaatatataataagaaagtgttgttatatatatatatatatatatatatagataatcaactctttcactttcacgtgagaaatgctaaacctaattatcatatgctatgtcatcatattgttattaaatctcattttttttactttaataatgatcgaatttaaaaactattaacgattatatgatgacacctcattaatttggatgctaggcaataggtaggtatagtaggcaggttaaatttgtgtttaaatttatatttttaaaatttttgaaaatattatatatttttttctaaataattaagaatcgaaatttttttttttcttcttataatccactaataatgttcgctggtcgtagcagtaagcaacataatgcttatgtaacaatcctcttcacacatttaaattttgaactatttgaagagtttttgcacaactctaagaaaaccctagctggattagttatcaaatatcttaattataattaatgagctagctagctatagtgtaacttatatcaaagaaaaaatataaggccaaggcagatataatgggttgttccataatatctcacaacaacattttctatgaatagcagcagaagtggtgggcatccaatccaatccaacttttttttttctcatccgatccaatccaattagtaattggatttggaaaatcatcatccgatccaatcc

SEQ ID NO: 75381 - DNA, 1141 bp, Cannabis sativa
gacattaatatcattcaaatataatagtttattgttgtaaaatttatttgctattaagtacacacagtggtatatttgctatgcaagtacacacagtaaaataaaactaaacatttctttatacatataatttttttcccttgtgtttgttattttttgttttatttattttaatttgttgttggcgacataaaataacaataatttatttttattttgttgttagttatgtgaaaaaaaaataataaacattaagtaatttaatattaaaaactaatcaatccaatccgcacttttgcggattagatttgagttattatgtggattggattgaatccaaaatatgaaatttccacttagtacagatcaaatgtgctcaaaatagtgtggaatgaattgtatgattactgttattgagaatgataaaaaagagataaaaaaactctttaaaaaatgaaataaatgaaatatgcaaagaataaattgtataaaattatcaaatgaaggtgtcaaggcttgaactcatgtcacttaacaagagatagaataatgtgcattaactctttccaactacatatgtatgctactagctaactagtacatgtatgatttatatagatacagtgttattaaaataaataatttatttaatatttaaaaattttaaatacattgaactaagttgaagaaaaagtatattatgaatatgtattatttactatttcatgcatgattatataaataatgtaattaaagttaataattaattttataaaatttttaaatatattgaacattataattttgaaaagtaaattaattaatataatataataaaattttgaaattattaaattaattaaaattttaaattaaatataaataaagaaaaaaaatcacttttaaaggattgaactcttgatgttttgattgttttaagagtgcttatattgattattataagttgaacatgttatagttttctataagtataattattattttaaaataaatttaattaaaatatattgttatgtaaatttaaaattaaacaatatatataattaaaattaattttttagtagacatatattatggtttggagttttgttagttaaatctataattaataatatttaaa

SEQ ID NO: 75382 - DNA, 536 bp, Cannabis sativa
tactttaattaaatttcatgatctcaatgattgaaaaagaacatgtttgcaagacatttgagtgacattggagttcagacatgaatttgaaagtgagagcgaagataattaggaaacacataccagaaaacttgagatcacaggagaaaccctttaagcgagttgcatcaacgtcatctttatcagacttaaatctattcactcttgtctgaagaatctgacaattttcagcagtagactcaccaccttccaaaaaaataaaataaaatcaaaatgatgaacaaagatcaccacaaatcaaaaggctcagagtcaggcctgtttgttaagatcaagaaaacccatattttcaagcaatgcaatatggcttcatattcattcaaattagctcaatccaatttcttccaagataatagataatactaatatatacgtaatgaatggctaatgaaatttgaatgataattttttttttttcattttctcacttattgattcatgaatttactggcacatttcggacaaaagtattaaag

SEQ ID NO: 75383 - DNA, 812 bp, Cannabis sativa
aaaaaaaaaaaaaattaatgaaatatcttaattggtagagtagctcatatattggatgaattttttttaacacgttgctatttttagctcttacctatacttgtatcattatagttattttactctatttattattgagtgctctaattgtcatgtcactatgaagtaaaataaattttggtttatattttgagtgaatatatcaagttagtaattatgaaagggtgattttacattgcactaagtgtgtatatcggaacctaatataaatattagtttataaatatttaattgtaacccgctttaaaaaaaataaaaagtttattattattattattattttgtggtgttcaaataattatatttgaaaaaaaaaatattttttttatttttacatttcaaaataattttttgtgcatttttacagaattctacatagaaatttatattgcaacaagcggatcaacctaaatcgcaactaaaaatcgtatagcaacccacatagaaactactagagaaattacttaagaaactcaaacagtaaatttgaaaaaaagttaaaaaaaaaaaaaaattagtatatgaagaaattcaaaaaaaaaaaacatgtatagtctaaattaatgttaaaaacttaaacataacacaaatataaattgtataaacattaaagtattaaacaatattcttctaaaactaatacatatatttatatattgatgtaaaattctaaatatcaacttcaatattcaaatacaattaaaactaacaatttaaatactagaaagtataaatttttaatataaaataat

SEQ ID NO: 75384 - DNA, 721 bp, Cannabis sativa
ttgcattttggccggctaaaacatatttctttttatttcactttgtcttaattataccaaagaaaaaatattattgtcccctaattaaacttccaaccccacatatccgacattaaatgtaaactaacattattttatattatatttttgtaagtaattttttttttcttttaaacttttttataaaaaatataaataataatttaatcatgaattaataaatttaatgaatctgaaatgccttaaattttatcacataacccaacccaaataattattctattgggttccaccccaaataattaaaagcttaaccagtaataattcctactagtattgcgacttgaattgccattaaaattagaaggcaagttgggaggtgtgggtcattagtcaacacagtggtctattaaaacattcattgacattttagatgatgactgagacgtaaactttaatatcatattttttatgttattagcttttgtaattggaaagaactaaagaatcataacaaaataaaatgaaaaacactggccatatataagaactctcctcaaattagcctatatatatccttaaattcctttttccaacttaattaacctattgtggccgaacccaagaacaacaattggtacaacaacagggaaaacgacaacaacaacaactactacggccacaatagcaatgcgagcgacaggtcgtacgagaccaataa

SEQ ID NO: 75385 - DNA, 787 bp, Cannabis sativa
  modified_base (753)..(756): a, c, t, g, unknown or other
attttatttattaaaaaataaatgcacaattttatcaattattatttagaattatttattaagaaatttaaaatttattatatgtagtattttaaattattttgtttaaagaaattatcattataaaataaataaatagggtggtgtagaaaaaaattatggtatttcccataatatattattttcatatctcgatcattcaaaactattatattattgtatttcacttgttgtctcattgtatctcacttattttgattaccgtatctcactcgttgtcatcattgtatctcatctcgtgtcattaccgtcgttcacttgttgttatcactattgtatttctcaaatctatatcttaatcttaaatttcatctcgaatttcaaacattttttttttaaatatttaaggcattggagaaaattcattagtttgttctgttattattaatcaatatgttttaaaaaagtgattattattttttaaatatctgatttttttttaaaaaaaaaaaacgaaaaaaaaatataaaagaatatgatattttagttatgagaaacattaaaattaaggcaaccctccttggtatcataccactattagtgtaattaagtaccaggtctcatataacttaaaaaattaagatttaaggaataccactaaccaatcgtacattgctacctatgaaaggtgttgggcaattgaaatattatcatctctgcaatctgctgctttatcatttctgcatctcattnnnncaaaaacgccaattttcaaattgaaccattt

SEQ ID NO: 75386 - DNA, 1303 bp, Cannabis sativa
aatgactaaaataagatcattacaatcaaatttctatcctttaacaacattccaattccattacaagaaatcatgacttacaacgaaatagacataataatgtgcaaaaattacacaaaaccatactgctcagaagtagaaagttttggttatgtatcaatcaattgcaaagtttaagccaaaaaagaataccttaaaccaatctaggttgtgcttagagtgagataaaggtcgagtcttggcacagttcaataattaattttgatttgttgaaaaagtacttgaaatccaaaaataatttaaactaagagctgttattccaataaaaaaataaagaacattaaatttgagagtagaataaaaaaaaagaggatgtacaagaaaaaaaaaattatcaatactttttaatctaaaaatggaagatggtgcttgattgatgttgatgatgagaagagagtttcagatggagagacgagacaagaagagagtgagagtaagagtaactgagtgagtgagattgggggtcggggcgggccggcggggcaatggattatggaactttgtttgaactttgaagccctaaactatggcagaaagaaaatgagaagaaggtaagtgtggtgagagagtgagtcacgagagaaagaaagagtttggagagagagagtcaattcaatcactttaaattaaaggtatacttttaaatttaaatattaataaaataataatatattatatattatatattatcatttatcacttataagtatacataagtaaaaaaattaaaaaattatatatgtataaggtggttcggtcggtttcggttttattggtcggtttacgatcaaaaaaaacggaccgactataagcggttttttcggttttcggttccagcgatgttcggtaggtcggtttgaacgattttttcggttctctggattttatgctcagccctatttggtacattgtattaggttgtattgtattatattaaattcgattatatatcctattttctttatatgatcctatgttatattttaatttgggtaaattcttacataaataccttttcagattttatacagttaaataccttatctttatttttggaggcaaaaatacccaatgttacaattttcttacacccgttactaccacttctgttaactcataaatatggacacgtggatgatcaaaatgcattacattttttttttttttaaaacttaatattcttaatatcagaaactaaatggtacttgtttcaaaataaaaaaacagttctcataataatttt

SEQ ID NO: 75387 - DNA, 961 bp, Cannabis sativa
tttttttaaaaaaaaaaagtagtaaaaacgttaagattaccgtactacagtataattgaaataaaaatgaaaaagttaataaatggtgtaaatttcccttatgttttctacaatatttgtaattatttttatttaaccaaaaaagatatgtaaaaatacaataaaacatattatataatgtgttacataaaaaaatagatcatcaagatcgaaaaaggaaaaaacatgaagtagaatattaattgggaataaatttgttgttcttactttcaagaagaagaaaagtttatattgaaaaataccattttcataagaggagtttacaagaatagcttaaaatttcacctagaagattttgttgctcaaatgtcaaacttatgtaagggcaaaatgttaaatttacaaagcttcaataacacattctgttaagtctcttttagatattcaccaggaatactatagtaaattatataaaagagggtgtaaatcaaattaagaaatatataattgtggggttcaatcattagctgaaagttagttgtattaaggttgaggaaattagactctatatcatttttatattgtcctcttttatttttattctttttttttaaagtctatcattttacctttttttttaaacattatactaattttgttcctgtcacttcaagatagtaaatactctccatgtgactttttcttatgtctggatattttgggtacaatacatataaaaaaaagtatatttcaattaaataaaaattggatgtaaatttaattaattgattaataaaagatattttttttcaacttaccccaaatacttacttatatctactactatttgggaccgttcaatatatttatatgcaggcccaaatttgttagttccgttttcagcatattgcagttgtgggcctgtggcccatttattctattacttcaaaggtccaaagta

SEQ ID NO: 75388 - DNA, 584 bp, Cannabis sativa
catcagtttttggttgtctcctttcaggctatttatcctgattctcaaggggtgtctcattttccccgagttgttcttctcgagccttttcctgtctccaggttcgtgagccacaaggtctgcctcgtagtcttctcactccaggttcaggttgattttgagcattcgtctcctgcgtcgccctgctgaagctgcctctcgttctaactcagtgtttcgacgatacgtctcttccagacggcgtctcaggcgacggctttccgtttcataagttctttctcccacagattgggcacctccacagttgagctcttcatccctcgtcctaggattttgaccattcccacggtgagttcacctcgagcgcgttgtccacgtaccaggaccaatgtcaagttgagttctccgggcatgtgtggtccgagcactaggaccatcctcaggttgggccctcctggaacgggtggtccttctggactacggattagttgatcttctggagcccatgggctcttttccaggatgatggttagtttcctcatgtggggtgttaatattctctagattttcagccataaaggaga

SEQ ID NO: 75389 - DNA, 626 bp, Cannabis sativa
aaacatattttttctcttttttctaggagggcaactgccccacattacttctatgtgggtccatccatactattttgttaaatgacaatttagacacagtatatttcaaaatagtataaaataatatttgagctcaattattgtcaaaataaaatataataataacctaatatgactaagcaagaaaaaaaactaatctagaagtgttatgaacaagttgaatacattgttcacatctattggtgatgaatagcttcaggtttgtcatataagaaaaaaaaaaacaaaaactgcattgaaggtattattttgtattattttagaaataaaaggcaattattatttaacaaaatagagaatttagtcaataatttttacaaaacacaggatccaacataatattcgtaaaaaataaagataaataccattttagaccttgtgttttgcaaaatgatcgatcagattccctattttattgaatgataaattagaccctatattttttaaaatagttacctgagatcaatttttatcattttttttaatataaccaacatcaaactagtttctaacatgaatacatgcaaaaaaaaaatgtatcttggttggtcataactgataacatt

SEQ ID NO: 75390 - DNA, 859 bp, Cannabis sativa
aattaattacaagttatgtccattaaggtgaatattaattaatatataattttatataattaaagatgctatggctattatttatataaaattatatttttacaaagacattaggtattacgctctaccttaaagtaatttcattattgtaacaccctactagtttagacgtgttatcatgaatttatattaattgtgcagctcgttgctaatcaacgagtttattgaaaattttgagtaattaaaaccttacttaattactattaatactaaaaataactaactttatatatattcgggatcccgagtttaaaatatttacaactgattcaaaatacttaatacaaaaatcgtcgcttaacgactatacaaaatacaaccagtagtcccaagatcgtacgctccaggtctaaccgcctcgacatgtacaatcttcatccgctcgctctcacggttgctcagctttagccttgcccttacctacacatgcaaacaatatctttgagtcgataaactcagtaagaaaagcataatcaataacataactataacctagattataatcaggcaggcaccagttgaagtggtcattgacctctccgaggagcaaattattgtagatccctctgccccaaaaatgactaagtccaaggattctctaggaggcagctcggacaggccaaagcaggcgagcggcggattcgagctgattagggcccctgctccgcctcgggtattgcaccctgagaccaaaagaggcaaatacatgctcactcactacatgacgcggttggtccctgaggtgaacgagcagctggctggggcagacaatgacctttctttggagctggtgatggga

SEQ ID NO: 75391 - DNA, 665 bp, Cannabis sativa
ccctaccaacactattatgagacaggtacttagtgcatgttgtacaaatgtcatacttttgttaagaacattcttgatcattttttaagccttgtagataggtgtatggacgcctaaatacaagtcagtaatatgttgtgtgttatatgcttttcttattgagtttgtcaactcacagatattgtttacatgtttaggtaaaggaaagtctaagacttagtgagtctagagctcaaggatgattgaacatgtcgagatggttaaagctgaagagtttgatcaaaggatgacttggaccttattttgtagtcgttgtgcgacatgtttatagagtatattttgaatgtgtttgtaaattttaaagacgggatcccgaattgaatgtttggatatatatgtattacaaaagtttaaagtttaattaaaaagtttaaatttgacatgatttttgagaaaccctttggttagtaaatgtgtgcactgtaattagaaaatcactataaaatagggcattacaattttgaaattagagccactatgttatttatcaaataccattaaaatatgtacaatcatcgtcagaggcaagctcgactcacagtttaataagcctttacttgtttagtaagttatgtgattagaaaagcatgatagaaaacatgtta

SEQ ID NO: 75392 - DNA, 685 bp, Cannabis sativa
atagttaaagaattaaagctactagatatgtaaggcgtcgatagctatggtttgttggacttttaaaagttattttttttttaaattctaaaaatacttctactgttagtcgggtaacttgtgagtattaatatttctctttaaaatgtttttttactaaactaattatagtagatttttctggaagaatttcatggaaaactaaaaggagaagcgcagaagtgatattactatatatgtgagtgatggatcctattcctttggactatcagatcaattcacttggattgttcttattgtctcaagcttagttagataaatgatgagttaactaatttcaagaatcaataattattaagagttagttccacattgttaatgtgtggaaataaattgtgatatataagatgaatgaattattctttttattgtcaattgattttgagatgaaaccaaaataatagaaagaccattccattggaatgatatttcagtactttaatatgcaaccaaccaaatgaatagaatgaagattgttttattttctttccattctatatcattatctctaaccaaacgccaccagagatctcatttatattccttattctatacatacctctaaacctgatcaatttaaagtataggactagttatactcactctaacctgaaccaagtaaatc

SEQ ID NO: 75393 - DNA, 724 bp, Cannabis sativa
aataagtagtgttcaaaagtaaaatgcaaataggccatacaagaacgtgaaactaaatatgtctactaatatgaattaaaatcataaatgtaagatactaacaaaatgtgtctaatcatgtgcaggcacagatggagtcgagttgggagctgtagcatctagatcaccaacgagctggctggccagccatatgattagcaacctagccgaccgtcacctccataggctggccaaccattgcctcatgaaggtggcccaacgataactcctcgggatggacgatagtcaggccaacttggtatgtatgcatcctactctcttagagttctctcccttgagcaagtattctttcaaggaaataagatcccatgtaagagaggtcaacattggggttacataaataaagctcatacaagacctctgagaacaagccaacatactcgtccatatggcttgctggccaataagagcatgttgtagcacttggtccttcttcccaatctccacctccaacttagagtcctcaacaacaaggatggtgttttcttggtttttgataccatgcatgagctccagacagttgatcaaatactggttcttttgcacaatagcctaattgatatgggcatccctctttgcttgaagctcaacctctttggccttaagcttctctcggtgagcgccagaggaacctttggccctaccatgggtaaggctaaacttt

SEQ ID NO: 75394 - DNA, 899 bp, Cannabis sativa
tttttagaattgattgtctcccactctccttgtatggtttattttcacctactttttttttggcagtttatttttcgctggatagaactcctatgaatattaaagctttgcctacaatcatgctggtgttttgagaacaacattgcattggtggtatcatagtcctcgatcccttttaactgtttttacttttttagtgtattgtttagttttcctttcttctttgaattttcttgttttggactttgaataacattgcagctcttatgaaaaataagaatgctagtttacttctcattgtccaattgactttctttcccaatatagttgtaattctcatttggtaaatgcattgtatttttcagcttcttgagatagctaccatggtttctcatagtcaacactgaatttcctacatcgtgaaaaataagaatttcagctctgcgtacttgtcctttattaggttgactgtatccctttccccctatatcttttttctcatttggtaaatgtcgtttatttcagtacttatttgatttcttactggatacttatcttgtgaacttattaaagctggcctgcaatggtggggtggtctttcaagaacaatattgcattggtggtattgttttcattgtacccttttactttatttactactttactgcaacgtatcatttagtttgctttcttgaattttcttgatattaggatgaaaacttgtactctgttaccatcaagttacacaagaaattgggtcagtgtgcttgctccatcaaattgttttatgaattctcttatatggctggtgactttatcagtgctgtttgctaaaaaatttcgtctactagcttttcgtttgttaaacaaattttctggttgtttcaactttttgacat

SEQ ID NO: 75395 - DNA, 586 bp, Cannabis sativa
ggatcagctagcaaattccgcgtatggatggccaatggagaaaatgaaaatataggatctgatgagaagtatgatgtcagaaaccgaaataaaaagcaaacacaatttaaagtaaaggatcaaagacttacgtccagaaggatcgggtgcaaaatctactagcgaaccaaaaggataaccttcacgtcgatggtgcattcgagacattacagtgcataaatgagcaaacctagccttaaattcagaagaagatacaacgcaacagattcagttaagaacataaacgaattggtgaagaaaagaaataatatcgatcctttctttacctgctccataagattacgaacagctaaggctggacgaggtaagccatgagctgaagtagcactttgtacaccacccgatataggtgttctaaaaagcccggctctagttcctcctgctgctgcagcactacttccacattgagatgaaagagacgagtccacggttggttccaaatttaaatgagtgtcactgtttttgcgttgacttaaatcacccttcagaagacaatataggccattaaaactctgaaggagccatt

SEQ ID NO: 75396 - DNA, 681 bp, Cannabis sativa
tatataattttatagttttaaactatatatataggggctccaaaatttgatttcgcctaggctccatataccttaggaccggccctgttaatagtagattggtctgaatcctaagtaattatgaactattgttcatattattagtttctttgattcactcgttaaagtttctcaaagaagataattcctactacttatgttttggaactttaagaatatggatggttgggaacataatctacaattatggaatcctgactttcttaatggatcgaattacccctcttggacctggagggccctaattgaagaagctagcctaggcacctcccgaacaagtattcaaagggtccaacacagatgttgacagcctcagggtgtcacgggtgtccaccctctgtacacgtcgaatctccaagtgatggtgacactttttctgacaagataagatcatgtctcctacatcccataatagtatggcatgcacctccaccacctttttaccagacaggtattacggactaccacttgtataggtgaaagctttaagcgacacgtggcctttaattttaaaggttaaacttttgaaggacacgtgtccattgcatatatattatcccaaatcacctagctgcaaggtgcacaagcatgattttcgacatggatttaacaatcagatct

SEQ ID NO: 75397 - DNA, 563 bp, Cannabis sativa
  modified_base (517)..(522): a, c, t, g, unknown or other
gtaaaataatttccaacaaacacctcttccatctcctcaccgtaaacattcgaagcagtaaacaactgttgataataatcctccacaattttctgcaccataatcttatcatcttgccaaataccgccgctatcaacaaggcctttaatgtcattctttttccgtcttgtcgatgccttatgataaaagtacttggtattttgatctccccatttcaaccacatagcacggctccacctttggaattaaagcaataatggtactattaaggcagctcaaatcggcattatggttcaatatattcagacatacctcaacaacattagagcggagttgatcccaaaacttgcgatagaacaatcccggtaatccatcttcaccaggcgccttattcgggttcatgtcattcacggcatgcacaacatattcttccacaaactctaacagtagctgatcattaatagcctccgacactctcggtaaaataacttccaacactgttgggttttatgccctnnnnnnaactcatttcatataatcagattacttattaataaagatca

SEQ ID NO: 75398 - DNA, 1186 bp, Cannabis sativa
tcaaaatgaactaaatcgaaacaagattcagcaatatgattttgacaattgaatggtaatcatttttgtttagccaaatgacaaatagaacatggggaaaaatcaatattctcaaaatgtaattgactatttattatctttgttgtggacgatgaaggatgtccaagtctagagtgccaagaatggacactattacatgatttagtagaagaaaaaggcgaattacaatgactaggagagttgacagattgcagtaggaaaaataggttgccaatgcgattagctatcccaatcttcttattctgtgtaccctgaagtatacaagaattatgagggaataaaattgtgttggtaattgtaagaagaaaactgggaacactaaaaagattaagttgaaagtcagggacatataaaacattgtggatggttaagtcttttgaaaaaatgatgtcccctgatctaaccactccaaagcttccaatagttccgtttctgactgaaagtacaggcgttatggagtcggttttcaaagggcgacgtaaaaagagggcccaatcccattccggactttagtggtagaaccattgggaagagaaacagagttagtaatagttgttttgtgtaaattggataataaagaaagattacaacatatatgatgcgtagcaccactgttaataatccataaattagtagagaaggaattgattttaccaaaaacatatgaagcaaatggttttgatgtatcagtatgagtcgattgcagcttttgagtgaggatagatatgatagcttgaatatcttcctgtttggtcaaattggcaagaaccccatactgatctgcagaagtggaggcatggtgaacagagggagtttgctctgttttctttttatctccatagccaggtgaaaagccaattaagaaaaaaaacttttcctttaagtggccaggtttatggcaattggagcaataaggcctcattttctttgtaggtctaggattagttgaagccgctgatgttgagagattttgagcaagagcagcagcagggggggttattttcttgaacagaagcaattaggggaatttggggattctttagtttcccttgtgtctcttcatgaataaccatggagaagactttaaacaaggaaggaaactgatcaattaacaagatttgagcac

SEQ ID NO: 75399 - DNA, 504 bp, Cannabis sativa
  modified_base (154)..(160): a, c, t, g, unknown or other
atcacgatttttactcaagaaaatctggtctaaaaacccatccataggttataaagatttatagcaatttatagatttataatattattacaaaaaataacccctaaatcattgtggcacatttacaccgtcttaaatgatccagctcatcacnnnnnnnaataatccacgtcatcttgaaaaaagtacttttagtacggacaattcgaaaccattgtaacactcaagtcttccaaatacgcacatcgcgtccttctcagatgaaccttcaaaactgacaaagctgtccgggagtacacctccgaattaatgacaagctatctggggagacattccaaacacggtacaagcttatctggaagcaccttttggtttttacaagacctcccacacagggctatctggatccacactaagcttcatgtatctattctccggattcacagcttcctatcccgaatgacaaaaatcttcataaacatagttaaatattttaatactcaa

SEQ ID NO: 75400 - DNA, 822 bp, Cannabis sativa
tttttagccaaccaacgcggagtcgtaataaatgagccttaaacaaaaatcacaataataaatgcaattaatgacaccagaatttgcaataaatgtaaagcaaaggcattggaatttaaagaggttcgactggatgtcggtaatagcctactccccttgtgttttattgatctgagttgcaaaagtcaagaacaagctcttgattacaaagaatgggaagtgtttatttttctaagtgttcaaaattgcggatccccctcccaggtcatggatgaccccttataaaggggaggggatcggtgcttctcgcttcaggagacgcgaccaacgcggagctacctcaaccgtctccttaattatttacacgtggtgagtctgatcataataaataaggatccaccgtcgtcagttaaccaaatttgaggtcaacattttggtgctttcattgagagtgttgtttaccaattcgatcaatcaccatggctgtaacaaggaaaactctgtctacaaattctacttcatcaggtcttcctcaagaccccatgactgttgatcctaatgtttgtgttccagccaccattggagtttccccaaacccaacggatgtagccaatcttgccaaccctgccaacacggtaggcccaacaaacttgaccgacacgatcagtcttgttgaccctgctaacccagctgatcccaatgaaaaacctctactgcctagggtagatccaccattggcacctctaacagagggttttgtcaatgtggaacaacccccacataccacaactaactctgttccccaatactatacaggggaaa

SEQ ID NO: 75401 - DNA, 930 bp, Cannabis sativa
tgccaacctgcatgatctccacaaaagccctcgtggatttccttgatgatctcgttggcttctgcaggaaggacacaccgtaaaagaggcattgagtagccccttcgattcaatttcccttctaccatcgtgtagcgaggcactgaatacaaaagttttcatgcctcatttttgtcagacagaagttacccgttgagaagatagtcaactataggtgtcatctaggtgggcaagctatctatcatctcaatttcttccttttcacatatacttggctcgtttaacacttccaacggtaccaagttcagttcatccaactcattctgtgaggtcagttttgctaaggcatcaacattagagttttgttctcttgggatttgtttgattttgaaataatcaaacttttccaagttcttccgaaccttctctaggtactttgccattttcagcccttagcctggtattcccctaggacttgatttataattaattgcgaatcactttggcatataagatttttaaacttcaacatttcagctatcttcaatccagctatcaaggcttcatactcagcctcgttgtttgaagtgttgaattgaaatcttaaggcatagtgaaactttaagccttttggcgaaattagtatcacccctgcacccaagccatgctcgttggatgctccatccacgtgcagcttccaagtatccacgtctcgctgaacaagcagattttcttctagagttattccttctatcaggaaatctaccaaagcttggcccttaatggatgttcttgggtgataagttatgtcaaacttccccaattcaattgtccattttatcaaccttccagaagcatctggttttgataaaacttgtctcaagggttgatcagttaacaccctaatcagatgtgcctggaagtaaggcc

SEQ ID NO: 75402 - DNA, 838 bp, Cannabis sativa
gcaaacaaacccagttgcatgattaagcttgatctccaaaaagcatatgacactattgaatgggaatttattgaggaaatgttaacaggcttgaatttcccccagagcttcatcagattagttatgaactgcatttctacacctaagttctcccttatgttcaatggagccttacacggtttctttgagtctaagagagggcttaggcaaggggatcccatgtccccattgctttttgtccttggtatggagtacctgtctcgattattggggaagaatggagacaaagaggatttttatttccatgacagatgtactagtctcaaattgaaccatctggcctttgcggatgatgttcttctatttcgccatggtgatattagaagtgtgttgtgtatgttacaggctttgaagcttttctctaacacatcaggccttcatcctaatccaagtaaaactgcaatttattgcagcaacatggatcaaggaagtgtaaacaagatagtgcaactgtcaggatatatgaggcagaatctgccttttacttatttgggtattcccatttgtgcaaagagaatatcagggaaggaatgcgaaattctggcagagaaaatgacagctagaattaggagttggagttctaggaacctctccgttgcaggccgaatcacattgatcaactcagttcttatagccatacaagcctattggagtcaaatagtgattttgccaaagaaagttctgaaggcaattgaatctatttgtagagcttttctttggaaagggcaagcaatgtttcatggtgcaagagctgtagcttgggacagaatatgccaac

SEQ ID NO: 75403 - DNA, 910 bp, Cannabis sativa
tggaggcttgaagcggggacgttacagtcttgaactacataacctctttagtcttggagttaggggaatgtatcgcataactttttgagcaactattttttttctctctttttctttttccaacgactctcaccactaataggacaataatatttttttctcattctcctttcaaaataaggcacagtgatacttgcatacattaatggagtcataacctaaaccaaggttgtgcaacttcatctttgaatcgtaatgggacttgagtaattttgtactccaaaaataactcaatcaatgtagagagtaacatataaaaataatggttactgcacttgttaagaactttgtagtgcatcaacttcatcaaagaattgagcgctattttttgcaacccgagtacagttcactttccatattcttgaacaaatcgctgtacttaacactaccatttagcgggggctcattgaaggaatcaatagtagtacttgtatcatcaaaacccagatcttctcttaaaatatcatccatcacatctgtcatttcttcttcatcgttgtctactatttccatagtcggttgcatgaacgactctccttaaaaataccaggtcgtgtacgatcgttggatgccatccataaacagatgtaccctaatattatcgggagtctcaaagttcaaattcagacatctcatgcaaggaaatcgagtaactccattagaatttatttacattcgagcaactccaataaactcatccacacccctacgaaactctacacaccgtctatttaaagtcatccaacttttgttgctcaccatatttctacataatataaaaagagaaagttcaaaacaaagttgaaaatatgcaagtgtccaaatccacattctcactccattactaaaa

SEQ ID NO: 75404 - DNA, 877 bp, Cannabis sativa
gaatatttaatggatccgataatggtcaggtgctcaactgttctcagctttttcaagagcggattctggaggaggaaaaagaggcactagtaaaatgccccaccccagaggaaattaagagtactctgtttgacatgggaaaccataaagcccctgcccctgacgggatgtctgtgctcttcgtttaacattattggaatacggtcggggatgacttttgtaatgttgtgtctgattttttgctactggtaacatgcatatgggtatcaacactacgaatatagttcttatccctaaagtcccaaatcaaactagacctagtcacttccgacccatctccctttgcaatgtgctttataaagtcatatctaagatcattgcaaacatgattaaacctattctacctgcaatcatatgccctacacaagctgcatttgtgcctggtaggaatattcaggacaacaatgttattgtgcaagagataatccactcgttcaaaaggaagaagggcaaggaaggtatgtttgctataaagattgatcttgtcaaagcgtatgatcggctgagttggaaatttattgatcatgtcctctcttgtcatgggatccctcagcagttttgtcggtgaatctctcagtgcttgtccaccaccactctcaacatttgtctgaatggaggcaaggttgggtcgattaagccctcctgtgggcttcgtcaaggagatcctctcttcccctatctctttattggggcggccgaggttctctctaggctgcttgggaatgcgctggccaagggagagattcctggtataaggcttagcaggggcggcccggttctctctcacatcttttttgcggatgacttaatccttgtg

SEQ ID NO: 75405 - DNA, 1579 bp, Cannabis sativa
tatgttggagcatattctggatataacaagataaagatgcatgtccttgatcaagagcatacaatctttgtaataaatataggactttactgctataaagtcatgtcgtttgaattaaaaaatgctagagcgacgtaccgacaattggtgaatggcatgtttgagaaccagatcgggcgaaatatgaaagtctacgtcgatgatatgctggtaaactcaataaaaagtatagatcacataaaggatctccaggaatattttgatatacttagaaagtataatatgaagcttaatccaaagaaatgttcctttggagtttcctcaggaaaatttccgggcttcatagtaaatgtcagaggaattaatcccaacccagaaaaaataaagccattaatagagatgtcctcacccacaaagccaaaagaagttcaagctttgacagggaaaatgacagcactaaacagattcatctcgaagtcaatagataaatgcttcccatgttttaatgttttgcgaggcaataagagatttgaatggaaagaagaatgcgaggaagcttttaaaggcataaagaaacatttgtaaacactcccaatttttgccaaaccaataactggagaaactttatacctatatctagttgtctcagagcatgccattagagaaaccttagtgcaagaagagggtaagcaccggtaacctgtttactatgtcagtaaaaggttactgggggtagagtcgagataccccccctctagaaaaacttgcattatacctaatccatgcatctaaaaaattacgaccatatttccaggcgcatccgattaaagtcttaataaatcaaccactaagataagttttatcaaaacctgatgcttcaggaagattgataaagtggtcaattgagttgggacaatttgacgtggcctaccacctgagagtgtcaatcaaagggcaagatttggctaactttctaattgaagggataaactccaaagaagacccagatgttgagcatgaaacagaaacatgaaaattatatgtagatggggcttcaaatgagatggcttgggggcatgagttatattgatgtcgcctgaaaacttcacattccactacacattgaggttccagtttgatacctcaaacaacgaggcagaatatgaggccttgttggcaggtttgtgaatagctaaggcactaaaggtcaagaatcttacatgctttagtgactcacaactgattgtaaatcaagtcttgggagaataccaagcaaaatgattaaaaatggaaaaatatttagacaaggttcagaagaatttgaaaaagttttattattttaaaatcaaacaaattccaagagaacaaaactctaatgcagatgcattagcaaagctaacatcccagtttgatctcgacaagttgaatttgctaccagttgaagtcttgagtgacccaagcatatatgaagaggaagaaatcgagatgatagatacttcaccaacatggacaacacctattgtcaagtatctagtcaataaagaactttctatagacaaaaccgaggcacgtaaactct

SEQ ID NO: 75406 - DNA, 838 bp, Cannabis sativa
tatttaggatgttaataaagatacttgtgagtagatctaagatcctggtaaaataattccaatgaatccttttgctttgaaccgagttgttgacgaagatctggcttcttcaagttcagatgttctcgtaggtcactcttgtcgtaactgcggtcgaaccttgcccttcctttcaaggtttgattcacctttttctccctataagggtttgtgtgagtttctttcttatgagcctaaagagaggattggcgactttcgtccgatgttccacgtatctcaagctgtgtctccagatttttcctcagtttcctcaggttgcatctcctgagagttctgagtatatctctggattttcccctgcccctcggtttgcaagtcgcgaggtttgcctcatgagtctcttctcccagggtcaggttgattttgggtaccgtcctcctgcgctgcctttactgcagctatttcgcgttctaactcggcataacttcctccaatcgacgcataagatggcgattttctaatttcacgattggtatgtacctggttgggtcgtaggcgccatcctcatcaacctggttaggaagtgactgattattgtttatccaaggtccgtcaagccaggggccccaatactgggtcttcctagggcttgcagtcttttcatgcaatgacttgatagatccctgagggctcaatggttcttttccgggatgatgattgattctttcttaaggattattatctttggtgtcatccatcacttttatgtcaggatgctttttctgagctttttgacagaggctatcaatgaaagcaccaaactgttaacgcagatttt

SEQ ID NO: 75407 - DNA, 824 bp, Cannabis sativa
aaaaattatataatttaattttattattatatatattttttaaaaaaaatatgtgacaaatgtatttttataatttttattagctaatttactatatttggtcattttttagttctttaaatatgagacatttactaacttagttttcaaatttagggtcattttgcatctcagccctttatttatttaacatcacatttattgagtttcgatttgaagatatagaaccacatcagccaccactaccggtccttactagtagaaacttccaggaaataaaaataaaagtatttgagctacccatctcaagtgatttatgtatttacttatagcatttctaacagagtgtcaaaaagatagtgtatagttatattttagtacacttaaaaaaattattgtttctctgtgttagatttttatttgagcatacattaatttttattggttttaataaaatatgagttgattggatagttctttgttgcgttagctcatattgttagtgattaatagttaataagcttagcatctgtgtgtataaagtatagttgaagtagaaatgtaaacttttctagctaactgaagcctttgatgagcaagcccagtccaactagggttatgtagttaaatctcctctcttactctataaatacataattgaatatttttgataatcagataaataaaactacttttgatttagagacctagagaagaaaacttagttaatagtattgtactatcaaattgcgatagttgttatggatcaataaagtatgtatacctaattattatctaaatattattgtgttctagattatata

SEQ ID NO: 75408 - DNA, 988 bp, Cannabis sativa
aaaatattttagttgtaaaaaattattttaacttgaacaaataacaatataagaatactgaatagtacaaattaagttcttaaaataaaataattttaatatatatttgatatgaacctctcacaaaatttaaaaaatagaaaaaaaatataaaaacacttttattttcctttattgaggtaaaaaagaaaagcatctatttctatctctaatttgattatttaaataattaaacttacaaaataaaaataacaacaaaaatgctaaaataaaaaaaaataacaacaaagagctaaaataaaaaaaaaaaaaaatcaatttgtacaaatatttatgttctatattttaaaattgaaataataaaaatcataacaaaaaatatacatataaatatatatatatatataatgaagagtattaaaatagtcatatatgatattgacaatcactttttacaaataaaataaaaaataaaattttaacttttgaacaaataaaaattaaaatagaatatttttactttaacaaataacaatataagaatactcaataatgcaaataaaattcttaaaataaaattatttttataaatatatatgaaaataattatgaaaaaatcaattgttcaaaataaaatacttatgggataagacattaatcaatcacccttaaaatataaaaaaaaaaatagaagactaaggaaagaaatttaactaaagtattatttataaccaacatagataatacctaaaaactatctaagcgatgtgggactttagtttgcatttgtggattattttacaaacaaaataaggagaatgtgtcataaaattagaaaaataggaagaaaaaaagataatatgccacatagactacttatgtttttctttatatatatactaggtaactaagccgcgcttcgcacggtattgtctaatttttataatttttatgtatatatatctatttatattaaatgataaaattt

SEQ ID NO: 75409 - DNA, 597 bp, Cannabis sativa
taccaattgtgtttctctgtttttttttcttattagaaaaaaaataagatgcttcagtacccacgtattgtttttgttgcagctttgaagcaacattatgcggctttggaggaagatgagatgccagacatcaaagatgaaacagtacctgatgaggaaggcatgcctaggtaaatatgtttggctacaaccactcttcttgcaagaaaattgtgcataccaaaaggaagtccagctgctttagaggataataaatgtttgtcttctcgttgcatcctgttagtaatttgtaattaattttatatattgcacattacctcacagaccaggcgcggataacgctttgaaagagtttaagctttccatctatggggaccattatgatgaggaaactgaaaatgctggagacagagaaggaaattgatgcctccaaaaagagaaaagctgcttccgaaattgcagttcatgagtatgcaaagtatgattggagtaaacttgcagacaatggagcggttggagaattgttttgcttcagtaatctatgattctatcttgctaagagaacttaataatacaaggaaagagaacttagacgta

SEQ ID NO: 75410 - DNA, 943 bp, Cannabis sativa
  modified_base (63)..(76): a, c, t, g, unknown or other
aatacatataaaaagaggtatgtttcaattaaatatagaattagaggtaaatttgattaattnnnnnnnnnnnnnngtatttttcaacttaccccttagtgttcatcattcactaataatttagggatttttacaaaaaatactgtatttgggacaaatttacaattttactgtcacacgaaattttttataaaaatactctctatataaaacaaccgtaaaatactaaacaaaataattaaaaacaataatggaacaactaaaggtaacagtagaacaattaaaaaacaaccatgaaacaacaaatgaaacttaacacagtatacagcatagaaaatatacagtatttttgaaaaaaaaaaacagtattttcaaaaatgttaatctatctggcctcttctaggcgtttcatttcattcaaaaatgtctctcaaactcaaagtatgcagttctactaagcttctacttctaaaaatctcatttttttaatcagaatacaaaagaaattttttaacaaaaagattgtataatttgagatcaattttgagttggtctcaatcattgcactttttatttttatgtatctggggttgagggtggattttttgttatgatttactttgactatcaaaaactctatatacttttgtttttaaaactagatttgaaatattttgctcttcaaattttaaatacgtttaaaatttatgatctggtctatattattgatcttacattttactttttcaaaaatgattattttttatataattattttatgaacttttttccctttatcattaaatgatatgatctctcaaatgtctaaaatcaatatagatatagaaatattattaaaatatactcgtaggaatattcaaggtgttgtatttttatggggaaaaatctccattggatcttgggccaactcaatgagtccata

SEQ ID NO: 75411 - DNA, 612 bp, Cannabis sativa
ctttcttcaagagaaaagtttttgtcaacccaccattcaggagcacctgaaactaacagagcttatacagcatagaatatactctttgaacctgtcactgaagccaaaagcctagagcactttgtcaataaaactccactcaagacggtcataggcttttgacatatcacactttaaacctacaaaagctttcttccctttcctttttctcatgtcataaaccgcctcctgagaaataattgattttctcataatccagttaccttcgacaaaggtggactgcttaggagaaattaactttggcaacatttgccaataattttgtaatgattttataatagacattacataagctaattagtctaaaaccatcaaaatacttagtcgttattttttttttcagaacatgcacagagaaagtgggatttacctctttcacgaacctccttgtctaaaaaaacatgccaacaaagtcacaaacttgaggtccaacaatattccaaaaatctttgtaaaattttgttgggaagccattagagcaggggacttcaacgaggctaagctccaaaccacccttcagatctcctcattagtagggaaggctcccaataa

SEQ ID NO: 75412 - DNA, 792 bp, Cannabis sativa
  modified_base (42)..(44): a, c, t, g, unknown or other
tattaataagtaaatctgagtatattgaaatgagttttattnnnggcataaaacccaacagtttggacctagctgcgatcgaggtcaggttgatcgacgaggagtagcggaaggaggaaacagagcagagatgtcttcaggcaaggtctcagactgttgaggcttagaatttgatagcggaaagccatcttgtgatcttgttgatggtctggtcatagaagaagtatgagatgtgtattctgataccatgagagaaactgagagagatgaaaagaaaaatgctttatttctcaaaaacgaattaatttaaaatggtacagagtcaagtgcttttatagcagcaataatcaagataatagttggtcaagtaaaacttaccaattatttagttaataatagaaataccaactggtaacagaaatggcagataagtgaaaagcctataactaactcaactaattacattttaataatactcacaagtcaatacaaactataggggagtaggcgattaccatcatcaaggggtcgaatctttataattcttgtgttttctttacttaattttaattaatatttatttcttatttgttcttaatcactttaatataattcattgtcgttggttaaaaacaaagttataacaaatatacttaaattgtatttatatttcaaattaaatctttattattataaataatttataattatttcaaaaaatttaatatataatcactaataaaaattaatatataattattattaaaaatataaataacgttctaaattaaa

SEQ ID NO: 75413 - DNA, 747 bp, Cannabis sativa
tgagagttcgattttacaatgcaaaaatttttggtaaatttacatctttaaattcttgattggatttgtagctaaacataaaagctttagatcttgttatcaacttttcaaaatatcttgaatcgtcaaattttaagttgtatcgaatgagttatggttagaatactattagaaacttagagtgtatgacacatttttaaatgtgtcactgcacacctttctttgtgccacaactatcagcgaaagttttcccagagaagataaacatgccgctaaacacctatcctcaggtcatagcttgagcacaattttttagtttttaaatagaatttaaggggaactgtaaaagattttgatctaatttttggagaaagtttttattaagtttttaatgctagagagaaaattataatattattattcattagtttagtctcaattttttccctaatctctttaattattaattatgattaattatacttgctatgatatggagtaaatcttttagaacaagaatatttcaaaactcaaaatataatttttcaatttttaataatgaatattattatttaatatatatcatattaaattactttctactcttctaaatactatgactatagggaaatttacataaagactatgtttggtaaaaaaaaattacactttacggtcaaatattttttttattcatattttatgtcctttaaaaataacaagaaaaatatatgaaaataataaaaa

SEQ ID NO: 75414 - DNA, 1207 bp, Cannabis sativa
caaataattatattaatctcattcataaataaaaaatagagaaataacattaacaaatgaggtgtttacttttgaataataaattcaataaagagaaatgaatacaaagttatacaaattgtttaaataataatatatgaggaagatgtgttaaacaaattaaattaactgtcatacttttatataatattatattaaattttaatttataataaaatattatatatatttataaaaattaatactacatacaatctcacataaaaatataacataaaataaaatataatataaaattatatagtgtaatgcatcatactaaaggaacctaaaatattatgtaaaagacttaattgtcttattcagagttaattaatatggtggttgaatttatactttcaatgtattatgatctctagtttcataactaaaatattttctacaatattttagtctcaaaaatcaattgtaatctcacttccaatgataattaaacattgagtattgttataaggtatcaatggtgtttagcactttctcgacatgtcacattgtgattagttagcgatgctccctaaaaattattatattaaattatatgggagtcgatacttaattgaaccaatagcgatactgacatataaaaagatactaggtaccacggatgccctttagcatttctcttaaacattatatcatatgtcaatttattgtgctatttttaaaattaaattgcttggcttcccaactaatccaatatgccattattaggagtgagccgtttatccccaatcatcaaatatacatatcactatagaaatgcattaaatttaaatatatggaataaaaatgcatttatatctatttaatataaaatatagttatataacgaaatttttgatttaatagtatttttttaaatttttatgttaactttaacgaaatatactattgttataagatatcagtggtgttaagcacacttagagataatgtcttgtagttatttatgatattttataaaaattaatacattaaattatatagaacttgatacataaataaactaatagtgatatatataacacgttagagcctgaaaatccactgttaatgtcttctaatatttttttttttataataattttatagaatatcactaatcatagtattttatttatagatacaagtatataggtttaatagt

SEQ ID NO: 75415 - DNA, 855 bp, Cannabis sativa
ctgaacctcaaagataaacgtgatataatcacaattcctgtaccccgaggattcatagcaccgcgtacccagatcacgttatctagagaggatttgcagcaagttacattgtgtgacttcatcagcaaccagggaatgttgtttggaatgatgtatactcttctttaatccaattaaccttatatatatatttatatatatatatatatcaaattctagtcaaattattataagacactaatacttaacaatttttttgacatgcacatatgggagagcatcaacggtttgagaaaaattttcaagttttacgacccagagcttctcgtagtgagtggtagcaacgatgaggagaagagtcagtcaaatgcggcaagacgattggctgcttggttatcatcgattaataacaaccaccaaatgttctttattccttagaatatcgggtaaacactatttaattttttagtgctaattgttcatttctatattatgacttcaaattatttttatactatcttacttatatcccaatataattttctagtgcgcattggatgctagaggtcgttacgccaaaaaaaattgtccatttaaatcctatatgtgaccaccaagtttccgaacaaattactcaaatgttgggaaggtaataataatttaatgactatttgtgtaataaattttaattaactaatgaattgaaatgctaatataattttaacacatgagtatcttgccccgtggtaagaaatttcactagcaaatcatccaagacaacctaaaaattaagaatgtagtttttatgttttgaaatacatgactgatatcgtcgcacgtgcaaactccaactgt

SEQ ID NO: 75416 - DNA, 719 bp, Cannabis sativa
attcttgggaaacacttaaacaagcattctataatcaattctctccatcaagcccaaagatttggtctgcatcaagaaacaagaagacaaacctctaaaagattacctacaacgattcttagaggcgaccacgcggacgaagatactcagtgaagcggccaaggtcatggcaatgactgctggactaactgttatgagtccattatggaaataattgaaactcaaatcattgcacgccatttaagagttgctagatagagctgatggtttcatcaagctcaaagaagccattatgaaggtcagatgagtttctcaaccagaagcaaccaattacactgcttacctatttcatgagtctctaatagacattgatcaggaaagggaagaagaatcaacactgaatgcttccactgaaacacactcctcttttgtttcccaagatgaactcgggcagggaaatagtgatgacgagtcccctactatttctcaagaagatctcaagcaggatagcattgacaaagaatctccccttacatcctaagacaacttgggacaggggcagtgatgaagattctccctctatttccaacaatgatcaagaacatgacagcaacaataaagatgcgtcctatgagtcttctaaagatattgaccaagaaagcaacactgaagactcccaatgagagagggagggaccttatatcatcactgaagcatta

SEQ ID NO: 75417 - DNA, 1136 bp, Cannabis sativa
atatagaaacatttacagtgaaataaaatataaatttccaaatgcattactatatataaagtgatatgaataatctcatgcatacacacgtcgattatatatggttcctttcaaaatggattattaatgggagggtactaattaatttccaccactaaaacaagttaagattttcaaaaatatatgtgcatatatatacatataattattacagctgactaaacaatgaaaaaaaaatgaaatgaattaattaaataaacctaaagtcttgttatggggccattataatatatagtattgtatatatatacaatagggtaactatttattatacttgggtgtgtgtgctttattattattgtgatttttatttccttgagtacacaccggccaaaactaattaatattaataatggaagattgaagattaagacttggcaacaactcctaattgtatggtgtaattcatcaaatatatattgtacttgaattttccaatttaattattattaatataaattatatttctttttatattgtataaataatcatgtatgttcccctctttataattacgtattattaaatatatttagtgttgcgtgaagttgatgaaaagagctatcactttttttttatataaataaagagaatagcacattttctagaactaattaattttaatttgtattacacatgataaatttttttagtgggggcaaaaaaaattattaaaaaggtaataatgaaaaatataatttttgtagatataaaaattaaattatgtgaaaataattaagataaaaattaaaaaaagtaaaattatgtaatgtaaaataaaattatgtgggataatatgaaaaatataaaatttatatgaataaagataaatatatataacaatataattaataaaaatataaattttatagaagcaaaaataaaatattctaaaagtttatatataaaatttaatttatagaaaattaagcctaaaatgatcactataatctatcttccccttatttgatcttaaaatttttagattgaaaattaacaaattcgtactaatttaattctaataacgctgaaaaaaaaatcgtcgaaaacggacctcccagccggccccacgcgcc

SEQ ID NO: 75418 - DNA, 976 bp, Cannabis sativa
caatctccatctagatcctaataaactgttagctactaatgttctttgtagcaaattcacacatattaatttaagaaaaaagaagaaaatagagaagaaaagaatgttgaaaattccgttgaaaaagcgttcgcgattgattttactctctgaaatttgtactcctcgattgcaattggtttccttctaaatcgcttgaagaaatccactgaagttcacttcttatatagccaatgagagatagaaaagatagcacatgcagaaaacctattcagctttgaattagagaggacagatgagcacacgctgaagtttcctatttccctttgaattaggggggcgggccacggcatgcccttgcttttccacacgtcttcagaccttctttgacacgggtcgtggcatgctcttttccatgctgcaacatggtccccatctgcacacctatgtgatcttttatctttttttctcatctttttcctttgatattttctaatcttctttctattttaaatctacgaaaataaaatataaaaagcataacattgctccaaacacgagtaaaactaaattaaaaatacactaaaattaatctaaaaataacttaacaaatttccccaaactaaacatttactcgtcctcaagtaaaacactaaaaaaaataaaagttaaacaagtcaatctctagaatatgagtaatattcaagtagactcaataacatgattatgaaaactttcacttatgcataataatcaagaatttcagttcaattacacccttgacacactttaattttgatttcattcagctcatgaaaccatagaacgcaattaactaacagttgaaccactttatgcatgccaattacaaccataaatccactaaactaaaatttcatatgcttgcaatacttactattgtccaataatataaatcaatgcacaaccaagaatcagaaggtctttctaggcttgt

SEQ ID NO: 75419 - DNA, 951 bp, Cannabis sativa
  modified_base (624)..(627): a, c, t, g, unknown or other
ggatccaccgagatgctcacgtcaggctggccagctgtggtggccaaacttattgtgcttgctgtggtgacaggattcaccacatctacagttttcacggggatcctagttgtgactagaacccaagtgtttggatgtgcaatttgtgggtcttgggggagacctggagatgcagatggtgcgacaggagttcttcttgtgttcaccatggcatttgatcagatcacaatatccatcctctcaatgaaagcaccaaactgttgaccctaaaaagtgattaaccgatagcggagtcgacaaatctgatgtttgccacatgtgtgtacaaataagaataagccacaataaacaacgagatttgttatagaggtttggcccccttgtgatagcgggtaatgacctactctccttttagttatattgataccaaggaaaacactatgtagatcgctataggtaggatctgctatggtgccctttggattacaatgtatggatcaatgtctggcagactcaagtgttggatagcctagagtgttgtacaacctatgcttggccatgtgagagagtgaggaagagagagagagagagaaagtttgacacctagagaatatgagatttctnnnntagaggaggcttaggcaacttaaagaacttaggttttcagctagaggttaagacctttatataggaggcctaaaccctaggtttacaacttaaatcccttgaaaataggatagttagatagatatttacataaggccaaaatgcccctagattttagatacttctcagcctgtctattgggcttttggggcccaattcgtagcccattcctgctatgcacgtgtaggtggtcctgtgggacccactgagcaatccttggccttgtgatgtggccaagctggccggccatgatgctattccatggcttggccgaccaggggtggc

SEQ ID NO: 75420 - DNA, 871 bp, Cannabis sativa
aaattttataaagagacttaatttaaaaaaaaaaattactttatatgaaatatatatctttagtttatattaattttttttctttctcatattcttaaaataatatacaagtaacataaaaattaaaaatatactttaaatattaagaaaataaaataaaaagtgatgaaattttattaaaaaaaattaaaaaaaagtacttttttttttaaatatatatataaaaaattaaaataaatattaaaattaacacaaaataacataaaaaattaaaaaaattaaaaaataatttttaaaaattaattaattttttttaatattacggcgtagttataattttatgagatataaataaaactagaaatgttcttcctttctctcagttaactactattattgtcccatcatggaagccacgtatccatatctcattcttccacatcatcattttgtaaaaaaaatatgataaaacttactctagaaattaaaaatataaatagaagcacttaaaacaaagttgttatccgttttaaaaataaaattatactcgatttttgagaggtcaagaaagtcaaattttgaaaccttgaccaagactcaaagggaccaaatgggtttaggactcgactcattactgtatagtattctatttgagtgtcctatggtacactaagaaggccatgtgagcagaccatgcttgcaccctagggttccgaaacctagggtttcatgaatttgaagtagggttttcatgcaaaactctaatctgatgagaaattcaacaagaactcgactcattgggatacaagaagatcaagactcactactacagaaaccccctttagaggcggtttttaagccctttcagcgt

SEQ ID NO: 75421 - DNA, 946 bp, Cannabis sativa
  modified_base (801)..(808): a, c, t, g, unknown or other
taggagttaggtggatataatcttttatcccctcttgattgatgtaattcctcataaagtagtcgtcactagccttattgattatagtgtaatagctaaaaaagggcgttacgccatctgtcatgtcgtttatggatatttcaatacgtcttatccaagtccacgtattttggaaaaagataggggcaacaataaccaaatagatgtactttgaagttctgctctttaataaatttattattttattttaattattcaaatatattttttcatgtttagtaattatttttttgcactgatattattaaaacaaatttagtcaaaagttagaaattttctaccactaaaaggtagattggtttgtgaccctaataataataagtatagttataaaatatagtagtctcaatatattttgacatacttattatgttatgacattttatttttaactatgtatttgttatctttatacttaatgactacacaaaataaagaattaactgattacttttaacatattttattaatattttatatttaattttatttcgtgaaaaacattttaatatattttttaaaaattattattatatttttttatactccataaccctttattttaaacatctttttatatataaaagaatattatttatttaatatttattgtaatatttaaaaaataaaatacataacctaatataaaactttgcaaatctagtatctattatataggaattatttcacaaatacacaaaaacaattaaaaaaaattacaaaaatacgatttcacggaannnnnnnnatttttacgatttttttattatatttaaagaaaatacaatctttttatgtagtactcactacaacattaaggaccaatagcgccgggcccctcggccgccattggtctagattctggccgctaaagggcaatagcggc

SEQ ID NO: 75422 - DNA, 870 bp, Cannabis sativa
gagtagccctggtggtttgaattatccatcgttttcggttgttttcgattcacatcaaggtttggtcaagtataagagggttgtcaagaatgttggaagtgaagttgatgctgtttaccaagtgacagtgagttcacccccggggattgaaatcaatgtttctccaagcaagcttgtgtttagtggtgtgaatcaaacacaagcatacgaggttacattctctactagtgttggttacagtaaatcggccaagtttggctcgattgagtggactgatgggactcataaagttcgaagcccagttgcttttaagtggagcaacaatggggggctcatagcttctgaatgagttaaaagagttgggaaagagatccagctgcattgggggttatgcatccagcatttgctttagtgccaaagctaatttaatttaatttcttgtacaaatttgaagactcaggtgtgactacggaggattatcatatactcttgcgttattgatcagaaaaaaaggttgattctctactggttggattggtatagaagtggtatgcataagtgatttacaagaccagagtttggatctctttggtaaggcattgtttaacttcagtttcttattttagaaaagaaagaagcacattcaaccttggggctcgtaaaggttttttttttttacttttcaatatagtacaagtacttctgatttgtgcataagctgatctttatgtaaacgctactttggggttgatccaaagtttatttactcttttgaatttgccctgttgatataatttcaatgcagaaaaataataaataaaagggagatgttgctttagtgtagcgtgttggtcttggtctttgattatt

SEQ ID NO: 75423 - DNA, 842 bp, Cannabis sativa
  modified_base (807)..(817): a, c, t, g, unknown or other
atcctcctcagtcgagtcacttaattgaatgctcataatcaagtttttatccctctctacaaacatatcatcaaggatctctaagtcccacgacttctcacccacactcatcaaactagcaacctttttatccaccagaccttgatgatccaaaatgacaaatggattactacccataggaagccacggatcaagaaggatactaacagatgcgccactaccaattgaacgtcgagcaccattcctgaccagagcttgagcttcccaaatactacgccaaatgaagcttggattttggccaagtttagcttgcaaaaaagaaccatttgggtaataccgggccttgtaaattctctccaacaatgtatctttttttgtgagtaactgccatccttgtttgcccaagaaagaaagattataatcacaaagatcccgaaatcctaacccaccgacatgcttatgttgacaaaggcgcttccagctaaaccaactaacacccttgcttgaagaattagattgggctttccaccaaaatttttccatcataccttcaagactagcacaaatttccttagtcaacagaaacacactcatagcataacttgggagggcttgagcaaccaacttgattagaatttccttacccgctttggaaaaaaactttgtttcccaactaaaaatacgctttctcattttttcttttagaaaaccaagaattgcattctttttcctgcccattatacaaggtaagcccaaataaagactattctcattggccttaaccaaaccctgttgggttttatgccnnnnnnnnnnntccatttcaatgtaatccattttat

SEQ ID NO: 75424 - DNA, 1072 bp, Cannabis sativa
  modified_base (1040)..(1046): a, c, t, g, unknown or other
tgggccgcgacattataacactgtctggcctcaccttagttacccctcacggtccccactccagcctcctgggtggggaatttcaggcacagatgccgagtggatgtaactacgccaaaatctaccagggccagccgaccaaggatcgcattataggccgttggaaaatccactaccacaaatgtgcagtacttaaaagtactctagggtgtatcctggcacaatgtgacaggcaacctcacttttcccattgggataagcgtggttccattgaatctcgtgagctgggaatcgctcggtgatagatcacgatctgtgaggcctattccggtgaaggcttctttaaacaacaaattcacggaactcccattgtctatcaatattctagccacgatcttattcgcaatgggagtctccatgaccagggggtcatggtgagggaaatgcactagtcttgcgtcttcttccgtgattttaattggctgatccatgagtcggggcctttgagctgggagctgagtgacttaacataattcgtcatgtttaatgggtccggcatagcgctttaattattttcgagtggtcctcctaatatggggcccaccagagatcatggccactcttccgttgggtcttggtggccggccaggggtttgctgagggattggtcctcctgagggcgcagctggggccaacgctccgggtacacttcctaatgtcccttggggcaatgggccccctgccagaactgggttgagatggggcagccagttcttgattcactcatagaggtgacccagtcagatcaagttttcaatttcatctatcagatttttgcactcattggtactgtgtccaatgtcattgtggtattcgcatcttttgttgggatcccgtcgtgaactatctctgtacagaagagggacccccccagaaaaacactataaatagcccacaaatacactgaaataaggctcgagaattctgggttcataggaatcaaagggagaaaataggagagagattcaccaagaacattnnnnnnnataaatactctcataaataacaaaga

SEQ ID NO: 75425 - DNA, 1248 bp, Cannabis sativa
  modified_base (27)..(28): a, c, t, g, unknown or other
  modified_base (104)..(106): a, c, t, g, unknown or other
actaatcagattgtaaagagttttatnnagggcataaaacccaacaagatgatcatgagagagtacataaaataaacagtatacaattcttgcaaattttagannntttcaaaggtagaaggaatctctccactaacctcacaattggtaataccactgttaagtaagcaatataaagaaaaaattaggatttatctcagttgaatagataaattgaattatatacaatccatactacatacaatacttctaatttgtttaaaatccctttttctaggggccatgggtcggacaaattattcatgggaaagttcctgtattcgaaattgttttagaagaataaatataaataatatcacgtaaattaaaaaattagaaagataagtatagaataataataagattgaattggacaatagaaatttcataaacaaaaagaacacctataacttaaacttacaaagatgatagctctgtcagtttgaactctagttgcaattactatatatataataaatatatatagatattaatttcataaaatataaatattacgagtgagagggggaatgtaatgccattactataatatattcaaatggtttgatccggtgcgcgacacccctgcgatgagcgactttctcacactaatgtaagcatggttaggagcctcaactcctttggtcctccgtaggagtgtaaatgaatcaaaacagatttgatcggtagcgtactttgtttccaaattaacattcgcgagaacggtgttggtcctacaaaaattaataaataatttatataaaaattaaaatagaaatatttgtaagagttttttttttcttttcactatctcaccattttttgaacattttccttcaggtagttcatgataactcattcttttcttctttcttgattctaattgttccggatttgggtcacaacagatttgagaagattttttttttcataagagagagaatgtgagagaaaaaaggagtagcaatataggtaggaggtgtgatatttatacagagggagaaaatatattaattaatataaatattatttaaaaagaaataataaaataattatgggggaggtttatttgttaatcaataaatgaatcccgtatctataaatatatataagaaaaaagaagaagataattctaaaaagtgataattatgtatgattcgttcacccttttatctttatctttaactaataagtctaacaatttgtttc

SEQ ID NO: 75426 - DNA, 982 bp, Cannabis sativa
attacattaaactatatgagatttgatacttaattataaccaatagcgaagaaaaagtaataaaggttaaagttaccatcaattaaatttaagtggacatatcgccaccaagtctaaccccattgccaaaacaaatgcaccttataggggtgagcataaaatctagaaaattgaaaaaaccgttcaaaccgacctactgaacaccgttggaatcgaaatcgacgaaaccgaaagccgaaaaaaccgctaacggtttaaaccgccattgaacggtcgattttttttttttgaaaataaaccgatcgaaaaaaccaaaactgactgttatacatatataaatattaatttattaattttttcttcatgtatttgtaaaataagaataaatttgattatttttttaaaaaaaaaaatcagtttgggcggtttaaaccaaccaaaccgaggttcaaaacggtcgattttaagatatgttttggattcgttggtcggttttcggattgcactaatccaaaccaaaaaccaaattttagatttttatatagaaaaaaacctaccgatgctcagctctagcagcttatgtggtctccaaaaaaaaatggttaaatatgtaaaagtataatgcgcacgttagcattgagaaggttgatcttcttccctttagataaaattaaatcagattaggttgggtttggttgggtttctttcaatctaaggacggaaatggcgaagccctcctccgagttgattaaggcgttactctctcccacagcggtgatctccaaggacctttctcccgaagtcgttgaccgagttctgatttttctctccaacgtcggcgccgcaaaacccattcccgatcactgcaacaccaaaggtttcttttccgacgtcatcaccgccgtacttaaacccctcactgtttcccctggacacatcacctgcctcctcaccgtcaaacccgccgtcgctgtaattattc

SEQ ID NO: 75427 - DNA, 623 bp, Cannabis sativa
tgataagataattttattatatatgtcactaatttatttacagcataattaattggattttgcatgtggtttgtataaaaagattaaaaaattagggtcttggagcatatattatggtcaaaatatatttgaatatataatatgattagatccaagaagcctgtctgagctaagttccatatcaaatattttggttatatattcgtgaaagtatatattggtaaaataagttggaccaaatgcttaatttaaatccttttaaaaaaataatatagggtctaaacaaaggtcaataaattaatgtataaaactattttttattgataacttcttaattaaagatactccaaattaaaagcttcatcagtttgacaaacattaattaattaagttgaaaagacaaatttttattagttattaattttgttatttctatgttttacttcatattttattaaattatagtttgaatcctctgttatgagaaaatctgattttggtcaacatgatttcaaaataatatcattttttttggccattattagattttttttggaggaacattagattattagattactaagatatcattttgattatttttgtcaaatccgagatctaaa

SEQ ID NO: 75428 - DNA, 754 bp, Cannabis sativa
ttctaattttttaaaactcaattttttaaaatttttgccaaacgacccctaatagtttttaaaaactgttttcagttttaaaaaacagaaaacagtttttaaacagtaaagccaaatagcctcctagtcatctgctcccccggaatgaatgtattgccagacaacttgaattagcatagttaggctaagtgtacggagtaaacaaacaaagttaggtaaaaaattaaacttatttatttatctacaaccaataatgaaacttaagtgtttacgccgcaaattagtctctaatattttaatgaaactgatgtaatatatttttatgttaaaaacatcttatttgaatttaattttatttttgcttacggtaaaaattatagtatttattataacacagactaaatatattttttgacacaaatagtcgcagtggtgggccaccacatagaatgggaagtttttggcccaagtgtgtttctaacatccatatatcaaatacaagttagaaaagtcacccaaagctccataattattactatatatattttataaaaaaaaaaaaatgaaaaaaagtttctaaccgtataaaaaatgtttgagaaaatagtaataagtttttttgcacatattttatacttaattaatataaagtatacaaaattgtaaattgccctagaaataataacatatttttttataaaaggtaactcattgatatcttcttgccatcatgataaggaaccaatttttataa

SEQ ID NO: 75429 - DNA, 1340 bp, Cannabis sativa
gtggaacaactgctcgacgaattacaggctcctaaatcacattgataacaacatggataagtgacacctaaatcacaaccgcgacttaggtatcaaacgcaaaacctatccacagtaacttaatataacaatacactaaactagcagggaattaaccaaccaaaaacttgaaactaacacgaatcgaaaacctaaatttttcgggaaccctgctgcaaaatccggtttcccaattttacagggacctgtaaaaccggttggccagttttccctagaaaaaccaaacaattttaaaccttaaccaaattgtttccaaaccttaccaaaccttccagacttgcataatatacctcaatagacataaaccaagcaatacaactagtacccaagcttagaatctaattttaccattaaagctccatgtttgagtttgaaaactcaaaacttgattaaacttactaacaaccattaaaccaagcttaaatcaacatttctaaacataatttaacttctaatatcaataacaaacactaacaacaactacaacaactataaactcaaaaacatgcataacccatttctaaaaattcaagaaacttaagaaagtgaagacaagagtttacctagagcataagaacactcaaatcctactgaaactagcttgaatggaggaaaaatacagcaaaccctacttgcttctaggtggattcgaaagagagagagagttgagagagaaaatgctttctttttttcaaaatcatagagagaggaatgttcttcatttcttctctttcaaaatcattctttagacattggctcaaattcaatttatcacccttcacaattggagcaactctcggtgaacaatcatttatccaaaatctttgtaaatctatgttgaagtaggcttcttgagatagcttaagatacctcaatatctatctctatgaattttaatgcctatgacataggatgcttcacccatgtctttaatcttaatgttttttgaaacaaatggtttacttcacgtagcaaccctatatcattgaatgcaagaagaatatcgtccacatataaaacaagaaaacaaatcttattcccactttcgtttaggtatatgcattgatccatgacattctcttcaaatccaaaggaagggatgacatcataaaattgtaagtaccattgacggcatgcttgttttaatccatagatggacttcttgagcttgcataccaaatcctgatgttcactagaggagaatccttctggttgtttcatgtatacctattcctctagatcactattgagaaaaacaatttttacatccatctgctcca

SEQ ID NO: 75430 - DNA, 504 bp, Cannabis sativa
ttgctgttttgttaatcatgtgtgatctggatcaccgcgtcaaaaaaaaaaaaaaattacacgtggacaattcagataattagtgttttttttttttttttcatttaaaataaatcttatttgttaaaaaaaacctaaatcctcaaaaccacctattcttcttcctcatcgcaccacccaagaaactcatccctgccaaaccttttaagcaattagcctgttatttatgactaaaattaccatattttgtaagaaatttaattatatttatacctatatctaaaattgcaggtcagtgagaaagttttctctttttctaattgacatataaaatcttgtagtggggaagaaaaaattataaggtcagtgagatggttttgcagttcgtatgtttcttgcatcaccctctctcagaaccttgctttggatcttggatgagtttaacatcattattggcaaagaaacggaaataattgttggcgataggttttttttttttttttt

SEQ ID NO: 75431 - DNA, 1106 bp, Cannabis sativa
acgtaacatctatctagtatacattaatgtatataagttttctaatggagcttaaatttattatttttctctacaattccagcttcaataatagcaaaacgggtcacagtggttcgacacgaatacgacacaattttttacgggtcgggttagggttgagataattagacacgagtcaaaaaaataggttgacccgcttgacacgaaatataaaagcgggtcacataaaatatgacacgaatacgacatgatgacacgttttaccacccctagtaatatatttaattattacatcaaaattaatattatgtttaaaatattattttttagtaaaaatacatataataactaattaaattgcatatacaatttattaaaaaaaaaaaagttacatatacaattttttctcaattttttttttttttcaaaaaagcaattatctcgcctctcttgtacataaatctgcccttggtgtatatacattctatagtctaccacacaagaattaaataaacctcactttataaatggtcaaactcttaattggtatttctaaaaataaaagggaatttttatttttttgagcgcaatttctaaaaatataagaaaataatttaggttgaccaattatcttatttaatcaatatgagattaattaatagtatataattattagttggctaatgagttctatctaaagtgtttgtattaatcagtaataaaaagaataataaaagcactcataataatctctttataataaggattctttaaaatttttagctaaatgtaataaaaaaatgcttctatcgtataatagagatgcacttaaaataatgcaatttgctctacatgtagagaatgaatagtgcattttctaaatttattttaatcatatataaataatattttatttatgtatattgtatatatgtttaaaaattattattttaatagtctaaaaaataaaaataatattaatttaatgatgtaaaaaaaatataaggaaattgatgtatagtgtaatgtaaaagtgtgttgtaaaataaaaaagtataattttaagggataattgcggcaaaagtccccaaaaacttgaggttgat

SEQ ID NO: 75432 - DNA, 577 bp, Cannabis sativa
aaaggtttgatcaaggcgttataaagattcgacccctcttccgtcaaaaatatttggtcagggagttataacagtttgacccctatttcgtcaaaaaggttttgtcaaggcccttattaaaaaggtttcaaaaaataatttttttttaaatgatgggtttgcattgtactatgtatttctagattaatttcggttaatcacacatatatgcccctcaagtaattttaaagggattatgctttataattacttgtttgaaaaaaatgattattttgttcacaactaaagttcaaaatatttcatatgatgtgatttataatcattaatatcaaaagaacttccccagtaccatcgcttattttatcaatcttccaggaacatctggttttgagaaaacgggttatgatgttcagggtcaatccctaacatactcccacaattgtttcaatattcaggttcaatccctgacatatcccgatgttccaggtaaagtaatcctggtcttacttttgtcttcgactgttactggttgacgtccagcttttcacgtgacagcttgacatgacagccatagtga

SEQ ID NO: 75433 - DNA, 580 bp, Cannabis sativa
ttagagggtaaaggttcaaaccccactaactacactttatattttctttttaaatttatttacgcccccctcactttaaattctgggtccgccactattgggatggatgtacatatattatcaattaaaagagaaaaaatatatatatatatatatatttgtgtaacacacctatatgtataatatatattatgagtgaaagtatggaatacgattcttataataattgacctcttgtattgaattattcaatgatttcacttggttgatccaccaagttctctaaatatccctatctgatgaagagtgagtaatcattggatcataattattaataaagtattttttaatatattctttattttcaccgtgcatgcaaagagtgctttatcactatagaaggggttgattgtagtggcttttaattagctgtttgattgaaattaagcactttagatagtgtcctatgtatcctatgtatgtacacacacacatataatgttagggaaatttgaattaatatacttactaatacctataatttttttcctgaatccaaagttattaaaattggttatgt

SEQ ID NO: 75434 - DNA, 1035 bp, Cannabis sativa
  modified_base (675)..(687): a, c, t, g, unknown or other
  modified_base (776)..(777): a, c, t, g, unknown or other
  modified_base (934)..(936): a, c, t, g, unknown or other
tattttttagaaaaccgtaaaaatgtaaaaaaaaaaaaaaacattctttgaacataaaaatgtaaatattttacagaaaatggtgccttatgtaattattcctaactcaaactgatgaatatgatttttttaaaagaaaatttgggccctttctatctttgggccctgtgcaatggaacagcctgcacaccattagggttggttgtgccattaaggtaactgataggggtggataaatatttggtagatatgcagttcaaagatcattaagttaaatttttaattgtatccaaaattacctccccagaaattcggattgcatattgataaaagtgaaaggtctatgattagttactagcttaagtccttctagggaaataccctagtgataggaaaacttcagaataatctgtcaacaagttaatcatagcaatttagatcaaattaataataggtttgttattaaaagaaaaaagtttttgaataaacaatttaagtataacaaacaatatctatgtaacaaatgtgaaatcagatatttattacttatataattaaactattatttaactaaccaactaaattttaaaaatttaggattgttgaaagaaccttaaatatcttttcaaaatctaaaatcaaatattgtaaaatatctaggtttatttgaattannnnnnnnnnnnnaattaaatatctaataagataaattatttaaaaataactaattagatattttcaaaattatttcttaatcttataatttaataaaattnnaataacaaaataaactaattttaaaacaaatatggttaggcaattattattttattcaaatttcaacaaaaaatatctaagttatttaaatatttaaaatattatttataaatgtcttataagtaaaatgacataaaatatcatttttctaacttannntttataaacaattaaatattccacaaaataacctacttttttaaatttgaaaattttatggttggaatgtttataaaaaaaatatctatgttaatttta

SEQ ID NO: 75435 - DNA, 939 bp, Cannabis sativa
aagtatatgtgaaaaggaagacgtggagatgatagacagctcagctacatggatgacccctatcatcaactatctactcggtgggaaacttctgactgacaaaaacgagtcacaaaaactttagtattcggtgccttgatacaaaataattgaaaacaaaatatacaaaagaggttattcgatgcctctacttcggtgtgtcctccctacagaggaaaatgagatcatcagagaaattcatgaaggcttttgtgaggatcatgcaggttggcagagcttatcaaaaaagatcatcagacaaggatattactggccaacgatcaataaggacacccacgagtttgtcaaaaagtgtgataagtgttagaggttttcacatataccttgcgtaccatcgacagaactaaggatgatgacctcaccttacctatttgctatatgggggataggggcattacccactgggcgaggaggagccaagtacgcagtagtagtagttgacttcttcactaaatggactgaggtcgagcctcttatttccataacctgtaagaaagtcctcaactttattgtcaaaaacattatctgtaggtttggaattcccatgaagatagtattcgataatagaacctaatttgatggcgacttgttcactgagctctgcgagaggaacgaaataattaagagcttctcgtcagtatccaggcctcaggcgaacggacaattggatgttgttaataaaaccttgaaggatactattaagaagaagttagatgctgccaaaggtaggtgggttgacgagctaccacaagtaatttgtgctcacagaactaccgagaagacggcaacagggcacaatcccttctcgctagcatttggctcgaaagcaatgctacctgttgaagtgaacatatcgactcacaaacgagagttttataa

SEQ ID NO: 75436 - DNA, 1119 bp, Cannabis sativa
  modified_base (274)..(290): a, c, t, g, unknown or other
caaagatgtaatagataatatgtaatttatgacctttatgatatgaaaagagtttatgtcatttttaaagtctgtcatcagttaaagaaagaagaaagtaataacattaacaattgagtaattaaaacaactggattcatatctttaatctctcatccatatttgaacaacttttatcactttctttgattttctgtcaatttttattgttttcattccaagattatttttcaaccaaatagaaacataagtcttatttagtggtattcagttnnnnnnnnnnnnnnnnngacctcacctgtgtgagtactgcttgatacgtgcactttcgtattattacaatttttgtaatatgtttttggcgtcattattggagaattatttaaattgatattacattaattagattgaattctactttggtttctttttctacttcttgctaacctatttttcttaaattcttcttatcttattttaggtatggtttatgcactgtcaaggaccaagttcaagagtgtctgttgatcatgagatagagaagattcacatgcagaacagaagaaacaagaggttagaaagagttgttcaaagggttgaccaagaataagttatggctaataacgacaataatgggggtgccatagaagattattctaatggtcgtaatccactgaaccgttgcttgagggactatgtgttaccaacattgacaggggtccagtcttgtataagaccaccttccattgaagcgaataattttgagatcaaactggccatacttcaaatggttcaatccatagtccagtttgaaggactttcttcagaagacccaaacatacatttagctaactttgtggagctttgtcaaacattcaagataaatggagttagtgatgatgctattctcttaaggttgttctcattctcactaaggctatcaggctgagatgggagatcaaaatttttttccaacacgacaatgagtctctatatgatgcttgggagatatttaaagatctgatcaaaaagtgtcctcatcacgggaatgagaagtggattctggtccacaacttctacaacaggttgactggtaatacccgcacactcatagatgtt

SEQ ID NO: 75437 - DNA, 843 bp, Cannabis sativa
aataaattatgtaagttgttttatataattgtaacacattagttttttttaagaaaaattgtgacgcattagtttcttaaataagtttaaaggtaataaaaatgttacaaaaagtaatgtaaaagttcttaaacaacaaaacaacataatataatatgaaaatgaatatatatatatatatatataattttattgtaatgcattattttcttaaatacttttgaaaataacgtagatgttgttaaaaaaagtaatgtaaaaatttttttaataacaaaacaatataattatataatctaaaaataaacataatttcaaaagtgactaaacaaaaaatgtaaccaaaatgtatatgaaatcatttttatcttaaagtgaatctttttatgataagtatcaaattaatctcataagtaactaaaatgttgcttttttatgcaaaaagtaaaaaaaaaaaagatattttcataaaagataactcattggtatcttatcagtatgcataagcaactaattgttatattaatttgtttaaaattttgctagttaactatgcggtatattctttataagctatcttttagtaatttattgaagttatactctaataaatagatttatttaaaattacattttatagacctaaaacaataaaatattttctaataacttttggaattggtcggtataataaactttgtttaagttattttagttactctttgatattaagctagaaactactgttttgttaactaaatataaaagaaactaaaatgatatttttaatgacaaaaaatatatgcttcccacagattaaaataatcgtgttaaaaaataagt

SEQ ID NO: 75438 - DNA, 1023 bp, Cannabis sativa
gaactgagcttgaggtggagcctcaagaagggtggagactgaaacatttgtagatcacaaaagtgatgattcggaagcaataatttaaagagctataaattggcaagagacagaatacagagagaagtaaaggctccatatagatacgaacatgctgatttaattgtattcacattccatgtcgctaatcagattgtgcaagaagagcctactagctatgcacaggcaatgaaaagaaaagatcgcaagaaatggaatggagctatatcggaagagatgcactccttgaagaagaactagacttgggatgtaataccgtgcgaaagatggtaaagtcatcagatgcaaatgtgtgtataaatggaaagaaggcatttgaggtgtacaagaggcacggtataaaacaagattggttgtgaagggattctctcagactgaaagagtcgattataatgacgttttttcttcgattgtaaagcacaaatcgattagaattttgttggcacttattgcgtgtcaagacctcgaactagaacaattagatgtcaagactgccttcatgtatggacatctgaatgaaagaattctaatgaaacaacttaaaggatttgaagaggttggaaaagaacactgggtgtgcttgttacggaagtccctgtatggcttgatgattatgtgaccaagataggtctaaagagaagtaagtttgatccttgtatatatttttgagagagaaatgtagttactttatatctgttgctctacgtagatgatattttgatcgccagcaagagtgtacaagagatcaagcacttgaagcttcagctaaaaacgaagtttgaaatgaaggatttgggttcggctagtaagatcttaggcatggatataagaagggaaagatagaaaaaactactgtacttgaatcagacgagttacatcaaaaagtttctagatacctttaaaatgagtaactctaaggcagtaagtactctgcttatacaacacttcaaactaagtgctact

SEQ ID NO: 75439 - DNA, 852 bp, Cannabis sativa
tattattagtagtattattatattctttttatactttaagtttgttgtggagaccaatttttttacttttcaataaaacatcacaaaacaaaatataataaatatattaataataaaattacatgtataattatttttgaatttatattaaaaaactatctctataattttttttcttatagaatcacatctctaaattatttattttctaatttctatttttatttgattattgtctatttcatgatactttaaatatccataatattatatgatatgtatatttttaactaattaagttgactcatatatatttattttaatatgtgatataattatatttatagatacaattaagaggtgagaagatattttatctttttaggaatgttatttttctttttttgtgattttttaaaattagattattttacttatgcctttattttaattattaattatcagtattaataattattcattcaaaaatgagtggacataataagaagatataataatttatataagatatttaattaatattatttttttttaatttttttatcatttaataataatactccatcataagattaatattttctctattttatttattcattacattatttttttaacttattctattattatttgtggtacgtatttttaattcattttattgttatttatgcctacgttttttttgttgatattaatagtaattttttttcatttaataataagattatgaattattattcggttttttttttctccattctcttatttatttaatattttttgttatttttatcatcattattaattgcaccaatatttttagttctc

SEQ ID NO: 75440 - DNA, 976 bp, Cannabis sativa
gttgatattttttagcactaaattacacagcattaataatattggattttaaatattggtgcataattattttatttgtttctttttattaagaaaaatgaataattccattaaaagttaaaaaaattaaagagatcaataattattatgatagtctagttttaggtacattttatgaagtattttagaagtgtgtttcaattaattattttattttgtgtaaaattatgcttattttctacttgtttcaggtctaaatagtaagattcacaatatgaattgaaaatgagatgaatatgataaatttatcatagaatttggagttctaagatttaataaggtgaaacattttaagttttgaatgttcaacacgcttcgtttgtgatctgatcgaaaattaagtctgaagctaagctgcaagctaatttttaactatgattcgttcactttgagaaaaaatattatgaataaaagtttagatctttctttcagcttttcaaaatatcttgaatcgtctaatttcgagcaatattgaaagagttatgaccaaaatattattagtcatcgcatcaagaagcttgctgcccaaaaataaccttcaagggtcacgccatggagggtcaatgttgcggcccgctatggtctaaaggccaaaattaagacttttaaactctaatttcaatatttaaatgggacatttgacactttttaataacaaaacttcgagagatgaaaaatagatgcagaggcgaatctagagactttcaatattcattttttttacgagttttttcttctagtttattttacaatgttcttaattagttgttataattttttacaatgactatgagtagctagaatttttattagggttgttaatggtgattctttgacaatttattgtagcttttaatatgatttagttctttcacatatcatatgtgcacctatttcattcatatttaatttcttt

SEQ ID NO: 75441 - DNA, 967 bp, Cannabis sativa
  modified_base (42)..(55): a, c, t, g, unknown or other
aaaatgcattcagaatttaaataacagcataaataattattnnnnnnnnnnnnnntaattttccataattaaatcataattaactgctaaattctaaattaaactaagcggtctttacatatatggagcctaaggtaaattaaatcttaaaatccctatatagtttaattattatcaaattaatagttatagtactttggtgtaatgataaagttttttaaaactctgttccaagattcaatctttcataacaatcattaaatatttttctaaaaataaaaaagtaaagatggagaactaatcactcgacctcttagtgtaagactctttatcactataccaaacaatatttgttatattgttttattatttaatattttatctatgtactaatatttttttcacaattttagggccctgagagttcaggggcctgaagtccacgcctgactcgcctaccctcaaggctcgtcatgacccttgacttaaataaagaaggtcgccaataaaatctttcataccactacacacaacatgtggtctttatatttttattgttgattaattaagattatcacaaaatatgaatataatatttttcaatcaacataaatatttagcttgagattcactagtgataatatatttaaagcatttctaatagtgacacttattataagttgcaatgttctcatatcatcttaaaatattatattttattttaatttttttacacattatttttagtactcttacttctaaaatactctaatagtaaatactcttgaattttgctccaatgatcctacaaaatattttttaatatattatttattttaatttatttttttttaaaaaaaagtatggctcaatgttaatttttaatttggcactcaaacatctctaatggttaacttctatcaagtattatgtcatattagcgggaagtattttctccaaacactac

SEQ ID NO: 75442 - DNA, 576 bp, Cannabis sativa
aaagatagtataaactgtacaatatttttgtaatttctgatgtgtgacaatataaaaataataaaatgctaaaatacagtatacatataaaaactccaaataaaattgctccttgtgaactaaaaggaaactttctatatattatttaatatatttaagatattatttccaaaaaaaaaataaataattgaaagagaaaattatatgtaatttctgctactgcttaatatcaatcaaatcgttgagctcaaacaatctcaacttttaattaaggtgagaatcggtgatagaaggcctttgcaagcgccctaagtaattaattaagatactactgctatactctgtaaaatatccccttactttattaggttctcttataagtggtcttgtttcactttttactttttgccgtttttttatttagtcataacaaggacttaaaattttgatggaacttatttatcataaaaaaaaatatatttattcgtagattatagtcatttttattagatttatttgattttatagggagtttaatttctcttattacaaattcatattacaaattctttacta

SEQ ID NO: 75443 - DNA, 811 bp, Cannabis sativa
taaacatagttagaggaaaagtgaaggagtgttatctgttgctgcctagttatttctatatggtccaaaaaacgaacccaggatctatagtgcacattgaaactgaagaaaacaacaacttcttgttttgcttcatggcactaaatgcttcactgaaagcatgggaaaaatgcaaacctacaatagtagtaaacgaaacatttcttaaagctacatatgggggaacactactaacagctagtgcacaaaatgcagcaagtaaaatattcccattagctttttgtgtggcagatttagaaactgatctatcatgggaatggttctttgaaaaattaagagcaacatttggtgttagacaagaacagtgtgttatatttgatagacatgaaagtataataaaggaagctcaacaagtcttccctgaaatacaacatggatagtgtatgtatcacctactcaacaacctgaaaacaacattcaagaaaaatgcaaggttctttgaaaagccattttctcgtgcagtaaaggcatacactactaaaaaatttgaatatcacatgagagagttcgatgccttagataaacgggttcgaccttatctacaaaaaatttgatatgagaaattgtcaaggttgtattctaaacacaaaagatacagtacaatgacatccaatgttcctgaatcattaaatgtagcaaatttggcagctagacaactaccaataacaacactaatggaagctttgaggactttaatccaagaatggacatgcaaaaacaggaaaatggcacaaggaacattcacaaaatt

SEQ ID NO: 75444 - DNA, 1239 bp, Cannabis sativa
  modified_base (1128)..(1139): a, c, t, g, unknown or other
agtggcgaggccagtacaagtggcccaactggaataggcgcttggagccttgagcacatcagggcaggggcaataatcccccttcgtgattattttaatgacttttccaaccacctcgggcttgccccgttccaactaaatcctatctcctatagaatcctcgcaagcttgagggttttgtacagaatccgaaattgggagttccccactcttatggaaatatagtatctctactctattaaagttgttccagcgagtaagaatgtcgtaggagacttttactatctcggcactcactctggcaagcacaaaatcgtgggattgcattacatcccatgtaaaataaatgcggtcaatatttgaaaatcacacagttgtgattgatctgcttttaccaggtaaatgtaaatgtgtattaaatacgttgtaacacatattgttctgggacgtctcgctggtaacatagcaccaataaccctggtagcgagctagaacttttcccatgtctttttgaggttgataatgtaaacctcatcgtttctgcgcttgaagacataacgctccatttgacaattgcagttcttggtgacaaggtgaacttcagcaatcaacatcatttgaatgacagcttctatttgagagagctgactcgaaggagatgtgaatctcattgaaagatgtctggagctaattagtgaaggtaccatgatcgcgccttcctatagcgagatggatgcctcgctattagtgtttggatttacttgacggttatacttagtttgtataatatgtattatacgctaagtgtcttaatagtcatcatgtctcgtctacatctcttcatgcatatcgaggtttatgccttgccttgcacatctggtgtcgtatggtttctcgttaatgcatgagacaacagtttgtatatctttatctcgcgtaagaccttacagtaagcgagttgtaaatatactctgtcaagtttgcatttaatgagttattccattttcaaatataattattattacatttgttgatttgtattcttcccagtttgacacgtgtcctcctctgaagtgctaactgaatttcgggtataacaacacaacatacattcatcaaataacacannnnnnnnnnnnaacacatccaaatcaacacaattaaacatattcatagttttaaatccatattacatgaaagtaaatcattacgatggctctcgagtttctaggtgagaga

SEQ ID NO: 75445 - DNA, 910 bp, Cannabis sativa
  modified_base (775)..(776): a, c, t, g, unknown or other
tgtaggtttagaatgacttccacccggtgggggagtcacgccaaagaatattatttttcccacttgggccatttcttgggtcggtcccagatgggcttcggacttccggtgcttgttcccctagaccattcagcccatttgtcctccagctggtttctcccctcggacaactttcttggggatgatgaagccagcattgtagtccaagacattgctagagctgaattagggagtcagggtaggactagttttattgctttcttattaggcgcacgcctttttcatgatcattctaacacttcgtttgtttccttgttgcagcagccaggcctatggaaaatcttctggctactcttgctgaggcatatatccctgacgcttctctgcctctagctccatcccagttggtgacccccgggaggtcctcgtccagtgccccttcaggcacgatcattttgatagatgaggagggggaagtagaggaggatgaggtcgaggttgcagccgcccttgagcgcaagcgaaaggacaagatggttgagaatgatccttctaagcgaacccggaggggggacactccggcggtgagcaatgactctgggattcctcccgaagcggaggagtacactgtgccgcacggcattgtgctgaccccggttcctacaaatgaggagaggcaaatgcactgagttgctaagcacaactacgccctggacgagttcagttggggacacgctgaggtggaggccctaaagaagattctgcgggaggagcnncagaacactttgcacgaggacgccttgcggaatccatgggacctgatatggaccctttgaaggattggttcaaccgctttgtcgggcctaccctagcttccttcgcctcagagatgaccagccagtttgtctcc

SEQ ID NO: 75446 - DNA, 670 bp, Cannabis sativa
tttatcgcttataactgattgaggaaatctctcaatattttgagggaatatctcaaccactgtaaatatatgtctactttttaaattcaaatttaaatgaatatttattcttttgaattaattagttaatccaaaaataaattttgtgcggacaaacactatccataggtgcctatcactgtgtcctaacacagtgatagtggcaccacctttgtcctaaccagacagtggtggtgtttttgtccagacaatttttgtctttctctaatttatttaattaataaatttaaaaataaataattactattttgacaaattaaaatagatttttttcaaacatcaatatacaatttttatccatactcttgacagtgtttcaaggtagcgatccgagaaccatgacctataatactaagctccaataaactagattatttattagatctcatcaaccgaatagccatgtttattaattttatgattaccacactataaatatggaattgaactcttagtaattttaaaattatatttactcagttttattgcagtgtctattgatataatcaattttagtgattaatattgtgtcagtttataattagttttggtcaaattactattttacccttttaattatttctttatccttagcattgttaattcacta

SEQ ID NO: 75447 - DNA, 833 bp, Cannabis sativa
  modified_base (770)..(773): a, c, t, g, unknown or other
agacatcgaagagatattcgatcagtcatgtcggttcaagagtaaaagtaggacgtcacccatccgattagtttcatgaccaaataagtccatgtgcaaccaagaagttcctgcatggacttaaggggcaaatgttatccaaatttgtacacagaatgacgtggtatccatctgggtgacatgtggaacaaattctacgacctagatagaagattccactcgtaatgaaccgtacagggagatttgatactcaaagtcaaaagaaactgaaacattcgagtggggcatgcaagaacacccaaccaacttccaacatgtgggcagcttgcatgagccgaccaaagaatgcgagttggacataatcaaagatatatcccatatatcttcgtacttgcaagacacagaaatatccctaatttcatgggatagatacgtagtatcaaagaagaaatgcaacttgcctagttttctattttgcttattgtaattatagaaagtaaagagtttcctcattttatttcttattagttttgggaaacctactgatgtaattcattcctataaatagtggagtcatctcactattcaaagacacgagattcatacagaaatcacacgagagaaatcataagaaagagttatagattcaagagtgcaaaactcagagatcattgtacgaactaaaggggagtaggctattaccatcttcaagggggctgaacctctataattttagtgtttctttgggtgcgtttggaagtaactgtgtnnnnactaggtagggtaattactagggtggtaattacacagtgtagtaattacactatatttta

SEQ ID NO: 75448 - DNA, 877 bp, Cannabis sativa
gaaaaatgatgattgatgagaaaaattgaggtttgggatgatttggattgaagaatttgtaaatggatgaagaaaattgaagaatgggtgaggatttttattattttcggctgggagaagggtttggacggaatgaagaattgtgtttagggttaggttgaatgaaatgaaaattggggatttataggcttttttgtaagctagttgtgactaccacatgggctggtcgcgattagcttcgaaaaaaaatttggctgattctctgtaaagctcgtggtcgtgaccataaaaaagggtcgcgaccatgggtatggctggtcacgaccactgtagccaaaaattttcccaagtttctgtaaacccccaggtcgcgaccaaggtcgcgcccacaaaaaagggtcgcaatcgctgggttcagaggcccaaaaaattatttttttctacttttcacgtttttcacgatccaaccaaaaaaatataacgtctaatactttacaaagaaaatttaaaatgcttaaaaaaaacaaaacataaactaaaataaaaacaaaagtctcaaaaataaaggaaaaacacttgggttgcctcccaagagtgtcttcatatagccggacgctgagttgttctttaaagaggcgccaatataatggcagacttgggttggtcaaattgacctcacaagtagagcttctatcgttttccattaaccttaaatatttttggactttcacctttcaattctacagctccataaggaaacgccttgaccaccgtgaatgatccagaccatcttgacttcaacttaccaggaaacaatttcaaccttgaattaaaaagtaaaacttgctgcccgagttgaaactccttcctaactaag

SEQ ID NO: 75449 - DNA, 623 bp, Cannabis sativa
tacatatttggtaccttaaagtaaaatttaatcaatacaattttataaatttaaccaaacggttcttagttatatgtaattaaataattaaatttgaatttagaagtaataaaattttagataatttgattatattgataaaattttatcaaaaattttgaatttaagataccaaatatatatgattttaaaatacaaggtaccaaataagcattattaaaaaatagagtatctaacttgtatttaaataaaatacaaaataccaaaatgtatagacaacccctaaataattataactttcgactgtgtttggctcaagaaaaaatcaaaagatgtgtggatttcatacaagtgaatatttttgttatcgccattcttgcttattcctaggagcagtagcaatattatcgttagatcatcttcaatcatgctctctaaacacattttttagctaaaatagagaatataacttaaaaaaatgaggtcgaacaatataaaaattagttttatataatagaaaatagataggtagttctctaaatgtaaggagcttcatatttttatgctaaatatttttaattgtatctttatacattaaaagtgtctatctaacggcatttctt

SEQ ID NO: 75450 - DNA, 681 bp, Cannabis sativa
aaaaattttaagttttggattctcaacatgctcagtttgtggttgaaaatcaagtctaaaagttcaagtgaatttttgactatgatggtttcactttgaaaaaaaatagtgtgaatagaagttttagatcactcttttagcttttcaaatcatcttcaatcgagcaatattaaaagagttatgaccaaaaaaatatcaatcattgtactaggaagctcgctgctaaaaatcgagcttcaagcaccgcgacactacatattctaaactgcaaaaaattaggtatttttttttatcttttgtagctatataaaggccatttttttaacactataagagagcaaacttagggagacaaaaattagaggcagaagatgactctgtagactttcaacattatttttttgatgagttctttcttttactttatttttttatgtttttaaaattattagatattttcaatgattatgagtagctaaactttttattagggtgttaatagagattttttgacactttattttagttttaatatgatttagttcttctctaattttcttttctatctgcatttatttcattcatactttgttgatttcgcttttagccaacgacaatgagtctttttacaagcgataaacgatatgtcgtaatgaatatataataaagcaataataagac

SEQ ID NO: 75451 - DNA, 968 bp, Cannabis sativa
tttgatttgagagctggagttgatctaagagtaattagggttaaaaaatagtaacgtaccctgagactcatctaatgtattctgtacatcacgaaatatatttcgtaaaaagtacatcacgggataaaatcgtgtccctatatatatttatataggaattatttctatttgggattaatactactaaaaataaatatttatatcatcacaagaaaaaataaacatttatactttttacttatttcaaaaatactatcttttaaattttttattttcaaaattacggtaagaaagtgagccatacatgtggatatgcgagcaagtgagactcacacgcgagtggaaaggcatcaaagttgactaacacgcgtaggattacaacatcaaaactcgtcagtggccccacatggcaagtttggacgtagtgggctttgtcctgttaggccttttttctcaacgcagtaataacacaaaaacaactaaataacaacaaaaataataactgaataacaacctaactttcaaaatacaaattaattcgacatcaacatattaagtgaacagaaaagaaaaaaaaaacttacaaatcagacaacaacaacctaaaaagaaattaaaaaaaacataaaaaataataataatgtttaaatggtttagaataattaagctaaaaccataattttgttggaataaataaacaaattttgttagaataaaattatgaaaccatgatttaaaatcattagagaataactccagattaatataaattaaatatacattaaaatattttgccaacactaaaatgaaattttaaaattaataaaagaaattgcccaattagaaataaattagacttcaactaaaaaatatacttatgaaattaagcatttttttttattatttgtgattatgaatattaaaaaataaataactagacaacgacccaactttaatataaaaattaa

SEQ ID NO: 75452 - DNA, 962 bp, Cannabis sativa
tcgtctatgtgccccccagccttcctggatttaacgagcatgtcatccatgtacacttccatatttcgtcggatctggtcattaaacattttgtttgccaatctttggtatgtcgctccagcgtttttaagaccaaacggcaatactttgtagcaatatagacacatatctgttcggaaacttgtatgttcttggtctggtggatgcattttggtttgattgtagcctgaataggcgtccacgaagcttaatatttcatgccctagtgttgcatctatgagctggtcgatccttggaaatggaaaacagtcttcgaagcatgctttgttgaggtctgtgaaatcagtacagactcgccatttcttgttcggcttgggcaccaatatgggatttgcgacccaagctgggtagaaagcttcaattgtaaaattgttgttgcgcaccttttctacttcttccttcaaggctaatgctcattctttgtccagtagccttcgcttttgttggactggccgaaagttgggaccaatattcaaaacgtgtgaaatgatagaaggatcaattccaaccatatatgcatgtgaccaggcaaaaacgtctaggtttgctctcagaaattctatcaattctgattttacttcgagcaacaaaccctttcggatcattagctttctggtcgggatatctggatcgattttgatctcttctaactcttccacaggtccaacatttctgcttgggtccccaagtccagaatccacatcttcatcctcgccttgggaagttccctacttgggaatgtttcttcccgtgtctgtgctctggctggaggatacttccttcttaggcttggccactgcaaggttataacactcccgagcaaactgctagtttcctcttagacaccctaccccattctttgttggaaacttcaggcatgagtggaatattgatgtgacagc

SEQ ID NO: 75453 - DNA, 653 bp, Cannabis sativa
tcaaataagtattaccaagacaattcggttttgataattgaataaatgttatgtgtgcgactgaaatatacgaagaagaaacttgtaagtgattcgtgaaatttatatgacattcgtaactactaatctataattcatgatagagttttggtaattggataaatacgcagtagaagagttactcaagaaccaacttattgaaagaggaaaaagtagccaatgcaaaaatatagagcttgttatatgtttgtgtctcatcttctataaagaacattatataaaggtatgtttcttcctaatcttttgaatgtaagtaaccaaaatgtgaaatagcatggtttcggtcatcacggttcactaccgacatgtatggtgagaaaggacacaatcaaaacgagactttttctgtcgttttacaaactcagctatttcgttaaaatcttttatcatcaatatcagatcagtgtgataatgaaaaattaagtttcaaaatactcgaaacaatcatcattttcttcccgaactaaaaacttgagttgtttaggcaaattccaaagtacttgtctaactcgaggttggttagtacctatcagaagtaatataaagatagtttagtgaagctaagaacaatctttacctcatttaataaggag

SEQ ID NO: 75454 - DNA, 803 bp, Cannabis sativa
cgaagtgttccacttggcggacctaaattcggaaacaaggtaagattagtataatgttatgtgtatgttattacatgtttagtatgcatgttgtttatgcctgttagagtacactgatagcagtaataatatacgtagagttgtattagttattgataaatgtatgttggctaaaatactgatcgacgctgtcacatcaacatggctagagtatggctagcatgttgagtatatgttgacattatggttgatagtattgtcgtatgaatgttctagactcagtaccgtgtaggacacggggataggattatggttaggtgtatgaccgcctgattataacttgggatattattatgttatatgttatgcttttttttttttttgagtctgttgattcacagtgctatttccatgtgtaggctagggcaagactaaggctgagcagtcgtgagagtgagcagatggcagttgtacatgtcagggcggttaggcctggagcatacgatctttgggacatcaaggcttttgctgtatagtcgctagacgacaaacttttgtaaatgtattttgtaaacgggatcccaggattttataaatatattactttatgtttctaattaaataagtaaattttaattaatcacgtttttcgttaatctcgttgattagcaacgagctgcacaatacgttaaaaatcatgctaacatacctaatttgttagggtgttacaattttttatcagagctgccaagttgtctttcgaagatcgtcacgacatgtacaatcatcatcagcgatcagct

SEQ ID NO: 75455 - DNA, 799 bp, Cannabis sativa
tatgcaaagcttgttgctttaaaaatataataaatcgcaatttaaatatgtttttgcaaagttaactacatagtctagggtcttaagacttagcatcatccaataaaaaaaaaatctagaattacaaaaaaaaaatattcattttaacttttctttccagggaaaccatataagaagtagcaaaattgagaagtcaaaatgggtttctgtgtaccatataatgatcgatgaggagcagtagaaggtctatcgatcattatgatcgatgaacactcctccaatcgactacaaatcatgctgaccttgaacgaatcggaccaatcggagcaatcattctccatagtattgaagagcctcgactaattgactgttcatcgtgctgggcttgaacgaatcgaccagtgggaccaataaatcttatcaaacgactctgttgtagtttgacccgctcaccttgtccaatcgactgcccatcgtgatggtcttgaaactcaatcggaccaatatctacaacctagtcatcaagaactctccatacactatacggtgaagttcaaatcgcatgcaaatggactgctcatcatgtgtggtcttgaagatttgaagggagtattgaagcttgggaattatattgttagtcttggagatttgagcgacatattaaatattaggtattatattagttcgattgttatttttcgcaatattggtttggatcgaagagaaaaaagtcgcaataacaatatgaattttgaaaaaaaaaaaaaaaagaatcgaaggatcaagaatatcgcataaa

SEQ ID NO: 75456 - DNA, 588 bp, Cannabis sativa
attttattaaacataagtccgaggctcaacaagctattccagctttcctcaatcttatcaaaaccagttcaatgttcaggtcaagtctgttagttcagatagtgcacgtagacttaaatttcctactctctttgcttctctagaaatcaatcgttatatttcttgcgtctgaagacctcaacaaaattcagttgttgagaggaagcacccacccacatttacttgtttcaatccctttatcttactagtttgaatgtatctatactgctacttacctaacctgtagcataagtccctataagttttatatcttaagtcttcctcatattctcactttaaggcctttgggtgcctggcccatgctcatcccatgtcaaagttatctcccagagcagtatcttgtgttttcctagactatcctagctatatcaaagcttatagttgtttgatttgattactaattgcatctattccaggggtgttcagttccatgaacatattttccatttgtcactcaagatccacttcctaccacttatcaaagtttttttctttccaccagcctttaaaattaaaaacaataataaa

SEQ ID NO: 75457 - DNA, 697 bp, Cannabis sativa
  modified_base (603)..(611): a, c, t, g, unknown or other
ttcttcacaatcttccacactatgattgagtattgacttgaattgtgtgggaaatcactcaactcactatagggtacgaattctagaaggagaagagaagagcaattcgaaatcaataaagaggctcttaattttttaattatctgacagaatagtcaaatgtaggttatgttgtcggtttacgaaaataagagccttatctatttataggataccttctagtgttaggatttaaatagcatgtaactaagaaagataaaataatggctaaataatcctttaagtgatcggccatatatgtgggccccacatgttttaatttttccatttatttaagaacttatcttttctttcacaaatgccatattttaatttcaatcctataaatgtcaaatctatttatttaaaaattataattaatttcaaataaaattaccatttaattaatttattaattaccttacaaagtctcttaatcaacaaataaaccctaaaccttcttttcttctcaattaagcctttgcttagtgaaaattcacaaacaaggcatagtctagtttaaaatgctaactgttcgggtaattaaaaccaattaactgagtnnnnnnnnnaatattatctcaactagtgcgaggaccatggacatgtataatcaagctcccaataagtagtattagaatttaccgagtaaattctc

SEQ ID NO: 75458 - DNA, 831 bp, Cannabis sativa
aggttgttaatccaacatacttgtcagtaaatctagatcctggtaaaataatttccaacagagtgttcgacccgaactgggagggtccatatgtcatcaaagcagtagttagagtcggagtctataaattggctttatttgatggctcgctaataaagaactactggaacgtagaacatttgcgaccctattatcaataaataaatgatgtaactcgcattactaatgtaaactttaaacttcagttatgagtaaatagaatcatttatattaagtaattacaaagtttcattctttaaattacttaaagggcatttatgtataactaatgggaattcatctggaaatacattgtataatgcaaacccgccatttcaatttatttttttttaaattcaaaggttctcgactaaacctctttgacgaaagtggagtcgaactgttataactccctaaccaaaccgtttttacgagaaaggggttaaatcgttataacaccttgatcaaaccttcttgatgaagaagggatcaaacaactataattttttatttataacctatctaacgtgagaggaaaatcaaaagttatataaaactgaatactaacggttctcgcgagctagggaagtactaaacgaggcatcatgacgccttgttaaaagaacttaaacctagaaaatagatagataatataacatttcatacgagcaacttaaaaatatacaaagtgataaaatccttaaagtatatttaagtttgcttaaggcagattataactgcaattgcgaggcagaattgacaaccactcgaaaatcataaagtttggtagat

SEQ ID NO: 75459 - DNA, 674 bp, Cannabis sativa
  modified_base (470)..(472): a, c, t, g, unknown or other
gacttaggttttaaacaaaaaacctatctactgtaacttaacatggcaataccctaaactggcagggaattaacctaccaaagctctgaaactaacacgaatcgataacatgaattttttgggcaaccgagcagcaaatccaggtaatcgattttataggtcctttaaaaccggtttaccggtatacaccagaaaacccaaaaaaaaaaccaaaacctatccaaattgattccaatccttaccaaaccttttagacttgcatattataccccaatagacattttccaagaaacaaaacaactacggaagctcagaatcaaaaatcaccgttaaagagccaagcttgagttctaaaacttaaagcttgctcaaacctaataacagcccgcaaaacaggcttaattcaacatatctaaacacattttgacttcagaaatacaattcaaacatcaacaacaacaacaacaacnnnaacaacaacaacaacagtagctaaactcacaaattcatgcaaaatcctaaacttgaaactcaagaaaactaaaaaaggagttgcttggagcttaccttggcttgaatacagtaagaccttgcaggaaattgctagaatttgaagaagaaaacataaccctagctggttctaggggttctaagagagagagggagagagagag

SEQ ID NO: 75460 - DNA, 1027 bp, Cannabis sativa
gtttacttgcacctttgataagtgctatgtcctttctagggcactgattaaagtaagcttgggttggatgtatggagaatgcatcggaagggaccgatattgaacttggattagattaataagcctatatcctggcaggcacttgcccgaccagcttgcacgttggcaggtacttggtgtacagccttgaccctggtagacacttgatgtaggagtgttcacggtgcaggttgtaacctttttccaaaccaaactgcatatgcagtttttctaatttctcaacccgcaactgcaccgctagatattaaaactacaaaaaccacactgcaaaaatacagtgtgctgcagtgcagtttgagcggtttacactatcatcattatcgaacattataataaaaatttaaaaatcaatctataaatttttaacaatataaaaaagaaatattattaaaattttgacatcataacatatatactaatcatcaagtcattatattgaattatctctaaaaaaaattaatgtaatgtatacatatatttgttcttatatgataaaagaataaaaatcatattgcaaaaattgataactttgtaatatatagtgcggtgcggtttgaaccgcaattattaaattcaaaactgcaaatcgtgttgcaccgtgcggtttggaataaatgcaaactacaatcgcaccgcaaaagattttaaattgcattttttatgcggtgtggtgctgtaacaccctactagcttaggcgtgttatcgtaattttatattaactgtgcagtctgttgctaatcagcgagttaatttaaaatcgtgattttttaaaactttatttaaatactccttttaagaaagtaacttatatataactggtatctcgtattttaatttttttgcaactaagttacaaaatatatttgatacaaaagttgtcgcctagcgacattacaaaatatagtctgctgtcccaaaaatcgtacgctttagacctaaccgtcccaacatgtacaatttttatcc

SEQ ID NO: 75461 - DNA, 1401 bp, Cannabis sativa
ttgttaaatttgattaaagataaaagtttgtatgtaaatattagttgaagtggaagttacttccgagaatgcagccacttgaaactacagagccttatagtgttgatcctattcaggtagtaataacattcacatatgttacaccattttcgggagaaaaaaagtagagaatcacattgggataaatatatccactataataatattttttttccataatatacacaataaattaattaaatatcattgattttttttgtaattagtataatattgaattcttttacctatataattttttttttttttttttagaaaacatactattggattgaagctgaaatcattattaaaaaatatcaaccaagatttttattacatgtcgtgtgatttatgtaataagaaacttatgttctacaacgacattgaagaaacagattgtgaaaattcaaaatgcggaaagaggtgttttcttacaccacggtataagcacatcataactaagttaatatttgaacttatttgatattcacattaaccgttttatattctgaataagttattagtgcaaggacatatgtacaactcgacgatggtaccgagttgctagatgctgtgatgttcggtgatgctgcagaaaacataatctcatgtactgcggttcaattaaaattatattcggatgaggtaaatataaaaaaataaatacgtaaaatttatacattttcttaaatagaaatatattaatcttattactaattatttttacaaaaacataggttctttgtcctaaaaattacggagcaattatcagccaaaaaatagagaattcagttgtatgtagatccaaaacgaacaatgagttcaaagtacaatcaattaattcaccattcaagcagttgaaccaatgaaagattaggaagaagtttcactatactctttttagtttttctaataatgttccatatattaagattttttttttaatacttttttcttttattttaagatcgcacactctctttaatttttgttacataatgtttgctttaaattctgccaaacttatatcttgttcctctaaattttctataagtaaataataattattattttgtatgagttatatatatatatacccaattatatttgaataaccaattataatagcataaatattactttaataaaataaataattcgtatgatcatacctttacatacaatctaaataagaaaaaaaaaattaaactttaaataaaactaatatttacataacttttaactagtatatatgtatataatttcttttttcaagaagattgaaatgtagccataaacatattactgaaattattttattgtgtatggagagtcgcaaccaaataaaaaattaaaaaa

SEQ ID NO: 75462 - DNA, 879 bp, Cannabis sativa
cagtacacacactcaccacgagtgcgtcgtgtgttcgattcgagattggttagtgtggtgtgacactttattttttctagaaatttatttaataaaataattattttaattatttaatttatttgagaaacttttttagttaaagctgattacatattttattaatctatataatgcgattgaatcaacaggagaaacacatcttttcatatcgagaaaaaaaaactcaaaaaatccatctacgatatctattttcagggtgtatacgatggttccctaatttccttaaatatatatcgcatatagaattttttggtagtgaaaactgaattatttttcttattatgaaaagatgtgcactttattttttttctagaaatttatttaataaaataattatttttattatttaatttatttgagaaacttgtttaattaaaactaattacttattctgttagtctatataatgcgattgaatcaacaagagaaaaacatcttttcatgtcgagaagagaaaaaaactcaatttttaccacaaaaaaaaaatccatttacgatatctattttcagggtgtattcgatggttcactaatttccttaaatagatatcgcaaatggaattttttggtagtgagaattgagtttttttttctcggtatgaaaagatgtgcactttattttttccagaaatttatttaataaaatagttatttcattatttaatttatttgagaaacgtctttatttaaaactgattacttattccattaatctatataatgcgattgaattaacaggagaaacacatattttcgtatcgagaaaaataatcagcttctaccaccaaaaaaatccatctgctcagggtgtattcga

SEQ ID NO: 75463 - DNA, 1347 bp, Cannabis sativa
taatcgttctggtgttaccaatcagccagttgtagaagttatggaccaacatccacttttcaatcccatgatgtggacattttctgatcagatctttgaatctcttccaagcctcatggagagattcattgtccagttgacagaaattattaatttctcctcgccgcttggtagactttgttggaggaaaaaacttggagaagaactttgttgccaaatcagtccatgttgcaatagagttcggtggcaaagagatcaaccaactttaagctcgctctctcagcgagaatgggaatagtctcaagcggatggcatcatcactgactccatttaccttgaaagtctgacagaactccatgaaattagacaagtgcaaattggggtgttcagaggggagtccacgaaattagactgaagactgcaccatctggagtatggctggctttatttcaaagttgttggcctccacggtgggtggtcttatacaagacttaatccccgttagtgttgggagaatgtagtttctcagactacgaccgtttgcctggtcttcaatggcacctccgttattaccgttgttgccgccattagcattatcagacataacttcttctgtttcagcacttgctgaaactctttcttatctttcgtttcttccatttcttctacaggtcttctcaattttaggatcaaccggcagtattacactttgtccttgacgtcgcatacaccttcaattcctgagatagattaagacaatgttgaaagaaacaagttagcaatcagtaggaagaactaaccaaagtagaatttaatctaatcttatgcaatatcaatttttaaacaattctccagaaacggcgccaaaaacttgttatgaaaaatatgaacaatacgcaagtgcacgtaatcaagtagtaaacttacacaggtgaggtcgaaccacaaggaattggactgaataccactagattaaatttatgattctatttgtaaaccaataattttatgattgaaaaacaaaacaaagagtatcaagaaactaaaattaacaacaaaaaatttaatcaagatgataaaatagggaagagaatcctgttaatttatttacccaattgttaatgctaattactaccctttttcttgatgtgaatgagaaattaaaaaaattaacctaacactattcagatcttttatgccctaaatcacatgttctctaatcaatctttgaattagattaacatgtaattaactttaagcaataatctaaatatcacacaggttatgcaaatacttttgtttcacataaaacctagattatccaattttagcattctgaattctcac

SEQ ID NO: 75464 - DNA, 1022 bp, Cannabis sativa
agaagtggcccatttactgaagcactagaagccgttgtgaaggcccacgctctttatgtcataaaaatagctgaagtcctccatcgaaggctccttatgtgcgtactctatgtacatcgcataaaacgcaagggctacgcgataactatttggggttagttgaaagggggatacatcataccgcttaagaatagcagcgatgaatggatgaaaaggaagcgatacaccacagtaaagaatgggtatagaaacaaccacattctctgtaggtattatcgcaggattggtaaaagaaagatgcagtctctgggtagggcgaggacgcatggtgctaaggcgtagaagatttaaccttgtaagggtggttaggtcagatttggtgactcatgaaactgaatcctcgcatgagaagggctcgtccagttaagtgttgtccactgagttagtcccgctcccttctgcgtcctcctcctcgtcccactcgcaatctggagcctcccagtcctcacccatctcctcaacttcagcatcaggagcatgcctggtgtgaacaagatgttcacgagcagatactgtggactcgctatcacggatctcgattgtccccagttcggcaagctcccgaacaattctttcgatgtccacggaggacaaagggccaagctctgtagttctgctaattggggtctccacttctgaaatcgaggtagggatgaaattatcctcctgatcttggtcgccttcgaaagcattgcctccagggccgagcatctggctgtctgataagtcgctcatctgaaagatagaagaccttttcagtgtggtgaatgtgcgaaaacaatacaagtgacctcacccgcattaaaaattcaaggtttccttaaaaggctagtttggattctcgcaaaaacccaatcagcccaccaaggcataaaattgtaagtgtgcgactagaagaatatctcaaaaaacggctgggagttacccagtgacccaaggggcatgcattttcgagcatgacc

SEQ ID NO: 75465 - DNA, 885 bp, Cannabis sativa
aatcctgcaatcaaagcctcatactctgcttcattgttagatgcagaaaattcaaatctaagtgcagcatgtaccttaaagttattgcaacttatgagtattacaccccctccggagccttcactgttggaggctccgtcaacatataaagtccatccttcaccatttggtacatcacgatcaattttttcttctatgggtgctacctcagtgcttggaaattcaaggataaagtctaccagggcctgccccttgatcgcagattttggcttgtacttaatgtcgaactggctcaactctactaaccattttaacaagcttcccgaggcctctggtttcaccaaaacttgcctcaaagggtagtttgttaaaacttcaatgctatgagcttggaagtaaggtcacaattttcttgatgctattaccagagccaacgccagtttctccgtctgtggataacgagtttcagcgtctaagaggcgcttactgacataatacaccagatactgttttcgttggtcttcgcagattagtaccgaactaatcgcgtattcagacactgtgaggtagatggataagatttcttcgggcatcggttttgaaaggattgggggttgccccaaatgcaacttgagagcttgaaaagcctcttcgcactttttggtccactgaaacttcttattgcattttaaaatttgaaaaaattctttgcatttatcagaggaacgtgatataaagcgatttaaagcggcgactttacttgtaaggctttggacctccttttgtttggttggagattgcatttctaccaaagctttgatcttcgcagagttagcttcaattgctcgctggttcaccataaactcgaggaattttcctgatccg

SEQ ID NO: 75466 - DNA, 623 bp, Cannabis sativa
  modified_base (90)..(91): a, c, t, g, unknown or other
cacactttggataaataacaaaaagttacaaaaaaatacaatttcatagaattttaaatattttttatgatttttttattttatttacannaaatacggtctttttatattgtactatcttgttaatttgtgttatttttttgttatctgtatgttaatttttgttattgttttgatgttatttagattatttttcatgttaaatttatgtagttttttttgttgtttttataaaaaattgtaaaaatcttaaaaaaaaaattaaacgtaaaaatattgtaatttttttataaaaaataatatcttatgtaattatctctaaacatttaccaaattgttatagacgactcatgtgtacttttataaataaatttatagtaataagatcaactttaaactctaaaacatgtttaattaaaaatttatatttaaatatatttaaaaattctaaattacactctctttattggggatcccaatttaaaaactaaacactattattttgtaaactgttatttaaatgaaaaaggctaaataaaaattatcagtcttaaaatctattccaaactactaactcaaccttgtaagccgaacagacgggaaaatgtacaactacttctctc

SEQ ID NO: 75467 - DNA, 565 bp, Cannabis sativa
aattcaaaatgacctatgaaatttataactaaaagcaatcatgctctaactggcaatatacatttttatcacacagctgttgaggaaaaatagaattaaatcttaaaaagcttctgcatgtaaataaatatatatatttttttttgtcaaaagaaaaaaaaattataacaacaaacaagtacttagatacgtgatctacagaaaaaatttattttaaattcactgttgttaaatttgtgtcataaaattcagatggtttgaggctctgttgcaatactccaaatgaagaggtttgaaaaaaaaaagatgttattgcctcacagcttaattatgagttatgacagcatcaaaggatcatttttctaactctaaccaaatttccctgcaaatatatgttacttgtacaaaatcccaccacctaagcctgaagacttatcaacatttcatatcccatgtaaaaaaatgctatgtgataaataacaaagttatgtagttcatttaacattaaaaaagacaagaaaaaaaaatctagtaaaatgaataccaagaaaccctgctgatcagg

SEQ ID NO: 75468 - DNA, 698 bp, Cannabis sativa
caaaagtcaactattggggatttgcctggaagaggaaaaggtgatcaggttggcatctcagatagggtgtgaagtgggaagttggcccttgatgtacttaggtatgcccttgggggctcgcctagaaaatgggctttttgggagccgatactgaacaagtgcgctaaaagactagatggttggaaatgttcatttttatctcgtgggggtagattgactctcattcagtcagttctatcctcctttccaatctactttctttccctatttaaagctccaaaatctgtaactaaagccttggagaagttgatgagggattttctttgggaaggttgtgaatcgtcgggtggggatcatttagtggcttgggatgaggtctgcagacctcgtgaggaaggtggtttgggaattgggaacttggagctgaggaacaagggcttgcttatgaaatggttgtggaggtttcctctagaaccaaactcgttgtggcacaaggtggtgttgagtcgatatggaaaggctgataatttttgggacacaagaaaaggacgtcttgtctcccccaaaggcccatggagggatatctctgacttgtatgacaagtaccttggtttagtacaattcaaattaggcaatggagccagtatgcggttttgggaagatgtttggcttggtgactctgttgggttttatgccct

SEQ ID NO: 75469 - DNA, 870 bp, Cannabis sativa
atgtttgacattgatttatgttaataggttgtgtaaagttataatatattttcaattaactcaaccccaacaccaattacggaccgagtccgggtctaggtcttgatcccaagttcgagtcttgggtcttaggtacgggtccagttttaggtctaattgaggtcgctaaatctgtgtcgaagattggggttgaccttgaattctttgtaaatactgtaatacaaactaatatagaacatttattatgtattaaataatgcaatttatattgtattaaaaaatttagtcgtaataattaatacaatacattgtttggataaacaatgttatttattatttaatacaatacgactcttatgtagcctaccaaacaagcgctaactatacaaactgaaacacgaataatgttttctacaagtatttttttttcaataaataacacatttaaaaataattaaaatcctcttaaaaaaattatatgttgtttaactatataaataaatttttaaattataaaaaatatatatttatgaatgtaagtcgtgtttttttatatttgtattttcatatttatatattcatgttttcgtgcttgttgtatcttgttttgctatgtttaagtccatatttttcgtgtcatgtccaactcatatttgcttcagatcgtgccaagtataagcccatattttctcgtaacgtgtcatgcccgtgcatcccaagctcatgctagtctcgtgtcgaaaaacccgacccaaatgtaaaactatactcaagactatagatacttcttggtaattatttagaatatttagcggttagaccctctcaaatgtcattttacttgcatttaactctcaaagtttaaatttt

SEQ ID NO: 75470 - DNA, 830 bp, Cannabis sativa
gtgttgttccaaaagaagaaggacgggaccttgagactgtgcatagactaccgcgccctcaacaaggtgactgtgcgcaacagatatcccattctcttgatcgctgatttgtttgaccagctaagtggagcaaaatacttcacgaaattggatttgagatcagggtactattaggttcggatcgcagaaggggatgaaccaaagattacttgtgttactcggtatcgggtgttcgagtttcgcgtcatcccgtttgggttaacaaatgcgccagccacattctgtacactcatgaacgaagtcttccatgatgtcttagacaagttcgtggtgatgtacctagatgatatcatggtctacagcgccacttgaacacttggcaacggtgtttcggaagttgagaaaagaacagttgtatgtaaagcgggagaagtgcttttttcctcagaaaagtatgaagttcctgggtcatgttgtggaacacgggaagatccgtatgaatttggaaaaggtatgggcgatccaaaagtggacgaccccagccaatgtaaaacaactatgctcgtttctcggtctaactaattactatagaagatttgtggaggtctattcgagaagagcagcacccttgacagagttgttgaagaagggtattatatggacgtggtctgagaagtgcgaagaaatttttcgaagtctaaaagaggccatgatggaggatcctgttttagccttgccagatgtatgcaaacccttcgaagtacagacagatgcgtcagattatgctttgggaggggtactcatgcaggagggccaccctgtggcatttg

SEQ ID NO: 75471 - DNA, 1194 bp, Cannabis sativa
aacaatctcaatagttcagaggacctttttaacgacctcaaaagttgaggggccatgatttggtacatgttaaagttcatgggcaaaaatcttaattagtcttttattataataaatgatgatgttattggtatttaaatttatttattaattcaaaaatgttattcaaattaatataatgaaatgtaattattcaatcctacttttttttaagggatcaacattaccctcttcaagggcaaagggtagttatattactttgagaataacatttcaaggttaaaccataatgtttcacattctcattctcttactagcattaatccagtcaaacaactcctaaatgtattttcatgagaaacaatttttttattcaaaatttttcccttatctcaatttcaattttaaaataatatcttcatttatattgaagatagatatattttttttaactcttaaagatagatatttatcaataactaattttatttatttttttttttttgaaagaaagggagcccactagagagaaagaaactcaataagatcacaggggtcatctccaatccagatagctacttcatctaaccctagagcccggtgcgccagcttatcagccagggagttggcttcgtgattgacatgagagagccgagcagcagggaacagagataaagtattcttgatttgacgaataagatctccaaaaaccgagatgtcttctttatggcgagacaaagcatcagtaatagctttgcaatccgtttccacctcatggaccagaaagtgttcattgatgcaccattgtagtaaagtgaggagagattttgcttccagagtggcgacagatcctcctccagtgtgtggctgggccagagctgcaactaccagtccttcactgttcctaatgataccaccgaaacccgctttcccgttgaccttggagatcactgcatccacatttagcttgagaagacctgcagctgggggcgaccaagaaggggaaaccaaattttgactggggcggatggaagatgaggagtacgactgggaggattggtaatcttccagaaacctgtgagccaagttaagaattgcatgagctgggtcgaaggcttgaccttttagagctttgttcctgttaaaccagataagccaagcaatacagacaaaaaactctacatcttttttggt

SEQ ID NO: 75472 - DNA, 605 bp, Cannabis sativa
taggacggaatgaattttaaagcccgacctccttcatcattttatcaatttcattttccgtttttctttgtaagaatcaatcccctttaccattttgtccatttcatttcattttatttaattctaatatgccattgcaacctccttcctcgccccgacgctattacaggtgacccacttcatttcattttagctatttattaaactaatttacctttttatgtctctaataagttgttctatcaattatcaagaaattctaatctaatactccgttgtggtcgaagccccagccgacgacagaccaatagttgaagccgctcgcaaagttcctaaaccactgtctgctttcgtcgaattctgtatcatcgataagtataatttttttgctctctttctcttctcatatatataattttaatatttttatgtgtatatttatttgtaattttatttatatatatatttgatatctatatattttgtatcttattttttaaacactattaatgcgccaaaattagtatgtttaagtttttttattatatgttatttttttttaaaaaaataatatatgtgttataaatattaataattatgtggat

SEQ ID NO: 75473 - DNA, 904 bp, Cannabis sativa
atttacataaaatatggtctattttatgttatattcttggtattttgttgttaatttttggttatttgtatattatttttttatgttgtttttttattatgtggttttcttgtgtttttatagaataccagaaaaatataaaaaaaaaatgaacgttaaaatataaattttttataaaaatcgatattttatgtaattatcctattaattttttaatatatactttagttctagagataaatataggagaattttcaaggatactattcattaatgttgtatttataattttacggcttaaatgttttaattataaaaatttgtttgtaaagttttaaaattattaaaatacactttgttcagcaaaaaataaaaatataactaaaaaacaacgagaaatcaacctcatgataactataaaacaactaaaaaataatgtattatttttactaaaaatttattttcataaataaaaaaattcaaagagtaaaaataataaaaaaatcatatatatttttgtaatttttttttcaaatttttagttaattatgtaaatttttcattccgatgattttttttttttttttttggaattttcttttgtgtttctggggatatttagtatgtggagatagaaatttaaatattgttaatgagaatagtcatgaggagcaattacttaatattctcttttttatatagtttgttatataacaagttgttcttgatacatatattttggaaaccacttacatcgtcatcatcatcattaatgttcactattttaaaatgagcattattattgggcactagtgactagtacctttaagacgtgttatgattggcttagcgatacttttaaaaagttattatattaaactatatgggacccgatactaaatta

SEQ ID NO: 75474 - DNA, 773 bp, Cannabis sativa
  modified_base (399)..(404): a, c, t, g, unknown or other
atggcttaattccataggcaaaaagaattttcttccttttcctacatcgtagccattctcatcgaaattgtattccttccaacaaaaattgtgagtaaaactcgcaatggagcttttgaatatagaaaacctcaaatgcatcgactcttttttggatggattggatctggaaaaataatgatcgaaatacattagacgggaggaaaggcaagagatgagaagcaattgcagcttttttccttttctttcttcgtaaatttttattgcgatcaaaatttatcaactacatatattgtatacgattggaattgccacgtatgagtttgtgatttttttttttattattattaaaaggtcacccaataatttctcataaattctgttatatagccacatttnnnnnngaatagatatatatatatataaactagaaaaaaaaaaactacgtgcgacgcacgtatacttagttttaatcccgttacgtgtaaatgcacgtatacttagtcatatatttaattttatgtaagtaatttaataaattatttttactatatattttattcgtttttgtcataacaactctagatcgagttattattaatatttattttgacaaaaaaaaaatcaactattttgtaccattttgaaaaaatacagaggtcaatttgtcatttaactaaataaatgtccaatcgaaaacttttgtaaaataatgaattcaaaatggtatttattctaaaaaaaatatggttatagttttaaaaataaaatat

SEQ ID NO: 75475 - DNA, 693 bp, Cannabis sativa
attggaataaacaactcagaaattctctttcactttctctttctctcttcttcttcttcttctttcttctcatctattttatattattttataacaaataatatgtacttactcttttttacacattttctctctcaattttattcatcatcaacacgctataccatatcccattaagccaatatttttagttttatttaatatcacattcttaacttttgattttttttaaaaaaaatcaaatacgtatttgctattttttttttttttggttttctaatgtttagttatttttttgagtactaaatttttaacattttttttaccctaattgtgtgtgtatctcacatatttattttctatacgactatacttatctttggatcatgtggcgaatgcattccgttttattactagaaatggttcctttagtgatcccaatctctttgaagaccagtacgatactctctttgttgcttgcccaaatcaccaatcaccaaaccaccgaatgtactcattgtaagattttttgagtttaccctatttatttcttcatatctatatatctatatatctataaatctataatatataaatctatatatatatataaaggagagatatgaggctgtaaagaccgcttaatttaaatttggaaattagcagataattaagatttaattattaaaatta

SEQ ID NO: 75476 - DNA, 645 bp, Cannabis sativa
ttcttctattgcttgttcactctagtgcttatttatatatctacttgcaatgtctctccccacaaccatttcctctttctccttccaaattccttccttcttctgtggttttcatggcgtcctcttctcgaaaccccattcctcttactgccctagatgatgaagagagtcttgttcatgatttcgatcacatctccctacactcacccaatgattccaactctttctgtttgttctttaagttgttgtctcctaaatctgtgaaaccttcttggatagagaaagccatgactgaagcttggacgctccgatttcccgttcaaatctcaaaataccactctggattattcttggctgacggtgaccgtcgtcgagttcttgaagaacagccgtggcatttcgataagttccttatggtcttcacccatccagatgtgtcctccacaccaactcctgaatctgtttactatgtccccttttagatccaggcccataggattttgtttggtcacaaaagcccttagttggctcaattcattgctgacgagataggtgagcttattgaaatattttccctctccttgcttgagaactttggtccttatctccgtcttcgggttttattcgatatcactaagccattgc

SEQ ID NO: 75477 - DNA, 716 bp, Cannabis sativa
agaaacaaatttcaccattaaagcttcaatattgagttcaaaaactcaaaacttgactaacccttcaaacaacctctaattcatgcatttaacaacataattatctatatctaaacctcagaacacaacaacaactaactatagcagctacaacaagctaaacaacatttcactcataaaaccaaagtttgagttcaaaactccaaacttgaataaaaccaaataacaaccacaaaaacctgcttaaatcttcattttaaagcataattaagctttagaaataaaaaacaaacataaacaacagccacaaccacaaaatcatcaagcatgcaaaaattcacttttcttaaactcaagaaacttaagaggaagcttcaagaatcttaccaagaacttgagatcactaaatccttgttgaaaccagcttgaaatgcagaaaaaattcaccaaaacctagctgcctctaggtgggttcgaaagagagaggaaggcttgagagaaaaatggaatttttttatctttctttttgatttttcaataaaatgagcaaataacatttaatcaacttatttcagcaaacataacttaaaataaatcaaataactacctaatactaagtccactaaaggaaaaaaagcttatgggacaaaatgaccattttgcccctcccacactaaaagggttaaaaagcatttaagggtattttgggaaattct

SEQ ID NO: 75478 - DNA, 991 bp, Cannabis sativa
tgctttaacctctagtaatgacatttttcagtgtaatcactattatatttttttttgctgaaaccaaaatttttataaaaactagaaaaaaaaaatcagacagattaatcatgagtagcaacaaggggtgctacatcccttgcacaaagagacccaacaatgttatgggacgcagcccaagcaaccatattgtgagcaacaatatttttgctacgagaaatccaaaacacacagcacttagcatcaaaatccagacaagaaaataaatacaaaaacagattagtaagcttccaagaggagatagaagaatctcgaacatcactaacaagagagaggcagtctgagaagaagagtcactattacattacttgtatgaaaagtgattatactccaatacctcatgaattctcattacaattacttaaaatgactatcttatccttattttatactttttcttactaaagtagggataattttgtcaatttattatctatttcattccaacaacaaaccaaacataacaatcaattcctattacaatttttatttcattacattattattaccattataattaccattccattccaccaaactaaacaccacctaagagcatctctaatagagtgccaaaaaggtggtgtattgctatattttagcacacttaagaaaaattatattgcaacagtgttttaaaaggtgtgctaaatttggcacatactaaaagttgtgctgaattcggcacaagatatagtattgtgctaaatttaacccacaataaatgctacttttttatttactataatgtcactaattattatgattcattgacttttactaaactttatttactttatttaccatattaccattatcaggcccgtctcaaggtgagaagaggcctggggcaaaatttaaaaataggcctttttttatataaaaattaaagataaatattaattacatttttgacacaatatcaatttta

SEQ ID NO: 75479 - DNA, 1135 bp, Cannabis sativa
tatttcttttttacaaaaaaaaaagaaataaaataataatcatatacaatatatatactctaaacaaaatttgatttgactttcttttaactttttatttatgcgttcatttaataaataaataaataaaacaatatattaaatatgatgtgatggtgatagtgatcatgattattatgatatatatacatatataaacaatggtataaacgttacatgttgatggtgatgttgctggcagggaataaaatgaaaaaatgagaaagataaaaaaaaactgacctggatagtgatattgcggcagagatggcatagaaaaaagagagtgtaatacctaatgtgtcaagtgaaaaagaaaaaggagagagatatattaaaaattttaagagccctttacacatttatttcggtaagagttattaagtggcaaaaagtgattaaaaaaataaaaaaaacaaacccacttaatgataccagatcagaccgaatcagatcaaggggtctattaagaccaatcaaatgggccctaaaaaacctaagtatcccaaagacaataagaaaagttgtctaaccacataagttatttattcatccaaagggcatgcaccgctaatccatgcccagccacattcgatttaaacactttgtttcttcaaaaattaaaacaaatgaatagttcacttttttagataaaatttcagctttattaaacttagagcaaatactcataatgataaagacaagttcaacaagtatatttcccacattggcattctccacactaaactcacgatcaacatagcaatataattgtcgcgcaagcaaatgcactgctaaattagtagactattttacaaaatgtaaataaacattactcaaaaatttcatcaacaacttacactcttcaactacaatcccaaaaccaggcgacataattatagaattgaattgtctgaatagccacaagattgtctgattccacaattaccattgagtaacgaaacctcttcaaccaactcagaacctacctcagctagctcaagagagaccacccctaccttacaagacacaccagccgaaagcaaagcacatacagcatcatgagctaagaactcacagccaaatcgtccttcct

SEQ ID NO: 75480 - DNA, 532 bp, Cannabis sativa
tcaaaaacaataaatttcttacaagtcagctaaacattgatcagctccactcagagtatcaaataattccaacaacaacagcaacaaaaaattgaattcaagcaaaaaaaaaaacaacaaataattgaaaattcttgtattgaatgaattgttcaatatataatcaataatagcctcctgaccttgtcaatatgaggaaattgagctctcattatccgaatcgccaccattgtatcgctaaagataagacttttctctgcatttacatataacaccaatcaattatacccaaaacaagaaggaaaaaaatagggttcaaagaagagtaatttctcaattcgaaaacgaattcccaaacctaaggatataatatgatcaatatcgcttgtttcgggttcttcgactgactctcgctgtcgtttctttccttttgaagattcagagcttgaattctccataattgggtcttcaaattttcaaattattttcaataaaaacgaaaaaatttcagatttttacttcgaccctttga

SEQ ID NO: 75481 - DNA, 1038 bp, Cannabis sativa
tggcccaccgtagcagccgaaaggttctcgggctgagaaagtccccccagattaggaagctccgttggggccaacccctcgaaatttccctgagcctcaccggcacccgatgaaatcttgggaagaacgttaagcagggtcccgatggcgtcgtcagtcgccgaatcatgctgagatgacatgccaaaatccgactgattggcttcctcaagcctcatcgccctgctcttatttgctttacttttgcgcttgggagacttcgacataagcctcttccgtcgggcagtggtttgggcctcgatctcctcgacggtcattttagatagcctcattttgggaagatgacgggggtaggtttctgcaaggcaggaatgatcctcagaaaagtctatcaaaattggtttgggtgtttgatttaagtgtttcagagcgcattttaagaaatcgggccaaataaaataagaaggataaggagtggggatacctagggggatcctgagttcgcgaggccaggcaaaagattcgattagggcttcggtggaaagaagaaacttgattgatcagaacttggggtccagggctgtaactttgcgaaccttcttggaaaaaaatatccctgataacggtctcctcgttgtcggttgtagctgcacagaagtaccaccattaaaatcaacatcaaaacatagcaaggagaaagtacacatgtatgtatgataataaaaagagagaagacagtaaaatagaagggcaccctaacgataggagtgaaagaagtaccaggagcccctcagctccggttaataaatggggtcgtagggtcgtcagaaacgaattcgatggggcctttagcaaaaaagaacctttccttccaccctttatgggaagtctctaggtcagtaatgagagcccgattcttcttaggatgaagatgatagcgccctggttcgttctccatcaaagaatagaaattgatgacgtcgggtacttccctcagaactcccgctttatcccctaaaacaatcagacctaaaagga

SEQ ID NO: 75482 - DNA, 675 bp, Cannabis sativa
ttgtttaacggttttgccatgccttgtaagaaaactttgtcctgctattgacaagggtagtttcattgtaaagaccgcttaagtttaataagatgaattattaaataattaggatttattcataaaatttaattattatttgaaatatacatattgtagagttttatttatatataataattatgctatatgtgaatctcttgttttctgtaattatgttcggtagcggtggaaggtgacgttgggctatagagagtcacatttttatatattttagaattatattaatagtggggcatcatttttaggctttggatttattgggaatttgacgggatttagaaatgactgaattacccatggtggttacttaacctttgaattttattaaaggggcaaagtggtcaatatttatagagtaacccttatcattttgtgggattttatgcagctgtaagaaataggtttaaattaggaaattaaatgagttatgttttgaggataacataaaaattaatctagaaccacctacacacatctctctctaccatcctctctctctttcgaaccacctagaatcagcaagatggaggagttttcagctaaattcaagtgataccaacaagatttaggtgtctccattcaaagtatatgttggaaatattttaccacgat

SEQ ID NO: 75483 - DNA, 635 bp, Cannabis sativa
cacaaaaatatgttcttaagcacgaaaagacacgagaagcacgaaaggcacgacacgtaagcacgatagactagcctgaaaagcacgatgtgatgtattaaaaaattaaaatttattgttaataataataaaatatgaatttaccaattataaataagttaaaattataataaaatttaaatataatactgaatattataattctataattaaaactataaaaataaaaaaaaaaaaaaaaactaagatcatatattaatttatttatagggtgtgaaataaatacttgagtatttataagtaaatattcaaattttagtgattttaataatttttttatatgattatttgtaaaatattgttcaaaagttatataaatataactaaaaattttaaatattcatataatttggtaattgtaaaaataaggtaaagcatgaatttaagtcaagatatgaaaacgagctagcctgttttaaaaatacgggtcggcacaagaaaatcacggtatgaatccgagcacgacactaaaatatcgggcctactggccgtgtcaagcctaccctttaaaaataaggattatttcacaaatacacaaaaattacaaaaatacagttttacggaattttaaatat

SEQ ID NO: 75484 - DNA, 523 bp, Cannabis sativa
  modified_base (31)..(36): a, c, t, g, unknown or other
attgaatagaaaaaattacattgaaatagannnnnntttagggcacaaagcccaacacccagctagaggggaagtcactccatggcccatagtaagtggttgtttattgacctactcggggtttgtccttggtggtcctctcgtgtttccaagagtctgcacgttggaatctgtcaccatctggtcgcccttatcagcaaggcctctacgattttgtaccaccattctgtatgcctatcaaaacttaagataaaaaacttgtgtttttactctcagtgaaagaaccaaaatattgacctcgctttttagctaacgacaatgactcaattaataagtgattaataatataattaaaagagaacaaaaatgataaagtaaaaagaacacaaaatttaaagaggttcagccccgtgagcgtggtaatagcctattccccttgtattgtattaacttaagagaaggtacaaagtgttcttcctctttgaaagctcttataattaatctctgagtaattctcttagat

SEQ ID NO: 75485 - DNA, 847 bp, Cannabis sativa
attagaacctcctccttataacttatagtatatccactatatatagtttgtaacttatgtgggactttacaaaaataaaattactaagaaaatataaatttaatataatcctaataaactagataaatagctaaaaattgattatagaaagccaattcctctcatttgtatttttctttatattaatatattagaaaatttaaccgcgcaatgcatgcgcggtataaataaaaagttattataaaagtactaatttttatacttatttagtatttatttaagagttttataaaatttagtaataatcatttaagaataaaataatatatagtagtagaaaaatttaattaatatcatattttttttcggtaaaatatattttttctccataaatttttattaaagtaatactattagtccaatgcatactttttctttttcatagaaactaatctataataattaatatttttggttgtaatttatttgacttttaatactcactcactaaaatattattgtttgattattttttaagaggataggaatgcctaactcatattattattaatgtaattaataatttattaaaactaaataaaataaatttattataaaattgtgactcaatgaaaaataaggttagtataaggtaagtctaaaaactcaatctcatggtggattattggtccaatagacttaggtgactctttgattttattttcaaaattatttatttttatagtaaaatgacaactaataatatgtaaagagtcttaatcaagactctttatttacccaaaattaggttacccttataataactccaccatttttcttctttgtg

SEQ ID NO: 75486 - DNA, 1454 bp, Cannabis sativa
  modified_base (1320)..(1324): a, c, t, g, unknown or other
catgtcccttgtttcgcgatgacatttgtctgtcaggtggcgaaactatcccaagggacaggctagttaatttgtcacattatggtgactttgggtatcttatcgagggttgttgaaatgatggctgtaattatggttttatctttccaagatgtcacgtcatcgaatctttcgggatctatgcatgcacaacttgaaataatcaaatattactttaagttagcttacgtggcgagaaaaaatattattttgtcatatggaagttaaagagttaaaattatagtgtcaaaatttaaataatattgttagagattttattacaatagaagataaatcaagatatattacaactctattgtaaaataatacaaaaactaaaataagatattggttaaatatttgttaccatacacgtatatacactatatatatagcatatatataaaatgtagaagaaaaagaatacaacacatgtaatataatacatatatataacaagagaataatatatatatacactcactcacaatctttagtgtagattagtgaggatcaccatgacttgaacaatatattacacctttattcaaaaacttattttccctatctctaagcactaagggaactctcatggaaatagctttgagaattatcaagccttagggttttctaacaatgtgttttttgatagaaaactttttctcaatatgagcaccttaaacctctttatataatgttgaggatatcaccatttgaaattcaaactcataacccccataaatgatgttgtagactcaaatgtaacttatgcacaccataactcctatagcatgaatttcaaattaagatgtgtaatactttttatacacttaatattgatgataaatgtggaggttactcatagtaacaactaacttttgtatatattacaaaataatgacaaataatatatattgtcatatattacatattattagtttattacacacatttaatatatattatattatttaaaaataatataacaatcacccactagattgaatattatctctttagtaacaaatttttaactttgtaacatatatttaatcaatcaaaaatattatatcaaagtataacattctcccactttaattgaataaatgtacacttttaagaagtcttgcttaggtgcattagataaaatatctttcaacttgaattttacttcagtataattaccacaaagtttgataaaattttagttgttgtagcattgaaccactattcttttagttcaaatcggtgataacacacacacccttgctaatgctcacnnnnnaccgcatgtctcgctcttggaccgctaatggccatgtgcaaaattctaattaatggactctagagaatactctaaattctcataagaggcgacaccacctctagtccatatagttagagttttagtgtct

SEQ ID NO: 75487 - DNA, 976 bp, Cannabis sativa
atttggttctgattagttgttgaaatttgagattttttgtttgatgggtctagcttcttcttgaaatttacattattttttctgtgtgtatatgattttagctggttttattgttttttttttatgtagttgggcatttatgaaaaaagagattttgttttgaggtgctaagttgggttatttgaaatttttgtttgatgagttggttttgtatattgttgatgcaaatgggcatcttaacaagcttaggcattcttaacaataagtttatgagtttttgtcttttttttttttttttctttttgattttttttctttccttctaacaataaaaagagttaacgtttggcgttgttagcatctaaaaataaaatatccccaaaattattcagcatatttcaatcgctccgattgatcaggaggaggcttaaaaattttctattgaaatttttattctcgattgagagctggcgaaaagagcttttccatgattgagggtggaagcttaaaaaattcgattgaaattttcaatcacagctcctttgcgattgagggttggttttggagttcgccaacgccgatgatgatgatgatgaagatgacgatcgggctcagcaactgattatcctttgcgattgagggttggtttcggagttcgccaacgccgatgatgatgatgatgaagacgacgatctggctcagcagccgattaaggagctagacatccttgagtaagatcatatatagaaggcttgataggtttgattctgcaatttcatacgatttgagtgcatattctttgagtaagatcagatatagggggcttgataggtatgattatgcaattttatacgatttgagtgcattgataaaaaaattctcccatcccatctgggaaagcggcaaatcaacttagtatcctttcgaggtgggttagcactacttgcacacgatctttaattgatttttgtaaagc

SEQ ID NO: 75488 - DNA, 648 bp, Cannabis sativa
acttaatttttgtgatagattatttttaggttttgataaatcatgataagatatatttaaatcttatctttattcttttggttttttgtgtttgtgtatctgatgttacaaaagagggttttctttgcttggggtccaataattcaagttccatatagatgcatgattcaactttaatttgatacaaaatacattatatatatgtcacatctaatcggtagataaaatcttaatcatggattcttccatgctgttattaatcttgaatctgactttttctattttttcttgataatcattgaggtattacatttattagaatttgctacacatttctatataatttagtctaaaaatttccatacacttgtagaaaaatcatctaagaacttaaaagatttctagattaaattaagtctagaatatactagttatgttgaactctagaaacatttaaatttgtttggatatatccttctagtaaaagaaggatctagaagaaataattctaaccataaagtgtaaggggtgagcaattatatataaatatccctttaagggttttaaattgtaactaacacccagcaactaacatcaaaactatcaataaagcttgctatcttctcatacaacaccactataaaaatg

SEQ ID NO: 75489 - DNA, 1126 bp, Cannabis sativa
ctgcaatctccaacaatggcttcaggttagtgcttccgctcatattttatcatcttcttcttctttaatttagcaaagtttatttatgatttagggtgttctatattaaagcactttaagaatatgtttagatctgtgatttatatatttcttaagtgttttataaatcctaacaattttaacataattgcggcattaacaaatcttagtgtattacttgtattaatgtttgtagtcaagttcttacatagagttgttgcatggattattagagttattttcctctcattttttctcatcgttttttttagtgactctaccttttatttataagcgctatgggagagtacaaaggagtcttcatacgtttctcccaccagttggcagttgtagcctatatatgactatttttctatatagagaaatgttctttacattgtgtttgctgaataagcctaaggtaagcgtttggtgagacaaaacaagacatgcccgtggctaatgggactacagagaaacatgatgttgctaggcgtctaagaaggatacatgttagaaaaatatggggaatattttcaaagatatctcctttttaataaaagctcatttttttttttttttttggttctacaaagagagttagcaacaatatttttccttgaaagttgggccatgaatggtgaacaagcataaacgatgcgagctccaagaggctctaactctcttgaaggcttgtactattattttaatcttttcaggttcttaaggaccatgtcaccctcctgaatgctttactccttctagagtaacgtctaattgaggttcaatggtaaactcttgcttcccatcaatcggggtcccacaagcaacgtggatttgttctagtaggccatgtatattagtaaaactagtggcaatatttaccctctaagtccaagcttgcatttttgtaagttgggacttgctgcaggacgcccttttgttttcctccagtaaggttttaattagggttgtataccgatcggtttggacggtttattctatatattttctaaccaaatttaaagttcgggttgctaaaatttaagtgcaacccacccaatttaaaaaaaaaaaatctataaac

SEQ ID NO: 75490 - DNA, 646 bp, Cannabis sativa
gaacctacagtggccagagcctctaagcaaccacctaacagttaaaaatagtaggaagtgggtcgttcaatttggaagcatcaaaaaattaggcactccacctagttgaaagaaaggatgcttttttcctcatttcttcatattcgaagtcgaatctcttgaggtaaaacttatttgatgcatccatatgagcagacacctctttcgacaataaggaagcacaaactgacaaaacaatattagaaggaggaagtggtagaagactcatcttatctctaggcaattgggaagaaggagcatgaatagattgtgatggcggaggctaagagttggtaatctcttttcatgaacgagtgctctgcctatgtggtatatcccttctgtgagcgtcagttcgtcttctttggaggattccaaactatatttccaagaaacagtaggttgttgaagtttatccttagcttcagcacttgatcttttgcgatctctgcccagttcaaagcaaactctctttctctgtgtaaatacaagtcaataattgtcatcatcctcttcattgtgcacatcaattgtcctattctaaagaagaacactagccaaagaagtttcaatttctcttcccaaagaagaagaatctactgcactg

SEQ ID NO: 75491 - DNA, 593 bp, Cannabis sativa
attcatcaaataaaaccttccctacacagtgttgtatagagatgactaaggaaccatgaactatatttcaaagctctaataacccaagattgccatcaatctcatcaatagaataatctaatttattaattctattattactccactataaatatgaaattacactctttgacaatataaattaaattatatttacattattcttaattgtactccattgatataatcaatataagtagctcaccctctaattattagttcataaatagagttggtcaaaatactattttacttttctaattatctcttatttcagtatgtaccattaattcaatgtgaacaattaatctataacttatttagaattggatccaactgttagcactcccagaattaacactattagaaaactaatattggatctaataggaaagcatggattccactattgtataacatgttcccaactactcatgttattaagctaccaaaatagaagttgtaagaatcatattctttgagaaaatttaacgagtgaatcaaagaactcaatgaacacaatcaaacaggagttcatcatatactcaggatga

SEQ ID NO: 75492 - DNA, 571 bp, Cannabis sativa
ggatctctcatggtagactgggttcttgctcaagtgaatggcagattgactgtctgaaaatacaaaaacttttcctttcagcatgttgatttcttgtagaatacccttgatccatgttgcttccttgaaggcctctgttattgccataaactcggcttctgtagttgacaaagcaacaacaggttgtagctgagatttccagtttatacagcatgaattcaactggaaacagtagctagtaatcgactttctagtgtccttgtttgatgcataatcaacatcaacaaatccttctaacttcaatgtactgccagtcttttcaaacttcaaaccatagtttgaggttgttattagataccttaaaagccattttaaaccagtccaatgattctcaccaggattggacataaatcgactcaaagtgctgacagcatatgctatgtcaggccttgtgcttatcataacatatatgacacttcaaatggctttggcataaggaatttcttccattcttttcttggatttttcatcttttggggattgttcagttgtgaatgcaaaatggccagct

SEQ ID NO: 75493 - DNA, 640 bp, Cannabis sativa
gatgaggaaaaaaaggttggattggatcgggtgcccacccctactggtgtatgaagcaattgattaatgtgttccagaattgctccagctgcaacctgcaacacacaaaagacaaggtcgatgtgaatgtgaggtgtttattggtcgcatcaaagagctaattaagacaatttgaaaaatggtcattggaaaaagtttaagacaatttgaaaaatggtcattagaaataataggaggcgtaaagtttagaaaggtagcaaaataacaacatagtaaagcatacatagagatcttgtattttggttataaagttttggtccaatctatctatatatatacataaaggagaagaataagacgctcacatgattgacagtctaaaatctctctaaatgacgctcacatgagcaacatcttcagatggttttgtagtgactacaagaacataaactgtatgccaaattcaagaagttcgagttttggctatctcatgtgtcttttcttgaacacattgtcagtaaagatggaatcaaggtggatccagggaagattgaatccatcggggtttgcctgagattgaagacaattacagaagttagaagtttcctgggtctggctagttattattgtcggtttgttg

SEQ ID NO: 75494 - DNA, 674 bp, Cannabis sativa
cccaatgcctcaaggagggcccacgatggcaccagaaggcatgtacctcctggagggacgccccatcagtaggcacccgaactgcctccctagactaacagaagagtcgctatgatctctggaggtcttcatattaggggaaccactagaaatgagctgaagcgttatgctggagtcctaaaacatgataaggaaatacgggatgttattgagcttccggctcaaaggcccagggtcatggatcaacccattaccttcattgaggaagatgcaaagccaatatggtttccacatcacgaccccttggttgttgagactcaaatcgcaaacaaagtcatggccagaatattggtggacaatggaagctcagtaaacctgttgttcaagatgctttcactgccattggcctcactgacaaagatctctcctctagcagttcacaactcacaggattcaatgagaaaaccctcatccctattggaaaggttaggctcccggttactttgtgtccgagcaccccgcaaagcacattcaaatattgcacctttgtggtagtggattgccccactgcttataacgctatcctagaaaggccagccttagtagactttggagcgatcacatctatacgacacttgtgccttaagtttcctacccaggaggtaggaatagga

SEQ ID NO: 75495 - DNA, 788 bp, Cannabis sativa
ctccatacatctgatagatactatactagtatattttactttaccaatgccctgaaaggacataacacttatccaaagtgtaagtaaaatttatcactgattatcacgtcggtgtaaatcaagcgtagtgataaatcataagactaaaatttttgaagcatataatcacaattactttccactgtgaagacatcactgtaattgtgaatgactatatgttctggatttaataaaaactgtatattaaaccataaacatgaaaataacatataaacttaaataacttctaatcttctattgataggaagttagattatattgaaaagaattcttgtagactaggggcaagtgctaaccccgaaaatcgtgcacttataatttttgacttaatctgaaacaccacaaggatcggtctcgtgacaactcgtgaatagataaaagacatggaagaaggccatgagcagggtgcagtgtgaggggcttgcatgtgagacatgcgaggggctcgcatgcgagccgtggtgtgtgtgcatggtgcgagacgtacatgtgtggtgtgtgtgtgtgtgtgtgagggctcgtgtgcgagcccatggtgcataaggggctcgcatgcgagcccatgtgtagtgtgtgtttgtgtgtgtgttgttgttgtgtatgtaaggtgaaggatggaatttgtatacatggtgaagagaatgtcgttgaagaagaaaccaaaggacaaggcgtgcaagggaaaagcctacgaccatgccttttacaagctttgaaagcaaggaggt

SEQ ID NO: 75496 - DNA, 764 bp, Cannabis sativa
tgggattaatcacttgtcatgccttgagatttgacttgccttatctttgtgatgttgtttaattcaatgaatgaattccctttaaaaaaaaaaaagtgtatataatagctaaagttacacaaaaataaaatatgatgtaaaacacaaagttagaggaagtatgcctaataacaaaatacaaatgatagctaaatagtgaatggtttgatcaattgtaatagttttgggccttttggcataccttcaaatggtggtgctgcatatataaattggaagtttcgccatagccacatttgatttaaaaaacaaaattacataaaatattattttttaatttttttttacatttttacgtacacattttctttttttatatttttacaatattttataaaaacaatacgaaaataataaaaaaaaactatataaaagtaacatggaaataataacattaaaatcataacatatatataacaaaaaatcaataatataaattaataaaattacaatttaaaaatattttaaaagactatatttttttaaaataaaattataaaaatatttaaaattcaatataactgtatttttataatttttttgtcgtttttatgtatatgtgaaataattcaaatatatatatatgtaaaatgaataaatatacactatcttaaatatatctattctatgtaaagtgtgcctatataactgaattcttggtttatgagaacttcatgggtgttattttttatttatatttaataaaa

SEQ ID NO: 75497 - DNA, 779 bp, Cannabis sativa
ttacattgaaacagagttttatttagggcataaaacccaacaatctttgtgatttttgagagccccatttagtaggaacgagtaacattgcacaaaagagttacacaaaccaagtaaagaaccaatctttagcttttgcactagaattgacaaaacgagctaagactagggagcctctaataactttcactaacgacaatacgatgcaaatgagatttccccatgagaatccactagtgataactatttagctcgcgaataaaagggtgaatcaagttttagtggataatgggagcttagtcaacattctgtataaagaaactttaaagaaaataagattagaaggaataattctaaaaccatgcatggttaatttatgcagattcacaggggatagcatcgcaagtttggaaacagtagagctccccataacaatgggacacccgcctttgtcaatgactctaatacaagagtttttggtggttgaccttccctcgatctataacttaatcatgggttgcccaacactgacaggactgggggcaattagtctaaaaaaacatatatcattaaaattcccaactcataatggagtaggaactgtaaaagacgaccaattattagcacgagaatgttataatattgagttgagggaaagaactaagtctcatcaaatgatggttgtggtaactgaggaaattgaaaaagaagaggaggatttggacccaagaatgggtgaagagcaatctcagttcgaactgattgaggagttgtaagag

SEQ ID NO: 75498 - DNA, 865 bp, Cannabis sativa
  modified_base (193)..(217): a, c, t, g, unknown or other
  modified_base (266)..(271): a, c, t, g, unknown or other
attgagggggtgaaacggtatatttatccctgcttggtgtaaataatctatagaggatctttgattattgggattagaacgatggttaaatctttatagtttatgtatatcgtggagcatatagagcattctatatgactaagagtgtaattggaagttctatggtggatgtaataaggaattaataagttannnnnnnnnnnnnnnnnnnnnnnnntctgcttattggaagctcggttgcataagttcatggtccccatactagnnnnnnccatactgcttgtaagacttcgttcattgattttaattgtttatctgcaaaaattaatgagcaatatttcaaaaaacacatctttggcaggccttggcaatggggctcgccaatcattatgaaactcttgtgttggaactgctctgggcttgggctgacacggaatgttcagttcctaaacaatttggttactaataaacgggccaatatttcttttttatgcgaaacattgtgtaaaaagctgaaagtggatcccttgagtagagctttgggctttgatgggtgcgttgtagtggaagccgaaggaagaagtggaggtttcgctatgttatggaaaaatcaagaagaggttactgtggattcctttttctgagaatcatattaattgcaaggttaagttagaagggcaaagagagtttagactcacatgggtgtttggagagcctaatagaagccttagaaagaagacttcggatcttctaagaacacttcttagtcgataaactctgccttggtgtctcatgggagactttgacaatgttcttaatcaatcggaaaagatagggggacaaccgtacccgtcatggctgatcg

SEQ ID NO: 75499 - DNA, 695 bp, Cannabis sativa
tttaaatttattttttattttttaaaattttgtaagatgttttaaataattataacatacacaaatattaaataaaaaaaatttcaaatgtctaaataggtaaataatataatgctttaccctatatttattaaatgtatatattattttatattttgatgatttaaaatatatatatatatcgatagtaatgaattaggaaatgtgttttgcaatatattattattattattattattatttgtgttagatttttctttatttgatttgttgtacatgttaattcgcggttaaatcatctgaattttaaattttcaacatttaaccacaaaaatcaattttttagaggcaaaactacataaactcttattctgttttgctctgtacccctccgtctaaaaattacagttaagtgctacagtggactgtccacgtatatacacttgtacacgtggcaaatttttagcggtctacaatccactatggtgatttttggagcagtacaatttagttaactttgcccctaaaaaatcgatttgtgtagttaagtgttaaaaaatttaaaattcatatagtttagccgttaatatttttttttatttatttattttttatttttgtaagggttgtacttgtacatgttatttaattattctgatttttaagtttttgctgtaataatgttctttttatga

SEQ ID NO: 75500 - DNA, 618 bp, Cannabis sativa
taagaagctgcataattttgtatttatattatcaatattgatattattctcttgtcttttgctatatatactatcattattaatttggtgaatttattaattagtttggtgagacttatcgttcttctaccttttttctacgtggtcgactatattcacatgtgtctttattattgtttcctaaatatttgctattattaatattatttattagtgttaattatctaattggaagaattcaattcataatttaaatgagtagcttaaaataatataaataaattaattaagttttttttttaaaaaaaagtcacccataaatttctcataaaccaagaattcaattatatagacacactttatatagaatagatatttatatagtgcagcaatcaaatcagcatatatgaaggtgagtgagttttctagaaaaattatttctgtgttcatgaaactttttaatatatttcatttccttatatacgtacatatattaaaattattttgttatgtgaaaataaattaattgattatttgatttcttgttaatttgcagcattaatattagctagggttccaacttttggtcataataaggtattacactatcccaagata

SEQ ID NO: 75501 - DNA, 963 bp, Cannabis sativa
tcttcttcctcttctttcttctcatctattttatattattttataacatttattacattatggtatactattttttaacagacgatctttattccatgtataactactatctttttaataaaaatttcctgttaaaaaatggtgtctcatctcatactatattaagcaaatctaattgtgacaagtcaattaacttaatttatattaaacatgctaactacttttgttgactcttttcttaaaaaatttattgacgtatcaaacttagaattgtttaacacattatgaaatactacttttccgaggatcttgattaattttctattttgtgggacaaaataaaattatacatattcttttaaaaaaaaaaaaaaaatttgcggcacaaatacgtaaattcaaaatattgcagcaaaagtgtcaaaattttcaaaataaatggtttgattaataactaaattaacatatcttttagttgctttaaaagtgtcacatatcaaacaacaatttgttcacattataatttttcaaaataataaaattaaaaaaaatatatgttttaaatttaataaacattaaaccactacaagaaaggagattttttattccacttttaaagtttaataaaaacaaaaaatagaataaaaattatattcatacattttataccacttttagatttggttttgaaatatacagttaaactttttcagacaagaccctttttagtagaacattaaaaaaatatcaaaggtcaaaaataagttcaagactcaatttttagggataaattacggtaatactctccaaaaacttagacttcatgcagattagttttccaacctcaaaaattggcagtaataatccctaaggtcaagctttttgtaagtccgttggtccctctttctaacttgtgaaacccaaataaaataccacgtatgtcaaattttcattactccaaat

SEQ ID NO: 75502 - DNA, 535 bp, Cannabis sativa
tggaggcttgaagcggggacgttacataaactgatattgtaattaataatacttatatatatacgggtgctaatgaatattattaaaaaaatttgagattttatgtttaatttttctatttaattagaaaaatttcttatttttatattatatggataggaattgttttaaaaatctaaaaaaaaaatatttttcagcaaaataaagataagaaaagttaaatttaatttagatatttgaatttgtatataaatatattgttaatatagtgtaaaaataattaatatataattttttatattaaattaaaacttaacatttaattgtaccgcactacaaaaaacaattacttttagtgataactttttagtcacaatttaaattttttgtgactaaatgtgacttttggtcacaacaaaaaaactacttgtgactaaaacatagtatttagacacaagttgtcactaatttatttttagtcacaacatggtattgtgactaaaactacatttagtcacaataaattgtaattttt

SEQ ID NO: 75503 - DNA, 691 bp, Cannabis sativa
ttttataaaatataaggtacattttattatttaataagacaaaagattcagttagtaatttttgcagaatacaagatataattaaaaaaaaaaaacaaattcaatcaacacattattgctgaaaagatcacaaaaaaatggaccaataaatatttgaacaccaagaataggcaggcaaaagaatttgtgtattaaagcccctgatacccatcatcctccactgtgcctcttaaggtagaaattttctttattttttagttgtgtatcgttagaattaataataaagacaaaaacaacataaatgcaaataaatatgaaattagaagcatgtcatgtcaaataaagccctaataacaacaacaacattttatctttaatcttttgatttctagtgtttagaatccaaagtgggtctggctattgtgaaatttagagctaagtttactttagtttaacttttccataaccaaatgacaaaaataaataaagcaagtctaataaattaactcatatagtaacaaataacttttgatataattaacatcagtgttgagtactgttgaatgtgatcacatgatagtttaacaatggttagatttgcaaaaattgttattgtttttcgtatttagttacttatgtgtgctttaatggttattacatataattaacatcaaatttgttaataataata

SEQ ID NO: 75504 - DNA, 765 bp, Cannabis sativa
attgttggaaatataaaaataaaaagttttttttttaatataataactaattttatttttttaattgctgaaaattaaataatacattgattattaaacaaggaagaaatttcttccaatcaagaaatctcgttttccatctgtgcataatctcaccatttcgcattacatgttgaagatatacatccagaaagacagataacaagaacctaatagaactaaaaaaacagcttcacccaaacacactttcagaaaaagaaatggctaaattgatgacaacttcaagatcactctctataaaagaaatagaaagacccaacaatgaacaactttggacgggagagaggatcgtcttagttgcatgacagagagaatcttgtgcttgtgaaaaaacactctctcaaaaaagagaaaatattttaactgcaaaataaaaaatatacgtaaggaaatataaaaattaaaataaaaaatatatattttcacgtttaaaatttttttttcttcatatttttacgattttttataataataatacaaaaataacaagaaaattacatataagtaacagaaaaataacatctaaacaacaacaaaaaataacatatagagaataaaaaattaacaaaagtataacataaaaatactgtattttttgtaaataaaattataaaaatcataaaaatatttaaaattctgtacaaccgtatttttgtatatttgtgaaacaattacaaaaatttagatgttttttttatcaacaaa

SEQ ID NO: 75505 - DNA, 1169 bp, Cannabis sativa
tgagagaagtagaagtaccccgacctttcttgcttgggggtacacttgaggtcaaaaaatcaactgacctcatgcgaagaaggcacaactcactttttggtggtttataggacgaacaaggtggacagatatttaatgccctttggagtaaattgggttggacagaggcggaagtactcttccaccttcctgaagtaccggtggaaaggcaccattgcccgttgcttggtgtgggcacctgaccaggcacacacccccttcttcgggtttgtgcgtcggtgatttgaggcagggacataacattcaagttcgctcagatagccagactggtccaaatcccttaggcgtgcctcagtgattttggatggaggactcatccatctagcacctaaggcaccttgccgcccgtgaggaactgcagtagtaagctcctcggtgacgtagtctacccctttgactaagacttcgccctctgcagacacttgctccccgacctcgttgtatcccccaacattttgaggttcagcctgctcctcttcctcagcctcggaaggactgcccggacggacattgtcctgttcctaaatttcctatacctgaatgtccccttcgggatccccctcctcctggatgggtagatcctgctcggcgctgggtagtgtggcgagctaggccacgtcagggtcagatgtgtttactcttcgcattgtttgctttgttcgagccatcatcctactgctagatggatactggggtgaatgccgagctaccgtgacaaccgaatagaaatgggaataccaaagttccatgaacttggacggccaacatgcagagtatcaacaacacctggctagacagcgtatgtccagtttgaaggcagatagcacctccaacccttcttcaactaccaaatgaagcaatcgtacccctctccagcgatctgctcggagtaatagttatgttacacttcgggttctggagtagaatagcattcactactcacctcccagtcttcacagcttgaattggaaagcccgtcacttgaagatgatggactggcacgaagacgaggatgatcctcgtacaaaagttgaagcaggtcttggttcatttggtgtttgctttcccaaaactcaccaaggttcatctataaaagacaacacgcgaga

SEQ ID NO: 75506 - DNA, 910 bp, Cannabis sativa
ttactgagagtctcaaagttttggagtgaaactaaagaaggaagaatgtggtattggacaagttggactttatcttcgttggaaagtgtgttgagagtgccaggctttagagcaccaaacgccccgtttgttggggcaaaaatggtcaatgtgttggatacattaagctgattctcaatctgaatgcttacggaggtactcttaaggaggcggatgaagacactgaagataccggctttttcgaggattttggtgacgtctgttggtgtgtgaagggctttgtggggtggtgccgggacaagtggcacttgagacggtggctccaccgccgacactggcaaagatgttggcgctttggttggggttatcgtcttagccttagccggggctatagctacatgtttggatggagcttgggctggagagtgagctaaagttgctccattagagtagtggaaacatagaagtaagaatgagaagtaaatgataagttgtttgttcatcttgttttatttttttttagtagtgcaagatggcaatctagttaagtagaacaagaatgatgttttcttgatgatatttgatgatttgtattggagcaatattatcaagttcttatatagagatgttggacatgaaaggcaattgtagtaataatatatagttaaaaatgaattgtgtgtattctatgtttgggtaggtaggagtgatcatcaattagggtgaaagagatgttggtgttaaatgagtttaattgctgattattggttggttacttgggaagcagggaaatgaaacgaaaagatccattctcgatcaggttggtgtggtgtgggattttattttttttaaagtacatatatacaagaataaatgtttttcttaatttctactgaaactcataatttgg

SEQ ID NO: 75507 - DNA, 1158 bp, Cannabis sativa
  modified_base (1086)..(1087): a, c, t, g, unknown or other
agccttaattataagttttggcaaatagtatataaatttaatatgtatttttaacttgtataaatatttaatatttataaaattatatttacgatcattatattttatttttgtctttaataaaacccatataaaatttaaattctatagcattggattcaaatagaaacataaattacttttaaatgttcttttaatatatttaaagcacactctgtactaataaaattaaaaaaaaaacaattttataaatattcagtatttatattattaaaaataaattttaaatttgtccgcttacaatcttaaaattttaaagaataattagcattttactcctaaactttcgacactacctgattttggcccctaaaatatactgtttgataaaaattctttctaaaatataatagttacaaaattatgtcccttctgttcggttccgtttattttaccgttaagattaacatttttatcccctgaactttgactaatacaaaattttgcccattttttctaaaaaaattaatttttaaaattataatattttattttttaaagcaattataatattctattaattttgaaaaaagaataaaaattattaaaaaacatgagaaaaatattaaattaaataaaaaaaatattaattttatttaaaaaaaaacttaatttattcctaaaaaaactattttcaaactttattttatttataatcaggtatcttaaaaaatcaaactaaaattattgagaatctaataaataatttaaataaattaaaattttttgaagaaaaaatcaaacttatttgtatttataaactcatatcttaacaaataaagaaaaataattaaaaattcaataaaaacataaaattattttgaaaaaaaaagttataaaattaaactaaaaaaatttatgtttattatttaaataaatctataatttttgagaaaaacaaaatatactcaagtatgttcccataaaatttagtttttacaaaaattgaatttttaatatattatttttaatatctaaatgaataatttgataaaaaataaaatttttttaaatcgcttaattagnnttaaaattttaatttattttttaatttttttaatcattcaaaataattttttcttaagatctaaattaatt

SEQ ID NO: 75508 - DNA, 1034 bp, Cannabis sativa
ttttggggtatatataattatttttaaataaaatgatgtattaattttttaaaaaatatattttatcatataaatagatatattatttaaaataataatatttttgaaaagtgattattaatatattttgaaaatatattaaaataatatatatttttttaaattttgttattaacctataatccttttaattaattttttacttttaaataaataagataattttttatacacatattatctatttataaattaactatttttctaaaagtatgttattaggttactataatttattctcaaactaatactaaaatattattttaaactaacctaaataatgcacaataatcctatcttatagttggtaaactaaaattattttaaaacttaactatatatgttatatattgtatataataattaattatttaggaaatattttaaaatatttctatttaaataatttctaactatttaattatttaatcacaattaataaagacaatataaaatatttaaattaattaaataaaattcattaataattagaaaatatgcttctaattacatagtggtagattatgttaaaacatattttactaggatccaaatttactaacatttatgtttaattataatctataatctaacatcccaaatacgaatttcctaaaataataaaataaacacatataaagttatagaaaaccttatattggcagcagctagcggaatataatggttccttccattcagaacccttgtttctttctatctcagagtattatcaagaactgaacttggatctcctctccttcaatttagttcaacgcaatctttctcactatgctaggaattgctttgacatgtgtgggtatactctcagaatactataggcttcgaattattcaatagagaagaagaagaattttgaaaataatagctctctttattttctgattgtctaacaaaaagagtttgatcatcatctgaaaataagagctatacatgtatggagtatacatcggaag

SEQ ID NO: 75509 - DNA, 639 bp, Cannabis sativa
  modified_base (458)..(461): a, c, t, g, unknown or other
tatactaaaatggtattatttagtatattatcgttaattaagattagttttaatattatcatttatatagtatctgccattgttatgtagaagaagatttggtacattggttaatagtttacaaaatcgcaccaaatgtttgcaccaaattaccagttctctgttctgccaaaccttcgaagaaccactgccagtcatttgatgactgcaatttatctcaagttaagtcgagtttcagtcgtcttcttctttgtttcgtgtgatcactgggttttatttaataaaatatcaaatcaaaaaaatttagagatatctatttaagattttaaaatattttttaaaaaatagttttaatattttttttaatattattttgtgttaattttaatatttattttcattttttatttataatttttttaaataaaattttatataatttttttgttataatattnnnnatataatttatttttatttaatatgtatatttagagaaaaaaatataaaaaaataattaatataattaaagatgtatatttgatataaaataaaaattatttaaattatgtgtaatttttaattttggctttgccacaacattgttaaaaaaaggttagaattgagtgtggatgttga

SEQ ID NO: 75510 - DNA, 808 bp, Cannabis sativa
aaatgtttaatgggccggcccaaagtatttttgtaattttttttccttttttgtatttttttgtttttttccctaaaaataaccctaaatagtgaacaaaataataaacaaccaaaaaaagcccaaaatgtagagatccattaatgaacattaaaacaacaactcataaaaacctaaaaacaacattacacaaatcaaataaactttaaaacaacttataaataacaataaaacaacacaaataaattcattaaataataaatctatacaaacaaaaacagaacaagaacaatatcacgaaaaaaaaaaaaactaaatttaaacaagttcaacctaattaacaaagcacatcataactaacccattaataccaaaagtccaaaaaaatgtaaacccctaaaatagaactaaaaaattcacaaataaactataaaatacttgacaacaaaaataaatgagaaaccataccttgttaactttctttcctttaaaatcttcattatcatatgggtatttattagaccacatccaatgttttttagtctatccagatcttatctaattatatattggatattagattttaccatccgatccaattcatttcagtcatccaatcaataatagatgttggattggatcgcttctatccgttaaatttcatatatatatttgtttaatttaagtttattcaatattttagacatattattttttggattgaatcggatccatccaatattttaggtctagtatgtattggattggattgaaagagtaaaaatttaatgttaatttttatatatac

SEQ ID NO: 75511 - DNA, 886 bp, Cannabis sativa
acaaaaatttaccacccatctgactacagtatatgtattcgcagaacctacttcactatagatgaatatgtaagattttcaaactcatctaacatgcatattattccaccccatttgtccgcatgacaatatatcgcaaagtctacttcactacggatgaaaaatacaagatttaaaaaaaaaaaaataggtaaaaacagatgaaaaatgaagaaatggaggaagaatggagtggttgggtgagagtttcgtgggtttgagaggagaagggctgctgattattttagggtttgagaaagacgatagctggagagggttatataataaagacatatggcgtcggttattacaaaataactgacgccatatgtatttttttattaaaattaaaaaatcacctacaaagttggctattacaaaataaccgactccgtagggtttttcattaaaattgaaaaaattattacttacagaattagttattacaaaataaccgattccgtagatgtttttattaaaattttattaatttgctgaaaaaaaaactaaaggtttattttgtagtagtggctggtgaaaggaagtcgttaaatcaactattaaaagccatggtgcattctgaatagagtctccaaggcgatttagaagttgccatgtgttagaacgattattatgatccggagttccataaaaaccagtaaaagtgaaatgataatagttaggaaactggatataacaatgaaaatagcttatattatatgaaagtacgtagaattacattaacatcctgagtccataacagaaggaggtattgaggccgacccgagggacttcaaggccattgacaaaactcagcttagacggaaacttatttatagcaccaaca

SEQ ID NO: 75512 - DNA, 624 bp, Cannabis sativa
  modified_base (548)..(548): a, c, t, g, unknown or other
  modified_base (574)..(580): a, c, t, g, unknown or other
atattgctaaggaagtcaactactgcagccttctcttgtctgctatataattggagccaatccccctatcaccatacttgaatgatttgtaagatttatatggaaggaatcagtggttaaagtgtgtcttcttgcttaggggatcttcatcatttgattccagaatatggagcaaagggataaggtgatgtagcggggatatgtcttctttgacaggatgcctatggttatgaaatcttggaatccaattgatgatttcaccaaagaggaagtaaccaatgtaccaacttggattcagctaaaaggtatagacataaaatactggggggcagacttccctattcaaaactgtggcccaattgggagaaccactgcaagtggataacattaccaagaacatgaattgacttcagtaccccataatccttatccaagttagcttatcacaagaagttcttaacacgatatccttcactgatgaatttaaccatgatattgatatggaagttgttggaattatattttcccactcagttatgctatcatgntcccaaaatatatgtatcaccctgannnnnnngtaggcttaactaataaatcaaaagaacatgaataacactcttg

SEQ ID NO: 75513 - DNA, 1252 bp, Cannabis sativa
tatctcaggtgtcctttcttagacacattgtcagtgaagatggaattaaagtggatctggcgaagattgaatccgtcagggattggccgagagtgaaaatagttacagaggttaaaagtttcttgggtctggctagttattactgtcagtttgtagaggggatttctaatatttcaacgccctttatcgagcttacgaaaaagaatcagttatttgtgttaatggacaagtgtgaagcaagctttcaggagctaaagcagaggttaatcacaactctatggttagccctaccttctgataaagaaaagtttgtagtttattgtgatgcatccagacagggtcttgggtgtgtattaatgcaggccgatcgggttatcacctatgcctctcgtcagttgaaagaatatgaacaatgatacccgactcatgatctagaacttgcagtggtagtgtttgctttgaagacttggcggcattatctctacggagagaaatgtgaaatttatactaaccataagagcctcaaatatttctttactcaaaaagatttaaatatgagacagaggcgttgattagagttggttaaggattatgactctaaaatcctttaccatcttgggaaggccattgtagtggctgatgccctaagtaggaatggtcccaggcaggtaattagtatgattcggatttcacctcaattagcagaggacatggtcagatcaagcatcgagtttgttgtaggtaaacttcataacttgacgctacaatctgatctgttagaacaaattaaagctactcaattaactgatccaggattagtgaagatcagagaagaggtttttgatggtcaagccagagattttacagtgtcagatagtggaatgttgttgtttaagaccagggtttgtattccaagtagtcccgaacttagaaatgaaattcttgaagaggctaataccactccatactccttgcatcttggcatcactaaaatgtaccaagatcttaaaccctacttctagtggagcgggatgaacaagaatgtggtagaatttgtatctcagtgcctaacttgtcagcaaattaaggctaaacattagagactggcaggtttgttgcagcctttggcacttgttgagtggaagtgggagaatatcaccatggactttgtggttgggttacctagaaccacgagtatgtacgattcaatttgggttgtggtagatcgattcacgatgtctgcacattttct

SEQ ID NO: 75514 - DNA, 610 bp, Cannabis sativa
gggcacaaaacccaacagtatgctcgtcggagcttgtctaatagtgaggggtaggcagatttgtcccaaagttgcaacgctttagccagagaaacagtatatgagctgggtgcaggggatcagatctttaagttggagtcccatcttctcataagttgtcttaaacaatatatttgaggaggctccattatctatcatagtccgtgccactgtcttatttgcaattggcacctctacgaccaggggacgttgtgcgggaaatggacgtgggcgacatctgcttcagtgaatgttattgttggctcccctgcctgtggtatttttagtattctctcctccatgcccaagattgtttcattttattcgtgctataaggctcatgcatacttttctcgagctttgcccgagtctccaacaagatgtggacccccaataatgacatgtaaatgcccatatactggtggatgcatcaactggttctgattatagtgtgcttgggcagctcttttgttctggtcagccttgacatacttctgtaaatgcgggttattctttctgatcaaaaactcaagttctcgctacaaactattacatttgtttgtgtcgtggt

SEQ ID NO: 75515 - DNA, 1298 bp, Cannabis sativa
  modified_base (1270)..(1271): a, c, t, g, unknown or other
agtaaaaagacttatgtggccttcggcctctatttacctacacaaagcagttaaagttagttacaaaagtttagtaatactttgtaactaactctcctctctttgtgctctaatacaacatcatatataaactagtagcaacaaaaacaagaagacagaacataaataccagattagtacaataacaacataaaaaaaaaaaaatagaatacacaacaaaaatcatatcagttttcaaagaggagaaattgagtgatttaggggttcttggaggaggcttaaaatggagtaagctttggaaccaaggtggtggttcggatatccatggccagaggatgttgttcatgcaaaagaagagaagaaacacaacattgttagtactgatttagagaggaaaaacagagagaaaaagaggagaaaattactgtaaaatattcagattaccaaaataaatacttgtgtgttttggaatccaaacccactgtaatcatttgatcattgaagatccatagtgaacgaggcgagctcgaagaggacgtacccagcacgattttggggaacctctataaaaccggcgttatctcttccttttatttttctgcaattttttatattgtgtttatgtgtgtatgtttatgtgatttctgggttgttgaatcggcttgggaaaggctcggtttaagggattttttctgggttttgtttatgatcagggaagggtgaataatcgggttgtcttgattttttgggtttgatctggtgtgcttttgtggttgctgtcttcgtgttcttcaatgaagaacccgaagaatatcctctggtagggttatttagttggggctggtgatgataaaagagacaaaagaaatatacatatgtctgatgacattttagggtttctagtgtgaataaacgacctgtagtataactttaaggaggcctgtcgtttgggctttaatttttggggtcattagtgagtttgactggggtaaaaaggtccaaattgaccttggtatattgatcaatctattgttgtgtgtagggcaaattgggaataaaattcctctagtggtatcagagtcaaacaaggcacaatctgcagtaaagattaatcaagaaagcataaagaaagcatcaagaaatacattcataccagtaagaattcaaatacacaaaaccgagattgcaaagaacagcaacaggattattctaaactcattatctatataatttctttaaaataattttatacatatacaattatgagttnnatgaaggttgatatagataagtttgat

SEQ ID NO: 75516 - DNA, 747 bp, Cannabis sativa
tcgatcattgtcggccagaaataaccttgccttagaattttcttacataaactttgcctggcggcgtgatttccacaaaatccatcgcgtactttagacgaaagtcgtgcaacttcttctttgggtaacacatctaagcaatggcatggagaaccctcgtctgtacataattccctctactatgatgtaccgtgcagccttccttctcatctttcgagctttatttcgattgtttgggagttccccagtgtcgaggtacgtcactattagcatcatccagtttgggaaagtatcaatcatttcgatctcctctgtgcaaatgatgttaggttctttgaggaactggataggacccaagttcgctttatcattcacattactactcgcaagccaagctaacgcattaacagtcgtgttttcttccctcggaatttatctaagaccgtagcgtttgaactgtgcgagcaggtcgtgtattttgctcaaatattctatcatcttttctccccgagcctcgtattctccagattcatgatttaacaccaactgtgaatcactgcagattttaatatgcacggctttcatctctcgggctagctttagaccggtgatcaaagcttcatattcggcctaattattggattttttaaatccaaacttgactgtagcgtgcaggtgttgccccccaggtgtgacaagggagattcctgcaccacatagttgatccgtagccgacccgtccacatg

SEQ ID NO: 75517 - DNA, 975 bp, Cannabis sativa
  modified_base (61)..(75): a, c, t, g, unknown or other
tgttttcgtgttattttttggaaaactgtaaaaatgtaaaaaaaaacattctttgaacgtnnnnnnnnnnnnnnnttacaaaaaatagtgccttatgtaattattcctaaaaaaaaccttaaaaatatattaaaaaaaattaaaagaaaaatccgttttaggtatattgtgtaatttctcatccttgaaatcttgtcctaaaatgtgtctagcggcatactaagaaataacttaaccacctggaaatttgtaaaatactttgacttaattccaaagcccaaactctcatggcccatgatgaccagcaatagaaaaccaccttgtaaaaatcccaagatagaatagaatgtttcaatgtagtgtatgcatattcatgtataatataattaggaagactgtctcgatcactattcattcacactcacaggccaatcccaatattgaattatcgtgtagccattattatttagtaaattaatagagtttttaaacgtgtcaaacgagattatggatatatatatcctaataataatgaatataattcttcagtggcaaacatacctcatgtagtacgaacaagtcataatataacaaagttattgacatttccaactttaaatcccaaatccgcgcatattaatttattctaaaactatctatagtgaacgcttcttatcaataatattcatccatttgtacgaaatataaaaattatggaaacaactatggtaaagtctttatctatttacacaattaagaaaaaaaaaattaatttttttaataattatatacgtcgtaattctttaagatcacttataaatttttttaaaaaattaaatagtttaccgtaaaaaaaaagaaaatagttatacatataacaaaatataatcttacttttcacattttaaattatttaaaaaattttaaaaatttaactgtcctaaaaattataacatatgaaaaaaaaaaaaaaaa

SEQ ID NO: 75518 - DNA, 658 bp, Cannabis sativa
gtactttagagagaaaagtaagaaggtgtggaggaaggaagccaccttggagttggagttcggcatgagggctcaatttatgtagttattcaagttagattttaaggtcgaaatctttttgtaaggtggagctaattgtaatgaccgcatagtttaatcatgagaattagtagataatcagttatttaattcatatttaaccagtgtatgcttctggtcgaaaattagggatagttatcaaaaaataagccttagaagaataatttatcgattttgaaaattttattaaattctagatttattatatatgctatatgttaattttagtattattgagaattgtgtccggcaatagtggaaaagcgacggattggccattagtgtcacatactcatgtttaagcacttttttttagttgtgggacacataacaaaataacttagtatttttttcttgggttttgttactttttttaagtgaggaagatagtggatttactagaaattcctatgttattttggaagctaaaagatatagcttagaagtgaggattgggttattattactcaaaaaaaaaaaaaaaaaaatcaaagagactttctctcttttcaaagtctttcaatcccatttttttaaggatttcagtgcgaattaagga

SEQ ID NO: 75519 - DNA, 894 bp, Cannabis sativa
agaaaaagcctcctgacataaaagtaatggatgacgctgaagaaaatatttttcaggaaggaatcaatcatcgccctggaaaagagccactgagttctcaaggatctattgagtaatcacatgaacagagtgcaagccccaggaaaatccagtattggggttcctggcttgactgagcttgggtaaacaacgaccggtcacttcctaacaaggttgatgaggatggcgcctacgacccaaccaggtacataccaatcgtggaattagaaaattatcatcttaggcatcgaatggaggaagccaaccagcgtaatgctaaattagagcgtgaaatagctgcagtaagggcagaataggagaatagttcctgaaatcaatctgaccttggaagaagagattcacgaggcaaaggtcacaactcgcaaaccaagggtcaggaggcaaccctaagatatactcagaactctcaggagatgcaacttgaggaaactgaggaaaatctggggatgcagcctgggatatgtggatcattggacagaaatcgccaaccctctcttcaagttcataagaaaggaactcacacaaacccctataggggaacaaggtgaatcataccttaagaggaagagaagaacgagaagaggtgaggggtaccacgagtcgtacagtatctcataatcgacccgtgcgaggagaagagaacactcctcacaacaataatcaaaaaggcataatacaacatgtaggacaagcaaggtctaacagcagtcatgaccagtgtgacctacaagaacatttgaacttgagaaaaccggatcttcatcaacgactcagtccaaaacaatagtccatttgtgaatgcacgagttggagaataagttcagaaaacatcaa

SEQ ID NO: 75520 - DNA, 915 bp, Cannabis sativa
cacccactataaatttttatatataaaaagaatattagtggttaaactacttgaatttttcagtttgtaacagttaatcacaaaaattgaaattttagcgccataactatttaaaccctagttttgctttgctctgtacccttccgtacaaaaatcacagttaagtgccacggtggactgtccgacgtgtacacacttgtacacgtagtaaatttttagtggtccacgtaatattaatttctaaaatattataaaatttaacttaaaaattataaaaattacaaatatatatataaaaaaatattttattttactgttctctttttcttttcttgtttcctttcttcttcatctaaactacacactgttattatcaccaccactacaaccaccataccaccaccaccaccaaaaataaaagatcttatatttttttaggaaaccaaaaccaaaacagcaaacaagagtttcatgaggaatcacactaagggaaagagaaggaaagaaaaatggagctcaaaacaagtcctggaacaccatcgataatggctggccgagaggtccattagagcactgtcgtgcatggtggttgttcccggtcgatgagttgtattagggagagaactatgggatctgaaagttcttgagaagggaaacacaaaactacaactcacttggctcaaagaggctcgaacttggccagattgaagttgagaagccttggctccggcaagcacctgacagcggcgaaatggtgaagggggaacacggggttggggttttcgatgcctggtaatccatttctggggttcgtgtgggctaaagaggaccgattgaggtggtccgttcggtcctctgttaaaggaatattcaagcaagagcattataatcactataatcaaatattaatccaat

SEQ ID NO: 75521 - DNA, 1333 bp, Cannabis sativa
ctctctctctctctctgtaaacactttaaaagactcatggaaaacttttggtggggatctttgggcaaaatcatcataaggttcactggaaaaaatagacccaagtttataactccaagttttatgggggtctcggttttagggatattgttcatcaaaatcaggctatgcttgctaaacaagcccggtgcatatacactaactttgattcccttatgtcttccctcttaaaagctaaatattttaaaaacaatgattttcttcatgctcccattggtcattatccctcatattgttggaggagtcttctctggggtagggaccttctttctaagggcttagtttggaaagtgggtgatcgtaaatctattcacatcactaatcctaattgaattcctgattcaaactctatctcttttaaaaatgattctcctccacctgaaaacatagtttcttatttcatcggggaggatggttcttggaattctgataagctcaatttttttttcatcaggagctagttcactcgatccttaaagtgcctattgaccccactaatatggattgtctcatttggggacacggtccttctggatctttcacagtcagttcagcctaccacctagccaattctaactctcccaatcctagttcttccaatcctgagactttcaaggcttggtggatgtctgtttggtcctccaatgttcctcccaagataaaatattttatttggaaggccttccaccacctactaccttctaaacttaatctcttttccagaaagattattgataacccttactgctctgtttgtttaaatgaaattgattctaatactcattccctagtaaaatgttccagggcaggtaagtattggaaacaaacccacttttcttctttctttcataataataaagtttgtgacatcaaagaatttcttttaagaggatttgatttgtttcaaaaagacgagttggctatattttttggtattttatgggctatttgaaataatcgtaacaagttcctcttcacagataataggaagttttgtaaggatatagaggtttctataacttcttatttgccaaagtataaggaagctcaagataaagtcatatcatcaccaaatagcactattcaaaatatcaactctgatcagtggggcacggaatctctgttttcttctccagtcaagtataaattgagtgttgatgttgcggttaagaaccaggattgcaagcatggatatggagccataatgcaagactcacaaaataaaaaacagtaaatatagagtttaaaggtgttagatattagctgtaaaaga

SEQ ID NO: 75522 - DNA, 807 bp, Cannabis sativa
ttgtacctcctaagcggcatatatagtcagagtttgtattctagaagcttgttggattcctactccttgaggagaatttagagctcttggctgtctaagaatagaaacgtgtccatgtgttactagttgtttgggatagacgattggaattcatacccagttgtataagtggcctttgcaaactaatccttcgattcatccctcaaatagtcacattagtttgttgtatgcacattaccaaaatggtactcacactttttattagggtccctcttttgctttccatcattgtttattggtggaggccttttgtaatgtaccatgttgctagtagctttgtataaattttcccgaatatcgattaagattgtgtactcagagtatcttggttcttgggtttttcctttcttcacagatttgctccaacttggtactttggaacttcttttgccccaagaactacttacatttgatttttgttcttcattctattgattcatttttttgggagcgacattatatcaggtttcagccactccaaagctagagaaacttgaatgtatagttggctgtgtagaagtaccaaatccataggcaattggtgttgtgaatgtaggtgtcgaaggtaaaatagccaaagcagttaattaagttgtagaagtgtttgttgatggtgctggaagtactccataaacctgagcataagcatattccaaatttatgaatctttgggctctagataagaaatcatataatgaatctgcttttcatctttcaagtttatcccccaacaaagatctagtgatt

SEQ ID NO: 75523 - DNA, 885 bp, Cannabis sativa
cctgcctggagcgattatcaatctttgcttattgggctctcatgatcttcatttgttgatccacccactcctagaattggcatttttactgttcaaattccaaattcacaactgctcgagtatcctcctgatcatggtgaagagttttggtatgttcttgcatcttctctaaggcatctcgcagattacacagcttagtatcatcaccgatcactgttcgaggttttccaataggtggatctctagtacatggcccaatctctcccttatgattacctatggttctagtttcttgtgtgctcatagtaaacccagccaaagggttgttaccccctgtcctactgatggtggaactcgtggtggtaggcaggtgcttggatcaggagtttccaccattagattactctgattagcaagactttgcacattaggatctgtagccatcaaatcaattgtttcagtagtttgggaccttctagtagttacaactatctttggatgatttagagaggatcaaagcaataaatagtgttctttttgctctcaatgaaagcaccaaaatgttgacctcacttttagccaatgacgccgagtcaattaaagtgatgagaatgattagaaataattatatgtaatttagcaataagaacacaaagatttatagaggttcagccccgtgattatggtaatagcctactcccttttttgttgtattactttggagaattaataagatcacaaggagctggccaggtgagtttgttaagaattctctggaaaatctgaaaattcttttacagcataagagctcttctagaaaatatgatttcggatccctctgtaatggaatggctccactatttataggaaaaattacttcaattt

SEQ ID NO: 75524 - DNA, 634 bp, Cannabis sativa
cactaatttcttgtaactgatttggacagtggatgtggggatttgttttaacaatttccacctgaatcctcatatgcactcttaatagttgtcttagttgttttctgagagtcttagctcgaacccactaggggttttgccaacctgtgtctatccctaataagcttaagcaaaacttaaacttattaagggaaaccaccttggtttccatgactgttgggttcactacagtaggcaccttttctatttctatttgtccttgagtaaccttgtccctgataaaatgatatttgagttctatgtgtttggtcctgtcgtggaacacatgattcttgcatagatagatactgctatggctatcaaagtagatgatatgtgttttcttaactaggtttagctcttccattaatcctctcaaccatagggcttcattaattgcttctgtagtagtaatgtattcagattcagtagtggataaagccactactagttgtaattgtactttccaactagtacaattgcctcatgttaaggaaaaatatgatgatgtagatcttctagtatccatgtctcctgcatagtctacatctatgaaccctttaatgttttgatgtgactggtgtgcttggtatat

SEQ ID NO: 75525 - DNA, 1016 bp, Cannabis sativa
  modified_base (52)..(62): a, c, t, g, unknown or other
  modified_base (124)..(131): a, c, t, g, unknown or other
tttttttttgtaataaaccgaccaaaaaaactgaaaccgaccgttatacatnnnnnnnnnnnttaatttattaagtttttttttctattgtatttacacaatatataataataatatattattnnnnnnnnaatattaaagttaaaagaataaggcaattaacttgtatggttgtagttgtagaatgtagaataatgtgcttatagaataaattagatcatattttaaagaaaaaaaagaagttcggtttgggcggtttaaaccgaccaaactgaggttcaaaacggtcggttttaagataggttctagattagtcggtcagtttttagattgcaccaatcaagacaaaaaaccgaattctggatttttatatagaaacaaaactgactaaatcgactgatgctcatccctactcggacccgtgacccgaacccgagacccgcgacccgacacttggacccggacccagacccgggactcagactaggaccaaaactcaggattccgaaactgaaaccccaaactcggggcccgcatctggacctaaacctaaactagggacccggactcgagacccgcaacccgtagttggtgttaatgttgagtgtattgaaaatatattataactttacacattctattaatacaagttaataccaaacataatattgtataaataatataaatacaatacaatacgtcgtaccaaacaaactgttaatgagtatttcatcaatttctgactcattcacatgattttataaccttcacataatttcataactcccaaatataattattcttttaattatatacaatcaagcttggtccataagttataaaaatatatttagatttggattacaaattgtgtattatttctcatataataaatatacaaattagttagtcacacattaatatataacacatatcacattttatcacatattatcactagttaagttcatacagaaaatattaatcgttagcgactggttttttttttttttttt

SEQ ID NO: 75526 - DNA, 659 bp, Cannabis sativa
ttaccatcggcagtggtggacggcgtaaccagggataaggggtttttttttttttgagaaagaaatggtatttttgggaagaagaaggggttatgcgttaaaatggatcctgggttttatattttaatatctgaggagcttatccctggcgacgtacactgaccacgtggcgactttgtcaccagtgaatgtttaagagggaaaaatcccgcccaatttaatcgatttttttaaaaaaattaataaatactgacgaaaatttcgttattagtatatatctcaatgacgaaattttcgtcagtgatatattttgtcgccattgatgtatacttcagcaaaaaaaattcatttttattactgaggatatttaaatgtcgttggtaataatgttacctttagtgaggattttttggcgttagtgatagtgccgttagtgatacctattattcttgtagtggtggatgaattattctagaaggatgtaaaaacccatttatactaatttaagctccattagtgaagataaataacttcgttgtttcgaaaaacattggaaaggttattcaactgaagaaagttctatactgtgttatctctattccaatttcggatagaattagagatacgtcttctgtttattcagatgcacttaataagca

SEQ ID NO: 75527 - DNA, 686 bp, Cannabis sativa
aatttgcatctgatccgatccaattatgattggatattcgattctattggatcggttgggattggattggatgactttctgcacacccctactttctagatttgtcgtcttgtaattgactagtgatactccttaaaaattattgcactaaattatatgagactcgatacttaattggactaataatgatattaacatataggaggtgctagacactactagtgtctttgaacatctatttttttattgtctacatgaatagtcactaataattaatttataatataattattcatattgtcgataattaatttgtgattatttttacaacaaattaaaagaagggttacaatgtaaagaaaaatttatacaacaatttggtgtagattcaaaattcaatacactaataatagtgtgaaatttggtacataccaatttggtatctctttagagtggaatggtgtaaagatttcacactaatttagtggaatgatgcataattgaagatacttcaattgtgtgaaatttagtatatcattgaaatgatacgaagattatacactaatttaataaaatgatgcattattaaagatgctcttttaaacaataaaatattttttatttatcaagaaacaaaatctttattaatcacaaccacatttacaaccaaacaaagcctacaaaaa

SEQ ID NO: 75528 - DNA, 931 bp, Cannabis sativa
tttttgctcaaggagttcacttcagaagacatttttgaggctttaaaaagtaagggtggagatagaagtccaagtcctgatggtatgtctgctatgtataatcaacaaaactaggatattgtgggttctttggttactaaggttgtgcttcatgtgttaaatgatggaggaaattcagctgcttttaacaaaaccttaattacattgattctcaaaattaagaagcccaagactatgaaagatttctgaccaatcaatttgtgtatgtaatttacaagataatatcaaagatgttggtgcttcgcttcaagattattctcccacatgttatttccgaaacttagagtgctttcttaccaaatcggcgaattacagacaatgttctcgtggattttgaacttgttcattatttgaaacataaaacccgaggtaggaaaggatttgttgcgcttaaactgatatatgagcaaaagcctttttgatagggttgaatggtctttcattgcatcagttatgggaaaaatggggtttaattttcgttggatttctctcattatgacttgcttacatacaatctagttttcatttcttattaatggtgtttgttatacccgaaattcgactagcacatcagaggaggacacgtgtttaaattggggaggatacaaaccaacccacgtaataataattatacttgaaatggaatatctcattaaaagcgaaattgacagagtatatttacaacttggttgactgaatagttttatgcgagataaagatgtacaaactgttacctcgtgtatttacgagaaaccatgtaacttcaagcgtacaagacgagccatcaatctcgttacgcattagaagacgagatatagcaactaatgaggcacttaacgtataatacacggtaagatagtcgtgtaagcac

SEQ ID NO: 75529 - DNA, 946 bp, Cannabis sativa
tgcatttgtttagaaaagtttgcatgtgttatttttttaattgaacatgcataaaaattacagcaattaaactaacaccctattcaaacaatacttgtatgaagcaaacattcaaataaaataccaaacaagctgcttaaaaaacagcagcaatggctatcgtatacgagaccaaaaccaaattctatcaatattaggggtccatgtaaaattgtgtttttctcaatcttgtattatacatgagtaggctttgaacgaggaaaagtaaaaatagttcaataaaatggcaaatataatataaattaagaaagcaaattaaatgttcaatcctaattgacagctcaaaatccatatgcaataaaacacaacaccgttacaacgatcagatgcattttattggaaaaaagtttgtatgtgttatataattattagattaaatttattatacaaggcaacatatcttatatttgaggctcatttgtctttgctgcaatagtgtttcttcaggtatttttgccagttttgtgaatgttcccaatgctctattcttgttgttccaataccacttttgtacaagactgtagaggcattctattaatttttcaactggtaattgcctgatttctttgattgctgaattaactgattcaactatgttacttgtcatggttgcatatcgtttgttggagctgtatattcttgtccatttgccaataccaacttcatcaaacaagtatggttttatcctctcatcaatactgtccaagtctctcataaagtcttcaaattcagtttttgtgtaagctctggaagcaccattgaatgcattttttagttcatctcctcctttttttagaatttagactttatgtttttgtacaagtgatagcaacatacaccatgcatcaaatttgggaaattttcttttgctgcctttgcaatgctt

SEQ ID NO: 75530 - DNA, 840 bp, Cannabis sativa
atagtgtgctgaaattgtcttgggtggcatgtcgatcatctaaaattgtgttagacaattttcagtagtttagtgatattttattgatatatagtttaagggtccatgtcacgtttcttggagccattttttaagaaaatgctacaaaatgttgaggatttgatgagggacatgtctagtgtcaaagctaacgttctaatttattgccctattacgactggtaacagccgtgtgatatcgaatgtgaattctaagcactatataaaaatgttttatttgtgtaacttagttttctaccaatttaagcacttgctaaaaaatacaatacttgattattctcaaatttatttctagtcgactatccaaaacacccttccaggatgaacaactagccatccaaaactcacttcctaattggatgactatctttcttgaggttaacacctgaagtagacatgatagtcatttgagaactcactttcggatagcaactatcattctaccagacttcttctagattgacaggtaggggtgttcatcaaatcattcacactgcacaaactgcccataccgcataaaaaatacggtttgaaattttttgtagtacggttgtgaattgtatttttgctaaaccacgcgcaatgcggtgcggtttgcgattttaaatttaataattgcggttcaaactgcaccgcactatatattacaaagttactatataatttttttttaatatgatttatattcttctttttcatataaaataattatatcggcagattatattatttttttagggtaaatgccattttagaccttgtgttttgtaaaaattaccaa

SEQ ID NO: 75531 - DNA, 986 bp, Cannabis sativa
ttaggatattctatttttaaggactctggagaataaacttctaaaccatattgggacatttttacaaaaagagcaatctcaattcttggataaaattcatcaaactagaggcttataaatacgataaacctaaattcttactcttcctaaaccctaaaggttacccaaaaaattaaatcaaaattactaaaatccaacggagccaagaaaatgcaaataataaaataatgatcataacccaggtaatgaaaaagatcagaggaaagaggatggatcacttaccatacggagtcgagttgtcacatgatgaaaagctctgcaactgaggatgggatgaatagcatgatgacttctatgtatacttgaggatgaaaaataaattcgagtagatgcgcaagaaatgtgtcaaagacaatgagggcatgtaaggtttcgagaaatcagaatgggttttttgtagaaaagcttgaaattttttgaaaagatgaaaatagtggaaaaatggttcctttttcattttatactttaagcataattaccgtaagatcaaaggtctgagatccaacggataggaataagggagaattggaaaggatggctcattaatgctaatgatatgcttcaaaaacataaaccgccaaattcaaaagcatatattttttcaaattggattatgacgaatatacctcagtaatcatttactaagggaaatttcattttataaaatactatcctaataactcctcattttacccaaaatacccttaccatttatttttttttttttatcaaaacctgaaaaacttaaaaacaatccaatctctctctctctctctaaccccatatgaggagaaccgctttccaaaaagaaaaccctacagccgccacctaccgccgctgggatactcggccaatctccttgaaggacatccgcccaaccttcttttatcagcccaaccgccgcccctcgttgtgaaggatgtccg

SEQ ID NO: 75532 - DNA, 507 bp, Cannabis sativa
aatcttagttttggctgaaatgaggatctgattaatttttatcacttttacaaattggaaaaaaatcaagaaaaagcaaaactctttttctctcaactgcctctctatttcggccctctttgagcatcaagaatcttggtgattctttggtttttcaagcagattttgagtgcaattcaaggtctaggtatagctcttacccttcccctctttagtttcttgaaaatcaagtaagaaattgattgcatgtttaagaaatggtggctgtggctgttgtgtgagcttgttagtgatttgtgtagcttatttatgctttaatatgttgattcaagcaagatcatgttgatgattagttggttttatttcaaatatggaattttaactcaaaactatagttttcaaagaaaaatgaagaaacttgttgctgtgattgttgttgctatgtaaatttattttctggtgttaaattaagttgaaataggttgagataggcatgatttagtggct

SEQ ID NO: 75533 - DNA, 660 bp, Cannabis sativa
  modified_base (27)..(30): a, c, t, g, unknown or other
aatctgattatattaaaatggattttnnnnagggcacaaaacccaacaactagtccaccgtccccctggagatagtcaccttgctcaagctaagggaaagatgaccgtcagactactcttctaacggtcatgattttacacattctttatcaattcagtctcggtatcctcgtgccacatgtcatcatttttaccatgtcattattgtcaaaatttgggtaaacatcgtgtatactaaatccagttgcacttgtggttgataagttctcactaacattacgccaagcaggggtttgagaagtcctagaagcttcacggatgctagcgagttcattggcgatacgagcttgaccattcatcaacgtctttagttgttatgtgatcacgaccaagttgtgatcatgggatttcaaatgttctttcatgcctgaaatctcggcatcaacaatctccattctcgtcaacacaattcacctgaatcggtgctttgataccaattgatatgatttgaactgttggtgtctggttaataacaaatacaacatctatatatataactagggaactaagccgcgcttcgcgcggtattgtccaacttttataaattatacatatatattatacttattaagtaaaataatctaaaatataatattttga

SEQ ID NO: 75534 - DNA, 1267 bp, Cannabis sativa
ttataaaggtacaggatccaaaatagtattacccaataaattatttgaacattactttatgtattgcaaattatttcgaaatattttatataatatcttaaataattataacgtacacaattattaaaaaaataataaattaaatttttatttaaataccgaaataagtaaataaaaatatacatcaatacatcttttttaaaggtacataaacattaaacaccttatagttgataaggccacatgtaaaggattcggtgttacactactataacattataataataatattaatttttgtaacgaacatgtgtagaccaaagtttttatttttattaacaatttaagtaacccaaaagagaaaatatgggcaaaagtttcttcatttcttgtcaaattaagttcttcttcttcttttttttctcatccaccatatgttatgtttacaatttttcatattttattttttgttattcaaaagctgcctagctaacctattaatgtactatttatttttttttaaaatatatatatagtttattaatctaaaacaaattaataatgtaagtatgattattaaatggatgatctcttctcttgagatatttattgcattttttttgtcttagctaaccatccacatgatccccataatatgtatagtcatactaccaccgtcttttaatactaatcaccaatcaatgcaccactacaagatttacaacaaagtctttcattaacttccattccacctatatccatagactatatatacattatatatacatatatatatatgtatagatacatatatgtatagactgtcacaaaatgtggtcgacaaggactcagactcggacccaataaggaaagtgattgtgacagttagtagtcctgtgatccgtaaagataaatatttgataagttgtgcaatttcatactgcctgagaaaggtcaagtgtgataattttaagactgtgttagtatgagactacataattaaagaggacttaaatagattgattgatgatactacatatatcaacaaggtgcatcttatttttcagtagtccatcacaaaagaacttgttaagcgtgtttgacttgaggtaattttaggatgggtgacttcctgagaaattttttcaagaactgtgcgagtgagtacaaagcacacaagaaatactcatgttggtttgtaggatcagtcgtcattccataaagcagtcaaagtgacgtactcaacccaatagagacttgaagcgga

SEQ ID NO: 75535 - DNA, 891 bp, Cannabis sativa
attagtttttattcgtataaccggctatatttttagttatatatgagacatttattttggtgacttttctagtgacttttctggcgacgttgacttcttgttgactttccggccacgacgacttttctagcgacttttccgacaacttttccagcgaccgtgatttcatatcttaaattagtaatcaatttcatgggttactgaaaagtattttttttaataaattttaaaattatcaactttttcatatgaatttttgtgaaatttaaagtttggttacttatctcttaataaagtgtaaaagaaactaaaatgttactttttatttatgtcattttgacatgttagaatcatagattttttgaccaaacaaaatttttggaatcaaagtaatttatagtttcttttatattttttttcttaataaaaaaaaaaagaactcataaattaaacaaattgtttttacctgttaactaatctcaaaggtgactataaattgtttgtaattttacatgtaaaagttaccataagatatgtattctatataaatttattttattgtatttcattaaattttatatatttttaaaaataataaataattaaaaattgttataaaaataaataaactaaaataaaacataattgtatcttactcaacaatatacaggatcaaaatgaaattatagttttaaaagttaaccacctaaaataagtaacaaaaatatatatgagataatatttttcacaaaccaaatgatattttagtgtcctatttttgaaatgacatctcataatttttaaatataattttttttttttgattaacaacatataaaataaactaaaaaattgctttgattttgaatatatggtttcaacatttttaaa

SEQ ID NO: 75536 - DNA, 829 bp, Cannabis sativa
tgactcttgcctaccgggacaacgttggattcttatttgatcggataaaaggttgctagtgtaaagaccgcttaagattaacactttggattattatataattagggtctatgcatgagattcaattattattgatgaaatgcatattgtggaaatttatttaacttcatatatgtttattatgctatttatgtaaatttctcaattcttgtgattaggttcggaagctgtggaaagcgacgttgaggttttagagagtcacattttatatgtattagaattttgttattggggtatcattgttgagtgttggaagtgttggaatttttggggactaatttacccttggggggttgtctattagtgaatttaattaggggcaaaaatggtaaattagttagagtttttcctttgtcttattatgagggataacctgattaatatttatgtttttaattgtcccattttggtcaaagagaaaatattaacctttgaccttcaagagataacctagaaccattttccttcaccctcaagttccctctttctctcttttctttcgaaccaccaaggaaccagctgggaatttagtttttcttaactcaattcagcaagttttaaggggattggaagattcaatctaaggtatataactctagtcctcttctccatgattttccttagcttaaagtatgttttatgcattaattttggtgtttaagttgctataggttttggggtgttttgatttcgtgtcatgggattagattaggttcatgttgtttgatttgagtttatttggtaagttttgataagatttggctaaggt

SEQ ID NO: 75537 - DNA, 639 bp, Cannabis sativa
gacgaattaaattttggggcccttgaaaatatataaaaaaaaaatcaaaaaaagagtgttatgggattagcatcaacctctaagctatgaatatttgttgcttataatgcacttaaattttacttaaataaaagcctaataaaattttttattttttttattttggcccccggaaagtgtgggccttaggcgcgggcctagcccgcctatacctaaggccggccctatatatatgatgcatgtgtacgtaaattttattaattttaaagctgacaattttatctagaattaacttgtttattcgatttcgtgggcataagtaaggatattactcgttcaatatttagaatttatgtactgtatatgttatatcctaaatgatataaatatatattgagatataagttgtattattttgtgatttaattaggttcatgatgattctcaccgccgagttttctcttcagcaacttgatttcaatctcttccatgacaacgtaaaggaacttataataatgtaagtacattgtaattaatagcatgattagtaatttttctagtaattaattaatacatgtatattgtcataatattaataatattttggttgcaggctaaagctgctgcataatcatcaca

SEQ ID NO: 75538 - DNA, 975 bp, Cannabis sativa
  modified_base (89)..(89): a, c, t, g, unknown or other
actcatcaaattcccccacacttgactcttgctcgtcctcgagtaagttaatgataaaatgaatgatacttaaacaaatcggtctttanggaaaataattttagtttcaaaaactgtacattatctttttataattcgaagaaaattcaaactcttcaatcattagaatttcaactcaagataattatttttcaaactcaatttatgctgtgtgtgtgtgtgtgtgtgctcaatcaactaatcatattattactaacattcaaatcaattaatgcatgccaacaatcaatgctcatctcaaaagaaatgtgtatttcaataaaaatctactccataagcttaattatcaaactattctccacgaaagtaattacacataatctaaagatcaataggactttataggcttataatgtaaggctagggtgaaaggtagataaggaaagttaatttggtctcaaatcacaccatagcatacatctacaatattctctcaaataattttcgtttgtattccccaatcactctcctcaacaattcaatcttgtatttttttttcataaaacttactattcccccacactgaaatgttacaagtattcatttatttttcattaatttattttttgaaatacttacaacttacaaaacattcattctaaatattaattttttttctcatcatcacttatacataaccatcaatatttttccctcaccaaaactctcacacattttcaaatacaataaacagcaatactatggtgtgaaaaatgatgaataagggatttttgtttaggctcaaaaggttatagtatagggttaaaaagaaaaaacaaatatgttaacatttaagctcaaatttggtaaaactaaggaattcacaaatagggtaggcttgaaaaactcaatcgatccaaaaaaattgcctatatcatatctcaaaattatgtgtaatttatcaatttcgcctca

SEQ ID NO: 75539 - DNA, 671 bp, Cannabis sativa
tttaaagtaagattttctgttttaaaagaattgttttaaattaagatttaaattataagttgttattgttatttatgttcccacattttaattttataaatatattgaaaaataacttagcagatgccaccttctgtggtgtggacaccttagaatttcaaaaagaaaaaaaaacaattgtattaataataataagttaacaagctataacgttagattagttgtgatcagataaaaatattttagaaagctggagtactgattctcttctcgaagctttagaacaaagttaattaaattatgaaatatgccgacaccattttgagtcttttaaagtatatgcaccaatataggtaagcaagtagccatatattaataagatgaagaattacttatatattattttttttaaagtacggtagttgccttagtttgtgtgaattttaattgtgatttaaatttattattttgttaattattacgtgaatttttgtaaaaatatataaaaaaaattactttaaaatataaaaataaaaaaaccctaataaaatttaaatacatgctgtttaattataaaataaatgtctaattttaaattttatactaaagcacgacataattataaatagccaaaatgtattatatgaaaaagtttaaaagaggagcatatc

SEQ ID NO: 75540 - DNA, 682 bp, Cannabis sativa
tgcaagcgtctcagatttccttaggagttttgccagaattatattagtcatacaaattatcagataaaccaatgagagtaaaatttttgcacaaaaattcattctcgacctagcttgctaaatcagcagtttgcttatgcttttcatcatccttagcagtatcacaaacaacaggtttatcagtcgtcaaaacaaaaataatcttttttcgtagtgaggtaaaaagacattttctgtctccatctttcaaaatgatttttctcaaaacaaaaaaaaattcatttatgtcaacaacactaaaatttttatcggtagtcatggaagaaatacaacgtcttaaaattgttgtaaatagttgctgtaaaaaaaagaaaaagaaacgagtttaccgaattaaagtttgggttgagtcgaggattatgttgctctctttaagacattcacgacattgttcaaaaatgtacaagcagattattaccctagagaactgtcgaaataccagacccaataatcatattactgttatgaatacatttgtaaacacacccacccccagttcggcacagtcggacgaacggcggcgagcgtgcgtgtggtgatccggtatgtgagtcctcacccatgcacagaaaactaagtacctcttggggccctattcatgttccaaatttacacattatat

SEQ ID NO: 75541 - DNA, 812 bp, Cannabis sativa
attcatgaataatatctattaaaagtgttccatttatatatatgcactagaggaaaatatttaaaaaaaaattaataaaattatttatctctataatatactcaatataaatattattctgtacataatatcaagtaagtgaatcaaaatcattagtgtactaaaattgattaattattttatattgatctaaaattttgtattattaattaaaattttattacgagttattgattatatacaactagtaaatattccgtatttcacggcggatatataaaatattttaaattatatttaaaattaaattgtgtattttaattaataataattacgtagtagaattatattaaagtttttattttactattaaaaaatttgtgacataaatacttaaaatattaaatttgtcgctaataaataccagaattcgtaaaatagtagcataaatcttcatttatagtttaatttttattctgatgtgtgtgttaagttctgggtttgaattttattgtatgtgttttaatgtttgagttttagtgttttactggagttctaatatttgagtatgtgtttatgagatctatttttttatttatttatttttatagattttaagaacttgaaatttgatgttgtttctattgattattgggattgagagtttgatttttcatacaggaattaaagtttgcctttttcgtttcattatttgaaaaatattagtagaaagtttatggaatacttgacattaaagttatcatttcaaaaaaagacgtaaagtaggcttttattaaaaattaattaatatt

SEQ ID NO: 75542 - DNA, 885 bp, Cannabis sativa
  modified_base (807)..(808): a, c, t, g, unknown or other
ccgcccgatgttcagccctagttcaaacagtctattgcacgtgtgattcttttattttatatgcgaatagactgtttgaacacaatttttatattgtaaattattcgaacaaataagagttgcatcagtgtacctctaaaatttttaggggtgcattaaagaatcacccaataatttttattttattttaattttttttatcatatttatttttaatgcttaattaattttagatattttctattattttttataattatttaaataataaaataaggtggaccaatgaaaacccatgtgtatccttatgtacactttgccaaagtggatggaaatctgaatagcaaaacaaaatgagagtgtagaaagtttagcccccaaaaaaatataaataaaacataataaaagaactctttttgaaaatcctgcttaatttaattaataaattgagtggaatagtttttggtgtattatttttttatttttgcatagttatattttatatataaaagaatctacacatgatttcacaaattttataatttaagctatttactaaactattagtatattataaatactaatactccaaaaaaaaaaaaaaaatggcaatccatgattggttcaagtcattaaatttttattattttaaaaaaattagttcaaatatatcaataagaaaatgacatgtggatttaaaatagcttaacatttaacagttaggtacctacagggttccagaaatataacttagttattattaccgctaaacttaagtatttatttacaactgagaattaaacttanntatttatgccgcaaattattctttatttatttatatacatcacaaaagtatatacttgttcgtgcaagttttctctt

SEQ ID NO: 75543 - DNA, 634 bp, Cannabis sativa
aactctaagtttgtagataaatacttaattaaatttattgatactattttttgttaggtttttgatacttaatagttacagttacaacgtgccaattttttattagtccatctcatttcatatttatttttatataaaaatatatttaaaatttaaaaaactaaataaaaaataatttaaaatctaaataaaataataaatatttaaaattcatttttaatctaattaaattaaaaatcattaactaaagctctaacttaaaattaaagaaaaaaaaatatagtttacctattggaacacctcttcgtctttccccttcttcttctcgtgaagaaatttaatatacacaagaagcaaaaataatcaagtctaagatgtcgttaaacgaattcataacttcaaaaaaaaatcatcacatttatcggattaactgttagtcttatggtactaaaattatgcattagaataaaagtttgtgattatcattatatcatatcatcaatatcaccaaaactaaaccagtgagaactctataggagtcttgtctattgacatggtgggttattcttttgtttgtctgattgttaccgattgattcctggtgtttcgtttgtgctttgatttttcatttggt

SEQ ID NO: 75544 - DNA, 1250 bp, Cannabis sativa
tttgttatcttaagtattttcactgtctttgtctaatgttgtgcacatgtaggtgcctcccaagtgatcgagcagacttatggtcttttggtcacttacaattaaccaagctctttgcctgtatatccagtttcctgagcgaacctatttccatgcatgtttagacataatattaattttaatgagtcaattattagtaagttatttgacacaatttgagtgaaaaaaatcacttttattcatttattagtcttacaaatgtgtgtcgctggaaacataaatatattaaataaaagcttaaatgttgaaagattgattttagatcatcaatattgaatcacttctgcacgacataccgtgtagaagccatcacttaagagtgatgtgttacaagaagttatcgaattcctagacggcataccgcccaagaaccactatttaagagcagcgttttttcaaaaaaaggcttactagtagtactttctgagatgttctccgttccaatattttggtaacagaattagttccgttttcttaatctactaaccaagtttatacgcacctaaacttgtgatatctgtaacttggtacggtccttcgcagtttgggccaagtactcctactacaggatctttggtgttaagaaatactcttagaagtaccatatcttccataaaaaaatttctatccttgataacttgttaaagtatctggctatcttgtgtttgtaggcttgtaacttcaagttggtctaatctctttttccttcgatttcgtcaagggattctattagcacggtgtggtttacgtacttcttggtcataggatatccttctgtgagacggtggttctaattcgacgggcagcattacttcatagtcataagctaatggaaaaaggtatcttctgcctggtggctgtcctctcgatggtcctataagaccaaagtacttctggaatttgttcgggccagtttttctttgcttcttcaagatacttttttagtgtgtctttgaggattttatttatggctttcacttgcctattttcttgtgggtgagcaactgcggagaagcttttaataatatcatgtcgattataaaagtcagtgaacatatcgctatcaaattgcttactattgtctgatataattttttatgggagattgtatcgataaataatgtttttaacaacaaatctaagaccttcttagaagttatagtggctaatggttcagcttcagtccattt

SEQ ID NO: 75545 - DNA, 743 bp, Cannabis sativa
aaggcccaagaaaagtcttttcatagggacatgactccaaagaacaaccaaatgagggaccttatgcaaagcattctagcaaactacaccacacacactacaacaaacaactacttttagtgacaactttttggtcataacataaattttttgtgactaaatgtgacttttggtcacaacaaaaaattacttgtgactaaaatatagtatttatacacaagttgtgactaatttacttttagtcacaacaagtattataactaaaaccacatttagtcacaacaaattgtataatttttgtgactaatacctttagccacgaactttttagtcacaacataagaatgataattaataattactcataacttttttactttttgtcacaaatttagttgtgactaaaagtaagattttttgtagtgacactcggttgtacaaataatcaatcatttaaaagtaataaataagcagtattactattagagatatttgaaaatagaatgaataagatttttaccttctaaagaaactagtaataagaaaagttagggcggtgttagggaaaaacgataaaaaaactagaaagaaaccttcagactctcatcagcttggttcttatatttcgtcacttcagggagggaaatgtttttcagcaacatgaagcttcgatttcttcttaacaagccgatgctcacttgttttttgtacactactacaaaaaccccctttagaggcgggtt

SEQ ID NO: 75546 - DNA, 740 bp, Cannabis sativa
cattctgggttgagtactcgcataaattgtccataatattattattattattataatttattttggtgttgtaaaaattccttcaacaacacatatataccataatctctaagtaatttgcttctaattctaaaaaaaaatatgaaaaaaaaaattgttttttttttgtagcaaaagacaatatacataataaatagtctaaaaaggtcatttctctacaagttttgaaatgaggacatttactaacatagtccaataatttggggccatttactataatttctttttataaaaaaggggaatttgaaaaaataccctgattttatattttatttataattgtacggcataaaatttataattacaaaaatactctggtcaaattttaaaattacaaaaatacactttattcaataaaaagtaaaaagaattactaaaaacaacttgaaatcaataccgtgacaactataaatcaaatataaaacaactaaaaaaatctcatgaaaactataatacaactataaaaaactataacaactaaaaaaaatagttcattattttcactaaaaaatatttttgtaaataaaaaagttcaaagagtaaaaatgaaaaaatttctatgttattgttttttataaattctttttaaaatatttttatatataaaatgtggttgtctaacgaattttgtagctttaacggaatattttaaaaatataagaatattctattaaatttaa

SEQ ID NO: 75547 - DNA, 691 bp, Cannabis sativa
gttaaatcaacatacttgtgagtatatctaagttcctggtaaaataatttccaacaaataccccataatagaacattataagtgtgtctgatggccaagactagtatacacacactcaaatagaagactaactgttttcagttacaataaataaaagaagaagaagaaaacttatagctcaaatacttcctatgagcctaactaccctaaccaattctacaacttataaatagccagatcaaagctctcaagaactacctaaatcaatttttcatcttctgcgagatgggttagagtgagagagtagagagtgaagctcctcggagctctattgtaatcccatacacgaagaaagaaatagagaaaagttagagtaatatcgagagaaaaataaagagaaaataaaatagtgaataaaaaatattatcaaccaagaaattgtggtttgaaaatataaaaaaaaaacacttgtaattatctgttgaatagtgaagatcaagctactctgaggtgagcttgacggagaagtaacccatgttctggggtgaactccgagatcaaatctctgtgttcgattctactttttgtttgttttctcaaatcctaactctcattaatttgtttatgtgtgtgagttcgtgttcttgatcttgtgtgtgagctattgatctctggatcgtgtgtgtgcgat

SEQ ID NO: 75548 - DNA, 956 bp, Cannabis sativa
gtctctcaacggggaggggacttcggtggtcgtggtgaagggaaggactttctcttggagtagtgtttggtggttcttgttttggatgaattgggtaatgcggtatggagacctcagtgtagtcgagaatgtcatccaagatatgttctaatttttctcttgaagtgttggcttcttgcatggcatgggcggaatggtagaggtgttccaccagtttgtacgactcctgcttagcctccgtggcttttaaatgtgccttccttataagtttttcgtgttcatgcagaacaccctcgagcctagcacagttaagacattctaaaattgaagctgaacggagtctaggactccttgaaggtgtacctacagctcttgcagaagaaaaaggatgaggtggggacttttcagaacttgtttcaaaagggttgaagttttggtaagggtccatatgatttaggtaatactaatacggggtttgaaaaaatgctttgtttcaaaacctaacctttacttatatagtggttgggtgggttgatgtacacgtaatgaggttcatgtacacataatagattttttttcccaatttaaccatttaatagctaaacaatttttacaatggaaataaatccaattactacaatctgataaaatcccaattaaaccatttaatagttaaacaattttaatacaaggacaaggtaaataaaattccacaaacaaaatccaagaaatatgagaaaagtaccatatgatgtgacatatatatattaaaaacaaatcaacgtacggttttatgatttaaataataatttccacaattaaagtaaaaataaaatgctttaaagtattagtgaacatgaaagagataatgaataaagtcaattgagttgatacggccgtataaaaatatcacatcaccgtcttgaaataataagtacatggttaaaatggtgaaa

SEQ ID NO: 75549 - DNA, 1421 bp, Cannabis sativa
atccttccaagttcactaccttctgtatcttaactgacgacctagaaaccatctatatggcaacacagtttgtagtcctgtataaaaaacttgctcccatgaaaaaggacataagcaagcgcgacatgtctaaattttttcgctttcatggagactatggccatgacactaatcactgaaacaacctgaagtgagaaattgaattcctgataaggaaaaataacccgcacgtgcagaaatatctcaagggcaaccagaatcaacgggctgcccaagcagataacaaccaagatctattaatgccaccaccagtggacgggcatttacaattcatcattgggggcccacatattgctagagatttgggcaaagctcgggaaaggtatgctcgaactttacaacatcaaccaaaggaagtaattctggccatagaagaaaggaagcccaaaattccatgagtaggggaacccactataaccttcactgaagaagatgttatcaatgttcactttccgcataatgatccactagtcgtggaggtacagatagcaaataaaatagtgccttgactatgatagacaatggagcctcggaaaacatccgttcaaaacaccatatgaaaagatggggctccaacttagagatctgatcccctacacccaaccagtgtatggtttctctggccacagtgttgcacctttagggaaaatttgtctaccatcactattggacaagatccgaggagcataactgtgatggcacaatttctaataattgatgttccattagcctttaacgttatgttaggccgaccagccttatatgagttgaaagttgttacatcaattttccattcatgcattaagttcccaacaaagaatggggtagggtgcctgaaaggaaaccaacaagttgcacgggaatgttacaaccttgccctgaccaaggcaaaaaaggaagaaacctttggccagagtttggaaaagggaaaagcattgccaaatagagaaccgaccaaggcggggaggaagatgtagatccccgacatggggaaccaaatacaaatgttgggccggtggaagaattggaggacatagaaatcgacccaaatgtcctgaccagaaaactcaaaattggaaaaggtttgctgcttgaagtaaaattagctttgataaaatttctaagagcaaacctagacattttttcctggtcacatgagaacatggtcggtatcgatccttctataatttcacacaccccaaaacatcgatccaaacttctggcccgttcagtaaaaaagaagattgttggaaaaagaataggaacaagcattaaaagaagaggtagaaatgttgcgcaataacaacttcatcattgaggcttttgttgggattttatgccctcaataaaacccatttcaa

SEQ ID NO: 75550 - DNA, 783 bp, Cannabis sativa
tttaatattaagatatagtgacgcgctaggcgcgttgggacttgtgtacccagtcatgccttgcatgtcactatatgttaataaaaaatgcaaatgattagttatttaatttaataatttctttattttatttattttttaaaaaaaaactttaattttatttatttaactaaataataaatttgatataaaaggatagtttgaaaccctaaagccccaaacctaacctgcctcctctctcaatcgaattctctctctctctctctgcgatctaccccaccccgacgacaaacatcaccataaaaattttttccgtccaagcccaaggaaaccccgtgaaaccccgccactctctccgccctattgtctaagttctgggctccatctccggtcccgtcgccgattgcagctttgccggactattatcgtcatcgtcgatcctcctcgagcgcccagcagtccagtccatgtaaaacctttataatttctccaatatttctctctcctgatctgcctcctcaagtggccagcaatccatgtgtatgaacaagtaaaagaaattgttatcattttgatattttatttaattttatattgatctgaaatgaagagttttgttaatttattaaagtagtagtcatcctccattctatgtttctttgtgtgtatgcaggtggaagaaaaaagtttggggtgatcatgtttggagaagaagcggaaggagaagaaagaaaagaaaagcaaagtaaggtataaagcagaaatggtgattcaaagactgga

SEQ ID NO: 75551 - DNA, 639 bp, Cannabis sativa
  modified_base (350)..(350): a, c, t, g, unknown or other
taatctataacatgatgtaatttgtttgactaataattttataatcaaattaaaaagctgggggctctgtcaaagttatatgcatgttaatttatttttatttgataatcactaaatttgtttttcttcctcatccttttcaaaggaaactggaaaaacacaatgtcttttttaagaaaataatagtaaataatccaaaaatatactactatataagtaaatatttttattttaaaatttgtagagaaataacatttttacattcttttatcacataaaattttcatgattctcacattgttattcaatatatacaattttttttttcatatatctatatatatatatanttttttttttttttaaaatttagaagcctatcacttaaatatcatagtatatctatattagtttcattaaaatcattattattataaaatatgtctctttttaataggttattgtgagttgttggcatgcatattttgttgtacaatattttttgtttttgttgtatgatatattattatttttacatgatatttttttttattttattttattatgtataatagcgatatatatttttttagcaaaatatataaatatagttacataattttattggcatgtgtttac

SEQ ID NO: 75552 - DNA, 988 bp, Cannabis sativa
aaacatgttgtggcgtgccttgacaaactgcctccccacatgcctaaaccttgtcaccaaacatgtaaatgtttctatcgtttgtcccatgtgtgctgcccaaccggaaaacacctctcacgccttggttgagtgttctttggttgctgcatgttggcagcaacttggtgttcactgtccgaactccccaggtacctctgcatcttggtttgaactcacattttcttctacaacaaccgaagatatgtgtaaaattgctatggtttgttgggcgttgtgaaaagtgcgaaataaaaaagtgtggaagaatcaaacctcctttttgaatgaggttatggtatcgacaactacttctcttgatcattggagaaaagctcaagatattacttctctttcatctatatttctcaataatataggtgatcaaaatgagctttgggtcaaaccggtgttggaaactatcatgattaatgttgataccgctttattcgagcaggaaaattcctatgggtttaggatggtggctcgcgatcatcttggttcccctcttcattttcaagttgcgtatcatggaggctactttgcacctgaagtaattaaagctacgggaatcaaagaagcacttaattggatcaaggcaaatcattggaaaggtgttatgattgagagtgacagtatgctcgccgtccaagctattcattctactcagttaatgacttctgtgtttggcttagttgttaatgactgtagaaatttattatcctctctttctgatgttcaattacgttttgtcagacgatcagcaaatcgtgcggcccactttgttgctaggcacgcacgatcgctaactggttgtagcattctggggtcttttattcctcttgatcttcagactatatatcatatttttatataatactatgtcaaactttaatttatactataatattatgtatttaggtgtccataaaagttaataccacatata

SEQ ID NO: 75553 - DNA, 614 bp, Cannabis sativa
agcttgcagtttgcaaagcttctccccaaaatttcttgtctaggccagcacctctcagcatacatctcaccctttcaagcaaggttctattctttcattctgctattccattttgttgtggtgttttgatcactgtcttgtgtcttgctatgccattgtctcggcaaaactttgtgaactgatctgagcaaaactctagtccattgtctgttcttagcttcttaatcctcctacgagtttgatgttctatcaatttcttccagttaacaaaagttttgaaggcttcatcttttgtcttgagtagaaatacccaaacccttctggtgtagtcctcaataatactcatgaaataactagcacacccaatggtcttagtccttgaagcaccccagagatcggagtgcatgcacataatccaacttacccttgtttatgtataatcctggagtgagtttcactctgctgcacttaccatacacacactcttcacagaaccccaatttctttccaagtttgcctttgagaatgccatgtttctccaattcataaagacctctctcactaacatgacctaactgttggaaattattttaccaggaccttagatctactca

SEQ ID NO: 75554 - DNA, 1145 bp, Cannabis sativa
ttacaatgtggggggcatttcagtggcacaagaactgctgccaaggtttttcatagtgggttctactggcctactcttttcaaggatgctaatgactttatgaatgcatgcgatcattgtcagagaacggggagcatttcaaggagaaatgaaatgcctttgactgatgttttggaggtagagttgtttgatgtgtggggcatagatttcatgggatcgtttccatcttcctttagcaatctctatattttgttggctgtggactttgtatcaaagtgggtggaagcagttgcaacacatgccaatgacagtaaaacaatcttgtctttccttcaaaagtacatcttcactcggtttggaactccctgagcaatcatcagcaatgaagggagttgtttttgtaataaacagtttgaggcattgctagcaagatgtggagtccgccataggacaacttgtttatttaatatgttataagaaaagcctattaggaagcatgttagtagccttatagttgaatagtcgtttgttttatttcctaaaatgagcgataattagtaaattattcttgatcgcgatctgaccaggctagctcttggttttgtaggctgttctattagaatggacgccaggcggattggaagatttagggtggtcttcggtcgaattgggggcttattgtttttctatagtgaaaaagaggaggccatttctcctattttttcctggtgcaggacccagaaaaacggcttgccatttttagaaaatggcctaccgtttttcaggcaggttccctgttttgatgtttttctcgatgcttaggacatggtttttctagagatcaatagggaataacctttagttttgagtttaaagtcctcggaaagtgatttagcgtatcacttatcaattttatgaatattgtgagttaggggcctataaaccgtcgagcagcagttccactcaggttgaccagcacacttgaattcgaaattgaggtaagatatgattatatgcatatgtgacttcatatttagtatatgcatgtttacgattgcctgttagatgacatttaaatagcggtagtagtatacacaaaattatattggttaccgaataatgtatatttggcttgagtactcatt

SEQ ID NO: 75555 - DNA, 918 bp, Cannabis sativa
cagcagtttcatcaaggacgccgaacaattaagtgggggagaatgtggcgtcctaccgcatggtacacccacaagggggccattttgtaacatgagcatgccttggtgcttgatcattagtcaagtcttgcaccaagcacctcattagggtggggagacttttgtgatttgcttttctttttgtaattccattcacattgttatatacctaaaattcgactaactaccaagctacacgtgtcctacagaaggaatacaaatcaactcaatgaaataataatgcatcattaaatacaattaaatataagtttgatagaaaatgttcaaactcgttcactgcttagtcttacgcgagacaagaataataactattaagctggtattgacgagacatatgtctacctcgggataaactcagttaaatatacaagaagaggatattctcctgcacgagcagaataaagataacaacactcaaccgcctcgcattacacatagcgtgatgatcacctcgcatcactaatccaaataaagggatataacgagttaaagtattttcaacacttagcattttttcctattaagatggacaagaaagagatatcatgtttgatgagatacaatcttccaagttagcataaccgtctaaaggataaaaataaggagtagttgggtggttattagatattatcccatatgtgaataaatgaaatatggggaatgtccacgtttcattaacagttgtaaatgaacaaatcccaaaaggaataactgccaaccttattcctataaataggggaagaatctatggaaaaatgaacagtaaatttgagagagaaaatcttattattcaaatattgatattgtactctgtattccaaaaaatatccctaataataaggacttgtggagtatgta

SEQ ID NO: 75556 - DNA, 809 bp, Cannabis sativa
ataatctaaaaccagattcgagctggtactagcgtaaattgtgtcatctaaggaagaaatttgagtgaaatgagatagtgaaagctggtgcttcaggtcagtttaaaaccaattggttgtacacaatagattggttcaaagcccgaccaattattacaaggatgtttggtgttctttatctgtgccaaaacatagatttatcttatggcaaatgatgaatgctcaactccttaccagggacaagatgtctcggtttcacattgttcttagctcgatcaaatgcccgatgagtgaggaggtggaggaatcccatgagcatctattttttaactgtgttatcttgaaaagttctggatttgagtttttcttggatgggatacaggggttgggcgattgcttatactagctggtatgattgggttattctgacaggtcatactcgaatttatcggctcaatatcaccattttggcagcagtgatttacaacatcttgctcaatagaaataggtgtatttttaatggttattctagatcagattttggaatagtaaatgatgtaaaaaatactataaattttagatggaaaattgtaaacagtagaaatatgtccaagcaagagagagattacttgttgagattacaaagtaggtagttgtggacttggggttgtttggctgtcttgagccgtgtgtggctttgcttttttgtttgtgtttgtatttggctctattgattaatgaagtattttcttcttaataaaaaaaagagaaatttgcggcaaaagtctccaaaaagttcacgttgatgc

SEQ ID NO: 75557 - DNA, 921 bp, Cannabis sativa
  modified_base (865)..(878): a, c, t, g, unknown or other
gtgactagcagtccagtcaacatgagtcaaatatacaagctgccacaaatcaaaaatacatacatatataagcactgcagtacactagcgaataaaattactaccatcacaataattcgaaaactgacttgtaaaaatatggtgcagccgaaaacatttttcgtgttcttagtcttgtaccgttgtagagagctcattagatattgaaagccagcagtcgcccaattcctcttcttaattgaccttgtatcaattaaagagtgcatgtagctagtgctgacctcggtaccattcttgggcagtcgaactgttccaatacaaacaagcacaaacttaatgagaaataggtaatcactctcgctgctttccttcagctccttctccagcagagtcagggaaaacctatagtccttggcctttaaaattttgtcaaactcaaggaggtcgcggtcactttaaattgccacaggttctcccccatccctaattcccatggcattctcaaacagcttggacgatatttgaatcgttcttccaaatatctccagccgagaagtggttggatccacgtgattgataagccaactaactatcttagcatcgatgtacgggccatcctcccttaagaatgtagagaaaccggcatttctaaccatttctttttgagcgttgttgagaagtgggactattctacccaaacctcgaaggagcaacgaccagatacttgaacatcccttaccctttcatttttctcgattcctggctcagcagataatgtctcctttaacttcttccctttccctctaacaccaaccttcgaagggaaagcctctgttgggttgtgtgccctaaataaaacccattnnnnnnnnnnnnnntttactaattaataaatatcagaaataatattttatgttgcat

SEQ ID NO: 75558 - DNA, 759 bp, Cannabis sativa
gttagttagggtgttacagaaagataaacaacaaacacataaacaatatacatgcaccgagagaaatttctcccactccatgagtccatcgcaagtaaactgtagaaataaactatctcctagactatatttacaagaagcataccccaccatcgactactacaaaatgcagaattcgcgacacggtcctagaaaggtttttttttttggaccgtcgctaaaaaaattaatagagtgttgaaaacttcaagacctaacagtaataagcttctcaaaattgggcaaaacatatgccataaaagggtcaccctttcttaccctcataagaaaaattaccacacaaataatcaaagcagaaaagactacacaaaacaataatgttataaaactataccaaacaagaatttacatagacgttcgagcacattttctgtagtatctcgaactattgtctcaatatctatagtattagaaagaacatttaacaatgcatcaacatttagattaatccatcgttctggagacatgcaatttaactccttagtcataagattgggtctcgaacattgactatacttattaaataacttaaagatttgtgcaagcaaaatatcaggatattggctttacgaccatgaacaatttgattccttcccccaaatattggcttggcctaattaatggcctactccaattcctctaagaggttccactctgagcaagacccttttccctctctctctctacttctatatttct

SEQ ID NO: 75559 - DNA, 765 bp, Cannabis sativa
tattagtttggatttaatggtaattaacaaagaaaaataaagataatttgataatttattgtaggaagcccaaaataacattccctcttttatataattataaattttaagaatctatgaatattctattaaatttcacggtgttagttggattagttttataaatatatataaatattaatatatgatttataatattattatttttaattaatatttttaaactttatatttatttttctcaaatttttaaaaatttaaaaattatttttttaaaataaaattaaaaattaatatgtaatttctttaaatttataaaattttaaaaatacacatagtaaaaataaaattaataatataattaaatatacgtgcacgtaataataacttaatatttttatatatattaaaaatatgtatctgacaaattattggattttttttttttttttgcctgtggttattttctcctttcatttttaacataattcattaattaagacttgaaatttttaaaaaataatctgaaataatacaaaataccttttttttagtcataacttttgagatagagtttcaatttcaataaattagatacagttggaatccatagataattgaaaaatctataagtttgtataaaataaaaatttctagattcacattatttgggaggtcagaaactaataataaattacaggttggttaatacaaaagtttataaaaatgtctcagtaatttcgatttcaataaattagatacact

SEQ ID NO: 75560 - DNA, 920 bp, Cannabis sativa
ttttctttagtaatagtaactatatagtactactatatactttgactctactattattcggtccaatatattagtaatttactattgcttttcttaagcttttttttctttttcctttttggttattctttaagaaaatgacaagtcttaagtttacaaacagatcgaagtaattaagctgtgtagtttatttatttattatttatttaaaaaaatgttaattgggatttttgcctcttaaactttaacatatactaaatcatgctctctgaacttttttgtccgataaaaattctccttgaattattgagattgttagatttaaggatttttgtctaatttcattcaattttactatatcagtgattgttgtaaactatgctctctagactttgatatttactaaatcatacccctcgaactttgacatactaaatcatgccccctgatcaactttcatccatgttagatttttttttactaaaaatggataaaagtccttaaatccaacaatatcaataatttgaggggccattttaacgaccttaaaaattcaggggcataatttggtacatgtcaaagttcgaggaacaaaaattctaattagccttacaaaaatatcaatgaattgttttgaagtttttttacacgatgatgggttgtgtgttaaattctaagtttatttttaattttatttgaagaatgtcattccaatataactgtgttttttggtttggtgttgtgatgtttttcagttttgctagctggaaggtatcttttcaatgtgatgggggtgttgtttgattgtgttattagctttaatgtttaaattttcggggggagttttgtcccatgtggctcgggataagaattctgcagtgcatggtttggcaaagcatgcccttcggttaaacaatgag

SEQ ID NO: 75561 - DNA, 1622 bp, Cannabis sativa
atgatctcaactcaaaatctgaaaagtgagaattgagaatgctaaaattggataatttaggtttttatgtgaaacaaaagtatttgcataacctatgtgacatttagattatcgcttcatgctgattacatgttaatctaattcaaagatgattagataacatgtgatttagggcctaaaagatttgaaaagagttaggtaatttgtataatctgtcattcacattaagaaagagaatagtaattagcattaataattaggtaattaaataaactagattctctttcctaatttaccatcttaattaaatcttgttattgctaatttaattttcttgttaatctttatttttttacttcaatcataaaatttttggattttcaaatagaaacataaatctaatctagtgttattcagtcaaattctctgtgggatcgacctcacctgtgtgagtttattacttgagcaacgatacgtgcacttgcgtattaaaattgacaacaaatagttgattaataacatgctcatgtattagtgaattacatgtcatacatagaaatcccacacagtttatattatcatgcatctcatagtaaaaacatgatatattaggattatcctatgtgtttatgtgtttaccctttttgaaatccaaaacatgtaaactagctaagattaatttagaattaacttggtaatttaaaattaacctattaatttaaaataattttaaattatgaattaaagagttaattcaaatttaataattatgacgaaaaatttatttataatttaagatatttattataaataaattaatcataattattaaagtggttaatatgtattaattctgagaatcaataaaataaacacatttaacttaaatagttagagggagaaggagtacatgtcaatgtaactatgacctctattattgatcaacactgagggagtatagactagcctcgagacgactttgttttcgttcccctaaggaaggtatgagtctatactgttgctcaaggttgatatcttgactaaaataagaggaagtgatgtattttagtgtaacaccgactcttaaggcgatgcactaagttaaggcatgaaatttgaaataatagattacactcacaacgtgcaactaagcttcatagtggttagttgttaacttggtgaaaaagcggtactttatattttgaaatggaaatatgagatatttaggtttcaaaataataaagatgagaattttcacataggcttaatgaaattgacttgataccgatcctaagacggcgatcaattgttaaatagttttattatgaaataactcaaacaaaattttatgtgttttacttaggggtgttcacggtgcgggtggtgcgatttttgaccatttttataaaccaacttgcacatgcagttattctaattttccaaactgcactcgcaccgtgaaattaaaaaactgtagaaaccgcatcgcgaaaaatggtgtagtgcgatgcgatattgcggtttctacggtttggaatatcaccaaattattaaattattacaaatacaacaaagcttgagcaacacttgtcaaaaatactataagacttgaaaataaatat

SEQ ID NO: 75562 - DNA, 1015 bp, Cannabis sativa
  modified_base (64)..(72): a, c, t, g, unknown or other
ctagtatattctagacttaatctaatctagaattctcttaagttcttagataatttttctacannnnnnnnnaaatttctagactaaattatgtagaaatgtgtagaaaattctaatatatccacaagacccacaactataatcaaaagcaaaatcagtgatgttcagcttcaaaagctggaaaaaagaaaattcaaatcgaattgttagattttaaaatgtgaatctcaggaaaataatgaaaacaaaaatcaaaatcaaagattagaaatacttcctatgatgagaagagccagattgtgtgtggctagagagagacaattttcaagtttatgggaatgatagttttggtgaaaaggaaaaatgaaatatttgggcgaggtagaatcccacatccttgacattttcgttctggttttttatttttattttaaaaaatggattatgtgttttttagtgcttcctatttctattttaatgctattatttgattttttatatttggtatcttattttaaatacatatatacttattaaataaaattaaacatactaatttttaagaggatgtgatattttgaattttaaatcttataatttttttttaaaaaaaagagattaatatttaacttacaatttaataatatattttacttttaaaatttttttttaaagaaaatcaaacttaactttaggaaagtatatatataatagttatttatagaaataaaaaatggttaaaagtcataattctttattaatcaatgaagagactttaattattttcttacgaatatctctaataaagtcgaagttttaaaatagtgatgcaattaagaatttgagagatagtgtaagtttttatttgagatgactatatattttcaaaatgagtgattaattcaaagtgattttttttatagaatatcccaaagtgattgaaagactactactaaaggggaaaaaatttgaaggcagcatgaagagaagccatatcttaccttttacaaaggtg

SEQ ID NO: 75563 - DNA, 875 bp, Cannabis sativa
taagttttgttggttcattttttttatgtgttatctcattccaaagctttcatgaaagagatttgtaattttgttggccatgttctatatataatttgattattcatacgcactaaaagtgaaacttagaaaattttctataaagagaattaaggattattatttttccttttaaaataggggacctccagaagcaaagtgcatgaataaggctagatttgcttccttttcataatgagaaggataaagaaagtcaatactagtttatagtctaattatcatgatttgaataaagcttaatagtgtatcaaacttacaaatccatatataggtactagtaaaaagtatgctgtcaaattttacaagataagcttccatgataacatagcctacttaacttgagaattgtatgaatcaaagacaactacaaaatacaacaatgttgcctattgatatgaaaattaaccaccattagaaaattaaaccatagaggctcaaaatgatgacatctccaacttaattgctatttgcatcaaaaggttagaaaagttaagttaatctaaaagttgagttaatcaaaaggttttcatctccactaaattgttatatattagcatcagcaattcccccagcagtattctccctcagcctttgtttcctcaatctctctttcctcttcttggtttgttcagtttggttaatggatggtggcctttcccttttctttggctaaacagttgcctacaaatcaccaagttttatcttattagttactaaccaataacattaaacaaacatagatgcaactaaaaaaaattcagagataacaaacttgaggaattgttgtttggcattttcttgcaatatggcctgct

SEQ ID NO: 75564 - DNA, 754 bp, Cannabis sativa
tatagtaatattttagcctattaagtgtaatgttttgtatacatacatttatattaataatcatttatgaaagaagaaatggacacaagagactagagtaaatggcttgttgttctttagaataaaaaatataagtagtttatatgtcttgtcctagtgacatgttgatttatcgtgttgtttaatgtttagttttttgtctttttagtattttgttgattttttctggctctgttcatcgatggcttctagtagtgtggggattcaagatatgtcaaagcaaggggctaatattgctttggaggatgaggatgaagatgttttagcttctcgaatactattcaactagcatcggctattgacgatcgttggtgtttggtgggggcaattttcgactcaacgaagtattaattttgatgcaatgaaacacctgatggcctcattgtggcaccaggtcggggaatgtttgtcaaagaatttgatgataaccggtatttattttaattttatcatgaagtcaatatacaaagagtgattgagaaaagcccttggacgtttaatggttttttactggtgttttagagactaaaaccaagagacgatccattggttgtccacctgaatacagtggacacttgggttcaactagatgatctccgtccagggttcatgtccgaaatcgtggtgaagaacatgggcaattatattggaaaatttgtggaatcagatcccaagaactttatgggaatgtgga

SEQ ID NO: 75565 - DNA, 804 bp, Cannabis sativa
cactaccaattccaaaaaatgaaaagagagaaacagtaaatatcactatgtataccattggcttaataaaactcttgcaagaaatgaaggagttgacgatcattatctatagtcattaaaccttcacatgcattcttgaacttcattgcagaggccttattccaacaatccttcatcaactcagactttggcaatgacttatcattatactcttcacatttcttcagatttgacatttccttttctatctcttgctttagctctgctaccttctcccttacttttgtagggatttctgtttcaagtctttttgtttgaaggcctaagaaagcatgtatgagtttctctagatgagcaactgcgaaagaaatgttaaagccctgaaaatccacgaatctcaagtggtaataccattgtcgaagatgatttctggtaatgtctgccaccatagtagtgcacatttcctttatgacctcacataaaacagaataaacaacgcacttccatcgccaattattttcagtgattccaacatctccatactgatcaagtaatttgttgaaaataggtactaaagtaaaaggtatcttataatctcccatacttacaatcttcactcctaaatcattagctttcaattctattgtgtttgccttaaagaattcgtcaagctcattacaaaattcttgaaaatccttattggtgaagtgagaaagttgtataatccaatcaatatcttctccaccacgcttattttcagattgtcccttgaactcaaatgaattgtcttcccatttgtaaaag

SEQ ID NO: 75566 - DNA, 615 bp, Cannabis sativa
agcttctcgtgtattagccttacagtaaacataactgtcatcaacaaacagcatatgagaaactacaggagccccacgagccactctacaaccagtgataagttgaagcctctcataatttttcaaaagagccgtcagaccttcagcacaaatcaaaaacaagtacggtgacaatggatctccctgacgcaaacccctactaggtgtgataggtccaattgaatgtccaccatgtaccacattatatgacacagtagagacacaactcattaccaaagccacaaaccgactacagaaacccatatgaagcatcaagttttcaataaatttccactccactcgatcataagccttgctcatatctagtttaagggccatgtagccttctttccctcttctttttcgtttcaggtaattcattatctcaaatgaaaccatgatattgtctgaaatcaaccgcccagggagaaacgcactctgtgtatcagaaattaccaaaggcaaaatcccttttaatctattcgccaataccttagaaattattttgtacaggacattacacaaagatattggccgaacatcagtcatcacctcaggttgtttcttcttaggaat

SEQ ID NO: 75567 - DNA, 760 bp, Cannabis sativa
gttaccgaagaacagcaaacgacaggattctgtctgggtgattattgacagactcactaaatcaacacattttctgccggtgcacactaattacaatgctgaacaatatgctgaattgtatgtaaaaaaaattgtaaggctacatggagtcccaaagaccattgtatcagatagaggtttagtttttacctctaagttttaggaaagtgtgcaaagtgctttgggcacaaaactaaagttgagtacaatattccatcctcaaactgatggacaatcggaacgaactattcaaatactagaagataagctacgagcttgtgcgttggatttcccaagtaactggagtaactatttgccactaatggagttatcgtacaacaatagttatcaatctacaatagggatggcaccctatgaaatgttgtatgggaggaagtgtcaatcaccactaaactgggatgaggttggcaaaaggcgatacttaggcctagacctaggaagagaggccactgaagcggttgaaaagattcaaaatagaacggttactgcacaaagccaccagaaaagttatgccgacgtaaagcgacgaaatgtggaatttgcagtgggtgacaaagtattcctttgagtttcacctgtaaaaggggttatgcgttttggaaagcgaggaaagctaagtccaagatttataggtccttttgagatattggacagagtgggacaggtagcttatcgactggcattgccaccagtattagct

SEQ ID NO: 75568 - DNA, 674 bp, Cannabis sativa
ataatttatttttaatttttagaatattttaaaatcaatgataacatttgttaaaaaataatcatactcatatgagttttttgaaaaccgatttaaaatagaataaatgctgaagagaataaataaaatataaagatcaagacgagaatttttacgtggtttaaatattaacgaactctagttcacaggttaatatatttggctagaaaaaccttcgagtattacattagtgttcttgtctggtttatgaattctagccctttgcatgaagggattttgttatatttaaaggctagtgttttcatgtattcaatgagacccagcccgtgatgtaatagttatctgtacacgtggaaattactttatagtgacaggtggaaaacgtgcaccatctccgtgtataataatgataatttactagctgtttgacagtcaccatatttccttttatggaatgcatgatttttggatttgactttagaaacaaagtccaaatatggtggggttcgatgttaaatgagcgtcgaatcatcgttgacatctgaaggcctattaattatacctttccagaagcatcacttgaaggtatctgaaagttctcttcgctagactcttcttttgcttgcatgagatgttactccgaaactcgaatggtctgacctctttgatgagct

SEQ ID NO: 75569 - DNA, 562 bp, Cannabis sativa
ctgcgtatatggaaccccttattcagattctaaggaagagttttggagattgtttacggagaaggtggctgactgtaatgaaccatgggttgttattggctatctaaatgtaattctcaatgaaaatgagaaagttgggggaaggaaatttaagatgcgagaaggtgatctgcttaaggagtttttgttgtcgacagggggagtggacttggggtgtgatggtgtcaagtgtacgtggcataactctcgcagaggtagcaatagagtccgcaagcgacttgatcgagccctggctaatgtggattggtgtacctcacaccctgaggcaaaagtcacgaatatgtcgattgttggttctgatcacgctccgattctcctagatagttggtgtgtggtggaaaaattacattatccttttcgttttctcaaagtgtggacttctcatacgggttgccatgatgttgtggatcgttcttggaagcaatactatggtgggacgggagaatcagctctgaccaataaaggagaatcttaaactatggaacagaaatgtttgtggcca

SEQ ID NO: 75570 - DNA, 1130 bp, Cannabis sativa
atataagaataggaatgagaacgacaataggaatagaaatgaaatgaaataaaatttaaaatgcatgaaaaaaattgataaaaaaattattaaatttttttttatcgtggatatgaatgatctttccttatatttcaaaattagttattctaccaaaatggtggaaaagtcattctattaaaatgacattccattaatattttaatatgtaactaaacaaaagaatggaatgaaaattgtttcatttctatttcatttcatttaattacctccaaccaaatgctatgttatttcctctgaaaaataatataattaagaattgaatttgagtgtaatggtaattaatataatttgacattgctacgtaattgcatatatttgaatagtgtaatttgaagtaatttagagattttaattatgctttctaaatcacttggtcctaggagaatcaacattgtttggtgagaagaaaaagtaggagctgggaaaggaaagaagggaaataagtgggaggagaggttgaatccttttgttggcaagaaggatcattcattctcttgtttggcaaaaaagatcattccaaggaaatgaaaagtaagagatgataaatccactcaaatgtacaattttaaatccttctattaatagaaagattgatactctctattataatttgttcaaaattgtaaaattactctctaaaaatattattataaaaataatttagcaatttcataaatgaataatgatagatcgttttacttctctatttctcctaccaaataatttaaacgaattactctcttcaccttccttcgtattatccatcttatgtattctcttctccttccacctcaccaaacatgttgtaagtgtaactataagtaaaaattaaaaactttcattttaaatataaactattaaaaataatattttcatatataattactaataatttatcaaacaaaatattatgaatattcatatataagtactacatcatataaatatgcattgtatttttaaatataatataattactaattatacagttagtaatattacactaagtaatgctgcatataaattacacataatgatgtgtattaaatattaattatttttatttt

SEQ ID NO: 75571 - DNA, 701 bp, Cannabis sativa
ttactaatataatagtcagagaaaatatggccaattaattctgctccattcccaaaaactatacaaagattatcgaaacaaataccaaactaaaagagtttagatttggtttaaagatgatcaagtgttgctaacgagagaatgaattaatgctttgggattgaaatccccaaacttcattgtgccatttaaatgaaggaatttttgggctcaatcaagtatatagccttgcttgattgagtattttgctgttaggaaagtctgaatatacaccaagctttggtactcatttttcaccttcactatatgctttttcaataccaacaactattagttggagctttgtcctcccaccaagtagtattctataagtatacattgtgaacccatttaatccaaagattatcttgtttaaaagtaatagttcacacatacttctccaacgctactgtgttatatacaacaaagaatttgacgaaagctcaaaccatcttgcttttttgggcggcaagttttgtcccaagcaactacctctgagccttgaaaaatattagaaccctttcaaaggaaggctctacagatggcatttactcactttaaaactttcctcgttaaaaccatgatttgagaccaataagagtgtacaaaaattaacactaaactaatgggctactctgccagcataggaaatatttctagtg

SEQ ID NO: 75572 - DNA, 1235 bp, Cannabis sativa
ctgattttcaattttatatatctacaattcttaattgaaagataattaattaggaatactttataagaaaaaagaacctcaaggattgaggactaacataattgctactttaaaaaaaatagaaatgtctaacatttttctatgtgttaatatcattggtttaattaaatatcgagaagacaacatatctagaaagtatcactaatacctaatagcaatgctctaaaaattaaatataaatcatcagagaattttacacaaaacatgtaaaatcatatttttttatatatatttttattaaaatacgattgttttttagtttcatttataattttcttgattataaataatttactttttaaaaaaaaaatattttatttttacaaaaagaaagaaagtataaatatagcaatatcataaaaataatgtaaagaaatgattgtttttttattatattatgcattgtaagcaactatttgagttatatttttagtaatataaactatttagaatttttttaaaatttataaataattctaaataattataataatgtacattcataaaaaaatagactagaattaagcttttcttattaacatttagttccacgttaatatgtggaaataaattgtaatatataagatgaatggactacttctcccattgccaattggttttgagatggaacatcattcatcttactccctaaaatctaacatggtatcagagttacttgtgatccgttgtgagcccaaattgccatcggtccaaaaagccgtttgtgaacgaaagtgccaccggtccaaacagatactttcgctgtctccccgttaacctccagttgggacttttcggctaatgtgccactttccacccgatatttggccttgtgtgatttttttaaatgtcacgttcggtcctgtggtcttaaaagtcgttcgttatacctacacttttcaggcccaaacgtgaagagagtgtattaagatttagtcccacattgctaatgtgtggaaataaattgtaacatacaagatgaatggactactcctcccattgccaattggttttgacatggaacctcattcatcttattcccaaattctaacatttttgaatgtggaaacagataatttttgtactgaaatactcattttggagggtgtaccacatttttccacaagtcccttacatcaatattttgtaataccattaatccttaccgtaaactc

SEQ ID NO: 75573 - DNA, 901 bp, Cannabis sativa
gaactcatgggttccttaagaacttttgagttaaataaacaaatcaagaaaaagggtaagcaaagttccttgagtgagaaaagcaaaggtattgcatccaaagtttctgaaaatgatgtttctgatgatgaaaatgatgatgaaatggccttgttgacaaagaatatccaaaaatacataaaatctattggaaataaaaagattttgtcgaaaactccaagaggtgacaattcaggtaacaatcattctaaacattttatctctaataataaaaaaggtattcaatgaaaagagtgtgaagcgtatggttacactcaatctgaatgtgccaataccttaaaaaaaaataaaaaaaggttttaatgttaattagagtgatgactctaaaagtagtgaggatgaaaaagaaaaagttgctttaacaagtgttttgtcaagaggtttgcaggaaaaaggaaaattcaaatgtttgaataacactttgaccgatgtcaatgggaaagaagatggatcaaactcatatgagttagatcttgatgagaactctatggctgaatcttacaagataatgttcagtaggtggttggaaatttgtgctaaaaattgttccttggttaaaatcaataaagatttgtgtcacaacatcaaagatcttgaagaaaaaaaataaatgttgtgaatctgaattgattttaaaagagtctgaaattacctctttaactaaggaacttgaaaatcttaaaagaaatgtcaaaatactaaatccaagttccaacttttgaaaacattcaaaatttaagtcaaacgagtcatgctagtttaggttatgtttcgactcaatccaaatccaataccaaatttatcaaatatgatattttggtttctaaagaatctgtctcta

SEQ ID NO: 75574 - DNA, 742 bp, Cannabis sativa
  modified_base (279)..(281): a, c, t, g, unknown or other
aaactgaaatgtgtaagaaatatataaaacaggtttttcacaaaatcatagtaacatattttgtaaaacaagtaacctatcctcataaatatattttctctattttaaataataaaatgtgctctgtatttttcaaaatagtaaaaatatgaccctgaacttaattttttattattatttttttttaatataatcaacttgaaggcaatttctaacacgaagagatgcagaaaaagtaaacaattttgtcataacacctttagatcgaattattattannntttattttgacaaaaaatcaatggaaaatatagagttcattttatcatttaacaaaatagaggtccaattaatatcttttgcaaaatataagttccaaaatagtattaccctattttctaacttcatccaagtcatctcgaaaaaaaaatgcttaattattcaaattcaaatataatatatttaaaaaaggtatacattaaggttctaggttctaagttttaattgaggtttttgaacaaaaaggttaataatataacagaaatgagatttaaagtacttttttttccgttacaaaatcagtttatggggttaaataaaaaaatagtatagttcaagtaaccttttgtaaaacaagtaacctgtgcttataagtcatttcttaattattcaaattcaaaaatataatatatttcataacacaattgaaattaatccttgcaaagcacaccaagcaaaagta

SEQ ID NO: 75575 - DNA, 893 bp, Cannabis sativa
gtggtcctgaattcaatatctgacagctcattatttctcaatcattaatctctgattttccatatctttctgttattaccttttgtacgaatattcccctttctgttattacgtttggtgaggtgtaatatttctagaatcatcttttaatgaatgaatgaaggcaaaagctcactgagctgaatattcaatcaaatccctttgtctataatttcttactgttttatgttacaataatggctaaaactataggacattacctttgtctatgtattataattcaaacttttcatacgacgatatataaattataactatagtatatatcaatctaaccagttgtggagagtgacttaaaaatagttatcaatgcgttcaataagaaggagtcttattgggcaattgagaactacgtctcattttgtaatagatcatctctcttgtttgtaattaagttgtattttctctagtattaggagaacttataattttgttgcctacaatgtggctaagtgggcgtttacccacatgaggtttgtttttattccgttagcttctatcccagacaatttgtattgcaatggtcgtgaggtctaactttatctatttatataagcacgaatttttatatatataaaaaaaaatcttaccagtttttaaacaatttcaaaaaaagaaattagaatgttaaacagtattataatatatttttttttcgcatgttgacctgggcagtttaggttgtttctaattcagtttatgaaaaaatgttttggttatgtttttaaataatgaagattcaagcaaatttagagagaaaactataaatttgagccccaagaaacagcgcccaagttgatttggtgctggcctagtgcccaggttaacaatca

SEQ ID NO: 75576 - DNA, 559 bp, Cannabis sativa
caatgtaaggtttcatgaatctgagaagatctttgatacccatttttggccttggttgctttgctgctactgatttgggaatggagaaagagagagagaaggttttgattagagaaaatggcgggaagaatagaaattggcggagaggactaaaaaagacaagagaacagtaacaggtgctctgttgttaaccaatgggaaacggccacgtgtactttatcagctgcctcataccatttttggtttttgagattgctgaaggataaaacagtcattctacactcagattgtttttcttttcattaataatgaaattttattaatgaaaattaactaaaatagtaatctactaattttaagatcttttgacaaaaaattaaaataaaaatgaaagagattgtagcataatcttaaaaatatttatattttattttatccaccgcttaaaagttatagcagaaattattacaacaagtttatttaatctcagaatttgagcacttaactattgtgtaagatacgtaactgtactactaacaatactttcagtcgcagagaa

SEQ ID NO: 75577 - DNA, 828 bp, Cannabis sativa
atattagtaccacctacactaaactagccttcatgtcaagtatagttaattcatttaaagaagaattgtggtgagttttgaatttttgacccaaacaaagaataatactaaattgccataaaaaaaatcactatctaatagtggttattattaatatgagaaatgctaaataataatttgatttaataaataatataaatacaccgtataaatatggtattagtagtcactagctatatggtgcctaatattaatcctttattaatatatattttgtagtataagtaagggtattattggtatatacggcaatacaaacatacattgtcgtgattcacgttgaagcaataaataaatggctccaaaataaaatagggtttctctccactatttaattatcaaagtcatcatagatcgcacaaaataattggaactagggatatgtttcttttatagagtattattgttaggtattagcggtgtttaatacttttttagacggtattttataattgattaataatattttttaaaagttattttcttaagttatatgagaaccgatacttaattacacaaataaaagtataacactgaaataagtactaaaacctaataatatttttttagcaaattttgaagaaaaaaaaaagagagaaaataaataataataataataatgaatggggcaataaaaagctagagataatgaaagttgatgatcatgatttatttattttcaattattttgtttttgttttatttatgatggagaggggtattgtataaatgtccacaattaaaaataataaataaaaagttccttaa

SEQ ID NO: 75578 - DNA, 592 bp, Cannabis sativa
aacaacatatttgatgaattactgaagttattaaaactaccttttccaaaggaaaataaaattctatcaaactactatgatgccaagaaaaagattgaagaaaattagggttggggtacgagtcaattcatgtgtgcatgcataattactgtttattttacaatgaacatgcaaataaagattcatgtctagtttgtggcactactagatggataacttcaaaaaattcaggagcaaaaaaggtgcatcataaggtgatgcgttgctttccattaacttcgtgactgaagagactatatagttcaaggcatacaacaaaatacatggtatggcaccacactggtaaatcaaaagatgatggtatgatgcgacaccctatggatggtagagcgtggaaggactttgatgccaaacatcgattttgctagttaacatcaaaatgtttgtctaggtttagctgctgatggctttaatccatttggcaacatgagccaagcttacagtatgtggccaatagttttggcgaactacaatcttccacctttgttatgtatgaaagataataattttatgttgaccattcttattcctg

SEQ ID NO: 75579 - DNA, 808 bp, Cannabis sativa
  modified_base (404)..(414): a, c, t, g, unknown or other
tataaaaccaatcgttttttttttttttaacttaaaacgaaattaaaccataccttaagctttttctctttaaagatttgctatcccgctactaccaaagcttagatcactagattttagattgtaaatcgaagaaataagatatagagagaagatggttttgtcaaaggagtaggagggtttgttctgtactattattataaacttataatatatataaaatttattagtatgataatgttttaaaaaaataatataataatatttatcttaatagtaataataataatataattaatattaatagttattctattattttttagcaactaagtaacgtttacttcacatttttggcctccaattggacttttaagatcgtcgaacctgaaaatatttttatnnnnnnnnnnnctcatattatatccacatatttcaaataaatctctgtaattaataagttacgcttatttattcatttatcggattttcagggttgccgaacctaaacatattttaatttcacatatagctcatcatattacattcacacatgctatataaatctccgtaattgataaaattacgcttatttactcacttatagaaaatttaaattttatattgaaatagattataggatcataatctcacttattacttgattaatgcataatataaatataaatcataattattgaccattagacttatcgggatattacaaataatatagtaataattatatggatcgggatcccgagaatcaaaatactagtttaaagtattctactaatatgtacatata

SEQ ID NO: 75580 - DNA, 953 bp, Cannabis sativa
  modified_base (345)..(349): a, c, t, g, unknown or other
cttgttgaagaatatcatcaccattaccatcattattccacttttttatttggtcatcatagggtgattataagttgttaaattcaaactccaatcttattttttaaggttatatataacgtcgttatttttatatgttaaggctcaaactctaattttactttatgtgatactatgatcacaattctattgggttgcacgtggtgcctgaaacatgaggaaggattgcaagattttgagctctaatatatttttcatagactagcctatatttctctttgtaaactaaaaactcgtgagtaaagcatacaataattcccagtgtcactcctgcaatcaaagttnnnnnctccacattcgaggtaagaaaatttagtagaaaattttaagttttctgtatgaaataatgttcaaaaggagtgggaatgaggtataacacttctaacttatttttatttgttcattattatactatgttgtttgaataatggacggtacaatgggttcacattatttaaataatagatatatatatgtgtatgtggtttgaataatggacgatataatggattcacattatttaaactatagatatgtattaagtagtttgaataatggtcggtacaacagattcacattattcaaactagttatgttatttagataatggacggtataaaggattcagattatttaaacaatgatatagttatgatatggttatgatatggttatgatatgactatgatatgattatgatatggttatgatatgattatgatatggttatgatatgattatgacatggttatggtataattatgatttcatatttaaataatgtatagtaggtagacattttttaaattagatatattgtagcttatgtgacatggtttgaccgagaaaataatagttaaatacttaattattgggtctatattgtagatagg

SEQ ID NO: 75581 - DNA, 720 bp, Cannabis sativa
aatagtaataaaatataaaagatgtgtaaaaaagttggtttagccgtgtataggtattaatgtaataaatttatcattttagatttttagtgtaaaaatttcttatttttaagggtaatctttttttttattattattattattaactaatagctctttcttattttttttttggtcattttaataatttcaagaatcacgtgtcagctataaggattttatatctcagcatattttaattgggtcatcataactacttcaagaatttttggtacgaggtaatgtaaaatttaaattaaatttgaatgacaaggaatttgtatttctaaataggtctcactttttaaattaaaatagtggtaatgttagcataagtttcatattctctctaactctactctctcaaactcaatttcacataacaaatatctcattaggtggcatttaattggaatgaatgaaaacataactagaataagaatgatattcaaatactttacaataaaaccaaataaaataatagaataaaagttgttttatttccattccattttattccctctaaccaaatatgtcacctaaggataatcttagtagattagataaaagaaatgacgttatccattatttgtgtgcttttcatccaaacaaatttacttattattctaacaacatgctaagtcaacttaggtatcgcaacatgaattacaccaaaataaa

SEQ ID NO: 75582 - DNA, 818 bp, Cannabis sativa
  modified_base (391)..(395): a, c, t, g, unknown or other
gataaccaagtgtgtaggagtaacccaaactcccttacctacagaggtgaaactatgttgatctatgctggggccatggccccccctaactttaactttgtggtttatttataattatatatatatatatgatattctcattatcctcgtcagctagtgatgtattctcattatggtggaagtaattctggggtttaaaaatatccaaaaaaaatttacattttgcgtggaggggtttccatgaaatcttgcctacacgtaacgggttgaacaaaagaaatatagtctttaacaattcatgtgagttatgtggttttggaggagagaccaatactcatgctatattttggtgtccctttacacaataaatttggaagctactggattttannnnnctacatgaagtgagagaggtaattaaatttaaaaatgtaatactatatgcttctgagatggtagaaagggaattctttgaaaaaattattattagtgcttgggccatatgaatggagagaaataaaattactcatggtcaacaattaagataaccacaacagattgttaattgggttgacaattagtatataaaactattatatctgctcgtgatggagccaagcatagtagccttactcttcaaagaaataggaatagtttggaagttctacctagagtttctcaagaagaacagagccacacaatacttatggttgatgcaacagtattgaataatacaagttcaataggcttaggggctgttatcttttcagtatataaaagggtaagatcagcagtatgcaagcctctcaaaggttaga

SEQ ID NO: 75583 - DNA, 999 bp, Cannabis sativa
aactttattccaaaatagaccacataaatttgacttatttatttgatgacccaacacacattttatatatacaattgtgaccccaataaattctaacaacttcgtgtaaaaatctcaaatttttttttttttttgaataaaaatcataagatttattaattaataaattcgttcaaaataataaaacgcacttcagaggaacagtcctccaactgaagcacacgaccgatagagaaacaagtgtctcttgccaagcaatgagccaacttatttgcaaatcgttttacaaaacacaaattgtgaaggcataaaataccgctctgaattgctttgacacactaagctatttgtttccaacatgactctatcccacgaatgagttgcaatccaactcaatgcttctttaattatgcctattatcttagcaatttcgggttgaacacatccaatcttccctttcttgaatgcttctaccatagcaccatgataattatgagctacacaactcatgtcaaaagacaagacttgaaccagaaaaaactaaaaggaaaagactaaaaaactatgtcaaaagacaagactagagaaccatgtcaaaagacaagactaatggaaaaattaaattagtttcaaaatgatcacaacattaaatttgcggcataaatacctaagttttactccgagtagcagataagtccctaagtcgtatttttggcggtaaaaataccttctgtcactattgtggaacttccgtaggtacctctccgttttctgccatataatataccaaatggcatgccatgtcattaaaataaatgccacatcactcccaccattaacaataaacattgccacatcatataccttaaaaaaactaataaaatattttcaaaaataaaaaaacactattaaaaaaataaaattcatgtaaaaaaaaaaactaaaattaattaaccactctctttctctttcaccattttcgtctcctgctacctctct

SEQ ID NO: 75584 - DNA, 1034 bp, Cannabis sativa
tttttttatttttacaatttaaaacagttttttttttttttacaaaattttatatagaaattggaactagcgctgtaatctaaattgtaacaaaaaatcgcatagaaactccttttgcaactaacgttgtaactactttagaaacccaaaccgtaaattaaaaaaaaaaattaaaaaaaataatatagagataattctcttattttttttttatatgggaagaaagattttttatttatttattttttttttgtttaaggaagaaagatatatgatgattagatatactcataattgttttgatttgcagttataggaacagcatttgcattgaatattttgttcaatattccagtttggggaggagttcttttgactggttcaagtactctcctactccttggtctccaacgatatggggtatataatatatatatatcattttatttttcattaattagttcattatttttaataaaaaaaatcagccaacaataacaaaggaaataaaaaataatgtatttttgaattataattatttttagagtaaataattttttgaatttgtgttttgtaaaagttattaattgaactttctgttttgtaaataaaaaattagactttgtattttttaaaatagtactaaatagtaattttttttatcaaaataaaacttaataataaatcgatctaaatgtgttattataaaacgagttacgttttctgtatctgttggtcttaaaaattagcctgaagttagtaatattaaaaaaattatctaaaattaagctcaaaactttatttataccattttcaaaaatactggtttcattttaacatttaacaaaataaatagtgtaattaataatttttacaaaattatgatctaaattagtattaagtattatttgtataaagtagtcgaaaattatttaaaaaaattacaaaaatttctaccaaatattcaaagttggtcctaggttttaatatacactaagcttgcgcctaaactcacataatttagggtacgggcc

SEQ ID NO: 75585 - DNA, 1500 bp, Cannabis sativa
gatatctatcaaatcatgcccttcgaattttaatatgtaataaatcatgtcctctgaattttcatctatcttagactttttttactaaaattggacaaaagtccttaaatccaacaatctcaatagttcaagggtatttttaacgactttaaaagttcaaagggcataatttaatacatatcaaagttcgggaggaggggaagcaaaaatcctaattaacctcttttaaatatgtaagaagtcattgttcttatctttgattttagatcacaattatctttgttctatataagaattaatgatattgtaaaaggattagtatggtacagattacatttgttaaacaagaaagtttagtgtatatatggaaaacataacataatttgcatgagttataccataataaattgtttattgtcacataatttgcatcttcttgtttttatttaaagatttctcctaccacaagtttcaacagttagtacttgactatggactgtttaccaactaattaaatgtaaagactaaagaggaaaccaaatgattttgttaagattgtttcttctaataagaaactgtttgagatacattaaaagctaaagcacagttgcattgcacttatttgatacagtaactaataattgagaaactcattaaataatcccataaataatctataataacacattatctttggccattaaataatcactatctcgaagaccacaagaatgtttaatgctatcattaaaaaaaaaacatataagaggatagactagcaagtgtaacaaaaccaatttttctgtactttttaagatgaaaattatattaagaaagagaagaagagtaaataaatgagttaaaaggacagatgacatgagctcgtgaacaagggaatcttagagagaaatagagtttaatttgaagggaaaggaggtgtctttttgtactgtttgtgtgtggatttgttgttttggaaagtagtgaagtgatgatgagtggaaaaccaataacccttttcactttcttggattttggattgatctaaatttggtctcgtgatcattttccaacccaaccgcccaacatatgatctcatctcaccatctcttttctttttgatcagctccatcatcaacccttatgctatctcaccaccactgcttgtaaatttaataatagtattgccggcccactctcacgggtcagcaaaaggtggatggcccccaccccacccttcatggtcctataataaccccatttcattttatttcattaaactttgtgttgagctcactttacttgaagttatgttttgtaagtcattaccatgtccaattgtccatatccatgtatagaagtgaaaatgaggggttctgttataatctctcattaatgcatccaatggcaatgcaaggaaataaaatgtgtcttagcttgtgaaagcactctagtattagtatggtatttgttcctaactttttatcatattgatgcgtg

SEQ ID NO: 75586 - DNA, 804 bp, Cannabis sativa
ggtattatattctcacagctcttttcgtctataattatatgatgagctttatttaattttatcaattacttttgtagatttctattttgatttatatttcacaacaattcttatttctctttttgttttagatcacaaattatatatgatgtgttttttttttatagatttgacaattttttttttcgagatctctattcttggtgagatttttttcaatttctaatatttgttaatctctattttggttttggtttagtcttttattatcctatatctcttattattctttcttttttagaccacaaattatattaattatgagttttttttttcacaaatttgttaattttttttttcgaaatctttattcttgatgatattttttaatttttaatcttttttatttctattttagtattgatttagtcttttattatcgcatatttttaataatattctttttctttcttttttaagtcacaaattatatgatgaggcaagtaaagaatttatcacaaaattattcactcatgtataaaaaagttagtagttaattaactcaagtatatgatttattttatgtcaaaagcaaacttattttgatcaatagtgataactacaaataagatacgataataatagcgaatgtagtggtgactacaaatgagatacggtgataacatcggttttgaatgacaacaattttgaaatcatatgatgagttttttatagataatttatcagttgttttttttttttaatctctattttgtgtgaggattttccaacctctattttttt

SEQ ID NO: 75587 - DNA, 861 bp, Cannabis sativa
aattagacaaaagtctttaaatataataatctcaatatttcagggggaatttttaacggcaaaaaaaaaaaaattaagggtaaaatttgatacatgtcaaagttcggaagaaaaaaaatcctaattagcgtttttgttatgctaaaacatgtaacaaaggaaaatttagattagtttaattttttttgtaatttttagattataaagagttattacaggttttttcaatttatagattgtaaaagttaatattggaataatatatatactgattcataaaaatatatatgtatatttttattttcttttatatttagttcactagctaatagatattatataataactaaactttgcactttcttttaacaatgtaaaaaaatatatattatagatgtaaaattaaaatatcaattgaattttatccaaattaattaacttgttattataatatttggatgtatgtgcctatatatacttattatataccaatttgaataatttgtttattgtttgaacatttttttttgttttgagagaaaaacttgtgctttaatagatgaaaccataaagtacaaagccaacaagttaaagggatggcaaagaaccattccaaacaaactcattatctaatcctaatcctagttttgctgcccaatgagctaattgattagaatccctatacacatgttcaattctaagattaggactgaaagataacaagttcttaatccccattaaaatatcatctagaggattagcattccaattacaagaatttagtttatccactatagttttacaatcagtcttcaaaacgtctactggaaggtgaagcaattgaacccactgaagagcatg

SEQ ID NO: 75588 - DNA, 782 bp, Cannabis sativa
acaaagttttcgatatatatatattgtttgaaggcacgaaaatattaaaactataatgttgttttaacaacttctgtgtacttaatgctacaattattagattgaataaaaataacagactgatatcagaaactaataaaagaactatcaaaagtctgagacaacaacaaattaaagtgaaagtaaaaatataaatgaaaatagaggaatgaaatgaaaaataaaatacctgatctatgtcaaaagaattattttatcattaataaaataaacacatacggaaagaaaatcacaaagttgtttgaggaagacgacaaaggtaatggaattagatttatgaagaagatttaataattttgaactgaactaccaggaattaaagcaaacctttgcacagacaggtcttgtttttccttttttaccttaatggcttacacactgggtttaaatgagttctgtatagatttagattcttacagctttacatgccaagacataagcagccttctctctcgatatttcaatatctctctcctctctctctctttttctcttgaacttattaagtatttcattgcaccaattaccatactatcataacaagctagctgttctagcacatcaaacatcacatctctgctctagaatcataacagtgaaaccagtctttggaaagcattaattaataatataaattctctttaaaaacatggcactctataaatgtttgtactcacacccatgtttacatatagtcatattatatatatatcatttttttt

SEQ ID NO: 75589 - DNA, 1169 bp, Cannabis sativa
  modified_base (519)..(530): a, c, t, g, unknown or other
tggtccacgtatattgggcgattttaggagcaacactatctcattaaaaaaaaacaaataaaagataaacataaaagaaacttataaaaaatttaagctcgtggtatattaattttacactatggaatattcatttaatctacaaaatatatcatttttatgtgctgatgtatatcaaacaagaaaaataaagaaaaaacataaaaaatagtgattttttgaataaatacatatcttaatatgacgaataaaataaagaaagaaaaaaaaaactaaagattggtattctttgattaaaaatatatgtatgctatacaacaaaattaatatacaatccaaatttttttattttattttctgaatggtataccatagtatagaatatatatatatatatataccataatacaaaatgtatataccaccgacaaaaaaatttgactgagaatttggtcagggccggcccttacttttagtgggccataaaaaaaaaattattttgggcccttatttagaaannnnnnnnnnnnttttcaaaatcagtaaaaaaaattgtataattttaaaaggaaaatatttttttttgggcccctgggctaggtgggccctaggcacaagcctagcccgcctatacccagggccgggtctgactttggtcgttgtatgggggtaatcattgtaatttggagatgtgagaaaactagaagaagaacaagaaatgaacagaggttcgtcgctttcgattgtgaggaattaaggggaaaatgattggatccaatgaatgaatcgaataaatgaatgagagaaaaatatttcatcaccttttgggagaaatcacgataatttacaaaaaaaaattgaagaaatctaaactaactggaaaaaaataaggagatggaggctttgtcatttagattttggagcaaagcttctgtttctatttggagaatgaatataatgttaataatacccttatataactaagggtatgttgaccgaggttttcggcaaccaatataataataataattaagaaagctataaggaattactgagagagatttttacttggggcattaataagccttagtccacgagtctgtgtatttatgatagtatttattacagagaatgttcttggtagatttttcctctctagttcttatgaa

SEQ ID NO: 75590 - DNA, 1132 bp, Cannabis sativa
agaaaattaaatactattttaatttagatattacacagacagaacttaagggcgccagagaagaaagttattgtcatccagtttgatggagactttgtgagaaaaggccacaggattgaaggtttgagctaaccatggaagctagagagagagagaagagcaacgaatagagaagatgaaagcataagcaaagagaagaaaaaaaaaaggttactctaataccatgttaagagtgaagaaagagaatgagaaagtattatttcattacattaagaaggagcaacaactcgagatatataaacagagtacaatacaattagaaacgcaaaagtttttgataaatacagctgtacagtaataatagaatcctaactaacatgtacagtaagcctaactaatattccaaacccaaaaatcatcataatccaagcaacaaatctttgcacaacatataagaaaatacccttttggcatccacattttacataaaaattcaagaaagaactgttcacaactacatatccctcaagtccaagcttaatgacccacccataaatgtcgagaacaatggaaagagctttaacaaaatatataaatacataatgtattaactatttattagaccattgttggacaatttttatcaggatattgatttactaacatgtatgtttaattataaatctataatctaacattctaaatataaattctctcaaataataaattaaacacatacaaagttatagaaaatcttacattattagcagcagaataatatgactcctttcattcagatctctaacccttgattctttctatcgcaaagtatgatcatgatctgaacctagtttctccttcaggtgacaagaacactacacaatattctacactatcttgaatatagacttgaattgtgtgggcaatcactcatacactatagggttcgaaaatttgagaaaaaggagaagaggaatttaaaattagaaggagctctctttattttctatttatttgacaaaaagtcaattaagttataaaaataagagctataattttctatttatatgatagctattagggttaggtttagaatttaaatggaattaaagaaaaaagataaaattggctt

SEQ ID NO: 75591 - DNA, 1174 bp, Cannabis sativa
agtttccctatcgataaataacattgaaatactctaaataactcaaaaatgggaaaaactagggttcccaaatttgccccagccggtagaccgattccccaatcgtaattccggttctgggaaaaattcttagaagccaaccgaaattccagttcctacaggcctccctgaaccggaattctggttcaatgcagaaatcaccaaaattttcataactcgaccaattcaaccctaatccaaacaaaactttccagacctactaattagacctcaatgaacatttctaaagcaataaaacaaccacccatacatagaaactaaaaccacctttaaagctccaagttttgagttcaaaactcaaacttgatcaaatctaactaacaaccaccaatacaagcttaaaccaacacaatcaagcattatttaacctctgtaaacaatatctaacagctacagcaactaaaaatccaaaacatgcaaaaattcctttttcttccaactcacgaaatcaacgaaagctacaaggcacttaccaagaacttgagatctcaaaccccttgcttaaaccagcttgaaatgcagaaaacaaatcaaaacctagctaccttaagaaattttcgagagagaaagagagagctttgagaggaaaaatggtttttcttctttttccttatttttgtaaaatgattaatataaatgacttttacttagataatatcagccaaaaatagttaataaaagctgaaaatacaatgcaactaagtccactaaaagagaaaatataaatggggcaaaatgaccattttgcccctcccacgcaaaaataacataaaagggtgctaagggtattttgagaaattctaaattcccgattaatcctgacatttccaatgtctaactaaactgccccgctataccaaaatactaagatatgattctactgagccatacaccgcgtttcaatgttgtcgggcaccgaaaatgcaaaattatgaaatttctatatgtgacatataaaatgcattctgaattgaaataaatcatcatacataatttatttaatatcagtaaataattttcataattaagccctaattatctactaattttcaagtttaaactaagtggtctttacaactatccccccttaaaaggatttcatccccgaaatcta

SEQ ID NO: 75592 - DNA, 518 bp, Cannabis sativa
atgagactcatttgtaattattttagtttactaaaataccatttacctgacggtcagtattgccgtcgacccttcgatgcttaagtcagtattgggatcttattgtaaaatccaattgattaaaacttttttacctgacggtcaattgccaaggtctcgtgacttttgtagttagatcctcaaatgtcagggggcacggtcaacgacttcaccgtcgaccctccgatgcttaagtcagtattgggatcttattgtaaaattcaattgattgaaacttttttacctgaaggtcaattaccaaggtctcgtgaattttgtagttggatcctgaaatgtcagggggcacagtcgacgatgcttaagtcagtaaggtgaaaagaatatgatagaaattaaagcttaaatttaaaataaatttgaaagtttagaaatgatactgtcttaggtgaacagcgttccaactgtttcttatatcacgtccatctaatgcttaaagtttgtaggctccttgtccgact

SEQ ID NO: 75593 - DNA, 501 bp, Cannabis sativa
gaagtattaacaagtgagctgatatggcccagaaacgctatgaagacatcggctttgaacagtggttgtcatagtcaataatgggtcattctagagataacttggccaaagtgagcgctaaaaccttgaccccattagacatggcatccatggatgaaaattcttctggtttgtggctgtaacctgcgaaaccaaatgaatcataaatgttataaatggtttgtgccatagtttgtttgatgcataatttatctctgctcgaaaatacaaatgggaacactatttcttttcatctacatgtaattgcatataggagatgctccgatcatataagaactcttgatatgaattataatttaagaaaaacaattatcaattttactgaggaagaaatataaaatacagtcttagattgctgactgttgaaagagaaacaaattctgacctttgtaacatggaatgaagatcatacccatcggagatactctgtaatgagtgaaa

SEQ ID NO: 75594 - DNA, 879 bp, Cannabis sativa
tattttctctcctcgattgaatggtgtttgcttctttaataccaacactactacaaaaattatatttagcaacacttaattagggacacttcaaaaaaagagtgttgccgttttgtccttttgagaaattagtaacaattgtagaaaaagtgttactaaaggcttattctaaataaaataaatatataaacaaatggtaaattgaacattagacaacactctttggttaagtgttatgtatattaataaaatagaaagcaacgctttctacaaatgcattgtcttatagttaaaaaaaaaaaaattaagttatatatatatatatatttgagtagtgttttaactgcacccgcctaataaaattttaaagtttaatttgaaaatattaataactaataaggatctcatggtcacacgttctcaatataaacttaccacttatttcatacaacttctctcatttagttctctgattatttcatagttcttctctttcagttcttcttaataagctagatattatattttccttcttgataacttaggagatatatacatctctggttatatcaaagtttagccaagtataattgtttactattataatttcttatatataattcattaataataattttttgttgtttaattagtaattattctttcaaattgttttgtttgcatcaatatttatttttcatttaatattttacttgttgtcttgtgattgaaatcatttgtatctctcttcttacacgcatagaacattgattatatactatatacattacatatataaacattttaataaagcttatgttatttttatgcagattttttttagtcgcgcggtatatcaacaaatacagctttgattaa

SEQ ID NO: 75595 - DNA, 757 bp, Cannabis sativa
  modified_base (610)..(617): a, c, t, g, unknown or other
aataactcattaaatatagaattagtagagtatattcataactcgctgactgtatagtcttaggcgagacaatgatacaaaactattaatatatgtattgacgagacaccatcctgcctcggaatatgtagatccaagaacaagattcatttatttaaaaaaaaaaaataagtgaagttattcgaatcaaccacagataatacatagtgaggcatccacctcgctatacataaaaaaattttgacgaggcgaatcagttgttataacacttagcgtaatttccacattacaataactaagtgtaacaacttggaaatatccaggacatgattatccagtctgcgaggccttggtcaaagagcagttgttaagtttgctcaatacattgatgctcatgccattgctggaaggcatataattgtccaaatcaactttggtcattcacaagttaagcgagctgctattgtccaaattagcatctaccatccttgaagataagaatgataggcgattatgcggttattaattgttatctacatgtgtttaaatgacacgtgatcaattcccacgtttcatgaaacgattatgtattttgaatttaaatgtaaannnnnnnnaacctatattcctataaatagggatagattctgaaaaaagggacggaaaaatctttgttgtaacataattaattaactaatatataattggggatatgattttgtcccgtaatgtactttcacggaatgtattctgtggt

SEQ ID NO: 75596 - DNA, 779 bp, Cannabis sativa
caaagatttctacattgattccattttacagaaatgttagcaaaacacaaacagcatacaagtcttctaagtctcacaagtatcaagtacaattatgaaagtatgcaaaaagttgagccaacggtattgtttacttcatttcaccattatgaataaagtaacttccaactcaataaaaataggtttcggcaatgatgaatgtttcgttttcccaacctgcctcaggttctgatattgaacctttcattactcatcaggtttcaatatatactagtgtcgcaaaatgctatatacccaaaaaaacaaatccaagctaatgttaaacacacaaagtttaaagtagtattatttatttttacttttcttttttaattttcgccgttctactgccgggagacctcacagtggccccaaggttgttttgagcttgtgaccctgtggggattcgagcctttggaacaaatgcctaccagcactttccaagactcctccttaccactagaccaccacttgggactcaaaggttaaagtctgaagtattacgatatgaaaaaagagccttctgaggaattcttctgcatttaccttgatgtcatccaatccagcatcctcaaatgcagagaaggcatctgctgacaaaacctcagcccactgagaaagaaaaatagaaatttgcctcaggagacgtgagagaaaaagatatttatttctcaaagagctacaagcctagaatcttcttggaagttatttgttcccatccccaacctgctacctttctg

SEQ ID NO: 75597 - DNA, 1233 bp, Cannabis sativa
gtctctggttcaaggatcgaatagtataacaacatacttcactcgactcaagtctctatgggatttaatacaggaatacagacctcagccagtttgtacctgtggagcaatgaagataattcaagattatcagaatgaagatcgtgttcttgagttcttagttggtcttaatgagtcctatattggagtcagatctcagatcttgatgcaagatcctattccaaacatcaacaaaacttatgcgactgtcatacaagaagagagccaaaggaatttgtctagtgcgcctgtggagagtgaaaaacctggatctgcagctggatcgaatcagaatcaatttgctggtgcagtgcagacacatcgatctaacttgctttgtacacattgtggaattactggacacacaattttccaggtgttttcgcatacatggttatcctccagggcacaagcttcatggaaagttccccaatcgaaatgcaagtgctcaaggaaatacgcatggacagaaacctagtgctgcaaacatcactggagacaatgctggaaatcatgacaaagctggtgaaggagctgatagtggtcaagatctggtttctagtcttacctctgtgcagtgtcaaaagctaatggcattgctgtcccaaaagatgctagaaatgccacctgctcccactgaaactcctatggtttcccaattttctggtacgttgctaaacttgtctaaatctacttggattattgacactggtgcaacgcaccatgtttgccatgatctttccttattccaagataagtatttcgatcctaatgttactattgtccatttgcctaatggatctactgctaaagtttcttgtcttggcactatacatcttttgcctaacctgtttcttcaccatgttctgtatgtaccaaactttcattgcaacttaatgtctataagtgctttgactgacacaggtgcttattcttttaatttcaaaactcgtcattgtattattcaggacgatttgaagaaacgggtgattgggatgggtgaaaagattgggagattgtattacttaaagtctactacaccagcttttaaatctaagcagcctgttactttctctgtattttctgattccaaaatttctagtgatactatatggcattatagatttggccattcttcttgtattaaatcacatcccttgaataaaaatctgcattttcatgccaatgattcct

SEQ ID NO: 75598 - DNA, 819 bp, Cannabis sativa
gtttgcagagacaatttcaaagtttggctccggattatttcttcttgttcaagttgtgcttctgttggatttcgttcacagatggaatgacacatgggttggctatgatgagcgattctggttagtttaggactattggttttttgttctttttatttcagcgagttatttcttaccttttcccttttttttttcttactctggctattcttctttcttttcgggcattgggcattggtataagaaatgataaatcatgactactttacgagaaataaagaccttagtaattaagataaataaccaaacaattgtgatattttctgcacagtttgcaagttaaaaccataacctctttaccaaccaaaactttatttttctgaacaattgtatatagtttatttatttattacttgcgtttgtttgtttgtggctttagtaaaaaattttctttcaaatgcaggttcattgctttgtttgttgtttcactattttgttatttggcgagctttgttttttctggacttctcttccactggttcacaccatctggacatgactgtggtctcaacaccttcttcattgttatgactttgatttcagtgtttgtcttcgctatagtagcactgcaccctgctgtaagtttatagttgatgacttggtcaccttgacacttgttcagatctgaaagattaatgtgttacagtttacccctttggttcaaagccttgcaaatttatgtttcttcttgttgtgtatagatttttatcaaagctttgtgtattgattgcacatgaatgatgaatattgtaaggatct

SEQ ID NO: 75599 - DNA, 580 bp, Cannabis sativa
  modified_base (28)..(63): a, c, t, g, unknown or other
tttcattttttagagaattcatatttannnnnnnnnnnnnnnnnnnnnnnnnnnnnnnnnnnntcctggtaaaatattcccaaaagactcaatcattcctcccaaaattaaacacttcctttggcaagcttaccatgatattcttccaactagtctcaatctgcataagcgaaagaccttgccttcaccaagttgttatcgctgcaactaccacgatgtgaccctagtacacactctttttaggtgctcaattgtccagcaggtatggaatataaccattttttctgcatttaatactaatcatacatctcttaattgtatggaattactgcacttagctgttagcaccttcacaactagcaactttcaggtttttgtttgtttgctttggaaattatggaactgtaggaatgaacatttacatcacagattagctatagtgcccatcaacgtactatagtggactaaagattacttggaccaataccaacaccacaacaacccccatacaactgttattcttccatcagcattgcaaccagcacagagtgagccacgagcaccatcatacagattaaaa

SEQ ID NO: 75600 - DNA, 793 bp, Cannabis sativa
ataagtttggacactgctgagataagataaaaatagtatcaagcggaaataaatcacatcctagactcagataaaacaaaactaagttaaataagataaaattaatccaaataaagataatcataacctaaaaattaattattaaagaattaataactcataggtacacatgtcagttacatcattaaagaatgacaacgaaactatgcatgcaaatagcgtacaatataaatgaagcaagaagttcacataaaaggtaagaagaaagactagaataaaggaagtactaaaaactcaaagaggaaaatcccaccaaaaaatactgattgattttaatcaataagagaaaaaccaccatttttggtcaaaacaactacacattgatcaacctggagagatttaaaaactggaaagaacaagaattaattacaaaataaaataaaaaagaaagagaaaagtgaatttacatataaaacgtaaaaatttaaataagatttatgcttaaacgtaaatttaattaaaatatatataaatagaatattaaaataaataatgtagaaatagaacctaaactcataaaaattcttatatctggtaatttttttttaaaaaaaagtgatataaagcattacacttattatatttatatttatggatgactatcaatggtcacatttttattgcaactatcatagttatatattcttttacctataatagcaggttaccaataagtaaaaattctttttttttagaattaattaattataattaactatttttttaaaataat

SEQ ID NO: 75601 - DNA, 1277 bp, Cannabis sativa
  modified_base (184)..(185): a, c, t, g, unknown or other
tgttgcctttaagtccataagagtagtattacattttatgatcgctgtctagcctgcttggcttatgggttcacaggctaagtcctataaaatggacggccagtagaatacaagaagtcagggtaatatggttgagaccgaaggcggtcagggaaatcaaattcccaagaatccccgtggtcgnngccctggccgtggcagagctcagggtggtcgtcctgtaaatccaccaccagctcctccagattgggagtagaggtttgcagaaatgcaagaccgaatcagctagcaagatcaagaaattcagagattaaggcagcagggttttcctgctgtgcctccacagcaagctggtcaggtcgttgcagttccagcagtgccagcagaacagcctgttactagcaactgtatggagccgttaaatgaaacgtttcgtaagaaagcacctctagtgtttctgggaggtcctaacgtaatgaaggttgagcagtggctcacagtaattgagcgaattttgaattttatgggggtggttggtaatgatcgggtgacctgcgcctcatttcagttccaagagcatgctcttgtgtggtgggagttgataaccttcactcaggacgtcacaattatgacctgggaagaattccggaagttgttcaattccaaatattacaatgaagttgtctgcaatgctaagctgaaagagttcactgagttagtacaaaccgaggggatgtcagttactaagtatactacaaagtttgaatgcctggccaaggtcgtcgtgggtattgtgccaacggattttagtaaggatgaaaagtacttggcgggtttgaatgtgaagattagacatgatttggtgatcactaccaacaaagcaacatcttatgcagaaatggttgagaaagccctgcgagtcgagggtgctgtaaaattccttcaagagccccgagtgactccgagtgttcgtgggacccccacctttcctactcctttatttggtagggatgttggtgattgcaccagttatcagaacaggaaagttaccctggcatctggttgctcgggacagagtaagcggtttcgtgggaaccaaggcagaggtagacgccagggtcattcctatcctgagtgtccacattgtaagaaagatcatccgggggagtgcaactagaagacatgctttctgtgtggcatggtggggaatttcaagaaatattgcccttaggcaaagaaagaagagccgaaaccaaaggcaaaacttgtacctgctc

SEQ ID NO: 75602 - DNA, 778 bp, Cannabis sativa
cgccaaaaaccgtacagtcgattttatacggttataatttctaaatggtcggttataaaattataaaaactgaccataaccgaccgattttcatccctaagtcctgggtcccaggttgcgtcccgggtctgggtcccgagttgggtgtagagtctgggttcgagtcccatgtccaggtctgggtccaggttgagtttgggtcgggtctgggtcctagtctaggttcgggtctcagcttagggtctgggtcccgaaatctggtccgggtctggtcccaggtcccatgtctgagtttagatcccgagcgggttcggtctgggtctgggtttggggttcgagtcttaaattaaggtttttttttttatattgaaactggatcggataagatccgatccaaaaaaaaaaaaattaggtgaggcggagcggatttgatctgagatccaataaatatctaaatgttttagattagaagtgatccgtcggatcagagttccagcccactacaactaaatgaaatctttctgacatcgctacaagtaaattttcattgtgttcatttatttttctacattgtgttcattaattttagttttctagtcttgaaactataatttcttgttttatggtgttataatttctagatcaacaaccatattcatctaagtcctaaacaaaacaaataaatgcaaagaaataatcacaacaacatgaactaaaaaatcaagaataattaaagaacgaaaagcaataaaaggggcaagaaatttctcctagtttc

SEQ ID NO: 75603 - DNA, 911 bp, Cannabis sativa
tatttgattctgattctgtcttaagaatctaactattttttcataataaacgagagctacgacttgtgacaagttaaattcacactttgatattttaacttttcaacaaggtcaaatatcagcaaaattagggagttttgagtcaacctgattttacaaaaaagtgacatcaccgaggattggtgaacaacttcaccaaaactatgaaattgactaagtgatgtcaacatatcacttaggcatcaaaaatatacaagttcgggacttttttcactcacaaaacgtctaggttgactttagtatggcaacctgggtgtccaatgtcaacttggacattggatcctgaataacttttagtaaaatggccataactccctcaatactgatctgattgatgcgactcaacttatgttttatagctatttcaaatctattttaaatcatgtctcacacccatatcgtaattttaaagatttcaagtccaaaattcgtccccaatacaagtgcaatttttttcacaaattacaagtccaacagacgagatttgagcttcgaaaatttctaatcatcatccgaagtcatttttactattagatcatcatcaagagccaagatcaatccaaaagttttttttttcatattttttgtaatattttattattattttaataggatatgcttccatataaaaggagagctccaatagttcattttacacattcagaaaagagcctttaaggtcaaagcatttctctctagttttgcctttgtcaattttttgtgtaattctcgtgagcaataaaaactcgaagtaaacatagctccattaccgtcacaacatgggggaactactttaaatcttgtgtgtctctctcatttactctaagtacttctattttctcttgcacatc

SEQ ID NO: 75604 - DNA, 900 bp, Cannabis sativa
attaatttattataattaatatattaatagctttactttataaaaaaaataagaaattaaacgactaattatttttttttgaattcacattccttccttcaaatactaaatttaaacaatagatatttttgactttttttgactttcctcaaaaaaaaaaaaaaaagaaatctttttaattaaaaacataacttaattaaaaaaaaaaagataatagtagaaaaagatatgttaaatgggatatctatggaatccgaagtccaaaaagaactgcccctttttcttcagttgggacgaaatcgttctatatagatttaaaagtcggaaaagtctcatctctggatgagaatggtgttgttgacactaataattttaaaaatggtaattaaattgggatttataatggaaaagaaaataatggtgtttactttgtcctgtttttcttttcttttcttttttttttttaaataaaaatctcgtataaaaagaaaaaacaaatctgttatatatcttgatcacattaatactaaatagataataattactcttatttcataaatttaattaatttttattataattaataaattgttagctttacattataaaaataaataagaacttgaacgactaaatttaaacaatagatatatttttgacttttcttgaaaaaaaatataaatatttttaattaaatgagaaaacataactttaaattaaatttttaaaaaaagataataattaaaaaaataaattttgatttgaaatagaaaacctcacgctataaatatgtagctgttgagaatcttacttcttatattctctgcttactatctcgaattctcaatgtcttatttagaaacaacattctcttttgtgtcaattacagagtctgagtct

SEQ ID NO: 75605 - DNA, 927 bp, Cannabis sativa
tcacaaacgtgtgtttgatatcaatacctcaaaagtattagaattgcttcacatggttcttatgggtccaattcaagttgaaagtctaaatggtaagtgatatatttttttgtgttttgatgatttctctcattttacttgggtggatcttttaaaagaaaagtcggacacttttgatgcttataaaactctttgtttgagattaagagttgaaaaaggatgtaatattggaattttttttttgaattcggagtgatcatggtaagcagtttgagaactcagtttatgatgatttttgtaagtctacaggtataactcatgaattctctgcttccaaaactcctcaacaaaatggagttcttgagaggaataattgaacattgcaggagacggcaagagtgatgttaaatagcaagaagctaacaaagcgattgtgggcagaagctattaacacagcttgctatataataaacagagtgtttattcgtccaggtacctcaaaaacatcctatgaaatttggaaaggtaaacgtcccaatgtaagtcattttttatgtttttggatgtgtttgttatgtttctagagatcgtgagcatattagtaaatttgatgctaaaattaatgttggtgttttcattggatattccttaaatagtagagcttatcgtgtgtacaacatgagaactcaaactgttttggaatcaactaatgtggttgttgataattttaaagataattttttcagaattttccacagaagccgagataaataactttatggatactccatcagaagcagcaaaagtagattctaatgcagcaaaactcaattctaacaatgcaaatgacgaatctgccgccgcaactgatacaagagaaccagaacaacctatgtcgactcatccaaacatcatcattgattctat

SEQ ID NO: 75606 - DNA, 779 bp, Cannabis sativa
  modified_base (392)..(396): a, c, t, g, unknown or other
gaggaaagagttatggtagttttatgaaaatttatttctccgaaaacaaaaataaaaacacaactacgaattttatcttataataatttatctcaagatttcgaattgattgctgacccgaagctattaaggttagaactattgatttagtgaaatagaaaggctaatactgatgagaatacgataatatctgactgtttacttgagtatatcgtataatagatttaaattttaaaataaagatataactcatcacataaaaatcatactaatataatttaaattttgaattttaaaataactaatttaattcctcactatatatttatattactatttaatatatatttatcctattcttcaccacgcactattataataataataataannnnnataataataataataatacaaatgtatcactcatttaatatatcaaatactaatataggtgtataaattgaatattacattaaaatttattaactgagtgatgggatgatcattaattttttaagtcttttttatttttacacttctaaatatagatatatatatattttttttttgtatttttataaaattctatatagaaactcttaatgcaaagaattttaacctaaatcgcaataaaaaatcgtatagaaatctgcaactagcactgcaacctcttaaaaatctaaacggtaaattttaaaaaaaataaaaataaaaaaaccaaataattctcctatttttttagttagagactaccaaatctctcattcgttcgaaca

SEQ ID NO: 75607 - DNA, 828 bp, Cannabis sativa
agaaatgaattgcatgcttaatcataataacgtaatttgattaagtagaaaagtcatcctaattggcagttgactgaattgagcatatattgatataataattagtggtggtacactatgtcggtgatagaactggtaagtgacaattgtttggtagaaaacgtcatttgaaaaacaaataacaatattttgcattcatggatcgaccacccatctttgagaaatcacaaactttttcagatgattagagccaatgagaatggaacacaaaggccaattaagtaaggcactattaacataattgcctcctcaatcgtcacacccctactgttattagttaaggatagtgacgtttgatagatgacctctggcaaggtgttctatttcagttggttaaaacaaacataggttttcccgaaattgaaatcattttttaactattatttttctagttggaagatcgatggaccagtaaatagtgacagtgatatgattggattagagaaaattggagaagagcaaggagaaaatcatagaatttaacatgtacacacttcaagctttaatcatggcccaattcggtaatgggatataatatggggctgcaattaatgtttccatttgttacatgatgatgatcttaataggtgttgtgattgggttgtggttgttatataatggctccacatgcttcactcatcctaagaatagagcatttttattaagttatagtggtgtcaaatgttatcataacataggggtgttcgcggtgcgagtggtgcggtttttcaaatttcccaaacggcacctgcactgcgaaattaaaaa

SEQ ID NO: 75608 - DNA, 1001 bp, Cannabis sativa
actgatgaggaagctcctttaataaattttgttcctttcacagaactcagtgaacaattctccatctaactgagttccgttgtcggatactattttaatgggtattccaaatctgcaacttatgttcttaacgacaaaatagagaactttcttgcaagttatggaaactagaggttcagcctttgtccactttgtgaagaagtcgactgctactactgcgtactttgctcctcctagccctgtcggcaatgctccaatcaagttgattccccatattgcaaaggggtatggcgaggtcatcattctcagttttgttggtggtacgcgaggtatatgtgaaaatctctaacatttatcgcacctcttgacaaatttatatgtctttatttattgttggccaatagtatccttgacggattatcttctttgacaagctttgccaaccttcatggtctccacaaaagcatttgtgaatttccttgattatctcgcttgcttctgtggggagcacacaccgtaggagaggcattgaataatccctcctatataatttgccttctactatcatgtagcgaggtattgaatacaagaattttcgtgcttcgttgtccgttgagtagatagttaactatgggcgtcttccatgtgggagaggcatctatcatttcaacttcctccttttcacacatactaagttcatttaaaactttgactggtaccaaattcaatttatcaagctcattttgcgaggccagatttgctaaggcgtcgacatttgagttatgttcacttggaatttgttcaattttaaagtaatcaaacttctccaagttcctctaaaccttctccaaatattttgccatttttaaacccttcacctggtatttgcctagaacttaatttacaattaattgtgagtcactgtagcacataagattcttgacctttaaaatctcagccattttcaaaccagttagtaaagcctcatactcggcctcatt

SEQ ID NO: 75609 - DNA, 742 bp, Cannabis sativa
taattcaattagtgaaagtccaaaaagctattctcacttttatataggttatagattacacatatgactttaattaaaaaaaagtggtaatactttattttacgattttgttgctcgtagttttttttagttgttaagtgtcaattaagcccgctaaatgatagctcaaaaacgcgtagcgacacattactttagcttatttaatacatagtctaataatatatcgtcatgtgtttctgaattgacacttaatggtcaaaaaagggtacgacttcaacaaaattgtaagataaagtatttttattgccaatttttttgattagggtcatatgtgtaacaattataaatattaagtaaattattccacaaatatccttatatattttttgaacaacacaaatatccttatattaaatgtcataaaatatgtatttttagaatgagaattgttaaaaggtataattggttcctagtctttttcttggtgtcatactgtttcgagtctcatataactttaaaaatagcatttaggtgatatcgttaactaatcgtaaaacgccacttataaaaagtgttaaaatgttcgataacaatgctctttttgaatatactcaaaataattaattagttatgaggagagaaaagaagaaatagaacaaacagttaatgttgaaaattgaatagattcagtaacaagagaaagacgatgacagttatctattgaaagaacaactaattgggg

SEQ ID NO: 75610 - DNA, 827 bp, Cannabis sativa
tacttcaaacattaattaaaactatataagactcgatatttagttggaccaatagcgatattaacacataggagggtaagcatcactggtgccctttctctattaacatatcaacgctatatgtgatgttttataaagagcattgttattaggtaccaatggtgcttagcatcttctcgacatgtcgcgttgcgattagctagcgatactctttaaaaactattatattaaattatataagaatcaatacttaattggaccaataacgatattaatacataagagggtactaaataccactagtaccttttagcattttacttttataaatacgtcatgttttattaatagttagtaattttttattataattaattgttaaattactctaataataatataatatttaatgataatattagacatcatgtgcacgtcttttagcattaatgttgtaagaataatgtgaggtatgcatacataatatacatgatatataaatatgtagttaataatgctattttagattatgttttttttttttttttaaaaataattaattttatcatgttttattaaataataatttatactgtatgtttttaaaatagttaaaataaattttgaatttaatttttataaattaaaatttaataataacttgattggaaggtgtaatgacaaaaatagttatacttttttttttatatatatatatatatatttgtgttgaaactattttatttttttttttagaaaattgaattcaaaatttatttttataccgtttcaaaatttatagtatctgaattattatttaacaaaat

SEQ ID NO: 75611 - DNA, 820 bp, Cannabis sativa
  modified_base (766)..(768): a, c, t, g, unknown or other
cagccagaggattttaagaatttttgttaataaaaagattattaaagaattttttataaagtttgcccactttattttttatatgagtttttttgcggcaaaacattctcaattgtcgtttcacttgtatttaactctctaaactcaaattttggcgataaaactctctaaacaactgaactagtaaaaaaaattaaggtgtcattcgattaactatcactataggctatttatgtgtacactcttatgtacatgacacgtttatattggtacacctaatattattatttttaaaatttattttaaaattaaataaaattatgaaaaataaaaataaaatattttgacacatgtataaaagtatacacataagcaagcagtctatattggaaattaactgttaaaaatagatgactttaaatttgcaagcagttcagtagttttaaaggttttaccgtcaaaattagagcttagagacttaagtgcaactggagtgatagttgagagaatttaaccgcaaaaaaactcttttttataactatttcgtctagaccaacgaacgggtggctcagcctttaatgtgctattaatattatgagtgctaggggtcttaatcttagattctaatttaggtgtttcctttgggtgatgcgggcttagtccctaattctttactttaggtctgtttggcacgtaagattagactaaattaattagattaaattaaagaataattatataagatactatttttttgtaaaaaaannnttatatttttacgtttacagaatttttctttttatatttttacgattttcta

SEQ ID NO: 75612 - DNA, 591 bp, Cannabis sativa
  modified_base (58)..(60): a, c, t, g, unknown or other
tatatttactctaaaatatttctattatgatataatattaatgattatttattgttannnttgttacattgatatttttttattatttattaattttttttccagtgtatccctatttagttataacctcctaattagaatataatttacttagtgccaagtgtattcttcaatagaggttctactgtaattagaattagaatatggcattcaaattgttgaattgacgatttacaataaatctccccacacttgattactcgaaactaagcccagactcatctaatgccacctcagcttgatctcaaccaactgccacttactctctcaaccgatttcaatagacagaacaagaatagagactttttattctattttttcagttaagaaaaataaaaaataaaataaaagagatattgagactttttatcccacgtttaaatttagcgtctcaaatatgcagcaaaatttttttagacaagggccctgttttgaagaacgttaaaaaaaatatcaaaagaaaaaaaaataagttcaagattcgatttttatgggttagccaaacgggaattaaggtttttagggagacct

SEQ ID NO: 75613 - DNA, 1337 bp, Cannabis sativa
gcataagtaagagttcatctgggaccatgtatgagggcttccgaaggagcttccaaataggaaagagtcagctagagtcgactatccgggactccctttcaggaggattaactagccattcgaaattcctttctagaggaaggctagctttcccgagaactagactcggagtggccatgatggtcattcaggaactcccttccagatggcaaccatcattctgcgagacttcttccagatgaataagttagttttccaggaacataattttgaaaaacaaataactttctaggcataactttttggagacctttttatttggaagaactataccacaagcatcaatcgtgaaccagaaattacaacaatcaagaagcgacaaatcaaccaaatagtttacacaacaaggtgatcaaaaatttgaaacaaaaagcaactttacatttttcattgtgatagacaattacagaattgtcattatcatcatcgatgcttcatctttattgttcttcttatcacttcaaataataatcccacgaccaaaagcttcaaacatgagcctaccatcctatagcctactaacatcactaccacaataaactgacaaaaataaactataacgtttgtatttacataacaatagtatttttatatagcctaccatcctatatgccaataaacctattagtttattttggcatattgaaataaaaattttatttttatttttttacagagtagcctatagtcagtatttcatataacattctccttacagattcgactgcgcacaaaaattggcatctccgaacgtacctctgcttgtacggacaagcctgacctcatgaatttaggcctcactcaagtggcccaaagtcaataattattgtatttttccccatcagaggacctagttgatcccaaaaaatcctaccgggttcgagtatgcccatacccagttattccctataaatatatcattatcccttcatacaaatggtggaaaatagaattcttggaagaagaactgagtattagggttcttcaactagggcacaaacattcgtaagaaataatgtgaatattttctagctcaataatattaactcgtggactagagttcattaatactcgaaccacgtaaaaagcttggtatgttctactttaatttacttctttcttaagcttatttattttataataagtttttaaaaatctcagtaaacaagtatatatatataaatatataatattcatttaattaatctagttttttatttattttaattatggtattatttttttctttcaattaagttacagtcttgtttattggc

SEQ ID NO: 75614 - DNA, 603 bp, Cannabis sativa
aaaataatatttttgtacaaatagtataaaatctcataaaatttgtaatttactctaaaatttagcagagaaagagaacgagaccaaacccatcaagttaagtgaaaacaaaaccacactcacaattctcagaaaagacctaataacggcacctcatgcgaacataaaagaaaaatcccacaaaactaaaatataatgtatatttttttgagttaaaagatggaataaaatctaacttttctttaacagtaaaaaatatatatatacatatttttgtgcttttttttttaaaaaaagttatcctataaataaccacactcgaagaatgattttacaaataagtgaaaaatatatatatatatatatatatttttttttttttttctttagctctattttgggggaaatcctattggtgttcctaagccaaagagaagggctagagcaaataacaaatacttatctatcaagtagtttagtttcacccgaaaaaaacaagactattgaatgttgatggttggtagatgagtgacaaccattactttcttttttctcatatcaacaaattgacatggctgctacaacaaaataatgagaaaaatt

SEQ ID NO: 75615 - DNA, 804 bp, Cannabis sativa
ttaagatgggttgggatgttgatgtaggggctgtcctagcccaagaaattgctgattgtgcgcaccgagggaaagggaaattatttctgctagttactgtcactgttctttgtcgcgaggcgggtgtaccaatgtggaattaagaaggagcattgaatccccgagggcctatcagttttggtccacctcgagcttcgaaaacaactcccgcctccgcgtcgacctcagccgcggagcctcccgcagatcgctttgctcactttgagcaagtgcagcagcaaatgtgtggccgattgcatgcaatgtgggagtatgagcaaaagggagatgtagttatggagcgtgcatttaagaggacaacgccacgatttgagcctaagttcccgcaattccctcaacacgttctcgacccgtgggctggaccatcaacttcgaatacggaggagccccacgagaactctgagtagagggagtttccttatacctaagctaatttctatttttctgttatgtgtcatttttagtttgtattgtgctaattgtgtgttgttttttgtgtttggaacttttattttctgtcgtttatgtggttgttagtttgacattgagagatttaagagttttctttatgtggcctagtgttctactccatgatgatattttccgctcattccattgatgtgatgcctaattttatctgttgcatttgcatgttgaaattgttggatatgatggatgattctccttagtcttccctcaataatgcatactgttattttcccaccatgctttgcatttttcata

SEQ ID NO: 75616 - DNA, 1250 bp, Cannabis sativa
  modified_base (65)..(67): a, c, t, g, unknown or other
  modified_base (617)..(619): a, c, t, g, unknown or other
tggcctttttgagccccattttccatagagtctccttataaagaatatttaccgagctcccattnnntattaacaccctcttgatccttttattggagagtggaacggtaatcactaatggatcgacatggggatacctcacgtttttctcgtcttccatcgtgaaaataatgggaggttcttcggttttcaccttcttgaaaggttctagggaaaatgtcaactgctcgttctttatctctttcacatatcttttctgggcgttatttctttcccttgcgatatgtggccctcccaaaataaccaagatgtcctctccttcaacaggaagaggttgtaacccttggttgtttgggttattgggcatactgggctggttgtatccatggccctgtcttttcacgtattgtttaaaatggcctcgagcgatgagactttctatctcatctttcaattggcgacattcatcggtcgtatgcctaatatccttatggaatttccaatacttgttaggatctcttttgctcctcgaattcctcatgggctcggggttgccgaaggcaaccttcttctcatgtgcaaggtaaatattctcccgagtttcattaagctcggtnnnaatagtatacactggcacgtacttctcatgcttcttctgtttctttttatccttcgacagatccttagtaccgtccttcttttcgaactagaagcccccaagttataatttctcttggaaatagtgcttgctgaaacattgctgagtttgcttcctgagcttgtttttaacaagttcatttttttatgggcttcttcatttcgaacgaatacctaagacgtttcgttgaactcaatgatgcttcttacttgatgaccttgtaagtcatcccacaactcaccccctatggtcaatagatcagtagagatccccgcctgaagggctgtaagttgtatgctgtcatccaatttcctaaccctagccgcagccgtgctaaaaagacttaagtacgtcttaagtgtctcaccgtgctactgctttatattggttagcgaggccgcttcgggtcattgatcaaggctcaaattgatacattttaagcctttatttgtgtacatataattaatataaattaaatattctttatttttaaaggtcatatttaatttaatttaattttgtgttatttttcagattttagtaaagtgttacaaataaaaattggatttcaaagccaattgaaagttgaatg

SEQ ID NO: 75617 - DNA, 519 bp, Cannabis sativa
ttatttaaactatttaaaagataacctatgtagtattttatgtttattcattttactaaatacaatatacataaaatataggacaatcctaaataattatatttctaaaatgagatgcatgattatcataaaagtaaatcgtgtggaattttatatattgacaaatgtatatatatgcatgtaataatcaactattagtaaataaataattaacaaagttaaatgaaatgtgaaccaaataaattttgagtatttttatattacaacacttggaataataaaaataaacaagaactcttcttacttatcaaaaaaacaagaactcttcttgttctctctctaggtctctttcttgttgtcgatccatgtagttttaggaatttcataccatactccctaatccattaccgaacaattagaagcacaatttctaattaaaaattaaattaatttcaaataacttaattttaaaccttttttttgtctttaattacatgtaattaaataattcaaatttaa

SEQ ID NO: 75618 - DNA, 1062 bp, Cannabis sativa
  modified_base (183)..(186): a, c, t, g, unknown or other
actcacttagagtagcgagtattcaacggaagctaccaagacaataaaacaactaacaaatataaagaacacaagggaatatagtgattcagtcagatcacggtttgcttagtttactgttgcaaataatttttacttagtttatttgatttggattacttagggccggcaaaacgggtcagnnnngatgacacgactcgaaacccgcacgagaattagcgggtttgggtttgccttaaatgggttagggtcgtgtttgggttgacttgtctaacccgtttgataaacgggtcgtgttcgggttgacacggctaacacgatattgacctattaatgacctatttaaagttattttagtactttaatgtgtcataaatggattataaacgtgttaaatacttcataaacgtgttattggttgatatgttaaaacaaaatatgcttataaacggattacacaggtcatgtcgtgtttgtgttttattttttgacacgattattaaacgggtcgtgttcgggtcaagaatttacttgttatacatggatctcgacacgacacgaacacgacccgcgaacacgaattgccacccctaggattacttttttatatagaaagcaagtgtccttttagttttacataactgataggttatagaaccgttttacaataaataactatattaaattagaataaacataaaagaataaatgaagaaaaatttaattcattctaataataagtgcagcaacgatgcaacctatcgagtgcgagtttattgttcaatattctcgcacaagcacgcaggctttaggtgtgttttacattcaaaaaacgactaatgagtctaccactaggatgtttgcgttccatctgagtcgctttgtcgaacatctcttgctgacaacatgagagatgcgagttcctatcgaattatcaaaaacgttttgtcattcagaccaatcactctgtaaagaaaagaagggatctttatctagtatatataaatatctattctatataaagtgtgtctatataactaaaattcttggtttatgagaaat

SEQ ID NO: 75619 - DNA, 593 bp, Cannabis sativa
gagagctacttcagatcccatcattatagtgatagtaggttattacccgctaactaagggggtcgaacctttataaaatcctgtgtctatttatttttctattctaattatgtaacacgtggcaagcatcaacatcacattcgactccactgtcagttggtcaatttctaaggtcaaccatatctatcaagtttatatcgactttatttattataaaatatttcacagatagtaatgggtcgtaatcaattagttaaaattctttttgacgatgatcttttattattgaccataccaagtacactgcccgcccgaacaccaaaaaaccgaaaactgtaaaaaccgccttcagttaaaacttcctttgcatggttagttttagtgtcaatggcaaactgaccgattaaaccgagaactaaccaaacatatatattatacactatacatatataatataattatttttgtacatattaatatacaattttattaaactagttttgcttcttatcttttttatttaatgtctcaattattcattgctttattttattataatttgatgtatttacgtattatatacacacattcat

SEQ ID NO: 75620 - DNA, 704 bp, Cannabis sativa
tgaacatattgagatatcaacatcgtcaaggcttctatgaaaaggtagctagaaaattactttaaagaatcaaggtggaaatttgtggaagttgatcctctaaaccaacctaaaactaactcacctacacttaactaactttctgttatgttagttagttagttggtgccgattttgcacctattttctagctgtgagttgtacctataaatagactactctttccacttttgtaagaagagaattggtttgggggtgcttttgtcgttagagaccataacggtttattcattaaaggccatactaagttgcacatgggaaatattgctccgcctgttgctgaagctttgagctttcgagaagctcaaagttggattaacaatcatccgcctagttctgtatgggtggagaccgattgtcttctggtcatccaagctttaaggagtttgactagtctttcttcttactttggttgtgtgattcaggaatgcaaagccatattggctaatttaagcaatgtctatttttgttttattaagcggtcagctaatagagtcgctcatgagtttgcaagggcatctttattttatcctaattgtattttcagtatgggaaatatcccaactgagttgttgcctatgttggtgacagaatttgaaggttaataaagtttgattttactttcaaaaaagagagagtttaga

SEQ ID NO: 75621 - DNA, 620 bp, Cannabis sativa
attaattattaatatttataacatgaataatataatataattctcatttaaaagaaaatttatataaatatatatttaatatttttattatattaattttcaatgtatattagcgatttggttgttttgtcacgaataataataaaaagaataattaaatgtgtatttaacagtttgaatattatttttaaaaatataaattattaagaaaattattagatgtgtactatatttacacaacatataaaatttagaaattatgttattgtaattatggactcacaatttttttttttaaagaaccacaaaattattatcaaaaacacaattttcgaatctatatgatatataacgttgtcaactttaaatacaaataatactcataataataatataataatgataatgatttgcataatatagaacaactcaacgcgtgtcaatacatatgagaataaaagaagtttttggtaatttaattggttaaagactaaaagaattgccacttttaatagattatagatatagagtctactatatttacacaacatataaaatttagaaattaaattattataattatagaccgccgcaactttttttttttaaagaaccacaaa

SEQ ID NO: 75622 - DNA, 1783 bp, Cannabis sativa
aacaaagttttgaaattgagacattgcataagagggaggattggaattactagacctatcgttgagagataaatagtcattgaaatcacctaaaatcaaccacgggagtaagggggcattgtcaaaaagtctactaagcaaacaccaagaatgagctttatcaaaactataaggagaaccataataacaggaaacatgagtagtaatattgtcattaaaagttataatacaatcaacatgattagtggaggagtttaaaatatttacatatatatccgaagtccaaaaaaccaaaagaccccctcccaaacctatcctaggcacttcaaacacattgtcaaaaggtagattgcgacacaaactttgaccacggccagcagtggctttagtctccatgatgaagagaaaatcaggcttgtgcttcttgacaaaacgggagaggtttctgaatgcccgagaactccctaaacctcgggcattccagctcatgagactcatttttctgggcggggttgccttgcaacacccgcctgttccagggattgattaatagcagtagaaacatcagtaattgttggtccagctctagcacgcttgaggatattcctgagggaatcacccaccactaccgtttgagggagaaaagcagttcttttagctccagccactgctttccccctagctttttcagttgttcttggagtagcatcctccacagcagtgccctcactggcacattcactagtcacagccgtagcatgctgagtggttgtgtagggaagatcgcagataacagaagagtggaagctaccatggctcaaaggagagccttcatgagagagaccagtggagtttggggtagggtcgattcccatagaatccagagtgacaacattaccacgagaggcagcatcagaggagcctgtgccaatgtcagcagtagtgagaaactggctcactgcagctgcaagggattgatcaacattctcctgctgtgcaggaggttcatccaaaggaacagagtttgagaggtcaagtggatttcttttaaaggttgatttcggagggctttgaggggtattttgtagggaaggtcagggggatatgcacggtcgtcgcatttttgaaggtaggtgatgcattttgtgagagtgtggtcaaatagtccgcagtgaaagcaaatgtttggcaggttctcatatttaaaagtgagccatttctcacgatgtatactcttgaagtccaccatgattccacgagtgatgggcttggggatgtcaatgagaacacgaacacgaagaaagagttcagagactttgaaaagagtaatcttgtcaacctccaagaagtctcccacctcatctccaatgagcttggccagctttagagatttttggccaaaagggatcgagtggacttgtatccagaaaggtgagtacctcagctggttaggaaggagagtgtccaggcctgcagggttggcacatgtgaccagacaatggtcaaagtgccatggctggccctcgaggactcttcgcatgtcgccctcatagtgaaactccaccatgaacataccggacccatattcagaggaagttaaaggcccgcgggtaatccacgcattcctcatagccacttcgaaccactcaagcttgatggttctaggggaaaggattctaaaaaccaggcaaaaggttctactaggttggctaacccccctagtatcctcttccagatcatgaactacagcttcgcggtcagttagattaagaatttcagacat

SEQ ID NO: 75623 - DNA, 1173 bp, Cannabis sativa
attatttatgtattaaatcatgttctctagactttgatatctaccaaatcatgcccttcaaattttgatatgtactaaatcatgcaccttgaactttcattcatgttaaattatttttacttaaataagacaaaagtgatccttaaatctaacaatctcaaagtttaggaggaatttttaacggcaaaaaaaattcaaaaagcataatttagtaaatgttaggaaaaaaaaaatactaagtagccgtacaattttatttaaagcattgtcatgatcttttttttttttttttgaagaaaagcgtattatataaatgataaagggttacacctctcggtcattacataaaatgtttgaagggatgttagaaattggaatatccccaaatattttgtaggtgaaagctcattttgccacattataggcaacgaaattacaagacctactaatattcaaaaacagacaactgccgaaagaagaaagactactgttacaaaaagagacatagttttcaataacccaagggatctccttcccattgagcgcattggtgactactctcgaggccgccgcttccccagagagtgcatcagagaagcctaggttagatgtttggacccaaatcacttttacgagatggttcctggcaacaactgctatacacatgctatcaagccccactttaacatcgcagtttagtttgagccagtcctgaggtagaggggactagctgatctcttccaggcaaggagcagggggagggaaaataggatcatataaatctgcaaaagaacatcgaacagagtcagtaatcattttcacatctaaagtaatgttattatgaaccttctcattgcaaattcgccaaatggtatcaaccaccagagatgcatagaggaaaatctcatctgctgcaacccccttgtgtctcaaatcccaaataaactttacccaatcccacatacgaataccactatcgctgaccaggtaaattccccaaggagacgatctccaggcatggagagccacctcacaattaaggaataagtgttccatagtttcttcctctctcccacacaatgggcatcttagatcatcaatatgaaatctttttcggatcacagacctgatagggagggcgcttgaaagaatgcaccaccacataaccttgtg

SEQ ID NO: 75624 - DNA, 1223 bp, Cannabis sativa
atccaaacatcgactatgggtcaggtccaagacacgggtccagatcaggatcccggtcttgggtcccaatctagttccacttcgggtcccaggtgctggtgcgggtcctagttcagggtctgggtctagggtcacgtctttggtctcgatgccagttttgaagcccaggtcccatgtccaagtccccatctaggtctgagtcctaggttacggttggggtgcaagtcctagtccgattttgggttcgagttttcgatcccggtccgggtccagatctgggttcgagtaccgagtttgagtccagatccaagttcgggtcagagtctcgggtttcgatccgggtctgggttctgaggcccaggtccaggtcccccatccaagtttgggtcctaggtcttagtccgggtccatgtttgggtttgggtcctagtccagttcttatttcgattctgtgttttggttcgggttcgggtcctggtctgggtcggggtctgagtcctggtccaagtccagggtcaggtctcggtccaagtctgcatcccggtctgggtctgggttttggtctagctccaagtcaaagtcttgggtacaagtccaggtttgggtctaggtttcggtctgaatccaggtcccaagtttcaatcccggtctggcatgggttttggttcgagtctaggtcagtatccagatccatgtctaggtcagagtctgggtctaagatcgtctcccatgttaaagtccgacctgatcccggacacggaactagaatcagatccagacatggactagaacccagacatgggaccataacaggacccaaaccaaaaaccaaactaagaccaccaggacccgaacccaaatccgtacccagacctagacctagagccagactgggatccagacgcgatctaagacctggaatcagaatcggacaaggtgggcaactagaacccagacctgagaaaggaataacacccaaacctaaacccaaactcagaccagaagcgataccgggacttggacccgaacctggacttgtgacttgcgacctaaaccaagacagggactcggacccagacccagacccaaacccgaaaactgggttcggatctaagacctaagaatcagactcggacctaggacccaaaactcggacccacattgggactaggaccagaactcggacctaaacctaaactgggacctggactcagaccgggact

SEQ ID NO: 75625 - DNA, 1004 bp, Cannabis sativa
aactcacactgtagtcttccaaccacacacaaagaatagtgtgggttattaggataaagtgtataatttattcttgattaattctcaacacatgagcaagaactatttgagagagaaaaaaaattccttttctccctggtatgttgaaaatagtagtttgaaaagcttcttttgatttctagaatctcgcttccactttagtagttaaatcctcagttaattaaatcatatttaattatttaaataaatatctataacctctttcggttgctaatattttagatgagagaatctttcaactacttgagagaatatctcaactactttgaaatatctttagccttttaaaattaaaatacatatccaatcgaattgattaattaatcaactcaaaaagaaaaaactaatagagataccctactataaggtaggtgtctaccttgtctcaattaagacaaggatggtgtcatttgtcctaataacttttgtctcaacaaatatagtcctaacaaattttgtcttaataacttttatatgtttctttatttaattaatttaaaaaaattatttatttattacaaaaataaataattactgctttgccaatttaaaaataaattttttcgaacaatattatacaactatttatccctacccttgacagtatttcaaggtggcaattcgggtaccatggacctataattctaagttccaataaactagattatatattgaatctcatcaactaaataatatttgtttattaattcaatgatttattgagttttactgtagtactcattgacatagtcaattctaatgattagccctccatgtgttggtttgtaattagttttggtcaaattaccgttttacccttccaattaattatttatcctgtaggaccattaattcactagtggaactataatttagatctcatctaaatttgcacactactttctagttctagaattaacacataaagggaaccaatattcgat

SEQ ID NO: 75626 - DNA, 851 bp, Cannabis sativa
aaattttgaagaattacttagattttaagctataacaatttaacaaaacacacttattagagaaggattgctttcatcttattaagtgtattaagtatatatgatcattgttcattttgtgaaaatttactactttgtgataaatttatactaaatttaattttaatgcacaattgtaaaattttgatataaaatttgatattttattaaaaaaataatatttattaactttataattaattttattattattttaatcaattctattattattttaatatggaagataattaaaaaaaatgttttataatttaatgtgatagttaaatatactaataaaataataaaaattacataaatgtaaataaaaaagtagtgtatttattgtggtgtaaattttacatcataaaaaatgttatactaaatttggcacaaaatttactatgtgtcaaatttacattactttttcgcacactattaaagcacatttttcattaaatgagctatattttaatttttcagcacttatttatactttaattagagatactcttattcgtgagattttaatacaccccctcacacaagtgtgaatcatgtcaaataactgtgaataatttgatattaaataaaggcatccaacattacaaaaatggacaactatgataccataataggaatttattgggtctaacttaacataacaaaattatgggagaattgttctcactttattaagtgcattaagtatatagtgatgtaatatatagtgacgtaaatataaattgggtattttaacgcgatacctatacgaaaccggtcggatgacacaagcacaactacacaccaat

SEQ ID NO: 75627 - DNA, 976 bp, Cannabis sativa
  modified_base (696)..(711): a, c, t, g, unknown or other
tgagtagccatgtaaatggtttccaaatcctcagttaagatagagaaagtagtgaacttggaaaaattgtctctaggcgcttgttcggttttgctaacaaactttccctttttcccattaccttgtctgttgttgttgttagactgtttaccgctcgagcttgaattgcttgggtactgagggagctagacagatgttccaccagagggagcttttggatggccaggcttaagctcaacttctgctctctgaatggcctcttcaagcttgatgaagcgatctgcacgatcaaggaagtcactcatggaatataccggtctgtctcttttgatatccttccaaagttctccgagaacttcaatgccctctagtatcacggtcaatttcccttcttcggtcaaccgtacaaccttcgttgcctccatcatgaatctgctgatataagcttggagaggttctcctggcctttgattcacttcgaccaggtcttccaaatgcaatgggagttggcaagaagaagagaattttgcatgaaattctgaggagaaagccttccaagagttgaatcttctaggtgtcaacttgaaatactattgttgggcggcttctgagagggtggcaagaaaaactctgtaacatacatctcctcatactccttgtaggtccatttgcatttcaaaatacttaacatgtgannnnnnnnnnnnnnnnccagtatacatcttccaggttggcatcatgaacttatgaggcaactctaggacattgatctctggggagaaaggggttccacgtgctcggtccaactcaaggtcattgttcttctgaccgcccagaccttggaacatattttttagttcatccaactgagcctgcacagatggatttacttgttcggtctcttggccgaccagagtcacgtcagaatctctttgagcgggattttgaacacgagccctaggcgtagtggctggtg

SEQ ID NO: 75628 - DNA, 757 bp, Cannabis sativa
aaaaaaaaaaaaaactattcaaatggtgttctaacatatgtgtcatttggcccaaataaattttatattttttatttatcataatgccactaattattatgatttattaaattttacataattttatattctttatttactatattactattatttaagcaaaaaaaaaattaatgatatttgtatattttcaatataatattataaatgatgattaataataattatatttttttgagcattgctattggaaaccaacgatatccaacacattttataagtggtgtcccacgattggttgacaatatttcctaaaagttattttcttaagttatatgagtcttggtatttaattatactaatagtggtatgacaccgagaaaggtgctagacaccaataatgttttttagtaattttttatttttttacatctttacattaaagcacaattgtaaatagtgagctaaatataacataaatttaatttttatgccaaacttccaaattttacatcaaaatgttcttaaatatttttataactatttgtaagatgctaggaatggtgctaggtataattaaatgcatattggtggaaattaaagtagtatatccatgagaataattaaagtttgaaaaaaccctattataattattaggtaaatattaattattttctttggttatatgtatgtagacggatgagtaatgatatgtacacatataaattattacatatatttacgtgataatttctct

SEQ ID NO: 75629 - DNA, 1077 bp, Cannabis sativa
ttgatgtttaattttacaaaaaaaaattagtttttattagtgatgactcattgatgtcgtcactgataccctcaccatcagtgaggactttcgtgcgtcactaatagtgtcgtcattaaaagttaagattcttatagtatattgttatatgtgtttctggtaaggaacagtgggcccaaataacataaaccgggcaaggtttaggatccattctgatttctgggaaaatatcaatatacagctcgcccaggtaaggttctatcaagccaagtcaacatctgaaagggtatatatctgtgtatctagaagaggtccttagtgtgtatctggaagactcatatagttttccagttactatctcgcacaaaataatgaattgctttcccaaaatctctgacagagaataagatattgctaaaaagaaaaactggatgattagaaattagataattaatatgtcattaattacccatggatataggatatagtatgaacagttaacttcgtgataaggcctccacgtcagcatgcacaaggtgcttcataggtcaggcctttccagataagtccaaagtcaatatatcatttgtaaactccccattagatcgaaaatggtaactaatatgatctctataacactataattactcattgaatctttcatacaaagggttagaaattcttgacatacttgctcaggcaaagaatagagtgctcatacttactgtaatcccttaagctttcctagaaaaatacttaataatattgactcgtggactaaggctcattaatgtccaaaccacataaaactctgagtgtcttcttcatatatttctctctaaattatattttccttaccttttatatttaataattagttttctgaaaaacttggtaaatattttagtgctttcatagagagctaaagaaagcagtgataccatctaagattacgtttagtaattatggtactcatccaaaaaattttgatcttcattaccaagatgatgttgatctaaataccaaaactaggcttgacgaagatcccactagggtgaccaggtgccaaaaagggaa

SEQ ID NO: 75630 - DNA, 729 bp, Cannabis sativa
tccattgattagtaaccccatctgacgaatagtaatacacttttccacccatttgacaaaattatgatggaaacccaaccctttgagtgtagctaatatgaatccccaatccattttatcatatgctttttccatatccaactttatcatcatataccctttctttccttttttctgcctcatggagtgaacaatctctctagacacagctgtgttctccgcgataagcctgccgtgaacaaaagccgacagggccggagagattatgttgggtagtaaaggcttgagcctgagagctaatatctttgatatgcacttatacgccacattgcaaagagctattggtctataatcattaacacttgtggggcaatcttttttagggataagaaccacgttagtgttattaatgaactgtggaagatcggcgtacctgaagaaatgggttaccatgtcctcaaagtcttttttgatcacgttccaatggtgtatatagaaccccaccgacattccatctggccccggtgctttatcttgtcccatggatcttatacacttcagaatttcattctccgaaggaatagagataagcgtctggtttgtagtgtcttcgataagcggattgttgattaaagagttcccctccaagtctgaacgttatctgcaggtgaagatgctgttgaattttgaggagaagagatcagctataattcttgggtcagttaccca

SEQ ID NO: 75631 - DNA, 712 bp, Cannabis sativa
cacacatttttttgggatcctctggaaatgataaagtcaccatatattagatagtcccaaaaaagaaaaatccaatatttaacgaataagatcaaataatgctgctaatctctctataaagaattaacatcaaaataataggaagaagatttaccagtttatgttgtacaatggtggtttcattcacaaccacggcaaaaagtggccggagtttaggtgaagaatagggtaaaggatgaagatttgtacttgacattttctgccttggggccattgaagagttacaagttcttttttatatatctatgaataaaaatagtactaagttattttaaaattattaaggaggacaaaaggagggctttgaaaactggaaaacatatttgtgatataatgtcttacttgatctgcacgatatatgaaaagagtatgataagatgttcatcagtccctattattcaattcatcatcattaacttttttctgttttttatgtaatgtactttttatattgataaaagagaaaaaaaatgaaattataatacacacaaaaggaagaatagtgtggtttttatatatatatatatggatatgattttgtagcgtaacgtactttcatggaatgtatttcatggtacattaaatgggtcttagggtacattaaatgagtgtcagggtatgtttctacttttaatcctaattacccctaaat

SEQ ID NO: 75632 - DNA, 834 bp, Cannabis sativa
gagttctattccttgtttcttcaattatttttaagattttaaagcttcatatgagtgattgttttttattttgaaaataaatttttattagaaataaaaactaaacctcacaattattacacaaaatattcttaggaataggaaaaacagataaccgattaaaccgattacattataggacataaaattaccaatttttaagatactacataacaaacaactagcaaagtacttcatatgagtgctcttgtatattaggtattgttcacgtaaaaatataaatgttacaaaaagtaaactttacaaagtttagctaccaataatccaaataagaatatgaattgtcattttgactttattaattttgagctttttttttttttaaaaaaaaaaaggaaaatcaaacatcagtgaatcatttgataataaaaaaaaaattctttttattaatatttgacaatcatatattttagtaagttaactttttacatagacaaatatatatatatatatatatataattaataataatatgatttagtacaaattaatatttttggcacaagacagaagacatttatatataatatcatgataaaaattttctctttacaaaataaattttgttggcaaataatttcattctcgaattttctagttgtattttttgttattaaattttgtaattttactgtttataacgtgactaaattggtgtttacttaaaactcgactaatatgtttgatcttccaatattatcaaccaactttatttgtaataacggcgagatctaaacaaaaaaaaatattatttcacttttagtacaagcttgc

SEQ ID NO: 75633 - DNA, 797 bp, Cannabis sativa
taaaataatttccaacacataccaccagaatttaaaaggcaacaattgaagaaattctactctgaggtcaaacactactattgggaggagcctatcctctataagcattgtgcggatcagattaacagaagatgtgcgtcggaggaggaaatgttctctattttaaatcattgccatagcttgcaatgcggtggacattttagtgggaaccgtactgctgctaaggtcttacaaagtggattcatttggcccactttatttaaagatgctcaccaatttgttcaagcatgaaatcggtgtcaacgaactagaaatatttcaagaagatgcctttgactggaattcttgaagtggaacttttcgatgtgtggggcattgatttcatgggacctttcccgtcatcatacagtaacacatacatattgttggctgtggattatgtctccaaatgggttgaagtagcaacacatctgaatgatggtaaaactgtgttaaactttcttcagaagaatattttctcccgatttggaacaccaagagcaattataagcgatgaaggaagtcatttctgcaacaagcaatttgaagctttacttgcatgatatggagtttgtcacaaaacaacacttccttatcatcctcagagtaatggccaaacaaaaatttccaacagggagattaaattgattctggagaagatggttcagcgttcaagagagaaatgggctaaaaagctggatgatgcattatgggcctacaggacagcattcaaaacaccaataggaatgtctccctat

SEQ ID NO: 75634 - DNA, 1553 bp, Cannabis sativa
  modified_base (53)..(82): a, c, t, g, unknown or other
atttaaggaatgaccattccaatataacaagaaaaaaaatttaatgatttttnnnnnnnnnnnnnnnnnnnnnnnnnnnnnnattccattccattcctattcctatgcccattcccattcctattcgtatattttcattcctcccaaccaaacgcctccttagattcatcccctatatcatccaatctatgcacaaggtagaatacaaagatgagaaaatttaattcatttcacttgaaagttagatttgtaacatgagaaaaacaatataaataatttcaacaatattgttttttattgaaattttgaagagattggatggttttttgctaatttattaatctagtaaaaataaagcaaaaaatttgaaacatagaaatactaaattcataacagatcctcttctcttctctgccccaagtgtgagctgaaaagtggaaacaaaatcttataaacaatcaaagcaaattcttatgaatttctcatattatttctccattagatctttaactaaaaagttgaagaaaccactatgttttgtaacttgtctatttttgctagccaaggaatatttttatcatcaaaaggtccactacataagatgaatgtagaaacaaagaataggcacatacatagggcctacacaaaaatttgtcttgctctaggatcctttatcgataactttttttaaaatctttatcactgcaaatttaccttagccatggcttgcaacagatgaattctgcgaaactctgtcaaccagaatggtgagcttgccattggagagaacaatggaattagaatagagagtctaaaaaataactatgaatacaaacctctcatcagataaaagcatggggtttagagtaattaataatagacaaacatctagcttgaaataattcgttgaaacacatgtcgaaaaagaaaacgaaactgtaggtccaaaaaagccctcgaattttgattgaaaggaataacctattttcgtaaacacataaatgctattttggaatgctaacaacaaacataaggattgtttgtattttactatgcttttgggtggtgtgagaagtgctttataatgttgtgtgtttcttaaatataaatatggcttgagaagatatgagttttctatttatagaaagttttttgtcaattttgtgaagtgttgttgttcttttttacttcccccaattttgtgtatcaaactaatattaggcagaataataaaatattatttagaaaactaagactattggcaaatgcctatagaggatgcctcaagtcctactatgaaagttttgaagccttcttatcagctaaaaaagaaaagaaacatcttctaactgtttctgatctgattccttctgatctaaagacaaagggctccaaataaacttggttatgtattaaaatagaatcatatcttcaataattataaccaaacactacaaatacaaacatggagtgtaacaactcaatgtgtatactctaaattcttatacacaatacatcaaacaaagcaatataaaaaaaaaaatatcataata

SEQ ID NO: 75635 - DNA, 547 bp, Cannabis sativa
atgcttctactttcattgcaaaattaagagaaaagcagcttaccttgaaaacaaagttgaaaaagaaagaagaagaaagtaagaaagtattgtgtagaagggaatgaaattaacatggtatttataggtggaaatggtgtaaatcatgtttaattattggaactaactaattaataaagtgtatcataggtgaatcattatcatatgtagatgaagttattaatatccaaaatagaattgatatagctagaggtgttattgatttgaatttttatattttttttttcaaatcaaactaatataactattttttttaatactcaaatcaaactaataaatttttcaaactaaaccaagtcattaagaaattgcagtttaagtaaagtttataattattaattttttttagtaattatgagatttttaattttattttttaaaatatatttaatatgataaataatagatttatagcatataaataataatagagcaaaatagtattcatattatgaagtataattttgacttttacatcactctcgtt

SEQ ID NO: 75636 - DNA, 928 bp, Cannabis sativa
tactccatacatctgatactagtaaactttgccaatgccctgtaaaggacataacacttatccaagatgtaagaatacttaccgttgattatcatgccagtctaaatcaagtgcactggcaaatcagggaattaaacttttgaacatatgctcatgattatattccactgtgctggcaacactataatcatgaacaaatgcatatgttctggacttaatagaatttatacattataaaaaatcatgaaataaatcatgtgaatcatgcaacataaaatgcgatttctgatctttattaattagtaaatctgactatattgaaattgattttatttaggacacaaaacccaacaaagtcatggccgaggtgagcctcaactttcgtcgcggcgagagcacgattccagatttttccaaattttatcttttttaaatcataagatttttatggggtataaataggacttttaaggttcatttttagagacttttagattgcgttttttaaagagaaactcaaagaaataggagaagaggaagattgcttcatcaattgttcatcaatttagttcttttcttttcctatctatttgctttttaattatgatgaatagtatagagttgtttctttttagttaagatttatttcaaaatcctaaaacatgaattattgattgttaataaagaatattactcttgatttctctcatattaatttttttttatttttctctttgaatgctatgaatattgtgaatttttgttatgtgtacagctaattaaagttttacattattgtactatcatcttagaattagttctcacctaatagtttaggattctgtagtggccaaaaattgctctaagcccaacgaaaaggcccaacaatcaaagtacttacaaagcccacttataagtcagaaacaag

SEQ ID NO: 75637 - DNA, 939 bp, Cannabis sativa
ttttaaaattgtttttttttttatacatgaatactaatgtatataaaaatatttaaaatatgaagtaattcttctaaaattaaaaaaaatgatatatgaagtattttccttacttttttttttatattttatattataaaatgtattatcaatttgtatgtaaatattttactttttataatcatttattattgttaatttttttttataaaattatatgaaaaataataaataaaattattttgaacacttagatagaaaaaaaaatattgaattattagtattttacaaaaaaatttattattgtaaaaaaaaagttgtcacattccattccaatatcaaccaaacacggtattaatgttgctttccttggtttatcatttccttcatcactctccaattaatgttaaacctattctcataaaatagaacctgcataccaaacgacccctaactatttttgtattcaagagataattttttagtttaaattttttcatgatcgtgtacgttgtaatcatttaaaatattctgcaaaatttattgagagattaaaaaaaaaactctaaatagtatattatttcttacttttatgctccattatttgggtgtgtgagtcatgattagtatttataaatatatatgtataaataattatttatattgaaactaaagtttaattttatgatagttagtagttgttagaatgcaaacgtgtatgattaaggtagtagaataggtaagtgtatgataagatgcatgaggtattccatctcaaaattaattggcaggaggagttcgtgcatcttatatatggtatttagttttaacacattatcaatgtgagattctctaacagtagtcttgtaattcgtaacggaaaatactggataagctatgtaatcccacaccacttagagaaggttaataataacgaag

SEQ ID NO: 75638 - DNA, 842 bp, Cannabis sativa
gcccctcattacagaacccaattagctgcaccaaattcttatgattcgtacgaccaatagcagttacttccgccttgaattcttggtcattttctttcaccatgtgctccaacttcttgacagcaaccaaacattgcttgtcatcaaatgaaagaacccctttgaagacactagcaaaagcaccctttcctagtagctccttgaaaccattggtggccttttctagtttcgcataagtgaaaatttgcaaatttatttctggtatgaaagtattttgcttattcacctttgatttttgactaaagcgaaaaagaacaaaaaggaatgctgcaagttgaaggacattaataaaagctgagctgcttaaaagtattgatccaatgagtactagtgtagattgatctttcgtatttgaatttgcgcctcctgtcattgaagtagaattgcgaactcttacttttataagagctttccctgcaaaagtgggatctatcctcccatttgagaaaggacttcttttcttgtaacattcaattcctctaaaaatggcaataagacaaaagcaatcatctaggcaagacttcctgcaccagtcttcagtcaccccttcaaaatactcgaattcttgagataaagaccagtctgtgttttccatgctaataattttaaagttatcaacatctcccgagtcttcatcacaactttgagcttcaaatgtctgtatgcagcctttcatcttatcatttggatcaatgaaagtgtaaccagttgggcaatggcaatttggtttctgatcaattcctatcacacagtagctattgtacccacaagctccacttcct

SEQ ID NO: 75639 - DNA, 639 bp, Cannabis sativa
ttccttcaaacgttcaacaatcaacggaattttgttaaacgtccatggggtaccttcaaggactctaccaatatccacttcatggaaaaattggaatagatacttattagtttccaattctttgacatacatacctttcccgggcctccacaacgatgccataacgtttcttaaagagtcaaaatctgccggtctgtccgacaataacttgcccactagacaccatcttccatcgaaatcatccaccaaaatctcctcctgatcaaacaataaaccccatccttcctcgtcgtcgacttgaaagtcggcccactgaactcccaattcctcgactgcatgactgctagacgccattgcccaaaaaaaaaaacaaggaaaactaactagataaacagtgaaacacaagcccagactcaccactctcaactcacaaaactcacaaactcacaaacatgtcattagacaagactcaaaagtatgctgtttgttagtattgatcacattggttaatgtctattagtgacttagttccctgtataatcatatatttgatataaaagagatgttttttcttttctaaatgaacacatatacacatttatattatatggagcaaaaatggtgcaccttagtaatttt

SEQ ID NO: 75640 - DNA, 1195 bp, Cannabis sativa
  modified_base (888)..(898): a, c, t, g, unknown or other
  modified_base (1044)..(1058): a, c, t, g, unknown or other
tatatatatatatatatagaaattgattaaaattctcaattagaatcagttgctgtatttattatttttattttttctgtgttatgttaattttttatattatcattatggaactttaatttaaattattaaataacagatttgggttgtctgaagttttgggtacaaaatacaaatacaataatttcagatttttcttaaaaatgatcatttatttatatttgagttgccagttttcttcttttatacataagtttgttttgaaacgtataccattttaggcaaatactaaatacgcaatttcttaggaaaaaaaacaatgatgacattaatataggaataattaattaattaattaaaacttgtccccattaccataaccgaatagtttgctttgctgtctctaataaatctacctcaaatataggacacttaattacgttttttttttttttttctgaatctaaatgtaatgattctttctattttttagtgaattaataaagtaaaatattaacaataaaatgtcaaactccaatttttttaaatgtgtagggaatatttaaaacaacataattatattagaggcaaaataaacaacatataataaagatattttattgtcgacaattaaattacaaagaaacaaatattaaaataggctaaaaatagtaaattactataaaaattaattagtaattttttcttctgaactttgacatgtagtaaatcgtgtcccatgaatttttttggctgttaaaaattctccctaaactattgagattgttaaatttaaggactttcattcaattttactgtttcagtgattgtttatgtacttaactatgctccccagactttgatatctaccaaatcatgctcctcaannnnnnnnnnntactaaatcatgtctcttgaactttcatccatgttagaattttttactaaaattaaacaaaagtccttaaatttaacaatctcaatagttcgagggaatttttaacggcaaaaaaagttcaaaaggcacgatttagtacatgtcannnnnnnnnnnnnnnaattactaattagcctaaaaaaaagtaaagagtgaagtcgccccactcgcactatgtaaacatactacaattttttattcttatttattttaataacaattattcggatgtttaatatattatagttatttttttta

SEQ ID NO: 75641 - DNA, 711 bp, Cannabis sativa
caaagaaagaatcaattaaatacaaatctgatatcaataagacatgttccatcacatgctttccaaaacaaattgtgttccatcacatcaaatcccgaaaatgagcaagcttttgagttttgatacttgagaacgactccattatcaattaaggtgtgtgtgtgtgtgacagagagcatcgatgataatttaaatatattatatttatatacgacatgttccatccaccatactaattccaagtccaccctactagtacccatttagcatgatgaaaaaaccgagaaataagcaggctttagagtatattgatacttcagaatgaccccattataagattgaccttttacctgtaaaatccattgcagatggcctggaggactcatttgcagaaagcatcctttgcaagtcaggaaccaactctgatggaattgaggagaatgcttcgctagataagtaagtcaaggtgttcatgtactgcagaagatggagcaaaagaatttacaattaacattgaatcacaaatacatagtaaaataaatctgcaagagcacttccaccatttacaaattaacaataacaagaggaagaggagagcgctgctagttgctaagcttaacagaagtataatgacactaaatagcaataccatattgaattgaacatacggaataatattaaggatcatcatacagtctttaacaagaggac

SEQ ID NO: 75642 - DNA, 775 bp, Cannabis sativa
tttgatcagttacagggaaagaccatcttctctaagattgaccttcgatctagttatcactagttgaggattcgggaagtggatattctcaaaactgcctcgatatgggcactacgagtttttagtgatgtctttcggcttgactaatgcaccaacaacatttatagacttaatgaatagggtgtttaaggactttctgaacaactttgtaattgtgtttattgatgacattctagtttattatgaatcgaatgaaactcatgaacaacaccttgtatggtattacaacgtctccgagaatacaagctttatgcaaattttaagaaatgtgaattttggttgtcccaagtgagtttcttaggacacgtggtaagtaaggatgggattctggtagatccagtgaagattaaagttgttcagaattggccatgacctaagacagcgactaaagttagaagtttcttaggattggctgggtactataggagatttgtagaagcttttgccaagattgctactcatttgactgagctgacccgaaagagttgcaagtttgtgtggactgataaatgcgagaataacttttaagaattaaagaagagattgattactgcaccagttctaagcctgccagtcagtgatgaaaagtttgtgatatattgtgatgcctcaagacaaggtttgggttgtgtgttaatgcaatcaggagaggtcattgcttatgtctttaagcaattgaaggattttgaatagcgttaccccactcatgatctag

SEQ ID NO: 75643 - DNA, 866 bp, Cannabis sativa
  modified_base (821)..(822): a, c, t, g, unknown or other
ttatatataatattaaataatattacaaatcaaaataaaagacaaatatatttcatgtataccattatatataaaaataaaattatgtatatttatttcatatatatataaaaaaaatagaaaatgtgttgttgttgttggttgcatgtgacaaaatctttaaagagactatcacatacgtaaataacttgtcttattgtttgtatggaagtgcttcttttgagacttaatatattttatacacatttatatacatatatattggatttttttttttttttggtaatatcaatcactgaataatattacaattaattaattaattaaagggaggagctagctaccttaattagtgattatcatgcatggaaaatttactaggtttcaatgtttcatcatattaaatgtccacacaaacaaaataattaattaatatattaaaaaaggttctttaattaattaagttttctttttattcaaagataattttggttaaggttggatataaaaaaaccaactttctccctctgcatgcatatatataattaaaataaataataatactgatctcatttgaaatgtccacacaaacaaaacaattaatacatatatatagtaaaaaaaaaattaaaaaaggtctctctttaatttaagttttctttttattcaaagacaattttggttaaggctgtgaatatatataaatatatatacaccaactttctccctctgcatgctaaaatcaagcatgaacacaaaaggttttggtccatatataatatatatatggaggaggtttcaatggttacatttttattgtnnccatcatggttacattttttttagtcattggatcactattaaat

SEQ ID NO: 75644 - DNA, 1800 bp, Cannabis sativa
aaaaaaattatgtaacttaattttattgttatatatatattttttttaaaaaatatgtaataaatatatttttataatttttattaactaatttactagattggccattttcttaaattttagaaaaagtagacatttactaacttagtttctaaatttagtgtcattttgtatctcaaccctttttttagagcccaacctaacgtaagcccgaattagcagcccaataagttaaactagggctaagcttaatctttcagatacggccaatctccctcgaactctctctattgcgctctccatcactttgctacgctatttccctctctctctttccaaggcacaatactcactcaaggtatgcagcttttcatcatgtttcttcttattcttcttcatatacgtatatatatgtacaagattgaaaggtatatttgatctagtttataggaaagtattttctgttatttcattttcaccactgttttcggaatggttgagttgaacacatatggtatgtgaaatcttattcttgatttgatcttgcgctcttttaatttcatttcatttagactcctccatcttcaatttcaatttcttttttttttgtggttatgttagtctaagacagttcatttttgtcctttttttagtttaattagagaaccctaaatctattgccctcgatttataagggtttttggaggtatgtcttgactttgatgacataacttaatgacaatagatttttttttttcaggaattgatgacaatagaattgtaatatatgtacatatataaatatatttgtatggggatgcttttcttgtgtttatggtactattttgactgaagttgttcaatttactttgtaggggtagattggtgtaatataaaacgaaaatgagtggagcaggagagaaagggtcaacagccacaaaaacgccagctgattttcttaaatcaattcggggacgacctgttgtcgtgaaactcaattctggagttgactacagaggtgtgtgttctttgttattattgttgttgttgttgtatttagatcccagtgattatcctgaaggttattattttttttttgtcttcattgtttacatatatgtgggttgtgagactttgtgtgtgatttcttgttttaaattatctataatggctcagtagttattctcaagagttgatttgagggtaactaatatcattagtttcacgatctcctgttagtgacaaagtgtctattgtaaatattgtcaagaaatcaaagcatgacgcgacgaatggtcattttctccataaaatttacacatttttattttttaaacctgggtaattttcatgtgcaggtatcctagcttgtctggatgggtatatgaatattgcaatggaacaaacagaggagtatgtcaatggtcaactgaaaaacaaatatggtgatgcatttattcgtggaaacaacggtaatgttcaaaggattgtttttctaaatactagtgttcaatttttacttaatactagtgttaaatttgcttagtaataataaaattttatttataattggcgcagttctgtacatcagtacatcaaagaggactttagcagatggggcttagtattgccatgttatcaagtggtgaatataatcttgtctcgagcttctcacaattgtattattatgcttttggattttggttaagaatgaactgaaactatcccaacctggactgaatagttagggttttgttatcaatgcaccatcatataaggtcagctatcatatacatcatt

SEQ ID NO: 75645 - DNA, 1091 bp, Cannabis sativa
  modified_base (1048)..(1049): a, c, t, g, unknown or other
agtttaattcatgtcatttttaattttgaatcattactcaaccatttgcatgttatttcctcttactttaagttgtaattagttggttttacatcaaacttcatttgcgatccctgtggagacgatcttacttatcattgtattacttgtttgactgcgtatacttgcgtatataattttcacaacaagtttttggcaccgttgaagaggattgaaactaaaaattgtgtattatcaactattttgcaatttattttctggtttgagattttaatcccattttggtgcgctgttttttctttttcaggtgctatctaatgcatgaacgagcaagaagaagaccttgaacttgctcctattgacctaaaaattgaacgcacttttagacaaagaaagaaggaacaaaaggctaaaaaacactgcaatatggccgatgggtttgaagttgggggtgctcataatgatgccaatcctattgctttggtcgatgatagagcccgagcagtaagagagtatgcagcccctatgttcaatgagcttaatccgggtattgtgagacccaaaatccaagcacctcactttgagctcaagcccgtcatgtttcaaatgctccaaacggttggtcaatttggtcggtcgccaacggaagatcatcacctccatattggctcattttttgaggtgagtgattctttcaagctacaaggagtaagtgaagaggctttaagattgaagttgttcctattttccttgagggatcaggctagagcttggcttaatactcttcctcccgattcggtgactaattggaaagatttgactgaaaaattcttcagaaagtactttcctccaacaagaaatgcaaagttttgcagtgagatcatgtcctttcaacaattggaagatgagactactagtgatgcatgggaaagattcaggtagttattaaggaagtgcccacaccatggtattcctcattgtatccaacttaaaacattttacaatagtcccaatgcggcctctaggatggtgttggacgcttccgctnntggagccattctttccaagtcttacaatgaagcttttgagat

SEQ ID NO: 75646 - DNA, 525 bp, Cannabis sativa
ttgtattatatgtattagacttttaaattactattttttttttcattaatgttaattgtatgtatatttttttaatttttttttttataaacatgtgtggattggtttagatcgattatttttacatgtcaagcaatattcaattcacacaagtgcggattttaaatttccaatccaatctagttaatccgcacaagtgcaaatatttgcattttgcggattgaattggatcggctattttatgaacaccattgttttctttcataaattcttttatgtgtttaggagaattaccttttatactattttttttaatttttttttaaaatttgggttactccggtgatttctatatatgtgggtcgttatgtgaattttgattgcgatttaagttgctttattaattactatatatgtgtacttaaaaaaaatgaaaaataaaactgttttaaaatataaaattgaaaaattcccaattatttattcttcataaataaaatgtaacgtccccgcttcaagcctcca

SEQ ID NO: 75647 - DNA, 642 bp, Cannabis sativa
agttgttttgtctaaattttcgagataatttaatcttatataagttgttctgtagtgactcatattctgactttgtatatttttggctacacaattaacttgtgaaccggaagtttctctgcgtcgacgattattatagtgtgattctgatcagtctataaaaaaaaagaaaaagttgtttctaggagataagtatgtctgaaaatgtgcatgtctaagtattatttgtgaattagttttggaatttcttactctattcttacaagaagagtgtctgaaatgtaatttgtggtattgattattggttctaattcagttctgttagaatttgacgatacatttatatatttttttggcgtcataaactatcattttattttatcattatagctcataaggccaaattaatgtttagagtaaattaacgttttaataaatcatggttttaaataaattaaggttatatactatatagatgaaaaaatcgattcatgactggccttttaatttgttcttatatgtgtatacatatattaggaaaatttacaattaaacacgtttttctcaatttaatatcaataataacgtggatattttaatttttgaatataccgttatttataccgttttttcattttaaac

SEQ ID NO: 75648 - DNA, 708 bp, Cannabis sativa
tcacagtgcggcaagggcaaggctgctaaagttgaggagccgtgagagcgagcaggtgaagattgtacatgtcgaggaagttaggcttggagcctacgatcctcgggacatcagggcttctgttgtttagtcgcttggcgacaaatcttttgtaaatgaatagcaaacttttgtaattgtattttgtaaacgggatcccggaaaagtataagtataatatgttgtattttaattaaaaagcaaaattttaattattcatgtttttccaataacctcgttgattagcaacgaactgcactgtgtgttaaaaatcacgttaacacgcctttgctagttagggtgttacatcattgctcatattcccttaactaacaagatctataagcaataaccctatcatcttgcatttaaaagcacctaagaccttttctgggtgcatcacagcaaaccttgaactttccctaatttggtggtagtgctagcaccggggctgtgatcaatccctgcttcatttcttagaaacttgtttcacatttgtctaccccatataaactgttgattctccttagttaactctgttatggaagggcattgaaatcttagaaaactcttgaacaaatcggcagtagtaaccagctaaacctagaaaacttctaactttggtggtcttctttagtctcagccaatcaataacggattctatctttt

SEQ ID NO: 75649 - DNA, 806 bp, Cannabis sativa
tttttaattaatatctattaaatcaagttatgtaaattgaaaaataaaaagaaaagtttaaagtcattattaccgtatttcactagtaattctcactatattcaaagtcgttttcatcgccgtatctcacttgtagtcgttactacattcaaagctattatcatcagtaccgcatctcacttatagccgccaatatcaaacacgttataatcattgtatctcactttgtagttgttactatgttcaaagtcgttatcgtcaccatatttcacttgtagtcgtcactacattcaaagtcacaattctcaataccacatctcacctatagtcgctactacatttaatatcgatgtcattagcaaagaatattattaaaatcaatagaagaaagaaattaataaaattgtttgaatcaattttttaattatatgtataaatattaaaataaataaaatattttacttttacaaatatacttatttacatttacatttacttatttagacaaatatataatttaataaaatacataaataaaaaattaattaaaaacaaacatcaaaactaaaaataattaaaaaaatatacatatattaaaaaactaattcaaattaaattcaaattaatttaaggtctaaaggcttcggactagctataccttggatcatgtccttaagttggtcaaactgtgcttgcacagaaggatcttttgttgtgggggctttattgactgacccttcttggggaggcaatagattttagagagataggggttggccggatataccctgtgagagggtatggtg

SEQ ID NO: 75650 - DNA, 718 bp, Cannabis sativa
ctaacttagccgactctgaactcaatcaagctcccatctatttggtagcaaaagtgctcacggttaaatcctttaaccgaaagaacttcatcgacaaaatgacaagcaattggaaccatatctctcgttctcctgttactatcacagatcgttccaatggcctctttctcattgagtttggttgcgatggagataggcgccgggttttgcttcagcaaccttggacctacctcaaccaagctattctcatggacatccctacctcggtggaagtcctcaacggggatagcttgctcaaaatccctctttgggtgcaagttttcaataccccgttccttaaacgaacggagcaattggcacaacttgtttcggctcccctcggtcacctgctcgagatttaccgaccctcccttcgcgaaacatggggcccctatttcagaattagagtcatgtttgatgtggccaatccgcttccgcggggtgtgcctatccatttcaccggcataaacaaagttgtttggctcgaactaaagtacgagaaccttcccgacatttgttttttctgcggccgcatggggcacagttacaataagggatgtgtggattacatgaaagcttgcgacgaagctccgttccctccggagctcaggtatgatatcagaaccattgtgggtaaagttaaggtttccactaacactatgttgtgctctgaacagct

SEQ ID NO: 75651 - DNA, 1039 bp, Cannabis sativa
ctagccgatacgctacctgcctgaccttctcgagtatcttgaatggcactataaacctagggcttaacttgccctttttcccaaaggagcatatacctttcatccatgaaacttgctaaaaaaacatattcttctgcctgaaatgcaatgtctgtgcacttaggatcagaataacttttctgcttgctttgcaaagcaagcatctaagccttaattttgtctattgcctcattggtcctttgaaccaattttggacctaaatacttcctttccccagtttcatcccaatgaattggggaacgacacttcctactgtacaacatttcatagggagccacccctgttgtaccttggtagctactattgttggagaattctattataggcaagtatttactccatgaaccttcaaagtccataacacatgcttgcaataagtcttctattatctatattgtcctttttgactgcccatcagtctaagggtgaaaagttgtactaaactttagctttgtacccatagccctatagaattatctagaattttgatgtaaacttcgaatccctatctaaaacaatggattttggagatccatataaacgaactatttctttaacatacaatggtgcatactgatccactgtataagttatttttactagcagaaaatgtgctgacttcatgaaacagtccactatggcccatactgaataatacattccgttttagttcttggcaacccaaccacgaaatctattataatattatcccacttccatttaagaagttctaaaggtttaaccctgcaggtttctgatgttctgtcttaattttctttcatggtaagcatttagacacatattccactacatctctcttcattccacaccaccaataatagggtttcaggtcgtggtacattttggtggtactcgggtgcaatgaataaggtgtagtatgagcctcatcaaatatttctttcctaagctcaacattactcagaacacacacccgagccttataaagtaacattctact

SEQ ID NO: 75652 - DNA, 810 bp, Cannabis sativa
tcaagtggtttagccgtcaatatttttttttaattttaaatttatatatatttgataaaaaataatttataatatttttatgttatattttatcaaatataaataaaaaagaaattcgaagctcaaatatataagaaaaaacttaagttgatatggtttcttaatataaaaataaaatataaaatatatttttttaaaaaaaaaagaggtttaattattatttattttattatgattaatttattttaaatattttttatttttctaatgtataataaataagtaaatataatttcagtataaataaattaattatattcttttagtcaaaatagttttttctaaaagtcgggttgtactaatttcagcttttagctatagcctgtagcttttctataaatttttcaagaaactgttttttgactgtttaccaaatacatttttatcacagtttttttcaaaaagtagtttttaactttttcaaaagttgtgccaaactggcacttagattattggaatgatatttttaaaatttatgtaattatttaacttaagtacattatcgtgttatgatgtacaagataaatcagttttgtttttaatttatttatgttaattgaattttaaaagatatattattataattttttttaaaaaataaatcaaattcttcctagtgtatataaaaaataaatgtgtggtttatgaccatgattgatgctagagtaaattgttcaaggagactgttcaccatatttactttgttgttgaaataagcgcaattacgaataggctgttcattaaggagac

SEQ ID NO: 75653 - DNA, 538 bp, Cannabis sativa
agaattacaagacaattgactaagtgtgaaagttttaatttctaaagagagaaactagagagagatactttgcccttatgtgtatttttctaaatgtaaaaatgagctagagctaatttatcaaattagccccaaatgtaatattttttgtgtcattagatgatttatcaaacataattacttgtcatttgtttagtgaatttctacaactacgagaattcccacttttgccgacacatttagtgaaatttgttagcaaaagttaccgacaaagggtactttcttagattggcaagatgaagtaagagatgagtagagtaaatagagagacacacaaaacttatagtagttcagtccccatgtcccaatggtaatgaagctacatctactttgatttttttatttctcacaagaactacaagagaattaagtaattattgaagttttaatttctagagcgaaaaactagagagagatgcgctaacgtaatgggtacttttttgaatgtcaaaaataagctagaagagctctcttttta

SEQ ID NO: 75654 - DNA, 836 bp, Cannabis sativa
ttaacaatatcaaaaaatataatcttttatacaatttttatactataatttttccacattattataatatataatataattttacaaagctaccttaattcgatttgtgttttgttagctttcacatagaaatctagataatgatatctcgttgatgatagtgatttccatgattgatgaagtaaatttagtcattcttttttgtttttttgttttttttttttttcataattgataaattaattatttttgcaaatttccaaatccattgtcaaaaatagtgataatttcgctattatatttttgtacgtatcagtggtctttttttacagaattttcactaatcttaaaactaaaagaatgactactataaagtgtcccttaggatggagaagtaatatgaaccttgaaattgagatttttaaacaccaaatggagaaacgacaccactgtactttcaaaaattattttgtcaaatgtcgtatatattaatagaagaaattaagataaattacaactgaattgtaaaaataatacaatgattaaaataagagattaattacataaatgttacaagacatatatacaatatataaatattataagaaatctagaagagatgaattacatgtaatatacaacatatataatataatatgaagaagaagatatatataaactcactcacaaccttgagtggagatttgtgaggatcaccatgacttaaacaaggtattatacctttatccaaaaacttatttcttcccatctctaagcactaaaggaactctcatagaaataactttgataaatatcaagccttttagggtttctag

SEQ ID NO: 75655 - DNA, 926 bp, Cannabis sativa
  modified_base (783)..(787): a, c, t, g, unknown or other
  modified_base (863)..(881): a, c, t, g, unknown or other
aagtcaaccttggcgtaaggctagagaccctttcatactatgacttgagttccttcactccgagaatgttttccctcttgccacgtgtcaaacattgatttctatatcaccacagctacttttggtgtaagcattagccacccaagtcaactttacacttgtgtgaggttgacttattgaggtgaactaagcttgtttgagtcattggagaaaatattaagaattggagtcaaaagcattattcagacctattgaagcccacttgaacgtctaccaagctcctcatcagtgccgtcaattcgctgatcttgtggcctagagacgtgcgtgctcctcaccaccaaaaaaaggtgcatggcaccttcagtcctctgtcagtcgcctgtagcttcctttacttgcctggaacctgccagtagcacctcttccccccacgctagccaccacatcatgccacgtgtttgcctttcctccatagtcgccattttaggagctccacaagctgccacttgtcatcatctccttccaaccgccttttccaagctctttgatgtttccaagtgttctaaatgcatagaaaatgagctcaaaataacaatttcaaaaatacactataattttccattctcttgcatttatttgactcattttcgcatctcacactattttctcagccaataaattacacattctctagtttacttttctaccctttgttgggttttatgccctaaataaactctttacaatctgattagtaatcaatacaagaaatttgaagtnnnnnatgtttgcatgaattttacatggtaatggtttaaatatgtttattatacttgcacacacaaaatcagttaaatccnnnnnnnnnnnnnnnnnnnaattacagtatcgtcaacacaatggaatgtgattgtgatcatatg

SEQ ID NO: 75656 - DNA, 1115 bp, Cannabis sativa
tttttcttattcttctgaattttgttactttcaaagtttctttaacattactaattattgtgcattttacttaaatacattacactacatgataactaatttatactttcaaaaatcatcaatatctatggttaaaaagatgtccctgtagtataaggacaaaagtagagtgtgtactatagaaattttctatatatatagggagtttctacagtaggacttagtgttttgtcctcatgttatacggaaataaaatggaccaataacaagttaaaaaaaattaattgtacagaacttttgttgaataacatgtagagaattatttaatgacttgtttgaataatatttaagtgggaccatcacccaaagattgaagtgttgtaggagggacgcgtgtaattgtgatgggattgttgggagggcaaactgggccttattcatgggctagtttttcctattatttatttgagaaatttacgcacagagatgaaattttaaaattaatattacaattaccgctaactatataattatgtaatatagtgttagttttttagtttttattaggtacatatgcaatgtgcctattattctattttgtttcagcttttaatcatattgttttactttttttttttctctaaacaatatatctatttatgtttttgtcattatcttacttctttttttttttcaagctacaacttttttttattattataataataatattttcttttataaaatttagtgtgtatattatttttgaaaaaaaataagttaggattaattttattatttttgttatttattgtctatctctttatttattgtactgaatagtttattttttatgtatgtttatttgttatttaaagattaaagtttattgtatagttttctgatggaatgtgtatatatatttgttattttaggttttctagtgtattttttatttttaatgtgtatgttattaacagtttatgatttagtagtatttttagctatagttttggttagtatactaattagtttctgttgtattagttttttattaagtagattttttctaggtttgtccttgatcaatataatactgttgtattactttttat

SEQ ID NO: 75657 - DNA, 1817 bp, Cannabis sativa
ttaggaattagacttataaaggtctcattcactctctcctgcattctcccagttaggaaaaactgctgaaccatccagcaaaccgaaactccaataatgtcccaatactttcgaaagaaaatacatggaaattcgtcaggccccggagctttaaggggatgcaacttaaacaccacatccttgatctcaccttcatcaggtacacgacaaattgcttcattctcactctctgtgactttctcagtgaaaagggactccaaatcatcgtctatgtgcgggttcgaggagcagaacatggcctgaaagcagtcctgaaagaacttccaaactcttaaccattccctcgtgtcatccctgatatgaaattatgccttctcctgatcagagtggacatgtggaagaacttcgaattcccatcaccaaaccgaagcaagttctcacgagacttttgtcgccagatcctacccattttctcctccatgtcaaggatttccatttggatttccgcttccttagccaccgtagattgagtgatagccatcttttgcacactctccaattgattccgaaggcatctcaattttctatcacagaagccaaaaacgttctggttccatagtttcaactctctcttggttctgcaaaattttctaggaagccccatttccctttgttcagcaaactcatccttccaggcattatcaataaccattctacagtcttctctttaagtccagacctgaagaaaccgaaaaggataattcagtttcaaagtttccccccaagtgtccagaagaataggagcatggtcggagccaataataggataattctgtacccgagcgttagaaaacacagtgcaccaatctccatcagcaataactctgtcaagccgtttccgaatacagttaggggccaatctcgaattcttccaagtgaaaatgccaccaacactacccaagtcaatcccaccacacttaaacagaaaatttctcagaaattccccttccctagcatcatagtctctacctcctatctttttcgtatggtcaagagtaacattaagatcacccacaagagcccagggatcattgcactcactcactttctcagtgagccaactccagaattctcttttagaagcaccgtagggagtaccatagatacaatacattttccactctgggaatccaatagcagcttggaaagacactaagaacccagtttcatacgtatcaacgacattacacaacacacctattctctaggcaatacaaaatccccccgctaagccattggccgggatgcaccaatggttcacgaacctcaaacgattcaacacagtacccatagtctccacagtaactttagtctcagaaagaaaaagaaaatccgcattagaatcgcggataagaccccggagggtcctctctgccgtggatcatcttaatccacggcagttccatgctaggcaccccatgaggacagtgggggcatgcttccggccgcctcctcgtcgcttccaaaattttgaatgctaccatattcaatgttaacctcaatacagttgttaagaacttcattgttattatctaaatcggctgtatccccagcatctcttccccgtcttcgaccacttctagtttttactcctgaggatcgtttagcagagcgattatcctctttgccctttggttttcttccatgagtcgtagcttttccaggattcgatgcttctccccccgagccaatacagaatttctcctttgttggtgtccactgtgtttttgcaatttcctcacttgcagttttgtttg

SEQ ID NO: 75658 - DNA, 988 bp, Cannabis sativa
  modified_base (309)..(311): a, c, t, g, unknown or other
atggagatgaccccagaccttgtcatgcagataatggaacaattgctttttcgttcgcccaatgtgttgaggaaggcccaggtatttttcgaaggaagaccgtaccgggatacccataaaattggatatcaaagtttgatccctaagctcaacatttggggagaaatacaaagaggatttttagaaattaacttgctgtcccgtggcccgcccataggcctcaagcacctctttgatgatattgcaggagctaatgttggcttgacaaaagaggaaactgtcatctgcaaataggaggtgagagatagnnngggctcttctagcaactttaaagcctaaaagggttctccttctttcttgttggtgcaagagggaagagaagccctccgcacacagcaggaagagataaggagaaaggggatcgccctggcgaatgcccctggaaggattgacactgcctaagactttgccgtttaggttgaattggaaggaggcagtggagatacaggcaaaaatcagatggacaaaccggggagggaattggaatttcctgagaatagccactatgaaaggccactccacacggtcgaaggctttagccatgtcaagcttgatcgccatccatcctttttttccccgcgtcttaagcttgatggaatgcgcaacttcctgggctatgatgatgttgtcagagatgagtcggcccgggaggaaagcgctttgttgaggtgagataagggaattcagaacaagtttcagcctattggcaatagtcttagaaatgattttatatatgatattacagagactgataggccgaaactcagagatacacttaggctgatggactttgggaataagcgtgataagggtgttattcagaggggccacattcgcatttccattgagaaagctggaggccgcttcaaggacgtctttcctgacaacatgccagttggctttgtagaagtgagagttgaagccatcc

SEQ ID NO: 75659 - DNA, 1029 bp, Cannabis sativa
ctctcatcagtataaccaaagcatgcaaataataagaataacaaaagaacatattcctttttattttctagaaaatccgacagcataacgactgtattttgaacaaatctaaaaataataacctccataaatatttgtacaaaaatatatttggcactctgtgctccagaacagtccagaaaaatgtgcacattaagttttcaatttttcaaacaatttacaaatcataaaaattggaatatgtctaatgttattcagcacatataaatatcaagtccaataatcaagttgagtccctacctctcccaggtcgttaaattttatccaaaagacgatcttaagctctcaagtcctgatctccaattatttagtccaatcatagataatactcttacctattccatcaaatggctatataattattatcattgcattctatattcaaaatcgagtccaatgaaatatactatgaccatatttaaagtttggagttttgagaactcgcttaagcggtgcacattaactatcggtggttataaaaattggtgtgccgaaaacatcaccaaaaataggggtagcatatatgaaaacaaccacctcgaccagtagatcacacccatgctaactgtttgtcaaaacagtacacgatatcgccggaaagtcactggaacggggcgaacctacaaaaatatcaccgaaaaaagtagcgagttgggtaaaatggtttagtgtaggttgttcttcacgacaagctaagtctagtggtgaagacgactcgtcaaatggacaccagaggtggtcgaaaaatccattcaaagtttgaacctccaaactttgacttgcgattctgggctaacgacggcgaaaggagcgacaccgattggggttgaggtcgccggcacctgtgggtttaaatggtccagcgcgtggggctggaaggtggccagagatgggtcgtcaaagtcacgctagtgatggggttttgtgggttttctattgtggtttgataagatatatatatatatatat

SEQ ID NO: 75660 - DNA, 648 bp, Cannabis sativa
tgtgtcagatgtacttagaaaagaagcagtgtaacaataagtacgaggtagtttgggccccaatcaaagtattctgggacaacgatctagttgagttgtttatgaccatgagagagaaaatggagtgttacacgatctacaatagtgtggcgctttctcctgccataatcagctccatcataaagaaatggaagttcaatattaagaagcctatggtgttggttttagatgagagaggtcaatatgtgcattacaatgccctttacatgatgggcatatggggcattagagcctaccctttctcatatgttagagaagaagaattgtggaagcaaaacaattgctggaacttcaactttatccttcaccgcctccacccagacatcactaattgggtatatatataattacactaattaaaatcataaataagatttatcgtcataaaactattatcacttttaaatgatgcgtcatgatatctagtgtcgagtatgcaacgaaaggtatttatgccgctaaaattttgatttaggtattaaattgctggaagataaattactctaatattaatttacctcttgtgaaaaagaaaaatgttattataattttgtgtatgcacatgtttcagatggtagagaagagata

SEQ ID NO: 75661 - DNA, 601 bp, Cannabis sativa
aaaaaaaaaaaaaaagaaatgtttacaagataaataggcattataaaaaggtatataaatgtagagcaaaactgtaataacatagagaatttgatagtgcatttttgtctcattttctttatattttgggaagaatatttcttttacacgatcgagtgtgatgattgtgctcttgtggatcgaaattctaagaacagttctttggttaggaccactttatatcgaacacagatgattggattcaaatgtgcttaatcattcggaggaatcagattccttacgatttcatttttgttccagatatacttgcatatatattgaattagatcaaaaaggtataccaaatatatatattcctatggagtaaatttgtatggttacattgataatataactattacccttatattttttagtcattaaattactattgaattggttgtgattaatttaaaaatttaataaaaataaataataattaaccataacttaataattacctaataatttatttatttataaaactttaataaaaattaattatattttaaaattaaattaaattttttataattattaattaatttttcgtaatttatta

SEQ ID NO: 75662 - DNA, 821 bp, Cannabis sativa
  modified_base (27)..(33): a, c, t, g, unknown or other
aattctgattatattgaaatgagtttnnnnnnnggcataaaacccaacactgtcttcgtgaacgggtcgactgtgaacaatcgcttgttgtgtagtgttgtctccagaaatgttagaaactggaggaatgagcggaggaggagcatctggaatattggaagaattgtgcagcaacggagtttggccggagcttcgtgatccagtagctcgagttctcgccatagaagacgatggaagaaaaaattgcagagagaatcagagggagtgaatttcgtctgataccatattagtgtaatgaattcttagtattattgaatgagaagaagtacattatttatacaaaagatgtaacaagattattgttacaaaacaaacaagtgagaagctgaaaactaactaacagaatgtctaactaacaataacagaaatatgttatcctaatacacaccgcactattttttgcggtacggtttctgcggttttttagttttgcagtgtgggtgctgtttgagaaattagaaaaaccgcatgtgcagattggtttgaaaaaatggtcaaaaactgcaccacctgcaccgcaaacacccttaagtaagacaaaggatgggtctgttccattgatgatcaactctattaataaaaatgcattatgtaaccactttgatttttaatttcaaaaacggtaaacaaaagtatgttttgtaaaatttatttttattttttattttttaattctatttaagtcagatctaggtccggggtcggattcgggtttgggttcgagtcaaaggccgggattagtgccagggtcgttggggggg

SEQ ID NO: 75663 - DNA, 611 bp, Cannabis sativa
cgtgggtgccacttccataatagcacaactcgttatccttgtcctccaccatgaatagcttagcctcgtagttcatctttttcttaagcttcttgtaggtttgaagctactccttcttgattgttctattgagacgacttgatcgtctaagcaacataatctcttaatatttagttctaattcttctaaaataaaattcttataagaaatcaacctaactatttgaataatttataatattcctagtagataaaatcaattaattattttttttctataaaagaaaagtctctccctgttaacataacatagttcaccaaataatttctatttacaccaagataaaataactatataactaagtaacactaaataaatacattaaataaaataataaaaactttttcttttaatattgttacttaaagaaaaaaaaattgtctaggctttctagttatgattttttgtaaaaaaaaaaaaaaaattatctagaaatatatttatacatatatattaatttttttttttttttgatttcatatgggtagtacctaaatttggatattggcactaaggtttctgtaataaatgaaattttgaaattacacaag

SEQ ID NO: 75664 - DNA, 900 bp, Cannabis sativa
  modified_base (40)..(40): a, c, t, g, unknown or other
gaagcccaaatagtggcttacggaggacactatacaaccngaatggcaggatatgtacccagagttcaactctcgggaaccctaccttagtttactccacaaatgcacggcatacagttctccgctaccccaggatacaatcagagcccagccttggctcttgcatctttccattacgggaacccctcagggatgagtggacaagtcccgtttcactctactcttgctgcgagcttaaccggacctcctcaaagctcccggagcaagaggtcctcaaaaggcagcacctagacggaggacaagcgccaaaaaaagggggtatactccccaatataaccagtacacagagttgacggacacgcaagagcgagtatatttttccacaaggaaaaataggcactaccggaagcctcctcctctgtacagacacagtacgcgaaaggatcccagcaagagatgtgtataccacaacgacattggacacagtaccaatgagtgcaagaatctaaaagatgagatcaaaaacttaatctgattgggtcacctatatgattggatcaagaacggctgcatctcaacccggttccagcagggggcccattgcctcaagggacactaggaggtacgcccggagcgttggcaccagctgtaccctccgggggagcgatccctcagcacacccctgacttgcaaccaagacccaacggaagagtagccatgatctcttgtgggccccatattggggggaccaccagaaaagaattaaagcgctatgctggggccatcaaacatgacgaagtatgggaagtcaccaagcttctagctcaaaggccccgactcatggatcagccaattactttcacagaggaagacacaaaactggtgtgtttccctcatcat

SEQ ID NO: 75665 - DNA, 721 bp, Cannabis sativa
  modified_base (549)..(555): a, c, t, g, unknown or other
cttcagcagcacatgtattggctgaactcctgcacgcaacactctatttttaatcttttctagcacaatggaactcttccaggtacgagtaagaaaaatagaggagggcatcagctgctttggtcttgtaccatgcctctctttatttcgttcactccaaatgcaccaaagaattgttgcaaattgctccagctgctgagttgaaaaaatgattgagcaatgcataaacatttccatcaaattggtgtggtgataaacataaacaagattataactaggtgctcatacacacaattgcaattctatctcgcgtcccatgtgtactgagtctggaatatttgtataaaaaggctagcatatatctattgatatcttagtgtaacactatgtacacttcaccaatatcctgatatgctaatctaatggctactgatatgcctgacataaatttgttggtatttcagtgcaactctatctacacctcaccgatatcctgatatgttattctaatgttaactaacatgcacactaaacatgtattcatatatnnnnnnnttatactaatcttaccttgatttcaaattcaaatgtgccgatcaacctaagtagaaactactgctcaacgatttacaagcccctaagtcacaacatacataaaactgataagtgatacgctaaatcactttttgaggacttaaaactcaaaactaaaagtttctct

SEQ ID NO: 75666 - DNA, 848 bp, Cannabis sativa
atatgtatattttttaaaaagtatttttttttttatttgggcccctaaaatgagtgaaccctaggcgcgagcctagcttgcctatgcttagagccgactctgtctatagtttatgggttcattgagttggatcaagatctaattacaaattttaccattataaatataaaatttcaatgtgtaagatctatatgattcatttttataaagaaaaatgtaataaaggactaatataaagttatcttatattaaacaaaattgttttattaagaacaaaaaaataacgaaccttaagtcaataaaaactgagaaaaaatttcatttaagagctcaatttaggatccaattcgaaattttctttgataggtatgaaagaggaattaaaataaaataatatagatttatatagatatgtttatacggatagagaagaaaattttctctattgatttaaatgatgtacctacaaaatgcatagagataagttaaggaatacctttttttttgtatccattaataaaaaaaatactctcatattatgtttcattaaaatctacctatttttatgagtgggttgtctaatttatccttgccctccacctaagtgtagcacataatttatattaatctaaggggtatagtggggacatcatttataaaagtaagtatattttaaaaaaaaataaaaatgaagataaaaataaaaaataataaaataaagtaagtatagaatgcaatttctacaaatacataaaggtacttagttaccgtacttaatttttcgagtaaataccattttagaccctctgttttacaaaagttattaattggaccctgtgttttgttaa

SEQ ID NO: 75667 - DNA, 672 bp, Cannabis sativa
  modified_base (212)..(233): a, c, t, g, unknown or other
aattgttaattaatgagaatgagaacacgtttacgttttttttttaaacaagtagcatttagtttctgatattaagaatattaagttttaaaataaaataaaaataagtgtaatgcatctgaactattcacgtgtccatatttatgagttaacaaaagtggtagtaacggtataagagaattgtcatattaggtatttttgcctccaaaaannnnnnnnnnnnnnnnnnnnnnataaaatctgaaacattaggtatttaagtgtataaaatctgaaacattaggtatttatgccgcaatttaccctttctattaaccaataaattatgctaccaacgatcctaacaaatcagttaggacatccctaaattgaaaaagacaatcaagatatgaaatagttgttcttacaaagttagcaaccaaattaactaaccgtttgacaaaggaaatagaaaaattttgtaacttagaaataatagctttacaatcttggatcacctgcctaggcaggtgatctagactacctgaacttgatgtcatgctctcattttaatccaacttaaagctttttgcattgcttatgctagtactggttccacggtccctgatagcaaacgggtgccttcttcaatcaaatggccaatatcatttcgagccacaaaaccaacacgag

SEQ ID NO: 75668 - DNA, 654 bp, Cannabis sativa
  modified_base (59)..(63): a, c, t, g, unknown or other
aataatttgtggtataaatatttacgttttaacccccagttgtaaataaatacttaagnnnnntttttggcgataataatacttaaattatagttttggaacttgtgtaggtacctggttgttaagtgttaagtaaattgccaagttgtaatttctgattagtctaggtcattagttaaatgttaattaaattgtgatgtgttattgtatttaggtcattcaatttttacttttttttaaaaaaaatagtttaaatataccaataccaaaatgaaacgtgataatgaaattccataaatataattttagtattattttggccaattactctataaataatgaaacaaactcactaattcaatccttcctaagaagaagagcttgtttttgctgacaatggccaactttcagaggtaatttaatctctcaaattacatcattattgtttattatgtatacattttatttttattcttgtcttttcaaataaattcatgtaaaattttggtgttgttctgagtttcttttggtggatttgattgaattgtgttcatcagattttcaaaactgacaaaaacaagatgcatctcttatggatggaaggaacttaactcttaactgtaggaatcgaaataaaatttcttcctatgttga

SEQ ID NO: 75669 - DNA, 1074 bp, Cannabis sativa
gtagacgagccatctgcttcgactgctctaaccactatagttaatacatcagacattacgacgctagcaaagaggtgggataggcttgaggcccaacaagctgccattatactcttgttgatggatttattaaatagccaaacaaatatgaggtgctctaaactggatagtcaaaaagagatgaaggagtttttgatggttatttagttggccaatgtgataactttgttgaatgagaaggacagggcaccacaaccatcccaactagcagatgatcgaccttgcatgagagtgagtatgaagatgagttcctaaaagattaggaataagatgatgctgaggaattgtctactctaacggatgccattatcacgatcattggtgatacagagtcacaggacgatgtcctactcctgactggacccctagaagaggtaccatttgtgagaatgaggaagaagcctttctatttgctagactacactgaggaaaaaaggaagaagtgacttcttctagagaatgtagattcgacaagaccagcaaatcgtagattgttacgtacgttcaagaggtgggtgcttggacacatcctaaataactgtcttaagaatctccacactgacattggtgatgtcaatttctttacgaagttattagtggttggaaaatagttggatgatgatgtaagtatttttctttataatgcatttcaattttttattgctgtattttatcgatatgtagtgacatctagtgagttttttccattaggttagcaaattctaacgatatataagccaaatatcataagaattcagttgtagaaatttttattgatatttttggtgacatcttgcgacatttttgtggatttattatgattatgtttagcgacatgtagcgatttcatttgtgatattctacgatatgttggctatatttttcttttggtataattggttgttttttgaattttcatgcaacatataaataccattttttacatgacgaggaggagacgacaccttttcccaaacccgtacccttagccaggtgtggttttggactcatcat

SEQ ID NO: 75670 - DNA, 856 bp, Cannabis sativa
  modified_base (479)..(486): a, c, t, g, unknown or other
aaacggcaccttagttttttaaaactttattacaaaaatatggcagatttaggtttggccattttttatggcatattttagtttttaagtttttttatggtatttattatgtcatacatatgtaaacttgatttttaaaagtagaaaacaaattacacaatatatgagaaaattattagagtttacttttttatggtataaataataatgctaaggggttatgagtttttttttacatttatatgagctttttctatgctatatttttgtaaaaaaaagatgaaaatctcatacttgtaaacaataataagttctgccagaaaagtcatcggcgccgaaaaagtaagtgttgccagaaaagtcgccaaaaaagtcatcagaaaaatcatcgttgctggaaaaagtcactaaaagaacatcagaagtagatgtctcaaatataaacaaaaaaagaatcggttctataacataatgaatannnnnnnntaacacaaaataactcaaaccgattataattgaaatataaccggttctgtaacataataaataaaaacgaataaaataaaatacctcaaagtaattataattaaaatagaaccggttctataacaatgttataataaataaaaataaataacacgaaataacttaaactgattataactaaaatagaaccaattatataacataatgaatgagtattttttaggtagatatggtatgagtgtaattgatatttagtgggttgtagcatgttgaatgaatgtttttgtttgagttatttgatttaactggaaatataatcggttttgtaacataataaataaaaaaaaaaagtaacacgaaataactcaaa

SEQ ID NO: 75671 - DNA, 1023 bp, Cannabis sativa
attccttacggtttgaatgaatctttcttccctattcgtgctcaaattctgttaattgagccttttccctctctatccaaagttttttccatgattattcatgaagaaagacagagaaagcttaaaaaatcctcacatttctcttattgcatatgtccaagaacctaatccatctgttgcttgcccaaactccctcggcatcagcatctaacaacaataataatggacacaataagaaaatgagaccctattgctcaaattgccataaaccatggcatttaaaggataaatgttacttccttattgggtttcccctggctatggcaacaagaaacaatctgataaggaacctactgctcataatgtcactgctcccactgataaattgttggccaatctgactaagaatgaagacattcaagctctcatttctctcctcagtcagaagctgcaacaaacaccaactgatgcaccaatctttgtctcaaacatctctggtaatgcctctaactctcggtttttgggtaatagacagcggtgcaacacatcacatttgttgcaacttgtctctttttacaactttacatcacaatgtcatagccttttttgtttctcttcctaatggcaccaaaatacctgttcaaaaatcaggcactattcacatatctgctactttaactttgcataatgttctttatgtgcctagttttcagctcaatctctttagtgtctctagctttcttagcaacactactaactatatatccttcactcatgattactgttttctttaggattcacagaagaggaagattgggacaactaaaagacttggacatttgtattttttgttgtcattcttcaatactagaataaactcaccatgtaatcaatcatgtaattctactttttcttggcattgtagatttggacatctgtccatatcaactaccaatttcatcaataaaatttttcaattgagtagttctcacaatgatgttccttgctccatttgtcatttag

SEQ ID NO: 75672 - DNA, 1576 bp, Cannabis sativa
  modified_base (81)..(81): a, c, t, g, unknown or other
aactaatgtcctgagttcaattttcaaatccaagaaatacagatctcaagaagttgaactggagttcccaaacaatccaantcaagtataatccaaaaaaaattatatcaatattatagtaaaatatttatcctagtgtatttttgttgttttcaaaatttctaatggtgaatttgttcatattgaatcatgaagagacatgtagatagagttacgtacgtgaaaacactgttctgatttttaatatttcataacagttgtattacagttgcataaatattttgctaacagttattttgtcttattgaaacttttattggtgcaaccttcagccaaccacccaacaaccttcgtctgatgcaaccttcgacaaccacccagcaaccatcatctaattgtgtaagtgatagtgtaagaggtattttggtaattaaaagcatataaaaagtataaatattgttcacaccttatggaagtatttttgtaaataaagtttcaatttgtattttacatgtaataattcatttatgaattttgtgattttatgtgcatatgtagacttagcttgattttgttgatatttagatagctagaacttatgtgattaatttatcgaggcatcctaaatcttggttgcgtggagatgattaaggtaattttttataatcgtttgggccaaaaaagctaccattaattcattatcttttgttgtcctactttgagcctaatttttcttatttttattctttgttaataaatgcatatttatccttgattatgagccatgaacttaaacaaattatctttatcctacgttgcactataaacataggttgtcatgtactaaataaaaaatataacataagtgggatgggaaattgtttttgagaatcaaatttggaaaggatgtatgtgaatagagagttatgatccaagtgctacgataaaagaaattctcttgttatgaaaaaaaaaaatacttcaaagaaaaaaattcatgttgaaaatacattaataacaagagataaattttagaggattttaacgttgattgtacgaaaaaataagcattggatgaaaaatattgttgagagaaaagggaaattacaatgaaggtttttgtatttgattagtggttttgtaaatttatagtgtgaaattagcccaaatgacatttttatccaccatatatataagcctaacgttacatgtctataaaatccttgtgatctacatgattttagtttacaatattagagatgaattgattatgcaagcctagttggttaaattctagtcgttagtttgaaatgcatgttgaataattgaaagagtttaatgttgagataaactacccttggtttaagatttgcaattttttcatccaatcattaaattattatttttttttttagttttattttttatcattgcttttggagatgtgataagtgctcatttgtacactcgtttttggtcattatttagatgaaatattatgttattcttaaagttttgtataaatttgataagttttttgtagtgtgcagttttgagcataaagtgataaaattat

SEQ ID NO: 75673 - DNA, 668 bp, Cannabis sativa
cacgcgtttcttggcttaagtcgggagattcgaatatgaaattttttcatcagcgtgccaatgcaagacactccaacaataaaattaaaaaactgactggggacaatggacaagtttacaccagcagccatgatattttgcagcagattgaactttattttattggtattttctctactcagggtgttgatcagctggcccttcaagcagtcctggacactattcctgtgaccatcactcctgaatctcgtgaagctttatcttctccttttactgctgaagacgtttattctgcattaaaatcgatgtctgaagacagcagtcctggggatgatggaatgtctgttatgttttacaccaactattggcatattgtggggactcttgttacaagttctgtgttggatgttctgaataatggtggagatccttcttcattcaataggactcttatcacccttattcctaaagtgaaaaaaccttcaagaatcacgcagtataggccaatcagtttgtgcaatgttttgtacaaacttgtgtccaaaacaattgtgcttcggcttcaaccatacctggctgtggttatctctgaattccagagtgcttttctctctcaacggcttattacggataatattcttgtagcatttgaggttcttcattctcta

SEQ ID NO: 75674 - DNA, 694 bp, Cannabis sativa
ttactaggttagctaataatataatagttcttataattaaactagtgattaatatgttgtagctaaaacataacagtgacaattatatttttgtaagtgaagttcaacttaaaaatagaaaacatttaaattttagacatgctatttgctatgctactattataataaatataacatattttgatttttttaattatgtctaaaaaaaataaagagtattataaaatataatattattttaattgaaatagtatatttttttaaaggaattaaaatagtacatgaaaatgtaaaatgtggtaggttgcaagtttccaaactttagttacccctactttttggtggacaaatatcagtcctaagataccaaaaatatgactcctaatttaatctaatggttataatgctgatgatggatcaaacacctcaaaaacatgatacatgatgaggtattgtataatttgccaataaaaaaatgataaaacaaaaataaaatttttcatcaaagtaaaataaagttagtgctatacataaaataaaaatttaaagaaaaaaaaaagaatttagtgaaaagtgttgccacttgccattatactagtctcttattgttgaagcctaaagcaaggtatcagttaattttttttaattaaaatggtaaaagaatttgtgcttttttattttaagaagaagcaac

SEQ ID NO: 75675 - DNA, 1500 bp, Cannabis sativa
aaaaaaaaatcggattgtatattaatattttttgtatggcatacatatatttttattcaaagaatatcaatctttaatttttttttctttctttattttattcgtcatattaagatatgtatttgaatcaggtcaggcaattttcataaatatggaaaatttaaatgaagattacttttatatggcataaataatataaaaagattcgagattaaaaaataatcaaagtttaaaatatgggaaacaaaaaaaaataccataaataaatttgataataataggtattgatgaaaagtcgctgaaaacgttgtcgtcgcagaaaaagtcatcggcgtcagaaaaattaccgaaaaagttatggtcactataaaagttgtcgaaaaagtcaccgaaaaaatcatcgtaaaagtcaccagatttgtcatcgtcgtcagaaaagtcacttgagttaaatgtcttagatattttttataaaatatagaaccggtttctataaaacaataaataaaagtaaataacacagaataactgaaatcagttataattaaagtaaaatcggttctataacatgaagaataaaaataaataacacaaaataactcaaaccagtattaacaaaatgctaatggctctctcacaaaaaaatgcttgaaaggagattcctccttcaccctttccaataactgcatttccataaacttagctttcactttggggtaataccaactaccgcatcgccaagtcacacgaccagtgtaatgttctgacactggaagtaaaagccgtggaactttgaaagactgcaaaaaaataccaagaaaaatagctgtcagaaaaaaatagctgcaagtaaaaatttggttttctatatcttttttattaattattgcaagtatgaatggattatatatttgaaagtcattctagaactccataatattcaataaacttctatgttttaatataaataataaaattaaaaattccaaccccataaaataaaacattatctattcaagaaatttattttgacctagtaacaacttactatctaatcaaaatattaagtataatcactaatcaaataaattatcaaagtcatgtcttaacccaccaatatatatttttaattaaactaaaaaaaattaattaaaaatctaatataacaaaaaaaaaattaacaatacacaacacaatcgagcaataaaaaataaaaataaaaatattgttaataaatcaataaaatataaaacaatacaaaataaaataattattaataaatcaataaaaaataaaatgataattaataaaacaataattaataattaataataaaacaataactaataattaataaaataatgaaaaattaaacaataattaataattaataataaaatttcaaaattaaataaagcactcggaccccatcggacccataattggacctatcgggcattatcaggaaaaattaaaatgaaaatacaaaaattggggtac

SEQ ID NO: 75676 - DNA, 697 bp, Cannabis sativa
tggtttgatgaaatactttaattaaatgtttaagtgtgttatttgtcctatgcaatttgaatatttatgtatttgttttaaaaacttagtatatatatatatatttttacagaaattatgatagaatattgaatataagtatattttactatttaaactatagaaattaaaaatgaaaattattaaataaattaacaccatagttaaaattacaaaaatcattcatcgattttttttaataaaattaatcaaatatgtttctattaaatttaaagaatttgttgttaagcacaatgatattgtggcagtctaatcttttaggattctaactttctaaatttatggtttttctaatttttcttacgcaataataataaaatgatctataatttatttaataacctaatcacaattaatatgtattttattagtttttaattccaaaaattattcaccttctcacgttatcataataaatgatatattaattagtacattctattacataaaaatgaatctattacatatatttttaagaaataatttaatgtaatatatatcaataactatgaatataattacactttattattgatatttcaaaaacatcagatggaattacaaatttgatgtatgagttgcgtcatggtttatggctttggtgccttttaaagttttcgcgcatgatttatggctg

SEQ ID NO: 75677 - DNA, 959 bp, Cannabis sativa
tcttcaatgtctttagccaagactagtttaccaccagttctatcttggaaaccatacattgcattgaagtctccaacaataacctaaggcttgtttatctggccaaaaccaacaagcttcgtaaaaagagctatcctttctaaagcattattactcccataaactattgtaacgaagatcccatcaacaatccccacaactttaaccttaatatggattaattggctatcttcgagcaatataacaacatgggcaaatttagactaccaaattaataaaatacaaccaataactatagtactagaataatgatcccagttagggatattattagaaaccatatcactaacattctcaggtttaatcttggtttcaaataaagcaccaagacccacattattctctctacaaacatccaaaatcgacctccgtttctcctttttattaatgcccctaacattccaactaaagacgttacaaacttccattaatagtttctattgtttgtgaccagttccccatctccaggttcttgaaaaacctcatatccgttgctggttcaagcccttagatcagcaattacaacttgttttgaccctttctttttaggaattaaccaactagctgaatcatccttcatgcctaattgttagtctttattaattaccaactaatcatcttgaatctcatttgaaatcctaccttcctgaactgtagaatacacatcttccactccagttctctcctttatcctcgagacttccttcactttatcatccttactcgaataatgttttagttatccaacgttagtcttctgatttgtatcaccctttattctccacacaaagctcttctctttattgctgttagcaaatgtatgtcccagcaggccgcaagtcccacacttggaagggagccattcgtattcaataggttgttctgccaattgcttcctt

SEQ ID NO: 75678 - DNA, 690 bp, Cannabis sativa
taatttgattagtttaacaactaagaggttgagagttcaaatcccaatagtctcacttttacattgggccccaatttttattttgcctgaggcccaaattaacatagagccgaccctgaacatgtggcccgatgatatatcaccacgtgcctcttaggtggtatttaataggccgacttggtatttacagtcaaaagagcatgtttacaacaaaatattgatgtatttttataattatttttttaattagaactatatgtgtaacaattaaaaatgataaggatttttgcggcatatatccggctaaaaaacaatactcattaattttgccataccaaaaaagtgaaggacaaatccagtaattattctaaactatttgtttaaactaaattataagtaaaacagtattattaaattttaattttattttactttcgaaaaataaatgtatatatattctgaaatatttgtacatacatacacatgaaacttatatacaaacaaaagtagtctgaattttcgacttttcgttttgggaaaccgttgcatgttcactataatggcaatgttttttcacctcttgtttttggttgcctttattgctatcttgcttaataataataatgttaattgatcgacaagagacttattattatgtcatgtataattaattcaatttgtttttaattc

SEQ ID NO: 75679 - DNA, 683 bp, Cannabis sativa
tttgttaataagttgcagaaccgtaatgtattttatttgtgttatttctcaactgatttttgatttaactaaagggcagaagtcccctaaaaggcgaactagtttttgtgatgtcgaattgtttatattatgttttttaattttaattacaaccagttattgagtaatttgtgttatttgttttaactcattttgttgtggaatttgttctatttaatatgatatgtcttagtatttttagaaataatttcctcttatttgtatgttgtgtttgttttattcatttttaccggttcttaatatttttatattattttttttctagtgaacatatttgaagattgacccaaatcttgtattgctagtaagttgcaaagaatgtattgtattttatttgtattgtttctcagttagtttttgattttgtatttcatgaacccgtttttgatttagttaattccagggaccgattttgaattttgttattctaggaaccaattttcgatttagttaagatcaagaaaccagtttttgtgtgttaatttttattttagttgctttactgaatcagtttctttgtcttagatttttaactaattgataaacgtaaccatttccttgtgtcttattctaacgtccaacttgaacatctaactcttgtgatgatgaaaactctgatgact

SEQ ID NO: 75680 - DNA, 1320 bp, Cannabis sativa
ttggatttgagctattgtgcagattggatttgatccaaaaaaataaaatcggcacttagtgcggagtgaatgttgtttaacaaaaaaaatgcgaattagatcagataaacagccctaacaaattataacatgttatctctcatagtgctgcataataatgctcatcttttaaacatatttaagaaggaattataacttttaattagatgtcagcctatacgtcagtcttggctagcttcgattattttggtataacttaatatatttcaacgccgaaaattaggttattcgataaaaacaatcacgtaaattacatgcagttcagatcgtttacacaaactgtatatataattatatcaacgagtaacctttagatggtccggcgtcacacatttggtccacacataaactttgtaagttaggtgatcaattagttgtgacataattctgttcgaaataaaaaaaaaatagttgttacataattaagaataacatttaaatatcaatgtataataatgttttatattaggtacataactatataactatattgtatgtgttaatttgttctttagttatttgtttacctgactaaaatgtatgagagtagataatattgcctaattgatattttataactataataacattaatattgttgtcctgagaattaaattagactaagaatatttttttgtcactcactccagaaacatgtaccaattatcagtatgtaaataattgctttgtgatcacaattgacgtaatgtaattggtaagcacacaccaacatttgatgttgatcgagataaattagaatatcacttctatatatcaaaaaagagaggaaaaaaaagaataccacttttttactccatttcaaaatttatatatataattaattaaagttgttttttcatgaataaatgataatttcagggtatgtaatgaatgtgggatcttaaatatagacctttctaattctgatgatggtactattgtgcctaaattatggtagggttaggacttctccaataaaatactaaaattcaataatagtaaagtttggataaaaaattactctaataacactataaactacactaaattttctttttaatttttaacattatttaaagtaatgtatttatgattaaatttttatatttttatataaattgtattgtgagataatttaataaaataatataataataaaaaatattttttagtgtaaactttagtgttgtagttggaatagaaaaaaatttagtgctaaaattatacatttttagcattaatttaacactataaatttaa

SEQ ID NO: 75681 - DNA, 1101 bp, Cannabis sativa
agaacagccactgatctctatctcactcaagccaagtacacttcagatcttctcactcgtaccaatatggccgctgctactcctacaccaacaccgatgtgtcccaacaccaaacttgctgcctcaatgggaactattatggaaaatcctactctttatcgcagtgttattggtactctccagtatttaactttgacaaggcccgacatctcttttgctgtaaacaagttatctcaattcttaaaagctcccaccgatgtacattggtctgcttgcaaacgaattcttcggtacttggctggcacaatagactatggtctccatttcaaggctgcatctcctctcactctagttgcctacactgatgctgactgggcaagctctattgatgacagacgatcaacttctggttattgcgtctatctgggccacaatttaatcacctggagctcgagaaaacaaaccgtagtggctcgctcaagcacggaatctgagtaccgtgccattgctcttgccaccactctcaatgtatataaatacatcttctctgctccagttgagaacagagcttctcttttcattttctctctatcttctcccttgttctgctcttacagatttcatgtctttatgttatctcttacatttagttaattaagaagaaagtttttacattctctcttatttttgttaattttatatacacaaatatttacatgagtacaaattttcatgcacattatcaaccatccactattaaattattattttgttgataacagtaaaagaatacagaataatattctgcagacaattttaaaagtttacttcaccaaaggccacattgaactcaacaaacaaaaataaaaataataaggcccgacccatacaagtagaatagctactcaaaaactaacctataatttacaaaactctaattaaatgatattgatgattacttgtcaacttattaaatttttaccttttttatttgaaaaacaaaataaaagacttaccaactatgtaaatgacatttatgattctttttttttctttagcatgtttcatttatgattactagccaactaaaaaaagttatca

SEQ ID NO: 75682 - DNA, 916 bp, Cannabis sativa
agatctgaaacaccattatacataacaaaagcaaagttagttgaacctgtcatacacagacatttaaatagaattaaattgtacaacaaaaatttaatagaaaagtggtaaaaaaatcctcaaaaatccataaatctgtcaagcatttaacacaaataggttttagttagtcattgtcgaattctttataactcatccactttgaacaatcaaggaggtttttttggcgaatgttaatgatgtgttgtaacatttgcatcctactatttggttaccaatgagacggtctgctatcgaaaacttgacaaagtgactgggggtgaaaaactttgaagtttcatctattgaagctatttgttgtgagagatatagaccactgttagtcagttattgcttgtgttcttagtgctcaagcataagtttactttatgatcataagtgatataaatcacggttgaagagtagtgcagaaaaacccgccatatcatctttatagggtgaaatcacaggttgttgaagaaaccagtttgataatttcaactcatagacccttgttaaaggtttaagaagaaaactccaagggaggaaaaagaaaaaagacattcgactaaacccatcctaagtacaacgtcctatactcgggaggagtttagccactgaaagaataccacaactaggaaaacttcccactctcaaaggattttcttcaaccaattagaatatctcttctagatgcaacgtcctgcttccagagagcttgttgtaattgatgatgcttttcttttctttttgatttttgtaatccgaggaggaatagttgcactagcactttagatttataaacttggtcattatattcttgtgtgacctcaagcgtttatatcataacactgcttaactcaagcgtgcaaatagt

SEQ ID NO: 75683 - DNA, 768 bp, Cannabis sativa
ccacggatcttcaagcacacgtacattattaccatctccaatgcgccatctataccctttttggactatctccttaccccacacgaagcttctccacacaaaggaggcattagatccacactttgccaccagcaccccctattaggaaaataactcgctttaagtaccttagtacacaacgagtccggaaatctaatacacctccaaatttgcttggatatcaaagctttattaaacagtcccaaatcacgaaatcccagccccccttctccttcggcttacacagataactccacttgcaccagtgtgtcttattggttttctcagatgaaccccaccaaaatctagccgacatacgatgaagactattaataacactcttcgacaaccaaaagcaactcgttgtataagttggaatggcctgcaaaatagctttaattaacacctcctttccagccacagaaaataaagatgccttccatccccgaaccttgctccaaactttattttaatcacagcaaagagctctttttttgttcgacctacaaaggaggggagggccaagacacttcccttaattttctaccacccgaacccccatgccagcagccaacctatcctgtgtcccttgaggcactattttcccaaagcacatctctgacttgtgaaaattaattacttgtccagaagccttacaatagttatccagcagctccttaaaaacctcacattccttatcattagcttcaaagaacactagactatcat

SEQ ID NO: 75684 - DNA, 528 bp, Cannabis sativa
acttatattgcaatttttgtttattcttttgatgtgagataaaaatttataataatgaaatacagaagtgaaaaataaaatgaaataataaaagcatctcactctccgaaattgagtagaagagatggaaagaagaaactggagaagatgtagcatgcatgcatgagttgaagataaaagtaatgaagagagttgggagctgtaaaatcactccaaaagtaacaaactttgactattaattcaccaaaacagcctttcatactttgaacttatgtgtttatatttgctaaatatgtttttgaacaaagactttctaatgctttgaccacgcaggagtggaggggaagccctttgtcatgttattttaataatataatgttttttattgataatttgtgacagataagaagagtttaacaaaatcatattgtcaaatgtaacatctattgcagttacaaatttattctttataatatttgtaattttggcataaacactcttgtaaaaaagtgttacatattcatttga

SEQ ID NO: 75685 - DNA, 811 bp, Cannabis sativa
aaaatcatatccctatatttataattatttaaaacagttacatttattcaccaaaaatcttacatacgttagggtcggtccaagtagtttgggagtcttggcgaaaaattaaaattagatattttattaacaaataaatatttaacttaattttttttaaaaaaaaataggcaattagttttagaactatacgtgcattgggaccacaaattttgttatcaattttttttttttttttctgagtaattgcatgtttgctttggtgttatgaatatttattatatatacattatagaagtggcttaattctaattttatagttttaaaatagtttgagaaggaatattgtactaagttatataattgcattttttaaaataaatatataattataatttcattcaataaaaagtatttaaataatatattaaaattgtggtggttctttcttctttgtaagcttgtgctaattaactcgtattgtatggtgtaacccttcaaactttgttgctatggattctgttgaaggtaagaaaactacacaatgtattgattctgttaaaaaaaattggacctttaatataagggttttgtccaatagttcaagctgctcaatgcttgagccgacaatgacttacattttatacttttctagatttttttttaatttatcaattttcattcaaatatgagaaaattagatctctcttatatattcaatgtttatcataccttattgagaaaattttaaatatattttcaacattgtaaactaattaaaatattttattgtaactataataaatatttt

SEQ ID NO: 75686 - DNA, 788 bp, Cannabis sativa
aaacatccaaaccttgtctcagcacgatgacgtctcacaataacattccgcttatcattttgacaatacccttcacaagagcaacagaaagttctatttatcatcacaccatgcttatctttatatcttttactttttctaatgccaaaaccaactttataagcataagcattgtaaaaattataagcttcatcttcagtttcaaactccatgccaatatttggaattaatttctcagatatttcaaaatgaatcacttctatactctttatattattatccaccaacttatcttcattgatttcttcttctcccctttcaaactctaatttacgacgagattgaaattctatttccatagttttattatggtcatccataatttcaaaacgtaatatcctgtatcaccaaaataaatatataatattcacatatatttttttttattaaattgctatctttaataatacataaaaaaaattattcatttattgaaaaaataaaaataccatacactaccaatatatataaataacctatatttcttaattaaaaaatttgtaaattttttaccttataataaatatatactagtatatattaaaaaaaagaaagaaagaaaaggaactcaagtataagaacgtcatgaagttcaatacaatttacagttttaatttcatacttgaaaccatttataattacaacatatcaacaattcaagtgaaaataaaaacaatagtaaaatcttaaaaagtagtaattatttttttaataaatatattataata

SEQ ID NO: 75687 - DNA, 637 bp, Cannabis sativa
tgaaattctagattgcataagtgaaaatgtttcataacactataagaaaacatgcttttgtcggtgcatttttgcgccgacaaaagtacaagaaaatgtcagtgaatcttggtcggtaaaggactttttaccgacgcgttagtgaaatgtgccggtaaaactacttttaccggtgacaaattgcgccggaaaaagtgaatcgccattgtaaaaggatacccttatctgctctgaacctccttttataattttttgccggcgcaataatgcgtcggtaaaaaggttcgcgttatttctcagattggcgcgagcagtattcccacctaccaacatttttcacgcgagaatttttccccccaatttcttgtaggcggtcaagattcccaccaaaaatttgtacacttttaccagcgcataactgcgccggcaaaagccttatagacgtggaaacgccctcgcaccatttggcagatcattttgaatctttcaccggcgcatatgtaataatacgccggtattgacttcctttgtgccggaaaaattaaatgctgaatcaaagtggaaattcaacattttatttattctaataacttttaccggggcaattgaccaattgcgccagtaaaagtaagttttc

SEQ ID NO: 75688 - DNA, 891 bp, Cannabis sativa
atggatgcctacgacgggtaaaattagattaaaatgcatgtcacagatcaggaatgtactagttttaggaacgacaagggggtataatgttgcctagtcatgcctttcggattaaagaacgccagcgcaacttatcagcgcatggttaaccagatgtttaaaggcctcctggaagaaatatggaggtatacgtagatgacatgctagttaaatccaaaacatgcatgggccatgcagatgacctcatgaagtgcttcgaagtggtccgaagaggtccgaagacatggaatgaagcttaatcccaaaaagtgcaccttcggcgtcgaattagggaaatttctgggatttatcgttagtcaacgcggaatagaggcaaaccctgaaaaaatacaggccttgttgaacatgccttccccaaagaaacacacggacgtacaaagcttgaccgggaaggtagctgccctaagtcgattcatctcccgatcgatcgataagtgcatccctttcttcaatattttgaaaaaatgtcagagattcaagtggaccgaagagtgcgaagaggcattcaagaaattaaaagaacacatgtccaaactgccaatactgtcaaaatcggttcacgaagaagacttctttctgtacttgaccgtctccgaaaacactgtcactgcggccttggtccgggaaaaagacaaagtcgaacacccagtatactatgtcagtaaacgcatgataggggtcgaaacccggtatcccttgatcgagaagttagctttttgcctcctgatggcctcaagaaagttaagaccctactttcaggcccatcccatcaagatatttacgaatcacccattccggcaagtcttgcaaaaacttgaagcctcaggaaga

SEQ ID NO: 75689 - DNA, 603 bp, Cannabis sativa
attcctgcatttcaagataagggtcgcggcatgctccctcctgggccgcagcctgtgtgtattttcccacgaattcctgacacgtgccacttaatgttatctttttttttttctaggcatgacccctattttgcacagttatcttttatatgatcttttttatctttttccactgatatttttctaatctttcaattttaaatctgcaaaaataaaagataacaatcgtaaaattactccaaatacgaataaaactaaattaaaaatacactagaattatctaaaaataatactataataacctaacaaatttccctaaactaaatatttactcgacctcaagaaaaacactgaaataaaaaacaaaagttaacaagtcaatctccaaaatatgagtaattttcaagtagactcaataacatgattatgaaaaatttcacaatacaatccagaatttcagtttaattatgcccttgacacacttcaatttaatttcattcagctcatgaaactagcaaatgaaattaactaacaattgaaccactttatgcatgccaatttcaaccataaatccactaatccaaaattccatatgcttgcaat

SEQ ID NO: 75690 - DNA, 606 bp, Cannabis sativa
ttttaaaaacaaaaaataaaagtgcgttctgtaaattttatttttatttattaattttatttaagttgggtccagaatggggtctaaggtcgagacaaagggtgggtccaagtccggggttgggttcggtttttaaggtctaaattaagatcgaaatctaaaatttgattgaaaaaactgtttaaaaaaatattaaaagtgatttttttaatttttaaaatttagatttttaatttaaaaatcaaaaaaataaaaacattttatagaacatgattttagaaaatattttacttttttaattttaataataaaaaaattaattaagaaagtgttaccatattaatttttaaatttgagactattttgtatttaagcttttagagatttagagatgctgggccacctaagaaaaatcaaaattgccacgtgtgagatcatctgacgtggacatttctaggctgaatcggacccacatgaatgggtaccattttattaccattctatgtgagccacgtgtcagcacttccatccttctaccacatcccatagttttgtagtgtactaaactctctctccctctcattttctccagcgtacatgacactt

SEQ ID NO: 75691 - DNA, 756 bp, Cannabis sativa
  modified_base (640)..(640): a, c, t, g, unknown or other
ttattattgatagttatttaatattttaggggaatcacaccatatactactttttaattatttatttttatgtttttttttttagtttttttaacttttatgggttgttttgttagttgcgatttgaattattgcgtgagtgataatgtgtcatgcgaattgatttgggttgagatttaggtttatattccgtaaaaattaaaaaaaaaattgaaaagtataaatgaaaatagaccaaaaaatgattattttttatttttatattaattgtttaaataatgataatatggtaaatgaagaaggtaaaatattgtaaaaattaataattagtatcaccatatatagtaaatagaaaaaatagtatttattgttggccaaaattcaacacactttttagaacgttattggaataattttttttttctgaatgtgctaaaatataataataggctacttttttaacacttcattggccgggatgctagtgttaaattgcatttatcacaaccaagatcatattttatttatagcatttaattatattatatacaaaagcataatattgagcattgcttgattgtgacttaccttgacactacaaaaaaaaaaaaaaaattgttacttttagtgacaacttttnagtcacaacataattttttgtgaaacatatatggtaattagttacaagttgtcactaattcagttttagtcacaacaagtattgtgactaaaatacatatttagtcacaacaaatt

SEQ ID NO: 75692 - DNA, 561 bp, Cannabis sativa
tgggaccatgctcctctttctcttaatctccaatacttttggtttgatcaatgtacactatgtaaggaaactttgaaaaatagtttcacttacaaatgtggtgagtgtacttttcgattgtgtttgaaatgcagtgcaatcaaaatgagaggaagtattaagtttgaaaatcatgagcactctctttgttacatggataacatgatgcccatgaataatcattgtagcatccaagattgctatggtaagaaaccatctacttcccattgtaaagaactttcttacacgtcttcttgtgcaatattttgcttggaatgcaacttcagaatccacctactctgtggaccattgccacccatgatcaaagatgagtcccacattcatcctcttattttggtcgattcggtggttgaggacagttatgaagacttctattgtgatatttgtgaaaatgaacgagatcctcgaatacgtgtttattattgtgagccctgcaaatttattggacatgtacattgtctcaagtctaaggtatgctaatcataatcaaaattttatttt

SEQ ID NO: 75693 - DNA, 563 bp, Cannabis sativa
ggagtaggatctgtgcgaggagtctagtcggactcgcgagagtgctacaacgcagcattaaaactcacagagaagaaatcagtcaacatgatatacatgttagaagcaccacctcctcgaggaaataccacatgaagaaaaaccagactttagtccaagaatccttgactataccaccactgcccaagctgcggaagatacaattgaggtacgaatcgatccttcagataataataaatttttgaaaaatgtgttctatattaacttttcaacagcaagaaaaacttgttacttttctcaaacaaaatcttgacatttttgcatggaaacattcggatatggtcgggatatcaccgcaggtcatgtgtcatcgattgaacattgaccccgaagtgtgaggtgtctgacaaaagtgccacaaaatggaccccgcacggtaccaagcgcggaagcaggaagtagatcgccttttaacatgtggcttcataagggagtcattttacccaaactggttagcaaatcccgtactagtgcccaaacctaagggctcatggtgcacatgc

SEQ ID NO: 75694 - DNA, 1039 bp, Cannabis sativa
aggcatttaagataaaaaaaaaaaaaaaaaccaaagcttggttacaaactagtctttacgaaaatgccactaggggcaaaccattaactgatcctcataaacaaaggatgagaggggaagtcgataaactcgagaaagattggctacacgtagctcaagaaagaccgtctgcatatatagagcctttgcacaaaccccattctcatcatcagatcccatttcttgaagccgagacctctttcccagcctcaagaaattccttgataccagaaagaggttggcacaaaggtcttctggtatagctttggatctgtggttggctagattctctgatagaaaccacgccaactcctgtcctgggtccatcaaaaaccatgccaatttccttccgggattccctgtcagcgtgaggaggacctctaagatcgctcacaagatctatgtctattcctgtggagacaaagaaaaagaggtcagtggagtaagaaaattataataaaatataatgatccgactcagatcaccatttacaggggataatactcaccctccatattcacttgtgataatcacgcataatgatttatggggctcccttgatttggattgttcggaagctccttagccttggaatctatcgtttctagttccaattgaggtttgaagtcctcgggaacggatggagaaggaaaatgttggtgtatctagaggttataaatttaggggagtgaacttctgaattcagaggggacattctagcatgaaagagatgatccattctcaagatggatctcaccaaaaaagtcacaagtttgtgaaaaatgacaagcttcagccgcccttttatacacaaagtccagtgacaagaaagctaaggatcgagaaatctaacggtcggtagtagggcagaatataaagagacaattcatgatgaccctcgacaccgtacaaccgccagaatcaaaggacgcattttttccatgaagggattttgacgaaaatgctctttgtaattattaaaaagcactttttactaaaa

SEQ ID NO: 75695 - DNA, 1065 bp, Cannabis sativa
acaatctcaatagttcaaggggcatttttaacgaccttaaaagttcaggagacattatttggtacatgtcaaagttcaggaggcaaaaatcctaagtagcctatttataattacatttacagtcttttttgttactatttttttacagcgatgtcattttcattgttatgtactaactagatttgtaaaatgccaactaaaagacatatgttgatcacatgttaattaattaattaattaattaattaaaagttaaattataaatagactttgttgacctcgcttttagccaatgacaatgaatcaaaataaatcgattgagaataattaaataacaaaaagtaaatagtttaaagtaaagaaaatactggattttagaaaggttcgacaccttaaagttggtaataacctactcccatctttgtcgtattgacttgtgagcgagaataatttattctctctcaaaagctcttacaatgatctctgagcattttggggaggtgaacatcatatcaaccatgatcttctttattttctctacgagaatcatcctcggctcagtgcagattcctcttcgtctagtgaaagctcttcaacttcaagttttgaagattgggaggtcagtagtgaccattcagaatctccagagcctatggtgcaacatcatcaatatcccgaccagataagtggagaagggtacaatcgatctatttaggaactgaaaaaaggttagagacaccatcttcctgcttcctggacatatagggtccaacttggtgttgttgacacattactagaaggtcaaccagctccatcggctaggcatactgtcataccagaaattgttattattgttgcaaggcacacatctgaattgaatttgtcgtccaagcatagaataatggcaaggacaaaataaaccacgaggaaagctttggagtctgacccccattttgctcggttgtttgcaatggcgggagtagagcaggttacattaaagtctgagagattgaagataaagacgaggtttgtcctactggctcctctgacattgaaggataagaa

SEQ ID NO: 75696 - DNA, 771 bp, Cannabis sativa
  modified_base (412)..(414): a, c, t, g, unknown or other
ccatttatcttacagtgtcccatataacaccagtattctcataaacacaaaacacgaccataacatgccacaaactagctcagtcttgatctcagcctatgcccatgcatattatctatatgcagcttgtaggaaacatgtaagtctttacaatgaacaacccatctgttgtaatgtttccctctcgattcacacatcgaaattgaacaagtaccctgattcttcaaacatatgaattagtgggctcccccacttcaacttgggaataacttttctcttagaggaatacatctcatggcatagctcataagctaaccgcatactcatatacagtccctccattccaaatgtcactttgatgaaggtgttaaactaatgcctcagtcatttgactcttcgcccctcgacattnnnatattgccttagtaccttagtcctactgactttcaccttaggccaacatttccatggtgttatcttagtactcgagtcctattgactttcaccctagataattggcattgcttgtgtcccaagtcttcttgacattacatccttaataacaatccatctccatgataatcatcttgatgcttgtaatgattacctagtatgctgagtgaaccgtgagggtctctcccccacttcatttattagcgtcctcaacaatatgcccacatgggaatgtctgactgcccaactcttcatgcacaccatgacatctaaaagtacatcccgcagatgtgactcttgagtcagctatctcatata

SEQ ID NO: 75697 - DNA, 715 bp, Cannabis sativa
tatttttaataataaatcattttatttttaatataaataaaaagtcactatgaatttttcataaattaggaattctgttatacaagtacaatttatattaaatagatattatatagaatagatatgtttggaatttctaaaaaaaaaaaaagaaaaaaaaaagttatgcatgcatgttatccatggtatggggcatgcaatggtgtgaatcagaatgagccacgcgaactgatgtgattcgttgagtgaatgagacaattataggccaacaacccacgtggcaagtcgctttcagtcaataatttcagtgggaaacataagtcatcaatttgggtgagcacatttattatgcacttggagcatggggcccacccacgaatatcgaagccacatgtgtgacttttgctgggccgttttggttaatatgacgtgtcaatgaaggacgcagatgtagaataccaaaatgtggaagagccactaggagtagagtaagaatagaaatagaaattgtaatgtaatggaataaaaaaaaaaatatatgattgggttgtttggttaaatttataaaataaatgactgaatatatattttttatatttagttgattatagaatggaatgagataaattaattttagataaaaatacttttatgtttaaaatatgattaataaattaaggtgacgtttggtattatttttttaattaatttttta

SEQ ID NO: 75698 - DNA, 1145 bp, Cannabis sativa
tgtatgaaaccaaaaaaaacataatgtatttatgctgtaaatatccaccttcaaaaacaatttattttttgtcaatattttttctctattttatgtcacatcattatattcattattttttcatattaatttatctctcatcattctcacattatttcgtctctcatcactctctctttcctccttctatctcattgctttctcactcattattttctctttcattgctttctctctcctcattttttgttcactttctctctcatcgttttctcacgttattttctttctcatcactttctctcatcattttctatttctcacattatttcgtctctcatcactttctctctcctccttctatctcattgttttctcactcattattttctctttcattactttctctctcctcattttctgttcacttcctctctcatcgttttctcacgttattttctctctcatcactttctctcatcattttctatttcatcaaggttcgggtctaggtccagggtcgggttctgctcaggtcctgtttatatcggaatcttaaaatattgaagtatctttcaaaaactaaaataaataaaataaaaataaaaattattttcagaaaacattaatcaaacatgacttatattttaaaattttcaaaaactattttttgttcttatttttaaaaatacttttttaaaaacaaaaaaataatgacaaacattctttataactcgttcatatgcatattcccttcgtttattttctattttggtcactaattaaggcatctgataacaggtaagtgattttacaacatcttatatgtggtatttatcaatatatgtattgagtaattaaatcggtgatttggaaattaataagtgagaggtgatttgcataaatccctaaaatgagataagctcttaataatggataacatggaaaataaaaaaaataataccttagcattaatgaaccactattggacttttgaatgagctctcttggaacagaaccagtaaggttgtttccgctcaagtttctgaaaccaagcatgaacaaattgtcgaaaacaagtcacaaaaagaacaaaatagtagtttttgcattcttctattaagtactagttttttttttttttt

SEQ ID NO: 75699 - DNA, 983 bp, Cannabis sativa
ggtcccgggttcgggtctgggtccggggtccgagtccgggtctggttccgggtctgggtccgagtccgggtccgggtccgaatcttggtccaggtcccgggttcgtgtcggagattgatgttgacctaaatcctttataaatattataatacaagctaatacagactatttattatgtattaaataatacaacatatattgtattaaaaaaatttggttgtaataattaatacaatatattgttttatttaaacataattttatttattatttaatataatacgacccttgtacgccataccaaaccagcccttatagattatatatacaatttatttcggcttgcaatgttttagactatgaaatattatgaatggtatatattggtaaatttttttgatgtactattgttttatcgataaacacaataaaaccctaccatggcagtactattatgatataagatcatatatgacaaaatgtatattatttaattaattcgtaccattcttctatcatatctagttggattcgtttgacttcagcatttgaaagcccatcccatattttttttaattgcatcattcaggcacatacgtcagatatatttaatggtatatgtatatttggatttagttagatttttcttttggtatatatatatatatatattgcaatatattttggttcaaacaatttaatttaaattttggtgttagtttatgtttaatattttgagtaaattaattgaaataatatgtcgctaaagtgaccttttttttgtgtagattaatttatttaaaatatcaagatagatggtatatttgtaattgatgcatatattgactgacccaaaagtaagtgaatattttgctaaattttaaacatatctcgtggcaataaatatgtgacaattataaggtattttgtgtgagcaatacgttagtctaaagattaatctattgtttgacacaattttattg

SEQ ID NO: 75700 - DNA, 678 bp, Cannabis sativa
aaattaggattttatctttttaagatatataaagttctcttttcaacacttttaagaagacgactttggaaggatgaaaacttttatcaatcaaggatttttcaacgagttcttttattgtaattttttttctaatgttcttgagtaattgttgtcagctatttacaatgaacttgaattgctagattttccattaggtttattaatggagattgtttaacattttatattggttttaatgtgatttaattcttccctcaattttctatgtgtaccaatttcattcttatttaattatttttaatgtcggatcaccaattgattgtttagtgatttcaacacaaaatttgagaattgtgtattgattatgctatagtgaaatagacatgaatttcaatataggacgagagtacctaaatagtttatgtagcatttaagatttttatgcttaatgcctcctatatatgtttaaattttttacgagagtagaaaatttgcatataggttgagatttatatgtcctaatccaaatataaatttctttagtaaatttgttatcatgtgaaaattgaaaattgaaaattaaattatgttaaaccagataaagtagattcaattaaaattaataaccttaagttgagcccatcattaatctcactttaattatttatttatttt

SEQ ID NO: 75701 - DNA, 1056 bp, Cannabis sativa
catcccacattgtcttatcttcttctataattggccaccactaggtcgggttcgaagtcaccttccccagctaaaaaaatttctaaaaatactaaaaaacctcctacaaattcatctaaagttgatcctaagatgggtttgaagcgcattgcaaagaaatgaataagtgatgttgcagagctatctagttctaaaaaaagacctattccagataagattgagtctcgtaagggaaagagagcaaaatctgccaaggatgttagttgggttatgttgtttttcattttttttttttagttttttttcttgttgttgtgttttttcatatgatgttttgtgttttaaattttccccccttcttattttaggttacatccgaaagtgattttgaggatgaagtgcatgattcggaagtgaagcctaaagttaaatccaatgtattattacctcgaattttttcattttcttaagtttaaattttttaatcaccctttgttttctttttgtcaatgttttacctgtttataatgacagttttatgttttgtctcattttttttttgtatttcttttatgtattttttattaatgttgtttttgtgttgttttttagttggtttttggttttgtttctgctattaaatagtttatagcattactggtttttcaatgatttattgccttgttaccaacagttgtttaactgtttgttttcagttgtttttcaggttgtttaatttaatttctcgattgacaattactatttgaatttcattttttggtaaatatattactttgaagttgttcatcttttaggctgaacatattggagttgttttttaaatgttgggttttggttttttcttggttgcttagtttttgttttgtcttttacttgttgcttgcaatttatttatttatttagttgttcaaatttgttgcttatcatttttttttgttatcctttatttgtagtggttgacatccttctttcagtgggtatttcagttgtatttgtgttgtttcagggttgcattggagttcttccatcattatt

SEQ ID NO: 75702 - DNA, 1141 bp, Cannabis sativa
atttaatgtcaagtctattcgaaccagaccaagagtccagtccaagacccgaaaaaccttagaagaggaacttcttcttctccagaggcggcgactgcttctcttctccggcatggtcgcttctccacttgtgtctgcccaccatgtgccccccgctggtgtccgactgtctgccactgactgccgagttccctccgaggtgactggcgaggtatgtttcagtatcgtgcgattgacgttggtcgttggcgttgctttgctccatccgttcttggagttgcagaatagtcgtatcgtattagtacaatactctctctattaatgattaattgtttatgagagagagcccaatgtgtgtcttcgtgatgtgtgtgtcttggtaatagttttttaagtcggttaatattaactacagatacaaaaaaaaggaaaattgtattgaataagataaaatagtatatatatatatatattatatagtagctttatttggtaggtatatataaatattggtatttttaaaaattaaatttatttgagcccataaatgatatattcgggctcagcccaataacacccgaacccgaccatgcccaacccgacaacgtccgacccgaaacccgacatacccgtacacccgaaaaccgggttcggttatgcatttccaagacccgaaatccgaaaacccaaactcgtgtgcccgaaaattcgaaaacccgacccgtgtgcacccctacctaccatgaagaacctatagactcttgtaagcactcttcactgaataaacccttgaaatctctttaaaccaatatcaatgatccgatccaaaattatcattcaacacaattctcttaattaattgtcagtcagaagcattgaacaaataaaggatttatgttttaatttaagatcattacaaattccaagcttaacaaatatcctctcccaaatcaaaaatgaaactatgagactatttatctctattttcttaaatatataatttgtttaatttgaaatattccagctcttccttcctatgccatgaatgtgcccataatgtgttccttctccttgttgagatgtgtaaggacactgagccgttaatgaggaaattctggtaaaagacacaatcttcttagaa

SEQ ID NO: 75703 - DNA, 1293 bp, Cannabis sativa
ctctggattcacacaccaaaactgaacaagtaccctgattcttcaaacatatgaattagtgggctcccccacttcaacttgggaaaaacttctctcatagaggaatgtccctcaagatatagcttgcaagctaactgcatactcgcatacggttcctccattcctcatgtcactttgatgaagatgttaaactaatgcctcggtcatatggactcttcgccctcgacatttcagtgttgcctcagtaccttagtcctactgactttcaccttaggtcaacattgccatggtgttatcttagtacctgagtcccgcagactttcaccctagataactggcactgcctgtgttccgagtcttcttgactttacattgtgaacaacaatcaatctccatgatactcatctcgatgcttgtaatgaataggtagtccgttgagtgaactgtgaaggtctctcccccacttcaactgttggcatcctcgacaacatgcccacatgcaaatgcctaactgcccgactcttcatgcacaccgtgccatctaaaagtgcatcccgcaggatgtgactcttaagtcaactatctcatatagcacccctgtcgatttctacatgcatgcaaaattcgctcagccatccaactgattcacacttgcatcacgtccttctggctcccacaatgtacaaagttccaatgatccagccctctggccttcatgcaaactctagcacacttcttgaccttcgcaagtaaacatgactactaagtctcattggcacagccctctggcctccactcaaactctagcgccatcttaacgcttgcgctcgatcttctcagccctgctggcttctttgatgcattcattgcgcaactccgcatctttgttgatgcctttgtgtgacttacgccctctggcgctttaacaagccaacacattccactcaacttcctcagcgcttccatatggatcaaatacaagtcacatgcaaacacctccaagtacaaccattctctgacgattgcgggatctgcctgccttggtctccatgtgcgtccctctcgacacacaatatagcaactgaggcatcccatgtctatcccatttgaaccatctcgattatcgactctcgacctctgtcgtgactaacaagaatctgacggtctttgcactacttccacattcctgccaacaagctcccctttcaacaaaagcacctcctgcagcttacgatgtcactcaggcaaacttggcctagggtacaaagcatacagcatggactatcccctcaa

SEQ ID NO: 75704 - DNA, 1418 bp, Cannabis sativa
tgtcacacaccaatatttgggtgtaccaagcatatctattgggtaatgaacctataccttttaagaaactttacaaatagacttggagtttatttatcctcacaaaatttaatgtagtattccctatctataattaatctcactatcttaatatgaaaattgcattttgttatcccaaaatttgtccacctgatgtggcccctccacgtggcaaaaagtagaaaatacgttgaagataggtcagcactaacttgtcaggattagtgtcaagcagcctctcaatctttaagattccatgggtgcatggtggacacaggcaaagacaaatgtacaaacctgccatagaggtcctggtcgtacacagccaagtgtgacaacttcaaagcaccgggcagcgttcaacatggctacactgccaagtgtacattattctcacaaacctttcaacttgcctttagcattcccacgacttcaaaacagttcaaactgcccacaaagatagggactctccgtcaacaagtaacaaccctattccttaaggattgttattatttattttgtattttaaatatactttgtgacttccctattttctagagatatctctatgtacaacttgtaagtgctactactatataaagggtaagatacacatgctcacactcacgtttagaacttcaagtacgctcaaaagcactataacaataagtcctctctattttttcatacttctcactagccaaacacattctcattgtaatactgaagagagcctagctagaaattataaggtttcagtctgtactctgtttgacattatctcaagagtgaatacaactaaaaagggagtgggtcattacctaaacaaaaagggttgaacctctataaacctgtgtcttttacatctatccttatcatgcacgtgacagtcataagcgttcgatcctatttagactcaacatcaattggctaaatccacagtaaatatcttggtactttcattgagagtccagaatattcattcaagaagctctcatattcttcatggatgtcacaagacgtgaaaatttgactgaaccacgagaccctatggtcgtggaccctaatgtctaagtgccacctaccgtggccaatccaaacctggctggccggccaccatgttttggtcagctgttcgaaacttccaccacgaaggtccagccaagagagtaagttcctgctggacccattgtccagcaaacaactgaaattactggcacaggagtgggacctcgtgtctatgctggtgagattggacctaagattggcaaccttgagagaatatcaaatgaagagagataatatggctgactacatggcacgaagctgagaatttctctgctccctcaagagatacatcatccatcaagtaccatagg

SEQ ID NO: 75705 - DNA, 862 bp, Cannabis sativa
tataaatatattagcaaaattgtacaatacactcccttaaaaaagtatatccatacactcttatatatttcggtatctaaaaaaaataattactttaattttttttatagtcgtatacattatagttatttgagacatctaataaaattttaagaaattcagaaaaatttagcacgtcgaaaacatatttaaagagtttgttgcacgtgtgacttttttattttatacgcgtatgaaatagacagtttaaacattgatttatatattgtaaattattctaaatttctcaaaattttgcagaatgtcttaaataactataacgtgcatgactataaaaaaatttagactaaaagttttttatagataccgaaatagttaggaattgcatcaatacactcattttaataaggtgtattgtagtagcacccaatatattatacaactaaatactattttaaattatgtgatttataaaaattattaaatgaatcttctattttaataaataacaaattacactttgtactttataaaatattactaaacaatatcttgaattgattttctgttaaagtaaaatttataataatctaatttagaagtgttatgacaaaactttactgtatttgttcttgttaaaaattattttcaagttgattatattaaaaaaaaatattaaaaattgagctcaaaaatcctatttatattatttttaaaaatacaagatttattttatcatttaatatgatagaatgtcgaattaataacttttacaaaatataaagttcaaaataatattaaccttaatatatataagtgtaatttaatatggtgtcacgttttttaatttaataattaatta

SEQ ID NO: 75706 - DNA, 594 bp, Cannabis sativa
  modified_base (50)..(57): a, c, t, g, unknown or other
ggacagcttgccatatctctgttaatctgatcccaaagttatagggattnnnnnnnngactcacgatgcgaaagttgaatttgctaagtgttggtgtgctgcacagatcgctcactgctcggtttagaggacttcgtccgagcaaatgtatgaggtgtcttgttcggcatatttcttacgggcaggtacccagagttgattccacgtgtcaccatcgtgtgatgccacgtcagagtgcaaaaattgggataacaattgtattgacttatgagaagagtgaacaagaatactctaatctcactcaaaagctcttacaatgatctgtgggtaatttactcttagatcaatgttttaatcttgagtgttctctttctgaataaaatcgtgtccctgaatagtgaaatgagtccactatttatagggattgattacatgaaattggtttccctaaatcaatgagaaataaaatggaaaactagttcagttctataattacaataaggaaagtaggaaacttaggctgattgcctttcttctctaaagatatgaatctatcccaagaatttaggaattatgtcatgacttgcaagcttg

SEQ ID NO: 75707 - DNA, 698 bp, Cannabis sativa
ttttttttctttttcttttttgagtatttacataaataaataaatatagtaagaaaatttataaaagaaaatataatatttaaataaaaacttaacatatatataggatatgctactttaaattaccataaaaaatattaaaattctcttcatattttttttttttaaaaaaaatcaataaatgaaactacaatgattgtcggaattgtcaccggtgctggaaaaggcatcggagttgattctagcgatggaaatgtcatcgaaattggtattgccatcagaaaaatatcaagaaactggattcttcatcaagaaattagtttcttagtaattttttcagcaataatgccgattccgacaactattccggagtttgctgtaagtgctagaaaagtaaccggagtagctgccggtgtcgtaaaagtcaccggagttgctgtcgccgccagaaaagtcatcggaactggcattatcggcggaaactaagaaagtggtttcttttcttcatcaagatactgtattcttcatcaaaactagtttcttggtgatttttcggcgacaatgctaattctgacgacttttccagagtttactgtcggtgctggaaaagtcaccggagtagctgccggtgtcgtaaaaattgctggagttgctgtcggcgtacaaaaaaagtcatcaaaattggcattgtcgccgga

SEQ ID NO: 75708 - DNA, 820 bp, Cannabis sativa
ataaataataatctaatttttcacgtaatattaacaaaataaaattgttttagttttagagtatatttattaaaataaatattatgatttatattttaatgaaaaaattttaaaataaatttattaaaaaatatatatttatataattaaaattataaaagtgttaaaatgtgttggcatataatgttttactaatttcttattgcaatttataccagcacttttcacaattactactggtaaaagtattttttctttattaaaaaatactagcaaaagattgtcatcaaattatatatagttcactttcactctctattttagagaatacatgccaccttccttatccagtcctgacgtccctctctctccgactcaaacatcgtgcatccttccttctccgaccccaacgtccctccctctccgacaatgtcggtctttagatctgtaagtatgtttacattatttttggtttctattactgcaatcttcagatctgtaatccctaaaatttttctgtcttcatctctaacttcaagcaccttactagttgcccaccaccaacaccccatgtctagatctaacccctaagagtttctttcttccttctccattttttttttgttttctgtctctctcatttctctctcaactctcaagtctcaactatccatattaggttcgtccctaacccaaacacggttcttcaaaatccaaccctaaaccttcctggatcatccgatcgaactcaagaatgaattgaatttttttttaaagctttacatcattcaatgtcagacctaaatctgaattaattgtc

SEQ ID NO: 75709 - DNA, 1174 bp, Cannabis sativa
gtacgagcacttcaaaataatatattaatatgattaattgtaatattaattaaagcggagaatataattttgttgttcaagacaacaaattaagttttaatttctcaacttaaaaatgtgtatttacattttgttaaacgattcacgaacaaagtagttcatgttcttgcacgagcttctattatttatgttgatggtgtctatataatgggaggactgcttccactattgcatccttgatttcggatgacttggtttaatgaagttacactttcattaaaaaaaaaatgattatgaatactagctaattagatttttccataagaaattaataacacaatcaaataagaaataaaaacctaataattaatcttattaaaagtgaattaaggcagctacttttagtaataattttttagtcatcacgacataaattttttgtgactaaatctgattttcaatcacaagaaaaaattacttgtaactagaacatggtatttagatacaagttgtcactaacataattttagtcaaaacaaattgtaatttttatgactaatacctttagccccggatcttttaatcacaacataagaatgatgatttattaattaatcacaagttttgttgtgactaaaagttaaaaaaaaatattcataaaaaaaaaaagttaaaaaaaaataaagtgtggtatgaggagttcaaaataatatgattagttgcaagcggagaatataatttgttggcaacttacaaatatatttggttatatattagaatatttagttagattactataaattgaattatattgtttggctaaataaaaggaaatgtgataaattgttgcgaacagttatataaaattattaatatattacatctatcctgaaggtagtttttgaatccactttttttttttttttattttccaaactaaaattagaaaatctcgtaccaaacataaaaatgtgaaaaattaccaatcctatgaaaatattacatcataccaaataataacctctaatgatattattggtggtaattataatgatgatcctttagtgttgacaatggtaatgaaagttgtgattaagttcaaatcaattgattagttagaatgttaatttattaaaagttagttaacttgatctagaattttgttagccaatga

SEQ ID NO: 75710 - DNA, 660 bp, Cannabis sativa
tatgtattaatatcgttattggtccaattaagtattaggtcccatataatttaatataatagcttttaaaaagtatcgctaatcaatcgaaatgcgacatgtcaagaagatattaggtactactagtgcctaatagcaatacttatatgtatatatagtacctccaaataagacaagtactataggaaatttcatactaaatattgtgagaacaaggttgaaaatcctcacaaacaaaatagattcatattataccatatgttttcataacaaagtgatattattcataatattcatgaaaccaaatgaattagggtttcatttatgccaaaagaaaagatgatcaaactaattcaattgtattgtgtgcatgaatgtacctctctcttaataaaatgtataaacaccataacaaaagaatttggtcatcgaattattggaaaagaaaatcaaagtatagtgattttcttttgaccaaaaccaaaaacacaaatgaaaagcttgtgcttattacttactgccatgtgatcatgattgagaccccttctcagttctcactttcatattctttctcattctagaatcattacttactactaccatggtttttgtcttcttctcacagtcccttttgccacgtcatacccttaatttctctct

SEQ ID NO: 75711 - DNA, 852 bp, Cannabis sativa
  modified_base (511)..(514): a, c, t, g, unknown or other
tttcattaatgatgattgataatgtcttgattatccacatataatgatacaatttatgtagatgtaacaccatgttttaatttatttgaaagtaaaatggttataatgcatatataataatagtaagttttcaatatttgttttagcaatttttttagtgattttttttttaaaagtataacatttactgttacgtataaaagtaatcttttatttaaaaattgagaaaaaaaataaaaaaaaaagattaatttcttattaaaaaagtgaaaaaaaagagaataatgtagtatattatgggtgtgcataaatcaatccaatctaatgagaaccgactgatccaattacaaccgacagccaaacattggatatccaattgtgatcggatcagattgaatgttatttttaaatatccaattgaatcggattggatggtggatgaggtgtgtaaaaatccaatacatacaatatccaatcgaacaaatttgtattttcatttagtttggatgannnnttagattttatattgttatatgtcgaatctatatgtatatctgaaaataaacattaaaattttactctttttttcttggattggatggatccatgtccactccaatatatactggacctaaaatattggatggatccgatccaaaaaatactaggtttaaaatattagataaacccaaattaaaccaataaatatatatgaaatacattccatggatagaaccgatccaatccaacacccaatgaattttggatggattggatgactaaaattgattggattggatcggatagtaaaatctaacatccaatatatgattggatcggatctagataggc

SEQ ID NO: 75712 - DNA, 1032 bp, Cannabis sativa
  modified_base (777)..(784): a, c, t, g, unknown or other
gggatcttctcatgcgaggcagttctaagaatctggccaaaaggagttacaaacttctgcagcaggttaatttccttttcttcttgttctcatttttcctcactttatcatttttactaacttcgagttgccttctccttggaagcttctttcctctcgtacgttacccatcattggtcgtcttagtgagttgaaatgctcgagattgagctttgccatatcgggagcatagggataccttagccaaaaagtggaatgactcggtggccaaggtttctcgcataaaggaggaggcagaaaagtagcatctagccaaccaaaagaagatcaaagaacttgaggattctctcaagtccctcaaagttgatcatgacaaaaaacttaaggaaatggaggctgaaaccaaagacagggtcaacagcattggtaggaggaccatctaccaaatttggtcgactaaccctgatttggactttagcttcttaggtgataatgccgatgccatgcttgccttttgcgagaagacaaggaaagaagaactgggcgaggaagaagaggttgaaggggaactaaaagatccatccaagtctcctacaatgtaggcttagtttttaagttgcatttttttttatatatattcatttaggaaaatggccatatggttgagacaatggtttgcccattgcgacacttttgtaaagacaaatttgcattgttggatggccaactttgctttttgtcttatcttttatttattgcctcgtatttctgcattcnnnnnnnntttgcttacttgcatttttactcacaatttaaacaattatattttgatcaaatttaaaatactttaagcctttcgagtgctcttattttcctttgatattgtaagtaatttactatgtgcgcgagcagttattatctgctaagcttttgatttgcaagtagttatcagttctgcttcgcgtaaacagttatgatatgtttttaaacaaacttaaacatactttaaataattcatctcgtgaatcactt

SEQ ID NO: 75713 - DNA, 857 bp, Cannabis sativa
agggaaatgattatgttataacacaagaatattgtcatttcattacattatgttataacacattttgaaaagcattacctgcacgctaataaaaaataagttcattaagtttaagagaaaataactttatatttttatatgagataaaagaggattcttttctctctctcccttaatctaaaaaactaaaataaaagaaaaataatgcaaacttgaggagaatctcaactccaattaacttcaaaaaaaagtttcatttgtgttttgatttaagttgagtcaagacatcaccaggcaaaaacttgctcttttggctgaaaagaaggctttttcagtaaactaattgatggatatttaggacacagttcaattaatagaggcaagaagcaaagaacacacaagcaaatcaggaacaatacgaacagtgaaaccttcaatcaatcaagggcatcaaacacaaaatgctttaaaaataataatccagccgatgaattatcaaaaaagctaagttgtttacaaacctttactttgtctggcctaaccattgcaccctgaagcggagggcactgaaagtaacgtgttccttttaccctagtacacgaataaaataacttaatttaatattcatgcacagaaacataacagtctacaaagcaaggggatgtaattctaaaattttaaatgcctcacgcaagtaaagcaaaaccataaaacaagtattcactatttacaaattttacatatgtcgtatgtgggtttataaaaaaaatacaagtaactgcatgctgatcaaacctctatgcaataaagtagatcttagaagattcatggcaaataaagctaaaaattatgagctt

SEQ ID NO: 75714 - DNA, 651 bp, Cannabis sativa
ctacaacaataatcataaattatgtataatgatacaatatattctattttgagaaaaaaacatcttggtaatgaaaattaaattttaagagacaacttcattaaatccatgtaagaactactatactgtaataaatatatatctttttaatttttttgtctcgattattattttagtgtcagtttactaaccgacacttaaagatcattaaaggtgtcagttttgaaccaacaccatagatttggggtggtccctagtattaattaaaaaaaaaaactgtacatcaagccaacaccaaaagtctatttagtagtagtgttgacaaactattgtgcacctaatcaatggctttagtgtatcctaattacatcttacatggtgttagtagtagtgagttggttagttatttgagtcagttagcaaggggtcaaaatttgttgattagctggtctaagagattctggtttaaatcttggtcttgtaatcatgtataaaaaaaatcttaattcaataaaaaagagttgagctcatttttactcttaaattccatttttcatttttctctctattttttaaccttagcatcagagtcgatggcgtcatcttcctcaggttatgtaacaccctaactaccataggcgtattacgtga

SEQ ID NO: 75715 - DNA, 1206 bp, Cannabis sativa
tgtttttcggagatgctctaatataattcatttttatattttcagataaatatctatgataactatattgttgaattttttatgaatatcgaaaaatatcataaaaatatcttcgtacttttaatctttatcaaatgaattccaatttccaatatgcctaagtaattgacgtattcacgtccgtttttagcaattgttggaaattgggaaaagaaaccgcttcaactaactaaagtttttgttaatttctatctaattgcctgcctattttagtttttttcttaattttgtctttttgttattatattttttgaaaaacttacttgccaacaagttgtaagtacaatgcttattttgccttcttcctaattttgtctttttgagattttttttttcagtacaacaaattattagtaagaacgagactatttcttttatttgttttaaaaataatttgtatcaatcttacttttttttgacaataaggttttacacaatatattttacaaaaatttcctttaattttgtctttctgtatttttttcaattatttaattatttgctaacaaattattaagtactagagattatttattttagggatttttttatttttactcttcaaaataattttttttagcatttttacaaaattctacctaaaaaaccttattgcaacttgcgctgcaacctaaattgcaacaaaaaaattgtataaaaattcctatcgcaactagcgctgcaactactttaaaaacacaaaccataaatttgaaaaaaaaaattaaaaaaatcagtgtataaggtaatttcttttttttttaatgtattaaaacaactaattttattttccatattataattaataaaaacttcttgagaaaatttatataatacctacaaaaattttggtaaaaactattttttgtaggaaaaaataagtgcatcaatgtgccctcttttttagaacaacattatagaaacactatataaatacttctcacaagtttttttaaaaattctcaataattattaagaaaattttacaatgtatctccttaaaatagatatattgatgtactcttattagtatctgcaaaatcattttttagtcaacgtttttcttatggtcatgtacgttacagctatttaagacaacttgtaaaattttaaaaaatttgaaaaattttaacacgctgaaaataa

SEQ ID NO: 75716 - DNA, 1279 bp, Cannabis sativa
  modified_base (1042)..(1043): a, c, t, g, unknown or other
cttgcctacatcctcggccagaaacagccacaactatggctttgagagtctttactgattgagcttcaaaatgagagattacaataggaacaaattacacaaaactaagaagcaatgctacagcaatccttcagcatttgtctcctctaatggcagtgatcatagaatacaatgtcactccaattacaacactcaaggcaattccctctcttcctctcaatcactcctgaactctctttctctctctccgttttattttctccaagtctatctatttagttgaatgagaagaccccttaaatactgatgttgcaacaatgttgcaaagtgcccgaacaccaactatcataactgacagttggttaagttagttaagttcggtaagggtacaattgtcatttgatatttgaccaaccattttaatagaaatgaattcatttaattttaaaaatgtattcatatcctatatattagtcatgttattatatatatatgtgttgttattacttacaatatttatattagagattgtaaaatttatattgtatgacatattgaatatatattatttaagatcagattttgtatacatcttgaagattagcaaaagttatattcatatattctttaaaatattacaaaaaaaattgttgaataatttcttctttttatggataaacaattaataattttttaagaaatttataataaagttctacttgttcaatgtcatttcccaaagtgaataaaataattttaaataattaatgatattatttactactcaaatatttctataagaaattagaaacaacaagaaaattaaataccacatgcaatcaaagtgcttaaaatctatgtatcatgtgtgaaattgaataatagtagtcacgtagttgtagaatggatacacttataatcaagtaggtaaaattatatttgactattgaatagaatgggaattgtatacatgttttaatatatcgcaaatttattgtacatttataacatttaaatattattctctgaagagaatgaatanncatgaaattctatttcaaagaatacattttttacatatattagtgatgccagaagtaaaattaatatagacatgttttattatttttaaaaatcaatagtttcaaactattgttcgtacaagatatgtatatataattatatatacatttactacttaattcagtttgcatattcgtaggcgtgaatgtataatttactaaaactatagtaaaatttgttagtgatctaatataat

SEQ ID NO: 75717 - DNA, 835 bp, Cannabis sativa
  modified_base (678)..(684): a, c, t, g, unknown or other
  modified_base (761)..(763): a, c, t, g, unknown or other
gatcggatcggatgggaaaatctaacatccaatatataattaaatcggatctggatagacctaaaaacattggatgtgatccaataaacaaccctataatataaatattaatattatttattttagatcaatttaatatatataaatataaatattatttattttaggttaattgaagttatatcaattttaaattaatttaaatatatataaatattaatacattatttataacattattatttttttttatttttacttttaatattaaaagtatatttaattttaatattctttaactttatatttattttccttaaatttttaaaaatttaaatattttttaaaaaaataaacaaaattttaaaaataattagttgggactttttcatttttacacttcaaaataattttttttgcattatgacaaaattctacatagaaactcctattgcaactagcgcttcaacttaaattgcaacaaaaaatcttaaagaaatcccttctcctataccattcgttaaagaaaaaacaaaaagaaaaagtctcttctttcatattcccttttcacctcacaataccatcatatctccgtctctgtcctcggcggccagggccggccctgaattgaaatgggctataggtaacaaatttttttggacccttactataaagatnnnnnnnatttttaaaaattattaaaataaacatgtatattttttaaaaggcaattttttaatttgggcccctaaaatgagtgnnncctaggcgcgggcctagcccgcctatgcccagggccggccctgtcggtggcgtggctgctgtaatctcaacg

SEQ ID NO: 75718 - DNA, 1208 bp, Cannabis sativa
tttttaaacatttaaataattattaaacaataaataaattaattaatgacatggactaataaacgagtgacacgtggatactgacctgtcacttaacggtcagatacttacagaagttcaacactattgacggaaggtatttttaccgccaaaaatacgacttaggtacttatctgcttttcagcataaaacttaagtattttatgccgcaaattactctatatattcatgagttttttttttttttttttgactttaagttaatggactttgttattttaatttattttttaaaataaatatgctaaaaaaacacatatataattttaaaataaataaaatatatatatgttagaatgcgtcataaaaagtatattatatttataagaatatattagcaggtgcaatttatgatatttgactaaagtaaaatttgtatataaataagaaaaagtgtataaatcagagttgtatagagagtagcattaaagaaaactttaaattagattaaattttgtgtaagatgaaattgtgcttatcaatgtaaaagagttgtaaatttttcttttgaagaaaaatcccgtatgggtgtaattgactaagtttgattaataaaaattatctttcttgaaaaaaaaaataataaagaaaattaattttttaaaaaataagtatggtagagctatttatgtaaacaaattggtcacaaaaatatttaaatatttaattttgttatagttaactattagtataaaaattttaatagcaaaatttgtaactgaaattatttttggaaaataaatacttgtataaaaatatttttaattaattttttaaaaaaataataatttaaattaaaaatttatattttttaattatttatatgattttattttttatataaaatatataaataaatattattacagtatgtataaagttttaattttatataaacagtcatattataaaagtacacaccttatattataattactacataatctaaaattaatgatcaaaaaaatttcgaaaattgaaatattttatagcaattattattattattaaatttgcccttacctttgttaatgcttacaattctggtaaattttttttttcaggtataacaatgtatatttattgtttctctcttctaactcttgcttacattctagcttcttttttttttttggacacgtaattgt

SEQ ID NO: 75719 - DNA, 614 bp, Cannabis sativa
ccctgaacctggccccagaccccaaacccagacccgaaccctagactcagacttggccccggtcccaaatgtcggacctagactcgaaccccaaactcaaccttagaccccaatcctgaacctcggactagaccctagccccagaccaagacccaatcccatacctagacccagacccgcaccgttggagttggggtcgagtttatagtaaagataatataattttacacaagctaatagtacaagtcaataccaaatatagtgctctattaattaatattaatacaatattgttatacctatatttcagacatcaatggaaagctaacacgtgtatcaaggttggaatatgaaccaacttaaaacacgcattattaaatgcgcttaaatgactcgtctcaagaaatacagataacagaaatactcaaactcgtcgccatataggcaataacgagacatgagtaataactattgactgatgagaccagcgagagaaacatgtctatctcgggataaacaaaatgcacaataaaagtttttcaagacgagtagttaatgagtttgctgctcattgatccacatactcgtgggtatgtgtaacaccctaactacct

SEQ ID NO: 75720 - DNA, 847 bp, Cannabis sativa
atgtcgagtgacattgagcatgcatgctgggtgactcttgagaatgcatgtcgagtgacttttgagcatgcattccgagtggcttgcattgcggccatgcttgggatccccttcggagtgactctcttggcttgttctcgttaatcttctcaattattggttaactaatctcgaaagttagtagtgctaatttttgggattaacaggccccgggccatatgcgtgactcagtcattcctcagctaactcttaaagttgatgtctctcgcttctcgagactaattgttgactaatctcgataatcaaccctgtcgatttttagcgtgaacacttgccccaagtctataagaactcttttaagtgttcttgtaaactaagttcaataagcactttcccttccgcttggttctatggttgtctctttgggtgcttgcaccttgagatcttttgtataagggaattttttgccacttgggctttctcaacctcttataaggtgtaacctcattattaagagaatgtagaccctttgtgtagtctcaacctcttgctggttacttattggatgttaaggaagttgtatagcctcttgggccacgctcaacctttatcaagtttctaattgaaggctaagggagttttttagcctcttggattgcgctctgctctttttcaagttttgtgatgctatggagagagattgtagcccttaagcgactctcaacctcttatattgcatttgtggcacttaaagtgcgttttgaatgtgagaaaatatgtattccttttagagatgcatccctctcatagttataccattttccttttctttttctcctcttttctc

SEQ ID NO: 75721 - DNA, 1343 bp, Cannabis sativa
aaatttctaattttttattttattttaaaaaatatttttatatttatattttttttattaacaaacgatatcaatttatgtttcttatagactacaattttatcctttacaagggataaaatataatttaaaaatattaaaaattaatttttactaaatgcatataaatttatactatagaaaaataattaaaaatatataaaaaataaaaattttatataacatatttttttatatatatttgtgattatgatgaactagattaaaatattatcattattataatagaatcttaacaactcgcagcactttaaaattataatttaccaaacactcaggtcaacttttttccacagttctgctacagctgcttttcctcacagcacagctacagctgctatttcccacagcacagttgtgccaaactggccctagatgttagaagtcatggcggagtacaatgagtggtattgtaattgtccaaacaatgaccatgcatgggaggacagttacaataatttggagccaaattttgacacttacactcaagggaccaaatgatgagaaattggggaattttcaagagtttaacatagaagaagagccttatcaaatgactcaaccaagttcacttgaggcgttgatgatggagttcatgcaaaaatgatgccttaattcaaagccaagcttcatccttgaggaaattagagaaccaatttgagctttcggtcaatgagttgtgtgataaattccatgaaactttgggtattggtatcgaaaattcaaagggagaagaagaaagtgaaaatgtcattttgaggagtggtaattagttgaagatacttggagaaaattttgagcaattacaagagcccacttcaatctaaagtagtgaagaaaagaatgaggaagcaagcatttcaagtttgtcagcatttgttgctattcataatgttgcagcattttcacagcaaaatcacccaaattttgacaaaatttagcaacaaaatgtttacattcctcaacctagtgagtcattagtcatggaaggctacgtttatgaagatcctttttggccaccacctcctcctcaactattggcatggtaccttggcatccatcatgtgcgttcatcgaattcaattcaagttgagcatttgggctattcaattccatttctcgccaagcttgagggcatccacgacaaagacccatttgtgagggcatatgccactctctataggcggaagccgctttatggtgagtgcttctcaaaaagtcaaactgacgactttaaatcaagcttttcttgggagacaacccaagctttctaaactttgtct

SEQ ID NO: 75722 - DNA, 1332 bp, Cannabis sativa
  modified_base (325)..(354): a, c, t, g, unknown or other
  modified_base (816)..(816): a, c, t, g, unknown or other
ataatctcattaaatctatcagtattctcatctaaagaaagggaagaaatcattctaaaatcgtattaacctttctagcaaattaaaattgctagcaattgatggttttaagtataattcttccaatttattccagatccctttagccgtcttctctgcgatgagtttcctttgaacactgtttgataattacatgatgattgtgtagtacatcctctgctccatttctactttttcctctagtttctttttagccaataacttctcgtctccaaaaactttagaaactttttggtgaaataggattcctttagactttctctcnnnnnnnnnnnnnnnnnnnnnnnnnnnnnntccaattcgaatctcaccattgataacattcaagtttcttcaagaattacagcggaatgaatcttaattttgcgttattgatcgattaccaagctctgatttgtgagaaaattatgactaatagtgcagaatcaaaatatcaaaactttaaacaatcaaacgattagcaatgacaagattatcaaattgaaaacaacaattagatgaacacagggcaaatagagtagtgaaaaccagaaaataacaaatgcagaaattaaagaaattaacaccaagatatatactggttcaagtcctatagatcgatgtgatctatgactctactctagttccggaacaccaccaaaatccttctttattgattgagcaagagtaggtacaatacaatcgagacgatattctctgttgagttctcacaaagtgtttcaactctcacacttacacccaagaatcttcttcatntacagaagattcttcttacaaaacacaaactcaatctctctattttctttgcacctctctctttacctctcaatcttttctctccaattctcaatctcatctgaactgagttctcaattttgtgtcttttaaaataattagtcgaggtggtatttatagccttaggattaagattctaaagtcgatggctgcaaaaagcgaggttgttaagttagttagaaataaataacttaaccaactccttatagagcgaagcctccacgtcagcagagcctctgggatcatatatgagcttctggactcacgaaccaagaacactcgctgatgatgctttcggataggattaagtatgctggagtcgactattcggatctaccattctaggagggacaactagccaactggagctcctttccagagggaggctagctatcttgaagactgaacccggaatagacctgatagtcatccgggaacaccctttcgaactcgactatcattccataagactccttc

SEQ ID NO: 75723 - DNA, 660 bp, Cannabis sativa
  modified_base (197)..(198): a, c, t, g, unknown or other
atcgatccaacatctattagatattaaattagatcggttctatccgttgaatgtatttcatatatatttattagtttaatttaaatttattcaattttaggcctaatattttttaatcggattgaatcaatgcaatattttaggtcccgtatgtattggatccaatccaaacaaaagagtaaaattttaatgttaanntttatatatacatatatatattttacgtataaccatataaaatttaattactcttggatgataacatctaatccgatccaatcacaattgaatatttaatatttggcggtcgtttataattagatcaattagttatcattggattgaataatttatggacacctctatgaaccatcgttatagtaacaagagcttttctttcatttttaaatctaaaaagaaaaagaaaaagaaaaaaaaaaatttctttttctttcttttatgttaatacttgcaatcattcattatccttgacaaataattaattactaccaatcactaatatttttcttttctaaaaaaaggggacaatattggtagtttaccattaataaaatatccaataaaataatagcttcattttttattattatgagacaagtagtcaagaactttgaactataggctattatattattggaa

SEQ ID NO: 75724 - DNA, 1041 bp, Cannabis sativa
  modified_base (456)..(461): a, c, t, g, unknown or other
attcatgtttaggatgttaaacaaaatacatggtagtaaatctagatcctggtaaaaccataatccaacagtatcaactttgtgaatcaaaggcacaaaataactaagctagcatatgggtgactcttgaaatctttccctctttactattaattacacattttatttgttttcttttaatatttattaccaaaaacaaaaatcacaaactcattggttactatggtcactttttattaaccttttgtttttacttttctacttatattcttgtccataatcacctccatatggaatcgactgtccgatctatactacaagcaccagtagaggaagtcatatttcgggcgtaaagcacggttcataattagagttggtcaaaatactattttatcattctaattctctattgattccttatgtaccattaattcaatgtgaacagttaatctatannnnnntatagatttggatccaactattagcactctcaaaataaacactataagggaactaatattcgctccgttaagaaagctttgattccactattgtataacatgttcccaaccactcatgtcattaagctcccaaaatagaagttgtaagaatcagcttctttgagaaactttaacaagtgaatcaaagaactcaatgaacacaagcaggagttcatggatactcaagattcaggttgatctactaatgatcatcattgtgatatgataaactcttttcatggtaaatgacaagttagatgaaagatgtttattacatatcagtccagtcatgcataatctaattacacagtacctttactacatgtctatctacatatgtgatccgaatcaaaatcgcacacactagaagtatagtgtatagtaaatcgtacttagtagttctatattaaaagattcccaatactttaatacactaccgacttgttttattcatatcgcataatcttaattctctcgtacatccttacaagattataccttctctatatgaatacgaaattttttgatatttaataattat

SEQ ID NO: 75725 - DNA, 754 bp, Cannabis sativa
tacagcaacccacatagaaattaccagaataaccatcatagcaatctaaacagtaaattttttaaaataaagttaaaaatagtatatagggtaattaaaaattaaatttgatgaaaaaagagttcataatatgggaattaccccatatactatttttttagctctttttttttttttctttcaaatttacagtttaattttttaaagtggtttttccggtaatttctgtataagttactatacaatttttgattgtgatttaggttgcgccgctagttgcaaatagtttctatataaaattttgtaaaaatataaaacaaattattttgaagtgtaaaaataaaaaaaaaataaaaaaaacatttcattgtattattaacataagatgattaataatttttacaaaatagaaacttcaaaataataacatttacctttatttaaactacaaccatgcatgtttagttatatattattattactcacgaaggcacctgtggactaggggcattatagtccttcaaaaaacattatatacttttttaaatttttttattattataataaataattactgaataatataattctaatgtatagtaaaattataaatatatttttttatttcatattattatcaatagtttcatattataaaataataattatatgtaattattttttacttcgccccaagaaaatatacattattttctcataatttgcttccccactctaaattccctctcattta

SEQ ID NO: 75726 - DNA, 692 bp, Cannabis sativa
tctttcgtataggggtcttctagataaggggcttccagattgggggggcttccaggcagggttttactaagaaggtcaattttagtattttggccataacttttcactcgagtatccgtattctatatactgttttaaagcttgtgacgagatctttaatgtggaatttatatttgagccgaattatgtatttatttgatgatattttcaccttagagtttggtagaaaagtgtagtgtctatacggatagtagaaagttccgtagagtaaatacttaccaattttacgtaaatgtgatatagggcctctgttcagcaaaggcatttctatccaggttgactgacacacttgaatctggaaataaagtaagataagtataagatatatatctgtatttgcttatgtatgtaatatgcatgctaaattatgtgatttgtatactaccaacacaagtacgattgcggtactgagtatatttgtacaatatataatgttaagggttcgacacaacattaccaacactagtacaggatgagtatagagtgtatgtggtataacactcagttgtacttgaagaacgaataaatcctaataacactagtattagaaagatacttaatgcatgtggtatagaggacacactttcatgagaatgctcttcatcatttgttaagcttgtaactaggtgtat

SEQ ID NO: 75727 - DNA, 2662 bp, Cannabis sativa
tttaaaataaataaacgtgtattttttaaccactaatcaactggtccacgtattttgggcgaattctggagcaacaactctctccttcttctttctctcttccttatttttctctcttctctcaaattttaaaaataatttcgcatcacgtcgttactcgaataagcctaaaaaaatatcattgcgatctactcttcaatatgaacactttaagatgtgtgaagcatataattttttactatttccagaaaagaaaccatttacttactaatatagtaattagttattgttttataaatttttttaaatcatagttaatattcattttagaattatactaattgaattatattatattatatgataaataattagcttttaaaaaataaaaatatacataaaataatcggtatataaaaataataccttgttatattacatggaaactgattaattttggcaatatttttcaaagttacctaaatatattttaaattatcaacattgctactaaaaataaaagaggagcgatattactgaatgaaatttttggattgagttgcggactagatcgccctctttaaaatgtttgtggcactgcccaagaatgtacaagtaatcgaaattttttcagtcatcgtatactgtatctggaacaccactgcactttagcgaatcgttgaatacactctcagaatatgatatcacagatgaagttttcagagaaaactgtattttattttttcagtatgtaaaaaatgtaattctcctgtcaaaaataaaatggtaacaattgtattatatagatattaatggattgcacaaataaaatgggaagaataacgtttttccaatcgtggatgagttgttaaacatgtcctataaaattgagacaattaagtattcaattttaattaaatacatttctcaaataaataaaataaaaataaatattttattaaataaattttatgtaaaaaaaaaataaagtgtcacaccacactaaccaaccagctcagattggatcggatcagtcggatggatggcgtctgttaactcagaatttcattacaataaacgagacattttgtaacttagaataataacttttggttgaaactataaaatattaataaataataacaaattggctgacatgatatatttacgtagttttgtaattaaattaacattgtgcacgagttaatgttatttttgaatttttttgtattacagaagtacaatacttaagaaatgtaagtaataaaagatgaatttcttgtagggtgattgtaatattccaaaaatataattatgaataattaggacttattatataaatatggattaattagggtgcaatgaggaggattatgattctattaatctaatttagcgtgaattatgaaattttaccataagtagataaataagcataatttattaattacggaaatttatttagaatatgtgggcataatgtgagttatttatggaataaaaatattttcaagtttgacgaccttggagactcgatcggagactaaaaatgacacaatggatttagttagtaattttaatgagactattaaggtaagttggttttaaaattactggggtacttgggattgaccaaataccttagggttagaaattttttagttgctaagaaatgttaaaataatcaattttttaattaattaattgttttattattattctttatttcttttttgacttctctcagtcaaaaattagttctacaagcctttagtagcagctaggagtaagcttgaagaggaaacctaagggtttagtatttttcttccatgaaagctttgggtttgaatgttgaccttgctttctatagttgttgtaggtttggtaacactttgtttttgtttatgagttagtttagaagtatttttatccttatttaatagatttgcttgttgtgggaggtgagagtcaagttagagtttttaagcttagagcttgatctctcttggcaacatttgcttaagggcgtgatttaaattcttgtcacgtagagattgttatatggatgttatatgattgttctgtaaaatttggaattaattggttaagttttggtgggggttttgagaagttgaaacttggggtttcacgttccctataaaaaacagcaggccatttttggaaaaactgcctactgttttccccgctaggaaattccaaaaacggcttgttgttttataaatggcttacctttttggtgatgtttagaacacttgtttttcatgttttctcaatgttttggggtattggtaacctaatatcgataggaaaacttacattgatgaattaatgaagtgattaattgaacttttcgtagttgtgacatagggcctgagatcgttgatctttctccattcaggtcagccgacacacctgaatcaaaacccgaggtaagaaaattatatgtgtaccacatagcatgtcaatatacgatcatgatcgtttgtgaatcacttggttatgaaagcaaaaagacggtcattaccgttatgaaacctatttgttgattatcttaggagataacgataatgacatttgaacttcaatcattgttaggtttcttacttgtcagttatctaatgagataacgacagtgacattt

SEQ ID NO: 75728 - DNA, 661 bp, Cannabis sativa
cttgagagaaagaaatgaaaaaaataaataaataatcgttgtgttgtagaaatgttttctttgttaatttgttttttgttattatttttataaggaggttgctttgattttatctttatattgttttactattctttgttatgtccttgtatttagagattaaatattagaggattcgaacattcctctatgaaatgaaaagttacaacacaacacacgccccacgcgtagaaaaagagagagactttggattgaacggagaggaaatgcttcgtttttatagacaaacgaagcaagctcccaattatatatgtgaagcttccaagaaaagtttgtttcaaatgttaataatgtacatacgcctctcttcgtcctctcctcgccggcaactccatcccatcttccatatacaacctattagcacgggcggagctaggatcaaatagtaggctatcaagcaatacataaaattgaagaaaatgtcatgatttttgtactctagcgtggcatcacacggtggtgacacgtggaatcgacggctcatatttgctcgaataggtatttcgaacaaaacacatatacctgcacgtacgaagtcctcctggccgagcagtgggcaaactgatagcatatcaatacttagcaacttcagcacttgtat

SEQ ID NO: 75729 - DNA, 709 bp, Cannabis sativa
aaggaaagttgggactttgaggatcaaatatcataatctcaatcacaaatgatattgattaaagttgggcagatgttgcttttaggactttaccaacattttttaccatagggagtgtatggttgcaaagttaaaacttaaaaaatttaacggaaagagaccatcagaactcaaaagtaaagcatgtcacctaatttgacttaatttggaaaaatttactatgtccacatatagcaaggattgataaattgagtgtaatttcttgattctatgagtggtggtacatagtcgtttttagatgcatttcccgtgtacaggtaatgcaattttagctaattttttgaaccacaccacatggacctcaaaatcacacaaagcgcactacaaaattgcgatgtgggagatttgcaataattgcaaattaattttaaaaaatttataaacattaataaaattacatcatataattcatttacaaacaatataactaaagatgttaacacaaaataataaaacaataacaaaataaggtacaaaatatataaatacttcaaaactcaatacataatataatataaactataaaataattcgtaattttgccttgaattgtttatacgactacattttgctctttataatattctgcttgttaataatactattctaacaattttaagtaaagaaacgtcattctttcattatactc

SEQ ID NO: 75730 - DNA, 517 bp, Cannabis sativa
cgaattgactcgttgatatctattcaacattatagaaaaggttaattagaatttttgtccttcaaactttttcacatgttttaaattataccttaaactttataagtgtaaaaaattctcttcaattattgagattgttaaatttaaaaaatttcgttcaatttaacgttcgatgtgtatgaaagttcaagaaatataatttggcatttatcaaagttcagaaacataatttggtacatatcaaagttcaagagacacaatttaccatttggactctctgttttgttaaatgacaaaatggactttatatttttcaaaataataaaaatagaaccctgagctcaatttttaatataaccaactttaagataatttttaccactaatagatacagaaaatgctaccatttgtgtcccatcatctctagatcagattattattaagttttattttgacgaaaaatcagttcaaggtcctatttgtataattttaaaaaatacagtgtttattttatcat

SEQ ID NO: 75731 - DNA, 1070 bp, Cannabis sativa
aagattgtacatatccaaatggttagacctgaagggttgcgatcttcaggacagcgcaagcgtagttttggttgtcatttggcgacaacattaatattatgtattttatgtatgttttgaaaaatagatttcgggatcgcgaatagtatattttgtaatcgtgatataaatttagtaaagtttcatttattattgaaattttattaaaaacactttttgtttaaaattctttaattagcaaagattagcataataaaaacacagtaacatatctaagctagtatggcattacaataactctatttcactgcaagtttaataataataattaaaaaaaaaatctaaactagacaaataaaaatgataataagatcctcatatatagaaatacaggtcattgtgtaaaaactttgtgcaatttttgtatatctctagaataacacttataagaaaatataaaccataatatataagtaacatatcttactttattctaatttgaaatctctataccattcaagacaaccaagatcgaatgtaaaatgggttgtttctttctttcttctttatctttaattaaaaagtatacataaattcctttactttatgatgagaacttttagtaagaatattattattccttagttgtatttgtcaaaaattagctgtatatatatataatggccttaactttactagcaaccagttattaattgccccatataaaattaaaatttcttccaaccatatatgtaattgtaaatatatatttaatatatatgacactacaaaaaatttgatttttttagtcacaataaaatttgtgactaaaaataaaaaagtcgtgactaattataaataataatttttatgttgtaacttaaacatttgtgtctaaaggtattagtcacaaaaatcattacaattcattatgactaaacgtatttttagctataatatagcttgttgtgattaaaattatattagtgacaacttgtatttaaatattatctttagtcacaaaaattttacattataactaaaatttgtcactaaagataatttttttt

SEQ ID NO: 75732 - DNA, 757 bp, Cannabis sativa
tgtgagaagaaacgatagaacatgttggatgagatcatctggtagtttagaaattttgtcttcaaacaatgtttccattgataatatcacctttaatttcttcgcccaacaacaacggagatttttcttggatgagtaactatcgctgcagagaagtccaagctaattattaagttgtatttttcttctgagtagtaagtgaagtttataatgggatctatatatatatgttcgatatgattgaaatcatttaaattttaagataaaaattgaatttctttattagtttaaaatcgcataagatttgtttaatttctaaatattagatatttacattgatttatttttttaaaaaaaaaagatatattttcgtattaattcaaattaaataataatttttaattaacagcacgtttaaactaataatatcttcctttaataaaaaattaaaaatatcttattttgtaagataatatcttaaaaattaaaaagtataaaaatcttcaatttgaaatggggaatttttctaaatacaccaaattaaaaaaagatatatgaatccttcaaaaaaaaaaaaaaaaaaaaagatacatgaaagatacgattgcttttacaaaaataaaaataatatcgaaataatattatagaaattataatatttgtaatttgttgttttaccgtaaattatacatttttttctctaaaaccaataaaaaatatattttcattgaaattatggctaattaggatttttttt

SEQ ID NO: 75733 - DNA, 548 bp, Cannabis sativa
tttgaatgtgaagaaccaccactaatgttcttattatttgtgtttacactttttattgttatatcaattccactcccaatataattttcctctttactttcaactctttcttctttcaaatatgcatcgacatcatccaagagccttttaaagacctccttagtaagttttataggcttttttactttctgatgcttttgttacaatatgattgcaagatctagacaaatcttggtaacacattgctaaacatgccttagaattatctccatctataatttgagatgtactacatgtaactcccatatttgcatgttttgttcatctctttaaaatgtattgataagatattcttacaacattacaaaaagaaaatactttaagaatatatgagcatagtatttctgcaaactcaaaattcttgcagctacacattgatgtattaactgatgaatcatatttaaccatgtgatgaaaatacttaccattaggagtaagcttatactctattattgttcctttctcggtacaaatttccatagcacaat

SEQ ID NO: 75734 - DNA, 617 bp, Cannabis sativa
tttatggtcctaagcaagcttcataaacttgaaatgacaagttcaaagccactttatacagcaagggcttcaaattgtccaaatttgacaactcattgttcattaattagtggctcttgacagaatctaattgtgttgttagtatatatggaggatatactaataacatgacctaatcaagcttccatttatgcaatcgtttcataaatgaacaatgaattatgtcaaagatttccttccccttcactactttctaggagttgaagtaaaccaaacacactctggtatgcatctttctcaatctaaatacattgcaggtttgctcaccgacctcaaattggatggtgttaaactatgtcttagtccaacaagctcatctcatattctttctcttacaaatggaaaatcttttactgaccacacactacatagaagcaccttaggggcccactagtatctcacattgactcggccagatgtgtcatttatagtgaataaactcgatcaatttattcatgctccaacaaatattcactgggatgcttgcaaacgtatgttcagatatattaaaggtaccattcatgagagggatcattcattagacctgcccccaaatt

SEQ ID NO: 75735 - DNA, 790 bp, Cannabis sativa
cttgctcagaattaaaaaaaaaaacagcacagtaaaattgttataagtaccgtgtgacagtaaaaaagaaataaaatgagaaaaattagtatagggtgtaaatttcccaaatattattacgactgagactacctatcaagatgtcctttagctctcaacccttttgagctcctagttactttaaaaaataaaaaataaaaaacaaaacaaaattgaatccattttttcttttaatctttcctcctatacttcatttttttttcattactattctctcattaatattctttgatcggattttttcttcataacgatatatattttttaaaatgatacatattattcttttgtttgtattcaatatttacataaccccttatttcactcgttaaaatgaatatacatatgatttattgatactagtatacataaatagcaataacctacaaactaaatgaattttattcatacctttttaattaaaatataatgggtgactaatggttatatttttattgtaacaattataattatatttttttttgacatgtaatagcaggttactaataggtaaacattttttttttagaattaattaattataattaactattttcttaaactaattaattaaatatttaataagacttcttttaacaattatgatttataaataatttttttatttatatttaaatctctactataattattttaacaatcaagtcatttaattataaaatttacaagatggggattgcaatagtgctttctttcattctagtatcaa

SEQ ID NO: 75736 - DNA, 835 bp, Cannabis sativa
aatcttaagtgtgactgtgaactatatatatgtaggatgttgagtggtatttctaatacaagttcccctcttgcatttatcaccaatataaagtctcttgtatatttgtaagtaacactctttctcaacacaaaatcaatctcttggattattgtcaaattaagaactcatcatatatgtataacctgcagagaactgagaaacaatgatatcactggcacaattccatcgagtattggccaactcacacaattggaacgtctgtaagtcattaagggactcaaaactacccaacatacactattttctaactatgaaatcgtgcttctatctttacagggatttgagctttaacaagttaaatggaccgattccagactctcttttcaacattgattcacttatttatttgtaattaatatatatccttgtctctctttaattgcattatataatagtagctagctactattatggaatatatcaaaccaagtaattttgtttcctttaatcaggtttcttggaaacaatagtctaaatggtaccttgccttggaaaaacagttcatctcctctcaacatgtgagttaatatatataatattttagtatgtttagtaggattcatggtaatcactctaaaattaacactgatgtactatatcttatgcttgcagagatctatcatacaataattttgccggaagcattccttcttgggttaatgatcagcaaaatttacagatgtatgcctttcaagaaatgttaatttttttcttttttcactttaatttttggttcattttcatccataaaatgacacccatatgatttagt

SEQ ID NO: 75737 - DNA, 582 bp, Cannabis sativa
gttataaatgtgttattatacgctaagtgccttaacagtcatgtctcgtctatgtttcttcatgcgtagtgagattgatgcctcgctttgcactactaatgtcatatagtttctcattaacgcacgaggcaacaattcgtatatctttatctcgcttaagaccttacaatcagcaagttataatataccctgtcagttccgcatttaatgagttattccatttttaaatatgattatcattatatttgttgattcgtattctcccagtttaacacgtgttctcctctggccgaatttcgggtataacaacagctaacaaaaattgatataataagtaagtaataatgcaataaaatccgattgaaatatatattatgtatagctctctaaaataataataataataataaaagaatatattagtaaaagtctcttaaattttttttaatgtagataagttcatattagctgcaatagttcctaaagttatatttttttttataagtctgttagtccttattttaactagttcaatacatacgttgaaatattattattcaaaataataattttaaataaata

SEQ ID NO: 75738 - DNA, 797 bp, Cannabis sativa
aagaaagagacacgagataccagaattcacactttttgaacttggcgtacgatttgtgatctcataattgttgcagtaccgatctgagatgtagctcatgttcctcttttgattcaaaataaaccagtatgtcatcaatcatcacgatcacacatctatcaccttgaacatctgattcataaggtccataaaatgtcgctggagcattagtgagtccaaaagacatcaccagaaattcataatgtctataccgagtacgaaacgcagtttttgggatatcttcctctcgaattctcagttgatgatagcttgagcgaagattgaacttagaaaagaccgtctttcccttcagttgatcaaatagatcgtcaattcgaggtagggaatacttgttcttgatagtaagcttgttcaactctcgctaataaatacacatccatagttacccgtctttcttttttacaaacaatactagagcaccccaaggagagtaactcggcctaacgaaccccaagttcaataacacctaaagttggatctttaattccttcaattccgctagagccattcagtacaatgcttttaatactggttccgctcccagaactaactcaatcacaaattcaatctctcgggaaggtggaaatcccaataaatcttcaggaaagacgtcaagaaactcacacaccaatcttatattctcaggtccagatgtcacaggttgactagtatccaccgtagtgactaggaatcccaaacaatctctactcatcagatctttagcttctaaaagtgtt

SEQ ID NO: 75739 - DNA, 640 bp, Cannabis sativa
cttctctcttgctgattctcggggtttttcagatgaaagttctctcgctagggttttggccttctttcttttatcagcttccaatttctgtgaactgagccctataaacgacacgtcgtttgttgataaaatagaaactttcaatacaaaataaggtgtcgttttcaagtaaagaacgacttgtcgttcaattttatcctttttcaggtatcaaaacttctaatttatttacacttaaatatttttttttgtttttgtaaaagtaccaaaagttgtatttttttaataaaggataaattttactaactcgaagtcaaataacaaaatattgtgaacatgaagacttgagaggaacatcatttcctcgcaatatactgatattattactaaattatgagcaacattattagcagaccgttgaataaaaaataaaacatatgaggtagagttggtaacaatatcttataatcctcaaccaacacgccgaaataagaggacatgcaactctcctcccacgtagataatcgatactgaagtgcttgcactacgaaaagctagttcatctcgacaactattcttattgatactgaatccagctcaacccttctttaagcccaatgactttcgcaactttcaggct

SEQ ID NO: 75740 - DNA, 806 bp, Cannabis sativa
caatatctatagatttttatacagaaaaaaaaaagacaatataaattttggagaaaaaaaaaatatgcttttttctaatgagactttgtcctctttatttatttccaattttctctcatttgataatttatttacattcgaaatcatacttctaatggaggagttaaaaaacttcaaactcaagttagtactacacgtctacacgagatgctctttgttgagatagataaaccatggttctctctggacgattagtcttgagtatgtggtacgtgactgtgagtgtgtgagctttgtttggagcattcctgtgttgtgttttcgtcgtgggtatggtggtaaaggtgctctcctgatagaagaggatttggataataatatttctcttacgggtggtttgaatgtggaggtggaagatgaatgggagtctcaggtcgaggctgccagaggatggctctcttgtgggaagagtgctgggcagaagacatcgcacgactaagtttttcaaatcagttttctccagaatttgggagaaagagagggagtggtcagtggaaatacttgctatggagaaacaatgcacggtggtaggcttgtcctttgacgataaaattcttccagaaaaagtgtacaagaagtcaacatggattttccatggtggcattttgattatagagaaatggccatctaatggtaaatgaaaagaagctagtctaaatgatgtggaatattggattaaaatgaaggggttcccaccaaatgctttgaccattaacaacgctaaaaggctaggaagtatggcaggg

SEQ ID NO: 75741 - DNA, 1160 bp, Cannabis sativa
gaatcttgcaatgaacagattagcgatgttgctaaggtttttctcccaccccccatcctccaaccggatctgctgaatgtaatttcgtcgacgacggatcacagtggtggccatgaagaattttgtgcatctgtctccttgctgcagccacttaacacgtgtcttttgtctccaaaaaatctcctcccttgcgagggcttcggtcagtttatctctagccattgcaagatcctctccatttacatgaactctatcttccagctgctgtagagctgctttcacctcattcacttggttgccaattaacttgaactgagctctattccacctcgccaattgttccttagtatttttgagttttcgataaaaattaatcattgggtgttgatgaagtttatctttccaggcgttcttcacaacccaatagcacttaggatctcttccccacattaactcgtacttaaagtatgatttgttgcagttggtccctccattcatgtcaagaagaatcggtctatgatcggaagttgctgcactaagcacatgagtgatggcattcgggtacatcaatctccactcaatcgacgctagagctctatcaagacgagctctttttaacccgcatcccccacttgtggctttcgatttttgaaaccatgtaaactttcctccttgtgaccccaaatctatcatgcccgttctagcaaccattcgccgcaaatcaaaggagtaccgtgctgggttcctccaatttgagtaatggaggttttcattgtccgcaagagtatcattaaggtcaccaatgatcacagtaggattcgtgttgttcaagattaaatcgccaattctgttccagaaagcttctctccccattatagaaggcggcccataaacacccaataagttccatggagtcccaggaggctccgactcaattagaacattgattaaatttttgtcttcactcatcaccgtacccttcatcccattcctccacactactccaaaaccccccgccaagccatcagggggaacataacttccatcaatgaactgtaacttcaaacatattctatcaaatttctcctttcctagtcttatttctgataaaactagcacatcgagatttgactggagaatcaaagccgtcaattgtcgaa

SEQ ID NO: 75742 - DNA, 1204 bp, Cannabis sativa
  modified_base (1163)..(1172): a, c, t, g, unknown or other
ttgtcagaggtatcttttctagggcatatttttggaaaagacggaattatggttgatctgggaaagatttaatcagtgaaaaattgcccgaggccaaaatatgtgacggaagtgcaaagttttctcagtttagcaaggtataatcaaaatttcgtcaaaggattctcaaagatctctatgccactaaccgagttaactaagaagaatcaacagttcatatggtcagacaagtgtgaagcaagttttcaagagttgaaacaacgattgataacagcaccagtgctagctttaccatcagatcaagaaaagtttgatgtttactatgatgcatccagacagggtatgggatgtgttctgatgcaagttgacaaagttatagcctatgcctcccgtcaactgaaggattatgagcagcgctacccaacacatgatttagagcttgttgtggtggtatttgctctaaaaatatggcgacactacctttatggtgaaaaatacagatttatactgatcataagagtcttaagtactttttcacccagaaagatttaaatatgaggcagagacggtggtaggaaatgtcgctccccaattcattgggacgaaactggagaaaggaagtacttgagtctaaaattagttcaaaagaccaatgaagctatagacaaggccaaggctcaaatgcttgcttcgtaaagcaggcagaaaatttatgctgatccgaagagtagagacattacacttcaggcaagggaacatgttttcctgcgagtttctccagtgaaaggtattagacgcttccggaagaggggcaagttaagccctaggttcattgggccattttagatactcgagaaggtcgggcaggtagcgtatcagctagccttaccaccagtgttatcagttttccataatgtatttcatatttcaatgttgaggaaatatgtttcagacccaactcatgtcttgagttacgaagcccttgaactacactcagacttgtcctacaaagaacagccgattcagatccttgatagaaaggaaaaggttcttcaaaacaagaccataaccttggtcaaagtactctggagtaacaacaaggtggaggaagccacctgggaattagagtctgacatgaagactcaatatccagagctattcannnnnnnnnncgaggacgaaatccttttaacgagaggataat

SEQ ID NO: 75743 - DNA, 763 bp, Cannabis sativa
taaaataaaaataaaaaatatattaaattattattacacgagtgatactgtctacttcctattataattaatctcttaatcaatatacatgcttaaaaatgcatattagaataaacttttttataagagtgtccgttatagttataacattattcatgtaatttagtgtcaaaaaataaatttaaagttttttgaacacacgtgcatagtaaattattggaatatttttttgatacggtaaactagttagaattttttaaaaatgtacagagataatattacaactacaacaaatagtgttataaaaagaaaaatattatgatatttgattttgaaccatgtgttttgcaaaagttattaattaaattttttgttttgttaaatgacaaaattgatctgatattttccaaaatagtaaaaataggaccttgaacttaattttaatttttttttaatataaccaactttaagacaatttctaacccgaacaattacataaaatgtaactacttttgtcatatctctagatcaaattattattaaattttattttgacaaaaaattattttagtgtcctatttatacatttttaaaaaaatataagatttattttattatttaacaaaataaaaaatccaattaataacttttacaaaagggaaatttgatttctaaaccaataatttaaaccctaaaaaaactataccttttttttcaaaaccccaaaaatacccccaaactaaaactatctctctttctctct

SEQ ID NO: 75744 - DNA, 636 bp, Cannabis sativa
atatagttaaattgaggtatggtcttttccatcttcctttttctttgctttatttctgggttgagttatttttctctatatttgtctggtctatgttgtctactacaatggatgagtttcttaatagtgtttcaagtgctctagtttttcctcctgatgaaaacaccattttcacctatgatgctagttcatcttcctctactcccactaccattagtcttcttttaaaactgcacactattcgaccatataataggccatctttgatgaaaactttgtctggtatttggtcatcacagtgtagattccctgtctctgtcactgaacatgctgatggcttgttccttgtctcatttgggtgtgagggtgataaggggagaattttggaggggcaaccgtggcactttgctcaaagtgtcacaatatttgctgctcccgaaagttctttccctatcaccccagataatctccattatgtccctttctgggttcagatttatggcatccctttcatgtgtaaatctcatgatctagctcgttttatagcttctgaagttggtgatctcattgaggttgataaggacactgttaaggagggcacaggaccttacctgaggattcgagtcctgttggatg

SEQ ID NO: 75745 - DNA, 822 bp, Cannabis sativa
tattccgttacatttctccattaaattattctgattttgattactgtatagtaaacgtgccaaaaaagacaaagaataacttttagagagaaaagacacaaacacatgccatgcggcaagactctagtaatctccaaagtaattaatattctcactcaatcaatcaatcattatattaataacagcctaggtgtttttgcaatatatactgaaatttggtatggtactattgtttggaatagtctttgtgttgaaattgaaaagctgatcggtaatatcactatcagtagccatgaaattactctatatctttagtttacctctataaacaaaataaattaaatgatttgtggttttttgattattattattatttttttgttattaaggatggacatgttgcacctacatgattaaattaacttatttaattttcattatcattattatgaattttagtcacctaatagtgatatgttgataggtttgttatataacaatccaatagtaatataagaagatttggatacaatttcaattttatatattgatgtgggattgaatgacttgttatgtttgttaatattagcttttgaagtcttatctaagatatatgttttaggagtggcaaactttatatgaattattatagattagggtcattaaataatgggaaacttacaaaaatattggaatttgagttactttttacaaaaacggaaaattttttaaaaatactgtgtttttataaaacactagtagaacacataacagaacaactcaaaataacagtagaacgaacaactaaaaaacaccagtgaa

SEQ ID NO: 75746 - DNA, 799 bp, Cannabis sativa
tacatatttttaatattagaaaattttgaatgtctatgtttaatttttctatttaattagaagaattttttatttttatattatatgagttgagttattctattagtgaaaaaaaaaaattaaggaaaaatttttttgacaaaaaaaaattaagttgaatttaacttaaatattttgtatattaataatatttgatgtagtataaaaataattattttttgattaaataacttaattaaaccgagaaattcaaattctactaatttaatattttaaaagaaagtagttaaatttatttagtaactatcaatgtagaataataaagtgttccacatatattatataacttttccgagcaaaagaattccattacagttatgttctaacttttaataaaaatgaaataaactttaagataaatcttcctacacaaaggtttagtacattctttatttggttaagcataccagaaaaatattttagtctaattttttttataattatatatattgtagtagtttagtccaattttttttataattatttatgatgcatataaaaaataattacaattacaacaaaatatttgaattttataacttcctataatttgttcaatttcttttaaaaaatttacaaaaataccaaaaagaaaaaatgtaccaaaacaaaaggacacactacatattttttcaaaaactttaatcgtagttcagcaacaaaaaaggaatcttcttctccatatgattattactattatatatataaaataaaaactattatatatattatatataaa

SEQ ID NO: 75747 - DNA, 629 bp, Cannabis sativa
ggtttttatttgatttcgatggacaagctagcatgattttatctatgataaatattgaaaccttaacaagataataataataatatcttatcgtatgtactttcctttaattttatagtttttcgcttttacaaacatagtagcaaatacattaatgtgttaatagaaatatttctacgcacggacaaacctttaaatctagaaattaatgatctaataatatgttccatgtgatatatgtgtttgtttgttattatacttattatacgatatatgatcaccttaattaaatttaccttcacaggaaccgtcagatccaaattcacgacaacatattttcccaggcagacgtcatagttactccaactacggggtatatatattaacttgaaaacagaaagaaaaatagacaaaactgagctacaactattaacttgttaccaaatttctaaataattatatgagtcgctaatttgtgctatatatatatatatataatcacagagtaacagcttatccaatttttaatgatgctctaaagactggtgaactcgactatgtaaatggaggtagtaattttttatttataaattacataaaatacgataaacatgtgatcttatttgctt

SEQ ID NO: 75748 - DNA, 519 bp, Cannabis sativa
gatcatgaagccgaactggctgcctaaaaagaacagaatagaaggatgtaagaaatagtggttgccatgcaaaaggccatggaaacagctggaatactcgttcatcccaaagtcgtgcctgcgggactagaggaaacacaagaggagtcttcaccaagcactcaaaggcccaaaactagggagccaagccccatacgatatccttctgaggaagaccctaagaaaaatcctacttcgatccccgggagaaacaagaaggctcaagatccgcaaaaggtccgctctgatttcccaaagggaaaggtccgtaaaggggtaagctccctcgagagagtcttggcccttaggatcgagaggcccgaaagagcgtatctgtgcaccaagaacctggggaaagagggaggaaaggtcaaaggcatctcccagttgatctaaggcaaaaaaatcaatgagaaatatggtgacttgagaaaccacctcgaaaagaaaaagcatgcattaccagtatcagggggcgcc

SEQ ID NO: 75749 - DNA, 767 bp, Cannabis sativa
tttttttttattttttttttttccccccccccccccccccatatcagaccaccatcggaccacctatttttttatgtacaaaaatatatataaaaaaaaaataggtagcatcaggtcaccatcggacccccatcagaccaccatcagtatagatgggaatagggagtatggatggtgaagttagaagagaagagaaaagaagagaagagagaagggtattatgggtataaagtgtgcctattttctaaattttagtaagcttgtgttcaaaaatttaatatacaccaaatgtatgcatataaattcaaatttttctagggtgattggtgactttatagtttattgttttcatgtggatttgtaataccgctgctcataatttgacttaaaagtaaaaatgctatgaattattttaatctgattagtttcttgtgacgatcgttaatgtaaatttttagcgtgattcataccattttatatgtatataaaaaaaaatggatattggtggttaaattatcctaacttttaggtttgtaacagttaaccacaaaaatcgaaattttggcggcataactctctaaaccctagttctgttttgcttagcactattctgtccaaaaatcacagttaagtgtcacgacggactacttacgtgtacacgagtacacgtaaaaaatttttagtggtccacgtaattttaattttaaatatactaaaaataatttaataattaaaaaaaataattataaaaaaaaaacttttttttt

SEQ ID NO: 75750 - DNA, 660 bp, Cannabis sativa
atttctttgatattgttaagttctcttcggtatcttgttgagtttttgcaatagttttttattttcttttgaggaatcttttagtaatgggttgcgtctgccactagtgcctctattctaaccaccaccccttctccacggggtcgatgtctgtcaaaccacaatgaagtttcagatatcccgactggtctgaaattatggtactgatttacgcgtgaagttaggctttaatggtggaatatattatgaaattttattaaatttcaaaaattaatgttcagatatctttaaaaatatatttacacaatattctctttctctattattgtatactatttttggttttgctactatttattttaaaatgttttcatttaaactctaattataattaaattattttattttatttttgctttaaattttagttattacagatatatatttatttttctcatttattcttttctcttttgtagctttttataaattagatacttttgactttccttttaattttaaaattttcattaatgttttgaacgcacaaatttagttctgcaaatacatgtattgcggtcggatgggtggataattttgtattattaatgtttttttttattattattgtattggtttatgtgtttattagttattttt

SEQ ID NO: 75751 - DNA, 542 bp, Cannabis sativa
tggtaaaacatgtaatttttcattcttttaattgattgaacgctgcatactttttggttaactcttatgattattaaaccggtatgatttttttcacattctttggttcaacgagccttaattatgctatttcaatgggaaatttacatttttataagttttttttggcaaagttacataaatatttcatgaaaaaaaattcaaaaagtaaaaaataaagttcaaaaacacgataaacataatttagtgtaaccaattttttaaaataaatttataaacaaaaggagatcatatgatgcagatcttttacccactctttcagtaattttgacaatctcgatgactacatgccaattataagggccttatacctcatcttgttttaattaggtcatcggtatgcacatcatgagagttttcatcccattaaagatgatacgttcacaacaagctagccttccaaatggccagttataatctctcacaatgaggggctatgatgggattcgaacccttggcccaaacaaagaagaatgtcggta

SEQ ID NO: 75752 - DNA, 578 bp, Cannabis sativa
tcaatttgaatcgcattcacttcgtcatctcaatcctcctcaaaagcttatgtgttggtggtatttataggattaggataaagatcctatagtcggtggctgcaagaattgaagttgctaagttagttagacaacacctaacttaaccaactctcatatgcacgagatctccatgtcaacattagtctaagtgcatccgagaacatatactagcaactaggatcacggaccaaaggcacttcactaaacaagcttctggataggatagaaccagctggagttgactatccaaaactgccttccacagagaatgacctttcaggaagaataaccttctaggaaggataactagctgttcagaactcctttctgtaggagcgctaccaatcttgaagactgaacccagagtagacatgataatcatccgagaactcccttccagactcaactatcattccataagactcctttcgggatgggcaagtaagttgtccgggaacaatatctagaagacacctaactttttaagaacaacattccaggaatgatattgcagaccttttcatttggaggaacta

SEQ ID NO: 75753 - DNA, 948 bp, Cannabis sativa
  modified_base (103)..(117): a, c, t, g, unknown or other
gacctgtttcaaaatctacaaattcctcgacgtgtacacccacaaatttctcgatatttggccttgtgggattctttcaaatgtcacgtttggccctgtggtnnnnnnnnnnnnnnncgttatacccatactttccaggcctaaatgtgagcagggtgtattagagttagtcccacattgttaatgtgtggaaataaattgtggtataaaagataaatgagctactcctcacattgccaattggttttgagatggaacctcattcatcttatccccaaattttaacatactgccataaacttttattttcttttatgctgtagacaccgaaataacaaaacttaaacaaaagcagatataaaacaaccataaacaaggaagaagaaatgtatttataaccaccatcttccacacccacggacggaaccaccatagcaacacgagaacatttagaaaataatcattaattctggggagatggagcaagaacagtgaaatcgacgtcaaataaataaatcatgacaaaacaactataaaataacactaaaacaaataaaaaagaaaagaaaagaaaaaaagattaaaagaactaaccatcttctccacaacctcaacaccagatgcaatagaaactatatttgtaagtccaactctgaaaaatcataataaaaaaaccatattcttctctttcctaaaaacgttattgaaaaccttaaaaactaaagaaaaaaaataaaaagaagatgaagaactgagcaagaaataaaataaaaaatttatatgttaatggagagagagagaacttgaggaagaagaggatgaaaaacaaaaaagataataatctatggattttgaaaaaaaaaaaatgaacaagagagaggactcaaatataatctgggctttttcatttttatacttcaaaacaagtttttttttttgtatttttta

SEQ ID NO: 75754 - DNA, 1276 bp, Cannabis sativa
  modified_base (599)..(609): a, c, t, g, unknown or other
aatttaatgccgcatgggtgaaaacgtattggacctaccataaacaatatgactgacggtgtaacccctctattgcagctattacgctatgattaataaggctagtgacgactactttatgagagatcacatcaattaagaagggataaaatattatacccacctaactcctaagatacctacggtataggtcatgtatttcctattttgtatctgctgggaatatgtgcccctactgaacctgcacagaaagacaagtgatttagttctagggatccctccagaaaaatactataaataccccccaaacgcactaaaacgggggtcgagaattttgggttcataagaattaaagagagcaactaagaggaatacctaccaagaacattctctgtaataaatactctcataaataaaaaagactcttgaactaaggctcgttaatgccccaaccacgtaaaaatctcatgcattaaacttcctacaactttcttacatatattattaaatcggttgccgaaaacctcggtcgacaaagagacaatattaggtagtgtcaaaagtttgagggacaaaaaatactaattattattattatnnnnnnnnnnnttattattattattttcttttgaaagttaaagaaattcttaagaaaggagcatgtaagctcattttggacgggaaagatacagatatttgggatgagtcgtgagtgattcatggtcaagactttcttccccgccccaaaaacggacgattagagagttgggagaaagtagcggatcttcttactgataatgggaatcgggatatctccaaactcaactacttttttaccaagagacaaccaataatatcctcaaagggggaaggcccgggggtcagggcagcgataaatggatttggactaaggaaccttctggtcattttttttacgaaatctgtctatcttgcttaggccttgtcgagggcctcctaccactgtggctcccgctttttggaaactgttgaattctaggatcttggaacgccacaaagtcctttggtggagcattctctctaatgttttacctatcaggttagctcttgctaaacaaatgtagattgaagacgtgccttgccccctttgcggtgaggaagaagaaacgatggaacatctttttctctactgtaactttgcttttcacctttggaggtcttccccctaggggtgatgcctataccagagtttgggccctgaatgtggggctgcgttaattttctatggagcttgaaa

SEQ ID NO: 75755 - DNA, 706 bp, Cannabis sativa
gatagagagacagagaaaaattgggacagaagatttggctcctaaaaaattcatgaaagaaataagaagaaaaaagaagtttgtatatattaagattttacatcttatgattagataattttattttttttaaattatataagatttaatatttaattagagtatatgacaccgatggtaccttcatttttcacatggttgtactgtatatgtatatacatatatatggcttgatttcatgagcatgcacctcatttttcaacgaaaacgatcgttctgccaactaatattatggcttgatttaatatgtaaagtactgctaaatttaaggaagctaaatatacacacaacacaacaacaaaacaattcagcaaaaaaaaaaaactacaacaaaaaaatgtatatacatcgtaatttttgaagttttagctatagttcaaatattttgtaggaaaggaaattttgataattaattatgtgtataattatgttgtttcacattagtataaaaaaatcttcagcaaataaaaagaaaaaacagaaagaaagaaagaaaacatatttatatatgtataggaaaatacttagagtcacaaaaaatgttacagtcattatttaattaattctttttatattattttatttaataattttgtgatatctataaggaaagttactcttataatatacaaattattttgttttg

SEQ ID NO: 75756 - DNA, 740 bp, Cannabis sativa
atgcatatacacttaacatatacatacattcgcatattcatattacacattatacacagttcttatcttctttctagtttcaagtgagtcagccgacttgaacggaaagtctcgtgctggatggatgccctaataacatattaaacctgggtaaatcacatgtccaaaaccctaatccgggaaacttgaatctaaaatactctggaagaagcccaaatagttgcctatagaggatactatccaacaggagtatcaggatatgcggcaggaacacaacttcctagagctgcactccctgcccctccacaaacaagcaagatacaattctctgccactctgggatatactcaaaacctggccctggctccggcactatcacacctaggggccccagtcagcaattcccccaggatgaacgtgcaacttccaactcagtctgcgccaaccccaagcacggcaggagtgcctcaaagttcccagtgtaagaggtcttctaaaggtagtacatgatctgaggacaaaaggtaaagaagaaggtatacgccctaatgtacacaatacaccgagctcacaaacactcaagaatgggtgtattttgcgactcgataaaatatgcattaccgaaaacctcctcctttgtatagagacagtttccggagagaccctagcaaaaggtgtgactatcacaacaacattggtcataccacgaacgaatgcaaaaatttgaaggatgaaactaa

SEQ ID NO: 75757 - DNA, 636 bp, Cannabis sativa
attaaggtgtcttcctcatttgacgttttctaatcaaattttctatatttttcatttgctagatatttttattttttaatgaaagggtgacgagttgaaacttctttattttactttataggataaattgtccttctccacagcaattgcgtcgtctatttctaaaaatatacacataggaatttggattatttttttggggtggggtgacatctctattttcgtttgtttcaggaaaaaaaaaaaaaaaagggggttaaaacaaagaattaggtgcttcaaaattgatcatgaaattcctcaaacaataaatgggcttaaaggccatattttatttagctcttgtgttgggataagttgaggaatatttttttttatccattaataaaaaatatcctcatattttatttcattaaaatttattttttttttgcttaatatatcattaccagcacaggatttacattaatttaaagagtataatagagacatcatctataaaaatgagtaatgaaagtaaaaattaaaacaaaataaagtggaatgcaatgggaaatttgattttctatacttaaaaaaccttaaaattttattcttaaaccaatacattttaaactaaaaaaaatatgacacttt

SEQ ID NO: 75758 - DNA, 909 bp, Cannabis sativa
  modified_base (38)..(62): a, c, t, g, unknown or other
tgtgtttaaattctattgttttagagaattcatatttnnnnnnnnnnnnnnnnnnnnnnnnngtaaatctagatcctggtaaaagaatacccaacaaatatgacctgttatctattgttgatattttacatcttgtttctaacctcttctccactagagacttctagttttttctttgtttgttgtggaacttgtggcattgcaggaatgaaaagctctaacatcacaaagtctctgatcctcactttactattcattggacaacgaaccacatacaccaatatcaattacatatcgtgacatctccatcttcatcggtacatctgcccaattcttccccctcccactaggtaccgccaccaaatggtcatttgaagctgaatattgatgtagctcaagatataaaagttgtaaaatgggacttagttttatcgtaagagattgtaatggtgttatcatgactgttgtttccattccttggtttggagtcttctcaccacttttgatggaagctctctctcttcaacaatctcttaagtggtgccttgaaaatttccttgaaattggttacatagaattggattgtaaggtttccatagtcagtgccaaacaatctaccactaccaatttttatttgtaaaattttgtttctaacattaatagcatattatcttccctctctcaaggtaatgttagctatgttactcgtgagacaaataatgctgctcattatttagttaagtatgctttagacttagataaagaaactatttggacaaaagaacatttgtattctgaacttttaactctttatcaatgtgtacataaattttaaataaataaataaataaaaataatttaatttgatttttagtctttctgatcatactcttgtaattgtactataaa

SEQ ID NO: 75759 - DNA, 624 bp, Cannabis sativa
attaatacgtggctcggcacgtacattcacctagtatataacaaaagtatcaattttctttgtattttgatggaagatgtatcttaactagggtatttttaaaaggaattaaaaatatacttttttcacaatttaccatatttaaaattaattataaaaatactgataaaagtttgttataacttttttatttaatctgtaaatattatttacaaaatttgcttatatggttataaatttataaattttagttatgaatttgtaaacttaatttaccacaattaaaatttgtaaatttttgttatcaaaaaaataaacatcacaattactattttatttcttatattttttgtaattttaatcatattttggatttttagtatttttttaattcaagtaaaatgtgcctttgaaccttggatccctgatcataatactttcctcccaacaagatacattggttcttcaaacaatgttgtagctaatttcattacggagaacaggtagtggaatgttcccatgttgcaagaggttttttgtctgattgatgttgagaagatcctcactataccattgagctacttcagccccaatgataaacttatctggcatcatcacaactct

SEQ ID NO: 75760 - DNA, 732 bp, Cannabis sativa
gtacaattagacatgtgctacaaaataagcaacttggcaaggtaattaacagaaaaataactgattacaaatcagttagaataactaattaacaacctttaatagcccccctcaagatggagtgtagatattaattacgcccatcttggaaactatggtagaaaaaggggtaggaagtaaaggtttggtaaaaatatccgccaagttttgttgagaagagacatggagaagacgaatggagccttgctgaattttctctcggatgaagtggcagtcgatttcaacatgtttggtgcgctcatgatacacggggttttcactgatgtgaatagcagccatgttgtcgcaataaagattagctggttgtttgtgggagacgccaaagtcattgagaagggcaaggagccatgtcaattcggaagtagcattagccattgcacggtattcagcttcagccgacgaacgagaaactacttgttgtttttttgatttccaggagacgagggacttcccaagaaaaatgcaataacctgaaatggagcgacgagtatcttgacagctgccccaatctgcatcagcaaagaacgagacttggacattgtctcaggatagactggtttcagtatatgcttgcagatgtggtgctgtatcggaaggaaaaaagagtccctgtccaggtgtttgctttaagtattgtaaaattcgatgagtggcctgcatatggggaagccg

SEQ ID NO: 75761 - DNA, 782 bp, Cannabis sativa
tgagtgttactcaaatagtatttgaaaaatttgaatttatatatttcatttaatttttttaattttaaaaaatatatctttttacattacattaaatataaaatatttatgtcaaactcaattttttttatatttttttgtccaaaaaatttttcttaattttttttcaaccaataaaacaatcttatctcatataatgtaaaaatgagatattttctaattatataaaaaaaaaaattaagcataaaaacttaaacttttctaatactatccattcataattagtaatacttattaagagtccaccaaaatatatatatgtatattattttggatgtttttgcataaattattgattgaattttttattttattttgttaaataatatttttgatctcgtatttttaaaattgcaaaagaataatattatgaattaaatttttattaaaataaaatttaacaataaattcacctggaggtaatatgaccaagttgcaagatatgttatgttcgtgctgaaaattaattttaagttgattataattaataataaaaaatgacaaaaattactatttatgctattttaaaaaataaagatttattatttaataaaacatgagatctaataaataatttacaaatagaatgttcaaaattatattaacctatttgatatcaaattaatctcatatattcttatttaacactaattcactacgactaataccctatcctatgatgagatatatacaatatgtttttttgtatttattgagtttac

SEQ ID NO: 75762 - DNA, 896 bp, Cannabis sativa
taagcttttgttacacgtaagactgaatgtgtctaaaccacttgctaataaagataacttcttaaattattttttcatttccatgtgtacacccggtagcatccctaagaaaacttccaggcaaggtctatgaaacttggtgaattacaagtgaccaatggaccgtaagtatgcgtactcagttgggggcacccacaccatacaatgcatcaaactagaacggagaacttattcagagaaattttaacgcttagtataagttacttaatttgcctctaaatcaagtgaagacatacttcaacttggcataaagaaaagtaaatctaaatacttacatgtcaaggcaataagagtatagctgggattgtcatataaggctaaataatagtagtgttcgaaaacagagtgcctataggccaaaagcaagaacatgaaagcctcaaggccgaatatgaataaaaagttggttcaaatgcataaggccaaggccctacaagaattgtacatacaaagaagagccagaaatagttcctataggaaccacgtaccaggctaaatatttaagacaaggcaaagttcctagcaggttccaagtcaaaagttccttgtaggttccaagccatagataaaaatctaggcaactgtccccaagcgtacttgccagatattatcattgtataaggcagggtattagtaaagtctcaagtgtaacaacttggacaaatgttcagtcttaagttgagcagttgactataatagactcaccattaagtttcatacaaagtttctaaggaaaccatgcatgagactaaggttgtatatgcctacagagccatgacaagattcttgccgaggtcaaaaaaaggatagataattggccaccttctttgaaccaa

SEQ ID NO: 75763 - DNA, 907 bp, Cannabis sativa
aatctggtcaaatttctgttactgactatgttcgagtaacgagcacagaatggtattactctttttcctttgataatgtattctctaaatattcagttatgttttttcaaatataacagtacatgttcgcatcataaatccttgtagaaaccgtctattacatgaataaccttcatattccatttttttttcagtgctagaatatttaatatatatccaaggaagggagcaattcttgctggatctgatgcagatataattgtcttcaatccaaattctagggtggaaataagtgctaagtctcaccactctagatctgacacaaatgtctatgaaggaaggagagtaaaggtaaatcttaattgctctcatgaaactgttatttggtttgctgcaatttgagaaggatacatcatcactatccattacctggtactaagaatgttcttataccatgttataagaagtgaaggaataatattcactttttctttattaagtgatgcacacatatatacacctttaaatctatcttaggaatctagaaataagctatctgaaaacttattacatatataatagagctaacgttgttaataccatccttaattttagccagaattcagctccctaaatattgggtgcttagaatgaaattgttgttacaagaagaattaacaatccatttggagttttcgttcataaaaaataggctgtaatttagtatagaatgtaattgattgatgtgattttgaaatgatcaagattataatggaaacgctagcaaatgatatctaacggctgcacctgtttacaaatgatctttaagaactaggaagttgtaccaagtgataaaaagtttttaatatgtcattagcaatcttgcatagaactctttcataactct

SEQ ID NO: 75764 - DNA, 843 bp, Cannabis sativa
attgtgacatttttggctaccaatcaggtctccatggttgtcggacctaaaaatatttttattttataaatagcatgtctattacccacatattttaataaattatttgtaaataataaattatgcttatttaatcacttgtgataaaatttcttaattcccacataattagattagtaagatcataatcttacccattatactcttaacacacatattactccatatttttataaaactctccctaattaactatagttatatttttgggatattgcagtaataaccctaattcaccattccacaaatgaacaatcatataatatataactgtgctatcacgatatactctatgtgcttagtttactgttttacttgaaatccaatgttattataactgttcatactgtattattattctgtcttgatgggccttgtcacacaggtgctctaatgtgcaagcaagggtaaagctgtgtcagttcagccacgagtttaagggttttgaagatgaattgtacatgttctggccaagctagactatgagggttaggtccatcaataaatagtttagaaaatttcattttgccgcttaggtcggcctatatgaaataacttataataatttgaaaaataattttatgggatccctgacatgtaatttaaatattttgttttggagcaaagaatgttattattgtaagttatttatttaatgagtttaagtttattttaaccacttggcttatagacccatattaatgggattattatgttgtaatcatgacacgtggtatttctttgagtaggacattataatttggtatcagagtgccaaggttt

SEQ ID NO: 75765 - DNA, 854 bp, Cannabis sativa
gtcagtgcattacaatttgcttcaattatgaactgaagcaaaaaacttttggcgtcggttaatgaatgaagcaaaaatctaagtatttgtgtctacggttatagcgtcagtttagccaaccgaagaaaattctttatgtgtcattttaaaaccgacgctaaatgtgagttttgtagtagtgttctaaaattagactatgtcttatttatgaattttcactaagcactgacttaattgtgaagaaaagaggttttagaatttatttgttaattaagagactttatgaagtctaattaataaagaagtcaaatgctaattttatttgttaatcaattataattattaagtaagtacttttgacatttaagagattgaaattgaaaaatgtagcagtagtgaaagaaaagataaattgttgaataaaatgaaaaaaattctaactagtggggcccattatatggccgaccacttaagtatttttaaccaatttttatcttttttaattccatataatttaaatctaaccttagggaaaatcctatataaggtataagatggctttcattctcatccaatctatcataacctagttttctaactctgtcaataataactaaaaattgagagcctccttctatagatttcgaattttcctctctttctcttcataaatttcgagccctatatagtgatagagtttatgcccactcatatcaaggcaagtactcaatcatagtgcggaagactgtgaagaatccaacacctgaaaaagatccaggctcagatcttgctaatattactctgtgacagaaaggaacaagggttcgagatctgagtggaaggagacacattat

SEQ ID NO: 75766 - DNA, 624 bp, Cannabis sativa
aaagtaatcaaatatttagccaaaaaagcttcatgggacccaaatgtattattttaaagtaagtctaaaaacaactaagttttgttacatttaattattattattaatatatgatatgatataacatattttatacatgtgaaatcaatcaaagttttattttttttcataaatggtgtctctaaatatttaaggggttttttaaaaaagattttgttatacatatttcctaattttatacaatattaatatgatctattttttttttaaaaatattttttatgtttagtttgagattttttttatgatattgttaagatttaaatattgttccatttctttcatcaaaaaaataaaataaaatattgttacatttctaaaaaaacattatatatctttgttaaagtgataagattaccattctcctaaaaatattacacaatataaatattaaaataaattaaatccctaaaaaaggaaaacaaaattcaatttagttagttcttagaacaaacaataaattacaaaatttcattcaaaaaaatttacaaaaatagtattaattaacaaccaagataacgagtcatttggtatagaaagagggtaataactaattaattaatt

SEQ ID NO: 75767 - DNA, 744 bp, Cannabis sativa
  modified_base (359)..(393): a, c, t, g, unknown or other
tgtcgatgaaatttattgttctatcgaaaaaaaataaccttttttgtttgtttagatttttttattattattttaacatttatatattacaattcataatttgagactctaatttaggacctccaacacacacgcactctactatggccacttgagctaatctcaagtgattaatttgtttgtttagatcaaggcatagaaattgaattctttttacgatatttatatctaaaaaaaattatataagcacgcaatattaaaaaaattaaattaatttttgttatttacacttaatatttgaaggaaaaaatatcttacattactttgtgttactatctcaataataataataataatannnnnnnnnnnnnnnnnnnnnnnnnnnnnnnnnnnaataataataataacaataatcttgttttcatatatttaattttgagtggtaaaattttatatattttttgtcttcatatttgtttgataaatgtgttttttattaatgtgagacggaaaataaaaaaaaaaaaagtgattataaaattaaaatatatattataaaaaattaaaacattcaaaagaaattaaaaataaataaaaatagttacgtgcttttataatttttttagtccaaataaaagtcctttttattatttgatggttttagttcaggggaattaccttatatattttttttttcaaatttatggtttgggtttctaaagtggttgcagtactagttgcaat

SEQ ID NO: 75768 - DNA, 906 bp, Cannabis sativa
agcatgcctaaccagcacagtctcctacatagattgattatcagttgctgcttattgagctctcataatctccatatatttgtccatccaatcccagaattggcatttttagtgttctaaggccaaattgacagttcctcgggtatcctcttgatcatggtgaagtgtgttagggtgttcttgcatctggcctaaagtagtttgtaaattttacagctcaatatcatcaccaatcacaactcgaggttctccacttaatggatttttagtaccttggccagtctatctagtatgagtactagtggttccagtctcctatgtaccttaagtgaacccatgtagaggggttgttactccctgtcctactgaccagtgaccccttagaggctgaggaatggttagatttgggtccatctgtgggatttcccctccttgtagtcacaacaatcttcgtgtgttttgaagaaaatcaaagcaacgatcgtgctcttttactctcaatgaaagtaccaaaatgttgacctacttttagtcaacgacactaagttaattaaagcgattagaataaatgatatcgagtaagaattacatgaaattaagcaataagaacacaaaaaattatagagatttgagctcatgataattgtgatagcctacccctcgttttcttgtatttactgatgagaagagaagcaattgagtttcttgattactctcgaaagcttacaattttactgcgtaagagcactcttaaaaaattgattttgaatcccaaaatagttaaatggttctcctatttgtaggaaaaaattacattaattaggtttcccagaacaatcaagaaataaaatgagaaacttttttattttcctaaaacaggtaaaattaaaagagaaactaggaagg

SEQ ID NO: 75769 - DNA, 792 bp, Cannabis sativa
  modified_base (670)..(675): a, c, t, g, unknown or other
taacagactaacgacttttaactatcacaatcattagttgtcttaacactaaactacatataaaggaccttattatcttaccaagcaaaaagaaaaataaaaacttagtaagtattaacatgatcattctgaatgatatctcgggtgccctattcttcttaaatatataatagaataaaataataataataattaacattttatagacttaaataagttattttgtggaacaacatcacggggttgctctttaatggccttcttcacctccactcgtttatttataaaagtgattttttttgcactactaacacatctatttataaaagtggttttcaaaacctctttcacagtttcttctgtaccaaaactcacaaacccaaaacctcttctttttccactcaagacatcacacattattttagtctctataacattaccaaaagtgttgaaatattctgtgagatctgtttcattaacttcattaggaagacctctaataaagatcttattactgtggtatgtagaattattggtgtttgtttcattctcattaggaacttgtaccattgcagcaggggaactacttgacattttcgttttgccaaattaattgaatttcaacactaacaaagtttgtgatgacatcattgtagttcctattgatatnnnnnnatttctaaacttaacactcaatttatcattctcttagttgataaaatgtcacatgtaaatatagtattggtcaaacttataaaagagaagtatgaggcggtgacgtggcggtctaaa

SEQ ID NO: 75770 - DNA, 968 bp, Cannabis sativa
tagtccacgagtctttgttatttatgagagtgtttattacagagaatattcttggtggatctctctctcctcttttctctcttcgattccttaacttaaatcgatcgaccctttttcagtttgtttatggggtatttatagtatatagtatttttctgggggaatccctaatccctaggaagggatcacttgtttttgggtgttagcttcttaggggcacaaattcctagcagatacaaaataagaaatacatgacctataccgtaggtatcttaggggttaggtagatataatcttttatcttctctggagtgatgtgactcctcataatgtagccatcactagacttatcgattgttgtgtaatcgccgtaaaaagggcttacgccatctgtcatatcttttatggaggtttcaatacgtttttccccatgtagcattaaatgcgaagtgattgttcaagtaatctctttacctcccgaaaaatgccttaacatggctctagcctcccaaaaagtaaagatgtgtcttatgctctcctccgggaggtccactccctatggtgtttttttttgtccaagacttagttgattttcgtgagtggatgttctttcagatccatgtgtcactcttatccgcgtccacgtattttgggaaaaatcttaggcaacaaaaatatatataaatacatatataaactcttaagaatgggaatcacgtgggttgtgcccaaattttaaatttaagtaaaaaaacaattatcacagaaatgacataatccataatcaaattttataaatacatataaagatctatataaacatatatatatatacttttaagaatggaatcatagggttgggtttaaattttaaatttaagtaaaacgaaataaaaaatctaacataaaagtgacataaaagttatcaatcaacttttacaaacgaaaataccagtaaggaaagggtg

SEQ ID NO: 75771 - DNA, 977 bp, Cannabis sativa
tttcgaatgaaagtatgtatagaacctatttatttatttcacaacgtatataataacttgaatattgctgaaatgaaattattgcatggtttatattattctatgctattgtggataaccttcttatggttaactcgttctatacgacatgcaacaatttttaaatgccaaataattatgcttttatgtttactttacaattaatttgtttcacaggttgataaaatagatatgttcaaatatcaagtcacctatggtgacacgaccttcatttttgacctgactgaaaaatcatgctcttgtaaggaattccaactagagggaattccatgtgctcgtgccattgcagcaatcgatgcgaatcattttgacgaatacaaattttgctccgagtggattagcaaatatattttgttggaaacatatgcaggtttagttaaccctcttccaaataaaaaggattggaacacccaagatgaaattaaagaagaccgcatcaagcatcctgaattcaaagttaaagcaagacgtcgtaagaaaagaagaggagaaggaattagagattataccaagcgtggtcgacgtcaaacgatgacatgtagaaattttggaatattgggccacaataaaaagagttgcaaccacacaaccaaccaattcaaaagtaaggctaaaaaaaaatatcaaatatttgacatactctgttgcttaaacatatatagctttaggcttgcatcatattctgttatctgctatttggtttgttagccttttccttctattaagtttggtttggaaatgtcaaaaatgagaattataatcatttgataaaacataaatgtgaaccataatgaatcatgaatgaataaccgtcttctaatctcaaccattggaggaaagcatggttggaacttcctgtgttcttttgtatctcaagtattgatcaactttgcaggcaaggattctagcattgaatg

SEQ ID NO: 75772 - DNA, 536 bp, Cannabis sativa
gagtccaatccgagcctctcaccttgaattctctatctcttttttctctaatttctgtaccaatcttgtgagtgtttaggagggttgtgaaagtagaattgctcatccttggagatgacttctaccatgtgagatttgatatgtaatgtgtaacacttagactcaattgagtgcatgaatcggattgtaaaggtacttgacaattgaatatagttttctattttgattcaaaactaaagtcttattaagtttcattttacttgttttagtttatggtttgaatttaatcttgtttgcttgttatgtttttgctgttcttgttgttaattggcactggtttggccaagtattgatggtgtttttcaccacaaatggtatcagagcaaggttgtctttgaagatcaagaacagcattcaagtgatcaagattcatccccaaactttcaagaaccaaattcgagtcatcaagaatcaaattcaagcttcaagaacctgatctgaaatgacttctgcaaggttcgaggtggacaaattta

SEQ ID NO: 75773 - DNA, 707 bp, Cannabis sativa
gctcaacgaatgcacacacaattagactaacagggcaacaaacaagccaaacagatacacaccaccattaatagaaagcccaagagtttaacaaacaacaattacaagacagcacagaaggacagaacttgcacacaaaaaattacacttataagattgtgtcaaacgactgcaaaaccaaaacaactaaacaaggaaagtaaaatgccatttacatagcaactccccatcggtgagcatgattagccagtaggattcagagaagcatcaccaccagatcgtatctccccctggatttgtgcaagtgtatctactggcattgggtcagagctaatctccccttggagtggtgcagtaggatcatcagaggagcttgactgaactggagtagcttcagagattgggccagagtccattgatcttagtacttcggacatggccgtgagcatagtaacaaccccttgctcaaaccttttctgacgctgttgatctagtgcataagcatgagccaagtttcaaacctcagaaagtagtttgacttgccaatgagcagagggcaagcgagaagtgggcgatgagctcacttgaggaatttctgatccagcaggggcagcagggtcagatgtggtaaaggtaatcacagatggaggaatgggcttgccaaacactggttgaaatgtcttgcctattgtaacgtccccgcttca

SEQ ID NO: 75774 - DNA, 1171 bp, Cannabis sativa
  modified_base (807)..(807): a, c, t, g, unknown or other
  modified_base (1117)..(1125): a, c, t, g, unknown or other
tcgaaaaatttattgggacaagatacgttggtttttatttctttggcagatggtctgaacttcatatggctgttttgaattttattgagacgtccactagagatttgtaattgtggaaaaaaataaaatgagaaaattctataatatactcccttaaaaggaatacactgatacatctctatctgttttagtatttgaaataatttttttaatcaattttttttttctcatggtcatgtaaattatacttatttaaaacatcctgcaaaattataagaacttcggaaaagtttaacacgccgaaaattgcattcaagcagtgtgttacacgagggactattttattttatacgcgtgtaaaatactatttgaacattatattctatattgtaaattattccgaatttcttaaaattttataggatatcttaaataggtataacatacatgaatatgaaaaaaaattagactaattttttttttttggatgccgaaagaagtagatggggcatcagtacatcctttttaagggagtgcattatagaatcaccatataagatatttcttctgtcgcttccaatcaatctaaaaaggttaattaagatttttactctcttaactttgacatgtatcaaatcatgctcctgaacttttaaatttgttaaaaatctccctaaactattgagattattagattaatttaaagacttttgtctaattttagtaaaaagagtctaacatggataaaagttcaggggacatgatttagtacatgtaaaaatttgatgggcatgatttggtagatancaaagtctggggagcatgatttagaactaaaatagtaaaattgaatgaaattagtcaaaagtacttaaatcttataaatataaaaaaaatctttttcattaatgaatagtattagtgagtagtaaaatttaacctgctaaatttaatacaatttttaacttagaatataaatttgatacacattttacatcaagaattaaatttttaacaaaatataaatattacactatatttataactcttcattggcgatactgtgataataaattgtaacgtccccgctttaagtctccattgggtccttacaccnnnnnnnnnaatggctcttatacacgagtaggtcactttggctgcttcatggact

SEQ ID NO: 75775 - DNA, 725 bp, Cannabis sativa
attaccctctttttatttgtttatatcctcgattatacccttatgtaatgaaaaaaaccttcctgaacagttgccttatgtgagggtataatcgataatggacttataaaaggaaaacatttcaattgaagaatttatttaaaataataaggctatttttggttaactggtgaaaaaatgggtatatttcaacttaccccaacttaatatactcatttatttagtaaatttagactttcaggaactaatttatatgtatgtggagcaatatattcacacaatgagtaataatttatattcaaagtaaatattatatactcacatgctaatattttatagttaagttagatgtggtcctattatatactatcactacaataaaatttatcaatagccgtaatattattagcaatgggcaaaatctgcccctaataatggtagcattagcggcaaaaccatgattcgccgctaattctacttatttatttttttttaaaaaaaaaaaaactattagtggtagacttcgcccctaataatattagcggcgagcccaccactaataatattaaaaaaaaataaaaaaataatcgttagaattattagcaacaggacattaacaacgatctcgctgctaataattatatatatacccaacctcgactttcggtacctgtttcagtactttattattgcctgtaagtttttttagacatagtcaattttgt

SEQ ID NO: 75776 - DNA, 1043 bp, Cannabis sativa
ccaaattagacaaaataacacagctgaattatgcttatcatacaaatcaaatcctttggcaataaacatatcaatatcatgatctttattctccatatagaaggagaaaaaaatagagtgtttccaagctttttttgcactagaacattccaagatagcatgttccactgtctctaatttcggttggcatagggggcatagaggcgaggggatgatgtgtcgaaagaataatgaagaggcaactggaatggaacaagaaagtacacaacacaccaagtgttttactttaggtggggtagtggacatccagattttttactagaattgtttgcttatattaaaagaagaataagaaggtagatctctagatttgagtgcaagatgataagcagttttaacattaaagagacctgattggtaatgatcccaaattaactcatccctacaactattactcgaaattggcacgtgaagaatgctatcaacaacttgatcttcaaaatactgatggagtttattgggatcctaggcaccagatggaatgataaagaaagataaattgggtttaggaggaggagaagatgagtagaatttgaacctgaaatcaggaagtcaatgatcctataaggtatgaattgtcttgccatcacccaccttctaaataagtcaatgcttcatcaaatttcgaccccaaagaatactatgccaggaaaaagaaggtctatggctaggagcagcctcaaggatcgaagtgttggggaaatatcgagctttaaaggttaggctaagcaaagactcaaggcctttataaatacgccaggcttgtttagccaacatagcctggttgaaatgggttaaagatcaaaaacctaaacctcccacaaattttgattggcaaacagacctctaatttttccaatggactttacgggtttcagtagtggatccccaccaaaatttggagataagagattcaatttccttacaaatcttggtaggtatacgaaaacaagtcacatcatatgaagggatggcctgaaggg

SEQ ID NO: 75777 - DNA, 735 bp, Cannabis sativa
ggccggggaggttattgacctttttgaggagctagctctcgcgaaccattctacaccgaaagttgctaagtccaaagattctcgaggaggaaacttagacaggcctgagcaatcaaagggttgatccgagctggtcaacagcggatctgagcagatgcgggctcctactccacctttgtaagttagaagccaagaaaggcaaggagatgctcgcccattacatgaaccggttggttcctgacgtaagtgagcagctagacggtgctgactacgagtcttccctagagctgctgatgggaggagtcttgaaggaattgacaagggtaagtctttcttgacaatttcctttaatcctttttatttagctcagactctaaagttttttatctatgtaggctggtttaaagttggcttacacctattcccgagccaaatctgctgcctccaaaaatgctgctatgtccaacaccatgagggcggaggtggacttggctaggaaggatggtgatgacgccagagtggagcttggagctgtccggatggagctgggggaagtcaacatgaagcttttcactgctgagaggaaaatagtcgagttgactaaggacctcgaggcttccaaccagcttgaagccaccatcggcaccttgttggcagaagtgagtagccttcaagagaaaatgggagttcttcagactgtcttccatctgtttgaagaagagaagaagactaagg

SEQ ID NO: 75778 - DNA, 713 bp, Cannabis sativa
taagccaagaacttttcgattcatgtcacaatggatctcaatccccaaaacataagatgcctctccaagatctttcatatcaaagttggtagacaaaaaaaagatggtctcatttagtaatgacaaatcactgttgacaagtaaaatgtcatcctcataaagaacaagaaaactataacgactcctactgatcttcatataaatacactagtcaaacttgttctgtacgaaacgaaacgatgtcacaaccttatcaaacttcaagtaccactggcgagatgcttatttgagaccatgaatagaacaaaagttttaacatccatttgatgcaactctaaataaaaatgcgcaactaaggccataataattctgaatgaatctttagtagaaacaggtgagaaagttttagtgtaatcaataccttctctttgagtaaagccttttgccactataaacgtgctttaaatctttaaatctgtcccttttttccctttaaaatccacttacaacctattggtttaaaaccatcaggtaataaaactagctcccatacaccatttttcttcatggagtcaatctcatcatccgtagctgctaactattttgaagattgtggactattaagtgcttcattataagtgacaggatcaataaaatgatcaatatcatattctccttctccaagataaacaaaattatcatgacactttgtt

SEQ ID NO: 75779 - DNA, 512 bp, Cannabis sativa
tagttccagatgtcatctcctttcaaatagacaacatgaacccatgtgacccataaaacttcatgcttcttcataatagcccacatatacttagccaaaatagccttgttccagttagttccttccctgaacccgagacctcctaggtgcttaggcctacacaccttctcccaagagccaaaatgaactttacaacgattcccagattgtccccaaagaaataatctgcaatgtttctcaatctctttgattacacattggggaagaataaagatgttcatccaatagttcctcaaaccaagtaaaatagtatgaatgagttgatgtctacctgcatatgaaagatgcctcgtagcccatgtgtgaagcctctttttgatcttgtcaacaataactccacagtcctccattctccatttggtaggtctcagaggcacccctaagtattttagagggaatttaccctcctctaggccaaacaatctggaaatctcaattttggttgtctcatc

SEQ ID NO: 75780 - DNA, 636 bp, Cannabis sativa
ctgttacactgaaactgttgtatggatgatatatatgtgttttgtgaagtttggaatgatttgaataggttttggtggagttttaagatgtgtaaaactcggagttcctatttcctacaacaaaacggtccacagcttgggacaaatggttaaccatttcgtgctaggaaaccctagaaaattgttaaccgttttacaagacggcttatcaattttggtatttttcaggaagatcgaatatcatattttggccataactttacactcgggtgtctgttttagatattttatataccgttttgaagcttgaaaaaagctctaccatatggtttatgcttttaagccaaaatataagttttattttagggtgttcataccactagatttggtagaaaatcctagattgtcttattcgaatattaaacagtattttgggatagacacttattggtttaccatttttgcgacatagggccgagatcatcgggaatatttctctacttggttggccaacatgcatgattctagattaaaggtaagaaaattatatttttactacacagcatgtcatgttaggatacaattattattattgtgaatcaattgatatcgagattaaaatacagttattaccat

SEQ ID NO: 75781 - DNA, 774 bp, Cannabis sativa
  modified_base (749)..(749): a, c, t, g, unknown or other
cataaactttctttccttatacttcaaaaaaccaaaaaggaggttgcaaaatctttaccttggtttggattcacttgaaacttacctggaaatcccctagagctgttgaagataacccaaccctagttggttctatgggtttcgaaaatgagagagagaattgagagtgaaatgattttttttttccttttctttaattttcttataaatgagatagtggttttttaccaaacaatatcagccattacactactaaaaatcagattactaaatgtagctaagtccactaaaggacaaaatattttgcccctcccatactagcacaacataaaaaggtacaaagggtattttgggaaattctaaattcccgactgttctcgacattctccatgtctaattaaatcgccccgctatactaaaatactaagatgtgattcaactacgccatacaccacgttccaatgttgccgaacactgaacatgtaaaaatatgaaatttctatatatgacatattaaattcattctgaattcaaataaaacatcatagattaataatttagaattaataactaataactaattttcatatttaaaccctaactatctgttaatttccaaatttaagctaagcagtctttacagtaatttagtccctatacaatgtatgactgagagtgcaattccaagctctatacgtcgatgcaacaaggaattgataagtcattggatttacttggtaaattcttgntctgcttattgaaagctcggttata

SEQ ID NO: 75782 - DNA, 1115 bp, Cannabis sativa
aagatggcttttaaacttgatatgtctaaggcatacgatagagtagaatgggaattcttggaagcaatgatggagtatttgggctttgatgaggactggattaagaaagtttgaactgtgttaaatcggtttctttctcagtcattttaaatggatcgatcaaaggtctattccatccgagtagaggcttaagacaaaaagaccccctttccccttttttatttctaatctgtgctgaaggtctctcttgtcttattcaggaagcggaaagggctgggaagattcatgggttacggtttggaagcttggatataaggctctcccatttattttttgcagatgatagtctcatctttctagatgctaatatggaggagtgtaaggcgataaaagaggttctggaaaggtatgaaactctatctggccagtgtataaactttgagaaatctgaaatgtgtgtgggcagcaagatcaaaacagccgtggcagaaactctagctaattacttgggcgtttctttggtgaaaaaccatactaaatacctgggtatgccttcttttgtgggcagaaataaaaaataagtttttggcataattagagataaggtggaagctaaacttcaaggttggaagatggggctcttctcacaagcgggaaaggaaatattgattaaagcggtgatccaagctatcccttgttatatcatgagttgttttagaatttcaaaaggcattcttaaggagatggagagtatgattgcgagatttttgtggggatctacatctaataaacacaagttacattggggtaattggaagaaattgtgtagactcaaggagcaaagtggtatgggctttcgggatttggaagattttaacaaagcaatgttggccaagcaaggatggaaactcataaccgaactagccagtttaatgacaagggtacttaaagctctctactttcctcaaggtaattttatggatgctaatataggccattatgggtcaacagtttggcaaagtatactttggggaagggagatcttacttcaaggctctcggtggtgcattgggaattgtagtactatacgtattaatgaagatgcttggctacca

SEQ ID NO: 75783 - DNA, 630 bp, Cannabis sativa
gtattctaactactagtcaaccaccttgaacttatcatattattaatattaatgtacttttaagaaattttaattttatacttgaacataatatatatattttttagagaaattgtaatagtacaagtgtcttgtttagtaccttcctacgtgttaatattgttattggttcaactaagtatcaggttacatatagtttaatataataatttttagagagtattactagtcaatcacaaaacgacacgcttagaaggtgctaagtagcattgatacctaataacaatactctatattttattaagttttgatttttttaaataaataatttacagtattaaaaataacgtttatttagtgtataaaaaaataagtatatataactaattatttgaactatatatttgatactataatttttttcccaaattttttaaagatatatttattataactataatatacatacattgttaatacatttatataataataaattctaatttcaagtaaaaatacccgtcaaaagtaatattcttaataagtccgaccctaaatatagacgggctaggcatgtgctaagggtctacctaatctaagggccttaaaaaaaatttatccccttttaga

SEQ ID NO: 75784 - DNA, 708 bp, Cannabis sativa
aaaaaaaaaaaaaaagatattggcggctaaaccatttaattttcatttttcaacacttaaccacaaaaatcgatttttttagggcaaaactacctcagctctcattccgttttgctctatacccatctgtccaaaaatcacagttaagtgccacagtggactgtccacgtgtacacacttgtacacgtagaaaatttttagtggcacacgtattattaattttaaaaaatgattataaatatttaaaaaaatatataaaaaatcagaaaaaaaataattttaaaaatattttctttttgggatattagcggctaaaccacccgaactttatattttttaacacttaaccaaaaaaatcaattttttgagggcaaaactacctaaactcccattctgtttttaacacttttcctttttcttttcttcttcttcttaactgaaaaaaccctagcacccagtcacctaccccacgacccaaccttctccgactcctctctcgcacactctctctcacggtgcacaacgctggccttctttgaccaccccaagtcagacgggccacagaactgaccccacgacccaaaaaatcccaacctcgatctggcctcttctctctctactttgatctttctccgacccccctctgtttgttttcgtttagtccgacctccctccggaaatcaccgcgaagagagagagagagagaga

SEQ ID NO: 75785 - DNA, 1207 bp, Cannabis sativa
aaaagcaaaagtaaagaatatgcgccagtgtaatatgaaagataacatgtgcatttttataggtatatacgtattacaataaaattaaaagaagaaacggtatatatgcaaattaattgaataacaatattgtgtcaattaattttaaattttggttgttagatgcaattttttctattttctttgtgtattaatgatatatatatttttaactcgtttgttccttaattaacatataagtttttttttttcgttcagttcttctttttaattttcttttcattttttttttagtttttgaaatattaagttacgtttctatggaagataagagtgtaattttttattttctaattttcgaggattgggtttgtaaatagcctctattacttttgatgttgaaattgtgtagaagatggttagttttttttttcttttgttttttttattttttatttttttagtgttgttttattgttattttgccacaatttatttatttgacgtcgatttcactgttcttactccatctttccaaaattatagttatttttcagatgttcttgtattgttgtggtggttctatccatgagtgtggaaaaatagaggctataaataacatttttttcccttctctatagttgtttttgtgatttttcattatgattgtcctataaatacattaaacgagttcactggcaaaaagtttttttaggtatgtagttcttttatgtttttctaattacgtggttatatgtgcttcattgtttatatttgtttttgtgttgttttagtaatttttttattctaatttttcagcactgtacttgcaaatatagccgttattgcatctggtgttgagactgtatagaagattattagttttttttaatctttttttctttttgttttgtttgatttgttttagtgttatttttacagttattttgtcttgattatttatttgacgttgattttacaatttttactcaatctcgccagaattagtagttgttttctggctgttttggtattgctgtggtcgttctattcgtgggtgtagaagatggatatcttgttttcttttttgttgtatacagtataaaaggaaaaaaagaacgacagtataaatgtaatttcaatcatgtggaaataaaattgtaaacttttacttttaattcggtattttataaaaactcctaaatga

SEQ ID NO: 75786 - DNA, 683 bp, Cannabis sativa
ggctagtatgttgttgacgcgtttacgcatggaggcgacctcaaagataacagataagttttaaatcttacttttaattatattttaataattttggtgaaattttatttctattattttatattattattttcttattacttatttgttagctaattgagttttgttaactctgttaacaaatatttaattttaattgggatttgagttattaagtttgattaattttcaaatattatgcatggtgcaggttatggtggctagttaatttctactttagaagacttagttttaatatttggacataacatattagtttcactggtgacgtcatgcttcaaagataagttttcttgttaacataatatttgcgttttatccttaatttaaaaatccataacattattattgtatagtatgctaatccactttttatacttatttattttgtaggtagttttggcccattgggttgtttacatcagatgcctcttgaaggcggtctcaagttgttttgtctaaatttctaagatagctttatcttatataagtcgctttgtttataatgactcatattttgactttgtatatctttggctagacaattagcttgttgattggaaattttctacatctacgattgtcatagtgtgattcatatcactctctcaaaaaaaaaaaaa

SEQ ID NO: 75787 - DNA, 670 bp, Cannabis sativa
tatttagtacaatatttagcatatgttccaatacaaaataataaaattgatacaaaatttaattttatattactgttcatttaatatttataaatatatataaataaaaattgtgatgaagatatgaattatgctatattataatgaattatgctatattatattgtgtgataatttgacatgtgttagaatttggtaaggtatgggttaagatgtctgaggttccatctcaaaactaattgacaatgagaggagcagtccatttattttatatatgataatttatatatttccacacattagtaatgtgagactaattctaatacaccatttacgtttgggcctggaaagtgtgggtataatggatgacctttaaaagaccacagagctgaaacctgacatttagaagagtctcaaaagctaaatcgcaaaatttgtgggtgtacatattgagaaatttgtggcttttgaaaaaaaagtcaaagaccctaacactggacactagcaaacattggctgcaaaaggtcccaaatagaggtcaaaggggagacatcgaaagttatttttagttttggctcgtcttttcggaccgacaacactttaagctcacaatagatcacaaacggctctgataccatgttaaaattttgggataaggtgaatggggttc

SEQ ID NO: 75788 - DNA, 1045 bp, Cannabis sativa
aacttaatctaaaattaatactaaaaataacctaatagtgggttgttagttctaaaagaattagtgcagattcatctttggaagcaaaaatttgggcttttctttttggctttctcatgggcagatgaggaagggtggaagaatatccacatcctctcaaattctaatgttgtagtccaagctttggctgagaacaaatgctccctagattggaaggtctcaagttttttttctttcagtagttaatttaattaagaagtttattatttataagttcttttttattaattgtagttttaactcgtttgcgaatagtgtagctaagtatgctagagttgttagtcaaccagctttgtagcaaggggagggaagtccccctgtgattctcatctatctttcttaatcaataaacaggatgttcttttaaaaaaagtcatcatctacggtaaaaactaaccaacttgtatttttttttcaatattttttttattattttattcctattttcaaggacatccttcacctctaaaaggagagctcatctagaaactgaagcttgaatacttagcatttttctgtaattaccatatcatgaaaaataaaaacttgaagtagatgtagctccattatttttgcgatacagagaatgaactactacaaattgttatgtctctctttgtttatacttaataaatatttcattctcatcaatctagcgagtgagttgtgcttatgattctttgttaaaatttctaactcaatactctctaattcttatagctcccatgaaaattgagtataattatactgtgtaattactaaaaattttctattttaaatattaattgttttaccaaacaaaatattaagaatttatgtataattactatatatatttaaatgcatagtgtaattaagtgtttaattatcaccataataattactagtaattattgaatgaaaataagtataccacctcttacagcgtccacccaaaccttgttgaaagtgttggttctccgaaatctaaaatcttctatttgat

SEQ ID NO: 75789 - DNA, 859 bp, Cannabis sativa
  modified_base (265)..(268): a, c, t, g, unknown or other
tttatcattctaattacttctttaccatgtagtatcgttagtttattagtgaaattataatttagatccaatctaaatttcataacaacttttcagttctagaattaacacttaaagagaaccagcattggatctgttacgaaagtcaagattccacaattgtaaatcaagttttcagccatccacattattagcttcctaatcagaaattttaagaatcatctactttgagaaactttaacgaatgaatcaaagaaactaatannnngaacaagagttcatgattactcaagattcaggctaatcagctattgatcatccttatgatatgaattaagtctttatagtaaacaacatgtttgataaatacagcttaattacacattggtctatgtcatatataatctctactatatacaacacattcacttagatgtcatactacatcagcaatgtgaagcgagattgcttgtaccgaataacggggatcagtgaacagtattagtaaccgttgattaaagattccatagctttaatatgttgctgattctaggtgatcttaatttttcgtacaatacaagtcacaacctcatatatgaataagaaagttttcaatatttataaataaattatttaatattaaatattaataatttaacattcaagcatatatcaaaatattcaactaatatttataatcaaaaatatatttacaagtttttcagggaataaacccttagttgatgtgttcgattaatactataaatgatctttaaacaagtatgaataaaaatcacatctgatctagttctacatattttctagtatgtacttccactaaagtgtcctacactagact

SEQ ID NO: 75790 - DNA, 1139 bp, Cannabis sativa
ttaaaatttatctctcaatttttacaattatataaatttagtcattttggttccatcctattattttggttaaatagttacgtatcttattaaattaattaacaactttactttctaattttgataactatgtacctcaaaataaaaataaaaaatatttaatattttttttagtaaaaatcttaaaaaattaatttataccttaaaaaaattatttatgtataaaaatatatattgaagaaattcatttattgtaaacaacatttattccatttattttctaacttttttttattaaaattttaaattttacagaaacaataatttttttaagtaaacaacattttttccatatttctttttttaaataatttatatttttattgaatttttaaaatataattttataaatataaataaatttaattttttcttcacaatattttagtttgtttaaattatttattgaatttttaataattttaatttaattttttaaaataaatgtttttaaatataataaaatttgaaaatatttttttaagaacaattaagattttttaagtaaattttttattttttttaattaatttaatactaatatttttatggacaaattttgtgttggtcaatatttagaatgtaaaataattaattgttaacgataaaaaaaataaatataaaaaaaaaccataattatacaattgttaaatggcatgtgaaaagttaataacacaaagctaattattcttttgtaattaaggtcaagtcaacatagtacaacaccacactgattctttgcatatatgatgcaggaagcacttgaggtaaagaaaacatttctttatggaacaaatctattttacaactccaaatttacttactgctttaaatatcaaacacattatttgttttagatatcaggctggctgttaatgtagaattaaacatataagtttttcacaaaaattttccataactaatcttttccacaaccttcttctctaacatcaaggcaccaaaatgataatatcaaaagttcaaaacctattaattaatgttataagacatgaactcataatataataaaacatttaattacagacacccttctttaaacagataggcataaaaagaaa

SEQ ID NO: 75791 - DNA, 800 bp, Cannabis sativa
cgggttagattggaactacggaaggccagtttgaaccctagatcatgcattggtttttataattatgtatattgttggaaatatatgtgaaattctagatttttggttgatttgattgcctttggttgattttggtgcttcatcctttatgggtggttattgtatatgctaacttcctcttcttcttcaatgtcaatgttctcttttgggtcatcagtcatattctctccagcaattgggttagtcttattattttgggttttgttttatagctttgatcttttcatagcttatgggttttaccttcatttataatgctgttgtagtcgctgaggcaattcatatacaattgaacaagattcttgttacatccattgatctcattaggactactgcgtaatttggtttgctttctaaatgatcagcaaattattatttaggagaattaatagtgaatattatttaattttttttttatgacgttagtgggcactttgatttccttgaaatgttaatgtttgattcccctaatgtaaccttttgatttggtcccacttcaatatacagtagtaacgattctattagactttgagttaatatactacttcaatatgctttggtcttcgatttgaagagagcaaaaacagtggaaattgcgggagatttggaagaagaggtgagtggattgtaagtgagagtttgagagaatatgttaattttgagtctctgaactcggatttgaagtaaagggtctctctgtagatcaaccacatgatagttagagacacaggtagagctta

SEQ ID NO: 75792 - DNA, 874 bp, Cannabis sativa
tttggtgatgcattattagtgtggtcacataacaaaagcttctactttctttgtttgttactctttgctatctactattacattcttatcctaaaattgtagttatactactccaactaactttttatttgttaaagcttgtttatttatacattttaaaataaattttttattataaatatatagtactttagtataaaagtttttttttattttttacatttaagcatattttttttatttatatttatacaaaaatatataaaataattaataaattacaacataaatcgcaatttaaatttacatcatcgcaatccacgcaaaaaatgttttagttaacattataaaagaaaatgtaaacattgatcagaaattgtttatataagttaagtcttcaacaaaattataattataattagaacatgcattagataaagacatttcaaagtctctgattaatcccttttaacatcactaatacttttgtatccactttttaaataaaaaaaaataattgtaatttagataataataatagtacactaggacctcccattttaatttatgtgtgattgtaaataatgatatatataatatgatatcgaaaagagtattgatatttagtattagtagtgcctattatctttttattagtggtgctctataattagttatttttatgtgaaactcgatatttaattacaccaatagcagtatgacactaagaaatatattaagccctaacagtatttcttaacaattttttataaaaacaaatagtgtgtaatttgataataattaatctatcattacaaaaattgtgattaacttttaatcataatactctttttttgttactaaatgtcttttt

SEQ ID NO: 75793 - DNA, 766 bp, Cannabis sativa
aagaggggatagctccacattgtgctcctctccaatcttgagtttgcattgcattgttggtgattcttggattcaaatggctcacatggatggttcaacgagaggtatgtgtgtatttatttggatgttctaaataaagtattgatcttggttttatgattatgagcaatgatgattaatgttgaatgtgtgtttggatagctcataatctatgtgataatttaacaattggtatcaagagctagtatatttgattttagaactctattattgaactaacccattttgttttcaaatctgaaattttattacattttttacttttttcgaatttatatgtttgatgaaatgtaaatatgagatttacaatttaaatgggtttatatatttaattatggccttttggtttcattgctatggaggtgttcatcaatggtgaaagccattttcagattttttgtattttatgaataatgtttttttgtaaaaatggttgaaatggatgttagaaattgatagagggttgaaaatggaacaaaacccctcaaacgccgtcggttttggtggccaggaatgctccaaccgatcgggtcacgaaacgggtcgcgccgatctgagttgcagacccacagacccatggggaagtttgttgggtgacgggggtgacaaaaatgtcgtttatcatgggtgaaaacgtcgttttttggagcagaaaaatgacttgtcgtttgggctctgtcagccaaacgacatgtcgttttgcatt

SEQ ID NO: 75794 - DNA, 661 bp, Cannabis sativa
  modified_base (279)..(280): a, c, t, g, unknown or other
ctcagtctctgtctcactcacacatatatatataagattagttttttttaaaaaaaaaaaattaagttcgatgttaagtataatatatgtatatttattaattttttaattagataatatatatttttttaatttttaaaatgaaatttgaaattaactttgtggctatagtgtatatatacatattttatatatacaataaaattgaagtaagatatattaatattttttctttagcgttttgaagattttattttaaatatttaatatatatatatnnatatatatatatatatgatattgtaatttaattaattacgagaattgttttaagtcctagagataatttttagtaatttaaatttaaattaatttttttatataaaatatttacatttttattattttaattcgtaattaaagcaattaagttaaaaatatgattaaaatatttttaaatatataataataatatcataaaattaataaaaaaatattctgtttactaatagtatattcggctaaagttaacttaaaaatacaaaaagtatagttaaagtcaaaaaattctgtttagtaacctatatagaatagatataacttgtttctctttcattataaggtaagtgccttttgtcatgtttttatgatcattttctta

SEQ ID NO: 75795 - DNA, 729 bp, Cannabis sativa
ttgaccattttacccctagcttaagaaataccctaattttaagtctaaggggcattttagtcatttattattaaggtgattaggtggctacctaattagatgacacctagcaactagtaatttcagcaagggattaattaatcaatccctttcatttgaaacaaagtaaagaaaattaaagaaaaccaaaatatagaactctctctctctctctctttctctcttttggctggggcaaaaaccaaggggaaaattcatcttcacgctggtgttttctgagtattaagcaaggttttgtgagtctaaagcaaaggtaaaaccctagaactcttgaatatgtgttttgaagctttttctttagtttgagtatgtgatttttgaagttagtggctgttagggtttaaagattgtgtagtctgatttctaagcttattttgaattgattttaagctctggatattagttttgagctttggtgagggaattgagcaagcttgagctttgaaactaatgtttagatctttaatggcataaattgatttagtgactttttctaagaatttctagttgaattatattgtatatgcattgtttaggtatactggagagttttgcaaagtttgggttgattttgaggtcatgggggcatttttcgagtatatatttaaaaatttaatttccatgatttgtcggttcactggatttagactgacatgataatcggtgata

SEQ ID NO: 75796 - DNA, 737 bp, Cannabis sativa
tctttcattaatgtcgtgacattactaaccacataactaaatttccacaattgtcgggcccgaaaataacgtacttcattaaataatttctcaacaatttacctaagtcagatcatgatcctacttcgtttccaaagtaattacatatttaataaaatatgtctatttaaatattatttattttctaggatattacaatcagcttcctcaaataccaactcccatgattaggagcttggtaagaccactaatcttcttctttaatatatatactatgtacccatggaacccataagttctcttccatgttaatttgcaactgcccaaaatacttaaataaggctgcaatattccattcatcattccttttaaagccagcttctccaagcaatgggaccagaagctaaaaacaaatgttggcctttccaaagataggcaggacagatagcttctatttcattgagtactttctttagcaagatcataatctgactccaataagaatgaaaggataacaacacagaattgatgagtacaactctacctgcaaaagataaattttgagtgctccatgctttgattcgggctgtcattttctcagctagtactttacattccttgcttgagattctttttgaacatataggaatgctaagatatctgaacgacatctttttcttgctaaaccccgaagtatcaacaatgagctgcactttactagcttgcattccacaaca

SEQ ID NO: 75797 - DNA, 666 bp, Cannabis sativa
tgccaacctcacctctcaatacaatggatatttgattttaaaatacaaagcaaactctctctaataagatgaaatataatgtgaaattttagagagaattgcaagtacactaataagataagagcaagtgtggttcaagtgtgtgtggttggtgtgtttatgaaaatatgataattttttagcttagaacacttagaatgatataataatatgaatagaagctcaaccaaccttgatttttgagtgaaaaatgagtttatatagtgtaggaataaaaattagccatttatagccattagcacatttttcaaaaagaaatactgggaaaaacggtttgctatttttaaaatagtctaccgtttctgtgaaaaacaataggccaaaaatgaggcaatggcaaaatatcattttttttacttaaaatgtgcataactcttagctcgtttatccgattttaaaaattccagctgtgttatcttagttaaaagatgaataatcttaaaatctaatttataaaaattatatgttatttttgaaaaataacttgtcgcacaagttaatatttaaacttataaattctaatatactatgcaaatcgctttaacaagactaaagtaaatttataccatttgattgtgtatagtattgatttagatgagcttccta

SEQ ID NO: 75798 - DNA, 1594 bp, Cannabis sativa
agtgtgtgtggagggatgtaaaagggagtatcacttttgaagtgattttccttaatgtgagacatttctttgtaatactttactgtgttgagttttaatctttggctcattctatggtgtacaattgacttcctattcaataaagatccatcattcattcattattgagttaagttttctttgtctaatttcaattaagttcaagttttggttttgtgattggttttaattttgaattgtgtttcttggacattgttactgctgttacaacctgttttgagggtgaggattcaccacaaacagtattagagctcagggtttagagttcaagaatcacattcaaccaatcaagattcatcttcaacatttcaataatcaaactcgaactttcaagaaccagattcaagcaatcaagaactggttttaatggcttcaacaaggtttgaggtggacaagttcaatggttcgaatgattttagcctatggagaatcaaaatgaaggcatttttagttcaccaagggatctatgaggcacttgatgatgaaaccatgaaattaattgaagacaacaagaagaaacttgagattgaagccaaagcacataatctcctcaatcttggtgatgaggttttgagggaaatttcagatgaagacaaggccttgggtctctagaataagttggcatcaatctacatgaagaaatctcttgcaaacaaattgtatcttaagaagaagcggtacacacttcgaatggatgagttaaaggaattgagaagacatctagatgattataacagaatcattcttgatctgaataatcttggggtaaaaattgatgatgaagaccagactctaatcatgttgagttcatttcctaagatgtatgaccaatttgttgatacgatcttgtatggcaaagaaactctaaatatgacaaaggttaaggttgcattgaattctaagaaaattcagaagaagggagatgagaaagatgagaccaatggagaaggattactcattgttaagggaaaattccccaagagggtatacaagggaaatcataactcaaatggctacaaaaggtaaccattcaagatccaattctagaaactccacaggagggccaagctctaatggagctgtagaaaagcaatattaccattgcaagaaggagggccactttagagatgagtgtttggctttgaaggctaaactgaagagggaaaatcatcacaagtctaggaagcatggagttgctgatgtagttgatggttatgggtcgtttgatgcacttacagtgtcatctgatgcacttgtgatgtctagatcagattcaggtggagattggacttttgatttagggtgttcatttcttatgacaccaaacaaagaactgtttaagactctttcagagagtcatgggggcacaattcttcttgggaacaacaaagcgtgtgagatcaaaggtgtgggaacaatcttgttaaagaatcatgatgagtcatgaagaccttgtttggaatatgttttactaggatccagatttactaacaagtatgtttttaacatcctaaacatgaacttctaaaacaat

SEQ ID NO: 75799 - DNA, 686 bp, Cannabis sativa
  modified_base (639)..(661): a, c, t, g, unknown or other
gagaatatatatatataaaaaaatctaaaaggaacattttgctacaagttttaaaataagaacatttattaacatagtcctataatttgggaccatataatttcccttcaataaattggataaaagcataaattaaggctcctaacaattgatagtttatagtctctcgtagcaacacacatactcaaacttgttaaaaatgagaaattttattatatatacttgaaaatataccattatcaatttttatacttttaactaatttataccaaataatgcctattttgacttgctttctcctttttacccccttcatattaataaatgcatcttaaaaaaaataactctctctgctctctctttctattttttttaaaaaatctcattacgaccacgacggccgacgacgatggtagagattccactaaaaccacgactcacgcacaatgatcgtacgaaacccgctacacttgcgataatagttaagtgttttagacaataattttttaaatattttgaagagtatgttgctatttttttttttattttttttgcaaaatagcaggatctgatttttttggtcagatttagattttttactattgggaatattttaacaggatctagatttactaacannnnnnnnnnnnnnnnnnnnnnntatgaatatctctaaaacaatgaaa

SEQ ID NO: 75800 - DNA, 870 bp, Cannabis sativa
aaaggaggtgcttagcttctcagtatatagagaatagttaaagagtattttaaaagttaaggtttgtgaatgaaaggaaattatgccagaaaaaagagtatgcttttagagtttataaaaggattatggatatgagatgagcagagccgaccctgaaaatatatgggcccatgacgaattaaattttggggccctaaaaatatattaaaaaaaatataaaataagagtgttatgggatttgatcccatgaccttggacattatgtcctccacctcaacaaactaaactataaacatttattgtttataatacacttaaattttacttaaataaaagtctaattttttttattttttttttatttttggcccccggaaagtgtgggccctaggcacgggcctagcccacctatgcctagggccgaccctggagatgaggagtgagatatgcacccttatttgagtggtatatatggctgttttgatcaatgaaaatctattgataaaaaaaaaaaaaaaaaacaattcaactctcgtgaatatattgatccttataatttttaccctttgaattttgatatgtactaaatcataaatttttaagttcgttaaaaatgttccctgaaatattaagattgttgaatttagaattttttgtctaattatagttcatgaggcatgatttagtatatatcaaaattcgaggagcatgatttgatagatatcaaagtctgaggaatattgtttagtacataaacaataaatagtaaaattgaatgaaattaaacaaaagtgtttaaatctaataatctcaatacttcaagagaaatttatatcagccaaaaaaattcaaaattataatttaatacat

SEQ ID NO: 75801 - DNA, 1098 bp, Cannabis sativa
ccttgccttctatgaaggatttgcgcccgatttccttgtgtaatgtactctacaaggtgataactaaagtcatggctaatcacatgaaaccgctgatggatggtatcatttctgcttcccaaagtgcgtttattcctggaagattaatctcagacaatgtgatggtctcttttgaagtgcttcactatttgaaaaggaaaagagcggggaaaacgggttttatggctttgaagctagatatgagcaaggcgtatgatcgcattgaatggaaagttcttgaagccattttacaaaagattggtttctcttctcccttgttgaatcttgtaatgaagtgcgtatctcggctaaatacacaattgttgatggtcctcatgagataggtccattgttaccttctagaggaattcgtcaacgcgatctgctttcgccttacttatttattctttgcgctgaagatttatccgctcttcttcagaaatatgagcatagtggttggattcatgggtgtaaggtggctaatggggcgcctcgtgtttctcacatacttttcgcggatgacagctatgtgtattgtaaggctacggttacagaggctgtccatattcagaatcttcttcacagttttgaattagcatctggtcaacaagttaatctggcgaaatcctcgatcttcttcagtactaatacggactccatgatggaacaacaactctgtacccttcttcaaatgcaggaggcggctgaaggtagtttttatttggggcttccaagtactatgagtcggaccaagtttgttgtgttgggatatctcaaagatagagttcataagagacttcaaagctgggaaggcaaattcctatcaagagctgggaaggaagtcttaatcaaatcggttgtccaagctttgccaagttaagcgatgagtgtttttcttctacccttggatattagtaatgatgttaagcgtgccatgaccaaattttggtggcgttcctcgaagagtgatggtaaaggcattcattggatgtcttgggacaaactttgcaagcataaaaagggaggaggcatgggttttagagatctacgagatttaat

SEQ ID NO: 75802 - DNA, 1208 bp, Cannabis sativa
agacacacaacctccacaacattccaataacatattcataagagattccaacaatggacgggccctcttcatttgtgtttggttcggtgtcgaagaatttatttaaggagaacagaagaaaggtttcagtcaagaaagattcaaaagctaagaaggggaataatggcggtacagtggaggatgtttctcagaaagaagattcagcagccactacaatcactgaagaggcgaaccctgtgagtcagggtcgcctacagcaatgaatactctgctctggaacgtccaagggctggggaacccttggacgattcgttccttaaactccctggtgattcgtcacactccttaattggttttcattatggaatcgaaacttaacaatgttcgcgcggaagctttgcatgtcaaattgggctttggtgggtgctttgtggttgaagccaaagggaagagtgggtgtcttcttttgttgtggtccgagaaagttgaaacccatgttctttctttctcccctttccacatagattctttcattagaatggaggaagggcagtggtggagatttactagtttctatggagatccggatccaagtcaacgtactcaatcttggaagttgttgaacaggatttgccgtatgtactcatggccgtgggtagtgggtggagactttaatgaaatcctgagtcaaaaagaaaaaatgggaggtcctcccaaactgggataccttattaaaaacttcagaaaggctctggacgcatgtaaacttcgggagattgcgtttgaaggtagtgattacacttggtgcaatgggaggaagaataatctcattttcgaaagacttgatcgagtttgtggtaactcggattggtttgacatgtttccctttgctcaagtgcgtcatttagagagaaccaactcggaccattgtccccttcttctcacagcaagtgactcttctcctatgaccacgaataagactagatggcgaacccgatttcactttgaaagtgcttgggcagatgatgaagactacacaaggattgtcaattcggcttggcaacatagtaacccaattatgacaactagagatcttaaagataagttaagaaaaatgtggaggggctcttcaaaagtggaatagagtaaaacggaaggaaatgacacaacagttgaaggaatatgcagaaaaaatttctaaactctcc

SEQ ID NO: 75803 - DNA, 1401 bp, Cannabis sativa
cagcttcgaagacttctccatcctcggagacaggctctccctcctcgttgaaaccactgaatggcagcacccaaactgtctcctcctcctcctcttctccctcagcctcgggaggggtagcacgacgaaccttgccctggtcttccacttcttggacttcaaagtccctttcaataatctctccttcctcgatcgaaggtctggcttgttctacacccgctgcagcaaacaacctagcaaagtttgggtcgctctttgaagctttcattattgttttctttgtccacaccctcattgtacgcttgagcggagatttaagttcaattgtatgcttggcaacgattacaacaaactcaacaatggtagttccattagcaaacaaggttggacgagctttgggcatagtatcaacaacactgcgctagaccctgtacgtcgaagaagtagccaaataatgcctccaacctttctttaactcccatatgaagcgtctgtacccttctccacgtatttggtttaggtaccagtgatgttgcacctcgggcttcgaggatagcatgtgttcactacttatttcctagtcttcaaaactagaatttgagatattgtcactggatgaagacgaacttgcacggagtcgaggatgatctttgtataagagttggagtaagtcttggttgatatggtgtttgcctccccagaaattaccagggttcatctacaaaagaagggagacaagaaagtgagatttggacagaggaaaagatgaaaaaatagattttatatgcctgctaggccagattaagggcaaaaagaaagggtttcattcaaaaatagaattcctaaatccaaaagttcaaaactttgagaggtacttggaaatctttagaatctcatgaatgagtggaaatgaatgattttaggtcaaaaaatcctcagtcaaagaattataagttataattgaatgttggtcaaagttacaggccttactatcatctattatacgatcagtcaagaacagataaatctgtggcaaggaatctaaaaaataatgcatacattcaataaaaattacataaagcgaagggataggtaacttactcgctgttcaaaattttttcgatctgctcagagggtagcatcaatggatttttcagcaaccttcttcaaagatttaagagaaaaatgtgaagaaaattcttactttgattctctgaaaataaaaatggctaaaagggttccttgaatgtttaaagcctcatttataggcacctaaaaaaggacaataattcatttaaaattcaaaatttgggttttcccccccaaaaagtgtacgttcaagtactcattacaaaggggagacgacactcatgctgcactcctcaatcgttagtgcgtaat

SEQ ID NO: 75804 - DNA, 679 bp, Cannabis sativa
taggagaccccatcattcaaaaagggagacagattcttactcacatcaggctagttgaaaatttgttagaatacatcctcaagatcattccgagcttaggaaacaggcgaaccagaaacattgtaaaaattgagagagaattgtgtaagctggcagagaatatgtacttcgattagattattgaacctaatgtaaagaattttatgttataataccaaattgttgttgagctaattttgagcatcaataaatatttttctaaaaaaatgcataaaacagaaccaaattgacataagagaaactaaaatgtgttctaaactatcttaataagttagtataaatctcatttatcatttactcttaatttttttatgcctaacaaaaaattcttgaaattgaacattatcatcactctccgtctcaacttttaaacttgacactttaactcattctaaaatttgatgtatgaatgtcaggttgatcttctattatcacattatggataataatacacgaattcattatgttatgtactgtatcaacacgacaatgaccacatatatatggggcacagattgtgcttcagttgaagggcaaaagttacagcatctgaaagcaaatatggggctctgttggagaaggcctaactgaaatatgatgtcaagaatggcatggcttt

SEQ ID NO: 75805 - DNA, 500 bp, Cannabis sativa
actgtagcgtgccttagcattagggcattacactttataagctcagcccctattctctcctattctagatacataaatttaaaattgagtatttaaatatagaacataagtataaatattaatattaattataattaataatatatactttattatatacaataataataatatactttacttgtatataataataataatattatatataataacaattataatatagttttatatatataatagttttatttcactattaaaaaacataatatagtatgtataatatagtaattagtagaaaaattataccaacctagattaaagtaattttttttcttgtagttccctagtaacgacgccaaaacttgttggtaccaaaagttgtatgttttatatttatcaactcacaagcacacgaatcattattatagtgtagagattatgaagaacaaggtcaaatccatgagaattgtgtgagatcaaaaaaaatacttatt

SEQ ID NO: 75806 - DNA, 543 bp, Cannabis sativa
aaaggggcgtgtaaaagggtggcagatggaagagatactagtatctggagggatccttggatccctcacttgaaaggtatcgttccgaaaccaaaagagggtgtggtgcaggataacaattatgttgttgatctcttgacacccaggggtgggtgggatatgggaaagcttcattgtctcttcgaccatgagaccatttcagctattctcaaggatggaattcctcgtagtagtggaaaggatagttggttatggactttggaaagtaatgggcacttctcttgcaaatcagcttatcttgcccaggctttggagagagcgccctattgtgatgtcgctccttctatgtggaataaactctggaataataaaattatggagcgccaaaaggttctttggtggtgcatcctctcaaatgcccttccggttagagcagtcattagcaagagatttccgattgatgattctaaatgtcctctctgtggagggggtgaggaagccatggagcatctcttttttacttgtgatgtggcgatgcacttg

SEQ ID NO: 75807 - DNA, 615 bp, Cannabis sativa
attttgaacatgccaaaatttaggaggcaaaaattctaattagcctttatgttaaatttctttttttttccttaaaaaaaatactaaaaagcaccactagcactctactaggtatcccatgttcactaattaatcatagaacactacctctaaaaattttgggaccactaatgcccaatatcaatgctcttaaaaaaaaaaagtaacatttgaatctacgactttgcttacaacctacctatgtacaaaaaggcgtcttgcattagttagcaatattccataaaagttaatacatcaaatatatgagactcaatatttaattgtaccactaataatatgacattttatatactaaaatatttgattgttacctaatattggttttgaaagactctataataaatttatttatactaaaaatatatttacataattatatactacaaaaataaaaaaaatatctcttacttttgaattttgttttaaaaaatattttaatattaacattaacctagactttcttatatacttaaattttttttattttttacatgtgataaaaatataatttaaaaatactataaattacttttattaaacgcatataaatttata

SEQ ID NO: 75808 - DNA, 722 bp, Cannabis sativa
ttttttaattattttagttttgtttgtcatgatttatttatttaatgtcaatttcactgctcttacttcatctcgttggaattaatggttttttttttctagatgttctcgggttgttgtggtgttctgtccataggtgaggaagatggaggttataaatacatttcttcttcgttcactttggctatttttgtgattttttttttattttggttctcccataaatacatttgacgagctcactgacaaaagagttttgaagtgtatggttcgtttatattgttctaagtggttatatttgttttattattctacatttgttttgtgttgttttagttttgttttagtagttttttattttattttttcaggattgggtttttaaatctagctgctattgcatctagtgttgaagctgtgtagaagattgttatttttttaattcttttgtccttttattttttctttgatttattttacttttgttttacagttattttgtcatgattatttatttgacgtcaatgttactgtttttgctcaatctcgtcggaattaataacgattttccggctgtcttggtgttgctgtggtagttctatttgtgggtgtggaagatggaggtctcgtattttttttcttggcgtttatattataaaaggaaaaaaaaaagaggagcacaatataaacggcagaaattctgccgtgtaacagtaaaatta

SEQ ID NO: 75809 - DNA, 723 bp, Cannabis sativa
cttgagcatcaacactaaacgcacattcgaaaccgatacaaacctgaagcttctcaaccatttccttcttggccaacgtttcacaaagaaataacacaatgggcttcttttggataacaatatccttaatgaattgaatggcccatgggttcccaagcccatggcaattccaagtaatgagactcataatgatgggtgggcttgggaaccaagacccacctttgacaagttttttggcccatcacccacatacacctcattctcaatcattgcaccatcataatcggccacatcagcattttcactaatattatcactttccatacgtctccttttagcatccaatataatcttggaaatatcttctccatcatcacccacattaatgctatcaactgatggcatgggatttactttccctattctttggccagtaataataccactttgattgcccacattgtttcctttttcagctccagcagagttggcgcgactgccatgaaatgtggagtcaacctccatgattttagccacagaatcagcttgctcatctgtcccaactcgtcgtccactgtccatctccgccgcctgctgttgctcagttccagaccgtagccatcgggttccaatcaggtggttccttcttctcatctgcgccttcatgccaatgccatacggtttaacgatttgatcaatatcatgatcaaaacgtttagcaca

SEQ ID NO: 75810 - DNA, 878 bp, Cannabis sativa
gaggctgttaagaattctgtttttgaatctattcttgactccctctgaatgtttccataaatggttttgtacttgtggtgtgttattgtgtggtaaatacgtcctcaagctcttggaaaatctatctcttactttcattttcttagattattctttgtgtgaagattaaggctttcaaaccttgttattcaaatttttaactaattttttaactgtaaattttatttaaattttattcaattagaccaattagaccttaacaatattaacaacattaaagggggaattatactccaaaaaaatacgaccagcatatgagcaagatgttctaggcataagattagcagaccgttgacaaaacataaagaaacatccttaaaagaagataaaagttatttacaatccttaatgataccaccaaaaggggatgataagacatctaaaaaattgcgcttcaactatgataacacttccttgattgccatggcttcagcaaactctagaagaacttgcccaatatgcagtcccgtaattccagtcacgacccgactcttgtgatcttgaacaacgccaccaaaaccataccttccctcctcgtcaaacaatgcaatatatattcaccttgagtttttcataacatggtttagaccatagcttagccctatctaaaagataccaaatatcaaacgcaggatacaaacatctttcttgagctattatccactcatcaagagtgatacgagctaatttgacaacgaactccactcgaatttatataccctttcagaagagttgattttgtgcgaaccaaattgcccaaaccaacatcattgcctgaacactttattcctcaaaaacgtaagaacaaatgaagaaat

SEQ ID NO: 75811 - DNA, 573 bp, Cannabis sativa
ttggtttagggaaattttttttttgattttctaagtatagaaaatcaaatttcccatttgttatgtgccaaatttgcatcactttttgacacatcattggagaacactttttgttaaatgaactataccacttatttacacttccattgaagacgctcttagataataatcaattggtaccttctattcatttttagaaacacattttgtactttaagtgtatttaatttaactttttatattttctcaaattactccattttaaaatattaactcattttcaattaattcaaatataaatcattaaaccaaaataaaaattaattcttaagaagtaaataatttaaattaatttaaatatataaaaatattaatatatcatttgtaatattgagaagttggttcaattttaatatttttaaactttacatgtattttcctttaatttttaaaactttaaatattttttataaaattaataattaatttgttcccttaaatttataaaattttaaaaatacacataaaaataaatactaaaaatataactaaatatacgtgcaatgcacgtaa

SEQ ID NO: 75812 - DNA, 1209 bp, Cannabis sativa
tcactgctcaaagagttcaattttcctacacctactgctgtaacttggtgtgacaacatgggagctagtgccttagcatcaaatcctgttttccatgctagaactaaacacattgaagttgacattcacttcattcgtgacaaagtcctaaacaaacaacttgagataaggtacattccatcctctcaccaaatagccgattgcctaaccaaaggattgtcaaactccagatttcaatttcttgtcaacaaacttggagtaacagagtcaccccagagtttgagaggggatgtaaagaaattaggaaatctgtcataatcaattctgttattctgtggtcctcattctctgccagttgtcatcattcagtgcattgctgattttgtggaattgtagcgtttgatttgtaatgattaggaaatcattgtatttagaatattccctttttctgttttgatttgctgccagctgtacagagcaatttctgctctttctttgtactcggcctatggccatgaactctatataaggaaatcaatatctcagcatttattgagctgagcaattcaatatcaatcttttttgaatttcaactgatattgttttgcatattgcaatcaggtcattattttgttatttttcgttgctttgtagttatctttttgttattttatagtttgtttcatattttttgttaaactgttttagagttattttttaaatttttttaaagcacagtatttttataattttgaaactttaacacagtatttttgaaaacatgatacaataaaaaaaaattaaaaagagtatgacagtaaaaatataaaaatgacaaaaaaattgaatatttttgtaagatctctttttttcgtattacacatacataaataaaaaatttataacctaataattcccacatcaacatcttcttctgtgaggggttcaagagcagtcgtctaagagtggttcggttcggctcaacgacgtcctccgtttcagatttttgttttcatttattaatttattgttattagtttaattccaattaatgtttttatagggttagaattataaggagttcatttcttaattaagtttaatgttgtgatcgcatttatgtgttgaaactaatttagtttttccattagtcttgtcttttgacatggttctttagtcttttccttttagtttttttctggttcgagt

SEQ ID NO: 75813 - DNA, 1215 bp, Cannabis sativa
cacataacacatatggaaatcataacaaaataaaaacaaccaaaaatataacaaaatttaaaactggaaaaataaaaaggaagaacataatagtctaaaggttaaccaaattaaaaaaaaatggaatgattaaaactaaaaacaacagatgtaaaaaataactttgaaaatctaaaccctaaaaaaataaaaacaatatacactaaacaaaaaattataactaaataaaagaatcaaagttgggggaaaactaaaaagaaactgaaaagaaacctccaacccatgatcctcttgaaccttctccttcttgttctcaaaggcaggggaaattttctaaggaacagaaactttagctttcttcttcgcaggtccacaatcccgtttcaatacaggaggagcaaagtcggagtcatcatcttctacaattgggcgatttcctttgaaccttttcctacagatttaacacctattttcgaattttttttgggaaatagtgaaggggaggatgaagaacgagtaatactcataattatatatagattcacaacaagaaaagaagagtacaaattgttatgaaaattggttaatggaagtttgaagataaaatagcagaaaattaggtaatgggaaaataggttttgatcgtggggagagacaaagttcagttatggatattttgtttttttttaaaaaaaaaattgaaacaaagttgaaaataaaaagtaaaaaagagagggaaagcgtggagtaattaataaaggtcaagtctatcacttgatgtgtttcaacacttgttctagatgtaatgtgtgtgcaagtggtgtaattataaataaaaaaaactcgaagagtacaaaaggaagtacacacgtattggagtatttatgtattaaaaattcttttttgtatctttggtataattataaataaaaaactcgaagagtacaaaaggaaatacacacgtatgggagtatttatgtatgaaaaattcttgaaaattttgtatttttggtgtaattacaatttcaattatttattttttgcttaattttcttattttttttttaatttttaatatgtttaaatatcacatatcctatatcaaacatatataattatcatttaaccattaattaacttcaaacaaaacgaataaaaaatctctaaacacaggtatttaatcatatacagcatacatatctctttcacttatat

SEQ ID NO: 75814 - DNA, 588 bp, Cannabis sativa
taataaaaactaattttattctgacaattagatttctaatagaaaattcagattttgcacaaaattctaccaaaatttgattttttttttttcaatgaaaaatgatctttgaatcaaaaaatatgacaaaaacaagtttggggcacaagggtatgcaatcattgcgcgcgcggaattgggcattggaccgagacaggaggttgcacgcaacctcaatgggcgagagaactcggcgtgacacaggcttcagacagctcgtgtctgagattcatcggacagggcttgtctaaagccgcgtgaatgccgagtaaagcccctcgtgcgcgcccaattgtgcaacctagtttcagatattttcatccaaattcaacaaatcataaataactcataaaaaatccaaattgagttctgtaaaagcctaaattcattaatgttttgcctactttccagtaaaaatatttccagaacgaaacaaaaaatatttttcaacatacattgagatttccctacaatcatcaaatttgcacataaaccatcatgaaaccatccaaatcaacaaaaacgttgttttaaatccatatttcatga

SEQ ID NO: 75815 - DNA, 622 bp, Cannabis sativa
  modified_base (40)..(51): a, c, t, g, unknown or other
cgcttgaattgctaaagactagcaataagctagttggggnnnnnnnnnnnngctcaagtttgtacattttaagtctttaattgtacacataaaattaatttaaatcgaatattttcatagttttaattgtaaaattattgtagttggaaatatttaatttaatttttatgttatttatttatttatttattttttttttttgtagatttgagcaaagtggtataaataaaaattatatcaagcccaacaaaataggcccaactcaaattctatatccatgcattactctctctccaatcaagatataataacttgttaatagcttcaagtcttcaacatcatccaagcggctacaatacaagattggcccatgattcaattcaattcaagaagaagcccatattaacaatacatcccacccactaactcaatttgttcaatgcacctcgccaccatccgaagctttttcatcacgcgcgagaaccacgatcaagactccatttccctggccagcatttcaagccactatcccattatctcatgcacgaataaattactttttggaacctaaagctctctataaatagaatttattggtattgtaaaagcatcagattttagt

SEQ ID NO: 75816 - DNA, 545 bp, Cannabis sativa
cgagccacgcaatcccaagccttattctcatctgggacgctaacctgcttccaagaggaatacttgggacacttataatcacaagtatactccttgtcagataaaagacccatcgatcttagattggcctcgttcaaaaggaagtcacatgacctaaggccataaggaagagtcatcagaagcctgtgccgactgaccatctcgggggtaggggtaggcctcgtaaagagagttgtaaaaacaaacataacattgatcagaaaactgaaagataaggatttatataactgagcaagagaaaaaaaatcacttacaaggctgcaaaaggtggttgtgccgatgggggaaagaccagatgtccagaacaagttgttttaaaaagacactttgtttggcaagtccacaatgattttaggctcgctacaatgagtaccgaggtagtagaagccccctaaaacattcttcctcgatggaacagccttaaccgagtacagatactcaatctctactggtgtggggcattcccagttcagaattttatacaa

SEQ ID NO: 75817 - DNA, 610 bp, Cannabis sativa
  modified_base (537)..(565): a, c, t, g, unknown or other
aatcacattttagtattttagtttcagcagagtaatatagttagacattgagaatgtcgggaatattcgaggatttagaaatgaccaatttacccctaggtgacagtgtaatttatggtgtatgtgggggcaaaatagtgttttgccgtggggtttcttttgtcatttagtgagctttatttagatgttataatcttattttagtaaaaagggattagataaaatttatttcatttatcctaattagaaaaattaagaaatcacataaatcaccttctctctctttggctttctctctctctctctctctcgaacccttaagaaggttgcaagagttctagtttttcagctttaattcagagctttctagctaaatttttagtgtgtcaactcaaggtaatgttggaaatattttaccaggatctagatttactagcaagtatgtttcattaacatcctaatatgaatttgtaaaacaatgaaataaacacatataaattttagattaccttacactgggtgcagcggaatataatnnnnnnnnnnnnnnnnnnnnnnnnnnnnngattcctttctgtagcagagcattatcaagatctgaagatcggaa

SEQ ID NO: 75818 - DNA, 579 bp, Cannabis sativa
  modified_base (50)..(62): a, c, t, g, unknown or other
aaatttctcttttattattctctatcggatcaaaatctaatagtttaatnnnnnnnnnnnnnatatttataattaaatttatttattatttaaatattctatatatataaataaataatcaaagtccttgtataaacatttggataaagttaaaagtccacaaacattatctgtttgctaacttttcaatattcatagttagctttcacagctttcttaccattattaaaatttaatagcagaagattgtagtgattttagtttatacgatgaatttttgtgagaaaagtcaaaatattttaagtccacaccgtaaggccgaaaagatatggtgcaggatagcaaatcattgaataatatgaaccacgaacttaacaaggattgattgtcatgtttggtccaacggtgagataatgtagaaattatggtgtttggttgaagtaatgaaatggaatggaaaggaaaggaaataatttccgttttatttttttgtttagttgtatattaaagtgttggaatgtaattctaaaggaatggtcatttcactattttggtggaatgacaatttcattttgaaat

SEQ ID NO: 75819 - DNA, 817 bp, Cannabis sativa
ataaagttttaattgtatacaaagttttaattgtatacaagcagtcctatagtaagagtatatactttacatcataataaccacaaaatctaaaatcaacggtaaaaaaaaaaagaactctaccggtagggaacttttactaagtcctactatagtattaccttatatatatgatatatataaatggggacttatttagtacctcacttgcatttgagatgttgcatacttcaaataagacaaaaacttatttactattgcaacaagtaacttttgttacttttatttagaaagaaattgatacttttttaattgtacaatgtttatatttaattttttttatttgatttgtttgtttagtggggcaaaattgtcaaaacacatatttgctgaatgtatcatgagtaacaaaaatgtattctctttgaagtttttttttttttttttgagaaaaacctgagattcattgataaaaccagaaagtacaaagttcaggtgaaattggaaggtaaagaaccattccaagaacattcactgtctagtcctaatccagccttagcaagaaaatgagccattgtgttatattctctcgggacatagagcacagacagattaggattgaacaacaatgaatttctaatggcattgacaacatcactaagaacagaattattacaataaaaactagaaattttatcaaccacactttggcaatctgaggcaatagtcaaaacaggaagctgaatcgcttgaatccactcaagagctgcaaggattgctttagcttctgcgacctccggggaaacgacaccagaac

SEQ ID NO: 75820 - DNA, 538 bp, Cannabis sativa
aatattcagaggagacaaatcccagactgctttggcccgtggacaagagaacaacgcatgagtaattgattcataagcagcattacaaatagtgcagtagggagaagttgctatatgccttcgatagagttcagcagctacaggaagagttgagtggaaaactttccacacaaagattcgcactttaggaggaatttttatcttccaaaaagtcgaccaccaatgctccattgaagagctactggcagtatcatcttgttcggcaagagaaactgctagttgatatccagattttacattgtaaatacctgtgaaagagtggctccaaatcaagacatcatcatggggaaatagactgagagggatggaaagtattcgatcaacatctacttggctgaaattggcttgcaaagataccaaatcccactgcctctgatcagaaattagatcagcaaccatcagatttgggtcagctcccttgaaaaaataaggcttaagtgttgtatttcctggtatccatgcatctgttgcacaattt

SEQ ID NO: 75821 - DNA, 593 bp, Cannabis sativa
tcacacatccctaatgcaaacaaggtaagtcttaagtcttcattaaccaaaggccgaataaaaacttctaggctaaatattattccaatttttgttaaacaaggacaaataatgatccaccaactaactaacacaactaccaataaagttgatgtgatctgtcaaaaagctttccaataaagttgaagagacaagagagtttataatgaaatatatatttttaaaatattaatattagatctaagtcatttttgtatatgtgttctatattgtatattatatatggttttagtatggtaatatttgtgtatttgggtggtgatatctaagatttgatttcggtcgtgagatttagattagatttataattttttttactctgcaactgtctaaaattgagggaaaagtgcttatctcaattgttctcacttttgccgtcgattttaaagggtcgataacattcattatcgacttttttctatcaatgtctattctactcaattttacatcgttgggtggtataggcttcgattttaaaaccaaacaacaatataatttaccaaactgggaaattcctttttttttttaatatt

SEQ ID NO: 75822 - DNA, 969 bp, Cannabis sativa
  modified_base (37)..(37): a, c, t, g, unknown or other
ttttcattttttcacttcaaaatattttttttttttntttttttgtatttttacggaaatttacgtagcaatctacatataacaattaacgaagcaatctaaattgcaattaaaatttatattgcaactcacataaaaactactagaacaaccaaagaaaaactcaaaccataaatttgaaaaaggaaaaaaaattaaaaaataatataaaaagtaattcttgtaatttataaagcaaaaatttgtaattcttctaattattaaataattattataaatcattgcaaaaaaacaaaaaaaaattattataaaaaaaataagacacaaaattcgtaccagtgtttttagtggtgtttggtgatttttaatgttgagaaaatgaaggtgaattaataaactgacaaaaaaaaaacacatggcatttataaactgataaacgtgagccatgacgatatatattcatattcatttaatcatatgataatgatatatgaaaatgagaacaagtaggatgaaaagaaaggaaccaaccatggattgctcaaaagatcaatgttcatataatgtgtttatattttcatggctaattagaattttctagttcaattttgacatgtattaaattatgtcttcagaatttttaaggtcgttaaaaatgttcttgaactattgatattgttggatttaaagacttttgtctaattttatttaaatttacaatttcagtaattatttatgtactaaaccatgctccccagactttaatatctatcaaatcatacctctcgaatcgaattttgacatgtactgaccactgaactttcgtgcatacatttttactaaaattagaaaaaaatccttaaatccaacaatctcaataattcaaagtcattcttaacaatcttaaaaattcaaaaaattctaattaacttattttaaaacatcaagatcacaaaacgacaaaaaaca

SEQ ID NO: 75823 - DNA, 969 bp, Cannabis sativa
  modified_base (54)..(55): a, c, t, g, unknown or other
  modified_base (137)..(141): a, c, t, g, unknown or other
aaatactgtatttttataaaatacaagtaaaacacaaagcagaacaactcaaannaacagtagaacaactaaaaaatatcagtagaatactaatgaaaatttaacacagtataatgcagtatgaaacttataaaaannnnnagtaaaaaagtaaaaaatattgcttggtagtatttttgtaaaaaaatgacaaaagttagtataccatctaaatttccctttgaaaaacttcattaataagggggaaagcatacctcttttaaagaaaagggaaaagcatacggaaatttacaccccatactgttttttttcttttttttttttactgtgacacggtaatgtttactttaatactatttttttttattgttattgtaactgtcatatatgtgttaacttgagcatctattaaacaaattttattattttttttaagtttaataaatacatgatgtgactttatattgtcactttttttcttttaaataaaattgtataatattttagagatcatataaatttgtgatttgattttgatagattttttttattttttttaaaaaaaattgatgataaaaaatttgataccataaatattaatacccttttattttactttactcttacttccctattattctctcttcctattcatcatcttctttttctttttttcactctttgcttcctcaagttctctctatctttctttaatatgtgttgtgggcattctctctgaaatggtcgagaacggggtaggagacctcatccttgatttaaagaaccttggaagtatctaaaagacaacatgaaagcttagaaaagagcaccaaccaccgaggtttacatatggcttggtgcgctaagctttgtttatccaattctgattttgtctggaccattcgtctagttttgcatagtgactgagagctataaagttagaaaaattaaattcacaacttcatattt

SEQ ID NO: 75824 - DNA, 796 bp, Cannabis sativa
actccctagagcagctatggtttgatcttgttcttcaaaaactcagaggtctttaacaagtttctagtgattcaatccaaggtataactttccttgaccctcctttgtgtttattgtatgtttttagttgaaatcaagcatgtttttcttaggattgggtactgtagttgctgttgatgtttgttgttgttttatggagttaagttatggttaattatgttgaattaagctggttgtgatggctgtggtaaggtttgatctagcttttgagtttaagaactcaagcttggctctttaatggtgactcttgattctgagcttgtttagttattttatttgcttggaatatgtttattggggtatattaagcaggtctggaaggtttggtttgatttgggtacgaattggtcaagtttcaaaattgtttgggttacctggtgtaaaatcgattaaccggttttacaggcccctgctaactaaattagaaactggtttcttgaactttttgtgttgtcgattcgggttagtttcagagctttggttggttaattccttgatagtttagggtattgccatgtaactttcagtaggaaaacttttggtttaaaacttaggtccctgggaagtgatttagcgtgtcactcacctgtgttacgaataatgtgaattagaggcctgtaattcaccgagtagctgttccactcaggctggtcggcacacctgaatttgaaaacaaggtaagattattgtaatgccctaaataattaggcccgtttcccaataaacttatgaaacc

SEQ ID NO: 75825 - DNA, 785 bp, Cannabis sativa
  modified_base (120)..(130): a, c, t, g, unknown or other
cactctacctcttgcattatattcctgacacttaaagtgcattttgaatgcgagaaaatgggtatcccttttagagaggtgtctctttcatagttataccattctctctctctctctctnnnnnnnnnnntctctctctctctctatttttctctctctctctctctctctcactacattacttcactaactttgataattttaattgacaagtatagtgggtgagttgaccaggcgtatgaagagtgatgaatgtcatttataaaatgaaaacatttcattggtaatgcaagtatgctatcgcccgaatacatgtgcttcgttcaaaggcctatataggttccctctttaatgtagagcattgtgctaaaggcaaacttgttgttgctaagatcaccttcccgtagagtggaactttacattgaggtatatcttggaccttttctttttgtgggatgtagagcggaaaattcatttgaatgcatgtaatgcccgtacttttataaaaatatcaattttatttacaagtgttaaacacggaaaatcatcatttttatttaatacttaaaaatgttcataactggccaattttcgtacaaaagacataataaataataactaaaataattgcgacataaatttaatagcataaataaataacagagcgccctagactgcctgcagttatatggccctcaacgagttcacacacagaagcgtctaaagttccactcaccaccgactttctagactttcagttgccttggtatgcacaaggtaatttg

SEQ ID NO: 75826 - DNA, 976 bp, Cannabis sativa
  modified_base (45)..(46): a, c, t, g, unknown or other
  modified_base (261)..(273): a, c, t, g, unknown or other
  modified_base (370)..(374): a, c, t, g, unknown or other
gtagaaagtttgcatgtaattgaggtttatatatctgagaagacnntaaattaccttagtaaacctgctactgcatagaaatttatagtaggaagccctagtttttgttaacagttaattttcttatcagtttaattgcttcttctttcactgtttttattattttttagttttaatattttcttaaattttatttaaccaaatagaagtaagagtttaattttaacgtacttaagtacaatcctcgtgggatcgacctcnnnnnnnnnnnnnttactacttgtcacgatacgtgcacttgtgtgtgcaaaatatcacaacaagtttttagcgccgttgccggggattgttagttaatattattaaaaannnnnttttgttctaatttggtttttcttctcaattttagtactaatttgttgtttcaaatttttttagtactaatttagttttatttttttttattctagtaatattttactgatgagtttgacctgtaagataaatctaaatactataccttgaggattttgtccaacaacacaatgagccattctattctgcttggaggagatttaagagtttggagagagatgttatcccaccttctcaagtgggtgttttacttggctcttctataacagacttaatgatgaaaccaggagcttggttgatcatggagcagaggtcactggaacgcctctattaatgagagggtatgatgtaataaatttgttgtataatatgtcaaattttgattacgactggcattgggatccatcactttagggttggagtcaccaatacccaccttatttcccaaactcaccccacccaactgaaaaagaggagcaactactagcacttctaatatcacttcgaggagagatcaatcgcttaactgacatggtgagatccttatgagataattcaatggctcatgattcagaatgtaataactccaatgatgaaagtt

SEQ ID NO: 75827 - DNA, 751 bp, Cannabis sativa
  modified_base (370)..(391): a, c, t, g, unknown or other
catattgatcatatatatgtatatgagcaaaagcaacctaggaaaatccaaacagatcccatgattttttttaaagaataaaaaattattactagctatataattcctaccaactccaatattaatgaccaaaagaagcaacttatttaactataaatataatctaaaattaaatgagagaaatttatatatctttataataagtaatttgtgccgtaaatacttaaatttaactctcagttatagacaaatatttaagtttaatttttaaagataataatacttaagttataagtctctttaaactttcgtaagtatatatgtacaagtgtcaagtcctaatccacgtgtcattttttattagtatatnnnnnnnnnnnnnnnnnnnnnnaataaaaatttaataacttaaaccaattaaagattgtcacgtaattattgacttgacaattaacaatcacgtatatctacagatattatataaatataatttaagtattattatcgtcaaaaaacaaactcaaatatttataatatgcaaggagttattaaatttaatatttacgtgattaattactcttatatcaatatatatatataaatatatttcataaaaaaacaagaaaagaaaattcatgatatataggttaacctatggtataaatgagtagtctttggtatttttaagacactatcattatgaacccacaatgatatatgatcatatagtttttacttgtatagaaagcaa

SEQ ID NO: 75828 - DNA, 834 bp, Cannabis sativa
ttatattaaaataatattgtgcatgtatacacatacaattaatcaatataaaacatgatagtatataaacaatatgtataaggttcataaacatacattaagctcacgacgcttataaacttaaattttttactaattgtgtttctatttacttgaatagttattatttctcttttagtccaataatatataatgaaacaaattacagatagttgatacatcactcattaaaataaacaatattaactgctttcaaaaaataaacaatattaactgttaattaagcaatgaccggtctctctggtttttgttaataataagctttttttttttgaatatataattaaaaataaacaggaaaaacattcgagagtatagatccaagaaatggagaggtcctagcaaatgttgcagagggagagaaggaagacattgatttggctgtgaaagccgcccgtgttgcttttgaccatggtccttggcctcgtttgtctggttctgtatgtactatatatatatataatatatatatacctaacttaatttttttttttcacaaccattagtgtgttcattctgttacattctctcttcatttattaaattcatgattactgaaaaattcatgatatttgcacaattatttaattaattgaataggaatagttaattagggggattactcatatatcattttttttaattgtttttagaaaatttatgatggggttacggaattttttatgtgggttgttatatggattttggttgcgatttatgttattcgtttttcgctatttgagttgctgcgtgaatttttgtaaaaatacaaaa

SEQ ID NO: 75829 - DNA, 1098 bp, Cannabis sativa
aaaatataatatttagatacacataataataatctcacctaataattaataatattttttctttaatttttaattgtatcactttcatataatatagaaaaaaactggcataaatttagattacgtgcctcgcacgtagtattttactagtatatatatatacatatttcttaatttttgtatgcattataaatccattccatcatatttatgttagaatattttatatggacttatataattaagcgttgctcacacaaaatccataaaaataattgtacatttatatgcatggtatggtgcttattatataattaagaccataatgggacggtcagatatattaatgacatttaagatacacggtagcaccctaataactacggattgacccattaaattatagtccacaactattagtattatgaactaaaaacatgtccattttaccctttaggatattaggcaggcatataatgagaaattttgagtgtgattgcactactacaaaagtcagaattcacgacggtcttaaaaatgctttttgagggaccgtcgctaaaagaattaagtaactgtttaaaaccgtcgggaaaaattagtattcctaatggtttataacagtaattacagaaataggggacgattttaattgaaattcgtaaatttattgggcccttatacttataggcgacggttttaaactgtcgggtataagggcccaaaaaaaatcgttacctacttctcgccacatttctcacgtgcccacctacttcttttctatttcccacatgcccacctatttcttctccattttccacaccctaaattgaaaatcttaactctccaaaaccccactcacgcctccgcaccatcgccctcctctctcgtcgtcttcctccctctttcgatcttcctttcttctcgtctatcgatctccacccaccctcctcacatcggtttccctctcctctctgtcgtatacgttggaccaccaccacctcccgttggtgtccctctcatctccgtctcatacgtcggacaccacctcccgtccgtctccctctctctctttctctctctccgagctcggtataa

SEQ ID NO: 75830 - DNA, 999 bp, Cannabis sativa
  modified_base (846)..(847): a, c, t, g, unknown or other
ctgctcgtttttttatttccttcacgtacctcttttgggcattgttgctctctcttgcaatatgcggccctcctgagataaccagaatatcctctccttcaaccaaggaggttgtaatccctggttgcttgggttattgggcagattgggctggttatgtccattgccatgtctcctcacatattacttgaagtggcctcgcgcaatgagactttctatctcatctttaaactgacgacgctcgtctgttgtgtgcccaatgtctttatgaaacttgcagtatctggtcggatctcttttatgcctcgcgtgcctcatgggctcatgtttactgaaggcaaccttgtgctcatgcgcgaggtaaatatattcctgagtttcattaagctcagtataaatagtataaattggcacgtacttgtcgtgcttcttttgtttcttcttgtctttgtatgaccccttagagtcatctttcctctttgagctagaggcccctgagttatcagctttagtcgagacagtacatgttaaaacagtgctgggtttgcctcccgagctagtttttaacaagttcatctcttttcaagcttcttcctttcgaacaaacacctgagccctctcgttgaactcggtgatgttcttcactggacgaccctgtaagtcgtcccacaatttacccccagtggtggagagatcagtagtgatccctgcctgaagggcagtaagttgcgtactatcatccaaatttcttactcttgcagcacccgtgctaaaatgacttaagtaagccttaaacatctcgctaggctgttactttatgttggtgagtgaggacgctttgggtcnnctatcccttgcggcctggaactgctttttgaagtccttggaaaactgttcccaagaagtaatggaatgatgagtaaatttattgaaccagctgcttgctgctccaacttgtgaggtgggaaacaaaatacaacgtaaattgtttgtaacatt

SEQ ID NO: 75831 - DNA, 1045 bp, Cannabis sativa
ggtaaaataaattccaacatatgtaacctttgttaaaaaaatttatcaatgtttacagatctgagcttgaatttgggcatttgggtttgtggtctatgttctattattgggtttgagtttttaattgtgggtttgtgggtttggctcgggtatggtcttaattgacatttgttcttcacctttttcattcaagggttttagttttggggtttcgctttaaatttggttgttgcatttgtaattttatttgtaatatattttgatttaggattctgtataaagtttttgttcttgacaagttctgggtttgttttagggtattaaacaaattttgtattgttgatgaacagttgaagatttgggtttcttttattcttttttgttttgtttgttcaaaatctaagtttgctttaggtggtgtgatgattcacttttgatcttagttttgtttcaaaatctaatttaatttatgttggaatttctttttaattcaaagtgaaaagaatggaaaaagaaataaaagaaaaattcatttccaaaaaaaaaaaaagaaagaaaaaaattaattgtttaggtttagaataattttttaggttttagattatatttttatttttatttcttatacattttaaatatattattttgattttaaaatgaattttaaaatgaaaaataaaattttttgatgtggactaataaaagggtgataggtggacatttaccttgaagaaaaccaaaggtacctacgaaagttctaggagtgtgacggaaggtatttttaccgccaaaaatacaagttaggtacacatctgctactcggcataaaacttagatattttttccgcaaattactcagttgtaaatgtaatatattgctttattaaaaaatatttgtaaaaatttaattttaatggtgatataagatgtgtgttaactttggtgctaaaaattacgttaaatttggttcaaaagatagcatgaattaagttttagttacattacgtttgtaacaataatattttataaagtattaaacttaaaa

SEQ ID NO: 75832 - DNA, 828 bp, Cannabis sativa
tttttacactatataaaaaatatgtttacatgtaaaatatttaagtcgaattcaactttttttatcacttttttgtcatttttttttattattattatttttttcagttgatggcccaatttcagcccatataatgtaaaagtaagaaatttttctaattaaataaaagaattaatcataaaaacttaaaattttctaatatccattaagagtgcacccatatatacaatagagtaattttggtatatatatatatatgtgggtacatataagaatatataaattgatataaacggatagagtttggtgtggtagtttcgagtgagaaaggtaaatgttagttgttgggtgttttggtttaattaaggtatattatttcgtatatgttaattattagctcttttattttatttattcctatttatgtgtttttatttttttactagttagttactattcctaatcatatgttattactaactagttactcatcagttattagttagtaataaattactaacttaactagttagtacaaagtactcaaaaattatataacttgtaagtagttaaataatcaaaatattaattttatactatttatttatgttgtgaggtcaatttgcaaggatctggcctacttgacgttgatcagtttctagctagttcgaggtatacatttattaacttttattattaattaatgatgaatacttagaagagttcgaatatcttaaatatttatctgcgatatattgtactgcggtcggatgagtggaatagtatgcatgttagatgagtttaaatatcttaaatattcatccatag

SEQ ID NO: 75833 - DNA, 983 bp, Cannabis sativa
tgtactaccgaattcagggctttgaatatagaaagtatggggagagaagaaaggattgattgaatgagagtcaatattccccctctcgacaagaaggcacttttccatccgtcaagtctcttaccgcatttatctagaattggtgtctagaactccaccttcctaggggatccccccaaaggtattccgagatacttcatcggccaactgccgacttcacacccgatagaagaagtgcacctctccaccatactctcagctaagcatatccccaatatttgactcttgctccttttaaccctgatattgcagaaaaggcctcaaccaacataattattctatggagagaaatctcgtcattcataaagaatagtatatcatctacaaattgtaaatggctaacctggatctactcccttccaattatgaatccacataattgcccagatttcactgctttgtcaaccattcttcctaacacatccgccaataaaataaatagaaaaggtgaaagaagatcgccttgtctaagtcctctagaccctttaaacttaccgatcgatttatggagtatgatgtagatgaaatacatccccctaatctacttcctcaaagtgccaccgaaatccttatactccaaaactagctcccaaaattctcattccaccctatcataggccttttcaaaatcaatcttgaataccaactcctctttacccctgcttctatactccacaaaatcattaatgatcaaaattgaatcctgtctcccttcgacaaatgcagcttgagtctccaatatagtgtcctccaacacacaagtctagaggtcagaactttggcaataatcttgtaaacactcataatgaaaccaatcggcctataatccttgaccttgcaactatcgacctttatagggatcagacagatgaatttttcattgatactgcttggtattctcccatctctttcaaatttcttga

SEQ ID NO: 75834 - DNA, 1093 bp, Cannabis sativa
ttagaaggaagtcgcacgatctaaggccgtggggaagagttagtaagagcctgtgccgattgaccatctcaggagtacggatgggtcttttcaagagggttgtaaaaaacaaaaaattagtcagaaaacttagaatgaaaatacaaggattaatccaactgagcctgatgaaaacaatcacttatgaattttgcagaaggtggttgtgccaattggggagaggccagctatccaaaagaagttatctttgaaagatatcttatttggcaagtctacaataattttaggctcactagagtgagtaccaagataaaagaagccccctacggcattcttccttgctggaacagccttgacagagtagagatactcgatttccacaggcgtagggcactcccacttaagaattttatacaaaaccattaaactggcaagaattctataagagatggggtttagttggaatggggaaagcccgaggtggtttatgtaatccttgaaatagtcacgggggaaattctggcccctgtactgatttgttcaagactccaggcacctatgccagtcaagccactgatactggtctcaccactggctccctcagaggtctcacctgtaagatgcgcaggggggtaacaactaaattcaccagctcgcactgacctaacttggcatactcgcccaagttcgattccacaggtcctcagtatatcacctgtgtagcctgagatagttcgcaccttcgattctattaactcgccctcaaaggtgacgctaggatcctggggtgtcttctttgatgtacgtggcttgggagacattatttcaaagtccaagtcacctggttcaaaagcaatcgtgactttgggtaaaatcaaaggcttagccaaaggaataaaggacatacttggaggttctggccaagctacatctcgcaagaaatggcgtttgccttcgattatttcttgcaagaagcgcgtgtggcgactagcattatcttcctgataggctctcactaaatgttccctaaccctcgcatcgtttaactctaattttgatgtggtttttgaaggttgggtttataagggacgac

SEQ ID NO: 75835 - DNA, 866 bp, Cannabis sativa
tataatatattaaattattattataatttttataatatataaaatctgaattaaaagaattatatattattattattttttttgaaaaaaaaaaaactaatataatgacctttttgtggatcactaaatctataaaataataataaaaaattaaaaaataacaaaaaaagataaagtgacgctttttgtgtgctgttgttacttagtacgtgagtgtgttagaattttggaataagatgaatgaggttccatctcaaaatcaattgccaatgggagaagtaactcatttttcttatatattctattatctttccacacattagcaatgtaggactctctaacagagtgtaaaagagtttagtgatatgcatgaagggtcactaaaaactgtttttctaatcatcctcattagtgacgtgcaatgaagtgtcattatagagttataaagtcacttaacataggtcactaaaacttgtttttctagtagtgcttgcacaattatcacaattcttttttacagaattgctagattcaagttcttcacataataaaatcctctctaaaaatttgaaaaataattaaaaaataataaacaagagagatgatcagaaaccaatgacataagaatgtatatatacaccctagagacattttagatagtagaaaagagaaaggaaacaatcaaatagtaagtgtaaaatattccttaaaatgattgttcagaacatgttctaataaatagtaaattggttaaagtaaatttaatgaacctaaatattttttaaacaaagttttttaaaaataaataaagaaagaaaatttccatttactacaacaatattcacacagttctagacagtacaaga

SEQ ID NO: 75836 - DNA, 616 bp, Cannabis sativa
ttattatgaaaacatgtgataaggcaatgattgaacaaatctcaatgcaatattcattcattctaaggaagaagttgaaggccatctgggtgacctcttgttacattacattgaagtgttaaaataaaaaaaaaaaaacaaaaagaaacttaaactagtggagctgccttgcgggccgcctccttaattcttaataattcaaacaactaaaggatacttccaaatcaccttttcaataatagtaattcttcaagtgtgatgtgttccatgcccttggtattactatatcatccatgcaagccaattcataggttcctagcaggatgaccttggcaagataggggacttcccagttggctcccaacactcctgcccccaggtccttagtgtttggtaggactttccttagcaccaagtcttcggtcctgaaggcgtgcatgcaaactcttgaattatagtatcacgccaccctttgttgattattgccaacctcatttaggtcgcatctcttatttcctccaagagatctaaactttctgccattgctttttcatttgttacttcattgaaattcttcattcaaaatgagttaagtttcatctcaatggggagtaca

SEQ ID NO: 75837 - DNA, 565 bp, Cannabis sativa
tataacacaatatttttataaaaaattgtatcttagtatttttataaattttttcccattttaaagtgtatttgtaagttctccaattcattgatttttactaaactttatattctttaatttatttaccatattactattatttaaacaataaaaaatataaaaaaaatatatatttttttaataaaacatcaaaaatgactaatcattattttacttactttacatattgtgcatttgaacactattataaataatagactaaatatagtacaaactcatttttgtaccaaattaagctcataacttaacagaatgttagtcaacttagttggctcaagatattagtaacagaaaactttctattgtgatttggatgagatacaccatagatagttttataattattttgtattttacatatataaatgagtaatgatagtctactaatctctttttctacaagacaaaataaaaataaataaactaataaaattaaaaggcaaacaagttttctagtgtcctgacaaaaaaaaaaaagttcctactatcatagttcttgtac

SEQ ID NO: 75838 - DNA, 610 bp, Cannabis sativa
cgatctaacagaattacattctgcttctgcaagtgtatacagttttatattttcgtatatattattgacatttgcaaaaattcaattcttgaataatcaaaatcgaaataagaaaaatatttgacacttcctcctattttttcgatttccatgaataataaagaagaaataaaagctttaattttatttttttttattaataataaaagctttaatttgtagtagtgtacttatcacatcaggtgttttttttaaaataataataataataataataataataatttacccttggatatccatttattttactttttttaaaaaacaaaaaaaaaaaagaaaaaccttattagcaatttttttttttaaaagaaaaagctatttaagttatttcacttgaaaaaagtatctaatatttaataataaaaaaaatatatatatctccataaacaaaggaaataaaaaactatcttcatcacacagattgaatggtttattattcagaaataagtgcaattttaaaaataaaaaaaaataagagattaccataattataatacttattatttttttttcttatttctcataacagaaagaccttataaatagt

SEQ ID NO: 75839 - DNA, 719 bp, Cannabis sativa
tggaattttccagtggggtttgaggactcagatgtcgagggaagtgatgattgcttgttagctttagaagaagtggaaaccccatcatccccatattcaacagaatgatgactttgagccatgaaagccactacttgtttatcctcatcaaaacttttgcttgcaacataatctttttcttcgtcactatcgctccaggtggcaacaaaggcattcttctttttgagagtgttgtcacactcagcctgaatgtgtccaaagccatcatattctctacattatatgctcatgctcttattgtcattgagttgctgaccatgcttgaagttccccgcaagatttctattgggaacattttctttacccctagaaaaaatcttcttctacttctttttcaataattttgcatagttcttggttaggagatctatagtttcatctgagaaaccagcaaacacatatgggacaaacttcttttattccttgtgaatgaatgcaagattgttgtcccctttttctttgttcacacccttctgctttttttctttcttccacattattaatgaaatttcataattctacaaggatccaatcagttcatcaagatctagttcctcggtgtttttcatttcttcaatggaggttactttagacataaatctcctaggtagaactccaagaactttacgaaccaacattgcatttgaataagtctctcc

SEQ ID NO: 75840 - DNA, 807 bp, Cannabis sativa
tttcatgtcttgagccatcgatgtaaattaagactatattactcaaactaaaattctttatggaccttctagaagaaggctttggaattttctagaggcacaacttaccggaactactgttttgcaggtgttactttatttggtgggcctagggcaagttacttgctgaacattcccgaggcacgttcatttcatcacgagtacagttcactggcttgcactattgagtttgtggatgatgtctacacagccattgatcacatacataagcatggaaggcatgtctgcatttgcttttagaaagcatgttatcttcttgaattccttttaattatgtgatttttatagaaaacagatctttaatattccaaattcactactttcaacagtgcacatactgattgcatagttacggaagattcaaaagttgcggaagtttttctacaccaagttgacaggtgatactatgcaaaagcttatcttattccacaatagataccattagcttgatagttgtctatgattgagaagagttgtttattatgttatgttagtgatgaatcgacgtggtaacactatggtatttggttctatatctctgggaactaatgaatttggcttgttataaacaatgcagtgctgctgttttccacaatgcaagcacaagattttgtgatggctcacgatttggactgggcgcagaggtatcatattgtgtgacagttacacaaaagttaagaatttttctcatggtggctttgtatttgattccctacaatttctgtgcaggttggaataagcacaagt

SEQ ID NO: 75841 - DNA, 653 bp, Cannabis sativa
aattaaaaattaataaattttttaattattaatatcattttattttttaaaataaatatattatcataatatgtataaagttttatatatttaatacacctcaatttattattactttaggtgtttttttttatctctaaaaaaatattatttacgtgaactaataagattgtgtcacgtgtacattatgtatatgtagataatttaaaatgatagttaacaactaaaattagatgaaaatagtaaattgccaatagaatacgagttttaaaatatttgcagtcaaaattatatatatatatatataactaaaaaaataaaaaataaataaaaaatgatgtcaaggaaaaaatgaattgttctattaagatattatttagccatgtcatctttttttttttttttttgtatctactcaataatacctattaaaaataattcacaaatatatatatatatatataaatttatatcactacggcttatgctaatcttcactatggaaatgactaaatatcaatatttaagtctgaacaaaataactcttatatgtgaaaattacatgaaatatgaaatatgagatttcataaaattattacaaaaatatgatatttataggtttgccactcttctatggccttttttcacattta

SEQ ID NO: 75842 - DNA, 722 bp, Cannabis sativa
aaatttcgtcccgaaattctactcgattctctcgattctttttttttttttttttgaaagcgaagattcaatgtcttatacctcaggacttgtcatcactctgtcctgcttgtggtgcttgtggtggttcattgatccctccattctcttggcctctatctcggccttggacttggcctcgaccccgacctcgacccaatctgactgaccttctaggaggcatattcaaactcctaaaccacacaaacctaaaaatatcaagaaggaacatttcgaacatcacctatagatgagaagaatatcacaacactacatgcacaatttaaagacaacttaatcgtaagtaataaccacttacagtacagtgagtcgcgctcgtctcgtggcaatgaactttacatgttagggctaaccacattatttaggaccgtattgctctgagaccatattgtaacgccctgatttcccgggacgtcacacttactagtccgtttaaaaccatttaaaataaagacaataaaagacttctttaataaaaataattaagcatgagatctcattatttttaaaacagaacatttatttattcacaacctttaaaatataaagctttacaaaattatttgaatcataatctgtaacgaaattttttttaaacgaaaacatcgtgacaatcccctaacatgtaatccacgcctcgagctcgccatcctcactgttta

SEQ ID NO: 75843 - DNA, 815 bp, Cannabis sativa
gacaaaaaaataatttctatgtcaattttttatttggttacatattaaaatattagaatataattctaattgaatagtctttttacgattttgatagaataattatttcattttaaaataataacaaaaaccattacaatcatgataagaaaaaatttaagtattttttttatacattctaaatttttttttcattttattcttattcttatatttttattccctctaactaaatgccactaaattagctagaacgacaaatataatatttgaacggaaattattcaaacattttaaaaatttgtatattatagctataatacacattagtatatgttacaaaaaaaattaagttatgaataatctactataaattataattattgttattttcattttcattgtttaaaaagagtgagcatgtaaaatttataggttttttcatttttatattttaaaataattttttttaatattgttacggaattctacgtagaaacggtcataacaattaatggatcaacctaaatcgtaacgaaaatccacattgtaacctacatagaaattactggaaacctaaaccgtaaattaaaaaaaaaattaaaaataggttaatttctctaaaaattaagtatgaaatttttttattagatattaacgaaaaagaaagtagtgatgtctattgaaatatcggtactataaagattatataaatatcacaaatatttttgatatcaatggacatttataaattataaaaaaataatgattaaacttatattttagggaaaaaaacaaaaaaatacaaaaaagga

SEQ ID NO: 75844 - DNA, 617 bp, Cannabis sativa
tatatatatatataagctatttgatatcatttcaaaaaaaaaaaaaaaaaaaaataactaaaaattctatttggttggtataaaagtttagcatacaatttaaacaaatataatactttttttttttgaatgaaaacaaatataatacttagttacatacagataatcaatttacaatcatttgaaaagaaaataaaaaaggatttactccattaaaaaaaagatttactattgaaaattaaattatatctaataacaatttagtgaatgtatatcatctaagattctgtgtcttattcttattttattttgagattattttaaaataaacaaaaaataataaaagattacaaaaatacgattatatgaaattttaaatattttttatattttttacgagtttatatacagaaaatatggtctttttatttttatattgtatttttgttaattttttttattgttgttttgagattatttggatgttattttaatgtaattttttttattatattcatgttattttcattaaacgctataaatatatatataaaaaatctttaagcctaaaagtgtaaattttttacaaaaatatagtattttatgtaattattctt

SEQ ID NO: 75845 - DNA, 613 bp, Cannabis sativa
gaattcccttcattggggacactcaaagaaaacaaatttcccaacctggaatttaatatctatatgctttggatcagcgtagctcttctgtctactctgtgaggcaaacatacgagctcaaatcttctcaatggcctcactcgttctttggactgcctcaagtccaagatacctcagttctccggcttcatcccaatgaatgggtgaacgacactttcttccataaagaatttcatacagtgccatgccaatagtactctgataactattgctatacgaaaacttgatcagagggagatatttgttcgaagaacccttaaaatccaatacacacgtccggagcatatccttaagtatctgaatagtcctctcagactgaccatcaatatgaggatgaaaagttgtactgaattttaacttggtaccctttgttctcggtagactctcccagaacttggatgtaaactttggatctcgatctgagacaattgactttggagcaccatgcagtcaaactatttctttgacatatagatcaacatattggtccaccatgtacgtagtctgcaatggtaaaaagtgtgctaattttgtatatctatccacaattacc

SEQ ID NO: 75846 - DNA, 509 bp, Cannabis sativa
atgatttgtgttaaagtaataatttatatttcattgtcttaatattattagttgtgttgggagttttttttttttaaaaaaaaaaatatagaaaagtgaactaagagactatagctataacatttataataaatttatataaagaaaaacaattacgaagaggtgatagcatatgtatatatatttgtgttaaagtataaaaagaaaatgaaatgctatacattataatagagaaatatatatttataaaattcaacaaacaaaatagatagtcacgagaaaataaatactaggagaagtaaatataatcttcttctctatgaggtgcccggattgggtctgttgcagttatagcattttaactacttttttgggtttttaactgttttttcaaacttttttccccctttttttttttttctctgctatcagttttcctatagttttcctttaactgctgcttctggtcctggtttcttctgtaattttcgtgatggatcctctcttgc

SEQ ID NO: 75847 - DNA, 1028 bp, Cannabis sativa
aaaacactcaaccaatcaaaaattctttttaggacccaccttttaattttcaataagtgttttcaaattctaaaccaattaattagtgattaataatattttttgaaaaaaaaatacaaaattaagcgtatgtttgacatcataactaaaaaatatatatatttttttaaaaaaataattaagtgtgtttggcattgttttttttaaaatagtttttagaaaataaagttacaaaaaataaaaatttagagtaaaacgaaatgttgttttctgttttaaaatataattcattttttgtcaatattttttctccactttatctcacatcattatacacattattttttcatattattttctctctcatcttttctcattcatcatttcctcacactattttctctttcattgctttctctctcatcattttctcacactttctctctcattattttctcacatgattttctctctcatcactttatctctcttcattttctcacattattttatatttccttattttctctctcatcactttctctcctctcattttggttcgggtcgggttgggctgaggtctagggtcgaggcctataggccggggttcgagtctgagccagggtctggggccacgtcgaggtcgggtccgaggactgggtttcggtccaggatctagattcgggtctagggtttggatccagatctagatctggattccaagtaaatattagccaaacatgacttgtgttttgaaaatcttaaaaaaaaaaaaaattattcttatttctaaaatcatttttttttaaaaaaaaaataaacagaaaaaatgctaaaatgctaagtcaagtctttggtaaacacttgacttattgcatttacctaggggtgttcatctaatccaatccgtactattttactcatagcgcatctgatccgcactaagtgtagattttattttctggatccaatccaatccgcacaatagctcaaatccaatccaatccgtaaaagtacagattggatca

SEQ ID NO: 75848 - DNA, 659 bp, Cannabis sativa
caatgaaaaccagcagagatattctagataactctaatttctggcggctcttatggcagttacagctccctccaaaagttctcaactttctatggagagcttctaccaacagtcttccaactcggtttcatctttctacaaaacatattccaattgctgcaacatgtccattttgtcttgctgctcctgagacgactctgcatgttctggtgcggtgctcttttggtcaaagttgctggagcaaggttccaattactgttgtggcgcctgatgtgatgttgttctcgagttggtttgacatcgtggaacacggctgaggctcttgaggctggtatgatttgttggtcagtttggactcgtcataatgatttggtttggaactccaaacaccctgatgcgggtgaggttgtgactatggaaaaattaaattatgttgaatggttcaatgctcaaaaacataatgtcacggatgcaagtttaaactggccgactgcactacccgtagagcaatggacaacacctgatttcccttttgtcaaagttaatgtcgatggtgcactattctctatccaagggcgatatggcctgggtttgattgtaaggtctgttgcgggaatggtcttggaggccataattttatctagagaaggctctttgca

SEQ ID NO: 75849 - DNA, 853 bp, Cannabis sativa
tgcaaattaactataaaagtcaatactactattaatttcactaaaaatatataaaataattaattttgtttatattattttaatatctgaatattagaaaaaattcgttaaggaatagtaagaggtaattaaaaaatatggtatttattatgggctaaaattttgtctaaactatcttttttgctaaatttagcacacattttacttaccattggagttaagttaaaactaaatattgtaaaaaatagcaatacaatttatagctctccattagagatgttctaaaaccatcccaaatggaagatgtaaaaattgtgctatatttggcacaaaaatagctctgtggtagatttacatcaaatttttgcattgtgttctaatgcacaattacaaaactttgatttaaaatttaatatataattaatgtttttattaaaaaaaaataaataaaaactaataactttattactataaaaatatttacttttagtcacaacaaaacttgtgactaaaaataaaaaacttgtaactaattattaaccattattcatatgctgtgactaaaaagtccgtgactaaaaatattagtcacaaaaattacaatttggtgagactaaatgcgttgttagtacttcttgtgattaaaattaaattagtgataacttgtacctatatactatggtttagttacagggtttagggtttagggtctagggtccgcctagtaaatattaagacattaaatccacgtgtgtcattttcttattggtatatttgaactaattttttttaaaataataaaaatttaatgacttggaccaattagggagtgtcacgtggcaatttatttaac

SEQ ID NO: 75850 - DNA, 657 bp, Cannabis sativa
gaccaggtgaagttggaacctgatcttttcatcggccttacatctgcttgggcataccaggctgtagagtcagcaacctctgaagccgaaatgagctttcccccttcctatcattgtgatgaaaaactgcattgaagtctcccaaaatgagccaagctgttttcaccttgatcctagataaggcggatcacaactccaatctaccctctatagagttagcaccatagataaaagtggcagtgaactccttctggtgccctatcattttaattatacaatgaacatgttgctttgactcctccatgatttcctctaaacaaacctcttcttccacccaataagaattatggcctttattatgttactgatgtaataatcccagctaaaaaaaaactattagccatcttctcctgcaattcattccccttaattttggtctccacaagagctccaacaccaattttattaactcttaaaatatccaccacagactcctatttcttttttattcaaccctttcacattccagctacatatgttgttactatccatcaacaacaatataggtttgatccctcgtctccatttattcctccttgattctccttaagaagatcggaggaattcctcaatatttgcacttggctgtcatctatt

SEQ ID NO: 75851 - DNA, 625 bp, Cannabis sativa
ttcacattgactcattctctgagtctgagtctaaatcatccactaattctacagttccttttcctcttcattactttcgcaacatcttgttgataggtctcaagaattagatactagcactttacaacctgaaatcgttcctacattagatattggtacttcacaacctaaaaacactcctccccctcctcttgcagttattacatatcctcctgagcctatggaccctccttgtcgctatcctcgcgcatttgtaagtctactcgccaaccaaattttacatactcttcttattttgcttcttttactttgttttttggcatctattcattgtccttatgagcctttgtcctatagagaggcagttattaatcctctttggcagcgtgctacgaatgaggaactctaggctttgcaaaagactcatacttgggatttggtacttttgcctcctggtaaacatgttgatgggtccatggaacggtgcaaggctcgattagtggctaagggtttttcacaacaatatggtatggactttgaggaaacttttgctcctgttgcaaaaatgactacttttcacactcttatagcaatggcatccattcgccaatggactatatctcaa

SEQ ID NO: 75852 - DNA, 844 bp, Cannabis sativa
agtttctttgaagctcaacaatggcccctgtcgacatagatgagctcatctgatttgagtttttttcgttgagtgattaatttgagtttctttgagtatttgatggttgttcaatatttagacgatctaatccattaaaaaatatttatatgtaagttggtttttggttaactcaaaaaaaaaagttggttttgctaaaaacacatagtaaatactaaatagtattataataaaaaatcagagaaaattacctgagaactttctaaaatatttacatgaatatgctccaatattttaatatagtaacattaacgatatgtttttattaatttcatatgcgtgtaccgagagtctctactctcttaatcttctatttttttttttcaagtcttttgactcattttttttttctaacatattttaattactgagtctcttcttcatttattagctttttgttttttctttttaaacaaatgacattatatttctgttaagtttatttatttatacatcctaatttttttttatataaattttgatgtgattaaatctatctaaataaattatcaaaagtttttctaattttattagtaattatttaagctcaaaaattatactatatattatattctattttttaaagtgatcatttttatatacaaaatatatatatattctccatcaccatcaccaagaagattaatatatataaaaataaatatgactttttaattttttttctttttctatttaattaactaaattttaaaataaataaaattaaatatgtcaattgattctaataagttactaaagatattttgttactcatatatttaaa

SEQ ID NO: 75853 - DNA, 900 bp, Cannabis sativa
gcttgagttggaggattaccatatttgggagtgacccaattcttgtcaaagcgatagtgacacacggctgcggtgtgaccagttcgaagacacacttgacagagaagtctagcaccaggaggtctgccattgtatctatttcgattgttgtcgtgtgcagggccacggggattagcattaggatgcctgtatggaccatttcttgctgcgagattagcttgcatttttacagagagatctgtaacagattgatgatgctcaattcgtgtctcatgtgagaggagaagtgcctggacttcttcaaatgaaaggaagtcgcttcttgaagtaattccagagaccactggatcaaattctggtccaagaccattaagtagctgcaagattaaatcttgagtggatactggtgaacctgcaatcaagagagcatcagcaatagattgagctttatcaacatattctgatatcgtaaggttgttcttaaggagatgggagaattggcctttgagctgtaacagacgggcctttgtttggcttgagaagcgttgttccaacgcacgccagacggagaaggatgtgtggaaatttgctacagatgcaagaacaggttctgtcatggacgcacgaagccatgagagtagaagctggtccttcttcttccattgagtatattcagggttcaagccaccagtcacaagattcattggaggagacacatcggagaagagaatttggtcgaggtcatggccgatgaccgtggggacaacttgagatttccaagataggaaattgttgcggtcaagtttcagagtgagagaagcagtaagtgaatttgagaaaggattccagttgtgattcagagtagcagcaggagctgtatgaggatcggaggttgaagac

SEQ ID NO: 75854 - DNA, 598 bp, Cannabis sativa
  modified_base (533)..(555): a, c, t, g, unknown or other
caacaccgagttacaagatatttcaacaaaaaagtcaagaaaagactgttcaatgttggagacttggtgttaaggcgggtatttgcaaacacgagagactcatctgcatgagtgttcaacctgaatcgggagggttcatatgtaatcgaagtagtagtaggaatcggagtttacaaattagctcgaataaatggctcgctaataaagaactactggaacgtggaacatttgcgaccctattaccagtaaataaataatgtaactcgctgctgatgtaatattttaacttcagttatgaataaaaagaatcatttccattatttaagtaattacaaaaccttactctttaaaattacttgagggacatttgtgtatgactaaccgggattaatctggaagtacatgatataatgaaaacccacaactttaaaaaaaattaaagtttttggtcaaacctttctgacgagaaaggatcaaaccatcataattttttggtttaaacctatctgacaagaaaggaaaatcaaaagttnnnnnnnnnnnnnnnnnnnnnnnttgcgtacaaagctgaatattaacggttcgcgcaagataggaa

SEQ ID NO: 75855 - DNA, 718 bp, Cannabis sativa
gctctgcacacctccgtccaaaaatcacagttaaatgccacggtggactgtccacgtgtatacacttgtacacgtggaaagttactagcggtccacgtaatattagttttaagaaataattataaatatttaaaaaataattaatattttttttctttctttttcttcttcatctttcttcttcttcctcttcttcttcgttttttttttccaaaaatcaaacccaatcctccaaattcaatttcccatcatgggtttctgtcttctccttgatcgttagcttagaaaaacccaaatccccatcatacctaaacccacttcatttttcgaactcgaatccccaatcaacgccaaaactggatcaatcttggaagaatccaaaatcgaacacctttcttcgttcaaactcctaccaaaggtaccgctattgaccacacaattggaggagcaatacatataagtctcctggagatcatagaccttgtgctccttgagtgagatacggtaacgactcttacgacgaggtcgatcggaagggaggggtttgaagcaaagagggttgccgtaaaggttagcgggagctcgctcagtaacgatgccgttgtagtcggagcgggagatgagagagccagttgtggaaagctggttctcattggcatcaaacccaatcctccaaattcaatttcccatcaccgattaaggcgagaagtgttgaagg

SEQ ID NO: 75856 - DNA, 912 bp, Cannabis sativa
  modified_base (221)..(221): a, c, t, g, unknown or other
gatggctgattctgtagggaactccaactctaaaacttctggacgataaattcatgaaccagagtgggacattgctgcaagcaaaaagcagacccaatccctggttatcaaaccaaaaggtaatgatttggagatcttaaaacaacctacatagtgcctgaactctagtatgaacagtttaaaccctaaaaaactaccaaaaccagatgagatgataaacnatacaaacaaatcaagtaactgatccacacaatgtaacaaacatgagataaaagaaagtaacttaatgtttgaagttagggcttggggcagtgcctcatagtttcttctacaaatcttcgaatgaagcatggatcgctttgagaggatgaagtcggaagagactcctggaaaaaggtcaaggacaaggatggcatgcaagtcttcggacaaatttattgataatccttgacggagaagcttaagggtttttctcaaactttttgaaatggagaaaatggtggaaaggtggttccttttttcttactttatacccatgacagtggcttcgttagatcaaagaaagatttgatcctatggatatgattgaaagcggaagtggaaaagagggtcatttcattctaatgtacttcaaaaccgcacaactgccaaaataagaggatatgcatcttttcaaaaaagaaaaaaatgacggaaataccctttgtaatcattaaaaagctctttttaattaaaaaagaactttttaaggggctattgttatacccaaaatttggtaagcacatcagaggaagatacgtgtcgagctgggaaggacgaagaacttaatcacacaaacgaaagtacatttagcatggaacaacacgttggaaacataatttgtagagtatgtttataactcggctggctgaa

SEQ ID NO: 75857 - DNA, 612 bp, Cannabis sativa
  modified_base (283)..(307): a, c, t, g, unknown or other
  modified_base (440)..(440): a, c, t, g, unknown or other
  modified_base (562)..(568): a, c, t, g, unknown or other
ggttgtaattacaatgctacgtggtcatctccacctgtaggctgtttaaaattaaatgttgatgcagcaatagataatttttctcagacgattggaataggagccattataagggatttgaatggttccatagttgcttgtctttctaaaccattaatgaataattttaattattatttagtgattttttaaggggaactccccttcaatatatatactatatatatatttttatatataattttattatattctcaatatcttcattattattattattatnnnnnnnnnnnnnnnnnnnnnnnnnattattattattattattagcatgagttaataaatttgtcttattaatttattttttcttagttctttgagagttaatgttattttattggtattattttgcaggttgtttttcagttgttcaagcagagtgngctttacttgtagcattggattggactgttactgtgggtctttcttcacattttgttgaatctgattgtttagcagttgtaaatgcgtcctcaactgtatagtcccatacctacacagtctnnnnnnnatcccacttgaccttccccaggcggtgtgggattgcacagctta

SEQ ID NO: 75858 - DNA, 1140 bp, Cannabis sativa
tgatttgagtttttcgtgggcttcaacaactacctttgttgttttaagtctatggaaattgcacggtgtacctttttttagttaactcattttatttttacttttttttttcttggtatttaatttatactactttaattttttatatcccgattatatctttatgttataaaaacaaccttcctcacctccccgatccctacccaccttccttcctcctcaccaccttcgttcctccatccaagatcggcactgtgtacactttgcaccctgtgatttcagccatcctcctttatcgcccttccttctttcgttccaacatcaccaccggcgatttcgttcatgtgcatccttcttactgtgatttcaaaccagccgagattcagccctccgcctccttcgctctgcaatttcaaactagcctagataaatttcaatcatatcagtattgagagctagagacttattataagatgggcgtataggtcatttggtagtagtggttgatatcagtagactcgaaacagttgggcctgaatatgtgagagtggttaaagagtttctagatgtgtttcctgaggaattacttagtttacacccccaacgtgaaatagattttgttattgatctatttctaaagcacttataggatggctccatcggaacttaaagaattgaaagttcaacttcaagggatgttagacattgggtttacccgacccagtgtatccccatggggagctccggtattgtttgtccagaagaaggatggatcccttcagatgtgtatcgattaccgagagtcgaacaagcttacagtgaagaacaagtatccattgctaagattcgatgacttgtttgatcaacttcaagggaagacagtcttctctaagattgatcttcgctcggggtatcatcagttgagaattcgagaggaagacattctaaagactgcatttcgtatgaggtatggacattatgagtttctagtaatgtcgtttggattaactaatgctccagcagcctttatggatcttatgaatagagtgttcaaggattttcttgataactttgtcatattgtttatcaatgacaaccttgtatactctcagtcagaaacagaacatgagcaacatcttc

SEQ ID NO: 75859 - DNA, 617 bp, Cannabis sativa
tcaaaacacttaaaattaacaaaattatacatatcatcgagaaaatatcaaaaaatcattaataagacatcgtaacgtataaataacaacattttacaggtggaaatcgagaaaatatctataaacaattgcgatgaaaacaaaataataattttcaggcaacaatcgacaaaacatcaaaaccaatcgagaaacaattgtgatggatagaaaatatcaattttcaagtaacactcgagattgtatcgaaaagacatcgagataatatcaatattcaacgaaaaatgaaaattatcaaaaaattcaggcagccatagaaattatcgagaaactatctcaaaacaatcgaaaaatagtcgaaaaggatcatccctaaccttagtacactaaccatcaaaactacatatagttaatgtcaaaaaaccatcgatattgttcaaaaaacccaatttttaccaaaaaattagatccaatcatttcacagaaaaaataataaaataataccaatgtaaacaataaccacatatatctagctactagaaatgaactacatagtcttctaaatgtttaagaaatggtttgcaaaatacttgcccattattgtagagaatgtgtct

SEQ ID NO: 75860 - DNA, 807 bp, Cannabis sativa
  modified_base (275)..(283): a, c, t, g, unknown or other
tactgaaaatgatgataaaggtaacgctgaggtaaaacctaaacttaattggactactgaagatgaaaaattatccggttataacaataagggcttacatactatttttaatggtggtggtaaaggttttattaaattaattttatcttgtgaatttgcagaggatgcgtgtgaaattcttcgaactcaatttgagggtaccactgatgtaaaaagatcacattttaccatgtttgtaaagaccgcctagtcttaatttggaaattagcagatannnnnnnnntaattatgaaaattatttattagcattgaattaattatttatgatgatttatttgaattcagaatgtatttttgtgtcatatatagaaatttcataattttgcatattttgtgcccggcaacattggaacgcgctgtatggctatttgaatcacatcttcgtatttttattatagcgggacaatagtttagacattaggaatgtcgggattagtcgggattttagaatttcctaaaatacccctaagtacccttttatgttgttttagtgtgggaggagcaaaatggtcattttgccccataagcttttgtcttttttgtgaatttaattagataagtataatcagattttattaatgttttggttgagaatgatttaataaaaccattttttttatttcatttcactcattttccaaaaataagaaaaattgaaaagaaagctcttctctttcaactctctctctctctctcgaaattcctagggctgctagggttggtatttcttcagtttttcctttgaat

SEQ ID NO: 75861 - DNA, 728 bp, Cannabis sativa
tgtaatccaatttaaaagtagattttttaaaatacctatcatataataaagtaaaacaaaaaaaccaagcattatcgcctggaatacaataaactgtaatatataataatacataacaacagctcgtacagatacttttataatattgcttgatattacaacaatatcattgaaacttcgaacaaatattatttttgatttgattctttcctttttaagagtgtggggttcataccataccatgtgacctgctacataaattaaaaaaattatccttctttgaaaaacgtgcattatacatgtataacttatctgttatacttaaaaaaaataatagtgcattagcatgagttttaaactgaaacaatgggattcgggtatgggattggatcaaatttatatagaatctcattaataagggtattcgagtagaagaagtctttctgtatgttttaattgttgttggaaccatttgaaggatgcgtaataatttgacacataataacacactttgggatattttgaaatgtattgaccagatttgtacttcttatgcagagttacatgatgttttattgccttatccaaatccaatcttgagggtgtcctggagtcctccccctcaggattagataaaattgaattgtgatgttagggtgggccttgagagcatgtgcacagcggtggttgcaaggaatcacttgggtgaagtgattcgaattcatacg

SEQ ID NO: 75862 - DNA, 975 bp, Cannabis sativa
gtaatgggttttatttaggcacaaaacccaacaataaccccacctgatgaattgccaaatacggtctggccgcctaccaattggcccacaggtggaacctgtgatcggggattggacggttgaccgttcagagtttaggcactatgcctaacaagaatttcttccgagctgcctagtgggatgctagacgcaggctgctggttagcaacttggtaggcccaccgtatcactacggtagcctttcttgttcggtcatcgatggctgcctattgagccttcaacgtttccatctctctatccctccattcggcgaactggcgcctctgctcttcgaaagcgaggttcactgcaacatggagctcttcctgatcatgatgcaaggtattagtatgaccttgcatgagcccaagagcattacggaggttttggatctcagtgtcatctccaatggttttttggacatttgttgctaaagggatcctagtgctgggagtacccaattcggctgttgaactggtgtttccagtctcttgcacaccgggtgtgattccagccaaaggagatgtcacaccttgacctgcggtaggtagttgcattttggttgctcaggattggtgactggtgggaccattgcattccctggagtctgcaatgcgggatctaccgccagtggatccacctgatcgaccatacctcttttgtaccaccatcttgagtgtctgatcacacttaaagtaaagagcaaacttggattattgctcttaattaaagcaccaaaatgttgacctcgcttttagccaatgacaatgagttaaataataagcgataaaaaaagtaattaacgtgaagtatgaagtaataagcaatgaagaagaccacgttttaaagaggtccaactgttggaaattattttacaagatcttagatctactcacaagtatgtttattaacaccctaaatttgaactttctaaaa

SEQ ID NO: 75863 - DNA, 602 bp, Cannabis sativa
aaaaaaagaggtgaaaaagtgattagaggtgaggtgtggtggagtggagtggaatagaggtgaaagtacgaaagaggcttttttcttttacaccgacgccttctactttttcttaaacatggaaacagccacattggatcacgcataaaacagaggccaacgtgaggataatttggtcatttcatgtatgcattttgtatattgtaatctttttctgagaataatggaaatttttgttaggcaaattagacgatacctctattaaacatgatatatcactcaaatgaatgaaaatacgaatacgaatatgagacagcaaatcatactatttacaaaatacgaatgaagattttaatgacacttttaattaagatactaataagttgacactgttgaaacactaaaaaaaggcgaagaatgtaagatatatcgaattaaatgaacatgtgataaattacattatcaatgactattataaattttttttttgataaaaattaagtgataacaaccttattatttaatctaaaataaaaataaataattaaacgattaatcatagcgataacaattataagaaacaatctcatcataaatcacgg

SEQ ID NO: 75864 - DNA, 566 bp, Cannabis sativa
cagcattcgaaacaaagaaaggaaattaaaaacactttcgaatctacatgccaaacaaatagaactaaaacttgatacaaattctacaataattgaggactaaaaacctataacaagtgtaattgtgatgcaagcgctctataattaaagactcgaactttaatgcgtgttgaagctacctatccttcttggtcaaaatatgtaactatttaggctatgttttaaaggagagtttagtaggtttgatggagagaagagtcaagtaacggtaggcgagctaaaatcctcttgtttggcgaaagggattatcggaggtagagaaaaaggtaagatttattctaacatttcaaatctttctatatgtactctccttcctagtttgtctaaaattatataaataccctattagaaaataactccaagaataatggcaaatatagagagtaatcaatccttgaaactctccataccctgtattaaaaaaataaaaaaatgattacaatactccttttcatccttctcactccactctaccaaaaatagtgtcaaggaaagagagagagaga

SEQ ID NO: 75865 - DNA, 763 bp, Cannabis sativa
aaaaaaaaaatctttaaacatatataacatatactttcaatataaaatttcatatataaattcacagcctttaaaaaaatttctatataaaatatatattatttataatgtgaagagtacgctaaaaagagaattgtattgatagatggatctatcatataatttatatacatattatatatttatgctagaacatatgtgtgaattattaaaaaattaggaatgaaggatgaggaagaagattcaataggtatttttgaaaaaaaaacttttaagtttccttttttgtttaatttcccttactaggctaaaaatgtaaaatttaagcctaaaatacatattatagaaaaaattccttttatttttgtatgtacaaaaaactgggtttctaacaaggacgcctataccgaggacatgtcatcgttattgcttttttcgcaccagcgggaaaaattcgcgcttttttttggtgtcaagtttctgtaccgtgttatctcaaaaaaaaagtttttgtaccgtggacatgtcctcattataagttctaccgaggacatttttatttccttttacttttcagcttctttgtcttctccaaactctcataacctgaaatccccatttcagaccagaaaactctcgccagataacccaaaattacacctgggaaccatcaaaatgtatcaagatttgaaaccctattattggtggtatagagtgaagaaagatgtagtggattacgtgactaaatgtttaatctgtcagc

SEQ ID NO: 75866 - DNA, 1264 bp, Cannabis sativa
tattgcaacccttgtcatcttcaagttcaatgagctctggcagttcccgtttaatggcaactttaattaaaaccctaggaaaactcaacttttctcttcttttttttttgtagcttcatttaccataactggcttcccaacttgtccaattatcttgaataaaaatcccccctcccccagtatttcaaatctaagtcatcaagattaacccaaattggtaccattctaatgacccctttcttcacattgattgagggctcccaaggttttatgactaccggtctgcgattacagaaaatatatcttccttggagaacataatcccttgtttcaactgagttaaatcgtattatgtatatgccataagagagtaatcctaccctttctatcttatctgcccatattcttctcacaaaaacacggctaaaggaggattagctcctaaaacacagcacaatattgaaggcttcaagaaatccacttcatcttgaatatcaacttttgttatcttcaccttattattcaaggaattcgaaaatagacttcgtacaagagaaccagacctcagaacaggggaattagtgtccataccttgggatatcttcactgaacagtgctcggatgtcaatagtgtcttaattattgaacctaatatttttattgttattttctttttttactttatactacatttaatactaaatacaaatttatatcaatttttaacatgttatacaatgtagaaaaaaacaacgccccctcacttacaaagaaaagtgtcgtccctctttaacttaaaatctcggattcgtgagtgaaagttatcttatttaaaggtagttgcataatattttctatctattagataaatatatcaaccttgggaaatgctcacgttttataattatttgataaattagatcaaaaataaatgctattagattcctataaatagcagtatccacgttgaagaaagcacaatcaattttttcacttagaaaaattctatcaaattgtattctataaaacaagaaagccataagtgaaaatgatttgttgggtatgtagacttaactacaaaattacataaaaaaaaaaatcttcatctttattattttataattaatatttttagagaatttattatagatttaaaaattatccaaactttatttatattaacgaatattatttggaatatactaaacaaatattatttggaatagatcactttattattattattatctccttcccttactcc

SEQ ID NO: 75867 - DNA, 1120 bp, Cannabis sativa
aatttctgggcaaatatggtatgtatgtaattagttggtgggttggagtatgttgaatggatgtttttgtttgagttattttatttaattgatttttgagtgtgagtttttatcgtagttgctttacggaaccagtttttttgtctcaaatttttaactagttgataaatgtaaccagtttctttatattatatttgagttattgtattctttgtgtttatttattttgttatggaatcaattcttttcatatttatgcctcaatattttttagaattgatccttatttttttaaaaaaattataatcgattttatgagggattatgtgttatgagatattttgttgtggaactagttttgtttataatttatgtttcagtgttttaggaactgatttcctctttattttttattgtaatcagtttgagttattgcatgttatttatttgtattcattatgttatataaccggtttgagttatttcgtgttatttatttttattcattataacactgttataaaactgattctattttaattataactgctttgagttattttgtgttatttactatatttcaatcataaccagtttgagttatttatttttattcattatgtgatagtttcagttctatttttagttatatctgagacatctacttctggtgacttttccagtgacttttctggcgatagtgatttttccggcgacggtgacttttttggcaccggtgacttttttcgacagaacttattattacaagctttattaaatttatttattattttttcccatattttaagctttaatttattttttaatcccatattttttgcattatttatttatactacaaaaaagtaaactatactctcaattctcacatttataaaaattctcctaaggaaaatgatagtaaattgccccaaattataggactatgttagtaaatgtcttcatttcaaaacttgtagcaaaatgtcccttttagattatttattatttatattatcttttgccacataaaaaatcaataaaatcaactaaaatgacaagcagcagctcgctatcaaagtgatcttggctccctcctcggcgaggcatccctatgaga

SEQ ID NO: 75868 - DNA, 1074 bp, Cannabis sativa
catttgtaccttctcccccaatgatgggtggtgctttatcttgccttgaaataaatagttgagtgttgtcaaggaaaacctccacttcttggacacgacaagaacatcttgacattttttatgatggtatgtaaggaatcaacttagccttagcctatcattcccacagacaacgccaaattattgatagtaagaacttgtcaactaactaattaaggaaaatctaacgttaagaacttgaaatagaagataattaagaaagtttctcaaactcttcaagaaatggtaagaaacttagggttccaatgatattcaaagttctttctaccagaattttccctcccctttacatttattcaaatggtctatttatactagagctactgaggctttgaattacatattctccccaagttaatggagggatacaaaattcctttagtaccatgaagatcaggtggatagtggtgaaatggtagtcggatgtcagcttgtacctctaatgagacaagctttgtctccactatttgtacttcgagtgagataagctttgtctccactattcgtatttgtagtatgatcactacctcatagaggcatgcctactccaacggtctcatccttggttatccatcatttttgtccgtccctccttattctcccatgttcaaggtattatgaagacatacaataaatttggactaagtgttccacttgatgttggttctcacatctagaggctatgtacatgatgggatggtcttctgagtatttgagagagtatcttaggagaaggaaagaagggagagtggggaaaggagagaggagggagcggggagtggggagagaggagagcggggagcagggagcagggagagggacgggtggggagaggggataggggataggggagagcagagagagaagagagggggagcggggagaggggagataagggtggcccgcctatttacccttttgaactttttcggtgggctttggaatctttttctttctctaattatgtggcctctttagaaaatatactcggtgaatttttggggttcacatcta

SEQ ID NO: 75869 - DNA, 804 bp, Cannabis sativa
cgggtctgggttcgtgtcaatgtcctggtctgaatcccaattgaggttaggggcttggtctaggtccaggatcgagtcccgagttcgagttcgagttcaggttcaagtcttaatcttagtctgggtcagggactgagttcgagcacgagtttcggggctgggtttttgtctaaatttggttcccagtcttggtccagatcctggtcactatcccgatcatgttccaaggtcctgataacgttttggttcagttttcggttttgggtcccaggtttgggtttgggtctaggtcctgctccagcttcgggtccttctttgagtccccgatcaagacaccgactatgggtattgtccaagccccggttcccacatcccaggacaagatttggatcccattcacgggatccagtctggtttcggttcatgtcccagatctcgatctgggtcttggtctagctctgagaccgagacttgggtgcaggtttggtctcgatcccaattgtggttcccaagtcctgttccatgcttgggtttgagttaaggtctaggtttgggtcccaagtcccagttcgggtttggattcaagtttgggacccaatcatacggtgggtctgtgtctgagtccgggtcctggtcttgttacagttttgtgtatgggttcaggtcctagtactagtcctgtttctcggtcccgatctccttctggttgcggttgtagtttcaagtcacggggtacgagttcgggtcgagtttgggtctgtgtttgggttctagttttgatttgggttcggggcgaggtttagg

SEQ ID NO: 75870 - DNA, 830 bp, Cannabis sativa
taacaatacttttaagtttatattgtcaccaaaagaaatttgtgtaaaagttctatcaatcaagaaagaaatttgtgaaagtctttaggtacaaaattatgatttattatgactgaattttttttttaagttattataattaaattagtaatattttatatctaaataatatataattttttcattgataaataagcttttgctatgattaaaaatgacattttattaaataagaaaattatgttgtgcttagctaacaatactaattagtatatgtatgacatatatcatggtgccgtgccatatttctttctcatagcattctaaacttaattataccatcaataattacttgttattagtacgttttcaattatttttagcaataattatgagagctatgtgtttggtttcattatttgtctttggtttaatatgttttctttttttgttgtttaatattttattttctgtgaggtgcatacataagcttttgaccatgcaccagagtttttaactaacatccttaactaacctagtaattaactaaactaaacccgagtttaataactaatgtctctaatcctctatattattcttacgtttatacagcctttgagcttgtgaaaatctcctaataaccaatgtgatttcattcactttttacaataatctaatattcacttggtggcctaattaagtctatttcgttgatcataattactcatcaatcccaatctataactggtatttgcgtgctcatcaccaatcactttagaggtatattgatgttacttttatcattacaagtaaaagtattgctatgttta

SEQ ID NO: 75871 - DNA, 1021 bp, Cannabis sativa
atcgagacctaggactcggacttggatgggggacttggacccgggacacgggcatgagagctaggattgagacccacgacccaaccccagacctggaccctgacctaggacccagaccgagacctaggacctgaagtggaactagatagggacctgagaccgtgacccaaatctggacttggggcttggacctaaccggtagtcagtgtttggatctgggacccatacccaaactcaaacccagacccggactaggaccaagacccagacccaaacccagactcgtaccccagagttgggtccgagtccaagtctaggtttgagtccaggaaccggaatctgactaggatcgaaacccagatctggatcgggatgcggacccgaatcaaaactcagataacgacctgggacacgaacttaaactcaaacacggacttggacccagtcccaaaaccaagaccccgaccgagattgctgactaagacctggacccaagagcccgacaaagattgtgggcccaatctcaaaattggaactagaatcgggacccaactgggattggaatccacgactttaccccagtctcaatcctagacccagacccgaacacgaacataaaccaagacctaggacccgaatcgaaatgagaacgggagcaaagattggcatatagatcataactcacgaccggggcatggaccaaacccgtagtcggtgtctagatcttggaatcgtaccaagagacccaaacctggagcaatttctaaactaggacccaaacccagactcagactcgtgacctgaaatttgaataagaactggaatgaagaccttggaacaggaatcggaggttgacccaaaaacggatgtatacgcaaaaccgaacacagacccgaaccccaactaggatcgatagctggatccatacttgcgttaggacctgcgaccaagaacccagaacccaggacccataacctgagaccttgaccagaacccagacccatacaagaacccataccca

SEQ ID NO: 75872 - DNA, 715 bp, Cannabis sativa
gtaggggatttggttctgcaaaaagtcatgccaaacgggaagaacccgacacatggggttttcggtgacaatggggaaggaccataccttatccctgaaaaaattggccatgcgacttatcggcgctcagaacacgatggtactacgattcgaagggcttggaacagtgaaagtttgaagttttattattagtagtactcgccgtgtatttatacttagtcaatttatttgtacaaatgtcctaagtatagggggtatatggcctactttgtaccactgatttcttgtaataagagttattgatttctcgaagtttcaaattttttgccttagcattttttaaaagttattacactaggctgtaattgaaaaaacagattacgattaagtctgtagattatgcgagtacccgtgtaccacgaaaagcaaacagataaataaatatccttgaagggatatatgctgttcgaaatagaaagaaagcaaagtgaagtttgtccaagtacaaaacgtgagtacccgtgtactgctaaaaaagtttaatagctatagaaataaaaacattagataaatcaagcgtttggagcagttggagtagtggagccatccgcgaccttgctggcagcctcatcagcgacctcttcagtattcgcagtctctgcgtcctcgggaaaaagattccctccgccaccctgagtttgagtaggcgacatag

SEQ ID NO: 75873 - DNA, 720 bp, Cannabis sativa
aatattgtttgtaagttgatttatcccaatatataatattctaaggtagcaatcaaattcaatggaaattaaattaatgtccctatattttattttaaatggttgaaacaagctagcaaatgctcccgtgtgtgagctgaggatttttcttcctcttatcttttctttgagaatagatttttccctgtaagtttcttctttcttctccgtcccttctcttgattccctcttccatggaggaccaagaacagttggtggaggaaatggttactacagagtctaacgtggaagagatggtagctatggaggacaatgttgagttactacgacaacaatttctcgacgaagttactcttgaactagaagtagattttgagattagtgcagaggtggctaaaggaggggtcctggcaaagatatttggctctcgacaactcccaaagagcagggttaaacagattttgggtggtatatggactctgaaaggaaaatggcgcatgaaaaccttggagatggggctgtggggaatcttttttgacgtcaaagaagacaaggacaagatattgaacagaagaccatggattgttgctaaccagttgctgaatctgagggactggcctgacgatggacattggccaaatattgacatgtctaaagctattttctgggtggagatactgttgggttttatgccctaaataaaactctgtttcaatgtaa

SEQ ID NO: 75874 - DNA, 764 bp, Cannabis sativa
ccaggaggagggacactccggctgttagcaccgactccgggattccttctgaagcggaggaacacactgtgccgcatggtattgttctcactccagtccctgcagacgaggaaaggcgactgctccgcatcgccaaatataactacgccttggacgagttcagccagggacatgttgaggtggaggccctgaagaagatcctgcgggaggagcaacagaacaccttcctcaagcacgccttcaggaatccttgggacctgaacatggaccctctgacggattggttcaaccgctttgtcgggcctactcttgttcccttttccttagagatgaccagccaatttgtctcccatctgactcaattcccaccaagagatacgctgcttgtgccttcgtcaactccgcttaccaagtgcagcacatcagtgctgctatggtcgcggtaagttcttgtgattttatttccttcttttagattgtcttaaggcatctgatttcattcttgtttcgttattcagattactgctgagaccggcagcctttccaagaccctcattgatcacgggttggtcatgtccaaattttgcggcatggatgaggccgtgaagattttgtaagacttgtgggccgagaggagcgcattgtaggaggaggcctagcggagggaggcacaggcagaggcaaagtgccgggaggaggcccgacagagggaggctcaggcggaggcgaggcatcgggaagagctgaaggcggagggtgaggct

SEQ ID NO: 75875 - DNA, 1103 bp, Cannabis sativa
acgtcataattgcttcaatccctccatgatcaataaattttgtcgtccttgatgatttgattgcaataatatttcacaccgcatacttgtgtgttaagctatagtatctttgcaagtgtcgtagagctcggttctccattggattgttagcggaaacatctgtacttattggatgtaatgcgctaacatcatctataaggcaatgatcttccatttggtaaatgatgagtatgcgtcatgtttaattatttgggatcataaatacaaatcaattaatattcgtacatattacaaaattaagtagttgaaaaagtgattattacataattatcttaaattattgataattatgcagatgaataagtatgagattttatttaatttggaggaatactttattcgatatgcaaaacttaattaagtaaccataaatcagagaacatatcatatataccaattcaattaagcaaccataaataacatatcaaagtatttttgtaaataagattattttagatacaataattaaaaaactccattactaattttaatctgtttaatctgttattaatttatttttttatgctctacaaaaaataatcatactccaatttttcttttccttatccacttacattttatttttataattttataaaatacatttaacatatataatagtacaatctttttttttataatatagtaatagcacaatttcaagaaaaaagaaattcattttatgaagaaaaaaaaagtaaactttcttattgtactatttttattttatagattttttttttttgtatttatttaatagatattttttttggcaaacatttggccaaatgaaaatgcacttttatgattccaaggcattttatagggtagtagactagtgtcttattaaaaaaatatttttaactagggaatagtaccgcgcttcgcgtggttttaataacttttcaaaattatatgtataacaaatttaatattttgttttattatgaataaaattttgaattgaatattattttcttattaaattaataaataatataaatagtatataataaatttctcttatatatcattagcacaaa

SEQ ID NO: 75876 - DNA, 726 bp, Cannabis sativa
atatagttatcgaactcccaacatgaagaacgacctctaagagcattaatgataacctctaaatcgctcttcaccaccacaaaattgtagctcttggccattgcagtctccactccaagtaaacaggcaacaattttgccaatgaggcgatctgaaaaggggaaccttttgacagccacccacacaatcaaacccatatggtcatgacccccaaccgccacacacatgtcttccacccaatcctcacatcataattaaccttaatccaatcgagtgggggtggaccaactagacacatcattagagacagtggatgagaggatggataaaacatgcataacagtaagtaatatggtcaatataatatttaatcctagacatattagtattgtgtacttcattattacaagctctccaaatcgtatcaacaatgatagatgcatacaagaagacctcattaacattgactcctttcgaattaagaccctacagaaatttaacacaatcctatatcctcaccgtagtatcattaatcggaatgaggccccacacggacaagctccatggacttcttttctctggcccaaatagggtaagtagtatcttcaatagtcaattgttgcccaaggagttgttggggattgttttaccaggatatagatttactaccatgtatgttatttaacatcttaaacatgaattctaaaacaatagaatttaaacaca

SEQ ID NO: 75877 - DNA, 1187 bp, Cannabis sativa
agatcctggtaaaataattttcaacaccatcccctctggcaagtcctacagaagccggaggcgtctggaagactcctcaagtgggctatggagttaagctagtttgacatacactacataccgcgcacttctataaaaggacaagcgctagccaacttcataaccgagtgcaatgaagcaaaagctagcgcaaacgtaccagcgccataaaccccagcacggaaagtatttgtggacagagcgtccaatgaaaacggattcagagctggggtaccaaatctctgaacagactctaactgcaggcagccttgcgcttcgaattcacagcttccaataatgaggctaagtacgaagccctgattgcaggtttaagattagcaaaagtcatgggggccacgagagtagaagtctttagtgattcagagttggtggtaaaccaagtgtcgggagaatatcaaacgcgtggagaaaaattggccgcctatgtagcaattttccgggagctactccatgagttcacggattataaagtggaaagaatccccagagaaaagaatacccacgcaaattgtttggctaagttagcgtgagacagcgagattgagaaactggggtggtgcccgttgaacgcctcacggagccaagcattaaagcctaaaatattgtggcagtagttgagctagagcccaactggatgatccccatcatcgaatacataaccaaaggcgagttgcctcaagaaagggcactgtccagaaggatacagtaccaagcgcaccggtatgtgatgatggataacattctctaccgaagaggactaaacatgtcgtacctaaggtgtgtatcggaccctaaagctaagcaaattatgctagaggtccatgaggggttctgcagagatcatacaggaggcctgagtctctcaaagaagatattgagacaaggatacttttggccaaccatgaagaaagactgtatagactatgtccggaaatgtgattcgtgccaaagattcgggaacataccaagagccccccaacgagattaccctaatgactagcccctggccgtttgcagtttggggggtaaatcttattgggtccctaccaacaggaaagggaggggtaaagtatgccatagtagtagtagactacttcacaaagtggacagaggccgagccaatgaag

SEQ ID NO: 75878 - DNA, 629 bp, Cannabis sativa
agatgggaacaatttactaattttttataatgcaatttaaatttaatttcattggatttttatttttatttttatttttattccaatttctattcatatatttttattccttctaaacaaatacaactttggttttttgttgtttaattcttctttcattttttttttctaaatcaacagtaataacaacttaacagctccaaatattggcctaaaatatcacatcaatacaaaaagtatcattaactctaaatttcttacaactcttctatcaaaaagtgtatctggccttttcactttctaaatttcttaggccttttcaatctatctttgatgtcgtgtttgatatatacaatgtgtaatagtaggaatagcaatcattccaaagcacacattaagatgatacactatcacagccaatgctaatgcaaaaaacttgcttccaacacaacaatggcaacaatttagtatctgaagatacctaaccactttttaatttcaacaaaacatcttttactataacaacaattaaagacaagatgctctacatcttcattatactttccacaaaccatacaacatggatcgtgacaagtattgaatcgatcgatatagtcttacttttgtct

SEQ ID NO: 75879 - DNA, 1322 bp, Cannabis sativa
tgtgtcaaatttattacgaaaggcttattaattggttaacgaaataaattttctccatggctaatcatgatgaaaacgataacagtcgccttgaagagactaactgacgtcttggaaaagagccaatgggctcacgaaggccatccacttcaagaactacgcgttcaacaagatcaacacgtttaagaagaagtcaacgtgatagtgatcaaaacccagaaactaggaatgaggaaaccaacactaatgctggtggatctgtacctatgagctaaggagcttatgatcccactagatatgtaccgttggttgagttggaaagttgccaagtctggcaatgtttggccaaggctaaccaacgaaacactgagttggagagagaggtagtcgtagccagggcgacttgagaaaacgttgcacaaaaccaacttgatcctggagtgagaaggccgtgaggcagacctcgagattcaagaaccaggaggcaggagacagctcaggaaaacccccagaacactcaggaggagcaacctggagaaactggggatgttccagaagatgaacaaccaaacaatcaggcacctcgacaagaggtacctcggagaccccaaggattcacaacccaagggaatgaaaacaatgacatcccaaaatcttctcgtgaaaacgagaacttaaggcaacacaggactaaggactaggagatccctcgtactaacgagagaaatcttgggactcaacctaggacaagtggattaccactgagacaccgtcaatgtccttcttgcactgatagggaggaggcgtatacacaccctagcaggggacgtgtatcaaacctttcccaaaggagaaggcatgtacatgacgaggcaagttctagctcgggatgttcaagatttcgagatcacagtagatctacgcgaggaggggatagacctcgacgtagtaatgatcgtgaaagtatgagtcatacaaggagtagtcaatctgagagttactcagacacgaggcccatgagcaaccatgaacgaagacagccagatcttcgtgaacatttgaatcggagacaacctaatttgcgcgagcgcttaattaaaatgctccaatccaattgcgaatcagtgagttagaaaacaaattcaagaaataccaagatggggaatatgggaaactgcttggttacaactcaaatgaggaggtcgaaccttttcatccaatcattatgaactctgaattcccccaaggatttaaaaaccctcacgtctcgtcgtacgatgggactacggatccggtcactcatctcaacaattttaatacta

SEQ ID NO: 75880 - DNA, 639 bp, Cannabis sativa
aaccatcaaaatccagtgatccctacaacaccaaatcaatcaagaaacaaaatattagactcttcaaaatggtgaagctgttttgaatctttcatgtacagaattccacataacatcatgattaatgtgtgtcaatatcaacaaaaagggactaaatgatctattcgaagcaatgtttagcattatgctttagtgcatatcctaatcctacacgtaattctagtttgttttttattttctcagtgcatgtaattctatttaaaagtaaaatatataaacatccataatattcaataagattagaattgactctcaatattacatatacagcacattaatactttattgttaaacgtatactaaattgtgccaaatttgggatgttacctgtacttaatttgacaaacattaattggtcaactttaatactttactttatgtatactttgtttcaaattaagtacagctaatatcccaaatttagcacaatttttagtatacctttaacaatttatataaatatatataaatatttgacaatgctatctaacattgccacaatttagcactgcactggagatgtttcaaatgactaaaccacagattttgtgacaaccatgtaaatcatcataatactgt

SEQ ID NO: 75881 - DNA, 545 bp, Cannabis sativa
ggtcgtacgtctacagtctaccatgaagagagactcggattatacttttgtctaatataagatcaaatcttgtcccctatgtcagactatggtagtgtgtacgtcccacctcttaatacttttttgcttgacgatttgtctaggcatttttttttcaaggagaaattttttggcgacacgtgtccagtaccaattgtgatcccctattgcccaactgcttctacgcacgggcaaaagctttattgggggcccaacaatcagattattacatgcattttaccctaatagtgggcttttgcaaaaagcccaaagtgagtcatgagtatgtccatacctgaaatttagcctataaatactccttgatttatatgcaaagggagatcaaaaaggagatagccgaagctctaccaaattttttctaagctttcttcttctccaagagaaaccaagaggacagagttaaggttttcttacaaacactattgtaaaaatattatacaagcctattaagtccaatagactgactcgtggattatggctcatta

SEQ ID NO: 75882 - DNA, 676 bp, Cannabis sativa
gagttgtaattcttctctttgtctttatattctctattttatgtgtatattttatttcatgttgtagcattatttaatccataattttgttctttgtattatttgtcatagaattgtaatcttgttggtttgatatttctattggaacacaataatttataacagcgttacggtagtgaagatctatattttcgatcgattatatattttgatataatcaaaaacatagatccaaaatttttttctttatcttttttccttacttttatctttgtattttatattttgtaccataaaacaccgaagatatacaccatatttcttgcagtgattgtggaatacagagggtcaagttttaattctaaaaaatggaatcatccattaattattttgtatattcttaatttggatacataaatttgttgtgtatagatatatgtcaaataattattattaccattttttattatatacctctatgagtgtttgttttcttgatttttcgtaaactttctctcccacatctctacttcttttattgaatttgattttctcttgagaagagaatataaagatgaaggatcataagcaggaggaatgctacatggccaactcttcgctggagctttcaccatggattccatcatgaatttttttgtcaatcctattgctgagc

SEQ ID NO: 75883 - DNA, 755 bp, Cannabis sativa
ctagccctgcgtctaggttgacttcgagaactccgggatggaagttcagacttcataacttgtttccaactcactatctttcagtattctgcaccatgtagatacgtagcaatcaaatccaagccccaagagtcggaatcacacgaatctgtaacctggaagccaacctgggcacctagggtttaacccagcgccaaggttgacattcccgactagggttacaattttcgggaccatcttagttcaaatgagtcaaaacttgcattgaaacaccgactagacataccacagacatatttgagacaccaaaatcagaattagagcaagttcatttttaagcacccatggccctaggccccgagcaccccaacgcctaagttgacaatttgtcaatttgggtgccttccaagtatcaaagtgatgatcaatggacatcttcttcatcttcatcaaaaacagggaaataagtcttttcggggaagaaacaacacttctttggtgccaaagtaaggcccagtgccgaggttgacacttggggttggcccaacactcagagtcaacctgagccaatcccaatgaatttttctgagaaatcctctaagcatcttcttcgttttcaaaaaagattgagattcaactatttccggtaaccaaatggaatttctgaaaggccataattgggacccaatgcccaggttgacatcaacatgggctgtttccaatcaagttcacgaaaaagtgttccaagcattttt

SEQ ID NO: 75884 - DNA, 732 bp, Cannabis sativa
ttatttttgaagagagttgcattaattacttgccaaacgtttttataatgtttatattaatatagatgaagatgattaattttctaaaactaatatttgagccataccatcactcaaattatttcttctttttcttattattatttcattaacctatcgattataaacagatttaatttacgactcatacatatatatatatatatatatttattgagttacgactaaatttagatgatatttattgacatgtatatattatgattttttttataagttaaccgttatgacaatttgaattaaaaatatactaaaataaataattaattaaaaataaaaatgttataaaatctcaaacaatttattatgaataaaatgagacaaactgattccatataaataaaacatactaaaattaaataattaattaagaaataaaaaccaataaaatataagagaattgtcatgtatattgccttttttattttattttttacttttagatttcttttatatttttttttatttttataaaattgtttcattttaaggttatattgtttctactttaaggttatatgagatacttcgaggttatactgttttcatttcaagattatattgtttctatttttattaattattaaaaaaatcaatcataaaaatataaatagaaaagcccttaaaatatatactttcttactatatatgagagctttgtaattttatata

SEQ ID NO: 75885 - DNA, 980 bp, Cannabis sativa
  modified_base (928)..(931): a, c, t, g, unknown or other
gcctcacttaatccccgatgggttcgaggtaggggaattcccattggatatggagacccattatgtacccattaagattaaaacaataatattaagaaaaaaataatgtagtaattcaacattaaaataaaaaataagatattaattttaaaataaacaaacattctacatattaaaaaagtctttattacacattaagttagagaagattaatagtcaactttgtaaatatagtcaataactttaatatgtaataattagaaaaatatataaaaagtttggaaactatatatctgagtcgaatatagggtgggtagtatcactcctgaccccgctctgaacatgcaaattacacctcacacccgtcctgttacccattaaggcaggtaatccttgccccattcgagggtgggtatctctggggaaaattttcatcactaataaaaggattgtacttagatataattaatatattgaataataactagtgtgtaataatttagtttttatataatttaatatttctaaacatttaaattttttatataaactttactaattttatattaagagattcaccaccccatttctggaatatatgagaatgaggattaaaatctttaacgggcatggggacgagaggagcacttttcgctaattttccccctcgtatgcatctttaattccaatggaagattagaaaaaatttaataatttttttatcaaattttttatacattttaaatttgattccatgcctattcttattttaattctcatttatattcctatattttttattattttcaatatcgtctaaatattaattttacataatttaatttaataattattataaaatatcattatagcactattaatacttaagagcaatactctttgttttatgagaaatgctaaagggcannnntggtgcctaacaccctcctatgtgtcaatatcgttattggtccaactaa

SEQ ID NO: 75886 - DNA, 691 bp, Cannabis sativa
  modified_base (425)..(428): a, c, t, g, unknown or other
  modified_base (636)..(649): a, c, t, g, unknown or other
ccaagaccttctccacgtatgataagaaggccctcgatgttggggagttggtcacgatagagaactgtcagaaggctaagctgatctcggggaaccagtcggtggatgacttcaatctttccaaagtcatctgcccaaacgtgagggctccggtcgcagaaagggcgttccgggaagacatcatcgccacggcggaggaccggtaccaaaagtacctctttaagagggaacaagagttggcctacatcaaggcccaggcgactgccgggaggactctttgtctggaagctccgccggagcagaggaccctttggcccaagcctggggtcccggtccctaatactggtgctcccgacgccagcacttcgggttctggtaagtcccctttaataatacattatgttcctcccgtctgagagtatacnnnncttagacctatagggttcgatgagtgccttcgtaggtttagaatgccttctacccggtgggggaatcatgccaaagagtattatttttcccacttagaccattttttaggtcgatctcggatcgattctagaccttcgacgcatattcccctggatcatttagcccacttatcttccagctggtttctttgttggaaattattttacnnnnnnnnnnnnnntactcacaagtatgttgtttacacaccctaaatatgaacttt

SEQ ID NO: 75887 - DNA, 796 bp, Cannabis sativa
tcaatgccaaaaatcgatgtaaaaaaactacaataaaaaattttgtcagtttggaaccgatgacattttgcgacgatttaaaaatgatatattcgatatttgcgccaattcataatagacgcaacctagcgtcaattaaaacccgacacattaaataaaaagaaaaaaagctcgattcaataaaggcccaattgacacataaaaccctacatatataaactaaatataaacctaaacctaaaacacaatcagtcgcaccccatttctctctcactctcttgacaatcggcaaccccaccatgcaccgcctcctacgatcttccagccgtgcaacccttcttctccctttctttatctcatcttgacaccagctctgccacccacacgccgacgagccaaacgggccatgaatggcctcttcccttctctttcgtctcgacaccatgccagtgttaccatgtaagttttctttgctctctttctctactctctctttctttcgatctcgtgggtgaaatatttttttgtacaaatttttgagttggggatgaaaacaaagaggaagaccattgtctatttctgggttttgatttaatgacggtggctattgtgttttgtatttggatctgttttagaatttttttttttttttttgtatgtttatttgtgtagatcttaatatttgtatatttctattttagatttgtaatattaaaatgaacattaaaatctgggtatttgttttagatttgggtataatttcgggatgaatatttggatttgttttttttttttt

SEQ ID NO: 75888 - DNA, 952 bp, Cannabis sativa
atcctatttcacttggtctaacaatcaaggaagtcaggacataatctattctagaatagaccatgcttttaaaaatgaggattggttggacttatttccgaattcgactgcttccttcagctaggaagaggtttcagaacattgtgcaatagtcatatcgtcagctgttatggtggcgataggggtgaagtcgttcaaattttttaattactggtctgagcatagagactttaaaaacctggttttggaaagttggcataaaccggtttgttctactggtttattggggatcagattcaaattgtctcggctgaagcatgtattgaaggcttttaatcatacaaggatgggcaatgtggagatgggctatcatagagctaaagaaaggttctttgaagctagattgcaagctcaaaataaccctggagttgagatgtttcttcctgaagaaaaaacagctgcagagagttatcttcaccatgaaagaatgctgaaaagtttccttgtccaaaggagtaaggtaacatggctaaatcaaggagatggtaacacatcttatttctatgcttgtatcaagaaaagaagggaggaaataggatagctagctatgttaataatcaaggaacaatagttgataattaccccgatgtggtgaagcattatattgaccatttcaagagctacatgggtagttgcagctcggttaataggcggcttgacagtgattgtttggagaatggaaactggttgaattaaaccagcaactgaggctaattcaccctttcactaataaggagattaaggaagctttgattagtatccctaggtcgaagagtccaggtcctgatggctataactttgaattcttcaaggttatgtggactgatattggagctgaagtgtcctgtgcgattaaagatttttttagtatgggtaagatccctacccaatt

SEQ ID NO: 75889 - DNA, 708 bp, Cannabis sativa
cttgggcgacgagggagactattcggacagtatcgaatggggcatgatagaggcgttggcacgttggcttggtgttggcatctcgccacacatgctaccttggtcacgagtgacaatgtgagcatcggtgttgggaatgccttatcgtagtgggaacctatggacagtgcgagtatcttagctagagagcctcgatgcatggatacactcggaaggagttgttcaagagacagaagtgtgcaagaggcacacggtcgcgcgaaaaaaatgagcccattattactcagatggttggagggctcaccttggcttagagaagtcaaggtgccgcacgggtgttctgctgcctgaaaaggtgagcccgtgacactagacatgatagtagaacccacaagaatacttgtttcacgcccaactatgaatttccatttattttataaataaataataaataaattaaatattgtaaatttaatatttattagaaacatcaactatgagaccccaaacccggtacaccccaccacgaaaagaccccaaccccaaaaacttcccaccccgatgagatccaaaccctagtaagaccctgagaaccaacaatacttatcacaaaaaaataatacaaactatacatattcaaactaaaaaagatagacctaaataaattaaattaataatataaagttaaaacatgtagataggtaaata

SEQ ID NO: 75890 - DNA, 607 bp, Cannabis sativa
taatatacttatactgacaacctataattaattctttataatctttattagagtaaaaaagtattattatggacaccaaaatactaaaaataatataagatataaatattttgtgtaatgaccgagagatttagctttttatttaatgaactatcattttcaaaaaaaaaaaaactaatagttttttataattttttttaaattaaaataaataaaacttaatttaaaattatattaatactaatattatacctcataaagttcctaagcggtttactttatcattttttaaagtaaaaatatataagatattgaattataccaaatcaatataagataatctttaatggaagataaaaaattaatctataaatagtacaaataatagttttgtcatatttttgtatcaatttttattattatgcttaaatgcataattataaattttaatgcaaaatttaatatattattaatacttttttaataattcattaaaaatataaaataataatcatacaaaaataaatataaaatttaataataattataaaaattatttaatacaaatcaacatacttaactaaattttaataataaaatattaaaa

SEQ ID NO: 75891 - DNA, 934 bp, Cannabis sativa
  modified_base (229)..(237): a, c, t, g, unknown or other
  modified_base (461)..(465): a, c, t, g, unknown or other
tgagtacacgtgtcctctaaacaggagtcggatctcgagtttctaggtgagagaaatctcactataacatcgtggaagtagtacctattgaaacattgcttggtttgcttcctgagcttattttcaacaagttcatttgctttcgggcttcttccttctggatgaacacctgagcccttttgttgaactcagtgatgcttctcaccggacgtccttgtaagtcatcccnnnnnnnnncccctgcagttaatggatcagtagagatcctcgcctgaagggctgtaagttgcatgctgtcatccaaatttctaaccctagccacaaccatgcttaaacgacttaagtacggcttaagtgtttcactaggctgctgctttatattggttagtgaggccgcttcgggtcgtctatctttagcaaccttaaattgtttcttgaaatccctagacaactgctcccannnnnttattgaatgatgagtaaacttgttaaatcaactactcgctgctccatcaagctaggtggggaacaaaatacagcgtaaattgttcgtcacattactcgctcgcattattgtgttaaagttattcaaatgtgagaccgaatcagtggttctgtcgtatgacgagacatgtgggaatcccgaaggaaaaggggtgctcattatatctgggtgatatggctcaagttcctcgctaaagtcgtatccagatagtttccctaattctcccacttgatatctcgtgaactagtcctccagcttgtttatccgcaattggattggatcctcttgctttggaccaagttgttggcgaaggtcaggttttttccaattcaagtgctcttgcagatccaattgagaataattgctggaagaccttgtcttactcacagatcgcgtcctactcacagactttgtctttgagtggctcgc

SEQ ID NO: 75892 - DNA, 850 bp, Cannabis sativa
tggtaaaataatatccaacaatattatcttattagttatttaataaatttaaattatttaaataaactagattttttgaaaattagttggatatttgaatttgagtttgaattgagatattttaggtattttttagatttaatattttttttaaatattttctaacaacctaatttgaattcaaattaagatattttttaatattttgttttaaaatagaaatagcttaaccaactttccagatcttgtcatgtttgtttgtttatgtaattgtttaattcaaaacttttttttttacaaagatgaggagaaaggctgcatggtacatcaccgtagaaagagtcatgtatagaaggggattctccatgccactacttagatgtgttacacaagaagaagctgcacgacttttgtctgaggtacacgatggattatgtggcaaccatgcaaccgtgcaaagtctattaaagaaaatactaaggcaaggatatttatggccgactatgattgaagattcaaaggcctacgttaaggaatgtgataaatgttaaagattttcaaagatacctcgtgcaccgcccaatgaactaactcagatgcaaagtccttcgccttttgctatttggggaattgatctaatcggacagttacttaaaggtaaagggggagtacagtacgtagtgattgcagtggattagtttactaaatggacggaagtcgagccattggcaacaattacatctaaaaaagtgctagacatatagtctcaaacaatggcacacagtttgatagtcaattgttctttcgtgatgggctaccgaaaaacaagggtcagtcatcagtccatgaa

SEQ ID NO: 75893 - DNA, 699 bp, Cannabis sativa
gtcaactcgaggtcattgttcttctaactcgccaggccttggaacatatttgttagttagcatccctttgagcgggattttgagcacgggctccgggttgaacgatttgcgtaacatgatgctcgtctagccctctccttctgttcaaatcatttctgattagtttggccgatcagctggccggaaccattaacttgggcagagttgttgggtatgaaatctcttgacaaattactagacaaggtctgcccacctaccgcttggcccacagtcggaacctgtgaccggggattggacgactgatcattcagggtttcagaagtgttcacggctggatcttcgtctgactcgcccaggtggatgataattgtaggctgctgattggtagcccgataggctttttgtattagcatggtggcctgccttgttcggtcatcaatggttgcttgttgagcccttaacatttccatttctttatccctccattctacgaacatatggcttttctcttcgaatgcgagattcaccacagcatggagttccacttgatcatgatgcagggtgttggtatgaccttgcatgattccaagagcagcacagagtatttggatctcggtgtcatctccaatgattgtttgagcatttgttgcgggcggaactttagtgttgggaatgccctatgtaaagaccgcttagttt

SEQ ID NO: 75894 - DNA, 797 bp, Cannabis sativa
acaaactgtttgaataattgtcagcgtgaatacaagaggggctttcttgtgcctaagagaggcagcaaataggttgaagcgagggggcgggggtcgggtcatatcgatatctacgtcgctggtgggtgctctgaggccaggttatggcggttacacagcgtcgaaggcagccgtggagacgatgatcaaaatacttgcgaaggaactaaaggggactgggatcacagccaactgtgtggcaccggggccaatcgcgacagagttgttcttttcggggaagagtgaaggtgtgattcagaaaattgtggatgagtgtcccatgggaaggcttggagaggttaaggatgtggcctctgtggtgggattcttggctggtgatgggagtgagtgggttaatgggcaggtcattcgtgctaatgggggatttgtttaggatcaaatctcatgaaaagataccaactttctaagattttgatcttcattttattatatcataataataagcattagagttgtaaaatcattgaaaatgtgaaataaaatcgatggagttagtgttggtatatatgatgaagagattttagcgccttagaaagtggaaactttgtgattttttattgtgggactgggtgaatttttgggttgaattgtaccatattaatacaaagaaatattcactagttaagcaatattgaaaaataacttaacaaaaagaacataatataaatcgaaacaattattaacttattactattgttgtaaacaataacttaacagcagtagtgtttttttacctt

SEQ ID NO: 75895 - DNA, 727 bp, Cannabis sativa
gagagattttattgctagcggaaggcctttgcacttgtttactatttgtctacccaattcctccaaatctttgtacttagtactgaggtcatcgttgggcacaaaagcatgtttgacaaataacttccaacaatcttcacttgacaatgtttggagattatgaatatccccaccagtggccatagtaaaggcaacagcttcgttccgggtagtcacaacaattttacttccatttgctccagaatcgaaacaactctttaaagagtcccacgaagtataagactcgttccaaacatcatcaagaacaaacataaacttcttccccaccaatgcttccttcaatcttcttcgaatttcttctgggttcttgatatcacactttctagaagtgacatcctcagaagtaaccttttcaaagatctctcttgttatctttgaaatatcaaactgatctgacactgtaacccatactcttagcccaaaatgatttttaactcgatcatcatcgaaaacaagttgagcaagagtggtcttgccaacaccacccatcccaacaatcgggataactgtaatgttagtaccaccatcaacatcatctttcagcagcaaatcaaaaatggcttctttttcagcatcccttccataaacatcagattgttcgagtaaaggagcaggaggcctttgagaagaagtgctttgaacaccttctctcaagccaagagcatcc

SEQ ID NO: 75896 - DNA, 921 bp, Cannabis sativa
  modified_base (894)..(896): a, c, t, g, unknown or other
ttccaaataccaaaacagatagaggatacattaatagattttttttaggatttttttttctatattatattggcaaaatttatactaaactctctaattagaattttttggtacaccctcctctttgaaaattaagaaaagttttccaatttctttttcttcataactatggaggttgtagttatttataaaattatttttaaaaatttgaatactttataatactaaaagtaagatttaaatgttttactatatatttaattattttttatacgtaaataattatttaaaccttatttcaacagtacatataaattttttgaaattttttaaaaaattacaaataatacctcatataactataatatacatagttataataaaattaaattaaataacttttttaaatgtcaaaagaaagaaacaatgaaatataagcaaatttttacggaatgtactataaatttattatattatataggaaattttacaataatatatatatttatttgcatttactaacgttactactattactgacgtgtcacattaactaaatcttacgtatttgacgttttttgtttttttcttgtatttttaaaagtgattttttaattactaaaagtgttgataagaatcatcaattagttaccttcagataaaaacttcatttttatattatataacttgagatatattttagttacctccaaaactcttttgtatacatctatggtaattaattaattatttttaagctatattaaggtagcttatcatttaaaatacatttagataaccttaaaaattatttttaaaaggctaattacgattttttttccccgtacattgacatgtaccaaatcatgctccctgaactttttttgccgttannnattccccctgaactattgagattgt

SEQ ID NO: 75897 - DNA, 1209 bp, Cannabis sativa
tgccggtcctgagggtgtttggatcctagaaaaataaaaatattattgatcctttattctaaagatacgtggtgtttttaaaaattattaaaaaaattacttgtttctaaaaaagaatttattttttgtttttgaacttgtcgtctcatacttaaatttatattatttttttcgtgccgtaccaattcgcaatatttgtttggtatagcataatgcttgtgtgtctcctgtcaaaaaaaaatacatttccatatttacagcacattcattcagcttgatgtagctttatgacccaaaaaacagtcaaaagaatttaagaattgcgtattgagaggtgaatatttattgattcagtttctaatttctttgattttcgtgctctattaatctcttttcaaagtttttgctttctaaattaatacagcttttgactggtgtaatgtaatctgtagtaccattgcctctttcagtcttgagtcttgactcacacattttcgtttatgaatagtaattggtgcatattttgtcaaattcgtttgtttcattaactgtgcttggacaaaaaaacaaacaaacaaattatattatagttttctcaaatcacttgaaaagattagtctaatataattgaaatacacaatgttgaccaccatctttcgagtcctaccttttcttaatatcagttaccaactttgttccaaaaaaaaaaaagttatcagttaccaacttaccacttgcaccttcattttcaatagttataaatatgatcgttttgttttataaatgcgtaaaaaaagtactatcgactaaaattttataaacaataaacttaacgaacagaaaaaatggattttctcataattggagaaatagaaactataattcaaacttcttaaaaaaaacatcttaacactataatttacaaaatagggtctcttttgtaattgtttgtaattacataacatattcaaaactttttgcattacttgatatttttcattttttatttttcttttttaattttaggtatttgaggcgtgaaatttgaactcaaaacttttcaaaatgatattataaccaacaaattttacataacatttctagttgggtaaataagcatatgaaattataaatagacaataattaaattttgtatattacatataaacaaaaaaaaaaaagataaaaattaaataatacatatttcat

SEQ ID NO: 75898 - DNA, 981 bp, Cannabis sativa
tgatgacaaaaggggcggtaataggtaccctgactttttaatccaaggttttcaacagtctttggttgacagtggacttcaagacatggagttatgtgggtatccgtttacatgggagcgtgcgcggggtactaatcattgatagaagtgcgtttggataggggctagctaatcttggttggttgaacatgctcacttctgctaagctccataatcttgaaatttcaacttcagaccatactccgattcttatggtcatggttcctgctgcagggcacaattctgttaagcggttttagtttgaaaatgcgtggttgagggaacctctttgttatcagattgtaaaggatagttgggggatttgtgagtctgatgatgttatgcataaaattcagttttgtggggacaagcaggctgtttgggtaaggaggttactggaaactttaaagaaaggttgaaaaagtgtaagaatgaagtgcagaagtggaaattggatcaggatgagatctctgtagccaattacaaataagcaaagaagcacttagctgaatgttatgtgcaacaggaagttttctggcatcaaagatcgaagcaactgtggttgcaagagggagataataatagcaagtattttcatgcttttgcaactacgagacgaaggaataattttgttgcaaaacttaaagatcattcgggttcatgggttgactgggataggggtttggatgatcttatggtttcttatttccacgagtttttttcctcttcccaaaccgtctggagagaagtcacaagcagcgtgcaaactcgtgtatcatcccagcagaatgttgagctactgttatcagtttcagatgaaaaagttcagaaagctttgttccaaatgcatctgaataagtccttagggcctgatggaatgaccccgattttttttcagaagtgctggccgatttttaaggatgatgtcatcaatatggttaa

SEQ ID NO: 75899 - DNA, 622 bp, Cannabis sativa
actctgcaggtttcatccaagattatggaatttcgaacgaaacttcaaaatctcaagaaaggagctttgagtcttaatgattacctcttaaaagtcaagtagaatgttgatttgcttgcatccgtgggtgaaactttaagagatcgtgaccatgtggctgctatattcaagggactcccgagcgagtacgacacgtttgtcatttcgactaatactcaagttgaagagtacactgtaggagaaattgaggcttttctgcttgcatctgaatcaagaatcgagaaatcagggaaagaattggacctcagtgccaacatagtgacagatgatcaagattctatgatggaagcgaatcttgcttggagaagattcaaacagcaatatggtcgtggtgttgggaattttggaaatcagtttgccaatcagtttggaaacagaggaaatcgtggaaatgagcagggttacatggctggacaaggttctggtagaggcaattttcatctgaatcgtggtggcagatctggagttaatttgaacaatagagttcaatgtcaactgtgtttaaggttcggtcatacagcccatgatttttttatcgatttgataagaactttacaagctc

SEQ ID NO: 75900 - DNA, 1020 bp, Cannabis sativa
gaagataagaaattagagtaaaaatttttagttagataattagttgtagggatttaattccagatatttaatttcaatttcattaaaataagttttaaatctttttttatttttgattaaattttaaattatttttatttaattttaaatgatttttttaaaattaattaggtattaatcaaactttagggagttaattaacaattaaaaataattatttaatcaaaacacattttttttaattttttttttattttattagatttttttttttaaaaaaataatttttaaataattattagataaagaataaaaattaaataacatgaacctatcaggggctgtcacgtaggtactgacttgacaattaacggtcaggtacctatggaagttccacactagtgacagaaggtatttttactgtcaaaaatgcgacttaggtatttatctgctacccggcataaaacttaggtatttacgccgcaaattactctataaaaaactcaaattttcattcctaagattgttattgacacgacatgtcgtgcccattttatcgtgccaaattaaagtagtattttttttttaatatgtattaatatatttgagtacactacatttttaagtatgaatattattataggtgtgcccaacttatgacaatgtgatatattgaaattgttatgattatattttgaataataaaatatgaccacgacatgtgtacaaaatagcataagtgaataggctcacatattaaagggattcatataccattaatatgcctcgagaaattactactaacggttttatatttaagtcttaccttataaaataattaaagatgagtcaaaaaaattaattgttaaatagaaaactagtaaaatcaaaatagcacatattgcaaccatctcggagataactgagtacataacatgcccattacaaaaaaaaaaatacaggatatatgagggctagataagtcaccacataaagcacatataacacgagatgaactta

SEQ ID NO: 75901 - DNA, 537 bp, Cannabis sativa
atgaaagggaacgaggatataaatgctaaaaggtactagtaatgtttagcaccctcttacatgtcaatattgttattggttcaactaagtatcatatctcatataatttaatataataatttttagagagtattgatagtcaatcataaagcgacacctctaaaaagtactaaacactaatagtgtccaatagcaacaatgctcaaactataattaagaagtttggtacaaccaattagataaaaagcatgattttcaaattcaattagttgcattgttttgtgtttatgagaatgatgatgatgatgacatatcacatatatattctttaaattctcttgttgtgaacattcttttttgtcttgtacctacaaaaactacaagaatgacactaaattggaaatgcaaattcaaatgaactatgataacaaattaataacctttttcattatgttttcttgttgtggtgatgatatatacatcttaggtactattcatcattacattacagaaaaaaaaatatagaaaagaattaat

SEQ ID NO: 75902 - DNA, 757 bp, Cannabis sativa
gaaggtactttacccatgatccttcaaagtctaatacacatgcccgtagcatgtcttttaaaatctaaatagttcttttggattgtccatctatctgatgatggaatactatactaaacttccgttgagtacccatagctcgatgtaaactctctcagaatcttgatgtgaactttagatctctattagaaataatggactttaggacactgtggagacaaactatttctctaacatatagttctgcatactgatcaatggagaagttcgtctgaataagcaagaagtgcgttgactttgtaaacttgtcaacaatgacccacatagagtcgcactgtcccgtagtcctaggtaatttaactacgaagtccatggcaatgtctttccatttccattctagaaggttctatggatgcaacaaacctgcaggcctttggttttcagctttcacttgctgacaagttaaacactttgaaatatactctactatatcattcttcatcccaggccatcagtacatagactcaagatcttgatacatttttgttatccctggatgaacagagtaaggagttgtgtgagactcatttataatttctctcttaatattgtcatccataggaatgcaaacacggttcataaactgtaacacaccattattatccactataaagtcattggtcttcccagctaaaatattgtctggagactttactaagcctgggtcttgatattgtgcttctttaattctttccaa

SEQ ID NO: 75903 - DNA, 817 bp, Cannabis sativa
ggatgactgaaattaattagatcagatcgaatggtaaaatctaacatctaatatataattagatcgaatttggattggaccaaaaatattggatgtggtccaataaatacctctattttttgctataacccaatgagacacaatattacaagaatatattaggctggcctattaaacatttatattacctgttatacccaaattttaactaataatgtgaagtcgacatgtgtacaggactggaatataaaccagcccaagttatgcattattaaatcacaataaataactcgcattgagaataacagttaataaaaatattttaactcatcatcgcctaggcaaaagcaagatgtgaataataactattaactagtaaattcagcgagacaataagttcaactcggggtgaacagaatacgtaatgagagttgctcaagacgaataaacaaagagcttgcaacttattgactcacagacatgcaagagcttgcagctaattgacccacatacttgcatgtccaaagggtgatattaacattcattcatctcactcttaacacgttaaagtaaccatcttgcttatacctcactcaaacagttaaggaagattgcaagatgcgtcatcactcaacacttagcatttttctacaaagatgtttaagaaagtgttgatagtaagaactcgtcaacgaaataagaagaacccaaaatggtattttaaaatcttaatagaagacttaaagtcaaaatcttacaaccttcactctctagaaaaatcacttttttcattcagatgtttctaaaaaaaaaaaaa

SEQ ID NO: 75904 - DNA, 917 bp, Cannabis sativa
aagatagttagggtgttacatccttccaaagctctccaagaacttcgatgcccccaatgttgcgattaatttcccttcttcggttaaccgtgcaactttcattgcctccgccatgaatctactaatataagctcggaggggctcccctggcctttgcttcactttgaccaggtcctctaaatgcaatgggagttggcgagaagaagagaattgtgcatggaatttcaaggagaaagccttccacgagttgaaccttcccagtgtcaacttgaagtacaattgttgggcggcttctgagagtgtggcaaaaaaaaatctgcaacacacatcccctcgtactccttgtaagtccatttgcatttcaaaatatttcagatgtgataaggggtctcctttcccagtatacatcttctaggttagcatcttgaacttgtggggtagctctagaacattgatctctggagaaaaaggggatccacatgctcgatccagctcgagatcattgtgcttttgatcggccagaccttggaacatgtttttcaattcatccaactgtgccttcatggatggatgaacttgtttggcctcttggccgaccaatgtcacatcaggatttcaatgagccggatcttgagcacgggccccgggctgagtggctggtggaacatattgttcgtctaaccctccccttctctttagatcatctttgagatcatgagctgttcccaatctattaaatagagatgcaccaggttatctcagtgactggttggtgtggccgagcacttggccagaactgctagtctgggcggagttattgggtataacccctcctgattaattaccatctaaggtcaggccacctaccgcttggcccataggggaaacctgtaaccggggattggacgacagaccct

SEQ ID NO: 75905 - DNA, 672 bp, Cannabis sativa
taaaggtagagagagaaaaccgaaaacgagtgagacttatgagtattatttttatttttttaaaggggtatattaagtcatattaaaattaataaatatgttaattaatattaatttttatttataggcattattttgtttactaactcaatattttatgaggaaaaaaaaaagaaaatacaaaaaaggaaaaaaaattacaaaattactatgggccggccctttaagcatttatacagctcatacaaatatttacaaaaataccatctcctctaaaccttcaacctcacggaacagaacgatcaagaactacagctctcgatcattcaaagcagcaacacaacaaaaatgaaatcaaaacgagagaaataccatcattaattctggcgaaatcaactgcaaaagaagacatgcaacgatctaaacagaaagtgacgaaaaaaaaccataaaaactgtgaagaaactgaaattacacatttgttttcggttttattcaattaaaacaactctccctaatatcgaaatctagattcataaaatgtagatctcccccccctcccccccacaatccaaaacaaggtatgatgtgaaaaattaaaaaataggtcatgaataatagatctagctaagttatatacagttgcattttggttgattactggtttccaat

SEQ ID NO: 75906 - DNA, 523 bp, Cannabis sativa
ttaatttcccatttgaggtttgttattgatttttgaacttattggtgattaatgattaattaagatgaaactgaatattatccaacacttgatctgagatactacagtatcgactgatgtcactcgatttgcttctgaatcatttaatcgtatttgcattatatattaatttttatcttcaatatagatatgagatttgaaatctcttgatttatgttatgtttagtgcttttgagttttgaagattttgtttctagctcagaattctcattcaacatattaaatttttagatttttatgtttaatgtttttgagttttgaagattttgagtaacatacttgtgttgctgagatgcaactctaagaccattcttaaatgatgtaacttgcatagataaggcttgacaagacttatgaatggccttactggtttatattagacacaaatgacacatagtttttaaattatcttgaatgtattcagctttttaagttttaattattgttttatttttcttaatat

SEQ ID NO: 75907 - DNA, 626 bp, Cannabis sativa
  modified_base (495)..(496): a, c, t, g, unknown or other
tttacaaaaatatctattgctctaactattcagccgcacgaaccaccttcttcaacaacaatagcttctagcaaccaaaccagcaggccaattgtaaagaaaccaagcaagacatagaatcttaataaatttcggcgacatcacctagaagaactgtaagaaatctaaacacatacaaattcgattaatgcaaaatcggacagaaaaactggttcgaagctaaaatccaaccttgaattacaattaaaatcgaagaaaactaatgctcctaatatcaattttcagatttataaaatatagatctgtctgaaacagatctggaatttctgttcaatccaaatcaagtacaaaccaaaaaaatgtatcaatacactagctaatgtttctctcgttgcattaacactgtttttttagatttttaatgggagatttattcatataaatcacgaataacaaagaaaatttgaattcatctagagccacgtacatagaaannttgttctagtttttaagtttctgcgtagttacattgtagttgtattaatattttaccaacgctgtataactagacatattaatgattacgaattgtcaacgatacaataatttttatgatatttgcaggt

SEQ ID NO: 75908 - DNA, 763 bp, Cannabis sativa
ttcttggcttaaagttggtgatcgtaatacttcctattttcatatgtttgctacatctaaaaaaaatgattaaaggtgtgtgtaattgtgggtgattggattacttcaacaaatggggttgagcaagaatttattaattattttgataacctatttttctctagtttcccttcgctgaatatgttatcgggaaattttatctggtgatgacaacaatatctgacacattgcaagaaagataacatctctgagttgagtagtctcgagtcatagcggtcgacctgggagaggtccctagccctacaccgaggttaacattaggaactctgaaataggtgtttggattccgatatcaattgacagctggaaggatgtaaagtctgcattccgcaagcaatttattgccgcaaacgagaaagacatggaagttgggtccttaaccaatgtcaagcaacaacctaatgaaagtctgaaggctttcattcaaagaatgatggagccagccagccgccaagaccaatgtcagcaatgatctaaagctgatggctctccagtcggggttggctgtaggttccttgttgtagggagagacgcagagaaagagagctgagatacactaagcaaatttatgtctaaggcacagggcataattgaccttgaggatgttggaatatttttaccaagatctacatttactaccatgtatgttatttaacatcctaatatgaatttataaaacaatgtaattgaaacacatataaag

SEQ ID NO: 75909 - DNA, 618 bp, Cannabis sativa
tgtatagtcgctaggcaacaaactcttgtatatgtatagttaaacttttgtaaatgtttttttttttttgtaaacgagatctcgaaattttataagtacgttactttatgtttttaattaaataagaaatttttttaattaatcacgattttcgataacctcgttgattagaaacgagctgcacagtacgctaaaatgcctaaattagttatagtgttacagtcttactcctaataacaacatatgtatttattgtaattagccatccatgtctacctttgatttgtggcacaataggttaggccatcctcgtgaaagaattgttcaatctatcatgaactcttgtaatattttttatagtaataaataatctagttctgtttctgaagcttgttgctttggcgaaattcacaaaatgccttttcttaaaattatctcaaactgaatacactaagccattacaactaattttatctgacctttggggaccctcacacaccatctctcacaattgttgcaaatgctataggagttttattgatgcctacactagattcacttggatatacctactcaaaaataagtctgaagccctaagaacctttcaaaatttttaaa

SEQ ID NO: 75910 - DNA, 775 bp, Cannabis sativa
attacggtaaatttatcatatctagttcaaatttaatatccgtcccttctcatgcatactccatacatctaacacaagcttactttaaccaatgccctggaacaagaaggtggtctcatgcaattggattctaaagattaaagaaggtgtgacagaagatgagcaagtaagattcaaggcaagattagttgccaaaggtttcactcaggtggaagggatagattacaccaaggtgttctcacttgtagtaaagtataagactattagacttatgctgtcaatggcaactcagcaaggttaaaaagtggagaaatttgatattaaaactgcatttctaaatggttatctagaagaagagatttacatggagcaaccatctagatttcaggtgaaacaagatggaaaagagatagtctgtaagttgtaaaagtccctatacgtccttaaaaaatcacaacgacaatggaacaaaagatttgacaactatgttcaggagattggtttcactaagtccaagtttgatcagtgtttgtatttcaaacacctagaagagtcaacagttgtgtatcttctactctatgtagatgatatgttaataatgggtaaagacaaggcagtaatcaaaggaattaaagataaactcaaaacagaatttgacatgaaagaattgggacaagtaaagataatacttggtttaaaagttcatagatccaagagtgatggagtcatgcttttaaagcaaaggaactacattgagaagatcctaacaaagttc

SEQ ID NO: 75911 - DNA, 558 bp, Cannabis sativa
atcaccatataacaaccctagctattatacatattatactcttaattttcaacttcttgtaatactagtatagaaaaattaggtatatatatcaatatatagaaacttgaaaccatgtggacccaaattatgagtgtgataggatggtagagatggggtgccaggctattggagtgcaaagagacacctgtaaactgtaaaggaatagttttagatttttaattttgtacagaaaatgactactttcttaattctacccaccaattgcttatcttttttctggtctcaaacttggtagcccctacacattgggaacctacaactaacttcttcacataccctttcaactaatttgtatgaaaaagcacctagcacctttctagtcttatgtatcgatatcgttattggtctaattaagtattggatctcatatagtttaatataataacttttgggaaacattgctagacaattattagacgacatgtctagaggtgttaagcaccactagtgtctaatagcaatgttcgacattcatagtgcttagcactgatgtgt

SEQ ID NO: 75912 - DNA, 741 bp, Cannabis sativa
aaataaatatgttaattatagaagaatatgttaattatagaagtataattaataaatatctgaaaattttatattcaaatagaaacgatatgatcttgtaagggagtacaagagaattaaaatcatacaatatgaataaaataagtcggtagtgtattaaagtatggaatatttaatatagaattaccaagtacgatttattatgcacaatactctagtgtgtataattttaattcgaatcacgtatgtggatagacatgtggtaaaagtactgtgtataattttgttatgcccatattttgagcactgaatatgaacatgacacatgtcatataagtctaaaagaatgaagaaaataataaaatgtgaggaatgaataaatatcccgcctcgggataagctacggttaaaaagatgtgataacctcgcgtggcactatcaatgcaataacttacggagataacaggatttcgaaacttgaccgagatgaacaaggcatgtgaatagcatgaaagaatgagttaagtggaaagggtagataactacttcttttaagagcttgcaactcattgacccacatacttatgggtatgttgaatgattaaggaaaataagcacatataatacaaataatttcaaaagactaagtctaaaagttgatctagaaaggttatggtgaggacaaacattttaactagcatctcgcaaaatacaacaagctatccctgaacaccgtcgaat

SEQ ID NO: 75913 - DNA, 1075 bp, Cannabis sativa
  modified_base (200)..(203): a, c, t, g, unknown or other
  modified_base (232)..(238): a, c, t, g, unknown or other
cttctttaatgtcttaaagcattctgcgaggtctgaggtatgatccttactttttattgattttaccaacatatcatcgacgtaaacctccatgttttgatctatttggtttgtcaacattttgtttaccaatcgctgatacgttgccccatcattcttcagtctgaacgacatatctttataacaatagagtcccatgnnnnttacgaagcttgtatgttcttgatgtggnnnnnnnatttttatctggttatatctagaatatgcgtcaataaatgacataagctcgtgcccaacagttgcatccaccaactggtcgatcgtgggaagtggaaaacaatcctttggacacgccttattcagatcaaagaagtcaatacaagttctcaaagttctgttaggcttaaggaaaagaacaggattagctatccacgagggacagaatacctcgcgtataaagtcgttgactaacaacttgtccacttcctgttttagtgcatcttgcctctaggaatccaagggtctctttttctgtctcttcgctgggttgcttggatcaacatttaaatgatggccgataatattagggtcgatccctatcatatatccatggctctaggggaacttatcctagttcgtcttcaaaaagcttattagttgctatttgagctgctcgttcaggttcttcccaatgtatacacactttgtgggacttcttggatcgagaataacctcctccaattcctgaattggttttaatagatttcctcatcttaaactcgggggtcgagatcttcgtcttacttttcctttttttctgccaagattgtcatcaactgatgacccactttcctatgctatagctctatgccatagcaatcgcgagccagcatttggtcaccgcgcaccactcccacaccatctagtgtttggaatttcaaggataggtgcttcatcgaattgactgcccgcagtccgatcagcgcaggatgacccaacaatatgttataagctgatggcaggtcgaaaactaagaagtcttgcataacagtagtagataagggtgcctcgccta

SEQ ID NO: 75914 - DNA, 1284 bp, Cannabis sativa
ttcttctccgtccagaggttttgcgagttgcatttttagctcttgaaaatctttttcacattcctcggtccactcaaattgcttatttcctcgcaggatattaaagaacggaacacacttgtgtgttgattttaaaacaaatctgctgagtgcggcaatccgaccagtcaaactttgaacttccttggttcttgttggggatttcgtatccagtagggcttgaatcttctctagattgacttcaattcctcaagcattgactataaagcctagaaacttacccgagctgactccaaaggagaactttaagggattgagtttcatgttacacttctagaggactttgaagcatatgccaggtcatctatgttcctcccagcctttctggatttgatgagcatgtcatccacgtacacttccatgtttcgtccgatctggtctttaaacatcttatttaccaatctttggtatgtagctctagcgtttttgagaccgaacaacatgacgttatagcaatacagacccatatttgttcagaaacttgtatgttcttggtctggtggatgcatcttaatttgattataccccgaataagtgtccataaaacttaatatttcatgtcttgttgttgcgtccacaagctgatctactcttaaaagtgggaaacagtctttggggcacgccttgttgaggtcggtgaaatcaatacaaactcatcatttcttgttcggtttgggtaccagtacgggatcagcaacccaagctgggtagaagcttcaattatgaaattattgttgcgtatcttctttacctcttccttcaaggctagggctcgctccttgtccaatagtcttcacttttgttgaactgatcggaagattggatcaatatttaggacatgtgaaattatagaaggatcaattctgaccatatcctcatgtgagcaggcaaaaataggtttactctcagaaatcttatcaatgctgattatacttcgagcggcaaaccttttccaatcttaagctttctggtcggaatattcgagtcgatttcaatctcttctagttcttccactggtccaacattgctgcttggttccccaagtcgaggatccacatcttcatccctgccttgggaggctccctacttaataatgttttttcccttgtccgaactctagctggagaatacttcctttttagccttggttatggcaaggttataacattcccgagtagcctgctggttttctcttaggcaccccaccccattctttgttgggaa

SEQ ID NO: 75915 - DNA, 723 bp, Cannabis sativa
  modified_base (29)..(34): a, c, t, g, unknown or other
gaaacctaaatcgtaaatttgaaaaaaannnnnnaaaaaaagttaaaaaaacagtacatgggataattcctcaaaattttataaggtttattttgtaagaatattttctaatattagaattattaattatattaattttattaaaagcaaatatttagtttaattgataaaatattctaaatatgatcaacgttatttagttactaatttaatttgatttagttgtccaaattatatttcctcattaattgtcaaaatattctgataattaattgtgggcgaaaccttgatagaaagtctcacctatataaatataagatcttggtcccaagctcactactcattctaaaaatacagaattcatctaaaagagagtagagagcttggaagccaccctaagacagagtagtcttacttagtagcagcttagtagcagtaggattacctgattcccagattaccacactaattagttttctatttgttttgcagatccaaagatcgtgtgggactaaagttcaaagaatcaatgactggaaatattactatcctatagttatattgtgtatatatttattcaattccgcatttcatatacacattcatgtgtttcatataattcatataaaatatctaatagttagtatcatagcggttttatctctgtcttgttttatctaatagttagtatcatagaggtttcaatggttacatttttattgt

SEQ ID NO: 75916 - DNA, 781 bp, Cannabis sativa
tgccttgagtcgtttcatctcccactcaaccgacaagtgcatcccgttctttaacaccctgaagaaatgttaaaagtttgaatgtaccaaagaatgaaaggaagcattcagaaggttgaaagagcatatggctaagccatcagtactgtcaaaaccagttcacgaagaagacttatatttatagttagctgtttccgagaacgcggtcagcacagctctggtgtgggaggaggaaaaagttcaacactaggtatattatgtcagcaaacgcgtgataggggttgaaattcgatatcctctgattgaaaaactatccttctgtctcttaatttcatcaaggaaactcaggccttatttccaagctcactccatcaaggtatttacaaatcacccgctgtaacaagttttacaaaagcttgaggcctcagggaggctcctcaagtgggccatggagttaagccagttcaacatacagtacattccacgtatctcgattaagggtcaagaattggcagactttattgtagaaggcaacaagatggaggccagcgccagtatgccgactcagggtacgcccacgtggaaagtatatgttgacgaggcgtccaatgaaaatgggtctagggccagaataataatgatctcacctgatgggttacgactccaggctaccctataattcacattcccgacctctaacaatgaggtcgagtatgaagccttaatagattggccaaggctgtaagggccaacagagtagaggtgtacagtgattcacaac

SEQ ID NO: 75917 - DNA, 572 bp, Cannabis sativa
agttaagtagtttgtagagttttatcgtcaaaatttgaactttgagggttaagtgcaagtagagtgatagttgggaggatttagctgcaaaatatatatattttttttttaataatagtaaaatacaaatattgtatttttctaaaaaaaaaaaaattaaggactttttgttaaagggttttttaggaatttggtgggggtttgagcatggcccctgctgccccatccttgagttgaccctgtagaacatattaggagcatagtcctcaacacccctttcttttgatataccttgacaacacccaataactaggcctcatacactgtgaatactagggctcgaccataccctaagggctcaaccacacgcctcgagcactagacaccaaaaagactaggtctcactcaccatgaatatttgacacttgaggattagggcttacacacacgactcttctctttgacttaagaccaaggaatgccccttaggtataccaaaggaatccacctcgacatagtctaataattccagtcgtgtgatctaatgacaataccttatgaaacttgaacac

SEQ ID NO: 75918 - DNA, 618 bp, Cannabis sativa
tttaaaaaataaaattataaataatatttatagctacaactttatagtaattggcttttatttattttattgattaaatcaacagcctactttcttatgtattaattatttaacaaactttattactttgagtttcaggcgcagccaaagtggaggagcactgaaatattttgtacaatatccaatcaaaactattttctgtcgaatatatatactttacaaatagattaattattgactcccattttgcaaataagtgtttcaatattgattcaaaaaaaaaaagctaataataataataataataataacaataaagattttattagaaggttagttttctttcttcttgtcactactcatttcatacttaattatagcatataatttaataaataatttttatgcaatctatttattattagacgataacgtaaaaattaagtattgttataatgaagtaagagaggctttgttttcaattcctggtatcaaggctccaggtccagatgggtatggtagtgctttttatcaggataactggaacatagtgggaactgatttcacagaggctattttgtcctttctcactattgggaaaattctgaaagagatcaa

SEQ ID NO: 75919 - DNA, 756 bp, Cannabis sativa
acctcacctgtgtgagatttactactctattgcgtatacttgcgtagcgtttataaaatatagcaacaattatctctgtgtttggggagatagagggtagaaaaatcttgactattcctagagtgccagcctcgagtggagacactttaatttggaagtcaaaaaaaagtggagaattctcagtgaaagcggcgtatgtggaggaccaacaacataggtttggagataaatttgtcttgtggaaatggatttgggattctaaaatacatccaagaattgctctgatgctatggagagtgctcaataatacccttcctctcaaatccaatctccatttccttagtgataaagcctgctctttctgccatgattttgaagaaacaaacaaccatttgttcaaagattgcacctttgcccgtgggatctggttcgcgggtcctgagccttggatgatacactcaatcccaggagagaacatagcccagatattagaaaatttaatctcagcttcaggaaattcaagaaatcatatgctggtctatgctggctgtgtattctctcttatatggcagtagagaaactttgctagaaaacatgggaaagctgaaaacataaatgttctggtgcataaattatcttcaagttttaaagaattctgggatacagagactaagacagactccacttacaccatgcaacgaggtattgttaactcatgccgttatgtgattatgacagatgcatcctggtgtgggg

SEQ ID NO: 75920 - DNA, 826 bp, Cannabis sativa
  modified_base (779)..(788): a, c, t, g, unknown or other
tgttgatttgggaaggtgacaactgctgtgtcataggtcttgtcagccttacttttgagagagagcatttagtgtccccttactccttttgtgtgatcctaactaacagtcatggccagaacaaaaaaacatgtcatagagcactaccatacgatcctcatattacagggtgacaataatgggtagagtcagggttgtagaggaggccacacaacttcgtaaggatgttgatcaggcaaaggtgcctgaagtcgaccaaggggtcgagagttttgactctgaatttgaggttgaggacgttgcgcctgttaggagaaggagttatagattttgttctatccttcccaagtgctctctgcgtggatatgatattgacaaggagccattgaacaggcttggtcagccttcaatgatggtatgtcttgattcaatcttcaaagccttaggttcttgatgttagatcatagggagacaggtgggtctctctcgcatctggtatctctatcaagacttttgatgagatactagccagtggtctagtgagaggtgtccagtttgtgatacccactagagatcaaagagcacacctacttactatcggttggatggcttggtcggagcatcatatacagtagagggcagtgttactactacacccatacttcagagacattgctgcttactttgggatgtgtccaacacaatcatcctcggtaatgtttattttatttgcaaagctaggctggcctcagcctactgttggaacttattttaccagnnnnnnnnnntactaacatgtatgtttgattaacaccctaaatatgaa

SEQ ID NO: 75921 - DNA, 558 bp, Cannabis sativa
attacatgacaactcattagtttttaaatttttttttaagattacccaaatatattttaaattataagctactataatataacttaaaaataattaattgattactaagatgtatacaaataagttttagatgtaaccaaaatatatatatatatatcaaattatatgatataaaaataaattttttatgtaaagataactaattggtttcttatccacacttttagtaaccaaatagttacttttaaaaatgtaagaaaatagtaataatacaaaataaaaaaatcacatacgtcagatttagctgacgtgacacgtcagtaatagtagtaacattattattgtaaattatatacaaaaaatatatatattattgtaaatttcccttgatttttccttaaataaccaaaaagctcaataaggcccaagaccaacacacgttgcctcacatgtacacaatcaattgagagtatgagtattgaacacggaagcaagattgaacaaaatattagctaaagggtttcctagctgacatcatcctcactttgaccaaaaact

SEQ ID NO: 75922 - DNA, 912 bp, Cannabis sativa
ttattattatttaatatggagtatattttataacattttaaatatccaaaaaatttaatagttagcaattactatagataaatattaagttttgtaattattataataattatttaaaacataaattagattaacaaatttaatattatcaatcgcttgttttgtggcgacgtaaatatatatatatataaattaatttactatgttagtatttgattttttttagttcaaacattggtattttattattactattattataataattttttttttaaaattgaaatactatgtaaaaatacaattaataaggtttaccgtggagattagtttgccattttgttatacacatgatttttttagaaagaaactatatacataacgtggagattaggggtttcagttattatgttgatgattatatatgctccatttttatttcaattattaattaatatagaatttttatttgaaaagaaattaatgtagattaaaattgagcaaaaaaattagaaaaataaaaaaatagtgtagagtgttaatgatgttatgtcaacgcctatatcctcaattttattctaacaatagtttttttatgacctttgatgaatctcaagagcctaccattaaaaatgacttttctctaaattgaataatttatatgttaatgaattaatcatgaataattcaaagttaatttagctttgaagttgtcttaaaaaaagtctgtctccaaattatcgataatattttgatgagtgaaagaaagattaaggtggcatttggttggaggtaattatagaatggaatagaagggaaatgaaacaatttttattctattctttcgtttggttgcattttaaaatattggaataatctttccactgatttggtagaatgaatattatattt

SEQ ID NO: 75923 - DNA, 734 bp, Cannabis sativa
acgtttttcaagaaaattctttgattagcaaagattgcacggtaattgaaaaagcattgtagcgtgccttagcattagggcgttacagttcctttctagtgaaattcccttgcaattccattcccctcgtactgtcagtacgattcaacgtggtggccgtgccaacacacctcctttcctcccttgggcccaccggagctccgcttccacctcttgacctctgttcatcattaatattaaaggattgcatcctacgtgccattatctccagacacagacctcttctattagccaccgtgatattacgagtatcaaagcagcttcgcaccggcgaattggctttcatccatactccatatagtggcactgcttctcctacaggcgggaacccatattctttttctcttgaacactcctttcattcatgaaatagatatccacagttaaagcataacgtcgggattttacaatacttgaattggatccactcttttccccctctattaatgctcaagtgaaatcctgccataattcgttgagtgaggtcgatctccaccattaactttaagaaacctcttctagcaatggtcctctggtccactatgtcaaacttgacataggtacccaccttggccccaataaccggagcattctgaactgccaaataaggggttgggagtccatgaatctgcacccacatccttgccatctttatatcaaccttgtgccaacat

SEQ ID NO: 75924 - DNA, 917 bp, Cannabis sativa
ccgtcggtcatgatcatgttactcgggtctgtatatacatgttcttaagcaccatatggactgtaatatcatcaacaagaccttgatttgccaagcctactcgcgtatcagattgccacccaataaaccaatataaataaatattgacctcatttttagtcaacgatgctgaattaattaaagtgattcgaaaaataaataattatgaataataattatatgaaattaagcaaaaaaaagacaccgagagttatagaggttcagtcccatcatagtggtaatagcctactccctatttacttgtattacttcttagaagagaggcaaaaagttcttgacctctctcgaaagcttataatttttacagcataagagctctcttgaaagtatgatccccgaatagtaaaatgactccattatttataggaaagaattactaatattaggtttcccaaaaacaaaagactaaaaatgaagactagttactttactaaattacactatttacgtgtagaaaccccattaaaataggaatttaattgaaaaaaaaaggtggaaagtatctttaaagctttctctgtcgcatttactttattctcaaatgagcagtatatgatggataatctactctagacgacagaccgataaaggttccctctttccaggtctataaatgcttcacatgtcacccaaataagcaccatgtcaacctgtgcagagtattcaacttcgttggatggtgaggacccactactacaaaaacaccttttaaagacgatttttaaggcctttcagtgttgattttggcaaaattcgctaccgatgctaatccaggtaatgttgtggggtctaaaataacggacgctatagggatacatatggcgtcgggtatttgttaggcaccgaagccaaggggg

SEQ ID NO: 75925 - DNA, 725 bp, Cannabis sativa
tctttttctaggtatgtgctctcagttacacgtatgttattgaatttttttaagatgccgtgatgttcggagatgtgcagaaaatatattacaatcaattcaccattcaaatagttgagccgatggaagattaggatgaagttttactatgctttcttttattttttttaatagtattctatattaagacgttatttaataattttttttctcagatattactttttctttaattttcgttacataatgtttgctttcaattttgtaaaatacatatattgttcttttaaattttcttgaaacaaatcataaatgttaaagtcatacattgttatgatttatcataaattatttcttcacattaaggataactacattatgatgattatgtaaatattactattaacatactttttattattaataccaatgtacatatcataattttatatacacaactatgttttattaaccgaacacaatgacacaaagattattttaataaatcaatcattcattaaataaaatacttttaaagttacacaaagattactaatcaaacacttttagttacagagtttaaaaaaataaaaaatcaaaccttaaataaaactaacacttacgtggctcagcacgtaaatttcacctaataaatatgtatcataatgaattttaaacatttatttttatccattttatatatatacatatatatctttatatat

SEQ ID NO: 75926 - DNA, 833 bp, Cannabis sativa
agaaatataaataataaatatatggattattatgatctcgaactatttttattttacttcctatatttttatggtaagtttaatcacaaagataacattaagcataacaactaatagaatatcatacaaacaacttaaatattttcgtcctcaatcaatttgcatccctaataattagagcatattcaaatcttatcttctagaattttaatttgaattcatagataatatagatggccagtaaataattatagaattaaaacagattttaattgaattaagagaagaagatgaaattgaatagctatattaatccataaaataaattcaagtggttcacataataatctttgaaagaaaattagttcataatagtccaacacaataaagagtcattaatgaaaaatattaaaaataaagatagatgagaaagaacattgttttgagttcttcaatggtgtcttctacttctagccttcaacctatgctccaaattggcctccaagttcgaatagtgtacaaagctttgccttcagccctctctttatagtgaaaattcgagtttcccaaaaaatactaaggttgccgtcttacaatcgatttcttcttttctttgctgttttttgaagtttcccattttcagtttcttccagcgacgaccaatagtattggtcacaactctcttggtataattcagaattggacaatttaaaatattttggaaagtagaaagaaagatctataactttcattcaggaattttctctaaaagtaaatggatcatagtcaaaaattgacttgaagctgcaaacattattttcaatcatcaacga

SEQ ID NO: 75927 - DNA, 591 bp, Cannabis sativa
taataacgcaaggagagtatcctccaactaaatacaatttgtatccaccaaaataacatatttagctaatatgtgagcatcagtattatcatatctagaaattctgaatattagttagaatacaatgaaagtcaaaaactacatctctagataatagtaggtaaagactaaatatagagaaaaaacagagaaagaaaatgtaaaatagtctttattgattgaatgaattgaagcattacaaaggaatagctataaatagctaagattgttatgtcaacataaccgacatacaaaataacggaattaacagaataaactaaccaactaatcttaatatctaataggccccctcaagatggggtatagaaatcctttacacccatcttggagacaatatttttgaatggagttggaaagagtgctttggtaaagatgtcggccaagttgttttaagaagagacatgattcatttggagagttccattagtgatcttttctcgaactgtatggaagtctatttcaacatgtttctttcgctcatgatacaccgggttttcagcaatgtggatggcagcactattgtcacagtaa

SEQ ID NO: 75928 - DNA, 848 bp, Cannabis sativa
tgaaaacctttcatcaagattttcatttagaaaagaattcttgacatccatttgccatatatagtaatcataagtggcagatatggatagaagaatgtgaatggatttaagcatcaccattggagtgaaggtttcgtcataatcgagaccttctcattatatgaagcctttagctacgagcgtagttttaaaggactttaccttcctttcaatatttgtcgtcttttcgttgctgagatccttccgagatcccctagcagagctgccgcccaagccaatagaaaggagtccttagggttttttaattttaattatttaattatagatttattgataattatatatttttttagataaatattgatgtctatatttgatctgtaataatgtataagatataatatgttgtgtaataataagttttaaacgtactattataattctctcaaaaaaaatgtattattataatttaaatatatataataatatatattttaaatatttattaattttttttatataaaatagagatgcaagtctagtaaaattggacttaaaatctaatattttggtaagtcttattttcaagtctagtaatgttggactagaaatttttttctagtcgaatattgttggacatgaaaaatacactttttatgtccctcaatattatgtccaacacaaaaaaggactacaaaaacttatctagtccaactttaatggacataaaaggggtttcttgtagtagtgaatgccttgtaggggaagagcctgttggccatagtttacttccaatagctctttctccttcttcaagccttcgagatctctccgcagtgcttcctttt

SEQ ID NO: 75929 - DNA, 890 bp, Cannabis sativa
ttaggatgttaaaaacatacttattagtatatctagatcctggtaaaagatattccaacaccatgaagttagaactgccaaattcacaacttcatattttcacttttctaacaaggtgatttacctagaaccgagtattttcgagtgtcttgttttcacaaaacagcaacttctctgagaactagtgactaacttttctagaatagagaaatggactaagtgatgtcaaaatataccttaggcatcaaaaaacacatcctaacacatttcccactcacctaatgtcctggttgacatcacatgtcaaccttggcattgtgcccaaaataacctttattaaaatggtcataactcactcaatattgattcgattgacgtgatttaacttgagttttgaagaaattttaatgatctatcaagtcatttatcaaaattcaatcgcaattctgaaattatcggctccaaattacatccccaaggaagttactgttaacgcagatttttgttaaccaaaatttgagccaaaacttgcacagaaaaataaagattgtaaagaaaatgacaatatgaacagaaaggattgcttacgtggttttgctgttaaaattctacatagtaagtcaatcttattcaatttttgatggttttttagggctttttttctcttatgattttttcatcccttttttaatctaacttgcctctatttataatcacatagtaggcagttaattacaaagttgactgtaatctttacaacgtttatcccctgaaattgtggggtttaattacatatcacgtagtataaatagggttattattgaatggggatttcttgaagagattctaactggtctatattttggatggagtacttatctagactgatg

SEQ ID NO: 75930 - DNA, 655 bp, Cannabis sativa
cagcagttgtttgggacggtatggtagcagcagtagctttgcgatattgagcaagatatgagtctaaatagctacaaatcacctccgcaatcttaggcttagaaccatgaatctccttatttctttcagaccaaatacaccacataatacatataattctctccaaatcagcatctttgttgacagtagcaagataggaaaaaatatcataccctttaaggttacctatgttgggcatcaaaacttggcactttgatatcttccatacagctttagcacgagtacagcaaaaaagagcatgtcacacacactcccaagcacataaacagagtgaacaagctgatgatgtcgagatcttacgatgcatcaaattggcagtcgttgggagagcatcattaataaaacgccatgcaaaaatcttgactttcttagttaattttagagaccagaaacgattccaccattgacgattagatgatgaaggggaatcagcctccatagattccaaacttgccgctaagtggtagcccgatttcattgtgtaatagcttgtgtctgagtggcgccagatgagcgtgtcctctctaggagtgggagcaagcggtatggaaagaatgcgttcaatatcattaatattcccaaaatgatcttccag

SEQ ID NO: 75931 - DNA, 618 bp, Cannabis sativa
acataccttatagttgatagggttttgactattccatcatacattttgaatcttatagatccaaagcctttgatttaaaaggtctgattattcattatgatcactttacctcctttagattccctgcaatcaaacatgtaagctttatcattagtcatatgaaaagtacattctgaatctaaaatcaatcatctttaaaagatgatgcaacaatataaactttaccactatctgtactatcataaccatctccatagttggcttggttatccttaaatgaattagatttagggttagaaatatctctctgtcctttgtatttcttaggtttgcctttgttcagaaaataacaatccttttttgaaatgtcctggtttgtcaccgctgtagcagccagtaggatcaattgggcctttagagtttgatcttcccctattatgattgttttctttgtggtaatctctattgtggtttctgcctttaaagtgtccaggtttcctattattaggtctcccttactgaaattcacttcttcattagaacctccatgtttctcacttttgatctccaagtctttagacttcaaggctgaaatcactgttggatatttattttacc

SEQ ID NO: 75932 - DNA, 890 bp, Cannabis sativa
atatatatataaatcaaaatcaatatatgaatatgttttgtttgttttaggtggaaattttgttttggtggggtgagagaggtgaggtgagaaagggaaattgagagttgcttttgggatagggaatggaagatacaaatgatgataattaataatgaatgaaatgtatgttataatgttatgtttatcttttgttttgaaaaatatttgttatttattattggagtttttataaaattaatagatttgtgtaaaattttataattttgctagaattttttataaaaatattatctttctataaaacaatagtaaaaatttaacacaaaagacaatatttttgaaacaaaatttaggataaatatcattattttggaccttgtattttgtaaaagttaccgattagatcctgtattttgttaaatgacaaaataaatcctgtattttctaaaatagtaaaaataggaccttgaacttaatttttgacaacttgttttttaatataatcaacttgaaacaatttctaatacaaacggatacaaaaatataaacagtttagtcataacaattttagattggattataattaaattttattttgataaaaaatcaattcaaagtcctatttgtaccattttaaaaaatataggatctattttgtcatttaaaaaaataaaatgtccaattaataacttttgtaaaacataagatccaaaatggtatttactccaaaatttacaccacaaaaaaaaaaataaaaaaagtaaaaatttccctttattacttatatatctttacataaaaaatttaaagcttttgtgatggtaatactgtatttttgtcctttttctaaaaagaataaataaataatgataattactgtttttttt

SEQ ID NO: 75933 - DNA, 1405 bp, Cannabis sativa
acatttctcgtattagaactgtgacgtttcgatctttgagagataactttgtattatgtattgaattgtaagagtacaagaagagttgatatacatgaattaaaataacagaaagcgtaacaatccttttaacaacttcttactaacacaactaacacctctgttatttaactacctggatccttgaaagccccttcaaactgacagtaattttagaaaccatacacagcttgtgcctaaactccgataacctagtgctagagatagagtgagacagtctgcaacctgagttgtagcaaagacatatttcacttgaatgcgctgttgtgaaaccttgtctcaaaaatgatgtagatcaatttttatatgttttgtacaagaaaagatagaatttgcagcaaggagggttgtgctgtgattatcacaccatatcaaaagaacaactacttcatgaatttgaagctcatggagaagcagcttaaccaatgtaacctcaacaacaacactagcaagactgtgaaactctacttcaattgatgacttgttgattgtaacttgcttttgagatttctaggccacaatgttacctccaaagtagatacaacaacatgtggtggagcgcttgtcatctgattagatacctaatcggcatcatagacacatcaagaaaaaaaaatctattactggtttaagcaggagaccatgatcaagagtacctgcaatatatctcagaattcattttactataatctagtgtgtatgcaaaggattttgcataaactgacacactttgttgacacaaaaagaaagctcaggtctggtgatagtggcatactgcagaccaccaacaataaacctatagagagtggcatctttcacaggttcattgcctaagtggagagtttaagactactattcatttaagcgttttgtgtgtttatattctgcacatttgacttagttaagtgttcttgaagatactttgtttgtgtgagtaagtggccagctggagttcgtgtgacttggattgcgaagaagtagtcaaccaagccgaggtcttttaaagaaaaggtagaactcaactcttggataagttgatcaacaggtttgtcatcactacccatagtgaggatgtcatctacagagacttagatgtaaatgcatgaatgagaggtgactctgatgaagagagattgatcatctcttgagaattgaaaaccatagcttagaagtattatagacaacttctcaaacttggcctttagagcatgtttaagatcatacaaggcattgtttagcttacacacatacttagggtagtctggatcaacaaaccctggtagttattgcatatagacctcttcctgtaagtcctcattaaggaaaacattgttgacatctagtt

SEQ ID NO: 75934 - DNA, 959 bp, Cannabis sativa
aattagtaagctttacttgatcacgatctgaccagactagctcttggttacgcatgttgttctaatagtatggatgtcaggcaaaacaccaggagtcagggtaactcgctcagatcttgtggtggatagggagtttagattcccgcaaatgttcgtggtcaagctagagcccctagtgggagggcacacgtagaggtgatgttaacccgccacaggctacccaggctgcccaaaaatgggaaaataggtgcagaaatgcaagccagaattaatgagcaagatgaagagattagatgcttgagacaacagggtgctcctgcaatccctgctccagaaatataggtagctcctgcccctgctgtgcaggcaggactagtcgttgcagtgaacagaatggaaccactgtatgaaaggttccacaagcaagcacctccagtctttctgggaggtcccgatgttatgaaagccgagtagttgctaaccgtcattactagaattttgaattttataggcgtcaccgacaatgacaaagtggcctgtgccacatttcagtttcaagaagacgctctagtatggtgggacatggtatccctgacccatgttgttactacgatgacctgggaaaagttccaggaattgttcaatgtgaagtacgataatgaagcagtcagaagtgcgaaaagaaaggagtttactcagctaactcagaaagaaaatatgagtgttactgaatacacaactcaatttgatcgattggcaatattggcttcgagaatagtgccaaccgattttagtaagaaagaaaaatacctagacggattgaattcaaagataaggcatgacttaatgatgagtactgatgacaacaccacttatgctgatatggtgggaaaggcactgtgagctgagggcgcagtggagtgcaccctagaatgtcgagggactcaggttgttggtgg

SEQ ID NO: 75935 - DNA, 622 bp, Cannabis sativa
  modified_base (495)..(518): a, c, t, g, unknown or other
tttatatctgaactaaaagaacatagcaagggcatgtgcttactgcctaatatcattaatgagatgactcaacattttttataattttattaaattaaaataaacaaaacctaataatattaaattacatcaataataatattatattagtgttaagcatactcgagtttatagtatttttcaaactataataccatctaaatagagaaatgttaaaagacattattagtgcctaacaaactcatcgatatcatactactatagatgtaattaagtattaggtctcatataatttaaaaaaataatttttagataatatcgttaatcaatcgtagagcgctacctataaaaggtattagatactgtccaatagcaatgctcattcaaatataactaaatatctaacgaacattattgctattagggcaccagtggtacttagcacctctagacatgttgccttgcgattgattagtgatactctttaaaagttannnnnnnnnnnnnnnnnnnnnnnnatacttaattagaccaataataatattaatacatatgaatactagacactattggtacctttagaagtagtatccaactcttcttcaatgctaacatttattat

SEQ ID NO: 75936 - DNA, 873 bp, Cannabis sativa
  modified_base (59)..(59): a, c, t, g, unknown or other
tttttaatttttaattgtatcacattttaataacgtagaaaaaaactagcataaaattnagtatacgtgcctcgcacgtaattttttgctaatatatgtatatttatgtatatatgaaaaaaaataataaaaaaattattaaattaacaaacaaataggctaaaaagtaaaataaataaataaattaaccttataatattttactatatatatataaagttatctaaattctttttaagcaatgtgatcaaatatcacaccaacaaatatatatatatatatacatattattttatagaagttttaattttattttaattactattcttaattaattaattactcaatcaatattcataaacctattaaaaaaagtaaaacatgagaaaattatgaagaaaaaaaaatatttaaagcaattttaaacttctatgtcactgtcttataccttaactttatatatatagattcttatgtattatttgtagaatattctttgagtattcgctattctaagtgagtattcacatatttattttcaagtgttcaaatgatctttgaatattcgcataattttagtattgtctaaattcatccgataacagcctcatttcattactgttagtttaacttaaatacttgtggtaagtattatagaaatattgttttactttgggatggttaaacttcacccacagatctttgttcgaaaattatgagtaacgttactgttatatccctcaataaataattttattataatgtggaatgttttggtgccaccatattcagttaccgaaactatgattaccgcatgtaaaattctagctgacgtcagcaatttatattgtatgccagttattaacattatat

SEQ ID NO: 75937 - DNA, 830 bp, Cannabis sativa
aaaccctagatatttgcatagtttgttagttaattacaaaagaccaaaataccgttcagtctagatattattcaactattatgttgggctattaggatccaatttatagcccatgagttgctctcgacatgtagaagtgtatgggaaaccctgatgaggacctcttgaccggccagacccttgtagagggcaggctagccggccatggtgcagtcccaaggctggccgaccatagggccaggtaggggtggttggctagctcttatgagggagttagtttgacactatgaccgttttggtgttgggatctccatttgcttaggtgttgagttttcttcttcctaatgagtgttattgccacgtggtactaattttgtccacgtaagtatgccacgtcaggaggacaaaaatcgggataacatttgtcccccaagtccctatgcagatgtttgtacggatagagactttaccacctgtgttggtgcggtcgagcctgttgtaccctttgctgaataaaagttgattcattttttagccttttgtagcactttgtcttgactgtctaatctcattgttgtagagaaatagctgctttagttgcctttatgatgtgtaggtgaggtaagtgaagaaaagaggccaacatgcattacgtaagtgactatttgggggaaaaccttttttcacttctcagtttttacttttcactttctctcactagaaacttgctttgggaaaatctcttccttctctctaaaggaccaaacccacaagcatcatcttcttgggattcttgtgtcctgtaaactatccaagcttcccaccttctt

SEQ ID NO: 75938 - DNA, 1448 bp, Cannabis sativa
taactgcaacaagtactcatacgtccggctggaaaacgactgcgtttcgtacctcccaatgcaaataaacgcccacctaccttacctatattattatactacacctatatatatataatcacgaacatttctattaggtatcacgtctagcaccttctcgacatgtcacgctgtgattggttagcgatactctttaaaaattattatattaagttatgtgatatctaatatttagttggaccgacacctgccttttagcatttctcatatgatcactactctctttcgtctatatactaattatactaaccagtaaggtgagtaggccatgcatgcatgcagcttaatttgccaagtgccgatccactttcacgtttatcaataataaaccaatggaaaaagtatagtgaccgtttaatttgcctctatctctaatcttccatcaccatcattccctataaatacaccttatccgttatcttattaagcacttcatcttcattaacctatcttatctctctctctgaagagtatattataatgagggaaaggattcaagatactcttgcagctcaccgcaatgaacttgtatctcttctctctcggtacgtacgtaatgcattattattatggacaatgttgttggtttttgatcatgaataagatctagttcttagttaggttgttgatgaatatgtacgtataatcaatgtaggtatgttggtcagggaaaagccattctacagtctcatcagctgacagacgagttgaataatatcgttaaagaagatgaaggaatgcaaaagctcaaggacagtccttttaacaaagtcttgcaatctgcacaggttataataacttaaaacacataattaacatttttaatctgcacacttaatatatatatatatacacatagaaatgctaagtgtcatttaagaggtcgcatactcggtgaaatttaatatggggttacaaaaattttaatttaataaataatataaaaaaccaaatgtacatttatattaagcaacttatatataggacaagattaggaacaccacttctatccatgcagataaggataattatgattttggcattttaaaaacataattcaattttttatatatgcacggtccaagataaattatacactataaaaaaaaattatttttaatcaccatcaaataaaagttcgtatttaaaattataagtcccataaattacaatttgttgtgactaagtaaatttttaatcatagtacttattgtgattaaaattatattaataacaacatgaatttaaatactatgtttagtcataagtaattcttttatattaaattttttattgtaattaaaaaattgtcaatgtggtcttttatataacaatagttacatagtaagtaatttatctatttttcaacaaaaaaaaaaaatctaaat

SEQ ID NO: 75939 - DNA, 557 bp, Cannabis sativa
tgggtactttgggagaaattcatacccgttgcaggagtattcaatttcggttctgagggagtagttggccttagttctcgggatcgggacaggcttctgatcgcggatgctccccgcatcattgcctgcaggagagtccccttcacagaggcctttcccgtgagctagggcttctatcttcctggaacaatggtcaacggtgtttgacctgttgattatcattgagcctctctatgttagaatccacatgttaagcattcaaaaatctagacaacaaaagtaaatctagagagttatatgtcaaggaaataagaagatagccaggattaaagactgcattgtcggttatatatctatgataaaaagctttaaggctatataatagtaatgttcaaaagtagagtgtctagaggccaaaagtaagaacgtgaaagccctggggctaaaaataagtagtcttcaatagtaaaaggccagtaggccatacagaatatgaaactagtatgtatatgcaaataaaatcataaatccagaatactaataaagtggttttaatc

SEQ ID NO: 75940 - DNA, 753 bp, Cannabis sativa
actatgaagggttctgaagcagttcagcaaaactatcaagcaacaagcaaaaggagttaagcaactcgtcaagaccctaaacaaccatgtctggctgccaaggggagtacataggccgactagaagaagcttgtatggtcagtcagggtttgaacataagctcgcacgccaaagattaattcccaaaccaaaaagggcctgttcgaccaaggatgcctgacctttgtaaggaaagttgtacaaagaagctagaaaggctggccaacacatactaaggttgactagcacatactaaggttgaccaaaacatactaaggttggccagcacataccaaggctgacaagcgcttaccaaggctggcaaacacataccaaggctggtaggcacataccaaggctggcaggcacttaccaaggctggaaggcacataccaaatctggcaggcacgtggaaaatctggtaggcacatagaaagctggcagatacatgccgaggctgtagggacaatacctggccagccataggtggtcataggccagctagaccctaaaaaataggctggccgaccaccttctgcatacaactcctaccaactgagcaaagttatgagacaggcacaatagcaccaaaaaataggggttttccctcgagatatcaatcttattttctaaggatttagttatccttttttgtaacttaaataatagataaaaagattatatatccccattttaaagagatgtctttaccta

SEQ ID NO: 75941 - DNA, 895 bp, Cannabis sativa
aatgaatcacaataattagtggcattatagtaaataaaaaagaagcatttattgtgggctaaaattgacacaatgctacatcttgtgccaaatttagttcactttttaaaacactattggagtataattttttataggtgtgctaaaatatagtaatacactacctttttggcactccattggaaatgctcttagtaaccaaaaagttacttaaaaatgtaagaaaatatataaaaaaaaaattgaaaaacgttaacaaaatgtcatatgcgttagatttagctaacgtgatacgtcagtaatagtagtaaaattattatcgtaaattagatacaaaaattgtatattatttggacttccctaaaaataataaaaaataacacccaaacattatcaaaataacaagaaaaaataacatacaaataataaaaaatcagcatcaaattaattaaagtacaacataaaaatacattaaaagactatattttctgtaaataaattcataaaaatcgtaaaaatatttaaaatttcatataaccatatttttataattttttgtgttttttgtgtatttgtgaaataatcctttaaaaaattcaacacctattttgggttgggctatgcatccaatccaatgcaatatttttctcctcatccgattaaattcaattagtaattacatttgaaaaatcaccatctattcaatccaattagacctcaaaatccactccaatcaaattattaattatattgatcgtttttctaattagctatctaattacacacttaatttttaatattaatttaaaatataaaaaaaaatactaaaaacctaaataatattttttatttaaatttaatactccataacaacattaaatttaaaaaaaaaaaa

SEQ ID NO: 75942 - DNA, 723 bp, Cannabis sativa
atatgtattagtttagaaataaaatattaggtatatgtaagtatagaaaatcaaatttccctttgtaaatcaaatgtatgtaacaaaatacaccaaagattcttacaacaaatttaccctaagatcttgattaataaattaagattcaaatctaagtccccttagattcgaagacaagctcccttgcttcgattgagctaaaatccctttagctatgactctgaactcccttcagatgaaacaacctccattatcacttcatcatagaagcttgaacttttcaacaatggaggaacttgtaagaaacaaagaagaagaagaagaaaaggatttctgccctagcagagaaaaacctttatcaaagaattaaaatgagtgggagttggttagaatattcaagaatcaactatgtataataccaactcatacaaaactgactttgacagctcactaacaactcattgatagctgtccaagatattttaatatgaaaatgctgatctgtcaaaattaacccataaaccagtaatagacatactcagatggaactactgactgtctagatggcagaaaactcataatttgacaaacacaaaaatatagttcttacaatctctcccttggaaaattatgatcaatgcaaccaacaacataaaagagaaactaataaaaactaagatgctaagctgtcacataatagtcaccaatataccaaccaatata

SEQ ID NO: 75943 - DNA, 915 bp, Cannabis sativa
gaaaactgttttcaaaaaacatggccaaacaagccaaattgtttttaaaaaacaattttctgtttttaaaaacaaaaaactgttttttagttatgatgtcaaacatgcatgcacttaatttttctctacttagtttttttaagaaataatgcaattttattaatagcaactagctaaaatattagtttgcaatccagtcggaacatctcctttgctgaaaacacgaccaggatatattagaatcagaaaaatgagttaactaatcggtcgcctgattcccgaatcgttcgacaaaataaactaaaataaaataaaattaagagattacaacatcacagttaaccttaaaaatacttatattcagttgcttctaccgctcaaaagacataacaataaaaaattttgtagcgggttcattcaaccccttagcttgtgcactcaactattatgcaaggtacataattgcacaacaaacaaccccttcaaccacaaaaaacttgttattcccaactaacaatgacgatttgatgatgagtcatcgaagaacaaagaatacaaaccaacaatgaaacaaaaaaataaaattatgtcacaaagagaagactaatcgcaataagttaaacaaaacacactcagaataatgtcacagagataagactatcacaataataaaacttaatcgtaaaagcaaaaccacagaccccaaccaagccacgcctaaacccagagagagttagcggacctagccagagaaaaaaataacttgaaagtctctgtactttgggtgatgcatgcaatacgggcacaacaacccaggcttgaccgattcgcaattaaaataatctattctgcaacgatgatacccttggcggaaccatggtggtggataagcgagataaccatttatttcactat

SEQ ID NO: 75944 - DNA, 709 bp, Cannabis sativa
agataacatatcagataacagtgtatatctcaaagacaccaattggtgggagtacaagactcccactaatgcaagttggtactagaaacaagttgttgttgccaaagaacaactaagaattttgacagacacagatttttactcaagcttcatatcagatagcaggtggttatcagctgctatgtcctcttcaaaacagagtaaggtgggatcaagaagtttggggcagactcaacatacctaaacacagttttataatgtagttcgctattcagaacaggctaaagacaatggacatattgaaaaaattatatctggtggacaatgatgaatgtgtattctgcaagcaaaacgaggaaacaaatggccatttattctttgaatgtaacatatctcatgagtgccttggtgaaatcaaacagtggatgaattggagagcacaaactgtcaatctatcccagctaataaggtggattgaaagagctaagctgtcaaaattcaaaaaataaatcatggcagcagtggttgccagtctagtgtaccacatttggtatgctagaaatgataaactatggaatgatgtgaatgaaaatgtagtggagatagtgaggaagacaaagcagacagtgaagaatcgagtagcacaaatctcgccaaaaaaagctagcagtgaggatacaaactggtttagtgcattgtgaattgaatt

SEQ ID NO: 75945 - DNA, 825 bp, Cannabis sativa
aagtccttcggtagggttcagtttgccctttttttcaatgacttttctgttttgtttgtttgttaaatgcgaatattgactatgactataccagaatagcaattgttttgctattctttgtttattgctacatatgttaatccaccaaaaatatggcataattaaatgttaacaaaattataacacataatcaaagtacaagtaaagaaataatgaagatacattataataataataataaataatcatcatcattcatattcacgtaaaacaagtgaaacattgacaaatttcaatttgatgaattggaaaagtgaaattcgagataataatgaaaaaaagaaagattatgaatttgaaaatgtaataggaatattataaattggaaaagtgaaatttgagataataatcttcttctactactgcacgagcattgctccctcacaagatattgagactgtgtattctttcggggagatcaacatttggtaattttttttagggtaaaatactttgttattataaattaaacaagaaattcatttacaataacagagtatataattagaggaataaattccaatcaatagcaagcttcattcattcctaaagcatatctagtcaattataagcagttatattagttgtacgcttgacatgaacaacatacacactaaaaagaaatgagaaaagactacaaatatcaacaattaaatccttgaaagatgaaattgttgaaaaagggccacttaaagaattagaaaccatcaaagcatcaatttctacttgtgaaacttgtagttgcaactgaagggaccaattcaa

SEQ ID NO: 75946 - DNA, 997 bp, Cannabis sativa
  modified_base (939)..(949): a, c, t, g, unknown or other
cctgccccctcagtgcaaagttttttggtgctaaggatatccttccagccccgagagtcggaatcatgcttctccactgttcaagcattaaaagtactgcagtatttagcacacagagtattgatccacggtttatctttcttctacagcaccatccaaaaaagctttgcaataagagcaaaatttctggcatgaaactttctgaaaccaagacctccatagttttttggttggcaaagatctccctaggactttagagcacaatatttgttctttttctggtttgccccgagccaccagaattttgcaaccatcctgtccaattcctcacaggtggaaagaggaatcatagttgttgacatgaagtaggttggaatgctttgaaggactgatttgactagagtagttttgcctgcaagagagaggcattttgccttccaaacatcaattttgttcatgattttctattttaggaactaaaagtcatcttttcttcgacccgtgaagaaaaacgggtttcccaggtacttatccttagcttttagagtctgcatttggagaagttgtagaatagccattttcttgttgttgtgagtatttgcagagaagacaactccacttttctccctgttaatacgttgtccagaccaagcttcatatttttcaaagattttcagcagtgtattagcattgtcttccgtggcttgactaaagaaaattgcatcatctgcataaaaaagatgagtaatggaaggagctttgcgcgataccttgataccacgaaccatgttttctttctcagctttaagaattaactttgataggacttcactacacaagatgaaaaggaagggggagaggggatctccctgtctcaggcctcggttaggattgaagggagcgagtgttgctccattaataattaatttttagttattnnnnnnnnnnnattggcatttaagtggttaaatttcaaaattggtatttttgagaaaat

SEQ ID NO: 75947 - DNA, 693 bp, Cannabis sativa
ttagggcataaaaaccaacagtaaaaagccttggcatgatccccccaccgagtagggggcatcgtaaacttaaaaagacgatcgtcgaactctataggtctataccgagaatactcttggactgaaggaacatgataaaccgttaaaggagacttaccgaaaccggatgtgttggcatcgagagccccagtattaggaaccaggaccaaagacttaggcctgggaggcatcagatctgtgcccgcctccaagcgaagggtcctccccgcggcagcctaagcttggatataaggcagctcttgttccctcctaaagaggtacttctggtaccggtcctctggcgaggctatgatgtccacccggagcgctttctctgcggccggagtacgaaattcggggcagagaaccttcgaaaggttaaagtcatccaccgactggctctcggagataagcttggccctccagcagttctccgtcgtgaccaagtcccccacgttaagaccttttttgtcataagtggagaaagtcttggcatgttggagaaacagctgggtaggagcagtgcggagaagagggggaatcctaacccactccgtgagaagcttcggctggtccacgagttggaagccagacgagaagaaaaagcgatggcagtactgttgggtttttgtgccctaaataaaaccctttaca

SEQ ID NO: 75948 - DNA, 659 bp, Cannabis sativa
ggatcaattagggtaaacaccaaaattataacataaacaaaaataaaataaatgtaatcattcaaaaattacaaaatgatttatttttcatatgatgattgaataatttataacaaaataaattaaactcaattaaaaactatttataatctacatagatctatatctctcatataattaaatagatgtaatttttttaataaatcatagaaatttattaatagcaatcaacttaataatatcctgcaatctaatcgcgacatctccttgttggagatacgactagaattataatttaaaaaatgaacaaaataatcagctgcctaattctctgattgttaatttgacacaaaaataaaaaatgaaattagataaaaaaattacaacatcacaatcaaccttaagaacacatatattctaattcattcaccgctcataagatacatattcaacctcgtagcttgagcaatattcaactattgtgtaaaatacgtaattgcattattaacaattcttttcgtcgtaaagaacttgttattactagtcattaataatgatttgatggggagtcatcgaagaacaaagaaaaaccaacaacaaaacaaaaccacgttacagagacatgactaaaatattcaaaactatgctatagattcaag

SEQ ID NO: 75949 - DNA, 1030 bp, Cannabis sativa
tttcctggctgtttgtattttggtctgatactcatccatcttcacgcgagaatgagctccgaataacgtctccatggcctgtcacaagcttgaagatgattcacaacccatcacttcagtggtatactttccgtcatcgatccgtaaagccacccaagtagtaactgatcattcacgatccagatctcgaactctggatttacagtaacattttcttctcttgttgaagagtctgtagggagaaactcaatgggtttaactttcgtacctttcaggtacccatccaacatgtgaccacgtacaatggcagataccatcgtcttccacaacgtgtagttgtttctgtcaagctttaaagtaaaaggctggtttagggtagtaacgatttgagaacctgcagcacctgctgaaggaatagatgaccgggccacactcgacacactctgttcacctgaacgagctggagtttgttctgccatggagctgagacggaaagagcaccaccagtgcggataagctctgataccaagtttgaaaacaaggtaaacagagaaataaagcaaaagatgtaggaaaatgagaaagctcagctcaaaacttttgagactggcgtactactttatatataccaatgattggtttgtacatgaaacatctagaataccattgtacaatatacacacgttttaaatattaaaggaatattctaacagaaattagttagcctagggaattctacaaaatctgttagtacacctcagcagagaaattacagtgataaaattcatttcttaacagtgtcgtctaatattattatgagatgcatgataacatttttagttatcggtgtcgtctaacattattatgagatgataacattttttgaaggatgagtaattttttatataataattattaaattaaaatatatgagattaatttgatacttaattacaatactatatagtattcacaatatgatacattgtaatagtattgagcctagtgataccttttaatatttttcttt

SEQ ID NO: 75950 - DNA, 730 bp, Cannabis sativa
caaacaaaacacaacagatgaacaacaaccaccattaataatagacaactgacctgtcacaactgacgaactagcatcagcgttagcctgagttatggtaaaaagttgccctgggttatgtgtagtattcttcttaggctcctctttcttggcctgaggaaaatctctgataaagtggcccaccacgccacattggaaacatgccttggcctgacactcacccgaatggtgctttttgcatttgggacactcgggatatgatcagaatgaggacctgcggccctggcggccacctctgtttccacgaaactttctgttgcctcctgatgttctagaagcctcatccttccgtttgtgatcaaggttgccactgtcggtcgccttattgacattaccactagcaggagggttcggtgccgtgatcgcatcctttacagtctgctctttcgcaacatgctgctcagcctcttcagcaatcaaggctagctctaccactttcttatacaaattttcatgtgaagtggtaatattcaagtcccgactaattgtggcattcattcctctcacatacttctgtttcctggtgaaatctgtgggcaccagctgaccagcaaattttgacaaccgatcgaattctagagtatactcagccatagacattttccactgagtaagttctcacaacgatgttgtaaaacttttcctcaaacaaatttttaaattcctccca

SEQ ID NO: 75951 - DNA, 624 bp, Cannabis sativa
gttgctgtaagtcagccatagtttagctaagctggggacccgaggattggcctcctcagggtcatcattctccgcataaagctccctaggtgggtgggatttagtcgttggttggtgccagccaattctaggagtgtttggtgtggaggatgagttgtggagccagttttgaggcctgctcttggcacctaggtcacaagagtggctccagttccaacttcatcaattggcgtgcccccagttgtttggtaagatgttggaattcttttgccaacacttgtagagtttgttgaaaccatcttattagtaactttctctagttgtcgctctcaatgaaaacaccgaaatattgacttaaaaatctggactagacttttaagccacacccgctcactagatttgcgataatgtaaaatttgttaagtgattataagagagacagaataaatttatagtagttcactccttgtatcgcaacaataatggaaatatgtctactttgagtttttatttctcacgagatggtattacagaaataggctaagtgttaaagctccgatttcttgagagagaagctcttaccttgtgggtaatattcaaaatgtgaaaaacgagctaagggag

SEQ ID NO: 75952 - DNA, 624 bp, Cannabis sativa
ataatatatattttatgatgagaatatttatgtatgtgatacatatataatatatattatgtggagatgatatatattatgatgagtatatgttatatatatgcgatgtatagttgtgatgtaaattaataatgcgagatatgtaacatgtgtaactaattatatttaggctatgtttggtaggaaggagagagagtaggatggatggagagtgtagaaaggatggagagtaggagggatggaaaggatatttgttctcctttgtattgtttagtattaggagtatataaggaaaaatgaagagtaaaataaatattaaaattactattttatcatttttaatataattatatattatttttttcaagggtagaaaaaaaaatttgtataatttttttgtcttattcttgaattcccccatgttaagacatgttaagagggattaaaaataatgtgtttggagggagaccctctccttccatctctcctctcactttttctctccttcttgccaaacaagaggattttccaatccctctctccacccctcccctccctcctctcccctctaccaaacatagtgttagtgtatatgataataataatagtgataatgatggaaaa

SEQ ID NO: 75953 - DNA, 662 bp, Cannabis sativa
  modified_base (389)..(393): a, c, t, g, unknown or other
taatcagcccagttccactgctccacttgatagccacgccacgtggtcgctccttattggcaggcagccttggcatcagacgagccccacgcagacaggtcttgtcccccacttgccagtcagtcgccttccatggcctaacttggtccttgtgtctccgccacttgcccaacctgagagtgggcttcctccaccctgctaccatttttttttttaaaatgacgttatattcactttagtattaatatttatttttggaaggtaaaagtacatatagggtagtattacactttaagggatatgattttgtcccttaatgtactttcatggattgtaatccgtgatgtacggtatcagatgaaagagttagggttaaaaagtagaaacgnnnnntgagacccatctaatgtaccacagaagaaagtacatcacaggacaaaatcatatccctacattttaaaatataatataatataagagtatttttagttaatagatataagtatttttcaattcaatttaatttttttccttaaaaatctaatattttcttgttcctctcttcaacacacaccatgtgtacacttaattagggctgaaaatgggctatagacaaaaatatatttttgctactataaaagtaagggttttttttttttttt

SEQ ID NO: 75954 - DNA, 736 bp, Cannabis sativa
tccaagatagaagatttacatatcttaaatgtgatggatgagaataaataacacatgtcaaagtaagacattataatattgacacaatgtaaacaaaaacaaaaaaagaagagggagcacgagagaaagttggggttttcgtctgaaaggagaaaacaaaaataaacaggaagtaaaaagttttaagagttaggttgttcgcccactaaagcagtacgtgagctaagttcaaaacatcacgagaccgttcggtccaaatctagcatgggcgctagagcattcaagggacctttccctaatacaaaaagatcatgaagagaagcacctcagatgtaccagttactatgcccaccataaaacgctaagtagccaagtgcaaaacacataacaactaaaagcatctaaagtagtaagcctaccccaacctttcagagtattttgtcaaaacaatctttataaaaattttaattaacaaaataacttttaaaaaattattagcaaaataaccttatatagtcgtgaaaaacgatcatgaattacacagtataattgtaacgtccccgcttcaagtcttcattgggcccttacacccaaaaaatgaatgactcttatacacgagtatgtcattctggctgtttcctgtattgacgactgaccctacagactaacacgagtgttttcagcgtgctttgttctcactcgcacgcttcttggaaaacttcccaagatgtcaccc

SEQ ID NO: 75955 - DNA, 702 bp, Cannabis sativa
ttatgggacactaacactaaatttgtagtcattttgtgcgtgtcactaaaactcacctttaaatttttagtgacacgcatttttgtgcgtgtcactaaagagtgtcactaaaacccaataagacatatttgtgcactctcatcatataaataagacatattttcaaatataatattatatttgtgctctttgtagatggatgtgtagatatgtggaaaaattggggtaaaattttgattagagaaaaatgaaaactatcgtgaagtgataggtgtaaaattggtagaatgattgaaaaaagaggtgaacataatagattttgaaagagagtgtaaaaatttaaggcatcaaattaaaagaggtatgtactgtaattttctccaccagccgaccctatgacaagtttgggctttaaaaaacaaaatatatgagataatgatattttgaagacaattttgataaaaatgggatgtttgttgggcctgctccttccccttccatatggcttatcttgcttaactcatgaggcctttcagacaatgtagaattttgggctcagatctgggagtaaagggctaaaaatttctcaattctttgttaaggatagttccattttactaaattttaccaaaaaggaaggtcatgatgagttcattaagtttgagttttatacaggaaaaaacattgatgaatgtaggggta

SEQ ID NO: 75956 - DNA, 981 bp, Cannabis sativa
attgaataatttatataaatatcagaaaattctttattcatatatgaggatgtgacttgtagttgtacggagaattaagatcacttatccatgaataaaacaatcaacaatatgttaaagttatggaatctttaatcaatagttctcagtatggttcactaatgcccgttattcagtcaagaaatctcaattcgaattgctgatgtagtatgatatctaagtgaatgtgttatatataatagagatatataatagagattatatatgacaatgattgatatttaatttagttatctttatcaaacatgtcatttattataaaaatctaattcatatcataaggatgatcaataatagatcgacctaaattatgagtaatcatgaacttttgttcatgttattagtttctttgattcattagttaaaatttctcaaagaagataattcttacaacttctgttttgagaatctaataatatagatgactaggaacatgatctacaattatagaatcctaacttttctaatggatcaaatgttagttcctttaagtgttaattctagagctgaaaagtgtgcataaatttagattggatctaaattatactttcactagtaaattaatgttacaaaaggataaaaaagtaattaaaagggtaaaacgataatttaaccaaaactaattacaaaatgaaccattgcagtatgtatatcaaatttatataattttttaaatataaatcttatacaatatgatatgataggtgtaaaaatatgtgttctgtagtaatttgttttagtatattttgttaaatattatatatatttgtgtgttgatgcaaaaatcttgacaccgatatctggccatatcagctctctagattggcatgattgtattatgagttaagtataaataagagagacacaacagtttatagtagttcactccctgtatcgcgacagtaataaaactacgattac

SEQ ID NO: 75957 - DNA, 1765 bp, Cannabis sativa
caacatattctcaatgttgctcgagctctaggctttcaatccaacctttctttagtttattggccataccttgttcaaacagccacttacctaattaataggactccatctaaactgttcaaaggtatgacttcttatcaagagcttcatggcactccccccaaatatgaccatttaagaagttttgggtgtcttgcctatggctccaccctcaactctaaaagacataagtttacaccaagaagtagagcctcggttttcattggatatccccaaggcatgaaagcctatctacttcttgatattgaaacaaaacaaacctatatctctcgggatgtagtcttttatgaaacgatttttccgttgttttcaactacatctccttctaaggtaagcaccttgtttcctgaccttgtgcttcccactatacaacccatgcatcaaccaaatatgcacacacctgcctgtcaatctgcaccaatatctggtgcacaacccgctaccaattcagacaatatttctccccaatcttatcctgctgattccacacatacagctcctacaccagcaactttaataccagaattttcaaccatttctggcctaaaatcagcaacaacacctggtatttccataccagattccactttacagcagaacaatatttctgcatctcctggaccaaatattcccacaccaggccctcccaaaatcccacctgcattaggtacgaatgatctctctacaacagttcctaaaccagcacccatattagatgttcatgcaacttccatgacatctacaagggctggccgaaccattacaaaaccaaagcatctcatagactacatctgtcatgcttcttctactcatcatcctattgagccctttttatcttacattaaattgcatcctcaattcagagccgctgtccttgcagcctatttcaaagttgaaccacaaagctatgctgaagcatcccattttcgacattggctattcgccatggataaagaaacgaatgctctcgaaaaaaaaaaacaacacttggattgtcaccaagttacctcctggccaaaaagccattggatgcaaatgggtttacaaagtaaagtacaatgaaagtggggctgttgaacgcttcaaagcccgcctagtagccaaaggctacactcaaaggcacgacattgattattctgacacctatgcccccgtgtggcaaaattcaacaccctcaaaagatcttcttagctctttctgcaatgcacaattggaatgtccaccaattggacattaataatgcttttctccatggtgatcttcatgaggaagtctacatgaaaatcccccccggttacaaagcaccttctaataccgtgtgcaaactcaataaaagcatctatggcctcaaacaagcatccaggcaatggtttagtaaactaagccacacccttatttcagatggtttggcacaatctttatctgacaactctttattcataaagagaaccaacacattctttcttgccatcctcatatacgtagatgacatcattgttgccagcaataatgactttgctatctcctcacttcaaaaaccttatctccatgacaaattcaaactcaaagaccttggaaccattcggtttttccttggccttgaaattggtagaacaaaacgcggcatctctgtctcccaaagaccatttacagtccaattactcaaggacacaggctacataggagccaaaccggtctctacacc

SEQ ID NO: 75958 - DNA, 734 bp, Cannabis sativa
caaaaatactactcaaaatttcataatattattcttgttctaaactacgtaaaatgacaagtctattgcaagatcacgtatcctagactttcaccaataattagattttgcaaaaatactactttcattgtcttgtgacattaaaaaggaattagcctacctacttaatttattcgcttggcccaatctatttttaagtaaatgaatcggtttaaaatataaaataattgaaaataatattttattatgttttttactaaactgttagtaacaagatttatatgtactctgtttctatatttttcctctgcctatactatgcttagccttattgtatccgttaagttagttgaggcagttatattagtttaggttgtttgttgactttaggattggcagttaaattagttatggttgcccttatctttcggttggacttctttgaccgactataagctgtatatatacatctcttttctctgtaatgtttaattcaattcaatcaaataaaaccatttcctgtttcattgtctcttccgcaatatggtatcagagcaaggaagacatgcttcctttcgattctgatttcactccgctccttctcgccgcgttcactctcttcttctccggcgaagatcaccttctgtattgatgaattcatctcttcattgaattcttcatcgacatcctttttctttctctttcctttctttcttttcttctcctaccatgtc

SEQ ID NO: 75959 - DNA, 1289 bp, Cannabis sativa
ttttttttagttaagaagtaaaaaaaatattttttttcagcatgagcttaagcccacaatggtccttcattgggtctgccagtgtcttcaatgaatggtataaagaaggtgtaaatatattctttagcacatgttcataaattgaactacatagtgtataatatgatttaaatttgacacatgttaaaaattgtgccaaatttaacacaaaatatagcatgcactgaatcctacaccaaaataaatatcactattttgtttactcttttgtcacgctttaatgcctttattaactttttacattttattgatatgtttactaaaaattttatacattttcaatcaaattttaatgtatttattgactttcttacaactttttattaaaaaaaaaagttaatttaccactacattggagcacaataataaaatttgggcccaatatagcattgacttattttttaagtcaaattttgtgcaaaatttacaccacccattaaagatggtcttataatacagaaatggagaagtcttttgttaaaaaaaaaagttcttttaaaagtgtttgggtaataaatgagaagtcttttttcttaatttaaaagttcttttgggagaacttatgatttgtaatttctcttaaaatgacttttgagaagttattcttaaaattaaaataatttacataatctttaatttactcaaaaaaaaaaaaaatattccaatgacgtttgaacactttgaaaaatattttatattaaaaaaaaatcttcatataatagttatctaaatggtttaaataagtcaaaatttataattatctcatacttctagttataagtaaaagtaaatacctactcaaataagtatccagtctagcataattttaaattaataacttcctaaaattcaaatatttttggatactaactaaaagcaattcaaagtatttggataaatttaaaagaaagtaaatataacaattattatttttgtgtaaaagtaagtgttaacgcaaattttcgttgacttaatatataactttacataataaatttactacagaatttaacaataataatgaacacaagatattttacgtgattttgtagtttaaatctagcattaataaatagagtaatttgtagcataacctccttaagtggtcagttatttgtaactaaccccaaattctaaaatttttgtagtaaaaccccctaaacccatgttctattagcacttagccctttccatccatttttagttgttaagtgtaatgaccgctctag

SEQ ID NO: 75960 - DNA, 626 bp, Cannabis sativa
tcatctactttatattattttataacaatatcttggttttctattatttttgttaaaacacttacaaaaaagaaattaacttttcaaaaatataaaataggatagtttaaatattcaccacaaaaaattttatatttagtcctaataaaatttatgattatataaaaatattgtaattaattataaattattatttttatgttgtgactaaaatgtatgtaactaaaagtattagtcacaaaaatcacaatttattttaaatatatttttaatcacaatattcattgtgactaaaattaaattagcgacatattgtatctaaatttatatttaaatctatttaaaaatatatataaatttaaattaaatttaaaaaatgaaaaatatatgatagaattgagttatatttattttatctaaaaatattataaaatttaaattttaaaaataagagaactactgtttttaaacatgatacagttggttttttttatatatatataattttagcaaaaaaaaattatttttttaatttaaattaaatttttgtatttaaaataaaattattgttgcggtaatcttgtgacagtaattataagattttattatatataataaagatattt

SEQ ID NO: 75961 - DNA, 551 bp, Cannabis sativa
caagtaatctattactaaccacttgatttcttgcactagcatcttcaaatcggtatcctctttgcaccagtattttttattccttgcataccagattttgtacactgcagcagctacacaagcagtatagcaactctttttgaatttgctttgttttgccctattaatccccctcagaatactcggcaacaaattggtctttgacttccatcccagccaatttttcaaatcttccaggcagtgttgtgcaaatcaacattcaaaaaacaaatgacacatactttcggctgcaatattacacagcaggcaggttgtatcacctgtaatattgaatttctgcaatctatcccgagtcctcagcttgttttgtacagcagtccataacacaaagttatgttttggtacatttaatctgctccaaatctgcttgctgaggtgaaagttcctctgctcctgcatcattagtttataaacagcagatatttgaaactctgatgttgtaaattgatcaggagggataacttgtttcaccagatcctttatgtacacta

SEQ ID NO: 75962 - DNA, 812 bp, Cannabis sativa
agagagagagagagaataagaagaaggtgtttatgtattttctttaattgtttctaattttgaataaaatgaattatttttttctaataagcacacactacttaatatagtcttactaaaagacaaaagagataaaaggcaaaaataccattttatccttgcctaagtcaaaaggtaacattaccacctaagggtattttggtcattcaaaaacctgtaatattcctgacattttcaatgtctaactaagtcgccctgctaatattaaatactacaatgtgattctattggccaaacgctgcattcctatgttgccggacataaaacatgaaaaacatagaattttatgtatagcataaataacacacctagaattcaaataaatcaccataaattcataaatcataattaataatccaatttcataattaagtcctaattatatgctaatttttatattaaaactaagcggtctttacacagacagtcgttctggatagatgagttggcatgagaaagagtaagaactcttgaggtagtggttgtgatccatgtaaggggtgtggtccaacacattggaaggaagtatacactagttggtggagagtggatgaatggaagatcatttgacgggaggcaaggtggtcctttgtttgaagagatgaatgttgggtgtgcaaccaaagtcctacattggctaaaaatgagaaatattatgggtatataataatggacaatatcttcattggtatgagatcttttggaaaagtacccaagaacaaattgttgggttttatgccctcaataaaact

SEQ ID NO: 75963 - DNA, 1236 bp, Cannabis sativa
gaacttacaccgggacacaaacctagactagaatcgggacctggaaccagaatcgggattgggacctgggcaacggaactaggactgggacccaagacttgaccccggacccggacttgaacttaggacccagctcgtgacacggcaccaaaaatggaaccagaccagcacgccagatcagggtccgggaccagaataaggacttggacctagacccaaaactgtaaccggaccaggacccagtttcccacccagaccttgatccgagctgggagccggacctgaatcctaatcaatacctagactcagtgccgaaccttgacccaaactcagacccaaacatggaaccagacttgggacacagaatttggcccgagacttagaagtgcaccctagtcacggtcccgaacccaaacttagacatgggacccaagacctgaactagaaccaaaactggactgagacacgtgatagggatcgagatctgggactcaaaccaagacccgaacccagactaggaccaaaactcggaccctaacccagacccgagacttgaaactagaatctgaacaagaacttccagacgaggatactcgaacaagactaggaccgtgatcaggacccaaacctaaaccttgaaccaaactcggacctagccccagacccaaatcgagaccggaactctggcccatgcacggtcatatacacagactgggaccaagacccggacccaagcctggacccagacctagacctaggacccgatccaagacctagaagcggacctagatagggatccagatacgaacctggactcgaacccagacacggacccacatcgggatcaaaactcaggacctaaatctggactgagaccctgacccagacccagactttgacccacacccgggatccgaactcaaacctggacctgaatgcagacccagaccaagatccgaacctggacccaaacccggacccagactcggaccaggacttcgaccaaaacccaaacccggaccataacccgaacccagacactaaatcgaaatcgaaattgggactagaacccaaacccgaacatggacccaaatcgggacctaggacccagacctgggtgaccatcctagttttgtgtggcgaagcatatttgaggcaaaagagtaattgatttctggtgtatgtcgttcaataggttttggtttttcagtttctattcttatgatccctgacttc

SEQ ID NO: 75964 - DNA, 1110 bp, Cannabis sativa
cctaactaaccaaagaatcagattaaaccaacaaacgccaatattactttcctaaaagagccaaattaaaatctctcaaacatcggaaccccaatccccctgtatgtttatgacgactcaaccgttcccagctcatccaattaatacttttacctctactcgaagctgagtgccaccagaacttggccataagccgctctaactccttgcaagtatttgaaggcaagagaaaaatattcatagcataactcggcaagacttgagcaatagatttcaacaataccccctttccctcacgagataagatacacccttcgcacccttgaattctctttggaagcttatccttaagaaaaccaagaatagcattcttatttctcccaaccgaatacagcaggcccatgtaatagccattttcatcggtctcataaatttccaacatagcacaaatagaatcccgtacttcacttccagtattattactgaaaaacacagaagacttagagaaattgattctttgccccgaagctacctcataagtatgcagcaactccttcacattgtacgcttcttcctcagttgccttacaataaatgtagctgttatcagcaaagagcatatgagagattaccggcgcacctcgagcaattttacaccccgtgagtaagccactttgttcataactccgcaacaaactagaaaaaccttcagcacaaagaataaacagatatggtgataaaagatccccttggcgcaaccctctttgagcaacaatgggccccaactccctcccgtcatgtgaaatggtataggaaacagaacatacacattgcataactaaattaatccaacgaccatcaaagcccatccttaccatcatagcccggatataaccccactcaagcttatcataggctttgctaacatcaagcttgagtgccatagaaccatccctccctcgtcgcttcctcttcaagtgatgcataatctcgtaagcaatcatgatgttgtccaaattaaccgaccttgcaaaaacgcgctttgagtatcagatatgatagacggcataacactcttaagtctattagcaaccactttggacacaatctt

SEQ ID NO: 75965 - DNA, 546 bp, Cannabis sativa
tacaaaattattatcttttttcaacacaaaaaaaatatattaagtaaaaatttttgaccttgaatttgggtggatcctaaacacagatctagctagtcgaacttgaccaaccatacatatgtataagtacacatatataaatttatatgaatatatacattaattaattaaaatataggaactaaaaataaagtttttttttaagcagcagctagtttgtatatgataacacatttaaatgtggcttagatttctttttaatatagaaaaacttggccttagttccttaaaatatttcaagagcaaaaagaaaaatctgaagaaaaaagtatcaaagaaatatcatgtgtttcatgaaaatattcacgagataacatatataatctacaggacctgaccatatcatttgacccttttttgcactactagagaaagaaaatttcttctgttaaaaatagttgggtatcgtattattgttggtctctatgatcaacgcctattcgaatgtcgtaaaattaggtggaataggcgtcagtagaaaatcgt

SEQ ID NO: 75966 - DNA, 973 bp, Cannabis sativa
aatttacttactaacagtttagtcgtttatttagaggagggttgttttttattttttaccaccaaaatttaagcttggaagattaagtacaaatagactaataattgaacatactaaaaaaaacgcctctttcaacttactcctctctttctttctattattattattatttattttttttttttatgaaaagataacttattttatattaaagaagaatgactattttttcttttttgacgtgaaagaagaatgactattaagttgggcataaaaaatgttatagatagatgtatctatctttctattcatatatattactaaaaaaaaggattttttttattttttaaaaaataaaataagtattatttaattatctttattggtagccttaggatagtaataaattaataattagtgaatcaatttaataacttcggataaatgctaaatgcaagactcctttgaaaaaaaaataaaaaaagattgcaggaccagtcgcgtgacttcatccgggtcctatatatataaatatagctttaacggtaaattaaattagggtaaaaaaaatagagttttcctttttaaatattttgttttattaaaagaattgttcttacttttttttcttatgaaatatagctttcatatagatgagggtttgaaaagttttctagtaaacaatttcgtgtgagttttgaactttgcatgcaatgtgatttttcctaaataaggattaccaaaaagaaattttatatgcaaattaataactattaaattatatttgtgtttttgaactcatgacatcgatcctatatatatgcatcttagcttaataatcacaacaaattaaattaatattatgtttataaatatatgtcctaattaattaaattgcatatatatttttttttaaaaaaagtgattggcttgtctcgtttctatgtggatctaccctagacatatatatata

SEQ ID NO: 75967 - DNA, 1565 bp, Cannabis sativa
aatcaacatcaaatccattttgaattttccaatccaatcaaagcacacaagtgtagatatccgcacttcgcgaattaaatttgattggatcgtgcggatgggattgaatcatgcagattggattatatcggttattttatgaacacccctagttaataaagtgaatcgattacaacagcatattagaaattttattacaatgaaagaaaatcacgatgtattacaactctattataaaatatagtataagaataatataagttattgattaaatatatgttacaacaaacatatatacaccatatattatgtatatattattatgcacatgttttgaacaataaatatgatcacgacacatgtacaaaaattcgaaagttaataggcttgcatattaaaaagaattcatatgacactaacacgcatcgggaaataatgcttgtagttcaaaatacatataagtcttaccttaaggatgtatcaaaattctgaccataaaaataaaacacaagcgagaccgataacatatgtaactaccttctcggaaaacactgagtataaagtatgaatgacgagaaggcatattattcagagacaaatccagcaagatcaagctaggcgcaagactgaatggtccttcacaagaagcacgagagataaattttgaagaggctaattcatgagaattgtacaaaaattatccaaaattttatttaaggataaaagctactaggagcatatttaacgagccactcattctgctagaagcacttaaaagatatatctagattcacccatgtgatttgcgagggacaggccggctctaggcataggcgggctaagctcgcggctagggcccactcattttaggggcccaaataaaaaaattgtcttttaaaaaatatacatattttcttactaatttttaaaaatactatttatctttatagtaaaaggctcaattttttttttgcctatgacccatttcaatttagggtcgcccctgacgaggcacacatgtgataaacagaataataactcggtaaaataatttctcaagataagatcatagatgtagttattcaaagtctaaattatgcctaagcggttatttatatgaaaaccacatgttgtaaattaatgaaacgtgaggtttgtccacatgagtggttaccaagataagagcaaagggaataactaatattctaaaactcctataaataatggaagaaaccattgtgcacgggatgaccaattgagaagagtgatcagagaatccttctttcaatcttgtatcttatactctgtaaccaaaaaacctaataaataagataaactcatggactatataaattttaactacaagattatgtaaaaattattgttatatatattataattttatatttataagtttttttcattatttatttaatacgcaaaagaatatataatttatttatttttttttttttgaaggcaaaattttatttaaccaacaaaagaactacaaccggtcaggcttttctgcatttaaaattgcagcagcacaagagggtaaaacc

SEQ ID NO: 75968 - DNA, 798 bp, Cannabis sativa
tgttattctgcatcggtggtatttgtcaactttagatatatttgcttgcgatttgttaacgatacttattaaaagttattatattaaattttagaacacaatatttaattggaccaatatcgatattaacacataagagagtgttaaacactattggtaccttttaatatttctcatagtaaaagggtaaaaaatagtgaaatctattattattagatactagtagttcctagcatttttttattggtagaccctttcgattgattaatgatattctttaaaagctattttttaaattatataagactcaatatttaattacacatattattaatatgacaccgagcaaaatattaaacactggtaatattttttgcaatttttttctcaagatcaataattgaattattctagagtcaagcaaaagccccaaaaaaaagcttcaccaaagaatatatatatttatgtaaacgttattttggttgttctagggaagagagtacacaataatgttgaaaaaatctaaccatatctttcaatgggagcagtgaaatgaaaggaagttgtacaattatcaaaaattattatttattgttcttacaaattgtaggatagggttccaacttcctaaatcaagagatatggggtcttaatttcatttaaatctcttattacaatattttaattaatttttatacctgaagtcatatattataatttgagcaatttgcggcgaaacccccttatgttttgatttttatacacttaacccccttatctttatttttggtggcaaaa

SEQ ID NO: 75969 - DNA, 942 bp, Cannabis sativa
tttttttttccatttaaatataaacattcctgaaaggaaattaagtaaacaaaattaaaactgaatgaaatttggccgcaaataaattcaaaactcaataattatgtcattgcacttctagttcttgtattataaactgtgtagctcttccttaaaatatttttggtattacttctgccatttgagtaatttttttccggcaaggtcaattattttagtcgccttaaattgtgtgaacttaatttggctctccaaaactaattgggaaaaagtccaaaccaacacaaaaacacgccaataaaagttgtattgagaagtaagatttagattagaactgatattctcgaaccaataaatttaagtctcttttgtttaacctaaagacattcagttgtgaatcctaaacacaagtcttgatttaagaaactctatgggaaagaagatttaaacactttccttcactaatatatagatcttccagcaaaaacatacataaaaaacacattcacatacataaatataccaactttgtttagctcctagataagcacttacaatctacataactgcaggcctaattagtctagaaataataacatttagcaaaatgttatctttatccatttccttggtaattaattcaaacacacaagaatctccaggcttcaaatggttctcttttgcaaatctaggccatccaccacttaaaatcagtccacctgaagtactacacaaattcacagaccacaattttttcccaacttgaagtgttacaactccagcctttcctcgtagataagtatttgcaaaatcatttggaagacgctgcagaaattcaaatcaacactgaatgttgagaataacaaacttctaataatcacatttcctaaatatacagttaatatttctaaaatcccaccttgaccttatcagaagactgcc

SEQ ID NO: 75970 - DNA, 570 bp, Cannabis sativa
atatatatatatatataaaatgctattttgaagggaggcaatccgtcaggccagggaatggatagatggggctggaccttagagtctagcgggaggtttacaagtaaatctgcttaccttgctcaagctttggagagagccagccactgcgaggtggctccatcgctctggaacaaactatggaatagtgaaattctagagcggcacaagattctttggtggtgcatcctctctacggcgctttctgtcagagatgttattgggaggagattccaaattgaagataccagatgccccttatgtgaacaggaggaggaatctattgaacacctcttcctaacttgtgatgtggcattacacttttggcgttcctccccttggggcatatatccggtcagtggcaatgggattcgtgtttggaactgggtgaagtttctctggagtcttaaaaacaagggtatccgtgaagaggatgtctttctctatgcatcgatagtaattgataccatctggagggcgcgaaatgaaaaagttcacaataacctttccccggatgtttcaaaatgtatt

SEQ ID NO: 75971 - DNA, 609 bp, Cannabis sativa
gttggaagtttttatcagatagtcatggtgtgaccagagtcaatccaggatgttcatcgaagttcaagaaataaggctcagagctgtttttgtgagcaggtcgagtgtgggcaacgacctgttggttgttattgtctccggtaagagcaaaagctagaggaatggttagaggatttgagggagcatctggtatagaataagagttttttgacaatagagtttgggcggaatttcttaaaccagtaggtcttattctcgccatggatgaaaaataaaggtaatgattttagagagaattgtaaatgtttgataccatattagaatataaaattgtgattttaatatgtaaattaactaactatgttaaagaatggattgtaaaagtatttttgagtataatgcttggaagaactaaattttttattgtactctcaatactaattaataaattttgattatttaaaaaaaaaaaaaatccattgatgaagacaaaaaagaaataaaaataaataaataaataaatgatcattatgaatatagatgtgtgccatactattaaatcttgaaggcactacattgcaaaatataatatttattgagctgtaataa

SEQ ID NO: 75972 - DNA, 669 bp, Cannabis sativa
aatgtgttgacatccccacgtgacattttccaattaaaagtatataaattaaagggattatttcacacatacataaaaaataacaaaaaaatatagttttattgaattttaaatatttttatgattttatttacagaaaatacggtctttttatattatattcttgttaatttgttgttgatttttgttatatatatgctattttttgttattgttttaattttatttggatgttatttttatgtagttttttttgttttcgtgttatttttataaaaaaccaaaaaattgtaaaaaaaagaagataaacataaaaatgtaacttttttaccaaaaaaaaaaaaaagaaaattaaaataatcctaattattcctatattaaaagacaaattatgtaattcctcaaatattcttgaaaatctcaaatcaccaataattgagcctaccaataaaattgtacctctcgagacttttggtaatattgttaaaacaaaaaatatctaatattatttatttaaaaatattaaaataagtaataaaataattttaactaattaaattagaaaaaaaatacatctagtagtagtaaccaaaattttaaattatggacaaaaatagagttaattattttaatatcaccaatacctatttctttaattcaattaatggt

SEQ ID NO: 75973 - DNA, 823 bp, Cannabis sativa
tttttaattgagaattcaaattttaaaaacaaaaaaaaaatcacttttaatattttttttaaacatttttttttcttaatcaatattttatactccgatcagatgcagacccaaatcccccctacggtgcccctatcgctgaacttggcttctgacccgaactcgaatccgactcacgacctagaccagacttaaataaaataaaaaaattaaaatgaactttacagaacagatgtttgttttccgtttttaaaattttaaaataagagtaattacagaattcatttttgtttttcaaaaacaaaaattttacttttattttgtgattaaaaattagaaaataaaagtgttaccaaacgacactttaagttcagctcctgattgtaaaatgaataattaagtttaatcttttgcggtaataatatttaagttatatttttacaatataggtatatggctattaaatatcaagtaataattcatgtatcgtttttttattggtgtatttaaactaatttttttttaaaaaatattataaatttaataacttaaatcaattaaaaattatcacgtgataatttatttggttacatttttacggaacctcataaaaacatgccaacataatacaaagataaaacaatattaaaccaatatcaataaacatggttgtccatattttgtaaacaaaaaaaaaatctgtaaaaaatattaaaaatactgtaaatccgtatttttgtaatttttttttatagttattaatgaaataatttagttacttaagatctataaacatatgaatttgaatatctttgatgctaat

SEQ ID NO: 75974 - DNA, 787 bp, Cannabis sativa
cttctgtagaagaaaacaattaatcaaaattattaacagctaagttgcgtaatagcatattatatagtggctctaccaacaacctgagtgatctcttggagctcatgaacaaactcgaaggtgtacgcagctggagaagcattcatctcgtctaagtttctcagaataattaaatggccttacatcacataatttccatcgaatagttccattcggttaccagccattctctattatgctgagattatatcggaataaaagcaattggacttcgagataaaagtacgatagaagatgtttgttgtttcaatctcttaatttcctcctcttgtcgttgaatcctagcttccatttcattaaacttttgctctaaatctgatggactctgcagtggttttttgtgaccacctccaaaagtctcttcacaaccttgagtaatagggggatccctatctttccaatttccaccagcatcgctcacattagtccaactacaatattcttgctaggcgtccattctacaggaaaaccctagacgttcatgagttggctaggtcaggcagccatcaaagtcgaaatctaactaccgcttacatgtgaatttaaatatactcctattcagctatatgactacaaacatgcttcctatcacgcttctcttataacaaactaataagatgaaccactaaagtaataaaggcttactgaactgtgagtcgagcttatttttgattatgattgtacatgtcgtgataatcttcgaaagacaacctggcgactctgatac

SEQ ID NO: 75975 - DNA, 936 bp, Cannabis sativa
ttcgtgttgtttctataaaaaatcttaaaaatgtaaaaaaaaaaaatatatatctttaaacgtaaaaatgtatttttcttaatgaaaaatagtaccttatgtaattattccaaatatatttccatggtatgagtcattttaagttcattttacatataactattgttcatcttcaatatatattttatttataattataaatgtaacaaattgcatattcatagagaaatgctactttcccctatttatccaatagtaagatataaaatgtaaaaaaaaaaaatagtaaatatgttagaccatttttaagatctaaatataatattaaatttgggaaaaaaaaaacaaattctatatttagtataattttttttattatacttaaatgcacaataatatgttaagatgtaaactaatacaaaaagtaatatattattaagtaaatatttaaaatgaataattaatgacattatcgtaatatgtgtattaaaattaaaacctatggttaatcacaaactataatcattattgtgtggagagagtttgtaaaaaaaagatcaaattgtgaggaaaaaattgaaaaaaaaaacaaatttttaataaacatttataagtattttttttttgcatataaacctttttataactaaaaaagggattgcgtagtggagatcccgtccctactccttcggttttaaggtaatttcaaaaatcacgtgctaattatggagaccttagttatttttccttattttttttatttggatttacttaggtcatcgatacattttctaattaagtcatccagactcattctatctctttaatcactctttttaacacgtactaaattcaaacaagaaagtatgttattggaaaactaagaacatgtttggtattgttttctgttttttgtttttaaaaaattgtttttag

SEQ ID NO: 75976 - DNA, 640 bp, Cannabis sativa
ggtttcgtttgaatttcttctctacaaatgtgaatatagctatataacaactgtaaaatgggtcgcaaaatattatctgtttttataaactgaaaataaaagatttatataaaaatgttagtgataaatttttttgtatgaaatgtttacttaaaaggatgaactttaataaattatgtagatatgaaatttatatcttaaagtatactgatgaaaatttacttacgctttgggcgattttaataattttttaaagaaaaattaatttattaattacgaataaaattttgagtgtaatatttcttttatgaataataaaaaattatgtgatattttataaatatctttttcatacgttattagcagaaatattaattataaaataataaaaatgaagacccaattttaattataataattaaaagctattaaaaatataaattcatttaaaatgatttagatattaataataattaatataatatatattattatagactaaacattagataaattttaaaaattataaataattaattgagaaaaataaaaacgacaaaagaaatattttttatataaattgttaacgctgaaaagtgggcaaaactagctcgctagattggcgagatgaataatgaat

SEQ ID NO: 75977 - DNA, 677 bp, Cannabis sativa
attgtattaggtacgggtttagtcaattgctcagctttagagccatcactttcaatagccaatgacaataaattttgtttatcctgagctttgcgccatcaatcaagtgtaactaatgctgatgaagcaacttgctgcagagtagaagtcttcttatccaaataagactgttgcgtgctttccagattgcccaacaaagcatgataatgtagcagctggtatcattatcagaagttttaaacacattgtgaagccaagcaccaacaatggtattaccagtaatattgagggacagttgagcattcttccaacatgcctgagcaaaacagcaactgatgagagcatgagggatggattctagttgactcttgcatactcgacaagccgaagagatgtctacatgcttagtgaaaagctgtaaacaggtgggaagggcattcgaaactgctgcttaactttcggggggatcttaagttgccaaagtttgcgccaaaacccagaattgtcaatatcatgttgatgttgtgttgatttctgcagcaggttgtatgcacttttgactgagaaaataccaatgctctcccttatccaagactaacaatcatcaccagctgaaaaacataagggtagcccgagaatcaaagatgcatcatgcgaattgaacatgtcatggacaa

SEQ ID NO: 75978 - DNA, 1095 bp, Cannabis sativa
ggcgtggagaatgagtggaaggaattgtgttccaagtacgaaatattattattattgaagaagaagaaagaaagtgggaataattatagtgaagattttgattcagccataaaggaattgagcttaactcaaactcaaattactaatcttgaggttgagaatgatgatgatggcttttgtcaaaattgaagcctaaactaaaaccattatatttatatatttgttttcgtagtacattgtcattttgtgttgatactcattgattgtaattttctttaaatagcagtgtaaaaaagattgaaaacattttcgattttatgaagattgatcttgaaaatgaatggtaaaagcatagaattggggcattccgagaattgaactcgggacctctcgcaccctaagcgagaatcataccactagaccaaatgcccatttgatgattgttttgttttttatataactataataacaattatgtgtggaaattatcttttaaacaattcactatacaaccctttaagctacttaatttatactaatgtgtcacattataattaatttgcaattttctatatcttattaaatcaaattgtatgatacttgataataaaatatatcaattacaatagactactttttacagtgtttgatactttaaggcacctattaatattttcctttataacaagaggtttctattaagatatgatttataattatgagtaaacctgattcatggcaatattattgttcagaaaatacataactctacacaatttaaatttatttttaatttttttacaataaatgcgtttgattatttgttcttttaaaaaattattagagaatgctcttttaagtattaattttgacatgtattaattttaactaggatttttattccttaaattcatgttcctgaaattattaaaattattagatttaaaaaaaaaatttctattaattcaatcattgtttatatattaaattatgttctacaaactcccttcaattttgacatttattaaattatacacatttaatttttaacggtcttaaaaatttaagaacataatttagtacatgtctaaattt

SEQ ID NO: 75979 - DNA, 1088 bp, Cannabis sativa
  modified_base (982)..(982): a, c, t, g, unknown or other
acccttagattcttgcaagaatttgtatgcacttttaaccgaataattccaacaagtctcaagtcattaactccaaccatcattagcggcagaatcactaagctgaatggacaaaataaggtcttgatcacgggcaacaaacaggtccctcataacatcctcatcccacgcgcgagtactgacttgaaagaggcagctggcagacttattcacaagaacagggtggcgtgagacaacatagctgttagaattatgtgggagccaaggatcattaagaatggagacattttccccattaccaattgttctttgagcacaagcgtggatacgatcttttgcttcaagaatactacgccaaatgaaactaggattgtgtcccaatacagtagaaaacatattaccagtagcataatatttagccttataaagcctactaaccaaagaatcaacattaaccaacaaacactaatattgcttccccaaaagagccaaattaaagtctctcacgctttggaatcccaatccacctgcatgtttatggaaacacgaccgctcccagctcatccaattaatacctttagcgctactcgaatctgagtgccaccagaacttggccacaagccgctctaactccttgcaagtgtctgaaggcaagagaaacacattcatagcataactcggcaagacttgagcaataaatttcagcaatacctcctttcccgcacggaataagatacgcccttccaacccttgaattctcttccgaagcttatccttaagaaaattaaggatagcattcttatttctcccaaccgaacacagcagacccaggtaatagttattttcatcagcctcataaatttccaacatagcacaaatagaatcccgcacctcaattctagtgttattgctgcaaaacacaaaagacttagagaaattgattctttgccccgaagccacctcgtaagtatgcagcaactcnttcacattgtacgcttcttcctcagttgccttacaataaatgtagctgtcatcagcaaagagaatatgagagattaccgacacacctcgagcaattttacaccccg

SEQ ID NO: 75980 - DNA, 501 bp, Cannabis sativa
tgctcaatttcaatcttatatgacctctaatggcaagcttcatgaaacttctcgcgttgatactccaccccaaaatggtgaagcaaaacgtaaaaatagacatcttcttgaaactgtacgtgccctcctgtttcaaatgcacgttcctaaacttttttgggtcgatgcagtttccaccgcatgctttcttatcaattgcatgccatcttttgtacttaatggtgacatctcatttcaaatctttttcctagtaagtctatgcagttgctcctcggatatttgacagtgtttgttttactcgagatgtttgtccagattttgccaaattagatcctaagtcattaaagtgtcttttttggttattctcgtctttagaaagggtattgttgttattatcctgatctcaacaaatattttatttctgctgatgttacttttgtagaaaatacactttatttttcatcttcacttctattcgtcaggaggaggatgatgatttgt

SEQ ID NO: 75981 - DNA, 632 bp, Cannabis sativa
atttatactccatacatccgatactagcaatgtacatattgacctcgccgacctgcgtgctgtgttgccagaatttgttttgggttgtatctattacgtattttagtgttatatttttgaggcatcatcgtatatagttcttttgtaaaaaaatttataacatggatccccggaacacaatttttatgcctttataatgtccattttttagtatttttttagtcaaatttttaatactatcacatttttaataattaatcaatctattagtattaaactagtttataaaattacatacgtggcgtccctatagattagggcattacatctttcaacttcttccttgagaactttagagcgctctttgtcaaggagcctgcgtttttgttgtacaggctagaagtttactttgtctatgtttagggcataataaatgacctaggttttaatcctgatcatgtcctcctgcaaccaggtaaaaatatcttgatttgtcctaaggcaagccataagcatgtcacttaagacctctgtcaggtttgttccaatcttgataacctttgtcgggtctgctgtgttgaggggaagttcttcgcgttcctcagtcggaccaactcccgagtcaattttcc

SEQ ID NO: 75982 - DNA, 845 bp, Cannabis sativa
aattcaaagctatattccaaattccaaacaaagcattttatgagctacagtcagcaatcataacttcgatttttcgttatagtgactgtgtagtgtaggtgagtcctcagcctcctcttaaagatccaaggacatgtatgagttttattaatgctatgtaactagggatatacatttctactatgggatggaactgcgctcttaatggggcggaaattctccgtctaaatagggaacgagacggagacggagattattttttgtccccaaatgttaaacgagacggggacggggatcacactccttaccttgatgcggacccgtttagtatttattttatatttttaataatattttataatttgtaatttatgtttgtatttttctttttgtatattagtattttcttatgatttttaagttgtgttttaaataataattagtttattgaataataattaatatgtaatattttaatttttatgtaggttaatatttttatatatttaaattttattattaattttattttttattaggagattctccgtcccatcttcgataaaaaaataagtgggatgcgaattaaaattcttaacggggatgaaaataaggggagtactctccgccaattctctgcctcgtgagacttctatttcctcatgtacttccgctagaaattgtgtacttgtcctatgtttggtactaaagaaaaatggaagaaaaaaaaaagttaagagagaaaagtagaaaggatgtaaaaatgagtgtatttggtatgagagaaaattgggtagaagagaaatatatagagaaaaaataagaatgggatcaccaaaatttat

SEQ ID NO: 75983 - DNA, 624 bp, Cannabis sativa
agtggtagggggaaataagcttttagatagaggtgcaagagaattgttcaagttttgtgattccctattatacacttgtggtgtatgcggtgttaagattgggcctctcacatctcttttatatatatgttatttatatattgtgtttcatgtgtagcttatatctctattctctattttatgtgtatattttgtttagtattgtaaaattatttaatccgtgaatttgtcatttgtattatttgtcataaatttgtaatcttgttgatttgatatttctattgaagcacaacaatatttctaacaataatattgtgaataatataacaattacataataaccacataaatataattagtgatcttgctttaagcaccaaatacatgagtggggtaagagttttgtcaaacaaataaacaaaaaagaaaaaaacgtgaggggtagtggctgaaaaaaatggagttttgtcaaatagggttaagtttaattaggatagtttagagttatatgtatatatagatattatttttaagaaaaaatatagatatatactattgatttctcttatttttttttcttggtagtttttaaatttagaattttttttaaccacaaatttagga

SEQ ID NO: 75984 - DNA, 1085 bp, Cannabis sativa
ctcattctctagctcttttgaaattcccaacaactgacgacgacactagagtttatgacctaaaaaacctgcaaaaatatttctaattattaaataagaattgaacattttgatatatgcatgaatgttaacatttaatattgaataatttatatataaatatcaaaaaaattctttattcataaatgagactgcgacttgtagctgtatagagaaccaagatcacttagtcattaatactgtcaacaacatattaagttataaaatctttaatcaatgcttggtagtacagtttagtgatgcccgttctttggtgcaagtaatctcggttcgaattatggatctaggatgacatcttagtaaaagagatctatgatttagaagaaatggagcatttgagtaacaattttgtcattactcaaggctatcaaaagctcatcatagctgaatcaaaggaatatttgccgagtattgtttggagtcggctgaactatccaaagcatagttttattatgtggatggccatgcttaaccaactcaagacaaaggatatgattgccaaataccaactagaaattgataaaatctatctattgtgcagcaatgaagaagaatcaatggaacacttgttttttaactgctattttgggcaggcttgcttgaatcaagttcaggtgtggctgaactggaacatgtgcaaaaagtcgctgccaggagttataaaatggctcggaaatgtcaaaatcagcaagtttcgaagaggtgtaatggctgctgcacttgcagctttagtgtatacattttggtgctcccgaaattcaattttgtgggaaaataaagttgtaaaaagtgatgtaatcacaacccaagtaaagaatattacaaagtgtcgaatctcttgtatttggccaaaaaaagtgaccaatagagagatagaatatggtttgaaaccttgtagacattagagattatttagattctcttattggagaatcctatagtgttttacaaaattttttggagtgatgaaattcacttgattcataaaaaaaaaaaaaaaaatatggctcaaaaaaaaaaaaaaa

SEQ ID NO: 75985 - DNA, 556 bp, Cannabis sativa
tcatatagacctccacatcatcatttttgtgctttcctttatatatagatatagatatagatatagatagattgattataaaatattttggaaaaatgaatgacactagaaaaaaaaaaacgtggaataaccctagcatgatacttgtaaagccataaaattattattaataaaatttaccaaaacagtatactgcgagaaatatttaaaaataaaaaacagtataaaaaaagttaaaatggacagtacaaatgaaaaaaaaaaatgataaagtgtaaatttccctttctttactccagttgcattgcaggctttctgaggcccaaaattaaactaagcccaacccacagtaccatattgctatttgctacttcactacttcttcttcgtcgtcgtcgtcgtggccaagaatcagtggttgggggcaaacgaaatcgtcacagttcctattcttctcttactccgagaaaaatccagacctgcccaaaggaaattagaggtcaataatggttataagcttgcaaatacccatgtctacctcactgccatcgtcttc

SEQ ID NO: 75986 - DNA, 630 bp, Cannabis sativa
gcaaagtcatccgatcaagcctacgctcttggggttgatgatgtacaaggaggtgcagactaggaagttgttgatggtatggttcttatctcacactcttgggctcatgtgttatttgatactggtgcatcacattcttttatatcattgatgtttcctagtatgttggatttgagttgggaagacacggtgaggtatccaccatatgtatgtcattttgtattgtgtttaagggacacaagttgtttgaaaacttattagtgttgcctatggggaaatttgatgtaattcttggtatggattggttgtgtaaaaataccaagctattatggattgttcactcaaaagagtgactcttttaacccgtagtggtgattttattatttaccgagccaacatgagtgcagtgagacaaaatcctatcttaagggcatgcttaggtggaaagagaaacttagagtgttatgggaatctgtttgtgatcaaggataagtctagggatttagaccagttttctttgatatcagtggttagaggttttcgatccagatgtatttcgagaggatttaccagggttaccacctgatagggagatcaagttttgcattgatttgattaccagagctcaac

SEQ ID NO: 75987 - DNA, 722 bp, Cannabis sativa
ccatccaaacaagtttctatttcaccctgaatatatacataactaattcataaaaatacatgaactagggatactttagaaaaattcgatagcaaacttgaaaaaataacatagtaaaatggttggagaaaacattcaacactaaacaagcaaaggcttcgaaagaaaatggagacaaagatgcatccacaaattttgctcaaagatagtttgggctcccatcaaatttttctccaactccaacattagtaaactacaacatgatgcctgaaaatacacacacaaatagaggttagaatatatcttatttttaaataataataaataaataaaattagaaaataaaacgttaaaataataatcgaaagaagaagaaaaacttagctgtaaaatttaatcatctttcaaaaatctttcgaagtctccacatcttctaaaactcacaacataacttaataataaaatgcaacaatacatgaacatacacaacacaacacagcaaaaataataaaatagtattggagaacacacacaatataaaaatatatacttttaagtaagaaattaaatataaaaataaaaaattatttaattcatatatctatgtatataaatatatggatatgctcttaatgggtattactcatgtatatgtattttcttcttgactattagatcaaatctaatgattgatatttataatcattaattaaatattaaaa

SEQ ID NO: 75988 - DNA, 804 bp, Cannabis sativa
aaaccctaatgtttaaaaagggaatgagggtcccctaaccgctggaaagaggccccctccggatgcttgccaaacaaggaaaccccataagatgttccttgacaaccatcgggtgcaaaaatcccaaaggtagcgacagtggagaaagaaaaagaaaaaggggaaaaaagaaaaggctgagaaaacacgaatcattctaggccctaaaggcgatattacgacagaaaaagacaattcccaaaagaaaacacagtaaaaagaaacaaccaaggcccaaaaaagagagattctatgcattatacaacaaactcaggcaagattacttcccaaaagttcaacattcaacccagaaactctaaacgcgcaatacaaacaaacattagacaagtataaagtatcctgagaacttacacgaagtgtgaagactgggatgaagagaagactagcaaatgcgaaggaaaaggagcagataatctatggtgtctggaatcttttctctctatggaaactctgagaaaatatggtaaaatggtgaaagtaaccaaatgaagtgggaaggttggattttataggccagagcgggtgtgagaaagctgtgatcgagcatcatcgtacggtcagaatagcaatcgattcgcattctacagatccaacggctggaacaagcgttcatcaagatagttggaaatgcttgagaactcgactgacaaccatttaatgcgctggatcattaaatggataggaaacaaatcgttgtctgcaaaaagcaaaaactgcaataatgatggtcataagtgcaccccc

SEQ ID NO: 75989 - DNA, 693 bp, Cannabis sativa
tttatccttttttggctataaaatagaatggattttcatactttttaggaagaaattagagattacgagttggaaaaaacaaagtgaccaagaaagcttttcaacagagttttcaataaattcttctactctattttcttcctatgttcttagttgatatgtgtcgaattgttacaggacaagagtagctaaataattattagggtattgatggatattgtttaacatctgtttgtggttgtaatatgattttattcttcttcaattttttatgtgtaatatatcatttgtacttatttttaaaatagtccagccattaattaattgtttatgattttgatacgaaatttgaaaagtgcgtgtcaattattttatagtgaaatcagaaaaaatcttaatctaggacgagagtacctatgtggtttggatagcttatagggtttttgtgtttaattccttttacatattttaaattatcacgaaagtagaaaatttgcatgtaattgagatttatatatctgataagacaataagttacttgagtaaacctgctattgcatagaaattggttaaataaattgaattatattaggccataatagatagatacaattgaaatcaataaccctagttctaatcattgttaattcacatatcaatttacgtgtttttttttttgtttttattgttttt

SEQ ID NO: 75990 - DNA, 1208 bp, Cannabis sativa
gaaattcattaaggatgacaaaagaacatagtaccgggattaaaagctgcctggtcagcccgttgtcgaaaaaatgaaaaataattccaagtttaaatccgattggtcggtcatgacgtcttaaaaaaggccttgaggccgcatataatgtatatataaaggagataaaaagagaagtgtttaaacagctggagtctcaggctctcggttcgtttgagccaactagagcaggaggatctgttgttcgaacaggagaagcatcagccagaggttgaagcagcttggccggaggttgaagcagccgcctggttcccaccacaagcaacttgggtcgcgcagtactcaaggtacatgtccttagcgtcgcccaagtagtcaaaattggcccaggattaaccttctagaaatcgaagaagagttcgagggcaactgtctccaaggcattgaccttctcttgcaactggtccgcctcggccaccttggcatccttctcctccttcagccaaagaagaacttgccgcagagaagtcctctcatcctgaagactattaacttcagcagataagatctcgatggtctcctcaaagcaatcagcagctttgaagtcctttgttagcacggagatcttcttctcagaagcaaatagcttcttgttggcttcgcccaactccagccgaacagctccagtttctgccttggcctcctcagcttcctttttggccaagtctacctccgccctcaaggtgtcgaacagagccgcactcttggaagtagtagatttagcccgggagtaagtgtaagccaacttcaaaccggcctgcacaaaggaaaaaaatcagcatatggagctaagtgtagaaagttaaaagggaagtatcaaaaaagacttacccgagctccttcaggactccgcccaccaacacatccgaagatgagtcactattagcactagccagttgctcactgaccttaggaaccagccagttcatatagtgggccagcatctccttgccctttttggcctctggcagcacgtgcaaaggtggagtttgtgcttgcacccgctcaggaacactcctgactcgttcagacccagtcgttggtagtccagactctttggacttggcagatttgggggtagaagggtttgcagcagttagctccccggaaagatcaataacctctctagaaggtctcttctccgagga

SEQ ID NO: 75991 - DNA, 737 bp, Cannabis sativa
cccaatcattaccaatgattagttgtcatatttttacattccaaaatattctcttgttacaaaaggttgttatgcctcgttttctttaatgccatgtggcaatgcctaaatggctattttgtattcatcttttgctatataatgaaatcccagtactcagtcttattgagctgagaaatccaatttgtcctagttttctatcttggtattatagcaaataccaaatcctctccatttccgctggacaatcttagtctcccctcactccaccaccgaccaatcgaaaccctggtgctcaaatgtcaattggcatagggaatgccagctcctctcaaaacctgaccaacaattacactcagcctttcaataccctaaaccaaccattttccgtcaagcttgatagaaacaacttcacactatggaaaacaacggtatcaactataatacatggcaatagactcgacggattcgtgaatggtaccagaccatgtccccctgagtttgtacagactgaaactgctgctgaaggagaccaaggggctgaagttacactcaattcggagtatgaacactggattatcagtgaccagctactcatgggctggatctacagctccatgacagagacgattgcaacggaggtcatgggttgtgccacctctgctgaactttggcgcgcattggagaatctctttgaagcacattccagggcaaaaatggacgaatatcgaacactt

SEQ ID NO: 75992 - DNA, 866 bp, Cannabis sativa
  modified_base (804)..(807): a, c, t, g, unknown or other
tttttttttttttgcacaattttttctattttatagttcatctttttcgtgaaatctttttatcttttttctatcttattcctttgatattttttaatcttcttctattttaaatttgtaaaaataaaagataaaaagcataaaattgctccaaagaagagtataactaaattaaaaatacactaaaaattaaccttaaaatagtactaaaaataacctaacatgaggcgaagagagagcagggcggagagagagagaagagagcaacggggttttttacattaggttttctgaaacgatatgttggagttagaagggaatttgtgtacaattaattagttagcatcaagttttaaaatatgcttaaattgtttgcgttatttaccaaccaactcaagcatttttagggtaaccggcgcataaaagatatattttttaaaaagaatttgtttttcccgtcagtctacattctagcgtcgaatacatagctgacgcaaattctttatagtttgcgtaagttgaacaccgacgcaacaactctgcctctattttttgtgtcattctgtgctgttgaccatcaggttgaccgacgccaattcaactttttgtgtgattcaatattcaacaaatcacaacaagcaactttgtttctatttttcggttgctggaaaaaaaatcgtaattgctaattcaataaatcacaatttatgagaatagtgaaaatgttaatgtgcaccaatagaaaggtgatagaatacatgcaacactatatcaaagcttaaactgttggatatattttaccannnnctagatttactaacaagtaagtttcattaacatcctaatatgaatagatcggaagagcg

SEQ ID NO: 75993 - DNA, 930 bp, Cannabis sativa
tgaagttacaaataactttaaatcatcacaaataagacacattttttggaccaattagttgtaatttcgataagatacaaatttgctacttttaataaaatcataaattttaaaataaaaacatctcatataaataagttttgatttttatattagttacttttaatattgtaggttcaatattagattatactatattaattaagatatatacttttatgttacttttaagttcacatttaggttatgttcaatcttgttgaagaaactatcacattacaataaagtaaaataaatcacataatttattagtaaaaaatttagacatgtatattaataactaattagttattttaaagttatatcatgatattctaaaattatttaaaatatattttgataacattaattaagtgtataaactattatttatcatataataacttttaaatatgaataacaaaatatatattagtaactcataaatttggttcgcatattaaattttatttaattgtaaaatttggttaattaaatagaagaaaaaaaaccctactttttaatgtagttattttaagggtaaatactattttagaccctgtgttttataaaagttatcgattagactttctattttgttaaatgacaaaatggaccctgtactttccaaaatagtaaaaataggacactcctcctttattgtcaatattccttgagtgcgattggaccctgtatttggctgttgttttagtattgtctctcttgtcgcactttgtgtttatgtagatatagatgaagactttgtcttctcttaggttgtagccttacagttccttaacattccctcaactacgttttagtgaaggtggtcttgatcttctcctcagcttcactgtggaggaggcattcgtcaacttcttagctttacag

SEQ ID NO: 75994 - DNA, 1101 bp, Cannabis sativa
aaaaaaaaaaaaacagcctttttagcatttctcatgcattatatattttgtttggaggtatatcgcatgcaagaaaaccttattataaatttgccgccatgttctagttaggtaaagagggttaggcagcttatcaaaacatctactttattcaatcttatccgtatacaataggtacttcttctcgtactgtcccaaactttttattaaaaattaaaatgaaacaagtatgtgtattattttgaaaaaaaaaataataataataataatcctacatagctgtaatgaaacatagatgtagtgtttggttggttggaagtaatgaatattgaataatccttttgtaaaagataaatgttaacgaggtatatcataggtgttcataaaataaaattgttaattttaatttaatctacatgatttaatttaattcaattttaatgtataggtattcgtacttgtacgaattagattagattgaaaaatttaaaatacgtacttatacaaattaaatattaattaacatgtaaaaatatctgatacacaattcaattaacatatttttatataaattttaaatatatatataactaatatttaatgtaagaaaataataataaaaaatttaacacatataatacaaatatattctaaaactttatacatcaaatatatattacattcttagatatatataattaatttattttttttatatacaattgaaataaataaatatttcttttacatacatttatttatttttatttaaatttgttattttattttatttattttaatttgttgatggagacataaaataatagtaatttattttattttatatttttttaagataatttgatttattttgttgatagttatgtgaaaaagatattttgttgataaattttaaaaagtaaccaattcaaaataattcatcaaatggatacttttacggattgaattgaattttatttgagttattatacgaattagattagatatccaaaatataaactttgtacttagtgcgaatttgatgcattataagtaaaatggtgtagatgtgattggatgaatattcctacgatactttaa

SEQ ID NO: 75995 - DNA, 875 bp, Cannabis sativa
  modified_base (433)..(447): a, c, t, g, unknown or other
ataccgtattgaagagtttaataaacgcttcaatcagctttgcaaaacatatccacttgtcgctaagtatcttaagaatgatgtcaagtttagaaagtggtctagagcatattttggtggtaaccaatatgaagtcatggccactaacataattgagtcagtgaataatttgatgtaaatggccagagagtatctaattattgttatgattgatttatctttagcatgatgggaaaatggttccttgaatgtcaacgtgaagcatgtgtagttacaactccgttaacatcaaagagggaagaaatattacgtaaaagatagaatgaagtctgttcattgataaccctccggttaaatgagaatgagtacaatgtgatgtgtggagacctcgttgtcatagtaaatttaaggtcaaagagttgcacgtgcaaannnnnnnnnnnnnnnaaacttccatgtatccatgcaatagccgcaacaggaaaggcgcaatcccaaaatactgggaaactcatatgttctatgtgttcatagtgctacacattaaaatattagttgttagcaattatttatcatgtacctctaaactcacaatagaccgacattcctaaagatattcttgcaatacaagtgatagcacctcctcaagacaagaataaaggaagatcaagaactaatcgcatagcttccaaaggtgaatttcctaagaaataatataattgtggagcatgtggatagtcaggacataattcataaacatgtctacaagtatcatcaaatggtagaagcacaattcatgtgtgatttattattatttagttctctaaattatatattgaatatttcttgtgtttgatatatggaaacttttattc

SEQ ID NO: 75996 - DNA, 808 bp, Cannabis sativa
atgggttttactcctttgacttaggagattttgtcctagtatactaaagaacatgaaaatattgcttgtgcgaaaagcaagaagagttccaagaaacttgagggggtctctgagctccctttcggtcccgttaaaggatgttatcaatggtccagatctggtgtgagactatgttcatcaagctactggttgggaagcaaatgaattgcattcgtccttgaattgcttgcaccaactcgaagagattattgtaaagagcaatatcataccccacggatgagggattttccactggctactcagagaccaggagactctgaatcacacctatggaagcttcagagcacagagtcagacacaactaatgtccaatactagtctttcgctactacttagttgatttctttgtttttgtgggacttgctccataccaattgatcttgcaggccaatcgtttgatggctagactttttattttttattcatttcgaaggtgggaggttcccaccctattgaaattttatatttttacgaacttatatcattctctaacaagggagataagtttaaggataggttttattctttgcaactgcatccgaacaataagggccaagtcccctataaacaccaaaagaatatctaattgtcaaagagtgggtcttcttacgactcttagggctgtcaaaaatcatataaattgctatttttaatatattttcgaattgataatttttaatataatacactgttgggaatattttaccaggatttagatttactaattaacaagtatgttgattaacat

SEQ ID NO: 75997 - DNA, 1241 bp, Cannabis sativa
attaaatttgaagtcagagtccaactgtacttgtagttgactttagatcccagtccggctttgttcaagcactcggccgccagtctatttcgacttagtgaattggcccgtaagctgacttgcaacgttacaagtttacacatgtcatgttctcaaaaacacaaataataaggtatattagtgcactctttatcataatagaatttttctaaatatatataaatattattatgtatacaaaataataataacaaaaaaaaatgaatgttcggtgtattatagtgcaggacatatatatcgtgcactttagtacgtacggtaaaatagtgtgatatttgtcgttacattggagcaatatggagcagcaaatccaacaaataaaatgcaatcccgttggagctgatctaaaacaaacgtttaacaacaggtgcttttgtttttagttatatttttttctagagaagaatatattacaaataaacaaacgaaagcatgaaaaggaagtcggcaacattttgacatggacatgatgatagtaccatttcaattcttttagctatgacatcactatgttagattagattctttagcataatcctggtaacttatttattttttctaaggtaatcaaggtaattattgtgacccattttttcctttatggtgtgacacatcaacaatatgtggttgttgtagggtcactaattaataagataagagtaccttttttatttaaaaaaaaaaatagaaagataagagtaacacatagcgtacactcaataatacattttccattttagtgcgactaaagaatgcaaattaaagtggcgaatgaatgaatatataagaatagaaaaagaaataagtaataagagtaggaatgagaatagaatgaaataaaattgaaattgtataaaaaaaattgattaaaaaatcattaaattgtttaaaaatagaatagtcattctaccataatagtaggaaggacattccattgtaatgacatttcaatactttcaaatgcaactaaataaatgaatggaatgaaatttgattctttttgattcattctattttattacctccaatcaaatgccacctaaagtctgataagagcactcacatcaatgtctctattttattttctaaaatactttattaaaactcaattttatttattttaactcacacttttacattacattatacaacaattcctttataattttctttacaacatt

SEQ ID NO: 75998 - DNA, 661 bp, Cannabis sativa
ttttgtagtttaaaaagaggcgggccgtgacactaccttgtactgtcgcgacccttgaagctcgatttttggtagtgagcttcttgttgtgttgattgataatattttggctataactatattaacattgctagaaattggaggattcaagatgttttggaaagataaaagagagatctaaaacttttattcaaaacattttttctcaaagtgaaggcatcatagtcaaacgggtgtttgaagattcagacttgattttcgatcacaaacagagcgtaataagtatccaaaaaataaaaattttcaccaattattttccaaaattcaaaattccttgatacttcattatattcatctcaattaacatattcattctcattttaaattcacattttgaatttttctattaaaacctgaaacaagtagaaaataagcaaaattctgcgcaaaatgaatataatcagtttcaatacacctctaaaatactttataaaatgtacataaaactagtatatcaaattacccaaagcataacctttactttccctcgagtaaagctgtaagaactaaagaaaacacaacataaataaaacaagtcaaacaactgaaacatgagcaatttttatgtaagccaaaaaagtcaaaccatttgttgaactcc

SEQ ID NO: 75999 - DNA, 744 bp, Cannabis sativa
aaaaagatgataaattgtttaatgtgtgttttgcatcagttatgggtgtttacctgtctcctttagttttttgacaacattttcttcttttctttcttgtttcaaattcttcttaattcctttcgcaattttctccattctttttctagttttttatggtttttatctgcttcaagactggtcttttcgatcctcgttactttcccatggacccaatattacacaccctaaactctaccttttcactcactccatcatcacgttgcgtgatgcctctgcttcaaaccctttccacaaatcaatctatgctcttattgctcaagttctctctagtaaacctatctacaaaatagaacaaattatatgtacactttagacgatttggacggagaagaattgagtggctcatgggcaaagagctaaggcagcttttaatattgtttgtagcaaactacatggacaactaccgttctactcaggtgaaatatggcccagaaatcttagcagccccacggtcttcacctccatcaattgaaccagttctttagacacctctgcaggtaggaaatctaaagctcaatgtcaatgcagccgtggatctttcaaaagaaactactggtataggtgctttgattcgagactcctatgtaggggcggagccacagccaagagaaggggggccatggccccctaaatatttcaaaattacattatatatataaatatttataaaataaagtatat

SEQ ID NO: 76000 - DNA, 811 bp, Cannabis sativa
  modified_base (72)..(72): a, c, t, g, unknown or other
acacttgatgaatcaacaaactgacgtaaatacaattaaaaaaaaaggtgagaatgactctccactccactnccacacaacaaacacaaggaagagttggtttgattaaatcgactaagtatgtccaaggtagacaaacgatttttccaggctagccaacttatgaacctgtgtttaggagtgcaaaatctatcccaaatgccatcataacgccatctaccaacacttttatgaggtatcttagcgtacatattagctatggaaaactgataattgctaaagtttttttaggagaagacttgttttatcatttccttggtttgaactattcttttccaataccaactagcctctaaagggatttggtagtcctaccaatcttgatttttgagatacacctcattaacccattttacccaaaggttttccttcttggtagtattagcccacacatgtttaccaatagcacatagattccataaagctatatctttgaaactcaaaccaccatctttcttaggtttacaaagatcatcccaggaaactttcccattaccattgctcatgcccactcccttccaaagataagcacggcaaatctgtgtaatcttttgaattactgcttttggtaaaataacaatttgggaccaataagtgttaatcgacaacaagacagagttgatgagaaccattcttcctggttaagaaaggttcctcaaactctaagttttgattttggttgtcattttctccactaaaccctcacaatctgctttagaaattctttttgagctaattgccattccaagat

SEQ ID NO: 76001 - DNA, 615 bp, Cannabis sativa
atttaagacatcctgcaaaattctgagtaattttgaataatttacaatatagaaaacagagttcaaatagtctatttcacacacgtataaaataaaagaccgctacatatgctcaacagactgtttgaatcctgttttcatcgtattaattttttttaaaatttttcaaaatttctaaggatgtcttaaataactacaacatacacaatcataaaaagaaaattaaactaaaaattcttcagggtgcattggtgcaccccttttaaaaaatgcattatagatttttcatatattatgtatattaacaaaaattaatatttattaaaaaaaaaactaatttgtaatcataaataatattatttttagttgtaacttttggttggtgttgtagttataatggaaagagttttaacactaaatttaatgttaaggttggagttgccctcacacccttaagtttaagaaacactcataatattgatagtgtagatttaatatttcaaccttataatagctaattgacaattgttgcctctgattttgcccaaaatacgtggcccaaccggatgacgacacgtggataggaaagggttagcatttaaataaaacagctaa

SEQ ID NO: 76002 - DNA, 693 bp, Cannabis sativa
atttaaggatatgtccccttcatcaatttgtagaaaggctcacgatgaaaagagtgtaccctttttgagaattggaccacctctctaacatatcttttctcaatactgtgttcaacaacgacgttgtacactacctgttactatcaacaatattgccaaccatacaacattcacttttaggaattaagcctcaccagctaggcccaataggtccaaataatgttaaaataatgtatttttcccagtagtgggctatatttcacacaaaacccctagttagaaacagattcgtccgaccaatagaacatgggtgcctatttataaggtattttctcatccatgcaaggaatttttatcttttgaactagctacatgaaaagccctaccgatagggttgactagagagtggggcggccgacaactagccccaagccctacaattttagagactcctaaaaaattaaaattaatatatatttataaataaaagaaaaatataatataaataaattttggttaactaaattacataaaaaaagttgcagcagaattagtaagcaagggtgtatattgatatgctgaggtgttgagtttgattcgtcactctatcattttttgttgttttaaaaatttaagggttttatatacaaacatatatatatatatacatatgtgttatattatttataataa

SEQ ID NO: 76003 - DNA, 1397 bp, Cannabis sativa
gtgccagtttattaatctttgtttctttaattttcttttgtttcatgttttgtttttttgtttctgtttttcagttgaagattaaaaacattcgtccaacttatgagaagaggcagaagttgcaattggaaggcttattttagatgaatctattgatgattgtggtaccactagcaaacatttgagagtgattcatcttctaaaaagcctgattcagaggacatagaaatgttgaaatctaagttgaagttggtcatttccaatcaagaatccttggccgaagattttatttctttgaggtgttttgttgaacttaatttcaagtctgtcatgactgtaattaagaatattcaaaaaaaagttaatgtcattcatcgtcgaccttctgatgaggtatttatttacacaattcttgtttcatattcttactgctgttattattagtttttttcctattttatttcagttgcaatactgtttttgaaccaggttaagtcatatgatgaatttgtcactcaagattctgatgatgatgatgatgctgctgatatgatgatgacaagggattacctgatctagagaatattgactctgatttcgatgatggtgatgagttgggtaaagatggtggtgatgctgctggagttgataaggttgtttgtgatgttcctgctgatgatgttattcaagctgaggctgttgcaggcagtgaagagagggccaaggatgttgaaaatgttaaggccaaagagtctagtgtaaagggagatgaatttttcaatggtttaagccaacttgaaattgatgatgagcaagttgtgttcgctggtttagaggttgttggtataatcaatgtaagtgtagtttatattctttgttaagatgtgttagcatttcagttttattttagttgcttgacagttttatgttagtttggtaatttttactttttttgatgttcaaattttatatttcatgttctagattccaatccaattgttgctgttgaaaaggcagctgttattgcttgtgatgaagaagttgatgacactattacttatactcctcttttggataagagacagggtgccccaacattgaaatcaccttttgtttattatgggtcggctgatgtgagcagcactccaatggaggtaatatcctcaggttctcaatctggaggagatgagagggattttaagatggttacgtatgtgaagggcttttacgctcttaacgatacatttgctgatgctgtctctcctgaaattgaggcaaagtttgatgcttggattggcaaagaaatgctaaaacatcctaggtgattattttctttattctgttttttattttttttatttgtttgaatttcatttttattttggcaattatttgaa

SEQ ID NO: 76004 - DNA, 893 bp, Cannabis sativa
tataggcgacggtttaaacccgtcgcctatactataggcgactgtttaaaacagttgcttataagggtccattgaaaaatcatcacctacttattcttgtcacatttcccacgtgcccacctactttttttctatttctcacatgcccacctatatcttctcacctatttcttctccatttcccacaccctaaaatgaaaatcttaactctccaaaaccccacccacgcctccgcaccatatcaccctcctctctcgccgtcttcctgcctctctcgatctccatgtctttttgtctgtctcgtccatcgatctccacccacccctccacccgtcgatttccctctactcttcgtcacatacgtcggacaaccaccacctcccgtcggtgtccctctcatcttcgtctcatacgtcggaccaccaccacctcccgtctgtctccctctttctctccaagctcagtataaatacatttatttatttatatacatttttatttattatatatatttattttgttattgtataaatttaatgtgttttaaagttgttgttattgtaacaatattaattagttgttttattttaatttaagtaaaattataaagctaatggaggaaaaaaaatgggggaaaatatagatttttctgccattaagggctgaaaaatctgtattttttttcttttttctttttatattcccgacggtttaaaatcgtcgcctataacagggtatcggcgacgatttcgccgattttaaaccgtcacctatagtataaggtacggttataaaccgtctcctatacccggttataggtgacggttttaaactgtcgggaaacccacattggcgacagttttgaaccatcgcctattatgctcattttacga

SEQ ID NO: 76005 - DNA, 861 bp, Cannabis sativa
  modified_base (364)..(368): a, c, t, g, unknown or other
ttttgcttttcagacggctccttgtacactggctccctttgaaggctcgcgttctctggaattagcttatgttcccgtagtttcaaggtcgtgcacaataatagccagtcacgatcttgaacagggaggcttccgagaatttcagcggcttctctgcgagttgcatctagcacaggtcgagctggtctatctgcggaaaataaggaaatgcagattagctcaaaatcacaaggtaacataaaaactaggtaaggaaatgtgcgacgtactaggtcgacgattaaaatcagccctaattcctgggactttaaacacgtaaaaccatttagatttctaatcccccatattggaaaccatgccttcnnnnncgttgatttcagaagtggcccacttgctgaaatagtagaagccattgtggagacccacgttctttatgtcataaaagtaactaaactcctccatcgaaggctccctatgcgcgtactccatatacatcgcataaaaccctaaagctatgcggtatctatttagggtcagtttaaaaggggacacatcgtaccgcttgagaatagcggagatgaatggatggaaagggattgatactccacatcgaagaatgggaatggaaactacgacgtcctctaacggtatgatcgcggggttggtgaagggaaggtgcggtctttgagtggggcgaggacgcatggtgcagagtggcaataagtttaacctcgaaaaggtggacaagttagatttagtgactcgtgaaactaagtcctcgcaggagaatgactcattcagttgcgtgttgtcaactgaatcagtctccctccctttggcatctccatcctcatctgattc

SEQ ID NO: 76006 - DNA, 839 bp, Cannabis sativa
aaaaagcactgtagcatgccttagcattaaggcgttacaccaacattccctgtaattgaactttcaactctttcaattctgtaggtgccatctgatatggagcttttgatataggctctgcccccggtattagatcaatttcaaaatcaatctcctgttttaggggaaaccccgacaactcctcttgaaagacatccagcgtttctcgaaccactggaacatgttccagtcccgttggtgtttccttcgtagtatccaccacattggccaggaaactgatacatccatcccataaaaaatatcttgccttaaccaccgagattaatggtatttgggatccttgaaacttgcccacaaacacaaatgggttctcaccctttgattcaaaagttaccatatttcttttacaatcgatagttgcattatactttgcaagccagtccatctcctgtataacatcaaaatcctctagattcaattaaatgaaatcaactgatctcgtccttcaacaaacactggaagggacctaacctatctgctagaaataaccagttctctagtaggcagcaaagtgcgaaaaccactcagtaaaacatcactaggtctatgcaaatttccaatcactctacttgaaatataggaatgtgtcggactagaatcaattaaaacagtcaataaagtaccagaaatagagagctgacctgtcacagtggaaaggcaagcatcccaattgaatgaccatgctcctccattggccaaccaagcacagtagatggcatcaaagcatatgccatcatagatggcaatatcttcagccactttctactcttagtctgtca

SEQ ID NO: 76007 - DNA, 694 bp, Cannabis sativa
accaagtgtaaccaccaacgaaccccaaatcaattaggccggtgcgattcaccattcttctaaagtcaaatgcatagcgggaggagttgccgctgttagcgtagttgatacgttctgaatcttgcaaggtgccatttaaatcgcctataataagtatgggggttattgctaggagaaccaagtctcctattgagcaccagaattcctctttgtccgtggcatgaggggggccgtaggtacccaagaccagccatttttctcctggggggtcagaactaatttctccgacaataaaaaacttatttgctgatagaattttgcattggacaccttttaaccaacataatccaagacccccagataaaccaataggcgggatataatgaatcccagtaaaatgcagcttaatacaaattgtaatgaacttactttgtggtatgcgagcttcagagatgagaagcatatccggttgatgctgacggatgagagccgtcagttgacgaactgtcgtggaactcccgagtccacgacagttccaagcgaggattttcatggcgattgtggagacttttgcaggcaagtctccgaagccccaaaacaaaaatccacatcgctggcgtgagcattgtctggcagttcttgtaatcgacaggaagaggttgggttagctgatttctcaatcaccacaaagtga

SEQ ID NO: 76008 - DNA, 894 bp, Cannabis sativa
acacatctcctaattatctgatcggcgcagtgcttgtagagcattggctcttcccaataataatgtttcacctcagaaaagaacttcttcaattgttgacacgacatctcgggaggagttatttttgcagcaaagaaataataatgtttcacctcataactcaaacgcagacgcattggcccgtttggcctcaactagagaagccgagctgcttgatgtgatccatgttgatgtgttaacacacccgactgtgagtcgagaagaagtgatggaaatagatgttgccagagaagtcacttggattactccaataatctcttacttggaaaagggaatcttgcccgatggcaagatagaagcaagaaaactgggacagcgggctgcctgatatgtcatctatgacggaagattatatcgcagaagcttcagtcaaccgctacttaaatgcattgacggagaggaatgcgactatgtactccgcgaggtacatgggggtatctgcgggaatcatactggtggtaattctcttgccttagagatcatgcggcaagggtattactggcctaccctgcggcaagacgcttttaacttcgcaaagaaatgcgacaagtgtcagcgaatagccacgtatgtccatcgacttgataggtgaattaccaaaaggaaaaggcaaagtcaagtacgctgtagtagcggtcgactattttacaaaatgggccgaggccaaagcactagcaaccatcactgcacttaaactgtgcgagtttgtctataactccataatctgtcgatttggcatcccttacaagctcatttcatagaacggaaagaaatttgattgtaaggagatgcgacagttatgcgatgaattagggattaaaaaggcgttctcag

SEQ ID NO: 76009 - DNA, 736 bp, Cannabis sativa
gtacctagtttaggttatttaggtattgtatagcctattttgaagctaatggaagttagggtttgtccggttttagtattatggtttgtgtcaaaaattggttaagatattcacttgattttgttgtcgtgacataagatcagaattgtcgagcgttgtttccatacaggttagcgtgcacacttaacttctggactgaggtaagaaaatttttatgcacctctcagtatgttagataagaaacgattataattgttggtgcctcgattatgatcgaggtaatgttgtgcatttgttgtgactcgattatgatcgagggaaagaaacagtcattactgttatgggtaattactcgtttgaaaccacaaataggtttcttacttatcgtttgctttaccgagcaacgatagtgacatatgtagctcgtggttaacgagtggtaagggtgctttatgaggcactgagattgtctcgtcttattgacgtttaattgcatatgcatgttgaatatgtgatgaatgatgagtatgtttattatgtcatgttgtgattacttgcattttacactgcgtgtgatttagtagcttttcttgctgagtttctgtgactcacgggtgcttcgtggtgtaggtaaagggaagggtaaagaggatcaaccatgagtcataggttttccaacagtgtacatatcaaccgtagtgccccgggtaccagtggacaagatccacccttttgg

SEQ ID NO: 76010 - DNA, 876 bp, Cannabis sativa
gatgatgaaatatgattacaagacaagcaaaggagtaatcaagatcactaaagggttgctaatgcttaaaggaaattaagaagaacattggtctcttattattcttgatggaaaagacttgtcacaccagcacatgcagctgctgttgacaaatgtaactcagaatccaagttatggcatgctaaattggggcacattggtgaacaaggtttagttgaattatctaaacaaggtttattacaaaattacactcatgctaacctacctttttgtgagatatgtgtacagggaaagaaacatatgatcaaattctcaaatagcaattacagagcaaaatcagtcctagaatacattcatgctgatctgtggggagccagcagggtaaaaactcaaggaagtaaacaatatttcctatctattgtagatgatttcagtaggaaagtttgggtattttttgctaagacataagaatgattgtcttgaagaatttaaaaattggaaaacacttgttgaaaaccaaactaattctaaaatcaaagtgttgaggactgataatggcttagaatttgttaatgatgagttcactgaattgtgtttaaagtttgcgatccaaagacataaaaccgtaattaaaacaccacaacgaaatggtatagctgaatgaatgaatagaacagtgctcaataaagttagatgtttattgctagaatctggattaaagaaacatttttggggagaagctctatatactgcttgttatctaattaacagaagtccaaacagaaaaatagggttgaaaactcctgaagagctgtggtctggtaagccaccatctctgtcacacttgaaattttttagttgtacagcatatgcaca

SEQ ID NO: 76011 - DNA, 680 bp, Cannabis sativa
ttattgaggtatagtatttttttttttgtgatttttttggttgttttatttttgtagttatactgttgttttagttaatttttatgttattatttcaggatttgagtcttaaatacatacgttctgagcattactaattctaaagttatcacttgtgagtatagggtattataggatcattaaggatatcttaactattttggttgaccgccaaaaagaattgtagtgaattttaatttcttacttgtttgtcttctttaatttatgagtagtctcgaagttttttgttgttgattgacattgattttgaagacttctggttgtatagctgaaaattatggttgtttttcgggtgttctgtgattgattagtgtttgtcgattgtgattgttaaatttgagaaactttagtactatttgacttatacacataaatgttataaatcaaatcaaaattgtataaatattaaattttccctatttttatatttttataaaatttagcccattttatattttgttaaaaacttagctagtggtagtgaatgtgaatgtgaatgtgaatgtgaatgtgaatgtgaatgttaaaagtggaatacaaaattaaaaggtatttacacttacaactaattattaattatgaggtaaaatgtgaacaaaattaaaggtagaggagcatag

SEQ ID NO: 76012 - DNA, 600 bp, Cannabis sativa
taatgtatcattaaataattaaataaattttataatttttttacgataacaaaattaattttaatggagtgaccatgtgataaaattatagcatgtatatatatatgataaatttaaaaaaaaaatagtaaatttaagtggcactttttaaaaagaatacatctaagttataatctcaaaatatatgattatatattaccttgttgaaaatagaataaaagaaaacgtatgaagtatgttatttgaaatctaatttttagcacaataaatcaatattcataaatttttaataaattaataaaatttggttctccattttaaggataccactaaaagactacctaaaaacatatgactaaataagaaaaaaaaaagtaattaattttacatatttataggaaaatattcaattatatatacatttaatagagaatgaaaaaaaaaagacgatgagaaagaaaatgaattacaaataaatttttaacacaattttgtatcctaatctatacatccaaacaaataaaatgaaaactaaaattgtaacataatatttttattaaaaaaatcaattattatatagttataattaatatttatata

SEQ ID NO: 76013 - DNA, 825 bp, Cannabis sativa
tatgctaaaattaacctaaatttagtactaaaaataacctaacaaaattcccccaaactaagattttactcgtcctcgagtaaaatactaactaacattaaataagtcaatatccaaaacatgagtaattttcaagtagcttaaataacatgattacgaaacaattcacttatgcatatagtccagaatttaagttcaattacacccttgacagctctcaatttgtcttcatttagctcacgaaaccatagaatgcaattaactataattgaaccactttatgcatgctaattacagccatcaatccactgacccgaaattctatatgcttgcaatacttactattctccactaatataaattaatgcacaaccaagaatcagaaggtctttctaggcttgtattgttaggcttaggtaaaggtagatgaaatggtcattcaggcttatctataccataagcttctccaatcatatcacccaaaatattttcacacacccccaatacccctttttctaattgcatgagagatgtttttcaacaagattgcaacaactttatgtttattttttttttctttctacctttgacactgattgtcagattttcttttcttcttttttttttttcaagttgttgccaatcaaaaaaattttgtattctctcaattttcactccttttccatacacatacaataaactccccatccgaattcccccaaactcaagatccacttatggtataattagggttaaatatttaggatattcatgggtttatctttttaggctcaatatgtgtagaacaaagaataggctaaggct

SEQ ID NO: 76014 - DNA, 557 bp, Cannabis sativa
aaactatcctacatgcatgtgatcagggccggttctaggcataggcgggctaggcacgtgcttagggtccacactttatgggggcccaaaataaaaaaataaaaaaatttattagacttttactcaagtaaaatttaagtgtattataagcaataaatattcataacttagttggttgaggtagatggaataatgtgtaaggcttcaaatccctgcatgtgatctgataaatttataggctttttaaatgatatctgtcgttcgaattcataagtcaaatattcgatcggtgctgaaattctcgagttgccttaaattgctgataactaatgtaatcatgcattttgaccaaaaggctcaattttcgttcaaattaattaataactaaattaactacaacaagtggacatatattcttttccctatatatactttgtataataaaatgaacagtacctggcaggacagctactcaagttttaccaaaatattaattgtttaagttgtgtacgtagactctacatatatgtatatagaagtcaattgttagttatgtc

SEQ ID NO: 76015 - DNA, 1023 bp, Cannabis sativa
aactcgaaagacccatacctagttacacaggttgtcttcgcttcatcccccactgcatttcgaacttgccagtaccccgcccggaggtccaacttggtaaagtatgatgctttcgtcagcctatcgaacaagtccgccgcatttggcaccgggtacttgttcttcactttgactttattcaaagccctatagtccacgcacattcgtaatgacccatctgacttcttttgaaacaataccagagcaccatatggagttttagatggcaccatatatcccgattccaccatgtcgttcaattgcttactgagttcttctagctctaaagcacccatcttgtacgttgccttgactggcagaactgctcccggtactaattcaatcttgtgatcaatctccctcctaggagggagttccttcggcaactcatctggcatggtgtcaccaaactcatccaaaaacccagccacttcatcgggtacttatacccactgatttggttttatctctatcaaggcagccacatacgtctggttgcctttcttcttaatagagtttccaaattgggtcgttgattccaacacaacgcccttttccttgttctgacttgaggagattgattcaacaaagcatgggcactcatccacacaaatcattacccgtctcaaatggggtgcaaccattgccttggttgcactcataaattatactccgagaatcatatcaaaataatccaatgggaccaccatgagtttgaacttagactcccacgccccaacctttaacatcaccgtagcatatccttgaattggtttcgcttctaagtttactgccttcaaccgagttgaacttttaatcacttctaggccaagtctggtggcttctttctgtgccacgaaattattcgttgccctcgaatccaccatggtcgtcacttctctcgcattgacaaatgccttcacttacatgaaacctttgaatagacttgatttctcagtagtgatagcattgagaagttgtaag

SEQ ID NO: 76016 - DNA, 817 bp, Cannabis sativa
aataaaaactaaagtgatcttaccgtcattgttgtcattgacacttcgctgtaatcttcttcttctccgtacatttcctcctagatttaaatgctaattttatatctataaaataaaattactatttaaatatatttattaattagacccacaaaatgtcttacttaacaaataaaacttctctttattttcttctcaaatttttccttccatagtaaaattcataaataagacataatcttctttagaattctaactgatttactaaaccaattaatttattctacaaggcaatatattatctcaaataatgtggagactatgagcgtaagtaaatttcctaacttattagtttctcttgaatccattataaattcagaattgaactcttaattacatagaacactctatataccaaatatagatacactataaattatctattgtttcaatctaaatatttcaaacttgggattttccttttgaaaccctagtctctttcacactatcaatttcagtactttttttttgcttaattttcagtaattgtatacattcgaaagatgtttaatgatgcagccggttgcaaaaccattgttctcaacttaaaaactattaaatatagcggggttcactccacgtgtgcaatggttttcataccatttatcaccaaacgggatagaatcctttgacaagctaaaggtactctttgtatttaattacagtggaatttgcggcataaatacttattttgttcattttgtcgctaataagtacccaattttaaacaattgcggcacaaatactcaaaactcca

SEQ ID NO: 76017 - DNA, 648 bp, Cannabis sativa
  modified_base (273)..(282): a, c, t, g, unknown or other
ttcgccgcaaattgctctaaattaaattatataatttttttagtattgtatattaatatattataacaaaaacgaataaatatattagatcattaaatatatacgacattgtttgatatattgtatcactgaaaattaatatatcttagtaataaaattatataccaaaaaaaaaaattaatactcaaattatataccacaattaaaacatatatagatatatcatgacaataaaattatataccaccactatatataataaaatagaaactnnnnnnnnnntatttaaaataaatagaataattagtacttttaccctttgaactttcgacaatactaattttggcccctaaaatatacagattgttaaaaatcccctgaacttttacatttatagaaatttagtctttctattaggttctgttccattattccgtttaaacgattgcgtgtctttgtcaattagcaactttaccctttaaactttgacaactatcaaattgtaccatcttaaaataaaaatgagaaagattgaacattttttttagtaaatcttaaaaaattgatataaatcttaagaaaaaatcattttgaatgattaaaaaattaaaattttaaaactaattaagcgatataaaaaattattta

SEQ ID NO: 76018 - DNA, 1010 bp, Cannabis sativa
cttccctttttataaatagggttgaaaaaactgcctctaaaggctaatattgtagtagtgtatatatctaatgtcaagatctttggccaaaaccttgtctctaacaaaatacacatctagctcaatgtgctttgttcttgcgtggcaaacgggattagatgctagtgcactggcccccatgttgtcacatcagataattggagtctgttgaaaaggaaattgaacttctcggagtaaggattgatccaggaaagttctgcagcaacttgagcaagaactctgtattatgattcagtgctcgatcttgagatgacaacttgcttctttgatgaccatgacactagggaatctccaaaatagacacagtaaccaactactaactttttgtcatcaggacagcaagcccagtcagcattagagtatccattaagagtcaatctgtcacaatgtttgatgtgaaggccatgatcttcagtaccctttagatatcttagaatcctctttactgcagaccaatgaacattagttggagcctatagaaactgacttagtttgttgatagagaaactaatgtcaggtcttgtgtgtgtaagatattggagagccttaattagacttctatattctataggattttgtagaggtgtaccatcttgtatggaaagaactttcccaactgtcatgggagtaggatagggttttagatgtgtcatgcttgctttcttgagtagatctgctatgtattttccctgagacaagtacatgcctatctcatctctatgcacttcgatccctaggaaataatgtagggaaccaagatctttcaaagtaaaaactctgttcaatttgctggtaaattgcttgagtttatctgagttgttccctatgacaattatgtcatcaacataaataagcacaaacaccatgtcagtagtatttctataaaagaacagtgaggcatcagccttagaattgcaaaatttccactcaagcaaagtttatttcaatct

SEQ ID NO: 76019 - DNA, 517 bp, Cannabis sativa
caacataaattaccacccctatgtttgcgtaaggccttctattctattaagttcccgtgttcgagtcccagtaaagtctttttttaccatatataattataaatttattcaatacaaaagtgtacaaagaagagaatcgaatattgaaccggcctcttatcacaccaaagttaattattattataagtgtttaaattatctaattacaatgtatattaagggtcccaaaattttacatgatttttttaggcacgacctgatcattaataggttaatatgtggttattttatgagaattactttatatatattattttttttattttttaaaaaaagtttacggtttgagttgctccgataatttctatgtgggttgctatgtgaattttagttacgatttgagttgctatgtgggttactatatggattttcgtaaaaatacataaaaaactgctttatgttataaaatattagtattatgtaatattataatttagagaaagaaaatagagaagag

SEQ ID NO: 76020 - DNA, 837 bp, Cannabis sativa
tatattttatccaataagttttaagtttttatttaatatagaaaatctatatctatatataaatatataaaaaaaaataaaaaaaaaagtgcaaaagagtcttggtggtatgttaaatttttttcaatgtatttttaaaattttgtaacattttcatattttctttagaaataaactattacaaaattacaaatacaaacttatagtcctacatagataatactttttttttccattaaaaaaaaaaaaagtattatctatgtaggttataaataacatttttattatgttactttcgtatttaataaatattttttaagagtattgatttatttattactttataaaattaaataatttattattcatattttgataaataattatatatctttaataatgaagtaatttataaattatatatatgtttttctttgtttataatttttctttaaaagaaataaactattacaaatacaaacttaaagtcctacacagataatactttttttttccattaaaaaaaaaagtattgttataaataacatttttattatgttactttcgtgtttaataaatattttttaagggtattgatttatgtattaccttataaaattaaataatttattattcatattttgataaataattatatatctttaataattaagtaatttataaattatatatatatatgtttttctttgtttataatttttctttaaaataaaaatacacatatataataacatattttttttatataatataataggaactataattaattcaatattttttatacatataaatatgttactatttttaatatat

SEQ ID NO: 76021 - DNA, 1243 bp, Cannabis sativa
ttttttttttttgttgtaataatacttaaattataattttaaaatttttgtttactgttaagtgttaagtaaattgctaataaattttaattggtctaggttattaattttttttttttaaaaaaatactaatttaaatgtatcaataagaaaattacatgtagataatgactggactaggtacttacagagttttagaaatataactaaagtattattatcgcaaaaaattaaagttaagtagttatttacaactggaaatcaaacttaaatatttataccgtaaattactttaaatttttttgacaaagggtgtcatgagtgtgtaatgtgctacacattccaattcccaactaaattgtaaatatttattgtttacaatacacttaattttatttaaataaaaatctaatataactttttattttttattttagactctcaaaatgtatagattttaaacataagcctaacctgcatatatttaagtctaatcctcattataactctatccgttccgtggattcattgcatgaaattatttgatcttttcctattaataattttgtctggtgaaaaaaccactttgtctgtccactttgcttttatagtctatataatatatgaagtgtttttttttaattattatttaataaagacttatgagtacaatatccatggtaacaaaagtggattattgcataggatgaaaagtaatccatcttgagttaattttgaagaataagcacttgaacaccactttcaccaaaggggacaccactaacagaggagacattaacctgaatattacaaaccccaatcctctacttgtttctaatcactatgtcagatgtgattaattggtgaaagtaagtacaccattcaacaaaataattataactagataaagtaataatataaactacattactaacaatatatattagacatatcaagataaataacaatatagtattttaatttcatttttttttaatggatggacatgtgcaattaattaatatctgtagtttgttcgatttatttattgatggctctaattctaaatttaaaattaatggtaaaagaatggagacggcacaatcattatttctctatgtggttttgtctattatatatggcgaatttaatttagggtaaatactattttggactctctgttttacaaaagttatcaattagactctgtattttgttaaatgacaaaatggactctgtattt

SEQ ID NO: 76022 - DNA, 711 bp, Cannabis sativa
gaatgagggagaggatagttgtttgtttagtgttaggagtaaagtagagggatggatattaaaattattgttttattatttttgatacaatgatatattattttttaaaggctaattaggatttttgcttaatgtgttgttgtgttttagtcctaatgtgaagatttagcagcgccagcgagagcagatggctatcatgagctttctagaaagactttcatctaaatgtgattctacaaagtcacaagttctttctgggtttgatgtctcctctttaaataatgtctttagtcacgttcttcatacataaactactcaatttgtttctattaatagcgctttggctagtcataatattaataatcatgcaccattacaaaaggaggtaatttacaagggccgaacaattgaacaccaaaatttgaaagtattatgaaattaggccacaccaagtttgagtgcaagaagctacaatttaaaaatcagcaaaaacactatgttaatattgcaatcactagtgatacatctaacaaattggtcgttatttctgcggatgaatttgccagttctcaaggtaccaggaatcactcaagtcttcatctccttttgtcactacaattgttgattcatgtaaatctaatgcgtgccttcttttcacctcatcgaaatgggtcattgattctggggctacatatcatatgacaggtaatt

SEQ ID NO: 76023 - DNA, 564 bp, Cannabis sativa
cccgatacatgctcagctacgggcagaggcttgctgggctcctccggtgcatggtatgttgaaaataatgttgataggggggtgaaaaaaggtgggcaaagtatgggaactggttgtgtggtgcgtgatggggaagggcaggtcctggtggctactgctacggcttggcagcaggagggttctcctcttcgggctgagttgcatgcgattaaggaggggtttctcttgggaattcaaaggaaatatcgacaattttgtattgaatccggttgtctacatgctatccaattgatccaaaaaaaaagaggatgggtgtagagatgaggatggaatattagattgtattaggagtttattgttacatgatgttgttaagggtatttcttttgtgtatagggaggcgaatggggtcgctcatggtttagccaattatgctttgacaaacaaagctagtgctatgtggattggggttaatccctcttgtgtaagtcttgctattgagcatgacatgcctaatcctatgtaatttggttatgtgttcaaaaaaaaaaaatagaagaaaaa

SEQ ID NO: 76024 - DNA, 526 bp, Cannabis sativa
aggttcaaagaagagaagatgaagcatatacagagagagaagatcaaagatataaaagcatgccatgcaaaaaagccaacacttagacaagactgctcgacagaggctactacaagcaagacaagagctggaaagtccctatccgattagatgttcgaacaaggacttgggggcaaatgttatcccaaattttttccactggatgcggcatgttcgtgtaagctaagatagaggacacatggagcacaaccttgccaatagcatgacaaaatcttcttgcaaggcatggcaaaaatgttaagcaacaagcaaaatgagttaagcaaaccgtcaagaagatgtacaataatgtctggctgaccaaagggagtacataggcaggccacgatgagcttgtatggtcggccagggtttgagcacaagttagccggccaaaggtgactttcaaactaagtgagggcttgttcgaccaaggaagcctgacctctacaagaaaaaggtgtacaaaggctagcctccacctaca

SEQ ID NO: 76025 - DNA, 938 bp, Cannabis sativa
tctgatttctggtttttttcgcttagtctgatggtgcctaataggggtccgatgattagttcagatttgaggttagggatgatgtatatatcagtttgatagggtgtctaatgttaagtcgattttttattgttgaggttgggtttatatggtggtccgatggctttagtggtcggttccgatgttacgtctgatggtggttcgattgtatggtccaatggtttttttgttgaattttgggtctaatataggttcgatgaggtccgatgtttgactgatttatggctttttaagaattttttatcacttttcttttagattcttattttaaaatatttaattgtgttttgtttttgtggatgacaaattcaactatttttgcgttcgttatgtataatggtgtttgggagcttgaaggtagaaattgagtttataatcgagctaaaaatttaacattcgagattgatatgaacgtaacctactcacgtttggttgatcttttgtatgaagaactcgatgttgacaaagtgcagtatgacttaaaattggaagtgaattacaagttcatgaaagggttaatgtatcgccctaaagttattagaaatgataagcatctaaggttatttttctctatgcttgcaaagaagccagataaatttattcccttgtttgtgactttggtgaagaagaatttctgtatcgatcttagtcccacaccaagtactgttaaggatactcgtagctaggttggaagtttcgttccaaaaacaaatctggaggtgttggcggttgatgtgttacctgaattaaacactatgatgctgacagttgacattgtaacacaaatgccctttcatgatgattttggtgatggtccagaccttgaatgaaaatttagaggtaataatgatattagagatgaccgagatacagaggtc

SEQ ID NO: 76026 - DNA, 932 bp, Cannabis sativa
ttttgcagagatgatcgatcaatggggcaaagacggcattacattgatgttgtgagtgccgagctgatcagagatgaaaataatgtccaacatctaatctaaagttgaaggacgatacccattgatagaaaagcttacttatgcctaatcttagcaacaaggaagttaaggccctacttccagactcatcctttttgggtatacactgaccaaccattacgccaagtattacaaaaacccaacgcttctggacagttactcaaatgggcagtagagttgggtcagtacaaaataatctttcaatcccaaacagcagtcaaaggacaggccttggcagactttgtagttgagtgcacaagcaaagaagaaaaccgttcaaaggacaacctggagccagtacaagaatcccaactgaacaataatgaatacagtcctaccaagaaattacacgtggacgggtcagctagaaatcaactgtttggtgcagggattgcccttgtcacacttgggggccaacacctgcacggggcagtcaaatttaaattcaaagcatccaacaacgaagcagagtacaaagccctcatttctagcttgaaacttgctcaggagctgcacgctgaacacatcgagatctgtagtgacccacagttggtagtgaatcatgtgtcaggagagtacgaggcccgaggggagaaaattatagcctatttaagcaaaatacaggatctgcttgcataattcaagagttacgctctgaggaaaattccaagaaaaaaaacacaattgttgataccttagcccgacttgcgagcagcaatataacagataaggctaatttagtcccaattcaattccttgaagaacccagcatcatctgtccgaaagaaattgagatgattgatacagctccgaactggatgacaccaatagca

SEQ ID NO: 76027 - DNA, 754 bp, Cannabis sativa
tgcatttctatttatctgctcgtgtaaggctagacgcctttggttcaattgatctcgcaaattaagctgatcacgtacatttttgcattgattctgtctattaccataattacttactgatcaacttggggaattacttttggattggtaactttgcaagttacttacactttcttgctcacttcgatatttgtggcgtggtgttctctcacctcatggtagattttcccatgtacgggatctcgaggattgagtttgcccctggcttgttgacctacattgggttgtatttgtttctaattcttatggttctcctcagactggccttcacctttcaaataagttagcgaactgccccttagtcaagtattcatacatactgtccctttcctcccttattggtcctcatggtatacgtggagggcgagcagagttgtggtaccctgattttgtggccctattcatcaacatgaactacccttgtttcccatggttgtttttcttgggagcgagtggggttattcagctcctgctctatgacgttgggtccttgtgcccttctgatacgtgactcgcagggtcttcctcgtggtcgtcgaataggttgctcttcttgtgttggtggggcatcgtttcgaggttctctgaccatagccattgctcgttctaactctttatcctttaactggattctatgagtctttgtcaaagtttttggtcttctgactcgacgattgggacataccttgtgggg

SEQ ID NO: 76028 - DNA, 997 bp, Cannabis sativa
attgataaaataaaaaataggagaatatactcatagagattgccgcctcaactcccttaatgcttttctttatatatatatatatattgatgtatattaataataataaatttttagctaaaaaataattgtaaaaaataaataaatgaaaaaaattgataaaataaaaaataagagagaaaactgattgcaagacctcaactcccctcatgcttttctttatatctctttatatattaaaagtggctatctaacgacatttcttgatttaacggtgtttttattttcctttccgttaacttcaacggaggctactgataacgttatttgattttataataataaataatttctttttacgagttgttacgtgaataaagcctcaaatagtgagaatattctagattacgaacgaactatacctcaaatttttaagatctctcgaatcaataacccaaccccattcttctccaatgcaaactatcaaacctcttcttccaaaagctttcaatgtcgtaagccactgcctgaaaatcctgaaacactcctcctccaagaaaggacttcgtttgatgtttatgaagtatttcgaggagggcatacagaaagggaatagaggaagaaggttggttttcatccattacatgagtgttaaagtggcaaaggaaattgatcattctgatagtgacgaatacagcaagaggtaccttatctctacatttgaatttcaatgtatatttaatcaagagtagtttttctcttttctatttgcccaattctaagatgtggtcgatgctcacatgtgctagccttgtgccacaacctgaacacccgaaattccggagcgaccagaggtggaggcagtttggagggttgtagaggaaaacttccttggcaagaagatgaagaggttggtcgtagttgacgactccaaggtcatcaacgacatttttgcctcagacttcgatgttgtacttttgggaaatactatcgttgt

SEQ ID NO: 76029 - DNA, 845 bp, Cannabis sativa
  modified_base (468)..(468): a, c, t, g, unknown or other
gctcggcaacagaaggagattgataaattaaaagccaaaatccaatccgttaaacaaaataaaaacactgccgaataagagaaagaaggagaggtggctgatcaggagtatgttccataataatacgctcatgaggatgagggtccaccacaaatctatgccaaggagtttgcttccctcaacgagccacctctcctatacaattttgattactagagggccctttatcaacaagtgtatctctactctgacaatattgaaaacattacggcccgagcgtatctgtatgagcatgagggttcaatcactgttcactgcaaggactacgatgattcacatgcccgggtttcgatttcagaaatgctactagaggatgctaaaatcccaatctcaattgaagggtggagatatgttaaggaagtagcacacatgttcctttcttagcctaaatacctaattgcaacaccnaggtaacttttgttataaattaattattaatgattagtggagtttgattatttttaatattcaaccatagtgaagtaggttctgagaatatatgtgctgcggtgggatggatgaataaacaactgttatatctgtgttatttgtcattatataggcatgtttaaaattttttgggggcatccaattacagccgttatgctgccaaaattttggtagaattaggatcaaatttgatatattatggtgcgttttgtttagggtccactcgctcaaccgccagcaagacgtgatgcgtcaaaggggaaagctccgatgctttctccacaaggtcgtggtgcacgggaagatgacttgttcacggaagagaagatggcgtt

SEQ ID NO: 76030 - DNA, 719 bp, Cannabis sativa
cttcaaagccttgtggttggaccatgtagacatcttcatcaagtgttccatttaagaaggcattgtttatatcaagttatcttatatcccaattgtttgctacaacaatcgttagaactatcctgactgttgacgctttgattaccggactaaaagtctctccaaaatctacacccggtctttgatgaaatcccttagcaacaaggcgagctttaagtcgttcaatcgatccatctgcatttaatttaattttatagacccacttgttaccaacaacattgtaatagggtgaaggaggtaccaaataccaggttttattcctctagagtgctaccatttcagtattcatagctgagttccaccccttatgactaagtgcttattgaacagttcgaggctcacaaagatcagctgctgtagcagttttagaaagcagaactcgaggcttaaatattcctgcctttccacgagtaatcatgggatgttgtggctgttgctgctgctgaactggtggtgaaatggcagcagtgttttcaggtacaggttgttgtgtttcgggttcttcaggatgaggtgtagatcgattgaaagcagggctaacagattcaatattaggagatgaaaaaggacttaaatctgaacctgaatcaggaaaaggcatagaagatattagagagccaagatcagaattaatacaaacctgattttgttgtgaaggc

SEQ ID NO: 76031 - DNA, 660 bp, Cannabis sativa
gattgagcaagatcgattcaagattgtgagcccttattgctggtagaacttgagatctcctgaaaaagtaattgttttgatctaggcgcagaggtggtagaaacatggttgttggtacagcaaagttattgttgttcgaacctcctggtggtgccgccatggatgaacctttggctcttgataccaagttgaatattatggcagtagaaagagagagagagagagagaacaaaagagagtgaaaagaatcttgtattgtattgtatgaattgaatgaatatcagtacactatatatagtccaataacatagtatagaaagtacagaaccaaaaacagaaataactgaaattataacaacctgcaactaactctaacagacttagttaaaactaatcttgactatcctcaatagtaaccatgttaatgatttcttcaaatcgatttacacaataaaaattagggttattgtttgatttttgttaacattattataaaatgccttccaatacccttttggccatgaatttgaagggagcaagctgtaatggcatcctttcgatggtattgagaattatagggttccatctcaaaatatttattctatgtggaacaatagctattttttgctcatcaatcttgaaccgtatcagagtggacat

SEQ ID NO: 76032 - DNA, 567 bp, Cannabis sativa
ctagaagagccaacaacaagattaaaattattaaggactgcaatggtacagtgatcacatcaaaagaaggtatgacgatttctactgaattaaatgagtcacttcttcttccctttacgaaaaaggaggttcttgatgccttgaaatccatgagttcaaatagaatcccagggagtgatggtatgttagcaatattttatcaaaattattggaatattgtgggtcttgtcaataaagtggttttaggagtgttgaatgaaggtcacaatatgaagttgatcaacacgtcaataatcactctaattctgaagataaaatctcatcaaagcatgggtgttttttgtccaataagtttgtacagtgtcatataaaaactcatatcaaagatggtggttatgagatttaaagaagcacttccttttgtagtctctaaaacacaaagtgatttcccctccaatatgcttatcacaaacaacatcctggttgcttttgaaccaattcatcacatccaacataagataagaggagcaaaaaaaaattttacaatcaagttggatatgagtaaag

SEQ ID NO: 76033 - DNA, 834 bp, Cannabis sativa
taattatttgaataattctatttgtttgtattttcaattaattaaatgtctttttttgaaaaaaaattattatttatttcacaaatttatcttaaaaaggagtagaagtctaatttctgtaagaaataatattttattgcaaatattataatcaattggtttgactattaaaaaaattatattagagaccccacaaaatgataagtacactctaatatttaaaaaaaaaaattaagcttaaaatagtttttaaaaattactcttcgtatttttttaaggatttttttctcacattaatttgtaataattttaatacttattttaattttattttcataatttttttctaaatcatgtataactctttttatttttttctaataaaatttcatataattgattatttttttgttataatatttaaaatacttttagtaggtatatatattttttttaagaatatgagttggaagaaaaaaataaaaagaaaaaaactaatataattaggatcaatttggcacaattggtttgataacataataaatgagtattttccgggtagatatggtatgggtgtaattagttggtgggttggagcatgttgaatggatatttttgtttgagttattttatttaactagtttctttgtgtgagtttttatcttagttgctttacgggagtaatttttttgtcacaaatttttaactagttgataaatataacccgtttctttattttatatttaagttattgtgtggtattatttgtatttatttattttgttatgaaaccggttcttttcatatttatgcctcaatattttttagaattga

SEQ ID NO: 76034 - DNA, 849 bp, Cannabis sativa
tgatctgtgagtagtagtattattatctctagtatcaatacaacaaaaaggggagtagatcattacctgctaattcaaggggccaaacctctttaaaatttggtgtctcttttactttattattcttattgtgtaacacgtggcaatcattaatattgaatatgattctgctgtcgattggcaaaattctgaggtcaacaccccagaaaagacattttccttatccaagtgtaagtaaaccacatcgttgattatcacgtcagtgtaaattaagcgcactgataaatcatgggactaaagagttggaagcatataatcatgattatttttcactttgtaaacaacactataatatatcacgaataacaatatgtccgacatttaacagaatttatatattaaatatataatcatgaaagtaacatgtaaaccaagcaatataaaatgatttctgactttttgttaattagtaaataagattacattgaaatatattttatttaggacataaatcctaacacctaggacttgtgcactatagtaataaggagattgagactgtagccacagagttcgtggactcagattatgctagtagcattgacaataggaggtccataataggttatgtattcacaatcttaggtggatgtgtgtattggaaatctaatcttcaaaaggttgttgctccatcctctacaaaagttgagtacatggcgttcactgaagcaatcaaagtggtaatttggctaagagggttcacaactaaattgtgtttcaattcctaagatattgtagtgtggtattgttgtggtaatttcaacacgcaagtgcacgtatcgtttacaa

SEQ ID NO: 76035 - DNA, 642 bp, Cannabis sativa
  modified_base (445)..(450): a, c, t, g, unknown or other
tatttatgaagaaaattcaaaattgggtctccagagagtgagcttgagcactgaaacgatttttagacatataatagacagcaaaagactcacaattattgttgagaatgtcgtatttgtcgaaatttcctcacctgttaccattgtcttgaaccagcatccgattggctcgacgaacgaccagatctggggcatcgcgattgtaaaggttacatgttccgatggatttgaggaagaattgaaccggtgagacgccatagttgaaacggaagagcctgtgaaatcggtcgagatctgcttatctaccctttaaggtttgaattccaatttcacttacttctttgatgttgatttatgattcggatggttgtctgtgaaggaacagagatagctagggtttcgaaaggggaacagctatatagaatttcagttatataggcacacnnnnnntagaatagatatatatatattataatttcgtatttattattgatatttgcaaaaactcgatttttcaatgtagattgaatttgatctaaaaaatgaaatttagacttagtgaaaattgaataaaatatgagcaaaatagtgcagattgaattggatgaactcctcatgtgttataaacaaacacaccacgta

SEQ ID NO: 76036 - DNA, 1418 bp, Cannabis sativa
atccccggactaccctaatccggacgtggagtatttggggtagtccagaaatttgcaccataaatctcctaattattggtttggagtagggtcggtcctgaattgaaatgggttatagataaaaaaaaaaattaccgttaatataaagataaatggtatttttaaaaattattaaaaaaatatatatatctttaaaagggaaacttacaaaaatactgcaattgggttaacttttacaaaaatactgtcatacggaatttttttctaaaatactgtgtttttataaaacaccagtagaacacaaaatagaataactcaaaacaacagtagaacaacagtaaaaacttaacgtagtatactgcagaataacacttataaaaaaaatataatataaaagtaagaaataccgtctgacagtattttttgtaaaaaaaatgacaaaagttagtataccatataaattttccttttttaaaatatactttttttatttgggcccctaaaatgagtgggtcctaggcacgagcctaacttgcctaaacctagggccggccctagtttagggcatagctttaaacaagggtaaagctaaaacaaaaattaaggtaggatatccttaaacttttaaatctttaccaaataaccttacttaacattacattattttgataagaaaaatatttgtataaggcctaaaaaattatttaaatttcagctccaaatagcttggatcgatcttaattttatgcgagatgattgtcccacttaatttatgtttaccgaaattttaagaaaccaataatatgtaatgaagcttaaaaaaagttatagacaaataataaaattagagtttttatgtagttggggcgttaacgagtcttaacactaaagtaatgagattctaaccctttgcatgaatgggttttcttataattaaaattatttaaatttcagctccaaataacttaggatcaatcttaattttactcgagatgactgtctcacttagtttatgtttactaaaattttaagaaaccaataatatgtaataaaacttaagaaaaatattatagacaaataataaaattagagtttttatgtagttggggcgttaacgagtcttagcattcaagtaatgagattttaactctttgcatgaatgggttttcttataataatagcactagggttcttacccactgatgggataaacataaataatattataacatttgagttgatttggtgaggtccaacctgtgagcctgtgaggctttgatcttctgctgacgtggaggctacatcatgttgatagcgttagggtttatgtcattgtttattgagtttttcagaaaccgaatattttgagaatgtaaagaagataacaatcagcagataataaacagatagatttttac

SEQ ID NO: 76037 - DNA, 713 bp, Cannabis sativa
tcacaactatctctgagtaatttacttttagatcaagtcttctctctgaatttaatcgcccccaaatagtgaaaatgagtccactatttataagaattaattacaggaaattggtttccctaaatcaataagaaataaaatagaataattacaataaggaaattaacaaatttaggttgtttgcgtttcttctctgaatatacaaattcatcctatgaatttggggattatgtcgtaacttgcaagcttaaagacatataagatatatctctgagattgctaacttgcatcccctggtcgatgcatgcaagacacttgcttgttaaaagttggtcgggtgtaacggtgtatatgcatactctgctcggatgtcacaatttctgtatgtgagcttgagaatcaattctttctatacgacttactaagagtagaattgtccgcgccaggttatggaatgtactccacgtgtcacctagatggatgccacatcattgtagaaatttggataacatttgtccccaagttcgcgcgagatcttcttggttgcatgtggacttactcgaccacgaagttttccggatgggtgacgcctgtccaattcttgtctctgatccgaagtgacttgattgaacgtctcttcgatgtttgggacatttaatgctatctcgaaagctacatctcaaattacacattgacggttgcacgacaccaca

SEQ ID NO: 76038 - DNA, 1155 bp, Cannabis sativa
  modified_base (393)..(396): a, c, t, g, unknown or other
agagaatgatcttgtcaaaaccactatgaacaagatgcaaattccatggattgataaaatatgcttttggtcttttgatgtcttaggtttagttacaataaagagtacttagaatagtccaagtggatattggtcacagaatactatattctatacattaacatacagtttggatccattgacagaaaatggatattaataacttgtgaaagttatactgtaaatttcaatttgaaatctaaaatttaaagtcaaagacttaaatttatacaaaatatacaatgagttatattctctcttggaccaccactagtaatctaactgtaagtttagaatgcataaagtaaacacatacaagtaggagatttctaagatcaaggattatatcatttnnnnatagaatgtcgggaatatagtcatatgctccatttaatttcataagagaaattagaatgacatcataagcaaatgatttataaaccattcataatactatttaagcaaatttaaaatgaaaaagctaagagcaaaaactaaaggataatttccaattaaattagaatccaacaatgtcccgtttaggtgagagttaatgtaatatcctagaaactatattgatattttaattggacatattttaaggggcaatttagacttttcctagagttattatttttgtctttatgtgactttttgggctgaggaaaagaaagaaagaaaaagataaatataaggggtttttatttaatttgaaggaaaaaacgtagaagttaagataatggcataaccccattcccctcttcttctccccttcgaatctaaggccagcagctgcaagggagggaaattcttcaccaatttttaagctttagcagaatttaacattgtccaaggattctttaagctttaaggtaagtcctcacttctttccttgattttctaggttaggttaggttaggttttatagtttagtgacattgtccaagttcagggtttattttggtgttgattttaagttgtttaggtttcaatgagtttaatttcttggatatatgattgtgaagttaaaaatgctaaattaagagtgaagttttgattctaatttggtgaaatggattggtgattaaattattgtgtattggtgcttgggatatg

SEQ ID NO: 76039 - DNA, 750 bp, Cannabis sativa
tcaaagaattacaaattaattagagtttaaataaatattttcattgaaattaatgtgatatattttatgttggaaatattttgtttgaatttaattttgtttagttttattgagaataatatcatttgtaaaagaaaagaataaaatgttgtaaaaaatgtggcccaaaaactataaaaattggtatttttgagatttaataacagcacaaaagacaaaagcccaaatgggtccaaaatcctctcccagtgacataagtgccacgtgtcacctacaggttcgtgcggcagaagacaccacaagcaactgctgcttttcccccaaacccgacccacgcgcccgtgcagcgcacggcgccgtgtggtctaggcttgtcacgcatgcgcctgaggcgcaactgggcttcgtctgcctagtttgtcttcagcctaaaaatccacttagctctcatttttcagctaatcaaacgatgacgcgtggcaccgcctcaataaaaaaaggactgatagtagtcatgtcagtttttactttttaaaatttattaatcttatattacaaaaagtgaaccggttaccaatatttttatcctacatataacttttatatagttttgttgttgattttatgttgttttcgtgctattttttataaatatatttataaattatataatatatagattttttttttgaaaatatataatatatagattatatataataaaaacatatatatatatataaactctct

SEQ ID NO: 76040 - DNA, 596 bp, Cannabis sativa
ctgtagaagtatctcttaatacctatggttttaatttttttgactggttcatatctaatgacaatggcccaagtttccacttcactggtttttatggtgctccatctgtctgagatagaacaacttcttagactctccttcacaggttggaagatgttgctcccttgcaacctttgttggccattggagattgcaataaaattctttcgaatcaaaataaatctggtggttctcttcaaagtgaaactaaaatggaagcttttcgtgttactcttgactgctgccatcttattgaactttcatttgaaggtgactctttcacttgggcaaggagtaggacagcagtaaacactgtcaaagtgcatctcaattggtgtttcgtcaacaatcaatgggacaaccaatttgctacacctgaagtaactcatctggactactaccactctgatcaccatgttatttctgcttttttcaccactaggagctatactacaccatataaaaggcgctacagattttgctttgaaaagttgtggttataggacccagaaagtcgagatataattgcccaatgctggactaataacacatcagct

SEQ ID NO: 76041 - DNA, 818 bp, Cannabis sativa
agaaaaagtataaaataagagtaaaatagtcattttaagtacttgtaatgaagattcatgaggtatgagagtgtaatcacttttcatacaagtgatgtaatagtgattacaatggaatatcattacaagagtttattaaaggcaaaccaaacattagaattgtaatcataattccattacaatgatgattacaacaaatcaaacacgccataaggttttatttaaaaaaaaaagtttttttttattttcttaattttcttaaaggcaattctcttattaatagttgttgaattatggtgaattaatccatttgattcaaacacattataatatatttaggtatctttccttctaattagtatggtgttacttatggtattgtagactcttctcattctaattacaataccaaaataatttacacaaaaaaaaaaaattatttattattttatatattattcattaaacaatgtatataaaacccacacaaaattaataaaccaattcctaaatcttatacacataaataatatatatagtttaaaaaataaataaaatataatatatagatgtaagaagaattagattctaagaccctaaaaaatatttatatataatattaaaaaagaatgttatagaatttgaactcatgaaattgtatactatatgatacacctcaatcaataaagatatgaatatttattgtttattgtacattaaattttacttaaataaaaatctaataaaattttttattttgaatatttgaatagtatagtctttaagtacggtcttagcccgcctatactaaataccgg

SEQ ID NO: 76042 - DNA, 619 bp, Cannabis sativa
ttattaatgtcaattacttttttttttttgcagaaaaagtctgtggctggctcaaaaaatatcaacaacaacattgtgtttattttttttttaatttgggtacatcaacaacgacaatgtcgtcattgatgatgtaatcaatgacgagattgtcgtcattgaagagtgtgtcaaaaaaataaaattcaataattatattaaaatattttttattttttttaaaaaaataattataattgaatttatttttttaaatatatatttttaaattaaaaatatattaattattaaaaatagaatttatataattgtaagcatgatattttgtataacaatgtaatttaataatatatctaaatttactattctaaaaaatgtaatatgcaaacataaaataaatttattaaaacaaatttcattaaaaagaaagattaacaaaattcaattcgtttttataaaaataaaacaaattatacattacatattgacacacacatatatatatattaaaaaaaaagtaaaaaaaatatgtagtaaggtggtaattaactctcttggagaaagtattgatcaaaaaggttgtcacaaagtacagttaatctcacaacatgtactatat

SEQ ID NO: 76043 - DNA, 928 bp, Cannabis sativa
attccaaactttatccttgatgacatcaaagacctcctttttccttttcaccacaaagctaggcagccccagatacttagcatggttagatacaaggcgcactcccaacctattaacaagatcatggccctgagctgaagtgatccttttcccatacatatttcagacttttcaagattaatttgttgccccgagagtcttgaatatctttgcaaaataagcttcatggtgtcacattcattcttttttgcattgaggagcacaaagctatcatctgcaaagaataagtgagaaactttgactttatctctcccaaatcgcaccccatttatatgaccagccctctctgcttcatgaataaggcaagataatccctccgaacatagtagaaagagataaggggataacgaatcaccttggcacagatcccgggttggttgaaaaagcccaagcttctccccattgataagaaccgagaaagatacacttgttacacacctcattattttttcaatccatttctcctcatacccgagacccctcatcatggtgactaagaagttccactcaactctatcataggctttggacatatccaatttcagagcaattttcttgccattaccaaacctttttgtcttcatgcagtgtaggctttcgaacccgattatggcattatcttggatgagtctgcctcccacaaatgcgctttgctcctccgatatcacttgaggaaggctttgtttcattctgccaactagacactttgccactattttatacacaacattgcaaagacttatcggtctgaaatctgtcattcttgtaggcttgggaatttttggaataaggcaaattagagtatcgttaatatcctccacctgcatcccttcatttagaattcctaaacacacttttgttatctccg

SEQ ID NO: 76044 - DNA, 660 bp, Cannabis sativa
atgagcttccttaacaatgataatagaaaaacaaaatattaatttaatttattgggacttactaatgaaaatgatggtataaggatggggtttaactgaaaatatatgatataataattaattgaagaatttgagtgactatacctctacaagaccaaaaatgaaagaatactaaatattgaaaatattgaaatagtatgattaaagttattatgttatttgaataattattcttaattaaattaataagttttagttttttattgaataatgcccttgaaattatcttatgcgtaaaattttgacaaaagttaaattataaatttaagtaatatgaggttattattgtttttcatatataaatatacacaatttgaggtctttcagttaaaaatgcacttagaatgtaaatggtttgtggagtaataataatttctgatttactatcaaaaaaatatatgttgttttatatgtattattattattattaaaattttgacaaaagtttttaatatcttttatcagtaaattaaattatatattgtaaattattctaattatagtagtttataaaaaatctttacaatcctagattcttcgaaaaaaaaaaaaaaagattgaaataaaaaaaatggtaacatttgaatagttttttaaatt

SEQ ID NO: 76045 - DNA, 501 bp, Cannabis sativa
ttaaatcttttgtggtgcggttgtgctttgtatttttgtcaaatcgggcggggcagtgcgattttcagttttaaatttaattaatgcggtttaaaccacaccatactatgtattatggaattaccaatttttacaatataatttttattttatataagaaaaaaatatatgttattatatgtgcatttgattatttttttagagacaattcaatataattacttgatgattattagtatatatattataatatttaaacttgaataatgtttaaaaataatgataatataaattgtttaaattataccgcaccataccgtatttttacagtgtgatttttttgtagttttgagatctcgtagtataatacggttgcaatttgaaaaaaaaataataacccccaccgcaaatattctttaaagtctttaagactgtaaatttgtaacaagaggttgacggtattaattttgtatttgtatcatacatttgtttgttactgcc

SEQ ID NO: 76046 - DNA, 553 bp, Cannabis sativa
atgtatagcattcctccattgtggaattaaatatcagttttgttttacttattacattatttgctgagacaattaattgttggaatctcttagatttattactctctctacttccttttattttgttcaacctttgatctctttcattattccacataatttttggattctcttaaatttttgctgtttgatgataattttttatttatttatttcaatttggaaattaattattttgaaaagaggcataattttgatgcaatgtatttgctttgactatttaaacatgagatgggattttaatttttcaaaccaaatggcaaagcttgataataattgtaagtacaaattaacaacattgtatttgtgttctataacgtcccatcttcaagatattaggcctttatactcacagaataatggtttttatacacaagtacatcatttttggttgtttcatggaatgatgactgactttacaaattaacacgagtgttttttgtatgttttatcttcatccgcatgttttttgagaaaatttcttaggaggcta

SEQ ID NO: 76047 - DNA, 663 bp, Cannabis sativa
taatatgaactcaatatcaatatttgacttaaagttgtttccgaatatcaacatttcgtctgaaaaaatattaagtatatataataattatatggattggtttgatttgaactgctatcgagattttctaaaactgtgaccgaactagagaatttaaaacggtctggattgatcaaatcattcactccagatttatttggtctggtctcaaatagtttggtctgaattggttggggtttggaaccacagattgcggattatagaaacacccctaacttttgtaggtaactagctgataagtgttaagaaaattaccatgtggcaatccctgattagtctaggtcattaaatttttattttttttaaaaaaattattttaaatatacaaaatgaaacgtgaataatgacttgacatttaacaactaaaacttatagagttttaaaaatataacttatgtattgttactgctaaaaattaaatttaagtatttatttgtaaccgaatttaaaattaagtatttatgctgtaaaatatattaaaaaaaatatattatatttaatacaattaattttacatgcaatatatgtcaaaattttccaatgttttaccgtattttttgtaaatagcctaaaagctaatctattctattctatatcctctga

SEQ ID NO: 76048 - DNA, 810 bp, Cannabis sativa
cgaatggagggatagaaagatggaggcattaagggctcaccatgaagagatcgaaaatcccagtcggcaggctaccgtgctgatacaaaaagcctacaaaactgtaggccagcagccgccgaacgtcattcccctgggtgaaacagacgaagatccgacgatgaatacctcccagactgcaaatagtcagctgcccaatccccggtcacgagttccactcatgggcccagcggtagacgagcagaccttgtctggtaattcatcaggagaagtcttacctgatggttccaaccaaaccaatggtgccattccacctgtcaaccaagcgaaacaatcgctaaagcagccaggcacttctgtgttcgaaaggttcggaacaacccatgacctaaggaatgatctgaacagaaggatgggagtagacgagtagaatattacaacgatcgtacagcctggagcccatactcaaattctcgctcagaaagatgctgaccagaataccgagcaggtcagtccagccatacaggcttagttagacaaactgaaaaatatgtttcacggcatggcagtacaaaggaataatgatcttgagttggaccgagcacgcggaactcctttctcaccagagatcaatctcctgccgctgcccctcaatttcaaaatgccgacgtggaagatgtacactgggagagaagatcttctttcccatctcaaatatttcgaaatccaaatggatttgcaaggagtacggggagatgtatgttacagaattttccctgctactctctcagaagccgctcagcaatggta

SEQ ID NO: 76049 - DNA, 708 bp, Cannabis sativa
tatgcataaaactctactgaatggaaaattcctgcacgggtaaatataaattgctctctaaatggtgtacaaggggtacagtacatgaatgacatacttacttaaaatcatatccatgcaattgctgcataacttcaggagccatcctgtggaaagtgtttgaagacataagtagaaaaaaataataagaataaggctaaaatttggggttgggtccaatgcattaagcacagtaattcagtataaatatatataattatattaagtagattggtgtgattcataccagcatggtgttccaacaaaagtatttcttgcatgccgtctatcaccattatcaaacaaacttgctgaaacaccaaagtctgctagcttaactgatccctttgcatcgatcaatatattcccagcctgcagatatgaaagtagtaaggtataataatgaatgcctgagtgttggtgtattacatgcaagcataataaaggaccaacaatgacagattttatgaaattttcacatataagcaagtgaaaataccaaacacatgttctggtggatgatttagttaaactcaaaagcattttactacagcagtcagcgctcgaggctcacaagctatatgaatttgtgtttcatttctcattagctaatactgtttaagtacagcaatgcaattagttaagagatagctgcaaaagttcctacag

SEQ ID NO: 76050 - DNA, 633 bp, Cannabis sativa
  modified_base (277)..(281): a, c, t, g, unknown or other
ttcaccaatacaagttcgcctacagtacgaacacagctacaattatcataatagtttaatcatcattcaaataataaaaattgaaagttgctaattgattcttttggacttctaaaagcatcttcaatagtagcatcttttaagaatgttaaaaatctccacattatttaaaaatataatattttattttattttattttttcatattatttttagcattcttacttctaaaatcactcaaataatatagcgtcttcaaaaatactataattatgannnnncacattattatttaattttttagttttaattttttattaaaaaaataatgatagcatcaatactactagcatttacacatattcctataactagaataatatttttttctctttaatggtataacatctcaatattttgccactttatttatccacctaagcaagcatcccgagatgctgtaacttgaaatgtgactttttagccctacagtgaatactatattgaaataggggttttttttctattttggattaatattactttaaataaacatttatactgttacaagcaaaaataaacatttatattgtttattaatttcaaatttactattttcaaagtttcttattt

SEQ ID NO: 76051 - DNA, 724 bp, Cannabis sativa
tatctaatggggatgccttgttagcaatggtgtcgagttaactttgatggcaagctgtgactcgtcatatgatttcccgaaattaatattgttttaactgcgataactatatttactggtgtcgagattatcttcctcgcatgcatgccatcttacagcaagatagaagcctcgctatctattatcttgattcactatacttttcatacttagtttgtataccatgtaatatacgctaagtgtttttatcgttatcgtttctctttcacacggcgaggttgaggcctcgtcatgcatacttccactcacatgctttctcgtcgatacataagttagcagttcgtacatttctctctcgcagaaggctattcagtcagctgagttataaacatactctgtaaattatgtttctaacgagttgatccatgctaagtgtactttcgtttgcgtgtttgagttcttcgttcttcctaggtcgacacgtatcttcctcttatgtgctcacaaaaattttggtataacaaatgtagtgatatttctaaccactccgtccagtttccacggtcgtcgggcccaaaaatattttatttctgaaatggtatccacgatatccacatattctaatattatcttagtaattaataaattaagctttatttaatcatttaataaattcacactaattaatataagtaaaattataatcttacttcattaccaaaat

SEQ ID NO: 76052 - DNA, 974 bp, Cannabis sativa
attttacttggtatattttttaaggttttctgtgctatggtttggggtaagaagattcaagtttgttgcacacactcacaactctagatttatcagtaatttttatagttctttttggcttgtactaacattttattttgatacttgtgtaatttttttaaaaaaaatttaactaatgcttgaattgctaaagactaacaataaagtagttggatgttgtgattaaagcttaaatttacatattttaaagctttaattgtgtatttaacattaatttaaattaaatcttttcttagttcttagttttaattgtaaaatcatttaggttacaaatgtttaatttatttatttttggctcaatattatatttggagcaagaaagtggcagaaatcaaaagtacaaagtgagcttcaatttggtcccaagtcttcttcaagcaaattttgatttggttattcatattattgttttacatattgttaatgtgggactttctaacattcttcctcaaaaagtagtttttttttttattggctcaccaatcttgaatatctcgatcacaagtgacacttttttttagttcactatcctagaatcataagtggttattttagctctaatttttggatttttttattttttattttattttgggtggctctttttttcgctctactttttttatttgatcggcttttattttggatttgatacttgttagaatttgcttttggttctgataccatattaaaattgtaagatgcatgaggtttcatctcaaaattaattggcaagaataataattcatgcatcttataattaaatgggattacctttcacatattagcattatgagactcttaaacaattagtttcactaaatatatactacaaaatatagataaaaaacagtcacctttcatcctagccctccctcactagtcaccattgagctagtctcaatcgctattga

SEQ ID NO: 76053 - DNA, 668 bp, Cannabis sativa
attaggtggcgtttggttggaagggaaaccaaacaaaagattggaagaaaagttgtttcttttccattccgttctattttattaactccaaacaaactccacctaactgtcatgtattgataggaaaacagtgaaacattcatattaaagtacttactgatatatatgttagtgtgtatctgtcatcttaaccagctgaggaagctaatgaaggagattcccatggccatgtaaatgaatccaaccaatcaactagtcaccaaaccagaaaacaagtattttggattcgaatcgggttttattcattccttgttctctctggccaggcagcagcaaccttattagggagattgtattatgagaaaggtggaaagagtaaatggatgggatcacttgtacagctagctggctttccaattcttcttccttactatctcttccgaaaaaagaagtataaaatcgaaaacaatcacaacagttacatgaatactaatactcttcctcttcaatcaaaaaagccttctatgttaactgttgcctcggtttacttggttcttggcctaatcgcagcagcgatttgttatctatactctgttggtctgatgtaccttccagtgtcaacttactcaatcatattagcatcccaattggccttcaatgctttcttc

SEQ ID NO: 76054 - DNA, 864 bp, Cannabis sativa
gagggaagagagtgggatttgattgatgagtgatggggatagcacacgtgtatgtgcatggaatgatgactaagtggtatttttgtaataaaacaaacatagtaagtaaaaaaattgatataggcgtgtaggggtgtttttgtaataaattgtgtaaaatgaatttttcatgtaaaaatttctaataataattcagcccatccacgtaattcataaaagagttttttttttttttctttttttcttttatcctttgagattcacgtgagcccatcaattcaacaaacatgaagcttttttctggagtggaaaatatataaaagtccctaatcttcctttcccattatattttttatggccaatgataaaaaaaattatcatcaacacctttcaattactatcgaagtagccaagaaatatctgcactccttaattttaaaatctaataagtctttcttatgattatgaagtttcaaactatttattaaactaactaagcaaccacgtacataagagatttgagaataaacaaaccctatacaagattttagaataaacaaaatatagatcaaggaaaatataattattgatgcataagatatatattaacttctagaatgcgaaccattaaattcagtatttttctcaacttaacaaaatgatgtatcaatctccattaatcttgacaaacttattcaagcgagcaactaaaattttgaaggttaagaaaatggtgaaataaaaaacctgcatatcccacgtttttttgcaaagataaagtcaacttgaatttagggaaaatgtaaaataaaataaaattaaagtttttttgttgagaaaataaaattgaagttaaataataga

SEQ ID NO: 76055 - DNA, 735 bp, Cannabis sativa
tatatttagctccttgagttccgttggaaccattctatatggtgcttctataagttctactccaggtgccaaatcaatcacacaatctatgtctctttgtggcggtaatcctgacaactcctcgggagaaattctttaataacccagactactttaagcccaaatgttttaggtctgctggagtcaatcacaaccgcaaaaaatcctacacatccactatgtagtaaatctctagcccttaagactgaaataatcaagatctaagatccctgaacagatccaacataggcaaatggatattcgccctccaattaaaaagttaccatttttcgcttacaatcaatactggtcgaatacttggatatgaaaagtatattaattgaacatgttattatgagaaaactcttatacattttttttaaaaaaatattgtaatacaaataatcttctcaagatactatattttgaaaagggttgtcaggcctaaatatactttaattaatacttctcgcgtccttcaataagtgttgggcgaagtaaacacaagacgctatcacaatatgaaaattcagagatgaatcatgctgggaatgtgactcctagtctcttagcatactcgcgaatatgtgagtcaatgagctgcaagttctgtaaataatttattatctatccttttcaagcattctcattctgttatgtattctatatttcttgagatcaaccttctaagttgat

SEQ ID NO: 76056 - DNA, 502 bp, Cannabis sativa
aatggagaaacaactgctgcccttgccatcccttatttcagaatcaaggaacctcacatccaagaactcaaaactctcatcatctccctaaattggtttctccatgaagacttccccattcactttatagacacagactggaaggcaataattgatgatttgaacaacactaatgagtgttgtagtattttttgtgatcttatttcatagttgaggacacttttcttacactgcctaaatatcaacattagccaaatctatagtgcagcttacgatttggctaagaaggcgcttcagcttcttgaagatacctattagatttgtaaagaccgcttgtgattaataccttggattgttaaataattagggtgtatggatgagattttattattatttataaaaattcatattgttgaaatatatttaagttcatatatgtttattatgctatttacgtaaatatctcaatttctgtgtttttgttcggaagctgtggaaagcg

SEQ ID NO: 76057 - DNA, 529 bp, Cannabis sativa
aactaagcgggctttacacgtagtatatgtcaaactggctcaattccatggcccatttaaggagtcaaactgaggcttcaggcttctggaaaacttgccaaagcggatgatttataagtaccttaatgggatgggcctggaaatagggtctcaatttccttgaagccattaggaggccaaaaaactaatttctcgtttaagggatactgcatctcggctcctatcatgcgcttgttgacatagtacatcggatgttggaccttgtcctcttcctggacaagggccgcactaatagcgttctcagagacgaccaagtataataacaagtcctctctgtgaacttgttttgaaagtagcggaggctttgccatgtgctcttttagtttttttgaatgcctcatcacattctttagtccactcgaatttttgacattttttcaaaatattgaacaacgggatgcacttgtcaattgatcgggaaatgaatcggcttagggcggtaacttttccggtcaagctttgcacatct

SEQ ID NO: 76058 - DNA, 726 bp, Cannabis sativa
ccaaaaagcagagtgtggtagccaaatcaagtactgaatctgaatacccggctcttgctttagcaacatctgagttagtctggattgaatctctccttactgagctttccatcaacctgtctcactgcccgatattatggtgtgacaaccttggtgctggctcccttgcttccaacccggtttaccatgctagaactaaacatatcgaaatcgaccttcactttgtttgggacaaggtcattgacaacaaactcgatgttagatatgttgactccaactaccagatagcagacattttgactaaaccattgttggttcaacagtttttgtacttaagagacaagttaacacttagttgtccaagtgtaacttgaggggggatgttaggattatgttagttactttgtctgttatttcagttagtgtataactgttttttagctgagctattttgccagctgttgtaaccaactctgttatttcattcctctatataaaggctttggtctcatcagtttcagatgagtctttttctacttctctctactttccatctttctctctcttactattcttacatggtatcagattgccattaatggcgtctaatggacccaattcctccagtaaccaaggccaagtcgacggcaatggcgctcctacgaacgctcaaccaccgaatcctcctgcgtatgaggctccaccagcaggattacccaacaacaa

SEQ ID NO: 76059 - DNA, 505 bp, Cannabis sativa
atgctatcaggattagggaacctattatggctgctcacttatctaccccggtaatgggaaaaggaaaatccatcttggtggagcaggaagactcttcagatgacgatgctccatctttaattgttcaggcaaatgcccctgcctgcatgcagggtacattaacttgcattttactttcttattttatgcttttctcacattttatgtttgcttctaattgcattgttttatctgtgcatacatgtctcaaaagatgattcaggccttgaagaagagagtaggagatagctcgggcttgtcttctctggccaagaattctaagggtggtgagactctgtccaaggagaaggtgccagttgatgaggtcattgaactttccgaggagcgacctgtggtggaccttccagttcagaaggtctcgaaatccaagagttccagaggagggagctcggacagatctgaacaagttaggaccccttcaacaaatgcggcgctgtgcacggag

SEQ ID NO: 76060 - DNA, 1359 bp, Cannabis sativa
  modified_base (965)..(965): a, c, t, g, unknown or other
  modified_base (1312)..(1326): a, c, t, g, unknown or other
ttgatcttttcaagcgaagtctaagcttgaactttcatgcaacttcagccatctcttaaggaagccaaagattccctcataaaaattcaacgtgactctaacatgccgatgtttattgtgaaagaaagatcactaggagtatggcacgtcttcaaccatccttcctgaaatggaaggagtacttgaagtctttcttacgccccgtggtgctttcttctcttggtcttttcaagcgaatttcgagcttgaatttttatgcaacttcagccttcctttgcggaagtcaaagcttgtctcataataattcaacgcgactctctcatgcaagatgttttttgtgcaagaaagatcactgggggtatggcatgtcttcaacccttcttcctagaatgggaggactgcttgatgtctgtcttactcctcgtggtgttttgtccttttgatcttttcaagcgaagtctatgcttgaatttttatgcaacttcagccttcctttgcggaagtcgaagcttgcctcataaaaattcaacgtgactctctcatgcacgatgttttttgtgcaagaaagatcactgggggtatggcatgtcttcaacccttcttcctagaatgggaggactgcttgaagtctgtcttactccctatggtgctttctccttttgattttttcaagcaaagtctatgcttgaatttttatgcaactttagccttccttcgcggaagccgaaccttgcctcacaatatttcaacgtgactctctcatgcacgatgtttttcgtgcaagcaatataacttagggtattgttgggctttgtcccctaaataaatctctattttaatgtaatcttttctattcaattatcaatgaagaaaaacatttaatttcattacttgtttaatgtgttttttggttcatgtgataatttatttacgtatttgaattataaattcatccaaatccttancacactgatattcttgtttattgtattattaaatcagtggaaagtgatcatgattgtgtgattacgtgtattcctatgatttatcagtacacagggtttaactgataggataatctatagcttagtttacttgcaccttggataagtgctatgtcctttccaaggcattggttaaagtaagctttggttggatgtatggagtatgcatcaaaagggatcgatattgaacttagatcagatatgataaacttattgtaatatctattaaattcaatatcacccaattgattttagatcaaatggtctcaatcctgagatggttaggttcatgttgggttttatgcccnnnnnnnnnnnnnnntcaatataatcagatttgtttattaatatagat

SEQ ID NO: 76061 - DNA, 698 bp, Cannabis sativa
ttttttggggggagggagggagggggtggaacatagatctccttaacaatgaagtgagcaatgtaatttagtttgatttgttttctgttatgtaatcacaacattctatagttgagactatcttaattagaaaattccttactgcttaatgctatgaatttgtttgttgatctattgatttgatgctacaagtagactcgtatcaaggagcttgaggaagaagtgaagcttttgaacatggtttacttttgaattaatttaagaacaatttgcagttagattatcaagattttttaaacactaatatattgctttcagtatttagttttaatttgtaacaccattatttagattaattaaatatacgtaaaaataatctcaaataataattaataatattttttctttaattatttattgtattatttttaaataatatagaaaacacctaagataaaattaagtatacgtacttcacacgtagctttcttctagtatttataaatatatatatatatataggggaaatctagtgtaagcccccttctttctatctcatgccataggggagttaaattgaccaatcaggattaaaaaaaaaaattgtacacctcatattagtgtacttctttacacccaattttttctttaaaaaaaaataacaaaagataaaactactttatcaaagacacctataa

SEQ ID NO: 76062 - DNA, 555 bp, Cannabis sativa
gataagccccatcctaaactacgacttttcggaaccataaactcatagttttcattaggtacacaaactatgagagagtaaaccacaggtcactcctgaaatgtaccagaagaaataagtgttcatactatatgcttctcccacattaccagcttctaaatatatatatttttttttattgaaaaagagaagcgatcaacttatccagaatcctccccgttatttattagaaagccttgcttatggcggaggaaaaccatggttacaccagcttctaaatatattttgtcctaaattctcctactcctaccctaaacaaatgatctgcctcctttcaacagccttgcaaacgatccagggaatcaaaaagagaaaaacacgaaaaacacaaaactcatattggcatacttgtaccaaaacagcaacagttcaatatcaatctatccatccgggatggtatttcctcacactgtcacacatcatatgttcattccagcatgtattcatacaataagaaaaagtaaggttcaaggaccaaaagggcaactataacaa

SEQ ID NO: 76063 - DNA, 616 bp, Cannabis sativa
agacttttagtcctgtggttaaacctgtgaccataagaattgttttgtccttagctctggccaaaggatggtgcatacaacaattggacatcaataacgctttcttgaatggtgatcttcaagaggaagtctatatgactcaacctcctggttttgagttgcccgatgcccctcacttagtttgcaagcttaataaggccatctatagccttaaacaagctcccagggcctggttcgataagcttcatcaatgtcttattgcttttggatttgtttcctccaagtcagatcacagtcttttcattcaacattcttctcactctatgattttgctgctagtctatgtcgatgatattatcatcactggtactgatgcttcacaagttgatgccttaatttcagcattagacagcaagttttcactctagaatcttgggaaattacattactttcttgggattgaagttgagcacacagaaacatggcttcacttgtctcaaggaaagtacataatggatctcctttgtagagctcaaatgcaggatgccaaacctgatcctacacctatgaccaatggtttaaaattgtctatgtttcaaggggatcctgtagaaaa

SEQ ID NO: 76064 - DNA, 885 bp, Cannabis sativa
atactcctcttttggataagagaaagcgtgcaccggtattgaaatcgccttttattgattttgggtcggttgatgtgagcagcactctaatagatcgaggtaatgtcatcaggttttcaatctggaggagatgagagggattttaagatggttacttatgtgaagggcctttacgctcttaacgatacatttgttgatcttgtctctcttgaaattgaggcaaagtttgatgcgtggattgacgaaggtttgctaaaatatcctaggtgattattttctttattctgttttgtactttttatttgtttgaattttgtttttatttttgcaattatttgaattcaatattgtttttttgtcgttttgttgtccttttttttgttgtttttgggcttaaaattgttataaggatggtgcgaagaaatttttccccgagtttagattaggtgttgattatgctgaagataaaacctggttttatcatttggcttgctgtgacatgtttatcaatgactcggtaaaatttcttttttcttttaaaactttttgtagttgttttttagtttagtaactgttattaagtttttttaaatattttttaactttttattttgtgtttctttgttgttttgtttcagcatatgaacactatcttctattaccttaggaaaaaagagaaatattcttctgctgttacactaaatttcgaaacaactgactgccttttcgatgattccatttaatctcaccagaattaatggttgtttttcgattgttatggtattcctgtgatggttcggtccataggtgtggaagatggaggcttcattttttttttgtgtttacagtataaaataaaataaaaattggccaaaacagtataaa

SEQ ID NO: 76065 - DNA, 715 bp, Cannabis sativa
tagtaaaactgtaattttcgtctaattttgttagtacatactctattaaagtcttaaatttgtaaccagacttagttttaaaatttattgaaagaagattgatactacatgtatcttgtgatttaaaatttgagccttatatgtgttttatttaagacactaacaaaatttgtactgataaaactggtcgaaatttacattttattaatattagttacttaaaataatccggtttatgtcaaatactaatgtaaacttttgagtatttatgtcgtaattttttcttataattactaatcaaagcttttttttttaatggtaactaactaaaatgaccccaacaattgttatttgatgttaaggtttgtgatctttcctctattagtgatatcaagtcatttgcatcaagatttgctttgaaggatgaaccacttcatgtattggtaatttactttcacttaattcacattatatttgatcaatgatcatagaattctcacaagaagtttataatgttctgatatcaaaaggcgaaatctaactcagataaaatctatggcttttaggtgaacaatgctggtgtgcttgaaaataaccgagttactacctcagaagggtgtgtagagattccttcattggttacaatttttttcacttttgaaaatctgatcctttcaaattttgcaggcaggagatgaactttgccgtgaatgta

SEQ ID NO: 76066 - DNA, 852 bp, Cannabis sativa
ttgtctaggctcaagaataacaacaaaaatagatcaaaatcaacataattaaccataaaacaacccaacaaataaaatcctaaacaattagctcgtatagaaatccaaaccctaatatgaaagcatgaaaccttactttagctgtgaaaaacaagaagaagaagattacttaagttagttagatcaattcctcaaatcttaagatgaaaagcctatgattttagaatgaaatgaaaggaaaatctccctggttgttgccctaagattggtcgagcaaataagaagaaagaaacagagagtttgctgtcgacaatgccaattccgataacttttttagagtttgctgttggtgctgaaaaattcgaaggagtagctaccggtgtctaaaaagtcgccggacttgctgcctgcaatggaaaagtcgtcaaaattagcattgttaccataaaaataccagaaaaatcacaatttttagttaattctcacacttcaaattacaggtcaggatagtttttttcaaattttgtttcatagcgatattttttttattgttacagtatcattcctataaatttttgaaattttttgaatagtttacaatgccaaaaacagagttcttgatattctagtttaccacgtgtgttcaaaaaacttcaaacgtattttcagcactgtgaactattcaaaaattttcaaaatttacagagatgatgttgtaagcataacgaacaccgccatctcgcaaattgcattggcaagtcctaagatgattaagcttttagctaattcactacaagaaagaaggcttttgccggcgcaaatgcgccagtaaacttttgtcgacgcataaat

SEQ ID NO: 76067 - DNA, 626 bp, Cannabis sativa
  modified_base (537)..(544): a, c, t, g, unknown or other
gttcgggttagagttcaggtcagagttcaagtcctggtctgagtttgggttcgggtccggatttcaatcaaggtctaggacaggctctgggtgtggtttgtgtcctgggtcttggtctaggttgggtccgagtccaaagttccaatcccaatctaagtctggatttagttctgggtctaagtcttggttctgatcctggtctaagttcgcgtttgggtccgggtcctggtctagctttgtgtctgattctaggtgtgggtgtttgagttcgggtctgagtctgtgtcagggattgtgtccaggtttggtctctgatctgggtctaggtgcaagtttgggtcccgagtgcgggtccaagtttgggtctgggtcacgatctcagtccagatctaggtctggtatttcgatcctagtctgggtcttgttccgagtccaggttcgtatctggatccctatctaggtccaagtcaatgtttgggatagtgtcccagatttaggtccaggtccgggtctaagttccggtctgggtacacgacnnnnnnnnggcacgagttccagtctcagtttgagtgtgaggctaggtctgtgttcggttctaggtctgggtccgggtcatggtcacagtc

SEQ ID NO: 76068 - DNA, 822 bp, Cannabis sativa
agactttaggtttacttcgaaaccctaggagagagtttctctctcagagaaactcgatgccaaaccctaaacaccatgaaatcccataacacaagcaatcaaaagatcagatttaaattgatctgatctatccccaaacatacacacaaaacacagtaaagagaaggttagaaaacactagagatttttcccgaagttcaccaaaaatttggctatgtctccgttgagttgttcctcagatctgagagctcgatactactacaaaataatgttcagagttacaaggctgagattccaagtcacaggtatgattttcgactggtaatctcttagtttattacataaattgtgtataatccctcttttctctctcaaactaactctcttttgttccttgtacatgtatgagctccttctcctccttcttcaagcttaacaaccctggatcttgaagataatcactcaaccacctttatttgggtttgctgcaggtatatttatagctctagggttctaatctgtttatgtagttagttagttacagaaattagttaggtatggattatgacctaatccattctaactaatttctattaggaatttagaggtcgaatgccaaaatagggattttgcatgtatttaatctttctccttgtaagtaagtaaatatcagtgtaagtggaggtttaatcaacactaaagaaatgaaatattcatcaaaaacaaaacatgattaagtgagtggtcaacaaacaaattggcatattgaaaaaatatttgtcattgaaagcttatgcttggtgggagaaggaaatttggaat

SEQ ID NO: 76069 - DNA, 604 bp, Cannabis sativa
aataaatatttatacattatatcacacttttaaattctgattctacactataaattatttaaatatttacaaaaaaaaatatgctataaatatattaaacatcacaaacaattataattataattaatttgaacgactaaataaaattatattgtgccaaaaaaaaaaaaaactatagaactctctaaaataatattggataaatctacagtacattctctaaaagagtattttagtacctaatagaagtttttagtctaatttttttttatgaccgtgtatgttatagttatttaagaccatttataaattttaagagaattccgagtaatttacaataccgaaaataaatttatgtattttgttgtactctcaatctttttaatgtacacatattaagtaattatttaaactttatttttaatgttgtaaattatttagaatttttaaaaaatttaaaataatcttaaataattacaatgtacgtaatcataccgtaacagataaaaaatctaacaaaacaactgttacataaaattctaaaaatatttataacacattattattatttattgtctttaaataagtgtaattatatagaaat

SEQ ID NO: 76070 - DNA, 660 bp, Cannabis sativa
aaagaagcatttcttgcaacatatgaaggttctgtgttaccaataggtgacccaaagacatgggacttgcctgataacatcaaacaactacaagtattaccaccaatatacaagggaccagcaggaaggccaaggaaacaaaggtataagactgcactagataaagcaacacagatgaaatgtgcaagatgcttacaaaaaggacacaaccgaaggacttacaaaaatgatgcggtcgagccaaagagaaagagaaaaggagacattgaatagcacatccattattcttccatttatccaaatactataaaaataaaaacaatactttcaaattgagaaactactaagtagctttactttccaatgtttccctacatttttaaatactataagaattaaaaaaaaacatgtcatttgtgaacactgcttttatgaatagttaaattcatttttaaagtctaaatttggtttttagtattttatatgattgatcactaatagaaaaactaacgcgttgcttaaattatatattcatacatctttatcatttaggcaaaaaatgttggttttcaataaatattctactgtctattttatttttaaattatcatacacacaaaaaacatatcaaaatagacattattcattatcaaaaaatga

SEQ ID NO: 76071 - DNA, 836 bp, Cannabis sativa
tggcactgcgggaggaattattcttgcttggaaggttgggtttagttttgagtgtatctcttgctcgtgtaatcatatttcggggctagtatactctgaccccccctctcatccgtggctcctttcgtgtgtttatggtcctccctacctgcatgcaaagaaaaaattctggtctgagttcatgaagttaggtgaaaaattcggggggccttggctgattctgggtgatactaatttcgtaataagtgcctcggaaagagagggttcatctggtagagacccttttatcccgattatctctaatctcctggacgctggaggtctgattaatttacctatccaaggggacaacctgacgtgggataaccatcggtctgggaggcatcatgtgaaatctgctttggataaaggcttagtgaatggcgcctggatcaatttatttcccaaagctattctttgctcgtctcagacctgcaactccgaccataggcctttgtgcattttgacgaatggtctggactccaggtttaaaagaagctttaagtttgaggaaggttggacccgggactctagaagcaacctggtggtggactatgcttggaattctgttaatcatgattgggcccctgcaagaattttcaaaaaggttggggccacaagggtggcccttcaaaactggagtagatcccaatttggtaagcttgatgtcgctataaaagatcttgaactccaactcaactctatgcagagccttcctgcggggactcgggattggaatcgggaacgagaaatccgccgggaattgaatgagtatctagaaagaaaggcgatctact

SEQ ID NO: 76072 - DNA, 526 bp, Cannabis sativa
gacgcctcgccccatccgacgcagccattcctcaattcaactctaatggccatattttgaagctgagacgacgaagcagtctcagcaggctcagtgatgagtttaagcctcaatggtctctcttcagcttcttgaacgtcaacccagaaagtctccatcaaattcttgaacccaaagctgctcgattcgtctttattacacactaaatccggcacagccaccagctcactactacccgcggtccctgaaaaactggcgttgttgacattgagattgggctttctgggtgtccagctttggaattggaaagctctcttttggtttccggagcagaagaaagatgttgatggagaaatcacagtacaataacgaaacgctgccattttctcaggtgttgttaatttctgatgaatttttctaggaaactgtttttgtcgcgaggtgtagtttcaggtgagagatgctaataatagggtacgcatggtactagtggatcagtgacttggaattagttgaattatataat

SEQ ID NO: 76073 - DNA, 616 bp, Cannabis sativa
atatataataaaaactaaaaagttcaaaaaaaaaattaaaagtgcaaaatcgggttggttgggttagtcggtttaattgggcgggttgaaactatttttaaccctccaacctgcccaattaacagaatgggcaatttgtaattttttcgggttatttcgatttgtaatttttatcgatttttttggttcggtttgggggggttattcggtttgggcggtttataaatttttttgtacaaccctaactctaatagctgtccaagattctacagaataagttgtcaaactcaaatgtccgttatcaaaaagaacaaaaacagttgtcaaacttaaatgtagtaatctcgatcgtgaaacttaacagatatcaagactaagcaacactaaagcatccataattaaaagttgagcattgttacgagttatttatggggcttagtactacggtgaattattgccttataattgattagcgattttttataatttttattaaagtaaaataagtgaaacctgatattaagttacaccaataaagatattacacctgttctaggcaccatgagtgttctttagcatttctcttaaaaaatggacactacctgttatacaagaa

SEQ ID NO: 76074 - DNA, 618 bp, Cannabis sativa
tacacattgcttcttgggaaaaaatttgctaccctaagtctcatggagggcttggatttagagatagtgcaaattagaatagagctattctaacgaagtattttcgggctgtgatgaacaaacatgtgtagctttgggttaagtgggtcaatctcatgtatttgaaggacaataatatatgggactacacccctacaatggatgttagctggtactggaggaagttatgccatttaagggcaaggttttctgctgctactctcatggctgcgggtaaaaatgggaaattcagtgttgctgcagtgtacaaaagcactttgcaggttggggaagtgtgctatactgaagctgtttggtgcagaagcagtctcccgaagcataggtttgttttatggcaggtagttaataatcaattgctaactagagacaagtttttcaggtttcaaatcactctgaaaaatgtcaattgtcctgtttgcaatgctgaaattgagagtcataaacacctatactttgactgtattttctctaagcaggtggttactgctatctttgattggattggtgtcaaggcttggcctttgttgtatgatggatggcttagttggtgttcgaaca

SEQ ID NO: 76075 - DNA, 839 bp, Cannabis sativa
  modified_base (39)..(49): a, c, t, g, unknown or other
attccccaagcttactgcctgctttcaggcttatttatnnnnnnnnnnncccggggatggggctctcccagtccggcggagattttgtatttttatgatcttgtttccgtcctcaaaaagggggaaaaacttaaagacggtttttacggattccgggcgcacccttcaaatgatggggtggtcccttataatcggcaaactcatgttaaggagtatcgccaccgcttcttcttctcctctgggttccgagctgtggagcacccggagcttcacacagagtgggtcaggattcccccctgcgagcggaccgcacctactgaggtctttctccggagggcccaggtctttgcgacttacgaccgggcagatcttgacgtcaggggcttagtcacgacggagaactgccggaaggccaagctaatcctgccgcaccaatcagtggaggactctaacatttccaaggttacctgtccgaatgtgagggtgcctgccgcagagaagaccttccgggatgaactcatcgccaccgcggagaagaagtaccaggagtatctctaccgaaaggcccaggagaaggcttattccaaggcccaggcagcttccgggaggccccttcgcgtggggagcccggtcgagaggagaagtcaggcgatggctgggaggtcccttcgcattgggagcccggctgagaggagggctcccaggccaaagccttcggttcaggtgccgaacaccggggctcctgatgccagtacttccggtccggtatgtaacgccctgaacctcaggaacgccacgtgtgtgcttttataatcttattatcaataatctattagttt

SEQ ID NO: 76076 - DNA, 611 bp, Cannabis sativa
  modified_base (167)..(170): a, c, t, g, unknown or other
gtacgtcgccaggaaaatcacatcacctaatcaagtgagcccatatatcacatgcataatatcatcacattatcaatactcaatcgattaatctatttattatataacaatattaactatatgtcaatattaatcattcattacaatactaattgtattacatacannnnactatgcagtacaatacacttttcttacctttaatctaggatcatacatgtcggccaatccaagtggagaactatccccaataatctcggtcgtatgtcacaataacgataaaccaataggtatttattccaaaacactgcttaatattcacataagataatctaggattttccactaaaccccacggtataaatacattaaaataaaacttatattttggctctaaaacatacatcatattgtagagctcgtcgcaagcttcaaaacggtatatagaacgtccaaaacggatacccgagtcaaaagttatgacaaccatacgatttctgatatcttaggaatttctaaaaactattaaactcgaaaatctctattttcgcactcaccgaaacaccaccaaaacttatccaaatcacttcaaacttcacagggcacatata

SEQ ID NO: 76077 - DNA, 1783 bp, Cannabis sativa
  modified_base (1565)..(1575): a, c, t, g, unknown or other
ccacctgtccgcagctgattcattcccgtaccttcaccatgcaacgtggttatgctggtgtctgcaaccttacgcgtagtgggattgccactaacattccctggtacggatgtacgattactggcctctgtacccgacctcaccgttactccatttggcctatataatgccgccgggagaatctcagaagttctaataagcgacggccggcgggagtcgaaacaacttctaatagggattaaagccttcaaccaaggcccctagagaaggacagcatcccctaccggtgggtaagcaaaagcctttggcttcctgcatatgcttcgttcatgaccaagaaagccacaattgaaacaaaatgtagggagcttcctatatttgaactgtatccattcacgtcgacccctagtaatacttaggaaaaaaccagcaggaacctgctgatcaataaggatatcgatttttagtttcaggaatccacgcctagcaataactccattggccgcaccatcatgttgaatgaaagttcccactttggctctgataacggcagagttctgggcagccaggaagggagtaggaaggccatggatttccacccaaaaggctgccaaggacatgttgacactctgccagtgtccatcaacaggccagtcccgaacatttagcagctggttggagatgatccaggaggttctcttcgaaatctcaatcttatcttcatgatgttcaaagaaaatgccccaaagaccggcctccatcgtcttcaaacgccatttacctttgcatgaccaaatgccagtcagaatatgttttactcttcccctcgagagaggtttgttaccaaaaagtttagccaaaacaccactctgggcaacttcctcactaatctcgaagtcaggctcaagttccaacgtaacctcctccaagaacttttgacgaagcacctctatatcctcagcagatccaatgttatcctctgtattcatggagccttgaccagaatcatgagacgccatcacgcgaccagaaagaataaaagacagaaagataagagaaaggaggaaagaaattcctcaaagcatggaaatatccagtagctcactcatgggagcaaaaagcacctttttttgaagattttctaatacatcctcctcaactgcatctttctttcttggtaagatgaaattatgctttagtacaaaaaaactaaaccgatcgacatttttaactgaaatttagttggtgacaagcatttagttaaacaatcagctattttgtcatgtggaggaatatatcaaatttttactcatttctaaaagactttgtctcaaacactacaaaaaatcatacttttagtcacaacaaaatttgtgactaaagaaaagataaaaaacattattgtgttgtgactaaaagtattaatcacaaaattacaatttgttgtgactaaatatatttttagttacaatatttgttgtgactaaaactaaattagtcacaacttgtagctaaatactatatatgttttagtcacaactaactttttgttgtgactaaaagtnnnnnnnnnnnacaaaaaatttatgttgtgactaagaggttgtgactaagagtagcagttttttgttataatgaaatgaacatcaagttctatatgtttagtccttggatgatacacatgatttgaggctagggcactggcactcacgttatcactacagataacaggaactgtaggcagattcgacttcatttctttaaacaatccttgcaaccaaga

SEQ ID NO: 76078 - DNA, 620 bp, Cannabis sativa
ctgcgtcgtcatcggtggagcacggcgtcaagaaggttctgatcgttgagtcgtcatcggcggagcacggcgtcaagaaggttcccttgctgcgactgggtcgattggatctacgcctgggttctttctgtcccgattgttgagtgttcgactggttgagttctcgttgcattatcggcattgttgagttatcggcggagcacggcgtcaaaggttctgatcgttgtgactggttttattctgtgcctggttttgatcattgagttatcgtcctcgtggagttatcttcatcgttgagttattggtggatattgcgcctgggtttttattttctattccgattgttgcgtttgttgagttatcgtggatattgcatcaggtttgtggtttggattttttctcagtttctatcgtggggttttgttggtttgatggcatcaactagcacagccatggatgacatggagttccagtatgggcatatagagttggatgatgaggaagaatgtggttttgagattgaggatgatgtggagtcggcggttctggtggatgatcgttggtgtttggtggggcggtttttgaatgcgagatcgatagattttgaagctatgaaacac

SEQ ID NO: 76079 - DNA, 905 bp, Cannabis sativa
tagtgattagttatactactcttatctctttcttctttctctctcaatttttaactttagttaaaaataatttcggccacatcattattctgttaatctttaaagaataggatattttacaaaaataccaatttttttttattacttttacatttttactatcaaaatctattttttacatttttactgtataaaattttcaaaaataatatgttaaggttttaaaattacaaaaataatatatttcagtaaaataaaaaaataattaaaaagcaattctaaaacaacttaacaaacaatataaaaataactataaaacaacaaaaaaaaataattacaaagcaacacaaaaatatcaaaataatgatctaattacaatatacaaaacaatatcaactactcaatatatttttgtattacgattttttttacttaattttaataatttgatttatctttttgtatttctacattattttttttcatagaatttattgttacaacttcatacttttaaaaacaaaattctcttttcttttttcagttagtgacagttaaaataataatttaatttttaaaaattaaataattacattaataatagaaataataaaatcttatgattttaaaatgtggtatataatataatgggtaatatataattaatatatcaatatctaatactacacattgtgtcaattaaaaaaaatacaaaattttatcatcgtatttttaaaaaaaatgtgtcaaaaactaaatttatgtatctaaactacaaagcaacatacaatcaaaaaattgtcaggaagaaattaaaaatatacagcataaaaaaatacacatgaataaaaaaaacaacttaaatataatttttgaacaagaaatattttgaaaactacttaaaa

SEQ ID NO: 76080 - DNA, 858 bp, Cannabis sativa
aatccgttgcaggcaaccaccattagctttcattctcaagtcccataatgtcagctacaataaattagcaaaaggaagcaaataaataaaaatctaataaacaaataaagagaagaaagctcatatcagaatttagaaacaatgtaatgtagcattttacctggaaaccttcaggaacagctaaaatattacttccactcgcattacaagaattatgcataaagctcacggctgatggatacaatagcctgaaaaaagtggcaaaatttgattaaaaaatccaaaaatttgatggaactctatcactgtctctgtcactctagccacaaaaaataggaaaacgttcatcttcctcataaacagataacgaaagcacaactaatatttctttctgaaaggaaccatcccaacgaatcaaattccaagaaaataaagaccatgacacaaaataagaattacgaaattgacgagtgaggcgacaccttaatgccaacataaagttcagtcacattagtttgattgcagaaaatccatttatcttttaactcaaccccatatatattagtgacagtgagagcaagattttcatagcacaacttcataacaagaaaatatgtgatctaatcatcttaagacaactttctccttttagaaattgttgttcttaacattgtctgtttctgtttctattttattattttgttaactaattagtttaaatactactattcatagaaaagcttagtgactatagcatatcgcacacactactcattcaatagtcacatagagcattgttaagaaaaacactcacatatagcataatctctctgcttctcttccacacacatatatata

SEQ ID NO: 76081 - DNA, 1882 bp, Cannabis sativa
atctgcttctttagcttagtaagatttttttcacgctattgcgtcaaatatttcccaactgaattacaaaaaaagaccctttttagatgcctaataaaggttggacagattctttttacccgaaagaaataaactcaaaacaaaattagtatataatagttattttaacatctaaaattatagaaaaatattaaaatttatggtgtttaacaatatctcaatgtgttatataattataagagtaatttatagatattcagtttaatgtattttaatttaataataattataaaaaatgtaattgctaataatttataaagtattattttatgataatgtttttttttttttttgaaagagttattttatgataatgttaaacacccctaatagaaatactcatcaattatgtgtatgtgtgttatatatgatgaagcttattctctcttaactttctatacttttgatgtgtacacgtgtcaaggttgatatatatctatataatgtttttcaaagtttcgtagccaaatagatttaccaaataccaactcttctagaccaagcaaagattccattatttgacccttctaactaacaaattatattaattgatttcaataatatttagagaggtggacaaatcaaagaatatcttaagtaaaatctttcgccaaatggtacaaaagaaataattaaaaaaaaaaaaagaaactactcactcaacattaggaatgaaaattgcacggtccgggatacatatccttagtgtggtaaaaatttattgcttaaatggaaaatagagtgggtatgagaacaattttctgtctctaaatattaaacgaagtgagaatagaatagcactctgttcgacggaactcgtttaattattttataatattattttaaattattatacatatacatttacgtgtttttgtagtttattttagtaaatttttaatattttcatttcactctaaataacattgtgtattttaaattatgactcattaatatgtatactattttaaattttatgcaatttgcctttttttattcataattttatttatttttaaataaatgggttactcgtaggttattatttgtcccagtaggaatttctcgccccacctacaatagagaatgtgcagtgatggaggcggaaatgagtattaaaataattaacgaagacaagaaaatattcacacttattacttgcccaaattctattcctatttaacaatattattattattattattattattattattattaataagacaaagtgattatacaaaataaataaataaataaggtaaatattccaaagctaaaataaataaattaataaaatcaagaaaattatacaaaattagaaagtggtagtgagtcttgagtcaaacccaattcaaatgcacaacattaaaattgattagtttattattcaacattcaaaaccaaatcaaacaaaaggttttttggcccacatttctagactcacaccaaatttttcttcttttctatttttctcaagtcaaattaagtgtgttcacacatgaggggcaatttcgtaatttcactcaaccgtaatgacggagggtagttgacgtgtgcagttgacggtggttcgaaatcggttgagtttctcttttctcgctataacgtcatccgtgaagtgttaaactaccacgtgtccaattcttattggctattactatttaccttttctagttttggttacctagatgaaacggtgcgttacgacaacgaaaagtggacacgttggcattattttggggtaactttgcttcatttctacgtaaagaaaaaattgaggaaaattctacaatgcacacccttaaaatggatatattga

SEQ ID NO: 76082 - DNA, 2810 bp, Cannabis sativa
ttttttttttttttttgtttcttcgtattcttacttcgttaaaaacttatagtttggtacatagccttttgtgctaattttagaagcaaatgctaaattgtgctgtgaacaaaagagaggaaggccttcctattatctggtagagattgtccatttcttgacaaatttatgaggtttctggataataagagttagttacgtttattgccttgatttttggtctatttccttacaaaattgtttttgagaattcgagtttagatgatgtcttatccaatcaaagaaattatagaaatttttctcttagaatgaaggttattatctttaaaaggaggggaaaaatacaaaaaggaagaggaaattaaagtcttatatttgtcaagcttgaaatgtagtcttaggttgctatgaatattgagttcactgttgttccttttgttgcagattcttgtcattttctgtgggcctggtgcggtgaaagtgaatacagttagaagtattgcggctcagattgttaatagagatactttaaaggggctaattttaataattcaaaacccaataacaagtcaagctcaaaaggctcttgattgtttgtctttcaaggttgaaattttccaggtatattttttctgacaaatgcaaatctttgttttcacttctcatgcttaattttttgattaagtgaaatgaagctcttaggtattttccaagttgtgactaggcatgagcaggtgtgttgtgaatatttgtcaaaattaaaactagcgatgctactttaattgtttttgtgattttgttctattgttctgactgttctaatatttgaaccttagaaattcttaatctcaaacttatgatacttcattgtcttcttgcattgtgtcagattactgacttgcttgttaacgtcacaaagcatgttttgaagccaaggtatcagtttctgagtaataaggagaaacaaaatctcctgaagaagtacagcatagaagaaaagcaggttaatctttttactgatatctcagttgttattccttattggtctctggccatgatttttgtaaccattctaataagcaaggaagtttgagtgaagtcttaaagattatgatagtgacccttttctcagagtcttagacttagttaacatagtggaaaagtaatttgtttttggctatagatagatgcttggccaccaaagtagggcttcacttcattgatttcctagcaagtgacatctgacagagattacagataatcttctcaatttcactaaaaggagatatggtggggactagtacaaaataatttttggtttttatcttgtaaatattgttaccttacctgccttgtttgaaggagcagtttaaaactgccatgtcctattctttttctaaacgatactgcagtaccctgaaagatcttcttgtctcttttgtttgtttggtcgaagttgggttgagctagttgcttatgctgttttaagtactttgcaggtgaagataaactttgtttatcgaagacaagattgcctaactcgaagtcgggttgggtaattactgcttcaatgtagtgtatgtattgcttgaatgttaacaatgactttttcttgcagctacctcgaatgttgaaagaagatgcaattgctgaatactatggacttcagaaggggcaagtggtgaagatttcgtacactggtggaatctccgactcttacgttacatatcgctgtgtatggtgatcacttttatgtgcagttcattatttggtagcatacttctagtgttatataaaggtaagattgttgacctcttctgggttactgcccttatatgtcttgtgggatttcggctcgatgtttctgtcattgtgtgcccatctgtggtttagagatgagattacacttttgtgggggcgagttataaaatttcatgttccaagggcacatagctggtgaaagaatgtatgttaaacaagtacttttgttacaagatgacccgattaaacgttactttcccgtaccatgtgatttctcatagaatggcctgtcgtgtttctttgagggttgccgtttataaaaacagacaacattttcgtaaagaaagggaaatggtcttcgtttgagccaaagcattgtactgttagtgttggaacattattgtgaattattaaaaacttgatgaaaagctgctatatgagatcctttaaaaattagtcctacatgttttggaatactcataagtgattaaaaacttgaatctttagaatcaagatctccggttaaaaattggtgtttcatactgtgttaaatctatcaaaatttgacacatcaactaatctaatttttattaaatatgttaattaattttgttgactttattagaggtttaatttttttataaataaaaaattaattgatgtgtcaaattttaattgacaatatgagacaccattttttaataaaaaatcttgattcgatcctttaaggattagtttcgtaacacttacaagtatatgtatggataattgggttgggctcaaagggtattaacttttatagaggagagatgagttacaaaaacttacccgcattatttttttttttgagaaaatttatttgttaaattattattttttttatttaattaattaaaattagttttataaatgtgtttaataatgggtaatcagaaacattttctcattatttttttcaataatgttcccaccaagcaacttaatctcccatgattttttttttttggaaatggcttaatctcccatgattagaaaaaaaaaaaaaaaaa

SEQ ID NO: 76083 - DNA, 807 bp, Cannabis sativa
gatcattctaaattcactagactaataatatactagtctatatttactcatacatgaaaatcaattcaacactactactaacgtaaagtcatttcaattgggcatttagttggtttcttttgttttattttatttctctctctatattctagaaatatttatgcaagaggaagatagattaagaaatgtattacaaagatccaagtaaccctaggaccaataaaatattgtcattgtggtggtcacctcaaaaggaagagttactagattacaaggacatagaagacaatttgcaaaagcaattgggaggcaaatttttgaagtacatccaagtctacagaataatgatggggatcaaagtgaagaaaaaacttccgaggatggggcaacatagaatgcatggcaaacaggtatacatcaagacatacaactagatgtagcaagtctagaactttggagattaacaagagcacaaaagccaaatcccaaatataccaatgttattacagctttgatccaagcaacaactcacacattcaatcaaagaaagaaataacttaagagggaaagggggttcggttttgaagaaggacaaacccagaaatttcagcaacaaattcaaataaaaagtaagaaaagcttcctcaaatccaaacaagaaccaagcccaaatcttcaaaactaagcttacttcctcaagcaatcaccacaaaatacaaactagaaaaaaaataagttttagagagagggaagggggttcggctgctagggctggaataatgtagaaattaaaatcccattttgctt

SEQ ID NO: 76084 - DNA, 2347 bp, Cannabis sativa
atcttctcatgataaatttggtaatattatagctgtggaagcttcaaggcaacaactacaaacgtatagagcaaaccaagggccaataaggccagttctagaagaattcataccattaaagacttcaagctctgaaggctcagcagatcaaaaaatcacaaacgcacctgataataaggcgaattggatgacgtcagcccaactatggagccaaactagtagtaacgatggaagcaagccacaacccacaaacaacatcaacaacagcactaataataatagtgttactacaaaagaaggtgatattagcttcaacgtagtgagcagtagtccaaagctggctctagataacaagttgtctcagaggcttaatggaccagctggtgcttttcttccgttctccaaagacaatattaacagccgtacaaacaaccagagttttaggccgctgcctgagctcgctctttctgcttccgtggcggatcagaaagacattattgttggggaggagaatcacaagtgcagttcggaggctgagaggagagaaaactcaggcaataataatggaaattgtggcggagtgattgttgaaatggggaaaggtggagtggcaggaaataataactgtagtaatattaacggatcagatcatcatcatcaaggtgtacaaacaattaatactaataatactaataataattccagctctacttcaaataataatcaagctcatcgaaaggcaaggaggtgttggtctccggatttgcaccgaagatttgttaatgctcttcagatgcttggtgggtctcaaggtaagtaatattagtttaattaatcttttttataatttattattgatatccttttttagtattaccatcacataaattatgaataattaaagttagttattattctactgtgatggaaacagttgccactccaaaacagatcagagagctcatgaaggttgacggtttgaccaatgatgaagttaaaagccatttgcaggtactatatatgatttctctctctcatgcaacaaaataatatattcatggtaagaaaaacaaaaaagaaaagaaaaatacaaaaagaaaaaggaaaaagaaaagcgtttgtttgatgtaccgtttcaaaagaaaaactcagggagacaacgtcccattctgacaatacaaaatcatatatcagtgattttgtttcgtttttttctaatataattatatttatttatacagaaatacaggctccacaccagaagaccgagtccgagcccacaagcagcaggggctccagcgccgcagctggtggtactaggaagcatctgggtcccaccagagtacgcagccgccgcagcacacagtggggcccaaacaaccctctacagttctcacgcggcttcccacgcgccgccgcctcactactgcgcgtctcccgtgcctcaagacttctacgcctcgcaagctcatcaccaagctcaggctcaggctcaggcacagggggtgactcaccaccagttacaccaccatcacgcgctccaccaccagcttcaaatgtacaaggccacgtcacagacgcacagctcgccggagactgacggccgaggggctggtggtggtgatcgatcggagagcatcgaagacggcaagtcagagagcagcagctggaaaggcgagagcggcgacaatggaggggagagaaaagggttggcggcgctgagggaagaaggggaagagagcaatggaagtgagatcactctcaaattctgatttgaggtatagagtataactagtgttaggatgataatggggtcttgtgtgttaatttctcatgattgccctttaatgatctaattttaatatatatatatattatttagttagttagtagagatcatatggtacgtataccaaaagagcataacggcaactaagaatgtctatttgttttgttataaattcatcttttatgtctcataagatgattatccttatttgaggaaaaattattcaaaattttaatattattattatcattgaaattttcttcagtacttttgctatttggacataccttcattgtttgtatatgccaattatgtctctataactaatttgatataaaacggcacattattatcctatatatatacatatattataaaattgagtaaatatatgccctcaaaggaacggtgtgattttattcacaggagaaagaaaacactataaaaagcgtacatatatgttgttagttaattagtaaatcacactgtggatgaatgtatataatatatgtttttttttgctgcaagtatataatatatgttactgtatgtatatga

SEQ ID NO: 76085 - DNA, 3990 bp, Cannabis sativa
aaactttttgttttaaaaataaataatgatattgttaaaaaaaaattgattaatgatatatacttcttataatcaaggtcagtccaaagttgaaatgggtcataggctaaaaaaaaaagaatattggacccttactataaagataaatgatatgtttaaaaattattaaaatatatatatattttaaaatgtatttttttatttgggccctaaaatgagtgggcgctaggcccaggcctagcctgcctatgcctagggccggccctaggcccagacctagcctacctatgcctagggctggccctaggcccaggcctagcctgcctatgccttgggccggtcctgctaataatttgtacaatttattataaccacactcttctaattacaaattataagaatgtatctatcactatcattattcttttaaaatatatatttggacataatatataaaatgtattttaaaagtatagttaattctcaaattaaactcaaattttgtcaaaatattttctaataaaatccttatatataaaacgatcaatataaaatacgtataacaatgaaatttattcttttattgtacatataaaatacatatatataatcacatctaaagcgcacactaatgtagccgcaatagctaaaaaaaaatctcaaagatcaaaatctcaaattctattttaaaaatttaaaaataaaatacattacctaatgaaaaaaaaattgaacttaaatgtattgcaattaacattagttaattaaacctaataaaaaagaaaactaattatacgtgcaatgcacgtaacatcaacttagtatatatatatgtatatatatagttatgctataacacatgtagattagattattgttatgttctatttttatgaaaattgagtttatggttaattttgcacttttttgaaaagaataccgattagcttgaattgtcatttaataaatagagttcaataagtaaattttataatatacaagataataaattgtatttagcctaaaaaatatcccttcggttattgctaaatttcactttgctaaacaatatgccttcggttatcgctaaagtttgctatactaaggtttgtggaataggttttgtatcccaaaatatcggttcatcacttggtaaatcattagtgtgaggcaactgtctactatagcaatagaaatcaaatcacactaatttaacaaggttcgatcagttgcatggtagtggcaactatctactatctttggatggaacaacctttggttttaatctttattgattcacacttagtgctacaatggtaataaacacctataaccttacaataacagttcgagttctatgattttaagagtctttacatgagattttgagtattgaaattagacttgagaggactcaatagtgaatacatagatggtatatataggctttgtccaagaatattagagggaccaaataaacagtctctaattaatttttaattgtcgagattgaagcttaaaagagctgacttgttattttaactgaaaaaactaattcgtttgactaagtttaactaaatccacatagatatgtagctttgatctcacagtgtagccaaggtcattagtgctaatgttaatttagccattaaagttagagtgaaagcctgaaaggtgctttgtttttccaattgtaacaggtgagaggcttatgaaatcagtttgattaactctttctgatttaaattttggttgttttgatttgcggtcgttgaaataaaagattctttctttgtttaaaaagaaaataagataatgattaggagatcatttctctctctctctctttttgtacccctgtaacaaactatgagctgtcatttctgtgacgtgtacatgctctagaatattctcattgtaataatccttttctataaattcaatacacaatctcagcaatgattttagctgagcattcatcccttattttctggttgtctttcctattatatctctgtttttgacttggtatcagagcgggtttctcggagcgtgccgtacgacatggagggcgatggaaactctgcaaccagcgttgaaacaacgacaccacagtccacaaaccaaaactcagctccgaatataatcgtgcctcaatttgggagcaccctgaaccagccatttgcactaaagctggaccgtaacaatttctccctatggaaaacaatggtttctgccattgttcgcggacaccgtttagatggttacctcaaaggaaccctctctaaaccccttgagttcttaccaccaaccactgagcccgacggcactactagttctattgtgcaggtcaattcggcatttgaacaatggatcgttaatgaccagctccttctcggctggctgtatgggtccatgacagaaggaatagcttccgaagtgatgggctgtgactgttccgcatccttgtggaaagctcttgaagaccttttcggtgctcattcaaaagcaaaaatggacgaatatcgcaccaagattcagacaagaaggaaaggggctctatctatgccagattaccttcgccaaaaacgacaatgggcagacgttcttgcccttgctggggagccgtacccagaaaaccagctagtggctaatgttctctctggtttagacattgactatcttcccatggttattcttatagaatccaaaggatccaccacttggcaacaacttcaagacatgctccttagctatgacagcaaaatggagagactacattcatactcaggtaccactaaaatcaatgctcctacagcaaactttgctaacaaaaatacctttcctggatccagcaggggaactaacaacagaggtggttcaaacaacaacagaggatctaatcctagatctagaggtcgtggaggaagaaatggtggaccgcgaccaacctgtcaagtctgtgggaaatacggacactccgctgcctactgctacaacagatatgatgagacttatatgggaaatccacctggtggtactggtgtcaatcaaaacaaatctcagactaacgctgctgctcttacagtctcatctgagtgtttggatcatgatgcctggtttgccgacagcggtgcgagccatcacatcactgctgaaatcaacaagatgaaactgaaggaggactacaatggtaaggaaactgtaactgtggctgatggtaataagcttcccattcaccatgttggtattggctctttccacactctatctgcctcaccattgattctaaaagaaattttacatgtccctcaaatctctaagaatttgctcagcatctcaaaacttacttcggataatgatgtttatgttgagtttttctctgatttgtgtttcataaaggacaaggggacaaagcaagtggttctcaaggggaagcttaaagacggactctatcagtttgacactccgaatccctctgctgctacatctcaccacaccaaacttcaaccaagtttttcctgtttttctggtcttgtagtgtcttctaattccaatgtaatacagcctacggctactcactctgtgtgttcaatcaaagatcgatggcataggagattaggccatccgtctactcgtgttcttgatgtagttctaaacaaaatcaatataagaaatgttcctcataaaactagtttctgtgatgcctgtcaactgggcaaatctcactcacttccattcaaaactaactcaaatagagcaacctcaccgcttgctcttgtacacactgacatttgggggccatctcctattatgtccaacacaaattttagatactacatacactttatcgatgactacagcaggtacacttggatcgacccactaagatccaaagatgctgccttcgctgccttcactcagttcaaggccttggctgaaaaacaattcaactgccatatcaaacgtctacaaaccgatttggggggg

SEQ ID NO: 76086 - DNA, 871 bp, Cannabis sativa
agcaattgaatgtctactccaataacatttgaaaagctttgaaatattgcatgattggtcatccaaaacactgttggaaattctcgaaattgaacttttttaatgcttcttaaatgttggaatccacaaggcaactcctttaattgtgggcaaggaccaatgaagcactcttcaagattaatcaatgctccttcctctattactatcaaactcaatttgttcaaggaatacaacacaagcaccttaagttttggaaatgttccttccttgaagtgcaatttctcaccatcatatccatcataaaatagttgaagctccacaagattttgtatgttttgaaggacacccaacaaatcaatttccaactttgaccaaaataaccctatcctagttagggtttgaagttgtgttatccatataggtaagttcttcaaatgcccttgtaagtggacacatctaagaaattgaggtggacaagatatggattccaaatctattgcatcatcttcacttgttgagcttacataaagggcttcaaggtgattcatcttttgaatgcagtcacataatctcttcccatcttcacttctcaaattcaagagccctaattttcttaattcagtcaacttgcacaactctttaaataggtcaactccaacaacattggcatcaacaaagtataatttttgcaaggttgttaaacttccaatcccagtgtgtactttcactcctttcactaaattaaatgaagcaaactcattcaaatttgcatggtaagctaatagatatcgaagtcgatgaagcttcttgatctcaattggtatttcagacaccaaagattgtttcaaatccaatgtctctaaatttttta

SEQ ID NO: 76087 - DNA, 1751 bp, Cannabis sativa
aacccctttgacatgcttatttgcagtctaaacagaagggctccattgggatatctctagatgttatgtggtatgaaccggcatcaaactccacagcagatgttgaagccactaatagagcccaagattttcagcttggctggtaataattattcaaatttcaaagctactcctacattttaatttcgcattatataaacttgattgcaatttgttgtcataataagtgcaggttccttgatccattgatatttggggattatccaaagtcaatgagagagagggtgagaaacagactgccagtatttacgaaatcggaggcttcactagtaaaagggtcattggattttgtgggaattaatcactacactacttattacggttccaaaagttcacttgccacaatacttaacgatactctcgcagactctggcgcactaacagttcgtaagtaaaacatgttgaatgaatctttctctttgaaatctcattggattggttttgtaactctagtcattatttatttccccgtctttttcagcattcaaaggtttaaatgctattggagacaaggtgaacaatctattcaactatttcttttcatcttattattttataaccgttgcttagactattcgaaattcagggccaagtttggaacatttttaattgattaaacactaaacgcacatactataactatatacttaaatattcatatatatgcaggcaaactctatatggttgtacattgtacctgaaggcatgagaaaattaatggtttatatcaaagaaaaatatggaaatcctccagtcattataactgagaatggtaattaatttttacagctgtgtttttttttaataaaaacttttgttgcctttccactcttaagaaagattttaaatgtttaatctttttctttttacaggaatggatgacccaaatgactcgggtattcccattaaacaagctttgaaggatgataaaaggatcaagtaccataatgactatttaacaaatttgctagctgctatcaagtatgtatatgtaatattaatatataaggcgcgttatttcttatttctcatgtagagttctaaataaagagatacatttaatgattttgttatctgttaaaatgcagagaggatgggtgcaacgtaaaagggtattttgtatggtctttgctggataattgggagtgggctgctggatacacatctagatttggtctatattttgttgattacaaagacaagctcaagagatacccaaagaattctgttcaatggttcaccaactttttaacttagttgatgctactatatataattacctcgattgtaccagagtttctttattaatagatgatccattgctttctcagaattaataataataataataataataaagggtgtacaattagttcttttcttcaaaaggataaataaataaatagaattcataaaatgtttactttttattggccaaattctctcgattataatcagtacccaaatcaacaacaaaagtatcccaggaataaaactggtaatggccatctagtcggttaccgaattgagaaaaacaatgactatcgttttatttattaactaatatataaatagctcttcacgagcgattatttgttattagaataaattatatactgaaaataaaaatataagtcagagcagagcagaaacataacaatcgctgaaaagagttgctatacgaaatataa

SEQ ID NO: 76088 - DNA, 1355 bp, Cannabis sativa
tattcaaatcacagctcttccacacacaaggtaccaactccttctcaagtgcagtgaagaggtatttatagggggctctaatttttatttgttgcatttgagatgctcaaagtggccccctaaagggaccatgtactatctagcaaatggctttggaaaaaatgttcgagcattagaattaaagtagtggtggttgggtgtcaggttatactgacacctgggatcatgctcccactaccttatatcgtaggtacatccttgtaccttcactctttcgtctcatcttttgtttgcgtcatgggtgtgcttgcagacctatcctcatggtgcctctcatccaaccgaatgtcgagactcacttttgggacctacaccttacaaactttggcttcatagagcctcttgaaagtccactttgaggggagtggggttgaggtgagaaagacaacttgcatgggatctcccctaaagggtcatgcatcttctcactaagaggtgagatccttatcgcacaaatggtctatgtggtgttgaataatgtaggggagcaagatataccatgcacggaaacaagccctgtcttgcttttgtgacccatgtggcgcggtgccatgcacaaaagcgaggcccctcattttccttggttatctaatggcacgacaaaaggggggtatgacccttatatttcccatgatgcacccaatgtgagaaaaatagggtccctttatgacccttccccaaagagtaagattatatctattcactgcttaactttgatttctcttcatgaatttgaaatccttactcaaagaatttgtgggtcaacttttgcccatgagtttatgagtgcacttttcaagtgttcttgtgtactcttgtactctttatgttttactactccatgcttcaacctttcaagaaacacatcatccatgatcctagcagtatctttttgggagagtatggaccattcattgacatcatggatcttgatggaagcaagtgtgttaatctccactattgattgccctttgattaaaggattgagaatcttcttccttgttactataaataccactttgtggtatcgagtgtttcattcacacattttactttagcttaatggtagaagatttaactttaagtctttggcaaaggagctaaagtctcgagtttgattccaacccagatcatctttggcaagaagttttttttttcatgcattcatgtgcatgggttttggggacccgaatttcttcccatgttaaccctcgctcctcatatgggtcacttattggtttacccttctagtgatggcccttcatggtaacctttcctttaggcctcattctctt

SEQ ID NO: 76089 - DNA, 552 bp, Cannabis sativa
ttacaacataagaattcatgattaataattagtcacaaagcttgtaactaaaactaaaattttttgtagtgatattttatgagagaaattcaaaaataaaaaaataaataaaacatatgaaaataatagtattgagtaaccagtttctttatattatttatatctcatattttattattttttcaaaataatttttttggaaaaaaaaaaacgtatatatttttgtacacatggtataaattcagcataaaatgtgtagttttcatgatactaaaaatatatttaataacaacatattataatttttgtaacgtagcattttttgtcttttgtcttggattttggtcacaacatacacatgagatatttttttacttacaaactttagtcacaaatttacaattgttaaaaaaatgacaaattaaaagaggtttataataattttttagtctcaaattctacagtgatatgtgttccttaccgatcgaatcgaaccgcactcttatgaatggagcttagcaaagtcatgtactaccactctgttcaaattat

SEQ ID NO: 76090 - DNA, 1057 bp, Cannabis sativa
  modified_base (60)..(67): a, c, t, g, unknown or other
gcaactagcgttgcaaccactttataaactcaaaccgtaaatttaaaaaaaaaaagttannnnnnnngtatatgagataattcccctaatatatataaagtaaactactattaaactatgtctactaccacataattataacaacatagataaaaaaataaacaaaatcatcctaaattaaatgttggctaattaagatttttttccccccgaactttgacatgtaccaaatcatgctccttgaactttttttgccgttaaaaatttctcttgaactattgagattgttagatttgaggacttttgtctaattttagtaaaagaaattctaacatgaatgaaagttcaaaggacgtgatttagtacatatcaaagtttaaaggaaatgatttggtagatatcaaaatttggggagcatggtttagtacataaacaatcactgaaacagtaaaattaaatgaaattagacaaaagttaaatctaacaatctcaatatatagttcagagggaattttcaacggccaaaatagttcaaaaggcatgatttattacatgtcaaagttcgaggggaatttttttttaattagccttaaatgtttacttactttcgatacaacatacttaatttaataaattggtataaagaaaatataatagacactaattacatccttaacatacctaacacataggtaaaatacatataatatattagtgtaattttaataatgtattctaaatataaataataaattataaaataacgaattttgtaattttttttttaaatttttgatttattatgtaaatttttctaatatatacctaatatccatacttaaaaattaattatatgtcgatatatatagagaagtgagatactaaattaaatatatatatatatataactaataactgtgtttggaaaatatataaaaaacttaaaatatatacatgcatgcatggttaattggattatagactatatatatatatatataaactagtatatatatatattaatagtacaacgaataaattaattaatgccaccaca

SEQ ID NO: 76091 - DNA, 1075 bp, Cannabis sativa
aatatgaaacataaggtgagagtaacctaaaatccttgaaatggtgctgcactgcgaccaagcggttctcgaatcaaacgattttggcagcttcaaggattttggatgacttataactggggtactcctcaattgctgtttcggtgttggtttaactccaagaatgtgcctaaattggccaacctttgaatcaaaaacaaaatcaagcacacagtaagtactttatcccaaaaactaatatcggttgtgtcagacaaactagatgagagaaaacccttttcaaaactcacagtgaaatttgagaatctatcattcttggcagcagtccatccagcattagggttatcattgatctctttaacaattgagtcctgcatagccatagtaataaataagcataaaaacactatatatcaaggtttacatgtataaatatatattagcaaaagtctaatacctgaagaatatgagaattaagcttgagactgcttactggttcaacagcaataacctggtgaacaaatacagaatcaagaatcaaaccaaaagggcataaactcaatctatcgcagaacaaggataagaaaatcgatcaagcaagatacccaataaattgaagttaaattgggattcaccaaacaacccatcaaaataatatctcaactaaatattgctactttcctttaccagccaaatttccatctcaaattgaaagtaaggaaagaacaaaacaacatacatccacccacacacacacggcacatccatataatcagaaatgggaaattttgaatttgaaaaaatgttaaaaattgcgaggagacaaacctggagattacagagggagatggtggtagcgagtaaaagtaaaagagagagaaacgaaaagggtttgagtgatgctgcttctgccatggctcgtcaatggttggttttccaaactggagattggaatttatgtaagctaacttgtagaaaacgataatataagaaaataaataaattaataaaataataaaataataaataaataaaattataggttgctttagttgtaccttgagagttgtgacaa

SEQ ID NO: 76092 - DNA, 643 bp, Cannabis sativa
gggaataataccgccggtattaacctaatttcttgtagtgtgttaagtgtcatgtaagactgtccacgtgtatatctacatacacaatgaacacatgacacaatttaattggtccatgtaaaaaattatttaaaaaattaaaacaaaattaatttgaaattaaaaaaactgtaatttatattaaaaaaaaaatctttttttttcttttcaagttattaaaataaactattccttaaaaaatgatgaaaaaatttcttctctttctctctaatctttatgattctgttggatgcattttttttcccttcatcttcattcctctaattaatatcatcaccaccccagatgcataccacaacaccatcaccatccacaactaatgcccaccacagctaccaccttaacctcttttttaaatccaaaacaccacaactaccgccaactccaccctatgtcaaacacaacaacacaattaaagaaacctaaacctgccaagatctaaatcaaacctgccaagtcccataacaatatacaagaaaaactaaatcaaatccacaatgtttgtgagaagctagacgggggaactcgaacccagtacccatgcctggcgccgactacttcggtttctcaccacgtggtatga

SEQ ID NO: 76093 - DNA, 789 bp, Cannabis sativa
aattctaactaagcgagattacaccaaactataagcccactaattaattattcactaaaaaataatttatgagttgaaattttataaacactaaattttcagtttgtcattgctgagaatatataacttttttaaaatactttatatttttttaagtttccagatgttttctcacatatatatggaaaaaattcccatacataatttctttaaaagtcatatttttgctataaaaactcataaaatatatgattttttttttttttgacattgattataacctcgaaataatccacatcgttggaggctgtagttagttttgaaaaatataagatattagatatgcaaataagtaaaaaacaaaattaaatatagttcatttagcataaattgtgctctattggtgcaccaaaatttaatacaaacttggcatataataaatattgtgtcaaatgatacaaaatttgtaaatgcacactttttttatttacttctatactatttttattatattattaatatatttatctattaacagatatttttattttctgcaaaagaaaattaatataattaactataatattaaaggagttctaattgcatccaaaaaaaaaaaattaataagtacactccattattaaaaaaattaaaattaaataatttttaaaatcacacttaatatatttttttttttaaatttcctcacattattttatgttaatttaatacttattttaattttattttcatatttttttctaaatcatatataattttttttatttt

SEQ ID NO: 76094 - DNA, 964 bp, Cannabis sativa
atattggtatgattccaattgattataagaattatcttcaaacaaaaacaatgacgcaaatgaaaattagagatacaagcagtgttttagagtatcttcaacgtatgcaaatacaagatccaaacttcttttatgatatacaagtggatgtggatgatttgatcacaaatattttttgggcagatgcaaagatgatacaatcatactcttattttggtgacgttgtaagctttgatactacaaataaaaaaaaccaagatgggagaccttttgcaatgtttcttggagtgaataatcgtaaacaaacaactatttttggtactgctctactttatgacgaaactactaaaatatttgagtggttgtttgatacgtttgccgcatcaatgtcaggaaagaaaccaaagacaattcttactgatcaagatgccgccatgactgaagcacttggttctcaatggccacaaacatatcatcgcttgtgtatttggcacatatatccaaatgcagcaaaaaatcttagtactgtatttgaactattttgagaattttcaaaagaatttagcaactgcatatatgattatgatgaagaaagtaaattttttgaggcttggaataagatgctaacgaaatatggtcttgaagataataaatggttgaaaaagatgtacaatttaagagaaaatgggctttggtgtatggtgaagagacattttgtgctgatatgacaactacccagagaagtgagagcatgaacaatacaataaaaggttatgtaagctacaaacatgaccttttatagttttttgagaactttgaaagattacttgagagtcgtcgatatgaagagttgcaagctgattttagagcaactcaaactaaaatgaaattatcatttgaagttgaaattttaaagcacggggcaagcttatacactccggcaatgaccaacatgtttcaaact

SEQ ID NO: 76095 - DNA, 820 bp, Cannabis sativa
ctcttgaaagctcttacaatctgactttctcttagatcactcttttctctccattgtatatttccccagcaattcgctcgatccctttcatagtgagcctacgtaactatttattgagacttaatacatgagggatggttttctttttgcttacaatgaataaaataggaaactacaatgattctataattacaatgtatgaaataggaaactaaaagaggtattcgtcatgctctgactcaatcccgtaattacagggattatcttcgcgtcttgacacaatgagattaatctctgaagttgtcatctctcgtacgtcgctcgtcataaacatgtctaaacttggtcgaactttttctccacaatcttgctcggatacctgactattacagatgctagttagttatttataggttgttagggacatttttctttgtccaggtatcaaaaatatgggacacatgtcattcaattctattgccacgtcaaggtgcaaaaaataggataacagatgtggaatgatgatttcctttgagcttgacctaatagagataaatagtggagtactcatttcagtaattaattagtttactaaaatattatttataggtagctaggtgttttaaggataaaatacattaaagggtggaacggtaaatttgttcctacttgatgtagatcatctatagtggatcacagattattaggattacaataattgataattcatagcatatctatatcgtggaacatatagagagttctatataattaagagtgcaattctgaatatatagtggcgcaaggagaaattaataag

SEQ ID NO: 76096 - DNA, 796 bp, Cannabis sativa
tattggtataaattgttcttaggttggttgaactattgtctataaatagctagtttcattctgtaaatgagttagctagctaattcataatcttggttggttcagatatatcgtgtgggtttgtgcgaggtatactgtattgttcgttgctgttttttaggtctgattgcatagcttggtgatggatatccattgcagaaagatcagagcttggtgttgctaagttcagactgaagggagttcagtgtcatcttcgtcatcagatctgaagggatttcagattgaagaaaagtgtcgaagaagaacttaggtactgcacagggaatcttgtgcgtacaactaagaatcttggttgttgttgataatacattactaattgttgtaaagattgtattaaattcctaattgtgaactggagattgtaatacaaatcttttggatttagtggatgttattaccctggttaagggaacccaagcactagtcggctgagatttgttctcagtgcagacgaagcttgtaagtcatagtgttctttactgcatacacttcaatctgattcctatatgtttatgttgtaattaatcaatctaatcttgaacaactcgaaaacttgaatcatgaaatttggataagttgttctttcatttggtatcagagcttaaaattttctgaaaaattttgtgttagatcataggcttgtctgattcttgattctgaaaaagtcagttgatatgtgttcgagatttgatcagttgatctggttgccactccctctctgagttctttctcagag

SEQ ID NO: 76097 - DNA, 1230 bp, Cannabis sativa
tctgctaaagcgaaaaatgaaaaaaataaaataaaataattacctgacaccagcaccaataacagcaactctcttaacagaacctggaacaattccatttccaataataaatcatcaccattctaaattcttgtaaagaagatcgtttgacaaaaattgagtagccccaaatttgtgaaaaaaattagcaatatatataatttgacatcaaaatgcaaagagttttcacatgaattcgaattttgtgttggtgacgatttcatttatgaacagagagaaagagagagtagagacttacttggcttatcttgtttggtagacgaagccatccccattttcgtttactcttttcagttttgcttgttgcaggagttacagggacgattctctctgatcaaaatcaacagtcaaatttgttcgaaaaaaaaaatgaaaagagtctaaaatctaaaagcgaaaccatggagaccccagtccaggaggaggatatgcttcgaaacgcaccgttttgactaacccaaatagaatacacctgtcaaataagactccaatgttgtccacatcagcatcaaaacaaaacagtgtctgggaaatgtaaaagggccttgggccctagaaagaatcaaatggaccgggccgtatactggcccattatcaaaggatagtagactggactggacagtctattgctcttgttcattttctaactctatcgtgcttgattgattcatgattatgtctattgtcgtttttatcggtaaacgacatatccattttctactaattatttacactttttaggttaacacaaaacattgttttttttttttggtaacactaaattcgttagtttttcattatttttttattcaaatcagaccattttgaatagaaaaggtaaaaattgtgctagcataaaaaataattataatatattgtattaatttttaatattattataatattaattaatattttattaaaaaatttttattatgtaaaacaataaaaaataaatgtgaaaagtttataatttaatgctaaagttatatataataataagattaacaacataatataaataaaataatagtgcatggtaatcataataaatgttgtctcaaatttgacacaatatttattaatagtcaaatttacatcaattttaatatattattgaaacatctttttaactatatgagttctattttaattttacatcatttattt

SEQ ID NO: 76098 - DNA, 1024 bp, Cannabis sativa
tagaatatttgactcctccctgtcctgtcctgttggaagagatcctacaaagtctatctcccaaattacaaatggccacgaactacttattagagtgattttattagtggagcccgtggaacgttagcataacattgacactgtttacacttacagacgtaatcaatacaatcctttttttattatagatcaaaagtatccctaacagatgaacttatttgacaagttgagctcaaatataatctccgcaaaaggcttcatttcgtgagtaactatactagtattctatttctatttattaaactatgtatatgtagagctatttatatgaatggagagatcatttcttacaattattttatggtatatataatcttagcaaacatagcatatatatatatagaacactttttaatggatattattcaaatcaaatttgaatctaatggaattttatatagccaatcatatatagtaatatgcataatacaaaataataataaattcagaaaaaaaaatacaactatcttcttctaccttgtataaattattataaattgccctcataaaattaatttttcaattcgaatcttctaaagtagcattaagttgggaggaataaaaatataagaatagaaataaaaatgggaattagaataggaatagaataaaaattaaaatgcataaaaaaattaataaaaaaaattattaaattttttcaagtcttgcattagaatagtctttccttctattttaaaatagaatagtcatttcaccaaaatgatgaaaatgtcattccatcggattggtattcaaatagtgttaaatgcaaccaaacaaaggaatcgaatgaaaattatttcctttccatccattctatttcattatctcaaaccaaacgccacctaagtacaacaagaagccaagatatagtaatataaaaataagggatattggcggctaaaccacttgaactttacgttttgtaacacttaaccacaaaaatcaaaattttggtggcaaa

SEQ ID NO: 76099 - DNA, 2276 bp, Cannabis sativa
  modified_base (189)..(198): a, c, t, g, unknown or other
ctcaatcatagtgagtaagacggtggtaaccaaatatgaaggagattagaaagagatcaaggttcagatcttgataatgctttacgacataaacgaatcaagctggtaagattttccgctgcaatcaagctggtaagatccaggttaagggctagatatatgaacgaaagaagtcattatattccgctnnnnnnnnnntaagattttcttaaactcttatgtgtttaattttattattttagagaattcatatttaggatgtgaattcaacatacttgttagtaaattaagagcctggtaaaatattctcagcatatatctgagtgttagataaaataggttgaaaatacattcaagataaatgtgaatgcatcactttttgaaagagagggtaagtatggctttgacattgtggctagagacaatattggcaagtttattgaagcacgagctggttgcaataatgactattatgctactgaggtggttgcagctatgcgaattaaggaggttcttagttagatcaagagcaagcattggcagtaaagtggaggttgaaacagacagcatgttcttgatgcaggccattcgaagcaatcaaccaatgtgatttacatttgatttgctcattgactgtcaaattttattatcttctttttatttatattttataagacaatcaataaatcgagtagctaatacactgtgttgcaagacacttttggtatcaattgttttggcttatttccaaagcctgttatatttagagtgctaaattttaataaagttaatatttcatttaaaaaaaacttataaatgtaaggctgagtttaggtgtgagataaaccatgcaataatattgagatcccatatttattggaaattgagtacgtaggtacgtatatatacctggttggtttttggtcactgcttacgtttaattatcttcatatttggctgccctattccctctccgaacacattattaggttttaaatttaaagcctctacaaaaaatcatgtgcagaagatcaatataacgtgctccatatataagtagtatttaatattagatatatatttttcttcctaaataacaataatattatattcataactttcacaaaaaaaaaaagagtaataaaatattatcagtgatactgcatatatggcaaaccaggaatgacatggtgtgtagcagaattttgagtctgtggccaaaaaagtttattagaatgaaattaaaaaagatattatataggatgtaataaattgatttagtaaactgcttgtttaaaaaaaaaaaaaaaatctctatgatgacaaacaaataaaaatacaaaaacttgacaaccagaaacaaacatttttttttaaagaagaactgataaatcaattttcagaaaaaatataaccaatacgtaagcatgatttcataaatgtatatatatttgttatttattgattatataatatgaaaagttctgagttctgaggataggtcatgtgtataattatataaattaattgagatgatattccagtatatatataatataaatgcatccctattccctatgatagtgctacattttattttatattttatttacatttactatatagtttttgcttaacatcacatatctaacacatggtgctgactgtacctactatgccataccatcacacaactataataattaatattcattattaaatatcctttttcttttattattattattattagtagtagtagtattatatccaaattttttttatatataaataattataataataaagggaaaaatagcttagatatcttgtgaaacacttgattcctttcagtttcagctacgtaatggagtcataataatcttctcatgtatgtatatgaatatgactatatatatatttttgttttagcataaagtcatcatggtgtggtggagggtttttcgataaagatcagtcaacaaataatttatcctcaattatattattaaattaaaattttctttcaaaaaattattaaattaaaattaatattatatatatataagaaaaactcttaccttaatacaataaagtctacctcatattaaaaatctatttataggaatactttgaccataaaaatattattggtgtgtatatatataaacaaatattttaattttcatatgtgaaatataatgcgtaaaatttagacaaaaatcgctatattccagcttctattaatttattagtttgaggagatattaataaat

SEQ ID NO: 76100 - DNA, 598 bp, Cannabis sativa
aaaataaaattaaaaaaaattaaaataaaaaaataaaaaagaatggcgcgtggatcaagagcgattgcgtggcggatcgcgcgtgacgacaacgtgaagtcacccccgccgcccttcacctacggcgctttatagtacgtgtcagctattatgggacccacctgtaacgtctggtgcgcagtacgcaccacaaccctatgttaataataataatgtttttggattttgctctgattacaataataatcgtatcttaattttgtgcatgtgtatgtgtagtattagtattagtcagttcaataattcttacgttcctgatcttgacacgtccacatcttatgtggggtattgacacgtgtctttatcggacgtgacttgattctcacgtttcacacgcacgagtgtgccttccaccctttattattattattattattattattagagcattcttattggctaccagtgttgcctaagtacccttaagacgtgtcgttttacgattggttagcgatactctttaaatgccattatattaaactatatggacccgatactaaattagaccaatagcgatattaacacgtaggagggtgtt

SEQ ID NO: 76101 - DNA, 715 bp, Cannabis sativa
ttaaaatcaaaactaaaagtttccttatcgatggataacatgacaataccctaaatatcataaaaacatgaaatctagggtaccctaaactgccccgatcgagtagacactacaagaaaaaaaaagtgtgttggcgcgataaaaattgtgccttaaagctctatttttcgtgccaatctacttttagacacgacatgtcatccccattctgtcgtgcctaaaagttatctagtggcacgacatttaaatgtcgggccaaatagtaaatttattttaaaaaaataataatatattattaatataaacaaatttataatatttatatatatattatattaggattgaacttttatatagtaatataacttaaaaattatttatatgaatctgaataattaatataaaaaaatatatttgttcaagaacaaatattattagcgcatacacattatacatatttatatagaaatatctcttaaaacgatgaaaaaaattattacaaaataggaagaaaaaaaaagtatttgaaaatgctttgaaccacagatacaaatagtaaccacgtcgaagcccttgaacaaccgtccgaccaatgtgctgcctcatccaaaacccatgcgccaccaatcagaaacaccttgaaccacccatccacccctgctatacgcttcgtcgtacacccagcgccatcgagcatttcttgtcaccattgggc

SEQ ID NO: 76102 - DNA, 1087 bp, Cannabis sativa
aacttaaaaaaatctctaaacaatgattttttattttctttcatctcactttttctgttttttttttaaataaaaaaaaaagtgtaaaaaataattttaaaaaagtatataacaaaaaattttaagtgtataaaatacaaaacattatatgtatatgataaaatcgttttatgttttaaaattttatacacttaacccctttaagaaaatgataaaataaaaatgaatattaaaaaataaatttagaaataactagaaactaaattatatctattaagtatgtaataagttgttgaaagtgatgcggtattttagttaagctataatgttttgattggttttgggatattgagacacaaaaaatgcaatcgtgcgagatgttgagttagtgaatacgttagctgagctgtaattttgttagttgtacaattaattccagtctgttagttgtacaatttgttgctctcatctaagagttcaattaagctgattgtaattgctatttatagcttgtaaattctctcctaatgaataatacaaattcattcaattcttctaatcttaataagaggataccatgtttctataattctatttccattggccaaacgaatcagcacctgttatggctataactactaagagtcaaaaattaaaaggtactaccaacaatgtcatattgcaaatgatacaattaaatattaggttttatataattattgttatcacaaatctaaacctactatgtactgatgctagtagtggtatctaataacagcctctctttgaatactggaaattgtagaagaagaagaagaaagaacgaaagaaaaatctaacaattaaactttgttccaccattggatcaatggatctcttgtgcatgagtgcatctttttggagggagggagagtgatgaaaggagaaattgaatctcttatttggtaaggagaggagggagatgagagatgaagggaactttctctctccaaactttaaaaattggaaggattgttgaaaaagaaaaaaataaaatttgttaaatacaataatatcttttaaaaagtgataaattgaaaaaaaaaaa

SEQ ID NO: 76103 - DNA, 533 bp, Cannabis sativa
ttttttcctctctacactctaataatatccattttgaaaatatttatatatacatgaatctcacatggattggccacttaaagtcgttgactcttttccaccctcacactcacacatagattattaaataattaatttataataaattactccaaatcttaatcatcactaccaataccacttagttaattatttaatcataatattctaagatcttaatgaaaaaaagtcataattagatcactagatcagcttcttaaaagcaaaaagcatactaatttatatttattttgattattatgatcacgggtagggatgcacattttttctatggggatagggccccgcgaaaacccgcccttaattggggcggggattccccgtctaaatagggaacgtggcggggaggggatcaaattttatccccgaatgttaaacggggcaggaacggagatgacacttccccccggacggggacccgtttaatttattaattatttttttattaatattttatattttatatatgcgtt

SEQ ID NO: 76104 - DNA, 515 bp, Cannabis sativa
aaaattactaattaaccaaaaagatatttcttttaaaaaaaagtaagctcaatgataatttttttttctttaaacgcttcttcttttttattcattaattcaatattattattttttacattttcaataaaaatcaaataccttagttgatattagtttgcatttggaaaacttataaaagaaaggaaaatttgattttttatacttacatttggttaaaaaaaattttctaaacaaataataactaatatttgtaagatatgaaaacttttatgatatccctaaaatacccccatttatattaccccatttacaccatcgggccacccatcggaccaccccatcgggccacccatcggacccatcggaccacccatcggactaccatcggaccaaatttgttaccaaattttttttttaggattttgtacatacaaaagtagcatcaggtgaccatcggaccaccatcggactatcaattttttttttttttttttttttttgcactaaaaaaa

SEQ ID NO: 76105 - DNA, 605 bp, Cannabis sativa
tattttttaacatacaaatagaattggtgagcgaataaacattaagaaattctaaactatattcaactcacaaagctttatttctgtagattttttattcaattgattattcttttttttttttaattattattattattacattttaccattgcagtattcattttatcttgtgtttgatgaaattcattctgaagtccctaacttcattttttcttttctcttggcctctatatatatgtcgagtcatatatagtactttgaaattatgtatatagatttagttctgattgtttgagaaaagtattattatcgcttggagtatatagacgattaagctcaattgtagggatactaaaatggataaaatgcagggaaaaaaagatttcgcaagggaatatacattgctgcaatgaatgctctgacatagtacctatggaaaggcagaattgggattgtgtaaaaacatgaggtagttacagtacagagtatttttattggggtaaagcaggttgaatataatagaatacataacaaatttttttacaaagtttagtaaggaagatcaaatgtagtttactggggtatataaaagcctctaacta

SEQ ID NO: 76106 - DNA, 552 bp, Cannabis sativa
cagacggaagtcctaccagaggtcagccgtagtcggagaggaaatcaacagaggtgaagaagaggagaatcgtgaacaaatatattagttaaatcatattctatagatattattattaataagtttttgaaaaaagaaaaacataaataactctcttaaaataaaaattagaaaagtataatggtatattcataatatctctaaagtatttatcgttgaaaaaggaaaaagatagataattatttttaaaataaaaattaaatgattataatcctaatagtaatatgatttaaaaaaaaatcctaaccgatatatataccgtactgatagtctttttttttttttttatgaaaccgtctttagtttagtgagaaaaaactcttcttatatatatatatatataccgtactcctatggtattggtgatcactttagttttagctgtaggcagagaagtttcttgtttccagattagtttttgttaataaattgttttttgtcatcaacaaattgtaataaaatatcgttaagagaaggttagttttgtaatca

SEQ ID NO: 76107 - DNA, 871 bp, Cannabis sativa
tcttttgttttggtttcatttgatgattattatttgtgtaccataaaaatatgaaatgtgaagtatgtatgggaatgacatttttgctttttaatcaatcatagaccttctcggcactctcactagatactccatgggacagtggaactgtttggagcaccatggccttttatatgttcactttacacgttcctttgagttttggttggttttctgtggtggctgaaatactccaacaacctaatcttgaccctcagactgaggtcagtacatataaatgtgtgtgtgtaagcatctctttagcaaatttttcttcttatgtttggaaagaacgatgaaacagtatctaggcttagttttccttcaatgtttctccaaacagaatgtgcttaagaccctcttcatacatggtcaagtttccaattaatcctcactcgatataagtaaggattacagctagaaattgggccataagaattttactctacagtctacacatggtttaaccatgtgggatgttaatgctattggtactataggggaaacattaaagaagctaaggaaggagtagttagaagagagaagacatagtgaaggattatcgagagaaactttattgcctttttatatctctatatgatacagatttagaactaaacttaaaattaaatacatatgggagggagtgttgaactcagatatatatatatatatatatatttatataaagagtgggttgattcagagtgtcgaggaaccaaaattcaataaagagagggggcaaagactaagaaacataaatgaacactgttacttacaggataatcttttatctagtaacttgtataattgtaagatattatatgtaaat

SEQ ID NO: 76108 - DNA, 507 bp, Cannabis sativa
gatagtgacatattcagctcgtgtttaacgagtggtaagggtactttatgaagtaatacaaggattaagtgattactttattatataaatgtataagcatattattgtgagattggatagatgagtactacatcgattattattttattcacttttcttgctgagtctctgtgactcacgggtgctataaggttcaggtaaagggaaggctaaggttgatcaaccatgagcctgtggtcggagtagcaatgtacatatcagtcgcggtgcaatggcccagtggacaggatgtttattttaagtgtattttgaaacgtaaagtttatgttgtaaaagtattttgaatcttaatgtaagtattttgtcacgagggggtcgccataaagaatagtatctaacttttaaaaaaaaaaaaggaatttgttttaaatggcaaaattttattacccacaattttggtataaatatataatatataatttattaaataagaattttataaaagca

SEQ ID NO: 76109 - DNA, 701 bp, Cannabis sativa
aagaaagaaagaaagaaaaacttatggccagtaagcgtttcccttgttggttacctttcttcagtctttgaggaattcattcgaacactctgtcaacctcaactggtttcttcaaactctaatctgaaacctggctcttgataccagtttgtgaggattggtctcctcttctccaatctcagatcaatacaccagaacaagacagaaacaaaaccggattaatttcagagtgcaaacaacaaaaataaaacagaaacaagagatcagattacatggttcagatcatggtggtcctacatccaaggcagggatatactccctagtcaaatatactatatatttcaaggttatactcactaatcaagggtttactgctctcaatataccaatataacattgcagcacatggtatattcaaaagaaaaagacagagcaatatcctcaataacactttctcgtgtgttgacacctctctcatctatacctcacaaatgaacatccttttataagtgagaacaccagccaattccaaaaagtacaatcttggacaagcttcttgattttaagtaagccaatgagtgatctgcagtttcacacgttggttatgactaacataacagttagttaaattcaattaggggcatatccaataataataaaacgtaaatgatgaataatgatcaagcaaatttattggcaat

SEQ ID NO: 76110 - DNA, 919 bp, Cannabis sativa
atataattcatataaagttttaaccgttttagtactcaatttcgtgttaaaaaattaaaatattagatcagctgtcactaggtgattcgtctttttggtttgtttaactgatatctcctcttaaaaaaacaacaataacaaacaacaacttttggttgccttttattatttaattattttaacatgaaaccgaaatttttgtaaacaagtttgttaattgtatctataattgtaaactttatgatattttttagttgtggtgttgttgtttgtttcttgtttttttttttttttttcttttttgttacaaaagttgttgtgtcttagtatcaaacatcattaacattaacacagaccaacattattgcatatgcatatataaatataaattatcaaaatatatatatttttgataaagtgtgactaattacctttctcgacattatttttgatcggtggatgtgcattttgaacaacccattatcattcgagtggtcacatcttaggtcaattttgatacaaatatagaaatatggggctataatatggtatcatattatataataatattaaataattagcatttttttcacataattttttttaaaccattaaattatgcctattataatatacgatttgctattaacgatttctattatattttatttaattttattatgaaatgagcagtgaatgatagttgcataaataaatataaattaaatactttttactgtttttatatttataaacgataaaataaaagatttttttataataatttatatttatatttttagttttttaatcattaaataaaatgtgaaaagtatttaatttatatttatttatcaactatcaactaccgtgtgaatatgatggaaatactatattagagtaaaaattatatttcgag

SEQ ID NO: 76111 - DNA, 726 bp, Cannabis sativa
gataaatacttgcgatcacaatcaatatatgaccggtcaaacagaatgagctgtacaatttcacctaaatcattatactacgtacaccaataatttcataccaaaccaagttatcattttaccccttcattttttatgttaccatatctcacttttttgtttttttattcattgataaataatttagatcttgcggacattataaaataataataagtctgttaattcacttaaagagttttaagcaaaaataaaaacaaattataataattctcaatctcccagcaaaatgacaagcgattaaaagaattcatcaccactctaaaattactctccatgatgatgaatgagtaccctttgaactttgttgtatcaagtgctaagctaagatgcagcctccttactacaaagagcatttgaaaaatctaatctagttgtattaacccaaaccacttcatcagaatgatttctagcgacatgattggccctaggtatagacgggctaggcccgcacctagggtccactcattttagggattcaaataaaaaaaatatattttaaaaaaatatatatttttaataatttttataaatattatttatctttaaataaaggttcaagaattttttttacctataatctattttaactcagcgctgaacttgtctaacgaccaccgcatgcaattcacaagctttacgctatgtatctttgtactttagtta

SEQ ID NO: 76112 - DNA, 1565 bp, Cannabis sativa
cacagtataaaacattagcgttggcggaatattaagactgtaaattcctactacctaaagaatgaactttgtaaaaaaaaaagctagtaaagactgcaaaagatcaagactgcaaatttcaactatccaagcttactagtaaagaattaagacattggcaaaagaccaagactgcaaatttccactatccaatcctactaactaaagaatgaagatatacattgacaaaagatcaagacagtaaatttccaagccaacaaatttattaatccataggaatttcaattgcacttccaactaaagaatcaaaatatacaaatcctaacctaacaaataattaaatgtagactacttgcaggtaaaagaataaaaaatacttccaacatgggtacttaccagataaaagatgcttctgcttactcccttccaaataacaatggcaagttaactccgatgtcccttcaacaacgtcgcatttgccacaccgatcaccaccaacatcgactccaacaactccattaggcaaacccaatttgcgaacattcgaattcaactgcgaacgtttggccttgctatctcgtcctttcaagagctgcctcaaattgaaagccctaactccgttctcttcccctaaaataagcaatccaaaggaaacactaatcgaaaaaaggggcttgcagcaatcaatcacggcgcatctcatcaatttcacagcgatcccatcaccataatcatcacccaccagtttcaaggcgaaaacccaaacctttgaggtcgaagccgagtacatcgccatgaaattgactgacccagaaagcttgatcgaaaccccatgaacagaatcaactaaaacccccaatctctgatcaaatcgaaggtccttctgactgcaaaccacttgggccctagagaagatctttttttgcctctgcaaaatatagaatcgaagaaggacacgagacccaccggcatgaggacccgaaacaacgaaaacaacgtgggagtcagattcggagccatatttcggattggcgggactagggttttttagaagtacaaaagcggacgaagaagaaggagcaggaactatggtttgagtaggagaaggaagggaagagagttgatgaagaggagaaagagaagggtagagagaaaaggaggtgtcggaatgcatgagagctagagagagagagttggggtcgaagagaatagaggatacgtgaggagaagagagagaaggattagggagcctgagcttggaagcttgaacaacaaccattagagaggagagaaacaccacggcgacaagcgccgccgccaccaccaccgccggctgagatttggtgttgtcgtgtttctttggtttagcttaggcattgacagtttagaagaagttgaatatagtagacgatcgtttctttattatttaatcatattttattattttaaatattaatttgagtttttgctttttttttttttaaatcagcgtttatagataaaataatgagcaatttatgcggaaatctcttttaagttttaattttgggaaatttacatggtat

SEQ ID NO: 76113 - DNA, 633 bp, Cannabis sativa
cttccattgttataaaatctctaacagtaatagctccattcatcaaggattattaattatttaaactgtatttcaaataaacatgtaacttccctattttaagaagatatttgcctatttgttatacataacacttgtaaaccctaatattatataaagggtcataacccttcatgaaagagaccacgctcacacttgaatcctaagcctcaagcatgctcagaaccttaaacttaatccatttatgcacttaagagctcagaagcaccaaggtatagaattttctctcttttctcatacttttcacctacaaagcacattctcattgtattactgaagagagcctagccagaaattacaaggttttagcttataatttgcttggtattatctcaagagtgaatacaactaaaattagattaggtcattacctaaacaaaggggtcgaacctctataaatctttgtgcctttacatttattatcattctacacgtgacagtcataagcgaaatccaatcctagtcagactctgcgtcggttggctaaatccacagtcaattggatccaacacatatcctgagttatgaaaccctagagctccaaccagatttatcttatgaggaacaaccagt

SEQ ID NO: 76114 - DNA, 649 bp, Cannabis sativa
tatatatttatatatatatggacacacatatagcacttatatggtattgcacttgtttattgccattattatgaaaatttggtaattaaactttgaaaataacaaatgatgtacaaacttgactaaaagactaataaaataatgttttcttctttacatattaggcttagtagagtagttaattggcatatctatttttcagtatattttctgggaaacgaattctgaaaaataataaccaaaatatatctctgttcaatagtctcttcttgtaaaataataaaatgattttccaatctatttctctatttcactgtaagtagattagctagttcatttcattagacttggaaaaatgcagaaaaatataaagaagggaaaaacctttagtaaatactctgtcacagtcatcattggactagttttatatagcaccaagaattagactacacttgaatgcctcatcttctcatacaatacgagttcttctttaaatgcatattgagcactgtaaaaatagaaaacggggttgttagagtttataaaacacttaagaaatatataaatcacagattcgaatatattcctaagagtgctttaatatagaaaaccctaaatcataaatctataaagcctttgctaaattaaa

SEQ ID NO: 76115 - DNA, 904 bp, Cannabis sativa
  modified_base (833)..(837): a, c, t, g, unknown or other
aattaattattataccatcaaactagagaagcgagggtgcttgagaagagtatggagtaatccttgtttgaaaacatctgggaaaatctttgtcttgcagccgagaatggctaagatatgaacagtgaagttttgttcgttgaaaaaacggcctgctggacttacaggctcatctttctcggccatcatcaacatcatatcctgctcggccaagaatgtgctcttcatcttaatattatcatcatcatttccccttctttttaatatattcgtggtttgaataggtttcagggcttgatttcttgatctgatcagggtaccgttttcatgttcagattccattgtgtaattgcttaatttcatcagcaactacactcaagacagattaagtatatatacttctataaaaaaaaaaacaaaaaaaggtagtactataatataaccgagattaacagtactcagtattaagtaatatatgtatatataaattgatggttattgtggattcattatattatatgtgatatatatatatagagagagagagatggaatatggatggtatttttcaaaaaatatgtccaaaagttatattttattttattttactttttcaaattgtacagtgtacatgttaggtcgccaactgttattttttattttattttagttttaaacttcataaagaaatgtagataggaaaatataggaaaattctacaatacatccccttaaaatggatatattaatgcacccttatctgtttttgcatccgaaataattttttaatcaaattttttatcatgcttatgtacgttatagttatttaagannnnntgcaaaattttaagaaatttggaaaagtttaacacaccgaaaactatgttcaaatagtgtgttgcac

SEQ ID NO: 76116 - DNA, 562 bp, Cannabis sativa
tattggtcaaacgaccataagcttcagacgttttttcgtcccctgcagtgcctagttgggcatgtactgtggaagacgggttgacgtcgtccatgacagcgtcttggccctgggcagtaagttgtacgatgttggtttttctggtagccaccattgttataggcacagcttgccttcaaatatttcttcaaatctcaatgaatgtaccaaaatatttatcaagatttttggaagtcaattataataagagttgagagattaaataaagcaatagaaagtagagatagagatttttacgtggtttaggtattaatgaaccctagtccacgagtcaattgtatttggctaagtagccttgatgtattacagtagagttcttacaagcttaagaaccctagttttttgctatagtgtttacacaataaatttctaaccttttgcataagggtataatgtagtatttatagactaggattcgagttcaggtatatatgtgacccgctagggtttgcataaaaacatgacccactaatggacaaaatacataaaatacgttaacttt

SEQ ID NO: 76117 - DNA, 2608 bp, Cannabis sativa
atatatatattcttcatatttatatatattttgtcacttgcgccatccatttttgactttatactagacgagaatttgtattccaaaagagcctcacatcaatcttgtttggtccacacattcaaacaagaatggctctagacattggtccctaataccatcaccctgaaataaaagttacagcacttaaaagaccattttacttgaggagttaaagagtacgtatgcaaatttacaaacacatattaagaaaacttggtctaacctttatataagagctaacagttctcgggaacagatgataaaggaagtgtttgagacttctctttggcatccataacctcagcaaccgaaggatttccgtccccatgcccatttagggtccctgggctcatcttttgaacctcttctctagtatagataaaaatctttttaaccatgccacaaaattccctgataaaataattgcacatcatgtcaatgatccaaatacccactaagtctaaagtgggggaaattagcatacatattgatctcattaagctagatgtgacattctaagatgaaggtaaaataaaatacttactgccagggatcatcaccaacaagcatcatatcattctcgtcatcagtgtacacaatcaaccaattcttttttggagccattagttcaccaccaaattcaaacaactcgtccaactcagctatcagctccttgtaattgttaaacttggtaagatctacagatcttcccagtgcaatcccctgcttgtgaacctggaaccatagcaaatcaataaacaagttcttactagtactatatccaaaacacagacagtccacatacaatcatataaaacaataccttggtgcagctcctagttgaactattctgtgtttttccttgatgttctctagattgttgctgagtagtttgcatgggtttttccgggtcactactgacgattggattatccgcaatttttgtgcccattgtctttgcaactgaacttttatgtgatactgcaggctctggtgcaattagagagtacccaaagatcttgcagttcccatctttaggttttgcaacctcaaacttctgctcagatataggttttgaggtcagctctcttgaatgaacagtattctcaaagtgaggagaggatggtggaggcataaaccagtttccatgtgcgtgctcaactctatgaccactcaaagtggtatagtcatcaaaccccccatatctaacattcccctgcccttggtatgatatagccccttgaacagaacccttcatattagtgtccaagctaagtgacagagacgaaggcaccatggacctggggctactatgcaagttcaacctgccttcctgatctaaagaatgctttctcattgaattagcagttgcaacagaatgctccgtaaaggaacagaaaccacgggtagaatcaacagttgtaccgaagccagatagcaaatctgtgtaagtaggttcatgcttcccagatgaagccctgttttcaggcacatatcttcttgaagcagacactacatcaactttctcatcatcaagggaaggttgccaaacaacagacttttctgcagtatcagaatcattgctctccacaaaatttcctctcaaggtcgataattcttgaccttgcaagaccctagaaaatccacttggcagtgaagggtctacagtcactttcgatgaacctattcaaattaaatatgaatacatgaacacacaaaaaaagaaaagaaaagaaaaaatacaaaataaacaagtgactggatagaaatgttgaaatatttatttcgattaaaacagcatcgcaacattaccttctctagtgagaacagacgagtcaggagacaacggcacaatgttagatcgaggtctctttgaccttggaactggtagaggatttagcgccggaggagcaagagcaggctctattttccaaggtgaaactctctcaggacgtggtattgctgaggtttcatcccatctcacctaaaagtagtaaatatgatagctttagaatgccaaatatgattttaacactgcaaccccttagatgaaacagattccaacttaccttcaggcatctccatttagaatctttccatctgttgggatcaaattcttcaatcccaattattgtgcctgtaaacctgcaacatttcaaaaaaaaataagcaagatcggaaaactacatggacatcagctaagtattggagccagaaccccttgtacgaattgaaattattcagaggaaagaaaattggggcaaggattcataaaactaagatagagaaagattctaatatcttgaaataaaatgttacgataaaatgcaaaacaaatcattaggatggcaaattgatgtctttctgtagagtgaaaaaaagcacttgctattttggttttttatttccaacctacacatacctctgttctggtgcttcttcaccttcaaatttcattttgaatctcatccctatagagtagttgttcttggtagcctccaaatactgatcgcatggaacgataaactcagctgggcttgtcctgttataagaaatagataaaaaa

SEQ ID NO: 76118 - DNA, 839 bp, Cannabis sativa
ataagtttgtattttgaattatgttaatcttgattgtcttgagtttgtagaaattttggttggtaatgcgagagctagcttgttgaatttctaaggagagggatatgtggatctcaaacatttttattattaatctaattgaaccaaaagtacttaaagaaagtaaaataagattataacttatctacatatactcaaaattttaaatgtaactctagattataattaaaaaaaaaagtcaatacacaatattcttttactataaaacttcaactatctttttaataacatgtaccaaaaattttaataataaatatattataatgttctaatccataaacatgtaaaataaaattgttccataaacatataagctaaaataatattattttatttgctattgaaataagaaagacaatttattttattaaatatatcttatgattgtctacacagttctaatgtagattttcatacttgggagcatacataatatgagtagataaactatatacaataaatgtatgtatggtataatgattaactaattgataagggaaatatatctatttaaagataattaatgatgatgcggtggaagaggtgggatactttgttcgtttctaaaaaaattattgggatcaactttagttttcaccttaactaacctgttaaaatttttaccaaaatacttttcaccccaaatacgtgcttgtgtgtaattattaggactcgcatgattagtttttcctaaatcaaggtccctataattgagatacgccaatcttggattttgggacacataaggagtcgtaaaattataaacacttcgaacccag

SEQ ID NO: 76119 - DNA, 919 bp, Cannabis sativa
tggtaataaaaggtgttacttaacggggttaaagaaaataaagaatgggacaattgacatcatcctaggggtttctgtcaagttttagacggaaaggatgggacaattgaccttcccaaggtcactcttttttattattttttattttaaatttaattattattattatttaaaaaaagaaaaaaaaatattaattcctttatttattattggtttagttattacatgagacagagtagaggtgggctcactctatttccataaatgacttatttcacttaaattaatttatgtgagattgtttatcccatctaacagtttgatgagataaataattctaacatgcaagattatttatttttttaatctttttttttttaattttgtaaatatattttatatttgaaaataatttaaatggaagaataaaaaatttattgtcaaaaacttatttattaacattggtaaaaatatataattttgagttattatatttttcttcttcagggccatcatactggtagaattttcttcagaagcttctcttccccctaagattgagaattttatctagaaaatatgtcttaattttatttcattccactataaaaacacagctactcttagtgacaaacttttctacacatatgataaaaatttattagggttcgattgacataattgggttggactagattgaataatgtcactaattcagtgttaggccatgctgaaagacgagataactaatccagttaaattccatttatgtgagatagcagtgtgagattaataattctaacatgcaagattattattttttttttttatctttttttaatttttgattttgtaaatatattttagatttgaaaataatttaaatggaagaatgaaaaatttattgtcaaaaacttat

SEQ ID NO: 76120 - DNA, 1057 bp, Cannabis sativa
aaacgttaaggtaaacatttttagttagtatcattttcatgtatgcatttagttatatttattggtttcatattaaactaagcaaacgtttcatattgaaatgaatggttacaaaaatatatatcaatgccaataattgtttttttttatatgagtgtgtacacatttttattagaataagaaatcaactataaactcatcatgtgttacagtagagagagcgctatatttgtttatatatatgctagctaaaagagatgagagctgatttgacaaaagcaagacacaaatactttcgagtttccttctgaggtggctctagatttgtaaatatatacaatatgtatatgcatatgtatatatattcttataatgatgcaaatcctatatatttatatatcaatgtatgctctactctctatgtataatgataagagagtacacattatatatgttagtaataataataatcaattttttttttttaaaaaaaaaaaaatccttctgatatttcttcttatacatttgattactttggtgtgttgtgtgaggagaatgaagaaagccacaagttaagaagtttgttcacaacatagtaaagtgatgatatgacctcatttagcacattattcttcgggtgacattctaattttatgctattagcataattttagttttaatttatgtatatatctattaatatatatttataattctgttgttagggtagatgatatggcgtttcctcttcttaatcttctataatctttttgttagagctggtgggatgacactttaatattttttcattctaatttatctatttgctctattttttcaatttttcaattctaatttctctattctaacatttcttcacaatttcatgcacaaccaaaaaaaaaaggtattgaggtttaccctcctcaatatattaaagaaaaattaatatgtgttttctttttgacactattttgaaggtacgctaaaatctctgaatatatatatttttagattcacttgcttgaaatatctatattgttgtacttatatatat

SEQ ID NO: 76121 - DNA, 1628 bp, Cannabis sativa
atgttgactcttgtattgtaagtaagtactacttctcacattttcattgttacttaaagatatatgtaagaacaaattcaccaaattttgttacactctgagcacaggcagactcttgtattgctaatgtacactcataatagttagagttggttaaaaagcatcaattttataatggttcaaatccacaaagtataagctcttatatgatcgaatttgtcaccactagcaattgtggattatatttcatgtataataaacatttaggctaccttgatattacatcctaggtctaccatcgcggactgctatttagtattttaaggtgtttaatactatattgacgtaatatcttataattgataagtagttgtttatattatttattaaattaaaatatctaagactcaacattaaaatacatcaataacaatgtactttacatcttataaacagttcgtaaacatttttcgttctcaaaaatatgggaagaatcttagctaaacacagcatatatatgtttataggcaaatacttctttctatggccatgtggaactcctcttctaaatacttaaagaatttctttagatcttaaataaaactaagaaattttcatgtattctatgaaaagattaatatattatataatatgaaatatacaattgatcttttggcaaatataacaaatgtttttaagaaaaaaaattaaagttggtgtcttgatcaactttttttttttttggcagaatgtcttgatcaactttgatgcagtaggtgaattatttatttgaatttaggaaatgattgaacaagcttctccttaaatggtgttatcatgttctcattgctttatttatttatttattaaatttaatatgatatatatacattttatatgttctcattaaaatgtaatgaaatatatcattaagaccttataagtcaaatagttagtaaaccaatttaattttttagtcactttaatatttgccactaacaatattttagaaaaaaaatacaataattagtgacaaattccattaataatgcccttttaatcacaatttttttaatatatactatgatgaaaatattcattaaggtatatttaattaataccaaagtaatatttgtgtcaaaaaatttcttagtcgacaatgttatgtttaatcataagaaaatattaaattttaacaccaaagcactattctttatttcccttttttctcttaacaataatgcttaagaaatccaataatctttaatttaatctttattgttctatgaagaaatgaaaagtgcaaacatggaaaaaagaaagaaagtgagaaatggaaaaagataagtagcgacaaggtggtggtcatggcttgtctaaaagatggcctttagtaaaagttatccactccacgattcatgcatatatgttaaaatacatgacatagattttccttttttaaaaaaataataataataatatagatttcattctaataatcaatcaacatatatgattatattagattgtattgtatagtattatattagttttatttaatataatattatgtttggtattaatttgtataaataaattatgcaataaagttttaatatattttcaat

SEQ ID NO: 76122 - DNA, 607 bp, Cannabis sativa
ttgcttctcgagccagtttttacaagttcatctcttttcgagcttcttcctttcaaacaaacacttgagctctctcattgaactcggtgatgttcttcattggaagactctataaattgtcccacaatacgcccccagtggttgagagatcagtactgatccctggctaaagtgcaataagttgtgtactatcatccaaatttcttactcttgtagctatcgtgataaaatgacttaagtacgccttaagcatctttccaggctgttgctttatgttcgtgaatgaggacgcttttggtcacctatcccttgcggcttggaactgctttttaaagtccttggacagctgttcccaagaagtagttgaatgatgagtaaatttattgaaccagctgcttgctgctccaactagtgaggtgggaaacaaaatacatcataaaatttttgtaacattactagctcgcattatagtgttgaagttattcaaatgcgagaccgaatcggtggtcccatcatacgacgagacgttacggtttttaaatcccttgggaaaaggagtgtccatgatatctagacagtatggctcgagtgttggaaattattttac

SEQ ID NO: 76123 - DNA, 533 bp, Cannabis sativa
aaattttctagaaagaaataaaatggccaactatatctaattttatcaaaattgtcacaacatataacagagctccaaaaaataaataaataaagcaataatatcattgaaaaaaatttactcccaattcataaattattttgtactatacagtatacattgtttaatatctacatacttgtagagttatatataatatctacctttctctttctttctttttttcttaatatacaataaaaacagctatacataactaaagttttatatgtacgaatgcgcactcatcaatttcattaatttatttttatctctgcagctacccgacctacactccagctgatgccagaaacacacaaattcaggtgatcatcatctcttaaaaaaaataagtaaaaataaaagattttccattaattaacatttaaatcacatccaattcaattagggagtctatatatcttttaagtttattaataatttaatttattgaaaacaattctacggctgatctatattttatatatattcat

SEQ ID NO: 76124 - DNA, 549 bp, Cannabis sativa
atattgggtatcaaatggggaataactctttgaatgaaactttatttggattaaggttgttaatgtgaagatgctaaattcaatgatcttatgaaatgacataattaacctcttctgattttcttgggcagctgtttttttttgtttttttttttttttgttaatcttcagttcctaaaagaaaaaagaaactttaattagatgaatacataaagggatatataaatacacactgacaaaacttaaggaggagtgagaggtaccttaaattaattccaatcagaggaatgagtaattataaatacttgcttatttgatatatgaattatattaagcttcactctatacatttatataggataataggaatcggttgcttctttgacaccctagttttttatttatttatttttgaataaaaggtgtttgtagattaatacaataaaattagattttataatcattacatatgatgttatctggtagctagagcaaaaaatcgatcatatcagttacattctcacgaaagcccacttgttaattatatta

SEQ ID NO: 76125 - DNA, 602 bp, Cannabis sativa
taataataataataataaacctttgtttgattccaaataatgagagagaggtccaacaagttccatgtccgatatataaaacgagtatggtaatttctcgtgctgagagaatgaaattagcctaattaggtttcagaaaatatgataaatgaagatatatagaagaatgcatagatacatacattgttgaggagttgattaacaatatgttggagttgttgaggggtaacagattgaggaagaaacatatggtttcccagagcaattccctctgcatccttcaaaatgcacagcagaccaccctgatcaccttcacccgattccatagtgacgtcgtgacgaggagaagttgcaggtgaggttgcaccgccggcgtcaatactgagagacacgagcgaattcagggtttttcttttttttttttaacttttacttctataaatatttaaagtttaattccagttgtaaaccctaatattatttattccttttttaatttttaatttttttttaatgttttattaaatttataaatatttatttattattaattaatagatgaaatatcactctaaatttatatattgttataaatattaata

SEQ ID NO: 76126 - DNA, 526 bp, Cannabis sativa
ccaaggggacccaatctctccgctcttgttcattcttgttatggagtatcttactagaagacttcaccatgcggctgttgacagcaagttcagctatcattcgatgtgtagaattctgaagttaatctctctttgttttgcagatgatctaattatcttttgcaagggagatgttcagtctattcatatcataaaatctgtgctagatgatttcagtgcctcttcaggtcttaaagctaatcttgaaaaatctcaggtgttctttggaggtgtttcagagacagaaaaaagagctgcttagcattcttagtcttgaggagggttcatttcccctcaagtaccttggggttcccatgaggccaacaaaatggaggaaagaagactgtggagttattttaaagaaaattaaggtgaggctgcatacttgggctactaaacatttgtcgtttgcagggagaggtcaacttattcattctgtactgctggatcttcagaactactggatgagtattttccttttgcctca

SEQ ID NO: 76127 - DNA, 702 bp, Cannabis sativa
atgtttctcaccctgattccatcactaatatcactcaaaagcttgaatgttgtgccaaatctcttcaacagtggcacatccgcaaatatggtcacatgaaaaaaaggattgatgaagcacagtccacggttacaactcttaataatatcagcaatcactcccctacaatagctgcctcgctcaaaacttctgaatctatccttgatgacttgctggaacaagaagaaatgtattggcaacagcaatctcgcattgactggctccaacttggagatcgaaacaccaagttctttcattcgaaagcttctgcgaggaaggctaacaataaaataaaatttcttcaaaccgaagggggtcttcgggttacatctaagcatgatatggctgaggctattcaagattattttgaaggaatttttcagagtagttcagttgatgaagatgctcttgctgccatcattcattcgatcccaacaaccattacacaagaaatgaacaatgaccttaccaagccatttaccccttctgaagtgaaagatgctttgttttctatgggttctgataaaagccccgacattgatggtatgtcggcaatgttctaccaacaacattgggacattgtgggtgattcggtttgttctgctgtccttaatgtcttgaaccatggagctgatccaacacctttaaactcaacgatgatca

SEQ ID NO: 76128 - DNA, 745 bp, Cannabis sativa
  modified_base (672)..(675): a, c, t, g, unknown or other
acctttaaaatagtgaaaattgaccttattaatataacaagagagattaagtttcaactaaaagatcacgtgtgtatttagtatcaaataaaagtacttgttctagactgtagccttaatttattacatttcttcttgcgcttgtaatggtcagatgattacctaatacctaccagtaatttggtgttgaattttttagttttggtgtaacaattccaatacaataattaatatttttgccctctaaattttcggtactatttgattttgtcccttgccttgttcaaattttttcttaaaatatatcagttacataattatacatcgttaaattccgtttcttttattgttaaaaattagtatttttattctttaaattttgaccaatacaaaattttgccccctttaattaaaaaaaataatttttaaaattataatattatattaattttgaaaaataataaaaatgattaaaaattttaataaaaatattaattttacttaaacaaaaacctaaattattcttaaaaaatattttaaattttattttatttataaacacgtatcttaataaatcaaaatttaaacaaactaaaattctttgaagaaaaaatcaaactaatttatatttataaactcatatcttaacaaataaaaaaaaataattaaaannnnaataaaaatataaaattatttttaaaaaaaagttagaaattgaatgaaaaaaaaatattatgtttactta

SEQ ID NO: 76129 - DNA, 2524 bp, Cannabis sativa
taggtgtacactcttgtacatgtggaacgtttatatatattaatacataatactattattttttaaaattataaaaaaaaaaaatacttcaaaattaataatatttatttttttatttttataattttatttagttttaaaataaattttgaaataataatattagatgtaccaataatacattccacgtgtataagagtgtacacataaatataatctatagtggcagttaatctgatgacaccttaaatttactaacagttcagcagtttaaaaaatttaccattaaaatttatacttaaataattaaatgcaagtgaaaaagttttaactgctaaaaactctaaaatttactgaaattatatataactctagctgctaatgctatgatctagggcactataacccaaattaagaagttgatcattagacctaacattttagtgctttgtcttgggaacagcagacacatgagaatgacatccatcattttgtttcaacacccacaaataattgatctaactaattaagcttaaataagtattaatattagttttaattaatttatcatttacaccaacaataatttatttttttctattacaaattaatacatatatatgtactgcgaaaattttgatttttagtcacaacaaaatttgtaactaaaaataaaataattgtgactaattataaatcatcattcctatgttgtgactaacactacaagaaatatcatttttgccagcacatttttgtgctgataaaaattgatattgcgctagtaaaatagaatttacttgtgatgtgttggcaaaaggggttggcaaatcaatattgacattagaacttttgccagcataaaatgaaaagcgttggcaaaaatgactttttccaccgcgtaaatgtgctggtaaaaattagattttagctactacaaatttacgctggtaaaattttgacctatttgccagtgcagtttgtgaaatgtgctggtaaaagttactttggttaaaattacttttactagcgcagtaacgaactgtgctagtaaaagtgacatttattgtagtgtaagaggttcgtagctaaaaatattagtcacaaaaatcacaatttgttatgactaaaagtaaattagtgataacttgtatgatttaaatactatgttttgttacaagtaactatttgttgtgactaaaagttaaatttagtcaaaaaaaaatttattttgtaactaaaaattatcactaaaggtagttattaattatttgtgggaattatgtacctctccaactttttccttatttttgaaatcaaataaataataacactaataaaataaacatgatgtgcatcattttttttaaaattaggaaattaataagtaaactaatttgccaaaggaaaaactaaaaaaaaaagttgtataaagaaatatcttaaactttattagtgtatattgcacacacacatatataaatattacatttataaatttttttcttttgaataattatttatttaataaaaattcccatcctttttctattaattttgagtcaaaagaataatattccattgccaaatatagtgttgcttatagagttaaagagtcaatgaaatcctctaaatgaaaaaggtaccgtacacatacagctcatacatagaattgatcacacatatatatatataaatataatatatatatatatttaattatatataacctatagtgttatgaaagggccacattagaaaagtgatatatgatagtattattagagaacaattaaaagacaaaatgagagataaaaagataaccttttgaaatgagtttgaactttgaaggcaaaaagtttttttaagtgacaaagtggaaaagtgatacatatatatatatcatatgtgcttgaaataattgagttaattatatgtttgtttttaataaattaaattagttaattagggtaacattaatttatagtatttgtctcttttgggttttcatgctatatagctagctaactccattattaactccattattatatatatataaatatatttatatatttatagatagataatagagcattgagttaattgatcttaataatcacatacataattaactcatgattttagcttaaaataaattaaaatgtttttataacagttttttatagcattcatgttcttgcttttgaaataatgttatatggtactacattatatttttagtcatgcactaaatctagctacttcttctacgtattatacatatttttttttttacaatttttttttttattttagtgaatctaattaatcttaattaggatttgtaaattaaagatgtataaaaaacaagctggtatgaataagagaataagacaatgcataattgcaaaaattattacctcatttatttacagtaataataatgaaataattattatttttacttgagatttgtagtacttttcactcttcattaacatgcatttaattacaaattttc

SEQ ID NO: 76130 - DNA, 933 bp, Cannabis sativa
cttaagcaaaaataatgatagtgaaattgctattattattgttattgttattactattgcgaaccccattaatttgtgattaatgggggacactatcaggcaataagaaaatgtaaatgcatgaagattaggtgggttcagcatatggattggttggttaaaatgggttggtcttgtataatttgatagtttgttttgttgcgcttcataatatgaactatatttttaaagtcaacatagaatatgcatatcaattgaagatgaatttcattaaaagcatgttaagaggagccagagtgattattatatggatttgaggtatagtggcttgccttgaacgaaagattagtagatgggtttgccatccccaattttagtgagtttgtaaatcctttaaaattgttgtaaaaaataaaaataaaagaatgaatcctttaaattgttgtaaataataataataataaatcctttaaaattggatgctttttgaagatttttttcttcttctcgacaacactctgtctttgttggaggaagaaacctagttatttgatctagacaacactctattttcaataataccacaagtaattaattttttttaaccgctgttatttttacttggctcttgttagcaatttcttttttttaatgatcgatcagagattatttatcagactatcctattggttatattaatttagtataaaatctacattaaattagagtataattttttacttttagtatagcaactctaaaaattcatatcaaatatcgtattaaaaacttcacaaaataaagaatttaaagttttaaaataatttaataaatgatatatagcgttgttgcaagtttgaaatggtttcattagagattaaggttggttattataattatgtattgtaatttaatcaatatcaagttgttatt

SEQ ID NO: 76131 - DNA, 624 bp, Cannabis sativa
aatctatacaaatgtaccactttactttaatctatacaatgtacattttgtgcaatgaaattaatttcttaagttgcttctctttttaaattatatttttactaatgtcttgcagatgcagcatagatgttgaatttactgattcattagcctggccaacaacaactgtatttggggaaattgtagaaacattattctcatgtaatgtaacaatactgattgataccaaaattaaggtttttttactcaattcacaaatatctttttacttaaggcaaaatagtctacttattattttaaatattctcttactaataaattgaattgctattttattggcaagtgacagcattcctaaagaacttcttgaactccatgacaacaaagagataacagcttacatcaaggcaataaaacaagattcaagtgaaggatggaaattcaacatcacttcattccttaatacaactccagtctcaattgaagaattaatctctaatgcttcaacttcccatcctaatccaactccacttttgactcttcttaaaaaaacttaaaattacagctgacaatgaaaagaagaaatatgaagctactgatgaagatgaaaagaaccacaaggct

SEQ ID NO: 76132 - DNA, 1536 bp, Cannabis sativa
cacaggttattgtgttatgcttggggaaaatttgataacttggccaacttttcaaaaataaaaaagttgtctctagatctaacaccgagtcagagtatatggctctctctagtactgttacagaacttgtttgggtggtttcattgcgtacagaacttgggatcaatctccctaacaagcctaaattatagtgtgacaattaggaggcacaagtgttggctggcttttaatcccatttttcactctcaaagtaagcatggtgggtgtgcattatgttcgagatcttgttctcaaaggccaggttgatgtgtcttatattccaaatgaagaacaactagttcaaatattcacaaaggcatttacttttcccaaatttaattttttcgatctatagcaagatgtccatagaatgcttcccgaacggcttgagggataatgttgaggatgttagtgacaattgtgattgaacctataggtagttagtcatttcttttattccaactgttttggttattaatttcctttcttgattctgttactcctatcttgttgtatatatatatgcatatttgttgtactcaatgttaatggtaatgagaattcataacaccattctctctctctgaatcaactctattatagttattgtccgcatgtgtaaacattgaaaacaaatactagactctagatagtaatcgatcgaaggctagagggctacatcatgcaatgcatgccgcatatatgtaatttaatctaagtggaaggttcctaaagctcacttttcatatatgtatatatatcgtacagtctcgtgttttaacttttaaattacatgattttagatatgagaataatggagatccaacccaaaaccaactaataaaaatatgaataaaaacaaaaagggaaaaatgaaaaaaagaaaaaagaaaaaagaaaaaagaacaaggcggggtcgacttattccatcattctcggtaaatatgtctatcactcttatcaattattaattcaattcaataaaagtaatgataataaataaagaatcatataaaaaaaagtgctttaatttttcaaagaagattctttaattgtcttgtacattattttaactcatatgtaaattattaataacatgcacgtatatccgtactattgattcctccacatagtagtgtgatgtattactagctagctagtacactgttagaaccttttcttgtgatgatttgatgttgacacagttaaattaaaacttattatattatgcatgcatgcatgattagtcacataaatctacaaaattaattatgtaatatatgtacgtatatgcatatattaattctatataatcatgtacaaattttcatctaccacccatttaaaatttaaattggaattatttatgtttaccagacttctattaaatatatggtccaatcagggccggccctgaaacaaagtgcgtcatagaaaaaaaaaaaaattgggcccttatgttagaaaaaatgtggtatttttcaaaatcggtaaaaa

SEQ ID NO: 76133 - DNA, 943 bp, Cannabis sativa
tcaatatcaccaaagaagtcctcagcatcatcgacagcatccagaagatcgtccagccactcctccacaacagggtttttgattctattgttctccacctcaaagcgagcagcagcaagagtattgaaggttgacttcaacttgaaaagcctctctttaacagaactttcattttctcccttgaagaagtctttaacataacgagaagcaatcttttgcagcaagacatcaaaggaagcagtgagaaaagcaccaatcacaagctcagccatgttaacacttgagtagcttagtttgttgcagcaatgttaaaataaaagttgagtaaaagcttagagagcaaattgacaaacaaatatgagagaagaagatgatcataaaatcttatcacatgaactctttccaactacataagttgtgaaatttgaattaatagcaatgaatgaaagatgacaataattaatgttcagaaaagtaaaacagaaaaacttacattatttatgcagtggtggtggggcaaaggacaaagacctctcatgatcatattatgtagttttcaaagggagaccatactgtactaaaaaatacagttgtctttcttttgcacatggaaaatttgtactggtacgaccaaagaataattcattgacttaactacattttttgcataagtttctagtcttatatttgtgtttacattattaatttaatgttgttaatcttattattatgtatttatttattattaagacttaaaaaagaacatgattgcttcttaattttttcattattgatctattttaaaaagagatttcatgatcattatatagataatgtttgagagaatagttggcacatcaaccatattagttaagttttgggcaaatacccacttagcgatattatgagccgtaaaattacacaatctaagaactttgtgtta

SEQ ID NO: 76134 - DNA, 2991 bp, Cannabis sativa
gctgaggacttgtttgatttcgaagtgtatgagggaaatgttgcatctggtatgtagtaataaagtagctgcagcagcctgctatattttctactgtattttatgtgagtctcatttatttttttcctcttaaatgtggactttcaggtcaatgtgctggcaaatttcaacccaaccccaagttggggaaagggaaaaagaaacctagtacaggggaacctcaagctgaagttagttctggtgtgccttatgtccataatgttcctcaagtgaactctatcttggaatttccaagtgaaggtattatctttttgataaagttaatcacaccaagcatagcatttgccccaagtgagggtattcttaattattcatctgttagatttgatgattctatttatttggatgcaatctctggtatttaaggggatgcagaaccaaccaattttgcaaaagctacctactcagaagtggtagaagatgaccctgtagtggaagaagtggtaatcttcttaaccaaattttgatatacaattactgtttggcctgtaatatgcttttagtgtagtcttcagcttacatttaattgttcagggtggcaagagtataataggagaaagttctgcagagccaaatggtcttagaagaagccaaagatcttctgctgctatgcaggaaattgaagaagatttagggcagctttttgaagaagaggataatgatgaggaatatagagtggataataaatctaaaaagaaaaaggctataagaaagttagaggaacctgcatctggaaaagagaaacctgttagaaagcgcaaaagctcgaagcaagcatcagaggagaaaattagagaacctcccaaaaagttctctcattcgactcgtcgtaaaaaaaggattggtaattacgtaatttttttttggtttttgttttttgatacctacataatgtgaggcatgatgttcttttactctctcttttctagtggaccaggcattacttgacatgccagaagatgaaattgatccccagaggttacctatcaaagatcttattcttcttgccgagcacagagagcgagtggcggtatacatgcttttcttgtttatctttatgggaggacatgataatttttgtttttcacttcattgcacttctttttctatatatgcatagaagttgtaagtttgatatttgatttgtatgtacttttttcccctggtttggaatctatgtgtgccagattaaagatgcagcaaagcttaagacaccacagacaaatcaaaggtccttgacattttttagctgattcttttctttttactgcctacttcaaaccatgcgatacaatacagtataattgaatggctacttttatttagtgaggacaacacaattatatgctgattttttgttagtgcttatatttgggcatctttatgatatttatatgtatttgaaactaggattcccaatattttagacatgggtttttcctatttcttccctgcatcgtttttgtttttgttcaattaacattatggaaaacaaaaaacttttgtttgattactattttcagcttgacacaaataaaatataattgatttgctaaagacatcataaagagtgttggggaccaagtgggatcatgatcaagttctcaaagtactgatatggaatttgaagaaacttgaaacttttacatttgctagataagtttacaatgggactgtgataaatggttttcttgcacacacacttatctgtatattattgcttgagactgtcaagtaatctgcctgatctaatatctatgcaattcctttcaacagcgctgatgattctttccgtcaggatgtttctcacaatgaagagatgtttcattcagaacagggccaaaactctgatgacgagcaactaacttacagtgtccacccaagctccacttacgttaattatcattcatttatggacaaaacacccagtgcaaggtggtcaaaaaacgacactgaacttttctatgaggtaaagttatgtgattgcttgagatgatgtattggagttatagtgtatctgccataagtattgtgaatttgctcaaaacttttgcatgtttgttgcatttagtcatttactgactttgattgttcacattttgttaaatattaatactattttagtaatcatttaatatatacttaccatgtggttcaggctgttcaacaaatcgggacagattttagcattatacaacagctttttccaaatcgaacacggaaacaattgaagatgaaatttaagaaggaagagcgtcaacatcccttacggctatctgattccctgaataatcgctcaaaaggtgagtgtgagatccttatttgctgtgcttctctccactttgaattaaatggtgattcgttcattcattggttggatgaattggcacactaaaatgagatatctgaaattgattcttcctctcctccaatctttgcttagattaatgacatttcacatcagctgcatcagcaccggcacttataaatgcattatcatgaaatgctgatctaataaatcaactagtttgtttctatcataattttcaatttgatgagatgcgaaacttgattctagaaaccaggacctgataaacaggggaattctgtgttaggatctcacattgaccaagtatggagttagtagtatctaactaattggcaccctcctctcttaggctaactttttgagagtgagttctacctaaatggttgtatcaaatagtattagagccatacaccctcaagtgggactgatgttgtggatggggcgacctttggaataggtttagagtgggccgctttagagtgggacaccgtgaacgttggctccaaagggagtgtattgataggatcctccattgaccaagtatgagattaactagtagtatgtaatttgggcaccctcctcttatgctaacttttgggagt

SEQ ID NO: 76135 - DNA, 3022 bp, Cannabis sativa
  modified_base (2995)..(2996): a, c, t, g, unknown or other
tcaactcaattcttcaacacacacccaatccccaacagaaccaccactccgcaccaccagcctccattgaaaccaccaccaccatcaccacaaccacctccattatcaccactatactatcattaacaccaccaccaacaacatttctccaaaataaaaaaaagaaacaaatccaattctgaaaaaaaaaacctgattacacaaaacaaaactaaatccaaatattcaatccaaacaaaacttgtaattttgatttgttcaagtcaccaaacataatcatcaatacacataattcacatatcacgataaactcaacgtcaaatcaactaaaaaactaaagaaaaagaaattacttttcttggttgacgatgagagaagtagaggaggatgaggcagaacaggattggagatgacacaatcgaggccagaaaacttcaactctaacaagagagagaaagagacagagagagtttgcgagaagggtgggacctttgggttttccttgggttctcaagtctcgcttcgcctaagttgatggtggtggtgaacccgtgataacgaaagaaccgagaagagaaagggagagcgagcgagtttgggcgtcggggtttgggattttcaaggttttgggtttcgagaaaaaggaccggaggtctacttaaggtgagaaggggtcggagaaggcgactccagtatggttccagcaccacatgagggaaactagagagagataaagaggtatcaggagagagagaaagatattagggtctgttgagttatattttttttgttgtaattttattatttatttttattttttaaattatttttgtattttaaaataattttaaaatgatgtggaccacttaaatttttccacatgtacacttgtgtacacattagcagtagctgttgtcatttaacaacatcattttaacgaaagtgtaaaaattaaaacagagtgcgatttagatagtgttaacccgataacttttcatggtgacgtgaacatcaatatttgacacatggcatgaaggatgacatcacagagttgagtagacccaagtcataacagtcaacttgggaggggattctagccctacacccaggttgactttaagagctccaagatagaagtttggacttcaataacttgaatccaactcactatctttcaagtatcatgtaccatgaaaatatgaagcaacctaatacaaggtttaagagctgaaattacacgaatctacaacccaaaagccaatttggccacctagggttttcacccggcacctatgttgacatcctcaactagggtttaagttttcaggaccgtcttagtgcaaagtgactaaaagttgcattgggacatcgacttgattcagagctagttaatttttaagcacccgaggccccgagcactcagtgcccaggttaacgatttgtcaatctcggcaccttccaagcattcgatcgaagatctgactttcgcattgaatctatcttcataaaaacaggtgaatagatccttttggaggaaaaacaacaagttctaggcacaaataatagggccctgcgcacaaaaaatggagttttcccaaaattatttcgagcattatctccttctttagaaaatattaagaattaactatttctggagaccaaacgaaactttcgaaggggcaaaagagggacctagcgcccaagttgacattttgtcaacttgggttgtttccaattcagttcaataaaaattgctccgagcatcttcaccgtcattagaaataatgaagattcatgtgaactcggggagaaaaccacaaacccgagtccttggaaataagacgcagcgctcaagttaataatcaacctgggacgttgccttcaattgcttgaatgccaaattcaatgcgaccattgaatctgatatggtcaaaatgatgggagagatcccgtcctcaagttcagaagcctgggaagccttgaaagtataaaaaatagaatcttgagagctcaatttaaaggccccaacgcccaagtcaacatttggcctggttcgttgggttctgcttatctgattctgatgatgtttcgattgtttgtcaagtttttcacaggtgcaatgatccatgaagttagatcaatcaaattcacaacttcaattttggctcattcagaagccgaaaattttgagtcttccatttttgtaaaacagcaacatccccgagaatgtgtgaccaacttcaccaaaacatataaaaggattaaggagtgtcaaaccatcacttaggcatctcaaaggacttcccttggatgtttctacacttttacaacgtccaggttgacgtcagatgtcaacttggttgctggaatattaacttgggcattggaacctaaactgtcttcaatataatagtcataacttactcaatttttatctgattgatgcgattcaacttgcgttttgaagctatgtaagcactctatcaagtcatgtcttacactaatcaaaattctgaagctattgttgccgaaatttaccccaagagtgttacaaaaataagctttaagtaactcgtagcgagacccgccaaacaaaaaaaatctgccataccagaaactaatttttatcgttagatcatcatcaatggtggaaaacactttatttgtattttatctcctattttcgtgggcctgcttcacctataaaaggatagctcctttagttcattttacacattcagaaaactacccacacggtcagaacttctctgtatagagtttgaaacatctaatacttaaatagttgttgtagatcttgtgagaaataaaaattcgaagacatagttctattactatcgcgtcataggagtggactactataaattactatgtctctcttatcaattactttctactttttattctcgccaatttagcaagtgtgtgtaacttaggagtttagtctagatttttgagtttacttgcatttggaganntgttatgttctttccagaacataggt

SEQ ID NO: 76136 - DNA, 1085 bp, Cannabis sativa
tatatatatatgtaaaaaggtttttcatgagctacgcgtaatgaaaagtcttcatatatagatctatcatatcatcatgatctgtcttgtctacaacattttattattacattaatatatatatatatatgcaacctggtcaaattttttattttaataattttatatatatatatatgtcttttatttttaacatataatttgtgaaaaagcaaaaaaacattaattaaacaaagacaaatcatcatcaacacatatcaaagtatatatcatcatcatcatgcatatgtagttgcgtgtctttagggccgatatttgtggcctaaaataagtaaaattagaacatgtgtacatgcatgcatgcatgcacctatatatatatagatcatatcataaatatttatatatatatatataggtagagtcaaatttattaatcttaaaaggtaactcatttttcataattcaactgatcatagtgaaacacgcttttgtgacttttaacttgtttgtatttttataaaagaaagtatatattattttattaagtcatccctatgtataaacaaatatatatttatataattgactaggtgaaagtgaaacgcactaagctactactccatggaattgagcatattacaaatatgaatattctctctctctctctcaataatattttctaaagaaataaaataagtgaaattaatcgtacgtatcattatatcattggctgtttggctaaaagatatgtatttatataaatataatcagtcccaattaactaaaactcctaattaaacaatgcaaatttatatatatatataggccccacgaaaaatatatatcatgatatgcatattgtctttttatttgtttgatgaagatcatgatgatatgcattgtcaaattaaagatgctatcaaatgcagtcacgtcacgtatattatattatctttataccaatttttcactaatataattattctatatatggatatgattttgtcctgttattgtactttcacggattgtaatctgtgatgtacgacagccctcagatgagggagttatttcatctaacg

SEQ ID NO: 76137 - DNA, 2216 bp, Cannabis sativa
  modified_base (2161)..(2191): a, c, t, g, unknown or other
agagagagagagagagatgagtgaagtaggaaaagtggtgtgtgtaacaggagcctcaggttacatagcttcatggctagtgaagctcttactacaaagtggatacactgtcaaagccactatcagtaatctaagtaagttttctttattagctccttttcaaattgattcaaaattattgctttttctctttttcttctgaagggaaggaaaaaaaaaagcactgccaaattgtggggttatgtctctttttggccaaaaacaaagatattaatctcataattcttgaaattctatctaatctgttaactgataatatgtggtgtaggtgattcaaagaaaacagaccatttggttgcactagatggagctaaagaaagacttcatttattcaaagcaaatttattagaagaaggctcttttgattctgccatcataggatgtgatggtgtttttcatacagcctctcctgcatttctttcagccactgatcctcaagtaaacatatgtctatatcttatatatatgtttcagcctatataaatgtttggcaggtttacacaaacaatgacttgtggttttttgcactacatattttcaggcagaaataataaagccagcagtgaatgggacactgaatgttctgaggtcatgtgcaagagctccatctgtaaagagagtggttataacatcttcctttgcttcagttttactaaatggaagagaacttacctctgatgtggttgttgatgagacatggttttctgatcctattctttgtcagaatttgaaggtactcttgttatttcatgcttataatatcttttgtaatttagctgaacagtaaaaactttttctttcttaaagtttcccaggaaaccaattcacctcaattaccccgtaacagcctcaaaacctttaatctttcatttacatattgagtttgcatcaattcagtttacagtatatttttattcctctgcagctttattatccactttcgaaaactctagcagaagaggctgcatggaaatttgcgaaagaaaaccagattgatttggtcactcttcatccagcattagcaattggtcctctcttgtcaccaattgttaatagtagtgtggagttgattatgaatcttgttaataacggtaaagtttggtactttcactccatacatttgtaaaaattgtaatcacattatgatatcatgatcattctactttgtttgtatttatatatatatttgtaggagctcaaacttttccatgtagtgtttgtggatttgttgatgttagagatgttgcaaatgcacacattcaagcatttgaagttgcttcagctagtggaagatactctctagttggatgtgttgcacacatttatgatatttttaagatattgaaagatctctaccctgctttcagtgttcctgaaaagtaagctcacttaccatagataattatatatgcaacatagatatccatagaattatataattatattcacaatttaaatttcttattactaaatgtcacttcaagttacatctacaaacatttagttacaagttgttagtagaatatttttatagtatgaaattgcattgctttgtaattaatttatataatttaattttattactattattggtagaagtgaagatgaggctcaacctgtaatgtcaaagtatcaagtatcagaattgaaagcaaagagtgtaggagtcaatttcatcccattggaagtgagcttgagagacactgtagaaagcctcaaggaaaaggggttcttcaatatctaatatctcattaacaagcctatatattttattagtttgattgtcgacttgtaattaataataataacatttatacatagttaggctaagcattttgactctacatttttactggttctaagcctaattaatgtatacataataattacatatgtcaaaacgtttcatcatcatattattaatagaactatttgtttacaagaccttacagttgtggtccttaaaatgcaatacttagacaaccagtccctctttttattataagttcattttattactcccagtcttcatttacttagataaagaggagcataaaatgaagaaaatgaaagtaaaggctgttgggttttgtgccctaannnnnnnnnnnnnnnnnnnnnnnnnnnnnnnatataagaaatttgaagtgatttat

SEQ ID NO: 76138 - DNA, 1940 bp, Cannabis sativa
ctctctctctctctctcgcccatggcgatttcatgaaattagattatgaatgtttcccttatttgaagtaattaaccttagcatataactaaaaaaagtcatatcttttgatttttttttttctttttcttttttgaggaaggctcattcaagaaaatgaaattagaatgtggattttgtttctttgaaccctttttcttattatcacatttattaaagctgcgattttcgcatgttagtgtcattgtgataatgaatcatatttgtagacaagcacatgtttatttttttcaattatcttgaatttttatgcattgtattaaattataggtataaacttgattttgatgttggattatcgtattgtgcaaggacagagatcaggaaaagtacctggtgttggcatggttcatgctccgttcgctttattgcccatgccattcccagaaactcactggaaacaagcatgtgaggtagctccaatttttaatgagctagtagatagagtgagtttggatgcaaaatttctgcaagattcactatccaggttctgttctcccattcactgaatctcatgtgtatagatttattattatctttattcatgattggtttaatattgtaataagtatttagcagttgtagtagttcttttatgaataccaataagcaaagcttactatgcttctcaaagtgggaaatgtttgtcggttgatattaacactatcatcatattcgaatcacagaactaagaaagcggatgcctttacctcgagacttctagatattcattcgaagatgcttgatatcaacaagaaagaggtaactgtattgtagatattcatttacttgtctcatctcaggtttcttggggtggttcatcagatgaacatgaaatttttgtgatcttcttttatcacttaagcaggaaatacgtttgggtttacatcgatcagattatatgcttgatgaacagactaaatctctcctccaaatagagatgaacacaatttcctcttcatttgctggtcttagtagtcttgtcagcgaccttcacaggtgaagtagcatttgggattaggagaactctagtggtttggtgtttctaaatattttctgttcatcttccaggagcttacttgataattatggaaagcttcttaacttagattccaaaagagttcctggcaacactgctgctagtcagtttgcagatgcattggcaaaagcttggacagagtataacaaccccaggttggatttgataaatgcttgtgctgtgttccttctttctatttcttttggctgtagctttcactgaagtttgtatggaaaattaattccagagggtttatttatatatttattcaggtctacagttatggttgtggctcaagcagatgaacgcaacatgtacgaccaacattggctttcttcattgttgaaagaaagatatccttttcatgtcaatgtaccagtagtatttttaagataagatacaattttgttaaaaaaaatgtgggtagaaaattgacaccggttggtagtgcatgcccaatttattcttctttaacaggaagagaaatggataggtgagttgaagagtgggggaagggaaataacacttctatgcttcaacgttatcaaaatgactttttaaatttttttatctggatgagttatttttgtggagcttattagtataaggttttgttcctcaactttacgatacacataatattacaagtattcggaagactttggctgaaattgatgcagaaggggaacttcaagctgatggctcactgatggtgtatgtggcctttactatggaaaattgatgtcgtcgctatgcttgtttaggctaactatgctatttccgacttataatcttttattcttctctcttgttcttcttttactccttttttttttttttt

SEQ ID NO: 76139 - DNA, 1303 bp, Cannabis sativa
  modified_base (245)..(248): a, c, t, g, unknown or other
aattaaaatcaagtaaagaaaatctatacattaattaatttgtctctctttttttgaacttgcaatgacactaaaagtcaaatatttttaatctctaactataagttagcaccaataaccattatgatcataataataataacctcaagtggttaagctaattaattaattaattaacctaaaacaatatacttttccaagtgaaataacttataagagcgaaataatataataataataataannnnaataataataataataattacctcatatattatttttttaaaaaaaaaaatttcaaatttacagtttgagtttctaaagtattttctctggcggtgatttttgtgtggatgctatacgatttttagttgcgatttaagttgctccactagttgcaataggagtttttatatagaatttcctaataatacaaaaaaatatatatatatattttgaagtgtaaaaataaaaaaacccctaataataataataatgggaattactccatatactatttttttaacttttttttatttttaaaaaaataaatataaatataaaaaaaaatataaaaaaatataataataataacaaaaaaacaaaaaagtatttatatatacaatgaaaagcattggaatagagaagattctttgtatactaatgattatttatactttagctactttttttacacactaaaagatgagtaagtggaaatggaatgaatgaagcataatatgctggtaaaaagcctaacttggagagagagaaattgaagagcttattgtaaaattaatcatatagtcagaatttgaaaaaagagaaatgctaaggggctttttggtatatggagtaaagtataggtgttggggaatgtaaaatctactctttgtttggtttaaattttaaactaagaatcttgagtattttgtgagactgatagttatatttattgataactcaacactttttacccctagagtttcatttgcccttcaattttcactacttacactactttacaagcaagctcaataaccataacaaaatgcccctgaaaggcattagcaatgctactcatgtctagcactactcaagattttatattgtagaattaagtactaagtaagttctataaaatttaattttaataactattaatataaaatatttctagtcatttacaaagcactatcttataatggtgctagacactactagtctctattaataatattatagaaagcctttgtggggacaaattatttaggattaattacataaggcactatttttt

SEQ ID NO: 76140 - DNA, 1203 bp, Cannabis sativa
atgtcaatgcccacaaatggagaatgttattagttcaagattaactctcaatgctctttacaaatttatttgtttatttattaaatggacttaacaaattcatttgaatgttaatgtaattggcatgtaatacggttgtacttgtgtgattttaattttcgtttcatttgtatatttttttaaactattaaatgaatcattcttaattaattaaattgttggtgtatattttgtgtgatttgttatggttggtttggtgtaatcgtgatcataatggaattattattacaattttgcagtttcgttttattttgaaaatattgcaagactttcatagtgcattcactattacaccttttttaaatgaatatggatttttttaaatgaatatggattacaagtggactataatcactattacactatttgcattaaaatgaatggctaatcagagttttttcttttggaatttagatatgcatagtgctttctaaatttttaggctgtaaaattatattttcgaacggttgaatttaaaaaaattttgttcaattttaagtttgatataaatagaaattgagaagatacattagtatatgtcaaaaataatgattttaaaaacaaaatcaaattacatatacatttcaaagctatgtgtataataatgaatatatattctcttagctccatagagctcttttatttttggtggtgctttctcaagttatttttcaaaaataatgaaatacatattctaaaactaaacaatcctgaaaactttaaggtggcgtttggttgggaggaatgaaaacatagaaatgggaatgagaataggattaggaatgaaataaaatttaaaatacataaaaagaaaaatttgttaaaaaaattattaatttttttgtcatcatatattgaaatactctttacttctattttaaaatgaaattgtcattccaccaaaatagtgcaatggtcattccataatttcattgaaataacattccaatactttaatatacaaccaaacaaaagaatggaattgagattgtttcctttccattccattccgttttattacctccaaccaaacgccacctaaaagaaatacaatattctaaaaaaaaaaattgccccacgattaaaaaaaaaaaaaaaaatttaaaaatatataaacatattttaatgagcaaataagaatgg

SEQ ID NO: 76141 - DNA, 639 bp, Cannabis sativa
atgatttgtcgcctctaatagccttactattagaggcgactttttgtcgcctcaaaattatcgcccctaaaatttaaatttgttgtagtgagaatcaagaattttgcatactctcattattttaatcattagcggtgaaagtaagccattttgtaaaagatgtaaaacaacaagtgttgcaaaattgaaaaaggaaaggaaaactattggcttgatatgctattaaaaattaatatgtcaccactacaccatttgcattgcatgtaacaccggtaacagtctccttcatcgactagaaggattcttgaaaccgaaggtgttcaaatctcgatcattcttcatcttcttcttggagcgaaagacatgagtgaagatggaaccaacgtttgagtagttcacggttagaagctgatggatcatctctgaagctccatgactccgtttgggtaacatcgggtctcgtttagccaaatggttttcaggaacgagatctacttgtatagatctttcagatctcgtctaagaatgagttttctattttgttgcagtgagttcttggtattttacattgaagacttggggtttttgtacaaattaaagggaaaattgattttcttgtttgaatatggagtttatttc

SEQ ID NO: 76142 - DNA, 976 bp, Cannabis sativa
  modified_base (233)..(241): a, c, t, g, unknown or other
atttaattatacaactattatattaaaaaaaaaaaatagttagctacaaaaacccttttccaattctcattagtattacatatactgtagcttacgacagcaaagtccaaattttttcaaatagcgagcttataactccttttaagatatgcttcttacctaaatttcaaagctcaaagtattggaaacaggagtagaccattattagtcttttatatatatataaatatatnnnnnnnnntatatatttatatattattttattttattttggatctttgctacttataggatatttcagtgcccttcttagatttttcttttccctctcaagtaagaggccttgaaataagaaacgatatagatggataattaaatatggtacaatttaatatataataacataataatgcaaagcttcgcattaaaactaactcaatcccacatcacatgtgacagtgtatacaaatttagaatcaatatttaattatacataagatgcatttccaatccaaccttgctcctcccaatacatttaataatacataatattatataatagaaattatttaaatatataatatatatactattattattaattcaagttgaatgacttaaaactgtcctagattcacttcatgaaatccaacgccatgaaaagtctttaactttatcctataaatatatataattctgatacagagcccttggccacaaccctttcttacatgaattaataaatcaaattaattattctttgcaataaaacttgagcaacttgatatataaataatgaaggatttgtaaaccgtcatccttaaatgtaaataattatttgatcccaacttgttgctttccaagagacagcagctcccacttgtggacttgatcagctttctttttcttaaaaaaaaaaagtaagaatagatgactttgaattttgttcattacttgtctattttttttttttttt

SEQ ID NO: 76143 - DNA, 708 bp, Cannabis sativa
atcatggtaagaactcgagctacttcttcggctactaccactgatcaagatccggtgatcgatgccttaacagctccaccaccatcatagccttctaccgatgatcaacttcgagttgatttcttaactccaaatctgcgcccagaactcgtggatcgacatgcatatgccttcacaactccaccaccatcatagtattgtattggattaatattatttaacagaatactatgtttaatattgacttgtattaatatcttgtgtaaaattatattatctttatcatatactcgaccaagggccaagttggagtcgaggttcaggttggggtttggggttgggtcaaggtccgggtttggagtttggggtttggggttagggatcggggtccgaagccaggtcggggtccatggtcgggttggggtccaagttcggggttcgggtccaagtccgaggttaattcttggtccgagtctggggtcaaggtccagggccgagtccgggtctggtcagggatccgagtctaggtcagggtccgagttcgatatatttaggaccaggtttggggtttgcaacctcagaccttttgtaaatattataattgaagctgatacagatcatatgttatgtattaaataatacgattcacattgtattaaaatttacggtcgtaatcattaatacaattcaggcttgtttagtatgttg

SEQ ID NO: 76144 - DNA, 645 bp, Cannabis sativa
ttactgagagcaatgttccacatgctcttcagtctattgtgatagcggatattgctgtttaatgaattattttggttcaaaaaaaaagtataattaatcttaatttacatacgtacagtttgatttataatattcaatcgacacaagaagtattatatatcttcacttactacatacgattaacttatagtattcggcttattaagaagtattatcgaccgataatatttaacttaaagattaatattgtgatgaggtggatattcattcaacataacaatattctttctaactgtcataaaatatattaattacacaaaatatacctttcacacccaaagagagaaactaccttaaagaaaaactaacatatatgaaaaaccatcaaaagaaaggaaggtatttgaaaaaatagaatcaataaaaagaaaaaaagtaaaagcatgcaaggagaaaaaagcaaaaaagtattccattgtatgaagaccttaattaattcattgatatctataaggtgcaaaaatgaagaagggtattttcgtctaaaaaataaaagaaaaatgtgaaacctaggcgaaaatgaaaaaacacacctgaaaatgttgggtaacatacgttatgacgtgagttacaatataggagaga

SEQ ID NO: 76145 - DNA, 704 bp, Cannabis sativa
agatagtataaaaggaaggctatggtgtcttcatccaactaatgcctccaaagctaaaaacctagttttctgatgagacaacttccttcttcttcttcctcttgaattttcgaaacactaagcctttcttcacaaatattatttagccattagtgattgagtaagtgtccacacacatcaagttggtcctcaatcatagtgtataagactgtgaagtatccaaacacaaggaaggagtttcgggctcagatcttggtgatactctgctacaaaaatgatacaagagttagaaatctgagtggaatgagtcatttaatttcgctacacccactgtaaggtttctcataacttttatgtgtttaaattatattgttttagaaattcatattaagatgttaaaaacatacatggtagtaaatctagatcctagtaaaatattccgacacgaccctggttatagacttatagtttattttggtggtaatgtaatattttattaatgtctctttaattttggtagtttctttattagtttattattgtggtttattataggagtgattttggtagtttatttgttagtttactttactatggtagtaattttggtagttttttcttagtttattgtggtagtaatgtaaaaattagtttattagtgttaataattaaatttagttttataaaaaattagttcaaaaaat

SEQ ID NO: 76146 - DNA, 1270 bp, Cannabis sativa
cggggttgggtcagagtcgaactcttgacttaaacaaaggaagaggtcaataaaagctttcctaccactacaaccacacaagacaacacgtggtccatgcctactcttcttactcttgacatttcaatttctttcaccccataacattcaaaacatacgacataaactctagagacgacgttcttcaatcccccaaaaaaataaaataaataaaacagaagagacgacgtcgtatggaggcaattgggtggtgggcacaaattcccacaggaacattaagttagcagaggcccaatgggcccctcaaagtgtaaggcatcacttccacctacctattatcaatagcattcgtgtccaacttccactaatatcctccgtaatttctctgtctctttcaatcggcggggccctacggttgcccatcttaattttctccttaaccgtttccttttaccatattaacatcaaatgagtgaagccacaccaacaacaatacaacatacatattaaacaaacaaaatcagaaataatatataaatgacgctaacatatcaaatatcgaacatcttgaatcttcaactcttaagtaaataaaaccaagtgtagtgatagggattgattttattagtatctttttttatttgagtcaaagtttgaaactcactttagcctctggattaaaacacgcttagtcctcagctacaggaacccttaaagtgattagcgatgatacaattaaattaaagtagagtgaggtaaagagatgggaaatgaatatgcaccattactcaaaaacattattaccatcctcgcaatcatactaatattagtgtaattaaatattaagtcacatatgacttaagaaaataattttaaaagaatagatgaattatcttatatattattttttttaaattcacggtttgggtttttagagtgatttcgatgtgaattcgtatacgattttgattgcgatttaagttgctccgttagttgcaatacaggtttctacgtaaaattctgtaaaaatataaaaaaaaaatattttaaagtgtaaaaataaaaaaagtctctaaagaatgttgttaaccaatgacactcattataaaagataagaaatgataaaaaatatcactagtacttaatatcttcttcagtgtcataatgctattagtataattaaatttcagattctattacttactaacaaaattcaagtaaataaaagcaaaatccctcccatttataatatttatataaaaaaataaaa

SEQ ID NO: 76147 - DNA, 1502 bp, Cannabis sativa
  modified_base (30)..(32): a, c, t, g, unknown or other
taaatatgattatattgaaatgggttttannnagggcacaaaacccaacaaaaggttcaaaggaagaccttgcacaccaatcgaggatcctctgcattccacctttacattatttttttggttatcccaactccaaagagagaaggtaacatggggttgagccgttagaacatacattttctgcaccttgactaactcttctctttccatctcatccttacaccaaatgatacatctatcatcaaataattgactaaccatcagctttctcgccaactctcttgaaagattaaagaagatagtgctccaattcgcataagtgttgtttctagcaaggataattgccaaactccaatctctagactgagctttggaccgcatatattcatagaatttaggttggttgaatctcttctcagggtatagattttttggcttgaaaccgagattaatttttggatataattctttccattcaatttttcccttgtttcgagccgcaacatttacattagtcttctcaatgtgttgaattttcaatgccggtttcgccatctgtttcaccacattagcccaagagtgttggttcgtggagcccctttccttccgttcttctcttttctggctacttcgttcgcaaggttctgtcgcctgtcgttttacaatttcattaagacattcttttaattctgaccagcctgtcgccctttcttcttctggcacaatgatcgtattcatcttgttattttttagcactaaaatttccataaaggatccattatagtttaaaaaccatttcaggaagcaactagcagtgctgctcctgaaggatcgtttaaagccgattttgtgtgatctgatttctgttgaagttcatctagagtgtcaatgatccagtccactgcctcaatggttatggcgatttcatacccaaaaagccttgttctttcgcatatacgaactgcaccaccatcatatgtcagagttaacataaacaccttgtgtttagttcgaaaactccaatatttatggagtttctgatccaaagatggaccaagaaagtttttccaaccaaaacaaatggggtaatggccttgtttttgatccacgatttttcattaaggtgtctcccaaataccactaggatcatcactcttttgctgagtaacaactccctccatagttggcttcatggggtctattgttttctcaattacagtagtattaactaactcaagaatagtttgatcaatattaatcataacattatcaacaacaacactctactttctcacacaaagcacacttggtatgaagtcattcaaactcaatagggacctcagtgatttgatcccattcattctcaaaagatatcatattaggaattttatccttgatctctattctaaaacacgagcaaactttattaaggtccatgctatgaatactgtaaatctgtatatagccctaattaattcatgagaatcaaacaataggattaa

SEQ ID NO: 76148 - DNA, 883 bp, Cannabis sativa
tatgtagttggacatttacaatattctctctcacaaacctaaaatcgaattccccctaatctcaatgtcaccaaagaaaaagagaataaattatttatgttaataatattctagggatgtactagtgaaactacataaaaaaaagtcaataatttcatatcaaactacttattagattctcaatctacacattgattttaatttagtacggtatacaaattattcaaaattcctagaatagagatattcaactcaacgcatgttgaaaagttatagcatgtggtgtggggcacccttcatttgtgaagagagtgtgtatggtttgagtttagtagagccaaataatgatagacccaaatttttgctttgccttgtaattccttgactataaataaaagggttgtgctcattttcgagttaagcttttcagctaataattctctctctctgtttctcttcctttttctctgagttttcttttttggtttttaccatttctagtttagcttgttaagcttctacaaatcaatccattggaatggcttggatagagaactatccattatttaattccgtcaaaaacatttattttttccacttgctaatatgtcacacggaaaatatatttgttgcctaatctccaatattacttttttactattcgaatgatatattaagttgattatcattactatatataatacacgaaaataaaattgaatataaattaaaatgtaaaaacaattattcctaatcagtaaagagtagacaccttgatttttgtttcgatcgatcagccggcgcccaattttattttatttaatttattttacctactctaattaaacccgattatttatgttttatacatattatatatata

SEQ ID NO: 76149 - DNA, 751 bp, Cannabis sativa
tgttggtaaatctagatcctggtaaaatattcccaacaaatctctcatctggtgaaaacaaaaactgttactcgaacggtgacaaatgtggccgaggaagaaacgtacgtaatcaaaacaagaatggctccagctgttgccattgaagccaaccctccggcaatgaccctgagacctggtgcctcaagaaaattcatggttactctcacagtttgatctgtgactggaacctacatttttggtgaggttctaatgaaagataataggggtcacgtggtaaggatcccagttgtagccgtgggataccaatgatagtttggcatagttatctaatattaaggggttttgtgattgatatatattctttataatttgtgggaataagatactgaggctagagtgtatttgtcttaagtataagtaaactgtaaagatgactcatataagggggagacgcctagtttcttccacttaagttttgctaatttgttcagtaattttccataatgaagtttgtttcttctctttttttttttcaaccttacgatcagaggaaccaactaaaagcaagcggatcttagaaaaaaaataataaaataacaaaataaaacttttttaatattaaattattcaatatttattataatgtaaattatttaaatcatgtttcaagcaacatgatgaaaaaattagggtttgactttgacgtacctcggaaggagcgccgccatactgtaacaccctaactaac

SEQ ID NO: 76150 - DNA, 501 bp, Cannabis sativa
  modified_base (462)..(463): a, c, t, g, unknown or other
gggccttggtaagttaggtggcccagtttttctatcctctctttgacttcaggcaagaatctggctctgtaggcatacacaaccttagtttcatccaaggtttctttgtatactttgtatgaaacttaattgtgagtcttattatagttgaatgttcaactaaagactcaacatggcttggatcctgtaagaaaccctgctctagccgtagcccgatacgtggcccttataggagctctatccttgtcttttctgactatatggttctggtaaggccttggcctcatgcatgcaaaccaatctgatattaggcctcttggctttcatgttcttgctttggtgtataggctccctatttcgaacactactattatttagccttaaagccatctatgacggacatatgatcgacctggctgtcttcaaatggccttgacaagtaagggtccagatttactttgnnaagccaaagtatgcctgcacgacttagaggcaggttta

SEQ ID NO: 76151 - DNA, 1040 bp, Cannabis sativa
catggtcgacttgatctgaagatgaagaaaaagaaaggaacaatggtcgttggcatggccgagacagatctggaccacaacttcgacaatcttgttgctccagcggcgggtttcgatgggcttgttgcagcgacgagggagacaaactaagatttggctaggatggagggatcgattttggcttttctatttctaggtttcggttcaagaaactggttatgggttcaagaaactggttttgaacttttgatttgatctgggtggttttattttatttttttttatcttgatttgttgagaatttaagttaatatccattttttgcattaacagatgataaaataggaagtagaaaattttagaagagaaaatcgatagtcattaatttagatttttctttgtagaaattatttaggttcgataaagttttttaatttaatattttaataatttttattttaaaaatctatatagtaatatttttcataattttaaattaatttaaatatttttttaagaaaattatgagttggactaatagagtattgatgtgttattgtaatcaacacttaactaaattgttaaaagaggtatggatggaatcacacaaattgataaattgagcatttttgccgcaacttttaaaatttcagtacttatatgcaacaaactcaacaatttgagtatttatgccgcaaattttcctaaaaaaaatgccaaatttggcatctagtgtaaaaatttcccaaaaaacctgcctaacgtgcaaccttattgaaatgcattggaaatatttcaagtattaatatttggactcaaaatattacacaatatgaccactcatttaagatactgaattaatgatctttggtcttcaaaatcacttctaaacatttcattgttcagtagcgttcagccatttggattatgggcataattattgaagatcattgtctcacatggattaaatgtaaaagtattgagccatatataaaaatatgagctactccactcattgccaattggttttgaaatgaaac

SEQ ID NO: 76152 - DNA, 732 bp, Cannabis sativa
atttatttattaaagtttaagattctaattaaatcacttggcttttaaactttgattaatgggattagtattttgtaatcacaatatgtagtgttcttttaggtaggacgttacatcaaggcttaaaataatgtgatatattgttttcgagggtggaggttgattaagaggttgtaacaggagattggcgataataaccaggtccctccttttcaactccaatatcttggtttgagatgttgcatgataggtccacaattcccttcttggcttcaaacacagtcaaatatttcacacattgatttatcttattcaggaatttctgataccattccaacatggtatttcaatacaatttctagtttaagatatttgaatttatctttcaatcagatcgagggtaccttgccaaacattccattgccatcgaatcattctcctgttgttgatctaagctccaaccaattccatggacatatcccactaaattccctcttcaatgcaactatcttgaatctttctaataacactcttaaaggatttgatcctctcttttgcaactcattacttgatcatgggactctaaagattcttgatctttcttataaccaactatttggaaaccttccggattgttggtttcagctacaaaatttgatatttctgaacttgcacaacaacagattgtttggagggatccccaactcaatttcttctctatatcaaattcaa

SEQ ID NO: 76153 - DNA, 868 bp, Cannabis sativa
taaattaaagtttaacatagtattatataaaaatatgatatataatccaattcaatataatacaatacaatacaatacgtcctaatacggcgttccaaacgagcccttagttctaagaaacttagctaaatgagatctaaatgtataactactatgcattttccccaaatttttcattattaagaaaattttcccaaactattttcgctattgacttatatgccccttccatcaattacaatttacaattatatggatacatcaatccataaatggataataatttgttggccatgtttctttcaagctttattattggtagttatacttacccaagcattgtgattgagcatatgatatatataaaataatatactatcacaaatgactatttttaatatacatttattttttatttttcaaaagataaaaaaaaaaatgaagagtgcaagcaactaagatagcgtttggtaatacttttgtttttaaattttttaatcataaaaataaaagtaaattttttgttttttaaattttgttttttgtaaaataaaaatgtgttttataataacttttgtttttcaatttcagaaacaaaaaacaaaagtgttttctgtaaatatgatttttatttttatttaagtcaggtctgaggtcgggtttgggaccgggggcgggtccaagtctggggctaggtctaggttcagtttccaaggtctaagctggagttgaaatctaaaatattgattaaaaaaattatttaaaaacttttgaaagtgattttgtttttgtttttaaagtttagattcttaattaaaaaattgaaaagtaaaaacaactttatagaatatgattttggaaaatattt

SEQ ID NO: 76154 - DNA, 799 bp, Cannabis sativa
cccaattaaagaatactgaggtattagatccctatagctgacacatgatgtataaaattatccaaaatacctaaagatgtagaaaaaaatttgcactacgtaatttttttagttctgcattaaaaataacaaaaaaatataaaaataaaaaataaaaattcaattaaataaaaaaataaaaaaaataaataaaaaagacaaaagacaaaaaaataaaataaaataaaatataaaaatatcacaatagtaaaaataaataaataattaaaaagaaaagaaatgacaaaggacaaaaacaagtcttttttttatttgtttgtgaacatctattcttctattgatgttatacatatatacatggaaaaggtataattatataaaaaataataaaaatatataatgattgttaggttatttttagtattatttttaagttaatttttagtgtgttttgtatttagttctacttttgtttggagcaattttatgttttttatcatttatttttacagatttaaaatagaagaagattagaaaatatcaaaaaaataagatggaaaaatagataaaaaaatctcacaaaaagatgatatataaaatagagaatattgtgcaagaaaataaagttgaaacttcaagcttaaatttgactatgttctgattagattttggaaaagttaaaccatataaaagttctagatctctcttttatctttcgagaacatcttgaatcgtccaattccgagtaatatcaagagatttattgctaaaatattatcagttgacgcaacagaaaact

SEQ ID NO: 76155 - DNA, 1290 bp, Cannabis sativa
gctgggaacccgaaaaatgctccccttatcaattcaaccccaaattttcccaaagcttccagcatacctgtaacactataatacaccaaacccaagcaaaagaatacaacaattcacacaaaatctcaatccaccattagagctccaacttgagctcttaaactccaattctacccaaacctcacaataaccaaccaattcagctctaattacccaaaataatcaacacctaactccagaaaagaaaatcaaactaataacatactcacagcccctaaacttccaaaaatcacatatcaaacttaaaataaaatcaaggaacattaaagagaacaagctagagtgtcctaccttgaattggagcttcaaacacaactgaaacctactagattgggttgagaaaatttcagcttggtgctggttcttgccaaatcgagagaaagagggagagagaagtagctttttctaggtttttcttaattccttccaacctaagctaatatatgtttctttctttctttctttcttttttttttttaaattaattcactttatattcagcattacatcacttaggtaagaaaaataaaatcctaccaaaagactcatttgcctttctaactaacataggtagctacaatttcccaagggtaaaattggtcaattttcgaatctcgaaaattccaacacattcaatattcaacaatgataccccaacaataaaaatctaaaacatataaaatgcgactctctaaaggcccaacatcgctttccacaacttccgaacacaaacacagaaattgaaaaatttacataaaatagcataataaacatatatgaacttaaatatatttccataatatacatttataaaataataattaaatctgatgcataaatcttaatgatttaataattcaatgtgttaatcttaagcggtctttacatggtgggcgtgtaaagctgctgatcatgaatactccaaattgtggatatttgactagtcttgaggaattgtttgtttcttgtgtatttatatatatctcatttttttttatatattttgatagtatgtataaataattatgtatatatatgtgtatgtatatatacatatatttttaaatatatatttttaaatttatgattttttttgtctaaaaaaacttatggggttaaaaaaaaaagtttttgttggtatgttaaatgattgatgtgatactgtatttattttatttggttttaattttttttatttattttttaaaatatttgcttcatttcatagct

SEQ ID NO: 76156 - DNA, 685 bp, Cannabis sativa
gactactgcctgagatgggaggtgttggcatcgagagttacaagggtgtcggaacacattttggaaggcaacttcgttgagggccttaaagacaacatcaacgggtctctccacatacttcagcccatgggcttagcctagattgtgaaaacggcccaacggatcaaagatgggcattagttgttccctacgggtcaacctgtgaagtccaacaaacccatagtgagcccgataacatcatattgtcagaacaccagcttgtttcaaagtcgagcgatctcagccgccccattattgtccacgcctcaagttttaccgggaaccaccacagatagagcttcgttcgtaagacaaatgtcagaggctgaataccaagaaaaaagagctaagggtctgtgtttcaaatgtgatgaaaaatatcatatgagtcatgagtgtgagcaaaggtttttataagttttgttgttcgccgatgaggatgagccactaccagcagtggagtcgacaccaccatctccgacattgggagaacaagctaaggtagaagagactttggccactctttctttaaattttttagttggaatttcttcagctcatactatgaaattagcgggaaggattggttagcaactcgtaacggtccttatcaaccgtggagcaacccataattaggggtgaaaat

SEQ ID NO: 76157 - DNA, 1355 bp, Cannabis sativa
aggcggtgtgggattgcacagcttacccggtatatccccttacggatcacgggactactgactgtcacagagcgatggaggaaaagaaatggaggcagggccggtcctgagagtaggcgagctaagcgtgtgtttcgggcccccaaacgctcaggacctcaaaatatttaatgtgtagctataaatgattgcatattacaactcttacgactttttaaaagttttaccattactataaatgattgcatattgaaactcttacgactttttaaaagttttaccattacaataagcattaaaattattattttgataatattttttttttatttaagcgtttatatattacaatgtataaattgagactcgaactcagaactttcaacacacacgcaccttcttatggctacttgaactaacctcaaataatttattttgataggattccaaaatttcatttttccttagatcttatatatctttggaccggccctcgagaatatgtgaaatcttttatttggcaaaaggtaagagaaatggaggaagacttcttcatccaaattaaaattttcaatctcttaaaacaaaaatattttttaaaaaaagacaaatatatataatatcatatttatccttaaaaaaacaataaataattatgttagtaatgataaaatttagtaattaatcgacattttccatttctaataccaaacaatatataagaaagacataaaaaagagttactttcctcatcgttcatactaattcatttccttccttcctaccctccattcttgtaaccaaacatatcctaattctcattaattatagtttcttattgcatataatccaagagtggagtaatggagccaaagagcaatggtaccaaagaattgaacacatggcaaacatgtagggacaaccccatcattcattggggtccattggtatcacatatgctatgatatgattattatgatatacatatttatatatatacaacatcaatgaatatatatacattttcccactctttgcagccatacaacaggctttaaatgattcaatttttcttctttcttttaaagcatttgaatttatttaattcatttagttgagtgtatgcagaagataacactcttagctaacactttttaaataattgaagtggaaagtattattttttttaaagggtcatatcattatcatcatgtatatatagtggtaatttcctttggtatatataaattaagttactataagacaaatgagtaatgattgaaaatatgtacaccatgtaattatatatacatataatgagtttgttgagctcttcaatgaaaaagagttaaaaa

SEQ ID NO: 76158 - DNA, 1284 bp, Cannabis sativa
gaattacctacgtagatactattagtaaattggtggtggatgtttccctttctttttctgcattttatttctttgctttacttccatgtacgccttaggacaaaattaaattaaaaacagaaggtattttcaattcattttcagtctatcataaatttttagtcttattacaagtgaccaagagtccagactcttaatcacttggaaggtagcatgtcttatatccctccaaaaattactaacaactaacattaattatgagagtagaaagtactgcctgaaatcagagcctcgtgaaactgaaagtaagcaactttttaccatatttttaaagttaataagtttactaaatcaatttaggttgattaaaggaggttcaggcttcagacataattaactcaggttaattaaaaataaaaaaagttcagacttcaaatttaattaatttaggtcaattaaactataaaactcaaagttacaaatctttgaaaccaaagcatcaaggatttggaagtaagtcatatttactaaaaaatttctagaacaagttgattaaatttcaaggcccatgctattggaaccatgttccaaggaatttaaaaaaataatttgttaaaacaaaacttaaagtttaagtataaaattgaaatcttatggttcaggccgttggaaccagaacctcaggaaacctggaaatgagactaacttattagaaaaacaaaattcatctaatatgcatcaaatatttagtaaatttaaaaattaaacatgtaaagcaaaatttttacgtgattaggcccagcgacaatagcgcgaatattatttttgctttaacaaaaaggggacaaggtaaaaaaaaaaaagaaaaaaaaaagaggaagataagttatggagttgatcaatgatgagttcatggctaagctggactgattgcttgctgagttgaatcagactggttttcagctggaacatcagtggctggaatgttacttaaagctggaacctcgctagtcggagcatttctgcagctataaggacatatccttcgaagttctcatcttctggaagaatggtctgaggatctttctccctgacttctttagcttccttagtattaaatagtactgctccacataaagaacaacaatattatccattattgtaaaatataatgtggtgcatgatatatttttggataaatttacatctttaaatcttcttctgtatgcttatgtggaaaagaatttatattctattaagcttatagctaccaagacataactt

SEQ ID NO: 76159 - DNA, 639 bp, Cannabis sativa
cacaaatccaattacattgtggctttccaaacacacccttataagtttttcttttaagtttttctttttagtgtggtaagggtcgtttacattttgtgtatgtataaataaatatagaaaatctttttggacaatggagagcattatgcgcgcaattgcgcattcttgaaggtatatatcattccatttaaaaaaattaagtatatatgattgagctggcgctactaaaaaaataagaaaatataattcttaatatttgattagtattaattttgacccatacagatgaattaattatttttacaaattattattcacgtcatgagccatgagccatgagccatgaatcatgatcatatcttacaaaaatactaatttctttttattacttttatatttttactcacactttttttataaaaaatttcataatttacattccatcatcaaatagtcacataaactaacatgaacacatccaaatcaaccaaacatcgttttaaattcatatttcatgaaaatataaatcactaccatgactctaagattagttgtttgaacttgttttaccagatctaaatttgctaacatgtatattgattatagctagagctataatctaacatcctacatatgaat

SEQ ID NO: 76160 - DNA, 595 bp, Cannabis sativa
tgaaaaatataaaaatttagaaatattagtcaatcttaccaagagtcgagcacgaagtggagctctaacttctggaggtacaagcctccattctttgtactgaaaactacagtattggcgaactataaatccaatctcattgttgaatcgctcagcattatcacaaatagcttgattaagtttatagtcgaaggttacagttaacgacttagctgacttcttaagtaccttagtaccatgaccacaagtaggcccccgttttgctatagggtttctagctttctctacaatacaacattttaaaaataacatacaatattattcagatataacccttattggttaagtaaagaactttttttttttgaaattttggttaagtaaagaacttgaaggacaattataccacttgaatgaatatgtaggtctactaacggtggttctactgttggtggatcagttgttggtgcttgttgtgcttgttgagctaataaacaattacattataaaataaaatatcaatccaatataatcattaattaaatatatagttgtagggaaatatcataccactcaaattaggaggtgctacact

SEQ ID NO: 76161 - DNA, 1125 bp, Cannabis sativa
tgttaaagcagcacttcatattaggtaaataagatatttctgatcttatttacctaatataccttttctatagtttggtactttagttcagatttagtacttaatctttccttttttcaaatatatattggatcttctagctaattcttacaaagttacaatttttcagatagtaagacactcttatcaaattacatgtattatactcaatgatcccctcagatttaagcgcatcaaaccaatcaaaattaccatttcaatctccttatcatttctcatccaccattccctcaaaatacaaaaaccttactattaaagaatgccttcaaaacctaaaaatcattcagtcccatagatgtataaacacaaatacaaatatacgataaccgtgaccaaatcaagaatcagagcaataagatcaaagctaaaagagaagtaataatcggaacagatcgaaaaacatactgaatccttcgtcaacgagataattgaaggtgtggccatcgcagttgtaggtgaacttgttatttgtagccggaagcttttgaagacactgcgaagctatgctggtgaagttgcctgtgaattccgtgtactcggcgaggatcaccgtgccacgcgcgacgaaggtgtagatcaacgattgctgccccatcagcgttgaatcgaaaaccctaagagagagaaaagtaaaagaaagaaaaactcaaagagaaaaagctgtgaactgaagagaagggtttttgttgcagagagaaaatagaacaaaccaacgaagattatgattttattgttaagagagaaaatgtttggtttgtttttttttttcgcttgaatgagaagaaaggtagcgaattttgcttaggtaccctccaattcaatagcaatttttaaaaatgccactatttatttctttatttttatttttaatttgaaaaagactacttctttaggaaaattatatggtgtatttaaaagatattcactaatgtattctatttattttagttatgtgtgatattttatgtgacttgcttttatattattgtgttaggtatttatttttttattcttgtttaattttctcaatcataactcgattggaaaaaaattgtatcgtgttcg

SEQ ID NO: 76162 - DNA, 4351 bp, Cannabis sativa
  modified_base (4296)..(4307): a, c, t, g, unknown or other
tattattattattattatatgtagtatttttagttgaaaactatatttatgattactttttggtaaaattttatttatcaatcacacacaaaattgttgcactcacattatagtcaaaagaataccatgtccaaaaaccatgaactgatttttgtctaaatagtcaattttgtcatattattaaacaaaaatagaataacaaacaaacatctctttctctactcgtctattggtgttttaacttttaaataatttgtgtaatattaaaggctaaattcttatgtcataactttgataatttactattcattaattaataattaagttatacttttgtttaactccaatttaaaataaaatgcgaaaattaacactcgattaattaataatttcgatacaattatatttttattgaatattgacattataaaagttttactgtatttgatactatgtgttttatcaagttacaattagttgcattatgttttcaataatacttatttattatcaaactagttattaaattcactttaaacttaaatttaatcaatatattttgaaactaaagtcactgagtgactgagtctaactaactcagtgacgagagaggggtgaaaaaaaaagaacataagttcgaatccaaaatcttaaattattaataaattaataataccactaggctacatttggaaaccaaaaaactaaactagcaaccatgaattatatgagttttaaatttaattacttttaagtgaaaacatgcaaatttttcatattaataaatttagaatactaaatatatacaattttaaattatataatattaaacaaatattattgaaaacattaattattatttctataaaaacacatattattataaataaatatatattttcttgttttagagaaaataaagttttttccttttgctttcataatttattttgtggtataaatatatgcttttatttaaggaacttaggaatgaagaaaagagtttgttgttttgccactcctcccaatgctgattttctttatttttcacaaaaaagatgactacaaattatatatacaataaatacactttggttgacttttttttttttttttttttttaatttcttctaaaaaagaaataaaagaaaaattaggcaatatttttcttttgaggctgctgagtcatttatttttaatttttcaaggctgcctagtgtctatgcttagaaacgtatgggtttctcatttattaaaaacacatgtaagggtcttgctttttctggtgacataaaataaaaataaaaataaagttaaattaattaataaataaatgtgcttcaaaccttccaaagtcggctatttatattttgtatgttaattttcttatttggttgttaatatttaaaacactatttatataaaactatatgttaattttttggggacatattttgctaaaattattgtaagagtgagaattgtcatatattatgtattttcttcttttggtgtgtgcatgaatgtgaatttgattaaatagtatatatgaaaaagatgttttaccccatgaatattcttgtatgaattcaaatgaaaaattaggttgccctacaagctaacacaatgggaaacatagagttttagggttaaaatttgagcttgggaagtctaagctaggctagctaggttttgaccaaaaatatcttaatgtgaatttattgagattggtatgtgaaagatgtatattcattgttttctagagacttgtgtaaactataatgagttgagattaacataggaaatattggaccattcttattgagtattagtggtgtttaacactttataaaagtggtgtttcatgattagttagttaattagtgatattttttaaaaattattttattaaattatatgagatccgatatttaattataattataataatagtggtatgatactgagaaagatactaaataccaatagtacctttagcaattatctaaatattgttatattatggtgcttaatgcaatcacggtatgacactttgtcaataattattatttttttttataagaattattaaattaaaatttattagacttaaataattaattaccctaaaatattattgaacactataaatatctttgagtattcttttaatttaaccataattaattttaaagagcattgttattaaatattagtggtgtttaacacttactaaatgtattgtcttacaattagttagcaatactctataaaagttattgtattgagaactgatacttaattaaatcaatattaatattgacacataagaatatattagacactactagtaccttttaacattttctaattttaaatgtggtattgtacactttcttatgtatgaatgagactttcttctgtatgaatgagactttcttctgtatgaatgagactaatcacattatgcaaaaaaaatgtgtgcacaagtgtgacacaattattgaatggagagagataaactctatatatcctaatgttttatcaataaagaaaacacataaaataatgaaataatcatgtaaaaaaagatgaagtataatactagaaaagcaaatgtactaataacaaaggattgcttaggcataatgcactatctaaaccataagtcatatatctcataataaatataattaatcttctagttttggtgacaaattggttaccaagaatactaaatgaaaatttattagattcaaatacttaattacactaataatattatgatacactttatagtatgtgcttaacactattaatatcgttctttaacattcttttaattttaaccatagataatattattaatcatatataattatatgtaaaaactgcatagtgtgacacaattattaaataatggagaaagataaacttttatgtttgtccataatatgaaatatacacaaaataattaaacaaacatgaaaggaaagatgaagtatgatacttgagaagaaaatgtactaataataagaaaggtttgcttaggtagaatgtactttctaaacctaagtcatataactcataataaatatataatatcttctatttatggtgacaaatgggttaccaagaacattaaattaaaaaatttctttcaaattatattcctcatatgaatttactagaaccaaccattgtggtggaattataaattagtcgaagtgacattgatttagtgtatgatgcttataattgataaaatcttaatgtcataataatattttgtatatagagttatgtatgtgtgtactatattatcctcttcttgtttatttaaatgaaaaatagattatcctaaagttaaattatattttagctcgaataataattggatcgttgccatttgaagattaaatgataatatttttttaagctttagattagttttatcaatttttttaataaaagagtaaaatgatcaattatcccatcaactcaattattattataaaatacattttttttaacgaaatatagtttataaaaccctaataacgataatataatgcctcgttacctcaaagatgctcaatcatccgagacagataattattaaaataaatcaaacctaagagcatgaattttttctttttttttttttaaatttggtgtgagaaatacaaatggaaagccaaattagaagatatcatatagtactactatataagatattatgcttttgtacactcaacacaagtctttatcaaattacaaacaaataaataataataataataatgataatttttttaaaaaatattatttctcatatccacacaatggtaaataaaaagccaaaccaccgacacttccatgatgtgccacctgtcacaatttgttagtgggccaatatgttagtgggccgacattaattaaggtgaaaaacgtgtggagtttcgttttaatatttattcctaaaaataccaatattacaataaaaacgtgcaatttcaatttcactattttctcttttcaattcataacaaaatatatattttaaaatttggacttatgaattttttgtgttttaaataaaataattagtgtttttgcattttaaatcttttacactgtaacgtccctgctttaagcctccattggacccttacacctacggaacaatggctcttatacacgagtacgccactctaactgctttctggattgatgactgaccctacagagtacagaccaacacgagtgtttaggtcacccatcctgaaattgccnnnnnnnnnnnncgcttaactgtggagttcttttgagatgggctaccgaaaaacaa

SEQ ID NO: 76163 - DNA, 556 bp, Cannabis sativa
aataaatttataaattttaatacatattcttaaacttttaaggccttttttttcgtggcaaaggcttgtttttgttagaatccatttgttctttctcttttaaggaataattacttggcaacttttttctttttctgttgtttttttatttttaacaaaactttgaccaaaaaaaaaaacattacagtacttttgttttctaaaacaaattgaaaatatatatatattgcaataaatttatcaattttttcctcctaaaattaaaaatgaaaaactaatatttttactaatcacaattaatttatatataattttttaatttttacaattgttccagtaattattttagtacgtggatttaaattgtgattaatttattattttctaaattttcgtaataaagtgaatcagacaattttttcttaataaaaaattgcatgaaatcctactcaattatcgtgccaaataataataaaataataataactagaatttaaatttaaaattattgcaaaaaagaatttaaatttagttaaattaaaaataataataataa

SEQ ID NO: 76164 - DNA, 826 bp, Cannabis sativa
aatgacagagtaattagattcaataagatggaaaatattcacaaacttacaataagcagttgttggaatgtacagaaacaatacttaagacccacccatctgccactgcatttcacaacaaaataaaatagttataactgagagcatcatagctttgttgctctatgtcaatgatcttagttaaatcataggcataattggttaattgtatcaaggcaaggcaagtgtacagagtttgcaactactaaaaccttctgagatgaaaaacaagataacattagaaatattggtgcaagtgcaagaagtaaaaacctttaatactggttcccctttgttagtgtttgatgcttgctttgcaagaccctgttgctgtgcacgtgcagcccttcctgctgcagatttctcaaactgctcttgcctgaaattatgataaaaaaacagaaaagtacaaaattcattatatatacaaacaattacatttacatccactccaccatttttcacaattaaaaaaagaagaagaagcttagactaacatagcaaagtccagtcacaaccacatgatcacagaaagatcatttttttcctaatagaaaactaatgtactttccatgtaagaatcagcacttatatgttgtagttatttctttaaggctagtaggctactccaaaaaagagtagcaaaaaggaacagtgcagtcttgaaattaagtaggcagaatacttgaattgaggcaaaagcattttaaactgtacttaaatgatgtatcaaaattccaaaatgcagaagataaagatatgaacatacattgttttgggaaggttt

SEQ ID NO: 76165 - DNA, 518 bp, Cannabis sativa
atgttcttctctggcctaatcctataatatggtgaccatttgaggtaggaaagagcttaattttgattttgaagggaagtgtatgcattgcatgcatatgcatgatggatataaaagtagaacttggcattcaagaaagtagtaacatacaatgtgcaaactaagttgatttttttacagtggaaacaaaagacaaaaaaacgaatttaattttttgtatgaaagcaaaggatacactttcatggagtggaagtagtatccaatgtcattctgcttttttagtttactaccatgatttccaagatgatacaaattttctaaatgcccaactctacaaagatccaaaatgtgaaaaagagaaaaactcaagcaataacatatgaatcaacaagtcatctgctggattgaagaactgaggaacagaattagccaatgtgaatcattgtttaataccttagatccttagtggtccctttttttctttctgccttggctttgagatatcctgtcaaataacc

SEQ ID NO: 76166 - DNA, 1399 bp, Cannabis sativa
tattagaatatagtagggttgaattataataattaatatttatgattaaattattaattatatatatggcctatgggactgtatatatttatatcacatttcaccagaaagcagctgaggctcaccttccagtccttgaatccaaagagggaatagtcattaatatggatgacttggatggtctgcatgtatggagcttcaaatacaggtcaatttaattatttaattattatatatatatttatatataattctaggtaatatagtaataagatcttatataatttttaattatttcaggttttggcctaacaacaacagcagaatgtatgtactcgaaaatactggtatatacatacatgccttttctttttcaaattatatacagaaaaagaagaagaaaaaaaaacattaatattaattttgatttattaattaacaatttgttatttgacaatttttcttaggggatttcactaacacacatggattaagacttggagactttatcatggtttatcaagataacgaaaaccagaattatgtaacacaatttaattttaatacaacttttctaaatttttcattaatttaattaataaatataattaaaatataacaaatagtattttaattttttcttcaggtgattcaggctcttaaaaagactagtactgaatctactgatcaagaagaacaacaagaacaagaactacaagatgatcatgataataacaaagaacaaatactacttcatcaaaatcatcatcatcatgatcttgttatatatacaaataatgatcacataaacacaacaacaacaagtgtgaaaatggaggcaccatgttctccatttgaagaagattattacttgaagagtagtaacaacataagatctaatcatgatgatgaaacaaacatgtctttcatctatgacactaccaatttctcaaatgagtctctgcttgactttttgggtggttcttctatgacccataacaacaactactactccaaatcaggaccttttgggagttttggctcagtggacaacttttctcttgatgactattactgatcattagtactacgtactatactacctctcctacctttttagtctcttttctacttaattttttgagaaatgtgatcagtttgacttgttctgttttttgtttttctcttcttttggatgccctctacctttgttgatgatctgtaagatgtattttggttcatgtgtcaaaacactagacacatgtatatatatgatgatgtaataaagagtggtaacttaagttataacaacactactacctttcttttttaaggggaaactgtcttattatgtaataatatattaaatgtatatattttattcactactcatagccca

SEQ ID NO: 76167 - DNA, 696 bp, Cannabis sativa
tactttttctattaatacacatgaattaatcttaagataatcaaacacatcaattatcactaaagttgaagtaataggcctaaacctgggcatgtaccataatatataggtcaacaaataggaacatacaatcaatgatttttcttttttttttagaaaatgcaatgaaaagttagtttataactttctatgttcaaaagactctagtctctagtcctatcttttggtattattagcaattaattgttgagcaacaattaatacatatagcaaatatctttacaaacacaatggataaggcaaaatttgaggactcataccatcacacacacacacacatatatatataaacatgtattggattgtgtagggacgtcaccacagatggcctatagttttgtgatattggtgtcttctcttctctaagaatatatgtgtggcaattcaatcctcaaaaagaagataacgtgaccctttttccccccactcaaatactcttattttccctttaaataaaataaatattttttaaaaaatcccatattgttagttaattagtttccttgcacttcaatgcgaagctatccaattctgcaaaggtttattgttattgggaaacttaataaagaaaaataagataattgggcctatccctttatcctctacagttgggcaacatttagtttgaaaacacat

SEQ ID NO: 76168 - DNA, 1185 bp, Cannabis sativa
gacaatcaaggcactaataataataggctttcatcttctgaagcagccagcaaattcatctcaaacaatccttacttccaagtgaatttgagatcatatcatttgcatggaaggagattggtatgtataaaatgttgctcatactttcttatcatgataatcgataccttttatcaaaattgtctttgatcttttgttttttcatatcatgatcaagagactactagtcatgaatgtttgtatgctaattcttgtttgtgcagtatattccgttggctttcgcaagccttcatttcgagaaaaagacacaaactgtaactctttgggttggtgaggagaattggcatgtgaatttaaatgtttgtggattagagtataggttttctggtggatggcctgcatttacaagagacaattctcttcagccaaatgatgtatgcatatttgagctgatcagcaagaatcaacctcggatgaaagtgaccatatttagacaaagtggtatggctcaagaataaactgttgtaataattttctatttatttaatttgccccagctgaagggttgtttctttaggttgctttaattgacccttaatcaatatcaggactaaaaacggttgcttatgaggccatgcctaatatcaacatcgcaatatacaaagatatctatttttttttttaataaaaaacaaaacaaatacgaaaaaataatacagatgaacacaaaattattatatgtataccttgtaatgttttggtgagcacatataaatatattttttcacatatacacaaacaacaaaaaaattataaaattttggttttactaaatttttttatatttttatgatttttttataaaaatacggtctttaatgtatttttatgttatatttttgttaatttattattgattttttgttatttgtatgttattattttgatgttttttttcttattacttttatgtaattttttgttattttagtattattattatataaaatcttaaaaatatataaaaaaaaattaacacttaaaaatacaaaggatttacaaaaaataataattaatgtaattattcttataaatatttagtaaagggtgactatttaatggttacatttttattgtaaccatatggttatatttttctttaatctgtaatagcaggttactaat

SEQ ID NO: 76169 - DNA, 1009 bp, Cannabis sativa
cctaagaaaatttcaagaaaaatcagttaaagatgtgaagcaaaagatcaaagttactttcaatcagagaattcgaacgaaatataattcttcgaaaacagttctatacattcttaagaaaagattaagggctacccaaaagacaagatttcagaaacaattcctctaatctcccttacatatcacaatcttgattaaaatacgaattaatattctctaacttgaaaaccccatctgcataaatcaaaacaccataaaaatctgcataggtaccaagtaaaaatattgctaagaggcacttgagatgttgcccaatacaacatcaccttacatgtcatatcgtcattaatggtacaatttaatatcggatctcaaacatataaaacccgctactcaattacatcaatcaaataattatacatatacaagatgctatatagcaatgctcaacaagactcaaaactttcaagcatgtggctttgagagtttgttctcacaaagtcttaggtaacgtttggttagaaggaatgaaaagataaaaatcagaagaataagaatggaaacaaatttaaaatacataaaaacaaattgatgaataaaattatcaattttttttcttctatttcaaaataaaatagtcattttagtcaataagagaaaagtcttattaaaatgatattccgatacttcaaaatacaaccaaattacggaatggaatgaaaattgttctctttccattccaatcgatttcattacctcaaaccaaacgccaactaccaaacgccaactaaggttcagttctatccaaggtaacataacaatctatggttaagtatgtcataactatgttctcttacaatctatggttaagaacacaaactaacaaatccaacatatacatataagaaaccataatatacatacattatatatatatatatatatatatatatatatttggtggatggattataaagacaatttttacataccacgaggtcaacacctt

SEQ ID NO: 76170 - DNA, 750 bp, Cannabis sativa
taaaataaagatttactatctctaatactttattattgttttaattgttaacaattatacttatttttaattaattttacatagaatagaattcataattactatatattgataatcttttatgtgattgagcacaattaattttattgatttttttttaaatttttcttaaaatttatcaggatagagttacccatgcataccctaccctatacttgttagggtaataccccatacccttcccgcaaaatataataggataatagggtaggcttgtgtagggtagagtatggatgaaactattttcataggatatggtcttggaataaacttacactacccatacttttttatgtagaatgacctcataaggcaggtcgaagagggaacactggtgcttgaaggcaatatggttattcttaccctggcgcttggcacaaatgaacacgatggacgttttaggggcatggggatgaacatcacctatacacaatattttaagatcccataccctaccaaaaagagaaagtggagagttgatggtgactgaaagccagagagcagacttcaatatagtctcaggaaataaatcatcaaagtcaacaacaactcaaggaacttttccaacatactcaacctaacaacgtggttgggacgtcacatgcatctagttcagatataagaggttcataaaatgaactagtgaatgtttcactaataattgtctttgctccaccaccagcgccacca

SEQ ID NO: 76171 - DNA, 2372 bp, Cannabis sativa
  modified_base (1385)..(1387): a, c, t, g, unknown or other
gattgaattcaatcatctttccttcttatttgagaaatacccaattgaattttgacttcgaagattaaatttttacaagtaatcagtgaagattgattgattttgttattgttatggggttttgcaaaaacacccttatttgttgtagtactaaaaattgaatgttaagaagaagattgaattcaatatttaacacaaaaagatttggttaattgcagagaatgaatcaagtggtacaccagacaagcaaaatgaatgaggcaatgaatgcagtaagaggtatgcctttgagtagagctcatgttacctatggaggttactatgaaggtctttagatacaatctctctcttcttcagctaaaaaatggtgaaagtttcttggccatagatgaatttgataagctctattttattaccatctatattattttcatatctatataaattttaatatatctgaaggtgtctctgtttctgtgttgtagtgttgtacatagttttgtttgttgtgttttgtatataattctctcagttctgctttgtaatattatagattacttagctcttttacttctttaagaataaattccaatgattatataacttggcatattagtttgagattttggtacttgttgtgtgtatgttaagtgattatattttatggaaagtcaaaaaaatttactctagaaaatggcattctttcataattgaattcatatttgcaaatttaataatagtgatagttgatatactcaactttcattatattggctaagttgggtataatcacatacaatattatattttattgtgaaaatatgtaagagaaaggaaaaagacctatgcatccactagctattttccttgataaaaaaaaggtttttttattgaaattcacaattcgcgtcacgtgactgtataggattaatcaggatcttacaaaattaatattgtacaatcatcgagccacgtagcttaggttgtgagtttcgatcagaattcggggttagtgggaatcctacaaaaattactgctcggcaagttttgactaattttgtgtatccacataattttggagcttggggttagtttggatcttgtaaagattattacttgaaactagcttagttgagatcctataaagattaatgctctataaatctcgactaattttgtgtagccacctaaagttgtgagtttcaatttaaatctaatgtattactcaatcttttttatttgtaacactctttaataacttgcattttagagaaatccaaatcataatcctaagagaaatgctaaaaggcactagtggtgcctagcaccttcctatgtatcaatatcactattggtttaactaagtatcaggtctcatataattnnntataataatttttagggagtatcgattggtaacgtaacatgtcgtaaaagtgcttagacaccttgtgcctaatagcagattaatcctaaacatgaatttgcataaagtaaaagactttttgaatcgagagaaaacacaacattattgaccatatttacattgtagagatatttttcttggaagcaatgactttgattgaacatcataagaatccatacaaatgatatttattgagttcatcccaattaccaattgcttgaataagacccaatgagaatgccaaacactgcctaatggtcaaaagtgatgacatgtgttgtttcaagaaaacttaatttgattttgacatttttctttatttttttgtgttgagtaccatgtatataatttttgcacctaaaacttaaaatcatacatggcactaacttctattggccacgtggcctttttggagctgtatatggcactaactcttcagttagccacgtggcatttttggagctgtatatgacactacctcttgagttggccacgtggatgattttcgtaaacttggattttacttaaaacaaaatgaatatacacagactacactaatcaaccacaagattaccctcaccaatttaataaatttttttttggaattaatgataatggaatagaatgaaaataatttttcttttgttatgtttttattttttttcaactaaatattatttaatgaaatatttattatatgagtttgagttagagaaaatagaggttgaagggagtagactttaagagaatataaagagattaacattactactattttagtttaaaaaataagactcacttacaaacataaattttttagtcattaaaatttaatttagatttaatatttttatttctttcaaatctaaacctcatattaaacacattattaatctaaaaagtatcaacatttacataagaatataaatttttaaaaatatatata

SEQ ID NO: 76172 - DNA, 506 bp, Cannabis sativa
tggcagcgccttaaagttaaattctcaagaagaggattattagagataagaacttgtaatgatgattgcttatcttccgcacaatcttctatggagagatttctaagttttttgcaagagatatttattttgttcaaagcaacaccatatagtatcaaagactcaagatttatggcttcaacttgaacatttaacttaggattgtctaaacatgtaagttctaagaacttgaggcttaaactttgtaatcgaaacttaccatcatttagaaattgatgatcaaataaccgcaatttctcaagagaagggcaacccaacaaaaatttaactaccccttctgaatctgaattatctgaatgccaaacactttctagtgacaaggtttttaaagatggaaagctaaatgaataagaagaatccaacattatcccgcttaaatccaaaatggtcaaatatcttgcattttctaataatattttaggtatgcagtagtaggcactattcca

SEQ ID NO: 76173 - DNA, 826 bp, Cannabis sativa
ccactacttggtgtctggggctctttcttaccccccccccccaaccatcccccaagccacgactttgaacctgaacccgaatcagaagcagacccagtaacggaacttacctccggaacttgctgcgtcgggaaccgactgggtaattgccctgttggaggaaacccaggcattccagccacattaggagcgggctcatctatcatgacaggcacttgttgttgttcgctgaggactttattaagcatgatcccagccccttcgatcagagccaagaggacgccgccaaaggcagctgagcgagatgccgcgcctaaaccctggcgcatctgaaggaacccaccggtggcggcacccgcgatgatcgagttccatggatcctccttctggcggacgtagaccatggtgcagtcgaaggcggagaataagccaccccagacggcaaagcttccaccaactcgaggcgcgttcatccgtacggcttgggagccaccgacgaggcgcgctcctttgggagagttgtagaggcccttgatgaagtgaaaagcggaacctccgactgcccccatgccgaacgcgccgccgatatcgtcgaggatacgatccggacagggctccctagaagtttctggagttcccatgagagataaatttgcgtaaaagatcttcccaactcgttctagggttactggtttcgcctaaaggtgtggaaaagagaaacagatcgattaaaggctttcttccttcccctcttttgttttgttttgtctttcttaaaaaatattaggtattttggccattaaacttttgttcttttttttttttt

SEQ ID NO: 76174 - DNA, 751 bp, Cannabis sativa
aaaattgtaatgtgggttcgatcactcattacttagtgagatggggctatcatccacttcttctcttaccatttagtgtgataatttgatcaatgttcttctgtctgtctgcaaatctccacattaaatactcaaacaaaacgtaatgtcttggacttaaattttcttaaaaaaaaaaaaaaaatctagcattttgacgtagacagttgctcaagcttggtttttatttctttgttccaaaatttgagtagaagaattataatctctattttctggggatgcaaggatatagtatagttagtattctatttctagtttgttaattacatagttattcataaaattttgttgtgatcctccatgaaaaataaattaataataacccgtgacaacatagcaattgaaacaatataacatgtccaagatttattataataagaaggataagaaacattattacaatataacatgtccaacaattacaccaaatacaagcacagttccaaagagctccccttgatgatctcaaggcctaataagctaattagaacttttatttattattgacttatagtaagtcatgaatatattatgaaatgatgtgttgtcatgattctcattggacggagacttatctccctgccacgttggcatttgacaacctcagcttcttttccttcgagagttcctcagcaaacctaccacaaataattaattaatgattatataaagaaaacaaatattagaataa

SEQ ID NO: 76175 - DNA, 679 bp, Cannabis sativa
tgagaatgatgaaagtttacaagcacaatttgtaatgagaatattattatattatatttgtgattgtagacatagcctaatacctcttctcacaagtttaaatactcctaaaacgtatattatattatctaattttattggcattatatagatttgtttattctttttcttgagtaatgattaatctttactaaactaaatcatccaaaatcaaggatgcaattacaagaggtaaagaaaccctactaatgacggtcaccctcagaaagagaagatcacgctaaagcatacgcaaccttattaacagaccgcttaacaaacttaaaagaaacatcaacaaaatcagaaatcaaagtcatacaatcataaagaatatgaccatacggagagaccatatattttggctttgcaaatcactaatgacttttaaacaatcaaactcaactataacatttgtccatccattctctttactccatgacaaagcctctttgataccaatggcttcgactatatgaggctgcaaatcgcctcccttggacaaagttctggccgccagcactaaaccagcagcagttctagcaatcaatcccactccataacacccatggctagaaaacaaagctccatccacgttgactttaatgaatgaaagctctggtgcagtccattgatcaac

SEQ ID NO: 76176 - DNA, 2304 bp, Cannabis sativa
  modified_base (79)..(81): a, c, t, g, unknown or other
tctctcacggacattcagccttcattggaaatctgaatacacgtgtcctttaaagaggagtctggtctcgagtttctannngagagaaatctcactataacagacccatcttaaaagagtacaaattattttacaaaatattgccacataagttatcaaatttgacctattatttgtgcttcttctggctttccatgattggacaatgaagcagaaagtaagtattaacacttgcaaatccaatacatcaaggggtcgtatgaaccaaattagacaggaaataaattctaaaagaaaaaataaaaaacaatctgcaccaaatcctcatgaagcataaaaaaaaaaaaaaaaattctaaatttctcttttttttcagtcgtcatgaagcattaaatttaaatgtctatacacctcccttcatggatacaatatacagagagaaagaacaatctgcaccaactaaaatctaagggtcacacaaatagacatgatgaatctcaattgagtatattttgataaaggctttcaaacttaaaattgtatggcacaaatgccttgaaaatgatcatatagataggaaaatataaaaataaataaataaagaagttttgacagaataaaatttagatgtgatgatatctaaaaacaatttacaaaaagtgtaaccttcaaaccaaaaaaaggtttctcctcattaacttaaatatccgttagttttacttcaaaaaggctcaaagtcaggtccaagatattgtaaatgtaaaaatttccataaactacagcagaaggtaaaaattctggttgagttgtcaaaactaattcaacttttatgattctaggagccctaacgtgagttaggggagcttgaaccttctatgtattctcatcgtagtagcagagctatgacaattgacaacgtttaatctacttcttcttctttgatttgctggaaagcgactgagtatatgcagttccctacatatcaaacggaaaaaatggaacagattagcaacaattctcattaggctaaaggaatttgctgttcagagaataatccgcacctaatctacactatattgaaaattaaaaaggtggagcttcagcattaactacgtacctgaagccactcatccattgatgcatcagtggtcctggtcccaacttccaccttgggagctctcttggttttctgtaaataaataaaagacgttggagaaggttttatgatgaaaatatatacataaataaatgactagtttgccacaagaacatcctaaggcaaaaattacaatattgtgaatgatgtgaaatttgcggaagacacaattagtagcataacacaaaaggatccaattcatattgactgcaagttaataggcctataaaagtcataccgcatccacatctattgaaatagatagaacattaaattgctagtaccttcgaaaggtgctgtatttgaccatgaacccacaagacaaggagaacaagaagagcgattccaagagtaacaaggaaaacagattcaacgctgacgaatccaccagcctcaacaacttcaatagtaccattgtagaaggtgttttgataaggatgttggtcaatctcataaatgatggtaccaacaagatcaaaagttccaggctgcaatcaaaaaaaaaaaaaactgtgtcatcctaatagaaatgattaaagaaactgaaaattgatgaaactggcaatgagatttatgaacctgcaagtacttgctgacagcaaatatgtaggggaaagtagcctgggctgaagctgggatcgatgcattgttgaaggtctagaaaagatgaatcacatatgtaagaaacaagataactaaggaatgaaccaaatcaaacaatttaaacaattaaaagttctcctcaacttgaccaaaaaaagagagaaattgaacactgggaagcaaaaaaattatgataacttatatttgattttttaaaaaaaaaatagtcaaactaagaaacccaagctcaccattgtagtcaaattttgaaccagcattttatgatcaaatgggagatgaacactagctttgattgcaatgacagtgacgcttgagtcccctgtttaatcatcaagaaaagcaactaagatccctctttaacattgaaaaagtaaaatgaaagcatacaccagtacatcccaaaagaaaagggaatagcttggtagttaagaggacacaaaattaccaaatctaaagtcatcaaaacgatatagcaacacagaattattaaaatcaaagcgtaagaacataatatcaagtacacc

SEQ ID NO: 76177 - DNA, 1163 bp, Cannabis sativa
aggcaccgacttagcctgtttatgtctagaaatgcataaaaatggattcttttatattccactatctagttcatataatatcctattttcttctagtttggcttcacatgttaagtcaaaatggcaagaaatataacaattagattaaggttctggatttgggtttatatatgaaactttcaaacaattttgtcattggttaggggttaaaagcaaaattaattagtataagttaattagcatctatacatgggttgattattatcaacaaattactatattaacttgatatatatatacttattcattatagccataaacaatataaaaaatctagtacatacatgtatagatgtaaaatttataagcacactaccttttttctttttcctcttttcatttttttggtagttacattattgataagaattaataacaatataactaattataattagtattaagtaattaattttgtataagagaagcatataagagaatattccaagtatcgggtactccggcgagacaccaatgactgcagtccatgtcacggtggccgccgtggccgtagaaggaggggtgaccgtcctttcttagctgtgacagggctgtgacgttaagcaaagtgacaggcattgaaatggagcgaaccactctctcaactaccaattctgctgggtgtgggcctggtttgtagctcaacccacttagtgcttttgcttgtccactacagctcctcccactcatgtctccccattccgttgcactgttttacgtacattaaaaagctcaaacatataattacatgcattatatacaaacaaaagcattttcatttttgtttttaatagataaataaaaggaaaaagaaaaaattagaatacataatacccactttgaattatactaataataatagtatgctgtttattatagtgtttgggtgttttatttttttttttacaaaacttccattaactcacaaaaattagacgccaatatcccatgactacattatcggcaacaaaattaaatagttgtatgaaacaaaaaaaaaatattatactaataatagtatgacagtgttaagcactaataatatttcttaacaattctttatagttaaatagtgtggaataaattattaagacttgtaatta

SEQ ID NO: 76178 - DNA, 899 bp, Cannabis sativa
ctcctctttgtttcatggaaagctcaatatccttgtaagtcacatatgtctaactaatttttttttttttgtatttattttgtttatggtgcatcttatttgccaatttcatatttttaaaataatttatttcaccaaataccacaaattcaattcaatttaatgtgcaattcaataataatatgaattggattgattatttaatatttattaatatatattttatgttaccaaaacaagtcaagtattgataataaaatgtatatattaaattatcaaaaaaaatatatatttttgttatatgtcaaaacagaaaagaaaattttaattagttttaaatttttttaattaatatatatacataaattatcaagaagaataaacaaaatatcataaatcaagaaattgagaatcagaacatagtgagaagaacatagaatgataaatcaagaaatttttctattttttagagccaacatttcatagaacttgtaccccaatcacattgattctacagtcacaaatcttcattcaaatttaattcaatgtatacacattgaacatatacaagaaactaattagatcgaacatttaacataattaatcaaacaaaataaaaacaagaaaaatttgttcagatctaaaatactttttaacaaaacaattctagtatcttgatcgtccaacaacgccaatagaaaaagtccatcatttaacaggtttgtcgtaaggagaagaagatcatgaagttggagaagacaagttggttccttttcatatattgttttaattattagttttataaaataaatatactactattttctaagtggggttgagttgattatgatttcttttttcatacaaataaaataaataaaattattaatcctatatat

SEQ ID NO: 76179 - DNA, 988 bp, Cannabis sativa
acactaaacgccgagcctcgacaaacttcgaaaccctctactgtctctcttatcagctccgatggagctttgtcaaccatcgactatcgctgaagcctccccagcatcctcctttctcagctctctagtttgccatctatctctctcttattctccctttctctctttgcgcatgagctgctgccaggctagatggccattgttgctcctccgcctctcctaggacgtcggtagtcgtagtttcgagatccccatttcgatagcccaaggttattactttcttcttttgttttccattatctttttttcatttgtctctttatctctcttgctttctcttttctgtgcagcattcatggtcgatagcagttaaagctcgtcgttgatctcgaccttcatgatgtttgaagctcgttggatctgatttctttttagctttctgggtttttttttacctattctaaatattgtgttttcttatattattttgggttaaaatttaggtttatgcccattatgtaactaattttaatagtttttgttgaatcaaattgaatcgatgaactctgtatgtaacattcaggtaattaaactttttattttagaacttttttcttagtatcactgtcttgatgagtgattcagttaaaaaaatatgtatattattttagtttataatttattacgtttatttaaaaaagaaaaagaaaactaatattaattttagttttatcaaaattataaaaaagagttgcatatataaaatttaaaatttaaataaataaaaattaatttttgcatttaggaaattaattaataaaataataataatagaaacagtgacgcgccctgtgagttgctgttatttttagagtttcacaaggtgggactctaaaagtctattgtgacacgcacgaagagattttaaaagtttttagtgacccacattaaagagtcactaaaacttacttttctagtaacccacatt

SEQ ID NO: 76180 - DNA, 568 bp, Cannabis sativa
gcccttttgagattttgatggtatcgaatggatggtttttggtctttcaatctgtgttatgtgtttgatgattgataatagtggtagtgggaatgtgggattgtaaattatcatcataaagttgtgaactttgaggaacaatgaaactacaaagcttataaaaaaatgcttcttgttttcgggtaagtctatagttcacctccttaaagagatgttttcggacgttataattatttaatattatttgtaaattttcagatgattttgaacagtttaaggtttaagtattttgttatctgcagtaagtaattgaactttattttagcaatgcaaattattcaaaaaaaatttaaaaatttacagttgattttaaatacacacaaatttatgcaatcaatgaaaaaaaaataaactaaatttctttctgaatgtccaaataaatagggatctatcaaaacccagtaaagatgggtgtattttaccttattacaagcaaagttatttctttgaattcttggcctttgagattttgatggtattggtgaaaaatggttttggtattttagtc

SEQ ID NO: 76181 - DNA, 552 bp, Cannabis sativa
tatttttctattctctgcaaatactctgcttttctaactaggtgtgttagggtctttctctgctaatgtggtagatctgcttgccattcgtttgggtttggctcttgagcatcaatttggtttcaatatctagattattaatagcgattctactgtggcaattggttggattaatagactccacattaatttttgttttcagtctattttattagatatccattctttattagctgttggtggtggtggttcttgtagcgccattccgcgatcagtgaatagtgttgccctcacactggcaacctctgttactagtttaggagattgtatttggatagatgtttgtctacaatttttgagttcttctgtaacaacagatttatcttgatgaagtttatctttttttcaaaaaaaaaattatatttcaaccaaaattgtgacgattaagttaaatgtattatgaaatattatttatggatgtccaaatcaccatattaattatcacaattaatgcttgattgtattttcctttattacatattaatttagttt

SEQ ID NO: 76182 - DNA, 3269 bp, Cannabis sativa
aattaaaaatgaaaataatgaagactaacttcttaagtatcattataataatatgtaaactcataaactcgaaactaaccgggatatataattaaatctttattaaagtaaaataaataggacaacatgagtcttttttaactctattattgaggagtgtaaaatttttctttagtctttatgtttttatttttaggcttaatttttattagacgttttatgaatattgagctctacacaattgtcagaaattctagtgttatgattgatcgtttatgggtagaaattttagctatacttttaaattgttatttatttttctgagtgattgcaatggttaataaatattatttatgtagttttttttgaggtattttttttatgtctttaggatagataataaatttttattaatggacattgctagtggtatctaacacttttataagtggcattctacaatagttagtgatattctctaaaaaattattagcaccgataatatgaatataatattgaggagggagcaaagtatgataacaataatactttttaataattttttttattaataaaataaaattctccactatttgtgtaatattattacttaattattttaaatgtattgatttctcttaaaataaagtaggttgattaaaagaaaatactaacaaatttgggggtaagttgaaaaaagaaaataaagaatagagagtttcgaaggtaccgaggtttttgtgtggagacaatgagtgccataaggcactaatggacccacttaaattgctcataaaacattaacaaacaaactatttaattcaaaccataataataaaattttaagatgtttaaaaaaaatttaacttgctaaaaataaagtttaaactctttatgtgttaaattttttaaatgttggcatgatatcctaaataagataattataaaaagttaaattaaaaattcccaataattaaaattgcatggtataatttttctaaaatatatattaatataaaattataaaaaatatatcaccaataataataaataaaatataaatttatttatttattctctcttaatatcatccacaaaaaatattacattaaaaatatagtcaaatatatatatagtagttgttggactcatcaaaaaactaaactcatttcatcaacacaaccagtcccaattttctctctctagaaactccctattttccctctctctctctttctaaaaccctactcatataaatatcttcaaattctattggatccctttctcatcacaaccacataatccattaatggctttcctttgatctctctctttctctctctctctttacaaaaatcagttttcgaagaaaaagaagaagaagaagaaatcgccatgaaacctaacaagctttgctgtctttgcgatcaagaagcttttctctactgcgcagccgatcgagcttttctttgccggaattgcgacgcagacgttcacactgctaattttctcgtcgctcgtcatattcgacaacctttgtgctccgtttgtgaagagtttgctggaaatttagtatccggtgacgatctacgtcatctctgttctcaatattgtcggagttgttctccgcgaaatatctcctccgttgacgatgacgacgacgatgatgattcatctgttttgtcttcggtttcgtctgtttgtgtttctagtaatgaatcgaagcttagatttgaagatcggcctaagacgattgagaggatctcttcttcgagctccgttacggatctctccggttccgtcgccgaagtcaagaaggaatcgattatacggcgacgtaagggtttgattagtgtggatacgaagacggagggcattttcgagaaatggtgcagagagattggactaaacggtaatttagccgtggtggtaaggttagcatcggaagcgctagggttttgtgtagcgaggtcgcgacttttaccgttcagagtatctttagcggcgtcgttttggtacggattgagatctatcgataagtcatcgtctgcagaggcggcgcgtacgttacaccgcctcagacggttacagcagttatcaggcgttccaatcaaattgatcgtggccgttgaattgcagcttgatcgcgaattaaaagctcagaagaatcgccgccgtgatgatctgaaggaaggttgggccgagtgctccggctaaacgtacgatctccggtctgtccaaaatctatacacttcttctgtttatatatatataatattattatataatccatggagtttagaattagattagggtttaaccggaattaggttatattaattagtgtaatctcaattatatattattattaattattaattttaattttaatttttttgtttagcaatattgttattgttttttttttttttttttttgaatggattaattaatttctgaccaaaattattaagaaaaagtttgttattaatagtaataaaataattaggtaattatgtattaattatggtaattattatgtaaggtagaaattgaaagtaaagtagttggaagctttttcttgtgtgtaaaaaaagctgtatatatatgtacggaatattaattgggaatgaagtcattacatccactactttaaaaaaatttgaataaaaatttgggtattattgttttttgtttttattttacaattttaatgaagacaaatttttaatagttaataatgttggatattttttttgttgggagccagatattatattccacgtgtaagtcttagaagcccttagtgtatgtagtgatcaagagaaatcctaaaaaggaacacggtgtataagcatcttttcacgtcttaatatagttattgatttaattaagtatcgagttttataggatttaatataataacttttacaataacaatgctctaaattcaaatgtgtacttaaaataaatattacaacgatctaattcacttaattttttttatttatttttgagtttttaatggttaaaatctctcaaatattgtttggcttgtatttaactttttaagtttaaattttagaaataaaatttttggatgattttacaatgccccctcttaaaaaaatgtaatgatacactcttgacttgtttcagcatctcaaaaaaaaattagtttaattttttttttatattcatgtacattatagctatttaagataacctacaaaattttaaaaaattccgaataatttataatatagaaa

SEQ ID NO: 76183 - DNA, 512 bp, Cannabis sativa
aatagagttttatgtattgttaatctgtaagtcagttttaaggaagaccaattgttacagagattttttaccgataagtttattttaaatattatttgtttgagagttgttatcttctaactattgagaatttcttttattaggttttaatatcatcacaggggattaattcattttttatcttattttgttttgtagatattttggggaccattcttgatatgttaatgagttgacgtgtagtattcactaatacaagttaaagctctagctctttaggtgtgttatttgaggaagttataactttattgtcaaaattttcgggggcaattttattttatgttgctcgctggctttagcagttcatggtttgacaaagcaccttctagttagacgatgagctatccatgttcaaggaagttcttgtgctgtttgcggatgtctgcatcgtaaatgcgtgagtaattttaatcactacatcgaaatatatatatatatataaaacactaatt

SEQ ID NO: 76184 - DNA, 764 bp, Cannabis sativa
tcctctttctctcggtggtttcgaaccaccccctctccggccctcttctctcgatgcgcaccctgccaccatcttcatttccacgagaaaaatgaggggtctctttctctctctctctctctctctcattcctcatttattttgaaaatgttggtttgatttcttttttttttcgcaagtttggggtggtggcgttgttgttacagtacgcaccagaccatggcggagccgtcacacaaacaaggtattttcaatctctctctctctctctctctctctctctctcgcaaatctctcaacacactaaatctggtattttttccagtttcgaggtggtggcacgcgattgggttctgggatgatgagttcgatgtggtgcattgaaccgtctcaaatctgaaaccatcttcgatcagatctatttttattttttttttattttagtttgcatcagttattaaatgaagcaaacaattttgcttcatttaataacaaacgcaaaatgtgtaatacttttggaatcagttattaaatgaagcaaaaaaaaaaaaattaatgtcaattacaaagtgaagcaaaaaataagactttttgcgtctgcggttattatgttagttgtcccaactgatgcaaatcatttatgtcatttaaaaactgaagcaaaaaattatttttatagtagtgggatcttaattcaaagcttaaacaactcctaagtgaaattattcaactaatgcaaccaaatgagcagaagacaacaattt

SEQ ID NO: 76185 - DNA, 1287 bp, Cannabis sativa
tctaacagatctcaataagtccattatcactttgattcccaaggtagctaatccgacttccatgactgaatatcgtccgataagtttgtgcaatgttatttacaagcttatttccaagaccattgtcaatagattcaagcaggttctaccttttgtaatatctgagacacaatctgcgtttttgtcaaataggcttattacagataacattttaattgcttttgagcttatccatcatctaaggcatagacaacaaggacggatgggatactcggccttaaagttagatatgagcaaagcatttgatagggttgagtggagatatttggaagccataatggataaaatggggtttgatcatcattggatttcactgattatgaggtgcatctcaacaagttctttctctttttctcttaatggtgatatagttggtcatgttacacctcatagaggcttgcgtcaaggtgaccccctttctccatatttgttcttaatttgttctgaaggtctctctagatttttgcaagcacaagaacaatcgggtatgttgaaagggctatgcttaacccgcaatgcaccttcggtttctcatttactctttgcggatgatagccttttgttttgtcaatcaactgaacaatcagccatatccatcaaacggtcacttgatacatatcatcgagcttctgggcaggtactcaataatgataaatctgtcatgtctttttcgcccaatacctctctagcagctcaggatttctttgctcgtacactacatatgccaattactgaatgtcatgagcgatatctgggacttccatcttattcaggacgtgataagcaagaactttttagtagtatcaaggataaagtttggaagcttttgcatgcatggaatgagaaaaattttctcagtaggagggaaagagggtgcttttgaaagctgtagttcaatccattcctacttatgctatgagttgcttcaaacttacaaagaagttttgtgatcagttggaaagtatgatggctaatttttggtggggtagcaatcaaaatggtacaaaaattcattggaagagatggaaagcactttgtaagtcaaaatatgaagggggtatgggatttcgatcttttattcactttaatcaagcacttttggctaaacaagcatggagaatcttcgacatgcctgaaactttgctgagtaggctgctaaagcataggtacttttcaaattgttctttccttgatgcaaacattggtcactccccatctttaacatgg

SEQ ID NO: 76186 - DNA, 1523 bp, Cannabis sativa
  modified_base (1112)..(1114): a, c, t, g, unknown or other
ctctccatgacaagaactaaatcaaccctttctttttgtggttgacccaacaaatcttcccctctgccttagttagtggactcaactaagcttgctctttgcctacaagctttaagcttcttcttagaaaaagtatttgtcaacatatctgaaccattctcactggtatgcacttttttctaagtacaattcttacatctcaagcacatcgcgaatccattgatatctaacatcaatatggttggatctggaatggaatgttgaattctgaggtgaatgatactctgactgtcacagtagacaaagtatctttcttgctccaagcccaactcttatagaaacttttttattcataaagtttccttacaagcttgagttacaactatgtattcaacttatgtagtagacaaagcaacacatttcggtaaccttgattgccatgaaacaactccccttgtaaatgtcatcaagaatcttgaagtgtatttgtagaatcacaatcaccagccatgtctacaatgcaaagtagcaaaacctactttctcccgctagatttcttctcttttttttccctcttttcttctttctaattcttggctgctactttttgttctccacgacaagaactaaatcagccctttctcttttttattttttttttttttttttggttggtggacctaacaaatctcccccattgcctcagttagtgggctcaactaagtctgctctttgcctacaagctttaagcttctttttaggaaaattctttgtcaaccaatctcactggtatgaacttttttataagtgtaattctttcatcttaagcacatagcgaatccagtgatatctaactgttgggattttatgttctaaataaaatccatttcaaaataattagatttactaattaataaaagagtagaaatcattttatgttgtatggttcacatgattactttcataatgtataaattctattaaatcctgaacatatagttagttattcatgattatagtgttgtctacacaatgaaaaataatcatgattatatgctttaaagttttagtcccatgatttgttagtacactggatttacactgacatgatnnncaacgataaagtttacttacaccttagataagtatgtctcttctaggacattggcaaatatgctagtatcagatgtatggagtatacatcggactgaaccgatattgacattagttaatattataaacttactattaaatctttataagtcaatatcatttagttgatcttatgtaaatagatcttaatccttagatggttagattctggcttaaatgtatcattcatattctttgacttgttcgttaaagttgaccaagtggattttcgtaatacttacatctttggaacatggtagtataattaagtgagatcgctaattataaatatggaatctatagcttctataacttctagaagtgaaatgatgatttccttcaagcttggcttaacgcgatgaatgattgag

SEQ ID NO: 76187 - DNA, 1033 bp, Cannabis sativa
catgatgcaaattaaagaagttcagattttttttttaaaagagactgaggtgtctaagactgatctcctcccaaatttattagggaggccctcacttttggtggaggaaaactgtggtaacaaaacaaactataacattagaatgcttgacataacacatcaaaatgcgtaggcctaaagatcttaaagcatcattcgaacacaaatagcaatatagctattaagcaaaagtaaaagtaccttggtggagaatacatccccaatctctgttgaggtcttggaaagatagaacttcaaatcctttttctcttataaacccaagttgcagcccaaaattaaagaagataggattttttataattaattaactcgaaatattttggatttttttagtagttatagttttcgatatgttttgagttcttagaattagtattctagttgatttcctgtcaataaacagacctaagtgatattaattatctgtagactgtttatgaaagtagacactgttcagagttgaaaatattctggtggattgaactttagcactttgtaaaatgttaatcctcactaatttcctctcttatattagttttggagaaggatctgattacattgccaagctttctatgtgttaatcttggagccagaaaggtagttctagtggaaaagagcataatatttttttaaacaaattatggtgtttacacaaattgtgggatataaatttgccaatttggtggttggttcttttattattcatccattttcttcaaaatcttatcttgatatactgaaagatcttagttatttgcctgattgggttattttatttcaaactgcagggctgagggttattggagaaactgtagtatctgccttagtccttgatgagtcttggctccggcatcctgacttttccattgcggcaaagtaataagttggacattatctcattattttatcattactgatagttccttctatcattatgctttgtaaaccgtatcaaacttcccatgtttcaggt

SEQ ID NO: 76188 - DNA, 1011 bp, Cannabis sativa
taattattgggtttatttatttgttaacgtttaacgttaacagtctgttaagttaatcgtgtaaggctagataaaaaaaaggaattgttaaaaaaatcgttaaaattaaaatagtataaggttaaatatatctatttggtgaagccttacacgattaaatatatctatttgatctaatttgtttctttgaaggattttaccatttctggttgtacttcttatggcaaatatatatttatattttttatgaatttttgctacaattaatttgtttttggccggccattgcatgagacttatagctaggtgattatattttggtgaacaattcttaaaactgacgctgacatgaattaaattacaattatcatttcaagtgtcaaccatgaagaaaaccaaatctttctcattttttatggtatatgtattcataccatatgtaaatttattattttgtatatattaacatgcttacaaggtatctctagctcacttcttatatcccgaatcagctgagctatgtcttatgttagcttgctaaatcagaactggactctaccttatgttatcttgtacagttctattttttcataaagcagagactagttcccataaaatctttacaaagttttaacttttaaggagatagtcttcttaacttgggcttggtggcaaggtataactatataacatggcttaaggctttatttttcatgttattttcagagacaaaaggaccacatgagttaactttgcattgattgttaattaaagtattagtatatatcttttatattgttgcatagcagctaaatataattaagaattacacagatggcaaaactaatgagtaaagaaactaaattattcaaactaatatgctgaatgatttttatcaaagatttgactgcaaaaaaatatatattatcaaaattgtatatatattatgtaataatgaatttgtgaaccaaattatcataaagtatgtcatgattttaattttaacattat

SEQ ID NO: 76189 - DNA, 665 bp, Cannabis sativa
gttaaagcacttccttggcattgaaattgctaaaactaaacaaggcatttttatatcccaaagatactatgttttgcaactgttggaagacttgggacaattgggatgtaaacctggcaatacaccaatgaaagtgaatttggatctcattcgagatggagaagaaaaactggctgatccaaaactatatagaagagttacaatacttaagaatcactagacctgatttagcctacacagttaataagctaagtcagttcctagtcactcccaaagtcacacacatgaatgttgcacaaagggctcctcagtatgttaaaagttctcttggacaggggctattctatcctgttgattctaaaatcaaactcgaggcatacactgatgcagattgggcagcatgtatggataccaaaagatcaacaactggcttttgtgtgtttgttggaagatctctgatatcgtggaagagcaagaaacaacacacagtctcaagatcctcaacagaagctgagtacaaaacaatgtcaaacaccatatgtgaactggtttggctactttccttgttgcaggagataaagatttagcataggggtcctgctatactacactatgataataaagctactcaacaaattgtagccaaccccgtgttccatgaaaga

SEQ ID NO: 76190 - DNA, 856 bp, Cannabis sativa
ttttttaattgaataattaaatttgaatttgaacttaaaactcgtataattgatcacagtttgattgtatttatcaaatttgagtagaggataagattttattctattcttaagtaaatatttttatatataagaatatacttatttgataccttgtattttttaaaaaatcttgaacaataaatttggtatctttgtttttaatatgtttagttataatattttaaaattatacatatttaatactttatggttaaatttgatcaataaaattatattaatctaaccatagttaaataattaactttgaatataaaacatataaataaaaattgatcgaatttgagttgagatataacaaataaaacagagtgcaattttttattaatattattattatttcttttccataagtcacataaaaatatgggatatgaccacttaagttattgggtacttagtttttttggttgaatttttatgagaatgttatagtaaaaagaattgtatggagtagaggatgattcttctagtttattcatttattttgaaaaaaacaatgaatcaatgatgggattgagagtgtaaaaaaagatagatagagacagcatgagagttatgtataaaaaatttatgtgattgattgagattggtgtgaagagtgagtgagtgagtgagtggggctactttgtctcttttactttggtgatttttccttttagtcaaaatttgagatacccaaatatgaattcttatgatttgtgtagggacagggaaaaatcacacagagaggactgtagccattgctgttggaggggttgcagctttgggttttttaattgtttgtttattgttt

SEQ ID NO: 76191 - DNA, 2335 bp, Cannabis sativa
gcacaatttataacactgaagtggccaacacattgaaggaacgaatctgcattcatcaggaatctgcgaatagtagacaaaaagtataaatataaaaccataaaatgaaccagaagagagtgagtggtcaagtttaagtatattattagaccagaataagcatttcaaaccagtactgaatttctagaacttttcaagtaacaattggcaattgtaaacaaattaaattatgataataactaaattgtggtattctgcagtacatataaaaagaggggtggttggtcttaggatcttttctgcagcctcatactcctaaagctatatcaccagtcacagctcgagagtcgagactgaaggaatttagcacaaaaaaacttttcttgaacccccggaacattcatcacacatcatcattgcaagctgattaaataaaatagatcagtgacaacctcatcgaacaggttgatcctaacattcttagtttaagaaaattacataatgaagaattaggaacgccaatgacttatttaagagcaaagattgaaaaacctacagctaaacccacatgtaatagcttatcaaatcaaacaagttataaattcaaagccaatatcagtatgtatctctaaattaatgaattctctcagaacatgacattttttatatataagaaaacaaaaatctactgtttcgaatgatgtttgaatgattactctcaaaaataaacctatgtcacccgatccattaataggatatcaccctataatttaaaagcttgagaatgttaagaaaccgtgccactccatcttcgcttcttgaccttcatctagtcttgtcttggcctacaacataagaagaggagtggtccttttcactaacaatacaggatcaaattactaattaaaagtagaaagggagaaagggatgcaacaccagaaaaccagtaggcttgactaggaaatctagccatggaaaaatgggcaaaggaatggaagaagtaaagatcataaaatagttatataaaaattctaatgaagataatctccatgtcagcatcgccgatgcatatcatgtgaatcactcctactgtttaatttaattgttttttcttccagtacttcattataaaatccactattacaatcgttaacttaccagaaaaatgagaaggaagaaaatgacatcaaggggtcctacaaatgttggctagatacctaattcaaggggaaaaaacacttgattaagagccttagaagcaaagctaggttttgatgaaaacaaggaacaagactactgcacccaagaaaatatgcaacattttaggaacctagatatctaagaagaggaaagctgggaccaaagatgatcccgcaataccaaatctatagattactctctttgttagccaaaacgaggttatacacgtgacactatctctattcaagaagatcagtactataggtgcattgatgccctaagcaaagttgcattaacaatgaaacaaaataaacttttccttgacaaaaccagtccaataagtataaatgatgaagaagatcaattaattactggattcctataacaaaaatctctgccgatagttaaaatatactcatttgatttgcaaggagggtgctaaacaaattcaattcgtgccataagacaaggaccccaacctttcgctcggattataattactacacaaactaaaattccatggtgaattccgaaattcagtagaaataactattaactcactcattcaattctttcccaaagtgttattcaattaccatctgaacgttggttttcactctctatgttcttatatgattatccttaagttcaacctatataagagcatctgaacagtcagggacatatcactaaacaacctattgggctaaaaattcacaatcatatagagctagggatacgcaatcattatgcaacaacaaatacaagtctaaaggaaaccatctagtaaactaaaacatattcaaccacgaatataaaatttatttatattgataaaatgttaataccaaatttgtgaagagtttaaagttcaaacaccttctggaagccaaccacaactgcgaggagtgacggaaagcattgaagtcatcaaagctgaagcagtggcagtgtggtaaggcaacatcgactctaagcagaagctcaactcaacgggacaccttcaatagaaaatcaacattactattatgtttggttgctaagaaagtgtgagaaattagaaatgacacttaaacattacaatttcggagatattgatgcaattatgattacagatacctgagagagcgttgag

SEQ ID NO: 76192 - DNA, 797 bp, Cannabis sativa
aatattgtgtggcagtatttttgtaaaatttatctaaaattttagtatttttgtaaaactccttaatttttttcaaaaagcatgttttaactttttttttaaattgtgccaaacttatcgttgatgttgttggtgcaatacaaaacttggtatcaaggttggagattgctttagttccttaagaaaaaaaatcaatcaataaaaagagagaaattaactacttaattattattttgagagctccattatttttcttatcgaaaactttgatcacgtgctttttttcaattcaagacaaagcccacttttaactgttatcgtgtttgcacacatacacgtgcatatagcacgattttcatcttgttgaccttcgtatatatggaaagagaaatgttaaagggaattagtagtgcttagcatttttttatttgtcaatatcgccctattggtccaactaaatatcgagtcctatataatttaatataatagtttttaaggagtatcgctagctaatcgtaacacgacatatcgagaaggtgctaagaagtagtggtgcctaatagcaatgttcatatgaaaagagcattcttattaagtatcagtagtgtttagcaccttcttgacatgttctgttataattgactagcaataatccttaaaaattattatattaaactatatgagatctgatatttagttggactaatagcgatattgacacataaaaaatgtttaataccacttataccctttaacatttttcatatgaaaagatcccacgtgtgtctgacgtggca

SEQ ID NO: 76193 - DNA, 651 bp, Cannabis sativa
gtgaatagtacccaaatttattagacgcgtcgttttttaaaaaacgacactaataatatataattagcgtcatttcttaaatgacaataaaaagtaaaccgacgaaaaaaccaaaaattgttgaaaacttcttttattttgcgtctgttattaactgtggagtattatgtttgcgagggtttaaaagtgatgcaaaataaaaatgtgagagatataaacagacgaaaatttaataaatatcctaaaactcttcgactttaaactcttcgaccctaaattattcacatccaaccctaatctcttcgactacacacagcgaaaccccagggggtgggcagttcttctgcttctcggttgttctgcttccgttaatggcagctctcgttttcgatttcctgcctttcgttgcttctcctcctccgtagattcccgatcgttccccaatcaaacccctaatcaacacaaacaccaccatcaccataagtttcaaaacactagctcttcagatttagcttcgtccacgtcctcgtcttcggattggattgttgaggatgcttcccaccatcgcagccaaaaccagataccggactaccaagaggagcaagctagggtgcttcgtgcttccctttgctgtttatctgctcttcatag

SEQ ID NO: 76194 - DNA, 650 bp, Cannabis sativa
tctctctctctctctctcacgccccatagggcttttcgctttatctctcacacgcctatgaggcaatctcaccccctcattagagatctatttattgattcatgttttgtatccttatagagagttatatcagaccccacctatagcaatctgaatagtattatctctaggtattaatacaacaaaaagaggagtaggtcattacccgctatcacaagggagtcgaacctctataacaaatctctgtgtttatatttttttgttgtttgtgtaacatgtggcaagcattagatctatacgaccatactgtcagttgagcatttttcggagtcagcaaatatgaataaaaatatgtaggataaaaataaaaagtataaattttatggggacaaatataaaaatttgtaaggacatatattaaaaaaaaaaacttatttttatggagtcaaaatataacatacttaaaaatttatacacaaaatttatatgaacaaaaaactgaggggaggcaaataaccccacatgccccctttcctctgccattggttttatctacttcagcatttaagagaaatttttagtttaattttttttttcataattatgtacactatagttttttttaggattacttataaattttttaggaa

SEQ ID NO: 76195 - DNA, 1192 bp, Cannabis sativa
ttcagtaccagtttcattattccgaatttaattaatcacttaattaaataataaaactgggaacattaaaatacggaatttcaactttgtcaaaaaaaaaatatagtgattttttaataaagttaattttgattaaggtgggttaggtctgtgtctagctagagcaatctaagcagtttggaaatttaatttgggtgaaaaattaaaattaggctttttatttttattttcttttttaaaaaagaaatctttcatgaattctttttaatatttatagtaaaattatacatacttagtttttttttaaaaaaaaatagaataaataagaattttagaatgtattctgactaaggttttataagtttttttttttttttcaaatgaatgttcatgttataaaaaatatatttattatattataataaatataaagaaaaaaagaaacaacatgcctttaaatataagggccttttgctataaactaagttacttaatgtctttatctattttttttccttttccgtctcttgtgttactctttttctctctttattgttttttttttcttatttctctctttttttttttcaaactttaaaaataatttctcatcacgtcgtgactcaaatgagtttctaaaaatattattgcgatctactcttcaacgtaaacattttaagatgtaggaaacatgttttttttttttttttgctatttttaaaaaataaaccatttagtttgtaatatagagattaattactgttttataattcttttttaaatcttagttaacattcattttagaattttgttaattgaattacattatattatatgataactaattaactttcaaaataataaaaagatatataaaataatcagtatataaaaataatagcttgttatattacatgacaactcattagtttcgaaaatatttttttaaggttacctaaatgtattttaaattaaatctaccataatataacttaaaaataactaattagttactaaaatgtatacaaataaatttttaaagagtaaccaaaacatatctcaaattatatgatataaaaataaagtttttatatatatatatatatatataaacgtaactaattagtttcttgtcaacactattagtaaccaaaaagttacttttaaaaatgcaagaaaattaaaaaaaaaa

SEQ ID NO: 76196 - DNA, 703 bp, Cannabis sativa
tttgttgtaactaaaagtaaaattttctgacgacacacaatataccaaatatataaggctttgacatttgttttttgtattagccaataataacacttttggtaaggctaacaaaaggagtcagacacgataacataatttaaaacctgcataaaagttagtggatttggatttgtcttaaatgggtttggattgatactactaatatgaagctaacttgttattgacctatttaaagttattttaatattttaacagttcataaatgggtcataaacgtattaaatatgtcatcaacgtattaacatgtcattaattaattaattaatgttgacaagtttcaaaaaaaaaatctaattacaaatgttttatagaggtcgtgttgtgtcaacccgtttataaatgggtcgtgtttaaattttatttttttgactcgattgttaaacgggtcatcttcaggtcgaacatatgcctataatacacgagtctcgacatgacaagaatacaacccgcaaacatgaattgacaccctaactttttgtcatgatatctatatggaaagaatattataattgggactaaatatattatattcaatattacattaatatggaaaaaatattattataaatttttagttgggtttgatttttctctcttggggtcctaaaatggataaaaaaattgtaaacaatcaagatat

SEQ ID NO: 76197 - DNA, 1310 bp, Cannabis sativa
tgcacaagaaaccgataagcagtactattaagtgcataaccaatgaaaatgcaatcaacagtttttggaccaatctttaccattttaggtaaaggtacagccactttggcaagacacccccacactcttaagtatttgaaagaaggcttagttcctttccataactcatgaggggtcttatcctctttctttttgggtaccttatttaaaaggtgattagcacaggacagcttctccccacatgttctgagggcaatccagaacttaatttaacatcgcattcatcatttcttttaatgtgcgatttttccgttctgcaactccattttgctgaggcgaataaggtgccgtggtttcatgaattattccatgtttagcacaaacttcaccaaacggtgattcatactcaccacctcggtcacttcttaacaccttaatctttttgtttagttgattctcaacttcacttttatagagtataaatttctctatagcctcgtctttgcttttcagcaaatatacatagcagtatttcgtgctatcatcgacaaaagtaataaaatacttattgcctccccttgtttgaacaaattttaaatcacatatatcactatgtattaaatcaaggggttcattattcctttcaacatttttgaaggaagaccttgttagttttgcctcaacacaggtttcacatttatgatttaaatcaatgtggaaattaggtatatgatttaagttaattaatctccgtagagtgttataattaacatgtcctagtctaccatgccaaatattggaagactcaagcaaataagtagaagcgttattaactttattgataactggtttaacaaccattacattgagtttaaacaacccatcagttacataaccccttcctacatacattccacttttagacaacactaccttatctgactcaattaccatacgaaatccatgtttactcaaaagtgaaccagatacaagattcttacggatttctggtacatacaacaagttgttgagagtcagttcctttctagaaatcattttcaggatcactttaccttgacccattatctcagacgtggcaaagtttcccataaaaaatttctctccattattcacttgttcaagagatttgaacatactcttgtctgagcatatatggcaagtagaaccagtgtcaatcaactagtctcttggattaaacttcactaggtttacttctgagaccattgccgatagatgtatatcatcatctttagacatgtcttttaccatattggcttcacgattgttat

SEQ ID NO: 76198 - DNA, 2005 bp, Cannabis sativa
aagatgaataaattaagacctttatggttgaatcaatttacagatgatgccaatgaatccaagaacagtatatagcttgagtaacactctcaaaattacaattgaaacctcacactaagagtcttgagatcaaacacatactcaagctcaattacaaccctccaaaattaaaattacaatcttaaaaggaaaagtaaagggatgaggtatttatacttcatcaaaacaaaacaaaaaaacaacttaactaacaacaaactaataagttgagctgtccattcttgaattggtaagaaagaaaagagccaatgcatgatcaattatttgtgatcaagtgacttgaaccacacaataaatctaccttggtttagtcacttgaatcacaaagagaaagagttgaaaccagagatatatatgcaatctgtctaaaaaaaagattagaatttgcttatgttgagcaactttaggcagtgcctaaacttgtgagctaacactctttgatcttcttggcttgaaccttgccttgtgctgctatacccttgacccataaatcttaaagcttctttgaatgcttctgataactctatagtatagagttatttttgatgctttaaaactgaaaatattgtgaggagagtagtgaaatgtgtttggttacttaaattttaagtagttttagtttaatttctatttaggaagctaacttttgagtcttgtaaaaattattgtgttaagtgtgtttttttttaattaaatgtttgcttatttgttgtgggaaagaagaattaatttgctaagctagatcttgttccggaagggctaaatctagtagttcaacttgaatggagcaagtgaaaacctagatttaggttttctttgtaagtgaaataggaatatttcatctaccttgcataacctaaaaattgatgcatatttagtgttctataatcttgttctataatctggtttgaaatctggtttgatataggaatatatgaaactaggtgttgcatccatgaattcagcttcagcgattgaaggggaaccatttccatcaattgagattgaaacagtttaaagtgtggagccaggagtattataacacaattttggaatcattcattccaaatttctatagaattctttacaaatagtctttctgactatgccttaatactcccggggtactctaatcaaactcaatatctaagattttttttgcctttccaagatctttcatctcaaattcagtacttaattgtatttttagttttgatatctcactattatctttttcaataatgagtatatcatccatatatagcaataaaaaattaaatacatactcatcaaagtatatacaacgatcaaacttatttttgttgaagccaatttgattgatgaagttgtcaaatttgatattctattgtctgggagcttgcttaagtccatacagtgatctttttagctagaaaacctcatctgaatttccattgtcaaagctgtcatattgaaccatgtagatatcctcttctagctcaccacataatccatttggtccacctaaatgagatctcattttgctacaagtcttgctttatatctctcttcttcaacacctgatatacctttattttcttgtaaacccaactgatcagcctttttaccaaaaggtcttttgacaatgatccatgtcttctgtttagggtctagttgatcttctagacctatctctgacaaggtgataattgtcaaggtcagcttaatcacttaattactcaagcaaagttttattctgttgggatgtgtccttaactgtattatgcctacctatttcttccactactcaaaaccattataaggtcaatcactttagacaaataatattgatataataacaatatctcaatatattaatattgtttgaatatgtactgtatttttttctcaattaatatatggaccttatataaaatttgtgtaaattggaaaaaaaaaaaaaaaa

SEQ ID NO: 76199 - DNA, 611 bp, Cannabis sativa
ttttttttttctttttaagctcaaatccaatcaaattctaaattgtaaaataaacatcaaaaatatcaattaggtaatttttagatttgattgtaattaattaaaaaagatatttgattttaattagcaatatttattatttatttatgaatcaatccataaatcgtgactagtaaaaagaaactaaaatggtttgtattcatgggggagttattggcatataaatacgtttttcataatcatctcaaaaaaaaaaaaaaatatcagattactggatcttagtaacttgatagttataaataatttattattattattgtttttttaatgtgcgtattttttttttttgaataatttattgtactgaaaataggattttgatcgtaaatgtgtacattttaaataatttatggtactaaaaataaaattttggtaattaaataaaggaaaatttaaaaaaatattgaaattttagttaacttttacaaaaatagtgtgagacgtaaaacagaacaactcaaaataacagtaaaataattaaaaaacaatcgtgaacaacagtaaaaacttaacatagtacacagttgaaacttacacagtatttaaaaaaa

SEQ ID NO: 76200 - DNA, 503 bp, Cannabis sativa
tctctctctctctctcttgtttcaaatatttgtgggctctcttcaacaagttgtgtgactccatcaaagattcgatggtctttctgaggcagtgtcagattcttgcaaggtcaatgatagtgtagctttgtttggatccagagtaggctcttatattaggtcttctcgggttggaactatgttgtaggggttcacaaagaagttgcacatcaatacgatagtgtttcaagaatgaagagggtgacaactatttgagatttaggttatggatctgctgtgtttttatttttttattttgttgtttctgaaaacggtgttcttacatcaaataatttatttcttcaataaaaaatataactgtaacaacttgtagtaacataatagaaacatgttactgcaaaatatgaacttgtagtaacgagaaacaaatataaataagttgtgcagaatttaagttaacacaagataattatataatattcttcttattaggctgaacctta

SEQ ID NO: 76201 - DNA, 1124 bp, Cannabis sativa
gatatcatacaattaaaggttacccaaataagttgaattattgagtatagagaagcttcatgtatctcaccaaataatcccatctggactacttaattggttgaaatgaagattagattagacttatgaaagatattattttaattatatggactaattatttaaattttgaatctgtaaaagtattgtgtgtttgagatgactctactttgagagattgtttgcatgtgattaggtctaatctagatcaagagctgtacaacttaaatgttcaaaaagaaaagattttttacaaaataatgttgatctcaaagagataaggtaaactattggaggaagaaaaaaataaataaaaaaactcttgctgccaatatttttcacactaagactaatagtaataaagaaaataaataaagattagtttagtttttcttcccccttattaatataaaccaaacagtagaagtgagacttagattcaagcaagatattatttataaggcgagcaaagcagtatcaagggaagttacacaagttttatttaattaaagctctaaaatcaacatataaagatatagagttaaagaatgattttctttgtttccattcttaaaatactgtgctatattaatttattacccatggaagaatttacacgtgtgttcaaaagattccagggatgtttatatcagattccagctaattttcttgtatcttaaggatcgtacatatcagatctgttgtgatcaaagatggtcagttttgattgctacacaaaatttacgaaattgaaaaaaaaaattataatatgtacttttaacacctctttcattcctctcttgggatccatctactccaccataggctcttcctgcgtctgttaagctcatcaacactctcattcagagtctttatgatctttctctgaaaccgaagagcagaagcaagagcattcctttgaggactagccttcttttttggctcaattttctgatcaaactaaataacaatttaaaaaggattagagatccttattgtattacatactcaaacataaatcaaattatataactccttaagaaaagaatcatgggtttatttatatgtagtagtagtagtagtag

SEQ ID NO: 76202 - DNA, 1364 bp, Cannabis sativa
aatctcggacgtgtttgagttttgtgcgcgggacacctaatgcatgcaaaatgagtttttcgcatattttgagttttgataattatgaatgacttgcatagctaataagctatttgtttccacaacaacatttaggaaagattgagatttaagccagcttagaaccttttttatcaaagaggctcgaccacaacttgttcaactctgctggtacaaagctgattaccagccaccaaaaattgagtcgtcgagtctcgcaccacgaagccaaaaccaaatcttctagtttccttaaaaatagcactatttacattgaccataatactatttttcaattgatttgctccaccgctcagcaccattacccacaagcaacagattaaacgatggagtaatgcttactccctaagctttaagctactatcaagaaactaaaacacaaacaacgccttctgcttccatgctaggtcattacaagcccacaaaatagcctaacaaatcatagccaccgagccaaacactccacaaaaactaattgcctcataatctccttaaactaacctctaaaagaccttacttctttatcaaacaaataaaagtctgcatattgccaacattcctaagcaaagaaccaatgataatttttttcaccataaattccacacaaaggacaaactaaatccacctccactcttttatctcgcattctccttttagtggggagacaattagaattttttctctacaattaatccttcactttagaagaaactttcaattgccaaggacatcttcaaatttcaacatcaccatcaccactcgcatgctcattagtcatttgaaccaaattataagcactcttaacagagtactattcatgatgttcatccacccaaaaccatgagtccccctcaacttgatcactaagcgagatactgaagataatcttcgcatcttgagtataaaatatcatgaaccacctcatcatcccaagggtgccacctcacttaaaacaaactactaattacatgatgttctagccccctcatatcagatgaaatataaggatgatcctccatagaaaggcaaagatcaaccaaaaatctaaataatcacccgagcctacacacttcctcaagctcccttgattaattcaaaagctttccacacactcatccaaacctcctctcttcaactcgacaaaatacacgaaaagagaacaatgcctacaccagtctaagttagttgtgtccaagtttgcaaaagagagagattctgtgtaaggaaagaaaccagaaagaacaaggaaacaccattgtctttgctgaattctcagctggttttttgagtggattgagggttgt

SEQ ID NO: 76203 - DNA, 3191 bp, Cannabis sativa
aagttctaaaatataacttaagtaatattaccgtcaaaaattaaacttaaatatttatctagaactgaaaattaaacttaaatatttatgccgcaaattacttaatccatgtctccgctctgttccccatttagatagaaaattcccgcccaattaggagcgagtatccacaggaattccccgtctaaatttttatgctgaataataattttagaaaaaaaaaaattgcacttagtttaaacaaattattatttcaatcacgtgaatttcaataatatcttattaaaatcaaacaatgttggaagttccattttgaccattttaataattgaagttacccttattttgcaactaatataaaactactctcatagtttatagaaatagacataaatattggtcttacattaaaaaaagttcaaagtcataacactcataacttaactaactaatctaaaactatttaaagatacaaaattgatgatatgcaaaaaaatcactcttccatgctaaatgaagcctttggttgaagacactatatatgttattattcacagattctcttctttcgaatgagaggcgaaggcgtattcaacttcacgattttcttcgtcttctttgacaaacggaaggctgccggggctttcttcctccataagtaaagtaatcggtgtttgtggagggtacttatccaagatgaagtcgatttcttcaccactgatttcgttctgattaagtagaacctacatttgcaagtaaatttagtttaattggctttttcaccacataacattatttcaatagctgttgaaaccgagctggtttacctaccttcacggttttaagtagcgctgcatggtgcctacgaagcaaagaaagtgtcttatcatacatgtcgtgtatcagctcctcggttctttgagcgatttcatcatctagattgaagttgagtggcggttctattagaccatagtcatcgtaaagtgatccttcaaagtccaatctcggtccaacgaacttaggcttctttctccaaggcggtggttcaccatgtatccgcatggggttctccaaattccatctgtaaaaaaaggatgaaccaataatgcattagagcattgataggaaatgtgaaggaattatgtacagaggaataggagctgactgacattgttaaaattttccgagcaagccagttggcatctgcaaggtattcaaccgacgcccttgatgtgtcccgtccatagattacctcttcggctgccctccctcctagtagaacctgtttagatcaacacaatgagattacatgatgttgtttgagacgaaactattcaatttaaaatttagccaacctgaaggcgatgcagcaactgtggtcggcgctcaaacatgtatgattcatcatcaagccgatgaaacacaacttgtgataatgtctgcaaggatcacttccaaaaattacacagtttacaagtaatcaaaaacatacagtcaatagtgaaataatcatcataagcatcaggctatatgaaatagagagctttgtaaatggttagcggtttttcataataacaacgattaaattacaatatgtgaaactcgatacttttattacaccaatagcagtatgacatatcatggttatttttgcgggcaatctccagaaaccttataagcattgaaggtttagtaagaaaagaattgtaaacaaattaagttttgtaatacaaaggagaagaataaggacctgaccacgtgggacaattgaaatgcgatcgcaacgttcaatttctgcattctcgtggcgccttagcaaatgggaagtcattgcaactcccacttcagtagaagcacgacgacattgtccttgatgacccaactctattccaacacgtttgggacctaccgttagtctatcaactgcatcatccatgtccgactgaagaattgaattatgccccttcctaaccgctacaagtgcagcctcttgaacaagctgagctagttttgctccggtccatcctgaaagcttttccttttaaatgaatcggttgctatcattaaaccaacaaacaacaatagagcagcaaacaaaataataccaggcaagttctgtgcatagctcgatagatcgagagattcagacattttcactttgctcgcatgaattttcaaaatctccaatctcccctttgcaggaggaggccgaatttttatctacaagacaaaagccgaaataataattaacacccaacccccattgacaaagcaagcataaattatagaatatataagtattttgccccgactgaattattagtgatgttaaatattctccctcaactttgaatgttagtgaaatatggaacttctgttactctttgtttgacttctgttaaataattaacaattttacccttcaaagtatgaccagtgaccactatcatattttgccccgaacttttgccattgccaaaccgagatttaagagacaaagtatgatattggtcatagtttgggggaatatatttaacatcgataataatttagggggcatgatttttttcagctaaagttagttcaggaggcaaaatacctatttattctagattataaataaggatatcgagtcatcggtagagtccaaatctagttaaacagaggtgtcttacccctttctgtttcttgcaaagctttacagatatgtaagaaagttttcattcaataatagaagcaaaccttgcgatcaaatcgacctggtcggagaagagcagggtctaacaaatccctacgatttgtagcacccaaaaatataacaccttttccagtatcgaacccatcaagttctatcaatagctggttcaatgtagtctccctctcttgagttgcagcattataaagctgatctgaggattccttgaaaataccttgccgcctatacaaacaatataagttctcagattatgaatgtgcaaacgaaatttatcaatgtttcgtaaaagctgatcctttgccatatatttagccatcgagcttatgtctcggacgagacacattctttagaccacttagttacaatatgatcacattgcatagttcccaattaactaaagaatgatcttgaataaaatggttgcctgttatattacagttgtgattcaatgtgatacaataaggtactaaaagat

SEQ ID NO: 76204 - DNA, 1611 bp, Cannabis sativa
  modified_base (1556)..(1570): a, c, t, g, unknown or other
tatcgcaaggattgaagctcaaagatcaatggttagaggtatttcgatctttcattgcatatacatttcgatatgtttatagtttttctgcattacatatcatttatctatatgatgtattcatatactatattatagtccagcagttggtatcagagaggtttaatctctatcttgattgtatttgagtttcattcatatatatatattcatattcggtgtttatatatatattcatatacggttctatgtatattttatatatgtgtatattttttatttcattacgtatatatatgtgttcatacattcattatatcatatttatttatatatatataaatactatctacaaatatacatatatacatttcattcatgtttatatatatactgtacaatattttttcggtatatatatgtatatatgtatatatatttatatatgcattatatattatgtatcaatacattcatatattaatatagattgttctaagcatgaaaactcattttgaaaaataaagaaattccaaaattttttggaatatattttttggacccgaaaatttttagtgattttaaagtctttgtttgacgtgttttcgatcatgaaatctatatgaatgtcttagtttttgcatttagattcatttgaattgatttgggcctttttggtagttggaaatgtcttttctgatcgggtttgggtcgggtccgtcggacccgcgtggctgaaaaacgggtcaaacgacctagtttggctgaagaagacgacccaaacgacatgtcgttttccacaatggaaaacgacatgtcatttttcatgatgttgcagctgtcatttgtggtaaacgacatgtcgtttttcgtcttgtgaggcagcccttcattgagtaaaacgacatgtcgttttttccccttgggaaaaagacgtcattttgtcgtatgctcagcccttcggaattgaaaaaatgacatgtcattttgctttttgcaaaaaacgacatgtcatttaggtagtgtaattttcaaaaaaaaaaaaaaagaaaaattctgaatttatttataaatttttatttatttggaatattaattatttttctattttgtgttaatttagtcaataaattgcatttagtcaattttctatttttgtttaatacatatatttagtttaaattgaaagtggaaatttgtttaatttagtaatttattacatgatttatttaggtaggtaataattatgctaatttgtataattgtgtatttaattatatattaccaaatttatgcaatttattgtctaaattaattttgaaaaaatctgccagtaattacatattgaggaatttgcatttaattaattatcatacattaattgaattaatttgtatttttttttgacaaatttgtgtttaacgtaattaatttagatgtgtatgattttaaatgctatacataaattctttttatagtgctagatgtatttgaaaatattgaaacattaagataggttgaatattttatttagtacattaagtttcataaaactnnnnnnnnnnnnnnntaaaatattcataaaattttataaaatgaaaaatatgaata

SEQ ID NO: 76205 - DNA, 538 bp, Cannabis sativa
atggggatatcaatgcagtcaatcggataacagcctctttttctctcaaatcaatggaaagttgcttctaattttaatatacgtggatgatattttaattacaggtgcagacaaggctgctgtccacaacctcatctcccaactacatcaaactttctccctcaaagctctcggttcagtaagatattttctgggatttgaggttcatcgcactgattcagccatctatctaacacaacaaaaatatactcgggacttattggcaaggactcaacttcttgactccaaaccacagtcaacacccatgtgttccacatccaaactgtcagccaagtcagggactctattggacaatccaactcactaccgaagcatcataggggctctccaatacctcaccatgtctcggcctgacatctccttttctgtcaataaactcagccaatatatgcaagctcccactactgaacattggggagcctgcaaaagaatcctcagatatttagctggctcaattacctctggtttagtcttcaaa

SEQ ID NO: 76206 - DNA, 2171 bp, Cannabis sativa
tagcatttttcttaatcaagatatccagatctgactttgactgaacgtgatagaattatcaaaaagtcaatatatatatatatatatgtcaacgtacattgccgaattggacaacctttgattattgatttgtaaagtcataaaagaaactccccccaaacaaatattatatgatcaatcaatcgaaacacaaaatatcatttgtattcatcgcagttcattttatatataaaccaaaaaatttagttctagccatatggttctacggggttgattggttaggacccttgaagaacgcgatgcagccatgtgactcaaagttatcattttaagtaggactgcaacattgttcctatataattaaactggttctgtataggcaataatccccttccccttacataaaccaaaatatacataaacagaaaccttttaaaaaaataataacatacgtaaatgtatatacggtcatcaataatggaatacatggacataactgctaacacataatcaaacatctaaacaagaacataaatgtttatatatagatcaataacatgcaagacatacgtacacaacgaaattgcccctatacatacaatttaatttatcatatatatacatagtgatcaatcaatagtgcaagacataaacattgtactccacaattgcgtcaaaagtagtggcgttagccacataagtcttggctagagcaaagcctcttgcgaacctaaaaactccacttccaccaacgataggcatctctcttacgcctgaaaggacggcgttgcgtcccaaaatgctaagagtgctacccttatattttccttccgtgaaaacgtagtttagagccattaaaagacttaactctgtctgtgatgtcgaggcatatattccttgtgcgctcccaattttcttggaggttggctcaggtcccacagtcagtggatcgtcacatacaaccacgaatccgaaactcacagccgaggtgttggttgtcttggcttcggcaactcggatggccgtagggtttggaccgctgaccacgtcgtgaaagtagaagtgaagatgagttagtttctcttgctttttattaaggcctagagttttttggggatttaagtttcttgagtaagtgtagtcatcgtgtgcggtggtgaggctcaagattgatgagtgaatagttagaaagagaatgagtatgattagggttgtgttgtgatgagtttcgtccatggtggagatgagatggagcttaattaggtgccttaggaagagacttgtatatgttaattatgcgtaatgcttatgaattgaggttaaacaaattggttttttactttataacttatgtttaatgtttatatatagcaagtgtataattttttatttggtaagatgagatatatgaattgttaaagtttgttcatataattttatatataaaaagttgttcatattatatttataaaagttgttcatatatatatagtttataggaaactatacagaaagagaattaattaggcaccatgactatattatgaatgctctattctacaagaaaattagaggccacaatactagcaatatataaattgactctctaaagaaataaaattcatacatatatttattatatatgtggcactgtaagaaatttaattttttttgggacaactaattcataatggatctggtcatcatgctcgattgagcaggaatggctacttttggaagtttcttgttctagccactcaatactttctaaaatagcgggaacttttgataaagtacggtggttagaactatttgagttcaatgagccattctgagtaccagatgaactgactctagagctcagattagcattaaaaaggttttcttccgaagtaggctaaataaaggcattcaatgccatagctaattctaaatcctcaattggtggtgagaatgcttgttgatgaactgcgacttgatcaatatgcaaaaaatgtaggatgtccctagttgataaattttaatcactacaagaaaataaccttttgccgacgaattttctcccctgcaaaactaggcataggccgtcgatagagttttgtcggcgaacttatgcatcgacgacaaaggctacccgagataattggtccacataagtagttttgtcggtg

SEQ ID NO: 76207 - DNA, 774 bp, Cannabis sativa
acccatgaaagaagcagagaaaaaagttgaagaagaagaagaaccaaagctgaagctttactctagccatggaagctcatgaaccagaagaagaagaagaagaagaagaagaagaagaagcattcatgatgttgtaaggtgggaacttataagggttattagtagtaccaggaggagtagaagatggagttggattaaggcatggattgcggtaaagggtgggggccatgattttatatgccatgcagcgcagtgttttctactttttctttttgttgctcattattattgtcaatttggtattgcttcttgcaatcgatgcctgcctttggtgttgcttttcataacaatagcacattctgatagtgattgtgtaaaataaggagagagtgctttttcttttctttttttcttctggtggttgaatgttgaaaaagaaagacttttggtcaccgtgactaccggtgcgtttgtctttgtgaatgaacttgacttgacttctttttagaatcacgattcacgggtgaatttactatgcaagctcttttaactaggatagttcatggtttaatcaaagaggatttttgtcaaattatggactattaaaatcttataacgataaaattgcttccgaaaatttaaacaataaaactataatatttttaaataacgcacaaaactcaattattacctgaaacattacaacacaaatgatgcatatgttatataaattaacaattaacccaagatctatttgtatataacatagaacac

SEQ ID NO: 76208 - DNA, 3611 bp, Cannabis sativa
  modified_base (545)..(549): a, c, t, g, unknown or other
agagagagagagagagagaggccatgtgctttagctgaaaggacagtgaaagtgattctcctatacatattcagcaaagactttggaaactaacaaattttcaatatcattttactactttccctttcccattttagcaaaacacaatttcttaaaattgggccaatggtccaattaacctctatggccgaattttttatgaccaggaatatgttatgtaaccaaacaccaaatcctattcacttttttttttctatttttttttttatgtaaataccatttgctaaaaaataaaaacaattcatttctctatttttcttaaacgaattaatttctctattctaaaccctattattaaagaattttcccaataatcttaataaataattcattttctatctatagtttttctcttctttttttggcactttgatattttttttcctatatcaatatttttatttgaatagaaaatatatatataaagaaaattatttttatatataataaagaaaaagaagagggaaaagagagagagagagagnnnnngagagagagagagagggagttaagtgatgatgaaaaatcagagagaatcaaaaccatattgttggttttggaggtacaaaagcagcacatctctacttggctctgcaacaaaatctctgcttcagaccaaattataacaatttccttaaaaccaatcacaacaacccctctctctctctctctctctctctctctcatgtagagagcttaagctcttctttttctttataatggaaaatgaaggaaaacgaaaagttaaagaagaagagctgactaaagaggacaaggacgaagaagaagaaataagtaaactggttttgggtataatggaaggttatagtgacactgtcattccaccattgtcacactttaagccttcatcactacttgaatcctccgccattgttgttgctcaacaggattcaacctccaaaaagcgagctagaacaaaatcaattcctgaaagagacagaagaatgaagatgaatgagagctatgatcttcttcaatccttggtcccgggtattcttcccaaggttaattttcctttccttatactatcttttcaagcattggactcgattttctcaattgggttttctctattttcttcttttgaatttaatttgatttcatttgaatatgcaatgagtaataggtacttctacaatcttctctaatatttttttattgggtgttacttgatcagaaagaaaaagagattttgttgatttgtaagcgattttgattaatgggttctcttctcttctcttcaattagtttattttcaatactaaatttgatattaccaatcacaatgccaagaacttctcaccatttttgcatattctgttttcatatttttctcattttaattttattgttttgtttaggcttcaaaggataaggttcttcatgcagcaactgagtacataaaataccttgaagagaagaagaaaatcttggaaaagctcaaggaatcctcttcttcttcttcctcctcaagatcaatggcagaaaaagggaagctgattttgccatgtacaagtagtagtaccagaaatttatctgtgactgttacattatctggtaacattgccttgtttgcaatacagagcctaaaacgacagggtttagtgactcaaattttcatggtgttccataagcacttggttgaagttttggctgcaaatgttgtagtccaccatacccaattgactattactgtcacagcttttgtgaatggtaatggaagcaatattgtagaggagattaagagagacattttgatgttatagagtttgaattttaagggtatatagggatatgaatctttgtggagtgtggttcttaggacagtgacaagaaattacttaacaaaagaacttgttcatattaacaaaaacaggctaatgacaggagttaatggattcaatattctcaaggccatgtgaggttgagcctcaagctgaatctttcttattttgtttttatttccctttttaattatagcatagtaaaaaaagtaccattctaccagtatacgaacagttctgaaaatttaaaggacctatatttgtactgctggtaaaagtgtctgagacccaaatcattgccattgcaaatggtccaaatttgtaaaatgaacttgtcgtaaaattaggactaaagtgcagaataaaaaacaactaaacttaatcaacaaacaattagtaatgacaagattaattgatcacaaatacgaatagaagaaaacagggatgaacaaagtattaaaaatttagaaacgattaaaccagtaaaacaataaaatcaacaccaagttatatactagttcaagtcttatagattgatgtgatctatggctctactcaaattctagaacaccaccaaatcctctttattgattgagcaagaataagggtacaatacagtcgagatcgattctctgttggattttcttcatacaaaactcaaaattaatctctctcttttctctgtacctctctctctctctacctctcaatctttctctctcaagatcacctctcgaaactcgtttgaacccagtatcttgaaatgataagtgttggtggtatttataggctcaagaaaaagatcctaagtcggtggctacaactgataagttgttaagttggttacgccataacaaacttaacaacttcctcgaaacagaatctccacatcagcacaagacagagtgcttccggatgagacatacattcccaagacaaaggaccgaagcgtatgctgaagggacttcccagataggaaagagtcagttggtgtctactatatggaactcccttttaggaggaagagctagccattcgaaacttcttccggggaggactagttttcctgaagactacacctggagtggacataatagttagccttctggatggcaactatcattcaacgagacttcttccggatggactagttagttgtccagaaacatactttcgagggacaactaactttccattactagaataactttttggagatcttttcatttcgaggaattataccacagaactcttgggaactaaagaaagataatacaaaaaccattttaaaaaaaaaaaaaatacgaaaaagtgtaattaatttgcctaaaggcaacaaaagagtaacacgatcaattaaagtgtgagttgatagaaatctggagaaatgttggtgagattgtataattgtgagccacaatagttcgtttccctcttatgagcgcaactagtccagtaagtaagaacggatatgtgaccaaaaaccatacatgtaattaccaaaaatatgtacaaataacaagtcacagttatgaaatgtggtcaaactgtgacaacggagatttccaagctgagagattgaagtgttaatatgttagccacaattcaactatgtgagttacctctgggtaagagagtaacagaacttcccttgaccatatagaaaaatcataactagtactttatattttgctgaaagatcaaactccaaggtttctaatctctttatctcaaaaaaaaaaaaaa

SEQ ID NO: 76209 - DNA, 851 bp, Cannabis sativa
  modified_base (274)..(274): a, c, t, g, unknown or other
  modified_base (781)..(781): a, c, t, g, unknown or other
gatcagtgtcggtagcgaatttcgccaaaaccgacgctgaaaggccttaaaaactgcctctaaagtccaattttgtagtagtggaggtcgatgatgcaggtcttgtgatgatcacaattcttatttagaaagagttcttcgaagctccttagaatgttagcttctaacttgtcaggattgtaagcctcactgaagttaactgggtgaagttacaggaagccttcccatagcgagataggcaacttgcttactaggtctcgagccaacccgactnttacactgagtttgtacattatacactaagggctttcgcagttgatatgtgtcgcttttgtcttcctagatgtaatgtacttgatgcctcggtattcgcattcagtgacatatggtttctcgctaatatactaagcaacaatttgtatattgatccctcacataagactttacagccagcaggttacaaatatactctgatacttacgtaattaatgagttattccataaaaagcgactccatcaatccatattccttttatcctgacatgtgtcccccactgagatggtagccgaatttcgggtataacagtttctttattaataattgaatcgaaaagattacattcaaatatagaaactcccacttgcactaatatagaactatcagtacatttccattaatcctaaattcagtctgtgcttttcaaatgtagttatagttaaaactttggtaaatagattagctaagttatcttcggcatccactttctccaccagtacatcncctcttgccacatattccttgatgatatgatatttcctctctatgagtttgcttctcttgtgacttcgag

SEQ ID NO: 76210 - DNA, 1010 bp, Cannabis sativa
acttgtacccagctaattaattcaataataaagatcgaaacattgttcttgttctatttctctcatatgttatcagaagtattcttgcctactgcttccaatgacaagacctttaactcgctcccaagatggcggtcctccatccacagtcagcaaccaagcaactgacatcacgtccgatcctcatgctactcctaatctcacttcatttcctgttcctcacagaaattaagcttccaggcctcaatctccacataactcgaaaccataaatggttcaatcacaggatcagtccaccattgttgacgatcatcacaccactgctcctcaagccaatcgtcctgtcaatgacaatctttctagtcccttctttcttagcattggtgatcaccctggactcatgcttgtgtccaccatcctcaatgacaacaactatcaatcctgcaaaagaggaatcacaatagttctggttgccaagaacaagattgccttcatcgacgactctcttcctctgccagaaattagtaatccctatctcaattcttggcttagatgcaataacctggttatgtcatggttagtcaactctgtttcacaagaaattgctcaaagcattatgtattttgatttggccattgacatgtggaatgaccttgctgagagatttaacaaaggcaatggccctcggattttttagttacaaactcaactcactctattacaacaaggtgaccagtctgtatcttcctatttcactgaaatgaaatccctctgggatgagttgaaggaatttcaaccaatcactacctgcacctgtggtgcaatgaaaatctttttagattactataactagaatcaagtgcttcaattcttgaccggtcttaatgaatcttttgcttctgttcgagcttaaatcttgctcaatgaaccaatccccaatctatctcgtgtctttccatgattatacaagaagaacgtcaacgatctcttggttctgctgacacaatccc

SEQ ID NO: 76211 - DNA, 674 bp, Cannabis sativa
aaaatctcacctaagctgagccaacgatgatgttgttgatagggatgaatatcagtttgacgaagaaaccgacgaatcccatgacgacgaagccgatcgcggtacggagcgccactttggagaattctagatcacagatcaaccatgcgagaccatcaatatcaaatcgaaccaaatatatatcataaaataaattgaatcgagaaaagagagatgaatacaaaatctaagaatacctttgcgatcgggcttgtggcacctcttgacgaggcgaacactgtccttggcaaagtctctgagaggatcgattacggaatcaattgcatccatttttgtgtttctggcaaatctaaaatttgggggttttggaatttggagagagaaagaggagagagatgcgattataagatgagaaggcagtcaagtcaatttatacacgcctttatgaaataaaatgaatcctaataaaaatgtaaatatgaagcaaatttatttatttatttattttaaatgaacaattaataataacaattgtcaaaacataataaaactttggatgattttacagtgcacccttttaaaagagatgtattgatgcaccttgttttggcatctagaaaaatttttgagtctaatttttttcatattcttatatgttatagctatttaagata

SEQ ID NO: 76212 - DNA, 1042 bp, Cannabis sativa
cataattgacaaactggattcactagtacgtcttttgtacaactgagccactgtaccagtgacaactctccacataaagttactcacctttggtggaatcttcaagttccacaacatgcgccaaaacccgatagcgttatctttagaccaccccactctcaaatcttgtaaatatttattggcacttttcactgagtaccaaccctattggtcaaaactccaaaaccaacaatcatcattcaaaaaggaactaagtttaatggatagaattaactcttggtctcgcctatcaaataaattagatattatgtccaaaatcccaagccttacttgcaatgcacatgaggtttcctacagtttttccaactaaagcagggtgttcagacatcacaaatgaatttccctacatggaagccaaggttcattgagaatactgataaagtaaccatctcgtactgttttgtgtacccctgccaccaatagcgattaagcttccattatactctgccaaatgaagcttgggttcacccccaactctgcagtaagaaaagtatcgaaatagaaatatcttgccttgtagatacggctaacaagcgagtctttttgagtgagcaatctccacccatagttacccaatatagccaaattaaagtcatgaaaattacgaaagcctaaaccccctgcatgcttgtgccgacataaacgaggccaactcatccagctaatgcttctcttcttactagaatttgtttcccaccaaaacttttccataagtcctttgaattgcttgcaagtatctttaggcaataagaagacattcactgcatagttcaaaagtgcttgctctatagttttcagaagaacctccttaccaactcgtgagagtagcttaccttcccaaccaaggatacgtttcgtcattctatctgttaggtaccccaaaatagttgtctttttcctccccatagtattaggtaaccccatatacgtagtgctttcatcagcttcataaataccgattacatcacaaagtgtatctctc

SEQ ID NO: 76213 - DNA, 1983 bp, Cannabis sativa
acttgggactgcccttgtttttccatcttaacatattcatatacccaaactttgaaaacaaaaggacaacccttcaagatgtaaaaataagacatcttcttctcgttatttctcctattcttggcaacgctataaattctatttgttaaattctttcccttagcaccatttcgaagtgacctaaatgttacatcatattccaattcatctcgtggaaaattctcacactcattccatctaacaagatttatctattcaattgctgagaagaaaattagatatgaggtacaactttgcaaatttgacagcaacaacatcatctttaaactttacaagaaatctagccgaaatatctttaaaagtcacatcctgatctgcaaaataccttccattcccaaaactaaaataataaacaaataagtttcgagatattacattaaaataaaatagtgattgtctttacacaaataaaaaaaaataaagaacttaaaaataaaaactcttaataagtatagaataaacagaataaagttaggacaaattttaacaaaataatatatattataataaaactaccaccaaaataaccagaataacatacactatgaattcatacattctattttcaattttcacaaaccgaaaaacattgctgtctcaatggagtttaaaccagatatcaatgcaaactcaacaaagactgaacctaatccgcttaatttttttttttgtttgatttaagcgttttatatattacaacaatctaatccgcttaattagtacttatgagaaaccacttttcgttcaaatttggtgacttaacctctctcaagaaaatattgtgtaacaactgtgattgcaaattaaatgattatatcttaagcaagtgcccaacacatgtatctttcaatatttacaattgagctttcgaaagtgaattcttaatcaactcaattacaccataatcaaaagattacaatttttttaaaaaaaaaataattaaataattcaatatactcaagtataaaaaaaatactaatacaaaatatactgaaatgtatacataacttcgattaaaaggaaaaactgttcataaaaaaatatataaacaaacatgtaaataatagaaactgaaatgtttaaaaatgtataaatgataaaaacaaaaacgtttaacaaataaaaaggtttaacaaattattatttttttttaaagaaatatattaaacaatacagtatactcaattataacaataatactaataatacataatatactaaattgtatgagtagcttcgataaccagaaaaaatcttataaaaacagaataaacaaacatgcaaattatataaaatcataataaacaaaaatatataaaaattttacgtaaaaaaactctataattaatacataaacattattataaaaataccatgacaatattttagcatataataaacataaatgtattaacaaaacagtagacaatatatctttaatcaaatgtaaatttttgaaactttatacaataaaatctgaaaaagagaagaccataacagtaaccagacaaatataaatcttaataaaaaactcataaaaatgaaactttttatactcttcaaaaaaattaccaaacaacaacccacaaaataaaaaaaaatgaaaaaaaacacaatacctccaacgaaggagtcggcggcgaatcatccaagccggaaatcagagtctcgtacaacctctcggaactcattcttcttcaactttttggtatctcattttgttggacctccttctttcactttgtcgggccgctacctcaccttgactcccaaattagtatgatattgtccgttttgggactaagccctcacagttttgtttttgggcactttcccaaaaggcctcatagtgtctatccttatacccataattcttcccattcctagctaatgtgggactttggtaggggtgttcataaaata

SEQ ID NO: 76214 - DNA, 1035 bp, Cannabis sativa
tccacagttaaaagtgcctacggtttgctacagcagctcttttctaggcctggttctgcttcatcatctgatttttggaggaagctgtggaagcttaaacttcccccagaggtgcagaattttttatggcgtgtgtgtgtgtcaatagccttccaacaaggttccaattagccactaaacatgtgcttgttacgacatgttgcccgatctgttctgctgcaccaaaaacagcacttcatatgcttgttcaatgcacctttgctagtgcttgctgaaggaaaacgaaggtgactgttgtagcacctgctgctatgttattcacaagctggtttgaggaaggtttgaatatttggagtgaacccgagagtgttgaagccgtcacgattctatggtccatttggaatactagaaatgatgtggtatggaatgataaacttcctatggtgggtgaggtaattcagaatgcaaaaatcaattatgtggactggtttaatgcttaacaagccgataaggactcacacagggaccatcatgaggttcggtcttataaatggaagccctctgagtttctaatcatcaaagtaaatgtggatggagcaatttttttcattagagaatcggtttggagtgggattggtggctcggtctgcatctggtgtggttgtccaggccaaaactgtgtgtaaagttggtgcacttcagccacatgaagttaaggcaatggaaatgaaagaagccttgtgatcgtggagtcagattttcttcaagtaatttcagatttacaaaataataaaattatagcttctccttatggctatattatttttgattgtaaggcgttgattgtcgttatggacaaagttttgttatgtgttgttaagcgatctgctaatagggtagcgcattgtctggcccgatcctctcttgttgaggctgattgtatttttagtagtcactctttgcatactataattgcatccttagttttggatgatttattttgatgaatttttcatttttattcaaaaaaaaaaa

SEQ ID NO: 76215 - DNA, 585 bp, Cannabis sativa
aggtatagctctgccacatgttgacagtcatgtagcaaccatctctagagggcctcatattgccagtattacaagaaatttcttgaaaagatatttgaacaagttagaacaagaaaggaagtgtgcaccttggtacaaacacctggacaaaggccgcgaatgatgaatcttcctatcacttttatagaagaagatggcaggcatgtgcattttcccctcaacgaccaattggtgatcgaggctcaaatcaccaacaaaagagtatcccggatactggtgtacaatgggagttctgtccacatattgtttaaagctacattccaggaaattaggttagttaaaactaaccttgcaccttgcccaatccaactttaaggctctaatggagattctttactgcccatggggaagatccaactcctagtcgtcactctaaacaagggtatccatcaaatatttatgcatgaagttcccaagctataatggaagtattggaacggtaaggggtgactggaaaggtgcacgcaagtgctatagtgtctccaccaaaacagttttcatgtgagagaagaaactgaggagcca

SEQ ID NO: 76216 - DNA, 1080 bp, Cannabis sativa
atatgtgtggtacagttgtctcatgaggagaagagttgagtgttggaagggatgattttaagattggtaggtaaatttttggagtaggttggtttatttttgggttttgttggtttatttctgggctttgttggttaattttagggctttgttggtttatttctagtgtgggaaactgtattggtgagtgctgcagggtaggagcaatgatgggcattgacctgcttagatgttgcaggggtatagggtgattagatctaggtgcttgggtgggcattgtagaattttggttgggcaagggagtgttggttgagacagtagcacaaccaggaacattgttagcaccagtagtagtattagaaaatgaagaagtagtaaatggagatgaggtagagggttgtacctgattagcattggagatagtgaaagcagggaagtagctctcatgaaagactacattcctagctctgtatattctgcctttggaattttcacaaagataacctttgtgatgagaagagtaaccaagaaaaatgcattgatcagatctatattccaatttgtgattattgtatggcctcaagtgtggaaaacaagcacaaccaaagggcttgagtatcttgtaatctggtagacttccaaacaagcattcataaggatttaaaaccaagaactgtgctaagaagtcaatttatagtaaacacaacactttgaaaagcataccaccaatatgacaaagataaactagcttgagcaagaagcaccaaactagtttcagttatgtgcctatattttcttttagctctcccattttgttcatgatcatgtcgacatggatgatgaaaatgaatcccttgatcacttagaaatctagcaaattgtctatactcccctccccagtcagtttgaacactttttatgggcaagttaaactgtttttttgccatgcttttgaatttaataaagacatcaaaggcttgtgactttagagttaaaggataaatccaagtgtacctagtatgatcatctatgaagtgaatgtaatattgaaatccctctttagataaaacatgggaagga

SEQ ID NO: 76217 - DNA, 1291 bp, Cannabis sativa
gtttagtgaattacattttgtttctttttccattatattaaaatagatttggtattttggtttcagggattaactgagaaatttaaggagaaggacaccaagtactctggttctgcaactttcagttatgaagctttcatgctcactgtacttcctttcctcatagcttaattgaggtgtttgtttgtaaatcattatggagctagatttatatgttgtaatatctagtgtattatatattattattgtatgtgcttttaacagatttgccattttttttaataaggctaagaatctgattatattattatttgtgttagtatgttactgtggtttatttttatttttatgtatttttttatataaaaggttacttaggatagattgattgctgaacaatgtcatacaattatgcaaaaccagtaaaataattataatattaagaagttggtatatttatgatttcaatgctcatgaccagaaatgttaaaaaataataacataaggtaatgattgcaaattctacatttcaattgaagccaaaactatctagtgatatgagaaatgaaagaatccaattccatcctagaaacaccaccttcagcagtagcctttctcaactcaacacccaatttctcagctcttttcctaatctcatcaccttcatcagaacacatcaatctcttcacaacattctcaatcacacaacaactcaccaacccatctctattcccacccaattccccaacacccaaaccaactttaacaaactcagtaaccaaagcagcattcatgggctgatctgagtgcataggccaagccaataaggccactccaagactcatactttcaaagcaagaattccacccacaatggctcataaacccacctgttgatgggtgccccaaaatctccaattgggacacccattccctcaccaccattcccattcccttaaccctttcttcaaacccttttggaagttgatcacttctttttcctctaattccctcttcttcattaaaaatgtcacctttatctgcatctcttaaaacccagatgaaattcactccacttttctctaacccaattgctatttcttcaatctgtttggtttccaagaaagttgtagtcccaaaagagatgtacaaaacagagttgggtctctgtttatcaagccaatccaagtaataatctttatctaatgatgaatcaccattgatattgaagaacactgttacagtatctaaaggcccaattacccaaatcttcatatcatcatcatcatcat

SEQ ID NO: 76218 - DNA, 792 bp, Cannabis sativa
tccgaggccgagttctggggttggaatctggtgtaattcgagtccctgcccaggtccagaaactggtcacagttattatcctgttccaggatcctggtcacattctgattcatgtttttgtttcgggtccaaggtttgggtctgggtctaggtattggtccaacttcgagtctttgtccgagtcccagttcaagacatcgactatgggtcttgtccaagccccggttctcggatcctgggacaagatctggatcataatcacgggtcctagcgagtttcaattcatgccccaggtcccgctctgggtatggctctaggtgtgggatcgagactggggtccagttttgggtctcaatccctgttctgggtcttgagtcctgttcaatggtcgagtctgagttcaggtctgggttagggtcccgagtcccaatttaggttcaggttcaggttttggacccaatcccgatgtgggtctatgtccgactccaggtccaggtccggttacagttttgggtcagggtcttaaacttggtcctgatcctattcctgggtcctgatccgcttctagtttcggttctagtttcaagtaacggggtaaggcttcgggtcgagttttggttcgagtctatgttcgggtcctgatttgggcccggggcgaggttcaggtctgagttttattctcggttagggtcaaaggctatgtctggtttcgagtttgggttcgagtttagatcctagtaccgttccaagatcccggtcttgttccaattcaagtttcggttttggttcccg

SEQ ID NO: 76219 - DNA, 1304 bp, Cannabis sativa
aaatagtcaaacatgtgttagaatgttacctaaaccgcatttcaagtaattacaataaaaccaaaacttatcatgtttacccttttttctttttcgatgttagccagttcaaatagtcagacatgtggtatgaacacccaacatttgaggttcgatcgcccaaatagtcaaacaagtagtatgcactcacaatatctaagtttctataacttaaataatcaaacatgtggtatgcaaacctactttcatacctaatctaaaaagaatgttatttaacccgcatttcaagtaattatagtaaaaccaaaacctacatgttgacccttttgcttttccaatatttgatagttcaaataatcagacatatgatacatactcataatagtttaatagctcaaatagtcaaacatgtagtatgctatctatgttcgagattcgaacttagatacacaaatagtaattggttataacattttaagaaaacaaaacaaaacaaagaaagaacaccaagaaaagaaaaaggagagctttttcaccttcaacaagtggaagagtagtagtactagcttggactttgcattgaaatggtgccaagaagagtagaaacaataacactctaaaattttttgaagccatattgctgaaaatgataacaaaaccaaaatatatatatatattgtatatgagtgagtgaaattctccattttcatacaaagcatgtgtagcatagtcccacaccacacaattgcaagtgacataaattgtaataatggatttgtgccgacactgtttacagagaaattatttcataaattgtaataatatgaaaaataatatgttgtagtttattgtactgatttttttgtttgggaaaattacctattttcaagtaaaaattttacatttttacgtttaagaaaattacatgaaagtaacaagaaaacaataacattcaaaataatatactaataacaaaaaattaataacaaaataacaagagtataacataaaaatacattaaaatactattttttgtgaaataaaatcttaaaaaccgtaaaaatatttttcgttaaaccatttttttttgttgggatattttataaaattagtatgagttacatgaacaaaaacacagtcataatatatgttggttaagtcaattttaattatgtgtcagattcacatgatattgtttttattctttgggttgatgatatattgagttgaaagtgatgataatgtaaatggtcccctgatttttttgaaatcaaattcaggatattctctctctctctctctct

SEQ ID NO: 76220 - DNA, 602 bp, Cannabis sativa
tcgatccataaagtttcttcgacagcagatggtagtggtgatgaaatgaaactttgtacagcggtccccatctctcagccaattaatcttaaattttttattccagtggatatttttctgaatgagaatttcatcaagttgagatctcaaagcatgctcctcctcagatgggaccctcatatccctatcaatttgacaggaatccagctgagtttgaacctcttgtatcttagcattaagatcaccaaactactaaaaatttcatttgaccaaggtagaccttgtagcacctaatatgcagtagaggcacgtgacatgatgctggtagaagtaggaaagacagacattatgaatgataaggacacacctctcatctctaatccacatggcttcaaactggaaagctttttagtttcttacaatagctccattagtatcaaggagcaaaggtttatgatcagagtttccgatgaagatagatcagatggtggacttgggaaacaattaaagccacaaaatgttcgacaaccctctgtccagagcatatttaattctaacatttcctttcatgtggttgtcccaagtgagggcaccacccagga

SEQ ID NO: 76221 - DNA, 1231 bp, Cannabis sativa
cagctaggaattgcttcaagttacagcctgagaaggcgggctattcttctctgctcgccaacatctatgcctcggccgagcagtggaatgatgctgggagattgagaaatgttttggacagcaaatttcgcaggtgcagctgggtggaatcatgttaattaaacttgttttttcgagttctaagatcaagcttggaccaagaaatggcaactgaaaaccaaagtgattattatttgtacttgttggattatttatacaaaatgattacacaatacttagtgtagtttcttacattgaaaaaaataaaaatggaagtaaaatttaggaaaaagcttgaaccttttcttcttcattctttactttattttttgttatatcttatttaatcaatcatttatttctttcacaagccacaagataatctatcaactgtgtacagattcagtttacaatttcattttctgctataatttttgcatttttaatcaattggaatccagcaaattttcatctcttggaacaaattaattaacttgtcagctgtccacaacatttctcagagaaaattatgcttgctatatataccaatacccacattgattataaacaaaaacccaaaatattgatcacctacattagtcacctagcttaaacatgaaattagtcaactagcttaaacataaataacagaaatttgttaagtcagtttctcttaaataacctaagtatcagatcactaattatttgatataaaatgatatttttacctataacagtttacaacttacaaccaaatttaaatacaagaaacacaatacacaaaacctccacagagcagtaaagagagccattgtaaaaagagagaaaactcttttgggagtttttctcagtgtgtttgcaaaagagagagttagtatctttgtaaaaggagagaaaaatagtgagaacaaaaaaagagacacaattataacctttacctgatatgttgatgaatgaacatcaagacggggagcttgacatagaagtagttgggtgaactctgagaacaatttcgggtgttgtctttgcaccttttattttctcataaccctaatttgatttctctgatattgtgtttatagtatttgtgtgtattttgttcttggtttcggtttggtgtgttttggccaagagatttttgggtttggtatttagagttatgccgagagctgtgagaatttttgggtttcag

SEQ ID NO: 76222 - DNA, 2165 bp, Cannabis sativa
agagagagagagagagattgttgttgattttattgttttgttactttaattattttttattttatatactctgttcatccatattttagtctttaattattgtgtgtgatttgtcaatcttgtcattactaattgtttgttgattaagttctagttgttttaattctacacattagttgtaattttttcacaggtagcaacaaaattattaggacatacatctatattgtgaatcaatcaatgacttacgatgtaattataccaatataagattattattgttagagaattactaaaagtattattagtgcccaacactctcttcggtgtcaaccggtgatgtaattaagtattggttggtccaatataacttaaagtagtaacttttagaaaatatcgataaccaatcgtgaaatactacctataaaaaatgatggacaacaccgtgtccaataataacaatgctcttattattatataattttttttaggctctcccttggtcatgggagtgattaatttggtcaaataaaatattcggaataataggcataaattaattgtttttattttataggctatagctgagtgaagttctctgttattacgaaataataataataaataataaataatgaaaacctcatctctataggtggaaaactaacttgttttactgctacaaatgtggaattctataaaaaatgaatcatcaattcatcattatcatttcagtttaaagattataaggaggaactaacaaaacccagtttgtcttcaaagcaaaaggtgactatactcttctgtaatttacaaatctgttgcagaaattggtttattttgtttcaatttttctgggaattggttggaacaacctatacttgttgtctcaacttcattctaaatttgtgtttttcaaacaggtatttatctatgtaaagttctaaactttatttacatatattgtttttctcaaaaacccaatgttatgattttcacaaagtcagcaaacatagttgttggttaattgaactttctttgctctcaaattccagatgggtgttgaagttgaccaagaatcagccaccaaaaatgaaattccaacaaaatccttattaagatacaactctcccattgtgcaaataatcttgattgccctggtttgtttctgctgtcctggcatgttcaatgccctctcaggcatgggaggtggaggccaagttgaccccacagcctcagacaactcccttaccgctctctacaccgcattcaccatctttggcatacttggtggtggcatatacaacatcttaggcccccatctcaccttgctctctgcctgtttgacatatgttctctatgcaggctctttcctttactacaatcatcacaagaaccaggactttgccattgctgctggagcccttcttggtgtcggtgcaggccttctatgggctggacaaggtgccatcatgacttcttatccacctcctgatcgtaaagggacatacatttccattttttggagcatcttcaacatgggaggtgtcattggtggtttaattccttttattctaaactatcacagaaccgaggctgcttctgttaatgatgctacttacattgctttcatgtgtttcatgaccgtaggagctgttctttctttggctattttgcccccgaataaggttgtccgtgatgatggaactagatgtagtaacattaagtattccaatgtttcaactgagtttgttgagatcatcaagctttttttgaactggaagatgcttttaatagttccagctgcttggtccagtaatttcttttacacttatcagttcaataacgttaatggggtgttgtttaacttgaggactagaggattgaacaatgtgttctattggggtgcacaaatgataggctcaattggaattggttacatgatggattttagcttcaagagtaggaggacaaggggttttttgggaattgcagtggttgcaattcttagcactgtgatttggggtggaggacttgccaaccaggtcaagtacaaccgagaagatgtagccaaagacgggtttaagaagttggatttcaaagaatcaggtgatgattttgcagggccatttgtcttgtactttagctatggtttgttggatgcc

SEQ ID NO: 76223 - DNA, 565 bp, Cannabis sativa
ttcccatacttcctggtgtgccatatttgaaggtgtgaagagcatgattccaagttatttaagaagaggtcagcagcagcgattgaagaagatgtagcccagttttgcttgataatggcagcagcttcagcatctttaagccatattttctcaaacctgaaatgagatttcctcctcacttgttgaggaagctgatcgattgcttggatagtaacagaaatagcccgatggtctgatctgaagaagtccaaatgagtagtgatcaaaggttcaagtgttgctgcccatttgtcattcacaaagcaccagtcgagtctctctttgatggtatcagctttacgtggacttttaaacgaagtgaaaggatcgccattaacaggcaactcagagaaagaacaaaaatctaaaacttgtctaaagtcttccatttgcgcctcattactcaacgcacccccttgcttattagcatttgaaagtatctcattaaaatctccaatgacaatccatggtaacagtggagcaacatcacgaagcctctttcaagttgtccaagaatgacagcgat

SEQ ID NO: 76224 - DNA, 1048 bp, Cannabis sativa
aagtagtaacatacaaatgagtataatcttaaactagtatataaatgtataaactaaataaatattaaatatttatatcacaaatatcttgtaaaaataaccctagaggaacttatcactattgatacattgaattgaaattgaatgcaatagtgttatttttgaataattttttaaagtcatctcaaaaaacttggaagactacaatatttaacttaattagcggtggactacgccgttaataaaccccaattcgaccgctataggctattagcggcggtaattctccgttaataatatgtcgctattaaatagccgctaataatagttattagcagcgcaattaagctccgccttaataatattattagcagccggcattagtggctggaccccatcgttaatacttgttgctaataaattttaaaagtaaaaaaataaattaataaatatacaaaataatgataatatataaatataattaaaccaattataaatattatgatttaactccaacaatatttattaataatttaaaattgtttcaaattaaactacacaacaatgttcaacattaatactattaaaatgtctcaaaattaaactaaattactaaaaaacataaactaattattccataaaatcttcgttaaggtctcgagttacaaagtctcttgatctgtattattatcattccgaggtcctgacggctgtggcggagaagtaacatatggttgatctgacgataaaccaagtgttaggttccatagctgagcttggttgggaataggagtcaaaaaaaattgttgctcatgagatgaactcccaaatattccaaaatcaacaaaatttgagccaagcggaggagacttcgatggggttctatataagaactgattttctaattgcggactagactgttgttgttgttgaggaaaatactggtgttgttgctgcgacaaattctagaattgatgtcgcgaagaaggccaaaattttggctgcaaagtaggttgttgttgatgttgtggaggagcgacataactct

SEQ ID NO: 76225 - DNA, 851 bp, Cannabis sativa
taaaattatttggaactttttttttaaatttatgatgttatatatgtgcagttaataatctagggttcaattcttctccggttgcctatctaagtaaagcggccacaagcacaaatcttttgatgggagccaattttgctacaggttcgggttatgatgactcaacaaccaatttatatgtaagaataaactctaaattaaaaatattattaatttaataatattttaactacgattaattatatatttacatattgaaatattttgtagctatcactatcactaaataagcaattggaatattataaagagttccaagcgaaagttgtaggaatggtgggcgaagcaaatgcttcgtccatcttttctggtggtttgtacgtaatcagcgcgggaactagtgatttcattcaaaattattacattagtcccgttcttcagattacgtaccccactgtcaaccaatactttgacattattctaagaaattatgaacaatttgtggaggtaaataataataatatttatatatactatatcattattttttttttgttatcatatgtatcctattcctacatcatcataattactaataaatatattatatttatatttatagaatttatattcattgggagcacgaagcattggagtgacttcattgccacctctagggtgcttaccaggaatgataactttatttgggttgggtaaattagatgagtgtgtcgatcgacttaattaattacgatgcactctccttcaatagaaggcttaattccacttctcaagccctaacacagagattagatggcttaaatttggttgtcttagacttataccaaccc

SEQ ID NO: 76226 - DNA, 883 bp, Cannabis sativa
aatgtttaataagttattttttttatataataattgggaagtatctgaatttcatagtgtagattaattattctagtctagcttatatgtaacgtaattaacctgcatagatatatatatataataattaataaagattgatttattggtatgtgttggtacttttgacctacaaattaaagtaaacgacgagatcatcatctttatcatcatcacattaattaattaaatagtgggcttaattaatcctaactagttttcaaaaaatatatatacatatatagcttattattattagaacacctaactaagaagattcttaattaattatttgttttaacttaatttaaattgtgtaaagcaattagcacatgatggaaatcctatccttattacatggagttatattattaattttaacacaaaatatatacattaatatgtatatagtatatatatttaagtttttcccttctttataagcttatgtctctaacttgaaccttaataatcaataataatataaatataatatttgttgagtgtaagaaaaaaaaactattttaataattctaggaatagtgtccaattaataatactattttaattaatatatggaacctctcaaattttattttcaattacaaatgtgtggttgcctttaatgaaaattttcatttctttccaaaaaaaaaaaaaaagaaataattaaaaataaaaatagaattgaacaatttaaaataataatttaatttggaaatgaaaagtttctcctagggaatctattacgtaagtattaattgaaatcctatatagtacgtagttgatagattctttatacatttgattaagtgagttgtttattattatttttttattttta

SEQ ID NO: 76227 - DNA, 573 bp, Cannabis sativa
aatctctcgaccaacctccggcgaccaccacgaagccatctctgacgtcgcgaagttctccccattgctgagaagtcctccgtcgcgaagccctctccgtcaaaaccaaagaattggtgtggggtttcacgaagatgttgcaatggcagtagctaggtttcatggagaagatgaagaggtggaaagaagaaatcgggagagagagtgaaaagattaagaattttttgtttagttcataagaaaaaaaaaagagaaagagaaaaaaaaaagatttttttttatatttataaattgtttttttaattttaatttttaagttatttataattattttttaaaactaaaattatgtggaccactaaaaatttatcatgtggacagtctactgtgatatttaactgtgatttttggacggagaggtacagagcaaaacggaaccaggatttaggtaattatgtcgctaaaattttggtttttgtggttatctgttacaaaccgtaaagtttaagtaatttagccaccaatatccctttataatataattactgcccttaaattttgagtttgttacaa

SEQ ID NO: 76228 - DNA, 1190 bp, Cannabis sativa
  modified_base (616)..(616): a, c, t, g, unknown or other
tgatttttctggcgacaattttctggcgacaatgccaattccgacgaatttttcggcgtcggtagcaattccgacgacttttccggcaccgaccgctactccggtgatttttccgacgacttttccgacatctatgacaaataaaactacctaaagaaataaaaacattaaatatgggatttgaaaacctaatttatatacatggtatatcaaataccatacaaagacctaaaaatacaaagacctaaaaataaaaaaataccatataaattgatcaaacttaaatgtgccatatttatcataagaacttttaaaatctcataataagtgtaatttcctcattcttaaactaaacataggattactttcaacataatctaattttgtccaatccagtccaatgcctaccaacacatgcccttttattacaaagttcactataacaataaaaaaaattcaaaaaaaaaaaaaaagaagaagaagatagattagagttagagacacaccttggaaaaatgaatgcagagctttcaacttcgagctctgaggtaagaatcgcaatgcattcgcataaataggtatattgtagggtttctagagagagagagagagaganagagagagagagagagagttgtgccgccgtgtagctgagaccgcgagctccaaaactctcaaaagacaaaaatgtgggcgaagagcctcaacgacgaccgaattcgagctgctagactcagggaggatgggtctagggtgctattctaaacatggttggagatggaggatgggtctaaatctaattgtttttttttatttgttttttgtttctttgttttttttatattctaataataaatttaagaaaaaaacttaaaatatagtatttttaacttttatgacaaaaatataacataaaaattccatacaaatgtaaagaaaactaaaaattcataactcaattatattttaaaaaaaatatacatcaaaaaaaagtaaacacttaattttttatcatattttgtttaatttttacataattaaattcaagtggatagggtttataattatagccgaaatatttagctttatagtttgtaaatatttttagggatatgattttgtcccgtgatgtactttcacggattgtattttgtggtaaattagatgagtctcagggtacattaaatgag

SEQ ID NO: 76229 - DNA, 840 bp, Cannabis sativa
  modified_base (60)..(63): a, c, t, g, unknown or other
tttatttattatttttcataataattttataaaaaaaattaacaataataaataattatnnnnagtaaaatatacatatatataggaatatcaatcgggccgagtcaggctcgacccagcatcgattcggctcggcacgatatctctttagcacgattcggccaggcctgactatttgtttcagcctggggggtcaggcccgacccgagataaatgggtcgggcttgacccgacccccttcttttttttgaatagtaaaattttcaactttaaatatctctataaatttcatttctcataatacatctttagagacatttctgttaaatcgatattgtcttttaatgttcatatattttttttaaaaaactattaaaggttatatatctctcttttactagaaaaaaatataattttctaacaatgaccgacacaattattattgggccgagccagattgggtcaatgacctgaataaagcccgattgccaggggtcaaagagacccgacccacaaaaaaaacacaaattaccattcctatatatgtacttgtcacaacaattaattataaatttaatttggtaataattttttcaagaatcattaatttaagcaacattaaaggtcaatcacttgttattgatttacaacaattaggatcaaaggctagagtgattgatgaaaagagacatttattccactgcacagatggtgtaataattaatctttgtctatgttaattagaaacatgttttatgtttttcttattttatttgatgatgaaataataaaaatatgttcattaattgcgatcctataataatattcccaacaactagt

SEQ ID NO: 76230 - DNA, 661 bp, Cannabis sativa
tatatatatatggggtggagggttcttatatatatttggttggtccaccctccctagctatctctttccccatgttttcatgcagcaaatcagcctctttttcaagcttaatttcatcctttatttatatatatttatacatatatatatatatacattcatattttgtggtcagggattttaacctaatgaattgcaatgtcatattcatatctttaatgttgaggtttacgattcaatcccctctttattattattattaaataacataactttaagtatatatttttagattgccacaaaaataaaaagtatatatttttggataattcagttttgtattttgttaaaagaaaattttccttttttttaatctcaattattacattttgatgctatttttctcaatattataaaacacacaattttaagctagctagaatttatatagttatatacttcatagaattgttttaatattattactaaagcatattattacaatttagaaaatatatattttcttataataaagtcattcaatatttgattatatcaaaacattatatatgtatataattaaatagcattaattaagtgatccccaaaaaatccccatgttaactagctaaagaagatattatatatataaatatatata

SEQ ID NO: 76231 - DNA, 660 bp, Cannabis sativa
aatgtatcgatattaaaatgcaccaaaaacgatttgtttaaaaataagaaatattaaaagcattgcaactacgtatctttaaggtgtttaacacaacaatgatatgacactttagtaattttttatataacttattaaatgaaaatatacaaaaacctaatattaaaatacattaataaggatttctcctaaaattaatgtcctttaaaaatatctaatcacattattttatttaaatatcatagagtcaaagtcaaaactaggatggacaatgttcaacgttggaccaaaacaaggctactctaatctaactctactatgatcaatgtaataataagcatcctatatctttaatgactgtattttataattaagaaaatattagattattcaaattcaatttaacctttttaattttttttttttaaaaaaaaacaagaaaattaattagttaaaggggtgctcattttatggaagaccctctttaataatgtaagaaaaaagagattgtaattagtaaagggtgctaatattaaggaagaaaaacaaaacatttaatagtgtattaggtaataacaacattatttgaagttaatgtatgatgaaataattaaaagagttagagaaaatgtttcaagtgagtgcttaacaacccaaaat

SEQ ID NO: 76232 - DNA, 1249 bp, Cannabis sativa
aataataataaaagaaaatagcaacaacaccgtttcactttcctttctgagtgagtcctacaattcactgcaaaaaaagatgagtgtgtaggttcatccttgaacacatgccgtatactagcccccccacatgcggccccaactgtagtttttcttgggttttccttttcgaagacactgctcgaaactgacacatgcaactgagatggtaaaaagagatgaaagaggtattgatggatatttatttatttacacatgtagacttggtcatatagatacagaacaagacatagagagagaaattgagtctgatatatttgacaaacaagaggagcgaaaaaaaaacacacaccaacaactcctactaccccacaaccactggttttcttccactgttttacctcttagaattcataatagtttcaagctcaaagctcttttaagtttaaccttttaaagttgaaggcctcgagctcaaactttgttctacaaggcttcttcttttgatcatttcatgacttttctctttctgggttttagtagagatgtcagctgttgatgggagtctaacccaccatgatgatacagaggctaatcaagagtgccaccaacaccaacaccaccatcatcatcgccatcgtcgatttcgtcgcccttctgttgtagcaagaggaggaggaagaggcagtgaggtgccactctccgacgaagattcagacgaccagtcttggcattcgcggtttgggtccggggccggaggtcggtcccagttttctagtgacattgaaggtttgactgaccttcaaataagctcttcttccgagtcagaggtggatttggagagtggagccttggagatgaaagtgcattttggtaaggcggaaagaagagattgtagaatttgccacttgggtttggagagcgaaagctcagactgtggtgctccgattgagttgggttgttcttgtaagggtgatctgggctctgctcacaagcagtgtgccgatacttggttcaagatcaagggtgacacgttagtatattctctttcttcacttcttttctttattatttggttttggcttatcgtttcagacaaattttgtgtacccatatgttagttttctaataagcttgctggaaatgatcttcttctgtacccaattttggttctaagattaaagtacgaagtgtttctctattttacctttcaaaaaaaaaaaatagtatcaagatatgaagagaaaag

SEQ ID NO: 76233 - DNA, 2134 bp, Cannabis sativa
atttaggaagctaatgctaacctcttcaaaagaagacaacttttgcttaacaaaaagaattgattattatatgaaagtgtgtgtgagataaaagtatatatggggttacataccaaaagcaaaatagtagaagctaagtgctaagtgagaaaactattaattaatgagttataactcctattttctattcctcttcagtattcttttttataatcttcaaaaatttacagtttttttaggttcaaaactattatttttttatatcttacaaaaacagaggttgttttgcttataaattattacaatgacaccaactttcccaaatgttttaaatgatcaagtataagtaagtagcacaaatttgaagatgatatattttgagtatttgactagattaggatggcccctgcacaaggatgacacgcacaaatcgagaaataaataaagaagaagaagcagaaacttgctttgcataatatctaatttgacatgtaatctcttatgtatgaattagtcttttatatctgaaatttcttcaaaagaagataactttgctaataactaatataattatattacttaaactaattatatttttgagtaaaatggacacttacactaatgatcagtatatgaaataatggacactctctgaactaagtagtgtgagataattagttattataactcttatttccttctcttcattattctgatttattagatcttatagagacaatttggcttaagaattatactttgaactattgcaacaaccaatgcaaccattattattaaatcattttgacactataataattaacaagcttatttcatttttattattgttatcataatattaacttgcacactcaaatcacacattattaaaagtataattatgcctatcattatgtattatatatatggtctatttttcaaatccataaacctcttaatgattttgatcatgcatttttaaggaatacttcctgagagatgaaggcttatgacctcttgggctccgccgatgaactggccaccaatgaagatggcgggcagagtaggactgcagccgagcagggtgagcgcttgctcgatcgccctgatgctgctgctctctattgggattttgtctagctcataaactgttgggttggccccaaagctataaaacaaggactttatgctgtggcacatgcaacaactgcttctgctgaagatcaccaaaggagtatcggataccatccttgtcaccatctccattttttctcaaaacaaagaaaaatgattcacaaaccgatgtgatgatgatgatgattataagtagttagtatatgttaggactttttgttgtggtaaaattaggtagtactgtttgtgctttttgtgatgggggtactcattattattataataattgtagcacctacataaagaaagatctatagagatcaattccaaaaagtttgatagtgaaggaattaaagatcaaactttgatatcatattattattttggaaaatttatagtacatccctttaaaggtatattttagtacacttcatattctttaaacatctatagtagtttggtaaatcgtgtatcttgtagttatttaagattactcgtaaaattttaaaaaattctagatagtttcaatgttctttttataataagcgtgataaacaactatttgaatcttattttagcaaattattttaatttttttgaaaattataaataattataaataattataacatatacaatcataaaataacaattatatttaaaagtttttctgatgccgaaacaattaaagagtgcactataactataacatatacactcttttttaggagatgtactccaaatttttccaaaagtttagaggagtgcactacaaatattttctattatagctagctactaaacaaatgtttttcacgtatataaaaaaatatgtataccataataaattgtttgaattttatttgaatattattatttattttagatttcttgaaaatttaaatataatattaatatgctacatgactacaatgtatgctatcataatattttaatatatttttttagagaattatcttatatattattttttttaatt

SEQ ID NO: 76234 - DNA, 7083 bp, Cannabis sativa
ttactatatttacctttaaatatagttggtatggaggttccaaagtacacagtacgcctttgtagattccatatccattctcttggaacatcaattgggtcgacacttgaatcattatctgcaaataactgcatgggatggataatacgaggccaatattagacaactattaccataagcctcaattagagagtaacatgtctagcttggtgcaattctcacctcattaacctgaaagtaggtcccgttaagtgggaagcttcctctcattgccgtcctgcatggtatctgttcattgacatatttaggcattgcttaatttcattttcaaatcattattactattgtttaactaaacactggcattgtaaccgatttgccaagtgtattcttaccaaaatggttcctcgaactgtttgggagttcgcttcacgcatgctgttgcacgagaaacactccttctcattgcacaagctgccatatccttgggagcaacacctcctctcgggtggttcaatagtgtttgcagtttcacctgaaatcgattatacactgaattgattcgagaatgcaaaatttggaaatctaatgtgtacctgcttatatagatgtatatgaatcctataaatctccaaggcagacttgaaccatccaaaatagatttataagaagttattgtcatacctggtgtccatatggccaaaaggtacgggctcggatcatcaggttctctcttctccaactgtaactgttaatacaatgcaagaatcctttagagatcaaatcttgataatccagataatatgttctttgtcaatatgtagacgcgcaacttaccttttccagaagagggtgcgaatctggaagttcataactgcatcatgttgaagaaatatttgaatgaatcgctacaatttggggcatataataaaaatgttccaatactatattgaaggtacatatgtaaccatctgaattgtaacataaatcgtgttcactgaaatctaaaaatcactaattagctcaggaccactggccttgaactttttttctatgttatattggtaagtagtatgaattaacatatcttcttgttatatttgatttagaaaatccatatttaaataataagtggagtgtagttttctttttggtaggtgttttgtgccaacttacacttgatgttctgttcgcagtcggctcacattcttcagcttgggcataggaatagaagcagcttctggacctagagaaactaaggcccgggacatttcgccatcttgaagttccatattttgttgcatatagttctgtacattctgagtgaactgttcaatattaagcttgatcattggaatttcgtcaggatcttcacagaaagcatcctcaatatcttctaatattgttgggctttcaggctctggtgttgctggttcctcaatgatgggttcacaacaattgatcccagcttttgcttctgactgatcatttacttccattaagtggtaatattctgattgcttgttggcatgaggaaggggtaagggtgttctctcattaacggtaaaatttatgtcttcctttcttttttcggttgcaataactacacttttctcttctggccctggcagggcaagtcgcgcactgcatttaaagtttttgttaataaatttgagatgataaaatcacactacatatctgcaataactacaccattaggacaaatcaaactataaataacaacattttctcctctagcccaggcagacaagttgcgccatagttatttggttaattatttgtgaggataaaacacactatatgtcagtttactcttgatttacttttctatgttgacatcctttgaacaacttcgatttatcttatttttgattttccatctatttttcaggatgaacatattaaaggggtttcttgtttctacatgataatgctttactggagctacatgtgtcaaatgtatttcatcacagatgtttggagttggaggaaatgtatacaaacctagcaaatgcactcgcaaagtgtctacattctcctctcattggacatgcattgcaatttggtttgcttttggtgcaaaagacctgcaccaaaaaaatagaatttcagttacaaggagcttgtgacctcaaacattattttcaatcttaaaaatacaaacgaagtatacctttccaaatgttatcatctggtaatgcaactcatagctgttaacaaaaatgggatggctcagtcaagttcagtcgatcagcttatacttttctcttatttatgttatgttagcatgtctgttagtttgcaaacttagaagtcattttctcttacagtgttctttggtcaagcttgcacagtcgaggccagagatatttttgaattgattccaacactgggtacctgtgagacaacagaataatattgtcatggtttaagtgcttatagtttgcatgaatagaaagggggcttagagtgctaacagttcaagaagatgcagctgtagtgactcaggcagtggctgaagaggtacccatcctaatcgtacggctatacgtccaacatttgtgtccacctaccaaagattcaataaattgtaaatatgtatttcacccgtcttgtaatataatgcttataatgtgaacttactgggaaagcaagatggtgtagtgtcaaaagtctcacacactcaacgcttttcagccccaatccccttatgcttagcagatactccctacaagttcaagttaaatgaatctaaagcatataacacaactggatacacagtaagccagcaaacagctatggaaaagtgataacgtgcaagggaaatagttttaaactaattcatgttgctaaattgtgaattgggttcttttcttactttgcttggtcaggtggaacgtctctcagccactcaaggtcagtacttccgtgttcttttaccagccggttaaggaagtcctgcgtgaacttcccggtgagaagtagggactttaaagggtttcataaatatgtgctatcttctagagctacattacctccactgttaaaacatattgaatgttatactagtaccttgattcgctctgccagcttgttgttcatcccccgttctctaattgtgtgagaaatttcaccaacatctgcacatcttacagcttcccaatccaaggagtccattgtatctgttgttttttttcttcttccattggcttctgcttgcttccttagtttgtcccagtcctgatattctgtgttctcctttccagatttcttattctttggctttgacgtagcagcatccagctcactgcactctttaggtaatgaatgacaacactcgttcaaatctacttctgctgtctgtttcaaaacttcttgggtttcttcagagtggattgtcaaattttgttgtattatactgcttttttctgaactccatgcttcaacaactttaaggtttccaactgtgctgctttgagattcaacaagtacatttttgttgatctgaatgatgttatctgattcaatcggccttgttgcttcttggggactgactgtcacctttttataaatagtgacttgagttgcagattccactgtcagtgtactctgatcacttgcactgttttcagttttgttccaagaaatttctgcaggttccgtcgctagggatttttcgaagcactcaatcaacgttgatcctgtattagtggtttcctgcaagtagagattattgacagggtaacatgtgggactacctttgtctataatttgtcttttatcgctatgctctgcagatttagacttgtcacaaatactgttgagcttgttagtgacaatctcctgattttcatggtaaacttcatgtagcatggaagaatcatccttttgtcgagctttcaatgatgaaatggagtcttccaaattttcatgcacagttttgcttggtagaatctctgcatctgagttgctctctgagcatgatcctgatttctcttgagttcgtgataaagaatctaaggtgggctgcaaagaaattagactagttgctttctcatcgtgctccttctcatattgtgtagtattgctatcttcacttacgtttttgtcaacacttgctatttcatcaggttctgcatcacgaggagccagtgaaggccagccacaaattggttggtttgaagtgtcttcagctaagcacacttgtggttcatttgatactgagcatactgtgtcatgattctctgatttaagaggaaaatgtgcagcgagcgccatgaaagcagagctataacaccatgaagggattggtcagagaatttccactcaatgtctattatccagttgtctaataaaagtttttgaaactgtatttaccttgataaatgatctgaaacattttgagtaagaaagacaccaacaactgaatctagaactgaccccttccaccgagagaatcgtctatctcctgcataagttgtgctataacatcatacttttgtaggtaatacaactaagtaaacaatacgatactactatgctgaaaattcactagtctcttgagctgtgtaagtctattgccctggagtattcaccaatctaggatcagggtgtacatgtcattccatttaatttttatttggttggacttagttttattagagaaaaatttaacagcattttctcatttcatggaatagttcttttacttattcattagtttctattactattgttcatttggattgggatatagggagaactgaaggattcattgtgtcatatgcagtggccatttctagtaacttgactaccataacccatgatatcttgaagagttgcagtcttttttgttcacaaaactaccttcccaatctttctgatatgcatagtgactagttagaaactttcgtaccttgcaccagatgcattcttgcaataaatgagtctgctcgtccacggaaaactgtgcgctcttcttcccaccattttgccttatcttcatctgttccatcaacaccttcactgtttatattttccaacagaagtttccatactttattagtttcttcatctaagtctactttagcccgaggacgatttttctttggaagatcaaatgaacccctaaagggtacaacagtgccatctctcctatatagaactagtgcattgtgttcttggtatcttgtatggaaaggaacaattgcatttctctcttgaaattcaagtaagggattttccttattgatgtctaagcatttcagttgcttgtcaattaaatcaagcatctctgtccacagtacatcacgagcagaacctgcaacaagtgtgaagaacgaatatcactatctgcaaattgagtatgaaaaaatgtaatatatagccttaagattgggctttcggttcaagtacctgataacttagcataacatcgttgcaaatttctctttgttgttcgtctctttcttgcaagtgttgtttttgtctgcgcaatcagagcattcatgcaggcgttagttctgttgaagttctcaattctcttctcattttggtacaccactttcgtgttagtggaacaagttttccccatgttgtgccctgccataattaatgaagacaaattgcgagttcttttaacatttcgagatcttttctttgtcggtgtctccttcggactaaaagccatgatcatgcattcagcatcagtatgcaggtttttcagaagcttattaggattacaatgagcgctcatcgagtttttggcttttgatccatacggattttgtatggtattattattctgagggtataaagttatgatttccctacagtcttttgctgctgtattatcatgcccttgcaccttctcagttctctttcgtttgctatgtggccaaggtatcaaatacgtctctaaattattatagtgaccaccatacatattactaatgttggtattagcttgtttgacagcgcaatgttggtccctcttagattttttagcttgttcatttccttttgccagatttacactactgctgcagtcagaaccatctggactcattggatatggaagagtttccctctccaacagaaattgtgcagagttttcacgttgaacgttggcagccatgtgaacatctttataatcctcttgaatatgaaccttcattttcaccaaagcagagtttctcaaaacaggaactgatgttcttacagtttctgttccattctttgacaggtaaccttcctccatatgatgtgcagaacagttttcacggacagtgcctgcttgtgtttttcctaccatcttcacctcaatttcatgacatactttaatggttgattttgatatctcacttctgttgatgttatgatgtacctgtgtctctgaacacacattgtcagtacatccggcatcatcagttattggttccatctcttcaaaattcaaaggctttctgcatgacttcttggcagggatttccattttggatcctgctagttctggtggagtttgcgataccttttctactttattctttctgacatattttctcttccctgttggggttttactggaatcagcaggctttggggttaccggctttggagttttcggtttgccttctttgaccaccttgggcctgtgccttctcctttttggtttttgctgtggcgttttattcgtgtcgacttcctcaatgtctcccttattggtattttgattcgcctgaagtgctgtggaatcagcagctgctgaaaaatcactagcaggtcttgtgctttcttgaagactacttaattcattgacatccaccatctcagtagtatttttattcatcagcttcactctgtcctcatcttgtacatcacctacatacaacttctgcattctagaatcccttttactatatactttgaagggcttatctggtgttgcaggtacaaaattgtgtacgcccttgcccggtgaagtatcaaatccaggtgtcaaattaagatcataataagtacgccgcagctgctgcactagagaattgtctgcaagttttttca

SEQ ID NO: 76235 - DNA, 901 bp, Cannabis sativa
gattaaaggttgaagattgaggattgaagaagattgaagattgaagaagcagttgccttgcttccgttggactgtgattatcaaaatgagagtgtttgagaacttcaaatcaaaacccttgaagatgaaaccacttaaaccctttcttcaaaataaagtcttttattattttattttattttctttctactccttaaactatacacattttgattaattaatcctccaaattttattttgataaattggtacctctttatatatagatatttgacaacattagagactaaattgaagttaagaaaaagaaaaaaaaaaaaaaaaactgaaaaccatcctggaaaatttgtgtgtattttgtctcatattgttactgtgtgaataattaatgtgtttatattacacttaataattattaaactttaaccttgctccctttaaaaatttataagaattagagtatctttaatagtgcactattttactaaattggtataaaatttttcacatcatttcactttaagaatacaccaaattttatactaaattggcgtgtgccaaatttcacaccattattaagactatctccaatggttacaccaatttagactcatttgtaacattctcgtgagtcgaattggactctattcactgatctgaacttcatcgtgaggtgatagatcaacgtcacaatcttcatttcctttaagattaggcgaccaatcaccgcgttgtacgctgaatattgatcaatcactgcgaagtccgccatagacttcattgttactggtgcttcaccaagcgttataggcaacctgatcattcctttcaactcaattgtatctccagtgaatttgtacatgctcaaggttatcgacttcaaatctttctcgtgtagtcc

SEQ ID NO: 76236 - DNA, 684 bp, Cannabis sativa
tttagtcacaacataagaatcatgatttataattagtcacaattttttcacttttagctagtcacaagttttgttgtgactaaaagtaaaaatttttgtagtgtcaaacagggaaccaaacccatattgagaccaagacccaaaccaggccaagtcctaggtctaggtctcagtctgcacccgagcgcgaggccgggattgggttcgggttcaagtctaggtaggtctgggtgtgggtccaagtcttgggccgagtctcattgtcaagtccaggtctgggtctgagatcgggcatcggtctcgggtccctattcgggttcaagtttagggttgggttcgattctgtgtctcggtcctggggtccaggtctaggtcttagggctaggtcctagtccgaatctaagtgttggtctagatctaagtccaggtacgggcatgtgagagaaaatgtaaagaagaatattttagaccaaaaaaaataaaaattattttgaaaataaaaaacaacaattttatatgttatgttttttagttttttgtaactcagttttcagaaaattattttttttaacacccttattagtttttaaaagttatttcattatttttaaaaacggaatacaattgccaaacgcccctaaatattaaacaattcataataatattttaaaattttacaagtta

SEQ ID NO: 76237 - DNA, 1106 bp, Cannabis sativa
ttttttacttctcttattttctgatcttacattattttagagttttaatgttttttttctttttttttttttttgtaatgcaatcttaatgtaatacttttatttatatttaagtatttgttgtatccctttagtggaatgagaaaatttcaaacactaataaactataaatttaaatttaagaatgcaaaggggctgctattcagagtgaccttattgaagatattaaatctctcagtatggttcaaagtatttggggttttgttttgtggatagagaaggaaatgaccttggtgattatttaggaaaatttgctttggacaacaaagcttctgcttgttggaatctggaatggggggcttccctcagttgcgagtccagttgttatgtaggacttggccaattctgttgtagtctctttgtttaatgaattccctttagaaaaaaaattaagtggatggatcaaaaactgtaagataagatagattatatattaattataagggtatttgacattgtggtgttttaataggtacactccaatgagttcaacaatcatatataaacgtccttttggtaggtgtatgcattcttaagaaggtatgtgaaatgattgaagtggtaagtgtagaatgaatgaataattcaacaagatacggcttcacttcatgtatttattttataatcaatctgtcccccacaacaatgtataaaggaaatttaaagaagacggaaactaaaagtgatgatatataacagattaaaatggggacatgagttggcaatcttttatgattggattagataaaccaaaaggaaacctaaggatatttatgtaagtataatattcatttttatatacactacagatgtagcccaactactgttgaccaaaaattataggaaacccaaaatataaaacaaggctaacaaaagcaatgatgtgggagactcccacaattacttattattatttacattaactttctaacatatttctatttatatataaattagggaactaagccgcgcttcgcgcggtgttgtctaatttttgtaatctttatatatattgcaattatattgagtgatataatctaaaatat

SEQ ID NO: 76238 - DNA, 975 bp, Cannabis sativa
aaaataatttccaacagaccaagcactgcaacaaggattttgagagctagtaggaccctcagatgatggcttctagagaatagtttcaggaagaaaataatcatcattgattaattgtgctaggtgttcagtaagagtgctaaacaaaagaggtctcaaattaaaagctcgatctctcgggtcatcactttcaacgtcagctttaaggagttcatttgccattaccttcctgccactcgccttgtctaaattttttgacttgtgcacaatcaacttagatttaataaactaagccacatgcggattaaattcatgaggaaatcttctacttctcttcatcctagccatgataactctaaaatttcatgtttcttagaactcaagaaaagtcttattaagttttgaaaaggagaagttcaagcaatttgaaaagtaagaaattttttaactcacaagaatattgtatttgaattttggaggccatggaaataagaattcaagggtgtttaggagttttagaatccttgaagcatgctcatcaaatgaggagaagaagaaaaaattttgaaaaaaaagtggtgctgaataaagaaagaaaaaaaaaattctaccttgaagggtgaagagcaattgaaggcttgatgaagatgaaatttcaaggaccttttcaaagtcttgagcgtgagagattcacagaggaagagttaaaattttattaaagcctctcttaattatagatgagttcgatctcctaatcctagagaaatgggagtcttctatattcaaatccttataggaaaaggtaaatgataagaaaaagataaaaatctatcttttctattctcctttcaacatgaattccaaattcctataaaaatagaaataagatttttcgaaagttaacattcattcctaaggctactaagattaaagaaaaattagagatttaaaaaggaaaagataaatgataagaaa

SEQ ID NO: 76239 - DNA, 2525 bp, Cannabis sativa
  modified_base (206)..(207): a, c, t, g, unknown or other
  modified_base (2318)..(2321): a, c, t, g, unknown or other
tttatgtatatgtgtgtggtatatacataatgcatggtattaattatatttatttatttatcttctgaataattaatactattttagactctatgttctgcaaaaattattaattgtactccttattttattaaatgataaaatagaccatatatatttttcaaaataataaaaataggatatgagctcaatttttaacaattttnntttttaatataacaaactttaaaataatttttaacataaacagatactaaaaatataattagcttgtcattacatctttagatcagattattgttaagttttattttgacaaaaaatcagtttattgttctatttgtataattttagaaaattctaagtctattttatcatttaacaaaacaaaaaatctaaataataacttttataaaatagagtatatattcaaaatagtatttacctttgaaagtgacatgatataaattgaataattgttaggttggtaacaaagttatataaatatatatttatatatgtatgtataatattaagtgcatatataattatatatatatgcagcatgctgaaaatgaagacataactactaactaattaatacgaattatattcttgaaaagtactagtaaagagtagggtcccaattatagaaggacaaagaataaattaatatgttaatatatcaatagaaagggtataaagaataaacatgttaagatatgtagtaaagattggataatattattctgaaataaaatatcttattaactactccacttgttgtatttgaaatactaactagggaattatatttgtgttttctcctttaaccatatgtggataagtacgtataagtttcatagaattaacaaggttcatatattggctaggtccagaagcaaagaatgagattcggcccgtttgctgtcgctcgagaagcatggcttcgaacccacaatcactaaatggtcttaagagagaagaccatctcaccagtcgagaacaccagggcagtcgactagatcccaactccctagcccaaaaaatacaagcaggaagtcaaggaccatgtcaatccagtacccttggcaaggcatttgagaatgaagtaccctactaggacccaacatctttctggtagcagcctccttacggtccgagcttgttttccagaatggttttggtaaaatctccacgtggcaccgttctgaatcagtgtagaagttgcacatcaacattccattcatagaggccttggaacaaagccaatttacctagagttcatgaaaggtattctatccaagaaaaagaagttagaagaataagagatatggtagcacttactgaggagtgcagtgcaatcctgcaaaagaaactaccactcaagcttaaagatagttaggtggtttcaatatttcatgctcaataagggattcaatggaaacaaaagctctatgtgatctgggagtgagtattaacttaatgcccatgtctgtgtttaaaagactaagattaggagaagccaagcccacaaagtgactctacaaatggccaaccattctttgactcatcctcgaggtctaattgaagatattttggtgaaggttagtaagtttatcttccctgctgattttttaatacttgacatgaaggaagatgagaatattcccatcattttggaaagatcattcttagccatggggagaacgttaattgatgtataaaaggaaaagttaaagttgcgtgttcaaaaggaagaagagactttcaatgtctttaccgcaacttaaattcctatatattgttgagtggaagttgtaaaggataatcgagaagtaacgaccaacaagaagaaagggatgtccaaagaacgattttgaacttttcgatgacgtatgaaaagactgatgtgcaggaattgggaaggtgactctcattctagggatagttttgaaatttgcaacattggaggacattttttgtcatttggtacaaggacccttatggatgcaagatgtggactgtatcctagttgaattttgcaacaccaccaccaccaccgccatacttatgtgacactcaggtaagtttcattttctctctctttaatatcacattagggacaatgtattaactatctggggggatggacttaaatttttatttttagtcttcgtttttaaaaaaaaaaaaaaaattgatctttagtttttagttttttagttgtttcttttattgttttgagtcaatttgcttaatgtgattcaatttgaaagtaggtatctagcatagtttgaaaattttatttatttttnnnnaaaaaaaaaaaaaaatctgtgtgcttagtgagattacattcttgactaattttaattttgtgatttaaaagagcatggaatcatattaggtcattttctgacaattaaattggtttatgtatgctaattgtgatatgtggaaagttatttaaaaaattcgagaactttcttgcttgctatttgaggcgaaataataaattatgc

SEQ ID NO: 76240 - DNA, 571 bp, Cannabis sativa
ctatcttcaaagctaaagtgggctctgatagtcacaccatcatccaagctcttcgacagaatgctactaattacacggactgggggcaattggtgcagaaagccattcacttgcgagattcttttcaatctttagaatttttatttgttgctagagattgtaataatgtgggtaatagtctagctaagtggagccgtttggctcagaagtctgctatttggacagattgtttacctatttgtgctgctgctaagttactagcagataagcctagtgttgcttaataaagtttttctctttcaaaacataaaagaaaatataatttgtatattgaaatatcataataattttaaaaatgaaacacttaagtttatttatttatttatttaaataaacactttttcttgtttattaaaatgtcataaataatttaaaatgtaacacttatgtttaatagttattaaaatatgtgtttaagaaaataaataaaattgtaattaaatgtagccttatgtataaacactatgtttatattattattgataatgtttattaattattaatctaatat

SEQ ID NO: 76241 - DNA, 610 bp, Cannabis sativa
tgaatctgataatagttgaagtatgaagggcctttgtgaaatggctattcctccttttgaccgagctatttccaactcaagaaagaatcaaggggaaccaaagtctttgaggtggaattttgagtgtaggaatagtttaaaggcagaggcatcatcatgattgttgctagcaatgattatgtcatcgacataaactaagagagataggaagttggtagaagtagttctaatgaataaagaatggtcattgggtgattgtttgaaaccaatatcaaggagagttgagctgagtttggcaaaccattgccttgatgactgttttaagccatataggcttttgttgagtttgcagccagcgtttgggggaagaggaccatcatgaacatagccttttggaatggacatatatacatcttcagtaagatcaccatgtaagaaggcattgttgatgtccatttgatgtaattcccaattatttatggcagtgagggcaaaaggaagtttgagagtgttaaactttgcaactggtgcaaaagtttccacatagtcaatgccatgttgttggttgtaaccttttgcaactaatcgggccttatgtctttcaacctct

SEQ ID NO: 76242 - DNA, 2323 bp, Cannabis sativa
  modified_base (157)..(168): a, c, t, g, unknown or other
tctctcttctccattaaataaccatggcaaggcccgacaccattcgttctcagtcatccaagctcgaaccgaaccccaaaaaatccaaaacctaaacctctcttctctccccgatctctcttgctccatctcgtttctctttctctctctctctctnnnnnnnnnnnnctctctctctctctctctcacgacttagaccaaatgagtcggtggagtgatttacaattgtaggtccaatgggttgtggtggttgtatcctgtgacgatgagtgggcagtgctcggggtagttcaacccaatggtggtgtggtagttgaatctggtttggttcatcatccatggtaaatctgggtggtgatttataaggatggatatggtgcttgggtatttaagagaggaagaaatgagatgaaatttgggttagggtttttaattttgaggtatttcagaagaatataaaatagaacagaaaaatattttttttcattattgttttatttttataatttaatttttttttaataattaatattatgtggactaataaaaatttgctatgtgtacacttgtgtacatgtggacaatctactatgacacttaactgagatttttagatagaagtgtaaagagccaaacgggatgggggttcactaggttttgcggtcaaatttttgatttatgtagttaagtattaaaaaaagtaaaatttaagtggttttattttaccgctaatatcctttaaaaaatttatgataaaaaactatgtttgtcatatatatatataaaatagagaaaagacatagaaaattatagtgatttgactcgatgcttgagccacttgagcctactctaccttttgaagagtactatgtgtatgctattatgaccagctccttcaccttcaaatggaggtagattcacctacttatagagttgaatattacaaaattatggtcataatggattcatctttggcctttaaaaatcacattcagggataccatcgagaatcaatcgatagcctctcgacatgtttcgatagtttttcaattatatggttagaaatgttgtccttaaaatttctcaactattttctgatagtaatgtgacatgttttcgatattttactgtgtgtgcatccgtttacattatttagggtgtttcttgactaagtattttttcattattattaaattacatgatcgactgtgtttgtgcttgtactatgtgatagtgtttgaggtgttgagggttttagtttgatctttaaaagcgaatgtagtatgacgttgatggttgaaatttacatcaccttacagaaaatgcgtgatattttatatgaagagttggagattgactcattggagtatgatttgaaggcaagtattttttttttttgttgctcaaaacagtttttactgtaatgtcattttcgacactttgatagtttgccgacaatttttcaatatagtcacgatgttttttcgaatttttttcaacaattggtaattttaaataatgaaattctcctacgtatcctactaggacattttcgatggttttttgaaaggattttgtgttcacgataatttttcaatgttcttttgatttactgcatttgattcttttgctacgtttgtaagtatgtttctcgataatttctcagtagtttttacgattattaggcacattaatttgaattaaacaaaacattttggagtaatgattttgatactatcccgatagtatagcgctaatatgtaatttcattctcaatatactttattacttgaacctatcaggatactatcgaaaaagcataaataaaccacaatgtaaacaccatcatctcaggaatcaacccccagaatattaaaaaaactaaaatctcactaaaacaaatacaaagcacatttaaaatcacaaaaaattaaaacacaattgttgaatcttatttttgaaaacctaacaactataaaaaaaaattgctgcagatcgtcatcctctagttcgtcttcccagtggtggtgatggaggacaaggatcagtggttctcggcctttcatgctctggttcggtgggcttttgacaatgagaatacgaaagaaccatggggcatctgtgcttttgaaggtttggagcttctggcttttctatgcgagagagatgggagaagaataggtggtgctagaagaactttgggcctcggtgggggtcgtggtggcaacaatgacgagaagggaacttagggcgtcgagggtttctcttcaaatctaaagagagaaaaaaagatagagagggagatgttttttttttttttttt

SEQ ID NO: 76243 - DNA, 2403 bp, Cannabis sativa
attttaatttatgtatattaattttaatttttcgggcctcaaaaattatggggcctggggcctatgccccggctgccccaccctctggccggccgtgtccatataaggcactgtaatgagattaggattttcatctcacacacacttgtaatggtgtgggtgagagagagagagagtaactttagcccaattatatttatactttttccgagacaaagtatttcacaagcaaattcaagtgcaacatgttctaaccactcgaaattagctcaagtggccataaacgagtgcgtgtgtgttaaaggtcgtcggttcgattctcaaattgaataatgtaatatataaatgcttaaatagaaaaataaaagtgcaacatgctctaggtggaccaaacctagacctagctctaggttccctcttttgaaaggcaaataggagagctccaagagttagttatagttagtagttaatcactttagttttacaaaaaagtaatattagttgacaaaaacatgtatttcatcatagtccaaacacaaaaacaagatttcatagtcgaaacttgaaacaaccttaaaacctacatgatacatataaatatatatatatatatataaaaaaagaaaaaatttcacaagaatcactaataaaaagtttcaaaacaccatttattcacttgcatactaaagacctgagctgggtttggttgacatcaacaacaatagtacagtccaaattggttgacttcttcttcttcatgataaacataagctcaactttcccggtcaacgccgccgtacaccggaaagtcaaagctccggcagtcaaatctctattaagattattagcaatagaagtgtttaccaaatttgaagagctcaaattcacttccaatttaatctttttcttggactgcaaaccaacctttcccttcggaatattaacccgtcccacggcggcgccaccgccgtaggtaaagaccaaagttgtgttgtcaaacttgtaaggcccaaagttggaattttgaattctcacttgggcattaaatttcatatcaaatgatgaaaccccaccattattattagctttgttcaaagttattggatcgatattgtttattctaaagttgggatttttagctctcataataacagcaccaaaaaccccaataacaatggcttgaaacactgcaaaaatggctatgtagattgctaatctgatcctcttctttcgttttagctcatctttggtggtgtctgaatttggtgtctcttcattgcttcttctactcccatttgctggggccaagggataagcttgttgttgattcttctgatctgccattgaaaagaaaagaaaaggaaaaagactctgtttttattattacaaaagacttgtttgtatgatatggtgaaagagtaataagttttatatatatataaaagaaatgagtgtggaaaatgtatgaagagatatgaaaaagaaatgatatcgtgtgtattcaatcactaaacgcggtaaaagtttggaatttctcacttctagatggtctagtagactttatagtcttttaagtaaagtttaattttttattttatttgtttgttttaatggctataagggtatgtttggtaggaaataaggagattagaatggatgagagtaagatggagggagagtttagaaatgagtgagagaatactatttctcttttgtattgtttggtattaattattaaaattgctataatatcttttttaatattaataataattattgttttaagagatagttttgatatttgatatatttatttattcgttaagcggcataagtactcaccggtataagtagtacttaatgtttgtcaaattgtaattagtctctaatttggtttgtacaaattctgttattatcttaaacatgacacagaaaatgctctgattcaagatcattgagtatagacaaaaagatatatggcatcaattacttctaaatgttcttttaataaatttaaagcaaaatctgtactgataaaattgaaaaaaaattacagttttacaactaatagatatttatgccgttaaaaataaacattaaatttatgttgctttcaaatttaaaactttcaatatttatactgctattcatcctttttcaaaatgttgagggatttaatttttaggacttaaaaggaaaaatgtctccatccctttctttctaccaaataaaggattccatctctctctatcctttcactcatatttcttcccaaccaaacatagtgtaaaagaaatgaacattttctatttttgtttttattagtaaaagaagcttcggttctttgctgttgtattagccattaattcctgtatacatataaaagctgatatgaatcatagg

SEQ ID NO: 76244 - DNA, 1416 bp, Cannabis sativa
taatttaataaatagatcattaaaagacagagaaagctaagcaaatgactttgttccaacttctactaatggctgccaaattcaacaatataaagaaagctaacctgtttaaccaatttgtcatcttcaactgaaactggtttgatctccttcacctcggggttctttgtgctatcgctactcggctaaaccaacagtaagtgaaaaacaaaaatctgttactaaatttctatataatgaacgaattaaaattatagttattcatcttttggaaggcctctttagtcattctaccgaaatggtagaaaaacaatttcaatgctttataaagcaaccaaacgaacgaatggaatgaaaaaggtttccattccattactcctaaccaaacacaccctaagatttcattgaattgaagtatcatagttctataacatctaacatatcatatcttccataccttgccagcaatgattttttccaaagcttcagttccattttcccttatatatttctccacttcagttaaaactctctctttctcgactgatgtatgcttctgttgggaaaaccagtttaagataatctggtgatccattgaaaggcaagggcataaaacatgtttgtagacatgaaaagcgccatcgaaataaggtatcactagtgaaaagacagtaactagcctaatgtaaggccagagtgggaacctgacaagtgaaaattgcataatgacagataagaaatttgtgttagaataaatttctcactctaatcttatgttgtagagttattagattgttcagaaactttaataatcagaaatgaagattcttattcatctatatcaagggtcattatcagaatcctaatacataatgatttgccttttactctctatggaaatgtattgacacaaataagtggtactaataacatcgagcattagtgtcgctctgtaaatggttagcaattttctataattattgttaaagtaaaataagtagagcccgagattgaattgtatcaatagcgatattaagaaaaagtttccaatcaacaagggaactttctaattcttcaattacttaatactaaatgaagaaaaaaagcaaatgcttggtggtcaaattatgaaatttatgaacccctttagtactaatttcctgttttaccatgacattttctgaaaaaccaagaggaaaaacattctcacaacataggaaatcaaataaaaaacttcatgtcatcatgttacaaacatgaaagaaaacatagtagtgtaaaaaaacttaccattcaaggagattcaaagtgtgttcaagaagcaaaatcagagagaagacaacccaataagtgttcaacttttgagtttccaaaacagaattggcctcaatggccctaatagaagcacatctgtca

SEQ ID NO: 76245 - DNA, 4289 bp, Cannabis sativa
aaaaaaaaaagatggacataattcttagatggattgaatatttgattatagaacactaatagtttattttagttaggaatttccaatacaataattaattgggtataaacatcatcattaaattatgtattgctgttctagtagtttaaacaattatactaaccattggtaatcaactattttatgttcaataaagaaaaaaggtgtgtaactcttgtaaatatataataatcattaggctaaacaattaaagtaaccaaaaccatattcgttataatagttacttaccgttgatacaaacgttaacaaatacaaaaagattaaaaggtgaaaaaaaaaaagtgacacaacacaaaccaattgtatttcatcattgtaaccttttttttttttttaaaaaaaaatataaaataaaattagacttgatttattgtatcaattgagccttttaacttttttttttaatggtgttcttagtataagaagacaagtagatttaaggggttatttcataaatatacaaaaacaataaaaatatagttgtaatgaatttttttaacatatttttacagtttttaagattttatttacagagaatacagtttttttttttttttcttttttatgttttttgtatgttatactcttactattttgttgttaattttttttattattttaatattgtttttgtattacttttatgtagtatttttgtaattttcatattatttttatagaatttcataataaaggtgaaaaaaaaagtatttgaacttaaattttcttagatttagtcgataacaacttatgcctatttggatgcaaaggtaaggttctgttcactagaatttgggccttttcaaaattttgggctaggctgacctcttgaactaggcccaatagttccaaaatgaccaacaataagaacaaggccggaaagaaaatttctgtttttttccaagaaaagataccaaatgtcatacataggaagaaaataacagaaaatatgatttattcaccgaaaaaatacacatattaattaatataatattaattggtttattatattatttatgaccatccatgaccaacattcaacttaattaatagtagttactcttatcatcatcattagcaacaaaagaaatagtattttaatttaaaattactaaattaatccaccggctcagattatttcagaacaaaaataataaaataaaacaaccaaaaagaaatgtgtaaactaaagtacccactttcaaaattcaaacacatcatacttattttcatatacctaggacaattaggtgtacttaatctatataatttaattattttccatttgcaagctgttaattgaaataattaattttctacaaaccaaagagctggatcacaaatcgaagagctggataattattatatgattttttttcttcgaactataattttcatagaattttatattttgattttttttaggaaatagaagcctcaaaaattttgaatttataaatagtataaatttaataatttttttagtggtatatatatttaatgttcttaaattagtctgtcttaactctcatgtaatattagttaattctaattttttatattgaccaaaaaaattacaattttagaaatatgaatagttatattctaaaaaaattgataaacttcatagcatttacaaatataaaaatttggatgattatggcactatttattttttttccttttattataaaaattcaaaagaattttttttcctacactataaaattattataaatatatgtttttttaaatatattcttttaattttttaaaaatataatttagttactggactatagataatttttttatttatatgtctattttttatgtaaattatttaaatttaaggaatcactttatatactattttgttttatttttattatttggattgctcctatgtgaatttgtgtgagttagtgtgtgaattgaaattgtaatttatatattgggtgcttgcttctgtttgtttcgtataaatgtaaaaaaaaaaaaatacttcaaaatatttaagtaaaaaaatccttataaatttataaattaactatgttaatgttataaaaaaataacatagcctaaatttataaaactctcaagaatcaaactaagtttgaggatcaaaaatcctatttattcttgcattaatacagtgtcaaaaacattcaaaaaaaaaaaaaaatacagtgtcaaaaaagtacagcaactctttattaagccgagctgttaattttaattggtatgaaaaacaaatccaaataaaataatacaaaaatatatattaatggtttccttatgtacactctcaaacaaataataataataataataacgacaatgaatcaatgaaacaaatattaataataataataataataataataataaaaacaaactcgtattaacataataacccaaaattaaaatatacaaaaaaaactgataatcttaatcgtaatcttaatcataattaacatcttaaatctttgattctcttagttttcaaaaccagattcatatcacacttcatctcactcgtctttctgttattaataatcttaatcaactcaactttaccagtgatttttgcatagctactgatcttcaaaactccattgttcaaatcactgttcagattattcgcaccctccggaagcctactcgatcgaatatccatcgttaatctcaccctcgtccttcctctcgtttccgtacggcctttcccgaaccgccgctcgccgattttctgaccgccgtaaaggatcctggctgagcttccgtcgaagctgtaaggtccgaagttaggattctcaattgaaatctccgccaccagagtagcgttaactgacggaaacggcgaggttgtgtagtggagagttttaacggtaacggatctgattttaacgtcgggagatttaggtcggagaacgattagggagaaaattagtaagattaaaccgaggaatacgattgtagcgaacacgtagatgaaacatttgttgcttcgttcttttcttatggctttgaatgctggattctcttcgtcgctacggtggtggattcgattcggagctaatggccatgactggctttcttcagtcatttttttgtttgtttggcgagaaagaaaatgaatgggaaaattagggtaagggaaagtgttttttgtttttgtcttaaaacgactgcgttttaatgtgatctgattttttttttttggtttctgatttgtgtgaataaaaggggtttatatatatagtggggttttggtgagttaaaaatagccgcgttgaaacattttgatttgaaatggactgagtggactcgtttagggttaaaacaagtgggtttggtttgggtcatgccatgtgggcgtgttggtttttggaagccacgtgggcatttattatttatttattacttacaaaacaaaaaaaaaatgagaaactaataataattatagtaatatcaaatctatatatatatgtgggatttaaaaatgattatatattatgatgtaatatcaaataataatagtaatgtcattatgtgtaagttttggagtgtgtgattggtttttgaactctttgatcaaatctaagtgagatatctaaaattagtgacataagaaaattaaattgggtatataatatattatactattatagtaatattaattaatgtttttttgtttgttttaggaaagtttaaattagttaccatatacataggtcttgcatgctgtcaatatataagattcttttttttatttattattattttttttatgtattaataaaatagtttaggttataatatagtgataattttgtttgtaattataatttagaaaatttcagtagtaaatctctttaagagttcgttttggtagatttttatctattttgatatttagaaaattattttagtttatttttttttatgatcacatacgttatacttatataagataatcgtctgtaattttttagaaaattccgaaaaatttataatgtcaaaaataaaatttaaacagttactcaatatgcatatgagaaaacagtcgcgtatgcaacaaaaaatacaaattttattaaactactcaaaattttcacgtacacaattatgataaaaattagactaaaaaactcttttacgtaccaaaatagttatgtaataatttatcgaaatataaagagtgcactgtaaacttaccctataattta

SEQ ID NO: 76246 - DNA, 3256 bp, Cannabis sativa
  modified_base (55)..(58): a, c, t, g, unknown or other
taaattttattctattcctatttcaattctcattttcattcctattcctatattnnnnttcctcccaaccaaacgccaagaaagtattttggtttcgccagaaacaaccctaataaaattaagttatataaaaagatttgatcaaattagcatctaaaatttggtcttcaagtattcaggtatatatttgactctcctcatagaatggacacagtagtaatcctttcctaattgttcaatgatactttctttatctgaggattttcatttggcaggaaagtcgttcatcagtgaacaatgagaaacctacatcatctggtaaattttagtgcaacgatttcgagtgtgtcactacacaaatgaattgttatttaaacttgtgttatgttgcaatacacaggagggaacacatcaacaaggacttggggaattccatcaatgtctagtaattttcttaaaagtaaagatttccagtgttcttttagataaatgagttttctttaaacttggggtatgttgcaataatataggtgtgaactcatcaccaaggacttgggggattccatcaatgtttgggaccagaggaggatcatctgaaggaaaaccagttagcaacacaactgtagatgagcctaatggttgttctaatcaaatgccttgtacaatccaattgacagaggtaatttcatatttgccaaatcccaataaataattgcggtaattatactcaaatcatctcaattattgtagtttagtacttaattttttctttttttgcgataataatacacgatattaatattttgttgtataccatcaatttttgttatcagcatatattattactttctttattctgtttatatttcaaatattcttttgtgttacgtaaatgtgtcacgtcattatttaataacaaaaaattgacggtttgtacctaatggtaacaaaatattgtattattaccgaaagaaaaaaatgatataaaagtgcgaccattagaaagatttgagtattatcgcctcaaataacctttttttttttttttcatatttgatttgtttttgattccttcttaatgtcctaattggatttggaatcagcccccttcaatattaaggccacttgaagctacagagagtgaaacagttgagatttgtgtaaccaaatcactcatccaatcttactatgacattgtcagaaagaatattcaagatcttgtcccaaaagctataatgcattttttggtaagcctctctctctctcatgtttggtatcttaacctttctttgttttgtggcttgattattgattgatgtgcttttaggtgaaccatacaaaaaggaaacttcagagtacctttacacagaaactttataggtataaataattcaatttttatgtctttgatccttaaactggtccatttttatgtctttgatccttaaactggtccatttttatgtctggcagttttgaaagaaaatataatctattgcacgtcgaatttcatttaagagtatagcttactccactcgttgttaattatttttatgatgatactccgtacttcttatcatcttagtttttaaaacacaatttcgcattctaacatgataacaaagttaaaaaccaaaagagacctatatgttcggttgttgcactttaatatagttgagagtgatttttctgatggttttcgggtttggagctgtatttttttcagtcattggaagtgtcagtgtcatgaagcaattagtcttggcaatagaaattagtaacatgagtttgtgaaatgaatgattctatgcagtggggacctatttgaagagctattgctcgaggacgacgaggttgtctcgaaaagaaagtgtaatcaagaattgtttctggttttacaagaagccattgaggtaagtaataatcaaacattgaataatgattagttagttactatgatttttgatacacaaaattatttcagatgcttgaggaagttgaatctgatgtttcaactggaagttcaacaatcatttcttcatcgagtagtgttgcagggatcacatattagtttatgttcaactaccaaacttcagatttaagaactgtaattttgaaatgaagtgattgaaaatattgacagctacgtggttttggttaattgaatctaaaatctcttttaattttaaataaatagtgtatggtattaaattttgatttgtgtaaattttgtcatgtaaattgaaaaattgaatttatgtccaatgaatcatacctaccaagaaaaagtcagttatatttctcgagagaaatgctaaaagacatcaatggtacttaacactctcaaaaatataatattgctattagtgtatttaagtatcaaatctcatatattttaatataataacttttatgaaatattgctagtgctacctttagatggtgttaagaaccactagtgcttaatagcaatattgatgggtgacaagagaagagatataactttgtgatagggcagaacatttgcacccgaaaatccacccagttggcaaacctgactgacctaatcccgaaaaacccaaaaaaattggatttaaaagattagtgggccaattcgggtgtaacccagttccaaatcgggttgggttcaagttagaaaaggtcaagaaattcaaaacccgagtgcacttggaactcgattttgtttagttaaatatatacttttatacccttacacggaaacgaatcaaacaccccccaccccaaaaaaacctaattctaatttctaaaactaaagaaccccattcgaaagccccgacttccacgaccccaaccccagactaggtccggcaagaccccaccgccccagctcaagtccagcgagacgcccaccactccacacaagtatttttcttccctttttttctgtttttttatttgttctttccttcctcatccgctcgggcctccgacaacaatgatctggtccagttgcttcgcctccgtcccaacctgcacccaagcctaaaacccaaaagcctgttctaccacacgggcgagttcgatacacaatctatacaccaaaaatctaaaaacccaaaacccacctgatgtgcacttcatcatatgtaaatcatccaagacatatttgaaaatctagaatttgaattgatgtgatttcattaaaaattaggagaattacctttaattttttttttttcaaatttacagtttgagtttctaaagtagttgtagc

SEQ ID NO: 76247 - DNA, 876 bp, Cannabis sativa
ggaagaagagataattcatcgatcggtaaaagagccccaaggaatacaaactaaaaacaaatcaagccaaagaaagggttatgcgagcagatagtattgcatcagatcttagagagagattaaatagaaactctcgccaaaaatatgattaggttaaccaaccaattgataactctattcaacgaagggtcattcagttggaggactggtttagaaaataccgagatagggaatacgagaagctcccagagtatcattctaatgacaaccctgagcctttccatcctaaaattttgaatttacaattttcaaaaagatttaaaaatccacatgtgactccttatgatgggacaattgacacaatgcctcatataaaaaatttcaacataataatacgagctagcaaagtgggaaataacttgcaatgcattctattcccaacattcgtcatcggagctgcgagcagctggtttgacaagttcatcgaatattctattacctcttggaaactgttgtcttaggacttttatgccgctaaaaatagaagacctgaggcatcatctttaaccaatttataaaataacaacctgatgaatccttgaaggccttcttgagttgtttcaacaccacgacagccaaggttaaatatttgaataatagcactgacctaactaccctacaagcgggaataacaccaagaagtgagctttaggatgatacacaagtatgcccagtaagatcaataagtgaattcaacgaccggacacttatatacgtctaaaataaagaggctttatccgaacttaagctattaaaagatggctcgagaaataaacctagctctagcaacgccaaagaaaatattgaaaacacaag

SEQ ID NO: 76248 - DNA, 2013 bp, Cannabis sativa
  modified_base (227)..(242): a, c, t, g, unknown or other
  modified_base (296)..(309): a, c, t, g, unknown or other
cgattattggattatcatgcggattggattagatcggatactttgtgaacaagcctagtttagggttgttctattagctgaaaaaaaaaataagaaaaaacaaatctagcaaaaaatgaaattaaaaaaagtcgagtttgacttaagtattttgtatataaacatatttttgatatggtgtaaaaaaaaaatattttttgacattttttttaattaagtagttaaannnnnnnnnnnnnnnnaaatttctcttttattattcgttattagatcaaaatttaatggtttaatatttnnnnnnnnnnnnnntatagttaaatttatttaataatcatcaataaataatactaattgagaagtattttatatatatttcatcgaatttagatttagaattaatttgatttattttacaaaacaaatactatataatcattattacacataaaattaatacacacttatagacaagtaatttcaacaaattatcttatttaagaagagcctcatttatttaaaggctaattttaatttttgtcattctgaattttgatatatacaaaatcatgctcttaaatttttaaagttgttaaaaatttctcaaaactattgacacttttggattttaaaacttatttctaatttctgtaagtaaagtctaacatgaatgaaagttcagagaacatgatttagtacatgttaaacttcgaggtacgtaatgtcaaatttgcgtgtgatttgtctatgtgcacatattattacattttgaaacacagaaaccaataacttattaggacaaaaacaaaccaaattaatatttctcaatcctaataaataataatatatcatttattatatttgagaatagtgattaaaaaacacctaaaataattaactaagttaggccccatattctatgccaaccaatcctttagggcaaggctgtcccttgaaactctctttctctctcatttttatattcctttcaaattttccaaaatgcttataaatagaaccacacaatcccattctcaaaacatcatcacaaacacaactaccaaatttttttctctctcaattcacacattttctctttagagttttttcttcatcaagagagaaaatggagtcaaagtcaacaatggtatttttgatggttgtgatgatgatggtgttcacagccattcctatggcctcagcagcagattcaccagccccaagcccaacttcagatgcggcccaattcattccggccttctttgcatcttttctagctttggctttgggcttagtcttctaagctcatatcatatcaattttcattcatattattttttgattaatattgtcaattatttcatggtgggtttggtttgtttttaattagtttcaatttttgttaattaataatgggatttttattgtaattagatattattctttgttgtggatgtgattcatcatgtctagtgtatcttataaataaaattaattaataattctagtgttattacaaattttgattttatgggttggcttaaaattcatataaaacgatttatatatattatattcaaggtattacaaatttcatatatctttaaattaattcaatatgttttatttattctttaaaaaaaaaattcaatatgttttttttttttttgttaaatcttttttaagcagagtatatatagacaaatttatataatagataaaaaatttgaaaaatttacaaaaatacattattatggaaaaaagtttcatttttactttgtaaacttttttatttacaaaaatgcatcttcaataaaaagaataaatcgtttttttttttgttgttgttttatttatagttgtattataattgtcatgagattgtttttctagttgttttttattgttttatagtttatttatagttgtcgtgagattgatttcttgttttttagttttttttttttttttgagcaaagtatatttttgtaattaaaactttacaaacgtattttt

SEQ ID NO: 76249 - DNA, 1248 bp, Cannabis sativa
ttttttttcacttaattatataatttattgcatgagagtgttgtaagtagcataacacaaatcagaagtttgattgggccaaacaagaaaaataaaatgttgtgcaaaccgaccattaattaattgtatagaaaagccagctatcatcactcaaaacatcaccctaatccaatgtattaattactaatcattaattaatataattaatgatatattttgtgagtgtgtgattattggttttattacattcatccaatcattaattgacgtctaaatcattaagataagactttatagtagatgtgtattgtaccacaatttgtttggattttgtactttcataaaaatttaaaaataagttttgcatcttgtaaagtgtttggaaaatatattaaacttggtctttaaatttattttttaccaaaatatattttaactaggggagtgtaatgtcaaccttctataacaacctcttagtcaatttttgcgtgtttaaaaatacatgacgaaatatataatttttttcatcacaatgttcgttctagctacaacatcattttcataaatttttgaaacatttcaaataggttagagtgtcgaaaataggtttgaaattttttgaacacgcacgtggtaaactggaatattagaatctattttcggtactataaattatttatttttaaaagattatagggatgatattcatactataacgaataatattatatgtcaacatgtaattttaggcacaggaattgattaggagattgtaataataagaggtttactgcacaaaaaggagttttatatttggttttttcactagtctatcttcagttaagaaaatcttggtacaaaatagtattaaggcgagatgtaggtctcgaaaacaccgaagacatacgtgggatctatatatttggttatttcatgataactaaagacatatatatataggtttttaaaataaaaaattgatatttataccataaatcgaagccaccgtttaacaccaccgtctccgagtcccaaacccagaaaaccctaaaatcaaaatccttgaacaacactattttttaattaccaccgtttaacaccaccaaatttccgagcgccatccgattttccaacaatcacgtagatttttcgaccaaccaccgctatatccaaactctatattacacacactaacaaaaataaaaaaacacacacacaaagaaaaaataatacatgctaaaatacata

SEQ ID NO: 76250 - DNA, 528 bp, Cannabis sativa
gaggatctccccacaatggttaagcctcttcctaataccatgaggagaaccccaattagaattatccagccacaccgacttcacaattttgacacactcctcttccccagcccaagcttgttcgtaatggaacctagatttccatctaggagtttttgttgaccaattcggtttggaatccgcacacaatagcaagggccggtgatccgaattccaccaaggaaggagagtaaccattgatgatcgaaatcgtctaaaccattccggattttccaatactctatccaaattttcaaagacaaggttggtttgtcgcccattgcaccaagtaaattccccacctttcatttgaacttccctgaatttgcaaaaggaaatagcattcttaaattctgtcatctgagattcaggtttcctacatcccccttttttctcttttgctgacattatctcattataatctccttcgcaaagccacgcaccttgaattaaatcacgaagtctttccaacagctgccaagaagactt

SEQ ID NO: 76251 - DNA, 718 bp, Cannabis sativa
tgtgactacagtattcttaattatctatttgtagctaatccaaattagctaaagaagcacattaacaaagccaaaaaatttgtcccatttttacctatacaagccaattaaaacactccacctcaatttggaggtaaaatcaggttttactcaaatgtgtttattaataatataataaaaagtgtgtatgttatttttcctttactaatctcatgaattgtttaaaaaacttaaccacgttttaaaatttacatgtagtagtaatttaatttataacgaataccattatgaaaaaactattctaacatatttttcaaaaatagaggttaagaaagatgtaataagatgtcataattagtaattaaggtggcgtttagttggaggtaatgaaataaaatagaatggaaaagaaacaatcttcatttctttgtttgattgcatatttaagtattagaatgatattttaatataacggtctttctactattttagtagattaactattttattttaaaaaagaaaaaaaagactatttcaatgaatgaaaagaaaaattaataactaattttttgtatgtattttaaattttatcccactctatttatattcttattctcatttatattcttatatttttattcttttcaaatgctgtaataagaaacatatttccggttaagaaacatgtaataagatgctgtaattagtaattagtttg

SEQ ID NO: 76252 - DNA, 1411 bp, Cannabis sativa
tagaatttatatataatggtacacaccaataagacatctttttaaaaaataaaaaataaaaaataccaataagacatcttttagtaaataataattaaaataaaaatttacactataacacggaaggctatacatatataggtatactttatctatcatatcatattatagctatagctacatacaaaattaagtatatttttctcaagtacatatgtctttacatattatctgtggaccatattcatctatatctccaacaaattattagttaaaataaaaatagatgagttacctgaacaattattattactattcattttaaattacatagtagttttaagttttaattataaactttacactgaaaaaacttgatgcaagacttttcaaacacagaaatgaggggtgtcttctttacttaattggtaagattcatgccttaagttgaatcgtaaccttataaataattattaattatttttcatttatatataagtaatatagtaaatagaataaggtcaaacttagttattattattatatatcttttaattattattatcagtttcaattgtcaaacataatttgtcacataataactaattatgattctacgcaaagataattaataataaaaataataaccgaattttcaagttacaaggagttacattttattttatttctattgtagaagttacatcttctaaaaaaaaggtaattaatacttttttttaatatttaacatccatttttatcgattttttatgttttatttttcagtaacatatcaaattgttggtttacatggacatattaaaccctagcaaagaaagatgaaagattggaactttgaaagtgacacagtcaatacattattcaacaagttataatgtcgatattattgatatgggcatttattttagatcaagaccattcactcttatatatatgtacaattaaatcattttagtataaggtccgtaaattattgttaagatttacatgtatatagctatgggacaactcatatttgtaggcttttgagcttcaacaatattgtttgatgataaaaaaaataatttcataaaccctctttagtatctttcaaatcaaactttgcagtttgcagtgtgaaattaaaacatgtcagaaaatacttcatttattttcaaaatgatacaattcaacaagttttggtgtaattttataattttttgtttaaaaagtgttaactggatttttaaccaaccaaagcgaaatcttaataaataagatttaaactaaaattgtaataataaatgtaattaattgttgaggtttgtgccttaaataaaactctaattaaatttaatttttttctattcaattatcaataaagaaatagatttaatttcattacttgttt

SEQ ID NO: 76253 - DNA, 881 bp, Cannabis sativa
ccatagcttcggcatcagctggtgaagtttttcctggccgagaggaccccgaagccaccaacagctgaccgtggcagtccctcaccacaaaatcaaaagatattattaatttcagttcaagacaaaataattgagtgcagttcatgaaatttctaaaaaaaaaaattattagcacatttgatgctcaaaaaagacaatctcatttatttatgtaattaataaaatttaaaaaaaaatactaacatttaaaatacttatttttggctaaaactctagcacttgaagatttctccaaaagttaaaaactttttgtaacgtgttgtctctaattgcttaccaacttgttgtaagttagtcacaaaacacataccaatctcaagtgtgtaaaactcatgccgagaccaccactcatgtcttgctcacatgcaatttgctaaatttttttggtacttcctttaacatgaccaccttctccacttttggtaactggtttgagtttttgcagaagaattttgatgacaaactggtctgtcgtgctactatgatatgttgggcaatttggaaggcccgtaacgattttgtttggaagaaaaaaacttcctctattgaagagattatagaactgttacacttgattattggcgaaaggctcaggataaattaaaccttattatcactgtctttacaaagcaatggtgatggacctgagttttagattaaactaataataaattgttaaattagatctcactgtaatatttattattactgtgttacaagatgaagtgaaaatacagataaaatacaaaacagaatacaacaggaaatagatcctatgtggctttgcctctagtggatcaagaactagctgttagttacaa

SEQ ID NO: 76254 - DNA, 929 bp, Cannabis sativa
tggtcggtttcggtttttcggtttttatgaacactcctacaatcgactatgacagaagttgtgggagtcaaaaaggtttttaactggatcaaacatcaagatctttctcaaattattattgaatttgattgtcaaggagttgttcatgcgatctgtcgtgctctccaactgaatacgccgtttgggttgattatttctgattgtaaacgtctacattctttttttaaacaatgtttctattgtatttgttaaacgatctgtgaagaagacaattaattgtttggctcatgttacttgttctttttcaagtcacgacatgtaatggacctgaagccaaaatggaacaaatcaaagctaatttggggttaagatattcaaacccttaggattagcaaacaccataatacaacgatcaaaatactaggattggccctctaaggctcttctcctatctcccttacacccaaaatgagccaagaacatgccaaaatgataaacaaaaaacgaaatatccaagcctcattcatagccttgtaattttctaaataaaatttgtattttttatattttctttaaaaattttggatatttttgaaaatctcccttacttttttgctttttataaaacgtttatttagacatttttttttcattgacaaacttttatttagactttacatacatatgactaatcatgatttaaaaccttctatcaaagaaagaaaagaaaagaaaagtataataacctgatttctattagtttgaccatgcatattccatagatgtattatgtatattacttgaaggttgaaaccacttattaataactaggtaatgtagccgccctttgtgcggcgaatttgaatatttttttaaaaaaaaattagatatttatgaataaataaaatattgtaaatatttaaaataat

SEQ ID NO: 76255 - DNA, 1206 bp, Cannabis sativa
aagaattagataaaacaaaaacttggaagctaagaatgtaccattttatccaagctctctggggttaaagatgacatcgcttgttgtgctttctcggcatcttctggggaaagtttgaaaccgaattgttcacccatgtttgccatcatttctgggctcatattctttatcattgatgtgaacatctgcaaattaatgaatgtttaatggacgtgtgagaaatcatacaagtcttttccttcccattatcaaatgctcaagtacctaatccaaattttgtcaacccatcttcacttaatgatttaaagcacagatcttactccagaaaacaacccatataaattagaccaagggataattctaattttgaactataaacataaagtataaaaaggcaaacctgccgcattgctggatctttcatttggtttctcatctgctcttgcagatcaccagtgggagcggggaagctcgacggaggaggaaaacttcttgaatttgaatacgaactactttcccctcgaacattagtgtcatcattaacagaactgagtccggcacttaaaccactatctgaacttgttccagctgcatttacagcagtaggcattggaaatgagttatttcccctcaattgtgttgccatttcaaacatcttctgaagttcctctggtggcattttattcatcatatcagatgctgttttcagcatgtcaggtgtcagatttggaggaattgacccaggtttgaaactgtcattagtgccaaggcctcccataaaacttgggctatccccctgaaatgaggaagccatttcgaacattttctgaagttcctcaggtgacattttcccaatcatgtttgatgcagactttatcatatcagcatttacctctccagagttaccggcattcaaagcggcaagggtttccggatcagcatttgcaacgaatttctggaatgttctattaatgaagacatacatgcagaaaagtaaattacttgggttacaaatctgtgagtgagaaaaatagaccggaaaacattgcaacaaatgaacggtgataactgtacatagcatttcaatagcatatcagaaaaaacgtgcagtgctggcttagcttaagcaacaaattgtcatgcaagaggttgttcacatattatataatatttttatatatatatatatatatattcttaaattaa

SEQ ID NO: 76256 - DNA, 597 bp, Cannabis sativa
tttgatcacaattaaaatgagactaatttgcctgaacaagccaaatagatgaatctcattcttttgttagaatgttctgttgattcgtgtatggggttccttgaaagaaaacaatagtgttgtaaatgtttcaaggtgaaaagggaagtgtcttattcttttttttttttactgtagtagccttagcacattcttttgctttggaaatatatgcattcaaatgaagatgcatacaaacaattgttgatatgttagtaccaactgccaacttttccagtggccatcgtgtagaagttttaaattctcatctaatttatcggttggaaggagctatcactttatttatttatttagtacttgttatctcaatgtttgttcaatctatatcttgcattttttgtctttaccaattattattttataaataagcttgtgccaaactaatgacgtgcctatcgccacactactaagcctaattcttttgacgaatgaattctccatattttgcattataatttctgcctgctatcttaagtccttccagtttttattttcgacaccgtctcaaaagattttatattagtagagtaggtggaa

SEQ ID NO: 76257 - DNA, 821 bp, Cannabis sativa
  modified_base (460)..(460): a, c, t, g, unknown or other
aattttcctagtaattattattatatttataatttatttgattaaaattttataaaataatccacctctcttaatttactctaaaatacaaaatgtttccttaataatgagtttcttatctttttataataccaattaacaggtaatataagcttttagatattagtactcattattttattattattattattattttatttatttaaataaccattaatataaaattacatacgatactatttagtataataataacaccttgaatatcataacaaactattttgaataccaattagtattaaattatatataagggtaaataccattttgaatcatgtgttttgtaaaagttactaattagaccctctgtaatgttaaatgacaaaatagaccctatattttccaaaatagtaaaaataggaccctaaacttaatttttcaataattttattttttnatataactaactttaagataatttctaacacaaacaaatacaaaaaatgtaaccaattttgtcatataacatctgtagattagattattattaagttttattttaacaaaaaatcaattcagggtcctatttgtacgattttagaaaatacaaggtctattttgtcatttaacaaaacagaatgtctaattaataacttttgcaaaacataaggtcaaaaatagtatttaccatacatataataccaattagtatgaattatgtataacgccaataaggcataatataataccaataagcagttcaatatataatactaaattattaaataaagattgaatagtataaattaaaaaagaaa

SEQ ID NO: 76258 - DNA, 1812 bp, Cannabis sativa
aagtaatcctatggaatctcatgtttctgcagtaaaaaggattatttgatatgttaatagtactcttgaatttggaatctggtattctaaagacactatttctaacatggcttgctttagtgatgcagattaggcaagcaatgctgatgatcgtaagtgtacgagtggaggttgtttcttccttggaaacaatttgttttcttggcatagtaagaaataaaattctatttccctgtctactgttgaggctgagtacatagctgctggtagttgttgtactcaattgttataattgaaataaatgttgattgattatggatttgaattgagtgttttaacaattttttgtgattacactaatgccgtaaatatttccaaaaatcatgttcaacattctagaacaaaacacattgatataaggcatcacattattaggaaacttattgacaacaaaacattgcagttagaatatgttgatactgaaaaataattgactgatattctcaccaaggccctagactcaagtcgctttgactcctcagaaaatccctgggagtttgcattgtctaatctcttttgttcttgtttttgtacaaaattgttgagttgttcttggcttgcatctattcttgtttcattcttatttgacaaatcatgtttatgattttggatgataattagcttaggatcttgtacttatcataccatgatggttgagttaaaagatttaggttactttttttgtgtgactgggattgcataaagtacttttatagagttgagcgattcttgtttctgtttcttgtcaagccccttgctggaatagagctacccataatgaggtgtgaaagtcatcttttgagtaagttgaaacttcgtaattaagagttatgaagagaatgcactaccatagaaaagggctaccttcagtatggtgtgatagcatccagttgtgggatcaatttgaaaaaggcaaaaaataaaaatcttgccaaggacaatgatcctattttcactgcacacactaatgtctgacaagtgaatacaagtgtgtaagtctcctctactcgaataaaattaaaaattatcttgatttacattatttgtaacttgtctattttctctcaacatttgttaagtgtggttggtatttgagatactatttagttatcctcttttgaaagcataacatgtgtatttatctctttttatgaaatttgattagttacttgctctagaataacttgttttacttatcaatataaaaaaaaatataagaaaaggggagggaggcgcttttgacttgacttgtgggctaaggaaatttagttcttgatttgtttggtaagtatcaatatttactctaattgattatgatgagtttccttttaaagattgatatcttattctttttattttgtttgtttgttgatcatgattgttggtttagattttaattttttttttttagaaaatcttagtttctttttatctttggcccttatagataaacaaaaagggggagtatttaagattttaattttgattgtatactcaactgtccagggggagttgaggtctgtgtttgtgtttaaatttggtcaaagttagctttttattttgatgtaatgatgtgtttctcagggggagcttatatggttgttttgctaactttattttgtaggctcttattttttaaaaagattttgattatttaaagtgccaaagggggagattgttaagtctttttttggtaatttagttgtcaaaatattttgtgcatttttattaagcatttaaattgtttttatt

SEQ ID NO: 76259 - DNA, 853 bp, Cannabis sativa
atgagaatcttgaatatattcctactccattgtcttcttaattctttaaagagcacagtcatgagtcatgtaaacccttgactgtttgaagaggcaaaggattagcatcataaaaactatgtattatgtgttataggtatcataacatatatttcaatgtcaatattcttttgatgtccctctcaaggaacgtatatatatatagtcacaaaaaacaaacttggcgtagattaagggagagtctgagttggagagaatcaaattattctaagacgttagtaatgtttcaaaactcaaatagaaaaattcttgaaagtggtactgaagtagctcttgtgcctgatctatagctttacgtcactttttttcaaaatgataataataatttataatggtgtaaatttcccagaatttttatttttcttttatgaataaaaataatgaaattgcatagtaacgattctaaattagggttttggggatttcaaaaaaaaattatatggtttttggcatttgtagtacattaaatttattagaatttataaaataataattaagaaaaaaaaatagctacttgttctagattgttaaaattttgcatggacattacaaacatgacaattaaatttcatgaaatttgttaataaaccaataactacattgtaaattcacattcaattaaataaaatttatttattataatacttaatttttataaatttaaggtatataccattatttgactactggtatcattattaattcaatttaatattaaatttcatgtattaaattttagaatagaataaaatacgtggcacttggttatgtggtcgggctagtagttagccaa

SEQ ID NO: 76260 - DNA, 1053 bp, Cannabis sativa
tattgtgcttgtgtctctgtgcgtgttttcctctcttaatgcttgtcatgtttcctattcgtagtcaatttgttctttatttttgtttcctaatttttgtgtaatggattctggttttgtagtttatattctacactgaaacaaaaaaccaaaagcatcttttataaaacataacgagtcgtactgattatttgcaatgttggttcagtttatgattttgattgttttactagatcatccgctgtttgtgttactgtgcagttgatcacaaccactgactttttcatgttttttttttctccctttctatttagttatttatttattgtttaataagatacatttatttggattcgaagtaggcactatagggccatttaattatgtattgtttcaacttagtattataattgttacagagtgataaatttgaattttcttttgatctagatttcattttaattttttagttgtaccctcttgcggaagtgccagttcttccgcccaggtgacaagtgactcatattatctaatgtttcatcccctttaaaatttacttttttcttttccttcttttatttgaagattgtctctgtgaactaattaagcctgccatttctgaatgatctacacgagtgtccccatttattgccacagttgtagcagattagataaataattaaaaaaataattgatgtgttgataagagtttagaagtccattgttttttactgaactatttctctatattaataatacaagtagtgctgttttgttttgtttttctttcaaaaaaggttcattgtttttcaatgttagagttcttgtgcttgtgtgtttgtttttcttagtcggtcgtcattcatggtctagggcctaggcttgtttatgcatctctccttgctaaattcaccttctgttgtactacaatatactcccaactttaaactgaaaccaagtgattgttgtgctggttttcagttgggctcaatgatggcatttctcgcactaagcacattgacatacgaaatcactttattatggttttaaata

SEQ ID NO: 76261 - DNA, 895 bp, Cannabis sativa
agagaatacagaatatacaatagaatgacaatgcttgaaaatggtagataatgaattatttacagagcttgcagctcattgactcacatactcgcgagtatgcaggtctttcaaatgcctcgcctgtaccatcataattcctcctactgctttgcctcctcggtgtgaatcgaagaaagcttcagtcaagaaagcttcttcttctactcctttttctagcaagagaacacccaaaaccctagctcgaaaatctatgaggcacacccaattgcctaagaattctaggtctggttcgaagtcttcttctccttctactaagggttctctttcttgtggtctcagtcaccacatgttgttactagtgtagcttctgcagcatcaaccctaaaaggtccttcatatcaaacccgtgcttagcaagcctttcttgaaaaggaagcacgaaccaaaaggcgtcatgacatgcctattcgttctactaaaaagctcaagctcaatagtcctttggcctcctcgagtgatgatgaagaagaagatcccatggaagtgtcttttgaggaattcgattttaaaactgagactttttcatatgaaaaagaaatttctatagaagatgatgttgtctcttctgaaagtgagggagtcctatctaaagttgaggaagaacttgttgatctggaacataatcctttattgccaaaatctacagcagtaactcctcaatttgcttctacagtcaaagcttcagctccagcaaagggaaaataacctatgaagggtgctttctcttgtaatctctcttcctctcaaggtgtaaattcaagatttttttataatgataattagcgtgattggaaattatatgctacctgtaagtttgaaaatgagaggaatt

SEQ ID NO: 76262 - DNA, 638 bp, Cannabis sativa
tacaaactaacttcacaattgaaataatgttataatggtttcactccatcaaaccagtccacaaaccaatagccaatatgcttgcatactttcctctctccacttatgttaaaaatattcttttcagaatcaaaaggactttttatggttagattttatggcttagatatttggaaaatgaaagacaattttggctaaagatatcataagcgcaaaagaacccacaacttcttacaacttagaatctcctgaagtgttcccacacttacaatgattgagacttttctgttttttttttcttttcaatctccggacatcactgatatattttttttctttaagcttttgatctctcgtttgatgatatattttttttagtttttctaaggcgagcacatactcttctaaaaatttttaaagtaatgctgggtaaatttttttttttcatttcaaatgtttctcaatcacgcaaaatttcattatcttttcttccacacttccactcactctgtttttcactcccccaacttattgtaaagcttatgacatcattcaaaatacaatgaggataagaaacagtgtgaatatatttttagttccataggtgaagaaacaaaacagatttaggctcaaaaggg

SEQ ID NO: 76263 - DNA, 535 bp, Cannabis sativa
tttcaaaggtttacgtgtgtatatctctatctctttcaaaaaagacttatttatattatttatttgcttttgctgagaaataatttatcgaacaagacagtatatattgcactaaaaagtccatatgtacataatatattattatattagttttccacttaatgttgccatccagattggtacatacataattaaaaatattctcttccaattatattttgagatccacattatatgtatatatacaacgaaccaatctctgaaacatttttttttaatttttttttaaatgctcaaataattcagacctttcaaaactcatccaaccattatcaatattgtccagaaaaaaattactttattttatctacattttttttttttgctgatatgcaaatttacgtttagtgatattggacatatatatatagagtgtaattggaaatttgggatgtgtttattgtattaatgatatatgattatatgattttaaagcaaattcacaactgggaaatgtatatatacaaattagtat

SEQ ID NO: 76264 - DNA, 533 bp, Cannabis sativa
aagtgccttgcacttaagtaaaaagccaataagttttccataagagagccaataaaatcatattgatgtgaggctatattttattagagacatactaattggaggggaagtaaagttggacaaagtggccattgaagacaatgcagctgacatcctcactaaagatctgcctacttctaaattctgtcactttttgaaactaccgaatgtaatggaagtttaggcagtgtttagtcctttatgtagttgcttagtttctttgcatattacttgtcaaggtagagatttgttagaattgtatacctaagtaatatgccacttaagcaactggttttaactaacttttcaagttagttaatctagttagttagtgtagagttaatcatgtaacatactcggggtcactaattataaatacccctatacttgtaatcaattttttatcttcacttttataattcagaataaaagcaataaagaaagtgttcattcatttctattataagtttagtgtgttcataggcatattgcag

SEQ ID NO: 76265 - DNA, 998 bp, Cannabis sativa
atatatataaaattacgtagtcttcagtaaggaaaacagggtagcaataggaagtagaaaaaagagatggagctgaaaacttaagactaccgtacattaatggcaggtggaggttgaagagtgtacggtaaagataactgactttgtgagtattttttttttttgagtatagatgtaattggaaaagtgagtgtgaaacacatgtgtgtagagataaacacgagcttcattgacttatcattgatgtttgctttctaattttgatttggaatcttattggagaacactcaaataataaattaagataattaattaattgtaggacccctaatgactgactgtggatgtgaatcatgtgatgccatattttgaacatgaaaaatactatacaacgtcgtacatagtacatagtacatgctacataattcatttctctattattgtatatattttttgatgaaacatattaatttgatgaaataattttgttaggtcttgttgactctattaagtaaattacagtccatttctcagaaaaagaaaaaaaagaaaataaattgtggtccaccgagtcactgacaatagagaaatgaccggtaggttgcatagtttgtaattttacgggctcaagcccaattagggatgatcatgatatgaagtaaaatggatccaaaagttatataattgtttttaggaaaacttacaaaaatactaaaaaatgggaaaacatttacaaaaatacggagatttttacatttttgttgtacaagtttacaaaaatattgtgtttaaaataaaaagaaaaaactcaaaaacaaccttagaataaattaaaaaaaacatgaaaacaactataaaaaataaatagataactacaaagaaacagaataataaaaaaatattgacctaattgtaataattaaaataattggataattacataagacactattttttgtaaaaaaattatattcttacgtttaattttttttgtttac

SEQ ID NO: 76266 - DNA, 675 bp, Cannabis sativa
gtgctactctcacaaagtcttcatagtgggcgaatcataaatttctcttttcttctcaagttttttgagttcttctattgttgagtttcaagcttttgaaattcttcatttccatgctttagagtagtctttatacactgtgatttgtgcaataactttaggatgtagaatgcacaactttttgatgaaaaagattgaatcttgcactttattttgccaatttaaacattggggttcaaagaacatgaagaaacggagctttaaatgtataaataggactattttatttgataagggaacctgcccgatactttgggtctatcagagaccctgtccagttatttagatccataaagaaactctatccagttcttatggaacaacttttaagctggccgattcttggggaaccaatttgaagctggtcggttcttggcctctcaaataaaggttgctcgattaatgatacactttctttaggctatttggtttgcatacatgcatgagacggatgcaccatgctggaaagagccagaggtctaacgtatgctactagtttggtggcttgtctcgagctcctaccaacatgcgtggaggcatggtgccttgaggattggaccatggacgtatgggagtccttgggtgatgagggagactgtttggatagtatggaat

SEQ ID NO: 76267 - DNA, 1350 bp, Cannabis sativa
tcaaagataggcctaggttcaatgagcagcaccaacaaaaatcactctcatgagcagtctatggcccttcactgtttgagggattgatttagtaggatccctcctcactgtaataggaggagtcaagtacgccatagtcactgttgagtacttcaccaaatgggtagaagcggagcccatgaatacaatcacctccaagaaggccttcgactttgttattaagaatatagtgtgctgctttgaacttccacacaagatcctctcaagagcttctccactatggctagacaataaggaaatggacaagtcaaatgtgtgaataagatcttgaagacaatgttaaaaaagaaactccaagcttgtaaagcccattggttggaggaacttccacgagtcctcgtggcatacagaacaatggagagaacctcaatgggacacatgccgtattagaagacctatggatgtgaatcggtcatcccaatagaaccacaattccctctcatagacgagacacttacgaccctacatggaaccagtcttttctccaggaatcattagacttaatacaagaactccgagagcagtcacacgtttaactcaagatgtaccaaggaaagattgtcaggcactttaattcaaaaatcaagagttgtacatttgacgttggagatctcgccttaaggcgagtctttccagctttgcaagaattaggagtggaggtcttaggacctaactgggaaagaccctatgaaatacaacacaaagtgggaaacaaaacatttcaactcaagagaatggatgggtcagagatccctcgtgtttggaatgcggaccatttgtgtcattattacaaataggctgagggaatttgagtctaccatttctctaaagttgtatgtaattctttgtaaattctctttcttaatgtaagcatgtgggtataacaaaatgaaaatagaagaaatttacacaagaattcatatttttgtctcctgcacaagctatattttaaataagtgaccaagaatttggagatgtctaaacttcctagctgacttgggggtagtatacctagatatgtgccctcaaaacatacaggtggcttagttattgcttgtactcaatctttattttttattgacaaatcaacaagtgttcttcattactccaataaaacttttaaatttacaaactaaccagcacccgtttttttaagggactgagaaattgctctatacatttataatgtgttaaaccatgataaatcttctaatgatactttgttaggccatacactatgtattatattttaacatgtgtttttcaattgctgaataatagcattcggtt

SEQ ID NO: 76268 - DNA, 658 bp, Cannabis sativa
ttcagggggcatttttaacgacctgaaaagttcagggggcatttttaacgacctgaaaagtttagggggcaaaaatcctaattagtctatatattatacattgagataaatgccaaaagtaccaataatgcttagcactctcctatatataaagtctcctatagtttctaataaaatttttaaaaatattactagccaattgcaataccacatcaaatgtgtagacttattagttgtctcatggaattggtacgtacatagtaatggccttttgtcaaataattagctggtgtatgctgaacacttattcttcaaaatacataagcaaatttttatcttctttttattttacttgcatttgtttctatttttttttttttctatatcatattttctttatattttttttattccaaatataaaataatagagaaagataataaaaacagaagagatattattaaaaaaagtatatgaaagaatgaatatagtataatttgtaaatgtagagaagagactggaacatgaggtaaattttttaattctaccttctaaactttgaaaattactgtattttacatcatatgtgatttgttctaaagggccagttttcatgaccggctggcctcttatgtgtatactagtaaaaagttacgtg

SEQ ID NO: 76269 - DNA, 587 bp, Cannabis sativa
cagctcaatctgaatcacaccaacctgttagagataactcaaaatcaatgcgaagaagaatgccctgacctaaacacccttttaagtagcaaattatacgaagtgtcgcatcctaatgatcttgacgaggttgttgcataaattgagccaataactgaactgtataaaccaagtcaggacgtgtgaaggataagtaaatgagacgacccacaagttatctatacctttcaagattggtgagcaaagagcctttggcgagagccaatgtatgatttcggtcaataggaaagctaacgaaatgagaccctaacaagccaacttcaacaataatataaagagtatatattcatcgacacaagaagatgccctctgaattacaagcaaccttaataccaagaaaatattttagaacacccaaatctttcatatgaacacacttatgcaaatatgccttgaaatgatcaacaacggaagcatcattactagaaataattagatcatcggtatacacaaggacatgaagttggactgatccctaatgtagagtaaaaaaggaataatctgaataagactaaaggaaatcataa

SEQ ID NO: 76270 - DNA, 876 bp, Cannabis sativa
tgtaacattaggtatttttgccttcaaaaataaacattaagtatttcagtgtataaaaatctgaaacattaagtatttatgccgcaatttacccttatttatatatcaatttttattagtatacttaaattttataatacataaaaattaatgacttgagtaattattatgtgattattgacttaacacttaggtgacgtttggttgggaggaatgaaaatataagaataggaatgggaatgagaattggaataagaatagaatggaatcaaatttaaaatgcataaaaaattggttaaaaaaattattaatttttttcaaatcttgcattggaatgctctttccttccattttaaaatggaatagtcattctaccaaaatgatggaaaggccattccatcgaaatggtatttcaatagttttaaatgcaaccaaataaaggaatggaatgaaaattgtttcctttccattccttccatttcattacctctaaccaaacaccaccttaaagtttaaaaatataaaattaaaatatttatttacaatcaaatattgaaaattaaatttaaatatttatatcataaatgctaattaggatttttaccccctgaattttgacgtgtaccaaattatgacccctgaacttttaagatcgttaaaaatgctccttgaactattgaaattgttagatttaaggacttttatcaaatttcattcagttttactatttcaaagattgtttatgtattaaataatgctcccaaacgttaatatctaccaaatcatgtcccttgaactttgacatgtactaaattatgccccctaaactttcatcaatgttagacttttttacggaaaaaagtccttaaatccaac

SEQ ID NO: 76271 - DNA, 1024 bp, Cannabis sativa
taagctcgtcgacgacacctaatctgacagaagactacctcgacccaccccacggaacctgattggtctcccaaattgttgtcgtcgtggatctctctattgtcgcgaagttatccatgtcgtcgagtagtcatctattgcaaattttcattagggttagagaagatggtaactctatggcagctagattttgtgggagaagatgaagaggtaggagagacatgatggagagattagagttttttaatttatttaatttttcaaaaaaaaaaaaaagtaacgacacataacaatgggaaatgaattttaaaatatttgtttataatttttaaataattataataggtgtaccaatataaatgtgtcacgtgtataagaatgtatatataagtttttgacttttggtatatatgaccacgttaactaatttttgagtgatctatcattggtacgtaggtaaattaagaatttaataaagttatgtggaggacaccttaaaaatacaaataaaataatattttaaaaaattttccactaaaatattaggttgaaagattaatttcaaataaatttagaatttatgaaatttaacggcaaagtactctaatggtgtaatggtgcgtaaatcaaatttcggccgagacacaatctcttctgttgtaataactaataaaaaagaaaaagggtggcccatttatgaaacaacgtatctctttcaaccgtcgatcttccacttgattacccaaaaccaacgggcttgggcgtgccatgtcatcaatccagacctttatgtatccgccaatcaaaagctttcaacgaccagtatataaacaaaatcaacttcctgtaaatttcatcactctcaaattttccctcacttttcctctgaagattgtctttcattttccctgaaaaagatctgatggcgccaagagcagagaagaagccggcggagaagaagccagcttccgagaaacccacggaggagaagaaggttctggccgagaagaagcccaaggccgga

SEQ ID NO: 76272 - DNA, 1043 bp, Cannabis sativa
attgaacccatgaagttgagcataattctaacaattctctatcatgtttctgcaggaggagattttcgggccagttcttctttgcatacatgtttgttctactcttccctgtttcactaaatctttttgttgcttcttgttaagacaagtaagaaacttaagaatcatgttttttttttccttctaatcgcaggctgacagctttgaagaggccataaacattgttaacagaaacaagtacttccctttagcttatcgttttacgaaattctcatcattctattatcaatgtgtcactatgtatgttgtttacatttgagttacatttctcacagatatggaaatggagcttctatattcacaacctctggcattgctgcaaggaaatttcagaatgagattgaggcaggacaggtaaaaacataactgtatttcgatattttcttccatctagatatagaatcaaaagggaaaacctgatataaaaccaattaataagcctagaagtataagccatggaaagttcatacattcattacggctatagctttaactcgtttgaatctccactcaggtcggcattaatgttcccattccggttcccttgccctttttctcgtttactggttccaaagcatctttcgctggagatcttaatttctatggtaagcaattttattcagaaatacccctttgacgtgatcgtggtacgaaatattatttgaacactgccttatcttatactgcaggtaaagcgggtgttaacttctttacccagatcaaaactgtaactcagcaatggaaggacttaccaggtggcagtggaattaacctagcaatgcctacttctcagaaggcataaatgtcactttgttatgatcttgtgtactttcaaacttatcttaactcttaataaaagggcgtttcagccatgttctatgtacattcttccatacgacacgaatcttcagtcgaaaattctattaaattaagataggaaaggtagaacaaaagttacagtcaaccctacaagttgctcaaag

SEQ ID NO: 76273 - DNA, 1212 bp, Cannabis sativa
tattagtaatttttatatagaaaaattaaaatagagttgcaactacaaagactacttaacaagtaatataataagccaacatgtatcatatgggatgggaactgattaatatattcatatttacgtataacctaccaagattactgtttaactctactatatatatgattgatcaattcaatgtgtattatattatatatatatatacacaccttgttcttatactcatcgtaactcgactcaattcaatctccaataatggcaactacaattaatccactcttctcaatcccacttacccaaaaaacctttctcaacaacaacctatatcacatctcttcttcttacccaatttgatgagaatcggggagggattgccgtggtgttactctcatgtgggcgtggaattggcgttggatcataagaaatcgccgtttttgaaacccactaatgatcctgtgtgctctcataatttggaggctctcttacacttgcttcacgggtaatgttaattaattattattattaatccacagacataaaagatgagagatttgtgttatcgagtggaagagacccagccttagtgaacaaagcatttgatttcttgaaagatcattacttagttccaccattttggagacaagaggagaataagggcatgatcagaagcaacgatggccgttggattcagcctgaacgtcctaatcatcaccgttcattcaccatgcatgaatgaatgaataaatgagtatttgatcattaattattattcataatcatctgagtgaaagcgattaagcaaaagaaaagaaacacagagttttaattgtatacttaattaagagagttgagtgagtattaataattattatgacagcacaggtgtagtagtggtgtgagactgtgtaggttggtacgtacacgtggcaacaggagagaaaagattactatattgtagtaaagcaagaaagagaatgagaggtttcaaagtcattccccaccaaaactgaaaacttattaacacagacacagacaaataacagtcgcagtgttgcactacctgccactcaaaccatgcaccacacccccccacacctatctatctccaatctctctctctctctctcttcacctttattattaactttctcattcaatcattcattcccatctttttcttcatttcaacaccactcttgtctctcacac

SEQ ID NO: 76274 - DNA, 883 bp, Cannabis sativa
attgcctcattggaaacaatttcacaagaattaggcaaactagcttcctccttagtgtgtagtttggcaatgaatgacaagaacaaggccaagtttggagtggcgggtacggttgaattgctcattgaggctatttcattagggtcaaatgatgaccaacatggttttggtatgtcactaatggcaaaacatcacttgctcagctccctcgcggagcttgtgcagttccatgggaactctacacttgcagtgcgatcgggagctgtacaaaccctcatggatgttgtggagagcgataaaggggaagagctttcgggaacttgtgtggctgtgctatgtttggtagctaagtttgatgagggattgaatgaaattaaaacaacacaatggatggttagtagaatggtgaatgtggtgaaagggaggtgcatgatgagtaaggaaggagcggcggagatacttattcggttgtttgatgaaagtgaagagtgtgtgagagatgccatgaggttgcctgagttcttaactgtcttggcggatctttcggttagaggatcaaccaaagctagagagaaagcttctttgttaatgaagaaaatgactgaggtagacttagactttggattggattcctatcatcctatgtagaatagattataggggttttctcgaattagttgggtccgaatttttaattttttcaaactaaatcagtattacggttttttaaaaatttaaaactaaaccagatcatttaaatgatcaaaccaaaccactcagaattaaattggtttggttcgaattatagtttgtatttcgtagttgttctaatttttttacagtaattgttcaaccaaagctgtcttggcggatctttcggtta

SEQ ID NO: 76275 - DNA, 1683 bp, Cannabis sativa
caaaattcaaattcttcgtgtaacgatgggtggtgtaagcaaagtctctgagctgaatcatcttcttcaaagtatatctagcaacagcaatggcagaatccctcgacctaagaccaccattgccgtaactaatgcaatcctccaaactctcaacttgggcaacctctctaaagccgtctcaatcctcttcgattctcctgtaccctttccctactctgtctacgctcgtcttttccagctaacttcttcaactcgcgcaattgtcgaggctcgaaagcttgaatctcatttggtcactttctcatccgacccacctgtctttctcttgaatcgtgccatagaggcctatggtaattgttgctgtgttcatgatgcccgcgagctgttcgaagaaatgccacttagaaatggcggctcttggaattccatgttaacagcttattcaaagaacagttatgataaggaggccttgttattgttttcgcgcatgaataggttcggtgtttttgccaatgagattacatttgcgagtgttttaggttcatgtgctaaactactgtgtctttgtctttctcgacagattcacgcgcttacttcaaagtatggttttggtaacaatataatattggaaacgtcacttgttgatgtgtatgggaaatgttggattatgagtgatgcacgtaggaagtttgatgagattcgtaaccccaatgatgtttcttggaatgttattgtaaggcggtatgttgaaatgaatgatgggaaggaagcaattttcatgtttttcaagatgtttcctgcggctgttagtcccttaagctttaccttttccaatgcacttgttgcttgctcaagtatttctgcacttagggaaggtattcaaattcatggagtgactattaagatgtgttttgatgttgatgaggtagtttcttgctccctaatagatatgtacgttaaatgtgggaaactggaacaagctcgtgcaatttttgagcagtctggtgcaaaagatttggtttcttggacttcaattgtgtggggttatgcgattaacgggaagacaagcgaggcaagggaactctttaatgacatgccagaacgtaatttgatatcatggaatgcaatgttggcaggatatattcattcattccagtgggaagaggctttggcttttttacatttattgcgaatgacaactaaggacatagatcatgttactattgggttggtattgaatatttgtgctggtctttcagacgttcaaacaggcaaacaggttcatggatttgtctatcgacatggtttgttttccaagctcaatgttagcaatgcccttcttgacatgtatggtaaatgtgggaatttgacaagtgcgagggttttgtttttccaaatgagtcaattgcgggataatgtttcttggaatactttattgactagctatgcttgtcatggccaaagcgaacaagctttgacaatcttctgggagatgcaatgggagacacaaccaagtaaatttacttttgcaacccttttggctgcttgtgcaaatatccttgcttttgagcaaggcagacaaagtcacgctttcattatcaggaatggttacgagatagatattgtgcttgcaggagctttggttgacatgtactccaagtgtcgttgtcttgattatgccct

SEQ ID NO: 76276 - DNA, 873 bp, Cannabis sativa
atcaacgtttatacatatatatatttttatttttttattttaaaagtattaaataatatgttaattatttttttaataaaattaattcactaatcaaaaatcatactaaaaccaatgaataattttttttttaccaataataatcttttcatatacagaaataaaaatatacaatttaaccaaacaaaacaaaaaatccaatactaattatatcaataatttctcaaaattaatacaactccacctacatcatacatcatacattttttaaaaagaaaatcatttacagtgaaacaaaggactcatttacaacatacatttttgaaaaaaaaaatcctttacagtaaataaaaaatcccacacagaacgaagaaattcaaagccccattgcccttctcgtccaagtacctgcacacacacagaaacaaacagaaaaaaaaaacaaaatcatttacagtaaataaaaaatcacacacggaatgaagaaacacaaagccccatcgcccttttcgtccacgtacctgcacacacacacagaaacaaacagaaaaaacaaagaggcgaaaatgagaaagaaagagagacgacttacagagagatacggtgatgagcgtcgccggagatgggactttcagtgcacgaaaacatagagagggagagacgagcaagaaagagggtcgggtgttagggttctcgaactagaggaaaggtgacggtcgccggggttctcgaactggaggatggtgacgttcgccgccgggattcacagactggagggggctttggggttcgaacatggagggggcttggggttcggtcgactggaaggagcttgatgaggttgttcgaacgaattagagagagagagagaga

SEQ ID NO: 76277 - DNA, 1536 bp, Cannabis sativa
ttctgtattagtgtctttgtgctgatgcttcctgtggactggcactgcaatatgtgaaaacgattcatacttgcatcttgaatgttttcttagtacattgatgtttatttgtttattttcatggttatgtggtgaaaaattaactactaccataaagtacttacttttgctcagtaagcgttcatatgcaatatgggttaccattcagaacctgaagaaaatgtagtataacattagattcattggtcaatatgtacattttgaaaaataaggaaagctctcagcttttagatttacctttttcacctggtagtattagtggtgctttacacactgtatttactgacaatattgggtcctgggggatactttttctgcttgcttacaggccagacactacacgcatatttgtagatattgggctaggatttcatgcagagttcacgtggtccgaagccttaaattatataactttaagggaggaaagattatccaagtgagtattttttctctgattattattatttcttaattaaattacacatctaacatgactattgggtgtttttacatataatggtggatgcaacttggatgggatgctttactaacaattctcaccaagcttctctttacttcttttgggtaagttcagtatactgatcccctattacacatttacaggcaagttgaagagtatactcaccttattgcatcaattaaagcccagataaaattggtaagttcatttgcaaattgtaatcataaattgtgggctctttttcttctatataggctcaagaatctgagcattgcttaaaactttcttcttactccttccattcatccatggctgcttcctttcttaccttttttctaatacacgcctataacattattcattgtttctttgtacaattgtaaatattttgtttggatttgtataaaattttggttcagttaaatgagtaaattatttttctacttcaggtatgcgaagggataagggagttgctccaacttccagcagagaaacctttaccccagcgtaccttctaacgtgttataatttgcacacaaaatgcctctttcatcgtttcaaactgtagttttaaatgacaatcaagtatgagagcatatgaatcattttatgatgagaagtttttgatgaatttgggaccaatcgtatattacacttgaggctctggagaaagcctgaagtccacttagtccagcattactaatagtgtaatttattgtttactagttaaagagttcttctgtcaatcatctatagcaggatgatggtatatcaaattaagaaagttcacagttaacccaattcaagcaggacttgggaattaatcccaaatagttatattaattagattgatgtatctttaaaaaaatttagtaaaatgtccgctaacaaattatactatatcattaaatatactgcatgtagcacagtattgatagaccgtaacacaaaaaaggttaatatatcatagtaattaatttatatgccaaaaaaaa

SEQ ID NO: 76278 - DNA, 1571 bp, Cannabis sativa
aactcttcacgcagtaagatcacagtttcatcttcttttcccaaactcaaccagctctgctccgacatcacaacctcgacgagtatgtttgacctatatttcaattcattagttcctaatatggaattgttcgatcataacccatttgaccccgttaacgaaaacccaagaaaagttgtgattgggccgactgacagtttcaaggtatgaattttctatacacagttaagaaagaatttggaaaattcaaagataagtaaagattttatgggatgaattgactttttaggaatgaagctcatatggtcggtaaagatgaagttcaccagattttgatggctggtaaagatggagctcaccgaattttggatagctgctaaagatggaggtcacattttggattgctgctaaagatagatgtcgctggcttttgattgccggtaaaatggagaatgtatttttgatttaaaagttttagtttctacatttttgcactaaaaatatatcaccgtaaaattgattaggattttatctatttctgtatctttgacaaatgtcctaaaattaaataatgaattaataaaaaagcaattataaaaaattagttagataatacattatatgatggacacgtgggagacaaatagtatttctcaattaaatagcaaatgtcagaaaatagagttgaataaaaaaatattttaatcaatcctagttttaatatggtacatttaagcccacggtattacaatgcacttacccaattataacaagctattaatgccctacaaatagggtatttagaaaattcatcacagtagaagagtcctttaaatatgtatatatatatttatatgcatatgaatttttttttttttcatttttagataaatagatattgtatctaaaaaataattagaatttgggataaggtgaatgtgattcatctcaaaactaattatcaataggagtagttaattaatcttatatatggtaattgattttcacacattaacaatgtgagactaactctaataaaaattggatggatatgattcgatccaaaaaaaaatactagatctaaaatattagataaatccgaatcaatgcaataaatatacataaaatacattcaatggatagtaccgatccaatccaacatccatcaaatgactgaaattaatgggatcagattggatggtaaaatttaacatctaatatataattagatcggttctggatatgcctaaaaaattagatgtagtccaataaatacctatacttttagggtatttattcatgaaaaatactaaaaggtttcagttgcgccatgggtgaagccacgtgtggactaagtgaggtacttagcctaatgtgaaattaagatcgttcctaaactatttagagctcaaatttaaattatttttttagtcttttatacaaatacttttctagtcaaataatattaagtatggttatttggtgtagtaaagatacttttaaaatttaaggaggtcacaaattctattcttcacaactttatttttgttttaaaagaaaggactaaaata

SEQ ID NO: 76279 - DNA, 599 bp, Cannabis sativa
cacctagaactgtgaatgcataaccagtgatggatctccttgtgtctatgcttccagcatagtcagattctacatatccattcacttctacctcttccttagacttgttgtcataaacaagtcccatctccattgagccttgcaggtatctgagtatccacttcactgtagactagtgttctttacctagatttgctataaatctattaaccatacttagtgcataagccagatcaggccttgtgcacaccatgcagtacatgagactgccaacacaggatgcatagggcactacatccatgtacaacttgtcttcttctatattaggtgattgactttgtgaaagcttgaagtattgggctaggggtgtgcttactggttttgcttcattcatgcaaaacttgtcaatcattttctgtgtgtagcttctttgtgacagtgataatctctctgctctctctttttatgtcaatcccaagtatcctctttgcttctcctagatcattcatttcaaattctgtattcaaactctattttagtttatctatggccttccttttgttaccaatgatgagaatatcatcaacatataacaacaa

SEQ ID NO: 76280 - DNA, 1490 bp, Cannabis sativa
  modified_base (442)..(444): a, c, t, g, unknown or other
cgccctatacatcatcaaccccaagagcataggcttgagcagatgactttgcttttgcttttccctttccttgactatgatggctcgtacttgcactagaccttccaccttgattggacccttttttattcctactaggagtaagagtttgcaaaccttgtgagtaccccatgttgaaccctgagccttgtgatctaaactgatgttgatactgagactactggcatgattggggtgtgaaactgtaggaggaagattgagaccggttagtcctgagctgtccatgaaaaggagtagactctacatagctccctatgggtccttcgtgagatgcttgaaatctttgtcatcgttgtgggcaatctttcttcttctgaccttgttgaccataactaaaacacctgcatggtccactacgagtctttctagatgaaccactacnnntgctacccccactaaattgttgtccttgggaccactgcccttgattcttcttggtcatcttttggtcatttccttttcctctgcttgtgttcttcttctcattcccttctacatgagctttagtttgcaaggctgctatcacacaatcagtcaggttgttaaaggtaaaaggggctattggagcaaatatcgcaggcctcaaaagatgcatgaaattttcaatcacaaggggttggccaacaataccaggatatgcagaagaggataactctacaaaattcatgtaaaactcattcacagtcatatcccctagtcttaaaccatcaaatactctaatcagagccctcctgtgagatggactaaaatattactccctgaaaaactttctcaaaatctcgccaagtcatcctatcagtttccaatgtcctggacaagatctcccacaaatctgttgtaacaccctctaacttggacacaacaaaagtaagttagtattcctcatgtgttcctattgtattggaatttttctttatctgcatcaaccacctttcagctaccatgaaatcttgtccaccctcaaactcaggcacttggatccgatgaaagatctaaaaatgatgactctgtcgagtggcaagatccatctattgagcgggaactgctcttaaggctttgagaagagcgttcatagagaattaagcttgtggaggttggacattagcttgaggggcatcttctccaactgttctccttgtcttccttccttttggatgcattttcttaggcctaagaaccaaaggctaatcagttagtgagaattagatgataataatataaatatgtcttacacatataaatatcatgatacttattactattattatttaaaataaatttaaactgtttagtggcacactctgaggtaattaaacccggtgttctaatgccattatcaaatggtataaaaaagtagatgtaatacccggtaaaaatctacatatattttaaattttatttgctatacaatttgtgtgagaataagtatt

SEQ ID NO: 76281 - DNA, 658 bp, Cannabis sativa
agtatatatacataaacgcacacttttataatcacaaactgaaagtcttgtcttcataaatgagaatttagatccatcctattacttagatttcttcaattgtgagaatgagacacagaaaagaaacccaactcatgatctattaagtaaatttattctatcacaacatgtacactttgtaaatttttgtttcagcaactggatgtatagacacacaaatatatatatatatataaatcaaaccttgttatttgaaaataacaaaatataatgttataatatattcatcaacatacaaaacattaatggtatacacaaagtaagcaattgcactttctctaataacgagaagaaagtgaagtaccttaagtcccaccaggagagttttcccaactgaaatcaatggataccaagagcttggtactttctcgacctgttcttcaaagcatttactaagattatctaaatttaacattagccagctctgcagctgctcgggcagaagcagttgcccgttctgcagaggcaagcgcagctctagctctttccaagatatcggaggatgtatgtagtcctgtctccattttgacatttctaactgctgctgcattatcatatttagttgaagcttgaatttcattagtacctgatgaaggca

SEQ ID NO: 76282 - DNA, 775 bp, Cannabis sativa
ataatattggtcttacaatcaaaatggacttccaaggaatgtaattgtcagctgaatttaaacttgaagagcagacttaacataaaattcaatatgaaacccattatacaaaacactagaaaaggaaaaaaaaaaaaaaaagaacaaaagagggataatctaggcagagaaggaaatatgcaaagtttaaagagatgggaagtgagtatgtactgtgaaaagatcagactctttgataggagtgatgttgagattttgtttaggcttgattagaggccaattggatgtctttttggaaaaactagctgctttctcttccattagcttcctctttgttcctgtctctgctgccatacaatttgttcttccttcttcgttctgtttttgatagggataagttgataagtgtgagcttttgtaaagacataaaatttagttgaggaatttcatcaaacacataaattgcacataaatcattcaagatatacaccatagcacaaatcatgaatcatcccaatccaccatttaaagcaattaaaaggtaatacaaaagcattaaaactcataaatacaaaccctaatggagacaacctgagccacttggttaaaaatctcaaaaagctgtccttcatccacgctaggctccagatccccaacgtaaagctctcctccttcttcttcaaatgttgatgttaaataaaaaaattaatatttttgcttttcaaattgaaaaatttgtcaaaatggacttttgacaaattgaaattagcaaaat

SEQ ID NO: 76283 - DNA, 681 bp, Cannabis sativa
agaacaagacgctgatatatataaatatttgtatgaaattttcttctggttaattcgatgagacatgaaattattaattaattttgttgcattataagatggtactggtaccatacatgcatgcatacccctttcaaaaatatgtatatatacatttttcataatataaatatatttatgtatattagctttttcataatatgtataaatatatttttcttaatttaatgttttagtaattaggtagtatatatatatatcaatatatattataagggttcttttatatataactttagggtgccctatttagctagtgtgagtgtattaattatatgagagtccgccatcaagttatagtgaccaccgaatctttaaaatgatcaagtgcatgccatgaggttgttgcatccaattaagtatatccttttggagatagaaaatgattttgtgatattaatgtagtactcatatttgatttttcatttattttttttctggtttattattgctttaaaactttcttaattataaataccatattgttatctcatatatggtttcattaatgtagtacgcatggatgtaatggatatttttctattaaaacctaattagttgccatttaaatttaatattgatatatatagcactatcaagcaataactagattaatgggga

SEQ ID NO: 76284 - DNA, 504 bp, Cannabis sativa
ttaaaggccatttgttatttttttcagagcttgcttaatgtgtcacctattttcagttctatattgtttttaattagtgcaatctactcaatatgagctttcctttcaagatgtcaaaatatacagatacattttttctggcgtattattttagaatatgggaatcataactagtttataaaggctatgaattgctctacactcctgcataatgacagtgaagtgtcaaatggttaaaaaatgatagagtgacaccaagaatttgacagaaagataatacacgagaaaagatataagtttgctattgtgaatgacgatgttggagattcaagcctttaatttgtttttttgtttttaatagcattgaatggctccatatgtacaatagttgcattgaccccaatgaacacgtcttcccacccatttatgttcgtgttgaaatgaaattgaacaattctaaatatctcagggataataataataagaaaaaatatttggcaacta

SEQ ID NO: 76285 - DNA, 1408 bp, Cannabis sativa
tagagctttgatctctaaattggcttggagcttggctcagaatcaagaccccccttgggtcaaatgcctcctgagcaaatattgcagcagagcctctttttgggccgttgaaccaaggaatggggattcttttctttggaagagcattctctcaaccaggaatattgtgctgaaaggctcggtcactcttgcggctgagggaagttctattgatttctgggcacaaccttggattccatggcttgacccaattggttttggtcaacttatgggaagcttagatagaaatactctctcaattactactgttgcagatatctcaacaaatggaagatggaatagagaggtggtcactgatgtttttggtgctgatattgggaggaaaattatggaaatcccaaggattccccttcatcatcatgatcaggtagtgtggaaaggcaatgagaatggcattttctctgttaaaagtgcatatcgtatcgatcaagaacatcgttttggacagaggagatcattgtggagatgggtttgatattcaaaattacatcctcggattggtacgtttctgtggagaatcttaaatgaagctatacccctgcgtagtaaattgccattttgtgttgagaaaaattgtttgatatgtggcgagaactctgaaactagcatgcatattttcaaagaatgtcctgtggcaaaagtgatgtggttctcaggtcctcttcctatgcgtggtgataacattcttggtgattcttttttagattttgctgaaaatctgttattgactgtgcctaaggaggaaatattgcctttgctctgttttatggggtgtgtttgtcaagaaatttggaacctcagaaacagaattttgtttaaaagttcagggattgatatggtccaacttaagaatcagattctttctaaatggctcgaaatgttggaattgtctcggactactggtgatcgattggggggtctcgaagataacctcaatctggttgggtatataccttcggatgctgctgtgttgctgatgacagatgcctcctggcaaagtggtgtaacaggtcttgctgcagttatgatagacttaaggagtggccattggtcttacatgctgcaacaatcatctgcaacctctcctttagaagctgaagctaaagtaatacaaatggctctttcttgggccgtagatagcaggtggtctcagatttgtgtggtgtcagattcggctgttgcagtccatgctttccagcagagaagaaaaatctataattggaagcttttaagcatttctttaagtattttagatacaattaagacttttaatgtttgcaattttatttatactaataggtgtaatctatcttttgtggatggtttggcaaaaaaagctagagcttct

SEQ ID NO: 76286 - DNA, 502 bp, Cannabis sativa
ccatcgacaaactttttgcttagacaaatataaatatataaatatatatatatatatatattatcttttttttttttgttttattaattaattaaataataatcatcacagcctcggcctttatatgaatatcatatcatcttataagctgtgagtttatcattgtaagggaccaaagtactgatcaagatcaatgtgttgtcttatattataattttcatgtaatcttgatctacatttactttgattaatggatggttataaatataatgaagctgttgagataccaactttttattatttttgtcataatatatattgttataccaagaattaaataaaatgaaacgaattaccaaatgaaataagttgagtcacggattatgttattttctttaagatgtttagtggctttacttaaagtgtccacggcaatatcagttactgtgtccctaggaaaaaacaataccttatacaaatctttatgctctgaatgatattg

SEQ ID NO: 76287 - DNA, 560 bp, Cannabis sativa
  modified_base (480)..(481): a, c, t, g, unknown or other
ataaattatagttacactacatatttgtaatgtcatatttacatattggtatccacagttattctaccataaatcagtatacaaatccataacaaaccacaactatagttagaaattcatagtggattatacttttgttaaatctgttagattatatcctaattgtcgttttaatttgaaatttgttttaactaatttactattttgtttggtggcggaactcgatgtttaataaagcttaaatttctattaaaaaatagttagaaattcctaacaagcattaatagataaatcatagttacaagtcggtaactaatttataagtatgcgataattcataattatcaaactaggaaatgtgttgtaaatgatagttactactaaaaagttacttttattgacaatcttttagtcacaatataaattttttgtgacttaaatgtaattcttagtcacaaaaaaagttacttgtgactaaannatagtatttagatacaagttgtcactaatttagttttggtcacaataagtattgtgacacaataagtattgtgactaaa

SEQ ID NO: 76288 - DNA, 909 bp, Cannabis sativa
gtgctcacctattccaaccagtactgccttactaaaaataaatgctctatcaccaaaaataaatgttcatgttgtgtggagaatttatagtattacataatcaatttacaacaattaaataatattttctttgaaaatcatgaaacatgatgataatcaaaatactgatggtttttggttgtgttattattgaataatttgtatttgtgtgatgtagatatgatatttggtttgtaacgtagatatatttggattttattttctatattgaatagttttttaaaagaaaaggatgttaaaagtggcattttgctaaagaaaaaaaaacaatacccaataagcctaacttaacctgtacccggtcctaactcacccagacccatcccaatccgacctaactcactcgcattggaaacctaaaaataggcgagtatgatatacaactctcacacaccccgaaaagtaagagtttaaatgggtcgggtctgatctgatccagctatgatgtgacctgatctaactagaatcagatactccaatcggatcaaattcgacctgattgatttggattcgatctaatcttacccgaccttttttatttttttatctaagcttataattttatatctatatttattttgtattattattatttaatacaatactatgattggtagagacttgtattaataaattgtgtaaaattaatatattttcaataaactcgaccctaataccaactacgagtaaggtccaggtctaggtctaggtcctgggtctgggtctgggtcccgagtctggttataggtttgggtctagatcccaagtttgggtcgggtctcagtcctaatctcgggcccaggtctaggtttaggtttggggcccgcacccaggtttgggtccgggtct

SEQ ID NO: 76289 - DNA, 3773 bp, Cannabis sativa
gaggtaagcttttgaagttgaagaccatgatcaaaggtgctgccagatacctcaaaattcatttaacatcaacccaatgtgattagagggggttgtgcataaattgacagaccttgttgacactaaaggcaatgtcacgctctgtgatacaagcatattaaagtgcatcgatgatagacctatacaaggtaggctcttctactggatcactaccatagttggagagccttaagccaccattcatgggagaattttgaattttaattccttgcatttgaactttgcaaagtaaaccttggagatactttttttgggacagaaggatgccattttcattgtgtttagcatggtttctcaaaaaataatccaaagagccaagatcttttagttcaaaagtgttacacaaagttgtaacaagagaggacactgcaacatcattgctaccaataactaaggtgtcatcaacttagataagaacatgtaaacatgatgttaaagtgacttttgtaaaaagtgaataatgatctgttagaggaaactacattcaagagtttcatctattattcttcttatttcttctttatttctcactattattcagattataaacaatattttgagatgataaaccaactatgcgtggctagttttcttagttgttagggttagatggatctctaattatgactttaattttaggatttaacgaaaattttagtttagttcaatatttttcatgtgattctacttctttttaattgttcacgtgattatgtgttatatatttttctactttatatgattatagttattgttattatttagattatgagatttattacttgagaggggaacttttaaataattgggcatcgggtagatcaacttaggtggtgtgagatcaagagataagcattcacttaggtaatcgaaatagttctaaattgtaaaatggagaggtgaaatatttagaattatttctagagtgagacttagggaaggtaaggtataatggtggtgtcgagatataggctattattcacttacaaattcttcatgagattggaatgatgattaaaatcatagttaatttaggttaaaatcaaaaccttgataattatgtataaggtttttggaccaaagataaactcagggctatcttataaggtagaatgcctgtgattaccctagtcgcataattggacattcatgtactgacaacatagaacctacaggttcttgatgacctgtcatttacttgtcttttagataagatttatacaaagatacgatctttatatatagttgcaagagagatgcaattagttatcacatataatcgatatatgcatgaccagtgctaacttctcttaatcatacttttttcaacactgttgggcacagtatgcaactagaccttctctcggtcgcacctccttgtaagtttctatcatttgagattttctctccctaagtcttatgctgacgtatcatctttttccactcgagaactgggtcctcatgttaaacatacacgagattgtactcaatatttgtaggtaaaaatatgcactataacacatgcccctactttcacagtgacagttgtctaccacacgatgaaattatcctgagggacagacgagatgagttgtcacatcgtgggtgacatttgaatgtcttattgagggttttgaaaatacagttagtatttattaatttacctttccaaggtgccatgtcatcaaaactctttggggtctgtgtaggcatgtcttgtgacaaccgttcgatgaagcatccttgggtttctgttgaccagatgtcacaatcgtaacagtaaattgtgattcctatttaaaccctaaattcaaaaatgaggcattcactttcctctcatttcacttgctcaaacttttcaaaaatcctcccaaatcttccaaaaaaaaaaattcttcaatttttagaagatctctcaagaatttttcgttgctcgaaccgtcggagtgtgattcagattcatcttgacagaggcaacatcagacttttagattcaaaggcgggatttctttactttctcagttttttgtaaattttttgaataattgcatgcattttgggctctgttggttgaaattgtatgaaaatgataggctatttttttgggtaatttggggtttaggtttgctgaactaaaatagataatttttttggaagttctttacatctaatttgactaaccaattcttcaaatcgtatttttcttcttagaacaccccgaatgctcgcacatgtatgtaggtttcacttagaacatgaagaacattttgaataatcgcacttttacctagattttgcgtacattacttaaaatattttttttttgaaagaattacattgccattacgcgagtaaggacactccttttattaaatggtatgcacgaaacgctaaaaagatcttctatcttttaaatgagcaaactcttggacatttaggagtactattctcaagggggagcattcgtggaagaaccccaaaatagcgatagcttcatttctacatcaatgtcaaaggaagatattccagagcgtcaggatttgctatccatggaggacatagctcacatgattatggatttagaagaactgatagaaatggagttacgaggaagtaagtcaaatgtatctgctcgtggcaattttattaatctagaagctttgtcagatggtgaagtggaagaagtcaatcagtacttcgaattttctatccacggagatgatatcgcagaagaggatgaagaagtggatgtttctaatggagaaaacacacctcttgacgagcctttttcctgagtggatctcgtctctaggacgaggcaattagacttaacttctttcaagaaattaagacttatttgtactggttgcacgaggcatgtgcccaaatagtgacgccaccttcccttcaccaattttgagatcataaaaatggaagttgtggtcttgtcaattcctattcttctctacaaagtaatggtcctttcaatccttttgtcaaatctatcctcggttactatgaagtcacgcctttcgaaataatcccaaatagctaaaaaattgtcattgaattcttcacactatataaaaaaaaggggatatgcaaatccaacagtcgaggattttagcattttctacgacatcaaaaatattggtaaggacaactgtttctttttctttagtaagtgggctaatgcgaatataaaatggagtcgatggcgtagttttcaacatggatgattggaaatcaaaatggttttacttgattaagatgccagggattaggatagagtttaatactcatcaatgtaggtcacttattttatatttgcatatattttctataacaagtttctaaccttttctaaactcgcaaggaggctagctcgaacaaaacttgctggaaagaagttgtaagctgcgaaaaaccattagtgtttttcctttcaaagtttgtgactgtagatttttgtatacttccccaaagttatgacaacacaatttgatcttccctaacatcaagcttcagcgagagccaatttacaaagaacctttcgagaagcaaaaggaaaagataaatttgactttcaaaacaaaaataatcaagtaatcgatgccccttgtacgcttattgcttattttatcattacaagtttttaacacttgtatttttccttgtccatacacgactttcctgaagagtgtacctctcga

SEQ ID NO: 76290 - DNA, 769 bp, Cannabis sativa
acttggggtgtaaatcagtcaacactttaatagaagctaatctcaagcgtagttaagataaagtgtaatatccttgaagcctaattatgaatattcatggtttagtatatattatgggattcattaggatgatgatcttgctaatctaatttagtgtaaattatgaatttttccataagtgggtaaataagtttaatttattagttacatagatttatttagaatatgtgggcataatgtgagtaattggtggaataaaaatattttcaggttttgcaaccttagagactcaattagaggctaaaaatatcacaacgggtttagtaagtggtttaaatgggattattgtggttatttcattttagaactacggggtactttggaatactcgggattgaccaaataccctcaggtgagagattccttagtagctaagaaatagcaaaataacctattataaactaattttactattattactattattactcgtattattataaatatatttattattattattttaatctaattatatatatacattaagtttaaaaaagaaaacataaaacctaaccctctcctttctccttctctctcgagcaagaaaccaagacaaaccaacctaatttttttattttccttgtctgaattcagctcctttatccctagtagcagccaaggaagtgatctaatcttgaagagggtaacttgaggtaaggtttaccccttttatttgaaaaatctataggttttaaggggtgacttt

SEQ ID NO: 76291 - DNA, 1897 bp, Cannabis sativa
aatttatattcaatatttatatataaatttagtatattgtataaaaaaaatggttaaatacttctaaaatatcacattatagaggtatgtttaacacttgtgcttatttaataaccatgctctttttattagatatgttttacgaataaaagaaaaaaaataagagggaaagaaaataatatgttttgtaaatgtttggtaaagaaagatgaaggaaagaaaattatgtaattttataattgcatttttaccctttaattattattttataattatatcagtattagttatataattaattatacctccattatatatccatatgagtttaaaaaaatcttctcacttttgtctccaaaattagagaaaaaaaattttggtgggaccatcttatttttttctcacactcttatccttttcattcccttttctttcttgcattttttttctttctatttacttttctctccaaaatttgctttcctaccatttttcccccttaccaaacataggattatagaataggcatggctgttcaattttatcactactatgtcattgggaaccaagattacaaagaaaataaccaaaatagaagcaattgctcctgctaaaatatcttgatctggtgggtaataaaatgtccttataattatattagcagtttttgtattataattaaaacaaacaaaaattattaatcagacaataatggtaatcaatttgtgaaattaatagtttgattagctgccatccacataaaatggacatcataacatctggaattgagagtgagaaaggtaaaagaggaaatgtggattaagtgtttgttactattactcaatatgactttgttaataacaagaaaataaagaaagtaagcaacaatttgagttggcacaaaatgtactcaaataccaataccagtataccagagagactgagaacataagcttaatatcaagctttagccctctacaaaattgggaagaagaatttgtcttgagtaccgaaactacccttatcatgtaatgaaaattacaacagtagtaataataccaactattatatttcaatttcaaacctcccttatctctctcaccaccgccattataatcaatccgaacaagaattcaataaagaggagcccgctgaggattcccttttcgccgattcatcaacgccgccgaaatttcggacactggcgagaaaactggccgacacgccgcacggtacgcggaaacgctgcttctctttttcctcacaattatctgttcagctgtggcggcggtgcagcttaaggtcctgctccctacactgccgttccctcctgacccggatgaggttcgggcagaacccgactgttcaagaaccgaatcgggtgatatcaaaccgtcttcggagcctgggtcgggcaaggacaagaacttgcactcaaatatgaactttgaaactccaccctcccttctcatgaggtactgaatctgtacaatgacaacgttcgattataaccataattaagaccaaaagagaaaaaaaggtgtaggaattgattagggaaaggtagtgaccttgcatgagagagagcaaaaaatgtatgggtcttgaaggcttctgtcacaggtacagcagatattgccggagcctctgaaagtccttgtctgaggcctttggtttaagaagacaactttagcactgttggttgtatacgactgcagaaaatgttggagaacaatggttcatatcagaagatttataataaaaaacccacacattcaactattttcaattccatctaatttacgttagtatacctaattgaaaaaaaataaaacatgtaaaatacaaataacgtgagaaatacgatacgataaaatacagcgattacaacacgagg

SEQ ID NO: 76292 - DNA, 560 bp, Cannabis sativa
caaatgatttttaatcgttaaaaaagttatgtacaccaaattaaattttgatcaaatgagttttaatcgttaaaaaagttacgcacatcaaattaaattttgattaaatttcattaaaataaaatattttatacatagtgggatgcatttcgcgtcaccataaaaacttactgaataaattctcaatagtattttatggcagtaagattatatattctttttctttttggtgaattatatggctgtaaaattattgatttgattagataaaatagctttttatatataaatatatatatatttatatatatatttgtgttgtgggaatagaaagtccattctagtttttttgatatggtgaaatttgaagaattaattcgattcaccaatttaatcaatcaaatccaagagtgaaattgatatgttctatatatgttatgatattaatgtatcattttcatatgccataaatgatacaatgtagttattatatttattaaatattttctttcacattattatatatattgaaatttgtaaaatgtattaatatatatata

SEQ ID NO: 76293 - DNA, 779 bp, Cannabis sativa
caactcaacattttcataatgtctggcgagccccattgccaaggcccgccaatgatgagtgttttttgaagtccactaccaccagctccatgtgacccatactacctccctccccaacctttctttttttattatcttaaattatcagcccaacattttcatcactcattatttccttttccttattctttccaaacatatcctcattaacttcagccccattgccaacacgtccaccattatcttgattgccaatcatattactaattttatttactatattatggtgattcactcctcattgattcttggctaaatgaacgtcagaccttctttccatattcggttgaaaggagcttacatgtccaggttcattgttgccgtcagccacctccgacttccaccctttgggacacaaagccactgcgctccaatgttcttgtggttcttctgtggcagcactcccatgaaatcaccgtacggtttcgtaatttggtctgtcgattgatgaaacagacggttgcaaatttttttggaatgaccaatgacaccacatatgaaacaaaaagtcgacatcctttcatattagaaatgaacccaaaaccagctaccatcttcttttgtcagtttcatacgccttcttaaaggttttgcaatatcaatcgtcactctaattctgagataatttctctagactccaatgaagtttttcgaatctgattctaattaagaactttcccaaagtattaccaacaccacggactgtcccttccgtcata

SEQ ID NO: 76294 - DNA, 954 bp, Cannabis sativa
ttatttttatttaggatcacatctcacaaacataaatatttactctagctatatactactatttatcactctcaagtatgcatgctgattcaataaatactcttttggaaaatttgagctttgagaaacgttaaagggcataaaagaataaaagataattataatcagacacttgtagtgtctagtatcattgagataacgtcttgcaatcagttagcgatcttttataaaaattattacattaaattatataagattcaatacttaattgcatcaataacgatattacatattggagggaattaccttaagcaccacctgtgcctttttaacattttctaccataacactctttttagaaagtttagcatctctctccttatttgccttaagttaatatcaacaaagaaacctgggaaaatatagaaacatcaattatgtaaaacttcttttgccaaagagaacatgtaagctgtcaagattttacatactccatgcacatatgcatgaattaaaattggctaacaaagaaatttgcaaatgaaaggaaaggtttgcaatgtattggtgcatatctagtctcttttagaaacttatataaacctataataacattaccaactgctgaaaatactgatgaaaggtcctcacaacggttgatgatggtggatttttcagcctttgaaggtaagaaaactcacctgcaaaagtatgatgacaaagaaaagatacaattaccattctaaaatcccaaataaaaaaatgagaaggacaagcaaaagccttccaacaagagaataaaacacctgttccaaccaagccagcaaaaaatgactgcactagtgtctaaacaaaacataacccaatatgtggaaaaaagaaaagtattaattaagagattaaaatagcaaaagaaatatttttttatctcatttttcagaggtcaaaactgtg

SEQ ID NO: 76295 - DNA, 926 bp, Cannabis sativa
cttaagaggaagttaatgcttgtattagtgttgcaggtaagaaccattatacggaaaagctttaagactgctcttgatgaacacgacattttgatttcacctgcttccccatctgctgcttataagattggtatgctgcttagaaagttttgcttttggattaatcttaaaagtttttctctctcaatctttcaaatgcttgttatttctacaggtgaaaagaaaaacgacccgttggcaatgtatgcaggcgatataatgacagtgagcatctgagtcctacttatgctccaatttgatatttgtatttgttttcggcttaaaaaggaagcaacttgcctctaatttgtttgaatttgaggaagagatgaagtgagtacatgtgatactaacatatcgtatatggcaggtcaatgttaacttagctggtctaccggcattggttttgccttgtggatttgtggaaggaggatcagcaggccttcctgttggtcttcaaatgattggtgctgcatttgatgaggtattacacttatgctgtttctttctacacattccttctggtaattggtgtcaattatgacttgggatattttaattttacctttcacagggaaaattgctgaaagtgggtcatattttcgagcagacccttaaaaatagcagattcgttcctccgctaatagcagatgaatgatgttgcaagctaaagttaaaccaccattgatctttcctttgctccagataattagaaagcacggctaatttgtcattgcatagtcatgagaaacttttctaaattaaaatttgtataattgtttcgtttaatcttttctaaaaataaaattcattttacctgtgaatcaatagttattttctcattaatttgattcgatttctttttctaacagaatgttaaagtttga

SEQ ID NO: 76296 - DNA, 570 bp, Cannabis sativa
taataataataaggtttgaaataaaagacactaatttatttaatagctataaatgttagttactaataataaataaagaatgtctttttaagaattgaatgcccttcatttcatttcatgcaaaagtaataaagtctctttttttttccttttttagtgtaaagtttcaatttttattttgaaatgaagtgtattttgtgtttatgttaaaatgaaaatgagaaattaaggtaaaagaattataaaaaagaatagagacttaaaactaagaagaacagctaagaatataagtaagtccattggtacaacacgatgcctccatttggtgtcatatatttatacaatagaaaaaagtttggttttttattttcaattattaaaaatattccatgcccatgtgatttgtctactcatacccctctcacgtggccaatttttatatgatatgtgatttgatagtttattgtttgtttcacacttagtaattaatatgtatgtatgaaaattgatcattggtaaaaatgaaaaagagaaaagaaaaggtgtttaatttgaataatgagatgagat

SEQ ID NO: 76297 - DNA, 751 bp, Cannabis sativa
acacacacacacacaaacacactgcattgcacataaaccaaatgacaaaactagaaaacaaaatgcacaataattggacgtaatcaaagcataaaacagaggaaaaaaataaaaggttgagacaagaaatttatcttggttcggatctcaatgtgagtcctactccagctctcccccaaggagtttctccactatgcaatgttgtttacaaacactaattaagagttcttcaatcagagatacacacagagagatataagccctcaaatcatcatgagcgagtaacattatgacaccacgagtaccatggttcttctcctctaaatgacttcttctttggctctcatccactcaactctcttcactgatttctctctcactcacatgaactctctcttacttacaaatgatattacaatttggtgtttaaataggttagttaatagctcacaaactcgagccactaaccacttggacaaagccaactaacttagcaactttattttaactaacttcctaaccaacttgccaagaatataaagttgtttataagacttgttttctatgaattacataccaataatctaaatcctaaaactaaactcagcaaaagcacaaaatctctgatatttgataatgggtggtagtgtaagatctctctacatatagagagccattttttttaattcatactctaatcgtgattttagaaagtctctaacacaataacatgcattgagtcatgggaaga

SEQ ID NO: 76298 - DNA, 906 bp, Cannabis sativa
  modified_base (30)..(43): a, c, t, g, unknown or other
ctcaaaaccaattggcaatgagtggagtannnnnnnnnnnnnnatatggctcaatactttcacatttaatccatgtgggataatattctccaatagtaaatattgtatacaaaaccgtaatatatggttctaaatttttaaacttttagttacaaaacacatattataaaaagcattgctattgagcgacagtggtgcctaacactcttaagacgtgtcgccttacgattggctagcgatactccctaaaagctatcaactttatgggacccgatactaaattagaccaatagcgatattgatacataggaggatagttggcaccacgggtgccttttagcatttctctattataaatgtgtaaattttatttatagaaaaataattatggttacctatatttttgtattttttatttttaaattctgcatatttttttcttcaaatttaaaaataaatatatattttttattttaataattactataaaaaaaatgctaacgacatataaaatatcatcttaatcatataatattaaatattactagtgtccaataataataataaaaaatttatgtaatagattaaaaaatttaaaattttacaaaaatacatcaacaatatagaaaaaatttcatttttactcactcagcttttttatttacaaacatatatttccaataaaaataattaatagttttttatagtgtatttatagttgtattataattgtcataagattattttactggttgataatttataattgtcgtaaggataattttttcgttactttttaatttcattttttacttttaaataaaatatatttttgtaattttaaaattttacattggtatttttacaattaaaaattattaagatgtaaaattataaataaaatat

SEQ ID NO: 76299 - DNA, 1317 bp, Cannabis sativa
aagttctatagttctactcttctcaaacccagaaaaactatgccactcaaacccgaaactaaaaccaactctaaataccaaacccaagaatctcaggcccaaaacacaccaaaccgaagtttgtatgctcctattttggtggatgtcttttctaacgaagtttgtctttttcaaaaaaaaaaataaaataaataataataataaagggttaatatcccataaatgaaagtattattgattaccatagtaaataaataacgtttacagcacaccacaacacaatttgaaatgtgtcaacatacagagccacctcaccttttttttatttctcaaattttattatactgttttgggttaagaggcagccagcgacactgaaacttgtttctcatgcaaactcattactcaccatctcaaaaattacgtgtcatcacaacctacaccttcacctctttatataaacatcacctctttctctctctccctttcatatttcccatcattattttctcaaactcaaagaaatggctgatcgttcccaacctcaccaagtccaagtccactcaacacatcactatggtggtgctaagggttttcaacaacaccaacaacaaggcccatcaactggaaaaattcttgctgtcatggcccttttaccagtaggtgggactcttttagctctagctggtttgactcttatgggaactgttattgggcttttattaagcaccccagttttccttctcttcagcccagttcttgttccagcagcccttacaattgggcttgctgtagcctcctttctaacttctggggctttgggtgtaactgggctttcatctctctcttgggtccttaatttcttccgacggacctcggtgcctgaacagttggaccacgccaagagacgtgtccaagatgctgcctcttatgcgggccagaagaccaaagatatgggccaagagattcagaacaaggcccaagaagggaagaggacttgaaaaagcactgtgtgtatctagaaatcataggaataataaagtgagtcttgcatgttttttttttttttttggtttacataagtgttaatgggtatgttgtgtttagtttgtgtgtgtttatgttttttcaagtgttttagttttacattttttgctcataatttatggtgagtcgagaatttggtctattgtacttggctatccgtatattaatgtttggtgttttgtttctacgattattgacttgcacatttgttagctttattatctaataaataacaccaaaacagttttggaaaattatacttttgaaaag

SEQ ID NO: 76300 - DNA, 5506 bp, Cannabis sativa
  modified_base (3657)..(3666): a, c, t, g, unknown or other
tctggtcgtagcatttttgagtataatgcttgggacgagttaatctcccttttgtattctgaatgctaattattcaatgaagttactatttcattttcaaaaaaagattaatatttcattcaaaaaaaaggcttagaacctaaaaatagcaactttctcttttctattttaccccattttcaattcagtatttgactaagtagtaagtatatctttttcatttaaaaaaaaaagtattatctttttaattaataaagtgacttattatttccttttcaaaaaaaaattgacttattatttttattatttaatcgattaatcaaattatcaaaatcatatcatggagtttgtaagtgttgtatggtgacaaaatcaaaatgattttatcttatttacactatcagaaaatattattaaaatacttaaattaaccaaataaacatgctaggattttctttctttgggagctaacatgcaacttcttgactaacaacttggtggttttggtcatttgttagtttctgcagagtgggttggtcggccttctactgatgttttcttgatttaatgaaggaagcctttaatcttattttgtatacacatgatgttttcaatatcttgattgtattataaagctaagcacaacatcatgttatgtactatttctacactacttgaattaggctatctttaagggtaacaatttatttgattgcttaagaagtctcacgtgtaatattgaactaatcaaaattttttaaatgaaaaaaaagcaacactataattaggcagtaaccacgcttactaaaatgaatcaatatattacattcctctctcttccacctcagattaactttaaattttggctaattaagatttttactcctcgaactttacatgtaccaaatcatgctccctgaacttttaaggtcattaaaaatgtctcctgaactattgaaattgttaaatttaagaatttttgttcaattttagtaaaaaaaaaatctaacatggatgaaagttcaggaggcataatttagtacatgtacgtggggcatgatttggtagatatcaaagtctggagagcatggtttggtacataaacaatcactaaaatagtaaaattgaaagaaattagacaaaaaaaatttaaatctaacaatctcaaatgttcaggagaaatttttgacggccataaaagttcaggagacatgatttggtacatgttaaattttaagggacaaaaatcctaattaactttaaatttttttctagaagacattttgagggcaacgcccattaaagttgccccggcaggcaccactgcatgcaggcgcataatagcattcgacagccttttctcagatgtctttttacatttataatgatggtacaaaagcatttttaaaccatttaatttttttttttccaattcataatccttctaaatacctaaaaatcactccaatgcagaaagtacaagaatatttcaaatcaattttctaaacccagccacaaaaaatccaaactgatctgaaataagtttagtagcttccattaacagttataatggtactatatgaatgaaaagacaaagcagcaaatcccataataacaaaataaaggcctttttatgattatttatttactttctacacaaatacagcctagttattcaatgcataatttagttatagaggtgcttaaagcttggcaatagcagatactggcaagttggatcttgctgggagcttgagatcctcccattcttcatcgtctaccttcgagaagtattgattaaccataccatcactgatgagctcaagcttggaaggcttccactgaacaaaaaaacaccaagacaattataaaccattctctttgaatgcaactatgttgaaaatatgaaaagttaaaaccaagtataccttgggatttttatccttgtctaacaacagagctctgcaaccctgcataataattacaggttaatataactggtgggggaccagtcttgtctttgtaaaattagcctttatgaaattttttattaacaaaataatcttatatggttgcggaaacgttcataaattatattgtgcgatcataaacgaccattatgaatgaccatattgttagtttgaaaaatttcacgtgacaagtgacctcctttctctttttcaaaaaaaaaaaaaatcatctatgagaaagaatcaagggcattaatgaaaagaagaaaaacctctgcaaaatctttgctgacttctcctttcatcacatgacaaaccattctaaattcacgtacaagacattgaccaacaccctgaagtcttccttctctaatctggaaaagagaaattgagattaaaatcaaaatcatagcacttggaaagacatagtaaataaaacaagccaaaacaaagcatgcagcattggtataccgatctcaaagaaattttcaaactcattggggatgcctttcttaatgtttgaatggttgcagagatccaatcatctggttttttcattacctccctctcctttaatacaagcagaggaccaccatcagataaactaaattaaaaatcctatcaagcatcaactccaagtgaaataaatcagtattgccaatacaggaaaaaaaaatcaagggctacacttttaactcttttactacattaacttacaagggcagataaaatatcttccactgttctttgagagaagcacttatcaataacatctcgcctgtatcgaaacaactaccatcatgagaatccaaaacatatcagtagtcgtttgaagaaccgaaacttaattatcttgaaaagtgactttgtttggtaaaaggatttaggaaacatatcaatactaatttatcctaaaagattaaaaaggtgtagtaggaagaaaatgtaatagaaaaaaatccaagatcatcccttgggattagttcattctcttggttagacgttattccatttattgcccctctttcgcttggtgaaagagatcctgacaaagtccttaagtagttgcgtattagtacgaaagggagactttaattggcccaatgattctttgcctggtgagttgaaaatatgattgacacatgagcttttgaaacttggtttatcacaacaacaagaagagggtattgcctacaccttttcaagccagggctagagaattattggatgggattgaataggatatttttttggtagaaatgattttaagagcgaaggacatagacaatagatttcaatctccaacttataataccttcaaattggacagattttagggaacaagtgaagaatcaaatcatagaacagtcttgtagaaaaaatctctcatttcttcaactagggaaaaactattcgtctcctcttctcttgcatcacctcagtagtaggatatatggcgatgcttataatgatcacgatctggtatcaaatttatggtgttttaaacaaaccaatttaatagtaatacaaggaagatcacaatcatagcgctgactttatagtacaacaaacatatacaaattgtccttgcttttattttcttatgtatgtgtgtgtggtgagagtatgtggaaccagcatagattcttttcttatatacatatacaacatatatatatatatatannnnnnnnnngagagagagagagagatgaaagaaaactcaaaaattgcactctcttttacactctcctttatcaatgaatgacatgtgtacattattcatttcttttatattttaaaattttaataatcattagtacacatatcattcattgatttgagtgaatgtgatatagaaagtattcaacatttctctatatatttatattttgtgtgtgtaattagaaagagagtgaattgttctaatgtaaatactaaccggagataagcacttttctcttttagatgaggctgctgtgagtatttaccaataacttctgaaatgatgactggatcacttgaatccaccttgtataggtcttcttctaacaaggatagtctctatccattaataagaaaggcaaagcaaacagtaaatcacataagcattctgttcaatcgtttgttttttagttagatattttatttatacattatccacaaagcacagagagaagcaaaatttccccttaaacccttttatgtcataacttaatttagcaacagagattatttatgacaaacttaggcagaaactgaaattaaaaaaaaaaaaaaaaaaaagaaagaaaagaaactatagaaagtagcatactgttgatgggacaaagtgagttgcaagaccacaagcaagcatttccgcaccatccaatctagaaccagttaaaccacaatattctcctgcgaagtatttacataacattatggatacaaaatactaaaataagaatgcatgctgaaaaatgatgtagtttagattaacaggattggaattagttgtacaaataacatagaagaaaaacaaatagaaacagaagatacaaaaactcaaggagggaaaagggagttattcaagcataatacttaattcaacaaatacaatacgagggcccttgatcaaaatcatcaatttgtaacagtagttcagcaaaaataaaaaaacaacatttcacactattcccttagcatgcttgaaggccttgggttcacatttactgtaccacataaaagaaatcattacagaaggaaaatgattagctaaaagatatcaagcaaaatttaagtaaatcaaggatatctgccattaccaaggaatccaggaagtcttgacaagaagtaagaggcaccaacgtctggaaagagtcccaaagctgtttctggcatagcaaatacctacaagggtaagttttgaagtgtgtgaagtcgacactaaaatactcataaacctttgactttctgaattacaaaattatacctcaaacacatatcaccaaagtcattcaagagaaaaatgaacctatgttacagttaaaaataggtaaaagtgaatacaactgtttcttttgttcccttcatttattaattatgttgtgaaaacggaaaagcaaaccccaataacaagtaaaaaaagcaaagactgtttgaaaagttgtttcaaagaatcatatagctcaatgtgtttctttaaacctacaagccaaaagcttaaaaatagtattaaaataaaggcataagcttcccaccatgcaaaaagttctaatattattcaccaaatttagatccctcactttgaagatatttatatttccattatcatttaaaaaatttacatcgtctctaagaaaattccagctagatgacttacaggaaaggataggatgcagaacaaataaatgtgtgagactgagacataccgaagtttcagttgcaactcgaaatctaccatgtattgaagctccagctccacctcccatgacaattccattgagaattgaaaccttaaatttaaatggtaaggaaataacttgatcaaa

SEQ ID NO: 76301 - DNA, 889 bp, Cannabis sativa
ttcatgggtaatacacattgagaagtattccatatatatatatattaatttaagattgttacaggagcagctgctttcatcaaatcagttcgaccaaaataggcatcttctatgatcagatcagccctcatgatgacaggtgaaaaaagtgacacaaaatcttcatttagagctggaaatatcttattcaagaacaaaatttaatttatttttctatgttttggtgcagcaagtgaatacaacaacatgggaaaaccattaacaaacaactcaaactccataacgagtccacacgaaacaggtgtaggagaaatcaacccaatgaaagctcttaacccagagctagtgtttgaaacaacagtagaagactatctgcaacccaagaagaaacaatgaggagaaaaaaaaaagttttaccctaattaatgcattattatatcattgggggtccatagcactgaataaaattaaataatgaattaataaaaaagtaattataaaaatattggttagatgatacactatacaagggacacgtgagagacaaatagtatttcccaattaaatagcaaatgtcagaaaatagagttgaataaaaatatattttaatcaatcctagtttaaatatgttgcatttatgaccatggtattacaatgcatttacccattagaacaaactattaaatatcctacaaataagccatttagaaaattctttaccgtagaagagtcctatacatatttataattattttatacttgtaagtaattaacattaatatcaatactttaatagttataaatgacttattttttttgagtcgttcgacattcaacaattacaccaaaaaaagataagatacagtagcttaattagtattatttgtaa

SEQ ID NO: 76302 - DNA, 1743 bp, Cannabis sativa
tataatttaatgtaataatttttggaatatcattaactaatcgcaaaatatcacctctaagtagtgctaagaatgactagtgtctaataacaatactcataaacttattgaagaattgataaagaaaaacttaagctaaaatctaaaactagtacaatccaattaaaaaaaaaaactattttgagaaaattgattaaaacattataataaatttatttattataatttgttatgcttttcgtcattctaactttacaaccggacctgaatgactgtttttttattatcacaatagttgtaataatatatatataggtgatatttaatagttacatttttattgtaatcatgatagttacacttttatggttacattttttttacatataataacaggttattaataagtaaaaaaaaatttttagaattaaattaatcataattgacaattttttataataattaattttaatttaaatatttgataagaccctttttagcaattaatatttataaatgattttatttttatatttaagtctctattataatatttttaacatttaaaccatttaactataatatttacaataaaattctatttttcttacaaaatttagacttccaccccttctaaaataaatttttaaatacttaattaatttttaaaaattacatctaattattattttgcaacaatcgcttgacccatcttcctagtttataaaaaaaattaaaaaattaagattttatttttgttccaacctaatattatgtaaattttccacttcgatacaatttcctacatctatgccataaactcatctgtctattcaacaaggtacagttagatttctctttagtttttaataattttcttgctattttcctactgttatgcttatttgtgaaaaagaagcaacaatttcaattagttggtaatatactttgataaatttttttttgaatctttagattgatgaagatgatttcaacaaggagcggaaatagttaacaatcattaattttatagttgttattatattttttttacttaatttttcattttttaaaagaaaaaaaaattaaataacttgaaccaatcttggactgacacattaatgtggcaattaaaaatgttaaaaagtaagattgagcgtaaaattacctctaattagagattattcatactatttttttattaattaaggttatgtatctaataacgttaaattagagttttgttgcaattatttcaattatttaagttaaaaaaataattgctaaaagatctttacttattaacaaattacataaagttagtcaataattattagtaatttaattttaaatataattaagtttttataaagaaataaagtatcaagttacgagttatttattatttatttttcttttaatttataaattaatcacaaccattcaataatgatctaatagttaaatataaatataaccacgatggtccatattataactattgaacctcctctatatatttatatatgaaagacctacaaatcaacataaggaatcctaatgtgcaattgaaataattaaaaatgtaattcctcttttgtctttttaattgacatagtttaagtcttttagtaaaaacgccagagggtggggcagccggggcatacgccccaggccccataattttcgaggccccgaaaaaatttaaataatatatatacatatataaaaatataatatata

SEQ ID NO: 76303 - DNA, 1141 bp, Cannabis sativa
acaaaaaattactaatcaactgtagctaaccgaattgacttaataactaagttacacaattttactaataggatgcaattggttctcctttatttttctccaatttaatgccaccccatcttgtaataaatattaagtcgttaagtgttcagtgaatgacacttgacgggtcatagattggtctaggttaaaattttatttttttgattaaaaattaattaaaatatacatgtaataaataatcactttgacaaccgtaaattagtctttaattaaatgccaagttcatcattgtacctcatacgtgaacgtgatgctgatagggcggcttttatattatgattcttgcgttgcgttataatggcagttatggatggatatcgatatgccgatgagagatggttatacgtactgaacagaattaatagcgattaaatgcgcctttgatttttttgtggaagtaataatgctgctaatgcatgttctgattggatggaggcctgcttaatttatatatttgctaacttatccgttttcagtaacaataaacctcctcctttaactcccttgacaacatatatatctcatatgacttttggactttgaactttagttcatgaatttttaccggttttatgaggtttggagtttcttttacctcattatattatacactactagctataaaaaagattctggctctttcttagtttagactttagagggtttcatttattaaaaagattctcacttttggacattttaaatcagtagtgttgcgtttgaactggtcaatcattatactgagaaattatatagaagaaaatgacaagacaagtaaagttgtgttacttgaattattggcggagcttatccctatatacattggcttagcatgaccatacttaaattgacaagcactatggaacatgctgtgatccctctctcatatcacaacaacaacaagcttaatgatcatcttgatactcaaaatcatatacctgaaagttatggtaatccttttcttacaagttgaactactaaattaactggcactgagaattttacccttcttcttcttcttcttttttttttttttggggtgtagatcaagatgaagtaaatgcttctccaatcgagc

SEQ ID NO: 76304 - DNA, 793 bp, Cannabis sativa
atataaagtgtggctatctaacgaaaattgatgttttgatggttttctgttattttccgttaaagctacaagttaaaaataacaccgttaaataaatttgttaaatatttttttgaacaaatttattaatttttcagtttaaaaatataacttatatataattatttaaaagtgttaataaaattggatagatattttcttatgtaagttgctgccttgcgagtcctctctggataaaactgataaacgaattttagattcaatgggttatgccttgttcggttcctcatatgatagtaaggtggtgggggggcgggtgtcttggtagttctttgggctgtttggttagaaataatggaatctttgaaggttctgaatgattagcagaggtcctatgggaaaatattagattttggactgcatcttgggttgtacaagactaagaagcagcatttttttgaaaatgtttcatttttagacttaattagagactggagagcagtgttgtaagttctttgctactgccacatatgactttctactgtgagggatctggtttttatgtgtatcctagatgaatgttaaaacgtatatttggggcagtgagtatgttcagggtgtctagatagtttctagtattggagcttggtttaactttgtaaccacggttttcctccaccacaagtgagggttttattcatatcggggggctagtctaagacaaaggcccctttctcttttttcagaaaaaaaaaaaaaaaaaaaaaaaaattaaatttgaatcaatccttaa

SEQ ID NO: 76305 - DNA, 522 bp, Cannabis sativa
tggaggtaaaatatggtaattgatgtagtagcaagaaatcacatggctcaagtaatttggattgaatgcagaaaaatttcttatgttgaacatgttgttggcgaaacagctgcatatggtttaacgcttaactcagtgttaggtgttggccacaagtttgttgttttagagagttattcttcttttacaataaataaggtttttaacggttccagtagtagttgggccattgataattatgtagttgagtgattgtaagagtttagcttcccaattgttgagatattttatttatattattgtatctttcaacttagagcatgaaataactcactagtatgaatatattttttttaacaaataaatacgttcttgttgatcaatcctaaacatgtataacttttcaagcatatttaaagcttcttcacatgaaaatttttctatttcttaaaggtaatttttctatttcaagcttggaataattttatttgagtatacataatttgttataaaataatataa

SEQ ID NO: 76306 - DNA, 641 bp, Cannabis sativa
ttctttctccatctgggttgttacactgtttttgatttctcttaaaatcgaaatgggattttaggatttttttagtttagtgtcaaatatatatgccgagcaaaccgccgattatggcaatatttgttttggccatgcataaatagggtgcgtggttgctagttgtaactgcaggtacatctataaaggatggtaaagtgaaagagatgcctctcaactattttaatactgtatagctcacaggaaacttcaattaatttaatactgtatagaactctaggtgtgagatttcttgtagttttgttgaggtagggagtataatttatggttatgagacttttgaaatttactatagtaaaaaaaattaaaatttggaagaaataaaacacaaactgcgatgctccattctcttttctcatcgttcaagattactgacattatgtggtcactcattgctcctaacaatccgtggtattctaaaatgtactttcttcatattcaaactttggtgtgttcaaacttaaaaaatttaattcttttggtgtttgtagatataaatattaggtctctttatctagctttgcttaatctacataatttctacaattcttattactatatatgttgcattaactttttct

SEQ ID NO: 76307 - DNA, 2516 bp, Cannabis sativa
ataactaatcagattgtaaagggttttatttaggacacaaaacccaacatgaactgactatgtaggtgccatggggtgtaaagaaccagaaatatgagtcaggtgtggctatgttggttaggggaatggttaaaatggcttgacaaatatccgtagggaaggtgttttgaagactggtgggttccattttggtaggtgttaaaagatctgccactgttgtgtatacatctgagttgtgtctaagataatggagtttaccataacctgggatccaggcatcattgaaaatggatattgtggtaccatcaccaactgttcttcaaagacctgacaggagaagttctttgccccaagagatgctagaccaaacaagtgaaggtcgatgacccttacccgaattaagaaattagtatgaggaaaataacgtgattttagtaaggtggcaacaagtgagtttggagactgaagaagccaccaagcttgcttggccaacaacgcctgattgaaagctttcattaagcgaaaaccgagacccccatgaaattttgaaacacaaagggaagacctaatttttccaatggattttacgtctttgctccgttcctccccaccaaaatcgagccatcatggattcgagcttagagtgaaaagaggccgggagtttgaagcaagccatagcataagaggggatagcttggacaactgatttcaagagaacttctttaccccctttggaaaaaagcttggaattctatttgtttaaatgagaccaaacctgatctttaatgtagttgaaggcatccttcttagttctcccaaaagtttgaaggagggccaagtatttatcaatagcgtctcttacagggatgccaaggatggtggtaatactagttttggtctcaacactagtatttggagagaagaacaaggcagatctggcaaaatttaccaattgaccagatgccagactgtagtcatgcaggatttgcttgatgacagtcgcagctaagggagaagaagaactaaaaagaagactatcatcagcaaagaaatgatgagagatagtcggagcgcgtctgacaatttttattccaagtgaatgtttgcagggttgagcctcttgcgctttgtgacaaattaaagaggacatgccttcagagcataaaagaaataagtaaggggatagcggatccccttggcgaattcctctagaaggcttcacatgcccaagaacctgctggttaatggagaaagagaaagttgcattagagatacatgatatgacaagatgaatgaatcagtgaagaaaaccaaatttctccatcactcgacggacaaaaacccattcaacacgatcaaaagccttggccatatcaagcttgagggccatccatccaaggcgacccgttttgcgatgagaaagggaatacattacctgttggccaatgataatgttatttgagattaatctgtttggaaggaaagcactttgggatggggagataatgcgattgagaatgggcttgagacggttaactaagaccctagatatgatcttgtaaaccgtggagcacagactaataggacggtaattaacaatttgttcaggatttgcctttttagggataagaataatgagcgtattgttgattgcagcaatgtttgcatctccattcaagaagctttgggcagcattaataacatccacccccaacagatgccaattcttttggaaaaaaccaccattgaatccatctaatccaggtgctttatcatttgctagttggaacgcagctgtcattatttcattggcggaaaaagtggcctgaagaagttcaacttcatcctcagttaggagctcattgataccagataagatggagtcaatgatatcgtcctccggtaattggctttggaaaagttgggtaaaataatgctcaatggttgacagaatggaaggagtatcatttgccgtggaaccatctgagcgttgaagagaatggattttgttagtttgaagcctcatggaagcgataagatggaagtaccgagtgtttttatctcccaggcgtaaccatgtaatacgagatcgttgttgccaatactcttcctctttatgcaaaagtcgattgaattcgctttcgaggtatctgccgctgtttagttgagcattggtgggttggggtaaatattgaatcaacttaagttgagattgaagctctcttatttgattagcaagggggggaccctacgatttcctccattgtttaaaacatgaagaacaattttccaattttttagtgagtccgaccaaagggttgtgactaggaagctggttagtcaacgacaaggccttacgaaggcaatcctcgaaccccggttctgaaagtcaaagctaaagataaatctaggagttggagtaggctggtcagcttgaaaatgaagggttaatatcaaagggtgatggtcagagccaaagaaatcaccattaagccggcgagggttagggaagtttg

SEQ ID NO: 76308 - DNA, 570 bp, Cannabis sativa
tggtggcgatttctattgaaattatagctgcgggaggcattgaaattttttcatgttattattatgttgtatgaatacgacaatgactataacattttacgttggaaaacattatagacatgtcatgtcgtcgtcgtaaaaacattgtatatatcgttctacgggacatatcatgaaagagtattgtcatcttctctatattttattgtaattcgactagttttttcttttcatttcattattattattattaggttaattaaaatttttgctctttaaattttgacatgtactaggggtgaaaatcgatcgattatggtcggtttttacaattttataaccgaccggtcggttatgatttttattttacgaaaaccgtaaccgaccgttaaagtaacttttaccactacaagaatgtcacttttaccagcacggttcgctactgttatggtaaaagtaacttttaccagcacatttcgcaaactgcactggcaaagaggtcaaagttttaccagcgtacatttgcagtggctaaaatctaacttataccagcgcatttacgcgctggga

SEQ ID NO: 76309 - DNA, 707 bp, Cannabis sativa
taattttttcctaacagctaatcatgagtgttcgaaagatgcagaaaaaggtattcatactactccaccagtgctaaggtctggaagtgtagtaagaaacctatccaattcttttgagagctcaaaaaagcaaagtcaggttaaagttactctcgatgacattgcagaggagatatccttttggaattcatctttggtctgctatatcctcggagcaaatccgcctctgaatgtgctggatggttttgtgaggagattatggaaggataagattgataaggtaggattactcttctatggtatttttttgattagatttcatgaggtgtccatacaccaggagtttccacataccatttattttgaaaatgagcatggaatgaatgttccggttactgtgtcttatgaatggaaaccaatcctctacaagaattgtaaaggaatgggccatgagacaattgactgtaggaagaaagacaagatacagcaagaatgggtgataaaaagggatgcaaggaagccagctgaggctgctgttattgataaagagaaaacggatgacttccaaccagtcactaaaggctggaaagtcaagggaaaagagccaccaaagtagacagtgattgttaattccttcaatgttcttgagcaagaaggagaagggaaagaagataaggtagcaaaaggagttataacagatggaatgc

SEQ ID NO: 76310 - DNA, 571 bp, Cannabis sativa
aaaaaaataatgagaattaatgcaaactatatacacattgtatagtagttctatataggtaagggtaaaaatatatacaaattaattaaatttagcaatgtatatataataaatggagattcgtactaagccattaaggctagtttagtggtgagggaaggatgggaaaagagagaggtcatgggttcgaacccaagacctttaagctacaagctattaattgattgtacaaataccattacgctacactaaaaaaaatggtgattcgtacaataattacatatttcattcatcaggattggaagacccattttttattatagcagtcttgtcatgcatggcatggcatgcagcagattcttacaagcagtaagaagtaagaacacgtacattctcaacattatattaatatgaaccaaacaccaattatataattacacgtgtactcttgttttgcttaaaaattgagcagctggtttccattaatatgtgtttagtattttcataatatagtgaaatttttttgtgcatctctccaaaaagttactactctattgttggattgtttttt

SEQ ID NO: 76311 - DNA, 1568 bp, Cannabis sativa
  modified_base (421)..(437): a, c, t, g, unknown or other
aaactttgacctctttgccagtgcagtttgcaaaatgtgctgctaaaagttacttttaccagtgcagtagcaaactgtactggtaaaaagtgacatttcttgtagtgattacaaaaatcttccttaactaaaaaatagagttctcttaaatttatattatttctccaaattaattagttaatttataaaaaaaattaagccctacattgatcttagcatatatatgaccaaatttatggaacctaacttgtgacagtcagtagtcctgtgatccgtaaggaaaaatatcgagtaagctttgcaatcccacatcgcctggggaaggtcaagtgtgatgattctgagactgtgtaggtatggaactatacgattgcagagagcttaaatagattgattgatactacctatatcaacaaggtgnnnnnnnnnnnnnnnnngcccatcacgaaagaactccacagttaagtgtgcttggcctggagcaattttaggatgggtgacctcctaagaaattttcccaggaagcgagcgagtgaggacaaagcatgctggaacactcgtcactacaagaaatatcacttttaccagcacatttttgtgctgaaaaaatttggtattgcactggtaaaatagaatttacttgtggtgtgttagcaaaaagagattagcaaatcaatgctggtaaaagttagattttagcaatgtatgttggtaaaactttgacctctttatcagtgcagtttgcgaaatgcgctagcttttagtgcgtgttggtctgtagggccagtcatcagtccatgaaacagccagaatgacgtactcgtgtattaatattaatgcacttctaggcaagtagtttttttatcactgtatagtaagatatttacccttaattaatttagggtgaatttagaataattcatgtctaaaactagctaatattataagtactttaatttctttgcgccattgttcacataatcatcaataggggtaatctggacagctcatattataaggttcatagaatttagacattccaaatatatttgatttaattataacattttttttaagagagagaagaataagaaaataacgaggaagatatggaagaatcaatattatgaagatgggggtcagctatagctggagactatatagaaaaggagaaaaaataatgaaagaaaattaataatctggaaaaactgaattgattcacgtaaaattaataaatggtatcaagaaattaattattacttctcagaaaaaacatttatggctgaattatatacacatctatcttattagttgaatgttattaaatgatcgtacgaagtctataatatatacaacaaaacaaaaacattttactcatctctacaaaaatgctctgaaaattaatggaccactatactagtgtattattatgttgcatttttcttttttcaaagtattcattaaattaaatatgatttgagccaaatatatatatatatagaagaggtttcaatggttacatttttattgtaaccataatggttacatttttttaagccattggatta

SEQ ID NO: 76312 - DNA, 2737 bp, Cannabis sativa
  modified_base (1291)..(1291): a, c, t, g, unknown or other
attatttgtcagttttttttttttgaaaaatttatatttttttatttataattttttaattttaaattaattttttaaataatttattatgtggaccaataaaattgtgatttgcatacaccgtgtccacgtagatgtacacatggagaatctaacatggcacttaacacctaaaatggatggaaactataaattgctaacagtttcctagttttgagagttttactgctaaaatttaagttttaaaagttaagtacaagtaaagttattaggaattatgccacaattaaccttttatcttttgaacttcttttggcattaatttttggagtatttattccttttctgaaaaaaaatgaaaatataaataaagatttctattacattaaacaataaacatagttcaaacttcaaacgctaaaattattttattaaaaaattctaataaatttatttgtactaaaatatatttaattatttattatatattactaaaaataaaaatattaacataaataatatataaatctttaatttctttttagttatttagaaatattttatatatatttgttatagtgtaaaatttttacctcgaaactcgaggtcaggctcccataagaatgacacgtggactcactctcctcgaggattgctgagctgtcaaaatgagatcactcaagtataaacctcgcctgaaccggactcagcgagatgatgtgaccctaacagagtatagtcgcattattacgcctcgcatgatgaaggagaaagaaagttgggcttaagactcgcatataccaagatatatgcgatgtccataaaggtttctcctgggaattggtaaagatcgattctttatttagcgagctggtccggatgacctaatatgctcgaagacccaataaggactcgcacatcctaggttaacgaattttacaagatatccgtatacgcggcttggatagaacgtagatatcttaacacaaagatttgttagtccttcaggaatcctaggcccgcgagcttatgcaagaatatgaacagaaaactcgaaccattaaggtcacgtacgttgctatatttagtaaattgagtcgaaactgctcttcatttattctatttaagtttttcttgatttaatgttgatattcaatgtaaaacggtttgataattaagtaagttttgtgtaatcaaaggacacttgctttgtatataaaggagtgatccaacataaaatggaacaagacagatatccttgcaacgatggactaagcagaccgtgatctgnctgaaccactataattcccttgtgttcattatattttccagtacgtctgagtgtctgttctttgaatactcgtcattctaggtagagtacttgcgcattttaattgataactatattttaattttttattcagtcttgccaaaattcctccaacaacatttggcgccgtctgtgggaaagatttttactattgattttggaggagaattaaaatggctgtaaatcagacgaacggaattaacaacacaagttctttcaatgtcggaacaatgaatgttccactcttgggcaacggagcgaatctcgttgatgtaatcaatggaggtgtgggacgtaccactgttactcccctcaacttgtttatagaagtcgtcggtcatgacagagaaaattcaacaccagtagccatcgtgggacacttcccagctattacaccagttgtggtgtctggaggaattattcaattgactacggcccagtatacaaccctacaggagcaaatacaagctttacaagtcgaggttgatggaagggtcaggactcgacgtcctccttgagtgccaaacacacgtttagacaacccataggtaacagccactaggtgatgaactaaaaataattgtactcgtagggaacatgagaatgaacaagatggtctcaacttgaaccggcctacacataactttgtgcaaaacaaggaaccagtcgcacgaaacgctgattgcattagggacgaaataccacaggaagaagatgccaagcgacgtaacttgcgaagccgatcccagccgcgagttgaggtaaacgatgtcgagtcccactcttcttccactaatagtcgttctctaagtgcttatactaggtctggatctgtggagtcgtgacaagggggaagatatcatgtccataggggtgatctccgtgatcacctcacaaaaatttttagggcacgatctcaaatgccaaggaacaacaatcacaacgagccccgtgatctccaggtgggcgatcaaggcacgcataacatgaacaacccgactaatatcgtcaacccgcctaacgtactagctgcgacaattgaggtagtaatcacgaataacatagccgcagttgctgccatgctaacagtagcacaagctaatcctgtcctaccaggaggcatagaccaagaaagcctactgagagtgttaaggatgatcgagcagcagagaaagcccatttacaaactccatgggacctcgcctttcactgaagatatgcgacaagctcgactccctaagggattcaagttatctgaatcgctaaaatacaaaggcactactaatcccataaattatttagacaaatttaatacaattatggcagtagaccaggtgccacagctagcgaagtgtcgcattcttgcggcaacccacttatgtcgtactgacacaactaatgaggtca

SEQ ID NO: 76313 - DNA, 578 bp, Cannabis sativa
ctttgtataagaagtgaactgtgtgagtgtattgagtctcacatggaagaggaatacttcattagaagtgtataaaatgtgcaactttggcacatgggttgggaccccaatgggtactcagttttatgcgagtgggtgaggactcacacaacagaccaccacacgcgcacgcgccgccgctgccatccgactgtgccaacccaagccgacgggcaagtgtggactcactttatattttagagaaaatttatctattaaattattagtttttatttaattaattaaaatagtttttaaacgagtttaattaattagtaagcaaacaacagaagaaagacatcgtttttctcttaaaaaattatatacagttttatacaattatataacaaatgtattccgagcagtagtattttattgggtgtgatattttgaaatttctctatcatgcaataaagctttgatacagtgttgcaactgggttattttatcctggggatgatgaggctgctagtctgcttgcacagttctggacactgtcgcgaacgtcttaaagagagcaacctagtccacgaattaac

SEQ ID NO: 76314 - DNA, 1593 bp, Cannabis sativa
acggtaataaccgtttccaaccctcaacaaacatttaaccagaatcttaataataatcaagggtataacaattaaaccattaacatttagccaaatatagtgcttaccaacttttcttacctcaattcagaactcaagcgtgcgggccaataaattgagtggaaaacaaactgggcgatcccggtcccatgtcacgacaatcgaaacttaatgaataccttaatccaaaatttcgaaataaaaccctaattcaaaaccaaacataacctaactcccaacaactccaaaataggtcaaataactcataaccaacctaaaaaaaaaaaccacgcaacaccccgagcaaaaacaaaactggaagaaaaacccaggaatttccccctgcacggcaaccggtcgaccggttctagtgcaccagaaccatccggtcgatctattctggcagaccaggaattcttgggttctctccttcaatttcgaaccaaacctcctccaaacctaaccaaacattcaagaacagtgtaataacacaaatacaacatatcactagcttcaaaacacagtaattcaatcattgaatcaaaatcatatgctcaagtgaaggaaacttaattttagcctcatctattacaattcacatcaaacagccatggaaaccattcaaatcaatctccaacatactcaaaaatatagcctaaacacaacccagtcctagtttaattcctacagccacagaagcacaaaaccctaacctaaaaccaactaaaattcataaaacaaggcatagaacttaccttagttacttctaggttgggcttaggtacaagaatcttctccaaaagcaaatgaaaattgtgaggaaggtctttcttgctggctggtttggcttgcacgaaggggaaaaagaaaatgaagcttgtagttccttagcttctaagttatctcgaataataagtttcttttctttgttttctttctctttttaaaatggtcagcccacaaagttaaaagggacaaataaatataatttgcaaaagactaatctacccctcaaaaaacttaagctttaaaaataacttaagggcattttggtaatttaattaagccatcaaaaagattttctaaaattctaaactagtttgaaatattttcaaaagaatccatcccttattgtcgtgacatcacagaccactctgtccagtttccacggtcactgggtccaaaaatattttattccagaaatggtatccacgatacccacatattctaataaaatctttgtaattgataaattacgctttaattaaatcatttaataaatccatactaattaatctaagtaagatcgtaatctttcttcattaccaaaacaattacatatttaataaaatatgtctaattatttaccataatattttccgagatattacaactatctcatccttatagaaatttcgtcctcaaaatttaccagcaaagcttgggatactgctcccgcatctgcgactctaattctcaagtcgcttctttaacctggctgttctgccacagcactttaactagcggaatagtcttgttccgcaataccttttc

SEQ ID NO: 76315 - DNA, 1740 bp, Cannabis sativa
ctcactttatcactatttattattggacaacactatttattattagacaacaaagacaatgacttctctttcaacaaaaattggttgtcacattgtttttctacttcttctttattattttttagttgaatttatgtattaactttaattaatacttaaatattattagatagatggtatctcattaaatatcatttatactaactttttgaatatgaagtgacaaaaacttgccaaagttttaaatacttaaaattggcaggtatgatcatattataattaaatgtatttatatgtataaatgtttggttgagtcacatataggaaaaatattatatggtttggttactaaaaccattaataattattcaacttgtgaaattttactaagtgcaatacaacaatataaattaatttgtgaatgtgattggttgaaagtgatagtcataacaatttaaggttgatacatattatgttttttcataaagtagaggattaatacatttattatattttatttttaatttttaaagcctatagaatatataattgatatgttaattattagattttgccaaaatggtctgaaatttattatcttaaaacaatgacaaagataaaagatctaacactcaatttaatttttgttaaatatttttcaaataacaagatcaaatcacctttaatttttttttcctgaatatttgcattttagtttattaagatatgtgttaattattctacattatatattttaggagtataatttgatagtttcataaattcaggaggaatagaataattattctactttgttaaaaatttaaagaagaagaacaaatcatgttattatttgaatttgaataaatcatcacctccattatatatatgttaattaattaagatctattattcaaatttcaatcacatgttaatgtttcattttaaataattagcagccaaagaaggaagtggaacacaaatacattaatagttgttaaatgaacatttattaattgatattgataatatatatattttttttcttctttcttgtttattaagttaggcagacctataaatataaataaattaatgtttattagtgccaaagcttttgggattagatttatttaatgacaattaatgcttaattggacctatattgtataaaagaaataaatttatcaataaaattattatttgaaagaagagacaaatattgtgatttgtgaatagtgatcatatgtttatatatttacacataaatatttcagtaaaaaaatataattattatagataataactattagagtagattaattcagacatgcatgcagaatggaaaagattaagtttcctaataaatttgttataattcaaatttgaagagaattaaatattagaagtgattgctgataattgtcattaatttgtgacatgtttcaaaaatcaatttatataaaatatataactataataataagaaaaagcctgtccaacaaatttcaatatttatagctaggcataaatagttataattatatataaatatataaatatattgagatgctgaaataggaagtgaggttccaaatttgaatattcccttcttatataaaataattaaaaaataattttgtttaatgaaaggaacacacttttttttattggtttgcaaatgcatgcaagtatgatcagaaattgtatttaacatgttataaattaaaaaaaaaaaaa

SEQ ID NO: 76316 - DNA, 1094 bp, Cannabis sativa
gctcccgactcggtcccgaactcatctcctcgttgcgttctcgactgggtcaactcggagttcgacagtgaagaggaagaagatttcgagttcgaggaaaaatctctctcggcgaaagagcgaattagtaaattggcttcgagctcaggggcaatttgggaatcagatggttggacagtcgtgaggtcctcctcttcttcgaccagtgaggaagaaacaccacgtgcgaattgttctgcgtgccaaggagaagaaggaacaagtttagaatattcggatatagtgagggcagaagatgaaatagtttggacaaattcgcaatactctcattttacagggactaatttgaaatatttgaaaattggtgagtacgagccggaatggtcatgtaacgggaggcgtgacggtgacggcggtggttgtggttgtggtgggtggcggtgcttagctggctcgaattgtcggcatggattggagttaacagtggataggcacagaatatgtttttacagcttgtacattattgttgtttctattagtttattattttcatattctttcccaataatattatccacgaataaatgcaatattttcctgagttatatttgatattcttcacctttcaattcacaattataaaaatttaaccattaccataactacaataagatataggggttgggttttttcgaattttgaggaaagtgattgaatcaactttctatttcccaaaaatccaaatcgatatatgccaaaggaaaaaatctaacagatagaaaccacttgatgtattattgttggtgagttattggttactgccgaccatggtaactgttggccaagttcaatgttgctagttgttagcatagaagcaataattatccaatatgcaaatattaacatatatatacatttatgtataatcaccttcaaatggcttagaataaatatcacaaatagtattcgagtggcgtataataaagatactattggacaatatctgttgtgagatattccatttattttatttgtatggttcccaattagtggtgcattgcaaacaaacactacgattagcatattttcttttt

SEQ ID NO: 76317 - DNA, 1046 bp, Cannabis sativa
cgtaaggcgtggctccccaagtcacgtccccctcggtctgctaatgctattaccatttttggtaggggaaggaatacggaagacctggatgtgggagatgaacctgcaaattttcctattttgaatataatggaaaaggaccggtcttcggaaggtttaagtattttgaataaggagaccgttggggataatggagtttgtattgggccaagctttaatgggccaaatatggagcccaaccgtgaattggctgcttctccctttgctgatgtggctaaaaattcggatggtagtaaggctttgagaactgggctgggctctagtgggccgtgtgtgctaattaatgaacaggtaaatgccaacttatgctctctttctcctgctactgggccggcttttcctgatgattctttgcaacccaatggggccgagatggtggtgactcttggcaataataactcttcaagaaaaatggtggggccgactcctttgggtaattgttctattggttctgggccaatatcttcctctcctaatgatggtgggctcgtgggggttagctctcatatgcctagagtatctcatggatccgaggagcactctaatgaagataaagccttggcccaattttttaaagctcaagaaagcctattgcatgaccttaaacattttgggaacctcgatttgtatgaaatacggaaaataggaggagacattgggatcccggcttcctctgaagttaatgagagaacgacaccttttaagaaacggaaatttgaagcgtctgcctctctttgctctaggccccacaaagttccgcggaagtatcaagaagttgttcgtgattttccctgggacacaaggatccaagcaaatgactctgatttggtgattgatgatccgtctgaggacagttctagttccccgagttgctctggtattttgaagaacccgcttgttggctcttttgttatcgatgacactgtttctagtgggtcttctgatgcccacaaccctgtggaggagaatgtcgaatctcctccaca

SEQ ID NO: 76318 - DNA, 1438 bp, Cannabis sativa
atccgcactttgtgaattggattggattggattggatcgtgcggattggattgtatcggctattttatgaacacccctaggtatggcccccataatttaactacaaaattacaaaatatcttacttgaaacaccttattaccaacaaattgggtctcacaaggaaacgccaatcttgcttaccgagcataaaaaatttaaaatcttgtaaaatttgaaactccattcaactatcatgcttataaaccgccaacttaacccaactcttccacattatccctttgcccctactaaaagagaacaccactagaattgagccatcattcctttccttctatagccttacacatccctttcgaaattaagaacacactcataacacaagaaggcaatacttataccatcgtttaagcataatctccttatccacctgctgggacggacgcactagtactaatgttggggttactaacaaaaatattacattttaaaaattaaatgtaattttttttagggtaaatagtggcataagtacccaacgtttgtaaaactgtaattttcttccagttttgtcagtacaaactttgttttgaatttattaaaagaatatttggaagtaactgatactatatatttctatctagacccgatgatcaaaaatttaggccttatatgtgccctatttaagataaaattagagaaaaattacagtttaacaaacattgagtacttatgccattaaaaataaacattgagtttatgccgcttacaaatattaaactttgggtacttatgccactattttttttttaattcgataattataggccaaaatagtagaaaagcccccacaaaattaaataaatctagtaagagtgattataatgtaggtaaatattttttcaatgataaataagctctcacaaagtaaaaatattgagtccgtcaccgtcctgagagatcaacttgttattcccaactttataaaatataaatacattatctataaaatttgtaattagagctttatttatacatgtatttttaatctaaaattttgaattatattagattagtgtcacttagtactagaaaacaatcttgatgaatttattgattgacaaaaatgatgccacacataatatttgctgaaataaaaaaacaataatcttcttaattaatttaaaagaagcattgatttttttaaggatttttttatatagaaattaatcacattaaatataattttttaaatttcatttaaacaaggctaattaaaatttttgtcatttgaattttaatttgaaccaaattatgttcataaacttttaaagtcattagaaattctcttgaactattgagattgttagatttaaggacttttgtcctatcttagtaagaaaagtttaacaaggatgaaagttcaggagacacgattt

SEQ ID NO: 76319 - DNA, 1284 bp, Cannabis sativa
aaaataaaaaataaaaatatttttaaaaaaagagtacaaattctgggggaaaacgtagacaagatatcattatctttcttgtattaatgtgaaatagtaatacaagcaaaaattggttaaggaaatccagtgtgaagccgagatatcattattctggaaatcaaattttcatagcatttagtttgtaacaacgcaaaaggttacaggtatgtttcacacgtccagtaagtagattgtctccacaggcaatgatattaacaaaaaaaaaatatagtatctagaactcttgcaggattaattaagctgttgaaaataaatgtttgaaatttagctgaaatcgtctcataagaattgtaggagagaaattatcgactgaacatttagttatcaattgtaaatatttgagggaaatcttagctttttttacatcgtttttctcttaagccacattgtgccaccaaaaaaatatattgaaactggagtttgagcttctgggtgtatgatgttattaatttttgggtttacattttgtaatattatttcatgtcttgcataacataatggaattcttttaatttaaattgttcttttcttttttctttttcttactggcctgtaaaacatctgaaatatgtagatgagaaattttctttctgactgagacttgcaaactacaaaattatatggtttgagttctttaaattagttactctttttgtatatgcagactaagagaaccaagaaggccggaattgtagggaaatatggtcagtgctttttcttagtcatcttttgtttcttaagcatatcctgaaaatttgatttagaacaaatggttttgtttaataatgatggaaggtgggatattacaaatagctgaacttacaaatttgatttagaacaaatggtttttttttaataatgaaattatgttagcaatagaaccagtcatgaaaagactcaagtaaatgtgattcagcttaaaagacttctgtaagaagaatgagaaatcagtatctacccataggaaaattagtggaaagaccatacctttggaaagttcacatcaaaagcagccataatagcaatagtggaagagcaaacaaatgctgcagagcttgataacccagatcctatatgaaacataaactcataatattaagaatttgtttttatcccctacacaaaaaccaactacaggacataaaattcattttgaaagcacctgtgggaacagttccgtcgaccagaatatcaagcccgactggctcatcaacttttata

SEQ ID NO: 76320 - DNA, 511 bp, Cannabis sativa
attgtttttaattctcaattacaagttgaatgcttaaaaccaccaagttgaagttgacaaacgtatgagatacattataatcttcgaaacattcacgagtcaaattagatttctttttttagaaatactaaatattaagtctcgtataatttaatataataactattaaaaaatatcacaactaatacttaataataatcttatgtatttttgtttcagtagctgtcagtgacaatgcctcaatgttttaccaaaaatacttgattgggtgcaagcaaagtttattgaaaaagagaaaacaataaaaataaacacaaattattcagacatatatagtcgctttcacttaagaatgacaaaaggtaaggtttggtccaaaggtcgattgccatatggtcatggcctaggatttttcttggaatttttggctattcaaataccaaatgggcatttaacaagatgaattcaccaataattaaataagtattgtcaatgaatcacgtgagatata

SEQ ID NO: 76321 - DNA, 730 bp, Cannabis sativa
ggtacacctacactactactactactactaaaactacttactgacagtgcctctttttaggttttggattttttttctttgttggttttgagttttatgtccctttcatttgttttcaaatgaatatgcagtgtagtagttacagccaagccaaaacatgtcatttctgaattatatgaactttatttatgagcttttgtttgtttttggggtcaatgtcttttgtataatgagttgtgtgtagaaaaatacctagccaaaggggacagtcagagaaggattttgtctcttggtcactgttttggctatgttaataaagacttgaattaaaagctgttatatccataaaacaaaggagtataaggtcatttcctttaggtacaaataatattcttcattagaaagcaaataatatacacttttccaagaactgataagataaagatgtcttattgtgcatgtctgtttcacacacaaagatattcaaatcaaacgactctctttccaatttaatcagttattttctcttctaatagtaatatattacactacaagacagtggcggacctagaatttaattagaggtggacgtaaattttttttatatataaacatatttcaaaaaaaaaataagtaaatataaagaaaaacacaattcaatatttcaatcaactaaaaagatattaaaaatcaaacactaaaaattttctaatagaaaaaaaaaaaaaaa

SEQ ID NO: 76322 - DNA, 847 bp, Cannabis sativa
ttacataaaaatattgcataaaatacaatttaatataatacaatacaatacaatacaacttaatacggcgttccaaacgagccctaaattaaacaacttaatttacaccaattaaacacactagttctcctaaatttgtgactgcttgcatgatatctgagagtaaccttgaagaagacaaggttggacaccaatacaatcatcaagaaaggtgacaatatatataaatactttaacttgaagggacattgcttttccacaattatattccctttttcccactttgaaacgtaccctttggagacattcctactcctctgtttgagtcccacatattgtgtctgctttgccatatcgactcacaatccataagatcttgaattttagtgtgttagtttttttgttgtacattcataaaattgagatttaaattataacatgatcaaatgataaagcaaaagtactcaatgaaaattactaatactaacatattgtttacacatgtttcatgatcaggcaatctatatctcttgagagtaaataatcgaagattaaatgtaggtagtgagaacttggtctcagtctcagcaacagacaactatataagagttactcttgagtttgatggtgttttcactaaatattatcttcccaagagatccaatagggatgggaaatggactgttctttggtccatacccgaaaacatatgccacgactctattctcccatccggtgatggtgtttgtggacacaacagtatttgtactctcaatgaagattcaagaccaacatgtcaatgcccaaaaaagtactcttttgttgatcccaatgatgaatatggaag

SEQ ID NO: 76323 - DNA, 2141 bp, Cannabis sativa
  modified_base (71)..(71): a, c, t, g, unknown or other
tttttatttttttaaaaaaaaggtaaaatgggaagttcatgtaatcaatggaattaatatgtacaaattantgaaaggtctaaattttgatattaggtgttttattacagacaaaaagtgaagttttcctaagaaaatagactataagtagaacttttttcttaaaagaagggttatgaaataaacatatcctaagtcctactatacctagttgccatcaattgacactcaattaagagttaagacaatattttttcctagacaggcagacctttataatgatatttattctctttaattttgtcatgtttatcataaaaaaagatacaaataataaatattttaaaaatttattaatgataataatatggacggaatttggttatgtttatagcttgtaatttattttaactaaagttgtgcattaattaaagattattttttacaaaagtacataagaatcaagaacaaatatttgtagaaatttaaatccctaaatgacttagtaataatttttactagtgtgtggactacattattatgaggaacacaaaatgacataacaagaaccaccattaactgtagctagctattaatataattacattattaataaatgatcgaaaaataatattagaatttagattattaacccaattacacacaattgaggaatcaactttagctctaaaaataataaagctcaattgattagctctgaaacccaccttcaagcctgatcgatcaacatgctcagatcacaccatcaccgtcttggatcacccttcccgtctgacaaatctactcctcggcaccacaactacatttgagctgaccgtaaaacatctcattgccggaggaacccatctcaaaattaatctctcactctccccgccccggagtacctcgaccccattcataccctgctgattcagctcttagaaagcattcccagtcaacacctcaagcgactctaaccttgaaaccttctgaacaaacaacatagagtttcgatcaaaccaaatgcaccaccaaaccatcatcattaacttaaaaaactccctcgtcaactcctccattaacaccacgaacaacttggtggaatggaattttgaatcttgggaaaccactaaaagcaaaacttttcttatggaggctctttcattcagctctaccaattgctacacagctctggcatcgaaatattttggtatcgctgttgttcgaagtgtggtgaagattctgaaactataacacattctctattcttttgttcagcgttggtcccgatgtggtctcaggtgggtgtctggtcagtgacgaggcattggttgtttgggccagtaccagacttgatggcgactctttttgaagaggttacacgtgagaattttgagctatttgtgacgatagtatggtggatgtggttcgacagaaattcaatcctttttggtgagtgtcattccatattggaggtgattccgaagcttgcttagggtggtcttgaggagtttacagcttctggtcagactggttcatcttccacaggtggggcagggatgccaagagttgtttgttgggttggctcgactgttggggaagacctctcgctgtgtatcgatgctttagtggtaccaagctgaggctttattggtgttaaagggggttctccaagatgctaatggggtggtttgggcgtcttgggagattgggttggtgggagatttctgatgtgtgtcgtatgtcgtatcaaatttactaattaagttaattctaatatttctaattattttagtataaaagcaagtacaaatcgaacccacaataattatgtttactctattattcaaaattaaacagcaattaaaaaggggattgttttacttttttttagaacaaacttaacaactcaaattaagaaaataaataaaatgtgatactacgaaatttaataaatagttaaaggttaatcaccaccctaacgaatgttattttaattttccaatcaaattattaatcctgcaaataacgctaaagcagataattatcttaatctttctattgcaaataatcaaggcgaagtactcaataattaactcttttaactaagcaataaatatatgaaccatacaatttattta

SEQ ID NO: 76324 - DNA, 589 bp, Cannabis sativa
tctgtaaatatacatgatacaattggcataaagatgcaaaagggtagttagattaatgataatttacggtaattatttattgatgccgaaaatgagtagagaatttttaccccatcaagattagctggacaatgaacaaagtttctgtattggcaaatccatatttaattgcacctgctttgtaccaaagtggtaaattgctgatccctgctacacgcagcaactgcaacaaaataataattaaagcaagtaaaagaattaatctcttttgcagaatgatttgattcaaataatacaatgcatatctccctaatgcacaaacacacaacttaatcaatatatacagtacaatgcatatctccctaactccttatccttaggtcttaaccacccaaaaaggcacccctttgggctattgaccaaagaaaatgcataaaacggcaggaagagacctcaaaaagatgaaaataaccatattgtaatatggtggaaccacactgatagttattttaaggttgtacatttttagagaaagttaagttggtaatacaattttttagaaagttattttgctactaaatttttatat

SEQ ID NO: 76325 - DNA, 1321 bp, Cannabis sativa
atgaatatggttttaggtagcaatggtcacaacacaactttccataaataaatgtagagcttattaccaatagaagaagccactctctctgtttttgcggcctaatctgacacatacatgcctcattacgggtgcatcttgggaccaactttctcatatttatttattactccttttcttttctcacccacaaaacaaattattattattatggtccattttggttgggatataattattttctaatcttttctgttaaattggttttatttcttttcatttaaaatatatataaaaataaacccatgtgatgaacttaaaagtgaagactttagagaacaaggggacaaattttgaggtttctactaaaattaaacatgattttgttaatgggctcattaaaaaaatgatataaattgtctgttatgttattttttttttctaaaaaatcaaaatagtaactttatttttatctctagtaaatatacattggtgaactttttttttttcttttcaagttaatggaaattgaggtgatagataaaagacaatagaaaagggaaaagttcagagaaaacagtgtcatgagtactgaaatggctagagaggtcacacacacacagtcacagatgatgattttattatgttatttaatattagctttgattttctgggcagagacaatataacatctacaaatctttgtacaccattgacagacagtgatatgcagagttagaataaattttactggactgcagactgtaaaagcctgaaagtgtttggtggggttttgggttttgactttgctacagcttcttctttttttttttatttcttcagatctttgaaattctcttctttttttataagagttttgtttttgaaaaaaaaataatataatatatttatatttcatctccctaaactttatatgttttagtaaattagtccccaaatatttaaattttaacaggttggtccctaaactaaatttttggacaaataagtactcaaacttttagttatttgacaagattaagtcttcactatgaaatgatagtagttttgttggcttttactatttattttagactttttttttggttttaatttcaagtatttttttaaaattttaattttagtacttttattaaaaaaaaaaagtaatgtatagtaatgcatatatttttgtattttccaagtattcatataaaaatatataaatggctattcccccgaactttgacatgtattaaatcgtgccccctgaacttttttggccgttaaaaattccacccgaactattgagattgttaaa

SEQ ID NO: 76326 - DNA, 526 bp, Cannabis sativa
acacaatatttccttaataatatggtaaaaattgcttacataaagagttttaatgaatgtaacagagttagtgttgaagatccaaaattttcatgaacacacgtgttttgtgtggaattttggtcacatgtgttgtatttgtcattgtcttttcggttcatgtcatgaattttgtttggatccctacaatttaaggagatattaagaatagttttttttttttgggatccctctaatatgacaatgtaatgaaaaaaattgacaaatttaaatgaaatgatttatatctcaagattaaaacattaacaaaatataatatgtacattcattaatttgattgttgatacatagatcaaatatcaccaaaaggcacttatacataattgaatcattaccaaaatataccttatttgttacctggtgcattattctaagattgtcaaaaagtacctatacaatatttaagcatcaataaaatataagttaagcccttctttatttgttggtacattactttaagatcacc

SEQ ID NO: 76327 - DNA, 1033 bp, Cannabis sativa
gaacttttcacatttctattgatctagacaaaagtccttaaatctaacaatcttaatagtttatggaaatttttaacggcaaaaaaaattcaaaaaacacaatttaatacatatcaaaatttggaaaaaaaaattattaattagccattttattatctgataagtatattagatatttaataagatatattcatgtcaaaccatgtaacgcatttatattgtttttttttaatggtctcggtgttattcaccaccacgtgccatcaacgctcccatttcaatctcctacgacaaatggactttggtcagcaatttaagtcaacatcaccaccaacttctttttttagggagagagagaaagagcaaaaagaaaaaaaagaaaaaaaaaaaacagaagagagagaaacctctttgcctctcttctcttggcgatgaaagctaggaagaagaagaagatgaggaacccgaatcttcatcttcattgagcaacttgcctctaccttcagtcactctcataacattgttggtttttttttttaattaatattattccattctctctttctcttcaagctttctctctctctctagataaatagaaaaaccccatacccttctccttctcatgtctcactctcataacctattaccgttatatctcaattacgacgtcgtttattcacaatgccaagctcaacagagaatacccatctccttgcccacttgatcaactctcacccctcccattgtttcttccctggaggaggcttattcgtcgacccttcttactctcttcctccttccctcgtttccttcatttcctcgaagacccgttttgattcggattcggatccgggtttggactccgtctcggtttcttgtgcttatcggggtggtcatcgccggaaaacggtacgttttgaggggttgagaggtcgggagagttgtggcttcttcttgtcggtgagtttgtcgataaagaagagcgaagaggggtatggtcgtgaatccacggatgatgttttggggcaaa

SEQ ID NO: 76328 - DNA, 777 bp, Cannabis sativa
ttcttcttggatgacagaagcaaagactttgttgacattgggaagaggatcttgaaggaggatttgagatctagtactggagtatgactcattgaggccaattaggaactcaagaaccttgtcttcatcgtgataggcttgaatcgtcttcatagcaccacaagagcatactggctgtggtctatactcttgcaaaagatcccagagacttttgagacgagtgtagtaggaggtaacatcattggaaccttgagccaacaactgtagtaatcttttaacctcatagattcttggagcatttctttgttgaaatctttcctgtagttcagaccagatgcaagacgcatcatccatgtacattatgctttcagcaatcgagttggagacagagtgtaaaatccacgaaataaccaagttgttacatcttgtccatgcctcataatcttcatcttcttcatctggtgcaggaagtttgccattgatgaatttcatcttgttcctagcaagtaaagccaccatcattgaacgatgccaagagctgtaattctctgctccagtaagaactttagggacaagattaacagaaggattatcaccatggttcaagtaatacggactgcgaggatcatcggcagagctgcgattactctgatcaagaacagagaagcgattcgattcaccattgttggtggtactgcgggtctgagttccacctcctctggccataatcgaagatcaaaaacgacgagcggaagagacgaagagcacactcaatcg

SEQ ID NO: 76329 - DNA, 1023 bp, Cannabis sativa
aagaagaaaccgcggccgcaggaacagtggaagagcttgatgcaagagccggtttgacatgctgatattttttattagcagcagtgaaattctgaagtaaagtggcagcagaggaaccagtaacagcagctggtttcgcaatttggccatgaacgactttattcctttcattccaaatagaccagaggatacaaaaaaattgctccatttcagcggtagaatggattgttgaaaggaaatgtaagtaatcaccttgcttcatggaggaggcagcatgccaatcaaagtgtatattcaaagatctccatacactcttagcatatttgcaaccaaatagagcgtggccaactatttcccaagcttgtcgacaaacggagcaagttgaatcggttataaccttccttcggacaagagttgtggcaacggggagggcgtcatgaataacccgccaggcaaagattttaacctttggagggagttgaagcgaccaaaagaacttcctccaagacgctgctgaagtagaactcgagttgagggcagagtcttcaagtgatgaagccaagtggtaaccggattggacagtgtagtagcccgaagagtgatggtgccaaataagggagtcatcgctgctgaaatagctcagaggaatagttaaaattctgtcaatatctggcgttgaaaacacttgctgcaacatatcaacattccattgtcgttcctctgttataaaatttccaacaacacaattggaggggcccgagtagtggataggcagaaaattagtgtggcccggaatccaaggatcaaccgcacacctaactgatcttccccccacctattttccatctcaaaccttcaactagaagttctctaccccaatgaatgccttgccaagtcaatgaaggagaatggccaacatgtgcttccaagaaggtgttcggataatatctgcatttcagcagcttaccaagcaaagaatcagttttttccacaaggtgccaagcttgtttcgcaagaagagct

SEQ ID NO: 76330 - DNA, 972 bp, Cannabis sativa
atatttctcgttttcttatttattgcctaatatctatcatgtttggagtgtcttcggttcttattatttaaaaatacatttcaaatttgtgctgtagctatacagaaatcaatggagaaatccatattcccatgtgattaaggtgatcagctgaggcaaggtaggagatagtagagaaaattatggagagttgatgtggccaattgcagtgattgtattatttcttatgagttttagctatacccatgtagagaagttgaggtacttttattatgtaatgaatttaaatttttaagattagaagccaatcttagtgattatcttatgatgattagaattttttcttgagctatcaaatcttgtactattttattgtgtgtaattgtatattttatttgggaagatttttgttatcagctatgccataatattggcatagaaattaatttttgtttattttgattgtggttattatggcaaaccaaccatctcaattcatatatattaaagatgaaataaaactatacgtaacatcagaagatacagaaaacagatagtaagctcaactagattcaccatgttgtatctgtatggtaattctaatattgcactactataactttcaagttcgcggaatggtcattcccaataatgttggaatgatatgtaatgagctgaagatagatcttaaatcaacaatcctaaaaatagagtaccaaggaaaagacaactaccctccattccacatagaagatgacctccagttttacttctacaaggagttgaagaaaaaagattcagatttcacaaagtacccgttgtgccttacaatggagaataaccatattgagtcgactatttttccaacaagaagtacatatatatatgaaaaatgataacaactatagtattatgtgagtgtgagtgtgtgtgaaatggaaacatctagaatttaatctcatatatatatat

SEQ ID NO: 76331 - DNA, 577 bp, Cannabis sativa
  modified_base (549)..(550): a, c, t, g, unknown or other
ttatgaagagaaggaagaagaatttaaagcttttgtaaaattgggtttgaagaagaaagaccatcaatgattcaggtagtaaaagaacttgttaagattgaaaggtctgcattatgcatgggaggagctcatacaacttaaatgaaagttttattacattatttaatcttattgcatatataaatttttcatacttgggaatttgttatttttcatgtaactgtattaacattgtaaatttgaaaaatgcttctttatgtgtctgataacatataatgctttgtacttgatctagcaactgcaatctgcttcttcaagctcccatgataataaattgcttgtcctaattagaagctggtgctttgaaaaacactacaattttaaatatttttcattcactactcctcaaaaagaatgtagagagcaatgaacctttaaaacgaatttgcatatttcagtattaattttggatagtttgtccttgaaagttaggctttgaatagggggaaacttacaaaaatactggaatttaggttaatttttacaaanntactgtcacacggaaatcttttcaaaa

SEQ ID NO: 76332 - DNA, 573 bp, Cannabis sativa
ctcttctatcaaaagtattgggaaaccaccaaagaggacgttttgaaagtgtgcctaaacatacttaatcatgattccccgatggagcacctcaatgacacttttattactctaatcactaaggtcgataagcctaagaagatggaagagttcaaacccattactctgtgcaatgtggtgtacaagatcatctctaaatgcctggcgaattggtcaaagaatagtatacatgtggtgatctcggagttccaaagcgcctttgttaaaggtagtatgatacatgacaatgctattgtggggtttgaaggcatccactgtatgaagcgtaatagattttgtaatgggtcaaaagtggcctttaaactggatatgtagaaagcttacgatagagtggaatggaattttgttaaggcagttatgattaaaatggggtttgctgataaatgggtccataagatttaccattgtatctcattagtgtccttctcaatactgttgattggaaaacccatgaggaaatttattcccaatcgaggccttcgtcaaggcgacccattgtcaaccttcatcttt

SEQ ID NO: 76333 - DNA, 1012 bp, Cannabis sativa
tcggttatgcatgatcgatcattgattagtttagaatatagatgctatcttataggagtttcaaacttttctttcaagggaaataataaagacctatacaaaaaaaaaaaaaaaaaattggaaattattagaaaatttatattatgtttcttctatattgtttacccaaaaatgtatgttatatttttttcatcaagcaaatgtgaaattaaattaaatatttattgtgaataggggtttgccttaacaaaagtttatttttccaaaaattccattctcgttaggtttttttctagtgtgtttgtgtgattcaagtgtgttgggtgtgttttaaggttagggtttttgtggaggtttcgtggtcacattggtcgtgagaattcagaggagttgtagaaattgtgggtcgactatagcttctagtagtaggtatgttcgtgatctagaggaagaatgtgttgtgattgaagggaaagaggagcatgagttgtgattgaagaatgtgttatgttgtgatttccctgagaatgaagagcaaaaggttaatgagtgatggtgcgttgtaggtcattttttgactcttgattttgaagtgatgaggcacttgatggcctcgttatgacagcatggcaagggaatgtatgtgaaagagctagatgtgaatcgatatttattttagttttatcatgatctagatctcaaaagagttgtggcaggttctctgtggacgttcaatagaatgaaatttgtgtttgcaagattgaagtgaggggagaattcacggtctgttgtgattaatacactggatttgtgggttcaggttcatgacttgtagtatggattcaaatctgaccatgtattacgtggggtagctacgtatattggcactcttgttgaaatggatttgaaaaaatttcaagggttgtggcgtgattatttgcgtgtgtgtgattgttgatattatcgtcccctgaaaacgacgcataacgattaagcatacggggggtgactt

SEQ ID NO: 76334 - DNA, 1095 bp, Cannabis sativa
acttaaatgataattaattatgaagatcgttgataatttgtgataatttttaattttaattatatttatatatatgaagaatatctaattttgtatgaagacgaataatttttggagacttttttatttgtaaaaactatactacaaaagcattacaatgaaacaagcctagctataatcttactgagcaacacacaatgaaacaagcatataatctaaataaattcatacaactaagtatatacttacgtaaacgatcattctaatatatatacataattttcgaaagttaatatgtctatgatcatgaacattatatagaaactttctcttctaaactattttttggttttaaccataataattcacaaaatctaaactgatcattaatgatcatagactagaaaaatattatatataaattttacttaaatttatataaaattattaatgtttacagaattattattatccgaccgcaaaatataagttataataattgagtcccaatcaaacagttgaaatttgttctacttaaaagactttgactttgtcttctaatattcgaaattttgttttattattgctcctctcaccaaaagttgtgtaccacaaaattaataattttgaatctttatcttcttatcttatttcacacgaaaatatgtttttttttttttttggaataaaaattaataactttattaactagcaatcgttaataacaataaaacgcacttcgttagaacaatcctccaactgaagtacacgacctggagagaaacaagaattcttggctaaaacatgagccagcttattgtttgcagatcatttgacaaaacacaactcaatattatttaaagataagagaagagtacaaacattatgaactaaaagaccaaaagaggatgacaaagtaatttggctttgcacggcttgaacacaaactaaactatcagttttcaaaatcacttgtccccacgaatgacggtcagtccaacttaaaagcttcttttatgccaacaaattcagctatttcaggttgcacctgccattttggcataaaaatccctgccattttcttcgctgcctcca

SEQ ID NO: 76335 - DNA, 882 bp, Cannabis sativa
ttatgattttatttacagaaaatacggtcttttaatatattttttattatacttttattaatttattatttgttgttgttttattgttactttttgttattacttctatgtagtttttttattgtttttatagaatactgtaaaaatgtaaaaaaaaaaatactttaaacgtaaaaatataaaaaatttataaaaattaatgtattatgtaattatctcataccatatacgatagaaaagataatattatggtgacaggggtagatcttgccactctttagctaaatttgctttagacgagagtcgagactagcaaaatttattgataccatatgctatttttaatgaattatcactcacatttggttgtttgtttactaataaatatttttgtaagaaatgtgtaatgttttttatttttgttttattttttaatattaattatacaataacaattttaccttttaaaatatgtcttgcaaaataactatcacatattatagtttaactataaagtataatttagtcaatttaagtattctgattacgttccatgataaagtaaacaagataaatcattattaatctatttccaaccaattttagtaaacaacatattataattattaattatgattattttttatttattttattaaatatttatattaaattattctgattctgaatattgtatggtaaatgtatcattagtatttcttagtatttgtggttaatacttttttcctaaaaaaataaaaaataaataaatactaaggtgtgtttatatattagattacggaatgagaataagaaatgagtttagttaacttatttgcttctctattttattgaggaatgggagaggtaatcccactaact

SEQ ID NO: 76336 - DNA, 1161 bp, Cannabis sativa
atttcatatggagaaagaaaatgcatggtatagttttcttatttatgaatatatattagaatcacgcttgtctttctgaataataagcggtgtgataggaaaataataataaattatatatatatatatagattttctaggtcatttaacagtactataccagatcttccgattctctacctgtttaggcgcgcaaaagataatgtggacctagtcaaacaaaaatatataattatactaacagcaaagcacagtaaaagttaaaataaataacattatttataaacaaaagttcaaataatacaactaaatatagatataaaatctattaggtagaaatataattttagctctaaattatttagtaaaattgatataatatttaaatattactacaaaattagcgttagaggaggttattttagttaaataataaaataaagtagccaattatagctttttggtttcgttaaaagggttttagcagcctatagtggcggttattatataataacaccactgccaaaggagcacgcgtacatgtgttggcgacgattattatataattaccgccactataggtcgaccttaaaacaccttcatcgagaacaaatggctcacttcatctcctcctccaatgttcattctctcaaaatccagacgaaaccctcctcaacaaccacatcttcagcccaaaaatcctatttttcccatctttcatttttttttttttgcaaaatttctcattttcaataccaaaaatatcttcctgttattagaatgataatatttaatcttttgagtgtagagtaaatatgttggtgacgatttgaattgtgatggttgtagctccgacgactggattttagacataaaaacattgaacctcaacatttattaaggtaaaaatttcatctttaataattctattgaggtacattgcattttaattattttgtaatttttttaaggtttttcttgttaagattgtgagttctttgggggttgcagcagtgaccgaatttcagcaataaggtaaaaatttaatttttaatagttttgttacaattttttttggatttgtatgattttttggttaatgattgtgtttgtgttacactagtagttttgagacaaatttattatttttctttaatatat

SEQ ID NO: 76337 - DNA, 669 bp, Cannabis sativa
ttaatttttaaataatgaaattgtttgaggaataattgagtgtgtgtataaaagaataggagttactagatattaaaggataccaatgaacatttgcaaaatataatcttttataaagtttcctcaaactatcatgctcaaaggcttatatggtatgaaaatgtggatacattactatattagaatatactggtagtaagtaaatgtataatattataaaaattgtgaaaaaaataataattacataattctatacaagtttataaatatttacaataaaaatatatatatttacgattttaacttgttgattactttcaattgattttctaaataaaaaaaataaacgcataaagttaaatatatgtaaatataaaagttaatatttatattatgatatattactaaaataatatatttactaaaatttaatataaaattaaaaaaagaatatacaaacatacttacaaattttatttatattttataaacagtttttatatatttattaaatatttgattagtattattaacgtttacaatgctattattaatttagtatgtttattatgataataattatcatttgtttataaaaaattcataataattttaaaaataaaacacttatatttattcatttatttgaacaaacactttattttttat

SEQ ID NO: 76338 - DNA, 639 bp, Cannabis sativa
aaatctcgacagaagatcatatcaatctaaaaagggaaattacctaaaatggagatcaagcaattattttatgattaattgtccacgattataggacacagttttgaaaaattcaatcgtatccagtctgtcagccagcagatcaactccttcgtgggctggaccttatgagaataatccaatttacgtattttcatgtgaactccctaatagaagaaaaaaggaaaactaagtataattctctagtcgccaacatagagatatgagggtcataaggtggtgccatgtggcatgtctgcttcgtccttgccataatggacatcgagtgtctagaaacagtaaccatggtctccgtgacaagaagatcttttggtgaagaaattgccctatcaacaggcaaagtatcgggcacactgtcctgaacaatgtaagtccaggaaccatgaagaaaatacctccacgcgaggctcaactcccaaatgaaccagctgtaaatctcaccacctattcgctctgaatgacggtgatgctggactttgggttctggagaaccactactaacatcaagatctctaaagaagctactagaggaatcaactggacactaatcctcgaagagaatgttggaatttattttac

SEQ ID NO: 76339 - DNA, 1680 bp, Cannabis sativa
agggtccaatctgtaatttttacaaaatacagggtctaaaatggtatttacccttattttttcattattttataaaattaatttatatttgaaaattttaaattataaaattttactaaaataattaaatattaattaaaaataaaaaaaataataattggagcaacaataataaaaataactttctattttaattttttaattaggctaattaggatttttgtctccttaactttgacattaccaaatcatgccccctgaacttttaaggtcgttaaaaatgccctctgtactattgagattattggatttaaggacttttgtctaattccattcaattttgttatttcagtgattgtttatatattaaaccatgctcccagactttaatatctaccaaatcatgcccctcgaattttgacatgtactaaatcatagcccctggactttcatccatgttagacttttttactaaattagaaaaaagtttttaaatacaacaatctcaatagttcaggggcatttttaacgactttaaaagtttaaggagtatgatttgatacatatcaaaattgggacaaaaatcctaattagccttttaattattcttactaaaaaaagtaaagagtaccctagttaatgatgttcttaatgcttaaatggagaaagaatagatagtatattcataagaactcggacggtacattttgatttttaatggtgcatacataccttaatttttttcttttttttttctttttttttttttaaagatatatacataccttaattagaaaccgaaagagaaaactttttaaagaaaaaaaatggaaaaatgttaaatgaatataaggatactcacaacgaagtaggtagaacttctcaattttaatcaaaaaaatcttactttatttattttacctacccaattacattcatcatacgtacatccaactttatttataaaatagcttcaattttaaagtcaaaagacattaaataaatattaaaatatttagctactacattgaactaaatatataaagatagtatagcgtatatttagttcaatgcttaatgcatgcatatttttgactttttgagttaaattataccttagagttattttacatactgcgataggagtgctctaattggtgatattataattattattaaatgctatcttacttttattaaatttcaattcacaacaaataatgacaatgagaaatatgtactaatagtatttaatactttctaaaatattttattattattcatagaattaaatattatataccatcttaaattcttaattacattaagtttatcaaattttaaatatacatatttttaagtaggaataaatactactataaatattaaaattcgtgacagtcttaaaacaaatatttttagggattatcgttaaaaaaattaagtaactatttaaaccatcgagaaaaatttagtatatccgacgattttaaatcgtagtaaacaaaataggcgatatttttttaataaaatcgattttttaatagacttttataccttacggtttaaaatcgtcgggtataaaggtccattaaaaaatcatcacctactttttcgccacatttcctacgtacccacctactttttttctatttcccacatgcccacttatttcttctc

SEQ ID NO: 76340 - DNA, 3587 bp, Cannabis sativa
  modified_base (3546)..(3561): a, c, t, g, unknown or other
agtttttttagggtttatttaagttttaggttggtttaataattttttttttattttttaagtatataaaatcaaaattttctaaattaaccttcaagactaacagtaagttgtccggtagtgtacctccgaattaataacaagctatccgggagagacatttcatatacggtacaagtttatgtggaagtactttccaaattctacaaaaccttctccataaagctttctggatttacactaaactttcaatacctactctttgaatccacaacttccaatcccagacaacaaaatttgtaactataaccaaccaaatccttaccatccagatcattaaagataatagtttccacaatatataatcataattgaaataatatttgtgtgtgtaagtattaatttatttatgcatggcctgtgtatgcataatatgaggagttccctttacttgcgcaagtttgtaacttgttctccacataaatctaacttaatcatatataattaatgtcaacggatagtatatatagcctcattgagttgagttgtgaatccatagataaataaagagatatcaatgtgacaatcatgtgtatgtatatatgtatttatataattctctactatactatacttttccaacggatttctattgaatggaattgtcagaaaagatgcttgctttaaataaataaaaagaaagaaagaaaagatgtttgcttgctttatgaataagaatcacttatatgcatgtgctagtaccaaaattcagaatcctatatagttcgttttatcacatcaaattaattaccaacaaagttaatcaaaatcaaaacttgattaattattatagctaagctaacaacacaaattacaaattcatcttatatttatctttgcttctagataaagataataaaagcaaattatgaatcatttatcaagtggaaagaaaatgtcacatgagctaggtaccacctgtcatatcacgtaatttggttggaaatgtttattgaagaaatctacatcatttaatgtacatgctctttcacacgtaattacttcctttcttagccatttcataattctacaccaaaaaaaaaagaacttttagaaagagaaacaaattaatatgactattttgagttggaaaaaaatgaagagcaaggataagattaagcccccaaattgagaacaataaataaactttaaggctaccacggttaaaagtcatggtgttcttgttcaaaatcaaattttcaactcccaacaaagccaaacgtgttatctcatgcaaagtttaaaaagaaaaaatggtaagagtatgaaaaagggtatgagaagataggacttgtggtccccccaacccaaccacgccataatccacaaatgactatagtacctttatttatttttctcttaatttctttgtgtctttcattcaaacttggatctttgaaatgcttgactatctgggccttattattttcccctatctcgagggttcaaagtttgaactttcaagaattcaagtgacactaattttctttggttatgtacatttgttgcctcttttggcacagtagtggaaagtagtgtccccatgcctattccttcttttcttgctctgtaacctgaagcttctttcttcaaccgaggcactttagttacatatttttttataccaaaagccatactcttagtggaatacaacagtattttctcttcttcttttcttatacataatattttattaaattttatcacttatacaatagtcaaactttgatgcctaattagctggattttttcgtgtacataactacaaataattcattaacaaaggagggaagaaaaaaacagtactatgggaaaatttaacatagaaaagaattttaagtcaattgtaataaaaacaacatcatttgtaaatatcaatatcatacaactgtagtaaatcacacagtttttttttttttttttggttggtggggtatgagtctaatagactgattttacaagaatatagatgaaatgaaccccacttatatttggtatttaaattaaattaaattgcataaaattaatctaccagaaacagtgggaattactgttattgcacttgatgtggttgttgttgttgttgtttaagagacgaacaaatcttcttctcctgtaagaaaagccacatctgaatctaaaacaagccaactttctgaatctacgagcagatttgagccttagccatatgaccctttttactcttaccaaagatctcttgatcctttcactcaagctcttttttctgcaaaactgatagcttcttagaaaaacttgccttttttctatcattgtagagttaccattcaagttggtatagtagtaattactactactattattattgctttgatctaagtagttgtagtaccctgaaccaaacgactctgtcctactcaaagtcataggacctattacatattggctctgtcccaaaacagccatataagaaaaaaattaaccagagataacttaatcactactactattactatactctttttaactcaaaaacccagaaatcaaagtttgcttctttcttcacctctttgctgaaaaaacccagaaacaaaaatggaaaaggagtatgagaaagagaggtttattgggttttctctgttctgctccctatttactgaaaatcccagaatgggtctttgttggagagagagaaaagaaaaaaagtagatatatataaaggattagggtgatggtgaaaaagggtgttatatgtaatatgtgtgtatgtgctgtgttgataatattacattgtatatggtatttgcgtttggtttgctgtgtaagcgagcagtgcgccgccacaggagctacagccttaggcttagcctatatatatatatatatacccaatgaagactccaaagaccaaagactgcctttacttactttacatttgtttctattttgtcttaattgaaatttaataataatagttattattggaaggtattttctgtttgggaaattattgatagatgatattaattatacttatactaagtattctattttttttatttttttttatttcaaaagtgaaacataaaatttaaatagatcatgtctttgttaaaaaaaaaaaaaagcatgtctattttatttgatattagtatcattttgaactttcgatttcgattgtgtaaattatataactataatatacaatcatccacaaattcgcataaaagtaaggtggatagcgcctcctaaataatcgaaaaaatatatattttttaattagttacggtaaaaaaaatatttatagagataatattaattttattgtaatggttaaactaaatataaaatttacttttgtcttgttttgaaagaaattacactatttatcactttaaattctgagtctgttaatatgtacaatgttatgtatatataaattctaaaggataatagtaatttttttcctcgaattttgacatgtactaagggccagtttggcacagnnnnnnnnnnnnnnnnagcagctgtagctgtgctgtgagaaa

SEQ ID NO: 76341 - DNA, 580 bp, Cannabis sativa
aaaaaaaaaaaaagagagagaggtacaacacatgcttgtttatcttttcagatgaaaatcatttttctgcaagaactgttccagtttctgacgaaatttctcttcttttcattgttcttgtttgtcttctttatatatctctctgttggctattgctatctgatttagtatatgaacaagaacaaacagagaatatcgacagatacacacttacagataatagtccctaaaagaaagattcctttggttgtgatactttttcatcttttgaaataaaacttcttgccactattcatcttctaataaaaaacaaaggctttcgtaattagcactaaacatatggagcttttcgtaattacaactaaacgtacgatacatgtacatgtttgatgtttcccatgatcattttggtcacctaaatgctacttccatgtgttcttttaagcgattttaacaaaaatcttattacaattgatcatgtttattttcctcccaactcattttttctaccatttacagattgatcacttaaaaaggttcattacagctaagagtgacaacaatgtaccttttttttttt

SEQ ID NO: 76342 - DNA, 1360 bp, Cannabis sativa
tataatgtagctataaatatttttttatgataaattagcccccacaaagtaaaaatcttgggtccgtcactggctccactaagattccacattacattaaaataataattttttggtaaaaagtaacttcttttcgaaaaaaatatatatataattacacaaaacactaattttaaacactataaaattgatcttgaatgaaaatatcatgtggtcatagtccatatttaaacactttaattgatcttaaaaattaaagaaatttttacaaaaatacaaaattttgaacaaaactttacaattttactgtcaaacagaattttttttcaaaaatattgtcttttttataaaataaccgtaaaacaacaaaacacaataattaaaacaacaataaaacaactaaaaaataaccgtagaacaaccgtgaaaacttaacacagtacatacttacacagtatttttgaaaaaaaattatgttccacaataaaaaaaaataaaaaaaattgaaaatttcaataaatatgtggtgtaaaaacctcaaaattaaaccatattacatatgtagcaataccgctccaataaacaaccccagagattgtaaaattgtaaaaatgtaaacttaaaccatattacttggccatggtccatattttatgtggatgtatgttggtaataataataaaaaataagaaagagaaaaaataaaatatgttattcattcttcattctttttcactctcatagtaaaccttctttaaatatgccaaaaatatgtcatcaaatattctttaaaacatcccctccaattataagattctatgtaaaaattatttggtagttcatttccatcatcttctttagtccatttgaaaataaatatttactaagagaatggagacctctagaaaaagaggacagcgccatgcccaatcaagaaaaaagtcaaccaataagaaaatgatatgcagatataatagcatccaaaaatataacttaaatattattacttaatatttatttacaactaaagtgacatttgattgaaagtaataaaatagaattaaaagaaattcatttaatttctttgattgtatttaaaactattagaataccaattcactggaaaaaatcattccaatacaagatttgaaaaaatttaataatttttttttttcaatttcttttatgcattcttatattacaattttaatttgaatattgtttcttattcttatatttttattcttccctaccaaaaaccacctaagaattaaacttatggggcaaattgctcaatactataataaaagtgaagcacattttggaaatgttattacaggcccaacattcaataaaaaga

SEQ ID NO: 76343 - DNA, 6282 bp, Cannabis sativa
ccaaacccaagactcggacctggacccaagacctggactcgggacccagacctggaccagaacccagacctgtacccaaacacaagcttgggacctagacccaaacccaaacccaaacccgaacccgagacccgaaccaaggatcgaacttgggacccgggtcctaggacccggacctatacccagacctgggacccagacctaggatccagactcggacttgagaaccgagacacggacctggacctagacccgaaccccggacccaagatccagacccagacttgagactcgagaactgaacctaagacccggacccagactcaagacccgaactcggactcaagactcgaactcagactcaggacccagacccgaacccaggatcggacccagacctagacccgaacctagatccgaacccaagacccgagacccggacctggaccttggacccgagacccatactcagatctggatccgaacccgaacctgacccgtaattagtgttggggtctagtttattgaaaatatattatctttacacaatctattaatacaagtcaatatcaaacatagtattgtattaaataatactaatagaaaattaaaatggatataaaattatatatttagatataaaattaaaattcttaaaaaaaaaaaagtcgggtcagatcagatccaatccgaataagttggatttagatctggtccgatccgagtatctgatcaagcaaagcgggacgaggtggatccttacatgatctggattagggcggatcatagccggatcagatccgacccgacccattaatttacactcctacgtaggcgttctaatggtcgctaaagtggtcaaggaaaactgcctctaaaagggacatacggtggtggttatttgtctataacgggactcagcaaataaccgccaccataggtattttttttttattattttaatggaaattcaacgacggaaaataatgaatggagtgagaaagtttaatttaaccaataaatcatagacttaaacgtaaaattatttttttttcttaaaaaaaatgcaccacaaatctgagttagccacgagaaccacttgcaaacaacaacataaaatagtaagagaaaacactaaaagaaaaacatggtagaaaaaaaatgggaccttcagtggtggttgcatcgtcgaggttgggtgctgacagtgctagggagagatttctttcgccaacgatagtgggatctttgtggttgaggcgttgccggtgctagggtcggtggtggctgggctaaaagctagacacatagaaagagagggaggaaaagaagaaagagaaaaaaaataccttgcgaaaaatagtgtaaattgagaaataaagaaaaaagaactaggatagtatcctcaaatatttgcatgactataaataaaaggagagacatattataactatataccaaaaagttagagaatataccaaaactaatatgattattaaactaattattatatggcttaaaaatcgccccacactatgttatacttaaatatactcttccaaaatcattttatgtatgcaaccgttgcttctgccggcgttcatgggcggctctttgtcgcttccggaatcctttccccttatgcccatctcaccttcttcccgaaaatcacttctactttaccttccatgaatcaacccttgtaaaacttgatgacacaagttaatgtatggaaaacctagtgaatcaacaatgttgtaattactaatggactttaggagtacattgatggctagtctagaccatctttccttagtattttgagtatatttctgtaaattggtactacttatgaaagtgaatggattgagactaacagaattatcattttaataacttcatatattttcatgctaaaaagattaaatttatgttgattataaactcaaaatagtaagtacgtataacacaaatatccttagtacatcaatagtcttgtcatggtagcacacttatgatttaagttaagggtaatgagagccctcctatacatgccttgccactttaattttaaagtaatgacatatttatgaatacctatctactttaatatcataatacaagtttaatgagatatgaaattatgaagtaaaatatacctagcattattatgaagtgttatatagttccgaggtataatttaatattagatcttacttattttactttaataataattatagaaaaaaatattaactgtttataggaggacacctatgctaggcgcgatggtgccttaaagcatttttcttttttggaaaaaaatggtactttgtattagcattagtattttttgtagctaataaatgaacaaatgcaaagtgataaataaatgcccaaatcaacatcatatgactcattatctcataatgtttatgcattaaatactttaacatttgaaagatagctacaaatattataggtgtgtattacctatgcatgcctttgatgttactatcaaagcaatcattattagcgtaaacttctgtttaggaccacttcagaaaaaatcaaattcaaccaaaataataactacaattttattatatgatcaagcttttaatgatgttattaaatataatttaatcttctcattgttttgataaatttacatgtataaagcccaacaagaaaataaacattaaagattaaaaattaaaaattcctctttttctatctatgaaacaaaggtaatatttacttgtatgcactttgttgtgatcaaaccaattcatcttcaatggaaaatctaacctcttgtcccgattcatcgcttctgctggtcttcgatttcaaaagggtgatagtgaaaagaatgtctcaaagtaccaacgaaaactaaaccgaaagaatgatgagtagttacctcacttagcagattgggaaaagccttccatttttcattcacagttgcaatgtgtgtataatttgttgaagtagtgccctgttcttactctgtttggtcagcagaaaatccggaaggaaagtaatgaaagcagcacgaaacagtcgaaaattacaagcaaaaagaattctctccttccctaaaactttctgagtaccaaacagagtctatagttgtcatggcagacttcattgttttcgcttatgtaatatgtactagttctttcttaaaacaatgagaaactttttcggtgtctagaatgacccgaagtatgagccttttcaactgatgatgctcttggagtgagctcacatccagcagatggtctaggagttggctcggtaatctcaagtgtctcttgttgagcatcagatgaccgtggaagaagcttacacccgaattttctacctattaagcggggagaaccgagggagctatgagatttactcacttttttcatctcctgtttgattttactaaattcttcttcgagttcaccaactctagacctcatcctttccatatccactttcagaacttggttttctcgcacaacagtcacccaaccgtctctttgcacaatctgtccagctgtttcgactgtgggagctgcaggggcgctttcattgtccaagacatggaggcaaccagctagagcggtcctcaaatgcatctgctcaaagaataagacttgaagaacaattctaagtggtaatctttcgttttgggatgcatgagcacatgcgtcgatagaaagtctctggaagtcaatgatgttgcaaagttcttctttctctttgtccgggagccaagggtgcgcctgcaacattgtcattagcaattatcagcttttatttcagattctagcactagcactagcagcatattacaatgtttcataccttcaagtatatatccagtgctcggtaaagcccatcgtgcaatgatcttgcagaccccggtatagcctcagctaaagaacgaatctttgtgggctttaaattcacatcagaagcaacctctgcaatgtagctatcgatcaacttagcaacttttcttactggttcagctgatggcgatgcttccatgtcctgtgatgttggagaaaatgactcaaccgttgtttctgttgacataaagtgatggacaatcttttgaacacagtcagtattatacaatgtgtcagcatccgaatatgtaggaattagaagaccgtctaaggttgctagttcaagttgcatccctattctcttttctaaagaatccaaacatggttgattgactccaagtatcaaagccacacgaagtagtccaagtaaaaaccgacaaaaagatttcccctttttctggggaagtagcctttcaatgttttccaatacaaccttttgatcgtggggaacgggtttcaaactaatgctcgtaaccattctagctatgctactttgtccactgtgccatcggcctaaaccaggcaagtactttcttgcatagtacattatagcgcctacaaggttttcagctcgtatacccttcgcttccattgtcttgataagtctctcaaacaaaacaatcccgagataagagatgtcttcgaaccaccaatctgattcagagcttcgaattcttgcaccggtatttattccattccacaaaatgcttccaccggggctttgtagactaccatacatcatcattggccaaccgaacaaactaggatcggtacaaaccatcacagacaaagcattcaaacatctgtttactatcccgagcttctcagctctacttataacgggctcagagctttggagagccaagatacaatctttccaattgtgaagtatatttttataaaagaaattctcggccttagacagtaagtttccttctccatatgcctctgtcatttcgaggtagtctgcagcacaataaaccataactgtgtttcttggagtcaattcgatcctcacaccatagcaaaatttaacagcaatcaagaaattatcagggccaccagggaattcttccagatttgtatcgagaatcttcgtgtgagtactttgagattcttcataaattcgtgccatcttcccacattttgctatgagaggaaactggagagtttatagattgtaataactaataagtcttacttctcattcaacaaagcaacactttcttttgatataatgattaatgtctttaagagaaatgaaaacactcaacaatgatttcaaaagcttaagcaaaatcaataaataagttctgaaacctttgtacaaaagatacataaaaatgagaactttattaccataaacaaacatgtatcactcattaaattaacacaattacatggcaattcctttgaaatctgactaaatatgctgtaaagatatataatttactaaccaaaatggaaattacataccttgtgaagatgaaaattcactccatccacagacacaacaatatcacttggcaatccagccttgtaaaacctgtcaacaccaatgaaattgttgaaaataacaaatctttaattatccccaaaacttttaagatagtaccacaattgggtcagcctaattaaagagaacaaggtcaattcaagtcttcaaatgagtttatataaacaaaaattagactaaaaggaaagtaataacaagaacccagtagagtttacccaaattcaaaggtctctaaactctaaaagctacaaattagaaccaaaaaaagcatataaaaaagaacagagagggagatgaagtaccagtcattgccttgtctgtaaaacccagaatccttcccatgtggaggaggagccatagctgagcagagaagcaaagatcactctttttctcaactttttttcaaaaagaagatcatctagctctaggtggaaattgggcaaccaaaaaaatattctgttttaattttagagaaagaaaaaggttagagagagagaggtagtagtagtaggtaggtaggtatcctagtccacagagtcaaataagggtcatggtgtggggaaagtaaggaaggaaggaagcttatatatataaagagtggacctttacagctagtaaagactatactacctctaaaaatgtctcctttgccgatttccacttctccatctcacaaatttctttaaaaattataattaaaattaaattttgaataaagggtacacagatcacgacgccacaactgccggacccgcaagaaaaaagagtttgtttgtttgtaaagcaagctataacatatatggaaagaaaaagaaaaaagaaaagagagtgaaataaagaggagaagaagaa

SEQ ID NO: 76344 - DNA, 2183 bp, Cannabis sativa
tcgaaacctctttattataaaaaaaaaaagtgtaaaattactaaagttacatttatgattacaactaaatatatttaaagattacacacaatgaaaaagaatttattaataactataaaataaaaaagacatcaaacataagataaaacaaagactttgaattatgtgttctcatgaaaatgagctcttattagtatggataatatggagaagtaccatatttgtataaatatggggtaggaaaagtactatattcgtatgaatgtggaataggagaagtactattttcgtatggaaaatacgagataggagaagtaccatattcatatggatgcagaacatgattgtaattataattaggtacccaataaactgggtgaggttggaatgaattgggagttgaataataaaatggagaagccaaatcggaaaggttcaagttattgtttgttatagtagaaacttgattgtttctctttgtttttactttagccatcttcacctctatttgttatcctttgaggttataaaacttctccttcaacacttttttcacttcaaaatcaaaagttacaaatccgaaaccccttcctttatcagttatttttgcacatataatttcactttctactacagttccaaaatcactgaaatatgtcttcaattcatatgctctaatttgatgatgagggagacctccaacaaaaatgtttttctcattgaaaatattggactccatggtaaaccactactaacacacaagcaataatcttaatgttgaaagttgaaatatatttggaatatgattctaagaatatttaaaaagataagatatatttttaaagaaaaaataagaaatatatatttattattattctaaaattaaataaaatatttatttataaatatattaatgaaaatactctaattactttaattattaattgatgattctaattgaattagattaaaatatatatgtctgttgctgacagtttgaaagatatttatttttcgtaacatttatcttttaatttaataataattttaactcaaataatacatattttgttctttatgtataattttttaagaaaaaaataggaaagtttagtcgtactttccttaaaaataattattaaatttaattgaatttgttatattttatggttgatttgatttattttgaaattctgtcgattctctatatatattgaatgaactcacccacatatacttaaccttttattatacgaactagactcatattttaatattaaacaaaatttaatacataataaaaacacttcgactaaacttaatagagagattaattacaaagatgaagatggtatgtgaggtttcttattgtccaaaggaccatcttttaggagaagacgcccattttatttgctcaaccgaacaaattatcggagtagctgatggagtgggcggttgggccaagaaaggcattgatgctggtgagtacgctcgccaactcatgctcaactcaattcatgaagttgtagacaacgaaataattaatccgaaaatgattttggagaaagcattcatggaaaatgcttactctgaaattcaaggctcatcaactgcatgcataatttgccacaacaacggaattttacatgcagtgaacgttggagatagtggttttatggtgtttagaaacaacaggttaagcctcgttttaaatattttaaaaaattataacaaattttgaaataataattaaaaaaaataataataacacctctaacaaaaattaataaaatgtatttatttatttttaaaaaatatgatattacatattaacacctctaaaaaaattaataaaaacttatctatattcaaaataaaattacatttaactctctaaatatatatattttaattatattggacttttttcactaaatttgtactctattcttaaatagatgtatatatcgatcagcaactcaacagaaagtatttaacacgccatatcagctcggcaatacttgtgacactcctacagttgcagtggaagtgaaggtagaagtggaagtaggagatatcattattttgggtactgatggagtttgggacaacatattcgtatgggagatggaacaagtgttaaaagaaaaaacaaaaatcatggatttgaagaatcttagtag

SEQ ID NO: 76345 - DNA, 873 bp, Cannabis sativa
cctgtttgtaatccctgcaaatggtagcaccaatgaaaacaatagagagtgtgagcttacattaaaagagcatcgagtatccaatttattttgacacctgcctttagaaagtatcttaggcaaagaggaactgccagagatgagcttgatttttgcaaataaattaataaagatcagaggaagttccaacggacacttgacatgcagatagtttgatattgagttggttcagattattacattgctgagaaatcttggacttcgagaagattccacaaagcactggctttatgaattaggggttttcagtttgtgctaaaatttgatgctaaccacagtgctatagttgctacatttgtgggaggatgggttattattttgcaaggaatttgatcaaatatgtgttcttcatcttgtgtggagagtccatgcactcctttcttaacaaactctatcatctgtagaattagggtaatagtgctattaattttcagtgctttgaacattttgcatttatttccaagtggtagaaatgaaaaatcgagggagcatttttggtttgaaataggtttaagtagatgatattaggattttataagttttccaagttattgacagtattttattcctcatcttctcagctcatatgggcagaatttggcgacaagtacatttataggagagacgttatttgccattctcattgccattttgggtcttgtattgttttcccatttgatcgggaatatgcaggtagtgggaaaagctttgctattgattctttccattcaatttctcttttatttattaagttttattttattatattttcatatgtttcttgttcactgatcctataattctcttggatga

SEQ ID NO: 76346 - DNA, 5206 bp, Cannabis sativa
  modified_base (1200)..(1206): a, c, t, g, unknown or other
tagactattaccataatcatagggtccaaccttattaaataatgtgttcttatttgcttaaatatattatttattatctattatctcatcattttaattgactcagtgtcgttagctaaaagtgaggtcaagagtttgcatcttacgaaagaaatcagcaagtgatgatacgaaacattgaggagctgcaacattgtcatttcggtgcataatttttaggctgagttttatgctacgttttcacgtcactcggggtactatgattatccccaatttcttaatgagctttagaaaccataccagccacctactgatcatgatgacaatccacctgctactgatgacggtgccatagttatggacccttagtcctagctgcactgatttattttctcttcctttacttataatgggaacactgtttattttaagttttcgagaaggtaatttttatgttttttattttttgtttttttgttttttttattattttggtttttatgggtactcttttgtttacttatgacatattagatctaatgatgaactaacacttaactcttttgatgttatttagtatgtatgaaaaatttatggattgtgtgtttgacccatcatacttacttttgatattgttatgtatattatgtgtcctacttattttataaatagactttttttagttttaactaaaaaaataacaatattataaaaatacttacagttggccaaataaattaatatacagctcaaataaaaaaaattacacaaataccacttacacacatcttcaacccaggatccatgcttccggggcaaccattacgcaaccacacagtaacccaacgcaaccgaaacaaaaatttaaccagaaagagaactaccattaattctagcgaccacctaagaagacgaccagaatcaatcaaaataggaggtgttttaaatttatgaaaaataagtgttaaaaaactactaggaaactaaaattcaaccaaaaatccaatttaatttgcataaaactaatgtccagacttcaattctcaaatccaagaaatgcagatctcaagaagttgaactagagttccaaacaatccaactcaagtataatccaaaaaaaattacatcaatactatagtaaaatgtttatcctagtgtatttttgttgttttcaaaatttttaatggtgaatttgttcannnnnnntcatgaagagacatgtagatagagttacgtacgtggaaacactgttttgatttttaatatttcataacagttgcattacagttgcataaatattttgctaacagtaattttgtgttattgaaacttttattgatgcaaccttcggccaaccacccagcaaccttcgtctgatgcaacttttgacaaccacccaacaaccatcatcttattgtgtaagtgattgtgtaagaggtattttggtaattaaaagcatataaaaagtataaatattgttcacaccttatggaagtatttttgtaaataaagttttaatttgtattttacatgtaataattcctttataaattttgtgattttatgtgcatatgtagacttagtttgattttgattatatttagatagctagaacttatgtgattaatttatcgaggcatcctaaatcttggttgcgtggagatgattaaggtaatttttttataatcgtttgggccaaaaaagctaccattaattcattatcttttgttgtcctactttgagcctaatttttcttatttttattctttgttaataaatgcatatttatccttgattatgagccatgaacttaaacaaattatccttatcctactttgcactataaacataggttgtcatgtactaaataaaaaatataacataagtgggatgagaaatttttttgagaatcaaatttggaaaggatgtatgtgaatagagagttatgatccaagtgctatgataaaagaaattctcttgttatgaaaaaaaaatacttcaaagaaaaaaattcatgttgaaaatacattaataacaagagataaattttagagaattttaacgttaattgtacgaaaaaagaagcattggatgaaaaatattgttgagagaaaagggaaattacaatgaaggtttttgcatttgattagtggttttgtaaatttatggtgtgaaattagcccaaatgacattttcatccatcatatatctaagcctaatgttacatgcctataaagtccttgtgatctacatgattttagtttacaatattagagatgaattgattatgcaagccatagttattttgattgcgttggtatggaagtctttatgtaaataaattatttgtagatagagtttgtagaattgacatgcacaatttttaaaaaaaacaatatggaagctaagtttggttggttgaattctagtcgttagtttaaaatgcatgttgaataattgaaagagtttaatattgagataaactatccttggtctaagatttgcaattttttcatccaatcattaaattgttagttttttttagttttattttttatcattgcttattgcttttggagatgtgatgaatgctcagttgtacactcgttcttggtcattatttagatgaattattatgttatactttaagttttgtataaagtgataaaattataataatattgtcatgtgtacactatgtttatgtgaataataccttatatatacataaataatcaagctggcagttaactgctaaaagtaaatagaaatggttaaatgctaacaaaacgtgaatttgaaagttttgctgaaatttaaatttttaaaattaattaccagtaaaacaaaagtattagggattatagtatacaatttactaaaatttagagctaatagtataatttaatattttggtatcaatacctcccaatatacacttctacttgcaaatttgaattgtcccttttaatagtattttaatatacacttctacaacataaaaaaaaatatattaacaggcaactcagatttgctaacactgacagtatagatagactatgtttggtggattttacctgtgtaaatcaatatcttctttatctttttttaattaaaaactaattaaaacagaaaaacaaaggaaaaaaaaacaccaaataaatacactgattgggcattttttgttttcatcacaaaaaattgtaacagatgatgagtctgacaggcaaaattatcaaagacaaacctagataccctatgatctactggactcgaaccgaacccacagttgtatttctcctctcagatcaactgcaacagcaagaaaggggaagaggaaaagtcagtagcacttcaactaaacctgacttaagaactagctaaatcaaacacaaccaagataaattaatatcaaaataattgtacattcaagcttggagacgtataaacaattgaaattctaatcaattaacaagagaatgttaaatttctcaataaaaaaagaagatattaaaaaaaattcatttgcatcttattttgtatttgtagacctttactatttgagcttgtggtatcaaagtaaagttcaagttttaaaccatattcttttatctaagtagacaagagtgaacttttgtagctattgcgttctttgataagattaaacacacatgaagctctgcagagaaagaaaccgtcccaagttatgtctccaattgatatgagtgttgtaaaaccaagcgaatcccaggattactagtttgtacactgtccattttcaaactagctagaagagtttggtacagattgctggtgttattgaatattcaagaagtgtatcatagttcataggaatctatctcaagtgggtaagggaccattacagaattggtacagaaaagaaacacgaaataaggaacttcgcatgtacgaacatgagttagacaatatggtctgaaagaaataagacaatgttcgaggtgcttaagaagattttttaatatttacaggatttgaactattggatggctttttgatacaaaaggatttagcagtatgttgtttcaagggatcggatttctattctgtaatctatattggggaacctcgtcccctagcaattgcattttgcatactttttattattataaattcattatgacttatgacaaagattctcttattttctaatgtattccccagtattaaataaataaataaaacaaaagcactaaggaacctgatccaaccaaaacaatcagacaaggcatcctccattacaaatagactgaacatataaatatttatataatacaagataaagaataaagaaagaagaaaaacaatgccaatttgtgcaggtttgtgattacaacaggcaaaccagccctgcagtgccctaacattaaaactacagtactaagatatagacttttatgcatcctaaaactacagtaggaagccaaaataatttattttgccaaatgataaaatgcagatagctaattgtttaatagtagttttacaattacgaacataatcatagaacaccataatacacctagatgtgacctaacattaaagaaaataaacctgggttgaaaattaagaaggtaccttttcttaaagtgggtgaggattaacaggcgatccattatccaattcattgaattcccctgatatttttactttgcaagatggacaaataaagccaacagaatctgattgcatttcagaatcaagagtattatgattaaattctaccccacaccagacacatgcagtaagctgatgtcttcgagttccagtcatgtttaacatcacttcctcagattcaaaatgaacagaggaaccaaacgcaccttcaatctcaacagtaccttccaattctattggcacctcctgcaaggaagaatcttggtcaccagtaaaactgtactgcaaaggctctatttcttccagcctcagctcttcaaatcccgttacacttgcttgtctctgtgcaacatggaaaaaaatttcctcctgtcaaccaacaggaaagctattgaaaatgccaacactatcaagggagaataataattttatgaagaaaaaagtcaacgaaaaacagaaggggaaaaaatgcatggagagagattacagtcctcttaattcacgttaacagctctccaggcactactgcagtaatatgaaacaaaatact

SEQ ID NO: 76347 - DNA, 542 bp, Cannabis sativa
taagatcatattctcaaagtagttatgcagctatgttctatatgattatcctaaattataaataataattactaagcaataatacgtgccatgcacttattataataattattcatgcttttgtgttttgtgtttgcattagttttccattttgttattttggttcttcatatttctctgattttttgatttggctttccggctatttggttcttcatagcatttgtaaattttttgaataatagaatattatttatagctttcaaacatttgctattattttgggacaaaaaaaaaagatttggataaattattgtgttttttttagagaaatttataacttttaagattgttgctctactttgttcatctaccgatcaattattttttctttattatttatttttctctccagtctccatttaatatttactcatctgataattataagatacatgatattttgtttgagaagtaccgtccttgctaaagtatgttggatacattcttatttaaatttaagggttgaagttaattaaaat

SEQ ID NO: 76348 - DNA, 1874 bp, Cannabis sativa
aaaggtaatagattcactcgtagaattggccgaatctttcccatcagaactctgacggggtacaacgcttggcactaacaaagatttattaactgcttgacttggcttctttgtcaccagatcatccgtttcctttgtatccaaatggggtgacacttttggagaagttaaagactcaattttcggccgagcaacaggctttcctccagcagctaagacaagaacacattttcacaagcaacaataaattcctgaaatctggtttagaggcttaagaattctagtgcataggaatgaaacaaataacttacagtccacatatatgttctttatttcttttgtctcataatcaggagaccgagatcgcaaacttgaagtccttactatggtcggctctctctctgagctctcttggagtttaagattaagtttcggctcggtgcaatcattttgagaagcatctccatatggttcaatatgctgatacaaacaaaagatttagtaagtaaagactgcaactaaaaattctaacgacgcgcgagaaaaagattaaggtaattaccgatatatccgctacccaaactccaacagaattttggtagtatgagcatcccaacagttttccttcatgaatgcacaagtcaccaagagttgaccatcccatatcaacagtgtcatgacaaagaaccggctcccacgaatagacctaccgagaaagaaacaaaaagttaaataatgaagtattgttctattcggtacaatccttgaagatgttaagatatgaaacaaatccaaaccttcaaactatcttctagtccagcaaacaaagtcctaccatctggatgaaagccaatcacacggactcccgttgccttgaaagaaaaatgtgtttaaaattaatattaccgaacaatgtaatattcgtgacaagaaccaaaaatgttttcgccaagggaaattgatgttcaacatggaatccatattatcttttctatgccaactttatccatagttagagaatactgaacacattgttaatcgaaaaactttcacttggagacaatagaataatatgtacctcaggtcgggttgatccaatcaattcaaaggtttccaaatcccagaatttgacagttctgtctgctgaacctggaaaaaggaattgtacaaatacggcataagttaataaaatttccccgagcgatattattctgataacactagcagaaggtcaggtagttgctcacctgtggccaaaagaaattccagaggatgaaaatctaaggactgaaccgctccttcgtggaacttaaactcgtgcaagagttttccagcagtaagatcccacacctacataatagtggtaagtctttgttgattataataaatgttgtcacgattgatcgagctcaagagcaactattacctttacgacattatcgagcccaccagaaacaacccaccgcccatcaggagtgaatttaatggtgcttacgcctttagtatgacccctgtacgtatgaatgcaccctttctttctaatatcccatacccttaaattggtatccatcgaaccagatgcaaagaactcgccaaaaggatgaaattcaacagcagtacagttggatctgtgtccagaaagcgtgcgaaccactacacttcaataacaagaagaagtacattaaagtctacaaacaaataacaccaaaacctctcaccattatacaacaatgcttctagacaacaagttttcacctacaaaatctctaaggaggcatttggaaaaccgttgtgtactgtaactgtgtaattggagataattgaggggttccagttacactctttgagaatagtgtaattacattactaaaaaa

SEQ ID NO: 76349 - DNA, 1016 bp, Cannabis sativa
atttttatcaagtttttttaataatttttattaattttttagaattaatagaatattataattttttaatttttttttttcaatagaagggagtaaaattttatattggtcaaagttcaggggataaaaatattaaattttaatggtaaaaaaaacagaatctaacagatggggtataattattttactgttatagtttaagagaaatttttaacaagtcatatattttaggaggtaaaattaggtagtactgaaagtttaggtggcaaaaatgctaatttttatttcattttattaaaatacaatatttttgtaattttgaaactttaatataatatttttgtaaacttgatataataaaaatataaaaatctctgtattcaagtattttttataaacttttctttattttataattatttataaattttcttatcaaaatatatttagctcacaattattcattgagttacacttaaatggaaaaaaaaaaaaatagtaaggtaaaaatttgtggtaatatatctcactaaatttaatttattacaaagatgaaaataacttattgtgagtggtgcaaagtgagaaaagagaaaggtatagagtatagacaagtgtaggtttggtggtagaatcaaacaaacactagttttgattggaatgcaggccagacatacacacgtgaagtccattcatttgataacaactctctaccataaaatgaagagacaaattaactatttaattagtaactattatattttttttccaaaaaaaaaaagaaggaaaaacaataggtaatataatttcaccactactcacagggcactgtatttgatttcaacatatccattttgtgtaacattattatttccttctttatatgatgaattaggtaaattataacttcatttcaaagagaaataatttatttaagtatctttatatattaaaagtgtttatctaacggtatttcttggtttaacaaaatatactttaaaaataaaagaatattc

SEQ ID NO: 76350 - DNA, 618 bp, Cannabis sativa
  modified_base (552)..(556): a, c, t, g, unknown or other
atcaacccctgtagagggaaaggggaaagccgtcttggaagagcaagaagactcttcagatgatgacgccccatctgtgcttgttcgggcagatgctcctgccaccatgcagagtacttcatctggcattcatttttcttaattttcatggcttcatatattttatgctttcttttgaccgtattgcttttttcgtgcagaaatgtctcagaaaatgatcgaggctctaaagaagagagtggggggaagcttgggcttatgccctccagccaagaagtccaaaggcggtgagactccgtccaaagagaaagcaccaacggaagaggtcattgatctctctaaggaacaacctatcgtggaccctctgttgggctttatgccctaaataaaactctatttcaatgtaatccctatcatttaaatatacataaagaaacagaagtattttcatcacttattttggttcatgttatcatttataagtttatatgatttatgaattcatccaaaccgttatcacatatatattcttatttattgtgtcgtcagcannnnngaaagtaatcaagattatgtaattcaatatatattcctagatttattagtatacaaggttta

SEQ ID NO: 76351 - DNA, 590 bp, Cannabis sativa
caggttattcgggtttggcagtttacgaaaatttttgtacagccctaatcaaaagagcctcatccaaaaagtaaaggaaaaaataagatctgtgagctacttaaggctggctctaggcatctgtggtcttaagtccacataaaccccatacattatacaatttctaacaataacaataattaataataaatttaagatttcttcaaaaaaaattactaaaaagtaccattagtacttaatacatttttaaaatactatactgttattagtataattaatcactcactgccccaataattctttgtaattattataaatgtttatagaaaaataattgttaaatatcccatttattaattttttttgaaacaatatcccatttattattaaatatgtgtgtatgcatttttaataaattacacaattatagtaccctctgaattaaacttactaaaaataaatattattaattgaacaatgacaatatacataattaggtgatattttttttccatatataataaatattaggattagtagtactgtcataatatatatttatgcaaatgatattattacacgcaaactat

SEQ ID NO: 76352 - DNA, 772 bp, Cannabis sativa
aacaaaatcatactcagaaagatacagaaacccaaaactacatgatttccaaagcagcaacccaaacatgaaatctcattgaatcacgaaattcactacatatgtttataacattcacaaatatataaataatacttggcaggagaatgatagaaccaaaaatagaggaatctaggatacatcatcacaaataatacttctcatgagaatgagagaaccaaaaataatataactggtctctcttttttttatatggtaaagcattcaagaagaactacagttacaaactatttaatgtatgaaataaatggctaacatattcaagatctttatacattgaaatttcatctatctatcagtacaattataaaagaaaatccaaactcattcaaagacatatcgcatctctagaacaataaaacagaaaaatacacatataactaatccttaaaaacaaaaagtttggattaaatcaaggcgttaaaagtttatattataaaatttgaaacagcaataaattatctctccaatcaacaacacaacattgttccaggtagcttatttgtcattatgagtagttaaacacagtactgaaataaaatatatgtgagaacaaataccatacaaatgggattcacatgaaagaaacagaaatttgtttattgaaccaaaatcagaaaatatggaaacttatttggccctggcccttgcgtttcaaatggaaaaagatttgagaacaaaatttcagataatccaaattagaacaaaattc

SEQ ID NO: 76353 - DNA, 1088 bp, Cannabis sativa
tctctctctctctctccccctctctctcattgaactgccacggcctggctcgaagctagccattcttagtcctccaggcttgaaatgaagcccaaaaaactcaaaatccaaacaccgaccttccaccctcgagcttcttggctgtccgtcgttctccctctctccttctcggttgtgcatgatgtgcgagctcaggtcactgcacgccaaaacggaggccatggatgacctctctaggtcatgtgattttgtggtgtgtcctgagatcttgggttggtactcggtggagctctcatggccaagtaaaagaagacgaataagaaaaaaaaaatagaacagaaaagaaaaaataatataatataaagtaaaataaagttttgattttaaaataaactttttagtttattttattttatttaaaatttattaattaaaattattatttggagcaataaaacattgacacgtggcattttattggggtttaacggatcatttagcttggggaacaatagacacataaatgtgaccttggggactattattgccaatttttgaggttgaagactaatctgtatcaactctaaatttttggagacttttgctgcaattatcccttattttaaaaatgtcacattttattttttaagtcacatcacagctttaaactttttttatgattatatttttaatcaatttttttttaattatattacattaataaaacttataatttttttttgttttaaagtggtacaaatttttaattcaattgcaacatacaataattagaagaaaaaatttctaatcattttaaaaaatatcacactaaataaatattttgatcattattattaattattaatatttaattatattattttattgctataataatatttaattataatttagataattatatatctaaatgtaataatgtttaaagagtgattagttttgttttgtttttaaaagtattagattatatgtttttagcatttggcttagtaggcaaattcatcaaagagattaattagtagtatgatttttgtttggtcctattatctgtgatgagtaggtatatt

SEQ ID NO: 76354 - DNA, 529 bp, Cannabis sativa
ttataaacatgtccagtccactctttgaaccgcaacaccataagcattatcctatttttcaataggtcaaacacagagaaaagaaagcttacaattatggctttaattggttttaccacttgattatttatcactaatatttgaaattgtcttcccacttaatcaaatccatgcattattataattcaaaagattgtacaacactcatcaaatttatactttgcttcaacaagttaactataatctctagagagagagagatgaatacaaatttaggcaggtcaaactcatcatgctaaacaccaagttgaatgctaaacccgctttagttttggatttctatggacgctggaatattttttttatctgaaaataattgctttgctatttatggtgttgaattttaaaggttttatcactttgtgcagactgagagtgaacttgaggtacaagatctgcttgataatcttggacttagagataagcaacaatttgtaagttttcttagaattattaaaggaatacacta

SEQ ID NO: 76355 - DNA, 509 bp, Cannabis sativa
  modified_base (141)..(151): a, c, t, g, unknown or other
atcgagcatttatggagaagaacaggactcaatcgtatggatatgtaaaatgcaggatttcacatcctagcaagaaaagaagggaaacgtatactcaatgtgagtaaacagaatttatgtcttccatcttgcaaataaggnnnnnnnnnnntgggtaaaatttttgaaacgatacttttgtttccatgtcttccaactactttatcacccactttgattagagatattttttatttgcattcacgccttttggaaagagctgctaaatcaagttctagtttagggaagccagtatgcaaacaacaaatgcatgggtatttgaacccgagtatccgggcaaaagtagaatatttgatggaagaatgggggatccttttgagcaacctcttataataggaaaaccatatatcttgaaattaattcatcaagtaaatgataaaatacgtggacgttgcagtggacattatgcacttgttacacaacaaccccttagaggaagggccaagcaa

SEQ ID NO: 76356 - DNA, 1283 bp, Cannabis sativa
  modified_base (485)..(487): a, c, t, g, unknown or other
ttaagatttaaatacttccaatttgttctagtggtgaattggtattgaggctttagaaattcataaatcataatttaacgttgaaaaggaatcactattcaatctttttgtagtcatagatatcatatatgcatatggggtccgcaaccatttccactaacaaattccaaaagaataaatgtcttaaaagatggcctttgctaacattatttttaaataaaagtaaaattttgttttttgttttttttttgaaaaatgaaaatgtgttttatagttatttttatttttttttttaattttaaaaacaaaaaataaaagtgtattctgtaaattttatttttatttttatttgttaattttatttaagtccggtttgaggtcgagactgggggcgagttcaagtctgcggtcgggtttgggtttggtttccaaggtttaagttgtggttggagtccaaaatattaattaaaaatattttaaaaaannnaaatttaaaagtaattttttttgttttaaaatttagatacttaattaaaaaattgaaaagtaatagttttatagaacatgatcttggaaaatattttcactattctaattttaaaaacaaaaaattgattaaaaaagtattaccaaaagcaccctaaattatcccacaaatcttaatgagtgaatcaaacaattcatataacatcaatatacgagcttaaaatgtttgtttataataacgagttcaaaaaattcaaaatctctgtttaattcaaagaatttttatagatcttaattatcggtgtatattattattggttgatatttttaattaaatgtttcattattataacggtaaatactattttggatagtaaaagttattaattatacattcaattttgttaaatgacaattcaaatcctatattttttttaaaggtacaaaataatactctattttagtcaaaataaaatttaataataaccagacctcgaggtgttatgactagattggatatatatatattttttttttgtatctttttgtgttaaaaactaaatttaggttggtaatataaaaaaaaatgacaaaaattgagcttaggatattattttttactagtttagaaaatacaaagtctgattatcatttaataaaatagatgatctaatcagtaacttttgtgaaacacaagattcaaatgatattactcttattataataatatttattgaaacattaataacacatttatcaaaatattatactatatcagattccacatcacatgtata

SEQ ID NO: 76357 - DNA, 3320 bp, Cannabis sativa
  modified_base (54)..(54): a, c, t, g, unknown or other
aatgtttaaaattccgtgaaactgtatttttattgtttttttgttgtttttgtncatttgtgaaattaacccttaaataaatttgaaagaaaaataaattataattataaaaattatcattaaaaattgtaaaataaaattttggagggggagacttactaactttatgagctacaatatagctccatccctgcctactttgttaagagtttttgtatgtattctcaaattaaaaatctttatatttacatttaagctacttaactaaatgaatttgtttatgtagtattttaactgacattaccgctaagttagttataggctatcatctatatatagtgctttgtgaggctatttttatatacaagtttttaaactccccaaagagtttgtaagttcgagagttttcacaagaaattgtaacaaggagtttgagtaaattttttttgtgcaatttagtgttaattgaggcaagtcgcattggtgtaatattcgtgtcttatagcactttttcgatcaataaataaattaatccaaaaaaaaattgttttatgttgaattaaataaaatttttttataagtaaaatatataattttacgggagcaaatatagtagttataattaaaaatcaattaagagggtttgcttatgtgatatcttagttaaggatattgtttatatatagttctttgtgaggctattttgatacatgagttaaactccccaaacaatttgtaagttcagagtttttgcaaattgtaacaaagagtttgagtaaaatatttttgtgtaatctggtgttaattgaggcaagtcgcttagtgtactatttgtgtcttgtagtacttttttgatcaataaataaattaatccacaacaaaatatgttttatgctgaatcaagtaaaattcttttgcaagtaaaataaataatttattgggagcaaattagtagtggttatacttaagccacttaattaagagagtttgtttatgtgacatcttaaatgtcattaccgttaagttagtttaggctattgtctatatatagccctttgtgaggctattttgaaatatgaatttttaaactctccaaatactttgtaagttgagagtttttgcgaaaaattgtaacaaagagtttgagtgaaagatcttgtgtaatttggtgttaactgaggcaagtcacattagtgtaatttttgtgtcttgtaacactctttcaatcaataaataaattaatccacaacaaaacatattttatgctgaatgaagtgaaattcttttacaagtaaaataaataatttgacgggagcaattatagaagttgttataattaagccacttaattaagattgtttgcttatgtgtcatcttagttgtcattatcgttaagttagttataggctattatttatatatagtcctttgtgaggttactttgatatacaaggttaaactccccagacagcttttaagttgagagtttttcacgagaaattgtaacaaagagtttgagtaatggattctgtgtaatctggtgttaattgaggcaagtctcattggtgtaaaattcgtgtcttgtaacactatgttgatcaataaataaattaatccacaacaaaacatattttatgctaatttaagtaaattttttttgcaagtaaaataaataatttcacgtgtgcaattatagtagtggttataattaagccacttaattaagaaagtttgcttatgtgtcattttagttgtcattaccgttaagtaagttataggctattgtctatatatggtccctattttgatctgagtttttaaacaccccaaacaatttgtaactggagagttttcgcgggaaattgtaaagaagagtttgagtgatggatttcgtgtaatctagtgttaaatgagacaagtcccattggtatttgtgtcctttaatactcttccgatcaataataaattaatccacgacaaaacacattttatgatgaatcaagtaaaataaataagttcacggggcaattatagtagtggttataattaagctacttaattacgagagtttgtttatgtggtatcttagatgtcattacttttaagttagttatatgctattgtctatgtatagtctattatgaggctattttgatctatgagtttttaaatatcctaaatagtttgtaagttgagagttttcgcgagaaattgtaataaagagtttgagtgatggattctgtgtaatctagtattaaatgagacaagtctcattggtatttgtgccttgtaacgcttttcgattaacaaataaattaatttaaatctacaacaaaatacagtttatgttgaatcaagtaaaattagtaatttcatgggagcaattatatgattgaactacttaattacgagagtttgtttatgtggcatcttagatgtcattatcattaagttagttatatgctattgtctatgtatagtccgttatgagactatttctatgagtttttaaacatcccaaatagtttgtaagttgagagttttcgcgagaaattgtaataaagagtttgagtgatggattctatgtaatctagtgttaaatgagataagtctcattggtatttgtgtcttgtaacgctttttcgatcaacaaataaattaatctacgacaaaaaacattttatactgaatcaagtaaaattcttttacaagtaaaataaataatttcacggaacaaatatagtagtgattataattaaaccacttaattcagagagtttgcttatgtagtatcttagctaccattaccgctaagtcaattataggctattgtccatatatagccatgtgtgaggttatttttgacgtaggagtttttaaagactccaaacaatttgtaagttatgggcttttgcgagaaaccgccataaagagtttgagtgattaattatgtgttagttagtgttaaatgagactagtcatatcggtatttgtgtccgctcttttgatcaacaaataaattaatccacaacataacacattatatggtgaatcaagttaagccacttaattaagagagattatttatgtggtatcttgactatcattaccgttaagtcaattataaactattgtctatacatagccctttgtaaagctattttgatataggaatttttaaagacctcaagtaatttgtaagttaaaagtttttcgcgaaaaattataacaaagagtttaattgataaattctatataatctcgtgttaattgagacaagtgacaagtctcatgtaatgtttatgtcttgtaatactttt

SEQ ID NO: 76358 - DNA, 3913 bp, Cannabis sativa
  modified_base (3874)..(3881): a, c, t, g, unknown or other
aagcctttttcaaaaaaaaaaaaatacaagaaaaaacaatactccactaaacgacggaggaattgtagtcacaacacaaacaacattcatttacttacatgtcccaaaagttcatccgtagcaatcccaccttggaacaaaaaaaaaaaaaaagaagaaaaatccacattaaaatcttcgaattctcataaaatttccgtttattctataattttaggatgtgggtatccataattgtcgctcttctgaactgggcttggtagtattaatcactagctgcggttgtggtgtctgtggtagtgtgaggtttttttttttggtttcagtaatggctgctactaacgttggctcctccttctcttgtttggctgctgctctttccactccaatacgcaccagaagtccttttcaggtttgattcaacttaagcccttttactcgacttgagcaatcgggatttcattttgtgagaaatgagaatgtgtgatttaggccccaaaaaaacttatgtctttgacttattgcttactgggtattgaatgtgtccctttctaagaagaaaaagggggataaaactttgatgacattactgggtttcaacttttttctcttcctaagcagaatggctggtgctcgtgtctgatattgtaggtttcagctgtaaatattttctgatataatagcatttttttttagtgtagatagctcatatatgtgttctgttagagtatttcaattttttttattagaaacaatgctgagatggtgagttacaacagagttggtatttttcttacacaaagattacttgaaaatttatatgcttgccttgctgatggttaggttgtaaattggtaatgctacacagtagtttgctaactttcattctaatggaacttacttcgcgaggatgccccttggattgggtagtggattagttttggattttgtctaagagtcattatgttgaggactgataaatgatggtaggtattgtttgcaaccttggtcttttcatggaactaatgagggttgttggaaatggttatttgtatttgtgctgagctaagatcctatctaatcattttactttttgttgttgctgttaaaacatggagtaaaaagatatagttttattggtactgtcactgtgaactttagtggcttagtgatgcatagtaggatattctattaaatttgtcatatgctttttgtagtttggatttctagttatttctcttgccatttgccataaatttgaagaggattttggttgaagaatatcatagtgctcatgaaaataattttctccattttatcaccagctgagcttatcacgaggattatacaacaatcaacaacatgaacctcaactgctaagatatcctagaggtaacttccaatattgattacaaaatttgttaaatgcggaaattgtatttggaagtgcaatttaggttgcccaaattgatttgtagaatgtatagtaggtagacaattatggctaagggaagtcttgggactctacttaagagagtcaatattaaaactttatctataaatacaaatcaagggatgtattgagtgatgctccagtgaacattatatagtcgcttattttacttccccgcgaggttcaatattgctaatagtttctctaaaatgttattgtttgcttctatttttattccaatcaggcaagtcctgcaagttcattcatggaatacttaactcaaaaggaaggtccccaaagtggtgcagtgctctttttgcagtttctgaggaacaaccgctacatgatgagatagaattagttgcatcagagcaagaaaaccttgaccctagtgctgaagatgtatctactgcaagcaattcaaatattatatttgatggtgctggtggaaaaccaggtctaatatccttttataaccaccgttcatacgaaagagaggataagattcatgtgtttagtccagagaagaaccacaacagcctgttatggtttattggtccggctgtacttgtagcctcttttgtctttccctctctgtatttgcgtagaatgctctcagcaatatttgaggactctttgttgacaggtgagattgcttgcactggtatatactgattttgaggattgctatatttttgccttttgtttcttcctatttttcaattagagacgctttagttgcaaacaaaatcaggtcgatattatcttagttgatgtctgaatatacttgggtgtgatatgactttgttatgttgtcacatagttctaaaagtacgccgacttcttgtcaaattttagatttcctcatactgttcttcacggaagctcttttctattgcggtgttgctgtgtttcttcttctaattgaccgtttggggcggccctctatgccagaatctactgcaaacagtaatagaacgctggcctcacattttggacaacgaatctcatctgttgctgctttggtacttagtcttataattcccatggtgacaatggggttcgtctggccctggactggccctgcagcatctgctactcttgcaccctacctggttggtatagtagtccaatttgcatttgagcagtatgcaagatataagaagtcaccatcttggcctgttattccaataatctttcaggtaaagatacttagtttattttcgctcaacttggtttcttatcttgactcatttgataactacaaaaaagactagctgaactattttacctttgaggactataaaaatcaacttttctgtttgatgctttgcaggtttacagattacaccaactgaacagggctgctcagctggtaacagccctatcgtttacagtaagaggagctgagatgacctctcataacttggcgataaacagctccctaggaacacttctgaatgtcctccagtgtctaggggttatatgcatttggtctctatcaagcttccttatgagatttttcccttcacctgcttattcttcttaataaagcatcaaatttccttatataaccagtgaaacaacttgcatttgatctttaaaattcaactcttgataggtctattttttcattttttttttggttgaaaagtgaatggatactgaagcattttgacttgtccacagctagttacaaagattttctcaggactttgtataccaagaaagatactaagtgcagaaaagaaagcaaaattggtgacatttttttttttcatgtgctttcttgcaagttaatacccattgtacataaattatttgtgccacagattgttcaatgtttatgatcctaaaatatgagcttaaactgttgggtatatcaataaattatgtcgtgctcaagtttggttcttttgatagtacttactacttacacatttggttatgggatttccctagccattatattataatctatagtttgtttatgagaaggggtagtttggtaattttgtttacctttccatgatgaagctcaactaatagtcacgtgactatcaggtgacacactggtgaaactgctcatttgcatcaatactcaatactattagaatgtgttatatttttactggtgtaattaaggattatgtatcatataatactaaaagataccagtagtatttagcatgcttgtgtgtgtgtcaatattactattggtttaattaagtattgagttttatatagtttaatataataatttttaaagagtatcgttagctaattataagacaacatgtctagaggtgttagacaccacagatgaccaatagaatactttttaatttaaaaacactaatcattatataacataataaataaataaatataaataatataaaataactcaaaccagttatnnnnnnnntagaaccggttctataacagtattataatgaa

SEQ ID NO: 76359 - DNA, 681 bp, Cannabis sativa
ccttcaccttttgaggtgaagtattactttgagctgaaatccagcccttgccagaacaggactggatacttctactttagccagtagggctactagtggttggacaacaccaatgacacacccatgtcaaagatcaggggttatgccaaaagtaacttcatggcttatgacataaaaagttttttccagttctttcattgagtccctacttacagccaaatgatccccacactgaagataagggatagggccaatcaaatcttatctcttcttgttgcttgatgcatatctataggttggcctatgaggagaacattaggaggtatggcatgtaccctcctggtgagggtgttgaagcctcaaataatttccctaaggatccatgcaatgctcttgttgagaaggagaaagtgaaaaaaaaaaaaagaggcatgtagctgagaaggagaagagtaaatttgatgatgagatctctttggctgagatcgcccaaatagagactaggagggaccaagctcttcattagtgtcttgcacgtgggggcactactggagatgccctagttctgatcaggcctaagggacaagggtcagtgagaatttctcggcccgtgccaatagaaaaaggcaaaggcaaagccattatgactagggacaactctagtgaatcttcttctgaaga

SEQ ID NO: 76360 - DNA, 1228 bp, Cannabis sativa
aataccaaataagatcacgtattaaaaaacttataaaaaaatcaacaaaataggaaaagaataaaccacatggagaacaaatctaaaacatgaaaaagtaactaaaaaatgaaaatcaaaaagctaaaatgaaacaaactaaccttagcttcattgaagatatccatatctaactcatcctcagaatgagaatccacatagtacatttcctaactcttttcttttgacaacacaatcatcttcagaaacctttcctttctcgactatcttctccttatctcgttttttctttgcaactaaacctttactctttcctgaactcgaagccttggaaccaccagggacacacattgataaatcttttccagttctaccacagtcagagagaggcaacagagaaggagaactggatgatcgaagaatcgccattttagttaaaagaaccaatatgatcagaaagaagagaaaacgaaatcctgatattcgcctaacatcaggggcggagccagaattaaattttagggggaccaaaaatatatttatacatatagttaaatctgatttaatatgagtacttaattttaaaaaaatgctggctagtattatttggtttaaaaatgatacctattaagtaagtattttgatattattttctaataagaaaaaaaaaattattagcttttaattttcataaaaaaaataagagaaacattaaaaatcactattagtgcctagcatttttcttggtgtctattggtataattaagtatggaatttcttattacttaaaaaaataatttttagaagatatcgctcaccaatcgtggaacggcacctatagaaggtgctggtcatcactagtgcccaataacaatgcttaaaaaataataataataacgtggactattgtttaagaaaaaatattaagaggtatcttaaagtgtcaaacactacaagacgttgcataatactattgatgcattttaatatcgggtcttacaaattttgatttaataaatgatgaaaaactgctaattaactaattatatgcatataacaccacaatagtatggtactggacaccttaaaataacaaatagcaataactaattttatattttttatatatattattacttaaaaaatatttatatatataattagctaataataaatgaaaatcaatcaatcactactaaaagaaaagagaaactcactttttattttc

SEQ ID NO: 76361 - DNA, 542 bp, Cannabis sativa
tgttgccttaacatcctccagttggcagtgcgagatgcagtcaatgaaatcagtagaggcatggaatttaactttgtgcccaattctctcatcctttgcaatgatatcattaaagtcccccattaataaccagctctcattggttgccaaacccctaagatcttgccataattccattcttccaacatgatcattatatgcatataccacagtaacaaagctactgaagtgtgaatcagtagtagaaatatgtaggtgcataagttggctggtgcacttaattatgtctacattgtatcttagaggattccaagcaatgactattctgccccctctatgccaagcaatgttggtggagaaacaccaacctgaaaacacatttaggtacaaagctcctaatttagaagcttttacccttgtctcgaggagaccaacaaaaccgaccccttgtgaactaataaattgctttattagcctttgcttttgttggttgttggctcctcggacattccaggataggaacttatccatttacaagagag

SEQ ID NO: 76362 - DNA, 1714 bp, Cannabis sativa
ctctcgtccatcgatctctacccacccctcctcccatcggtctccctctcctctccgtcgcatacgtcggaccaccaccacctctcgtccgtctacctctgtctttctctctctctctctccgagctcgggataaatacatttatttatatacttttttatttattatatatttattttgttattgtataaatttaatgtgttttaaagtttgtttttattgtaataaaattaattagttattttattttaatttaggtaaaattataaaactaatgcaagaaaaaaataggggaaaatacagaaaaatctatatttttctctctctttttttttacattctcgacggtttaaaatcgttgcctataccctgttataggcaacggttcaaaaccgtcgggaagtccacattagcgacgatttttaaccgtcgcctattttgtcctttttgcgatagtcgtataggcgattattgtagaaaccgacaagaatacattaaataactgtttaaaaatatcgagaaaaactatttttgtagtagtgtaaaaaaatcaccggagtagctgtcggtgtcaaaaaagtcgttgaagttactaccgatgctaaaaaaatcatcaaaattagcattgtcgctggaaaaatcatcgaaaaataccaagaactgatttcttgatgaagaaactggtttcttgatgaagaaaccactttcttggtaattttttcggtgataatgccaatttcgacaactttttcaacattagcagctgctttgacgactttttcagcactgacagcaaacttcagaaaagtcgtcagaatttgcatagtcgctggaaaaatcactaagtttcttagtgattattctgatgataatgctaattccgttgacttttccggtgccaacagcaactctgatgactttcccagcactgacagcaactctagtgactttctcaacaagtatgtgccaactttttttaatattcgtaataaggaaatgatatgattttattatttaaacaatcaaattaattaaatacaactattgtaatgtcaatgtaggaatattaaaagtattaatatcttgttatgtacacaacctataacatataataagataacatcttatttgattacaaaatattagcacgtgagtgtagaatatttattctagatatatatattattatttattatatgtatatattgctctatatacatacaaattagctttctaaatctattttgtacaagttaattcatggagatatattattattcattgtatgcaatattgctctatatatacaagttagttcttaaatctaaattattattcattgcattcatatattgcttcatatttatattaattcttagatataaattatcactcattttatgcatatattgttctatatatacaagttagttcttgaaaatttaaatctactaaataaatgattttactaaagttgcttattcaattttttttttttttttaaagttgcttattcattaaataacataaaatttacttatatataaaaaaataaataaaattttatgctgatacattctaacactacaatcgggctataccaagttaattttagagtgggagtactatttgtacaatttatatatattttaatatttattttaattaatataaaattatttttcttaaaaaaaactcacataatatattaatg

SEQ ID NO: 76363 - DNA, 9956 bp, Cannabis sativa
agaagaagaagaaaaggaaaaagaaaaaaaaaaaaaattcatgattttaaattattttttataatattttaataattaatagtacgtgatcactaaaatttactacatgtatactttacaacatttaattgagatttttgaagggaggtagagcaaaatgaaataaaaattcaataaattttactgtcaaaatttaatttatgtggtaattaagtttaaaaaaaaaataaaacctcactagttttacagccaatattcctttaaataaaatttgttcaaaatataaaacaaaatttttaccctttaattaaaagatattatttcataaatattaaaaatgataaaaaatttacattgtttatgattttacaatgtttaatatacgaattttagctttttctgtttttttaacaagtatttacataatgttttctaaaaaagataaagtaaaaaacctgtaaaaaaaatagaatgttttttttttctaagaataaaaaagcctatcacaattttgtaagaattaaaacacacatttttttctacagtaatttaaaagcaaagaaagactgatttaaatccatcctgatttcagaaaaaataaaattaaaaaatccatccataaaatattaaatcaacatatggtcacgattgttttcatttaagatagattttttttttatatatatatatatattatttttgaaaattttaggatggagattttattaaaaaaattaatttaactgttaagaggataattgataattgccattaaaaatatttcttttattaaaaattttatttgcactcataaaataataagtacacttaattattaaaaaaaattaaatacttttaaaaatcttataatattttaaatgttttccttgtattatttatgttaattttaataattttactttcatatttttttctatgttatgtatgtttttcatttttttctaacttatataattttttataatatttaaaatataatttattgttatttgatagatttattttttaaaaaaataaattaaaagaaaaaaaaaataaaaaagcttaataacaattaagaatatgtcctttttttttaagaaaaaacaattaagaatataaattttgattttcttccgaataaaatgaatttaattttggatgaagtgcgtgatatacacttgcaccagacaaagcgtgagacaaaattatctcatcgtcaaacagagaagcggaaacagttctaaaaaccaacagtgtttgcgcttgagccggaaccgggacccgtgttgggttaagttttaaccatgttgactcaaacatcactgaaaaaaaagttaaactacggttaacttgtaagctgttgtgttttttcccttgcttttagagcaaagttaaacattaacaatcccaactataaaattgcaagaaattgatgaatatcggtcgagtccactgtagtgctaagcgaggaacgccggaattaatgcatagtttttctctcttttttttattattagaaaaattattataattcctgatatagttattttaatattttaaattgagaaaaaataaaaggttaaaaagggtacaccatgcctcatcatatgtggatatgaatagttataatttttttaaaataattacatgcaattatttaaagaaactccctcagctgaaaaatagttataattttttccaaaattatattatagctatttagacagcttcaaatattatttataatatcttgtaaatattgaaaaaaaaaattatcaactaatttactttgtagaaaaaaaaaatctatagaatacatgtaaacaaaagtttgtttaacctaatgtttagaagttcatttttttgaaaaatttataatcactataataaattaaggtaaagtgtttaaaaaagaaaattacaattataactccccctactaaaataaaagagctgcacggtatagtcttttttagggtttctaggggtttaaattaggtagttaacatttattatttgtttaaacctgttttttttttacttttttaattaatttattaattaattaattccatttcggattattaaaaagaaatcaggtttttattatttaattgattccatttcggattattaaaaaaaaatcaggtttttattatttaattaattccatttcgaattaatttattattaattaaaaaaaatattaaaaaagtaaaattggataggttccttaaagatctttgttgttttgctggcttctgaagatacacatacagtttcgtcagatccgaagaaaaagggtaaaaaaatcaaattaattattttaaaattaataaataagagagagaaatatattaaatattaaataaataaataaaggaacagtagcagtattactaatagtaccgctagttgttttttttttctcaatattttggactcttgcatgatccaaaaggttgctgtggcttttttctttttgtttttgtttgaaaatggagttctatcttgtgttgtgtgtcggccattgagtgttcgattgaatctctgagccaaggagaagaaaaacaaagaagacgagaaaaaggaaaagaagattcaatttttttttcttttcaatttcccacaccaaaaagtttccaactgggttcttctttttgtttttgttttctcaactaattacttttaactgaagaaatttgagagctttgttttatagtttcttcattcttggatcgttgaagcagagttagctcggaattttttatctgagaagttaaaggaattgaaacgaagtcgtttaggattcttttctgggtagagggactgtgagttagtttgggttaaaaagagtcttactgttgaggctgctccactggtttcattgagtgtacactttattagggtttttgtgtgtttttcaaattaagtttattgtgttttgatggttgaagttttctaagggaggttttttctttctgggatgagtgatgtaattgaagcattgaatttaagaggggagagggagcaaagatatttcgaagctggtctgtttttctgtttattcttaattatggggttctatagaattagtggtattgattgtgggtattgttttatgtggagttttagaacagattcctttggtgaatcgtgccacaaagtttagatcttccatctctactttggtcttctttatctatttaaggtaagaaatgcatcaaattgtacttcattgattggaattaataattacttcccttatgattattatatttctttacttttcctttaaaaagaatcttttatctttctttcttttgggttttgattctgacttatttgactgatttatatggttatgcaggtcttatttgataaaggaatcaaaaactagtaaagggtgttcatttctgggaagattttgtagtttttcctttttttttttcaaaagaattatcacttaagttgattacgtttatggattcaaaagagaaacttaaagaggtggagaagtgtttagatcctcagttatggcatgcctgtgctggaggtatggttcagatgccaatggtaaatgcaaaggtgttttacttccctcaaggccatgccgaacatgcctgtggtcctgttgatttcagcaaaatcctcaggatttcatctttcacactatgcaaagtttcttccattaaattcatggctgatcctgagactgatgaggtttttgccaagttaaggttgattccttcttctgctggtgtgaatgagcttggctttgatgatgatggtattggaggagggcttaatgggtctgaagctcaagagaaaccagcatcatttgccaagactttgacccagtcagatgccaacaatggtggtggattctcagtaccaagatactgtgccgaaaccatctttccacgtttggattacaatgccgatccccctgttcagactatccttgctaaggatgttcatggcgaaacatggaaattcagacatatatatagagggacgccaaggcggcatcttttgacaacaggatggagtacttttgttaaccataagaagctggttgctggggattcaattgtgtttttaagagctgaaaatggcgatctctgtgttggtattcgtcgtgctaagcggggtatgggaggtggaacggagtcctcttcgggttggaatccaactggtgggaattgtgctagtccttatggaggatttgctgcttttttaagggatgaagagaacaagatgttgagaaatggtaatggtaatggaacgaactcgaatggtagtctgatggggaaggggaaagtgaggcccgaatcagttattgaagctgcaacacttgcttctaatggtcaaccatttgaggttgtttactaccctcgagctagtactcctgagttttgtgtcaaagcgtccttggtaagagccgcattacagatccgttggacccctggaatgaggttcaagatggcctttgaaaccgaagattctagccgaataagttggtttatgggaactatatcttctgtccaggtttctgattaccatcgctggcctgattctccatggagactactccaggtacttaccaaattactcttttttttttgtcttttatttttattatctctaaacgtaaaaaaaatatcaaactaagctagaatttatagttactttatcttctcctgttaccaaattactctgtattttttcatctcgacctttttagtctgcttactggcgtaagatacggttaaacataaaaaatttatcaaaacaaagccttgggaggtttccattcaattgttgttgaatttaaatacatctaataggaaacgataatgatacttgtcttgaacatgtaccaaatgattgttcgtttacattgaaagccttttgtactcttcacaagtgctaatttgtattgagaatatggtgctgcaggtttcatgggatgaacctgatctacttcaaaatgtgaaacgagttagtccgtggttggtagaattggtgtctaacatgccggccattcatctctcaccattctcaccaccaagaaagaaattgagattgccccagcattcagatttcccacttgacactcatattccaatgccgagtttcaccggcaatctctttggtcacagtaacaactttagttgtctgtccgaaaacactcctgctggcatgcagggagccaggcaagctcattttggtctatctttatcagatcttcacttcaataaactgcaaccgagccttttccaggctggtttcccaccattcgatcatggtgctgcgcccgctaagttccccaacaatgcaatgaatcagaagccgctgagcctcaatgaaaatgtttcttgcttgttaacaatgtcccataccgcacaaacacctaagaagtctactaatgatgtaaagacaccgcagctcatactctttggtcaaccgatactaacagaacagcagatctctttaagctgttctggtgatacagtctcgccagttcttactggaaacagttcatcagatgggaatggtgataaagcagctaacttttctgatgcttctggccaacaacgacgctcaccctgcgaagggctccaatggaataaggagactgagccgaacttggaaactggtcactgtaaagttttcatggagtcagaagatgtagggcgcacccttgatctctctgtgcttggctcttacaatgaattgtataggaaacttgcagacatgtttggaatagaaaactctgaaacactaagccatgctctctatcgcgatggcacaggtgcagtaaagcacatcggagatgaaccattcaggtaaagatttagatgttcacatctattgtaatagtagggttgttcagttgattgacttgtttcatataacagtgagttcacgaaaaccgcgaggaggttgacaattctaatggattcgggaagcgacaacgtaggacatgtaaagacagacaaacattagctcaattgtgcagcctcaaatgatttataatctcttagttccttcccaatgctgaccaaaaattctaccttgtgaagccactctgatccaaccaaagactcttcacattattgttattcttcttttttgcccaattttggtcgaagaaataagtctttgatcaaataatttacgactattttccatggcagttttgtttgtttgtttgtttggttttaatattattctacagcctcaaaatcccctgcttctacacatgtacaagtggtttatagaacatggtgtactaatatttctaaataccatgttccataacactttttggttatgaccgatttcaagttttacttttggagatgtatattattaaatttaagcagtgttgtttttcttcttatacttgtatagtctgaacactacttactgataataagtgctttttattggtctatcttcattgctcaagtctcatttccatgtatataaagggaaaaagacagtttttctttggctcagcacatataaagtcatttgaaaaaggtagttttgttgacttttgaggttttctttgggggggttggttaaaataggtcgcttgcattaattacttttaccattttggatttatttttatcatatttaaaacgaagatacagaagttatatcttaatatagaggtattcccgaacaagaaagtcaaattaaggaaaggaaacaaaacgaagagatgtaaagtataaaacgacaggagaaaagaacaaaaagaaggaaagaagagaagaagaagagaaagaacacatattctgtattgttgtaacccactctttggcacacgtgagaattgtgggacccaaagtcaaagagtcaaaattggagcttttgatgtttttttggggttttcacgtgtggccaacgtcagcttagacttatatttaacatgaaagagaaagagaaagagatttgcatgggttgcgccgttttggtgaccgggctgtttatgcataacataattatactatattatattatgttccatgattttggtgctttgactatttatacacttataaccactcctttctttatctttccattttttttttcattatttcttttagtatgtttcatatacatatgattgaagcacatattgtttttacactttagaagataaaaaaaacaaagtttaaagtgatgaaattttgctgaaaatatcctaagatttttaatattgttacaatatttagacaaaggaaattcagaagtttggtatatacttcatgttgaaaaatatatatttctcttttattaaatataatttaaagatttactcaaaaaaaaatatatatagtttaaggattttttcttatttttctaaccattaaaatatatatttttaaactaagggtaaatgctattttagatcctgtatttagtaaaagttacagattagaccttgtgttatattaaatgacaaaatggaccatgcatttcttaaaatagtacaaataaggccctaaattgatttttggtcacgataaaacttaaataataattcgatctagaggtattatgaaaaaactggtgaaattttttgcatttgtttgtattaggaattatctttaaataagttatattaaaaaaaattgttaaaaattaagctcagggtcctagttcattttatcattttaaaaaatagatggtctaatctgtaacttttgtaaaacacagggtccaaaataatatttatccttaaatcaatcaattatttttttaaaaaaaaatattactttaaatatctctatttaatttaaatttgaattagacattgattgaattagttaattatattttataaataaataaatttaaaactagattaaattttatatatttaaaaaagtataaataaattgtattagatttaatttttgttaatattatttaaattaataattaagtaatagcaactctaaccaaacatgtattgcatgctactaatactagttatacgtgcactcttaataggtattactcatagatggtaattagaaaaatttaagtttttatgcttaagttttttattagattagaaaaatctctcatttttatattatgtggggctgaggtggttcaataactaaaaaaataattaaaaaaaaaacgtgttttttgccaaaaaaaaaaaaacaaaaaaagctgagtttgacttaagttttttttttatataaacatatttttgatataatgtaaaaagatatatatatatattttaattttattaataaagttggtaaattagtcatagaaatttaaaattttcttttatttttcaccaacgaatcaaaatttaatagtttaatatttaaaattaatatttatatttaaatttgtttagtatccatcaatgagtaatatacccattaaaaaatggtccatataatatgattaaagtttcgttttattacaaaaattaaaaaaattaaagtctattataattttaaaagtacttgcatgttttttttcgtcttaaaaaaattaagggaattatctcatatattttttttttcttacggtttgggttgttccaatagtgtatatgtgggttgcgaaggttactccgttagttgttatgtggattttcgtaaaaatatataaaaaaaaattactttgaaatgtaaaaataaaaaaaaaaatcccaaaaaattattcatgcataattacatggttaagtaaaataactcaaccataccattttaaaatttatattatcaaattttataattacctaattatttcttattatatagttcaagttttctaatttttaactcaataatgtaaaaaaaatatataattttttattatagttttcaatattattttttcataatcaatatttgagattgtactaaatatttatatttttatttcattaaaaaacaacttaaatattttaatatgtccaacaaccccaattctcaacaatttttggaagaaaattttaagtaagagtattacttttgatcttaccctagctgggtatttttttttaatttattttcaatatacggagaaattacatatcattttttttataggtttcttacctattttaagaaaattttataaaaattttagtgttaaatatatgattcatacaagatggtgatgttttatgttcggctgctactcttatcttaggtttgcttgaacctcatgtggtggaggcttctacacttcttcatgggcttctcctttgtgtgtggttgggatatactcgtatcaatagattctttgattatttgtgcctagtgaactctctttcaaacaagaagaatgattgcaatgagtgtattattcttgatattcttcaggtgtggaagtctttttctcatgtctttatttcttattgtaatcgagctagtaacgttattgcctattctctagcctaattttctctttcattagaaacttttcaagtttggtggtcgagtcttccgcctaattaactttagatggtttatgcttgtattgatatcatgatttctttagtttcgtgctttttttaatgaaattattcctttttcaaaaataaaaatatataattgaaacagtttattacattcatgtgtaaatttttatacgagtaaaattaattattttaaattttatttttgtcatattaaattattatgatgtctattattataactaaaatacacaacatcatataaaagaaaagaaatcgggataagatttttttatagatactgaaaattaaaaattctcctacagtaccaaaaaaaaaaaaaaaataaggtgcttctacaatgtaccttttaaaaaagatgcattgatgcatcttttatttattttgacattcagaaaaaaaaaaaaattaattattttttttccatattcgtatacgttatagttat

SEQ ID NO: 76364 - DNA, 1095 bp, Cannabis sativa
agtacagtataaatgttaattctgccgtgtggcagtaaaattaaaaagtattaccccaaatccagtatttttgtaaaatgccctatatatatggtatcaattctgcttataacttgaatattttggcccaaaatatcttttttatgcagtatgatttcatagcaaatatttttcttaattttatactcgattttttatttgatacataataatgcatagttattctcaatcattcaattaagtgacgcggccctatttaaaactatctatcattgaaattaaaaataacttggtgtaaaaatatatatattttaagctaattagtaatttttcttttgaactttgatatgtaataaatcatgtccgaactttttttgcggttaaaaattctccctaaactattgagattattaaatttaaagatttttatttaattttagtaactcatatatatctttatacattaaaagttcatatatatctttatgcattaaaagtgcctatataacaaaattcatggtttaaccaattttgttattttttaatatttttaaaatatttcaaatcaaagcttcctattctcaagaaaacgatttaatttgttaatgacttttaagtaataatttatttatttttttataaaaaaaacaaaaaaaattaacatattttatgatgaacaaatcaaaaatacgaatgagattctcatttgtagaaccagctgatttccattatttgttttccttatttttattttcaagatagtccatcgtacaaagaaattaggaaaatacgaatgatttaaaacagtacacttaaacctgtttgacgaagtgtaactggaattgaggcctaaatatgttaaacatatacgcattaattcttccttctcttcatctctctctacgattcttttctatttcctttttatgacattgtttaatgtatacatccaactgaaactctctttattattatataacacttttttattagtttcctgtttttaaaagtgaaaaagtaaaaatgtttttcaaaatcatgttctataaaattgtttttacttttcaattttataattagaaatcaatttttttt

SEQ ID NO: 76365 - DNA, 685 bp, Cannabis sativa
tgggtgagccttcatgcctctaaaaagcctgcaaaagtagtggttttacaaaggtagtggagagacaatggtctggtgtcagttcgatctgacacccaaccaccactaccttaactaccctcctacaatgttgaccttggatgtatagtcatggtgtgtttgattctttaaacctagagtcattgaagctcaagtataaatagccccccctaatacttgtaaggggagttgggaaatcatttataagaacactcaatataatgcaattttcatactctccattaaacacttgtttattttcataaattcttctaagttcatcatactttagtcttttacttaatttgattttctagctttaacttaggtcaccaaattcataaaaaaaattataaaaattaacacaaaattattctctagttatacataaatttttagaaaaattaaataaaacgggatacaaaatttgtatataatatagaacacaataataactgataataattatgtatacatacctgaaagatccgtagcaattggtgcaatttgatagtacaatactatcaactaagtcttcctccctggatctctaaatcagaagaagttatattttctatctgattatcaaaagtatacaattttgatgagacaatataaattaatagagttagggaggggacttagc

SEQ ID NO: 76366 - DNA, 1202 bp, Cannabis sativa
ataataatgttgtttattttgttgtataaataatattaattaggtgatgactgatcctgatgttcctggccctagtgatccttatttgagggagcatttacactggtaactacaaaaataattaaattatatttaagaacaaattactacatatatatacattgctacaaattaattaaagcaaaattatcatgatttatttgatgtaataataattataatatcttctatatatatatattataaaattaagtactattttttaatatgattattaaaatataataagtgtgatgacaaagtttttgggttatataacttattattaaatatattattagacaaaattaattacctataatattcatatataagttattttattactagagagagagattgaaaagatataaactaaaaaatttaaatatatacctaatactatatataatattgataattaatttttttatcctataaaattccgatcatacatatttcttatttatatataatattattcaacttgtgtatagctattttcactttttaattataaatataaatatttatattcatctaattaagctgtcgtataatttgagacactgtacacatcttgatcgatcgttagggggacgaaggtcttaatattaattaattaattaatataatatatatgtctaatctatgtatatataattataaatattcttctttttttatataatataatatataggggaatagtataataataagtatacttaagggaatatatgcaactggtgagaccacacatgatccttacttagtcatcacaagatctcagaatttcaacaaataattaaaaaagtattttgattaattataaagtcatagcaaataatattaaattattaataatatacaacaattagttatcaggtgtccactatatattatattattttaacttttaaggtcgttaaaaatgatgttctctgaattatattgagattgttggatttaaaattttttgtctaattttagtaaaaaaactaacatggaggaaagttcaggtggcatgatttggtagatattaaagtgaggtaatttagtacataaacaatcactgaattagtaaaattaaataaaattagacaaaagtatttaaatttaacaatctcaataattcggagaacatttttaacgaccttaaa

SEQ ID NO: 76367 - DNA, 586 bp, Cannabis sativa
ttgtataaataggggttcaccctgctggaataaacaactaaaaagttcacattcactttctctttctctcttcttcttcttcttcttctttcttctcatctattttatattattttgtaacactatgtacatatataactaattaattgaacatcatattacagtgttgattaaaactatacgaaatgcatattttaacataaagacaaacaaacaatacgatatgcatatttgagcatccatccatcaatttcctatgattcttgaatttttctttccatcttgtatcaaatggatggatgtttttaataaagttttctaacacccttcaaccccaaaacatcatataaatcatttaaaaaaagataaggtaaaattaaagtacaaaagaagatgaatatattaatacctgattagtgatgatcgttgttggtagaaagtttggttctaaaaatttctcctcaacacctaaatctgaaaaattagagattttaatagaaaaatgaagacttaagaagaagaagatatcacattattactatatggaataagctttcaagttgaagatgaatatattaatacctga

SEQ ID NO: 76368 - DNA, 1315 bp, Cannabis sativa
tgttagaccagacagttagagttagttaaagtcggttatgtactgtaactttcagttagttatttctgttataatgttagttgtacagctgtagtttgttacagcttttggtcatctcttatgtacacactctctataaatatgtaataagattcctgagcctctgtattgattcaagctcacttttcatctcatcttcttctcaagtaatatacacgtgagacactcattaaaagatctttcgaatgcaattgtattcatatcaatttaaattatatcgagtgagatacgaccaacacattaggagctagtctgatactagcacatatgttaacgtatcagtgtccaagttgacatctaacatcaacctaaacactttgaacttcgttacttattcttagcatattttaagataccaaggtgacattggtgcattactaagcaaattttataactttcccataagacttttgagaaaagtgtaatcggagccaccattaaatgcaaataaatttttataacatgtctctaagtttctcttctcacctaaacatgtctttaggatgggattttgtattactgcaaattcgttggctcaatataaaataaaattaccattgagagttaaaaagagtaatatttttgcatgcacaatctatattagaatgatatttagagaactaatttattttaatagtcacatcataccatccaacaacaagtaatactgacatgtttcctaccaaactcataaacaatacatgattgcaagagtgtaaaaataagaactatataatcaacaactccctggcctctaccccttatatatcattaactctaagagcataaacttaaacatagacttttcctttttgttggctaaattcattctgccaatgttcccacattactaaccttaattagacttagtaaatctcacaagaattacgttaacaattcttccaagtacgaaatgcctaaaacatgcctgaactatctaataaaatgagtgaataattatgtaaaattattgtcatatcctcatatctcaaccatcacatgctccaattattgtcttctcatgagactaagagaaatatatatatatattttttttgctggaaaagatcacttcattaaacaaggcaaacaaaccaaaacacacaaaaaggttttagatggcaacaagaggtgccaactcctcagcattgaaaaaaccaaactgataagaattaaaggaccacttagcaagcttatgagctttttcattcccggtacgaggaatccaaactacagaggctgacgggatacaatc

SEQ ID NO: 76369 - DNA, 1016 bp, Cannabis sativa
aactcggcttgaggagcaacaactccacagattcccgcttgatgaagtaaaactacgcttgcacccatatctgggccgtggagttttcctgtcagcaaaactcgaagtggcatgaacagagacttcccctgcacgagcatcgttatatttgttagtttgtcatgaaagtttaatcacatttttaagaagcattaaccttgcgctgaaagagtgagaaagagaaaattgaccttgcgcttcagtgttttgccgaagctctttacccaatttttccagccagcatgaccaccttcaagagcagtaaggagttcaccactgtcataagcggcaataaggctggctgaaaaatcagacagattgtcgtccaagacaggtttggcttcagcactgcagacaaaacccaccaaatttacagcacttacagcattactgttgcttcattgcagcaaaaatccccaactaaaatgtttttttttcttaatgtgtgaaaataactgttaaccttagagtcaaggaaagtatctcatattgtacataagcagatttattgaagagtttcccagtatttgatttgcagtgcaaactcaaattgtagaaaaaacagaaattcaaggatgagaaattgaattcacctggttaaagtgtcatgtaaaggataagatagcaagtttgacagttgtttgtctgaatctggtatcacgtcaatcccgtcctttagcaattcaactgcttcctattgtacaaaccacactgtaaaaactcacacacttcgcttcacaggacaaaaaatcttatgatttaaatgaaatatgaagccgttaaatgcaatatgaagccattaattagtttgaagaagaaagttatccaatttttaaagcctctcaactcatggcatagtgaacaacctgtctagcacaatagttatgtataagaggactatctacataaaatgatccacttcagagcattccatataaaattcagtccacaaaaatagtccactggattgcgattta

SEQ ID NO: 76370 - DNA, 786 bp, Cannabis sativa
gttttactggtgttttataaaaacacggtatttttgaaaagatttccgtatgacagtatttttgtaaaagttaatccaaattacagtatttttcgtaaatttcccatttagtatgtgctttaatatctctctccatatatatatgctacttgttaatcgtatatgtgatcacatattgtattcttactataaattcgtacattattactactgattatgagtattataagttataaatatatttatgataatctatatttatctttatcacatattacttaactactaacatatagacacatatatctagagccggtcttgagctaagacaaaggaggcggccgtcttaggtctcccaccgctcagaccccatttaaaaaaaaaaaaattaaaatataattagtaataaaataaataataatacttctaatgttaaatatgtgttgtaccctaatggtaatttggttagtttaacaattaagaggttaagagttcaaatcctaatagcctcatttttttttatgggataagttgaggaatacttattttttgtatccattaatcaaaaataccctcatattatacttcattaaaatgtacctacttttgtaagtgtgttacctaatatatcatcacccttcacttaagtctagcacctaatttttattaacttaaggggtataatggagacatcatctataaaattagatatatcttaaaaaatataaaaataaagataaaataaatatcattaaaataccgaatactacaaagttttatccacta

SEQ ID NO: 76371 - DNA, 2547 bp, Cannabis sativa
ttagaaatatcattttgatttgtaataatttcttttatgttcagtttatacattgttttataaggttggttaatggggttgctcattgtgcaactaagcttattttgcggggagaatgagcataggccatagagtgtggtgtgtagtgttgtaaatagaagaaattacattatatatccattttcttgtatttatttttatttttacctctattttcatattctttaagatattgtacctacttttaaagatgatatcctcattaaatccttaagttaataaaaaatatatgctagatttaagtaggagtgagggtatattaggcaatctacttaaaaaaataggtatatttaaaaataaaatataatatgagggtatttttgattaatagaaacaaaaaaaaatgtatttttcaatttctcccttgtaaatacgtgtcctgtgagccatgttgtcaggttcgaccttagattaaaacatgctaagctcgtgctttaggtccacccaaattcaagaccaaaattttttatatagtatacatttttgtattgaaaatatagtaatttttataaaattttatgaaaagagacccaataatactcacatgttactttaaatatagcatacaaaaaaaaaaaaaaaaaaaattgcagcccattattactcagggtcgaccctacatgttgtgtcgtgctataaaaaaatacgaatcatattgtactgtgtcataaaaaaatacgagccatatcgtgcagtgccataaaaaaatacgggatgtgtcgtaccatgctcggattcgtgtcatgctttactcatgctgacttgttttcttgtacaagctcaaattcgtactccacttttctaaattttatttttagaattaatattagagttaatctcacattgataatgtatggaaataaaatgttatatataagatgagtggactactcctctcatagtcaattggttttgagatggaacctcatgcatcttataattctaacatagtatcatagccaaacaaaaaaattgtctcccctttaacctctatttgagaccttttggtcaatgtgtgctagtctcccctttaaccttaatttgggacatttcgaccaatatatgccattttctaatattgggatctttgacctctttcaaaaattcacaaattttttggcgtgtacactcacaaatttttcgagtttgccttgtgagattccttcaaatgtcacgttcagccctgtggtctcttaaaagtcgttcgttataactacactttccaagctcaaatgtgaggagagtgtattagagttagtcccacattgctaatatgtaaaaataaaatatcatatgtaagatgaatggactactcctctcattgtcagttaattttgagatggaatgtcatggatcttatcaaattctcacaattaatgagataattacaaaaattatatatatttttttagcttctactatttttatataatttttcacataaaattatataaaaaattaattaaaactattaaaatttgaatatttactaataaatatttaaattattattattactactatcaaatataaggtttttcacatgtcgtgcttacaaaatagaatattcgtgcttatgtgtcatgtcttttgagcttgttgtgcccatattttttggcctgttgtgccaatctgtaacatcgtgtcgtgtcgtgcctatgcccatattttttcatatctgatcgtgctcgtgcctcactaactcatgcaagtttcatcccttgtcatacaactcgacctgcatttacaacactagtggtgtgtctattggctaacctgattgtattactccttgttttgatgaaaataattaatatttaaagtctattttatttatatatatatatgactattttaattagcggtggacaacatccaatccagttcaattataaaaaaaaaaatatatctaattacaattggattagattgaatgataaaaattacattctaattagattggatctgttattggatatcattcttaaaatctaattaaaaataattcgatccaattcaattacattatatatattaaagaaattattttatatttatatatgtataataaaaatacatatttaattatatatttactaaatttttgtgtgtgttgaatttgtaactgttgggtgtacaactaaagttctacattggataaaaataggaaggatcttgagtatataaggatggacacaatcttcattacaatgagaccttttgaaaatgtgtcttgaaaataaatccacgagggcttagacccaaagcaaataatatcatatcaatagggagatagatggtgtttgacgatcctaacaagtggtatcaaaatgaatcctcagagtgccaaacaaaggaggtgaagcttgttggtagagctgtcggaggttcagatttgatttgaagggagttcaaatctagctagtgaaaagattcatctagcttactcaagggaatcttgaatgttagaatcaagtgattcgattt

SEQ ID NO: 76372 - DNA, 639 bp, Cannabis sativa
  modified_base (66)..(73): a, c, t, g, unknown or other
gttgctcagttactggattcttaaacaaaaaccactaaaacttatataaaactaatatttacgtgnnnnnnnncgtaactctcatctagtatataaagaaattttatcaattattatgaactttatgtctagtatctcaaattattgagatttttcttttttttttatcagaactaaaagattcaattataatgtaagctaacgaataaaaaaaaatgagattataatatttacaaataccataatcacaaaaataacactactataatattgcttatttatatatgagataattatataaaatacaatttttttttgtaaaaaaaaatacatttttatgttgaaatatattttttttatatttttaccgtttataaaaacaacaccaaaaccaccaaaaaattacatataagtaataagaaaataacatccaaacaatatcaaaataacaacaaaaaaaataacatacaaataataaaaaaataacaaaaaagtaaaaataatacaacataaaaatactatattttctagggatgatgagcatcatccaattcaatccaattgagccgaacattcaatccaatctaattataaaaagttggatatccaattacaattgtattggatgctaaaagttgg

SEQ ID NO: 76373 - DNA, 783 bp, Cannabis sativa
ttttaattaagtatgaaaattttatttattcacgtttttcactaatctcgttgattagcaatgagctgcacagtacatttaaaatcatgctaacacgcctatgctagttagggtgttacaacaaatatggccaataacgtcacaatcgaaagacatgccacaaccaagcaattatataaagacatgacatttattttaatgctctaaatttctaagtgaactcttacaacatgaaaagttacattgacagattgctattaatttcccatactgaaatggtttttttaaggtaccattacagttgctagacatttgtttgccatgttaaaaatacattactgttaagattcctaccatattggtttcttaaaagtttcatactttttttaaattatatgacaactacaatatatttaaaacgttcattataggttcataatatttttggcatagagattatgaagctttcccatacttaaataattttttttaacattggataaaaattgctacacagttttgtgccatgttaagaatatactcctattaagactcctaccataatggttttaaaagttgcataatagcttttttttttaaaaaaaaaaataaaagttgaatgccaaatacaatatatttaaaatgtttattataagttcatagcacttttcgtttcaagattaagaagttttcccatacaagaatgatttttataataatttctacacagttgtgtgcgatgttaaaaattatttctattaaaatttctaccatatttatttt

SEQ ID NO: 76374 - DNA, 1309 bp, Cannabis sativa
tctcctcacttaaattaaaaaaaagttactaaatactttttttatttttttttaaaaaatttaaaaaatatttcaatttttatattaaatatttcatttttttaccacgcccatcaaaatatttacaagtcttattatcattatgaaaaaaaaaagaagttaacactatggcacaataaaaacatttcatgttttgttttttttgagatttcgtaaaaatataattaagaaaaataatgtaaaaaagtacaatatagtctataaaactgtaaaaaaaagtacaattttacatgttttacttttgtgtaaattatgccattgaatttttttcccggataaaactttctcctgaattattcaaaatgtcgggataaaaaagttttgttaagttttattttgtgtagcagacattttattggtgtagttgttgtcatttttaaatgtgtaatttaaattataaactttataattaattctgttagttgttaaatattttttaattatataattttagatttaaaatagttatttttagtaagaaaataaattttataagttttaaattatcttttatgaaaaattacacatttggaaaaattttaacgaacaaataagatcagagaacacggtttagtaattgtaataattcagcggcaaaattgcaaaataaccaaaatattaatgccaaagtacaaagcactgaagcacatttgatattttacagaagtaaaacgctgtcgttttcacatcatttaaacaaacaaaaaaaaaagtttgcgcgcctcatttaaattggcattgaatttaatttccctcctaatttcacttcttatcttcttccaaaagccattttcaataattcaaactccacaatcccctcaaaacgacaattaaatccctattaaaattattgtcgttttattctcttcccaccaaaaacgacaatcaaatccccaccgaaattattgtcgttttcttctcttctcaccaaaaacgacaatcgtcacaaccacattcaccgccaatcgccatgtctttcgtcgtcgacgacgacgacgatttccaggtccctttaacccgatcaacccctactcccaaaaatctcactctctcacagaagaaaccattgaaagcttcaagctttactactccacggccatggaagaaacctaagcaattgagctctgcagcctcttcttcttctttgcatttggggattcaggagaacgagggttttgaatcgttggatggtgtggattgtagcttggattcgataccgtctagttttgatttcacaaaccctaaagtt

SEQ ID NO: 76375 - DNA, 6626 bp, Cannabis sativa
taagtatgaataatttttggtctccattttttttttttttggcttaattatatagattttattatggtaagggaaataacatggctgctcattggttgatgttggttgaatcatatttctaacaagattggttttttttttgtttgattgatttatttatcttggcgaagaaatgattatagaattcggaactggggttttcttttttcttcctcgacgagaaattaataagatatttttgttactattgtataaacaaaaagttgatttttgttgaaattatttaaattttagaagtaattaatggtaatgtgagatctaattacgtctttacttgtagcgcctcttgtttttctcttagcggtttgaggtaatctagttaattctcaaaaaaaagtatctcaatgttaaaatgaggaatgactttacaggggataaatcgacatggtgaaataaatcttttatggtggttgtttggttgcatcaaaagaaattaaaatgttactattgttttcacgtttctgacgttaatttaaacaatctttttccctagctcgtatgaatcttttagaagcagagatttgcagtgtcataaaatgtcaagctaatttctttttgtagtgacagacagatgatatccagtatgctatgttggtttattgataaaaggatgattgatcaagttttgtttattgtcttgtccagttttgattcctagacagtgatggtagatgttattaaacaaagcaagtgtctgattttcttttactctgtttttttcttcctgagggatgtacagtgcatttcttcttgtcggattgctatttttgtctgctttttaaccttatggcgtggtttatattttaaatgaaagtattatacttgtcaatttatactatatgtatatatgtgtctgtttataatcgaaattacaatgctttagcatgtggaattttggatcttcattcctttgtggttgaacgcaactacaaagcttactgtcttaagcagttttgtcaatgccatgcaggtcacgcacagctgttgctcctttggaacgcttgaaaatcttactacaggttcattttcttactaattcacgcatgtacatgccacattacacatttacattttcctcagttttcatgttcatatattttttgtagattggctaatcatttaatcatcatatgctatacaggtccagaatccccatagcataaaatacaatggaacaattcaaggtttaaaatatatctggagaactgaaggtttccgtggactatttaaaggaaatggtaccaattgtgcccgtatagtcccaaactctgccgtcaagtttttcagctacgaacaagcttctaagtatgtcttcttcaatcatattgattaatttaagattgaagttattttcagtttgtttctaaagccactggtactagttaaatggttgaaatgctattttctagtgatacaaactgttgaggtgggagatcatcctactaaagaacagtatgcttgatagttacagtcaagtttagtgtcatgtatgtcaaccaaagttgtgaattgtctttagaatgctttttccatatggatttgcaaattatcattttgttcacggagttactttcttggtaccatgcaatatgggtttttattgaccgagaaaaaggagtggaaatgatatatgatttatatagttgactaatctttaagaaattattcatgattttactgaaaacatacagttttcctgaaggtggattagggaaagcaatgtgcacaattctttagtattaacctcatttttaactagttttaggatttagtgctgaattgtcaatctctgtttatcgttgttcatgtatattgaggcaaatgcatcattgattttttcccctccgaactgattatcactttttgctatgttttccgcagggcaatattgcttatgtatcagcaacaaactggcaacggtatgcctagctttagcatggcaatatttcttgtggttttttgttgatctttggtagtactcatttgtatacttttgtggttgctatagttagctagctgttgatacctgtgactttattgtaacaatggttatgaagttcaatttcttttctttaagtaaaaatttcatataaattatgtttagttagaaactgaaattcaatatccttttctgccatatcattaatcttttaacatcagaagttattataaagctgtcaatatttactttgccagttgtaatgcttgaatgttaagtagagcataataggttggagatgatgttgaattaggtaaagttagacatttcatttgtgttacttaaactctatagacactaagacagaattatatatttcctgggaatataggatcatccaactcttgttcttctatttgcagaggatgctcaactcacacctcttttacgacttggggctggagcatgtgctggaattattgccatgtccgcaacttacccaatggacatggtacgggggaggataactgtgcaggtactttactgaagatgtaactctgtaaggataatttgctgcagatgcttctctcaaagttttagtcataagacgtgcaaatcaaattaacaatcatgtttgagtcaaatgattcatagggagttgcattgtctgtcagcacttccatttaactttattttcttcctaaatgtacagacagacaaatctccatatcagtacaggggaatgtttcatgctctctcaactgtactcagagaggagggcgcaagggctttgtacaaaggatggcttccatcagttattggagtggtaagcaatttttgaactttgtctccactgtgtgcttgtaagtaagaagaagcaaacaaacaaaaagaagttaataccgctagatgattgttaatgcatgtagatttttccttctttacactaaattatatcttcgagtgaagcctctgatgttctttttgtgtaatgcttttgcatctcgtttcattttacttggttattgatattattatggactggcatagttatattacatcatagtaatacccggatccttaggttcatttgttgtcaacatgccaatggggtcaataaacattaattggattcagcccccaaggccaagagtacccacccaatcttacacatgaaacccctttacttttccccagcgtctacagaggaaaattcactcgtctgcctgttcccatcttattgaaattgaaaaccagtcagaaacttcatctattctaatgcaacctgaagctgcttcggcttgtgctagatcagatgcacttatagaggctctgcaattgttcaacaaatcacctggtctgagtgtggtatctgccactgccattattggccaatttattcggtggagtcgccataaagaggctgttcatctcttttcaagaatgcttgcatcaaatatcagacccaatgagtacacctttggcactctatttccttcattaactgctttgagagacattcgtataggtaagcaacttcatgcgtgtgctatgaagatgggtttgcataaaaatgtgtttgtgggaagtgcacttttggatttttatgcaaaattaagtactatagatgatgcccagagatcttttgaagatactcaatccccaaatgttgtttcatatacgacattgatttgtggttacttaaagaaggataaaactgaagatgcttgtcgcctttttcaatcaatgccagagagaaacattgtttcatggaatgcaatgattggtgggtacagccaaacaggccacaatgaagaggctctgaatttttttgttcagctccttagagaaggttatgtacctattcaatctactttcccttgtgcaatcactgctgcagccaatgtcgcatcacttggcattggcagaagtgttcatgcctgtgctgtaaagttcttgggtaagcctgatgtgtttgttggcaattcacttgtgagcttttatgcaaaatgtggaagcctggaggatagcctcttggttttcaataaacttggggaaaaaaatattgtatcttggaatgctgtgatatgtggttatgcacaaaatggcagaggatacgaagctataagcctttatgaaagaatgcaagtatcaggctgtcgacctaatggtgtcacacttcttggcctgttatgggcttgtaatcacgctggccttgttagtgatgggtattcttattttaacaaggcaagacttgaaaaccctagcatgctaaaaccagagcactatgcttgtatggttgatttactctcccgctccgggtgtttcagacaagctgaggagtttatatatgatttgtcatttgatccaggaattgggttttggaaagcattactcagtggctgcctgatccactctaatgtggacttgggagaattggcagcacacaaaatcctggctttggatcctgaagatgtgtcgtcttatgtgatgatgtgtaatgcacattctgcagctggtagatggcagagtgcttcgaaaataaggagaacaatgaaagaaaagggaatgaagagggttcctggttgtagttggattgagatcagaagcaaggttcatgtttttgttacaggggacaagaatcatcagcagaaggatgagatctatacggtgttgggatggcttatccaaaatgttcaggaggatgaagattatgaattactttaagaattttaatcaaaattcagcaacgtgaatcaggcattatgcaacaaagtggactattaccgttataggttgagacacacattgctgagatatagcctgaattgagcatctttacagttgctctacttaagaaaagcgattttggtaggagtaggaggcatgacactgtattggtcctatataagtgagttggccatatcctctgatgtttttgtataagcctgataatttaccattaacacaaactatggctcatagggagatcagctatgcgtagtacaatttattattaacttcatgcactgcgagctatagtgtttacctttcaattgcttcttcatatgcccttaacctttgctttcatttcttttcacacggaaacttatcctcgtaaattgattgcaggttccttatgttggtctcaactttgctgtttacgagtctctcaaggattggctaattacatctaagccctttggcctcattgataaatctgacactgagttgagtgtgacaacaaggttggcatgtggagctgctgctggaactgtcgggcagactgttgcttacccacttgatgttattcgccggagaatgcagatggtgggttggaataatgctgcatctgttgttgctggtgatggaaggagcaagggctcacttgaatacaaagggatggttgatgcctttaggaaaaccgtccgacatgagggctttggggcattgtacaagggattggtcccaaattctgtcaaggtcagtaatcagtgtgtgtgtgtgtgtgcatgttcgaattctgtaattttaggtttttaagttatgataactaatatatttgatttgattttcatttatcaggtagtcccgtcgattgcaattgcatttgtttcgtatgagatggtgaaggaaatattaggagtggagatcagaatatctgactagagaagaatgaagtgggaggatattcgtgtgttatttttgtaggaaaggggatagagagatggtaaaactaggggtaatttctttctttctttttcttttgtcttgccaagttagtagctggtattgagtttgttgtttataaattgctgtccctttgttttctgtctttgtttccttgtgaacacatatatatgagtaggtttcaactcctcatttaatatgtatgccaataaatgtttatgacactttcataaaatgcatttttgcatgcatttccctctacaagagttaaatagaggtgaattctccatttgtactgactttatataaatttaagtctctttccaaatgcttcacttccaactactctccacttctttcttaatatattctttggtattttaccttgtaaaaatatctctgtaaatttatttacctttttttttaactgatattcagtttatgtccatgctagctattttgatttatatgtagaaagaaataaaaaaaaccctagtatattactgtagtaccatggttgtcaccctaaatctgattttaatttccttattcagctttttcattgttagtatagttctgtattttgaaatatgaaactatgattagtatgattgcaatgttatgcagtattcaccaaaaggtttcgagtctcttaaataacagtttcctactaaaactaacctgtgtattattttaaaaatatcagattgttagtttcttcaataaataaataaataaataagaaatcgtatcattatcattagttagaaaatctaactaattaattgatttaaatttcattctatgataacagtcttaataatactaaatattatagggaatttcgattttatatacttaaaattttttattattaaaccaaaactctaaaccctaaaaaaactatgacatgttttttcaaaatcccaaaaatacc

SEQ ID NO: 76376 - DNA, 1470 bp, Cannabis sativa
taacattttattgtgactaaaagttacatttagtcacaaaaaaattaggttgtgactaaaaaattatcactaaaagtagcagttttttgtagtgatataatatattataataatgtgttattatatattataataacacttatgcctttcagtaattctcagtatattaaggtgtgtctattgtcttatttgtcttattgtatcactactagtataattaagtattaaattctatataatttaatataataatttttatagaatattgataactaatcgcaaaatgctatctctaaataatgttagtcactactagtagagtcggtccaaacattgagcagcttggattgcaaggcgcctagttaccaagccgtttttcttaatgaaagacaagtttaaggcccatcctgatattattagtgtctaatagcaatactcatcttataatctaagtaagtcttgtaatgcatcgatctctacaaagtaatatatagcttatgtattttttgaaaagagaattgttaaaagatattattagtatctaacactttattgggtgtcatattactattagtgtaattaaatagtagatctcacataatttaaaatattactaaccaatcgtacggtattattggtgcctaataacaatactttttgaaaaatacacaaaataataatatatagttgatgtatatatataaatataaataatggaaaagatgatgggttattgagaagaagagaagagaatgaagatgagtcagtaggcgtgcggttatgcgcgtgatcctataactcaacccctaacctctttgtttttttataatgtaaattaacaacaaagattcaatgatgatgagtagtgtttttctatattatatattttttgttttactcattggattaattgattattattataagtagtgcttgagttgagaagtccaataatgtttttaaaatttcaagtaaggtgggtataaatacaaattagaatagaacaagtgtgttttcatggctcaagtttcatcaactagctactatactactactgcatgctctcattttgttctgaccaatttctaaccacaatgacaccatgtggctctttcccatgccatttttaatattcaacaaaattatttattattattattgttatttaaaaaaattgttaaagaaaattttaaaggtacaacactaacatttctcaaaggttacatgtccttgtgttactctcgcccaaatgtgtttaactaatggaatccggtacattagtattgatattattacactcaaaatgtattgtgcgatataatcatttacatcgaacctctcttttcactcaagttaaataaaaaaattatcaattacaaaaataatcacccaataatgaatcagaataaatatcaatccaatatatcattaaacacctacaacatttaattataatttgtacattatggt

SEQ ID NO: 76377 - DNA, 1121 bp, Cannabis sativa
tggataatgttgttcgcagcctctcccatctttgttgtagggttgaaaatttagagaaagtttacttagaattacaacccaatgttttgaaggaacctagtaaagattgtttgaaattttcccgctctgaaccatattttactaagagagagtttggaatggacgatcaagattatcattgtcattacttgagggattttgatcctatgattattgaatcaaatattggaagtttggtggacaatgacaataaagattttgttatggatgatattgagaaaaatgaacaaaaagacaaagtaaacatagttgagagactaacacaagataagggagatgttgtgtcaagtgtgttggagtcaaattttagtaatatgatttcattgtataagaccagtaacggtctgagggtcggtgcatttaatttgagtcatcgcttgagcgaagaagaattttccttggcgttatacatgtttgatcctatactaagtggaaggtaattgatctatatttagacattttcatttgataaacttacattagcattgttttacaatgtttgtagtttattttgttattttttttagtgaggtgttagtggagaatccacagtttgttgtgcaaagaatacattttctaagtttaaggccacaccatcatgtccatcgaaagatatgtgttataaaagtttgtttttgttaatatttgctgcaaaacatctaatatatattgtattactgatttttttgggtttttttttggtattagataattgatgcttattcaagttttttgtactttattcatttgagaaaattacggtcgagcaatacatctaatggaattatgtttctccccagtttttatcctggacagtaatttatttattttatttatgttgattatatttcatcttgggagttagtttgttagatatgtattgacctgttataacttagtgtacgttttgagtttagctcactcgaaagagtttttgtgagatggttgttaaatggtgtaaatgtggtgaagaagagtcatggaaaacattgattgtgcggatggaattggtatgtaacatttaaccacactttttgtttcttttgacccaacttaatttt

SEQ ID NO: 76378 - DNA, 870 bp, Cannabis sativa
caaaaatattatttgtaagaaaaataactaatgtattaattattattttactcattaatgcatgacaaattaaaagaagaagataatttaatttttattatgtaattttgtttttgattttatttatttaacttttttcgttataatttattttaaagatatattaattatgcattccaaatgagaatatttttttaagaaaaaaaaaactttgactagaacaaagagttagtccttaactttttatttcttcattttttaatttcttatctttttgacaaattgaaaattcaaacttaattaatttggagctaaactagtaaagcttatgttgtgaaagaggcaaccccaagaggagtactaaaactaatgaactcaaagatgttgaccatctatcatgtcaagagtcatttgcaggtacccaacagcacttgtttcttaatttctaactatatactaattttctcaccattacatatgttctttttcttctaaataattaatataaagatatatttatacatatatttataataacctttcctcatacttgtagaaatatcgatgttcaaagtatttcgaagaatatacaaagggtacgtccgtaaatcgctaaataattatattagcaacatgcatgcataataaatattttaagactgttatagctcatcttagaaagaaaaaaatgctttaaaagtataaaaataaaaacactcctaaaatatttttttcttatatatgtatatatgactgtaagcttcttattattgcaggaaaagttgataataagagatttacttcttgtgacacgcctcagttggatatgaaaatgtaggtacaaaatgcatagatacttgtgctaagcta

SEQ ID NO: 76379 - DNA, 693 bp, Cannabis sativa
attctgaagatacacaagacttacacataaaggagtcgaatattgatcaaatcggatgctgtttagaaaccatgcatatggaaaaagagacacattcagacaaccaggtagtttgtaaattttcaaatattgttacgttttggctttatagactcttgtgtctgggattttttttttgtttgtgattttgtgtaacattagttgaaattgaactgattgtgttgatgaaggtctcattgattgaccagtcggttccaccaagcagttcgtatcgtttagtttcagtggtggagcactttggaggggctggcagtggtcattacactatttacagaagcgtgagagctgacccctgtataaaagaatttgacgaaccacaagagcctgattctttttgctggttctctatttcagattctaatgtgtgtagggtctctgaaaaagaggttcttgcagctgaggctagcttgctgttttatgagaaaatatatgaaggttgactgatgtgccttctctatatggctggttaatgttatataacatttttttgctttatgtagagttataagaactattcctaaaaaaaaaggaagaattattattttttttttgggtaatttgcgttgactaatgtggagatacctctactaccactagatataccaaatcacagaaaaatagatgaaaactgaa

SEQ ID NO: 76380 - DNA, 633 bp, Cannabis sativa
catctttatgctttcttggagaggacatatttaagagagcctatatcttctccaggtttgattcgaatccttggaagctaataataaaacttagaaatttccctgaggaaactctaaaggtacattttttttttcaaattcagcttcataccacacttctggatcatcgagaaatcctcttccaaatcgttggtgtcctccccaacaatctttgacttcactagcatgttgtctacataatcttccatattttttcctaagatatctttgaacattttgttcaccgaatgttggtaggtagccatgacattcttaagcccaaagggcattacaaggtagaaatatacacttttgtcagtttagaagctagtgtgttcttggtctgctacatgcatttttatatgatggtagccgaagtatgcattcataaagcttagaagtatgaccttagctttcttgacgctaagagtaaatagtacgtcaccttttccatgagtgggtatcgaattttaatgtcaattagtctttcctgatgtagtatactagatgctagattttgtcttcttctcttattaggactgcactcacagcatactctgtgatggccaagtacacgcctaattcctcattgtc

SEQ ID NO: 76381 - DNA, 4337 bp, Cannabis sativa
  modified_base (101)..(101): a, c, t, g, unknown or other
aaatatttatttaataaattcaaaatgaagtctgtagtaacaaaactaaaagaaaattacagttttacaaacattgagtacttatgccactaaaaataaanattgagtttatgccgcttacaaaacgctatttaccctttatatttagtatttgaaatcacccaatcatagtaaaaagggaagaggagcctagtttgaaaaagcacacaaaagtaccacgtcatcctcactccactcaaaaaaaaaaaaaaaaaatacaaactttctcacttacatttcaaactagccgttacactctccattccttttattcaaaaactcattttcaaaaactcatctttttcttccccaaaaccaaaaaaagctcatctttttcatcaaattctctcgaatcgaatcaaaccctttactgattctcatcaatcaagcgtgatttgcaggtaagttcatacaaatttgatcccaaaacaaagaattctggttctaaagattatgccttttcttctctatctgatgattaattatacatatatgtttgtttgtatagtgagtgagattattgaggagcaaaacaatgtcagttactcctgatctgatgactaggaaagtgggtactatgggagggctttccccatctccctctcctttcctcactcctcgtcccgaaaggcggcgcttaatggattcaagaggggttgattggaatcgccatgatagggataaagaagttaatgttcaagttttgcttcgatgcaggtactcaatcactcccttttccctcttttccattaagctgttgttcaagtgatccttgaattacactaagcgaccccattaggtcattattcttaagctcaatttttctttttttaatgtcttttgtgtgctggttttgagtgtccctagtgatagatgttttgtgtgctcggcacgctcttcgggtggatagagaacttctgttagatgtgggatttttaatcttttaggctttatgacattattatttctatttttaatgaatttgttcggtgggccactatggctgcatataaattagctcggtatgttcttcgggtggaaagagaacttttgtagttagatgagatcacttatatctgggatttataatcttttaggctttatggcattattatttctattttttaacgagtttttttattgccataaaaagaaaaacaaactcattttgtaaggctattcatgaattcagttgttcatacactcaaggtgggtggtgaatttgttttggatggataatttatcatctctcttattggatttattgcactttgattattttgattagtcaaattatagacctttgagtggtgaagagaaaaaatcccattattactcttaaactcaatttctcaatagttcttttttgcttatttatggattttagaggactcaaaaccaacccattttgtttgattgatcaaataatagacctttgagtgatgaagaggcaaaatccaatgtgcaaagagtgatctcatgcaatgagcaaaagaaagaggtgaccgtgttgcagaatgtagctaacaaacaaatagatagactcttcacctttgataaggtaagctttttctttgatttcaaatcaccccttatctatttttcttctttaattgtattttttggcttacttttcatcatgtgttcaaggtttttgggccaaaatcacagcaaagatcaatatatgaccaagcgatttcgccaattgttaatgaagttcttgaaggtttcaactgtaccgtctttgcttatgggcagaccggaactgggaaaacctacactatggagggtgggattaaaaacaaggtaaaatattatgttacattctaactaatcattttaagtttcatataatcatatcaagtagtataatgatcttgttgttatcttttgtagggtggtgatctgtctgctgaggctggtgttattccaagagcagttcgccaaatttttgaaacgcttgaagcacaaaacgctgactacagtgttaaagttacattcttggagctctataatgaagatataaccgatttattggcctctgatgacacttcaagatgtccagaagacaagcaaaagaagcccatttcactaatggaggatggaaggggttgtgtggttgtgagaggcctcgaagaagaagctgtttacagtgttagcgaaatctacaatctcttggaacgagggtctgcaaagagacgtacagctgataccttgttaaacaagcatagcagccgctctcattctgtgttttccattactgtacacattaaagaagctaccattggcgatgaggagctgatcaaatgtggaaaacttaatcttgttgacttagcgggatcagagaacatatctagatcaggtgcaagagaggtatggcatgttatagtttgtttgttcatcatgtcatcaaagtttaggataatgtgtcttacattcggttgaataatgtgatagggccgagcaagagaagcgggagagatcaataagagcttgctcaccttgggccgtgtcataaatgcgctggttgaacattcgagccatataccttacaggtacattttcatagcatactcacattgtcattatgtgttttgttgttaagacatgtatatgaaccgagttttttctcaatgcagggatagcaaactcacaagattgttgagagattctttaggaggaaaaacaaaaacttgtattattgctacaatttctccctctgctcattctttggaggaaactttaagcacactagactatgcttatcgtgccaaaaatattcgaaacaaacccgaggtttgtttgtcacaacacattatttatattgcttacttgattgtactattctcttatgcttctatctctttctaacaatgtaaattttatatttgcaggcaaaccagaaaatgtctaaggctgtgttgcttaaagatttatatcttgaacttgagagaatgaaagatggtgagtaatacattttcatacttgagaattggctttttgttatacattttcttatcttgacatgattgaaaatcagatgtccgagctgcaagggagaagaacggtgtttatgttccacatgaaagatttgtccaagatgaagctgagaagaaggtatattgattctttactcaataaatttttagatggtatttttgctatcatattcatacttaaaatctttacaggctaaggatgaaaaaattgagcaactagagaacgatctcattctatcggagaaggtaattttatatttttagatggtatttttttttcactaagatcatatctttaccttagttatgaatatttaatatcttgttacagcaagtggatagctttcgcgagctctatgtcaccgagcaagagcaaagattagaccttcaaagcgagctcaatgattgcaaagtatgtaacatgaactttgaacttttgttaactgcttagttccctgatttttgtttttcattgaatcctaaaaactatgttttgtgtctgttgtttataggtaagtttggaaactaccaacaaggcattacttgatttacaagaaagctatagattggcaatggaatctttgaaagagaaggagatcattatatcgaaaatggtatcctcaggtcaggaaattcaaacacattcctagtcattctctttttccatttgtgacaaatattgatgatttgttttgatctgtgttcagaaaattctttgattgaatgtgcgaagggattgcgtaatgatttgcagtatgcatcagatgatataagttcattgttcacaaaattagatcataaagataggttggaatcagaaaatcgaaacttggttttgacattcgggtctgaccttgataagagtttaaaagaactccataaggtcatcattggatctgtttctcaacaaacacagcaaataagatcaatggaagaacaagttcaaaccaactttgctactaaatttgatgtaagaaaacattctaataccattgatgtgtattgattttttttgcattgtctaacaaatcaagtgtttaattttacaaaacttgttacaggtgactcaagtaatgaagtcgaaggttgagaaaatggcggaaacatactgctcgggagtagcaagcttgaaagaactcgttgacatgttgcaaagaaaagcatcaactgatttgaatcagataaatgatgtggttgcatcacaagcaactgctgttgagaatgtatggtgtttttaaccgaaaaaatactaatttcgttcttcttttgaaatttgcttgtaaatcaatctttgtctac

SEQ ID NO: 76382 - DNA, 616 bp, Cannabis sativa
gaagatttgctcataactttttctgaaataaaataaaagtctaaatcaatatgcttagttcgagcatgaaagattgagttagtagacatgaaaattgtgcttaaattgtaaagtttttgtggattcatggaataatgcaacttaataagcaatgactaaattgaaactacctctattatagactcatatattcaacctctgtactagacttgaagatcgtcttttgtttctttgaggtccaaaaaccaacttgttttgattcaattataaatttgggagaaagagacaagggaaaagaaaaccatgaaaccacaaaactagctagtatcattgaatatattattgagggtacaaatgtttaagggtgacaattcgtgttcgcagatcgtatttgtgtcgtgttgagcccatgtataacaagtatatgctcgacttgagcatgacctatttaataatagtgtcagaaaataaaacccgaataggacccgttgataaacaggttgacacaacacgatccgtgtaacccgtttataagcatattttgtttaaacatatcaactaataacacgtttataaagtattcaacaagtttataacttatttatgacatgttaaa

SEQ ID NO: 76383 - DNA, 548 bp, Cannabis sativa
taaattttaatactggccatataaatattatataatctgttatattcatagcaaaattgaaacgagtaactggcaaaaggaaaagtcaatttttccaaaaataaatcatttaatcaaactatccataaaaaaaattctcctttatgaaaatttttctaaataaaaatgacaactataagaactaaattgtacacaagaacacaatatttaattcgcattgaatggcagccgggaagaggtatgtatgttgaagaactcgaaaacaatctgtttctttttcaattctatcatgaagttgacattgaaagagttttggatgggagcccttggacttttgatcgtgtgccattaatatttgaacgtgttcaacaaggtcaaaatccgagaaccatcatactaaataaacttgacttttgggttcaaatacacaacctatcaacaggatttatgttgaacgagtggtgcgggaccttggaaactatgtgggaacttttatcagagcggatccaaacaattttattggcgtatggcgggattacctacgggtt

SEQ ID NO: 76384 - DNA, 784 bp, Cannabis sativa
atttttcactataacaacatgatcttccctggcacgagcgggatctatggagattaaggcatggataaatttatgaatttattatttattttcacaaaactgactatcaaatttatatgtacatagacagaggagttggcaatgggaggaaaaatatacacaacatcttcaaataactcacctttaatatattactgtgcaattgagcaacaccattgacctacaaaaaattggggtatcaacgagtccatattaatttgaaatgtaattaaataaacagctaataaatgaagagttaaatgactgaacatggccggtaaaaatgaatagagacgccagagaaaaacataattattttacagaaattgtattcagttggttatgtttggtttggcgcaagggtaatcgaattggaatcaccattacaattgtattatttggttttgaaagtttacatgtatacgagaatacccaacaacataaaaagtttacacactaattttacatgaaatattgcaatataaaaagggtttaaatattttagaatcaatgttgtttagagtttaaaaatagagaggaaaaaagttcttttcagtaattcatcaacttaattcatacagaatgaggaccaatcagcatctttctactcttatactctccaaaattcacaccccaacaaacacaatgcatccttaatcgaaatacatatgatgaagcacaactttaagattcaatattagaataacgaaaaatcattttagcaaactgataatattgttaacat

SEQ ID NO: 76385 - DNA, 824 bp, Cannabis sativa
cccgtttttttttttttaaaaaaaaatcagtttatttatttgtctttgtcttgaaaggtgcattgttgttatttttcatgtatactgttatttgttttctataatcttgatctacaaaaaaaaaccaagccacatagccataaataataaataaataaacaaaagttgaatggaataacagagatgaaacatgaagtttgatcaataatttataagcttatcactaaggtggcatttggttggaggtaataaaatggaatggaatggaaaggaaataattttcattccatttctttgtttggttgcatttaaaactattggaatatccttttaatggaatgacctttccatcattttggtggaatgactcttatatattcattttaaattttattcaatttcattcctattccaattcttatatattcattcctcttaaccaaacgccacttaagctcctttgaaaagactcttcctttatttcccaccaacttattattattattattattaaaacatctttattaattcaatttttgttataaaaatactatatttttagttcaataattttgatgagtgccaaaatacctacaatattgaatactgtaaaaaaaaaaaaaaaacaactgccattgaaaaagctttatatatatatcctcttattgtggccttaaggcttatccatatatatagttgtgtcttctagggaaaccaaatatgatattcatttatatatatatatatatatatatgagtgcaatcttaatgggtattactcattaatgggtaatattaaaaaattttgagtttttatgattaat

SEQ ID NO: 76386 - DNA, 523 bp, Cannabis sativa
  modified_base (28)..(43): a, c, t, g, unknown or other
tggtccacgtaatattagttttaaaaannnnnnnnnnnnnnnnaaaaaaaattaaaaaaattattaaattaattttttttttcattttcttctgtcatagctaatgaagttttttcggactcttgaattttggaatctggttgttcatttcacatgtgcccgtattaggagtgctttgatacttataaggcatatgatggttgtactattttgatgggcagtgattctagctctaaagttgttggaataagaactgttaaggtgaagatgtttgatggtgttgtgagaacactgattgatgtgagacatgttccaaagttaaagaggaccttaatctctttgagagttttggatactcgtggttatgactattttgcaaaagatggtgaaataactatcaagaaaggtggcttagtagttgtgaagggtcgaaaagagcaaattttgtataaattagtcgggagactattttaggtggagctgtgaaggtggagtcaagtcaacactacaaaaaatcttactt

SEQ ID NO: 76387 - DNA, 877 bp, Cannabis sativa
taatgagaagaggcccggaccaaagcacagagaggaaaacaccatttggatcaaaatagttttggccagcgaagctcttccagttctttccaaggaaactattgagcctctcagcaagaaatacaccacccactgcacagtattgctgcccaagtaagaagcgattttccatagcatataataaagtagttgatggaatgaaaagacttgtattcggaaaaaagactaacgaatgttttaatgtccaaagtctaataatgttaaagtttgtgttctaatcaagcttttattgctactcctacctaccacctaaagattgtagggtacagtgggttgggatgagaagcactgaaaaagatgaactttgctgctatgccacagaagagccaatgtaaatcccaaccccttcaatgccagattttcagttttagaaatattttaaactatgatacacaatatagaggacaaaagaggctactctagcacaatatgaaagttcagctagagtaaccgatgttctaactgattttgtaactaaccaaactgttagtaattaggtgttatatgctaagacagttagagcaactttttattcttgtaagaactttcatataaataagcttaagtaatgctcatttactaatgaatgagcgcatgatccacattgctttctttcaattgattcactcttcccggtttataaattctcaaagctcctggttttttacatgcatcaataaccataaacctttgctcttaagaaaaatgttattatggttgaaacattccaggttccaccaaaaatcagcaatttaagttcagaagacaaaatttaaaggtagtagtccaagtccaacattacaaaaaaaaaaaaaaa

SEQ ID NO: 76388 - DNA, 759 bp, Cannabis sativa
ttaaaatattatgaattcacgtgagcaaccccttttctttaattttcaacgtgaaatcttttgcttttaggttaaaataataatgaaaaaaaaaatgaataaagttttgatttaacaaagttatgatacatagcaacgagaaaagttaacgagagtcgcataacatatacgctttgggaatctttggatgttgtttaattggttttgtggtcatgaaagggatctgaatcaaattattttccctttataaaaaagtcaaagtaatctaactttggtgaaggtcaaacattttattagtttaatccacggcatctgatcatatctgtaaagcttacgtgtttggctgatgtgattcattatcttataataaagatttatgtgctggctgatgtaatacactgagagtctggcccagatcagttgcccaaaagttccatgtgagattttttttttttcaaaaaaattgtttttaggaataattagaattgagtaattataaataaacttctaaatttataccacatattatatatagtagataaatgttacttgacaaatcatctatgatagtgttacattaatttttagttatattttaatatcatcattaaaagtgtcgttaaataggcacttttaatatataaagatatagaaaactcctaagaaaatattactttataattaattaaccgtttgtatattatttattaattttttttttctaaaaaatgtgtggaactcttgtaatagttgagagtt

SEQ ID NO: 76389 - DNA, 712 bp, Cannabis sativa
tatatctatatatgatggaatcgtatttttcttgtctcagtatatatgtatatatatatagaaaagatgagtacactaacatgaatacactaacgttagtgttaacgttatagtggagagaaaaaaggaaatagtggccaaagcataaaaataggatcacaaatatatatgctatatactaccaagtcaataaaactaaataggccacgttttccttttgaaatatatttataattagttattttatttacaacaaacaatttgtcaaaaaatttgtttttggtttgatcattgttgtattgttttgaattggtggagttcaaaacatagcgataccaaaacatagagatgatatccattaaaatctcgatcttaagagttggagttttgggtattctaccttatttttgattggtgggttgtttgctttattgagaaatctgatccctaaaattatgctgcagttcgatttgagaaggacccactaaaaaaaatggcagaaggagaggaagatttgcccagggatgcaaagattgtgaaatcgctcttgaaatcaatgggcgtggaggactatgaacctcgtgttattcaccaattcttggagctttggtatcgctatgttgttgatgttctaaccgattcacaggtttactcggagcatgcgggcaaaggtgcaatcgactctgacgatgtcaagcttgccattcaatcc

SEQ ID NO: 76390 - DNA, 947 bp, Cannabis sativa
  modified_base (339)..(349): a, c, t, g, unknown or other
ctaataggaaccattttgtagactgtataagagtgatattttattaaataataaagaacatcatacaactttgtattaatgtcccacaaactcttgactctatagtacgtaattctgttttagaaatgataaataattctgtaaaccaacacgaatatttttaatgtattttgcttcacttgcacgtttactccaagtcaagcacgtttaatgttctcaagtgatgagctactgcaaacaagatatgcaccttgttgatatatgtagtaccaatcaattcatttaaactctcttcaactgtgtagtttcatacttacacagtttcaaaattatcacacnnnnnnnnnnncaagtaatgtgggattgcacaactctcagtctttcctatacggatcacatgactctatctgtcagaatattaattattacgactataaattttaatacaataaaaattgtatcatttaatacataacaaattgggacccaaatctcgaccccgacctcagaccctggacccaaacccgagagtcagccccggatccaacccgaatttggccctagactgagaccctagactcgacccgagccccaaacccagagtgaaccctaaatcagacttggacccgaacttaacctcgaaccctgagcttggacctagaacctagtctgggattcaagattgggtctgagttcggactatggccagagatgggatctaggtctagggacacagtcgggattggggtcgagtttatgataaagacaatataattttatacatataccaaatatagtattgtattaaatactaataaaatacaatatagtataatctaacacaatataatacaatgcaatgcaataaatataacacaatgctatacaatacaatacaatataatatagtgtaccaaacgagcccataaaagtatattttgtaaata

SEQ ID NO: 76391 - DNA, 1089 bp, Cannabis sativa
agcagagtctttttgttcagacataataatgaatgagataaagaagaagagaatgttaattggggtttgatttgtgaagatgtgagaattgaggtgatattatttataggggttactgtactgtgaatgtgagatatatatacgttgcttgagaagatgaatgagattgattgaaggtttgggagagaaggaaagggattgtttcccagtattgacttggtgcacctcatctatcttcatcaaaatcataatcgagttgtatagtatggtatagaagagaaaagaggcaaggtttggtattcttcaaaggttgggtaatcgccggactttcatttcctttgtttattcaaaactatactaacgcttttccaaactgtatcatatgccaattggcaagtacacatgtcgcaattttgatttgccacgtggaaataataatccaattgaaacgcatatgaacaacacgtggactaagatgagttagattcctacctatggccccaattcaaatgtttttttttaagttttatttgctacccagaaaaatataagtagagtaatgatatgttcatacaaattttacacatattttcgtaaaaaataattttaactaattatctttactttttttttttgaaacatgaaatatcaatttcattaaaataaatcattcaaattataaattggcatgaaaatcagccagaacatcaacattatgaatgttacgatcaaagtaaaaacaagaacgccaagtcacgaagtggacaactttatttgctgatcgtttaataaaacgaagactacattagatagagaggatagaagagttttacaatcattagtaatcaaaccgaaaacagaagtcatttgttgatggctaaaaattgcctgaacagtgagtaagctattagtttccacctctaccatattccaacttttgcctttgaaccaactaagtgcctccttaacccttaaagcctcaactacctcggcagagaaggacccatgagaatacttagccataaaatcaataatcctacttttcgagtcacaagctacaataccaaacccatatgcattgtctttctc

SEQ ID NO: 76392 - DNA, 914 bp, Cannabis sativa
gggggatgttctctcttggagagagatggtcttctatcatctcctctgtctccttgtttttcctgtcccttctagtgcatccctaggtgtgttagtggccttcctcccttcctcttcctttatgtgatttctatttttcctgccttttagttttgactttagttttgcctctcttctcaccttttccttctttctttgtctcgttgatagttggctgtgtgtcctttctctgcacgttgacccgtgtgtgggtatatcctttgttcttgagtgttgtttttgttgtcttttttgtgtcttcttggtccctcctttgctttttcatttttgtcttgtgctgtctggttggtggggttagtgtgtttcgttatttgtttcggtgtctactgcctttattgctatggagttggtttgtcatcctgagtcagtggttggtaagaatatttctctttctgaggccactattaatttgaatcgtagtgtctcttttgtcaagtgtctttactccctttgtctacttgggaaagttgctggccccatttctatcgatgaagctagtcccaaaaattttactgagaaggaatggcgacgccatgtccttgttagtttggtcccgggtgttgataaacggtccaacctctttgaactgatctttaaaaatcctgaagatagaaagtgggtgcttgataatggcccatgggtagttaaaggatctcttcttctgctcaaagtttggaatcctctctctgctatctaacaatttttcggttgcttggttgtaggtccagatacataaccttccatttgaatttttttccagtgacaatggtaagtgcttgggtgccttgaccgattctgtggtggaagtggatttggatgaaagtaaacccgcttcatggtctaaatggctcaga

SEQ ID NO: 76393 - DNA, 2185 bp, Cannabis sativa
  modified_base (1020)..(1051): a, c, t, g, unknown or other
ataatatttttgtatgcagcatactaattattaatgctttttcatttttactatatttaaaactaattaaaaatatatatgtatgttgaattcaaattccaatatctgtaaccctacccaaccattttttctttattatttataaaatagcattaaataatcaataacaaactacttttcaaatatccactatataaatagcattaactaattataagttcaattcttatcatatataattatatcaacctatatttcaaatatcatcacatcataattgtaaagatgaggaaaattaattgtattttcttcttgtttttgctttcattaatttgtactgaatttgaattgagtgagggtctccgttttggtgattataaattttgctttaaagaagttgcaaatgtagcaccatgtgcatttgaaatatctagttttaatctttggaaacgtccaataagttcatcttgttgttccaaaatctcaaaggcggctgctactaattgtgctcttccgttaccctattattggtttgtaaatagccaaacttattgtactgctgctctttcgtcaccaccaccaccaccatcacagccatctccacttctaccaccaccaccatcacgaccctccccaatacttccaccaccaccaccgtcacggccaacgccaataatacttcctgagcaacccgccaattatcacatgaaaaattgtccagagttcaacatcttgccacagttgtgtattcaacagttttatgactactatattcacgatcagccgatcagttcttcatgttgcacgacctatcttagtgtcttcaacacgtgtactaaaactccatggtcgaagatcagcctcaaatgccatgattattgccaacaccaactctcatcaccatgaaatgctcaactagcacccactacctagctagggtttcatatcttttaagtttttaatattttaatcttggtagctattattattatagattttgctttattattattattattnnnnnnnnnnnnnnnnnnnnnnnnnnnnnnnntattattattattatttatgatttcttgatagaaattttcattattaattagttaagaaacgtttttgtgagaattttattttatttgatttgtgatagagtaaattaaatcaaattgaaaattgctacatttggaacgtgtctaaagtaaaatctatagagtgctagtacaaattaatgaaaggaaaaaaagaaaaactacaatacaattaattttccagtatcaaaaaagtaatgcttacaaatggtcaataaaaatctgaaaatatggggaccaacatatctgccaaaataatctcaaataaaatttcgatgagacactcataaattaatagaagaacactttctatcaggaatagaatatttttattaattaataatatgatatgataattaattaattaattaatgtgttcttcaacttggacctctttccttgagaaaactgatcaatgagctgtgaaaatgacttacggttgacaaaacgacattaatcatcaaataaacgacattaactgagaaaaacgatagatatgcatggcaaaattgaaacgacaaatattgtaaagaaacgacaatatttgataaaaacgacagtataaataaaaacaacaacaattcagtaaactttgaaaaaactttgacgagaccttgacaatcataaaaagatcgtaaacaaactacagtacataataaaaacgaccctattttcaaaacgaccattgttgataaacgacaataatttaataaacgacaacttatatattaagaaaaaaatgtattttaaattggaaaacattattttagggtacgttccgtttttctgtttccaatttttattcaaaaaaaaagttataaccaactttaattcaaagttttgttaattttcaaaccatataattaattaaataattatttcaaactattattttcaaataatagttgacattaacagattttttttcttttgaattcctgaacccttattaatctacagtatatatacataaatatttacacacgtaaaattaaagagagttagtataatttcacaatggcgaagagcaacatttcaattttattgttgttttgtttgatgagtttgatgccattagtgagtcatggatttgattt

SEQ ID NO: 76394 - DNA, 1781 bp, Cannabis sativa
acgcatcagaaggaactttcttataaaagtaataacaacccctaaacgaggagttgtgctggaagttgtagacgtaatgcacctctctggtcgtgggagcccggctagcggcctccatgaaggctatgaagaagctggtcaatatgatctacccgttggaccccaactgaaggggagctatgccaaaataatccaaaaccctaatgaaaaagggtggagtggctaagccacacccgccttgagaatagactcactgaaagccaccatgttcacaggtggaaagtttatgcagtccttcgataagggttcaaaaccccgctcgatagcatatccgttgactatcctcttaatgtcgaactatgttattgtactcgtgacatcagccatcccatacgggagtgatggatcacgagtgggaagaggcacactaggctggcttgattggcatggtttgtccatatttgcaaaagtgcaaggaatgttagaatgggacacagtgcacttcatgcctttcatctgacgagcaagagcctttcggctcgacttgggcctggtgggagctccaccctctgcccgatagatgggtggctccacggcagaaggtatgggtgaacaactaggggaggatggctcaggcgggaacatgcgctctaagtgagcaaggttacccgctatgtcagcgtaaatttgcttgagatgggaaatacgggcatacgtgtggacgtgcccttgattgtccaaaagcttaatctctcttttaagtcaggccaaacgttcttgggattcgctaattgcttccaaggactttaggcgctcagacatcgattggtgatattgcgcccaaggatcgggaccttcctcatctgagtcggacaaaagttcaataaaaggaactccatcggggacataaggtgatgtatgattttccataagtatgaggaggaaagaaaaatgctctagtgggaaactaactactagcaagacacggatgcaggcgatataagataaatgagtaaccgcaaatgtaacagaaatacaaatatatgagaaatgaaacaaggcgtatgggttaagaaggtacctgttggaataaacgtaggcaaaggtaagcctgttgcatcaaaagttgcaaggagaacaggtgtcgaaagcctaaggatgtaagtagagctcgaaggaaataaagactagaaggtggaagcgaatacagaaagatgaagttgaaacaaagctatgaaagaagagagggctatttatatgagggggagtgattcatcaccgtaggatcgaaataagagcaacaattaagatcaaacacgcatgcccatgaaatatcacatgtgcccacctaccttattgaataatcccatcaatgtggcagtgtgtggttctagacataattccagatgaggagcaccacaaaaatagagaaggcaattcacttacagtcaaaaagatcacccttttggacttggggcaagtgttaaccacagaaatagaagaagtaaaatttttctataaatagcaaatggagaggtgaataacacaagatattccatacaaacaaaaaaaggacaaaaagcgacccccacctcctttatttatgaatcttctttagtcaaatcgaattatctcttggaaacatccacgcctacggaccccgcgctcttacctcgcccacacccgcccctactcgcccgcacccgcacacgcccgcgtactcacccgcgcccgcgcctactcgccccacacgcccgcgcccaattgcccctgctctcccg

SEQ ID NO: 76395 - DNA, 532 bp, Cannabis sativa
atcatcatcaatatcatcatcatcgccattctctccagactgttggaatatgcgatatttgtggatagtaaggttgctgcgacacttttagcatttgcgggtagtacggctgtggcatctgttgcatggacggctgctccatctgtggcgtgtgcttcatgcgggaagttgttcctccttctgtatgttttgcatcaaaggttattgctacatctacgatgattgttgttgcatctgcgatgattgttgttgcaatcgttgagtatgctgcatttgcggtgtctgttgcatataatttacttgcagctgcgacattggcgaggacaaccaaggaaatggagacatttgctgaggtgatgacgaagaaaacataaatggaataggactctgctgcgcttgatgagattgagaagtcccgggctgtgaagatgaagcagatccacctccagacatttgaggttggaacgtctgtgttggaggcattgacattgcgaacaactcatcttcagtaggtagacgaacatcaggtccc

SEQ ID NO: 76396 - DNA, 920 bp, Cannabis sativa
tgcaaaaattgggataacacttctagttttgggtttgatgttagtttatgtcgtctctcttcttgtattgctcctaacttcctatctagaacgactaactcctggaagttattatttttggatagtgagtctagttgggacctctccgagcagtttatgggggaaggcccccaactccctttctatgttaggtagttagggtagctaaattcttagatttacttatttctgtacagaaaccatgactaagtgttcttatcaaaaggagattaattcagaggaggaggcttcaggacaccaaggggcttcccaattggtcctgaatgatagcccctgggtaatagaccagcatgtcaacttgttcagatcaacttaagataattttcatagtattttttattttattttaatagtcatttttatatagattttgaaatgcatttttttgaatgtagatatttcaaaaaatctcaattttgaaaattagattaaagttgaaaattaatttgttaattaattttagatcaacttaaatcaagttatattttattaatgatttattaaaataaatagacttttattttatttagaaaattaaataattagtttatgaattatctagaaagatattttctaggtagactttttggtatttctctagatatatttaattaaatagaaaattattatttaagttgatttgttttagacacttaagtatttgatatttttcttaagagatttaattacataggaaaattatatttatgttgaaaattatttatttaattttagatcaacataaataagaataatttttccagttttattttattttagtttaatatgaatttcaaaaatgtatttttttaatacattggatttcgaattctgtcatacatatttattgaaaattaaat

SEQ ID NO: 76397 - DNA, 1329 bp, Cannabis sativa
  modified_base (669)..(680): a, c, t, g, unknown or other
ttgggaccgccattggagccggtcaaccacatccggtcgcggcgagaggaccaaatcctcgagctgcttcgccaggttggcttcgatatcagccagcttggccttagccacgtcaacggcctcgtggtcaggccggtcgccgatggttttgagcacggatcgagtctgggccacatcagtcacagcacgggtcatgacctcgattagcttcgggtcggtcaaacagggcatctgctcgactaactcatactgacctgcccccaaacctaaaattctaggatgcggaggagtaatcgacgacgtagatgtggtcgacggagttgtggatggtggtgtctggaagggttagaagaaatggtagctctggtgtttgaaatggaaatgaaaatggaggagaagatttgggtttcttgtatttggtggtgttttagagttgatcgtagtagtagagaggttgtttcacctgttcttctacatagtgatgatggtgataatggaggtttaggctaggttttttttagcagagaagaagaagaaaaaggaggagggcgtgagggcgtgagggaattagggttaggttttttttttttaaatttttatttttttaaaattgtttttttaatttttaattttttaatttttgaagaaaaataatttttttattttttnnnnnnnnnnnnattaattttttattttttaaatatttatttacgtggaccaattaaattgtgccacgcgtacattgtgtctacgtagacattccaccatggcaattaacagtaaaaaatggatggaaatggctaactgctaacagaacttaggtttaggaggttttaccaccaaaattttagaattgaaagttagttgcaaaaatatgaccatttaagaaggttatgccacaaattaccctataaatattattaatgcatgaaatgatatactagaatgaaatgtcaaatcgatttgtgttttatatttaattttgaaaaggaaataggtgcttatgttaatcttatgagtggggggaaaaagagaggaccaaactagaagctcttcaaagattaattagtgttatatatagtcttatatattagaagggccaattttcaaatgattcagattctcaacttatatacaatttgttttcagagaatggacccatcaacaaatattaaagcttggggagaatataagatcatagccatttgtcaatcaaatctagaagattattctttcataaatgttatttgcatatgcccatggtgaaaaattaaaattgtgttttttattaataaataaatatttcacttagttttttttttttttttt

SEQ ID NO: 76398 - DNA, 630 bp, Cannabis sativa
tctctctcttttttttttttttgtaagtgaatctcacactgaacccacaccaattacaaaatgggaaaatcagccacaaccggacgagactggactcagatctacgcgatttacggactcgaccaatggcagaccttactcttcctcctcttccacgccatcctcttcactgtcctctccatcctctacctcgcttacttcaacccggtagtccacctcttcgagcgtttcctcgccctggtctcagttcctggcggagccgctcgtttcgccgccggcttcaccggttcagtcaccgcgatctccgccatttgtctcttcttcgccgccgctaacttcttctactcatctctcccgctccactacgacatggcccaccgcatggtcaactcagtaagcgattggtcaacggtgaaacacgccctggacttgggctgcggccgcgggatcctcctcaacgcagtggcgacccagctgaagaaaggcggaagctcgggtcgtgtagtgggtctggaccggtctaagagctcgaccctgtcgaccctgcgtacggccaagatggaaggtgtaggagagtacgtgacttgtcgtgagggtgaccccaggagattacccttcggagataactac

SEQ ID NO: 76399 - DNA, 1447 bp, Cannabis sativa
caccgtgccttgacgatggaatttaaactgaagggacaaacaatgaaactcgatggaaatcccacttggtctgcgaaacagatttcttttacccaactcacttcaccgttgcatgagggtcaagtcagttggctcgggtgtatgactcatgtttcgaccgctcgagagcaatctcttttactgtctacaccgttggttaacgagttggccttgcccgatctatctccgccttggaacgccgctgctagcaagttgattgggcagttctcttcggtttttgctactccgacacagttgccaccattccgcacagttgatcatcgtatttttttacagccaggttcaagcccagttaacgtacggccgtatcgttatccttatttccagaaggatattattgagaagttggttcttgaaatgaaggatgccggttttattcgccatagtacaagtccttattcctcaccggttcttctcgtcaagaagaaagatggctcttggcgcttttgcgtggattaccgtgctctcaatggcattacggttaaagatcgctttcctattcccaccattgacgaattattggatgagctgggggccgctaaggttttttcaaaactggatttacgagcggggtaccatcaaattcggatggatggtcgggatgtccacaagaccgcttttcgaacacacgaagggcattatgagtttcttgtgatgccctttgggctcactaacgctccggcaacttttcaggcagcaatgaaccaggtttttcagccttatttacgccgctttgtcatagttttctttgatgatattctggtttacagtggttccatgtccaagcatcttgcacacttacggttggtttttcagttgctatctcaacatcaattttttgccaaggcatccaagtgttttttatttcaacaatccattgagtacttaggccacatcgtgtcggatcaaggggtggccgccgacccttcgaaggtctcggctatggtggaatggcctttgccgcgtaatctcaaacagctgcggggttttttgggtttgacagggtattaccgccgtttcgtcgctcattatgcatccattgccgctcctcttactgacttgctcaaaaaggacagtttctcatggacgccagcagctactttggccttccagcaactcaaggattctatggtctctactcctgtgttacagttgccagattttactaaacagtttgttgttgaaacggatgcctccaatattgggttcggcggggtgttgcttcaagatggtcatccgcttgcttactttagcaagaggtttgggcagcgtttgctcggggcatctgcttacgacagggagcttcgtgcggtagttgaggtcgtgactcgttggcgtcaatatcttttgggccgacacttcgtcattcgcacagatcacaagagcc

SEQ ID NO: 76400 - DNA, 513 bp, Cannabis sativa
aataaataactgccatgtgtctttatgtaaacaaggtgtgtaaccaacatggaataagttttcaaccaaataaaataatttattctgattttcaagttttagtgcaattacaagatatgttatacctctcttggcattaaaaaatccacacatagacccattgagcaacaaggaaaactttggagttcttatgtagctatttatgaataaactgacttgggtaggcccccgtgtttatgaaaaaaactctctaagaaaagaaatttatcttgtaaattagttacatagtaatcctccttaatattttcttgaaatttattgtattataggtttaattttatatacgattgataagtaatgatcatgatttaattttatgaaaagaagagtagtcctccctaaattagtttttaaatatttttttatttaaaaacatattaactactcaaaaacttttattcacttatcatatttagggattacatttattatgtttaagaagctattaagttt

SEQ ID NO: 76401 - DNA, 912 bp, Cannabis sativa
atggcttcggcaagagggggatcaactgcactgtgagagagcacagttctagcttcaataagcacaccatcgttgtttcgggccaccattcctataccataagaatttcctccattaaatagagctgcatctacattaaccttgagactagtttcggttgggggtgtccaatgctcattcccatcacccatctgaagctcagaccatgatgaatccaaattggattttctagcattcctccattgctcaaggtactttgttgcaaacacaactacattgttaggattaaaaactttatgttgccataccaggttgttacgggcgccccatattgcccaacaaaccgctgccaaaatgcatttctgctccccatctgaccgaaggaagctgctggtgcaccactgcagaaatgttgtacctggtgcgacattcgtgccaatacccacacggttccagcagtgttggaccaggttgcaagtgacaaggctatgcatggttgtttcttcttcagcttggcaaagaggacataaaacacagctaaccacttttttaattcgcaggtgaactaaagttggaaggcattcggtacaagcacgccacaacaaattagctaccttcgggggaactttcaagctccaaagtttattccaaaactgggaggtctggtcatcataccataaccccttatcctgctgcaataatccatacgcactcttcaccgaataaatgcccgaaacttctttagcccaagaaatttgatctgtagccgagagtgcctgcaaggggatactcttaattaaaagctgatccctcacctcaaagagatcttcaatgatttcaacatcccaacctccattgtctaaagacatcaaaccagcaacagtggctgtcgcaagtgctgggggacttgaa

SEQ ID NO: 76402 - DNA, 695 bp, Cannabis sativa
  modified_base (459)..(459): a, c, t, g, unknown or other
atttattaaatcataataaaaattgttaaccaattacaaatattgcattggtatgtgttggagtattaacttaaatctcacaataaataagagttatcttaaacataagtgttacacttattatattagtacaaagtttcgtgagggcttaaatttaaagtgaatgatccaacaaagtagaagaataagacccaataaattgtatcaaaaccaaaaattttaaaatgggtatatactattttggatcttgtgtttcacaaaagttactaattggaccttctattttgttaaataataaaattgatcctgtattttctaaaattatacaaataggatcttgaactgatttttgttaaaataaaacttaataataatttgatctagagatgttattataaaactgtaattattttctgtatttgttcgtattagattttgtcttaaagttagttatattanaaaataaaattattaaaaattgagtttagaatcttattttaattattttgaaaaatatagtgtagattttgtcatttaaatttaattaataatttttaaaaaatataaagtttgaaatagtatttattattattttatatcgaaagtctacgtgatattgccgtggatgtgaattgggcccaactatactgtttgaaacaagaatgcttttatgccttgaattgaagtaattcatt

SEQ ID NO: 76403 - DNA, 5930 bp, Cannabis sativa
ctgtttgagaataatgtccattgcgtgtttgataaagtgccattaaatcttgtgttttttcactattttatcatggttcctgtaagtatctacttggatatgaaatgattgggagggaagtttggattggtttataaagaacatgactagatgttttatgactattgggaacagaatcttaaaagtttggggtattgggttttgcaggcatgagattttgattatccaagtgtagctgatttgatttatgcaagtgatatgtaattctaatttctataacaattctaagctaattagatgtgaagacacttatttattattattattatttaatttaaagaaatgaatacacctttttgggagagagttatttggttggttcatatagaagaatatgactagatcttttacgagtattggggtaagagaatctcaaaaatatggggtattagggttggcaggcatgagatttatctaagtgatttacagttttctataataattctaagctaataagaaaatactcgttgtgaaattaccccagaggaatcgatttttcactctgttattttcttcactcttcaacccgattattgcattgtttcagtttttgaagcatgtagttttacttctaaatttctagaaattaaaacacttaattttgtttctgaaatttttgttgaaaatggtattattgctgggttaaaagagcagtctttgtaatatttttgtttaagaatgatgcctataaactgtttgataaagtgtttgttattagaacaattaactgtgtgtgtgtgtgtgtttttttttctattttatcatggttgctgtaagtctctattaaaatatatgaagacacttatttggagaaagatatgggctggtttatgtataaagaatatgaatagatgttttatgagtattgggtaagaaaatctcaaacatttggggtattgcattggggttggcatgagatttagcaccattcccacaagttaagatgatttgatttatccaagtgatttgtaattctaagctaataataaattactttgtgtaggttggaccaacgagaccaccatagaatacaaccctagggaactttgtgtagtttggattggtttatagagaaaaatatgactagatgttttacatataagtgtagctgatttgatttatgcaaatgatatgtaattctaatctctataagaattctaagctaattggatgtgaatacagagaagaatatgactagatttgttatgagtaattgggtaagagaatcttaaaagtttggggcattggtgttggcatgagatttagctgatttgatttatccaattgatttatagttctaatttctataatagtttttagctaataagaaattactctgtgacttgtgtgggttggaccaacaaggacaccatagaatacaaccctaagaaacttaagcttcatatccaatgtcagcaactatacctcggccactactagatgtcatcatcccaagcctcccaaacgatctggcattgaacattctagcctgcgtgcgaagacagtaccacttggtcctctcagctgtatccaaatccatcagattagtcctttcatcgcctcagctatacacactaagatctctccttaacctcaccgaaaacttgctctatttcaaggtctcctccatgaccctaggtagtgagaactggttcgccatctatgaaaagccaccaaacccacataaaatgccagaatctgttgaagttgttgtgggccacaatatctacgttattggtggcaacaactctaataattacaatgttttcatattttcttctgaaatgtggatactcgattgttgctctcacacttgggagcaaggcccaagcactgaaataccacgtttcaatacttctgtagtcgtagtggacaagaagatttatgtgattggagggtggccggtgaaatcatgggtggaactggaagtgtttgatccggtgataggacattgggaatacatttaaagtaattttgcattagaacgtgtaaacgataaaatcttagtcaagttcagtgaggaagagtttcagctcaacatggagactgaacatgaacagtcatattgtgtatttgttcgaatggagtgcaacctaggagttggaaagaggtcaaaggtgtgatggaagtgatgacccgaaacctgtttaatgtggaattggtcaatttgaaagagaggttgtttatgatgttgggagaggtgagttatgagagttgtacaaagggagttgtcaagttatgtggtggagaaattgaagtgagtagaagaaatgaaggagacaatgttgatttgtggggtgaggttcataagcttactttgcttccagaacaggcatggtgttgtcctgaaactgaaaaaagctttaaaccagtacttttcaaacgcaaatctttatctatttgtttgtgaatattcacaccaagtttatttggttattagtttttttcaaatgatgattgttaagtaggtctttaagaattgacattctttttggctcaactttcaattaattataatggttttattatgcttttcaaaagaatgtgatctgtatgactgttttgtgggattcgtaatttcacatattagtctcctttctaacttttaagctgaggttatgctctatgactggaccaagcaagtcttgtgtgtagtatatattttgatccaagtgatttgtaattttctattataattctaagctaagaaattactttgtgtgaactttgtagtaaaagaagagaacaattgaatcttgtgttttatcctttttgtcatatttattttgctataatgcctataaggtgtttgataaagtgcttgttagaaaaataattaaatcttgtgttttatcctttttctattctatcacggttgctgtaagtctctaattggatataaaggcagttatattagggagagagatatgagtttgaactttgtttatagagacgaatatgagtacatgttttactagtatttggggtgttggggttggcatgagtttgaactttgtttatagagacgaatatgagtagaagttttactagtatttggggtgttggggttggcatgagatttagcaccaatccacaagtgtagctttgatttatccaagtgatttgtaattttctataattaattctaagctaataagaaattactttttgtgaactttgtaggaaacttgagcttcatatccaatgtcagcagttatacctccgccactaccggatgtcatcatcccaagcctcccaaacgatctggcattgaacattctagcccgcgtaccaagacagtaccacttggtcctctcagctgtatccaaatccatcagattagccctttcatcgcctcagctatacacaacaagatctatcctcaacctcaccgaaaacttgctctatttgaaggtctcctccatgtccctaggtactgagaactggtttgccatctatcgaaagccaatcgtctcagccgaccccatttgcaatggccttcttcggtttgcccgactcccaccgaacccacataaattggagggctctgttgaagctgttgtgggccacaatatctacgtcattggtggaaacaactctaatgactacaatgttgtcatcccttcgtccgacgtatggatacttgactgccgctctcacacatgggagcaaggcccaagcattggaataccacgcatgcatgcttctgtagccgtagtagacgagaagatttatgtgattggagggtggacggaggaatcatgggtagaagtgtttgatccggtgataggacattgggagcacattccaagtccacttgatggaatacgcgcgatttctgcaacagtagaagttgtgaacggtataatcttagtcaagtttggtgaggcagagtttcgactcaacccgaagaccaagatgtgggaggtctctaaacataatcagccatattatgtaaatggtggaacggattgcaaggttgatgggattgcttatcgctctcgtggtaatagagggagaatcgaatggtatgatgatagagagaggagatggaaagaggtcagaggtgtgatggaagcaatgccccaatacgtgtgttctaccgaattggtcaatttgaaagagaggttgttttttatgtggggagatgtgagttacgagagttcttctacagatggagttgtcaagttatgtggtggggaaatcgaagtgagtagaagaaatgaaggagatggtgtagatttatggggtgaagttcataaggttactttgcttccagaaagtacttttggtatttctgaagaaagctttgaacttatgctatttgttttctttagtgattcattttctgtttgtttgtgaagactcattacaagctttgaactagctagcttgctagcaagtctatttggttcttattagtttttcctttatttttaggtgttgaagaattgaccattttggctcaacttttctatggatgcttaatgtcttaatgtgacccttttagattaattaagctggttttattattgttcttgtaagaaagtatatattaatggtgtaaggaagttaagtttgattaatttcttatagctttgattctatcctcaacatctatattgtgtgttatgggattaatatttttgaatattttttttgtcaaaacttatgcttcagtatttaacatgtaatctgtattaataaaagttaaaattagacttctccataatatttcatcaactgaattgtaaaacaatagaatattttttctacaacaacatagcatcaactgaatttgtaacaatagaatattaatcataaatttatgacacaaaaacacaacaatagtacacaaaaacaaaaacaagataaatttttgttctagattaaaagtctacaaaataaataaaactaagaaacctctgtttagtaaaataattcacatgcacactcttaattgattaacaagtgagattttgagcaggatcaacaccaagttgattacaatagtctgtataattcagtttgccaagaagatgaagttcatcatatcaggttgcatcaatactgtcattggcattgggttggacagactaaatttacaaaaacaaatggtagtatggtatagattgttgtgttgtttcggagaaagaataagagggtttaattgtatcactacatttagcctacccaccttattaaacttggaaaaccttagtctttacatggttttttttttttttttggctgaataaacctcaaatagacttccttataatctcaacacctttacatggttgatgaagcattttgaatttgaagcatggaattgtagtagcatctcatattcatagatagtggactccaaatgcctgcttcatatgaatatagctcaagtgtttgtgtactgtaatattcaagtttgtgtttagttagtaaaataaaatattcttctcaaatattaagacacaaatattatctaaaaaaattatatatatattatgacacaaataatatacataaatagcacaaagtgaaaatttacagtatggttacggatcatattagtacactttgcacaaaaaaaaatggtggtttgcattcatatagtggcaattcttataacacgattccaaattaaattgacatgattagttacaaaaattaaataaaaattaaacatataataaaaataaaaaaaaaatccttaattgaactttttttataataactactaaataaaattcaactaaattaattattatatattttaacataccattaataataaaaatgtaaattagaaattgataacgattgggatagatactcctcaaacataactaagagattcattttattttatt

SEQ ID NO: 76404 - DNA, 503 bp, Cannabis sativa
cccgcctatgcctagggccgaccctgtttataagggaccaaacaccatttattttgaaagatgaatgccaacatttatatttcaaatatataatttctctcgctaattgggattaatttgaactcataaggttatctacggatgatattattatatatgtttaaactataaacattaaatttctttaattaaataattaactttgagggcagagaatgattgattaatgtatacctaattaattaataattaatggcataaatattttgtaaataaaataaatagaattagaaactattaatataaaggggctttttcttcttcttttctttaattaagggaaactgaaatttatttctatcatatgaatatgattattgttaatttatgtaattaagtgtacactaattgtattcttatattattaatctcatgaatgattgatgctgataaatcaagtctcgttattgtatcatttgcacgaacatattatcttttaattt

SEQ ID NO: 76405 - DNA, 682 bp, Cannabis sativa
tgtagatttcttaatggaaactaagaagaataatggagatatgactcggttatggcaaagacttggcttttttgataggatttcagtgccttctcaaggaaattcaggtggtttggctttgttttggagaaggggatagaaactgaatatgtctcaagtaattttaattctaattaagttcattttgtggaagatagaaatatgaagccttggtgtgtgtacgcaccgccttggagagagtgttggaatgctttttaggaatctttgtgtgctgaagtgggatcctctaatgaaagatggatggtaataggtgatttaaactcagttttgcatcgctcgaaaaaggtgggggcaaggtttgcgagacttcatgtttgtcacaggggtaatagctctttcacctagactaaaggtcaggactagagacatcttattcgtaaaaaattgggcaggctatttgctctactgactttgttgtcctaattttctaaggctaggttacaaatatgagcattaaacaatctgatcatgcgactatccttcttgatacctttaaagacatggaacgtattagagcacctttacgatatattgatgcttggggtagacccaatatgtaaggacattattaaagaggcatggagcaaatatgtaagtggttttcatagctttattcttaatt

SEQ ID NO: 76406 - DNA, 3179 bp, Cannabis sativa
gagagagagagagagagaactagctagcaatgctaattaaaaataacagcttaagcaaacacgaacaatcaacattgacagctccaacaaatatatatctactaagaataaaataaagtattttaaagtacgaatgaaagtcaactgctatctctgacacaagaaaaagtcttaactagaaaaatcagtacaaacactagacataccagtacaaacaagattcctgcatgcaccattacggaagtcatgaaatactctgttacgatgatcttggagcatctttgcatgaatataaaaacaagaatagccaagttctgtaattttcttggccaacagttctacccgatttacagaattgcagaagataattgactggtttatttgaagctggaaaagaatatcataataatgttataatcacaatcagaaaataaaagtggctggcaaaaatcagtaatttactcgagaactaaccttggagaaaagagtgttcaggcagtgaactttctgtcgttcttcaacaaatgcataaaactgtgtaataccctttagagtaagctcatccataaggttaataatgtaaggcttttgaagatatctatccttgaaatccttaacagtgacagggaatgtagctgaaaacattaaaatttgcctgtttccaggcaaaaacccaatcagctgttcaattgatggctgaaactctggtgacagtagcttatcagcctgagagaaattaatagccaaccattagacttcatatgtcatcagtaaccacattgtgaatagcagaaaatcgaataagcctatagaaactacaaataatgtaaagtaagttggtgacaagttatcgcacacagataaggtcaccatcgcatcacccaccatgttaacgtacacataataaagtagcagtcaagtacatacctcatccataacaagcatagcgcagtctttcaagatgcaaacacccttcttcgaaagatctaaaattcttccaggtgttccaacaagcaaatgaacaggttgatataaacgcatgatatcatcctttaagctagtaccaccagttgtaaccataacttgaatattcaaatgcttcccgagctccttacagacttgtgatgtttgaagagccagctcacgtgttgggacaagtattacaactgtgaaaatgtggagtgtataagttaggatatgagatcagcacagtaacagcagcatcaacacatgaacagcctagtattctccagtaacactctttagctgaaaaatacatgcattttctacatctagaacaaaacaaagaaaacattgcaacaagttttgtgcttgaaaaacattagtagacatcataagtttcttaatatacacaatcaagtagccccaatttataaacaaatcctaaaagcaacagctttctttccgagacagagagtagagaactgaccttgtattgcatttaaatcttgatcaatcttttccaaggcagggatgcaaaatgcagctgtctttccagtcccatttttggctctagcaagtatatcactaccagtaagagcaattggtatactctcttcctgaataggggatggtctttcaaaccctttctcatatattcccatcagcaactcacgtttcaggaaatagtcctcaaactcatttcctttagttgcagtcacatcctgaaaagaatattagtaaggggatctggactattaggaagatatagagataacgttgcacttacagtttctttcacacaatcaacaggcccacaattttccaacgcaaacaaatgaaaccacaaaagcatatggccacataacaattcaaacatttaactacacataactcaactaaagatgaaaactaaaactgttatcttattatcacaggaaatctaagcaaaagtgaactaatattagttcaggtttggggatggtgggacaagaaaatttctatctaggctgtaagagaaaacaaatatacaatacacggtaaaaatccactacatatccattcttcaagtacatcaataatgaattaaatttatgcagctcaaccctgagataaaatcaaattggttatttaaccagtaaaagtaagtactgatcaaataacgcaaaaaacagtaagtgtgtaaccaattattttaaaccaacctctgttctgtagcgggtatcagctggtggtattttcaatcttgccttccaatcttgagaactatagaaatagcagaaggaaaaaataatatcatttagattgcaagtgaaaaagtactactcacatacattttcgataataaataaatttaaaaccagataaaagcaaaaccataaacatcccaaattagaaaacaagcaaaaaatattgatatcaatatcagcagcaagaaaattttcatatgcagattattttttttaacaaatatacagtgttgaaatcaaacaaatgtttggaagcaccttcaagctttcaacaaaataaaatttcaggatatcatcttcaagaattgtaaatatgctttttattcccacaaaaatcatatatcatatataaacaacatagaaccagagtcttcaccggtaagaaaactcttatagacgactaacacgaaaagcttcctgaccgttgtttaatacacccgatttcgtgacaacaaacatgaaggttgtgctcaacccatccagaatcagatttaaactacaaactataagagaatcacctccaacatttacctgcaattacatcatatagtccctttataacacacgtaaaactccataccataaacacacggtcacaagcagtatttcagaatcatggtttagtatggttctcatcctaacagagttatatggtataccccgaaaccgcagtatatacttgttctatatcttcttctcttacttactctataactatctcaattccaactcaaatcatgtcagcacagtaaagcatagtacaaaccagttccacaatctcacacagcattcataaacccaacacattcacaataaaatatgtaaacgagataaaaagaaatgcacacacctggagtccacggcctccgactgtacggtcttctcgacctcgtcagcactggaatcagcaactccacccaattgacctctcctcagccattgctgttgttgttgttgctgctgctgttg

SEQ ID NO: 76407 - DNA, 1217 bp, Cannabis sativa
tagataaaaaaggtaatttgaaatcaataaattttaatttgtaataaatgatacatattaattagaaataatattaatctcatatctacctatttgtatcatagttaaagaaaaaaaaaaaaaaactctgtattgctaatttttttcacaaagatacgattatatagaaattaattcaaattgaataaaaatgaaacatttgagcaatttgtcaaactttgagagttaagacagacaatttaactactaaaaattgaactgctttccttaaaaagaaattaaactgattgttttcttgttattgtttaattatgatattgattattatttgactattacgggaattactatctaatattgtacataatttacttattaaattttttttattattagttattactttcttctataaaaagaagaataaatatatatttatattcttttgtgttagtgtataatgtgtactattttcactatcatgattcttttttttttaataatatatagtacgtatatttgtaataatccttaaaaagtttagatatatgaatgtatacacgatcttttatactcttcatcttataataatttaattattttctgtataaaaaattatgaaaatataactcatattttatctgtttttgttaataacaaactaatacctatccttaatttttttttattttatcagaatacctatccttaattagtttcataaatctcaaagaaaaatttcttttaatttacatactcaccacacctctttttcaattaaaatcataaccaattttcattggtaatcttaattaattagtctcatactcataaaataaataaaaaaataatatacaataatatctgaaaagtacatcaataaagaatttacctttctagttacctttctagttatataaaaatacatttttagtaataggacattgaaagaatggggtcaatacatggtgatgctcccacattaatgctcgaagattagaagatttgtaaaactaatagctagattgaaaatttagctatgattgtgaagttgtgatgatgagtgatatcaaagaaattagtacaatatggcatgaaaggtctttgctgataagaatggtgaaggaaaaggagaaagaaatgtatttgatatgataatatttttttgttgtgttttggtttcatgatcaatttacaaattatatatatactaatat

SEQ ID NO: 76408 - DNA, 788 bp, Cannabis sativa
  modified_base (762)..(762): a, c, t, g, unknown or other
ttttttttttcaaaaataattattttatgagaaaaattcaataaaatgtagaaaaaacagtatctctcaagtcattgtgtaacgcaatgacttgctttcaatggtataacattgatattaggtacatatagtagtgtccaacatctttttttttttttttatgaaatgaaacttcattaaatttagcattcagagtacaaaagagcctataaatcaacttagatattatgctaaaaaatgctacaaccagaaagaaatcgagagtatttagcaataacatgtgcaactcaatttgctgatcgtttgataaaacgtaaattaaaattatgtaaagaggaaaacagatgtttacaatcgttgatgatcaaactgaagacagagtacattgattgattatgtcgaatcccttgaatggtgaccaagctatccgtttcaatctctaccatctgccatgtctgactcttgatccaactaagagtctcttttattcccatagccttcactacttcagcaacatataacccttctttgtaataggtttttgcttcaataagcttaccaagactatctctcccaacaattttgaagccataagaattttccaacatatagtaaatattaaattataataagtgagatttaatattaaattatatttataataatataatatatttagtggtgtcagatactattggtgtctttaagtataagtgcgacagttaaatgtactaagcttctaatatctttatatattaaaantgcctatctaacggcaattcttggtt

SEQ ID NO: 76409 - DNA, 3679 bp, Cannabis sativa
aaaacaaaaatcatcatactttcttataagctctgtttgttttctgggaaatttttttggacctgatgatttagatccaaaaagtgattttcgtttgcgaaaagtaaaaactttgattttagaaggaaaagtagaaataatttcgttgaaaaaataattataaaattcatggaggtttctttgattggtagctctcagtcgaaggttggagcgacggagttgggttacagggagctagggttttgtagctcgaaagttgagagtcttaacgtcgttagtttgaggaacaaggtatgtttcgatcagattgggaagtggaagattaacaccaggcttcgatttacacctaaagctgtaaagtccgaacctgtacgatctacggaagtttctgggcgaaaccgaaagtccaaattggtgagttttccttaattgtcttggcctttcagaaattggaaatgatttacttttttttttgcaatatttttttttcttgcgaaccaaacaagaaaaaacaggttctaatataagtttttaagtataaaaacagagggttgtatttaaattttgttgttattataatttgtttaatcatattaaatctccttcattcaatgaacatttaatttaatttcagtatattttaaaataaaatattaataataacaatgatttcagaaccaactttctttgtgtccttttctttatgtttcctatatggtggaatagagagattattgactgcataatgggttatggagaaaggcccaaatttctagaccaaagatgctgtgtgtggtggcctagtagtttttttctttttttttttctaagaacttgaaaaatctggctgtgcttttatcttatatagggataggaattgccttaatttgttggagatgtaaaggaaaatttatctagttactcggaattggtgctgaaagttttagtatgcttcaaaagcttaccgatctatggcctttttactgtaaatgggtgaagtttataatatactgagtgtatgttgtttactttgcagcttaatggtgtaaagttgtacgttggattgcccttggatatagtttctgactgcaatactgttaaccatgcaagagcaattgctgctggactaaaggctctgaagcttttaggtgttgaaggtgttgagctcccaatttggtgggggatagttgagcaagaggctatgggaaagtatgagtggtcggggtacctggctattgcagagatggttaagaatgccggtctcaagctccatgtctcactctgtttccatgcctctaaagaaccagagattcctctcccagcttgggtgtctcagattggtgaatccgagccaagtatcttcttcactgatcgatcagggaagtgttacaaagaatgcttatcgttggccgttgatgaacttcctgttctcaatggaaaaaccccagttcaagtttacaatgacttttgtgaaagcttcaagtcttcattcttgtcttccatgggttcgacaatccaggtgagaataagaacatagattttggaatactttgaaagaatctctcttgttttgatatgtggtctgacatagtctatggcttttgtttttgccaatttcagggtatttccattggcttaggacctgacggcgagctttgctatccttctcatcatcagaaagcaaaagacaataaaatccctggtgttggagagttccagtgttatgacaagaacatgcttagcaatctgaagcagcatgctgaagcaactgggaacccttgttggggacttggcggtcctcatgatgcatccacttatgatcagctaccaacttcaaatagtttcttcaaggacaacggtggatcatgggaatcaccctatggcgacttcttcctctcttggtattcaaaccagctcttaaatcacggtgatcggctactttctatggcttcttctgttttcaaggatactgaagtggaagtttctggtaaagtcccacttgtgcactcatggaacagaacaaggtctcacccttctgagctgacttctgggttttacaacacatgccttagagatggatatgaagaagtggcacaggtttttgtaaagaactccagcacaatgatattgccaggaatggacttattagatgaacaccaacaccatggttcactttcgagtcccgagttattactaaaacagattaagaaagcttgcagaaggcacggcgttgagatttctggacagaactcatcagtttcaggtgctccagggggatttgaacagatcaagaagaatttgttgagtgagaatatggtgaacctgttcacttatcagagaatgggtgcatatttcttctcacctgatcattttccttcattcactatgtttgtccgtagtctcaatcaaccacagttacactcagatgacttgcgtagaggaagaagaagaagaagaagctgttggggctattcctaaatcttcagaatcaagcatcaacatgcaagccgcttaagtaaggagtaaaagaacttatatttatttatacatagtcatgtaaatattgaacgtattacatcttatatcattgtaatgaagagcttttattagacaaaacatgacaaggtgttagccaaataggggcaacataattaaatgtgtgtctatgaaccattataagccagtccagttttacaaggatgacgtttatataattatttatggtgtgggacttcatatacattcattttatttttttgttaatcgatttatcaaagtaggattgaagtttgctacctggattggaatataaaatcacaacgatgttatctgtaaagttttcttccttgcattgaatttgtctagacttgaataaattagtactatatatttatatatcctttctacttttgataatgatactgtgtttatcaactcggtatttgatagatatacatataaattatatacagctaagttataatattatatttgagttaatacagaacacacgaacacaattgcttgtgtaaattagtttctaacaaaactttccaagacaactgtagaagattatatatatttatttatttatttatattttccttgaattcaacctataccagtctcattcccttttcctataaatctgaccattacagctctcttttttcctctctatgatcagattttaactttttcagattttgtatatacaatttgtttgattttgacactatcatcatcatgagatttccctttctttatcatacatttatttacttattacaaacccttttgccttttctttctttctttcgttctttctttcttttctctatctatcttcaattattctaccaagccacacacacacctctctatatatatatttattgaaaaattaccaaacaaaaaagaattacatgtaatattcccaacatcaagctagtgttaattttattttagtacttttagttaaaataaaataacataaaattaatagtgatcattaaaatgctttattaattatagttattattctcataatattactaagttataataatatgcactttttttttagaggttttaacttttaaaaactcttattgagtaaaataattaagtggtataaatttagttaaaataaatgtttataaattagtagtcttttgct

SEQ ID NO: 76410 - DNA, 1572 bp, Cannabis sativa
gctgcccaatgcttgggccggccctccatccacattgccatcgataattccttcttgaaaaaccttggaatgacccaaccactttcttcctctttctctcccgatatcactctctttcactcctctcttatgtgttaggatttataaaacactcaagaaatatatatatatatatattacagatctaaacattacgtgggctacttaaactatgccacgtgtacgttagtatacacttcaatcgtccactatgacacttaactaaaaattttgaacgggtgggtaaatagcataacagaagtaagatttaagtagtgttgtcgctaaaaattcgatttatgtggttaattatttaaaaaataatgtttgagtagttttgttgttaatatccatttgataaatattttgttttacaatattattttaagattttaaattcttactattagccatgatataattatatcataaattagatattttaggttattaatataaataatacaaaatgtgagatcttttaagtaaaatatatttatttagtgtgaatcattggagttgttacactaagagcttgtttggtacaccgtgatggcgtgatgtattgtattatattgtataatattgtgttggataatattatattgtattaatattatttaatacaatattatgtttgatattgacttgtactaatagatagtgtaaaattataaattctttataataaactcgaccccaacccaaaccacggcctggactcggactccgaaccaaacctgaacttggaccctggacccggcttaggacctgaacctaaacctagactcggactcagaccccaaactcggacccaaactcgaacctcgaccctaaccccaaacttgaaccaagacccagaccccaaacccaaacttaggttgcgaacccagaacccagacccaaatctcgaggtctgagtctagggtttgggtttgggtctgggggttcaaggttcgggtagcgactcgagtttggggtttgggtagcggttcgagtccaagtctagattcggagtccaagtcttgggtccagggtccgggtagcggttcaggtcttggtccaagttcgagtctgggtttggggtttgggttcgggttcaaggttaaggtccggggtcggggtttgaggtgggggtctaaggtcggggtccggggcctgggtctgggtttgggtccatggtcaaggtatggatttgaggttcagggctgagttcaatcctagggttgaccctaggccctttgtaaacattataatacaagctaatacatgccatttgttatgtattaaataatacgactcacattatgttaaaatttatggccgtaataattaatactatacaatattttatccaaacatgctattatttgttatttaatacaatacgatccttatacgtacgacgtacctaccaaacgagccttaaaaataaaatattctactctaaattagtataaccattgaagatggttttaggggtaaaattaatctttttttatatataaaagtcaacaaatgtattatttttta

SEQ ID NO: 76411 - DNA, 1078 bp, Cannabis sativa
tttaattttaatttatttatataaaatgtcttttctcaataaataaattaaaagaaaagggcatgtatggttcaaaatttatgatttatttgttttcaacacatgatttaaaagttattaaaagggtttttttaaatgaattttagcatggtgtttggtaagttgcaaagaattttagcatggccttttgggttagaaaaatcacaatggttcacaattagttttttttttttacttttgttatttttaatacagtttttttttatatatatattaaagaaaatctaattgtatattttgcacaagtagttgaagaaaattacaatttgatgagttttcataaatcggtgtaaaattgtgacttaagggtaatcgagtttttttcttttttcttttttctaaaaaaaatcccattaataacatttttttaaaaaaacaaaatcatatttttgtaacttgtaccttaaaaaccattaaaatataaaaatttccatgaattaattctatgaatcaccaattagtcttttggctgaacgtttatatcagtcttggatcaaacactcagcataatttttgttgttgttgttgtgatattaaaatgttataatggaagttttaaaaatatgagattgaatctaaaaactaattaatatgagtgaaatacccactcttcttataaatgaggtataaaatggctacatgcttttcacatgggatattagaacattttttgaagaattgattcaaatgaaaaaacatgggccacattcccaagcccaccactccaacaattatcattcactagcccaagaaaattaatgatgtttaaatttcttttataatacttttggggcttcaaaatcaaaagaaaatagttacttgctcccattgcaagtcaaaaatggcaatgacagaaccagagtttaggaagaagttgaaggaaaccaaaagataaaaaaaaaaaaaaaaaactaatttgcttattataattgaatgagaagaagtacagtatttatacaaaaagatgtaacaagattattgttacaaaataaataagtgggaagctgaaactaactaa

SEQ ID NO: 76412 - DNA, 6184 bp, Cannabis sativa
ctgttttggttttgcttttccctttttctttccgttattttctcttttatcatgcagattcttaatttcccggcgtgcaaggaaagaaaagaatccaactttatacttgtttaaaaatcataatcaaaatattatgcacattttgctttcttttttctttgtttatttctggctacttatcaattgttggggaaaaaaatgacaatatcagacaccacgattgttagcttgtacatatcttataatcatataagacaatagttcctttcagaaaaaaaaaaataaataaaaatagtatgacgttgttgtatgaatttgttacacaaactgtttaaaaaatcatcatagctgaaagtcacagtcatatccaaaataataatagaaaaaagagatagcaccaagaagctattatttgaaataaataaaaaagtcaagaatgtatacgaatagttttatttcttttttaattattattatagtgaatgataaaaaaaaatgaaaatagcataaaacaccaaaccgtggcgtgaacaagacgagacgactagaataaaaacaaactaataaatctttgtaagagatattttaatcaaaagaaaaaatctatcatagtaagagatggctcctttattcttcccataattattattaatttataattacaattaatatgaatattaatattaatatcagagatttagccttgtactgactcgtagtagaaaaaatggagttaagataggccaaactcaaacccaaaacccgcacctgtttaacttacccgtcttactcgctctgcctctctctccttctttctctctctttacaattatatatcttcttttctctctctctccaactccatctgttccacgttttcttttttctttcttttgaatatattatacataattgtgatgattgatatgtgcccagtaacgtaatcctcgaccattggtgaaaatgtttcaaagaacacgtttttgggttgtgttgggcatatattgattataatagtattagtaattgttgttcggtgttggggtcttggcagtttcagataatcaaatgaagtctcctgattttgtaagtacccatcttcatctttcttctgtcttttccaattttgctcttcttttttgctttttgttttttctttgtagttaaagtttagatttttaataaccgaacatctccaaacaaatgatatctatacgtataaattatattgttgggtttcagatatgtcgtttctctgccttttgtaacaagaatttatgtaaaatcagttcctaaatcccataaatatatttatatatttgtatacagagatatgttttgcatgtgtttgcttcattggttaagtacactaatttcgatgctgctaataaatcctaatttactttcttggtttcagtgagtccagcacattatgacttttaacagacaaaaccaatcagcttaagttgtgataaagtatttttctttttgctgtaattgtacacaaaggcttaggttatttcttcaaattgtttttgagttttcattgatcggcattacattaaagctatatatactcatcaataagaaagtgtgctcttttattttcattcactcataagtttccttacccatttgaacataattattctttgcataatttgaacaatttgtgttctcataaagagcaagcaatatattgtccctctcctgaatctttgcatttcctcttattaatttcaattattggttattgaatcttttttgtcagtacccataagaattttttacagaattagtatttttggggttgcaagataacattaaaaagttctgtttatgtagttaaatttggcttttggtttattctttctcctcttctcaggtatctttacttgctgattcacacagtaggaggtcttgcttttgtagccttgttcctgcaacttctttgctatgtctagtttttttattagggaatgcttttatagcaccaatctacaaagaggtatttatttcttctattcatctttttgtagtttttttttttttatgtaaatataagatcaaactttcttagaatctggtctgtagttaagtccctcaaactttgtaatgactcttttgatacttcggtgtagaaattatcaatatggggaatgactgatactctacataatcttaacttcaacaaatgcaaggtgtgttttcttccatacacgttccatacaatattaaattattaatgtacataaatattggggcgttgttattcacatttgtttgtccctttagaaccaatgtagacctaatgggagtgaggcattacccgaaggtattgtatccaagacttcaaacttggaaatgcggcctttgtggggttttccaaaggtatgattttagatgacttattctagtccattgattgctataagtattagaattctaaatgtgttttcaaggcttcttgtcaatactgatttgcaacctgtttcaaccagaaaaatgaaagttctaaggttaacttatttgctgtggctgttggcataaaacaaaaggatttaatcaataaaatggttaaaaaggtatgaagcaaatttttgctctctaaaattaatgagttatactttctgtatccaagtgaatgattcctcctgtttacacattgttttgcagtttctatccaataatttttctgtaatgctcttccattatgatggtaaacttgatgaatggaagagttatgaatggtgtgaccatgttttacatgtatctgcaatcaatcaaacaaaatggtacttgtctcaacttttagtctaaccttattaaaatggaagctgcagttttcaaacctgatttatcgtgtgatgatgccattgatgctaggtggttcgccaagcgtttcttacatcctgatatagtggctgaatatggctacattttcctttgggatgaggaccttggggtagaaagtttcagtcctcaaaggtatgtcatgtcacctcatgtttatgcatttgtgtttttgtatttcctattatgaatgctctatatcacgtaccatatccagattatgagggttgcatatcttttatcttaaaaactcactcttttatcacatgttagctaccacccgaagttcagacataaaatttccttaaaccctttttctttaaatgcattctttacatttgtattaaattagttgcattaaggattgaaaaataacaccttagttgatgtttcttttaaaatcttttaggtatatatctattgttcaaagtgaagggcttgagatatcacagcctgcacttgatccagccaaatcagtagagctgcatcatcaaattactgcacgggggaggaagatagtccacaggtattagtaaaattgttttgtgttttaagataacaattccatattatcagcgtggcaagttgtagtttttgtaacttttagctacatttgaagaagtatggcacaaaggaatgttgtccttcttatgataaacaaaaacaaatcacaaggacaccatctttgaaaacatggttagttttagacaataaaaattatgtgaagaaaagtatgaaaaagttcacagggattttggttttaccttcatatgcattgtcagataattgctatttactgtgtacaaggaattattcaagattcaagtagcagagagtgattatttttttcttttaagcataaaatcatttctagctgcggttatttaatgccaccatttgaccaatttagaggaatgcctgtgtgtagtttagttctctagtatgaaggcttacatgtttttcactgtttgtgtctgcagaagaatttacaagcatggtgaaagtgggaaaggttgtgatggcagcagtacagctcctccatgcactgggtaaattttcagctttcagacttactagtactacaacataatagtgttatcttgctaaccaagataggaattttttttttctttcctgaaataactttagtggatcctctttgtacatttcgtaaaagtattgctgttataatataagttcatttacaccataatatgaaatgaagattttcgttgcagatggattgaaatgatggcccctgttttttcaagagctgcttggcgttgtgtatggtatatgatccaagtgagttcttttctgttttatgaatgaaatgaatcacccgacaggggtagctcaaatgctcaggcgtgtggttcgctcccaggtcggatgtttgagtccctcctgggtactaacgtagcatttattatagtgtcctcttttatgctcccaaaatagtgtagggttagagagagtgcctaatttcaaaacaaaagaaaaacaatgacacgccatgaattaactcttcataagtaaaatcagtaaaataaatgaagttaattttgacttaatgaccttcttgtttgattatttgcagaatgacttgattcatgcttggggtctagatatgcagcttggttactgtgcacaggcatgttttttctgatatattatttttatcttaaatggttgcattactttgaccttctcattgatcattttggctagaccatgttgattaagtattctttatcttctttcttgacagggtgatcgaaccaataatgttggtgttgttgatgctgaatacataattcattatggtcgccctacactgggaggtggagttggtgatggaaataaggttagaaatatgatcatactctctattcttattggaacacactccatcttctcttgagctttatgtttaatttttcactttgtaattttgactattttttatacatgaaattcccatcttacgttaagcacaataatcatgtacatagataaaaatctaaactcttttcaaacatgaaatgtctgatgtcatatatgatggtatctcatcaaccatgtaaacctctcatgttttgtcatgtgcataatccaaaaataactgccaacatattccaatgcagacaagttcttcagcgaaaggccacactgttaaaacaaaaaatatttcaagcacagagaaggtttcgatctctactctacatcttcactgtattttcactgtcattggacctaaaaccccttaatctttttcttttttgcaggcaccatcccattctcattcccattttaagggccccagagtggatgtaagttttgacttatgagttacattcttcttttgaaacttcccaaacaagaacaatataaacttattatgattcaatgaggcaattggattggagatttgatatcttatgttagatcaacttaagaaattgttttgtgtaatatgtgtaggtgagaaggcaatcatacatagaattagatattttcaagaaaagatgggaaaaggctgttcaagaggataaatgttgggttgatccttacaaatgaacacacaggagaaatcccatacattctaaatttttctgccactttacagcaaaatattgcataaagggaggtatgagcaatgagcacaaggtattgatgatggtttatgcttataggagtaacacaattttatgttgtcattcttttctttaaaaaaaaataataaaaaaagaaaagaaaaaagttaaaattaaaaataatcttgtaaatgtgttatttttatttttatttttattttcttacgtaaatagtatatagatagatgtttgtgcgcaagaaaagtaggaaattattttgtgccttcagagcaataataaatttttacttgttgagtttctaaagttagatatcacaataaagtttcataaaatgatcttattaagcctttagtttgagtgatttcatataggaattactttttttcttcttcttcttattaaagatccagctgtcagtgggattgtggggacaaacacatccactctagatgaaccccattatgtttatatttaattatagagtaatgtttgtggcacacttaaaacacttaaacagtgacctgtaataatcttaactacacaactaaaagtaatgtgatccacaccaaaatatttatggtaaaaattaaatatacgtcattactaatgttataacttataaagttgttattctagttagaatttaggttgcttttggttggaggtaatgaaatggaatggaatggaaaggaaataattttcattccattctt

SEQ ID NO: 76413 - DNA, 692 bp, Cannabis sativa
tctttcccacatcatttcatataatatgtattgattcttcatgtcatcatctttatatttgatcaatcatattctttcaatctacacaaaaggaaaaaaaacatatatgcaaggagtgtgtaacactactcttttcactctcaacacacacatacccacacacatccttagtcactaataaggggtatgacccttttataaggattagtgggtctttttgtcttatagtccaaatagggagaatttattgtcttggcccaatggactgaccaaaaatattttagagcgtgcccatgggctccgagcgtgtttgtacgttatgtctatcctattatggcctgataatattaccatgtattaccgattatatagttaccatcatatgctaatatcaatactgagtgagcaacacttaactatgttagtttacataaaacattttaacattctcctacttggattacataattacatatatatatgtgctctcactatgcaatcgtgtcaacagacagaaatctcaagaaacactaatgtctagaagactaattatgcatcatattgtattgacatgatataagtataatacatatatctgagattcataaaatattatgataactattgatctggatctactcgaacatagcacaaagactaagccactagcttgcatcaacaagtgtgcacac

SEQ ID NO: 76414 - DNA, 1624 bp, Cannabis sativa
atgattcaaattagaaatatcatcgcatagtattttttatattattttattaaattaaaatatacgagacttactaataataataataataataataataatatacgatatcttcactctttggaaaaaatgtcccttactatttctcttttttttctatcgcaaagttcctttaaattatacataatcatgtgtaacacgtgcggatcatttcgttttattgtaggtgcaaatatttctaagacattaataaactttttcttgatggaaaaagaaaaatttaaacatttaagaaattagcatctcgtaagttgtttaaaaatctaaattatcatcttgagctgttattttaattttattaggggtgtctaatatttttctatgtgtaattatcgctatcagtctaattaaatatcggatcccttatagtttaatataataacttttacacagatgggtggatggagagagatggagggagagtgatagaaagagagattaaattacttatttggcaagagggagaggagagatggagagagtccttccaaagtccaaaccttcaaaatttaatccatccaaatttgtaaagattgtaaaaaaaatacattttgtaaaatacaataattacccttaaaaaaataataaaattttatttttaaaatgataattttgtaattttactaataaatcttttctccatcattttgatctcacacctaataccaaacaatacaaaggagattaacatttccctaaaaaaaaaagagattaacaaacctctctattcctctttctccatatcatctctaacctatcaatccatcctactctactcttactccctcccatcaaacatatttttgaagaatatcgttagtcaatcacaagacgacatatcttgcacaatagcaatgcttaaaaaattataccctttgttttctaaaaaataaaactagttgtgtttataaaaatgttggtgtaattaaacaatagaatatatagaatggcaaggactgagtaaaataaaaacatagcaacatgtatattataataataactgagatatatactaatcagtgttttagtatttcaaaaaggggaagaaaaccgtatttttaataatttctcattttttaatcacttttggtatctattaattaaaaacacaaaatagcgaataaatatacatttacttattttttacggaccaaaaattcaaatagcaaacgaatatttggaaacagaacaaatagttaaaagaaaatcgagagttaacggacgagtgaaaggaacagttaccgactgtggcagagttgtaagttgtggacccatcatcggagttcttattaccgacaattacggttttaccctttccttctccaactaacagaacattcttctgcttagtggggatcttaatatactcctgatacgtacccgccttaatttgaattaccgttctgcccccctcagccatcgaagccgataactcgtcaatcgccgccccgatcgtcccatggctcccactcccatccttcgctaccaccgcgtgcgctttaatctcctccaccggagcctccaaaagctgccggtcgccggcagtaacccacgcggggaactc

SEQ ID NO: 76415 - DNA, 747 bp, Cannabis sativa
tcaaggactttcaattttacaaacacaacgattatccttgtgctaaattgtgttccttaaattttcatctacgtcaaatttctattaataaaatttgacaaaaaaaatcaaataatataatttcttatatgtcaaaattcaaaaattaaagtcttaacttttttttttttttttctgacattgagggagggagattctaatttttaatagttatgtaacaaacaacacttaaattttcttatttcttattaaattaaattatcattatcataatctaaattattataatagaattggaggggaaatatggataatggttgctttgggaagtgtaactgaaaaacgacaataatgaaaaatattgctttgctatgaattgaatgacttgacactacatatgaattgtgatcatcatcatcatcatcatcatcatcgtatcaaataccaatattatattatccaacaacacatgtccatttcaaagtttcaatcttttacgccttttcattgattgaagttatttcttagaagagaaagaacaaccccaccaaaattctctctggttctcggtcatcaatggcgtataggaggtgtttgcagctgaatcatgttctgggcagacttagttttactgcaaccaggaattttactggtctccctaaacccaacccctcttcttcttcttcctcccaagacctcatcaactccgaacaagagttcagtgctcacaagtaatctctctctctc

SEQ ID NO: 76416 - DNA, 1103 bp, Cannabis sativa
taaataactactttaatataagagaaatatatattctttaagttaggattttagtgttttgttaaaaaaaaatagttaagccaaaatcttactattaatatgttgtgatagtgtaattcttaattccatttttttattttttaaaataagaattaaaaacaaaaataaactatataaatacctttttttaatcatagtttttttgtactctctttcatcaatttatgttattgaattttgtaataaaaaattgtatttttcaaaggaggatattctttttctttttttcctttggaaaaaaatgatcatttaaacaactttttgaaaagaggatttttttttaagaaatcttttttgaaaaagaggatttaatattacaaggaagcacatgcaataataatcataataataataaaagactttaactttgtagatttttttttccatgttttatatggtgtagcttatcttttatgtctagaaaagtatgatacattattctaaagatgattctttcataataatcatagtttggttcccaattttgaggcatatcaaagtgtcaacaatcattaaacttctatcattaatttttgaaattccaaatgttttaattgttttttttttcaagaaaaattaaatcatcttagtagtatttttttggctcctttcttatcttttgcatcacttaatttctagaagataaaattttcatatggccatggttctttccctctttaaaaattaaaaggaaaaaaaaaaacatagttatttcagttcttaaaagttttaaaggtttcaaattaattgcattatattgacattcaatcatttataaaggcatccaactttgatttagaaacaaaaaacacacacacaaacaataatatgataccttgtagtttattattaaaactaatttcctcgttgagtgttctactgtaaaagtccttaaccgtcatttataaggtatataaatcattttactaattactaattaattttttaaaaatatccaatgtgactagttaggtaatcattttactcatcactaattagtttttttttaaaatatccaatgtgattagttttttttttttttt

SEQ ID NO: 76417 - DNA, 1277 bp, Cannabis sativa
atatatgtataatagagatgcactcaaaccaatacaatttgctctacatatagagaatgaatagtgtattctttaaacttattttaataatatataaataatgttttatttatgtatatcgtatatatgttcaaaaattataattttaatagtgtaaaaaataaaaataatattaatttaatgatgtagagaaaaatataaagaaactgatataatgtaaaagtgtgctataaaataagaaatgaatttttgtgatgtatgttaaatgatagagtagagaatcttaacactcccaacaacttttctattttattctttaaaatacattactaaaactctactttatctattttacctcaaatttttacataccatgcatatcaccttctctatttttcttttcatttaaatattatatttttaatatattttattcattttatataaataatttatataatattacacatattagaaaatttaggaaaataatattaaaatatgtttagcttaatgaataattatctctacatttaattacatactatttattaaactaaaaaatatataaaataagtaagatttatttcatttgttggaagtttaattttgtaatttttttctttataatttaaagattgaactattttaactcgtataggtgaatgatcttactggtttgaaagtttggacattggtagggtaggtttttattaaatatagttaaagcgtgggaggcacttgggggctctactttattaatattattgttaattttctattttatttgataactttaattgtttgtgtggtgagggaaaacgacgtgcattaaacaagtgggctcttgaacgggaagcactattatcatctacttctctttttcactcccaccacaatagctttgaagtgacatatatattctcacttcacttcttctagctactaaaacacaacatcactcactcatataaaaacaaaactttcaaattttagacaaacttcccccttaataaaacttgtatctacactttattcactatatcatcctcaaaaaaataagattatttataatggaaattacttatgtttgtcattaaaagaaaaaaagaaaaaaataagaaaaagcatttttatttatgacatttaaaaaactataactaaatttattatgtgatgatttacattgtagttataggagcattttacaagtttttaaatttttttaaataatttacagtgttgaaggtagggtatttatattcaaacattcaatt

SEQ ID NO: 76418 - DNA, 1263 bp, Cannabis sativa
ccctccatcgtcaaatgaacaaaatttgttcttcgatcgtgagcatgaggtggtctcgatcaactgaacatggagttcctttttggactcgatatgattgtaagcatcaaattgcttagctaattgaatccataataatgagtagtacatattgtttgatcccggtaattcatagttttgtattatttctgaaacagttctacaaatatttagtgctgcatagagttgaacaaaggttatccaaagaagtatctagctcgagagacggggtgagacataccgtaattttttcgtctaatctaaaatattctcggttgattcgttcagttttattgtaggaaaagagtcctatctaaacttgttctttgctttgtttctcactcttcatgtggcatcaggaagtacaatgaatgggacaaaaaaaagcatcacaaggagtctagtcttcgggtgagttttcgatttgggtgatacaataaccatttttttacactatagcttatggtttaaaactgtaggttatagtttccactactgtcgacctattaatagagccaaagaacaaattgagactattcacactaatgtgtgcaaaaagctatcaatattcaagctcgaggtgattatgaatacttcttcacttctattaatgattattctagatatgttcatgcttacctaattgctaagaagtctaaaacttttgggaagttcaaagaattcaaagctatggctgaaaagtaattaggtaaatcattgaagacatttcgatcagatcgtggtggagagaatttggattctaaattcaaagagtattttttggaagaatggatcttgtcccaacttacaacacctagaacacctcagtagaatggtgttgtagagagaagaaatcagaccttgttagacatggttagatcgatggagtgttactcatcactgccactaaacttatggggatacacacttgtagtggctacctacattttcaatgtagtaacctcgaagagcataagcaatactctaatagaattagaatgaagcttgagcagccgagttaagcactccatggcaagaataaaaagtagaggagatatggggtctccttgtttggggcctttttaacacctttgaattgatcatgtattctaccattcagcactaaagcttaagaaacgtaccccgcacacataccataatccattgaacaaaccgagtagggaagtgatatgctttgacaagcctctcaagaaagtctcaatc

SEQ ID NO: 76419 - DNA, 974 bp, Cannabis sativa
gaggacaatgtgcgatgagatactgtgtgttatgtgtgtgagtataacatgcattaagattacactgtgatatgatgttatattatatgtgagaataatatgatatgtagatatatgtatgcaagcatggtatgaattgatttgatgttgtgatattgatattcttatggctatgttatctagttggggggattatgtcctacatagctcttcttactgggcgttagctcatgggtactctgtgtgcaggtaaagataaaactaaacagtgaagatggcaagctcgaggcatggagaacatgttaagggattgtcacggtgttttgatttaagaatatttctttaaagattatggcttgagtatttttgtaaaaatttataaatgaatcacgtgtttttgttttaaaataatgagatctcatgctttagttatttttaataaattagtttattatttttataataaatggttttaaacgaactatcgtgtgtgacatctcgggaaatcggagtgttacaattcggttagacaatgtgtggttagaaaacaatgatcgattttttggtaatgaacaaaatatattgtcaaatattcaatatgattccacaagatctagttttgttcaattaacgaaatatagccaagtgaaaggattttctgataaatccagatattattttgattccaatagtcatgaggattcagattatcacatattgatcaatcaaatagagattcaactaaaacaaagatcaattctttaggattcttcctttcttcaaatggaacaaacagagatagaatcataatgattccctaaatcctaggaggcacaaaacaacttcattttgtataatatagaaatatctcgtaaaagaagatttacctaataagaatatttgacactaagggccagtttggcacagctgtgctgtggaaaaaagtagctgtagctgtgctgtaagaaaaagca

SEQ ID NO: 76420 - DNA, 503 bp, Cannabis sativa
accccattggaataaacaactcaaaaattctcattcaccttctctttctctcttcatcttcttcttctttattttcatctactttatattattttataacaagtaaattgttattattgtatttttacaactcctcattaatattgacatgtgaactagctaggattctttaatatttgaaccacatagattatcgtctcatcatctttaatgctctcttatattttatttcatatttattatttgatcgagttgcataaaattttcgtcaacagtcgacactaatattttaggttgaatttagaaaaaaatatatataagttacacttaatcaatatagtctagcctttcaaaaaaaaaaacaacaaaaaatcaatatagtctaagatttgacattttgtgaatctgtatttatagcgcgtttactaaactgtaattggaatcagaataatcaatcggagaaatgtaggtttaaaatagaaaataatcggaaacaatatttt

SEQ ID NO: 76421 - DNA, 1152 bp, Cannabis sativa
  modified_base (1110)..(1112): a, c, t, g, unknown or other
aaggtttactaaactttatatgtgattatttcattattctagaattcatatgaggttgctaataaaacatacatggtagtaaatctagatcctggtaaaaaaattccaataactactcctacaccttaggtgataggtggaggccctagaactagctcaaaagtttgacccccaaggccaccaaatgctcccggtaatagaaccgacgagtaaattccacctggagagccacacgtggagttgcaagaccctaaggaggccaattctcgggttgaacagcttagccaaattgtgactgatctacaacaaaaattgcgggactctctcaaaacacaacacgagcagtttcaacactggttcgtggagaactgacagaatattgagagccagcgagttgagcaggaataaatgagagctaacctatctcaatggatgaaagaagcctatcactctggtttcaaaactacccatgcaggggcctatccgagctggtaaaagagattccccatcggccaattggccacattggaactagtgctcaagggaaaactcttaatgcacggaacactagtaagaaaacaccaagtgttaaggtcctccaaagggaagcaaactttgagcaagattctaaaaggacttaaactcgtgggcaccaaccaatggaccctccacctaatgcggagagagacctcggaataccaagagagccaacatgaatccaagaaaccacattcctttcctaagagtgtggatttacctactgttttaacctctttgtctcgcaaggaattagaaaactttactgagactattaattaggtcaatctctatgggccaaatgaggctcccatgtatagagcttcttgggagctcatttacaatctggccacactgtttgataaaattctttttcaattgggctcaaaaaatgtaaagcccatactctccttgacatcaggtctatgtttgctaaaagtgagattaatgctatgatcttctcgattttggaaggctcagtctttgataatttaggtgataacactgctcttcctttttctacaagttaaaatgatgtaacttttggaatatattttaccatgatctagattnnntaacaagtatgtttttaacatccttaacatgaacttctaa

SEQ ID NO: 76422 - DNA, 513 bp, Cannabis sativa
aaaatgtccaaattgtaaatttatggcgttcactagtgatgcaatgcatagcatctgattacaccttttagctcgatttttaatgactcgttaaggattagtgatgcaaaaagctgttacatgtttaagagggtttgggtaagagtaatgttaagttaaaatcatgattatattacctgtcaattttcatttccctcgctgttttcactttctgcaagaaagattccactgattcttggcttgttccaggatttttctttccctgtaaaaaatttgacaaacaaataacatgaaaaataattcagcattgagtgaatgagattaaacagattttaattactggcaagacccagatagaatattaatgctgagaaaacaaggtagtttgtaatgataaatatactgcatgctcaaataaaacgagcagcatggtaaaactactgagagaattcatccatatagttattgttgttgaatgaagagaaaacgtgttgactgttctaatattagaaa

SEQ ID NO: 76423 - DNA, 566 bp, Cannabis sativa
agattatactttaaataaaatcagaaaatagatttaattacatttattaaatgtgtgagctttacaaaccaatatgcaaagctaccaatattctatactctttaatattatctttcttttaataagatattacatattacttaattctttctttcttaatcattattacaaaattttttataaaaaaaaaaaattatgactaattataaattattattcttaaattgtaattaaaaagtctgtaactaaaagtactagtcacaacaattacaatttactttttactaaatgtatttttagctacaatattaattatgactaaaactaaattagtaacaacttatagttaaatactatgttttagtcacaaataattttttgttgttactaaaaatcacacttagtcacaaaaaatttatgccatgactaaaaaattgtcactaaaaataattgttttttgaagtaatttagttcttaattctttgatataaacttttactcaaaaaaaatgatataaattaatatttaaataattacttacaagttacattacatataagaattta

SEQ ID NO: 76424 - DNA, 784 bp, Cannabis sativa
ctcctaccaaacatagtgtaaattcaataaaatcatgaaatgggactaagttaaagggggctattcgattttttctgaatattaaaggctagaagtgacggatgaaagtgggagaataccaatggagattccaaaatcgtgtttttcatcatctatttttatcttttatgttttcaattaattttcagatgattagaatgaattatatgagctaatttagttttgagattattacgtgaaccacttgattttttttttatggattaaaatagttattcaattttatcttcttctcttattttatttccatgcaatctaatttaattatgcaattattaactaatcacctataattattatttatgaattcaaataaaaattttaaaaaatgagacttgaatctagattatttgtattattttatgagttgttttatttaatacattctttgtgattaaactttgtcatagaaatatagagaattttcatataaaataagtttgtaagtcttaatcagattacgatttggaaattataataatccatatttttctcattgttatttctctattcatttattgtttttaacctgctattattattatttttttttttgcttaaaatcctaaaagtttatttagggtgtgtttggaagtaactgtgtaattcctagatagggtaattactaattaattactagggtggtaattacacattttagtaattacactatattttaaattgcaaggtgtgtttggatatgaggtggtaattacatatgaat

SEQ ID NO: 76425 - DNA, 798 bp, Cannabis sativa
aaaagttgaggagttaagaaaccgacgtcgaaacggcgtcgttaatggcactacaatctccaaaaaagagcttttgaaagatggtaaagtatatatgttaccttcttctgttgatgaaaacgagagcagaaaatcgatatctttggaggatgatagtgtgtcttcttctgggtcacgaccaaaaccagtgaaggaagaaacaaagatggaaaccatggaggagaaaacagaggaggaggataaagatagtgcagtggtaaaggttgaggctttagagaaaatggtggtggtagaagaagaagaagaagagaaggagaatgaagaagaggaaatggaggaagaagaagatgaagagagaggaaatttatgtccaggatcaccaagtttcagagtgttttttgttgagtcatcattgggtgagaaggacgatggtaagtatatatatacatgtatatatatatgtatagtatttgacaatatgcaacaccattcatgcattattattattaccaaaacatttgtgcatatattatagggtgtttttatagtacaccactaaggatgtgtttctggtaattcgtatattgtagttatctaaaatattcagacacttaataatgcaccccaccatagaatttttctaatatatttatatgattatgcagttaaaaacgacagtaaggatgagaatcacatgaaacagaaatggggtagtgccaatagtgctgacagcattgtaatattggagactcatgaggaggaggaggtaaatatatatacatatatgtgtgtgtgtgt

SEQ ID NO: 76426 - DNA, 860 bp, Cannabis sativa
tgatgaataaaagaggcatttttcaacttacccctttaatcaatatatcaaatatattttttttaggggccagcgtcattcctgggcccattatagcagggtcggttcaacagtgggtcagtagggatccacgcctaagacttcccatcaggcccaaaaaaaaaaattacgttttatacctattttgcattttctattttaatttttatctcttttattattttttaatttatacccaattttatagattatattcctattatgtgtattagagactttaattttgatatattatgtgagatatatttgatactttaattataaaagagagtatttatcaattaaaattattttatagttatatttaattaatgtgtaataacaatggtagatctcaacctatccgaaaaaactctttaacaaaaagatcccaaagtaattttttaaaaataccattttgtaatttattattatttaaaaatataacttttttttttaaaaaaaaaaaatacttaatttattttttgataatttattttttgagatactacatttaatattttaataagaaaaaagacttaattatatttttaaaatactaaatatatttaaaaaatttaccaatacatataaaaaaaacataaaaaattttatataaaaaagttcaattaaattttttggcttaaggtcttcaattaacttaaaacgggtctgcttcatatagttatatgtaattaaaaatttaaatttagaactcatataattgaaaagagcacttatactattgatcatatttgagtttatatttatatatatataaattgtgttgaaaggggtctcttaaaaaaaaaaaaaaaaaa

SEQ ID NO: 76427 - DNA, 609 bp, Cannabis sativa
  modified_base (526)..(544): a, c, t, g, unknown or other
tgttaacacttttcattttgcattggtaaaagtttcaacgccaacatggattaatttgccaaccgcttttattagcgcaaaaatgtactgctgctggcaaaaataaatattgttttaccaaatacgctgacaaaaatcttatttcttgcagtgcatactgataccactgatcatttgagcatcactagataccaggggctctagtctcttgatcatgcattaaaaaagaaaactttagtgtaatttttaatcacaatataaattttttataactaaatgtgacttttagttacaacaaaaaattacaaattatgactaaaacataatatttagatataaattgtcactaattattatatatatcttattatttttatcatcatgttcagtatgttatgttaaataattctaatttttatattattataattaattaaaaattaaaatttattagttaccaaccacattggatttcctcacaacatagctatagcaaattgaccatttatatataaatatatatatnnnnnnnnnnnnnnnnnnntatatatatttatatatatctcaattgtttgcccgctcttctggtctctctcgtttttggtttgt

SEQ ID NO: 76428 - DNA, 1862 bp, Cannabis sativa
aaaaaaattatatatctttttattgaaaattccctcaattaatttttaacccatttttcactaagatttgtaggagcctaccactagtatatttataaagaatcttatcatgtctaactagaaaagtcaatgtagtacaaagatgattttttgttgttttattaagcaagcctcaagcaataaagacaattatatttatataaaaaagacaataaatacaatctaatttgtttacctccacaactacatttataaataataataataataattcaatgtgaacacgtgttctctctctcatagttatgtttcctttggtaggttagatttagagtttgtatttttaaataatttaatatattgatgaattttgttatttattaatttatttatttacttataatagaccttattaaaattaatgcaatttattttgttagatgggaaataatataaatacccaagcccaagttccaactatactacatactatcattcatttaagtaaatgataagagagtaaagagtatttattgaagaagaagaagaagaagaagttgaaggcatggatgaaaagggagaaaacatggaaaagggattgttagaaaaagaaaaagaaaaagaaagtatttttagtaaagtatttgatgaagtgaagcttttgggttatattggaggacctatggtgattgtgaacatgtcacaatatgttcttcaaataatttctataatgatggttggtcatcatggtaaactcgctctttctagtacagctattgcgatttctttctcagctgtttccggcttcagtcttattgtaagtcgattatttctctttgatattattagtattttcggtatatatgaataagttgtgaatatgattgatttaaatgagttgtttaaatcactaaattttatgaataagttgtgaatttgatttcatatactaatcacataatagtaataagaaagttttatattagttgatcttcttaaacttttgaggttagatcttgatgcaaagtcatgttatatttaatatatctatatataaattgttaataggtcatgttatgttaattaataatatataaatggttgagtatgagttgttttaatcaccatctatatagagagattgttagtattttcgattataagttgtgaatatgattcaaatactaattgcattatagtatgaagagagttttggctattttagtagacctttatctatttttttcactcggaataattttttagtcaaattactttttttcatattcgtgtatgttataattttttatcaaaataaaacttacatattttattatgcgcgattgttttttttttttatacgcatgataagtaataatttaaaccttatttttagcattataagttattcagaattttttgtttacaaataatcttaaataactacaacaaacataattataataaaaaaattaaactaaaaaaaattctaagtgtcgaaacaaataaataatctatcaaaacgagcttttaagaatctagtacacaaatttcccaaactataaatttcccaaattaatacataaatttatatattagtctatctttgagatgggatcttgatcaaaagtcatgttatattaagatatatatcccaactcaaattaagtcaacaatagctaaaaaaaaatgatttataaatatatattaaagtatttattgaattttaaagaagatttacacaattttaaaatatctaatatagtgcatttttagttattttctttaaaatttaaaaattcttttattataaaatatttattgtgagtgctctaataatctcgacttcattcattcatgtt

SEQ ID NO: 76429 - DNA, 1337 bp, Cannabis sativa
gcggcggcggcgcctgaaggcaccttcttcttgcttggaacacagccaccgcccttccccatctcttactgcgtttttaaaaactcaatccttgcttttcaagaaatcagaattcaaaaactcctttccgtttttcaaaatttaaaaatattcaaaggtaaacaaaaacgagctcgaagacttttttctctttttcttttttttttttggcgaaaacggatttggttgggaagaaaggccacgtggcggcgtttagtgggtacctgagagagtgagacgacgtcgtagtgtagaggaaacgaagggtttggatttggaatatatggaaaatggatcgttaaggattcgtctgttttggaaattaattaaattaaaatatgaaaaaaattagataaaactgttagaagccgccgtgattggttgctacacagtcatgactcatctaccaactctttttttaaaaaaaaataaataaatattgaattgaataataataataatgaaacagtaagagcaccatgtgttgatgatgttgatattggcatctgcctaactggaaataattattaaaaaaaataataatagtaaaagaagattattgtgcacgtagcgtaaaattaagaaaataaatgattatttgaaagacttttttaagtttaatacattattttatagttatatattctacaagtgcggataattctatttatgaaaatgaaatgtaacatttttttttcaaaggataactaactacattttgtaattggattgtaaaattggatatatttacaaaattagatttcaatagtgagagaagtgatgatctgggaggaatgtatgtcaattctagaagcagttaacagtttaaggtgcatattcaaaaggataaagtgaggaggagtgatgagcattacaaatccaagttggtcggctccccaatatgatggacagcttgcaacattgatttttcggtctatgaattctgatgtgtacagaattaaggttgcaaatattttctctatcaacattcacatggtatgttgccacagatccctcgttaggagtagggtgggcctcagcttagcccctccaaacaaggcctgcgcctcgggcttccacggcccaaagaatttcaaaaaaattccttcccaaaaatacatatctttattcttttttaatattttaaaaaagagaaatattagggggaatgtcaagcccagtaggatgtggctgttgttatgggttcatgttcgggttgtacatcggtcggtttgggcagtttatcctatatattttctaacccaatttaaagttcgggttgctaaaatttaagtgca

SEQ ID NO: 76430 - DNA, 661 bp, Cannabis sativa
tatatattattatgcttacatgaatatgttttcttactctttatttgtaaaaatagatttctcgttttttacttacaagagtttacttgtcccatttggccaagtaaaagcacctccttctaattagggctctactaacaatcattttgaactctacattaaactctaatttcttttatagattattgtaattaatagcgagcctaaattttttattttaaactagagcttaattgttacaaaaagtatttgttcttatattttaaacaaaaattatcattactcatactaaatttatttaattttatgataatttaattattatagaaatatctatgagagtctttttactattttggggtatatttattaaatttgtatataaaaaaataagcttttaagtgcaattttatggtgaaaatttttatcagcaaaaaaaaaaatgtaattttatggtgtatgttgctttgtccgcaattttgaaacatacatggtattttctttggttttgaccaaaaagagattacttttatatgaaaatagccatcattctttcacctcttatcgatttcagtcaaattaacagaaaaatatgggttaatattattttagattatgtgttttgcaaaaattattgattgtactttctgttttgttaaat

SEQ ID NO: 76431 - DNA, 878 bp, Cannabis sativa
  modified_base (437)..(438): a, c, t, g, unknown or other
tatttgatagtaaatctcatgttcccgactaaaaaaaatcatgttacgctcccttcttttaaaatggaatgtgaataatataagttatgggcgtgtttgataatatttatttaatcaatattctatttttttaataaaaaaaagtaaaaatatttttcaaaaacatgttctataaaattgtttttactttttaattttttaattaaaaatcaaaaacttaaatttttttttttttaaaaaaaatcactttcacaatttttttttcttaactaatattttggactccgaccccaacttagaccttaggggcttggactccgatcctggccctagtctctgactcggaccacgaccccgacatggacccgacttatatagaatcaaaaaataaaaatgaaaataaaagttatagaacacatttttattttctgtttttnnaattaaaaaataaaagtggttatagaacatatttttattttttaaaacgaaattttaaaaacacgaattttacttttatttttgtgattaaaaaattaaaaaataaatatattttctatatacttattactgaattatataatatgtattatatctattttttattatttttttaggggaaaagtacataaacaaaacattataggaagaccatatgagagtaataactgaaaagacagcaaaaggataaactccatccaaaaatttagaaaccttaacaatcttgttagacttttatttgggtttacattaacttttattagttttattaaaacttaggttgattagataattctttattatgttagtccataatgttgatgatcaatagttaatgagcctatatataaagtctagttgaagcagaattgtgagctttt

SEQ ID NO: 76432 - DNA, 583 bp, Cannabis sativa
atacaaaaaggaaaataacaagcctattttaacactccccctcaagatggggagctaattctaatcagccccatcttgtccttgaaatcattgaattgggtaggaaaaagcgtcttggtaaatatatcagcaacctgatctttagtaccaacatgacttgttttaataactccttaatgcaccttttcccttaccaaatggcaatcaatctctatatgtttggttctctcatgaaaaattgggttcgcagcaatgtattgagctgctttattgtcacagtagagcaaggtaggacctttgtgttcgatttttaattccttcaaaatagacagcagccaaacaagctcacaagaggtgtttgccatagctctatactcggcttcagctgaggatctagaaaccacatgttgcttttttactctttcaagaaatcagagattgtccaagaaaaataaaaaatcccgtagtggatcttctagtatcaggataagttccccaatccgcattcgtataagctttaagttgaatctctgatgtagcggggaagaataaaccttgaccagggcaattcttgacatattga

SEQ ID NO: 76433 - DNA, 611 bp, Cannabis sativa
acacacccacctatggccactagctcaagtggaacaataaagtacattatcttattatttcattactttgtcacacattagtatctagttaaattttgattttatattaataggctattcaatatttttataccagaactattgtcattactaatttgtgtacgttaaaaatttagttgctaaaatttctttgaaatagtggccataaagggtgtaggtgagtgcgtatgtctatggaggtcttgggatcgaatttcaaattgtataatgcatgtatataaaaaatatttcaataaaaattccctaaaatataaaatgtctattaagttttatctcattttacttataaaatattaatataactaatgtgttattaccacataaatatcactgatataatttaatataaaataatttaaaattcaagaaatctctttcttaacattagttaataagaaaatttcaaattagtttacttttgtttattaatagttaataaatagttaaacaatttaatttgcaccgcttataatgatgcatagcaacatcttcatcaacattatgccagtcacatgctataaaacaaatttttaaaattttccgagtattat

SEQ ID NO: 76434 - DNA, 1754 bp, Cannabis sativa
ctttaaacaaaattatgtaagaagttacctaagatattttatgttattttacttgcttattaagatattatttttattttgatttcaaagccaaggtcaaaatctcatacataatacacatggatatataatatatatttgactatattctattatgagtaagtaacactcttataagcttttgttcaaaaaacactcttataagcttattgtatgccatttttgactatttggtttcaaatatggcataaatggttacatgttttgcaattttgcttctcaacttggtcataacttgatttggtcaccaattactctatacactatataatatattaagccaaagtgcacgtatgcacttaactcataatataatataacccaaaattctcataaaaacatgtactttaaaattaactaataagtttgataaatgggctacctttcttattaattgcatttataaataaatatgtggctaatactatttatttatttacaatatagagtagaaaaatagaattagtggcagattatatggagacaagtagggttaattgatctttataaaaattatatgtgtttataatttaatctattttgtgtaaaattttatatttataatcatattttaatataattttttgcatttatatatctttttaaaaaggtttttttttgtgcccctatttatatatccatctttttcttttttttttgaaaagatccaaaataatcttataatatatatagtttgaagtttcttttgttaaaaaaaataataaataaaatatatagtttgacgttttttttttctagggataaaacgtgaagctaataagtttgacaatattattctattaaatttggcttgagttcaaagaaaatggtattgaagaaaaagttgacccttttataaattatatggtgcacttttaataagtattactcacgaatatatattattagaaaattttgaatttttatatttaatttttctatctaattaaaaaaaataaatcttcacattatatgaattgagtttgttccattggctgaaaaaaatattctaataacaaaaaaataaataaagaaatattgagtttgacttaaatatttatatataaacatatttttgggtatagtttaaaaagagacatgttttgattttttctaatatgagtagttaaattaagtataaaaactcaaatttttattttattaattattgttggatcaaaatttaataattttatatttttaaaatttatatttataattaaatttttttaataactatgtataatatctattaaaaaatattccatatataatactcaagcaaacataataaaaaaaaataaagatattactatattattatttagatagtcatctaagaaattatatgtatataatataaatagtttaattaactttgtagactttgagtatccaagtcccacatgtaaaaaaaaaaaaaattatatcattctagatattataaaaaaaaaatatattgaaaatataggagtatgatgtatattttatcttttttaaataaaattgaaagtaagtaaaattaatataaactaggttaaagatatgtaatattggaatactcctaacatttctaactcttgttttggtttcttatgtgacttgggaaggtgtattctatttatgtgatcaataaaaattttttatccctaccctaaaagttacacttaaaataaagggataatttcacaaat

SEQ ID NO: 76435 - DNA, 565 bp, Cannabis sativa
ctagttatgattttgcaagaaaaagaaattaaataattataaggatacgtccagaacagcacgaatgactgcaaaaagtcaaaaacaggtgagcgttaatgaaggaattgagtgttgtaaatgattaggcaaagagtatgaaattaggaagaactaaataccaatagcccacaaaaatatatgaataaagaaataaaagagaaaataaagaattcacaaaaatctaagaaaatttactatataataaacagagaaatatgtaaaaaaaatcacaaccatacaacactaatttcggatgtaataaatattaaaatagactaataataaacaaaattatattgaataaatcaattagttaatgaaaattaaatgataaatctcccaatataatcgtcacatgtacataaaatttttggcaatgaagctgattcattcaaattatgaatttatttataatatagtatatgaaacgaaggaatatgtgaaaatattcaaacttattttgctgcaacaataaacattatggattaatgatgacaccccaaaacaaaaaataaaagaaaaa

SEQ ID NO: 76436 - DNA, 811 bp, Cannabis sativa
tctcatgaaatctaataaaaaaaataccataggatagtaatcctaccttatcaatcttgtccttccataatctcctcacaaaaccatccagcacattcagaggagggttttctccaagtatatagcagacaaagatgaattccaaaaggagatctcctcttcgatgtcatcaagagtaattttaacctgactttgcttttttgagttctcaaaagaattggataggtttcttactacactttcagaccttagcactggtgcggtagcatgaataccttttgctgcatcttttgaacactcaagattagctgttaggaaaaaattagaatcttgttgtaccacctcttgttgcagtatcgcattcaatgaagatctgggagttaaaggctcctgaaagcagtcgttctgtgtagttcccaaaggttccaaaactcgacgatcctcttcttcatcaaaaagttcaaaaggctccactcccagtacctcttccatcgattttgttatcttcacatcagaggaggaagggcctcgtttcttcttcttcacggtcacttttgcagttgatttattagcttaccctgctgcttagatcttgtcttagccatggcaccagctcagggagagctgcaaggtcgaagagagagaaagcttattattttgatgaagttttaattgtatgaaattaatttaaataatatttaatttaaattaattaatgttcaatgtaaataaattaaatttgtaaaattatatgaagtttaaaactaaaaaaataaattgattttctatgaaaattacatatcatatcata

SEQ ID NO: 76437 - DNA, 581 bp, Cannabis sativa
gttattcttctcttcacaaataactatcatagtatcaaagcaagatttatgatagtgaagttcttaagcgtaatcatagcttttgcggatccaactctgcggtgagttggctggggattgcaggaggcaacgcgcccctgcctgaggttcggggcggagcctcgaaagttttcgcagacgttcgtacaatcgtgtccgtacaatttgacagtctagttttagtattaaattcttcgacttttttcttgattcgcataacagtttcaattttgatattcgcatagcaattttgggtattgattttcgcagcacaaatttaaattttcatcagttttgtatttagaatttttttacaatttgttattttttctacaatggctaccaataaagatggttcccttcaagcgatcagcgtgagattgaatagaaaaaaattattcgtattagagttatgttatgaaaaaaaattgaaaagaaaaaagatgtggggttatatttttgaaacaaagaggcaaccagcaaatggcaatgcagatctgttagaaattttggaagtggacaatttgaaaatcctcaccatg

SEQ ID NO: 76438 - DNA, 3842 bp, Cannabis sativa
cagcaaggtcagccattctttcttgctgcaaattcttacacttctcatagtcatagagattctcatgcctgaattttgttcttcctttaatttgttcttttcagggcaatgagtgggtcagtgccttttgaagaggccttggctgcgagactttccttgtttaatccttctcaatctcaagttcaggaatttcttgaaaagaggcccccaaggtagaagggttaccttcaaaatttgtttactctagctattataattgtggatgtctagtcttgcttttgctaaataagaaggaaatattcacattatcatttaaaaaaaaacatgcaagagaatctggtttatgacatctattatcaataaataatgaatgggggtcactggaatatcatcaaaattgcaatgtgtaagtgtatacatataagatgtgagctttaaattttgttgattggagtcaattgacattggaatgtatcttaaatagcatattatgtttctgccatggaacgacagtatttctattttcctagctaactatgtgatttgtaatttgacatcacatgtcataagacttctacacatatgttctcacattgtttttgatagtattttgtactatgtataaagtttatgtttcataaaaaaataacctcaacttacttctaaaggtagagatgtttgctaaacaaaatgtgattttttttttttttgaagagaatgataggatagagtttgtttgtaataaaaggaagaagtaactttttgatgtatggtgttggtgcgaattcattcctttaactgaaagttagaggcttctgtttttttaaccacttatggcatcacaatgaccagaaatttgtgttcattttggtcttcctgagtctgctattttcctgcaggctttctcctggcatagatgagttggtcaaaaaactgaaggctaatgataaggatgtgttcctgatatctggaggttttcgtcaaatgatcaatgtatgttgttaaatgattaatcagtatcgcgataaacttaactcaacatcttatgggcttcatctttttgaactattatgtttttgaaaaaacacatagattactaaggaactatattatggtacacttatttagtcatcttgatggcagaataagacctgaggcttctaataagagagccaaaagactttaataactggaagttctatatacttacagactcccataattgatggatcgccgtgtgcttaaatctgaaaaatcacatttttctaaagcataaaccaaagatatcatggttataggaactttttgtgtaaaaaattatgtacccaatgtccaacttttaacgaagaatagactgaatatttatgtacttttaattttaaatacttgttgattgagcaattttctgtgaagcctgttgcatcaatgctttctatacctcctgtaaacatttttgccaatcaactattgtttggaagctctggggagtttcttgggtttgataacagtgagcctacttcaagaagtggaggcaaggctaaagcagtgcaacaaataagggaggtcagtttttgaagctgattaacttaatttttgtgtttttgaagtattttgctcaataaactgattgagctcatctgctaggctcataattacaagtcactagtcatgattggagatggtgcaactgatctcgaggtaactataaaaacctcaaatctataactgtctcttttcatgctaccaccacatgtaatatggcattgcatgctggttattatgatttgaagtgaacttagtttgtaagattatcaagtgcaaacaatttatcattgaactagtttcatagataagtaatgattgacataataatatgttattttattttccatgacgaatttcagaatatttgaaccctttactgtattttcttacacaaacaaacctatccaatccaaggacaccctattatggtattacttgtgccctaatatttttcttttcctacacataggcgcgtaaacctggaggtgctgacttgtttgtttgctatgctggtgttcaacatcgagctgctgttgcagcaaatgctgattggcttgttttcgatttcaaagacctaataagttgcttggactaactatataaggtgggttcattgctagccctactccattctttgcttttttttttgtggttgcttgtaaaaactcgtatctgaatgaataaaaagagtttgttctttccagccagtaaatgcaaatgatacttccttctttgcttgcatactataatatgtaaccatatttatgattaaggggattgcattttagttaatggacttctgctatttgattaagtatatttaagttacaaggctaaataaatgttagtaaagttagtttggcaactgtgctgtggagaaaagcagaattgtgaaaaaaaaaaggtgagctgaatatttggtaaattataaattttaaagtactgtgaattattaagattctattataataataatgttataatcttgtttattattatcacaaacatataaaaaaaattatgttatacaaaaattttattttctatatatttttagttctttgattttcatagtataaatttatatgcatttgataaaaataatttatatatttttttaaattatatttttatcacttgtaaaaaaattataatttataattcttgataaattattaaatgtggtttgttaataataaaaatataaatataaaatatttttaaaataaaataaaaaataagaaaattaaatatttttttcattcaaaaaaatatatatttttttgtaatatataataaacaattaaatatattttcagtataaaataatttattacagagtttattaatcaaaaatgatttttttatactttggcagtactaattttagtttttagctgtttttttaactgcttactaaatacctttttatcataatttttttaaaaatagtttttagtttttccaaaaattgtgtcaaatgggtcctaaattgctcagaggccccctaaagtagcaattttatgcagaccaagctctttacactcgagcagggctcgccctaaattgaaatgcgccataagaaaaaaaaaaatttaggcccttactataaaaataaatagtattttttaaaattattaaaaaatatgtatattttttaaaatttatttttgtatttgggtccctaaaatgagtgggccctaagtgcgggcctagcccgcctatatctaggaccggccctgcactcgagaagagagcgcttggtaatagctgtaataataagtaaattaaaccatatatatatattttgataaatcacaccaaatatagcatttatctaattatcaaataaaatattacaaattttgtcatcttagatagtgcaccaactccatactttaatctttgaatacataattccatactttaatctatgaatacataaaataataatcaatataattttttgatagttttgatgctttttactgtttttgtgctttttatggtttttgtatcatttattatgacttgtctctatttgtttagagtattttatggtatggtcaatgagtaagagaattaatctattttgtgctcataatttctactttggcgattcttttcacttttaatagataagtatttcaaatctttttaagtctttttctttaatattgattgatttaccatcacttttcattttatattttttcattatattgtattgtaatggagtattattttttattattttgtaggttgttttgtggagggcctacaattacataaaattt

SEQ ID NO: 76439 - DNA, 1008 bp, Cannabis sativa
aatacattggattttgaattatgattaatatatttataaaaaattaaatttaagttgaaaattaattcttaattaattttagatcaacttgaattatataattttcatcatatttatttgaaagatatatattaagtttggaagatactttttttaatttattttcagatcaatctaagtaaatatttcaataaatattaaaataaaatttatatttagttcatctaaattagtaattttaattaaataaatagattaaaataaatatttaaaatgaaaatacaatttcttttaaaataatgagctttaattataagatattcgatctccattgttggtcttacatgttttattttcaatgggacctcgaggcgctagattttgtctccctaatggatggtcatccattgcagatttaacactgtaagatctcgaatgataagtattttgtaaattttttttcctagtagactcatccctacattgactacttagaattaaatttacaaatatgaaacaatggtagaagctcaagaaataagataacattgactgtcgcctaacggaacaacattggattcttattttgatcgaataaaaggttgttaaaatagtgtccattttaaatgagttaactactctattcaaccgatgatatctttgacactcgcctactgagatattgtatatcatctagttgaaaatcttagaaaaaaatatttgagatgtatttgttttgtatttttctatatcttcattacttgctaaatgtttacaaatttctaaaaattgtgtatgaatttatattgaacctgcattgttttctgctattgattatgtagtatcaattttgaatcttcattgttggtctaacttagcttattatttttaatggggcagtccccaatagattttcatctgttagacaacataatagtgttagatctcgtgagataagcattataatgaccgctttagtaattgggattagtaaaggcaattagcact

SEQ ID NO: 76440 - DNA, 645 bp, Cannabis sativa
accctttgtattgtagggtttatagtatggtaccatgtcccttccctatgcttaagtttaacaatagtttagcaaatttttattgtactacaaattcatatattaaataaatagcatcaaaaatgagattagtgggtaacatctaaaccaatttaattacactaaataatttattctattcctgctataaaagattggaaaccttaaatttgaataattagattgaatcagatggctgatgagtagaaatgcatatttttttatggggatgggcttggtgggggacccactctagggtggcaattcgttttcgttggtcgtgttcgtgtaatgtcgagacacatgtattacaggtgtgcagggccgaccttgagggtaggcaggctagacgtgcgtcttgggcccccgaacgctcagggccctgaaattgtgaaaaaaaatattaatatatagataaaatattaaataaggaaaaaaaaagtaataaaaattgtttggtgtagtggtaaaaggtcttactttaatctaagaggtcatggggtcaattcccaacctctattttaaaatatttaatgtgtagttatgaggagttgaaccttggagctcttaagagttttacacagaactattatttttataatagtt

SEQ ID NO: 76441 - DNA, 1755 bp, Cannabis sativa
tcataaaaatcaactttacttactttatatttgcacaatagtttatgtttactcattagttgcaaatctctttcactaatatgccctagcgttcagagccatagggtagttttagaatcctcaagtgagtttgttgttgtattgtggcagtttaaaactagctccccttttagatagtagtgacctttgtagactcggccaaccccaacccgtagaccagcgagctcgaaactcgcgatctcgaaccatttcacgggtggggtccgagtacaattttttgaactcaaaacccgcgaactcgaaactcacgaacccaaaacccagtcaacccacccgatgttcacccctaacaataacagcacaaattgatgagagttagggttagagaaaacaaacaaaaaaggaatttgaacacatagatttgatgatcttgaagttcatccaagaacatgggctacgtctctaccaagctctcctaagagtagcttgattctccactagattcagcaggtaattactagtgtgatttcagatttaaacacaaaatttttgttgataatctcatatgattttctcactatttctctttcttatgtatgtgattacaactgagctctgaagagcttctcactctacattctcactccaactccaactcagctcgcatgagataaaaaaaacatctcgaggtagatctctcaacttggatctatttatttataggttgtaaaagtagttgcagcagttagggagtgtagttgttgttgtaattcatttcttgttagtttgttgtaactaaaacaatttgagagtctttgtattgagtgtctgtactagtcttggccttcgagcatacttctttgcaaggcaggatgggtcttcttaccccatttacattcctccttgcaaagacaaaattctaactttagcttcctgcatgatacactaattggcttggaaaagtttcatgagatcatgctgaggtagctcagcatattgtagtatcgacccaataaaaagactgattatctatgtattgtcattgcttttacaaagtgaatgaaaaaatataaatatttccaactttgctttagtgcgaactattttatagttggagaatctagtcctttatttcatcatttatatatggatatgatgtgttacgagaaattactaaaaagtatcaatagtgtctaacttcctcctacgtgttaatttattggttgaactaaatatcaagttccaaatagtgtctaacatcctcgtacgtgttaatttattggttaaactaaatatcaaattccatataattttaaagagtatcactaaccaatcgtaaaacgacacgtttaaaaatgctaaaggaacccaagaataatgctacatgtcttatatatatatttcattaacgtttgaaacaacacatcccactaattagtacatataataagccaggtatgcgtggcgcattatcgtgcaatacataaatatattgtattccacaaactaattatatggtcaaaacttgtctactatttttagcatgctatattaatagactatagatgcaaaaataatggaccatataatcaaagaaaacttaattaagggcgtgcaaaatatattcacactcacacacacacactctcaccggtttcattccactaattaaacaaaataagaaccatgtgcaatatgtcttcattatgaaagtattgcacattaaccacaccacttcaactactatatatatat

SEQ ID NO: 76442 - DNA, 1513 bp, Cannabis sativa
tgttattgcaacaaaattagatgacaaaacttacatataatcgatctcatcaattactctttttcattaatgaaaactattctttcagtttcagtttcatttccattctttctcttttttttttctttttttttttttatttctgacaaatcgatcataagtgctaagaacctccacaatgagaaagaaaaaaaatatttatttggatgaaaaaaatcacattatttagcagtacttgattcataattttaatataaaattacacatttggtatatatcaatttgaaaaaaaattaatgtcattaaaattatatttacacaatataattatatatttgtgatatatctgaaacttaaagatcttacaactttttcacaccccaccctcccctttagcaacaataaaagagagagcagccgccaaagccgattgaaacttaggatttgacgtaattgctttggttgctgctgcaattgtctcagtcgtcagtggttgctgttgattattatgggttgaagctgtagtagctgtagtagtactactactactaaggttgacaatgttgttcatgtaagattgataaaatttataattagtaccattattagcttcttgaaatggtatcccatcgctagtagtcaccattgtcccatgagatccaatacgtgggttacatataaatttgttttgaagagacgtaactcgaaaatttttcatgtaatcattattattggtaatattgtaaccattcaaaatattgttccacggcaatacagaggaggaactcaaagacgaggtcgaaaagttgagacacgtagaggagaatatctggatcctatatgagaagttgaatatgggtttgggagcgttagatctagagtgactgttgggtgagaattggaggttgaaaatgatgtattttctggaaaatagactttttggggtaagagttgtttattattgttattattaatgtttgaggtatggaagaacatagtactaggtatatggaggtgattggaagaagaggtggttgagtgagactgaagcatggaagtagcagcagaagtggtggaagccatggcagtggcggagatgggaagtgggtggttgtgggttccttcataagtggtaattaagatagacatatcgtcaatgcatctttggacctgaaaagtattataaataacaagtaattagaattaatgttagttattccatcttatataagatatatgtaataactaatgtaatttcagtatgcatgtgtgattattaattcataagtacttttcgttatcattttattcttgacccttacacaagtgtaccataatagttttttaactagtcacatttttttaattaaattagctagtactgttacattgaaaaatagtattatcatgtgtaatatttgagaaatgctaatgggtgtagcataattcaccaagaagtgaaaaatatgcaaagaaaaataggaaaaaaaagatgaaatttgtagaaatgaac

SEQ ID NO: 76443 - DNA, 830 bp, Cannabis sativa
ttaaatccatatataaatatacatataaagtttacaagccgagatccgagattaaaaacatatttgaaaaatatgctatatacatacattagttttttttttacaagtcacatagttacaacaaaagctaaaccctcaaaatacaatatgaccaaactctcatggttgcattgccgcagtatgtacaatcattgacaagccaacaattcactgttcctccactttcgcttttcccttacttacacatggtatcaaactgatgaactaacaaactcagtaagatatacagaaactatatattaattaagacatgtaggagctccaatttttaggatataagttgaaatatatagactgaaaataatgtagatatctttgaatggtgaaattacaaaattgcccgaaaatctcgtctttagcctatagccgcggctacataaagcttagtcgcgaccataggaaaattggaaagttcatgctctctggctggcctcctagtcacgaccataaaaaatggtggtcgcgactactgaagcaaatttgacagcgtcaacatctttcagtaaaatatgcataactttcacatacaaactctaaatgagttgattcaagatgcgttggaaagaagaaaaagaaatctaaagcttctatgttttgaatttttccaaaatctgatcacaacatagtcaaatttaggcttgaagttttagctttattttcttgtagaattttctctattctatagattgttacttttcgaaatttgatcaattaatacatttcaagtgtgaaacctgaaaccaaagaaaacaagcgtaattccattccaa

SEQ ID NO: 76444 - DNA, 894 bp, Cannabis sativa
tcacttcactgaaccaggtatctctctttctctctctcattttctggttgtgtgagttaattggggatgaagattttgggaagggattggaggtttgctggcaggtagtgttggctctgaggagttgtttttgttttttttcttcttcagcagccgccgttcccgtcgtcggcggctctacattcgacgactccgtcttcctacttcttctttgacctatatctctctcttctctctgtacggcctcggccacggcaacctaacttcgacgacatcaactcagtaagtggcggcggattcactttcactctacagctacaggtatcaaaaatcacaaaaccatcaagtcttcacttcaatgttaaattattcactattctttctattttcacataagaaattgaatttaaaattgtaaacgtaataacactataaattataatgcacctaatattggtttttgtcagtttttttttttttttaaaaataaaaacaatgaaaaggaaaaaaagaacctgtaatattgtataaatagtaaatatatgaagagtttgcatatcttagttgaggagttaagtagtaaatctatcttggaattgttattttctaattcttcagtggattatatgattcattcattcattgtgttactgaattttgttagtggattttaaggttctttgtttgtgtgttactgaattttactagtggattttaaggttctttgtttgtatattactgagtttattagtagattttcaggttctttgtgtgttcccttcctattcacttcacttcactttagaaaccggtttttgtttttttttgttttaaaattatatgtgtttgtttccctatatatttcagaaactggtttccaacattactttatat

SEQ ID NO: 76445 - DNA, 570 bp, Cannabis sativa
atagattttgctagttaacattggttgtgttttcatttaaatttatcatcctataattagggccgatctaagcattttaggggcattgtgcaaaattttaaaattggactctttaaaaaaaaaaaaaccgtgtacataaaaactataattctattactagcgctttttttaggattctttcataaattttttatttatgtatatataatatgaaaagaaaaagaaaaaaataggccttttctttaaaaaaaataaataaataaattgggccttaaaaaaatagaggccttgtgcaatggcccaagctgcctaatgcttgggccgaccctgcctataatatagggataagttgaaatgtacattcatctgttaaccaaacatagtctcattttaaattcaattgaaaagtaccccttttataagtccattatcaattatacccttacataagagtaatgtttagggaggtgaggaaggttttttttttttttaaataacagatggtataaattaaggaaaattttatttacactcctaaaatttctaaagacaccccattttaataatttt

SEQ ID NO: 76446 - DNA, 858 bp, Cannabis sativa
aaaaaaaaaaaaaaaactatttaggtacattcaatttgggtcttctttagtaccacacattgtctagcaattatctggtaccacagttcaggtctagggaggctagttatatttaagcaaaatacacctaggatatataatgtttatttttaaaatgttagtgagagctttggacctgatgttgttggtgaaggctttgaaagtgactctgatgttctttctatcatagccgatgaaaacttttctaactcttggattttggattttagttgttcgttccacatatgcccgtataatgagtgttttgatacttataagatatatgatggttgtattgttttgataggcaatgattctagctctaaagttattagaataagaattgttaatgtgaaaatatttgatggtgttgtgagaacactgatgatgtgagacatgttccaacatgaaggaggagcttaatctctttgggagttttgaatactcgtggctatgactattttgcaaaagatgatgaaataattataaagaaaggtggcttggtagttgtgaagggtaagaaagagtttgtataaattagtcgggaagactattttgggtggagctatgaatgtgaagttaagtcacaaaagacattcagttagtgtgaagaaatgtggcaaggtggagaagactctaatttcagttaaagattgtttgaagaaaaaaggcattagtgaaagattgaagaatgtaaagataatgtgctcaagtgaagttcaatgagagtatgaactcgatgttagatgtttatatgtataaactgaaatatatgaatgtgtatataaaatgcggaataaacaaatatatacactatat

SEQ ID NO: 76447 - DNA, 600 bp, Cannabis sativa
gtgggggagttggagtcgtcttctgcgagtcgtctgttgtcgtcgactcttctgggcttggtcagagatgagcggatagatttctcacgtagagaactcgattgacctccggtggaagcctggtgttacctttgcggagactgattgttgtcattttggggatttagggttttggtgtttggagaacgagaaagtaagagagaaaaagtaaagttgcagagaaagctctcgtttggggatttcccctgttaaaataaataaataaataatataatttcttttttttttctaattgaattagaattaattttttttgtccaaaaataaataaataatgaaattttattgcaagcaattaaaataagataatggataattatataaattactattttttttttgtaaaaagtttagagttttatattttaaagatttttttttataattttatgatttttttatagaaaaaatacgaaaattacataaaagtagaaaataatatccaaataatatcaaaacaacaacaatataattttttcaatttatatttttaaaaagacttaagtttttttaatttttttttccaatttatatttttaa

SEQ ID NO: 76448 - DNA, 614 bp, Cannabis sativa
  modified_base (540)..(571): a, c, t, g, unknown or other
aaaaaataatttaattctgataattagatttcaaatttgaaaagtaaaaatcaaaatacaaactacacaaaaaatttaaaattaattccatgaaaattacatgaacaaataaaaaaatgaaaaaatttggatttggctcggatggtatcaagtgcataccatccgctcgcgcatcaaagggaagcaggctgagaatcctcggcgctggaggctgcatgcagccttttcgcgcgcggatgagggtgttcagacaggggacagccgagaaaactcggacaatccctgtcctaatgcgcgtgcacatgggtgatcacccgtgtctgcgcgcgcacattatgtgtacccgattttagattttttcaaattttcgaaaaatcataactaattcaaataaaatcgaaatcaagttctgtaaaaaaaatgaattgcttaatttttcccaaactatccaaaaaaaaaaataatttcagaacgaaaattcaattatttttcattaaaatttcgcaaacatcaaataatcatcaaataacacacagatcnnnnnnnnnnnnnnnnnnnnnnnnnnnnnnnnttttaagtccaaatttcttgaaagaaaatcaattaccatggct

SEQ ID NO: 76449 - DNA, 870 bp, Cannabis sativa
tttttttaattctctaaaagaggaattgactaaagcagcttatgaatgaagtaaaccctactaggaagcaatggatttggattctttgaaaaggaaaagcaaaatatactgacataccattaatactactaaatttaggaataaaataatgaaaaatgatacgtatcacatattattattgttcttattacaaaaagaagggaaaggaaaaaaaaacaaattattatatcaataatggacaatatgttgacaattgtctaaaatatcattgtacaagtatatatatcctacattaaggaaattatttaacttattcccatgcaatcttcttcttcttttttaaggtaaatactaatttgatataatatgtttctataaaaaacggatttatagctagtatcttaatatttaattacttattgtatcagtcttcttgataaaatttgttgatcaatttgcggcgaaattgcttcatgttttaatttttatacatttaacccctttatttattttttgtggcaaaactcccttatattttaatttttatatacttaacctctttatctttttttttaatggcaaaacccccttaaatttattattttttttttttgcaaatttaaaatattagttagatattaccgttaaatattaacttgattactactgtgtcattttcttattggtatatttaaattaatttttttcttaaaaaaattaaactttaatgacttggaccaatcaagaatttccacgtggcaatttacttaatagttaacagtcaagtatctacaaaagtttcagaattataacttaggtattattaccgccaaaaattaaacttgctatttatttgcaactaagagttaa

SEQ ID NO: 76450 - DNA, 646 bp, Cannabis sativa
ttgctactaaactagaaatgttatgacaaagttagtttctcttttttaatttgcttttatgccatgttgttggatagttgaggcttttattctttctcgggagtttgaaattattggaaaaaagaaaagcaaagagagacttatggtaaaacttaatatgcaccaaagtttttttaccgcgtgaccattcttacttaaagcttttatccataattttgggaaaaacttttgtaagtttatattggcttgcaccactctttttggtttttctttgtgctcctaaatggccaacatttaaagaaagtttgttctcgaaagagtcttagtcttatttaggaagatttattgcagcacggagatcctcctgatcatgatgcaaggtgttagtgtgaccttgcatgagctaagggcgttacgaaggttttgaatctcagtgccatcccctaccatcgtctaagcattggttgtggatgggattccagtgctgggagtgatttgattgactgcaaaactggtattcccagtctcttgcaaagctagggtgatcccagccagaggggaagtcacaccttggcccacagtaggtggctgtgtgttaggctgctcgggattggttcctggagggacccttgtattcccaggggtt

SEQ ID NO: 76451 - DNA, 986 bp, Cannabis sativa
atgaatataaaaaaaattagactaaattttttttctagataccgaaacaaatcaaggttgcatcagtacatctcttttaagggggtgcattgtaaaatcaccgagagttattataatctttgtaatgtttttatgtctatttatacggagcattttagatagctaaatgtatcgattttgcttctattgcaggagttttttttttttttttttgcaatatccattttttttatttatatataggcttacattatagttaaatagtaggccttttgctaatattttgaaaattctcaataatttaaattgtaaaaaataaaattaaaaataaactgcatataacataaaattggcatgtgtactactcactatatgaatcctatttttggtatcatcaattatttaaatatttttgaaaacaggcaggtttcttactataattataatatacgtcatataaaaaaattaacttaaaattctctatatacaaaaaataaaaaatgtccctaagcacaaaagtgatgtccctaccttatataaatggtatagatgtgtatggtggataggtctcactacatacactcatgatggcacataatgctcaactttcagattttgttaaggccttcgtatttgtacatttatacgtccatccaaattattttgttatgtacaattcaaaaaacttacgagaaataatattcattacaatttacaatgtttatgtagagactagctatatcaagactacttttctatatccaattctcgagtagtaatatatatatatatatatatatatatatcaaagaaaatgcatgtcatgatgatccctattatgaatagtcgggtataaatagagttaactaattagctgttagagagtcccacattaatatagcctactcttctattattagttttgagatgaagactttacaattctaaaattagcatataacttagctttgatctgatcatgaatt

SEQ ID NO: 76452 - DNA, 1457 bp, Cannabis sativa
aaacaaataaaaaatctatcagaattatcattttggggtctactatagaaattttcatcactttaagtactgaattttcaatttttaattgaaattacattaacatatcattactaacattttctatctcaaccgtgtaaaattgacaaaaactaaaacaaatatatttgatggtactaaaatttaggataagtctatagtacatccctagaagaatgtttcggtagactcctaatatgttcggtatacagaagaagtttttagttttagtcaaattttttttttttttatttatgatcgtgtacgttatagttatttaggatcacttgtaaatttttaaaaaataaaatcaaataatttacaatgccgaaaataagatttacatattttattacacatgcgactattttctcttatacgcgtagtaactctttaaatctaattttcgacactatatatttagaattttctaaaaatttacaagtgataaataattacaatatttgcgatcatgaaaaaaaaaattgactaattttttttctaaatgtccaaatagataggggttctacgagaacgaccctttaggatggtctactacataaatttcctaaaatttaatataccaataaagtaagaggtaagtctagagtacaatcccctaattaaataggtattttggtagatcatctatctgtttcggcacaagagaacttcttaatctatttttttttttatgatcatgtatattattgttattaggaccacctgtaaatttttagaaacttcggagtagtttacaatgctaaaaataagatttacatattttgatgcatgcacgcctttttttcttatatgctgtgactatttaaaccttattttcgatattgtaaattattcagataattttataaaaatttacaagtaatattaaatagctacaatatatgcgatcactaaaaaaaattaaactaaaaaatattttaagtgctgaaatagataaaaatctatcaaaacaatcctttaaaaggtctacaacataaatttcctaaattcatcataataataataattttaagctcaaggtatgtagcccaaaatgttataactagataagttagtagacctttaaaaaaatatttcggtagaatttatatctattttgacataaaaaaggttgtttaaacaatttattttataatcgtatatattatagttatatatgactatttgtaaatttttaaaaaatttacaatgccaaaaataatatttatatattttattgtacaaaatattttttataaatttagcaagtaactatttagttctaatttttggttctataaataattcgaattttttgaaaatttataaataattttaaataattaagatataataagtgattataaaattaactttttttttcttaatgacgaaagagacagaaatctaccaaa

SEQ ID NO: 76453 - DNA, 1163 bp, Cannabis sativa
atttggaattcaaggtatgagagaaacaaaattagcaatgttctttctttctttgatttaaaaaaatggaactctagtatacatgttacaagtcttaggacaagacttttcacgatcaaattaagttctatctttatttattgagtaatttatggtgtaatatctaaatttaacttataaataattaaatttaatttttgatggtaataatatcaattgcaaaatatacaattaattaaaaacaactaaaataaaaataaaaaatactaaaataacccttattaattatttaacaattttaacaaaatttaagttaaataattggaattatttactctaataataataataataaatgttaaaagataccagtagtgcctaacatctaatcgtatgtgtcaatatcgatattgttctaattaaatatcggattccatataatttaatgtaataatttttaaaatcgtaaccaatcacgaaaggacttctttagaagtaccaataatatttataataagctcctcagatatctcttcagttccacacaagccaaagaaaaaagcttcagaaattggaacaagtaatataaatatatataaataaaataaaaataaaaatacaaaacatcatcaacggagctcaaaacccaatgaaaaagtgaaagaaaacgacgtcgtttttcaaaatccacgtcagtaaatataaaaaactcattatagcctctcaattatttatcttaacgcattgtgtttggccttttgtgttttattattattattattattagtgaatatgcatttatgaaaggaaaaaaaaaagcaaaggtgggttgtgttcaaacttttcctccacacaagaaaaagccaaggttgaagctttttcaagaccatgacactagaaaaatcattgccacaaaagaaaaatcacacacaaaaaaccactctccccaaatcaagaccacattagattagattagattctcatgattttggacactttcacacaaaaccacaaaaatatacatacattatgatttcctttctataattattaaaggaaaatgtttggtgaaagagggaaacaaaagtagagatgaagaaaaatacacacaaattatctatagtatcggtatggggtgctcttgctcgtgccctagaaccggc

SEQ ID NO: 76454 - DNA, 576 bp, Cannabis sativa
tgacttgttggaagccctcagcatcagacttccctttaggatccacgctctctcttcctttttccacccatacttgttttgacatttcctttttctcacacttctgacttatgtcccatacccaagtaatgatcacagacaattggtaaacattcatgaatcacaagcaacataatgtattgattcaatttattagtaaatgaaaccaaatcagaaaattcatgatgtacctaaactcctaacattattcgaggatagttccacatttctttgttctttgtcacctcaaatagcattccccagtgtgccaaattttttgtataaagttccttctctccaatgcctaagttccaaaccatgaatttgaatctaggtagctacagagcaaacatctttccgagtgaaatctatgtatggatcccattctttcataataactggttttttgtcaaaaaataagtaccctccctaaagaacctcatctctctgagctacactcaagaatctcacaatataaattcctttggctaacaaacccactttctgcagacttttgttcttccatattctattggc

SEQ ID NO: 76455 - DNA, 1084 bp, Cannabis sativa
tagtagtcgacttgggaggggtccctaacactgcccccaggttgactctagtaacttcggaatgggtgtttggatcatgctaagttgtttctaactaatcatcttttagtattctataccacaaagacaacaagaatccaaattcaaggtctagaagctgaaaatacacaaaacaacacccctagaagtcaatctgggtggctagcacccaggttgacattccaactaggattttgtttttttgggttcgttttggtgaaaatggctcaaaatttattttgggacattaattagacctgtcacaaacatatttgaggaaacataatcaaaatcggagcacttttaattttgggcacccgaggcacgaggtgccccaaacactcagtgcccaagttgaatattatcaacttggggcacttccgaccgcaatattgaagaagtatctcaataattttctttttcttcatccaaaataaggaaaaaagtactttcaggaaagaagcaaatcgacctgaaggctgaaacaggaacccagcacccaggttgacactttgtccacagggccacttccatcagcatttcagatgaagtcttctaggaatattctttgttttcatctacaattaagatttgagtgctttttgaaaacaaacagagttgtttgggggtcagaattgggacccgaggcctaggttcacctggtgctaagcccaacgccaaggttaaaattttgtcaccatgggccatttccatggagtttttctgagaagtcttccaggtctattctctatttttgtcaaagattaagatactagtgtttttaggaatcaacaaagtcatttggtgggaaaaaatagacccaacgctcaagttgacacctcgcactaggctcagtatcaacctgggctgtttccaatcaaattttcaaaaaaagtgtttcgagaattttttctgtcataagaaataacaaagatactagtgatatcagggaggaaatgagattttcagggagccagaatagggccctagcgcccaggttgacatggcactgggccttgtgtaacaccccgatttcccgagatgt

SEQ ID NO: 76456 - DNA, 1208 bp, Cannabis sativa
  modified_base (55)..(59): a, c, t, g, unknown or other
ttttatttttaagtgtattctgttaaaccaaaaaatgccgttagataggcacttnnnnnatataaagatatatatatttttttatatatttttaatagataattttatacttttccatgcataaattaagagttaattaattgtaacacgggaaactaaggaaatacatttatgtaaaaacctttcattcttcttttaattattttattaaattattaaacttattgtctttttttttttgaaagatgtatattctaacaaaaacaactacaaaagtttaggcaaatccgtcattatataggcagatgcacaagaagggtaattccctatccacaacttattacaattagaagagatagccaatttggcaaacgaatgggcaaccatgttgtttttcctgctggtatgaaacacggccaagcagtgagagaactccggagcttcacgcacttcgtctagtaacgccccccaatcggatttagcttggaagtttcctttgatgtactcaaccacccgaagacaatctgtttgaatgatgaaaggggttgctgaaatttggacagccaaggaaatccccattcgaagagctagaacttcagccagctcaattgagaaaacgcctggtttgtactgagtttcagcagcagtaacctcaccagtattggtccttattaccactcctaacccgattcttgcctctgtactaagcacacttgcatcactattaatgcagaaactgttcaaagggggcggctcccagtcaatatactgaattttaggagtgatctttcatctgtctaatgatggatcatggtgcattaggtagtctacttccatatgagcccattttatccaagactcttgagaggggacatggtgattaagtcttttcttgttccttcgattccatagcagccaagacataataatgaaaaaaacaaagtcctcctttgccacctgccttttaatgtgaatgagaatgtcaataatggtgcccttactttgtttgattaccttccacaaaggataattcttccatatctgtcgttaaaaagggcaaaaccataagcagtgttcaatggtttccttcccctgcccacacaagtagcaactggtattaattttcatgccgctatgctacaatatagtgttcacgggtagccaatcattacacaacctccatatgaagtttctgttggaaattattt

SEQ ID NO: 76457 - DNA, 586 bp, Cannabis sativa
tctgactattcttgcagggaagagatttgagttcagtaactgataagttgtggaagaaattctatgaaataaagtttggtgttgagaacactaagcttgttatggagaggatgaggcagaaaaaagtggtatttaaatggatgcaattgtatgaggtgggtctccttcctggtattttataaaatcattttttagctatcttccatgtaaagtgttcatttttgccaattttgtaattgattgggatttttctgttgcttcatgcacatgtttgcatgtttatacacctacatagataggtaattcatcaatatagctttttaagtgtggggatatgttatatgaaatatccactttgctctgaagtacttatttaacttggttgtatttccaggcaaaaatgaaggatgcagctgaggcgcaaaataaagcctgtgatcgaattgcacaactatataagaaagaaaatgccagtatgttatacattctctattgatctatatccattccaggcacttttttatataaataaaggcccaaatttatgtccctttggatgaaatccctctgacttcctcaggctcat

SEQ ID NO: 76458 - DNA, 1645 bp, Cannabis sativa
aacatcaatactacttaaactatacaaaagtaacactaaatcccacaaacaaaatttttgagactaaactcttcaaatttcacatttgttgggcttttactattctgttaaatttttatagttaaagtggccagataaattatctgtatatattatatacactactatacatgtgatctatttcaatggttcacataattttaattacttaaatttcataaaaaataatttaaaagtaaataaataatttaaaaaaataaaaaaaaattatgaaaaagaattctttttttcctttccttttatcaaatcttacagaattcctctcctttttcattagtttttttaaggtactgacaaaattaaagtcatacgaaaacaaaaaatttgaatattaatgattaaatacctaaatttaccattatcgaaatttggataagaagaaagagaaataaacaaaaaggaaaatatcgatttagatttaagtttatgagaaaatattggttaagcttattattatcaaaaaagaacaaaaaaaaaggttttctatttgggtttggtttgtgttagatcttttagacattgatgaaatattatagaacaatggagagagaagagtaaaagagaaaaaagagcatagaaaggtaatgaagattaaaaagcaatctcattatgtttactacactaaaggtagtatatataagtgcatgaaaaaatagagagactggaatctaagagagctagttacaaggaattagttaagtacaaccaaacaactaataacaacctttagtagaatctaactaattctaacaaaaattaattgtcatcttttccaatactccctctcaaacttgcaattgctgcgtcaattgtaagtttgtttttgaaagtaatgaattggttgttggagatggtttttattaaaccatcagttagttgatcagtcgctaatacatgtttaacttggacagatccttggagaactaacaaagtatacatgtttaaattatacacatagcttgacttgacaactggctaagcaactatgttattatttgtggtatagtttctccaaataaaaaggtctttgcaaatgtcatttctgagaagttgttcaattgttgttatcgattccagaaggaattgtgtggaatgatagtcgagttcagaagggagtttcatgatgagtatcatgtccactcttggtctgattctcacgatagctagctttcctggaaaggagttccagttggctagttatctctcttacaatggtagatttagatagtcgactacaatagttttataaactatccggaagcgtctttagcaacggtttgtggtcctcaagtccaaaagctcgtttatatttccgaaggccatgacacttaagttgacgtggagattttgctagagagttggttaagttagttatttctaattaacataacaacttcatttcttccaaccaccgactttaggatcttgatcctaagcctataaagatcatcctgactttgtcatttgaacaacaagagattcagaactttagagatgagattgagagtttgagagagaaaagattgagagacagagagagaggtgcagagaaaatagagagattgggtttggattttgtaagaag

SEQ ID NO: 76459 - DNA, 2625 bp, Cannabis sativa
gagtagtaatcttgttagtttgatgtttttgttgaagtttaacattttctaataatatggcgccgacaaaaggtaacattcccaccaaaaatcttccctctctttagtggtaattttgcgtctttttgtagataaagttactttttgcgctagtgtaacatacctataatgaggcaaaatattttcagcaaaaggtgaaaaaaatgaaacacaattcttaatatacgcatagttatgctagcacaattaagtaaattttaattaagccggcaaaattctattttgttgttgtgttcattggcggaagtagaaactagaaaccacgacgctcggtacttacaatccacgtgtcaagaagttgactatctcttcattattctaaaattacaattttgattgggaaaaggacgaatataccctaacactacttaacatgattggacacacaattacgatcattctagagaaaatgagagggacccacctcaaagggctaagagttcacttatcaaggtatgggaagcagcatggtgttcctgcttttttttaagaagacatggtattcatgctttgatagtaacctttctatactttgccttgccctatttatttatgaaattatcaactttattttttgggttgatagaaatttatttaattatttaattttcttgcaaaattctagactctagttagttggcttattaaaaataaaagggctagtagtagattggataatattataaacaatattaacacaatcctaccccaaaaaactttcacagatataacatatttgtgcttatcaattttcaaaaattatatggtggatatactcatggtatacattattattataataataaatttatttatcacagcagcaaaacaagaatgactatgtgtgaatccaaacatgcttgcagggcaagtgggtccaaattgtcgagaaatattgttttacttatggactaataatttgttagggtaaatggagggggaaatattattttgaacattgtgttttgtaaaaattattaattagactttctgttttgttaaattataaaatagatcttgtatttttagtataaataggaccctgaactgattttttgtcaaaataaaatttaataataattcgatttaaaagtgttatgacaaaactgtttacattttctgtatttgttcgtgttaggaatttgtcttcaagttggttatattacaaaaaaaaaaaattattaaaatttagttcagggtcttatttttactattttagaaaatataagatccattttatcatttaacaaaatagaagattcaattgataatttttgcaaaacacaatatctaaaatggtatttaccttaaattaaatgataatttcagtaaaacacacaccgatcatcagatgctctcacatcgatcaattcatattttagtgatcatatataattcacaacaataatatcacatgactaattatattccaaaggcaagattagtcaatatgcgcgtactttggatcatcacacttaaatatgcccatatataaatacaaattttaacaatgaaccaagtgagacctcattattttagtgtatattgagggaatggctagtgatcaccatggccaaaagataaaaaatcaagtacaatgaaccaagtgatgttatgactaagcctaaccgtggcttgattatatattatatataattttgtgtaccactgaaccccaaaaatctcaatctagtaatcaaatatgatcagtagattcttggcgaacatggtgatctaggtcaagttgggtatctgggttttggtctcctaataattttaactctaaatttttttactgtaatatatttatatttatataaagaaaagaggccggtaggaatgttcgtacgtatttgtattttcaatatattatatatatatataaataaatatgctaggttaagcatataatatatattctgcatgtgatataaagaatatgtataaatatatacatatatatattttctcaacagaattagttcaatgaatatttaataaaattggttttataatactattagaaattagaaaaccacacactttctctcaatagagttttttcagtttccttcttactataaaaaatgctacttttagtgaaaaaaaatttattacaaacatagatttttttttattaaatatcacttttagtcactacataaattactttgtcactaaatattagtatttagatataaattgtcactaatttagttttaatcacatcaagtattgtagctaaaaatatatatttagtaaaaacaaattgtaatttttatgactaataattttagccacgaactttttagtgataacataagattgatgatttacgtttagtcacaatccttttacttttagtcacaaatttcattgtgactaaaaaacagattttttttgtagtgtctcttctctttctcggctagggacccagccaccagcactgatgtgtgtctagtgttctttgaccgagagggaatgttgatggtagttctaatggccatgggtctttgctctacaagaatggagaagtcggcgcctaagggtgtgctttctcggagg

SEQ ID NO: 76460 - DNA, 573 bp, Cannabis sativa
gtttaggaaattgaaaaaaccgcatgtgcgggttggtttgaaaaaatagtcaaaaattacaccactcgcactgcgaacacccctagtactggtatgtatctctcttagaccaaatacattatcgatcttctagtcagactacacatggaaggtactaggtcatctccaaaccccaccagtgcagcagcaaagctcccattacatgatggtgaacttttttctgatataactttgtatcgaagtaccttgggggtacttcaatacttgtcccttactagacctgatgtagcctttattgtaaacaaactcagtcaatttttacaagctcctactcacctacattgggaggcttgcaaaaggttactcaagtaccttaaaggcactatcaaggatggcagggccggccttatgttaatttgggccttaggcaaaaataaaaattggggcccaacgaaaaagtgaggctattgggatttgaactctaaacctcttagttgttaatttatcaaattaccactaggctacaacacatatttagcattaaaagtattattatttattttattactaact

SEQ ID NO: 76461 - DNA, 1029 bp, Cannabis sativa
tagacaagcaagataacaagactagagccgtggccatgtatgaacaaagaagtatcagatcggctgctatgaaatccccactggaagagagtagttttcagcttgtcattccaagcacggggtgcttgtttgagaccataaatggccttgtcaagtttgcacacatgagttggatacctttcatcctcaaagccttgaggttaggacatataaattgtttcttctaactcaccatttagaaacgcattgctgacatctaactgttgcactggccaattgtttgagacagctattgatagaacaacccgaactgttgcaggcttgacaaccgggctaaacgtttcttcaaaatcgatacctggtgtttggagatatcccttggcaaccaacctcgatttatatctatccagcgagccatctacattgagtttaacacggtgtacccacttatttccaatcacatgcataccctctcgaaatggaaccaagtgccaagtaccagcttttttgagagaaccaatttcagagttcatggaggctaaccattttggatctcttagggctgctttgagagatttaggctcacttggaagtagggattcgggtaaagggtgcttggtggcaagatatgatttgggtttgacaataccattttgagatcttgtactcataggatgtgtgcgtgtaggggcaggaatagtagcaacagatgatgtattatggttggtctcagtgtggctcacagaatgatcatcagtgtcatttgttgtaggacagatggatggagagatgtgaggatttagaacaacctgttgggcagcatgtgattcgtttgcatcaggaatgggaacactagaaacaacaggttgatggtgtgaattagcatttgctgcagaaacatcagtaatgggagctggtgcctcttgaatatggctattggagatattttgttcagtaggcaggggggcagcgtttggcacagctgctgtgtgtggtgtagcagatggctcagcagtagttgcagaagca

SEQ ID NO: 76462 - DNA, 656 bp, Cannabis sativa
  modified_base (126)..(126): a, c, t, g, unknown or other
tgagagaaaatagcaagtataactcttcaagtataactgtatggcgcgcttgtatattccctgcaagaagtgttatgatcaactcatcccataaccgatcggtcggttataaaattttaaaaaccnaccataaccgaccgattttcatccttagtgttgtcttcctttttaactgtaacttggttttagaatggaagtgatctctattcttgttcattgtaattttgtgggtcactctcccttaaaaaaactcttctctacaaaaaaaaaataattgttctcctcggcaaagttaaaaaaagagtaaatggtgtgaaataacattaaaagtctattaattgtgaaggtgacagttctaattgatgtataaaaattttattggtggaacatgttggaatagttgctgcataaattaaaaagaatgaacttaccgaataaatatttatgttgtgtcatggagtagatcactatctttgagatgttcacagtactgctcagaattttgcaagcaatcttgtcatcctgaggattaaacatcctagtcgaaccactgtatcgaacttccactacactatagaaaaccgtcgaaataccacacctaaaaaatactagtgctcaaaatgcatattgtaatataactttttctatgaaaatga

SEQ ID NO: 76463 - DNA, 665 bp, Cannabis sativa
ttattgttgaatgccaagggcttagcagttggctggtatcgaaaccccaaattgtcctcttcttcatcatcatcggcattggcagattacgacgccatgacccgatatatttgactcgggtgtgaagaaaagaagttggtcgagttgggttcgaagcttaccgcaagcttcaaagaatttgagtctattttcgggtgaagagaccatgtgaacactctcgatcccttcaggtaatccaacatcgctacaagggattttgattgtaaggacttcgacttgtgtgcctaaaaaggctctgcttttctcgattgttttagaaaagttttgtgcgtagtaagaggttgtaacaatggtggcttttaaccctcgtgaagagcttggccatgtccatggttggcattgtgtggccttgagcatggtgcttcttctcaccgtcggatacacctggttttgctctctttgcatcatcatcctcgtcgctgccgatatctttatattttccttttttttgtgatcttcattgtttgataaattagatcgcccattcttgagtcataaccctgatttagttgacggtagaggtgattcaagtgacattttcttttaaatcaggtgtgattgtagaatatttaatatcagttcaaatattaataggatttgtttta

SEQ ID NO: 76464 - DNA, 1147 bp, Cannabis sativa
gttaagtgtcaaataggctcatctctcataatggttttgacacctatttacaatgaaaccccttgttttcttcctacctgtgtgactcaaaaccaggggacatcatttactctttttacacaaaacgacaacattccaatgggctatttctcatttctctttattataatttataataaccctttttcacctataaatacataataacttcatatatcaaattcacaaatacaaaacaaagacacaaagaaatatacacttttgcttgtttgtgttgttcattttttatggcttctcttttgcttttgttatctgaacttgttagtcatcatcatgaagatccagatttctgggtaaagctctcttcttcttcttcatcatcatcatcttcttcttcttcttgtgcttctgcctttgctactgcatcttcttctgccatgaaagagaccagaaagagctatgatgttgtgtctgatcatgacaagaatttacaggtgtcaagagtttgtgttgacctggtttggccatgaaacttatatgttatgttgatttgtatttatgggatttgtttgagatctcataactgcaaatttgacatttgtttttgggtggttttgtaatgatgataagtttgagaaatgtaaatatatctacctctttgatctattgcaatggagaaaagaattaatctattaatagtctgattgatgaagctataaatgtccttaatagtcttatgtatcatctctaaacaggattagtattattgtcatacctctttttagattttggttttgatgggttctctctgttttctctattggtcatttttttcatcaaattattcctaagaagtgattagtaagatggacaaattcccataaggccaaatttggtgcaattaacatttgatttttatgagtacccttttagttatacatcaaatggaaatgtttgttcatttatgaatccaatattggcatatgaaaacacacattatagcccttattcaacttctatcctggttcacacaaattttcaaagtaaaacaccttctgttatgggatttagctcttttctctgaacataaccatgagagctttaaccccacccacaaatatttgctgaaatccctctgaggcaatgt

SEQ ID NO: 76465 - DNA, 1260 bp, Cannabis sativa
aaaatttatgttatgactaaaaaattatcactaaaagtaataattttttgtaaatattgaaaatttatgattctttattattagttttcaaaattgaacccataaactattattattgaaaattcattaaacactcataaaaacaacatttaaattctgaaaatactttgaaaaatcataacaaacagacctatatggcatgattgaactttgagaataataatatcatgatactatacaccttttatcaacacgtctttaaatatgtcatgttgtcctcactaattgattaaaattgattttttttttcagtaaatataattttggctaattaatttatagttttttttttatatacattttaaagtaatttttttttatatgtttacgaaaaatacacgtagaaatctacatagtaactaacggagcaacttaaattgtaacttaaattcatatagcagctcacataaaagttactaaaataattactaaagtaacttaaatcgtaaaaataagaacaaaaaaaattaaaaaataatatatagcatgacttctttaatttacttagatttgtgtgactcaattactagttatttgaatgaatgaattacgactaggacctacccaagttgcaaatttgggctaactatagctagtaaaaattgtaagacttgctctcaaaacttaattattattagctagctagtcaaactgtcaatttttgagttgattattcttttttctttcttcagacaaacgaaaacatattatgtaatgttgaattggtctcctattgcacttcatgcattctttgaacttagtattagaagagccgacatattctctaaatataatactattaaaagtaaactattatcatatttaactcgtgctaattaatttttataaaatattcacttttgtatgaagctactacagctaatatgtatatcatgtatatgtatttgtatactatatattatttgaaattaaattacttcatgcatatccttatggagataagatcgtaggataattctatctttccctaaagaaaaatatagttgaaaattgaagataatggaaatggaatagtagatcacaaattaatgtttatttttgacatacctatataattgtattttttatttcttcaaaaaaaaaaaaaatttgttgtagttttatcgattagctcatacatcatacgtcaatgtcctaacaatattgtcaatactagttatttatttattaattatatat

SEQ ID NO: 76466 - DNA, 596 bp, Cannabis sativa
aaaacaaagtgtttcaaggtcttataaatgttcaacatgttcttgccttagatcaagttgctgactgtttaataactaagccaatttttagtactcatttttcctatcttaggaacacactaagtgtgctttcctatgccacacttagtttgaagggggatgttaggagtccaagtgactcttcccttaatcagttagaagtttgttagaaattttgctaattagtaaataataatagaaaaaaattatatgcgcttacatatagacagattgattgatgatctaaacttcaataatcaaattcttgtttaaatataatttttcttttgacaattgtttaaacataattgatgaaagttagatatataattataacctacatgttttgacaagggttacatgccttcggcacgtcctccacaccttatatacatgtatatattctgtgtggtagctagggaattgggatgagaaatttttactataaaaaatcttacttttagtcataataaaacttgtgattaaaaaagaagaagttgtgactaattataaaaaattttatgttgtgattcaaaagtctgtagataaaagtatat

SEQ ID NO: 76467 - DNA, 1471 bp, Cannabis sativa
  modified_base (35)..(37): a, c, t, g, unknown or other
ctacttgaagttttaaatgaccgatgataaatcannngaagcccagtctcacgagcttcagaaaaaatagctcacaaaattttgtctgaaggtattactattgaggaacgatttcaagttgttattatgattgataaattactcccttcgtggaaagattttaagaatactttcaggcacaaaacaaaagaattttcattagaaagtctgatcactcgccttcgcattgaggaaaaagctcgaaagcaagaccagaaagaagaggtgcttgttgttggaaataacaacaaaactaataaacgatccactactttttgaaacccaatgagtgaagacacacacacttaacccaccccacatgtgtgtgcatcgtccgtccatccaaccgcgtcgagctggctggtgtggtgtgacactttattttttggagaaaatttatttattaaattattatttttatttagttgattaaaaaagtttttaaatgtgtttacttaattggtaaagagagagagatgtgttatcctccttattcttagtatcatttccacgatctcacttaacgttcccatgatcaatgtctttcttcccgttactaccttctgtgtattccctgtataatatattagaaccaacaagagaaatacatatttctcacactttaaaaatcacttacaatttattatttatgattatattatataagtagtccaagcaatagtttttgggtgtggtatttcgacaattctttattgtgtagtagagcttcgatatagtggtatttcaactgagctattttatcctagggacaactggcaatttccaactgcttgtacattcttggagagtgctgcgaacattctaaagagaacgacctagtccgtgactcaatctaataatttcattcgataatatcattcctgttttagtttttagtaatattgtttaacatttttaagatgttcgttttgctatgaatagtgccaatgattttctaattctattactgacattaacaagcctttttcgttttcatgttttgtatttgaaaagttggagacaaaagataatgttttttctcactatgaaaaaagttgtgtttgtgctgattgttttgaaaccagttgtgtttgagactccacctcctgctgagaagaaggatggagtcgagaagtatgaattgcaggttaaggaaagggacttttgagtagagatgatttttctgtgtaagaattttattttgaatggtttgtcttatatttgtatgattactataatattgataaatatactaaggaaatatgtgaagtattatagaaaaaatatgataccgaggaggcatgaacaaagaaaaatgtagtgagccgctacctaaagttttaaatgatcgatgataaatcagtcgaagcccagtctcacgagcttcagaaaatagctcacgaatttttatctgaaggtatgactattgatg

SEQ ID NO: 76468 - DNA, 618 bp, Cannabis sativa
tgtcaattgaatattatagttcaatgctaactggaattacctctgcatatacatgtgtacatgtggtactaaaacatcaaagtcaataaaaatatgtcacgtctacacaagtgtacatagtgacaactcaattactatttaacagttaaatttaactgaccgttcaaatttgtaaataaatgaaattaaagggtattgccacaaaaaaaaaattaggaagtttggtgtctaaaattaaaatataacagtttcactgcgagggaaaaaatgatgaaagtaatgccaacaaaaataaattagttttttattttttaaaaaaactaatttgcggcatgaatacttaagatttactcccggctgcagataaatgtctatgtttaatttttaacggtaataatacctaagttattttttagaatttacgtaggtacgtagctattaagtgtcacgtgactattcacgtgatagtccctgattagtttatgtcattaattttttattttttatttaaaaaaattaatataaatatactaataaaaaaatgacatgtagataataacttaatacttaacggtcaaatatcttaaatttatatatttagaccttaaattattcttt

SEQ ID NO: 76469 - DNA, 1131 bp, Cannabis sativa
ttagaagtgagattatccagaatgaagttaaagttcgcatcattctatccagagcggaacaggggaagaccaaaatacttaatgttaccttcaggagagccaatccccaaagcttccttgatccctcttttcaaaccattggaagtatttttactaaagaagatcgaggtttttaatttgttaacttgttgcctcgaccaagagcagaatctctcaagacaatgccaatagcctctcgctttaatcaagttagctttgccaacaagaattaagtcttcaacaaagaagatatgggagagaattggacctcccctactaagtctaatacccttcatagcacatttactcattgcatcctctaacagccttgataaaacttcagcaacccagataaagaggtaaggagatagaggatcaccctgtcgaaggccgcaagagggcttaatcgatccaacctgccccccattaagacagatattgaaggaggtggtagagatacattgggagaccccaattgtgaaacttctgaggactaccataacaagaaagcacatggtcgatgaatctctagttcagcctgccataagctttcatgaggtcaattttaatggcgaagtaacattccttgcctttttcctgttaaacgagtggataatctcttgcacaatgatttatcttgaatattcctacccagcacaaaagcagcttgagtagggcaaatgagagaatgtaatataggtttaattatatttgcaatgatcttggagatgaccttgtacatcacattgtaaagagaaatgagtctaaaatggttggttcttttagggttttggactttaggaatgaggacaacatttgtagcattaacacccttatgcatttttccagaattgaagaagtctgtaacagcttcacaaaaatcttcatccacagactcccaatagtgcttaaagaagagaactgacatcccatcagggccaaggctttatggttacccatagcaaagagagttctttagatttcctcatgagtggggctcatgaggagcacctcctggtccacagaagaaattctctcatgaaagaattgatttcagttaagagtctgtccattatcagacctcgagaaaat

SEQ ID NO: 76470 - DNA, 3964 bp, Cannabis sativa
  modified_base (2929)..(2938): a, c, t, g, unknown or other
aacctaaagatatatcttaattataaattaaaataaataaaatgagagtacattccccaaaaaccaatcatttccagtttgattcaagcactttttgaaatgttttttttttgtctagttcgtaaatgttcaataaatagttgtatttacattcttcttttttttttttttccttaaggtggaataggatagtgtttccataaatttcaactatctattacttcacaactttatttattttttaaataactctaggctctattaaatttgggcatatatgggatgggtcaatactttgttggtacaaatccattttttgagatgtgaggtggtgagtggtgggttcagtaaaatggattaggatgtgtaggctgcactcaatattgttccatatatatcatatatgcatgagttggagtagttaagacgtcaaacacatgagaagtagaaccaacagccatatttgaattttaatttattcttaatatcaatttcaaacccctctttttaaactcatgattctatcttcttcttcgacaaaagtcattgtattttattttaattctacttctctacttaattatataatataaatacgtatcattaatataaaattcataaatacagaataaaaataatatataatacaatcatttgaacgtaactatcattatttttgtttttatatattattagttaagtataagatcattacatgatgatatgcattacacgtacattcgtataggtatctgtatctttagatttaaatgtatctttgatttacttgttaataattaaatatattacgaatattggactttttttttttatacacagagtttaattttttttcttaaattatttaaaatttttaaaaatttataaattatcttaaatagttacgatatatgtaattataaaaaaaaaaaatagattaatttttttaatatcaaaatagataaaattctaccaactacactataataataagtgtctatactattgctacaaaaaaaaaaaaaaatagtgtctatactatatatatgactaccacgtgttacacaaaaacagttatagtggcttttcattctaaataatgccttattctcttcttcaataataataataattaaaatttttaacaataataataataataatagtaattaatataagaaaataacataattacattttaatatataatatattatactgggttttttttgttttattttttttattttctgctatttaatataataagaatttcaaaaaaatatatttaaatttaatatattatcataaatttgatttttatttcttaaaaaaaataatattatttttattgagtaatgaatatatatttatttataatataaatatatagatatagatattgatgtgataatttaattaattatgattctaaaattttgatttatataataatacctactatccgcgaacggtatttgatgtaattggccataattttagtctttttcttttttgtcgtcgtttttattggctttatttagtgccgtttttgtttgtcttttggtgtgtatttaatatttaatttatgtataaaatcacataagttatatcattatataataatattaagttttagttaatataaaaaaaaaattaagttttataatttaatttaataaataatatattttgttaaaagaaattaataagtatatgagaggtattatatatgatacttttttgagatagtaccgacactaactaaaatgacgaataccaacacatatatgagaggtattatactggacttgtccgtgtattgtttaaaattatatatatatttctataattaccttaatatgtttcatgtacttacgtaggtttgcttcatataaatgaaatatttatatgtatgtacgtaggtaggtagattcatgagcatgctgaaatgaaactaattgaaataacgatatatgtatagtattttggatatagatattagatattggatatatatattttgaaaatgatatttttttttaacaatgaataattttattaaaaaataaaattataatggcatataaattttaaatcttaagaaacccggataaaaaaatcttatcaaaccatactagttctctatccatttaaaaaaaaaaatatgcgaagtaatccatgtgctttgcctattaggtgtccgaggaataaaatgatattggatactttcaattgagtacattaaaaaaaaataggtctcccatattaatttaaaaaaatataaacaaaaatataataacaaaagtgtccccaagcccatgaaataattttcagaatcaacatttcatgggtcacgacgaggggttgagtccacactccgcatgttgtgggtctaaccgttacgggtccaacttggtgttcttttcctcttattcaatatcaacttgtaaatattttttttttttgaatataataaaacttgtaaatactttcaaagataaaaacatctaatctcaagtggttaacaccaattccatttcaaaataaaataaaaaaaagtggttaaaccaatgtcaaagcataaatttcgcaactttgtttttcagatcattttatatttgtttgtttatatatatttaaataaaacacacgtcattgtctctttctttgtttaattagaaaataatttaggatcctgaattccaatgaatttttattactaaaaaaacaactatttttagttataatattttaaatttaattttgaatttttttatcatgcaccccttaaaatagatataccaatatatttttatctattttagtattcaaagtttaacacgtcgaaaactatattcaaataatgtgttgcacgcgtaattattttattttatacgtgtgtaaatagactgtttgaacattattnnnnnnnnnntaaattattctgaatttttaaaattttgtaggatatcttaaatagttataaagtacatgaatataaaaaaaaatagactaattttttttttggaatgccgaaataagtagagagtgcatcaatacgcccttttaaagggatgcgttgtagaattaccctttaatttttagtcacaacaaaaattaaattgtgactaaaatatagtaattaaatacaaattgtcactaatttagttttagccaacataaattgactaaaaatatatttagtcacaataaattataatttttgtgactgatacttcagctacgggccttttagtcataatataaaaatgatagtttataattagtcacaatttttttacttttaattataaattttgttgtgactaaaattagattttttgtagtgtggttttccaacattctcttggctggttttaaaagggacaatgatttgagtggttgaatacttgatattgaatgtaagtcgagagaaaaaaaatgatacttatcgttaattaatcaaggattacttttagcaataaaatctatttagttagattattagtgaataaatgaatgagttctaataattatactctattattatatgtatagtacaatccgatccgtaacactaaccgtattgtgtcttaacgttttctagtgcatcaacttcaaagtgtgttaatgttttagttaatttagttgctaaattaagtttttgctaactttatttcatctagtttactattttagttaatttttctttcataatataaaaaaattatataattgactaatgaaagtcaaaaagataaaagtttttttcaataaaatgattttagataaaaaagaaaaacggtatacttaagatacacactagctaattagctagggagagccaaatagtttattattagttaagaagaaccccttcgtctaggggtgttcataaaatagccgatctaatccaatccgcacgatccaatccaatattcaatccgcaaagtgcggatat

SEQ ID NO: 76471 - DNA, 4984 bp, Cannabis sativa
aaaaaaaaaaaaaaaaagccttaactataaattgggtagttagttgtcaaaggtggaagatgatgccacgtgcccctccttgattggtgagattaatgaaactgtggagtggtttgcaccatgtaatttctttccgatacgtgacacagagcgcgccacgcctactcgactcggtccttcccaactcactgagtcaccaactcagcgcttcaaaccccaaagctctcgcaatcgcgagctcttaatcacgattttccaaccatgttcgaaactcaaaatcgaatcaatggcttccaaacagaatccagaggcactgatcgagatcaacggactcaggttcacctaccctggaatcgacggccatcctcccccgggctccaagcctctgatcgataacttctccctcactctcaactccggcgaccgctgccttcttgtcggatctaatggagctggttcgtcaatcttttctttcaacatttggttttaaaattggcatatttggctggattgaatatgacattgaatttgaatttgaatttagggaaaacgacaattttgaagatattgggagggaagcacatggtggagcctcatatggttcgagtgctcggaaggtcggcatttcatgacactgctcttacctcatctggtgatctctgctatcttggaggagaggtttgtttcttcttttggtaatgtatcgtaaatcatttgtaattgttgactgagtattcaaaggaaattgcttatttatgcagtggaggcgagatgttgcttttgcagggtttgaagttgcaattcaaatggatatttctgctgagaaattgatatttggggttgcaggaattgatccccaaagaagagctgaactattgaaggtgagaacgcactgctctcttttccttgaagtgggttctttccaatgcaatgcttatgattattgtgtaaaaaaagatcatatttataggcttgatgaggatagaatatgtatacatgatcagagaaaactcaatctttgttagaatgattgttaaggatatagatacatgatcatacaaaaacttagggagatctgtatgagtcatttgaagatctagtaatagttaagccaaatctgaactttcttcatgtttattcaacttgttttcttggaagcataggttctagacattgatctttcatggagaatgcataaagtatccgatggccagagaaggcgggtccaaatatgcatgggtctcctgaaaccatttaaggtatctgcatcattttgactaataccaaatacagtcacaataattttgtttctttttcttgagaaataaataatcctctttctaatacttcataaattttgtatcttttgttatgtgtaggttctgcttcttgatgagataacagttgaccttgatgtgctagcaagagctgatctgttaaagtttctgagaaaagaatgtgaagagaaaggtgccacaattatatatgcaacacatatatttgacggtctagaggattggccatcacatattgtaagtttcaatattttcttctcactttctattctgtattttcaacccaaccccagatttgtgaagactattttgatgtgttcaggtatatgtagccaagggaacattgcaactagcaatgcctatggataaagttaaggagattagcaaattgtctttaatggttagtgttgcactccttgttcagacattctttgttcagttaatatttattcgttacatctggcagaattgaatgtaaattgtaccattaaattgcagagaacagttgagagttggctgagaaaggaacaagacgaagagaggaagataaggaaggaaagaaaggaaagaggtcttcctgaatttgaagacaagatagatggaagccgtgtggctggcggtccacgtgcagtcaataatggttgggcagccggaagactgaactccaccgttgctggagaagataactttgtttacagctcaaacagagtcttaagacagtaattatacatgagaatgagtttttcaatttgaattttgtttgttatttattacctttgtgttcatttgtttctaataatagtgtgcaattatcttgattgtattgcatcatattttgtatctttattattatgtttgttattgaaaagaaaagcatcaacacatagagagcaaccaatagtggtctattatattcatgtatcttcaagcttgtattgcatgagtataatacatctccaatacaaaattagtataagagtgaaaacttaatacaaagtagtacgtattatattaaatttagttgttgatgcttaaaaatttcatagaaacaaattactaagaatcgtgacttctttaattgatcattccttttgattcaagcctatttaattcacgaacttttccacggttgagcttgcgcaaaataaatggtttcctctgacaagacactctaacacttaaataagtgtgtcgcttaatttttaaatcgacgaaaaaaattaaaatgaaattgaataaaaaaagattgaagcattacagttaatctttaaaatatttgtattttgtttcatttaccgctcaaaagataccgcagtagaaactattacagtatattcaatctcgtaacttgagcactcaactattgtgtaaggtacgtaactgtactactaacaacttctttagtcacaaaaaatttgttatttccaaccactaacagcaattcaatagtgagccattaaagaaaaaaaaaccaacaacgaaatgtcacatacccttaattgattggttatcgaattttgcgatgggatgcccataatagacttttggaggtcaatcctaaaggattcacctccaattttcgtgaacaaatggaaagttgtcgaacaagagctcttttgattagtggttgatttctctcttgcaacacttttgaagaaaccttgggtgaaaggataagcaacatacctcgtttatcattaaacaaggaggatagtcttgttgggaagagtaaggaaggtggaattttctttgtaaagtcagcttactttgattaccaaaaacgccgctttggagaagaaaaacttgtccgaaaatcgacatttcatctaaagataggaatgatgctttggcagattttacatgaagctcttccaaccaaagataatttacaatttgtccaggaaaataattgttttctatgtcatcaagatataggaactcctatacatctttttaggtaatgtgcttgcaccaagatcatttggtttcatgacttatttggaattctgggactggaaaaatctctggaagttggcaccaataaaatcaagtgcttattgagggtcattgtacaaatgcaaaggaggttagtaaagtgatcaatgtttttttttttttttggaatttcaacaagacagggacatgacctacaatcaatgagcgacataactctaaaaggctgctagctttgctatggagagggagatcaaggctatcctgttgttctcactgatgctctggtgtttgtgaatgctttttcaaggaaacaatgtccaaatgtttggaaactttaaaatatttctttctttgcacttttactagttttaattttttctatattaacatctcagttagtgttctaagggagtgggactccctcgctcatggtttgatattctggtgtcttaggcgttgaagaaccacactaatctatcctaaacttagtgattaaattctactgcagtgacgatacgtcattgtaacaccctaactactttaagcgtgttagcgtgattttaaacgtactatgcagtttgttgctaataaacaaaattaacgaaaaatttgattaattaaaatttgcttatttaattagaaacttaaagtatttcagactaaaggttaaattaagaagctaacattaaaggtgtgtctctagtccttgatgaatggaatggaaaagtttataaacagactaaaggggaaattaagaagaagaattcatagctagctgttcttgatgtgtccttggataattcttcttgggtcgagtatcaaaagaaaagaaggagaaagagcttgatgtcctttacaaggataagaagtatttggcttcaaggaaaaaaattcctagatgaaacttggggataaaaattttgcgtccttccatcagagtgcgactggtcggaaatggaaaattattatcactggtatatttgatagtgatatggtttgggaggagatgcctaggggtatttctagtagggctatacataaatttttgtaaaccgcccaacccgaagaatccacccaaaccaaaccgagataatttgacgaaaaatacaaaccgaaaaacccgacaaaaatataacctgcccaatttttatattgggcgggctgaaaataacatcaacccgcccaatcaacccgaactaacccgaccaacccgattaagagaatttttttttatatatatgtttttattatatataatttatatacatacttatgaaaaatagaaagttcaaactactatattttttttataacggatttaaactttaaattcaatttttatatttatctcattatcacaataactaaaatataacaatacaatgtgaaaaaaaaaaacaaacattagtgctcgatttggacaggttaaccagactaaaccgaccaattcattgggcgggttgaaactttttttcttcttaattgggcgggttgcacttatatttttgtaacccgatctttacattgggttaaataaaatgttacgtaaatcgaccaaaccgaccgacgtacacccctaatttctagtgtctttgagcaatatttcaaagtattttttacttctcatcagctttatatggatactatgaatcaggttttgcattcagtgcatgtctgttaggctatttttagcctaagttttgggtcacattttatagttgtttttcttcttt

SEQ ID NO: 76472 - DNA, 512 bp, Cannabis sativa
cccccaatttcaccattttcaaccattaaccttatttttttaaaaaaataaaacttcttttcatacccaaaaacatatcctgagtattagatcatatttttcttcgtattttagtgtaaaccgagaagagttagtggttgttgtggttgtgatgattgtagctccggtcactgattttggtgttgcaaatgttgaatctcaacatatattaaagtataaatctaatctctaataatatttagtaatatacattactttatttttaattttgtaaaatttttgagggttttcctatgttattaagattgtgttcttgtggttgtgtgtggtggccaaattttgatcagtattggtggctgattccagtaataaggtaaaaatttaaactttaatagaatttatatgtgttttcttgtattgaatatgtattatgtgtatatgtattttataattgtgttgtatatgtattctatttataaaaatactgcaattttattgtatatattttatgt

SEQ ID NO: 76473 - DNA, 809 bp, Cannabis sativa
tcacattttaatattacagtttgttaaaaaagctacttacaatgaggataggaatttgatacttttgcgacactagaagttagtgaaattgacacaatatttgtactaactatagcttttagacaaatacttattttgtgttttaaatttttattaatagtgttataccttaaattcggctgccatctcagtggagaacacgtgtcacgataagaggaatatagatcgatgcaatcgctttatatggaataactcattaattacgtgagtatcagagtatatttgtaacctgcagactgtaagatcttaggcaaggaatcaatatacaaactggtgcttagtatattagccagaaaccatatattgttgaatgcgaatagcgaggcatcaaggacactacaaataggaaggagaaagcgacatatatcaattgcgaaagctcttagtgtacaaactaagtgtaacagtcagatcggctcgagaccaagtaagcgaggtgcctgtcttgctatgggaagacttcctgtaacttcatctagttagcgccagtgaggctcacaaccctggcaagtcagaagctaacattcaaatgagctttgaagaactttttgtaaataagaatcgccgtcgacacaagacatgcctcgtcgacctcggaaagaaaaatggccccagctcgctattgaggtcactggaaccaagcttctattgagacaactccagatacaataattaaagacgtgtttaattcacgatcattttgacccagtaaaagcgggaaaatcacagctatatgattttcaaatcat

SEQ ID NO: 76474 - DNA, 627 bp, Cannabis sativa
tgtgagagaagcaaaagagagagaaaacaacaagaaagagctgaatgattattctgttattgaacagagcaacaagctcagtatatatacagtgataagttagttacaaagtctaaccaactaagcaacggaagctacagtaaataactaactctaactgactatgactgtacaaaataacagaaataacagtatgtacaattgactcatacagagtctctaacatttatgatagtacatttgacttgggttcttgataaacgtggcacctgattgaatgaggctgggttgtgatactagtcatcctagtggcaaagttcggttatgtaatgatgataatcttttttattttttttgggggggcgaatctagtttttagcttctcttgggcttcagtggcaaaatatattaaagagtttcccatcttttattagaaaaatactagtgtattttttcctactcgagtatttaagaaaatggattatgacatctatatgtggtagttctgtcatagattaaacactgtcctatcaataatagtatggaagtgggtggttgtggttgtgaagatgacggtaaggctgatgtttgtatatgtatatattatttttttttgaaaagagaaaa

SEQ ID NO: 76475 - DNA, 4705 bp, Cannabis sativa
aacattacatcaaaacttttaatttaaaaaaaaaaaacataacaaatcatactaaggagacaaatggcaaaatgggagaaaaacaacttctatattgcttataaaaaagacagtatataaaattatagtaaaaattataaaattaaaatgaagagttgtaatatatgactgtctcaaataaaattatagtaacaagtaaaaaaaaaaaaaaaaaaaaatcctatttttttttttccctctcttctaaattaggcttcaaatatatattaaaaaaaattagtttgatatttaaaactagtagatcaactttacaaattgtttattttattaggtttaaaaatcaaatagtcaagctaggatacatcggctaaataccactatcttagcagctgtaatctataacatttggcttaacaaaaacagaaacaggtgtattttcagtaattattctaaatcagtgtgtggtttagttgatgatgtaaaaagttctattaagtacagattacaacttgtctaagcaggagagagactacctattgagattacaagataggtatttttttgtcttggctgggttgtaagggacggtgtgtgttcttgagccgtgagtggcttggtagcttttgctagttgttgtattttgctctgttgattaatgaaactttttttcttgataaaaaaaaatcaaatagtcatacacaagttttaatacaaagatttaaatctttaagaaaaaaaaagtcatatctaaatattcagatcgagcgagatccaatccaaaaataacctaacagagcataacaggtcagatcagcaaaattcgaatcagattgggtcaaatcgaatcagatatgaccatccatttacgggataaattacaacaagatgcttcacttcagcaatgccaaaaaatgtgtaaacaatgtacaatagagtaaccgcatttagaacacgtgccattgcgtatgaatatatatataatataacattacacacaacctagattacaaacagcacaatactttgacaaaacccacatcgaaacttgggcatgagatatcgccgatacaaaatcaaaagaccggttgccatgaaacccagtgcatgttttttcttgtttcttttttcatgcctttgtatcttttagtactccacccttttcaagctccccgactagatccctcagggatggaactttcatggccagtgttctgtatagcctagagtaacgagctcgggttccatcggcagtccttgccaaggcaagcaagcttagagcttctgggagttcagagaatacttgcttcatctcctccaagctcatgttttccaaaacaggcggtttcggaacaaccctcacaatctcaccacccttgggttcctgaactcgggcatctgctttaatgaccagttctgaatttgagtttgctccgcacttgatgataaatgggtttgctgagcctgtattgaactggagtacattccactgtgccacgtcaacttcagtaccagtaccaaaatctctagatgatctgcggctacgtgatggttcttgaatgcggtcatcttcttcaggaattgtctgcagcaatgtgcatagtgtaaagcaatagaagaacaataacaattcaccaaaaaaaaaaagaataataacgtaagctagacaaacgtacatccagcaaaaactgtgatgagcaactaaaaataaactgtacatgtgatgagcaagagaagtgttcctttatcttaaaaattcagatttaaccaccaaaaaacaaatttcccaggattatgtgaattaaaaaaaaaatagcatatgtataaatgtatttgtgctaacacatacttcaatcatctggcgagcatcagcaatgtgcctctgggcacatggatggtcaatgtttagaagggacggcatccgctcggaaagttcatctagggatgctagcattgctttctttttacttttactcaagatgctgacagaagattgtctcactgtatcctgttggaagagactttcaatggtgcttctttatggaaagtaagttggggaagtgaatattgacaccaaaaaataaaacaaaaatgcagaggtaaaaccttgacttgcttcaatatgccatcaagtgatattagagatgctaatcgtgcatcttcagcagcagtagaaggattttgaatgggtggactgcccacttctaatgttagtaatgctgcatcatttctcatttgttgcaaaatctgattaaaaaaaaacaaaataaatatcacattagactttacagtgcaacgttggcgagcatagagaatttggagtgccctctatcagtttttgtttaaaagcaccctaccaagctctcacaacacctcagtaaatacatactattaaacatgtttcttcaagaactccaaaacaaatgaattatttgcctatcggccataaaaaatttcacacagtccacattcaattagcttgattttaatggtgctatcaatattaggaattggctacctttcttcttttatgatcaacagattcaagtgcagaacgcagctttgccacctgtggtgcatcttcagcctcttccgtagccagagtgccagcaatatcctatgtgaagagaaatttcaaaaaattctgacatttcgaagaaaagtatatatcttcaacaacgcacagatgagcaaaacgaaagaagaaaactattattaagtagcaacgatagatgcatccaaaatatgcaccaaaacattacagtgaagtggcactgctctttcagctaatcacaattatttaagatgccactgtttggaaataaagtgtcatgtcactgtgtgtaatggtttgggacatattttgtatgcacatcttattactcttattattaaataagcacataattgttaggacccttatgagtgttttttaaaaataatattgattgcaagctcagaataccttcaagtgctgtagctgagagctaaagactcgcttcgcatactcagataaaagttggccaagagcatctgtactaggaggcacagcagcaccaagtccagccatccaaccatccataattgtagttgaaagaagctccaactgaccagttgttcccccagatgcatcatctcccgtaacagaaagaaaatcaaaattccctgcaagccaggttctaatttggcgttgcagctcacctgctggagtatgaacaaataaagcagcaagagccttgtttccaatcgcaaaacttttggcttcctcgagtatttccctaagctttccaccagtgacctgttgcttcaaagtatcctgtaaattgacaatctttagcctaacatctatcaaaaccactagggacattcttccagaaaagcagagcaagaaaataacaccagcattcaggtttaccaaataattatcttacatcaagaaaaaatttgccaaaaaaaatcatatagaactgattgaataggcaacgttctccatgaaaatacaagcaggagaaaggatagtttacacccacaacacaacacgagaaagataaacaacattcacacaacatgcatataattataaatagcagccaacctgatccagccctcttatctttgatacaactgaggagaacttggacttcctttctggcttcaaattgaccttaaagccttggatatgctcatcagcatagcgaacaggagaccttcctgggctgttaccacgactcgaacttctactacgtccactgttagccttttccaaaaaacgatcaacagaagatacctacaagattaaataaaaataaaacttagcaaaacacaaatgagagaaaatcatcaccacagcacaagaaacagtaaaaagtgtaatcttaatttcatattcagtaccttgatggactgcaactctggtgatctagcaagcaacgatctaatatacaaaattctaacacgagatacaagcatggtgtccatgaccctctttggttccatcttacgaataaaagagaatacagcatctctaatttcagcaagtatttcatgctccctagaagcgcctgctttgatcacagcagctaaaacctgcaatgttctttcaatgataattaatcacaaaacttctaattctttaagtggataagcaaacacttgatttgggatattatgaatattgggaatgataaatttactaggcatatacaatttcaaatttttaaccacgtaaccatacacttgattcaagatatatattggggtcgaagtgacagcatatacaggacttgaaacccagaaacatgaaactaacttgttgatatgatgatagagcgatcatcatatcaaaatacagaatcattattcacagcatgtaatcagaagcaatctaggctctagtataattgaaacaaaaaaaaatcatgcaccctgttaataatactttacatatttttatagttaagtgcacacaagtacaaatgaatcaatgtcacaaccagaacatgacttaaatacaagtacacaaatagaattgtgcatttaaaaaaaactcattatgcagataatgagatcaagtcaattcatatcattaaatctaacagttcttcgtcaatatacagtatgaaaccaattgtttttttttaaaaaaaacttaaaacgaaattaaactataccttatgctttccctcttcaaggatttgctatcctgcta

SEQ ID NO: 76476 - DNA, 1879 bp, Cannabis sativa
tatatatatatatatattcaagtatgagtacgtagtatagtagtatgaaatgaaagagtgaagacatagagaaatgtccaaaataaagaattattaataaattgaaactaaggtggagatggaccatagtttcatgatgaaatatttaatatctctttggattgacatatagttatatatatcactataaatttttttacttttagtcaaaataaaatttatgattaaaagtgaaaaaaaaattgtgactaattataaatcaatatttttatattgtgactaaaagatccgtgtgattaaaaatattagtcacaaaaattataatttattgcgattattaaatgtgtatttagtcataatacttgttgtgattaaaactaaattagtaacaatttgtatttaattactatattttagtcacaagtaactgtttattgtaattaaaaagttgtaattataattaattcacgacatatttaattggtatataggattggatgagattagactggacaacacttcaaattaagattggataggtttattagtattgtatttagtgcaacatgactaaataaaataaaatatatttttaaataagtttataattttataaaaatacttcattaataaataaaacataataatttaatttaaataactttttaataaaaataacaattctagaaaataataaataaataatgaggtagcacatgttttagtcaattatattttgattaacaaagtgagagctatgtagattggggttattcccccttgtgcaagacttgcgattttgcaagacttgcctaatcctttgtaatgatttctattaatgaagactttatgttcaaaaaaaaataataataaataaaaatatttcaattaaatttataatagatatataatttattatttttaactttaaaaaattaatttttaaataaaaaaatatatattatatatcaactcactattttggcttgttaattaatatgattccaagcccttgaagaaatttgaaagataggataaaactttaagaaatgctataaagggtattaataatatcgaacaccaccgagcactcacattagatacttttaaaataaagaagttttaaaatatttgaagaaccaaccgaaaagtaaacaaactcattcgttttaaaatttctttaaaatttattatccatgttatatatttataagatattattaattattctaaatatattcgattaattgtttgaggtttgatattttttttatgtgtagataattacattaatattatatgtttaaaataaataaaatatattaaaaattaaacaagtaatgttttggtgatataatttaaaagtttcaagtaaaattaaaaaataaggttttaaagcattcttaatatagtttttattctctattttttaaaatacattacctaaaatcatattttatttattaaacatcaaacttttacattacactatccattaacttctttatattatcttttgatatattttaaatacacattattaatacccacatacacacatataaaaaaaataattttaaatcaaagaaatatataaaataagtttagagcattaatgaataatattgttccatatgtagactagggagtgaggcaaaaactcaaattaaatggggccaaaatgcaaaagaaaaggttaaggggggcctaaacataacttttaaaagaaattaagagaaaatatattaaaaaaataatataatttaatatatataattatatatatatgtatatatataaagttgaggggtcatggcaacccctctttacaacacagcatagatccctctcagagtcaagggcgaagttagaaataaaa

SEQ ID NO: 76477 - DNA, 730 bp, Cannabis sativa
aaaaaaaaaaaaaaataataatcataataaatcagttacaatatttttttagttttgcataacattatttcattcactactttatttttgtttttatacctctatctatatttatatgtaagtgtgatgaatgcatttttttttattaatatggagtttggcattagctttaataccaacaaaggcattcttttttttttcttggtaagtgtattttggccacacaacatgccagcataacaagtacattattttctctctctatcttaatattgtaaatgatattattatttttcttaatacatgattttttgtaataaaaatatagctattgtattgacatttttttgactacatattgatccattatgtattgtctctcaaaatagaattaaagatggagagatatgattcttgcagttgtattctttttggtgttgatgtcaaaaaatcaaatcgaaattagttcttagagtttgttcttaatatagagtttgctcgatccaccttctaaacaagtgacaaaaatatatgtaaagaaaattacaaagtcttacttaactgaaattattttttaaagtaaatacgcccttatgctgtgagtcacacatactgtaccaaatatagatttttattatttattttttttgtcgtaaattattattattttttaaactaaaattcccgcctaaccatattaatttaggaattattaaactataacaattat

SEQ ID NO: 76478 - DNA, 1268 bp, Cannabis sativa
ccaagacactaggagatccatttcgggctatttgccctattccttggaaactcccttgtctcatggaagtcaaaaaaacaacaaactgtttcacaatcttctgctgaagcagaatatcgagccatggccaatgctacatccgaactcacatgaatcctcgccctactcaaggattttggcatcaattctactaccccacagcacttctctctatattgtgcgcgacaacaccgctgcaatccacataagtgaaaatccagtctatcatgaacgcacaaagcatgtggaaattgactgccatttcatccgagagaaagcccaacaaggctcgatcaagctacttcatgtctcctcacaaaacaaccttgccgacatattcaccaaagcgctccttcccactcacttctccacaatagtatccaagatgggcttgatcaacatctacactccatcttgaggggagcttttaggattagctttggataagattggttaaggatagttttgttactaagtttgttatttacagctgttaactttctgttacagcacgtggttagtttccctaaccgcctctctcttgtaatgagctatttaagctccaaacctattgtaaaattagatacaagataatacactctgattttcctattttctctctatattttctcatatggtatcagaagaatttcggccccaagcttccgtggccaggccaactactcgatctcaggatggcactacaccatcgacgatcgacaatcctggagcagaggtcaattccgaccctatccctgctcctcctccctcagctgctcatcgacgcattccaccagcacgcgttcaacatcagaactcgactcctggttttcaagaaaattccgccattgttgatgacgattccactcaggcgcctcaatctcgtttggttgttgatgatccctccagtcctttcttcctcagcacaggtgatcaccctggcttgattcttgtaaccacggtccttactggaaccaactaccaaccatggaaaaggggcatcacgatggcactcacggccaagaacaaaattgcgttcatcaatggatccattcctcggccagaacctggtattcctacactcaattcttggttaagatgcaataacatggtgatgtcttggttagtcaattcggtttcctctgagattgcacaaagtatcatgtactttgatttagccactgatatgtggaacgaccttgctgagcgtttcaataaaggcaatggcc

SEQ ID NO: 76479 - DNA, 725 bp, Cannabis sativa
ggtcaaatttacctattttcttctattctcaaattctctatgtttcaattaccatatgcacatttacaaattttcttgtcatcatagaagatctcacttgcaaaatgttgtaggaacccaagccaatggagcaagaaattggaaactcacaaaacttgattgattttagtaccgaattcgaaaacccggaacaaactcaacaaacatcttcactcatcagtggtagtagtagcttgccaacatttgaaacatcaggaaaagagaatccatcaaagactccaagtgaaaacactttggaaagtttattatttggtttgtcaactgatgatgtctcattacaaacacctaacaacaatgatattctctcaacaaacaatactccaaatcactcttctaatgatgatctacaactagctgctaataacaacagttgcgccgataccaaagtaaccgaaaaatggccatttgagagtatgttgcagcatcaaccttcttcattgcttgttccaggaagtgactctatttcacagcaggctatgctatcaaatgaagatccaaacaatgaggtaatgatacagttgatcataattttatgggatttttagcataaatgcccttgaagttttattttgtttggcaattgagtaattcaggtcgcgtttggttgagagaaataaaaatataagaataggattatgaatgagaatggaatggaataaaattta

SEQ ID NO: 76480 - DNA, 590 bp, Cannabis sativa
tgaactacctttagtaaaatggtcataacttactcaatatttatccaattaacgcgattcaacttatatttgaaagaaatttttaagctcctaattcatgtctcataatcatatcaaaattctatcaaaattttgtcctcaagtcaagtgcgattgttttcacagattacttgaaaataatccaacagacacgattcatgcttcaaaaattgatgattttcatctaaagtcaattttagccattatatcatcatcaatggtcaagatcagtccagaatgatttttttcatattttattattattttaatggaaatccctccctataaaaggagagcttcacaagctcattggaggcatttagaaaagtcctttaaaggtcagagcatctctctctagaaatttgagctcttgccttagtcaattctcttataattcttgtgagaaaaaaaaactcgaagtagacgtaggttcattactgttgtgacacgaggagtggactagtgcaaatcttgtgtctctcatttatttttaactcatatttgcgagcaagagagtgttggctagttttctacgttaatattttggtgct

SEQ ID NO: 76481 - DNA, 726 bp, Cannabis sativa
  modified_base (670)..(683): a, c, t, g, unknown or other
agaaggagaagatgccgaagtaggtagtggaggcgacgtagccacaaatggtctaggcgaagaagccctttttggtgctggaggtttaggaactagttgaggctttttcttcggaaccggtctaggagaaccaccgccagtggcatcacaactgagctttctacaatcaactggatgagcagaatcataagcgcattgcctagcagaccgttgatcagacttatcggcaatacacactaccgtcaaagaccacacttttaccaccggcacaagaaggagctttgccggtgaagtagttaaatgaatatgtgaagtgttttcagttctcgggttctcaaatttagtttgatttttttttttttgagtatgtgtgatttaggtataaaaaatagggtacggtagtagcgttgctgagcagtgatggatggtttcagtggtggtgggtggtggttatagatggtaggtagtggtggtttcggtggatgttggtggtggtggatgtagatggtatgaagaagatgaagaagaagaaaaatagaaaataatgaagaaaaaaaaggatttgttggaatgaaaaaaaaaatattttacttttaatttttaaattatttttctgttaaaagaaattaaattatttatctttattttaaattttaatttaattttaaannnnnnnnnnnnnnactaattaaattgtgccatgtgtacactgtgtacacgtagaca

SEQ ID NO: 76482 - DNA, 831 bp, Cannabis sativa
ggggccgaccaatgggtctattgtcaataatcaattagacaattctacttatgggcaagatgcaaatttacttcaggatgaggatagagctttatcgagtttcttccaagctcaagtccaagtccaagctcaagaaactctttttcaagagctgaaacgattcaggaatttggatttgtatgagatcagggccttgggaggagatattggtggcaagcctacttccgagactattgctagaactaccccttttaagaagaggaagttaaatgatgcctcttcttctcttagtgcaagatcgcagaaatttatacggatgcaccctggagttatacgtgatttcccctgggactctcatgagaaggaccaggagcctagggaggcttttgaaaaaccatcggaagacaattcggaattcgtgagtcggtctgatgatgtgttcaagaatccgcttattggctctttcttgatcgaggatgctagctcgagtgtttctgttcgctcccatacccctgtggaggagaaggtcgaatctcctccacaggagctatgagagggctagcttggaactgtagagggttagggcagacctctacagttcgtgagttgaagtccctgattcggtcgcgctcccctgatttcatctttctgaccgagcttaaagtcgatgctacggctttggtacgtactcttcactctatccatttttatttccatattactgttccggctgtgggcactgcgggaggtattattttggcttggaaaatcggttttgagtttgagtgtactgcttactcccaaaatcacatatctggtattgtgtattcg

SEQ ID NO: 76483 - DNA, 1579 bp, Cannabis sativa
aaaatctaaaggtgcatatgatatggggatggagaatgcattgcattcatcccaaggagctttcaactctgcttatgtggtaaaacaccatgatgattatacgtgtgtgagtagtgtattccattcaatctacattattgcattcaatttatattattttatagattaatttgccgcataaatacataagtttaacttttaattgcaaataaatacctaaatttaatttttggcgctaataatacctaagttatatttttgaaactttataagtacttaatcgttaaatgtcaaataattatccacgtgttattttcttattggtatatttactttcaaggagaaaaaaaaaataatgacgtggaccaatcagagattgtcacgtggcaatttacttaataattaatagcaaggtacctatagaagttctagaaatataacttagatattattaccgccaaaaattaaacttaagtatttatttgcaactagaagttaaatttaagtatttatgccacaaattactctattttatattgtggattcaattcaatttgtatgataactcaaataccaattattttggattggttaatttttaatatgaaattatttaatattaattaaaatgtatattttttacactaccaaaatctcgaacataaaatattccttttagatttttcaataacaaaataaaataagtcgttatatgtcttcaacaaactaaaataaataaaccaaaaataataagggaagattaaaaaaaaaatgtatgcacaaaggaaatgattagctttacttagattttgttttctcttgaatataaaaatatgcatttgatatatttagttttgaaaaatttatgtgtgtattaattttatttaattactttaaaacattaataataaatttataagtttttaaataatataaataagtgttattatctgtatttttgataatatgacacgtggtattttaagagaatgatcaagtgggaatcgcctcagccaaaactcttccatgcaaggaagcctggtccagacgggagatgggcccgagcccatttgaagcccagaagcctcgcctccaagtacgagacttattcgaatttagaaggttcctcgccttttggaagatggaataggccaaaccctccaagtgaacattgggatgtactcggagaggaatttcaagaggcatctccagaagccctttgaggggtgatgtggctgtcccctcatacccggtcccaacaaatcagacattgtctcctatgtcaaaacataccaccaagaggaatacatcctctttgtgtaatggcacctgtctgacatctttgtatattgtagtagtactcgcgtgtgacacctgtctggatcgcgtgagccccatctgtacgaacacattcaccccacgagccagaattctgcaccggtcctcaaagtcgtgtatttcatgtatttacctcaatagtgggcctagtttgcccagtaatcgtagcagtcacaagtatgtctggatccaaatcttagcccataaataccctttcataccttcatgtaaagggagagag

SEQ ID NO: 76484 - DNA, 924 bp, Cannabis sativa
tggaatttgattgttacgcgtaggtataagagtttggtgaagaattgatgcaagaatctgggccattggtttggtctacatgtagtagtctaccaagttgatgacaatttttttttttacatgaaatgctggtttggtagttgatgacaattaatattagatcttcttttcttttttatcctaaataaaaaaaaatcttcttttttctattttctttaaataaaaattgtttctaattattaacactaaactagataggactatctcaactcttaagtaaaaggcacgatacgacgtgatactagaaattagtttgataatacaaaagaaatatgttcttaaacacgacatgacatgagaatcacaaaaagtacaatacataagtacgagtagactaaccaaaaaacacgacacgcgataaactcaaaaaatataacacgacatattaaaaaatcttataatttaacaataataataatatatgaatttatcaattataaataaattaaaataataataaaattttaaatataatgttgaatattataattttataattttattttttgaatggaaaaatcatctttattaaccaataacttctgttactaaataatgtaacaaatttgttggaacaaattccaaattaaaattacaactagtatataagatagcaactctagcaaagttatgagttatcatattaactgatcatttggcaaaataatcggaaacattacatgaatttgcaagcatattttcacaatcttaaatgacataaccaaacagagaaatcatactgatagaactctgtaatacttgcacaagctctaaactattggaatttctagctaccaactccaaaccaaaactctgaccaccatcaaacagagatgcgtctacatttaccttaatactatcaaa

SEQ ID NO: 76485 - DNA, 847 bp, Cannabis sativa
tgttacaatatattccactctactataacatttttccaagcaaataacaaagtaaaataaaatcatcatcacattacacacatcataaacaattaatagaaattaaccatgatctggagatttttcttgataaatttttggtgaacaacttctaatatttaatgttttctgagaaacaaagcagagagcagaatcaagcatatgaagacaacaacactaacaaaagcagccaccacagctccactcacattctggcagaaatctgtgaattggttacaaatggcaagccagttcgagctagcattgccattgtgagccaagtaaactatggcggctgctgcagccgcggctgaagtggccagagttagtgccacctgaacaaacaaaatatgtttatagctaattagtaagaagaacaatgacaaatatatgaaaagatcaataacagagtgacagagtagtatagttgtgtagtgtattacagtgtccataatgacaaggaagagcttgattccagatgcatggggacgaacaatggtgactatggagaatggaagagagaggactaggtagccactcactagtgccattgctatcaggaaaaatctgcacatttttaatcatcaacaatttattagtacttgtaacttgttaccaaaacagaggccgtttttttgttctcagcaaattcacgacgaaaaattttatttttagtcacaatttaaaaattatggctaattataaatcagcattcttatgttgtgactaaaaggtctgtagctaaagatattaatcataaaaattataatttattaatgactatatgtatttttagtcacaatatttg

SEQ ID NO: 76486 - DNA, 517 bp, Cannabis sativa
ttggtatcagagcgtccttgctaacgcaatgtcgactcctcaggacccagcccactcaccaagtcaggttggtcagactcctgctgaacaaactagtgcttcagctgcaacaatggtacaaacaccatctttatccaatcctctacccactgtcaatcctttcagtaatactctaagtcagcccttctcactgaaactggatcgaaacaattttcctctatggaaaactatggtcaacaccattatacgtggtcacagactagaaggattcataaacggcacaaaacctccaccacctgagtttattccttcaggaacacctctcgaaggagcccctggttctggtatggatgttaatcccgagttcgaaacttggttggtctatgaccaactcttaatgggatggttatacggatcgatgacggaggccatcgcatcagaagtaatgggctgtcaatctgcctcagcactgtggaatgcccttgaagaactttatggagctcactccagagctaat

SEQ ID NO: 76487 - DNA, 537 bp, Cannabis sativa
taacccatcccggtttcgggcaaggcagcccactgttttagatcagttaattaataatccataaacacagatcatagtccatcaaattataattaaataattagttaattaaacttaatcctgcactaaatacacaattgattatgattagcatgtgcaacattattggataattaagatggccaccctggctcacattcaacacagacacaccaaaacaattcatgtggttgcttcattactttgagtttgaactaaaagacaaaaaaaatagtttacaacctcaaactatattcacttgtcaaattggtttcccattataaggtaaacattattatgaggtaggggttttggatccaattaatttccacaatattctaaatttatggattttatcagttattttaaattaattatttttaatattaaattatttaatatattgaaaataattttttttacataattaataataaaataaaataaattattagaacttagttgatattactctcacctaatttcacattttttttt

SEQ ID NO: 76488 - DNA, 502 bp, Cannabis sativa
agcacattttcaagaaaattggtcatttgtttctttagttcacacccaatggttcttttctttggctggtgggtttccccccttttaatatagcgcacattgtctcgtgataaaaaatgtagttaaattttcgaaagtttcattcaccattgtccaatataaggtcaaccaccctattgtatctgatggtaggcactccgtttattttcaagcaaaactcgtttctatttgtcatccacgagtcctcccaagtattcatatccttcccatcaaccaccaccatgcatgctccctttctaaggatctcttttgttttgtcagcattcttctaaaaccaataatcagagctcttgtattaagatacttggcattaagaactttgcagcacaaggattaacttccattaatcaagtgtcattgtcatttagccaaaaaaaaaaccaagtcatttattttgtctttcagaaacccgattaccgatgagactttggaagaaagatct

SEQ ID NO: 76489 - DNA, 904 bp, Cannabis sativa
ttcagtagttaagattataaaggttgcatcgacccataatatgataatttgggagaaacataaaaacggtcggctataattgttgctgagcgatttaaggaagaaaatacatgaaactaagtatgtatgtttttgtgtatatataataattttttttagaaaaaaaaaagaatccactttgtgatcatagactcttttgatcgatcatctagagagagttagctgttttagaaaatagaaatgacctttttttggttaagatatttaattaatattgtccaaaatggttaggtgtacagacccccagtgaccaaaatcttcctgaatctaattagtggagaatcatagagattctattatataatcaataaaagctgtatactattactattacaaagttaatttcaagtgccaattaaaagagtgttgataaagtttacaatatcaattttttaatccaattacaatatagggtttttagctatatagcacaatgtaagattaacaatcgcctagacaaagcttcgagacttggatctagtcctttcatatattattttttattacacattacatgcatatatatatatattattattccattagtattatttttggtcatgcaaagatgcaaaaagagtactattggagacatttaccgcacacgtattaagtcctaactataaattatatatcttatcaaaagagtaccagacatattttatataaatttatttcttaaaaaagttatataatataatatttagtttgactaaaagttattggaatcaaatcaccaataatattaatgattaataacatgctcttctactttgtagtattgatggtttacaattactcactaataaatgaatctagcttcctaatatatttattgatatta

SEQ ID NO: 76490 - DNA, 866 bp, Cannabis sativa
  modified_base (312)..(332): a, c, t, g, unknown or other
ttaatataatagtttttaaggagtatcgctagccaatcgcaacgcgacatgtcgagaaggtgctaggcacctctggtgcctaatagcaatgctcattataattgtgtttatttacgtatctagaaaatatttaatattatttaatgtagtgctgtaaatacgtgttgaatcttttcacacggcatgaaatcgatacgagcacgattcaacataaaaaaaatacgaatttaaacacgacatgacacgatagtgtagattgacactgtacgacacgaaaaaaaaataaacttaaacaacaacaacaacaacaannnnnnnnnnnnnnnnnnnnncaacaacaataataataataaaaagtaaatagcggcataagtacctaaacttttaagtttataagtggcataaattcaatatttatttttagcaacataagtacctaatgtttgtaaaactgtaatttttctctaatttcgtcaatatagactctgttattgtcttaaacaaggcacatatataaggcccaaattttagatcattaagtctagatataaacatgtagcattagttacttaaatttctttttaataaattaaaatagagtctgtattgacgaaactagaaaaaaattatagttttataaatatttaatacttataccgctaaaattaaatattgaatttttgttgctcacaaactaaatacatatattctcatctaaaatcaaatccaaaaaaatatacacgttaagtccaaaatattttacaataaaaaattaaagagagtggatagaatgatgcttcacaattgaagctcgaccaccatgccgcagttagctctgcatggcacactgagagagagagagagag

SEQ ID NO: 76491 - DNA, 723 bp, Cannabis sativa
  modified_base (646)..(646): a, c, t, g, unknown or other
aacgctcaaagcccaatgtagtccaagcaacttaaattccttattatacaggtgttattctctcagtttatttatttagtcctctctaatatatatttttaatttctaatttattaaagtgaatataatttatgtgggcatgcatttaacgctaccacacatcaaagtcaagttttattataattgcgaaactggtgagcccaatgtatgctcgttctcgcataatttcttaacaaaattattattgcacttatttataattgcaaataggcgagcctaatatagtgctcatttttgcattattgtttagcaaacttgctattgtatttctatttgtaaattggcgagccgtacaagtgctcatattttgcaaaattatttgataagttcgcaattatgcatatatgctcttaaagaggcaaactcaaacacttattttttgcatactaaaataccaagtatatggcaagctcgtgatagtgcccaaatatttttacccattagcacatcgcaaatatggccaatgcctcgcttaggcaccattccaattaaatcgggcgcacaaacccgaaaggtttgttggctaacatctcagaaaagtgaaagaatcgaaccttattgaaaaggttcgggcgatgaattaatnaccaaaggcaaaagacttttttgtctcattttagggcccgatggcccacttggtaaataccacactcttatatatcg

SEQ ID NO: 76492 - DNA, 1577 bp, Cannabis sativa
gacaaacacaattttctatggataattccttaccatatggtgaagtgtttagttagaggcaaataagaaataagaccgtccaaaacagtactttatctgctgggataataagattttaagtatgcgatgattaataactttattaaagacaataatggataagtggtaaatccaaggagataattatgatattagaaaaatgaaagaaacacatgctaattttagactacatgttgctaacaaccagaacagaatatgagtgttagcaattaataaataaaatacgaaaaataatacaacttctgcatgtgtctttacagctcacaagggtcagccatggtgctactcacgctaatataatggagaattgctagcttttatttattttttatataaattatatgcacacattctgtatatattgaattaaacacatgtatcttatgtatatgtcatgtagcataatgcccatttcaaataatttcattaaacactacaaaataaaaacatcacactcaattagattaggaaactatgattttctattgcccataaattttcttccacatcaagatgctactcacaaactcaaactatggcaaaccaaattttgataacgtgtatacacataaaagaagaagaagcaaaattttattcataagatttttctttctttttcagaaatggacaagaagctatttctctataacatcaaagctccacagaattctcagttgtgaaaatacaagtcatttccttgttctgaacaattattagttgaacgttttcttgatttgtgtttgtatatatcagtactgaagaaaaaaatttaggccgactaccaaatcaatgaattttctgactctcaaaagggctaacattaaaacttgcaagcccccaaaaatacaaaaatagtaatcaaaatcacagatttatgtaaggctgatggaagtggcataagattggagaagggttagagcttgctctgtaatggctctatttctggctctcttaacccagtccccaactatttctgaggcttggctgccttggacaccttcttcaagaacatctgctgcttcagcaattttcccttcagccaaacaggactcaactttgttgatgagagattctattccatcaccagattgattagcttccttcacctgaaggaaatttcgatgcaaatataaaaatgatctaataagtgatatgtatataggaggagagggaaacgtaagcttgattttgtatcttcataccttcagccaggatgctacatgcgccaaagaatgagttaaaacaccaccaccgccaggagggattaagctgaagtgtcggagtgtcccttttaaggcatcaaactgacaaaagaattactgaagttagcagataaggcttatcaataggattcatttatgtagttcttgagtatccagcattcagatcttgaattgaagccttcataatttgcatttttatacatgttcaactgacaagtcgtctttgagtgaaaaatcacaagaaagtcataataatactgctgaaattaatgagcttacccacagtagaaaaaa

SEQ ID NO: 76493 - DNA, 1469 bp, Cannabis sativa
tctcaattagaatataatttaattagtcccaagtgtattcttggatagaggttctagtgtactaccattttaatttaaaaagtaaaattcacttggcaacacaaatctcttggtcattaaaatttaatttagtttgacattttcattctatcaagtttcaacctcataccaaatactctttaagtaactagaggagtaatcagttaagtttttctcatattttttaacttttttttttaagttttcctacaaaataagttttgataataagtcatgtttttggtagcttataccttaaaatccataaaaaatgaaaatttctttattagattttgtaaataaggcatttttattattgggcttttcagctattgcttattgggccttagtatatataaggcatcttttcatatgttgtaattagcatttcaactaacagctaaattggccacaggagagtctatgtgtgttggaagtcttcagttggaattatgcattgtaatatatgaacgcttaaataaattgccatttcaactactttgaatgagaagagactattcttctaatatggcatcagtgatatcactcctttaaccctaactcatcgactctaacttcttctccatggcaccacgaaccaaaaactctaccatagccactgctgaagtctcctctcttctaatgacttctatagccacagttctcgcaaccacatcatcccctccacctccgtcttctgatgttaccattgaagctttaatttcttagattacagagacattttacgttaacactggaaaacttagagggctctggctcaaactccaagggttgaacccgaacctacaacacttgtcttttttattgttgaattgttttttttttcacaattattgtctttaccttgttgacttgtcatcctctctttgtgcaattcttctatacacttgggcaatggatgccttagaagaattcaaaagcaatttggctgtccagacttggaccgtgaggaaggctgcggatacaaggaccaagaggcagaaggagagacctccagttccaagaagatgatcagggggacgccatctccagcaaacgcagtggacaccatggtcaacccaaacctggtggtcccggctttcccaattcaacaagtctcattagtcgatcctcctgctccaaacatagttgaaggacctaagcaagtgatcgatcttgacaaggaagatgccccaaaagtgcctctcattcacgtaagtacgtcatgtgaacaataagaaactagtacaaaggccaaggcgacagccttagcaaagagtcaaagagaggagggggagcaataggcagcgaagaataagcagcaagacccagagagaaatttgtagtgacatcccaatggggagcataaccctcgaagatgcacgagaagtctacaagagggaaccctatggctccctccttccccctca

SEQ ID NO: 76494 - DNA, 958 bp, Cannabis sativa
atccaccattggcaccttctagggaaggaaagacccatgagcgacaaccacctagcaaaaaaactggacctcaactcttctacgctggagagaccagcccgagagtgggcaagtcaacaattggcgagcctcattttgacctaggagaagaccttgagttttctagactcaaagaagttgtaggctgtgtaggccttactaaagaaccaagtgctgctgattgtgattcattcgctcaatagagacgcacattgctgagatggatggatgactaggagtacacccttccatctcaccaagcagaattagatcgtcgcaatcgcaaggcaagcaatctaatgagacagttcaatccgacaaccgacagaagaggccaggatctccttttggattcactttaaagaagactgccgccaagtgcctcaggaactaggacatatcttccctttccaaagggaggacaaacctttgctcaaaggttaaacggcgaaaacaactagatcgtggggccagccagggatatctggctcaatagcaacacccattgtgtagccactgaccgaccagccattaacagcagttctaatggctagccagggtacatcacttcctccctaaggggagcgaggttccccaagatcgatcttcgaccgatgatgattgagagtgggtggaaacacccaatggttatttgagaagagaaaccgatcacttcaagcatccaaatacaccaaactccatcaattgctgtgatctacccccaataaacacatagccaacatcagttgaccgtggagtcacgggctgctagactctacccaattcactctttgccggccaaggaagcatcacgggcggtcagaccctgctctttggatgtttggttggccatggaggagtattggggtgccagccctacacaatgtaggtttggctagccaagcatatgaattgggtg

SEQ ID NO: 76495 - DNA, 941 bp, Cannabis sativa
attgttctggtcttgttgaatttgaaagtttgcactttcatctaaagtagcccctgggaactgtggtaatgactgagtagtagtagcactagtagtagtagtgttattgctcccttgggacaaagacaaaccagctgttccccatataatttcataaatcaataaacaagaaatcttaacttacccaaaaaaaagttcgaatttttaaattacacacacattccttcaagaaaactaattcaagaaacttgacaatcttaaattccaaccaatacatataaacataaatcaaatcaagggagctatataatttcataatcttaacctacacattctctcgagaaatctaatctaagaaacttaacacactcttaaattccaatcagtgcatatagagataaataaaactagggttaaactaatatttaccagagcttggttcagagggaagagaatgggaggcatcaccgccaatatctctatttagagcagcctgaaaagcttccacatcagcccccgaatgcatactttcgtccttcgaaaaacaaaacacaattcagttcaaatcaaatcaattttacaaatcgaattcttaattctattcccaaaaacaaaattcaaaccctaaaaagattgcagagaaagagagagagaaggaacctcgtcatcttcgagaagcttcttcataagagagggatccatggtgatttgggtcgatcgaagcgaaggagaagaagaaggatgaaggcgccaatatttttaatttatttttaatcaattaataatcaatatatatagaagaatggacggtgacatggcgctctcttctctccttaattttttttttttttaatttttcattctttttataaatcttttatctcattaattcacttatcttttaattttttattatagtttattttataaattaattgaaa

SEQ ID NO: 76496 - DNA, 581 bp, Cannabis sativa
  modified_base (38)..(40): a, c, t, g, unknown or other
ttaaacaaaaaccactagaacttaaaataaaactaatnnntacgtggctcgccacgtaactctcgtctagtatcaaatatatgtacagttatttcattaaaaaatatatatgtacagttacaaaaaaaaagttgtgtaatttaggttgagatatattgcaaaaaataaaataaaaaagatacactacgaagaagataaaccaataacatatgaatcaatcacaaaactaatattaatgaaaacggtataaatataagggtaactttcattattttaaaagctatttatgtaattgagatgtattttaagactctaaatgtaaatttccctagatatgttgctaatccaattaatgagaataaaaaaatagctatgaattaatttgagagtatcaccttttttgttaataaaaattaaaaatagttatacaaaatatagaagagttattattcaaaaaaatattaaagaattaaataatgtaattttttttaacatattaaataatgtaattattggcccttttcactactacaaatattcgttttcgcgacggttttaaaaacgaattttttttgggaccg

SEQ ID NO: 76497 - DNA, 880 bp, Cannabis sativa
tttataagtaaagtgtgctatgctatttcgtgtgatgtgaatggggtaattcatgtactgtaaaatctgttactagtcccaatggagttcgtgtgtggataaatacttgtcataaatttataagtactcatgtaacaatttacttatgtgatcagtaagcaacatttcttgttttttttttttcacaaaaaagaataacccttttggaagatatgtactgaattacccaaagggatattgacggataaaccacccgaactttaaattttttaacacttaaccacaaaaaccaaaattttgacggcaaaacctactaaacccaggttccgctttgctctacacatttccatccaaaaatctcagttaagtgctacatagggctgtccacgtgtacacaaatgtacacgtggaaaatttttagtggtccacgtaatattacttattaaaatattataaaaaataatttaaaaattattaaaaataaaaaaattataaaaaaaaatactttattttattttactcttttcttttttcttattctttttttttttctttctttttatctttttctgctgaaatccattcatcttccacataccacacccaccgaaaccctaaccctcatctttgtgcagtagagcctttcccagctccagaggagctatcgtcgaaatcctcaacccaaacgggccattattatctccaaccccgagaagcccaaacccccaatgacactccctctcatgtccctgatctcccgtttcttttaccgtctctctctttctcatcgatagaaagggcagacaaagcaggtcaacgtaggtcgacagaggttggagcttcagttgggcttcgatcgacgattgtgaagacttcgctt

SEQ ID NO: 76498 - DNA, 920 bp, Cannabis sativa
caaagggaaaaggatctgcagtagaactgggaagggccactcagagaatcaaccatgataatggttggttcaaaatctggaaggtaaagaccaacgaaccacttcccaatcgaaattatttctgggatgatcgaggttttttatttcggtactttgccttaggacccgatgggacacaatatgaatattttttgcaggtgcatggagaagagttgaacttgagtaatcagttcaaatccacacttgctaccccaatgaagactattttgaaggaaatagtcactgcagcaccacgagtgaccgcgctggaagtggtcgctcgagagaagactttgtcatcatttaagagaaaacccccaagtaaccagtttgagttattttgtactatttatttttatccattatgttatagaactagatctatttttatttatatctgagacatctacttgtggtgacttttctagtgacttttccggcaattgtgactttttcggtgacttttctgacgaaatttattattgttttgtaaatatgagatttctacatttgtttacaaaaatattacataaaaaagcccatgtaaatgtaaaataataataaaaactcataacccatgatattatttatttatgctataaaaaagtactcttataatttttccatatattgtgtaatttatacttgtggaaattatgtgcagtatggtttttaagaatattttatggtaaatatggcatagtttagtttggacactttttatggcttttttaaactttggacatgttttgtggatttttaaagcccatacgtttataatgtatgtttaaaaagcccatatgtggttgtttgtagtttctggaggttattttcgtaatttaatatttttaaatttttgtatcagtttttttattgtttac

SEQ ID NO: 76499 - DNA, 524 bp, Cannabis sativa
tcacaaattttattgagactaaaaataaaaaaaaattgtagtgagtcagaagataatttttcgtgcttccctataaattaattcattgcccgtatttatgatcatctcaatcttttatttcatagataaaaaaatctttaaaattgaataaagaaggagaacaaatattcccaaagcaaatagataattatgtttgttttcattgtttggttgggagtatttttttttatattctaaagaatataagtaataatttttttacaactactaaaaacaataaaaaaaatattttttacttaaaattaataaaaataatttttacttatttttaaaatttaaaaataattaattaataaaaataggataaatgtcatttcgaattttatgttttgcaaaaattactaatttggataatctgttttattaaataataaattataccatatattttttaaaggctaattattatttttttcccccgaactttgacatgtatcaattcatgccccctgaacttttttagc

SEQ ID NO: 76500 - DNA, 852 bp, Cannabis sativa
ttcagggtccgacgaagcttgtaaatttgagtgttttctggttagtttcatgcattttacattcagtataaaagcattttattatacattaagaatacaacaatgctagacttttcaagtatattgatggctggaaatggggaattatataactggagatgtatcgagagcaaacattcaggttgttgataagttaaatcagtacatcaacaactagcaaaattatatatcagctttgaagattccacatgaagaatagaaagacataattatggattgtgtattaagattttggaagactatgggattatatgattttgactgagtaatagcagttggatatgccgagccaatatgttatctaccagtgcagacaatttatatagtaaatacagatatttagttttaggtggcaaattttgtattactctgaggattgcctataaaagggatacgtagaaaaggaagttaagccatggattaattagatctttttgatactgaagtaagtaggtaaagtagtctattggttagctttaaatcctgcgttgtttagagtgcataatgtatttcatatctctatgctgagaaaataagtattggatccgacacatattctcagctatgacgatattgagcttcaggaaaatttattatatgggaaacaacctatccatgttctggatcgaaaagagaaggtactttagaacaagacagtcccactaattaaagtgctgaggagaaatagcaattgttaaagaagcaacttgggagttagagttgcagatgcgacaccagtatcctgagttgttcaagtaaattttgaggatgaaatttctataaggaggggat

SEQ ID NO: 76501 - DNA, 7431 bp, Cannabis sativa
atttttttatcaattttttttattcattttaaattttattccattctattcttattcccattcccattcctattcctatattttcattcctcccagaattctgttcgctttaattttttcttttgtttcaagagtatgagctaagtttcacttaaaaaaatgggaaatgaaaataccatactgacatttaaatagaaatatgaattttaacaacagctttaagatattaaatttgatataattaggaactcatttatttgattgcatttgcttcttcaaatttccaagaggtccaaatgaattagtcttcacctcttctttgctacaaatacatttactagtgttcaaattcataccacaattgaaacacatgcctttgcaatttggatcacaaacagaactgatggtaatctccaggtgcagcaggtctctgatgtgtttcgatatatctatttccttttctttagggggaaaatagagccgatcctcaaaatcaatggaagcttcatcatcttcttcctcaccatcctcaccatttccagtaaaaactatgctcttgttttctccaaaaatcatactcatgtcaatggtctcaggttcttcaacaggttcctcagttaatagcaaggagaaatcggagaagatgctttctgcagctgcctcaccacaccttcaacagaaaaacaaatgacattcaaaatccttatgaaataaactaaacataaagaacagtatattttatgcatatgatcaatgcatacaagttctcaccaataacaaaatagctcataaacatcctgaaaccttaccaattcaacactgtacttctttctgatgttataaatgctagttgactctaacaaaaagatacaactaaaaaacctaaatgaatgataagatttacaatttacaatttacaaaattcagaagttcagttatacagtgtaaagttgagaatcaaataagtaaattcatagcaaagatagaaacaattttgctgcccagagagaacatatagcaacatttcaacatatagcacatatacctggatgaatgaccatcattataacagttaagctaattatctattgagttgaatgattatctacctactgcatccaagagtgaagacggtttttatgatcccgtcaagcctcaactttcgcttcttccttgttatatcaacagagatgtgaactggtgttccaaaaggataatcctttacagcttttgtcacccgcaaccccattacagaagctcttgattttgatacctcggtcgaaagcttccctaacccaagtctctcaagggtggtgcagtattccacgtgtgttattgaagagtttctcttgtaaataactgctccttcccatggtgagccagtgtcttcaatgtcttctttttcttcatcttcataatcgaaagatatgatatcttctccattggactgataattacatcttaaagcactaagaggtttctctctgaaaattgtatgtacattttcaataatacaaaatggatgcttcccgtgaaaaagagtaaaacaaggagataaacaagtagtttgattggcctttagatgaaaaaccttacattggttaaaacaagtagagggaatcatggatgttgatgaagggattacaaaagacattatttatctatttttttcctttgtaattagctagtaaatttaattcaattcaaagcatggaactaaaaacaaagaaaagcaaaaattacaagaggccagtccaatatgccctctacttgatttatgagcccaaacgaaacagcctaatctgcaagaaagtagttgataaaaagcttaatcaacgaatataaagatgtattgaaattcaacactgcatgtacataatcaaaaaacgaattaaaaatacgatatatactttccacagtatttaatgctttgtaagtcaaaatttcacaaacgtcttagagagaatcataatactgtttgttaattatgtctttgttttcgcaatggtctctaaatgaatattcattaacagactggtcagcaagtaagtattttcaagtgagaaattgaagtgaatgaaaaattgtaagctgcacatttcgacaaacaacttttgggcatgttcaggtgcctctatacttcagaaattaagtgaaggagcaagaaaagaagaatggaaggagaggcaagataaagacttaccttgaattttctcgtccatggatgggaccttcaaatgtgaacaaagaagatgatgaagaagaagaactcggataaggagagctccaaattttgttctacaaaaatggagtgggcctcggcccatagtattcaaaaatgggctcacaaaaaagcccaacccaatggacattcgcagaaggcccaaaaagagcccagaagatgaaagctaagctttcatatggggaacgaagaaaagtgtgaagtttgttaacgcaaaccttctgttggttggtttggagagaactcgaaaaggaagaagccatggcagctgagctcagacttggaggagcagccctagtactagccctactattttcgatctcatctcatttctcacttctcaacgcttcctcctcccctcaggacattcagatcgtcaacgccgagcgcagagtgagccttcatcctcgctcaatttcgctttccaaacgcttttaattcattcaaaaccgatatataatcagatcaatttgtaatggagttgtttatctcgatgtgtatcattattcttatacctactgtctctgatttttactgatcaatgcttgcagattgacttgacttctcacattattaaagtcttcttaacactgaaggtatgggaaaatcaataaatctatctgattttaattaatttttgctaatttgatagcgaatttattgcaatgtgttttaaaattgtaatatttctgggggtttgatattcttattacatactattattcatcatggttacgggcgtttagatttagggtcggttaattaaatttgatcaaatgataagtttttttcttttcttttgggggtaatgaggaagtgatttgttggtatattcataataataatcaattgaacaaatggtgtttctcaattagattgaaaatactgggacatctcctgtgtctgaagtactccttgcatttccacccaccgaggttgatcatgtcgcactggttaaagcagcagtcactgctggaaaaaagaagaagaagacttatcaccccctcgatgtgaaaccttctgaacaatccaatgcaccaaatggagccaaatttttcagtatatccttgctcaaaccattaggcaaaggtgaaatggcaacactagaagtgctctatgaattgacccattctcttgaacctttcccgttggagataagccaatcggaatctcagttggtgtacttccgtgatagtgcattattgttgtcaccgtactacattaagcaacagacaacctttattaggactccaactactaaggtggaatctttcaccaaattggagtctactaatcgtgttggtacagaactaaagtacgggccatacagtgatcgtgccccctattcgttttcacccatcattgttcattttgagaataacaatccatttgctgttgttgaggagcttgtacgggaagtggagatatctcactggggcagccttcagatcacagagaattataagctggttcatgctggtgctcgacacaaaggtgtcttttcaaggtgtgtttattttcttatgatattgcgctaatctattataaaatattgttagagagtccacattgataatatgtgggaacttaaaatcatatgtaggatacatgaattactctactcgttccggcacgattcttaacatagggatgagagtcaaacaaaatcctaacaagtatcctatccaaatcctaaaaggaaaaccaaaagagctatctcacattaataatgtgggggaatttaaaatcatatacaagatacatttaaatgtttgatatgttcttctaattttggccacacaatgatgtaagataaatgtttttgcatggacatagtttatatgatatatgtttactcccagtttgttcgggcttttcatttgggtagcaacatgagtaacagactggttagcaaaggcaatttgatttctacttgtttgttgtatctacaaatcttagaggtttgttgtgctgactgctgataagttagtgtagaaggatgagcttctttgatcttgagatatgaaccctatagtctttggtggattagtaactcattgaattatcaaactctatacctcattggagtaattgtggacatgactaccgaagttcctagtcacgtgaaagaaaaaaattagagcatagatgcggtattaaaacttattctgtaggagtaattatacagaaatggctaaaccattgaaaagtcataattttccatttctgagtaatattttatttctagtattctttgttttacaatttttctgcacatcctgttaggcgtggttttatgcttttatgctcctataaaattatagagctgtaaggagaacaaccactaaaggagaagaattgttgttttcagatattagcaaacaaggcctcaacagtcaacagggcggctacattttgttttgttcttaacatcaaaattccatttgtgatcttaagctcttaatctctgatgctttcgtttggcagggttgaatatcaatcaaggccagctcagagtggtgtctcttcatttaagaggattttggcaaggctaccacctagggttcattcagtatactaccgagataacatagggaacatctcatcatcacgcctacgcacagattatcagaaagtacgttcttgagtttctttcttgcacccaaatgttttaattgacttaagctaattcatttcttttatcttaaattgcgttgacagtaataatcacatcaagtaccattttagtttaaatttgtgctgttaagttcgagttctcacgtttaaatttgagtaaagcaagtaatttctgccttattgtcattatctttacctatttctcccgaaattgcagaaggtttttagtaattattgtaccatccatgtgggaagttttttcttgatcatattattttcttgaaaatgggtgacatataagtctaagactctgtaaaatgatatctttaaattaatgcttgtcagttagtattttgtttgactgtgtcccttctggtatctgcacgttgcagtcagaacttgaaattgaaccaaggtatcctttgtttggtggttggaaagctacttttgtcataggctatgtgctaccactgcaagacttcctttttgaatcatctgatgggaggagatacctgaacttcacttttggttgtcctcttattgacacggttgtagacaagttgaccatcaaggtgatatatatccatcctaaattgctctaattctttttattttgttggttcactcttacaatctgaagcactggaaatataagtttggggatttgctgtgttttaggttgtgttgccagagggatcaaaagacccgtctgttgttactccttttccagtagagcagcagttggaggtaattgcttaatttatacttgctaatcatattttccctgtcctaacaatgctgttcgtatcatatccacgacattgacatctgggtttcttcgtgctattcattttgacccatgtgcatacgtaaattatccattttcagagatttctccttttcttttggtttagacaaaaaattactctattaacaattaataataaattgattatgtgcatataacagtagttgaagttggattttgacattactgccattttatatatttatacgtatatctctgcagactaaatatacatatcttgatgtggttggacggaccgtggtagttcttgaaaagaaaaatgtggtccccgagcacaactctcctttccaggtgatcacctgtcctttgcatatttggaaattttctcgcatttcctagtaaatcatttcagtcacctcaagtgctctctaattaggagattctgaatctacagttttagcctactctggagaaatatgagtttcttctgatcgtgttagaaatattgttcttgctatatatattgaatatggacataaagttctggttttgaccgttccacatacattggtgatacctatatttaaattgacatatcaaaataaaaatgcagaaaatgtagccataccccaattcattgttggccttcaaattattttccctctcagaaaaatcatttcttgaaagcttcaattataatttttcagttgttaatgttttcttctcaatctactttctttggcaggtttactacaacttcaagcccattttcatgcttgcggaaccgttaatgctggtggtagcattctttttgttcttcgtagctagcacagcttacatgcacatagatctttccctaagcaagtgaggagcattttcataaatctctagactaattacattagaaatgccgtgatattcgttgtaatttatagctcaaatggttgtaatcactttcaacttggttgatatgagtatgaaccagaagagtcggagaacatttttaagttgcagcgaataggattactgaattttgaaaacttgttcatgattattttaaacttgcccttagaaattttgtagcctatatgcttttttcgtctatccaagttggagttgagcactacacacgttgcattagttacaattaacttcacaaactgattttttagtctgaattttacttctgttttgctttttacacttctcagttaagtatcaaggtgaaggattgacatgtacggaatcatacatgtgccagattttgattggcctacataatattaaatatttaaatattataaaaaaataattaataaaagtaaaaatataaaaaatattacaaaaataataaaacaaataatttttttccattttttttcttttacttttcttccaacattattctgttcttcttcttgttccttcctcattcttctctttatgtgtgttctccattctcaaaagaatgtcacaccataattaataactaaactctaaatttcaccaataccactaccattattttttcaatgtcaaagaaaaaaatattagggaatgtgggaaaattacaactaaatgtgcagaattaaatcaactaaattttaaacgatcaaacagttagcaatgacaagattaacaaatcacaaacaataataggaggaaaaatagggagaaacagattatgaataacaagaaactaattaaagcagtaaaacgataaaaactacaccaagatatatactggttcaagtccgatagatcgatatgatctatgactcta

SEQ ID NO: 76502 - DNA, 515 bp, Cannabis sativa
tttcattattctcttttcctcgtttttttttttggtgtatgaaatcattgttttagttgggtgaagatagttcggattttccgttttaatttctagtgatttccacgttcgtgttatccatcactaaacatggagaagaatcaatttttgtatctgatatgcattctatctttgtattttgaggtttccttctcactctctttccaactcttgtgtaaactttcttgatttttctgttttggtctcacattaataatcaagtggtttttgagttttgaatgttggatttaattatgatgggtaggttcagttttatgatgtgtgtattgctccaattttggtgaaattttggctctattatgatgccaataatgatgaagggtgtgcttcttaaatgggtttatggagtctaaattgttccagatatatgtgaaactttgaacaatgatgttggtaaagagtgatgaatcctttggtgctgttaatgattgaaaatgttaagtctgatcactgtt

SEQ ID NO: 76503 - DNA, 3668 bp, Cannabis sativa
gacaggattttgagcaatgtagagagctgattgactatcacaatataagtgcatggctggcgaatatgtgacacccaaacttgcaagtaaagctttgagccacttcaactcggaagtgacagcagccatagaacgatactcagcctcagcagaagatcgagacactgtgtgttgtttcttggtcttccaagaaatcggagaagagccaagaaacactatccaaccagtaagagaccgtctagtcaaaggacacgtagcccaatctgaatcacaccaacctgttagagataattcacaatcagtgcgaagaagaatgccttgacctggacacccttttaagtagcgaaccgtacgaagtaccgcatcccaatgatcttgacgagggtgttgcataaactgagccaagatatgaacagtataaaccaagtctggacgtgtgaatgataagtaaatgagacgacccacaagtcgtctataccgctcaggatcgatgagcaatgggcctttggtgagagctaatgtgtgattttgctcaatgggaaagccagcaggacgagatcccaacaagccaacttcagcaataatatcaagtgagtattttcgctaacacaagaagatgctctctgaattacgagcaacctcaataccaagaaagtattttaggatgcccaataaacgtagataaacgtagataaacgtaaccaggttgtcagcacgctggtcagggtagataaacgtagaaaggctggacagggtaaatgagccttggtcctttcttcaacaagctccgtgaatatctccaaccgcatcctacatatgcaaatttgactcctctgcccaagattgtaggagtctcaacgaattgtaaataaaaatatgtgcccctcatttggttgctctatggagctcgagaccccatagtgtcactaaacctcagccttaaacatgtatctttgtgtcttttggataggtcatgatatccctgcgtgggtgggtcttggcaaccatcttagagactacgtataaaccccagcttactcctccatagtactcggaagtattaaaaagccaaaggaactaggaatttgatgtgcattacatgatcccattttatttagcaaaataaataaataaataagagtaagaatagtagtggatgaaacggttaaaagatttcccgccactcctaactgtcgagagtccgtacagttgagctggaacataaaggcggtaactctcagtctcaccatttcaaacagaccactcgtctctcctctctctcttactctctttctctctttctccatttcctcctctgtctcacactttcttgtttacttcaaccctttcttccttcaatggcagagacttcaatattggaaacccagatcgaaatcaagcccccacccccgccattcttcctcgaaaacattcaagaacaaaaggtcgtcctttccttcttcaaatcctgtcatcggaggcgccggcaaggcgacacatggctcatttccatctttctgatcctacccatcatcgctttcctagtcaccatgttcgtcaatgactgttggcggaaatcccatgcagactgcgttgttaaacccttgggcagattctcctttcagcccctctcagagaatccctttcttggcccttcggcttccacgtacggtgaccggttcttttttctttcctttttctcattttgattttggagattttatatctttttccaagtgggctttgagtttggttaatgaatctttgagaaatgttcttgttttcccttaagttttgatgggtttcctctgtttggtttgcgggaaaataaaaaagagaagagattcccccacttattcactcaagattttgtattgtttggttcatgggaaatcagtgattctttgaggggaatatgctcttctcttgattcttgaaccgaatacttaactgtttatattactataatttttattgctaataccaacgccataaatctttaatttcttgtagttcagttgaacagaaataactgggcttattttatttctggttggacttgatcaagagttttatgtaatcttttgatgtggagacaaaattgttttatcttcctccattggactttattatatatcttatgttttcatgattagttcagagttttctcattttaacaatcaaacacatgtattgtttccaagattattttttaattttgttcattgcaaagataacttttttgggtcactcaagtttttggggctttttctgtgatttaattttgtattgaaattgcaggctaggtgaggtgggagctcttcgacgcacatttttgatagaacatcagcaaacatggcgcttctttgcctttcaatgtctacacgctggcttgatccaccttgtcatcaatctaggaagtgttgtctttgttggggctcacttggagcgggagtttggtccatgtaagtcttctgagcctagttctctttactttgtatgataattgccaaagatcttaaaatgacttttaggcaatgtatatgacattttttttttgggcagtaatggttgggataatctatctactttcttccttctctgggacattaatggctgcactctttgttcaaaacaagcctgctgttggttcatctggacctctttatggattacttggtgctgctctttctgagttgatttggaactggagaatgtacattgataaggtttttaaactctgcccttttctcagttttctacagctgataattatatttccatagtgttcttaattagtatgcaatgcatatactgactggttttgtttaaaaatgtgatcagtttacagctttggcatcactttttttggtgtgcatgatcaatctagctcttggtttgcttccatatgtagacaacttttcaagtcttggtggttttatagctggaatcctacttggatcagtacttttatgcagctctcaaatcgaacaaaactctcaaaacaatggaaaaggagtattgtttgagcatagtgaaaacaaacgctttacaaaactgaagttaaagcagaagctggacatgtcaattctcagaactctcactcttgttctctattgtgttatgttagtacccttccttacctttgtgagttttatattggtcattaattttggtttataaaataagtctttctaataatgccagatgtaccggatgtctggtagcactattacgtggcattgacatgaacgactactgcaactggtgtagatatattgactgtgttcctacaaaaagatggagttgcgaagacagagtaatttcttgtgaggtaataataagagtattattagattatttgttatgtagttgagaataatatcctttattttggtatgcattgcagaccatggtgagcaaggcagagttgactttgacttgcttgagtaacgggaagttcaaggtttttccttacaccaacatttcaagacccaggattaatgatatttgcagtgtgatatgcggatattgatgatgcttgcttcttctactataccacgtagcaatatgtactatgttgtaacattcttttggttaataaaagcatgactttagacttttattttcatttctcttgtcgttttaaaaggagatctctgcgtttt

SEQ ID NO: 76504 - DNA, 504 bp, Cannabis sativa
aaagattaaacgaagattacgaaagaaaaataaaatatatggttctccaagtctgacctgagagagagagagagtagctagtggtccggtctgaaagtccggcggcgaaggggacgagagagaatggtcgagtagagtactgagacggctgagagaagagaggccgattatggtttagggttaacaatggagagtgaaagagaaagaaaggcgttaaaataaaataaataaataaataaaattattattatatttttttttttgaaatggaataaataaaattattcaatatagaataattttaataaaaggattatttttatttttacacctcaaactagtatttttattatttttatagaattgtacataaaaaattttataacaatttaaatcataatcaatatttacatagcaatatatatagaaatttttggagcaactcaaactgtaaatttaaaaaaaaaaataaaaaataatatatatattgttataaatattaat

SEQ ID NO: 76505 - DNA, 3309 bp, Cannabis sativa
tttttttgttttaaagaattagccgagcccatatgtgaagcccacatgtatataaggtcattttcttagtaatatcagtatagcttaagtttagggttttctcacttggtatcctcgtctcctacctctccacactccgcagccatggcagagcaggttcgttccagatctatcccacctctcaactccgttttttttttgtcagttctgcttcttaaactctataatttcagtattttaacactctatttcgttgcagaccgagaaggcttttcttaagcaaccaaaggtttttctaaggtacattgtagaaagaaaaataaacctttcttttcttattggtatatatttgtttattggagtttgtttatttatgttttatttactttaatataatcaattttcagctccaagaaatcttccaaggggaagagacctggaaagggagggaatcgtttctggaagagcgttggattgggtttcaagacccccagggaagcaattgaaggtctttttctttgtacccatgttcattaaatacgtgaatgtgtttactttcttttttattggcatatattttgtgtgaatatgtatttggatggttttttttttctttatttcggcatatataaacttaagaatgtatccaaagttagtttatttaagagggagatttactgcttaaaatcatcgaatgagtgattgaggaagtgtgaaggttgagtattctgcacttattagtggttggactaacctaattttgttatggttttgaattttctttctttcaaagatttgtagtataaaccttattgtatataatggtaaacggactagtttacatgagatcgtttcaccttaatttttcagtttctaataaatcagagaatttttctcaccaaacagtttacacgtatacataatatatattatagtacgctattctataaggaaataacatatgtgctcgtcaatgtctcatagaaaagtaaatgaaacctaactcgtgtcactgtacggacacctgattgtgtgagtctgtgctcactcgttacgacgttttccaaacagtccacatctcaaagagggtgtttactgtttcggcttaaatgtcaaagaacttggaaactgactagtgactaattccttgggagaaagatcatttcaacttattgggtcattttttctctttcaaatcttgcttagttctttgcaacaagttattcggcattgtacgtatgcaaatttcttattttagcttccttgtttacacacaggaacttacattgacaagaagtgcccatttactggaactgtctctgtcagggggcgtattttagctggaacttgccacagtgctaagatggttaggaccatcattgttcggcggaattatcttcattttgtgaagaagtaccaaaggtatgtattttgaatgcttatgtttctttcatttttattagagttttctagtctatcaatcacgttttttatatctttctgttgcttgttttaggtatgagaagaggcactcaaatatcccagctcacatctcaccctgcttccgtgtgaaagaaggtgatcatgtgatcattggccagtgcaggtaatgtatcgatagattctattccaaagcctcttttttttttataatcttagttttgaggccaaattagattgacttgactgttacactggcttgttcatttaattacatcagctatgtttgcatttttgatttgttcttttcccatttttcaggccattgtcaaagactgtaaggttcaatgttctgaaggtggttcctgctggttcgtcaggtggcgggaagaaggcttttactggattgtgagctttatttctgatgttagttttgtgtttttttcccgtttcccccactactttccaagtataattatgttatcaggggaagttttgaagttggattcttttagaggattgttatctaattttatttcatgatttgatatagaaatcttactttctctacccgtgaattttgcatgaaaatggtttcctgctcaacttgttttctttttagagtaatgatatgcacacacaattttcactaaagttatacttatgtttggcaagtgttttttttggttcgttctaaaatgagtctaaagctaaaatggcttctgtaggtgcgtgtggtgtttttctatacattggtgtttctctaactaaaataaagttataactctctttatttcatttgtgtttaacttttaacttgtacaattacatttttggcgaactggtgaacaatttttttttctccctggtattgctaaagtaataggttgggtgcaccactgtaaaattgattttgttcggtctaaatttcgatgaattgtatatattttgtatttttttttttttttatataaaattatggcgttaatattttcattgacgctaatattttcttccttggttatgaagaattgaaatatgatggttatgatgaattgaaattatgatcgtttagttgtaagttagttggttaggaccaggtaagtagtggtttggatggttccttattttattttatttttgtagcttagccttagagggtagaaagaataaataattataaacagtgatgcgttgatgtcgagtctaacgtgagtgagtagtactctatggatgagtttcgttaatggtaaaacaaacaagagtcagttagtttaatttttgctcgaaagtctgtcgaagtcaggtcttgtttggtttttgcattacaataacaatttccttattattattttgaatgaatgcttggcttggattattgttttatatctgcttggaagtaatagggtaattacttgggttaatttttaatgttttgtttggcaaaatatttactgagtgtaattatggttaaccatgagaattaattaccttcaattacattaaccaacatgaccaatcctataattactactttctttaattttttgactgcacccttaataatattttagtgtgtaaattgcgtgttaaataaaattgatgtagtcattagaaatacaatagtcaattgaataaatatatagtagattatttctaatggagtgccaaaaagatggtgtagtgttatattttaatgcaccattaatataatcaattatttttttcctttattttgcattggagtacaattgtaaataatggaccaaatatagcacaaatttattttttgtgctaaatttaacacaaattttaattcttatattagagatggttttattgttcaattatttgaattagttttgaaag

SEQ ID NO: 76506 - DNA, 2755 bp, Cannabis sativa
taattattaccagtgtgaaaaaggatctcatgtcaccaccatgaacctcaacttttggcttaatagtaattgtggaaggaaacaactcatggccattgtagactctcttgtttgagttgtaagtcactgtaaattttagggttggagagaaaacatcaaccacatctcctatcactcttccaataataagaggattatctgacattcttgccatttttcttttaaaaaaaaattagagagagagagagagagtataattaatatatttatgatgtttgattttgtgatgagttgttgtttagaaatatatcccttatttatagagaggacacaaattaaaaatgagatgtttaatatattaagtggggttttgcagtagtgaaaaagaaaactaaaataatttaaatgaaaggaatagtataaaaagggtcatcatcttcaaaaggtttattttatagatccatgccacatctagctagctttttttttttttctattgagagaataagaggatcaagtagtgcaaatttcttccttactcattcgatagttttgacaatattagggaccacgtgctagttataagagtcttatatttcatcatattttaattgggtcatcgatatatatgcacctctatagggcttcatcccattaagaatgatattgtcacaacaaactagcctctcgaaggaccaagtataatccctcttaattaataaggagttgtggtgggattcgaactacccttgatccatgtcacctctagctatgtttttttttttgaaagaataagggatcacgtggtgaaaattcattcctcacccctttaattagtagttttaacaatgttggggaccatgtgctagctataggagtcttatacctcaacctgctttaattgaattatcattatgtacttttagaatttccaccctcttaaagatggtaccgccacaccaaactagccttttaaagggccaatcataatccttcttataatgagaactgcagtgagatttgaactacccttgactcgaacaaagaaagatgctaactagtaaaggcaaccatactaacacgtggcggcctacactacaagaaatgtcacttttacaagtatagtttgctactatactgataaaagtaacttttactagcgcattttacaaactgcactggcaaaaaagtcaaaattttaccagcgcacatttacagtggctaaaatctaacttttacagtgtatttatgcgctagaaaaagtatttttgccaacctttttcattttgtgctagcaaaaggtttaatactaatgttgatttgccaactcctttaccaacacagcaaaagtaaattccattttactagtgaaatactaaacttttgccaatacaaaaatatactggcaaaagtgacatttcttgtagtgctagctagttattatttagtgattgatatataaaattatagcactcaattcactaatacaatatacctatataaaattatactattgtccgctaataatatttcttttatttatattaaatatatatatatatatttagcgaaatttattggtttaacgatttgttttattttttttattaaaactaatagttaaaattaataccgttaaatcaattaattaattgttttcatttgaagctttattagtattattgttgtcatttgagctaagcttattgaagcgatgcatctccactatatatgaaactttataagctttattttattttattttatttttatggaaggtggtaaggtggttggagatacattaatttatgtataattttagctagaatatatttgggagaacctaaacaaaaataatgtaaagttagggatttcttttgaaagaaatatatatatatatttggaaatttattaaaaatcaattacatcaccattcactatcttcttttaaattattattatcattaattaagtatatgctccactttgttattatccacaacaacaataaactttctctttttgggttttctaggtttacacatatatattctagagttcaaatcatgttagatttattataaattatctaattaaaatatatatttgactattagtaattagattgaaaaaaatattatagtcaagattaaaaaataatatttaaacaaatttgtactaatctatttttagttatttttcttatatagtgataaaatttattttcagtatatagtatcataagataattgaaaattattttttagtaaaaaaatatattgtaattaaaattggaaaaaagaaaattattgtctcacaacaagaactaaatttaaattaatattttgtatgatttgatcatgaaagtcttttataaaccttaatatttatatatatgatcaaattaatttaattaagagataaacaaatttattaatataataaaaataactaatgctaagatataatttcctagctagaactataaaatcacagctagaagacagaatttttgggttgttcttcaaaatttatgatatattttcttaattaacattaaaatatataacatgatcaactttatgcacatcaaatacaaagttaaagcaatatggacttgattcacttgaacgatgatattaaatatttgatttgatgtgtaacttttttaattgaaatgacgtatatattatctcttaattattaaatagtataatgtaagaaaatcatgtttccattaaaaattataatgtat

SEQ ID NO: 76507 - DNA, 1313 bp, Cannabis sativa
taaataaatactagatcttggttttaatgattatgagtaatcgtttttcaacaattggtatcagggccaaagttattgattttaggactcaaattttttcacaaaccccgtttctcaaatctaaaatttgcggtgattttttagattaatgtgtttaagattgtgtgaatatgagtattatccttctaattgtgttcatatatgtcttggaaataatcttttacattttctattgagatatatatgagctttaacaatggagaagcccattttggattcatcatttttggatgtattattctgtgtttgttgagtaaatgggtattgaaaaatgggacaaaacgcgttaaaggacgtcgaatttggtggcggaatgtgggacatatggccgggtcaaaaaccgggtcgcgatgattcaaattttgaacccgtaggcacatttttgggcgacagggtcagagaaaacaacgtgtcatttttgcctctgtcgggaaaaatgacatgtcgtttagctcatgaatttagcctccaaaaatgataggtcgtttagtgtgtgtgctcggtcccagcctcgcaaacaacacgtcgttcagtgacctcgaagtcctcccgcgtacgacacatcgtttggtgtcctcggattcagccccttcgtgaacgacaagtcgtttcttgtcctcgggtgcctcgcgaatgacggtcgtttgccatccccttgcgctcgtcgttttattcaaacgacatgtcatttcatcaaacgacatgtcgtatggacctgtaataaaaaagagaggaagaaaatgggtgcatgggggcgcgtgcaggggtgttttcgggccatttttccaccattttcatgtttttttttttaattctatattattttttagtatgtacaatactaattacatgaattttattcatatttggttgataattttagtattgtggcataaattttgtgatttatttcaacaattaatgcttattttcttgggtatcgtaagattaagcttggaaaattatttgataatgagaaacacttaaatattaatttatttaagtattgtattttcttccaaataacattaagatctttttaagtaattaattatcctatcgatgatggttgcttattaaagatgcttaatatggtgaggaaaattattaaatgttatgaatcacaatctatctatcctttcgatagtgaattaatgtatttgattataatatttaatagatttttcttacctgtgtatgagttccatcttgttaatttgtctgagaattctagcatgcataatgatcatttg

SEQ ID NO: 76508 - DNA, 701 bp, Cannabis sativa
tcacaatcattggacaatctttttatttttctctaagctatgttcattaatcaacctttaaggaaatgttagcaagttttcctatcacaaattcaatccctggtctagtcaaatcttcagctagctctgctgaaatcatctttaattcacaaacttaccttgggccctttcgacttagagcatccgctaccacatttgcttttccacgatggtagagaatctcgcagtcataatctttgaccagttctaaccatcgtcgttgcctcatatttaaatctttcttaatgaaaaagtacttgaggctcttgtgatcggtatagatctcacatcttttgccatacagataatgatgccaaaccttcagtgcaaaaataactactgccaattcaatatcatgggtaggatatcgctgctcatattctttcatatgtctggaagcataagcaattacttttccagactgcataagaacacagcctaacccctgtttggatgcatcgcaataaatcacgaacttttcattactgaccggtaaagttagcacaggaccggtaattaatctttatttaagttcctagaaactactttcacacttatcaatttaactctaagatttctaagattgcggatttaaatcattttgggatagaatttcgggaatataatcatatgcgtcgtttaatttcttaagataaaatata

SEQ ID NO: 76509 - DNA, 781 bp, Cannabis sativa
tatatatatatataaaaatgtataaatatttattaatgagtttgttgttttgatattttgagcaggtacaaggtgttgggggtttagatttaaccaaacaacttgacaaaaatgatgaagtttaaagaaaatgagtttaatttgtttcaaatttgtacttattctatgcatcttattgtatagatttttctaattactagtttgtgttctaaaattggtatatataattaccattctttagctttaatcattcattttcggtatttggagtaaaaatgcaatgtaccattgatcaactatttagttagttttatgtacaattctaaactagtttttactattggttttctttcataatggctattatttttttttttaatataaggaacatatcactaaattttaaaataaataaataaagtgtaaaaagaggggcctaaacctatctaaacaagtttctaatcgatcataaatgtatacacaattaatttatgggatgacatgaactagagatactttaaaaaaacttggatagcatatttgaaatataaaaaaacatgatgaatcaaaaaaagtataatgcttggtgaaaacatttaatacttaataaacaaaaacttcaaaatataatggagaccaagtgatgcatccataaattctactcaaagatagttctgccataacaaatctttcttctaactcgagcattaaataaagtacaacacgataaaaatttaagtatcgtttggtaacatttttgttttttaattttttaatcata

SEQ ID NO: 76510 - DNA, 614 bp, Cannabis sativa
  modified_base (275)..(283): a, c, t, g, unknown or other
gaagtaacaactcaaattaactcaaatgacgaattaacaaaataaatttattaaattatttgtttgaattagggcaaataaatatataccattaagctttggtgctcttgttttgcaatagctttgttcttgttctactgttgcaatatagactgagatggggatttagggttaagaattgggtttcagttttagaaaacttgtgatttgggttgctaatatgggttccaattccaaatttgacgaagattaaacagagagagagagagagagannnnnnnnnagagagagagagagagatagaatagatcgagaagctttgtaatggtggtctttggtggtctttggtggtctccggtggtctccaatggttttcaacgatcacaaggtttggagtttagaagaaaaaaggggaaaagaaaagggttactgcaaaactgaaaaagaaaagaatgattttaatgtaaacatgagaaaaagaaaatataaaaatgaaaaagaaaaataaaaaatcgtaaaagtggagtaaacatataaaaatatcgtaaaaaaggtgatttctcttttattattcactttttaaatatttagataaaaaaattaaataattaagt

SEQ ID NO: 76511 - DNA, 1832 bp, Cannabis sativa
caaatgtttctctagagctagtaaagaggttcttttgaaagcagtgattcaagctatcccagcttatgcgatggcttgttttcggctacctgttaagatttgtaagggaattgaagctgcgatggcaagattctagtggggttctactggggaatcttgaaaaattcattggagatcttggaaatttctttgtcaatcaaaatttcatggtggtttgggttttcgttctcttgctcactttaaccaagctatgttagctaagcaagcttggcgtattcttaaaaaccctaactctcatcttagtttgcttcttaaagctcgttactttcctcagacctctatccttacggttgtccctggtcataacccttcttttacttggagaagtattttatgggatagaaacttattggcttcgggaatcatttggaaagtaggaaatggtagtgaaattagaattttgaatggtcattggctttctaactataggtataaatcatttaataataatgtccatcctccttctagttgttttttttttttctattttattactaactcaggtacttgggatgttactaaattgggttcctattttgatgagccaatgattgtcgatattattgaagttcctgtttcttgttgttatggcaatgataatttgatttgggaaagggaaagttcaggtattttctctgttaagtctgcttatcatttggatttttcttctcaggatctcccatcttcttcttctttctcttcttctaaaaagttttgatcccgaatttggtcctctgttatccctcctaatgttaagctgtttgtttagagaatgttgtctattgccctcccagttgcatcttctctttttagtaggaaagtgattgattcccctctttgtcctttgtgtaaacttgttcctaaaaatgccaagcatgctatgttagattgctccagatcccaaaaagcttggcgatcttccaggtttgtggcttttttttttttttggatgaataagaattttattgctcaaaccaaactttacatcacaacatttttacaaattacaatcactattctgtcactaattatgatcatatacagaattatcactacaagaaaacctagttttaccggcgcaattgaccaattgcgccgataacagttgtcagaataaatgaaatactgaacttccaattcgattcagcaataacttttatcgacgcaattttgcactggcaaaaggtactcaataccggcgtattattacatatgcgccggtgaaagatcaacaatgaaccgccaaatggcaagcacatttccacttctgtaaggcttttgccgatgcataattgcgccagtaaaagctagcaaatttttcgtgggaatcttgaccgcccatgtgaaattttgggggaaaaaatcccgcgtggaaggtggtggtaggtaggagtacttttatcggcgcattaatgcgcttaatgcgccggtaaaagtctttaacgaaacggggcgttttcatttagggttatatgaccacttttaccggcgcatataacctgccccttcgagcagcagaccctatttccctgttttttctcattttttttcctctcaaacctcttaaactctcattcagccctctctctcaatctcactcattctcactcaatctctctcaatctctctcaatccctctcattacctctcaaaaattttcttttttttttgtcaaaaaaattaccactgtcggcaaccacaccaccaccgtccgccactagccaccaccgcagatcaccccaagccctacctcctctaatttgtgtaaggta

SEQ ID NO: 76512 - DNA, 556 bp, Cannabis sativa
gggttaatctacaaaaagaataattgattaaaagaaatacatattaaaagtaagatgatatatatgaattttatttactttatcatggatatgtctcacgatgatcttcgaaccatgcacctagggccggccctgaaaatatatgggcccaagacgaattaaattttggggccctcaaaaatatattaaaataatatcaaaagaagagtattatgggatttaaacatatgaccttggacattatgccatctacctcaaccaactaagctatgaatatttgttgcttataacgcacttaaattttacttaaataaaaacctaataattttttttattttttttgttttggacccccagaaagtgtaggcccaagtgtaggccctaggcatccctaggcatgggcctaggcatgggcctagcccgcctatgcctagggccgaccctgcatgcacccttaatataggcattttagactgtgacactttgtttctcttagaaattgccttcaaaagtaaaaaagaattcatagttaaatagaaaaaatttcaagaaaaat

SEQ ID NO: 76513 - DNA, 1463 bp, Cannabis sativa
tatacattaattttaattttttgatagaaaaaaatgatcattttttcaatataatcccagtgattgtgttcaatctgcttttgaaaggaatcgtccgttaatgccgcgcaattcaatttgaacgttcttaaagatttaaaaataaattattattatgaaagtccaccacgttttacgtctgaaaatcagggatgagtgatatgattatatctatgtacatcatgtttttattttttttttcaatctttcatttatcaaaatagtcaaccattcatgattttttttatcaaagaatgtgtcagtcatacgtcaccatatttcttaatttgttcattatttcattcaatatcatgtatgtttgaatttggagttagggatggtaattatattggcgaatttggctaccgcgagtacgtgctcttaatgaggcgtgggcagaggcgaattttgctgaagaaattacattctatatgctttttatattgtcttcttttatttttattcttttttcaaagtctattatttttatttttttttttaaaaaatattatactaattttactcatgtcacttcaaaatactctccaaatgtatgtttcaattaaatataaattagatgtaaatttaattaattgattaataaaagtaatatttttcaacttagcacaaatttgaaccctcccaaatattatatatgtatatatttatattttaaaatcataactactataattaaaataatggccatgcatatttataatgacacttaagagtcttaaaaaaatgacacttaatcacttatttttttttaaggaaattaacttatatattaatttttttttcaaatttacggtttgggtttgtaaagtgatttctttggtgtttctatgtgggttgctatacaatttttagttgtgatttaagttgctctgctagttgaaatatgaatttttatgtagaatttgtaaaaatatatataaaaaaactattttgaagtgtaaaaataaaaattctattctatttatgtttattgttttaataaattattatgatgttttttttttttataattctctttgagaaatattttatttttcaaaaatatatatataatgagtatttgatgggaattcttttcctgacgggtaattcttacgttgtctccgctttaatttaaacgggtattgaggcgaatagagagtgaatttaagaagtgggtatgcagtgagagagcaattcccgcccgtgccccacaccgtttaaattcctaggagtactataggtagctagtccaaaaaaagctacaaatataatttcctggcaacgtgcaaacactatataaaggactcgtttggaacgtaatattcgtattgtattgtattatattaaattgaattatatattatatttttatacaatactatgataaattttaatttatactaaaatattatatatttagg

SEQ ID NO: 76514 - DNA, 5146 bp, Cannabis sativa
tttggtttcagctcataacactaggtgagttgagtttttatttttgctttgatttatcgaatctgtatttgaacattcatttggattaagagaacgatcgatcaatgcctgtttttctcaaagctagctgagaaatttttgtttgatttaagataagattatgtagaggtttttgttgatattaatatatatttatatgtatatatgtttgtggttgtgtagagttctttgtttttgattcttgtcatgcgattttcgtcgggggaatcgtcgggtgcatcgtcttctaaggaaagtaagggttgtaatagtaataatctgtcgggtcctcggcttcggaagaagcacaagaggctcgacgccatttgtgagaaggagtataacaaaaaccgtgttgatttgaatgagaatagcggtgttattggaaatgagagtgctgatttagagatccgtagaagttcgcgtgttcgtcgggctccggttttgcttgatttgtcgccttcgccgccgaaaaagaggcggaagattattaagaaagatgtagtttccagtgttggcgagagtgtgaggaaggattctcctctgaggaactcgaattcggaggatttggacactccgggaagttggaagtcgaggttgagatccaggggtagaaatgtgagttttagagggaaagaggaggatgattcgccaaaggggaagaggaagctttttcatgaagtagaggtgggtagaagttatgaaaaagcttcggggaaaaaaggggttcgaaaaggcgaatcagaaggtaactatacggttgtgaaatctaagaggtcaggaaggatcaaagcaacaaatggtttaaagaagacggaggaaagagtaaaggagttgcgagtcattgaaaatgattgtgcacgggaagaatcgaaggtcattgataacaggggaagggatgattcaggtggtcattctgaaagggacacagacatagaagtggttgagacagaggagcatttgcagtctgaggatgagtgcatttgcaatgattctaaggaaactgtggaaagattggagttaattgaaagtgtaggaaaaaaagataacataagggccattcaagatatagagaaagaggcaaacgtggaggctattgagcatgctcaggaggagaagaccatggaggccattgaaaatgaagagaaagaggacgttggggaggctattgaacacgtagaggatgatgacaatatggagatcgttgaagatgaacaggacactacagaggccattggacatgtagagagagagaacaatgcagagatcattgaagatgctgaaaatgaagaaaatgttgatgccgttgaacatgtagagaaagagggggaacaattagaatttggagaaaaccaaactaaccaagtggaagctgttgcatctgcagcaaatgaattggaggagggcccaggctgttatgatggggggaagaatatgaataaaacaaaacttgatgaatctcatgtaaaagaaaatggtacggcggatgcttcaaaatgtgcttcaagtgtcatacttggcaaaccgcgcattaaggaaggtaggcgatgtggtttgtgtggtggcggcacagatggtaaaccgccaaaacaattagctcatgatgcaggagagagtgagaatgagctgtacggtggttcttcagcttctgaggaacacaagtacgatatatgggatggttttggtgatgaacctggctggcttggacgtcttctgggtcctataaatgatcggcatggaattgctggaatatgggttcaccaacattgtgcagtatggagtcctgaggtgtgttccctttgcccagttttaatcttgtgtattttgaatcatatatttccatctatcaaagcatgaaccattgttttctattgcactaagagcctaagactgtaaagattaaagatgctaaatgttaagcatatttacttttttaacatatataaagagaccagcatgccgatgattaacagattttgaatcaggacgggtgagaaaggagtgtcattattgaaacttcttaaaaaagataaagcaaaataaatgtcaaaaacatctctcttttacaccaatgtgggagtgttctatattctagattttgaaatttctcgctgctacaaccttttactgctttgctgaagtcttgtgtgtgttggactcaaaagcctggatatactttagttttaacatatagtaaatttttacttcaatgagatgaacacctcaggtactgctatttatcttgtttaggccctactgggctggtaaccataaggactgaacctgagttgttggagtattgtggttatgctctggactaaattcaacttcttgtagacttggagtcctaattacacaagtttgggagaaaattaattttgtcatttgtgatattttcttgtgatgggcccataagtaggaaacagacgtcaatctctgcttcttgactgacacaagctgataaagtatctactaatctgtggcttgatttcatcaatatgctctggacaaaattcaacaatttcttcatttcgttagtttgaatgcagtctcgtatgtactcgcagtaactttgcttgtactttggtttgtgtttgcaggtatattttgctggtttaggttgcttgaaaaatgtaagggctgcgctctgtagaggaagagcattgaaatgtacccgctgtggaaggccaggggccaccattggatgtcgtgttgatcgatgtccaaaaacttaccacttggttagttatttctatttggaattattggaaaactaagaatataggaatcaagagtttctgcgagaggtatatatatgcattgtacttatgcagtgatggcatatgtacccatattgtccaatgatattgattgtgcttcatgttttttcagccttgtgctcgagcaaatgggtgtatctttgatcatcgaaaatttcttatagcctgcacggatcatcgacgtctcttccaacctcagggctttcagaaattcacaagaataaagaaagttaaagctaggaaaatgaagttggaattgagaaaactttcgaatgatgcttgtcgaaaggatattgaggcagaagagaaatggttggagaactgtggtgaggatgaagaatttttaaagcgtgaaagcaagagacttcatcgagatttggcgaggattgcacctgtttatattggaggcacagactctgaaagtggaaaactgtttcagggttgggaatctgttgctggccttcaagatgtcatccggtgtatgaaggaagttgtcataatgcctttattatatccagaattctttgataatcttggccttacaccgcctaggggtgttctactccatgggtatcctggaacaggtaaaactctcgttgtgagggcattgataggtgcatgtgctcgtggtgataaacggatagcctattttgcccggaaaggggcagattgcttaggaaaatatgttggtgatgctgagcgccagctaaggcttttatttcaggttgctgagaaatgccaaccttctataatattttttgatgaaatagatggattggcaccttgccgctcacgaagacaagatcagacccatagttcagttgtatcaacattacttgctctgatggatggtttaaaatctcgaggttctgtcgtagtcattggtgcaacaaatcgtcctgatgcagttgatcctgcattaaggcggcctggaagattcgatagggagatttattttccacttccatcaatgaaggacagagctgccattctttcgcttcacactcaaaggtggccgaaaccagttagtggatctttgcttcagtggatcgcgagaaaaactgcaggatttgctggtgcagatctgcaggcactctgtactcaagcagccgtcactggtttgaaaaggaattttcctctgcatgaaattttgtcagctgctgagaaaaacacttccactggtaaacgccttcctcttccaaactttgcagtagaggaaaaagactggttggaagctttatcatgctccccacctccttgctctcgaagggaagctggtatagctgctaatgacgtagtatcttctcctcttcctttccaccttattccttgtattctacgaccattagccactttgctcgtctccctctatctcgatgaacgcctgttgttgccagctgcactttctacagctgcagacatgataaaaagtgtgatagtttcaactttggacaagaagaaattgcctagtgattgttggtggtcatttcttgatgattttattcaagaacctgatgttgcgaaagaaatagagaagaaacttctagattctggcatttccctcggaaattttagttccactgcaactattgattttgatgatgagagtgatcacagcaatgcaaaattcgaaccttacttgaaacttaatggcagagcccactcaaatatgttgcgggccccattaaatccatcgagtaattcagggttccgtatgttaattgctggaagtcccagatctgggcagaggcatcttgcttcttgtcttattcactcttttgttggaaatgttgaaattcagaaggttgatttggctacaatatcacaagaagggcatggcgatgttgttcaggggatgacacaaatattaagtacgttcccttttcttttttcttgaactaatgtattatttttgttattgaaaataccttgaaccaccttagttctacatctaaatttgtgtgatttttaaaattctaccattacaacgtgtgtgctttcataattgttccaaaatattttgtaaaattcaagatctgtttctcaataagtaccttgaagatctggtaaaacaatttttttagtactcttgtgtgaagaagattattattgtggaatagttttcttcattggtttatgttgaagaaaattaaggattcatgtttctatgctaatttggaattggggacctttcttgtaattgttgtgttttacattcaaacttgattactagaaaacaaccagttattgtaatatcttttttcctttgtaaaataattttgtgttttattgatgaaaaagaatatgctttgagaggtagttagatt

SEQ ID NO: 76515 - DNA, 1280 bp, Cannabis sativa
  modified_base (808)..(808): a, c, t, g, unknown or other
tatatattgcactcttttttttttgttcaggttttgttccactggatttttctgacaagatttttaacgagacaactttaaatcgtattaacatacttgcactttatgtagcaagtagtgagataatgacataacgtattcgtgaaacatatggatcaacaccaacaattctctatgaagatgatactacttgcatcgctcaactaaaaggagggtacattgaaggagataaaaccaaagacacatttcaccaaattcttcttaatacatttcaagagaatgcatattggtgtcaaacatattcaatcaagtgtcaatcttgcagacttattcataaagacattaccaacatcaatatttgagaagatggttcacaagattagaattcgtcgattagaaaatctccacgaatacctaaataagggagagttaattcatattgcactcttttttccttggtcgagtttttgtcctagtagattttctaacaaggtttttaatgaggtagttattatagaaatccaaataggagtgatatgaaatattatatatacggatgtccaattcacctaaatcttttctattaactaccattaattgtaattactattcatcttcttagtttctcattattttagtaaataggggttcacccaattagaataaactattaagaaattctcattcactcttacattctctttgtcttttctcttctcttatttctttctctatattcaatattattttatgataagaattatattttttttaaataataaaaacttatttttataaaaaaaaaatnaaaaaaaattataaaaataaaaaacaaataaagatgtaaaaactttgtcattttttatatttcaaaaataattccttacttttatttaagatggttctacatagacttgccacatataggtgtgtgtgaccattgtgctgtcatttatggagaggaaattatattgtatactcattttattttatatactagttaacgtaaccgcgtctcaggcggttattataataattaattgaaacataatttaaaaaaacaattagaaaaaaattaattttgttttgatttttttttgtttgtttagtttgatggtttttattttattgttatgattttatttttaaaaaaataaaaataagaatttttttgccagaacatttgagttgccacgttggatagttgaattgagttggatcaatacacataagggggtaacgggattgaataacaaaagaatggatttgcaagttcctct

SEQ ID NO: 76516 - DNA, 2586 bp, Cannabis sativa
tcttctgcctgcacaatatcaataacccgaatttataaaaaaataaaaagtgataaattatccgtgcagaaatatgctgtaaaggtcccctatataccaaaggaaaagagaaaagcaaaattctttctaactatactttcttcggttcactgtagatttgagacttacagcttttgtcttcttgagtaaattttttagtccaaaatatgctttcttcaattcattgtgttctggatcaaggcggagtcccttttggtaatgcctgaaaaagaaacacatattcatccatattactttgattcccacatgtataagtgcactcaaaattaaaaaagatttatgtactagcagtccagcacttcatttaagctgttcttatacataccttatagcaacatcatggtctgctaaatagtagtaggcacgaccgcggagtaataatgaatccagatcatcctcatgttctttaagaatgaatccactctcagagatggcactagaatagtctttatttgatatcaacaatttcaccttgagtagtttggcctgcattaatcaatgttcatagagttactcaatttgaccatctgatgctattagctaagtggccattcatcgtaaaattacaaaggaaagtgcggccaataaagagagaaaataattttaccttcaagcatgctggagagaaaacgagtacaactttgtcaacatattccaaagatttcgaaaaatcacccgactcaaagagagataaagctgtagcaagtgcactctgagcctggtgcaattgagaaagctccttttctgccgcagaatgtcgaggttttagctccagaacacttttataacttttctctgattcctcatatctacattagccaaaaaccgcctgaatcatataattttccaatcagaaattggaaagagaaaggggagagagagagagagagatgagagaaagcgagctatctaaaaaatctgaaataagacatttcttttgtaatcttaaaatattttctctcactcattttactaataacgaaagtgaagaataaactaacttgagaattacagtgaacatgaacaattatcattgattgtcaatggtgggcagccgttgaagctaagaagtaaggagaacaatgtgaacagaactagtaaacgctgaatgactcatgtattctatttcaggaaaataaattgctttgtatactgtaaataaacttccaatacaatatactctttcgtataattaattttttgcttttaaagacaaggtgctaattttaaagttcatttaatcatatcattgaattttcagtgttaggatgacaagttggttttcaataattttccttattctcttgcaaagttattcttccctttataaaggtttttttttttttttttggagaagtatcagatggtatgtcagatgttgtaatggtcgatgtgtccagtctataattaacatccaaccatagaaaatcacaatgggatgagaaaataaaaaccaaatgaactcagaaacataatagttgaataaagaagcttctaactaaacattatcatagtaacagcagaggatgaacctgcatagctgtcgaagaattgatgcccggtgaaaataggcttctgaaagagttgggtctgcctcaattgcagcattaaggtcatcaagagcctcactgtaacgcttcaccttcacattctgtgaaaccttctcgaacaactcagcagcattactagctttgctacctggtatattcaagtagtacatttcatacactctttctttacaattattaacacaggtaccggtatatatatatgtataaatgtttaacttttaagaagatgaatacatctacacatacacacatgtatatgtaaacgaacgtatcaacttccagcccatttctaacatatgcaaatcaatcaggcagaatcgatattatattttggtccaatattattcttcctaattaattgctaaatctttaacttatgttaaatcccatatcaaaacaaagagatacactcttttttcttttttgccaaacaaaatcccacgatccaatcaaccaaaatctacctaattaagtacaaaacaaatctaaagagaataataaacaccagatcgaagcttaaataacaccattttaacaaacatcattataattgaaaaatgtatcgaaaaattgagaagtggagaaacctaaagcagaaagaggttgaagaaggagaagctggcagaccaagacgaaatgcagtatgaaccctgcgtaagctaatcctctccaagctactgcctccattcgattctccaccattcacactcagaattcgtatacgtatgttacatatattagagtatatatatatatatatattgatttatgctcgaatcgaagaggaagaagatgaagaaatgaaattaagaaagacaaaatatataataagtaatgtaatatacgattttgctggtttttgagcgaggattctcaatgtcattccacgttactctcaccaatcaattaattacacgtggaatagactttgacgggcccaagttttggtggaaat

SEQ ID NO: 76517 - DNA, 572 bp, Cannabis sativa
tgtaatattaattaacaattaatgctttacaaatttgttaattgaaattaaataaaaaagaaaaattggaaataaagttattaattttatttgaaaaaattatttatttaaccaatctagtattttcatatgtacaaaattactatgtaaaaaaagaggacccacaggtgcaccaaaactgtaaccgcgggcattaaattgcaataaaagtattagtgttgcaaatttctcttattttaattaaggctgacaatttatgttattgtgtggtattcgtgtcgacatatgtttatgagacgacccgtttatggtgaacacgaatacgacatgattattaattgtgtcaagactccaaacacgaacacaacacgattacttagcaggtcacatgacacaacacgataacacatttaataaacgtgtcatgacacaaactcgaaaatcacacattaaaaacacgattaaatatgttataacaagacatgaatttgacacaattaacataattatatatatatataaaaacacaaatattgcacataaaattcatagtttgaatttattattccttt

SEQ ID NO: 76518 - DNA, 1297 bp, Cannabis sativa
attctatgctcaagtgagcaacaacactttctttctaaaactccacatgatcagattgccccctagataaataaaataacatgtagaacgtctatcattaattgaacttggccaatcagcatctgtataggcaacaagattaagagaagtagctggtttgaagtgtaagccaaagtccaccgttccaacgaaattcaagaaacacgtttgaaagctaaccaatgatcatttgtgggagccttgagaaattgggaaatcttgttaacagcaaagaaaatatctggtcgagataatgttaagtattaaagagctccaatcacacttctataaagagttgggttatccattagagtacccatggtggctgaaagctttgtgttggggcacataagtgtaggtgtcgaagtaggtgctgccatattcattcaagcaaggaaaaaaaaggatatttggcttgtgtaagaaatagactagaagagtttcttgtgacttcaaaccccaaaaagtatcaaattagtcccagattcttgagtgcatattgctggtgcagttgggagattaagtgatgattaaagtttgaatctttacctgttaaaagtatatcatcgacatagattaatagtaaggtgaagttgtcatgattcctcatataaattaattaggtgtcagctcttcaattttggaaaccccagtgaaacagtgagtgtttgagcttatcaaaccaagcatgaggggcctattttaagccatagatgactttgttcaactcgtagacataatgcatgtgagtagagctttgaaaaatagcaaccatataaacacattattggaggtccccattgagaaaaggattgttgatgtcaattcgttggattggccaattatttgttactgtcactgagaaaataacatgtatggtacaaggcttgatcacatgactaaatgtctcaaaatagtctaggccaggggtttgttaaaatcctttggcgacaagccttgacttgaacctatccactgttccatcaagattgttttttattcaatgcacacatttgttatctataactgtcattccagtctaaaatgggagaagagtccatgttttgtctgtaatatgatcccttatttcatttttcattgcaaagaagctttaagagtcctaggctcaatgcttatattagaagatacaattagagcttttggtttgtgaatccctaaccttggctctagtaatcattgtgtgtttgtttacattttatggtggttgagtagtgatggaaggttgagattgaatggt

SEQ ID NO: 76519 - DNA, 944 bp, Cannabis sativa
  modified_base (891)..(914): a, c, t, g, unknown or other
aaaataattgaagatttatatcttccactactaatttcacaataattcaagccataagacgtatataaaatctaaatttcatatttgaaatcctcattacatctttattctccaactatctcttaataaaaaaatattatcgtcttttctcatttttctatcaaattttatagttttgtcacccaaaatcgcatatccagtataaaaattaatttattttaagagttgcgggtaaatatgagagctttggccaacaaatttttaggatatttgtagaacaatgatgctaatgggacaatttttcaggttttgacactattagaaaaaccactactctcgttggtcatcaaaacgtttttcttcgaggatcgtcgctaataaaattaagtgagtgtataaaaccgtcgactatagtttagaaatttttttagtttataaatatcgcaatgtattatcaacgattgtacatcgttacatagcttggaattgctggcggttaagaaccgtaggctaaagtataaccgaccatttagaatcatcgactatactttagcccctacgggttttaatcgtcggctaaaggggcatattatataacccaaatctaagcatattatacttctccaactttgaaaacctagcgaaaaccctaaagtaatctctttctctaagccctcgcacagtcacacttcagaaaaaaaaaaaagcaacctctcaacaaatttcgatctttttgtctccattggcgtttgtagctttgcttttgggggcggtggatgttgtcctcctcctcttttcttctcacgcttctaatatacatgccctcccttttgcacatacgaactaccacaagcctgttgggttttgtgacctaaataaaactcatttcannnnnnnnnnnnnnnnnnnnnnnnaaagatcagaaataatattttatgttgcat

SEQ ID NO: 76520 - DNA, 962 bp, Cannabis sativa
ttcgacagaagaggctggaaggaattcattgggaacaaccatttgaaaattgaggatgtcttaatatttgaattgattgaaaaaactgagcaaatcattatgttcaacattatcatattccaagccaccaaatgtgatcgaaacagccaacagttacaatctcatcaaggttagtagcttaacttataaattgtaggcttggaacagaattggataatttggcataatatgatcatatatatgttgaaggcaacaatattataaagtctgggataaccaattccaacgatcacaacagcaagtcttcatcttcaaagagtgacaaatttttgggagaagaaatcaaacaatcttatcccaattttgaagtcacattgggggaatctgttgatgagatgctggtatgaaatgtcatacatatatttatatataacatgattttacaaattattgttaatattatcacattgtcatttgtatatatgatctttctgcagcagatttccaatgtaaggacttattttcaagtaaagccagaaatcgcaacactccaagtgctgaagaaatgttggaaggttgatttgagatggggtttatcagatgaagtgattttatatggtggtggatggtctaaatttgcaaggagaaccggccacatcccggagattcttgtctatttgagattgttaggaatgaaattgataatgctttgttcaaagttaccattactgttgatgttagttgttagattagataacattcacaagtacttattctaagtattaatgacagtagctgtcttaatttcctctctaacagaagagacttaagtgtttattttgatttagaagtttctgaaagttaatttttagagaatttggatgaatttgaagcttgttattatgtggaaggaaactgattagaagttgttttaagctggccttgaatgtagaaatgttcaa

SEQ ID NO: 76521 - DNA, 661 bp, Cannabis sativa
ctaccaaaattcaataaatccttagaatttaatcacaaaaagtcataatcacgaccacaccagtagagagaaaaatcaattcctacttgacaatacttagacaataacacacatatacatcatccctcacataaaattcacaaaaaaaatagaaatatttccaaaacccacattgtaaaacattaccaatcctattaaatctcaacagtcaacttgataatctgagaaaacaagcaaatcaatgagcacccagtacccatctcccatctttgtgtatctaatatcatttttagttcttgtgtttgaataaaagcttctaaatatttcttcactatcaattcgcccaacactcaaactaaaaaccaaattctctttctataaaataaaaccccattgaatgaaaaattaaagaagaataatgaatgaaatgaaaccctatttttattatgactaacaaaacacacatatagtccaaaccaaatgagatgttttaaatcatgagaagaaaaatgaaacccaacattgtataaacataggagaaaatgtagaagagaagaaaggtagcacaaggacaaaggaggagcacgtaccaaagacgaacagtgctggactgagtcttgtgcgaagcttgagcagtagcagaggatggtggagggtcgtt

SEQ ID NO: 76522 - DNA, 4008 bp, Cannabis sativa
ttaatgtgcacactcaaaagtcatacacatcaatgattaaaaaaatgttcctatactataagaacaaaatttgtaccatagaattattctaaatatatatactaccgtttatagtacacaaaagatatataattatttgtacggtataaatgatggctcataaataaatagtttatatatgtttctaccaatttaattgaattggttattatttttttgagttatataaaaaaattaactgtcactatttataaattttgtgactttataattatataaaataaagctaactttagtactgataaccttttagtaacaatataaattttttgtgattaaatataatttttagtcatattctctatattagattactgtatacttagggttcatcttgcatcagatatatcttcatctgtaagtcaaaagcttcttcctttctctttctgtttaacttttgtaaatttttggcatatgggatttgattagtattcattgattcatgttgtttgtggtttggattgtattataatgctcttttggtatatagggtttgattattatctaatccttttgttaagggtttgtgtttttcaactcttttcttggaagggttttaggttttcttttctcagaagggtttttgttagattttcaataaattaaaaacaagttggtttctttaaagggtttttgttatgtaaatttttcttaagaaaaaatatttctttgaaggttttggtttggtttatgttggattcatgttcaaacttttctttcagccatttttgtcagaaaactgcttcttgattttagatttctttagaaattcgagtggtttttgaaatggagcttcgagtgaagagcatgaagccatgagcttgtttcttctcataagtgctccacagatcaaatgctttcttgttttcagaaatgaatggtttagtgtcatttcaatgaaattctcggttgcatacaatacattgtattcttgaccttttatgtttgatatgttaaaacaatgaatgaaagattatagctgttgagttcaatttcgggatagagtggtttcgaaatggagcctcgagtgaagaggatgaagccttgagcttgcctcttctcatagtgctccacacatcaaaagctttcttgtttttgaaatggatgttttggtgccatttcaatgatattctttgaggcatacaatacatttttatcttccaaacttttatatttgatatgctctgatttttagttgtagagattttatgttgagaaactgaatgaacgattatagctgttaagttcaatttcgggatatagtcgattcgaaatggagcctcgagtgaagagcaaaaagccttgagcttgcttcttctcatagtgctccacacatcaaaagctttcttgttttcgaaatggatggtttagtgccatttcaataagtctcgaaggcatacaatatattttctaccttttattttgatatgctttgattgaattgtaaatatttgctattggaaatttggaaattgaatagaagattgtagcttctcacttcaatttaggcctatagtggttttgaaatggagcctcgagtgaagagcgaaacagccttatgcttgcttcttctcatagtgctccacacattaataagctttcatgtttctgaaatggataatttgatgtcgtttctttgaaatttcggatgctaacaattcacttctaaacttttaaaacacttgccagtccaaatcactgcattgaaataaataagaactcggtttgtcccttgtttaaatcttgcttagcaacaaaatgaaatgagaagcaacaaatagtttgtctcttttttacttgctttcggttttgattcatagaaatttgtaatgtgaatttaggtacaaatatgtcaaccatgtcggcaactgcaagaatcccctcacattgcatgatcaaaactgcccctcagaaccaactcgccactgccattgtcaaatctccatttgccctaggctctgtcaagaacatctccaagtctttcgggttaaaagcatcatctacctcgttcaaatcatcaatggcagtgtacaagattaagctaatcgacccagatggcaatgtgaacgagttcgaggctccagatgacagctacgtactagatgctgctgagactgcagggatcgatcttccatactcgtgcagagcaggggcttgctctacctgtgcagggaagatcgaatcaggcagtgtcgatcagtctgatggtgcatttctcgatgataaacaattgggtgaagggtttttgctgacatgtgtttcgtaccctacttcggattgtgtgattcacacccacaaagaacatgatctttactgatgaaccgaaaatgtataatctggtattggattagggtactgatgatgatgagtttcgggtatttgaacaccttccttttggaattgttatgtttagtttttctgtttgttgtggaaaaggccatctaaactgaataataataataataggaatgttttctctgcattcttcatttatgaaattcgtacactggtttgaaacactaaccaatccatttaaaaccggaccaaatgaatccgtggtctcgacaaattccaactgatttgaaccaaataattccaatatgggaatcatagctactaaaaagcttaggtgatactagaaaaatagttattgcctaactaattaggtacacaaggtgagtagcaaattagtactcaagtcagaaaaattttacatttttaaagagtaattaaggaaaatgaactttttatttatttatgtctttcatttttgacaccattgctaatcaatttccagctaccatttctttgttactgttttctttaggtaaagactttttcagagtaataaatagactttgctagtagttctattttttttttttttctaagggtggaaatttggatttcacataataatatgatttaaatacaaattgttttttttcaattaattttttatgtaaattaaatgacataaccaatacaaattcactatattaggcagctacattaataaaaaaaatgaattttttcatttttatacttcaacacatttttttttttgcattacgaaattttacataaaaactctcatagcgactaacgaaataacttgaatcataaccgaaatttatatagcaactcacatagaaactattggaataatccaaactataaatttaaagaaaaatagtatgtgtagtaatttttcttaaaaaacctacctaattcagtagcataaatattacatagcaaattgataactaataatgatccttgaatttctcggagaaccataaaataattaatcttttgattaataagataataatatgacaatatcattattgtagctgtaaaactatttagttccagccaaaacttttttttttttttttggaagaccagccaaaactttttgttagtgttaaatatataaatataatttgtcaaaattaattacatttacatattttttttcttaaaaaaaaagcaaaaattgaaacctgtcagacaaccgtgcaaccaccccagctagagataaccagctgagaacgatcatctacagccgtgagcatccgaagatgatctagccgttaatcacgctatgattgaacggtcatatttcctccaccaggtttggtttcctgtctccttagaaatcaaggaagcagaggtacgagcctatagaacagatcctgttcaagtaaggtcgtgacaatttatctcagcaatctctatataaacttctctatgtagttgtaaactatcaatgtgggagttttgtgacgagaatttgttgggcttttcttttttgttttatactaccaggcccttctttaatgttgggccaattttccaatttttagttgaataattagtttttttagtccctgtacttatgacactatactatgatgtcctttaatttataagtgtagttaa

SEQ ID NO: 76523 - DNA, 1988 bp, Cannabis sativa
ggtaaaaattgaaaataataacatttaattgtataaattaattaggagtctaaattttattagagggtatttttttaagcattaaaaataaaatttcccttgcaaaataatgttttatcattttcattttattttataaatttaaaaaattggtaaaaagcaaaaaagggggtttttttttttaatgaaattcatctttatttaaaaagaactaatcgaaagaaacaaaaataaaagcttttacaatttttaattactaaactaaaactggaaagcattataaaaaaactatgaatagcttttaaacatctcaatctcaccactcaatgggattataaaagagaaaattataaattttatgtatttttatactattatgtaaaaatatagttatttttcaaaaaagttactaaaaaaatttaagaaaaagttgaaaaatatgaaaaaagtaaataagggtaattagatactcttaagtaaccagcaattagatatctttaagacaaccagttaccgtaaggaggtaactagtcactttatattgctttttccataaattaattttttttgtttgagaaaagatcattgtaaacttatacctcaaaagccattaaagaaatgacttgctttctctcccttatcaatataagaccaaaagaacaaaagaattatagaaagtttattggatcattaacactaaaatgtagaggtaacgttcaaagtaggaattattgatatatgtttaatgatattgatatgtacatctataattcaaatattacatattaatgtgatactatttttttttaagtagttggtcccaatttaaataattgtgattggtttaacaaaactattaagttattgtgtgtaatgtgtggatgtaatttctagtgcatactatgatatataccaaatctcaaatgatatctcaaataatgatatccaaaaggcttttggttctcaaatttaaataatagtgactatgattttgttgtgtgtgcaatttgtgagtacaaaaatgagtactatgtagataatagatattatctcaaacctcaaataatgctatctaaaaggtctgggcaaaaggagaagacatgttcaaactttttaaatgaaatcttgtgcttgtgcttccatttcttaatcacgtggaaaaaaaatggggaattaagcttttttttatgccaagttttcctttctctttttccattctatttttcttcactagtccttactttcaaaacgaaaagtaattgaagtctcttattttgaatggtaaaattgatggtgtttttgttggactaagttgggttggttgttgcttatagacttaatacacaattttgaatcattcttatgatgaaatattgacactcgtactcgtagtatatacaaaacttggtatttttaattggagtttatttatttatttattttttccattttaattatttggctttgacctttttttatattctttcatttgattaatttatgcttggcaatatcatgaagcttgtaaaaattggctgattttgttatcaacacatggctcaatctcaccgaaggtccaaagataaccccacaatttggataaagtcaattgatgattatattagtgtttgatacaaattggtaatttattgctaaaatataatttattttgtaaaaagtttgttgcaatgttaaaagttgatccaaatttattacattataaaaattaatttaaatttggatcataatatgtcatgatgtaaaatttgcatcacaataaatacactatttttatatttatttttaatatcattttcaatattttattattaaacttagctagttattgcattgaattataaacattttacatttattttttattgtttcatataaaataatgataaaattaagagtaatttgtggcataaatacttaagtttaactcccagttgtaattaaatatctaagtttaatttttggcggta

SEQ ID NO: 76524 - DNA, 1380 bp, Cannabis sativa
aagggacggctccacatgtccttgacggctgacagtttttccaagaataagaataccacagcagtcccgagccaccataccgaacccaaagctgtgagtaccttcaaatattgcagcgtctacattgaccttaacactattagtagtaggtgttgtccaatgctctgctccatccccaggtatagtgccgaaggatggtgactctattaaagagttttgagcattaatccattggttaaggtaagctgtagcagacgcaataatactagagatactgacaggtttgttgttccaaacaacaccattcctggcaccccaaatagcccagcaaatggctgcaatctcagcctttttctcgctgttctggtgccgaaaaacctccttgcaccagtccaaaaaaccagacccctcctccacgttagttccaataccaactctgtgccataccattttgatcacatcacaagttaccagactatgaagagctgtttcattctcatgatgacataaggggcacaaagcactcacctccactcttttaattcggagttgatccattgttggtaagttgttggaaccggccctccataaatgagttttaatctttggaggcagccttaacttccacatattcttccagaattcagaaaccacatcctcgctccaacggccgttggcttgctgcaataagttgtaggccgatttgactgtgtataggcctgaattgtcttccttccagatcagatggtcctcacaatcggtcacttggagaggaatttgttgaatgagccgagagtccctttcctcaaacatgtcgttaatcagttccaagtcccaaattcttgaatccgagaccagtaagttacaaactttcgtgtttagaagaccaggatggactgatgttatgtaaggattgtttggatctggtagccacggctccccaagcacattgatgttttttccatctcccacacaccatttaatacccttcgccaccaagtgttgagcctcccaaatgcttctccacacaaagctaggattgttacccaacgaagcattaagaaaagaaccactcgggtagtaccgggcttttaaaaccttggcgaccaaagaatcacctcttgttagaagccgccaaccttgcttaccaagaagcgccaagttaaagtcccttagattcctaaatcccaagcctcccacatctttgtgcttgctaagcttgtcccaagacatccaatggataccaccattgctctgtttagaggatttccaccagaatttggacataagttgctcaatatccctactaatttccaacggaagtaggaaaacgctcatagcgtaactagggagagtttgagccaccgttttaatcaagac

SEQ ID NO: 76525 - DNA, 947 bp, Cannabis sativa
  modified_base (88)..(90): a, c, t, g, unknown or other
gaaagatagatatatagacagagaaagagagaaaacgtaatctgtatataatttgaatttttttttatatacatatatatattatttnnntattattttatatatatataaacacaatagacttggtcaaaccgagtctttacatacaataagggcaacgactttggacaaaatatcgactacaaagtgaaatatgtttgttttaattttattaagtttatataataacacaaatagttgaatgataatgattttgaatatatattttcaaaaataactataatatatatcaatataaattaattaattaatcaattcaaaataattataaaaatcaagattttattatattaatttttttattgagagtaaaaaaaattcaactaaatttgttactcatattaataaaaaaaaatatatatttagaagatattaaaatttgataaatatgacttaattttttattttttttaatttatattaattaaagtcggagttcctttcttcccattttataagtttctatttgtatattttttaagttatatatatatttttttattctatattaattaaagctggaggtttcttttctcatattttataattttcgaattatcttttctttaatttataatgtttttaacctatattaattaaaagttagaggttcccttcctctcattttataattttctttttccccttttttaatttattattttttaatctacataattaaagtcagaggtttctttcctcctattttctatttttttatttattctttttttatttctaatattttgttctatattaattatatttataaataaaaaaaaaccacttcaaagtactaattaggtatggtaaataattccctaataactaaactcttttatagaacataaatatcataactaacttaccatttatttatttatttt

SEQ ID NO: 76526 - DNA, 672 bp, Cannabis sativa
catcttctcccaactcatccaagtaatccctcaagaattcttagatgaagaaggcctccagaactgaaccatcatatggtcaattgcttgacacaaactcaagagaagaagaaatttcatagtagaagtaggaaaagattggaccaaattcttcaacaaaacttccttcctcacatgcaagagaagcttcccattctaactattaatttgcttttccatccactcctttaaataacctaaaatataattcttatttgccccaatacattaggcaaaccaaaatatttattttcatcattcgcttcaaccacttacaacaaagaacaaacatgattttccactaagagacaagtattcttgctaaaaaaatcaaagatttggcaagatttaccatctgacctaaagcatgctcaaattgctgcaaaagagaaagaatactctccactgccccgttagtcacttaacaaaacaagtaattgtcatcagcaaacaccatatgtgagattgaagaagccccacgagcaacctaacagccttgaagaagattctttctttcatacgtatgaatgaacccataaaagccttctgccaaaataatgacaaataagaaattggagaccatgcttttaggcctcagatcttgagttttatccacaaaaaaaaaaaaaaaaa

SEQ ID NO: 76527 - DNA, 651 bp, Cannabis sativa
gagaaaaagaataaaagaatgaattatgattaattaaataatgaattgaattgtgattgggtatttcccattttaaacttagctgtcaattatcacggaatctgttgaaagctcatatccataagccatagctagccaccgaccaaagcaacggaaaactcccactcccaactcttgctgacgttattttcatttctttattcattattttttttttttttttgtaggctaagatttttgtttttcgaacttttcacatatactaaatcctatatcttaaaattttaagattattaaaaatatcttttaaattattgagattgttaaatttaaaaaaatttatctaattttagtataaaaaatttaacataaataaaaatttagagaacatgatatagtacatgtgaaagtttaaagacattatttaatagatattaaaatttgtggagcaagatttagtacataaataattactgaaatagtaaaattaaatgaaattaaacaaaaattcttaaatctaacaatctcagtaattgaaaaataatttttaacggttaaaaaaattcaaaaaatataatttaataaaaagtataatttaatacatattaaaatttagatagcaaaaatcttaattatatataaatatataat

SEQ ID NO: 76528 - DNA, 3290 bp, Cannabis sativa
ctatacacaccaaataaagtgtatactgtagctgtacactatatttggtgtagttatagtgccaacgttagtgtagaaaatatagactttatcaccataataccgtgggttggagtttctataacactcaagtgatgatatgttctttagccttaaagttgttctattgtgtgccatctcaatcatacttatgatttgttgaatgcagattttcggagttgcttatcgtggtccatttggacattacctgcacataattctagacaaaattttcaaggggaaaagggatacaaaaacagtagccaagaaggtacaccattttactcagccttgagcttaagtttgttccctgaaagccttgatttaatgacagatattgaaagaatgtaactcaacattattttattacttgtgttagtaatgtaagaatgaccaaattccatctctctggtggctgtaaaggaaatcttcagttttcttatgttgaagcatatactgttttctccttttgctgaatataattaactggagaatgaacttaatagcatcaataaggggtttctaaagtgattttcccgaaccaattgacagtttgtttgactcaatcagtggaagagaaaagagaacaatttttagaagtttaaatccaaatatggcttgtcaaattgtcaggtgctgctggagcaggttactatttctccttggaacaatctggttttcatggtttaccttgggctggttgtggagggtaagttgtaaggaaacatattacttccaccattttttctttcatttgctgaagccaaaaatgattaaattgtataattgagttgacccctgtaataccaaccaactttatacttcatgttttggtttcacattataaaagtggatattagaaaaacaactctattactgaaatcaagcctaaaagaattaggaaaataagcaggctagatatggctatttcagatagcaatagtatgttagtaactgttaattattttatgcatatatgaaacacaggaagaccttgggttcatgtgaaagctaaaataaagaaggactatccaacaatacaatatacttcatggacggtattacactatgctcaacctcaattatatgctatggtgatatgatataacaactatcataatctgacttaagagaaacaaatgcagttctggcctgttattggttggatcaatcaccgctatgtgcccctgcaattccgtgtgatccttcagagcttagttgcattttgctggtatgaaattttgattggtggccttcttctacactaaatttacatatgcctcttattcatatccttcaaaccaaaatttgagccttgttacacttttccattctaatgttttctatttttccctttcaggggaatctttctaaatcttcgagcacgatccatcgtcttaccaaagcccaaatgaagcaactcagtttgcttgaataagttaaagctcctagatcccagctattcttagtctgctaagtagatgatctattttgagtattcatcaactcagaagagtatcctgaactttgtttattataatataaactggatcttatgcttaatgattcctatcttaagccagttttggttgttatctactcattaagcaatcaagattttatttatcttctaataacagaaatattgattgcaatacaaaaatgtagtgttgctgctacttgctatgctcccacttcaaagcggagtaggtaacatgctaattttatttataaccattgttttcttaccttgaacttttgactaagtttatgtattaaaaataatctcacttgcaaatgtagttggctcctgtggccaaaagaatggggacatagagtccagctctcattgaaaacaggctaggtgtgaactttgtagattattatttaaaggtaatgtgaaacattcagggagacctctctctccttgttttatgtgaaaactaaattaaatggcaattcatctatttaatatacttaatggacggtgttactgtatacttactctattatagttgtcgttctgccatgttatgttacaacataataaatataatttattaggtgtgggtagtactgtctgaaatcagttctaggtcatcctccagaatttagtggcagcttttttttggtgtgaaaaatatgcaattttactgtaccaagcagccactgttagtgttgatcctatttaaattttcaaagtaatgtttagttggattattaaaaattgagcattgctattaggaaccagtggtgcctaacacttttatgacatgtcgcgttgcaattgcttagcgatactccctaaaagctattatgttaaactatatgggacccgatacttagttggactaataacacatataggaggatactaggcaccactggtaccctttaacatttctcttaaaaactgctcagttctctcattgaatgtaatttatgatcgggtagttcgctatttattaagtattcaagtctcaatgatgcaaatttttgtggctatgctcccagtcccactccgagttgtagtttgcttacacgattagttgagtccactcgtgcatgtgaggaacagggtaaaaagcatggtagggacatgtttgaataagaaataataaaatcaattaattgacccttgtggctcggccaataataaatactatataaaaattatgtatatatataataataatatatgtgtatgcataaggcatgactgaaagataacgcatacaagttttatattataggaacatcacgtatatgatgatataaaatttgtgttggcacaaaatgagtttgtacatttggcataattgtgtgcacaaaatataaaataaagaaaagaataattaattatattgatgattattttatatttcattgaatatatataaaaattattattttaataatgataatatgttaaataaagaatataaaatttagtaaaagtgaattataataatcataataaataaaaagtagtatttattgtgagttaaatttatgacaatgttataatttatgtcaaatttgatcaaacttttaatatgtaataaatttagcatattttttagaactgtaatgtgtaataataactttaaaatatgttacaactgggttgaaattgaatatatcatcttgaattttgatttttttttttttttttgataaatatttttgaaatacagttgaatcttgccttggattagaggttgatcgttaccccaaaaaaaaaaaaaaaa

SEQ ID NO: 76529 - DNA, 824 bp, Cannabis sativa
cctacgtggaggtctagctcttcttgtacttttttcaaaacttgaggattgttgaggagtaatgagattgcccatgttatagtccctgctgtcgtgtcgccccctcctagtataagtgcctatgtatatattatagcaaattttaattaatataaattactctcaaaaatattaatattgtaaattttccttaaaataaggtccttattaaattactataagatcactaaaaggtatttttagtacttagtattacttatggtattatatcgttatttctatttcgttattagaataattaaatattaaataatttaatttaatatcttttataaaatatcactaaactatttaccctactctatatatcattgagactcatctaaataaacgaaaatataacatgctaaacatgataatctaatctaatccgcacgatctaatccaatccaatccgcaaagtgtggatattcgcacttgtgcggattagattggattggaaaattcaaaatccgcacttgcgcggattgaatattgattgacatgtaaaaataaccgatccaatttaatccacacatatttataaaatattaaaaattatatatacaaataacattttaatgtaaagaaaatagtaatttaaaaatataatacatataatacaattatatgtcaaaacttaataaatcaaatgtatattctattcttacatatcattcttttatatacaatttaaaataaaattaaacatttttttatacatacaattttttttcttccttttattatttactattttatttgttttaatgtgttgttgaaga

SEQ ID NO: 76530 - DNA, 669 bp, Cannabis sativa
tatatatatatatattgatattagtatctttctcataagtttcaatacatcattgctaagatcaatagtaaaattaggattttgtttgagcatcaaaaattcaatttaattccttatcaacatgtttattacgatgaacttgttttactatatttcgttattgacaaatggttaacccattttatatatatctattctatataaagtgtgataactgaattcttggtttatgagaaattcatgggttactttttatttttatttaataaaataataaaatattatttaaaactgatatctagaattcttgttttataagaaattattgggtgactttttttttttttaaaaaaaaaaatttattaaaaaatagcagtttttttgctgaagttaacgggttaaatccccaatttatttttatttcagatgaacgagaccagcatattcgcccaaattaaagcttcaatcgactgcacattatttcaatctcaatgtgttatggtaccaatgacaacatctctcttttttttctttctcatttttttttggtttggagccgaaaactccctgtgcagcatcgtctatctctatcaccatcaatgtccctgaccaaagccacgacgtttagtctctgactaccgtgcaaaaggaaatttgttgtcgaaatgg

SEQ ID NO: 76531 - DNA, 2209 bp, Cannabis sativa
taaaattaaaagcaaatgtagctgtgatcagtcattacactaaataaatttgatctttaccaaattgaagaacgagattatggttattccacacagaacatgcattaaatatctacattgaaaaaaaaaaattaaaaaaagataaagaaaaaaaaaagtcgctactcctctgaaaagaaaagataccaaagttgtgacctgccagttacgttacataaattaacacccttgacttcactcgttcaaactcttttcctactatatgcacatcaatactttctcttaaacatgggaaagtgttatgtatttacatgtttactgatcttaatgttatcaatcagtgtcatcaacacccaattcagtcttgactagttatcagctcaacccagaacccttctcaaatcagatttctgttcagaattaagcttcgatggaaacatcacatcgaatttgattctgagattacctcttttgctgggatcttttgaaatgggcattccctcgttctgaattactacttcatgaccaggcttaactatatctgtgactgagatactaagtaccctcccgtccaagcttgttacattcagagttttccctgttagagcctctaataaagatattcgttgcttaaccacaagatcattcccatctctccggaaaataccatgaggtttctcttcaattacgaagataagatctgacgcagtgattccaggttcttggttacctttctctgggaaagtgattttggtaccctttttccagccaggtttaatgtcaatctttaaaatttcatcaatggtctttgacttactgcaacaaaaataatcgttgatacataataaggccaaaattgaatatgaacaataaaaatgcaatgcttcaagcttaagatgaaatacccattataatgtatataaaaatgattcataatttattgtggttaaaatatgtcatagtcagttagctgctcaagatctaaattagcactggttttttatttcttctgtgtaatgccatttaaagcctgcacaatgtgcagctttaatcaatttaaaacagagttttgggtatctgtgttatcatttcctgggaaaagtcttgaaaagattatgactagctagtactcccaataggttggatgtattcaaagacaataaaaatttctatgatgggctgttggaacgaataaattagttaattaagaaatatagtaatttgcacgaattttcaagctaaccgagttaataaaatcagtggacagagaaattaaataaattaataaagagaaaaatgacattgagttacccaaaatcatcgataactgttctagaaattgtcattttctttctagttcctttaaagagatcctccaagctacacggcaacttttcctcaactggttgtgcttttctggtagagttagtactattaatcttctgctcccgactatgtccattaccatcatcagatccgccaaaaaattctgcaaaaatatcatccggatcacgaggattgaaccggaaccgagagccaccattgctattaattctcattccgtgaccgaaagagctaggagaagaagaaggtgatgaagaattgaagtcaaccgatttaagagcttcggcgccatagacatcatagatctgacgtctttgaggatcagcaaggacgtcataggcttcggagatgagcttgaacttggcctccgcttccttattgttcacctggttcttgtcaggatgccacttcatagccgacctccgatatgcctttttcagttcctcctccgttgcgttccgcttcaccttcaaaacgtcatagtaatcaattcccatatcagcttctctaaattctgtgatgggcagacaatcgatcgaagcaggcagtaaccttcttctattcttccttttgattcgacggtagagtaggatttcgcaattagaaaagcatgtgaaggggttgatgaattcggtgggagagagctccggcgagtggagcggttagttcacaagaagcttatatgaattattatgaatgaattttaataaaataataaataaaaatgtaagttgtgcgcgtttatttcggatatttccaaacgggtcgaaggaagacttcagtgacagctatatttccttgaggttacaaaagtccaatggcaaaattacactttattttctaaataaaacatataaaaatcaga

SEQ ID NO: 76532 - DNA, 526 bp, Cannabis sativa
  modified_base (460)..(477): a, c, t, g, unknown or other
aatcatgtgaatcatgcaatataaaataatttctgatcgtttattttttagtaaatctaattatattgaaacgagttttatttagagcataaaattccaacaattagttcatccaaatcctctaaaaatagtgtcaaaaacgggattcacacccaaagttccaccattgttggccaaagtggtggtctcattgatgttgatgttgacattattgttattttgcttcgtagctactgtgatcttccttcaaaatcacaggatataatactagaactaccctccttctagcgtcaaatattatcggaagaaaatagacaataccaaaaattatgagtacgtattctagataaataagaatacccgcttacagaacagtgagtattcacctagaatggcgagtactcaaattaaaataacgagtaataaaacaataacgataggggtgttcatccgatccaannnnnnnnnnnnnnnnnnaacaacatccaatccgcactaagtgcggatttcatattttggatccaat

SEQ ID NO: 76533 - DNA, 1345 bp, Cannabis sativa
ttttaagaaatgagtatttcatattatttgcacatggttctaacatgaggatattcttctgtgcctgtgcttctactttttctcaaatcaactcaacgatttgtttgcagatcgaaaatttggaaatgatgcatgtggtttagtgggcccagattcttggggatctttggtgtctgtacaaattgtaggcccatatactgagagaagcgaaacgcttgggcctcggtttggatttggatttgcatgagcccaattcaaaacttcaatcatcgcttgaaaacattgtatttacaacatttacaacacatagaaaggtgatatttgagggaaattcacaagagaatacaaattttatatcatagaattacaaggtactacctttcaaaaaaaaaaaaaaaacaagaattacaaggttctctaaatatcatcataattcattcaccaaattatcaattaaaatggaagtgtttggcaaaataatcttatatatattcactttgcacaaatagcttccttttgataattatttgcataactacctcaaacactgtatgttacttagacttaggtgagtgaatagtggacttaaatattttgttgaaagagatcataacgaaaacaaatactgtatatttaaatctacctaatagtaccagattatatactaagaagaaaaatatgatcaaattatttgttcattatatactaagaagaaaaatatgatcaaattatttgttcaaaatcaaatacagagtagcttagtgatatttgatttcaagtgaaatagatgactgtatttttttaaaaataaaatcggatattgctctcattgagagttgaactcaagacctcccgcttactaaacgggtgctctaaccaactgagctatgagagcttgatgtctaagcgtgcatattaaagtttattattcaatatatttacgactctattttgtttgcaccctaataaatatttttcatatttttaaagtgaaaaaaaaaacaatattatttaaatgactatgctgcgcctcctaattaataagcacgagtctcacatgtatttcaacaaagcaaaattacaaccattatttgcgtttttatttattttttttgtttgtgtttttagttacatgaaatgtattgtacatagctaactaatctttaatataacttaactacaattatattcgaacttactaattcatggcatctctgagctaaagattttgttcattagattgaaacacatttcatcttttttcgatttttttttgttttgcttagattgagcaaattattcagtgtctttgccattattttagagtcatatcaattagaggatt

SEQ ID NO: 76534 - DNA, 685 bp, Cannabis sativa
aggttttacaaaaattacaagagataattattttctcaaaaataacaataatgtaaaagtggaaattgatattttctagagtaataaggagtaagaagatgataatgggcctttataaaataaggaagattttccttaaggtttctattatatgaacttaaaggaaaaattctaggtttgaggaatgcttttttttttttttttaatttatctattaatgaaaaatatatttatattatattttattaaaatatatctacttttataggtgggttgtccaatatatcttcactctctacttaagtctagcatataatttatattaatctaaggggtctaatatggacatcatgtataaaagtgagtatattttaaaaaatatgaaaaatgaaggtaaaaattaaaacaagtaaagtaaagtgagtatacaatgtaatttctacaaaattctcgaggtctggacgtaacgaaaaaagttttataacacaccgaaataagagatttgttttcattaatagcttttgagaaatctaagacttataatgaggcattagtaagaatatattgtagtaaattaatctatgtacattgtacactttagagtaccaagtagatttataaataggccgaccctgagttgaaatgggtcataaacaattttttttttttgaactcttactataaa

SEQ ID NO: 76535 - DNA, 1377 bp, Cannabis sativa
attttagttattattattcatcttaattatcataaacaagaattaatttgtcattattgaggttgaggagagaattgatgctattaatattatcatagtgagaaaaatataaattggttcacagactttacattgtatacatatattaattattggattattacaaaagaattatagttaaagtacatgacaatataatataataatgataaaagaatgtatctatcatatatgatagaactgcatatatgaccttgccaactcacatgcatgcatcgaattagaaattaataattttgtactagtaacttgaagaggaacttgcaatcaccagagcaagatatatatatatatatatatatatatatatatacttgtgaattcatcaaatttcctctgaacgtacttatagatattgaagatacctataatcgagagagatatgaattcacagggaagtaggacactaccagtggtgctttggatgccttaatattattccttccaccctctaatttactctgctgggaattttcgacgacactgttggagactcgagaggaagacacgagaaaacagcttaacaagcctgtgaaaatagccatgttttttaagatgctggctggcaataagagagaaccttaaaatttgaaagataggttactgtggttggtggtatacttgttgatttatgagaaagttacgacacttgtggtctactatttatatggtgcaaataatatgcttggtgcgcaagtagaagaccaaaatatgggtctacgatggctgctttgatattaattactttctttcttttcttggatagtccttatgttattgtcataatttttgttgtcggtcccactttattcaaccgccattgtattttatattacctcgatcttaaactattctcctctatttttcttacaagaataccaacaaaattttctaaaaatatttttttatatgtttttcaactatttattcaaggtctccatcataaatgaaaaacaaaagaaaatccagcatccacaaattgtgatcttttcatgagatttgatctaacaaaaaagaaatataaatatatattagggaaatttataccccatactatttttttctattttttttactgttacatggtaattttttattttatactatgtttttattattattgtaattggcctgtagtgtcttgacttgagcatctaataaataatttttattattttttaattgtaataaatgcatgatgtgattttgtattgtcacattagtgaccgtttatttttctatttttattttcttttaactaaaattgtattatattttaccgataatgtgacagtcagtagtctcgtaatccgtaag

SEQ ID NO: 76536 - DNA, 1420 bp, Cannabis sativa
gcatatgttgataagagacattgttttaatgcgagcaatatgtagactcttgtggaatcattatgcttgttgtcattatctaactcctgtttattttaattgggatttctcctaaatgtaatctttgtttgacaaattattaagctttggcttgtttacatagctcttttcatacacacgcctctaaaaagtttgttctgctgaacgagttcaatacccaatagagattatgcagagtgcttactaaatgttgattcctttttccatttgtcagttttgtagtttgatggaaagttgatttacattttcctgttgtcattcattgttagtattactattgcatactgaaaaattaagaagtataaccattgcatacttaagtttcccgagatagtaattgcctagtcactgtttgtattgtatgctttaattaatgataaaagatgaacaacttaattgttttctagcatagatagagggcagagacacttgcacagtgaaaactcatcttcaacattgttgaagccaatatcattcttttgcttcatctccctgctgtgggggctcttcttcactctcactagacatctaatatgatctcaattaagcttgttatgaacttcatagagcaaaatactcaccaaggggatcaaaacaattagagaaaaaaaaattaatatggtttgcatgtctaaggggaaatcgtcatctagcttcatttcattagatactgtagaatggagaagatacctgcctatcttggatgatgtaaatcagctaaattacgaattagcccatcaataactacactacttcaacatgcaatctttttcactccattgctttccgtaacttccctaaccatatggaagtgattccacttctcacaagtagtatatataatagacaaaaatccatatccaccatctgtcttgggctctgacttgtgcaactctcttgaacctatcttttccatgtttctatcagcattacaagcactaagcattgctccccaaatagaacgacttagtttcattggcatctactcgatcaaataatacaccctaaccaatctacccgaacaacctaagagatccacctagcatttgtagtgctcaactcttggttcaatgccaaattatgagtatgggcggtaagaacaccaataaatgtaatttcatttggtgttacatcttgctacatctaagaaaactgatttgtaggtttgtttccataaccataaaaagcaagtgattcattgttgtccacatagtaacgtccttctttgttactctctcaaaaaccaaaaagctcttttaattttgccacacctgtcatacataattattagtggtgagcctgaaaaggcatctacttgcttctgattctaacaacaatgttgtgtatcccacttttttac

SEQ ID NO: 76537 - DNA, 923 bp, Cannabis sativa
atataatatgatatgataataactagctttttcgattaaggtataatttaatagtgtcaaaacataagtgcaaaaatttaggagtattcgtcaaatttaatctgcaatattttgcttacagtgcatcagcacagtgtacaaaaattatatttgggattcactctgcacaataactcaaattcaatccaattcgtaaaattgtggattgaattagttaccttttaatattaaactatttaatatttattaaaaaatatttatttcacataactaacaacaaaataaaattaattattgttgttttatgtctccagcaataaattaaataaaataaaaaataacaaattcgaaggaagaaaaaaaaaattgtgtaaaaagaatgtttaattttattttaaattgtatgtagaaaaaatatatgggtacctattcaatggttatattttttttttgtaaccatgatggttacatttttgttgacctgtaatagcaggttatcaacatgtaaaaattctatttttaaaattaaattagctataattaactatttcttaaaatgaataatttttaatttgaatatttaataagaccctttttagcaattaatattaataattttatttttatatttaagtctctattataattttttttaacaattaaaccatttaattataatatctacaataaaactctattaatttataaaatttaaactttcaccctttctaaaatatatttttgaataattaatcacaaaatctgaggatagtggaaaatactagaatataagcattcatgatttatccatcatgtctaaacctccattttatctgtaaatcgttttagacacaacttgaaaataaactaacaatttcatatatgtatatttttatcagtaacacatattggagatcaataac

SEQ ID NO: 76538 - DNA, 857 bp, Cannabis sativa
ttttacctcattttcatatatcaatattattataagctattgctatcgtgtgccaaatcaaagaaatttaagaaatctgtcaattttgagatcaaagattcaagattgtgttaccactattattaaagaaacttatttaaaatattgtacaataagtacaattgagaacaaactctttagctgtaaaaattaaaaaaaaaaataatggtaaaattaagcaagaatcatagatgagccaaagactacaaaaagcacagcaccagccaaaccaagcaaaacagaatgactcttcttagaattagccacattggaagccggagcaggtgccttgacggctggagcgggaggcgagaccgaaaccaaaggagtgggagcaacgtcggcagagggtgttcgaggaacattgatgtcaaccttctggccgccttgacagtggcccggaacaccacacatgtagaaatggtggcctcgagtggtgatggtgatgctgtcatttcctgtggtgtacgtttccaaaggtagtgacgcattacatgtcttgtacattgcatgtgttactctcattacgttgtgaaattgagcattgtattcgaattctgaatcaacaaaaaaaaaaaggtaaattcatcactgaaaagattaaactaaatacctaatacttatatatatctaacattaatacaattcttagttttttgaagaagtttttggtaacttattttgaaagcaagttttttaggacgaaggcgtgcaaagtgctgagtttattattatatccatattgcaagtaaatggccgaccacaacacttaaaaacacaacaaaaggactagtctttttattctttattattttaag

SEQ ID NO: 76539 - DNA, 1892 bp, Cannabis sativa
gcctcagtttcaatttatagtatatgctttttcattattaattaattaattaattaaaggtgatgttttgttagaattagctttctcttaaagccaacctgttggaaattctcttctatcaccccccatacacttggatatctaactgtaatgacttggacttggacttaatattagacactagaaaagatgcaaattctacaaatttttttaaagaaaattattcaaagtggtagctaccaattaataattaattagtatagttaattaagattaaaatatgtgtgtacttcttctctcggtcctccctttagaactaaactatatacaatattatgatatattattgcaagtagcaatgagatctttgtagggttacattattttttaaggtaaaattatacataaaatatgcccaacaaaacaaagaatatttacataaaattaatatagtattataattattatgggactccaatataattcaatattaaattaaatcaatcacttttaattgcatcaatacataaaaaaaaaaaaaaaaatcagttgtgttttaaaatatcaatatattgcaaattacataataaagttgtgtgtgttggtcatttcttttgggagatctctatttgcttgtaggtcatttgattaaaaaaattttaagagaaatgctaaaaagtatcagtgatgtttagcacattcatatgtgttaatattgttattggttcaattataatcgtaaaacgatatgtctagaggtgctaaatattattaatgtctaataacaatgctcattttttaagtattcgtatagtatggattagaattttttctactctatcatttaaaataaatcatcaaaattttatttttttttttattttacaacacattacaaaattttttctctacatcattaaattaatattatttttactttctacactattaaaataataattttttattacaatatgtataaataaaatattatttatatattattaaaataaatttagagaatgtattattcattctctacatataaagatagttgcattggtttgaatgcatctttattatatatataatttaaataagctgaagaaagctttttctattactgtagctaaaaaaatttagaaaatcactattatataatgaggctgttgtgattctcaataatttttctactttatcctttacatcaccaagtatacttatttcacattacatttttacattatactatacattaatttctttaaaatacattatcaaaattctaccttttttaaaaaattatgtcatttcaaatatatatccccatataaaaataattattaaaattcaaaacaattaataaaatatatttagagtaatgaattgtattttataaatgtaaagcctaattttaaagaaactttaaaatgaaaaataaattagagcatttgctaacatatctttcatgaatttttttaaaacttctcactgatgggagtgctcttatattaataaaattgtgttgtaaattatacttttatataatatatataaaactatacaatagaatctaatttatacattaccaaacagatcataacaatttgatatctttttaaacaaaatcttcataggagagtataaatacatccttaaatgcttagcatgtttaaatgttcttgtaattaaataagggtctaagtatataaatatagagaatgaataattattagtacctttatttcattagtaatgggtttattttgtttattgaagcaaagtagttcatgattacctttctttacataaagagagaaattagtcttaatattccgatctttcttttatgacttgttagagaatgagagccgtacacgtggatccttgat

SEQ ID NO: 76540 - DNA, 530 bp, Cannabis sativa
agagtttgtcatttgcaggctaccaatcaaagagggagagccatatggcccaagcaaagcttgtcgtttgcaggccaccaagagtcatatggctcgggcaaaatctatgatttgtaggctaagagtcacgtgcctcgagtaaaacttatcatttgcagtttttatttattttgacatttttaattttttttataatcgtgtacgttagaattatttaaagcatctctaatgcaacagaaccacctggcttgagcaaatctttagtttgtgtaggctaagtgccacgtgccacgtgcctcgggagccaagtggttcgagtgaaaaacccattgttagctcgggttaccgagagaatagctaatctaattcatgtctaattgtatgaaacaaagagaaaaagatgacaaaacaaaatgtatataatagttttagaactcaagtctcatgaaataattgaaaaactagaattgaattggataataatgaattattgatcatcatcatcatcaagctttgaacttcataaactt

SEQ ID NO: 76541 - DNA, 899 bp, Cannabis sativa
taccaattttaatccctaatatgcatataattttaaaagatacttatgtataaagttttaaattttaattttttttcatccctacactattatatatacatatgcatatttacttatctcttttttctagatttgatactgaatgatgagatttttttttttatttcaaattccacattttatgatatgtttctataaatttttatgtttgtgagttttttacaaaattttcaagttttaatcttccttcctatacggtttaattagatatttcatatttgttctctagagacattgtttattgctttttttttttttttttgaaatcttaatctttatagatttatcagttttaatcttttcttctctataatttttgacaatattttttccatctgaatttggtattatatagtaagttctctacatatatttcttaatttgtaagattagttttttttttctttttaaaaaaaaagaaacttttaatcctttcatctctactattatttgattatgtcatttatttgtttttttactctaaattgtatggtaagattttttttcttaaagatttcgaatctatcattatatggtaagttttctataaatttttatatttgtgagttcctatgttgttcattatattttagatttcttattttcattatagatttctcaattttttattttttcttccattttctaaacttatttatttattttctttttattttattttctcttttttggtgggtagattataaattgaaatttacagcctcaagaatataagatatggccttcagttgcttcttttgcttcatcattatcaatgtgagtttcatctcagagtaagagagccattccttagctgagacaagggtgtacatcatggt

SEQ ID NO: 76542 - DNA, 513 bp, Cannabis sativa
atacacacctgacttgtgaatacgctcagaaccagccaaatctaccacgacaagtttgcttttccgaagaagtggcttaaatgatttgcttaggcaagagagttccccattgtcaactgaatgattatcttcccttcccatgacagaccttttgacatgcacctgcaccagagagaagcatatatatcaaatgacccatttatgcttttaagagtagtatattttgatccattatctagtttacttttttaatgacagaaaatcatttcaccatcagaatagcatgactacgagaagattcagtgttcaacttcgtgttagctgcaatcctatgagtttctcccactctcagcaactccagtttagtttgttgatccctgatttctacaagagtcgcaccaggtactgaaacatcaccagttcttggatcttccacaaaggggatgttatcatttgatggatcaagaaggtcttgaatggtctccatataaagctacacattttattttattt

SEQ ID NO: 76543 - DNA, 623 bp, Cannabis sativa
agagagagaagatttgaattgaactacgtacctttctcttctttcttcttcttatctcctttagctttatgtggcttagctttgcttgccttaggagccattgcagtagtaaactatttggttctgtctttctttatcttttaattatatgtatagagagagttgagtctagctatataataagattataagacaatattccaaacaaataataatttcaatattcagtctcaaattcccaacaagagaactaattaaaatatgcaaattccccaagcaatattaatacccaatataggaaaaatgaaaatcttatctatttttccggtagaaaagaaagaagaagaatatagtacatagtgagactgagagtgaatatattggaaaagttattggtttttttttggtctacaactcccaatgggaaagggactgagttctaaatgggaaagaaataaaatggtgaagtgtttatgagaagaatgattattatgaacatttcatttatgataaagaagagagagaaagagaaagagatagtaataagagaagaaggttatgtaatataagagagaggagagagaaagagagagtattagagataggataaggtaagaggcaat

SEQ ID NO: 76544 - DNA, 1065 bp, Cannabis sativa
ccgaaaacccatcccctccgcctccccactccggtcgtcgacgtcctttgctgccactgccggctctcctccgcctgaaatagcgtcggccaaccaccagcggcgagttgtgaggtaatatctcattttctgtacgttaaaataatatatgtcattattaaaaatgcctctggtctagggatgtcaatggtgggtgtggggtgtctccatttgcgttcagttaaccatttactaataatatatagccaaatccgaaaagactacaaccttctaaggctgggatgggatgggattgcttacctctttcttttcccaatgccgtggcttaagtttagaaaacagtaggcctcacttagatcaaatcagaaaatttaaaggtgattttaaataactccattatataagattaaggaaaaaaataaaaattcctcctagagccgacatagtgttttgttacacccatggggtgttttagtataaaaagaatactatagattattttttgtttatatatgtatttgtgtttatatatatttttgttgtttgaatttttgtagctatatagtgtgtatatattttgatttgtaaaatgttatataagattgtatttgttgttttttttttctttttaattatatacatatatataggtgaatattctgaaattattatttttttttagataatatttgtgtttgtttttgttattgtgtaaatgaaataatctcttagatatatatatatatgcggctgttttttttttttatatatatatatattttttaataattttttggtttagtttgataatatgtaatatttaaatatttgagatgtatttgaaaatttttagattgtgtaaatcaggtttaaattttttgggtagtttaaaatataaatgttattctgcccaaattttgttaaaaatttgagataataaaaaaaatatagaagttatatttaatgaggaaaattataaattaataattatttataaaaattaatgaaaataattttaaaattaagtaatttaactaaataaaatttgtatttttttgaaaaata

SEQ ID NO: 76545 - DNA, 1146 bp, Cannabis sativa
gcacattgcagaggagtatatgactgcatatctattggatgtttcttgtatcttcttgagtgctttgtgactttgttatcttcctttgaaagttgcttcattgctacaaagtcatcatttgttgagtggctcgtctaccaagatgttcatacaacgaacaagtcaagttccaatatgcggatttgttttcgacaaccccgtttagagctattacagtttgttatccatgctataaagcattgccttcacaacaaggaatttatgactgaatggatcaaaagatctgtcttagttgagaatgagtcctactcattacttgttcagaggatggttgccataatctgtttgatttatgtgaatttcgaaatatgcttggacttgcttcttgatttacgaggaagaagttacatcactgaacaactaccaaggcagttttgtgaaaccctcaagtctagttttcaaaattcaaatctcgataaagcctttatgcaaatagacaataatttggtgattgtgagctttagggaaaaatcctcaaagtattcctttccaaatgctgtacttgtcaacatggaggcctatcatcacaaaaacgacataataagattattgttcacgaaaacctttgacacttcagaagatttcactctagctcagccttctgaaacagaagactcttgcagagaaacagtttctacaagcagttccaccacagggatgagttccgagctttcacattctagttttgagttagcaactgatcatgacagccacacttgggagaaacccgaatgcgatccaccaatggatgttgtatgcttttgggagatatttgaaaggattaactccgatgtttctggaataggcgaagtggaatttacattgaatcctcaaacaattaaggtaaactattttttgtttttcaacacaagttgtgtaaactgatttattgagtgagaaatgaaatgatcttttcttactgctttccaatgtttcaggacaatgtggagaaatgtattcgcttcttaactgcaacaatattggctcaaaacacttgtctctttgaggaaaaaagcttatctgtggccgacatgataaacgatctgaagcaattctccgctgcattggattcgaggttggttttaa

SEQ ID NO: 76546 - DNA, 691 bp, Cannabis sativa
gtatatatacctaatccaagaatgaccagcaaggccttgcatacagtctggaaaaggttgaagcaggtggcgtaattaggtggaaatattaagcggtcactttgagatccagctgcaaggggtaacttattataacgatgtgatgtcctttttgggtagcttaataatataatttttaacaagttagtgtataacactcgaaattaatattgggattagtaataaatatttgttcacccttttgttctatggtgatagcattcgatcctccaagactctctccaccagctcgtgtacgtccttgatgtgcatcctttttaactgttactgaaaaattagaatattacttactgtttaacaaaaatctgtgttaaaagaaggataattaaatggatatattatataccaacttcaattgcattcgtcagaagttgagcaaaattaacgcaagttttgtaattgtctggatagctttgtttctcttcattatctaatcttttcagcaataaagtaatgcgatcttcagattctggcttcagctcatccacaaatgtccctttatataattaaaatgaagacaattttttaggtaccaacatatttgttttgccaaaataatattgttaactaaagaataagtaagcggcacttacaatgggagatgagattgtgccaatgaccaaggttgcta

SEQ ID NO: 76547 - DNA, 4859 bp, Cannabis sativa
ttcggtttttgtgtttaagtgttacaaaccgtaaagttcaagtggtttagccgccaatatcccttgaaaatataatatgaaatgatatggagaaaatatgaaaagttgttatataatgtaatacaaaggcaaaatgaaaaaattaaaatttttataaagtattataaagaatagaatagaaatgaacatttttgcagtataatatagtttttttttttttttttacttttaaaatcttccttattatccatattgaaaaaaatagaggacccaaatgttagatgttttaggaagagggacaaaaacacaaatgaaaacaaattaagggaatattagtgatagacgaaagttcgggtctgctggaagtttaaaaaccaaaaccctagcttctatttcctctcagacgacgcgcagctccaccatcttttacatctctctctctcagcctctaattctgtggccaccggtaactctctctcttgctctctctctcttttcatgtacgatttagattgtttccttgaatgttggaattggaaattagtcactgtgatttcatttcccatatcaaaatagaggctaagattttgatgcgggttctgagaaaacttagttaagaaccgattttagagtgggaaactatttttttttcttgtccttgtaatattattttccattaatttgaatattgaagactcggaagcaatgatttctattttaaacgatttaatttctggggaaaggacatattgtatagctgaaagactaatttaaagatgggcgcatagtagaaattaacgcttgtaatcgatatatatttttttgttagtagccaaatttgtattttttttttacctttatgataaattgtttattatggcatggggctctgctaattcgatgccagtaaaaatgtctttagatgtggtttaagagacataatgttgagttagtttggtttgttatttggttcttttggtacagaacaagcaaatatgagtcgaggaagtgcagcagctcccaaggggaagaagaagggagcaacatttacaattgattgtgctaaaccggtggaggacaaaatcatggatattgcatccctcgagaagtttctccaggagaggattaaggttggtggcaaggcaggcgctctcggtgactcagtaactgttacccgtgagaagagcaagattactgttacatctgacagtaatttctccaagaggtatcatttgctcccattgaaacttgatgtgttgttacatggtttgagtaatgcatttctgatggctgtacctttaagaagcgaagatgatgaacatctttggcctactgtaaggtttatctacagtagaaggggtagacaaacttagcttatttttgagttggcttagggatgggtaatttcgtaatttccttagtggcaagcactgagctgccttatgtaatgagaatgttagaattagttctgcaaagtttgagtctcaatctttgcataactttgcatagctaattctagcattctcattcattacataaggcagctcaccactaaggaaattaccaaattacccatccctaagccaactcagcgctaagctaagtttgtctaccccttctagtgtaggtaaaccttaccgtaggcctaagatgcttatcagaaaaactttaaattttactattagaaatcctaaatctgtatttgattgcttggttcaaagttgattgcaaaggaaaactttacttctcatatatgtatatctttttctttatataataaatgcctactagatgagaatttgttgtgtatttctgtttatttagccgtgtaaaactgaaactgttaattagcattatgtttgattaacttgtaactcttcaaaactgtgcaataaaaaacaggggttactctgccagtcaaggttttaacttcccactttgctgcagtactctttatttcgctttcttttttgttttggaatacaatctgattttcactattgtaggttttcaagacttggtaaaattgaattttttgcaattgattttaagaatagttaagcattacacttatatgtgacaaaggttcagtaattatattttccaatgtcactgtactaatatagagaaatcaacatagacatcatgtttgtttgctgtcatgaccagtgatttgtaagtgttcagcaacaaataatattgcatgtgttagttgcttcaatatgctactggtctagaaggccgatgcttcaatatattttttaagtggcattagctctagtatatatatattagtgtgctgatttatatgccgtaaattttttctattaaaatgatttatgtttgtgtgtggatttggttcatttatgaattgagatgtctgatgcttatgattttgacatgtttactttctctttgtttaggtatttgaaatcttgaccaagtagtatttgggttcatttatgtattgagatgtctgatgctgttgtttttggcatgtctacttatgttttgtttaggtatttgaaatacttgaccaagaagtatttgaagaagcacaatgttcgcgattggctccgtgtaatctcatccaacaaagatcgtaatgtttatgaattgaggtatttcaacattgccgagaatgagggtgaggaggaagattaaacctctgtaatattttatttgttagaagaacttaatttcctgttgccagactttcctttgttttagtttttccaatgtgatggtgttttcactgaaaattattatggttcacaattttgttcgctacgagattttaaattattactgctgtttgttgaccgatgagaatatattagcatgttttgatcacggatttgatctgtagtgatgcttctatgtttctatagtttcttgtatcaagtgatgtcgttaatttggtttgccgaatcaagatgttttattttgttacttgttcatgtaaagcagtgcccatattaccgaaggaaaacatgattttgttctttttcatttttgagctagatgacacattggtatttatctgcctgtgtatgcgagcaagcatgaatgaagtttagccctttccaagaaataaaaagaaaacatcaattttagtctatcttaatatctacaccgtttcaaacgttatcggagcgtgactgtctccaattcgcaagaagggcaatgtgatcctccttgtccttgatgacaatttttaaaaatgttaagcttgagaagcatattttactacaaaaatattaagatccgcttatcgttggccttctttgttttccttttagttacaaacttaccagcattataaattttctgtgaaaattacttgctacgtgaccagttatctactcactgccttggcatgagtcttctaaccatccgtttgttatgcctaaacaatggcacacttctttacttgtcaaagccatttaccaaatttttgcatgtatatattgtcaaccctgtaaatttcaacaccataactcatcatctactaacattatcgacatggagttcttccttgccaatgtaatatttgtctttagccagctcaagcttctagcagccattctcgccatagccactgctgtatatctcttctacaaaacaaaacgtgtatatctagttgatttcatgtgttatagtgcccctgatgcttaccgagcccctacatctaccttcgtagaacacatagaaagattagacaaattcaacagtgagactattgagtttcaaactaaagtcttgaaaagatctggtcttggaagcaaaagctactttcccgctggtattcatctgtatccaaccgatcaaacccttaattcagctgtacaagttgaaatggtgctcttttcagtagcacaagagctcctttccaggcacaaaattgacccaaaaagcattgatattctcataactaactgcagcgtcatttgtccagctccctcttttgcttccaagattgtcaacaagtttggtttgagaagcaatataaagagcttcaacctctctggaatgggatgcagtgctggactattatcagtttctttggctgaagacctcctcaaagttcatgagaactctctagctttgattctgagtatggaatctgtttattcaaatatctacaatggaaaagtcaagtccatgttgcttgctaattgtttgtttcggatgggtggtgctgcggtcttgctttccaatcggaaaagagacaaaagagtagccaaatatgaacttaaacacttggtgagaagctatactggtgccaaagatagttattacaaatgtgtaatccaggagccaggtaaggatggatttactggggttaacttatcaaaatcactcaagcaagtagcaggggaagccttaagagttaatatggctacacttgcagtattggtactaccctattcagagcaagtcaagtacgttttggcaattgtttggaagaaaatttggcccccagcaaaaaaaagagggccctatataccaaactttaagaaagcgtttgagcatttttgtattcattcaggcggaaagtcagttatcgaaacagtgaaggagaaactgaagttgagagaaaaggacattgaagcatcaaggatgacacttcacaagtttgggaacacatcctctgcctcaatttggtactcactttgctatcttgaggcaaaaggaagagttaagaaaggggaccgagtttggcagttgtctttcgggagtgggctcaagtgtaacagtgcagtttggaagtgcatcaaacatcttgaccatgaaagttctaatgtctggtctgattggatccacaggtatgcggtggaagttccagatataatgga

SEQ ID NO: 76548 - DNA, 4396 bp, Cannabis sativa
ttaaaacatgtatagtcaaattttcttaacaaaatgagaaagtcttccaaataagtaaaaatagaataaaatcatataaaatgctacataatatcttataatttttttttgtgtcatcctttatataaatacataaatatataaatttatagataaaaaattcatagttgattggatacaattaaactatacattaaaattacatgtactattggatctacagtagtaaatataccagcagctaagttcgtttggatcttgactttcttgttatagtgaatcacaatacctataataacagccataagattaccattttcatatcaatatgtatatagtgacctttctttggaattataaactcaaatctaaccagatagtgactaaattattggttttgattactaacactagaaaaaccttatctgaaatgttaccaagttagaagcttcttttggtgcctctcaaaaggccaaaaaccattttcctccactcataacatatacccctatcttcttagcaaaggccaatatttcatttgcccatcaaccacaaatttttttttttctcctctccaaagataaaaataaataataatattaaaaaaaaaaaacaatttcttatatttatgacacctcgattaaagacatcacttctctctcatttcttcaatagtgatctctttttacagacataacacactctcaaagcttgctccaagtaatttttcagcagtcctcctcaggtactctttttggaaccaaatttatttacaatatgtttgatttaattaatggaaacatgataattgtgtactaagctttaggtgattggaggttcaaaaaaacttctcagtggtcttaatatgtcaataccctgctttttagactatgatatcagcataatctcactcttgtttttattggaaatttcattcattttcttttttttttatatgtatatttttttactctggtttttcactcaaattgacaagtgggttttgtgatggcgggtagatctgttagagatttcttgtttgggtttggtttgattattgttgtttaaagcttatacataatagtgtgcagtgttcacacttttgtcacggcatttcaaaaggcaatagagaatagataaagtaaaaggataagttaaagtgaacaataggaaaagttgacaactttctatctgggttttatatttagcttccatatatatgactggcattgtataacttgaggcttttggctgtgttatttctcagtgaggattactatcattaggggaagatggcacagattttggcaccttctacacaatggcagatgaggcttaccaaagtctcaactgatgcaagtccactgtcttcaaagatgtggagctctctagttttgaaacaaaataacaagagaggtgcaatgaaaacttctgctaaattcaaagtgttggctctcaaatctgacaacagtaccatcaacaggcttgagggtttgctaaacctggatatcactcccttcactgacagaatcattgctgaatacatttggtactgctcacttctttgctgacatctgtatcctatagcacctgtaagctatcttgtaatgaacattaccaggaataacaatgtcatagttttttggtaaattttttgttcaatgcactaaaatgggaaagtcaaatatgaatgtctgctcatttaggctattaggatcacatgactttgtctctcatagttacatgtgaatgcactcctagaatgtaatgacattgtgtcatttttggaacaggattggtgggtcaggaattgatgtccgtagcaaatcgagggtacaataccaaactctgttaaaacattcttatcaatttgtcaaggattgatttcgtaagtcattttttaacatgttattatcacattcttgtacaatcttttcagacaatatcaaagcctgttgaacatccttctgagcttcccaagtggaactatgatggatcaagtacagggcaagcaccgggcgaagatagtgaagtaattctatagtaagatctcgaaaacagaagctattattggtgttggatatgtattttattatacaaaagtttccatttacacctctttttttgcagccctcaagctattttcaaggacccttttcgtggtggaaacaatatcttggtaagtatctgaagatcaaacaaaaattacataaaaagtaaaccttgttaatatcaaaaaagtaaataagaataaagtaagttctgtaatacattttcatctacataggtaatttgtgatgcatacaccccagctggtgagcctattcccacaaacaaaagataccgagctgcagagattttcagtaacaagaaggttgctgatgaaattccatggtaatatttacgttgagataagtatgtatgaatattttgagcaatcacattctttacctgacaagtgtatggtcttatcagttatcatcaatggtaaatgtgtgtatatatatatttatataattttcgtatatttaaggatggaaacagcttgctgatatctatgacaaattatatataggtatggaatagagcaggagtacactttgcttcagcaggatgttaaatggcctttaggttggccagttggagcctaccctggtcctcaggtagtaatctaaatcattacttctatggttatcagatcatattaatttagtttaagaaaatcaacatgactagtcacattatatggtgtttctatgattctatcagggtccttattactgtggtgccggggcagacaaatcgtttggccgtgacatatcagatgctcactacaaggcttgtttatatgctggaattaatatcagtggtaccaatggagaagttatgcctggccaggttttattctcttaccatatgcagttttgttctgctcataaatatagcctatataattactgtatgtgtctgagcttatgttgccaacaataattactttgactaaaattcagtgggagtatcaagttggtccaagtgtaggaattgaagctggagatcatatctggtgctcaagatacattcttgaggtaaatcataaaaaatttcattctaattaatttttttccaattctgacatttggggtacaatactagtttctttattctcaaatgctccttattccatctgatgacagagaatcactgaacaagctggtgttgttcttacccttgatccaaaaccaattgaggtattgtgttgtgattcagaacataatctagtctgttacaaaacatgaattctatgtcaatatggatagttaaatataacattttcttactttgttcacctcaacagggtgactggaatggtgcaggatgccacaccaactacaggtactcaaaaaaactcgattgaacaaaatgagtaatttttattccgggaattctttttgtgtgagtgagtttttctagcaatattgaataataatttgttttgtagtacaaagagtatgagggaagaaggaggctttgaagttattaagaaggcaattctgaatctgtccctgcgccataacgagcacattagcgcctatggagaaggaaatgagaggaggttgactggaaagcatgaaacagctagcattaaccaattttcttgggtatgtactgaaaaatatactaattttctgatgtgagcttggccattttttgttgcacattgtgaaaaaatgcatccataaacactgctaaacacaatataatgcttattttattcatggaagctctaaaattttaacttgcagggtgttgctaatcgcggttgctcaatccgtgtggggcgtgacactgagaaggaaggaaaaggtaccactattaacattttattgtattagcatgaacttttttgaagtttatgcatcaaacactgatcctttacatggtgtttggtaaatgttgtttaggttacttggaagataggcgtccagcttcgaacatggacccgtatgtggttacctcgctactggcagaaactacgttattgtgggaaccttcacttgagtctgaagctctagctgctcagaagcttgctctgaatgtctaaatcaattcattgacaataatctgaaggggcctcaaaatgcaatttattaaagacaaattcatccaaccactttagagctatctccttctagatcctttagggaatttccttgtgtaaataaaagtcttgaagtgagtagttccacatgcccaagtttgtacaatgggtttcccatattggaatgaaccttgcagattggcatgtcttcaagacttaagtttttcactttcacatggaattttattttggacatgtttccattcaatgccaggaccccatttaagtttttctgtt

SEQ ID NO: 76549 - DNA, 611 bp, Cannabis sativa
agctattttatgcaaagtattatagtgaggcagtcagtagtgccaagagaaaataattcacgcacttgacttaaaagaaaaatatgacagtcacggaatataccatagagttcgatagattggctaagttagcttcgagaattgtgctaactgactttagtaagaaaaaaaaagtatctggatgggttgaattctaagattaaacaggacctgatgattacaacggatgatgccactacttatgatgatatggtaggaaaagcactcctaactgagggcacagttgagtgtattcaagagtcccaagggactcagattattggtggagacactgctcctcctacctctagttatggtagggggggtaatgactcaaccactaaacaaaagagaaaaatttcatctgcgtctagtggcttgagccagaacaataggttctgagggaactaaggtcgtgttaaccgtcagggagggtctgaaagccgatacactaaccaaaatgccccaactataagaagcatcatttgggcaagtgtagaggtcgaggatgtttctagtgtggtgtaattagacattataaaagagcatgcccacaactaaagaaggaagag

SEQ ID NO: 76550 - DNA, 771 bp, Cannabis sativa
aaataaagtaactaatatagaatggagatggaatattttacgtggttcatgtgttaattaaccctagtctacgagtcccttgtatttagctgacgacccttgatgtattacaatgtgattttacaagctcaagaactttagcttcttgctatagtgttttatcactttctagttttctaaccctcagattctaatcccttgcatgaaggtataaaatggtatttataggctaggaattgggttcgggtatactcgtgaaccgctagggtttctatgtaaataggcccactaattaggtaaatacataaaatacatgactatagacctactagcagaagtccatctcatggggcaaaggcgttccataagcttcgggaccatgcaatccttaatagatgttaaatgcacaccgcatatatgtattgtagtgtcaagtttgtgtcatttgacaaaagggaggtttcctattggtggtgcgtgcactcttatgctttggcacagggaaaaccctggttcggtgggacagggtgtgagagggcagccacatcatcctatactaggcttctgaggtgccttttggggtaccctttttggacgcatgccaacgcttgtccagaaagcttcgactggtccaaccagttcttggacccagataagtctcgtcttggagtcgagtcctctgggctttggatgggtgtgtgggtcggacctctcctcacggaaaggcttttagctagaccatactgtgcattatggcatttgtttgttacc

SEQ ID NO: 76551 - DNA, 1480 bp, Cannabis sativa
  modified_base (447)..(449): a, c, t, g, unknown or other
atgcttgtttaaagctacttttatgttcactaagttcataactttaggtttaattgcaattagggtgaaactacataaacaaattcaagaaaaatgtgcactaaattaagcaagaaataaattaagataatccttgtatgttttgaaaagttattaggacatatgatcattatttttagaatgtttggaaataactagaggagtaataacaccctatacaagatgaatttttatttttggtaaacaagttgataataacataaaaataatattatataataattaattttaaaaatagtcatatttcttaatacatcgtattgtttgtgggggagatatttttgggtaaaagtaagacttagacacaaacaaatggattatttacaccacatactaaaaatgttaactatttttattttttactgtggggcggaattttttttcaannntactgtgtaagttttatactgttactgtgttaaattttgattgttgctcttttttcgttgttccactattgtttttagttgttctgttttgtgttccactgttgttttaaaaaaattccgtgtgacagtatttttataaaaactaacctaaattccattatttttataagtttccctaaataaattgcacctaagacgaattagcaaaaactaaaagaataaggctaagatacacaatacaacaaaaaagaaagcggggtatagaatgccttcgatctaactaataatctaaccaactagaagacagacatatttcagatacctcaattagcctctacaatcagatgaccaagatatttgaatatctcggtcgcttgaaagggaactaattaaaaaaaatctgaaactttgttaaagataaatgttaagtttaaaatcaaacatatcaatctacaaagaggttagttcaagttacgaaatgacaagagcaagaccaagtattaataaaaaattatataataacattaaggaggaaaataaaattagataattaccacaatacgtgtcaatttaaaataaaattagataattacgaaatacatatcaattgagggtaattaatacaaatgtagtatattttggccacactcaattatcaaaagaactacttcaacaataactacaagaataagctccactcatttgttcttcttcccagtcgaaattaattgtttcaaaatatatataactcaaatggaagagaaaacaaataaattaaatacgaatcagtgaatggaatcaatttctattttttaacaaatcgagtactctacaaaagtgatacccaattctccaagaacaccataaattcatattggtttttgctcattgagttggtataaaaatagaaaaagaaaaattaagactaaatagtaattttttcctctgaactttgacatatatcaaattatgcccactgaactttttttgccgttaaaaattccccctaaactattgagattgttaaattt

SEQ ID NO: 76552 - DNA, 2899 bp, Cannabis sativa
aaagggaaccaaaaagaaaaccctagagctctcaaagccctcactcaaatcgccattgaatagaaaggggttacctaaaacagtaccgaaggggaacaaattgggctgcatttcaactccaaccgcatagatcaaagcgtgcaaagtccatttcaggtaggtagataatcaagttggcgaagatctagcaatggagtggagtttcttcttcttcttcttcttcggcttcgatggagttttgggatttgtagactttttgtagctcagccttgacctcactctctctctaactgttagaaactactatttacgaattatctcagtctataatttttgtataaatgcaaaatatataatccctaattattcaaagaaaaagaaaaagatctcaatgctaaaaatagtgtaatttatctatttgtttttcacctaactttataaggtttcaaaatctaaaatccgtcgtcatgtcaaaaaaattataatcgaaaccaatcaccaaattcggtgataacatggaaccaaaatttcgattatggtctggtcaatttgattgttggtttcgattgttcagtttttactttcacccctaatgtaggacaagccctcatgtgagctcactacaaccactagaactagaagttatagaaaatggtgtgtgcataaatcgatcaaatccaataataactgactgtttaacattggatatccaattgtgatcagattatattgaactttacttttaaatatccaattagatcagattggatatccacaaatccaatacatccaacgtttaatcaaactaatcaatatttttatttagtttggatgagtaattaaattttatgttaatatacataaagtatgtatttatatattaaaattaacgttgaaattttactataatttttttttggattagatctatccaatccaattcaatccaatacatactaaatctaaaatattagatggatttgatctaaaaagcattaggtttaaaatattgaataaacctaaattaaaccaataaatatacatgaaaaacatctaatagattgaagtgatccaatccaatatccaataaatgttagatcgattggatgaatgaagttaattgaatttgatcagatggtaaaatttaacattcagtatataatttaatcggatctgaatatgcttaaaaacattgaatgtgatccaataaatacttgtacaaattactttacatattaaatctaagtctcatcattaacgtcaatgaatacaaaatatataatccttaattatttggaaataaaaaaatcttaaaaataggtataatttatttttggttaattagtttttttttttcacaaactttataatcatgtgtgttgcacaaatctataagtaataatagtgattaatatatggaaaaaaaaaaaattcttcttcctaaatcttaagtatcggaggttgtcttttttctttggccaagcctgctggccttatttgggcttaagtgcgccttggtcggggttgcattttgctactgcgattagtcttgtctttgtgatatgattttgagtattttagtattgtctctataacttggttttgagtgtttttatcttgtatatgtgtcatggttttgttttgtttattttcattgttggttcctctttgttcttcaatgattcgtcatcaaatcgttgttaatggttagggataataagttatgtggaattgaaaaaatgttgttagtagtgcagttacataccttgcataatagttgagtgctcaagttacgaggttgaatgagcggtttctactggcgtgtcttctaaaaagtagatgaaactgaatatatgtatttttaaagctaattgtaatgctacaatctttttcatctaattttattttagttttttttttcgtcaaataatttgagaattaggcaattgattatttaactcgtttatctaattttaattatggtcgtgtctccaacaaggaagacgttccgattagattgcagtatattattttagttaattgctattaataaaattgcatgatttatctaaacaaaataatagtaaataaatcgatatcatcccacacaaattaaaagtaattaaacaattaattatagggaataatagatctaattttatctaaccaatcaattttgaatggtattaaaaaattaaaagaaaataataaaataaaactgagaataatcaaaaacaaaaataactgtaaatgtttcgatttcactctaatataattatgattttaaatattcatgtacttagcttattctactagtttgaggaacctgaagcattattgtatttctaaggagtgtcccatgaaaaaagtactagacatgtcatcttggatgggtcaatcatcgagaagatcttcttcgtgggaaataatatttggaagctcgggttgaacaactagagaataagaatgattcgttagagtttgccctaattacatgcaccatagtttttgagatgaaatttaattttcctctgataccatgagttgatgaaatataaaggtagcgtttggttgggagaaatgaaaatataagaataaaaataagaatgagaattagaataggaatagaatgaaataaaatttaaaatatataaaaaattattaattttttttaaatcttgcattggaatgatctttccttccatttcaaaatagaataatcattttaccaaaatgatggaaaggtcattccatcgaaatgatattctaatagatttaaatgcaaccaaacaaaataatgaaatgaaaattatttcatttccattctattcaattttgttacctcaaaccaaacgccaccaaagtgaaaacataccactccttactaacaacacaaata

SEQ ID NO: 76553 - DNA, 700 bp, Cannabis sativa
ccgggatgggtccagagagattgttgaaagagagttgaatgtcttctagatttttcatctcgctaagaaagtccgggaccggtcccgatagattggcccagctaactacaaggaacctgagcttgtggagcttggttagggctcgtgggataggtccggtgagattgggttgcttgtgaagccataagacatcgaggtatggaaggtctccgaattgagaggggatgggtccggaaagatcaccggagaggagcatgaaggaggtgatacggtgtgtggtctcatcgcatttgagggagtctgtccagtcagcgcagcagtcggtttttgggtcccatctggagaagacacgtggattgttgaaggcttgcttaatttggagaaggactttcttgtcttctgggtggcagagctcggattgacaagggtagtagaaatggacgaaagtgatgaagaggataatgggaattatgttttggatctccatttttaatggcagagatatttgatgattataatggttggattatataaggtttttctttacttttgtatttggatcataagagtggacaaggtgtaataattatggaaatgtgcacagcaagtgccggacaataacattgacttctttccacccattaaagataaggttgaagacctatttacatactagaaagcatatatatgtgattatata

SEQ ID NO: 76554 - DNA, 1991 bp, Cannabis sativa
  modified_base (82)..(86): a, c, t, g, unknown or other
agtccctcatggacatctcagcttccattggaaatctgagtatatgtgtcctctaaataggggtctggtctcgagtttctannnnngagaaatctcactataacatctttgaaactctgcttaatctaatcacctttactacttccttttttgttgtggcttttttcttcgaccaactgctaacagtgctcagttgaagaataagtgatccacaatcttgacatcactatcacacgccaaacatagatcattatctaccatgttcatacactggagattatcttttatcctcaatctaccaagcataactaacgacaacatgaatttgtgcatcagtatgctaagcctctcccaaacttctttcctccaatcaaccttattttgattcaatttcaacttctcatagccctagtttgtctggtcatacttgaagtgaaactttcaactgctatccttcattaatacatattttctctagtatctgctgtttgtggctagagtttgtacgcccaccaatttgaattacccaagtacacattgccatagagagattttctataagaaaatagtttcatattttttttctcatatatacaaatgaggtagatagtagttttttttcttttttgggaaggggggtcatgtgctatggaagagggcatatgaagaaataaaaacaaaattgaaaatggaaaagagacaaataattgaaagaaataaaaattgaagaaaaataatgacaaaaaatatttgaagaaatatatataaaaaaaaagataaataataaataaaaaagtgttgaaatgaaaaatgtaatgaaataaaaatgaaagaaagacaaataaaattacataaaaagaaatgatagagagaagaaagaaaaaaaaaagatggataatgttttttaggaaaataaagaaagacataaatttagaaaataaaaaaaaaatattatgagaaaataattacttttaagaaataaaaatctcatgaaatattaacttttgaattgaaaaaaccatataaaaaggtaaatactatatttttataaactcctaataatttatatagtgtttttttaaaaacatgattaattaaaaaaaaaagcatgtttaatttctcaaacactcattatcatttatagtgcaaataaaatatatttattcacaataaaattataattttcgtgtaactaatattttaatttaggaagcatcgactgaaaaatttcagaagaaggtaatctactcggtttttcaccaaatcatattaatgttgaagcttatataaggggcatgtcgacatggcgcctaactggcttctacggtgaaccaaacagaagacaacgggattgaacatggactattcttcgttcattgcacagcgagtcgtctctcccatggtgtatcatcagtgattttaaaaatatttcaacccaatctgacaagagaggcaggcgtccgtacccaacttctcttattgatggtttccagtcgattcttgatgattgcaaccttatgtatctggacctttcgcgactatcctttcacttgggatcgtggacgaggaacaaacaattgtgtagaaatttgcctcgataaagcaactgtctctcttcgttagttagacacttttactacagctactctcaccaacattcgtttttctagttccaatcatactcccatcttcttacaacctgatgcccatcatagtactatcactgctactcgtttttgttatgagaacgcgtggtctcgagagcccatttgtgcacagattgtaaaagattgttgggatatgcacaagcacctatccctctttgataaaataaaaatttgtggggataatttgacgaagtggggttcggatctcactgataatttcaagggttgtatttctaccagtaaaaagaaaatggcacaactaaagcagcaccataattttcccttgaatgccgagtttgttaatgaacaaaataattactttga

SEQ ID NO: 76555 - DNA, 1419 bp, Cannabis sativa
ttgaaaaatattttcacttttctacttttaaaaacaaaaaactgattaaaaaagtgttaccaaacggcacctatataaatacatattagtagagtagtactatatctaaatcatatatggcgcgctcaaaaatagtgcggatcggataacatcacatattccctatgccatttttatgtacgccacgccaaatcaatcattaagcaatttctggaattttatcagatattgcgatattcttttctagtataattaagacctcttgcataaaatttctcaagtacacgtggtagtactagtaggtagaagtatgtaaatatatatttccacgaatattaacaacatatatacacagaaaatgaatacacgatcatgttatgaaataacgaaaaaatatatctaacgaataatgaaataaacaaattaatatgcccaaaaatctgaaacaaaattttgataaatattaagcacatataatactgtgacttgtttaaaaaaaaaaaaaaaaaacttaataatgaactggctgccacgtgtcatcaatttgcggcatctccctaagcaatctctcgaaatctttgaaggaaatatttgtggtcaaagttgttgtaatatcgggtgcagtagcagtagctgatgatgatgatgatgatgaattataatgatcggtagtggagcgcgttctgaaggctctgtggccatcgtggccgtcgtcgtgatcttccaccttggaatcttttccggtcagcttctgtaccacatctttgaagcctttggcgtcggtttctacgtattgggtgttgattatcacaacctttgggggtttgttactattattgtctcttcttggtgtgttataattaccactgccggacatggtgacaaagtatataatatatatatatatatatatattcctctctcttgattctgatgactaagttgttccaatcgttgagttatatatatgtatataataattgaaactttcttttaagcgatgatgatcaatgaaatgatgcatgtaataataaatgatacttgtacggaatttatattattgagaatcagaaagaaattattaaagaagtggaaaggatcaatgaagtaagttgaccgttgttttgtgtcggtctcggtttaattaattgatatataatttggtcaaaccatgcagttgactgttgagaaaatcttctctaattaactgctatatatatcctcttataatattgactttgtaaagaatatggggaaaagaaagaaaaaaaaaaagtatatatatggatgaatattatttattatatgaaaatgggtagatctgatattaaataggctaattagattttttactagaattttaacatataccaaatcatataccaaattatgttctttgaatttttaaggttgttaaaa

SEQ ID NO: 76556 - DNA, 1213 bp, Cannabis sativa
atcaaaaacaggatatattttctgtgctgaggtagttgcaagttgaataaatggaagctgcagcagcccttacagccaattccctctccgagttatccgatttctgtgatctgaattcactatccagttttcccaacctatgaataccacccattattgtactccagtgaatgtgttgtaaacctttgtcacaatgcatttgcatttcttttacttgattcaaccagctttcctgcaacggaacaaaaacacacgtacaacacatgagacttcgaaagtaaaactagcaactgaaactttgaaagcaactaaccaggtgtttctcttcttcagaaagctctttatccattccatcgaacagtttaccccaccttgctcgatgcacgtcagcagttgctgctgtgcttttcattgcatgcagattattattgtcttcatcaagtgaaaattcctttgatagcaagaacggcaactctgtagtaattacagctcgaactctcttcttactgcgtcgcaaggctgcaatgcaacaacattacagagtaaaattccactcaaggcatgagaatatggtttgtggctatcagtgcaataacactacaaaatatttagataaagggtttaccagaaaggcgtcctttaatgtcttgttgtagaagatccaaccactgagaagcaaccgtggcagctgagaaacattgaacaaaaaatgtcattgacaagtcaagcattcattctatataaatagttttaattgtccaaggaatgaattaaaagaagtgggtgcagaaacaacagatcatacaataaaatgaataaattaaaataataacctttggcagaaagatgtgaagctgaatcctcattagaggtggagttctcattctcagacatcttagttgatgatgatagctttacagccagtgcatcgtcctcatttacaacagtagattgcaatacaccagttatatcggaaaacctatcttccatggtttggtcactttctccttctttctcttgcttaaactgagtacatttaccaatagatatagggtaccctcttgtttgcctttcccaagagaaagcgcttgatggtttatcttcaagggacaagccattgtcttccgttcggtaacaaatttctttagttccgtttttggtatgacttccttgtttgtttcctaaatgattgttttcatgtttctcggatctt

SEQ ID NO: 76557 - DNA, 1054 bp, Cannabis sativa
atgagggaaataataataagaatattattaataaggtgaagatttttcaatcagacccatttgattatcaaagcataatcgatgcattgaggggttgttctgccttgttttactcattcgaacctccacaagatcaacccgattatgatgtatgtataatattattattattaattattaattttcatgattttttttttttaaaatataactatataattaataatgaatactaaaaattatatatcttaaagaaaaaaaaagtgttggagaacagcttgcaacataaatacatttgtagcttttaatactatacacccatgtgtagtaatgtatagctttgaatgaagtaataggtgattcttgataatacattagctgtcatatgtggctaaagtgactttttatacatgcattaataacattatttaattatgagataattttacaaatacacaaaaacaagaaaataattataaaaatatagtttcacagaattttaaatattttaacgaatttattgattttatttacataaaatacagtttttttatattttattcgtattaatttgttgttaatcttttattatctgtataatattttttgttattgtgttattttcacattacttttatgtaatttttttgttattttcgtattgtttttacaagaaaccgtaaaaatataaaaaaaaaaatcattaaatgtaaaaatataattatccctttaattattgccacactaaaaataaaattaataattatttaattatattttaaactttatgcatgcaaaatctttatatatattacataaaaaaaattatttaaaaacgtatttagatttatataacttaaaaaaataatttttaaaaaatattactaactaattataaaatatgttattaatgctaagcaagtgcttaacaatagtcattgcataactatatgtgtttttttttttttcatcagtattatatatatttttgtaaggattgcataactatatttaatgcaattttgtaatgatattaattaatgaatatatacat

SEQ ID NO: 76558 - DNA, 842 bp, Cannabis sativa
ttaattgagatctattatttaactacagagaaatgctaaggacacccttggtcccatatcgctattagtataattaagtatcagatcttatatagtttaatataataatttttataaagtatcgcttcaaagtgttaacaccactagtgcccaataataatattcttaactgcatcaatagctatatgacatacaataaagtgttagacattattaataacttctagtatttctccattataaattaaagattttttatttatttactttttaaagaggctcatatgagaaactaatgaaaaagtctcaataattcagagtatatgggaaaagtgaagcattgctaaattataacttatattattttcttaaaagttgtgatacattttacaaaaaaaaaaaaaaaaattatgatatatttttattaatttttataacaatatgttctaatataaagttgcaaaacttaaaaaaaaaatttaatgtttaattaatgattttattaaaaatatatataaaaaataatatttttatcattaattttagaaagaattgcagctaaatctccatatattttaattgttacacacttaactctttaattattttttttagaaatgtcattttatttgtaaatttattattctgtccattctttaaatacgattagtcctaatcacctaattattttacatgacaaatttaatattcatgtggcaaactataaagtacatttaataatttattaaaaaaattaaaaggttaataactttatgagatatttgcggcataaatacttaagttttatgccgagtagcagataaatacttaagtcctatttt

SEQ ID NO: 76559 - DNA, 1858 bp, Cannabis sativa
aactaagcgggctttacaactaggacctctaccgtcaatggtccctctagcttctctagttcttctagcatcactaggacctctaacatcagtggtttctctagcactactggttcagtctggatgactacaactaatacaaggtgtttgacaattttctctacatggcattcttttttgtgtcggttgcctgggtggtattttgtacgatagtggagtcacattttaagctacaacaacatggacctctatatcttggttgtctcttacgtcatcattgcctacataccattcagggtctggaccatcaccaaaataataatgaaagagcatttttgttacaatgtcaattgtcagtatcatagtgtttaatttaggtaacacatcggtcgccaacacctttgggtttgtttctggaacaaaaactcccaacctcactacgagtatccttaatagtacttggtgtgggactaggatcgatacaaatatttttcttcaccaaagtcacaaacaagggggtaaatttatctggcttctttgtaagcataaacaaaaataagtttatacgcttgtcattttcaataactttagggcgatacattaagcctttcatgtacttggattcacttccaatttcaagtcatgctgcactttgtcaatatcaagttcttcgtacaaaagatcaaccaaatgtgagtagcttacgttcctatcaatctcgaatgtcaaatttttagctcggttatgaacccaatctctacccttaagttcccagacaccattatacataacgaacaaaaaaatacttgaacctgtcatccgcagacatttaaatataattaaaatttagaacaaaaatttaacaaaaaagtgataaaaaaatcctaaaaaagccataagtctgttaagcatcaaacacaatcgaacctatatcggaccccatgtaataaatttcaacaaaaaactattggacataaccatcggacccatatcgaagcaatatcagaccccatataataaattccaacaaaaacctataagacacaaccatcagacccattggacgtgggatataaaacaaaattctaagtggcatcaggcttaatatcggactcaccattgggacactaaagggcattgaacctatatcagactcacccatcaagcctatttagacatcatccctaaccttggaactgatctaacaatcagaccatcatcagaccactatcaaacaccatcaggctagacgaaaaaagaccaaaaaccaaaaaaatgcagaaaacttaaccaacaaccatttccatacaaaaaacaacataaaaaagcaacaactaacaaatcgaccatcaaaataatattataaaataaatataacaaccaacaacaaaattaaacaaagaaaaatcattacccattcaattcgtatattatgttccgtccaaaaaaaaaaaaaaacaaccatcaccaaagcattgagtttgtattaaaaatttatgttatttagtaatgaaatgagtgaagagaatgaaatttgtgagtagataaaattgagagatgagagaggagagaagagagaaaagctgaagaagagaagagagagagaggaaaatactaattttttgggctgtaggagtattatggggattataattaaagttagtcttttaatattgcacaatatgagtttagaagaataatttcccaaatatatgcatgaaaagttgaatttctcaattaaaatacatcacacataaatatgatatttaatagaagaaattacacttactatgagattttaaaagttgtttacttaaatatgacacttttaagtttgaccaatttatatgatattttt

SEQ ID NO: 76560 - DNA, 950 bp, Cannabis sativa
ataaacctatttaaagtgaaattagaatatcacatcacctcgtacttctcccatatataaattaacggtgcatggactatatatatatatatttcatcgttttacaaatttaacaacatattcttttttcgctacgagtctttattgatttttttttttttttttgagcacaaacacacaaagaaaaggattcattataaactggtaaaatatcattaattatgtccttatttagaatttttttttttgttcccctaggaatatttattaactacttatttgactaataatggaattattatcccctcttcttctttgacttcttgtctcaacacatttgttggtcaaactaataatttattaatatatatgtttctttaactatatctttttattttttgttgaatacataacagatcgacactattggtttatgcttcaatttaaaaatgatgacaaataatattaataaggtttcggataaagttagaaaagccaccatggaaagagcgaaagaactaacatcagggtccgaacttgattttcccacattcttgaaatcaatgaacccttctaatatcactgagggattctggctggtacataatcttttgattattacttttgatataaattaattagtgtattatgcatgcatgaaattatatatattatatataattataatcaattattgttttaattaatttgtttttaatcctcattaacaggcacttccgaatgatttttgtacaaagaacttgtctaagaaagatgagattattacattaaaagataaaagaggaaatgaatatgaagctaagtacttagctgagagtagaacactgagtaatgggtggaaatcatttgcacgtgatcattatttgaacgatggggatgttctctgctttcgattaatacagcctttagttttcgaggttagtgtaatt

SEQ ID NO: 76561 - DNA, 599 bp, Cannabis sativa
gcttggggaaacatgtttagccagatttagaattgaagaattatttcaaacttaaaaaaattaaacatacgtgtttcgcacgtatctttaatttagtatgtataaatagttaaataatataatataaattgaatagaacaaaaagtaaagttgagacaaaaatttacaacgatttgtataatgcaagaaaaaatttaataacaaaagaaaaatcaaagagcaaaactctacaagaatcctagttgaaaaaacaaactcttatttattttatgcaataataaagtagaaatcactctttactcttctactactttagtgtaaactaattttattgtcatattgtgatattttattttgtgatggaaaaattggaataaactttatttgctaagtaagaaaagaataaagtacataagattaatgtaagtatatattttgtatatatatgtattgtcacccatattcttaatttctagtgctacatattcgttatggccataagattagtgtctgtctgggctggaatttatacaaagtaacacatgatcattttgttaggaaacttacaaaaatacaggaatttgggttaacttttacaa

SEQ ID NO: 76562 - DNA, 2592 bp, Cannabis sativa
cgctagccaatcacaacgcgacatttcaagaaagtgctagtcaccactggtgcctaataggaatgctccttataaatatttattcaaagttaataaataatattaatagttggcaaaaagataattaaaaatgtagtatttattgtgttctaacatttgtctcgtgctattttttatgctaaatttggacataatttttagcttgggcaaaatttaaagtataatttacattaccattaattttaataaaatattttaaaaaatgacaatacaccgcatttataattctctcttggaattaaattgatttaacagtgggacaccatcttttaaaaagggattttgttagcacctataaaaagcatccacattagtcattagtgtcatagtgtgtaatgcacgtccgtctcgttttttgaatttgaatcattcaaagtaaacgtgtgtagtattatttattccttttatttttcgtaggaacgtcggtagtatttgatcgatcataagaaactagaggaaaatcttcctcatgtaaatcacctaaccgactatttgcaactcaccatgtatatatatatatatatctgtcaccactcgcctataaatataatatcataaaccatattatatatgtttatatatcatagcccatgtcaggttattgcttgtacaatttacttgaacattaaacattatgaacgaaacagagtccacctagcttgttcattgtactaaccccaacaaatcgattaattgtttgacagaatccgattcctgcaaaaaaaaataatggcagctttggaaccctggaaacaaaaacaacagccccactttgtgttaatcccattaatggctcaaggccatatgattcccatgatagacatggccagactctttgccgagcgtggagtatacgttagcctagtaaccaccccccataatgcctccagattcgagtcaatcattactcgggcatcccattccggactcccaatcaagctcgtccaattcccattcccgagccaagaagtaggcctcccaatcgggtacgagaatctcgacagtttgccatctagaaacctcttgggacaattctacaaagctctcaacatgcttcagaaaccactggaatcatacctagaaaggaatccgattccgatcacttgcatagtctctgacaagtgtttgttttggacttctgaaacagccaataagtttaatattccaagaatcgtttttcacggcatgtgctgcttttctctcttggcttctcataacatcaagctccacaacgctcataattcggtcaattccgattccgagccattcccgattccggaactactgcctcatcgtcaaagaattgaaatcacgagagcccagttgccaggagcgttcgttactcagccagacttggatgatttccgagacagaatgaaggaggccgaaacgacggcgtttggggtcgtggtcaacagttttgatgagctggagaaagggtgttccgtgaaatacggtaaagccttaaacaacaaagtgtggtgtattggaccggtttgtctttccaataagaacgaattggataaattggagagagggaaccggaccttgataaacgacagggagtgtttacaatggcttgacacaatggaaccaaactcagtcgtttatgcatgtcttggtagtcagtgtcgtttagttccttcacagcttatagagctggggttggggttggaagcctctggtcaaccctttatatgggtggtcaaaccaggagaaaagttttatgagtttgagaattggctaaaggaggaaagatttgaggaaaggattaagggaaaaggtatgttgataatgggttgggccccacagattctgatattagcccataaatcaattggtgggtttctgactcactgtggctggaattcgactattgaagctgtttgttttggtttgccaatgataacttggcctctttttgctgagcaatttttgaatgagaaattggttgtagaagttttgaggattggtgttagggttggtgttgaagtcccagttaggtggggtgatgaagaaaaaattggggtgttggttaagagagatgaagtgaggagagccgttgagattttgatgatggaaagtggagatgatgatgatgaagtgaaaaatagaagagaaagagctagaatacttggagatatggctaaaagagctactgatcaagaaggtagtgggtcttcttacttgaacatatcatctttgatcaaagatgtagctaattattattcttaagttaagtaattaaactaacattatatcatctctattttgtaagtattatttggagtcatgtaataagtaatatttttgaatatattttttttcgagaaatttattgtgcacccttttaaagaaatattttggtgcatcctcatgagtttcgagctttttaaatgaatttttttcataataatatacgtgctaattattgtaaatagttatttactaatataaaaaagacatttactcatataataaaatattttaatattatttttcttattataacttattcaaaattttctaaaa

SEQ ID NO: 76563 - DNA, 1143 bp, Cannabis sativa
acttgagtttatacatagatttccctaatttgcaaaccatattctttggatctttggatacaaagttttcttggttgcaccatataatttttttcatcaataataccattgttaaatgacacttcaataatttatttgatataactcaaaatcataatgagcagcctgtgtcatgcttgtcctaaaatagtatttcaattaagctaaacgaaagtctatttaaaatgaatatccgctttatgagtaattctttacatacaagacatactttatatttctccacattacaatttgcatcctcttggtcataaatatttgttatatttaattaattttacaccttatagcaataggaaaaataaaaaactttattgtctcacattaatttgtatttcttatttatgatatcaaatttagttttgagagttggaaccttaatggcatgataaaagttgatttgatcatctttcatcattccattatttcattatgttctttttctcatggatttctttaatggcattggtctttgaggttgttgagtttgattatgtgaaacatttaccatatcttgaatggaaagttgtttaatattgtcttatcaaggttctagattcacttcttgatcaatgaaagacttataaacaaacattgtcaaaagtgatagttataattgagtttaatgcaaattccttcttaaaaatatctctaatattcttatttctcccccaaactcaactttctcaaaattattgacttttctcgtctcaaaattgaatcttagtgtatgattacaaatttataactctttaattacttaaagtaattagtaaagtagctccttactattttagagtctgaattccttttaagaggcttataagacctcatcttagttagacatctacaaacataaatatattattgttaatgttaatttttgttaactaataaattagcctatatttaataaatttactttagaatatgaatgattataatgaaaataataataataataataataataaacaataaggtttttatgtagttttgaagttaattcttcatagtccacctgtaacgtcctcgattcaaacttttattgggcccttacacccacaaaataatggctcttataca

SEQ ID NO: 76564 - DNA, 891 bp, Cannabis sativa
gaaaaggaagataatggagtgaagagaagagagccaccattgttgggtaccagagctgtggacgccatctcagtgctttttagagttttcttacgtgttctcttccctatccatatattatatacatgtcttaatttatttgtttatttatttaaggataaatactattaccaactctattttttaaaaaagttatcaattagattttttgttttgttaaataataaaatttattatgtattttttaaaattgtacaaataaaactctgaactcaattttcaacaattttgttttttaatataacacaatttttaacacgaacaaatacagaaaatgtaactagttttatcataacatctctaaattaaattattattaagttttattttgataaaaaatcaattcagggtcctattcgtacaattttaaaaaatacatgatctattttgttatttaacaaaacagaatgtccaattaataatttttacaaaacacacagtctaaaatagtatttacccatttatttatggttatttgtttattttagttttttttattattattatttatggcttattttaaataaaagtaaccaagttgaaaaaagttgaatttagatggagaagaaatataaaattgcattaaatcatataagagttttaagatagtccaaaaaatttagatataaatttagttcattcttgtgatttaaacatagaattaaacctcaatttaaaatagatagatgaagaaaaaaaaactttaagttgatctcctctagcctccttatctagaatatgaaaagtgttttacttcataatctcaaaatcattaaaattgttataaatagtattaattatgtggatgtccaaatcttttatttattacca

SEQ ID NO: 76565 - DNA, 662 bp, Cannabis sativa
ggttacactcttcccaagctctacgccaagatgcagtactgtgtctcctgtgcaattcactctcacgttgtgagagttcgttccagggaaaacaggagggtccgtgagcccccacagcgtttcagacgccgggtatgttcattttaacggtctttcatttgctgttagttagcttttcgtttggttttgatctatgttttctaataatccatgacattgttaattcgtaatgtgtcattttgtaccaatgtttgttaattttaaacataaattagttgcctttatatgagatctttcgtattcaaaatttgtggtagacagtttctattctttgttgatgtgttctggtccatgaattctgtaagtactgctgctgtgtgtagcaacctggccgtgtagtctttcatttactggtcggcagcctgcaaaagctgctgaccaaccagtaggaaaatgcccggtcagccctttcctgcgtcttaagcgggatgatcagcttaacccttctgtgttgattatgttaagtagcgctaagctattgagttgtatctaaaacatgatgtatgattttaatttttcgttattgttttcattgatgctaaagtagaaatagaaagagttcttttggtaatttcagttcagtacaattttgctaggaaagt

SEQ ID NO: 76566 - DNA, 537 bp, Cannabis sativa
aatttcaaggctaagaaagaaacgaaattttccaaggtcttttagtttaaatttttggtcaagtgagttgttaagttgtgtgatgttggaaacattattgctggcaataatgatatcatccacgtaaataagaatggctaagaaatctgttggtgttcgtttgatgaacaatgagttgtcagatttggattgatgaaaaccatattgaatgagagtggtaccgagtttaatgtaccattgtctgaaggcctatttcaggccatatatgttctagtttagtttgtaaacagagtttggtggacccttgtatctaggggtattttcatgtaaacctctttgtggaggtccccatggagaaaggcattattaatgtctaattggtggatatgccaattgtacattgatgtaagtgccaagaatattttaagtgtattgaactttgcaacaggggcataggtttgcgagaattctatgccttgcctttggttgaaacctttggcgacaatgcgagccttaaacctgtcaacatccccatgt

SEQ ID NO: 76567 - DNA, 620 bp, Cannabis sativa
aaaacttagtacaattaaaaatataaattttacataaaataaaaattattaaaataaggtgtatttaaaattttttgggtgtaaataaaagattcctatatttatatgtaactaattaattaaaggaggaataaggttatgggggtgggggccaattcttgtaggtagccgaagacggaaaatgccttttatgatcggttttaaattttaatggtctttgagggcacttgatgcctccacttacttattcatataatatatataatttcttctactttaatttatggtaggccatcactcttctaataaacccttatcaaccaaagctcctttgttaattaatatcaccttttgcactgtatttgcttaatatttataattatattgtacaagtatatatattcgaagaaaagaaaataattataattaaagaaacatgtataatttggtatctaattctagctaggatattccaatctatatacacatccgctttattaattaattaatataaaattctctcaccaaaaaatatatggaagaaacgatgttgaatttgtatgaaaaatatatttaatgaattatgagaattattaattgagctaaaattagtaattttt

SEQ ID NO: 76568 - DNA, 788 bp, Cannabis sativa
gatactatcccaaaggaaaatcctaaaatctctgacatgctaaattgagataaaacgacctgtagttggatgtcaaaacgacatgccccatatgttctcttgtaaaatcacgagttttgttagtagagcctctggggaagaatcctaccaaatggataccccaaattataaaaagtaaaggggttttttttctttttatacttgaaaacagtttttttttttcatttttacggaattctacatagaaactccttttgcaactagcgttgcaacctaaattgcaacaaaaaatcgtataaaaactcctattgcaactagcgtagcaaccactttagaaacccaaatagtaaatttgaaaatttgaaaaaaaaaaaagttaaaaaaacagtatatagggtaattctccaaaagtaaataactgctcattaatgtgatttcaatgggtggtgcacgtaggactttagcgaatctatgacattgttcacactttttcacatattccatacaatccttcttcatggtgggccaaaaatacccttgatgtaggattttttaagaaaggttaggttcagaagtatgatctccacagaatccttaatgaacctcatggactactgcgataatctctgtcctagcgatgcacctcaaatatggcatagacaaccccctgtgatatagcttcccgctaggggtgaaaatcggtcggttatggtcagtttttaaaattttataatcgaccggtcggttacagtttttattttacgaaaaaccgtaaccgaccgtttaga

SEQ ID NO: 76569 - DNA, 1071 bp, Cannabis sativa
gttcttatccaagaaatgtctccttattctgccaaaaaaaaatagatgtcctcatctaaggaattttctcattctaaaaaaaaaatgaataacctcattgaaggaatggcctcattctgccaaaaaaaaaatagatacattcatccaacgattgccctcattccactaaaaaaaaaatgctctcatataaggaatgcccttatttcacaaaaaaataaaataaaataaaataaataaataaaaaatagatgctcttattccacaaaattaaaagaatgccccattctctctaatttctcttgactgctatgattatgggtattcattggatcacatccaatatttttaggcctatccaaatccgttctaattaatttaagtcatctaatcaatccaacatccattgaatgttggattggatcggttctatccattggaagtattttatatatatttattagtttaatttaggtatacccaatatattagacctagtatttttttggatgagatcggatccacccaatactttaggtctagcatgtattagattggactggttccatccaatccataaaaaaaaaaaaaattaatgttaattttcatatatacatatagattttactacaacaatacaaattacaaaatataattactcatccaaactaaatgaaaatactaattagtttgattggatgttagatgtatttaatttttagacaccccatccaacatccgatccgatcacaattgaattttcaatatttggcggtcgattattattgaatcaatcggttctcattagattggaattcatgttttaacccaatttagttaaccttatagactcttctccaaccatctagcgttcatattgccccgcatattataaaactttctaaagtcttctaaactcttaattgagtccatccttttatcgaaatgccctagaattcaatatattcactttatctttacgatttttgttcgaaacctttatgttaatcaatattataatatccattttaattcatttcccacctctcacaagtacttaacaaagatttgtcc

SEQ ID NO: 76570 - DNA, 960 bp, Cannabis sativa
aatagtccagatctagtccagacagcacattagaaacaagttggctttcaggataggggtcacctacaagagttagaacatcaacccattgtctcttttgtctgaggtattgaacaatgctttgtgaaccctttcgatgagtttgaatcttggttctatactcatccatcttttcttttgaatgagcaccaaaaagagcctcaagtgcatgcaaaagagttgtagaggactccacacccatgacttcagtggctatctcgtctgtcatggagccgaatagccaccccatcagaagttggtcgtgaacaatccgttgttcataatccgcgtttacctccacaccaaagctaggttgaccatcaagagaagggatggagataaactcaaccggttttgcttttgtacctataaaaaaatcatcaagcatgtgtcctcgaacaatggatgtaaccattgtcttccacagtgagaaattcttcctatccaatttgagagcgaatggttgattaagagtgctcccaaactgtggtatgacaacatttgaagtagaccctgtattttgggtcgtgaacatctagtttgcaacactgctaccaacgagagcttgaggagtacgattgccggtggacatagcgtcaaatacccgctatgataccaaattttaaaaaaaaagaattgttaatgagtgaaaccttgctcaatgagctagaggctgtagggctccttttatatagaggataaaattggttatagatcgagaaatctaaaaattgtacacctcaataacaaacttgtcagagaattacaaaaaagggaatattcgcaaaaggataaaaaggaaaatgagcagctgcacggattgttgatgtaggcactaacattgaggttgatttggatgctgatttggacataagagcttacttggacagggtcattttctaacatacattgataaaacac

SEQ ID NO: 76571 - DNA, 1010 bp, Cannabis sativa
gtaagaagagtataactgtactacatagcatgttatgtgagttacgattattatcgtttgtaaattgagtaatatcgagattaagaaacaataattatcgttatgtgatgaaaagattgtcttattagacaatgatgaaaaggttattttattagacaatgataaaaaattgtcttgatagacaatggtgaagtggaatgactataaattgaaaccactgttcagtttcttacttgtcggttatgctttataagtaacgacagtgacattggatactagtggctaggtctctgggttgtctggtatgacaacaatagtgacatttgatactagtgacttcgcggtgcgggtggtgcgagttgtagccattttttcaaaccaaatcgcttatgcagtttttataatttctcaaaccgcaatcgcactacgagatcttaaagttacagaaaccacactacgaaaatacggtgcggtgcggtgcggtttgagcagtttacactatcataattattaaacatcataatgaaaatttaacaatcaaactaataaagttttaacaatacaaaacaaaaaattcttattaaagttttaacatcataacatgtataacaatcattaaagcattatattgaattgtctctacaaaataaagtaatatatacatatattatatatatttgtttttatatgaaaaaaataaaaatcattttataaaaattggtaactttgtaatgtatagtgcggtgcggtttgaaccacaattattaaattcaaaatcgcaaactaaaccgcaccatgcagtttggaaaaatgcaaactgcaattgcaccacaaagaatttcaaactgtattttttatgcagtgcgggcggtttgtgtggtttgggcggtttgatgaacacccctaataggtattaagattatcttattaggcaatgatagtattatttggatatcggtgataagtatcagagttattttattaaacaataacaaggatattgggatgcc

SEQ ID NO: 76572 - DNA, 1507 bp, Cannabis sativa
gtcagtcaacattgtcgtaagccttgttgaggtcaatttttataatacaacgagcgaaaatgttctttcttgtataaccctttagcacatcctgaaagatgagaaagttatgcgtgagtaaccagttcttcacaaaagccccttggttattgttaacaagccacgataatattacagacattctggaagaaagcatcttcgagacgcatttgtatatggtattacaacaagcaatcaacctatagtccttagcatcaattagagcttcagatttagaaatgagagcaatcaccatttcattcatctcctttggcatagtgccattatgaaaaaaatccaaaatagcatttgtgatatcatcccctatctcactccaaagacctttgaagaaacctgagccaaatccttccaatccttggcttttcgagctatgaatactaaataaagcttttttaacatcttttttgttgaaaggacgaatcatttttacctgttgctctaaactcaaataattgccaaaagcaagagtctccatatctacctttttagtggttaaattttctccccattatatttttgaaatggtttaaataatgattaaccactttagagtaatcatcgatcaccttctcattctccatgtaggttgtgatgcgattctcaagttttcttttctcaaacaggcatgaaaaaattcagtgttctcatctctaagtttgatccaactaattttactatgttgtctaacaaagcaagcataacctttctttaagttagaatactctagcaacttatccttttctttgttttgcagaatcaggttcaatgggtccctagcaaggtcctcctggactctgctaaggtcttctctgccagcaagatacatagagtgaatatccctaacattctctttgttaaattttttaagcacatgtttagctctaaacaagtttttcaccatatctgacagtttttttgtctgattctagcaagctaaaacagcctgcttgtaccccagttgaaggccccaatgattgcagaaacgaaagggtttgaatcccatgttgctatgatcttgatgcttgattagacaatagctatggtcagaacaaggatcccatttagaacaagcttcaattttagggaaaactcttagccatacttcattcacaaacactctatcaagctttgagaaaattttattaccaacatcatgtttgttgttccaagtgaaataggagcctgaacacttgaactccattaattgaccttgagcaagccaattttgggagtcctcaacttctttagctttgacatgattccctcctattctatcattaaaatagagcatggcattaaaatccccaaaaacaatccaaggtaaggagggctttgttgggattttatgccctaaataaaacccatttcaatctaatctgattaattatcaatgaaagattagaagtcatttatgtttacatggtgttttcatgtttatggtttaata

SEQ ID NO: 76573 - DNA, 774 bp, Cannabis sativa
ttcagaggaaatgcagctagaaatgtcacaggcaaagtaccgatcaaagtactcttccgccgcttacgatcagaaagatctaacaccaaatcgattctttattttattttaaatatatactatcctctatttctttccgtttgcgattgtgatctgtgctcctcttcgcaatcttcctatattttttgcttttggaatatcgtttacgctttcctctattttccgggaaaatgttctgtgagccctaaaactaaggaaaacaaatgaaacggcaacgcggacttcggttgaaaataaaaaaaaaacaatatatatctatataaatattttatgtgtatataacaatatgattaaattaaattaaattaaacaaagaacgagaagctctttcttcttcttttttttttcttgcgctggttttatgagacggcctctccgcgcctcgttcctcgctctatatctatcgcctttctttctcttctattttttccactccaaataaaatctttaatacatttcaaattttaaaaataaattaaattaatataataattattatttttctctcactagtttcacactacctgaccacgtcagcgtgggatccacatctaccaatctaccaatctaccacgtggcatctcgagattgacggtcaagacgtgagagcctctttccctccaccgatttgattattttttttctttttctttttgtaagattaatacttttctttctttttattttcaaaaaaaaaaaatacttttttttttt

SEQ ID NO: 76574 - DNA, 686 bp, Cannabis sativa
aaaaatgataggttttaaaaaagaggataaaaatgaaagagaacaatataaaaagtgtatagaatctaattttctccaatctcatcttgattggttcagattattaaattttaattttttatttaaaaattaattaaatataccaataaaaaaatggcatgtgaataataatttgacactaaacagttatgtacttacggaagtttcagaaatataatttatgtattattaccgccataaaaatttaaacttattatatatattatttattatttacaattaaaagttaaacttagtatttatacaataaattacttaatcaaatatttagattttggcatcaatatagtattatcgtcatacatacttaaattgacttagaccaatttggtacaagtaattgcatctaagtaaataataaatttgtgaaattctagttcattataatatataaaattttcattttctatctttaattattatattttctcctaaatgaatttatatgcacaatcaaaataacaacttttgtagttttatttaactttacataatcaaaatttaaagtctattatgatatcacttggattggttacttataaaacaaaaaagttactactaaggaatttctgtttatacaatcattaagggtgcgtttggaaagccacaatgtaattggatttgtg

SEQ ID NO: 76575 - DNA, 942 bp, Cannabis sativa
tattgaaatgagttttatttaagcacaaaacccaacattattaccctttgaataaagcaaagataaaatatttgggatcatgtcactatacaaataattaaagaggctcaatacaaaatactaaacactactgtttaacatccccctcaaactcaaggggctaggaagcaccgtgagtttggaatgcaatgcctgaaatcgagaagtaactaaaggtttggtgagacaatcatcgacttggtcctcagaagaggtgaaacaaagttgaagcacgccacgtttgacttgttcatgtacaaattaatagtcgattttaacatgtttagtgcgagcataaagtaccgggttggatgtaagatgaagggtgctcacgttatcacaattgagagtaggaggaatagtgagaggacaaccaagttttccaagaagagagtaaatccaagatactttggaggcttcgttggcgagagcacgatattttgattcggtgatagatcgagaaaccactttctgttttgttgaaaccaagagataaggttaaggcctaaataaacacagtaggcactcgtgcttccgcgatcatcagggcaagaggcccaataagcatccgtgaaataataaagttcatgtgtcgtatcgggttgaatatgaaggccgagatgagtgtacctttgagataacgaagaacctgtttaacagcttggtaatggatgactgaggagcatggagaaattgacataatttgttgacagtgaaggagataccaagccgagtcaaagtgcattactgtaatgcaccaacaagactctgataggcagtcacatcttcaaggggatcaccatcatagagtgacaacagagtcagagtcatgggagtggaaaccaaattcgagtcaaggaaatgagttttggtgagaatatctctaatatacttcgtttgagt

SEQ ID NO: 76576 - DNA, 1032 bp, Cannabis sativa
  modified_base (505)..(505): a, c, t, g, unknown or other
gtcttctcactctaggttcaggttgattttgagcattcgtcccctgtgccgccctggccacggctgtatcacactccaattcagcgttccgacgatatgcctcttctatacgacatcttaagcggcagctttctgcgtcataagtaccttctcccatagattggccacaaccgcatcgggctcttcatccctcgtcccaggattctggccattcccatgctgagttctcctcgatcgtgttgtccacgtactaggaccaacgtcaggttaagttctccttgaagtgatgtccgaacgctggggccaccctcaggttgggtcctcctagagcgagtggtccgtcgagactgtgggttggtagaccttctggagcccatgggctatttcctagaacgatgatgagtttcctcatgtggggtatttaaattttttggattttaagcaatgaatgagagggtttttcttcaaaaggaaggagggttttctgagctttttcacagaggcnctcaatgaaagcaccaaaccgttaccgtagatttttgttaacaaactttgagcctcacaataacgatttcacatagaaaaaataaaagctataaaaataaaagtatgaacatagggttatttacatggttttgtagttacaaatctgcatagtccacgagtcaatcttcttcaaatttctaatacgtttctcaggggctcttttgtatgagtttttccatccctttttttgatctcacttctcactatttataattacatagtgggcagttaattataaagttgactgtaatctgtttacaataatcatcccataaaatcatggggtatgattacatatcacgtaatgtaaatgcggtaattattataaaatcatacagctgtgattttcttgcttttactgggtcaaaacgaccgtggttttaaacacgtctttaattgtcatatctgaatagaagcttggttccaataatcataatagccagctggggccattttttccttccaaggtcgatgatacacgtcttg

SEQ ID NO: 76577 - DNA, 2502 bp, Cannabis sativa
cttttattgttgcagaaatagctctgtgatctgatgtgaaaaagtcgagatgtactactggaggtgattcgaaatgttgatcccaaaaggtatttgtgaaacaccaatctaacctttctttgatagtgatggtggctgttctatttttaacccatgtgtaatggtttccttcatatggtagctccttcaattgacagagatcaagagcctgacgaaacccttgaatttgtgagtcattacgcagagctccaccagatttatctctttgggacaaaatttcattgaagtctccaatgataatccaaggtgaagttggagcaatatcgtgtaatctcttcaaaagtgtccatgatagtgctctgtttgatgtttcaggggctccataaaaagaagaaaagtgaaaggagggaccatcttcaaaggacatgacacaatcaaagtaagtaggaccaaaagtgttaagggaaacattaacattgtctttccatagtagcataagtccaccaccaaggccaacgcgtggtgattccagaccgcaactgaagtttaatgattgacggaaccgtgagatagagttgttactaagacgagtttccataagaaaaagtacttggggtgactgctgtttaacaagcagtcgcaaatgtctgaacgctttgggattccccagccccctagcgttccaactcacgattttcatggtgaagagcggggttgcatctcaacctccgctgattcgtcaatgaaaccatcagaatccattattagagaggaaacaaaatggtttgagctatctccttgggacgaagaaggagcagccatggagtcgtgttggctacggcaccgttttaacaattgtcgcatagaaagttggtcctgctgacgctttgattgcttgtttgggttatagttttctttgtcaacaccagaattttggtatgtggaaaaggatcggatggtaggaggggtagtggagaaatgggagttgtgatttggcattgggagagaattgagagggatgtttgtatgagggaagtaagttgttggaggataagtggctacaggtataaaagaaaggtgttgagttccaatatcaggagtgaaaacattgtctaaatgtattgtggtagaactggtgtggcttttcagatcagcggcaagtgtagtaggatggatggcattatgtgtagtgttggtggaagaaggggatatgccctgatgagaggagataagaggggtagttaattgatggttggaatgatggtctggagttgggcgatggtggacagcagtagaagcaacaaaagaaggattaggagaagtggcattcggctggtgcaaaaaattaggagaggaaggcgacaacagtggagaagaaagggtctggtttgaggtttctccgtgtgataaggtttttggttgaggggagaacattttgttaagttgtgggagtgacgtagtgatggagtttcgagcaaggcgagtaagaaaaggccaggcattcccttttgagaagtcttgtctatatctgtcatatccattattgggtaacttagcacctttcatccaagggccatattcaaaatcatcattgtttccattatccattctctccataaaagccacacatttctcaaatggatgaccaagacgaccacattcaaagcaaaattcgggtagcctctcataacggaaatcaacccagaaatcatccctgactcgtggtagactaatcattcggcctctaagcaaaggctttgaaatagggagtttcacacgtattcgcaagaagggaccccacccttcatcaagggagtcttcatggacatcaacaaattcaccaacaatattaccaagtgccttagcaagtgattttgatttgctaaggaaaggaagacgataaatttgtacccaaaatggtgtgaaagccaaatctgtgattgagacattttgcagaacatctggcgtgtacattacaatgagatggttttgaaagtgccatggttccttatttagaactcttagtttatcacctgcacatccaaaggtaattttgaacatatcatcacgaaattcagagacaatagtcagataacggcctttccagtgacttgacatttggctgatgaaagtaggcttatggatgaaagattcagtaacaactcgggcaagtaatacatggctttggtttgaagcagttgcagtcgtggcagaggagtcctcgtcagtgaggacaagggttgatctttcctcatcagtaagagaaagatcattttggattgagtgcagaagagggtccatgatcgggttgaataggcggctgaaaacaaaagtatagcagggaataggggaactgggaatagtgtatcgtgagatgaagaaggaagttacttaggcaagaactgctctagatcaaggagaaaaggataaagcaaggtagttgagaaaagaaaagtggttaaaaacccataacggcaacagacctaagaaaggcaccatata

SEQ ID NO: 76578 - DNA, 616 bp, Cannabis sativa
  modified_base (572)..(576): a, c, t, g, unknown or other
aagtccctgtccctgtggaggagacgaacgaactttgaactttgatttgattacttatcattgtattacttgtttgtgattgtgtacacttgcgcaattataaagcaatataattttcacaacaccaaccatagtgtattatgagtaacagacaaaagattaattaattcttttaaattattttatgtattattttgttgtatgataaatgcttttagtggatgcttaatcaaacaatttattttaaatatttgtagagtttaattgaagctgtgacaagcattttgggtgcaaggcatcatttttgttgttttcatttgaaaataacatggtaagaaaatatggcacatcacacctttaaggtttcttttgggtaatagttgagacaaccgatttcaagataataatagagcgaattaagaaattcaaccaggaggcccatgactggctaagcatattgacttcaagcattggacaatgagcaagttcgacccaaatgtgaaggtagaatatctaacaaataattttgtttagtcattcgattggctaatcatgttgggttttatgccctnnnnnaaactctatttcaatgtaatctattttattcaacatcaat

SEQ ID NO: 76579 - DNA, 1003 bp, Cannabis sativa
ctttgtattgaactccaaatttcactatatctgattccttaatggtaataaactaataaaaggagttcatcttgaataacaatcagtaataaccgatcgagctgagactgatacttcttcgttctttctttcgctaattaacacaaacaaaccaaatatatacaaaagagtaaacccaaaatgaaaaccaaaacgcatgtgaccttaattaaactcaagcaccaaaaaagagtactgcaaaatcataagggtatattacccacttgtgtttgtgcaaacacaagtggttgaaatatatgtacataatgggatatgattcatcattaatacacttatatccttaattaatcataattacattttaagtgaccttgtgccacaccacacatggtatagttattttcttctaaattaccctttagttcactcatatgaatttctatataatctcagcttccaaaaatccaatattattatccctcattacatttctccaagtgaaaaaaaaaagaggtatgatgatatatattacttatgtacacgtatttatagaatttattctttacaattaattatgtacgcctaattattaataatgtattaattttcaggtgtataactaattaatgaggactttacttgtaatctccatagcacttttcttgatggtggcatgtagccttgatcaagccaaagcagtcaataataataagatgaaagtgactatttcgaaaggtggcagcaccaccgtggccgccgccggcatcttagggcgccgacttttgatgaagaataatgatgatgatgatgatgataagaacgaagcttttggtcaaagtggcagcagttcctccgccagtggtgaaagtcaccgtacgtttgatcatcacattcactatagttgagattataatgtttcaatcccaatttgaagaactttgttttattgttattattagcttatatatatgcaaaacctaatttataatatgtataatataca

SEQ ID NO: 76580 - DNA, 1197 bp, Cannabis sativa
attttttttttaaatacctatagttatagaaagtacaccaatacatatcttaaataggagatgcacattaaaatcaccttatattttttcttaaaaattactatattggtaacctattctatcccctatcctcacaaatggggttatattattaaaaatagaaactttaaatattttgtgagatatagaaaatgggggagcgagagaaaagcctaaaaaaaagtcttagaatttaaacgcacccaataaggtttagtaccagaactagtacctttgttttagtaagtgcagtacatgttagtaccgataacgacggaatatttctctactccatttactcctcctactaccttccccaaacgcctacctctcactcccgcaactctgtcaatctcgtttctcatatcacaaatggtggcgccagtagcagcagcaaccactaccactgctaggccttattcaccactaccttcttcacttgttccatcatgtcaaggtagttcaccattgttctctttcttttctttcttaacatggtttaatgggatttcaatatcaacaggacttcgtggaaatttgggttcaactcgtaccttgcaatggccaaggaaagaagtgagcttttcccttatttttgtactgggacaagttgaattttctctcgtttggttttcgagaatattccagtttcttttttactaaattacttttaataagcagagacagtgtactaggaaggccagttttaataaagtcactgcccagtttgagctaaagcctcccccatatccattggtaagttaatataaagtttctcttgctacctctcgtatgatgttttctttcgtttttgttctttgacatgtttaaggttattttggtttggacctctttggttttttcctttggggacactaaattttgggttgagtttcaatatcattttgtccttctacatgagtaaacttttgactccccaactagtcactcaggtgtttgtcaaatgttcttaaaggagaattttatgtaagaattaaaagaaatagagttttaaggtaatattgttaatgtacaatttgtttagtagtggaaaggtaaagattttcaagtaaatcccattttttttattatttattgattgtattgagaactttaaatgatgataactctagcaagtttattccaaaaaaaaaaaaa

SEQ ID NO: 76581 - DNA, 557 bp, Cannabis sativa
tatatagtaattggcacaacttattaaatagttatgaggaatatcctgatttctttcttgagaacttgcgtagaaatcatgtatacaagttaattaattatgtgaaattaattcactagttaaaagtttaatcaactcccataattaaatataatcgtagtttaggaccccctaagcaagtaaattgaattatgatgcctatcatttaaggcttagtcatgtgataagttgcctccactctaagcctaaggagccaaagcatgcatccaaataataccattagttaattaatgcccacccaacttgaacaaattttaaaaattttattgctgcctatcttatagatgatggcaaaacatatacattttattttcatcaagtatttacaaatttcatacacttcaagtgtttcattcatgcacaaactaataaataatttaaggaaatatcattgtttcactcttaaagaataagtgcatgtttagcatcataactaaaatattgttttttgtttttaaaaactgaaaattgtttttcaaaaacaatttggcttgttt

SEQ ID NO: 76582 - DNA, 633 bp, Cannabis sativa
tcaggaagcatgagataaaaaaaagtacaagaatctttgcttattccaattttcagttcagtattttttttttttgatattccagttcagtacttttcatgtggttttcaaacttaacatcgttttttcttaattgatgttgttgtcgttttatgtggtccttgtcgtttcatacgaagtcttccttgtttcagctcccaactcaaagattatttgatagatatatttagtgtgattaaactctcaactttgatatataagtagagaatcaacaaaaacgatcaatgtcaaaaatttattgatagcacagtcataggcgttggcgaggtcattattaatattttatctatatattaataatttttttttttcacaattttgcaaccttaagcgtttgggtgtttgaggcgctcgtctaccctcaaggtcgggcttgcctgctagtgctcgtactttttgggctcatgttgtgtcaaaaagtacgacttatatttacaacactaggtgagtgaagggaaagtgtaaaggttggcaagtgagaaaagatgagggtaaaatgatttgaagtgacaaagggaaaaaaaaatataaaattggggttaggtgtgaaactattatttgtggaagataaat

SEQ ID NO: 76583 - DNA, 675 bp, Cannabis sativa
aatgataatttataattagccacacaatttttttatctttagtcacaaattatgttgtgactaaaaataagattttttgtagtgacatggtgaatgaatgaatatattttcggccataaattgtaggtcttgcaccagctacaaataaaagatcttaaatcgaattgtaagatgtgaatttattcaaaggaagtatcattagaaaaatcttgaaattatctaaatatgtcacgaagggctcaaaatcaaatttgtaggttaagatagtgaaaaacgagtcacaaagtaggagctcacaaaaggtgtgagaattcaatttaattttccatttctatgcacgaacttggacatgatcaaggaataaaagaggatgtgactggagagttgatattacaaggaagacagttctattcattttatagttagacaattcagattgtatataaaagcttttgattattaattaaagcagagaaaattcataaaacttgagagagatttctattgttttatgtggagtgtttttgtgtgtgttcattggagtttcttactgtgtgggatcatacgtcatttccaatagatggtatcagagcttggagatcaaaaatcacattcaaaggattcaacattcttaaagatcgatccaagaaacaatggggaatgccaagtatgatc

SEQ ID NO: 76584 - DNA, 543 bp, Cannabis sativa
cacacacacatagaaatataaaaaatcaaatattagattaatttatattaaaaaagagaataatatactaaaaaaaaactaactggttagaagagacgcggtgttgaatatcggtgcaaaatggtggtgaatcggtggtgaatggtggtaaatcggtagtgaaaaggaagaaaaatgaaaaatgaaaaaactggagaagggaaaaaatgggggaacctatttgttcctcttatttatagaaaatttattaccggcggggccccgccggtattaacaatattagcgacagacccctgcaagtattggtccgccactaatagcttttaaatgcagaaagcaggagttttcccgcgcttattaccccttcaataatagtggccagctatccgctggtattaacctaagcccgtcgctattctagtttatatttattcatttcttaaaattattattgttatacccgagattcagctaacacaatagaggaaacacgtatcaagctgggaagaatatgaaccaaggcacgtaattataattacattt

SEQ ID NO: 76585 - DNA, 680 bp, Cannabis sativa
attagtgatattatttaaatcaccaataaaaacaaccggccagcttctattatcaacaagagatcgaattgtactccaagtattaccgcatgacctcgattagcctcaccataaatccccaccagtctccattgtggcatactcggcacttttgtaaggatattaatgtgtttttcagaaaaatcaataatttcaccctcctcaatatttttccacaacatagcaagcccaccactatgaccacaggcctccaccacaaataattcctcataacccaaagacaatttaattctctcaagagcacttctaccacataatgtttcacataaaaagacaaacttgggcttcttttggatgactaaatcctttaaaaattgtacggcctgagggttctcaagcccccaacagttctaactcaaggtactcatggctcttggtgagcctagagacccaaacccgccccaaaaaagttttttggtgcaccttcttctccattttcaaaaataccatttaaattctggcccaatgtccctggcccagccgaaccctaccttttcctttttaattcagatacagtcaactcttcactcatcaatgcatgcgtgtcaccctctccatcattggtcatattaatatcaatattatacccattattctcctcaaattcaggaccaagtttc

SEQ ID NO: 76586 - DNA, 844 bp, Cannabis sativa
cttcatgacaacttgtagaggtgagtcccaactttttactagattttataaattattcacttgtcgaatttctctcagttgaaatgtcaaatttacttcctaacatgtttctttgcatcgaagcatgtcgaaatagctattttctaatctggtattgcattcttcagaagtgagaaggaaacaatttaggtctattaccgcacactctcgtcttctcggtcaaagtgtctacagagtacaaggaagatgactgagatttaaggtaggcctaattcacaactttggtggtggcatgaaaatttccattgatctcatgaaaattactatccagcattttagacattatggctgctggagtgaggtatgtcgaataccccagaatattattattattattattatttaagcgcttttcttaattattatgattgttgtgatacattgttttaatattcatgttattcctttgttactctctgtttacacccccaccaccaaaagagaaaaactcaacccaacatttaaatattcataacatatctcctcccaaaaagacaaaggaaaaaaaaaacattattaatatttacctgttgaattgaacctaatttgtgaaagcttataagaaatgttgatgttgaagtattgctgattatgatgtttcaactttcaacttcaagagaacaaactactactgtaactttcaaacaatctagaggctgaatgatttacaatttcaataccttgaattcagatttgttacttttatttcataaaattacaatatttatatccaaaggctgaaatatagcattattatatatgtaacttccaattgaattagcac

SEQ ID NO: 76587 - DNA, 1990 bp, Cannabis sativa
gtttgcgaagttctaattcattgttgatgaaggaaaataagttgttcttacctgtatgttgtatgggttatctcaccagtaatggcaatggcacttctgatgactaatataataaaattatctgattttatcatcatttgtaaattccctctaaaattacttttcgtttaagaattgagcgtctgattaataaaccctctttgaaacgtataaataaccaaattatcaagaaaatatcaatagtagagaatagagattatcattatccaatggattttatggcatagacgaagaaacattttagtctaaaactagattgcttgattgaagtgttagggcgaaatcaatagaaaatatcatgaataaacaaaatttgaatggcatacgggagtcaaaacatccatcagatgataatttcatcctagcacataaacaagaaattaagaactagcgagtagagagtaaacttttcgactttgatgtaacaactaaaaccaagaagtcttttaaaagcatccaattctagtcaataataaggggaaaaactcaatggaaactggtttaaaaaaggaaatctttgacaaaacttatgagtatataaatcccccatgttatctcatcttctatccttacaaagccttccgcagaaataacaattacacaatattagagcagaggggatcctgagtttgagccaatacacatacacttacttccaatgcatgtctaataaatttcggggttaacactaacatactcgggctggactgtccaattaacattgcttactctattgcctattgtccaaaaccaaaaggtaagtgggggtgtcgaattttaaatctaatttggcacatttgctttgggtttcttatgaccaactttctaagctgaatatagcttacaaagcatatcgcgtgatatatcatacttgattttaattgccaacatgtatctccaaatggcccagcatggcattgcgagcctaaaattgaatcattttttgtttgcattaacatatttaaaactaataccagaaaaggattcgtgaatacctccaatatcccaggattttgcatggctattccaatgacacgtcttcttaatcctttgtagaccgcctcattgattctcccatctccaaccacggtaatattggcacacataattctcagaaaaaccgtaaaagatttaacttctgtatccctttcagatgaaacaagtgtgccctgcatacaaacatcatgcagattgctcacttgattttcactaattgagtcggtaatttctttaggaaagttagaaatagacttggagaatatcatcagtattcaagatggattcctgctgtgtatgagggacaacggaatcatgactctcaggattaaggacaacatggctgttaccacagtcttaaccacagaataagctttgggatgttgacacttaacagctgtcaatgtcagaaaatacttggaataatacaaggcatcgacaacatttacaaagttgaacgcattaacctgagtagagagcacaaatatactaattaaatcacatttttctctataaataaattacttttgtggagacttgaaccctcaccacaaacacatacgctcatgtaactttaaattttatctgtttgtaaaaaaaaaatactaataaggaccctcaaatttaacaaacaagagtatatgtaatcattagaagccttgctgatttgtttcaaaatcatttctccaattgcaagtgtaacattaatgtttggcagtgcaatcttcgcaaatgtgttgcaacttgcacatgagacatgagacgttgaaagcctatttttgtggtaatattgtgattgcattttaaagaaaaacagtcctttgacatatgcataagaacagcacatagctgtaatttagattcatttagggctcgtttggaacgctcgtattgtattgtattgtattatattgaattggattatatatcatat

SEQ ID NO: 76588 - DNA, 3322 bp, Cannabis sativa
tactttttatataagaacccaacaaaatttctcttgtttcacttatctgttatcctagattaaaaatcatcattacttttatcttaaattaaaaatcatagatgtagttaggttcactttgtgcatctcttacaaatatagttatttaaaacataaaaaactatatcaaccccattaaggaagaaattgttattagaaaaaacatcccaccaatacctcttttacaaaataagtgatataatatgtacaaacacaatttatatcataacatttcacaaatctatatgtgggaaacaatcatacatatcatcacactattaaaataaccttttgtcaaaacacaaaacaacaagcattttgagccatattagcatcaagcaattgaaaagacaaaggtaattattatttctttccttaccaaatctgatttttcaatatcacaatagtaaaattacaacacaatggtaataacaataatcttgaaactagacataatcacttctctaagcatgaaattacacaaagtccatcaaaatggggtcttcattattaaaataacacataccattgttactaaatttagtgacttaatcaaacttcactcactctttgtttttcttcgcgataaacagaccccatgtttgctcgccggatgaacttctgatcagcttcgctttccatccattaacaatatcattatagtcctcctacaagtgattcatttattgataaatatgagtaaagatttttcaatgaagcacaacatatgagaaggacgaaactcacttcagagaagtcgttgatgaattcatccttttctttttcgagtacatccagttcccgctgcagaacttgtaagaactgaaacacaatacaaaaagaaaattaagaaagaaccgaaacatggtcatcgaatagaatagatcatatgtcaaacctgttcagtgcggtcttcagcaatgacttccttaaaaccagcattgctaagcatctgagtttattacaaaccgaaaataaggaaccttgttaagtagaggaaattggaataaacatctaaaagggtgttgaaatgtaaatatatctaaacatacttggccgtattcttctacatcatggagatcatatcctctttgcttaatataacttgcaaattctgcagttggggttcctgaactcttgcaataatcacttatgagaactgttcctcctggttttaaccacttgaagaatgacttgaacaatgaaggtttatcctgcacatgttaaaatatttcacattaataaaagtttcatgtcaacaaaaaagatttaaggtaatagtccacatgattaaatgaatagaagaaatgagtgccttacttgaatgtgcaatatggtgtcgcggctgtaaatcacatcaaatgagttatcaggataagtctttgttgtgcaatcagcaacttcaaattcaacagagcaattaagccctatggcgcgttcaagagcaagagaaatcatattcacggagaggtcgatgccaacaacttcaacatcaaaattttcagccatataaaagtctccccctccaattccacagccaacatctagaactctctgaccaggcttaaggtccaattttgccacaaattccttggttgtttctgcataggcgatttaaatattgttaggagagaccaaatgcaagaactgttaatatccaatctttccttttctctttctttttcctaatcaacgaaagtagtgtgaaatactaagatgcaaataaagatattgttcttgaatcgtgtagaattctaaattgttgcctaagaaaaacaattcgaatgtattcagttatggcatattactgaaaacatacatagctcatgtgtgttgtaattaaaatatttcatattcattattcagcttataaaatgctagtatgctctttcattctgttcagttattttagtttctcaattataaggacaaagtagtattaccaattccgccagtgctaacatagcccgagccgaaaacacgctcataacgcaatatgccagtgcatttgtactgaacagtgtctaaaaactgctgaaaccctctatcatcctgtgaactcactttctgccatgtccagcaaatctgcatcatacaaaaattatcagtaagcttcatttactaagaaaatagcactaaaagatttaatcttgtcaagtaaatcacctgattttgattctttttgtttctcacataagcaccaatacatttgcagccaacaagagacaactcaaaggaatttccagatccatcagttgtttggcattctttaaaaatctgaaacatcaatggaaatatacatataataaagagaaagaaaaaaaaacaatttttgattcatgaaatgaaacacaggattagctcaatatttagaattacaaagttgctgtgatcaaacaacctaaaaacttcagtaagaagaaaagggtaatgaaaagtatcagtgattcaacttctttcctcttttttctcaccaagtaacctcttattatcactaataagatttcagaaactggatttttctgactatgatcacagactattgaagaaattctaatcatatcatgaacacaaagttaaagcaatttctttgaacatgtttgataactcaatcagaaggcaaaccttggtatagaatctcggttcccggtaatgggtggggttgtatttccgcttcgagtcaccagattggtggaaacaagattccctgaaaaatatgaacccaccaaccttcaaccatttcaccatcctttcagccaaattttccacctgcaatacatttcagggaattaaaatttcaggaacagatccttaattgagaatagtaagcatttatcattttgaaattctttacctcttcatctgacaaatacatgagaagccaatttgagaaaatcaaatcaacagatccttcaggtatatcaagatcaggggaagtcacatcagcacatctaaactcaacattcttgtaatgtccattaatttcttcattctacacgaaacacacttaaacaaatcacacaaaaatccaaacaaatatgtttaatttccactatataacatcaaatattaatttaccttttttatggcactttcaatgaaatccatagcaagaagatgaccagccttctgagccaattcaccagtaaaacgaccaattccagctcctaactcaatcacagatttcccctcatacggcggcaaaagagacagtacctataaattacataatcataataataataattaattaacatttcaaaccttttgatcttaattacat

SEQ ID NO: 76589 - DNA, 794 bp, Cannabis sativa
  modified_base (655)..(655): a, c, t, g, unknown or other
tccttcttcagtaagcagccaatcgcccttttgtgcttgaaaaaatttacaagcactcttaactgagtagaacattttggccacacattaaaatgcttgtctcttgagttgaacagatcagagaccacacattaaaataacaacattttggccaatgagaccaggatgatgggaagtaacagtatcagggagccaaggatctaacatacaattaatatgtttttgttaatttttctctcttctatataacaaactagcttaatatggtagctaaattattaattatgaaaagctcaccacattcacatgtgttatttattctcctattttttttttgtttgttgcagtgatcatatatatggtgtttggagggctttgaatttgagagattaaacagaatggcattgagttttttagtttagggtaaacactattatggatttttacaaaaattataaattaaattttttgttttattaaatgacaaaataaactctttattttttaaaatattacaaataggatcgtgagctcaattttggacaatttttttttaatataatcaatttgaagataattattaacacgaacagatgcaagaaatttaatcagtgttgtcataacacatctaaatcggattattattaaattttantttgacaaaaaatcagtttaaaatcctatttataccattttgaaaattatcaagtccattttatcatttaacaaaataaaatatataatttataaatttttcaaaatacatagtgcaaaagatatttaccctttaattt

SEQ ID NO: 76590 - DNA, 548 bp, Cannabis sativa
atactcggggatgccattgactacctgaaggagctactgcagaggattaatgatcttcataatgaactagagtcgacccctcctggctctctgttgccaccttcttcaagctttcaccctttgacaccaacaccaccgacccttccctgccgtgtcaaagaagaactgttcccaggctccctaccaagccctaaaaaccaacctgcaagggtatttttcttagaccttgattctccttaacattctctatttgttttgctctgtgagaatgagaacttaacaagaacatatattgacaacctgataactgtatgagctaagataatcaatcataaacacaattaagttgggaatgatttttcggtcttgcaggtggaggttcggctgagggagggaagggctgttaacattcacatgttctgtgctcggagaccaggtctcttgctctctaccatgagggctttggacaaccttggattggacattcagcaagctgtaatcagctgcttcaacgggtttgctttagatgtgttccgagctgaggtatg

SEQ ID NO: 76591 - DNA, 754 bp, Cannabis sativa
aaaaagtaaaaaataccgcctgccagtatttttgtaaaaaaatggcaaaagttagtataccatgtaaatttcccttctttaaattttattagggttattgttgatatcaatcaaaagaaacaacatatgtatgtgatatggtacaatctccatctcacatttattatcctatttaagcttgtaaaaacaaaaatggttctctcatatcatatctccatcccaaaaatggtagagatcttctcacaattccaccatatgcatccatgtttttatgggaaattacaaaaatacagtatttctaatatttttaaatttctaacaaatattgtttacaaaagttgtatgcgtcactctatattctatatttttgttaaaaaaattgtatttttgacatataccttattttaaaaaaatctaaattttatgcatttttgttaaattctcatctctaattgtatggccttaactaactaataacaccaaattgatgtgaatgtttcatgcaaccctttattaaaaaaaatcacaaatcatttatctctctccctacatttcaagatcaacttttgttaagttacatgtttggttaaataatatttgaagtttgaaaattaaaaaaaaaaaaaaaaaccaacaacaacaacatctcttttcaaaacgggcaatcctattaggcactagcgtctagtaccatgttaagggatgacaaaatggggctttttcgtgggtcaagtcaaggccctgccacgacaca

SEQ ID NO: 76592 - DNA, 515 bp, Cannabis sativa
gaatagaattaataatttaaaaaactaaatacctttatttgtatataaaaattgaagaaaatatttatatttttcaatggaaaaaactatttatagaataatattgaggctatcttgaagacaaaagttaaaggcaataaagtagtaggtttgatgtgagttgtttttcaaagaccggactatttatgtagtctgattcttcaaaaattttaaaattgaagggcaattgtaagtgatcaaaataatattgtttggttataaaaatttatttcagtgaagatctttgagtatctccaataatagtattctttgaagatgttatatatttacacataatttaaatatataatattttattttatttttattccactttattttttgcacatttacttttaaaactccaatagtataataccttataaaaatgctataattatgatctcacacatattatatatatatatatatattattaaattatttgttagaaaaaatagagagattacaatgga

SEQ ID NO: 76593 - DNA, 1524 bp, Cannabis sativa
  modified_base (467)..(473): a, c, t, g, unknown or other
atatatatatatataattcaatatattttttattattagtatttcatgatcatagaaattagtaatgttgttacgggtgtttattgcatcgcattcaattttttttaggtttatttagatccgatctaattatatgttagattttactatctgatcgatctaattaattttagtcattcgatccattagatgttgaattagattggtccttatctgttagatgtatttcatatatatatttattggtttaatttgcgtttatttaatattttagacctagtatttttttaatcggatcggatccatctaatattttagatccagtatgtattggattggatgaatcatccgatccaagaaaaaaaaaagtaaaattttaatgttaattttatatatgcgtatatattttacgtgtaataatataaaatttaattactcatccaaactaaatgaaaatactaattagnnnnnnnggatgttggatgtattggatttttcgacaccccatccaacatttgattcgattaaattagatattcaaaaataacatatccaatctgatctgatctgatctgatcacaattggatgtctattgtttggcagtcaattgtaattggatcagtagattgttattggattggatgatttatgcacccctaaatatgggctgtgcaaacttattaataaataaaatatatgtataacatatagtttttcttaattatttttttattgctttaatagtatttgaatcaaatttgacacatgagtaaatttagctaaaataatataacacattttttaaattttatatacattggagaggcatcaattatcggataaaaatttgtcacaagctattactactattatatgtatatacatttgtaattatcactatttttaataaaatatattaaagcaagtatattaatttactattaggctaggtgtagttttaatttttcttttcttaattaaataaattagagtttttttttataatgaaaataaatttgagcttttttatctcatgaaaatatgcctttacgatttctttcttaattaactacatgtgcaaagtcttataataataataataaataaagaaagaaagaaaacctctaaaaaggggcaaagtgagagtggggagtagttgtcatttttccacaagttagatacccatcttttaataaattttattatttttctcccattcaaaaaaaatataaaataaacatttcttatcatcaaagtcaaaatgggaattctcatagtcaaacaaaatatgcatttagattcacaccctacacattggtcactaattgaattttagcaccattcatttatgttctatacacataagatagtgatccactttctaatattttaaactcttttattattattgcttttaatctttatatttattaatgattaattatattttcatattcataatttttgtaagaaaaatgcacttaaaataatgctccaagcttatccacatatttcctttgtta

SEQ ID NO: 76594 - DNA, 1358 bp, Cannabis sativa
  modified_base (989)..(992): a, c, t, g, unknown or other
cacaatagtaatactaaaaatgaggctagctttatggatcatcatagtactgacatcgagaggttgactttaatatgataatgtttagaagagtaggaccatcaaaaaattttgtttttttttagatctatatatatttttttatttgatatatacatggtaattacagtgtataggaccttagaatatacatggtaattctagtgtagaggtccttaaactatctccaaatattatgttaaattcttttaacaaaaaaaaaatattatgttatattccgcaaaaaaaataaacaaactttgtatttagcacaatatttacaattgtgctccaatgcagaataatattttaagagataaattgatttaaaacaacaaaatatcaacaaacaataaattaaatatttaaaaattactaatcgttatattttaaataaaatgtatttattaaaatatttcattaataattaatggtaaaagtataattaaaaaagtagtatttattgtgtgctaaatttggcacaatgatatatcttgtgctaaatttaatccaatttttaacatgtactaaatttagcataatttttataacacactattggaaaaactttttattgaaaagtgctaaaaaaataaaagtacaccacctatttaatacttcattacaaatgatcttatacctcatggtatgaggtaattttttgtccaagattaaagtaaaataaaataaagtctccatcaccatatgtacacatgtaattaatttgtttttcgggtctaaacaaaatgacttttatgaaaaggtatgtgaatagttttttagacatcaaaaaaagaagtgactactttattaaaaaaaactgttcaaaaaaaaaacaaaaaagactgttttcatatattgtgcgtatataaattaatattttttataaaataaataataacttagttaggttaaaaatatttacaatatttaaatttaaatttctttannnnaaatatttacataatttttatttaaaattaaattaataaatttgaaaaaataattaaaaatatctataatatttaaagtattttaaatttaaattaaaatttctttatataaaaaaaagatttttttgaaatatatgtaaaatgtaaaataattacaaaaataacttcataaatcttaattataatagtgtcttgccacgccaaaaaaaaaatacctcaatttcaaaataatatacttgaataactaatcccgaaattcaataattttttttttattattattttgcgttataaaagtaactttttggttacttatgatgttgataataaatcaataagtaacttttttataaatatatatatata

SEQ ID NO: 76595 - DNA, 1769 bp, Cannabis sativa
  modified_base (302)..(302): a, c, t, g, unknown or other
aattaacagaataaaaataacaaagggttaaaccaataattgatatatattgatgtttgtatttatgatcataaaaattaaacatagggaagttctatttacaccccataaatttataaatacaccccattattaaaaaaatatcaacttaaataatttttaaaaaatactcttaatatttttttaaatttttttctttacattattttatgttaatttcaatacttattttgatttcattttcataattttttctaaatcatgtatattttttttaattttttttctaagaaaatttcatntaattttttattttaatttttttgccataatatttaaaatataatttaattttgtttgataagtatattttttaagaactagatgaaagttacgtggcgagccacgtaaatattagttttatttaagttttagtgatttttttaaaaaaaaatcggtaactaattgtaaattattttttattatttgttttataaaaatagactttttaagaatatcataattgtatatataaacatgtacacattgttattaataatactaaaaaattggtaatattagaagtacttatgaactgtacttatgattatgattaaagcatattacacttaaaaaattgaaagagacttcatatcaatagttgtggtgtattcagtccctccaaatataagctcgggagctcgataatatctcgagcaaatgtaataaacattcggttctcctttcatctgataacatagaaaagagactaaactttgaacaattggatcaagctaagctaacaagctagattaatcactcaatatgtaacatagcgaaaatacttaccaacattttggcacttccaaaatcacaaagcttcaactgatgagtgtgaggatttacctgaatattattatagcatatttttagaatttgacaaggcaaaaaaatgatacataaacagataataacacatccataatacaccattcaaaagtatttaaacatctttcactgtaattcctacaaatatcaccaaattcttaattctcacactaacaagtgtcactcttgacaattaatttttcttacataccctacaaacattagggaaactggagttttataggacaagtctcaagaggctcttttgcaaaatgacttatgagacaaatatttgttagatgaaatcgattcgatatacttttacatgacgaaagcaagagtgaccaagtaggttgagaagtgtaaaaatgaaatgtcattttctaatttcactttccaagattgtcattttggcaaacaccaacaagtcttatctacacaagtactatatgctctaagaaaagaatcttacgagtaaattttgaggcttgatatcccggtgacaaataccaatgcaattgtggatataagcaagtgccctgcaaatctgtacccaaaaaacaaaaatgaaatccaaacactaaccaacatattgtctagcaataaaattaattaatatatcccatgatcttaaccgaagaaccaagaacattcagaaaagaaggtttttaatacgcaacagaattcaataaaattacttttatacctgatatgtgtagagtttaacatatatcaggggcattcttaggttaatcctgctataatttctggcaacacggtgaacagtctcagggacatattcaagtacaagattcagttaaagctcttctttgtctgttgttgagaaaaaatagtgctttagtgcgacgatattaggatga

SEQ ID NO: 76596 - DNA, 1262 bp, Cannabis sativa
aatattcatcaattataaaattgctttattaatttttcttctttctcattttttattacactcttacaagggaatgcttaggaggaggaatttagcttctttggttgcaacagaagctcaaaaagaagcaaccaaagctgcaacacttgtcaagtgcctcaggtaaatttagtcttcacaaatgcttctaaagcgattcttccatttacagtacaaatagttgaacataagtcttttcttttggtaaccttttttttcccagtatgtttgctgatctttgctcatctgcctcacccgagaatccgcacctctctttcaacacgttcttcatgctcagcaagatcattgaccagtcaaatgagatcattccattgaaggataaatcatttcctttaaatacaatctcctcaccttcaaacacagagaaaccaactggcaaaaagaatacaagttcagttactcgaaaaagtacattgaaagcaaccaagatcgccgcggaagtaagtggaattgagaaactggaatgggctaaaggagatagtacaaaagagataaaagatctgagagagcttctcttgagtgaaacaagatcttggtttcttaaattcttggatgcagctttagatgatggctttcgcctcaacaatcaagagaagaaaggtaagaacagtgcagggcggagagttgagccagacaaccatattgctatcacattatcacagcttaagaatgcaaatgagtggttagaaaaactaaaaagcaactcaagctcggagaatgatggattaatggagaccgttgatcggttgaagaaaaaagtatattcttgtttgcttagtcacgtagagtctgcagcatccgcacttgagaacaaatctgatcgtggttgatgagcaaaatggaatgttttggacttattcttttatttatgaattatttattataggaaaggtgatgttactcttttagaaagcttcatttgagttggaaaatcttgatgaacatgttgcaaatgtaaattatttgtgcttgttgtgtgtataataacaataacaataaagttacattctttaaaaatttaccttgtttgaattcccgcagcagacaatagcaaaaaatgttcaaatagtcaactagcatccaccataagagctgggtccatgttagctacaatgttcctgcaaaggagatgatccaagctggagaagtagagcacatgccatattctcagtgctgaggctgataagattggcatgtgccct

SEQ ID NO: 76597 - DNA, 914 bp, Cannabis sativa
atatatataaaggaaagcacaaagctttccatgtggcagctcaattagcatttttttcttagtctctcttttcttaatttttttgatttaatttaattttaatcctatttttgtattttaattttatttagtattatttaaggccattaatatttttaattctgaaaggtcattatcgattgatttcaatgtcttttaatttctttttgtactatatcgtttactattctcaatttatttccttttttttagggttatctcaaaagtaaccctcaaaaccgcaatcgtctccatctactttaaaaaaacccatcgcatcatctcccccctcatcccctccctcctctgctccaccaccatcaccactcgagtatgaaccattgcctccattgttccaccaccatcgcgatcaagattgagaaactcgggccttcatatattcttaggtttctcatgtctcggtgagtggagaaagtttcttctgctcaagttcttcctataggcggcgagtatgagttggatgatgaatcagggagggagataatgttgatgatgatttgaatgacaccaagttgtttccaagtttcactcacaccatatcatttcacaaacgacaagctttaagttaggtgaattatgtatatatttatatcagcaaaacttatcctatgtatgtgtttgttggtatgtgtgtttgttgcagtgacgtatttggagaataacaaagtaggaatcacagtgtttggattcatgttggacagcacattgcttcactacatttaagttatttcttaaatctcttaggagtataatttctcatattagttttttaaacatgtactctgttaaatatatttctttctcttattttgtttcattttgtactggtgatttacttggcgatttttcaaaaa

SEQ ID NO: 76598 - DNA, 1021 bp, Cannabis sativa
  modified_base (852)..(869): a, c, t, g, unknown or other
  modified_base (983)..(985): a, c, t, g, unknown or other
ggtaaaataatttccaacatcatgttcctctcgagcaagttgacacttcagattcccccgtgtcacttgagggggggatgttaggaatataaaaaatggttaggatagttggttgattggttaagtttgttactgtgtaatcatttctttgcctatctgtttctctaactgtattctgttttgccagctagtgtaatcagctactatgtattgtatctatatatactcaatacaattcaaggctcattagttcagttgagccatttctccatcttcttctctcttttcatttctctgtttttacattcaatatgttgattgaatcctttcacccacaaagagaacaaaattttatgccaaattacagtaagagtcctcgtaatgtaagtgttcaccgaattatactgctcaaagactatcatcgtattcgtagccacatattttccttgaaatgattctaaaagtcctacaaaaatactatagcaaataaagaaacatacaacaaagctgaacaaaaacatacatattacagtaaagataaaaatactaatttgtatcgtatataaatatattagtggtccctagtatcatctagatgtatagtcttacgattgtgtagcaatattatataatatttattaaattaaattatgtgagactcaatacttaattctatttaggattgtgcataataaatcgatccaatttaatgacaattgaccgatccaattacaaccggccgttaaatattggatatccaattgtgatcagattagattagatcttatttttgaatatttaattagatcggatcggatgttagatggaatcactataaaaaatcttactttnnnnnnnnnnnnnnnnnntgactaaaagtaaaaaagttgtaactaattataaattattattcttacgctgtgactaaaaaagttcgtggctaaagatataagtcacaaaaattacaatttattgtgactaannntatttttagtcacaatacttgttgtgactaaaacta

SEQ ID NO: 76599 - DNA, 1617 bp, Cannabis sativa
  modified_base (961)..(965): a, c, t, g, unknown or other
atagttgatatcccaacaaagaaagaagagaagagctcacgttttagataatgcatcaaaaatactctgtgcctcactggtgacaccaactcctattctctcagcctcaacctctgcttgtctgcaattaatctcaccatgttcccaaaatcaaaaattaaaacttcactgtcaagatgggcaataaaagcaaaaccctcaaaagggttaaaggaaatacctaatggccgattcctctctggcttgaaggctattcaaatcgatgtaacacttctttagatcaagtgggtcttcggcttgacccaataaagtaaactctttaatatagtttgcctttagtagccttatgttgcgccgtgaccctgctttggaaccctcttgtaagagaccgatcagaacaaaaaaagttaaggatcatactctctgaaaccccaaaaagtctacttttttttttctagggctagcaaaaaaaaaaaaatttaagaaatcaaaatcaaaattggaagtaattaaggatatgaaggacgaggatgttggaggggcggtcgaaggtgatgacgtaagcctgaaattcgtcgcctaaggttgtcttgatggagaggaagcaacccacggcgaagtcctcggcgttgctaccttccatggctgctcctttggtgtacagctctgcagctattccgcgccttattgaatcattttctacggtcgtctttgggcttggattgggctttgggccttaaagaaatcaggttatttgggcctaactgaagaccatcgctggaataagtttaaaaatacctttttttatccattaattaaaaataccatcatattagattttattaaaatatacccacttttttgagtgtgttacccaatataccctcactccctacttaaatttagcatataatttacattaacctaagggatctactagggacatcatctataaaagtgnnnnnatcttaaagaatataaaaatagaggtaaaaattaaaacatgtaaaataaagtgggtatacaatataatttcctcacgcttctctaaaaaagcccaactataataatcaaagaatttttactgtaactgaaaaataattacagaaatataatagagaatataaccttaattatctaaataattgtagaactacctgattttctatcatttactttgaaattggtatctcacaaattattaattcacatcctattatcacaagaactagaccgattggtagaaaaaaaaagtaaaaatttgtgtatgagttaatttaagggtgtattatgaactctaatatgttaataacatatttagtattattttttttattattatatattctaataacatattatgaacgcctattagaatgtggattatatggattatagagaatatactttgaatctttattcacattttattttgggaatttttagtttttattatgaacatgaggtttgatgaataaattttagtaattatttggttttgaattgatttttgtactttaaatttagaattaatgccttttcttttaagtgttatgtttaattttcataaataaatatagtagaaaaaataactatataaaatttggattaaaaaaa

SEQ ID NO: 76600 - DNA, 533 bp, Cannabis sativa
tcctaattgaaaagtaaaaattttttttttttttttttgaagatatgtgtatatattaatattatatatttaaaattaataaatatattttagtaatattgactcaccttctagccaagacgtgaagtcaagatatacaataatgtctatatgaaataataaaataatgataagaaattcaatcacaaattaaaatttattggtaatattccttggtattactttatgaataattagaatcacttggttgtatgccaaataatgagttttctaactattctttaaagattacacaaatgatttagagttaaaaaatagtcggattctcatttttgtgaaatgagctagtatttgtaagctagaagtaaataaattacattaaaatattcgattaatgttgattattctctaaattttggatctctacggtaaaaataatgacctaattaatcttcaaagatttaggatttaattgtgtgaatgatctaaaatgggttgctttcgctggtagttaggctggcaaggtggatgct

SEQ ID NO: 76601 - DNA, 1266 bp, Cannabis sativa
atatgttcgaaaataatattaattgtaagtataatatatgttgattgggattatataagagaatgtgttatcttttttttttttcaaacattacaactaaaatttaaatatattacatatatcttttttattttgtatacgtgcttatataaaataaaatatatttttttaatatcctaatttaaattaattttttttttatctaatctacatatcttaaaaaaatatcttctcttttcaaataaaaaaaattattataacactattacctattgcaattatatcacatttaaaaatgatatataatattcaaaagaaatatcaagattctcttaaagaaaaaaaaaataaaacccaaatatcacgattatttatttattatacatgtgatatttaattttattgacaataatttttattattgtttaattaatttgattagagaatatatatatatggtagttaattattatttgagaattgttatgttatgatttatttttttgcgaactaactaacataatcttttttttttatcaaaataatgatattttattactttttttaaacatcaaattacatatgttgcggtcattttcttacaagaaaatatatttatttatataaaattaaacaaaaattaataattttttaaaatatacaatttttcattattaattaaaaattatagttatcaagacaaattaaaaaaacagctataacattatgagatgtaagaaacaagctattactaataataataaaaaaaaaaattaacttataagaggaataactcgaatgattattcatgtctatttgagtatctaatcaaaaaattattttaagacaaagaaagagccaaaattgatgaagaaatgccttcatgtagagctactttatacatagccaaagaaattaataaatggtaccaaaaaaaattctctaacaaaaattacttgcactccaaggcaaagaaaccctagcttagtgaagtagtactatcctcaaatatcctcttccttgccatttttgcctgcaaatgtaataatccattttgagagtgagagaaatttttttggtaaataagatgacaaaatctccaattaataattcttgtaatcacctaagaaataaaatcttgaaagttcgataaggtggttaagatggacacttgttctcgctgttaatcagtggtgatggtgaacttagatggagacaagtgggaaatttactccacttattttttttaagttaattaggattttt

SEQ ID NO: 76602 - DNA, 1449 bp, Cannabis sativa
tttataattcatattaggatgttagtgaaacatacttgttagtaaatctagatcctggtaaaatatttcgaacaaatacttagttcaagctaggtctgagatatctggtatgttttaatggtaaactttgcaagtagaattatacttctaggatagtattatgtggaaattttttgtgccatgagagtgttgatactatatgggtagttaaggtatggctgtctagactccgtagaatttacatgtgtttaggattttggaaatagggtttaaaccaggcatgaccaaattttgggtaaatactaggtctgcccatcttttgtgcgtcaattcggagttcttagaactcagaatggacttaatttctagaattcactttttatttcattctggtaaattttcccttggttcctaatctatcactttgagtttcttggcaaagacaagcttttggaagtgatgggtttggcaggcacctctccgagcaattttagtagagcccttccttaatgtccattttgtcattttgatattgcgtgtctaattacttggcctttcttctctttaattgtcatttttctagtgatagatttaaacgaggaattccatctcaaagtggtggaaattgaagaaaaccctgaagttactcctgcagaggaaatggtgactaaggaaactcaggcagaggttcttggtggaggacctcaatagggcctactcgagagaatatcccggaggctattttgtctagggtaacgaaaaaatccaaaggaaaagggaaggccaagacttcgcctctcgctcatgcattcaaggactccattcggaaaatggaacaaaaggaaaattacttctgttcatacgatatgctggagatgtatgccactgaagctagactatgcaacatatcgggactgatgtggcacaagctatctgtcgcggaagaattagctaaagatcagctagatcatataataacttttataattcaataaattaataacacatatcgaccaataaatcaataaagatattaattatcattcaaaattgtgtcagatttatatctttttcgcaaagtataacaacttatttaattacctaaaaatgcgtacaacggatttgcctaaacgtaatagatgaatagacaaaataaaacttgtaaaatacaagtgcccaagagtccaaagtctgctcggtcacttgagggaaaactatacacacgtacaagcattggtaaacaacaagctcgaagaaaaaatgaaaaaaaaattagacttaagagaaaatattcatattaagataacaaagcaggataagccaaggaattaaagctacccagccagccacttgtcttaaacaaaacgaaaatattttccgagtttaaaagccgcttgggcaggcatattttacttaaaaataggctcgtagacagaacatgtaaaaaaa

SEQ ID NO: 76603 - DNA, 826 bp, Cannabis sativa
aactagaagaacaagaaaataaaacgggcaacaactataatttacaaagaaatatacttattttttttttttacatatatacacacattttatgaaaacttgtttttcgggccacggccacctcttaggtagatctggtgcctgagaaatcaggagcctaattaaggtgatgtaaaattaattaataatgttgtgtgcatgcatatatatatcatatcatgtctgtgttatttttcttatatatatttttgaatatgatagaaaaccctaataaaaatgaagctataatgttcgtgtatgtggtctttttttatggttttcttatctataccactgaaaactctcaaatatatgtgttagataagctggaagatatttgagtatagaatacggtaacgaattttcaatatcaacttcgatatatatgatatctctttagagaatttattgagttttgttatttcaattttcaagtaataatgaataaattacttatactaaacgcgtaagattccaagaaagtgaggttttcttcctcttgcgtccaaaaccagccttctataaaatccaacctaattaaattaattttatttatatatatgtatataggtttaattatttattttattggacgaccaacaatacatgtgcatgcatataaatacatattgactacattttatttatttttggtagcaaatttgtatatgcatggcgtacatttgacttcatctaagaatattttgctgagacacaagaatacaagcatgaaattcgatggtttttaatttgatccataagaaagtataatcttttacgtttataa

SEQ ID NO: 76604 - DNA, 3208 bp, Cannabis sativa
tcatctctggatagtttccacgagaaccaaatatacgctttggtcccactaatccccatatgacagatgcgccaaagaagactcggtcgccaggacaagtccagggactatctggtgggagaagattatcctggcatatattctccacagaacccagcaaccaccatgccaccgcaagattgatggttccagcaaggatcgttcctatgaactgggagcacatattcagttggtaaagaagaatagaaaattgaaaatagggcaaagtaagcagattgttcagaataacttatctggagacaatttttgtgaaattgcttaatgcctgattgtgcaaagaagattatttttcttcctagtgttagagaatgtacctgaactagaaacatcgatcttggaggaatcttcatataatgccccagcttgaaatcatttagaaaggacacagcctgcgccgtactcatatagccataagttttgaagcaaacattggcaattggatgtcctggtaatatgatacccatgacatactctgttattatgttgagccccggtgtctgttattatttcatagcattagtagattgtgaaaaattctgggctttgtagggaagagtagaaatgaaagataatagcatggttgctagaatattttgtatacaaaatagagatgtaatgtgataatagttacatcgagtcttaacaaaacctacttttcgtaaactacaattagtaaacaaccagacttggatagtaaagctaaagcgaaagctaatcatgggattgaaagatattaaagttttgacttgcctggtttgttgtagcagttataatgctgattgggagagtgaaaatgaaggccatagcagcagcaaagaggagtccccaccatggcatctgaacctggtcattcataaaaatgcagagtgctagggatactaatagtgtcacgccaagcaagaagtaaaaccaccaggaaggtatgtccttgtatcttctcattagttttgtatggatgtcctccttgcctttatatgaagcactgtactgctgatagatctccctgtgcacaagctgtgaattaatttggattggagttgttttttgtccatagtctaaagaaagagtgtttctattccatctaaaaatttggtggccgtacaattattttggtagttctttgcttgtgtgtttcattaggaacattttatagatagtagtacaaaattgaaatgacaagtaaacaaactctcttctgaggatgtcaagtgtaactgtaactaaatgcaacacatttggatgaagtttattgacataggaagattaaatacaattaatgccgattttgtattttctctctgttaggatacaattgcagctaacaaaaattagataattaccttccttagaaatatgaaataaggaaatgtaatttaattttttgggataacaaagtattaccttccatagaagaaagccacatgtgtgagggtggcagctatggtggcaaaaccgaaaccataagtgagggcgaaaaacatgcttaagtgaattcttccttgctcctcatactttgctgtatccaactcgaacttgttgttcactatagctgatatattgtaaatttgaccttctgcggtaaacaagtgtgaagagaaaatgggaaattttcttgcactgtacaagtccagtccccagtatgctataggtagtgcaacataaattatcagtgcatagccagcaaaaatgttgagaatgctaaagaacgggcagattagagggctgaataagaaagatgccacggctgaccagtcaagtgtgaacgatcccagtccaaggcctttcatgcctgaaccgatctgctgtgctgtaactgactttgagaatacccagcaaacccatgatatgtttgtgagtgttgggaataggaatcccggaaaaacataccatgaaaaactgcagattaaagctattagaaagaactttgcccgtgacatccgctgctcgtctttctcatgcaatgctctgttcattggtatgggaaatttttattaaagcaggcatagataatgttcataagttatttaccattaaaattttaggcaattgtgacttgtgagtaaaaaaaaaaaggagggtgataatgcattcatgaaaattgatggcaataccatctaccctaaggctgaagctaaataggatcaagagttgttaggccaaataaaatttactttcaaaacttactgttattttggcatcactttaaatacatggtatctaattagattatccatagctagaaaatatgatttggattcactttgatattgtttttgattattttcatgagtttctatttaaaattttgtttattatggaaaactatgctgaatgtgcattgaacttttcattttattaaatcaaactagaacagtatgcaaatctatcttaattatctcacaagatgacacacctaattatccaaatcttacttgtagtgattagtgaacaattaattatttctcaaaatctcgtctacttttctttggggctaattgacagcaattcgtgagtgggactggtgactaattaaaaaacaaaaacaattaataaaaaaggctttatcttcgttgacttgggtcacaagtccaacaagtattttttttaatgaaataaaataaataaaaatggggcaccattttgtagctaaggggagccagtatcaaccagtagatttgttattatttttaaaagtaagaaagatggataataatgttaataataaccaatggtcaaaccaatcggtattgaagtaaaatttcatgaaatgtgaattgcacaccagggcattcacagatgagcagatttgaaatttgaataatgttaggcaagagaagagctacactaatggccacttggataggataatttaatataactatttttatcaaatatcactaatcattcttaaagcaccacttcacagtggtatctatcttagaagtgtaaatagatcggatcgaatccgatccagctataattggatcaatccgtcccgtcccgtcctgctagataagatactcagatcggatctacttattcggaccgaattggatccaatctgactttttttttaataatatctaagcttatattttaattttgtattagtattatttaatataatactatgtttggtattgacttg

SEQ ID NO: 76605 - DNA, 1930 bp, Cannabis sativa
taattgccttttctaatccacattactagagcggtcattacaactggtttgtccaaatggctgctacaggttcatcatataataggctagaagaagtttctttaaaaatcaaattaagaaccaagataggacaatattgttattcagaatccaagcattgtaaagattgtaattagtagaaaggggtttaaggatagaagcatccaagaatcttaattcattcttgaaagagatagcaagctccatagaacaactctaagaaatgtaattgtcctagcctatgagtggttgagaaacaaggatattcccaaggctatctccatggtgaaggtagtaaggattcgacggatcttcgattggatttcttggagtcatgacatggagactttgattgttagatctgtagtttgttgtggatttccagtgatgatagtgcttggaactccagctttagtcctatattcttgattgttgtttgacatggtaaactagattgaacattggatcaaaaaccaagaaagaacacatgatgcaaagtaacgattggagaagaaatatgaaaatctaagataacgggatacttgggatttggtttgtactctgaaggatcattctactttcacgtggtgtattattggcgatctgaataatgtggggagtaataatgagatgagaggggggagagtgtatcaaactggctattagatggattttgagatatgttagatgaatgtgggttgtttgatttttagttgagttgatatccttttacatggggacgtggtcacggtacagatgcatagattgaggttcgccttgataaggctcttgttacgcaatcttggctagatgtttctaaggacgctcgtctagctaatctttagttgtctaccttagatcattgtctaattttctaagaaccgtgtatttaggtcatttcttagtgtgtgtgaaaaaaatttaaatttgaaaattcatggttacgagagcccatatgtgagaagttagcgaggggtgtttgggagggtaatttggaggtggatctttttgagaaaatttctagttgtggagtggttctgaccgattgttttaaagagagattgttacagtgcaagagacgattgagataactttgtcaaaaaactaatgttgtttcacaaaagttgtatgaggaagaacaaaaagttttatgagattttaactcaataagaagtattgtggaagcaaagagcgaagaagttttggttgaaagatggtgataaaaatagtcgttattttcatgcagcggtgagttctcgtaaaaggacaaatcatatttctaagctacaagatgagagtggtgcttggtttacatgggatgatggtcttcttcagttagtacaagagtatttctaggatgtttttactgccttagatgccgagtggggtaacctgcttgatgatattcaacattcaattttagcttctcaaaatgacgatttggtgcgacctatttcggaagaggaattttgtagggccttgttttaaatacattcagagaatgctctgggtcgtgatgggataagcctgagattttatcaaaaattttagcatattgtgtgggcagatgtggttaattggtgcaatatgttttctcttcgggtgagatccaattggtattaatgacactaatattgttcttattccaaaaaataagaatattgtgaagataggggatctaaggtcaatttctttgtgtaatgtggtctacaagattgattctaaggttatggtcaattaatttaatgtggtgttgccacaggtaatctatgacacacaaagtgcttatatactgggtcggttgattttcgataatatcttggtgttgtttgaaactatgcattatttgaagcgtaaggttactggaaaggcgggagttatggtgttaaaa

SEQ ID NO: 76606 - DNA, 872 bp, Cannabis sativa
  modified_base (834)..(838): a, c, t, g, unknown or other
ggtttttatagagagaaagaataagaagataattatggagatctcgaagagagaaggatgatttatgttggctaaattgagtcaatggcttcccggctaactaggattcattttgagccactaaattattctcattaatttcttggataactataaaataagagcattgctattaggcaccagtagtgcctagcacttttgcgacatgtggcattgcgattggctagcgatactccttaaaaactattatattaaattatatgggacccgatacttagttgtactaatagcgatattgacacataggaaggtgttagacactactgggccctttagcatttctcataaaataaagaacgaaattttgcatgtaattaatatgataattaatatgagacataataacccattttttaattagtatgcatatatctaattaatagtacaaattcatttgctaagtactttttgcatgtttaactaggaatatagtacgacaaaaataataaaattgtcatatatgccattcatatatatttagcaggagataaaaaaaaaatgaattttggtttagccaattacatttaattcttttaactgaatttttagtatagattagtaaacaacaaacaatagctacccaaaaagatttcacaaattaaacgcctctataagtcatatatttttagtttgaagccaaaatacataaagacaatataaaatttcaactaatatatatttccaagttaagatggggcttaatttagccgagatatatcgactatggagtttgttaagagaaatgctaatgggcaccactggtgcctagcaccnnnnnacgtgtcaatatcgctattggtgtaattaagtat

SEQ ID NO: 76607 - DNA, 721 bp, Cannabis sativa
aaaaacttagtcaaatattttttttataattatacttattcaaaacatcatgtaaaattataaaaaatttaaaatattttaatatagaaagtagtttttaagcggttaatttcacacacataaaaataaaagtaaattgcgataaaaactcatgtgtaaatttagatacttctaccatgcacccttctaaaaaggtgcaccgttacaccctttgtcatccagaaaaaaatttagtcaaatatttttttataatcatgtccgttataattattcaaaacattctgtaaaattatataaaaaaaaatgaaatactttacaatattgaaagtagtgttcaagcagtcaattttacacacatatataaaataagattaaagtacgccaaaactccaatagtttcactctgctagcaattaactcccaaaacctaaattttggtagcaaaacccccaagccaccatcccattagtaattgggttaattgcggtaaaaaacccaatactttatttcactagcaattaacctccaaaacttaaattttggcggtaaaactctcaaaactcgcaatctattagcaattagtaatttccatctaaatttagttgttaagtgccaggttggactatctatatgtacacattgtacacgtggtacaatttcattggcccacgtaaataaattctcatttttttaaaaaaataaaataaattaatttaacata

SEQ ID NO: 76608 - DNA, 581 bp, Cannabis sativa
gtggaaacttggaggtgatcattctcatcaactgacaaggtcgattcaaattcattcacaatattccctctgcatctttttagagtttgtctaagagaaagaccttcactctgtcgctttgttaacacatttgggttcgagttttccttcccagaagtattaattacagctgtggcaggagtagatatggcatgagacattaatggtgtgagtgcagcagaaaccataatttgcttgttagacaaattaatgggttgatctgtaggaggatatgtagcaaaggcattacaagaaggaggaatgggagtaaatggcatatagatggacgagagatctgtgaaattggagaggggccatgagatttatctgcccgtttgtcacagctagcagaggaagaagggcatgaaatggtggaattgtttaaagaagatggctgaaaacaaattgatggtggtttcttaattgaagcagggacggtaagattgtgaggagcattactgataatatcttcattgtcaatggcattggaagactctccagcatataaaggccttggatgtggatgaccacgcagatgaagt

SEQ ID NO: 76609 - DNA, 5261 bp, Cannabis sativa
ctaacaaaaattagttagaattgatcgtgacaggtcatcgatcctacatctaactaatttctgtaactaacgtactaagaaaagaaagaacctactactatatatacttgcacttcaatctccttcagcttgggttgagtagaatcttcaagatccaggagcaaagatcttaggagaagaggagagagactcgtacatgcacaagaaaataagattgagttagtaaacagagagagagagagagagagagagagattaaacacaatacttgtaataaatcaagagattaccagtcaaaatcatagctgtgacttggaatatcatccttgtaactctgattaattgattaacagtggaatcgagctaccaaatctgaggagcagcttagcaggaacgtagcccatttttgagtgaaccttgggaaaaatctcagatattttctttacctttctcattctgtttttctttttgatattttgtgggagagatcagatcaatctaaatctgatcttgtgtatgtgtgtgatttgtgtttttagcaagactaggggtcgagcattgagtttcttcgaagaagaaaatctctactagggtttctttgtgaagctagaacctaagtcaaattgatcgagaaggttcttgttttagggcaaaacgaagtcgtattgactttgttgactggtaaaaagttaaaggaggtaaaggtcaaatttgaccttggttaaaattgataagtgtttgttggtataaggtatatttggcaaattgaaattcctacagttcctgtactctctgtcgagattaacaagaactatcaatcattgtgattattagcacacacttatccttgtgtgttaaggcatggcttgaaagagtaaagtgtgagtttttcatcatcatctcacttggaatttataatttttttgatttacaaagagatagtaaggaatcttgataggtttcaagatgtgttcttctacatattttatgcattttataatttattgtctacattttatgttgagaccttgcttcagtatcaattcttttaaaattaatcttctactgctactctaatttactcttaaaatatcaacaaacagagaatcgccttgccataagcttctactctggattataatccctttgacactattattgaggagaatcaagaattggacagattgaacacatcacgtgatttttttcactcatatttcactgtaacccatcttcagtaattcacattctataaggttccactcaatcctgtgaagtttttaccatgtctagttttagggccattttttgaaccactttcaattttttttccacagtgcaacccctcaaagctaataatagtattacactataaaaaaaaaagttaactttagtgaaaattttttaatcataacataaatatttgtgactaaatgttaattttagtataataaaaaattatttgtaactaaaacataactttcagatataagttattactagtttaattttagtcacaataagtattgcgactaaaaatatatttagttacagtaaattataatttttgtgactaatacttttagccataaactttttagtcacaacataaaaatataaatttatgattagttataactttttttatttttaattataaattttgttgtgactaaaaataattttttttacaatattatcataaattagatcgatggaaataaagacaaagtaagattcagaaattttatcacccacagaaagtcgatcttattcaagtatttgaaaactattttatagttcacattataagctaatgggttagaaattctcaaatcttataaggggttttgaatttaaattcatgtatctactttcatacttgtaaatacaaatgctttgcgtatatttaaaaaagttgtctcacattcataaatctgttgttaatcaaataaaataaaattagaacaagttgcaagagaacaataataattaatgtaatcctcaaaaaagaaaataaattttaaagaaatgcacgtgcgatcctaaatcccaataatacccaattgaattgaccactgtgcattaattaaaagctttatgttttaaaatcttaaacattaagaatataaaatcctatcctcattatgccttttgtctattattgattgttgacttagtgatgatgaaaatgtcaaataagttcttcaacattaaagagaaagtcaaaggcgaatcttcaaaatttattttagctttagcagagtggccattatataaaccaaattggaaatattgttgttttattactttaaaagaatattgattttagagtttttttttttttttggtcgttaaatccttttaattattattttacctacacataaccttttaagtttaaattttgacatcattcactttctactgttaactggtaatataaaccgcttatgtgtatacttttatacacatgacacatttatattaatacacctaatattataatttaaaaaatataaaacacataaaaaatataaaaaaaattataatattttttatttttataattttatttaattttaaataaattttgaaaataattttcgaataataatattcggtataccaatataaacgtgctacgtgtacaagagtatgcacataagtagtccatggtaactgttaatcggatgacactttaaatttgttacagtagtttggagggttttactgcaaaaatttaaattttgagagttaaatacaagtgacatgatagttgagagggtttagctgccaaaaactcttaattttaaaatatttttataaaaaaatatattatattattaaatgaatccaatttatatattttttttttttaaaaaaagaactttgttcgagaatttgatctacatttctccttatgaaagaattttcaaattagactaaattttaaaaattccacaaaaagttatttgaaattcatttaaatatttgtaaaaataattttttttaaaaaaaaacgagaaagatgatgaaaagtgatgaaacaaattgtatttaagtgtccttacaaaagaaataaaatgtataagagtttaatttttgaataggcacacacttggacacattttgtgaaggctgattaagtttttggcgaaaacaaaatcttctattgcaaattgtcgagagtggcagtgctagtctttgtacccttacttcaagttttattgggtattctctcacggatttatgactcttatacacgagtacgtcactttgaatgattcctggaatgacagttgatcctgtaaaccaacacgagtctttaaagttcacccatcctgtatttactctaagtcaagcacgcttaactttaaatttttgagtgataggctagaagatgcatcttgttatcatcagtaacacccatacatcaatttaagtcaactttaatggcatgttacttaaaaggattgagaattaatagtatgatattgattttcatacaattgtttactaaattttgaaaagagagaaagtagtggggtccacacaatttaaggagaaaacaaagggaaagcttctcccccatttttataaagaatacattttcctttcctaacttaatttattttaattttaatttattagttaaaaataaaaaagacaaatatgtccttttaaaatctataaacaaaaaataattacatgtcttaataatgataattttgtcaaattaaagcaatatgattacattttctagttatgtaaacaaaataatatgattctattttttttttttccggacagtttagtaaacagcataataaaatattatttttgattattttctattttaaaccgattcatttctcccattgattattctgattccaattacagcttagtaaacgtatcataattctataatctcatacctacacatcctaaaatcatcacacttgacttttcctaagcgacctattacacatcttacctagtcttcccctttatagatcacgagactctgactgccacaagccaagccacctcttatcattttgcaagttttcatgaaaaaatagtaaaacaaagttacattagaaagtttaaaagggtatttgatattgttttttttatttactacaagaaatactatttttgtcggtgcattattgtgccaacaaaagtatgtgccggtaaaaactatctgtgaatctcggttagtaaaaagctttttgctggcacaatttatctttgcgccggcaaaactaaatttatcgacgctattttgtgccaggaaaaactataccctggtgtaaactatggtcctaaatccgctaatcggtgtctaaaataactttgtcgccgcataaatgcgtcggcaaaagtttcgtgcattttccataaatggtgcacaagattttgtcgctgccatttagatttatgcacaaatgacctttgtgcgccggtaaaaagtttagagtttagggttttgatttttgtttaggattttagattagtttgtgctagcgcaaaaatgcgtcggtaaagcttttgctttaatttttttaaatattattacattttaatactttataattatattataatcaattttaaatttaaaattagattttaaagaaataattaaaaaatagtattcaaatttataattaaaaagtattccaatcgaactaatatacaaatatgttcgatttgtagtaagtaattaaaagtctaagttatcaaaaaaaaaaaggcaaaatattaaaagatgttcggaaattaaaaaaaaaattaagttctaaagttaattataaaatatatattgttctaaagatacttaatgtcaccgccattgttgttctgagtcgggacggtgcgatgacgatctagcaccagaaggagtgggaaacggcagatgatccataggaggcatgttgaaaccaagcacaacctgagagaaatactcaaactaatcttggaattacttgattttgagctgttgtgtttcatactacttcttcgaatactgagattactgctgtgcctcctctgcttttttctataaggcctcataccgttccatagtaatagtctgtgatgcaaaagcagtcgtggcagttgctcttttggccctaaataccttcaatctcaagagatggccaaagccccaaacaccagtatcttccaaatcgatacaacacacacaatgaataatatgcgctattaggataaagtgtataacctttgtt

SEQ ID NO: 76610 - DNA, 796 bp, Cannabis sativa
tcgccatttatttttattctgtgtagtgaggtcttatccaagctcatttttaaggtggaaaggttgggtcagctatcgggggtgcgtatagctagaaactctgctcccatttcgcacttgttctatgcagatgattcaatatttttctgcaatgctacggttgcgaattcggagaatcttttgaaatgtattcacacctatgaagaatggtctggacagagagttaacaagcagaaaagtggcctggttttttctcctaatactccgagaagctgtcgagaagaaatcaagcagaggatgggaattggttgtctgaattctagtgagaagtatttgggtaacccgtttttcttttctgctaataaaagaagtgattttcaattcatcaaggagaaaataactaatagactcgaaggctggaaagcacgtcagctggctcaagcagggagatcagtgctgatcaattcagttttacagactatcccaaactactgtatgtccacggctgctgtgcccattactctctgtaacaaactggataggattcttgcgagattttggtggataggcaattcggaaaagaatagatactgtgctctgaagagttggaatgatttatgtcagcctaaggtatgtgggggactgggttttagaagaatggcggatatgaatggctctacttgccaaattgttttggatggtcttgaaaggagaggacaagttttgggttcacttacttagagataaatattgcagagttttgtccccttggaatgtcgagaaaaaagatatggat

SEQ ID NO: 76611 - DNA, 525 bp, Cannabis sativa
accttttcaacatttttcgttataaaaataagattacaaacaagttgttaattatattatttttccaaatgtttgtacaaatataggtttaaattcatgcgtagctatagagacgtctttttcgtaggttctgagatgactttttgtgatcaagagttcatgacttatttaaatggaggttcaagaggacagttacaaattgagctacacatactagtttttatttttcttttgaaagtttaacttgatagtatatatatgttggtttaaactaatttaaaattaacatgttatttgctattacaattaacatacactacaatatatttaaatatttattattattaagttaatattacgtacaatatatatttaattatattttaatttttaatttaattatgtactttaattttaaatgaataacactttcggttgtgttaagagtccatactttttgatgtttttgataaaatagaaaatgtacagaacctaccgttatgtgtaaaagagtatggcaaacaa

SEQ ID NO: 76612 - DNA, 790 bp, Cannabis sativa
  modified_base (37)..(37): a, c, t, g, unknown or other
ttttactaaaattagaaaaaaatccttaaatccaacnatctcaatagttcaggggcattttcaatgaccttaaaagttcaagggggcatgatttggtacatgtcaaagttcaggatgcaaaaatcttaattagcatgttatgtatttttttattttttaagttatattttgtaattttttttatttaaaaatttgtttaatggctcctcttaaattttatttttgcatattaatccctaatcacaatatttttctgcctttgcccctaattatgcaggcatctcaaaaaggcgtgattggaatatcattggtggcgccctggtatgagccgtattctaacgcaaagcacaacctaaatgctgcaaaacgagcccttgatttcgtttttggatggtacattattactactatttcatactatgattatatatatatatataggctttggttggttggagttttaaaagttatttttaggtttatgaagttttaaaaaatatttgtattgctagttgtgtaattaatgaatttcaacttttaattctaaaaagatcttttgatatagaaaccagttttaataattttctcaagaagagatttttgaaaaactataaggagaaccctaattattaataatagagaaatgttaaggaacgtcttgtattgttattggtgcaaattaatattggaccctacatattttcatttaataaattataatataaaaaactgctatctactcgtaacgcgctatgtcggtataatgtaattaatttgtaggtgcatggaa

SEQ ID NO: 76613 - DNA, 889 bp, Cannabis sativa
ttttagtttctcaagaagttttcctgaaaaagttactaaaattgactaacaaactttttagagctaagaactaaactaatttgttacctaaccagccagtaaaagtgcttttaaaatctcagaatcttaaaaataattttcaaacactcccaataacttaagacactcatgttaggaatgcaaataaatttctacatattggctaaaaatgggaaggatcatgggtatataaggatgtacatatctctattggtatgaggccttttgggaaggtgcccaaaaataaaaccgtgaaggcttgcccaaagcgaacaatatcatacctagtggagatggcatgtagtgtccgatgatccttgacaaattggtatcagcgccaaatcccaacattagtcatgcaatcctttgaatcatcttaaggtgatataccttggtatactctcatgatgttcgtggatgtgcttagttaggtggtgtgctttgatccggtagagttggcctagtaataagcaagaaactctcgaggtagtggtggggctccatgtaaggcgtgctctccaacgcattggaggaaagtatactagttggtagagagtggacggattggagatcttgtttggtgccttgtgtcgaaagtcttcttgacaatgaaggtcaggcagcttgttctgtttgtgataacagaggtacaaaatggaagatcgtttgaggggaaactatgtagtcctgtgtttgaggagaggattgttgggaatgtaaacaaagtcttacatttgctagaaataataagaatcatgaatatataaggatggatatatttctattggcattaggtcttttgagaatgtgcttaaaaacaaaatcaacttaggcccaaagcgaataatat

SEQ ID NO: 76614 - DNA, 1366 bp, Cannabis sativa
ggtctaaatgtgcagccctactttatactgtccaaagataatttttaatcaatcatccttttctttgtgaaaaaaatttaatttttggattttgtcagtattttcgtatatatttctaggtagaatgtagttattatacacatatatgctcccaagtaattttaaagaaaataaaactttataattacttgaaaaattcaacttttattcagaataatgaacaattattacaaagattaatacaatatttacataataaacttttagtgataaggtcgtaagtgctcgctgttacagtgattctttattagcgagacattaagccaagctactttataaaccccgattccaactacatcttcaatgatgtatgggcattcccagtttggtgtaatgtttgagtgcaaatggctaagctaagcaccaccccaaaacccaacattgggaattggcagagcaaagattgacgacaacgtaggagttgatgaagaagaaggcccaatcgaaacaacaactgaagaagaagagctagaaatgggagtgttgctaagctcgaacaaatgtggtcgaagaacggttagaaacagcgctgggaatggagtgagcatgttcaagcgatgactggtgagattgaaattgaatttagggcttagggttgaggtttaggctgggattgaggtttgagtttgtggagggcaactcaggagtagagatcgacgaagttgtcatggacgatagaggttgttactgggtcgaaggttgtggacttgaggaggggttgtacttgtaatggtggtacggtaggtgggttggtggcacctggtgcggacatgggttgtggcgtgggatttggttcatccatttgcataaaacagagaagagacccttcctcttagttttggtttggatgctacagatagaacaaggagaaagagaaagggaagatttagtggcagcgtgaagaagaagaaatagaaaaataaaataatttatttagtttttttttttaattttaaattatttaaaattaaaattacgatttggactaattatttatcaaaacgtagcattttgaattagtaaacaattcattagaaaaagaactaaccgaattataaatatggagatcttgtggattattattgttaatttttaagattaggaacttatttgcattagaataattttttttagaacttatattacaattttctctatataattataaaatgtgggtcaaaaactattcatttttgttttagccaaatctaacttaaatttttgacaatacattgatcattgatgttggtctaactttatggtacgtcccttacaaaattataacattatcatacatcatttaata

SEQ ID NO: 76615 - DNA, 901 bp, Cannabis sativa
taaactcattctatacaaaactcttggagtgaaaaaaaaaaataaacattttatacaattacaagtgcataaacaatttgcatctactttcttcaatttcttcgaaagaatcaaagcagttttactcctaacatcttgctgaattctttgacaacttacagtaacaatttgtacactttgaagccaaaaggctatatttcgaaccatccagatgtgatacacgaaggcagcaatagaggcaatatatatacttgtttgcaaaatttagaaattttttatctatcaatccatctcacaatagtaggaaaactagatcccatacatcaccatccaagccaatttttaatcacttgttagaaaaccttgctaaaataacagctaaaaaatagatgctcaatagattcaacctgaaccccacacatcaagcaagtattatcttggcaaatattaaatgtcattaatctgtctcttgtctacagcctctttaagacagctatcataagaatgaaatgatgctttagaatggaaagtctctcccaaacttgtccaacccaatttaattaccttctcaagagtacgaagaagagccttataacctcgactgatggtgtatcaaagaaataagaaatgttgctcacttgtaatttgtttaatcttgtctctaattaacaaccattatttgcctccagtaccaactgctatgcatgttaaaagtttagctccaccaattttgatctttcaaatacacactatgtaccaatttcaccgaaaggttatcttgctttgttgaaatagcccacacatactttgtcaagagttgcttggttctaaagtaacaacattcaaaaccccagcccaccttctttcagagacttgcaaagatctgcccaagcgacatacc

SEQ ID NO: 76616 - DNA, 3820 bp, Cannabis sativa
aaatgccgttagatagacacttttaagatataaagatatgagtaatgttattagtccagtatattttataagtagcggcgcacgattagttagtgatataaagtctaatataattaattatatcaatactttttaacacttctcgtacatatatctatatttttcttatttagagtttgattgatctgattttcatacatgaacagaaaagaaacctgatggataaccaataaatatcttgaatttaattatatatgaaaaacttgacaccatttcgtgtttgccgacacatatgcatttgatatcttttcccttttttaacataaaagagagtcaattaattatctgatagtatttgtttatccttgattttgttattataatatacaattagaaaattataatatacaatcagttataagtcaagatgtaacattttttgttttcgaataaaatattatttgtgtgttaaaaaaaaaatatattatttgatataaattttgacatcacatatatatatactacttaaaatggggccacaacatttttggtagtagatatgcataaaaagctgctttcttttttcatcaagtatataattttgaatcttgtaattcctatttagcagtataaagttggagatgataggtgccaaagtagtagttagttttatgtgcttggtaaaatcatcagaccatcttttattaaacatataaaaattgtggagacggactgtatgggagtagttcaggcacttagaagtttgctagacatggtgtctttgtttggttgtgttattaatgattgtaataaacttctttctgagttaagaaatgtctctgttttctttgttaaacgatcagcgaataaggttgctcatgcttttgcaaaagcttctctattttattctgattgtacgtttcacctggaggatgttccggtggatttgctacctagtttggtagctgattttgatgattaataagattaacttttccattaaaaaaaaaacatataaaaattgtgttatatttggtataaaaagtaattttgcagtaaatttaaatcaaattataatattatactttaatgcacaattgtaaaattttaatataaaatttaatatctaattaatatttttttttaaaaaaaataaaactaataactttattatcaattttattattattttgatatgtaagataataaaataataatataaatacttcataatttaatgctatagttaattatactaataaaataatataaatgatataaatataaattaaaaaataaagcgtttattgtggtataaattttacattatagaaaatattgtgccaaatttagtataaaatttattatgtgtcaaatttacatcactttttagcacatcattggaccaaactttttgttaaatgaactatattttagctttacaccacttatttatatcttcattgaagatactcttagccacaaaaaattgtatagtgataaatatgtataaatatttgtcttttaaagtagtggtgttagtttcctaaagtggtgtaaggtggcaattatcaggtcacgtcactctgatttaacatgaacacgatttgaaatcttacaagtttgaaatgattcgaaaattattcggattatcttcgtgtttgtcttttattaattttttgttacaagtcgtgcttttgttgcccatctaaaatacatttaaaaactccacaccacacaaacacgatatgatgatgacactaaaaataacaatttatcttacaattagtcaatacaacacaagattttttgggttctatctaaataggccatatatagagtgttaaatgtgtgttaattgttagttagtgagctgtatagaaagttagttagttctgttataactaatttttataacagaattgaattgaaccgtgtatatatatatacttactgtaaaagcatgatcctctaatcaatgaaatacagcttctctctttcatctctctctgttacaccctgttcttattttactaaaatggtatcagagccaagaacatcttgagctttttcttcttcgtttttcttctatgttcttcttgtttttctagctatggcaaaaggaggagcaacacagacttgaagcaatacaaatttagatgacaactctaaaaatgcaaatcgttcattttctactgatttgaatttgaggttcgatgatccaagaaatcctactatctctctcatggagatcatccaagtgcaatgcttgtagctaaaattcgcactggatttgagaattacagctcgtggaagagatcaatgcttgttgctctagttgcgagaaacaaagtcaagtttatggatggaacaacatgatgaagattatgatccctggtgcagatgcaatagtttgatcatttcttggatcttgcgtgctgtctcgattgagatcgaagatagcataatgtatctcaaaaatgcttcatcaatttgggttgaattgtaggagaggttcagtaaaaaaaaatgctccgcgaattttcgaagttaaacgtgctatgcaacttctctagcaagctacaagaatcgttatatgggctaaaacaagcctcaagacaatggtttgagaagttttctaatgccttgaggaagaaggattctcacatattccgctacaaattactccttcttcattaaacatttcaagcatgatttcatagccttgcttgtctatgttgatgatgtgatacttgctagcaacaacttggaagaattggagctgctcaaaataaagcttgaccaaagatttaaacttaaggatctaggaaagctaaaataattcttaggtttggaagttgcatgatctgaacaaggtatttccatttctcaaagaccatatgcattacaaattcttgaagactttggatatttgaaaagcaaacctatgaacactcctatggaagcaaacttaattaaattgtgttaggaagctaaagaagatgggttggctaatgctgcactatatagaaaaattattggaaagctccaatatcttactttgactagactagatttgtcattctcagttaacagactgagccaattcttaagcacaccaagagtatcacatatggttgctgctcaaagactgctacaatatgttaaagttacactgactcaaattgggtagcttgtccagaaacaagaagatcaactactgatttttatattttccttagaaacacattaatttcatggaaaagcaaaaaaacaacacacaatgtctagatccttagtagaggctgaatataaggtaatgactaatacaacttcaaaaattatttggctattgttaatgctcgaagaactaaaaatcaagcacaaatgacctgttatcatgcattgtgataatatggcaacgcaacatattgttgataatcctatttttcatgagaggacaaacatatagaaattgattgccatttgataaaagaaaaggttcaagaaaaggataatcaagacaacttacatctcaagcaaagaacaacttgtagacatcttcacaaaggctttaatgcctggtcagtttggctatctcaaagacaaaatgggtttaatgaatctcatccatcttgagggggagtatcaaaataggccagctataaagtgttaggtgtgtattagttattagtatagtgagctgtataggaagttagttagttctatttagttagtattaagagttagtcccacattgttaatgtgtgaaaataaattgtgatatataagatgaaagggctactcctcccattgccaa

SEQ ID NO: 76617 - DNA, 1520 bp, Cannabis sativa
tctatctccaaggattttcctaagaggaagagatttcgagaagatactccaccgcatgattttatgtcattcaagaatcttgaagttctagagtttgttccactatttagggtcgacatcgatgggtggggctctatccaaaacttagattaagtattcagatttggtgtttaacttgacactctttttcttgacccaaattcaatgatcactaccttggccttttcaataacctcctttttaagataacatcaataatttcctgctcataaaggatgttaagtttaggaatgtcccaacccccattgagttgtaagaggtctgctgcataagtaaaaccagccctcgtattccctttcggttttggacaaaactcattaccatgtagtacccaagggtctttccaaacgttgattctattaccatctgtaattctcatacatgcacattcccttaagacatctttggctttcaccacatttttctaaaaccaaaaattaatatttttatatttacttcgaaaaaagtgggagttgttaagatatgttgcagccaacaacaccctacaacaaaggaagttttccccattaagaagttgtcaaccctacttggccaggaaggctctattcatttctgtagttttgcaaaatcccaatccatcctagatttagaaagacaaagtttgtcccaagccttaagataaaagcccttgtttcattttttaccaccccaccaaaaatatcttaccaaactatctattcaagtagcaagttgattagatagtttagtattttgcatagagtaagtgggcggtgagagaacaacagatttgatcaatgtagcgcgaccaatcttaaagaaggtcttcaccttctaaccttgaagtttatagatgagattatctatactaaaattaaaatatgcatcatgttagtgaatacaaaacaaaagaaggccaaggtaattaatattatcaattggccccttaatccccaaggcttccttaatgcttctttgcataccaccactagtatttttactaaagaatgtgaatatttttagtttattgatctgttgtctagaacaattacaaaatttgtccaaacagctcgacataccttgagcctcagtcaagttagcctatccaactaagatgagttcatttgcaaagaaaagatgagacaaccgaggccctcccctactaagttacaaccccttgattgagccatcatctaaactttcctcaatcaatctcgaaagaatttgcattgacaaaataaatagatgggggagagagggtcgccttgtctcaatccacatattggattaatttttcacaccagacccctattaatacacttcagtgaagttgtggtgatacattgagcaaaccatgagcaaaacatctcgggagcatgagagtttttcaaaacatcatccacaaactgttagctcaatttatcatatgctttaatgagatcaattttaattgtgaaaatccctatcttacctcttttgag

SEQ ID NO: 76618 - DNA, 715 bp, Cannabis sativa
tctctttttttaattttttattcagttaataaatattaattattaattaattaagaaaaatctatcaatatatcaatcaatctatatatctctttaaatatctctttatattctgtctttaattctctattttttaatatttttattagatctataaatattaattaattaattaattaaaaaatatcccaataaaattcaaaaaattttaaaatattattattaataataattagtttaaaaatatatacataaaatcaaacatcaccctctcttaatcgtatatatcaaatctcatctcaaataaagtatataacctaacttatactcttctttctaaactattttctttaagcttagtaccttttttattttatttaatttttttaataaaccagacaatattttttattttgaggtttatggcatatatacttttttgagtgtgcgccatcaatcatggataaaggagttttatgggtctcaatttcttgagctttcaacaaagttgtgagtttttaaatatgcaatcttagttttatgttaattattgtagtttaatgtaattgtattttgatgaaatgcatgtaatttcgttgagtttattataaatatctctctcttattattattttttttctaaaatctccatattatactacgttttgtatatgaaatttatttaaataatatgtcaaagatcatatatatatat

SEQ ID NO: 76619 - DNA, 632 bp, Cannabis sativa
  modified_base (592)..(606): a, c, t, g, unknown or other
tgttgcatttatctgagttgtttgcttagagtttgtcctgaagtgccacggtattgttgttaattgacatatttaatttcatttccatttgatcttgttcttcatcgtctacctatggctgcaaaagtccagaagcttcttccttccttcaacgatttcatcaaagaaatcatcaagttgggcaacgatattctcagctccatatctcaaaaccataaaacaatgtctcaagttgtcaaccctttctccgatcccaccttccgatttccactccattacctgactcgtcgttgtggttgtggtggtcatcgtcgctgtcctctccaactcacttctaagctcatccatggcagccttagacctcctaaacacatacaaaagaatccccaaccgaccactgatctgtttgatctccgtcgccactctctgttgcaacctccccgtcgatatcataaatgccaatccaaagaacaatcaaccttcatacccacctctgcctctcagaaaactcaatttcgaccaacagtaaaccagcccataaagtaagatcatcagcagtagtgatggtggttttgttggaaatattttaccnnnnnnnnnnnnnnntaccatgtatgtttcattaacatcct

SEQ ID NO: 76620 - DNA, 2080 bp, Cannabis sativa
acaacaattctacttatggtttgatccaactgctgatttccacacatactccattctttggaaccctcaacacattgtgtaagtacccctttactttccaaacttcttgactagttttactctattttaagcttgacttaatagaaacatttactctgtttttcagcttctctgtggatggtaccccaattagaaagttcaagaatttggaatcaaagggtgtgccatacccaaagaaccagccaatgagaatccactcaagtctttggaatgctgatgattgggccacaaggggtggtttggttaagactgattggagtaaggctcccttcacagcctcatacagaaacttcaaagccaatgcttgtgttatgaactctggctcatcttcttgtgcttcatcaaactctcaagctaattcaaattcatggctcaaccaagagttggactcagctggtgaacaaaagctgaaatgggttcagaagaattacttgatctacaattactgcactgattctaagagatttcctcaaggtttcccactagaatgcacagtggtctaagaattgagttatgaggttttatctgtgtgtgttaaggattttgatgtaaagtattaggttaattatttcatttgttatatttagatataatattctttatttgttttaaattatgtaccacaaattctatcagacaatgaaattattttattatacaattaattaaatgatcagcttccaaaacacaagcatatgacatcattaaaaatattatataacttcaaataccaaaactaattatctattactaattttttatttaaagctagctctataattaaatcaaatctatttgttttttgacttatggtagtgaccccttttagaagagaaaatctaataagaggacagtatagaataaacaaatcttctaaaaaataggattagctaataattataataataatagaataattgatacactctcaaattattattatataagttatatatataaattagtcaatgttaatttatgtggataagattaatttatttaatgttaatgaagtagctcaaaagtctacgtttaccctatgcatgtatgtaattcactaaataaaacaattaattaaatagcattgttattagacactagtggtgactagcatcttttagacgtgtcactttgcgattagttagcgatattctctaaaatctattaaattatatggactcgatacttaattacactaatatcgataatgatacataaaagaatgttggacattattggtactttttagcatttctcttaatactcaatattacaatattgttattagtaatcactgtggtgcttagcacgtcttacgattagttaacaatagtttctaataattattatctatgagatttgatattttaattgtaccaataataatatgatgttaagaagtgtgttagacactattaatagtatcttttaacatttttcatattaaaataaataagttaatatgtaatcatagacataacctaaaaacactaatattacttatctattctattctttataacacctcaccaaattatatttttatttacttcatttaaataatattgattctttaaagaaaataattaaaaaaataaataaatatacaaatattagtgggaaagagaaataaaaagaggacaaaaagaaaataatttttttaaaaaatgtataaaaaagcatatttgcttcgctaaggcatttcaagcatatcatggggaatggttttggaacttttggctatataattttagtattgttattggtcactactaataattaatattttttataagtaatattttaagattgattaataatatttttttaaaattatatgaaactcaatactcaattacattaataacagtataatattaaaaaaaaatattaaacaccaataattttttttagtaattctcttaattttaagattgagctattataccgcaactcatgcggatgctctaataatttcagataagtcttaagttcgaaaaagtaaaaataaataaataaa

SEQ ID NO: 76621 - DNA, 530 bp, Cannabis sativa
ttttttctaaattataactccaatagttggcgcttggcggacaagattaagttgaatagaaccaaaaagtagttagtggggtattttttttttcaaaaaaaatagaatagaagaagacaatttttttaagcaaatataaaacttttattaatttgctaagttggctaaaaaaagaaaggactctaaaccaataagagtatttttcctgttaaatatttatctcgtgaacaagatgctttaataaaactataagtattcatgttagtagatcgtttaacaaaaacaagaaaatattgtttaaagatgcaagaagtctacgataatattctataactccataaaaataaagtatatgtaatgaagtttgaatagcttggactgctaccaagtaatttgactccagctctatttttcgctatggttgagttttaatccaattttacgcttcctttatactaattgcttcagccaaattcagaacgcctataccagcaaaaatgtgtgacttagccatctctaattctccttga

SEQ ID NO: 76622 - DNA, 1877 bp, Cannabis sativa
aaacaagaaggctgtcttgaatgtcccattccagaaaatcttcagagatgcgatcctctgcttcatcttctgttgttgcatattttgatggtactgctgtaggatcaagatacttgagtagacgatgacctttgatagctgcatagacttggtgtctccatggaaggaagttattttcatcgagtttaactgaaagagtatgattgaatgagatggacgaaggtctcggtagttgattggaaccagtgggacgaagaacagaaccagatgaagttgcagacgccattagaatgaaggaagctctgataccaagttgagtttagagaggaagagagaacgagagagaagaaagatattctttattgttgaatgaattactttacatcagaacagaaaagaaattatatacagcaagaagaacaaagcaattagttacagaattggttagaatgatagctagcaaaacagaaaactaaccaacttaataacagacagtaactaactattaacagttgctaaatgctatcattaacaggtaccaacatttgtattattatttgcctaatgtaaatgtgcattaatattcaaactttgtattcgtttactgagaatcctgtattattgctaagatttggaacaaagatatctacatagtttagaacaaaacggttaaattctaaagaacaagatgttagcttatactttaaaagggaaatttgcggcataaatactcaaattattgagtttgttgcaaataaatacctaaattctaaaaatagcggcataaatactcaattttccaatttctttcaatccgttactacccatttaactattctgttaagtgctaacataaatgccatgtgtcaatacttctttggtccatctcataatattcattttagaaaaaaaaaatcatttaataaagatattaacgtataaaagagcttttaaaaattaaactgattttagcttaaaaaattaaacaaaaaatttaacatttaaaaaaaagaaagaaaaaaacaaactgatccccaataaaaaaaatttcgtacaacctcaccttgtcgagagaaataactaaacaaaaaatttcattaccaaaaatcaacacccatgccatcaagaacaataaaaaaatcaattgagtattgatgccatgtgttcaacccatgcgtttggatccatctccggctccaagtttcaataccttgcccgggtcaacatcccataaagaaatttctaacatagatctcgtcccttagccgccaccgacgagtgatgcaccttcaatggtccttcgtcattcctcgcctctgtcggagagaaagagttgcccaaattttgaacctcgcctgacccctccgtccacaccaggtctgtacccatccatgcttgcctgagaaataacaatgtgggtctattttatggaagaagatcaaataatttgggatttgacagtgcgacagagaagatgatggtacagaaaagttttaatgttaattcaaaaagattttttaaaaatatttcataatttttcaattaattatagttttcattttaaaaataataataattacatttttaataatttgaatattttaaaaaaatattttgaagtggaccagtaaaatatcaacatttggtaatttttttttttggatgaattaacagagtagttaaatgggtaattgttataataattaaatgattttttttattatttttctaaaatgaatattatgagatggaccaaagaagtattgacacatggcatttatgttagcacttaacagaatagttaaataggtagtaacggattgaaagaaattgagaaattgagtatttttgctgctatttttaaaatttaggtattt

SEQ ID NO: 76623 - DNA, 1552 bp, Cannabis sativa
tgaagtcaataatagagctcttcatatgctcaatggagggctggactgctctccttgcaaaaaccagtgcttcaagcaatgagttactggcaagtcggtttgctccatgcatacctgtgcaggcaacttcacctgccacatacaagcccctaacattggtctctccctggagcccagctcgaactcctccacacatgtaatgagcagcaggaacaactggaatcgggtggcgggttatgtctaatccatatcgaagacactctgctgctatgttagggaagtgggacataattttttccctgggtttgtgacttatatcaagaagcacatacttctcattacgctttttaagctggtcatctatgcttcttgccaccacatccctgggagcaagctctgctctctcatcatacaagggcataaacctctccatgtcaagattgtatagaatgcctccatctcccctgacagcttcagttatgagaaatgcattttcacgggtcttggttggtttgactggaagaccttcatctgctaaagctgttggatggaactgcacaaatctgccgcaagaaaactatgatcatattccaaatcaaacctccaaaccccacccaaaggaagaaaaatagaaaagaaatgcacttcaatacaatctacatgtttgggaacatatttttcaaattttaaccacttgcacattttagtgaatagaacatggaatcaattttttgtgtaacatttattgagcttcccgggattgtcttgggtaatgattaatttcaggctatgaaagtagcaataataaactggataattgataaaaccaagtactactaagatacagttagttgatttttactcactccatgtttgaaattacagcttgagcgagatgagccatggcaattccatctccagtagctacctgtcagtataatatacaaacatatttagccaatgttattttgcggatgtaaaatggaaacagaaatttggggaaaaacaattcaaataccagaggatttgtggttgaaggatatatatgtccagccccccctgatgcaagcaatgtcacctttgaaataaatcgtgttacctgaaaggaaagagttcgagaaattgaggacttaaacatagtgtttgttcagaaaaatacagcacagtaagagagtataggcagcaaaagattcttttacctctaatgtttcagtatttaaagtgtcaacaccaagacaaattatgtcagaaccatcctaaagtgccaatgacataaaaatatattagcaaataccaagaaagcattcatagtttcagtcaatcgatcattacaaactcaaaatcacatgaataaagcaatcagtgttatcgaaaaaggtttcacttgtttttagatgtgtgaagtgtctgaaaattgggtcaagaacacatacagcaaacacattgggagcaaaaaaaagcaggtgaaaagcaccaatctgtgaagaaaatgtgaaaagggcacttcacaaaagtaaaacctgcagtaaaacagacctgagaagttagcaaa

SEQ ID NO: 76624 - DNA, 1024 bp, Cannabis sativa
attttgtgcttgatttattccatgttgaccgtaccctgatttgctgctttgtttggctgtcgaagatacagcattaatggaattggatacagtagagtggccggaggaagaagcaccgccggtcttcgtggcaattcctggtttcaaccatctcgcaccagcagcgtaattccttcgtctcgggggtgctttcatctctaggccataaggcttatctaactgatcatagggagtatcaaagagacgatcgcaaaacctctcggagtgtccaagaactccacagatgaagcagaaggttggaaggtcctcgtacttgaacagagcgtggcaacttaatcctccctgtttaatcaatttctttttcctttttagtggctgagtgacattgatttttacccgaatccgcagatagtccctccatacaccaacaaagttgttaggatccgatttgacatattccccaagataattacccagtccccgaatcactgtttccgacataaaacccgttgtcaaattgtgaagctgtacccagaaatcaattcgattaagtggtactgatctgggattttcgccttgtttgagtcgctcaaataacaaaggaactcggtcaaaagtccatgggcttccttccttaactcgttcaatgtccacttcatggtaaaattgaaacaaatacaaattgttttctaattctttcacatacattcctctccccggttgccatagttgtgccattttattttgcatcgcttgaaaatcaatcgatctgtgggtgagaaaacgtcccaccaaacaccatctatcgtctatctcaaaggcctcatcatgttccccttcaaagagtaatccctcttcctcatcttcttcaatgttcagggctgcatattggtcttccaagttggaatcggtattcatttttcaggacaacagacacaaaagctagacagtagtatagccaatagaaaacagttaaaagaccaccaatactagaataacttctttgatcgacacagtacacaaa

SEQ ID NO: 76625 - DNA, 591 bp, Cannabis sativa
  modified_base (32)..(62): a, c, t, g, unknown or other
tttagaaagttcttatttaggatgttaataannnnnnnnnnnnnnnnnnnnnnnnnnnnnnnaaaataatttccaacagttgaaatctcagttgcaatattctggccttggagctggtggtgtagaggcgttcaagagtaatccacagctcattcgatgtaagacaacttatcacatgtccaaacatggattcggagatggagttgggaagccaactgagtatagacttatctatacgcctccacatggcatatccgagattgagttgacgagtcttgctaggaatcggacctccgattgtattgtccacaaactgtggtggacatggcttagttcctagcacatatccttcgagatcatgtgcgcgaagagcaggcaaggcttgagatctccagtatggatagttagctctttcgagtttaatggtgagaggggccagactttcgaagggcgaggattgtatggctgcagcaggtgtaataacaggtgtattgactggttcggcagtgggcgttgcatcagcttgatttgaggctgaagacaatttagctgaggcaggatttttcataacaggttagcgattttcccact

SEQ ID NO: 76626 - DNA, 801 bp, Cannabis sativa
ctatcatatactaattaattattagttttcatatttaattatgtagtcattacatattatatttttctgttttgaaaaaattctaagtaattgtaccctgataaaattcagatagtcaactgcatacatgttttattaattgatacgtgtacaactaattgttatattcattgtagaaacactattaaagagagttagtgatcagagcctgaaaatcctatactccattaattctctctcttttattttggaagtctaaaaattaatatgttagtgaagatttacatgcataaataactataactatgtagttattctgcacacacatatatatatatatatagagagaattgttcatatatttatagatttatataatataacatcaaaccttttcacgtctagctacataataaatcgcttgttaattaggcttagcagtgcatatatacaatttttttttttttgtttagttaattaataccttgggttgaatattgaacccttcaaaataataaatatgcttgaaacaacaagaaaagaggagagaaagaaagaaatagagaaagatgttgaaaagctttagcatcaaaatgtattgatttcacacttatagttatatacacttaagcgacatttagtagcacttttttaattaattctttgtttttaaaattgaaatagtgaaaataccttttaaaaacatgttctataaaattgttttcattttttaattttttaattgagaatcaaattttaaaaacaaaaaaaaaaaactactttaaatatttttttaaacag

SEQ ID NO: 76627 - DNA, 1025 bp, Cannabis sativa
agagttgttaactacaagtctataagtctaaaggtcaaccaacaacacaaacttttcaagtttgttggcacattcccactctctttccatttttatcaaccttacactaatttttctaagtctcatatattcagatttataataaatatatctgtatatataaatacaatatcgtagtggccctcattatgtactgaagttttcattgaatatatattttacttatattatagagtggatatatataataataataatatatattcattctaatatttaactatggagaacaacaccaccccaattcgtcgccggaagcaagccaaacatccacataattttgagtctgatcaaggtaagtgttttttttgaaaatatttatatggaaattatatgttgagattaattaattatttgttacaaattaactttggtgcagaggtttgtagtcttgaatgggaatttataaatatgaccgagcaagaagaagatcttatttatagaatgttttcactcgtgggaaataggtatttattaatgtttaagaaaataatttatacaatttttttccattttttttcttcataaaatcaaaccaaacataatatttatcgaattatgaaaaataatattataaggttataatttggtagcaatgtgggacacacaaattaacacataacatataacaaaagtttttttcttaagaaataaatatactcctatacctatattttaatttaataattattatattttatttttgaatgtttaattttatatagcctctgatgcatgcattgaccattgtttaggcaagtgaaaataaaagaaaaaaagaattttgattcataatttcatatgcatatatgaaatttttatttgtacgtattaagacaaaagtttgaaaattgtcttgataaactatcatatatgcttactttaaggaacttgatcattatataaagatcttcaaattaaaatatgttactaattgttaatatatgttgttatttgtttttttt

SEQ ID NO: 76628 - DNA, 649 bp, Cannabis sativa
ggttttaaaaatatgatgtggatgttggtatgacgatttcacactgctttatactgtgcaatatcatgcttgtggtgacgtgttttaaaaacatcatgccactagataacattaccatagaaattatcatacaataagaccacgattttactataactgtcataccttgtagtctatggtatgacaatttagaggacactatcctaccatatacaaaaaatgaggaagaaatttctcattatttaaccactatttatattcaaaaaaaattaatatttatttcaccactacaataagactaaaatgaataaataaaattgatctattctaaacatgaagagattaaaaaaaaaattaacttgttatagcatatataatttggctgctactttacttttttcttgtagtggaagttttctatgtttaatcttatattatagagaaaataatttgtagtgaaactttttttgtggtggaacttttctaggtttaatacgtattttattatttatttaattaattttgaattcattttaattaattaattaattaatatatcttgtagatttttaatattgaattttttctatttagacattacaaagtcttatgaaggaacacaattgttatggtctaattaactgattgt

SEQ ID NO: 76629 - DNA, 1641 bp, Cannabis sativa
gaaactcatatgcgagtagtattagagaacccgtgagtcatgttacttggaatatgaaaagtcattgtgcaactttgatagtcgtactcgtttaggtatttaataagaacggtctaaactgtttttaccatttatttttaaacatttgtatctaaattaaatgtaattaatgttataacggtcctgtctaaccagtagtatgagctgaaagattacttactttctatataaaagaatgatcccatctgaataaaactaatcacaaatctcttccaaaagtggattaagcaaaccaagctctgacaaaactattataattttcttgtctttctttacatatttgttgtttacatttcactaattgttattttagtttgaatatttgccactctaggtaaatattcgcatatctacttgtagatacttaagctttgctcaaatacttacaatttttggtattgtctaatttcttccaacaacatatggcactagaaggagggcgtgtatatttctagtgtattttctgtgattctggaggaaaatcgcaatggccacgaatcaaaaccataatagttacatcaacatcaacgaaaacactactccatcgatcaacgatagaactttagatttgaatcccataattgacactatttttggaggagttggatagacgaacactgtcccacttaacctgttcccacaattcaccagagctgtaggagacacgacgactcctatagagactactggtcatttcttgtcaattacacctacccacacagctgagggtatggtgcaactttcagccgcacagtacacaaccacgcaagagcagatgcgagcactggaagccgaggtagcaggtatgacacgtaaccagaacgcatccccttcgtgagagtgtgtgagaatgcaaaatctcgacgatgaggtgcataataatactaatagacatcgtgaatataccaataataatggtcattggtactatatgagggagcgatcagatgagaataaccagaaaaatccttgtttgaattaatcacctcgggactccgcgagcggtaaggggcctgctgtccccgaagatgatcaatgacaagactcgagattttgtccaccacaggatgttggtagaagcagaaaagaagagagatactgcgaggaggatgatgatgagcgccataatcctagaagttgtgctgattgaaggacccatgaggagtacaatcttgaatcatttagatcgaatagtcgcactcctagtgtgtatactagatcaggatcgattttcatgggtctacgaggtagataccacatccagagaggagatctatgagattgatgttggaagttattttactaagatctagatttacagtatgtttgattataaatctataatctaacatcctaaatatgaatttcttaaaaaaatgaattaaacacaaaaagttataggaaatcttacattgatggcagcagaataatttaattcattccgttcaaatctctaacccttgatccattctgttgcagagtatgattaagatctgaacctagtttctcctacaggtgacaagaacactacacaatcttctacactatcttaagtattgtcttaaattgtgtgggcaatca

SEQ ID NO: 76630 - DNA, 709 bp, Cannabis sativa
gcaattgcggttgatcacctttggacaaacaaaattatcaagctctttggtcttagaatattcaagcactgagtgtaatctctagattaagtagttaaacatgaagtttgaaatagaacacatgtttagattgccaaaaaaaataatactttagatatggattggattgttcatttgtaaatatagcagttgaatttgcttgttcttgaatttttttcccttttttctttcaggtctaagtggtgctactagtttgtaaatattgattgaggcaatataactttcctgattcataaaagaaaaacatgtattataatattttacttttttttttttacggtggtttttagattttatttaattattattatttttttaaaaaaattaaattgtatggctagagaatttgtacattgattagctcgggatactcttcgggtatgtaaagaattcaagtgtataaagaacttatgtggttaaatataaggtgggacattcgtatttgaaacccacctacgcaacctgaataactcaaaaaacccaaaaagaagagtttgaaattataaggcgggttcgggttacactcggttacccaccgagcaacaattcaggttctaaaattgtgacacctcaagaccagagtcaaatccgaacccacctgagaaacccattttttttaattatatataatatatttatacaactagac

SEQ ID NO: 76631 - DNA, 551 bp, Cannabis sativa
  modified_base (493)..(498): a, c, t, g, unknown or other
attgtttctattattcgtgccttaatctcccacctaggcatcacggggctcattgtgattttggggcgtttgagatcacgccctaaaaactttattgaggtgatcgtaaagaacacccctataaacatggtacctcacccctcatcgtctctctacagacctagacctggtataaacattaggagaacaactatgaaagtaagaggaatgggattcaaaatcatttaactcatttttcgattgggctcggcttcgagggttacaccgctcggtattttcttccttcgatatttcgcgatcagtgtttcgtgcgacttgttccctatgcgctgatttgttcaagtcgagtccctcctgctcattttgatattccctacgagtatgattattagttcgtcgattgttggttgttacttgagggttgtttgaacgcgtgtttggtactcgaggaggacatcgagtcctgactcatccatctgttgggttttatgcnnnnnntaaaactctatttcaatgtaattcgtatccttcaatatcaataaagaaacaga

SEQ ID NO: 76632 - DNA, 896 bp, Cannabis sativa
tctgctcggtcacttggggggcacctatacctgtacaaaacatttgataaagaacaaaacaaacaaagtttcacaatgattataaacaagggatgaaattcattaagaataacaaaagcattcaaacccgggattaaagactacccggtaagccagttgttcacaaaatgaaaaatattccaagtttaaagaccgcttggcctgtcactttatctaaaaagaaggcctattggccaaacagacatataaaaaaaggaacataaaaggaaagccactaaacagcaggagccctaggctctttgtatgggtcggctggatctaaaggagccggagggtcagctaggtttgaagaggccggaggatcatcagtctgggtagcaggaacctcgacattctgctcggtcgaaaaggtggaagtagtcacctcgggattttcattggctacctgagccatgcaatagtcgagaaacatgtctttggaagtgccaagatattcaaaatttgccttacggttagccttccagaagtcataaaaaaatttcaagaccatcagtctctaaggcattcaccttctccccgagcttctccacctcagacttttggctcttagcttcagtctcaagctccttttccatggtcttttttgtccttaacctcatcttctaacctaggaagaagagtccgaagaccctccctttcatctctgagactagcaatgtcccgagacaaagaagcattatctacctcgagttgctcaattgacggcatctcctccagttccctggtcagctcggcaactctagtctcaacgacaaggagtttcttattgacctcaccaagtttcgtccgcacagtctcaagttgggcccatgcatctttggcgtcctttttggcca

SEQ ID NO: 76633 - DNA, 762 bp, Cannabis sativa
cacgtaaaacaaagactttaaaattaccaaaacatttcgggtccgaatgttatttttagaaaattcttgagatttctttgtttttaaattgttttttcatgcttaaaaccatatatatataatattatatgaatgtattgatgcatacaaatatgaaaataaatattgaaaaacaaaaattcaaatcggaacaaacagatcgaaaactaaacttttcatgcatgtttatatatatacatgtatctaatgtatatatcgcataaaaacattataaatatatgaaagagagtgttgtaaacattattatgcaataaaatcataaatctaatgtaatatatatatatatatatatttatataaatatatatgtgggaacggaacatgatcaatatatataaaaatagattgagtatcactataaatataatgtagattatatgaatatgaatgtatatacatataaatatatatgtacaaaaattatatcataaacaaaaaaccagctaaacgtatatatatatatatttatatatatgaaactcaaaataaatcaagacagagataaaaattgctctgataccaactgttagattataatataatatgaacaataaagcatgtataaacgatatgtaatgcgaaataaactgtaaacatatcgaaattgtatatatgcaatgaaagaatcgaagtacctctagtcattgatgtttgagcttcaatctctgcgatagcttcagtattggagttcgggcttcctcg

SEQ ID NO: 76634 - DNA, 6411 bp, Cannabis sativa
ttttttttttttttttaatgtttttcgtgtagatcttcataaacaaaacgagaaataaactatatggacaaattattttatattcttttactaattaatgagctaacacaagcatgttgccaatatatgcaaaacaactatatatagctgaacaagtttactattatgagttttaagactagtagtgcaaatttcaaaaacaaaagcatattattaattctttgagggcttatatatatgaagtaaaaaataataataaaaactttcaatagcgttagcttatatagaatatagatacacatatttttataaatttcaatcacactcatactcatactcatagcatgttaacttagaaatttatgcatatatatatataatataaataataaattagcaattaacttaccatgcaattatgctattgtttagcaaaaacaaacgttgcaaggatgaggtaatctgcaacctaaggtctaattgcacaacaaaaaaattgtgatctaaacctcaggatgcagattacccgatcctaacataatatactatccattcttccaaatatcgaccagaaaggaagagacaatctgcatatcccaaggactagatgactcggcaatatatatatatatattatataaaattataaagaataaagtgatgatgatcttctaaacctcaggaagcagattatccaatcctcaccacaatattatacaaaatataataagaactctactatgaagaagaaaagatcaatgaaaagatctcatagtaaggcatatgtatatatgagtttggttgaggctctctatgcatgatggtataggtatttatattagttttgaagtgaaaatatgatatgtttttttaagtagaaatttaatttaatggcctacatatagcataaagcaatataagattctgttcttccatggccaatgatcttgtagggtctactttatgaagaaaatgatgttcttctaggctctaggcccttgtcccttgactactttttttttttttcaagagaagtagtataaagatattttcctcttgttatatagctataaaaattatattatctcatgtatcatatatagcaaaagatagttgaaattgatgatcaacaagaaagatagacataagtagtgttatattgtgcttcaagctaagccttgcaataatactctaagcatcttaagcttttaattaagaatcaatgcatctaggattctctctatattgatcttcgtaagccgattgatgaagagatgaaaaggaaagaagtgacatttttacatctgttttgtttcattaaatgtttgatcaacttttattttttgttttttatttactcattattgttattctgttccttggctatcaaaagaaacaacaagctccacctcacataattaagaagcttgtatcacaatatgagtgttatagtgcaaattttttcgcttaaaaaatacgagtacagtctcgtgaaaagttgtcacatggagcaagtctttacaggaaaagataatttttcgcaaatgtatgcttgtttccattcttgtgctattaactgcagaaagtgttgttaatcacagaaagtgttgttaactgcaaaaagtgttactaaatttagaaagaagaagtgtggacacaaacaagtacgatcagataaagaatgatcggttcacctcgcatgatgtgaacttgcgagaagatgtgactaggacagggtctagttgtatactatgcttcgcataataaacagataagcaggaccaagagaagttaatactggtcgcgcgattatatgtgatgactaagtatatctctcgtgcgataagtaaagattatttctttacataaattttggtctaaataactaatgtgttcgacgactcgtcacagtcgtgcatgttctaaattgttaacgcatagaatgtctaactatgtgatcaaaagtgaacgcaaacattcaaagaaataggcccaaaggcccatcctgcaagtacaacaccgtagagcctgcgaactgtgtttggaatatgaatggacaagctgcgacttatcaagtcacatacgttgctggaataaagttaagaacgaccaaaatattcttcatttattctttaaacgtttatcttgatttaattatgtcatttattgtaaaaacagtattatctgactagttatgtaatcctaaagggcacttactttctatataaatgagtgatccaaagcaaataaactaagctaaaactattacctaaagtagaaccaatataattctcttgtcttctttttatttctgctttcgtttttgtctatatagtagcttacactttgagtactcgctattctaggtgaatactcacataactgctagtcagtgttcttgttttgcttgaatactcgcattatttagtgttgtctaaattcctccaaaaatatttggtgtcgtctgtggaaaatgtaaatttttttaagatttttggagaaaaattgaaatgactacaaaacagacaaacacgaacaacaatcaccaagctatcaacattggcactatcaatgttccaatttttggagggggaatgaccaccgttgatgctattataggagaagtagggcataccaatgtgactccccttagcctgtttcctcaattctcaggctatgctggagaaacctcaatatcaacggctacagtgggatagtttccaacaataacacctgtcttagcctctgatggcatcatccaactaacaatcatgtaatacatgactatgcaggagcagatgtaggcattacaggcaaaaatcaccagaagagatcaaatttgagcccgacatccaccatgagtcacaagccaatgtcgcactgataattttgtaactaatgatactaggtgtcgtaatgaacgtactaatgtgactcgtaatttcagggaacactcaggtgagaacaacccagatgggatcgacttgaattaacctatttgtgaccctgcatgttgtagaggccattttgttcctaacataaatcgacaaacctagttggagggtggaaagactacgtgaagaggagcatcctgaacgatgcaaaccacatagttatgcgcaaccacatattgacgcaaacaatctagaatctaatttctcctcttcaaggactaacaacctttctatagtgtttacgccaggttaggactgatgttcataagattaggagggagataccttatgcatagaggtgatctacaagactgcctcaacaaagcatttctcgctcattcccagactacaaggaactggaacgtggaggaggaaccctatgatcccctgttggttgattaaagtgtgcccctcaaaggacagccccctacaaatgcaaacaacaaaataattgacgttaacctgccgcttgcaccagctgtgctcaacgatgttgtggtacccatgtacataggagcaatggctattctaccaataggaaaccaagttgtacctgccaataatcccacactaccaagagggattgatcaagagaaccttctacgagccgtaagaatgattgagcagcagagaaagagcatccataagctgcatgaaacgtcgcccttcattgaggaagtgcaacaagccaggctcctaaagagcttcaggctctctaagtcgcttaggtataaaggtacatccaatcccatttattgtcttgttaaatttaacattattatggaagttgactaggtaccccaattggctaagtgtcgtatcgttgtcgcgaccttggaggttaacgtacacgactggttcacctagttacccaaagcattccatctcgacgtgggagacatttgtggacttgtttctaacacacttctaagcaaccatgacgtataaactaccatatacgactttggaaaacacaaaacaagacgtaggtgagactttacaagattattttaagtgttttaatgcggaagtaactaaagtggaaaaggcccccgagtatttgtttgtctgcatgcttattacaggtgtgccaccaagaacagatttctggtaggaattacaggcgcaacatcttgaagcactaatcgagttctttaccatggcaaaaccccaaaagagaatagagaacgcaatggcagagctagagaagagcaaagacaaccaaagatctctagtgcctagactgcggtttaggagcccatgacataaaagtttgagagggcgcagtccaaggtggagctcgagaagacacaatcatacaagacgtcaaagcccaaagcttgacaagtcaccacctaggaaagagagtgtgataatgcaaattttttgcctagaaataggaatacattcttgtgaaaagttgccacgtgtatccattcttcacaggaaaatatgattttccacaagtgtatgcttatctcccctcctctgctattaactgtagaaagtattgttaaccatagaaagtattgttaactgcagaaagtgttgttaaccgtagaaagtactgttaacagcaaaaagagaaattaattgaagaaaaaagagtgtggaaacaacaaccagtgagatcaaaaaaagaatgatcagttcacctcgcatgatgtgaacttgaaagaagatacaaccgagatagggtctagttgcatcccatgctctgcatagtcaacgtataagcagggctgagaaaatttaatactgattgtgcatatactaattatatgcgatgaccaagtatatctctactgcgataagtaaagaccatttctttacataggttttggtctaaatgactaatgtgtttgacgaatcattagggattcacatgttccaagttgtcaacacatagaatgtctgactatgcgatcaagggtgaataaagacattcaaagaaataggcccaaaggcccattttccgagtacaacaacgtagagcccgcgagctcgtgtgtttggaatatgaatggacaagttgcgacttatcaagtcacatacgttgccacaatgaagtcaagaatggacaaaatttttcttaatttattttttgaatgtttatctagatgatttatatctgtcatttatagtaaaaatgatccgatctgataggttatgtaattctaaagaacacttgctttctatataaaacggtaatccaaatcaaataaactaagtttaaactattgcctaaagtggactaagcagactaagctctgacaaaaccactataattctcttgtattctctttatttctactttttatttgtccattttgtagcttacactttgagtactcgctattctaagtgaatactctcataactgctagtgagtgctcttaccgtgcttgaatactcgcattatttggtgttgtttaatttcctccaataacttttagtgtcgtctgtggaaaacataaatatttctaagatttctagaggaaaattgaaatggcgacagaatagacaaacacgaacaaaaaatttcccataaccatcaaggaagtacaaagactaactggacgcattgctacactaagcagatttgtttccaagtctacaaacaaatgtctactcttcttcaacattcttagaggcaacaaaaaatttgagtggacagaggaatgtaaaaatgcatttaaggagctgaagaaacaattagctcaaccacttgtgttgtcgaaacccctagacaatagacaatgaagagctaggagctaggcgtgtaactagtaactagcagtcacagagcatactgtgagtgctgtcctcacaagagaagaagacggtgtatagaatcatgtacactacatcagcaagagactaatcgacactgaaagttggtacccactcatggagaagctgactcacaactttctcttggcttctagaaagctaaggccctacttccaggcacacccccataaaggtgtacactgatcaactattgcggtaggtttttcataaaccttaagcatcaggctgactactcaagtgggccattgagcttggccagtttgatgtcacatatcaaccaagaacagccataaagggtcaagcccttgcagacttcgtggctaaatgcacaaactaatctcttaaaatctcacaatattcaggagaaaagcaagagacagagaagaagcgagagcaacagcaacatcaaaaacttgaagaaccaacatggaaactccatgttgacagaagctgtatcgaccaattattcggtgcaagcattgcccttataacccctgggggccagtaactgcacggagcaatcaaatttagattcaaagcctcaaacaacgaggttgaatacgaaacattaatggtcagcctcaagctggcacatgaagtatgggctgaccacctagacatatttagtaactctcaactagtc

SEQ ID NO: 76635 - DNA, 659 bp, Cannabis sativa
cagaggaaccactctccttaaaccacaaaaagaaagaaagaagcacacttcacatgaaaaaactatagcactgaggaacgaaaccaacaaaaggcaatcacccaagaaaagagtatgaaagccaaaactggagaaccctaaggctgaaaggagggaaaccaaaagttcaaaaagaaactagactctacgcaggagccattttgcccattttgggtggtattgtttttatcaattacagcttagattacacaaatgagtcacccaactccacgattccattaacatctggtattttattattatctagactattacttgattgcaagatggtgtatgtcttaggtagagtagggagttatactaattcataccattatgtgaggtagacttagatattaacattacaaagaatttgtccatcatactagaaaaaaaatacaaactcatcaaattacaatatcaaaacagcagtaaatgaacaaaaccaaatcatactataaatttttcccacaaataataaataacatattattatagactatactcactgattaaataaactactctcttattttatcattcaaagaatcattaatgtatagtaacaattaggggtgttcgcggtgcgagtgatgcggttttgactattttttcaaacc

SEQ ID NO: 76636 - DNA, 614 bp, Cannabis sativa
ccctatctatttatctgggctgcgaaaatattgtcaaggattctggagaacgcccgaaattcgggaatcataagtggaatcagactgagtaggggggccctattatttcccatattttctttaccgatgacctcattcttgttggaaaagccaatgtggaggaggccaagggtttctgggattgtcttgagaagttctgcacttggtcgggacaaaagataaataaaatgaagacctccattttctttagtaagaatactcccaagaatactcccactgatattaaacggaggataagggagatgttgggtttaggatcgccagagggtaatgttaattatctgtggcttcctttattcagattaagacaaaaggatgcagactttaactttattctggataacctgactgcgaaattgcatggttagaaagctaagactctctctaaagcagggcgagcaactctaatcaagtctgtgggattatctctacctctgtatgctatgcaaactaccaaactatccaatagacttgccgctaagattgatggattggtgcgcgatttctggtggggatcggagaagggtaaccacggacttcacctgaaagcctgg

SEQ ID NO: 76637 - DNA, 992 bp, Cannabis sativa
agcattttatgatatgaacatttgagaagataacagtgtagtatatgctttgttgtgtactctgtgatatggtatattatattagtttttggtttgttgttttgctatgaattttagtattttataatgctgttattcagggaatatatgcttatgtttgaatatgctatatgctagtttatttcttgaatttttgtactggataacttttgttttagatttgcatcaatggaagctatagagttattgtggagacttgcatttttttcttgaacttattttcttttgtggtagaattggaatattacagtgtttctaaaaaataattatattttcaagtcagtatttttttttttctttttttacagcactggaaacccttattttaattgtaaaacaacacttctctcaggttcgacctacccggcatcaagaggatttttccaagtcaaaggaatttctgttcgtttttgttcctctgattttattattcctgtaaagatggttgatttccttttcgacgattttttttcggttgagggaataaacccaaatggtgaaaagtttgataaaggtgtgtcattgttgtttcgatacttgtcatttgtatgtagtttccttgctcattttaagttttctcagttgggtatttatgcacaagacttcttataaatgattaggcctttggaaaaaatctatcttgctgtgattgtagacactagaaatttgtccaaaatttgctatcatttttcttgtttgttcgtcttttctgatttttgagctttttaacatgtatgtatcttttggttgaagtttgatattcaatcctttttttttctctcttatttgttttagttactagaatcgttgcacaaagtgagaagcatggcatgttgttgcaccttgatgtaaatacagagatatatcctatgaaaaaaggagataggttcttgatggttctgtctcccacccttaattggaatggagcacct

SEQ ID NO: 76638 - DNA, 1014 bp, Cannabis sativa
tgcacttttaattttttattgtaataaaaacatagcatcaatgtcattatatgacatcaatataaattttaagaataacattcttttatctctaatggtataacatcactatattttatcacttaagttcttcacttcattaagcattttttaaattattaccattagagatgctctaatattattctttataatatagtggatctcagagagaatcagtgatgtcacgctctaatagtattgatataatttaatctatttttttaatcataatatatatctaatttgtattaattgtggattaaatcagttattttaagtttattattttgataaatattaaattacataataattatttataatatttttttacttcaccaaaattaattaaatattacctctttcaattttaaattcaataacaaataacacaagaaaatgtataacttatatcaagattttaatctttgattactatatcaattatttaaaagaataattttatttttatctatttaaaatattaattatatatgtataaattttttaaaatatatataaatagttttatagtgtgtcgatcgatctagttttggctttgtgaggagattataacttaaatttgcatattctcaccttttaaaaaaaaaatgaataatttatggtgttgatacataatataattcaaacaattaattatctttatttttacacttaatttattattttaaactctttgttagtaaaaaattattattaaggaagtcaaaaatacctccacaattacatcttacaaattcacaaattgtcaaaatatacctatgaaataatagtaaaaaaattgcaataaatatctaaaaagaatacactatcatgatgtatcatccattcattttaagggctaattatttgataataaataatgataataattgatgtgggacaagtgtacagtcaggacatttcacagaaggttctgatagactcaaactaaaaaaggaacaaaaaaaa

SEQ ID NO: 76639 - DNA, 1747 bp, Cannabis sativa
aatgtagctttcaacatgccgattagaagcaacatgaattacagttaccaattcaggaaaggactcttttaacaggtccattgtatttctgaagattgtgagcattctagtgacctcttgtaatctgcttccaggaagcaaggaaacaacagtagctcctacacaaaataaaaaagcaaataaaggtagtacttaaatgcagtatatttaaagaccttatagagaagggataaaaacatctgatctcctatggcaactttatttcaccccttaatactctcagagcttgtgaaagtcccctcaatactttcagagcatgggaaaggatgataaaacaattttaaaatttagcacatatgaattcataatacaaattatgatttacctgcaggtattgcatttttctctttgaaatcttctgattttccttcaatcttccatttacatggtgaagtattcctatcctgccataataaacctcccatgaattggtgcttactctgtcaaatctactctaatggctaatcacatgtttgccttttccaatgcagttagtatgcttaagtacaaaactggaacaaataatttccaccatatattctccagtaagggaataagaaatacactcattcaaccccaaaacagaagaaggtgcttacttttaattccataacatcctcaacaatggggtgacccacgaaagttgcacctagcccgttagctctgcacactccttcctcaaatggaagtatacacaagacatgatccacaaattcagttaggcctttgagtcttgcttcaccccctttccatgcccaaaatgaaggtgctacataatggaagtgtactggaccatccaaattgagctgattgtatctaactgcaaaaatattccctcaatttctcatatcctaagtttatcacttaccatcaagaaaatgttactatgaccccaaaattatatgacctcgtaacttctttagaagacgaaaagaaaaacccttgttgtcaactgttacaacaacatgaggtttaaacacaagtgcagcctctattgtatccttcaacttagcctgaaatttacaatagggtgcatgaaattattcacgagttagtgcatggatttgttacaaattctcgacatatattctgctagcagaatcttaagttactcactactcaccctgagtttatttatatgtggcaatagctcccatatacccatcacagaaatatcctctatgggaaacagagatgttaaaccttgtttggccatcagggatctgagcatatggataagtaatggaagaatttagaaacatatggcattatgcttaagggtagcagaatgtgaaagacagttaggagaaagcagagaaataaaaatatttagtccaatgatgatcacatcttaccctccaacaccagaaaatctgatgggaagtggagagagcttctttagggatgccataagtcttgaagcaattgtatccccagaaacctctccagaaactataaaaaccctcacttctccatcttttgttgccttgtctatcacagttctgctggaaacagataaatgtctactcagaagccttaagaagcctctgtgcttttcactcttaacattccatattgctttcaacaacatttcaaatatcaccctagccatataagacatgaaacaagttagaagtttaacatgcaaatatttgaaaaggcgtttgaatcacaaattaaataatta

SEQ ID NO: 76640 - DNA, 983 bp, Cannabis sativa
tttttcacgtcaactatttttgttcaagggaattccacttctagcttggattatattgtaaacagaaatctctggctcaggtttatatgactatgacatatatatattatttttgatggaatatataaatatatttatactatagaaattatatatatgagtattaattaaactaatggcacgaatcattcagtccattgtagcctcacagccccagtacagaatatactgagacattatattatgattccttcaccaaaattaaaggtcaaaaagaaataccattactttaagacaataatataaaattctcattaagtgattagcatagaatatgctttaaatactaatttgattatcaaaataatttgccttactttttaatcgtttccattaacatgtaaattataagcaaaactaccatgttacatgtaattattatgtaatggcatattcgaatccaattgttaattaccaacatatatattattgattgggtgcagtttattttggtcctcatatttttttatggccacaattattcagaaaataaaagaaataataataacaacataaggggtctgtggtcttcacactccccaccttctaataatatagatatttccattaattgataatttgatggacgacacaagttatgaaaagtattattttttgcaggaactatgtttggtagggaagattgattgtgtgtggtgtgtggatggagagccagggatggagtagtcacaaagagatgaagggagcaaaattatgtatgaatgtacaaaatgaattgaatggaaaaattaaaaatttcacttgggcaaaatatcggatattgattttgcaaaaataactttatttctacatacaattttgtttcctttttcttattatatttattattttatttatttaatttaatttaattattggagatataaaacaataataacttattttattttattattaattat

SEQ ID NO: 76641 - DNA, 580 bp, Cannabis sativa
taatacattactcaattaaaaccaaaaccatgcagcaattctacaccataaggtacttcgttttattcgaataaaaaaaaagctagaacacacatacacgtgatatagttcttacataaaactacactgacttcactaaaaaaaccatcaggaaaaaaaaaaaaatgggagtcgggatcctttgaaaatacacacgcacagtatttatttgcttgcttttaatatccaccagttccgtatccgggagcacctccgcttgggtcctgggtcgtggtccgacccgtacccgtacccgtgtgggtcccaattgggtgggtcttagctatgccttccgtcacgtggcccgtgggctgacccgtcgccccggttgccgagtaggcggtcgttccggtaccgacggccgagtacccagtgtgaccgccgacgttggtgcccatcctcgcagcctcttttgccgccgcgttttgctcccgcgcctgctgtttgtttagctctgcctcggctatcttttgctccttcctttccgtcgctatctctttctccaatgggtgatgggccgtcatcctctcgacctgcgcgc

SEQ ID NO: 76642 - DNA, 653 bp, Cannabis sativa
aaatatacggatggaattttaattaacatggcaaaatttaattagtgggacagaagatgagacataaattaggaacagaagatttggattcaaattatcctttcattaaaattacacacacaactttcaagatgaaagaacacactttcaccacaaacatttccaacaaccttttccctctaattcttaaaggggtaaatagcgatataaatacctaaaattttaagtttgtaagtggcataattttaatgtttatttttaacggcataagtacccaatatttgtaaagctgtaattttactctaatttcgttagtacaaatcttattattttcttaaataggccacatataacgtccagattttagatcatttggtctagacaaaaatatatagtatcggttacttccaaatattcctttaataaattcaaaacgaagtctgtactcacaaaactggaggaaaattacagttttacaaatattgagtacttataccgctaaaaataaatattaaatttatgacacttacaaacttaaaatattaggtctattataattcacagattatattatagtattgcaaaaatatatagtatactccctaaaaagaactaaaaagaaggttccgttagttcaaaaaaaaaaaaaaaaa

SEQ ID NO: 76643 - DNA, 1132 bp, Cannabis sativa
ttttcagaagcagttttgaaactagttgcgtaatcattagaaaactctgcaccagcatcacattgaacaattggtatcctgaaattactgttgcaacactaaacagtaagccattcagtacatggtttatggtacaaattgagccaaaacgaaaagcattccaaagcaaaaggcacttttatattggaagagaaaggatgtagctttccatccactagaatgtatctaatgttacgagcagtttaaatctggaaaaacatcaatcttgtacaagtaaacatgaaaacaagatcaaagacaattacataaaatcactacaacacgagtacacattggaaaagagagaaattaagaaagatgaaattacccaaacaaagctttgtaggcataaggtgttcccgcagccacagaggcggcggcagcagaggcagcagccgtggccgaaataaatccagaagagtgagctgtatataaacttgggtttttcctcaacagatccaaggctatagctattcccgccattctcaactaactaaatttacaacatatgtatggcacaatcagattcttatataatatgattgaagtgattcaaatcatcaacatcaacaccaaacccaaaaactgattcttactaagtccattaatacatgaatttttaaacccagcaatattatcattatgtaaagcatgtaaactttacaatgtagtgcaataaaagctataaacatcagacacaaaaaatgcagcaataggaagttgacatagcttgttatatctatccaatattagttacattagaaggatcacaataatcataaagatctctttaatcaaacagaaaaatcataaagatctcattaaaacccagatccaacaaagaaagaaaatagttcaaagttatcaataaaaaaattaatcgagatatgaacaaaaattctatacacatacatcatccattggtcaatgtaattttaaattggacaaacataaacttcgtacatacatgaaagtgaattgaggcatctctacaaacacgtagcactatagcagaatggaataaccataaacatgaagaaaaaacaaaaccagcgaaatcatataagagatggagattttagcaaattttcaa

SEQ ID NO: 76644 - DNA, 649 bp, Cannabis sativa
aaaatttataatttatactaaattaggttagtaggatcataatcctactcattactagctaattaacttataataaataataaactctaattattcattattaagtttctgaaatattacagtagtaaaactatttgaaattcattacctatgctttcttcttttgggattagtatagatagaagattgtcgtaaacttctagcatctttaaataatattttttttttattttttttaattaaacgatctactaacatggttgctcatagttttgttagagcgtcttgttcttttgcaaattgagtgttcaataagggtgatgtttatgttgaggtacaatcttattttttagttgatttggcaaattaacaaaatttctatatttatttttttaaaaaaaaaaatatcctcaatttcacaagtcacattgagaaagtaagaaaaaattactgaatgccaaaataaagtttaggagtacaatcaatcagagcaaacaagaatcaaactaaaaacaattatgaaaaaacttcataaaagaagagctataaacagtaccaaaataaaaaatccagtaaccagttcttctaaaaactttacccctcaagtgttttgaggattgaagggtcccatatatgagttgaggaatca

SEQ ID NO: 76645 - DNA, 1834 bp, Cannabis sativa
cttgttctgaaaaaagaagaaatacaaattgggtttttaacttgttagacaatactaatgaatttgaatgcacagcaacttttatttcagatataataatcaataaaatatgatgactagtttatcaacctgctcaataaggtatgtgacgtggtttagcccgtatttcacaacaatgggcttcttggtctcggcagtttttccttcagcctcagcttgagcacgcttaactagacgttccttcttttcggctttgtcctcaggcctgtacttaaggagcaacttgaacagacttgttgctgcacaacattatgagaaatgaaaaacataagaattttacaaaaaattatgctcagagttaacaagttatatttcaatctataaggtacgataagaaaaataaagcactaaagagatgaaaaagaaatgagtaattaatattaaaacatttccctttttccaatggcaaaattaattctaatgttatgggatgacaatcaccagatagagtaaataacatctggatccaattttcataagataaagtaagaagaccactacaagtaaataacacagaaaccaacttaaaaagtgcactagaatataggataaaagaaatacattatcccacaaagacaacaatcaaaatatactaattgttttatgagtgatgaaccgtccaattattaatcattaataatcaaatgagggaacccagattgattttatcctcatgcactatcactatctcatttccagctccagtctaaacaaatcaatcaactcatttccagtccaaaaaaacttatcgaattcataactaagaaaatcaacaaaaatggttgttctggatcataccaaggtttttgtccaaagtcttggtgaactgattcaactgtggtggaaccttcaacctctgcttaaggattctcttcttcctctggagctgaacagcctttggccatttgacaaatctgtgtaaatccctctttggtggcaaagctcctccaataccgaactgcttgggacgcttctcaaacagtggattcacaaccttctcctgttagccaaatacagaattaaaatgcgcaaccaagcaatgtttcactcaaaattttgagctaaagaattatatataaataaaactaatgatgctgaaaattacaggcttcttcttcgagagggccgaggcctttccggtcttctttggaggctgcataacagtaacgatggtcagattcaaagttcaatttaagagaccaaacacagattaatccaaagttaccatcttttttcttgtttgagctgaggacgccggcggggttgagtgaaggctgagatgagtgcttgagataggttaggttttgtatcagtgtatatatagtaaacccattaagcttatctcgattgtgaaattttcggcccaaaaattgggctactttcgtctcgcatctacggcccagccccaatttttgggctccccacgatagggattttttgttgggaacttacaaaaataaaagggaatttttcattaatatacctcaattaaaaaataatcacacaaatcaccacactcatttaaattataccaatacgtttattaataaaaaaaatagatttaaaaagctctcgtgaatgcctaaatatataagggatctaccaaaatacctttttaagaatgtctcattgatttttcctaaaaaattcaatacttattcttataattgaatagtagcattttttgattttgatttgtcttagagatatttaaaattagaattaaaaaaaaaaaaacgaaaaaaaaacctttatttttattatttaaaaaaaa

SEQ ID NO: 76646 - DNA, 602 bp, Cannabis sativa
caattattctccaattcaagctttaattttcaaaattgatttgtaaatgaaaaagaaaaagagagaaagggggaggttagctagggaaaggataaaccagaaaatactttatcaatttacaaaattttcatctttgttgaaaaaagtcatatatggtcaaatgaccaaaatgcccttagggctaatataaccatatacacacatcaagggtaaaattgtcatataaatcacacatataacataagattatctcacttatcatattaatgccaaaataaaattccaaaaatgtattttgagcattttgagcctcaaactcggttttgtccaaaatacccggttgtgaatatactgcgccaacttgtcagaaaatacatacagatagacagaacaaacatactatataataatatagtccataagcatgatatattattaaaattacaattttacccttctcgggtcaaaattacgaaaatgcccctagcacatcaacagaatcttagaatacaatttatcaatatacttttatatattaaattatataataaaagtctttacaacttatattttttttttatcgaatttctaattattatagt

SEQ ID NO: 76647 - DNA, 783 bp, Cannabis sativa
tatcacatcactttttctaccgtaaaaaaaatgaaatttaaaataaatttataataatatatgttaaaaacaaaattcaaacattcatctccatacataccaaaataaaaaattgttaaataattactataactataatgtgaccatcttataaaagaaattataatgtcttaaaagtaaaatctagagtagcatatattgttaattaatatggggtcgactaatataatattgtttaattaatcaacgtacagagaagcgaattacacgtgattggaacgagtggaatggcagtgatgacagcacaagcaagagagtcagagaaggaggagactggatactcattcgtgcattgcaaggttacaggtagtggtaagcatgcatttctagggagagcttggatgagcagacccagagtcgtcttttccttcaccaacctaagcgacgtcgttacccctcttggatggagcgacaattttcaccctgaacgtgacaagtaattattattattaattaattgattacataattaccatatatatatatataattttaattataactgttattattaatgggtgcatgcagcactgttttcttcggagagtacaagaacagcggaccaggtgcgagtactggtgggcgatctaaattcaccaagctactaacgtatgaccaagccaagccttatattagtcttggttttataaagggttcgacctggttgcttcctccccctaagccctaaattaatgtatattattatgtatatttctgtatcca

SEQ ID NO: 76648 - DNA, 2760 bp, Cannabis sativa
aaagtaatatacattagtgatcaattgaatcatcattactattaggtatatcttaattaattacactaaaatatttccttattaaaatatgtaaacctcatataaattacacctataataatacatcatatttctatagtgataaaataatcttcagcaattaattctctttaaaataaagtacaaaaagttatgatacgtatgttatggcagtatatatagcatatatatattatctttaatagtaattaaataattaaatcccaaatttacttcattggatatataaataaaaccttataataaattgcaggatcttgagcaaggtttaccaattagaggacgacctacagttgaagaagcaattgaaactcttgtaaagtcttataaagcatctgaaaattgccagctagttcaacaacaagtatcccaaatatgtaataaaaaggtaattattaattaattcatctcaatttatgaattaatgttttctattttacgtcaacgttgacaataaaaataaataattcagaataagagcgtaggcttaatggagaagaagagaagccacgctggtttcataagccaatgtggtgtgttaacaagaagatcattcaaaaacatgtacagagatttgggttactactggtttcgtctagttatatatattggcttggctattggattgggcactatcttttgcaacattggccattctgacggatccgttgaggtatctcctattaatgttaacattatattttaaattattatttgtgaaattaaaatgtgtaagatttgatatcaaattaatatttgtaatcttgtctattttggtttaatcaatgtttcaggcaagagcttcacttatcatgtatgttgcttctttcttaactttcatgactattggtggattcccttcttttgttgaagacatgaaggtatgcatatataattaattaaatatatattgtactttcgaaatttagattttctctttttctttttttttttcattattttatatttaaaattataccacatgcatagtcctaaccatgcataaagtctccaaattaaaaagaaggccaaaaataaaaataaataattattcattcacactttagaaaaattaacatacacaatcacatgccaataatataatgataaaaaaaattatgctaataatataataataagtaagattatttttatagtaattataaactaaaataatatgcaaagccatgaaaatgggatcactaatttctttcactctatgtaatatatttctttgaaatttaggtatttggaagagaaagactaaatggacactatagtgtaacatcatttgtaatgggtaacaccatatctgcacaaccatacctcgtccttatcgctctgataccaggtgctttagcttactttccgccaggactccgaggaggattcgaacacttcatctactttgtgttggttctctatgcttgcatgatgttggtcgagagcctaatgatgatagtggcagctctcgtccctaactttctcttggggatcatcacgggggctggaatccaagggtttatgatgttggcaggtggattttttcgcctgccaaatgaccttccagatcctttctggaggtaccctgtgttttatatttcgtttcatagatatgcatttcaaggattatataagaatgagttcaagggtttgatgttcgtggacgaaattcttggtaagtcacacaagattagtggggatgaaatcttgagaaataagtaccaagttaatatgagctattcgaagtgggttgattttgttttattgttgtcaatggtgtttgcttatcgtgttatgttcttgctcatcctcaaaatttctgagaattataagactatttctgctgcttttgcttttggacgacgcaagcctagtacacaagtcatggagaatcctactgccactccacctcatgcatagaagagtttaggcaatataaatatatgtacgtatagtcgtatatatatgtatctaataataagcacactgtgtgcattaaagaatgagaagctctctatagttttataaatattatctttgttgtggtatagctcttatccaatcaccatcaagtgcatgatgatgtaatgtaacatataagtttaagagtattacttttttttttatgaatgaagaaagcattaaaaattaaacaaaaagtttgttaacagcaaaaggtgttaactcccaaaagttgtctactaaacttggtctgtctaatttgtcaaagcatttgcaagttcaacaaggattgactctagaaatccaacacatcttacaaatatacaaatctaaaacaaagaaaagagaagaacgcaacccagccactttctaaaaaggcaaagaatgagacttattatgagcctcaaaaggactttacaatcactgaaaatcacaacatcagtccagcccacgcctccttaatcaactcagctgcaaaatattgtagtttttaatatatacaacgaaattattttaatatgatcatcatcgtgtctaagaatttccatatctgtatatattgagtaatttgtggtacaaatacttaagtttatcttttagttgcaatttaatacctaagttaaaatcttagcagcataaataccttccgttatactttcagacattctgtaggtaccttgctgttatcttgcacactggacaccagctggcatgccacatcatcttattaaatag

SEQ ID NO: 76649 - DNA, 650 bp, Cannabis sativa
gccttgctactgatatagcccctgctgtctcctctatgcaagaaatggattcacgaactcatcctctctgcccccaccacatatatacccacttccataccctccacaacaaatactgcaccaaaaatgaccatttcagcacctcccacaaccaatattacaccagaaattcccacaataccatccatttttacaccagatttgccacccaccaccagtaccacaaataaccatcctatgcaaaccagatctaaatctggtattcataaacccaaagcatatctctcgacccaacaccctcttcccgaatccattttaccaaaggaaccaacaacattaaagcaagatttgcatgatcctctctggtacaagtctatgcagcaagagaattatgctttaaagaaaaacaatacatggactcttgttccatactcttctgacatgcatattgtaggtaacaagtgggtacatcggataaagttaaaggctgatggttcggttgacaagctgaaatcaagattagtggctaaagggtactcccaaacacctggaatagattacaccgataccttcagtccagttgtgaagccagccactgtgagaatattgctaactcttgctgtgtcaaactcctggccgattacatagtt

SEQ ID NO: 76650 - DNA, 962 bp, Cannabis sativa
aagataattgggatttagtgggacatgacatagtggaggatgttatttctttctcaaattctagaaagattttaaaagggataaacacaactactatcacactaattcccaagactacatgtcccaaaagtgttgtggattttagacccatctcatgttgcaatgttgtgtatgagatagcaaccaaggtgatctacaatagactgaggaagatacttcctgatcttattgcataaaaccaaggaggatttgtacatgggaggttcattgctcacaatgtgttagtgtgtcaggacttggtgagactgtatgggagaaaaaactgtagaccgaattgcatgatcaagatatacttgaggaaggctcataatactatagaatgggagttcttggaagagatgatgactgctttaggtttccctggtaagttcataaatcttattatggaatgcattagtacccctaaattctccttactattgaatggctctattcgtgggttctttaatgcaaagagagggttaagacaaagtgatctgatgtctccccgcctctttgtgtcaagaatggaatacttatccagaatcttcaccaaagtgggagaatggtcaggttttaaattccatgacatatgtgccttcttaaagctgaatcacatgtgttttgctgatgatttattagttttctacaatggaaactttatttctgtgatgctgctactaaaaggacttaagttgttctcaacttcatctggtttgttgccaaatgaaccgaaaacaaccatttattgtccaggaatgcctgaatctgaagtctccaagatccttgaggcatccaaccatttagataccttggtatccatgtttgttgaaagaagatatcttggactgaatgccaaagtctgctggaaaaaatgacaagtagaattcgaatgtggagtacaaggaacttatcttatatgg

SEQ ID NO: 76651 - DNA, 2356 bp, Cannabis sativa
aagtcggttagttgtcggctcaaagatctcatctaatggactaaccaataatgtttacttagaaacatgcccgaatagtgcatttttcgcaccatgacctactcgtaattgaaattcccattatcaataagatagtagctcgaataatggataaaaattattaaattaaattatataaaacttaataattaaatattgcacaaaaaaatacttttagatttcacatttaaaaggatacaaaatctattctctaattaaatgaatataaatataaataatactaataataatatagattttgtaggctaaatatttgcatgtgatgccaggatccgtcgtcgtctcattgttctttacctgaaatattttttattttattatggaaaagttgacattcttttcccactctctacttgccacccttttccgcactatgccaactactcaaattaatttcctaactatactatggactctatcaccttatccttatctcacatttactctctactactctttacatatcactacactatttttttctcatcaaacaatatatccatcccaatatgatcatatcatataaatatatataattatacacacaacacatgtactaattgtcatattatataaaaatatttgcggtgaaatctctttaatatttagaattggtacacataaccttaattaaaaaaaatggtaataaatttattttatcttacgattttgttacagacgtacccttttttagttgttaagtatcaactaaagtctattaagtgtcagttcaaaaacatgtagcaatatatttatttaacttatttaatatatagtctaatagtatgtcgctatatatgtatttctaagttgacacttaatgactttgccaccactttttctgattatgatcatatgtgtaacaattttaaatgttaagaaaattttgccacaaatattcgtattatatatatgatatcatatatatatcctagtttattacgtacgtatgtattaatgcacattattgttaagtgcatgttttgtttttttttgagaaaagattgttaagtgtttaacaatattagttattacaagattatatttggagtatatatattgcgaattgaataagttttatatctatttcaaaaataaaaaaaaagttttatattatacgcaaatgcaaatgcaaatgcaatatataaagggtgtacggaaaataatattttacaaccatatattgatgataaatttaggtaagatgatttgttattatttctaacctcttctttttacatttatttctttattagtgatataatttaattttcgttttcttcaggtaattttaattaactttatttttaaaattaattatatattataacaaaaaaaaaaagaaacaggatacactcaaaattagactttttttctacattttaagaatgtttttttataaatttcttacatgtattttgtttgaaaaaaacattgatcatattaattttttgtagcaataacgtaaaaataaaaatacacaatctctcaatatttttgtaaaaaaaaaaattataatccgtaaaaatataaataaaattgtagatctataaaaatataaatttttatcatttttcagaatttataaaataataatctcttaataacaattaatcaatcatatataaatgatggataaatatttacacatatatatgttacttataatttattaatgcagattatggatatactaagaaaggagttaattatcttattaattaaattataagaattaagttgttgaagatccccacgaatccacatatagtaccttacacgaatgctttaataagttagggcaattatgtacaaatatatataaatatttatatcagttgttatataaattaaatattatatgagagtatatattatttaatttggccaaagagtactaaaataaaaatataagcaatatgtcaatataataaacatagttaagtaagtaaactaatcatgcatgcacatatatttatatatgagactattatgtacacatataattaaggcatatgccgatgcatgatacctttatgtatatatgataacaaaatcctttaagagataatatacgaagaagaaatatatataattattattatatatatgcatgaatgattcgatgcgttagagtaagtacgagagagaggtcatgttacgtacggtcgacatataatgatagtaataataaagtaaaatagccttagctatgaaaaaacggcccttggagtccaattgagccagtttataacattatgggcattgttaccttaaatatttatatatatatata

SEQ ID NO: 76652 - DNA, 775 bp, Cannabis sativa
ttttaagctgaataaaggtttcaaaagcttgtgatttaagaacaagaggaaatatccaaaagaatctgctaaagtcatccacaaacacaatgtaatacttttaattatctttggaggcagtgtgagatgacccccataaatcagtatgaataaattccagaggttgttttgcacgagtaatggacaaggaaaagggaagtctgtgacttttacctctttgacaagcattacaaaattgtaagtttttaagtgaatgaggaatgtttgttgtggttagtattttggttaaaatgcagaatgctcgagtttacaataccaaaggtttatatcattagacaaatttgagacaaacacaagcaggttttgaaatcatggaataagaagaattgaattcttcattatccgtgacaatattacaaagagaaatagtattttcataatgaatacacttgttactacaagaatttgaaaaacaatcaaaagaattaggggacatggttgaggtagcaagctgacattccagtaatgtgtttaagagagtagaatcctcatctccaagaagataaagaccattcttaagcttcactttgctcaggactgcacccgtttgtttgtccttgacaaaacaacaagattagtgaaattctaggaaaacatcattgtttgtggtaagcttagaaacattgacaagatttttagttatagaaggaacttgaagaacataattcaattttaatggtgcaatagaatgagagggaatagtggctttaccaat

SEQ ID NO: 76653 - DNA, 526 bp, Cannabis sativa
attccaatactttaaaatgtaaccaaacaaaggaatgaaatgaaaattgtttcctttctattccattccatttcattacctccaaccaaacgcaagtaatagtgtttctctcctacatgttaatatgtgtcgctaactgattaaaatttatttatgttaataaatggataacaatttaacatttactttttatattgaaatattgctcaataaagctactttagcatatgaaacgggaatctattacctacaggttcaacttctcaacagagtaaaaagagtctttgtcaatgaaatagtttaccaccatggagaaaccagcagtgaccagtgtcacagctggttgtaaacccataaccacatttgtacaaacagacacaaaatcttttagagaggttgtgcagaggctgacaggcccatcagagccaaataatgtagcccaacaagaagtagcagcaacaacaacaaacagcaaggcaacaggcccaaagaggcagttcctcacaacaccaacggccccaccacc

SEQ ID NO: 76654 - DNA, 521 bp, Cannabis sativa
atcaagttcattgaaagtaacatctctactaattattatcttattagttttaagataaagcagtctataaccttttataccatcaacatagcctagaaaggcacacttgaccttttgccaattttgtcaatagcatgatgagcaatacatccgaaagtgttaaatatgaattagagatggtttcttacaaacctattaatttccctcgggtgtaaaaaggtcattaacaggacttgagcttctactaatgaagtaacaagtttaacaaagttctattcattctttcaataattctatcttgctgtgaaatattagtacttttttgttcctttgaatgccaaaatctatacacaatttatcaaactcactattaacaaattcaagatagtcagttctaatacttttaattgttttattcttaactaaaattatccacattccaaaacttatcaacacactcactctttgtttaagcaaatagctagacctaaacttttctgctataatcatcttctatagat

SEQ ID NO: 76655 - DNA, 651 bp, Cannabis sativa
tatatatatatttatataaaggaacaaaggaacatttttctttacaaactttgatggcctaacttttcgattctgcattatttaagaaaaaatgttgtaaaatattgttgtattaatgtaattaatggaaattttcatttttctcaaaaaaaaaaaaaaaagaaaaaagagagagagagagagagagagaaatatataattaaatattagatcacacatattcaatttaataattattataaaaaattaataaatattgataagattgtgataataacaatactcttaattatattcattataagtaaatgttctttgatcttcatcggttttaggttactctatggagattatcgtttttcagtgacaattttggactcagcttctaagacttcatgattgagtatttattttgttgttgaatttttattaaattatatacatacatatttttaattaatgtagagatattatattagctatcgagaccaaaacacttcttcaattaatctttctcatttttgtaattaatcttggattggggattggcctgttttgatgaaataaaactttttctctcttcaaaaaatatatatttattataatcattcacactctatattttctttctattatcatcaacccacatta

SEQ ID NO: 76656 - DNA, 1525 bp, Cannabis sativa
ttatttgtatgttattttttttgttgttattttgatgttattttcatactaattttatgtagttttttttttttgttgattttgtattatttttattaaaaacagtaaaaaaaaaagtaaataatggtacataagtaattatttcaaccaaaacatattatatttattttagaaattatagtcctcttgctattttttttttttttttgaaggaagtcctcttgctatttattaatagagttttctctctcccgcacagactgacaaaacaaaccatatatatcagtgtagagatttatcgatcataaagacataaactaatcaacggataacaatggccgactctgtagacactttgcagttcctcaaactcgttcccagcccagacggcactcttactcgccccgctatcttccccaacgtccctgcatcagatgagccacacgatacagccgtcatctccaaagatttccctctcaattccgccaccggaaccttcctccgagctttcaagcccaacccccttccgacgagtcccaatcttcccgtcatcctctacttccacggcggcggcttcatcgccttcagcgccacctcgctcccttaccacaaatcatgcgccgactcagcggtccagcttcgcgcgcttgtcctatcactcgagtaccgtctcgctcccgaacaccgtctcccagccgcctacgacgacgccgtcgaagctcttcgctggatatccgccgtagcaggcggcgtctcagccgagccctggctcagcgagtgtgccgatttcaccaagtgttttgtgatgggaagtagcgctggggggaatatggtgtaccacgcgggtttacgtgcgctcgatctggatctgtcacctatggtgatccgagggctgtggtttaaccaacctttcttcggtggggtccacaggacggaatcagagttgtgtcacgtcagcgatcatatattgcctttggcagccaccgacttgatgtggaacttggctttgcccgaaggcgctgaccgtaatcatgagtattctaatccaacggtcgccaattgtggtgttggtgatgagaggatcaaacggttgccgaggagtctggtaactggatacggtggggatccactcgttgataggcagaaggagtttgtggagttactcaagaagcgaggggtccacgtagagacccacttcgaagatggtggattccacgctgctgagctctttgaatctgccgaagctgagaagttaaacgacgtcgttagccgtttcattcgaaagtcatgcctcgtgaatccatgatgatgccctcattttcccaattatatcaagttttatttttgatctttctattatgaatatgagacaaatgaaaaattatatatgaatctattaaataagaatatcaagttttatactttttgttctgaattatggatctcttgctctaccttttttggtgaaacaaaaggaaatatatagcttcacgtgctgcaaataattaaaacttttatgggtaaa

SEQ ID NO: 76657 - DNA, 1352 bp, Cannabis sativa
gttaaaccaagaaatgtcgttagataaacacttttaatatataaagaaatgtataattttatcttgagttcgccactcactaatagtgatcgtgttttataattttataagcctatactaactattgtaattatatttgagtatgtaataagattatatttatgctaccctttatgatctcaatgatcattttttcatataattttaggtaattaagttaaaatgaagtgttatctaaatatgaaaaacaaatgcaaaacaactatctaaatatttaaccaaaccaaatgttaaaaatctaataaatttctcttgatttatgtgatatataatttacattagtggaaatatatttctcttgatttattaactacttgaggctagctcaagtgagtggccataaggggtgcggggtgcgtgtgtattggaggtcctgggttcgaatcccaagttatgttgatgtaatatataaacgcttaaatcaaaaaaaaaaaattaaaaaaagcaagcttacggttgctttgattgttagtgtataagttaaacataaaccacatatttgtttaaaattattagagttgggacatatttacgctagggcaccaaatcgaataaaccaacaaaaaatacaactcgaaataatataatgaaaatttaaaccgcccaatgaatatattgggtggtttacaaattattctaaacagctagcccaattaacccaaataaacagaattaaaccaattaatacatttttaataaaagtgtatatagtatattacataaattatatttattagtcaaactattttgtatttaaagtttggacattttagtgtttaacttaaactctagactttatagttaatatttttattgtatttagatattgaagttgaagtttaaaatctatacaatattattaatttttttattattttatttaattattttttagtttgtaattcaaaaaattatatataaaaaaagtgaataactgtttggacagttaacccgaccaaaccaacaaaattattgggcaggttgaactttttctaatttttaatttggcgggttacaattaaatatttacaaccgatatttatattggattggtaaaaatatattataacctgactaaaccgacctacatccactcctaatttacacgatttgcttataaataaatgatgttgttaacaattgggtatatgtaaattgaaattctagtcatttaaaggcaggatctaactgtcctttccttgtagggattgttgggaaatcatgcttaacgaattggtttattttttatgcttaacgaattgttaaaaatttcacaaaaattggtagaacat

SEQ ID NO: 76658 - DNA, 594 bp, Cannabis sativa
attattattattattatgtatttacaactatgtttgatagcaaagaaataaaataagaaataaagaaaatttaagagagatacaaaagataaaaataaatgaaaatattttcattttttaaattgtttgttatataagaaggaaaatatatataataaaattactatattatccttcaaagcattaatttaatagtataatatttttctttttgtaaaaatattttagtcattttcacttttttgttggagactttactcttgtcttgtcttcattttttttcccaactaaacaactcaacattatatgaaattctctttctttcatatatggccattttttgaaattaagtttgggatgagcactttagagattgctcacgtgtatgctctacaggagcttgcttcattgaagtattagagatttgctctttcgatccccatgttactcttcatcagtgtcctacttctaatttcaatggaccctgctagtgtatgtgatttatttgcggaatcagttcagatctcacaagatgatataacctttgccctcaaccgaggagaggtggacgaaccccaggaagctaatcaagtt

SEQ ID NO: 76659 - DNA, 1264 bp, Cannabis sativa
  modified_base (770)..(773): a, c, t, g, unknown or other
gaggaccagttgaaaataggcatgttcggttcacattgcatgtaatgaaatgctcactttggtttaaggaggaccaattgaaaataggcatattttgattttgctaatctccctagtaaaaaatgctatgatgctatcaacatgttcacataatttgtttaaatgacaataaaagctcttacaaagatgttaaaaagaaataatcaaactcttaagcaaactaacaaatcccaaaagttaataatattagaagaaaagatatgaaaaacttattttattcatgcactctaagtctttatcagagtgtatgtgaaaatcaacagtcttccaacaaagagcaaaatcaaacaaagacaataccaagaaccaaaaaaaaattatggttacaaaatactaacaaaaaacttaacggtataccagaaataaacccaatatatttacataaactacacatttctaaaagaataacataaaaaaataaatataaaaaaaattaaatgatataaattaattttaataaggaaatttaatttcttaatgaaaaaaaaccgcctaataactgcatgataaaaaaagaaacgtttatggcatgtttactaataagtaatgggaatgataatcatttacttacatttgtttacttgcattattaaaattagaatatgaagaacttgattaaataagggataaaagaaagagaatacttctcccaccaattttataaggaatgtcattaagggtaatgaattttatttatttttattttattnnnnaatattaaatatataatgataattttatcttttaaaacatgttttataaaataactaccatatactatagtttaacttaaaaaggtaatttagtcaatttatagccttccgattaaattttctaataaagtaaacaagataaatcactattattctattttcaaaaaaaattagtaaataacatattacaaatattaattccgattattcttcatttattccgttacatttctccattaatttattctgattctgaatactgtataataaacgtgccattagtttcaaataagaagactttgattccaaactaatcagtaaattccaaataggaaaagaatgataaaaatttgtttaaattgattagtggaaaccacaaaaggaaaaaaaaaaaaggacaatatatgtatcaaatagatacataatgtgtacattaagcaagaagattagtagggctataatatcccatctcaaagtagttgatattagag

SEQ ID NO: 76660 - DNA, 608 bp, Cannabis sativa
  modified_base (541)..(569): a, c, t, g, unknown or other
ggtggtgtgaaatttcaacaagaactctaaagatttttgaggaaaaagaaaaatatggctctaatggtttaaagattaaaatggataaaagagtgttaagaaatcttaaatccctttttataagcatttggagggataattaagtaattcaaaatttgatttttggggtttctcccaaaaaaggataattaacactcattaaaaaagtacaaacgtcacacatgtggtacctagcaaccatcactacgtgtcttgaggtctaacttccaagacaacattaaactctctagacatcaaagagacattcgatcagtcacatcagataaagagtggcttgaatactgaacatgtgtcaccaatccgatcagcttattgactgaatacatgtgcgaccaggaagtacccacgtggacttgggagaaaatattatctcaatttttgcacaaggtgatgtggcatccacctttgtgacacgtggaaaagattctatagtttggacaggcagaccctcctatgaggtgtctgttgggttttatgcccnnnnnnnnnnnnnnnnnnnnnnnnnnnnntttacttattaatatagataagaaataacatttaatgtt

SEQ ID NO: 76661 - DNA, 976 bp, Cannabis sativa
  modified_base (633)..(637): a, c, t, g, unknown or other
taaaaatacaaaaaaactgttttaaagtgtaaaaataaaaaacccctatatttttttatatttttttagaatattattattgggcaccaataataatattttttaaaagcttttatatagaccaatacttaattagatcaataattgtacgacactaagaaagtgttaagtacagtagtatcttttagtatttttctattttttattggctatttagtatttttttttcctaaactatgacaaatgaattattgtccataaactttttagctcattaaaaatagtccatgaattattcacagtgttataaattaatcattttagtttaatgattttttaaatatgcatattttttcaatgttaaattatacacgtgatactaatgtgacaattaattaaataaatatgttattattttatttgttatgtgtgataaaatttgataaaaccactaatttatattactgtaaatagtttaaaaatcatttataacgaataaaagaggagtgctaattacaaccttttattacaattttttagtcaacctctacgttcgaaatcatatgtcgaaatttttttatagcggtattcgttatagttacgatatcattcctgtaaatttttgaaaaattnnnnntagtttacagtaccgaaaatagagttcctgatatttcagtttactacgcgcgttcaaaaaacttcaaacgtattttcggcactgtaaactattcgaaaattttcaaaaatttacaaggatgatgttgtaagcataacgagcactcctgtgaaaaaaaatattcaacatatattttcaggcataaaaattgattaagaggttgtaacataaaattaacagtatcactcctctaaacaaaaatacaataatatttagggaaattctacaatgtacccccttaaaatggatacattgatgcaccattgtctgttttagcacccgaaataattttttagtcaa

SEQ ID NO: 76662 - DNA, 1222 bp, Cannabis sativa
  modified_base (820)..(822): a, c, t, g, unknown or other
atatgacagaatgcaaataatattgaagataaacaataataataacaatattatttgtaaccaattgtggggcaggtagaatggaagcattataattataacagctgcttttgatatgaagtttccaccatcagaagcaaggaagggagaaacaagcatgtaacgacattataatcagtcattagcaacctataatcataactttatataaaataataataataataattataataacaatatcacatctaataatagcatttctttgtttatttttgtttccatttgtaacaaacttatcttattccaccgaatgaaaagacatgaaatatataatatataatcacttagtaatttaattttataattaacattaacacaacttttctcttagtattaattctgctccctctagctcattcataactctaatgcacaagcatatactatcattcatagatctagcttaataatagatgtgtttttggcccttgattaataatttattggttcattttcattattgttgtgtaaggtcgtgagattttaattgggttcttaggtgttggaatatcattatagtcataacaatttagaagagtcaactctactaatatctataataaagctccagttgtaagttgattttattgagtaggaataaaatatgtatttaattaatttttgtatacgttgtaactaaaagtatttgttaacatttttgtctttaaaattttattttagaaaaataaaattgtgtttcacaacttttttttaaaaacaaaaatatatatatgttctgtaaattttatttttattnnnatttgttgattttatttaagtcggatctagatcagggtttaagtccgaggtcggtcgggactgggtccgggtctgatccaggatccaagttagagggtctgggccgggtttgggtcctagttcggggttcagggttcaagttcgatccaaggttcgggtccggcaccgaggccacagtttgggtctagcgctaagagtcaaggtcgaggttagggtctggttcgaggttcgagtttgggattcggattctggtccaatgtcggggtcgaggccatagtccgggtctaggtccagagccgggagtcggggttgggattgaggttcgggtctgggatcccgatctgaggttcaagtccagtctggggtccaattctggtatggatttaggtccaggttccaa

SEQ ID NO: 76663 - DNA, 2879 bp, Cannabis sativa
atgaacaatagtgatatcaaccaatatccacgttcgattgtgataaagaggtgtcatttcttcataaatagcacgattacacccctcatgttgaagtgcatctttgagagagtacggttcatgacgtgagagatcaaatttagcatggccaaggtagaatttgggtttgaagacccatgtctttgctcgagcaataattggatgaaaagaccttaatggctgaattgtgactagtgtggtaacatgtgtagaactgttattcgtggatgcacaatctatatcctgtgagacagctacaagggactgatgcaatggtgagatatcaagtttagtatcagagggaggagagtatacctgctgtgaggatgagtctagagaccgaggtggtgattctgcaaggccaggactgataggtgttgtctgagtgagaatcaggtgttacatatgatagcgtatttggtaagtgttgagggtagtatgaggtacattaggaagagtgaaccaagcatgaggtgtgtcaagagtgacaatttgttcatgtcgatgaagaaaccatgttgacatggaaattcatgttcattaaagatgacatgcctgaaattgtatattcgcccatgaggagttaggcatttatagcctttttgtgcttcattgtagcaaaaattaatgcatttagaggagtgaaactaaaacttgtgtgtttgatataatcacagataagaaaagcatgttgtacgtaccaaaaaccttaagagatttatagtctagttttgtggagtacaagacttcatatggagatttttcattgagtatagaagtgggaagacgattgatgagatgaacaacagtgtggaaggcatctgtccaatatttgaatcgcatgtatgcttgtgctaagagagtgagtccaattttgactatgtgtcgatgctttcattaagcccttccattctatttagaagtatgagggcatgaatgttgataaacaatgccattttgattgacaatgtctgtatatgcttggaactcacctccccaatcagttctaagagctttgattttcctatcaaattagttttccaccaatgctttgaacttaacaaaagccaaaaggacattagatttttgttttagtggaaagatccaagtatagcggctatgttcatccataaagtgaatgtataatctaaaatttatgtgtgaatttatgagagttggtccccatagatccttgtgtatgagatgtagaacattagaggcatgattgatagagtttttgaaaggtaaatagtgggatttcccatattgacatacataaaaaaaattgatttctcattcataactggcatcacattagttgtttttaaaactttactcaacactgcatgagaagggtgaccgagccttttatgacacaaactcaaaacatactcatcacactagttttatttgatttatatgttgtagcagtgactccgacaaaagaaatagacttagatttagaagattgagggtatgatttgtttggctgagaaaggagagatgtgttgagctagtagagtccattctcaagagctcctcacagaaccactctccttgtctcctgatccttcacacaacaagtagatggaaagaattcaatagatacattattatttgttgtaaattgagaaacactaatcaaattcttagtgatatttggaacatgaaagagattcttaagaattgaaggtgcagatgaatgagttttaagttggcctgagctgatatgggatatggttagtttattaccatcaccaacagatcttctccttaccaccatacacggacttgttgctcatctgtccatcttcaacagtcaaatggttgctcactccactatttgtgtaccaactattatcattgagaacttgtggtctaacaacaagtgcactgaattttttttcctgattttgatgtcttggtggctgatgtcccatgtaattctcatcgtacgtgttgtaacaaacaacagttgagtggtcatacttgccacagacttggaccctccaaaatgaccacgacgacccctaccatgatttccatttctttcttgagatcctaaatttaaagaggagcctcgcccatgttgatggtactggtttgtgaatcgagagccacaatgaccagttggtttgtgagccaagttggccgatggtgaaactaggttcttatggctaggaggggtagcaaacaacctttccagtttgttgttgaagctgaggagtatgctctgtagttcttgccaagttgttttagatttggactcgattagagagacaatcgacgggtattcaatctccaaactagataatacattggacactagatgactttccggataaggttttccaacgagtgcaagtgagtaagcccacatacgcattcgctttagataatcagtcattgatgtagatcctttccttgttgtctaaagttcggtgtggagatcattagtgtgagcctgtgagtatgcaccatagagatattcaagtgttgtccaaagtacatgagctgattgacatcccattactttggacacaatactttcgatcatcgaactgtagacccattccattaataactggtcatgaacaatccaattttttcatagtcaaggttaatggtaacatgataattaagggaattagggatacctgaagtgatgaactcctcttgacaggccttttggccattgatgaaacctttgaatctgtaaccttgaataatggtgaaaaccatcgtcttccacagggaaaagtttttttttcaagcttcttagtgaatggttgagtgagtgtgctactaaagggagtagccattgttgggttttatgccct

SEQ ID NO: 76664 - DNA, 965 bp, Cannabis sativa
gctcttccgatcttgtgggaaatggagaagaaataggttagaagaaataggtgggcatgtaggaaatagaaaagaagtaggtgggcacgtgggaatgtggcgagaagtaggaaataattttttattggggccttatacccgacaatttaaaatagtcacctatactataggcgacgattttaaaccgttagatataagttcctaataaattgacgaattccaattaaaatcgttgcctattcctgtaattattgttataaattgtcgggatactaattttttctgacgattttaaatagttacttaatttttttagcgacagtccccttaaaaaaaatgtttttagaacagtcgcgaattctgatttttgtagtagtggttgaggctgctctcaaacatccaaggtggtcagtgcaacgggcactgaaatggtggctctaacaaagaataaaacctagaacacagtccctccatcaattgattaaaacttgataggcaataaatgggtttttcagacacaagaaaaatgcagatggcagccatcaaagattcaaggccaggcttgtggccaaaggctttcattagagacctataattgactatggagagacattcagtccagtcatcaaggctgcaatagtaagaatcatactcattatagctgtgtccaaaggttgggaaataaggcaactcgatgtgaacaatgccttcctaaatggggtattagaagaagatgtttttatggtacaaccataaggctttgaagaaaaaggaaaagagcactatgttggctagctaaacaaatctctgtatgggttaaaacagcctcgagcctggtttcagaaacttaaacattcactacagagatggggtttcaagaactcaaggtctgatacctctctgttcttttgcaacatgcacacatatgtcatctttgtgttgatttatgttgatgacataattgt

SEQ ID NO: 76665 - DNA, 1198 bp, Cannabis sativa
aaataccatataaacatagcgcattatgacttatgagtgattattggttttctatactatttataaaatcaaaatatctaaaactaaatattaaatttcaccaacaacagtatactatctgttatggtgctcgacacacgccttaaaatgtgtcgagcactactcttaacaatctttgtttttacaagcattaaacatgaccaaatgaacaagcaacaattaaattcatatgaaaaaagaaactaattaacaaataaagttagttattatagttgattaatataataaaattattaccttggggagcaacagattgagaagaaggtggtaaccaaacatgggttattccaactgcagaaagatcagaaattgtgttcttcaaagaattgtaccatcctcctttctcacttgacccccaattgaacccctaatattcattattaataaaataattcaatttttattatatatatataataaaaattacaactatatatatgtatatatatacctgaaataatatggtggaagttgtgaaagaagggaggataaagatgaaaagaaataaaagagagttcatattatgatagctaagcaagctatagagagtttttatttttttgacttgtgttgtgttgttttgtgtgagtttgaaacttgaaagaatgggtttctttttataggccaagtttatggttaaagaatttttctttctttttttttaatatagagaaatggtcaagacttatataataaggaatttgaagtcaagagtcaagacttataacaaggaattaggcctttgggtggaatggtggaaattttggcatttaaagtgaaggtttaaggtttcaaattagagcactatttatgcttagtactctccagtcctcactcagtattttactgttatcaaagtaattaaatattaaatcttttataaaataatttttagggaatatcgctaattaatcatgtagtgtcacttacaaaaggtgttaaatactattggtgtccaataacaatactcaaactttactaactaaacccatttgtaaatataattgggtaaatattttttgtatttatcaaaatagaatgtaatagtatcctaagttcataatggaacataacaatattttgagttaaaggtgctatgaccattttagttatatttttttgtacttctttgtattag

SEQ ID NO: 76666 - DNA, 592 bp, Cannabis sativa
gatgagagatgtggtgaggagtgggtttatggttaattggatagctagtaactgtagcgtatgtgaggaaagcggtgggaggtgtggattcctttgggatatctatcatttcagatgcttttgccctgataggcctcacgccttgaagtgttttccggtgacggcggcgccggcggcgggttagtttttcttcaaccactcattttcactttatttattatttttttttttttataattatctctttttttattttgtttttggttttaccatttttttgggggttttgcatgcctaccatatttgacccaaataattgagtcgcattgataacgttgaacttagcttgtatacaaaaattaatgaataattttcgtcatgaaaattgcaaaccactaatattaataatataaataataataataatattaatgtatcaaaactgttaccttatatttccaattgatcataactcacacatcccataaatcttttataaaaaatactaagattatgatttagtttgggttgagagttgagtatgtatttccatgcttcgattgaaatgtgccccagttcacgtgggaagata

SEQ ID NO: 76667 - DNA, 609 bp, Cannabis sativa
taatataaaagagaagtatgaagcggagatgtggcactctaaaataactttaatctcactatctcttctctccttaatacttgcatgagttggcaggggcagggtggctccaataagaccatctcaggctgtgaacctgagaacttaacctggtgaactgatcctaggacttgttcatcagtgctctcagtagctgggattggggatgttgcttgataatctgttggcttgataactatttgactcaaggcatgccttttattggctgtagttttccaaggtcttttcaatggttccgagtttgctcccgacgaagtctctgaagatgcaattctcttctttccttttttgcccgagctagtaaggaagttcttaaaatccatatctgcgaggcaaaaataaatatatcaacaattgttcaaaataagcaaaagaagatggaggatagtctcccacttaaggaaatttaccatagctatcagatgaagatgaagaactattataattactaaactccctagagcaagtgatcatgaagagatcatagatatttagaggagacaaaccccaatcttgatggttcgctctatcaaagttagtaccgtatta

SEQ ID NO: 76668 - DNA, 757 bp, Cannabis sativa
gtggatgaccattgtgatcgatttacactgttatccttaacgaaaaattgttctctatatttaagttggaggtgagctttcttacaaagaacacactatgaagggaagatcactgtacagggattttgtttctaaatattttccatcatattgctgtcatgtttatgcgaaaagaattaatctgttgtgttcagtttttttcgtggaaaagacttggtccaatttcgggttagaggtggctaattagagttacggtttctgcaaatagacgaatgtagaacaatttagatttcatccaatgcagacttgcttatatttcattgctgctgctttctagcaacactgctttcgagcatgttatgaaattttttgttaccttcctatcattttattttcttttggtaactgaaaaagaaaaatgaatcctgtgttaccacacacttgtgcttattatagcttcaactctagtggttgatgattggtatggcttatgttcggtaacagttgcattaaatatgcttattctcttcagcattgaataattttttcgatattatttctgtttacaggatgatggtgatctcattgacagggatgaccaacagaagtttctggcttgtgctgattttctttctactaatggcctatctgcattgatttcaaatatgcaggcagcagtaacagatgttatcaaagggtaaggttgttctcataatcttgtggttagatgtgttgaatttcttatctttatatatat

SEQ ID NO: 76669 - DNA, 593 bp, Cannabis sativa
actgtcctctgtttcgacttccgttttgagtttgccttcgagctcgccattcagtaatcgactcatctaaactctgtagtagcaggtgtttgattcataaagaatctaagtacctgtctgtttttgctctgcaataacatatctttaatatgttttctcagccaaatgtgaagctgacaaagcaaaagaatcacctactttgattgtggacgatcgttattgcgtatctgacaagggtaatactttttctttcatctcaaagttgacatgcttatgaggattatggagaagcttcaaattttgttctgctatacacttttgtttaaaccaaatttattttgtttgttataattactgagtttacagatatctttatgtctttatgtcatttgagtagaagtttattagaaactgatccttaactaagtcactatatttttagtttttttcaaaatgttttagattcattgttttttaatatatggttcactcatagattagacctaatctatggagtatggactaccaatccattatatctatgataaatgtattcttaagtcttagcccaagtttatataaatgtaaattaa

SEQ ID NO: 76670 - DNA, 566 bp, Cannabis sativa
attatgaccaatttttaataattatggatttaggaaaaattttttttagggtattgtaagcatgaaatttcaaattttcctttgaaattttgcggtatgattgtggtttaagaaattgtaaaatgtgcatgtatggattggtttgaaaatataacaataatccacactataccacctcaaatgttgttatagcttatgttcctagagagaagctaatgaaatgggtcatatttttttttttgaataatgagcatatcattaaataaatagagtgtacaaaaaagatggaccaaaaccatacaaacaagtttttaattcatgtatgtacaactaattcacgagatgacataaattagggatacttcaagaaaattgaatagcaaacttgaaaaaataacatagtataatagttggaaaaaaatattaaaagctaaacaagtaaagattaaaaaaaaatgggtcataaatttgatctttagtgaaattataactgttacgaaaattatgaacactacgcaagtatacgcaatcaagtagtaaaatcacacaggtgaggtcgaaccaca

SEQ ID NO: 76671 - DNA, 2020 bp, Cannabis sativa
gaaagtgagagagatatctgagagggggttgagtttggaaaattgtattgagcaacgttgtcgattatgttggctcgggttaatgagttaatgaatgttgagagattacactataggtgacttactgtgattattttcttgtagctccaaagattgatatctctaattctcattatcaataaagattggtgacactgctttcaaattggagtatgaccaagttcatattgaacttaggatcggaaccagtataattctcgtgtgttgtatctggaagctatctagatttatcgtgtttatatttctagtttgatatgtgttaactgatttaattcttgatttgttttgatctaacttttatttgtttaagtgtgatcttgaagctagaattatagaggttaattcctatgtatcagagctaaatttcttacaggtacaaaatatgaaatcaagtggttcatggagcaatctttagctatgaggcttagatgtgactatgacatgttgtcaaaattccacaagatgaagaaagctcctagaagattttagatgtcgcataagaagttgagtaatctaactatctaatttattttaggagtagtttaaatttatttaattttttttacctctagttgtgagtattatttaaatgtttattttgtttgtaaatatctttttgagttaaaaaatttatacttataaatagttcattatttgtaacaagaacaaaaaaactcatttagaagtagaattaattcatagataacataactttagagaactatgttttagcattaacatcaataatagtactaattgaatcagtctattatcttcgtcgaaagagggtaaactattataaatctaatcttcatcatgtttttttgtaatattttttacatacaatttatttgagatctattattcatgtgtttaatcgttttgttaagatttttttatattttggatgaaaatttatagtatatagagaaattggtataggataatgtgataaggtaaattgtatttgaaatttcaaaattcaaaagtaatgcattattacatttttgtcttaaaaggggactattggaaattgagtgggctaaattagagggttggagcgtctgagagtgggccgtggaggagcctacccaaatgtgccccctttcaacaatgcaaaatagaaaaatctacctgtgagtctgtgacctatacctttttgtctgttctctctcgtattttacattcttgttttgttatttttcttttaaacaaatttaattttggtgacagaaataaataaatatatactcatatatattttcctgaataatatatttatatagattacaagtaatctaggggtggttcagttgtaacttgcacctttttattaattttttttaatagctgatgagaacaaaaattattccaactcccttcggttgtgattctatgaataatacatgggtgattagaatatggaacttttataaaaataccaaattttattgccatacaaatttttttttataataatattattttttttataaaataacaaaatagaataattaaaaacaataatagaacaactaaaaaataacagtgtaaacttagttaacacagtacacaataatttttataaaagttctcctccacaataaaaaagaaaaaaataagaaattttagtatataatgtaaaatccctttaaaataatataaaaaatattgctatggaagtgtacggatctacataaaggcaagagaggtaattaaacaaatatttataattaaaaataatattaattaatataatactaattttgatataacgttattttaaacactatataaatattaagttattatggtgcctaacacaattgatattgaactggtaaaattactttaattataaatgttaaagtgttgatattaggtgcttgtttggaatgtcgtattaggtgatattataatgtgttgtattatattaaattagattatgtatcatattttt

SEQ ID NO: 76672 - DNA, 1983 bp, Cannabis sativa
gtgtatttttaacgctaatttttctaactattatatacaactgatgcatatttatatttatatttactaggtagtaacaactgtgtaccacgtaccatcattattatatacgctaatgtatatttcagtgtacaatttaattttttttgtagatgagtgtacaatttaatttgtgaaacaaaaattgaaaagtgcaagatagaataagtaataaggaatgtccatgaaggactatcacctaacccatacatacatatgtatatatgaataagtttatgttgtagaggagttgaagaggtcaagacaacgaaattattaggcaaaaagtgaagaacatgtggaaaggaaaagagaaagagaaaaggggtttgagatgagaaagcacaacctcactccactagtttcaatttcttaagtataaaatgttataccaaatctatacattggagaaggtggcaattagattaatttgtggaagaaaacagccttattttgaagcttgtgtgttgcacgttcctataaaaacatggcaaagtaaaaggtacgacacgtcactgctgagttggcacataaataatataaaatactggcgaaaagggtacacttgcttaatttaatttatatgcctgcccttttccggcatatattaatgagtttctaaaatcaatcccttaatttcctaagattagtgctcaaatcgtctcagctaccattactgtactaacatctaacattactatttattatttaattaattgataaactttaatcgagccaaattatatttcatggacgagaatcgacttcaactgcaaaagttccatatgtaacttaactacttataaagacaaaataatgcaactagtcttttttaaacaataagtctcagggatgtacatatatataaatttatagtagtctttctttaatcattacttaaaataatactaattaatactgtaatataaattgggtagacaaactaagcacatatgataacataaatatgtataatttgttgtcaagtttgacacaaaattgattgaaatattgacctagtttattcagttatttttaataaaatatatcatagatcaataatatggggagaataactttttatcaaaagaaaaaaaaaatgtaaaacaaatcaaagacttatagttacaataaaaatacatgtaaaaataaaatgatatagtgactaaaatgaatgttttgtcaaatttttataaattcacaaatctcaatataaccagcttacaaaattaaaaattattgatttattctgcaatgcattataatttttaaaaaataataaagttacaataaagtttggtagcttttggttcagataggagccagttttgggggcctaaaatgtaaattttcgagcccttgctgcccagttttggctttcccgaaggttagcttttctgaaagttagcttccctgatggttaccttccctgaaagttagcttccgtgaatgttagcttccctgaaggttagcttcctgtaggttagttttcttataggctagcttccttgaaggttagcttctctaaaggttggcttccccgaaggttagcttccctgaaggtaagcttccccgaaggtgagcttctgcatttgtggggcttccagcagggtttaccgagaaggtcaactttagtattttagccataactttttactcgggagtccgttttagatgttttacataccgttttgaagctcttgagaagctcgatagcatcggtttaattttagatccaaaatacgtaggtagatttgtggaaaatccttgtttctattcgagttttaaagaagtgttctagagtaaatacttatcagtttcacattgtgacatagtgcctccgttcagcgcatgaatttccattcaggttgactgacacacttgaaccaggaaacgagataagaatagcatagaacataatatatatgtgattatgtgtatgtg

SEQ ID NO: 76673 - DNA, 534 bp, Cannabis sativa
tctctctctctctttctctctctgattcaacctaaagctctcacctttacttttttttgtttgttgaggaagtgtaaagttggtgggatactctgtggtgagttttgttctctactgatttttttttttttattttttttgtgattattatgatatcaaaagataaagattagagaaggataaagtaacaagcacgtacctctttcaaaaaaaaaaaaaaaaaattatttgagaaataaaataaaatgtaaacagtataaatatttaaatttaaggcttggttaataataaatacttaattttaattttttaggataataatagataagttatatttgtgaaccttttataggtatttatgttatgtcattatacgtgtgtaatttttttattgatatatttaaataaatttttaaataaaaaataaaaattgaataatatgaacctatgaggtaggggtgggcatcatccaattcaatcaaattgaaccgaactaatccaatccaatccaattacaaaaagttggatatccaa

SEQ ID NO: 76674 - DNA, 3546 bp, Cannabis sativa
tttttttttttttgttaaatctttcactttatttcggagaaacaaggacttaattccttcctttaataaatttgcagctaataaaatctagatgtggcttgatctcttaatctgattgtgttaaattctgtggaatttttgtcgtgcttgtattgtatatatttatcatttctacatgattttgcttttgtcaagtggatgttattgctaatttctttttgtaaatttgatatctttcttgtctgcagttagagagtaccatatccggtagatgggtacatcgtctggctctgacatccaccatcagtcatcatcaaaaatgttacccccgcgccagcagcctcgtcctggaggtttgcaaacctcattatcccttgtttcatcggatgctcgactgtcccctgaggaacccagatcaaactctgatcaaattcgtgagtccccgactgaaagtgccagttctcgtgatacatggcccgctgctgatctagttacggcaaagaagatggagaatggaaaagcagaaaatgattgccctgaacagtcagtcattcgccgtgtttcaagtgcagataagataactcttcgggacatagcaagtgatagggttgaaataatatctgaaaagatgcatcatctgcctgatgagtttctagaagaagtaaaaaataacctccgagttatccttgatgggaatggtggctcacagcatagggaggaattttttaatttgcagaagttggttcaaatgaggtctgatttaactgctaagacattaattagagcacacagggtacagctagaaatcctagttgcaataaacactgggattcttgcatttttgcatccaaatgtcagtctttctcagacctctctcattgaaatttttgtttataaaagatgccgaaacatagcatgccaaaatcagccccctgccgatgaatgtacctgtgatatttgcaccaacagaaacggcttctgtaatctttgcatgtgtgcaatctgtaacaagtttgattttgaggtgaatacttgtcgctggattggctgtgatctgtgttctcactggactcacacagactgtgctattcgtgatggacaaatatgcatgggtccagctaaaaatggggcaggcccaactgaaatgctcttcagatgtcgtgcttgtaatcggacatcagagctgttaggttgggttaaggatgttttccaacactgtgcacctgcttgggaacgcgatgctctaacaagggaacttgactttgtaagcagaatctttcacggaagtgaagaccctcgaggacagaaactcttcttgaagtgtgaggaactcaaaacaaaactaaagaatagtcatgtggattccacagcagcttgccatgccatattgatgtttttccaaggtacgtattggataaagactcatgttgactagcaaaagctttattaccttcacaacgctctatagataccccacgtgttgatatatggtcaaacagaatagttcttgaatgcattcccagtataattttttcagtttttgccttcagggttgatgattcttcaatgtgatgtatttattaatcttatcaaaaactgtgcaagtattagttaaaaatatatatatatatattcataaattatctcacctttcagcttccatttgtatcaccacaactggaatggtcccttttttttgggaaatggcctcacaaaggagccaaggaatggtccttttgtacatcagatttcatgttgggaacttttgtttggtgctagacatcatcatgcccttgtgttctaacatagcatgggtgtttggatatatcagacatgaactgtaggattaattagtggacttattccttgaactttgacagtaatgcataaatttgccctttcagtgtgaaattatgtttcattggatgaactgtagaggcaatttctgaccacctcatattttggatgatgtccttgatgtagagcttgaagtggactccccaaagagcttggaaaatggagaaggtggacggttgatagcccctcaagaagcttgtaaccgaattgcggaagtggtgcaggaggccataaggaagatggaaatggttgctgaagagaagatgagaatgtacaagaaagcgcgactggcagttgaggcttgtgaccgcgaactccaggacaaggctaaggaagttaaagaactaaagctggagaggcaaaataagaagttgcaaattgaagagctggagaaaattgtaaggcttaagcacgcagaagctgatatgttccagcacaaggcaaacgaggcgaagcgggaggctgagaggctccagaggattgctcttgcaaagtcggacaaatcagaggaagaatatgctaccagttaccttaagcaacgcatgagtgaggctgaagctgagaaacagtatctgttggagaagatgaagctccaagagagctctcgaacatcgcaaagcagcggcggtggaggtgacccttctcagatgcttatgtattctaaagtgcatgaacttctatacagtggagctccaaagatggaggccctttcaaacgaacgtcatccattcaggaagaatccctgaggagtctttactagtactgtatgtatttaatttaactaagttgggatgttaaactaatgttaatgaaatgtgatattgcttcatgatgattgtcaaatatttaatttgtattgtgtaacgctaatttttttgcataactttcttagtatgtacatacatactaatgtatgtggacttgaatttgcaaggtatacgtttaactttactacgtgtcatgaactgaataagaagatcaaagctttcaaatattattattagggttctcttttcttcagcgaaaacgcaaacattagttttacaaatgagcccttttctttggttgatgggctgaaactacaagagtttgaaaggatcattttgctgcaagagtttgaaagggtcattttgcttcttggcataaactcaattctagattattattgttagattagactatttcacttcaatttcttcatcattttttaggatgtttggtatgctatgcccttaccaataatctcatgagactgccttcttatgtctgtcactgtgggtattttctttcttttcctaagaagtgtcagtgtttgtgtgggctgggttccaaccataaacaatagaattaattaacaacttaaccaaagccatcttccgatgtaccaacttgttggaaaggggcaaaatacaatataatttgcattttttttcgaaaggatataattagcatttcatgttctctatttactttatgtgataaccaaccatgttctcatttttttggtaagaataaaactgttatagataactaaaaagttgagatacaacaatagacagcggagggtgagtaatctctaaccagatacaatctgtgtcactcgaaaaagtatacttagatagcttatgagtatcaatattcgccgatctataaacatgagagatttgcattcctaagaaatcggacaat

SEQ ID NO: 76675 - DNA, 2027 bp, Cannabis sativa
taatttaagtgacatgaatgctatggcagcagcttaattccaattgcttgaggtggccttacattggccaaatgttggtggtccacttgagttgttagccaggtgcagcaagttttggtgactcttctcgcgatggtcagctggcatgcatttctttcggagcattggagggagagtgaagcatgcacacttttcctccttctcccttagacttcatggcataagggaatcacttaatttccctctttttccattatgctggttagagccatcattgtagaacatgcctttaccagggatcatttgtgttggtcggcatgacaaatagtacttggggcactattatgccttgtgtttgttcgatgctaattttctctcttatttgggcttgctggatagcttcttccaactttatgaagccatctgctcgatcaagtaactctttcatgttgttcaataagatccttctaatatctttctaaggtaggatgcctctatgcatggtcatatatcggccttcttctatcaggcctttgaccttggtggcctaagtcatgaactgttgaatgtagtccttcaaaggctcatcttgtctttgctttattttgacaagatcctctagttgtgaaggtatttgtcttgaagaagagaactgaatatagaactctcgggagaattcttcccaaaaattaaatctttatggggctagcttgaaataccattgttgggcttcttcagctagagttgtcgaaaagatttgacatcgcacatctctagatacttgttggagatctatttggatctcaaagaatctcaagtgtactaggggatcttctttccccatgtacatcttccacatcgacatcttgaacttgggcaagggcaagacatttacgtatgccgagaatggtgatccctttgacctgtctagctcaagttctaaacattttggacaagcaaaacccattagaatttctcgtatttgatctaattgtgtttgcaaagaaggatctattactgtaggggcctgctttgtttgcccctcctacagcctcgaatttgctagagttttgctggccctacactaagagagtgtatgttggaggtcggctagccctagccttggaaactgtccatggctggccagcctagtgttgtgtagggtcaagccgcccatgattccttgattagtttgtggagtcggtgtgttgatagggggtagatcacaccggttgctaaagtcaggtaaatctagatacccgaaatgatcgatttcacttttcaagttatcactttgggtgttttcacctgctccaacttctagccggttgaagatttgcctttaagtggctccctcaactccgagaaggagtgtactaccttggtaggccagaggtactcctactagtggttgaacaacaaaaggttggttgatggggtttattattgaacctgagatccttggctagccacccatgccctttatttcttgaagaacctggttggtcatcttgctgatagaccctccctaatctatcaactagtctttctaaaagtggatctttgatgaggtcctagcgtcttccattggttctttggttgaacaaccttatcaggttgttggcttttttcttgtggtgatcttgctttacctagtgagattgaaggatgtacccttagtcattcatccatctcaagatttgcatctctactgagtgaatacatcacaattagcagtgtgtggttctttagttaggtcagcttggtagatagcctctaaaagtctaggtaactcaagatcttcttccacgtcaacatagggctcaccagtagcagtctcaccaattccttgtctagtctctcctacatagtaccggggacgaggtctagttgttattcttaggggttgttcccaaagggtcctttgtgggaggtgcctatggagtgtccaacattgaggcagtggctgactgttaagttctacaaggatgtttgtgccatcttagccagctgtagtggccagattt

SEQ ID NO: 76676 - DNA, 1217 bp, Cannabis sativa
tgcttcattagacaatctgttccttaactgcattgcctttgccatgatttgatggtgtccactgtgtaattaaatattctctcatagtgctgttttatctataaatttgtgtcttgaatttacaaaaaataacatatattttcctttctcttctataggttgttccaaagagtagtccatcagttgatggtgatactgtctccaaggctcctccatcagtatccagtgacaagataacagagtcgaataagaatgtgactgctgaaggagagacaggagaggaattgatgcacaaatccaagcccgagcgtagaacagatgtcagtggagataggagcaaggaaagagaaagagatagggaaagagagagggataggataaggtctcgggatcgtgataggggcagggattctgaccgagaaagagatagagaggagcccgaaagggacagagataaagctagggaacgacgccatcgttccaaggatagagcttcaggtaatttgcctaacaagtttcaaatttcggtaaacttcacgccaaatattcaacaatttaatttccttttcagcatttgtcttgagcaaaatacattaaactaagatttttaatggtgtctgaattcaggtggagggccttcagataaatcaagacatcactcatcaagaggtatgtatattttacttaggtgtcatacctacatgaattcttctttgagttaggttgtacattacctaaaaagctttcggttattacaggttcttatccctcaagagagaaggatcgatatagacaccattaatatgcttgaaccagttttcaaagcttgtatggcatgttctggtgtttattcctttcatatacagactattatgttccttgaataatcaagagcgatgtagccaagcacctgcttgtaaatgattaatgaaaatttttcattctggacaaaatttatgatacatgttactattttttttttgtgttgacagaattttattagattgttttcttatttagcattactaatactagattaattaggggtatgataaaataatccctccaaaattattgcattttcgctttgtaatttttgcgattttgaagtttcatgaacttagattttttttttgctaaaagcaaacacacaagttatcatccgaactaataaaaaaaaaatgaaaatttactaattgacattgatttccaactag

SEQ ID NO: 76677 - DNA, 1584 bp, Cannabis sativa
aagtggccataggtgggtgtgtgagtgttggaggtcctgggttcgagtcccaggtaaaacatgatgtaatatataaacgcttgaatcaaaaaaaaaacatccaaaagtgaagtcaaaggggccaagaggctgagtggaagcaagccaatcctccatatccttctcttatcaatctttccatctcttttgcctcatttgctgcttttgctctctgttacataccaaaacatttaaaaacattacctatattttatatacactcacccacatgtagttatctttttctttcaagacaaaaacccttattgcatgtagtaactacagcttttatatatatatatataaaaatatgcagagggaagagaacaaatactccatacaaaactacaaatttctgcatgtgttaaaaaaatgtatatttgcatgttccaagaacatattaagagaatattataggattaaatgtcaaagtattttattaaagttattatagtataatggaatcaactaattaattaaggttaatatattgttagttattacacttacaatttgtcatttccagttagttttggaaggattaatatgatatattattatttatatggtattatattgaattatattttatttttttatttaaaattatagatattaatttttatgggttataaatatagagtactagtttagtataaattaaaatttattataatatgtaaaagtaaaatataaaacacactttaatataatacaatattttatttgcaatgattaactaatctatttttcaaagatggattcggaaaagaaaaaaagataaaatatttggtatgaaaaagaaaattttattgaaaaacaccttgattcaacaaaatttttccttcaccaaacatcaaaaattaattttctttttattcttcacactttttttccccatattttctttacttttttcatttttaaacctaatttaatatccaaacatagcctatatataaaatccctaattaaatttattataaaattaataattacctgcatcttttccacggcatcagtctcggaattgaagtcataaaaagtgctagccgcagtcaatttcatcgagagaaactgaaaccaaaaaaaaaggtatatatatattatcagatataatcttattcttaaaaagaaaaagaaaattaaaatggttacaattaattccattgaaaaaaaatttattaaaataaattactaacctccacctgattctgcaaggactggacataattaattatctcatccaacatcactgccatacccatagtctgcaatttcataaatatgttactaaaattaattatgatttcacataaacataataacatataaaatacaaattaaaatattgatatttaattaatttaccttatagcatcctggcacaatgtcttgcaaacatctgagtctttcattaatttttcctcttctaacctgagatgtagtacacaaaaaatcaataagttacaattcataatcaaatgtgtacgtttactggcttatagaagaaaataattgattattataataattatacccttt

SEQ ID NO: 76678 - DNA, 589 bp, Cannabis sativa
tttatataatagagatggtatgtaaggaaaatggaagttggttcaagtggtagttttcattgtacttatacggcagggttcagtttcattgtattttgttagtttatatactgaaatctgttttggccatagggttcagtttcattatgaagtaaagtgtcataaataagttactactagtcaaagggtaattcttttggctagttctagtaataatattaaagttgggttatagttgcttattacttgttgtatttgtagataatggttaatttgaaaattttctaataaaaatttcgtttttggtttgtgatgcattgtttcaagtgatatttcagttttataggctgaaattttaaccaactaaacttgaaacaacacaatattgttctagctaacttatttgtcactatgagtagttaaacacaatttttaaatcttaaaactaaacattgtaaactaattataatataaaaaagaagagagaaaaaaaaaagaaaggaaaagagaactggatgatagctaaatcatgaactcttatacaaaacaatacaacatgccactttttttattaaaagtgtttattctt

SEQ ID NO: 76679 - DNA, 1627 bp, Cannabis sativa
  modified_base (56)..(66): a, c, t, g, unknown or other
tatattcattgaatctggacagaatcaattacgtaatattctatatatggtcagannnnnnnnnnnattacctgatttgatttcctgattagaaatattctaatagaagaaactcatgttttgtctactcatagcatccaagaacttataggctcactccatgagagtcttaaccaatcacccgcttttctaagtcctctggaagctaaaattgtatgggagattactcaaataggcaatggaattaaatcagttcgacatctcttaacatcctcaagtatctatcaaaaaacaagccttggctgggtaaaatgcactgagattgatagaaaaggaagaagagaccttggtgtgggaaatccttgtcgattaagtgtccaacgaaaatggattcgagacttggattatgttaatatctcctgtgaaacttaagcttcaaagtgccattcaattcacatttgaaacctcaaacaataaagctaagtatgaggcccttttggctaggataagattgacccaagtgagagcctagagcatcaaagtcttcaacgactctccactcgtggccaaccaaatttcaggagaatatcaggccaaataggagaaaatggtcacgtatgtagctcgagtctgagacattctgctaaaatctaaatgatataagatctagtacatcccttaggaccaaaaccaacatctaaatgtcttggctaaactcgtgtcagatcaaagcatgtaattcatagaggtacgtagtaccaattaattatctaacacctcatagtattggggcccgagaagctatcaaagtaatatactattaactcctaaatgggcctcatcatcaaatacttgatctcgggagagttacccacgaaaagaaatgttgtccggaagctctagtaccaagttccaaggtacgtcttgatggatggtaagatttaccgaagggatttgtccataccatatctaagatgtatagtcggactgaaatcaatatggttatgcatgaagtacacgaaaggttttggtgttagattttatgccctaaataaaattttatttcaatgtaatcttatttatctaccaataaaagatcagcgattattttttacttattgttaaaaacatgtggctatcgacattgaaatattattatgcccctacaaaattatagttataacagagtcgtttggtaaaaatatctctttagctaaatatatacctaaaatatgaaaatctcatatattaaattagctatgacttaaaatacatatgcactattgcaaagcaaaatctttgagcattgttgcactggtcaggaaaaaaaataaagaaacaacaccattacatcaacaagaagttgttgggtgctaagattagatatccctggatgaagaaactcatgttttgtctgctcatagcatccaagaacttacaagctcactccatcaaagtcttaactaatcacccgtttgccaagtccttcggaagctaaaattgtatgggagattactcgaatgggcaatggaattaagggcctattttggaaaagctaaaagctgctttttgaaaaaactgtgataaaattttgtttggtaaacagtcaaaaaataactttttgaag

SEQ ID NO: 76680 - DNA, 2598 bp, Cannabis sativa
tcctatttagtaattgtagaaagttttaagtagcccctataattgctttaatgtaaagaaaactaacgcaaatttagcatagtatataataaataatgtgctaaattcagtacaacatttgttataatataaaattttcattatcataaatgtacagttttcttttatgctattttaattattatatttagttatagtattaaattataagctttttatatttattttttattattgtttatatagtaaaattaacgaaaagttaaaattattattttttatcaatattaaattttgcattacttaaattttacaattgttaattagaacttaatatcaaaaaaatatgaaaatatatcataattttttttatataccaaataatataacataatttttacatctccaataagagatgagttactataaaattttaattagatattaatatttaatattcatattttaacaagaatttaatattcatttaatttatacacattccttattaataaatttggtatagtatataactgtatatatcttcaaattaatcctagccattttcaactaattaaaaataacaaaatgaaaaagtttcaattattccatctccaatttcacattaatatttctgtctcctacataaaacagaatataaccatttaaattgttaattacttattttcaaaaaaaaaaaaaaattgttaattacttttatctcaaaaaaaaaattaatgttaattactaaatgtcaaaataacaattacaaatctaagccaatttttaaggaaaattagcagcaagaccaggtgatattgtggctgtaattttgacacagttttgagccttttaaagagagaaatgttctccaattttgacatattatttatatatatatatattccattgattaattaatataaataaaatttattatttccttgattttctatctatagtactccctagcttaaattaaaaattagaaagaattaaaaggattaaattaagatatgtcttcaagtttaaaagtgggtgcaaagctttttaaatttttattatgcagtaataatactatctccagatcaagagtttttgtcacagttgccacaaggcctctacaagtaagtataatcacattgaatataaaaatatttatatatatatgttttttttttttatgttgaaagatgcacattaattatctctgaatggggcgagaatttctcgtctaaataaggaacagagggcgaggacggggatatcatcttttgtctccaaatgttaaatgggtcgagaacgggaataacacttcccgttccgttgggaacccgtttaatatttttattatacttttaataatattttatattctataatttatatgtttgtatatttttttagtatattattattttttttataaatttgtaagttgtttttttttttgcttcgtccccaccctatctttgatgggaattataggggaatggagattaaaattcttaacgaggatgggaatgaagaaaatactccctactaatttcatgctttgtgtgtatcatataatttgaaagcaaagagaaaattaagtgtaaagggactgtaaatataactttttaacattatgtataaataattatttatacatattttaattttaatagtatttaattgaatattaatgtgattttacttttaataattattttaaataattaaaaaataattgtttaaattctaaattatttatgtttatatattgtctctattttaattaaaaaacttatgatttattcttaaaaatatatatattttttaatgagaattctaaatatatgttaattttctaataaatggattatatacgcgttaaaaaaattataatattatttattaagaggagtatcctcatttattaatgagtaattttgaactaaaaatatttgaaatgtatttgaaagaaatttgaagaattaatatgaatatgtttagtaatgggaaattataaatgtacatagaagcactctataattttaaattaaaatatctagatattatatataaaataatttcatatttgagcttcacttttggtcctactactgataaatgatttatgtaacactagtaaacaacttcaagatcaattgaatatttatgttgttgattaatatgaagtgatgaaatgaagattttaaaaaataattaataatataatgatcaatatcgggtgatgatgatggtataagcttattattgttgaattttgtccaatttatttattaatagatatttttattttctctaaaaaaaaatgaaggcagaatcaaagaaggagcaagacgaagtagaagcatgtgaaaaggcgaaagaagcggctgaagctattaaaagtggagcaaaagaagtgagggaaacttgtgaattcattagagacactgttgaaaccactactcaatcggtaaaataataatatgttgatgagtgttatcgctaatctcttattttaacttttaagtcaatctttaaacctgaaaaacacaaatcaatttttttttttatttatccttttgatattcattatagttacaa

SEQ ID NO: 76681 - DNA, 3184 bp, Cannabis sativa
aaattttaaaaaatttggaataatttataatatacaaatcaatgtttaaaccgttcatttcacacgagtataaaataaaaaagtcactcgtgcaacagattctttggacactattttcaatgtcttaaattttttgaaatttctcaaaattttatcaaatgtcttaaatatatataatgtatacgaccataaaaaaaaaaattaaactaagtatttttttagatattctaaaatagataaaagttcatcgatacactaattttaaggaaatttattgtagaatttttttatatttattattatctttgtgcaccaaaattatattattagtattgtcgtgtttaaaacttaaaactatacgattacaaaaaaacatcaaatttataaaaaatataaaaataaacgataatttatctaataattagtcaagaataagtgtataaatgtgcactaatcaattacggttctatattttttctccttgtgtttattgaccctttgttttgtggtttcgtgattccttgtcaagtttatgtctttaatttcgtttcctttttttttttttttttcaataataagtttattattttctaatttttattggaatgttattggttgatgagttaaatttgtcatatacttgtttggtttgaaaatttagctcactttacattccttagatgcttaataactggtgaattataaaactttgtttgaagttgctgttagttttttctttttcttttcctaattgtaattaacccactaagcttataagttatattagttaattttgcttgtgttatcttcaggcaagaaaactgtatccttacttattaataaataattattgtatcttttcgaaggaagaaaaatagagatattaaaaattaaaataatgaaattagaataaaattgtcaaaaataaattaatataataattatgtcatttccgcagtccatcaatggtacaagccatttctgggccttttaactataggattgagcttgggcttgggcccttcttctttcgatatttcaatcaacatcttgagagaattgaattggagctaagctaagatagtagctggctaccaagcaatgtgaaactctagctatcaaaataaaataaaaaatagaaaataaagaaaaaagacaatgtgaaagtttcaccaagttacacaacaacgtataaattccttaactcgataatagtgatggattttttttcttttttcttttctttataaataagaggattcccaagataaaacgctattcattttggggtgggaaggaatttcaatttcaaatatacttgtttgtgcaattctaaagatgtgttttataactttgtcctataaaaattaccttgatagatgtgttttaagtatttttatttctttagtttattttttcttccttgaacttttcaattgcattgcatgcttgattaatgtttcactttatccaccatagatggatttttaattttacttccttactttttttttttttggttcttgaagataagctattggtatggcattaatgtctttattctttacttgtggtgtactatgtatagttttatcattattattgataaagggtcaaataaattgatggtatttgtttgtggagtttggacttttttaagtgatgggataaaatggctgcttatgaagtcaaaagagaagaaaacacacaaatgaatttattagtcatgtctttttggtttttgctattgtcaatttgtcaccaattttgagtgggaaataaatatatggatgactacaacataattatataaagtaaagtcatcaattatgtaacatgttatagacaaattcataaaataaaggatgtatttatttgcatgctctttgtctttcttcatatatcaaactagtttattttgaaatgaattaatagacatttaaattggttatacataataaatgtatgtttatttaattgatatgtttgttgatatctaatgttttttttctttttatatgaattatatatgtgcattaagataatcataaattaagcaaaattaatgctaaagttagggaatttacaacgtgtatagcctaaatatattaattttaagaaaataaaactttgacttgtattcttatcatataagattttataagaagcaaaaatcttctttttaattactttttgataatctatttaaagaacttgtcaaattatatttaatatctacattaaaaaaactccatcataatatgtctatatcacactggtttagaataagttatttatgttaaaaatgtaatttcatatggatgggacattcattcattgtaaaataatatatagtttgtagatacaaagaattaaaatatcataaaacataataaagagaaaagtaagataagaagaaatgcattattaaaaaaaaaattatattaaaaactcaaaagaatttatttaaaaggttgtagtagggaaaaagcatgtgcatgtatagtagaagatggctgctttgtgaaacaacaacaataataatattcatctaattattaatagacatgtttataataataattaaaaaaaaaatcatatattttttttttctaagataaaaaaaagagcttaatttttttgaaaagagcttaattaaaattgaacattccatattagttagcccatgtagttgatgcctccattaattcccaatgagaacaaatccatatccattccatttccatggggtgagtgaagggacccacttcctcccacaaaaattgatagggatcgatgcacacacaaagttgtgacagaaggagtctcctttaccactttttagtcttttatttgtacccaccactaccacctccaccaccaccaatttggccacattcaaatgaatatacaaaaatcaaatttgatgtcccacctaccaaatatcaccaaacaagaattacttgttccatctttaaactatttaccaaatattaattatcatttttgaattttgtgtttattaagagttagtaccacattggtaatgtgtggaaataaattgtgatatataaacaggaccggccctaacttttagtgggtcatagaaaaaaaattattttgggcccttatttaaaaaaaatatggtatttttcaaaatcagtaaaaaaaatggtataatttt

SEQ ID NO: 76682 - DNA, 719 bp, Cannabis sativa
cgacgacggagtacatttagtaaagatccaaaatataaggcgaaaactgtgcatgtaatggtgatgacattgtatggcatgctaaaatctggagtggttaaagggacaagtaatacttctgtgtaagacagaacagtactgttttcctacattacaaatccataaaaaaacaaagtaaatacaaaatctaatccaaagtagaacatgtttataattaacataacatttttgaactgtacctgaagttttgctaaaataggtaaggtctccaaagatttatcttcaatgtagtgtatgcttgcttggaaatctggatagcttactagggccgacgggatatcgaatccctgattagcatctggtggatattcatcaatatgcaaaaatccctacaaaaatgtactaatctagttattaaggaaatagaggcacatgcaattttgagccagtatgatgaaatcataccttatcgaattctagagttacaacagctgatttcatggcacaagggagctttagtaacatctccatcgacccaggtgacaccttgtcttcagaaggcgaaacgcacatcttctcaactgaatctgaaactgtttgtggttgttcatcaacaaatacttgtagtgtatgataatacaccttgatataccaaggcactacttggaaaatcttaacctgcaacttgcaactctcttttgttgtatcgaaatgcaata

SEQ ID NO: 76683 - DNA, 748 bp, Cannabis sativa
ttttggcttttgggacaagaaaaaataaatatattgtatcagtgcatgcattatacagaaaataacagaagaaatcactttctatataccagttcttgggtcatgtgccttagccacatcatctactacgtaaataaatagtaatatattaagtaaacaaaatcatttgtacaatattttgctggaatttttttttttttttgttatatttgaatgttttattctctcttatgagggtacttaattattataaatataaattgatactttattcataaagtaaaaataacatttatactttttatgtgattttaattatcaaaataccacttatactatcacttacataatcaaacgatagttgcagggtgattgttgcgtggttgcgcggtagttgcatcagacaaaagtttcaatcagacgatggttgcagggtaattgctaggtggttggtcgaaagttgaatcgacgaaagtttcaatcagacgaacatttctaggtagttgctgagtggttggccgaaagtggcatcagacgaaggttttcaattagacgaaataattgttagcaaaatatttatgcaactgtaatacaactgtaatgcaacttttgtgaaatattaaaatcagaacagtgtttgtgtttccacgcacgtaactctatctacatgtctctttatgatttaatatgaacaaattcaccattagaaatttagaaaataacaaaaatacaccaagataaacatttt

SEQ ID NO: 76684 - DNA, 2093 bp, Cannabis sativa
aaggtaaggcttattttatgttgtacaattacacttaatatcccaatgaataaaaaaaaggtataaaataaaaaactaggtatttcagactaaccaaatgaagtatggaacagctcacacactacaaaaacatagctaaaaaatgaatgaaactaagactcggctccgctctcagaggtaagactaccatcatttggtgagttttgggcttctaatagctgcatttggcgtttggcgtgctctctttcgctagcagttattcccataatgatatggagtatcgtactagttgtaccaaagaacacaataggagctaaagattttctttttattcccacaagaatagctaacaatgcccctgctacagagaatacccaagtcccaagggcattggagacaaagcagtcctcaagatgcttaacattgtcttggccttccatcctggtcaacttgccagtgccggtgccggagagggaagttcttaatgcgaagacgaaacgtgagattcacgagatgacgagacaagaggcaaagaagaaacgacaagagaataggaatcgagggtttagaaactcgaacaatatctctcctgtaacagaagatcaaaatcatgatcacgatgatgaaaatcaaaatcgaggattggtttcaaagatgacatttttaagctttccctataaacaaaatattaagcttcagaatacaacaaaatttaaacgttcaaaaaaaataaataaatggagaaggtagtacaaataaaatggtattgttctcttcttccaacctttgttcagatgggttcacaccaagctggtacgctgcctatcccctcttacagctgaagcttctgcagccttacttgcagtcacgatggctaagcactacagacacccgtatgtgatcattgagggtgattctgccaatgccattgctgctctgaaaaaagaggcctctttttgggaaattgatagaattgtcactgaaatgggcacttcaattcagtaaaattggtttgatccctttggaagtgatccccagcaatgtcatttgtaatgaccacccttggtctcctaattcgcattaatgaaactttcaggtttaacaaaaaaaaaatcattattctttataattaaaaaaaattaaaaaaaaaattgttggtaacctgctatagtaggtcaccaaattgccacctcatcaggttttttagtactaattaatgggtattacccatttagaaatcatccgtcatcagacattatcagtattttttttcatttcaacattaaaataatcaaaataaagtcggagggaattataggcgccaaatgctaaaatttcatctccaatacacgtgtaggtgaatctctacgcctaccaattctttttagtatagaatcctaattctaaactattacattattgttgacatttagttaccaatacatcttacgaataaatattagtggataaaactatcctttatctaccaataactattggtaggtaacatattggtaggtaaacgcaagatttcttgtagtgatttaagccacgagatccgagatctttgtttccaatagtcttcctcttgtgcaagcaattcatccaatatagtttctgaatttttaagagcagtaaagtgatcaacatctgcgttagaggaattctaaagcccttccacatgtttatgagcctctttaatgtcctgcttcatatttccatacttgtgatggtgccaagattgtaaatgagtagcacatgattgtaaattactcattgtttgagatatagcattcaaagtattgctgacccaattcttgaaaatgatgtccaaacaatcttgattattgagccaaattttttcaaaacggaactgagatttgtatgaaggttcaatttgttgcaccccagccattgaaaccattaatttaagtgctctgtgatttgaatggtagaagttaagatgctgaataattggtttctcagaagattcagaccaaaaatcattgaagaaaccataatcaagcctctccttaacgttaccaagtccttgacttttgttagtccaagtaatgagttcaccttcataagca

SEQ ID NO: 76685 - DNA, 2272 bp, Cannabis sativa
aagtcatacaaatactattttttctgattaaataacttaattagctgctgaccacagctaggtccaaagcatatttgtcttctcgttattatttttcatttgttctattaaggctcctaaaaaaaatcctaaaactacctatttctgcaacaagatccaaaattgtaatcacaataaattaaattaattgttttagcgattagttcaatgttcaagagaattttaattacatcttccttctaagattataagattataaaagacctaagttatacagttagcttaatgttaattgatgagtttgaaataatatggatttggaattttatcgtttcattaaaactcatccaggaaaaatattttgtttagcaaacaaatatcaggttgggatcatcagaaaaaatattttcacaggatcaatctgagattgtagggatcatatatttcagagtaactctgatgtaagcaaatagaattttagaggttatcaacaccattgataggaacattacagagaatagaaaggaagcaaagttgaaaattgaatgtcgctgcatactataaagaaaactacataaagagaaactcctaccaaaagtaaagttcttgcatacctgattttctgcttctctttcactaatggtactgtggatcacttttttggtcaaccctatatttgttaaaattgattaaagatgataccaaacatgatatcgagcaaatcttcccaaaattagagcataatatcttacaatacaaaatagataaaagcatgcctcagcaatgctacaaaaagtgtggaacaacagatgtcagcatatattagctgcttaccactagctgcgtgatgactctgacaccattcccccattctgtctaaacattctttagtttggtggataaccaaatcaggaccctaaaagagaaaattatcctgaatcacaaaaacaaaaagaactatatgtatgtatctatacactcatagcaaaagagaaattttcttcaatcataacgaagagaaaatatacatttatagaacaagcacgctgcatgtgaatcatcgactcaatcatgcagtgttagcaattatatgggcaatctgaacaagaaaaaagagaataatttgccataatgtggtagaagacgaattcaatttgggaaagagtaaaatataggtttctgtatgaatttcttcatatatattgaacttagaaagtacctttcgataagtttcttttaggctgtgaaggttgatggatatatttatctttcttccggttttagctttgtgaagatttctaatttgatttgattttttccctgtgtttatggtttagatgaaattgatccctttttacattttttttttttaatttctgaatatttcattgtctttttcttctaatatctcttaatctaacaaaaccttttttttcattcgaaaacaaatactcatcagtactcaggaggtaaaaatggtttctctataaaagtaaatgctagatacttagtaatgcaaagagactcacgagtacttatttcaaaagagactcacgagtacttatttcaaccgtacattcacatgtttcacactctttcctttctaagcggaaaacaagaatttgtcagaaacaagccaagaaaccataaaggaattaacagacaagcaaacctctaacaaaggacttaatgtgaaacagtagttctactatcactagccctcacacaaatattgctgcaattgactttgcgtaagagcttggtgagcaattgtgcagcacactaaagagtgttgtaattaatattgagtgtaattcggaataataattactaaatttgatgtatttgtttaaccaaataattacacaataacgatacaattggcggtaattgaagaagtctcaattatactctccaattcttatagcagctaggagaattggctgagtaattacaaaatgttattatttttaaataaatatttattacacaaatattacttttatgtgtacttactaactcatttgataaacgaaataagaattcttcaagtaattactacttgacatccatataattattgtgttgtgtaataaccctcatgttaatgggtttctctaaatgtacatttatttatcactgctcgaaatgcgcggccaagactataaagttgcaatgtacatcatcaactaactgcgtacttggtgttcactagtacatttataagaatatcctactagtgcatttataagaattataagttttgcttgtt

SEQ ID NO: 76686 - DNA, 537 bp, Cannabis sativa
acgcaacaagaagggctagatttccttaatactttttctcctgtcgctaaaatggttacccttaaattgcttttagttgtctctactataaaaaaactggcatattttacaaatcgatataaacaatgccttccttaatggagacctcaatgaagaggtctacatgtgtataccacaaggactaactctcccttctactcttaatgcagaaaataacttggtatgcaaattacacaagtcaatatacggactcaaacaatcttctaggcaatggtacaagaagttatctgaggctcttatacaagagggattcattcaatctcaggcagattacacccttttcactagaggaacggaagagaccttcatagccttactcgtatacgtagatgacattgtaatcactggacccaacatcagtattttacatgatttacaaacatcattacaccagaaattcaagttcaaagccttgggaaaactgaagtattttctcggttttgaggtgacacattctcaagaaggactattcctttc

SEQ ID NO: 76687 - DNA, 574 bp, Cannabis sativa
tttggttttgtttcatccaaatccgatcattccttattcattaatcattctgaaacatcaacaacacttgtgcttgtgtatgttgatgatattctcattacaggaagtgattttgctatggtggataatctagttgctgctttgaataccagattctctttaagggatcttggccctctcaagtactttttgggaattgaagttgcttattctgaagagggcattcacctgtgtcaacagaaatatgctcgagatctccttatcaaagcacaaatgcttggttcgaaactttctcctacacccatgactagtggtattcgactatcagctcaacagggagaaccacttgctgatgttcaaatgtacaggtctattgtaggggcattacagtacatcacgataactaggcctgagctttcctttagtgtgaacaaggtgtgtcagtttatgcagcagcctttgtccacacattggcaagccgttaagcgcattctgaggtatattagtggcactatgaatcatggtctcaggtttactaaaccagtgtcatatgatcttgttgcttattgtgatg

SEQ ID NO: 76688 - DNA, 900 bp, Cannabis sativa
tgatgcttactagattgggtgagtcaaaatccattgatgaatgcaaagttatgatcaaacattttgatttgaatggtgatggtgttcttagctttgatgagttcaggattatgatgcagtagtgattagtactgaagatttcattaatttattgtagtacaatttttgttgtttgtatgtgtgtatatattaaggcaatattatattactcatgttttatttattattatactcatatatgcactttgactttatctacataatcattattgttgtaaatgttgctacggaaaataagagaggaacgatattattaaataattgagttaagccataaattaggtcgttctttttaaaacatgcacgatactgtctaaaattgtacaagcagtcgaaaaaagtcaatcatcttcaagataaaatagcccattaggtatcgaaacctcactactgtaacaaacggtcaaatacaccatctaataatattattgcccaaaataattcaaatgggaaaactgtttataaaaaaagggatgtctttctccattggttctgatgcgttaataaaataaataaaacaaagtcgtttttttttatgaattgtgagatagttggattatggctaaaaaatataaagaagaaagatctttgtttaccaattaatgaagcatgtttaaaaatagttttaattaattaaataaaaaataataatttttaataaataatttttctctaaaagatggcagtggcggtgcacgtgtgtgtgtccctcttctaacccaattactcacatttacaatatactagaagaaagttacgtgcaaggcacgtatacttaattttatgttagttgctctataatttaattgagaaagattcaataaataatcatataattta

SEQ ID NO: 76689 - DNA, 1341 bp, Cannabis sativa
agataggtttacaagttatatacaaatgtgtctgtattgatttgagatttaaagttaaataaactttggagatagtatatattatagttgccatatgttttttttttattcgtgttgttgagatttttaaccagattacaatgattttgtaatcaagttgaggtctttccattaaagtagtatcaagctcttcaattaaacttttgcctgtgccaatgtgtgtaaaaagactttgttttaaactactctttgatagtggattggtagcttcagtagttgtcttgagtttattggatcatcttttttattattgtactaaggtataattctaatattaaaactatgttagcagtggttgattttgaagaaaacgttagaaaaaggattattgcctcagaaatatcatagctaatattttgttttgagtaaatattaatattttatgtttactttctaactctctgctttgaattaattgcagttagttgtcaaattcttcttaattaatcacaattttttctttttattattaattgcaggaaatcagttgtgccaagcctgcaaatttgcctcgtactgttggactatgttagtatctaaatcaaacaaactcaaattgtgttaacccaaagcactattataagtcagatttggtagtgcctacatataaaatttggtcaacaattcaagattctcccttactcccttaggtgctttgtgattcttttgttttttcttagtttactttttattagacttttacttgaagtttactttcttctatattgattattgtaaataattgagtatgactctgttaactaattttgctataagcatcatttttttataacgaacacctctaattgacttatttgatatgtatatttttcttttttaataaaacaaataattttttattttgtattgatattaggaatgttttagtacttaagcacaaagatatgaaaatgaaaatctcaaataaaataattgtgcaattgtagtataattttattatagattacaatttctctctaagagcatctccaagtgctattattgtgtgtatatgtgttttttttatccgtatccatatataagatcctatttatagataaaaatattgatctaatttttttttttcacaaaaaaaaaaaggataatataagatgctatatatttcttatatatatttttaagtcagcattttattttacatactcattgaatttgtgttttgtttagtatatgaatattgatttttagtttatttttgaattatcttaagaacatattacagttaaattatcaagtctttttaaacactaatatattgca

SEQ ID NO: 76690 - DNA, 615 bp, Cannabis sativa
aattaaagttaatttttccaatttctattgacataaaaatgtgattcatattttaatatatatttttcggattgctttggatctacaccatgattatcgacgtttaaaattcttaatctagttaggctatgaatcatggataaatatattattgaaaggcaaaataaattcaaacatgcttgtttcagcttaaaatattcatgaacacttaattgatgtgtctcgatcaattttgggcttgaaaatataatttttggcgacaaaaacacgattttccgactgggtggggaatcgggtcctgtagacccacgtacaggaatccgcgtcaagaagacccggttagctgaggaagataacttatacaacagctaattttgcaaatgaaggggaaaatggcagttttcaaaaaaaaaaaaaggtaaaaattatgaatattataattgttttaagaaaaaattacattgtatacccactttactttacttattttaatttttacttttaatttttttattctttaaaatatacttattttatagatgttgtccccattaaactccttaagttaatttaaattatatgctagatttaaatatgttgcccctaattttgccc

SEQ ID NO: 76691 - DNA, 1332 bp, Cannabis sativa
tttagtataatcctttgccatctcgttagtaattttttttttcctttgctaaactaatgacaaaatttattgatatcaattaataaattttttccttggaataaattattactgagttagatcaccaataacgttaacttatcattttaaaatgttacatggaaacaatccacatgaaaagaattaagaaaaaagtaatcaaaacacgaaacaatgaactttgcttacgcactttatcctaaactttttgcttttgtctatatatcaaaagagcgatgatatatgtatacatagattattacaccgaaagattatatattaacatagtataaaaactatcacgtgaattattatgtgtaatctttcgatgtaatttgttaatggaattaaaatagtttgttccttttgatctgatttgttttacctttctaatctcaatgtcgaattgttttttgtgagtatttctttttttcacctaatatggtattttaactttttacttttgaaattgtaggttttttacttttttttttttaattagtagaattaatttagttaatttgtagtaaaacttcttgccaaaaaaaatgtagtaaaacaatttggatgtatatcttttcgccacttttatgattttcgctttaaataattaagaaaaaaaaatcaaattatttattatattttaaatatatttttaagtttttttttttttttgaaagaaatatatatttttaagttgaactaatttttctaattaaaaatcaaatcaatttttagataaaaaaaataaattataatttagatcaatgtattgtttccctaatcaacacttactgaacttaagtaagtaggtactatgccacaaatatccattaaaaatataatatttgtacaaatcttcagcctagaatttgacttaaacctatatagaacatttctgttgatcaaaatggaagaaacaaaatacaaaaagactacaaagattgaagttaaattactttttggatgaaccaaaacccccaaatcccatcatagctgcaacatcaggatccatttcaggctcctcttctgctgccttctctttctgaaaaccaaggaatagacaaacaatatgggaagatgagaatcatttggtggcttccatataagaaatcacaatatgatacatttatctgggttgctatttgggaaactccacaaaacatcctcataacaccctacaaagcttattttccctatttttgtctctcacaaaattatcccccaacccacttcaaatgacataacttaacaccaaaaatatgaaaatacttcatggaattcaaaatacat

SEQ ID NO: 76692 - DNA, 2885 bp, Cannabis sativa
ggtaaaataattccaacaaaatattggttggatactgttatccgtatttccagttagggacatgtggaagttctataacgaatacaacttaaataccccaggcccaacagagggcccaaataaaatagctgggccagatccataagcgaccagttgattcgaacgaggagcgagtggcccgtccaagcagaatcccatccagcatggtatacattcagataagattaagccatatatccagaggaagtaattagcgaatatctgaatgtcgacggatgtttccctttactgccagatcccatgagattagaaattgtcttccaagaatctcagattgaatatcatatctcgctaaatatagaaaaatgctaattagtagtcaagtaataaatgtgtctttatttcccgtaaagataggacacgattttgacaactattatcgtgatgggcatccacaatagcatataaaagacgcctcatggggcgggcttcatcaaataagcccaaggctaatatattatttgtaaacacttcctcaatgggaaaaaggtaatgagtatgacctctatacactataaatacacaaaaaaccttacatgcaaagggttagaattttattattcacttggtcatgccaaatagagaattcatattttcttgtaaaccctaaggtttttctagccttatatttttaatattgactcgtggactaaggcttgttaatgtcccaaccacgtgaaaatcctgattattcttattctctttgtctttgaattatcattctttggctcttataaatataaataattagtttttaaaaatttcggcaaacattttggtgcttttattgagagctaaagaaaacagtgataccatcaaaggttgtatattgcaactatagtactcacctaaaacaaaactagtggttgggatggagatacacctatggaagacgtagatcctgcagcccaggcgaagacatgagtcgatggagatccaagaaaagaaacaagagtcttgcaaaaaagactcaacgtactgagaagcacgttgagaaatatcccatcctataaaaccggtcgaccggtttgcactagtaaaacccaaaaatctcagatttcagccaaaactttcccaaatgcaatcaaactttctaggattcctgtaatactagtctagagtagttttcaaacaaaaacagcaaagaaaacgcaccaaaacttaacttgccattgttgagtcaagtttgagttgctcaaccacaaaattaaacaacaacagctcaaacagataaaaatcatcaactaataaccattgataacaaccctaatcagtaagtaactactcaacacttaaatccctaattcaaaaacttaaacttaaagaaaccaccaaacaacacaaaaaattcacaatagaattaggttagggttctacctcgaattgagctcttagattccaccaaaaaacctctgaaaattgaggaaaaactcccgtagacttgctggccgaagtgaagaagaagagaaattaaggtttccaactttgtaatctctctctatttttctattctacacccaattaatccaaattaattaattcagccgaaaattgccaactgctaagaagctaagttgccacctagacacaaactcaatatttccacttttacccttgcttaaggtctaattaaaaaaaacgatttaggggtaaaatagtccaaaactattaccccgcaaaaactcgaatctcaaccttaacatgctaaaattctctataataataaaagattttaagtttacccatgtgacctaaataatcctccgttgcattttacatcgccaccgagttaggatcacaaaaataattcattttacatttaacataaatattcacatataattatcaataatgatgataataataataaaattaattagtatttataaccacactaatccatatctaaatcatgcgctcattaaatttatatactaaaagtcctgtagcaagggcctattaaaattgtatccgcaaaggtaaaaagggggaccattgtcccccaaaaataagttcaaaaaaaaaaaaacaaaagcataagtgaatataagtttaggaatcgacaagagcatccgattgagtatttgggtctagcagaacatttgtatccacaatcaaagcttcagaagctggatccaccacctatgctgaaagagtatgcagtttattaatattaagaacataaattatataataaatataaaatatttattttgtacaaaatagaaaaatgtatggatttaaatattgtttattttgttataatttatttgttttgaatatttatattttttttttgtaatatataataaataagtacatatatttttaatataaataaatttccttaagtcttttaatccaatcaacattttttaaaagttgggttgtacaagatttaaattttgactataatttctttataaatttttaaataagttattttttatggtcctacggggacttaagaccctactagaaaaaatattattcacaaattacaatataaagtctttttaatttttaaattattttaaatattatcataagatgccttaaaataaattttacaataattaagccttccacaaaatgtaattttttttagaatcagacaaaaaataatttttttatttactaatatatataattttttattttatgtccccactaaataaaaattctatgttcatcactgtagcaaataactttttcgcataaattttttagaaaaaataaggttttactagtttgtctccacctcataactcattacaggttattaaaaattgaataattaatatttttgcctcatgaactttcaa

SEQ ID NO: 76693 - DNA, 1647 bp, Cannabis sativa
aaaaaaaaaaaaaaaacagtatttgtactggacaaaattatacacgtgtaaatcacttgtggatgttggataaggtagtgggaactatattataacttcttttaataatcaatgattattcattttgtataaattgtagctatcaaaattttaacataatattttttattaattttataatattattatatttatttaaaaataaaaattatataaatatttatataaaaaaattaattttattctatagaaataaaaataaaaattatatttatatataattacatatatctataaacaaaatatatatttaaattttaattttacaacaaactttttatttaaaaaataattaataatattattcaaaaaatgattaatgatataagtgcctcaacggggttagtttttctctccagtttccctattttccctgtctcccttgtatcgagtttttccagttttttttttctggttttgccctgttctttcgtcttcctcttcattgatctgtcgcccatgaacccacattcccactactatctaatagttcttcaatctgacagccacgatctatcattgttcgtggaatctccttacattcaacattatatatatatatatacaatctcagactctctttgatttattcctccattttttattctctttcactaaatctaacttctctatggactccataatcaacaacatgaactctaccttgactctatttgaaaaagaaagggagttccatacattctctgaggcagaccttaatgatcctactcaagtgcctaaattcttcctggtgacccggtgtctctccaactctatcaatcccaacacttttattaaaagaatgggagctttttggtccaacaaatgccgttttaaggtatctgtttcgaaaatgaattctgatcttttcttactaactattggttgtgcaggggatcttcatcgaatcctcactggagaacagtggcatttcaataactaattggtcctattgcactccccaactgtgcttagcaatgtcaccaaatctgaccttaccaaggctcaattctgggttcaaacttatcggttaccttttctcagcaagtctcgagccttagcaaaaaaagttggtgaatgggttggagaattcattgatgtgtatgaagactctcttcatgagggatggggtccctttctccgagttcgtgtttggattgatgtcactcaaccttttgatgagagggaaaatggtcaagctaccaaaattttgggatgaatattggctggagtttcgatatgaaaatctcccgatcttctgttttcagtgtggcttaattggacatcttttgaacgatgtgcctcttttttggagcttattgacaatggtattgatcctaatcttccctatggccctcagatgattggagataagcttccaaattctggttatgatagataccgtacagacttttctaaggctaatgtatattctttcctcacccgtataaccaaaaaagctattggacatgccatccctgatctaaattccaatcgttatttagcaatagggtcacttccacatccttctcctcttacgttggttgaatcttcatcaaacacaacaatagtttctaggcctgtaga

SEQ ID NO: 76694 - DNA, 523 bp, Cannabis sativa
tatatatttatatatatattaataggattaataatattacacattttaaattaaagagggaaaagtgtatatagctttttagaacaaaaaaaaaatgtttacaattcagtcaaatatatagcattaaaatagagattattagctaagtatgccttgcaaagtacccaaattataaataaatttaaatattaaaaaaaattaagtacacttaagtactacaaatataacaatttgtatacttataatttaaatatacttaacttttacaaatatatataataatttatattttcgccgctaaagaaataacttcagtattttactacaatcgctaaattaattaagatatatataatatgccatattatttatttgagcattgttattggatattagtggtgcttagcaacttctattagtggtgcatattgttattggtataattaagtatgagatctcatataatttaaataaataatttttaaaaaatattgctaaccaattataaagtactacttataaa

SEQ ID NO: 76695 - DNA, 947 bp, Cannabis sativa
gaaggaagactggaaaaatttcaagtcaattagatatcacgagataatcacatttcccagcccacaattcacacaccctactactcttctttgttgtcaaaatagaaagcacctcagggactagatgtattaaaaacctacaaattataactggagataaaactgagcacattttgaaccagtaaacaacattagatggatcacatatttaccatctatcttagacaaaagatgcatatgatgcactaaatttcatgcatcaaaaaacaagtcctcactaaggtaactgtttgccttacataacagtattaaccaaactgttacaatttaccataatgaaggtggaactaagtcaaatgtgccttaagatacataggcgaaaggattatcatgtatggcaatacatattagcacaagtcaacagcactttatctaaaaccgaaaatgaaattaaaaaacattgcatagcaacatgatggaccttaatcatacacttgcaatatcttgcatatttctgtaacatattgccaatatcatatgtatgatatgttaacatcataatactccatatgatacctaattaggagatatgatatggtacctgactaaaatattattattatcaccatgatgtggtagtcatgtaatggtggaagtcctgatgagtctaaattaaattgcgcaagaaagagaggcacatacatgtaaatgacacatacatacaggagaagttgtatttaactatctatcatcactattcactcaagatcagaatatcagctcccttggcaacaaaataattgtaagttatataagacagagagacaaactttaccaggaaattattgacacattccaaacacagcataaaaatgaaggaaaacacattaaactacatttcaaatataaaaattacttgttcagatgtagtgtgtttgtcaaactat

SEQ ID NO: 76696 - DNA, 521 bp, Cannabis sativa
  modified_base (208)..(212): a, c, t, g, unknown or other
  modified_base (494)..(495): a, c, t, g, unknown or other
ggtctcggtccggatccaggtcctaagtttcgatcccggtctgggtcttggtccgagtccaggttcttatccagatccatgtctaggtttgagtctaggtctgggatcggatcccaggttcaggttcgacccgatccgagacccagaactggaattggaataggactgagactagaacccaaacatgggactgtaacaggacccaaannnnnacccaaactcagaccagaacccatactgggacttggacccagaccgggacctgtgacctggtacctaaaccaacaccaggacctggacccagatcgagatccggacccagactcagacaaaaaaactggggccgaaccaaggacccaagaacaagactcgaacatgggacctaaaactcggacacagacttagactgggacccgaaatcggacccgaacccaaatcggggcccaggaccgaacatagatgggggacccatgtcgggttttatgccctaaatnnaactccatttcaatgtaatctatttt

SEQ ID NO: 76697 - DNA, 864 bp, Cannabis sativa
aagaagatattaattatcctcctcatcctttttactcctcattctctctatgttatacaataatctatattttaagtataaagtaacaaatttggtatcactaataatatggtgtctcttgaattattagtgatattaaatatttttctttaattttgaagttagtaaaatatgaaaaaaaaaaaatagatttagttagatttttgttaaataattagaaattttattctgatcattattatattttgttcctaaacttcaacactattacattatattgccttcaattagagggacacggttcgatagtaataaaaatttaagaggtataatataaaagtgatcatagttcgaaagtaaaattactaattatttaataaaaatctcattatcacaaactgtcacagttcatgaaaaatatttaacatcaataacaattcaagtagcataattaattttttacaatcaaagtttataaggaaaaatatttatttattttttattaaatattttaagtcttctaattaataaaatataattatatgggaaggatagtatcctccaagctaaaaccatttcgcatttaatgtggattgttcaatcttgtgtgtgcttgatctaacagctgagattgaatagtgttgtacatgtaagtagtagggatatttactttaaatgcccagtagtcggctagcttttgcaaaaaaaaaaattttaaatacttaatgtgatagtcggtcaattatacttatttgaactacttatcttttactttagtctattctcattttcttcgtttattctttttcttctcacttcactcaacaacattttcttctcatcttcttcttcttctcaatcgat

SEQ ID NO: 76698 - DNA, 732 bp, Cannabis sativa
  modified_base (693)..(695): a, c, t, g, unknown or other
aaatcaattttacattcatgggtaataaccattaaaattgcacccatatatatacatacttaaacattaaattacacactacaacaaatactattttccatacatgattattagcttaatgaaaaaaatattataataaaagtttgaaattaaaaagcagaataaaaattttttaagtgacaaacttaaggagctgtttggcttcataacttaaaaattgtttttaattttaaaaaataaaaaacaatttttaaaaactaataggggttgcttggcaaaataatttaaaaactgttttaaaaaattaaaaagcggaaaacatcaaaatgttgttttcaattttcaaaaatattttttttttgtctagcatattatattttacatttttactcacatactcggaccctagacccgaaccaaacccgaacccgaacccaaatggttcatgttggtttaaaatattgattttttttttttttgtaagaaaaaatctaaaaatagttttaaaaaacttgtgtcaaataccattaaaattttaaaatgacaaaaaactaattttaattctcacttttagaaacataattttaaaaactaaaaactacaaacacaaccagtttggctataagtgttctacttttccaaaccaagctttcccttttctttttaagcaaaaaaaaaaaggctaattagtannntttccccctgaactttgacatgtagtaaatcgtgccc

SEQ ID NO: 76699 - DNA, 1166 bp, Cannabis sativa
gctaacctgatcgaattttcaacaacataatatatatatttatgaatatatgaactttaatatttttctgttcaaatttaaagtgaaacagaaaataaaatttgaatatatgaacttttaagtattgtatttaatatatgcatttgattagaagtaagaaaatacaaattggagaaagtttcaacaacataatatatatatttacaactcaaaattaattaagttatagacttacttttacaagtaaagaaccccacagaataaagcataataaatacaatatacctaatgaacacaaacacaaaaaattacataaacaatttgtttcttcactaaagagtaatttgattttattggtcacttttagaagtgagtgtgataagagaaatcattagtcaataataagtcataagtggtgagaaaacaaattagacaaaaaagatcttgtgaatgcaattatatacaaaaaaaaataaaaattagaaaggaaaattagtctctaattgaatgcaatgtaatgaaatcacatacatatgttaagactatcgattctatatatatatatatatatatatatatatatttattagcagaagagtaacaaaaactaaactttaccttcaactgcttcaaagcaatccttccatgtatattggtttttaacttttcttgctacaacctaagtgagccaaagacccattacaggaaaattaacatatgcaaaaataatagatcaaatattcaagttttcaaattaaatgataataaaaccaaattaagaattaactccaataatcttcaaatatattgacaacatcattcatgcggcaccactcaactcttgggaaaaaatcaatattgacaatcattaacaaacaaccaatcatttattacctgaaaggagtcatctccaatcgttggcagtcaagaaaagggattagagttttagcttttctctctaccaaattgtcttctgttttgcaatgctggtttttcccctctgtggtgctcgtcgatcagaagcaattttcttcgtagaatatagggcaatcacaatataagatttggacttgagagagaaaatcgagagggagaaaaattgcgattatttattattataaaattaaaaaaaaaattattaatattctcccaagataggtttgtta

SEQ ID NO: 76700 - DNA, 1229 bp, Cannabis sativa
ttaagtgtataaaaatcaaaacataagggagtttcgccgcaaattgctcttttatctttaatatcaaattatcaagctgtgaaatgcaccacacacactcctttcgctcaacgttttatgtatttaaaaattaatttaattttctaagatttagaaaaaatgaaaaatacaactaattatgtccacttattaacaattaagataaaaataaattatcatgtcaaacaaaaaaaaaaagaaagaaaaaaataaattatatgtataatttattaatcagaattaaaagaaacgtgcacgcttattaattatagttatgattttcagatgttatttaaagaattatgttattgattttcttttttataatgcccaactagctaatatgtttcttatatagaaattaatatacgttttaatataaaataaataaattatgataagtcaattttcacgtcactttgttgaattaattatcaaatgtaaattttgtgtaattattataaaatggtaatatgtaattactatattcgttggcagttaagttattgacaagttgctattttcataataattaattaaagttgaccagttcccttgtacaaacaaaatttatagttgacctttcttccttgaaaatttcattttacaagtaatttatctatttatttatttattttcctgattaatggataattacaaataaatatatattgtgttttattctattttttattggtcttcctatttatttttatcacgaggataactattataataaataaagaaaaaaaaaacaaaaatttcatatatatgttctgtatatattaatgttattgtgataagttatagacctgatatgccataatccaaacatgatgattatagatcattaatatattaattattattattattatcaacaaattaataaattaattatgagtcaatcataatgtatcaacttttggttatactcaagttgataacaaacaatctgcatacatatatttatatacattaagttatatttttatttttatttttatttatatatacttggttaatatcactcagatttgtaggattggttctggttgtaaccggaggaggaacctattgggttctgaggtcttcggacctctcctgttgccaccgtgagccaataagaccgaaggtccgacccttcgctctcatcctcctactgcatgtgacccatctagatctcgagt

SEQ ID NO: 76701 - DNA, 2855 bp, Cannabis sativa
tattgaacaaggatgatgataaaattcaattaaaagtaagacttttttaggttgaccaataatataccttaatatactctcaattaattccagcctttttattatcattaattaaataattgatcttcattattttttagtattgttagaatggttatcagttactagttagaaaaagttagatagtgctaattgggctttagagtagctcggcagagcgattagttgcctataaattacacttataacccctagtacattgtaactaagtttgtatcatttattattaaagtgagagttaattgaaaaacagttctaagttatagaaaaagaagtgaggcttgtaactctctattcttcttgattaatagcagtgtgactctgtaacacttggtgattaataaagacattaatgattgttgtttggtgttcctctctctctctctctcttgtttcttgtttaattctcttaataattctttgtatttctctcggattgtttgtgttcttgagatgatgttggtattataggtgaacttggcattgagtgtcttgattgattcacaacaaattgggttataagttactagttacagaaagttagatagtgtcaactggatattagagtagctcggcaaaagggttagttatttatgttaggattgccaaagcctaaaaaatgattaatctaattaatcttttttctccatcaacaccgtagaattgtgtggtagaagatatggaagatcaaggtgtgagttttatgtcattgttctaaggacacaacatacgaaaagattcgaggataccctgataggcttcaagagtaatattatattttcatatttttacttttacatttaatatatatatatggtgatcttggaaatattgtatattgataatcagtttaatcctatgcttacttgatttagtaccataatacccaatttattcccctgttaaaaggattttatcctcaaaatctaatcctaacaagtctagttagtgagtcctcatattgtactctaaatccaaggtagcttcctctaccttgttgtttctcaagaatactttgaccaatgctacgatcttgtttcaaaggactttgtctttcttattgagggtctgcactggttacctctcataagataagtctgattaaagttctagaccttcataacttaggatatgagtcaagtctgaaaatacttttcttaacattgaaacatggaatatgttgtttattgccgacaatgctagtggcaaagctaaacgataagctactaatctgactttattgagaatctcgaaaggccatgtaaatctagggcatagcttgccatttctcctgaagtgttttccccctacttggaattttatgtttccgcacttctgatctatataactcttctgcctacttgaaaagcaagaattttgacattgatcttctctatagcctccctagtctgctaaattaactctagacctaagtattcctttgtcagtttcatcctaatgaattggagaactataattctgaccatacaacatcttatagggagccatctttataatactctgataattgttattgcagggaaattctaccaaaggtagatacttactccacaaaccttcaaaatccataacacaagcttgtagcatctcttccaatattcaaattgtcctttcacaacctgtcttagagtggaaagttgcactaaactttaactttgtacccatgatcctttggagactttctcaaaacttaaaggtaaactttggatccctacccgaagtaatagactttagattcctatagtgtacctcttttacatacaattatatgtactgatctacttcatacattattttcactagtagaaattgtgttgattaagtaaattgatccataatcactcatatggaattgtacatttttgttgttctaggcagaccaaccacagatatccattgtagcatccccccacttccactcgagaagtgtcaaaagttgcaataagtctacaggtctttattgttcaatcttgatctgttgacaaattaagcatttggatacataatctaccacatccttcttcataacgcactaccactaatagggtttcacacattggtgtatcttggtcgtaataggtaagagatttctctaggatttctcttccaagttcaacactgcttagagcgcaaactcaagtcttatatggtaacatcccgttgctgacatagagaaatctttagactggttagttatgacctcttctcgattttcttacttattcaggattcaccaattgagcgcacttctgattcttgctaacaaatttgattgaagtgtcaagttattgagtttaccaaccacaaccttaatacttgacttgaccatactcagaagagatcttggttgtactaaaaacctcctcaagatctttcttggttagggcatccgctactatattggccttcctggggtgataaagaattttgcagtcgcaaaacttgtctaactctaaccaccctctcagtctcatgtttaaatctttctgagtaaggaaatatttgagactcttgtggtcagtatagatttcacacttttctccatagagatagtgctgctaaatcttcagtgcaaaaccactgcaacaagttctaggtcatgagttgggtaacattgctcatactcctttaactaatgagaagcataggcgatgactttgtcagcttgcatcaaagcacaccccagggtattatcaacattttgcagaatgtttttttaagatttgaatgccagtgacaaaattgactaagaagaaccaacggtttgtatggtc

SEQ ID NO: 76702 - DNA, 969 bp, Cannabis sativa
  modified_base (839)..(841): a, c, t, g, unknown or other
caggggaacggcattccaaaagttgccgaaatggctttccttcgccgtgttattcaagtttaactcttcaaatcgagccttgatttttgcaaaagtctcggtgcctctgtaactaacgcggccagtaaaatgctcggatggtggaattatgagtcttggagccatctgaaaaaataaaaaccaaaaaaatgttaatgtcaaaaaatttaagaaaggtcgacataacatcgacatcatgtcaatattcggtcgacattatcaaacatttagtgaccacctaattggtcgacaaaacgtcgatatactatcgacatgatatcgacattatcataaaagcagtaacaaaacaaatttgtcgatatcatgtcgacaaactatcaacattctgtcgacatgcaagaaaaataaatcaatatttgcatcaaaccaacaacatcgacaaaaggtcgacataatgtcgacatgatgtcgacattataaaacttaactaccataagagtcaactacaacttattatcgacaacctatcgacatacagtcgacaaattatcgacattataacacttaactaccataagaatcaactacaacttatttttgacaacctatcgacatacagtcgacaaattgtcgacattgcatgtcaaaactacataacaacaaacaaggtgaaaccatcgacaaattgtcgacatgatatcgacaacctgtcgacaacaatgttcaaacacacaaacagaaaaccacatatatcgatatcctatcgatatcctatcgacatttcatcgataacgctgtaaaaacacacaaacaccattgaaacatatccaacatatacnnnctaccacaagaaagagcacaaaatctacaaaagttccacaaatctcaacaacatgcaataattgacatccaaatctattaaaaaattaatttttttttttcaaaataaaaaaacttacctttgactga

SEQ ID NO: 76703 - DNA, 608 bp, Cannabis sativa
tgtagctttaatctttaggctatatttgtggggtttttccatttagcagctttcgtgtgagttttaagttttttactcttttgctctcagtatgattggccgacagttagtcgtttctaagtgagatttgtacagttttatttccacctgactttgttgatcgtcatgaaattttacctttttctaaaaaaaaaaaaaaaaaaatggatgctttaatttatctcatacctatataattttagaatcatcacacttgaccttctttagggtacaaatacaaataataatagtactaataagagtatgatattttaaatggtattagctattaatatctttcttctataattgtcttatttgctttgatagtaatataaaatcaaattcctttgttgtttaaaaataacttagaaagcaagtcattttgtcaaaaatcaaaatacccaaattaaagaaatcgtattaattgcataatcttatggagtgttattttaactaaagttctttatacttttcaaaaagattctactgaacaaaattattgtgattgatattctaatatgtagaatttatgttgtaaggcattgatactaatagattaggagtag

SEQ ID NO: 76704 - DNA, 733 bp, Cannabis sativa
agagagagagagagagagagactccactgatctagtggtccgacaccttgcatgggagcgaggcttcctcttgtttcgtgttcttttgagactttatttctcccctcgaaatgtaaggtgaacttatttattttctcaactttcattttttattgtgattttgaaatttttatttggaaaatttttgcgttaacaaaaggttaattgattcttaactaaatttattttttaataatattatgataaattaattatttattttgtcatttttaattttcattaaataaataatttgttttgtcattcttgtaataaatttactataagtaaatttatatttatatatttatatgaaagaaagcataaaaatattaaagtggtattctaaattttttagctacaagagttttacattttttatatataaaaaaaagttaattgattctttattattatttttgtaataatcccattattagttttgtcatttttatttgtgttgaaattaggattttttttttccttttttgataattgattaaatcaatcatacctcttagttataatttttaaattcatctaatctttttaaattcatctaatatcaatagtttataattatacatattttattatatggagaaagttttaatggttacatcaaatatgtaactatcatggttacatttatttttaaccattagatcacagttgaatagttgtgatatttttt

SEQ ID NO: 76705 - DNA, 2047 bp, Cannabis sativa
ttacatataagacttactgtttgtgtatcacatcttgctctgaccgaaaccctagctttcttcaagggggaggagacatgtgaagccccatcctcattattacgatcttgtcctaattcacttcgcacagtcttaaggactttactgggtggccacatgatctagtgggtttggcggttattgccttctcctcctccttatgcttattaatttcctctaaatcatcatcatcatcatcacaactagtcgacttcttcttcataagatgatcatctgtgggaccattagatccagtacataaccctagagcaagtttcccattactatgaagcccttcctcatcatggtgatggtcattattgcctttgctgctgctagtagtagtacttaattatactcatcgtctcatgattgctattaatgtaagtactagtacttgaggttctcccaaggctaagagaaagttgatcttgaggttctttattattcataactgcaacttttatgtcatgatcattaatactcttatccttattagctacttcttggtttcgaagaatctcaaagaactctgtttggagagactgataatcctttaagacacgcgatagtagcagcttaagcctttcattttcttctttcacttcactcatttccgctttagctaatttgatcagcttttcataatcttcatcattattctcctatatatacaataatatatataaagatcataaattaaatatgttaacaaatacattaattaataattaatttgacaaatttaggatgaaagggcccacacctgatgatcatctttatgttcagagggcgagctatgatctgcattatttgtgtgcgtgagtgatggacagtcatttgtaatatgatcagtatttaatgccaaatgttcctgcacatacatgtatgtcaccaatataattacaccaatactattacttcaattcttaattcaatgtatgtacggcgactaatatatatatatatatgtgaaaatataattgaataagatatatatgttaatcgtattattcaaagcttcgaataaataaatcttaattgtaatccgtaattaacaggttcaaattgaactaattaattagtctgccatatgaatttacaaccaataatcatctattaataaattcatattttttaaaatgattttcacatactcaagggtcgcactttttttttgggggggattttttttacaggttttttcttgtatttttttaaaaaataatggctgcttttatttaacagcaatatgaaaacagtaaaactactgtccctattttttttttttttttaaaaaaaatcaaaatcaaaatcaaaatccatacaaatattaaacatactgtagtgacatattttttgtaactatttttggtatttataaaatattttttgaaaaaaaattatatattatatattatatatatatgtatatgtatatatattggagttatctagacggaaatatatacacatctcactagctttgagtatgtcgatccctgtcctacagatgtgcttctctatcattggccaattacatattcatgagtcgtacgtttactagttctgaatgataaataatattaattctagcaagcttatgatcatgtaaaggtttggatgggatcttacagtttatatagttattacaatatattatatatagtatagatttatatttctctccctcaaaatatatatatgtgttctttaaatatgtatctctctttcttagttttcttttattttactgtatattagtttgtatctcatacaccgtgtttgtgatctttataaataccattgaatttgaaattaataaaataaagttatttataaactctaatttgttttaggattaattaagcttaaattcacttctaaaattaatttacattcgatgtacactcttttatatgtattagatttagagaaaagagatgaacaagaatgaactctgttattattattgtacaagagttatagaaagagaacaagaaagagc

SEQ ID NO: 76706 - DNA, 776 bp, Cannabis sativa
aaattgaaagaaaaaaattaattagatgtttgcaagtgatggatagtttattattatttcctactattaacaaactttatttgacaaaaactagaaaaataaaatatatattataaaaaattatatatgtatatatatataatgttgagagataagatattgaaatactatgtaaaatttctatatataattgaaaaaaaaaaaaagaacatttcttcatataattaaaaattgactcaaatgtttaattaattaattttttttaaattaattttggtcaattttcgatgcagccagatatgatgatgacaatgtgtttaactacactgctaactataagtgagaagcggtgataatattagctttgaatgtagtgacgactacaagtaaaacacagtaattagaatgacctttataatggagaaagtaaataaaatacgatgttgacaacgacttaactttttatcattcaatttaaatagctaaaaataaatttttgtattaacatacataaaataaaaagttatgtgagagttaactaaatagatatttattcatatatttatgataaataatctaaattttatagtatatatcagctaaaaatatttaaataatttataaacaattaatatagatgagaaataaaaaaatcattttatttttgtaatatttactctatgaaccgttttgtatttaattttaaatattctcattaccccaaaattaaattaaatattcttaataaattggatattttaacattttaaatttaa

SEQ ID NO: 76707 - DNA, 714 bp, Cannabis sativa
ctgtgccctatccgggtccgggttcagtttcatttttttgaacccgcgaaaccctcgaactcgaaacccagtttacctacctgatgttcagccatattagtggtttcagatcaccttagtttggcaaattaaaagatctttagtcttatgaaggttggagagatgccttgggatgaagaggatcttaaagacatctttgtggagcaggatgttaagctcttaggagagacttcttgggatgaagatgatctttgagacatctggcaatggataggtaaaaactctggtgctaattcggttaagagtgctcatcaacttattcaggagcttaaaggagaatcatctaaagttggtaactcaattttttggagagagttgcgagaattgagagttcctcctaaagttaaggatttggttaggatggctgcttccaattgtcttcctactccagttcaattatgtgggaaacatgtccctcttccctttcatttgtgatgaaggtgctttcgagttgttgtgtctgtttcacattgtcttgcagggtgttcttttgcttttgcatgctggagggtggttggtatttcgatagtggagattggagacaattcttttggaggatggctgttggaaattttctcaatacactttgagagaataggaggattacagctaaatacacaaaatacataaaagtattacaataatattacattg

SEQ ID NO: 76708 - DNA, 1108 bp, Cannabis sativa
atgtctaagggatgcaatatatagaataaaattaggagaataatcactcaaaattaaagcttatagaccaccttatatatcatcaaaaatagaagcaaccacaaagtatgacttgagtaaaatatgaacgaaaattaatacaacatggaatagtcggagaccaacaaaccaaaatattagtagctatcaagttttaatcctataataaaaatttgataatttgataaatactataaaataatggtacttattaggaacagagtaatgagagaaaagaaagctttattgaattgcaatatatgttctatacaggagggagagatacatgtatttataggacaaaagccatgagaagaaaaaataacagaaaaaaaataacggaaaaaccgaactaattccctaactaactctaataggcccttcaaggtggagtgtagaagattcaaacacccatcttggaaagaatttctttgaactgagtagggaaaagtggctttgtaatgatgtctgctaggttggcttttgaaggaacattattcatttggagaacaccattagtgactttttctcggacaatgtggcaatctatctcaacgtgttttgttctttcatgatatactggatttttagagctatgtatagcagtgttgttgtcacagtatagagttgaaggtagtttgatgttcacgttgaaatctcttatgattgaagtgagccaagtgagttcacaaatggcatgcgccattgttcgatactctgcttctgctgaggatagtgatactatttgttgtttctttgacttccaggagatgagcgaacggcctaggaagacatagtagcctgttattgatcgtcttgtgtcgagacatgctccccaatctatatctgcaaaggcttggagttgtatcgaggctggtgaagaagcatagaagaaaaggccctgtcttggagaattttttaggtagtgcagtattctagttgcaacttgcaagtgtggtactcgagggcatcaaaaatattgactgagtttatttacagcaaaactgatatcaggccatgtgattgtgaggtaaaggaatttccatatgagactcctatattgtgtggg

SEQ ID NO: 76709 - DNA, 1685 bp, Cannabis sativa
ttaaattcaacaatctcaatagttcagaggcatttttaacgaccttaaaagtgtagggggcatgatttaatacatgtcaaaatttaggggcgaaaatcctaattagctttgattaattacaggaatctcttcattaataaatgaaataaaataatgcaatcctacttctatttcaccttcttctgaactagtcttctttctctaaaccactcaatccaatgattcaaaatccataatatgcttacaaaaatagcagtgcttataacaaccatccaagaaatccatgcccattttggagttgaagtatcagcagccccgcttagataaaaaaccaccatcttcaacacaaacaaaggtccaagaactaccctgaaaacagtatagaaaacataaaaacgaggagaaagaaactcgtacagttttaaagctgcaggtgcataggccttctttaaacaagccaggctccacacattttggcaaagactggtggcctcagcaagaacaaggagtaccagaagagctgaggcaccatggtgaaccacgaaacgacatgtcatgaacacataaagggtggccaagtgatgacttatgaagagaatatcagttgggaagaagactatgtagtgaataaggtcaactaagaagtaagctatgctatagtcaagcacaatgttttgtgaattggtgtttggagaggcaaaagaagaaagtggcatatgggatttggttagtgcatttagagctaataaaacaactggtgttccatgagccagagagattacacagcttgttgcttctgcaatattttttggaccccagttgtggcaaaggacaaagtaagcaattagatatatgagtagaaaaatggtgaagaatatggctaatgtgggggtgaatagatttagtgtctccatttagaaactcaactcaataactgagaggtaagaggttcggtgcttttatagtttgaagatttttgggatattgagtatagagggagaagagtaggaaactgatcaaagattcaaggttatcatttttggatttggagtgaaagaatgagatgtttgaggttgtcacgtatggaaaacataccttctaaattgttataattactttccaaaaaaaaataaaatgctataattaattactaatgtgtgaaatgtttgactaatttagaattattattggattggagtcagaaaaatcagaaccgtggaaggtgatattagattagatagaagttgaattggataacttggtcatatgatgacacgttattcttctgtgttatcttaatgggatattcgaatacttttatcttaaatggtttggtatttgattctttaaggaaaggttttatgcttgcaagagaagaatcattccatctccatctcaaataccgttgttgctgttgttgagttggtcattgatttgttttctaaaagctctaaatatttaggtggcgtttggttggagataataaaatggaataaaaaggaaataattttcattctattcttttgtttggttgcattttaaagtattagaatgacattctaatggaatatcctttccaccattttggtgaaaagactatttgactttaaaatgacattccaatcggtttgagcggtttatcctatatattttctaactcaatctaaagttcgggttgctaaaat

SEQ ID NO: 76710 - DNA, 644 bp, Cannabis sativa
gccattgctggatcaccaattccaaatcaagattttattcttcagctgctaaatggttttggactagagttcgactctgtggttttgggcatcaccgtgcgcagtgattctcttactcctgaggaagtacaggctcttcttctttcacatgaaagttgcctagagcatcataactccgttactgatctcaccatgaagctacaacccaatgtggccttctcaggatcaagaactaacccctacagaccactacaaggcttcaagattggcaatcgaggaggcttttgtggaagtaatcagaacaataggctccagtgccaattgtgcctacgatttggccacactgcccctgtgtgccattatcgctttgacaagaactgggctcctcctaaaccaggcacaaccagtcagcccaccaacacatctaatccttctcctcgtgctcttgtcactgaacatgagtttgactacgatcctcaagcttatgctacatctttcttgcttgattttggagatgatttaggctggtttgtggacactggtgctaccaaccacattacttatggtacagacaatttagacaatgttgttccttcacaggcccagagggtgtggttgtaggagacggtaagaaattgtcaatt

SEQ ID NO: 76711 - DNA, 3317 bp, Cannabis sativa
atacctttaccactgctcgaatctaaatgccaccaaaacttagccataagccgctctaactccttacaagtgtctacaggcaagagaaatacattcatagcgtaatttgccaatgctattttaataactggtttgagttattttatgttatttatatttaattataaccggttctgtaacataatagaaccggttctattttaattatcactggtttgagttattttatgtcatttatacttaattataatcggttctgtaacataatagaaccagttatatttttagttatatttgagacattttattctggtgacttttccagtgactttgtcggcgactgtgactttttcgacgacagtgatttttctggcgacgttgatttttccagagacttttcggtgtcagtgactttttcggcgacttttccagtgccagttacttttccagcaaaatttattgttgttttactaatataatatttttttttttacaaaaatatggtataataaaaacccatataaatgtaaaaaaaaaataataaaaaaatttatccctataatgttatttatttatactataaaaaagtaaattataccctccatttctatatgaaaatataaaatataagtatcttatgaatactacacactgatagaaaaaggattattaatttatgaaagttttaaggtaagctttaagataatggtaatgaggtcatgagatttggttaaagaggtacttctcattgaacacatgtgactaacataataatgatttgattaattcatagcatactttagtgtttttagtaaaagattagagtatattaataaatatgaagaagagtcggtgcatattgtttcttgatcattagtttaataataatttagatgagatgatgatgatgatttaaaggacaaggaatttatatatatgtatatacatagtacttacgtggattgtagaaaaaaattaaagtttttgcggttgagagagctaggtagctactaaaagagaagtcttcctaatcatgatgatgcctttggctttgtagattaatataatgaagtgaaggtaaccaacatgcatgcatgattccaattctcaacacaattacaataataaataagtttagcaagaaagttaaatttacctttatatattttatagaatgtggaatgatgtcactaggtgcaattatgcatatgttatgtgactaaaaatattagtcacaaaaattgaaattttattgtcaactaactagctagtgttttagtactgtgaaaataaagtatataattaagggctcatttaatacatcgtgatatattgtagtgtattgcattatattgtattgtatagtagtgtggtgtattatattagtattatttaataaaatattatatttaatatttacttgtacttataggttgtgtaaaattataaattctttacaataaattcgatcctaaccccgaccacaacctggactcggacccgaaataaagatctcgactcggatccgaatccgaacccagactccagacccgaaacatgcctcggactcaaacacgaaacaggacctggactccgaactcgaacttgaatccccaaaccccagacctgaagtactgggacctgaacccgaaccgcgggttcggggtctgggttcaagtttggtgttcagggccggggccggggttcgagtccaggatccgagttcggggtctaggtccggggtccaggtctaagtccattcattattttggaagaaaatagtgtgacatcgtaagcagatgttttataaactttcttgtccaatgatatactatctttagcaatttcttaatggaaaagctaagaggaaatataaagataaattccgattaaaataagaatccaacgatgtcccgattaggtgagagttaaagttatccttattttataagttctccattatttcaacattataaacgctagtctaagttgtcatctattggggatgagtcgactagattttgcatttacaaacacttatttgtcgagatctaacacttttagaatgtctaatggatgaccatctattggggatgaatcccataaaaaacaatcaattaagttagaccagcaatggagttcgaaattgatactatataattaatatataacagaagtcaatgatggttcactataaattcatacacactttgcgaattttttttaaacatttagcaatcaatgaagatatgaaaaaatacagaacaaacatatctcaaataatttccaaagttttggaccaaatgctatacaatgtctctagtaaatgagaatcaaagatacattagttaaatagagtagtcaacttatctaaaatgaatatattttagcaatcttttattcgatcaaataagaattgaacattattccggtaattaagcaagagtcaagattattcatattttatgagcttctactattgattcatatatataacccaatctacgtagtcattcaaaggaatggagctcttagaatttaacatcataaattacttatcttttgaaatcttacgggtttagattgcctaacagatgattacccgttgggggaccatgtctagcgtcttgaggtcccattaaaagcaacaaccaaccaacaatgaagatcgaatgtcttataattaaatctcattattttaaaatatattttttattttaaatatttaattaatttaatctgttttatctatatatttatttaattaaaatattaatttagataaactaatataaattttaattaaatatttattaagatatttagttaggttaatctaaaaatattttaaaaataattcccaatatacaccttatcgagtctttattccctttgtagaatagaattaggctgtcggtaaaacaaagattgatgagtttcaagcttttacacattgggtgataaaaaaagctttgtcacaagctttccatttaagagtccaagttagatattccatgacaagcacaaagagaagggaagacataagattctcttgtcttaggtcttttgctcattcaaattgaccttacactttcacattcaccactagaaaatagcaagatcctcaaacacaaaccaatatccaatccacaaataatctcgagaaccaataggtatttaatgatttgtcaaaaaaaattcaatcaattgtgtcataggccttgcttaaatctatgttcattaaacaactaggatagatttgttttcgatgataacctttgattaaaacttgaaggatcaatatattgtgagtgagg

SEQ ID NO: 76712 - DNA, 1056 bp, Cannabis sativa
ttaccaatttgaaccttactccccgaagctgcagcattagatggctgtgaaagtgattgcctaagagaattagacaatgtcgaacttgggcttggtttctttgatattggatttcgattttgattttgttcttggtcttgatttttagccacgaagatcttctcagttttgctgaaacccttggaaatcccaacaataaaataaaaattaataattaatggaattgccacgaaaatcattagatgtgtaatacgtgcatattgctgtcattctctacaagatagaaaaataaaattgcaagtcaagaaatattccttaagggtcctatctccaacaataaccgataacttagtgttctccaaaagaagatatgcaagtatgcaagattcaagcgaaaagtgactactacctacaatcgatacaaatatgatttaagaaaaagaattactttgatgttagaaattgtgatctatttcacaaaatctatgaagttagacaaaatttcatatcacatttaattacttcaatcaaaaggtaatgacatcattgatattaaaattgttattcatattatatatcaatcaaaataattaacttttattatgaaataacaacatttttgtactatacttcagttttcaatcttctgcaacagaatcaaggagtggataatagacacagacaaccaacgaccaaaaaacgtcgacttcagatcggtatattcatataaaaaaattggtattgttagttaatattcatctttctaaattttcgactactaacctgctttatttttttaaaataataattgtccagcaaaacatggagaagtaacaagagtgtgcccctctctcaatgaagacacacatacgtccgtaaattgtccattaaatgccaactcacaaaaaggtaattcttcccaaaaattatatatctacacacttgataataagttattatttcacccttatctaactattttaatatttactaaatagttattaatccatataatgatgatgacgcaaatgatggaattgacaaccaagtccttca

SEQ ID NO: 76713 - DNA, 518 bp, Cannabis sativa
tgtaaatttgtgtggtgcaagtaaaatttctcaagttaattatatgagagatgacgattttaaaccaccatgcattgtcacgttggatttgtatcaccatgtcaggttgttttgactattaatactgagggcccgtttggtacgcatgattagactagattaaacgtgctaatttatctaatctagtgtttgagcatgttggaggttttgataactaatccagctaatcccatttgtctgggattatttatcccaatagggtgcgatgaataatcccatgcaggtgagattttttttttattgtttttaatttttttttttattttgttaatatattttaaatttattaagaatttaaatgaaagaattattacaaatttatttataaatttttttatcaaaaatttattaaagttattgaaaatgtataattgaattattatacataagctttcaaaatttaaaataatattaattaaacaatagttacttaaattgattctaagagaaacaatatg

SEQ ID NO: 76714 - DNA, 526 bp, Cannabis sativa
catgttgcagatgtgagtgagctgttggggagggaggagacaggttcttccgaagcaagtttataaccacttttaactgtgtagagaccagtagaagtatagtgccacaggaggacatcatcacatggaaataaactcaaaggaattgaaagaattctgtcgacatcaggaggagagaaaaactgttggagctttggaacatcccagagtctcgaatgagtaataaaatcagcaactttaacatcatgatcattactcaaaaagagcagaggtttaaaattggaagacccaggaatccaaggttgagagttacagcaaacatcagctccagagcctattctccatcttaatcccttaagaagtaattgtttaccccaaacaattgatttccaagtgagggatggctgtgtaccagcagtagccataaaaaaaagaaccatttgaaaaatatctgctctttaggactctagcaaggagtgaagaaggattttcaagaattcaacaagcttgtttggctaaaagggct

SEQ ID NO: 76715 - DNA, 1258 bp, Cannabis sativa
caaaacaaaccatagcaaggctttattctatttctcaaaaatattcaaaaatttatcttattttcactgctttgagtataatttaagtgaccctcttatccaatattaggaaggggaaaaaatgataattccaaatatgaattacagttattttagtttttttgcaatgatgaattacagttatttgatcttatgagtttagtattgagagtttcccttgaaaaactcttccttccctcttaacaaaatgagagaaagacgatggcttaaagctttattaatcaatttagaaaatttccatttgatgtaggcttgttccaaactgtaggcttagattatcttcaaagaactcaatcaagatgactctattcttttttgaaaaacttcttggcctgtcatcaaaacaaaaacataaacataagaataaatatctataagaaaataaaagattgtcatttcatttttcggtgttccataccaactggttccacatttaagttcagcatagtcatatgatgatgactgatgcaaattttcattgcctggtctaattaattaaaatgcaatatgatgggcagaaccacatcttactcatacctgttctagagttaggaacataacgacattccaggttcccagccgtccaaaatttggcaagaaacccttgtaaaaagcaagaggaccctgcagacaacaaatgcttcaagttcaagacgattatcatataaggatttcagtcataatttcaacaaagaagacgagtttattcgattcgatccactgaaattgcttgagtcaacatcatgaccacattactccaaatgttcaatgtgtaaagctcaatgatggtaagaagtgaaaaagacaaatgttaagaaaaagtgaaaaagatggcatacatcattcttcaaagttctgatgaaacagtcaagtgtgcttttgtaagaaggatctcccatcattctcgacttaacctgaaaagagtacagaataattaattgataaaaactaatttagtgtacaaacctattgaaacaagaatgtaactaatatgtacaaacaagtggaccgtaggcatgtgggactattattatggattgagatcaagcatttgcatagtatatctttgtctgactggatcctaaaggatcatcacaatcatgtatgttttttactataataatgtggatattagtttataattgtacagactatagctatttttttgttgaaaaagagaaagaggccacttgtctta

SEQ ID NO: 76716 - DNA, 2401 bp, Cannabis sativa
gaactattcatttttcaagttaaatttagagccttcatttttgccttatccgaaatccaattacctctagtgaatgaagaaagctagttatggaaattgttgaaatgagtttttcatttcatttcttactttaataaggtatgaactagtctatcatgtagagcaagacgatcagtaacttttacaaaatacttgttgttataatctcaagtcggttatatttccatagatatcgaaatccatggattttcgattctttatggaaaaagatatattgcttaaagtaaattggtatctcgaaaatttgaactttaatttcttggagccctcatttttgcctaatttgaaatccaattacctctagtggaaaattttttgagctaaatttgatgaacttgtaattcttgatcctcaattgtcttaattttgagctaagggaggaaagtttcatgtttatgaattgattctcgagatggttagttgacatcgaatgccttcgagtgtctatttcgacccgaagaactgttccttttttcgggtttgtttggtttttacaagcaaaattggaaattagccttatatcgtttgtgttaaagttctttatgcaaatgtttgtgtttgattatttcccatatatttggacttttagacaacacttcttcatagcttttttaggtaagaattaagtaaatggattcatctattgattattttcctctagtggggtcttttaatatccattaaattttacttatgtatatactaattatcacttaagaaagtgaaaaagccaaagattataacatgaatcaccacaaaaatatcaaattattggctttacatttgtttagtattaatttgcattattttctttccaaacaaatcattctatcaaggaaatccaagatcacattagcattaattatggataattatgtttatcaagtttgtgtttttaaattgtgactaatgacccactttattattagtgctctaattagtttggcataatttagttagtagatgaaataaataaatggctcattagtggaaatctacatacatagctcattattgtgtcaatctccaaataatgcatcttttagatcattttggtgcttattttattgtgttgtctaatccaattcttctcttaacccttgtagatgacattttactcaagtggaatatcggtgttgatgcccggagatgaaattccgacgtttattgctcaaccggctcccatggtacggtgtccacccgaacgcatttcatggccgcaacatcatcaagcttcgtttccaaaccctccctcgagctcgtctagggtacaagttgaaaaccaaacgtgacaagtcctatagtttcttttttttttttatcgcgattttctcgaaattgaatcatgcttagagctttttgatttttgtatatatcattcatatgtattagccaggctaaatgcactttgtttttgaccatgttaatttcatcatggttctttttagatgattcccaaattttgattttgtgatggattgtatgattttctccatcataatgatcaatctttcaatgtaaaaaaagaaaaaggaaaatgtaattaagctggcttattgtggtattagagagaggtagttccaattttaaaattttgtatttatttatttattaatttttttttctgcaataacaattttattgaaaagagagtaaatactatttttaattttatgttttacaaaaattataaatttaatataatccacttgaacataatttctaacatgaacatgtataaaagatgtaattaattttattataatatttttaaattaaattattataaagttttattgtaataaaaaattagttgaagattttatttttaataatttaaaaaatatagagtttattttattatttaataaattatacgatccaatccataatttttataaactaagtaatcaaatagtatttacacttacaaaaaaaataattataatccttgagaaaagaagtgttatcattctaatcatcttataaacattaacactgtttaaccatatacaaacaaaagcccaatttgtagtttggattaaagcccaattgtaagtgcccaatttataggtaggattgagcccaattattatgttataaattcattggtctcttagttgggtaattttcatttttatggttttttttggcaaagttcacaaaattatgttcttgtgggaaaattactccttatactaatttttttcatattttcaattctttttaacttttcctataaaataactaattcaaaaaaaaaaaaaaattgcaatggaaggttaacaatctcatggtgccaggagaaagaagttgagatttggaagtgatctccgatatc

SEQ ID NO: 76717 - DNA, 823 bp, Cannabis sativa
caaatcttccctatgataaagagctaagttcacaactaaaatcgagtcaaaagagaaatattgtacataactttgctgaaattctgagataaagaaaaaaaaaaaaaaaagcaaaacaatgaacaagtagaaaatttcgtactaatgaaaaggatcgtgaataagattaaagcagtaccatatgcttgtcgtaaaaggggaagccctgcatttggcgaagtgcattggtggcggaagacacgtcttcgaaaaccacccaagcttggcctttgtgcttcagcgtcttgaaagctaaaacgtccaatatcttgccgaattgagagaacactgccttaagcgacttcttcaactctgtaaccaaataatgctcacaaaattttggtccccaaatctaattcaaattctcacaacaaggaaaaattcaaaaacaaaaacaattgagtaccgtcgagcttgattttctcgttgagattgttgatgtagatggtcacgttgggaggagcatcagttcctatgttgttttctgccatttttcttcttcttcttcttcttcctccgtggctacaattctagtttcgagaactatctgagcttccttctgcaatcaatcaaagagggccttagcttactacaaggaagggtccagggtttatgccagattttgtcaaattagacaaacgggtcacaatttggggaaagggaagagccctaattttgattttgcattctatgagtatgactatattgactatgataagcctggagctggattgtaattcttatgggcctgtctattgaatggcccaattacacaataggaaaa

SEQ ID NO: 76718 - DNA, 1102 bp, Cannabis sativa
tcaataagtgtagttattgaactagaatcatacatgaagtcctagaacatagcaagaagcaagaagagttatcatttcataatctgaatgctgaagagacacaccaaattggccaagaaactaaggaaccataaagaatgtgagcaacaacaacaactaaaataaacaaaactataagtcggacgttcccgaaagttttaaacatgcaattaatctattaaaacatccacaactttggatagaaagaggtaaaaaatagtgttgttactagtcaaagaacagtacaatcactaaaacaaaaaaactaactcgttcatcttctttagtctctacttgtctaattttattcaatataaaattcttatcaacaatgatctaaacacacctgctacacttctggtaaaaccgctgctcgtgacctccaatagtaacttttggagtctttgagtgagtttcgcaaactttgtggcgtctatgatagtcccaacatttagtaaggtctgaattgcagccatccacaaggcaagatgggacgtggattccattgcttgatgatggccctcttgtcctcttcaaaggaattgaggaagaagatgactcccaatctgaagccccaagctctttccacttgaaattcgatccatcatccataattttctaaagaaatctcctctagtagtaacttttttccttactatctagtcttaagataccacaaccagcaaccaaaacaatgttggaaaatgccttatttctccaactcatagactttctcaaatactcttaataatctctttcctgaattttgttgaacacttaaacatgacactcttaaaaaaaaagacaaaaataactacaaaatacaaatgggattgggaagtagtgaatgtttttaaattgtaatggaatttaaagctaaaattattttagttattcaagtattttagctgctcaatcatatggtatagtaccaatcaaaataaatttaacaaaactgccacaaacaacatatataaaaacaataacacaatgacttgcacataaatttgatctatccaaaacacatattattcttagtcaaaattaagtagagatatacctt

SEQ ID NO: 76719 - DNA, 554 bp, Cannabis sativa
atcatccatgactctacttgacgaagccatctataccaaaaaacaacagaaccgagaacaataatcacaacacacaataatcttctcaatacgcaacccaagcagaccccgttgtaataaccagtcaagttttttatttgttgaagaattatttatggctaaaaagtatttaatgtattaataatattgggtgtcataacccaaaaactgggtagtgtgacgtgtacaagtcagggaaaaatcaaacacaaaattacaagtttacaactagcgttgggatttagttgcaactaccatagtaatgtggttaatgattcatcaaagaattcttaatgtaatgtctatacatagtaattttaatataagaaatttgtttacaatgaatttgttataaactcctcttcaaccattttttttatttaattatctctatattctttaaaatttacttattatgatttcattaaaaattgtacaacttttactttctagggctattttagtattttgattttgttttttcagccaaaggaatataggtgggttctctctcc

SEQ ID NO: 76720 - DNA, 2139 bp, Cannabis sativa
aaagagttttgacaataattctttatttcattccatattaatttttattagatatataatctcttagttgttccaaattttaatctttgcaagtttttctatcttgttttcaactttactatatgtaaaaattaattcatctttgcattctagtttggatttttttttttatttctttattttttgtaaaatgacataattaatttatattacatattcttgtgttattgactaatggaaaatcaatttcattggcgaaaattgacatagaatgctttctattcagaaattttattagacaaatcataatgtcatataaaaacataatttttaaggaaaagtgtcatcaaaagtggcgctaacatgattattcacgtgcttatgtatataatacacataaaactttcgtgttaatttatagtgttacacccacgttattaaataacaataaaaccaaaataaataaacattattatagaaactctctaaatacataaatattatttattctgtaaaaattaaaaagtgatgataaactgtgggattggcccccacttggatgaaggaccgctagggttacataggctttcactcaaatacatataatggtgaaattcaccatcattggtttataaaataataatgaatattaaacatttttttaaaggtaaaccctctcctatttttgctagctaggatatataggaaattaaattactccaactaatcattcttccctaatagtaatggtatataaccaagaaaaaaagaaaagcaagtactctccttatcctttgggagagggctaaaattaaaattaacctacccttattaagggtaatacactttttaacaaacaatcacgtgaaccccgcaaattaatggccactaattattgaattctaattatttattaacaggtacggattccggccgctttgtcccgccgccgtacaatatgccctttgtccatttgccacgttaaattatatatactagtttaatatatatatatatattaattgatattattaggggcccgagaagaggaaccatttctttaatttttgttaattaatattactttgtttattatatacgatcgtctgaagaaaaagaaaaacagtactttaaatatatcgaatatataatgaggtaagtggcctttgaataggtgattgtattactcggtgtccctttgttgtggttccttattaattcacactatatgccaaatctataatattattattattattattagtgattttaatccccttgttctttgggaagcattggattcatttattcatgttctatatataaacaaataaactatgtttataatcattgagattattaataccacaccgttttagacctgtattacatttatatatgtagctgtttttccagtgaaaatagtatataggtaggcatatatatttttgtttcgtgtcaaattaattaaaataattattatcctcatcatacaatttatttaacccgtaaattacatttcttaaatttatatatgcctttcaaaaaaaataacctctcataaaatatatttatatataggttattaatttaacctctcataaaatcaattatacataataataaatgtatataattgtttctccgagtgtattattgctatagttgaaaatatatattaattaaaaaatctataaaataaaataccggcttgaaattatttattttaatgacttttttttttttttacttaaaagaaatcaaaggcgttttgaaataattttttcagttttaattcgtatcttttggtgaagtttcagttttaatattgtatatatgaatttattaagaaaaaagatgagaagcaaaacaaaagtagttgtcaataaaactaccggcccttttatatatctacaaaaagataataagtaatggaaactaataaaaaaaaaacttttaattataaaatatcaaaatttacaaaaatatctatgtatattgaaaagttatgtaagtacacgtaaattattgctttctataaatttattttcattttgagtactattttcacttctacttcaaaaggcaagttaaaatttatatttttatcgatcccacccaagtctctttttttttttt

SEQ ID NO: 76721 - DNA, 727 bp, Cannabis sativa
gggagtatatggagaaaggagcaaagttaagttaacacagcttgttgttacttgttattagagcaatttaataaaaagtatggacaacacttgtatgaatatcaattttcatcataatattatttgtcaaggatgatgtttagtgtaattagttagttagttagttaattatggtcaactaattaacttaattagttagtgttgttaggagtggttgttagaagttagttaaagatagttgttagcttaatgcggtatataaagctttgtaatctataattaatcaatcactctttctctctcaaagactattagagctctagtcgtttcttcaatggagattctaacttcttcaactggtgaagcattaagattgaacaatacttagctacacaacaattaacaagtttcactacctaaattgtaccctatttctttcaatcattccctatcaattaaacatgatgagcacaattttcttccctgaaaacatcaagttcttgcctcgagcaaaggcagtcagtttcaaaaatttcttgatcctactcgggttcctgcaaagttcttgacagttacaaaagagcaatccaacaatttcaactctaagtttgaagatagggaacaacaaaaaaaatctacttatctcttggctactctcatttatgtccgaaaaaagaatcaatagaataattagttacgacacacaggaaatcacaaagtactacat

SEQ ID NO: 76722 - DNA, 529 bp, Cannabis sativa
acaaaatcctgcaaatttgagaataacaataaaatcgaatacagtgactctgctcgatgtagccttttatcatcttaaatatatttcaagaaaattatcttcaactagtaatccaataattgtgtcataataattaaagactctgctctaaccatcattacatgttaattaattaccatttaccaaaatcttaatagttcatatgatataatactttggaggcatggctgtctcagactctcagggctcttagagatttaatgggccgaaaatgaaaaattattgggataagttgaggaatactttttttttatatcattaaataaaaatacttttatattatattacattaaaatgtatctatttttatgagtaggttgttcaatataccattatcttttaccacataatttattttaacttgaagggtataatggggacatcatctataaaagtgagtatatattaaaaaatataaaaataaaagtaaaaattaaaacaagtaaactaaaatgagtatacaatataa

SEQ ID NO: 76723 - DNA, 746 bp, Cannabis sativa
ttttttcgttttgaactatgcttattatttttttcaatttatgttttcatagtttatatttttatttgcggtttttgaaattatttttttaggtgttctgctgttctatttatttgttggttgtactaaataactggtttctgtgtttaaatgtttcttcttcttttttttttttaagaaaatggtttcattgttcagatattttactagctgataaacgtaattggtttctattagtcagattctaacgtctaactctggtgacaactccgacatcaaactccggtgactgtaacaactccgataaatttttcggtgactttttccggccacaatcccaattccggtgactttttggcaatagtagcatactctagcgatttttccagtaccgacaataaacttcgacgatcactatagtctcaactgtttctattttttttttaaaaaaaaatatatgaaggaagttttaatattttttgtaaggtaattcaaatgacatatctcatatatgttaagttttttttattttatatgaaacattttgtccaattaagttttttttttaccatatttatctaaactaattttgttattaccatatttatgtaaatagccatatataaaaaaataaatactctagcagtagaagcgaaaaattaagagcatgtttgatattgttttctgttttttgttttcaaaaaattatttttagaaatgagaataaaaaatagtttttgaagttt

SEQ ID NO: 76724 - DNA, 702 bp, Cannabis sativa
aaaagaggtatgtttcaaataaataaaaattataggtaaatttgattaattgattaataaaagaggcatttttcaacttatcctttttcaaaattgatattttcaggagtttatgtttatgctacttttcttagaaaaagtggtgaaagaaataaataaatgataccataattttcttttcccagcagccatcaaattgtgtttttttttttttttgtttggaaaggtaccaaattggttttcatcattgtagtattgtttttatgatgaataagcatatatgtttagctcaattagtgtatattatataactatatataaatttataatattgtagtttcacttgtatgattgttttttaaaaaacttgttataattgtattaagtccaataatgtagattcatagctaaatattgttataagtgaaattaattatatttttgtaggcttagtgtaaattaagttacaatatatgactttcactaattttttttttatgatagaattttataaatatattttctttttgagttaaataactgtccccatctaaaacgcacacattttcaatatggccatttaaattaacttcaagtaattatgtgattttcacgatataaataacatttaattttatggaaagaaaaagtaattatagaaatttcactctccttcaatatttctaaatggaaacttatttt

SEQ ID NO: 76725 - DNA, 542 bp, Cannabis sativa
acccaatcaagcagaataacatcagcacagctttcttttagtgttccaatctaatttcaaatatcaaaataacagaaacattgtcaaaaagataatactcaagaaactcaaccattgatagaaaaatattttttttaaaaaaaaaaaaaaatgtgtgcctgattctatagtgggctccaaaggttcataatctatatcaatcaaattttcttctctaatttatagtctctctgaagtgtcaattctacgtttttttttttacagctcatagcttaaccctgccgaaaaaaatataacatgtatagttagagagagaaagaaagaaaattgtggttgcgatggttaataacacttgtcttaccgttgatgtggtgaagctgaagcaaggaagagttcgcttcgacaatcaaaaacatggccattggtcagctttgagtttcagagggaggagaggagaggacttgagagaggccgagggaataattgggcctggcccgtttctcactccaaatggttgttgggctttggcctggttagagttg

SEQ ID NO: 76726 - DNA, 812 bp, Cannabis sativa
gatttctatcagctgcattaaacccagaaaactcccagcaagcccaagcaaattgacaagaaactaacaaatgcagctcagtttcggcgaagacgccacacaaagggcaattgttatcattcagtaccttcttgatgcagagattcgatttggttgctaagcaatttgacgccgctctccacactagatctttagttttgggaggaactttaagtgaccacaatttattccaaaaccggtggtcttctgagggagttgggggctgcttataatcttgaatcaattggtaggcgcttcggacagagtaaagtccgtttctctctgcaaaccagtaccaaaagtcgtcctgaaccacctgatttatttggatgcccaggattaaagcagcatcatcgaaagtaaaaaggtcattaacaacttcagcatcccaggagcgactgtgtgtttgaaacaagctattcaccatgaagttctcaagacccgggacattgggaattggcgttggtctgtcaagagaaggcaaccaaggatcggtggttatttgcacagtcaatcccgatcctattcccttccttaagccgagcttaactatgtccttcgcggcaaatatgctactccaaataaagctaggattagaacccaactcagcagataaataatcaccctgtggatagtatctagccttgaaaactttactcacaagagaatcatgtcggaataagagtctccacccttgctttccaagcatagcaagattaaaatctctcaaatttctgaaccccattccaccagcagtttttgatcttgtcatt

SEQ ID NO: 76727 - DNA, 1107 bp, Cannabis sativa
ttggttgtggtgcattgcataggatttggttgatgattccttagtttataatttagtcattaagaaagggtcatttttgtttaatgtgttttggtcttcagattcagttttaccagtcacaaatttgtttctgttgtattttcagattgtctgccaatcagagccagtttttaaaactcaaaaaactggtaacagaaaatgcacccaatcatattttcataatatgtattaaggctctaaatccaaatttatatatgagaatcatatttttaaaagagtacagttatgtaatctcgaaccaatcaggtgcaaaaagattttaaatattttgcagctatttggtagatgacccattgtaattttttctctatcttatgatgcaccttgttgtgctattgttcctagattagatataaacactgaaaactaggctcatcaggtcttcaatacacttattctgcaagtcttcacctggttcacttcatatcttttctgatagaaagttctgaatgttggtcgtaagttgtttcatcatttcgagttgatcaattaagatgtaacattgtgaatttaataatagacttaccactcaatgcaaaaaggcaactgcaaataagtggtatttgaaattctggtttttgctatgtgcaggtggggtccgctgtttgtccattttaaatgcaatttttgcaattgtatttggtcttcttgctttgtttcttggttcaagcctcctgacactggggaataactgctccaaacccctcttttggtgctatgagtttgcatcttggggtttggtcattctgtatgggggaactgccttttttttgagaaggaaagcagctgacaatggagattccagtcaaaaccacggtcttgagatgtttgtagctaatccctttgaagtcacaccaggtgttgaaagacgtgttagtgaaggatttaaggcatggatggggtcatcctacttatcctctgacgacgacgaagatgaacctgaccatgaggcctctcccttaacacgtaccaactcaaacaggcagacagtctaaacatgactggccttggccttggatgagaatgcttaggttttttttttttttt

SEQ ID NO: 76728 - DNA, 666 bp, Cannabis sativa
atccattcaccaaactaggtcggatcagatgcacacacgcccctcaagaaaaatatgtaagcatgcagtagccagttcaggagaaaacaatttacgagaaacctgatgatttacaaaattatagtgtaataatgataatatcatcagtcatgcgcagtacagctatcgcatcataagtcagaaataatactcatctcattaccctgcccttcatataaaatctttcttaatccgctgggggattttcgccattattattgatgatcaggtttcagatttctactctctctctctttgtaattttggtatgtcaaaaattaatttgaagccagccatgcatgaaatgcacgcattcgttgaactttatcgatccagtcaagacaactgccaattcccttaattatttggatagcagctggccatggcataattaagtttggcttttttggacactcactatattaatacgtatatcttcttcacttctattagaccgaaaaattttctgtattattgatataggtgtttatgtcttcagttttgctaaggttatgtgagtgtttgtggtgcttcaatcaacacaaatcggctgtagtaataatttgtgtcctcttttttttttggaacttgatatgcaagttaaagtattggtcgggaacaacaaaa

SEQ ID NO: 76729 - DNA, 817 bp, Cannabis sativa
tttttttttttttttaatttaatagatttaatcacactaaaatagtaattattatctttaatatcacaagctaccttacaaacaatatcaattttgtgcaaaataaccttataaaagagatcattttgccttcccttgacctctttggatctcattattataatattaataagagtaaatagtgacataagtacccaaagttttaagtttataagcgacatgaattcaatatttatttttagcggcataagtattcaatatttgtaaaactgtaatttttctcaaatttcatcagtacagactccggtttaaatttattaaaagaaatatttagaattaattgatattatatatttctgtctacacttaatgatctagaaactgagtctaatatgtgacatgtttaagataataatagagtatgtactttgtacagataaaattagagaaaaattactgttttacaaaaattagacacttatatcactaaaaataaacaaagtttatgccgtttacaaacgtaaaactttaagtacttaccctattaataacacacaacaataataataataataatgttagttagaaaaatatatgagagtgtaagatatcataagtgcttactcagggggcatatatccaaatgtacccacaagacgtgtctgcaatgaagtactcccatattcagtcaattttgtaagtccaaaatctgcaacctgtaaaagaaataagtttgtattaattaattaattaagatataatttgttgtgaatatagttttaagtgagaattacatgacctttccacggaagttttt

SEQ ID NO: 76730 - DNA, 2477 bp, Cannabis sativa
agtcacaaaaaaattatgttgtgaataaaaagttatcactaaaaatagcagatttttgtagagtggtttagggccctaacataccattttaactcattacgtacgggttgaactccctatgcctctcgagatcatatctgctcccttatttggtatgggtggctgccctggtaaggccccttggttctggggaagttttccctaaagggcctttatatttggtgcttgtaccatgcttccacgtggtagttgagatatgacttgtccttccctcatatgcggtaagcgattccttatccactcatacaagtggtctaaccgtatcaagttctcaatctcatcttttagattcttgcatttattggttgtatgcccaatgttattgtggtactcacatcttttattggggtccctccgtgatctgtctcggtataaaggaggtggcctttggtagtgaacattttgccttgcagtcaaatatacacgctcttgagtatccaccaaatcaatatactgactatacttgggattatactcgtatctttttggcttcttactatcactttgggtgcttcctttggatgaccatttactctgagaagtttcgggagctgaagttccacttgctgcaagtgaagcagattgagcaagatattgcgtgcatgctttgggagtgggaccacttaccgacagtccataatcataatgggctaattctatgacaaagtttagtgagcacctaggtgttgcttgaaatttcacactaggcatgccactcatttggggagcggcaggtagtgtgatacctgggaattgtaccccaaaagtatacccagggcccccattaggataataccctctgaaagcggttatttgggttttttccaagttaatatacttttgggctctcttttggaaatcttgaaggctagctacactttcttgttacaactcattctcaaagggagttctcgtccggattctggcttgtaataaagccaacttttgtccgtcatctacttcttggttttggaaacctcctctttgaacctcttgatgaagttcttcaaggttttcgttggtagttgtttgatgttagttaaagtactaactttgaggtttatatttctggttacagcaaatatccttctgaaattagtctacaatttattctaacaatacatagatcctggttctaactttttgaaccactcttctctagatcctcttaatgtcagtggaaaatacaagaatttagcgtcattgctgaccttcatgactgtcatgactctgttgaatctagacaggtgatcactggaatctgtgtcatctgtgtacatagtcatttcaggcattttaaagttctttaggagttcaacctctagtatatttcttgcacatggctcccggtcttcacagtttgattctgagtcatctcctttctgcctccaggagacccttgctatgtccttctagaggatagcaagttcaaccaagattccttcatttaagatacccttagaggctggggcaactttctttctttgatcaaggcgtgcccttaggtctccctgtttgacactgagtttttatattttaaactttgattattttctaattcaatatttttttacattatttatttatgttatataaaattaaatattaaattatttttcaatatttataaaaaaaatctcttaaacttaaacaccatatggcatgaggcatgctggacctactcgacacgacaagacataaattttctagcgacacgaaaatgtgagcattgcagctctagaattagcgaatggtatatatgtatgtggtaatgcattactttttagtaacgtacacctaatacttgtaccacaaatatttcacattatttacatttagtacacttctcttaattattccttctagttatctttttaatttctctccctctatagtctctctcaaaaaaagtataaaataatgagaagaaaaaaaaaggttgagctataggaaccatatatattatactcatcacccctttatcttttatagatacgcttttgagacacatagaataacacacttcatggtgagagatctacctcccataatccaaattctcatcataaatttttatgcatttaattatatctcatcatatttttatttatttattattattattatgattaaatttcagtaattaataatattctcaaaatgggaacaaaatcatgaaaatcaacatgatccccacccggctaagctaagggataatgtaatatagcattattactagaattgattgtataaattaagtgatcacttttcacatgtcagaatttaatgtactataaatatttattctgggaaagatattctcataatatatatgtatataatgtgttttttaagattggcttctcctattcatgatgatgatttatcgatcatgatatacaattaatatatatata

SEQ ID NO: 76731 - DNA, 539 bp, Cannabis sativa
tcagagaaatttgcagtgataattggtaaaatcaaaaggattaacaagagggctgggaaaagaattttttttggaccattttctggcgtctgatccttgtaatgctaatcttctatcgttccaatttaatcggaataggacaaacttctacttctaattctaaactcacgtagaaatattaccagacgaatttggactctaggggaaagatagaagatagaacttggccatttacaaaaataaaaatatgaaaaaataaaaaattaatatttataaaatgtgcttatgtaaatttttggtttaatataattttttacattttatataaaatacatttatatatatagcatacaaatcgaggggaatttaaatttgagaattttacaagtttatccgaaattatatattttatttacaaaaatacgattagacatatatttaaacttttatacagtttatgttttatttttttaatttttactgtaacatttggagaaagtaagaagaaggagaagagaaaaaataagagagagagagag

SEQ ID NO: 76732 - DNA, 1005 bp, Cannabis sativa
attgaaactatgaaactgtgaagcagaatagaagaactgtttaaataaatattgacctattccatttatcacactatctcaaatgcaaattagacttaactgatctagatcttattttttaacaatacgataaaaatttcaatattctggctactttcacctgtataaaaaaaaaaaaactcttgtcaatgtgttaggttgcaatcgtggttggtggtggaaacatatttcgtggatcttcgtgggctggctgcagtggtctagaccgttcctcagctgattacattgggtaatttctgtgtttggaatattgaattgaatgaatgcagcttcaattcttggaatcattgtgtagatagacacattttacatgctttcaagttatttaccactatctagttctgttctgtacattacttatccactttggctgagagtggtctggaactctacgttttattatatcatatacatattatcatggtttattatgattcaagggcaccaggtagctcaaatggccagatgtgtggttttctgccacaaggtctaaaagtgcctcttgggttcctctgttcttatatggttagacaaggagcctcatttgttttaaaaaaaaatatttatgatagaaggacaacaaagctatgcaacatatccctttgctatgcaaacatacattaatttgtctaataatagcttgttaattggaacatttaatcttataatttataaaagaatgcagctttccatagtttcttatttaaaaacaaaaacaaaaacaaaaacaaaatgcaactttcattgttggataagaatagaaaacacaggctacatacaatttactgatgcctacagaaaagaatgcattgtggattgtgattttttacttttaccgctttgcttttgctgatctattagttggtcctcgagagacactcaattttaataccaaaataattgaatgtttacgcatgtcaaaaatcccctacaagtctgatctat

SEQ ID NO: 76733 - DNA, 776 bp, Cannabis sativa
cccaataagctccttttacatattttcagctaccattatctttctccactagagttatatgatttcagcaaaagcttcaacttaaaaggtcataagaaactactagaccatttaaaggataaaataacataaataactataatcaaacaaattatgttcaaaaaaaaaaaatcaaacaaattaagaaaaccttcataataataatgttttgtgttattttcccaaataaaatatatattaaaaataattaaaaaaaaaaataagattttgggtgcctttgcaaagtaccaaatttagatttttctttacctttcatagtttatcatctactctaccacatccttatcctttgtcataaaaaggacagcttgtaccttaaaataagagaagaactatgtttgacattttaaccgaaaacatatcaaaacaaaagaatgaaacctactcgtacacagttagccaaaaaaaaaacaaaaaaaaagacctattggtacactctcttacaacaaataagaagtcagaccatcactagttcataaaaatgtaccctctatgtaattaaaccacaaataattcatcttagcatttgtgtttgaccatttactcaacacacactataagaacaccaacaaaatacagatggacctaattcatatcgtaacgatcatcaatagtagatcatcttaaattctgactaatcataaactcttgttcatattattagtttttttaattcactcgttaaagtttctcagagaagatagttcttacaactt

SEQ ID NO: 76734 - DNA, 933 bp, Cannabis sativa
atttacaaaaaggatatatgatcctatattttatctaaaaattaggttatctatgtttaatgattttggggatgacggaaaaaggaacacaaaaatacgtataatgttagaaatatagtactctagtcaatagagacaacatacaaatttcctaacaagcaaaccactaaatttaggtacaaaccccaaaatattcaaaatttgaagtgattacatgcccatctttgtgtcttaggtccattgccatttttacatgtgttaccattttttccatcaaaattataatattatttcgttgcaaattatttataaacataacattttttataattaatttccatggaactaatttaatccattaatactataaaaatccatcaattcaaataattatatatattttttttttcattctatatttttgtagaacgtgaaagcatttaaaacacatttataatattttttttcttttgtaataataaatataatgaaattacaaatcattaacttaaacgacgtcgcattcaggtggtagaccatcaggaaaccgttgaaggtcataacagtaattataaatcatataattattctgaatccatctaagccgttcttgggtggctgagtcaagctgatcagaaagccatggtggtggtgatgacgtggcattgttgttattgcaagaagaagaagaagaagagttattattccaaacacatgactctaagtcatcgaagtttcggtatgaggcgttgaatggagcttggctccagtctgtttggaggaagccgccgccgccgctgaagccggtaactaagtcgttgaaggtggttagggttgagtataatgtcattggctgagtatatgggtatgcgattcccattgatgataagtttttgaacactcgaattggggaatcatccactgcaaatctga

SEQ ID NO: 76735 - DNA, 848 bp, Cannabis sativa
aacaatattcattcaattcattttcaataaccaagatttctctcaaaattctcttaagactttaatgaactagacttcctttatgtgaagaaaagtgtgaacaactaagttatttttagagtaatttgcggtataaatacttaagtttaactttcaattgcacataaatatttaagtttaatttttagctgtaataatacttaagttataattaaaacttctgtaggtacctggttaaataaattgtcacgtggcaatccctgattgatctaagtcattaatttttattattaaaaaaaaattagttcaaatataccaatgaaaaatgacacgtgtatataatgacttaatatttaacggttaggtacctacagaattacagaaatataacttaggtattattactgtcaaaaattaaatttaaatatttatttacaagtaagattaaacttaattatttatgctgtatgactacaatatattatatattaaaatcatatttaagtatttatggtgatatttttcaaatgattaataatactttataaaaattattatattaaatcatctgaatataaaatctaatatttaatatattaatagtaatatgacatcttaaatagtgctaagcacttactttaacatttctcatattttaaaagcataatcagataatgtaagttcggaggataagaaatggaaattattcttaaaaacaaacaatgttttgagttcagacaatagaaataataattaattaattattctagaatactttttttaatttttcatttttttaaaaaacagggtatctcaaataagaaatagtgataattccatggatgaaa

SEQ ID NO: 76736 - DNA, 642 bp, Cannabis sativa
ttatatataaaaaaataccaatcaatattcaacatcgctagtaactaaaatgttacagttacgtaaaaaatgaaatttttaataaaaccttttattgcaaataaattatttttgaaacttgttttttggttttttttttttttttttgagtcttttgcactaaattctctcaatgattattttacttgcatttaattctctaaatttaaaattttgatggtaaaaccttccaaattagtgaactgttagcttaaggtgtcatttatttttcacagtaaataccaacatgaattgcactcttgtacacgtgccacgtttatatttgtatgattaatattattatttaaaaattataaaaaaaatcataattaataatattttttatttttatgattttaaattttaaaatgaaatttgaaataatcggaataccaatataaatgtactacgcgtaaagagtgtacacataagcagttcatggtggcaattaacctaatgatacctaaaatttgttaacaattcagtacgtagtttggaagattttaccgccgaaatttgaacttaaaaagttaagtgcaagtgaaactacagtgaagagggtttagctgccaaaaattcttttcttttttaatgtatcaagtt

SEQ ID NO: 76737 - DNA, 911 bp, Cannabis sativa
ttgtccctcttccccttggatttaaccctatttaaagaaataatatagcaattattcagtctcacctacgtttcacacgattgattaaatacatttttggtaaacaaataactaccaatatttaaataagagaaatgctaaagggcaccaatggtgtctggtacctttttatgtgttaatatctctattgatccaactaagtatgggtcctatataatttaatataataacttttagggacatcgctagccaatcgcaacgcgacatgtcgcaaaggtgctaagcaccactggtgctagaattgttgtccctcttccccttggatttaaccctaatagcaatgctctttaaataaatagcaggctttgaccaagtcaattctcctatatcaggagttgtatgatattgtcacccttaatatctcgaacgattataatatgatgcttctttgagctgtatgaacgcttgtatgaatgatctcagcttgataggtttaaatacttcaatttataaacattgcatgcactgaggggagaattggcgggaagtgctccattacctttaaagattttaatccacatccctacttattctttatcgaggatagggcagagaatctcctaatgagagcggagacgggtgggaaaaatcctaataaaaaaattattaaattatataaaaattaaaatatattatacattaattattattcaaaatacaatttcaaaatcataaataggatactaatacactaaaaaaatgcaaacataaattacaaattataaaatattattagaaatataaaataaaatactaaacaggtcctcgttgatatggggagtgtgatccctgtctccgccccatttaatattcagggacaaaaaataaaccctgttccaccccattcccca

SEQ ID NO: 76738 - DNA, 740 bp, Cannabis sativa
  modified_base (26)..(53): a, c, t, g, unknown or other
cttgatttttttataacaaattagannnnnnnnnnnnnnnnnnnnnnnnnnnntagaggttctactgtatatattacccaactcctgactgagctagctattttctttgtggttggaataaatgttaattaatataagaagacaatttatgctaaaaaaaaaaaaccaaaagaagaagaagaaaaacaatatgcacctactgcccctccttccatccgcacctgagtttcccaactactaataaccacaaaagaagttcaaatatgacaaattacatctataaagggttgctttcagaaaaaaaaaaaaaaaaaaatctactctaatttttatgttttgttacgcatcattcttcaattaaaatttcgagtggttactaccattctcttaacaaatttaagagcatctttggtattactttttgaattttgttttcaaaattaaaagtgtttttagaaataagaacaaaaaatagtttttgacgttttcaaaacacaagtcgcgtttggttagtatttttcaacaatttttgttttttgtaattttattttctaaacactgttttcaaaaaaaaaataaggccaaacaaacctaattattttcaaaaaacaatatttttgtttttaaaaacaaaaaaaaaataattttttagttatgacgccaaacatgtattaagatttcgttccttatccatcatttagtaccagcgtggaataattaaaacaaaaattaatcagaat

SEQ ID NO: 76739 - DNA, 785 bp, Cannabis sativa
ttcattaaaataaaacttaaattgctgaaatgtttcttatgtgcatttttgttgcccttctggattgaagataaacttacttgccccataaaaaatacacacgcagagttaaatggaaaattctttacagtttcttggtagaggagaaaaaaaggtattgcataattgcttttgcatagtaatgctttgcgagaccttaataaactagtgtgctgaaacaagccagtgtcaacaaatctttagatagcagccagtagtccgccttagcttttgtcagtcagttatattaggttgttgtgattgcatgtcaacacaaaaacagaagcaagttttctgacatttctgctcattgttttcacagcatcaagaggtgtggcttgtgtctttgctgcaagaaagcgtgcgttggtctacatattagaggaggatgaggatgaggtctcagaaacagaatgactggccattatgtcgaaagtggtaaccattttggtgaagtgatgtttaatttaatcgaaagcactaaaatgaatggttttattcgtttttcactatacgcttctcagcatatccatgcttgttgattaggagcaattctgttgtaaattggaatggaaacatgatataaatcaaatgttcaatttgttttgaacagttttgtcaaatatgaatcacacaactataatgagcttaagtcccttccaggtttaaccacatctgcttgcgaggccaaaaagaacaagattcagtttagctaacccttttggacactaagcttaggaacgttt

SEQ ID NO: 76740 - DNA, 1646 bp, Cannabis sativa
ccacataccaaacgcatgcatggataaggataagaaaggcctctttttaggatatcctgctcaattttgatgccaatctatttgttatgattgaattgaatatcttaaaccatttactgacactcaaataaacacctttcggatttatctaaaaaaaagaaaataataatcaacccctttcacagaacttttaaattagttcaaagaaaaaagaaaatatagtcttccaaagcattaaaaaagaaaaccacaaaatcaaaattcaaaacctcaaaataatccaagcagaaagtgagtaaaagagttaaagaaacagagcacaagaatacataccttaatttagaaagggaaacaaaaataaataaaattaaaatgttcagaaaacttgattgaagaacaagtcaagcccatgaattatcaaaagctgcagaagtaatagcctgagaaaattcaggaaaactgattcttccatctccatcagtatcagcctctttgatcatccctgtaagctcctctgctgtaagagcatggccaagcttggccatggagtgagccaactcggccgccgtgatgaacccgtttccgtctctgtcgaacatcttaaacagctgctgaagctggtcctccgtgtaaggagatttagaggagagaatctccggcgaaaccaggccgacgaattcagagaactcaattaacccattgctgtttgtgtcagccttttggatcaactcctctagctgatctgggctcggctttaggcccagtgaccggagaagcgatcccagctccagctgcgttagactaccgtcgttgttccggtcaaatgatcggaatatctcccgaagctcggcgatttgctcgtcgtcaagcttcaatggctgttgattgttcatcaccaagaaaattaaaaaagaaaataaacagaaacgttgtaactcaaaaacacgtacgttttttttttcctaaaacttttatgtacactgtacttgggttgttctcgattcgatttccagaatcaagaatgaaatctacttaattgaaattctatatttggatcgtaatcgagaacggaacaaaccctgtctttctccattgatctaaaatttctgtattctgatctggggattgatttgcatttgaatctaatggttagttttgaaaacttcaaaaagatccaagaattccttggatttcctcctttttctctggatcgaaaatttgttctcccagatttcggatcgatttctcaatctcaaatccaaaaaaggtgagattgaaagaaacacttgtaaataagattgataaacaagtaggtagatagtagttgaattttaagaaagatgtttctttataaaaaaaataaaataaataagtaaataaattgctattgtttattattttttgtaaatgttttgaagtgttcctgctaatatatgaattttagtggttggtcaactatttaaaatacaaaagttttatttctttcttattttctgagaaattttcaatgataaaaggcgggaaaagatgcgggaattacgtgaggactgaggagtgcccacgttttcgtcctgacttatgactgttacaactcaacactcaccgttggacattcattcatcatcaactgattttcgaaacaattc

SEQ ID NO: 76741 - DNA, 584 bp, Cannabis sativa
  modified_base (191)..(205): a, c, t, g, unknown or other
tagtatttctttgaacattgctatagtcatcaattaacgataggattaaacatccgatataattcaatatttttctctatcgaatcaaattaaattattaattaaatatcaattttttaattgaatatcaattacaaatacattttaatgttaacttaaaaatatataaaaaaaaatatatctttatatannnnnnnnnnnnnnntaacggcatttcttggtttaatagaatatactttaaaaataaaagaatattctgttaaatttaacgatgttagtagcctcccgttaactttaaaaaatatataaataattaaacccaaaaaattaaacaatctttttttaaacgtttaaaccaaaaaaaaattaaactcattaaccttttttgcgatattttctcattttttaagactctaaatcaaaacctcctattctttaagaaaatccaattgatcgatcatctcttcttttcaagaaatcaaaattggagaacgattgcaacaacaatcatcttcgtttgtaacaatgatcgtgaaactcttgggaaagaagaaatctcaattgatcgatcctcaatggcctct

SEQ ID NO: 76742 - DNA, 2067 bp, Cannabis sativa
tgcaaagaagcaacaagtggtggctcagtcgagtattgaaaatgaatttcgtgcacttgcaaacacatctgctgaagtaaagtagatatgctttgttctccgtgaattacgtgtctcccttccttctcctccaattatttggattgacaaccaaggggctatctcaattgttgcaaatccagtatttcatgctcgcttaaagcacattgagattgatctgcatttcattcgtgattaaatattggctaaacaggtactatgttccctcctatgatcaaacaaaagacattctaacgaaaccactgtctactaaacgttttagctatctcaaaatcaagattgaaattagtacaacatcctttcgcttgaggggaattataagtaaccaattttgttacttagagttgtgtaatttatttaattagttaaacaaactaactgactctgcctaatggtaaattttattatgtcattattttgttcagctcaaactctttgtaattcttttatttataaataacagatggtatcaaagactctgcagctgttgtaagtcttgaattgaatctcatagagtgaattcttgctagattttgtataaatgaattcctataatgagacattgaccttattaaaacccgacaaaataaaaagaacttcaatgaaatatcattaattttacgagtatagatatgaaataagaatactaaatctaatcttatttattactttttaaagaaaattgtcacatttaagtaaaatttaatattattttacataataactaattatggtagttaattaatcttcaaattttaattaaatatttgacaaatttttatgttaatttctttttttgatacatatgggatctaactcctacccccaactcacacacctctcccatacaaatttttatgttagttgttttttaatatctaattaaattataaaataaataaatattgtttaaaatgtcaaagtgaactaatagacttgaagcacttgtcaaactaggaagattattctctaatatgattggtagatttgtaagattatatactatttcctaattgttatattcctctagggttagtaccatggtatgtgaagatgaaatataagaaccctagagattgagattggtaacccatcctatccccttaaagaaaaatcccattgcacctttttttttttgttttgttttgtttttttttaaaaaaatcctatttattatgaaaaggggcttggcaaagaactttgtggtatgaatggcaattaagggcatttcaataacgatttacaaaaggtatagtctctatgcttttttgggttgtttcttatgatcaaattatgatattatggattttttaatgtttacaatttttaaatcaatttataaaaatataataaaaaatttaataatttaaaaaaaaaaaaaaacaagaaaccctaattcaaagttatccaaaaaaaaaaaaaagaaaaccctaactcaagcctctattcaacattaactatggttagtttatgtcattcctacttataaaaccttaataaaggccccaatctatgaaaacctaaatagttttagggttttttttaatattttttaatttctttggtaaaggttctcttctcatatataaatgtattttatttttttcttgtcatcctacaacatatatttttttagtttttgaaaacccctcatttttgcagtcttcctctgaaggagggcatataagaaaaaagagaaagtgggtggtgtataaatggaatatactggaaaacatagggagaacaatggaagaagcccaaaggtcgtaaggcggtcaccagagggtcatcaaaaaccccacttctgtcctcatcttcctcctatttccactacttccactacaaataatactggtaccaattttccctctttttacaattttggggttttctatttttcttttcttttcttttctgtctctctctctcaagaaaagattatatctgaattaagagagagagagagagggcgcgagcgggactgaaaaaaaaaaataaaaactttcg

SEQ ID NO: 76743 - DNA, 2273 bp, Cannabis sativa
ctctcttttctagtgaacctgttctaatatagagtaatttatagtacttttgaagtaattgagaaataatattggattagtactgttgtaaattactttaggatagaaggagaccgatcctagagctatatatatatatatatagagagagagagagattcttaggtagggcatcacttttgtcatatacgagttttctatttttgatagttggagaaattataacttaactgtttttatatgacgttataataaacaataaaaataggatagttaatctaaagtaagctgcactaaattgtacctttccaattacagcttcaccattaacatcagacacaacttggttattagcacgaatgacccagtgtctccaatacagttgacaagagtcaaatgccatcccattgatattgcctcctccaggaagaagggacatgcggatagagtatgtaaacaaatatttttcctcaaaatcttcaaggtctgaaaattctggaataagcacagcagaagcacgaacctatgataaatagtaaattgttagtaagctccctggacaagagaatgaatgattaggattatagtcacggtaacaacaactacaagaattaaacaacatactcagctcaactgattttttatttttgaactttttttttttactaagaaacaagtacaggtggtaaaagatgatcaggaatcatctgcattaccaattattcaaccgcatagagtgtactagacataaaaacaaaaaaacgcaaacacaacaaaaacaccttagctataaaaaaaaaataagaaattcaaattacaaccacaaagaaggattgagttaagttctccttaaacctcaactgaacttttagcttcaccaaataaattaccttatcacaaaagggtagctactaacaacataaaaaattaaacaaagtgatcttaactgcacataaacttttgttcaaaatcatttccaacaaagtaacataaaagcgtttgtaagaacctaacatacacaccctgcaagtacaactctcactagttttaaggtaaccaatttttcttgttttttttttttaataaaacagctaatctctagatgtaatttaagacaataatcttatcattttttgtactactctttctatatctattattcaaagtcccttgttatatataaaagataataataataattttactactagtagttttatccctcaatgtttttttttcacatatataaatatatatatttcctccttgcacctgcacatgtcaaaataaaattcaccacaaaactaatgaaagatatttgtacttaataaattacataacaaaacaaactaagaattgtatgacttattccgaggtgttctttataacatccagaataagatttttaaataccataatttttatgcatttgcttacttggataaacattattttcattactatgcttacttaaatacaatgaaactgaaagaagattatatatcagcttaatgcaattacttacttgtacaccagaggttatagcagtactacataagggggattcttcaggaaactgactgatactattactaccgggttttttcccttcacgaagtttgatgattcctttttccaaccgactagcatgctcctctaaccacagcaacatggcatcctgttgttggttagcattaacatcatgcactgatctgatcaattcctttggaacacaaggaagcatttctccagaagctgacagattcttggtgccaacaaagagttgaccgctgctacagtttagcaaaaataacttgggaattaatgtggaggaagcagccacaataatataatttgattttccagagaaaccaggataagatctgttatcaattgtttgcgcaacaatttgatgtaaaggcagcaagtacacatttacagagcggttatagaaagtataaccacctatcaggcccaatggactaccatacagatcatttgcatagtcttcatctttaaattcctggccatcgtaaaaacgatagaggatcctcgtaggaagaggtaatttcaccttcaagattctttcaaactcttgaatctcagattctgatgccccctttctaagagtagcctcagcctctggaaaattaagtgtcaaccaatttctaagccttccccaacatttatgtacccgccttacaagtgaccaaggatacatactaaacgattctcgccataactgataagatacctgggtgagacagaaccag

SEQ ID NO: 76744 - DNA, 863 bp, Cannabis sativa
cgcgtcaagcaaaggtctatcctttgcaaaatactctctcaccaggccgttgggcaaaaagcatatccgaaggtgcgtacgcgcactatcatggcctgacatgggggacaaaatttgatcttgtgtcagaaaaaggtaaaactgtctatagagtgatccacacatgatgttgacgtggccatggcctgcgaggctattgttacgctccgggttcattactgaaggaagttcttcccaggagtcatctattctaactatcttccagatccgagagatgttccttaccttctgaataattttgtttacccttctcagttgctatattttgctccccaatcatgccacgtgtcctatgcaagaaaactcggataacaattggggcttttataaaaatactggattttgggtcaaagtttacaattttattgtcacacgaattttttttataaaaatactgtattttaataaaaaaaaaaaccataaaataacaaaatagaacaattaaaacaatagtggaacatctaaaaaataaccgtggaacaaccgtaaaaacttaacatagtacacggtataaaacttacacaatatttttgaaaaaaattatgccccacagtaaaaaagtaaaaagatttgaaatttcagtatgtagtgtaaaaatctcttttttattttagtgaaacacattatatctgtaaattaaaatttaataaagtatttaatttttttttttgaaaaaacttgcagcttcaataaatgaagaggaaagtacaaagcttacatgttcaataaggaaggtaaagaacctttccaaactaactctgtaacgccctaaataattaggcacgctacccaaaatgcttatg

SEQ ID NO: 76745 - DNA, 1782 bp, Cannabis sativa
aaagaccgccgatattgctattaataacggcaagcaaaaactgccgatattactattaataactatgggccaagatcaccgagatagacccatatttaatctaggcatcgaaatacagggcgggcgtagactgccgagttagagcaataacatggagccgaacccaccaaaatagccctattttttttgtagtgatgagaacttatatggttagatgagattcattcaggaattcttaatctttgaggttgtaagacattataatttatttttcaatgaaattattcattactgtaaaaaaaaatggctttggttggcagagtttttaaaagttgtttttaggcttctgaaattccaaaagtacttctattgcatttgcatgaatgtaaatttttgcttttaacttcaaaaagttctccaagaaactagaaatagaaagcaaaagctcagcaaagaaaatatcactatatattatgccaaatattcaaattcaataactctaccaagtaccaaacaatctgcctcattctcataccacatcagctatccaactcttcgattcccgataattaactggaaaggtaattctttggtgctttgtatttatgatcattatgatttttaccaaagaaaagcttcatgaatatgatgcttattattttttatagagaaatgttaaagggcactggtgcctagtatcctcgtatatgtcaatatcgttattggtctaactaagtatcaggtcccatataatttaatataatagtttttagagaatatcgctaactaatcgcaacgcgacatgtcgagaaggtgctaggcaccactggtgtctcatagcaatgctcttttttttttagctcacgtgaatccttagcggcacatatagtgagaaattctgcatcttaattattacattacttatgagttaagcgtggagtaatacacaatagacaactcaactaatgtttaataattgttccttttatatttttcagaagtagacgaagatattatcatcaaaagtttctacaaaatttgcttgcgtccattttttttttcttttcaaaaaattaaaaagattgattgttgtcaaaaataagaaaacaacaaaagaaaagataatgacaagcgaaaaggaaaacaaataaaccatgaccaggtatataactaacgatccttattcaccaagacatgcaagcgatctgaagaagcccacaaaccaattgttaatcactggcaactattctcctaccgaactagaggactccattcaacattttgtgtatctaatgatcaaacgtttaaaaagaaaaaaaaaacccagagccatttcaggcaaaaggggaaggagaaaaaagggtcaaaaaatctaatatatgcaattcgaagttgctcattgctcattcctagcacaaagggttgtcgtttcaacacattggccactgataaccagaaaaaggtaacaagtcattgtcaccatgacaaccattatatgttcaacaactggttgtttaagagagaaaataaggtactttgacaaggaaactccattaataaacataatagtgagagaacaaggagcaaaccgagcacaaaatcggtcattcagcagcatggtcagtaattgtagtagccatcaagctgtggtgtctgaaatttcctgtatggaaacaaaggtaaaattaaacattacacatagaagtaataaaaagtttatttcaatatttctctttttaactttgtatatataaatagcaaaacttttcatatgaaagaaag

SEQ ID NO: 76746 - DNA, 817 bp, Cannabis sativa
gtttatttttgaaatatactttctcatatgctgctgcattggtatttggatctgaagtttgagttttgttaaattataatgggagatgcaaagaagaaaaaaagtaggctatatggtgtttattagttcatcggggaacagggtttgagttgattggtgtctgataacaaatagattggtgcataaataggcgaaagtaagaatagagtcaaagttagaagttcggttcaaggacttagaagcttaactttactgtactgttttttatttggattgattatattccatagtttatagcatggaaaattctttgtcaaactttggatagcaatatgatggaaaatcacactcacacacagataaagagaaagaaagagagtgcttggctatgatttgtcttgggatttcgggatttttgagtattcctccaaattttgatcacaatctcaatctcaatagtcaatatttatcatatatacatatacatatatatatatatgtataattagtttctcttagccattaaagctaacaatttggtacattgattattgtttttgcagagatagcaatgtgaatgagatgaattttcaaaagggttttattctctgaactgtggtggtggtgggaatttgatgagagtattaaattggtggtgtaatattttagttaaatgctaattttgactattaattataatccattttaattttttctcttttattgttcttaataattgtataaaaaaaaactcttattgataatattgaagatataaaaacgaaaagttctttaagagctgtttttgtgattatta

SEQ ID NO: 76747 - DNA, 548 bp, Cannabis sativa
ggagatcaaacctattaacatcttaaatttaacagaatattcttttattttagggtatattctgttaaaccaagaaatgccgttagataggcacttttaatatataaaaatacacaaacacacagtagcacattaacacatgcaagtggtagtagagtactactggtggacccacatgaagaaaggagggcggccgcctcgctgaaaaaggaaaaaaaaagtattatataagtattcaaggacaattaggcttaccccactggcaatgggaggaaccatagcaccataggtaagccatgcttatctcttacagctacccaaacagtccatattaaatcgtaccagtatcattatggtgttttttatgggagaacattatccctggattaaatatgaaaatattcaactgtatataacaacatggattattctacttattagtaattagttttgatataaaatttcataattctcatcaccctttagttttttttattattatttttgctacatttatttaaatgtttttttttttctaattttattgg

SEQ ID NO: 76748 - DNA, 2627 bp, Cannabis sativa
agtaacctagtcattaatgagactgtattattagatagaagttagatataataaaaaagagactttacatgaaaatttcataaatacacattacaaaatctatgacccatctatgaaagctaaaaagtttgtacctcagttttaccaacagttgaatgaatatcttgagaactcttctcgttagagcaagtcgtttcacattctaaatgtgactgatcggcaacacaatgcctctttttagagttatcaatcaataatgagctagcttgtctcttatggtcactcacttttaactctgggttcaaatccacatttgattgaagatcactaaataaaatcaaaaactgtatttagcaagggagggtgtgtgctatttaaccatcacaaattcattccagtagagaccatcaaaaaagtagcaataaatagacacaagatagctaaaattgcaaaaacaaacttgtacattagtatgtgaattcagagtacaatacctacagtacagagacaaaaagtcatttttaaacttctttaattccgagttttctgcaccttgcaccaaatctgagctgctaccctttccagaatgtccaactgcaacaccagccacttcaagtaattctctcgatgtttccttctgatttggttcgaaatcatcagccactcgagattgaaatgacgaaagctgcctttcacaatcatccttcctagacttattaatctctaatgacaaacttctttttaccgaatcttgcagagctaatgaatcatgaccagcacgcgaaggcttatctgagttaccctctccttgtgaagccaccaagtaactgtccaaggtgcctttggcactaggagacccttctatatttttcaaactcttttcctttctctcatgcttcaaacaaggtgacacagctttcctcttcttcgaagcaaaaaactgcacagagataaccccaaccaacaatgagcctatttcaaattaaaaaaagaaaaccagaaacaactcaatttaaaagaaatctaatcaagggtttcatagtttcctataaaacattcaactaaatctaaaactagggtttcacagtgaatatcaatctctacccaaaaaaattgttctttcctctattcatgcaacctaaaaacaaaaatgtcatctctttcccaaacaacaaaccaaaacagagttcaaaaacgaaacaaaaatcattacaagaggaccaccgttgaccaattaagaacaaactacatacaataacacattccaaaaatgagataattcgaaaaactcaaacttggaaaacaaacaaccacaccaagattttctagggttgtaaagtaagattaaagacaaacctgatcaatccgggaccgtggggaatcggaggccatgataagaatggtgaaagggatctgcaaaaaatgcaagcttcgattgttagaagagtttttgaatcaaaccgaagtgggattggccaccgcgccaaatgtcattttctttgggcactgtttcatctttctcactactcaaatactcattgcccccaaaattcactctttcaaatttcaacttttcaagagctataagattttgcaattctgccctctgttcttagattttttcagttgcaaccctgtgtcttttgtttgtagtgacctagggctgagcatcgggctagttgatcgggttttgggttttgcatttaaagaatgagactcatacccacccgtgaaatgaacggattaaccgagtttcgagttcatgagtttcgggtttaaagaatgagacttgtacccgcatgtgaaatgaatgggttgactgaataattttcttttctttttttttaactaaaattttatatgatttttttttttgctttatttgtttatggaatttaatataacaccttaatttataattttttataggaaaaaaatattaatttcaaattcaaagttcagatatcaattcaaaaccaaatttgatgcatacagtttgtcaaacactcgatgccaccacaattcttccctcgctataacacaaagcatgagacccctaaagaaatcttcatcacaacacacaaagatctcatcaaagaaggtagtagatggctaagcaagacttccgagtcttgctcttttgtggcggccctcattgccactgtcgcattcacaacttcatccactgtgcccggtggggttgatcaaggaaccggcataccacttctgaaaggagaatttgcttttgatgctttctccatatcgtcattgctcgcactctgtttctcgatcactgccctagttttcttcctctcaatcctcacctctcgttatgacgagaaagatttcgcaatggacttacctcgaaagcttctttttggtttgacattgctttttgcttccatagcttccatgttggtttcattttgcaatggtcatatctttactcttacacataaactaaagtttgtggcctttcctttatatgcaactttgtgctttcccattacctattttgctttggctcaattgtctctctacttagacctcatttgggctattttcaaaaaggttcctcagcgtagtaacaaggcatttctacacttataagatatatgtacataatt

SEQ ID NO: 76749 - DNA, 823 bp, Cannabis sativa
  modified_base (50)..(50): a, c, t, g, unknown or other
  modified_base (752)..(768): a, c, t, g, unknown or other
gaagtttaaagctgaaggaaacttcaagccaggtcatcttagagctattnagatgaaactaaaagagcgaatgcctggatgtgacatacaagctaagccatacattgagtctagaatgaaaacattgaagactgattttcaaatagtacatgaaacgttgactggatctttttgtagcgggtttggatgggacagtaatagaaaaactgtaactgcagaaaaatcagtgtgggaagcatatttgcaggtacttatgtttatatatgctctattataatatgactagtggtttaaaaatgtattggactttttaacttgacataatgtttggaacttcttatgaaatacttttgtatatatactttagagatatgtgaagtaaaagatagattatgcagtgagacttataacgtaaatcatcaactttctcctactatttttgttcttatccaacttgtgaattatcagttaagatatcatttcatctcttatacatgcagagtcataaggaagcaacccattcaagatcaagtcattccttggtatgacagcttgtgtgcagtttttggcaaagatcgtacaactggaaaatatgcagagactatatcatatgttgttgaagaacttgaagctgaaaagaaaaacactacacttggaggagatgatttcagcagtgctaataatttggatgaagtggaatctatgtctgtttcaaatacaacaagaggtgctcaatctcacactcaatcagnnnnnnnnnnnnnnnnnaaaaggaaagctgcaaatcatgaagaactttcaaatgcacttacacaatcagctt

SEQ ID NO: 76750 - DNA, 3003 bp, Cannabis sativa
  modified_base (1199)..(1210): a, c, t, g, unknown or other
ccggaaataataataattaaactaagttaatgcaaatgacggaagtataaatgtaactagttaggtgcaaagcaccaaactttatttttgaactttgtaccaataactttgttaaatttcttgacaaataatgtaaatcatttttaaagttggagtaaatgtcatttcagaccaccatgtattttgtaaaaattatcgattgaaccctttattttattaaatgataaaataaaacttgtattttctaaaatggtaaaataggaccctgagtttaatttttgacaacttttttttaatataattaatttgaagacaattcttaacaacaaatacaaaaaatataaacaattttctcataacacctttagatcatattattaataaatttttttttgataaaaaaattagttcaatgtcctatttatattattttaaaaaatatacagtcaattttgtcatttaacaaaatagaaggttcaattgatcatttttgcaaaatacagggtccaaaatagtatttatcatttttaaaatttttttttagttcttttctgaagaaggattatgttttttctttataaatttaatcacactaaatataaagtttattcaatcatcaaaactgtatcataaaattaatattttgtttttgatattagaggagagagattcaaacttcgaattttctttttgttttttgtaagaagaagtgtaaaactactaacttatatctacggccacatcataaaattaatacttggaagctagaaaaatgatcatttttaaaagttaaatgcataaaatcacatatcaaaaggataattgcacaaaatcaaaatagtaaacatgtcttgataccattcacatatttgcaaaatggaaaaaggaaaactcagttggttacattcgtatttatcatcagaattgttagtttttctagaaggaactaatatagtatattgggctagaataaatactaaaattaatttgtttacttctaagttctaacattgaatgagagcataaataattgaatcatatatagatatgcgcctaccttatctattgcaataatatatagtaactacatgagttattatgatccttcactaaatattgataattagagtgttgtggatattgtcccacatagaacaaatggtagagaattgagctatatataagaacatgggctactnnnnnnnnnnnnaattgattttgagatagaaccccatgattctcatcatagagttcagtacatccttcgtatttaatgctgaaagaaatatttaattatatactctcaatcaaagagtgaattttatgtctatagagcaaatttccaaccaagggggaagctacaaccatggccccaacatatttatgtatccttactatacatatcatgatccgaactctaagtcgtggcagttatataatatccataatttggatggttaaagattacattttgacccttacaataaaataagacttacaaataattcattaatatatattacaaaattacataagacttataattaaaataatagagtaactcctataataataatagaaaatagttgtaataaaataaatttactctttagtatatacgtacaataataatatttccacaattttgtagtcaccgaatagttagaattaataaactgaaaaataccaagataatacttatagcatctatcatatttctcatccctaactggtcatgtctatataaatgatccagaccatctgttaataattagatacatatccaatatttaaagaagagttaattaataattaaagtaggactaagctaatctcatcgttctccattaacgactttcccacatccataggtatccaactgagttcctagaagagaaatataaggggtgagcttataaatctcagtaggaagacaatcattatcaaaggaccagtagtttaataaaagttcatacatggttagctctttaaaaacaaaatatctcatcatcatgtataaacaaagtagagagaccacacccgtgcatatcacactgtccactaaacccctagctctcaataccaatcataaaaaatgacaccataaactgggaagtcgcacttgataactgccatattacgggggctcagagtcaagtcacttcctatacaaattttaggtctcacctacaggtgagtgcacaactgatctacctatgatgacacagagactaggtcgtgaaataataatatgcacaaaatcatgatcaatatggctctcatcagatttcagtataaccaaaattaggcaaacaagaatgacaaaaaagcatattccctttttactttagaaaattcggcagcataacagttgtaatttgaataaatttaaaaatcggaacctgcataaataattgtacaaaaatatatttggcactcagtgcccccaaaacaattcagaaaaatctacagattaacttttcaatttttcaaatattttataaatcataaaaattagaatatatataatgccattcaacacatataaaatcaagtctaataattaagttgagtccctacctcctttggatcatcaagctttctccaaaagagacgctcctaagcccttgattcttaatttcaaatagcttagtcacacaaaaagtcactttgtcctacattctccaaccaaataaataattatcaacattgtaatgtgctcttcaaactgattccaatgacatagaacgtgaccatatttgaaatttgacgttccacaatctcacctaaacgatgaacattaactatcggtggcagtagaaattagctctcaaaacgcacttggggcagcccccaatactttccaagccaatgcctggagaagtcttatccgtctacctcacagtgtccgaatatgcaattagtttggtcctaatccgcgaagaccagggtagacagtacccagtatattatgtaagcaagcgtctcttagatgctgaaacc

SEQ ID NO: 76751 - DNA, 781 bp, Cannabis sativa
gtattgagaaagtttatagcagcagtcatgattttattagttagcataagatatgctcgcacgtgtgcacacagattcattaattacaataaaagaacactagtgaaataagctatcagaaatgctattcaattttcttttaatatataattattatttttttaaaaaaaaaaaaaaaactatttaattagctttgttaaaatacaggagtgtacaataaaaatctgttctcataaaaatcatactgttgtatgttgtgacagagaaaaagggttcgaatgtcaatgtgtaaggataagtgtgtagtagtgtaggtattttgttttctttatacatatatctatgcccatattatgatcatcaagtaaaggaatcaattagtggtttcctattattattgtccttttattgtttttttttttcaaaaaaataaaaatctcacatatggtcatgcatgtaatgttggttaaacattaaattaaaaacccatttaaatataaattgagaaaaatgttactaattaggtaaaaggaaagggagagtgattggttgatgaaaattggcttaaggaggaagcaaaggaatcactttcaattgagataagccagccagccagcatgattgggcggccagaaacccatcatgatctcacaatataaaagaatcccatattcataaagctgatgagagaatcccaacattgattataaatatataaatattaaatacacatatatagcatagcattaatccaaaaagaataatatgtaataataatata

SEQ ID NO: 76752 - DNA, 733 bp, Cannabis sativa
ctccttcaccttctgagtcaagttaaaagcttcaaatttggcctttattgaagcaaagtatccgttgcctctgtatgttatacgccctggaaagtggtctgataatgggagaataagttcaagagccacctgcatttagaaagattaactaggttttatcgcataataatcacacaaacatcacctaaaatcgcataaaggcagcaaaaaataggccactctcaaaaagaatcgcataaatatcgtacataggtcgcataatatcgctaaaacaatgcagaacaaaacaaataaaaaatcaagtccctgtcaggtaacatcgcacaaacgtcgcccaaacatcgcttaatgttgctaaaatcgcacaacatactccatataaactaaatcgcacaaacctcgcccaatgtcgcccaaatatcgctaaatatacccataatattgctgaaatctactccaaatatactacatcgcacaaacatcgcacaatgtcgccgaaaaattgctaaatatactcagaatgtaaaaacctcttataaaatcgcacaacatcgcatattaaatcgcataacgtcgcacaaaaaataaaataggaacaaacagcgttgaccacgaccccaataatttcccctgatttttgatgcataatttaccacaaacaaacatactaaatcacaatttcagtttaaacagattcatccatcacaaattaaagcatgttttaacaaaaatt

SEQ ID NO: 76753 - DNA, 7611 bp, Cannabis sativa
gctacttagtaagtagttgattcataaaaggttagctagattgattttggataatcacaaatgcaactaaatcatttatatgcatgtttataatagagcattgttatggagcattaaggaatctagtactattataaggtggtattctataacttttagagtttatttataatttttattaaaataaaatatgtaaaattcaatgttaaattacattattagtaatattatattgagaagtataaatactctttactattttatcatattatcaatggtgatttatgaggaataaatcctataaagtataaagagtggactacacatatttcctttattttattttttattataaaggggatctctttttctttttttcgagggaaattataaaggtatatctccttatacataatataaatcataaagtgaaaattttattacattttcaggtcattgatggtgaatatttaaattactagcgtgtttaattaattaaaaacagcacacatgcaatttttgtctttctaaaaattacaattataatttgccttgacgtgtagtgtagtcattaaatggggcaagaaatgaaatcgttggtaaaattattatttataggaccaaatataaaacgtacgtgataattccgccgactcgcgcagagggcgaagggttaaagcttaaaggtcgagcatgttgggtggtcggaggcaaaagggtacgtgcattccacgagactgaaataaaaagcaaattatatggggcccacaagagaagtaggggatttaagtgagtgccacgtgatggtctgtccttcataagattaaacccacaaacaatgcaggcctattttagtagcctataatggatgcgtttctcagtatccaatcccagaccagccgaccacttctctaacctctctcggctactcagtcaaccttccctcccttctatataattaattttaacacacatgatttgcctaaaatgctttcgtcaccttcttatgttccgtgctacaaactactttttattaatattaattgctattacaattacatgtttcaattactccaatattaatagtaatatatatgtccgtaatgacgaaattgcttcaatttggtatgtaatattaccttattaccattcatggataagcatcagaaaaaggtaattgacgaatggtttctcttggcttgtcaatttggtaaacatgttcaccgacccactccacctattcaaaattcttcaatttttgttgattttagaaaagaaaaggagagaaaaaaaaaacaatattcaagataatgtaccccatcttggaaaagattagaaaatatgctcctggctgaaatagaaaatttgaatggtcaattattttccacgaccccatgcatatttaggaataaataataattaatttaatctttaattttccttcaaagtgtttgaagtttggtacttgcaaagaaaatatggttactatgcccacacacacacacgtttggtaaacaggtttaatagtgaataatattgaatggtaaataatctacatacataatttggtctgggtactgatggccagtactatatatagattagacttacagttcaaagttgattaaaatattaatctttgctgaaattgcacgtggggatgtggggcctgtctccttaaattttcaatgtatatggttaataataataataaactaattactatttcaccaactaaaaggagaatttccaatcaaaagaaaaagaaaaaggaagtaaaagttttgatggggattcatttttgtttagtaccattaatctcccattgtgttttggacttaatataaatagtaaaagtactttattaaagcaatgttagcacgaaccagtctgaactatttatatataatagctacgaaggataatttggtcactgtattgtatacgtagagaagctttattacgacaaagtggtatagtgtgaaaaaaatatatatatgaaaaagtagtaatatgtctgtgttgatacatacacaacataattaaaacttgaataaaacacacgactctctcacttcaaggaaaaagaagggtataatggtcaattcaaggggttttcagcgtagaactagaaggttggtgctagcatgtaaatatttataattaagtaaaaataaattatttttaatatttttgtagaagagaaaaaaaaaaacagaggtgatggatggtatatatttattggaattggaatattttttcgattattgaacgttattataattattattgcgagtaatttcaaaactgtaatctatggtacggaaacagagttaaaaacccaccaaaaaaacaaagaacagaaaagcaacaaaagcagctatcctttaagctgattgggtcagattgttttcttgagcgttgtgtcagattaaacgtttttcagatctcatcccaagacttttttcatttttttattttcatccaacggttcagaattctgcagacaggatcatggtatctgcatgtttttatttcacaaaaccgatcatgcaattgcaaatccttttctctctattattattttttttaaatgaaaaaacatggaaaataatgatagcaaattaacaaaaccaaaaaacatgtacaggacagtggctcatcccatcaatttcttgacacttgaaattaaatgaaataaaaaataaagagtgtaaattatagcactataaccaaggtattaattagtattaagtgaagtgtttcttatctactttgacattttaattaagacgtacctaagccaatgactttgacacttaaatagctaataaaatgaaaataattgggggcgtgtaatgtgctaatcaagtcgagtccctattcgttgtaccctgtttgaagtgtgactaaatctactttaataacacacataacataacataatctccttttcacattactaattataataataataataatgtgggaacgagagttttgtaagcttgtgtagtctctctctccttggacaagaccctaataaagagaggaagggatgtttggttttggggtagtgtgctctttaaaaaaaaaaaggcttatgtgtaatttggtgagtgtgagagagagtgagtatctttagggaggtcagcaaagcgtgctttgcttcctgagctgagcaaacctaaaaacgtttttctaaaaggctcacagatagaagagaagaggcaatggttgcgtgtttttgtgatttaagtgcgttcttgttttgggcttcttagggtagaagggaatctctctagttttgtcatttttatttattttttttattctcttgccccttaattaattatattacatataaaaaaagaaaaaagaaacaacattcggtctttactctttaaccttgttccttcctcctctcgtcctctcatttcattattcattcacatcccaaaaggagaagaaagaaagttagcaaagcccactcactaagcgtgctcaaatattttgtagaaaagggcttttaggacatcaataccagtaccagcccctcacttttgctttttttgatttcattatttgcttattatattttggcttttcttaatatttcataatatacctcttggtggggtttcttttaggggagtcttattaataattatatggtctttggagagtgagtgtgtttgtgtgttggttttacagattttcatgggttgaggtttgagaagctctgtctttgtttccttaaccaccttttcgtcctctattctcctttatattaaacttattaaatttggttttcaaaatgtttagctttgcacttggttgaggatctgaaataaaggtatttatatttgtttatgttaagttgagttttcatttatataaactttttcaatctttagtttctgttcaagttctgttaagtttagttttcatttatatatatgtatttttctcacgctactctttttcatttgacagtgaacttcctcgatttgcttgctttgattttttaagtgtacaaagagaaaaaggttgaagaagaaaggaaagtagtgctgattcatcatctgggttatttcagaaaattgacgttgtattgattatattgacatggaaggaaactcaagaagagaagaaaattgtcctcagttactagatttgattcctcaaaacagagagtggttcatgaacaaagaaaaagagaagagaagccatggcacatcagatgagaaaaagttagagcttaggcttggtccaccaggtcaagactggccacggaaagataacagagaaagagatgagtctctcctttctcttggttatttcattcaaaacactaataccatcatcaacaacaacaacaagagtagtggtaaccataaccaaaaccacaagtttacttcctcagagaacggaggagttgggaatgttctatcctcttccccatggccttcttctactccttcctcttcaggttaccaaggaaaagctccaacgtcatttcttccaagcttgcctgttatagcaaaggaagcctcacagccctgttgccctaaaacagtagtagagttgcagaaggcagagaaaaaagcattttcaccagctactattcctgcaaatacagctgttaccaacagctctcagaaaaggtacctcagcttttttccttttcttttttttttgttcgctcttgtatctatttctatcttttggacagagtatattcactcttgacacagttccacgttgtgtaagacagtgtcttgtgtggtccatgcataactagctcccctttatttttgtttacattttaatggatcaaactcaattatatatgatttacataaatatgttttcttttgcagttagacaatttttctttggtcatttacgatagataagtcttagcttattttggcaaatctcttgttttttactatatcgtctcatttccatgctaagtcttaaattttcttgtaatcatttctatctgtctcatgaagagttccattaatattgtctttataaaactacgcaaaggcaagcctagccaacaagccaagtagtgtgtgtttttatgcaacttctcgtctcatttcctttctttgctctttccatataaaggtaatttgaaataattaaccatttaattattaataaaaaaacacagaactgctcctgctccagttgttgggtggcccccaattcgttcattcaggaagaatcttgctagtaatagctcttcttcaaaacccacaacagaatcacaaaatcctgaccagaacaagaagattcatggtgcaaaaccagtggagaccccgggaaaaggtctatttgtgaagatcaacatggatggtgtccctattggaaggaaagtggacctcaaagcctatgacagctataataagctctcttctgctgttgatgaactcttcaggggactacttgcaggtttttgttttcatcattaattatcttattagtacaattattcttgatttttgagtcactgtttcatttttttttaaattttttgacgaagtttgattgtagaccattttcacatataccatatggtcagactgttttgttgtgaagcatataatttattactatatatgtgtgacaaaatggtcaatccatttctcttttttcaccgaacaaatattaaaaagtacaataagtcctaagaattgtcgtttgccttcctttcagacatgtgttagtctgacttgatacagaattgtttaattcattttcctcatttaattatttttttttgtcgttttctcttatgtttagctcaaagagattcctctactgctggtggaattcaaaacaatcaagatgaagggaaagcgattactggattactggatggaagtggagaatatacacttgtttatgaagataatgaaggagacagaatgcttgttggggatgtcccatggcagtaagcatcttcatctttgacatataacattatataactcttttagtttacttatttattgagtaattattatgtttgttaataattgaaacaaggaaattatatactgcattagattccctgttatattttatcttatcttatattttaaacttaagtgatttttttttttttaattatgttattctttgtatgattaatatctttttaattaaatttctcacttcatttgcttgcagcatgtttgtgtctacagtaaaaaggctgcgagttttaaagagctctgaactttctgcacttagtcgtgagttttcattgtctccattcattttcaatcactactaactatatttatgctatttattgatactaactacgtgatatatttttttcttgtattttagtcgttaataataagcaagaccagatgcgagttgactcttcattgaagtgaagaatgaaagaaatgttatctgaagaaaaaagtaaatttccactacagtttggaagagaatttgtattaattatttgactttttgttttcatgtttttctatgatcaaggaagtaaaaaaaaaaagtgttagcctaagaaccatgtaatgatgtttcacggatttggtttttttttgctgaaaatgctgttaattccaactcggctcttgtagaaaaatgctatagccaccccaatatatgtttgtgaattttgacactgcttctagtttatacatttttgtttggctcaaaggatttatatattttgttgtgaaatgggttttacacgaagttaacttgtgacaaaaacttccaaaaaaaatgtatatttagtatttatttatccaaattggtgtatgcctgtatggtggtacatcgtttttaataatattggaaagtttgaaatttggtcttccataagaaaataaagtaatggtttaaaataaagtggccatttttagctgccttgtaagtttctcttaagtttggattagttttatcttgtaaattattattatttttttcctttctttttttgaaggaacgatagttctattatttttctccttagaatatcttctaaatgatttgattaactattgttggccatttctatatatgtttgtactggattttgtttcagcaatcttttgataaaattatcttttcaaaaaataatttcataataggatcaaatgaaacgacaacatgatgcaatcgatttacctaatttcctacttagacatttttctttgtctttttccttctttctaatctcttaatttcatatatgaaataaataaataaattcgttctctgctaatgacagttcagagttcacagaccccatatatgtgggaactatttcatgtgagataagaattaacgtaccaaacattcatgatatttgatttgaattggattgggtaatataatgttaatgaccataggcaatcgggtatggtgatgtgaatatttcgttgaaggcaagctgttgtgggaaatatagttgtactgtagggtgggggagaaagtagatacgattatcatatatgttcccttttcttgtttaaaacaacacagtgagtagaccctaaatccccactcactcacttctgatagtgatctccataatttaggtacaaa

SEQ ID NO: 76754 - DNA, 1337 bp, Cannabis sativa
atcaaaaataataaactatattaagtgttcgcagattacttttgagaaactgaactgtaatgcactcgatttgttgttgatcaatagagaaatttgagatcgtgttccaagttggagtaagaccaaattcacatcaaacttaggatttaaattaggataattcattgtcttgtctctacagtttatcgattgatctttataattctgtcatgttcattttttgtttgattgcttgacattgttgatattttgaattgtgttttgttactgcaacaaatttaggctttaaggataataatggttgcatctgatagtattggaaattgcttctaatagtattagaggccgcctctaaatatatttatcagatcccaattttaatttttaagagcgataatgtcgcccccaatttatttaatattaataaaatttataatatcatatcataaatatttttatatattaattgggattgatactctttttctttagtgtgtaattaaaaaaaaatgagttagttaatcatttttaattagtatttctatatttatatgaaagaaaaaactagtagataagaagacaagcacaattataaaattaaaatattataaagtccatcttcatcaattgtccttaccgtagaaaataacaaccgaaactttaattacatcaaataaagatagaaaaaaaaatttcaaaagaaaattaagagtccttgaaatatctagtgacacatacacactcaagatgaaagaaattaatgaaaatgagatgattttggaaggaaataaccatgcatcgattaaaataataaaggctattaaaggctaattaggatttttgccccttaaactttgacatgtaccaaatgtagaaaattaatatatccaatttcttccctacacacagcaaaagtttagtcaaaaaacaacaatggtcaaatcagacctattacccagtcaaagttttcttttgacccttagcattcaataaacgacaacccctttttcttttaatattaatgctacaggttgttttttatatatattctgaagacctaaaaacacatcagaggtatatatatcatcttatatctcaaacactcaaacagtagccctaaaataaaccctagcagagaaactaaatgcctccttcttcaatgttcttctttgaagaacatgaagaacaccatcaacataaacccagaaaaacccactgcccagatcaactaaccccaaaccttgatacacaacaacccaacacagattaaactaaaccccttttaactcgagccaccttcttcgatgttcttctctgaagaaaacgaagaacaacaa

SEQ ID NO: 76755 - DNA, 735 bp, Cannabis sativa
aatagtatttacctgaaggattattgtttctttccttctagtatttaataaaatcataaatatggtggtacctataagtctttatgataattattttctattaattggtattcaaaaacataatatgtactttttggtatatttttctacttttttttattggtacgtcgtttgattagatattttttagcgcttgtttcttcttattattttttctaatgagtttttatttattgaactaaattaatattaaaatggtagatttaatttttagtctattttataccatttttaatactattttatattcattcagtatttctcaaattttgaacatgtgttggtctttatgtttattaataagagttctttctgaataagtattaaagcatagtctcttggtccggtttttctctcttccatggcaaaaaagaaaagagtaaccaagaagccagcacttcgtttgatttcaccagatcctgtttcgaactcagatgtgagggaggagcaagatgctgatgctacgatgaaaaaggtaggagaggccatggcagaagttgtcaaagatggagaatcgatgatggagcaggacgtgatgcacgatgaaatctgtcttgaaattcttgatgaaggctacgaagatgctcgagttactcaatcgtgggcacagaaagtggagcaggatctgcaacaatctgctcagagtcactcgaggaaattttcaacaaataagtt

SEQ ID NO: 76756 - DNA, 1283 bp, Cannabis sativa
gcgactactgcatatttgactctgtcttttcctttgggtagctcgcctattaagtcgatcccccatactgcgaaaggccatggacttgtgattgaatgcagattactcggaggtcggtgggtatatgtggctattcgctgacacctttttttgggatagaagactctgagaggagcaccttttttttgggatagaagactctttcttcgtcatcctaagaaaacacatttttgtaaccctattatcaactccagagtatacatactaagcttcctcttcttcaagaggaacacggtggaaaggagttttagtctattgtatctctatttgtataaataattactagccaatgaccctaataaaatagactcgtggactaaggatagttaacgcctaaaccacgtaaaaatatcttattttttatcttgctatttatcctacctttactttctcaagctctaaaaaataattagttgccaaaaactcggtaaatattttggtgctttcattgagagttgaggaaagaaacatgcacgatggtcagtgacacaagcctgtaaaaggaagagcccctgcgtagaaagaagaaggaaggccaattgactggttgtcaaggtccggccaaaggtcagggggtcttggccagatgtattgttaagacgagggtttacacccttgagcgcccaaagaaagtgtagaagatgaacgcatgtggcctagaaacactctccgtactcgcgctcacccctaaaaacccacatttggctagccaactccctggcaggaggaccgaccactagtatcctcaagcacatgttcctcgctgtccatacacagacacaacgaggtgcaagaggtgttggggcaagccgacggtgctaagacccgatgcatttatgacgactaactcataaagggtcgtcacatataatgaatctatccatcccaaggctccagcgctagtgctcaagcgagggccagatccattgtcgatgattacttcccctacctttgtgcttagccatgaagttgatcgaaaattgatcctgtaatggcggcagctaagaggagaccattagtacgtcgacgtctgcttggcctctagtccggcctggttatggtactgtttgttgaggcaggccattttccgcaaagtttactcagaaggtctctgtcatccagatgtaactacaaccctggagttacatcaaagaaagtaaatcgtgccattaaaaactagttagggaaactctaccaaagtagcattcatcctactgggggag

SEQ ID NO: 76757 - DNA, 1917 bp, Cannabis sativa
tttatatgttataaatatttatatatatatatatatgatatcacgtttgtacatgtgttaattatatatactatacaatatattttttttttctcttaataacacatttatatatgtttatgtaatgcagctcatcaagaagcactaaagagagaaatagagagattgaggcaagtatatcaccaacaaaatatgaacaagatggaaaataataatgttggtcaatcaccatcatcaatgggagacactactaaatcttcaattgataaaaatgatcagcagcttctcaatgtttcttcgtaactgtattattattattattattgttatggtcaaaactcaaaagctgcgttatggataagttagaaaacttttatatgctataaaagtggggttgggaaaagtggaagtaagtgatcatcaatttcgatgatttttttagtaaaagtatatactactactactactgcaacaaacaacaagtgtttgattcagaagaattgcttattattagccagtttttctgatctgatctatgtggagaaagagaaagagttgaaagtgtaccttacctaatcagacaccaaagaagagacacatgaacttgggtgctcactgctgttgacctgtgccctcacgtgatgtgttttcaccttttatgaagggaccacttggtgattacatgattggcttgcaggaaagaacatgtgcatgtagtagtagtagtagttgtggtttttttttttaattattaaagaaaattattattaagaaaagaaaaaaaaaagattgtctttgttagctagctacagctttaactgattaggggggaggggtgtggttgattcttttaatttatatatatttatttttctttcctttttctttgcacattgattctttaatttgtattttgtatgaattggcaaagggtataagagagtagtgggtttgtgttgggatgaacaaaaggaaaaagattgtcagtgaagtgatctttgctaatttgatatattcggatttattgtactttttccagtttattattgttccttgggtttagttgtaacttatttctttggcttgttattaattagagaaaaaaaaaatcatgaatgtgaaagtgtaaatatacaagaatgatatttcaatgtatctggagaaaaagttgattttgtttagtgctatttgttttcaccaatttttaaacttaattttccttctttttgtttagtgctatttgattaaaatttcattcaagttaaaaaaatattccttctcccaagttcccaacaatatggcatctccaattaaagacatccacgaaaattaccaatacaacctactactattagtactacgtacaccaatatgataaaaagaaagcagcaaccaataattagaattgatgaaatagcaataaatgatgcagaagataagatcattgccaggggtataatttaaagtaaatttagcttaaaaaataaactaatactatatttggtctgaattttataatagtgtttcaatataaaattcagtattttaatagtataaatttaatatttaattatttaattaaatacgatataataaatttaatgtcgaaatatgtagctacaaattaaaaaatcagtacaacaacacaaagttttataccgggtattaataatctttatagattgtattattagtttacgaggtcacgaggtcacttttaaagataagactcattagtaatatctcaaaaatacaaagtttttgacttatacacataaatagacttctttgtatgttgcaagctcaatgtattccaccttcacaaatgaacctatttgaaccttcacgaactcaaactctcctttcgatctgcttgaattgtgctttctcccgaggtaagacttaaaccatcttctc

SEQ ID NO: 76758 - DNA, 1630 bp, Cannabis sativa
aatcattaagtatgatgaattgggagattttactctgaaattagtgaatgtccaattcaaattgatggatcataacattccttttctgaactctaactttatttatcgagttcttcatgtatttcttaccccttttagcgttatcaaaacagcctacagagaacgaatgtacattaaagcttacagtggccttggcccctagctttctacgaatcaaagataagtgatatataataataactagcaatcaatattatgtctatagccaaaagaaaataaagaaaattaagttgaaaagtcaatgtaaatatagtaaaatcaataggaataaattaggtaaattggttactaaatcagtgaattggtaactattcatttcaaaagaataaaaaataatattttagtataaataataaaatataatttttctttctaacaaataaaatgttaattacatttaaacaaataatatatataatattagttaaataaatatgtataagtgtggtcttatatcgattaataacataataaattaaagatacttaaaaaatatgtatgatttttttaattaattgattcatatatatttattttaatttataatatttataaaagttttaaattaatgtaggagaataatattggatcaccaataaatataatcaacactatctaaaaataaaaatatcggtcaccaaaattcataaacatgaagccctatttttgtagatgtgttgttattggtcccctaacatttaatccttacagtaacccctgacagcctacaacacttataataaaacatggagcgtcaataacttaattattagtgtgtagttgagaaaagcaagctaaaaaatgagaacaatgaatatgctcattatgtttcttaccacaagtccaataaattaaaggtaaggaaaattaaagaataaaaataattatgcttctaaacagaataacaataagaaggagaataaaaataaacagaagaatttgtatgttaaaatacactaattaatgtaaaatattttttatgtgaaaatttcagatattaaaaaatgaattgttacaaatataagacttgattagaaaagaagcaagcacaaacaaacactatactgagtattttttctgtagagttgttaatgtttctcatgttaaggcttgtcaatattaatgcttctcaagcacaattttggtgtggtagctcgtgatgatcagggtaatgttatggcaggtgtgattgctcctgcaacggggaatgtagctgaggctaaagctcttcttcttgctttagagtggattcaagcaatcaacttacctattcatgtcatagagtcggattgtaagagcttggtggacaaaatttatagtcagttttgtaacaatacggtaattagtgatttgctctcatgtattagaaacatgttgtcgtataatcctactctctcaatcccatttgtaacaagagaattttacaaacttactcatacttgtgttagggctgatttaggattggacaacgagtatatttaaaatcttggttatcttgaatgtttgtttgtttatttactttgatttcctttcaggatatacactctttttttcaaatatatatatatat

SEQ ID NO: 76759 - DNA, 848 bp, Cannabis sativa
  modified_base (788)..(794): a, c, t, g, unknown or other
attaagtaccttaaagtgtcattcatatatctttctaacaaatattagcctcatgtacaggtagccaccatataaacttacttcaaatgatccccatatgtttataagaaaatacctactttcatatttggtatttttcccccaaaatttatagccctatatataactagtagagtaattattcaatagttatgactaattattttctaatctattataacatgttattaataggtaaaaaaatttatttttaaataaattaattacaaacatttttagtaattaacatttataaatatttttattttttatttataaaaataaaataaaaacaatttactatcaagttacagttaatttattaattattattattttattagtaacgaatttattgattatatattttattaatttttaaattaatcataactattcaataatgattcaacaactaaaagtatgtaacaaattttctcaaaaaaaaaagtatgtaacaacttaaacctccacaatttatatatgtgtataaatataaatataatagagcaaatactattttggaccctgtattttacaaaagttataaattagaccctttgttttgttaaatgacaaaatggaccctgtattttccaaaattgtaaacataagaccctgagcttaattttcgacaacttttttttttaaaatataactaacttaaagataatttctaacacaagcagatacagaaaatataaacaggtttgtcataaaatacatttagatcgaattattattaaatnnnnnnntgacaaaaaatcagttcatggtcctatttgtactattttagaaaattcagggtc

SEQ ID NO: 76760 - DNA, 565 bp, Cannabis sativa
agacttctttcatctctctcttttctctgcctttctttctctttggttctctctgttttctgttctttgttcttgatgaacaatgtctaagaggttgaatacctctcacacatagtagcgatacacttttgttgtggtgaaagcttcttctgccaacaacgacaaccctcatatgaaagtatgtgaatgatttttagagcatacactatgtgtaagaatatgtatctgcaccatgcgaaagaattgaatccattttgtttttcttgaaattttaaattctttttcaaaacaaaataataataataaaaaaaacgaggatgacatggacattgttcaatagtagcaacgcccgaatcactagattaattggaactctcatttttttttaaaaaaaaaaaaaaaattgaacaaagttgaacaattggcatgagcaacctccattgaagataactattagaattaaaagtattattaattaaaatatctattctatataaagtgtgcctatataactaaatttcttggtttatgagaaattcatgggtgactttttatttatatttaa

SEQ ID NO: 76761 - DNA, 3287 bp, Cannabis sativa
caagtttggaaatgtaactacataagcggggaatccaacggtttgagattacttctcttttttcacttgagaggatccaacggtccaactgttgagattggttaagaagaggaagcaagtgaagcggtgaaaggagaagaaaaataataatagtggggaagttggaagcatagaatagaagtagaagaaggaaaagaaaagggaaagagagaaagaaacaaacaagtccttcggattttatttggccatgtgttacggtcagcagcgatcgttctccagagacgaaaacctaaccccttctcggacccttcgatcgcccaccgataacgccctcgtcgtccagaatctacgggatcgtcttgccgagaccgaggcgcgcctggcaagggccagggctcgagaggccgagctgagtcgctgccttaacgagatgaagcgcttcgtctccgtcatggagatccttgagacctacctcaagcgacgcttccgagagcaacaagatgacgtcgttcgcttattctctccgccattgccgcattcttgaaattgcatttctctcctcggtgatttccttactaaaccctcgttcacatcataaatatattttctttttctaatgctattttgatttttttaatttgtttatttatattcactctctagtttaatggggtctttttttttggttttcgacataagttggtagaaacttgtgcttgatttgattatattactttggtgattcggtttgaacataattttatatggtttagttctattctattgtgaattgatcatggagtcatatattcttgacaagaagtgtgcaattttatggggaaattggtttctgaaatggttttgagatgtggattaatccagccttggtatgaaattgataaaaataaaataaaataaataaaaagtgagtattaattcagtgtaaagccgtggattactttgtagggaaggagcattctggaagttttaattatattggctaaatcaacaatggtgtagcttggtgggtttctgataatggggagttgggttcctataaaaataggaagggttacatttgaaagaataagatgttgaaaaacttgcatttttgtaaggttagtgttgaagggataagatgttgaaaactttcatttgggtacttatgtttaatgttcatgtactgtaattgcattacttttcctagatatgcatagtattaaacctgtaggcttcagcagcaggaataatggaaggcgatggacagtggattgtgtttctagaataattattgaattttaagagatgtttccagaattaaggtgagtcgcaatcttgttgccatggacttaggaatacttttagatgagtttctattatgttgcagtaggagaaccataattgaaatgtattagagcattgaaggtaaatgatctaagtggattctgctgcaaaaatgataaataaagcagtgggagtcttatatgtgatcattcattcatttgcttgagcgtcttgtgctagtgtttgtatgccatgaatgaatattcaggatcacccaaattcggtaggggttatgctttaagatgattaatggcacaaaaagagaactacgtgcacttagcttgatgtagataagggaaatatttgaaggtgagtcttataaagaccttttatatgaaaattctaaatcttttattaatttcattggtttagagtcttaatactattttcatgtaaatgagtggtttcttggtgttctttctatccacattgagttctgaaatttgttctttggctacatcacatgaaaaatatattaactgtaaagtttttaagaggccgatacttggttacctgtatcagttgacacgcattttgctctgtcataaaattcaatagagtagctcaaacagttagcccaatggtttgctccggcaaggtttgaggtttgatcatctcttgagtgcctgtataggagttgctacacttttctggttaggcaaggagctagtttacaaaaactatgactaatgtgggggtatatacaccagctaaataaatttatgacattggctttgttcaaatagttcagcatgaccttttccttgttatgaccaggtattgcttagtttgttaaactttgcttattgttatagacgacttagttagtatgtatatgagaggaaatggatccacttgcatttgacaaaacagaatttgttgagcgtttaagtgatgctgcattatgaaatgttgattcagaaatttcctagacattgtaaaggaattctgaaactgggcttttttttttgtgtgtgtttggcaggaatgattcataaccggagccggaaaacatattgaatgttgtaaatttacagcaacaatgaaagagagagttcaatgaagtgccacttaatgttctgaggggcttcaaatataaaatttccccaccttttgttaatcatcaccggtcatgaatattagattttatttgcttcaaaatattggagaactccaaatcattccaaaagttcatatatgtacatacattcttaatgactatcaaattgaatatatcatattaagtacatacatctcttctttcccttcctgtctacttattctataaagtttcaactttctgataattatttgagattaaaaatgccttatattcaaacacaaccttttgtttgtcagggaggaaagaagagtggaaggaaaggggtggagggataggtgaaaagggaaaaatgaaagaaaaggagaggtggagggataagaaaaagacaaaaataaataagatcatatttatccttaaaaaaataataattatattaggaagaagtaggacagtgtaattttaataattaatttaacatttcatcctttatttctatttctaattcccattaatataatggagagctactttcctcttcttccttcatattctctttcttttttttttccttcctttcatcctactctcatttcttcttactaaatatagactttatgtgagttaaaagaagttagggcaattattatcattatgcaaactgctaggggtgaagattataagtaaattattttcttatttctattaaatatatacaagaaaatctgtcctaattagtatttgcatgtcaaattaattaggagttccttgtaatctcataaaacacaaagaataaatatttaataaagtaactttgctaaatgtttgagcaagctcctttcgcaaagttttgggctcctttctagctttgtggattctctaa

SEQ ID NO: 76762 - DNA, 691 bp, Cannabis sativa
  modified_base (27)..(32): a, c, t, g, unknown or other
  modified_base (645)..(650): a, c, t, g, unknown or other
aaaatagattacattgaaatggagttnnnnnnagggcataaaacccaacaggagagacgagagaagaagagagtgcaagtaagagtgagtgagtgactgagtgagattggggattttgatttttgagtttgggggttaggggtcggggcagggcaaggctttgagtttgaatccctacactctagtagcagaaagaaaatgagaagaagagatagagaaagagaaggtgagtcacgagagaaagaaagaaagagtttggagagagagagagagagagagagagagtcaactttaataaagtagtttgtcttattcttttaatttttaaaattaataaaacaataatatattctatattatcagtatacaatataataatacataaagaaagcaaaaaaaattaaaaaattatatatgtataagttatttcagtcagtttcgatttttttggtcggtttactatccaaaaaaaattgaccgaccattgtcagttttaaccattggcggttatttcggtttttggttccgccagttttggttttagcagtgttcggtaggttggtttgaacagttttttgatctagattttatgcttagccctaatatgcattagaccagaaacttgttgttgagtgggagtaatgnnnnnntatcagattaatccaggaaatgaacattggaagacaatcaa

SEQ ID NO: 76763 - DNA, 3854 bp, Cannabis sativa
atgatgatgatgatgaagaagtgtggctggagttattaaagtatcatcacatgaatgcacgaggggactcctccagctgcttctacccaaaacagggcctaccccaaatctactgtcccacaactaagatcaatcatccacattttgaaataacttttctctccaatgtacatatatgtaaataaagtttatttggtcatttcaagtatttattttatccatactactaataagtttaccaaagtctgagaagtggggtcagtaagaaattatagtatattcatttcaactcagtcaagtatataaacccgggttcgacccgaatccaaacttggttaagtttcttatataagaaactaaaaagcaagtcttctttaatatactcaactagtcagttgttcctcattacatatactctgtattaaaactttggtccaacatttctctctctctctctctcactttaccactcgtgtgcttgtacacatgcaactttaattcattccttctataaccaaaaaaaaaaagagagagaaaaaatgtcctcattgctactatgattgagtctgttcaaaagatagtacagcttattacagagagagaaaagagagcgtgtgcttttgcatgaaaataaatctaaaaatggtcaatttatggatttttgtaatcacagtagctgttttgttgtactgcataatcttctacaagaacaagtttattagaagacttactggatcaaaacccagaagaagcttacttccattaggctctatggggtggccttttcttggagaaacaatcgagtttgtgacttgtgcttactctgaccgacctgagaccttcatggataaacgtcgtcgcatgtaagttatggtctcaaaaatctattttcttaggaaaaaaaaacctaaacttaatgttctcaaactaatctctaacattacatgttttctttactattgataattctagttaccaagtcttttcaccagctacttagttacctataattatgcatttatttttttttactttgatacctttgtttgagcttttatttttctagatttttcaatgggaaattaataagtatttttgtgttttttatttttggttaggtatggtaaggtgtttaagtcccacatatttggaagtccagctatagtttcaacagatgcagaagtgagtaaatttattctgcaaagtgatgcaaaggtttttgtgccttcttacccaaaatctctgactgagttgatgggaaagtcttctattttgcttatcaatggaagcttgcaaaggagaatccatggactagtgggtggcttctttaaatcaccacaactcaaggctcaaatcaccagagacatgtacaaatatgtccaagaatcaatgacaaattggacccatgaccgacccatctacattcaggatgaaaccaaaaatgtaagctctctttttcacacatattcatcttgggaaatgagttgttaggatattactttggttcctctcaagttacctagctagtttattttttgggaagagtttcaagtagacacaacaaaaaacaaaagatgccttctatcttttaagtttaaaaattcagccttttttgtgtggtgaagatatttttttaggtggggggtaattttatttattcttttatgtgttaggggggataaaataaaggaatctgtctgtgaaacagtgaaagagtaataattattgattgtttgaaatattccatctctagcttctacttagatttgaggatgattttccaaaaggaaaaggtgaaccagttgttatgtggttgagaataaatttgtttgaatcattttgtctgtgaaaacagattaacaattattatgtttttaatggtactttttaaaagttaataacacaagaatatgactaaacaccccttttggtctctctctctctctcagactgcatttcaagtactagttaaggcattgattaatttggatcctggtgaggaaatggagtccttaagaaaacaatttcaagaattcattgcaggcctcatgtcattaccaataaactttcctggaactaggcttcacagatcattacaggtaagttagttattattattattttattaccactacttacattacatcttaccttatttctatattgatacaaaaaataatttccctcttttcatttcaggcaaaaaagaaaatggtaaagcaagtaaagaaaattttagaagctaggaaaagtagtagtgggatgaacaaggtccccaaagaggctccaagagatgtaatagatgttcttttaaatgacacaagtggtcaattaacagatgatcttatagctgataacattatagatatgatgatcccaggagaggattcagttcctgttcttttgactcttgcagtgaaatatctctcagattctcctgctgccctacaacaattgatggtatgaaccacttagtttattgttttttctttcttggattgttatacaaatcaaattattataatcatatcacttattaataataataatcataataatgaaaagatgccaacttcatttcatcatcattaacacccttttctttagtgctctttaatttaaaaatgacttaattggattaagctgcataaataaatcctgtttagccagccaatattttttctcttttttggaaatttgtgactttcgagtccattttttgaccaattttactgcctagttttgtcgtttctgaagtggtttccttctcatttgtgccttgtcattggaaataggtgacaatgcaaatcctatataatataaggtagccataggttctatccacaaaataaatatatataccaattagactaatgcagttattctcttgaaaaagacagctatagtacaagatttttatatagaaaatgaattaaaaatagaagacttagttccaataactaagtactatacgcacttacttatttatcttatctcaggaggagaacatgaagttaaaaagacttaaagatgagcttggggagccactgtgttggagtgactacttatctttaccatttactcaaacggtaataattttttttaccactgcatgaaaatgacacagaagaagaaaataacagctaagaaagctagctataacttttctaaaatgcttgacttttgataaataaaataaaattacaggtcattacagaaacactaaggttagggaacattatcattggggtgatgagaaaagccatgaaagatgttgagataaaagggtatctaataccaaagggatggtgtgcttttgcatattttagatcagttcatcttgatgaaagtaattatgactggccgtacaagtttaatccatggaggtggcaggtacgtggggaccaaaatatttcaatattaactttgctcttttcaaaattatcaacagtatatagtccaataattcattgaacctttactgaaattcacaggaaaaagacactagcaattgtaacttcaccccatttggaggtggccagaggctatgccctgggattgacttggctagattggaagcttctatctttctacaccacttggtcactcaattcaggtaataatgaatttttattagtaataagtttcaattacaattatgacagtatgattaattattgaatctgatttttcattgcttcacacgtagttagatacttgctttcagtaaaccatatctaattactagaataataataataataaaagataatctagatatatatgtaaaatatttattaaaacaatagaacaaaacttgcccatcataacataagccttcaacagctcccatt

SEQ ID NO: 76764 - DNA, 917 bp, Cannabis sativa
gctaaaaagcaacaggttgttgctcgatctagcactgagagcgagtttcgtgctctagcaaacactgcagcttagttgaaatggattgtctctcttctcactgaattacaggttgatcttcctcactgtcctctcatatgggttgataaccaaagtgcctctgccttggctgcaaatccagtgtttcatgctcgatgtaagcatattgaaattgacttacattttgtaagagatcaaattctggataaagagactgtctgttagatatgttccaagtcatgatcaaattgctgacttgcttacaataccattgtccaaagatcgattcatgtaccttaagtccaaactgaaaatggctcaaaccccttttcgtttgaggggggatgttaacactagttaactatacctagttaattttctgttagcttaggttagttaacctgtgtaattagttaaggtagttagtttttctgttattagtctctttctttgttttctgcttgtatagaaacaatggttctctatcaataaagattgagcttttcatttttcttttctctgctctgttcttcatgctctgtaattctacactagccactgctctttaacgttttgtgggatgctactggcttgagtttggaaaggctctcgcgatttagtaggtagtgttccaatgtagtgagtttggctacaacaatatttactttgaatctgattgcaaatgtctttatgttaaacatactaattttggtgatttggactcttcacttggattagtcctttgatatattatttgatgcttgtgattttttcatatatttacattcatgtattgctctagaaagataaagagaaatgctaggactaactctaatgaatgttgtccatatcatattatgtggcaagagagaagagaa

SEQ ID NO: 76765 - DNA, 570 bp, Cannabis sativa
ttcaattgagagatacaaggctcggttagtagtttgaggattctctgaacagtatgagctagattatgacaagatatttgtcccggtcgctaggattacaacagtgtgggttctattagcactcacaaccagtaaagactgaaggctatggtagatggatgtgaagaatgtcttttaacatggagaactagattgagagatatacatggtgcaaccaagaggatttgaggatagagctcatccaaactatgtttgtaaactgaaaaaggcgctctatggtttgaagcatgctccaagagcgcggtatggcaagattgctaagtttttagtggagagtgattacatcatggcacacgcaaattcaagcttattcctcaaagtaagagaataaaagattgtcgttgttctagtatatgtatataaaatattaaaaattgttaaaaatatttaaaatttcgtataactgtatttttatatttttttttttttggttatttttgtatatatatattttttaaattatccctttttttttcataaattaaaaaattctcttaatcaaccagatac

SEQ ID NO: 76766 - DNA, 861 bp, Cannabis sativa
ccggcgtgtgggactatgaatccatctccaattcacttctgctccgttattggcccacttctgtcctccttgtatctatttccggtggtttaattcattttgtgttttaggttctcttatgttggttgtgagattttgattactggcttgttgtctcattttgtttgctcttttttttggacttttttgaattgttgtcttcgttagattatgaatcatgttagtttgctaaacatcatcgccttagttcaagtcctagagtcaataaacgtgctagtgttcattttgaattagtccattctgatgtttgaggtccttctcccattttgtctaaacctagtttttgttattctgttacttttgtggatgattattctcgtgtcacttggttgtttctgctgaagaatcgttttgaattgttctttattttttgtgccttttgcgctgaaattcaaaatcaatttaatgtgtctattcaaaatttgagaagtgataatgccagagtacaaatctggtgtatttcaatcttatatggctcaaaacaacatgcttcatgaaacttcttgtgttgatactctatctcaaaatggtgtagcaaaacgaaaaaatagacatctctttgaaacagctagagctctcttatttcagacgcatgttcctaaaccattttgggttgacgcggtctacagcatgttttttgattaactgcatgccatcttctattcttcatggtgaaatccctttcaaaattatttttcccaataagccattatatccttttgaaccaagaatttttggtagcacttgctttgttcgtgatgtttgtccacaggtaactaaattagatcccaagtcattaaa

SEQ ID NO: 76767 - DNA, 984 bp, Cannabis sativa
atgaataacaacaacagaatcattcataaaagtagtagctacacaaattcagtaaccctaacagagattatccatctaaataaccctaacattaacaattaccaaaaccaaaaagaggagcccattacacaattccagttcaatatcacctaccgcaccatagtcaccagctgctacggccacgtgtcaaacgaagacggcgactacacccccgacggaaacacgccggacgtggtctactacccagcatcagaaaccttgtcagaaccattaggcgttgacaaaatgcatagttttgaggcaacttacaaggctctctcacccattttatcaactattggagtcaaacgtcgcagtgccagaaccgacgtggcacaggctgttactgagttctgtaaatggtttattaatgccaaaaacaagtattcaagattggttgtgggtgcagtggcgatcgagagacaggtagagcaatgggagcgtagtatggatgatgatgatattaatgatgaattttattggatggataatatggagattgtggatttacatcttgatggttacagagttggagaggatgatgatgatgagttaggaaagagttgtgcggtgtgtttggaagaatttggagtgggaacaaagggtgcgaggatgcctcactgtttacatttgtttcacgtgaattgtatttgtaattggcttcgaaagaatttatcttgtccagtttgtcgatctcagttagatattagctctacttaattttataatttggttatttctcatccattatatgaatgagatcttgaaatttagtgggagatagaaaaaaatatttttttagatttttattaatttagagaaaaatatatgatattttcaaaattaataaaaaaatatataaatttattaacggtctttattgtaccacatccaaacatccaatgtttttagtcctattgggatccaatccaattatatattgga

SEQ ID NO: 76768 - DNA, 655 bp, Cannabis sativa
aaatcacatttttgggatcatgccacagtttactcctaatttcaaatttgattacactaaaatttattgtaatatttttatttatacatttcaaagttttttttatatatttttagagaatatattgtgcaacctatgaagcaacctaaattgcaattcaattcaaaccgcaattcacattgcaatccatgcactaacctaaatcgcaactaatggagcaacccaaaatcgtaaaaaaaaaaaaaaaaatggtacaaataaaaaaaaagctaaaaaattgtatatgtggtgattttccaaatttacttaacatatagttgtttattattttatattttattatatttaattgtatgatttttattaaatattgaggttcacataatttaagagtaaacattgctattaagcaccatgattcttaccaccatgaggtgacgccgaataaatagttattaattttttataatcattattaaaagtaaaataaatgggattacatattaaattacaacaattgtttatgacacttcatagaagatgttaggttccatagatgtctttagtattacactataaaaatagataatcgtccacttaaattttatttttcgtttcgccgctactcataatattgttgaatcaccaatagtac

SEQ ID NO: 76769 - DNA, 1066 bp, Cannabis sativa
gagaaacgaccattactttccaaagtcgagaaccagctatcctttccaaggccagaaggaatgccccctttcaggatagctgagatagtttcattatcaaaaaacctgttaagtttctggatattccatccaccattgtccaaaaggagctcagcgacctttatctcttcattcaatgtcggccgttttggttggggataaagcccttcagatgcgcaatccatggatcaatccatatattagtatcctgaccatccgccactcgcttgtaggcacccttatgaatgatggctcttgatttagccacattcttccaaaaccacgagtccgagtctttcgggtcacagtctagaaagggcttccctttgaggtatttggcttccagtgttcgatagcataaggattggttgcctgtcagaaggttccacccccatttagcaagaaaagcctggttcatttccttagattttcggaagcccaatccccctaaagacttggggaggcaaattttgtcccaggctttcaggtgaagtccgtgattacccttctcagaaccccaccagaaatcgcgcaccaatccatcaatcttagcagcaagtcgattggagagctcggttgtttttatagcatacattggcagagataaacccacaaacttaattagagtcactcgccccgctttggagagattcttagctttccaaccatgcaatttcatagtcaggttatccaaaatgaagttaaactctgcatctttttgtctagatctgaataaaggaagccccaaataattaacgttaccctccagcgatcatattcccagcagcgccctgatcctctgtttcatattagtgagagtattcttactgaagaaaattgaggtcttcattttatttaccatctgtcccgaccaagcgcagaacttctcaagacaatcccagaaacccttggcctcctctaaattggcttttccaaccagaatgaggtcatcagcaaagaagatatgagatataatagggcctcccctactaagcttgattttgctgatgcttctcgatgcttgggc

SEQ ID NO: 76770 - DNA, 1435 bp, Cannabis sativa
aaagctcgattttgggccaaatttgctgatgacaaggtacattaatcatgtattttcactgatttttattcattattgatcttaataaattttaaccttttatccttgttgagactttgcagaaggcacttaagcacacaaatatttggacacattttgacacgaaatatttgagtttgtgtgacacatttatttttgtgtcgatctatattcaggttttgataggatcatttgaagcttgcaaagctcaaggagaagggaaagaaaaactgatagaatctgtgcaagaagctttaggttttctcgagaaagaaatcgaagggaagaagtatttcggaggagaaagcattggttatctggatttagcattgggttggattcgtttataccttgatgtatggggagaagttggggagatgaagttattccaagaagaaaagtttccatgtcttcatcaatggtctaagacttttcttatggaaaatccaatcgtggttgagttatctccctcgagagaaacactcgtcgagttatattctacttatatcgcctatcttcgctctttggaagccaataaatagtgaaataaatctacaagttcaatgatttgtataataaaaatttgtcaagaacttagttttctttgttaaactctgttatacttaaactttgttatatatatatataaaggattgctcaaaatgatttctatttcatatggaattggtctatggtttttatggtcaaatgtgaagaaagacaaagggatcaaatgagtgttaattatataagaaccaaaccaatcaaagttatgattaacaaactaactaactgactacatcatagtacggttatgattataacacactacacagagacaatcaaatcaacacttaataaaaatggcaaaagaaaaggatgaaaagcagtagtaagagtagagagaatccaatcacatgtgtcaaggtgaagtgacatggcttcttctgagtctgctagagcgcctgacaggtgtaatgatctcatcatcattagagggaatcttctcataagtggtgaaacttccatatgaaatggaaatggaatcttcttccattgatgaacatgatgaagtagcagtggattctctcctattattgttcttctttgtgagcttttgattttgaaagctgctgctgctgctgctcatttcagatggacaacaagagttttttgacttctctggcagaataggagttgttgctgaatccactttctttactagcaacacaatggctatggtggatgatgcaataagaagagccaagatagcacaacatgccattgttacttgtgaacttttcacatcttggattgttgaagcatcatcatcatcaacagttgctgcttctgggatttcttcattcactttggagagaccattttcattcccatc

SEQ ID NO: 76771 - DNA, 3094 bp, Cannabis sativa
gttcgtctgagggttgactaggcttgtcttatgtaccagcttgaatctcctagatgtgattctgatctacatattattaaggctactgggaaaacagcacatctctgtctgtcaatggttgattcattctggttgactatactggatgctttgtctcttattttgtcaaggttggtttaacattgtaccaatgtattagtactagaattataaagatagtattctagtagggcttttcatttaataggtccagcagtgtttttttttttccttctttcttttctttgtaattagcttcgagtcacttccgtaggtcacaaggagaggctattgtgttggaaatactaaagggatatcaggcattcacacaggtaatcattgctcttacatatcatctctgtattaatgatattgtagtacaaggaagaagctatggaaaataccaccaatatcatctctgtattaatgatattggtggtattttccatagcttcttccttgtactacaatatcattaatacaagcgttgtttcttcagaaaaatatatacatatataggtctcgaatgcagttgcagtttgaatatacgggttctatcatgccacataatatattttccatgttgtatatgttgttgcaaggatttttccggcttaaactatttcctctttcttgaccaatgtaaatgatgattccaggcatgtggggttcttcacgccattgagcctttaaactcctttttagcatcactttgcaagtttactataaattttccaaatgaagcagagaaaagaaggtactaaataataaatgtctttgaaattcttatgtcttatgatcaacaattgtcagatttctacaaaaaagcttatttccatgataattgtattttaatttcgtgaagtactatagtaatcttgtataattttatcattttgggactttttgttttattattactattattttttataagaaaatatttttctgcttgcatgagtttcacctctgtgatgttgttttatatctttttttatttacctaaaaaatttgtttttgagagccacaaactgagatatttcattacaagaagtctttccaactcattaataacaagggaaaataaaacctaagaggagtagctcaaacggccaggcatatgatttgcttaaattttagctaaaattttctagtcccatatattttaaagttaggcaaggaatccttgttaaaaaaaaagagaagaagaaaaaagaacatattcaaaaacatgctaaaaccctatgaataaaacctgtgatttgcttttctttcacataatttttgttcttatacacgtcatcaaacctttgacttgaggaggttgctgtaaccattctaagaggtttcaggtcttattgtagttatgactaatcttttccagtgaccagacaatatagaagttttgggtttaatttgagattttggcagtgctttacagtctcctggttcgaaacgttctgaattgtcagttgatcaaaaggaaagcattgttcttaccccgaaaaatgtgcaggtattttctttggtcttgttattgtggtacttctgtttcgcctttactttgatcatctttatctgctttaattttattctgaatgtctgtacataaagttttggttttcttgatgatcagtatttctaattccgtttgtttctgctaccaggccttgagaactctcttcaacatttctcatcgcttgcataatgtgttaggtccatcttgggtcctggtatgtcatttgattttggatatctgactaaaaacctagaattctttccctgattctttccgttgaaaattggcaggtcttggaaaccctggcagctctagaccgagcaatccactcaccacatgccagcacacaggtaatcttgaaaagatactaatgcaacatcatgtagctcagggttgcagcatatttgatgtaacagggctttgaattatattatttggataaatatagctagacaatttctctaattttggttaaatacatgttagtttggattccaagtggctggttaatgaaatcttgtacatatctctgataaattttaagcgtctccatttgttttgcctttagcacatataatcatgaagctgtgtaaaatagccagtggtatggtttttgtgcatacttgtaagatggcttataaggggtgaatcccaaaccttacaaaaacaccaaatagaaaaacaattggcagtttgccaatgtcacatggattcgagatgcatgcacagtggttggagtttaaagatttagtctaacaaaactgagctagctatctctcataaaaaaaaaaaaccaagctagctaaatctcatctgaggtctctgcatatctatgtaataatctattttggggggaaattaagtttaaaaattggccattggggccactgtgatgcagagaaattgatttcaattcttgcatacccacaactatccccttcacacctatataactatccatttctcctctcaataaccacccttaatacaatgactcaaatacccttttcatttaatcatgggaactaacacagatatctagaattttctaagctttgaaaatgcacataaatgactgttggccttttggtctaaacatcaaatcttaggctccataagaaatgtcttccgaagttaagtgaaaaaacacatgattattgattaagtagagaattggaaagaattaagaaacattgaagaaggcaggaaaagttgattttggttgccatgtggtaactggaaactagtatttttgtttggggctttcttacagcattcttctagagtttaactgtttaagtatattaaactttagtttatcttgacaggaggtctctactggcgtaaagaagttaatgagggaatcatctggccagtacagtgacttcagtattctttcttcattgaactctcaggtaaatcatgcaacacactgtttgtttagtaggatatatgcgtacacgtacacatatttaaatgatattttaggtgaaaattggtttaagatctttaagaaaatattagatgcgacctgtt

SEQ ID NO: 76772 - DNA, 770 bp, Cannabis sativa
atcaattgttaattaataaagccataattttattaaattaaaggatataagcaaagtgagtacggtaaatatatgtaactttttattgccctgttttcagctccatatattatgtacgtacagtattaattatcatttaatccatacaaaaattagagaaaggaccacactaatcatttcatcattaattatcaaaattttatttatattttaaacgcgtacgtgcagtcggctcctgttttgagtgtataattttgagaatatttataatggcagctggtcaaatggtttcttgtattaataatatttgtatacaaaaaaaatcaataaataatctaaaagatatatatattacacttatataacgtttttgttggtaaaattcatttttttacaccaatgtaatagactttttctgacttttgccgtatactaaattagaagaaaaaaatgtgacttttgttgcaaaatattatttttagtaacttaagtgcaatatttcagactatttacttatttttaccatttaagataaactattcagtaacttttttgttaatagtaaaactacaaatttatttctttttttgttgaagagtaaaactatttagaaacttacaactttttaaactatataatttggagtttttataaaaatagtatattttaagtaagtttacaattttactgtaatttaaagtgagggggggcggaaataaatttaaaaagaaaatataaagtgtagttagtggggtttgaacctttaccct

SEQ ID NO: 76773 - DNA, 687 bp, Cannabis sativa
  modified_base (38)..(40): a, c, t, g, unknown or other
ttataattagttataatttttttacttttagtcacaannnttattgtgactaaaaataaaaatttttgtagtgtatattgtcaaaagtaggtattagcaactattgattcattggagattggccgagcttaaatttagcgattaaatatcccgacaaaagtgatatttttttttttttgtgtagaaaggtgttaacaattggttgcctacattttctaatctttatactaacttaaaaaatatatagtaaaaatataaaaaataaataaataatattaattagggttttttttaacaaatttaataaattattataagtacataaattatatatgcacgatgatttgctgatcaatctctgacgatatgatccaaaaaagattcccatattaatttcatttaattaataatattgtctcatctaataatcaaagattatcaacttaattaaatactactaattaatctatgaaattataatatatattacattaattaatcgttggtgaaatgatttatgatctccatctaataattgattttgtgctgtcaaagtttttaataatatataattagataacaaagaataatttaggtatgtgaaaacgtggttaagtatataattataatactaacactattattatttatatatataaatgttaaatattatactattaacactat

SEQ ID NO: 76774 - DNA, 685 bp, Cannabis sativa
taggtgtagaagaatgaactaaagttgtgttatcgaggctggggagaagaaactggttgaccgcatcttggagaccctgaacagaagtgttagcaagagatgcatggtttttcttcaaaaggggttgagttggaaagctcaaagatgctctttttataacaagttttaggaggatccctgagagtatccttgtagcttaaggaagggggataggcgtaggtatcacaatgttgaagggacatgtcacacttggtatatgtgtgaccaagtttaccacagtggtaaccataattttggatgccctcatattgaaacttaagccattttgtaagggcaagctttcaaaaactaacattcatacctctatgaacggattttgtagtatcaaggagcccacgaatttgcaggaaaaggacgatggaatcatatagagaggagagttgaacctcaacctatggcatcaactatggacttggccagaccataagagccgtttctaaagggaatgaagtggacttgcatccagagaggaatatacctcagttgtgtgggaagaatgatatcaaagccatcaggtatggcaaacaacataagagatcgatcaaaatgctagggttgaccttcaacaacccttctcctatctcttttgcaaccaaaacggaccatgaaaagaacagattggtac

SEQ ID NO: 76775 - DNA, 613 bp, Cannabis sativa
  modified_base (153)..(176): a, c, t, g, unknown or other
agtagaaatcgtcgactaaagctacgtcgagaacggaggaggagggtggtgatagtagctgtgccatttttggtcttctctaagataatattctctggttcttcttcttcttcttcttcttcctctctctcactctctctctctctatatatnnnnnnnnnnnnnnnnnnnnnnnnatatatatatttatatgaatgtgagaaaaagaaaaaatagttgtaaaagggaaaagataatttaaattggtaattttcattagggaatggataaagtgaaatagtggcaattgtagggccctattaaattgagcgggaattgggaggaaattatagggggaagttgaaaaatactacttttattaattaattaattaaatttatctctaattttatatttaattgaaacataaataccctgacataagagagtcacatgaagaatatcttgaactaatagggacaaaattggtacaacgtttaaaaaaaggtaaaatgatagattttaaacaagagtgcaaaaagaaaagaggacaatataaaaatggtatagaatgtaatttcctcaaatattatattggataattacttcacatacttaaatttttaattttttt

SEQ ID NO: 76776 - DNA, 2102 bp, Cannabis sativa
aataaaaataaaaagtcacccataaatttctcataaaccaagaattttagttatataggcatactttatatagaatagatacaactcttcctacaacttgatcactgtagtcagaaatataaattaatattgaaattattatatttgttttttatatgtcatcacaaattattatgatgagtttttatttgtcaaatttacttgtactaactaatagatataacattattaattaaggcattattaaatataataattttactatatattatatagtaccaggtcaactgcataacatatatatgtatatatattaaataataataccaagtcaaacaggctgtgatgataggaaccaggcaactagctagaaaaggaagatagtactatatatagaaaaagaaaatcttatgctaactactaagtatacataatacatcattatatattattaatattttgttgttattaatggaaatgaagaagaataattacttgtggtgcttttttttggtggtgttatggccatcatcactagcagcaggtcttaccatggtaaagtcacccaattgtccgaacaaatgtggagatgttgaggttccctacccttttggaatcgacgacgaaaactgcgccattaggaagaggttcttgctcaaatgcaacacttctactggttctcctaaactaatacttggagaaaacttagaagttagcaacattgatgtcgaaaaagccaccatgagtgttgagtatttcgactcctacgactgttaccataagaatggtagctcaagtattcgaaacaacccctatataaggctgagtaagtccttcactctctcagattctgagaacaagctctttgctttcggatgcgacacacaagccttcatgaacgatacacaaaataatttcgggagtggctgcatctccatctgcaatgaaaatgtaaacatgtcgacccaaacctcgtgttcgggtttaggctgttgccagacctttcttcccaagcatgtcaagtatttatcagttacaacaactagcttcaataaccacaaaggtgttcactcttttaacccttgtgggtatgcgttcttggcggatcagaatagttttgacatatcaaaaatgcgtctcgattttaagcccgaacaagtcaagaatcctatagttctgctggattgggttgtgggaaataacctaacatgtaaggaagctcaatcgaattcatcgtcctatgtgtgtggagaaaatagtgattgttactattccgagaatggtggtggatatcaatgtcgttgcaagcaaggatatgagggaaatccttatctcaaacaaggatgccaaggtatgtattttccaaattactaaagaaaaaatgtattatattggcttaatctgccttaatccaaactcgaccctgaacttatattattatgtcaataatatcatgtttcacactttttactaattctgttttttgtggtgttaatatctttggttggtggtatagacattgatgagtgtttagatcctaagatcataaaaaattgcaaaggatgcaaaaacatacctggaaattacacatgcaagtgttcacttgggatgcatggagatgggaagaatggaaattgtaaaggatttcgttttgacacattagcaacaggtattcatacttcatatacaattatttatcaaaatgagtatttgaccaaacaaaatattcattatacaatttcttcatcatttttcataggacattttcatatcataatatactagtaatgttgatatatatatgttttggcatgtacagttattggagcaagcatttttttgatgataatagttttactccttttctacgactgtaaaagaagaaagagagagaagatattcaaacaaaatggtggtttagtgttaaagcaccagagagtaagaatcttcaccaaagcagaattagtcaaagcaacaaacaactacaaccaatctaatttcatcggccaaggtggctttgcttctgtttataaaggagtaattatactaaatgaaactaatagtaatactaacacaaatactcaactaatagccgtgaagaa

SEQ ID NO: 76777 - DNA, 1204 bp, Cannabis sativa
tgtaagagaaacaatatattttcaattcaaaatccgaccaaaaataataaaaaattaccttatgaaggtgaaaagaaatttgcccaacttcaacagtgacatcactaggaagccctgttgagcaaaacctacaaaaaatgcatgtaaaatgtgttgaactaaagaaagtgactaaatgagatcactcatcaaaattctcaagtgaaatactttttaactttatataaccaaatatgatgagtccaaatttttcaaaccagttttgagtatattatgcatataatcatttcctattcaagattcaaaataataataaattcccataaattataaatttaaaaataaataaataaataaaatgtaccatgtttcaccatgaaggcgaaaaacttcagacttagatcccagcttcatcatgcatgccattgtacggacgaaacaatgacttaaaaaacttcttcttctcttccttcttcattaaattaaaaagagtcacaatatgaatgaagatggcccaaaaaaaaggaaacagaaaataataaccaaatcaagaaaatgtcaataatcattagaaaaatggacccttctttctttagtgtgcaatcattttcagctttttttttaaaaataaataaataaataaaattgattattattattattacatcattagattacagtttgaacttaccatataataagagtgggtggtgcatcaatttcagaagctacaacttaaaaacataacgtcaaataaacctaaaatttacagagaaaagaatttgtaaatgaataagataacactaagtaataataagttcatataatatatctatatacctttgtgttaaattaacacatccttatacagatttggagaatagtatacacatccaagatctttttaatggtttttttttctgcaaaataagaaatgagagttaattaatatgtaatgtttaggaaagcaacatctaaattgagttgatcttgtgtgtgaatcatcattatatatatatatatataaaattatatacaatgtgaatgtgaatgtgatgtgaaagaattattaatggatcaaagtttcacatccttttcaatcccacaaatcgattagccaaaacaatattagagatgttaaattaattaaagcatataaattattacatgaatgaacccttaattaccttaactcatacacatt

SEQ ID NO: 76778 - DNA, 2273 bp, Cannabis sativa
taatctttttatcatgtggttcatttacatttcttagtaaagattgtttgttaagtattatgttagttgatggaagttatggtaaatgttcctcttttttcacttttttcccttttggttttgtcgagctagatcttcgtgataatacgcaattcttcatagaacatcctgatgccgttccaattactacaactcaggtgaaaattttactctttacaatgttctattagtttacataattattgtacattttctcttctttaaattgacatgtccatcaaattaagggagaggaacttcaaaagcttatcaaagcacatgcttatatcgaatgcagctcgaaaacacaacaggtatacaaacataaaactttcttcccttctttctttttcgttgccttaataaactcgttttgtatacacagaatgtgatggaagtctttgatgcgaccataagagttgctcttcaaccgccgaaacagaagaaaaggaaaagcaaagtacttaaggcttgcactataatgtgaattgaaaaattaggtgttcattcagaagaagaataaggatatgaatctattataaatggtgtttgtgttttcttggaattattgtcatggtttgactatatatttatattaaattcagatttttattattttattttatatataattaaaagctgtcattttgaaaaatacattgtgaagcacaaaccaattcaacatatcaaccaaaacaaagtgaaattgggagaaacttacatcctctcctattcttggtctctaataaaaatataccctatatatatttatattctctattaaaaaggaaatttcaaattaacaccaagagattgaaataaaacccataccacaaaattgtattctatatgtgaatcattatttttttggagtggtggcagaggaaaaaataccttcttgagatttgtagcaatgaaaaaaatgtggtattttttaaagtcagtaaaaaaatatatataattttaaaagggaaaaaaaaaatttaggcccttaggctaggtgggccctaggcacaggcctagcctgcccgcttatgtccagggcccgggcctgccttgaggtagctatatggattggatatagggtggtttgagatataactttagtgaaagtgaaatgtggtgagaagtaggtgaggattcatgttgaagtagaagtaggtactagtaaattgatcaagactaagtggattgtgttgtagaataatataaatatgggatcaaaagcaacagtgaaatctagtcagtgccttagacattacatgaaataaacaacttgattttatgaatccaacaaaaattcgtaaagtgagacaaaaggaagtgttcaccttaaatgggagagaatcttaaaggagtcctctccaactacaagccttttgaagaagaagaagacgacgacaccattgctctttacaaatctactctctgtgaaatcaatcacccaaatcaaaccgaacttgtgaagaagcgaaataaaaataagcaccaaatggttccaagagaagagaagaactcttactaaatttgcagatcatcagtgtgacagagaatacatacagacaaaattacttgatgaagttgaaaactcaaactcaaaactcagctttatagatatagttatattgactaagtaaaatcagcaacaaattgtagaatttgaccaaagaagctataagaataatataaaatttcatcatatcatgatgaaacataaagtgtatcaaattttggggtaccccacttgtttctataatagacacaaaaatggaatatactaaggacccttttaccaaaaccacctttaatgtaggaattccctctcaatatacaaaacctacctaaaatttgtataattctagctgagaaaaaaactaaacagctaaggctttttttgtcaagtgggcagtgtctgcaatcttatatgcttgtacttttgctctgtgttaaaccttcttgcactctctgacaagcccttggatagtagaagattcaatatgtcaactccttctcgcaatgcggtatcaatctgttccaagaaagcgaaaacacattactagaaaggaaaaatgaaaaccctccattgctttagctaatcatcactaatctgaaaaaatgaatttgaccagcaatgggaaaagggacttactcgttcttgagcggttaagctgaatctttgtagtaagaacgctttaggatccatttgaccaggtggcctcccgatacctaatgag

SEQ ID NO: 76779 - DNA, 1213 bp, Cannabis sativa
gctgctgttgccacccttccctattgtcaaagaaaactctaaaatagggctgagaaaccactgaaattcttcttatttctacggctgctctgatttagactgtataaataaattatatattagaggatagttggtttcttatttggtgtggattctgaatttgaatatggattagggttaacatggctcttgaatttttatcagcgggtagcaggagatgtttcattgtattaattattttttttaaacactccaatactctatcagtcccctgataaaaattctagcagtgctctttgaaatttgaatatgcatttcttgagtaattttcttttcgcgaggagctgataattgtctgattttaattgttggcctcgagctcttattaatttttttttatggctaattgtgtagtacctatttgtgggccattggcaacttgattattatttttgtgccattatgtattttttatttttcttaaggaaaaaaagaattcaccctctgtttgtgtctcctctattttcttcatttgtttatttgtttattcctctgtgaatgattccttgtcttcaattgttattttgttctgagtaggaatctctattgatcttgtgagtagtgaaaggtcttgttacacgaaacaatggactgacttcctcaggagtcatatgtccaccttatcattgacataaaataaacacgacataagtacagatgagtatctttgtagggtttaggtgctttactattttttgttgatgggttcatatgagggattgagattcatgtactcatctatgtcactatcgtcttcttgccatgtctatgaaggacttgctcttttgttaacacttgttgatgcagtaagtttgtcgttgataggtggagatataagtagtctcctacatattttttcatcaagatcattgagtgagaataggcagttacaagcagtgtttgggtattgcaaatcttgaaagattgaatcattatagttaacaacgttttttttagtgtagtgttttttataatgattcatatcttcttctagtttttggagatactcgggtagataatattttcatggtgcatcatcttcggattttggccagatggcgtctggaatcaccatgttaatggcaaatagttacttttccagctgtcttgattctatgcttcctatcacgacaagtagatgttcacttgactt

SEQ ID NO: 76780 - DNA, 690 bp, Cannabis sativa
tctctctctctctctctatttttcaccatatctcattaaacattatatctcgagtagtgatagattatagcttttgtggaaattttaaatttttagaagaacttatttatacaactataatattatagtatttattttattttattgagaaaagtagttgttttcttcattacctaatctaactctatggatatatgttttgtgctaatattatagtatttataaattatgtcaattctattttaccttttttagaatatatatattttttttgtgctaattatgaaatggcaatacatatacataagcttatatatttttgatattctctcgcatatgtaagatagattttatattcactaattgttattactacccaattttatttctttgtattttttttatcttattaaactaactatgatacgtttaagttacatcactaagataaaataagtccactttaatctttaaaatttatcatgaattatggttgacatttaacgttcctactaaaattatagtgaattatataatttacttgtaaaactttgtgtagaaattcaaatgtgcatcttcattttaaacaaataatagataaaaattttgagcacaaagctcaatacaatttatgtacaatcttgcttttcaagtttagcaataaaattcaaaaatgaagagaaaaaaaaa

SEQ ID NO: 76781 - DNA, 967 bp, Cannabis sativa
tgagggtaccgttcacacagccagttcaagctggagtcattctactgaggcatggaagagcgtttcttcttctcttattgaccaaaaccagggagcatgcttgtcattggttgctagatctaagaaagcattttctaaggcatgtatgctatttgaaagctacaagtgtaagcataaagaggttacaactcgcctggagttgtctggcccatctacccttcatattcccactagattctcttttaaagacatctctcctccaatttccctcatcacccatcctaaggaagagatccatgtggaggaactagggttagtcattccaaatgatccaatggaaggcgtcgagttgtagggcctaggagatcatgttctgttccagggtgtttattctcatgaccagggggctaacctcgagacaagatggattaagaggctcaagttatacctctaatgtatcttttgagtcttttaactcccaacacctctttcaaccctcctatggtcctgatgttaagtttctcaaccatcctttgttccagacaagttatcttggtcttagtcccagatgggcaaaagttttggtgaatacaatgaacacttggagaatacacccccatgattggtcttgggttttccaatattcaacggaggatctccatgaggcgaccctcaactatagcacatgggttagtgtttattattattgttattagactttctttggtgacttgctgacctcaacttttatttttattttgtaggaattcgttcttcaacaatacacacctagctccaactcctctggccagggaaatctttcctgcctctagaaatatttaaagacttggcagaccgcagacgtgttcactaagcatgagtccgtcttaaacattatggaggccctgttctaattttgaaaattaggcccctacaaaaaaaaaatacaatttataaataatatttt

SEQ ID NO: 76782 - DNA, 693 bp, Cannabis sativa
aactcatgatgattttgaaataacttcaaatgtcaattttctcttgaaattctttgtctccacataactgcatgggaccctttctccacctaacctccaactgtcttccttattattttttaagagattactctaaaaacaagaacatattcactatagattgtgctatctttgacaaaaaaaataaataaataaataacatcaattttacatatatttataattcaatggtgtaaatagatatatattatttacatcaagttttttaatattatcgtctaatacaataatacaaaacttaatacgaatttaatgtttaattaatatttttattacaaatataaaaaataataattttattattctattatgtagaataataaaaaaaaaattccatccgaataaatattgtatcaaatttgacacaatatatgttatgtgcgttcataaataaaaaaaaaatattatataataaagctaaatcacattttagagcttatttttcattgagctatagtttggttttgtactgtttatttgcatatccattaaagataatctaaaataggagtagtattttatacatggcgtgcattaagactatctctaatgaaaattttaaaatatgtgctaaatttaacacaaaaaaataagtttatgctatactaggggattaagccgcgcttcgcgcgg

SEQ ID NO: 76783 - DNA, 1305 bp, Cannabis sativa
  modified_base (29)..(62): a, c, t, g, unknown or other
attattttagaattcatattaggttgttnnnnnnnnnnnnnnnnnnnnnnnnnnnnnnnnnngtaaaataatttccaacagttggatacccttaaagtgagccaacttttccaaccattcccattagtcggccaggcttaattttccagccacaaaaatagctttccaccactctgcttaacaaaagcacaatcaaaaaataaatggttatgtatctcggttgccattttacaaacaagacagtccatcgattctaacacgatattaaattgcaacattttatcacgggttaaaagatgagagtgaaccacttgccataggatgaaccgatatttaggcaagtttagagagctccaaatggctttgctggagttggattggtgttggggtaataggctgttatacaactaattcgttttaaacttaccaccagccccttccttttgaattttagtgcttggaaacttgtctctcaagtgacaaagcttgcgccaataccagctcgaatcttgtttgagatcatacgcccaaaagttgttattcttcaagtagatattattaatccatttaacccaaagcaagtcccttttagaagcgattgcccaaatgtatttggcaaggatagtttgattctattttattccatctttgaaaccaagacctccataagcttttgagagacaaattttctcctaagaagccacatggatcttacttctgtttccattccaacttcaaagatcttctttagtaacactatgaggaagaatgaatatgctcatccggtagtttcgtagcccaaaaagcaccgagtggatcaactgaactctcctttcataagaaaggtgtctgctagcccaagtatgaagcctttgtctcattttcttgatgattatgccacaatcttccgctttctattttgttggtcttaggggaactcccaagtatttaagaggaaaatttccttccatcaacccaaactctttcaagatactttgcttctcatctaatcccacccctccaaagtatatttgagattgatttggttgtattgatgaaaagacatgtcactgaactaaattcatcaagagtgtctctaagaactctgacagactgctgaacacctttgctgaaaagaattaaatcatcgacaaagcatagactcgtgaatttaaggtctttacacattggatgatacttgtaaggggaatcgcaagcaaccgatatgtaattaagttgtctttatcaaagatgtcatttactataaagacctaatttatatcataatgatgatcaatggtagat

SEQ ID NO: 76784 - DNA, 692 bp, Cannabis sativa
tacatccctcgttctcgatttttaacattttttttatttattaactagacttaatttcaaatcaaatcaatatcatcacccacacataatgctagtgattacggggaataggccagttgctcctccatcaagatcaattatttgatcaaacgaggaagttaacgtacccactgcttatcgcacttcttattccagcccactcgcttctcttttctttctagaagtactcctttttccgacaccggcgatcgattgaaaataaataggctctctctctcaaagtaggttgtttccctatcaaagggaatgcatccacccgcccgaaaagtagagaatttcaaataagatcgcaggtgtcggtttgggataatttccatcaaaattgttcgtcacctcgaggctcgagagacctttcctttgccggaaaagaggtcgggccaggagaagaccttattaaaagagggaggtgtaggctattcaaccccgggtaggcccctcgacttaccgagagtggattcgggatggagaaaaaggtttgaaccttcctttgttggctgtctctctttatttctgagaccgctctttgtttttttttttcctcttttgtttttataagggaaactaaattaagcaacattaattactataatcagagtatatttgggctccaaagtggaccaagcttatacgta

SEQ ID NO: 76785 - DNA, 533 bp, Cannabis sativa
  modified_base (466)..(488): a, c, t, g, unknown or other
gttggggccaaaaaagattgcatacgatccaaaagtagattacctgtcatggggatcacgagcctaatctgcatcacaaaatgcaatgagctcatagatttctaattttctgagatgaatgccatagtccatggtgccacttaggtatcttaggattctcttaacagcaagtcagtgaacttggagagaattggccatgaattgacatgctttgttgacactgaatgagatttcaagtttggtgataaccagatattgtaaagctcgaactatggatctatattgctgaggattatcaacaggaagactcccaaaagttgagagtttgagtccactaatcatgggggtattggatggtttggattcagccatgtcagctttgtggagaagatctcaaacatatttagtttgaaacagatgaagacttgttggggtagtttgttggaagttattttaccaggaactnnnnnnnnnnnnnnnnnnnnnnnatttaacaacctaaatatgagcttctaaaacgatatgaaattaaa

SEQ ID NO: 76786 - DNA, 810 bp, Cannabis sativa
  modified_base (403)..(420): a, c, t, g, unknown or other
  modified_base (479)..(495): a, c, t, g, unknown or other
tacactttttttcttgatgaattttttttagcattctattagtagcttttatataattattaaaaatatagggatatattataaaaataaaaaagaaaaaaacggaaacatgattaacggaatggggattaaaaataagtttgagatattttgtgaaaaataaaaatcgtcattaatgtttgaagtggctatgtttgatttgattttcgctctagtaaaaataaggaaacttacaaaaatattggaatttaagttaacttttataaaaatactgtaacacgaaattttttacaaaaatactgtaattttataaaacaccagtaaaacacaaagcagaacagctcaaaataccagtagaacaccagtaaaacactagtacaacaccagtgaaaacttaacacannnnnnnnnnnnnnnnnncttataaaaaaatacagtaaaaatgtaaaaaattccgtctgacagtatttttgtaaaannnnnnnnnnnnnnnnnataccatgtaaatttccctaaaaataaaaggtgtttttacaagtttgagcaaaaatttataatttttagtgttacacggaaatttttataaaaatattatttttttataaaaaataaaaaacagtagaacaactaattttttatagggtgtatacatattaacatacatatttggtaccctaaattcaaaattttttgataaaattttatcaatatattaattaaattgtctttaattttacaaattttagattcaaatttaattatttaattacatataattaagaactatttggccaaattaataaaattata

SEQ ID NO: 76787 - DNA, 1609 bp, Cannabis sativa
tgaacttgaggttattgctggagaatgttgcagtagggattgccttgctataacagatgaagtatggtagtgatacaaacattcaagttttagtaagctttgtagtttccctaaacttatttcgagtaagaactaactgtcactaagatgacttcttataatataagaagacattccctgtgtccatttttaatttgaaccctttggatgtgtttccaggtttatgagtatgttacattcgacaataacaaacacacatctcttgcttcactttctggaatgaaagaccggactatcatcacatcttccttgtccaaatcctttagtgtaacaggttaagtgtgttaataattatctttgtgaaaactattgcagccttatggatgattacttaaagctttattgtattttcaatcaggttggagggttggatgggctatagccccacctttgattgcctcagcaattaaaaacattcatgtcaaaatcacggattccgctccagcaccattccaagaggctgccttgactgctttaacaaccccacaagaatactttgaattgctgcaaaaagtaataaggagaaataaacaccaaaaactcatactacaacatgcatttattcattaccttacttacaaattgacactgaaaataaacctattgattctcaggattatgagtacaaaagagatttcatggtcaagttgcttgaagggattggttttcagattgcatttaagcctcagggctctttcttcttatttgcagagcttcctgaagatttcccatttactgatgtattctatcttgtttacttgtcatgtgtaccttctaatggttctatgtattgagttaaagtaaagtatcaccttttatttttatgagtaatatctgaaatttttctcttaacagatggaatttgtaaagaagatgatagagaaggtaggagtggtggctgtgccagggcgtggattttttcacgctaacatgtatttggagaagctttgtgaggtggattataggtaccagaatagatacataaggtttgcattttgtaagagtgatcaaactttggcctctgctgcacaaagacttggatccatcaaattttgaattatgcgcatggttttatcatgacactgttagacatttatatggatgatatgaaacatatatgatcatgtatgaaatgcggaataaattgaacatatatgcattaaaagattgaaatccccccagccattgattctttgagctttaattccacacaaactttgaatctgcaaaagaaaaagaaactgtttagtgtgggtaattgggcttccaagttctctctactctctttagatagatttgctcagggactgaaactctatatttatataggtgagatcttccatcaaagtctctactacaattaattgtcataatattttgataattaatgaggatatgtaatttgggcaactaaaaaaattaaattagtaactaaataatgttgactatatatagaatattttgtcaattaaattaaatattgacttttaataaaatcaattagaattaatataattaataatttcaatattagaaaatattcttacat

SEQ ID NO: 76788 - DNA, 964 bp, Cannabis sativa
ttgcaatattattgaatttgggtcctggacccatctaccatagcttgctagaaacaacaattaataagaggacattatttcttcttgttgaggaaagatcatataagattttcaaccaggcggccctcctgattggaaggtcatgtgcatatatcattgagagttttggagattatgaaaacaattgttgtgcttataataactctattatgaaaaagatgttaatgctatcgcagatgccagatagcatagcaaaaataggtgtacaattagtcaagctatgacctctacatagaagggaggggaaacccgtttgtggttcctaatttcattagccttaatgcttatcagttgtaatctttccaaataaaaaatgaggataataatagagatacttatttgtccaagtaatagtattaataataataacagacacgtcaaaaaaaaatattaacagagagatgtaagttttaaaatataattattattttaaaatgacttcaaaatataataataattaataaacaatcttgttctattcgctagctctatatatatgttcaattctgtaaatatcacaattgtcaacatcaaaatatacattaagctgaatcttaacccatttcagaaaaaaaatgttgaatcataacaaaagaaaaaccagataatttcaaaagaaacacaaaagttacaaaacaatttttttttctttttacaaaaattcggtatgtaaagaattttagcattttgatgatttttttagattttatttacataaaatgcaattttttagtatatttttatgttgtaatattgttattttgttgttaatctttttgttatttgtatattaaatttttttatgttgttatgatattgttttcttgttactttcatttatttatttttatatttttataaaatattgtaaaaatatataaaaaaaaaaatatttgaaggtaaa

SEQ ID NO: 76789 - DNA, 566 bp, Cannabis sativa
cactattttttacgatgcagtttctgcggttttttagttttgcggtgttggtgcaatttgaaaaattaaaaaaaccgcatatacaatttagtttgaaaatggtcaaaacatacaccacccgcaatacaaataccctaacaaatatggggtgttgtgataaaaggttttttttctttatttttttttttttcattttttgataaatatgtatactaagagttgtgtgtgcctgcttgtaaaaaattataatatcgtgccatgccttccaagtgagttcgttaaagaaaaatataaatcattcagctcgtacattgaagaatatgaattatgttgtaacgtgctaacactaaaattacatgtattttttatatttttaattacttttgtatattttttcaacaatacttaatgtaattatataaaaacaattataattattaaaatctaaatacttataaatactttagtttttaactcaactttaaaataaattactataattttatattttctaataattttagttaaataaatataaatactcgattttatatttgaatttatat

SEQ ID NO: 76790 - DNA, 2145 bp, Cannabis sativa
tgataactatgtcatattcaatgttgttattattatgattatttttaataattttctgttctcactgttctgagaatgatggttctcattttactgttcaatgtggacccactaatttttttgactttgttttgcaaaaggaagttgatgaaattcagaaaagtaacctttttattgctacaacagcaatcctattgtttgaatatgtctttaataaagatacaaactgattctttctttattaatgtatccaaatcaggacttaaacaattaggagttaagcaaacttttaaattcaagttcaacgtcgtctatattcgtgttctaccagagcaattcaagctctttatgtataagctgttaaattttcagtttatgatactattaggtttagtaataagatctgcgtgttcacggtaccatttttggtcaacatggagggctcattattgttgtgacttttgtatattaagagcatgagtttgagtatcataaaactgcacttggttagttgcttacctctgtgatgatgtaaactcgtgttttgtgtctttcctacagaaaaataaacaaagaatatgtgtataacttggtgctctctctctctgcttattattttttttttgctctaggtctctgctgataagaagtctgatggagggaaggagaatgtagctaatgaagacaatgcacaaaaaacatcctcgaagaagggccgtaaaagtgaacctctgtcaaggcctgtgagttttcaatgattatatgtggcttaatcagcattcattttgctaggagttaataaattggccaatttgtaggtaatttgcatttgcaatgacctatatgcacctgccttaagaccattgcgtcaggtggcaaagtaagtctctcacttgtcagttaatatatcacgcacaagcaagactttcttatttgaattttaattttgactccgcactaagtatttgcttctctgcagggttcatgtgtttgttcaaccaacagttagtcgtgtagtgagcaggtgatagtttttactacgcattcacattgcttatatttttattgccttttcttgtgtttcttatattagaatttgtattttgctatttttatatgggttaatcacaggctcaaatatatatgcaacaaagaggggatgaaaactagctcaattggactcactgcacttgctgattatacaggtatattacacaactccttgactatggcatcctatcacaactggataaaaccagtcatataagccaaatcttctgtagttttatttgtcacttttgctgtgacctctatttaatttggtctatgtgtggcagaatgtgacatacgctcatgcttgaacactcttcagttcctacacaaaaagaaggaatccctcaatgtggtgatttttctctttattctcacccttttatcacagaccgttgtatttaatttttgtggatctctgatactagcttacttctttttcctttttctgttgagtttgctggtttattttactaaagttcttttctgggttgcagctggaggttggttctcaagtggttggacgaaaagacatgtcaaaaagtgtctttgatatctggaaagaggtgaggtgctgaactaaattcctttgccttgcttttttaattgttaatgacatcatttttcgtgcttacatgtggtgatgatgtactttatttaggttttccaaaagagaaaaccgaaaagagaaaggagatccaataatagtagtcagaccaattccaatgagtttgactctttgcactctctcatttctagccggtaagaagcaattactgcaagtgttgtttgctctttctcaagtcacatattaagctgaactgtcaattactttgcagtggtgactatgatttaatcatggatggcatacatgaaaatattttgcagctgcattatcatgacccagtgatgcaaaaaactgtaagcctctcgatatgatctcactgaatacagcctaaaatataaaaatagaaaaacaattttgacttcatactatgttttttttgaaggtcaaatgctttgataatcttggagtttctgactacatgcaccaatatattatgcgcactcaacaaatgtctctttatggtaata

SEQ ID NO: 76791 - DNA, 679 bp, Cannabis sativa
aacccaacccaacccattttttttttttttttgtagtaatgagttatgttaggaaaatttacaccctacactgatttttcccattttattttttttgtagtgttacacggtaattgtaactcttttagtgtttttttttttttaattgtaagtctaattaatttaacttaataatatatatatatatatatatgtttatatataaaaaaataggtttgtaaaagttgattgatgtcttttacatcacttttatgttaaattttttattttattttgttacttaaatttaaaatttaagttcaatcactcacatgattttatttttaaaaatttatatatttatttatatatatacctatttatatatgtttagttgactgatgggacaactttatttttacttcaatttgaaattgaagacaacccacccacgtgatcctcattcccaaacttatatatgtattttgtttctctctctatctctttttgtgggttgatgtctatagaaaaattcttgagattggtgtcaagataaagatcatcaatcaagaacttcacataaaactcttctctctattcttcaatgtttcaaaaacttacaaagctcattcatttctttcatttttttacttgagttttgagagagaaaagtaagatatatagagagagaaattttttg

SEQ ID NO: 76792 - DNA, 613 bp, Cannabis sativa
ttttattttttaaatttaaaaacaaaaaacattaaattttgttttttttttctttttttaattaactaatgttttttttttatgaagagttttatatttttattgtgaggtttatgaatttattttagtgttgtttgtgtgtgcttgattggattgcttttttattttgctcattgaaagcaactcgccactattcttaatttgagattcttagttatggttattctctttattctcaacaacataatttttgttatttttgttgtaagatttgtatactattgttggcatttattattatgatcatgatgaagaaaaagaagtgtatacttttggagacgaaaaatatattgccatatgtgatatcacttttttggtgcaataattaagcaaactaaaaagattataagatcgcctcaagcgtaaattagttctttaagtttcttttaaaaaaattcaaaattttataattctcacaatacaatgtcatattttatactatatcatcattttttgtacaataatttagcaaactaaaagcattaccattattataaaaaaccgcgcgcagcgcggaataattccctagtttagaataactttttcctttttt

SEQ ID NO: 76793 - DNA, 749 bp, Cannabis sativa
acattatctgcatggtatcttatgtattgcaaacttcttgaattgtgtggaatacactattagatagttgaagcttatgagtaagagttagaacttttgtatagatcttctcccaagttgatttgtgttttttaatcatttctcactcagccatctaataaggaagttttccttattttttctttgcataattataattttgcttcacaaaaaataattgtctccttcttccttccatgtttgctaggttgtctatggagaagacgaaatagcataccaaattggtgaaaccgccgaaatactttcaagtggttatctttgtgcaacaccccactgcgttcgggtacttaatctttcccaataatatgtgctcatgtacgatgttaacatatcaatccaagaaagaagcagcagatgttttctattctttatcctctttttataatgttacaattagcgatgcccctcaaagtatcaaggttctccctacttggcagtatattaaatacacttgagttgcatatcagattatgttcttgaaaaaaataattatatcattttagtttaatcatagaagcgtcatgattttaacaactaataatgttttaatgtttgatcacattttgaattggtttagcatgtccttaggatatataatgaacttttttttttgatgttagaaaccctccacctcttttgtaacatttgtttaccttttaattttaactttttatcggtattcccctaaa

SEQ ID NO: 76794 - DNA, 738 bp, Cannabis sativa
tgatgaggtgatttagatgaaaaatgacctgatctatacaaaatttggtattggacgtgctaggataatgacttcattattatagagactcaatagatgatcttgtttacttttaggataatgacattgaatacttgtaactgttttaaagattgaatggaaggcatagagaagggggaaaaggaagaggactcctcttcacccatcgattttctttgagctgttcttcaccgaaatacactcgcgatgaaatcagcctctcactcagcgatgcatatggaaatcaggtaaaatattttcatttgaaatacaaaattgaattgggggattaattaattgattgcctaattttggcgatggaattgaaaaaggtgtatgctccttgactagacgatccacgatcgaagacattcaagcgttgcttgattgatacatatgagatatcagggtcttgtacttattagatctgatatctctacctgtattgtaccagagtggttatgatagttggaaatcagagaagcatctctgtggtagagaagttcaaggtaaaatctaatttacatgagatattgtttttgttttctatttctttaatctaatttgattaaaacaatatatcgcatgtgtttggatgtagaatcttcatgattcttaaatataatctaattttcaataatatatgtatattgcattttttttacatttgaatatgaaattaaatatttgttacgatta

SEQ ID NO: 76795 - DNA, 653 bp, Cannabis sativa
gagtttttatttttttatttctgttacttttaacagagacgtctttcccccgtttctaaagcatcaacaactaaattagaagtttttgcccaattaggacagaatgccaagaagatgtaccgaagacccattttaagctcgaggtatgcattttaatctcagatagactttatatttaatctcagctgaatttgatgattgagttttatatactttcttaatcatctcttaacccgaataggattttggtaattgattaatactgtatttagtgtaattaaattgataaaaaagcgaagacatgtgtgttatattatacttaacagctaccaagcacccataatagaattttgataattgggtaaatattgtgtttggtgcaattaacttgataaaaataaatcacattcttaatcatttgggatttaggatactaaaaagttctgagagtgttttaatatcaaaaagtatggaattttattgatttgttgcaactgtggtttatgcagtgttgttttaatacctactttcacaggcagggaaaactctaagccaaagaagatggaatgttgctttctgaagatggtcatctcgatatagccgaagctcttagaaggatccaaagaggggtaccctttttttttttttttttt

SEQ ID NO: 76796 - DNA, 1881 bp, Cannabis sativa
ttctcccatgcggcattaaatgtgaaatgactgttcagataggatctgacacctccaagagatgctttgttgtagctttgctctccgggattatgtgcgactcacgtgccttctcagggaggcacgtctgaggctgatccctatggctatagggacttagctgaaatatctaaacattaagccttttcagtctacgtgtcatcatccggttggtccacgtattttgggcaaaatcaggggcaacatttaccccccaagccttgtttggtgaaaaagtaaacaaggcttgcttagatgcctacggttgccttatcagcttcctgtcacgtgcctcgggcgcgtggtgacatattaatgaccatcattactacagttatttgctttttgcagacaacgattcgttttctatccatttattgatacggtgcataaaatgagtgtcagacgggtactcaaacattttctaccgccttgatgagtgtttaatcaaaccgttggatctatagaattcgaatcgattgccatcctgaccgtacgatggtggctgatcacagttgtctcacacctgttttggcctataaaagccacccttattacttcatttagttactttcagcatttcaccaaatttttcttaagagttttttagagagaaaagaagctttaaacaccattgattccctgctcttgttccttcgacgttgccagtcttcgttttaccagcgatcaacagcaacctccagccttcaaacttcatgtaagttcttcgtatactgtatacttgctcactgttcgtttatatagcacgtttttatgatttatgggttggatgtttgaacttctgggattggtgttgttcgagtttctgaatgatgtgttaaattcctcctttttgtgtttagattactttctttaactacgttttcgctgaggaatcatcctcatcacgtgtaatgaccactttagggcttagagtagaccttgccttttcggttttatcctttttcccctttctctgttcctcttttttctccttttgtttgcaatgtcactacctttgggattcttgccaaggaaaacctcttggggctttcttatttggcaagtgtccggagggggcctctttccagcggtgaggggacccccattcccttttttgaacattagggtttggtatgtggcctaactgctcgatttttttgattttcagaaccaaaatgtctgcttccgcgtccggttgcaaatcttccaagaaagaagaagctcgtttcgccaccctggaggaggtcatgcagggctctggggcccaagaaaattacaagtccctcgccaacggatgggaggcggctgagctccactccacactgacctgcgctcaccagctggagaagatcgtggtggtggcaggcatcaagccttcagtctctgggacctaccaccggctgcctcgggatgaggagactccctaccacgattacgggggcttcggagcttagagccaaacccacttgatgtctggggctatgcttcccctccaggattattttataaactttcttgttgtcgttggccttgcgccttaccaactcatccctcaagcctaccgcctactttcaggcttattcattttttacgctgcccggagctagggctcgcccagtccgactgagatattgtatttttctgaacttatttccatccccaagaagggggataagtttaaagacggtttttatcgccttcggacccatcctttgaatgagggttcagtccctttcaactatcagaagcatgtgaaggaataccgtcaccgcttcttcttttcctccggcgtccaagccatggaccgcccggaggttctcacagagtgggttaggatcc

SEQ ID NO: 76797 - DNA, 812 bp, Cannabis sativa
taattattatatgttattattgtgttgtatgttatatagcaataaaatttattattaatttatctaacattatatgcttatatattgggaaaaagaaagaccaagacttacaaattgtggtatattagtaccagagagatcattattcgatcaagagaaaaggagagaagagcatcatatacatatataaaggtatatataataaagggtatggagtggtcatcatcatcagaaaattacataggtttaacaccaataagcttcttagaaagagcaggagatgtttttggagatgaaacttcaataattgactatgatcataatatctcattttcatggtctcaaactcatcgaacatctcttcaactctcttatgctctcatccatttaggaatctctccccatgatcttgtaagtcaatattatacatattactttctctttcatattttatatataacgatgaaatgatctagctactactcatgaatttatataacaaggtctagtttttatgatgatgatgatgatgatgatggtatgatttttattgatttatttatttgataattacttaagtagctgtgtgtatattaatgtagatatatggacatattatattataagatatttattataactcttttgtccctattgactagactatatatatatatagagatcatgtaatatatattagcattgctatagcatttcaattaattagtaatattatttataaattatttttaaaattatatgagagttgatatattcaattatattaataaggctatgacaataaatactaa

SEQ ID NO: 76798 - DNA, 693 bp, Cannabis sativa
tattgaattttttattttttgagaataagatgaaattcatttactagtgcaaatggacatcaggtgtacaaattagacaatactcaaatagctgcacatatctcacaatttgattactcgtctgagattggtacatttgtttaagttattatttatttttattttttttgaaagagtttaaggtattattttattaatacttaaaaatgacaaaacatttacaaaaatacgaatttacaatatttatttatttttttattgattatgttttttatacaaaaatgcggaccgttattttatagttgtcttaaaaaaaacataattttcacgatactgctatattatattatgttttcacacgttgtgaaaataacaaaataacaagaaaaaaaaaaataatatcagtaaaaatgtaaaataaaaaatctgccaaaaaaaaaaccaatttatggtactttgtgtaaattttcatgtatatatgtttaattgatttagttttcttgtaattaaatttaataattaacagctcaaaaactttttttttttgaagaagaaattataaattttatgggtttttatacttttttttttctttcaaaaatatgactttttcttaaaaaattattttaagaaaaatattaaagaaaaaattgaaaaatatgagaaaatcaagtaagggtaagcatataccct

SEQ ID NO: 76799 - DNA, 670 bp, Cannabis sativa
atgaaagagatgatgagagaaaagatactgcagaaactgaggcaagtagtggcaagagtacctccgaatcaagcacatgcattgatactgagaaagaacctcgcggtggacataatcttcaagaacagaaatcagactcggggaaggggaaggggaaggtaggcgagccctcggaagtttccaatcccaggtagaatcaggcttaacaccttctcagatggaggaatatctcatggtgaccaaagttgaaaaggatggttttttggggtttaaactctttactgcttgtaagttgtaactatcttctggcaacatggaactggaagaaatcaattagttgtggtgtttttccaatctttaagcaacttttgttgcatgacaattccaaagaagtagctaaatcatggtcttgattattgtagcatttttataaaataaaatatattgatgtattctttatcattgtccttttatttgcctattatactgaaataacagtcataaatgttcacttcaaacacaaaaacagaattagtactaaactactaattatcgagataaaaaacttctaattttttgataaaaagagaagaaactctatctaatttttgcaaagtatatgaacttgaaagaatataaattgtgggataacaaaaaaataaattaattt

SEQ ID NO: 76800 - DNA, 781 bp, Cannabis sativa
tggaggcttgaagcggggacgttacagtaagcaagaagatgcaaaaagagttttggaatcgacttttgagtattttggtaagattgacatacttgtcaattcagccggcggaaacttccttgctttatcagaagatttgtcccctaacggattttgaacaggttggttaatgataaaggccacaattaatctccaacataaagtttaatgttgtggaatctatctctgttcaacaaaccgcctgcaccgcaccacaccgcataaataatgtagtttgaaattttttgcggtgcggttgtaatttgcaatttgtcaaaccacaatgcactagatattataaagataacaatttttacaatatgattttttttataagaacaaatatatgtaatatatgttttaaaacttataagatttttcttttattgtattgttaaaattttataagattgatttttgaatttttattataataatcagtaatgataatagtgtaaactacttaaactgtatcgtactacaacgtattttcacggtgtagtttttatgcttttaagatcttgcagtacggttgtggtttgaaaaattagatatgcagttcggtttgactttttctaataagaaatattaatttgtcattatttactccaaatgtgtcccatgaaacaccatatgactccttacaaatttgtattttggatttgaatgattacataagaatgtcccttttgattatggtttgcagtaatggacattcattcagttggtacattcataatgt

SEQ ID NO: 76801 - DNA, 960 bp, Cannabis sativa
atatgcccatgcaagcattgtggggttatcacacacgtgcgtttctgtaaacatatccttttggcctttgcatgattgcatgtattttataactatagctcatgtggaaccaacacagctagccaaccaatcaaattcccatctccatcaaaaaaccaaaaaggttgacacaagaaacttactgtatcacgatgtagtgtcttctttcttcgctaattatttttttttcttatacttttagtttattttgtttgtaagataatttattattttgagtatttatgagtttagtagagtatgaaatttatttattttttcagtaacaataaaatttatcattttttttattattattatttattttgaaggtatgtataacgctagataaataattaaattattagagataatttaatatttaattatttgtgtatattattataggtatattaataataatatataggtaaacatattatagcatattgtttaatttattaatatcatattattattattaatactattattattatttattatttaattattattattattagtagtagtattattattattattattcttattatctacgtaggtatgtatatatatatattttttttttctttttaaatttttaagttgttaatctagggttatattagggttagaactatatataagacgtttatatgattgtttatggtttagagggtatagaaacgggtgagaggcagagagagagagtacagtgtatacgatataccgaaaaattttcgtttttcaagtggagtgcgacctgggtgaaagtgaggatttgagatcacttatgtacgacctaaggaagctttttaacgtggtataagggtcagaggtccctgttttgagtttcgccattgttgaagcttcgaagatacggttcttgtaacaaacccggatttgaacgtgtttaag

SEQ ID NO: 76802 - DNA, 591 bp, Cannabis sativa
  modified_base (563)..(565): a, c, t, g, unknown or other
tcgtctcttcgtctaagcttttattttccaggtattctaattatttggcttgaatttcatctatttctgattctgttatgtttttatagtcctactaacgtgcctaatttgcagtagagcttccccctagagcactagaactgaggagatagtcaagaaagaagctcaatacaggaccttctctgaggaacaattaaaggttggggacttaatgatgacctaacttctccgtagatctggcttgattacaaaattccaaagcattgacatgctcaacctctgaggacaacgccaacccccagggaagtaaaggaggctcttgccactgacttggtcgttataattaccaaagcagcccaaaatgacaataccctgaactttgattggatgttgcgccatcccgatcctctatttgaggaaaaagagattttggggactccaggagccaatacttcgagaagaggtaatagacccttctgcatccttcgtacccacagtctgagtcgcatgtcttggaggatcagaaaggatttggcaaatatttctgttgggttttatgcccnnnataaaactctttacaatctgattagt

SEQ ID NO: 76803 - DNA, 585 bp, Cannabis sativa
caatcattaagcataatttaaataaataaaaaaaacgtgctcaaaaaatattctctgaaagaaaagggtctaaactaaccacacatgcatttcaaaaagaaaaggaaaaaaaaaaaaaaccaccacgatcaatcttatctttttcacccatgaagtgccacgatggcggcagttatttttttcgtctttaaaataactgaagaacgtcgtaaccctatggttagattatttaagcactgttctgcctttgtattttgaaaaactggaacgtaatagcactagaacactattgctcttgtaaaattttctctcaagagaaatattgcttcttcttccaaaagtagtgttgtgagttaaaaacacaaaacactaaagtactaagtgtgagcgatattcacataataatatatattgatacaatggctaggacatcactattcggacaatcagtcagtctcaacgccctccgatcatacattgctgagttcatctcaaccttcttctttgtcttcgttgttgtgggctccaccatgtcatcacgttagtactttcttcttctaagcattttcaattacagtatgaatt

SEQ ID NO: 76804 - DNA, 3958 bp, Cannabis sativa
tatatgttctggccaaactaaaccgcgagagttggattctacatagagcttgttataaaaatctcatttcgcgcttaggtcggcttacatgtaaacgacttctaatactttgaaaagattttacgagatcctagatttgtaatattattaaattcaaggtgtaaccaaaaccaatattaaatatgatattgaatttatatatgagttgcatcacttttttaaaaagtggtgaaataaataaataatgaaaaatgaaaatacacaaactttggaataaatacaaaatgagatggtccttttctttttttctttttcttattctaacataacaaaacaagccaccattattgattccaaattcttctccaaatccgtaaaaattttgaagagtttcttcttatttgtttcatatttgattaaaaattaggcccagccgcaacaatttcctcagtcaaattactgtcttttccaaccttgtagttcaagaacacctcaaagttgttcttaaacaaaccaccaagatggagtaagctatccttgtaggcttgcttgtctgaccactgcacccaatcacaataagaaaaaacaatacaatattatgatttattatttgtgccattacatataaatgttcaagaagagaaaagaaagaaagaactaacttacagtgtttatagggtcaagaatttctgatgggacaccctcaatctcagttgggatctccaaaccaaatacatcagttttggtgtagtttgcctctaagagagctcctgagtgaatagcatcaatgattttccttgtgtaagccaacttgatacgactaccagatccatatctacataacaaaacaaaacaattcattataaaatcgaaactaagtagattaaggactagtaaaacacgtgttagaatttaagataagatgaataaggttttatttcaaaaacaattgacaatgaaaagagtaccccattcatcttacatatgacaatttattatgtgaaactaactctaatacacactcctcacgtttgggtttggaaagtgtgggtataacaaacaacttttaagagattacaagaccaaacgtgacaaatattgggaaatttgtagattttgaaacaagtcaaagactccaacactagaaactggcacacattggccaaaaggttccaaatggaggttaaaggggagacaacaaaagtttttaagtttggctcatctttttagaccggtgacactttgagctcacaatggatcacaaacgactctttaatgactcgccttttggactagcggtactttgggcttacaacggatcacaaccgactctaataccatgttagaatttaggataaggtgaatggagtttcatctcgaaacccattagcaataggaggagtagctcattcatctaatatatgaaaatttatttccacacattaacaatgtaggactaagacaacaatttttatcataccttccaccagaccagccagtgttaacaagccacccggtagcgccatgtttttgcatcttttcagcaagcattgttgcatatcttgtgggatgcaacattataaaggctgcaccaaagcatgctgagaatgttgctcttggctctttcacaccctcctctgttccagccacctatacaaatagcccatttagttaattaataagaccactcttaccaattatttcatgatgaaaacaaacacaggtcaaataatgatgagaaagtaccagagcagtgtaaccactgatgaaatggtacatagtttgggccaagctgagcttgctcacaggcgggagaaccccgaaggcgtcgcaggccaagagaatcacattcttaggatgaggaccaacacagggtattttagcatttggaatgtactctattggatatgcagctctagtgttctctgatttataccataattaattaacagattaatttaattagtcacattaacttatgtaaataatagcaatggatgattcattaatttttttacctgtaacagatttgtcagagtaatctacttctcgagtatgctcatcaaaaaccacattctccaccactgcaaacccaaaaaacaatgattaaataagtattattgattatgtataaataaaaactgattaaattagaatataataataagtacaaaccagttccaaacttgatagcattccaaatatcaggctccttttccttagacaaatcaatgcacttagcatagcaacctccttcaatgtttgaaacaccattatcactccaacaatgctcatcatctccaatcaaatacctattgtgatcagtggaaagggttgtcttcccagtccctaattaacaacaccaaaaatatcaataaattaagatatataagacctttctatgtattaatattcttttttagatgtacctacctgataatccaaagaagagggcaacatcaccatctttgcccatgttacaaccagaatgaagggagaggatttggcgttggggcatgagatagtgcatcacaccaaacagtcctttcttcatttcaccagcatattgggtgcccaaaatcaccatttctctcctagctagattgaggtctatgctagttgaagaggtcatgtagtgagtgtaacggttgcatgggaactgaccagcattgtatattgtgaaatcaggggtcccaaaatcctccaactcttcttcggtaggacggatacacctgacaattaatgattggtacaatttaatattggatctcgtatttttaaaattaaaataatatattgtatttgtgagttcttagttgtttagtacttacatgttgtgcataaacagagagtggtaagctctggcagatacaattcgaactttgattctgttttgtggatcccaattcagaaattgatcgtttacaaatacctgcgttaattgttcatcacaaaatattatcaacacaatataactccaaattagtctctaccttaattgttagactttttttttatttatttatttttcatgtattaaatctatgtcttttttttttgagagagaaatgattcgaagaaaactccaccttgtaagagctaaaaactttacaacaaggagagggaatacaaatacgtattcattcatttgttgcaccatggaaagtaaatgactaaatacaaataggataattgggctaccaaatcttgctaatagtagtcgataaaataaatttagttgtaatttttcatttatttctagattatttaactttttgacctataataagactaaatgggctttttaaatttatcttctataccggttaacttaatttgtaatgactacaaggtctaacttcttaagctttaatatagttacacagtttattcgaaaaaaaaaaagttgtgggcgagtttatgccgaatttgcctaaatttgacgttgctataatttatttggaaagaaaaaaagaaaaaacagtatgatctccataaacgtgcatttcccacaaaactaggatttcctacttttcttctaattttccattttttaaaataagataaataatatagaactggataaggatacccaaaagctgatttggagtttaactagtcaaaacccacctaagtaacataacacgtactcacttaccttaattaaattgccaaattcatatataaattttgtgtgtatactaatactataccttgtccaaagaattcaagtaatcgacagctctttctctgttgaccaaaaaagtttgctcgtccatttcaatattaggagagccctttccccaccacagctcattttgagtggtgtcatctttaacaacacgcttgtctcgtggagctctacctgtcttagccccagacagtgtggccaatgcacctgttgacgttatgaacgaacctttctctgacttgatagcttgttcatacaattctgcat

SEQ ID NO: 76805 - DNA, 517 bp, Cannabis sativa
tcttatgaggcaaggcaaggaaggtgagataagggttttctatcttcaatgtgagagagatatctaccaaatcaagcaaaaaaaagtttgccaccctcaaactcaattagagtttggtgatgaagaaaacttcaatctcactctaaaaaatgatttttttttttgttgtaattattatcattaaaaaatatactcatcatgttgaggcatataggtgattttctttggtctaacttaatcataactagtagtagtagtagctggtgaaagtggggacatcatatgtcttaagaagtacacatttttttaaaatttttttttgacacatattggttgaaaggatcaaatatgatacaaaataaataagcttgtgaaaagcttttcacttatggaaatgggaaaggaaaaaaaaaagggggtctccaagtagatgataaaaaatgcttgtgatgtagaaataaagggaaatatgattacttaaaaaagctttcaagttttggaagatccaaagataata

SEQ ID NO: 76806 - DNA, 602 bp, Cannabis sativa
actgtagcgtgccttagcattagggcgttacactctctctccctctgctctctcccgtccctctacatcgacggagcgtacagcagcacccgccagtcagacggagccacgtacgtacactcgcaccaactggtccatctcggtaatatcctttccaatcgcaccacctcaacagtcaacaccgcctaccagtcacaccacgtcggcaattggaaccatcaccaatcgacgcaccatcatctcaggtgccgcctccaacaactagcgcaacccccgttcgtcaatattattttcaggctatctctatattgtctttcatttgtatttatctattgtgttgttctttaatttgagatgtgtaaggattctagttttgcatctggtttgcagatatggtgaatgttttgagaggcaatctattttttttaatgtgacggtacaaaattatcagctatatagttttcactattgccaatggtttgaaaccgtcgataaaaaattttcgtcggctgttttaaatcgtcgcttattctacctaattttgcgacgtcaaataggcaacgattatagagaccgatcgacaacaatacattagtcgactg

SEQ ID NO: 76807 - DNA, 1025 bp, Cannabis sativa
ggcataatagtcactctgcattccaaggttgttggaaaagaatctcgtaaatgatttgctccagctgtcaggataaattctgttagcattgtattcctaaaattcctttgctgtaaaatatctttagccacgtgttgctctgtaatttgtactctgtaattgccctgtattcattcactttgtctataaaaggaaatagaatccatcagcatcatttgagctgatttcatcaaataccatatatgttagtaattttacttggtatcagagcaaatttaggcgcttgccatgtcgatccctcaagaacaaatgacaccagcacagtcagaaacaaaccctgaaaatcagggtcaatcagctcccttgaatgcgatgattcagccatcgtctgcatcaagtcctgctccgattgctaacccatttagcaacacgttgagccagcccttctctctaaaacttgatcgccacaattttcctctgtggaaaactatggttaccacaatcatccgtggtcatagactggatggttatctcaatggtaacagaccacctccacctgagttcttacctgcaagagtagctgaagatggaacacctggatctggttttgatgttaacccagagtacgaagcatggttagtccatgaccaactcttaatgggttggctttatggatcaatgactgaaggagtagcagcagaggtaatgggatgtcagtcagctgcctcactttggaatgcccttgaagagttatatggtgcctattccagagccaacatggatgatattcgaacaaagatccagatcactcgcaaaggcactcagtcgatgtttgagtatttgagacagaaacgcatgtgggccgattctctggccttagcaggtgatccttaccctgaaaaacacttaattgctaatgttttatctggtctagatgcagaatatttgtctatcgtggttctgatagaggctcgggaacatactacatggcaacaattgcaaaacatgcttctcagcttcgatgg

SEQ ID NO: 76808 - DNA, 550 bp, Cannabis sativa
  modified_base (523)..(525): a, c, t, g, unknown or other
aaaagaaaaagaaaaggatgaaaataaaagaaaaatgcaagaaagaagatcaggcagtagctagcaacggatatttaaaagaaaacgtagttttttcacaatattagaaaaaacaacctttgagctatcaaagttatcaaacaaaaatacatctagtttttagaaattggtattaaatccaattaaaatcaatggcttgctaagagaaatgctacaagcattactagctagcacgtatcacttaattagatattatattgttattggtataattaaattatcgagtattttaattataaattttgttgggataaaaataaaaaaatttatagtgtgcatatatatagaaatatatataactaggatttttttttttttttaaaacaaaaaaagagttagtagtagttagctgcatgtgcatgtgtggtgtgttgtcgatactaattgggaaacttacaaaaatactggaattttggttaacttttacaaaaatactgtcacacggaatttttttcaaaaatannntgtttttataaaacaccagtaaaac

SEQ ID NO: 76809 - DNA, 2741 bp, Cannabis sativa
aaaaaaaaaaaaattgtgatatttaaagataagattctttatgtatttttgtgggttaaaatacataaaaaaaaaaaatacatatttttttgtatatttgttatgggctacacaattactacattttatatattgtaaaacccaatgtaacaattccatttcatatgagattttttttaattaaatataaaaattcaaattttttggagacacaaatatttacatatttattacacttttttactataattcaaatatatgatttaatttagtatgaaataggaaagaagaagaatgacccctttttttcttttaaattttttggatgtattatgtgtgtatatatatatatataaataaataatataaacataaatttttgtcccatattttaacattttcttttgtgtttttggaaacaggcagctctacctcaaggaattgtcccctttgtctttgctaaggagtacaatgtacaccctgatattcttagcacagggtaacaattttatttattttttattctttttaaattaaaataaaaaaaaatacccaattattttttttaattaaatttttgtccttttctaacaaaatatatatatatatatattttttaattttgcagggttatatttggaatgttaattgctttgcccataacattagtgtactacattttgttgggaatatgaagctgtggaaaaaagcaaagaaaatcaccattattggctggcctttaattaattataatttctctatttttaatgtggaaaagaaaaaaaaaaacaactttatttgccagcaagaaaatgagtgagaaaaagatcaagaaaaaaaatgaaaaagaaaatgatataatgtattccaagttggaattttaacaaaaggaaaatttgaggtggaaaaaaaaaaataggactgtatggttggaagaatgagtctttttctttcttattatgaatgagttttttttttttaatattttggtagtagaaaaatttgtaaaatgattatgtttgtagtgaattaatttataaaaggagaagagaatgtttccctatttattaatttatatatttttttgtttgtttgtttgttattgtttttattctatgaatttaatgcaaattaagaagaatataaatttaggaagaaaaaacaattggtaaagtattagagttaatgtgatgattcaatatcatttatgtcatgttgtttagttaattatttattttatgtttaacatcattgtgtcattaaataaaatattaatcaataattggatattataaaatactactttgtggcaaatgttaccctagaactatttttttttttgtcaagaaaaatcaataaatgttaaaataataaaagtaactatgttatataaaaaatgaaagattttttatatctaagaatatttattgtctattaaaaaaattagacaataaaattttaatatcgaacaagaaaacttctaacttaattagtttgaagcaccattacttattgattacgatacttttttaaaaggcttttttcatctctatgttgaatttgttatttgattatgatttcttaaccaaatcacaaaaatgttacactaattaaatagtattattaaatattatatatattcataagatgattaatttatcacttaagttaaattagttttgaaaagtaaaagtcatgttccttaattcttaaacatatttatacgacaaagtataaaaggtataaaaattaaggaagagagctattattattattattattattaaactctcttgaaatttataattattacacatatgatcataattaaaaaaaagtgccaacaaaagtattttattttacaattttgttacagtcgtaccttcttttgttatcaagtgtcaactcaaaaatacgtaacgatatattattaaactacgcattaaataagctaaaaaaatatattactacatgtttctgagttgagacttaacagacttaattgatacttaacagtcaaaaagatgtacgactgcaacaaaatcataaaataaagtatttttgcagtcaaatttcaagtgttatgagaattttactgcaaatatctcttattattattattataatttttttttttgggtatgcttttaaattgcatgaattaattagtggtgaaaaaaaggggtccctccattatatataaatatatatagggtttgattttgatatggacttgtttggaatattgttagacaatagtcataatccaaagtttcttcatctttttctttttttctctctctctcactatcttttattttctatctccttattctttttggtaacacaattttgtgcctttttctttgacacctttcattttcaatctttaatctgtctcttgagtgctttgcatatactatcattaaatctagtaaatattcatactttttaatttatatattgtttttttgaatatgtaattttctaatgtttttattatataacatcatcattaataatatgatcaaaatgaatagaggctttggaaaatcccatataaatattagatattattataggtgataacattgatatttgtacatatatattcaaataattatgtcattattgtacatacatctcaaaagaaaatattgtcacataatttaataattcttttagctatattaaaaaaatatatatttttatggtaatatttaaattgttatagaaatttt

SEQ ID NO: 76810 - DNA, 803 bp, Cannabis sativa
  modified_base (738)..(745): a, c, t, g, unknown or other
aaattcaggggacatgatttggtatatgttaaatttggaaaaaattactaattaacttttttattaatgtaactttttttgaatggattaacttaattaaatattaagtcttttaattataattttttaaaagtatgtaactaattataaaataacacgaaaaagatattaaacactattaatatatgctttcgttttctttgaaaaagcactaattaattcttggttggaaaaacacaccgacaaatgcatgggacataatggtattaataataaatctccatttatatataactattaaagatgatgtgccaaaaacacgtgttatttgtgtattagttagtttaacataacacccgtcaaaatttattataaattaattatacattttactttcattaattacgtttaaatacctttcaaaaaaaaaaaaaattacgtttaaataagaacagtgtgatataagttcgctaagtattatctgcatgttgtttaaatataatttatgcgattttttccattagagagaaaagctacagatgtgatgtatttctatttttaaaatattttgctaaaatttaattctaatgatgtaaaatatatgctaaatttcacacaaaagatagtataggctcaattttagcccacaataaatactattttttaattacctatttgccatttattaatactattaattgattttgaagaagatatatttataagatattaaaatannnnnnnnaaaattaattattttgtatattttgaatgaacattaatggtaatgttgacttttatag

SEQ ID NO: 76811 - DNA, 633 bp, Cannabis sativa
cttaaatgtgaaaaaatgccatagaaaagtggcaaacctaaaaatgccatatttttctaactttgttatgaaatcccatatttcatgtaattttcacaaattcttatgtgacccaaaaaagagggcagtgactagtaggagtattcatcaaagtctctatatatagaaaaatatagttgtaatttgtattttctttaaattgtgtaatgcgatgccgtttacaatttgcaatctcatatttatagtttgaaccaaatcgcaccgcattattattaaaattataagttttatctaagtctatatatgtgaagcatagccaaattaatcattttttttacctgattattacaacacaaactaactgtggtcttctctgccaaataataataatcattatagtgattcatacaaatattgaacaaaaaatcgttatttgaagtagtaccacagaattgattcacattcaatattaacttcgaattattaccatacattgttactattattatcttaatggtgcaagatttaatatgttggtagttgagatattatttttaggctaattaataattttttctcctgaactttgacatgtactaaatcgtgccccatgaatttttttggtcgttaaaa

SEQ ID NO: 76812 - DNA, 1137 bp, Cannabis sativa
tccttgtggcgcacaaagacttagtaaatgtttacaagttatctgatccacgtgtcctctctcgactggtacacgtattttgggcgaattctggagcaacacttagtaattatatatattaaggaacggacaagttagtattacgtatatatgatctccacatttataatacaccacctctatattccaaactttagttttttttttttttttttgaaaaaaacaatttactaataattgtcaaaaaaaaaagttaacttaataagaagtattataaatatcctttttgagaaattttggtgtaaaaactttcataaaaaaaaaataaaaagacttgggttataaactttgtttgtttgatgattccaataatgtttaaaaagtgttctctgtatgattaacgattggagtttggaaggaacacaatttataataaattctccttgtcagacacaagtttcagcgagaagataaattatctcagtgaaagttgtaaggtatatctattaatgtaattgtgtattgtaattaatttttattttttttatttattattaaaaattttatttaagtttttctttatttaaattttgcgacatgactactatacaattgggtatgtggtaagtgcaaattgcttattattattctctattacttttttatttttattttgtataataaagcaatttggttgatttttgtaataatattgaaatatctcttcaaaatttaaattaatttttatttagctctaataaagtagttgcatacctcatttatatagttcatttagcatatatttttgttattggtaaaatgatgtattttttagaattcatcaaagaaaccgggatgatatgaaattttcttgaaattatttatcatcttatataagattgaaggatttttattcatttatttatttgagatttttaatttattagatgttgcagaagtgtttcaataaaaaaaaaaattgcatgcaagacaccttatttaaattttttttagtaaatgaagcttaaggatccatgaatattagctaactttccttattaggggttactgtaggaatttttattcctaaaaaatccctacacacagtaaaaaaaacaaagaaaactgaggtcaaat

SEQ ID NO: 76813 - DNA, 697 bp, Cannabis sativa
tttggatttgttttctattaagaaaatttgagatcgggatgctttgattcagctcagatatttcttgtttgatgtattaatggattttgtatatgagtatcaaaaggaaggcttttttatggggctgtcattgttagtttttatatttacgaaatgccctttatagcagaatgtaaaatattgagtggatactgtgaaatttgtcaaattttccaattaattaagatgagaagctttgtttttttacaaagtagttgttgatcctaaataatgggttgacacaagttgggacaggctttttggactagggactcatgtggtctgtttctaagtagttaatctgttgtttggagtatggtcctgattcacttatgtgcctaaataatgtgatgattatgtcaggacccaatttgaatgggttgtttggaaggcagtctggaacaactgctggatattcttactcagctgctaacaagaacatggctgtgacttgggaggaaaagactttgtatgattacttgctaaatcccaagaaggtaatgacttgttctttcttcttccaactattctcatactttgtttgtttattgtattctcaaatgattatcaatattgatccctggactacccttgttctccagtacattcctggaactaagatggtgtttcctggactgaagaaaccacaggatcgtgc

SEQ ID NO: 76814 - DNA, 550 bp, Cannabis sativa
ggtgttgttagtccctgagattgccaaaaatctgatcagtgtttcaaagttaactgctgataatgatgtgtttattgagtttcaccccaatatttgttttatgaaggacaaggtaacaaggaaggtcatgctacaagggaggcttagagatggcttatactagctgaatacctcaccaacatcctctcggaaccagcaatcaacgttaaataacagtcctaagtttactggtgtgtctgttttgtctaagtctaggagtaacaatgatacctcaaaggccgatgtttggcatagaaggttgggacacccttcattgagagtattaaaaagtgtcttgtcttctcttaatgtaatcagttctagtaatgaaaatgtccacttttgtgatgcatgtcaatatggtaaatcacatgctttaccctttaatttatcacaaaaccgtgctacaaaagtccttgaactgattcacacagacctgtggggacctgcacctattcaatcaaacaccaactataggtattacatccactttgtggatgattttagtaga

SEQ ID NO: 76815 - DNA, 716 bp, Cannabis sativa
aaaacaaaagggtgtgttaaatccctaaaggatggggtactaaagttcctaggaatccagtgaaaattacaatcaacgaatacagcaactttccaacaagaccattttccctcaactaacccctgatgatattgatgccatcaaaaaccaccatagcaataattagggtggacaaaattcaattcaatccacacttggagctagctcaagtggccataggtgggtgtgtgagtgttggaggtcctggattcgagtcccagataaaacatgttgtaatatataaacgcttaaataataaaaaaaaaaaattcaattcaatccaattcaaccgaatcaatttaattgtaaaaatttagatattcaattacaattaaattagattgaatgttaaaaattagattattattagattagattagttattgaatgtcaattttaaaatttaattaaaaatcaattcaattcaattaaatttaatgtatattaaaaaattatctatatttataatatttataaaaatatattgttttgtttaataataataataaaaatatttagttcttttcagtatttgtgaatatgtttaatacgatttttgttatgacgaatatagttacgttttttttttatatttattcgtaataagaattatcttcaagttagttatattaaaaaaaatttatcatttaaaataagtctattttatcatttaacaa

SEQ ID NO: 76816 - DNA, 512 bp, Cannabis sativa
aaactgattcgcgtacgatgcgtgcgacatcgtgtctgcaagaggcggaatcgcatgtaaccatgcaagtcttaatcacatgtatctgactaatcatcataacacatagcgatgagctgtcatatcatatttcgggattagccaaatttaacctcatctcattcccgcactccatttgactctcgctcgttttgccgacacatatagttaaaaaacataaaataaagagcacattttaggtaactttagattttttttttctttctaattattattattggaaacgagttggtcctgtcttatatcttttccatactatttttttagtgttatattattatttgtatgattaaatattaattttatataatttaaaaaaataattttgaaaaaatatcactcatcaaccataaaacactatagatagctagaaagtgatgctaatttatcattatttttaggcaaactctaataataaaaagttaaatttagtggttaactaacactgaaaa

SEQ ID NO: 76817 - DNA, 692 bp, Cannabis sativa
ttatatccagccggctataactgtcaattatataaattaatacacatatatttataagccggctaataatgtgattcacttgatttgagaaaataatgcataaatatccacatcttgatttttaaagagatttttaataatttttgtttagtattgataaaaaggcacaaagacaaaagaatgacatacaatacaaaatgatcagccttgatcggaatgtaaactaggccactaaactagacaaacatcaaaagataaagcattgtctcatcaaaaaattaattgagccataacattatgagtttaattacaatgagataagaaatatttaaggaaaacaaagatttatttttaatgtcatacacaatttgtatcaaactcaatgaatttcttattattacttgagatagctaacaccaaacgagacaattaaaaaatatattgatcatccacctaaagccaagcctaagacaaaaaagaacaccttaaggactgaaggacgaaggagttaatgtatattgttaattttggattttgttgagtatatgctcatatataaatatgggatttttctcatatgggtatttgattgtgaaaatttatattttatatatgtacacacatattcttcgtttaagtatgtgacaataaggaaaacacatgcaagctaggttattcaacattggtagtat

SEQ ID NO: 76818 - DNA, 915 bp, Cannabis sativa
acagctaaaaatagatggaaatattaaactgttatcagaatacgagtttagggggttttactactaaaaatttaaaaccacttaaggaggttatgacacaaattatccttttttctttgtactcttttattttctttcaacttcaaatgtggtgatgattgtgtaccttatatattaaaaaaaaaaaaaaaataggtcacaaacaattagggagtatgctgaatgaaagaaaaaaaagaggaaagctatagttaattaatgtagtgagttatatatgaagaataagaaaaaaaaataaaataattgatgttctgacttttttgtgttacctgcaagtcgaaaaggtaataattgaaaaagagaaaaccctaaacaatgtctaagttaaaatagaaaaggataaataaaataagtttctttttttttatatatatatatgtactgtacagcaagagaattgatttaaaatatttcaaaaaaaaaaaaaaaaagagagagagaattgatttaaaagaataataataataataatatttaatagactctcatagaaatagaaggcttcgttgtataaattatttctttttaatttatataaaaaaagtgacaatcatattgaattaacacattatgggacacagttttctgttgtgttttctaacagaggatcttcattctaatgatatgtccacacaattttcagatatatatgtgttatatttatgtgtacacatgttgtccctaaagttttttaacatagacgtagacatgaagacaaatgacctctcacttaaattttactactggtgaaatttaaatttaacattacctctcacttattttactatcatactttcatctcacttaccagtaatttaattgtagccggcaaaagacaaacttcaaagtcaacac

SEQ ID NO: 76819 - DNA, 635 bp, Cannabis sativa
aaataagaaattatatgttagtaagaggaattgccatgaattttactagctactcaatttgtgaggttgatgttgattgtcataaacttccttttttgtattgttcttttactaagtatctcatgcacgctatccattattggcttatagtaatgtcatttggccagagttgtatccgaattcgcttttttggttgagtgctaatcgagatcacaatcttcttcatagagttgtggcggctattattgtgcagtaacaatttattttatttggtagagtcgaaatgcttgtatctttgagcaaaaagtttttttagtttcttatgagaattgattagagttacgcttaaatcgatattactacttgttaataggaggaatctctctaagaaggactaaagatctttgattttgtttattgtgatatttaagtatgtctatcttttgttgttttgtaaatactggtttgtgtagcatttgttctattttgattaataaatttttctcctttaattaaaaataatacttaaagttttaaaatttttttaaaaaataaatataaaatttaagaatattaaaattgaatattcttctaatattaaaaaggctaattaggttttttgccccctgaacttt

SEQ ID NO: 76820 - DNA, 701 bp, Cannabis sativa
aaagaagaatattttcgatttggttgtgagaaaggattatggttatggttctaggtatggctggttatttgtgctttatagtttatatatagcggcgtagtaaagaaaccaggggcctattggatttgggtaagggcgtactacaaatgggattgggaaacagagggctattgaataagattgatgatatagcaagtcgcaacggggtttccaaagataaaagcagaaataaggggcccactccggccctcatgggacacgtgttcatcttttaatgggtagtttggataagaacaacgggttgtgtacgtggattttggaagcttctgctgtctacgtggattgagaaagggtttttcagcattttgtgtctcggattcgggtcattattattatcttttcttgtttttttcgatcatttggttttggttgcatttcggggttttttccaattttttttaagagaaaaatctatatatctatatatctaatataaagtaaagtttattagagcttatgtggcaccttagtggagtttcttaatcctttctttgatttctcaaattttcatatttaaatattttttaatcaatttttttaatataaataaatattaaccatttaatgacttaagtgatgtcctttcaattatttagcaatgacttttggttattatgtttttttatatcacatttaatgac

SEQ ID NO: 76821 - DNA, 667 bp, Cannabis sativa
tgactctgaagtggatggaactgagagtgaaagaggtggattttctgggcatcctccgtgtgatttctgcaaaactccattttatgggaacaatgagctttactcccatatgtctactgagcactttcaatgccatatatgtaaaaggtaaaacataatttatttttaagtatttctgccgatccgggggtatgacatgaacttaagtttaacagaggtaatatttaaacctgtttaatgcagacagcatcctgaaaatgacgactattacaagaattatgatgacttggaggcaagtatttgttgtcactgcattgtttattcattttaaatatctttgttaacttagtggatcactttgtaacagatgcacttccgtcattcccattttctatgtgaagatgaagcttgtcttgcaaaaaaatttatagtctttcagtctgaagctgaaatgaaggtgacttttctaagagcatgggagtgatgtatctttttattttaaggtttatgcagttcttgcttcttgttccttaatgcttttcttccctgttttttcacagaggcacaatactgttgaacatggagggcgtatgtctcgttctaagcgtaacgctgctctacaggtatgtacaatatttttaatgtgttttcaatcatatttggtatt

SEQ ID NO: 76822 - DNA, 2274 bp, Cannabis sativa
aagatgtattcatctctggttcattattgcttagcatactgcaatcaaaacacatattcggcacacattatatacatgtatttgataacctataaagcatagaaacaataggagtaggtgtatttcttttattcttcatataattgtagatgaaaatatcaaaatgttggagtaatgtgaagtgtgaagtggttgataagggtgtctctgcttagctgaaaaggttaagccaactgttggactcatggtattaatctttccttggtcgttaaagtttcatagtcatggagtaatgtcaaagccatgtttgctacaaagaaagaaagaaagaaagaaaggggagaaggtcactttggtaaacttgctcagcacttgcatagttaggtgacgcaataataaatgttacggccaaagtcttcattcatgccagcttcttgccttaaaagcaagcccaatgtgcattgacaaaattgcccctacgtggaagctgcttctagttcatccattgacatgtttttgttccggttagatgaaatgtctaacctaaaacataaaattaaatacaaaatggaaacccacagccaccatgaaatgtatggtctacagtcgcatatcatatcaccgagtttcaaaggttttttttttttttttttgcatattattattaatattattatatcatcatccagctaaacatgtacatgattactaagaaggttagattagatccacaatatattaaattaatccaaattctttatttgttaaaatgggtttgatcaagcagagaaaggatttaaatcgatcaagttcattatatggtgcctatagtattaattagatgttaggggttttttgtttttgtttttttttttttttggttttgtaagaattagatgttaatgtttaaagtaaaggaagctagcaactaactcatacaaattttctaaggaaaaatactaaaagacactaagtacccttatcgtaatttcgttagtaaaatttgagaaatcatgctaaaaaataacacatggtgtttaattaaactaaaaaattacacattgtttaaatatgctaatttttcaattggcttccaaaattacccataactttttagttttccccccttctctctaacatccttctctctcctccttccctctccattcgaacccaaaaaccccgaacccaccccctccattcgaaccagacccaatcgaccccaacctccgatgattccgacgaccctcccgatcctatcgaccccaacgaacgacaaccctgtcgacccaaacgaacgacgtcgaccctgtggagccgaatgaacgacgaccctctcgacccaacgaacaccgaccctctcgacccaatcgatcccagcgaccaaccacacccactcgaatcccatcaacccataaaaccaatcagattaaagagatatttttttttgaaatttttattttaatttatctttaaaatatggcttaatttgtggatgaatttgtggtttaactgaaattgtgatttagtatgtgtttttgtgataaattgtgcaagaaagatgtaggaaaattatgagtttcgtgctgattcttttcgttcctggttttgtaatttttgcgacattgtgcgatttgtgtgcgatattgtgcgattaagacttagactttatgtgttgggtatgttaatcgatattgtgcaattttaagcgatatacgtgatgtggtataggttgtgcgattttagcgatattatgcgatttctatgcgatttttgtgcgatttacctgacattataaattttcagctgttacgctgtattttttagcgattattatgcggttactatgcgatatttgtgcgatttttgttggcagtagcttataatttttgttgatgtcttatgcgattttctgcgatgtttgtgcgactttatgcgatatttgctaattaatttcttttgatgcagatggctccagaatttattctcccattgtcgagcactttcgagggcgtataacttacagagggaacgagtacttcacatcaataaaggctaaatttgaagcttttgacttgactcggaaggtgaaggagacaccctttggagttttttggaatgccagtgaattgaaattcagtggggttattgtgcatcaactgttattaaggaagaagaaaatgagtgaggccaaaaatgatgaactgtggttttacgtgggtaaaactgaagctagatttgggcagtctgagttcggtttgatcacaggcctaa

SEQ ID NO: 76823 - DNA, 1206 bp, Cannabis sativa
aactttttctcttaaagtcacattaattaattacgtgagaaaaatatcacatatgtttgaaaaatcatacaaaatacaatgaaaattaaaatctcatcatatatattgtttaatagtttggcaaaaaaaaaaaaaaaaggaaaagaaaaacaaaaacaaaaaaaaagacacttaggatgaaagttccacactatttattgatgttcacacatggttatatactactactacaaaaaatcttatttttagtcacaacaaaatttgtaattaaaagtaaaaaaattgtgactagctataaattatcattcttatattgtgattaaaagacttgtggtattagtacaaaaattataatttattgtaactaaatttgtttttaattagtcacaatatatatacttgtataaactagtaataacttgtatctaaatactatgttttagtcacaagtaaattttctcttggaacttaaagtacatttaatcacaaaaaaattatgatgtgactaaaaatagcagtttttgtagtatacaataacaaaaagtatattggataattagttatttattcttttggtcaaaaactaaaatataggtagcgttgagtagtatttttgtttttaaatttttattcacaaaaatttttgtttttgaaaacagataacaaaagtgtgctctgtaaattttattttcattttattttttttttaattttatttaatttgatttcggggtcaattttggggtcagggttgggggcagggtctggggtcgtttttgaggccggtgccgggggcagagccagggtctaggttcgagtagaggtcgaggttcgggtacggggccagggtctgggtccagggtttggggtacaagtttgggtccggccgggtttggatgcaggtctcaatgtctaagttgggattggagtctaaaatattgattataaaattgttttaaaaaaaaattaaaaactattttattttttcaaaattttgattcttaattaaaaagtaaaaataatttttcaaaaaattaaaaatatttttactttactaatttaaaaaataaaaaatattatcaaattaactcactcgtaatttatagctctatcaaacaaattaattgtcatgcatgtgtataaataaataaatataagtaaaaggaatacaaatgacatatatatacatatatgtgaatttttaac

SEQ ID NO: 76824 - DNA, 1797 bp, Cannabis sativa
tcattcccttctatatagcattgacttttctccattctcccataaatatcccatgattctcatatgtatcttccccattaactcctccactagtttggccggtaaatactccaccatattcgttatcaacgccacgatctcctcccctaattgattggctccctcatcaatcttgcttcgacctatcagaattgtacttccatgttcaacatgtccaccggaaaactgaccccctgctacatccgactcgttactaactgccttcccagacctgagccattgtgacccaatcatatgagccttcctttgcagattcactttcatccataccccataaggctttacaagttgctcatcgatcgccttttcacaaaactgctatgagtgaccaataacaccacatacaaaacaaaatgttggcacatgttcatattttaaatgtgcccaaaaccaatcttcagcgctccaaataatcttcattcttcgtttaagtggtttggtaataactattgttacccaaattttcaaatattccctccacacccctgaaaaattgttgacatcagattcaacgtaggttccgacatagtttccaatccctttcagcaccatttcagatctatacccatgttgtaagtcgaagacttgtacccatagatcaagtcgaattagaaccatcgttctcggattgtctccttccttcaatcgtttaaagatcaattattttctatcaaacgtcgacagactacctttgatagccctttgaatatctacctcatggtagaactggaataagtatcgactgttatcaagctctttaacatacagccccttaaccagcttccatagaaatgctatcatattttgcatggcttgaaaatccataagtccagcatttagaaatctaccaactagacaccacctcacatcaaacggttcctcctttccccctacaaaactgaaatcaatctcttcatcatccaatgtaatccctgctgcttgttcctctatggcaagacttccactagacgaaaccattcaataaaacaaacacgagcacacaaatcagatcacttagaaaaaacaacgaacagagtaaaatagagcttcgaaaaagaccaaaaaaacatacaaaagacaaaaattggactgtatcaagagatacgacttttttacaaaaaatatttaaaaatcatcttaaaatataagaaataattaaaaaataaaaaataaacataagaaaattaaaataaagtaaaaaaatttttcttttcttttccttttttctttttcatcttcttttttcctcaacaaatcaacatatatctgccacacaaccattatcacagccgccaccatcacacaacatccaccaccattcttttctccccttgtcttcatccaccaacccaaaaaattagttgtcttcatcaaaaaaaaattcttaaaatcattctaaatctaaacctaagctcctatttttatatataaacctaaatctttctttaaactgaaaatcaaaacagttttcaaccattcaaatctcatatctcaaattctttacgaaaaaaaataattaaacaaagctttaatcccaaaatttggatcttgattccttcatttgcgtttacgtggtaaatcgaagcttatgaggatcaattcttcaagatccatcatggatctttcctgtttcatcaaaccatcgtcaccttatctccccatgaatgaacccaagaccaatggctcaaaggttcctgatcgaagcttccaagttcaatgatggaagatgtagtggcc

SEQ ID NO: 76825 - DNA, 981 bp, Cannabis sativa
gttccattttacaatacccctattttaggtttagggaaaaaattaccccctaagcataaaaattcaaatttctccctaaaaattcgaatgtatcatgaaaacctagccccactcattttttatgtcaaaaatagtcaagagtcgtgaccttcgatagagagtcgtggctctaggaatttttacataatgcaattattcaattttttccaaagggtcttttccatggctcttgctcaatattacagaattgataccattttgaaatcctactgcaacgactgatggtattttagtcataactctcttgatataactcagaattggataattcaagatattttaaaaagctaaaagagaggtctagaactttcattcagaaagtttttcttaaaactgaacagattatagctggagaatgttgaacatccaaaacttagaatttttcacacattatatcttaaaactccaaaatttatgctaaatccataaaattcatcttatttagcatgtttcctctcaattcaatccatatgatgtattttaccattaaaacctaaaataagaataaaataagcgtaaacctaaacaataaaatataaaaatactaaaaatacacactaaaatggactctaaaaatacataaaaataaacctaacaaatttttccaaactcatcctttactcgtgctcgagtaaatatcaagttaaactaacaaaacaaacacaattgaacaagctaaacccccatttccatctacattgttttgccactactcatgaattctcaattgcattatcaacgagaacttcaatctaaccactttgaaaattaaccttaaagctcaaattagggaatttaataatataattcacaaatgatcacaataattggattctatagtatatgctcaactcaaatcaaacaagcccacaagccaatttttaatatacttgtatgatttaactttctccaataatgtca

SEQ ID NO: 76826 - DNA, 511 bp, Cannabis sativa
tagaagaaatgcattggttgttgtatgcattattagctaatgacattgcatagataatgttttcgataatttttttactagttttgattttttgatttattcaactaaacaattgttactttcacttcacttcaaaggtgtatgataataagtatgattttaatactctatctttttaataatacttattgattattttacatttttaaatcatacatatttactattttaagcttaaatttaattaataaaattttatcaattaaatcaaattattctcaattttatcaattattttcaataattaaattttattttaaagtaaatacaatttcaaaatacaaagtactaaataattattattaaaaacacaggtactaaaatatttttcaacaaaatacaaaatactaaaaagttatttggcttcataacttaaaaactgttttttattttttaaaactaaaaacagtttttaaaaattaataggagttgtttggtaaaattttttaaa

SEQ ID NO: 76827 - DNA, 995 bp, Cannabis sativa
tgagcccatatcttccatccattctaaagtctccacatcacggtaataattttttcaatctccaaaggtttcaacacatcactaagatctgggagaaatcgaaactattttggggggaaacaccatgaattgaattgagctcgaagagtttttctgacctccctattagacttacaatctcacacatgtaaagtggagtcaacctcattaattagcacaaatttgacaagtcctatccaactaattaatgtggtgtctagccaagttcattctacacggtttccaatcatgtgaagctttatatggatcttttaatttctcgggttttagtataggttatcgttcacagtgagaattcgttaacgaaatgttaaaaatcaaatgtaatattcagaaattttagttaaaaaacaattaaagaaaactcttaaactcactccaaaaaattactgtttcattgatctttttttcaaaaaaaatcccttttacaaataccttgaaggacctatctatagtgtgtatttcatacaattttgaattctatctggtcctctagtttgtgagtgtcaagctgttttcatactaagtagaatagtaactcagataatctgatgtctctagaacttttaataggacaaaaattctctcttctatttgtactttggttgaggtaagttttgtcttcattatatgtatttattgtgtggttgctatctcgtctgcaacatctttgctcaaacgaccctagccgtgatcattgctcatcatctcttgtgtttgtgaggttatgcttacattcaagacgtccatgttaggtttaagtgtgaggagaaaaaagggttaaaaggaggggtgtagggaggctgggcgcgcgaggagacatgggtgcgaagaggcctaggcccgcgagctaggtgcgcggggaggctgggcagggcacgcgaagcttggtgcatagggagatgtgataggggacaaaaacaaaaaagtagggg

SEQ ID NO: 76828 - DNA, 742 bp, Cannabis sativa
ttaatttttttattttaattttaaatatttattacgtggactaattaaactgtgccacgtgtacattatgtacacgtaaacattccaacttggcacttaacattcaaaaatggatgtaaagggctaagtcctaacataacttgagtttgaaaagttttacactaaaattttagaattagaaattagttgcaaaaacttaacgagaggttatggtgcaaattacccttaaaaaaaaataataaatgaaaaataaaacgctcgaatagggaatcaaattcaaagctgaaatttgtaacccttgatttgagtatgggtgaacccgaaaggaaaggggccaaggccaagcgaagacaaggctggacccagcaaaaccaaaatcagcactcaccagcctaaaccaccgttctccagagtccactctcctttcttggcggctctccttctctatccccatcgccattttcatttcacttcacatcattccatcccaagctcccgcgatccactccaacccatcttctatgagacgaaactccaaacctctccgccattcatgaatggagtcctcacctccgccgccgtccggtactccaagatgttgaggaaacccatggccattatcgtcgctccaggtgagtcctcccttctcctcttctccctccaaaaacccatttcttccattgcttcttctcttcccgcagattccgaaccacccgaactttcttcccagctcttctccatc

SEQ ID NO: 76829 - DNA, 548 bp, Cannabis sativa
tataatataatataaaaaagaagatatatatacacatttgtccaaaaacttattttccctttctctaaacactaaaggaattctcatggaaatagctttggataggggtgcacatcgggtaggttttctgggctttcaggtttttgagttcgggttttttgagtttggcttttggaatcttgggaccaaatccgttcgtatggagaccgagttttttgggtgtcgggtctgggtgagtcgtgttcgggttgagacgggtttgggtgggttggatcgggtttcgagttgggctaggttttttttaaaaaaacaattttttcacaaaaaaattacaaaataatataattatacaatatattattatcatacacaaacacaatacataattatacacaataatacaatatattattatcatacaattcccaaatctaggggtgcacatttacacctgaaaacctatccacccgtctcgaaacctgaaaagcccaaaaaatgagtttcaattttagtagaccgggttcgggtgtaacccgattctgtaccgg

SEQ ID NO: 76830 - DNA, 4556 bp, Cannabis sativa
aattttagaattgggggttatttgtaaatacctcaccacttaaagaggttatgtcgcaaataaccctttataaatctatattattgtcactttgcagttcatcatattggacaaataattagcaattttcttagcaaatcatttgacaaaaacacaagaaataatattaaaagtaaacattaaagtacgacaatcaaaagtaattaaatcaaaatgagataataaagaagccgaactatacatagcattaatgatgcttttacaatccgactcaataataacttgatctaggccccgttttttgatcctgctcaaagcttccttcaacccaattacctccgctaaaagaggagaaacgcggccaaacaattgttttgtttgtatcaatttgttccataatgatcacgggccaaccctctaatctcgaaatacaaaaccccaaaagtgacaaaagcatctattattaactttaatcatatcaatactaggaaccgaccaatgctctacatgaacagaaggactagaattcattgtgtttgcagaattttcgtgagcaatcttccattaattaaagtaagacaacgcatgagccaccacacaatttgcaacaatattttaactttgccaaacaagctcattgcttgctttctaaagagaccaacaaattatcgcaacatgacaaattaaagtcttcgaaaattctataactagttgataaaattatcctgaaaaatttgtagctgaaagattgcctagcacctataaatacttagcatctttatgagatgtaatattactattaattcaattcaatattaaattttacttatttattttaataaatattataaaaaattactaattgcccatccaacaacataaccaattgtaaatcaatattttagcattagtcctaaactttatcgtaaaaatcctcataccaaatgttgagtacaatttgaaccatccagtaaaaaatacataggagactacagatgtgttgactgacgagcaattattatttattaaagtcattatgaggcaagaaaatgcggatgaatttgataagaccttagtgctcagttggagctcatccagataaaaaatgcaatcttattacataatcttttacaagaatattacattaattactatttaattcattaacaaaacttagaaatgaaattcaagtagacacaaattaaaaaggaaaataatacaactttatttaagcttaaaaaaagactataaccttagactcatcatttacacagaatcctaattgattcttataatattaatttatataatttgttgagatcactccattataattagatactagtattatctaatatttttttataaatgacgtctctcgattaattaaacacactaatatttttagtaattctcatcactatattgtataattaaaagatagagaaaaggaaattatacacgaattatgttgtactttcgtcatcttataaagatagataatatttgagccagtcaaactttttatttttgtttatttccttgaaaggtcatgggcttatgtaagattaaaagttgtatataaacagaatattctttctatgacaaattaaaatgttgtaaatgatttgacacgtactccaattttaaattttatacaataaaataaacaaaaacacacatttaattaaatcttttagttcaaatataaacaagtttgtatgataatatatgtgaccaaatatactatttgtaggattcaaatatatatttatttatttataaaaaatatatcataatttaattactaaggcactcccaatgagctaaaacagctcattgattctttaaattatagagaaaatttaataaaattgtgcttaagtgagctagctttacttattttacatatatattttttacattaatgaataatacttattaaatataaaaataactatttattgagctaaaatattttattattattatttaattttttttatgaatatgtgcatgtgcaatactattatattttataaattaataaaatattaagaatataatatttaaaaatgtagaaaaaaatgatgtatgatataaaatgaaaaattgaaataaaatagataaaatgaaattttaataatacatattttgaatgataaattagaaaagctgttgggaatactctgaaaatgtaagagtactaggcatccgatccaatctaattagtaattagattcaaaaaattattatccgatccaatctacctcaaaaatccaatctaattactaattggattagattaattttttaattggatatattcaattacatacctaatttttaatattaacttaaaaatatgaagaaaaaaaatacttaaaaactaaataacactttttatatatataagtttaataacccataaaaatatcatcaatataaatataatacaactaaaaatttgaaaatttttgaaataactaaaacgataacactgccaattaataaaatataacaaaatacatgaaaacaaatgtacaaaacaacccactcttacaaatttaacaccaaaaaataaataaccactaaatatatatatatgatatttttggtaaattatctcatatattatttgtttatatagatttaggttaactctgtagttgctataggggtttttatgtgaaattctgtaaaaaaaaaaaaaaaaccttgttttgaagtattaaaatgaaaaaaatctctattttttaatatttttaatatatataaataaatataaataattttttttgatgaatcgtgaattttattgcacaaccaacatattttgtttacaagctatggctttatacatatattgttttgtaacaatctccttataactctctaaaccaatctatatgtcattttgatctatgcaattaggcatatattacacatgtaatcctatttttcactagccatttagtttcttgaaccagcaccttcggatcagtgctctccttgcaccagaaaaacttatttcttgcctgtcagaccttataaaccagagcagcaatgcaagctatataacagctccttttaaacttgctctggttttctctattgatccacctgagtgtaccctgcagtgagttagatttggccctccagcccaactagtctttcaattgctgcaaacatggctgagcaaattagcaattaaaaaatagatgttgaacattctctactgcattattacacagcagacagacaatatcatcaatgatatgaaactgcagaaatctatctcatgttctcatcttgttctgcactgcaatccatagcacaaagatgtgctttggaatattaagcctgctccagacttgtttactgacatgaaaatctctatgttcctgattaagcagcttatataaggaagcaattttaaaatctgaagctgtaaactaatcaggtggcatgatcagcttcacaacttcctttgtgctcacaattcttctccaataccagctagtgtggctaggggccttatacccccaccaatcttcatgattaatatacacactatgcacccacttcacccatatattatccttctttatagcaattgcccaaacatgttttgctacaacaacttgcttccactttgcaatttcctgaaaaccaattcctccagcttttttttttttacttgcataaactctcccaagcaatgttactaggcccattcatgttgcttctccatgtccatagaaagcttctgcatatactctctatttcctttattattttctttggaaggataagggtttggctccaataaacatgtattgtcaatagaactgagttaattagtacatttctaccagtaaaagataaattccttgagctccacactttaatttttgatgtcatcttctcatttaggagtgaacattcagttgatgatattcttttggcacaaatagggactccgagatatttgaatgtgatactactcctttagaatccagaagcatccataatccttcttatttcatcttctctcatcccactgcagtaaattgcagtcttttatttattagggtaaagatttgaagtcattgaaaataacttaaggccttttagcatcaaatagatgctcttgaagtcacccctgcaaaaaagaagaatatcgtctgtaaaactcaagtggttaatctttaatcccccacaccttttatgtaaatgaatttcttctttatcacctattttcttcaatattctgctgagatactccattcccaacacaaagagaagaggtgacattgggtctccctgtcaaagacccctcttagcttaaaaaaaatcatgtaatgatccattgaaaatcaaagagaatttaggagtggtgatgcagatcataacgagtttgatgaaagatgctggaaattgaaaagcatataacatctcttcttaaaagctccattccattgtatcatatgccttttgtaggtcaagtttaatcatacaattagccttaacattcttcctcccatagtgcctta

SEQ ID NO: 76831 - DNA, 636 bp, Cannabis sativa
catggcttttttaagttcattaatcactttggagaaagggttaattaataatgagttactttagggctaagaaatctgtaggtaccttaggatattttaatttattttttattgaaacctcacctcaattgaaaatctcaagaaaatgactaaagaaatctgtaaaatccaattaattattaatttattttagtcctaatccacataaacatactatgatactaaaaagaataaaaaatcagatcaaatcagataggaaacaattaacaattaacagaccttactaagaagttgtgaaggaagattcaatttctttgtttagcaggtatgaaaaaaaggcaaagggtcagagtgaagaaagcatggccaaatatttacactaatattctaaagactgtattaagaacaaaattacaattaataattaataatattacaattcttccttcaaccatagtgaatcttggtgagtgagtgagtatgcatagttcaaatccctgttaagggtatcatgtagaaaaatcaatctaatattatagtcctacgtcaaaaaccattgtgatttgtttgttcctgaaacgattttagcccctagacataaaacaagattgggatgatattaactattaggtataa

SEQ ID NO: 76832 - DNA, 1258 bp, Cannabis sativa
agaaatttaaaaggaaagaaaagtatctaagctgataagagaagagaacacagtcacaaatagaagctgcgaatagatttgtaccttaattccatatatgattgtacttctatctatttagtacatcaaccaattaatcaatctgaatttccaaaaaggcctctgaagaacccaaagtgattgaagttattgttcaatataaaggatgaaattctgaatgaaatcttaattttaaaatataaattgattgtgtcaaacaaacatattaatatcatctcacaaccattaaatattctaacaagatataactaaatcatttacaacagaaaattaaaaaatataaaatagaaaataataaaaaaagaagaagaagaagacgagtcaaactatcatacctggtaccgtctttaacaatgatatttgggatgtgagcaataattagccagtcctcccctgtctccctctccactcgttgttttagcaatggacaattgaaaatgtgtagttcagaaagagaagtgggtagttcttttggtaagaaccggaggtaacgacaactttcaatcgtcaacttcttaagatgaggaaaagctccaccttccatatatatagctgattaaaataatatataattataaaaaatattattatttttgttaatagaataaagttttaattcttttgaaacgtaccttgatgttgccagcttctttaatggccgtgatgaacttaatctgatcggccaactgagcatgcaaacggttgaaatcagaacgtcgaccaacttaatcgcacttaccagactatggtggtcgaagaaatcgtcgtggacgattttcactcccagagattagaaggcatcgatgatcttggccttgtccagattggacagcgtgcattcacggaccaagatgaaggtctcgtgtctgaccttggccctggcttccacgatgaatttataaacgtaccctgttccgcggatgaacaagatcgaaacgctgctccatacgcaactccatagatttgaagagttgaacaatctctttatctttgctgagaattactgtgaatctctcagtataatttctctaaaaaaaaggaattttggatttaagaatattgggatgttctgaattatagaaaaatgactactattattatattattatttattttaaaatttaacacgattaataagttaactttaattattgggtttattttttgaaattgaaatgaagccgtgtaatttgttaga

SEQ ID NO: 76833 - DNA, 505 bp, Cannabis sativa
tcatgtctcggatgaagaagattgagaggtggatcagagtctctcctctacgattgccaaaaatattctcagagggcgactgtgctctaatgtcgatcatagcaggggctttttaaagaaagtcttgggaagaatatggaggctgaaggaggcggaatggaatatcaagattcaggaaaaatatgactcaggtatgttcttaacgttttcttttgcctctgaacaagcccagtcacggattctatcaaagatgccatggtatttatctaatggggtattgatattggggaaaatggtgaacactagtgaatcttggaagaatgtgttgggtccgccccttgttagtgggcttggaccaataagggcttaaggcccatcttatttgaattaaaatgaaaaaaaaaaaaaaacagaaagaaaggtagtaagtaggcttcgtgagcagcaagcagccaaaagagaaaagaaagaaaaagagcgggaaagaagagaaagaaagctagag

SEQ ID NO: 76834 - DNA, 3553 bp, Cannabis sativa
ctaaaattgaaattatatttacatatattcagttcagattcatgcaagaaaagaaattaactaattcttttctttcttttataaacaaaattagcttacctcacgaatggtagccaaacgcttagtctcttcttcaactcgacccaactgagcttgtactttctctctgacctccatcctcttcctctcgatctcttcctccttggctttgaaagtcgatagagccgaccttgacatctcttcatcttctctggagagattgctattgaagcttaagcttcctgagttctgattctgaaccattaattgttgagattgctcactcgtctgcatctcttcttccaaacccttctcccaaaaccctctctttctctaactctctctctctgttatcttctctctctctttctctttctctttctctctctctctctttttctgttctttctttgtttctttattttcttttgcttttgctttgaaatgatgggcagtgctctgttctttctctctttcttgctctgttttcaagtgcttataaacaaggccctgggcctaaagtatctcaccttaccatttttctttattcttattattattataacccaacattttttctttaaaattaaaaattattaataagataagataaaagatattttaatatatattacaaaaataaaaataaaaataaaagagaagctttagttgaaatgacacaaatgccaacaactgataaagatgtatagagtggcaattaactactactttacatataattccctaatttatgtcacacaaaattcaaattttgtctccataacttttattttcttcagaaaaaattaaataaaaatgaaactgaacaattttattttgggactggaaaaaaaatattattttacataattatgtttatatattaatatatatgagtcatgagtttgtcattttttgttactaattttgaaccaatttacatgaaaagatgtggaattgtggcattgacttgagttgatttgttgtaactttgtttagtaggtagatgggcaacttcatctaactgtttcagttaaatccttgtcacatgtggtgactgtagaaacaatttattttgcatgagcatttaagtgttcattttcatgaaattggtgcctttgaaatcttacttaaacatgctcataaatttagctttaaacataattcacccctaatcttatatttcaaattcaaatccttatcaagtttatccaatcaaagataaaaattaattttatcaaaggctacacaataaattgaaaataatttgaaaaatgaaaagaattcggacaagtttttatttcgctcgactttctctcttcctagggttctctacccctttcattctcgtgctcttagggttcctcctctttccttgggtgccaccagccagatctaggctagtggcgcccgagatcttaggcgctcttgtggatgttggtcaataaatgggttcttcgcaagtgggtggcgattttgggatctggtggagtttttgaaaggcattgatttgctcttttttcctgtcttgtggtcgaagtgttgcgtgtaacaattcagaggcagggtcaccgatcatgagggtcaagggccttagttttggtgtctcttaattaagggaggtggttggcaactgcttttttccactaggtctcatggcggtggggattctcatggctgtgtgtgacggttgccaatggtatgttgccttggctgtttagaggtgttgttggtggctatggtttgtaggtgggtgtatttcatgccactgttagcggctttggtattgttccaaggaccttgtgtctctgcttcttgaggtgatggtggaggctattgctcatggctagttggctgtttgttggtcatatacattcttgttttcgaacaataataaatcacttttgtttctatgttagtgttttctaatcttagatgttctagggttacaatcaggtggggtggatgtgggtttttattccaatccgtgttattgtgactcttatgccgggtggttttcattttgtagtttgctttatttaattattatgtttagatgtttgtagatttccttgcacaagtcgggttttgttctattttaattttttttttatgtttttttttggtgttttatcacccttgtcttttgcagtgttttgctttaggacattttgtaatcgacttgatttggttgttgtttggacatcttcttgagagatttatgcagctttgtttctgccagacttttcgagctttgtcttgttaaactagggaaagatattcttctttcaaaaaaagaaaaaaattattataatatttgagtaagtttgcttaatttaaataattactcaaccaagatatatttgagcaattattaaaatatgtaacaaaatataatttaagtgttgggaatcgtcgacactatttatccctacattggtatgatattatccgctttggacctaagttcttacgaattttttcttgggcatcttcccaaaaggcctcataccactgaagatattgtccatctttatacatccatgatccttttcatatatagccaatgtgagactttagttgcacacctaacattaagtattacacgttaactaagagtgtgtttggaagtaactgtgtaattactaaatagtgtaattactacggtatagtaattacacagtctagtaattgcactatgcactatattttgaaatacaatgtgtgtttggatatgaggtgggtaattacatatgaattcctaatatcttgtttgataaaatagttagtaattacacggaaaaatattttttttagtagttaatatttaaaataaaaaaaattagtaattacacagtgtaattatactcaattctcatggggtcatgataattgaagagtgtaattagaatccctcgattagtacagttatattgtaataccatgattagacaaacatgccgaattgtgtaattacctccaattacacaataactttctaagcgtaccataatatttttaagggttttttatttttacactttaacacagctttttttagtatttttatagaattttacacaaaaattcatataacaactaacggagcaacctaaatcgcaaccgaaattcgtatagcaacccacataaaaactaccagaaaaattatcggagcaactcaaactgtaaatttgaaaaaaaaattaaaaaaaatagtatatatgataatttccgtatttttagttcattttatttatgtaaatgttttatgaattaattattagataaataatgttttgctaactagtatctttttaattgtgccttctaactaatatgaattatgccacaaaaattacaaggtattattcttaatgatacttgacacttacttcataccttctaggcacttacacgaaggataatgagaatgtggagctattttagttaagaataataataggtgtatatattattttggaccctgtgctttgtaaaagttattaattggact

SEQ ID NO: 76835 - DNA, 534 bp, Cannabis sativa
atttctaacctccttgcaaaataacaccatatatagtcacctaactatcaatattatatataacttggaccatttaaggatgggagggatagaatacggcttaggggagagaatataagagagttatatatatgtgtagtttataatgtagggttagtaactaattcctattataaaccgtacatgtatatataatgtgtagtttataatgtagggtttagagtaactaatgtgtagttattttggtattttttatttgtggaaaattctatttttttttttttgaatgaaaataatctttattagatagaaacatctgctaacacaatggactgaagagcaaggggaacatcactctcagtaaaaagataacctgaccaataacaagcaccacgtgtcatacaatgcgtgactttgttagcagaccgcttaacatgaccaatagaaacattacttaaagaagataaaataaattgacaatcttgaacaaatagaccaaaaatagaaggtatagatatcgaactaagaatagct

SEQ ID NO: 76836 - DNA, 1717 bp, Cannabis sativa
  modified_base (601)..(609): a, c, t, g, unknown or other
  modified_base (1186)..(1196): a, c, t, g, unknown or other
  modified_base (1358)..(1383): a, c, t, g, unknown or other
gagagagagctttgagagaaatgatttttgcttcttttcttagtttttgtaaaatgagaattataaaattggttttattaaaataccttcaaccaaatataactagaaaatttgaataaatttatttacttaattcacagaaagacaaaacacaaaaaggacaaaaagaccaaaatgcccttgcccacacaaaactaacttaaaggatactaagggtattttgggaaattctaaattcccgactaatcctgatatttccaatgtctaacaataccgcccgctatactaaaataccgagatgcgattctactgagccatacactgcgttccaatgttgctgggcaccgaacatgcaaaaatatgaaatttctatatatgacatataaaatgcattccgaattcaaataaattatcataaataattagtttaatatcaataaataatttttatagttaaaccctaattatctgctaatttcgaaatttaaactaagcggtctttacagtgatttttgtgactaatacttttagccacagacatagtcacaacgtaagaatgacaatttataattagtcacaattttttacttttaatcacaannnnnnnnntgactaaaagtaagattttttataatgtgttttgattactttttattattattattgttattgataacacgtttggttatttatttcatacttaaaaaatagttaactttaaaactatgattttagttgttatattatattatgttattgtttatgtcaagatattatgacaactttttttttgtcatataactttaagttttaaacataattcaataactaaataaagtataagaaactactataaaaaattttagtatagttgatttttttaatggaaactatatgatatttaagatactattgaatttccttaccacttattttagaaagctttcaaaattatttcataaaaataaatttatttagaatttaacaaaatacttttaacttattcaattttgtttaaacttcactattgattacttattggttgaaagaaattaaaatgtaactattgatttcagttatcattttcgatgaccaaacaattatcagtatagttaccaattagaccatctgttttgttaaatgacaaaatggatcctgtatttttctaaaatggtaaaaataggannnnnnnnnnnatttttgacaatttttttaatataactaacttgaagacaattcctaaaacgaacagatatagaaaatgtaaagagttttgtcataacacctttagatcagattattattaaattttattttgacaaaaaatcagttgatagggtcctatttgtacaattttnnnnnnnnnnnnnnnnnnnnnnnnnnttaataaaacagaaggtccaattagcaacttttacaaaacacatgatccaaaatagtatttaccaaaaaataaagttaaaaagtgagtttttttccatattaaaagttttttttagatgaaaatgcgtattatattaaataaaaagttcataatacaataagcatttaaagggggaggtatttcctccaattaagaacaagtagagtccaccgaaagagcatactaagctagcaaatgagcaagtcgtattcgaaatctacacacatgagaaatctgcagagaagttagacactaggtgtgaaatgtctatcaaaagacaatggaaatcagaaa

SEQ ID NO: 76837 - DNA, 675 bp, Cannabis sativa
aaaaagaaaagtaagcgtaaaagctcaaaattaattcagatgtctatatctctatgttgaatttgataagtattataaaagaagaaattgagtatttgaaaatgaaagatatatggatgctggaaacatatctttagtacttaatacacttacaaaagtaaaatctttgaagaaattaattatacgcaaggatggataatatatttgtgacacttctcgttacctatatatagatatatattagtgttagtgtgtgtgtgtgtgtgcgcgaatagataatagataatcggattatttttatttttatttatttttttttttgataaatgaaaggaaaatccatatgtgaggtgacaaagaaaagaggaatgagtgcctatgcgcttgtgaaagttattagccataccagaaaacagagaagaagaagaaagagagaaagacagagaaagatagtgaaagagagagattgaagattgaaagagaatcttattgatgaatgaatcaacatgatcttatatacacaatcagtagctctaggtgatcacaacaagaattggttacaacagaaatagagctaacaaccaaactatctgtaactaactcataacagaaaaacagttagaaaaacaactaactgtaataactgtcatggacagttgttactttgtcttcaca

SEQ ID NO: 76838 - DNA, 2038 bp, Cannabis sativa
atatatattaaagtatctattgaattttgaagaagatttacacaattttaaaatatctaatatagtgtatttttaggtattttctttaaaatttaaaaaatcttttattattataaaatatttattgtgaatgctcttataactgacttgatctcgacttcattcattcatgttaaccagtttggaatgtctagtgcattggaaacactatgtggacaagcatatggagcaaagcaatatcgaaaactcggaatcctaaccaacacgggcatacttaccctaaccctagtatgcattcccttgtctctaatgtggtcttacatggaaaatgtcttggtctttatgggacaagatcctataatttcaagagaagctggtaaattttcaatatggttaatccctgcactatttgcctatgcaactcttcaaccactagttagatattttatgacacaaagcattacctatcccttgcttttgagctcatttgcctcaatttgttgccatttaccaatttgttgggctttagtattcaagtcaagattagggcattttggggctgcattatctattggtttttcatattggttaaatgtgagtttgctacttttgttcatgaaattctctcctacttgtgaaaaaactcgggcctcgattttttcaaacctatttcaaggcgtcggagagttcttgcggttcgctataccttcttccttaatgatttggtaccaaaacaacaccttataacttatgagagttcacattatttcaaatttttaaaatttatttattacattatattatatttttatataacactatattcagtattgacttgtacataaatataaaaatatatcataatgtaatacaaattaatacttaatatagtattatataatacaatacaatataatacacaatatactaaattgatgcttgaagttattgaaacttgttaattttttttctttttcttttatgctgttattctagccttgagtggtgggcatttgagcttcttactttactatctggtttcctatcaaatcctcaacttgaaacttcagtcttatctgtatggtaatttttttttctatatcataaaatatgcacattagattttagaaatagattcatcataacatttaggcaaataatcttttcaataagtgtttttttttgtttttgtttttcttaacagtttgtccacaatcataacactttatacaataccagatggatttggtgcagctacaaggtttgctcaaaaattataagcttataaattatatgtatatgtaacacttctcaataaaaaattaatatatatacaggaaaaaaaattattttataatcactttacaaaataatttcaagaatcaacattaaatgtcagaattctcgatagagtgtctgaaatgttattttgtgaaaattattagattattatacaaacttataataaaaataatagaattttacaaatgacaaataaatattaggtttttttttttattattatttattttttataacaattctttaacattttttctccttttgtttttcttttttccttttttgggcatgtagcactagagtttcaaatgaattaggtgctggtaagccaaaagcagctcgatttgttgttcgggttgttttgtgtcttgtagtgatagaggcggttattgtaagttcatctctctttctaggccgaaaaacattcggttatgttttcagcaatgagaaagaagttgtagattatgtgacgagtatggcgcctctagtttgtgcagcagttatgataaattctttacaagcaatcctttcaggttttcctcttattctcaaaaactcttaaaagattatttcattgcaaaaagaaggggaaaaaaactctttgtatgatccttttttgttacttaattaggtattattagaggatgtggatggcaagacttgggggcctttatcaaccttggttcttactatcttttcgggattccgacggccgcggctttgggattttggttga

SEQ ID NO: 76839 - DNA, 588 bp, Cannabis sativa
  modified_base (340)..(340): a, c, t, g, unknown or other
tgccccttgagtcactgagtttctcccagccgtttttagaggtatatcgcttagctcaagatgcgtgacttattcgcaggttgtgagtttagttggactccttgaaatagtgggcgtctccttgtcatcctagggtcatgctgaaagatgcatgtcgctgaggttaccaggacactcataaccattttttgggatgtttttctattcgcatatttagtattccctctgctctcatattgatggggtggttagtattcgcgaggatgcggaccattctctcaatgcgattttatagtttatatgcgggtaagatcacttattttgtttttcacacattcancaggctgaaaagatcttctatctttcagatgagcgacctgtcggatagtcagctgcttggctcgggagccgatgcatttgacggtgaggaggacgagagggaggatagctttatcccgacttcgatctcaaaagaggagatcacacctatagtaggtatagaattaggtctgatgtcttccgcagacatcgagaaaatggtgcaggagctcgctgaaccaggggccatcgagattcgagacagcgagt

SEQ ID NO: 76840 - DNA, 923 bp, Cannabis sativa
tagtgggatatatattggagaaaataaaataccgaggttgagcggggttatagaatttgaccattttacccctagtcttgaaaatacttaagttatgagaatgaaggcattttagtaatttggtctatgggtagttgggtggctgccctaggtttttacacctagcaaaagattacttcagcgaaggttatattaacctttattttcatttgagaaaattaaagaaaaataagaaaataggaagaacctctccctttcccttctctctcttcgaaccaaccaaaagcctgggaatttgttgctattctttgagttttcagcaaggatttgaggagattttaattaaggtaagccatagacacactttaattatgtgtttctcaaggttgtaattggttaatgcttttaatttttagttttaggggttgttagggtttggttcttgcataatttgaattataaggttaatttgagttagttttaggttcttccagctggttttagtgtattgtgttgagttcgagcaagtttgagctttgaaacccaaactttgatctttaatggaatgttttaaattagtatgtgtttttgagatttatgggttggaatatgttgtatataccctgtttaggtactctgaaaagtttggtggtaattggacaagttttgagcaagttttagagttgttggagaaacctggtgcaaaccagttaaccggtttgccaagtcctgtaaaaccggttaaccggttttgagagattccccgaacaactcattttctcaattctggtccattttagtgtcttaattgaatgtatccttgtttcctaggctaatgtaatccctagtgaatataacagcctagagttgtagattcagatttcttggattaggattttggacatgtgatttacccggtttta

SEQ ID NO: 76841 - DNA, 3253 bp, Cannabis sativa
ttttttttttacaaaaatacagattcgttgctgctatggaaaagtaacgtaattttcagtacaaatgtaaatatataaaaattgcataaaaatgttagaaacaatgtaattgtataaatttgtgaatattattatgatagtgaattgaattgttgttgttgtagcatgtggagcaagtggagcattgtacacactgataatgtgtgtaacaggatgtacatgctgttattcttgcttctatagatcaaagatgagacaacaacatgccctacatgagtccccttgcaacgattgcttgactcattgcttctgtgaaacttgtgccctatgccaagagtaccgcgagctccaaaaccgcggttacaatatgcaaatcggtactaatacttataatctcaattttttttaatgctaaatgtttttttcgatataggcgttattcttgctctaccatgcatttagagaaattatgttctaatatcgtttttatgactgtttatatagttatagtagacatcgagtatgtttcaagaaattttgaatagtttatgcctaaaaaagaagtttaaaatagttactagtaagcgtataaaataaaataagcactcgtacagttaattagttgaatatatctttaacactttaaaaacttagaattttttgaaaatagatagaatatcgactatgataatgtgtactattttactttatatgaaaaataaaaaataaaaattacaaggatattctgacctaataattttcctatattatactattgtttatattagttatagagttcaactattatatgttttttgaaataaaaaattgttatatgtcattatattgatatactatacaagtataactaaatatttgaactatactataatttattggaaaattaatgattgacctactatataattaaatctacacactaactcatgtatttcttattcataatgtggtgtgtttaacacagtttaggaagagaaaatatcaaattaattgcaatagttttttttttaaaaaaataataaataaataaattgactcatatatccataaaataataagaaatagaatcatgaagataattaattgaattaatgatatggttttgttgtttaattaaattggtttattgtataggatggcatggaaatgcagaggagaagaatcgtgaggtggcaatgggtcccactcctccaactgttgaaggaggcatgactcgttaattaaatttaatattatcataaattttattaattcttcttgtgtattatatattaattaattatgtattttttattaaattaattatgtatgtgctgggtttatgtttttttttttaatttaattacagctgtgggttgtaataattatatcaacgtgtaaaaatatgttgcattaataatgaaaaaaatagctgtgttctgttctataatgtatatgtcagatttttatttatttttctataattaaagcttattaattaatagttattatgctaatgattaaaaaatacgtgtctaaaaatgattatccattataaaatgttatttattagggctgtaattaaggacagatggaaatgcatattaattcatatatttgatatttattcagatttacttatattattatctaggtatatatcggtttatttaattaataaatattattttagtcattttattttgtaaaattaatatttaagactatttatttcgttaaataataaattaaaattaattaatttatttaaaatttatataaaagactaaaaatttgaaaaaaaaattactaaaatacttttatataaaaaaaattaatttttagtctttaaacttttttatttacgaaaatatcacttcagtaaaaaaataataaactatttggttgattgttttataatttgtttatagttgatttttcttagtttttttttattaatttttggttatttcttacttgtatttttacttttaagtgtacttttgtaaacaaatttatttttgtaattaagaattttagttcgtaaaattataaataaaacataagaaaaaaataattaaaaattttctaatactattttaaatgtgaaaattacattgtatattcactttactttatttgttttaatttttaccttcatttctatattctttaagatatacacacttttataaataatgtccccattaaacctcttaaattaatgttaatcatgtgctatacttaagtggagagcaaaggtatattaggcaattcactcacaaaagtgagtagattttaataaaatataatatgagaatatttttgattaatggatacaaaaaaaaagagatatttcttaacttatcctattttaaattctatattttacaaaaattactaatgagatatatcatattaaataatgaaataaatttatattttaaaaaatgatacaaaatagtaggggtgaacaaaaaatctaaaaaaccgaccatccgaacaccgaaaaaacgacactgaaaaaaccgaaaaccaaaaaaccgccttcggttaaaaccgccttaacatggtcggttttagtgtcaatggcaaaccgaccgaacatatatattatatataatatatattatttttgtatatatttaatatacaattttattaaactagttttacttatatcttttttatttaaagtctcaattatttattgttttattttgttatagtttgatgcatttacatattatatatacacattcataaaataatacaaaatttttaatataactcattaccatataatagcacaaataattttaacaaatttaaaaaagtttattttacattatttatttaactaagaaagttttattcttaaatatatgatatttgatacaatactctaatttttttagttttcaaataataataaaaaatttaaaaatttatttatttttttttaaaaaaataatgttcggtttggccgatttaacccaaccaaacagtgaattaaaacagtcaattttttttacatttatataatagttagtcggttttcggattataaccgtcaaaatcgaaaatcgaattttaatttttttttttttttttttgtgtaaaaaaccaatttagtcacccctacaatagggaaatttcaatttttgcccttaataatatatcttatatcaaattttataccccttactaatttatacaaaacaattccactattttcaaattctacccaaaa

SEQ ID NO: 76842 - DNA, 6676 bp, Cannabis sativa
cgattccaagtcctagatttccttcaagtagtcattcaactgcaaagctaatcaaggagcaagcttatttgcagtacttcttgaaccaaactccaatgtttagaaaactctcatagtcagattgtggcctgcagatgaaaacatttcattagatctttgataaagatgtcaaactagttggcaactttgctttgtttacctatcaattccatgaatatcattaggaaacacaatagttttaacatcaactcctttctcctttagtgctcgagcatactgcgaatcataatctcataaacatcaatgataattgcaaatactattatgtcaaattgcttaattcgagttactgtcaaagatgcagatgcagatgcagatgaaagacagcaagagcttccatgtcgaatcattattcatttttacttatgttggaccataaaattagcatgaaagtcactatgtaattcttatatttagaggtgaaacatgatatctttcttacttgcaatccagttgaatttggaactcgaagatctttggcacccaaaaggaaaagcgtaggcgtcttcacctgcacagatcatcaaagaataaagacaatttctttttcttatcaaaatattaaaaaaagttgaacttgagaagagtagcccaaatggttaagcatacagtttgcttccataagatatgagattcgagtccctcttaggcacctacacaacaattattatagtttttgtttctcaaatattgtaggaataagggggagctcagcttcaagaaaaaaaaacaatagttgggacttattagctgaatgtttttggataatggtctcacaaaagtatggagaagggactagagtgaaaatcaagtctaagctacttggtttgattgaagtggagacttaagaagcttgttattgctttgaagcttcggctctttcaaggtttttcatcagaaaaaaaattcctatttgaagtagcatagaatatcccatagtcactgaattttaaaattttctcactcaaatcctttaccgattcatatcttttttttctgatctagccagtctcaacactgcatattacttgtgactctcaagcttcaatacttagtttttcttgtctttcatacaatattgctatcaagccttggccaggcgcatgactacaataatagaaagcacccatgctacttactagtggcatgtgaatccactgattttctatggcaagcaattagccgataattaatgataagagggtcatgaatgcagtttcacttgtgaactctaggttatgtttgcatccaagttttaatattttgaatggctttgcatcttaaggagtttgattaatggtagcacaaaactcctagactgcaaaaaagccatacctttgagatgtggaaaataggagacttcatttgaaaggaggtcaggtgttcagctgttggtgcttcagtgtaatagtttttccactcacttccataggtctctacaaagcaccagtctgggatatcagatgtgccaaccatcaatgcaaggttgcaaactggattccttgctgctgcagcagcgaatttgtcaggtgcctgcaagcatttagaaaataaagagaagtatttatatttataaattttttccacttgagaatactaaatgtaggcatactatagagaaactcagtgaatattccaatccacaatggtcacatgaactgtaggaagaaagaaagaaacttataaagaagcagaatagcatcaaagatcagaattttactggcaagagtattgacaagatcccaagaatctgaatttatacagagtctagacaatattaaaaaaatatgtaaaagattttatagcagaaatgagggcggtaaacagattcaaaagactaacatacctggccaatcaagtgggttgtgagaaagccaccatgggaaccaccaagcactgcaatttttgatggattagcttttttgaggtcaatgacatgatctatagctgtgagtacatcattgacatcctgttcggaataatcttaagatattaaaaacttatatatatgcagcaaaacttcatagacgtaacataattaatataaaatgctaagaacttaatttattatgataatagataaataataagcacctgggtcccgatttttcctggtagagattgcagagcttcctcaccaaatcccaaggatcctctgagataaattagcatgttgaaaaagcatgaatcctttagcacattccagcagtcgatgcagtaatatggtttttaagaggaaaatgaaatggaagacaagaggcacttcaaaaaatataataatcctaaaatactaaaaaaaaattaattaagcaacttaatgaacaaatcatatcaagtatatacattccttgttgaatctcaacgaggaatgcattgactttgagatctcacctataattgacaatcaacaagttgaatccatttgaagacagaaatgccaatgactttgaaaaacttgtcactgatgtagtatggggaccgccatgaagcattacaatcagtggctcacatgaatcatttcttctagttttggaggacacaaatactgcttcgaaaggtttcttagctcctagaatatttcaaagagtagagaagttgcaattaacattcaaattactatcatgtgattcatcttggagagaatagtccctgtaatacatcagccaaaaataaagatcttatatagtctattatggcatgtaataccttcagtcaagttaccagaaacatccttcactggaatcttcataatatcaaactgctgatttgacagcaaagatttaacctgaagatcaaccatttgattgtttggtttcaagtaattagcattatctaaggaatgaaaaaacgaaaacaaaaaaaaaaaaaaatgcaagcaaaataaactgaccttctcggggcatttaactatgggacttgatacatctaaccaattccatgtagcattatcagtaagatacccatacttgatttgaggaacatctactggactgctagaaactgcgaagtcaaaacaagtgcaagtataagctcacctatgtacacaactaatacactagatagttataaatatcagcattcgatgatacctgcaacaacgttatttccatccaatgcaagaagattccatgaaaaaccagagtctatagggctaatacgtgatacttctgcactgtgattcattcaaatgcataagtattgtataaaacaacacgaagaaagtcataaaaagttatgcagtcagataccttaatacatttattgaaagtaacactagactacttctccagatggtagataatattattgtgcagccatcaagaagccacggattactcaggaaactagtgcagtaaagcccaggaaagcaaccatcttcagcagacatcacaacaggaatcttcaaagaaattgaatagtagacaactaaactcagtagatgaaacaaactgaaatagaatcctcagtaaacaacacatgcctttcagatatagtacatttcagtatgtagaatggtgtttgaactgaactctgaagacataaatgtgaccagcataaaaactaacaagtacttagaatttgacgcgttttaaataactgcttgaatttgaatggacaatcatgagaatacaattgctgcaccagcaacaattcccttgtttgaatcaatctttgtagctggcgaaaaacagcagtgaaatcaagatctcaccacatcaacaattttcaaagatgaggacagattgccatctgttggccattcgatcctgtgaagtgaattggtcgcggaatgtgctccagaatccacagaactacgtgcagataaaaacacaaggaattttccatctgggctggaaaagataaagacaacaattcaaataaaataatttacaattgtgaacaagatttggaactacaactcaagagttaagaagatactgagacacaatgcaatttttcaaaagatttaccaaactcaaggaaggaactgtttccaattaaattaaagatgctataaaagattacaatacaagcagaaaataaaattttaatacaattattctgctcacatttatcaattttgactactaaccatgcaagtaacaagacacaaaaacaccctactttacaacaaagagcgcagttcaaacaaggaaaatgcatctctattttcagggaatttgacagaaagtgtaccgctgttttgaatttctaagagttcttttggtatgccttctgattaaatatgactctaacatactattatatttgtaatgtaatattaatgatgttttgagttgataactaagttatgagaatagcctacaaaatgtaatctacaccctataaatttagagtaatgattggcacactcccaatttacacacaaaaagtacacaatttaatacaagatggtatggtccccacttaaaactatccatgatacttgaactttccatattttttttttcttttatcataatgatgtttttgctgatatgtctaaaattcgtggcattttcatccatcattccgaaaaaaaaaaaaaaaaaagttaatagacctgcaaagtattaaatttttaatatttcaattacaagaacttaaaacatataaaaaagtgtaaataccttgagatattataatcttcattgaactacaatcagaaatataagatatatacttacctgaaccgtgggtaaaaggaactgcttatgctttgagttagcttgaacacaggcacattttcagttgaactatctctacaacataggaaaagtacacagcaacagcatatttaggagaactctaggcagccaacaaacagttgacttgagaaagataatgttaagaaaaaaaaacatgtacatcacaaaagtaactcacttaagattatctttattggcttctgtttcatcaaatggcgccttaattgcatataatgcacaaggcctgttgtagcagtattttattccaagctttcccttatctgaagaccacccaacaaaaaccaaatactggtctgatccactaattgatggcgcccatacaacttgaccaacactcaaggatttctcaattcctttaacagcttgtacctcaccacttcaaaccataaaaaatgcaggcaatgagtttgtaatgaaaatgatactctagtagtttctttaaacatcagtgcttacctattaatattaatgacaaaaagtgcaggctgcctttttccagcataggcctcaccccagccctcctcccattcccctagtcctttccagctaccatagtccttatccgatgaacctcctttcttataatagcctagctcgttaaatgttggcttggtgggagatggctcttccgcagcataagcaataagagtttcatcagcattccaagaaattccctcaaacctatatcaatacaagactacatttacatatcatacatgatagtaatgtacattacataattaaacaaaatagactgaaaagttacatgcttaattaccatccatcagtgtatatcgaaccatgaacagattggggaacatggaattccttctccaactgagatgaactccaaatctcaatgtgacaaggagattcattttcaggattccgaacaacaaaaagcttggttccggatggagatggcacaattacagaaactcctgtcatctcaacaggaaaaggggcccatcgaaagttcacagaagtggcactttcttttgaaatttcagtggaaagaacaaactttctcctcttatttgccaaaaggttaggttgactaactaaaaacattgcctgggagtttatccctgcaccaaaaaaaatcgtgtgtaaataataaggtagtgactagtgagtttaggaatcaaatagaagagatgattttcactaacaagtgttactataagatgaacataaacaaataaatattaatacataccgctcccagacttaaaagtccatgccttatcaatgttggagatgctagtaaattcttgaagtagcttagattgtaaagtgtattcttcctcacttgcttcatccaaccccaatggcagatcctttcctgaattccctttagaaccctccatggcaaatactttagacaatcttttactacagaaaaacaaaatcatcaattcaaaatgtatggagaaatatctcatactaaaacttatccgttgagtggtaattcagatagaaattgaataaaccaactgtaacccaataaaagatatcaaatgaatgaaattcaaagagaccaactatggctacggatatctatcatcaaatgactatgatcaaaagcagtaaatgttatgaatttgaatatgattatgtgagagagtagagagaggacttacggagagagagaatcgagtgtgagtgtgggagtgattggattggagggagttgaataagaaggaaagggaaattgtggtcgtggagttggagttggagatgcgaagctaacaagccaagccgaattcagtaggcgttgaagtgccccagccattcacagaaaagattctcatctcatgaaacaaatataattagcattttccccttaatttgttcaaaattcctataaaatataataaattaat

SEQ ID NO: 76843 - DNA, 673 bp, Cannabis sativa
ccaccactaagaaattctaaactatcatcgagtgttgttgtattgaaattgttaattcccagccagatattctttaagggtgcaaagcttccctaatgatctttctcatattttcaaaagagttagaaagaggacatttcttagtaccaaatatggcgagatcaacaagattggtctcttctcaatttgcctttctccttcttttctttttgttattagtttaaaattagctggtctaacttttgtgtgtaattatctaccttatatcttttagagtatggtatttgtatgtcttacttttgttgtgatcacaatcacaatttactataaaaaaatcttatttttagtcacaataaaatttgtagttaaaagtaataaaaaaattgtggctaattataattatcattcctatgttgtgactaaaaaatccgcaactaaaagtattagtcacaaaaattgcaatttgttgtgactaaatgtatttttagtcacaataactgttgtgactaaaactaaattagtgacaacttataactaaaaactatattttagtctcaagtaacattttgttgtgactaaaaatcacatttagtaacaaaaaaattatgttgtgactaaaaaattgtcactaaaaatatctgtttttttgtagtgattgattcttatgactatt

SEQ ID NO: 76844 - DNA, 589 bp, Cannabis sativa
agagagagagagagagagtaagtaatgatgtgagtaaggcttgaccaaacgagccttaaataggttctagtaagcccttctccttatacatgcagcaggcagccatacaacctgcacataaccatgcaaaagattatcagttccctattcgggaacgtgagcaaaaaaagaagagaaaatattttataactgaagttgttacataaagctgcccaattaagacttcaacaatcaaaactggagttggaaagtccctatttgtacagacatccaaacagggacttgaggagaaaatattatcctaatttttgtccacgtgacatggcaagtccacataggcaagattagtgccacgtggagtacaacttgtcagtaagaggaccaagtcaccatgcacaacgtactagttgacgaagattccaaatacattagcaagacaaagagataatgaactaaccaacgagggggtctagccaaaccacccctggccgaccatggtgtagcaagggacgaccaccctccaggaaagcataagctggccaacttcttttttggcatgcatttttggtgcctctgtagctttcaacct

SEQ ID NO: 76845 - DNA, 604 bp, Cannabis sativa
ttaattttaaaagaaaataaatgtcaacttgagacgatcagagtgacgacacctagttgatgtgttcaacagacaaattatatcctcttttttagggattttcatcaaaatcaaaccgctaaaaccgttcgcactgaaaaaaaaaacggtttgaaattctttgcggtgcggtcgcgatttgaatttttctttaaactgtgcggtgcggtgcgatttgcggttttaaattgataatatgcagttcaaatcgcaccataccgcacattataaaaatatcaatttttatatttatttaggtccaattatatgaatgtccaatccaaacctactaattattgtattaaaacttaagtgttgctcaagctttatcgtatttgtgatagtttaattatttgtgatatagtccaaattgcagaaatctcaccgtaccacaacatttttttgcggtgctgtttctgtagttttttagtttcacgatacgggtacaggttgagaaattaaaaaaaacaacatttttagtttcttaattaatttgtcatttctatatatacatagtaatatatataaatttctatattgttgtttactttggatggttttcctt

SEQ ID NO: 76846 - DNA, 1843 bp, Cannabis sativa
tatttatgctcctgtgtaaaagtatagatcttacttgttgagcattctttcactgcaatatttatttaatttgtctattaaaaatcaatattcaattataaataataaaaataataatagagatatatatttttttgaaagtataataatacataagtggagactaaaaaattttacttttagttacaacaaaatttgtgattaaaagtaaaaattgtgactaaatataaattaatattcttatgttgtgactaaagaattcgtagctaaatgtattagtcacaaaagttataattattgtgactaaataatgtgtttttagtcacaatacttattgtgacgactaaaagtaaattagtgataacttatatctaaatactatattttggttacaagtagttttttattgtgactaaaaatcacatttaatcccaaaaaaaattatattgagactaaaagtttgtgacaataaattttttaattatatatggttgaaatttaactaattacacatcattctctatatcattgcgtataaaagaaatttagtaaaaatttgagtgtcacatcgtttctcttcaattatatggttataattaattagacattagttatgatcgtatataacttttgtgtgtggaataagagagtgacagtcattattactttttaagaaatgggagaagaaagatattagttaaaggtatatatacttaattagtattatttttgttgaagtatatagagatttatccacgtgatgaattgtaattatatgtagttttgcattcagcattttgaagtacatcgatgaattaagacaggtagatatatagcatctttgaaattaattaacaagacgttggtcatggtctattcttctctctagctagtagtgacatttattatgaaaatatggataagaatacccaaaacatacaaatatatgttgtatacgtttgctctttaattttttatcatcactttattcatcatatctttgcctaagaagtccccattatgttgagacctatagttaagctagcttctatagaaaagtatctcaaccatgcacgtgattttgttacaataatacattttcttttcttcatcaataaaattattcatttattttccaatttcgatatatatcatcattctctctctcctaacatgttttcattgcccatttgcatgaacttatatatgaatacgtgtatctatatatatataacccctagctagctagatcaacatattccactccttttccttttcttcatcccctctctctctctgatttctttagagtttggattagaaattacaaggccaatagagagaaagagaaaaaaaaaatggatgattatacaagaacatgtagtggtaactcatctgaagaggtagaagtgagaaaagggccatggacaatggaagaagatttgattctgataaattatatcgccaatcacggtgaaggagtatggaatagcttggctaaggctgctggtacgtatataaatttatataattagtaaaactatatataataactatatagttaaagtttatgtatatatatgtatggataggtctgaaacgaactggaaagagttgccggctccgttggctgaactatctccggcctgatgttcggagaggaaatattacaaatgaggaacaactcatcatcatggaactccatgctaaatggggaaacaggtacctattaattaattataaattataattaagttttgcgtataattaatatatgagtaatttacggcaaaaccccctcaactatcaatttacttacaaaaaaccatccaacctcatattt

SEQ ID NO: 76847 - DNA, 623 bp, Cannabis sativa
cttgcttgctagcaatcaaaacgataaaaactagatgctatcaattcatgatagtagaacatgattgaggggaacttgttctcattgaagtattgataattatattttgtcaatgtattaggctttctaaactatttttgggttaaaattttattaatattttttaactttgtaactttattgcccacaatgtagctaaggctaaataggcattaacatatctcgtatgattgaggctcacttagaccaatgaacattatttgtaatgaccaagtatcaatatgaaaagttatattctttttagtttatatattttttagggggagagatttgaatagctgaaaatatatagaattgtattgtatgcagtacttagaacaaacagtcaagtaagagggatttgcattcattctattctgtctatgtttagacataccaaagtataagatgatatggaacaatgtaataataatatacactgtttttatgaaggaaaataaaactcaaaacaacttcgaaatgaaagcatatgagaaatcgaaactatgaattagtaacctctgtgcttatcagtgtagagtgctgaacggtcttctaagagtacctgcaaataaaaatcaaaa

SEQ ID NO: 76848 - DNA, 504 bp, Cannabis sativa
aatttatttatttttgccaatgtacaagaatgtcgacacaaaatgattcgtggtcttttagcttaatttaattaatacatttttatttcaagaaaaatgcattatttatttgaatctatattgaactagtgcgtttatcattcaaatgtcaaaagtggaaaaatcttcttcttcttttaatcatgtataaaattaaaaagttgaaaaatctgaggaattgctcttttctttctttcataaaaaaaagtgtaataaggcatgaggaaggagatgaagagaaaacaatgaatagggtacaagagcttaaacaatacctataatgtaaccttgttaatatatatataaagatatatatatatatatatattgtaacttagttcaaacactagaatatatctttaccgattgaatattcataatattaattgggaaatttgattttctatacttagaaaatcaaaaaaaaatttccctaaaccaaaaatttaaaacctaaaaaaacta

SEQ ID NO: 76849 - DNA, 702 bp, Cannabis sativa
ctttatgttatatgttttcatcaatatttttggatgagtaaagtcaagatataaccaataattgaacattgagcatagttgtcatttgttggaatttatgactatgatttaaattgattgattacattgaaatatgaaaatagctaacaacattaaccttagaagaaatagcaaagatatcaagaagaatagagcaaaactcagagactaatggtgttttgttggacaaagcttccgccattgaggctgtcgaaacagcttcaagaaggaccgcggtagacacgagacaggaccgtcatgatcgagccccgaatccacgttgagcttcaccctccacgttgagattcaacttccacaaatagagacccttatgagtttctttagcctccaaaaaacaactattagaaaaatagagactcttcaatacccttggggcaagagaattgggagtacaattgtacgccctacaaacttgtttggcaagaagagctttattgaacacgaagaggttcctaaatcccataccactatcggagttatgctaacaaagtctgattcaagtacaccaatgcatctttcttttatcatcatctccaccccaccagaagcgagcacaaagacaatgtaattcattgaccaagttctcaggcaagcgaaaaagattcatgacataggacaggattgcttgaataactgatttca

SEQ ID NO: 76850 - DNA, 673 bp, Cannabis sativa
tatgttgatgatgatgatcatcagcaaagacaagatagaaattcaaataattaaggataaacttagttctgaatttaaaatgaaggactttggagttgtcaagaagattcttggtattgaagttatacggaaaaaacaagaaggaaaaaatgattctaactcagaagagctacatagaaaaagtgatcaagaagttcaacttggagtcatctaagacaacagttgtacctctagttgggcactttaagttgtctaatgagcagtgtccaaagtctgaagcagagagagaatacataaaggggattaccatatgcaatggttgttcgctgccttatgtatatcatggtcatcactccctaagtgtattgagctgatttatggcaaatccaggggatacttgaaatgaacaataaagtatggcttaatctaccaaagggactcatcaaatttgagattagaaggctatgtcgatgcagagtatgcatcaaacagggacattagaagatctactacaacatatgttagggattattttaccaggatctagatgtactaacaagtatgttgtttaacatcctaaatatgaattatctaacacaatagaatttaaacacatgtaaagtttcaaaaagtcatacattgattgcagcagaataatatgtctccttcaact

SEQ ID NO: 76851 - DNA, 1071 bp, Cannabis sativa
cacattgatagtttatgaaaatttattgttatttataaaagtatggattactctatatgcattactaattgactttgtgatgaaatatgttacatatattgattttattacatattgctatttataagagtgtggattactctatgcattggtaattcactttgtgatgaaatatattacatattcaatctaatctaaatttaaaatgggtccaaaaatgagatatctatgacaaaaaggaaaaaagccataggggatcaatccaccccatatatgttttaccatacatcctattctactttcttaatctcattttcatattttaacatgagatcttcaatcaaattaaactcaatcgaaaaaaaaaaaaaaaatccttataatttgagattaataagccacttgtgattatgattaaatatttttaattatattttgataaaatcaaatcttgtgaataactttttttttttattataatttattgcaaaagaaaataattttttgagacaaggctctaagagcaacacaataatctcacaaataaaatgactaaataagagctaatcaagtcttgtttagtaccattttcttttttctttgaaaggaatcatgtcattcttattatttgagatatatgctaattttgttgggaggtttgcagtagtagttcaagctaaaccaatggctttaatggtggtattggattagtgatctctcccacttcgattttttattagttcttgagtttaattgtttagttttgatctctacattctctaagagattctttatttaccactttacttttcaatttttcataattgacgtaagaccaatatatgattattcataaattaacagtagaatggataattcttcatcttcaatgtattatattcttattattttcaataaaatatttattgttaaaaaaggaagcacaattatatacaatcaaatcaattcaaaaactaaacacatcttcaaataaaggttagagagaataggctctgctccaaatcttattttgttgggttaatttcacaaatgcaaaaaaaaaaaaaaaaa

SEQ ID NO: 76852 - DNA, 705 bp, Cannabis sativa
aatccttaaatccaacaatctctggaggcatttttaacgactttaaaagttcagggggcgtacatgtcgaagttcacggaataaaaatcccaattaactttataataatattaaaccacggtaccgtcattttcagggaatcatttttttcatttatttatttatttattttttttttttaaaaaaagcagggaatcttttttatgattactgttgtagctttaaaaaaaatgaaaagaaaaagagtttggcgttgagacaattggttggtatttgctctgttcactcacacaattgttgtgggcgcctctttagccttttccctttgactgcatataaatcagtcatccttcgtttaacaccgaacctagttttacttttcgtcatagggagatcgagcatatggatatggaaggcaccccgacttcccatggattttacatgcccggagaatttgaatctcactcacaaacctggcttggttggcctgtaagccttctctttcatgtttttcatcaattttctcacttggctactatctttatttatttatttattcttctatgagaaataacatcagtggctacaaggattgtaccatcagatataaaaataggataaggccttcactttatgctctcttttagctttacataaactttatatctctgttgatgatactagagaataggaatgtaatgatgt

SEQ ID NO: 76853 - DNA, 3099 bp, Cannabis sativa
gatcttctgtgagtttttttcaacaacaatttccacttgtataaaatcttttgcagttggcctagttttgtagctcacaacattcacctacaacattataaaaaacaggcctaaattagacaaagaaataaaaatagattactaccgtcgttttttacttacaatcgaataagtacctggcatacgtatggaatttccttccgatactgaataaatatcttttcccttacaatttcagaaacaaagaatctttcgggatgttcactgacaatgtcctgagaaaacatataacgaaacatgagttatcctgcaaagactcatcccacaaaccccttcactttgtccgatgagatgagacataaggaaacagatagacaaagagtttatcaggctaaaaattgtacggcatgatcttcatcgtaggtgatcgaaaaaataataaggaacttcacattctgagtacctttggatagtaagcaggcccggtgggaagttttgacagaatccaattcttgatatcttccactccttgaccatacttggcactcaccggtatgacctcatcaacatttgtaaatttttcataccactgcaaggcatttacagtaaaaattcatggaattaagaaaatctacaatcacaaaatcaaagaaacctcaatacatggatatctatctacaaattcttacctccagcttctttgcaagttcaccaggtttaatcatatctcttttattcaaaaccagcaaaatgggtggcattttttctgagaagtcaccaagaccttcctccaatatttcatcaatctacaaaagtaacaataacacattaggacaagtagaaaaaatattagatcagttcctacaaacttaaagaagcatactttatcgggcactttacatgcatcaacaagaacaagtacacagtctgcattgacagcagcatttctgacattcttcatcatcatagaatctaacatgtgcatcttcttctcaataacaccaggtgtatcataaagtaccatctgaaacaaacccgataaatccatgaagattaggaagcatcagaaaagcaaatctaaaactaaaaatgaatgtacttatatggaattttttacttgagcagagaattaaagaataaaatattcacttgaaaattaaccctacataattaaaccaaacagaagaaagccggaagctttgctaagtaggtcacgtaaagaatcaaacccgaaacttatgaagaaaaaaaacatggccctgatcaataatttgtcaagtatcactgttaagcaatagctatctccaagaacagtacacaactattagaactcttagcattcaaatctatcaaagagtagagaccctatatagctcatcaccccctaacattaacgcatgaagtacacctaattaaggttttagaatgaatcccagtagttaaaaaactatgttgattccatggtttcaggcattgtaacttgttcatgtcagtttcaacaacattaagaatacaagtaattaagaaaaacaaacctgatattctggtgtagagcatataccaagaactcgatgccttgtagtttgcggtttatcagtaactattgacaacttttgacctatcatttggtttgacagtgtactctttccaacattaggcttcccaagtacagccacatatcctgcatttgaatcaaaagcaaataaaaatctctaatttttgtgtcttttactggtttttaagttcaaaaccaagaattatagtatcaattcacagccaaagaagcacaatcatctttaacataaccaaaacaaattcaccaatcattcttgtttccaacttgaaacacttatataataaattattaggaagtatattgggcctaactcaacctaacaaaaccggcttatctggagtattgctctcaccttattaagtggattgtataatgaaccataccaaataactgtgaacaaatcaatattaaggacacccgaaattgaaaaactaacccgcgttatacggaaggatattgggtctaattcaacctaataaaaccggcttattatgagaggattgccctcaactggattgtgtaaatatcaccagtcaatgtgggactttaatatgccctctctagcaaaacctgaaccatgtcaagcaactatgaacaaatcgatattaggagcacccaacattataatattgtgcccactctatagtatattaggaaagctaattagcctaactcaacttaacataaccggcttgctaagtgtggattgtcctcatgaattgcttaaaatgcggtactttaaatttaaatcaccataaagattaaatgatgaatttagcagctgaaaatgataagcactctttcatatataatcatttgaatcccatatatggtaagtggaaaaatcagtagacataaaacccaaatggaataggaaccatagaaactaaccgcttcgatggttagggtcagagtaatcgagctcctccaattcatagtcgtctagtaacgccatgttcctgtcaggcttcacactcagagacagtaaagaagattcaccatccgaataagagctcatttcttcttcgtcttcctcttcttcattttcttgttcgctaaccaaaatctgctgtcgtacactcaacaatacgaattgataggtaaagtttctgggttggacatggaaatgagtttgtagtggatattttctgatagaagaaggaaagagaggccttcggttatctgggtttgttcggaatttggagaaggaagaggaaccagttaaaagattttgtcttgaaagagttgaagttgcagagttgtaggaaacaagctccattgccggagctccagaccagaaagaattatcaatagcttttttattttaaataaataaaataaataacattttctatgtcatacagaggaaaaggattactccaaaatttagaaaacaccgatacggtgtcgtttcgattgacttcatgtgattattattttttttatattacattttttagttacatacattgattatcacatgaaatcctctatatggccgcttagggattattttttttttt

SEQ ID NO: 76854 - DNA, 980 bp, Cannabis sativa
agagagagagagagagatcataatgtggggagtatgattatcttaatgagtattttttaatttgatcccaaaagtaaaattcacattacgaagaagaaaaatgatagtggagaaaaatgaaaaatgggttgaaaagaagtcaatcttaaaattttggtgtttgctattgttaaaaatataaatatatataaaatattacacttgggttgctccctaaccaatagggcattgtgacgtaacaaatggaaatatatataagtgaaagagagaggttgttcagaaaggaaagcctttattctaattagactaaaataattgttttaaggagtttaatgactcataaaccactagtattaggcccttgatcattgtattatacaattaatcaaacttcattatattaacaacaattggagggtcattctaggcaccaatcacattctgacacttagccaaattggaaggcccttgaaattaattcataattgcccttagaagaagtacagtttgagtgaactaccataatgtacaaattacctttcctaccttatatttatagtatagaaaaatgaccaatcaacaatgagttcttatctattttggaagtgctatacaaggactttcttcacaaaataaatttgtgtggctctgtaatttttaacatacaatagggcaatttgctcagcttttatgtggacaagtttagaccacgagatcattaaaatatattaaagaaaactagaaatgtcactacaaagaaggtgaacaaattaattcttaaaggaaaataataaacttatagttgcgtatacaaatagaaagtaaccgaaattaatatatatatttacatgaaaagcatgcatggaaataatgggaaaggaagcctaaagatatatatataggttatttttaatagaacatgagatatatattaattgctttaaatttatatatagacaccatatatagtactcttatat

SEQ ID NO: 76855 - DNA, 1454 bp, Cannabis sativa
  modified_base (661)..(661): a, c, t, g, unknown or other
tttttttttttttttaagtgtatacaccaaacagttaatcaggaaaatgactttatattttagttaggcttaactgataagtaaataaacgacagcggtgatacatcatcccacccccactccaccatagttttaaaaaagttatttaaattactgaagtaatatatgtatctatgcataaatatttatggtacgagtttttatggtaataaatgagtatatgtataataatactttacacgcattatgtaatttcttcttatattattataataatatttaataattaaatattgaataaatattattttagactcgtgttttgtaaaaattattgattggactctttgttttgttaaatgacaaaatagactttgtatttttcaaattgtaaaaataagatcttgagtttaattttcgacaattttttttttttactacaactaacttgaagacaattcttaacacgaacagatacaacacttttgatcagattatagttaaattttattttaacaaaaaatcaatttagagttatttgtatcatttagaaaatacgtagtctatattgtcatttatcaaaataaagagtccaattagtattttttgcaatacatagttcaaaatggtatttatctttaaatattcttttttttttttnaaaaaaaaaaaagaaaaacaaaaacaaaaaacaaatactatgtattctctcttccttcactgcctagaccttcattgcctttaatcaatattttatataatttttgtaatttcttttaagtcaaaataaatgcaactccatgtacgatgacataattaacatctaggaggggctttgaaaagagccaagagagatactccagtctttgaaacatgaatcgaaaagagttatctacacaatgctattgctaagagttccatctcaataaaatacacattttatcgaggtcattttttactcatcaaaataattatttggactctttttctttttttctttgagataaaataataattatttggactttgagaaagatatttgctttgcttcattgtcattccacatgtaaactgggaatgatgctcaacaatagtataccaaataatatacaagagcacacaaatatatcaaacatctactttaccacagttatatacaagataattacttttcaaaatttcgcctgcacacaaaaagctacaaaagtcatattatatatgcagttttcaaattgaatagaaaagaccaaacatactaaattaaaatataccacaataaatctagactaattattttactaaaaaatatgatcttggtaaggtagtaatattcttgtcgtttttaacgagttgatacggtggctccagcttgggcctagctatagtgccacgtgtcataaccatggcgggaaagagaacatctttagtttttattgaggatactaacaacacta

SEQ ID NO: 76856 - DNA, 656 bp, Cannabis sativa
aaagttgaattaccattcaaaaaaaaaaaagtatatataaaaagtgagtagttaactccttgactaattttatttatgtacaaagtaaacttattgataaatagtagctagtcacaattacaaataagatacaacgatggcagtgactttgaatgtagtagtaagtacaagtgaaagtgagatacagttatgataacaattttaaatttagtgatgattacaagtaaaatacggtgacaactttaaatgtactggtaaatacaagtgaaatacagtgatcacaataattataaaatcatatcatgatttttcaatcattaaaattatttttgctatcatatgtgaagatattaatttattaacctaagtctgaaagttaaaaaattaaaatacactaaatatatataaaaatattaaaatttaaaatttgttataattttataatttaattatcactaaataatacaatcgcacgcgaagcgcagtttgttttttaatttttaaaatattggcagaatattttgtttacaatgagctattatttgtaatctgtaaatttttccacatcacttacaatatataaaagaaaacctaaaaaacctaatattttagaatcatgagaatatatgaaatccactcctttaattagaagtaaa

SEQ ID NO: 76857 - DNA, 1647 bp, Cannabis sativa
cacttgcagaaagattccaacactcagctagatattaactattaatgatcaacgaatgtgatctacatgggactatcaactagatgcccaagttttccataggtttctcgcgatcacattcgttgaatcatgtaaattgtagtatttttgtttttatatgtaattttgatctgttttttcatttgtattcaatttgtctgtggctaattatatcaacacaaatagaaggttggtttggtgcttttaaatatcatatcgtatcaaaattacttatactgagattgttttacctgtcaactacttctaatctattacaaacaagtaagactactgtgactagaaggaagtccagagcaaaagcataccttttattacgtcaggattataagatttcttgaacctatcaaccaaagaagcataaaaaggctctgctttctggggtgccattgcaacatgaaaatctggtttgttacccttcaagaatccgtacaatgtaaattgactcactgccacaaaaaaaaaaaaaaaacattacaatcacctcatcttctaataattctctttacctagtagaatttcatatttctcagtagaatttttttaagaacagtttacctagtagaatttcatatttcctctgcattacctgcaaagataaataaactagatgaaaatttaaacttgaaataatctaaaaatgtcagagacagaaagagagttgaaaattacgtttaggtcccatcctctgccagtatcctcatttgggaacaatctcatgttcaagaccttccggcatctaccaaggattattattgactttctgtatttttaataataaaattcgaaaaaaaaaaagagagaatagattagattagtaaaagaagagtacatgtattcggcatcggactcggaatcggagtcatggatgccgacgaggacgagcaggcccggcccaatctgcgaaacagtgcacccttccacctgaaatgaaattggtgacattggtgagggtggttgtgcgataaacacgaatgatgtgaaagagtagtagtgcagtgagtgagtgagtgagtggctgtagctgacctcgacgctggcagaggccactcgctggaccacggctcgcattgccctgactggcgcctgtgggtggcttcgcttgattcgtgttgtagccaaagaaggaagtagaacggaaacagcgtacataatggtctgtatgtgtacaatgtatatgctaagtatgacccttacttttggttggagctaataagaggaatcaaatgagtttttatttcattatatgtattttaaagtattggaaaagggaaattttactatttgactctaataaaataccccatatcaaaatttataccttccattaatttgtacaaaacaattccactattactcatttctacccaaaatacccctcaaattgaattttcctattctctctctctttccctctctttccctctctctttctctctctgtcgtttgctattcgaacgctgccccacgacgacgacccaacgacccaataacgcaatccacgaccacgaccccactccggccacccacccacgaccctgacccaaccctctctctatctactgttctctttctctctttctctctttc

SEQ ID NO: 76858 - DNA, 1122 bp, Cannabis sativa
aaataatatattttggtgttgcgaaattcactcgacaacagggtggtaatccaggtaagtcctctagaaatacatctaaaaatttgcacactagtctcgtattttcaggtccaaatggcataggctaactaatatccattgcagtgactaggaatcctagacaacatctgcgcaacagatccttagcttttaggagtgttattctaggtatgcgcgatccttgtacattacccacaaacactgctgggttggcactgtcaggttcaaactccaccatcttctgcttacagtcaattgttgccccgtattttgacaagaaatccattcccaagattatataaaaattagacaattgtaactcaattaggttggcagtttattcataaccgtcaatccaaaaagataaggacctaatccactgagtagatacaattaggtgttccgagggtaatagggtaccaaaccttgaagtatacaaatcacatagtttatgaaaactttttattactctactcgacacataagagtgagtagcttctgaatcaaataatactaaataagaataacttttaattgacagctgacctgtcaccactaacagactagcatcaccgtcagcctaattcatagtgaacagatgcctcagattctgattgttattcttctttatttcttctttcttagcctcaggacaatctctgataaagtggcccaccacgccacactgaaaaataagtcttagcccagcactcaccctgatggtgcttcttgcatttgggacactctggatatgatttgaatgttgatctgtggccttgatggcgacctctatttccctgacactttctattacttgtcggtgttccgaaagcttcagccttccatttatgatctgggataccactgttggtccccttactcacattaccacccacagtagggttcgatgccatgacgacatcctttgcagcttgctctataattacatgttgctctgcctcttcagtaatcaagactaatttgacaactttcttgtacaatgtatcgtgattagtggtaattttcaaatctcgagggatagtggtatttagaccccttacatacttttgtttccgagtgaag

SEQ ID NO: 76859 - DNA, 1211 bp, Cannabis sativa
accagtttcttatacaagagatcagtttgagctggattctctaattaatattgaatcatgatctcacttgtgatctataaaaaataaaaggggaccagccaaatattaagaagctgataattaatatagggtaaactcccactaagtatggatcactgtagaattagaaggaaattctgttatatattaagggcatttgaaaattgcaaactggcaattgggacctacttgtgactattgtgatgaaatgccatatgtgtatgaataaaccaagcaaagtgccagccaatatgtatataaatgtatatataattctctctccaaaaggataagaggataaaggtggatatgcttcacttttttttaaatatattaggcaccaaataataaaaagaaaaatggaaaattgggagtggggttggatatgcacctcttggctactaacgttattaggacctcttggcatgttgaatgaatggataattgcgtgacataatcaatgaaaacgacaaacattaattaattaaggagattgattattttagtaatttttttaagttataataattaaatataaaccagagatcatcttcttgattatggaagcgaaaccttaaaatagtgctatacataattggaaagaataataatgaagggtcaagaaatataaatgaaatgacaattaattaatagccttctccaactccaacaaggaacctttgtcattattgtttatgtttttgcattttgccacgtctgaatatgctagttaggttttattatgattattagacgagactataatatatactgatatttgaattttgatcattattattattatatatatgtgttacgttgtgattgtggttaatttgatgatcataatgatatatcgatatgtctataaattaatagttaatctctgtgcatggctagtcaatggtcacgtacgagaaaaaatatattaattaattaattacacattaatatattatttatttttgtacatgtaaattaattgtaattatgtatatatattatattggcatctcttgaacttgaaaggtgaaaatgtataatatttatataaattgtacgctaattaattaagatttcaccttagtttgtgggctctcaattttttaggtccttaacaattttaggtccttaaattccatttagttttactaaagcacttaatatggata

SEQ ID NO: 76860 - DNA, 611 bp, Cannabis sativa
tttacagtggtgttagtgttggatggctgcattgtggttattggactcattattagtctatggaacttggtcatgtcttttgcaaatacttgcatgtaaaacatgttcaatctattaccttgagagttttaataaatgaatgtggaagagaaagagaattatatttcattaattcatgaaagaattgcagaatgagtttatatatagctaatcatgtttaactagaacaattaaattattataactaaactaatcacaataagtaacaaatgggcatcttgaataactactcctgacagttgatacattaatcactaatttttttgtagagagagcttatttgttttgatttttagtgaaagagacatactcaccaaagaaaattaaaatttacccattcatgagtaatattcattaagagtgtactcatatatatatatatatataaatataatattttcaaatgcagtattcatattctataattgcacaatcataatatcttttactaaaaatttaccaattaccgtttcttttttgagtgtagcgtaatggtattacaatcaattaatagttaaaaaacttaggttcaaatccataccatttctctt

SEQ ID NO: 76861 - DNA, 888 bp, Cannabis sativa
ttagttttcttttattaatgttgtcgtatttttaaacatctgctttcgtcatcatgtatgttattagagtgattaacaatataaatactcaaaagagagtatgtttggaccatgtaaacaattctcttcctcaggttctaaatcactatttatcattcaatttttctgaattttgaatttttattttttatgaacgagtatcaacatgcttaatagattctattactgttacaggtggaattgcagaaaacatgagctttattttgagacaattaactgatcttactcagttgggtactttgaaatatgaaactaagacacctgttggatatataagtatcaagatgatgggtatgcattctaattttaggattgccttttgcatttgtactttttatggttaactttaacatataacattttggattttgccttctggatgttagtttgcataatgcctttaggattttatatatgtcttgacatggtttattcttgaaacccatggaggtatcttaatcatttcatgtttttcaattgttagggatgtaattatattttacggtaaaacatattgttccttattagttgtgcaatattttaatttactataagttttgtatatgatttttgtcattttatatctccatcaaaagattttattgtttgatgttgcacccttttattggtccttgtcttttgaaagcctttgtaacaatttatcaatctaaatttgtgttgagtttgaaatatcggcatttttttattctttcataaggtatttttttcacctgtacaatttttggacttggaagggtcgtaagattcattatgttgtacaaggtgaaggctcaccggttgttctcattcatggttttggtgcttctg

SEQ ID NO: 76862 - DNA, 574 bp, Cannabis sativa
attacattaccacatctttcttatcactaatactctcaattttcaatcagtgtctcaaattatacaccaaattagtaaaattgaatttagaatcgccttaagataatagttaccaaaaaatcaaaatatctcaaatgctttaacttacaaaattgaattcaatgaatttattttcaagcattccatagtcgaacagtgtataaacttaagtgtcatttgattggaagcaatgaaatggaatggaataaaaataaaactattttcatcattttagtagaataattatttcattttaaaatgaaagtaatgaccattccaacgcaagatgagaagaaatttaataattttatcaattttttatgtatttttaatttaattctatttcattcctatttttattctcatttccattcctattcttatgttttgatttatcccaactaaatactaccttaaaattcaatactactatcgcaactgccttgtctataggaaaacattcatcaacgaaaattgttcgaatcttgttttaaacataatcattattagcaaataatcatatttggttgcttaa

SEQ ID NO: 76863 - DNA, 797 bp, Cannabis sativa
actaatccataagatcaaaggtaaaaagggtaggggaggccttatggctattaagcttgatatgcataaggcctacgacaagatggaatggagttttcttgaaaaagtcctttgcaaaagtggttttattggcaagagctgtaggcttttaatggcgtgtgcgactagtgtgtcgtacttggtgcttctgaatggctgtcctcttaagaagatttttcctcaacgaggattgagacaaggggacccgctctctccgttcctctttctcctttgccaagatgttttgtccagacttatcactcgcgcagaagagaagaggctcatgcatggtgtcaaaattgctcattcttgcccttcgatatctcacctcatgttcgcagacgacacgattctttttgctagagcaaacgaatcaaatggaaggaatctactcaagattctaacgacctatgagaattggtcggggcagtcatgtagcaaaccaaagtcgggtattctgttttctaagaacacaagtgctgagtcgaagagaaatattctgagtatactgagtattaatcaagttagtggtgaagaaaaacacttggggaacccattcattttcaaaagaagaaaagtggaagattacaacagacttaaggaaagcatgcgaatgaagctagaaggatggaagatgaaatctttgtcctatgctgggcgtctaactctaatcaagtcagttgcttcgtctattccgatctatgctatgtccaccaacaaggtacctatctcttcttgccgaaatcttgatgctctta

SEQ ID NO: 76864 - DNA, 606 bp, Cannabis sativa
gaaggcatctaagattgaaagggaaaaatgaaataattatagcccaggaaaaatgaaaagtgaaccatgtttacttaaaagggcagaatttctggaattatcaactcaaagctgatacaagtaggtattagaggaagttatgtcatattcgaaccacttttactcaatatgaaatagaaggggctagttccaatggaaaatttaaggttggcaagatttataacagcttcatcaatcttgaaaaggtgaattatcggctgtttgtttggaacaatttaagcatgccgaagcatcgttttattctctggcaggttgtaaactctaagttgctcactcaagacaatctttaagcgtattcatgttcccacggataacactctgtccccgatttgtttgctggaagagaaagaccataaccacctcttctttgaatgtctcttttcacagtaggtggtgcgacagattcaaggtatgcttggcagaagttggcctctgaattttgattgttgggtttgttggattgaaggaatgaagagaggtattatagctaaggtcacagcagctatttttgcagccactgtttaccatatatggaacaatagaaat

SEQ ID NO: 76865 - DNA, 800 bp, Cannabis sativa
actaaataaaatcaaagaaaaatcaattgtcattgtactgtacctgaaggaccgggttgattgagcttttccttttccatctcaaacaaacattcctcttcgaatctgtctcgtccctctagcagtatgccaagatagctgtacaacttggcttgaatcatccatttaatgctttgcctttcgtcttcagtgaatggaacattgtacagaagcttagcctgcaataagaagttgatattagcttccattagttctagcaaatacaaaatcttgttgttctttctagtagtaatcttcaaagtgaactgaagaaagagattcttgattgttctacttctgaacatgagtttatatttatcccggatgcaaatgaaaaagagagttgtattcatcataaccaaggatcttaatgacataaaccatcagactagcacaagcagagagcaacaactaacctgtttaaatattgtacttgttccactccgatcagaacccactaatagaaacttgtaaactattttctcctcaaactgatttggtgttgtgagagcggtgtccttttcttccgttgatgagttagaaggatcagaaggaattggcaaagacaagacagcacaagctatcttgactgtaacctgttgagaccattatgtaagctccacagatcattaaagtttcaatgtacaatttctcaaaaaaaaaaaaaaaaaaggtttcatgtacaggattaactagcgaaaacaaacatctactgcgatgataataagaatgtactgcaaaagccttgtcatttcaaaaga

SEQ ID NO: 76866 - DNA, 4686 bp, Cannabis sativa
tatagtagtttctgtgtaacattcaagtacatcgttagaaaaaatggaaaagcggtcataaaactatagtaaactgaaagtggtttgttcctcttataaaactagatgtaaaccaatcatatatcataattgtagacactagaaaatacattaagcaatgcagttataacttataatgctcagctgcatgtctcctccattcattgtggtaggcttttattcatcaaaatttgcacaatcttatccactagttaatatggattttaggaaatcaatgcaatctgaagtcgtaaatacgatcttactataattttgataagatgatagaggtatgaaagttaaggtgaattcacatcgtctggcaacatagaatgttggggaacgagaaactgtacccaacggtgtaatgcatcatggacatgtaaagttaagtgctaagttcgtgcaactatctaacttaataaaaagcagcattagacacaatattaattagagagtcaatgttatgaatatagccaattaaccatagtacagatatgatattcacctggggtgaggatttcccttcaccattttctgcccatattttctccatctgtgtccatcagctgaaattcccacatcgccagctgcatgcactacaaatttaggcttcttgctaggtttcaagacagaacctgcatattctacattacttttcttcaatctgtttacacacagaaatgggaagtaaattaaagttaaaacaatatactattaggaaatctcatttcaacaataatatagagaggagggctcataaaagagctatgatagaggagaccaggttcacagaaaacttgcctttttttctgctctggttcattgtcaagctcttccttcacctttagatcaccattttcatcagagttcacagagtgctgccgctttctttcagaacttggaagtatttcgggtgtgctttctttggcagatgtggatgggtctgagtctttagggaccttacagggctgttttgtaacattgtaaccagaaaaccgctcagcggatgaaagcttgtgttccctcgtgttgttactctttttgggaggatcatgagtatgctggcttttgtagacaacttccgttacatgcccaaaatgatcacagcattcaattttcttagcacagcactcgaaaaatgtgcatttataatagctacgagaaccttgaggactcttcacttgcttttgaccatatttccgccaattgtagccatcagaagcaggtatcttcacagcaggaacagtagatacaatttttacgtctgaagaatttcgcttctttggcattgacgcacataactcattctcctttggaggtgagaacctttgttcaagtaaaattgggcttggagcagatgaaattgattgagtaacagaggtcggtgatagttctgataaagttcgacatgcgtttgactggtgctgtttttcttttggagcattgatatattgagctgttgcaccagtcgcaacttcattgtgagtattatcaatttggccctgagagaataaacaggattatagatgaacagaaaataatatttattgacaaaccaaacgcaaaaggcaacagacataacattaaaaggacaggaacattctcaacctatgtttgtggtgagatactgcaagtaaaagtatgttcgtggttcaaattttagagattcagagctgcagatgacttgtggaagagtgaatttagcaagaggtagagttcgcaacacatcaacacaagtttttcatcattatattccacaaattctgaaaaaatccaactagtaaaaaccataaaactattgtagagaattgagatggtgctaagaaactaggtaaagtgtgaagaagattcttctgcctggtgtttacatattcctatatttcaacattctatacaatttttagttaataaaatacccatcaatactattactaaaaaacgtttcattgatcctatttatgacttttgttattattgtttcttatcagaattaatcaatcttctaggccctaagtcatgaaggttcctcactgattgaacatagtaatattggtttattattttcccattctgtttcataataagataacacacaaatttatcaccatcaaaggggttaaaacattctcctgatttatttcaccttgagtaaggacacaacctatcactaagttttataaggctacctagataaagaggaacatctcatacctaatcttcttcctaccataaaggttagaacaaataaagagtagttaggttaggtaatccaaattcagtcaagcaattcacagtaccaaggttttcattcacatccacttagtatatcttaaaaaaacaacaacaactgtatttcccatcatgttaactctgtaattcttttttttatctgctgctgctgctactactagttaaatatatgtatatatatatatatgtaaagtttaaaggtgttacattacagcacaaactaatgtgctttcaccaaaatcaaaatcaaaatgattcactccactccaccaacaattaaccataaaagaaacagatagaatgatagatagattagatatattcctacctaaataaactcccaaaagtgtccaagctcatccctgtccacaaacaatcacaccaaatatggatggaagcatttcatttctcatagcagagtcagtcactgctctttcctttatatttacacctttacacccacccaaccccaactcctttcttgttttatatataaaagtagaacaacattcattattcaccccttaaaacacctctactactactactactataattatccaaaaccagcaagcagtctagtttcttgcccaccgcttctttctttctctacactccttttttctggtccttgaccaattaagatcgataccacctcaacccgctgcatccatgcattcttataattacaccaccccccacatctgaaatctgaatcattcagatttgattggattctcctatcctctcctttcctctccatttgagatgaacatattttcaaactctctcgtttacaactcctcatcatcaagtcaaaaaacactaagtaattcttatactataataattatttttcttttaactctgtaattcttttacaataataattatttttcttttaagtagaccaaatatttccagaattccaatactctaaaatttcacatcacgtctctaagttctcaatgttccgttttcaacttaattaaagagcctaaatcaaactagggactgtagagaccattatattcacactacgaatcatttccatgaagtctaggtacttgaagcaaagaggtgtgagcccaattaatatgatgaagattgtgtttcatagcgaacactgtgcatagaagctgtaagaactaagaacaattaagaaaggccaaaaactattttaaaatattcataatcaacatccctttattcagatcttgccaaaagatcagaaagattcatagagcacttcctatcttctaaattgagaaataaaacaagtaatcattatacaaacttcctctaagtttcaaaagaaaataatcatggtaccagaaatgacaatcacacaattcagacatcagaggtttaagaattcatcacagcagatccaattccaaaacaaagagccaaatataacattaagaagaaaaacctgtaaaatcataaaatcaccaaaacaaagatcaacgaacacagtgaccaagactgagctatacttacttccaaatgagctccatcctttgactttgaagtagaattcacctgaagaactgtaagatcaaacaacacactccatcacttcactgtaattcaaccataccaaaaaaaaaaaaagcagcttcataaacactcaaaacacacctaaaagcatatacatacatgatacatacatatataaatatatttatagttatttatataaaaacaaagacctaccatccttcttcggtacctccaatgaagaagacgcagctagggtttctaattgagtctctttaagctcggcaccgcttcgcagctctgaactctgcacctcgccgagtcgtctttcaccttcttcttcttctcctcctccatcgctttcttctgattcctcttcttcaccttcttcttctccttgttcttcgttcgtctttaggttttccgcttcggagctctgacgctcggcagccatggccaaatccttcgaagttttgagtaaagtttttcctaaaacgtcccagcgaccttttatactatccgaaacccaaacccgaaaacccgaaacggagctgtgtgtgtttcggattctagagagagaaagtgaaaggctttgttttttaagagagagaaagctgtaaaagggatagcaaagtgggggcgagggggtatatatgtctttgactaaagttgactcaggtcaggtcaggtgctttacttgacggtgtaacggaagccgttaatcactccgttacatcaggtgccgaaatcaccgttgatttgtttgacttgacgatttctattgatcgccgtccgttactggtctcattgactcggacatagtgacccatttatttgtattattttattatttaggcttagggaagtgtgtgaatgacgttttattttgtt

SEQ ID NO: 76867 - DNA, 743 bp, Cannabis sativa
tctcaatggaagaccacgaacaccattgctagaactccgaagaagatccgaagccggttttccagtaaatgcaactggagaatgagataccgaagccattctccaaaatccccaaagctaaattctcaacccaatccttaaacccctatccgctaatctcacagctctgaattaaaacaatcaacaaaaaattaactcaaatcaaatcaaattcgaaacaagtaaaacttcacacggcattaggaaacaaaaacaaaaccgaaatccattacataaagaaataaaatatacatatacaaaattcagaagcttgaaactccaaccattgaactaaaaagctcgagctaaacaacaagcatgcaaaaatgtaatatgaagtagtagaatgaagaaaaaaaaaacgaagcttaccagaagagaattggaaaaaggggttcttggagatacgatctgagagagagagagagagagaaagagaagagtaagaaaatggcggagagggttgaggacggtgattattaagaattgaaagagaaagagagagagggagcttcgtggagatcgtctcgtctagaaatgaagggtttttagagagagagagagagagagagaggaatggtggcgatacttcttatgagtgagaagtagtaaggagaggtagctgtgtcataataagccagcctttttcggtttggccgttgaaacaagcattttcatattcatctctttctatttttattttt

SEQ ID NO: 76868 - DNA, 1049 bp, Cannabis sativa
gaagagtctttctaattgtggtagaatacttaattaataactttactttagtcaacaatgtggaaatcgatcatttctagtttattatttgtatactgaaatttttaaatttcttagttttatacattgagttctttaattgtcattaaattaaaacaactttaataaatctactacatttcaatattaattaaataaaaaaaaataaaagcagggatgttttgtctgtactactctctattatattctcacattaattcgattaaaaaaaaaaaaagaaaaagaaacttaattgtggttctgatacttcttatgtataagattcatcaagacaatcacaaatatattatacattcacaattattatatatgtacattcttatatatatttgggactattatatattatttattctcgatattattctaattttcactctaataaaaaaataggaatttataaaaattacacaatctatatattggttatataatgtgtaagagagaattcttcctctcaaaaaaaaagagagagagagagagaattcataattgagtacagtttactaatttcttaaattaagaaagatatcaaataatatagcaatttcaccctttttttttccttcttctttcttcttttcttttctttcttattttaaaaggggaagagaaatatttttagacagttgtaatgttgttagagaatatacttgtagcactagagattatactatacaataatcatttactatatattattatcaaatatgtcaactatattatttgaagcaatatatatttatatgtatctctcaacaataatgtaaaacaatatatacaatctcaccacatgatcaccattttcttattatactcacatacatatagttttgaacaagtcaaaaaaaaaaaatgtaagataactctaatatatatgtcggcaaatttaattattattacataaagtaatactaaaattaaaaaaggacttaacattttgacaccctctaaaaagaggaaagttttatttgcaccctataaatgat

SEQ ID NO: 76869 - DNA, 3231 bp, Cannabis sativa
ttctgttatttttgttagttaagattagttcactttcagttgtaactgtaagagttagttagtttctattcttgctttcttgtattgttgaactatccctataaataatagaaactctcttgaagagagtcaatgattccattgcattttatctgtttcttacaataagttttccctggtttttaccttctctggtctttacctaagtctactggtttccatttctacattaccaaattttattatacggcctctctttgtttcagttcctcaaatgttcggagcaaggatttcctaatattagcagttgaagacttcaacatgtgccaatcaatacaccgtgaagaactcaagactctttctaggtgtgtttttgtttttgtttttttatatcatatgatatgatgatcgacctttttctggaatttttccagtaatgacccataagttgatgcctatgctaaaaactaaataaatggccaactgaaaccattaaagaaaataaatttaaaacaaacagggaaaatgaatttatcaaacatataaacataaaacatttgtaacgtaatgatgattgccgaattataaataaacttgtttttttttgctgaaataaatataatcttagatttaaatgagcataaaaataattactaaaagtctaaattgctgagaaagtatttcgaaaggcctgaaaagttaataataagtttgtaacttgatatactgaataagtttcagagcaaaagaacagaaaaattgctaggaattgaaatagaacttgaaatgtaaacaaacagaacctacactaacataaagccttcctttttaaaattgtgggttgttggtaacttgctttgtgtttcctcattgtcgtttagagtggaacacaaagcctttttaaaattgtggattatgggagatccattcagattttagcggagaatgggaccctttctgatatagaggaatctgtcactgcagagattctatttatattatgctactctctatatgatggtgcaatgatggatgctatcactcaactcagttcttgaaagaacgatgaaaggaatttcattgatcaaatccaaaaaggtagttacaaaacaagttattctctactctcaaatcacaatatcaatcatcaataccaattcccagtgtcaatgtctttcttatttataggctaagaccaacataactccctacttagccaaccaacaagaaaccaaagaagtgtcagctgaattagaaataaaacattcaacacttaagatctccacgctgccaatctctttcttatttatgagtattttcttgactttgtattttaacttatttaaaggaaataatttgttctttttccaacctgttgaagcaggtgggttgtagagaataggttggacaagctaaagtttgctaggcagaagctggcatactgttacttttctgctgctgctactctttcttctcctgaattatctgatgcccgcatatcatgggcgaaaaatggggtacttactacagtggttgatgatttttttgatgttggaggttcagaagaggaactagtaaatctcattcaattgttggaaaagtatgttttccctttttcattttcctttcaatccattttggttactatcctcctagttatttaccaagcaaaggtcatcaagtttttgtgctttgcaacctcaggtgggatgtagatgtcagtgttgattgtttatcggagcaagttgaaattatttatttagcacttcatggcacaatctctgaaattggagaaaaggcgttcgtgtggcaaggacgtagtgtgacaaatcacataatagagattgtgagcttgaatatttttcttggttcatgtttaacttttatcttctttctcatataatagttttataaaatattattacttcaattctttccattctgaaagtactgaaatattaatatgcatactctcaacctcatagaaagaatatctataatgattcatcctgttagtaatcagtgcctatatactggtcatgtctgcggggtaagatcttttctggttgtttggaaaaagataaaaagcaaaaaagtgtatggacttttcagtgatatggtagtggtagtgtatatgtagcttttgggaatgtttccaatgtcgagctgtgttattcactcaatttctgatgggacttcgtttaattaattacagtggctggatttgctcaagtccatgttgaaggaagctcaatggttgaaatacgagaccgtcccaacaatagatgagtatatgaaaaatggatacatatcatttgccttaggacctatagtccttccagcactttacttagttggatctatgctttctgaggatgttacaagacatcctgagctccattatctatataaactcatgagcacttccggacgacttctcaacgatatccacggcttcaaggtaactatagtttatcctttccactggtccataagataccttgtttaaaaccagaaagataaaatataagttttcgttgtgatgagtttctggcattttctaatcactctattggttatgctgcagagagaatccaaagaagggaaactgaatatagtgtcattaagcctactggcgcgtggttttggctctggttcttcttctgaagaagagatcattaatgaaatgaaaagtgttgtaaatggtaagaggagagaattgctgaggctagtttttaaggaaaaagatagcattgttccaagagcttgcaaggacttgttctggaaaatgagccaagtgttgcacctattttatgccaatgacgacggattcacctcaaatgagatgatcaatgtcgcaaaagcaataatcgaggagcccataattgaaaataaattgtaagtttagaattttgaatttttgatcaaataacaaaacatcaggtgcaatcaataatatgttcaataagttcaataattgaaaataattgtaagtttagagtatcgacctatcgtttttgtgtaatgtaatgtataaaattattgctaaagctttatcactaaggatgaaaagtgttcttggctgcctcatctcatctttcaaagtgcatttgttcaagggcgttcgatacatgacaacaatatggttagttttgagctacttcattcattgtttaaaagaaataacgggagaaggggatttatggcactcaaacttgacatgagtaaagc

SEQ ID NO: 76870 - DNA, 1176 bp, Cannabis sativa
gattagtcctctccctgtcgagaattatctctttctattttttctataattgtaatctctattttaaaattagtgtgagtgaaggaagggtgtacgagtcccttgtatttctgatcaagggtaccctaggtgatgtttttgtaactggtgaaatacaccattgttgagtgttaatgagttcaagaactattgctataattggtgttggtgatcaataaagattctattcattttatcccttgtgattcaagctaagttttttttttggtttagttaatttgttattgctggtttaattcaagttgtgtttgtttgagttgcttgtgttcttacttattgagttcagtttaacagtgaagatcaagtggttttaatccactacactttttttatcagttttagcatccatgtgaatctttttcaaaaaaaaaaaaaaatcactagtaaatttttaaagaattttgaattgtatacagtgataaaaataaagtttaaataattgcttacagcctatataagaaaaaaaaaattatccgtgcaacaaaatatctaaattttattataggtactgtaaactctttagaattttttgaaaaatttacaggtgattatagatgactacaacatacaaaatcataaaaacaaattaaactataaaactctcttgtatgttaaaacatatagaaggtatattagaacaattttttctcagagatgttctatagaattacctaatattcttttattttttgatctaaattataatgcgtttttaattgaagaaaattgtctttcaattaattaaataatttttttgtcaaaaaaataaattaaataaaattttaattctcgatgaaaacaatatgaaataagtatataacatgacaatatttttttgggaatggattaggtaatgatttcatattaacctttcttttaacatgagaataaaattaaaaaaattgattgggttattataacgagtaatgttacactttttttaacactattttaaaagtaatttgaattaatgttattatctcattaattaatataaataaatatatatttcactgccttccattaagtgatacttaaataatcacatcaaaatgaggttatgtttatagttgaacatttcctttgcaaatggatagttgggcttttttttttttt

SEQ ID NO: 76871 - DNA, 683 bp, Cannabis sativa
aaattgttaaagagtatttttataaaaaagtgctaactacactatgatgatattttttttatattggggtagaagaatttgaatttagaatcttttctttgtgacgaaaaatatgaaatcattagaaatgctctaaataacaataatttttaaaacttgttgaagtatagctttgtcacaatatctttaattttagtttttatttttactccaaaaaaaaaacaaactataaaacaaaaagaaagataacatttagtagcgattttcacaaagtgaatttcataataaacatctgaaaatgataacaaattatgaaataaaatgacctcatagtcactatccacttattcgtttatctacaacaacttattattatttcatatcaagctagctattatccaataatattaattaatgaccacataactagacataattctttaaaagctactatgtcgaaaccaaacaattgaaattgatcactatagttttgaatataaatccagtcctaacataagaaggaaataaaagaaaagtataatagaacgtcctaggggcagctacctgtctcatttgtttttataaaaagaaaaagtttatatgtgaataatttaataaattatgtgtataactcgattcaattcaattataatcaaccatgaaatacatatttgaaatctaat

SEQ ID NO: 76872 - DNA, 621 bp, Cannabis sativa
  modified_base (461)..(463): a, c, t, g, unknown or other
tttgactttggtttttcaactgtaaaaaatagtttttttttccttcggaaatggagtaaataatgtgtatttcaactcaattttcttaccttattttctactattttttaatttttacaatttaactttgataataatagctactaaacaaattcatttttatttacttttatattttttcaaataaatttcttaaactctataaaactcacacaaaaatgagaaagctttgaataaataaaagttgacaaagctttgaaaaagtttcaacttgttatgaaacagataaaaatgagagaatattttaggaatctgatttatcttttctctttcagtgtgtattccattaagaagtatagtgcctctgtttataacaaaatctctcaaatatatatctatagtagaacctttatccaagaatatacttggaactaagaaaataatattctaattgagaggtnnnaactaaatagagttacacttaaaaaaaaaaaatcaaaatatcaaaaaatatcaatgtaacaaaaataccaaaaaacaattcttaagaatggaactggaaatctcagagcccataaacatcattgtcgtggctttggtttcgatgaaaaaaatggaaag

SEQ ID NO: 76873 - DNA, 636 bp, Cannabis sativa
aaaacattttttctaaaattatagccaaacacttcttgttttaaaatacaattttctctttttaaaaagtaaaaattatttttgaactataaagccaaacaggcacttagtcgttaatgggtgttgagaatggagatttagagataaggaccattgagaatttgaatgaaaaatgttagggctacaatgacagccaaaataatttaaataaaattggagatttcgaccaaaaaaaaaaaaaacaacaggtttagaaatttgagaaagatgaagatgatgataaaggaaggggattagagatggggcttaagcaacaaaaagataaataattttttttttttttcttttcttttcaaaacaattctattaaagaaaagttcataaaaaatgtaattgaaaaaaaaagaacttaaacaaacataagagtaacacttaatatatattaataataacaaaattataacaattattctaagaaaaaaaaattacaattattattattattataaaaggtatcactatttactatttttaaactttgaaaatataaagaaagagaatttgtctctaattaggtggaatcaccattttttatggcaaaaaaaaaaaaaaaatctcgaattaaatgcaatataa

SEQ ID NO: 76874 - DNA, 1264 bp, Cannabis sativa
  modified_base (1116)..(1119): a, c, t, g, unknown or other
attacttcaactttctcgttggtttatttaaatgctatgacgccaaacaccaaacctactagagtaatgtcattagggagaggaagttctaattacaatattttagttaattttcatattcaaaattatatattaaaatattttttatatagttatattcgttatagtttcaatattattcttgtaattttttgaatagtttacataattaaaaataaaattttgatattctaatttactatgtgtatttaaaaaactttacatttatttttcgtcacggtaattatttaaaaaattttaaaaatttataaagccatgaaaatatttttggaaaaaaaatattctaacatatatttttaaaaataaaaattgactaaaaaattgtaataaaaagttaatggtacaagagtacaacaagtttatattaaaaagtgcttgaaaatctttaatagttaatgtttgaatttgaacgtaaacaagaaactgtaaatattaaaattaatccatcaaagtagaaggtacatacatatactaaattacactctgcaaaagccaaaaataaaataaaaccccatctgaccatttcattaatcttagagcaaatcaagggcataaatccggattaatcatgaacatgtcaaaattaagaagaataaaaaggtgtatgcaactcagaattagtctggaagaaacaagaaacaagaaaacaaaaaataaataaataaataaatactttgtttagctttcaagagacttggaaagatatgcaaaccaaataaactgccattgtaaaagtcaccctccaacttattatttttatcagaattaaataagaagaagatgaaagaagttgcttgtacgtcaaatagtttttgacattttgtgtttctagaatcctatgatggcttcaatcacccttcacaaataaaatatgaaaccatgaagaaaaagaaaaaaaaaatgttatcaaaattcaaatcttctttcatgcaatttgttttaactgcatgatctactcgtatgaatataaccagacccggccttgaattgaagtagatcataggcaaaaaaaaaaaaaaaattgagcttttattataaagataaatgatatttttnnnnattattaaaaaaatatgtatatttcttgaaaagtatttttttatttgagctcagtgggccttaagcgcggacctatagcccgcttatacctggagccgactttgaatataacaacaaaatgaatgaataccccacatgctctatt

SEQ ID NO: 76875 - DNA, 532 bp, Cannabis sativa
tctttcatttctatatacatatatcattattgatattttgacgagtaccgatatttgatttcgatttgtattcgaaaatgaaattcttgttttagaagggctctggcgttttcttgtgaagtgaaaaaagattagcgtttatgaatttgatggtcaaattggttataatttactatttgattcaaactatggatatgggatgttatttaggtttgagtttctacttttattgttttaacgttagggttaaattgatatataagactgcatattagagtcaggaagaaattaataactgtttatcacatgagataatcgatcaaagtgactcttgtaacaatttttgaaacgaggctccctttcttaaccatacaatatttgggtactagaaaactatatatatattttttggaaaagagacagaggtcacttgtttagagtgacccacccaagtttattgtagaccctcacttatggctgaggaaaattgtggtaaccgtggtaccaaaaaacaatatcaattgctatgtta

SEQ ID NO: 76876 - DNA, 530 bp, Cannabis sativa
acaatctctctggacccatcccggaatctatctccaaactacccaaactcacagggcttagcttagaccgtaacaaactgacgggaccaataccggactcattcggagaattccaaggcaagagcttttatcttgatctgtcccacaatcaaatttccggaaatataccaatctcgctggggaatatgatggaattcaaccacgtggacctgtcccggaaccatctcggtggtgatgcttctgtgttcttcggttctaataagaagagtttgcagtacgtggacttttcaaggaatttattggagtttgacctgtccaacgttgagtttccagagaacttgttttggttagatctgaaccataataagataagagggagtcttccagtgggattggcctcactgaaatattttcagtttataaatgtgagttacaacagattgtgtggacaaattcccgttggtggacggctaaagagtttggacaatacgtcgtactttcataaccgttgcctgtgtggtgctcctcta

SEQ ID NO: 76877 - DNA, 2010 bp, Cannabis sativa
aatcatttaaaaattatttcctaaaattttgtgagaaattctctaaccatattatacattatcattaaaaaaaaaacacacatatatataatttatttatgcatatatgtactaaaaattctgattaaatggttaccacctatatttataacatatatttacaacctaaccaactgcaattgctttgaatagaatttaagagaaaaatacattttctctaaaatatttagactttacaacattaccaaacaaaaatacagctacacactaaaatacagacagtacgtaataaattctcccttaaaacccctaattacaaaaattaattataaccccattttagctaacagacaaaaatattcactcatatatattgattaacaacaaaacgaattagtcatactcactagagtatgaagcttccatcgatcttcaagatcaaaaaagcaaagaaatcatcatcatcatcatcttcatcaagttcatggaaatggcgacctctcatcaaacacataaaaactgcttcattccacttcaaagccaaaatgttccagactaactacgccaccaacatggttctaacgtccgatcaaaaaggaaataagctcgctcacatgttagactcctcgtggtcgcaatcgcggagctttagaggcgcggtcgcggtgaaaagtactggggagctgctgctggagaatgcggttgaggcaatgaaaacaaagaggctttcgtttgagccgggatgcgggacgaattcgatactcggtggaggaggaggaggagaaggctatgatcagttcccttttcaggattgtgttgtgcaggctgtggatgctaccaatccctatattgaatttagggtttcaatggaagaaatggtggaatcttattatggagtgaagaaaaagaagaataataataattatggggaaaaggattgttattataattattataattgtgattgggagtatctagaagggcttctttcttggtacttgagaatgaatgataagaaaaactatggagttatagttgaggcttttatagatatgtatgctgggcttgttgcttcttgccctgttgctccaaatactactactactactagttcatgttctttctcttataatgcctctgcttcttcttccaaatccaaagactggtgggagatcaatattaacgaagccagctttattaaacgggcagagaaagaattgtgtccaaattataattaaataattctcataattattattatgcattgtacgaactattttgtaatgactttgttttgaactttcttaagttgatcataatttgacttcaattagtgtgccaatgtgtcatgcaagaaatcaagttagattttttctagatgaaaagtaaaatgttctagcttgtttaagacaaagatcatcaaattaatagggaagaccaggaaccagaaatgctaaaagacacgtgtttagtatactacctaaatgtattatattgttattggtataattaagtatcaagttctatatatataatttaatttaataactatgtgggaaaattacaactaaaggtgaagaatcaaatcaacgaaactttaaacaatcaaacaattagcgcaatgacaaagattaacaagtcacacacaataatcgaataaaaaatagagatgaacaaagtaatagaaaactagaaaacaattaaggcataaaataaagaaatcaacaccaaaatatgtattggttcaagatcgatagatttatgtgatctatggctctacttcagttttagagcaccaccaaatagtctttattaattgatagcaagaacaagtataatacaatcgagatcaattctctaatgagttctctcaaagtatttcaactcccatattcttaccctagaatcttcttcatctacagaagattcttattacaaaattcaaagccaatctctctcttttctttgtacctctctctacctctcaatattctctctctctctctctct

SEQ ID NO: 76878 - DNA, 2451 bp, Cannabis sativa
agttatgtcaatgatttgtgtctataaaattctttcattttggtttgacttatgtcctttttggtgagttatgtaaaaactagttttaatcctttcttttttggtcagttatgataatgtgttatgttattctttcaaagttaaggtggtattattgatatcgcccaattatttacactgcgatcatagtagtatacggaatttgttatccataagaagacaaatcaccactaaaaattaatttagtaaaaataaaattaatgtgatacaagaaaataagaaataattaaaatgatgagatgagaaaattgatcagataaagagctcatgaataaggtagaaatgtagttatgtaaattctaatctaatattgaacttaattcatacacagttgcaattctaaactattaattacaacgaggagatatacacactaaaagtacaaattaattaatcttgcataaattgaatcatttgtaatttgagaacatatcatattatatatcataaattgataaaatgtcattattggcagaatgcagtaaacgacatacaatataataaatacactattaatagcctaatttacataaaaaaaaaaagcatgactgaacttatataaaagatactattgaatttagaagaaaaattagaaaataaaaagtaatttaataaatgagatatgaaaatgaagtacaaaaatatcaatatcaataattaaaataagaagtacaaaaactacactctaacttcaccaatattactaatctagttcactcatttttgtcacataaaataagtgaaactaaaatagcaacaagagaaaaataaccaagccacaaagtgtattttttctactaaaaaattggatgtcgttacacttaatttggctctctatagagaaattacgagccaaatatggtacaatatttagtgggctggaacgcatgatggagactatgtgcgtcaattggtagttgtgaaggagtatttgatatgttatgtgtgcaagagaataaattcagcttaatgacatggctcttaaacgtggcattatgtaaatgatggcttgaaagatgctactctcacttggacttggaactttcaaagggatgaaatgaaagtggccttgccttgcaacgtgggggtggtctggtgattggagagataattttgtcttggctcttgttggagagtgatccataattagctattgggttgaatataacaccgagcccaattgctttattgaataagattaggcttaaatgttgagtcgaaatgggctcaatttgttgtactcgtttttatgattgctttttggtatttctgtcacaaatttttataaatcttaaaattaacagaaaattaaattaagttaaatatttctaagttagataattgttttatattgaaactcatgaaaataaataatttaactctatttattcatacaattaaaaggttaaaatatacaaatttgagcatttatcacatgatacaatactttaccattattttcttactattgtttctatagaagcttataacattatttcagtcaatttaagtgtgactttgatgatttcacagttaatgataaaatctttatattgtttcaagtaacttgttatcgtgtgttagtttttaatttgtaattttatgaaactagtttcttgatgttagatttttaattagttgtctaatgtaattggttttgtaatttaattttataagtcatttgttaagaatttttatgtcgtatatcttattttttttaagtaattaattcttattgatataactagttaatttaaattttctttatgtagctgatttttctgtgtcagatactgaattagctgtttgatataactgatttttgatatttatttttataatacatttgttaaaatttcttatatggtatggcttttttttttcacaaatctttcttttttaaccaattagttttactttatgaaaaaataacttatttttatgttcaagattttattgtttagtgtaaaatgtttctgttatttaatttgataagatatttgttatatgtattttttattgaaattaattttagtttatgctcattgtttattattcaaaagtctataaactggttttggtatatgtgttgtttctttaacttgatttattgtcattgtttacatggttgttattttatgagattttattttttattttgtattcattttttaacagataggaacagactctaattctaaacatccagaccttggaaggttgatccttttaagaaaattaaagtaagaatcaagcaagaagcaggtgaaaagaatgtatgtatactacatctgtataaaaattgattttaatgctttattttttgtttagtttttgataacggcttctcattcttctactttttagtttgcttttataaggctaggaaag

SEQ ID NO: 76879 - DNA, 869 bp, Cannabis sativa
taactgctgactcagtcctaccgatcaccttcatcagtcatcgttctttctttttttactgtggttactatagttttattgttccattcaaggcacacgtgtgtatacagtatataaaaaaagttaattatatgtgttcccaattatcgtaaattttgaatgggtagtaagagggttgatgaaaaactcagttatatataaatataatattaaaatgtcaggaatataataatttattaattttattttgcatttatttgtctcttaaatcaatacttttacttatatatggttttatccttttatgattacttcagattttttaggattgagtttgtatttgtgttttgaattggtgtacatacttattattaatctgtgaagttttgaatttcattgtcgatcatttacaaatgctccaacaaatttggtttggctctccatgcttcaagtctcaccgttattgattaagttgtgggatgaattcaataaattaactgtattgataaaggacaaatattattattagtgattaatatcaaactttcgatctcaacattgaatactatggatccaatgaacaacttctcatgctgtcactagcaacgatcttgttgtgccttccaatattgtttggaatctcatacaaagcggttagtgaagcagttattattattattattaaaaaattgttcctaaaaaatggtaaagtgagttttgaggaggattcaagtgatgatgatgatgataattcctcggatgatgagcatgtgagtactgtacaatacttattatgtccacaaaaatttgtagtttaaaaaaaaaaaaagaaatcttgttgatcttgtctgtatgtttagatagtttaa

SEQ ID NO: 76880 - DNA, 675 bp, Cannabis sativa
tatatatatacaacataaattaaaaatgtaagtcataataattaaatttgtacatgtataattagatggtaattggattgattttctaaaaattacatcgtatccaacttaatgttttctttataataacattttcttattatggtactgtaacaatcatgttacaaagaatgtcataatagtcttttaatttaaaaatttggtataactgtcttaatttatatataagataaattagagaagaaacatgcctaaacaattttgcatttaaatggggaaccaaccaataatacgacattacatgatacaagcagtgaagaaagttccacttatttgaggtataaatacattcctctccaaacatactactgctaatataggcatttttttatccataaacctgtaaatgtttgtgtgtataccaaaaccaaataagaatactactaataattgtaaacatttatgtttctccctgcaaattttcatgaaatttatttttcttccctttttgatgttttaatttaaacggaccacagtaacggattaaattttagaaccagctagtcgtcgcttagaagcattcgaaacagagacctgtccaagattatctgccttttcctcggttgccaaccgttcttttagtggcatatagtgcctcaaccaaaccccagtgta

SEQ ID NO: 76881 - DNA, 1896 bp, Cannabis sativa
accctcctcatgtaattctttacaaagtaataaaaatgttgatgtttttcctactgaagttgctcatccttctgctctttttattgctgaaaaatcaaatgttaatctttggcactcaaaattaggccaccctgccccccaaatcttagccaagatattagcttctttaaatctttctgccaatcttaaagatttaaaattttgtgaggcatgcaaaagaggcaaaagcagtaaactcccctacaccatctctgcctcacgagcttctcaaccccttgaattggtccacaccgatttgtggggaccatctcatacaccatctaaagaaggtcataggtattatatccatttcattgatgattacagcagatacacttggatatttcccctatcccttaagtctcaagcctatagcactttcctccaattcaagatctttgctgaaaagcaattttctttacctataaaatcagttcaatcggattggggaggagagtacagatctttagcatcatttctaaaccaacatggtgtccatttccaacatccttgtcctcatgaccatgagaaaaatggccgtgctgaaagaaagcatcgccatatcactgaaaccggccttactttgctagcacaagctggtttacctatgccatattggtggcttgcttttcaaaacgctgtttacttgatcaacaggatgcctaccaaagttataggagacatttctccatatgaatgcctttttcatagcagccctgattacacattgctaaagcctttcgggtgtgcatgcttcccacacataaggccctacaactctcacaaacttgctctcagatctgaaaaatgcattatggtgggttactcaatgaatcacaaaggttatttgtgtgaaaatcaagatgggaaagtgtatattgctaggaatgttgtatttcatgaggaggaatttccagctcttaacaagatcaccactaatcaagtacaatcttcctctcattttttggttcctactgcttcatttacaactccatctttcactaattttccctcatctttttatgtacctgctgctggaaacaataatatctccatttctcctcatggttcacgagcggctgttgcaccaataccatcaacaacaccatttgtgtctcctactgcagtagctactgctgctgctgcttctctcccttcaacaaattcaggaagtgtcccacagcccaccaatattaccccagaaattgccatccctataccagtaccagtcaccattaacccagaaatatccaccaatccttctccacaaatagtcccaccagtagctcctgttgatccacaaaatacagtaaccctttccaccaccagcaatcatcactccatgcaaactagatctaaatctggtatccataaacctaaagcctatgcctctacattacatcctcttcctgaatctatattacccaaagaacccactacattaaagcaagctttatctgatcctcgatggttcaagtctatgcaacaagagaattatgctttaacgaaaaataatacatggaccttagttccctacactcctgacatgcatattgtgggtaacaagtgggttcatcgcataaaattgaaggctgatggttctattgacaagctaaaatcaagattggtagccaagggatattctcaaacccctgggatcgatttcacagacaccttcagccctgtggttaagccagctactgtgagggtcttattaactctagctgtatcaaatgattggccgattacacaattagacatctcaaatgcttttcttaatggaacacttaaggaagctgtgtttatgacccagccacccggatttgtggatcctaattttcctacccatgtgtgtaa

SEQ ID NO: 76882 - DNA, 879 bp, Cannabis sativa
gactaaatttgtacaaattaagggagggtataaattttgatatgacttgtattattaaggccaaaaagtgaaatttcccaataaaaattgttaaaatatggtgcatttataaatttttagggcacaaataaaattctcttaatgtaaataagacaaaatgtggtatctttaaagcaaaatgtcatatttagtgctaaattaagtaaaaatagtaagtactacaccaaattgatgaaatatgtacacaaaaatagtgtcattgttagagatggtctaactaccctatacttacatgctgtctcatttcataatttaggataattatgaatagaaattattagcttacaaattgattcctttccttccacctaaactaaacaattagagaatgttaaaaagtattattggtgtctaacattctcagatattatatcactattagtgtaattaagtatcaaatgtcatgtaatttaacgtaataacatttaaaaaatataggtaaccaattgtagtgcgacaactctaaacgatgtttgtaccactaatgtctaataacagctcgaacaattaacaaaaaaaaaattaaatctctgaaattcaaggatttattggtaatgatttcatctaatgaagatttgcgacataaatatctaagtttaacttctatccatttgtagttgacaactctaaaaggtgttatcaccactaatgtcaaataacagctcaaacaattaacaaaaacaactaaatctcttaaattcaaggatttgttggtaatgattttatctaatgaagatttgcagcataaataaatacataagtctaactttcagttgtaaataaatacttaaatttaattttggcggtaataatacctaa

SEQ ID NO: 76883 - DNA, 1065 bp, Cannabis sativa
ttgtgacattcttcgatctttaataatatttataagtggatcaaaatgatattatatataaatatatagatatttacgaacagaatattataagtaaagttgtaataatcaattttgtgatatgagaagagaacgtattaggataacagggccatttcaactttcttacctcccatttaaccaaattccacacctaaaattgagctactacctattttaggcttttatgctctacaagtgatggcttttccataatagtatttaatatttactaaacgtattaatttgtgattagttagctatatattttaaaaattatataaaatctgatacttaattacacaaataatgatattaacagtaggacaatgctagacactctggtgctttttagcatttctcataattctatatatattttcaataggattatatcctatagggtatcaagtgtctagtaccattatgaggtggtgctctataattaattatggtttttttataattattattaaagtaaaataagtggtaattaatattaaattacatatatataataatattacacatgcaagattaggtctgagctaaggcgggctaagccagcacctaacacccaccaaactagggtccaaaaaatattttttacttaaaattatacatatatattttagtagtttttaaaaataccttatttttttttaataaagggtccaattttttttttaaaaaaaaaataaaaggcctttacacacgttaattacaaaagtgatatccatcataagtgaccattaacattttcattaattaatggagacattttcttttttaataattacaaatggagaaataatctaggttctacaaatattactaatacataaaaggacactatttaataaatagatcatatattttaaagccagacgtacgtttaaaacatatgtattacatctttattttaatttctttgtgtaatatattttatattggttaaaaatgtaaaagcaaataacagtaaaaataataataataataattaatagttaattttggatctaacaa

SEQ ID NO: 76884 - DNA, 566 bp, Cannabis sativa
accaaagaatacgaaggaaatgtcggttcttatgttgatgacgtgaaaagatatggtcgcgctgcatgtcgtaacctcgcattttcctcccttaccttgtttactacattctttctttttgcagcttaggtagtctggatctttctttaggaaaattgactgcgaaaattaattaaattattgtattgtataatattatattaaattatagtttatattatattagagactcacaacacttaaaggtgatactagttaaaaattattatattaaattatatataaaattcgataattaattatattactagcaatataacatgttgaagagtgctagctaagtaacactgatattaatattaatattttaatattttaatttatttatttattcgtggaattttaaggaaatggtcctattaaggtcggcccaaccatggtgggcccaggtagcacacggtccgttatcgtaccactgcgaagagagagaattttgttggaggaaattacactctataccctttttataatgtcctcttttattttggggagttatatttgcaccc

SEQ ID NO: 76885 - DNA, 3036 bp, Cannabis sativa
  modified_base (1742)..(1743): a, c, t, g, unknown or other
cgctcttccgatctagagagagagagagagagagagggaaagcgataactcgagggagaactagctttgtgcttcttggatactcgtgatctcagtggtggggtctcgtttgtcgattatgatcgagtcgaatcgccaacaatggccaatgatgtcggatgagttgaagacatagagtacatgtgtgatattttgaaataattttttaactttcaattttgttaatttttaattattatgaaattattttaaattatgaatttcaataatttttttttaatttttagtagctttcaaatgattttttatttaatttttaaataaaaataaaataaaatgagtagtgcgccaatcagatagtgccatgtgaatacatacctaccgcttaacgattaagtacttacaaaaatttcagaattataactataaatattacgaaagcaatccttttaagtatttaagtgcaactacaagtaattaaactttagtatgcaaattactcatcataatattccaaaaaaaatccatataaagccctatcgtcattacaatgacctcatcacctccacctagactgccacgttgtactaattaagaaacttcagtacttacttccacgaaagtgcatatgaaagagcatgtcataaccaaataactaataataaaataaaatcacaataagataataattttataatatgtatatatatacatttgatggaagtgactcttaagtctaagcacacaccactctttttcaaccatatatttttcttctctctctctttctctctctctccaatgaatttccaccaaaaccctaaccctaatatgactcataaccattttggggggaatatcgaccctctcatggactttgaactctctgatttcttagtctttgaggatggaggtgtagtacttgatcatcatcatcaatttgactctttatcttcacagagctttccttccccggaaaataattttgtgtctagcaacgacggtggaggcggctgcgatgacaactacggttgttatactgatgatcaaaccatcaacagtatgatgattggtgcaacatcaactaacactaacaagcaagtcatctcttatcattatcttaacacataatttagtttttctatttttcctcttaattatctatattttattttacaaaacattttactatcaagatatgtatgtatgcccacattgtttttttcacatttaattagaggaagtagtaatatttgcgcatgtgaatgatatatatatatatatttattaattggtttatatatacaatatgtacagtaaaaacagaaaaaataagatggatgaagtgggtcatagagttgcttttaaaacaaaatcagagctggagataatggatgatggtttcaagtggagaaagtatgggaagaagtcagtcaagaatagcccaaatcccagaattaattaattaattaaaatgataatataataaagtgatcttaaacactattgagataatactttcttttatttgtttattatatatatacatagcatacggaaaagaattgccgaaatcctctacatattatatatctctataataaattaattaatagagttcattgaaataaaaattgcatgggaccagttagcatttagcaacgagtggatcattttgatccgtctctctctttcgtctctctctcattttgccttcatcgattcatttatatatatatatnnatatatatttatatatatatgaacaactaggcaaagtttaactttttcaaaaaaaaaaatatatatttaactagtagcattattattttgcactgtacaccttatacttgattataggttttgtatataatttattaaatacgtgtgatattcgatattaatatagagagcattgttattaaacactagttagtggtgctcagtaccttctatatgtgtcatttttatgatagttaacgatattttttaaaacttatttttttaaattatatgagattcgctacttattagttacaccaatagcaatttaatactaaaaaagatgcttgacactaaggtgacgtttggtgggaggtaatgaaatggaatgaaaaaaaaacaatctccattccatttctttgtttggttacatattaaagtgttagaatgtcattccaatggaatgacctattctcattctcattcttatatttttattccttccaaccaaacgtcacctaatagtgcgcccctttagcaattctctaatatacattaatagcatgttatgtgtcttgtggactgtggtgatgtgtcccttagcattatgtgtggagaaacgctcaaagatactcataatatatatcacttgatatgatatagtatcattattgaaaaaattcaatatcaaatctcatttattattataaaaatcttaaaaatagctgactatatatatttatatagcggcaattcatggtagtactagctgggcatccaccttgatgcctcttagcaatggcccttatgtgtgagcattaggaatcgactgaccatgtacaagtttaaaaatacttggaaaaatcgaacccaatatatgtaactatatatatatatatatccacagtactatttgctacgcaatgcaaaatcggcggctttatagttagtggatcctataaggtagctagttatcatgtgatgtgcaataatgcaaaatggcatgccatatataacatatatatattttcaatcagtacatatatatttatttacttctgcggttcattttttatcgagttatcataattaaattcattagagataattaatttcacttaaatataattgaaaaataatacaaattgcaatattatagtgtctacacttctttattgtaatacttaatacgtacaattaacgtgtgtctttacagatctaatttccacgtaaaatcaaatatatataaaattattttatatatatgtaaaaaatccttcatattttgatatattacatatagactatcatata

SEQ ID NO: 76886 - DNA, 798 bp, Cannabis sativa
  modified_base (147)..(162): a, c, t, g, unknown or other
tttcaaacatcaaacaaaaaatttgtaattgtaatcgtaatctttatctttaaactttaaaaattaaaaataaaatacattcaaaatcttaaaaagaccaaaatcttaaatgaaactagcagtacgtggctcggcacgtacattcannnnnnnnnnnnnnnnatatatatatatatttatagaaaagcatgaaaaagttaatatgcactaccaaaaatattacttttagtaataaggtcttagttactatatttattttttgtgactaaatatcgattttagtcacaacaaaaatcttttgttactaagaagtattatttagtcaaatgttgtcactaatttagtttcagaaactaataaattttgtgactaaatatatatttagtgacaataaattgtgattttatgactaaatacactttcaatcacagatttttagtggtaatataggagtattaatgatttataatactatttgtggtgttaataacaatagttaataatatgggggtggtgttatggtggtggagtagtactactagtacatgatcatatcaataatatttcaaaatatatatgtagagtaatttaattgtaggatccttagtttattcctaattgcatggggtaatttttttggccaatcagattaaagtcaataaaaggttacatggtatattagtctgtatgtacacgttttttttttcgttaaaaaagagaaagaaaaaaatggttgcacctgcctatgtgtcaggcttggtttttgtcttttttttttgcttcacgcacgttaatgga

SEQ ID NO: 76887 - DNA, 777 bp, Cannabis sativa
aggccattgattactatcataaagttccagctattaactcaaatgggatgtaattgaatatagttttgaatgttgcagtttgtgcttaccagaatcaagtatggacatgctcattactgggcaattttgtttgtgttttggtttcttatctttggtatttgggcttctcagacacatggtacacattcaccaaagcctcccctagagtttggtcttaaggcttttcaaattaaatttccaccaacaccacacacacaaagaaacaaatatcaaaaccacacaatcaactacttaattacaaatagcaagaatcatataaaattcaaaagatgattagaacttggcatattaccaaacgatgccattttggatgcaggggcagcctctttctctggtaatgttgttgtcttaacattattagattcgtcaaaattgggtggaatggaaaattaaagagagaaagagcagagaatgcgaaatggaaaggatcattatattctgaaggttttttttttctctgtctaagaagatggaggcaaaataagaaatgagataaacgaaaagacctaaagaaaatgaaacctaaatcattaagacccattaaaagtaatcaattaattaataaaataaaatttaaataaattaaaaaattagaaataagttaaaaaattaagaggacaaagattagaaaataagcataagtatgctgccacatggaatgtttaaaaccttcctatatatattgattttttattttttgtaatttcattttgattc

SEQ ID NO: 76888 - DNA, 970 bp, Cannabis sativa
cctgtactttttatggtggaatttctttcttaaaagtggtaatatctaattgaagatatttcttttggacaaataatgggagatgatattttaaataggcgtcttcataatatctttaattcaattacgattcaatctaataatccatctaatctaattcacatttacatatatatggaaagtatttcttattaatgagtattatacaaatttaaataattatcaattttaaaatattaacccattaaattttggtctgataaatttagctacttaattaaaaaaattatcaaaaacctatttttcttttacactatcaaaaatatgtttatatgaaaaatatttaagtctaactcagcttttttttatcatttttttgccaagatattttttttcgactgatggaataaccctaacctatataatgtaaaaataaaaataaattctaattaaataaaaaaattaatcataaaaactcaaatttttttagtattacacattcataagtaataccctttaagagtgcaccgttatatatatttaaaaatattatatatacaattaatattttaatgttaaaaaataataaattaaaaatctagtacatatataaatataggcagtcgattttgttcccattttctaaaattatgaattgtgtttcgttgtacgacataatggacccaacatactttaatattttctatgaatttttttattgatttgacaaccggttcttgtaggtttcttccatggttgtcacttttcttttttcatttaataaaaaagtacaaaaaggcttaatcaaatggcagttggtggtagttaatacaatagtactacagagaatgtgtctatattgtcagactgaggttatttttgtcttttcagtccttcatatttttttttttttatgaatttgtgcagtagtagtggagtatgttatatcacgtactgagtatatttatag

SEQ ID NO: 76889 - DNA, 714 bp, Cannabis sativa
ctctctctctctatctatctctatgtgtgtgtgtgtgtgtgtaaacacgcacatgaaggaacacacaatcggaccacccacacaacttacggctcacctcgaccttgcgaccacactacccacacgacccacggaccactgcgaccacaccacccaacaccgacaatgtgtttgtcaaaggtaattcctaattttttttcatgaatttttaactgtaattattttattttttcatgatttagggttaaaacaatcagatttagggttaagtttgtgtttttagtggagaatatgtaatttttgaggtttttaggctcatatctatgttttggaggggaatctgtgattttcgcctcgcccgatgtagatccgatgtaggcccgatataggacccgatggtagtttaatgttgaaggagttgaaggttgaagaagatagcccgataggtctgatataaggcccgatggtcctcataattttaaattttattgtgacacgatggattcgatatagggcccgatggtagttttattttgatatttttaaatatatatctttaaaggggtttttttttacactacaaaacagttttttttttttttggtatttttacagaattccacataaaaacctctatggcaattaacggagaaatttaaatcgtaactaaaatctatataataaaaactaccgaaaaaactcaaacgataaatt

SEQ ID NO: 76890 - DNA, 960 bp, Cannabis sativa
  modified_base (169)..(171): a, c, t, g, unknown or other
tagatcacccacacccgaagcaatgattttggccaaatcaagagacttacaacgaaaaggaataccatacacctgaacccagaaaggaacatagtgcagctgatcaggagtaatgggaaaggaagcatcaggagcagcaaagatagtgagactctgggcaaaatgccannnctgtccatcaagaattctcctcttatcaccttcgcaaccaaaagtgaccagaaatagcccatccgaatgttcagatatgactacaggaaacctacactgagaggtccaaactggggataaagttttgatcaaggagggtcgactataatgcttgacagtgaatagttttaagagaaggctaatggtatcagtggattcatcagggacatcagcaagagtatacacagtgttttcatcaggggtaagggttaaagactgagaaggaaagggattaagcgcatccatcttagaactattacgcagaacaatcacaaagaaagagaagatacagaagagagatggtgaaaaacaaattaacctaaatctatctttatataaggaataaaagagactatgaagagtacctcttggtttgcctctgatcatagcttggcctctaatcttgatagatatcatgattattccattctcccaagcatcatcaactccttcgatgcccctcgccgccatcttaatgaaggaaattgggtttaaaagatatctggtgatttgatagttagatacttgatagaagaaaggagaagaagataataaatgcagatgtaaatttagacctaaacgagacactggaagacaataaatgcagtagaaattttggtctgaagaaagattgaggagataatattcgtcacggcaataaattttgcaattaatgaggaagaaaacgaaatgattatgattaaaaccccaaaagaggtaccaaataccaccacaaaaccaatttgggtg

SEQ ID NO: 76891 - DNA, 586 bp, Cannabis sativa
aattaaaaactgcattatccattaattttatccttttgtttagtgattccttttctccctaataggacgaacaagaaagaatacttgggatgggaatagaatagttaaggcaccaaagtcatgtctaatataattttaaagattttttaatttttataccttaaaataaattttttttatatatttttacgaaaattcacaaaaaaaatctacatataataatcaacggaacaacttaaatcgtaattaaaattcacatttaaactcacatagaaactaccgtaacaatcaaactataaattttttttaaaaaaaaagttaaaaataatttatagaataattttcctaaattttatattttatttctatatatgcataatatatatttatgattttaaatctggggcaagggaggttaattagagaggtagagctttcggtcagttgagcacaaaatcacacgattcacgggggttgatatagtcacttttataggtttgttcgttttcgtggaccttttttagtgatatttttttgttcatgattacgatagtgttttcgtagtttcgatgactagacaatataa

SEQ ID NO: 76892 - DNA, 871 bp, Cannabis sativa
  modified_base (844)..(845): a, c, t, g, unknown or other
aaaataatttccaacaattaattacttactattcttaaactatatatatctaagctatgcttattaattttataatttaattatatttaaattttcttaattttatttctctcatcatagagtgttcttttgttaccaatttagtttataagtttatgaagaacgaaatagttaatattctaattaatgtgaattttaattcaataatctaaaatttaattaatttatgtgttaatgataacataatactctgaagtatttatttaattattaacttttattcataatttttaaatttaattttagttattcatcattatattccaatatttccatattgtttttataatatatataaaagttatttgatatccatgcagtgttggagatattaagattgttgaaagtcgttataagaaaaaatatcaaagttctagcacatatgtattgcagattttttttttctttagagatactatagattatttattatttatcgaatacaaaatttattatttttccttcttctaagagtcaaacaaacgattatgagagtttttttaataaaattaattaactaaatttaaatgagtgtaattttattaatactaaaataattatgagtatatatatatataatatatttgaaaaatatgtctttaattgattcattgaattttaaagtcgttttctacattagcataatctaataataatttttggattattttctgaaaatatttacaaatctatagattcacccctaataaaaataaatttgtattacttcaaatcaattatgtacatccactttatagtttaatgtgttaggttttatgccctnnataaaactctttacaatctgattagt

SEQ ID NO: 76893 - DNA, 3314 bp, Cannabis sativa
agaagacagagagaaatgaagatgaaagtgaaaagggagaaagtgaacaatggagaatgaaaagctcaacttgactcagttgaggaaagaccttgatatttataatatggtttggtcagagaccttacaacaaacttgtgtaacagaaaatgacagctgtacaagaacttaacagaacaacagtaaaattgttttgtgattagttatgttcgttaagttcgttatgttcttgacagttagtatttacaatatctaaccattttttttaaattgagaaatctttttgaataatagtcctaaactttatctagcagttctcttattttgaattttacgttagtagttggaataagtgaaagttcctcactttcacaaccacttccaagttcacttttcaccttgcattccaaaatattacttcttatctcatttattaagctccttaactcctgagaagttttttggtggcgtttggttgggatgaatgaaatatatataatgggaatgagaataggaatagaatggaatacaatttaaaatgcaaaaaaaaattaataaaaaaattattaaattttttttcatcatgcattggaatggtctttccttccattttaaaatggaattgtcattccacctaaatggtggacagaccattccattgaaatgacattccaacactttaatatgcaactaaacaagggaatggaatgaaaattgtttcttttcctttccattctatttcattacctccaaacaaacgccaccttaattcattaattagctatattcattcacagtttgtacttttatttcttatttgcatttcctaagaatcactaataatggctccaattaatcataatttcctaattatcttcttaaatatctttcagtttagtttttttgccattataaagtctacaatgtcctaagaatctactctttcaccaattttttcaaacacaatctaaagaatagaacaaacaagcgtgtctaccatgatttatggagtcacaaattcctcaaaataacaagaaaccagaaaaatgaaaatgaaaatggtaccaaaaattaatttgtaacctaattgtaaagtcataccgaaaaaatataagagtacttgtacttaccattaagattggatgagctttgtttgttcttaagcaaatctactagcatccgaatgagctccttaactctctttgggtctgcaattgattttcagagttaatgagttataaactgtggtaatgatcattagagagttcaataacaagaaaacagtatgtctcgggtttacaaggaaacatcatgtaatgcatgaatagaatcaaaatattaattacactaccacatccaacacttctcactgagtcaagtgaaatcatattataaaagtaattgtggtttcatatatttgtttagcataagaaaatagacagatgatatcttcttttctgaagatcattaaatcaaaattcataaagtacttaggatctcataagtgactattctgcttagatttgaacttaatattatgccaaaaaaaatagttagtttaggatctcagtggctatactaaaaatagttgcctgattgattttcatggattaaaatgaaaatagtacataccaagcaaaagtattagttagaatccaatgacatatatatataaatatatatatatatatatatatattaatagatttcatggtccagtaatagctgcaaaaatataataaataaataaaatgagaaagagaaaaatcttgcaagaaagaagatcaaatgtatacaatgcaaatgcaatccaataaccaaaaaaaaaaaaaacacatcataaataatcgaaacctttgcttgttgtaaaacaagtaaagaacaatatgaagcttcacttacgaaaagagtgaaatccagaacaagctggttttgaccattacgtaaatcttcaaaatgaaccccaagaaaccctaattgattgaaccaaacaaaagttaaaatattggtagaagaaagaaagcatgctcagctcagagtcttaattctttcactctaatcgagcctaacacgaaaaattgttcttactttcaagaaagtagaaaaagaaatgggtttaaaccaaaaagttccaaactttaaattaaaattgaagaacactcttcataaaggcccagatctacaagcctagagagcaacaaagtcaaatatagcaactgtactgaaaatgggtacctgggaacgaaagaggagccgagtgaatgagctcatcatcaacagcaaaccattacagctccattgagctcttaattaatgaccagcattgatcagttccaaacatggttattcccgaagtttcagaaggacattaataaaggcaaaatgtttcagatcccagctaccatattaatgaaaagaagaagagtgattaagttttgagacatttatatatatatatatatatatataaacacgaggagaaagaaaccccaactctcttttctgggtggtttttgctagtaagatatatctgtatgtgagtagcgagtgaatgtgggtagttgggttgggtttcaagtaccgttgctggttgaaaaccattaaatatttgtccctttatttataaagtttgcatgcggtacgtaaatctctgcagcaaaattaaaacaacttattaacgtaaatggccatgcattcaaatgggtttggttattgttccaattaaacattcctatttggtagaatagtcaaatcaatgtgggctccatcacactataggagagaatggtcaacagttgggttgggttggacctattgccaaggcatgtgctgcggttgggctttttaaaaggtatataaagttaaaaaatgaaattgatatttttaagaactatggtcaaactgagtaactatatatatatcataatgcactgtaaaattacaaaacacagtaagtgtgaaaataacaaaaggttaaaaataaactgagacaagtatttctctctccatacaaaagaacaagtgggtagaaaagcaacctttttagaagtgaaaagtaatcagctactattataatttatttttgagggatgcacatgattctaatgtaaatgttctgaagaatggattgcattcaaccaaatccaaaagcaatgcatgctccgaggagcaagagcatgcactgcttttggattcggttgaacgcattggaactacaccggcaactaagagatgatacaactgagcccgaatgccctacattagttgatcttgatgataacaaaggcttattaagcaatcaaactaatgaaaga

SEQ ID NO: 76894 - DNA, 1846 bp, Cannabis sativa
ttaatttaattttaataaaatactacatactataaaaattaagtgaaaatatattttatttgaccctctcatctggttctaccactcaatactaagctactttaaaagtagtcactattattatttaatatatcatatatttttattataaatatattatcaaactaacaaaaaaaaaaggaagttagactttttacctttcgagaatagctaggccaattttatttattttactttaatgggtaaacaattttagttgcttctgctactgcattgcagcaagaatatcaatcgttgcaggttgaattattagccatttatgctggtctaggtgggatttcagcgacattttcaaagtttcagtattgaattaatctactgtcttgagactatccaattaatccagaataggatagttgtagagatattgatggggtactgtttcaggagcttgttatttagtataggcggctgatggctgtgcctagggcctaggattgagcaacggtcggtttagtcggttttttactcaaaaaaaaaatccaaaattcggtttttggtttttatggttctaattcgaaaaccgacctaccattataaaaatatagaaaaaccgactgttttaattcacagtttggtcggtttaaacaaaccaaaccgaattttaatgcatgtatctcaatttaaattaaataacatatacattaatttattattattaatttttaacatatatatacgtacgtttgtcttatatatatattacatgcatcacagtaaaattatttaaattttgagagttatatatttacattataatatacctctttgtctttctttggtgtgatcaactaccaactccaagttggtcagtcctttttatggtaaagaatgcgaatgaaagagatatatttgatatgaccttttatttataaaattaccctatacgtactaattatcagttatatattatctccaaattaaaggaccacttgattttataattaccatgatttgtactttttttttaattaggatgtgactaatatttatcagctataaaatgtagccttaaagtactacatgtgtttctaataatgatatcactttatcattgccaccgaaaaaaataacaataataatataaaaaaaatatttttaattaataatatcaaatattatatcggatatgtatttgattttttttttttatgaaattgaatatatatttaattaaatatatatagtttgtcgcttgcgtaagtaattagtactattttaattttcagtcctttttttttgctataattttcagtctttaaactattctactaaaacaacaaatagaaaatctttagtttattctcaaataattgttaacttttaaattacaaacatatataaatcaaattttgtaagaaaataataatatatgtccctttctgctgactgtgctaattggttaatcaaatcttcattgatatatatatatatatatatatatatatatctcgtcatattatcatctcctcatatacaaaaacaaaataaaaataatcaataatggcattaagtagtatctatcatttatttattcattttggagtacgtatatctaaatatatatataatcaatatataattaattactacaatacatatataagacatgtcatcactctatcatttttccatatattctgtataattttcagcattatactcttattttttttaacaaaaataaaatataaatatattcatatgatttttgtcttaatagaaatataatatttccattaatcatgcatgcatataatatttaattagccatgcctcacacacg

SEQ ID NO: 76895 - DNA, 5116 bp, Cannabis sativa
accgcaaccaacaccagtacagcattttcactgagctaacccgatctaatcgccccgtcagatccgcttctatttcccggtgaatctccggtatctttatcaccggaatgtcagttaccgacgacctcagcaggttccagctttcttcttctctttctagctgtcttggttcaaaatgtgtcagaaaatttccgtttgttttggctttcttaacgaatggttccgattattaacagtactttttcgtttggcctgagaacttttagctcgacctcgatctcaacactatacggagctttttctttctcgaatctaattctctctctagatttgcttttttttttctacttattatttgtgctgtaataaaagcagcagcttttctgaatcattatttttaagcttaaaaatcttcgctttttgttctatcttagtacaatcattttatgtcttttttttttgttggttcattttttgtggtcggtccattttccaatttcgggtttttgctttaattttcgaaaattttggctctatgagcgctaaatcaaattaaatgtggcttctttgagacgtaaattggggatttttttttggctcttttgcttggagtgtttaatgaagtataaattgatgtgatatttcaagtgggtttgctgaaattttacacagcataacaactgatttgtctctatttttcctctcaaatcaaggattaaatttcttcccactcttaccaaagaactctctctctctgcacaaaccacatctggctgtacctcatttctcctcaaaaccgtttatttggatatggccttacattttcttatttgggtataactgactaataacccctctagctgaggttgaagtctgttgtagctgtctagcaagggaggttttaattatagtttggtaaagttatcatctttataagttatgtatatatataatggtatatggtgttgaataatattagggatcttgtttgacatttttgattttgtgtattatttgggagaagattatttttctgccttttgaaagatttgtgaattaagagctttgcttattggaaaaatgaacttaaaaaagttatgtatataatcgtttgcaggtgttaaaatgaatgtgactcagaggaggaaagctaatggtaatggagagaaacctttcccaggatgcttgggaagaatggtaaacctctttgatttgagcaatggggttgcttcaaataggatgcttacagatagaccccaccatgatggtaatttttgattcacactcatatttggtttatgcatcttgaagtataatcgtattttgtgaacctgacaagttatttcttagaattgttgctgaactcgaaaagttatgactaaagccatgctctactaataaatccttttgataatattttatatctacttttcttgttacagatagtataaatggtgcttagtttagcattatctgatggattttagttacaaattgatcagttcatgatgtaaatgttatatttgctaggctcttcacttgcgaggagtcaatcggatgtatcaagaatgagtttgccttttggagataagatagaggataaactggtaaatcttgatggatttatttatcaatctcttatgatgggagttgtattttacttactgtacagtacactcaagttccctgatattattgtgtgtttgatgcgtgcagatcgtatctgagttcaggagaacttcatccaacaagaaggccaatgggacacctataaagatgctcatagaccaagaaatgtcaaaagagattgagtctagaagtgaacctcctaatgtagttgccaagttaatgggccttgatgcattcccgagacaacaaccccatccatctctccaaagaagcaatacaaacaattattcaaaacctcctttcggtcattcagggaagcctttgggttcttgggaacaagaagatgggttcgcagagaatagaatgcaatttgacgtccatcattgttcggaacgaaatgaatgtaaggatgtttatgaggtttggcaacaacctgagaacagaaactgtataaaagacaaatcacctcaaaaggaaaggcataataatgcaaatacaaatgataggaatatggcccttgttcgtcaaaagttcttggaagcaaaacggttggtcacagatgagaagcttcaacagtctaaggaatttcaagatgcattggaagtcttaagttccaatagagatttactcaccaagttttttcaggaatcaacttacacattttctcaacatctatatgaattacagtctacgcctccgcctcctgagactaagaggataactgttcttaggccttcaaagatagttgataatgaaagattttctggatcaaggcagaagagtgataaaccaacagataattttgtgcagttgggtcaaacggctgtattgaataaaaacaaccctggaaattctcctatgtttcctgatcagaaagttgatgaatataccatgcaaccaactcgaatagtggtattgaaacctagctctggcaaggctaatgacattagggctgtgactccacctatcacctcatcaaaaatgtttcaagatgaaaacatcttcgaggatcctgaagatgatgaggcgcgagaatcaagggaagtggcgaaagagatcacgaggcaggtgcgtgataatctcatgggtcatcggagggttgaaactctgctttcttctgtgttttccaacaattatactggtgatgagagttcattcaacaaatcagaaaatgagtatgttgcagaaaatctcagtgatcaagaagtcatgtcaccatcttctagacattcatgggattacatcaataggataggcagccccttttcttcctctttcagccgtgcatcttgttcaccagagtcttctgtttgcagagaagctaaaaagagactttctgagagatgggccatgatggcatcaaatgggaatgggaactctcaggagttcagacatgtccggagaagctcgagtacattaggagaaatgcttgcactttcagatatgaagaagtcagttagacctgaggatgaaactaacaaggaacaagaaccaaggaaattagtttcatgcttgactagtgacttgatcaaagaggatgctacttgtgattctcccataaatcttctaagatcaaaatctttacctgggtcgtctacagtgtttggtgctagactaaatatgtcaatttcagatgctgtggctgacacggtaaatggtcccaaggaactgaccaaggcaaagagcactaagtcctcattgaaagggaaagtttcaagtttgtttttctctaggagcaaaaaatcaagcaaagaaaaatgtggtccatctggatccaacggcgaatctcaatatgcttctgctgaaaccccgaggtttccattgcctcagtcgagtaatgagaatggtctcgaagagcgtttgcctactacttcttgtttgtcaggcataatttcacgagaggtaattaaatttgtttttttttttttgtgatgatggtccgaattaatcatatttgcatttttctaacatccatttttttgttcctaaattcaatattttaagagttttctttaattttagcaggcagggttgtctctgatgaaaccaacggtgtctcggggtgtcggtgagaatcaagaccagcccagtccaatctcagttttagaaccccatttcgaagagtatgacaacttgactcgtgagacttctggctacttgaagctggatgttcaaggtagtttttctcttatagtgctaatcagttttcccatgggaagaacttcatcatgtttttttttttttgtttttcttctaactttgtttttgttttttaaaacaggaggattactaaggtcaaacttaattgacaagtcaccgcctatagaatcagttgcacggactctatcgtgggatgactcatgtttagagacagccacttcatacacgttgaaaccctcttcggttcccttagtttgtgaagaagacgaacaagaatggctttcttttgtccaaactcttctctcagctgctggattcagcagagagacagaatccaattcccgagattcagtgctccatagatggcaaacacccgaagctccactggatccttcattgagggacaagtataccaatgtagatgacaaagagcctatgcatgaggccaaacgcagatatttaaggtcaacccgaaagcttgtatttgactatgtcaacacagcattagcagacatgactggttatggaccagacatgagcttaagcatcacatgcaagggggcccatgataggttaatggagggtgattcaccccaattgttggactccttgtggggccaaatgaaggactggttttcgggtgagttgaggtgttattcggaggatggtggggacgccaccaccagcctggtagtggacggtgtgttgaggaaggagattgtggggaaggagtggaatgaacttacgagattggaaatggataatataggaaaggacatagaagggagtttgctggaattgcttgtggaggaggctgttgttgacttgacagagaggttttgagagattttgtcctccaatatcctttttttttttttgtttaattttttgtattaatttaattgtaagttgttgtaactcaattatctgtgtatttgatttaaaaccaagaaatgatagtcctactactacccaccactaccatcaacttatttgtttatgttgcaaaaacagaaagaaaagaaaagaaaaaaaatgttgtatggataatggattatatgtgtataaacattgtctcctcttttaacttgaatagcttaacatggaaattgagctacaagaaactacagaaacattattatttttgagacccatcttcaagtttgattttgtctctgtaattttttatttttctgctcccatgtttttttttttcttgagaaaaaggccttgttaaaacccctcgagtaaactcagtagaaaaaatctcaaaagaaaaaagagtgtgaaatactattagccattttaagacaatttaaaagagata

SEQ ID NO: 76896 - DNA, 664 bp, Cannabis sativa
accctttagcatttttcaataaaaatacatcatataacatgtcaccaaataataataatgtaacgaataaactaaacgaaacatatagtatgacaataaatatacaatccaattattagattgacacatatcaaacttctctaagaaaaagaaggataatgaccttgagaggcatggatggagtcattatttttaaaatatttagctttaagaagcttgacaataagagaatcaaggtcagtgaaaatctaccaagtttgtttagcaagcatatcttgcttgtggtgaacaatagctcaaaactcaagacccccaaagaatttagagttacaaaaaatagaccatttttttccaatgaattttcataaggttatttattgattcccaccgaaaattagccataagttttctaaatatttacaagtagatgaaggaaggctatagcacattgcaaatgaaggactagcttggataacagctttaagaagaatctttttaccaactatagaaaataatttactgttccaaacattgagcttataactagctttttggagaagatagtgaaaggaaactttcttagaatgagtgaaacattgtggcacattaatgtatttattgatggaagttgtatctgttggaattattttacgaggatctagat

SEQ ID NO: 76897 - DNA, 1165 bp, Cannabis sativa
  modified_base (1116)..(1118): a, c, t, g, unknown or other
aaagaggagaagaagcccctggcatttggcgatgatgagaaacaataggatgttgccaaccagatttgaaaatgaatccagttcctgttaaagcattctgtttatcaagggctgcatccacaaaaagagcaggagaatcttcttggaagccaattgattgcagtcgctgaagatgctgagatatggaagaggctactgaattcggttgaattacacgatagctttgttaagcttcattataatcctgtaaataatgaataacaaactcttccacattgttaataaaaccagatttctgaaataaaattgagtttctagtattccaaatatgctagataatagcaataaaaattggaaaatcccgtgtagagatatgatgtagagcctgaagataaaaatccgcaatgtcagttcgattgtaagcatggtaaaattgtttgaatgttgaagacttccaaatgctctttgctctgggacaacctagaatggcatgagtgacagattcaatgctgttaccacaaacaggataactagaatgagggataatctttttatggtacaaatttaatgcgcagggtaaaatatggtggaaagctttccaagtgaaatgcttaagcttcggagggataggaagggaccataactttttccaccaaggctgaaaggggttggggttggaggaagaaggagcatcaatagaaacaagggtagaagcaagatggtaagctgatttgactgtgataatgccagaaggatgaaatgcccaaatgagagaatcatccaaagttggatccaaaggaatttggaggatatgatctacctggtaagagggaaaaaaatgttgaagcttaggcacattccaagtattatcatggtttataaagaaggagacaaaagcttgggaaggatcaattgggtgtatgagagttggactgagaacgttagggatccagttaggtgcagatagggaataattggtactagccccaaccttccagaccagacctttcttgagcaattgacggccccaaaggagacttctccaggtgaaagaatagttatggccaacaggagcattcagaagatcagtatgtttatgttgcccctgattttgcnnnatatacgtggaccaaccagacaaggacacgtggatcaagcaacttat

SEQ ID NO: 76898 - DNA, 1027 bp, Cannabis sativa
tattgctccactgctgaaaaacacatatccaaattaacacacataattagtgtatataaatatgaataacttctaaaaaccaaataaaaaataaaatattcatttatgaatcaattgctttcttttgtaggttttcattggcaccccgaattgattataggagcttttttatttttatactttaaaacagttttttacaacctaaatcacaattaaagaatcgtaaagcaaccaacacagaaattactgaaaaaaccactttaaaaactcacatgatgtaattccccttgataatatgtagctaggtacatattttaaactataatggcatgttttatacataatagactataggagtcgaaaagagacagcttaaaaagtaatataatataataaagggaaacactttaaagagaactgatattaaaaattccttccaaaattctggaattgaaaaatatagaaagactttattattaggtcgtattatcgaatatatcacttagttaaacatgtcatgactactgtagaataaaaaaagtgggatttttctgttcattcatgtatgatgcatatatatttccatatatggtcacttacatagatgcatcatagattttaattccattacaagaaaattccacggccaagaaacattgatgatcattaataacaaagttacaaggttaattgaaaaccagaaagataaaagctgaggaatattaacagaaaattacatccctgtatcaaaataaaaagaaaacattaaattgaaaaaacgtacctgatatagtattatgattaaggtaatagttaatgagattggagaagacaatgcaaaaaaatatttttttcttgggaagattcagatctgaagaaggagactgtttcagagtaaagtggctatctactctgggaatttgcacacgtaataattaatttttattcattaacatccctagtcaaattaacttaattaaattatgataaaaaattaacttaattaattacattttctcaaaaaaaa

SEQ ID NO: 76899 - DNA, 1642 bp, Cannabis sativa
cttcatgaaattcctttgaaaaaaataaggggaattgattttgaaatttcagaaaaataacattatattataatatattaaaacattattattgggtaccagtgtctaacacgtctcataagtagcaccttacgactggttagcgatattgtctaaaaattattttcctaagttatatagagcctgatatttaattatattaatagcggtatgataccgaagagagtgctagacactaatagtatcctttaacaattctcaatacattattataagttgagaaactcttctacctaagtagaccctaaaatcgagcactacactctttaagacttttagagtctaaaaaatgttgaagaatttacactatgggttttaaaagatttttttatttagatatggaaatttttaagtttggttattttgtatgatattttttatttgttttaaactattttatggtatttattattttatgtacatgtaaacttaatttttttgatggattgttcatcgaaaattattcatcaataaactattttttttccatcaagtaattgattttttaaaatagactttttaaaataaactcatttatctcatatccctatgtcatatgtgtcaatataggatgttgagttcttgtagtccttttaaaatggacttttgatggtgcagacaaattgacaatagcttactaattatctatttggaatattatatatttttgaaagggatcatattaatatttagatattattatctacattttaatatctcttttatgaaaatatttctcattattatccttttataaatgactataaaataataatagatgaggattgtataaaagagtaaggcattattaaaagtgctctgcgtaggaccatttcaattaacacactgaaatgttgatgctatatatgctacaaagtcagctgctttgtaattatgaatcattttcccattcttttgggacccatttccaattgatttaaatgtctactatttatatgttatttgattaaacagaccaaccaaaaatatgatgccccatccaaatgttttatcctctaatacaaaattaactttttctttataataaataataataataataatgattattattcgatgaaataaaagacaaaagaacagcaaataaacacctaaccaaataagataatgatcacttcatctcatcccatctcatctaaactcccaaatatcttattcatttttgtggtttttctaagttgaacttcatgaatcaaacactatgatttattctttttgtaagttccttttcaagataagtttcttcatatataataaattgaaaaattcagttgggttaatagtttttcaagtatttagagttatattacttattgcaatataagttaagataactcataccttgtcacaatttttgtttgggagtcaaaagtgccactattaacatgaaaaaaaaaaacaaaaaaaacagaaaaaatctaactttggtcaaaattctcaccaataatattttggtgatccaattgagaacacagtggcctaaaaaagaaacaccaaatgaatgggttggaatttataattcttcttgatttatcttttgggatccaacacacattttgaa

SEQ ID NO: 76900 - DNA, 595 bp, Cannabis sativa
atatgcaaggtaatcagaatataaaaacagagactaataataagttttttaggttaatactctacaaacacaccaggagaattacaaataaaatctattattaagtaaaacacaaatatataaatgagtgaagcaaatataaagttccatcatgtgtctatctttattagtattcctttgattactgcaaaaatgtcaaaagaataaatcatgaaattattcattaacaaatttaaattaatcacacccataaaacacattcaaagataaaaaaaataaatcaaactcataattgtacaaactcaccgccaatttcatatatttcggtacattattatagtggagagtgaaaatagcaattgtttagcgcttctataagagggtgagatggtttctttgaggtatgaatgggagattgaagatggttattatatggagatgttcacctatgtgatctacttttaattaataaaattaaaaaagaagaagaagaagatagtgggtattgagggttacttggggttgaaattttctttgactgatggaaatggttagggaattaagctatttacaaatgtatatattattttatttt

SEQ ID NO: 76901 - DNA, 7719 bp, Cannabis sativa
  modified_base (27)..(32): a, c, t, g, unknown or other
  modified_base (3047)..(3054): a, c, t, g, unknown or other
tgattaagaaaaaaaactgtttaaaannnnnntgaaagtgattttttttttttaaattttgattctcaattaaaaaaaaatgaaaagcaaaaacagttttattgaaaatattttcacttttttaatttaaaaaaaaaaaaactgattaaaaaagtgttaccaaacgtcacctatgacaaataacatcacatatttggcaatacatgcctatgaaatgaaaacaagcttttattgaattaatattcttcaacaagtgatcatactccaaaaacatgccttcacaaggaaaagatcattatgtgttacttgtagctaatcataatgcccttcatagagagaacattatctcttaacacaattctcttggatatccacaacaaaatgaaaataatatttttataaaaaaaattgtgaaaatattgatttttttttttttgaaaaataaataatattcaacaaggtaaaccgataaagggtcaagagcccaataaatcatgcgaaaataaagttgtacaaatctcacaagaacataaccaaataataacaccccacatcaatgcaaagcccaacaagaatagcacaaagcgaacattacaaaaggcaaagtgataaacactattattacttattacaaaaaaaataaaaaatcattaaagataaatgtcgacctacacaagaaaaatcaaaatattcaaataaaataaactatacaaagcacaccaccaaaccggaaccatccaggagactaaacaacaagacgacggtgcattaccctcgaagacaaatttgcatcctccttttttcgattgcaacctccacatagtgacaaaaatataaatattttcattttcaaaaaatattatttttcatattttatttataattttacggcctaaattttttatttacaaagatacacttgtaaagttttaaaattacaacaatacactttgataagcaaaaagtaagaaaacaactaaaaaaataacgagaaatagatttcgcgacaactataaatcaacttcacgacaactataatataattataaaacaactaaaaaaacagtttattatttttactgaagacgtatttttgtaaacaaaaaagttcaaagtgtaaacataattttttttttctgtattacgtatttttgtaattttttttctcaaatttttagtctattatataatatttttttatagaacctattgatatattttcacatataaaatttatttttctaaatttaaattatcgagtgtttctacaatgcactcccataaacgggtgcactgatgcactcctataagtttcaacattcaagagaattttttactctaatttttttcatagtcgtgtatattatagttatttaagatatattacaaaattttaaaaaattcagaataatttacaatacgtttaaatagtttatttcatacgcgtaaaaaataaaagagtcacgcatgcatcatacggttttactctattttttacgtgttaaatattttttcgaatttctcaaattatgcaagatgttttaaataactacaacatacacgaccatgaaaaaataagactaaaaaactctctcaaatatcgaaacagataggggtacagcagaactttcttaaattatttaaggaaaattctacaatatacctcctcaaaaaggatgtactgatgcacccttatttattttgtatctaaaataatcttttatttattttttttctcatgattatgaaccttatagttatttaagacattctgtaaaattttaagaaattcaaacaaaatttaacatgctaaaaacaaggttcaaatattgtattacacacatggatattttattttatatacgtataaaatagattatttgaatactactttctatattgtaaattactttaaaaattttaaaattttattagacatcttcaataaatataacgaacacaaatataaaaatcttgactaaaaaattattctgaatatcgaaacaggtacaaagtgaataagtgcatcaatttgtaagaatgtgtagaatttttcctaaataatttaatattattattgaaaaatataaatagagtgataatggtgatatttaaacctcaaaaatcaaaagacccgctaagattatgagatgaggttactctattgccatacctcaattccatttcactcttcaaattcaaagcttcaatctttaatccccaatttcactcctcccaaaaccctaattcgaattctctcaggtgctctctccctcactctaatcgcctcttctccttctcctttccttgctctcgaatcaccatcatcaccatcttctccttcttctgagtattgccgagaacaagatttgatcgaagatttgagctctgaatcggaagagacctttgtcactaatgaggggattgttgaggaagcttgggaaatcgttaatgatagctttctcgataccagtcgtcagcatcgatggtcccctgaaaattggcaggtttagctcttaaaaatctgaactttatttcttgtttttgaaagatgagattgtaatctcatattttttggatggttagtgtattgagttttgttgtggatgaattttctaaactaactacatgaaagtgtaaaatttgcaaaatagcctcattgaatttatgttgtgatagtttttggtcacaaaaaagagtgttttggaaaaatagccatgcaagtttttattaacaaaagggttagtactaaactcgccgtgttttgtaaaagttaccaattagaccttttattttgttgacaagttagactagtacgaaatagtattctgagcttaattttcaataatttttttaatataactaacttgaagataatttttagcacgaacatatacagaaaatgtactaaattttgtcataataactctagatcggactattattaatttttattttgacaaaaaatcagtttaggatactattttggaaaatataaggtttaatttgtcatttggtaaaacagaaagtccaatcaataacttttnnnnnnnncagggtccaaaatagtatttgcccttaacaaaataactctaaaaaacaatttattagcaaaataaccatttatagtcgcacaaatgcaaaccgaacatagatttacactatgcaactatcatggtcgcataaaataagttaaatgtggttattttgtaaattttagtatttcacattattagtttgtcaaatttcacacaagacggctataacagttgttttatgatcgcacaatgtaatttttggtcatttatgcgaccaaatgtgattattttgctagtaaagtttttttttaaaaaaaatcatagtgactatttttactatacacttttttagaggaagaaggaagatattaggagttcttcaatccagtcaaggtcaaaagctcatgatgtaattaagcgtatgttggctagcttgggtgatccttacacaagatttctttcacctgatcaggtacctatgattatacttatttttctgttctttttattgggttgcttgtaactgataaacaatgtgcagcaaagtttttgatgagagaaaagtataaattgtgatctttttacaatgacttgtatatatagccttacaagtggacaggtctagaatttactatagctaatctaatattaacaaagcataactaattagagaaatatgcattagtctggtttattagtaacaatatttctggtgattctcaatcacttgccattttcatttacaagttcatcttgatttttttgttgttggaagttctccaaaatggcaaggtatgatgtgagtggtattgggatgaacatcaaggaagtcccggatgaaaatggtggcacgaaattgagggtactaggacttgtattggatggtcctgcccacttagcaggtgtgagacaggtaaattaaaaacaagaatagaatttgtggatgctttctctttttttgttttgctttcctctttgtgctttcgcttttgagaaccgtttatgacttttatacttgtgatttcgcgtttaaattccgttctacaacactttgatttgattagattgagttggagaatgtttgaatttggttattcttataggtttattatggaattctcattatcctgttgcacattagtatgtggtgaaatcttgcatatctgttgcactttctcaatttacgaacttgttggatttgatgataatatattatgctaataccatattttgcgagtttttgtttttgtgtatgtgtaaacttgtatgtctaagaggttgctcctttattttttgttgatagggggatgaagtgttagctgttaatggaatggatgtggcaggaaaatcagcatttgaagtgttatcttctatccaaggtcctaatgagacatctgttaccctcaaggttttgattctatttggtgcgattctttgctttatgcgctaaaagaagagagctttcattcttaacaatcttgttttagagtattgttgtgttacttcttttgaataatccttcttgctttaggtaaagcatgggaattgtggacctattcaatctgtaacaattgaaagacaagttgttgctcggaccccagtgttttatcggattgaacaaatggaaaatggcggtccatcagttgggtacatgcggttaaaagagtttaatgcattggcaagaaaagatttggccattggtaacacaactgaatgattattgtattctttattcaatatcttgaattcttcaccaaaatatatttctttattaattatttgtttatgctttgctactttatctcaatgaagatgaatcttcatccttgtaacaattagctagatgtaaagtttttggtgttagtttcattggtttattgcatttgcagccatgaaaagacttcaaaagatgggtgcatcatatttcgttttggatcttagagataatcttggtggacttgttcaggtttgtacgataaacccgcttggtatgattaactttttgttaatctcaggtttaaaagctcagtaactgacatgattaaataatgtcagaagagaccatttactaaaattttatgaagaaatttgaatcatctctggggaaaatgatgtacgaaactcaattacctctgcatgttaatggaatgtgtaatttattctgtctgattctatatcttggaatatttcaggctggaatagaaattgccaaactctttctaaatcaaggcgatacagtaagttcatgtagtttgtttctttatacttttcctgatttttcgggtctttcattcaacgagtaaattcattaataaaatattgtaactaccccttttcccctttcgaatgcataacgcttgtttgcctcttgcataacataacatcgattttttaactgaattgcatacactaactctgtcagtgttgttttatttttctatggtgctgctcataacaggtaatttatactgttggaaaggatcctcagtaccaacaaagtgctgttgcagacaaccaaccgttgactgaagctcctctaatcgtatgcataaatttctccgaagccaaccttttctcttgttgtttaatttctttgcaacctgaatatgtatcttaatgatacactatggttttattccaatgttgaaagaattagaaaatataaatcttatagatatcaaagaaaggattacaatttttccaagcttttcgagacactcgagtaaattttacttttaacaatacaaatcaattcctgtatttatactaattcattcctactgatttaagctaaaaccttaggacaggctcacttagaaacatttgatctgaacaactaagaatttatcaactcagactctttaaatagtttcataacaagtatttgtactttaattctaatgcaggtattagtgaacaacaacactgccagtgctagtgaaattgtaagcagcttgattaattgacaaaactacattctgtggcttggcttctatgtgtagtattttcaagctgtcgtggtctttttgcaggttgcttccgcgttgcacgacaattgcagagctgttcttgtcggtgaaaagacatttggcaaggttctattcttaatcatcatcgttgttttcgtatactgttacacgagcttctgttttaaaacttgtttcacagttgagattagaacgaaaatcctagttatgtttggggttcgccccttaatttgaaggtgtcacaacaatgcagtgcattgcagcatcctatacttaggttgtgtttggttggaagtaatgaaatggaatggaaatgaatcaattttcattccattcttttgtttggttgctttttaaaatattttaatgttgttctaatggaattactttcccaccaccattttggtagaaagactatttcattttgaaatagaatcattttttctttcttcatgcatgctccacttggctcggggggatatagcacaattggtagagctccgcctttgcaattggatcgttgtgattacgggttgggtgtgtaattgtccatgcagtaatgatagtatcttgtaccagggatattgattacaattcatccaaattttcgtttgaattattcgtttatgaaattttattatatttattagtaatatttctagaataaatgtactattcttttgaatcaacaaaaaaaattcttaaattttattcctattttgattcttatttctattcttgtattttcatttctccaaaccaagcgtacccttagaatgtaggtcatttttatttgattcttaagttctgctcattaccttttgtttctttaatagggtttgattcaatcagtatttgaacttcatgatggatctggtgtagttgtcactgttgggaagtatgtcacaccaaatcataaagacataaatggcaatggaatagaacccgattatcgaaattttccaggtacgaaacgcttcacttttctcgaaatataaatggtgttgacataatttaatctataaagtaacctttcgtctctgcaggctggcatgatgtcgaacaacgcctttcgcagtgcaaatatgttcacgaacatgggtagtagttcatacatactttgcaggtttgatcaatctgcttagcgaaattacttactaataccgaaataagcttcagcttccgttaacaaatctttgaaaaatacattgaagaacagcttgatagattcatttcattctcttctgtgtttttaagttgactcaacttaaaaatagaagagttgttaagaatgtattatgtatccaaaaactatcaatgaagaatttaattacataaaataattattaaaatacaacaaacaaaatgttccattgagcttcatacttgtggaatcccaattggtggggttttcttagatttgatttctctggtaacaactattaataagagaaaggtgtatttgagtgttctgtttgcggatattatagttttattatctaaagttcttgagacagttttgtctcatgtggctcgtgataagaattttacagttcatggtttagcaaatcatatttttcggttaaacaatgagttattttgattcgaggagatttgaaggccaattgcaaatatttgcatcatatatttattggtgcttttgatcactatatgaaaaaaaaaatgttccataa

SEQ ID NO: 76902 - DNA, 1990 bp, Cannabis sativa
tgaagtagctcattttcttatatatgacttttataataatctactatttattccatgtgtacaatgtccacaatattccccaacccttcaagatagtgactattttttgcttatcaatcttaaattgtatcagagtgaacatggtcactatctatataggtgtgtatcggcggataggagcacatgctcgcaagggatatggctctgataccatgttaagatgcaaaagtgtatggttgaggaagtaagaataggtgagtgtatggtaaggtaaggtgcatgaggttctatctcaaaactaattagcgataagtaaagtagtctatatgttcttatatatggctcaatactctactatttatttcatgtaggacaaagtccacaataacttatcaacctaactattaaataaatggcaatctaataataaattatggaaaaaatatttatttccattattacatctaatacttatctgtttagtgcattaattacatttcaactagcatatgtataagttagttgaattgatactcaatgattgctattgtaattttgtggttcataatcacataagcaaattaaattgtttatataaataaagttaatttttctttcaaaaaaataaagtaaatttgtatttcacgggggacaattccaataattttattgtttgggtgtacttttttcaaaaataaaataaaaaatagcaaaagtctacaatggccttgagagagaaaaaaaaatcatacttattcattattatatttattgaacaatatgctttattattatgaaagtataatacatatatatgaaatttattacattgaataaaggaataatagaaataacatattgccattcaataaaaaatagaaataacacattgcccattaccattggagacaaccgtattcttcagagaatgtttatataataaaacggaaattaaataggcaaattggcccattagctcagttggttagagcgtcgtgctaataacgcgaaggtcgcaggttcgaaacctgcatgggccaattattattttttttttatttttaaactattttattctttttatcactgccacattaatgaataaaaaaatagaaggctaattattgcagcaaataaagctgtactgttattggcatagctccttaatattacttcaacgatgaaaccagagtccgcaaggagaggagaaaattctgtgtgaactttttttttatgattgaaaattcagtgtgaacttcatcaagatccactttttctttgtatttttctgtgatgtctttcatgaactcgttactttggacgtatttttgagttatatactcctccaatggcatccactgcagcatatgcatgcaaacacaatatattaatttaattaaataaaacaattaaattaccatgatcatgactatgatatttaatagtatacattaattaccattgctgcctctatctctaattcctgtatctgtatgtcaaaagatttgggtcgtagtatgcacacaaagaaaatttctgacttcccaaataatgccttatggctttgcctgtcgtaaatgaattcatatttcttgttatagactagaaatatataatataagaactgcactatatatataatatacatagataaaagtagttataaaatgaaattaagccaaaaccccatccatacttgaaagaaagtatttccacaaactccgtgtcaatctgaatttacacaaccataaagtatataaattaataaacaaaataagattattatatataatgagaatttttctaaagttcaaaaaaattaatgtgcttactccagtttcttctttcacttctctcacagcagcatcacatacatcttctccctgcagcggtgagatataaaaaattaaaagctatatatatatatacaagtaagcaataatatatatttacatatattagccttttgatcaagtaataataatgtgta

SEQ ID NO: 76903 - DNA, 1925 bp, Cannabis sativa
ttaatttttatcctaaattagttatttttattttcactagattgtaatattttctcaattttttattaccaaatagatttagaaatttaatttattagtactaactataatatgcgagggaacgataccttacttaacattatatcacttgaaattaatacgtaaactagtgcgtaataaaatccataacaggagaccaacatgaaagtatagccctccataccttttcatcttgtgatttatgaacactttcattatgactttccaatattgataattcgagtcattcaacaaaagtggtggagtaatggagcttaattatgcaaacaaagacatctcacaaaagaaaaaaaaaataaacggtataacaatctgaagatctcaccaagagtttagtgacttattttgataccaattgaaattttgtattttaatattactaatttattatgtaattaatccattaattaaatacgaaataataaatatggtactaaaacagttattctgtaactatagaacacaactctgtaattgcagaataaaactagaaaatagtgcaaaaaaataaaaacagacaaggtttttgtacgtgatatcaacaatccttgcagatttttactagtccacgggaccatgcccagagataagatttattgataaatctcaaaaatacaaagtaattgacttacgcataaataaactcccttttattgtatgccgcaagcttggtgtattccaccttctaatcgaatcttattgaaacttcaagtgctcgaactcccttcaatccccttaaagagtgcttgcttcctcctgaggtaagacttgaaaaactatctcccaaaagcttgtagaactttctctagaaggtatagcactgttgttctgttgttcttcttcttttatagatttaattacttaattacaaatacaaactcactcaagacaatacaaaatacataaacacagagaaagagacgaacacacccttctctacaaaacaaaaatattctttcttacaagatatgaatgaaatacaaagatgtgaaagagatattaaatctaactgctataaatacaccttattgatagctcatacacgatctaaaaataagatcacaactcacaagaaattttcctaaaaaagatctttaatcaacccaaaaatttttgcttctgtacctacaaaatcgtgagaagtaagtgtgacttttcttttatagaataggaaagtcatatttcggttttcttcataagaaacttgatccaaccaataaagaaacttatataagatcaaattaatacagttgaatttttttaccatttatataaattaatcaattaaatacaaatatataaaaataaaaaatacaactcagctgaaattataaacaatttataaaatatttttatcaactatagatgtcaaaaaaaaaaaaaatagaattaacatagctcaatttggtgattgataaaaagcttcatatattttgcaaatttgtaccctgcattttctttgttttgatttcctataatttcaagtgtcaactatgctcaacttaggtcattcatcacgaattactgaaatcatttttatttgaatgatgatgaatgataatttgaaattcttgaggatggaaaaaggataaaaagactactagctagtactctgcataaattttgacctacgaaggtacgtatatggtgatacactaatgttgtaataaaaacttctcatcatgacccttttttgttacttcaaatagcaccaagacactaaccacagagaatgctccattgctcagactcacttgcattcacaatcattttatgtaattatatgttttcagagaagtggacgagaagctttttcatacaaaaaagagagaatgatcagagagaatctgtacagagaaactata

SEQ ID NO: 76904 - DNA, 2757 bp, Cannabis sativa
  modified_base (170)..(172): a, c, t, g, unknown or other
atttaaaagtatctacttttgtgagtgggttgctccatatacattcacccaccacttaagtctagcacataatttatattaacctaaatagtataatagagacatcatttatgaaagttgatatatctttaaaattatagaaataatagtaaaaattaaaataaataaannnaaataaaataaatatacaatataatttccacttttcatttttaccttcttaataatttatcttttctgcatatttttacagttaatgtccctataatactctctcttcaatccaaaacaatatcaattaatttccaagctctaatgctaatatccatcctcatctccattttttgacaatgttagcttgatttatccttaaaattttaaattaattatcgacatattctttttcaatatcttcatatatatatatataaaaacacttttaaaaaataacacttagtatttatatgtatacacgcattatttaatcaattttaatagagaaaaattcattaatagttttaatttgatggtatgcttatggtggtgacaaagatagtagctcgctggtggaagaattgatatagaggataatgtgtatatgggttgtgatatatgtggaggataatgtgtatatgggttgtgatatatgtggaggtatattagacaatctccttactaaaatgggtataatttgaatgaatatagtttgcaaaaatttttagttaactgacaacaaaaagggatcttctttaagttatattacatgagaaatcaaaaaatacaaagatatgatataaatataaactattaattaaatatgttagataacatagtattaacgggagaattcacgcaagagaaatcctccgttatcgaaatttaaaaagaagggatcaaaataaagtcggaagaggacaaagagtctcagggaccacgagcaggcccctgcgagaagcactttatgaggaggccccatgcgagaagcaccctacgaggaggccccctgcgagaagcaccttacgaggaggaccctgcaaggagggacctacggggacccctgcctgggaggaccgcctgcggggactcctcctgtgcggactctttgtgttggggatacaccgacaatgaccaattgttaggacctcaatcatttgttaattcagaatttcttttattatctccctaatctcagtgacgctcaaacgatctaactaccacgggcatggtttacttagtccatgacaaggaaatatgggaggcgagatgcccaactcacctaaatatgatggtacgaggatcccaaaacctttgagaaacttgggacctgcgaagaggggtccctatgaggaccccgagtgctgcaaggaggggtccctacgaggaccacaagacctgcgaagaggggtccctacaaggaccataagtgttgcgaataggggtcccattcaggatcacgagacctgtgaaaaaggatccttatggggaccccatgacctgcaagaaggggttcctatgaggacccccgtggacttgattcgtcattgattcttcttcaagagcacaaccatttggggatccctcattgccccctttgtcatgataatactcaagtagttcaactaatatgagtatagtttaaacacttggcccatggtaaaagagtatgtgagacaaggggtcgaacttggataagagtggtggtacgaaggtcccaagttcaggaccgccaagcatggaccacaacgtcaagtcacgcgtggagataagacctaaagcgggtagtgacatttccacctctctgtagcacatgctacacccgaccaacaacatcctgcaaccactactctgagtcctgctacctaaccaacgtattgtacattggtttgtccccattggggaccactagagaattaatatgtaaataagagccatgagagctaaccttaatagagattgatccctcattcatatggggttggaaactttgtgtaaccctagctaacaaactgataatacaatacaccaacttttctccactattgctctgcaagttttctttaagtttcaaaaaattcatatattttcttagaatgtgatattcacacatagagtttccagccattaacattgttaaaatcttctttccttttttatcgttaacagccaccattttaggagtagaagaagttagaccattaaaagccatatcatcaaattctttccccaatgaagcacgaggaaccaccattagagcagtcgccctcctactagccactggtctccaagcatctacgattgacttcccttctgaaggaccaccatgaatattaggggtgggcatcatccaatctaatccaattgaatcgaaccgaagcgatccaatccaatccaattacaaaaagttggatatacaactacaattggattggatgctaaaagttgaattctaattaaatcgaatcgattattggatgtcaatctcaaaatccaataaaaaatcgatccaatccaattacatttatatatgttaaaaaaattatttatataataaaaaatattgacaaatataatatatattaattatatttttattagattttttttgtgcgtgttgaatttgtaacacttggttgttttgtgtatttattttcatgatattttgttttattttattacttagaaatattgtttgtttaattatttaaatttttggctacattacacttgcaacgatggtatgtttatgaagtattaaac

SEQ ID NO: 76905 - DNA, 504 bp, Cannabis sativa
tacaatttatttccattccactcaactaaacatggtatttaaacttaattattcttacttagttttctcatatttatcaactttttattgatttttttttttttttggaaaagccatatatttcctaatcataagcatgtggtaaacatttatgaaacatcttttgcactttcccaagtaccttcaaaaagttattttatgaaaacgccacttcatacaaaaaccaattttctcttggcaaactattttggactatgaatttattaatctaggctctatataattataggagaaatttagtgtacgccctcttatctttacctatagcatggggaagttaaatgtgggccactagaaaataaaatatattgtacacttggggtccgtacacaggattagactgaacaaaattagattatgctaaaagtaattttgtatttagtttaaaaatagactgtactattttatttatttccttttagaaaaaaaaaaacttaaattaaa

SEQ ID NO: 76906 - DNA, 1003 bp, Cannabis sativa
tctttactttgctaatgatttgattatgttttgtaaggggacggttaagtcaatttaagtaatccaagattcttttacaatttttagtagcagtttgagcctccatgctaactcgaacaactcttatatttactttggtgaggttgacgaaggaagaaaactggctattcggggattggtttcttatgatgaaggtcaattccctctcaaatatctcagtgtgacaatgaggtcaacaaagtggaaagcagtgaattgtaatcattttattagaaagattcaattgaagcttcacagctgggcaagtaggcacctctcgtttgcaggtagaatgcaattgattcaatcggtgttactgggcattcgatgttattggatgagtatctttatgcttccaaagaaagtagtcaaggaggttgataaactctgcagagactttttgtggggtgtgcaaggtaactctagtaagatgcatcttgctttttgggatcttgtttgcaaacctaagaattaaggacggttgggttttcgggaaggaaccaagtggaacaaagcttcgattgctagatacgtttgggctatttcaacaaaacaagatgttaagagggttaaatggatcaatgttatctatttaaaaaatcaagatttttgggtggttgataagaaaggtgatgtgagttggtactagcgcaaacttcttaatcttaggagtgttttcacttgagacacaattctggatgcttgaaaaggggaaagatttagggtcagtaagctttacaactcttttgttacccctatgccaaagttgataattataaatgatttggggtagattatccataccaaaacatagatttattctctggtaagcctctcataataacttataaaccagagatcacctgttggcaagaggtattaccatgaattctactagctacccagtttgtgaggttggtgttgactctcataatcatcttttctttgattgttctttttccaa

SEQ ID NO: 76907 - DNA, 617 bp, Cannabis sativa
ccaacgaaatgtcctcattgatgctcaatactgacgaaaacaggggtttttaccaacgaaatttgtcctcagtaatgctcatttttcttgtagtgagtgctcattttatggctgaagcttttataagactttgtaaccaaatattttttttatgttcattgctgtattgataagcttctacgttcaaagaataatatttaatatttttgttactgtgtgagactttaataaaagaagaaatatatattgggtagattccaaaaacatatatagtaagaaaccaactaattaatcaagccttattttcttacccacgttcatattgtaagaccattttattaatgttgtattctcatctcagtagttccaaacatcattcatgttatttgacgtactcgtatgtaaaacaaagtgagtaaaagtggggtatactactagtacaagaacaactatcgatatatagtgacaacttttttttttttttttctgaaacatatatagtgacttaacatggtatataaataatttaagcaaaaaaatatatatgagtataaatataaaatatatagataattttttatgattgtttttcttttttctttttaagttattgaccc

SEQ ID NO: 76908 - DNA, 637 bp, Cannabis sativa
  modified_base (45)..(50): a, c, t, g, unknown or other
aaaaaaatcgtaaaaatatttaatattctgtaaaactgtattttnnnnnntttttttgttgtttttatattttcgtgaaataatccctttaattattcatacttaatgtatgaattgttgtttttaagatccagatccatttttcatattcaattttaataggaattataattctactctaacttttattatcttttaacataaataaaggaacaacaaattcattttgcaagtctattattattatgtagtttctataaaataaatgagctacctaaaatacaaatttgatacctatcacaaaaatttatatatctatacacataaaataactttataatcttttaaaatacttctacataaatcttccttaattcttttatttttttaatatttttattaagtttataaatattaatttattaattaacttaaaaaatattcatatacaattcaaaaaaatttaaaatattattaataataattagttaaaaaaatataaaatcacacattctctttaatggtatatcttaaataaagtatgttgacttcgtttttagccaacgacaatgaactttttgataagtgataaacgatatgtcgtaatgcaaaataaaagcaacaataagacacaaga

SEQ ID NO: 76909 - DNA, 1441 bp, Cannabis sativa
atttagtgtaattaagtttttatgccatatatatcaaaacttatctttattttcccatatttttgtaaatagcccattggagtttttaggtgtaaaactgcacaactagccaacctagatatgctatgtgtgactgtgagagggcttttttcttgggaaattatattaacttttgtcatgtttttacaaaaatactgtcagacggtattttttacttttttattatttttttataagtttcatactgcagtatactatgttaaattttcactggtgttctactggtgttttttagttgttccactgttgttttgagttgttccgttttgtattctactggtattttataaaaacacagtatttttgaaattttttctgtgcgacaatatttttgtaagttttcctaaacattgaattttaagaaagagaaagaagaaaaaaagttaaataataaaaaaaaggatttcgtttctcatttttgatttaatcaataaataaagaattttactttagaaagattactaataactatttggtttagcttctatgagctcttttttagtttttagaattaaaaaaaatctttctaaaagcgtttggataaaaaattaaaaatctctttttaatttaaaagtccttttgaaagaagctaaaatttgtagtttctcccgaaaaaacttttaagaaattattttaaattaaaataatttacataatatctaatttacttacaattttttttttaataatatataaataacttaaaaaaatcattaaaaaaatatctccatataataatatcaaaattgtaaaaataagtccaaacttaaatttattttatacttctagctataagcaaaagtatacgtttagtcaaacaggacccatcttgtagtataattttatgaaatttatgtcaattacaaatattaaaaaaatataacgtaaaatatttttctctacagaattttcgatgttaaaatttaaagtccaaataaagcctaactatctaaaatcaaaattttatttttctgactacagttttgttttaaaatttccaacaaattcagtttagtataaagttagattaaagttcttaatttgtttcaatatttaatttacctttttctaaaaaaaaaaattaataggactgataattcgtaatgacacaacgacacaattcaaaaacaataaaaccaataagtttggataatatatttaattttcatgtcaaaatcgtattgatatatttaacacatttatttagtgtgtatttaatgtgtattatagttaaatataatatttttaagtttaatattatgtgaattataaaaaacctctaaagaattccatgttagaattattataatggactaatacaatcataggtttaattccataatacacaatcattaattatgtgcctaatgttactcataac

SEQ ID NO: 76910 - DNA, 776 bp, Cannabis sativa
tttttgttttgtttttattataaagattatgctattatataaatcaaatacacattcatttacaataacagaaacaacagaaaatatggggaggagatattctccaaccattgataatctctatacaactctaaaccatgctaagcaaggctatgagtagccataatggccatccgccttacatgttaaatcttgagaagaagatctaacagatgatgcagaaactaggaaaagtctgtctcactgtctccacatgcgtgattggcagcttagttgagaaccaattaaaaccatgaaacagagtttttgcctccatttcgtgggaacattaattttattctaatttgtaaagtaaaataaaataaaaaaggaacttggtaatttattttaaagaataaaataaattttaattctaattatgagttttttcctttttaaataaataatatacatatatagataaaatttactatggggaatttgaaaagacccatagattggacatttaataccctttgcttattagtgaactgcatcataatattgtagtagttgtatggtaatccgtatataatgaacatcatgatagaattttctaaggtgaaaattttaaatatttcatttttttttcttacctctggtgagatttgggagagattatttgcacaatgggtgatctttccctacattggatgatttttgaaggagttttgtttattttacgatgagttagggatcattaatgaaggagtagttcagtttgtgtatatcaattt

SEQ ID NO: 76911 - DNA, 1795 bp, Cannabis sativa
tttttttttttttttttttttttttttttttgctatgaaaaatttttaacttaaattttaggtagtgaatttttgcaaggccctccactaatttaccatctcaattttaacccaaattcgaaacaaagttacctcccttgagaccggcaaataggcttaaacctgaacaacttttttatcatacccaattcaaattttaaatttatacccaattccactttgcaaacttttattccactttgtaaatatcatatttcagatttttaattagataaaatatgacatttgcttattataggatacgaaattcttgaccatgttaagtcttgcaaaaaatttgaattaggtaaataggcttagccaattcaatttttttgcaagatcccaacatagtctaaggatgtcctataataagcagcatcttgctcatattaaaagaacatagacatagcaatttaacctcaccagtatacgaatgaatatataatcaaaactggatgagcagagtggtttaataaaagaaaatttgctatatgtttactcaaaatgaccaccagtgaaaaaaggaaaatatacatcatttaccaattaccatgaaatttacaaaaacacaaacttaaagttttaataaacggactaaatgcatgacaacagaagatatgagctacttccaaactagtaaactacaagaatatgaaaaattgttaaggagagagagaaatgcaccatgggtacattcacattattcacttacacaaaagacaagtgcttgaataaagaatcaaaattctgttttggctagtaccccctatccaatataaaaagaaaatacgaagtctatgattggtaatttggtattacattctatcctcgtaccattgatagttcccttgatctggtctcatgccttctagctttacaaggcttggaaaatgctgaaatttagtaactgtgtcaaatagctctctttttggccgtggaagttcaatcttgttaattctcttggctttgacatcgtaagaaaacgacattctccttctaaagttaaaccacaggacagtagattgaaatatcgctggagaaatttgatctctttcctttgaatagggttctgtgtttagaaatgtcaatggaacaatccttttctgctcactccatctcaagtcaccaccatcgtactttgtcatttttaagaggtgaaggtctagcccgattatctcagcaatagctaaacaatcatcccattcaataaaacaagctttcaataaattgaagtggacatctctaggcaaaccattattaaccagatacatgtcatcccatgcgttaatagataggacagacagagcaataccttcatcaattaataatactctaattgaatgcaattctccgctggttctcacatacattagcttaatgacatccggaaaatgtaaaaagcctgtctgtctcccgatggatctccaattgatatctttaccaacttcaaaagtttctaaagcatgttcttcgacaccttgattgttgacgcgtctacattccaagagcaatttggactcatgtgttttcctattgaaagcaattaacggaagcaaatgaatagcgggagcatgattatcaacataaggagaacgtaggatagcatgatttggatccggcaaatcaagtatttggcgggtggcagggttgactatagagtagttaacaggattttggttgctcattttcaacaccaatccacagaacgagtcgattatgtaagaattctggtttacgggttggaaatgtagat

SEQ ID NO: 76912 - DNA, 1584 bp, Cannabis sativa
aaattatatattaatccataaacatgaaaataacatgtaaacttatataatttccaatctttcattgatagcatataagattatatattaaaatggattttatttagggtataaaatcttaacattaggtgccttcttgtttttgtctttaggcttgccactgttgttgtccttactgttcatttccttttcttgtctgaagaagaaggagagctggattttacttcaacaatatttgattcacctttcttggacttatccttgttaaggttcttaaacatgatcaactcgatcaataattgagtcatgttgaactctagcttgttcattacatagttcgtggtgaaatctttaaagcaaggagatagtaactcaagaatcatactcaactgagtcttttcgtcaatgatagcctcgtgtgtcccttcttcatacacaagctcaatcatgtgcaatacataagttctaacagggacaaccttcttcatcttataattcatgtaactatgagtaacatcatgtcttgtttgattagaatgctgctcaaacatggcctgtagagaattcattatttgagatgcattctctatttgttcatgtgtcttacacagaacatcgtttattgtaagaagcatgaagcatttagccttcttgttagattgaatccaagagtcgtatatgtcttaaacatttttaagggcattggtagcgagctcctcagaacgctcttccgttaggacaaatttgttgttttcacaaaccagcatcaaatttagattagatttctatttcataaaattttcaacattcaattttttaagtgctagtaaggcagtaaggggatttggcatagtagacatgattgaaataaataaagataacataataaatattattttggaataattgtaaacgtgatgcatgagtgcatacaagtaaaacacataaaatattttttaagttgttctataataaaactctttgacaattgatcgtcatcttaggatcagtatcaagtgtggcaatttcttctttttagattttgagcccttggctcgagtgacatcttcttcaagcttgataaagtcatctactctatccaaaaagtcatttatagtatagactaacttgagatgaaagtcaaaccataaaggactcatctttttgagccaggcttcaagggccattacccttacatcctcgctaattatttttgtcttagcagttgcctctaagagcatctccaatggagatgcaaataagtggtattaaactaaaatatagctaatttagaaaaaagtgtgctccaatggtgtgcccaaaaagtgatgtaaatttagcacatagaaaattttgtgtccaatttggcacaacatatactatgatataaaatttacacaacaataagtgcactattttttttttacgtttatgccatttgtattattttattagtataattaactatagcattaaattctgaagcatttaaattatttttttattatcttatatattaaaataataataaaattgataataaagttattagttttattcttttaataacaacattaattagat

SEQ ID NO: 76913 - DNA, 922 bp, Cannabis sativa
attttagctagtcgcttcaaaaagttttgtttctcttcatttttctgctagtagaaatggacataaccaggatttccaattgggcactgtgggagcaactaaaggtgcgcctattattcttgcaagggaagcacttggagaaggaacccaggctatggttgctgttgaagtgccccaacaagggatgattctggaaattgtaccaaaggatgaacctatcatagaggaaggactatccgcaaaagccaaaggaaaaaggagggcaaagaccccccaactgcacaagctttcaatgctccatctcggagatggatcagaaggccagctgtttctactcctattaaatgttgacggcctatgctaatggtggtggtctccgcaacattccaagattgatgtgacacagattgtctgccacaagagaattagtgtccacctgtatagagggattcagtgcttacagctggtcccacatttctaatggagtgcatctctccttaaggacctattttatgaatttgatgtccaagattgggatagctcctttctagctaatcccctcattgtataggcttctgactgggtggtatgtcttctgcaagatggacaagttggaagtaccttccttgaaggatatcctttacttttacagtgtaaaggctaaccccatgagggcaaacaaaagaagttaggtttctttaggttggaaaagtgtttgggctcttactgcgcagttagccacactgaccatactcatgatcttcgagagtactggttcttttccttcgggttccctgtaaaaagggtgctttctcttcaactgaacttccagttgccatgtattgttgacactagcattgatttttcatttcttagattttctttgttttgattgatttactgatgtctttcttgtaaatct

SEQ ID NO: 76914 - DNA, 978 bp, Cannabis sativa
tggtttattttccatgagcaaatcataaaccaatcctattacattgactgcataaaatcccaatcccacagtactacagctaagcaccttcaaataacaaaacattttctaagtattgcaaaatgttcgtcctacctcttactcaggttcaatatacttttgaacagttgtaaatccgttgactctggatgaccaggtattcatatctcgaagagggtactggatcatccctctcagaaggactatggagacgagcatctgctgctggtgccttcacacctatggataaaagagcattcgggatagcagatgacatgtaatttctttacatatttacttagattaagcatattgtctaagtataacactttgtttttacatttttgtttttccatgcagatatgaagcaggtcttctctttgcatacttagctttccttccattttgtgaacctggcataatggatagtctctctttgcaggtataataaatgttactctatcatcttcttcagttaatcttctttccgtataagagtgccattagctaatcctgattttttttttttgtttttttcattgatatcccatctgcttacagaggcttatagagaacactttccaacttgatattgaagcaatccgagagtaagatatacatacatacgtacataaatatatatgtgtatatttaatatgaatttggtatattggtcaaaattgtagtttttggttcatctcttcaaatagattgtaagaaagctttgctggagtcaaatttttttctttcttgtttaatcagatactgtttagcggatgatcgattattagaagctgtgaagtttctggatcttggagatggtgctggttgggagttactccaggttgatttacattttagatcctgatgactatttcattaattaacactgatatcatcattcttctgtatatttattctgaattatcatgtcttatt

SEQ ID NO: 76915 - DNA, 9300 bp, Cannabis sativa
  modified_base (214)..(215): a, c, t, g, unknown or other
  modified_base (1849)..(1850): a, c, t, g, unknown or other
ttgtaaatatgtttttaaatatgtgcatttttaaaattgtgtttttttgcacattttttgtaattatttaaaaaatgtatacatttatgtaaaatgcccaaataaaaatacacactaatttatacacacacgtatatatacataataacttctttaaaaacaatatctacatatccctaaaatcaaatctgaaacacacaaaaaaaaaaaaaannaaaacaaacaaacaaaaaaaatcaaaatacttacctgcaaatggaaacgtacgagacgagtggtcttcaaccgaagaagggtgatgcgtcgctggagtacacctgtgtgcgaccgggttcgaagaaacaaagaagagagggagtttagggatttcaaataaaaaaaaaaaaaaagaggaaaaaagaaagtgaagaaaatgagctgggaggatatatatatactattattagcggcaaaaaccaccgctattgccccgtcgctaataataaaaataataatttatttattttttattttttaattattattagcggcgaggccctgccgctaatacttttgaacttaacaggcaagaattttctcgctcatttattagcggtcaatattagcagcgggaaatagaggcaaagcccgccactaatactttaaaaataaatacatagtattagcgcgagatctgggttctgccgctaatactacccttattagcgacaaattttacctgtcactaataaatttgccactattgacgaatattgttgtagtgacatgtgagacttactttgggtaattgggttcgcaacatccgacctcgaacaaaatagttaagagctcgaaaattgtagaattgatggaaaattgtaagggtaaaaactaatttcaggggtataaaaataattatgcttgataaatatagaaaagctaatgaaataatgtggcagaaacagtatgaaatgcaccatttcatcaaaagagaacagagaagaatcgaaacagagcttagaaagcttagaaaatggagcagagcttagaaagcttagaaaatggagcagagctcgatgaaattaagagaggtttgcagagctcgcataacagaagaaaacaggaaagtgcgcgaagatatgagagaaacaagtccacgtggaccaatccaaatgagagaaagagagtggtttaatgaccatatcacctattaataggagacccccatcgttcaaaaatggcacagattcttggccacaccagagctgtcaaaatacatcctcaaattattctcagatcgagaaaagagaggtatagagaaagattagcaagagatatagggaattgtgtaaattggcaaaacattgtaatttgattggatcaaaccctagtgtaaagagtttcatgttctaatacgaatttattgttgagttaattttcacatcaacaacacccatcactgaagctttaggacattttacaaggagttttttagcaacaagggatggggatgaggaagaacgagtaattactattagataggggtgtttgtagtgcgggtggtgtgatttttggccatttttaaactaacccacacatgcagtttttttaataatccaaactgcacccgcactgcgaaactaaaaaactgcagaaaccgcaccacaaaaaatagtgcggtgcggtgcggtttttgcgatttcgactatcaccaataattaaactattacaaatacaacaaagcatgagcaacacttttcaaaaataccataaggcttgaaaataattatgaaaataaattaactttcaataatataataattagtaggctttgggttgaacattcacatattagacctaaataaatatnnaaattagtatttttataatgtgcggtgttgtgcggattgaaccgcatattaacaattcaaaaccgcaaactgcaccgtaccgcgcagtttaggaaaaattcaaacatcgaccgcaccgtatcgcaaataatttcaaaccgcaatttttttgtggtgcggtgcagtacggctagtttaagcagtttgaacggtttaatgaacatccatactattaaggagttatttatacaaataaaaaaattaaaaattaaaaggagaaaaaagttgaaaaaatgaaaaaatagacgatgagaaagctatttcacacatatataaactaaaaattaatgcatccaacatactatttaaacattgtttttggtgcatgaaattattttaaatttcttaaaaatttataaaatgtctcatagatataactacaatttacactatcatatataaaaaaaattaaattaaaactatttgaaaattgaaaaccagaaaatgtacatccatacacataatttttttaaggtgtttgcactgtaagatttctcaatttccaaaataaaaataagtttagaatcgaaaacatggagcaagccagctctgcagtagaggttaggtcggtatggtggcccattcctatccgttggattgctgtgactctgtctgatcagacggtaggaacatcataagtctgtgatcaaaaagttggagttcggagctggagctggaaattgtggtgagtgttagatttagaaagaagaaagatgcacctaagccagaacgaagggattgaggggaaaacatttgttgtgactgggggtttgggctttgtgggttcagctctctgcttagatctccttcgccgaggtgctcgccaggtccgagctttcgattttcgatcccaatctcaattctctgaacatcttcaccaacatggagcacaatgcatccaaggtaactcattttccattccttctacttttgaaagatttaaaatttttatttattattattatttttaagtttactcccaatccatcggatcgatcattggccaattttgtttatctatgtctagctttacttttttataatttgcatcaacagaattagggtttgttgtagaagaataatacccaattttattaaatactaaacagtttactttttctctttggttgttggttaagttcagtactgaagaagtagacactatggaataacaagaacactcaattcttattgctttcaccttttgatttgaccccttttattaagattgatcattgacaaaagtctcggtttcaatttgtatcaacaaaattagggtgtgcagtattgagttttatttctatgcaaatgtagagccatgagcagattgagtagtttatatttgttttttcttttatctatctttagttaagtttagcatttcaaaaaagtaggcacttgggtagaaaacaagatacccaattcttatttattctcttttgataaaaatgataggagatgtcacccaaaaaaatgatgtggagaaggttctacgcggtgccgattgtgtgttccaccttgcttcatttggtatgtctgggaaggaaatgctgcaatttggtcgtgtggatgatgttaacattaatggaacatgccacattttagacgcatgccttaacctgggaattcaaaggcttatctatgttagcacttataacgttgtatttggtggaaaggaaattgtcaatggcaatgaggtcttaccctattttcctattgatgaccatgtcgatccgtatggtcgtagcaaatcgctcgccgagcagttggttctcaagaacaatggtcgccctttaaagtaagtactttgtaattctaattcttattcttacgattttgagtttatagttgaagggtttgaggaactcttttgtctatgcactttacagaaaaaagactggaaaatgtcttcacacctgtgccattcgtccagctgcaatttatggacctggtgaggaaaggcacttcccaaggatagtgtcccttgcaaagctaggcctgctgccatttaaaattggggatccaagcgtgaagacagactggatttatattgataatctagtactcgctctaatattggcaagcatggggcttctggatgacattcctgagaaggagagacgtctagtagctgctgggcagccatattttgtatctgacggtaacaactgcccctttttacacctctttgaactttatgacttgaaataatgttcttctgttccaaaagatctaattgaactgaacaaagctttgttgatatctaaaagccaagtacatctgcagggtctcctgtcaacacttttgagttcattcgacctcttcttctaggcctggattatgacctaccaacttcttctttagctgttccgcaagctcttcgcttgggaaagattttctggggtttctatacattgttatatccatggttggatcgatggtggcttcctcaaccactgatccttcctgctgaagtgtacaaggtttctcttctgtctttgattttttatttagatgatataatgataatgattttgtattgcaagataatgattttgtatgtcaaacaggttggtgtcacgcacaacttctcctttcttaaagccaaggaggaacttggttatgttccaatggtaacacctcgtgaaggcatggctgcaacgatttcatattggcgagaaaggaaaaggaaagcgcttgatggacctactatttatgcttggatattcgttgtgattggaatgtgcacactattttgtgctgcctatttaccagacataggacctgtcccatttttcagagcaattagcctcttctttttcaggtcagtgtggatgctaagaacggtgttccttacagctacaatactacaccttggagaagctgtatatgcatggaatctggccaatagagttgaccctcataatgcaagaggatggttttggcagacatttgctcttgggatcttttcattgcgtttactccttaaaagagtgaagaagcaatcataaagttagtatccttacactaatctatttctattacgttacataaagagtgggtttagccttagggtctgattttcatcaagttattttattctttgtgactccatattgtgattgggaaaagacagagagaacttataacatataatatttttttttatatatatataaatatcctttcataataaaagatattatacagattcttctctctcacacatttcaccttccttttccatccatttcgagattttgtaatggtcttttctcctctgggttgagcatttttcaagctaaaagatatccacctcaatcttctttctttctactcttttgggtcgatatttttttttgctttgtttagtaaactctttctcttattagagttttgatagaagagctcaagatgataactatacttgctcttttaagttttttcttcaccactttccccgtatattttcttttctattctccaattcattctacagtagttcagttgtaatttattctcttcacttgtagtagttgaaagcaaaggacctcaccatgattataggttggtaacagcaagaaaagaactaagaagtgtttcggtttgtacaacctcagactgcaactcacagaacaatcctcctttcgagggaatgcattgtcgatttagctacttcactgcaatgcaatggcgaagataattactatgtacagaaaaagaataaattaagcatgtaggcgaacaagaaaaagttatgctgttgttttgttatgttttgttgggatataaattttgaaattgcattaggtcatagtttctttcaatgttttcagtcttttgtgttcgaatatgtctaaaattaattttcattgttctcgcttaatttccaaactttttagttagtgattggtgatttgctcactctcattcatatgtaaaatgtatatggaggttttgttttcccctctaaatcatatgtaaaatgactaggtgtattaattcttgagttgctctttttacatatttatcaatatttgaatatgaaatgagatggtctttcattttgcgtcttctataaaacaaaatgaatcaactgttatcattagtaaatttacttgtatcttagattcaaactgaaatatatacaatacacactccataaacataaaaggagtgcaatgatgcactcctatttatttcagtttttacaacaactttttagttcaatttttatttatggttgctaatattatagttattgaagacattatgtaactttttgaaaaatctggaaaaatttaatatgcagaaaataatttattttacgcgcgtataaaataaaagtcgcgcatgtaatagattgcttgaatcgtatttttggcatgttaaatatttttaaatttatcaaaagtttacaaaatattttaaataagtacaacgtatatgattataaaaaaaaataaattaaaaaatcttcttaaatgtataaataaataaaagatgcattacagggtgcaccttatattatattatatatatttagagctaaatatggagtaaaactttgatccttcatacattttattatacctactatgcaaacaatttctctctataccacaaagtcactaccaccacctccctagcaccatctcaacgctatcattgccattaatgtcgtcatatcccccatcactattgaagcacctatagtttttttttttcttaatgtttaaataattaacgttgtacaattgatgtctaatgatgttatgatttttttttttggcaaaattaatgttttaacgatgttattgcaatgaattcatgcagttttttagaaaagtactatttaacgatatatttgtgatagtctgcgataaaatttgattaaaaaaactaagcaacaacttttcacctgaatgtcaatttgaggtgtttgtttgttttttttattaatttggtattttttttccttcaaaatactcacatgtgatgcgtataacgatgtttaaataattgatgttgtacaaatgatgtccaacgatgctatgagtttttcttggcaaaattaatgttttaatgatgttgttgcaatgaattcatgcaaatttttattggaaaaataatatttaagtatttaacaatatatttgtgatagtctgcgaatttttttgataaaaacactacgcgacaacttttcacttgaatgtcaatttgaggtttttttttattaatttggtattttttttcttcttcaaaatcctcgcatttacagtgtaaatgtctaacagtcattgccaccagacaagtggcctagtggtactacttgctttcctgtgacatgaggtcatgggtggttccctctcgcaagaagtatttaatgaatccaaggagtcttaaatgtgaacttttggtgccagtccattcctcaaaccctctacttcaggaaaagcattcaccactagtaatttggtgcagtactggtgacacatcccatcgtaggtggaggagaccacacaaattgggttttggcgaagattccaaggctaggtttgagctctctcggtaacgcctagagggggatccacactaatagctccctcctcccctttttattccatacaaaaaaatctaatagtcattgtattaatatagtgtataacattcttttggaaatatattttgtatattattactgctataagaacatcctctatgcatgatgcaattgtttttttattaatggaaactttattcaaaacaaaaaaagactaacgtctcaaacatctaagttagtggaaacaagaggttccacctcctctttactaaaagagccaaaacataaattaggagcagcccaagctgcaagacaatgagcttgaacattaaaagtcctacgaatccaaataacacgacatgctaaaaaagcaccaatcactataaaatgtcgcagaaagttggatttgaatctccaattttggagccttgttgcaatgaataccatccaccaagcatttgcaatcagaaaaaaaaaattatcttagaccatcccatatcaagcacaaagagaaagcgtgccaaagagtaagagtttcagcatcgaggggtccccacaatcaaaactaacagtaagaccctcaagaagatcatcatcgctactatgaacaatagcagcgccaactcccaacaagcccctacaagcaacattagagaagacagccacaaaacctgcaagaatgtcggccaactcatcggtagccagaatagaaatagctttgctgcccacattcaaattttcaacaatataaagaccctgtagagtattatgaattgaaacttgaatacctcttgctgttgggatcactttttcgtggaaagccttattcctagctccctaaaactcgtaataaagatacaaatcaaagttagtgaaagaaggactaatggccccatgaggcaacacgagagagtcaagtttcaacaaccatttcaacaactctaacgaggtagagaacacaagaaattcactccttattgaccaaggacaggagaaccagaggctcttagccaaagggcaaagacaaaaaaggtataagaaataatcatcgtgaaaatcacagataacacacttttgcacattatcgaaaatttgccccaaacgactagcaaaatgaaggacatccctaccaagtttatagagcaataacttcggcctcacatgatctttgagctatcgcacatctttccatatcccatctcctaggccagttctattcttaatgatagaaagataagtagatttaattataaactacttccatacaagatcatcactatgcctagaagaaaggttcttaatcgaaccaattcgaagtagcaacgctttgaataaactagaacttaaatttattcatgtttcgctctccattctccctcaataaagaggagacatggaaagtatttttcacgatcaaaggattgaaggaagccttgtattgatcccaagtgagccaagaaatccaatgagagtttcaaatgttcacttccctgtcattaccaataagataataagcttcatctctaatcaattatctagaagaaagaattcttctcacaccaaaagaagcattgctaggtaattttaaagaccaaaaagaattaaagggatattggcagtaatactacccaaactacacatttagttacacttaatctcacaaacccaatttttggtggtaaaactctctgaacctcacttctattttgctcattacactcccgtctaaaaatctcagttgagtatacatgtggaaaaaacttagtagtccacgtaatattaattattataaaataattttaaatatttaaaaattttaaaaagtagaaaaaaaataattaatttttt

SEQ ID NO: 76916 - DNA, 767 bp, Cannabis sativa
cgctcttccgatcttgtggctgacgtagctaaatattttgttagggtttataagggttcattcgagttttcttatgtcctaaaacccatttagaagtttgcaacacccctttagaggtggttgtatggaaataagcgcctctaaagggtttcaacatattttttttttaccttttagagatatagtattatttttttagtgatagaaaaatatttcttttcaagttctttttgtagtagtgctctgataccaattgtggagtctcaaactccgaacaagaacctaaacaaaacatgagaaacaatgttaaacatatcaatgaatgaaataccaaaaaaaaatttgaacataaacaataaacaaagtgaatacaaagcttatggggttggggtatacaatcggggagatgatcatgagagaaagcagccttcaatgattgttgatattatctttattaatgccagaatagagttataaaataaggacaaagtgcttgactcaatggagacttcctccttacaaaatcctccagtacttgacatcctctcaattaaataaatgcgagtgtctttaacatccttccatctctcaatttttctaattttgtctcttactttttagttgcaggcatttgtttctcatttattcttttgttttgtttctatcattgacctagctaaaaaaaactaattaatatcacaagccacttggccatttggttggtaaaataatttttgtaaactacactgaccaaccgttagccaact

SEQ ID NO: 76917 - DNA, 772 bp, Cannabis sativa
agaccatcaccttactaattttaagttgttataggaagtgagttatttttaacttttcaattgtgtatacattggtatatttccttcaaatgaaaagatatccaaaaattgttctaatcatgaaaagttagatgtattccagaaaggagttaccaatatattacaaaataaatcaaacatagtaatagtaatctcattactattcctattaccattataattacatttcagtaaatcaaacaccatctaaactcttaattctatattaagaaacaaaagaatagtataaaaatatagccataactaattatcacatatcatgaaaggaataatttaaaactatacatttatgtttaccagagtaacgagacgatagatcaacatttcttgcttcaccatagtattcaatattcatttctcagtggcaaaagtatatctctctcatatagcaaacaggatttattatcaaatggaatttaataacatctaaactctcaattacttagacatagttcttgaatattttggtgtggctgtagaccttctattgacatttcataaccaacaatcgcctcagcttcatcgatttcaacattagaatcctacttcaacgtcaaggatcgaagatattgtttatcctttaattttgcttcctcatactccgctgccacatctttctcacaactcaaatttgtaacttccaatccacctctcaagttattcaatctcatcaattcctttagctcaccaccatgtcttgggatagactttt

SEQ ID NO: 76918 - DNA, 2054 bp, Cannabis sativa
actttaaatttgtaatttttttttgttttcctcaaatttttttttttgttatttttttaatttgttgtttgatacataaaataataatttttttattattttgttgttagtgatgtaaaaaaaatattttttaatttatattaaataattcaatattaaaaagtaacagatctaaaatataaaatctactttcttcaaaaaaaaaaaaaaatatataaaatctacacttaatgcgaatcaaatgcattataagcagaatagaacggaatgaatcacatgaacaccccaatattacctacaagtttattaaattattgaattacattggatatcatcaacgtagtcgataaaaattgttgcccaaatgaccccacctaacctacttttacaatatgtttgataggaagaagggaaatggaaggagaagggtggagggagggaagagttgaaatgaggggtaaatactaaatccttttacaagtttaattttcctaaaaatttgagtaaaagacagaactaaaatatcaaataccaaaattatcatttcaaaaataacaaatatttatagtaagaaagttattagggtaatcttaataattttctctcaatctttttacctttgttattaataccaaacaacacaagagagagttaatagattcttcatccatctcactctcctttcctaccaaaaataattttaagttttattggaatttaattcaaattatttatttatttctatatttgtaaagttatatatttttttagtaattatttacttgtgagaaaattagtctttatgactaagttttagagtgtcttcgtgcttaagttttgtagctttataaatatatattttttgtgtgtgagaaagagtaacgtgtgtgaagaaaagagtaggtcgtgaaaagaaaagtgagtttgagtttgttgtgtgatgagagtgaggaagaaacaaaaaatgtattgagatttagatagagagattaagattgtgaatgagtgtatttttgaaattataagtgaaatatatatatatatatatttatatttatatatttctttgtgggtttggtagttttaaactgaataaattgttttgtttcacttctttattattatgttgtgcttgaagtttatcaatttcccaacaagtagtattacagtcaagattcagatctacattgaaaattttaaagtgttggtatcaaaattatacgttttacatttatctcttagatttattttaaggtttttttttaaggatattactagtttttaattttattgggttaaaaaaatatatattaccaactagttactagtaagtaagaaagaaacaaaaatcgtaccaatgcaaattgtaaattgtttttatttttttctcagcagtaaattgtgtatgtttttattttcataaagaacattattgaaattatacaattaaaaaattattggtacatacataaggttgcacattttcttaattatgggggaactcaggatagagaacggagtggggatgaaaattattttttattttccaatgttaaacgagaaagggataatgacactcttcgccttgatgagaacccgtttaatttattgattattttttaattaatattttatattttataatatgtatttgtattttttagtatattagtattatttttatatttttttaagttatattttttgtataatagttagtatattaaataataaataatgtgtaatattttaattatatgatttaattattttatacatttacatttttaaaagagtttttggcagctaaacccttctaactgccgttttcacttgcatttgaagtggtaaaccctccaaattactaaacaggtagcaaatttaagatgtcatccagttaagtgtcactgtggactgcttatgtatacactcttatacacatgatatgtttatactggtacacttatcattattattatttaaaaattattttcaaaatttattttgaaattaaataaaattataaaaataaaaaataaaaaattttaaaaaat

SEQ ID NO: 76919 - DNA, 2529 bp, Cannabis sativa
  modified_base (1982)..(1986): a, c, t, g, unknown or other
ccgcagttataacagaagatgcccagcttctcgtacttgaactgtatccacctttgggagcccgattccagaccgaagtaacaaccagcgaacataggttgactaacattcaacctaatcaaaactttgagagccttactccagagagcaggttttccttcatccaaattcacatataaaacttggccagcttttgcccccaatgttttaccgttatctgttgagtagtagtccctagggagattgtgaatgtgtagccaagttctcacacagttaaacacagcagagagatcttttattggctcccaagctttcaataggaatgtatacccacggacacaccaaggaccattttcaagggcccaaatacggttcccagcacttgtgaaaccaagctcaaaacagttacggttgttggcaccctcattcacagctaccactgtcacattaaatttccatactttttccacaaaatcaataatggtggcttcattaactaccatcggggccaccactttcccaagaagacaaaaagaagataaagcctgctgagaagaggcacaaggaatgagcttgagagaggcttcctcacacgtgaaacactttccattattggaagagttggtagcatttactaatgccattgaaccagacaaagaaaagcaaacaactaaacaaatccaaccttaccaacccctctaccacagaataccaccctacccccactaaactcacaaagaccccacactgagacaactaacagacagaaccaacaagcgcccttaaaggataacaaggaagactaagaccaaagcaactaaggggaaggaagcaacaaaacagaaaagcaaacacaaaggacactgccacaaccacaacaaaataaaaacacagatcaccaaaacgaagagaagaagagaaagaaaaaaaaaggaaatgggaaggaagactcagatcaaaagagagagtggtagatacttcttgtattttaatactatataaacactactcaagtaccatttaaatacagttcaatcaatacgaagtttcttttactttactttgtttttcgattcattcttctaatatggtatcaaatgttataatccaagaatcatagaatccacaaagcttccactgcctacaataatagtgcgcatgagagccaattcctctgctacctctactgatcccaacatcaatccagtggacgatgctcctctgctatctttttttccttttggatccctctctaccttcgaataaagtgttttctatgattgttcatcaagaacgccaaagaactcttggccatagaatattacccctcttgcagcagcatcttcctctacatccaatcctgtagccacttctaattctaaccctacaaccaatttcacttcaagaaaaaaaaaatgcgcccaacctattccaattgccaaaaatcaggcgaacttcgagataaatgctattttttcattggctttccttctggttatggtgatataacatcaccactagcggaattctaacatttctcttttttgattataactctagttctcaaattgtaaataaggttgaaaagtgaagataatattaatgataataatgtaacgataacaccttaatttccatatggttatatatatatataaatattaaagtgatttctaacgatacttaattagcaagggccagccaaccagccaaaagagagtgcaaaatttagacaaccttaattatacattaacttttaaaagaatagggccggaaacttacaaaagtattggaatttgagtaaatttttacaaaaatactgtcacacgaatttttttttttaaaaatactgtgtttttataaaacaccagtaatacacaaagtagaacaactcaaaacaatagtagaacaactaaaaaacaccagtagaacaccagtgaaacgtaacacagtgtatattgcagtatgaaacttataaaaannnnnagtaaaaaagtaaaaaattccgtctagcagtatttttgtaaaaaaataacaaaagttagtatactatgtaaatttcccaaagaatattcatacaattttgcccaaaagttttacggataggccaatttatatacatatatattattaacaatattagtgatactagtgtttgatcatttgtttgtttctttattcgaattgagcaatttttttaaaaaaaaatagttataatacaattacgtttaatattgatatctataaatgtctcatggttacttaatggagtattatattatccaccagctgtaacaaataccaattataataaaataaatatacaactactaatattaaagaaagagacaaagaaaaccacaccatgatccatgaagaaaccatgttgtaatccgatatgcatggatcgaataataatatgatcgaaccaaacaaacaaaataaaaaggggttagaaatgaaatagcaaatgccatgctgctttcccccttgtattaataattcatttatttatatatatttatatat

SEQ ID NO: 76920 - DNA, 1407 bp, Cannabis sativa
atcctcaacctctctctgcctcaacggttgaacctgaaccaaaggcgaaggtctctgattcccccgaaacgccttagaactaacaagttgatcggaattagccacgcaaaatctaccgagcattctattcttatcaagttccccttgacaaaactcataaccattatcagaaccaccattttcattcgacgaagaatacatactagactcactcgacgaaaccccttcttcttcgaaacccgaatttctcaaaaccgctccactattttcggttatcctatccatttctacttcaatttcatcattaagaacattcttttcatcttccattaatgtcaaatcctcatccaaacccatactcatccatttcaagaacttcctacggcgttcaaagacatcaccacctaatttctcagcccaaacttcataccttaatctactcgaaatactagaactacaatcctctgctacactatccgaatcccaatccgaaacagaagaaaggtcctcataagcatcataaaattgatcatctcgctccaaactcaaacagttcatcatcttttgtttacacttaaacaatttttgcttaattatcccatgagatcggattttctgacacataatttcaaacaacaattaattaaaaaataattaagaaaaaaaaaaaagcaaacaactttacttaaattcagacaaaatagacaaaagggttcacgtttttcttttcatttacttcaaatcaaaactaataaatccaaaactaaaatagcaaaaaaaaaaaaaaaatcccaaattaagatctcaaccaacaaacaaaccactcctcctaactccaaattaagtacaaatctaatgactttcctaaaaaaagggaattttatatcaaatcaaaacatataaaacaaaaaaaaaaaatcaatttcacaacagcttgattaatcccccaaagaaaccctaaaggtagaatttttatttctcacctgggtcaccacgaaaattttggtcaaaacccagaaatcaagtcttcccacatagggattttcgcttcctcaaattcttatctgtttccttcttcttcttcttattctctctctatatctatatatgtttgttcaaatctacatgagcatcccacttgtgaagaaggcaaagaatatttttttattattataattattacaaaaacctgaactttaacaataaaaaaaaataaactttttacaaaaatttaaaaataaaaaaaaaatacctggattatggtgtcacaagaagaagagaagagagtgaaaagtggtacttaggttattatgttgttgtgttgtgttgtgtctttgtttctgtcttggagtttgtaactcattttcctatggtgtttgatttcggaccatctaccggttggtacta

SEQ ID NO: 76921 - DNA, 1842 bp, Cannabis sativa
tatgtactagtatgttgtcttatttggggttgaactatgcttgtagcaattcaaatatagaggatctgcacccattcatggtatggtaatggtagtagtagtagtggttgcggtagtgaagtttctttgacgagctcgggttttatagatctcgccaataactccttaagcaaatatgccaacctttgatgtctcccacgaagcctttatttgttggactagagaatatcaatggatgagctcgctgcatgttgttgtcaattgtttgtgttattgatagtcaggattagctctctttttggcttttcttttctgttagttagttacaattttgttacaatgttagttgcttgcttttgccttctgtatatttctagggtttttttttttttttttttgtatgtaactaactgatattatataaagcctcaagcctccccttcaatgattgagcttctttttcattttctcactcttcattacattcttacatgtatcataacagccaaaaacttttagcatgttgtaatcaggtagctgtttatataatttttcaaagagagacatattgttgagtatgaggtgggaagcctattaatcaagtatacaatgatgcagaagcttcccatcagaaactaagtggaatattactttgagctaaaagagtgagtcccatatcaacgacatgtctatgttttctcacaacacaaccttgttgttgatgagtgtgagcacaagattatcgaaaggtgattccaagttgatgatacaggttatacagatgtaaaaactctttaaagatctgtttgaacatttattagtttggtttcaaacattagttcaacaaatttggtaaattgagtgaaaagacatgtgacttaagacttggattgcattggatatatctacaaatcttgtgaagtcatcaacacaactaagataatacatcaactctaggcctctgttttactgcttcctctgatcttaaccttcataattactaggatgcagattgggcagggtgcaatgattacaggaaatcaacctcttaatactgcatgttcttgggaagtaacctcattagtcggtgtttcaaaaagcaaagtgtggttgctcgatccagtattgagtccaaatatcgagcccttgctttagctacctccgaactaatatgtatggaatccattctcactgagttatctattcatgtgtcaactattcctgtgctatggtgtgacaacttaggtgccggtttctctagtttcaaatctagtttatcacgcttgaaccgagcatatagaaatcgatgtttactttgttcgaaacagagttcttaataacaagctggatgttcgataggtggattcctcataccaaattgcagatatccttactaaatctctttacatttctcagttcaactacctcagagacaaattaacacttaaatcaaatgagtgtaatttaatgggtatgttaaagatagttaggactctctttttggcttttcttttctcatagttaattacaattctgttacaatgttagttgcttgcttttgccttttttctagttctctcactctctagtatgtaactaaggggctgtttggaataagttaatgctagtaagggaattgtaatgtgaaacattacattgtttgtttggaggatttagccttagaatgttattcccctagtaatataactaccattgaggagggtaatattcataccttaaataagggtacgattgaattattaccttccattatattaatttgaataacatttttgaattaataaataaatttaaataccaataatattatcatttatatat

SEQ ID NO: 76922 - DNA, 1064 bp, Cannabis sativa
acgatcaaggatttcttgttaaaattgagaatggagtcatgaaagtttatagagcatcatacaaaaccaaaaacctaagttctaagccctaaaacctaagttccaagctctaatctcgagacccttgctctctctttctctctctcactcgagtatccatagcaccgacactaagattgtctccttatctcacttgttcgagatctactttacattattctcactattgtaacattcaaagagagctacactagaaattacactgtagaagattgtaatctgtgtggtattatctctcaaatcaatacaactaaaatgagagtatgtcattacctactaaccaagagggtcaaacctctataaattgctatgctattttctttacttacttttattatttacacgtgataatttcgatcataaataaggctccactgtcagctgaccaaatatgaggtcaacacttaatattataggtacatggtccctgaattgccattctataagacagtcaagggtatgaatgagacaaaataaaacagaaaaagaaaaatctattttgaagtagcaaaatactaattatttatttttataataaataatttattttttttttaaaaaaatttattatttaaataagttaggggagacaagaatcgtaaagacaagatgggatgacactaccttgattgttaagataaggtaggtgccacaatgtacgtatcacgacaattgtaggtggtgcctacactatattattacacagtgctgtagtgggccccacttactttatttttggattaattaattatttcagaaaaataaaaatttatttaaattagaatttaaaatttggttatagatatttttatggttgagatattctcccaagtaattaagaactttcctcaatcagttattagatgtttaatttataagtatttaaattttaaaataatatctataatataattagttacaaatatttatttaaatattataatatagttatttaatattttaaataaataaatatattatttaattaaatttttaatattatt

SEQ ID NO: 76923 - DNA, 2789 bp, Cannabis sativa
  modified_base (849)..(852): a, c, t, g, unknown or other
tcttgtaaaccaatggtggtggaagatgatgtggaatcagccaattccctcaaagattaaacatttcctttggcatgtataccatgacactctttcaacaagacagaatctatatacaaagaaatctttatcatcactagtttatttttgttgccaccaccaagaagagaccctgacacattctctttttctaggttcttaactatccagcgggtatgaaaattaacactttttatacattcatatcatttgcatcagcattgagtttcatcaccttttaaaaaagttcaataggttaaggattacttacagcattaccaaagcaacaacaccctcttgacacaggtctccattcaacgtcacctctgctctctcgttgtgagacactagcactattcaatcagttaaagcttaccgtggatgcagcccaagacataaagagaaacaaatgggttttaatatggtcattcataacgttcacaacaaagtggttgtggctttggctacaccgtggcagagaatccattcgcctcaaactatggaagcccatttcctccagcatgcgcttcattggtgtcacaatcactctacgaaacctagtcgtattgcatctaactgtaaaatacttgttgatcacatatgtatcaacttgtctcatacttttcatctaaataagtttgtcattgagattcatagcttgctattttctctccctcaagctactcttagttgtattctttaagggccaaatgaagttagtcatcatatagctaagcacgctttatgactagatcaggcagctatttggacgaggaacgagaaccacatgcagggccggccctgaaacannnngggccatagggaaaaaaaatttgggcccttatgttagaaaaaatatggtattttttaaaattagtaaaaaaataaatataattttaaaagagaaaaaaataattttgggcccctgggctgggtgggccctagcctagcccgactatgcccagggccgggcctgaccacatgttaaactatatcatgtattctacttgattttattgatggatacacttcttctcttaaaaacaaaagaaagtttgtgtcattttttaattcaatgattggattttgagaagcaggtatccaaaatattaaaaagaaaaatacacgtattttggatgtaaccgtagaagaaaaaaaaaaaaaaagatattagctataaaattacttgaactttatgtctttttacacttaacctcaaaaaccaaaattttaaggacaaaactatctaaacttcacttctgttatgttttttacccctcaattcaaaaatctcagttaagtgccacagtggatggctgaaatatatactaaagtacatgtggcagaatttgagtagtgcacataatattaaaataaaaatttattattttattgtttcttttcttttcttttctttctttctttctttttttcttcttctgaaaatactaaagaaccaccccaaaaccatctccataaccccgcctccccaaaaaaaaaaaacagaaccaccaccactatcactatccaccacaattaccacacaccaccaagccactaccattatcaccactaatatttctctaaaataatagtaaaaaacaagacatctagatctaaaaaaaaataaaataaaaacccaacaactccttgcgtcacctgaagtttcagatggctcaatcagagtcgtggtacctcggctccagtgagatccactacgaagagaaagaaatagagggtatgtgagagagagagagagagaggacaaacgactcaatcaaagttgtgtggagtttcgactctgatgaggtccaccacgaagaaagggggtcggaggcatgcttcgcacctgctccacagctctggcgaggtctaccacgaagagagggggttggaggggtttcgctgggttcatcatagagttttggggctcgtcacttgaagttcgagtctcgcggaagatgaagaaggaacacgggaggggggcgtctggtagtatcgtagaaggaagaggaggaacacgggagaggaggcgtctgttctagtcgcagcaaaaagatgaaggagaaggagaaatagaaaaagaaggaaaataaaaaaattaaaatttattgatttaattattttttttattttataattttgaaattattttttaaaataatgaaacaattaaaattaagtagatcactaaaattttgtcacatgtacacttgtgtacacgtggataatgtaccatgacacttaactgcaatttttggatagaaatgtaaagagcaacaatgaatgcgagattggtaagattttcgctcaaaattttaatttttgtaattaagtgttaaaaaacataaaattttaatacttttaccgctaatatatatatttatatatatatataaaagaaacaataaataaaacctcctgaatgttacttaacattatcacagtttaatattaagtaaattttcaatatgcatctctgtaaatacacaattgtattgtgtactatacaaaagagagatgagaagagacaccaatagagtttggttcagagttgaaacattaaaagcgcacgtatgttactttttattttaatttgatctgtaaagatagagaagagaaaaaaaaggagatgtgatgggcttttctcataacattatttgtgtctatgcattgtttggtaactcaaaagctgggctgtgaaatcttaattgaattgaattgaggtcatgagatgagtgagtgagtga

SEQ ID NO: 76924 - DNA, 545 bp, Cannabis sativa
aagctgcgaccgccatagctcgtgattcggctgctgtttttgcgtggaaaggtgagactcttcaagagtattggtggtgtactgagcgtgctcttgattggggtccaggtggtggtccagatctgattgttgatgatggtggtgatgctacgcttttgattcatgagggagttaaggctgaggagatctatgaaaagactggtcagttgcctgatcctacttctactgataatgttgagtttcaacttgttcttgggattattaaggaaggtttgaagactgatcctaagagataccacaagatgaaggatagacttgttggtgtttctgaagaaactactactggtgttaagaggctttaccagatgcaagctaatggaactttgttgttccctgctattaatgttaacgactctgttactaagagcaaggtaaaaacttagatctgtgttcatttttgcttttttttttttgattcagatctgatatgattcgatcgattattttggatttttatgctcatttaacttgcagatctactttat

SEQ ID NO: 76925 - DNA, 567 bp, Cannabis sativa
ttcttctcgcaaacggcagccaggtcttttaactttctcttattttgaatatgtagtacattgcgaaatgatatttatatttaatttaattcttttctgagctttctagggttcgatttgtacgtcgttgttttcaacatttttatgatgcgctgggcatatgaatcaattataaatttgtgtctgattctattatctatactgcagctagggttttatgcatgaagatttatgaatttttcttgttggatttttttttttattttgattaatttaaaggaaatgggaaaaaagttgaatatgatattttactgcttacttgtttattttcttgttaaatcgaggaagaatggttattacctggttaatttgaatgttattgctgaacagacgaatcgattacgtggatagttcagaatggctgatcatcgcaatggaaatggccaacctcctaacgggaaggctactggggctgcctactctattgatctggtcaaattcagtgagcgattgaagactctttattcacattggattgaacataaatctgacatgtggggttcttct

SEQ ID NO: 76926 - DNA, 1771 bp, Cannabis sativa
  modified_base (1547)..(1552): a, c, t, g, unknown or other
ccataacaccaactgactttttgacttgaagtcatatccgaaatagaaaaggtcagggtacttctaattttcccagaatgaatatcaatggctaagaagaaccacacacaagaaggttttaaagattggaggcttctttgaagattattatattgtttaggatatggatgttgaccatctttcttttgagctggatccaccttatttccacccccttttactttagggttgaggtcgagggcacatgaaattcttcaactcttagcgtgtgctcagaatatctccctcttgactataactataaacctcctcgagtatgggctttacccgtccgaagaggtacaagagtctgaccaagcagccaaaaagacttccatcgagttgaagattccaaagaagaagaagaagaggaagaagaagaagaagaagaagaaggatcttgtggagcatcaggagccgattgaacggcctatccaaattagagatgacctcggggtggctacttgtcttgcaaccctagtaataggaaagggaaaggtcgtggtggtggaagatggtagagattcttctgatgaggatgccccatctctacttatttgggatggttcccctttcgaagtctagggtagccattatttaacataattttgcttctatttttacttgtctatatttaacaagtgtttttattttttacagctatgtcaaagaggttgaagcgcgtattgaagaggaagtttagtgatagctttagttagaaatttcctgctacgttggaagatacccttctagtgagaattgcgtcgagctctcagatgccccacctagatactgaaaggagctctgtggtcgcagccatagacgtttttgactctccctctctagccaagaagtcctccaaaaatctacctccaactgtccaggcaaaaattacaaagtcttccaagggtctgacgagttctaaaggtgccaattctaaatggcataattttttgaagccaatttccactccacctaccgtgcgacctgttaacctaaaaaattagtgcttgtaatttccgagattagctgaccaaggcatgagagatgacatggcaaaaatcactcggcgcaagaatgactcaatgtcactctcccttgagagcgaaaaaacttagccatgagagtgacaatgtcacttgaccttgagagtgacaaagtcacttgggaagggcattgagaggtcagtcagcaaaggcaatgaaatgtcactcagccaaggacatctcaactttgtagatctatttctcatctttctatagcaacttgaattgcccaaattgggttaatattgggggagttatgctctaaacatgcaaggggtgcaagatgagtaagacccacttgacgaagaagccttggaccatccttaaggcacccaaaaagaacttctcgagaagtcgctcatcaagaacttctcgggtgatcacttggcatgaactccttagaagtcactcgacatgcaccctgttggaataaattttaccaggacctagatttactaacannnnnntttttaacatcctaaatatgaatctctaaaataatgaaacttaaacacatataaagtatgagaaactttacattggttgcagcagaattaaatgactccttcccctcagatctattatccttgttcctttctgtcgcagagtataatcaacatctgagctcgacactcctccagttgtttgaattcttcacagtcttacatgttggaaatttattttac

SEQ ID NO: 76927 - DNA, 778 bp, Cannabis sativa
  modified_base (48)..(56): a, c, t, g, unknown or other
ttagtatacgtgcctcgcacgtatctttttactagtatatatatatannnnnnnnnatatatatatatatatgaaaaaaccaactaagggtaatcaagtacgcttatggtaactagagggtaaccagttactataagggataatcaggtacctattgtcgtttttttttttttcatatttttaaattttttctaaaaaatttccgtgaataattttttttgagaaaaagttatatttttacaaacttatactttaaaaaccataaaaataaaaatttcaaaataaataaataaataaataaaatatttttaaaaattttccataaagtctaaattaaaatatgttaattatgatttttcttgtattataatttttatgttattattattaataatttattatcattattattattattagcataagaaatatatttgttttgttaatttatctttttctgaatttttgggagttgacgttatttttgttagttttaagcaagttgatttccagttatccaaacacaaagtgtggttttacttgtgccattggataggacttagtctttctttacattttgttgaatttgattgtttagcagttgtgaatacgctttttaatgcttttctttctttaataatttttgttccttattagaagatttagttagtttcagggacggacacaagcccccactaaaaaaaaattagtgtgaaaaaaaattaaatattttctatttagttaaataattatacaacaaaatagtaaaaagccccca

SEQ ID NO: 76928 - DNA, 887 bp, Cannabis sativa
aaaaaccaaataaaattaaattaagcccaaataaaaagtctaacaaatgggtgatatttttaaacttattgtagaccataaactatatcaatgactataccctaactcagaggggaatggctatacccaatgaataatatttatgaccttgtacataaaaatagattgaaatagaatggaatacattcctaattcagagttcatgacagtaataaaatctcattctcttcaaatcgatgtaaaatcgaagaacagatctaaaatcgatttaatattttctttatgaaaaaaaaaaacctggaagccaagcggcatatccaccgtcgctcccctgccaactcaaacgtgtcgaacccctgggaacccaaacactatcgatcccctacgaaaacggaacccgtcgtctgcgaatgttaacccatcgtccctgtcaaggaaagaaaagacccaaagaatgagacagatagatatatatagagagagtaaaaaatgatgagcgacttgggattttgatggcagcgatctcggatctgattttgtttgagtcgtcgatcacagaaacaaggtggttggaccagcgatctccatcggatgccaacaattcatcaaaaccaaatataaagtaaagaatcgactgaggcaatcaaaatcaattttgtaattacctagacctcaatccactctactagaaaatttaatcgagatcgattctcctacaaaggaacagatttctatgccaccttaaccagagtgagattatggatttttttaaaagatgtttgcgattcaattttatcgattgcaaaaaaaaaaaaaaagataagaatgttgtattatttaataatataatatagattaaaatgatatatattattatgtgaataata

SEQ ID NO: 76929 - DNA, 629 bp, Cannabis sativa
cccaaatcttcattaatgtcaacaattagtggagcaaaggtccagtcataatctgatagtagtagtagaaacctatacacaaaatgtcccacagaacacaaaacagagttagttaggatacaaatttaaagtatttatagctgcaagtctaattgctaaagatttaacttgagctgaataaagaaactttaacctcaaaaacccagtgatccttgaagatggagcctcataaggtaaaggcttcaaaaacagatatgcaaccaatagctcaattgcctcctccaccaagcatgttgagaatagatgtgacgcaacccatctttttgcaagccttcacattaagataaaacgattattttgagttgtatttcactaggaaaataaactggtaggctgtgataatattctaacctagcaactggtccatatactgggtaacgactttgtagaccattaatcatgttcgaatgctgactgcgaaaaaaaagctccttgtctgtagaatagaccctttttacttgatcactttcagctacatgtcgaagcaagttcaaaaggtcaacatcatataagagtcagacaaatgtaaaaccactgagacagatttcttactttccctcttcaataag

SEQ ID NO: 76930 - DNA, 534 bp, Cannabis sativa
caaataaaatgctcattaattgctttgcccaagctaaacccaacatttttttatatttattacatgtacctccgcaaactccttccctatttctaccgccgttatctcatccctacttagccccgctgcctccttttcacttacctttattattacttatgagttctctcaacaaaaaaaaataaataaataataaaaatgatgtattaatttagaaagatattattgattccaaaaattgttagtgtaattttttgagttatctaaattaatgagagaaaaaattccaaagtatattttaaaatggtattttttctaaaatacacgtaaattataaaataattataaaaataacttaataaatttcaattacaataatattttattacgttattaaaaaatacatttattctaaaataatatacttgatatgatactaaccccgaaattcttttttttttcttttaaattttcgtgcatttcaaaattaattttttcattgcttttgatgttttttttttttgggaaatcagc

SEQ ID NO: 76931 - DNA, 517 bp, Cannabis sativa
  modified_base (27)..(28): a, c, t, g, unknown or other
ttatgctgaaataaattagtaggatcnnaatcccacttattacctgattaattcataatatcaatataaaccctaattatttaccatttaacttatcgggatattacactaatgattaagctataggcagatcttatccattcctcggagtcactattctcaggatagtctcatttggcactataactcctcaggtgagtatactgtgaaaagtggttattagaatgttattagacttttgtgaaggggtcaatttgactcttcttccgagccatgttcttggtggaaatacatttaaagtctcacaatccctctgaagattaaagggtttatatggaaggcttgtttagattggttcccaacaaaatgtaacttggctatgcataaggttcccattgcattatggtgtcttgtgtgtcatttagaggaggagtcttcttttcatgccctttgtggatgcttgggtcttcatgatattactaataaagttcaatttgtgagtaatccttcctctata

SEQ ID NO: 76932 - DNA, 908 bp, Cannabis sativa
tgagctacctcgggttttgtttggagaaacgcttttcaatcttcaccttttatttcttggaaggtttcttgtacataagctctcgttggagtctagtgtcgtttctaatcaatccatgttctcgcaactttttcgtcgtacaaaaaatgcattaatcatgttcagtgattggtagactgcataggacctctgcaatttccaaacaatcttcagtgagttttgatcgagttggcctccctatgaatacaaattaaagattataatcctcaaaattagaataaaaataatacaagtataaaagtatgcgatgtacgaggttggcagttaaatttatcctaatctcgagcagtgtaaatggataaaaccacttcaatttccaatctcccataacgaaaaaccacacctttcattccattgacctctgagttagccctattactaaaatagtagaagctgttattgtggccaacattcctaatgtcatagaagtagcagaagtcctcaatggtagattccccttgcgtgtactccatatacatcacatagaaccgaaggatgattctatagttattgggggtaagctagaaggaagaaatgtcataatatgttaaaattgctcttacaaaaaaatggaaaggaactccaactccaaagcgaagaatgggaatagaaatcaccgtgacatcagttggggtaatcgctaagttggtgaaaggaagatgtggacattgtattgacacgggttttgtacaactggcgttgatcaactttagcctctagaatttcgtaaggtcaaacttccgtacacatgagactagatcatcgcaagaaaatcgatcgtctagtagtgtgtcttctacaaaaactgcaacatcctcatcatcttcacctgttgggttttgtgccct

SEQ ID NO: 76933 - DNA, 1131 bp, Cannabis sativa
taaagaaaccctaatatatactcagccgcctcactcataataaaaccctaataaccctaaaatttgctctctgactatctttctcgatgtcatgctcagtctaaccaccatcgaccctagcactcaccccaaccccgaaaaacctaacaccaccgatgccctaacccttttttttttgtgatctcactatttttcttttcatgtttgcaggtctttttttgttttttgttttaataacacagttgtgtgtgttaatgttattctagactattaatttttggtcaaaccaaactcactttctctattttttttatctatacatatatagttatcattttttattggactgaaaataaatgaataatacataaaaaaaaggacctatgatttcaattatatgttaataaccgaagttataaggattgagaatccacatatatgcaccttatgacttttgttagtcctaccaaataaccgaataacgaaagccataggaggcctttttgcctttaatttattttgactccttttcgcttcgcctgaaacgccttcgactccaaattttgtcaaaacgaaagctaaacacccaaaaaaaaccaaacctaaaaggccatatagtgtgtgttttcttttttttttatataattttaaccacaacttttagcacagtaattatttaaattattcacttaactatttttacgaaaaaaaataaaaaaaaactatagcatcttatttgtatattttaaaattatgcacttatttaattattttttaataagtatattatgtaaatttaaattcaatgcatatgttttcaatagtaatataactatatatttaattttagtttgtgaaataaagttatatatgaattcaattttaaaagataattataatttttccattatcatggtcagagcatataatcatataatatgggaaatttgattttctatactttgaaaatcaaaaaatttgattcctaaaccaataatttaaaccctaaaagaactataccatttttttttcaaaaccccaaaaatacccccaaactctcacagcatctctctttctctctctatctcggccggtcccaagaatcccacaccccaggtccgatggtcggac

SEQ ID NO: 76934 - DNA, 882 bp, Cannabis sativa
ggccctccacatcagattttttatcttcggaggcatctttaaagaccacaaacttttccaaaaagctgaagcatttatctcatcacacagccctttcaaagattgaagtaaccgatatgcgcttttgaccatatacacaccagtcggctcatgaaaccagcagagaatgtcacttgactggtttgagttcagaggtatctggtgtataagccgttgttctctgtcatcaaacaaatcctttagaatttcttcatcccacgaattactgtccattgacatcagattgcacacacaagcttgctgaagtgccggatgtgtatatgtaacaaaaggttgatggggatcaggcagccacggctcattcaaaacagaaatagaagagccattacccacattccatctaacccccgcactaaccagagatttagcttcccaaacacttcgccaaacaaaactaggattacctccaagaggggccgagagataggtaccaataggaaaataacgagctttgaaaatgcgagaaaccaaagattcgggtcttgtaagaaaacgccaaccttgtcataaacaagagaattaagccactggtggtgttaatttttgtaattttttttaatttaatttttgtactaatcaatacatctattcaaaattacaattagacaattaattatattttaattaaaagttataactaaatataatataaaaaaaattaaatttctaaaaaatattaatgtaacaataataagaaataaacaatagttataagggtaactattcaatggttacatttttattgtaaccatcattgttacatttttctttgactagcaggttactaataggtaaacattcatttttagaattaattaatta

SEQ ID NO: 76935 - DNA, 1984 bp, Cannabis sativa
attgtttcgaaaatataaaaaacattctccaaaactaataagaaatgtgcgtgattctgttaaatttttatgtcaaaatatttattatagttatactatcaaatttgtaatttttttaaaaactcttaatagtttaaagcattaagttcttaatatttcagtttactatgtctgttcaaaaaaaaaaaaaaattagacctatttttagtactataaattatttagaatttttcaaaaatttataaaattgatattgtaagtataacgaatactattttcggacatatttgaggcatcagaattagaattggagcaagtttatttttgagcactcggggccctgggccccaagcacccagtgcctaagttgacaatatatcaatttaggcaccttccaagtatcatatcagagatctgacttttgcatcttctatcaaaaacaaggatgtaggtccttctaaagaaaaaacaccacttcttaagtgcaaaaaaagggctcagtgcccaggttgacacttgggattggccctgcgcccaagttgatattttgtcaacatgggccattttcaattgagtttttgaagagaacttctaagaattttcttgttttcagtaaatattaagattgaactattttcagggaccaaataaaatttttcacagggccaaaattgggacccaaagtccagtttgacacttgaggttgggcctagcgcccaggttgacataatgtcaacatggactgtttccgatcaagtttaccaaaaagtattccgagcatttttccatcatcagaaataatgaagatctaagcaaacttgggaagaaaacaacaaactcgagcccctggaaacggagcccagcgcctaagttgacattgtgctgggcccagcacgcaggttgacaatcaacctagaacgtgccttcaattgctcaaatgacaaaactaatgcgaccatcgaatttggaatggtcaaaaatggggttaaggacctcgtcctcaagttcggaagccttagaagtataaaaaacgagatcccgagagctcaggagtaagtatcaagcgcccaggttgacaaatggtttggtgcgctgggttctgcttatccgattctgatgtcgtttcgatcgttcgtctagtttttcacaataataaatattcatgaagttaaagaagtcaaattcataactttacatttctcatttccagcttacttggaaatgaagagtttcgagtctctcattccgcaaaacagcaaacatctccatctccgtggtgacgtgaccaactttgccagaacacagaaactaactgagtgatatcaaaatatcacttaggcatcttaaagtgcatcccttggatgtttctacacttacccaacgtccaggttgacgtcatatgtcaacctggggactgggatgtcaacctggggactgggatgtcaacctgggcattggatgtcaacctcagcactaggtcatgaactgcctttagtaaaaatattcataactcactcaatattgatttgattgatgcgattcaactttcatttcaaagccaatttaattctctatcaagtcatgtctcaaacttcaattgtaattctgaatctatcatcatcaaaattcattcccaacggagttactaaataagctctaggttactacagcggaaccctccgggctccgaaaaatgtccatcaccaccaagagttgattcttaccgttagatcatcatcaacgataaaaaatatcttatattttctcctatttttgtgggtctccttcacctataaaaggagagctctataaactcattttttaaatttaaaaaactatccacaaggtcaaaatttctctctctagaaattaaagcttctgatacttaatctttttttgtaattaccatctcgtgagaaataaaaatttaaaatagacgtagctccattactgtcgcgatacagggagtaaactactataaatt

SEQ ID NO: 76936 - DNA, 806 bp, Cannabis sativa
ttagttcagatatttgcgaatgcaaagaaaaattggatttgataggcaaagagatcaacctatgtcacaacaatgttttgaataggagggcagctctaaattagtttccctttcaatttctttataattcaaataataagtattaagtattaagtttcttaatttattttgagtttttgtttttgttagtttgggaattggatagctgattatttagtttgtttttctaattcgaatcctgatcgtgtctctaacatgaagatgtccggattagattacaagttattattttacttaattgctattaataaaattacataatttattaaaaaaatatattaagttttacatatttttagcactaatccacttaataatagtacaatacaagttgggctcctcttccatagaatcttttcaccttattatccatttttagtgatttatcattaaacttatgtgttttttaataaatatcaacacttggatagtagagaacaatatcaaaatataaacaataccaaaaaaaattagtacttaatcaatatacatacaaaccatgtttatataaaagtctaatatgcattaatcatattcaatatctcttctttgtcaactaaattttatcaaagatattcactttaatttttaaaaacagagagaagaagaacaaataaggaatgaatcataaatttgatagtcacatataatttccatttataagtatgtctattttgccactaaacaaacctaattaaccttgttaataactagattagattcaattttcatgatattcaaaaata

SEQ ID NO: 76937 - DNA, 699 bp, Cannabis sativa
attggatcgccttgatcagtaaggccttccctttgagtttgtataaccatcatgttaacctgtcaagattaagagaaaaacttgtattttttctctcaatgaaagcaccaaaatttgaaagcaaaaacagtaaagtaaagagaacaccagattttaaagaggttcggccccataagaatggtaatagcctactccccttgtatttatattgacttgagagaaggaataaagtctttttcccctctaaagctcttacaatggatctccgagttattctgtgtgtttctggattaattttctcatcctcctcaatagtgagactatgccactatttataggggcttaatacatgaagaatggtttcccttaatttataatgaataaaataagaaactacattaattatataactacaatgtaaagaatagggaattaaggcctattgcctttattctctgattcaaacacaattatagggattgtcttcgtgccttgaaggtgacgagactgatctctagttttgccaacttatataccttgctcgatacatatatgtttgtatcttggtcgaacgtcttcttgactatcctgtttggatatcctagggttacagatatggagattaaccattagtgggctgctaggaatacttccctctgcctaggtaataaaaatgtgggacacgtgtcattcattctc

SEQ ID NO: 76938 - DNA, 695 bp, Cannabis sativa
atgtaattcataatttttttataattttatttatatattaaatatagtttttagatactttcagtaaatatttaatctttttggtaactttttgacgattttctattaaaataatgtttattttactcctagtacattggagcacaattataaaattagatcaaatataacatgaacttattttttgagttaaatttaacacaaaattttcaagattcattagagatggtctaatgtggaaagagcattccattggaatgacattccattaatttaaaatgcaatcaaacaaatgaatggaatgaaaattatttcctttccattttattaactcctaccaaatgtcacctaaatatatgtcgtttccttgatgagaagaacttacaaaaaaccatgcaactcctctccattggtccttggatgttttaatttaattagggcactgattgcactaattagtaaaattatcggcatgtttttatttcttctaattttattatcataaataataatttatttataaataatttcatctgtatgataaaaaactaaaattacattttatgtgtgatttttctctatttttttttttggaaggaaataacatttataaaaggaaaatttacatggtatattaacttttactatttttttacaaaaatactgtcaggcggtcttttttacttttttactgt

SEQ ID NO: 76939 - DNA, 594 bp, Cannabis sativa
aaaaaaaaaaaaaaactatatttgcactaaatagactttggtatgtcaaaaaaaaattaataaataaaaaatagactttggtaagccatgcaatcagtgcagcctccatgaaaaacattgtcttcagtcaagatatggcaacaaataaaaatcaaccattttttttttccaacaacaaaacataataaataataatcaaccatatccccacaccatcaactagatcttattcttttaattattattttttttttagaaaaggctaagaagacattatgagaggtcatgaagaaaattaagatattaattaaatcaaaagaaagatttcccttatcgactatgacgattggaatgacctacaaccaagaaggaaagaagaaaatattaaaaataaaaaccccaacttttaactgtgtctaaatagttggggtttaatttagacactgttattaattttacaatgattatttttatcacttattggagttaaagatttttaattttaattttaggatataatattaggttaaattatttttttttctttttagaaaaacaattttagaccatttttaagattggaaaaatagataa

SEQ ID NO: 76940 - DNA, 2082 bp, Cannabis sativa
  modified_base (1564)..(1582): a, c, t, g, unknown or other
gaactatataataatataatttcttaattattcttaattatctaattaggattttgctaatccatttcttaattttagggtattacactatccaaggcctggcacaggggacaagttgccagatttcttgagattcttgtgagaggtgtgccatgtaggatggttcccaaacacttgcacgttttacgcctttttgactatcattcccgaatgacccttgagggtatacgacttcgcctctttgaatgcttgctagttgaatgtatgattaccttttagaactattaagcttagtcacaaagaagcgactatctgatccagaagtgtcatttggctttacttatgggtcgactgatcgatccacttggacccagtgaatggacctgtcattcttaatgggcttacttgaacatacacgtgtcacttattcagaaatgcagataatatttaccaccaagccttctaggctcaagagtcacagagacttgcaaccatcatccgactttgtcatcgcaactagggccatgaatggtttgagtcttttgggattccatgatgacatgttgtggaagatcctgaacccttcatattttgctagtagagtacacatgtcgaatattctttgggtcgtgtatgttacgcggttcacggtagcgcgtgttgccttaggttgcaaacttatggttggttatgccagctagttactcgaggcgaatattatcattaatgtgcatgtcattggttttataaattgcattaaatgtaacttttggcattctcggaccattggatcccaaagattatgctttctcaaactcaatttgagcccttggatcggaggcacacgaattgccaagattcttagaataaaagctctccgaatatgattcggatgcctcaaatatgttcgtgacatgtctagttcatgtcttagtataaattttgacccatttacactaagacggtcccaaaaaatgaaactctagatgggttgttgacttgggcgttaggtgaaatcctagacacctaggttgatttttgtggtgttatttcatgtatttttaactcccaggccttgaacttggataatttgtaacaccctattgcctaggcacgctacagtaatttttctacttactgtgcactcctttgctaatcaaaaggtttttcaaaaatcatgacaaatttaaacttttaattaaatttaaacttttataaatataaaaatattcgtacaaaagtcgagatcctgtctttaaaatttacattcttattcaaaatacactttaaagacatgccactccgcgactacaaaatgaaggcccaagtcgtcccgagaccgaactctctaggtataaccatcctgatatgtacaattatccctaagttctggacttactggtgctcagccttagcctttctcttacgtacacatgcaaataatatttgtgagttaacagacttagtaagaaaagcataaaacatataatatattactgacttgtattttagcgcccacacacctatttacaaggcttaacagatgatcaagaacattcttaannnnnnnnnnnnnnnnnnnccacatgcactaagtactcatcccgttctagtgttggtaaggctgaatcgtaccttgagcaccactgagtgttgtatcacatgtattatgtgcttgaccgtactagtgttggtaacactggatcgtaccctttgaacatcatatactataccaatgcactttgtactgctaccgtactagtgttggtagtatatgaatcacataacatagcatgcaatttacatacatacacatatacatgttttatactaatcttacctcatttccagattcaagtgtgtcagtcgacctatatagaaattcacacactgaatagaggccctatgtcacaatcacataaatcgggtaaacaacttgctaaaaccttctcggggacctaaactcaaaattaaaagttgatagatagcatgacaataccttaaatatcgaggaaacacaaaaactaaggctctcaaaactactaaaatcgataagctagatttcaaaacggtaaactattt

SEQ ID NO: 76941 - DNA, 775 bp, Cannabis sativa
gcgttacaatatttttgtaaaaattcacccaaattccaatattttacaagtttccctttaaatttcacattttttagagcccattattatagaatgttcacatcagggagggtactcttgtagttctcaatttatatacgtgtatatgctttgccaacaaaaaaagatagtaaatcaattaattaaatccacctctaatttaaggatctaatttcaaagtgataagtcaggtggctctttacgtaacgaggcacaattgactgcttccgttcaaccttggatcgttgtctgctcaaagaattaccatatagtggggaccgattcacctggataaaaaaccgaaatgcactcacaactatcaaggaacgattggattgggttttcactaaccattcatgggattctttttttgaatgtcctgctgttacacatttggattttttctcatcgaatcatggttggctgatccggagagtaaggatatcatctctagttgctggtctgttgcctcaaataatgatcccatttccaatatcattcacaaacttgattgttgtgctgaatcactacagcagtggcacattcgcaagtatgggaacatgaaaaaacggattactgatgcccaagcttcagttattgctctcaacaatgtcaactctcattctcctgaatctgctgccgttctgaggcaatcggagtccgttcttgatgatctcttagaacaagaagaaatgtatttgcaacagagattccgcgtagattggcttcaacttgg

SEQ ID NO: 76942 - DNA, 834 bp, Cannabis sativa
ataaatgacttctaattttttattgataacaaatcagattagattgaaatgggttttatttagggcataaaatcccaacaatacttcctctacgtctattccgatatatcgttcaacctcaagaatccacagaggtcattaccctgatcattctgtcctcggtttcaaagttcttcattgtgtgacaacccaacttcgaacggtaagttatccatcctctttcttctaatccttttcaaatcttgggttatgatcattattttattatttgcatttttgtggcttcgttgggttttagtgattttgatttaattttctaggtaacctttagggtttaggcagagtaaaaatttaggtttatcgtatttataagcctctagtttgataaatttcatctaggaattgggattgccttttttgtaaaaatatcccaatctggttcagaagtttattctccaaagtccgtagaaatagatatcataatgaactagccctcccgtacaaacccagaattttcaaacctcagtccaaactagagataaacgatgcaaaaatttgagaccatttaataaaacatcgttacttgcgagatgcagcctggcatgaacctccatttttatcttttattcgtttggctaaacccttgtttttacccaaagtcacaattgcttttttaccaggtgacctggactttgaaattatatcttccaagccccgaagtcaaagacttcctgtaactccctaatgctaaggcacgctacaatgctttttcaattacagtgctgtctttgctaatcaaagatttttctcaaaaaaaaaacgtgttaaattaaa

SEQ ID NO: 76943 - DNA, 635 bp, Cannabis sativa
gtgtaataaattaagaaaattttgctacttttaattttttatttttttggttagacatgtgaaaaaagttatttattagtcaatttttggatattatattgattatagatccatgaacttttgtccatctatagctataaatttgtccaattcttcttcttttattttgtttcaagatctaaattttaaaaagtaaatagttattgggtgtccaataacatggcatatgtatatataatttaatattgaatcacacataatctaatattaaattaaatttataaaatttgtttgattaattgtattaaattatagtgtaaaatattatataatatgttaaattttgatttatattaaaatattatatatatttatatattaatcaataccaaatataatattacaaaaaaaatatgataaaaaacaaaatttaatataatacaatacgatataatacaatgtaccaaactcatccgtaaatattattatattacaccacatgtacttagtataattaggttattaactacccaaaaaattaataattaaggtaattcaaaatctaaactttgagttgtaacaattttaattttaactgtaaattttcggtagattctttaataaattgttttttt

SEQ ID NO: 76944 - DNA, 754 bp, Cannabis sativa
  modified_base (593)..(594): a, c, t, g, unknown or other
tatatatccctatttttgccagacagctttgagatatgcccatgctatgaagttcgctccacaaactgatagggagagggagagcttggccaagggctattcttactaaagttagcgccttggaggtcgacattaagcttttgaagagtaaggccgacaatctttagttagagaagaggggttgggatcttactcgatcggcccttgagtcagaaaagggtgttctaatttgcaaggtggcttccctggaggctagtctatcgacggtgaatctgagaaggccactttgttgcaagaacgcgatgccttccgttctgaggctgaggcggcaaaggacaaactctcttccttgagtggaaagttgtccgaagccgaaaaggcgtcagctcaggcccaaaaggctttggttgctgagaaggaatccctgtcaaaggagatcaaagtcctaacgggccaagtcaagaaggggttccttagtggaagttatcagtcgtcctttagactgtattctgagtttaaggagggaaaatcttctacctgggatctggacgagttttttgcgaaatacttcgagtttaagaaggatgaagatnnggtggattcttcctcggagtctgacgatggtagtgagggcgaggatgccgacgaagcctaaagagatgggagggaatttttccctacccttattttgataaatttcctaatgccccccccccccttttttatttgtgtgtgtgagacaagcttgaggaac

SEQ ID NO: 76945 - DNA, 3524 bp, Cannabis sativa
tatatttacactttaaaagattttttaaggaatttcatataaaaactcttaaagcagctactagatcgatttaaatctcaatcaaaattcacatagcaacgcacataaaaactactgaagaaatcatggagcaacccaaactataaatttaaaaaataaaaaaaaattaaaaaaataatatatagagtaatttttttttcataatgtgtagatcataaataattaagattacttgtaatttttcaaaaaaaaaaataaaaaagattaatatcaaaaataaaatttatatattttgttatccgttttttcttccatttttttattattttattttttatatttatttttcttttttctattttaatttaataaaatagtgtaaaatataataattaaatattattaaaaaatatatatataaaaaattgatatatgatataatataaatgtacacataaaataaaaaaaattgatgaaatattttaaaaaaatataacataaaaggtgatgagagagctctaatagttggaacaatatagtatcctcaaatagtattggacactaccagaactcttctctttttcttgctctcattttaacatttctcttataatatgattattagaactaaactaatttacattagcattacctaattaaaagtgtcacatatacttgtactagtatatatattattgggtaacacatttcttaaagaatattttggtagactctttatttgttttacattgagacaattttttagtctatttttatatatatatatatataattgtgtacgttatagtcatttaggacagtctgtaaatttttaaaaaattcttagtaatatacaatgtcaaaaataaaatttatatattttattctacacacaattattttctttcttatactcgtggtaagtgtaagaacataaaaccagaaaaacaaagcacgagagaaatccattagctcttgtgataggatgaatagcctaggacctaaaattcatcttgtgagagtgatagggtctgagatgtggaaaatgaacacgtccaaatagtttcataatgatacaattaagttgagagccaaacaaacaaacattcaaaggggctgacattgtttagaacaacatttggtagcctgtttatagtgaaggtagcatattgaaaagcatggcaccaataagtgaaatccaggttacatttatcaagaagtgcgaggccagttttaataatatgtctatgttttctctcagcccttccattttgcttctgtgtgtgtgtgtgtgcaagggtgagagaaaaggataccttggtcaatgaggaacctcttaaaaggtttatattcacctccaccatctgcctgtacaactttaataggtaagctaaattgtttctcagccatccttttgaattgaagatgcatttcaagggcttggaattttaatgacaatggatagatccatgtaaatctgctcaagtcatcaatgaagtgaatgtagtatttgaatccatctttggattgtatgtgagatggtctccacaaatctgtatggacaaattcaagaggttaactagcacgatttaaggatattgggaagcgcaacttgtgattttttttccttgctcacaagcattacagaactatagtgttttaatagaaccagtgtgaggttatttaggcaatagtttgcttaaagttaataagaaaggattgcccaattcgcaatgccaaacatttatgtcatcaaatggagaagaatataatgcagaatatttgcaatgccaaacaacattcttgtcattacaatgtatattttgatcagtacaatatgaattttgttcagaataagactcgatggtgagatgacattgcagaaatgggtcggatgacactggaccttcactcagcatgtatagaccatctttacactttcctttgaggagagatgctcatgtttgcttgtccttaacaaaacaataatttttatgaaattcaagaaagatgccattgtcatcaacaagcttagatacactgatgaaattcttagttattgagggcacttgtaacacagattgtagttgacgaggacatgatagattatatgatggaagagtagaattaccaacatgagagattaaaaatttcttaccatcacccatgactaaggttttaggaccattgtaagcatgttgattgtccagattagtggcatcgaaggtaatatgagcagttgctccaatttcaacataccagcaagaatcatcaccaaaatcttgaaccagtgtggtggaatgggcttgaggatcatacttggagtcaacctctacaagatgtgcccgtgcagattgattggatcttgacactacccaatttttgtcaaaatagtagtgacaaactggaattgtatggccagaccttagacacacttgacatatgacactttgttggttgtacttaggatatcccctaccacgaccagtggatagttgggtaacatcatgttgaggattcttggagttggaatatggtggaacaccatcagatctaccattgccaaaggtaagatttgcttccattttgacaacaagatctgtcataaattgatgatgttcaagtctgctttcatgagaaagaagcagagcttgaacttcctcaatggtcaaggcatcacttcttgatgtaatacctgagacaacagagtcaaattctaggccaagaccatttaagagttgtaaaaccaaatcttgatcatcaacaggtgatctagcaacacttagggcatcagaagtagattgaatattatcaacatactcaaagatagagagacttcccttttgaatattggtgaattggcccttgagttgaaaacgacaagcattggtttaactggaaaatttatggtctagtgtttgccacatagcaaagcagctctggtaattagcaacagatgcaaggacactctctgtcatagacgatcgaatccagaaaaggacgcatatacttgggtcatttaatacctccattagaacaaagtttagtttatccaaattaaagtgtgatgtcaattttgccaagccatctgtaatagagttttattttcttggaacttgttctatttaaaataatcaaacatttccaaactcttccaaactttttctagatatttggccattcttgtgccttttgcttggtattctctaatacccggtaaaattatacatatattttaaattttatttgttatacaattaatgtgagaataagtattttatttatttctactaatagtgaatagggataattgcttagaatagtattgacaaatttctaaacatagttgaaattgttgtaagtgtcaaggtaaaattatggtatttttacgaattaggataattactcaattaaaggccgataagaaagtctattagagttttataaattatttactgggtttaatttattgtatcagtgcattaaataacattataatggaattaatgttaaaaaattcgtag

SEQ ID NO: 76946 - DNA, 1236 bp, Cannabis sativa
aaaaattaatgattttattatcaattttttttatgtattttaaattttattccattcaattcctattcctatattttcattcctcctaaccaaacgccacctagagaaatttggttttgtaagattttatctttttatattattttgctcttatttttcctcatttttctaaatattttcaaattttagaataacatatggtatatgttatgttataaattgtaaataacatatttaattatttatttttatttgtattaaaattattacttttataaaaatattaaaatattcaacatttgttaaaaattcttttattttttttaaaattaaactattttataaattgtttgttatttcaatttttaaatatatatatatctgtttgctttaaaaattatctaaagtttttatatatatacaaaaataatattaataaataaagttatataaaataaaaatctaagaaaataaacattaacgaaatttaataaacatattaataaagaccttgataaacattccattagagacaaggaataactttagaggtttgtgaattaaaaaaatgaattgctttacaaaccaaaaagaaaagaaatttataggaatcattggtgccagatattttatatattttccaatcctatctctttattcgccagatagatatttttttttttgattcaataataaaagaagattatattccctgctgcctggttaaataatatccttataatataaatatttatttttttaaggataattttagtatttgatatatttaatttgtgggaaattctattacatctcacaaaatgataattacactttaaaattaattttaaaattcattcttaatatttttaatttctttcttattaatttcaatacttatttattattttttcacaattttttttttaaatcatgtataatttatttatttatttttttaataaaattttacataattttttattttaattttttgttataatatttgtaatataatttatttttgcttgataagtatatttttcaagaatataaattagaagaaaaaattaaaaaaaaaacagttaatataactaaaaatatataatttatttgttcaaaaaaatataatttatgcaaaataaaaattattaaaataagatgaatttataaatttttggatgcaaataaaacttcttttaatttggtttttacttaaatggattagatttttag

SEQ ID NO: 76947 - DNA, 680 bp, Cannabis sativa
aaattatgtataattttgaaggagaccatgatattattcaaaatgaatcaacccacaaaaaacacactttgggtatccaaaataacatacggaagaatcactttaagcctattagctaagaccttaaatatgatcttatataacatattacacaataatacaggcctaaaatctcccatattaacgagttattttctctttagaattagtacaacgttcgtatcattcaaccacttaggaaaaacacttttaataaagaaactttttacctgagaaaccacatcctcacccccaattgcccatacttttgataaaactctgaggtcattctgtcaggtcctaactacttgtcgaaatgtatttaaaaaagaactttttttaatttttgttaatgtaacagaatgcaatagctcattcattttgagagtcatagaaacacaagttggttgaataatttttaaaatctaatacataaataagaaactttttgttatctgtctagttttataataatactttcttcaaaattttatcttcttaagtattaattttacggtatttttatcaattccttcatttagaaaatatttattggtactgaattttatttttcaattcatataaaaagaaaaaaagggtgataaagctgtcttttcctaatgatgaggatagatagactt

SEQ ID NO: 76948 - DNA, 1173 bp, Cannabis sativa
  modified_base (1131)..(1134): a, c, t, g, unknown or other
gtgtggcagtaaaattgaaaagtattaccccaaatccagtatttttgtaaaatgccctaattgttctgtattttgggcttttggtactgcttattgtgcttggtccaatatatgcgttgggcctatatgtactgtgtacgacacgcttgtatttcccactgggttttaccaatttaacatgaattaaaaaatgaattttttcaataatatacttaaaaatataaattatttacaaaattactttaataaatttcaattacaataatatcttatcacgttattaaaaattattttaaaataatatgcctgaaacaaaattaattctaaattccattttttttattattttcctgagtttttaaaaataatattttggttacttataatgctgataagaaactaattaattactttcacgtaaaaaaaaattatttttaaattatataatttgatatacaatttggttacctctaaaaccttatttgtaaatatcttaataatcaattaactaattttaagttatattgtgctattttttttatttgaactacatttgcgtaaccttaaaatttattttcgaatctaatgagttgtcatataatacagtaaactactattttatttaccaattatttaatatatatttttttcacttcaaaatttatgtgtttaattttaaattatattaattaagtaatttattatttaaatacttttacgttacttattttttattttacttttgaaatatatttttgttacctccaagtctatttaataaattaataagttacaatataataaaaaaaaaagggaaaaaaacaagaaaatacaaaaaacggaaaaaaattacaaaattactatgggacggctcattaaacatttatatagcccagaacaaaatatttacaaaaataccacatagtctaaaccttaagccacacggaatgaacaaagaagatgaacatacctctattgttcaaatcagcaacacaaccagaatgaaacaaaaacgagggtaatgcaaccatcaattccggcgaaaatcaactggaaaagaagaactgcaatgatctaaacagaaaattacgaaaaaaaaccaaaaaaaaattgggaagaaactgaaattannnntttgatttcggttttaatcgttcaaaacaactccctcta

SEQ ID NO: 76949 - DNA, 1470 bp, Cannabis sativa
actatttacccttaaatgaattaaatgtatgagcttgttaaattaacattaattaattaattatttaattactggtttatatgaaggtggtcagtgatagccgatcatctacctggtagaacagacaatgagattaagaactattggaactctcatttgagtcgaaaaatctacagtttcaccaagcgactacctaatgaatcatcatcatcatcttcatcttcttcatctcaagccatcattcataacttagcaaaactagcttcatttaacaagagaagaggtggtagagcccgaaatactgctcctacaactaaatcatccttgaaaaagaataacaaaactgttacttctacaactactataaaaaaagatgaagaagaagtcaaagagagtaataaattagatgaagcagaaaagaagaacgacaatcatgatcatgacaaaacgacatgcgttttgagtagtggtagtagtgtactggaggagcatcatagtgaggaatggcacacttgcatctcttctgcaatggatagtgatgacattaatattaataatataaataacagctcagttgggtttgaagatgaaggaatatggtttgattggaagtgggaagaatattatgttgttatgttgttgaaacccatgataatattaataataataataatgggatatgggattgggatgactactcctctgatcaagatggagagagattgttttctttatgggaaaatggtaattttgaagggcatcatgcatgagatcacaccacaaaataaacatactacaatttaatgtccacttcgaataatgtttgtattagttttacatagtgtgattggatgagttgaaaaaaaaaaatgttatttttagtttgttctttttcacaagccgtaaacagatttgattgctcactcgaaaaggtttgacatgtttttgagatgtagagctaattaagaagaagaaagaaagaaaaatcattactagtttcagaattgattttcccttattttcttctttcgttgtaatttattattttactaatgaaatgtctccatcatatggtaatatttccaacttccaatgttgtattgtatgtttattttaaagcgtctgtacatatgcatatatgcatattttgttttatctaaatagttctgacaatggttgttttgttagactaagtttttaatagacaaaaaaaacacctactaatatgacgcattgtgagtggttaacgattgagaaatgctaaaagacactattggtgtctagcatcctccttgttattataccactatagatgtaattaagtataaagtctcatataacttaagaaaataacttctaagaagtatcgctaaccaatcgtagaggcgtcatttataaaaagtgttaggcaccactgattaggggtgttcatggattggtttggttcggattttcataagttttgaacca

SEQ ID NO: 76950 - DNA, 1071 bp, Cannabis sativa
aaaagtaaatgaaaaagagttgtttgttcttatgataagaataaaaaaggtaagagttacaacatacaaagactgattttaaattctgcatacaataaataaaatttgacgacttcataaccagggttgatgatattcactttgcactttcgaaagtcattgatatctctaggaaacatgagattgtatgtctacagaccattactccacagacttgacagaatcaccacaaacaagcatattggcataaagtttagatgaaatagaataacagcatgccaaggccaaatttccaaagtaaactactatagagtgataaggtatagaaacaaaatgaatctcttaacttacccctcctttctttaaacgctctgatagaacaacaattatcataaaagctaaccttgttttgtaaacctttttaactagttgtaaataattgtagaaattgatattcaaaatataacttgaagacaagaaatagttcaaaaaaacaatcaaaccattacaacaaaaatctcatatttcatttcaagtcttcctagatttcttccttgcagcagttgttttgccaattcttttgccaatatctcatataagtagaaaatattgctgaaattcaatttatgctgctacaatgcaatgagtaattgagtaatatagtgctgaaaattttaacaatctttttagtggtcacaaatctttgacatgtttaatcaaatgaagaaatttacctgaggaagaagctcaagaaacttggaggtttcttccacgacaatgcctctgtcccacctctgattcagcaactgctcccacccaacatcgggcaccatagattcgccataggcaatctcagttcccacagacataacagtgatatcaggggttaacaagggtttctcggcccttaaaagttggtaaagaattgggagatcttccagttgaaaaaaccagaagagagtcagggcggtattaggcttctcatagaactttgaagcggagaagagaggtttcgagggtcgttgtggtcatcgtagaaaaacaaagctacaaaactttattcatcatctt

SEQ ID NO: 76951 - DNA, 664 bp, Cannabis sativa
gtcccaaaggctactagataattatccagcttagggaaagttctatacaacttttagcattattccagtcatagattaactactggtgttactttcctataacacaaatataggtctcgaaaagtaaagaatccaacaccctaagaggagtaaacatatagatagaaattttacaatatcaaagtttttgtgactaaggaggatgtaatggtggagaaggttgatacttaatacaacatataagatcctattacagagataatactacatactacacttgatctagacatcaagaagatgagattaattgaaataaattttaagttttataatagtgcaagtgggagtttgttgggattttatgccccaaataaaactcatttgaataaaatcttatttttctaattaataaaagatcataaatcattttacgttgcttggttcacatgttactttcttactttcatgatttcatgattatatgattatatgattatatttttaatatatatataaattatattaaatctagaacgtatagttattcatgattatagtattgtctgcatagtggataataatcaaatgattatatgcttcaaaattattttagtcccatgatttattagtacacttgatttacactgacgtaataaacatcgat

SEQ ID NO: 76952 - DNA, 854 bp, Cannabis sativa
gacagtggatggtttttaaagatcacttatttcatagcttcggttccaagatccatcatgctagaagttttaaagatttgagctcttttttttctttttctcaagggataagtaggactgttgggaagtatataaatttttcactgttatctatcttcttttggctgtaaaatgtttatcactacatgttacagacttggatgtgctgaagtaaagcactaacaattttgtcctgttagatttttttttttctgggaaaggctgttaggtcctgcatggtatgttatattgtattgtattggattgattttattatttttattcaatattatgtttgatttcaactgtattaggatgtattaattatactattttttgatgaataacagagttactatactgttttactataagtgatgttaggatcaggattggtgcaagataaaggctcgggtgatgatcaaaaggttgagaaagagactggtagtggtggctaggtcagaattgggtttgaacttggatggggtttggctttctaatatgctagggcagctaagctaggtcaagaataaggttgagagtaattataagtgcaccttcaaatatatgggtcactattcaatggttacatttttattgtaaccataatagcagtttactaataggtaaatattctttttttataattaattaattataattaactatttttttttaaataattaattaaatatttaacaagacctcttttagcaagtaatatttataaatatttttttcatttatatttagactagggaactaagctgcgcttcgcgcagtattatccaatttttgtaatctttttttttttt

SEQ ID NO: 76953 - DNA, 526 bp, Cannabis sativa
atgaagactttgtgagagtagcacaattcttctcgacaatggcgatcctcaagcaagcagcaataaggttcctcggaggattcttggatcgtgggggcttcgggtttgagaggtttgaagttatgtgagttttaagttttaaataaaggttgagagagttttctaaattcaaggaagttgaaaagtgtaaaatgagaagagaggaagtgagatacttacatatgttttgggaaattatttttcccccaaaaacttaatggggagttaatgccacaaaaatagaaatgcatgggaaagaggaggccaagagtttaaacatgggaaagcgtgcagctgtcacatcatttcctacattgatcgacataaagttgataactgtcataaaatcatgtcagtcgaaaagaccaatatttggccaagtaatgttgcacggcaaagccatcaaaaactaaggcagaattgaaaagtccttatctggacaaacatttagacaaggacttgtggggaaaatattatcctaaatttt

SEQ ID NO: 76954 - DNA, 6174 bp, Cannabis sativa
  modified_base (1264)..(1272): a, c, t, g, unknown or other
attaatcacaaccatttaatagtgatccaatgattaaaaaaaatgtaaccataatgattacaataaaaatgtaactattaaaaccttctcctatatccaaaatatgcttatctctacatttttttcaaagaagtcactctcataattttttttcccacaaatcatattcttttacatgcaccaaacaccaacaaagcaaaaataataaaaaaaaaaaatttaaaaaaataccaacaacttatgagagagatagtagaatagggtttgatgggaaaaacttatgagaggggcttttttgaaaggaaaagaaagtagagataagataagcatattttggattagtgattagtgaaaaatgaaatgatttttttgaattatatggtatgattaagaatggaaattcaaatttgtcttctaataatatgatttctttccataagaaaataagtgattgagatagtaattaagtagttaccaacatcattaatggttggttcatctcattatgaaagttgttaaattttgtttgggaaccattaatcttggtacttttagcaacacgagaaattataaaaaagaaattaaaagtattttcaaagaatttttttaaaactaattcttgtaattttaccattggttattgtgactatttgtaacttggtaggtaggtattgatttggactttctgattatagcggggaggactaacaattgtggggcattttgacaccacatgggatttcttgtttatgtaaatgatttggcatgtgactccatagatgaaatatttctcccaccaattattaacataattaatcaaaagaatgaacaatacactatcaaatgttagcaataactcacataatatagaatcataaaagattaaaaaaaaatgctttcataaataaaacatagaaagagtgaatgtagtaaagcactaaactgtttctaatttatttcttttttgtttaaaattttgcaattttaattgtgaaaacctaaattttaccatttgattttataatgcaccttctaaaagatgtacactgatccattttttatttatttttatatttaagaaaatttgttagtttattttttttatatagttatttaagacatcttgtaaaatttaaaagaaatttaaaataatttataatattcaaatagtcgatttcacacgcatataaaataaagaggttatgcatccaagaaactgtttaaactctatttttgatgtattaatttttttaaaattttttannnnnnnnnaaaatattttaaataactataaatataaaaaagttgagctaaactattttttcaaatgacaaaaaaaataggaataggtccttttaagagggtgtattgtggaattttctaaattagtagtagtagttgtggagctttgtctattgtttactgattcagtgactagtcatgtttttaaagatttgtaaccattttacgagtggtaacttctggaatcttcaaagagaataatatttgaattgtaactgttataactatattgaatgtcaaaataataacgtaagaaatacaattccaaaagacatctttaaaactatattaaaacactacaaaaatttattttctatttctattttttctgcagaaagaagaaacaaatttaacagctgtttcacctttccccaatttacaaatcgaaccgcaaagcccaaaaacatttcaatgggcctccaagcccatattacatatctgcctcggaggcggagcctcccaattccaagttcgtttcttcatttcttcaaaatcgttaacgcattttttcaaagtcaaactttgaactcttttcctttctttggcgagtttcttcccggcgactcggtcaaataatttctcccaaccatcttcccacttctcatgcgcgtcgcacagctcgagtgtcccgttggcccaatcggtccagctccagctcttgtaaagccccggcatcacttcagcaacgcacgcgccccgacacgccgccgtgcaaggccgacacttggctccactcagtggaccgcggctcgacaacgccgtaaccggcacgccgaactgggtgggagggaattcgtacatccgatccgacaccacacagaacgggagccgtttggtgacgtaaggcacgccttgggtggtgagttgagctttgaaggaggtttctgagttgagttggtataacccggccgagtcgagttttgggatgagggagaggcgtgagagagcgactattgaggtgttgaggtctcctaagccgaaacggtcgttaagtccaccgtaacttgacccgggtgggaccaagtaaccgcccgctatgaagtttctcgggtggagcgggtcgttccagtaaccatctactcgggttcggattatccagtcgtaagtgaagttctgtcgtttttggtagttttggattaaagttaaacacccttccacgaggtggaaatactgcaaaagaccctgcaatttttttttttttttttttttttttgaatttagaaaagtgacaaatttatgagaagacaataatgatccatacaatatataattctaactacaatatttaaatctagagtaatttatgggggtatattgagaaataactcttttatttatcaattaactaaaattacttctaattttatatttaattgaaacatacctcttttatatgtattgtacccaaaataccttgacaggggtaaaattggtaaagtgtttagaaaaagagataaaaataataggttttaaaaaagagggtaaaaatgaaagagaacaataaaaaaatggtatagagtctaatttcctctaatatttatggctaaatttaatttttatatatttaatttttttatttttcttttggaaaattttttaagtttattttcattttttataaatttgagacactagttaaatattattattaattaataattaaatgatgacggtgtatgtatgtgtatatgtgaaaataaaatttcaaaaattgataaaataataattgttggtatttaaggtgatatttagttaacattttaaatttataaaaaaaattaaacataatcaggttttgcccaaaaaaaaaaataaataaatgtaatcaaaacgtttcaatacaaataaatcttaaattttaccataaaaatattggataacatttggagtagtcaacttatttcataattttaaaccaagtgtacaaagaactagaaggactctaaatattataaataaatagcaatattctgagtcataataagtgtaggatgtatttcattaaaaaaaaaataagtgtaggaagtaacaatataataaataaatattgaaggagcacatgcattaacacgtaaatattgcaattttagcgggttgtaattttctgtactttatgagcaagctaacagtcagtcttatgggagatggatattcaaattttattttttataccaaaacaaagacttttgacttttctaatcttaaataagagcattggacactaacaattcgttaataatattttttaaaattataaagataacaatatgacactaaaaataatattagaaatcttttaacaattctgtttaaagaaacagtcttttactttcgagggggaaaaaggaagacataaaaaggccaatagtaataataattttaaaagttttctaccaaaaaaaaatataaaatttagagtgagttggctagccagaaataacatatctgggcagttcaaaagttggtaaatgtcgcttttagtttttcctaatataatttgtgttagataagggtcagaaaatgtcaactaaaaaccacaaattatatattatttcggtcttacgaaaaaaatatgtatatcatttcggtaaatataagtaagcaagcgtactgctgcagcaagggtaatatgggtattttctattaaatttttcatgcttatttagtagtttttttttttttttttttgcttatttagtaggtgaaagctagaaataaacaacaaaaaaaaatctcatgtttttaaaaatgtaaaatcaaagactaataatccattaacggcaattggcaaatcaatacgagtaaaacgactatatatagatattatacgtaaataattctgtatgtctttcattaactagttaataattaaaattaaaaaatggaaaataattaacctggattccattaggggagttctgagcggtgagaacccgagcctgggtctcagtctccggtatgggtttgggctcaaagattcgaacagaagccaggtttggagcgttcttaagaagcgagaatttgaaggcgttttgatccaacggactgtgaagaaaaagatcagaattcggatactcttctagaatattctccatgattgaaggtcctgttagctcgaacctcctagcgccgccaactaaacaaacagcaattcttgatctaagcaactcttccttcttcttcctccaaagccgagtctcagccgtttcgtttcgcggcggggtataataataaattgagacaggactagtaccggtggtggtggcattaatatttacggttacaccgagtaggaatgatcgaattggagcgaaagaggagaatggatttgtgagaggtgatgaaaaatatgggaggaagaagaagatgattaaggagagtggtgggattagtatgagaaagtaacgataatcgagacttgaaagccttttggtgaaatacattatatgatgatgatgatgatgatgatcaagatgaggatattggttgttgttcttcttgatcaccattttcttcttcttctacttttcgactcccttcagttcatcggatcttgaataattcagtttcttctgccattaaatatacaattgaatttaacgaatacagactacagagttgagtttattattagtattataattataattattaatataaataaaataatcaagaagtctatatagctaagtgagggaggtggtgtgttcatgtgttgtatgtttaaatattacgttacttgaggctatttttgtaattttaataaaaagtgttaggaggaaaagtatcctatggactaaggagggagttaagtgtgtttgtgttggtgtgatttattttttaaaccaaatcacatatatagtttttttaatttcttaaacagcaattgtacagccagatttaaaacttgaaaaaattatataaaaaatattgtaagatttaagcattttacactattatcattatcaaatattataattaaaattcaataatggatgttataaagtttttaacattataaaaaagttttaacattattatatagatcctaatttttaaaaaattctataatatattacatatatttaattatatattgaaaaaaataaaaattatattataaaaattaataattttgtaatgtatagtgtagtacaattttaaatgcaattattgaattaaaaactgcaaatcacatctcatcatatatgatttgaaaagaaatataacccgcaattacaccgaaagattttaaactgtattttttatactgtatggactgtctatgcggtgtgagatatttaataaacagcttaaaaaaaaattatattcatcaccctagtttcataaatacactttttttttttttaattaaattgtaaacttttcattatttattaaaatatctttaaaaacgaatttgaaatgagttagagaaaaaaaaagcatgttattggttggatatgagaaaaataaaatgaatggagtaacttggagatatatatatattctgaagatgagtcttgtttaagttattaaaaagatgtgcacataatttacataattatattatattgtaaaataatacaacaagatcctatttttggacgtgtttaaatgaaatttattaaatataagttaaaatgtaatagaagtaatttagaacaattttctgaatcacttcaaataaataaataaataaaaagtaattaagttggcgtagagcaacaccatcaacgcctcacatttcttttgctgcacatctaagcttttacacacaattttgagtaccaacggattgaatgaaactgttaaaataacaattaatcataatcattaaagtcaagatctagtatttatttagagcatcaa

SEQ ID NO: 76955 - DNA, 1268 bp, Cannabis sativa
aggcctactgatggggtaaaatacaataaatattgactttgagctaattgagtgaggcccaattcatgagataatggccatccatatgagaagggaccatttgaggatgctaggtttcatgaacaatcatttccgtaccgagaatgtatgagaatatgacgttggacaaaaatgtgatcttcttttggtaatgcatgcactccgcaaatctcatttaatggacaaacctatgtcacagtggggctgtgtgtatggtgagcatcacggaaggtgatatccaggaattatctgaatgtctcttcaaccattcgcgtctgaattacaccatgggggtatccagattagtcctaatgggctctttttctttagaccagataacatctcctagatcagagtggtatggccttgtgatgtttataactggattttcatccggatctagaaccatagcttaattccatttatgggctgaataattaattgggcccaagaatgggcctacctttactgatagttggaagtgcttatgtcactgctccagaaatatgggtaatatttacacccccaaaccttcgaggatcgagagtcgcagaggcttgcagcgtactcccagatgcacttttagaattccaaagaaataggtagcggaagctcataatcctttcgtttcccttgagtagagtacacgtgttacgagtctactaatctatgcacactacacgtctggttcatgttagtgaaatttttgaggggaatatcttcattgaattgcctcaatccctcatacaaaactaaatgttgcctttccatattcccagaatgttggatcttctttgtgtttcctaagacatgatctggaccgtttaatttaaaagcacacagattaccactttaagtataaatagggggaggatcaacaaaaaattatttgtaccattttgaatttatgagcttaaattttttatagggagttaatcacctaagagaggaaaaactccctaatctcctttgatgaatttttgatatcataaacgagatccttcacctccttcgagtacgatcaagacataatctagatgcaccaccccgaaacccagcattgatccttcaaagtcatcttggtcacaggatttctgagcgggggtcgatgaactgttgtagatagcccgagacttgggagaggctcgaacatctagatcaagttcccccaatagatgtttccataggtaagaatttttgactttaaacttatacttttgatttctgtc

SEQ ID NO: 76956 - DNA, 852 bp, Cannabis sativa
caaatgtgcataaacagattaatgaaaacatatttatagaaaaacataagaacatatacctgaatactgatactgatagctgagaaagagaagagaacctgcgaacttttttgcattatctcatttagaagctttgatatatcatttttcaaagttccaatctgccaataaaaaacatttgcaagatttagaaataaatattactaacaatacccaatcagaagagagaaacacaacggcatatgcaaccataatatgctattacatatgaaatttatacaagaggtaacataataattagaaacaaatcacatacagtagatattcagagtgttacctaataaaaataagacaatcgagtcaatctttaataatctaaagaatattccaaacaagtttttattagaaaattaatatttcacacagtatagaaaaagaagacagcattgaaaatccatttcaaaatagaaaaatattcctcatattaaatgtttcatataagtaaagtaattaaactatttaagtattcattatttaataccaaaacacaatactgagaaatcttacactacctacctcagacaacatacactcacatgcaaaaacctgttatattagaattgggtgcagaggtataaggaaaagagaactggattttctaagatttttagaaagacaaacctgtagatccgatcggaagaggtagtcatgttgatctgattggaagtggtggttttgctcctttggttgttgatacggttagcaatggtggtggtcgcatcatcgctacctccaaactcaccattgttggcgatctcgaagaccttatcgtggtccgaaaaagaagatgga

SEQ ID NO: 76957 - DNA, 779 bp, Cannabis sativa
ccacataggatctggtcttttatttgtatttcttctcttcttgtaaaactgtaataataagtattacagagggatctaatttaacaaaattcaagacttaattattcttttagaacttcaaacatagattttaagagagataaaaataaaagtaaaagaatttctatttttaatattgtattaaattaaaagatttgatttatatgtatgtaaaaatgtgtagtgttcttattagaagatccttagtaatactacataaaaagatatatgtatatgattcatttggtatgtcgtataagggttgtattgtcttaaataataaataatactatatttagataaaatattatattgtattaattattacaaccataaattttaatacaatgtgagtcatattatttaatacataaaaaaatgaaccatattattagcttgtattataatatttactaaaggtctgggattaaccccagccccaaccccagacctcaactcagacccataccctaaccatggactcggacccggactcggattcaaattcaaaccctggaccccgatcccgagccccaaaatcagaccccaaactcggatcccgactcgtaccccaacccaaactctgacccattcagaccctaaccctgacttggacccagacctggaccccggacctcgaaccccaaaccccggactcgaaccttggacccgaagccagatccagtcccagacctagacccaaaccctgtcccgaaccccaacccagactcggtaccgaa

SEQ ID NO: 76958 - DNA, 617 bp, Cannabis sativa
ataccatcttttctccttcaattatcagctcctcttctaaccttaaattttcttcttccaaagattcttgttccaatttcttgaaaatttctttaacatccatttttttttctttaaagaatttttctcataaaaaacgcccctatatatatcaatatatatatatatatactacgtaaaagttacatgctgtactacgtaaaagttacatgccgagccacgtaaatgttaattttatttaagatttttgtttagttttatttaaggtttttgttttataaaagtaaattgtgtgttaggtaaaacatagttctgtctataaatatgtacatttttattaataataaaaaataatgctaatatatacactcatagaatagttactaggaaacaaactgcgcttcgcgtgcggttatattttatttagtgataattaagttataaaactatattcaatttctaaatttaataatattttatgattttttttaatgatatgagtaattattctaaattttaaagtgatagatatttttaaaatatctcacaaatttattattattttttaaaataatttttttaaatgtaatatataaggtgagtaattaggtagattt

SEQ ID NO: 76959 - DNA, 1443 bp, Cannabis sativa
  modified_base (598)..(604): a, c, t, g, unknown or other
  modified_base (1382)..(1385): a, c, t, g, unknown or other
aatattccaattatgttgataaaatatcactgacataccatcaatatcaggacttttatcacgacccatgattttcaaagcaataagaacttctgctgcagtaaattctttaagtagaaaatcattatgggaatcagtaatggtagtaggaattgtggagagaacatgtgatagggcccaataatcttcctcagagcgtgaataaggtgtcaaaatatgaggagataatttttgcaattctttcacgagaagtgatagtattgccatttaaatctttcaaaaacttgattttattatttgagttccttgccgaagctttagcatggaaaaattttgtgtttcgatcctccaattacatcaaatcaacatgtgacctctgctgccaatattgttctacagcagctaaaagtttatctaaaatagtctccgccaaaataacatcatcagaatgagcaaaacctggtatttatgaatattttatttagcatattaagtttcataaaaaaaaaaaaaaaaattgacttaaatattttttcatataaacatatttttgaaatagtgtaaaaagagatattttttttttatattttctttaatnnnnnnnctaaattaagcatagaaatttaaaattttcttttattatttgctgtcggactaaaatctaatggtttagtatttttaaaattaatatttatagttaaatttgtttattacccattaatgggtaattccatatatatttatgtattagcttaaagtaacctaaaaatataaacaatatttgacatccacatttggacaataattttatttctaggttagatggattccagtaaatatgtatattatatatattgttataaaatattatttatatagatgtatgtttagcacaacttttagaaaagctaaaagttattttttaaaaaatttgtgataaaaatgtgtttggtaagaaatcgaaaaataattttttgaaatttttttaaaaaagctacagttaaaagctaaagatgcttcaactcaacttttaaaaaaaaaactattttaattaaaatactataataaatttttttatactaaaaccatatttacttatttattattttttaaaaaataaaaatacttaaaataaattattattaaatctcttattttttacattttattttagtatcaacaaacaacattaacctaaaacttttcttatatacttgagttttttttttacatttgaaaaaacataatataaaaatattattaattatttttatcaaattgcatataaatttatatttgaaaaaaaattaaaaatatatataaaaaaatattatataaaataatttttagatatttgtaattataataaattagattataannnnatcattatcattataatagatcttaacaactcacagtactttaaaatttataatttac

SEQ ID NO: 76960 - DNA, 3006 bp, Cannabis sativa
  modified_base (1708)..(1718): a, c, t, g, unknown or other
accatctcagggactaatgttaggatttttgctcccaaaaacgaatggcataaagatttttgccacaaaaaaaattacatagagatttaagtgcaacaaagtgaactgcataggaatttttgccgtaaatttcctataattccataattaaaaaatgtggaaaacacttaagtgatgattatattagtttggctaataacaagcaaaacttagtacataattttatatgggggaaaattgttaaatactatattgtttacttaacaactaacaagattattcttttaaatttgttgctaaatccaaaacttaataatatgagatttgcatacttaatgcaataaaatgtcaaaaagaaaaaaacaattgatagtgtaaggtgggatgtcaccatctgtccatacatgcatacatacattatacatatatatatgttatgtttgtatataatatgaaacatagaaagagacaaggaaatgataaggctgtgtgtgtttgttttgttgcttaaaaccatacgtacgtgggtctttaattttaatctttgtaaatctaagggtggctggctaaggccactacaagacacccctcttaatggctgcatgtgcaacctctcttctataaaacccttcatctattatttgtgggatcaactctcttctacttctatcttattcctcttcctattccatccctactaaacacatgccaaaaactcctctattattattttgactaatgatatgtgaatacaaattatgtaccaaaagttatatgttatatttagttgagataggattcacttataattattattattattattggttttgaaatattagagagggagggaggattcgaatttgaaaccttctctttgtgagagatattgagatattactaagttatgtctatgaccagtggtttagaatagttccgactgatatctttattgtttaatataaaagttgatgtaaagaaaatatagagaagttgatgtatggtgtaatataaaagtttgaggtaaaataagtgaagttttggtgatgtattttaaagtgtagagtagagaagttgttgggagtgctctaactattttaaaaaacagtgttattactaagagagtgagaactgttttgatgtatattttgtgtgcctatatctttactctattattaacggtatttgtattgttttgatggtgtgacatataaaacttcgtgcaatttgaacattgtgcgacaattgcctttgttttttggaggcaaatgttatgtccaattttagtttgtgatatagtattaaaaagacgtgtcgtggactaacgcaagaaagtaaacgtaggtgagcctgttgacagacatgaattaaaggaggcatttgcgattatggctgcctctttgttctagacactaaatttggtctctcattcatgttaaacttattacaaattattattattaggataatttgcagtcaaactccttaaacctttaagtttggcacgattaattctcaatattgaattttaaggtatcaattaaaatttacacgtgtacatttctggacacagtggcagtccacattaatatttaacagaccatagtagatgccaaagtggagaccaaaacagaatcgaagtttgattgtgttaaaattaaaaatttaagaagtttgatcgcaaattatatttattattattattatnnnnnnnnnnnttattattattattatttggtgaatatcattaataatattattattaaatattagcacaaatatgggagtgttacatttaaaatgacacttttgtgtcagagaccattttttaatagaagataatttggtaggtaaactaacaaccaaagcttctgaaatagtaaatgaagtagagatatatatagtatagtatcatatatactttctcaaatctcaatcatattttatagattattatttataactggatattcactaatattgatttttatttaattgatctagaaatatgagatgttttttttttaattattattttttaagaatactattttagcttgtgttttgcaaaagttacttattagattttcagttttattttgttaaatgaaaaaatagactttgtattttttataatagtataaataagatcttgagtttaatttttcaataattttttttaatataatttaatttaaaaataattcttaacatgaaccaatacagtaaatgtaactaattttgtcataataatatttttagatttggttattattaagttttattttaaaaaaattaattcaagatattatttaagactattttaaaaaatataaaatttaatttactatttattaaaataaaatatttaataaataatttttacaaaattggagatactaaatagtatttattttcttttttcttaagatataaaagacaaaaaagaaattaaaaaaataaaataaaattaatgaaaaggactaagagaagagtgatgaccatgttactttcaaggcacatgtcaattttggtttgttgtgtagttgtgtcaatatatactagagaaatttccaatctagtcatatgagattttgaccctttttcaattcatatttatcaattatattttttaaatattttaattttaattttgtgtcggttcaagtatatttttggagaaattttaaataggggtatatttgtcatgtaatacaatactggctcataattaacattttagcaatttataacatataaaaaaaaaaattcttaaaatttttggtacattatttgataaaattattgggaaaagtcaatacttacatatgccacttgattattttgtttttgtttttgtttaatgattgtagtaaaagatatgttgtctcacttgaggtgtgtatggtctattatagatctttttgtttttattttttacaatttcagtatatatgtttttacattaaatatataagtatacctcaatatttaaaaaaaaaaaaa

SEQ ID NO: 76961 - DNA, 1679 bp, Cannabis sativa
aaagtcaaaggtacaaatggcttaaaatgcaatcaatattaaaagagaccaatgcccaaagctgtcctatatttctgaatgcgttgttcaaatgcaagggggaacatgccaaattcacggcagactataatttggaacttttcatatccttcaatttaaaaatatcttcttttattgtcaaatattgatttaatcattcaataaaagaaaaatatatatattttttagtaaaagaaaatataaagactttgcttttctacaaaaggtcatagtctcataaattgtattataaatttataatagagcagctggaaaatttatttgattttgaaaaaataaaaaattttacttaactaaatggttgaaatatttaatatatgtgattacttacctaatatatttaaaggtagttgaaagtgaatcaaaaccaaatatgtctaatttttcaagatatcgtttttccctcaactaaaaaattagtaataaaagctctttcattactatttatttttatttttatttttaaaaaatttattaattaaaaacccttagctctacatgttctaagtagcttcaagtagcctcccgaattaatttccaaaatcaagtgattgcaactaaaaacagataaacagtttaagatgcagatatcaatatatgaaaatgacttttttttcagaactgaactgttaaaattttttatgtgcacttctattataccctacacacacaaaaaaacaatgagataatattcactgacttatttaagaaaagactccaaagttacatgtatttctccaacaaaagtggacaaaaaaggatcatataatattctctttaggatgatgtgtacgtacgtaccattatttcagataacatgccatttgcagtagtactagtgcacgtggctaggcctatacacaaaatggaccacaattgttgacgtgcaattgatttaagatcaattaaaaactataattatattatctcaagctctaaatcatataagtggccggggtgggctatgatgtaaagctagccggacaacacaagtcatcaggacatggcgaccgtgactggctgtttttgtgtattgaaacattcaacctttctcgaccatccagcttaataagataagactctaataataataataatgtaaagagatttaaagctacactgtcctaaaacctatcccaaaaaacataaaaagaaaagaaatggtaagtggcaaatagttagtgtattttaataatagacactttaatttaataaaatagttaattatggctgcttatgcctacagggtgcttaaaaaaatttctaaataaggatccaaaattattttttggctaattattaatttttttttgacatgtactaaatcgtgcattgttaaatttaaggacttttatctaatttcattcaattactgtttcaatgattgtttatgtactaaatcatgctccccagacttttatatctatcaaatcatgtccatcaaactttgatatatactaaatcatgccctttgaactttcatccatgttagaataaatttaaccggctaaaaaagttcaggggcacgatttagtacatttcaaagggggaaaattattaattatccttattgtttttactttaggtggctcatggtgtcaaataatatatatcatggc

SEQ ID NO: 76962 - DNA, 605 bp, Cannabis sativa
atatatattaacagtgtttattaaaaattttatgccaaaattaaagttcaaaccatttattacatattttttttattaacaacgatatagttgtggcttgtgtccaaaatttctcaaatttggatatatttcttgtgtgggacccaacatgtcgacatgtctcaccattaggtagtaaacgaagtgtataggaatgtcatagctactacggttcgtacacgtggacagtgatggtggacgtattcaacggctcacaatgcttactcagcacaaatactaatacacggaatcttttgtacacgtggccctctctcacactgacaacaaattattatttatttatttatttattaattaattaattccccaataattaaatagttcatatatattctaaaaagacgtaaaaagaccgccacacacacacatcagccacggcaacgtgtccttgttaagaatggaatattaatttttttaattattgtacccaaaaattctataaataaaaattaaattcaaccatttcatataataaataataataattaaattaacacctcgccgtaacagtaacagatatgcatattcgagactcttctttatta

SEQ ID NO: 76963 - DNA, 770 bp, Cannabis sativa
gggattgcacagcttacccggtatttccccttacggatcacgggcttactgactgtcacaccctgctcgccatcatgacaaacttatcagcaacgagcctacagcatgtagcagtactctgttccaataggtcaaccaaaaatggtgacatgtctgttccaaattcaggacggagcttctccgttatcttaaccttgttcacaagaagagggcaggcatcattccatttgtcgtagtcggtaaatcaaagttacatttggaggagatactactggtcaacttcttcatcttttcatacttgctgccaagccccttctggtataactgcttgatgacctttaggcatgcattatcaacttttgtcaacaacaaaggcttgacaaaaagtgtgaagggtgtcagaggtaatagatgtagtgtagtgttttcctttcccatgataactgagtagaggtggcgggaataaccttaggcgctgagggtggtggaggaggatctcaattattccttgatgttttggtgcctcacctatgcgggcttccaccatcgaatgcatcagaccccttctgggagtgagttttataggactgccttcttgaggctgctaattgtaagacctattctttggtctccacccttgccctcttgttggcgacaccataagatgaacaagccagctttttattaatcacgattggcccatcataatcagagttatccccctattgttctttataagaacctatcttaactattccacgaccaggaca

SEQ ID NO: 76964 - DNA, 2512 bp, Cannabis sativa
attaagggcatcaaatccgaaaaaacatcacaaaggtgtatgcttcccgagagagtaaaaagatgattagttggatttggtttcaatatctgaatccatttcacctccttatgttgatgttgaggtactagatgtagttcctttgcaatccaagatggctgtgaagagacaacaaaatttgggagtccactatagatctccaattgtcaatgagttttgttcttgtgaaccaaaagatcaaaacaacgaggagaaggagcattttgttaaagaagaggtcgagcacaagaagttgtttccttttgtaagagggatttggttgaacacgactactaaagaatgccaagaatatattagctgatcgaaggttctcagttgttgcaaaaagaagtatgtataatttttcttgaactcttttttttttttaattttttttattagttagtgaattctatctgttgttttttttatttaactggttatttattataatttttaatttttttgttgtattaacaaaaaaaaataaaaaatcacatggtgctattgagcctcttttagattttaacattgttcaaattgaagacaaatcctggtttgtcatattagagaattgctgagaagagttatttgatttggtatgtaaatggttattttccttgttttcacttttttatgttgttgtttctttggcttatcacttttaattttttttttttgcatcatttgaatgttgaattctattatcttagaaagagtattttgtttgatcccaatctcaatgagagagtgatgacaacatgtacatattttgatgcaacattaaagggtgtatacaatgtttttgttcaagctgaacatgaccacagtgttatcaagtatgaaacacggttagtgattacatactggaccaatataatttttattttcaatcaggggttggtgtggatgatattttcggctcctatcacgtttctctgcaacaacattggatttttctccactttatcatcttgagaaggaagatatttgtatatagttcaatgaagaacaccaagacaaatcaaatgaagatcttaccacatcttcttccatattatgagttacttccctatttcttggatttcttaaatttttatgatggtagaaaggaccttagcttggaggaaggcccttatgatgttccaaaggacacccatattgctcaagagtttgtggacaagcttcctactcaaatctcaaggtaaataacttgttatttatttgttttgtgatttttttcttttcttagtgttaattttttttctttaaaataaatgttctatttttaattatatttgtttgttttgaatgattttgtggcgttttttgtcattaagtatgccgatctattcattcgaggaaagatgaatgagattcctttaaatatgtatgacatgattgctaattacatggatgacatgatagtaacattgtataactatgtccaaaaaaagatcattgagggatattctatcgaagatatatctaaaggaaagaagtcgaggaggaataactaagtgacttaattagcagagacatagtattttagttttaatttgtattttttggtagaacaattcattctttaatgtttatatttaggttttcgtttcttataagaatgtttggaactagtttcatgtaatgttaatttcatatatatgtatatgtgtatatgcagtatttgtttatttctctcgtagtgtatgtttttatggttttatactttcaaagaaaagtgacttttttattctatttgctttatttattatttttcctttaaatagaaccagttcttttacattttttggcttggttgagtggccttgcagaagccttagtttagtagtatattaagaaccttttataattggcattacgaaagccttggccaagagccttcctggaatctttggtcgagtggcattttctatttgtcgagtggcatcttcaaatccttaactgagttacttatttgaattcttggctgattggcctttacggaagctagtatggttgaatcgaatatttcgaaagagataaacattttgtttatctatactagtttattgattaataattttaacaagtttttctttatttttatattctataaccagtttcatttcagtcaatgattactatttgtaaggctaagaatggatcttgtcattgctgtatacgttgagagtataggatttaaaaagtcagctcatccttattgtccaagcattcaatacattataatgacaagcaacactaccaaaagcctcaacaatgcgatagaataattcaggaaatatcaaatagctactttagctgaatttataaggttctcattgcaaagttggttcactgagcgtctcgaaaaggaaagttagtgtgctacccctttggctcctactttcagggatgatttgctagcacaacacaaggatggtaggttcaaaagcgttcaatgtaatggcgc

SEQ ID NO: 76965 - DNA, 540 bp, Cannabis sativa
aagcttagttaacaaaacctatataggctacgtactgcccctcttctcatcattatatcattatgtgagtctctctctttctacatgactctgattgggtgaattatatatgtatattttttttataattgttgtccactaagcacccacaaacaaacattaaaaagtgaccgtcaaacaacaaaactaactattgcaactgtagaaaacaaagaaaataacgaaaataactaatcaagaaacaagtttgttatggctgtgagaaaatagttctactatatttttctattgtaacttttagttataagatcactgaccattcttacacataaataacaatgattattcttatttaaattagttgagcaattcattttctattattcatttttttttaccttcctctctatatatatattcttatttaaatagagagggttttttggatttgcaaagttcggttaggaaggccaaagatgaacttcaggcagtccaagatcaattacagcaacaactattggctattgagttacatcataa

SEQ ID NO: 76966 - DNA, 2225 bp, Cannabis sativa
aaaaaattattagaaagagtctaaatttatttaagttaattgcttttgtaatgtttgatacttcattaatttatttcattatctgagtgtgaccctgtggactagtagtatttaaaaaaatactgataccgcatataattttctcactactacaaaaagcactactctcgtcagtccccgaataagttttttttagaattgttgctaatgaaagtaagtgactgtttaaaaccatcgttaatagtggagtattcctgacggtttaaggtagtcatgagactaaaattaaaacactagttttaaaccgtcgggaatagtatacccgacaagtttaaatcgttggggattctaatttaaatacaaagtcccaatttcagatctcatttcatacaatatgatctctctctctctcttggctctctcgttcaaacgacgcaaccacctcgtcctctctcctctctcggctctatcatatgaacaacaagcaaccacgaccactgccacatcctcgctcggtgagacctaaaggcgcgaccacgaaccacctcctctcaatttgccttctctcacggcgagacccaaagataagaacaatttactttctcttttttttattgttgttctcagattttaatgagatctcattctgttcattctttgatgtaatcaatatcttttgcttcctttttctcatgtcatttgctattgaaagtaattggaggcctaatttggagtgtctggtttggtgatggaagaaggtgaagtcattgcagaagccgcatgttgttcttattcttcttcttcatcttcgatgagaaagaataatgatgtttctactgaagaagatgatttagaggagaatgataatttagaggcttagagttcgtataatgatgattcagaggcttagagttcgtataaaggaccactaaaatgatgtattcgttagaggattcattaccttcaaggtattattcctcgattcttttgatgagtataagtgatggtttttcattgtcacttatactataggcaacaattttaatgccaatagtataagtagcggtggaaaactgtcggcaatggtactttgtactgtcgacggttttgcacaatcggaaaaaaaatttcctgacatttttccaccaacacctattctacctagttttacgacggttgaataggcattggtcttagagattgacagtaatattttatacgtctgtttaaaatagtgagaaaaacccaggtttttagtagtatcttgtatcaagttttaaattttgtacaatttatttttcttcccgttttggtattgcaagtctatattttgcagtaacaagtttccaacctgttactgcaagtcgttatagttacatttaaattacagttattaatcttttaaatatcatttttttaatttaacattcaagcatatatcgaaatattcaattcatatttataatcataaatgtctttacagattttctaagatataaatcctaataacaactactaactgcctaaacatgtcagcaagacatgtagcaaatccgtccaagtagttgaattacataataggtttacattacattacctaggtggagagatcaactttagagcattattatcaatgttattaagttttcgcacattatcaaatatgagaaatttttatttattatcaacgtgagactttgtaacatcctcttaagatggtaattatctttagttcactaatctttgatgacttgatctgactctttgtttaactcaccatcattaaatcatgactcttttgacttttttttttttgtcaaatattccttagagctttcttttagttttgatactaaattaaaatgtgaaagtatggtttagaaaataaaataaaatgagatgtttggtaagaagtaaaatatttcttctgaaaattaattaataataaatggagtaatatataatcttataaataattttaagtttttacctacattattcatgtgagactcgaacatattttgctaataaaaatatgaggaaaaaatagatttttttaataaaaaaattgaagataaaaataattaatttggagaattaaaaggaggtaatgagagtaaaagtatttagaagatgttttaaatgaagaatttaaagaaaataaaaattgtccaaaacatagaatacatttacatcatttgttggaagaaagaattattcttaag

SEQ ID NO: 76967 - DNA, 501 bp, Cannabis sativa
cttaagggatggacaaaaccacaagacttgtatagtagtatacttaattatattatatctataatttgagtgtatatataatataaatgtgggtctaatattacttttggataaaactacatgtaatatactagcaatgatatgtataagcattattgatcaaaacaaacttatatcataacaagtattttttttttataacaaaactaacaagtatttctttgtacatacatacatgtattatgcaattgatgatgtattaacttaatgtaagatgaatttcaaataagaaaaaaaaaagcctcataaattttttatatttataattatttggaaaaagagaaactacgtatattgttcattaatagataatccatgcatgcacgaaagaagtacgtagctactatgtgtataaaacacgcccagaaggcgcgtgttcttacactttgacaattactatttactaattggaaacagttaattttgtcaataaactacgat

SEQ ID NO: 76968 - DNA, 2298 bp, Cannabis sativa
gttaccaaacggcaccataattttgtaataatttataaaaatatcacaaatattttaaatgagggcccagaatctcaatgtgtgaaataattgagttcatgctaatttgttttgtttcaaaataattacacccaatataatattgtttaataattcattttatttaaaaattatttcattttcatgtattagaaagaaaaaagaaacttaataagagttctaaattgatgaaataaaaaatatgaaggactaattttgctaaataataaatatttagaggaccaaaaaagaataaaacctaatttagaaacacaaaaaaacaaaaaatgtggagaaaataattatttattaaatgaaaaaaaaatatataataggtgggatattatccaatattgtaggtgaactagtggagttccaaatacgcttttaacaaaagtcaagtaactgtgagtacgagagagtaaaattacaaaattacccccgtaatccaaaagagaaatagtatgaaaagggtgtctaaaatggtaaatatacattcacagtgacctctggcctcatcgtcaacccaccattttctataaataccaagttccatttccacgtttttcttcgttaaagctcagattattatcattgtggatagttagagagagaaagtgaaaggagagaaagagagagagagttttgggttggagttaggtggtggccggtggaggcgcgtggctcaagtttcgccattttcttcttcttattcttctgtaagaagctaaagcactgaggtatgtctttgcattgtttctctctctttctttctttaactttttgtgttgagatattttctgttttgtctggtttgttatggatatgatatgatttgatttgattagttatttatttttggttatatttattgtttttgattaactgtaaaaggtagtgagagagaaaaatttatattttatttgtttaattatctgtttttttgatatatttttggacatgtacagttataattatgtcataaataattaaatatgtcttatttgtttatatttatatttgtatatatatgtatggattttggattttcagatctgttgcaggaaataagattttgtgggaagaattgttcgtttgtcctttttttctttttgtactcgttctgtatttaggggtttcacaaattttaggcctttttccttttgtagaaaccattttcaaggaggaaaatgaagaaattttaaatttatggaggttgaaaggacatcaaatgatttaaagtagctttctttttgttctagtgaagagaatttaataggttatgtggtgtaccaaatccttgttctttactggatttgaaatagtttagaacacagaggttccatattccaattctattttgtcctctagcattggaatatgcagagttgtctcataaattgacatttagaacttgtcgattcgcagtagcaatggaggtgtgtggcaaatctatggtatcatcagggcctgctaatgtgatttacctgtcgactattctgggccgagatgggttgattcctgttcacaaatgcgattggaagtgtgaaaatgaacatgtttgtggaaacatgtatcgttgcaaactaactggacttactcacatctgtgacaaaaactgtaaccaaagaattttgtatgataaccatagttcactttgcagagcgagtcgtcaaatatttcagcttacagctgtagaggagcaggctgtgagaggtattcgaaggaaggttgatgctgataacaccacctccacaactgatagttgctctttcaagcgcagacgacgggatgcacagttccagccttctcctttcgagagatccttcaccgctgtcagtccaatctgcagtcaagttggagatggcatggatatgagctagagatatatacataaatgcgaagatgttatattacttacttatcttaatcttgtttctttataattttcccttttttttttctcttttcttggaacaaatctggatgatagaactttatgtgagatacttaaatggtggacctgatgtgtcctgccccgtatgtagggacaatctatatttctagtcttctttaatgcaatttagatcttccattagttgtctccttgaaatgcgatatgaattcgagtaatgttcatttgcttgtgagacttgaattaaattcagttctcctaaatttgacagaaatctgggatattcattagcttgcactttttgtgttatgtttagtacatttgtggggctaagaaagaatagt

SEQ ID NO: 76969 - DNA, 765 bp, Cannabis sativa
gaatcctaacataagctaaacatccctaggttctaaaataagacacatttggttgcctatttttcaagatctcataaggtgaaatttttctcttagatttaggaaatctattcacaatataacaaacagttaaaatttcactccaccaatgagatacaacataagaattaaacaaaatagccagaactaattcagtaaaggttctattttttctttctgctttaccgttcatttcaggtgaatatggtgcagtcctttcgtgtatcataccatgtgaattataaaattcaataaacaagttcaattcatattcagttcctctatcactatgaaacatttttattttcttattgaattgattctcaatttcagccacaaataatttgaacatgtcaagtgcatcatttttattttttatcaagtacatgtaagtaaaatcagaacaatcatttatgattttaataaaataacgtttactatttctagtaagtgttccattaattcaaaatctttttctgacattttgggattaagcgaatattactcatgttaatgatacgtttattaacatgacaaagtctagaatgccaaacattaaaatcacacaacatgtaagctgaagaagatactatataaaattcaacatttaatttaaacattccatcagtagcataacccttccccacaaaagtaccattcttagtgatggtgtacaaatcagccccaattgtttgagtaaacccagccttattaagcaaaaaacca

SEQ ID NO: 76970 - DNA, 1041 bp, Cannabis sativa
agctattcctgctcccacaataactacatcttccaccacttcttccattttccctctcaccctgttaatctttcttacaaacacatagtggcttattagtataatcaatgtgtatgttatatatatatatgttggaactgtcattcaatacatgccgaaaatatatcccagggccttgtaaaaacagccaagtccgttccaggaaacaattgaaaagaagacaagattcttgtttgaccctattaatctattattatgttgcacttcaacaaataaaagttaactccaacaaggaaaggattgtaataatactacattatgatacgttaaaaaaaagtattggccaatccaatataataaagtaacgatgactatgctttcaattaacttgcataacgttttgatcgagtgcgtagaaatggtaatatctcatacagtattttaaaaataaaacaaaaaaatttacataaaaaaaaaaattaaaaaactaacttatttacaaaaaatactcttactctaactattaacatttttactatcaatcaatatcaatatataagaaaagtatatgagacggtcactaacatcctaaaattacgttaattagttttatttcttctctcttcaattctcttaatttaaatttttttaataaatttataaatattaattattcaaaataataataaaattctcaaaaaaattactataaaaaatatcctaaatattaatatttaaatacagttcaattatattcatattcatctccacttttcatttatttttttaaaatttaattttaaaaattaaacacatgagctcggtaaaataatattataatgaatatatattatttaattaatatacttatttaaatatctatgatcctaggttaaatatgatattaagcaattatcttatgctttgtcaatatggccaaagaaaatctcttacaacacttcaaccttcctatttcttcatcgttgttcgtgatcgcatcccagtacttacttctctatcgttctgatcctccaacaaact

SEQ ID NO: 76971 - DNA, 515 bp, Cannabis sativa
gttaaaccaagaaatgccgttagatagacacttttaatatataaagatatatattacttaaaaaaaccagttaaattaaagatccaactgaaaatttgattaaaaacaaaagtctcaaccttagtaagtcatttgtattgcttaactcaaaatttgtacaatttgtaaacttcagacataatgtctttacataaattctatcaacaccatatatatgcaatatgtatatgaattctatcaattctatcccagtttatccattccctatcagcttcccttatcttccccatactaagacaatgtatcctagccttaatgacatatttcacctgtgtaacaaaattatttacagtttgaacctcttgattccacacagctttgtttcgtacgttccatatcaggtatacacatgaattgaattgaataccatgatatctattctatataaagtgtgtctatataactgaattcttggtttatgagaaaatcatgggtgactttttatttatatttaa

SEQ ID NO: 76972 - DNA, 609 bp, Cannabis sativa
ttattatttttaatgtaaaaatttctattaattaatgtgacacttcataaataaatatttctttttcccattgtcgttcaaagtaaatattaaacccttcaacttagttttttttcttttgaaaggggaaaccttcaacttagtttgatcatgttgtatctgtttaaataggtctctctccaattaagtagaccaataaaaatagacaaggtcattgtggtccaaactaatcaattcttatatatcagctccaactttctttcttttcatcttttattatttattttttggagaaaagtgaagttaataagtgattctaatatatgactcattaaaaaaaaaaaagagtagaaaaaaatgagtatgaaatgataaattgaacactattggtactttgatttgtttacctttttttaagaaaaagatttgatttgttcattttaattttaatggacaacctttcttgcatgtttggataaaacccaacccaacaaactatttaggcgttctcttttcactaaaataaaagcccaagaaactattttgggcttaaaataacaaccttccatgcttgtttaggctcaaataaaacccaacccaacaaactat

SEQ ID NO: 76973 - DNA, 7076 bp, Cannabis sativa
ttttttttttttaattttcataatgtttaacccatttgtttgcttgtgtttttttggcaaaaagacatttgttgtttatcaattttacatgccaaaaaaggaaaagtcaactaaaatagacaaaactttaaagttcaaaaaatagaaaaagaatgatgtcataaaaaacatacaaaattcaggtgtaaatggatctttttttgttatggaacaaaaatttatgttaggcgtagcaatttgagtcagatacgataatacgatttaaaatccacaaaaaataaatgaatttgaatttgccttaaatgggttagggttattttttaattaacgcgactaacctatttattttcgggttggcacgcttaacccgaaaatgatactataattacctatgtaagagtatacactcttaaacttattatatttattacatgtaaattatatatttttagttaaataagatataaacatgttaaattgctcataaatgtgtcattataaaattgtaagcatattaaacttgttataaatatgttatgaactggtaagttaactaaaattaagcatgattctttatataaataggttaaacgggtcaggtcgggtcaacctgtttataaatagttgggtttggattttagtttttgacacgattactaaatgaatcagatttgaatttagcggttgcttctaatacctaagcctcaacacgacacgaatacgactcactaacacgaatttttacccctagttcatgtgtaaatggatctttgcgtttaatttatttttaaatgaagaagtattctgaaaaataacacaagttattatgattattaggcaaaaactatattttggaatttggatccgtaagttttgtagacttgagaaactaggtcatatcaccttaggcccactaacacattttctaagggataattagaccacgtacttaaatttctaacttttttgcttttatactgtggggtggaatttttttcaaaaatactgtagctttttcaaaaatactgtgtaagttttatactgtgtacagtgttaattttttattattattctattattgttttttagttgttctactgttgtttttagttgttctattttgtgtttctctattattttataaaaatacagtatttttgaaaagatttatatgtgacaatatttttgtaaaagttaacttaaatttcaatatttttgtaagtttcctctaaaaaaacgaaaaagcccacactaacactaagcgttggggaaaagacataacagtccttcaatttacgctatttcacgaacaaatactcagttgccttgccgggatagatgagaaaagccaatagaatagctcgataattcgtctccaattgcacattttcctcagcctcaggtaccaactcgaatctgataccactaccactattattacttcactcattcaattaagtgtatttcaattctgtaatttgtgtatgtaatttggtttttcaatgggggaaataattcaaattagggttttggttgtttggcagttgatgttctgatccatttatttttaaggtagtgatcaagatgggaggagctgaacatggacatggagaaggtgcccatggccacgccactgactttaggcacaaggtctggagcatgagcggaggtcccaactgtagacccgtacattggaagcgtaacaccgccattgccatggccggcatttttctcgtctgcattccgatcgccatgaaatccgccgagcttgaggtctcctctatatccacttacattcgttacttttttctacattttttgtttttgccgaatttcttaattaagtgaaataaattagtgttgttaggtttatagaaattttttttagtgctgttaggatctgaaaaacttagaaacgaggcaatgcgattctgctccttggaacttttatcattcttattctattaatacttttgtgcattttactatggttttatcagcaatcagttccttccgataacgggattagcctgtgtgactttattataggattctaagtatctacagtatatacttgttgtcattgattttggtgtaagatggattgggagtttatttctgaagtgaattttatatgttctttggtgaattctgagttcttgacactcaactggtagattagaaaatcgtttgaacgagctaaaaaaaactattttggttaagttgacttttagctttgagaactgatggtggagttactactcctcactgtctttattcagctagtctctttaagtcctctaagtaggatctaatcaagcaatgaactggtattaatgtttgagttttctcgttataaaatcttcatttttcatttttgctatatggtactgttaaattggttttccttgttcaagtataacacaagatgcttatagatggatttggtgttgaggatcatggttttctcgcacaaggtaaagttatgtttttttttttgatgaaacaaggtaagattatgtggttcactcttttacggggatatagctagcaatttgcttgatttttctgcatttcaaggattctaggcctttatttattttcaatcatattgtttggaagattgtgattaagctgatgtgatttccgttctagacaatgttcgtaaaaacttagttgggatttgaagggtgtcttgctaaagtgaggagaggcataagccagaagccttcaggcggaatatggttttacttcgaaataaacaaaaataatagtaaaagtaagtaaaagagaaacacagtcatacactactttaagatactctcactatactggtaaccaagagagtctagagtgaaaaggactccttgaattctgaaagtttagaatcctagtctaatagtttggcagagtatagaaagcagagactgtgtgatgccttcatttctcttagggtaatgtttgatgacctgtgttatggtatgtggaatattctaattttttcagtttccaactataatagtcttttttttttctagagagaaattgatcttacaatatcgacagtgctttcctttgacatttgtattattgaataattatacacttgatttgaattttctctaccggtgatttagtgtgatggatctgtcttttttttaattagaattatcttttagggtagtttattgtttttgatagaaaaatcattttttgtggttgaaacctgaatccgtgcttgtcccaatttgattgtttgaattggtctttggaatcgcaatgtctgaaagctgaatgagttttggctttaataggtgtttcacagtaatgacagatatattatacagcagcatactacaaagtgttaatgccaattgccaagtttggcatttctgagctctagataatgtgtccaactttttctatctgtgttgattatcaactcttacccttgtctacgctcgttgttgtatagatgtaccaggctagactgagaattaatcttattgtttttactgacttaaaatatttactctcttgtgtaattccagtctcgtcaattaatttattttttaagttgaaggattgagaattgaggccgtctctaattgttaatgactagtttttgcatcaaagtagtcaacgttgcctgtctatatgagagaattgagtatgaacaatcaattttaattatatttgtgtgtgtagctgggaatcttttgcaatttctatgcctacatgcaatcttttctttgactttataatgagctgataataactagtactgagacaactctattttttatttcagcaacggccacatcctcccgtccgccctattccttcacagctctggtgcaagaacttcggtacaaaagactacgagtccgttaaaggcccataagcaaaagacctagtggaggttgggtatacattagtcttgctttacgggaaagcatattccttgaatttgttatttgcagtgaatactttgaacagctatttaggacttttgctgttcccatgttttggaagtgttgacactaaaactcaaggattgagttgtatctcatcttacactcagtgacaaataagtcgccaagtctttttgcttgcttttcattaataaaagaaaatgtctaatcttgtgattttagcttcttaaggtattgatttaataacagtgacatggatgctattgctatcaagtttatgtatagcctttcaatatgatatgcctttctgtaataaaaagtaaaaggcgtcaaacttttttttgtttacaatttccaacttgtttggttaaaaaaagaaaaacaaatagaggaaagaatggctttaatttgccgcagtggtgaggaatgaggataatctaaagacttcgttccaaattgcaggcacagctcaggtgccttgcatcacactacaagtggaatcaaattccgttcatgtataccacttttagactcactattctcgcatataattattttattactgaaatcggtagattttctggttaaattactctcttattttgtaaagaataataataataaaaaagaatgaataaaatatttagtagtataaatttatgggctgcacacgttgattctttatagatggtacctgtccatccaattggagttggcttgttcaggataattgcgattgcagcatttgaaaatcaacggcaaagtcatctgttattgctttaatctacttttgattagtgaattatatatcagcattttcgggaaattgttatccatagaatttgtgttttgctctttttcttattgatacttgtatatgctaaatcaaagaattagacgtaacgtcgaatgtggtctaactgtaagcatattatgctcgtttcattttcagaataaaatcaacagcattctgtgagtaatgtaaaattatttgattagatttggacaaatatatttagcgttagaaggaatgaaaagatagaaataaaaatgagaaaagaaatagaaataggaatgaaatttaagatgtttaaaaaaatttgataaaacaattatttaattttgttctcatcttgtattgaaatacctttccttcatttttaatttggaatagttattctaccaaatgatgaaaagtaattacattggaataacatttaaagtgtaacgaaacaaataaatgaaataaaaattattttattttcattctattctattatcttcaaccaaacaccattaaaattcacaggatgacctttgtttggtgggtttcacaagcaccaatcacttttgttttttgatttctctatttcaaactttttttaatgaattttttgaaattaatttattttttaatattgcaatagcagcttattatgcaataaactctattaggtggcgtttaattaagagagataaaaatatagaaaaaagaaaaaataagaataaaaatatgaataaaagttgaataaaattaaattaaaaatgtatacaacaaattaattaaaaagttattaaattttttctcatcttgcattctatttcaatataattctaccaaaatattaaaaaaaagagatttcattactaaaatataacaaaacaaaagaataaaataattttttttttccattccatctcatttcaatgtagttcaaacaaaattagaaaatttatcactctgaaccaaataaatctaaagttcataagaaaagacaacttttgtagtatcaattcaatgtgattttgacaatttttaatcaataaggcattaactaacaaaaactaatccacttgaattcttatttgattatgtaatgagcaagttgaaaacttaaaaaatatctttacaatcaaatgttggcaaacacattggatcactttcctactcccacattgtgacagcattctcatccaatcaaattccagatcaaatgattgcaataacattaattcaaagttcattccctgaaccatctaaatggactcagatctagttacaaatattttgaaccaacaaaactcatccacgtggcgttgatcaccatatatcggtggtccataacccaccatattcttcaaagtctccaatccgccacttttccattaaaagacctccaagtgccaacctacggttcgtgcaattcacctccaatcagaacaaacccttggctgcccaatatttatccgggcagttacctttcttcatccatcaccgtccgtcgtcgttatttgactgacctaaaatcccgggcaactgtacttcgagtcccaactctaccagtagcttcaactacctccatattcttctccagacaacactgcagttcagtgcattgtatggtacacataacacattaccaaaataaccaataataatatatactttaaatatgccattaaattattcgtgaaattaaaaataatagcgaaaattctgtcacttcactataaattgaccccaaaactatattgattggaagtcaattgtggttgttgacatctgatatctgaataattccatggctatcacagactgagaaaatggatttgtagcttcttccctgagtacgcgttttggagtttttgaacttcttatattccagatttgatttttttcgggaagtgtcagagggagataatgtggaaggcagctcgattcgccgcgtctagtcttcgccgatcgaggcgtttatcgactgcgattcctggtccctgtattgtccataagcgtggtgctgatattctccatgatccctggttcaacaaggttcttattttattcttcttcgttattatgttcgctctgtttgttttcgtaatttatagtttttctgtgcgtgtgtgtatgtatggttgatttgaagtttggtaagatgaaaggatctctctcccattcacgaaagagtcttcattctgtgttttcttaagcaagatgtatccgattaatcaataaatgtcttcaaattctctaatcagatgaaaaagtacaaatgtactgtacacaaatatacaattttctttttcttcttttattttcaaattttgaagtaatttatgtttcattaagtagagaatgtt

SEQ ID NO: 76974 - DNA, 576 bp, Cannabis sativa
atattgagtcatgggaattattacaaaatttcaaaattaggaggaatgaattaagtatagagcagtaattagattagtagagagtatcatagtttgtagactgtattaagaatcaatcttttgtcagccattagataagattagtaaatttttgctttattttggtgttaaactaagaaagatggttttaaataattaacagtttaaacatatacagaataacaaagaatatgtaatggcatttttatttaataaaataataaaatattatttatatatcataaaataataataatacaattaaattcttgccacggaacgaattaaatttgtatacatctttgaatgatttgatgttactcttatgtaataaaaagagtttcgttatatgcatgcaatttgattactcgacaatggtttgagcttcctaagatttctcaagttcttaataaatatacaatgaaaagagatcttcaaccatttaaaggaattgctagattggtttgtcggccaaataataataataataataataatatatgcaaagttgtgataatatctattctatataaagtg

SEQ ID NO: 76975 - DNA, 2086 bp, Cannabis sativa
tttttttattttattatatttgtgtagatgcaaaaaggttaattggtaggtggtacgaggacgaatgtgtacagagcgatattaagctctggccattcaaggttatccccagtcctggagacaagcctttgattcttgtgaactacaagggtgaagacaaactgttcgctgctgaggagatctcatctatggttctcatgaagatgcgtgagactgctgaggcttaccttggttcaaccgtcaagaacgcagttgtcactgtccctgttttcttcaacgactctcagcgtcaggctaccaaggatgccggatttattgctggtttaaacgtgatgcgtattatcaacgagcccactgctgcagcaattgcttacggtcttcacaagaaggccaccagtgttggtgggaagaacgttttgatcattgatttgggaggtggtacttttgatgtgtcactccttaccattaaagacgacatttttgaggtgaaagcctccgctggtgacactcatctcggaggagaagattttgacaacagaatggtcaaccatttcgtccaggagttcaagaggaagaacaagaaggacatcagtggcaacccaagggcccttaggaggttgagaacatcttgcgagagagcgaaaaggaccatctcttccacagcccagaccaccatcgagattgattgcctatatgagggtattgatttctactccccctttacccgtgccaaatttgaggagctcaatatagatcttttcaggaagtgtatggagcaagtcgagaagtgtttgagtgatgctaagatggacaagatcaatgttgatgatgttgtgcttgttggtggttccactagaattcccaaggttcaacagttgttgcaagatttcttcaacggaaaagagctttgcaagagtattaacccagacgaggctgttgcgtacggtgcagctgtccaggctgctatcttaaccggtcaaggaaacgaaaaggtccaggaccttttgcttttggatgttactcctttgtctcttggtgtggagactcttggaggtgttgtgactgtagtgatccccagaaacacaaccattcccgccaagaaggaggaggtgataactactaccgagaacaaccaaacctggttgtcgatcgacgtgtacgaaggtgaaagagctaggacccgtgacaacaacttgcttggaaagttcgagctttctggcattcctccagctcccaggcatgttccagaaatcaaagtatgctttgatattgatgccaatggtattcttaatgtctctgctatggacatgtccacaggacgaaagaacaatatcactatcaacaacgataagggaaggttgtccaaggatgaaattgagaagatggttcaggacgctaagaagtacaaggccgaggatgaagagcacaggaagaagaacgattccaagaatgctttggagtactacgcttacagcatgaggaacgcaattaaggacgagagcattgcatccaagcttactaaagccgctaaaaagaagatcgaggatgccattgatggagcgatcctgtggctttatgataaccaatttgctgagttttatgagtttgatgataagaggaaggagcttgagagcaagttcaagtcaatcatcgtcgagatgtacgagggaggtagagatcatgatgtcaacataaagctcttgtgtaaaatttttttcagattggtaactattgttgctgtagtaatgaattagagaaagacagactaagtttagactttagagcatctagagagtgctcttaattatcgcatcaataagaaagttcttgcttagcctatttttgtttagtaaacaggaaaagaagataagaggaggaaatgactttattttcgtttagtaagaaggaaaagagaaggaaatcgctaaggattgccaatttcttatgcccactacaaacaattcggaacaaagaatatccacttctgtctaatggaagacctatttcattaatgttcactaagctaaaaaaaaaatactcgtaatatatatagaaaaataaattaaaaaacaaaagaaactcaaca

SEQ ID NO: 76976 - DNA, 1115 bp, Cannabis sativa
ttctgttttggtcagttagctttaattatctctttgacctgtgtatatatactattccaactctcttaatacaaagcaatgaatctttctcttcagtattcttctcttcaaatgaactactcttctcattaccaattaattttgaaatagaaccttattcaccttatcctaaatactaacataaatcataataccatttaacatttctaagtaaattcgtaaattagttttgcaagcaaagcctttcaagcgagcaagttgtccaataatgtcttttttttaaccaatattctatttttatttttattttttttttaaagaaattctatttttattttatttataccaaaataatagtgttttatcatttggtctattatatatgaccttgacttgtgtaaattttattttagtttaggtcagtggtaataatgcaatttggagcgttatcagtatcactattaatttgttttgattattttgatcaaagtaactaattatcgatatttcataagggatggagcatctattttttgtttatctttattattggggatcattattctttgaatgattatatatgctctactatttttgacgcaataatttgccatttatttagtcatctttatgaaatattatttgtgtaattttattttcacttaaacctatagtgttttgtaccatataaactaatattctattaaaaggaagtaaccaaacactaaggagtgtcaagtgtgacttatgcaagtcttgatacatacttatccactaagataactattattaaagactattaaaactatacaaaactagctacattacaatatttattctatatatctctttctatcttggtttttgatgagaatggtaatcccattgcccttaagaatcattgaccaaaattcatttacagaaccccaaaaaaagatgaacaaaacccatcgaagaagacaaaagttggcatttaaatagatactttaaattaattaaaagaaagaaaaatagataggaatacccacaaatcccaataagatcataatttttctttttcactaactcaatctgaaattcaatcctggtcagcacttaaaaagtgatcattatta

SEQ ID NO: 76977 - DNA, 1239 bp, Cannabis sativa
ttctgcatgggagatcgtacatggttggacgttcctccagtccgaattctagtcatccactcgagatgtagggaccttttcctttgttagtgtattgtttggggatatggacttcatgtccttccccccaatctgttggataaattgcttgatcaagtcgattgcctccttggaatggcaattcatttcttcttgctgggcacgcatagactaagcctaacgatccatctgctctcggaattcacactgttgttgttcgaacgcatggttaacaaaagtacatgtctcctattgcttgtggtagagtgtgttggtatgtgtctagacttgtcctagtgcatctctcaggttctccaacattgaattatcccccaaatttatttagggctctcctttagacagttgaccagtgtcgtaatctcttgaacaccagtcgtgagtccagttatggggtagtgaccccagtggttctggtgtttatccccgcagggattgtatctccacttcttgctctcacaggtgggttgtttcgaggaggcatccgagtggtggggctgtctaatcctaagtcagcgggtgcctagacattgggatacgtcaccatttgatcacatggttcaatggatgtagatcttcttgtcaaaaccattatttgtcgattcaagaatggattgaaagtcaaaggttggtgatagcaagatggtatttcagcctcccaacaaaagcactaaaatattgacctcacttctagctaatgacattgagtcaattaaagcgatagaaataactatattgataatttaagaacataaacgacacttgaaatttataaagactcaaccccttaattcggtaatagcctacccccttttttattgtattgcttatgaaagaatacaaatatcacaaggtttgccaagtgaattttttaatatctctcgaaaaggctccaagtattttacagagtattttctctttttaaagtgtgtaaaaaagaagccccttaaataatgaattggcctcactatttataggggaaagggattacatttatttcaaaatattaggagatgaggcagtgagaatttaaatgtgaatcccactattttctcattttattaagtcaaattctatgaaaatatggattttatattagtcctaattttatagaaacatttaagaaaaactagtttttgaacgtgcgttgcacgtgtaatatatagaggaagattgtatgta

SEQ ID NO: 76978 - DNA, 914 bp, Cannabis sativa
  modified_base (55)..(56): a, c, t, g, unknown or other
attggacaatattgtcccacatggatcaaatgtaaaaatattgagccatatatannaacatgggctactctactcattgccaattggttttgagatggaataacctcatgattctcaacaaaatttatttattaatttaaaaatattattcaaattaatataatggaagagaataatgaattccaccttttttaatgtatcaacattaccctcttcaagggtatttatataaccaagctgagaatgacatttcaagattaaacctctaaacaaacaaggtaatgtttaacattactatttccttgctaacattaatccattccaaacacccccttagttataatagatatttttaaaattttttaaaatattctaataatttatgggatcaaaaaataattttaaatctggtcataggtttctttcaaaaaaaaaaaaaaatctggtcataagtatagaagtctagtgatttcgcacttttcatcacaaaaatgaggttacaagttcaaataacccttcacccaatgtaaaaaaaaaacaagatttaaattctttcattattattatttttaaatgtgtacaattgattattttaaacttttattttcagtcttataaattgttaaaaatttctcaaaatttagtaacaatggtcatataaaaaaaattaagttataatgttggagcaacatgaaaataatattattttttgtctaaaaaaattacaaattcgtaaaaaatatatagagaaataaaagttcataaaaatatataaaaaaaaaagtacaattttagatactttgtgtaaattttcttaatttgtttatatgtgctgaaaattaaatactccgatcgaaaggaaccttattatataatgttcttacttctaatagtcatgatatttattaagaagt

SEQ ID NO: 76979 - DNA, 769 bp, Cannabis sativa
tataatctcacaaattattatatacaatcctttttttgttaaactattatatataggaaaattacatcatatactatttttttaacttgttttttaaatttacagtttgggtttcaaaagtggttgcagcgctaattacaatagagatttctataagattttttgttacaatttaggttgcagcgctagttgcaataggagtttttatatagaattccgtaaaaaatgcaaaaaaaaattgttttaaagtgtaaaaacgaaaaagccccttatatattacacttttaattttttatttttttaaaaaatagtattaatgccattatatgacatcaatacaaattttaagaataatatttttttttatcttcattcattagtataacatttttatattttgtcaactaaacttttcatttcatcaaacattttctaaaatgttaccattgaaaatgcttttagtggctaaaccactataaaacctattgttatttgttaaagaattactaaaaaatattaatggtgcctaacatcctactcggtgttataccgttatttataaaattaagcatcctcatataatttaagaaaataattttttaaaaatatatcttcaaaataatcatgtgacaccacctataaaaaatatttgacaccactaatactcaataacaatgccatatgaattattccgccatcttcaacctctcttattttctttatttgaaaattcgctttaacaattatagtaattaattggggaattacc

SEQ ID NO: 76980 - DNA, 1596 bp, Cannabis sativa
actgaaggctcctagtctcaagtcagtctgttgctaatctattagacaatgcttaactctagtggttagttctctgctaaatcatcctactagcttgatcaaggtgactgtcttgatcatgctagtccttcctagaaactgatttggtcaaacaatttacatctgagacatagcttgcttttgtggagggtgtgcaatggttctctacctataagggataaatttgcttgtgatggtaacacaaattgcttattatgtaatcttaaggtcgagaatcctttgcacttatttgtcaactatcatttgtctaggctgctctggtttagctccccgattccaattagaattgattggatttttgatcaaaacttgcttgaagttttgttatttttatgccaagatctaaaaggggagcttttgatgcgagttttgatttattttgtttcagtgtgtgatactatttggaactataaaaatgttattcttcatggtgggaagaaaagaagtatcgagagccagcaagaagaaatcaccatgaggagactgtgatggaaattagatttggtccaaagaagttgagtgcttaaagggtctttcaattcacaaaccctatttacagatggtgctttcagggatgagaggtgtggggtggctatcctagctattgataaaagtagtttggcttgggaaactaaagtgaagatctttgaaggtatccctgccttggaagtaaaactgaaggctattcatttggcaattttctgggttgttgaaatgaagtaaaagtccattgttatttttacaaactgtcttgtggctgttaacgctctagaaaaaagaaactaccagactgaaggcttgcttcaattttctttcttgtctatgcttactctatttcaagtcttaagatttgttttgtgaagagagaatacttaaagttcgtgaatgatttggctgtccaagctagagtggagagagtcctaaactcttgttatgtaggggagggattgccccctgtcaatcctattttcctttattaatttcataaactgaggttctcttaaaaaaaaaaaaaagagttaaaagagaggtttgtttgagattttctcattttaaaagaaagaaaacttgtattgatgatattgattggttggagagtttgagcttaaatttcaattgagctctttctcttggtgtacctttctggtgacatttcaagcaaaccttcatgaagtttcaagcttcagaaattaattcaaagcgagggatgagagaaattagagctttttccttgttgtagcattggcataaatcaaatcttagatacttctagatcgttatcgttattattgcaataacaaagacaaaataatcgttaagtcaaagaatcagtgacaaatagaacaaaaacaaaacaaatgtatgatgatacatagagtgagagttaggattacaattaaggaaaaaatatgtaaagattgtagaaataaggttggaaaggagaagtacctacccatgcagaatagagcttgagactgatcgtgatgatgagaaatggaagagaacgatgaaaatcgaagagagagagagagagag

SEQ ID NO: 76981 - DNA, 2752 bp, Cannabis sativa
agcatcgattgaagccagtgaagccagtgaagctaagaaaccaaaatgaccggccatctactggaaaagagtgcagacattttaaaacaatttgtgccaacatgttacttctgcaatagaaggggtcacataagacctcgatgttataagctgcaaacatatttgaaaaatatgattcaaccgtaaggttcattctcacagtcaaattagaataaaagaaaatttcctagagtgggttggagatctaagtttgaaaatctagctttagtggcacacacattcccattagccatgataaagatgagtggtaccttaatagttgcattttatttattttttgtgtatacattttcttaatgtatacttatcgaggactaatctactatacttttgagagactaattgaaaagtaattacatagatatcaataaaatttaagagtatctataattttagcttgaataattaaaattactatatttagatccaactagctttaaattaattaaatagattctcttactgtaattatatgtgtgtctcctagccacattaacaaattatctcaaaaattaagccaaaaaaaaaaaacaatggatagaaaaaaattgtaattatcttcataatttgaggataattttttatataaaaaaataataatttggaaacaaaactttaccaatgtcataatttcaggataagttatatgtatatatttttaatgaggttcattttgttatttttttttatgtgaactaaagtaccataacattattgctatacaatagatgaatcaatgagctgaggtcccctcacccctctaatttacattgtacttaataatttgatttggttccaacaaagctctattactcaaattagacaagatctgccgaaccaacaccaaacccagttaccataaacgccaagtgccatgctgtgaaaagacaaatcccattcaattctaattctcctatttgtgaattgcctataaaagagtcctcataaaccaggttggctaaaccatttggtagcttcaatcatttttaatgagttgaatcttgtcttactgaatgtcccatgttgcttgattaaaagtaataaacatggagttgtacaccaaaaagtatattctacctaactaattaactatgagtgtttcactcccatgtatgtatcctttaagtaattaagtatatatgtttctctttctctctctctccccccatataaacaaatgtgaatttttatttatctccagcaacaaattttgttggccatttaatactggtttagaagactaccttttcgattcacttgtcaagaacaaaactagtggagaagtacgggtatatggcacaggcttgtcctcccacacctaaccgacctacccaaaaaaaaagtagccaaagacgtaatacgattacattccacaaaaaatcacctttttttgttgggtaattattgagtattgctgttaggctttagcatttttctaaatataataaactgaaatttgtgcaaaactttcatggatttacatattagaagagtactattatagtacaatatctccttctcaccaaataataggattgattcctttttccttcctcatgtttcagcatacatcaactgcaagcagatttgtataaaggaattccagagtttactccaatttacaggccataattttttaagacacaaaggaaagacctcatatgatggcagttaattaatataaataaacaataatttatgcacagaacaacaaattaaaaaaggaaaaagaaaagagcaagttgttattataatttataagtgctaagctatataactcggaaaggacatttatatataaaaaaaaaaagtgaacctgaggtgggttacattacagtcttacagagttaaaaaaaaaaattatatataattttcgtttttttagtaattaacggccgttagcaagaggactaacgatggctgccttgcaaggactaggtgggagactggtctttccggaagcgacgagacgttcaacaaaactctggattctctgtccgttagtttccgtcagtaaccgcttcccgccaaatggtaacgactcaacccctctttccttcatgacttccaccaccacgacctcctcgttatccttcgttctcggtcccactaacccgtttgcctgcacattttcgaaaacgacgtcgtcattaaactccgtcattttgaacggaagtacccaaaatgaaggaacaaataacattaatacgaacgactttattaactctctctctaccaatttcaatgccaaccgaatagaaaattggctaggaaggaactcaaagggattgataaaagagtaataaatgaattacctgaattctgacgtagtccgtacgattccaacagaatgcgttccccaacatttggtcaatggtctccgataccccgtcaagcacaatgtcaacaaccgatgacgtggagcaatcggagttggcgccgttgcggaatggtttccgtccgatcagcggaccgttacccaacgacagaactaacagatcctcaacgccgttaaccgaagggaaatctcgtttgttgtggagaacatgcgtcaccgccgccgccgttgggttgttcattactagtccgccgtctacggcgtagcacgacgtcttcccgtcgacggagcttaagctgaagggcttgaagtggctaggcgtcgctgatgtggcgcggcagaccttccacaagt

SEQ ID NO: 76982 - DNA, 2189 bp, Cannabis sativa
gaaccccatgattcttaacattcatgatttgttagttgagcagttgtctctctctcttcaatttgagttgttgaatcgactttccttggtgttgaattggctgggttttcttcaccttcatcatcgggacaaaagaagctcgccccacgtcgtgttattcatattttcctatgttaaataataaatacagataattcttaccttaactatttactggcttttcagtaacctataaacaaaataaagttgactaattagtatcatatgctataaaaataccatataatgaaaatttgtatgtagaaatatcattatataatgtattggaaataaactcgtacgtatatttttacaagtttagaatctcttatcacattcacatgtaataagtcgcaaccaactcaactagtttggcatagctttatttattaatttaaattaatatggaatattctagattaacgatgaataagcttgaaccataaaataatagatccactggatcatctcaaagtcaacaatatgattcctaatcttacagtgcatctcactcattaatcttatcttttaagtattaattattatatataagttacatatatcaataaatatgtatttatacaaataatatatatagtatatggattagcgtagcagctcatgaatggttggcatacgaagtactctgcctacttgacacttcttttcacgtaatacataaaaaaaataatgcaatcatgttggcaataatgaggacaaattgtacattctatttgtatacattacacatatatatatatatataaataaagggatattccagtgtattttcatccatatatatacatatgacgaaaccaaccaatatatgactttttctttccaaaatcgaatagcttcgtctcccaatttcatgctgtgcgactgtccgtacgcctgccctttccgagacattagaagacaaaaacaaatcttttttttttacaaaaacaaatgttaaaagaaattggaataaaatttatagaaaaataaaaaaagagaactgataatatctaagtttcattcgtatatcaatcatatcataaacttcaacgccttactatatattacaaaataaaataaaaaataaaaaacaaagtcaaattcaataaacgaaaccccaaagacatacagcccaaaaatttcctttttatatattaaaagtcctcctaaccccaccctttcagattactatagagtcattcggatattaatcatgcttaattacatattaacatacttatcaatctctctttcttcttgtttttaggtcattggctcttgtagtttttactatagttgtacatgaaatatatttatattatataacacataaaatatacttttgggccttttgacatattctcctatgcttacgtcccttactcaaatctcagtattttattgtttgttgtttttgggctttacatatatatataaaggctacaaatctaacatttcatatcaactagaatcgatcacatctgtctctttttttctctttcttaatccctttttgcttttggtgattaagatttgctaaaaaggggtatctgaaataataatggcaggacttagtgggattctcttggcttcacttcttattctctcatgctttgctgaaacatcttttggggttgttcacttctcttctcttaaacaaactcttacagttacagcttcaccaaaaccaggacaaggtaacatatatgtatatatatacataatacatatcatcttttatatatgtgtcactcgtgataatctgacctaaaaattgggttgtttttctaatctaatgaaaaggggtttgtcgtttttatgttaaattataacaaaattgatttaaatttgcagttttgaaagccggtgatgacaaattcacagtgacctggggtctaaacaatagtttcccagctgggactgattcggcctacaagaccatcaagctaaggctatgctacgcgccagtcagccaagtggagcgcgcgtggagaaagaccgaggaagagctctctaaggacaagacttgtcagttcaatatcgtgacaaagccttacagcgcctcaaaacagagcttcgagtgggtcgtcgaacgcgacgtgcctttaggaacgtacttcgtacgcgcctacgcttacaacgccgcg

SEQ ID NO: 76983 - DNA, 3330 bp, Cannabis sativa
  modified_base (1776)..(1777): a, c, t, g, unknown or other
tattaataagtaaatctgattgtattgaaatgggttttatttaggacacagaaaccaacaggagtaccttactcggcttttacaacaagctgctcatgactttaactacaggtatcaccccttatgcaaaagtctaaagcttgttaacttgtgttttgcggatgatttgataatattgagcaagggaacgagacagtctttacgtattatcaaagcagtttttgatgatttcagtacaactacagggctgttcattaatactcaaaaatctcatatctactttggtgcggtagatagtagagaataagctgatattttaggggatatatctctcattgagggggactttcctctaaagtatcttggggtgcccttgagacccagaaaatggaagatagaagactgggattatcattaccaaaatcaaacagaggctacataattgggcaacaagacacctatcttttgcccgtagagctcaattgattcacacagttttacttggcctcaagagttactggatgaggatttttatactccctcaaagtgttactaaggaagtggaaaaattatgcagagggtttctttggagaagtaaaggtgataggagcaaaatgcacatgatcccttaggacaaagtttgccttcctaagtcttatggtggcatcagttttaaggaaggatctaagtggaatcatgctatgatttcaaagtatgtgtgggctatcatggacaaaaaggatcttctttgggttaaatgggtgaacttaatttaccttaaagatgaatctatctggtcctacaaccaaaaacctgacactagctggtactggaaaaagttatgctggctgagattaaagtttttgagggatgcgattatgaggtctggtaagaatggtaagcttaaagctgtcactctttataatagtcttctgattcagaacaaggacccttatagtaagatcagttggaatcacatgaccacctcttttccaattgtgccttctctcgaagggtggtggaccgaacctttgaatggctagggaataatacttggccgatcaggtatatagactggaaagcttggctaactttgaacaattctagtctgataagaagaattcagattgccattcttgctgctgtgtgctatggtatttggttgaacaggaacagatgcatttttgacaattgttctagaactgatgtgtctatagttgctgaggtgaaaagcattgttttgtatatattacatcttgtaaaaaaaaatagaaaattatctagacaggagagattatttgtcaacaagattcgatgtaattaatttgttgttgttgttggctctttagtttgttaaagagagctttgagggtgtatttgctcagttgattaatgaattttcttcttaataaaaaaaaattaatttttagtggacattacggtttggagttaggtttagagttttattagttaaatttataattaatattaatattcaaaattaattataaataaataaatatattaattatatatagtgtaatttttaagaattaatttgagtcattggattaaatcaaaggttataaaatactatctttatcaataaatattttatccaatcctactgtaatagtctccattatatttatatgtacaggctgcaattcgggatctaaatctagtctattcatgaagtgatatttttgttcaaatccatttatgacaatcacatgccaatgaaaccatctatcactttttttttatatatatatnnatatatatatatatatatggtgtcactttcattatgccttcaatatattcaaggtcttaattgaaaagtataaccaaattgtcaagttaataaagtcataacccaaagccacccacaaaccttcacaaattaactactatatgccgatcatttgatacttttaatagttaaccaagtgctttgtgacaaagattcaactatacatgagataattaatccaagtgcgcaattatacaaatattactatttatttatcatatttgttaagattataaattggccacgtaaatcttgtccataaatatacaaatattaactttttctaacataaaattaaggtaattattgtgatgagatgatctggggtgggaatgtgagatccttttaattatttaatgccggcgtgtaacctatattcatttaacctcaactgtatttgaaagattagagatcaataacagtagctgaaattctttgtcgatcgagtattaattggtaaaatgataatattgggtttttaaatacttgtacaagttttggatttcaatttagtcatgtataagtcaagtgatgaaccccatcagtacatatgataaatgtatagtaatatatttaggctttttttggggttttctttggtcatatacaaaatttggcttccacaatactgttgaccatatatctgttattttttttttttttgaaacagaccatatatctgttattgactgttgtcgaatatcttcattggtttgttttttcgggttcaaacaaatgtacttgtcttattatgaaatatgttatatatatttctttgatgatgagattactttttaatttttatgcggaagtgaatattttgttagctatggaataaaatttaacaaattaaaattttatatttcatcacagaataatttagaagaatcttttaatcgatgatttggcagtaacaaaattcgggaacaaaaattgtaaataggctacgagcttttgaaaacgatcaagtacaaaatcttctcatttcttgttattactaaaatctactcctaaattttaatttggtcaatttgtttttttttttctgttaaaaaaaactaaaactatttgttaacattaaatatttttttttttaaaaaaaaaaagcttttttgaacacaagtagaggtttctggcattgtttttagaaataattttaaaaataaaattacgaaaaattgaattttttaagaacaaaacttgttttctatttcatgacttttttttttttcaaattatatctcattatttattacaaacttttaaaattttaatcattcaatatttttattaattaatgttattgaggatttcaaaaactatttttagaaaatatatcaatcatacactttatttttcgaaaactataaaaactattttgcgcctcttattttttaacagaattttcaaaataaaaataaaaaagaatgctaaccccaagtctccgacttaaaagtttatataaaataaaatctaccctggtattggtatattttcacaaaaatttatataag

SEQ ID NO: 76984 - DNA, 1066 bp, Cannabis sativa
  modified_base (1029)..(1041): a, c, t, g, unknown or other
atatatatagggttagtgtaaatctattccttttaggtttaggaataattacgagtttaaatttaaaaagataattatgtgataaaaatataggcataaatgaacaatttttattaatactaaataatatattgaacatatatacatataaatatattaagagagatgatatatatataaattagaattaatacgtaccttatattttgtatcttaaaatatatattttttttgagtaaatttgtatcttaaaatatcatttatttattaattttcttttttttttttaaactatttttttttttttgagataaaaagagtactattttttatgagtactattttataaaacaggttcaagaaaaagattactttatttattcagtatcctatatcgtgactgttattatctatatatattattcttataaattagtatatttatatatttttaaatctatatctccagaattatattatcttattattaattcttgtatacgtgtcctcattataattctacttaaaatatggacataataatatctattttatcttttatctaatatgaaatgtgtctatataatataatattttttttaataattcaattaaaatctaaactcattgtacatatttaaataatatctttctattattattttatttaccataaaaaatatatttttattattattatttaaaaaaattagaaaaagtgttatcatatgccaaaaagtattatggtaattaaattaaaattataattaagaagcctttttaagtatattattatgttttcttttataaataatacttacaattaaatattttttaataaaaataattttagttattgaataacgtccacacaaaaaaaaaattatttagttatattcttagctaatttttattgcggttctgtatacatatattgtacatatattgtacgtaatattaatttatctagtatataataaaagaataattaaaaggggaattattctatatactattttttaatttttnnnnnnnnnnnnnggtttgggtttctaaagtggtggca

SEQ ID NO: 76985 - DNA, 756 bp, Cannabis sativa
attcgtttataaattaatatttgagtgtcattttttttatacaattattatacatgtctatgtttgagttgagcatatagctgtaaataccaattgtaacccctattattatcactatttgatgtgcaacacattgagtaataataatcttatagcttgttagaatttggaatgaaagtggctaaagtacatgagttttattttaaaactaattagtaataaaacgagtagtccattatgatattatcttatatataataatttatttctataaattaataataagggactaactctaatatcaaaatattattatattttaataagcatgataccctttaatggtatatccatagctatatttttcaattaatcaaagagacttatagttagggaaggtaattgtgcatggattaatacataaaagaaaattaaaggtttttggcgttttatttttgaaatatttttgttgtaaaagaaggtagaatataaataaggtatgatagatgtgtagtatagtagcaccacgtgatgatgtgcaccaacctatatatctaccaataataataggagtttgttattttttatttgaagattattgttattatacaccatatgatattgtctaacgccatatcaatatggtacgttaatttttgagattatttcacaaatacataaaataataaaaaaaaattataaaaatatgattatacaaaattttaaatatttttacaatttttataattttattta

SEQ ID NO: 76986 - DNA, 701 bp, Cannabis sativa
gatggatcactttacttgctgctccacgttatgaaataataattattagatatacacgagaataatgaaattattgttgttcattcaaaaaagaagatgaaattgaaaactaatttccaaaaaaacaaaaaagttgtgatataattaataatattcacacattacaccgaccaatattgtaataatatatatatattgtacaatgtacacgattacatgatccatatatatgaattagctagctagcatatatattctttcttatatgacagatcttagatacgtttgtttgttgttgctatttattattataattattaagtacgtgtactactaattaattataatgtatcatgaaaaagaaagacagcacaaaaatccaaagattaaatggaaaagaaagatgagagatatataatggatacaatacaacacaacacggatggtactcatgatgaataagaagaaaaacatttaattgtgtacacgtacaactacacaactagtagcaaattcaatgccaacgcgtaataatattaatgtcacttctcacactcttactatactactcctacatacatatatatgtcttgtcttgtctttcactaactcaactaataatatataattaattaacaagatatacatacagatgtatagataccagtatgagtaattgtggggatgttggacactattta

SEQ ID NO: 76987 - DNA, 675 bp, Cannabis sativa
gatgtacgtatgcttatgcttagtcatatgtttaaaatatgcaattttaacattaagttaatttggataatggaaaatattataataatttaatataagatcttgtaaaacacatttacatactctgtaacttcatttaattgtgcactccttaaagtcattatctcaatatgtccttagcaagtatgagataagaaccacatttataaactttggaatttttttttttttttttgacatttgattaaaatcactacagaaatctatgaagcttacattagctatcaaagctcatttttaaaccgaaaggtcatatttttccaaattatgaactacacaagtaagaaagatacataggacaaatatatatgtatattaattctatttagttaatgatattttattaaagtcttacattgtctacattatatattaatttaattaaattatttgttttatttaaagtatttatcaattacaattagcttttaatagtactattttcaacaaatttccttatagtattttaaacaaaaaggccaaaattaattttacaaaacttatgcaaatactctttctgatgcaacttcaaaacggagtgaaaaaaaaatatatgcaaatacttttatttatgctctttcaccctgaaaataatatccatgaacaaaaaaaaaa

SEQ ID NO: 76988 - DNA, 819 bp, Cannabis sativa
gaaacatagacacattaatgaaaccggtctcacattattagcaaaagctggcttgggaatgaactattggtggcatgcctttagttgtgttgttttcaccatcaaccggttaccaacaagagttctagattggtcatctcctcttgaaacactatttcacaataagccatgattactctatcctcaagccatttggatgtgcatgctttccacatttgaggccatacaacaagcataagttggattttagaacacaacaatgtctctttttgggctattcatctcatcacaaaggctacatttgccaagcaccagagggaagaatctatatagctcgcaatgtcatttttaatgaagaaaacttccctggtgcaaacttttctttagaaaaagtctctgatgcaccaaatcaggtatcttctcactcaaatatacctatttttgttcctaatattggtatacaatctcacactgatgttgctgttacttctattcctgatgttggtgcttcaactgctgagcctgctgatataactcccacagctgttgctggtgcaacatcaaatcctgttgttggtgcaacatctgatactgctactagtatacactctgctactgttgctggtgcaacacctggtgcagctactggtgtacaatcagctgcagttgatgataactctcatggtatgcaagttgaaccatcacaaatcccaccagaaaatacctctctacaaaactcagtacccacacagctgcctatttcccatataaatccagcatctgaacctcctacccgatccaatatccacccaatgcaga

SEQ ID NO: 76989 - DNA, 1095 bp, Cannabis sativa
tttttatttattagcaaaattaaatgacaataacacagtaaaatgttcaaatttttttgacttgatgggaaatttacataccgaaagccaacatttattttttcattttttgagttaattttgtgtgattatttgttttgaattaatcactatacactaccctattaaaagggtaagtttcacatgcacttctatagacaaattcttagctgcttaccctatttaaatcccaattactcaattagaaaataaacgaaaaatttaatgtgtgttatttattgacatatataaatgaaacttgtgataatttaatctttaataagttatttattatcaagccattcttctgtttcaaacgataagagcaaaaaatggtcaagtttgtccaaactcgaaattaggcttagttaggaacagtgatgatgtaccaatggaagcataagatttgatttgacactgtacaaagacaaatgtagcagcagcagcctatgtgtgtgttaaatggggcaagcagatcgaactagtctatattatcagtactaaataatttcatgttggtaccataaagaggactctctaattaaaaaataaaaatttgagaaggtgaaaagaaaatttatgagtttctttttttttttttttttgagatacgaaatcaggaaagagggaaatggtcggagaaaatgtagccccactatctaatttgaaaaataaagaaagaagcacacacaaacacacaccggccaacttggttttatgagaaagagtctaatatcatgtgcattagtgaccctacaaattcaagtgcactgaccatgtaaaccccacttttccgactccctttggcctttataacccctttgcatgtgaccctatgaaacccaatttaccaaatccaccatattttaaggtctaaatcttctataatacatttcattaaaataagtgtactgacgcaactcttaaaagctcgtttggtttaaccacttgaggctagctcaagtggccataagtgggtgtgtgtgtcttggaggtcttgggttcgagtcccaggtaaaacatggttgtaatatacaaacgcttaaatcaaaaaaa

SEQ ID NO: 76990 - DNA, 2283 bp, Cannabis sativa
acaaaatatatgttaatagattgactaccgacacataatttaggccaagtcaattccagtttcaatattttggtacttaaattttgtgccatttgcgtgcactcactgccataccattccaccataacataggaaggaaaatcattgaaatcattctttgttttcaaagttcaatggcccaaacactaaaaatcaaaagtagtaatttataaacaaatcacagttaattaattaatatattattatgagctgtccaacaatgtttctttttattattatttcaaagtgaacgtcctcactcctttttagtctctctccttaattaatttttatcttttatattaataaatagcggtacttaaaattttatgtttgtaagtggcttaaatataaaactgtaattttttttttattttctctgtacagactccgtcattgtcttaaacaggacacatataaaggctaaattttttattattggatctagataaaaatatgtagtatcaattatttccaaatatttttttaataaattcaaaagggtctgtgctggcgaaattaactgaaagaaaattacagttttacaaatactgagtatttatgctgttaaaaataaatattaaatttatacagtttacaaacataaaatattaggtacttacgaccatatttaccctttatattattatttaagtagacatattcggtgtagaataaaatcaattaatagatgactcatataccaagtaaaaagagcatgaggaggacataaatgaaaacattgttcccacccccatttacgtaaattgtgtatatgtacggtactgaatataaaaacccctataaatttagcaaatgttacacagaatataggaagagatgagaaatttaattctaaattgataaatcccaaataataagaaacatattttctaattatgtgctctcgactgccactattctctttatcttggggaagaactttacatatagatacttatataacaaaataataacagatatgtttgtaaataatactattataaatataattatttccgtcggttcttaaattatttttttagagaactgtcactaataaaattaagtgggtgtttaaaatcgtcgactatagtagactattctaaacaattttaaaacactcgtgtatttttcccaactatttaaaagagtcacaagccaaaaaaaaaatggttataaatgacatctcaacagtttaaaatcgtcaaccatagtattccctacgattttaaaccatcgaggaatgtggttacacatatagtttaatttttcaatttaaactcttatttcagccctcatttttattcatttgcttaatttttcaatttaaaccaaatcattcgttcttactttcgctccctctcctccgatccaccaccaccatccccgacaacgagtcactaccacctccctcccctttgctctctctctctctctctctctctctctctcgacatcaaagcccacactacggccccacccgtcgtctctccctcatcctccttcgtctatcttttgattatgggttagtgttaatacttgttcttgtttgaactttaacatagcattatccgtgttttcggcaagggacacatggattccaaatagaagtcaaggtctatcaatgggcccaaacgacaagaactgggctgagcccaacacaaacctggccttccgaaaagtaatcatacctcttgctcaggcgagcttccgccaaggttagtttgtatccagaaggatcctagctccgtgtattcggaagaactctttaatgtatctataagccagttgtagtttcccgtttactgttacgtgcagaataaggaaatcactttcctcagatctcggacaaagaataaatatcaagctaaaataggaaactacataattgaaaatcaaataattaatatccattaattatccacaatcaagggacacagtatgaacaattatgaccgtgatcaacatgccaaatcagcatacagtcattgccttatggactgggtttcatttgataagcccaaagtaatgtattatctataaacattccattagagagaaatggtaactaagtatgatctctattactctataaatacacactgaatccttcatgcaaagggttagaatttcttaacttacaaacttgagaagaaaatagagtgttcatattcattgtaatcccttaggcttttctagcctatctgataataataatggcttgtggactaaggctcatta

SEQ ID NO: 76991 - DNA, 848 bp, Cannabis sativa
ataagttaagttttgattataatttttaaattattacttatatgtaatttatactcacagaagaaaatttagcaattttttttttttgttttgcttctttaatagagtactatgaattaaagttcttgtacatttcaatcttcattttctattgatcaacttaagttcttagtatccaacactttctagattgtactactgcttcccctaacaaggtatacaatacaatcctccaaataataataaaaaaacaaaaaacaaaaaacaaaaaacttacacttgaattaaacaatctactagaagtcttgtcttttgacatgtatgtgaggctatgagtttgtgaagtctatttgtcgtgcttttgttgatcgtgtgattggttactttcttgtttgagttatggcatcaagcagccgtaatatggaagagttgggacaacaatgggcggggttacatgtagaagatgaggatgagatgggacttttgttcgataatgcggaaccacttgttgatgactttgacggcagatggtgtcttgtgggaaaactattgtctgatcgtccggcagactttgattcgctaaggaatgttttggcatcgctatggcgtccagggagaggaatgtacgtcaaggagttggaaacaaatcgatatttgtttcaattctttcatgaggttgacattagtagagttcttgaaggtactccttggacttttaacaggaaccccctggttgttgaaagactaaaggaaggggaaaatcctagaaacaagccattgaatactatggaaatatgggtccaagtatacaatcttgaagtggaatatcgatccgatcgtgtcttaca

SEQ ID NO: 76992 - DNA, 702 bp, Cannabis sativa
ggtccaatctataacttttgtaaagcacaggatctaaaatagtatttaccctttatttaatattacaaacaaaatgccaattaaaatttcataaaaaaacagagagtattaatatgtaagtaatgtaatgcatgtatccttgaaaaggtagttattttatttttttaatcaaacatcttaaaaagttagttattttaatatactaaactaaacatctccaattcaattactataataataaagtagataggcaaatttgtttgattattttacataagatattgttttgtaaaaaatggaaataatgaagataattaaagcaaggaaatagaatattaatttgtagcatataaatggtccatgagaggacactcatatgtgggagatgtgtaatttaggatatttaatgttagtgacataacattgaaccccacaaagattttgttagaaacaatgatatacatacattccattactatcatatatatatatgttttgtcactgagcttcaatcatgtggctatgatattttattctatttttttggcattttacatatatatacatatatactatttaattggcatgtgcctagttgattaaaaattattaaacaaaattagcaatatttgttatattataattaaaaattataaatcttaattaattttatctttgtgtattaaaacaatgaagcaaagt

SEQ ID NO: 76993 - DNA, 6729 bp, Cannabis sativa
caaaagaagaagaagaaaaacgccagctggagcgtgagggaccagttcgaaacggtacccgacgactcagtacagtacttgccccaaacggttccgttctacgggctaccattggaaacccgacccagattatcactccgatccgactacaataacacaaaaaggtatgctacttaagtaacattattctcgatttgtttattttttttttaatttaataaatagagtaataaaaacattatggcctctacttgagagatagcaactcagtctcatattctacttgtcttaacttggctcggctgaatctgatcttattctctttttcttatcgctcagtggtggtggaatcgtcaaggcgaataagaaatttggggggaaaatgagcaaggttgggaacctgtcggatctgattcaacgagttacggcgtcttgcttgcttcatccgctcaccggcatcgaacgccgtgaaaattcaagcgacggggaaggaaaagacgatgcggaggaagtgtacgagtacgagacggatgagcatgaaaaggaggaagaaaccgatgaagatgatgatcaacaaattgaaggagtgttggaaaggagaagcggcggtagcagtagtagtagcggaaggaagcagaagcaggtttggcagccgagaacgagggaggtcgtggtggagatggagatgacgatggggcaagtgtttgatgcggtttcggcgatgaagaaagcatacctgaaattacaggaggcgcattgtccgtgggacccggagaagatgagggtggctgatgcggccgtgttggcagagattaggaagctgagtgtgcttagagagaggttcagaaggaatgttgttctcggcggtaacggaggagggagatctggctccgggaggatgttaatggctgctacgacgattaaagaggtggtggcgccgtatgaagcggcggtcgatgagctgaagagagaggttaaggctagagaagttgaagttgagaatctgaaggagaagctcaagagcttcaccgtcaatggcggtgggaacgggaggaaaggaaggtctttctctaggaagaaggtcagctgtagtcttgctcaaggtacttgccctgttcctcacagtaatctttgtcttttaccgatgaaatgatttttataccctttgaattttgatttgttgacttttatatctgatgtggcacgtaatcattggtttagaatcattgacctaaaaagaaaaagtctattgtcttttttacgaaaagaatgatctttttatttctgatcatccaaacagtctttttagctctgaacaaggattttaattatgttcttttccgacttacagtgccgctatctacatcaccggaattattcgaggtgacaacgagtagagtaaccgatgcattaaggacatttacgtctctactcctctcattgatgcgctccgcccattgggacatagcagccgcagttcgttccatagaattggcctccgccgctgaaagcgccaccggagacgtatccactatatcctcctccgtcacaacccaacacgccaagtacgctctagaatcctacgtagcccacaagatgttccaagggtttgatcacgagacgttttacatggacggaagcctcgcgtcgctcatcaacccggaccagttccgccgagactgctttactcagtaccgtgacatgaaggccatggaccccacggagcttcttggagtactgcccacttgtcacttcggcaagttctgcttcaagaagtaccttgccattgttcaccccaaaatggaggagtctttgtttggagatttggagcagcaccgccaggtcgtggctgggaaccacccccgcagtcagttttacagcgagttcttggaacttgccaagactgtgtggcttcttcacttgttggctttctcgcttgacccggttcctagtcagttcgaggctagtagaggagccgagtttcatcctcagtacatggagagcgtcgttaagtttcccggtgggagggttacgccgggtcaggttgtggctttgcctgttagtcccgggtttaagctctggaacgggtcagttatcaaagccagggtgtacttggtaccaaggagttgaagatgaagactacagtgtttggattttgttgtaagtgttgtaagtgatataattagggttaagctaatggattgtcctacgacatagtatgtcttgtaattttcaagtactgttttttttttatgtaataggtgtagtgttcatgggtattgaaagccaaaggaatgttgcatgttattaaaagtttctagcaaagtgtttgattaggtgagaatcgttattgcagggatatcaattgtgacaatatgtgtaatcatggctcatccaaataaagtaattaaaatacaaatcaatgcctgctgttcaaaagggtgttaagcaacatgtgacgtgctcctctatatatagtcgggtattaaatatagtgttataatgactaatgagttttgacaaatctacattttggaactatcatcaattcaaccaatgatacaaattaataaagagttggccatgttttaaatatgattcaccaagttgaaaagaaagaaggtaaagttcaatataacaaagcccaggaggggaaaaaaaatgggaagttaatctgcggatcccattaccagtccttatggagccccagtcaaaaatctcttcgtctgtcgtgtaaagtaataaataaaaaattagatattaatttaagtaggtcaagcaaagcaaatagttaagtataatagcaaactataaattgcttatcttacttgctcaagggtgagaaacataataacattccaagatccaaaccgacttaagtttggaaggaaacctttgtaaaaggccaaaattccctgcagtacaattgcaacagacaaaaattacaggatggtaacttatgaaacacgatgaattacagtaataaaaaaaaacaccagtacaaaacaagaagactcagctgcaaaggcatggtacattctcagtttttaatcttccatctcttactcttacaactgatagggtttgtcattgagttaaatccaatagctaatagggtttcttttagattaccttgcaagatcatcatgcgggcataccaaaatatattcttttatacttatagtacatatttgagtttttaagttaacagatagtatgatagtaaaattccaagttgcttttaaatattaatctgtattaactaggatagtgagtagccacaatgtgacgaaatttcttcagtcacagaggtcgaaagaaagcaaacttatatatattcattcgaacgaaggtcaaatatgatggtccaattcccgttatgaatcccatctgtgtcattgttacagattgattcacacaaaatgcatatgtatatatacttatatattataaaatagtgtgcaaccacattgacaacgcaaatttagattaacgttaaactaattcacatacctcacttttcaaagtcttaaagaagcaatcaagggtgtttttataattggaatctcccatcatcctagacttcacctgaaaacatatacagcgttaaaccaatattgcaagactagctcattcctcagagagtatagaagattgcttcatataaacaaaaccagacatccctactgccgacaaagtctatcaactatcattaatggctagcaattgtaccaatgttgcaagttgcaacaccagcatatctaatttctctaaatattaagcctacgaattctcaatattcttgctttcagtttagcatacaacatgcctgagagacaggaagctgaagtctgatcatttcattattcactccaataatccaatatatgttattactatagttaatagtctatatgacaacggtgtggcctatctttgccaattaatcatttaaatgcttcatgttaatcctctatactttcttgtagttccgagtgtagcaaatgtcccatacagttttagcaaaaccttgattggccaaggtcaacgcaaaaacaaaagaaaaagcatctatataaatcatgattaaacatgagtatgacaaaagaatcatccattcattgtttatataaagtttagaattttgttctattttgattttatttttatatgatatatttacaataacttgaaccaggactacacccacccaaccacttgagctagttttaacggattgaagttttagaagatttcaaatatgatcagtaataaaaagaggtataacagtttccttatttttctaagcgaacaatttactacagttttaatttaaagtgaatgcagattaatagttttgagtcagaatccatatttatgggtatttgtggttttattttaggaaaacaaaatcttaaatctacagatgaatagtaaaagaatacgtaccacatcaatgggagaaccaatacatatggcaaacaaacctgcacctaaaccagctaggatatgagtgaaaatattgtccatgaaccctggaatttttaaaattgtctgcataagtataacaaatcaggataccacagaagtaacgccctagatatagcatgttagcaataagttaaatattgaaaaaatggaacttcaaaataagagataaaacactacactattacctgcttgatgtggtcataactagccagctcagcagcatttattgtcgcattccgggctacatttggtcctagtccagtccatagagcccctaatccttcctacaaatgtacaaaatgaataaaaaaatattgaaaaaattatgttcatgggttgagaaaacaaaatgatgagagcaaaagtaaagtactatataaataaaaccaacctgtctaactatagtataatatgcatcaagagctccagaatagcgtctgggaaccccgggaggtaacttcccttcagcttgaagtctaactttcacaaggtcagttgggtttgccaatgcaatagccagagctcctgttatccattaaaaaaaaagccttattgttaaaaacatctaaaaaactttcaattccaaaggtcaaggaacatatgaaaaaaggtcagggtcagggacctatataggcgtaatatgagattgtagtgcaagttgtgtgatacccaaagaagtggtaacgccaccagtatactaaccagttatcagagcagcaagtattttataatacaaaggaacatctccaacaaaagcactgccaacaaagaaagtcttgacctgttcaaataaaatttacaattgcatacatattgttaaacaaaaactctcttagctactatcaaggaaggaaagtaaatttaactcacaggatcatataacccaatccttaatccaccataaagacattggcgttgtaatcctggaacaatgcctttccaaagtgaagctaaaccttcttccctggcaatggtggcaatagtgtccaacaagccactgtattttggtgaagctcctccattcactgactctgatttctctccatccactgtagctgctttcctttggagttgtaaccttactttagcagtatccaaaggaatggtacagaactgcaaaataacaatgctagaatgatcattctagaacaaagaatgcagctattttcaacatgaattatcattcataatttttttcatgatttaagaaaagaaaaaaaaaaaaaaagaacccaaatgaatttaaaattatatcctgactcggaatgagtccaaaatgcacccaagttgatagctcagacccattaaaggctgttagaactcagtttgcatatcagaaaatgaaatctgaccaaacttcccatattccaatcgaaagaagtatctgtataaattatgaacgagctacaaccaaatttgcaaattacgcacgatttgtttaacatttccataatccaaatacataagctagactccaagaaaactggaatcaattctacacattaacactcttgaaaattatctcactcaaattaaaaaagtaaggctgacaacaactattcaactcaattttcaccaaactgagcaaagaacctaactacgaaacgcaattaacaacatcagcaagaaaccatacacgtacctcagcaaaacaggcagcgaaagcactgcagataaaagtttgagcgaatgaaatctcagagctggggccgagatccgccatggtgaaaacgcgaaaggagaagtgagactcagaagaagcagtggttgagaaaaatgggtagaagaaaaagaaggtagttacatatagaggttgtgaagtaaaagagtgattaagaaggaaaggtacatgaattaaaagtgagtattgatcaccattgaagaaaacagaagatgctcattaaggtcgggtaatcgggtaatttacacaccttatagctgtcgtctttgtctcccagtttttttgttttttttttttttgtatagggtagttgtgtatataatttattggctaattagtatttttcacctcaattttgacttttttttttcaattttagaaaaaaaaattaatataaatgaaaatttaagggataatttagtacatgtcaaaatttaaagaatatgatttggtagatatagggattatgtttgatggaaattgggtggttaatgtacgggaaatgcaatccccgcccccatccccgttacctatttatacccccatccccgtcccat

SEQ ID NO: 76994 - DNA, 773 bp, Cannabis sativa
gacagtgagatgataggatgctcattattctgctcaagtgttttctagttagtaatatgttattgatacaatgcattttggtatattttgtaaatgtttgtaaaatcaattcaggatcccaaagtttataaactttatagtgtataattagtaaagtttatatttattatgaaagtttttgttaattttttttactaatccttttaattaacaaatattagcacaatgatttagaatttattgtggcgcgcctaaactagtagagcgtgacagtaaaagactaaaatatgtacaactaatgaagaataagaattatttatcaaaaagtaaagaataagaattggagtctttttttagaagcattttttaaattacatatttgagttacattattgaaatttttttgatccccttacacacactctaatactctttatatgaccacttaagttagtcttaagtgatttttttgaagtttttcttagttatataggtatatactatttgaaaattgagaataataaaatgagtattactattgggtactaatggtgccgaacactttctataggtgacactatacgattagttagcaatattctctaaaagtaattttattaagttatatgagaccgatacttaattatactaatagtagtatgtgattgatgaggccatgagggtgctagacaccattggtgtcttttaacaattctctaaggactcgtttggaacgccgtattaggtcatattgtattgtattgtattttatg

SEQ ID NO: 76995 - DNA, 974 bp, Cannabis sativa
ataataataataataatgagaaattgcgatattaatacataaatttgtaagttgttcctactatatacccaaacctaattaatagcgggtaaaacactcaaaatctcatttttaacgattttgtgtttagttaattggtaaggtaggatatgtagagggcttagattaactctgtctttttttttttttttttttttctatttcacttaattttttaagaaattaaaaaacttgaaaattaagaaaattttaatttaatctcttaaaaaccaaataccattctttcaaaaaaaaaaaatccaaatacaatttacctaaagtctaaaacttaaaatatatatatatatttagaccaagtttctctgaagactttcaccttcaaatagagaaatcgaagagacctcgaaccttttcagagaaacccagtaccaaagtgttgtaaaaaagagaattcagaaattaaacatgcattttctgtattattgaatgaatcaaatgaaagacatagcagaaggaaagttcttttatacaaaatatgaaattaataaagcctctccgactaacgggactaacctacatatctaaagacttatctccaaacaaaactaaaaataatgatatcttgtatatagtatttttttaaaaaaaaaaaataaataattggtttacggtagatatttttatgaaaattttattaaaataatagtaaaatattaatttatagatttatactctagtttatagatttatactctagtaaaattttaaaaatgagagaattaaggagatttgagaaaaatagttttagagagattttaaagagtcatgtcaccgcttcattcttcttctttatgtatatataaattctaatttttatgctctatttgtatcactatttttttttttgaataatgattaaatttcattaaactaaatcattcaaaactaaggattcaaaaacaaaaggtaaggag

SEQ ID NO: 76996 - DNA, 932 bp, Cannabis sativa
gtcaaagatactaattccctaaaccactatttaaggtaagttaattaagacaatatatgatatgttttgacttctaacaaaaaaataataataatagcaatgaaaatgtgctcctttaatcaatgaacaacaaacaaccacaaaagtgaactacaagaatgaaacattaatgactctaaagaggtggcttttgactaattggttagattttagcattaatatttattatttattttatatatatatacattaatatttactatttttttgaaataaaaagcgtttatatcatagattaaatggattagacctcgtggtcgttacaaattatattgtcaggtagataggatatcgggatggacccaaacacctgatgagcaaacgcccatctagccacattatgggcagcgaaattacaattcttactaacataagaaaaattacaactaataaaagagggagaagacttagaacaaaatgagacataattatcaaggctccaacgagaatccaccccattgagagcattgataaccaccctcgagtcactctccactattacaaacttggatccgatttctacagctacagaaacagctaaacagcaggcagccgcttctccacaaataacctccgagaagtcttcccgagccgtctgaactctaacctccgagaagtcttctccacaaataccccagggagaggagcgccatagatggaaagccacatcgcaggagagaaaaagatgttcaaaggattcctcctccacaccacataaggggcaactattgtcctctatatggaatctcttgccaatcaacgctctcacaggcagagcactggaaaggatacaccaccacagaaccttgtgtcgctccaaaattttactattccataacttattccagagtttcggagcaacctcacagtga

SEQ ID NO: 76997 - DNA, 925 bp, Cannabis sativa
tggaacatatagagcattctattattattatattattaatattattactataatattttattttttatatataaaatttaaaactgattaaggtaaatatattatataggttatacgtttataaacaaaagaacgaacgaaaacgaaaccctcgtccttcgtcaatttttttctcctcctatatcttttttttttattttcaattcaaaacatagcgatctaagctccggtagtagcaggatagtaaattctcctagcagaaaagattaaggtaagatttaatttcattttaagtttaaaacaattagtttcgtataggagtttttgtgaattagaatagttatgaaagttctgaccttataggattattctcgggtagtcatgagactagttttgatattttcttactgaaattgaggattttgggttagaaattgagtttggaacttcttatagcttaagtccgaacattagtggcgtttgccaatcgagggcttgattttagattttattgtgtaagtatggtagtatgtatagtatatatgtgccctataaagtttgggatagtttggatagctttcggtagcgtttcagtgaatacataaacttaaaaaatcacatttttaccttttgaaaaaaccggtcaaccgattttgaaaccggtcaaccggttctggccaatcggtttaccgtttcgggcaacctcgggaactcaagaatcgtatttttgccacaacttttcactcgggtgtcagttttggatgttctatatactgtttcaaagcttgcgacgagatctaccatatggtgtatgttttagagctaaaatataagttttattttaatgtatttgagctatggggtttggtaggaaaccttaggtcgtcatttgcaactgttaagcagtgttttgggataaacactt

SEQ ID NO: 76998 - DNA, 574 bp, Cannabis sativa
tatggtgtcgagaaggggtgcatcgcacgaatagaccctcaaacaagacgaggtcgcgcacagatttagacattctgtgtctgaagacacgattagctccacgttcggacacgatgatgcacgcccaacaccctgctagcagggtcttttgcgcatggatcagcttctaaatcctctcgtgtgcacacgttgaaggctgccatcatcctgtccctcggtagccaaggtgctatgcacctaaaattcgatttttgggggatttttcaacaaattttgaatttttttcaatttcaaatcttaaaaatctaaataaaatataatttttaatatttaaacctaaatatcaaattttttaaattaataatatttaattttttaatagattattattaatttgagatattttgaattttaaatctaaaaattggttactttatttttaaataatggttattttttaaaaatgagttaatttctttgaatttacagattatttaattacaaagatagatattttaatatttggtatattttaaattaaaaaatagcattatcattttaatttgaaatatta

SEQ ID NO: 76999 - DNA, 847 bp, Cannabis sativa
gtgtaatttatattttttttttggttaattaaaattattattgttatatttaattgtatttggacataattaatataaattattatttataatatataaaatttgaattagaataattaaatattatttttgtgaagaaaaatatttaatatagtggtactttttgtgtgtcactatatctcaaaaaaaattaataataaaaaaaaagatatagtgacacttcatgtgtgtggctgttactgcctatagtgacgcgcaaaaaatgaatgtaaaagggttcagtgacacgtatgaagtgtcactaaaaactgtctttccagtcaccctcattagtgacacgcgttgaagtgtcactatatagttttagagttactcaatatgtgtcactaaaacccatttttctattaaaaacttaacatctttctttctacacttaaaggttcgaacactaagaactgaactcaaaaatttcttagctaaatctcaactacaccaaatctaaaactaagaacacacaaatacaaatacacaatatcaaaaatacagagatttaaatgagaaatacaaatagaaaaatagtaaagatgaagatactaatttgatctccgagttcacttaatgttaccggctacttctccatcaagctacttcagagcttgaatccattcaaatcaacaatatattataaaagtatgatttacaactttgatttctctcttcatataactaacagatatctcttttatttttcattacatgaacaaacaaactgagctatacaaagctctctctgaggagactctctcacaaggcttatctcaaactaaagctctctctctctctctct

SEQ ID NO: 77000 - DNA, 1185 bp, Cannabis sativa
atcaggggggaattcttctggggccctcagctttaggacgaaacgaggaatacttaaaccgcatattccccaaatggagcaatcccatactggagtctgtcgcaagtatcggactgctcttctttcttttcctagtcggattagagctcgatctcagctctatccaccgtagtggccgcaaagccttcggcatagccctcgccgggattactctccctttcgtttgcggcatcggcgttgcttttgtacttcgtaaaacagtcgaaggagctgaccaagtcggttacgctccattcctagtcttcatgggtgtgtctctctccatcactgccttcccggtacttgctcgcattctagctgagcttaaactccttaccacggaagtaggggagactgccatggctgcagctgctttcaacgatgtagctgcatggatcctcctcgcgctggccgttgcactagctggtaacggagacggtgagggtggaaaaagcccattggtgtcgctctgggtgctgatatcaggggttgttttcgtggtgtttatgatgatggttgttcaaccgatcatgaaatgggtggccaggcgatgctcttcggaaggcgaggtggtggacgaggcgtacatatgcttgactctggcaggggtcatggtgtctgggttcttgaccgacctcatcggaatccattccatatttggggccttcgtttttgggttgacgattcctaagggagggaactttgctgacaggctaatcgagaggattgaggacttcgtgtctggcttgctgctgccgctttacttcgcgtcgagtgggttgaagaccaacgtggctaagatcagtggtgggaaggcatggggcttgttggtgcttgttataaccactgcctgtgctgggaagatcatcggtactttcgttgtcgccatgatggttaggattccagttagggagtccctcacccttggtgtcctcatgaacaccaaaggcttggttgagctcattgttctcaacattggcaaggagaaaaaggtcagtttctttattatattataatttatttgacaaattattattcacattgcttaatagataaataataaaaggtacgtactcttggtaggtgttaatattgttattccaagcaatagcggcggaccaatagcggccgaggtccgccgctatt

SEQ ID NO: 77001 - DNA, 1603 bp, Cannabis sativa
gtcatatgttacatgttattagtttattacacatatttaatctatatattatattattataaataatataacagttattggtataattaagtattaaattttatatgacataagaaagtagcttttaaaaaaatatcattattaataaattacggaaaatgaaaaagtatagaataatactagtacttaataacaagactcattgaattaatattattaatttgtagttataataagtcaacctattacttttaattttcttccatattgattctatatattttcacttttgactacaatagttaatgtgtttacttaatttaattgttaattgaaagcttgactttataataacgacttaaattcaataattttttaaaaacataaatacttaatattaattaaggtcagattttaaattattgagtttgaacaaaaatatgtatatggtattattaatttatacttctaaatcttcctttaacaaataaatctaattttaaatttattaagacactaatagagttggtgcatgttaaaaaaaaattattggatctatatatttacgaactaaaaattttaagtgtatgccatgtaataattgaataaaaagcaagaaataaaaaaaaaaaaatccactaattaactacgttattgtgtacgcaaatataaacgcatgcactaataaatttacgttaatcacttaaaaattacaaataataagaataataataataaaaaaaaactttattaaggtcaaaaaaggttaagcatacacggcatatataatattataaaaaaaaaatgtatcatacatataaatattaatttaaaatttaaaagcaaagatgaattataatggaaacccacgtatgcatatacatagataattaataatcttaattatttattttatttacttaatttaaatagagaacaaatcgttacatgactaacaaattggatcaatggaccccatcgatgtaattataaagattacaaaagaataatcatataataataaaaataaataaatttaatgatgatcgacaatatgtcatcttctaagtatatatatgctgtttaattaactatatatataatttaataaattaattaaatgagtgattaattaataccaccatgaccatatcaatggcgattgcccataatataggcttactaatggccatctcctggacttggtcctgaatctttgactcctccaaggatatcaacattagtaaacttgtgtccctcatcggggctcggtcccgactctttaattcctccaagagttttggcgttagtaaatttatgtcccccaccaccagagctcggtcctgagtttttgattcctccaagagtcttggcgttagtaaatttatgtcccccaccacctgagcttggtcccgagtttttgattcctccaactgtcttggcgttagtaaatttatgtcccccaccaccagagtttggtcccgagtttttgattcctccaactgtcttggcattagtaaatttatgtcccccaccaccagagctcggtcctgaattttttattcctccaagtgtcttcgcattggtaaacttatgtcccgcg

SEQ ID NO: 77002 - DNA, 733 bp, Cannabis sativa
aaggtgtaaaaggttacaagctctttgatataaataataaacaaatgtttgtatctagaaacgttgtgtttcatgaaaacatttatccttttcaaaaactaaacaatgagaatgctgatattgatcccttttctcttagtattattcctctttctgtaacaaatgacatgtctggttgtgagtaccccacaggttctaacaatacctcaaatggtgcaaatcgcttggaagacattagcaataactcagatctaactgaggcagaacccactcctgctggtacaccagcagttccaccacatcatgttgctgcccccacaattacaccagatttttcacctgcaccagcagcttcatcaccacaaataactcaggaccttccaagaagatcgagtagacaatcaaaaccacctggctacttaaaagattttgaatgctactcactcatccaagatcattcttcaactccccataagattgataaattcatttcatattctaatttatctgaaactcacaaagcttttatccttgcagtttcatccaacaaagaaccgagatcttactttgaagccatacaaaccttggcttggttagaagcaatgcaatgcgaattaaaagcactttcagacaacaaaacctggtctatagttcctcttccagccaacaaaagagctataggatgtcgctggatttataagattaaataccatagtgatgggagcatagaaag

SEQ ID NO: 77003 - DNA, 2702 bp, Cannabis sativa
  modified_base (2629)..(2655): a, c, t, g, unknown or other
ttgctttattaatattaatttacaaactcttctagcttagtcctataacaatggctactttctcatttctcttattctcattccaacccaagataaagataatagaagaattgaaagaacaagtgtccaacaaacaatggagccccaaatgtaaattccaaaaatttggctctttaaggttgctccctttgttgcttcctaggtttaatgaaatgttctagtaaaaaaaaatcaaatcaaatttaaaacaatatcaaaagagttcaaaatcgtatgtatattcatttcatgattatttatattataataaattaacataataacaaaagacattagtaagattaatatagaagattaaaatacatataaaagataatgaaataataagattgttttttttttttttttgtctttttgttatttatttttttagaatttgtaattttttcacaattttataactaaaaattcttgtggccaaaaatttaaaatagtaaaactaaaaattggaaaaggaaacaattattcacacacgtgtatcaattatataaaattccattaattatgataaataaaaagaatattaattatgataaaaatgttaaaaaaataaataaaactaaataactttttttctccatttttttcttcttcctcaagaagcccgattcttctgtttcttcaaaaaaaaaaaaaaaaaaaaataaaacaattagttttattattattattattttaatatttttattattcttaattaatttttataatatttaaataatttatattacgtgcaccaattaaaatttgcagccaatattcctaaataaaatatttagtatatatttatatgggaagagtatataaatggaaaattcaaattacccatttcatttttcgtaccaaaatagaaacaatggcagaaaaaaattaacagagagctttacgtttcctctttcagtattcctcaggtttccatggaagctttgatcgagctttgcgatctcattgtttataacaacccataaaaattcatcaattaaatatatatatatatttggtaagatatcgtagcatttattgagggtctataattaagcaccacgcacaaattacgtggaaaaaattaataaattggttaagataaactttttaatttatatataaatctagaattttaacctaataaaattctcaaacaaacccattcttcacttcttaatcaagcttcaatctctccctgtctcgtaatttttggtagccttgtaagttgttctacacctataatcatcttatttaattgtgttctctttgttattatggttgagtatgtatttgagtttagacaagatattggattttttgtgcgtggagatgggaagaagattactcactccaatcatcaaactctccacaccaactccctctctactaatgagtataataatcaaggtacagtagaacctctatttaaaaataataacctcttttttagtgtaactctatgtataatttatattgttttactgtatatatatatttgaattgtaatttgttgagaatcatgaggttcaatctcaaaaccaattagcaatgagtggagtaactatgttcttatatatgactcaatacttttacatttaatctatgtagacaatactctccaatatcattaatctcttaattaatgataaaatctaatgatttagagttttgaatttgaacaggtgcaatactagtcgaggaagaagtagatagatttctactaattcctgaagaattagtagagcaaattttattaaggttggacattgactgcttaataatttgtaggtgcgtttgtaagtcttggtttaatcttactaatacttcattgtttgtaaacaaacatttggacattgttcatactagtcagaagatggtgtcctttgttgggtacaatcaagatgatgatgatgaagaacccactctcaagtttgtaactagtgttggtgactatgttattgaacaagtactaaatatttctgaaatgaagcaacatcataaagatcttccttactttttacaactctcccattgtaatggcattgttcatatatttggtctccatgatgattcaactgttttttataatccaacacttagaaaatttaagttacttcgaggacccatttgttttccacctaattttgtagaagttgttggaagtggatttgggtatgattctaaatctaatgtttacaaatgtgttaagatcttttgtaacaaagattgtcgagacctcatagctatggtccatactctaggaactaataattggagagaagttaagattgaaagagagataatagaatctatcccaaatttaaataatagtcatttgagaggcttgggatcaatatatgttaaggatgctttgtattggtgttgttattcttattcaacacaaaaaggtttacttctttctttcaatatgtccaatgaggtattttgtagcatacaaattcctcatcacgtggtggagcaattagattgtagaagaaaattgatgttggtagagtggaatggatcagttgggctttttttttttggggtcaaggaggctaataattgaggaaattacactctnnnnnnnnnnnnnnnnnnnnnnnnnnntttttaccttcttttttaaaatctatcatttttatctctttttttaa

SEQ ID NO: 77004 - DNA, 687 bp, Cannabis sativa
ctaaaaccctaacgtatggtataatatctttgtattttaccaaataaacaatctacataagaaaatattttctaaaatttaactattagaggtgctcttaagatttgagtaatttgcaatgtaactatacttaaatataattatcggttgtagtaaaatatattttgttaagaatttggaatttttgtaagtgtttggtcattaagtgttaagttaattatcgacgtattaccttgtgattggttcaaaactgagagttataagtaggtttttatctgcaaccgaaaatttcaaaacctcaaaatatatttttacctaaggaagttctagaaccctaatagaaggtatttttacttacgaacgttttagaatcttaagatataaatgctagaaggtgtttattgtgtctaacaccaatgtgagatgccatattgttattggtgtacttatatataaattagtcttatcttatagtggtgtatgatactattaatgactaataacaatattttacacgatagggttgtaaaaaattaacaatatttttataataattattaaattaattatgtggaaactgattttttcgaaattaggatattttctttgtgaagagaagtacgaaaccactaaattatgcctatgaccattatagaaactaacatttaattttactatataatattt

SEQ ID NO: 77005 - DNA, 732 bp, Cannabis sativa
taactataatatacacgaacataacaaaaaattaattaaaaaaatcgctcaaataaataaaaatataccagtgtatcacttttaaaaagtgtattgtaaaatttgccaaaatcttacccgattttgttttctttttcttccctttcctgccgtaataagtaacgtaagtttaagttgtggcaattgacatgccatccgtccgcgtaattatataatatagattcttattgtgttgccacacgtgtatcatatgctgcgtcttatagaaaacactttgactgtagttttcaaccaaacttccaatttatacgctttcaaaattcaaagtccttatattctattataaaaaaaaaatcagttatatatatttttaattgaaaaataattcatgtggtgcctagtatgtttgtgatgtatataattcaatattatatctaatttattttattataataaattttataaaaaattactcactaattatagtcaccgttttttgtaatgttagacacttatacttcctattcaagccatgaccgaaattcgtatttccaatgcacgagtctatgttttagcagtaaaaaaatgttttgcaatgtatttattatttttttttgatggaggtagggctgttcatccgatccaatctgtatcttttggtcaaacaacatccaattcgcactaagtgtggatttcatttttttggatccaatccaatccgcacaatagctc

SEQ ID NO: 77006 - DNA, 1026 bp, Cannabis sativa
aatggatttgctgcataattctctgaattgatttggcattgtttttgtgaaacatggtgttgaatttgcaggatcacaaggtggccgggatggaagttgagaggataggagacaagtaagtagcctgctaatgctatatgctggacctgcatgagggtgttttaaaggcgggcatagaaggaagaggaggagaagaggctgcatttgatagtgaattgcctctttaagatgtctcacctactgatttttcaggtactactattgtatgtgatatttcatcttatctgatgctttctttctctttttccctctctcacgcactctctatctcctatattcatgatatctcaatattttttttgtttctccaatcacacaaaacacaaatatcatcactatcattgtcatcatgcattatgcatacctttctcaaattcactttgttcagtttatgtgtctgcatctgaagacacagttggattgtgaaatattaaaaagttaaaaagacaagagagtgatacgattaggctcaataatcagtacctttatggtgataatatatggatgttgactgctgattctcatgtcacctaaggaatcactgcttcaaattcaagtttttcttctttacttaccgcagttgtttaagctcaatactaattaaataaatatatttaaatatttatctcagttcttcatgactgctctctgattttgtttgtttatacaatgtattatcaaggaagacaactctgtgtgatgtaaaataacaagttttcataaactagtgacttttatcgtccgtaacatgatactgtatttctatatagttaaagaataaataacttgttaaaaaaagaatgaataaaaattgtagaattaataaacattcctcactgttattaaatattagttagtgccaactggtttcggcaagtagtttgttctttatgttagttaatagttaagctcttctatattctgttaattgatgtaatcgacatagcttagtctatagatacttag

SEQ ID NO: 77007 - DNA, 2380 bp, Cannabis sativa
tacaatggaaacctcttccatatatatatttgaaaaaatcatatcttatatttggtatctcttatcctatagtttctaatctatatttaagttataaatatgctatgtcttacagaatacaatttatttattaatttctactactactacaaaaacaggtatttttatcaatttttaggtgacatttaaagaatttgcatcagtctagaaaactgacatatatgccatagtcgcaaataattttttattagcttcctttttataatgacgccaaaaaaaattctcttcattcaaaaaccgacacaatatatatactgttcttttttatcttctgcgtcggtttggagatgacgcaaacttgtttgcaccatttcaaaacaaacactaaaaacttataccgttggttataaaatgacacataagttgttgaaatattttttttgtaggtaaaggaaaattgtagatttttatgcattttttcctacttgtatttttaaattttagaatgactttctataatagtaaatatataggcacaatgtataactgaaagagagaaattcaaattagaggtaacgtataccaagatttcaatatgattgtatcatacttgtaaacaaaaaaaaataatttggagatgtgaaatttatttagaaggatatagagttgccaaaaaataaaattagagttggaaatcaaaaaaaaaaaaatctacaaaagataagaaaggactagactaaaaaactaaatgggaagtacttcattcttcatcctccttatctccatctccaccagaagccttcttagcaactgctttctggttctttcgcttcactcggatagggaggccacctccaaaggcacttgtgatagagaagtcaataagcttctgagagttaattctcataataaatgatgagatattgactacctgcctctcaaccctcagaagagcaaaagtaacgagtatttgtaagatttattattattatgtattattgatgaaattgcaactaactgaaacacataattaatttcaagattcaacaaactatttcattcaaaagagtaaatgtaaccatcattctaagagcaaatgtaaccatcattctaagataataatctatataaatgggatgtaactaggtaaagtaactagtctaatgtaagattttcttacacatggaagcctcagtgagatagaccactaactacagcaattataagtcatccacaaaatataaagcacacaaaaaaagttttataaggccacaattttctctaaaattatcaccaaaaaagaaaaagaacaagaagaataatacctaacctaacacaacttcacttgttctaaattagacaagtaattaggataaaagaaacaaagcaatatatgaaaaaacataaatggatggtgaaattgatacctaatgtggctttccttatgaaaagcaaggtggatggacttagccagcaggcttgaaaacagtttgcaatcccttgattaattcatggtcaagcacatgcttcaaacttttttaggcataagggcgtaattgatcattcattgttgcagattcaccagttgctgaacacagagagaatagtcaattcaatcaatcctattcatccagggtgttgcaataaaattaaaatatagtagagcaactgctcgagtttaacacttcatatcaacccaataattgcatcagtaaacataaaaaatagactagccattgtatcattttagtttaatactattatatcattctttatctcctattgatcaagaatcaattattttcttttgcattaattaacatggaaaaatattaacgttattttaatactcaatcataagctatataaaatcctatgtttgctaggagttagctaaataatacaacaccataagaaacaaataccattgacaaaagagatccacattgacaatacagagacacaactgagaagacaattaacttaccatcgacaaaaatagcaagtggtggatgctcataagaaaatatggtggagaaacatcagcctgagtatcttcaacgattggaatccaagactatcttcactaacaaaatatttaatatttagactagttcataaaaaacaaaatgaagtcttcttcatgattcaaactttatactaaagcaaactttgcaattttaccactgtctagttatctaaaagttctcaactactgtacttatatatttagaaaacaagttaaacactgccctgcaatacaattaaaattgataattaaaataggcaacgtacttttaagactatataggtttgaataggtacacccccatcttaagaaaaggaaccaaaaggaagaaaaaagaaaaaagaaaagtta

SEQ ID NO: 77008 - DNA, 526 bp, Cannabis sativa
atgtgaccttaaaaataatttgataaaaaaattatttgggataataaaggtactttcttttttaagtaagagtattgtaaaattttcttttttttttattattttaaattaaattaaaatttttaattttgtaagagaaactaaggacaagagagagaaaagaggtgagtgtgtgataaacgtaagaatttctccaccacccactgggcccattttagaatattctgagtatatttagtttgattggatgtttaatatacactacttatttattttggtatcataagaatttaaaataatttataaaattttaagaaattcagaataatttataatataaaaaatagtattcaaatagtctattttacatgcgtgtaaaataaaataatcacgcgtacagtataatgtttgaatttatttttggcatattaaatttttttgaatttctcacaattttgcaagatgtcttaaataaatataacgtacataaccataagaaaagttttaactaaaaaattatttcaga

SEQ ID NO: 77009 - DNA, 1273 bp, Cannabis sativa
gtaatcgattcccacttatgcttcatttcacctagagaattagagtttatattttgttatgccacaatacttcactcacaacttattgggctcttcgttgattgaggccattcactgaactaattatatcacaggggtcttttgaaagtgattctgttttattttattttaatttaatctttagcttaataaggtgtcttctttctcataatcatgcttaggtgttgcaactagtgttgtaacaattattgttgtgttcaattaattaatttacttattcattctcttagcttttctgtttgaacttaacaattcatattcatatccatgcttaggtattccataacaacaaagaagaactttatctctcactttattgttggtattgtcttatttttttatgttgttcaacaaatttgattttatttttcaattatagcatatctgagtataattataattatcaatgtacatcaacattgttcttctttttatttcatttaattatatcaatattatcatttgatcaagagtgcctacaattttatgatagtacaaactttcctagagattacctgtaatttttcattttctgtgaaaaagtacaataagaattgcaatcccaacaggaataatcttgatttttttccaattatttattattatattaatatattttctgatgtgcgtgcatatctacttaataatatatgcttataatattcctcattcagcataaggctgataggcctacactaacctttgtctacagtcgaaggaacagggtaagtaatatagacagcaccacagagaagtaaagggtgagttggcaagttagttgtgtgagttttgattgtgtgtatgcttttgagggtacacccggttataggaataaaggggtttttgtttgtatgagagaggtgtgaagaatttgacttgtttgtaacctttgttgggagagatccaggctctcgaattcctgggtaacgaatagaaggctattcagccatttttcatcaattctgctctattttcttcttctttctgcttgttgttgctactggtttgacaggaattcctatcaaattggtatcagagcattgatctcatggggtcgaaaaaagacatgggtggtgaagccatggatgaacgcttggaagctctgcaatcggaggtacagaaggagattgcagaggtgaggtcgcagttggggaaagaagtgtcggagacaagatcggaagttcagtgccttccggagatcatgatggctcag

SEQ ID NO: 77010 - DNA, 2247 bp, Cannabis sativa
actaatcagattgtaaagagtttaatttagggcataaaacccagcatacgatcccacaagatatgtatcgttggtggaattagaaaatagacgactttgacagagattggcaaagtcaaatcagagaaaatgttgagttggaacgtgaggctgcagctgcaagagcgacatgcaatgatgcacctcttaaccaaccaaacacatccacaagatggcctcggggaagacatagagggtcaagaaccaggagaaatgaggaaactcctattggagaaaataaccacaaaaatcccacgaatcctcaagatgatcaaccagggaatacgagggatattctggtggacacataagatccacaaaatccaagaaacactaacactagacaaacacgggccaatgatctagtgtcttctcgtgataacatgaataatggaaaaatgaaacctggcaatttaaagtcatcttatatgaatgctgataccagcagacaaacgcgacatgatgatcaagaatttactcaccgtaatgagaggaatccaagtagactacatgcatcacggcgtccaccatggcacctgcgggggccaaaccaaaacgaaagagatagcatgtctacctactttagtagggaccgcatctcaaatctcttccagaggtgtaggcctactcgggaagattcccaagaaaaaaaaatcaagcacttatcgagtgggtcaaggacacatgatcagagtaggtcgaccagatcacgtgcaagggaaaggcgaacacgaagagaaggaaatactcgtcgccattatcatgataaacaagaaagcatgagtaactaaaatctctctacaatatcagtcagtagtgcaaggcaacctaaacctgctctctgtgagcatctaaaccgtagacaacctgacttgcatgagtagctgaatcgcaatgtttgagatctcaaaggatgattaaatcagcagcaacaagtcgagcagcctgttgtggatcccactcaactaagggttacatttagcgactcaatgggctccgccacaagctagtattattaggataaatgttgatgttgtggttatttgtcgtgagaatatggctagcctgggatctatggctagagatgatggaggaagagtgttgtttgcatccgctatttatattttgcaaggactccaaaatagcagagctacacaccattaaatatggtttgcatatgggaatcaatagaaagatgcagcaattttaagtccagtcggattgtttacaggtggtgtagttaataaacaatgcagaaagtggatgcagagataatgatgggctggtgcaccaatttaagaatcttgttaaatcattctaatgtaattgatttgttttttgtttataaagaggctaatcaagtagctcataagttagtaaattatttttgaccactaaagttagtgttatggattgaggttagccccctttgtgtaagtcatgttgtactagcccatttgccttatcctgtgtaatttttgtttatcaataaattttatttcaaaaaaataataaataaataaaaagaagaaaaaataagaaaaatatattagtcattttgtcatacaacataaaaattagtatatatttaatagagttgtaggaggaagatgtatatgatttaagctcataagcataaaaattcaatttgttttggtaaataccatttttgacactatattttgcaaaagtcactaattagactctcagctttgttaaatgacaaaacggaatttgtatattcaaatatggtataaattggaccaaagcttattttttgataattttttttttttgaaagaaataattttttttaatataactaacttgaatacaattcttaaacacaaaaagagtaaaaaatttaatcacagttttgtcataacacctctaggtcggattattattaagttttattttgataaaaaatcaattcaggatcctatttgtatcattttaaaaaatacatagtttattttgtcatttaacgaaacaaatgatctaatttataacttttgcaaaatacagatctaaaatggatttgcttgtacttgagttgcatttaatactttgtgccattgtttttataatttttttttatgggtatactcaaggtaacaaaggtttttcggccctcaagcttgatatgagcaaagcttttgatagagttgaatgggattatctgtctgcggtcatggagaaaatggg

SEQ ID NO: 77011 - DNA, 555 bp, Cannabis sativa
tttaaatttgatttgatttcattcatattctattcattcccatttctattcttattcttatttttttatttcttccaaccaaatgtcaccttaattagttaccctactttttgccattctttgtcaaatttgtgcataatttatatgttcacgattactaaatttttttgtctaaacattcgaaatcatttttgaatgttctctggctatatagtaaatactataaaaatatttacactatgcgaaataactttataaaaaaatttattagtaaaaatagcctttatgaaattttttattagcaaaataatcttatatggtcgtaaaaatgaccatgaattataccataaacaaccattatgattacaaaacggctataaatttatattgtgctactaacatggtcgcatagagtaaattaaatgaagttattttctaaattttagtatttgatagtgttagggccagtttggcacaactgtgttgtggcgaaaaatagttgtagttgtgttgtgagaaaaagcagttgcagcagaactgtggaagaaagctgag

SEQ ID NO: 77012 - DNA, 543 bp, Cannabis sativa
  modified_base (254)..(254): a, c, t, g, unknown or other
aacgtgatagtatgtcactattgctaaccctatatatataattgttgggttgggttagttataatatattattagctagggtttatattgtcaaccaaaatgtattttaggagagctgctttataatgattttttaaattttataataataatatgagaaatgctaaagggcattactggtgcctaacactatcctacgtgtcaatatcgctattggtgcaattaagtatcgggtcccatatagtttaatatantaatttttatagagtatcgctagtcaattgcaagtcgacacatttagaaggtgctaggtaccactggtgcccaataacaatatatatatatgcttttttttttgaatgaaatatatatatatgctttcgtcatacgtgtaaaagtgattttttttttcctatcttgttcgatttttatttgaaccctcacaaaattataagtaatatttttaaaagataaatttaaatcaattttaaaaattaaaaaataactctataacattttataagattatcttttttaaagaaa

SEQ ID NO: 77013 - DNA, 545 bp, Cannabis sativa
aaaaaaaaaaaaaaaacaactaactattgacaactcttaaaacataattatctcgtttttttgaaattagccttgtgaatccctaacactctagccttcactatagttttaatctcattactaagaataaaggcagagttacaaacaacatcaaagatacaaccattcctgtttttccaaatcaaataaagagcaactaaggtaatcacattcaagattgtaagagacagatcagccttaggggacagatgcctttgctgaagctcgcagaggtttcttggccagtttaaacaccccacccaactttttaaaatctcaaccagcttcttagtaaagatgcaatctatatgagactctagagcactctcacaaaccacatataagatcgaagggatagaaaaaattctactcaaatgatcttgagtaagaaggtgatcattgtagatttgccaataaatgaatatatgcttagagatagttagtttgtgccaaattgtagcagagtaagaagctttaacagccccaatcatagcattgtagaacct

SEQ ID NO: 77014 - DNA, 1408 bp, Cannabis sativa
aaatagaagctggtctcttttctttttcatcataacaattttttatccatcttactaaacataaaactaaaagtataattaagaaaaagaaaaacactaaacaaaaaatatcattacagtttgcttctcaaaaataaagtatcatttagaaaaaaaaataaataaaaaataaaaatagggattatttcacaaatatggtaatggtaatggtatagaaaggcccaataaggacgaaaaggtccctccaaaactgagctagcaaggtccaattaataatggagagaattatgggcttgttgatgcataagtccaatgattaagatccatgcaacttatgttggtgtcgtttttgagaagttccacggcttcttcattattctttgtcgttttacgaatgttgtcgtttctgtattttcaatatatgttttttaaatgaccaaaacttcattgatgagaataagaaagtacattggttaggaatttcttttacctaaaataatttccttttccatttatctgtaatttatattttgttaaaacatatggtactatatcattgcacattacaattgaagatatacatctgaaaaatacaaaaatttaataattctaagcatacaatcccattgagaaacaacctgggaaaggaaatatacaaaatttacaacattttcatcactctaaatataagaaaaaaaaaaaagaaacaaattgcaaaaccttttccacaatcatgaactactagagcaccaatcacaactaataaatacatctacatttaatttcaacaatcctacactaggagttttctagtgatttaattggaaaaaaaaaaaaattaattttggtaagttgcagtttctaaactccattaaaattaataaaattattaaattaaaatatataaaactaaataaagaactttcaaaaaaaaataaagaagaagagtagtactactctcagtggcagaaatatacaagagaaaatattattagttaaattaaaaccagattaaatcaattaacaaacataattaccaaaattattaattatgaaatacagaaacacagatttaagaaacaattaaataaaatgtatatataggtacgaataattaaaaacatctgaggacgttgatgataaaatggaacaaataatttggtgggtcgataaattcatgttggaccaaccgctctaagttgagatttcgtggtagcaaattactgtaatataacaacgttgtgatcgtcgatgttggtcgagtcaacaaccccatcacaagtctaaccactgattctaccataaacggcattacaccactctacaaaattaaaataaaaaataaataaaacccaattaaaatatacataaaaatcaattaataattaccttaattattagcatgcat

SEQ ID NO: 77015 - DNA, 2272 bp, Cannabis sativa
aaaggtgaatttatttttaagtttcttgtaatttcagggtgaggcactagttatgggatatgatgacatggggtaagttttgctttcgtaagttttaattatttttcttctttttaaaaggaataataacagacaaatgcattagataaagaattattagataacattaaaacaatcatcactgcaatgcaatgaagtgaatttcatgtcagcactaaagaaagtagagacaagaaaggagtgaaaaagtgtataacggagggtggcgagtctaacacaatggctgctttctcttttttaaaatgtatttctgatttagcaataaatagggtgcaatagcacattctttttttctcccctcaccctttattccaagtaagcctccataaaattcgaaaataataataaaatatatcttttcacgccactcaaattttgaataagtacaaaattataaataaatataaaaaatattgtaaaaagttatttttacacctcttcacatcattattattactattaaatatacaaacattactcttaataataaaatattgtattatgtgttcatataacagtgttaaagccaacaagttattattataaataataataaagaaccactgcgattaacgtaattacccactacccatgataatcaatggtgtcatactgtcatatcatgatatttatttttgtcttttacctctaattttcatggcttaatttaatggcctttctttcccttttgtatttttatttattcctagggccagtctaagacaagtaggctctgtctctttttcaaaaaaaatctatctaaagtttcttttcaagagggacttgttgtcatgcattaaaactttgagtacttattttgtcaaccaatctatatatttagaaaaaaagaatatcttacattcatgttttgttcactcattataattttttttttctttcattaataatatgttggggtgtggtacgaactaggggttataattatgattatttgaagatatttattccaatatatataatatttcaaagtaggactttaactgatctgtttggcattcatacttgatgttatctttctctggaaacagaaaattccgaggacaaatctgagtgtttgatatttttatcatgtaacagcttgtaaaaaaatgttaaataataataataaaacgacttaaaattatgcgaacaagttatgctgtagaagaaattaaaattgttgtggaagatttcatactaggaagatctattccttcctaatgatttttcttttaatattcaaacaaatgtcctttgtattaacaaccctctctatttatagatgctgattacaaagtgaataatgcagaaaaaaaaagtactgttgttttaattctttcaattgccaaaaggcacttgtcttagacttccccctaacttgtggcggaggaaaaccatggtaacagtaactctagcttaatcatagaaaaatcaggaaataaaaatcaacagccaaagctaacataacgtatagtgcagcagcaacttccactttttacataagtttagaaatgaaaactcctcgaagtgtttagtcttaaagacccaaatagctgaccaaaatctgaccttctcccaaaagatcctctgctacagtcttgttaccttcgaaaatctgttctttctttcaatctaaactgcccacatcatggctaagattgcagtcctccaaagttttatttttcttttactcccaaccaacttgtccaacataagctgggtagagttgggcaacacccaagctaactcgaattcctagtataacaaagacgagagtttatgagtataattgcattccaggaacaaatgttctatagtttcattccattcctttttaatattcctcctctcttcggccaatacttggttccactcattgcttccttccattttatcaaggacctccaatcttctttctagtgaattattagtggaacgattgttgccgaaagtaatcttgctccataccaaaatattctactgtactttcttcaatttactcatgaatttagttcgaggacagcccaatcacaccgcctctctccaccacagttctaaattttggggaaaagaattatgttccaattattggttatcatatctgtacgtactaggaccccattttggtggattagaatcaagaataatcgggttatgatcaaagactaacccgacgagcatctcttgcctaacaaactgataggccatattt

SEQ ID NO: 77016 - DNA, 1140 bp, Cannabis sativa
aggtggttgattttggtcatcttttagcccaaatgggaatctgatattggggcctttctttgcacacttagcttcaaccacctccaacaacaacactaccaccaacaacatcatgcttgcccaatacatgattttagtcatctataattacaatataattgctccctctctctctctctcactctctctaagttttttcttttttttttcttcacccagtttgttcttattaaataggaatggaccaagtttttcttggttaattgcaacttaattgtgataagatccagtaggatagataacacaaaacttttgttgaagaccttccaggaaggacttattttgcggtggccgggtgggacttatatttcagtcttctatcagacttttcctttgaagtttcaaaacaaacttttagaatatctttttcaatagtcaattatttcacctcatatatatagaaaacttttatcatcatttgtgtcaatgtttaaggaaagagaacgagagagaagacagagttgtatatttcattacatatagaaaatgatatacagagtttatatacaaagagagaaataacagaataccaaaactaacataacaactctgtaacagaaatgatacaacaactaacagtaaaaccgttaggacagttggcacagttagcctatgtaacagtgtccttgacagcccccctcaaactgagtgtggatttagaatcgacacacagtttgcttcgaagatcagagaagcgcgagctggagataggcttggtgagacaatctgcaagttgagcctgtgcagggacatgtttgacttgtatttgattttgcagtactttatctcagacaaaatacaagtctatttcaatatgcttcgttcgggcatgtaacacaggattggcagctagaagaaccgtgctttgattgtcgcaccagatcgaaggggttgtaggacattgaatgtgcaattcgtgaaggagagactgcagccaagacacctctgaaacagcactggcaaggcttctgaactcagcttcagttgatgacctgcttatagtggcttgtttttgtgatttccaagtgaccaaatttccccctagatagatgcaataacctgtcgcggacctcctgtcat

SEQ ID NO: 77017 - DNA, 718 bp, Cannabis sativa
tggaagatgaaaagagaattccaatgtgattggctacgtggattttgattatgtcgctgatatagatacaagaaggtctcaatcaggttatgtattttagctaaatcaatgtacaatcaattggaaattaaatatctccaaacaattgttgcactcttcacaacagctgaatatatagcctgcacagatgaaatagatttttttggctcaaagggatctctaaagagttaggaatcgatcaaatgagcataatgattcaatgtgatagtcagagtgctcttcattttagtaagaactaagtattccataaaagaacaaagcatatcaatgtaagattacatttcattagtgacatacttgcaagtgacaaagtgaagctgtcaaagatttcaatagatgacaatgcgcagacatgtttaccaagtcttcctacagcaaaatttgatcattgcctcatatttttaaacattgtcagaaactaaattgtcaaagtctagtcattacaaagtcaaggtggataatggttatattttatatgcctttgtaatgaatcacatgcaaagacagttagttaactaagtgtgtagtgtgtcttagaggtatctagtcaataaatacctctctatatcatttgtaaatctaagctcattaagtgtatgataaagcttagtgcattattctgttcaagtattcttcctttatttctcgagtattgttt

SEQ ID NO: 77018 - DNA, 645 bp, Cannabis sativa
ggaggaggcacagccggatgccctttggccgcaactctatcagaaaagtactcagttcttgttctcgaaagaggaaatgtccctcaagctcaccccgatacgttggttgcatctggaatcttcactaacctcgtcgaagaagatgatggaaccacaccggcgcagagattcacatcgaaggatggtgtggagaatgtgagaggtagggttttgggaggatcaagcatgattaatgccgctttctattcagaagcggacgaggattttcttgccatgtccggagtggattgggacatggaagaagttgagaaggcttatgagtgggtgagaaagagtttagtgtcatattctaatttgtcagtttggcaatttgctgcaaaagatgcttttgtagaagctggcattggtcctgacaatggaatcactttagaacataaggttggagttaaacaatctggttctacgtttgatgagatgggaagaagacatggagctgtggagttgcttaataatggaaacctcaacaacttgaaaattgcaattcatgcctcagtcaacaaaattatcttctcctctaaattctcaagtatgttagatctaacttaattatatatttaatatttgtgtgtgttttatttatttatt

SEQ ID NO: 77019 - DNA, 591 bp, Cannabis sativa
  modified_base (391)..(411): a, c, t, g, unknown or other
ttttttttttttgaaattaaacgtttgggcaatacatattaaatgaatattaatgtcaaaaagatagtaaatgaatttgttcagaaataaataaatgaatatttattatattttaatctcttttaatttatttattgttaacggtggagcaagtaaaaaagaaaaatcattataaatatcaataaacctgaccaaacaatgcactgttcaactatatcataagattaactcgtagaaatagaaagttagagaccatcatgtatactattttttttgtaacaaaataattattttttttaggctaattaagatttttactcttgaactatcaaattatgttccctgaacttttaaggttgttcaaaatacccctaaactattgagattgttnnnnnnnnnnnnnnnnnnnnnatttcattcaattttactatttttagtgattgtttatatactaaaccatactctctagactttgatatctatcgaatcatgctcctcaaattttgacatatactaaatcatactccttgaacttttatccatattagacttctttactaaaattagaaaaaggtccttaaatccaacaat

SEQ ID NO: 77020 - DNA, 679 bp, Cannabis sativa
tcaaaagtttaaattatcacaatttttgataaaaccctttgattttaaaaggtgtgcactataattaaaaagtcactgtagcgtgcctaatcattagggcattacaattttagtatcagagccaccaggttgtctaccgaagactgtcaaaacatgtacaatcatcgttagaggaaagctcgactcagtgtttagtaagccttaacttgtttagtaagttatgtgattaggaagcataatagttttataattatttatttaaatgcattgccttaaaatctataagtgtggtacttagaacatatatgatcgttgtctgacctacctgacttatgggttcgcaggctaagtccaatagtatggatgctcagtgaaacataagaagtcatggtaacatggttgagattgggggcgatcaggaaggtcaaaatcctccaaacccttgtggacgcggcagaggctgtggaaggtttcaaggaggtggacataaaaatctaccacaagctactcatgattgggagcaaaggcttgcagaaatgtaagcccaaatccactaacaagatgaaaaattagaggctaagatagtagggtccccttgtagtgcctccactacaaatgccaacaattttgcttccatcagtgccagcaaaacaaactattgttggcaaccgtatggaac

SEQ ID NO: 77021 - DNA, 528 bp, Cannabis sativa
accatctcgtgttcttgggtctggtacaattactcctacttcaatgcttcctttatcgtttgtcttacatttacctaatttttcttttaatttgatctctattggtcaacttactcgtgatcttagttattgtatcttttttttcttaatcactgcttattttaggatcttatgacaaagtaaattattggtaaaggaatctggagacctatacattcttgatacataaatacctaaattagtttcttcaactagtgtacaatcccccttcgaggcacattgtaggttgggtcacccatctcttcctctgcttaaaaagtgttgtctataatatagtaagttgtattcgttagattgtgaatcatgtcagtttgttaaacgtcatcgactttgttcaagtcctaaaattaataaacgttctagtattccttttgaattagtccatcctgatgtttggagtccttctcctatcacttctaaacccgttttttgttattttgttacttttgtggataattattctcgtgt

SEQ ID NO: 77022 - DNA, 1861 bp, Cannabis sativa
atcacaaaggaaccgacttagtgtaaaataggtaatcttatctaataaggacctaactaattatctaactgtctaacagtaaataacagtaacaacacaatagtaacaactaactctgacacaatttgttaaatctgttaacgtgtgttttcagacttaaaggttgattacaacctctttgtcaaccacactgcttccaaaaacacaggctagctaggataaaatcataactctgttatagttacaaattattgtaaatttttaaatttttttgaatatttatagtattgaatatacaatttctattattcaagtttactacgagtgttcaagcctatttttgacactatatattattcgtaatattaggctatttttagccaaagttttgggttgatttcataagcattttcttagttaatgttgcattttggaatggttttacgcttggtttttcttatttcaggttcccgatgcattacagttcgaattttatcaattggtgaaaagacgggacactttggagaaaaatctgctgaagctgctaatttagcatcagtagtcgcgaccagacaagtccatagtcgcgacccttttctatggtcgtgaccatggtcgcgactaggaggtttggcagaaaaggggtgtttttccaattggcctatggtcgtgactagaactttatatagtcgcgaccatgggtgaaacacagaattttttgccatttcgccattcagaggtagcaaccctaattcctataaaagggacttgagttttatgacgaaaatcatcagagattagccccgaaaagtgaatgaaggaggagaggaagctattgtgacaatccggagtgcaatcatcaactagttctttcttaactcttgaattttttatgttaatttctgtttagatttgattatggatgttaatatggtttttatgaactaaattcccaattggggaagacgatgaatgttgattgaagttttgcttagttaatgataattcacattccttttatcttgtttgtgaaattatttaaatttgtgagtaattccatgtttaagattgatcacattttacatgttctatgatctcaattcgaaatctgaaaagtgagaaccgagaatgctaaaattggataatctaggttttacgtgaaatgaaagtatttgcgtaacctgtgtagcgttaagattattgcttaaagctgatcacatgttaatctaactcagagattgattagataacatgtgatttagggcctaaaagatttgaaaaagagttaggctaatttgtttaatctgtcattcacattaagaaaaagaatagtaattagcattaacaattgggttaaataaatcaacaggattctcttccctattttatatcatcttgattaaatctttcgttgttaattttaagtttcttgatactctgtgttttgtatctcaattataaaaattatcggtttgccaaatagaatcataaatttaatctagtggtattcagtccaattttttgtggttcaatctcacctgtgtgagtaaactacttgattacgtgcacttgtgtattgtttatatttttcgtaacaagtaatttttcaaaaatttacaagaataacatgtaagtataacgaacattttcataaaaaaataaaataaataacctcttattatattatcattaagaaatgaagatgatatataattctacaaactggaataggtatttcttattaattaccaacaaaatttattttattaaatgcaaagatactcttaaaaactagacattcattaaagttttaatatcttatactaaataatacacagatcataaatagatgccctattat

SEQ ID NO: 77023 - DNA, 1669 bp, Cannabis sativa
  modified_base (1259)..(1268): a, c, t, g, unknown or other
tttgaaaaagtgtgaggacagagacggagaaaggattcttagacgatcaacaatttaatcccagtttaattgaatgatttacttatgtatatatgtatccatgttgggaagtattttaagtctagtgcgtggaaagatagccctttgactttctatcatgggttgtaatgacagcgtgtacgtatgtgtatatataaatatgcatataaaaatcgatagtgcttaattaggtctcatgtgcgtttctttagccagcttccatcgctggcggggtccctcattgttaaggctcaactactacgtacgtataataattaagttttggcatatgtagagttacgaataagtttaattaattagcttattttgaaagtttatttagtgatatttgtaattttctttactttctatttaagcattttaacaacactcagctagaagcctaataatggtctaagtaaacaggaacaaatatatgatgacaaaagaatatcctgaaaagcttccaagcttttaaatggaaaatttggttcattgactttattaaatgattttctatgtgggaatgtctaaggatattcagtaggtgttgatatatttgtgggattaatttactctattttccctacacaaacactgctaaaaaattaagactattggagagaatgatcaatactttgatgggcgctatattattttataactcgtgtaatttttggttttggtgcacagaatagttggatgacatctttatttattggacttcatatgtctttctaaaacataatgaataattagcatttttgccttctcaatttttgtcactacctcattttgtccattaaaatatacaatttgttaaaaaaaattcataaaatatataacagtttcatatgcaccttctattagttttcgtttcttttaccgtaaagaattagttttttacaccctacactttaaccaatataaaaaaattctccttttattaaaaaaattaattttaaaaattttaatatcctattaattctcaaaaaaattaataaaaagtattaaaaaccctgataaaactattaaatttattacaaaatattaattttacttaaaaaactttaattatttctaaaaaaaatattttcaaactttattaatttatttataaacacgtctcttaaaaaattaaacctaaaatattgagaatttaataaataatttaaataatcaaagatattttaaagaaaaatcaaacttatttatatttnnnnnnnnnnatcttaacaaataaaaaaaaataattaaaattcaataaaaatataaattatcttgaaaagttaaaaattaaactaaaagaatcttatatttacttaaataaatctacattttttttaacaaaataaacacaagtttgtgcgcgtaaaatttagtttttagaaaaatttaatttttaatatataccactactacaaaaataagattcagtgactcattttgagtgactctaaaaatattaatgacacttcattgtgtgtcactaatgtgggtaactggaaatttagtatttagtgacccttcggtatgtgtcactaaagctttttagagtccctcaacgcatgtcactatagccatttaaagtcatgccacgtgtaagagtaattataatatcaacttccaa

SEQ ID NO: 77024 - DNA, 2043 bp, Cannabis sativa
ttctcagtgcatatttttatttttgccaatgcttttcgttttgtgctggcaaaagttctaataccaacgcgaatttaccaaccccttttgtcagtgcaaaaatgtgcttgcaaaaggagaattagttttgccagtacaatacccagctttttccagcataaaaatgcgctagcaaaactctcatttcgtgtagtaacattcgacaaatctacttaatttaccaatattctgaaaaaggcataccacttgccatagtgtaagtagaccacatcgctaattatcacgtcgctataagtcagtgtactgataaatctcgagactaaaaatatttgaagcaaataatcataattattaatttctactataatgatatcattatatataattatgaataactatatattattgatttaataaaatttatatattatacatataataatgcaagcgtttgataaattcaatataaactttattgaattaaatgatattaaattaaatttagattttgttagggcatagagcccaacaggtataggtgtcaggttagtagtttagctatgttttcccaccattttggagcccggacttgtgtctatagaagctagggcattcattctcagctttaggtcatgaagatctagagacagaaatttagaagaaaagattgaaatacaagagttgtgtatgtttcatcacaataccttcaagtgagttctgtggaagtacaagataccatttttgactttgataattatttgatcgtccatgtaaccttgagcaatattctcattgaataaagtttggttctaaagtggttcctcccagagattagatccaaattgtgatggcttgagattgattaatctagttaattctttgtctactggtttacagcgcaaagcatttctcataacattgttctattattactgttatatattttctaatttcacaatttgtcattaattatttatttccgcattattcttggattttaagtctttatatatattattcataacaattagatatatataaaaaagctattaaataatacaaatgcttgggttcaaaaaaaatataataataatacaaatgctacatatattattattaataataaatactacaatctcaatcaaattatactaattacttaacatgcatgatattattattatagccaagagctttcctagtaattagtaattagacacccaactttcgtctaccaccgtactcagagatcacaacaccaccgtagcgctgagccgcctcgttgcaatccatgacggcagggaatacggccggtttccggtggtttcgaggcggagtagttggagtttgtttggctgtacttgtattgtaaccatatcccatgtttggctgcgatgtggaatatttgttataagcagctggaatatgggcttcattatcggatgaacgagaagcttgacaattccccattctcttctctaactgtcgaaataccaaacaaaggattaatagtggttttgtatgtgcttttgctaagtgtgagggtataataaactaaacatactatacatatatttatagaagaagaagcattagaataatgatattgtgtggtgttctgttctgcctaaaggaataataaatattaattgattatattaaaagatgtttccatgcaggctcccactcaaacagtttcttttgatttaggcccttcattcaggcttgtagctagctggcggttatatattatatattacataatataataatctgatataaaagttagcaaacttattgtttcgtgttctggatggatctgaattatagtttaggaaaaatatctatactactatacacccttatcaaatattacttcgatacacaagattttttttaatagcatatgttataatttttttgaaaattttctagaactacctataaatttaccaaaaatattggaaattaagttttaaataatcatgtatagaacaaaatattttaacgttatattatttttcgacacaataaattatttaa

SEQ ID NO: 77025 - DNA, 934 bp, Cannabis sativa
aatcgagtacaattagctctctaatataactacaaattttcgaccaattaataaaatgctgagatgataattaaaatcatttatagattcattattaaaatgttcggaatagatttgttgaaattttaaaaatttaaattaggagtttatatcgtgtactcttcttcatgtttagtctcctaatttttttatttttttttgaaaagaagatctttattaatcaaggtccttcaacaataaggacgataaagtagtaggcatagaagtcctactaacagtacaatcagctttagaataagagtcccttgcaaggaaatgggccacattattcgcggatcgttttacaaaagagattgaaacattaaaaagaacagagaggagctgtttagagtcgttgataaggctaccatatggagaaaacatatggactttgctgttgatggcatggacgacgttaaggcaatctgattccacttgaacattctgccagttgtttgcttttatccagctgagcgcttcttttattgctaccgcctcagcgatttcagcacgcacagaaccaagcttgcttgattgaaaggccagtaagaagctgccatcatggtctcttgcaacaaaaccccacccgaagcttttctgattagcaaaggttgccgcatctacattaaccttgatcattgggtatgtcggtttagtctccagcgctcaagactatctgtagtactagtagcactattggagagagtctttgaaagggattgagcacttttccattgatctaaagtgagtgttgcagatgaggtaactctgtcgacagaaggctgagtttgattccatatgaggtcgttacggcatcgccatatggcccagcagagcattgatatggattcgatttcagaggcaggccagtgagagagaacgtgatgaaaccagg

SEQ ID NO: 77026 - DNA, 1596 bp, Cannabis sativa
aaaaaaaatgcccattatttaatatgacctacctcactacctgcccttttgtttaatgattattatgcataaatgtaattagattccatcataaattttcatgtttttactttcattgattttgttttctcttctctaaattttcattgtttattgtatattctcttttcttttttattacttaatttcatcacttttgtcttgtaaaaacactgctcattttagtatttcaacatcatcaccttccttctattttatataaaaatatatttatttcaaaagaagaaagataagacagtagtttatttatttatttttttgttttggttgaagacagtattacccaatactaagactaaaatgtagaaatgagatgagactggtattcatgtcaatcctatcagtcctatggagaaactctttgttttggagtttagtcttaattcttgtagattttatggatattttgtcctatgtattttgttgctactattccttaacttgattccaaattttgaaaaggtacttattacatattttcacatttcatttcatcactcatctcctcattttttttatttaaatagttataattttatttttttttagaaaaatttgactttttatatatttattggattaaaattattttccaaaacttaagttaacccatattagtagaataggctaacatttcataaaattcaattctacccctctcatttcaaacatctaaccctttctcttcatcccttctctctctcgcactctgaactcactccaaggactcaacccacaacccaccgcccataacatcggtctcttctctccacgaccactgcgaccacagacccaatgaccaccgcagacctaacgacttctccatcaaccacggcttctccatcgataatattatcaaacaaataagttgtatgattaatatttgttatttgcgagtagatattagatttaggttaaatcgactagattagagttttgggcaaaaaattagtttttttgccaggcctgatggtggttcgatgcctttctgttgttaaaatgagtaaatgttgaaaacgaaggtccgatgatagtctgatggtagcctgataatacgtttcgatggtagttcgatggtgacctaatgccttcctgttgttaaaatgagtaaaggttgtagacgaaggttcgatagtagttcgatggtggcccgatggtagtccaatggtagtccgatggtagtctaatggtggtccgatggtggcccaatactttcttggcgagcttaatgaatggggcttaatatatataaatgttgaataaggttcgatggtgacctgatactaccatttttttatgtataaaaacataaaaaaaatggctagcattgggccaccatcggaccctattggaccaccatcagtatggatgagaatgatgagtatggatgattaagttaaaaaagaagagaagggagaagggtattaatataaattgtgcctattttttaaattttgtaaacttgtgttcaaaaatttaagatgcactaaatgtatgtatataaatttaatttttttttatatgatattatacatt

SEQ ID NO: 77027 - DNA, 520 bp, Cannabis sativa
acaaaagtttgacttgaaatcatgtgtggttgagctatagttaagctaaaatggcaaaattttcaggaagttttgtagctgtgttaggagactgaactgaacattctcgatcattatattaataatttcgattgcagttacttattttaatttggaaattttatgatttatcgtaggctaatatttgtaatagagacactattaaaaacttgagctgttcttgcagcaacgaggagagctagctttcactattttgagtgatactcatttatacctaatagttaatatcatctcaatctcgttttatgtctaggggctaaaatcgtttaaggaacaaataaatcacaattgtttttgacgtaggattataatattagattaatttttctacatgatacccttaacatggatttgaactatgcatacacactgactcccaaaataactttagattagaaaaagctttgtatggtctgaaacaagcaccacgtgcttggtatgagcgtctaactgaattttt

SEQ ID NO: 77028 - DNA, 1506 bp, Cannabis sativa
ctttcacatacaaatctgcatacttatccaccataaaggttgtttacactggcagaaaatgtacatactttgtgaattgatcaatcacaacgcaaatggaatcatacattctcgtggttctaggtaaccaaaccaccaagtccatggtgataccctcccacttacacccggtctctaatgttcaaccttgatctattgacaagttaagcaccaggatacaaattctaccacatccttcttcatcccgcaccaccagaagtagggtttaagatcttgatacatcttggtagtgccaggattcaatgagtatggagtggtctgagcctcctaaagaatctcatttccaagttccgcactacttggaacacaaaccctagtcttaaataacggcatcccactatctgatactgtaaaatctttggtatgaccagctgaaacctcttctcagatcttcactaattttggatcagctaactaagcagctttaactcatctaacagattagattatagcgttaagttatgaagttttcctacaacaaactcaatgcctaaacttaccatgtcttttgctaaccaagatgaaatcttaatgatactagttatctgccttggaccctttctgcttagggcatcaaccactacattagccttctcaggatggtaaaggatttcacagtcataatcgttaaccaactctaaccaacacctctgcctcatattcaaatctttctgagtaaagaagtacttgaggctcttatatatggtaagtataaatctcacatttttctctgtagagataatgctgccaaatcttcaaagcaaaaaccaccgcaacaagttctaaatcatgagtcaggtatcgctgttcataatatttcaactgacaagaggcataggcaatgtcccgatcgacttgcatcagtacacaccccagaccatgtctggatgcatgacagtaaactacaaacttttccttatctgctggtagggctaatactgaagttgtaatcaatctctgttttcgctcatgaaagcttgcttcacacttatctgtccacacaaactgctgattcttttttgagagaatggttaatggtgttgaaatcttagaaaatccctctacaaaccgatggtaataaccagtcagacccaggaaacttctaactttcgtaactgtctttggtcttggcaaatccctgacagattcaatcttccctagattaaccttgatcccatctttactcacaatgtgctcaagaaaagacacttgagatagccaaaattgtcacttcttaaatttggcagacaacttatgttctcgtagtcgttgtaaaaccatccaaagatgttgcttgtgctcctcttctgattgagagtacacaatgatgtcgtcgatgaaaacaatatacacaaatatcgaggaaatccttgaataccctattcattagatccataaaagttgcaggtgttggaaattattttaacaggatcttagatctactca

SEQ ID NO: 77029 - DNA, 557 bp, Cannabis sativa
atccttatagcttaggctagggggataaggatggttatcacagtgaagaaggaatttaccacatttgttgaaggtatgatcgagcttactacagtggtagcaatagtcttgaataccttcgtaaagaaacttgagccacttggtaaaggaaagcttcctgaagtgaacgttcattccacgatgcagcggcttggtggtgtcgagaagaacacggacacgcatgaaaggggtgacagagtcatacagagagatcaaatgaacctcaatgaggtcaccgatcgtattagcaacaaactgagccagaccgtatgaacgggacccaaaggggatatagtgaacctgaacccagagaggaatatagcgaagttgggaggggaggatggtatcaaatccatcaggaatagcaaggatcataagggatcggtcgaaatgccatggctgaccttccatgactcttcgacgatccccctcacaaccgaactgaactagaagaagtcccgagtgatattcggagaaagagaaggggcaacgagctacccaagcttcggtcatagctt

SEQ ID NO: 77030 - DNA, 3252 bp, Cannabis sativa
cggaatggagaaattataactctactttccaattctaacaatagggcccacaaataattaaattcataaataattataaaaatatcataaattagtgctaattgtctttactaatccaaactactaaagcggtcattacactaagatatttaagtttgaatttaatatccagatactatttgaagtaagagatcgttgattattttgctagcaacaattatgtcatcaacataaattgggatagccaagaagatggatacagtacattttttgaacaatgaattatttgagatggactgggtgaagccaacctcgggtaacgtgtgactaaatttggtgtaccattgtcgtgaggcctatttgaggccataaatgcttttatttaatttgcaaattgtatttaggggagccttgtatctaggcaatatattcatgtagacttcctcatgaggtccccgtgaagaaaggtattatttatgtctaattagtgaatgttccaattatttatagcagccaaagcaagaatattttttaaagtgttaaattttacagcaggtgcataggtttatgagaaatcgattccttgcctttggttgtaacctctggctaccagacgagcctcgaatcgattaacttctccagctttgttatacttcactttgtaaactcatttgcatccaatggctttttttcctggggtaatttagtcataatccaagtcttatttattttaaagcttaagtttaattatccatggcttgaagctaatattttaactgtgaggtctcagcatagttttgtggtttagtgtgagaataaactgctagaataacagctctaaactgaggatgcagtttgatataggataaaaagggctctattgggtgtgcaatggaagtcacatgatacacataatcttgtaaatatgctagttttgttactatttgacctgttctggtggcctgagggggattggccaggtaagtggaaggattttgtgtgttggactttggtacttgttgacaagatgcttgtgttactagtttttgattggggagtattgcttgagagaagcagttgtcaatcttcgagggagatgtggttgaaagaaaagaaaagacattttcatggaatataacatcacgagagatatatttgattggtgtaataccccagaaaaataataatatttaattggacatattttataaaaatatgtaatcatatgggcattagagtaggataatgatcttactacagctaattatgagttaattagtaaaatattgaatgaatgattaaataaagcgtaatttattaattacagagattttaggagattatgtgggtattgtatatactattttttaaataaaatattttcgaatttgggaaccgtagaaactcaatggattattcagagatgtcacgacgattaatgatgagatatattggaattatactagactagtttagaaagttgagttgtcagattagttggaataatttgaaatgaccaaaatacccttgggttatggattattttttatgttttaagaggggtaaaattgtctcttactaaattttattattttgttttacgtcaagggctagaaattactagttgagaattaagtttatttcctttagtttcattattaattggttagataattaagttagtaacctagaaaataataaagaaaacatacaattttcatttctctcactttcctttgaagccctaggagccagcatgaatcaaagcatttttcttcacaatcaactaattctaagctgaattagctaacactaggtacttttcaagcttggaggcaagttctcgctctttgtctcattgaattttaaggtttaggttgagttttggttagggtttttgtggttttggggctgtagtataaaattgagttcaaaatatgtttctaaaattaatttaagatttgcttgtgtgtgaattgatcatctccttggctgctaggtctagaattaggagaattaagtttaagaactcaattttcactcaataattttgatattttaaggtgttactgagtattgaatacttgagtacattattattatgttttagaagtgttctgaaaagtttgagcaggattgaagaagttttggtttggttttgaagtgaaaaaccaggtttttcccactctacaagaaccggtcgaccgattctacaggtcactgaggaaccactcaaccgattggctagcagtgggaaacccctagttttctttgaaactggtttctgctcggggtgtttttccagaacctagtttagggtattttattaatgtttaagctatttctaagttaatggggattagggtttgtccggttgtgaaattagggtttattttggaatttgattaagttgcttaccaatttatattgtcatgacataggacctgtgatcgtcgagcagtgttccacttaggtcagcgtgcacacctaatttttgaattgaggtaagaaaaatccaattgcactgcttaaacatgtcaagtgaggaatgattattattgtttgtgactcgattataattgagataaagatacggtaattaccgttattgagaatgagttactactcactttgaaactgctgataggctaactacttatcagttgcttaattaggcaacgatagtgacatataaagctcgttggtaacgagtggtaaggatactttaggaggcatcaaggtcgattagtcttataagacaagtaattaattatatgatgtggattatgtattgagtaattgtctatactgtgtgaagcatttataagttgtgcattgttatgaaattatgctataagcaatgtctgagttttcttgcttttcttgctgagtctttgtgacttgcgggtgcttcaaggtgtaggtaaagggaagggaaaactggaccagccatgagttagaggtctcccagtgatgtacatatcaaccattgtgtcttggctttcaatggacaagatccaccttttgatcgtgttttgaaaatgtaaccccattttgtaacaaccgtttcctaacatgttgttaaagtttataaataagggaatccccgaatctagcagtattttgaatgaaaagataagtttaaatttaactaaaaattttaattaaactgcacttttcttaaatttttaatttataattataaattaatttataaaagtacacacatggcacccttacggatcagggcat

SEQ ID NO: 77031 - DNA, 904 bp, Cannabis sativa
tcttgagaaaaacatttcaagaaaacgaagatcatcagtactgtacttctccaatgcacacaatcgatctctcagtatgtagtttataacttggaagtattttaatggagatcttctaatatgtaattgcgaaaatcaatcccccgcgaattacttgcatgcaaagccaaagttgtatatatttatatataaatttgaagaataatattgaatgtaataataaaaaaccctgtaattgtatttgtagaagatgatcgatgccgatgaagagagccaaggatcttcaatcaaagcctctgaaatcaaaaccaagaggatcgccgtagtcccaaatactcggtggacattccacgtcattcatgagcggccacatcataggtgaaacgggtcccaccgccccaccgatcggatccatacccggggctaccatcgcctgagtgcatagactcaagctcgaatccaccgctccaaccagtgtattgatatcctcgtaagacgcgcaattaatcggagccgtcggattacgagaatcatgatgctggtactgttgctgctgatgatgataattatccctattacaattagggtttgtgtacgagtttagtacggcggtagtggggtcaccaccacaaaatccacccacgctaagatcattcaccgggtactgatattgtacttgtaacggattattattattgttattattattagtacctataagtacggacgcattattattattattattagtaggaggagcgataccgtacggtgcaaaacccgtagacggaggtgggttcataaacggcaccgtttggagctgagcggcggctgaggagtaagtcaagccgaagccggaagggcgagggagcaaaggacgaagcgtctgagtagaagaagaaga

SEQ ID NO: 77032 - DNA, 960 bp, Cannabis sativa
ctgtccttaccggcaccatcaaccaccatccaccttaggaggatagataatatggatagaagaaaacaatgtgagagtgaaatatgattttttgggcgattagtttgatcatctaattattgaactaaaatgtgattaatgatatcatctaattattaaactaaaatgtgattaatgatggttttctttgagtttgactaaatgtgattaatgatggagtgctcatttaaataattaaattagcttactgaaatatcatttataagtatttaagtattttaaagataaaatacattaaagaataaaataataaatttatccctactcgatgtaagctgtctatatgtttagattgaaccaatgaatacttcatagcgtatctatatttagtatgtaaagtgttttatgtaatcaagagtgtaattttaaatctataatgaaataaagtgaaattaataaattaagaaattaacttattaaatgtaaaaatattaagtgaaatataaaaataattaatgactattttgttcattattaattaattttgaaaaaaaataatcatgattcttgtcaattttgtaacattgactagatacaagtaactttgtctaatcaacctcaataatagctatatttacatagaataatatatataaaagagaacatatatagtgtttttgataaatttaatcacaccaaacagaagagataaacatacaaatacatttgtttttatgaaattgaagatacatattatatatatatcgttatttatttgcatagcataagagataggacatgagattttaattatgtagttgtcatcctgatctattttccagcatcttcagcccaagataactgcatgcacaatcacataaatatataaatacatatacagtatattgctattagtagttaatcacaaataataattaattacccattaaaaacagttga

SEQ ID NO: 77033 - DNA, 796 bp, Cannabis sativa
acatcataattaatggttggaaaaaggacaccgatggggaacggagctgtcctctcttatattagtaactatattttaattatatgcaggacaccaagttcctattcttcctacctgttatgactcactcacggggatggatcattagtcttgtatggtaaattgagaccagggacaacgttcttatagatgctttaatgtagttagttagttgttactataattagtaacaaaatgttgacatcgtattataatacagtaacggctaaaagggtaatgacacaattaatcccactaaaaagctaagcatatggattctggattctaggtgagtcagactttgatttatggctacatcataaaataattggtgtattgcttggtagtattaggacacaagcacaagtgcactatcgttatagaatgtccatgagatgatcgactatgcagaagctagtgggttttcccacgaagcttaaattaatgaaagtaaaaggtctaaaagtatcattaattaccccaaagcgaaaatttgaggggtactcatagtgcaacgacatgtgggattttgaaaaattttatgagctcaaatgtgcaggacaagtggccaagctcactgtacgcgtagtgcacactttacgagctatgcccgatgcatggggttatagtttaacgaacccatagtatacggaatacatgctatgcttgcaatatgatagatataactgagtatagtataatggtagtattttttatatatatataattcaaaatcatgcattaattaagtaaaagt

SEQ ID NO: 77034 - DNA, 1702 bp, Cannabis sativa
tacagttataaaaaattaaactaaaaaatcttcttaaatgacgaaacagacaggagtgtatccatcctttttaagtgatatattgtagaaatttacaataaataattgagaattgttaaaaattaccactcaaatttattattttttttaatattatattattattggtataattaagtgtcaggttagatataattttaaaaaaatatatattttaaaaaatatcactaattaattataaaatacaacttataaaaaatatccaatacactaatttccaataataatcctttaaataattagaaaaggaataataaaaataaatgttgctttgggagattattggaaaggtgtcaacttggtgactaagacaggtgggttctggctcagtggctcatgtgtgtttggttacttgacagatcaatctggcttcacaagccgacaagccgagccgaatttaattttttctttttaaaaaaagtaaaaaaaataaaaatataatatcttgtttatttatatttatattttggaaaaggtaatatagtgttgagattggtttaaatttttggcccatgacggcatgttatatcatatgattgtttattttaatatagttttccaattattactattattataattattgttattttgtctttcattctgtcttattgaactaaaactggtttttttctcttttccgcttatggatatgacaagacctatctaactagtaactccatctataatattaaaaaatatagggtaagttctatactacatttcccttatggtggaatgtttaactctactttatcatattttgaaaaaaatttattttaatttttttaaaattatatatattgtagttaattaagattaattataaaattttaattttttttgaatagtttataatgttaaaagtaagctttaaatagggtaaaacttatgcacatgacaattttttattatatgtgtagtaggtaattgttgaattttattttcaatactatacattattttgaattttttaaaaaattacaaatagtcttaaataattacagcgtacacgattataaaaaaaattaaactaaaaaattatcgtaaatgttgaaacagataaggagtgacggagtgtactgaaatactcctttagagaggtgtactatatatatttccaaaaatatatctaacactttttagcaaaaaatatatataggctaaattaggatgttttttttttctaaaagtttgatatgtaccaaatcgtgttttttgaacatttttagatcgataaaaaattaccctgaactattaagattgttggattcaaagagtaattttatcaaatttcgttcaattttattgacaggcatctaatgagacgattttccttataccaaatcatgctcccgaactttaatatgtaccaaatcatcccactcaaattttagtggaaaatttttttaacgacttgaaaaagttttggaagcataatttactacatttcacaatttggaggaaacaaaatactaattatctatatatatatacaacaataaatattttttttttcaagcaatgaaaattaatatgatacatgatactgttagacttactatatgaaaaataataaattgtaacgctctaatctataggaacgccacgtgtgtgaatttataaaactagtttaatacta

SEQ ID NO: 77035 - DNA, 695 bp, Cannabis sativa
ttttttttgacaagaaggaaaaatcttcattaatgacaaacatttataacctaaacaaacaaggcaacaaagccccacaactacttacaatataaactctctatatatctcttttcaacactttttaatctcctttttttgctacttgtaatctatagaaaacattgtctttaatatcctgtacaatcttccaaaccaagctcgagtaattgtgaaatatacaattgtttctattgctccacaagttatagattgttgctgccatgactgtggtgtaaactcgctgcaatttatccttcttgatcttcactaaccatctttgccactcttgaaagtcacttggccaattggttgtcccaagccaattgcaaacccgagagagaacctgctgagagagacagcaagcaaaaaataggtggctgttggcctcatcatcagccccacaagcctgacatacaacactgtccaggacaattttgaagcgagcaaatttatcccgggttagtagttggtcattagcagcctgctagaaaacgaacctatgtttgggcactatgacactgctccgaatactactgctgatctcgaaaatagtatggtacagtttgctattgtatagcttcttcgttttgagtcggcctttggcatctccagcattagtaagctcatgaggagtaaacttttctcttaaatga

SEQ ID NO: 77036 - DNA, 2324 bp, Cannabis sativa
gccacatagttcaggaatgaatctcacattggtcaataccttataagaatcattctcattttattctagattgaaccaattccttgaattccacgggatctattgtttcccatcatgatctatcttgatctctcttctttgagatcaaagagccactctcttcttagtgacatgtggaatgttcactctgaatccataacccactcatcttgagaaatctatcatataaacagttagagcattagcagaatcataggaaacattcaaaacaccaacattatcaaaatagttagaaacatttgcagaattaatattggaatttccatttggtttttgtccattatttttcctttgtggacaatcctttctaaagtgtccttcttgactgtaggtccaacatgctcttcttcctatggatttggatctggactttcctcttcctcttccacctttactattgtttttcctctttttctaatctccctttaacattgagtcattcaataggattctttcccactttctgatttgtaggttccttggagtatgtatcttcaatcacctcttccaaagacaatgtttctctacaatacttgagtgtatctctcaagttctcataggctttaggtagagaattcaataggaagattgcttgatcctctccctcaatctttaccttgatggattccaaatctgatatcagctttgtaattcatctatgttttcatctatggactttgattcatccatcttgaatccataaaacctttcttcaaataaatctgattaggcagagtctttgccatgtacaatttttcgagtttaaaccacatttcatgtgtagtctcttcatttatcaccttccttagtacttgattgctcaagataagaataattgtatttttttggctttcttgggtatctgatattttttttttccaacttctctggaatcttgcttgattctttcaaggcttcttcaagtccaagatttcccatgtgtgccatcatctttgtcttccatagacagtagtcattcttcccatcaaacttctccacctcaaatttcgaagtcaccatgttgataagaatttgttcatggccagtaaacaggttcttgaaaaattgttgaacttcaaaaattatcttcgagtcttcttggggattaaaccagttcgttcatggaatgaagatggatttatagttgtatcctagctctgaaatcaatttgttaggatctaaactacaaaaattgacactcaaacaaaaatgaagcaattcagaaacaaagattcaaagataaacaaaaacataaacaattaatgatcaaaactaaaggttgaaaagtaaaaacaataaacaccaaaattacttagttcaaatctgatctcaatgtgaagtagtcttacttgtcggcaagacttgagaattaatccactaagttttcaatcaaggttacacgctcaaaacacatattagacaatctaattttatctcactcgatcaatagctcgaaaattctctcaactcactaactctcagcttggtttcatgaccaactttgtacatcaatctgaataacactctagttaatcagtctaagttagtttatataggcttcagaattagtagtaggggagggacaaccgaattaactaattctgttagcttgagtctttaacagttaaaatagttggtttaattattttacttcttgatgtcatgttggcaattcaagggagtgtgtttgataggttgggaaataaggatcatcatacttcacaattattatttttttcttcaaaaggttctatttttttttacccattttcaagaaggttttatagtgtaataaaatttataaacattgagttatatggaattatttgataaattgtaggctttagagtcttaaatagttgacctggttgatattttagaaaagaccaatattggtctttttcaatagaagagtcatccccattagtttttgacaaagtcatctccattatcataagtaatctatatatagtgtctacttaaatagtaagtaaaacactaaagagtatgaaaaattctccttatttagcttcaatgacatgtttatctctttggtcaaaatcaattaagtacccttaattaaaaaatctaaataaaaatataaaagtagtttaaaaaatgtttatttaaagatgatttctcatatataatttatttgaagtgtaggtttgattttgtctacgagtatttttcttatttaatgaagtcacttagaggtgaaatagattataaaattatattaaattttcaatagtgagttctca

SEQ ID NO: 77037 - DNA, 1108 bp, Cannabis sativa
tgtggcaggatttgtccacctctatgtaggggaaggtccgtcctagttcctaaagaacttggttagactgtttgtctgtagaccctgtccaatctgtcgactagtctcccttagagaggatacctaataagttcctgacctttctcgatagttctttcattgaactgccttatcgggtcattaacttctttgttgcgacggtctagcttcgcctgatgagatcaaaggatgtactcctggtcattcatctatctcagaaattcatgtctctgttttgtgaatgcatcgcaaccaacaatgcgtggttcttcaatttggctgacttggcagaaaacttccctaagtctagccaattcgagatcttctcgcaaatccacgtgaggctcaccaacggttggctcgccaattattggccttatttccatatcataatattggggccagagtcagttgtggtgtccaaggattgctccacgttggccaagccctcactacgaggtgccagtggtggataaatccttgcagaggttggccattgggacaaattaggttggcagtgtcaacctgactagtcgtggtgatgaagtttgttatgcctgccgggttggcaaagttagccatctctgtcagatttgtggagattataattgtggttggaaacgaacattaggatcaacagtcatagggtcttgaggaagacttgatgaggtatgagttgtagccagagctctccttgtgttaaccatggtgatatatcaaatactctcaatgaaagtaataaactgttgatctcagatttggccaaccgacaacagagtcatatttatgactgatatcaccacgtgtacacaaaaagaataagaaagtaaggagacatagtatttttatagaggtttgacccccttagttagtgggtaatgacctactctccttttggttgtattaatactagagataatactactaagatcacaagtgttgtggactctgaagtgattctcttaagattacaacattagaatcagtaggtgaatctcaagtaaaagagatgagagagagacttagtctcttttacaatgcatggggcagagggagagagagagagaga

SEQ ID NO: 77038 - DNA, 1745 bp, Cannabis sativa
tctttccctgctctgataccataatgcggaattgaaaaatagaatttgtattatctgattgaatgaataaagaacagaaacaggggctatttatacaagagactcaactagaagatatgaaactaactaacttaacaacccatctgacacaatctaaagactaggaaaacaggtaacagaaaccgttaatgacagttaagcattaacagtataaaccagtaaagggagaataataatataataataaatccgtgtaaaacttaataccccctcccctcaagatggacggtataaatcgtatacaaccattttgcctatgtgagagttaaggattgtggaagtaaggagcttggtgaagacatcggcgagttgctgattgctgtttatagggctgagccgtatcttggacttgttgattttgtctcggataaaatgacagtccagttctatatgttttgttctctcatgaaaggttgggttgttttctatatggatagccgactgattatcacagtatatgaaagctggttgatcttgggaaatctaaagatcttgaagcaggtattgcagccaggtgagttcgctgcctgttgcagcaagagctcgatattctgctttagcaaactgcgagaaacaattggttgttttttagtgcgccaggaaattaaacagtctacgatgaagatgcaaaatcctgtggttgatcgacgagtaatggggcaggaggcccagtcagagtcagaatagcctcgaagatttagggaagatgcagcagagtacatcagaccttgacctggacttccttttagatatcttagaagatgatgagctgcttgtagatgtggtgttcgaggagatgacataaattggctgagtaagttgacaacaaaagttatgtcaggtctcgatagagtgaggtataacaatttacccacaagttgccgatatggtgatgggtcttcaagtggttctccttattgatcatccaatttgattcttgggtccataggtgttttggcaagtttgctgccaatgaaaccattgtcttgcaagagttgtaaaatgtattttctttgagataacactaatccttctttggcacgagcgatctcaaatccgagaaaatatttgagggtgccaagagctttgagagaaaaaatttcatgtaaggtggattgaagttcgttcagaagagatatatttggacccgtgagaatcatgtcatccacgtaaactaaaatagcaatgaaatcatcttgtgaacctctagtaactagggtgtagtcggcttgggattagacataaccttcttgaataagagcatcagataattttttataccattatcttgatgattgcttgagaccgtagatagatttatttagtttgcacaccatgttagattccttagcaatttctggaggaagaacaagtcctttgggtagttgcatatagacttcttcagtgaggtctccgttgaggaaggcgttatttacgtcaagttgcaaagtatgccaattcttaatggtggaaatggccaataagagcttaaaggtaaccttttttgcaactggagagaaggtgtcgaagaagtctaatccttcttgttgagtatacccttgagcaacaagacgagctttgtgccattctacagatccgtcactattgagcttgattttgtacacccaacgacatcctatagccttcttgtttgggggcaaacgaacataagtccaagtcttgtt

SEQ ID NO: 77039 - DNA, 808 bp, Cannabis sativa
  modified_base (388)..(388): a, c, t, g, unknown or other
tttttttataaaaggtgtgatgaaaaattcaaattttaaaatttttcaacaatataaacaatttaaatttcattacaaatctacaaatgatcctaaaacactaataagaagaatatcgaaaaaatccttttggattttatatagtcgtaatgataaaactttttttcgttttttctgtgtgaaaataaatgtctttctctcattagttctgatgtattacatagagaacacatagaaaataataacaggaagaaagtcatttaatctaatcgtggagagagaaggttgtattgtggaaacgttacaaaaagcgtaggagaaaacgtctcagttttactcattaattaaatacatttataaaactaattttaattaattaaataaaaanaataatttaataaataaattttctctaaaaaataaggtgcacacaacacatttagctcaatcggacggcagcgcacatgtgtgatgtacgtggttgatgcaactaatgaaggatctacaccaatctacagattctgcagtgccactttattgtgacaatcaatccgctattcgtctagtagagaatccagtttttcatgctcgaacaaagcatctttcttagaaaaaagtacttcaagaagagttaaagatgcaccaagtgaagagcaaagatcaagtagcagatttattttccaaaaaactcggcacaacgagatttcagaagctgaaagaccaactcaatatgaagagtcggtgttgagggggagtgttaaaagatcaacacctactctataagtatctagaattttctatcattttg

SEQ ID NO: 77040 - DNA, 1233 bp, Cannabis sativa
aaaaaaaaaaaaaaagccttttttcttattgccaatgagaaagaggaaaagaaacaggaatgtagaaaatggtaactggaggaatgaaaatggctaccaaaacccaatattgtatttttaataataccaatatgaattgaagggatttgatttgatcacatcaaatcttgatgactttgtttttctcttttttcttttcgggctttttgatttgtttagttcatactacattcactctttgccatcagcagcacgtagagaacccaattgaacaggtgcttgagttcccaccacctttgaggacccataaactgccaaatcaacacctttagctttctctttctcaatctgctcctttatccaaaagtaagtaaacctaagcccatcctttagaaagaaaaaaaaaaacaaaatacccaatgagaatttgattagtctccaccttgaatacaccaaaacaatattatacttcaaaattattttgtaaagagttataaaaacaaaatttattttagagatctagcactttgtacaatggagcataatgatagattttatcattcttttcaggattttcagattagattagatttcagactagaatcactagagtaggggatttaaagttaggattatgtttatttattttttatggcaaagtacaataggctttgaattgttatttaacaaaataggaggaggatcaaagagaccaattaataatttcaaccagagagaatccaaaatgttatttactaaaaaaaaatatgttattttgaaagctaattaagatttttgtccgtaaactactttgatatgtacgaaatcatgctacgtgaacttttctggccattaaaaatttctcctgaactattgagattgttggtttttaggacttttgtccaatttcatttaatttattaattcggtgattgtccatgtactaaatcaatcatgctccccagattttaatatctaactttgacatgtgccaaatcatgcttctgaacttttatccatgtttgacttttcttactaaaattagacaaaagtccttaaatccagcaatcttgaatttttaatagtcttcaaaattcaaggagtatgatttggtatatgtcaaaattccaagagtaaaaatgaaaaagcctctatttattatttataataccttcaacttcatggttggggcccagcctagcttttctttaatgagagtgttgtctgagtttc

SEQ ID NO: 77041 - DNA, 652 bp, Cannabis sativa
ccagtgggccaataactttaatatagtaagaattggaaagaaggggtaatatagccttagtttcttgatcatggagattattattattagggttttgttcagaatccattattaatatttctggctctttgtgctcaaaatgtgagacaccacaccccattaaaattaatgttaactatatagcaatcgaaatagataaaaaaaattgagaggctgatcgattgaagaagagaaagaacccaaaaaaaaacaatataatataatattgtagattaattaattaatataatttgtgttataaaaattatttgtgtttaaacgaaataataaaatgagggattcaacgactgttgcgggaaaaagaagattaatggtaaccatgcatgagtttgggtatatattgtaacattaattaattaatattagtgacataatttgtgtgttaggttgttatatatttgcatgtaccacatcttttagatcatttcatactaacaaaataataattattagtagtttattattagtgattatggaatcattaatccgtttcattccttaattagtatttaattaacaataaataattcttatatgacacatgctatacatatatgattatccacctactaattaatagcacattctcatt

SEQ ID NO: 77042 - DNA, 3262 bp, Cannabis sativa
gggggtgtgaattacaacgattaatggttgaactcggacgagagtcacatgcttgtttgctaactttatcatgtattctttattatttttgagtttttaaccctgactttatttactttggcagtgtgccctcacactttgtagatgaatatccttgacaccttcgtcaagaatgtagactctcggagcgaggaggtgcagaaggccacaggaagaagaagagcaaagcttcctgctctaggccacaggtcaaggacactgtgtcacctgccaaagtagtagatacttttgttacaacccatgcgtcagccggttccgccagtgctcctacaattttggtagttccactaaaataagttttgctagccccaaaaatactagtcccaaaaaagcaggtgatcccgattgacgatgaggatgatgcagattggccaatcttcctgatgaaaaggccaatagaaaatgttgataggtcaatagttggttgcccgacgaaagtcagagagggagaagggtgagcaaaaaagagtcaaaagggagaagaccgagaggagctcctgaaaggaaagggaaggaaaggctttcctatggagtttacaatgtatttttggttttcagctctagaaaatctcacccttgcatggagcagtagtgccatatttataggcactattcttaatgggctgacttatccagatccattaggattatatgagtgtaaaaacccactgatgggataaaatacatttgtttattagtatattttaagctattgggtcgggtaggtaatccaatccaagttggattgagctgcctttcctacacggttgtgttgttgatagtgataggtgaggtgtgggccattagtgggagaaataaatgtcagaataatgagtatccttcaaaaaagataatttcttttttgtgtgcctttccaaggcctaacagaggagacatgctgccaaatttcttaggattgtgtcaggagagtgccacgtagacgacctccaagacatcattgatcctggatgctttgttgtattctattcctggatgacccttgaggatatgctccttaataagttcatattgtatgcatactcagtactgtaaaattattatctaaaacttatcgtataaattcatcatttatgtgcgatgcgagaatcgcagtggctatccagtttcgtccgttcttaattagtagatgggctaagtaattcatccgctttgggctagggaatgagcctaatttttgcaatgggcctcgacgagagcccacgtgtcatttattcaaaattattgcggataacaacaatatatttaagaaacctaaaacgtgaatcaccattttatcactgtttttttaataaagaatttttgctcatggattaaaaaaaacccaagaactattaatcttttgtgtcctatcaaccaacaccgatcttaaatgtagtggttcatttagaagatttggtgtgagttccattaccgttttatgatacaattttgaaaagataacgatgatacttgatagttcatcaagagtttactttcctattcatctttttattttgaggtacaataattttttttttgataaaaagcgttcattggataagtaaataaaagttagacctcatgatcattatataataggtctgaaggaattgtttctaccggaatgactccaaacctttgaaggacgaaagcccatttaaccacgttatgggcattaaaattacaagttttgccgatattatagaaaatacaaactatattaaatactttcattacacacctgatttaataccacaaaaccaacaatccatccttatttgtatgtggacccatcttgtaaattatccactctattttattatcttcttcatcaatagataacatgtgaatactattcatttttcttttaatattttgaaaatatgataataatagtggaataccacatatattttacatttattgatttatgaatgtattaaagaaagtgcaatacaataacaaatatcaactatacatacaaagtgtagtcattcttttcaactaattatgatgaaacatgcctcatgcatgtttgtttgtttgggtttgttagtgtggaaactagcttgcatcacaaaaagacatgctgaaacggtccccataaccaatcctcattgggatgagagaagcggataacaataataactatatcctctcataccctttacgtaaccatatcttttgcatatttataatatataaaaaatgacaatataatcttctaataataataataataataatataataataatactatgcaagagagctatatatatatatatacactatctaagtaagtattatccccaagaaatagggagaatatacattagctttaacatggcatcaaatgcactcactagaggatcacataccatcaactccatggttctcaacctcaagtaagtattattaatttacttattaattatattatgtattagctagaaaatttgatatttaaaataatcatttttattttaatatcatgttatgtgacgtacttattgaataaatttttattaggccgtttggaagaaaagcaagttatcacaagaactcgattcgagagacgatgaagatggagaaggaagaagtaagtaatgtgaggcatattaatggaggtcatgatcatgatcattgtgatgaagtgagcaaaaatgatgggaatgaatggattcccgatgtgcgtactgggatttattaccctaaaggacatgagaaagttatggaagatgttcctcccaaggctgggaaagatatcaattggatgtcatatagtgacaacattcattaagtttaatatatttaaatatattatatttatatatatacttaattgttattaagagaattatctgataacaactcttgcagataaatcaaaatattggacaaattaattcctattagtgctaaattctgcttttgaaaaaagaaaaagaagagttgattgtagggttgtgttcacagttaaaaaaaatgatgaatatgaagatcctcatctatattttatcacttttctaataacacgttttgaaatccgcatgaaataagttggtttgaattctccttaaatgtgtttggatcattttcggtggatatggtgaacccgtttgttaaatggatcatttttaagttgatagagatttaacctaaggaagaaaaaaaacccctttagaggcggtttttaagc

SEQ ID NO: 77043 - DNA, 1373 bp, Cannabis sativa
ttgaaactttaagacagtattttttaaaatttaacacagtaaaaatgtaaaaaataacaaataagaaaaaaaaaaaaaaaaaagaatattttgtgaaaacttcgttaaaacgggccatggaaatagattactttggaccggaaagggacaggaaagcccaattgacgattggggctcgaattatggggccgtaaagcgaggccacaactaccctacagccctacccaaagtgctggtattttcgtagtttccgaaactcaggaggtcgattctatactttcttgtgctttatatttgggctcctagggtttccgcaccagaagcagaggaggaggaggaggaggcagcgccatcactatcatcatcagcagccatggttctcaagtaagtctctatttctctgtggctatttggatctgatatcagattattcagcttatattctccgaaatgtcctaaatttaagttgatgctttgcatttcataattttatcaagtattgcttctatcggttttgcatggtattgtggtggagaaatgaagcttggaagtgaattaaaatatggttaaacatttgggattttagggttctgatggtagtttaaattgtgatgtagagtattaaagtgagtactaagattgggtgtgtgatgtttattggtatttattatgtatcttgtattagaaccagaaagtatagaaatttgttttcaaaattaacagaataaaggtagcgtgcttagtaacattctgatatatatatagtatattcatttaagtatatatgatgcttgagcaatcacaagagaagattacttgaatagaacttttgaaatgtgattatttgaattttatttcgagatcttggcttgaagttatttgttgttctacacgaggggtttgttgattgttgaatggtagtgcacgtggtttgctcccttcagccctggcgttcggctctcatgagtgcctactgagcaattgctagagttttctagttttctaccttcgaaggctagagtattcagtacaaaactaatatatgaaaaaaattcttaggttcacttgttctgcacctagaataaaattgatgggatatgttttttgtcctcttaagtattgaatgatcaagttttgttgtctttcaagaccaacatgtctgaaaagattattaggctgttttgcgtctagaatataaaatgatttcatctaaatcatatgatttttgttttctcaagaatattatattaggttgttttgtacctaatacaaaaaatgacctgatatatctttgctctctcagttgagagtgtcttgtgtaattaattctcaacgcagtttattaataatttggtttatgcttgtaggactga

SEQ ID NO: 77044 - DNA, 610 bp, Cannabis sativa
ttttaggaaatataaaacatgattaaaagaattctcctctctttacatgagaggaaagataattctcataatcctaaatttctttaccaaaaggacacctaaaaccacatgtgcattaaaagaaaaaaaaaaccacatgtgcattaaaactaacctcaaagttaaatggataaataaataccgtgaatgtaaatattttaacagtgtaactaaagagacagaatttatttgtgaagacagccaaagtataaaaaaaaaaaaaaattgaggggtcaataaataaataattaataagaaatagaaaaaattacaactataaaattaaaaattaataatatttgaaggactaagtaaaacatagctccatccctcataattggcaatattatttcacgtggaaccctttccatgcaaagcgcaaaatttaagtggaattttaactgtccaaaagaattttcaccaacttgataacattattttttattttttgaaatttagattgtaatcactttgaactatgctaaactatgctaaagttacgattaatccaaaactagcatttttcttagttaatttattagggtaggtttagtattatttttggaataat

SEQ ID NO: 77045 - DNA, 710 bp, Cannabis sativa
tttggttggtaagaaataattttggttcttcatacttctgcttctagctcaagctcatcattttttttttgtttggttcattataattttgttgaaaatccaattcaaaaatgaaaacataacaaggtattattttgttttattttcattgttatatatcacaaaaagacaactgttgtggcaggtaattcaagcattcaaacatttgatatcccagttctgactagctcagatgtaattttctgaaccttacttttatgtatgtaaaccataatagaaacatgatcaacataaacaaaaggtcatttttatcttggcaatttttggagagaggagttgaaggaaatatgtgtggttttatagtttttcactgatgttatttctctgaaaattgcttgtttaggcaattgaaaggttgaaagccaaccgggaaaaccataaagggaagcaacaattcttggccatgtactccagcatttttggtggaataacaacagatcctgcggctatggtcatccctattgatgatcacatggtccacagagggcatggtgtttttgacactgctgccataatggaggggttagtttagtcaaagacacacaaattccaagctgttgttcaatttttttttttcaatgatttcattatgtgtccttttttttacatggcagatatctgtatgagttggatcaacatgttaaccgtat

SEQ ID NO: 77046 - DNA, 1033 bp, Cannabis sativa
gattcagtattggataaggtcactggttgcaattgaactttccaactagtgtaattgcctcttaataacaaaaagtaggctgatgtaaattttttagtgtccctatccctattttaattagtgtcaaatattttttttaaaaataattacattctaaccttataattataaacctaataatttatttggacttcttctagataattataatttgtcgatttgtgatggctaattaactagctagatttcttactaataaagtcattgaaaaacctcatagatctctcaaatcacaaataattaacacacaacatacaaattaagtatatgaagaagaagaaaaagaagtgctctcatacacattgttgtccttaatgtttttcactaaaaaaataaatacaaataaagtatatatttaaattatatatgtcatcatccatttccttgtaataaggggttggactttgaaattatgcctcctattcaaactacacttaacattaaataaacttatctacctagcttcttatacatatataatttatatatggattattctagaaattaaaggtttaattataaaattattcacctcaaaatgaagcttcttattattatttattattattattattattatcattatgtttaagctagaaatttatgtttgtgagagacgaaagccaatgtttcaatgtcaatagacaagtcactatcggttttaagcatattattagaatctttaattatttatgtatatgaatcacatataagtatatttgaggggctaatgtgaaaaaaaaaaaaattgattttttttaaaaaaaattaattacatttatagtatttattcaattaataatttttggttaccatacgtgtaatataaatctcacaagcaaatataaagaaaaatactcaagtcttttctttctttctttttttttacaacaaaatatggcaaaataaaaatcggacttgggccaaatatttagaaaaaataagatgaaaagtttcaaatttggtagcatga

SEQ ID NO: 77047 - DNA, 520 bp, Cannabis sativa
ttgtatcacactttataatagcatatacattatacatatgtgcctacaaaggattttttaatccaacaataacattttattattttagaaataatggaagtgataatcccaccaactttattggattgccaatttcattccttaatcttaaattactgtgagactcacatattttattcttattctggcaaaattagaaaaataaacatcaatctcattccacggctagtaattcaatatttgaacacatacataatttaattcacttaacactatatgtacgataaatttttaatcactatataaatttcttttgtgattaaatgtgacttttaatcacaataaaatattacttttgactaaaacaaaaaatttaaatacaagttgtcactaatttaattttaatcataataattattgtgactgtaaacatatttagtcataataaattgtaattttcgtgactaatacttttagccacatattttttagttataacgtaggaataataatttataat

SEQ ID NO: 77048 - DNA, 2861 bp, Cannabis sativa
  modified_base (44)..(87): a, c, t, g, unknown or other
  modified_base (616)..(616): a, c, t, g, unknown or other
aactttatatgtgtttatttcaccgttttagaaagttcatattnnnnnnnnnnnnnnnnnnnnnnnnnnnnnnnnnnnnnnnnnnnntaaaataatttccaacatgtgttccttgaactccattcatggccgcaaatctaggatccacaatgttcgatgaatccacgccgatcttctccgtctttggtgttcctcgagctccattttttccatttgttgtcgcagatctaagatccaccacacctaatgaagccaagagtgtcttctccgacttcggtgctctacgatctaccatcgtcgacatagaacgagtaggagtcgattgcgatctataaggatcgaattcaattgaaatgtcaccaccgacaagattgagagccttctccgatggcttcgtgattctcagtggttccacaggaacttcgatgttgcttctaatctctggcgaaataggtggtgcctgagctgaggaatccagcactgccacactcgacaagttgtggcgctcaaacatggcgtcagtacgcaactctacagatctaatcatggatcttacgaactcacgaagctcttcgtcagtcatagtgtggagctctcaatgaaagcaccaattgtnagatattagtcctcttcgagacagtacaaatctcctaaaatgcactcttcgagtcagtgccaaactccaattgaaccaaagttctatttactcaatccatatcccataatagctatatagttacatatttatagtgattcacaccctttgcaaattactaacaaacccctacactatttgatagtgtaacactcttcttcaactaaatagatggcacttatatgagttgtgcttaagggcatcgtcccataacatatggtgctaagaggtaccatatttccttggtgccaaggaatttcatgattgtttccctaaatggactgaaagattctcaccaagaatcagagaatgaacaaatgtagcttcataaactcatatgttacatatataacccattgccctggaaaaacatgtcttcatgaatacaattacagccaagaatagaagacctgcttttcatagggagcaacaaaaagttcataaaaatcacttcattggtgcaagaatggtatagatcaaaagaaatgtaactaatacaattgctcccgcaagagtaaaccctggactagtccataacatgaggttcgacctctctgctcttttgatgggatcaacttcctcagacaatgggtaatttgaacgtctaggattccagctcacatacttgtttggcgagaactgtgagaagaaggatttcttcttcctcccttgctttctaaagcttgaccaggccttgtcccaatccatagagaatttgtcatctgatatagtcaagggtaagcaaaattaagatcattcaaaaacttatttcaccttatatacttctctctgaaagtgaaaaagttttcatacagatgataaatgttgctgaattaactttgcataaactactgatagaaccctctaattctatcaagagaatttggggagttttagcactctcccaaagaacatcaactctcaaaccaaaatcacacaaaacaaaatcccccattcttttcatcttccatacatgtaactaacattcctaaccaaataattacagcaaatacctagtagtaccctataacaaacaataattaccccattaattgccttttggtatgtgcctataaactacatgaacagtaagtcattatacaatagaataaattcataaatccatgtgcatgtaatgtgaggcagattcatgaaccagaaatggagaaaattcataaatcttgccgacataaatccattgttgacacagaaagtgtagatgacttttccaaatgggaaacattctaaaaagtgggaagtcccttagaaagtgaataaggggcagggcaacttgaggagtgttcttctctaaagactcttctcaaagcaatgttatataatattacctcacatacaaggaagccatactgataagtgataacagaccagtcaccagactaccatgcaagagattttcttggggaaattgttggttcaagaacatcctataacgcatagaactttttttaacaataaccccatcaagcaggcaactgatgactaatgactaactgaaaaaatcaaatgggcaacacctcccccatcatttcttcaaataaagctaattcaataaagcatagaaactaaattacaataacccattaagcaatggatgactaactaaacaaacccatttacaaacaccttacctactatgtatcatttcttcaaagaaagaactagttcaataaaattaaatagtggcaaaataagagcacctctcccatttttcactcaaacatgtcctactactttgtaggcataatgacatatagcaaaacaagtatatattttggcatattcttctacatgcgttaataataacataacacgaaatcattatgttgctgcatatgcaccatttattaacttggtcatatgtgtgtgtataacatacatggttcagaaagtgatgaaggaaaaggtagtaccatcgtcttggttatcttgagaatcgttggaggagcagagaaacttcttggtcccgtaagaggaggaagaagaagatttgagggttgaggaggtgaaagcgtgagaagaaattattccgattcgagcttgaatctccatgaatatggatggatttgatactctcaatactgttaacgtctgtgtaaactcttatctcatagctttaggatcaaattaaaatcaaccccaaactcatccacgtgtacatactcctcactcacttcactcttttttt

SEQ ID NO: 77049 - DNA, 1713 bp, Cannabis sativa
gtttaattatctccagttctaatttataactccaataaaatacttgaaatttttggatttagtactgttattattatttatatatatattatttacatgtatcatcattatcagacaaattataagcaacctatatccattttgatttatcattattagacaaaaatgtgggggatcagatcttttgacaagattaattttattcatatataatatttctcttatttttttttaaataaaacaaagagaatattaggtcttcatgaaaagaaaaacatgtcacaataaaattaatgataataaaaaataaataaataaaaagacaaccatataaagattggatttcaaactgaaagatatggaaatataggcataattgatcatttgaattatgatcagttgctagtttgtttgtataattagttaactactcaaacatataggacaagaccagttatatatatcattattttatttgatcagaacataaattaggattcaaatctcacattaatgatcaaggcctatatatataaatgaatttatagatactatttcagttgtttgattgacgtacatatatgtataaacttttctttttatgcttctataattaataaatgctatatatatattattttattttaagagatattttcttttggcatatatatataaataagtttagtgtggaatctttcataccacataattaattgcacatgatcttcaagtttgaactatgttgttgaaattttctgattcgtttgaataaataaataaattaatataaaagacaataaaaaaaagtaacatggctagatcatgatacaaagaattgactcaaggctgttcattcatattgattttttttatataattatcaacttaattatacaaaaaacttattaaatgtggaactgtgaataagttgcttcatcaaaaatgaaattcgatctataaaaatctagacttattgatcaaacaagtgcagagataaaaatattatactgtagtactattttggtgttgactcccaatgtataatagacttattagtttacacgtgtacatttggtggttgtgtagttatgttagttaaaactaacttaaccacctcttcctagatatacttcactgacctatgtttataaacaggtccagtacaattttgtgtaaactaaactcttgtacaaacacttttagattattaaagagagctatttcttcatttatgtgctttgtgtatgtgtgatatatgtgtgtgtgtgtgattgacattgctgccattgttctcaagagtcacagcttataagtgtttgatcgtggaaactaagagtgaatctccaacaattacagaaagtaaaatcacacacgataattttacgtgttgtcaatattttctcgaatactgtttattcacgaggtcgcaacctaaagaataaaatctactagtagagtatcaaaccattacaaaagtacttgatttatacaaaataagactccaaacctagattagaatagtaacgacgtctaaaaatcccatattcccaacctagattagaatagtaacgactaaaaatccctacagcgtagcctatgtcacgccttgtacatatgttggattaaaaatcctatgtgggcacatatgtataatgtatatgctattataaagtgtgatacaaaattaagtgaccaattatgttatgggta

SEQ ID NO: 77050 - DNA, 580 bp, Cannabis sativa
tttttttttaattatcattttacaatgtacatatacgggagaagtctacactaattaacaaacattgaatttgtatccccaacaactcaaatttttataatgtttcttacagaaacaagagttgaagaagtctaccacagattctaaagattaaagtttaagttaaattgttttatatatatatggttaatattaggggcaataaatgtatattttgctacaggccgtctcaaattaggggtcttaggccaaaaaatataatttaaagcttttttatataaaaaaaattatatatatttatatttatagtggtaaatttaaaatgtatatatagtgtttttttttcttaataaaatatcaaatatagtatcttaaaatataaataagtaggtatttttttaataaataatagtaaaaatataaaatatgctatgttttttttaaaaaaaaataagtttgaagccttttttgttaaaagattttttaggtttgggtggggtgccttgggcatgggtcttgctgcaccacctttgagtcggcctgtttaattaaatttttaatttttattttgattatgtat

SEQ ID NO: 77051 - DNA, 973 bp, Cannabis sativa
tttctctctcctgatcttctccttcccaaaccctctctttctcgtctcttctctctctctctctctctctctctccgtggtggtcgtcggggttaggattttttaggtcttggggttcagttctgtggctcgtctaggatggggtggtcggagaaagtcggcgttgtgcactgtgaaagattgtgtgagaggggagttgggtgctagggttttttcagttaaggagaagaagaaaagaaaaaggaaaaaaagaaaataaaagaaaaaaaaatatatttttttttatttttatattttaaattattatttgtaattatttgtaaaattaatattacgtgggccactaaaaatttgccacgtgtacaagtgtgtacacttggagtcccttacttaactgtgatttttggacaggggtacagagcaaaacagaatgggaacttaagtagttttgtcccaaaaatatataagatagtttcctcacaaattaaccataataataataatagctgggcatcattctttctatgtatcaatcaaactatgtaacaatggtaaatacaaatgtataagaattgcattgtgtacctgtgttaatgcttgactcatttccatggcgtctctatagaatttgtggcctcaatacacaaaattagagagcacaaaaactcgtagatgtggtttccaagagataccaactctctatatttaacatcaaatagttaaacacattgtcacttggagacaaagctgattgacttctatgtcaatgcactcaatttttgactgttggaggactaaacaaaaattaatacttttctttcatatatagaaaacgaattggaaagtatattactattagtattagggatgcatatttttcctatatggtttcacgaggacccattcttaaggggtggcaatttatgttcgcaggtcgtatttgtgttccatatataacaagtatatgctcgat

SEQ ID NO: 77052 - DNA, 801 bp, Cannabis sativa
ccaagatatttcagaggaaaggtctcttaagcaagtctaattttagacagcatagcaagcttctccctaggatcaacatccccaaaataaatatgagacttcttagaattgatttgtaaacctgatgcattgttgaattcctccaacacctgagtgagagcatcaagggactgacttgaacccttgctaaacaaaataagatcgtcaacaaagtaaagattgatcaatctaagaaacttgcacatcgggtgaaacctgtacttggttgtcttggctgccacaagaagtaatctagtaagatattccattactagaacaaagagaagggggaataaagggtcacattggcgcatccctttttcagctttgaaaccccgttgaactcttccattcataataatggaataaaatgtagaccgaatacagatcatcacccaacagacaaacttttaaggcatgttataggcattaagaagatcttcaagaaaatcccagttgattgtgtcataagccttgcttaagtcaatcttaatggcacatcgacgagaaactatcttccttgagtagtttttcaaaagatcctagagaatcatcacattatgagctattgaccccccttttatgaaagccccctggctctgatttatcaccttaggaagaaccaaagatattctagagcaaataagcttagacacacatttatagagcaccgagcagcaatcaatcgacttataatcatttgctttagttagattttcatgcttaggaatcaaagatatcatagcagagtgaagcttaagg

SEQ ID NO: 77053 - DNA, 543 bp, Cannabis sativa
gggcataaaacccaacagttggaagggttgcaagaattggattggagatgaaatttgaaatgcttctaattctaagttagcaatggtcttcaaaggatgtaacttttaggataagagaagatgaaatattaagtctttctcttttcttttattcagatgattatatttagttttggtttttaattatttacttatttattttaattttaattatatttagttttagttttatttttgtaataaattaaattgcataaaaataatacacatcattaaaataatacatgtcatcaataataatatacgtgtatgacacgtggaccaatcgcgtgagtctgttatatatgacttgtcatttaacgcctacaactaacagctgcaacaaaaataaaagttaagggagttttgtcgccatttttttattgaggtcatatgtgtaacaaatcaaaatgataagggggtttcgctgcaatttttcctattttcaaatttcaaaaattttgattttaccaattcagaagatcgatatatgtttaaaaagtc

SEQ ID NO: 77054 - DNA, 511 bp, Cannabis sativa
ttcagaaaatcccagcttccaagtatttgcaatcaaatctctctcatagtctggtatgtagaaaatgttgctcttatgcagacgtattattttgaataatatatatatagaagatgaaaccaagtgctcttggtaaaggtatttaatcgaaatctaaatgaactttaccccagattccatctatacaacttaatttgtatagatacccaaaagagagtacgtttgaatcatgtaaacaattctcttcctcaggttctaaatcactatttaccattcaatttttctaaattttgaatttttatttttgatgaacgagtatcaacatgcttaatagattctattactgttacaggtcgaattgcagaaaacatgagctatattttgagacaattaactgatcttacttcgttgggtacttagaaatatgaaactaagacacctgttggatatacaagtatcaagatgatgggtatgcattctaattttgggattgccttttgcatttgtactt

SEQ ID NO: 77055 - DNA, 1268 bp, Cannabis sativa
aagccttttaattatgataaacataaggtggtatataggcatatttttatgatactattatggcctaatgactacgaatgagcatctatatttctgttatgtgtcaaactattaaaatgagcatctcttctcccacccgacacttaattgtatactctttttccctgaaataactgattgtgctttttgttattattaaatcatagaaaaaaaaaaaactcaaaaaggaattagtaataccaaggagaatgtttatgcatttcaacctacgcctctagctataaatagtcctttaattaattacttttttatattctcctcttcttttattttatataaaactttcctaacattcactacatataatcattcaaacgaaacgaggctatataacttaattagttaagtattagtaaaagtaattaattaacgagtactataaactcaacttatccctaagattaattattatatatatatacattaaagatgtgatgtttttttaatcttaatgaaactacagtaatattaacacatccccctgactagattctcttttttttttggcttcttcgatctgtatttgatgataatggtcttgtcaacatttaactaccataggatctaattctaatgcttattctcaatttatattaagaaatcacatatcattcttaatactaagactctaaaaaatcgtatgatctttggatataattccattcatttgtctttttaattaaatacataataggtatcaagttttgattatttcttttacgaggaggaaggatgaaggatttattgatatcatattgttcgagaaaccttaaatactgtcaaagtaaaagatcgtcaataaaagcattataatactgcattgtagatttttaagtaattaatgttagaatttataaaacactccaaaaatacaaataattacatatctaattatattttaaacagtgtattaatattgaaaaactttaaaatcatattttatagaaatctttgctaaatcaaagaagaaaatgatgataaaaaagatgagcggaagtactaactaaaagtcattattggagattgcacagaaggttataattttctaagaatacaccatttctctaaagttatctgataggaatgagagaatacaagaatccttgtgtttcttggggaacactacctatttatagacacatcttagaatgagtttttggtatttataatttgagccctcaacaaattataaattaacttatggtatc

SEQ ID NO: 77056 - DNA, 543 bp, Cannabis sativa
  modified_base (380)..(392): a, c, t, g, unknown or other
  modified_base (456)..(461): a, c, t, g, unknown or other
aaaagccaacgattcatttgtttatttactaagatcgcatcatctataatgtacatatatagttaattaattaatgaattactaagttatggtgttaatcatggaatcctaagtctattggcaaagctaaaagatatatattatagggattattttacaaatataaaaaaataataataaaaatacaatatataaaattttaaatttttttacaatttttataattttatttataaaaatacaatttctttctatgtatttttatgttgtatttttgttatttgaattttttttttgttatttttatgtattttttattattattttcgtgttatttttataaaaagaaaagcttaatttaaacgtaaaaatataatttnnnnnnnnnnnnnataatattttatgtaattatctttatattatatagtttctttattgggaaaaaaacagaaaaannnnnnaaaggaaaaaaaattacaaaaatactttgggccggcccattaaacatttatacagtccacatacaaatatttacaaaaatac

SEQ ID NO: 77057 - DNA, 599 bp, Cannabis sativa
atgttgctcgatgacattatgaaaagtatagtagtatcactaaaaactatgatattttggaaaaaattattgcaaatgaaactaatgatgataaaaaaataaaaagaaatataaaagttgttctactcttaagtataattacaaagcttacatgcgcattacaggtgacaaatggagttaaagtggacagttaaagtttttagagacactcatagttacaactttgttacccccaaataagaggataaaaatgaaaataaatcgtcacatgccaaaagcagtgaagaacttgatggaggcatttaaaaaaaaagttgaaaattatatatacgttataatttaacattctaaaatatgacattcataaaatgataaataaacatataaatagaatagaatcctcaccttgattataacaaaaattactaacttcttttgttcaattactctaatacttgattctctttgttgaagttgaaaaatggcaaactctcgctcggtagattgacgagataaataatgagttaagtaaatattaaagagggacaaacagaatttatagtagttcactccccatatcgtgataataatagagctac

SEQ ID NO: 77058 - DNA, 920 bp, Cannabis sativa
  modified_base (486)..(498): a, c, t, g, unknown or other
tcaaaagacacttttacatcgtgaagcacaaaagcaatccctataattcaggaatcgtatcaaaggaatatagcaagctgtccaaatcccacaatctatgtattctaaatatgtaatgaatgttcttaccaattatagatattgtaagcaaaagggaaaccttccctcaagcatttagccctataaatagtgatccattctcactggtataggggtcgaaagaattacttcagagagatctaagagaatacactcagagatttcattatgagagcttcaagagaggaaacactatattctttgttcttgagttaatacaattcaaggggagtaggctattaccaatctaacggggccgaacctctttaaaatcttttgttctttactgctcattagttcttactttatcttaattatattttctatcacttactatttgactcattgtcgttggctaaaagtgaggtcaatattttggtactttcnnnnnnnnnnnnnatccaagtttgctctttgctttaagtttaatcaaacacatagaatgctggttcaaactcgcagaggcatggccgatcaggttgatccactagtgacagatcctacactgtagactcttgggaatgcaaaggtcccaccagtcaccaatcctgagcaaccaaacacgcaactgatccaatttaaaaaactgttagcactgatatcgacaacaaagggcctctggtggtgtggccttgatgtggcgtagatgttggaatctacaaattgttagcactgatattaacaaaatcgtgattcatgtgcaaggtgaattgaatttaaaaattgggtgggatgctttgtttatgcttcccctcaacatgatctttgtgatgatttctggaattagcttactagaaggatgaagtcttgttccgatccat

SEQ ID NO: 77059 - DNA, 520 bp, Cannabis sativa
  modified_base (31)..(36): a, c, t, g, unknown or other
aaactgtaaaaatgtaaaaaaacattctttnnnnnnaaaaatgtaaatattttataaaaaatggtgtcttatgtaattattcctaaaataaatcatgtttttgcaaaaacttgtataccttaaaacaataaaaatgaagtttctctaaggttatacttcaaagttagattttgataagaaaaggaaaaagtaaggaaaatatataagaaaaaaaagtgtagaaaaaaaaaaaaatcaatttttcaagtttgaactaagtttttttattgaattgagtgttttatttttatacaattttttttccataccaaatatgataactttatttattattattttctctttttttttttaaataataaaaaaaaatctctacttttttctttccaaaccaaaatcaaatttgaaaatatataaataaaattcaggttagaaaagaaaagtgatccaattagaattgagttgagatccatgcaagggcccaaaaactaggcccaaaatagaaaaggccgatctttca

SEQ ID NO: 77060 - DNA, 3018 bp, Cannabis sativa
attaggtatatgtaagtatagaaaatcaaatttactttttagaaattatttaagtttatatatggtatattttaatgagattcacattttaaaaattctcttttcctaagattatcatattttaatatcgaaccaaatctattgtttcccatatttgtaaccaatcccttttcctaagcacaacattatagtttggtgactcgagtgctattaaaagtacgtactacaatccttattataaggcttatataacttcctgataataccatacaaataattaatagcataatattacaagcatggattccgaagtgtctaatctttgatgaagccctaaagtgaaggaggttttctaattttagtggcttgctcaaacccatatgcgatttcaatcaatttgggttcataaccttttagtcccccaaagaaaatgccaaatggcacctctccaagatagcctgcggggacagtaatgccaggaaatcccccaatggccaagattgtactgataattgggagtggaggaaaagaaggtccagcacaagccaccaatgcatctagcttgtaccttctcattaacttcacaaaaccatttcttgtttgtctttctaaagtgcccaatacagccttgtctattccctttgttgcttcggctgctataagtaatttttgcccatattccttaattttttcctacaatatccaaaatttaatagactatatattagtagtgtatataatatacatttgtaatatattaatttattgttatatgcgtggctattattatatatatatatatacatatacttaccaacttagagtttttattgttaaaggctatgacatcggctagggattgcactggtgatgacaccagctcttttaggtatgcatttaaatctatcttgaaatcatttttcattgcagtctcttcactagatgcatcattgtagatttcatcaatatttgttattttcagattatctattacaattgcaccttttttcctggtttttcaataaaatatcaatacattaatttcatacaccaactagtaactaaaacataaaataggaggacaatatgtatggatttaatatgtaagtaagtatactagaacagatgctatattggattaataccttaatgtgctgagatgttcctcaaatgtattaatgagaaatgtgtcgatctctttagaaatgttgaattcaaagtaaggatgtcttacaatccctagtctctttcctttgagtccatttgaactaagaaattgtgcatagccacctttgggaatgtacttggatttctcaaatgttgctttgtcattcttatcaacaccagcaatgacatcaagaacataagtggcatccgagactgtcctacaaattggtctatttcaaccacaagtgatgatttagttcaatacaaaatatatttatacatagaataaaaaaattgtaagctaatgcttacttacccaacggtatcttgtctatgggtgatgggaacaacccctgctcggctagtgagaccaatagttggtttgatgcccacaaccgagtttatgctggctgggcataaaatagagccatctgtctctgttcctaatgtaactgttgcaaaatttgcggctgctgatattgatgatccactactcgatccacatggagtttccgttttgtcataaggattctgcttatatatatataaattatagtaacttaatcaaatccccatattctctagttctttctgtgttttagaagccgttattttatggaacttactcaaatttttattatgtgtattttttttttgttttgttcttagtaactgttttgtttgtgaaaaagtcaatttaaatactgtgcaaatcttaacaggagttgaagaaggcaagtcttgaacttgatcagtttacataccattatcaaaatagaaaacgtcggaacaaaagctcatatatatcaagccatggttcaacaaatggattgatcagacactaggatgatgcacagtatatgttaatttgcttctaattataataaaacatataagtaattcttgttttattaaaaaaattaatcagcaaatcttccaaagtgaaaggaatggtatgcaatttcaaattgataaaaaatgagaagaacttaccaccccttggcctcctctggcgctccaaccattgggtatataggctctaaaagcagaccactcggtcaagctggcttttcccagtatgatagccccagctttcttgagctttgccaccactccagcgtctcgtggcacgactgagccaagcaacgccagtgagcctgcagtggtgttcatcttgtccttggtggcaatattatccttaaccagaataggtattccatggagcttggagaatgatactggagccttaacctttctctcgtagtcagccttatcggctagttcaccagcatcgggattcacttctatgacaccatgtagtagtgggttcaaccgttggatacggtttatatagaactctacgagtttccttgaggtgagtttgttttgcttgaaagccagttggatttcgtccactgtggcttctaagattgagaaacctttattattattattattattattagcagctgctgcatcggagtagtggtaacctgatagaagtaaggctagaagctggatcagaaccattaaatggcatatagaagagagagatagaagagctcccatggtggagaacaaataatggattgaatgtaggtacgtacgacatttataataatacaagatgagaaaagatgtggtgtctgtaaaaagttagcattatggtgtgaaacacatgctaggccattatattagtactatccatagtgtactacaacaatatatatttttaatgatatggtttaattttttttaaaaaaataaaaatcataaaatctattaattaataaatttgctcaaaacaatcgaacgcacttcagaggtacagtcctccaactgaagcacacg

SEQ ID NO: 77061 - DNA, 757 bp, Cannabis sativa
tgggataagttgagaactaccattttttattacacattaaccaaatataactgcaaactaattttaattgataaatactttcttttataatcaaagtgtcaaatataacctcataatttgttaaaattagagcccctaacgcatataacgaggatatgacccataaaacttaatataaattaaaaactaataaaaaaaggtaaaaattaaaataaaaaataaaaagtaaatatacaatataattttctcttattattttgttcccttcaccaatatcaatggcgaactacccaatgggccagttatactatatataatttcaatttttaattgataatatatagtttaatttttttttaataaacgttattgttggaactttgatgaactttgatgaatctcttaacaaaatctataagtgttctagtgtgtgtgaagtagaaagagtctcatatggaatatgaacccttatttacaagagtatatagaagtgaagtggaaatatgttcaatgggtaataacaagttatgaagtgataaaagtgagatcatgctataattatccgaaaagaaaagcataaattcctgaagcgatttaaggatgagttaatagaagctcttaatgagatctatacttaggggcgaagccagaactaaagagtttggggggccaatatcagacagtgcaatatacaataaatttaaattttggtgactttaataccttttaaggatgtgtgtcaattataaaaaatact

SEQ ID NO: 77062 - DNA, 952 bp, Cannabis sativa
tgcctgtcatttctgatttggtcagtagttcgggattaattgattttcctgttaaaggcgattttctcacctgggataaccatcgtgattgtgaggctcatgtcaaatcggcccttgacaaggctttatccaacgctcagtggctgggcttttttctgaaggggggtgttcattcctgccacacctgcaatttggatcaccgtcccttggttatcaggactgtggaccaggaatccaaacctagaaagcttttccagtttgaagcctggtggaccagggatcctcgtagtgcgcttgttgtggagagtgcttggggctctctatcccatagttggtcctcggcaagaattttcaagaaggtgaggctactcgcctgacgcttagtaattggagtaggaatcagtttgggaaattagattctcgcattgctcagcttgaatgtcgtctgaacctgattcagggtcgttcggctgggactagggcttgggctgaggaggtggaggcacgaaagtctcttaacgaggctttgagacaaagagtcgtgtactggcagcaaagatcccaggtgtcttggatcaaggatggtgataagtgctcgaagttcttcttcactacgaccaccataagaaataggagaaatgcgattgagaaaatcttaaataatgatggggtgtggttgagtagcaggtcggacattggaaaagaattctgagattttttgggaagcatttttaaaaactcggtgtatggacctttagagagccttaatggcctggtcccagaccccctttctctcgaggagcaaaaggacctggttgtcgtgcctaatccttaggaaatcagacagactctgttctctatgggtagtctgaaagctccgggccctgatggtatgtcggtgctgttctttaagcactattggaatacgtttgggagtgacttctgtgatgct

SEQ ID NO: 77063 - DNA, 868 bp, Cannabis sativa
tggaggcttgaagcggggacgttacacacgataacatgacttaatttttgtagattccataatttcttttataacaattcatgtatatcgtgatcgtgtaatcaatatcgtgtacatattcgtatttgacttttccacatgtttaataaacattttgcatgttgtatcatgaacgtgtcaacacgaacaagatataataacatgaatttctagccctaatttataatcatggcgatatttatgtaagaatgtaagacatattaaacatatcaataaaatataagtagatcgatgctaagtggtgcctaactaatactaccacaaaatgtcataacatacataattaagtaccgaatcaaacaaatttttagaaaattaagaaggaaactcatatataatgccatatcatataaagattattataaaaaatagttaactaagcattaccttaagttagtattagatattagtacttaagagaactacttataaaaggcacaaatagtgcttaatatctttctacgtgttaatatcactattaatataattgaatattaaatctcatatgattcaatataataatttttaaaaattatcactaattaattataaaataatataattactattcatatctggtgtcgaataactatactctagtagactagtacttaataataatcttaattattataaaatatatatcccccatttattgttgttgtggtttccaaacaagcataagacttgtaggaatttacacttggtgaaattccaagtttaacctacaccactcaagaaaacttgtcaaaacgacagggacaaagttgtcccagaaaattcaacttaaaacccaatcaacgacaac

SEQ ID NO: 77064 - DNA, 540 bp, Cannabis sativa
gtggcaaacctaaaaatgccatatttttctaactttgttataaaatcccatatttcatgtaatttttacaaaaaaaataatatagaggagatagatgaatgtttacgcaaaagaaaaaactagcatatacatataaacaaacattaaaaaaaacaaaaatacaaacatttaaaaaaaaaaaaaaaaaataacagcgcacctacgcatatacctgccaaaaaaattgcaaaaccaaaggtatattacacaattaaaaacatcaatgttacttgtgatatttttttcaccatttggttgataggtgtaaatttctcgaaaaaaaaaagagctatttacaaaaatatgggaaaaaaaatataagttatgatatatatggcataaaaacttaattacactaaatatggcattttttttaaacaaattttaaaatatgggaaaaaataagaaggaatgccatataaaaactttaaattctgtttctcttttttttttttttgtttttttttcttttctttcaaaaaaaaaataaaacactgtaat

SEQ ID NO: 77065 - DNA, 562 bp, Cannabis sativa
cataacactttcagctatctcgttggaaattgcatggagaatccatgagataacaatactgttgcagtgattccatagctcgaaatcttcatcatcttcgtccggaggaggaagtttgccattaacaaacttgagtttgtctctcgcattaagtgcgactgtcatagctcttcgccatgagctataattttcacagccagtaagaacttttggaaccaagctagctctaggatggtcactattggacaaatagtaaggatttcgagcttcatcagagtaagatctgacattgttgtcgagagccgagaaccggttggaattttctgatgaacttcgagtttgagctcctccacgagccatggaggtgactgatgcaatggaatttacttagagccctgctctgataccatattagttgcggaagtgtgtaaagaaagagagggaaaaacagagagaaagtgaatgagaaaaatagagtatttttcattaattgtgaatgtgtacagtgactaagcttatatagctcaagaaatacaatcatacagttggcaatctaactgcc

SEQ ID NO: 77066 - DNA, 1766 bp, Cannabis sativa
aaacaattgaaaacttcaaaattctcaagatagagtaaaaaacaaatgtattataaggaacaccactaagtactaacccagtaacacggatttgcttttgctttgtccgtccaatccaatccgcaaattcaacagtgttaggtacctgcaaattggtagcaaatatttcatgttcaaaagcagccacaacaaagagataaaagagggttggccaaatggacccgtgcataattttataacgtaagtatcttcattgtagctttagttttaacacaaaagggttttattgtagatatattataatggaagattggtaggcaataacacatacagataacaaaataatagaaacaagacaatggagttaaagttgaactccttatgagtatttgctaaaaaaaaaagccaaatgcaaacaaatggctggtattcaagagactgtcgactcttcccaagaagaaaggctccactcaatacaaattctccataatcctctccatttgccataccttttttttgggaaagaattttccataatcccgtctgccaaacctagtctaatagaccctgacagccatattctctaacttattaagttaagccttatgttatatgtatggttacatttgataacaatctaattatgaagatgttataatattaatataacagggtgtatttgaaggaagtgaatgttcagtggaggacctatgggagaaaatcagattttggacagcagcttgggtttttaaaactaaacacttttgaggagttatctttcctagacctgtgtagagagtggaaaactttgatgtatcatgttttttgagttttattgtaattttgtttttgcaatgttttatgtcttgtgctacttttgattgttaccatggttgtccgccaccacaaatgaggcttttcaataaattagagtgggggtcagtctaagacaagtggccctttctctttttttcaaaaaaaaatattaatattatataactaatgtttgaaagaattactgaatataagtaatgatgttatatttatagtttttgttagactttcaattaatgtattattggatatttgtaattttctaaagtttcttttaaaaaatttgtatttctagatgaatagctatgataatcatgaattatcttaaaatttccatcaatataaaaattatatgaaaatagagtccttgcttacaatgtaaatttagtacataagtaaaagtgattaccgtggctgaaagaagaacaatgttaatatgtctcggaagcatgatgataacttcttcccaaacaacacctctttcaacatcattaacatagtgcacctcatcaaatataacctatatccaaatatgcacagcaaaaaaatattaaaaaaaacatttgttatggaaaagataattcttcttattaaaaaatgggaaacaagaaagcgggatgggggtggtaaataacagttgaaaaaaaaaatattgcagtacaatccttttttacccattcaatgtcacgtataatatcagcaccccggtacagcattgatcttaatatttctgtggtcataataagacaagacgcttcaggcttcaagctaacatcacctgttagaagtccaacatcaaattttccgcagaaatccctatacttttgattgcttatggttttaatcggagcagtatagacagctctagtacaatgctgcatgatatataaaaacaagtttaatatcatcgaaaagtatgtataactatggaa

SEQ ID NO: 77067 - DNA, 1036 bp, Cannabis sativa
tgaatattttctttaaacactccgagaccttgaaatagagagaaataagcgtaaaaccgtcctaaaagtagaaacaaagagcgaaaaacaacactaaaaaacgacccaaaacttaagctaaaaatagcctaacactcatttataaatcttgggagctctccatgtaagaaaaaatgtagcaacatctttgtcaacttctttcccaccatatccctgaacatgaaaagcaactggcattccgtctgatccgagagccttttctatcctcatagcaagcatggctttaatgatttcaaaactctcattgatgacctataaatcctcatcagcgggcaaaactcctaaaagacccacaagcgaggatgttcccctctacgggttgatggaatgagtagtattaaatttctgagcaaaaggattgacaatttccccggatttgtcacccattctccatcagaattatttatagcttggattaattacgtctcctccttataactattgaagccataaagaattttgtgcatctccttaagcctagaaacccttgattttagtttaccatttacttcatttgatagatgtacatttttgcacaattttgtaaaactttagctaacttttagctcatttattgaaactgcttaaaggaaaattaatagtgtcaattccaagaaagaattgatgctaaaacaagacgcgcctaaagcttgttttccctttaatgtattcacctaaaatatataaaataactcaagcaaaaaaaaaattagttgcgttatatttattttattagccagtaatattaaaataatatgaatatgtataaagtcatttttaataataaattaaatgtcactaaaagtcaaaaacagatgtggatatgtacttatcaaaaaaaaaaaaaagatgtggatatgtactatttgtatttgtgactgtgaaggtagtgaaaaagctattaacatgtgggaaaaagattagacataaaagatgcgatccacaagggtgctttcttggcgtgaagtacttttta

SEQ ID NO: 77068 - DNA, 1355 bp, Cannabis sativa
cccaacttaagatttccatttcaaaacaattcaaaagcataaggtaaggtgcttgttacagtaaaacaatctcataagaaagaagactgcccatcaaaaatcaaaccaagtgaatataatatcacctaaaattgagacaacccatcactcgaatctaaacaaatagaataaatgaagccatacccagatgccaaaatcactaaacaagcacacaaacacacacacacacacacccctctaaatatttacagaaaataaattttgtattaaatacggtatatcaaacaatgcgtcacattcctaattaacaaaacatccaagagagagaattacccaacatcgtcgcgatagagacgattgatgagaacatcgcctcggaggttcaagaagtaaatggcggaagcagccaccggcatgacggatccagtgggtggcgtccggaatcagatctaggcggagtagttgcgatctgggacgtaagatttgaaagatggatggcctatctatttgatttgatctctgcttttcttggtaagggagaaatggaagaatttgacaaagcagaaatggaagagaagagttgagttgtgttttgttttcttggtttgtttgtttgtttttatatttctttcttagctcaaatcaataataaattccagtcagcggaaatggcttcttctcagtccttcccacgcgtgactacctcgcacgtgctccattttctttctagtttctatctttatgtagtgtttgattaggtatgaattttaatgtgatttatttggaggagtatagccccaatcaaattttaattacctaaggaggtgttttttttttaagagaaaattttcattccaaaaaattcattcaattgagtaattcagtctcaacaatgacagaaaaatcactcggaacattagagctaaaaaaatacaatcaacatttaaacgagaagttcttgcaatttgataagtaacttgattttatttaaagaattcaacaactatttgcaatcttccacaacacctacaaacgtagaaagcatcaccttatgtttatgaattgcttggactaataccaagtaatcattctcaacattgttgaccgttggggagtcttttcagtcacaacaacacctcattcaatgttatagcttcggtaacttcagctagcacaacacctgcctttaattctgatataccagccaccacatgaccgggatgatctctaatcactccatgaaacccatacttttcgtcctcctcaaaaatggcaacaccgataatcatcttaagtatatcaacatctagtttagaccaaaactcaacccctttcgaaagacactaagtatctgc

SEQ ID NO: 77069 - DNA, 7930 bp, Cannabis sativa
  modified_base (49)..(55): a, c, t, g, unknown or other
  modified_base (425)..(446): a, c, t, g, unknown or other
attttttggaaaaccgtaaaaatgtaaaaaaaaacattctttgaacgtnnnnnnntaaatattttacaaaaaatggtgtattatggtgtatattttttgtgttttacataatttaaatttaagtttctacccactggtaattgcgtatatcttaaaaataccaaaattagaaaaagaaaaaaaaaaaaactaaaactaaaactaacatccaagtgaatagttatgatttgttgtaattttaattaaatttcatcgcaacgccaaagtttttaatcaaatttcatcacaatatatcatcatcattgttaagatcgatttttgaataatccacaccatttcttcttctattgtaacaaaaaatttcatatcactaattacgattttaagtatggaaaattccttaataacattattattattattannnnnnnnnnnnnnnnnnnnnntattattattattattaaaatcaagtttttatgactctatcacaaaattaacgttaagcattgcaaagtttaaaaatatgcaaaggtttagatctaaaacagataacgagtaaaaccaataaatcacatagatgtgtttgaaactttttaaattaatgttttaaataacattattggggatttaaattttgcgtttgattgtaattcattaaaaaaatggtgtttcaataatgatgagagctggttgcatcaatagcaatgacatgaggtagtgctctggtgtggcctgtgctgtggggaggccatcatggtaaatggagtatttgttaatagaagagacagtacaaagaggttttgtggtgattaatataataagatgcataaagcatgaaggcttcccaaagataaagaaaatatcccaccaaatgataactatgtaattagaagtaattgaaaattctcaattatactctccaattctcgtggctcttatgagaattaagtgtaattacaaattattaccaattttagataattaatactattaaattatgtaattactagctcattttctaaatatgaaaataaaaattcatatgtaattactacttggatatcataacacattgtattttaaaataaatattgttattagacatcaatagtgtatggcacgataattggttagcaatatttcttaaaagttattatcttaagctatataagattcaatatttaattgcactaataataatataacaccgagaaaaatattaagtactattagtattttttagtatttctcttttaaaatagaatataattactatgtataattatactacctaataattacataattgtttccaaaaacacttttaagcatagaggaagaaaatataaaagtggtgaaaattaaatcaattaaagagagagagaatatccaatttattacaatgacacccacaaaggaagccttgtagaagctcatcactttgtagttgcctcaaccaaatgtgtctataccaaacgtactaaaaatataacacccaattccaaatatatgatttggagaaagttacataaaagaaataataataataataatggtagtggtaacagtggaaatgtacacaaaaacttcactcagtgtcccatatatatagaaagactcgctcctaggaacttagtgtggattaatagatcaaggcacatagttcacaacagaagaagctggagtataaaaataagtagctagctaccagtcaatgtaagatcaactaacgccgcctccgaattgccttttaaggactggtgttctgctaccatttgcttttctcttttttcaaatgtaggtctgaccaatcttcatctctgccattttctctctgaataaaagcaagaaggactagttaattaataatttttttaaatgagacaaaaacacatggatagatggagttgttcaatgaataccatttgacttagtcccctgctgtgcttgagagttagacctttccacacgaggagatccctgccttccatttgtaccgggcaaagaatgtctcttcttgatgtaaatgtctctgtcttggacatcaggactggatcttggagaactatttgcattgagctttgctctagctgattctgttgcttgcataaagtgggggattgaactattgctgctactgtctctaggttcttgttcactatgctcaagtttcattgcaccaaaagaattgcgtcgcttcccatttttctggtccttaggcaacttttccgtgctacttcttgagccagattcgtgacctgcattagaaggtgacttcttaatggccgacagagactcgcgtttctgatcagacctgctcttgccagatctatttcttttggctttcactgaaacctgactaccaggtgttccttgggattcagaaacagtcatatggctagcaggtgttccatgagattcagcaacagtcatatggctagcaggtgttccatgagattcagcaacagtcatatgactagcaggtgttccttgggatttaggagcagtcatatggcttctaggagaagcatgtggcgacaacacttgagcttgagcatctgtgttagagtgttgctctggttcactctgaaaatcagttgtattcctcttcgaattcagctccattggtggcgtggagttcacagtaatcacagaactaacagcatcaccatacacaagatcaagattttcaggctgttctgggattgaacgagacaagctagattctgggattgtaggaacgccaatttccttaagatctaaattttccatgttgttattatgattaggattgcaaatctcttcatccgaaactttggcctcaggctcgcgttctatggctacaatatcagacctatctggtgaatcaagagttgaagttacagagagttcagtgccacactctgagccaccaacttgaagccttgatccatgaactggactttccataacaacaacatccttgctcctgatttcagaatgtggctcaaaagagaatgtgtccttgtgtgactcgtccccagattcttgataggatgaactcatagactgacctagattaccagctaaactcagctcttcaaatttggaatgggcggcaataaatgaaggattacttgtcttctttgatccatagacaaatttcttgctctcagtctctaattcatctgtggcaagtcttttcattgaacgctttggttgttcagcttctgtttcaggtacaccagaacgcgaattgttctccggttgagaatctacttctgactgcacacattccttttgaataggctttatctctaccgaggtctctttgacatcagatgtgcttgtgttctcttgctgaggctgctccaaattatctctggcagaaaaagtggaagaatggccagcctgaaagtcaaattcgtctgcctcataagtaattagattgtcttcactttcagattgcacacctgattcatggacactgaaatttgagtccattgcctcacaaatgacttcgggttctacacctgactcatgaacactgaactttgagtccattgactcagaaatgacttcgggttctacagtgatgttccccaattgagactcaaaattttcgctcttctctccctgctgctctgtaactgaaacttccttctctgtcacagcagcactcactgctgagacagacatccacctctccaaccatttccaagcagaatcagattttgaagggtcacacttgacatcaatttgtttggtcttgggagttgattccagaagctacaattcaataaaatagatgatatttgttagaaacagcctccaaacttgcacaataaaagaatgttataagcatacctggcgagcaaatttattgctaagtagcttctccatgccagcgcttgccccacttgatttgtttgctaaagtttcttgcttctgaaaaaagaacaatattaatgttgccatcctatgtaacaattgcatcgtcaaacttcatgtagtacataaacaatgataaaaagaccatagcaccatcaaacaccataagcaggtggaaattagacaaattggagtctgaaagtaaaagtaaggaatcaaattttcatatccacacatgaataatgatatcattatttatggcaactatcaacttgaaaagtatctaatgcaaaattttcaactaccagacataagcataatataccaatagtgaacaaactacccccaccagtctcaaacagtaaagcatccttaaaacactatttgaatgagaattccattcaagagtaagttgttttggtattactaaattctttatgtagtagtacatgagacccaggagaaacatggggtccatgaacttttctaacttaaaagaaattagataaggtacaaagtgtgaacaagactaggtactttgagtggggtacactaccttcccatctgaattttgacatggttcccccaaagattgccgagcatggcgagcacgaacaagagcttgcattttcacaatagcttgaacacaacgtagagttccaacagcatgcttacgaaccaaatgacctcgaacagcagcttgcaacttgactgcatgtttgtgttttgacagttgtcgccgagcctgatcaataatttgacagaaaattagttcaaattgctataacccaatcattttcagacttgacaaaatcagaagcataaactaccaagaagcctctggcggcagtctggattgcaatgacaacagcctcatccactttggcatccgtctcagcctcactttcagtggtaacttcagtgagagtggcagattcttttggattaactggagttggcaattggggtttctcatcattgcaatgtaccacagtgattttctcaggaacagtggtgtcagctggagcttcaaagttgagaggagcagattctggaccttccttattcccaaaagcgggggtttcagttaccacagtgttgcttagcacacgatgacgggcagatctcttgcggaagctccacccacgtttatcacttggacccttgctctagaaggaaattgattacagttaattaacagaaaaaaaaaaacagatagaaaaaggatagaagaaaactgttacacaccactcttgtaattaaatctttgctaacaagccataaaattcactttctcactgcacttactattttagtaagcgcctataattaagttggcaagtacatagtaaagtattataggcgttcaaaccaaactttgagatctttgcaaaaaaaaaaaaaaaactaaactttgggcatcccgttaaagtgggcacaatgcaaaatgcacaatccttctaaactaataatcatttatggtaaaaaaaaaatcaaataatcagtttaacaaagaaaaataagattatcatataacaaatatttccaatggtatgcatactagaactatgtaatagatcatacatgtctacacaatagcgtgacattataaaattttgttcagataatttgattcaactgtcaaaactcctcctcttttctcacttaattttatgttcatttatacaatttaagaaacaaatcgaaaagatagaatcctgactcctgagactcacttttcttgtccttaaaaaacaaaatcacttttaaaaatgaaaatcttaaaactctgcccaaatgtaaaaaatatatattatatatcttaaaactaattattcatttaattttagtaaaaatataataataataataatatatcatcaacgctaaataattttccaataaataaaagtaagggaagaaaattcaacaattttaaccttacattcccaagacatttttggggggataaaaatcaggaccaaaaacaaattgattgacaataacattttcaggggaatataaaagggaaaaaaattcccaaaaaaaaggaaagaaaataagaaaaaagaaataaaagttctattaattactatcggtttgattcaataaaaacatatgaagaaaaagcacaagtagatttctcagatcttcacctcaaaaataaatgaaaaaataaaaccaaatcagatagcctaagaaacttgggattgcactcaatgcattggctatgattgtaagtgcttattcagcgattcaatacaatattaaaatcaacaaaaaaaaaaaatagagaagagtgagtaatgagatacctcagtaagttcaagatcatccttgtccgctgaatcgctaccacatgtaataattttgaaacaagaagtggtagatttccccattctcttactcacagactcacagtcttcctcctcactgtgtgtgtgtgtttcactctctctctctcactcagtcgcggacacagacaaaagcgtctatgtaggtgttggaaattggaaacattagttaagaaataagaagccggacctcaacaaactccttaaatccgctttactttattttgctttggaatccgccatttatgaaccccgttccgtttattcaactccacggccacagacaaatatttttaccaaaaaaaaaaaaagctgtcagatctcttccttcttttttaattattattcttcttatccaaccgttgattcatccacaatacgagaaataatcaaaatatcgagatgatattttactttaattaattttgtgctaaccactactttgagtttatccattgtctcaattttttgtctcagccacctacaatgatgtttactttataattcgaccaagtttttttttataattctaactgttaagaatattatatcactttaattacaacaatatttcataaaaaaataatacatggaattcaatacttaccaatagagatataacaaaaatattaaatatcactaatttttttagcaagttttttagattaattacatattattagtataaaaactgtataatttaaatgtgtttcaattattattatatactttttttatattatgtatcacatttgttgccatatcttcaaagaataaaccatagtgtcatatttgacgatgccaatttttagtacaaaataataaaatatataaaatatttggattatgtaacatgttcatggagatcaatcaacaaataatctttaaaatgtattacttataattatgttttaaaactcaaaatggcctattttattggaataagagacaagaaaaagaaaaaggatagtagataatatttgttttattggggtcatgataagaatgattaatgaattatagttggtgtaattgagaacttgagatcaaactatgactcattggccccctaattattgaataatcactgtgttttgataacgaaagaaaacttatatactcaatttaatactttcttctcaactaaaaaagtaacatgtcaatcgtttctaaaccaaaaaaaaaaaaatgatttagattcagtgcatttgacaatatggtagcgtttgtttaccaaacaaaagtattaataaacgaaaacaaacccaaccaaattattgtcttctctgctaactaaataatgagagattattttatcaaaacaaaaaaaaaaattaataatgagaaactataaacacctaaggaaaacaaaaagtggtatataatttcattaaatttaattaaatcacatcatcagtaaagtttactacattcttttctcacgaactattcttattgagaaattgattttgtttcttcttcccttttctttttcttaatactacacatttgaagaaaggaacataaaggtatcatcaacaaaattgggtccaattcagcaaaatgatgtaaattgggccaatatggagatgtggggtaggttaaaaaaatggaataattatataaggcaccattttttgtaaaatattttacatttttacgtttaaagaatatttttttatatttttacggttttcaaaaaataa

SEQ ID NO: 77070 - DNA, 770 bp, Cannabis sativa
aaaaaaaaactaagattacaatcagggcaaagattgatgtactaatcacagcagcatggctcttaaggctgacagccataaagttggatccatgctcgccaaagtagcatatttgtcaaaacccaacctattgcaggttacaacaatttgctccaagagatccgccacgaatagagcaagatttgagcccactctaggctgaattcgttcggtgacatctgagctgtcgaagataaaaggaagagactaagtccatcttgttaaacctacaaactcaacaccctgtttggctgagagtattatagttctcctctttatgtcaacaaactcatcatcgaacctctttacaaaaatttatcagctacctctagctgagcaaggtcctattctagcaatgaggaaggacgaacaagcaaaataacccttgaaggtggaagggcaggaaggttagtcttgtctcttggcaactgggaagaaggagcgttagattgtttttgtggcagaggctaggaacttgaaatctctttgtcggagtgtgtggtccgcctgcctgacgtctgagtttcctgagattctctttctctatgcccaaaagactctaaggcttgcttcttggaagcagttgatgtgtgtctgttgtgaaaattaatattatatgcaagtgcacgcaattgggaacaagtaatataatgataagttgagtatcgtctccatagggattgtaaattaaaataaatgtaaaataaactaattaacaacttagggtcttt

SEQ ID NO: 77071 - DNA, 3874 bp, Cannabis sativa
  modified_base (3733)..(3734): a, c, t, g, unknown or other
aggttattcacctggttcactaatagcaggacaaatagcttctgtaatgtgtaactgaacttcaagtccaagtggactgtttaacacggtcctttgcactgtgatctggtcacaattgcaacgatacattagatacaccttaaaaatttattaaaattaaccctactgtaagattcaacttacatatgcttctccagctattccttcaataaaacgctccccaccaaaaaaagctcgctttgcaccatcgtcatctctctggtttcctccctcttgagagcatgctacattagcatccatgaacatatcaggatgaggcaagagatcaatagacagtgactcccactcaagtttctggtaggaaaaggatacatttcatcagtatcaagccaagcaaatgtgacttgttagagagcaataaccacagtatattaatactaatgtgcacacgccagagaagcaataaccacagtatatcaatactaatgtgaccctaatcaagggaagtgattacaaaagataaatatagaaataaatgaacatgaaagtatatagaagaaatgcctctaatgaaaacggaatagactattactttgaacacgtatatgaactttttgtcattgttgaagtctcgtgcctccttaagatttaccacctgttacagtaaatgttctgagttaagaagctgaatgtgtacaatgtggtaaaaaaaacacttgtgagttgtgagaataattagtgaattacctgccaatcttcattagttgtatacagcaaaaggttgcgaatagtaatggatgctagaggcgacgccctattcaaaaaatgcaaaggaaatttgagtaaacaaggctaggattactatcatgtcttaagtctacaattgaaatatcatatgaaacatcagtgtaaataaattctccacaaatgtcctagcatttgatagaataattggattttttttatagcgtgtacatcagtaagaagttgcattcatgtgatgaggacctgttcgttaatagtttcaagttcaaaaagaaaaaaaaaacatgaaagctaaacattcgaaagcaacaagaaattaccaacttgcccctccttctcgtcgagcacctccacgagtttcaagtagcagattgacagtaccaatctccacagtcattccgtctgcaatctgacattatgaaaggcccaagtcatagcttataatgcaagtaggcatgtatattatatgctcttagacacagccagataagagtgctttcaggacggcatcgtcattgaatttttagtacatgccttgtgatcaaagttctgatattacatcatatcagaacactttcatgtctgtactaaagaacaatgatgacaagacaatcgacgtactgaaatgacatacaaaagtggaaaagcaagggcacaaagacatgaatatggaagaagggaaggcgcaaaaagaaaactgttggggaagctgggagccgcaaagtgcaactcttaatgggagaagacacgtgtcaattacctaacataccaactcctccctacttttcattgggcaacatcaccctgtaaacgtatttacttaaaaattataaatttatacttaccaacaccacacctaaaaactgaattcaatacctttcatgcaactacttattaaatgctatatcctttcaggacaatcgggttgaatttggatcaacaaatattattacttaccaccaccacaccacaaaactgaattcattatctttcatgcaacttcttattaattgccatatccttccaggacaatcaggttgaatttggatcaacaaatattattattatttgaatttttggccctgtcagttcgaccgggagacctcccactcccagtgcccccaaggtttttttgagcatgtgggagattcgaaccttgaaacttgaaacaaatgcctaccagcactttccaatacaaataggccaccccttggggttaataatcaacaaatattattttatcatacaaaagatagagcccaaccttgtcagcgaatccataaccgctacccttagcagaggtcgaggatgtttgggaactgccaaaacgaagcataaattaaaatcttagagtagaaaccttacattaatcttcataagaaaattatgcaactatgtttagcattacctgcttgggcttttacatgcatctgcatctggattctcctctagaaccaaatcaagtctatcaatttgcactattataggctcgacttgtacattgcttacagatgatgggagctagtaaaccacagaagacaatgttgctcaaataaaatatattgttatttcgacaataaaaaacattttggcagttgaaaattagctagaagaatttcaatgtccattctttcgcactcgaataatgaatgacatcattgttcgcagagcagagagtagtttatactagttaaaactaaattgcatctcaaatcaaattctgagcagataaatgttgaatttcctacataatcaggaaaaagaagaaaagaattctaatcaccaaccacaatctctaatttcccaacttttgcagtcgtcacattcagagcagggggaaatccgacgcttgaatgcaaagcatcgccatttatatctgcgaaaattgagcccaaaatcaaccaaatttcccaactcaaatctcaaaacaaaaccctcgcggaaccaaataataataaaaatgatctctgaatttatttattttctattacccaaattagagagctgaacagtccttccctgcaacttaaactggtccctggagaaagatttcaaccagtacttgagagtgtactcgagagcccgagccagaatcgactccattgcagaaatctctcgccctccctgagaacctcagagaagcttctggagaagacaaacactggtccggagtccggatctttcttccagatctacaaaatctcaaatgccaaagttcgatcggaggcccgacaatggcggcttcagcttttatggggattcgcaaggagaatttcgcttttacttttgtttttgcattcgcctttttaggttctgaagcccagctcagaagatcaaggaatctcagaacagtgggggtggtggaagagtggaaaggaatgaaggtgagtcgcacgtgacgagagaggtgtgtccgtatgtgtggcacgtgcgagagagatggggtgtgcagtggtgttgtgttggatcttggatctaaacactcatttagctctcaatgagggggtgagtttggactgtttcagttctgacacgctgtgtacgtgtcagaatgaagatttgtcggcctgccttcgcgtttttggaaaaagcggttcaagtactaacttgagtttctcaaacatatgcatcccgccaaattatgcctctttcctctaattattattttttatttcataattaagtaatttgtgacataacttttttaagtggtcagatttttgcatttaacattcaattttaaaattttggtggtaaaaccttttaaactttctgtgagcacttagtccttttcatccattttggatgttaagtgttaagttagattgtccacgcgtacacaatatacacgtgccataatatacacataaataaatatttaaaaaaataataaaattaattatttcaaaaataaaaaataaaataaattatttttctttaaaaattaaaaaaaacaattttttttttnnaaaaaaaaaaaaaaaacctaattccctaattcaaccttcttcttcttcttcgttcttcttctttttcttcaatttatcaacatcaccaagcccaccaccatccacaactacggacgccaccaccaccaatatcaaaacct

SEQ ID NO: 77072 - DNA, 988 bp, Cannabis sativa
accacatgactgtgtggtttatgaattttcatatagtcatgttcaagaaaggtagcattatcggtacaaatactttttttttcttgataactatagaaataggcacctggagtttcaactgaataacctacaaatatgcaaacttcagttatgggagcaagtttcggaatcatcgattttagaaaataagtaggactataaagccctaatccctagggacaccatgtgtgtgctttggaaacataattttgtaatagtagattaatgatttgataaaatccatgataataataataaattcaccaaagtaaaaccatagcaatgaagatgatggcattgctaaattttttttcatggatcccttgttacaaaaatttaacaaagagggctatacaaaagtaagtcaaaatacacataaagtacagcccaaaaaaaatcctgacaacttgaccacacaagtcaaataactccatatgtacattgaccgaagaagatttatgcctcatggctaacctagtttcccttcacccttaactacaccacaaagcacccatgagtgacaaagactcaacaaaaaatgtaaacaataaaatataacagtcaaatatctaaatcaggataataacatggttaaacagtaagactcaagtacttgtataatacgacaagccataactgctacttcataaagtaaccaattatgttgttgcctaataagacaactctgatgccctaatcgggaatccataaatatcattatctaataaggcaatgtcgatgccctaacaccgcatcaatatatctcattgcctaataacgcgaagctgatggcctaacttagaatccatatttctctgtcattatttaataagaaaatcgacaagtaagaaacctaacaacaattttaattgacgtcgtgaatttaatttttgaatggtaatcatcgtgcctttgttcagtaggaaacaaagtatcaaacccactaggc

SEQ ID NO: 77073 - DNA, 638 bp, Cannabis sativa
ttttgagtaatgtagacgagactggtttcctggaaaatgagaaaggtcctgcaaatctttctattttacgtgagaatgaggtggaccggtcctttggaagggaaggtaatttaaatgttcaagccgttaatttggatttagtggttgttgggcctgctattgggccgaaggttgttgacagtgggtcgactgtcttgcgtggggagctggaaggtgattttgggagtgggccgaagactgttgggccgaagtctgttgggaatgggccgaatgatgttgggagtgggctgtctttaaaggttggtaagtcatgtgggccatccttggtcaacaataatatttcactctttgggtcgatggagggggatgcctattctaataatattacaaattataatgtgatagctaatgggccgagggtgactaatatttcttctctttctcttgggccggctcttgaagaccaagtgggtgatggctaggttggtcatttgtctcttgaacccaatgttggtcgtgagtctttggtgcaccctaatgaagatatagctttggctcaatttttcaaagctcaagaggacttaatgaatgatcttaaacactttgggaagcttgacttatatgagattcgaaagata

SEQ ID NO: 77074 - DNA, 780 bp, Cannabis sativa
cgaaaagcttcagccatctcagccacttccgctccaaggatgcagaaatcgaagtctgacaccttggatatagtcgtgtatatatagttagaaacaacttaatcatactgcttcttcccattctccttctcggtctccaagtcgcgagccaattcctcgacctttgactgagagagcttggcctgaagttccacctactctttggacttttagaggtcctcgaggtttttattttggagctcacgtcctgcttcagcttcttgtttctctcttgaagatgagtgatcttctttttcaggagatcaacttctttggaacatgcgacgaatgccctcgagaatacagtcatgaactgcgtggccagttctacccccaacgacatgatctcctcagtacggattgcctccacccttgacacgaactcgcgttcacaaatttgtcctaaagagtcacaaaattgcgagctctgatagccaagtctatcatgactttctttctcttgtcctgaccaggcctaacctccttcttagaggagtcagcagcgggagtcgcgacaacgtcactcttcctcttctgagggatgatgggagaagtcgtcgcagttccgattttgggcttacggttaagcattggagcttgcttcaagaaagtcatttctgcgaagacaaaacattaagataagtataaatctattatgttatattacaaatatatgcaatgatttacctgatgttggtagagaggtttgtttggatagacgcttgtctattctctcctttt

SEQ ID NO: 77075 - DNA, 554 bp, Cannabis sativa
gatgaaaacatcccaatttggtgcacacgtgcacgcacgcggatggcagggagctgctcggtcaagaccgagttcaaacagccccgtgttcgaggttactcggacatcccgtgttcgaagcctccaactgacggaggttcctcggtcaagtaggctacttacagcctcgtgtctcgcacatcaaccctcatacgcgcgcgcagggtgatgcccaattagttacactgcgatcgcgacagtaaacatgctttgtcgtatccacagggatgacaatcgcaactaaagattagtttattaaatataaaataaatttattaagagaaattaagaagcgaaattaaaatggagatgagaaagttgatcagataaagagctcagtaaggtagaaatgtagttatgcaaatcctattctaatactaatattaattcaaaacgcatttatcattctacaccattaattacagctggaagatatatatgttaaaagcacaaattaattaatcttgaataaattgaatcttacttctaatttaatagcatatcatattatatat

SEQ ID NO: 77076 - DNA, 1213 bp, Cannabis sativa
  modified_base (1082)..(1082): a, c, t, g, unknown or other
aaaatctaacctatctaataattagaacattgcatcgccaatgtagtcaaataaaactcacaatgataattgtagctaattagaatttaaagtgctcgcttaagaacctatgtaaatttgcctaacccttgacacaggtattagaagtgggtaagaataccaccaaatgaaaaaaaataaaaatagtagatcaacatgatccatgattaataggatccacttgttaaagagttttacattaataatattgtgtgaaaatttaatatatctattctatatgaaatatgattatgtagccgcaacagttaaaaaaattcttaaagattaaaatctcaaatgcgctattataaaaattaaaaaataaaaatacattacttaactaaaaaaaaattaaatatacatatattgcaattgacatcatttaattaaatctaattaaaaaaaattaattatatttgtattgcacttaacatcaacctagtatatatgttagagatattattacaatggaaaataaaccaagatatgtacaatttaattgtaaaaattaaacaaggataataaaaagagagattggttaaatatatgttacacaatacacatatatacactatatatattgcatatatatgaaaggtacaagaagaagatacaacacataatatatgatatatatacactatatatattatatatataacaaaggtagaataaataaaaagattacacaatattatataacacatatatataatatgaagaaatatatatatactcacttacaaccttgagtgtagattagtggggatcaccatgacttgaacaaggtattacacatttgtccaaaagcttatttctcctatctctaaacactaaaagaactctctaagaaatagccttaggaattatcaagccttaaagttttctagcaaagtgcttttttgatagaaaacttcatctcaatatgagcatcttagacctctttatatggtgtttaggatatcactatttgaaattcaaatttataacccccatggatgttatggactcaaatgtaactcatacacacaccataactcctntagcattaagaatttcaaattaagatgtgtaacatcttactcatactaacaagtaactctcctatatgttacaaaataatgacaaataatataaattgtcatatgttacatattattagtttattacacat

SEQ ID NO: 77077 - DNA, 526 bp, Cannabis sativa
  modified_base (456)..(458): a, c, t, g, unknown or other
tatacatatataaacatgtgtagttatatgactaatcaaaccttaaattttccatggcttttattttatgtcattatacttcccatgattgtttaataatatgatcacctaaatattatgatccacatcatcattacaattagtggtatatcactatattttaataattggttgattataagaattaagaagttaaatatattaattgttagtgtctttcaattgagtcggcaatcccctcttctactcgtacgagagaatctatataaaaatatatatatatatatataaatatacaccttattctaattaatattatacttttagtcacaacaaaatttgtgactaattataaattatcaaacctatgttgtgactaaaaggtctgtggctaaatgtattagtcacagaaattacaatttgtgactaagtgtattttagtcacaatacttgttnnnattaaaactaaattagtgacaacatgtaattaaatactacgttttagtcacaagtaacattttattgt

SEQ ID NO: 77078 - DNA, 723 bp, Cannabis sativa
  modified_base (29)..(57): a, c, t, g, unknown or other
tattacaggtcaaagaaaaatgtaaccannnnnnnnnnnnnnnnnnnnnnnnnnnnnatagtcacccatatatatattttagtttacaaatataaatatatggaatagaaaagtcaaaatagcataaaattctataaaataaggcctaacaaaaaattgccattttttcaagtttttttttttttaattttatattgtgtaaattctactattaattaagcttcatgagtaggaataattaaataacagatgtcacatacttagggcccgtttggcacagcttttgaaaaagctaaaagttgtttttcgaaaaagccgtgataaaaatatgtttggtaagcagtcaagaaattgttttttgaagaatttttgaagaagctacagctaaaaactaaagctgctccaaccttacttttagaaaaagttgttttgattaaaaaatcataataaagttatttttactaaaaccatattacttatttattatatattagaaaaataaataaattaaaataaattaattagattaaaataaataattattaaatttcttttttttttttaaaataatttatattttattttaataattacaatcaacatcaacctataatttttcttatatatacgcgagtttctattatttttacatttgataaaacataatacaaaaatactataaattatttttatcaaacgcatataaatttatattttaaaaaa

SEQ ID NO: 77079 - DNA, 585 bp, Cannabis sativa
  modified_base (34)..(40): a, c, t, g, unknown or other
aaccgtccggtcggttataaaattttaaaaaccnnnnnnnaccgaccgattttcacccctaggagagagagagaagcaaggtagttatggagaagaagaaatgtgatgacagcagcagaagcacaaccaaccgaaacaaaaagaaaatgtttattcgtttttttttttgagtttgttgagtgagtatcttccaagcatatgctttggagcattaattttattgctattttgttttcttttcctccttccacttaagctatttttatttcattttttattaataattatgagaatattgtgacatggacctattatgaaataggtgtctaatcttgaaagttgtagcttacgaggttttcaatagcactgtgttgtgtcacacttatttattgtattttgcaccataaagctatttgtccaatctccagaaacagatcaaagagaaatggcacaaacccaatagtaagtatgggaagcaacagtgagagcacaaagccaagcctgaactgtcttcacacacacctctagttcttctttgtagcaagagtgtagtatagtataagtaacgttattattctcacagca

SEQ ID NO: 77080 - DNA, 849 bp, Cannabis sativa
tggtgaacataccacctccaaaagcctctcattctattctgatgctagttgaatgactagtgaagatgatacttttatttctccacttaattcaatctcactgaaaaaaaaataaaatttctttcttgagaccccaaatttgagtcttttgtaatattgcaaataatgttctgcaaatatttttcttaaaaatgaaaaatggtgaaaaaaaaaaacatataatcataattatatatacatacataaatgtgagatttttctgtacttttgattcaaaagctttgagatgtttccgactctgacaaaaaaatggagagggtgagattgagctcttaatcacacgaaaatgagaaaaaatctagatcgacggtgagaaggaaagggggcttctttgaataattttgttactgtgtggctttaacatattttttgttagtactcataacaaattctactaattcttccataaacaacaaaactattctattttatgaatatttttctatcgattcacatgcaatccttttataagacatataaaatttattactgatacttgtttcagatgatttaagtgggagataatcctcttttttaatcttgacatggctaatcacttaaattgtagctttggaatattataatttttacaaaacatactaattggttttataatcaaatgtgggagtagattaaaatattaaaatgactttttcacactacttccatcatcattataagaggcaaatgtggttgatagaaattcacatgaatacatgatcatattattattatcaaaatttatccccaactcaatttcttttaatattcttctaattcatagttatt

SEQ ID NO: 77081 - DNA, 568 bp, Cannabis sativa
ttttttttgtttctgttttataattagattttgattaaatatttttatgaatttacagtgaataacttattctcaattggtaatatttattttttggataatttgtgttatttcacatatttgacaaaatggtgctaaactgtaaatgtttaagaagcccaaactctgttgagctagaaacgaagcttagcccatgtcttcagtccagtttgtcgaaagatcatttcagcccagcccaactctattactcttcagcagctatacggcccaatacctctcccaagcccaatagcttaatatcttctctttctgctaacagcttttggcccaagagccaatacacagtaacagcttcatacttcataggctctcatctcatttcaggcccagcctaattaccccttccatatgtttttggaagcaagtagtctagagatgtaaataaaaatatacacactaaacattggagtgtccttggatatctccaaactccaattaccaatatcactccccaaacctcattgctattaagagcactcctaaatcttttaaattatatcaccaaaat

SEQ ID NO: 77082 - DNA, 1115 bp, Cannabis sativa
  modified_base (138)..(143): a, c, t, g, unknown or other
  modified_base (620)..(624): a, c, t, g, unknown or other
ataaaattacatgatttatttaaaaaaaaataataataataattaggatttttaccttttaaattttgacatgtaccaaatcatgccctttaaaattaaagattgttaaaaacttttcatgaactattgagattgttnnnnnnaaagacttttgtctaattttaataagaaatgtctaacatggatgaaagttcaagggacataatttgacacatatgaaagttcgagtaacatgatttagtagatatgaaagttagaggaacatgatttaatacatggacaatcactgaattaataaaattagataaaattgaacaaaaatctttaaatctaacaatttcaatagtttagaaaaaaaaattatcataaaaaagattcaaaaacataatttagtacacaaattcgaactaaaaaaatgcatgtgttaaaaaaattattaatcgttaaagactgcaagcagaacgaggcaacttttcaatttgagtatgggtaaatctaacggtcaggattgaatagatcgacggtgaatatttagtagccgttagttttcaaaaattgggttagcatctgcgaagacataaaatccgccgttccctttcaaatctctctctctctctctnnnnntctctctctctctctccatttactttttctccgccattagagagatagagtgatcggagcttttcatggagtttttctgatcaatccatctctctctaactctctgattcaatcgtggtttcaagagggcaaacacttttaagaatttgtgtggaactttgatcaggtttatttactttagtttgatgagttatttttttaatttcaaaatcgaagatcggcttgttttaccttactttgttatcgattagttcttctacatgcattcttccgagttcaaatctctatgtttacttactagattttgtttgggatagaggtgttctatactcacaccaatctgtttgtctgtcttatcggattttgattcttataagctaattttctttgtctatagatttaaagacaatgtctggatcagacgagaacaatctgggggttattgggccagcgtctaatctgcaaggtaatcaaatcagacattgctgatc

SEQ ID NO: 77083 - DNA, 508 bp, Cannabis sativa
agtgccttaagttgacatacgtcaagttaggcgccttaggaatccgtctcattgatgcctaatcttctttttggtggaaagtgcacacgtaaattttgtttcgtctaatatgcatgtgcgttactcagtgaacttgagtcagtgccctagcatccatgtcaatctggacggctagagtttgtttccttcattcacatgtcgaagtgatattaagccataaataaaagtgatattaccatttcttttctcatttatattaattgagtagtgaaaccatagagatataatacaaatgatgaaccaaagaaatccacctctcattgaaccctaagtgtggcattataccataaataaaattctacttgtaagccttgcatatatattcgcatttagagcaagataaccctaatatttgcttttcttcactcaactcgatatcgcaaaccttgaacatatatttatgttatataaatttggcgaaaggagccattaatttattttattttag

SEQ ID NO: 77084 - DNA, 857 bp, Cannabis sativa
tttcactgcaccagtaatcggccaagcccctttcttttgctgcaatagtttgtatgcactcttaacagagtacaatccactagactcctcagaccagtaccaggtatcatcacattgattatcccccaactgtatagataatatcttgcctatttcttgctcattaaacatgtcctgcaccagctcaacatcccagcctctgccatcggttttgaacaagcagtccacagttcttcctatcaaactaggatgaactgtagtaataaaattgttcccagccccaggcagccatggtacatcaagaaccatagttgattttccatctccaatagctctcctagcccccaaattaaccaaacctttagcttcccaaatacttctccaaataaagcttgggttaggacccaattcagcattgaaaaaattccctttcggatagtaactagcccgataaatcttagccactagagagtgttcattggtgactaatctccatccttgtttcccaaggaacgccatgttataatccctcaaattacgaaatccaagcccccctacatctttgtgacaacacattttttcccaactcatccaactaactcctttagaattggaattagattgagatttccaccaaaacttagccatcaaaccttctagctgagaacatatttccttggttaaaaggaaaacactcattgcaaaacttggtaaagcttggcctacagatttcaacatcacttcttttcctgccttagacagaaatctagtctcccaactcataatcttcttcctcattttttctttgagaaatcccagaattgcattcttactacgacccattgtacaaggcaaac

SEQ ID NO: 77085 - DNA, 1921 bp, Cannabis sativa
  modified_base (594)..(604): a, c, t, g, unknown or other
  modified_base (658)..(658): a, c, t, g, unknown or other
  modified_base (763)..(765): a, c, t, g, unknown or other
tattaattgtgtttttgttgcttaaataaatcattaagcttcgtttctgggcataagatctccggtggcgtacagagagataaagggggtagagaaatggaaagtgagtaagtatggaatgaactttgcatttggagggacaggagtgtttgatacaatggaaaaggaaccaaacatgtccacccaaatcaatttctttgaagatgtattacgtgaaaatgatttctattccaaacaagaccttaactcttccctggctttagtctctattgctggcaatgactatggtgcttacctttctaaaggtaccaataacattaacaacatggaggtcagtagttaacctatacttaatcttatatgtttataatttatactttttcttatatatggtttaatttgttaacatttctatatgtaatatttttaccatggtgcattttaaatagagaaataatatcacaactagcttcaatatttaatattggctaattagtaatttttcccccgaactttgacatgtaccaaattatgctcgctgaacttttttggtggtttttaattcccctcgaactattgaaattgttaaatttnnnnnnnnnnntctaattttagtaaaaaaaaatctaacatagatgaaagttcaggggacatgatntagtacatatcaaagtttgagggaaataatttggtagatatcaaagtgtagggagcatgatttagtacttcaacaatcactgaaattagacaaaagtccttaaannnaacaatctcaatagttcgggggaatttttaacggtcaaaaaagtttagggggcacgatttgttacatgtcaaaattcaggggaaaaaattactaattagcctttaatatttaattgcattgtgacattttttctagggtttggcgaatttgacgacatcaataattgaccaacttgttgcgaatgtgaggcggatacaaaagttgggagtgagaaaaatagcagttacagcactagaacctcttggatgtcttcccccattcacagcctcttcttcattccaaaattgttctcaaattttcaactctgtctctgattttcacaaccaaatattgcatcaaaaattgcaagctctaaacaatcagaccagttcattatcaaactctttgccagtcttagttcttgatctttataccacgttcatgtctgcatttgagaatttgaagaagaatattactactactaccactgcaggtaataaacgtgtccaaattagtattaattaattaattagtattattgtatattgagtacttctatttgtggtaggaaatttgagagtggagtctccattagtaatgaagccttgttgtgtgggaataagcaaagagtattcgtgtgggagtttggatgaaaatggggcaaagaagtatagtgtatgcaagaatcctgagctatcttttttttgggacatgattcacccttctcaaaatggttggtctgcagttttttctggactcagatcttctcttcataatttaataattaattagtgaaaataatcattattatatatataaatgcaagaagtagtcttaatgcagacgacacgtgtactgcaccctatttctagaaaactaattctagtatggtgttatggaaagaaaagagcttcaaattaaggacctcaaattgtaataacttcattaagtcaaaatcctatatactcagtcttcccgaacactattattgtttttactgtacactatagctaggtgcttaaacaaactatgaatatctacgaagagaatatatgtaagaaaaatattattatttttgtttagctctaagcaataattgatgaattattacattattattgatagtaccagttgatgagagttaatttggatatgaataattattacctaactaga

SEQ ID NO: 77086 - DNA, 702 bp, Cannabis sativa
tactaaataatgtccctcgaattttgacatatactaaattatgttatttaaatttttatctatgttaagttttttttactaaaattagataaaagtccttaaatctaacaatttcaataattcatgagatatttttaacgactttaaaaattcaagaagtatgatttgatacatgtcaaaattcaaaaggtaaaaattctaattaatctttaatatatttttggaaggagagattgcgtaaaaaaatggtaatagaatgttgtgattaaccacatattcattcaaccatacgaaaccccaaggatttgtccaaataagatgtgtctctgactgtgactcgggaaatggtcaccaaaaatggttttttttacctttttctttaaagaaatgagataggaacaagattcaatatgtgcatgggtgggtttgtctgaaaacataagtcagaaagagaaaacaaataaaaaaagataaaaattgaaaagaaaacccatgttccaacaacacacctacccacacaacactgactagaaaggtcaacaattgacaatttgaactgttaagtttgtgaaggtgtatgttagcaaaaatctagtgtgcaatgttagaacaactagctagctatgttgaaaatttagatttaggtgatattttataataattattaaattaatttatttaagatttaatatttaattactg

SEQ ID NO: 77087 - DNA, 603 bp, Cannabis sativa
tttaattataactactattaattgtaacaaattactaaacaaagttttatatataattaattataattaaatcaattcaaaaaataaatttctttttaataatcgcaacatattatgaaacgtattgaaaaatgtaagtatagttacaattttcaatatgttgaaaaaaaaaagttacattttttaatatattattaagtaataagtagtcatcataaattaatttatgtatgttattattactgtattaatagatgatgttagcaatgaatgatgttaagtcaatgcaatgcatttgggctttttacaacgttaagcccaatacaaatcatataataatagaaaattttacacttacgttcaaaatttattttttataattttacaatattctataaaaacacaacaaaaaaaaaaaattatatgaaaataacataaaaacaaaaactaaagaacatcaaaataacacaacataaaaatacatcaactattatctataaataaaatcttaaaatttgtaaaaataaataaaattcagcacggccgtattttttatatatgacccttttttattataacattaccctataacaatatttgatc

SEQ ID NO: 77088 - DNA, 2547 bp, Cannabis sativa
gaaaatttgttagtcatggcaaggatccaagggattccaagtgatttagcttcatccagcagaagtgaaagggcaggcatttgcggtgaagcatttgagtaccgtggtattctatgggaaagattatgcacaagaataaccaagtcaatttttcggttaagatcgcgaatgccagtccataattcatctctaaaatgagaggcctccatattcagctcctgcaaaaaagaaaaaaataataaatacataagagattgttaagcagcaggtagaacaaagcttaaattttcttaacagatctgtgcaacattgtccagtgtgccaattccatgaattacatttgaattttctttcttttttcctttgcgctaaggatatttacaacaatcagttggttgacattgacaataatacttttttgggaactttaaagaatctggaaaaagaataaagagaaaaaaaaaaggttttcatgtacagttccccagaacaagaatgtgaatgtgttgataatagtggaaaaataaaattccataacaggtgtaagtgttgatgaaattaactaacctgtaaatttattccagctgaatcacagtagcacaaacccccagcaataacttcttgaggatcagtctctgggagcagattttcaatatttgtaaaagtattatttattctacctcgagacaatattgctttaagaagagaagttttaccagcaccctgcacaagcccataactcgtgtgatgaatcttttcaggagcaaaaaaaaaatcatgaagaatcaagcatagtcgtggaaaattaaaaaagtgagagaaatgaatgtctcaatacctcaagaccaagtagacgtactctacgcgttcgtacataaacctctttggagactgtggtgaaatcactggtacaggacacaaaaacatcactcaaaccttcaggacgaagggatttttcctcatgaggtgatccagaaataagctccctattgagattagaggcttcagaatcaatagaaggaaaaacgtgcatgaatgtatctgtgcttgtctgttgcattggtggccgtttcaatggagctccaaccagtactctcattttttgtagttctggctgagccccatattccggagcttgagggaatgattctaccatagttgaacacctgaatttgataaaaggattatctgattatataacattcaatcttcttaattcattgcagttgccaagtacagattcacacatattttcattataagcattagttttttgatagagtatcatttttactttcagaaagcatttaatggtggtcacactgaaataatgagtgatggacatggatgacaagagacagcaaaagtagaattggacattctccaaataaaattactcggtgttcaagatgttaaagcttctctgctaccagactcgagcagaaaataagggtattcaaaacaaggatacaatgataataatactttttgcatttactctgtatttatataagacttaatttatggtcctcttaggttgtttgttatgggggtttgggttcttgggaacgggaaatgtgaaaccaaacctatgtttggtatgattttagtggtaggtttacgtttgtgtgggtcctatttttagtttatttttggggtataatctcaaattctttgaacaagatttccttaatctcaacccctctcaactaagcccaccaagtaaaactcttacaccaaacaaccccatgtaatgttacttttatatgcatggactaaattttatttgaacaaattgttatattagcacaagacaagtggcagaggacaataccatttaccattcacttgagcatgaactatgttacacaaatgcaatccaaagcccgttatatcaaccttcaactgttcgctgctcttctggccaggtacaccactccaccctagtggggcaatagaagaagcagttcgaattaggggtgattctactatatccccaagctcaacagtacctgcaactgcaacaccaagccactgctgcagatgaggaaactgttgccattgctccatccctatgaaagacgaagaatcatctctcatgcacagttcatatattctgaaaacagacaaagtcagacggtcagaggtcatgtcaagtaaacctacagactacagtcctaaaaaatctctgaacttcttgctattgagacagcaacacaaacacacatactctgcacctactttgatttttccagcctcagaaattagtcaaggacaattgaattcctagttctatttatttttctgggtatactgaagtcttatctttctaaatcataagtaaaacattttgctaaggaaacatagtagatatgaaagtgcctttcaatcaaataagattgatgcactgagcagactttgcaatccttttctgtcaaagtaggcactaggcagtgcagtgaaagggtctattccctaaaaaagtaaaaaaaaataaatataaaactcactaaatagatcggaagagcgtcgtgtagggaaagagtg

SEQ ID NO: 77089 - DNA, 555 bp, Cannabis sativa
tttgtgttgtatgattacaacaatctataatttcgttgtttgtattattggtcataaaattataattttcttaatttcatattcaacaattttcaatttcatatatagcatagtatagatatatagcacatattataatccaaagattgagaaagttccgccaatgcacaaaagagtgttaaataatttgaatgtaacatttgtagaatgcaatttttacacaaaagagtgtcaagttctaactgatatgattgtgtgattatataccttttcaaaagtagtagcatccatcttaaattgatgcatatcatctcattaattatcattagtcttcagcaaacactattgagataattaattgtgtcaattcaacaatattcaatcttactgtgatctctctatctctcttttcttatacaggtttaatactatccattatcaaaactctataatattaagccttgatatatatagctacaaagtagcatttactgaatgctaatatcaacttctttagttatgaaccgcttattccttttctctagtagtgaaaat

SEQ ID NO: 77090 - DNA, 7288 bp, Cannabis sativa
  modified_base (5293)..(5309): a, c, t, g, unknown or other
  modified_base (5544)..(5547): a, c, t, g, unknown or other
tttggtagctgaagtaattagttaataaagccaatttcttatttaaagaaaaaacactacataaattctactaaggggttcctgttcaaaaaaaaaaaataaaataaattcactaagggccaagtgccaaagaatgtttccgttttgcaacttggcacacttgtttatttttcttaaacaaagaaaagatatttgacattttataggagagagtagcgtagtagtgtaatatagtaagaattgacccataatcaataatttagcttttttttaaaaaaaaaatcatatgcctttattgaattatatttgtatctgtattttaattattattatttattttgaatttcgtattttaattaatacatgctttataaattggctccaaaaaagaaagttaaatattggcacaaactgaggggttgggtttattttatttatttatttatttatttattttcaattatgataaagatgtgtgcgtgagtttaagctatagacttttgaagttttgaggtacaagaagacacaagggataaactttcattctttctgaaaataatatgatttgataggtttccactttatattttattattattattagtattagttagtatcattatgatttgaagaaatgccctaccttgcttatacaatacaattattttatcctttaattttctccattttttttttggtatggaaatttttctaccaatttgaattagaatggacaaataattgctccttccaaatcgaagaatttatttctttcttcaaataataataataattattattataattcaaagaaagaaagggattcttaatggttaattagtaaatcccatatttactattgaccggaaaatagaatgagttagtaacaattcattttttttttctttagaaaatttatttattttccatttatgaaaactttccattcaaattctttggttaattatgcaaaaacactgccttaaattgctccaagaaagtgttacaaatacaaacttagctcattaataaattcaatttccaacccaaatattggtcattaatgtgaaattctttttttatgttttccttttttaaatttcttaaaaaaaacacacacaaaaaaagaaaaaacgttgacatatgtacttcaccggctttgtctgtctgtttgtctctctgctcctaaaaaaaaaaattaacggcgttaagacgacgttaagtcgcatgtgagtggggtccatagaactctccctctctcatccttagagagagaaagagaagagtttttgtcctttacagactgtagttactcagcttcaccaaccaacactgtccacctgacagaaccgccatttttaacggattttctctttccctttctggttttggttcattcttctatcaccccccaaaaaaaaaaccctaactctcattttctctctctcaatctagggtttcgagaacgattcttcttcgtcttcatcgcgcggtagctgagtcgggtgagtgagactgactcggggttactacggcgtactaattttttttttcttcaatgaatcattagggttttaccgcgacacccaatgaatttctttcccgctctttactcttactttctctctctacttttggtatcggtctcttgcgtctccgactctgagctccgatccttgctcgagttcaaaaaaggggtacgtattgacccgcttcggaaggttcttgacacatggaactaccccacgctcgagagtttttccgactgccctccctggaccggcgttacctgcgacgagaacggcaatgtcactgctgtagtcctcgaagggcttggcctcggcggtgagttgaagttccacactctgattgggcttgggaagcttaagaatcttagtctcgctggaaatggattcacgggtcgggttgaaccaacattgggtacaatgacttcattgcagcatttggatctatctgggaatggcttctatggtccgatcccagagcggatcagtgggttgtgggatttgaagcatcttaatctctcggcaaacaaattcaaaggtgggtttcctcgtggatttaataatcttcagcagttgaaagtgttggatttgcattcgaaccagttatgggggagcattggtgatttagtacaagagcttcgcaatttagagtacgttgatttgagtgtgaacgagttttttgggtcgatttctcttcctctggaaaatatttcgagtttagcgaacactgttcatcatttgaacttgagtcataataagttaaatggtggcttctttaagggtgatgcaatagcgttgttccgcaatttggaagttctggacttgggttataatcagatcaatggagagcttccttcatttgggtctctgccaagtttgcgggtcttgcgtctagggaacaatcagttgttcggatcaattccagaggagttgtttgagacttctattccgattgtagaactggatctaagtaacaatggatttacaggttaagaattgaccttctattattaaatgcaggatttgctaacttttgaaaataatcaccttttcaaaccttcaaatttaggtttgtctaatgattttttcatgctaatattgtacgttattctttttgttaacttgaatggtttgatgtgggaaatgaaaaccttgatggtttccttcctcgatctcaagtttttattagtctttacttttaaaagatcacatcactgtaaaggtgtatattttgcaaacttctctaactatttcgtttatatttcggggaaaaaatcgatgtaaattttatgtatttctactctgtccatgttgaaatgtgttgggcttatttttcccctgcaattggtcttgtaagatctgtataaagtcccttgtaattattttttaacctttgaactaatcgccattgctgctgtttatcaaatgtatgatatgttattgctcttttatctacaggttctcttgtcggaattaactctacaagcttgcaacttttgaatctttcatccaacagtttgtctggggcattacctgcaactgtaaaaagttgtctggcgatcgatttgagcaaaaatatgatatctggtgatgtttccactatgcagaactgggaagctcatctagagtttattgatatgagctcaaacgagttatctggaagctttccaaaactatcttcacactttcagagtttaactacaattaaccttagaaataattcaatagtaggtactttgcctcccatcttggtggcctgtcctagattgtcaacagttgatgttagttcaaatgaactcagtgggcctattcctgcttctttcttcggttcaaggactttgctaaccctcaatctttctggaaatcatcttatagggccaatttctcttggaagtgatcatgtgagtgaattattatatttaccttctagtccaatgatagaatacctcgacctctctcggaactctttgtcaggtgtcctgccttcacacatgggtaatatgatcaatctcaaattgctgaatctcgcaaagaatggcttttcaggaaagttgccaaaggagttggacaaacttagtaagttggagtaccttgatctatctgacaacaaatttaatggtgaaatccctgataaccttccctccagcataactttctttaatgtatcaaacaatgatctaaggggtcctcttcctggaaatttgagaaggtttcctatatctgcatttcatccaggaaatgacttgcttatcttacctaagggtatgccgacatcgaattcagttccagaccatgttagtgatctaaggaaaaatcgaccttcaaaaagtagtaatattaaagtagcaattattcttgcatctgttggagctgcctttatgatcgtttttgttttactagcttatcatcgttcacagcttaaagatttccataggagaagtggacttggaggtcaaactacagggagagacatcaagataggaaaaatcacaagaccttcgttcttgaagttcacttccaacactcaggccccaccatcttcattgagtttttcaaatgatcacttgttaacttcaaaatcagggtcaatatctgcacagcgagagattgcaactgaagttgtacatcgggaagtggcaactacttcagcttctatggatctccttgataataatcctgcaacttcgggaaggaaatcctcttcagattctccattatcttcatctcctcgtttcatagaagcacgtgaacaacctgtaatgttggatgtatattcaccagatagattggctggggaattgttcttcctggatgcttcaatggcattcacagctgaggaactatctcgagctccagctgaagttcttggcagaagcagccatggaactttgtacaaagctactttagacagtggacatatgttgactgtcaaatggttacgggtaggcctggtcaagcataagaaagagtttgctagagaggtcaaaaggattggctcgataaggcatcctagcattgttccgttgagggcatactactggggaccaagagaacaagagagacttcttttagcagattatatccatggagacagtttagccctgcatctttatggtaagactttaaattgatcttcctggttcttatatactctatcttattaaattttcttacgaacttcaaagtgagccatctttaataatgttatggtgcatgcattcaacatgttaagatttaattgttctacatattagtcttcttctttctttctccccactggtttattttttattttggctagtcttgtttttttcggttcagtatattgttttggtgtttgattgaataggcttttgttcctttaggtcaaataacttgtcagacaacttttttgcaagccttctgccattacaatcaagaattgtggttatgggtgtgatttcctacactatagaaaaaattgaaaagcttaagttcttactaataatctatctaggattcagtaaaagtttattggaaatttatttggtgactgcctctttgagaagtatttggaagagtgactatcagtacaactttgaagtaattacgtataatcttctgcaatcggaacctttattgttatactcttttctaattcttcacaaacaagtttgttgaatgttaggttggtttattctcaatttcactagaacttactctcatttctccaaaagctttttatggggatttattgaaggttagaacttaggtggcgtttggttggnnnnnnnnnnnnnnnnngaataggaatgggaatggaatggaataaaatttaaaatgcataaaaacaattgataaaaaaatcattaaattttttcttttgttacattggaatgatctttccttcttttttaaaatgaaatagtcattctaccaaaatggtggaaagagcattccattggaatgccattccaatactttaaaatgcaaccaaataaaggaatggaatgaaaattgtttccattccatttcattnnnnccaaccaaacgccaccttaaagtaaacatgaaaggggagtcaaaccagaatttattgtttgaaactgttttatcaagagacaaatattgcctatacaaggtgggaatactttaatacataatgcgactaattgccagatagaaaataaatgcatatgagttgtagtgtaggctaggctgggagcctaaatagtgctaatgaatttctttcttggaatccttctatttttgtgctatggattgcgtgtgtaggttgatttttctttcttactttcagtttcggcacaaataaaaagatgaaacataacagacatcatttaaatggctgagaatacttggatagcctaaatagtgctaatgaattttttttcttggaatccttctatatttgtgctatggattatgtgtgtaggttgatttttctttctttcagtttcggcacaaataaaaagatgaaacttgacaggcatcatttaaatggttgagaatacttggataggatctgtagcaagtttttttccctgattgattgttttagcaaaatatgtcagtgaataacaaacgttgccatagtatgtttccttgaggagtgtttgagccaatgtctgtgctggctaagtattttcttattccttggctgatctgcggcgttaaagtgaaagtttaaggactttgggtttttcagtaatatacattagtccgtaatactgatcacgtgagttcttactctggtttctgaaaatttcattcatatgtatcttatgcagagactacacctcggaggtactgtccattggcattcacccaaagactaaaagttgcagtggatgtagctcggtgtctcttattccttcatgacagaggtctgccccatggaaatctaaagccaacaaacatacttctagctggtcctgaatatgaggctcggcttactgattacagtcttcaccgcctaatgacaccagctggtattgcagaacagatactaaacatgggtgccctaggctatcgagccccggaactatcctcagcagccaaaccagttccctcattcaaggctgatgtttatgcatttggagttatcttgatggaattgctaaccagaagaagtgcaggtgatattatttcaggtcaatcaggggcggttgatcttacggattgggttaggctgtgtgatcaggaaggacgaggaagggactgcattgatagagacattgctagtggggaagaaccctccaaagcaatggatgatttacttgcaatatcacttaagtgtattctccctgtaaatgagaggcctaacatcagacatattttcgatgatctatgttctatatccgtttgaatttattttttttgtacgtgagtcttggaattagtttttttgttccttgacccatgttttcttatttttttcctttctcccctccaatccttctgatttatggctaatgatcacattttttttcccttgaaaatttcattgtaaagaaacgactcattatttgactggtttgagtttggtcttttaaaagattgtccattcttttttataaatatatattctcttagaaagattttttttttttcttacaccatatattttcaggaaggttgtattgcactgcaaagttatgcttaaacagcttggaagcaatgtaaagtaaaatttaaatagccaagcagattagttattattattagagaaaatggcagtaaaagtaatttctgttgatttacta

SEQ ID NO: 77091 - DNA, 761 bp, Cannabis sativa
aacataatcaatggttgagacattttgtcaaacacataacaaacatttaagtttaaatactttataagaaatttttgaaagaaacatcattagggatttttacaatagctcatttagagttgattacctgagatttaaagaatgaaagaagttgagagggagcaacattgctggaagcacacttgaggtatttaccagaagaagtgaggtagtcagagtaaatagttgttccatctctgcctgaaaataagaccaataggagtcttcagaacattccagctactctttctgatacaaccacacataaatgactctgctttttactggtacttctcgaacactggtgcataccgaccaacttttccttgcattaaaaactatacaaagaagtaacagattattaactagtaaccaatttcttttttttttcgaacaagatattgatgaaaattaaaaaaatagaaagtatcaatgttaacatgagtattcataaactaagaacacctcataaatcacttataaaaaccttttatcaatcatagtatataatacttttcagtattctaaaacaacttccttaacaattaccctatgtgcatctccatcgaacacatcaaaagatattacgatttaagctacattattaaggttagacactagtatccatgggctattaactcttttatctattattgatcagagttacttacactttttttttgttggacctctttcatatacagtagaagcagaaagaatct

SEQ ID NO: 77092 - DNA, 2228 bp, Cannabis sativa
taaaattaaaagtagtagttttttgtagtattaaaccaaaaacgacttcgatcaaattgacatattaaaaaattgttagaccaaaattgaaccctaatttggttcattttgcagaacgcataatctaaattatcattaaaaaaaacacaaataaaagtaataacataccattacgaagcctttgataatttcattagtataatattcaggttgagagtcttgcaaagagagtaaatgttcaatcacagtattcatccgattctcatctttgttactcttatgctctttgatcaaaccttccaagagtgagtccatagtcttcccaagtctcttcaccttattctcaaaattattaattggaatccaattcaagattggcaaaaaatcagctgcgttcccagctccattaaactccataaaagttctcaaagtatccctaaacaactttgcttcctcttcgtttgccacgtcatcaccgcaataccgttttcccgccaccattcttgttatgatgttaaaagtcaactcttgaaacattgactttagctcaactctgttagaatcttggcaagagagctttttaagtagtcttatgacctcgtctcttcggctattaataaagaggttgagtcttcctgaggagaagatctcaatagccccaatcctgcgaagattgcgccaatgctcgccgtaggaacaatccacaacgttcgaggagttgtaccctacgtgctttgcaagtaggaaatgtgggcggttggcaaaaacaatgtcgttttttgtaagacattcttgggctatggtagaggatgagactacaaccacacggcgaaaccctaaccggagtaagaaaatttcgccgtatttggtagaaagattgtggagtgccctgtggattggtggtttcactagatgtaagtggccaattatgggaagagagggtggggttggtgggaggtttttgtattgtcgtttttcggttttgaaagacaaaacgacaatggaaataattagggttagggttaataagggtgttagcaagtatgagaagatcatgatgatcacttattcactcactagtttcttattatgatgtgttgtgacctttaatcaaagtttgtgtttttccttaaatctacatctatttatatgcatatatgtacatatataaatttgaacttagtacacatattggcgattatgtgataaataacctaagtaattataataaaaaatggagtcattattgtaataaattagtgaaacaagaaaaggtaaatttgagcatcatgtaattattagttaggttgaataattaaatgaaaaataaaaagtcaatagtagttcgttaggtttttttttaataaatcatgcaatttttaaaagtaaacatttgaaataatagtctgtaactaatgggtacatctctcccattgaatacgcaaccagatttagaatcagaaaaatgaatcaattaattggccgcctaattatcagatcgtttgacaaagaaactaaaataaaatcagatgaaaaagattttagcatcacagttaaccttaagaatacctataatttctctactgctcagaagacacaactgtctaaattgttgcagcatgttcgttcaacatattaacttgagtactcaatttttgtgtaagctacataactgcaccactaacaaccgcttcagctgcaaagaactttttattctcaatttcaaaacaaatcacaaagataagactaatcacaataacttaaattaaagacactcaaaatcatgtcacaaacaagactaattgcagtagtaaaacctaattgcattagcaaaaccacaaacctcgaccaacgtctaagcccaaagagggccaacgggcctaactagagaaaaaagacaacctttggcggctaataatttagaaacaaaaaaccatagcagtcgatataaaaatattattagttaagtttaaactaactatttgcaaaggaaaattcacactaaaaaattgaaatatgtctatatgtgtatataaagctgagttataagatggtcacgttaattatttgtaaaggaaacttcacatgtaaaaaaataaagtatatatataaagctgagtcataaggtgttcacatgctagttaaaattgcatcaaatatttttatctattttttctttaattctcttatttttctaattcttctattatactttatttaattagaga

SEQ ID NO: 77093 - DNA, 2778 bp, Cannabis sativa
acagcttaaatttgtattttctatgtactaattcattttttcatttctatttttatattaatcttttcttcttttttttcatcaatttctccactttttttagtgattttttctgctttttttagtcttctgtgcaccttttttttttttttttaaaaaaaaaaatacataattatactaatcttgtttccttgttcttttacatttttctccatcaattttttttgttcactgttttaactactaatataatcttgcatatgaaattattattaatctcctttgtctttttattcttctttttccatcagtttctttaatcattgttttatttttatttttatttacttattagtagataatggtggagattctaccaataataaatcgtagtggtgaaaatgacatggcttacaaattttttttaatattatttttactctaccaaatttctaccccttactaccaaaaatttatttttgtgttatataattaatatttaatattattaaaccattatttattaaatttaaatattactaaactattatttatagaatgttatataaaattgaataagaaaaaagttatatgcccactataaagttatacttagaccacaaatgaattaaatacaaaaattatagtttgtttaatttgacaaaagaagtattttgtaagctgtttaaaacaattttattagcaaatgctaaaaaaaagtattaaaatctgtatattgtattaaaaacttaaagaagtataaatattacagccgaggccaaaatatttcagttattattttatttttgttttgtagaccaccaaattttcttttgtctacctggaattgaagaagaatttggcgtagaaaactcaaatggaatctcctttttgagataaataaaaaagataggcccaccttcaactctcaagtcttaaaaaagtccataagtttctttgtacacaaatatgcagctttggcaaagtcacagtactacctccccccattgaactacaagaaagttacaattatacccttatggattttcttttttttttttgaggaaataccccataattatggagtttatgttaaaaacttatcatctaatatctgttaccattataattttgatgaggctgatattaatccaaatttgaacaatagtgggactaaacggccctatgtttcagaaatgttttggtcactttccccacaaaattcttagttggcaggttcacaggtgtcccaacaatttggtccacaaatagtacaatgtgacgtgcttttggagcaatccaaattccaatgaagaaaaataaaagggaaatgcatattgttattgtgttgttgttggtaacttttaatatgaagtctttcacatacaataggatagattagtgttactagtttatgatttttccatagtatagtgggtttgctataagcgttgttggtcttttcaattactaatattttttttggtatttaattagtgttagaatttaagaaataagatgaatgaggtttcatctcaaaattaattgactatgggacaagtagcacattgctcttatatattctattttctttctacacattagcaatgtgggactctctaacatcccctcaagatggtagttattttatttactcaccatcttagataactcgatcattagcgacatcggtttattttttggggttggatagttgctagagttttgtttgttttgctctaatactatgttagaattttagaatataaggtgaatgatgttccatctcaaaaccaattggctatgggaggagtagtccattcctcttatatattctattttcttttcacacattagcaatgtaggactcggtaacaattaggtatatataaagctaaaattaggaactacaaaccaaattaatataagtgggatatttattgatttaatgaacacaatttttttataagatatgataaataatatccagtcactttatttaatgatcatatatatattttttatgttgtataatgtatataatttttaaagtatgttctaattttagtttatatattaatttgatttaaattctattaatacaatttaatatggtgagcatcttttgtttatgacaagcggaaaattcaaaacgtggctgagcacataatgccaatgacttatggacatgatggtgaaattagttaatgtagacagagcactctttcttgtttcatttttatgtacattcattttagaataaatgggatttatttatgtaaattataattatagagttttgtctttataatttgtctctgttgtaatttattttttctaaactatgagtgtgttttgtaaattttttttaatgagtttattatttttaaaattaaaaaagttaagatattttctaaaattatgtttattaaaactgtttttactttttaatttattaattgagaattaaaattttaaaaattttaaaaataaaagaaaatcactttttaaaatttttttaaacaatttttctcttaattaatatttttgactttgactccaactagaccttagagcttgggcagatcctaaccctgaccttggacttggccctagcccccgattctagcttcggacctgaactcaatttgaataaaatcaagaaaataaaaataaaatttacattatacacttttattttttgtttttaaaattgaaaaacaaaactggttataaaacacacttttgtttttcaaaataaaaattttaaaaacaaaa

SEQ ID NO: 77094 - DNA, 577 bp, Cannabis sativa
tatgtactcgctcaataatatatagcaaataaagatagttatttttacgtataatatcatttgtatatatacacgtaaattatatataaagtagaaagaaaaataaaggagagaaaattaaaaggaaattatggaaaatgtaaaatgtatttttcttgggttgtttggtagatggaaagaaagaaaataggtattctaaaattgctatattatttatgcaaaaattgaattacaaaaataaatagtaattttaaatttgtgtcattttataaaagttttttttttcttctcaaattggatggaaaattttttggtgggtcctataattttctcttattttttttagcattattaaatatgtgtctagcataatttcctatataaatggttagcgatattttataataatgattaaattaaataatgtgagagtgtgagaactaatatttaattaaatcaatgtcaatatgatatttttagatagtgctatagtaatactttttgggctcgtttggaacaccgtattagatcgaattgtattgtattgtattatattaaattggattatatatcatat

SEQ ID NO: 77095 - DNA, 751 bp, Cannabis sativa
ttaaatatttatgatattataataatttttttaaaaaaaaaaagtaatatcattagaggtaatattctttttttttttttttgaaaagattagaggtaatatttaagagcaactaaaagtaaaaataagaatctaaaaattactttttggggcaacaaaagttgctctaataatacttttagagtagctccaatgctcgttttgctcatgaagcttttgtcagtctaagaaaaacaatcttgattacttcaccactaaagaaaattgtgtgggctactacaattactactgccaagcaatggtaggcgaattattttttattttttttataagttttctatcaaaaaggtgtattaatataatatttaaaagactcaaaaaaaaataatatttagaatattaaaagtaatttaataatatattaaataatagagtgtgggtccattctcatgatttttaaaattgtttagcattggagtaattttaagagtaaagtgatcaaaaataatgtggatgaaaaaaaaatatatagtattttaaaataatgtaaaaattgttagctatttttttaaatgcttgcattgaagttgctcttagcgccttttcagaaaaaataaataaataataataataatacttttagggtgactgtttaggagcaataaattgcccctaatatgcaaatttattgtagtgagattatttactttaagctccatgaagattcacttgccctaacttctcctttttg

SEQ ID NO: 77096 - DNA, 747 bp, Cannabis sativa
cggttagatgatgagctatcctggttcgaggaggttccagcaccgatggcggacttttgcatcgtaaattcatgagtgattctaatcactttgacaaaaaaaaaataagggtttgcttggtaagttttttttttcaaactaaattatgcgcagggagcattttcaataaaagttgtttatggaattatttttaccacatatgcaatgtgatgattattttttatacaattttatcaacactattatctatatttaacaacaatcgtgtggtattattttatatttttttctttctttttttctcaaaaaagttccttcatagtattattttatagtatttaataaaatttgcaaagtccttttttggcaagttagatgacaaaatgtttttcttttatggtaagattgttttgcattcatacccgattttcttaccttgtttattcggtttttattgctcttttctttgttaggaaagatgcatttttcagctggacttttctttgtttggaaacttcttgtaagagaagtaattcttttatggcaagttggtttttaaaggaaactttgattattgcctttttcttattgaattcgattgtgtcttgatacaatcagaatatataagctgtttatggcaggaatcatttacgtttacatgtagttttcatattgatggtttaatgtatataatttctgttaagtccagaacatatagttattcataattacagtgatgtcaacaca

SEQ ID NO: 77097 - DNA, 2497 bp, Cannabis sativa
gtttgagttcagattgtattttaggttcaatttgagattgtttgggtgtgaattgaatgatttcttggctgattaaggttagagttaaaggagttgagtttaagaactccatttcgctctttaatggtgaattgagggttttgatgaattgttgagagttatttgtttgtatgcattgtttttatgatatacaactgttctggaacatttgagtaggtttggtggagaataggttgggtttcaatgtggaaaaccagggtttcccaccgtgttgcaaaaactagttaaccgattttacaggagctgagaaatcggtcaaccggtttgcctacaggggaaaccctagtttttggtttgaaaccagtttttctcagggttttttcagagcttggatcagggtattctaaggatgtttaagctaattttgaaccagtgggagttagattttgtccggttgtgaattagggtttgtattagggattgaataagtggttgatcaagttatgttattcgtgacataggacctggatcatcgagcatggttccacctaggtcggcccgcacacccgatattggtttgaggtaattaagaaagctaattgcactactaggcataataagtgagaaacgattatcatcgtatgtgacccgaatatgatcgaggtaatgaacactatcgtatgccactcaattatgatcgaggtaatgaacactatcgtatgtgacttgattatgatcgaggtgatgattattattgtgtgtgactcgattatgatcgagataaagatatggtcattaccattattgaacatgagttggaaacggtcattactgttaagagtaattactcttgaaatcgcagataggtttcttacttatcgtcgctgtatcgggcaacgatagtgacatacgtagctcattgttaacgagtggtaagggtgttgtataaagtactgaaattatgtgattataatgatgtgaaattgattaagcatgttagcatgtgatgtgttgtaattgggtacatttggttatggtgattaattatgtgttgtataaatgtttatttgtgtatgatggaattatatgctatgcattgttacgctatctcatgttatacattgtttatgattccttgctttcttgctaagtctttgtgcctcacgggtgcttcgtggtgcaggtaaagggaggggaaaagtggttcagccatgagtcagaggtctcccagcgatgtatatatcaaccgcggtgtttcggctgtcagtagataggatccatcctttttgactattttatggaaatgtaaccctattttgtaaatctggatttgaactaaattgtaaagctttttgaatagcggatgcccaaacttaataatcttttgaataaaagttacgttttagtttattcttaaagtttttaattcaaccgcacttttcctaaactaatagattaactaagaattagtttgtaaaagcacacacgtggtatccctgtggatcagggcgttacaaaatgcatcttaaaagttatatactgttttcatttctaagagcacaattttaaaataaaaaaacagcccatttgcttccgcaaaataagtagtgggatcaagtttagggtttgattggtttgtgattcaaaaacttgtgaaaatttaaattttgtaagtgaaaatttgtttctaaatatgtgattggttgtagtgtgatttaatctttttgagttttaaaaaattgaatatgtgattggttgagaatctcaaaataaaaaagtaagagaataattggagagtttttggattctatgatttcaaaacataaaaaacataaaaatagtgttttcatttcttagcttaaaactcaaaatagtattcaaattttgtttttgaaaacactcagccaatcaaaaattcttaggtggaccctaccatttaaattttcagaaacataatacagttttcaaatcctaaaccattttctaagtcattttgaccgtgtctaaagagagatttacacataaggtgccttctgtttccaaacatgtcatgaggagagatttcttgatacacttaccgattgtatcaaattgcactcttcgagtcagtgccaaactccaataggaataatcctaattttctctcttttcattccttccctatttgtgtaatagtattacatatttgtactaactagacaatactaacaattactaactagtccctataccctttcatgtagcactccaacccttcaaaatcaccttgtcctcaaggtaatagaaataaaaaaacaactaaaaacaagcacaaatatagaagataaaaactaattatacagcccaaatattcttttaatattcagcccatttctttctaatttcctactaaattctcagcccaagattcatagggcaaagagagtcccatgtcactaatgatgtgctgctcttctacttttcctttgtcttcttctggtttttttttttttttttt

SEQ ID NO: 77098 - DNA, 1738 bp, Cannabis sativa
agtttagactgatttccctatgtattgtggtctataaggttatctttaagatcattgctaacaagattaggtcgattcttccccgaattatctgtcctacccagactgcttttgttccaggacagaatatttaggataacaatgttttggtccaggaaattattcactcgtttaagctcaagaaaggtaaagaaggtttatttgctatcaagattgacctggtcaaagcctttgacaagctgagctggaaattcatcgatcatgtgctccgtagttttgaggctcctcagaatttctacaattgcgtcaatgtatttccacgtcattatttattgtctatcttaattgtgataaagtcggtaggtttaaccttgagtgtgggatcagacatggagaccctttttccccttaccttttcatttgggccgctaatattctatcatgaattcttgaacatgccttatgtaatgggatgattagggatatcaagttaagcaagaatggccctggtctagcccatctgttctttgtagatgaccttatccttgtgggcagggcgaatattgaggatgctaaagggttgtggcaatgcttagagaaattctgtagctggtccaggtagaaaattaataagcttaaaacgtcaatcttctttagcaataacatgagtgatggtataaaaagaggcataaagcaagtcggtctcaactatgccatgggcaacattaattacctgggacttttgttatttaggtctcatcttaaggatgctgatttcaacttcattctagaacatcttgtctcaaaacttcacgggtggaaactgaagtctctatccaaagctggtcaggcaatgttgatcaaatcggttggccttgccttgccaatttatgctatgcagaccgcgaagctgtcaaagaaacttgcctctaaaattgatgggatggctagggattttttgtggggttgtgaacagggcaatcgtggtatttttttaaaggcttgggatcatctttgtcttcccaaatcccagggaggtcttggctttagaaagactttagaaatgaatcaagccttattggcaaaatggggttgggatctgattaacgaggaccaatcattgtgttgtaaagtgctaagagctaagtatttgaggaatagaccttttttgaatgttctgttaagagtttggactcttaattttggaagaatgtggtaagatccaaagctatccttaaaaaaggtgcttgcaatctctctacccgaagcctatctctactagcactgagggtgtggagaaactagctaacttgctcttggaaaatggggattggaacattccaaggctccaatctctctttgaccctcagacaatcaggaacattttgaaaggtggcaagccaagtggtcagggtacgaatggatgggtttggactaaagaactgagtggtattttgtcttctaaatctgcctagctgattcaagttttggatcgtgctcttttgtgcaatggtgtccctgccttatggaacaaactttggaacttgaaagtgttggagcggcataaggttctttggtcaagcattctctctaatgctttgcctatattcgtgccctcatcgctaagaggatgcatattgagatggttacttctgcgatctgtggaaagggtgaggagtcaatgaaatatcttttcctctattgtaactttgcttaccatctgtggagatcattcccg

SEQ ID NO: 77099 - DNA, 976 bp, Cannabis sativa
cgttggacaaggaagctcatgttcaacttagcatgatattgaaagttgattccagcttctttttaagcattatgaagagaggtatccctcacagaagcatgagcctttgaaatggcttgttggtactttccttttgcttcatgatagccctgttccacatccccaatctcttctctattgaacaccttaaggacatgtttaagtcttagtaacttccagatgatacaagtcaaaccttttccagtcataggtttgtcccagttactcttgaccacagctttaaaattactatgagttgtccataaattgtaaaacctaaaaggtttccttcccacgttttcttatttctgagttttaatgagacaaaggcaatggtcagaaacaatttcccattgataaacaactatagtgtttggcatagcatcaagccaatcttcatttgtaaaaacatggtcaatttttgaatagaccctatcattcctattttatttattcgtccaagtataatttgaacccacgcttttagaggatcaacctgatttaaagctaaccaagctgtagaatcaacaatttcagcagcagatattgctttacctcccattctgtcatcataataaaatattgtattaaaatctccaagtataagccaaggcttcattggaaacattgtattcgtaagccccatccaaagatcaacacaattctcaactgtattgaatccataaacaaaagtcaagcaaaattcagtttgtaaccccaatatcctgatcacacagtgaacaaattgttggttctcttcaagaatattaaccctaacaaaagatttttgccaaacaattaaaattgtcccttcagtaaaactgttgcaataaaaatcccagtcatgaaacacaaagttcattatatcactaactttgtccttcttcaatttattctctaaaagagcacccatacccactattattattattattat

SEQ ID NO: 77100 - DNA, 2915 bp, Cannabis sativa
agtatagggtgtaaatttcccaaacaaaatggaggccaccaatcaaaattgactgttaactaacaaagcctcaaaatcaacgaccaaaccatctaaaactacttcttctattctactacatcaaatctcccatcttccccaattttccagcctacaaatccagaaaactaatctcatctcatacagaaatggggttcttctccttcgcctttgctggcgttggattcatattcatcggtgcatgggaagctttcacctttctttcctcgaacccaaatcaaatctcacttccatcttcacctcttacctcgattcaaaccccctcaccatcttccaaatcaaattcccagataaaaactccatctttttcttcctcctccttatcattcatctccatctccatagtctctttcctctttattataaattccttggtttccttatatgacgcgattgagttacgcgaccgagttggaacggctcttcaattacaggttctagcaattgcttctctcttcttgctctacggcatcatgggtcttatggtaaatttctcttcttcgctcgtcagtttaatcggtcttttcgctttcgtcgaagaatttctattgttttacctccaaagaaaagacccaagtggaattgaaaatcgttactttgatcttttgttagttcccataaccgtatgtctattctccacagttcttgatttgaaatcacccaaatcgatttttcccaaattcgctcgtgggattggcttaattttacagggaatgtggtttttacaaatgggtttttcgttttacaccaatttaatcactcatggttgtacattgcacgaaaagagcagaggaaattacacgatcaagtgtaagggacaccctgattatcacagagctagggctattgctacacttcaattcaattgtcaccttgctcttgtagtgatcatagtttcgattttttactcaattgtgtctcggagaaatggtagtgctgattttatgcagtataagccactcgttgctgaaatggctacatttgagaatcagagccagttcactttggattctgatgaagaagaagaagaagaggacaaagtggctaaccaaaaggcagctgaagttgtggaatttggtgttactggtcatgtatcacatcagtgagtatacaaattcaaaattttattcaacattattagattttgatactgctaaatttgtttttccttttcaattttgtataaatgatcttgatttgggaccttcaatctatgcaatgcacatgttgagtcatacttttgtttcttgtacttaaaaagtgtggaagtccacactctctcataatgaatattagtttagtattgaatattgtgattagttaggctaaatatagttagaaatgagctagtttggataagatttgctttaattttttaaagggtcattatcatccaacatggctgccactttttgcagtttttgcattataaagtgtagtgtgaacatgccaagtaaagttatgcaaagtgctgttctttaaatatcaccttgacctaacaagtccatgtttatttcggtttggggattgggagctttctgatttgtagtaatggttaataactttatatacttgtaaagaaaattgatgtttctagtcgtttgttgttttgggctactttatttaattcaatttcgaaaactagggatatattttgctatcttttgtattaacttcttgaatgatattgttggagtgcttagagtgaacttttaagtaagctctttagctcttctaggcattcaacttgtacacttagtgaaacataaaaacctttttaggatcatgttagaagtatttcagtgttcatttcattgatcaccagttatcgctagtagtattttgcaacaacatctgaaggttggaaacccctggttttggaaccaaaggtaaaaaaaatatttgaccgatatgcgttaaacactcctgtgagatggtgcaatttaatatcgggtctcatagtagtgtctggtaccttggtgccccatagcatgctatgctcttaatttatattctttgtgaaaccaaggaagtggcagttggggtttattaactttaatgagctcatggattattgagttttttgctcttgacaagaagatgttcaaagaggtaatagagaatggtctttgccgtaaagctcctatcttatattatgactgtatcatatcatggattggtatggttaaaatgcatcaactatgtagtatttgtattctgataaagaaatgggactctcatttttctcatttgcaatgtgcatatgtaaaattagaaatggaatatggatagtcatttgatcgaatgtatcaagtttctctacttgattaaacacatcagtttttataaaagcttataacaattgctaatttagtaatttcctctggggcttcactctctggcctaacagcttcatttctatcataacggttggacattctatctttatgggttcactgtataacagccaacaagattgaatattttatttgtaactagaaagcatattaaaatattttaatccaattactttgttagttaaaactaacttgtgaaaatttaattttataaatcaatttagtctgtcattgtgatttttaaactttgaatgatgaaaacaattttttttggaccttataaaatacagtactttgataatttaattaggacttttcaatttttctgaataaaatataataaatagtattcaaaaaatggcctttttaaataaataatgataaaagtttaaaaatagtatttttgaaaaataaataagagcttttttttttctaaaaaagtttttgaaacagaaaacattgtcaatcttatcaaaagagattaaattattattaaat

SEQ ID NO: 77101 - DNA, 766 bp, Cannabis sativa
atatatctcgtggcctttccttatggagttggaaacttatcaacaccccaaaaaagttcaattcttgtttgtctttctcgccttttttactagctgataataaagaatgctgactaaaacatgcccaaatgcaggaggctatgcagagaaaggttttggcttccactgctgcagctgaagcacttgaagaagcaattgctactgagtctattatcaggagcttaaggtaatgcttaatctttctttataataaagtgtgacttatatatagtatgtattaaaaatgaatattattcataattgtttcatggttttacttattataggaactaatttgcttttttttgttgtctttaatttctgaaagatgataaatgaccataaagtaatctatctaatagtctttattttggtgcctcagtatgttttcagaactctcctccacatccaaggttgggaaccctctaccaaccattgaccgcttcttttcaatatacgacgacgtagtgagatcaacaaaaatagcagagtcaattgccagtagccgcattaattccgaaatatcccatgaaaaaggtacccctaccgagcaattaaactctgtttctctatgggtagaagccgccttggccactgatcttgagattgtctcccttttaactactcaagaagacaatgaaacttcatctaaactgcataaaatgtggtttttacgtttcgttgaggagacccttgatgcttcttttcgggtcttcggagagggtag

SEQ ID NO: 77102 - DNA, 1038 bp, Cannabis sativa
ctgtgacacacaacagctggtgtgtccaagtttgtgacaaacttgacaaatcaattttggtgtgggggaagcacctcagccaaagtttatgggagggacacaattattatattgagaatttgatcctctgcttgatgtattgtatctatttagtgtcccatttgcaaatctggtaggacaaacagcaagatttgttgagatcttggtgctggaatcatctatagtgtagtgtctttccaatctgagctcatgagttagtgataaagattgaatagattcaaaggaaagatcatcaacaaggctagtaacatgaacaacaataggatcgaattaagggcctgatccattgagcaagtgcatgattaaatcattttcgtccataggagtaccagcaactgaaagagaattagcaagaatctttaccttgtcaaggtagttcgaaatggaaagattacctttctgaattgtagagagttgtgacttgatctgtaaaattcgggctttggattgattggcgtatctttgttccaatgcgcgccgggaagagtaggagctttggaattgagtaagagatccaagaacaaattcagacatcgatgagcgaagccaactaaggagaagctgatcctttctcttccaggtagtgaattcagggtctgtttggccattaaccaatctttcaggtggagaaatacctccaaaaagtatgtcattgagaccgtgaccaattacagttggtataacttgagattcccatgcgaggaaattggagcgatccaatttcacggtgagagaggagtgaagggaattttggaacggattccatggaagattgaccggagcttgagcagcggtggtggttgtgtgagttgaggaacgaggttgattttcaggattatgaggatccatatgagacagaagtcaggggcaatctgataccatgtaggagcttatctatgctaagaatctaacagaatccaatatatgagattgcaattcaagactagcaaaagttaactagccttaggaaatgatttc

SEQ ID NO: 77103 - DNA, 4142 bp, Cannabis sativa
acatttaaatttgtatttgtgtttctggggcagctttggtttgatgtccttaatgaaattcataccgtttatatgcacgagccacagtcagattgtcttgattttagttatgaagaataagggatagccagccttagacaatcataatattccatacatagggtcttttgttttttttattttttcttttttgacaaaccagaaaataaaaactttgaagaagccatatgtgagatatgaccacgcaggttttgttgtgcttcttctatagaatcttttctaatatagggatctttttccttttattttctactctttttgttatcattagctgggtgcgtttattgaagttgttgaggtttaacagtgaatttaaagttttgaagacaacaatcaagtaattagagttcttttggagatgatgttaatgatagtgaagatatgaaggaagttgatttgattacaatgtgaagatgttcccaagtcttgaagaatttcaagtcatcttaaaactgacacttgcaaggtcagcagcctagtgcttgctcttttatcatgagcgtccaaattattggggaaatatatttttctagtaaaaggtctatggtatgcaaaggactttatcaagaactcacgattttgtccttcattgtagctcttgtcctacaatgtcaagaactgacaattattttgttttgttttatgatatttttctccaggcaaccacgtggatttggttttgtccaatttgtagatccgcaagatgctgctgaggctaaatatcatatggatggacagattcttcttggtcgggaggttactgttgtgtttgctgaggagaataggaagaagccatctgatatgagggcacgggagcgaggaaggtaaatattgcatgtattttctccgtatgtattgtattttcattcaatgaattctcttccatttatgcatatgcgttaaatgttctattctctgtactttgtgagattcatgatacttgttcgatttctagagcttgttacaaatttattctgggaatctaattgtacttcaatctagttcttaataaatattttatgaatttttttgtagttttctttgatcacaacaaaatagttactttatcataatttcctttcaatttttagtaattatttactgtatgtggtaaccggatttgtgctgatgtacaaagtatcgttacatttacattactatatgtttgaaacatttgtgatacattctgtaaagcctgaagctcatttgaaattaagcaatgatactgaaaacctgatgaagcttaagaatgtttctgatccatttccatgctttaattgttagtatcacatttttttttgtgtaactgaatgtttttaagttgcttttctgtcatgcagcagccgtggaaactatcgtgatcgaagacgttctcctcctcgctattctcgatctccacctccacgtctagcaggatcacgatctcatagccgagactattattctccacctaaaaggaggaattactcaaggtaattcgtgtttatattctcttccaagtatatcttttcaacttctctagtcggcattaaaaatgtgggatctttagcaataggagaaaacatgcatttaatatatttcaatgtttaaacattaattttcgtactccctcttcgggccagatctgtgtctccacaggagagaaggtacagccgagacaggtcgtactctcgttctccaccatataatggatcaagaagcccaagtcgaagcccagctaggggtccaagtggagctagaagtccaagccatagtcgaagcagaagccgaagcccaaagagaagccttagccgaagtccaaatcgctacccagatgaaccaaatggtagtaggtctccatctccatgagagaagcccccgatatgcttttgttgtctgatttcatgtaggtaatataaaccgagttgttgtttgtcaagccgccattgttgggattttcttaaacttgtttgtgatttctgttcagattagagaggattatgacatctgatgttagaaaatattgattctctatccttgaaagaatttgtgctgctaacgtttgatcttcatgctaaataactttgatagcatttaaggtttttgtttggtcacacttctcatgttgaccaacaaaagaaaaaaaaaacaagtcatatctcatatcccttctaacctttaaaggagctgttttttttaattctttttctatttttacaaccttttttcttgtcttctatttctatactttggcttttaaacttttactttataaactgtttttctatttcagttttatggtctctttctattttcctcagttctttagtctctcactcttcttcttgaatttcagtagagttaacagctaaagtattctttttctctgaactttttctgtgtagcaacttttgtggtaaaaatgttattgaattttagtttcataatattagattaaaaggtggtttagtgacaccccaaaagcctaaaatggttttagtagagttttctgaattaatatctgatttttttttttttgcaatcctaaattcccactcatactgcaagatttctaaaattgaaatcaattcccatgtatccctcaatttcaagaatttgaaacactaaatcatcattgcaaccgatattgtaggcttaattagggtatgtgttcttttatgattctcattctttcttagccaaaattggatttgtctcatttgcaaccactcataattgcctaactttagaaagccctcttctattattcatttttgtaatcttaaatcgtaatgtgcatcacaaattaagtcaccatcttaatcgcaattcaagttgcagtccaaaatgtaacaaattgtagccttaattgcaatttaaaatcgtaaccaaatcataattgccgcaatacaaattacaacactgcactagttgagccaaaagtcaagaagtttggaaccaatttttcttttcactctaatttttttaaactgtgttgtaagttggtattctttgtaattttataaaaatatatatacagtataaataattagatttattaatgaccatattttcatttaaatttttaactataacagtattaatgaaaaaaagctctaatttcttcgaaccaaagtcacttttacatttgatttttagaattaaaattatttttgagctaatgtcgtgttattctagtcaattatataacacttacatttggcatcatagagtgaattgaattttgctattaaaaattttattttaattagatagttaagtattctatttttttggtaggaaaaataataattgtaaatgtaattgaatattatattttatatattttaatttaataattattattatgaaaagttctttatagtgtgaaccatagttttttgtgtacctaataggttacaaaaatgaaattacaattcataaccattatataaaataaattattaatttgagaattgtactcaagaaaatgaagtacaaaatacgtactaactagctttttaaaagagatagaaagctttaaaacttgatgaggaaattgataaagagacaagattattatttaaatgatgaaaataattacatgcaaggaattttcgatacaaatagagattgatgtaaattattaatttcattaattaattattacttataaaacacaaactagttttttttttttttttgaaacggcacaaactagttcttaacatatacatactactaacttatttccactttcacaaaaaaaaaattataaaatacctttcttttatattttatttataattttactgtctaaaatttttaattaaaaaaaatatatttgtaaaattttaaaattacaaaaatacactttgttccgcaaaagtaaaaaaacaacaagaaatcaaacatcaaactcacaacaactataaataaactataaaacaactaaaaataactagaaaaataacctcatcacaattatgataaaattatatataaactataaaataatcaaataacggtttattatttttactgaatagatatttttgtaaataaaaaaatttaaagagtaaaaataaaaaatttctgtgtta

SEQ ID NO: 77104 - DNA, 935 bp, Cannabis sativa
caaggacaagtgttacaatacaaagtcatagctcacataactcatcttttgtcttccaaaatcaacagtcatcagcaccagaccatatggtacaattattaatctctattttgatcgttaatttcaacttgatactcatcattttgtattatgttattgcttattttgaattatgttactcccaatatggctttaatccgtaaaatgtctatacatcagcattagatactcgaatctggaagtcgtgaagagaaaaatatcgaaattttatgttaactaaccttgtagatgagaaggagaaagagtgggattcgtaaccttccaatacaaatgcttggagtaagaagaggagctgataacagaaggcgcagagcaaaacccatcatcactcgcaaccaaatcaagcagacctgaaaacaaaatttcaagaaaaaaacaatgaatctccttaaaagctatttacttttcaattttttttttaattttctgaggaaacaaacaaacagaaaagagaagagtcccccgtacataaagtgatggttagaaggatgagagaggcttgcattgggtaccgcattgggagtggaagtgtatgggaatggtgtgacttgtgagagagatgggatcatgggatgggagtggtgttgtttagtttgtaaagtaatcggaagaagttgaattgaagtggagtggagtcagagtcagactcagttgagtcacagtgtcatcgaggaagacgccaaaaacatgagttggccactcctcctttttgtagtgtttaatttgtagccacttttaaatgatgtggagtttattaatattcgtagtgccacacttttcagtttattatcctaggataaaaattaaggtggcgtttggtaacaattttttaattagttttctgtttttaaaagtggaaaagtgaaaatattttt

SEQ ID NO: 77105 - DNA, 5530 bp, Cannabis sativa
  modified_base (4566)..(4566): a, c, t, g, unknown or other
cactcaaacacaacaaaatctcaattcaaaagaatctcttttttctttccttacaagcacaaacaatttgagctattatcccatcaaaatgttaccgtcaacctcctatttcaacctctatctcgacctcagcctccaaaaacacatacattttatagttaaaaaatcattccagtaaatcttcaaaagaaaattacaaataatttacaatatcgaaatcaaatagtgagtgttcaaaacaatttaaacctgttttcaggactgtaaactatacctaaccccaccttatcacaattacaaagctcagtatataaagtcacagaaactccatacacatatacatacaataacatataattttccaccatgagtgttctccagttcaagagccacaaaaatcacacacaacataaaaatcaattcaaaagaactcatttttctttctttaactccccaaaatcgaaaacccacaaagaaaaaatatcaataaacaacaattaatattccaaaatcggaaaaagtcgtaaaactgacctaaagatgtcatttttatcggcattggtggtggtggtgtttctggaggtaaacatggtggtggaggacctggaggtggaggtggaggtggtggtggttgttctggagctggttgcaatggcagcggcggcggcggcggcggtggtggtagagttagttgtaatggggaagatggtggctttggatagggaggtggaagaatggattggtagcctggaggtggaccttcatcttcgtcaagttgactggtttccatggcggcgacaatctcctcaggcgagtctccggcgattaactatggtgtcttgtctctctccacgaggacgaggttgtgtgttgtgttggcctacaatttcaattaataaagatacttttttttatttttaagatttataccattttttttggaaaatgttatttatatcttttttcgatgagaaatgctaaaagatactagtgatatctagtactttctgtgttaatattgttattagtttaacaaagtatcgagtcttatacagtttaatgtaataagttttaggagtcaatcgtaagacgacatgtctaaaggtgctaaacaccactagtgcctaatagcaatgcatttttttcgataaaataatattatttgtaagatttaatttttaattaatttaagggataatttcaaaaaaattataaaaatatggttgtgtgaaattttaaatatttatacgatttttatgattttatttacagaaaataagattttttgatatatttttatattatactcttgttaacttttggttatttgaatgttgtttaggtgttattttcctgttacttttatatagtttcttgctatttttgtgttgtttttataaaatattgtaaaaatataaaaataaaatctttcaacgtaaaaatataaattttttacaaaaaaaaaagtaatattttatgtaattattccttaatttaacgatttcctttacttttataatagtgataattaatcaaaagtagagtagtatattttagacaaaattataaattttatgggtttttatacttgctcaaaagtatgacatttttttttttaaatattattttacagaaaagttaaagaaaaagttaaaactaatatgggaaaattaggtaaggctaattagatacccttaatcaaagcaaaatatgatattttttttgaaaattttattttatgggaaaattgaaataaaaataaaagagaaaattaggtaagggtaaatagttaccataatcggtaactaagtaccttatgctgtttttttgaattttttctaaaattttcctttaaaataatttttctgagaaaaaaattatatttttgtaaatttatactttaaaaccataaaataaaaattctcctatattttaaagtaaaatattattataattttttttcattttaagtaaaattttatataaaaaataataattaaatagcatggaccagtatgagactattaagtggatactttcttgatgctttgttaagtatttaccaatgttttaaaatcctcatataaggtattagagctgtaaaaaaaaaaactttattagtatttaagttttgctgaaaaataaacttaagcattatcaccgaaaattactatagtatctatatataaaacttaaacacaaatacctaatgaaatggacagaaaaaaggagaaaaaaaaatagagtactatagtataacaattgagtaaatttgtgtatttttgctattaatatccatttgtgtaagtgtaaaactattgtattgtatgcttcaatatcatagtaaatagtacatcttttttaataatacaaagataccaaaagatgaggactattaaagatacaaaagtaattaaaagacatatagttgtaacatgaaatcaagatcatctatgttcaaagcttttatgcatcaatttctagtcaataccacaaattttttatctttgaaaccttgatgatgagtggtttgaacataaaattgacacaaatagatatactaatcttgataatctttcatataataacaagtaataataatatcgtagaaagatgatcaacttgttcacatcaagataggatccaaaacggtgtacaaagagtaaagaagaatagtaaaatataagatggctgaggctacacccgcaattagggctccagtgacatgatcgcaaaacttgggcacttgtccacagatgggcaaccaaccggcgtcatcattccctttcttccccacatcgcctatagccaacgcagccgaaatgctcgaggccaaaagcactgtcataacctattcacaacacataatattttttcattaacaataattaaaatattcaaattattattaagaagtgtttggctaaatatatgtttttagttttttttttgtaatttaattatattttaaccaataataatcataacaaaataagataataaaaagtaattagttaagtttaattaccacatccaaaataataactatgcgcctaaaccaattctttgtggaaagaatgagagttattagactgtatagccctgcaattgcttccactatcatgaagtacctatccacatacatataaattgcattatatataaatgaataaataaataaataaaattaatatatcatatggtcacccatgtacttaaaaaaaataaaaaataacatggtcatctcgttaagacagactaaacttacacttaagacccatgaatccataagtaaatcaaaaaattcttttaataatttttaaaaatattatttttgtctaataataaggctcacaaaatctcaagaccgacgagatgtgaatttataaaaaacattttatatgacttacacgaatgcgggtgtgttgttgtatttggcagtgaaagttaagttcaagacatgagcagtgtcatgggtagtgacaatgactacaacagcagccacacttgcagccatggctacaaacctcatcacaaggctcaagattttactatactttgccataatatttgatgatgattaattgattgagatgatcaaggggtcttgtagttgtggagatataaatatatacgaaaattttggacaagttttgtattaggttagatgcatttgtgaaaattagacatgtgtagtgttgatgaggtttggtttggtaacctatatttcatattatattagtatttggtttttagataagacaaaacaacacttgtaataactagtgtcatttttcattagtcacaccttattattatcttattaattatgaatagaacattcctattatatattattggtactcgatattttttattggtgacgttgtataattagttagtgatatttttttaaaattattttcttaagctatatgagattcgatacttaactagagccgaccttaaaatttagtgagtcattaaaaaatatatttttttaagcctttatttagaataaaatgtagtattttttttttaaaattaataaaaaaatatgtaattttaaaaggagataaagcttttttaagcccctgaactaagcacaaacctagtctgcttatgcccaaagccaaacttatatttaattatatcaatagcaatgacactgaaaataatattagacactaataatactttttaaaaaaatctcttatcaatataataaaaaatttgttttacttgaaaagtgttctaaatatgagtatgattatcataggtaaactacttaacatgaagatctatctatattatactatgaggggatgtactagttttccatgaagtaagcctcttctaacgtggtaatctctcatatctcttttgtattattatgtatgtattattattaacaataatcaacattaattaatgtcgtaagttgaaaaatgtctcttttattaatcaattaactaaatttgcctctaattttatatttatttgaatcatacctctttttatatgtattgtacccaaagtactctgacataagagagtcacatgganagtatcttgaagtgacaggggtaaaattggtacaatgttttaaaaaagaggtaaaatgatagactttaaaaaagagggtaaaaatgaaaaaggacaatataaaaatggtatagagtgtaattttctcttaattaattgtgttcttttggaggctttcgggcttggcccaagggttaaggcccatccacaatggtccaaaggtaaccaacttatttcttcaaaaaatcatagattcttatcattgtttacttttttccttaaaaaataagcttaattattcttttcaaaaataccatagttcaaacaatatatttcatagtatgaaataaaacagatatgcttataatgtataatttttttttttttcacattcactttataatatcatagttcaaataatatatttttatagattgtaagaggaatcttttatctaagaaaagtattagtatattcatgaatcacaatggttttttttttcaatggaaaatgttaactttattaaccaacaaattcagttatcaaacaaggtaacaaatcagtaggaacagacttcatactgaagatacgatcaggatacaaaatagcggtcctaacaaagctatgagccactacattagcagatcgtttaataaaaataacctcaacggtacacaattcagcaagtaaaattttacagctttgaatgactttaccaaacaaagaaatcatatgtatagaactacataatgattgcaccaccccaagattgtcgctctccacagttacatgatcccactgctgtctctttatccatgtgagagcttccttgacactcattgcttcagccaagattggtttaactgtgcccaccttaaaggtggttcgtccctcaatcaaccaacctttaccatctctagccaccatactcgtatcaaaagaacaaccatcgtcaaacaaggttgcgtctacattaaccttaatt

SEQ ID NO: 77106 - DNA, 940 bp, Cannabis sativa
tccaaaatagtatttatccaatataaatataaatataaatgactattttctcacctaccaagcacataaacttcgtttggcattttctttgtttaattttatttttttgtttcattctaataagctctcttggtgggtggttaattcatggttaaagtgcatgcctagctaatcaagatcgacataataaattaatgcctttgaattctccacacacactcgtacgtgcaccttaaactgatcttatatatatatattaggtctaatttcagccaagtgttcgattagttaacaatatcatcaatataaactttaattacagttattattatattattagtagttatgaatataataagtaattatataaatattaataaatgttcaatcacaataatatatatgtggatcaagaaattgtaggacaccactttattagtaggtgcctctctatggatccagagcatatttgatcagcaccatgaaaaaaaaaaatcagtgtttgatgatcacatatattgcaaatagaaaaggccaatattagtgattgaaattgtctttatgaataattatgttggaggggactttagttgtaagtcactctctcattggttgatcttctttaatcatccttaaccaatagtactagtactttatatatataatatataaatatatttctataggaaacttttaaaagcaatttaattaatgattcttttttgcaaatctttacaaagggataaataattgaagggtgctagctaataataataattaatatatagtgaatttaattttaatatatataaattaattatatatctatatagttaggtatataaccccttttcaaagaaatatatcatcatttagtttactggttcatatggaatccaagacatgattctcaattgtgatgataattataaaactacaa

SEQ ID NO: 77107 - DNA, 869 bp, Cannabis sativa
tagagctcggaccgagctttccaatgatataaagaacgtcccaaacggagtcctgagtcaaaagttatcgccaaaaacaaaatcgggaaaaacatattttctcattgcgaaaccaagtcgcgagaggccaaaaatgtcgtcacgacgactgggtttagaacacccaaaaactccatttttaaggcctaagcatgccaacttttcctagattcgaaccccaaccaaacatagggtaaaaacacaaaattcatgcatcaaatccaaccataaaacaccctgaaattcagattacaaatccatgaacatcatgcttcattcaagaacataaatcaacaaaacttcatacttgcaaccttaaatccctaggcatgaatcaaacttattttccagcaaccaaaacataataaacacatggattcaagctagaaaacactccaagaattccatctatatctcacacaaaatcgaatccaacttataatcataaattcaaataatagcatgcttgatgaaccaacacaagatcatcaacatgcaactaccatcctccttaagctatttcatgcttttcaacaaataaaaattcagcaagaacataactcaattcaacaaaagaaagaactacctcaatccttcaattcaaagcacaaagctaccaaactctaagcttaatttccaagcacttattatgattttcaagtgaaaaggattaggttagaaagagagggagagggagagggtaaggagagagaaagccaaaaaattcctttttcgtttcctcaaaattcagcttttattaaagtaaatcaaataaggtcaaaagaccattttgcccctaaggccaattttcacctattcacacatacaag

SEQ ID NO: 77108 - DNA, 786 bp, Cannabis sativa
ggtgagcccctccctaggctctgatcatgacgggctttagtctggtggcgaccagatggtagtgtcagtttaattttttttgctattttgttttgagcattacttttgactccaaactttgtttaggacgtttatatattgttggaaatttcattttgagctccattatttggtccagttatagagtcttaattgtgaatattatgaatgttatttttgggtgattaaccctagtttataaaacctaaaattgtgactaggattaccggtgcttagtcagaatcacctatggatcgatatttctcctcatacattggaaatcacgtaagacaacaaactaagcacatagaatatagcacgttggcacagtaatacaatatttgattattattgtgaattcatgacctagggttattaccttaactgcgtattactataagtgtgcaataatttattaattgaatatctgagtagagttatgcatctacagtttaaccaggttagactcggcgattgtaattgagacaaactctagtaaggccttaaatataaaaagacatgtgagtgtaacacgtaggtctatgctacatagacatttattatagtgacattattatgctgagtaatataatataaagtgcggtggcatagtatagatacacagcagcatattgtatgaagtgtaattattattataattatcatactgtattattttctgtcttgatgggccttgtctcacaggtgctctattatgcaggcaagggtaaagtagtgtcagattag

SEQ ID NO: 77109 - DNA, 5077 bp, Cannabis sativa
tgcagcaccaattattgcaggcaaaaattggagagttttgattataaccatgcctccccatttcctctcactattatcatttactttggtcttttcttttctcttgatatgctcgtcgaaaaactcccatgaagcaatgagcccggctctgtgccactgcatcctaacactcccatttacaagatagggctgatgacatatgcaaagttaacacgcgaaattgtcttcaagtaatagcaaaaaactacagcaattcaaatctcaatacctggtataatcgacgaacataagtctccattactcgcctctgaagagtgtgatcactatgatcaaatagccctacaagggcatcttcaactgccaaaggagcactcacaagatcctccattcgttcatttatggcactttttctcttgggagtatccatgttttcaccatcctccgtaaacatctccaactctgagagacttctggcaatgttggacctgagttcactcaattttgtttgctcaagcaactgacttgcttttaatgccaactgcataaacacattggcagcagaacttagtttacaacattttagatattaagattttgtcataacaattcaaacctcggaatagtttgtatggttgagtgcagagaatctaattagcttgtccctgtatgcagcagggttaggataaaccagttgttccatgagtcgaagtatcagcctattcttactcttgacaccctgcaaacgaaaaccgaacaaaatgaaaatgtaaaactactcgaatagtaaatctgggctcatcaaagtatgaagtacctgatgagaaagcacaatgtccacaatcttcaagagatcttttttgtactgaagtctgagtctttcaattacatcagcctgaacaaaacagaatactccaatgtgaagaaaatctaagcatttcaagtaaatggctaaataaaagacacaaagaccaagttggataatgtatagttagcaactttcaatattatttttctgaaaaaaatagaaaaatgagagaatttcaaccatgatactgatgagtccaactattacaaatgaatggaccaaagggctgattcatgcaatagtaacagattgaattgacagtttcaagtattaaacttaatattacccacattgtcatgtcatttgaaattacttacttgaatattgtcactaaataattcttcaatcgacaagtactcttcaaagagggactgaatgataaggcgggcatggctttctctgccaccctcatatgacttcacaaggctcaacaaaggttcgataagcctttgttgggctcctctttctttatcggaacaggaagataggtgagcctatagaaaaatatgtgttcctttattgttataaattaagagggaaatcaaatgaaaaagaattcacttacttcaagaatattccacagtagtttagcagggaaatcgacattctgagtactaggaattgcatcgaactctttatatttcgattctaactgttgaaaaaacataacataggataaaatatgagcatcaagcacgagacaggacaactctcttaaaatgcactcttcgagacagtatcaatcttctaatgaaccgaagttctattttcttatacgctctttgcaaattactaataaagtcgttacactattttcgtagtgtaacacatatgtaagtgcagagggcataaaaagctctatttacctcgtttttaagatctttgggaagacgggttgcaagaacagccatgcactcttgccattgaagataagggagttcgggactatcaaggcaatggagcaagttttgcactacctgaggaaacatgttagaaaatattttcagtaaaagtttaatcaaagattcttttcatggcagaaacagaattagatactcacttcattaatgttgtgttcataaccggcgagaatcattcgtgctgcattaattcctgcagcacatttctgatgaactttattggaaattgttgttggaggtcctaagatagggaaagtcccaatgaaaggttctgcctttctcacagctgaaggatcatctaaatcaagtcttgctataagctcacccgcctaacaaaaatagtaactgttttaacttctatacaagtcataattcattgatatctttgtttggaacataacataattttacctgtattgcttgaccttcagacattttaaatcgaataatacccgaagcaggtgaaagtagaggcatacacatcttcataacttcgacctctgcataaggtgtatcagcagcaacatgactaccatcaggaaccgaatacctcatcagtttgcatggtatctcggctatgagcttagacgggtcgtgatcattctagttgcaaaagaacaatttacagttaatgttatcatgtttagtaagtatttcttaaggaaactaaaagaaattgtttggaagaagtgaatggtggggaacctgaagcaagcatgttcttccatcgatgagaagtcgagttccagctgcttcttcctctgcatatatcacatgactgtttccatccaactgttgagaaaaatacaaacatattatcagttagagttgtgaaatacaaaaaggacaagctgaataagattgcagcagagtggtcctcatggctagtcttatgccttaattcgggacagattttgtactcccaaacatcgtttcatagcttgtttagccttgcatcagcgttatctacgagggacagactgaatcggtttggggtggttcaagttactgactgtttggtgtgtgggggattctgtagatactcactcccatctgtttttctcctgaagttacagcaagaaagtcttgttcgaaatagcccaatagacaggtttgtcaagccagcagactgatcttgttgcagtgatcaggaaagggaaattctctcaaggaagaaggaatatttacatgagtattatttctgccatgatttaatgtacatggtaaagtttagtgcatgttgggaccgaaaaattcctagagtcaaagtagttgttaacaaaattatacacatactgtctgtcatagaattcattatatgaatatacaaaagttgaataggatggataaggattggatggctgctctatatagagttgtaaagaagttttgtgttcaatacaatttcatctgatttcccaaacaaaaaagtacacacaaatagtttaacttgggagtcaagtaatctcattttcatgggaaacgagaaacacttgagtttagttttgcataacaaaaacatcagtgttttacttttgaaacctgaaattttttgtttaattcacttgcctgcatcaataaacctccatcgcgcaacgtatgtatctctgcttcaatctctgactcattcatcctcaatctataactgcccggtccacctcttaccatgtcaatctacaaacattttggcatagtttgaacaacatatgtcaatagaaaatgaaaagtaacacatatccaagaaagaagaaatagatttacaatgccatcatttaaacatactgtatatttgcttccttcaatgttcaatgccacttgtgagtgtacaagcgaaatgtgctgcaataagtataagcatgaattaggaacatgagaaacatcatcatcatcatgtatggaacttttaagtattttcaaccgaaataccttgggtggtatttgtcccttttcaagataaccgacgtaatctgaaaccaatgcggcactacttgcagatgatttctaaattggccgaaaaaaaagggtaagtgatgaattttgcgaatatgaaagatcgaaaaataaatgatttgcttacaaataacgctcctccaacaacagacaggtaccaaggtggcctttctgctctcactcgcatagctattctactatccaaccatcctgtgtggattttattctctttgtaatctaaagcctgtgaaacattgatttcgggttagtttgagtactgatttttcgattagttgtaaagaaatcattgatttgtgtgaagtttacatgtaagagatcaatcatgtagtcaacattagttcgaatttctccacgaatttgaatttccttcaacccaagaaccatatttgcaatagccaatgctctagactcaccaaatgcaaaaacatgtcctgaggtgtgatttaacaatcagtcatttcaatagctaaaatattcaaataactttcatcattaagactaaccgaattgagaatcggagaactcatgaatccctcctccagactgcataacaaaaactggttattagactttaataactcgaatttcgattcaaagacataaaaagttaccttaatagagaagtaagcccacacatttggcttgcttttaaagctcaactcctgtgcaaaatgatgtaataagtcaatatgatttaaccataatcacttcattgcatctgaacataaaacactaacctgtactttcccactagtaggtttgaatccatcatcaggatcctcactcgttacgcgaacagcaacacaatgacctttcggtttaatagattctgcatggtcaaaatcaaatggggtagcagtaactgaagtgtttctccaagaatcatatccaccaccatgttcctttccataaaatcttgctatctctttttgaatcaaccatgttaagaaaagaatgggaaatattagaataggtaaaaaagaaagaagaaaggcgaaaaagagtttgttaaagaagtgcccaccaggaattttccaaagaggaatacccatcccaaccacaatctgagctgctggtagattaacttcagcaatccactcagtaacaggatgctccacctgcacaaaaaaagaagaacatgataagtttataatcattgaagctgtaaactttttcataacaaagtgttccaaaccagtaaaggtttggaaaaacacagatttctgataccaaagaaagaattacaaattttccaagcttttcaagacacttaggtggcgtttggttggaagtaataaaatggaaaggaatggaaaggaaa

SEQ ID NO: 77110 - DNA, 696 bp, Cannabis sativa
  modified_base (541)..(543): a, c, t, g, unknown or other
tccgagccctaactcttagggctctaagacttaccccacagtaagtctcctccaccttgatctaatttgagttctgtgtgttgttattctgcctttattttgatttgtgagatggtatttatatatattgtagctgaaaaagagagttgagagttagttaaaagttttaactaacttttagtcttgctgtaggttgataaaagtcgaaggccacctaggcattttattcttgctttgtaaattctgttttaatattgatcttggacagtgcacagggcatgtggggatttatttgaacaatttccacctaaatccctatatgtaccgtgcactgatatatttgttgttgtctgagtgtatctgagggtcttagctcgaactcactaggggttataccaacctgtgtcaatccctaataagcttaagcaaagcttaaacttattgagggacacaacctttgtgcccatgtctgctggattcacttcagtaggcactttgtctatctctatctgtccatgtgtaactttatccctgataaagnnntattttatctcaatgtgttttgtcctgtcatgaaaaacatggtttttgcacaaatagattctgctctgactatcagagtagattataggcaccttttccactaactttagttcctccataagtcctttcgaccatagggcctctttaatagct

SEQ ID NO: 77111 - DNA, 1438 bp, Cannabis sativa
ttacataaaaatatgctttgaaaggggttgtccagaccttagcaccaaaacttttcaaacttttaaacggaaggtacgtccaaaagccaccactgaagagtgatgttgtggagcaacatgaaatttcgtagtcttcaaacctttgcatttattagtaataatttcttagatgctctccattctaataccattgtactaggatgagtttcattttgtcaacatacctacccaatttatatgctcccaaacttgtaacttcgatgacttagaatgacccttccaaatttagtctgagcacacctaccgcactatattttgtgtttaagagcactcttctgaccaccatatctcccataaaaactttctttcccttacttgtttgttgaaatatctagccactttctattgatgggcctgaagccttaagattgctagatctcttctttcgccaagtttatttgagcactatattaggacattacagttgacatcttgatcgttggatagtctcctaagggatggtggttccaattcgacttgtaataacattgcttcatagccataagctaatgcgaaaggagtttgtccagtagttgttcgttcaagttttctgtacgacaagagaactttgggtaactcttcatgcccatcacattagcttcttcacgaagtttttccaaagtacccttaagtattttattcactactttgacctgtctattttcttgacggtgcgcgactgtcgggaagcttttcacagttccatgtttcatgtagaattcagtgaacttggttgtcaaattgcttgtcattatctgaaatgattttttggggaagattgtactgaaatatgatatttttttaccacaaagtataggacttttttggaagttattgttgctaatggtttggcttccttccacttggtgaaatagtcaacagctactacagcatattgcactccacctttcccttttggaagttttccgattaggtcaactgcccatatagcaaatggccattaacttttcatatgaattaactccttgggcggagccctaggagtctttgatatacaacctttggcacttgccacacttctttacatacgcctttcaatcttcaatcatggtcagcaagaagtaaccttgtcggaatactttcttggacacactttgtccccaagcatgattgccacgaaaacctttgtgaacctcactcaggagtcatacaacttcttcttttgtaacacaccgatcagcaaaggttgggagaaccctcatctgtaaattaatttgtctagaatcaaataccttgcatccttcctcatcatcttccaatcttcctttcagtcacttgaaagtactctagtttcaagataggttgcaatattggtcatccaagtaggagtgtcatctagcattttaatatcctccat

SEQ ID NO: 77112 - DNA, 941 bp, Cannabis sativa
  modified_base (875)..(916): a, c, t, g, unknown or other
acaaagttgtggatttctttgaaagatgtctggagctgattagtgaaggtaccacgggcacgccttcctatggcgagatgaacgcctcgctatttgttgtttggatttacccgactgtaatacttagtttgtatactgtgtgttatacgttaagtgtcttaatagtcattatatctcgtctacgtctactcatgcgtaacgagattgatgcctcgccttgcacatccaatgtcgtatggtttcttgttaatgcacgaggcaacaatttgtatatctttatcttgcgtaagaccttatattcagcaagttgtgaatatactctgtcaaatccgaacttaataagttattccgttttcaaatgtgattaccattacattcattaattcataccctccttaatttaacacatgttctcctttgaaacgatggccgaattttgggtataacaattgccccttaaaaagttctttttaataaaaagtgctttttaaatgaccattgaaggtaaatttgtcataatccccttcttcaagatcacgcatgtccctaagtttaatggcttcatggttccgagggccaatattagcattaatggattgcccttttcgctacttccttattcccaaataatagatttcccaacttttggccttaccgttactgggctccaagtataaaatggtagttcaggtgggacatattccataaactcctggtttttgatgaaattcatcaagaacttggattgtcattctcctgcggagatgtcccatccagactcagaattttatccctcaaaacttgaagcaccataatataccaaatgcttttcctccctatttttgggaatatgttactgttgggttttgtgcccnnnnnnnnnnnnnnnnnnnnnnnnnnnnnnnnnnnnnnnnnnaaagatcagaaataatattttatgt

SEQ ID NO: 77113 - DNA, 1023 bp, Cannabis sativa
ataactcaaatatgtcacagaaacaagactaattacaattgcaaaaatcgaatgacaaaaacaaaacacaaccccaatcaagccgcacttaagcttaaaaaaagccaacgggccttgccgaaggaaaaaaattaccttcagtagctatttaggagcaaaaaatcctttttccctctttagtatgaatgtcaagttttaatcaaataaatatgtatgatttctatatagtaataacatataaattttaataaataatataaaaataattataaaatgtcacaattttttttttttgatgaaaagtgtatttaattaaacaatgagttagacctcgaagtcattacataacatatttgaagggatggtggatagcggaatatcaccaaataatttgtgggtaaacgtccacttagccacattatgagcgacaaaattacaagttctactaatattagagaaaatacatctagaaaaacaagaaaagtgacttacaaaaggagacatagttaccaatgacccaacgggactctttcccattgagcgcattgataattattctcgaatcgctctccactatgacaaactgggctttcacttccagcactacaaaaatagccaaacagcaagccgccgcttccccacaaaacgcgtcaacgaaatccattttagacgtgtgaacccgaacaacttcacccaaatggttcttggcaatagctgctaaacaattagtattagacattttaagatgttaaataacaatgctcaatttatttatttaatatcatttttgtagtacttttttattattaatattattataaataatcaacattaataataataataagtatttatttttatatttcaaaatatttttttttttatttttacaaaaaatttatataacaatcaatagagaaactaaatcatagttaaaattcacataacaacaatcaatagagaaacaaaatcatatagaaattactaaagtaatattgaagtaatccaaaccatatatttaaa

SEQ ID NO: 77114 - DNA, 9576 bp, Cannabis sativa
  modified_base (1195)..(1197): a, c, t, g, unknown or other
aaaaacaaaaacaaaaaaaacaaaggatactattttctcaaaaaaaaaaaaaacaaacaaactcttttgacctagggacgagggacgattgtcatttttcttttatttttttcttccaagttaattcaagtgctatttaattcaatgaagtggtttttaaataagtggattacttttaacccgaaacaaaataagtattagttgtgttaattgcacatcaacaaaacttttacaaagcaaacctacatgagttctaaaaccatcagcatgtgtaaagacaatagctacagaaatttacactagaatcctgataaataatacaatcgaagctcatatcaaactatgttccacaatgaagatcaacacttaatttttaagttatcggtggatttgttaacgcctaaaccatctttttcctcctgagcattgcaagatgaaaactgaaagtttgatgaaaaaaatgaattccttttcttgaaaaatatcatagattacagtaggctttatagaatacaatatacaaaagacagctaatgaaaactatttacagccactaaaaaagatattctaacaaaatcaggaaaggatgttttgtagaaaatctcctataggaactagggaaaattctaaaaatcactaatatttcgacaaaaactgatgaagaaaatggtaaaactcctctctttccatcagtctggcctatgtgtgtatgtactagtactcctacttgctctattatgcatatctgattatgatactcctattttttacaatctttatttgaggtagtgcgtaccaaactaaagattagagaagaaatcaagcatttcataatggcatatatcatgtacctgacagtctgacagatgatcaatcggaatgtcattttagacaatcaagaatctgcatgtcaccaattgtttctgtcaagtcacggtaaattcatagcaatgttgatttatgacagcaaaagttcaaatttctgtgtctaatttaggagtgttcatggaatactccatttaatttaatttgcacgaataaaatgaaaacatgtatttagtagcagttcataattcgtataaaatctttcattacgtcaaattttttaattaagacctcagcttgttatgggatttacatttcaggtatttatcgtatgtatctatatacatacaaagtatatatatatatatannnatatagagagagagagagagaggatgatgagtaaacacagatctcttcaatgaccttgtagggagaaacttctttaataggatacagcgaacccaaagggaaaaaaagtgggatatagaacatgagggacaggtcttcaaaagggtaaacatgaactctttaatagcaggagaaatattagagtaagataatgtaaggtcttcaatggcggacgagaggaaagaaatagaaagtgaaagacagaagcatgaggagtttaggaagtttgcaaaggcaaatatattattgaatcagaattatgaataactatggttaaaagatttttagctaggagacttcttaagtttaccttccttttgtacctcaaacattaaagtttaaacgaacaaattggcagagaaaggggcaaaattggaatcacactcatatgacagaagaggtagaagggaataaaagcactatatgcatattaaaagcaaggtatcaatttccagcatattgaaagtgaagcagcaaaagttaactcaccagaatagatagcttatgatccatcccacaattggaatttgacacaagaacaccttcacagatggccaaaaaccactacagccatagattagacaaacttcagtaaggaataggatcattacaaaattattcaactttaagttaaagattaagcgcagaaactgacccaaagagaacaaaacaaccatatatttcacatattataccaactatgggccatcgaacgaaaataaaaaatagcccgagaagaaaagatatagaaccctgaagaagcaaatagaaaccaatgtaagattaatctttattgcaaatacatatattttcaaagcatacgtataattatagtaattcaaattggcagctatttcacacagtatcctatcaagttatactgatatccaaaagtaatccaaagttatatttagaacaagagacaaaatgatattcaaaggtaacaagtcgactgcaccttccaacataaagataaaaagtacaggatttcgatgaaaatagtagtcaccgtggactccatccagcacgtaaaatgcagaaggtgaggatcacattaagacctctttacataatataataaaaacgtattataattactcattacactgagtagcacagtaaggagttcataccaagtgttgttttttataccttgtaatttgctgggttggtaaaaagcctccatgtagcgccccaaccaagtaaaagggctactccagtcaaccaaaagatctgaaaccagtattaaaagtaatggattatgaatcatttccaaaaagataaataataccatatattgagctaaagaaaagccatacatttcccaaggcaagcaaacctctatcaaagaatagtattacaccaagtaaggagaaaaatatgccaaacccaataaggcccaagccaacctctgcaattattttgtaagtcaattataagccaaatatatatatatatatataaatatatataaatatatttataaaagaaagaaaaaaagaaaactaatcaagatgcaacaaagttgacagataatgaaaatttccatgaattttgcaaaaagaaatgacaaatttgctttaaagtgatccccggatatatttttcagaaaagaaagaaggatcaaccctcctcccggtgcattataggttggtgatattattcaattttctctgttatctggcattggtcgtgtaatacttcctgctgcaagctaaatatttgtcattttgctcacaattgttttccacatgtatcagaactggtgcagggatgagtatgaactctttatagattgacataaaattgtaagtgctctgccaaattttcaggaataattttattgtaaattctcctctttctccaactgctccagatgtcattattgttcatgacagtattttttaaattataatgaaggaatggcaaacaattgtcattctcattcagtgaagactataatattcaaagcaaaatttatttgaccagttgtaagaaaccatcaatggtgatctctattctctacaccatggtttgattaccatgacaagctcctccccccttgataaatgtctgtgatctaaagctcccaaataaataactgcatcaggtccttaatttataaaggaggattattaatcttcaatatgaatcaacagagaaaccaattcatcagttacagtatcccgttctgaaaccaatagcttcaacacactatttatctcttcgcattgtggatgagaccggtcaccggaaacaaatgcagaaatctgatctttaatttttacccaagaccatcctggctctttaaccacaccctttgatttcaaactcattcttattgctgctgcttccctccatttccctttggcagcatatatatttgccaaggtgatgtgagttgctgcacaatttggatttagtttgagaatctcctctgcagcacgttttccacagtccagatcaccatgaaccctgcaagctctgagcagagttgaccatacaacatcatccagctgaaacggcatacatcttatcattctctctgaatcgcttaatcgtccagctcgacaaaggagatcaatgacacaaccatagtgctctttggagggagtgatatggtattcattacgcattgattcgaagtagcggaaacccagatcaacaaatccagcatggctacaagcagcaagaataccaacaaaggtcacagagtcaggtctcaaacccaccatttgtatcttgtcaaacaaatgaatggcttcttggctgtatccatgttctgcatatccattaatcatggctgtccatgacactatatcatcttgtcccatcacatcaaataattctgaagcttcttttacactaccacatttacaatacatattgattaaagaactttgtattattggtttatgctctaacccaacagacacgacatgagcatgcagttgcttcccttggtcgagcattgccatgcttccacaaacacttaacaagctagcaaaggcaaattcattaggcttcggtccatcctttctcatccatgacaaatactcaaaagcttcttctccataacctccttgacaatacccagcaattattgtgctccaagaaattacatcttttcggctcattccttcaaacattattgaagctgaagtcaaacgcccacatttcaagtacattgtgacaatagagtttgttactgacaaataatccaccaaccctaaacatattacatgagaatgtaactgttcaccatagtcaactctagctagattggcgcacccagagatgatggcagcaaaagtatactcattaggactcacactagagtccttcatccttctgaaggcttcaattgcattcttctcttgacccatctgaacatatgtggtgataattgttgtccaagaaaccacatcacgtgtcttcattgttgcaaacaaatgcaagccatagtctaatttaccacatttattgtacatagtagaaagagagttggctacaaaggagctttcattcaaccctttcttcaatgcttgtgtgtgaattgccttcccatgatttagtgaactcgaatcagcacaagcctttaatgcaatagcatatgcataagcatcacattccacctttgacctccacatttcagagaagtaaataagaccctctgcatgataaccagcatgaacgagcccagttataatggcagtccatgatactatgtttctaaatggcatttgttcaaagactctacaacctttatcaatcttgccaattttggtgtacatgtcaagaaggctactaccaacaaaaactgagttgatcaaacctgattttattgagcacccatgtaatagttcaccataacaaatgttcatactgagcccacaagcctttagagcaagactaagcacaaaagggtcaagttgcagttcagacttcacaaacatagttgaaaataaactcaatgcctcaggtgcttgaaaggtattcacatagccagaaatcatattggcccatgaaatctcatctctttggggcattttattgaacagtaacctggcatcatttaggaagcctgttttcactagttgcttcaagtgagagtttagctcaacagtactaacatgattcacaaaatgggtttctggggctaactggtcttgcctcacctgtaagcatttgcctgtggaaataacagccggctctacgaaaattcttctggcaaagcatctcattgatgaaaccatattgcagttgtagtcttaccatgcaaggcagttcttgtgaaaacttcaaacaggccccaaagaaatatttcgttgagcatatttcattatgataccatgtttaaattatcacttttactttcaggggtgcctataaatcccatatgcacgattctatttgacaaccatgatttgtaggccaacattaacatttgattgcaagtcaaccatcaaatatgtttctattagtgatttcaaaacctgggtccctactataagttggagccttaaaataatttcagccatgaactctgtaactaaggatataggtcaaaccattaaggaacgaagttttgattgacaaacaactcaaaattaagggttgcaaagcgggatcgttttttattttattttcctacaaaggaagcaaaaaaggagatctaaaagctgcaaaacaggtgcaaaacaggatacttattaaaaatatatacttactcttttgctcatttagctcatacgccattgtttttactccacggtgatggtgataacaaacacaatctgcaatagaaagaaaaacgcagaactaagaatctagcatcagtattaactaaaaccaacattaaaactgaaagttatggacaagaccaatatgcaataattgaagcacggaattagtataaacaccacttaaacacacagatgaaagatgtaatggcataaatgataaaaccaatgcagtattttagcagcggggtctatatgaaaaccactaattcctccaatttagtcatcaccaaaagctagaaccccacctaaacagagtattacagcgtatcaaagaaaactaccaaagtcatttttcctgttggaaccctatctaaatcttctgtgcaatttaagaaccttttttaagaagaaaaaagaaaaattatgtatttccaatacccaaaaaacatctcaaaaagaaacacaaaacaactagggcaagaattcttaacctgaagtagcagatataaacaaaatgtattgatttagaagataaagcagcaaacatgttaaaggatacggctgcactattttatttataacacctaaatttggctaataatctgattaaaatgagatttgaaaagatagtttaggaatatgaatgtctgctaggcatgcatggcttatctttcctatttgtctgaattactgttgtgcctggacattggtttagaattggcgagactagtaacaaacttaattaaattcaataattaatctcttcaaataaccaggcaatcttgtaaggtgaaatgatccataatcccgagttcctttgattctatatgttttgcattattggccataaattctaaaacaaatcaaaatcacagctcaaaacccaacatttgcttcccttctctgtttccctttgtgattacctacaaccaattacctcaatatctaatagaaaagattttgacacccatttcaagatccatattaatgaaaaatcatgcttaaaaatgaccagcttagtcttgtttctttcattaattagtattcaattccgaatcagaaaaggaaaaacgcaaattaaacctttaatcacacgcaaacaaaattaaccaacaacggaacaaaagaagacaaatccaaatgtagattttgctatagagttgaaaacacacgaacaaatacgaaaaatacatacacaaacacatgagacatacatatatcatacagatgagaaacactgacctcaaaactataagcgcattagcagccagagcagagtagagcagaacaatggcgtaagtatgttgctataaccgagtcaaatccaactctttagagtgtttttggttcttcgatgcaatttgaactcgtgtacttttcttccatttctaggcctgactctcatttctatattttcttaaagtgagggttatttatgtaatttcaggttataagtaggttttgttttcttgaaggttctttcggtcattctctctttcttctaaagagagaaacataggacgagctggtgagttattacttgtcctccaataaagccacaaaacagtctctcctcttcacacaaaatataagaaaccaaattatcaaattccaaaatccttcagacaattaaaaaaaaaaaactgtgggaacaaatttaaacaaaagccctaatttgttttgctttggaaagagggttttcttgcagtttggggcatcagattgtttcgccgtcagtttcagctatggtacgtcttcggttctcctctcctcttctcgaaatctccatgtttgtgtgtttaatataggaaaggtttttctctatggtattttgtttcaactagttctggtgtttttacttgtggggtttaaatgttttacttattggttatgaattttggaacttcatgatataaattttgtaggaaaaagaaaaggaaactttttcattttgtttttgtgtgtttgtacgttggaaagggattaggaattagagttgggtttgttgtcttattatttggaaaatagagttacaactttctaatttacattcggttgagctgaactgattgctttgtttaacacaatttatgaatcgattttcgtaggctgcaaagattcttgcaaatttgatcgtgatgggttctgggatactagctagggcttttgttcaagcctatcgtcaagcacttgcaagtaagtttcttcattattgtaaacactagggcagtccttagaattgcatgttctgcataacatttacagtagaatgtagcttatgttttgtttattgagatttatttgttaacccgataagggttttctcttttcttatcatatttcacacatgactagtgcatcaaatttgtaacctcagggcgttgatagcttttgctttgtgatgtaccttttgcatgctagagtggaagtgatgtaatatgcatagtttttaattattctgtttgggatagtgttatcgatagaggcttttaagacatggatcagtctcttttgtagacttttatataagcaattgtccttatccaagaagtgtagggttaggggtagagcatagaattttttcttaaagtctaaatagaaaaggtactaattttcatcaggtttagtatcttccacagtatacctgatattacacttgtgtaatcaaaagcccgtgttggttctcgtttgtctaaaaaaaattcacatgaaacatttttgcctactataaactcttatttgaaaccttaatcttcacttctggccaataactggaggctgtaacatacaaatgtgatcttttgataattcctaaaatagagagttaaactaataaaaggatacttaaataagatgaaaattttgatacttaattagaggatgaccgttgaaaatgtaatcttcacaattcttaaaacacagcttaaatataatatgtttaatgcattaaagcataatgttatattcttgaaaggtcttctcactcatcatatacagcactaaatatgaagattcttcttcatatttcaaatggctccaataagtctaaaacagaatgacaaatcctgggaggccagtgctaatcatttctcgatggcagtttctagtgaagctgcaccaaatagagagggaacatcaaatgtaataagtcaaccctttagctgccgtagactgcataaagaagtttcacataacacattgatttatagctaaaatgaaatctaattgttttctgcttccgttatctccaaattccatctcaccctataacctgattataaaagcaactttagtatgtgcatttatagtccacggactttcaaatgtgttatggtgccctatcccaatattgctaacatttgcaggttagaacctttcattgaatttgtatgtatgctaaagtaatccttggtggcatgccaattatatgaagccggttgctgttgttctcggacatttgtaataatttattgattgagctgttgttttcatgattaatctgtatgcattattggcttagtttagggtgcattttgctactgctcttatttctgattgatttgagtgataccaaagagattttgtgaatgagttt

SEQ ID NO: 77115 - DNA, 803 bp, Cannabis sativa
tacggttattttataaaaagatagtatttttgtaaaaaaaattgtatgagtaaaattataaacttttatctaaaattcagtatttttgtaaaaaaccctaatataaaactgtatgcttagagcattaaggtgttctgtattttagcttgaggaaaaaaaaattatattttgggttaaatttggtcgaatatatttagtctttttccaccgaggaaattgagagagcgttctttcagctccccctggacaaggctgccggtctcgatggtttcaactctcatttctatagagcaaactggtccctcctaaagaataatgttctagctgctgcccttagctttcttaacggtgatgggaatactgcccctcttaacaccactctcatcactctcatccccaaagttaaaaaccccacctcaatctctgaattcagacctattagcctttgcaatatcatttataaaatcatctcgaaaaccattgctaataggctcaaacttgttcttaacaatctgatctctccaaaccaaagtgctttccttcggggtcggcttatgtcggacaacatcattatcgcttaggaagtcgctcactccataaagcttaagtcttgtgggaggaggggttggatggcggttaagcatgacatggccaaggcctttgatagagtggagtggtctttaaccctccttcgcagacttggaaggactgcttgaagtctatcctactcctcatgatactttccctttgatattttcaagcgaagtctaagcttgaaattttatataacttcagctttcctt

SEQ ID NO: 77116 - DNA, 1540 bp, Cannabis sativa
ctacgatcatgacgatcataataatattaacgaggaagataatcagagtaacaagaggagagcccctgggaagagtaggaagacagctcggccaaggtttgcgtttcagacgaggagtgctgatgatattcttgacgatggttacaggtggagaaaatatggacagaaagctgtcaagaacagtgcatatcccaggtatatatatacatatacatatacactatatattcatatttttgttgcatgcttaattatatgatgacgtctatacatataatataatatatgtagttctagcaaattatattgatatatttgtttgaaaaaacttgttttcattcaatagttatgttataaaaaatttgcttagcgataatatcaagaagacttctaaaatattaatggtttaatgaggtgtatacatccatatatatctgaatacatagtactatctacatgtaataataaggaaaaacaaatattacagtttgcctggtaaaacacaacaagagaatctaatttgtcattaagggaaaggctaaacattcggaaatcttatctatagatgtttgttaatttatagccaggagaagacaatatatataaatacttatatgctactgtttatattatacattatatatatatatgcatgtaaattatcgaattgtaattctctaatcaatagcatattttattttgacatgcatgatctctcaaaactgtacataaaacaggtggtatatatgaaattgatcatgattaatcaagcatgcatatggacaagtataactaaaccctcttatttaagccatctcctttgtagagtaaaagtaattaacaggattattaattagttaattatatatatttatgtttaaggtaaataatcatctatatattatatatatacagatatatttatataaacaatcggccgatcatatttttattgtctatataagatttttgtccccatgaactatgacataatatgtattattatgcctctaaacttttgagtctattacaaatagagtatcgtaaattattcattttattaaatttttatcacacgatgacaaaattataacatgattgcttaactaatttctacatcaagtatataatttaacattacaaaataattatgcatttttaaaaaattattatactaaaaatcaattaataataaagaaaattatgtaaaactaaattaaaaaaattattttatcatattaacttaacactgacgtggtaactgattaagcagttatgtcattattttgtttgccaggttatctttttttttttttgtcatcattaaaaaattacataaaattaaattaaaaaaaattatttttttcaaattaattacatatgtgatgttgacattacactaacgtggtaactgactaaacaattatgtcatcattgtatgacaaacttaatagaactaatttacaacactttaaatctatttttaacgaactcaaaaattaaaaaaggcacaataatacatcataattctgagacaaat

SEQ ID NO: 77117 - DNA, 1949 bp, Cannabis sativa
  modified_base (47)..(51): a, c, t, g, unknown or other
gcgctggtaaaagttacttttactagcgcagtagcgaactgtgctgnnnnnagtgacatttcttgtagtgctagtttggaggggtttttgagagcactaaagctcaccacgagcttcatctctgtctgggcagctccaccgcacaatagagaggtgagagagagagagtgatatctagagagagaggaagaagaaatggaattagggttgggggggtttggtcttgtgcgcagaagaagaagaaaaaaaagaaagaaaaaaaatcttttatttatttatttaattattataattttttataaaaattttataatatttaaacaattaatattatgtggaccactaaaaatgtgtcgtgtgtacattagtgtacacatgggcagttcactgtggcacttaattgagatttttggatgaagtgtaaaaagcaaaatagaatgggagtttggtaggttttgccgtcaaaaaaatagtttatgtggttaaatattaaaatataaaatttaagtaattttgccgctaatattgtttaaaaatatttcatttcaaattcttcctttaaaaaaagctaaaaatatacatattttaatatttttgttaagattttcaacaaacaattttaagaacttaaaaaaaatatatatatatatttttaaataattatttttatttattatttttttaagaaaaactatgtatattataaatcattaacaagttatttaatattggggaaaaaaatttcctccaaccaaaaataataaccatccaacactagagtatgtttggctaggccatgggtaaccaaaattggttgattgtttagcatgagtaacacaaactctaagaaaaaaggataaaaaaactatgaatatcaacaatgaaatcattgaagatagaaattgctaatgtagggccatttaaggcagatgaaaccatcaaagcatctgtctccacatgtgttattggcaactgttattgaagagcccaattgagactataaaacagaactttagcttctatttcgtgatatgcataatttccttgcaatggattgcaaaaagcagcaacaacttggcccaaggaatcacgcaccacattgcctacaccaatcttattatcaacctttttacaagatgcatcaacgttaagcgttagacctccagttgcaggcgacttccatggggaactaggtggcaaaggtcggcgagaaaggagagcttcaacatgtagagcaacaacagccacatcctggttgtgttagaacgtgcttgacaaaattagaggatataacttttagaaaaaagatgcaatgtattgctaatttagctttttatccatgaagaacttgattcctctctgtccaaatggaccacagaacacatatgatctcttccattttaggtttcgagtagagagaggataggtgaactaaataatcacccttatgcatagacaatgtttgttaggaatcaattggaaaatcagtattcctccaaacaactcaagcatatttgcaactgaacattgcatgtccaattgattcccaggcttgttttacagacagaacaagtaacatcggtgataacctttcatctcactaatgtggtagccaccgacagtgcatcatggaaaacgttccacacaaagattctaacctttgatggcaattttaaagactaaaagaacttccactagcccacatctgaatcagaagttgaggcatcttttaattcaacaagagaagtggcgaagtgataacctgagctaaccatgtatatttgtaacgtccccgcttcaagcctttattgggccttctcccatagaataatgactcttatacacgggtatcccactcttggcagaccatgaggtgtgcaatctcatatcgcgtggggaaggataattgtgatgattctgagattgtgtaggtatgggactacacagtt

SEQ ID NO: 77118 - DNA, 1278 bp, Cannabis sativa
aactgggacaattggaatcgaagaaatccatgaaagtgtgttggatgacttcaatgattgggacccgggacctgcaatctctttgtaatttttctgttgtttgtactctgttctttgattggttggggacttatcctagctgctgttgttcttttttctttggttgtttctttcctgttgttgtttttgaacttggcatttttctgccttttaatgaatgggtgtcctgaacaccccccacttcattaaaaggttaaactcatttccaaacaaataatctaaatccttagctaacatacttcatcctaaactttcaaatctttagctaaatgtagctaagctctaaagtttctttctttattttttttttttgtacttcattggcgtttccaaatagaagtcatgtggcacttaactaatatttaatgagttttgagcctatcatttggctcagtaagactagcaagtagtctttttattagttcgaatcttgtatccaaatttatgttacattccagaaatttcaaagcgtatcgaagcacctccaaaagtcattcatcaatgaaagttgaaagggtatctgggatagtttatgatctcagaggatgctcgtgtggcgctcctctgacacaattttgaagaatttggtgacgtgtcccctctgttagattttaattttttctttaaatttgatcaacatataaattataaagtcttttttaaattaattatcaaaatattatttaatttaattttcataattaaggaaaattaagtattgatttgattttgtcaattagtggttatagctgatttgtatttatttagaatgtttttcataaaaaattatgaaaagtattgaatattgtatatatttggtcataattgattggaatcaattcttggttcatatctttggtattactttgtatataatagattttgtggtatttttatgacaggaattagagctaaaatcgttaccttggctatatatggaaagtttggaaaattttgtctgatttgtcactgcagattgcgtttttgtcgcagcagattggggtttaaattaggaaagtttctaacaattgtaaaaatgtgtttgtagatgtctctaaggtttctatgttctataaatatgacctaaataaaccacacgactttcatctcttctggtcttattattttacattttttatctttgtgagaagagagtttaaagtaattgtatttgtaatttttttagactttattaattaattttttttctctaggtgt

SEQ ID NO: 77119 - DNA, 1302 bp, Cannabis sativa
  modified_base (35)..(41): a, c, t, g, unknown or other
tgttcatatgttatgatatgaatataccacaccannnnnnnatgtatggatgatgagattctattcatacaaaaccaattccaataaacatattggagggtcccattagcgtacatccaataagaattaaacctaagaatttgccaattataagttgagcgcatacactatcataatttttatatgtattatgtaattatattatattaataatgaagaataaaattaattctaatattttcacaagatctaatgctaattataattgattattacacgtatgtctttcattacaacacaactaagtgctgtttggtttgcaatacatagatatataattaataacaaacttagtcacaggaatatatgactgtgataattttaattttcatttaatcacaatttataaattataatgataattaaataggttataactaaaattatactttgtgatcataatgtaaattgcaatttttatcactaattaatactttttttttagtcacaatccaattactttaattttggtaatgacatataattagtattataatatttttaagttattttttttttatttttagttgtgattaaaataaaaagaattgtaatttggcttaaagtaattaaattaatatactagaaaaagaagaatgatagtatgaaatgtatttttgtttcctagagaaatttatattcaatatttttgagaggtacataatatttttgggaaattactttatatattatttttattatttttttaatttatgatttaattgttccagcattttctatgtgtatattttcataaattaaaattttaaactaaccaaacaaattaattattgctattgaaataaataagatgttaaaaaagaaataagagcaaatagaacttacaaataaatagaaaaataaaaacacgagaaatttataaattacctatgtctcgaagcaccactaattatttgttggacttcaaaattacaacttgggcaagattgagtaaacaaccaccctttataatatagaaggaatacaaattttgagatgaaaagaaatggtgaggggccatatttataggcttagatatgggttaaattctcatttacaatcaatgtgggactttttatatacagttactcacaaagaaatcaaaaccatgggcatccgatccaatctaacttttttcctctaatccaatacaatccaattagtgattgaatataaaaaatcatcatcccaatttagtccaattaaactttaaaatttaatccaatctaattagattcgatc

SEQ ID NO: 77120 - DNA, 562 bp, Cannabis sativa
agagagagagagagagttttttatgagtgaatgtgtgtgtcagtatatatattaggatgttttatgtgtattgggcttgggcttttgtttttctctttataatgtcactttcgtcagtttataaccgttgttattttgcgtttgtaataagttgatgcaaatgtcataacatgttgatttaaaaccgacgtaaaataagtcccgaactgacaaataaattttaaatggtttttttgcgttgatttcaagtgttgaattagatcaatcaaaatataagtattgaacactacaagtgtcacataggaatgctttaacatataattgtgttacatgatataagtgtcaatattgatggagacgtcctcattttctatgtaaaatcatccgatggttttcaaaaaattaggaataacttacaatgctaaaataaaactggaaaaatagataattacattggtatagtaaaaaaacaagtatgcaggcagttgattattagaattaatttttcacattgaaaattattaaaaaaatttgcaatacatagttaaactataatgtacac

SEQ ID NO: 77121 - DNA, 662 bp, Cannabis sativa
ttattgtgactaaaagtcacatttagtcacaaaaaaaaatgttgtgactaaaaagttatcactaaaagtagcagttttttgtagtgacaatacgaattttacaggttaggatcggaataattaaacgtgggtcaaaaacaaatcaacaggacttgacgaaataaaaataagtcaaacacgacacgacttgcttaacacaaaattgacacatttaatattgttcttttaaataaaataaaatagaaaataattaataataatataattatatatgtataaatataaatagtgattcaattttaagtaaaaaattttaaatttaatttttttaaagagaaattgaaaatgtttaaaaaatttacttttttattatatatataaaaaagactatctatataaatgtatatgagtttttttttaataaaacttaaatttattattttttctacaactctagcttcagtaatagtaaaatgaatcaaagtgtatcaataaatacaacatgattttttaagagttggtttaggagttaaaaaattaaatacgagtcaaaaaagaatcgacacgtacactataaaatataaaatttgagtcgctaaaatatgacacaaatacgagtcctaatacgtttgaaagaggagtgaggattcaaaaattcacat

SEQ ID NO: 77122 - DNA, 699 bp, Cannabis sativa
  modified_base (532)..(532): a, c, t, g, unknown or other
gtgccactaccgctttgacaagaactatgttccacccaattctgctcctcctcgtgcctacctaactgagattgaagctgaaaatgagcattaggtacctcacactaccattttacctgattttggagatgacaatctatggtttgttgatacaggggcaaatgtacatgtcacaaatggttctgaatcccttgattcccctactccttatgttggaactgagacactttctgtaggtgatcgtaagagtcttctcatcactcacataggctctacttctttgtccttccccaattctcatgctttacacttaaattctgtcttatatgttcctgccatgaaaaagaatttaattagtgtgtctaagctaactcatgacaataatgtgtatcttgaatttcacaaaaattattgttttgtcaaggacaaactcacgggagctgttcttctcaaaggaccagttaaagatggcctctatgttcttggtgactctagtcataactcacacactctacaatgtaatctcactacnttgtctcagtccaacacagattgtaatttttcttcttgtccccattgttgtaataaaatcactacagattctatgactttttgtaatgagtcccatattaataaagaaaatacttttgtgtattcttctacatcttctccatatgcttctttaactaattttactca

SEQ ID NO: 77123 - DNA, 1382 bp, Cannabis sativa
aaaaatactgtcttttaataaaacaaccataaaacaacaaaatagaacaattaaaacaacagggctcaaagctaatcttgctaaatctcaggttttctttggtggaatttctaaaagagacaggtctaatttacttgggattttacagattgaggaaggggtgtttcccctaaagtatctcggggttccaatgagaccaacaaagtggaaagtggaggactgtggggttattctcaagaagatcaataaccggttgcacacttgggctagtaggcccctttcttatgcagggagatgttaactaatcaactctgttttgttaggtctgaggaattattagatgaacattttcttgttgcctcaaagcgcaatcaaggaaatagataaactttgcatgtggtttttgtggggaaacaatggtacaagaagtaagtttcatcttacatcttggactaatgtttgcttaccaaaggagcaaggaggccttggttttggtgaaggtgctaagtggaataaggcgatgattgcgaagtatgtttgggctatcaatcatcattcgaaagctctttgggttcgttggatcaaccatgtgtatttaaaagggcaaagtttttggcagtatcaactaaaaaagatactagttggtactggaaaaaactttacaaaattagattgatgttttctcaacaaaaagtggaggatgccatgtgtaagggtaaattttgtgtcaacaaattatacaagagcctttgtcatggtgagcaatttgagtaccaaaggtttgtttggaatcggtatgctattccaaagcatagatttatttgttggcaggttgtgcgagatagcttactcactcgggatcatctctctagaattctgcatattgacagcaggctttgtccagtgtgtggctgctgtgatgaaaccacggtgcacttgctcttctcctgcaggttttctcaataggtgttgaagggtattaatgggtggttaggaactgcctggtcggactgtctagaggactggcagctttggactatgcggttgggaaataaaaggatgaatttagttgttgcaatggttttttcaactacaatgtattatgtgtggcaaaatagacacgattgtaatttcaatgggtattcttgtagtgtttaaaagattgtagagatgataagaaaagatacaaagtatagggtaagcaattttatttttaagaagttgaaagatgaagagaggttattgatgttaaacattacctctttgtagggtgggcttttgttgtgttgagttgtaagttggttgttttgcttgttgattaatgaagattagttcttcttgatcaaaaaaaaaataatagtaaaacaattaaaaaacaactg

SEQ ID NO: 77124 - DNA, 764 bp, Cannabis sativa
agctctctgagctggtgcaatggcaaaaacaaggtccaagatgcagggaaaactgaactctacgaggaagaagaagaaaaagaaaggaccagattagactactagtgtaaagaaactgaagtccatggatgagattttaggggttgaaccaatagctttttcagaaagcgaggacgaaggggtgactatgaatgtgcctgatctagcgagttctgacctatttcaagctccactatcgccaaagtcatcgttaaaagcaatacagcagcaggaagagattcgcacagagtttgccttctttatgcaagctaaccaacaatgttcagctgaaatttcgaaagataattctcctcaacctcctgtacttaggtctgaatctatgagaaagaatttagctagctcttttgttagtaaggaacaggggaagaaagtgaaaatacaactggaagatattgaagatgagatatcttattggtccccttcaattgtatgctatgtgttaggagcaaatccaccattgtctattttggatggttttgctagacgtatatgaaagggaaaggttgataaggtgggaatgcttgcatatggaatttcttgattcagtttgagtctattaagtgcagagatgaagggctaacaggaggttacatctttttcaacaggaggcctgtcattatgaaggcatgggacccgaatgtgaattttaaaaaggaagatgtttctttagtcccaatttggatacaagtagaggagttggaact

SEQ ID NO: 77125 - DNA, 1272 bp, Cannabis sativa
tgctgctgttgttgttgatgatgatgtacaacggttcatggtcatatcgagcagcctccagctagtcctgtccattactagaccttcttttagatctggaaagcgtggcatagaagacagcttcggacaattttcaataacaagtttagttaatgaaggcaacacattgatgtaattgtattcacaccatccctgtagcttaggcagatctgtgagccagagtctttctaggctcgaaaatagatttggattgtttgtcgatgaaaagaataattcatgaccaaccaaaatgtattctagattgtcaagatattctaggactaacaccttcagaccatgaatctgatgaatagcttgtagatttttgcaatttgagcatctgcttaatgaaagtttcactagcttacttgaaaattgggagccaaattgggagccaggacaacgcactgtaacacccctgaatccattaatagacaattcttcaagataagaaggtagattattgtgaagaggtagctccccgtatacagacttgttccatttatcgactctccattctaatgacaaggattgaatttcagatggtacagccctcaaatactggattgctgtttcttcatgtctcaagtttttaagtctcaaattttttattttgaactgttgtatgagctcgcttgattctctggcaacatcttcttttcctttatgccatgttgctgccgagaggaggatgaggaggattcttagctcatattgttagtcatcaatagttaatgcattcatgtaaagcttagttaaagtaaaagcgatattttctaattaagtgaagtctttaatgaacagtcaactatgaagttatataactaagtcctcttcataattttataaatacatattatttcattattattatatattttttgataattagataaaaaaaaaactatttctgattaagagatttaggaaaaaacacttaattgataacattacactattaaattaaagtaattactataaatcaatcaagtatgtatatatgtataattattattatattctaaattattattatctaattatttttttgattttacacaaattactaataataataataataataagagtaaattgtgccataaatacttaagtttaatttttggcggtaataatacctaagttatattttaaaatttctgtaggtgttgcgaaaattattaattactacgcaagtgcacgcaatcaagtagtatactcacgcaagtgagg

SEQ ID NO: 77126 - DNA, 2462 bp, Cannabis sativa
agaacataagaggtgatatgtgggtgacctactacatctatcttagctattcgactttcatataaaaaagaatacgtaggtgacctactataaccatccagcttccataggcttacacaccaccacatataagcccaaagtcaaccttgggccttggctaagttttttccaatgctgatgaagtcaagcttctgcaactttgtaagacaaaatgctcttacacattttgccgtagtgaatattgtaacaattgaaatagatgaagttgcagaacaaaatttatttgtgtgggagtttcgggtgagtaggtaccgaacttctattgatacttttacataataaaatatatataaaatatcacatgtgaattatagtttcaactctagtcaatgttctttgctataagatcttctgcatccccaagaggggtagctcaaatgtcagtcgtgtgggactcccacaaggtctgaactcccacaagaggggtagccagttcttatagtttcttgcagcgggatcctggctgtgtgtgtatatatatattctgcatccagattccagacttactctttggctcatttcttcttgactgtctcttttaactgagcttatgtttatctctgccgtttttacaggttataaatattttgacatcatccaaagagttacttgaccttttaaagatggtggattctattttccattccaaacagactggaattgggaaaccaatgcttaatagcttgtatagatttgtaccttcaattcgtgaacagttgaaggtacgctcaactctccctgttatttttagtcaaaagtgtgtaagaaaaccatctttattgtcactttaaaagtaaaaataaaaaatataaactcgtggaatatacagtcagtttaaagtatatataattggaatttatgctatatctataagtttgatgttcgatgtttcctgttggggcatttcctaagtaagctgtattgtaatgcaactatcgatgataggccctgtgttctacttgaggcagaagaaaccaattacgcagcaactggtcacctaatttatttttctcttgtaaacattaggactgggaggatggattatcggagtctgatgctgatggatctttcttgcatgaaaattggaacaaagatttacgtcttttcagtgatggagaagatggcggccagcagctacttcaggtttttatgctcaacctttctctcctttgctcctccttaaaatcatgtatacactacgagatcttgaccaattttaatgatttcattgtttcagttgttcatattacgagcggaagctgagctgcaagccatttctggtgacaatcttgctcgaaatctgcagtgcattgattcactgaaatcacaagtggcctgcctattcggtagccacacgataaagccattgtcattttctccggaaccaaaacagcatcagcaggtccgtgatgatatattcaagcccagaagagtcagcagttgtacaatgaccaatgtcaattacaagggtgactggatgaagcgccccatctcagatgacgaggttggatggcttgcgaaattcttggtctggttgtcggattggttgaatgagaatcttggaataaaccagccagataacattcaggtagactcgccttcatggccttacgtggaggttttaagtggtgaggtggacaatgtttatggacccacagatactatgaaggcaattctatgtgctcttggttcatggcttcttatgctgggaatgacagtggtacggataatgagaaaacatggtgtgagagtgaaccttagaatgttggcgtctaaaaaggtagtaatggttttgtttttgtatgttgtgtttaatatactgaggaaagcttttggtgttcttcatagggtgtagtgtagatgacactagaacaagagtttctaaggaaagaaaaaaaaaaacaaaaaagaagaaaagaaaagaaaagaaaagcttataggaatagggaaagttgtgttttctctacaaactttgttgatggagttttgttgttgccaacttgtaagtaattgtaatacgtgcagcatgaaaatgtaaaaagggtttttttttttttttaggttaattaattcctcctctattgggactcttttttttctttgatgattttttattgagatgataagggcacacaaaatgaaaatatatcccaaatatgtacatctcacataattttgaaaaaaattgtaccatgacaattactttgacctatggaattctaaaccggcctaaatgcaatgagtgggttgggttgattataacccattttataaaattctagtcactttcaaaaaaattaatttatatcacatcatattctaaaaaaagaatgcatcaagtctttgtatcaataaactatccctaaattttagtcatccaaacataaatataactttgtact

SEQ ID NO: 77127 - DNA, 685 bp, Cannabis sativa
attttttgaacgtaaaaatgtaaatattttataaaaaattatgccttatgtaattattccttagaattttccgaataattatatttttgtaacaaaataataacattattgaggtgttttttttttattttttgagagaaatttagtatgggtgtcatatttaaaataaaatttaatctaaatttaaattaagacattgattaatgtacacgcttctattcgaaagcttacatttgccaaaacgagggttttggggaatctaacggcttggaataaaccatcccaacgccttggtggttgatagtgggcctaaaaccctagcactatgccacgtaattaatgttcttttcaactagttttttttttaaaaaattatatgaaatatgaaattttataaaaaaacaaaattacaaaaatatggtatctttaggtttgtcactcttttataatatttttcatatttaaaattttttatggtatttgatatgccatatttttgtaaacccaatatttaaacctatatttcatgtttttgtttcatgattaattagtcttatttttttctttagtttattttagggcttttttcacaaatgtacaactaaaacaacataattacaaaaaatgtgcaaaaaaaaaatattttaaaaacttatatatattgaaaacttattacatgaaacca

SEQ ID NO: 77128 - DNA, 1595 bp, Cannabis sativa
tctcaaactggaaaaaaaaaaaactccagtaatggtgtgtagtgactcagagaagcggagactttactttcaagcccgacccattcaatttgaagacataattgactttgactttggtttttcaactgtatataaactgtatataatagttttttttttcttcgaaaatgcttcgaaaatggagtaaatactgtgtttttttttttccagttttagagagacgaagagagaggggttggggggctggggttagttttggaaaattaataaaattggcatatattagcaattttagtaagtatgtatttaggaaaaaaaataatgagattttgtaagtatggaaattcaaatttcccaaaggaaataaacattcactcgtgttaggatataaatctgtttttcatatcaaaaacagaggatttattaataggttgcaaaccagccaagaaaacgccaaaaaatactaacaaaccacagattcaacatcaaaacaacaaataacagcaataatagaagaaaaaaaacacttatccatttattttctttgaaaaatcaaacagtgctctttcgggttcagccgaagcaatgtctttattacaagattttagtgctaaaattgtgtacatttgatttctagtttagaaagagaaaaaacatgtttagagcgtgggaatgaggaagagaaaaaagaaagaaaatagaaaatggttttccttatatgggagggacattttagacaatggaaaaaaggttacattgcttgtttatactttcaatttggcctttgtatacaaaatcaaattttccatgagttgatattatgtgagtttgtgaaattttttattttatattggaagagggaagactttgtgagttgtttatgaacttttatttgaaagcccctttttctttcctttccttgtgaatgttgaattctgagttttttcttgagtgtacactatagatgttatgagttacatttatttgttctttagtttcactagtcaagccatgttgagccacaaaaatctaaggtggctttatcgcaacaaggaaaaaatcaattaggctaatgtatgtcagtctataattacttattctcacagcaagtgagaaaaagcagctgcagcagaactgtggaaaaaaaatactgtgagttattaagatatattataatgataataataatgttataatctagtttattataatcacaaatatgtaaaaagttattttatacaatattttattttttttatatatttttatattttaaaatataaatttttatgcatttgataaaaataatttatagtatctttatagtatgttttattaaatgtaaaaaattagaaacaagtatataagaaaaattctaggtttatgttgtttgttaatattaaaataaaatataaattatgttttgaaaaaaaaaataagagatttgataattatttattttattataattactttattttaattacttttttattttatttttcatatctttatatattaaaagtgcatatttaacggtatttcttggtgtaacagaatatacttcaaaaataaaagaatattttgttaaattt

SEQ ID NO: 77129 - DNA, 930 bp, Cannabis sativa
aacaaatttacttgctgcaacaaaggcatcgtctgcagaagaaaagtcttcagtaagttcaaaaaaggtaagatatcatgtaagtaggtttgttccaatttgtcatttttgtggtattaaggggcatattaggcctaaatgtttcaccatgtaaactatatttaaaacaaattattttggtaatttaaaacaatttcaaaagaaacatagtgcttcacaaaaaaagtggattgaaaaagaaaaatatctagctattttttccaataaaagtgttgcttcacaaacatgatattttgaaagtggttgttctagacatatatgacaagaattattttgtgaatatcagaccgatgcaatgtggtgaggtcatgtttgacaatggtttagtaggaaatgtaatgggaatgagaactctcaattttgaaggattaccaaggttgaaagatggtatgcttgttgagggattaaaagctaatttacttagcattagctagatttgtgatcaagggtgtatggtctcttttgacactgatcattgttatgtacttaatgatgataatcaatgtattttgtaaggattttgatctaatgataattattatacccaattcctgttttcatttgtcattaagctatcaacaacatcactaatttgtggcatgcaaaacttaacatattaactataaaaatctaaaaaagttgtccaatataggtgttgttcgtggtctacccaaactgggtgaagaaagtatcgctcttaaaactccctaataaaatggagtcattgagaggaagaaccaaattttgtaaaagatggcaaggttgacgttgaatagtaagaatctgacaaaatatttatgggcaaaggctataaatatatcttgttacacaatacactcagtgtttatttgtctaggtacatccaaaata

SEQ ID NO: 77130 - DNA, 810 bp, Cannabis sativa
  modified_base (50)..(68): a, c, t, g, unknown or other
attggatccaaaatatgaaatccgcacttagtgcggattggatgttgttnnnnnnnnnnnnnnnnnnntggatcggatgaacacccctattagtcgtataacctcatctaattaaaagtcatctatatattctatcattaattatcttaattttttttttaatttaagtcacatgtggcattataaggtccctttgagttgtgttttttttgggtgacgaggcagtctaaaatctctttaaaattatttttctttttattccttaattctctcaattttttaatattttattagagcatagatttacaaaatattaattattattttaataaattttctataaaaatatctattttaaattaattattttttaaaaaacacataataataaatataaattaaattaataatattaaaattaaataattatttaattatttttttatatatatatgtattcataactatatatatgtgtgaagtttttttttatgtatttttttttatagaaaaaatttattatgaatcaaacattatgaatatttgaaaacaaaaaaaaaaaaaaaacaggtgtgagagtatgtaaaaaaaaaacacaggtaaatatgttcaaataaaatatttttctttgctaaaaaaagttatatgtgacagaaacatatatatttacaaatctaatttaataattttgtgtaaagaaaatccaaaaatgctatatacagattataggagactttttcattactatattatattttttgctattcaattgaatttttaaataccaatttatatatctattttatataa

SEQ ID NO: 77131 - DNA, 562 bp, Cannabis sativa
atttcaatacaatgttatatatatattttgatgatatcttgaaaataaaactaaattacttaatttgtatatgctagactgtaactaacattaaagggcatacagtacataaattttgactctatgaaaaaaatgtaaatgtaatccactacaacatgcacatacaatacaaatcgcccactttacaatataatattgtacactattattttgtgttaaaagaacgtacgtggatagcaaatctaataggccaaagatataaaaattaaatagataaataaaataataataaaactaaaagagagacctaatacgtgtcaagatgacatgtacttgtctactgttgtaggtaacatgatttattagtagtgtttactatgtaggatgttttttcataataatttactgtatcaatattccaatttaccataagtttttaaaaaaatcaaatttattttagatatgataaattatttaaattttttaaaaatttaaaaaatagtattttaattataacaaacattcatattaattaaacaaaattaaaaaaaaaaacatatat

SEQ ID NO: 77132 - DNA, 549 bp, Cannabis sativa
tcgtttaaattttaatttccacgcttattttattagtaatcctgtttaagggattaaggtttcttaatcattttgggtagcgtgcctaaatcttagggcaatacacctgttttcttaagaagcaaagcaaagtgacttggctccaatgttgtgaggataatactacatactttcattcttttataaagaaaagaaagctggaaaataaaattagaacttttttgttagatgatgaagttgtagatgactttccaaaagtggtggagccttttcttaatcatttcaaaggttttgtggcgaggagaagcactgttacacagagaattgatgttcaatgcttaaaataggggaactgtcttgatattgagcaacaggttagtctcataaaacctttttataagaaagatgtcaagaaggctatgtttgggattcattcttcaaaaagtcttggtttagatggatttggatccgggctctttaaatgcctatgtaatgaaataagagatgatatttctaatgctattctgactttctttaaggaggggtcca

SEQ ID NO: 77133 - DNA, 524 bp, Cannabis sativa
cgaggcggcaataaaaagggattcataatttcaaaattaaaaaaccattttttccaaaatccctaacaatgttcaatagagttcttgtgattaggatttcgtttgtttgtgagtgggttatttcccgggaagtggatttttagggggaagtgcagccaaattttttaaaaaaaatcttgagtgttagaatttttgggtaagatgggtcctaaaagatctagagtgagtgaacaagggggagcttcatcatctaacccacctaggggtcgctctaatctagatagatcgaggtttgctaatatggatgctcaagagcagtttttcaaattgaaagataggccattcattgaagacagggggatagatattattaaccttagccaaactacaaacattccagctgtatttgactccatcagagaacaaatcttaaataggcagtggactaagtttgtggatgtcactgggtgtagcaaccaaaccttagcttttagaattcctagccaactggccagaaagagagg

SEQ ID NO: 77134 - DNA, 1311 bp, Cannabis sativa
  modified_base (415)..(426): a, c, t, g, unknown or other
taataatttgggatatattgtggctatgtatgtatttataaatgttgcagtgtgggtggagagggttcgattgaggatgttcatatgcaacatcgatctggagaggagcaatctctgtttgctaggcttgtgcttcgatcagcttcagacatggaagcagttcttcaaggaaaggagaaagtgaaattctccattgatggaaaacatgtctgggcaagaaagtatgtgcgtatgacgtcagctcctactactactactgttactactcccaccaacaccaagtcaaacccatcctcaccaaaatccgaccaggcttaatctataagctcttgcctcctgttaaattagtgctttcttttaattatctaatatatatgcatgcactaatttccagaaaataataataataataatnnnnnnnnnnnnaataataataataataaaaatgtgtggttccaatgattgaactttttatttattattaaaaatgatctcttgaatattgaggacttctaatatatggtggcctgatttcttgattagtcgaagcatatatatatgtttaatttacagaaaaaaaaactagacgtttgacaatctttactcaatattactgaacacatatattttcttttgagttttttcgactaaattcttgcaactaacctttagttgcacttacctctctcaaattttgagttttgcaaatttaaagtgtcatcaactatttataattaactgtcaacataaacggtttatgtatacacttttatacacataacaaatttatattagtgcactaatattattatttaaaaaatataaaaagataattcaaattttataatattttttatttttataattttatttaatttcaaaggaattttaaaaataattaagttttagataataatattcggtataccaatataaacgtgtcacgtgtcacatgtacaagagtatgcacataaataatctatatggtgttatttaatcggatgacaccttatatttgatactggtttagaagttttgagggttttactatcaaaatttaagattggagagttatatacaagtaaaatgataaaagggtgtagcggtcaaaaattattattttttatatgatgttctatatagtagttgtaataggcattctttctctttttgagaagtttagaatattttatggtgtaaaaataaaatttaatataatatgtggcaagcgtgtgtagcataaaaattacacgcatccaactgaatgcatgaatacaactatttgcaattttgtttcttgttttttttttt

SEQ ID NO: 77135 - DNA, 554 bp, Cannabis sativa
aattttattttttaaaatagtacatccatctctaaatgcataaataaatattagagatgcatttattatgaaatgccaaaaaattaatgtagtgttatatacttatagcatatttcttttaaaaaatattacctctcattctaaaaattgatttaaatttaaatactaaaaattatgttaaatttgatataatataaaaaaaaaaattatataaacgatataatatgaatttatgcctatgaacatgatcaatgtggttagcatattttgagcaattgctcgcattaatgaagttaatttttcattaaaaaaaattgccaaaattgatataaaatgaagttatgcctaagatcaatatatttttagcatattttgagcaattactctatcaatatgacaattaattttagccaatttagctactctatcagtaacttttaataaaaacgaaattataacattcaaaagcactaacaagctttcaaatttctaacactacagtcctgcttttcctacatggcgacaactgtttcttctccaaagctttcatcact

SEQ ID NO: 77136 - DNA, 2076 bp, Cannabis sativa
aaattaattaacatcacttgactatagtgaagaggaatattttttcttttaaattattgaaatatgaggctgcaaaataagaaaattatagtaattagacaccaacataagtgaatatataatgtaataaaaacaaaaagaaaatgtgccaattaattttttctctccatatatatattgtgtttaaattaaatttaaacttgctttcacattaggcagaaaatagtgaaaaagtgtaaacaattactaataaatatcttattatatattattatatattatgatattgatctaataaatatagaataattgatacctactaacaatactttcctaaatatacatgaaataattaaatacacaattttaggttatttgttttctttcttatgaatagaagttataataattttataaaattattacatgatataaataatattgataataattttcatgttcactcacgggattttgtacattttgaagttcaaacaataagctaatctatatatatatatataaatatatatttatgtatatgggcaacatgcatgattacaaaaacacaacatacacatgacatgtattagagttgcacctacaataatgagagataattaatgagcttttaacatataaaaaaagtgaaagacaacacacacttgaaatcatcaaaaataaaaaaaaataaaaaaaatcatatatacaattagttcaataacatttttttatataaataaaatcattgtattgcttaattaacattctatttacaacatataatatagctccaacttaaataatctattttttttatataaatactagaaaatcaatctctctaatttcaatctctcttagaagccttctttggcattacaagactaattctaataacaatctcattcaccatgctttttgtatagtgtttttgacaagccaaaacttctgtgacctaagtacatcattcctagctctccaaatgtaataaacaaaagccacaagaaccgcatacataatattctttagaactgcattttttgctttactaacccaacggatcaactcattcaattccaaggaagaacatttccatcccaactaatttttaatttctttgaggcaagctctactataggagcagtcaaaaaataactgtcacgtatcctccggagcagccccacaaagaaggcagtcttgatccaccaacatgttcatctttcggaggttgtcttttgttcgaatcttctacaacaagaccacccataacacaattctatgttttggaatactgagtctatcccaaactactttacttcaagttaccttttgcgattgatcaaataaaaattgcagccatgtttgatacaatattttgaaccagtaaaggttagattattcgttctagctttaaatgtatctctgatagcaacaagattcttccaataccagctacaatcgttgggggcgactggtatttacaccaatttttattagttccttttcaaaaaaaaaaagtagataattttaaaccctgatgcatcaataaaatagagacaaagtcgctatgacaaaacaatagcaaatcatatgcaaaatacatgatttagcttcaaattcgtacatctatcatggaatttaaagccttgccaagtgttaacttctatcataattttagacatatattccatactaagaataaataatagaggagatatcagatcccttttacctcaaacctctctttgactcaaaaaatgcacgcatctcaccattaatcaataaagagaatttaagagtttttatgcaaaccataatgagatcaataagttgttgagaaaaagcaatgagcatttcttcactaaatcctcaatctatagtatcataagtcttcctcaagtctattttaatcatacaacttagcttgcaattcttcctcccataatgtcgaacaatatcttggcaaatcaaaatgttatgagcaatgtatctcccatgaacattgtacattactgtaatgttatcaatattgtgtacattgtagttatagtagacataacatctattttaaaa

SEQ ID NO: 77137 - DNA, 573 bp, Cannabis sativa
ttttgaatttgaacttggggatgtcaataaacaaattaaattgttaaccaaatatatataactaaggcggactcatcatctctctctcacactgttgttaattttttgaattctgttgttaaaaaatcgtgaatatattaccctctcatctcttcttctcctctctccatagatttgctctcaggtctcaattccatctcactgtaatgcaatttttaataatctcactttcatatttataatgtttagatttaattaactaacactaaaactctctttctttatcatcgtcttctcctcttctttctcaatcaaggtcaatcctgaagcctccactccaatttactcgctccgtggcctcgacaacttcaagttcttctcattgtctttctactggtactggtaagagtactctgtcttcattgtctttttacttctcaacaccttatcgtctttttactctattctcaaatttgctggattctttccaatttcgttgactttatgtttgctggtaattaaagtttattgcaatttttctataattttcaattgcgtgggtactgattttgc

SEQ ID NO: 77138 - DNA, 527 bp, Cannabis sativa
ttagtttctgtagtggtcaagtcatcaatcatctcctctacatttttttcattatccatattgctagaaataatttatactgcacaaagcaagataatggcaaattgacaatagttagaacaatgaactatagtaaacaaaaaaaaaccttgaatgaaaagaaacaaatactcacacctcttatatatacaactatcacacactcttaattgactaatgaatataaacaaggaaataaggaaatcaaccaaacccttttgtgttgatggccgattaaataaggaagcaataaatagattaaaatcatcatacagggtccctaataatgaactagtggaccgtatatgtgcctctagtacccttgtataattaagagtgtatatatatataagtaccatatatatgtgcatatatttttaagcacagtcaaataaatcaatctgtaaagattataaagaggataacaactataactgaattagttagtagaaagttacaaaccaaaatcaatcaatcattccactttg

SEQ ID NO: 77139 - DNA, 604 bp, Cannabis sativa
gcaacataagtttccaaccgtctagataaattgagagagaacagaagaagatgaaagagaaaatgagggtatgttgtagtgagatgggtattttaaaaattaaaggaaatcattagcataagtttataatgttgaaaccatggggaattgataatacaagccagaattgtggagttggaaggaactaaataaacattatggaatgaatgtaattgttgtctaaactccattggtcggtagttgactcatatagtcaaaggttagatgcttaattgttaatggatttgtggcttgacaattcaaaaatgtcacctgtgaaattaactgatgtaagtattttgtttgatctagaaaagtcatttcacttcattccaaatctatttttaaatcaagtctcatgctccacattccatgccattgattattgaagaattactttgtaaaggtaaatttataataagaatcttagattgacaatttatctatctatctatatatctatataattgtattgttgggtatgtgacatggcattctatcattttagtattgtcatttttctattttatggattttttaaaatttatctatttttataattttt

SEQ ID NO: 77140 - DNA, 939 bp, Cannabis sativa
gtagcatattcagtacaactgttataaaagttttgttttaggtcataaattatatttagttatgttatatatttgcatcttactactgtattgttagcgttaggtgatatgaaattgcactaatggttgtgattttagcatttactatatagggtaagacttgtggtagtttttggaatttggtggaaccaattattattactaagtggtgattattattactgttgttatcttttaccattactattagtttttagaaatttttttaccataacaagatacattattaagaaaatgaaattaaccaattttaccttttttgttggcaatatgtgttttacgccaattatgtccatagctaaaattattaaaatacctatactttgtactttcccattgtagtgagatgaaggcatcacttctgacgttgcttataaatttggatcataaagtgtaagtacagtataataatgagaaataagaattaattattgaaccaattaggttgacacaatttctttcataataatctgactatttctaaatcatgtaatttaagtgtatgagaagaaacacttaatgtacttttaaaattgaatatattgaacatcaaggcttataacaattataggcaccataccgtaagcaatagtacaaatctattaaacattaaactcatgtctaagtaaatcatgtaatttaaaattatgggaaaaatgttgaagtgtgttttaaaatgcagtatagtgaagcacaacactattcacgaacttactatgaaggtttgtggattatattctcaaaattaatgatacttatctttaaaaatcctcactacaagaattatggtcaataccaacgccactattaccaacgcctaaaagtcctcattaaaaatgaaggtatcaataacgacatttgaatgtcgttgggaaagct

SEQ ID NO: 77141 - DNA, 678 bp, Cannabis sativa
tactattttagaaaatacaaagtctattttgtcatttaacaaaacaaagagttcaatcggtaacttattcaaaatataaagttcaaaataatgtttaccctacattttaatattcgattttacatattttaatttaataaataatataaaaaatcattaattaattacaaaatatcatataaatataatattaaatacctcaccatatcaaataacaattctcttaaaaaaaatgatattagaaaaacaaaggatcggggtgtatgtggcactacaaaacaaacaacagatttttttttatttttaaaaaatattaaaattataactgccctaacattattcattatttattactatgaactcttccatttttataattttgttttaccacattttcgaaactaataaaaatactcttataaaataagacaaaattaattaattagtaataaaaaagtgcttattatatatatactaagttaatgttaagtgtcatacaattataattagttttttttttaattagatttaattaaatgatgttaattgtaacatatgtatttattttttaattaagtaatgtatttttatttttaaatttttataatagtgtttgagattttaatctttaagaatttttttaactattgcggctacatagtcacattttatatagaa

SEQ ID NO: 77142 - DNA, 601 bp, Cannabis sativa
caaacggcttgtatcacatccaccatcttctcaatcattatctcattcatctggttttttacagaacaattactgctttttctccgccaagatcctcaaatcgctgagactgcaggactctataccaagtttctgattcctagcatatttgcatatggttatattcaaaatattttgaggtttcttcagacacaatcagttgttaggcctttgatattgttctcatcaatcccattggtctttcacattggtatcacatattgtttggtgcatttaacacctcttggtttcaaaggagccccaatagcaacctcaatcacactctggctaaccttttttttgttggctgcatatgtcatgttctccaaggagtttaaactcacatggcatggattttcacttgaatccttctgttacatttacacaaacttgaaacttgccattccctctgcagctatggtgtggtaagtgtccgtattgaaataattaagtactgatcagatgctggatataccaaagtctcaaatctatttctttttctttttctttttggagagttataaaaatatttaatgaattagacatgttacacagtctaatt

SEQ ID NO: 77143 - DNA, 514 bp, Cannabis sativa
ataatattttaattctgaccttaattagggcagctccgatcgaactgcatgtagtatatttagtgtgtaatttctctccaactcagctgtaatgtccaccacatgtttttctattttgttacactgtacattacatcatttttacatttttctataatattaataatatatataataattttatatataataatgataaaaataatattttatttaactaatatcaatataataataattaaaaaaaaagatttagtgtaatatttagtattatgattggattgaaaaaaaatatatgatactaatttttgtgttagtacaatactaaatataggatatggttggagatgaccttgaaagtggcactcatttgagagaaataggtgacagtgtacgtaggtcatggttctcaacgtgggagaagccttagttggtaaccagtggcggacctagaatttaaagtgaggggggcgtaaataaatttaaaaagaaaatataaagtgtaattagtggg

SEQ ID NO: 77144 - DNA, 1181 bp, Cannabis sativa
ttttttatatatatatagtcaaaaagataacttacaagaatgtcatgtgttatgtgttttggataccttgaaagcaatagaagatgccaagggaacactcaatcatgtcactattttatgtggagaacaatatcattacccaaaaagctgagttgagctttaactaactagggttgagctttaacaaactaagattaattaattatgctttacacataccaaactaacccacttaattaattaaagttcttgcatgtttataacattaattatttattaatgaactctatatagattagatgaggttttcaacaagtcccaagtggatgactttttttaggtcatggggacatgttattagttatgggtctttactaataggatgaaaacatcatacttgtggattgttgaaaatgaaagcttgacttttaataataaggcaacaaaatttacttattgtacttgaaaaatttctccttttgaatgattgtttagtaaaatgccaagtagaaaataaagctttaggaaattgctagtatatgagtttgtttagactttaaatgacattttaaccctttctagaatggtttaaatggaagactaatagtttgacttttattggagagaaaatatagtcacattacatggaacttgtagaagagacattgattaaattgattatcatattaattactaagcatatgatgtaagtgatatttaggcttagggtgtgtatagtaaaatgaaatttagtttagttgaagaagaaatatcatatcttgtaataaaagctaaaaaaaaaggaattgttgatatgatatgtaactaaagaataaaagtaggtaagactaaatataaaccgaagaaattaaatttgagcaaagaaagacttttgatagtgactattgggagaaaggttagattagaaaggaagaacaaattataaacatatgaaaggaaacttcttttttcaacatttcaaggcagaaaaacagagaaaggtaaataccaagaacctcataatctgatactccaaaatctcacatgtaagtacttgttgttttcatttggtttttaatgttaaaatgttacaaaaatcattattgggtgactatcttaaaaccaagcccaaattttttaatcactaagcaaaattttttaggtacctatttctccctagt

SEQ ID NO: 77145 - DNA, 544 bp, Cannabis sativa
atcttgatatggttaggttcagttaggactgaatattttgaacgggttcgacccagacctggccaacccgcccggatctgacccggtcaacctgcaatttttttttgaataaaatattcgggcgggtcgggttcaactcggtgccctttggccgtgttcacgagttgagtttttagagacaccaggttttgggttgaacccgaacccacccgccaacccgcatataaatacattatatatttttttattacatattaatatattatatattagtttttgaatttcaccacacacacgacagagagagacgacaaatatattatattatatatgtgacagtgatataatgtgaaaatttaaaaaataaaaagaaagaaggtgatgaattttttttaatatgtaattataagtttataaataagttattacatttattagatttttttaatgtataattataaatttataaataagttattacatttattagaaattatagattagagttaataaataaaaaaaataaaagaaataattatttgaa

SEQ ID NO: 77146 - DNA, 2119 bp, Cannabis sativa
aaaaagtcacccatgaatttctccatgaatttctcataaaccaagaaattcagttatataggcacactttatatagaatagatatatgctattgcccttataaccctagggggttattaactaattgggcttatggggtcttttatggtgtactataatttaatgagccaactatagtattaagggtgctctcatgtgcctctaacacataattaagttgttaaccatcccattatggttattagcaatattaggcacataattaatgatggtgtattatggaattaaacctatgattgtattagtccattataaccattctaacaaggtcctcaaacaattccatcatttccatctcaatattactgtcgcgttccaaaaccttcccaacatcatgattaatggagtccatcaaggagaacagagagacaccacaacgagaaaacaaacactaacccttagagaagctacaaagagctaaaaaaacacaagcaaaaaaaacgtctgagaaaaccagtaaaagtccactagaagactagaccaaaaagatgagccatcaattcgcggatcatgtgatatagtatcttatacttcacatatagcaatcaagggttttttgagcttctaatttcattttgttttttacattttgagaagttagaaagcttttcattactaccatgaaattgacctgaaattgcaatatcttttgctctagtgaactatttttttttacaaaagaatcccattatataacttgtgtcaaaacatgttattacttaaattttatgttttgtaatcttatctagaaagttatagcagtgattttgtaagcttactcgtcttttcttttttttttttccaaagcttacaatagtcgttgtgataaatgttgacataaaagtttttctgagaattaggcaatcaaattgacaagaagtttatagaaattcaaatccttgagtcaaaacaaaatgtccttaatttctgctaatttggcacacaatctaatccatgccaacttgcttattttcacatcttcacaaaatgtgcacatatccaagtcgaattcttgtattgttttttgaatggattgattgctaaacaactatgtgccaaagtttgtttaaggaagtgggcaaggaaaaaatattgagtttggcagccacaactttcaatttcatccttagtatgagaactaaatggtggtttaactttaatttaatagcagtatgcatagccaattggactttgttttttttagaagtaattggactttggttttagtttaatgatttttggcatgtgaaaactttcacatgtgaatatctcatagtgtatctttcaatggggtcaatcaatgtaaatgctgaatgaggaccacatggatgagcagagacaaagtttatatatgaaaatcttatcaaaaaagaaaaaaaaaattggatttgaaaataattgaaatttggaaatataacactttattctctctatgttacttaaatatctagttatttctccatgttttaataatatcaaatatagacaaaagattaatgttttcaaaaaaaaaaatcttaaaacattacccttaatatctagaggaaaaaaaaaactataaaataatttaaaaatctaataagcatgaaatatttgtagtgagtgtttcacttctggtatgctacatatacaatttttagtcatcacaaaatttgtaacttaaataaaatatttgttatttaaaaatattattattttatgtcattattaaaaaatttgtagctaaaagtagtataaaccaaaataataagagaattttttatatttttaaaaacaataaaaataattacaaaaatttggatttatacttttttaaacatttttgcacatttgaactttttttttttctacaaaatattggcggttgttttaatttttgttgtttttaaaacaacattatactatcatattgtttgggaaatttacatggtctactaacttttgctataaaaatactactaggcggtactttttacttttttactgtatttttttataaatttcatactgcagtatactgtgtgaagtttccactgttgttctactggtgttttttagt

SEQ ID NO: 77147 - DNA, 1344 bp, Cannabis sativa
cttagttatattaaagttaccaaaagttattggataatatgatacatattatattgtgatttttttttttaaaaaaaaacatttactgaaaaaattaataaacctacattggattggatgactatgagaatgtttgaaatgactaactctagtaattacttgtttatggtgcggggttgtaacattttttaaatcaaactgcatatgtaatttttataattatttaaactacatcgtacaaaattttaagtcgtattttttatccagtgtgatacgatttagataatttgtgtaatataagtaatttgatgaacactcctaataaacaccacacaaaaagtgataaactattatttgtacattttaatattaactccacacattttgattttaatatcggtgtagtattaagcattttaaagtgacaaataacaatactcaattcttgttgctaaatagtttggataatagattttacattaaatttttttaaaacattagagaattcctttcttaattgacagagagagccaaaaggtacaaataaggaaagcattaagaatcaagagatgtttactcaaatgaagcaacacaaaaaagaggcaaagaatcatcaaatgccagaaccagctacacatatctacacttctcttgtttcaatccaaacacactctcttaaaatcattcaatcaaaaacacccaatatggaaaacccactccatctactcaaacacttcatattcaataactttcatatatctcataaaccctttttgtgtacatttttcttaatagcaatactattggatttttcatagtcttgtaataattacacccaaaagggtatatatttattattttctgattaaaaaaaatgtatgttcctaaagtaaatgagagttttcttaatcaacttgaatcaatgggatttcctttagctcagtcaacaagagcacttcattattctggtgagagactcatcaatattggttactttattttgttattggtaaccaattttttttttttaatttttaattattattatttaattttttttaggcaataacagtatagaagatgctgtaaattggatcattgatcatgaaaatgatcctgacattgaccaaatgcccttggtatcaatatttccataatttatttaccattgtaattattagtagctaaaagtctggtttatttttctgttagtttcagttattaactaactaattttgtttttcaactcttttttccttgtattacctcactatatataaataccaatctgccttgattaattaaaacaccactttttttattctttaaactaaattgtataca

SEQ ID NO: 77148 - DNA, 1468 bp, Cannabis sativa
aaaggctttttcacatatatacaaacggtaaagttattatatatgcgcacacctaaattaatctggcagtcaccacagtttctagctctcatcattttttttccttctaattccctgcacatgaactttgtttcttttcctttagaaaagatgctgttatttaatttttaatatatttttttttatcaatacaaaaaagacaaaaataaaaaataacctttcaatttattttataactaggaattaagctctgttgccaaacttctataatctttttatatatatatataattattcagtaatataattaatctaaaatataacattttaatatgtgtattataaacaaaataatattattaaaattagaaacataatttattatttttaaaatatatagaaagatagtaatattgtgtcaaatataaaaaaaaaaaaaaaatagtagaattaacaaagaaattgcaatgtattttcaaaataaaataaacgaaaagataacgggtttcgctttaataaactcgagttgtgattgatgatgcaattgtttttcaaaaactatttaaactattttttcttcttaaattagaagaaatactttaattactgtttatgaaagtttttacattttgttttgtggtttagtttgaatgctttgtccacaaagataaatgtggctaaatgacaactctaaatggagttgcaaaacattatgtgtttttaaaaactaaaaaagtggaatttatataaaaaatgttagtggtagaattttttatatgaaatgtttacataaaaggataaattttaataacttatataaatgtaaaatttatactttaaattgtaacgatgagaattgaagtatgcttctagcactttttaataattttttaaaattacatatagaaaattaatttattaattatgaataaaacttcaaatgtaaaatttattattttttatgaataatataaaattatataatatacttataatttttttatgtggttagcagtattaatcataatataataaaaatcataagcccactttacatcatgaagttatttataataattaaaagctattaaaaatataaatttatttaaatgagttagatattaataataattaataaaatatatgttattatagactacacattaaaatttaaaaaaatattttcaaaaaaaaaaattaaaaaattaaaaaattataaatagttaattgagaaaaattaaaaatagcaaaagaaatgtttttttatatataaacatagataataaaatacatattattatagagtataggtcacgtgaatttaaaaaatatatatataactaattaattgggtaagattgatttaatcaattattctagaagattgaatataatatttggaccaattaaaatggcaaaaggaagatagtgtaaaatatacttacaaaattattacacggtaaatagg

SEQ ID NO: 77149 - DNA, 527 bp, Cannabis sativa
gaggaagttatgttaaacccaaaagaatagtgtttatccatactagatattccaaacttgagaacatatataaaatgcttcttgatcaatgattccaacaaaagcaaaacaaaagaaaaaataaattttttatttcatttattttgttaatttaatttaatttgaatttatttttatttttaaatattcttttacattggccaattaaattaagccatgtataaactgtgttcagtatagaattgcggttaacactcaaaaatagatcaaaatgataaactgctaatagaacacagattttagggtttgtcgcaaaaaaatagattcatggagttaattgctagcaaagtaaaaattttgagagttttttccataatttactcgtaaaattattacaagatggcaccatccactgtataataacagtgatatgcgcctatcataattataggccccactaaatttgtttttgaattaaataattaattcaaaagataaatatttattttaatttaaatttgaaatgt

SEQ ID NO: 77150 - DNA, 677 bp, Cannabis sativa
cccaattgttaatgctaattattatttctctttctttatgtgaatgacagatcataaaattaaccttactcttcttagatcttttaggtcctagatcatatgctatctattgcatctttgagatatactaaaatacaatttgtgagcaataatctcaatgccgacacataggccatgcagatactttcgtttcacaacaaaacctagtttattcaattttagcattctcaatactcactgtttagattttgtattgagatcataaagcatgtctaaggtgatcaatctcaaacatggaattaagtacaaacatgaataaatacacaatcaagaaagaaaaaatagcaattaacattaagtcatggcataaaatcaatcaacattcatcatctccttaaattagaatttagtttataacatccataatcaaatttaaaatagaaattaacatagaaatcaagagtttaagaaagaactagttggtgactgtgctctggatctccacaatatcttcttctcctccctctttcacttttcgggtccattttttgatgatttttgttctaaaacgcgattcccttaaataaaaattagggttgttacctctggatggcaaaaattcaaaactatccaaaattctcgtgttttgcccgtagttgcgactacataaagcctag

SEQ ID NO: 77151 - DNA, 6580 bp, Cannabis sativa
attattttagtatattataaattacattaacattatcaataaatttattgactccgtataatatcattcatagtattaatatccaccatagtatctctataacttataacctaacaaatctaattattaattatgtaaaaatgaaaatacaccctaacaaatctaattattaatgtattatgtaaaaatgaaacatataaatatatggaatattttttaatgggtaataagcattaatttaattaatgggtaataaacatacatatttatatatatcacgagcgatatattttcacaatgacggaaaaaacatgtacttttctatcttgaagcacaacaacattatttcatatataaaactttttctcagaactctctcgaaaggcaacttttcaaaatctagagatattgtcattcataatgtgatgtagttagtctacttcaaactgctttgtttaacacaatggacaacaatttactaaaaccacttgaacaagatccgaattttgatctgcttctcttgtaacacaatttcttattttcccttaataaggagaacctttaaagtttaaatccatgaaatatgaaggaataacatcatgaatataacaaaaagatgatgcacaaaaacaggtgtacttagattgagcagttcagaaattttcccatttcatattcagatgctaattgctccttttgaacaggagagatgccaaacccatcctccatccaggggtcatcgagtgctcgggtttcttctgtaccagagatgccagacctgcctgcaagccttggccgaagctcatttcctgcttgtaacttgttcctaaggacctggaatcaatgcaaataacaatcttattcgtacattgcaaacatgggattctaatgtgatgacatcatttacttaaagactataaagaaagacaaaaagtgatacttgcaaacggtaaaatcctcagttcagaaaactactatttttcattctttttcttctaatctttcgagaaaattagtcgcacaagagccgtgctaaactaataatggtaatactatgactggtgaccattgatgtctaatctttaagcagcccattccatattcaatattcaaaactcaaaactacaaggagcaacttcaagtagattttatgcaattaaatcattaagactatagcctattaccaaatatgaaataaattctagccaaagtctaataagctttcataggcttttgattcaaacagaatatatgatgttcatataagccttcacaatgattattcagtataacattatttgatcccaatctataatggcaaatgcaataataaaattggtatgaactagtaggctgagacaatcactctaacccagatataaaatatactctataatcaacaagattgaacaaagcaaagcaggccacatcagtcgaataacagattaaaaaaaatacatatcaatatgtataaccagatatgcaccaaatagatatcaatatgtataatttcaaatgcaatcaaattggtatgcaccaaatagatgaaaacgattaattactgcaatctttatgtgagcctacagaaatattgcataataaggaattagtttgtaaacaggaatacattcaaaaattgaacaattctaaaactaacacagaaattttaacaaaactctttaacataactgattgcagaacccataaacagtttaaggtgcaaaaagaagaagaagggtcaaatgaaaaggtagacatacataggaggcaacggaccttggtaagcaaaggtcgaaacgccttgtcgttgcttgtgctttggattggctgtgcagagcacataaacacgtccgcggcgtttaactgttctacaaaattcacacattttcttcactgatgagcgcaccttcatgttgattctgtaatagaaaccatcaatcacacaatcaggatacaaagcccagtagagcataatagcaccaaatcagtctgaaaataaaaatttataataagaaagcaaaatcccctaatcatatgctcaaatcatgttggaatttgggataagatgcatggggttccatctcaaaaccaattagcaatgagaggaatagcctattcatcttatacatgacaatttgtttccacacattagcaatgtgagattaactctaatataccctcctcaagtttagacttagaatgtgtgggcataacgaacgacctttaacagactacatggccgaacgtgacatttgaaagaatcacacaaagccaaacatcgagaaatttgtaggtgtacatgtcgcgaaatttgtagattttgaaacatgccaaagctcccaatactgaaaattggcacacattagccgaaaggtccaaaatagaagttaaaggggaaacaacaaaagtttttttagtttggctcgtctttttggaccgaaggcactttgggctcacaacggatcacaatgggctttgatatcatgttagaatttgggataagatgcatagggttctatctcaaaagcaattgggaatgaaaggactagcccattcatcttatatatgacaatttatttctgcaaattagtaatatggtactaactttaataaatcacaaaagaaaaccttgttgtgacaaatagaactcagaagataaagggacatagtagttcatgctaaattcaatactcaatctaggaccaagagggtgtgaaaattttctacgatggtaattagaaacctcaattgggataattattcagacctaatatcaacataagtgaaacccaaaaaacaaaattcttcttagctacagtgaatcactaatctcatttcccatgcattctcaacaccagaacagtaagagagaaggtaagagacaactcaataccagcatatacataataatgcattcatatataatcacaaagtaaatacacaataagtaaattaccattattttactaaggaacaataaactaaagtctttaacgaaggaaaccgtgcgaaacaaaagtataagggttaatataatctgtaatttccaggaaatcaaaaaccgtattcttttttcttttcttccattaactccataagatatagatacggtggggaaagaatagtagaaaattgataaagaaaaaggaaaaaaaacctgaatctgcagacgaaggatgggttgcagcgagcaggaggcgactgtgcgagaagtttgcagcgataatcggtgcttggcggtgaggaactcacagggcggttgctttagagagatattgaggactatcgaatagggttcttgtttaaatgttttagtgagtgaaggtgcacacgaagaatatgaaatcagcagtcataatttataaaatattaattttattaggaatttttacacaaaatgataattttttttcttttagaaaagataattatatagatcataacaattatattatagtcttaagtggaggtagacaatcctccaactaagtacattttgtattcaccgtaagagtaaattagccaataaatagacttcaatatttgcaaatcgatatacatgagatacctgagctcgtgggaaattggatacaagaagacgaatatcatttaagatgccatggaaagtcgaacgataattagccacatgttgaagaccttgaagaatcattaatgagtttgtttcaataaaatggatagaaaaatcacagcgaataagccattggaggctgtgaacaatggctaaagcctccatttcctctaatttaaaattacttgagattggttttgagtaagaagcaataatgttgctagatgagtttcttaggatagcaccaattccaataattccattagagagaccaatggttgcatccgtatttaacttcagtcggcttgagcgaggagctagccacttctatttatctttgctgcgagaaacttccattgcaatctctaattgtggtaacagagaaagggtagctgatggtttatgcactcttctatattcagttaagaactttgtaacaaagctgagaattaaagcagcaggcttagcttttttaccatgaacttcagcattgtgttcaaaccggatacaccagagaagaataatgaactgctcaaactgatctttgggaagctttgttgatacatgaattaaaaaatctttgctactcatcgttgaagacaggtgataatcgaacaccacatcagtagattcccttacttctttagcacggctacactagaacaaggcatgattaatttgatccactatgatgttcacaaattatgcatcttggatccgaagtaatatgccttttattaagggttgcagcaactgaaaacactccatgaaagactttccaagcaaatattataactttagatggtattttcaagctccagaatgattgccaccaatgattagcagaattggagggacttatttcatcttgtgcagccatgttcgaggcaaacttgtatcctaatttaacatcatagagcccagttgaggagtaataccaagtaaaaatatcatcagatggaaacaagcttaaagggatggtgatgatgcgatcgatatccaattggcaaaagttagcacaaagtgttgtgtgatcccattgtcgttgagatgtaatataatcaacaactagtaatgatagattacatcccataaaaacaagaggtttgaagaaagagtgctcggtatccaaggatcaaatttgcaactgacacttagaccagtaccaattctaaaccgaaggcctttctgtagcaagtctttaccccaaacaatgcttcgccatgtcaaagatggtgaccgcccttcttttgcctctaaaaatcatccttaaggaaaatatctatgatgtagaattttgccaagaagagatccaggattgtcgaaaagtctccaagcctatttagctaatagggcttggttaaaagtgaatgaaattcttaaatcacattcctccatgaactttttccttgcaaagaaaattcaaattcttccaatggatagaattaccccaggcagaggacccccacaagaagttggccattaaactttcaatttgttgacacaattgattggcaacctaaaacagctcataacataagtaggaattgcttggacaactaccttaagaagaacctctttaccactgattgagaaaaactgctctttccatgaattaagtagtttccagatgcgattagtgattccactgaagagattcattttatcgcgactatagaaagagggtagacccagatatgtctcatggcaaggttgaattggcatgccaaacattcgttggaggaattattgatcagaaacactagtattaggtgaaaaagaaagcacacacttcttaggattaatgacttgactagaggcacgactgtataattcaagacaacactggattgagcgagcagaatctcaagaagcacgaaagaaaagaacactgtcatctgtaaagaataaatgagagattgatggagtagatcgggaaactttcagaccatggagagcaccattagactcctcttattgtagaagagatagaccttcagcacaaataaagaaaagatatggagataaatgatatccttgtcggatacctcgactaggagtgagagcaccatggacaacaccatttaatagaaaagaataggagactgattagagacagtgaaggataagctcaacaatttttacacaaaaacccatctttaacattacacgactaagaaaatgacattccaccctattgaatgccttgctcatatcaagtttcattgttgcataaccctgtcgaccacattttcggttctttagagagtgaattaactaaaaagcaatcaatacattatctgtaatcaatctttggctgaggaaagcactctaaaattcagaaataaccatggacaaatgtggctgcattcgcaagattatggttttggatataattttttagagaacaatgcagatgcttataggtcggtgttgtggaaccagcttaggcttttaaatctatggtataagtgtgataagtgttttgttgaaactagatggatcccctccattattcaaaacatcaaacatagcttgggtaaccatatcacccacaatatgccaataattagtgtagaacattaccgacatgccatccaagcctgaactcctatcactcctcattgattttagagcaacataaacctctttagatgagtaaggagcagatatagcagaataggcttcaatagagatagtcgatgggattgcagcaagacatcagtagagcatacttatgaaattccttggaagtatatctcaatgacattaagaaaactaggaagacttttttgaggttgtccatttgtgcttcaagcattttgatcttattattgttgcagcgtgcattcactcgttggtgaaagaaacgagtattatagtcactcgattttagtcaagaaatttgagatctttggtgccaataatcttcctcctgagatagtagctcatccaagatagtttctgttgggaatattttacaaggatcta

SEQ ID NO: 77152 - DNA, 673 bp, Cannabis sativa
tagggcataaaatccaacagtgtactcataaatagtctacctaataacaccagcgtagtgcattgaatagagtcatcttccatgtttagaacataaaaattagccgaaaaaactaaattttcttaccttaacaagaacatcctccactactccacgaggatagacattagatcgatcgaccaattgaatgactattctcgtttcttttagtggctcgagattcagcgaagcataaatagaatatgacatggcatttattgacgctcccaaatccaacatacattgatcaaccaacttatcccccatagtacaagggatcataaagcttcttggatcttcacatttaggaagaagtttcttttggagaatctcagacacagtctcccccatacttacttttttgtcccctttcaactttcgcttactcgtacataattctttcaaaaattgtgcatagcgaggtacttgtctaatagcatcaagtaatggtagatttacctcaaccttgtaaaatgtctcaaggattgctttgtcaatttcatctttctttgtcttccttaatcttcttggaaatagaggaataagaacataagtaggcattggtgcatccttgggaggttgaacctcatcctcttgtggtgatggtgtaggaggatattgttggaaattattt

SEQ ID NO: 77153 - DNA, 769 bp, Cannabis sativa
gttaacttcataatatatgtgagtacttataagcctaatgggtctcatgcacacatatatctttcctcttgaactaattctattcgtcaagatttattcctcatgctacatataatgtatcagttaaattttttttaaaacttagccaatcccatgctaccgtacgaccccactacgacctatccttaacttaataataagtttaaaaaaaatcattatttgatagcgtattggactattattaaagcccatagaaatttatagaaagtataatttataaaaatgacatgtttctcataacttagaagaatatcattttgattgacgagtaaataacatattacatactatttctacatcgagataggtagattaacctaaaagaaaataataactaaatattttgattattacaacactcatattatgattggtaacatctaaagactttatggttgtcattcatatttatatgagagtgaaaactctataattagaggccataatattcacttttgatattcttggttgaaataactttgttgttgttagagtcttgtaaggacatatttatctatagacaccagattggatatgagatttgataaatccttaagagcatttttagagtttccttaagtactgtttgtgtggaggaggaatgactttaggataaacatccttgagaattcttattttcttctttgtataattcatataatgtgatgtattataaaaaaatcgaatttttgcaaatgtcaattatata

SEQ ID NO: 77154 - DNA, 3824 bp, Cannabis sativa
ggatggaccaacattgcctgatgatcaaatagtaataataataagtccattataaaaaaaaatcaatatttaagacatcattaattatacaattaaaagattcatcaccaaatatcagataagataagtcgaatttcaccataagtagaaaaatccacccaagaaaattccaaaaaaaaaaagagcaaaacaaacattgataaaatactgtacctttttcctatattcccttttcagtaaggaaacatccacattttcgtaccgtgccaagcccaacactgaataaagatcagtacagtttaacaaccgcacaacttcatcttcggaagttgtctcagaatccgttccactcgttgaaggtgctccagggctacgatcagcagaaaatcctggaccggtttcaaaggctgaagaatgtgtctgatcactgttgaagaacccttgttgaccttgcatcccgggtgtttgttcagtggatccttcagcacttctactctgatttatattattctttaggaagtaaatcagaatatcactcgagacaaaagccagattgaaagcaacaagtacaccaaaccatccgacgtatgtccaagcacaatacacagagtatacagtgcttataaacagtgcaacacgttcacagctgagagcaaatgccaaacctgagttgtaaagggtgttaaatctcagccatctcttataaaaagaaaaggaaaaaaaaaacaaagcattacagagataaaaggaacacctccaaggacgatcacaaacaatgttgtccaaaaacttccatagagccacaataaaatagctccagaaattgcagccaccagaattccaagagtaaaaccaacaaaaagtccaattaaagcagcaaaggcctgaacagaattagttaaggtagcacgaattagcaacagcaatggacccagcaataaggtgagattatcgcatatgtaagccactcaagataaattgaaataatgcaaaaccatcatattgatcaacaaaaaataaagttataatcagcacaactcattgctatatcaaatgaaatgtagactcaccaaaacaagaaggaacttgaatattccaaccatagcaattagagaaaaaatgccacaccatataactgaaaagaaagatgtcgtccccaatcgtagaaaagaatccatgcccctaatagcacagtctaaccaaaccattaatatcaaaagcattatactcccgaaatgcattagccatttcaaaacaacaggatatgcctgcataatcttagttttgccataatcattagccttctgtgcttgattttttagtctaataaacaaaggtctctgtctctccagccattcatttgttgcctttatggtggataatgccaatgccttcaattttctcatgaccacattatctgggagctccatattttccagtgcattttggatacgaagtccactcaacgagtacgatgtcctgctctttctatgtcttttcatatgattggcccgaggtggtactggcacattttcttctacaacacttggaccttcagaattgccaatgtggtcatcagaatcatttcgtaaaggcttttcctttggctgctctacaccatccactccattcacagcttgcttgtctttcctcaaatgcttattagttttcttcttgcttttatgttcccctccggcattatgagttttccccgtgctccttcccaaaggactgtttggatggttaccatctgggagttcatctccaggaaactccttagcctcacttgcattcccattagcttttacatctggctctgcagaccctatatctgaagacctctttttatggtttgaagcatgactatcaatgccatttttctgctgattaccttttcgagccataacttaacaattattgaatcacagtttggcggggagtttagttatgacatgtcctgattaataaggccaccataccattaagataaattcttcaatatgttctgccaacaaagataatagacaatcatattggagtgcatacagtaacatcaattaagaaatttccatgagctaaaaatagatatatgacaagtatgactagaataaaaagtaaaaaacttctaccagttcatttagtacaaaagcatgaaaaggatagaaaattaacaacaaacaaaagacttttctaaactacttcttcttcttcttcttcttttaattttggtggcaaaaaacttttctaatctaaaggcaaaacttacaaattcagtcataaacggcaaaaggatgcaagcagagtaaaaaccttaaataagtaaaattcatatcaatgaaatttaaattaccttagcttagcttttacactacctttctcgaaacaaattgggagataacaaagcaccagtacctgacatgcatgtcaacaagaccattgaaaatcatccattgaaaaatacaaacagggccataaaatggagaacacaacaagaagataggcctaaatttcgtatcaaaataaaaacccattgtcgcataatccaaaacagatgcagcaaataaatgaattttgacaaacaccgtgtaagaacaacttgaaaaaagaagaaaacaaagagtttgaacaatacccaaatgaaaaaaatctgccataaattacaaattttaagagcatacacatacatacctgaaacaggttcgaatgtgagagagagagtaagagaagggtataaccaaaaaagaaactttgatagatatagaaatagttatggccgaaaaagcaataaagatcaaatttttagccagttgttgacactgtgtatatgaaattggtccgatttgggcgtttatcacaggcgaaacatgtcggaattttgagacgggagtagatacacacgaagctctcaaagacgatgactttgagattttccaatatgggctttttttgggccgacgagagcccattaggcccaatatttaataaaattaccatataaatacttgtaagtttttaatattacccatttttgtcgagtgaaatacccaagtttagtatttataagatcattctagtttttattgttcaaggttctaaagtaacgtgaaataatcatgtactatgctcttatttaaaacattggtgaaatagccttttcttgtgataagatgaaaaattctccattcaaactaagtagccttttcttgtcatattttgtgtgtgattaaatgcactttatatattttatatatgtaataagaatagaaaataataatagttttgttaaatataaaatgatatatccaaaatgtagtaattataagtgtatatttatttgtttttatttatttattcaattaacaaaaatttcatgagatttggtagcttttagattaaatattattattcaaacttttagattatttatttcttgaaattatatttatataaatatttattcaagtaattagtgaagtttattaatgtaaatgtaactgattatttaaaagaaaacaattattttactttatttctcgttcctagatttatagttattgaaagttatttttttctccgatcagacctgccggccctccttaggcttaggtacggcttggtcggagttatatttttctactgttattcgatttttgttactgtgcttaatattacatcatcattgtatgtgtaacatcttcaaaaatttcttgaggaaaagttagaagatgaaatcagtattttgtactcttcgagttctccaataggggcttccttttatcctcatgtggcggaggcatcggctgtcttaaatgagttgttgttgt

SEQ ID NO: 77155 - DNA, 3425 bp, Cannabis sativa
caaaaaataataaaatgaagaagaagaaatggttagataattcatataaaaaagatggttagataaaaatatataatgaaagtgagggtttggcttgtcaaaaaaaaaaaagtgagggtttggcattccccaaattgattagtgttggttcccaactagatttgcactaaaattagagatttggtacatttaatcacttattattcaaatagcattgttattaggtattttagtactttttagatgtgttattttgtaattagttagcaataatttttaaaaattattatattaaattatataggactcaatacttaattacactaatttagggtgctaggaaccactgatgctttttaatatttctcaacaaactttatgagtattgctattggggaccaatggtacttaacacttctaaatatgttgtcttgcgattggctaatgatattctctaaacgttattatattaaattatacggaactaatacttagttgcatcaataacgatattaacacataggagggtgctaggcactactggtatcctttaatatttttcaaactttatttacgccttttagcgtttcacgacgtgtcacctttcaattagttagcaaaaattctaaaaattactacattaaattattttgatacttagaaaggtgctaaataggttaggtttgtgtgttggccccacctaactcagggatcaaaaaagtatttttttccttctaaaattatacatattttttttttattaattttaaaaaatgccacattttttctaaataagaatctaaaaatatttttttttttcttataatccattaaatttcaaaaccaaccctaatgctagacatacattactaatgtcttttaacatttctcaacaaactatatttgtatatttattatttatttattttagtcgtagatctcacaagttaaaaggaaatcaaatacattgggattatagagctcataatccaataaattgggatttataagaaaaactagtttaccaaggagactttacatgctacactattttttgttgagagttttattagcactcaataatttataaggttatttatttttcatttttactaaaatagatatatttaatttatcctacacattttttttaataataagaaaaatttataacaagaaatacaaaattttattaaaataaaaataaaaatatattaaaatatgaaaataacataaaaataatattaatttaaatgtcaagtttgctaaatagaataagttaattaggattttgcttgtataaatttcttcacaaaatgctagtgtatcattatcatatcaatcacatgtgtgtaatttaaataaaaattaattaagtttaagaaattttttccttatcaacaatataaaattcttttatttttatttattaattgtcaataacaaatatatttttttaaaatttatattacacatgttaagttgttatgacattaacacatcaaccaacatcaacattttattagtcatatgaaatataacttaacaaaatcctatatattttatcatgttgaataattcaagtaattttcaaggagcaaaagtattagataccatttggttatagtatttttattttttctttttgaataaatttagtaatagtattagttcgggtgataaaaaaaactaaaaaaattaatctgccgcataaatacataagtttgattcctgacttaatttatatttctagaacgtacctgacatttaagtatcaagccaataatcacttgacaatctctgattattatatgtcattaaattttattttttatttaaaaataaatttatatataccaataaaaaataacacgtgaataattatttgacacttaattaatagatatacttaccgaaattttaaaaatataaattcaatattatcacggtcaaaaattaaattgaaatatttatctaaaaataaaaattaaagttaagtatttacactcaaattactcaaattaaaaatcctaatagcaaatagaataatagttgccatgtcgtatgactccacttagtgtcgttttgacacttcttctcatcatcttcttgaatataacccaaaagattacctgaaacacaacaatggcgaatgaattcagctaaagaattaatctttccatggtaatgatcaagaagcttaccttcttactaacccatgctcgaactattgatcaccttagacaaattcactcacccataatcacccatggtcttacccaacttgaaacccttttggccaatcaacttcttctcttaacaactcagttttctaggaatatagctcaatacataaccagaatccttcaccatttacagaacccagatgcccatttatggagttttgctgttaggttcttctcccataatgggcaattcaacactgcattgtctctttatgttgaaatgcttagacttggtctctgtccaagctcttttgccttgtcttcttctttgaaggcttgtgctaagattggagatagattgagtggttgtttggttcattctcatgtttataaatatgggttttgtggctctgtttatgttgagactgctgtgcttgatttttactcgaaatcgggtgatatggttagtgctcgaaaggtgttcgatgaaatgcccgaaagaaatgtggtttcgtggaacgcggtgttatcggggtatttgaggtttgggaatttggaagaggctcaaagggtgtttgttgagattccttgtaaggatgttgtttcgtggaattcgatgatttcgggttatgcaagaacgggagatatggatcgggcaatttctttgtttgaagagatgcctgagaagaatttggcttcttggaatgctgtgttgagtggttatgtgagttgtgggaatgtggagttagcaagaagctattttgatgcaatgcctgttagaaacagtgtttcttggattaccatgatttcggggtactcgaaaagtggagatgttgtctctgctcgtttactctttgatcagattaagagaaaagaacttctttcattcaatgctatgatagcatgttatgaacaaaacaaccaaccaaaggaagctcttgagttgtttaatcatatggtcaaaacagatttcaacattcagccagatgagatgactttaactagtgttgtatctgcttgttcacagctaggttatctggaattcgggttatggatcgagtcatacatgaagaagaacgggattcgattggatgatcacttggcgaactcttttatcgatttgtatgctaagtgtggaaacattgagaaagcatttgagctatttcgtggtttaagaaacaaagatttggttgcttattctgcaatgatttcgggttttggtgtaaatggtaaagcaac

SEQ ID NO: 77156 - DNA, 591 bp, Cannabis sativa
tgtgcatcataatcaatggatgggattgaggtgatcatgtttgcgtcaggaagtgattgaactgatggttgaacagttggtgttggaaatttttctccatgcttcttcatccatttttcttgtcgtttataacaaggcaagactattgcaggctgtgaatcttgtgcagcaccacctgaatcccatctggtaggttctggcataggctgattgtagctctttggtgcagagtatttgactatgtagttgaatttccccgatggttggcctaatagactgatggttttgtcgcctttttccaattttttctttagtcgttttcctggagtgggacgtcgtgagggttcatcatctcttaaacaacttttgcagttacaaacatcccagtatttatgtctgtcagaggattcaaaagcataaactggctttccttgggaatcaaagtacaagatttctgcatctattgggtggatgggtgtgaaaacaactaggcgtttttgtttggcttctgtcaaaaataatttcgacagatccatcttcttttgtgtggtaggaaggttcagttgtggtctgaaccacaggctgtggctt

SEQ ID NO: 77157 - DNA, 1335 bp, Cannabis sativa
agttatttttaaaagggttattggcgtgaaacccctttatactttaatttttatacacttaaccctcttattttttttaggggcatttttcctttaaattttttttttttttttttttttttgcaaatttgagacaacacttaaatatctgtatatacgtgacaacaaaacctcgaagccaatacagtagtaattcaattgatatttaacggtgattattgattgatgcctcaaatttacaaaaaagggtatacgtgagggatttggccaccaagaaaaaagataaaggggttaagtgtataaaatcaaaacataaagaggtttggccgccaataacccctttttaaaattgatgtgataggaactggttacggctatcaaaataacttttttggtaatgttgtagtaaccagtaaccactgttttttagtaaagtttactaaaaacagagtggtagccacaaattagtttttttttttttttttttatataatggtaagctgttagtacctcatcagtgattctaaacaaaatataggaaaaaccccataaaaaatggacaatgttaatcccatatttaataaacttatagagaaaaaaccatatttcgtgtcattttttcatttttttccttctttgcgagtcttatttgcaaaagttgatcctctccacttcctttcatttccaaggtcggtagctgatgcttcagagaaggaacttgtcactctgggcttccaggttagaaaaagacttcagatatccagctttggggatttatatttatcatatacgtatatgaaaccacttcttttatagatttgttacttccttatcttcagctcaaattaaatgtttcttgcagagcttacgtgtgatcatgaatgatgggctttctaatataccaccggactgtcttccagtgtaagttatttatttgacaagacacaatgatgttattgataatcccagaattcctcttcgaacatgtcaaatctacacaaaaatctttgatttctctcttcctatacattccaacaaatggtcattgaagcagaggttcataacaataacaatttcctttgttacaaaaatcaggacagcttattggaggatctcactttgatcaccctttttctatccttccttatatacacattactgcattgaattcataggctaggctgtatatgattgatgtactcattaaacttatgaatgattttcatgcttaggttctactctcctattcaataacagtacatattctgtaattgcttgattggtgcttttgtaagtatacatagatgtggacaatgatgtctaaagtacatatat

SEQ ID NO: 77158 - DNA, 774 bp, Cannabis sativa
ataaaataatcccttaagtaaaactacaagatccgtagtgttcttcctccaacttcttaaggaatatccttaatatatttctatatgcatctcaatattaattaaaaataaacttaaattaatttttaaaattcacttttaatattttttttattatttttcttttgataacatttggtagatttataaatttttgggtataaataaaactttcattatttttgttttatttttctttaaaaaaaataagcattaaaagacaaatttttcctattataaaaagggggtatttgattattttaaagcattcgattcggattataatttctcataaagtaaacattcattcttaaataattttggttaacaacatatataattataaatattgattataatttattttataaatttctctattaatttattccgattttgacgtattattttagtaatcaaatagaatgcgtgtttatatacaaaatgaaataaagtaaatagctaatgctcttttacataagactaatttagatttttgtccttgaattttgacaaactattgagattgtaggatttaaatcgtctaattgtactaaacaaaatttaagattcagggcataatttagtagatatcaaagtttattaaaggacagtctgaaaaatttctaattagcctttacataaatattattgtgattattaatgaaagacgagagaagttccagcttgagcaatttgaggagcaagaacagcattggttgcctctgttggatg

SEQ ID NO: 77159 - DNA, 1685 bp, Cannabis sativa
aagttcagttgaagccttcaaataaccctgcaaacatagtaaccaatcaaaacaacataacaaaacagaactagtcatgaaatgaaagagtaaacagttcttcttgcctcgattcgaaaagtgagggaagatacatttttgcaggggcctgaaaacttaatagggccaatcaagtatgtcccttttggtactaaaagttccactctacctttggattcacaagccttctcccatgctgatacaaaagcctatagacacaaatagaagtaccataacataagaaaaagatcaagtttttatttgttttgaacccttaaaaacacagaaaaagacattgaagtattgaaatcaaacatgggtatcatcagtttggccatctgcttcagcaccaaagctaatcacattgaattcaaaactcaaagcttttgtctttgacagctctcttgtactaacaaaaacactaaggaaacaaaacatgaataacatcaaaaacaacttattattagtaccaaagtgaagactcataatgttacacattgtagtaagtaaagaatgagcttggttttagtattgggagtagcctaaaacactaatatatgttgaacattgtaatttttaaactatttcaagcgggaatttttttgggtttgtaaataactgtaattaactccctaattccattactttagttattctttatttttatttgattttctaagtttgtaatggtagtcctaaaaatatggggtaatggggtatcggttttctaggactgcttttttaaacacgttttaattcggtcttttagtaaagcccatgttgttgactacttcttcttaagtcaacaatatggtagtttacaaacaacaaatataagaccatggcaatcatatattatctatttctgaatccataatagaaacaaaaaaaaaattgtgaacattctatagttaaaaagttaaataataaccatacttaattattttaataatatttataatattattttattaaatataaattgatttcacaataaaaaaataattttaattaaaatactattaaaaaatttaaccaaaaaaaaaaagaaactttctacatttaagtggcgtttggttgggagaaatgaaaacataagaatagaatggaataaaaatggaatgatcttttctttcatttcaaaatgaaataaccattccatcaaaatggtagaaagatcattccattagaatgacattctaatactttaatatgctaccaaacaaaagaatagaatgaaaattatttcttttccattctattttatttcattacctccaagtaaacgtcactttaaagatttccctatctattatctattataaagagtcattatttctatggttggagcccgtgggtcacattcataatttattatagagttattttttgtgtaattagagctagtggtaggatttgaatctttaatctctatcctatatacaatctagcttaattattgtaccaaaactaatattatatttgtatatattattttttattattaagtatatgtcataattaattaatatatatttttttcttcatttcttttttcaaaaaccctctcactcttatgtgaatccgttcttgaaactcattttttttaagtcttattcttcattttaactaaaaaaaaatgtatt

SEQ ID NO: 77160 - DNA, 665 bp, Cannabis sativa
tcaggtttgaggagtttgggtccgggttgcggtctgagtccaggtccctattcgggtccggttcggggtcccgaaccgagtcccagtcaaggtctatgtctcgaaccaggttctggtctacgtttggatccgggttcaagtcatgagtctaggtctaggttcgggtctagattcaggtttgggtctgggtcctgggttccaatctcggtatgggtatgggtaaaggcccatgtccaggttagggttttcggtttatggttttgggtttagtatttagggtttagggcttagggtttagggttaagtgaacagagtttaggatttagggtttaaggtttagggtttatggtttaagggtcttcttctagttccagttcacatttttgggtcatagagtaagatttaaggttcaggtgtgggtctaggtccaagtcccggtttgagtctaggttcgtgttttggtttaggtccaagtcttggtcccaaatccagacaccaaccacatgtcgagtctagtttgagttctggtacgggttccagttctggtccgggtctaggtaagggtccaagtccaattcctagatttagacaccgactgtgggtcgggtccaagtccaattcctagatttagacaccgactgtgggtcaggtccaagcctcgggtc

SEQ ID NO: 77161 - DNA, 1773 bp, Cannabis sativa
  modified_base (615)..(615): a, c, t, g, unknown or other
  modified_base (1555)..(1557): a, c, t, g, unknown or other
gtggactcccttcagaagatcctaatctgcatctctcgaacttcatggaactgtgtgagacttttaaagttaatggagttttttgattaatgaatacaaaatgaaggtattcattaacttcaaaaaaaagtatcaacagggttggccctgagtattaatgggctcaagaatttttatttattttttttttttgttatatctaaagtagagtgtgggtattattgagtctattttacaaaaatttacaaaaacataatttttttcaatgcataaaatatgaggtttttatataaaaaaaaataaaaaataaaaaaatggattttgggtaaaagtttacaatttcagtcacacataattttttacaaaaatattttcattttataaaacaaccgtaaaataacaaacaaaacaattaaaacaacagtggaacaactaaaaaacaatcctgaaaacttaacacagtacacagcataaaatttacactgtatttttaaaaaaattctaccccacagtaaaaaagtaaaaaaattagaaattttagtatgtggtataaaaacccctaaaaatatactatataaaaatttgaggaaattagactctataccctttttatantgtcctcttttatttttaccctctcttttaaagtctatcatttttacttctttttttaaatactttaccaatttcgcccttgtcacttcaatatactttccatgtgactctcttatgtcaaggtattttgaatacagtatatataaaaagaggtatgttttaattaaatataaattaaaagtaaatttaattaattgatcaataaaaaaaaaagtatttttcaatatactcctaaaaattttggatcctgagattgagtgagccctaagccagatctagcccgccttagcctaggaccggaccttagtatcaaataactaaaatttaaaatttgtaataaatactaacaaatgggggtaagaagaacattgggccactattctctgaaggccaatgtccatcactagcttgtatggccgataagaagtccacactccttcttaatgcacatgttgctttttcataagtgatctcttcaccatcttcaatatgaacaagaggaattctttgtttgaaacctttctctctcataaactacaaaacatttaagaaaacacacataactaatatgtacctatcatgaaaaaaaaaaaatcaattagatattcttatgtaactttgtccatttacctggattttccaaatagaatcggcagaagtagtaacttgagaacgacggttgtggaagttggagcgagcagcttcaacctctgctcgctcttctacggtgtcggtgcctgcattggcatcaaactcccatgtttgtcttcccacgaactcatttgtgctataaatgtttggatcttttcctttttgtgctatctttagcctccacatttttctttaattttgtacagccaatttttgtacacaaattatatataagcaaaagtcacccaacaatatttatgcacaaatttattattattactattattannnttattattattattattattcaacaaaagttagaaagagcatgtgatatatagcaatggatggataaggagaactatagccacatatatataaatatatatgggattattaaaaaaggaattatttcacacaaacataaaaattacaaaaatacagtttcacggaattttaaatatttttacgattttttttaattttatttacagaaaatacggt

SEQ ID NO: 77162 - DNA, 1378 bp, Cannabis sativa
ggagtccctatagttccaggggctgcaccaggtttttttcctctagccaataacgatcaaatgatgatgatgaatagtaataataagtttgtggccggagacttcgaaatcaaccccgccaacagtggtggcgggcttcgagaagagatggccgaaaacaaatcttgcttggcggatgttgaagtgaagctattagggtttgatgcgatgataaaaattttatcaaggcgaagaccgggacaacttattaaggccattgcagctcttgaggatttgcaatttaatattctccacactaatattacaaccattgaacaaactgttctttactctttcaatgtcaaggtaggtatttatataatattatatataaatataattaagtactaataaacaattaagtatttattacatacaaataattattcttatattatttgtattatgtaacaggttactagtgattcgagatttactgctgaagacattgcctgttctgttcaacaaatatttagttttatccatgcaaatagcttgtaacaatgtcatatgtacttcttaaaaataatttaccaatatatatatcttaatttatcgaatatttaagagaatttttagtctattatttaagatatttcgtaaattttaaaaaaatttaacatgctgaaaatagagttcaaatagtctattgcatacacaagtaactcttgtattttatacgcatatatatatgaaataggctatttgaatactgacttttatattgtaaattattataaatttcttaaaatttatttgtaagatattttaaatacctataacatacacaattataaaaaaaaaaaattagattaaaaaattattctaaataccgaactagataaatgtgttaagaaaatataagatatcgatataagattaacaataatatgaaacaaccgtttccaaaaaactcaatatttagtttttgtaactcttctccaagttaaatctttctccaacgtcctcgtactcatttaaagctcaatattaagtctttgaaaaatttacataatagatcaaaaattaatataaaaaaaaaatatattataaaaatacatcaatacgaaaaaaaattatttttactttttaaacttttttatttacaaaatatttcttaaataaaaatagggaactcattttttgattattttataggttgtatcatagttctcataaaattatttttttagttgtttttaattgttttataaattacttatagttaatttatagttgttgtgagatttatttttcgttattttttatttatcgaacaaagtgtatttttataattttaaaattttataagtatatttttacaattaatttttttttt

SEQ ID NO: 77163 - DNA, 2046 bp, Cannabis sativa
gaatgtgatcaactgttctttgatccaatcaatcaccaaacctctgcacgtgatactcaagtgataaaatatctcacccacacccatggtgactaatgactatacaagtataaaaatataattagaaaaggatgaggaaagagtcatatttgaatgctcaagtaattaattttttagaaagtgaaatgtggtttgtaactagtgtatgtttcactcccatagaaaagataagaggctgtcaatgcatgcaatagaaaagtagactaactaagaagacaatatagtccttacaataaaaaagagtcaacaatatatagtattgaatgaacattaagacttacaaaaaaccttatgagtccgtgtcccctttcatcatagccagtgtctcttttaagctcaatcccatgaaatatttcaaaaattatagacgaaatctaagccaaaaatgaaaaagaaaaacttcgtagatgactttacttcacactaaatcaaactctctttaagtcttgaccatgaaacaaagaaaaatcttataccaacagatcataaaggcagtaggaaataaagttcaaatatagtcaaggaccagttaattctaagaacagagttgttgttgttgttaagtagcttggtagggacactcatattttatatttcaatgatagctacatatatcgcaccagagataaaatttcatgagtttaagtcttcctacacatacgtacattcaatcaaacttgggatttttaccaacaaataaatagaataacggctttgcttacctgccctaccatcggaggaaacatattcaaagtgtgtacaaaagtgtatgacttcacatcaatcctacaaataatgactaatactatttaaaaaaaatatcatgagtaaagataacagtctaagaagtcactgaggaatagtatcaaacaatttataagcatatactttcaaaattgtttcatatctaagataacaaaaagaattaaacttagctaaactatcattgcattacttgctaatacttatcattctttgtcacctaaacaaacacaccattaaagttacttcatgatatatacgtatgtagcattttcagaaatgaatttgagtattcaaattccacaagctaatcaattctaaaatattggtctttcagatataagtaatgctccacatctaacaaatcatcattaaagcacaacttagctaatttaacatagttggtgatataacatgatcatattggccacaaaattactagtaatagttaagccacaacacataggagcctctaaatccattcccaatcaataacagtgatgtgcactagaagattcacactctatcacataaataaaagtagaatcatcacacaattgtgcattattaattataatgaaccactgaatgtaaaaattcctactcgacaatataaataatgcaaagaggttgtatcacactttttgcattttttataattgactgataatgtaatgtattatttaccaagagtagtctgatatttctagcaacatcaattggattaacatttgcaagactatagatgtaaagaaaaaaaagagattaagttgacttaatttgtatataataagagggtatatgagctttataaaatgttactaatgttgctgaggaaaacaatataaatgtcaaaagtttcaacataaaaatttcttcgtgcttcagatatatatattcaagatttgcatgtctatccctttcatacattaatcaatgatgataaaattggacatgtctcttttctccaaccaagtaaatcttgatgaaaatgaaactaagatctaaattggtaaagttagtgaaactacaggaaatatctactctacctaaaaatgcacaagtactcataacacagttggcaactgcttcctgagttcatagcctttggatctgtagaactgaatatgtaaaataatagtcttcatttacatttaggaaccatagcgttagtaaagccaaaaccaaatcacacaagtctaaagccaaatcatttcgagagaa

SEQ ID NO: 77164 - DNA, 555 bp, Cannabis sativa
ataagtataatatacactattataaaaaactatttacactaaaaatacaaattgaattagattaaatcaattacttaaatatttagtttgtaaaaatacaaatttttaaatttctaatcaaattcaatgtgcaaatatctacactttacaaatggtatgtaaagaatcaaattagctgtccctactaaaacattttttcccacaaacttttgtgacccattactaacagtttgtgccacaaatatatatatatttatagcacatcctttaattatgtgggtatgattgcacgaacaaagtaaataataaagatagttttatagcatattaaaaaaacatagcaatataatatagcatggcactgaaatttgcaaggccaaaaatgtggtggaaatcgagaacccatttagcattgggttatttacataaatatagaaaaaaataaaaaaataattagatagagtactattcttataaaaaaaaaagtatatttttacatttgaaacttaataggaaaaaaataagatatttaaaattaggccaattatgtagtac

SEQ ID NO: 77165 - DNA, 2105 bp, Cannabis sativa
gataagagcttcttcaagggataaatttggatcattaaattcatcgatgcctataaaaaatatacaattatttatgacaataaataagttaaatgaagtgattattaattaagttaaaataaattaaaataattataccattctcagttatgtaaatgagtggattattgtactttctttttgtatagaccaaaacatctcgaattcctcttggataaatgtagatcgcatttgaagtaccctatcatatataatataattatattgaattaatattaaattataactatataaacaagattaataattgttatttcaaatataattacttttaaagtaaatatataatatatatacatacattaggtgatggaccaatagggaccccattacgctccgctgccacaaaatataaaatactttgttaattttgaaggccatattaatttactctatctataaaatataggtgtacatacaaatatttatatgaaaattgttagataatctaagtaattttagtatttgcaagtacaaaaatttgtaattcagttttttaaatatattgttataatgtaattcaggcccaactctgaatataggcgggctagatttgtgtttaaggcccacttagttcaagaaaaaaatttcttttaaaataaatatttctatacaaattttgaaaaatactacttttttttttaataagaacccaaaaatacttattttcctatgactaactaaatttcaggaccagttctggttacacacatattttgttttgatatttatacacacgtacaactaataattatttgtaaattattttaaattttctgaatattataagagatccaatataatttaattatatatgatcatatgaatagaattataatttattgcaataatactaatatctatagcaaaaagaaagttataattgaaatgaaaatacttatatataaatacttacaagataatgaagcccaagaatctgttaagtaggaaggattttgaagagtagtatcattattgtgatgtggagcataagatgcataattagaagagtagtaattcaatccaataaagtcaaatgagccttttacaatcttagattccaatttggtgaatttgggcaacctatctcccacaatagatctcatactatgaggatactcaccatttgttaaagggtccataaacctgcaccaaccacctctaattatatattataatattacttagttgattcttaaattaaattaaatgatattgtacttaccatccatacataaaatcaagagctagaagtgcagcttttttgtggtgctttgcctcagaatatggtaccacccatagtgacactaatgtgattccaattgaccctttttgacttccctaataaacatgatgattataatgttacatgtacatattaatcttaaaaggagaggctaattagttaaaataattaattgggaggtgtttgttatagagattcatatttggtaaatttattttgaataaaaaaattttatttactaaactatcacacttatagaattttgttttgtaaattattattttgtacaaaaaaaattctcggattatggaaataattgttaatttttaatttttttcatattagactaatccaaggttaatgatctatatggtaattaagtgtccaatcaataggattaagtatctgtaattttgaaattaatgtttgaatgtttacgtacgattattatactttgtttcagctaaccagcttaaattaaattagttcttattataattatatgagtagctcgtggttaaattaataaattatttcaataaatgaacaaaatgttaagtattcctatatacttcaaggggaatatttttaaaaaatgacaaaaaaaattaggagacaataccctctaatcatcatagttcggaagataaaatttttatttattcatttatttttaatatgatgcattgaaaattttttgttttcaggtgaatcccacctttatactaatttatttaaaagtaattttgaacctttcaaacaatttgaatttcacataattttcttaattcaatttctt

SEQ ID NO: 77166 - DNA, 838 bp, Cannabis sativa
attagactttgtaggatgtgggagtctactaacagtaagaaggatgatgaattaattagtgtggacatgattttcattgatgagaaggtatgataaaataaggttatttgttagagaaaatgttatgcatgcaacaattcgaatgttgtttgtttctaagtttaagcatcttttgagtgagggttctctgtatagtgtgaagaatttcaaggtggttgcaagtacaggcgagtataggcctattttaaatgcttacaagattattttttaaaaaacaacttcaatcatgaaattagaagaaggaagcattagattccaactaacagatttcaattcgtatctcataatttgattgtttctcgtatcaataacaacacaatcctctaaggtatttatataaaatttagtgtttcaatgtaatgcataattgaaaatttttcagttttcatattctaacatcttaatattattattacttttttccccaaaatataagatattgtcggatgtttatgtggtgtgggagacattgagattgttggcgcaagttggaaaaaaagagacttgaaagttataacagattagtaagtttaattaattgaaccacaactatatcaatttttttttgttacagttcgttatttatagaaataatgtttatattttatcttggttgaagtatgttaatgcaattttaccttttcttttttcagttcagtcacatcaaaaattacactgtggagtaagatgacagagatgtttgatacaaatgtgtataaaaaagatgagggtccttttattgtgatagtaacttctaccacaataaaaaaatttcaag

SEQ ID NO: 77167 - DNA, 532 bp, Cannabis sativa
tttatgagtgtatatattgtagatatgagcaattagatttgttttttcgcagcaactatttcaagatcttcttttatgactttgtgatgtttgctttaaagagtattatctcacgtttccttactttttaataaataattagcaattttattctttaaactttcgacaataatatcgactagaaaaatagctaatttactcaaagtcaaataatcactgattaatcatcactaaggaattaaaaacaaaaattaaataagagcacacaacaattatagaggttcggcccccttgtatgtgcgtaataacctactccccttttagttgtatagattgtaagataatatcgtacagatcactaaggaagacaaagtgaattctagctacggctctcaaagtgtttacagagaatatctttcagcaaaatgctcttagatgtgtgagtatgattttaggtctcagtcccttccccttgtgaattcattcactatttagagggaaaaggctattaaatttggctccgtaaagggag

SEQ ID NO: 77168 - DNA, 3112 bp, Cannabis sativa
  modified_base (69)..(71): a, c, t, g, unknown or other
tagcataaaactaagtatacgtgcttggcacgtagcttttttctagtatatctatatatctatataaannngaagtatgaggcggtgacgtggcgatctaagatcaatctaaatacatcaatcttttctctgctttatcctctcattttattgaatattttattagaacataaatttataaattaatattttactattatttaataaattttttaaaaatttatctagcataaattaatatttttaaaaaaatactatatataaactacactcacggtagaattattcaaataacaataataataatcataatctatatacattttataaataattataaatcaaacaaaaccatacgtaatatttatctagcatacggtatagataataaatctaactatctctgttgggcaaaataaaggttgagttactaaaactttgcttctctctctcaacctttacacactaatgtgttatcggtgacttccgatcttttgcttctacataactgttctatagcaatttttcattggctctcgtagcgaagtatggatgcaagtgcaagtgcaagtgagggaaacccgcctatagaggatcccagtatacagggtgaggaagggcaggggacaaacatggtgacgctgcaggaggttacggagtttggagaacctgggattgatgcaggagaaatggacgaaatgaggtagcatttcatcaactccatgacactcgatcttgaggctgatgtggagctaagtgctgaaataacgaaaaaagggtatctagctagaacctttggtagaagaaatatagaaagggttcgtgttaaggaaatattgtcaaaaatttagaagttagaaggaacctggcgcatgaagacaatgaagctagatttgtgggccatcctttttgacagtgaagcagataagaaataaattcttaaaaaacgaccatggtgttggtcaatggtgtttaacttaacatcagggagtgacctgatgatggatgttgggaaaaggtgaacatgaacaaagctaggtattgggtggaggctcatggtttgcctacaccatacctcacatgggaaaatacaaatgtaattgcaagaaaggttggggaatatattgattttgaaagagcttctaggacagtcattgctcggagaggattcttaaagttccaagtagatatcctcctcaatcaaagacttgttgtaggttttcatttgaacatctcccgtgatcgaaaagaatgggtacaatttaagtaccacaaactcccagctatttgattcacgtgtggtcatttggctcactcttatgacaaatgtgatcgttctcaggagtatgcctaccctcccatcggtaaggcggtacctctatacggggcttggattaaagtgggtgtgccgataaggaattgtttcgaccctgcaattctgagattgaaagtggacgagaacctccgtcgtgctgaggacagttctccagtggaagctagggaaaagggtaaatcggtaataacggaggctgaaaatgatggtacaaagtcactgagacaaggtccaacctgcagggggccgttggaatggcattttcaccaaaacgggtagttatttagggagcaaagaaggcgtgccttgatgttcagaggaagttggccagatcgggaaatttgagtcaacaaagacaaaggccttcaccaaggtcaagaagacatcctatgactagtattgacaatagaagaagagatgaggggatagtagctagtttgatggctgacattggacccacacgtgaccaaatggtggatataccacatgaggagatttacaagtctagggtcccacatcaacatcctaagcccgcctttgtcacttggcccactgataaaaaccttgaggaagtcattgactaagtaatggacccggcccaaagtaaacttaggcttgctcaagttgtggtctcacatgatagtattgatttctctacttctagtacttccttttctggtgcaaaagagaggagagctagtgtgactgttgtacatgtgattactcttggagaagatgtcaaaacattgggggagaaaacgccatcaaccctagttgccatgctgccacccgtggagatcaataccttttcccaggcagcagtagccgtgatgggactagcaacaagcgaagaaattatactcagagacgagggggaaactcgggcggatcttgtaaaggagcaaagcagggaattaaaggctgtgagaagcgaaatagcgtggacaagatggaagataagaacacaggtacgagttttactgatatggaaagcaatttggttgacattactatacatgagactctcaatttggtatcgggtgaggaggcagcccttagcaagccccctccgtcgccatgaggatcctttcgttgaattgtcggggtattcatagaaccccgacgacccaagctcttgtgacttgggctaggagatataaacaggagtgtatcttttcaatggaaactaagtgtagtgaagaggggattttttaaattgcaagattattgggataccaattttcttcaactattcctgccgaaggtatagggggaggattttctctgttgtggaatggtagtatcgatatgaaagtgttagaagctagtggtgggctttttgaagtcttgataaaggagccaatgacacggttgaaatggtatatgtttgatgtttatggaaggccttatgacaatgaaaaaaaatgcttttgggataggttggaggaaaagatcaataggtgtgcaacgccttggatggcaattggtgatctaaatttgatagcttatccttgggagaaaagtggtgggaggagagtaatgacccatgacacaacaattctttagaatttcttgcaaaatacagggggggggttgatcttggctaccatggatacaagttcacttggtagaataatcgataacctggtggtctgacaagagagaggcctgatagaggtatggttttgggggactggatcactattttcgccgcggccaaagtgtcgcattcaccaattaccatctcagatcatggttatatcctcatggattctaatg

SEQ ID NO: 77169 - DNA, 1192 bp, Cannabis sativa
taattattcttactaacagtataaataacagatgaacaactcgatttataaaataatggtgaatatcattaagggtagatttatgtcaagccattattcattcttaactaacttagaaccaacaaacaattggtctccaatgagaaaatcagaaattagttagattaaaacttgttgcaaaattaaagccaatacagattggttgcaactcaacaaatttttttttttttaaacaaaaaaaaatgtaataggattgtaattatcaataatatcaaataatagattttggcatatttactttgacttaattaattgtttcattttagtaaaccataaatgatttttgaattaaacttgaaatgtatttgggcaatttcatcatttatggcctattttatatagctactatttttgaatattataaggaatgataataattaaaacaaatagttatgtaagtgtataatatgaagaaattgttgactaaattttaatttgaacgacttttgctattgccatattaaaaattcatttctacatcttttttctgagaaaaaaaagaatttattatgaacaattgtagcaaccaagttagaaatttccaatactataatggtaaaattttaacactacattaattttctatttaaacaataaacaatatgcttttttttttttaataaaataaaataataagctatattattgagtcaaatttttagctgtaaatattgtgtgtcatcattgctcatctgtcctttttctaactattatgaattaattagtgtacacactcaaaataagaataataaaaaaaactaattatttttttaatcctaaactcatagatctaccttcatttactcatttggtctaaccaacctaaaatgaaaattctttgacactttgtctatttttttttctaaaaaaatacttaaatccaaataagacaaacaacactataaaaaaatattattttagtcacaataaaacttatgactaagaataaaaaaaataattaattataaattattatttttgtgttgagactaaaatatttatagttaaaaatattagttacaaaattataatttgttgtgattaaatatgtttttaattataatgaaaaaattaatatttatgacaattcgtatttaattactatattttagttatttttagttaaaaaaaa

SEQ ID NO: 77170 - DNA, 2102 bp, Cannabis sativa
cactgccatgtctagatgtaagagacaagatcatattttgttaggaaaagcataattgtcaccttgttgacctggctcatgagaaaagtcgacatccgcgaacacccatgagggttggtatccacaacaagttactctaatgagcatttggggagccatccaaaacgagcctttctactagtcccttctgggtttgggagaggcatttcctatctcgcttttgggaagaaaatcttcccgggagaaggtttctacatatttctttgctttgaataattcttcaactcgggggaaccgtttaacgactgtgcaccttttaaaggactctagctcacgaagaatcaattgagccttttcaattaaagtgccacgtgtcatgtctttcataaaacacagattatatttacccccaagctttcaggatgcaatgtggtccagaaccttgcagcccttctcaactttttgagacaaacccatggcatgtgggactattagttcgtctcatattccaagatttgtcatcatttaataagtcacataggccttattaacgtggcacatgggcagtatcttaaatgtagttactagtgtcacgcatgtgtgggagcatatttttttagaggagttatactaacgactgagtgattaaaatgactcttcatttaatgaacacattcctcgaggcatgcaatgatgaatgtcaagtgttaggattgaacattaaatgctaactcttcaactccctagccgttgaattggaggatactcttcaattgaaataatcagggtcatttagttcaaagggtaaagacttcaactggtccataagtaaatttccaaagtttattcatattcaatctttgtaagtctttctatcttcttcgaacttaaagcttagaagcctcgactcaccttaccccctgttcaacaaaaacatagggtaagcgtcacacacttgagtccagcgtactgcatccttctttaacccttcctattattcggtaagtaactcaattcttgttggcttttgcataatttcatgtcagaggtagaaatgctaagttcaagcaaggtgcgatacatattgcatgtcagacttatagaacacttgttcattgaaatgcattattaagataggactgtgtgtgaatctctgtgctttgatcgtgtcagtcttattctgatgggctgagtacgatcatgctttatttttgaacaagcttgcatgactccgggaatgagactatgtaaccactatactggcccgttaccttcatttttggacaagggtgtgtcgaaggttgatccattggggaaggatacctgatccttctatgtgcccccatttaagagtttgttgttgcattttgagtaatctttccatgttgattgtgctcgcaggtaccatttcaacaatcaaaattctaagccctaggaaagagtccagtttgacaagcttcaagcgtagaggagattccacaagatagaggaggaggcaagatactgaccctcaacaagccaacaattcaaccccatttgatctgctgccttcagctccacaactatactagcaatacctacggcggtgcccatagccgcagtagcctccatattaatcattttaatcgcactgtcagtgacctacctctcttcttgagatcccttcaataggcttcaaattcttcacgacaattattcccatggaatttgtgctatgcagagggagaaggatgtcgaacacgctttgaggaggtagcacaaggaagagtggaggattttatgcatgagagcaaacagactttctgctgtgaaaagggttgaaacctctgaaggtctttttgccactgttcctcatgggccaatggtggacattgaagccctagaaaagtggattggtgcctaaagtagtgagggaagttgcaccctatgaagacatgggcaacctacagtagcactgatgtgttcaccctttcccatgtcgccaaacaacaggcagtaggggtgagctttgacttttatattcttgttcttactgctatgtactgcttttgttttctcatgttttgttcatgtgctaggcgaccttgatgatggagagggct

SEQ ID NO: 77171 - DNA, 1004 bp, Cannabis sativa
ctaccttatatgtggtattctttccgttactaaactcctctaagtatgagagattatacttaccacgagttttgtacattctttctttcttttcctcatttggagttttttcatttaaacctttaacaaggttctatgagtttaaatcatcgagcaaggttcttcaacatccataaattttatccttattaaagatttgatgggtttttctgaactactctacaatagtgattcatctcgcttatgatgataaaataaatcaatgattgaacaccaagtgaacaagaaataatccactacaactcaaaagtggtctatcttgctcctagatctcgctactagcagatagcttcaacagaataatttcatagcttctcaccctagttactaagaaactgacgctggaaggaaacaacaacaaagctgaggcaacctcttatccaattttttagtattccacctacctgttgagttccccacaccagtcggtattggtcgcattctcaatcaatcaaagaaagatcgctcgttagagaggtttaaattaccaacatgatagtggcaaaggtgataattaatgatgaatcatcatcaaatatcctgttcaaacaaaccataaaaagaataagtttttccctaaaagatatgaaaccatgcaagcaacttatgtaagattttagcatagccaacatcgctccatgtgataaagttagattaccattgacagtcagaactgtcccgaggcagaacactactatgactaccttcatagtaattgacacgaagtctccttacaatgtaatgatcagaaggtcaacactctaagacctccaagacatctcgtatatctacccgctgtttgtcaagttctcgacagtagttgttattgatagtctagcagccgaaacgaatgttacaacacatcgttgatattcaccaagaagacttcctctattgtgctagtaaccgaggagatgaagaagacatcctccactatgttaata

SEQ ID NO: 77172 - DNA, 1068 bp, Cannabis sativa
cacttggttgctacttgctaccaatctaaattgaacataaactaaacatgaaaacaaagtatatgtcaaaaatatgaaagttatgcaaatattttttggattgcataattctaaacctgaacatatagttaaatgcaaaaacattataagtatggtaagcaattcaaaaatgcatggtaatcaaaatttagctcaaataactacaaggttgatagcaaagggactaataccaaaagaggagtacattctattccctcttttattgtttgtcttatctactttaaaatttttgatcaatctcgagttcatcaactaagcttacaatccgaatctaaccttgtagtagttaaccgatgatattgtgttaaacacttttacatttcaaaaatatcatccttattttactattatctttcatttcatgcctatcataaatagcaccactttactgggacccaaattgcaaaaagtgatttggaaatatccttctctaaaagattagtttttcaaaaaaaaaaaaaatgatcaccctctaaattattataagataaatattaaatatactatattttatcaagtataatattattataagtgtaatttaataataattggagtttctggttgacccagacccggaccggaacccgggacccggagccagactcggacccagacccggacccagacccgaatccgaacccagaccaaacccgaacccgaactcgggacacggacccggacccggacccgaacccaaactcgagacctagattggcacctgaaacccgagacccaaacccggacctggacccagcgcccggacccatacccgaaccaggacccgaacccagacccggactgggacttgaaacctgtgacccgaacctggaccgaacctgaacccgaacccgagacacggacccggacccaaacccggacttggacccggggcctggaccgagacttgaaacccgtgacccgaacccggagccgaactcgggaccggacccgaacccgggacccgaacccgaacccaggacccaaacccggacccgaacccgaacc

SEQ ID NO: 77173 - DNA, 2310 bp, Cannabis sativa
  modified_base (394)..(395): a, c, t, g, unknown or other
tgtttatttagaagttcatatttaggttaataatcaacatacttgcgagtagatctaagatcctggtaaaataattccaacagcccctgggtccttcctacagtgggaggcgctaatggtggatctactcctggaggcacgggcctgccatttggatcaaccaagatgctcgcatcaggttggccaactaaggtggtcagacttattgtggtgacaggattcaccacatctgtagtattcatggggattccaattgtgactggaacccgagtgtttggatctgcaatctgtggatcttaaggaagacccaaagatgcagatagtgcgacaggagttcctcttgtgttcaccatgacatttgatcagatcacgatatccacgctctcaatgaaannaccaaactgttgacctcaaaaagagatcaaccgacagcagggttgtatagatctgatgcttgcgacgcgtgtgtacaaataacagtgaaaaagcaatagacaacatgatttattatagaggttcaaccccttgtgatagcgggtaatgacctactcccctcttagttgtattataccgagggaattactatccagatcgctatagtacccttaggatgacaatatatgaattgatatctggcagggcccaagtgtcagacagcctaggctaggcatgtgagagaatgaggaagagagagagtctgacagttagagagtttgaggtttttagcttagaggcggcttaggcaacttatgttttcagtcagaggttaaggccattatataggaggccttaaatcctaggtttactattcaaatcccttggaaattgtatagatagttagatatttacaagagaccaatatgcccttgattctagatattcttcagtcagtttgttgggcttttcgggcctaattcgcagcccatctttgttgtccacgtgctagagtgtccttggggccctacagtgcaatccttggccgcccaagcccttgtgctggccaggctggccgatcctggggccaactcctgagagtgagttggtaggggtgcacatttggacccgcacacccgaaaaacccgacaacccgccccgacccgttgctaaaaaaaccaaccacctaaaaaccggtgtagtcgggtcaggttcaacccgaaaaagcctccaaacgggtttcaggttcgggtgtggataagtcattttttttggtcgggttgtaacccgtaacccgaaactatttatttttttaaaaaaaaaattaatattaataatacttaattacttattaatcgaaaaaaagacttcatttcactaaaacgatgactattggtcagcttaatactattacttgtcattaattaagttgtcaatacttaattaatattttttatttttttttagttagattaaaaaaaaaaaagactcttcaattcatattggtattcgtgactctcacactagaccaagagtttttttggttctcacttctcagtcactcccttaaccataaaggtaatgaatgcattacatttttaatattattatatactactaaaagtcttcataaagaatataatatttttatatactttaatttaatactgatatatgttattattatttttaaaaggttcaaaacaaatgttataaaaataaaaaaaatggcatttttaaaaattaaatatcatttcagcccataaattaaatattcgggcttagcccaataggaccggctcgaacccgagtacgcccaacctgaaaaagcccgacctgatacccaacgcacctgaacacccgaaaaccgtgttcggttgtgcatttccaagacccgaagcccgaaaacccgaacccgactacccgaaaacccgacccgtgtgcacccctatgagctggtctgtcacttggtccccgtttgagtgtcggggtctttgttggcttgggtgctgacttggccttccctttaatgaattgtactgccaagtgccacacattctgtccacgtaagcatgccacgtcatgaggacaaaaattaggttaacaagcaccattggtgcctttatagcaatgctacataaaaagaaatgctaaaaggtgggtctaacactacatagaaatattatatcattattggtataattaagtattatgtctcacataatttttttttttcattaaagcgtttaaatatacaataaattgcataatttaagataccatctgaggatccccaacagacaacacacatgcaccctcccatacttcttatggccacttgagttagattatttagattattaaatatatatatat

SEQ ID NO: 77174 - DNA, 516 bp, Cannabis sativa
aagaagggtagctcaaatgatcaaacatgtggttgctcccacaaggtccaagattcgagtccattcgtggtactaattgttatagtttcctggtctccaaaaaatgtagggttaagacaggaaccctagtattagaaaatgaaaatacgaaaatgcatgacttgtggtaggttttccctgtcaaattagtgtaatgcagcatgaataatggaaataggagagtagaattcatgaaaaaccgagttgatatttcttaacccgggaattctagattagatgtctcttctctccctcaaaagttacaaaccataccgaaatactcgacaccccgctagagaccctctactcagctaactttctattccccggctgctgccttaccataacttccattgttcttcctaacatacacataggtcaatggaggcctatcaacttgtgtataagatttggagatgtagtgcctgttcaaatattggtagcacatatcacagtctagcaagacatttttactct

SEQ ID NO: 77175 - DNA, 1538 bp, Cannabis sativa
ctttatttcaaaaatatcaccacataagcacatagttgaagttgatatggcaaaaagaatcattgtattcctaaacagaaacttatggaaggatctggtcagcagctccttatttatctttttcttgtacttgtaaggatgccgaagatgcttcgtcacaaatttgattatgcctacctacttaacagtaacaattaactcgtgaactttctagatccaattttctacagtatttaaagtaacaccattagaaatactatactataccataaaaatatacctcattatctgattcatcagcggttctttgaacccgcttttcaagttctataagctcatttcttaggagctcaaaacggtggatttcatttagttctgactctgcagaacttgaagcagtctgctcaaaaaattcattttcctgcatacaataaacaagcattagaaaaaaaaaatggattaagcaataccaccaatttgcagcagctacatacgttatgaaatctttcattccaatttttcaaacataatccatttggtaatgatgcaacaaatgccaaatgataagttcgagaggcatttttgtcatagatcatgtcagagatagatgacgtactgattcatccgaagttaacacaagattgggtttcctagttgaaggccgcctaaagatgctccacataccacgatttttatcaccaactctgaagaatattaacttactttaatgggaaagttgtgatttaataatctaatttattacagaaactaaatgtagctacactaatcgcacctgtcattcctatctgccctgacattaccactcctactttttttcctttttaaaaattgttgttgctcactaacagccagttgggaatgactgtcgtcaatcccctagacaaagagaaggaaaccagtggaatcgaaataaataagaaaatcatggaaaataaacaaaggctgtacacacagagcgtgaatgttaaggtacaaaagtttagagcgaaggtaattaaaaagtgattaccatgcattttgttagtcctagaacatagcttatgctttatccattttgcatattggtccccaacctatttgttttggcatttcgttacctaaaatattgtttccttagtctccctttgctaatttacatcttgcatccaaaatccattaggctgtgaaaattgactatgtatataatatttatatattgtgccatggatccctaaaacttcttgattgttgttacattactaccatttgagtacaaacaaacatatccataattaaaggaagatttaatgaaaaatatatattttagtcaagtcctacataagtgcatgtttgtttaatatttttaattttagtcatggttttcaaaattggtcaaggcatacacctcaaggaggttcaaaaccgaatctgaggctacacctctgctattttcattgaggcatacggctcacattgatgaggcacacacctctgaggtgatgaacactgagacttgagcgcacgcctaaggttaattg

SEQ ID NO: 77176 - DNA, 847 bp, Cannabis sativa
attgattttaaaatggtaaaaagtaaaatattatttcttccatcattaaattgtataatatacattcacaacattcgttttcattctttcgttttattttaatattaatatttttttattaaaaaatatatatataactaactaacaactcaaaatttaaaatatttttttattaataaatatcgctaactaaaaattaaaaaaacaataaaaataataatatattaaagatatggttatggttataagatttatagtgtatgtattattttgaaatgtgtaactgaactcaattgagagagtataatataattataatggataaatttataccaaaagagtctaatataggataaatacattaatatttaaatagatagagaagaataatgcatgaattcgacaaaaactcaaatcaaggtttgggaaaaaaaaatcaattccaatcaaattttaatatctaagataccaaaacatgtttaaggtactcagagcatatacaaaaaaaaaaaaaaaaagtttataaaagatatttcctctatttataaagacatatataccttttattataactaattacatggactatatatatataatacttaattatacgtgataaaatctataagaaggtgagaacattacattttcaagtcatattaattataaaagaaaggaagaaggatttaattgtaaaagaaacgatcaagggtaaataaaagtttatatatatttataaagttaatatctagtttataaatatttatatagttagtgatatcaggaattagatagatttagttagtgattttttttttttaaaaaaaataataaaataattaactaa

SEQ ID NO: 77177 - DNA, 631 bp, Cannabis sativa
ttatttaatattaatatttttgttgttatatttttaaatatgttagtattttaaattaattattatttttgtgatagatttaaaattcaacatcattaatagtgtaaaatttaccgtacactaatccaatgcgtaatttggtgtgtatcattaaagtaaaataatgtgaatattcctaatttaataaaattatatactattggagatgctcttattaatcattagtaagcaaaagagtatttctttgaagctatgatcatcacacgaccaacatgatcttcaattcatcactgttttgtatttataaaatgttttctacaaatatttcttctcttaatttttgcctccaagctaattaattacttattattaattaataataacgaaatagagaaggttaattataaaatttggcttttatttttattttttagaggtgtctataagaaattttgaataaaaatatgaagtatatgaatgattatatgaaagtaaaataaattgtaatcgaacatatacacagtataatgaaaaaaattaaagtaccttcacttattaattctttgagtttccacacgagcttaaatctattaaagaaaaacaagactgagttagtgtgggtattcagact

SEQ ID NO: 77178 - DNA, 963 bp, Cannabis sativa
tttcatgtttaggtaatagttatcacttattttttaagtaagaaaatcaactgcataattattcacatatgctgcttatttttaccttattttttaactaaaacaaatcatgtccgtacctgattaacaacatttcgttgcttgatcccatctcccgccgtcaagaacctgcaatagtaataataaatgcataaaaccacatgtgataattattgaatcgcagcaaagcaaaatgtgtcgtcctgaattttgtttccaaataccgtggagtgacaatgaatctttttcttgccaataaatataaaagaatgcaagtaaaaaagaacaatcttaacaaaaccatttcataataaaagctacattatcaaatttaaatcgatcaatagcatcaattatgaaaactattattattattttgtgcataaaacataatctaagaaaaagttagaatttctggactacccgaaaaaaatcttacttccattttactagtcttaactaatacttatgcaagccaagcaaaatctcaagaagattaggaaattttgaagacatccagtgagtaaaatcaaatggtacaatgtacttacggaatttgagctccaacatcatcttcagaaggtgccaattgtctaaccaggggagacaaatccttctgaaagagagaccaaacactacattttttagaaaatagcaaattactaacacatagtttatcataataatctctattcattaatacttaataggaacaaaaggttacctgaatatcctccatgctggcattggcgtggctactgtccaataaaaccttaattcagcacgtaagttttatttagctagagtaattaaacagttagacaaacatccgtagattaatatcactttcaaagagaaaaaactaccattatgagacgagctgcctttgcactttcaacaaccatccattgtccttcttctgag

SEQ ID NO: 77179 - DNA, 1635 bp, Cannabis sativa
ttatgggaaaccaccatagtaatgattccgttctaaagtggccatacatgtataatgattgaacaaagttacttgtttatctagattctgtggtttgatggtgatgattaagtacaatctggtgtgaggttcttgaagtgatatttgtccaagattctactatatgcaattacgggtcccgccagtaactcttgatctttttgttctgtttcttaggaagagatgaaataaggcatatagttttgctcttaaatatggatgaggctatggttgggccatctttctcactttataaggtgagcttttggcttaattttttttctttcttctcacttttcttttgcctcaaatatcatgtatttttatatccgaaagatgatatgtctaatttgcagatggcagttgaacgcaatttcacaagaggtcgtaggacaacacaagttgcagctgcttgtatctatattgcatgtcggtgagttctttttgttattgatttcattgttttctgctcgatattagagatctcatttggctatggaaatcaatgtaatcggttttcattcatctagaatctagacttagttaaatcattttcttgctttccatataatcttagagaactcacttgctataattttggtattcactagaatgtcattgtcatataaacaagtagtattactattaagttttaacttttaatgttacttaataacctttgttggaatctatattgcaatgcagaacttcaaacccaccaaaaccttacctacttattgacttttcagaagctttgagtataaatgtgtaagtaagcaattctatttgtacatttattattgatcgagttttcagcaacaacaagtagatatatgatatctttaacatcacctctggcgcacactagtgatcgtatctgtttgcatatgtaggtatgtggtcggagctacctttttgcagctttgtcaactgttaagccttggagagcataacattattaagagacccattgatcctactctttttattcctcgatttaccgaaagtaagtttacgcctctttgttttttcagcactttgtatactcactttattactaaaatatattccacatgatgagatgattccagttttggaagcttctgtagtgattatagtagtattagtttgactttgtattttagaaatgtgttacatcttaagttatttataagcaacattaaattttcccttttgttttcgagattttagagttattagctggaaaagatgtcgaggtttccagaactgcaatgcgcatcatagctagcatgaagcgagactggatgcaggtacgatttaagcagagagattatttttgtttctaaaagctgcttcttcacctccattcatgaaggaaggcatttagtactgcatatcgcctttgttataaaaatctaggattaatcttgctacagccctaactcttagattagtattacacgaatgcaccacacaatgaattacagaagtgtttcaataaaagccctttagtaccataccaagtttaccaaatttctcctacaatgctacctgtttctgcctaacattatttatttgccaaagtccttggctatgagaaaaaccttagaaccc

SEQ ID NO: 77180 - DNA, 507 bp, Cannabis sativa
tcactcggccatactggccttaaggtcatacgacatgcatgacttgaaagtcacttggcatgcatgacttgagaatcactcgacatgctagtttgaaagtcactcaacatgcacgcttgaagctcactcggcatgcactcctcttcaacccactcggcatgcacttcatgacatactacttccacgacgatgtaactatacttagtgaaattttcctaagtatggaaaatgaaggtagcaagagtacgaccacaataaggacaaggcgtgcatgtgaaatgtgtataaacacgtcctctacaagctctaaaggtaagaaggtacgagtaatggtggcaccacacctgcaaggtctgacagcttgaccaaaggtacacaacatcaaccactcctgtaacccgagaccacctgataccagacaaaggtacaaggcgcaagatcactttctgcaacctgcaacttgcaggtcatggatgtcaccatgtcccttgggaccactaatgtacc

SEQ ID NO: 77181 - DNA, 2576 bp, Cannabis sativa
aaatgaaaaagcaaatcacctcggctgtcaaaagaaaaggagcagcatgtggatggaaatgcacagcccgaagagaacgccgagtcctaagaattattgacggagaagaattctcccctcttctattatagtgccatatgtagagctaatataaaattttaaaaatcaagatcatcataaaaaaaaatgccaagttctcatatgaagttccacactatataattcctcaccttgtgaccagatgctacagcaagaagctccccttttgcatggaaagctatggaagcaataggacggtctgcttgagaggaaaaacaaaaacacaatcaatcatataacttaataacttagtaaacattattgttatttatagctttatcttttcttttctttttttcttatgttgcctttgtgcaaaacataattaatgtctaagagtgagataattacagaaatcgcgggatcctatacactctgcagtatttgcatcccataaacgaacttcatgatccaaacttccactcgcaagtaggtcaggatacaatggatggaacctaacctgtaagaagtagtacccagcaggattatcagctaaaggactgaattaataatttgctttggtaaaaaagaactaagtgcattccattttaaaatcggacaagtaatactctttactcaaatcacttagttcagaattttttttgagattattaagattagcatcatgctaatcataattacaattgatcaacttaagaaaacaagccaaagcatcaaaaaccgaaagtcttttaagtctcctattattaatgagatgcatgactcaaaaggtgccttcagttttgacagccccaaaaatcctttttaaacaatgcaaaaaattatgaattcataaatgaagttctaggtcttaccacccaaggtgtcctgcgatgaccactcagaaccttcaagcagctaccagtttcgcagtcaattatctttactgtatgatccccactgaaaacataggaaaaaagcatacttcaaaactagagcatttataggagtaaacattagctctattcaagtcctatgtggcattgccacagcataatacacacagtttaaggtctataacttactgggtagaggcaagtgtcttcccatcagggctgaaggctgcagctatggttgatcttggaggaggcaaaagtggacaatatttggcagaaaaatgtcttagtgactctgattccaccctgaaaacaaccaaagttcaaggaatcaatcaccctaacacccagcaagactgctagagatatcaaagccttcgataaaataagcagaaaaggagcaaaggcttaccatgatacaagactatgtctagaaatcctagccacttcacaccttggcttagcagaaccaagttggcatttagaagcctctccccataacctctttgaaaaatgttttgtatgaggagaaatctctcttcgagctaacagttcaaatatattgccaactctgaaagcaacaacaaataaagatattctaattgaatcaattacattaacaaactcaagtcattgcaattgtcaagtgtcccaaatctcttgagtacacgaattctgatgctcttaataacagaaagcaaatcaataccattgttgcttccctaaccaattaatcagaattagtaacacataatacctcaatgatcctgattttttttctcaaagtgctaattaatttaatgaagataacaatgaaaatagttgagcaattccaaccccagaaaagaaataataattctaaaatccatttaataataatttccctattcgctaacaaattcatcaaaaacttatcaaaatctcctcaaaccagattgaaattcaaagaattcaagcaaaattcagatctttacataacaacagcctaaattaacacgaaattttttaaaacaaatcacgaaaacaatagagtttaatcaattcacctgtgcctgccctgaaccgcctgaagaatcggcggcgtggaggtcgatggagcattagcatcgtcggcccacaacgaagctcccctcattattttctcgacaaaacctcatgctcccaaatttccatgcatccttatccaaaactctctctccctctctcaactagtgaaagttcacaactttcaaggaaaattcagattgatacgatacaacagagcaaaatttaatattgtcaacatacacacacaaaaggaaaccaatctatgtaaagaaacaatacaatttgtacaaacagatgtatatatatatattggtgtatgtatgtatgtatgtattttgtgtaatgttctacgcaagatctcaatggaagaagaaaacctaaggagagagaagagctgttgttctacgatttttgcagtcggacatttttaaagcttccaaatctaaataattattaataattataataataataataataataataattgaaattagagtatggatttctgcgttggtgagaaagtggtttgacgaaaataccctcggtgtaagtgcgatatttgcggtatcttcactttaaaaatatactttt

SEQ ID NO: 77182 - DNA, 673 bp, Cannabis sativa
attagcattgacgctgagataattggtcaagggggtagagtagtaaggaggggctcaacttgataagtctaccacctcgggtaattccccgtaggttattggccgtcggtgcgactggtgttgactccaccaataaacctagaagtttctcatatcttaccgtttctgtagggtcacgccccttgtgagcagcagaacactcgggcttgagagcacaagggatcagctgtgcttttaagagactgaccagccaaatctatgtttttttaaatatgcacgagcgctacggaagctcaaagaccatttgcatccaccttcttcatttctcttgctcggacaagggcgtgggcctttgtcctcgacagtatcttttttatttttcttgattggactctctcttttgtatttcgagacttgcgacggcaaaaattatgcatgtttctatctttcctcagctctcaatgaaagcactaaaatatttaccgagatttttaaaaactgattacatttagtgcttaagaaagaaagtaaataaaataaatggcaagagattttttacgtggttcaggcgttaactatccttagtccacgagtccattttattagccacttaggtagacaatgaatcatacaagaatatactagactagaactctctatttctctcgttcct

SEQ ID NO: 77183 - DNA, 609 bp, Cannabis sativa
atattatattgaatatcatctaatcaattattatagtgtatatatatattaaacattcttttgtggccgttcaatgaatttattttgctttgagatacacatatatatttatatttttatatattaaaaagtctgagaatatatgggtctaaataaaatagattaggattcgaattgataatattgtataatatattatacacttaattaattatgttatgaatatttgttgtttttttttttgaattaaacgtttatatattacaatgcataacttgggactcgaacccaaaacctccaatacacacattctcctatggccacttaagctaacttcaagtggtttatgaatatttgttgttaatgataaacttaattttacttaaatgaaagcctgataaaaatttttatgttttattttgagcctccgaaaagtgtgagttataggcacggatctagcccgcctatacttaggatcggccctgtatatattaggtattaataagtttgctagaactgtattagagttgctattaattacctaattattaatttcaataataataattaaatttaatttttaccatttaattatattttttaaatata

SEQ ID NO: 77184 - DNA, 571 bp, Cannabis sativa
gaactgatattaaatattcgcttatacatcaaaatttgcactgccgatgcaaagctttcgttaatatactgatgtcgtttgcgtctgtcatcttataccagcgaccatggttggtcaaatgactcaaattaatggtgataaaatcaaacagtatataaaatcaagtgatgatcccgcggcaccattatgagtatgtctttctgcctttgtaatcgatttcttttttttactactttggtttgagtgtggatcattgagcagcttatgatttagggtttatgagtagtttgttgttttctttttttcttccttatacttgttttcaacggtgatttgattttcatcatgtttgtttatatttggtgctgatcgctttcaaatcatgattttcatcttgtttgtttgtatgcataatgttcttagtcatatatgttatttcttactgtttctttattaatctctctttcttgaacttgttacattaactatttcataatactcttcaattactgttttacttaactgctatgaatctttaatcctgtttacttccttaattccaagattatga

SEQ ID NO: 77185 - DNA, 3237 bp, Cannabis sativa
aaataaagtgttaccaaacattaccaaagaatatttttattatattttctgaaatttatttttcttaaaataaacattaatcatattgatttttcttcatttttcttaattaatatgcgctataatcattgcaaatattcttctttagttacacattttgctcctttatctgatttattaacaaaactctaaaattattcaaattaatattataatattaggataagtctaatagtaaattattaagaatttattatatactttgggttaatcaagcaattaatgggattataatcctactacctatttcatcaaaaaatttaatttttattataagtagataaataagcgtaatttgtcaattacgaagatttatttgaaatgtgtagatataatgtaagttattggtgaactaaaaatattttcaagttcagcgatcttagcgacccgattggaggcttaagatgtcataacagttttagttagtaatattgatggaataattgagataagtcgattttaaaaataatggggtatttttaaggtgctaggagttgaccaaataccctaaaattaaagatttcttagtggttgtaaagggaaaaatctacaatgatcggaatggaagaatcggggacactgacaacctatagaacaaaggaaaaaggatcgttgatcaagttagtaaatagttcgaataaagaatagttgaatgtaaataaagaagatagaaaataaatatttccaccgtagagtgatggagaaggactggtaataatactggtaacgtattgcgtgaatgcttaggtaagtgttcaatgagtgaagatgtgatgatccttcaggactccagggttatcattttatagagtctctgatggtcaaattcatctgttctgaagaacgaacgtgagaagtggtcttccttttttccaggaggaatgatcgattcttatcagttatagactcattcctatcctttgtatttaattggtcttgtagctactataggcttgtttgggccttgtattttagccaaagcccaatgtattttggatgagtgggttatatttactgacttggttttgaaggattgtaattctaatttgggccgtaagctaaaaagcatttgggcctagtgcaatttttggccactatagtatgtctcttactctttgagtcaagtgtggttaagttgaagagtagttgcgttgactggcaaaaaattgaaatgtgtgtatcgataagaatttttatttttcagtgcatcgattaacttgaagaatgtataaatattgagtttgtattagaaatgatttaaatgagtagcatatgtatatatgtatgtatgtgtatgagagagagataaatagtatgtggtaaaaaataataatggcaatagttgttgtgataataataataataataataaggatgtagatatattttttatgttgattttgattttgttatatgtatatatacatatgtactccgaacatataatgcatatgtctaatattttagttagaaaaatatatatggtatgattttatttgactaaacacttgtggatcttgatttgtaaaaatgatattttgaatgctagaagcccaatgatgaaaggtcttttgaagttgaatttaattatataattatgtacaaagtgcaaaagtaggtgacgaaagcagtcatgctttgtttattttgagtcttctgctcattttctttggccatagacatgtggtctgttatttcagacctttctcctccttacattgttcttctttcaagtatatcccgtatatatgaacaaaagtaaaggtattcgacacagtgtttgaagagtcctttctctctcttcaggttaatttgctttgaatctatttgtatgttcattttattcaagcaatgttttgtcatatttatgatgggaatcttgttattttttggactttcattttatgtgtaatgttctatgttgagctcttttaatgtgagtttgtgctctgtgaattgagtaatgtaagactttgctctatgtattgagcttttggatgtgtattgttgtttcttgatgtaggattatgatcaatatcattgatttgttttcattggatgggatgttttattaagatggacgatttagttcttcccttgacttttgtatctataagatagtcatgtagcttagactttgttacaaacaagaccctatactagttaggattcttgtatccgttctagaattgtcacataacaaatagtgtcactctacaattttccatctatatttggatcatacatcttttaaaaatgctactattagaaatacttcaagatcttgagtgtggctaagacttcataaacaagttgtatttctgtaatattaaacttaatatgccgtataactatttataaagtcaatccatcttatttttataatttatttactttattagttataactaaaaaaagtcatcaatttttctttatcacacttgtttgatatttttttagtgggtggaacttggtttgtaattataaaatagttatgaaaatttttacaatgcagttctaaaaggagtcaataccttttatttattttaatatttgagagaatattttagtttaattttttttatgaccgttcacgttatacgccgaaaattttgagaaattcaaaaactttaatacacgaaaataaggttaaaacagtttattcacatgcttataaaataaaaaaatcttgagtgcaacatattatttgaatcttattttcaatgtgttaaattttttcgaatttcttaaaattttacaagatattttaaacaattacaacatagatgataataaaaaaaaaatgaactaaaaaattttctgaaataaattggagtgcatttgtcaaccatccaatatttattttcataccaacttatttgtttcatacttgattaatcgattcaatcaaataataaattagtaatattaaaattagaaatttaatagtttttactaaaatcaatgaatgaaaaacaaaactagttcggaatggaaattgcacttaaaagatataagtatttcaatgattcttaaccgtttacaataaacaagtagacctcccataaaatcccatttccacgatttattgaagagaacaagcgaagcaatgagaatggtggttcaatcataatcattgatctccaaaaatggagcatatcttacaacttagcctta

SEQ ID NO: 77186 - DNA, 664 bp, Cannabis sativa
  modified_base (594)..(598): a, c, t, g, unknown or other
atatatagataaacatatattaatgaaaatcatgtatatatccttgtatatatacaatcactcatcaattattatatgttttacaaaaagaagagacgattagtactttaatttgtacaatctcatatataatctaagctgctattaaatttgattggttgcctataatatgacagtgctatatatatataaaggatgggtgtttaaaaaattcatttgactttgatcacaccctgtgctaagatggattttagaacatttacagtggacacctaattatatgcggcgtttatctagccattttaataattaataatatattattcattatatatatatatatgggaatgtatatatatatatatgagacttacaagatgatatatatgtttggtttaggattggagagatcgaagagcaaccctattgtttatctgaatattggccatctatactatatagtctatatatatatatgatcttgtatacatttggagaaaaattaagaagaaatgaaattgatcttttcagagaaaattaaagcttttgtatattttttgagaatacaacatattaacaaatatatatatatannnnnatatatatataatataacaatcaccataatgatatacagaagctattaatcaattaataattaatc

SEQ ID NO: 77187 - DNA, 1439 bp, Cannabis sativa
agaagggttggaataattttagcagagtcatggtatgagtgaaaacgtaataatagtaatgagagtggctttgaatggagctcacctgtttggggtaatgtgttcttcacaaatacaaaaagggcttttccaggactcaaatgcagcctgctgcttaatacatggataaattgtcccaccgacatatctctaggaacaaggtatcttaagagccaaatagaagaagaacccattaattagattggaaatgatctctctttgttgaaattttatttatttaattattttagaaaaagtccaatatctagaaaaagagaaaggtatgggggtgacattcaactaccgtttggtatgttgattaagttgattactatattgtttctaaaaataaaaatccctcaatttaattaggaacaaggtatagattatataaaatcatatagagattggcaggttaaatgtgctaaaaactgaaattagaaagggaaaaaagaaaaagggaaaaggaaacatacttcttcttttccatttcaggcaaatctgtctttgtatatttttcaagtatcacctaagaaatatgataaacatgtataagtactgtcaagagacaatccaataagaaaattgagaatgaaataacatttggaaactaaacatacaggaactctatctgggtatttcgcaatcatgttctttgattcatcaactcgctcatctgccaccatccagtccacaacacaaaatcaaagcttattagaaagaaaaaaaaaataataaaattttaaaattaaaaagacaaaaagaacataatagaaaaagaaacgataagaaaagagatccaaaccaaaagagtactcctgtttgaaagacatgatctttcccataatgtttggtcaaattttctgggaggaacaaagttaaagttttggtttggtatatggttaaagagagagagagagataaaagaagagaagaaagaagaatatggtatatgcttgtgtgtaagatatatgcgaacggaaagggtaacgtgttatccgttaaaacatgcacctcaaacgcttacaacaactcatattttttatctttttgtttttatttaaaaaaagaaaaggtaatatgatgagtaagtcattttcattttgctttctcagttttgacgctctacgccatccgccttctgttcctccaccgacaatctcaacattttttctatttttttttttatttatttacgttgaccttcttaacaatagtacttttttctcttaaattttggagagttgatcttgcacttaaactatattgttagttaaaagtttgcttaaaatataatagttatataattttgtacattttattagattctttctcatttggtgttaaaaattaacatttttacttataaactagtaagagtactcgtgctatgcacgtga

SEQ ID NO: 77188 - DNA, 708 bp, Cannabis sativa
gacaaatggatatgatcattacatttaagcatcaaaaccttataaacagttcagtagtaagatcactctaattttcttaactaaataatgacatgcttaaaatgcaatgccatttacacaaaaaattatatgaaatttttgtgtaattttttgtgtgcatcaaacactttttttatactatcaagagcttgcattaatattccacatctaaaaagacaacatgctgttagagagtagcagaaagttagaagataaataatgccttttaaaatccacacacaaacatgtgggactagaggaatcaaacagaccaaggagcaagggtaccttacattaattaatagaatataatagagaaatgttaaagggcatccgtgtgcctagcaccctcctgtatgtcaatatcgctattggtctaattatgtattgggtctcgtataattaaatataataatttttagagagtatcgctattcaatcgcaatgcgacatgtcgagaaggtgctagctaggtacaactagtgccgaatagcaatgctcaatataatatactagcttagattaagaatttaattaccgacaacatcattaacgattttcatttgttaactcatattagatattttcgaaatcattaactaataaaataaacaaaaattggaaaaagatttaaatgataactaattacaatctatataaaagatataa

SEQ ID NO: 77189 - DNA, 1908 bp, Cannabis sativa
cgccctgatcagcgtcggtagcgaatttcgcgtaagccgacgctgaaagggcttaaaaagcttaaaaaccgcctataaagggggtttttgtagtagtgtaaatataatatatcattctcaataatttctacagtgaaaatgtttattttagtgtaggaataatttttttttttccaaaattaatttttttttttttcaaattttaaggcttatttctgttgttggtgcaccttttcgtactgatgtgatgttattgaaataacaaagaatacaagttagaagaaagatgaagaagaaattgccataaataataaataatctaatcatgaattagaatactcaggtactcaccatgcatgcatgactgtactttttcattatgatgagtttctcacaattagaaaattctacaaatgagtactgatcaagtatatatatagcatgtttaattatgatatttcacaataatataataaagcaacatccatgtataactaattaattacttaaatagctaacttttaaagtctactagctagttctgtctttcaaaataaataataaacaaaagaaaagcaaattataagttcctaattaaataaacaaaaataataattaagaaagatcatgcattaatacgtacctaattaaataaataaaaataaagacaaatagttaataagttcttacggaccaagctaggtaaatgccactcttagcccgcctccccccctaaaaaaaaacagaaaaaatagaacaaacaaacttgtgcccatgagaccatcacttctccctccttcattacttatgctacaaaagtgaaaagatatacatgttatacatattatatatataaaaaagagtttatataattgaaataataatataataataaatttgtacctgtttacacacatgatttaaaacactcacatttctataagtcatttctataacaactcctccaaaaataatgaacccaaaaacacaataattccttccataaatatatctataatatttcttaccactatgcaccttcttaagatgttggggcataatttcatctataaagataatagttgtatcatctttaaattttttcgccatatcagtatggagagaataccatacaatacttgtccagcaaatgtcacccagaataccaataatattcagtaaagacaaacagattatggtgcattgtattattacgtgtataagttcgtatttacactctattataaacggcttgaaattcaaaagggtaaatagaaacccttcaattattattatgattttaaacattttagtatattgaaattcaaacttcttcaatcttttaacttcatcctcctctagtttcattatgtctttgatctatcataataaattaataaaatgaaagttagataaaacataaatataaaaataataaagtgatctaattatataaattaaatagaattatttttaaaatttactaacaagtacatatataattgtgctatatatatgtatccattaatttatatattttgtagttaaaactactataaaagaatcacaaatttgtaatagagataataactaattgacagtgttattaagaagtaaaacaatgcaagagagaaacctaagccaaaggaggagtgttataaaaatagcattcaagtttgagaagtaataaaaacaatttatagagtatcaggattacctttagatgagagaggagtgctttaatgtgtcatgtgtggtagagtgatgatacatgatcaagtaaaagataattattccaaagcatctctcagccattagatcttcaattcgatttttttttaaaaaaaaaacaagcgtcatgatgaaataatacattctccctgagtggtgtactgggcgggacatcat

SEQ ID NO: 77190 - DNA, 5990 bp, Cannabis sativa
atctaattactgattaaattttatgagatgaggaaaaaaaattaaactaaatcggatgctccaccatatgtacacaaaagatttttttttttcctgaaataatacatatagggaagattgaatattgatgatacgtataaaacatagaactttatttcatgtaaggtccctcaagattctaaattctcatttgggtcctcaagtggacgatatggaatgtggaattgtgaatctaactaatagccgttactattcccactcaaaaatttgtggagcttcgaccccacacgccaacccaagagcgtaaattacacgctcttcgcttctgttccccaatccattcgcgcgatttttttttttattattaatgcaactttctattaaatcacacaacaccccattcccgcgattaccaacgccattcctctcatctcccacgcgatcttctggcgcgtgcatcttaaactctcttcaatcttcccaagcctctgccactcattttctccggtaaattcctgggaagcccaaatattttggatacccaccgctgtgagatgacgtcagccgagtgcgaaggttaagcgtgagcatagcgaaggaggatccagtgtccatctggtgcgcacattagaattaagggtagtagtggaaagatgacaaacacgaagatgagagaggggcttattagttgtttacttgtttatagtattatttgtaagctttgactctctctctctctcaagctttgatttgatatgtatgtgtagactttggagaccaataaaatccacgaatgaaaactttattttttaaataaaaaaaaaattggtataagaaataatgggaattaacaataattgtaatagtattgtatggattataatattattttaatggatcgattaaaataggattaacagattggggagtctcttttaagctgtcgtgttttccatttgattcttcttcaagatgatgagacttagggttttcgttctcttctctacaaaagcttgtactgatttggattcggactctgtagttgcagacctgagaatttgagctggaagaattaataacgaagagaagaagaagaagaagaagtaagatcagcttcatcatttggcttagaaagcttatgttatattgtttcaattcatttttaattgtgtgtgtgtgtgtgtgtttggttggtgagaaagcttgaagcgaagaatagcgagaacaacttcatggttttctcgattattgttttagctctaagcaaaatgagaaagttcatgttagtttaaggaatacactcaagtacgtgtatttaaatataattatatatactctactcatacacatatatagtacatacatgtatgcagatacatatatgtatgtgtacatgtgtatttctgtattcttttatttggttttccttgctctgttttctgggagtgtttttcgggtgttgtttcatggtttctgtagtctttctttgctaatgaaacttggtaggtgttggggaaaaacggttaaggaaaatttgaactttttccttttcttttctcgtctcatattcttaaatgaataaaaagtacacccttctgttgtctgggtttatatcagagcaaagttttcacctttttttcttttgaaagaaagcaaagtgttcaccttaaaagggaaaattgtggctctttccaatatttcctgttcattcattgaagaatgaacttttctgattcatctcgtgctatatattgtgttttcatctatgttgcagttcctgactttcacttgttcttgttaatacttttgattgtacaacattctttatattatttgaaatacccaaaaaacaagggcgtgtttcttctttgtcataataatgacattctgttatttgaaattttgcaaattaaagatgtattgatgtgatcaagaatattacaaaactagtaacttatttggctaaatcccataatgttgtattgcacgtggtgctctttggcttttgaatttaccttctataccttttaattttagtggggttttcattatttcctttttgagttatattttacatgaagtctcatcaagcattatttatgtttttcagttgaataagcatgaactctacttcccaatttgtttcctcaagaaggatgggagcttatgagccaatccaccagatgggcatgtggggagaaaacttcaaaactaatggtactctaaatacaccaccatctattcttgtggatggagatgaactaaacactcaggtacaaatgcatgaaatttatttatactttctcctttcttggtatccatcaagtgttgaattaacctatgtgatctttattttatttcctcagtcagaagatacttcaaatggaatcctggggcattctgacaaattttacttagaaggaactaaacctgctgacaaggttagaataattatgcctctttctcaatgcatagtgttccttcactagttgtaacaataaagacttagttcctttgcaggtacagagaagacttgcacagaatagggaagctgctcgtaaaagtcgtttacgtaagaaggtaaggaaggggtgtgctttggaaggcatttggcctacttaaaaactctatttgaagactaatctgatgtcagttttctttgtaggcctatgttcagcagttagagacaagtcgtttgaaacttgttcaattggagcaagagcttgagcgagccaggaaacaagtaagtagatgaccagctggtctagtttctagcttcttaaacctattataagatacattatcggtcaaggtgaaaaaattaaaagaaattaaaaattttaaataaaaatctttcactgcagttcaatatttacaatcttttcattgtaataattattcaattagtgatgatgttttttcgactacagggcctttatgtaggtagtggtggattagatgctaatcgtttgggttactctggagctacagatgcaggtttgtttatgctccccaccattatttttttcttaccttccaagaaaaatccagtgcatattttagcattacataataaaccggagtcatgagggggtgtgaatgagttgcaattttttttttagttcaacttattatgtaatactgtaatgatgtcagattagttttgcattatcagactctcttcatcaatttttataaaataatagacaaagggattcactttattctatatttagtttacatttgttattgtttctttagcattgagattctgaggtgataggtatttttgctaatagggggtaacataacatcgtagttttgcctatatagtctttcatttctttatgtctctttggcaaaattcttagatgattgatcatcttggtaggaggttgacattatcaggagtagagttagaggttggcttgacattaatgatttcataaagccatttccaaattctttatgaattgagtaagggcatgaaagcatctaggcctactattagatgttctcagaccttgttttttgtttttcttgtatgttctaaaatgggaaacatcatggtttacaggcataacagcctttgagatggagtatgcgcattgggtggaagaacaaaatcgattagtttgtgagttgaggacagctttacatgcacatataggagatggagagcttcggatgctagtagaaagtagcatgaaccactatttcaagctttttagcatgaaatcaatggctgcaaaagctgacgtgttttatgtcatgtctggaatgtggaagacatcagcagaaaggttcttcttgtggataggaggctttcgcccttctgaacttcttaaggtgccgtctcattgatcaattcgttcattgataaataatctacttctctttatgctttcttagctatacttttttgggttttcatttcataactgttttttttcttaattaacaggttcttgagccccatcttgaacccttgacggataatcagcttctagatgtttataacctaagacaatcatgtcagcaagcagaagatgctctttctcaaggtatggaaaagctccagcaaacactagccgaatctgtagctgctggtcagctaggtgaaggaaattatattccacagttgcctaccgctatggagaggttggaagctctagtgtgcttcttgaaccaggtaatatattctaattctactttttgtgcccacttaatggttcaatttccaattcgatctttaaagttttgttatccttaaggaaatttaggcaagtttgtagtgtcttctaataatatgataaattttaacagctgattttttttgaaatctaaaaattgtgtagtgttaaaagcaggaagaaaaaatatgtagtatatcaaaattaatttctaacacatcaatttgtaatgtgtaaatgcatttgatcgagctatttaaaaatatatttaattataaatactttttatcaaaatgttcccatgtgctacaaacagtagatgctgcatcatttcttctcaaatcctaggctatttgagttgtgttattttgtagtatggctatatatctcatcttttgtaattttataaacatgtcaccaatttttttgctttcctaatcgaatggtgttttgtctaaacaggctgaccatcttcgacaggaaaccctgacacagatggcacgtatcttgacaactcgccaggctgctagaggcttgcttgccatgggggagtatttccaacgtctctgggctttgagctcgctttgggcaactcgtcctcgcgagcctgcttagtcttaatttagaagaggaagaagaagacaagtaaagtttgcaacatgcaggatagtcactgccaaatctgccatatgcttccacaagtggtgcaatttagttgctaaatcttgaaaaacataatatagtgtctaagctgctgatgacattattcaagcagcctccaatatctgagaaactgtaaatatgaatagccattttggtgtaattaataaaagtaaagcttttttgtacattacaactgatgtattttgaggatttgtatatcatgtctacaaaggcaagacggactataagcatctcctgtagttatattatttgaatggtctctgtattttttataatagaatgcattggacacaccttattattgtggataatgtatacagttgcttcgttgtgcttcgaaatcacatattattactttgcttataagtgtttctgtgtattgacactgactcgtaggcaatctcaggtttggtgtatgtccaactatgtaggtgtctcaattactagacacaagtaaataataataataataataataataaattattacagctaaaacaatagttcatgaatttctttacatgtagccctatccattgaataaactcatcaatagaagccctaactattcatccataaatattatttttttaaaaaaatttatttattatatgtgtgtgacattattatatttattcatttttaaataaatataaataaatataaaaaaatagaaagacataaatatttaaatgaaataaagaaatagaaaaaattatatttcggtgaagtattattgagatttttgtcctcctaaaactttaatatgttttaaattgtgttttctaaatttttcaaggtcgataaaaattcttcaattttactaatttgaagattgcctaaataccaaattatatttcctaaattttaataagtactaaattgtgtttccaaacattgatatagcaaattgtacccttaaattttaatatatactaaatcatattatttgaactttcatctatattaaaaacaatctaaaaatatttaaaaatataatttgattcgtaaccaaaatactaattagccaagagaaaatgtttgcaattttgctgcggtattgttttttttttttttttttgaataaaaatcataagatctattaattaataa

SEQ ID NO: 77191 - DNA, 668 bp, Cannabis sativa
tgccaagctatggcatgggcttgctattaggcaatgtgatatacaagctcacctgattatgtgatgtgatatatggatgttaggatacggcatgggcatgcctgtttaggtaatgtaatatatggataccggtattcgagttgttcctatgaggcaactgcgataaagtcatgactcttaactgaaactgttgttagttttcttcttgtcggcaatcctagtgaggtagtgacagtgacatataggtgctaggctatggcgtaagcttgcctggttaggcgatgcgatatattggtgccaggttgtggcacaagcttgtctaattaggcaatgcaatacattggtgcctggttgtgggatgggctcatttgattaggtgatgcaacgacattatgtatgatgccagattatgacacgggcttgcctgattaggcaatataatatatgatcacttttatttccatgcatatggttggttatattatccactcttgaatgttattatttaatcattttataatagtgaaatggataattagttatttcatgtattgtcatttgttacttttatttttgagtccttgtgactcacgggtgctctgtggtgcacataagggcaagaaaaaattagagtagccatgaagtgacagtcttctccagcaatgtac

SEQ ID NO: 77192 - DNA, 676 bp, Cannabis sativa
gggactttaaatgtctcccatagccattgaggttttggacatccctcctagcatgtctcccttagggtgatgtccgaagcctcaaatgtctattatatgggaggcatctaaacacaaaagtactagattctatttttaatgtcacttctcttttttaattgtttaaacatatgatcaaatatttgagcaaagtccaaaaaaagaaaaaacaaaaaggtcaaaatgtgttagagctcaaagttgcagttagtgaaatcaaattcagctataaatatatatatatatatatatagggtaaatctaccgtgggtcctctagttttgtcctcatgctatgaggaaagaaaatagaccaattacaagttaaataaatgtgtgtgtagatgtattttgttagattatagtagctgattattcatatattatagctagtggaaagggtatgtgcaaaactttttaatactctcgaatataaattatctacctaaactaaattaagataatttgataaaaaatacaaactaaaaaatctgatgaaaatataatccacccaatttttatttgggcgggttgaaaataataccaactactactagcctaatcaatccgaactaactctacctacccgattaaaagagtttattttttttttttatatatatatacttttacatttt

SEQ ID NO: 77193 - DNA, 2200 bp, Cannabis sativa
  modified_base (1418)..(1433): a, c, t, g, unknown or other
tggatgaagctcttttggtttgaaccattatttctaaatcaaagatgattcgaaaatggacgaaatatgaatattttgttaagagcaaaatgtctttagctcttaatgaaagcaccaaaattttggtcaatgacgtggagtcaaataaaatgacaataaaagtatttgaatatagatttacggtaaataaataaacgacactgaaaatttatagaggttcgactcaaattatatgctaataacgtactttccatttcttagtatttgtttattggaataccaagatcacgagaactagagtgaagtgagtttctcaatattcttcaaagaattataagagataatttttgcagcttaatagctctcttaaagtataaaatcagacccctcaaataagaaaatgaataaaaggtattaattacagagataatttttgcagcgtagtaaccattatttataggattacaaaagaataaatgatattaattacaaaatatttcataaatgttgattattatcccttgattgtagtctcccatgttgtccgtccaatctttgacttgtcatagtccaaccaacccttcaattgaccatcacgtgtcactttgtgtagataatttttgggataacagacataaattatgtataaatttcctcacatcatatttaactacaatacatagaaagggcacttaattgttttctcatcgatattttgttgcagtatgtttggtgtcactcaagtgatgatatttccttattattgttatttgtttgagtagaactttgaggggctatggcttttgctcttttgctttgaaatctgttcatgattttccaaatggacatagccagactatatttattgcaaccactgccagaggtgttttaacaacaaatgatagaagttttaagtttgtctatttgaatgcattatcatcctattttgtctggtattattgattggaggctcatgaagtggcaccatgcttgaagcattacaagctattggtgagtggtgatgaccatgatggtctattgggtgcaggcctatctcaagctaattgaagggcttggtcaaaaaatttatgggtaaatactattttggactctatgttttgcaaaagttattaattggaccctctgctttgttaaatgacaaaataaaccttgtattttctaaaatggtacaaatgggaccatgaattgattttttgtcaaaataaaatttaattataatccgatctaaaagtgttgtgacaaaattgtttacattttctgtatctgttcttattaggaattgttttcaagttgattattaaaaaaaaaattgtcaaaaattaagttcagggtcctatttttactattttagaaaatactgtcatttaacaaaacacagggtccaatcggtaactttnnnnnnnnnnnnnnnncaaaatggtatttacccaaaatttaattgtggtaaaaatttaaaatatagtattttaaaaataatttttttaaaaaatattaaatatagtatcttaaaaaataaattaagtatttttttaaagataataatatatttttttaataaataatagaaaaaatgcaaaaatatggtattattgaggggtttttacaccccacactgaaattttcaacttttttatttttttttgttgtggggtagaattttttcaaaaatactgtgtattgtgttaaatttttactgttgttctacggttattttttagttgttccactgttactttaattgttctgttttgttgttttacgattattttataagaagacaatatttttttaaaagaaatccgtataatagtacaattgtaacttttgtcctaaaattcaatatttttacaaaaaccttaatagatccttattattaaaggtttttttgggcctggttggggccttgcacgtgggcctctgctgcccaggcccagattgggtgaagtaagttgagcagttggacatcatcatgctataataactttgggtgtattgttgatggaacttcaatatcacagtaagtttgatgagcacacctaatcttgtctttgaaccattatttttcatatatttgattcattacttttgatcttataggtgtaactgttttttttttttaaatataatatctacctacaacttttcatgtcaattatctaccatctctcacttagatact

SEQ ID NO: 77194 - DNA, 1245 bp, Cannabis sativa
ttttttttttttttatgaaaaagtgagtttcttgatgaatggttttttgcgagtttcgctctaaccgatcgttgctggatatggacaaaaaacttaaaaattagtatacaaattttatttttatattcaaaatcagtttctcaatgaataaactagtttcgtaataaaataaaatatgaaaaaactaatttcttgatgaaggatctttgaggagaaatttatgtaaagattaaatatggattttaaaaattaaatttaatatcataaaataattttaaaaagataccataaaaaactgtcacatttaagtaaaaaaaattaaaaccttagtgtaaacttcccttagaaaaatagatttcaaagataagatacagtacacaagagccaccaaaaagcattctcaagactcaaaacataaaatcatttcctagtagcagttcaatttcaacaacttattaattataatcttcaaaataacatattcatatagtagtataacgttgcagagaaaccggccgttggcacaaccacgccgttcatattcaaaagagctataatcttgttcaaaatgttcacaaaaccatgtttgcataaccaagtttcaaagactcccatgactttttcacgtcacaaatcaccttctctgcctgttctttctttaacacacaaaccttgatcacttgatcctgttcagcagtgaccagtgcctgttttgatgtagctgctcggccagccaaatcttcaagcatcttactcagacgcgccttcttcgtcttcctttcggttagctgtctttcaaggacagttatttcatgatcaacagcctcaccttgtgtccttattggcaagaagtcagaatatatttgcttcatatctgtttttagatcatcgattttcttttcgttcaattggaccccccttaagtcttttttggctaattcatattgctcacaactttgaataaagtttgccacaaacttggttatctcatcaaccatctcttcaggaaaggcattgctactaagcagaattgaaagtgatttcatgagctcgaaatctaggcattgttttaagatatttcttgcataagtaatttcctcaacgggtcggatgtggtttataaggttagccgacttagttataaaattcttcccatccaattgattttgaatgtcaacaaacaaattgtcgtatttagaaaaaatggtttcttctgattctaccaatatcgacttctgaaacaat

SEQ ID NO: 77195 - DNA, 932 bp, Cannabis sativa
tcttgctgtccacaaggaggaacacaccatcaccacagtagccatacgggcagcatccaatagggaccaaactctcgggcatcttgatgtattaagatctaaatttggatccttttttattatgtaatatatttacatccaggccagccctaggcataggcaggctaggcctaagcctaaggcccacttattttaggagcccaaataatcaacctcggtatcggcaaccaagacgcccttctctgtcaaatgaatcttcaaaccacgactccgatcacggtttctagttgactttttctcaagtgacaatggcaggagaacacttcacaaaatgcgctttgacagcgagcgagatctttgaaattcaatcagaacagcattgggtgagtaagaaataggattcttgtatgagttgcctggatcacaaaatggatctatgatctcaagtccactcgttgatttcaagaaaaccaacaaaatatcttttaaaaaataaacataattttttaataatttttaaaaataccatttatttttatagtaagggctcaaaaaaaattgcctatggcccattttaattcaaggctggccctatttgcataataatttggcacactattagagtaaattttttaacaaaataagttatattttttattttcatctccattagatatgctctaaggccaactccaaggagactgcaattttatatatgtcttagatttcttctccaaagacacaccatttgatattagtctttttttaaattaatgtttatatatatttatcttattagatgtatttatgaaattaagaatttaatttttgaaaattttacaatacatctttctaaaaatgatatactgatatattcctatttgtttcgacgccggatagacttttttagccttttttttttttttttttaa

SEQ ID NO: 77196 - DNA, 1157 bp, Cannabis sativa
tggcagcaagagcagcatgaaaaatactcttccgggttgcagataacttcgatttatctgtccatttagctagctgcagcaaactgtttgtcgatgttttccattccagccaatctttaacgccttgtacacacatgttgctgtaatgacaagtaaagaagaggtgttccaatgtttcggatccattactacacaataaacaagtctcatctaccaagggattgaacttttgtatttgctcttttgttctgagtttttgcaacattatcaaccataaaataaccctgtgtttcggtatagtctgcctattccaaactatcttactccagtttacatccacaggtttgttaaacaataggtcaataccagtgttgatatcatacctcaaagccgcaaaggtttgttgatcaatcttggttgtgagggtgttcttgactgctacgattctcttccagtaccagctgcaatcggttggtggctggtactcccaccaattcttccccatcaaatatacttcattgatccatttgacaaataaattgtcttttttggtggcaattgcccagacatatttccccattgctgcagtattccaatcatgaatgtttcgaaatcctagtcccccagccttctttggtgcacatatctgttgccatgctactaatccaggacctgagttggttgtcatgcctttccaaagaaacgctctacacatgctctctacatcctttagcaatttcttgggcaatattgtgatttgagcccaatatgagtgaatagtaattaacaccgagttgatgagtgttattctccccatataggacaagttcctcgaactccaaactttaatgcgtgccaccatcttctcaaggatactattacagtcagctgcagatattttcttggagcaaattggaataccaaggtacctaaatggaagattggcccttgaataccctgatacttctagcactcttttgacctcttcatctttcattccactacaaaacactgctgtttttttcttcattttggctctaaacccgaagtggaagagaagagctttaacccttgtagcattaagagaatggatacataatcaccatggcagaatagtaataggtcgtcagcaaaacacagatgattaagctttaaag

SEQ ID NO: 77197 - DNA, 707 bp, Cannabis sativa
ctatttgcaaaacataaggtctaaattggtaatcgtacaaaacaccaacattacaaaatggtatgttccctattataattacctttaatttgggttatgagcaggtgtgggaggtgagactatggaaaactgatccttcaaacacaaaggagaagaaatctttgatagcatcatctagggtaacccttttatctaacctgccagtaccagagaatgctaaagaagcaggaaatgctctaatgaagtatgcaaagttatgagtaagaataaaaaaaatcatagaaaacagaattgttcttgccacttgtaaagtgctctaatcattcataatacttttagtctgaacttaaaaatgtttaattcatatgcttctagttcaaaaataaaggagcaaatttcattcttaaagacatatagaacacattttacatgtgttattgtatatggtatcgattctccttcatttatttactaaattttataatggaagaaattagtggaatctataaattaaaaaaagaaaatctcataaattagaaatacatttctctttcctaacttactttcttttaattttaattttattaattaaaaataaaaagacaaacataccctttaaaattatatacttttacaatttagttgaattaaaatattctcactattttttctcattttcttacttatgtaaacaaaataaaataatt

SEQ ID NO: 77198 - DNA, 565 bp, Cannabis sativa
ggctatgcttacacagggctcctattggtcaaggatatggcttgacagaaacttttgctggggctgctttttctgaggcagatgacacaacagttggccgtgttgggccaccccttccttgttgctacattaaggtacagcttttcaattttccaaaaataatcaggttgaattctgattgtaaccataagtttcagattagaatggcctgtggattttatgctggaaaatttctacttgtgtatgttgtgtttattaacacacaagttcaagtattttggcaggtgtgtctttgaatggtccagaattaagtccttgtgtgatcgtaggcatagcttagtggtattacacgtcttcttacaaagagatggatccatgttcaaattctctcttccctaatctcaaaaggaaaaaaaaaataggattcaagtccctgtaaatgctaaatagaaactttgcttaggttctctttcagaaacatatctgtgaattagtcaggaccaataacagttaaatgttactgaagaaatctaattgagacttttaacgtcttctattctgaaat

SEQ ID NO: 77199 - DNA, 505 bp, Cannabis sativa
tgattgctttcaattttcaagagtataagctggagtgtgctcttttctgttcacttttgatgatctcttcactccatttcgtacttctctactgttatcttttttagttttacatgtatattatggctcttttatcactcaatctctttgaatacccgaatcaaaacatttttcttttcttagatgccttagttcttgacaatgttcactattattgtctgcttaaagggttcatactctgaagccttatttgtaataatgttactgtacaatctttagttatatccgcttgtctacattctacttgtatttgatagcctataaggaataacattctctatggtgtgtttgtttttgtacttttgaataataacttacttaaagaaaattgaatcagtttatagtacaatgatccatggacacatgaaaagagcagagtgcttagcagggacttttgaagtagataattgaactaaactttaactatttaaaatcagactttcac

SEQ ID NO: 77200 - DNA, 1630 bp, Cannabis sativa
ctcatttaggatttgaacaagtccttctcattaaaagatcttgaagaagtacattatttctcgggagtagagattcatagagaatttacgggtatgtattaatcgcaaacaaggtatattactgatcttttggtaaaacctcacatgaaaggtgccaattctttgttccaatcctattaaagcttctacctagctttctcttcacgagggtgaccatttgaagatcctacactctataggagtacaattggtgccctacaatgcttacaactcactcgaccagatgttgcttttgtcataaacaaattaagtcaatttctcaagacacctacagtacttcattgggaggcctggaaacgactcctttgatatcttaaaggcaccattagagaagggttagtgttttgacctgctgctgactttacattaactaactactctgatgtcgattgggcatcgtgtgtttgatgagacgctccacagctggctatgtgatctttcttggtagcattaatctaatatcctagttttccaaaaagcaacatgtagttgctcatttgagtactgagagtgagttttgctcactcgcaaatactaatgcagaacttcgatggattacttctcttctcattgaactccaagtttctttgagccactgtccaataatctggattgataaccaaagtactactgtacttgctgcaaattctgtgtttcatactcgttcgaaacacattaaaattgatttgcactttgtagagatcaagttatagataaacaactttcggtatcaatatgcctaccattggtaagtggcttatcttctcataaatccattgtctaccataatagaaaatgctcccaccgtatagacaaaagtgatatctctactaagaagtttctcatatctttatatataaaaaaaaaagtgtaactatctaaagtgattattggtttaacagttttttatttttattatttgtcaattttaatataatatatatgctattatttagtataatattcttagttagtttttaaataattcaacaaataacattttagtattttatttataacagggataccaccacttcttaatcctaatagtagggatgttgttgttttcggtatgtgaagaaattacaattcattattatatgacgataatattataaataatttataatattttattaatttttaaaaaattctaaataatttataatgttaaaaataagtttcaaactgttaattgcatgttaaaaataaacaaataagctataatataagtgctaataataaaaatgtgcccatctataaaatttctcaatatataaacataactgaaaattaacttccaaccatttgtaagagatctattttcttatttaaattagagatctattgactttgaagattccattttttcttttttttttttttaaaaaaaaaaagattgaagattccttttaaaatgtttagtttgtatactttatagtatgcttgtattacaaaacataatttgaaaaagaaaatggcactcattatttattaaatctaaaaattaaaaagttaaaaagcaactttttgttcattatatataatatttcattgttcatcccaaaaa

SEQ ID NO: 77201 - DNA, 511 bp, Cannabis sativa
atggcaaagaaaccctccttacctctcttcctattaaatgagtgaattatctcctgaacaatgacattgttatcatggatatttcttcccgggacgaaggcagcttgagttgggcaaattatagaagggagaataggcctaattctgttcgccaaaaacttcgctatgactttatacaccacattacacagagaaatgggcctgaagtggttggtacgtttaggattctggaccttcgggatgaggacaatattggtggcattgatccctctatgcatattaccgttctcaaagaagtcaagtaccgcatcgcaaaaatcagatccaacagactcccagtagtgcttgtaaaatagaactgacatcccatcaggacccggggctttatgattgttcattgcaaatagagtcctcttaatctcatcagagctggggggagctgacaaggtgatccaactcctcatgggagagtcgctccggaatcaaccgagcgcagttgtactcctggcta

SEQ ID NO: 77202 - DNA, 507 bp, Cannabis sativa
cccacacgatccaacaccggtttgccccatgttctctgccattcattcgaaggacattaaaagtataagtatcttaccaaatgcaggataataaaatagttagtaccaaaaacttgcctccaaattcctttgctgaaccccagacagaattgtgttcacaaaaacagcatccacttcgccctgttaaaccgatacaaatttttaaaatttgagaatcacaagctattgatgctctgatcaatagcaagaaccagaacagtcattcagtcattggaaatgtatgttaaaaaagaaagacaagaaaagaaagaaaggattagtttagtgcctttgattccacaagatttaggtggatttttatattgtccactgttccaggaccaaaatatgtgtctgcgcaaagtaaaatacaaaaaaatctgcatcagaaacagaacaagagggaaaaagaaactaatataaaagcagccatcgctcaagttcaagctaatataaaaagaaaaactt

SEQ ID NO: 77203 - DNA, 538 bp, Cannabis sativa
  modified_base (393)..(397): a, c, t, g, unknown or other
ttgtcaaattaggttataattatatataaaaaaaaataaataacaatttaaaaaatataaatatatgtatataaactaaaaagttagactctctttgaccctgtgtgttctacgcttgtttttgtagccttttatttgatcatctcgattagctatggcaacctgtgagaggagtaatgtaattgtggaggacattatttatgagactttacaattatctgttggggatgaagatgataattgggaaggcaatgaaacacttgtggaaggtttggaaactgtcagtgataggacgaatcatttttaaatgtagtgtaaaagaaattttattaagacagtatttggccaaatttgggaggtctctgagggttaggatgttcatgtgcttgcttnnnnngatgacatcacatttgttggcttcacctttaattatcagtggcttcctaaaatagtttttgacaaagcattatggacttttaagggggggactaatgctttgtgagttgtggccttaatcttggaacttgcgtgatgcgag

SEQ ID NO: 77204 - DNA, 4418 bp, Cannabis sativa
tattttattttatttcttttttttttttttttttttttttcaaatgaagaatagtttgttatgggttgtttaatcgcttaatgaatcgttttcttatgcagtgccgtcaaaagaccatggattttgtggcctcgtgcaagaatacgaagggagggaagatctgcacccttaacgtttgtcacaaatgtctcttgaacaggttaaatatatcgtttgagtatttttaaattttcttttagttaaatgtttggggatttatatttgatgtgtgatgcaaatgttaatgctaagtattgaaataaaattgattaggtatggagaaaaggcagaagaagtgaatttgttggatgactggacatgccccaaatgcagaggcatatgcaactgcagtttttgtatgtaagtcttcgatgttttgcgaggctagtgtatttcactaatttgtagtgttatttattgttgactaaatctaatgcagttaattttatctattttccaggaagaaacgaggtcataaacccaccggtattttagttcatgctgccaaggcaattggattgaattctgcttctgaaatgatactaatgaaaggtgcagataatttgggtgttgagaggagttctaaaaaaactgttgtttcgcctaaaaagtctgttattttaaacaaggtatgctctagttgtctgagtctattgcaaccgtatctgccttgaaattatgcttatgaaaccctacttttgaatattggcaggagtctgagtctaaagttgtatcgccaatgaaacttggaaaggaaaattcttttgatggaaatgctgatgcaaacttggcccctaagaatttagcacccatatccaatgagaagaaaagtaagaaaacaaagagggacggtttaaaggaaattgaaatgggtaatgctgagaaagttgctggggactattcaacccagagtagcccaaaaaagcctaaggtttctacaaaaaagtctgcggatgattgtgttacaggggaaaaaaagctttctaagaaaagggtttcagatgaagtttcgctcccatcaataaaacaggaagatggaaacatgaatgatggtaaagttgtaggaaaagtatccaagaaaaagaaaaccggtaaggaagattgttatcttgtcaaaaagaatgatgttcttgatgatgtttcactccagtccatcaaaccacccgaggatggcatgaagaatgagactgggatatcacaagatgcaggagttttgatttcttctaaagatgctaaggccaaagttcgcaagactaaggcacttgaaatcaagaagtgtgcagttcttgagcaaactgaagttgaagatgttcctctgcctcagggaactctcttaacgactgtatggggttttgaattgtctccggaagatgttggacatgctctgcagtttctggaattttgtttaacttttggaaaggtaattctagttttagttaaacgtgggactgagtattcaccaatttcattttgctattggatgcggcattagtcttggacttagttacaatattgttgtggtttccctggactatttgacataaattttagtgttcatattagtttgatatgcatgctcgcatttacacacacacacacacatatatatataatataaaaattatgcgtgtatatatttttgtcaccctaagtaatgtgattgacatttcaaaattcaattgttttctttaggttcttgatgtcaggaatgggcaagctcaagcaatacttcgagaattaaaccgtggatctagttttcgtcggggacagtactcctcagcaattcggtttcatacccaactcttgtctcttatacaagaggattcaagcgaagagtacaaatctttttcctatgttttcattttatttgttatttttgtacaaggttacatatattttacaaggtttgattgtgaagtaatggatctaattcaaacctgtagtgaaagagtttattgttttgttttttttttttcccaaaaaattctttgcagcagagtagtttaatgatatagttcattttggcatatgtttctgtttaggccctcatccataagcgacaataattcttggcttcaggatttggagaattgcatctctgaatctgaatgtgtatcaaaggaactgtcaacttggtttggcaaaggggtaaagggatatggtagtttggcgttctcaaaaaaactgagaatcttaaattttctttgtgatgaggttctctgcaccgcgtaagtttatgacctttaccggataattaattttgttactgcattttttatatctatattttaaattctgatgcccattttacttactagtacaaattttcccagtttttggtatgattgaatttttatccgttctttcagaaaattgagaagttacattgatgatgaaaattcaaagcttcttgagaaagagaaggagtcgaaggaaaaggttgctgcagcgaagagtaaggtaatatgcaaactaaaaggaagaatcttctgagtttttaggtcactactataataatcagtgtaaaaaatgaacaaggaaattttacaatttctcatttattcatatattttttacactatttcactttcattttttatgggcctctaatactttatttagtaaatgaaaaaggaaactcgatcccttgcaaatgtttccaaaatagaaatcaaagtagttgtaattatagtttttcattttaaatttgcttataaattgtaatgattttacttgcaggagaaactcctcaagcagaagatgcaggatgagcttgtagcagctattgttgcgaaaaatggcattccgctctcagtttcagagcatgaggctattgcttcacagattaaaagagatgtggcagaagctcatgctgaaatactcaaggcaactgacaatgcaactaagagtatgtttttaacaaaaatgatttggctaagaaaatcagccctagaggataaatattatttgattaaaatctcatttgtttgatttaattatcagagtccgtcttataaatttactcgcatgatgatcctttaataatttataggtagaagaaaatgtgatgctgttcgaacagaacctaaattttcggatggtgatggtcatgttttctggaaacttagatgctgtggtggtgaaatagatatgttacaacaaggtaagtttatcttttgagcatgcttcttttgaaaatttgttcaatgactaacttccaaattataattaatttttctctgatatagatatgggagcatctgttgtagactcatcagctgaaaaatggtttgcgtattgttctgacatgaaagaagaaattcagaaatacttttcctttaaaaggtggacacactggatatgcttaccaaaagaaaagcaaaataattattgtttgttgcagttgttgataaatgatttcagacatgctcacaagcatcttacgtttgatttgcagggcaaagtgcattaggaatcaaagtttcactcgctatctaactaatcaaggtaagacaagatataagattatatcaaaatttcacgtcttttatatttgacgccaagtggaaatgagtcttaaggatagtttagtatggaaattaatgcaaaagggtaggctgtttctttactaatgtgtggttttacttggaattcattcgagttagggttgcttctagatgggtctaaaaatacaaaagcctaatttgaactgaaagaattgataaaatattaattttgtttactttcttgacaataaatttcacactgagttaaactaatatgttgttgatatgcaatgcagctgattttagaaactcagaaacagaaatttccgtctaacttgcttgaaaggcacaattgaacttcggtcttcatcgctattcacgtatgtaaatgcaaaagtgaaactctctctttttcctagagtacatttttcttttgttacagcattgattggatagagcagaaggaagtaagccatttaaagtctaggcaacagaaggaactagacgttgattaaatttgtaatttgattgcaatgctgtacagtgtactccctattcattttcaattgctctttcttttgatgcattacatcatgtactgcaggctattttgctatgcaaacagtaaaccttgttggttctgatttctttgtaggaaaatcttgttggctgttttgttattttgaaagatgaggttattttgtttaaaatggatggatttattgcaccggaccaaacctgacaacttgaaatcacatggtggaggggtcctttctttttttcaaaaaatttaatagcagtatttgttatagttttaagaatatttttataaattttttgaattttttcaaataatttaggtgccgtttggta

SEQ ID NO: 77205 - DNA, 1046 bp, Cannabis sativa
  modified_base (1008)..(1011): a, c, t, g, unknown or other
aatgaaaataatggatgtggccccatcatgtcctaccctccatgccataacataacccatcccatcttgttattatgaatattacagctcgatcgatcgatcatcagtacttatatatatatatatataaagatttatatgatagagatgactactggaatctggtcaccactggaccataaacagtggtgttatctttgaatgtatacgaaggcaaaggaacacactacaattcttattgtccatccaccccatatcaaaccacctacaattaatatatatatttatatggaaattcttttctaaagttttttagttttagtataaatgtaggtaataaattttaaataatttactgtgtggaaaatataagtcaaaagttgtgcgtatttgtatattgtatgagtcaacaaattgaaattatttagaattgtcaaaaaatgaatgatatgactatattataactacaacgtacaaaatataaaaatataacttatttaaataccaaaacgctctcttacagtaaatataaataaaataaattaaaatgatgcttatgtacatatatatgaataaattaaattttttcactctcaactattaccacattcaaatcttgctctctaaacattttatgttgtaaaaagtccccaaaaattattcgtacatatttattctagatatatttgtattgaattgattttttaggtattcactacaaatataattgttctcttttgaataagcaaattaaattatttacaaaatcattgttctcttttaattaaaaaaatctaattgttgctacttgttaaaccctagctaattccgttttgaattatatattaccgaatagctagatcgaaatctatatataatactaatttttattatgaagattaaacattaattgaacttatttgaaccaatatacagtagaacctctattcaaacctctattcaagaatacacttgggaccaaaaaaataatattctaattgagaggtnnnnactaaatagagttacacttgaaaaaaaaatcaaaa

SEQ ID NO: 77206 - DNA, 1193 bp, Cannabis sativa
  modified_base (1065)..(1077): a, c, t, g, unknown or other
tttgatagatatatttttttttaagaatatgaattgaaagaaaataattgaaaaaaactaatataattaaaaatatatatttcatgtaaaatgaaaattattaaaatgggatatatatttataattttttgaagtataaataatactcttcttacaattatatatgaaggaaaaaaaaatagagttttacttttgtatctatatagataggggcattaatgtttttggcatatgaagaaattagttttttttttttttcaaatttattgaatatttactatgccaaagcaaaagcttaaaatattctgttacaggcataaaaaaaattaaacaaaacaaagtatttaactcatgtaccttaaattatttaaaatctcttagactctaactatataaaattaattatatagtttgtttatgtaatagtatcgtgtaaatattatgtaaaaaaagctgtgaaaaatataattatctctacccaaaataaaataataataataataataacgcatcctagtatagattaaactataattgtatataaaaattataacttaataccaatgaggtatgaaatatatttattttcaacaataacaataatgactagcgaaaaaacaataacaagaatgtttattcatagaaataaaaatgttttgatatgtcgcacattaattatgactactaacaggattcaagatttggtgaaacttgtgtgtgtttcttctgcattgctcatgctgtttatattactcttagtagctaataatagttttaatcttatttttttgttaattagataaatggtatatttgatgtgatattatcaaaataaattcaagatttggtgataactctcagaaaggtaataaaaacatttttatatatctatgtttttttatcttaaatgtggctttaaattaatatttttgttttttttttaatattacaattcaaatttaaatttaccatacatatttcttttatcttttatctttatattaagtgtggctatatttttttttttattttagaaattaccccatatactatttttttaatttnnnnnnnnnnnnntacggtttgagtttctaaagtagtttctccggtggtttctatgagagttgttatacgattttttgtagcgatttaggttgctccgctagttgcaatagaaatttttatgtagaatt

SEQ ID NO: 77207 - DNA, 872 bp, Cannabis sativa
ctagaccgggcgatggtgaactttatgtggttgactcggtatcgtgaagcaaaactattcaatctggcggtctctccctcagatcattctccactgttcttggatatgttacaacatgttaaaccggctggagtgaatttttttcgtttcgaaaattattggactcggttggaggagtgtgagtcgattattagagatagctggaatcgttcgggagcgttgcaaatgcaacaaaaactctatcaatgcggccaggatttaaaagcttggggaagtagtgttgctgggaatttttcagcaagaattaagcaatgtaacaatgatcttaaattgctcaaaggtcgttgtgatactgaggggaaacaacggtatttggacaccaaacttcagctttttgaaactctaaaccagaaagaaatctattggcgccaacgttcgaagcagctatggctcaaagatggtgatcgaaatagtaagtttttccattcaaaagcttcttctcgcaaacgtaataataatattatttgtttaaaagatgatatgggagagttgaaatattgggatgctggcttggagttaatgcttgattattattcaaaaatgttttcggccctggttgggaagaagtgttgagttgtgttgttcccaaggttgatgaagagcaaaataatttcttagttagacccgttgaaactcaagaagtcaaagatgcattattccaaatgcatccgaataagtctccggggccggatggaatgaatccaaaattttttcaaaagtattggcacattgttggggcggacgtggtagcttgtgttcagatttttttcatgactaaggaaatgcctgtggggttgaatgataccaatatt

SEQ ID NO: 77208 - DNA, 2226 bp, Cannabis sativa
tctcaagaaaatagtgtatcatgtatcaaaatctgtttggctgatattttttcaaaataattttcagaactaaaatgtgttctcacaaatcaacaaggctgattaagtgggtttcaactttacactccaatagattaatcgcacatcaattgctctctaggagtatacttcactgaagtcgatagaggattgtttctacaattgctcttaacttttccctcatggatccctctactgtgtgtaaccttttcgaagaggcagtgcaaatatcccaaagcgatatcacgttcagtctacaccctggggaagtagatgaaccccaagagtcaaacctggtgctgcttgggaaaatcattagtagatataagctaggaaaatcggcaatacagggctctttaaagttatcatggcattccatcaaacgctggaaatggaaagagattgaaggcgggctaatacaattcaccttcacaaacagggacgatgcgttgaatgttctggcaagacgcccttggtttgtttgcggttcccttattgtcataatgccttggccttcttggctgactccagctgaagttcgattcgacaaaacgcccatttgggtgaatgtggaaagcattccaccgttttattggaacttatccaatctgaaggaaatggccactaaagcatcccctgtatttgaactacctaacggcatagaagatgcagtgggattgagtacccttcggttcagggctacgattgatctcaacaaacccatattttctgggttcttcctcaggcgtcaaaaacttaaggacctctggattcaatatcggtatgagaagctccctaaactttgctttaagtgtgggattatgactcatgaccaaaactcctgctttaagccccctacggtggtaaaggacgtagacggcaacttctatcccatgtttggggtttggctcaagagcgacgctcaagagaaatcgaccttcacgacgccattggcaaaatggtttcaggattgggctcttcaaaagcagttggcccgtgacccaatgctcagaaatcaaatgaaggttcacaaggccatccaacatggcgagtctgctgaacttcgagaaagccgtctacaacttccggcgaaaagaagaattgtagaagacaccgagaatccacccgaggaggcaactaatcagaaagttattatccagttacctttggttaatctgccgggtattggagaatttgccccatttggaggtaattccaaaatagcaatcctgccagagagagagatacctgacccaagtgcttcatcagctggcacgcgtaacaacgacaactccatggacaccaacttagttgccgagttgggggaggacagaaactgtactaaggaaagccctccaactcctaactcaaaggggaaggatacgtctcagaactctgaacatgtgggaatgttgaaaaaggatatatgccccctgttaatggactctaaatccaaaaaggttagtatggatatgggcccttcttatttggactcccctcttggtacccaggcccgttgggttgcttcaccctctaaacaattatggggccaccccaaaggaagagagttgtttatgggctcactaactgttgacaagtttcatagggagcccaccctcttcaatccgattttagaaattgaagacttcagggtttatgaacactcttcaggcccaaggaaaaggaaagcttctgatggcatcctccttcatcccatcccaagccaaatcgaagtaaatgacacttcccaggaactgaaaagcaagggcctccaattacccagccagcatattgtttcgaacaaggatattgaaaatccaggtgatatatccaaactctctcccctgaaggaagccacgagttacgatcaaggaacacggatagagagtccaactcccagacgcagaggcaggccacgactgaagagtgaagttggggaagatgctagcagttccaagaaaaggagaggcagaccaccaaaaaataaacaacatttaggagccactccaaaagctttcaagtggcaaaaaccaacaagatatgatagtgacaaagtcaccacgatcaagcaccaatgggaaggtaattcgtttgatctaaaggtgaatctagataaccattttgttgttgtggagaagatatccaaaccgaacccgaaatgtctcattactgagattgacgactcta

SEQ ID NO: 77209 - DNA, 821 bp, Cannabis sativa
cgtgtgggatccgaaaaaattatagagcctatggaggacatcgaggaagtgagggtgtgcgacctcgacccgtccaaaattatccgcctaggaaaaaatctagaaccggagggacggagcaagatcatagacacactaaaggcgactacgaatgtctttgcatggtgccagggggacatgaccggaataagcccccatgtaatcacccatgttttgaacgtcaaccgagatatgcctctggtgcaataaaagagatgcccgcttgacccagtaaaggctgacaccctaaaaaatgaagtggataagttattgtcgaacaaccttatccgggacatgtattacccagaatggttggccaatccggtcttgttacctaaaccaaatgggacatggcgggtctacatagactttaacgatcttaacaaagcttgcccaaaggactgcttcccactcccccagattgaccagatggtggacgccacctcggttttcaagttgctatcctttatggaggcctactcaggatacaatcaaattaaaatgtatattggagatcaagaatgtactagctttaggaccgacaatggggtatactgctacctggtcatgcccttcagattaaagaacgtcagagcaacttaccaatgcatggtcctcctgggacggaacatggaagtatatgtagacgacatgttggtcaaatctagaacgtacatgggccatgcagatgacctcacgaagtgttttgaggtagtccgaagatatgggacgaaacttatgttgggttttacgccctaaataaaactctattttaatgtaat

SEQ ID NO: 77210 - DNA, 923 bp, Cannabis sativa
tttaaagttatggcatttgtgttctttttttcttttcccttgaatttttttctatggactttctcatatacaaatgcatcaagctctatttttgcactcaaatcttccatttttaataaattcaagttcctgcagtaaatcatgctcatgaatgtaaaaattaattgattcataaatctagtagtcatctgctaaagaaaagtgaaaactagaactccatatatgatagtaatgccataaaaatgttaaaatataacccacaactttatctaagtgatcaaaatatgagtacacatagatctcctttgccttagtttccttctgtttctttggccgaataagtgttagttgctaagatattggatttaatgattcaaatgaaacagttaataacacaatgacaatcatggctaaacacacataaatgtaataaaaaaagtaacagaatataacataaattatattaaaaatatacaaataaaattaaacaatagagttatcaacagtttatagccaatcccaagcacgcaataacatatataatccaatgtttttcaacttttaacccaacctctgaaataaggtttgcaattagctgtgattttttatttttcaaaatcaagatttacaatactaccgagcacttgggcgagcaatggacttgtcaatagacaaacaattatcaattctaataatgtcaattcagggagcccaagttgagagaagaatgacttgagtttcttgatgtgtcatctctaagttaccttctctcaatgctgttgcttctctttccatggtgatggcgtcctagaccttcttcagaacttccgagatcgattgacgacctcatgtttccatctcctcctctctcccttcctcaccttcatgcttgttgagaatcatgaggttccatctcaaaacca

SEQ ID NO: 77211 - DNA, 1794 bp, Cannabis sativa
tccagcactctaacccaaatcgaatccaaacaactgcataatcaatccacaatagtacccctagattcaggtagccaagccatttttgccttgacttctttgactcctccatccaaatcaatctagggcctccagaccaacttacccagacacctacataaagcaaaggttggcgaaagagcagagcatagttcaatcctagaccaaacgattgtccgcgatgaagagtgtagagatcacggaaggcatccacaacctgtggtattcatctcctatcatagacctccctgtcgtaagcaagcagtcggtcctcatttaggcaaggacttagcaccttttagtgttgaagctattgaggacatcgctagtagtttgacagagctaactacagagaagtgggccattggtagtagttgtaaccctgtgttgttggccaatgcctcgagacaacatgcagttggggtatttcttgtttctatctttattgtttttcttttttcctttttcacttaatgccctttccatttctgatggtttcctaactggttccagatggctttcttagcggaacacacttgcagggaggtgtagacaatggcagtccagctagacctttctctagccacccagaaggatttggagctccaaattgaaaatgttatgaaagaagttgaatctcactacaaggaggtagaggaggcagccaataaaaagtatttgcaaaagtacaacgattataagatatcctttacgtctcaattagaagcaaaatacaaggcctgtctcaaggagctggaggctaccaatgccacccttaccactgaacgtgacaatgccttaaaagccaaaacggaccttgagaatcaagcagtgtctagaagccttgagcttcagaacaaaatgaatgtcattaagggattagaggcttaggttaaatctgcttagggatttcaaaagcttacaaaagaccaagtcatagctctcaagggtggtattgtggaaaaggatgagcagatcgtgaagcaatctaactccatctaagagcttaaagaaattaagctcttgtatcagcagggccgtgatgatgctttaaaggaggttactttcctacgcaaagaccttgaggctgagcgggaaaagtgtagtgaagagcaagagtcccacaataatgccttaacacgccttgtgaaccttgctcatgtcattctgctggctcgcttccaggagactatccccaacatcttcagtcatgtaggtgaggacgttgaggacttctctaagagagtcaaatctttcaaccattttatcgatgaataccttgaggcttatgacttgggagaaacaactactgatgatgggactgaagcaactattgaggaggtagaagatgtaaaggatgcacagactggcaataattagaggttgtggacattccatttgaaaaggatgatcctcttactaaagattcccctacagtgctgcctacagatccaactatttaatcacatatcccccttcaagtaattcataatttacttctcttttatcattataatctttatacttttcttggacaatttctttcaatgttcgtggacctatttttataagcccggtccgcagagccttcgtttataatctttaagactataactcctttttcttttcgtaactaaacattagataagaaagttaaccatggtttgcatgtttgttagctattctaagtggttaggggtggactatcccatagtcattagataagaaagtgtttatttaaacaaatacaacttt

SEQ ID NO: 77212 - DNA, 647 bp, Cannabis sativa
acttggtgtcaatgaaagatttaagacttattgggcttatgtctcatgattgtcacgctttaatgcaacaattaatccatattgctattcgtggaacatctcaaactcatgtgaaagctgcaatcaccagactttcttttttttaatgcaatttgtgccaaaactatcgatgtatcttctttgaagccattacaaactgaaattgagtttacattatgcttgcttgagcaatttttccctccatctttttttgatataatgcttcatcttacagtgcatatagttagggaagttgagttaggtgggtcagtgtatatgaggtggatgtacggatttgagagatatatgaatatattaaagggatatgttcaaaatcatagtaggccggaaggttgtatagttgaatgttacattgcagaagaggttgttgagtttttctctgaatatgttagtaatattgatgcaattggtatcccaaaataaatatctgatgaaaacactagtaaaggattcggtgctggaactcctaacttcacaaatgatgaagaaatttatttggcacacataaatgtgatagacaatacgtcgttggtgcaaccttacattgagtgagcactataatgagagtaatgtaaacatgaaatcag

SEQ ID NO: 77213 - DNA, 901 bp, Cannabis sativa
  modified_base (717)..(753): a, c, t, g, unknown or other
ttactaatcaattttttcttcatcatttccacctcacacttaataccaaacaatacaaaagaaattaacaatcctctccatccgtcttactccccatcctatctaatttctccatccatcctactctccctccctcccaccaaacatagccttaattatgagttataaacattataacttattatgttatctgagtcattagatctgtttgttacagatctaccttacagtctagcccatacttacaaattggggacttggtgatataattgaatcggagtatttgtcatagatataaaaattagtagcttctacttatagaagttaaatggtaatttccttaaagccttgttcaagaagtttaaatgaaagagatcttgctttagtaattaagtttacaaaagttttatttacaaggaattaagcgttttaaggataaaaatttagtgttgtaaataggggcctgacttttagacacgacacgaaattgacataagcctcagaggcatgagcatgattaggaacgaaaaaatatgggtttggacacaaaaacacaatgctataaattggcatgacatgacactgaaaatatgtgcttaaacacgacacaacacaacacgacaaagctcgaaagacacgacacgttaaaaaaccttaaaatttgatgatgatgatgatgatggtggtgatgataatgatgatgataataataataannnnnnnnnnnnnnnnnnnnnnnnnnnnnnnnnnnnnaataataataataataatgttgacgcaatttttcgttagctaatctaagaatatcataagaaatagaggattaatacgctaattagactttggtaaagtaaaatcgcaaaaagtaaataagacaccaggatttatagtaatttatttc

SEQ ID NO: 77214 - DNA, 3508 bp, Cannabis sativa
agtgccaaaatatagttcaaagagctatttaccactcgtataagaaaacgtagtcacgcgtttaataaagtatttgaatattatttttgacattataaattattcaaaattttataaaaattatcaagtgtccctaaataattacaacttacacagtcataaaaaaaatagattaaaaaactctcctaagtgtcgaacatatgtgtcaactagaatacttctgttaattttatttttggcatctatcaattgaaaaaaaatattttataatttaattatttacttttggctaagtaatttagtttgtttccttaattttgttgaattatataaggtaggaaatatgattaacttttctagttatggaaaggaaggcataaaggttaagtttgatgactcaaccaatttcaatctatccagttatgtatgtttcattctttgtgagtttcctaaaatattttatcagattttttgtgaagaaaaccgaagcaagacttttcttttttataaaagaaaagtttcacttactgctcaagattctgtaagtatagaacacaaaatttctgggctgattgaagaataattttagaaaagtttctaagtgaattgtggtattatttagaccgcgtatgagttatcaataatgtgtatattaattataaatactaagagtgtacgtcagtcagtttggtcgggttataacatatttttattaactcaatataaatatcgagttacaaatatttaatcgtaacccgcccaattaaaaagtaaaaaaagttcaacctgcccaatgattttgtcagtttggtcgggttaacccgtccaaactgttcttcacttttttttttataattataattgttagtttctagtattcaaataattagatataaaaaaaataaaaatatattatttatattttaagttaagaatactatagtttaaattaattttaagaactttaatatagaataaatataattgagtaaacataaaatatttaaatgaaataatagaaaatagtaataatatgatatagattttaaacttcaatttcaatttccaaatacaataaatataatctatgtaatataatatatacacttttattaaaaaaaatatatataaatcggttttattcggtttattcgagttaattgagcgatttagaataatttgtaaaccacccaatatatttattgggcagtttggaatttcattatattatttcggttgtattttttgttagtttattcggtttggtttgggtggtttattcgagttaggcgatttataaattttgttgaacacctttaataaatacaccttgtagcagttaggtcaagcatctctttcatacactttgaattgtattcatatctttaaaaaacgagtctttgttttgtagagaagtggttgttcgtctctttcttttcgtgtttatgtattttgtattatcttgagtatgtaataaagtttacaaaagaagaaaaactacattgctaccttcaggagaaggttctacaagtttgcggcataaaataagagggagtttgagcacttaaaatttcaataagattcgattagaatgtagaacacatcaagtttgcgacgtaaaataagatggagtttatttatacataagtcaattactttatatttttgagatctatctaatgaatcttatctctgggtgtggtcctgtggactagtaataatatgcaaggattattgaactcacgtacaaaacctttatgtgtttttatgtttctatattgtttgtgttttggtttatttggaagttacatagttgttttttgtagttacagaattatgttttctgcactaattttattattttccatttaattaaaaaattaattaaataataaattagcaatattaaaataggtaatttcaatttctttagcactatgttatacatttcctctcatttttttttttttgagtacactttaaatatatattcttatatacaaactcaatagaaatacacaattacacaccataggcatatatatgaaatataacttattttcttttatcatggtaagtgtaaatcttcacatagattttggtcaaatgagattttttttgctagagaacgtttggtcaaatgagattgatatctcaaaataaaatggtgaacatgaagcataaggaaattggagaaaaggcacatttattattcgaaatacatacgctttggatatgaaaacatatggcttcactgaaaatacatataagtaaaaatttaattacactaatacccctaaaaataatattcttttttttttaaaaaaaaaaaactaatttaacaacttttataaaagagctgattacaagaggcatcatatttaaaaaataccaactgctaaaacataacttattttatcccattcgagggacctaaaacttcgattgcaagtgaggcatttcataaaatccccaaataagtatactttctattgatattttgcaaattccaagagagtatgatctttgccacaagccaaaaaaaaaaaaaaaaaaaacaaaaattgcaagagagtattgtccttttttgaggggttgtatttaagagaagctcccataaaaaaacaaacaccattattgttcaaaagtgatagcaccttttttatattcttattccactcatttttttccatttttgtggacttaatttaattatctatgtcggttcaccaagaaaagaaaacgcttttgtcaattctattttccgctacataacaaagaagaaaaaaaatgtttttctttgttgtctaatctattattattcttcttccaattgttatgtttttcctcatctaaccttttacatcgtttttccacgtgttaaatgctaaccactttattcaaataataacatctagcaaaagaaacaaagtcaaataaatttaaaaaaaaaacaaattcaaataaattgacaaggtaatgtgtaaatggtgttttctctttattatctcttcctatgattcaaaatatagtatagtgaaaaatataactcttgtatttatagacaactccggatcattgttgtaagaaatctaattgatgtagtttcatataaatatatggacacttcgagatgtttgttttttctttccgggtagggatattttgttaatacattaattaataatcttatggtaataagaagttgaagaatatgatagtaatgatggagtttagtacaagctaacatatctcttaatattttaataattattattttaagtttttaataaataatattattttacattacaatttttttttttggcaatttattttttctcaagaaaattacactttattattctttaaactcttaaaaaagacatttttctttcttctaacaacaatgaaacttaaatctaagtaatatctttatatataaaatgtaatacctttttttatagagacgtcacgtgttattttataaattagtttaatactaata

SEQ ID NO: 77215 - DNA, 922 bp, Cannabis sativa
atatcaatttcatgataaaattgaaaaaggtaaagatttgcttccaactctttcacatacacacctttcccgggttgccatagagatgccataaggtgtctcattgcatcgaaatcaatagaccttcctgtaagaaacttccctacaaggcaccacctatcgtcaaaggtctgctcctcaccctcaccctcccccttgatcagaacaccttcttcttcatcatcaatctggaaattctcatattgatcaacaagatcacccaacacatgactgctagaagccataacacccgaagcaaacaccactgggagtactcctcaacaatcttaaacgcagcaggaaaacacagcacacacataaaaatctgatcaaaaacaaggacttttcaccacctcatacgtataacacactcaaaagagagagacttttttcacttattctgatcttaatgcatgaatcctaaccatcaaaataacttaaacaagcttttgattcgtataaacatctatatttctatatattaatataaaggaaagtataaagtaggtgaggtagcatcttataatttttttcacttattttatttattttattagaattagtgaatttagtataattttgtaattttttttctttttagcaaaagtcccacatggtttgcagatgatgtgtatgttgtatttgtaagctataaataaagtagtcttacattcactttattttgtcatgggtgattgaaattgaatatctcaatcttgcctaattagttatatttttttttttgaattaattagtgtgtccatattgaaattaaaaattaatataaatagtaaatataaattttgtaaattctaaaatatgtattgtagtataccatttaaatctataaatttcatattatatagttagaaaaataatacaa

SEQ ID NO: 77216 - DNA, 706 bp, Cannabis sativa
aatattgatattaaggtttaaatattaaaaataatattttaaattgatattagggtttaaaaaatggaaaaaaatttgggtgaaataatcaccgaaaaaattgattttgggttgaaaaaccaaggctgccaagaaataggctgcaagcagcctgttcgatccgcacgcggaaggaacttgctgtagggtgaggcgccgagaaatctcgacgggtgtagcctctagtggcgtgccatcgtgtctgaacacgggcatgaccgagggtttcaaacaaaaactatctaatgcacgtacacgcaccttcatcttgtccgaggatctgtgcgtgcggtgtggagctctcgacacaccttggacccaattttcaaatgcccataactctctcattttttatcgaaattgagttccgtaaaaacaaaagttgcttaatttttcacaaagaatctaaataaaatatttttagaataaaaataaaattattttcatggaaaaatttcgtaaatcacatacattcatcaaataacacataaacaacatgaacacatccaaatcaacacaataaacaaattcatcattttaaatccatattacatgaaagtaaatgattaccatggattggaggccaattgttgggaaaattttaccaggatctagatttgctaacaagtatgttgaattaacattctaaatatgaatatctctaaaa

SEQ ID NO: 77217 - DNA, 1846 bp, Cannabis sativa
tttataataataattaattttttttaaattatattctttagttctcaaaaataataaaaaatgactagcaattaattgactgcaataaatatcattgaatgaataaattacctgcactcaaatgtttatatgacatacttttcaattgattttttcttttttttttttttttttgtttgtatacgtgcattttatacacacacgaatatgtaccaattatgattcttcttacaatttctcaaaaatttctatgcaatcaatgtatcattttttgcctagattcttatcgtggcccgacaactgatatggtcatatcacattttgaagacgatgatagaaactttctcaatccagattgatcatctccttccaacatatccgtctcagaaaaatagcctggtggtttgggctgaggcaatacactctcaccactcagcattacaacaactgaagacatattaggcctatcaataggactttgttgcacacacaatagaccaatatggatgcaacgcaatgcttcttcactgttttcgtatgagtcccttaagcacttgtcaataagtttatttgccttgccctccttcatcaatgtccacgcctaacaaattataagaacataagtgttattctttgtttgacatatttaacaaaaattataagatccttcattgaagctcttctgtatttacacttacaaatccaatgagagtaaggccattgttttcatagtaataacctctacttctctttccacttataatctctagtaacaatatgccaaaactaaacacgtcggattttattgagaataggccatcgaatgcatattctggagccatataaccactacacatgcaaaatatttattagtatggataaatagtgtaaacaaaaatgtattgttaagaggatcgacttactaagttcctactactttgcttgtgtttccttctaattggtcaccaccaaaagttctagctaagccgaaatctgaaattttgggattcatttcttcatcaagtagcacattactagctttgagatctcgatggataattctcaatcttgaatcgtgatgcaaatatagaagccctttagcaattccacatattatttggaagcgcttaggccaatctaacatcctaccttgtctttgatctgcaaatgttagtttgtatctttagaacaaaattggcaactcataatgaacattgcatttattataagaggtaaaatgattctgaccaaagatgaaatagtcaaggcttttgttgggcatatactcataaattaacaatttctcgtgtccttgaatgcaacaaccaagaatttttacaagatttcgatgttgaagtcgggcaattagtttaacttcatttttgaactcattgtctccttgtccagaccacattgatagtctcttcacagcaaattcttgtcctccttctaacattccctaaaatattacaacaataaaaataaaataaaagaaaaagtattaattattccaatatgtacatttccaaaaaaacaactatgttcacaagtaggtaaatggtgagtttactctgtatactggtccgaaaccaccttctccaagcttactattctgtgagaaattattagtggcagtacgaattgtatgtagactgaacaatgggagctccaagtcatcttcttggcattcatccctatttataataacatttgtctctgcattttctaatataatcaagcaatgaaagaaaacatgtcagtttcattggtgaatttgatctgaaagcaagcaaaacagctaatgggtgaatatatgtttcctcataaggattttgctttgaccata

SEQ ID NO: 77218 - DNA, 1101 bp, Cannabis sativa
  modified_base (60)..(66): a, c, t, g, unknown or other
accacgtaaaaatcctcatctcactttcttacagctctttactataatcatattttaatnnnnnnngaaaatctcggtcaacagtaagaacaataatagatttgtacatctaaattaatacataactctaaatttatatataagaaattatactgtgtaaggaaacgagagaaagaagaatgaattggattgagtgaaatgaaatgaaaaggctcactgaacaagtgaagccagtcactgtatttatataatgaatcaataacagagtttgttacagagtaaagaaaagttagttacaactgtttgaaaacagaaaaatcagaagaagaatttaaaactaacagctgcgctaactaactttgtatattcctaacacccccctcaagttacacttgggcatccaagtgttaacttgtccctcaaataatcaaattgagtattagacagaggtttagtgagaatgtacgctatttgatagtgagaatccacataacgaacatctagctgattggccaaaactttgtcacgaacgaagtgcaaatcgattctatgtgttttgttcgagcgtgatacaccggattggaagctaaagatcctgcccctagattatcacacctatgtatgggactgtgagggagagtaatgttgatttctgttaagagtgactggatccacgttatttcagcagtggcaagagctaaagcacgatactcggactctgtgcttgagcgagctacaacactttgcttctttgagcaccaactaatgagatttttaccaaggaaaacacagtagccagatgttgattttcgatcatcatagttgtcagcccagtcggcatccgtgtatccttgaagatccatataagaagctggagaaaaagtgagaccaaggttgatggtgccagcaagatatcgcaaaattctcttgcaggccccacagtgagttgtagtaggactcttgagaaattggcttaatttgtttacagcaaaggaggtgtcggggcgagtcattgttagatactgtagagcgccaatgatgctacgatattgttgaacatcttgaagaggctgaccagaattgatagacaatttagttgtg

SEQ ID NO: 77219 - DNA, 571 bp, Cannabis sativa
ggtaaattgctaacagaatagtggttttggggatttacccgcagaaatttaggttgtgggggtttaataaaaccaaaaaaaaaagtattaggaattttaccgccatttatccataacaatatgaaatacaaatcgactagactgcgacaacctgaagaatgagagttgaaaactaccactaggaaaaactataaataggaaaggacacaccacagcttaccgccttaagaagaaaagtagagacttttttatttttacacttcaaaatatttttttttattattatttttataaaattctgcataaaaacttttattgtaactaggactagcctaaatcataacaaaaaatcgtataaactttttgttgcaactatctctgcaactaccttaaaaactcaaatcataaattttaaaaacaaaaataaaaaaataacgaggtaattcctcaagaaagaaacaagtaccttgtggtgtatcgaacatgtaagggatattaagaatcttaggtgattcaacatgaccctttttaaactcctcaactgtcctgttattacataaatcacaaaact

SEQ ID NO: 77220 - DNA, 735 bp, Cannabis sativa
agagattgtttgttaatgactggattgcatcagcagtaaaattgttctcatcccacaaaacatgataatgagctggccgacttgtaccctggccattgaaagagagatatcaattgctgtaggttctaaaatttctaatttagtacttccactgttgaaatatgtcatctaatcaatgtcatctttaggactcgttacttgtaacataatttctaattagaaagtaatgaaaacaaatttatacctgaataccggcatggctgcaaagataaaaatcaaactctgttggatggcagatcttagtatcaacaacggtgccttgaaaaaaacaataaacaattgttagtaaccataacaagtttaaaataaaaactaaagcttcttctagctactaaatttaccaggcaatatattcccactcttgtctgtgctgctcctatctctgtgattattagcaaacagccgagtatgatgtcgtttttggacaactataaaagtgactggcggttggtagttgggttccaaagaagcacaagcctgtaccataataataataataattgttacacctatattctttcaaaataatttcctgattatatattaaaaccttagaaatttctctcacctttctgatagcatcaagctcatacagtagaacttggtaaaattgcccttcactcacaccatccctgctcaccattacatgaaggaaagccatattgacttattagg

SEQ ID NO: 77221 - DNA, 838 bp, Cannabis sativa
tggtttgtaatatggagtgatgttcttgatgctccaaatggtatttttctagtgtccacattagttgttggaagacgaaagcagagatatagctctagcacaatcttacacaatagtaaacctcctcaaatctagctcaacccctagtttgatcccttcttgaatggctaggatttctattaggataggtagttatatcttctgttacaattatgttattacaacttgtaagttagtttctaactaactcagctcttctcattccactgaatttgttaaagcatttctatctttgtaatatgtacatatttcatattaataaaattatagagctaagctctagttttcttccgctaatggtatcagaagttaacatgtgatttttcaagaaaagtcaagaagcttcaaagaactcaaacaatcaacaatggtgagaactcatgcaacccttttagctactaccaatggccttgatccagtggtcgatgccacgtatctatttgctccaccaccattacaaacctcagctagtattacacgggtgacttctcatcgagcttcgaatcaccctgcttcgaataatcgacgagcatatgaaaatgtgtataatccctacttcttaagcatgaagatcatccagggcttgctctaacaattctggtcctcaccgatcaaaacttccagccataaaaatgcaattttaagctttccattggtgcaagaaacaaaacaccattcctcaaaggtactcttccgcaaccgccttctactttaccacttttaagttcttggattcgctgtaagaaaatggtaatgtcctagatcttacattttgttt

SEQ ID NO: 77222 - DNA, 520 bp, Cannabis sativa
taataataataataattaaagtggtatatatagtacgtagtgaacgataatatcctgttattcttttttacgtgtgtatatttcttaattgttgacttttcttttaatgatttttcactttgaattaagtaaataataattaggactataatatatacaattaatatattatatatacatataaattaaatagatagtatataataaagaaaaatttattaaattaaaatacaaaaagagaggttcatgaatcgaaggctgtatggattaggctatatatttaattaataattaaaacagcatattttttaaacaaaaagaataaataaataaataaaagaacatatcaatatactgacggaagtaactttataacacgttgcaactgcatctaataattttaatttattttattattattattattattacaaaaaaaaaaaaaaaaaaaaaacaaaatcatataaaaaaatatatataaacatattaaacacctaaaagaattcaaaataaaaaaaac

SEQ ID NO: 77223 - DNA, 804 bp, Cannabis sativa
aaaaaaaaaaaatctaataacaacctcaattaagaatttaataagccatctaccattaaagcatcaaagaattatgaagtatattgcattcataatagctttttattttattttttgttttctttttaatgattgggtaaattgttatttattaagattgtctgtaaattttttttcaaattatgaataatttatattgcataaaataaaatttaaaaataacgacgcgtttaataaaatattttttttatttatggctcttttaaaaaaaattatttataacaatgaaattactcaaatttttctaaaagtactttcatcagcttttccactcatcaccaaaatctcaatttttctgttttaccttatatttactttacactatacattaattttttaaaaatacatcacaaaaactcaatttttttcaaattttattatatttttcccatttcaaatatataatattaatatatacacatatcctcatataaaaagaattattcaaacttaaaataattaataaaatatgtttagtgtaatgaataatattctataaatgtagagcatgaatagtaaattttaaaatgaagaaaaattttaaaacatagagtataaactattctaaataagtgcaatctataatattctgtaatatattttttaatttggttctttaaatattttaaagcttctctattttagagtatttaatgtgatgtgagtactctaaagtttataaactattctaaataattgcaatgcatgtaatatttttttagaaatagactacaaaattcttta

SEQ ID NO: 77224 - DNA, 605 bp, Cannabis sativa
ctggtactttaattagacctttgaacagggaaaaaaatatcaattaaggagtaaatggaaaaaacagcatgtctctgagaatcttttattcttaccataatagcccacaaattttctttaatttatttgaattcttgacggagaacaaataaaaaaaagaaatgaaaactaaagtaatggagtcgataagttggagtattatcgaaaattacttttgctgcctgaaaactatttctgtacatttattgatatatatcaatgggcatattatatgtaatctttttgatgaacccaaaatatctggctattttgggatatattggttacactaccaatttttttatcttatttatatattttgaattttttttattaaagttgttttgaattattgtcacatatatatatgaaaatctaagatcaaaaatcatatatagtctttcttacaagattaaaaactttattttgattaaacaaaaaatatgaatattgagtatctgtagactgtaattcaggtgtataactatatatttatagaggtgctctatttacttgttttcgtcttcataaagattgattaatattctatttattatactctctat

SEQ ID NO: 77225 - DNA, 2040 bp, Cannabis sativa
atggaacaattgcatcatattgtaacaatttattcttctaaacccttataattaagatgaggcaaaataacatagattgaacttgcattgctaccttatttatgtacaaatcatccatgtatgaccatgccattataattgtcaatttgtcacccttttatttccttttttttttttttttcgttttattcaatttcaagtcacttgtttcatcatcatctttctaatgccattttcaaaagggtttttcctcctttcctttagtttcaagatatatactcatcatataccattaaaattaaagcaaagcatcaaaagacatgcaagcattccatagatttacaaatattcaccaataagtggaaccttttggataaaaaagatttagatgataaaaaggggtgggacgaaagagggagaggcgaaaggcagagattgaaaacggtgaaaggttttttttaggcccaaaattttcttttctcatccaaggtcttgctggacccaacaattcacatgcatattatgccctttttcctttttttttttagtttgtttttatttatttatttttctaccatggctgctccaaaaagaaaaaaataatcttgctggtcatctgccgttaataatatttgacagataaacagtgtgaaagtgaaagatacctttttttatattattttattttttttccttatattattattattattattattattattttttggtcttctcggttaactaaaattccttaatttaaaacagaaatgaagaaaattttacacacgttagaaacagatcacactggacccggaaagtctttggaggttcatgggagagtatctgatgcttcaagaacctacagaaacgttactatcaagataaacctttttcttcttctaattttgttattatatttagggcacttgtctactttcaatttatctaaaaagtttaaaacttagctaaagtgaaaaaaatattgaagttggtaaacaaattagaataagcattgctacgaggcactacagtatttaatattaccatgaagtacaattttataattagttagtgattttttataagatttattaaattatactaataataatattataccaatattaagtatcattttaacatttttcaagtggaataaagttaccaaaaaaaacaacaaaataactcaccaattagcattatttattttaatatatatttgtatttatatatgaattgattgaattatggtctattttattatttattttttttttcaaaaaaaaaaactaaattcttctttttcctctaagaaaaacataatgactggaccatccatccaagtccatcccactccttttaattatatatattaatgaattaatagtttcctatatgtctccattaacgactttagatactataataatatagaaaatttatttactttttcttctttaaaataaaaccaaaactttcatggaaaagctgatctctaatcatgctttccaagaactttatcatcctccaccagaagcccaaaaataatgttttggatactatagctattctaataaaagaagggtctaattgtcacattatagaagttcgataatagaacagttggattgagtgagaatatactgttctactcaatgaaattaagtctcatgaggaattttttttccgcatatcatacgtgtatgtgtccccacccaccctttcaacttccaagttgagaaaacattttttgtctactagtgtatgtatactcataattcattcaccttggcactaatctataagatttggaaaagtgattccactttctcattgataggtacagccataatatgggcaaatataagaatctttacaacagattttggagaataaaactcttgttaactaatgcctaagaaataacagtaagattagctaacaaatgaagtagattaaatatataagaatagattaacagaattgaaaattggtttaacaagaggaaatgttatattatttttaatataataatat

SEQ ID NO: 77226 - DNA, 7152 bp, Cannabis sativa
ttttatgtggcaatttatattataattataattatcatctcactatttttacaaaaaatttcaaataatcacagtgttaatcaaaatcagagtttaaattgtaattattattagttatataccatacgcatacttaatttttatactgtggtgcaactttgaactgtacatttttttaattttatttttaacattataaattattattattatttttaaatacctactatgaatgcaatatatacagttaactgaattagattataatgatttaagtgtcaaaacagatcccttatacaatccgccctctaattttctagcaaagtactatcataaactgtcatgaaaacctttaattaatttttcaactctaatctttgtcaagtgtgagtgtgtgtgattttggttgtaaaatttccaaattttacactggccacgctcagtacgtagtaccaaaagaatgtgttttcatggttttgtagtttgtagtagctgtttttcaactaaattattattactatttactgccttttcccccaaacacgaaccaatcaatccaatcccactggacttcaaagttgaaaaggtcgctagatttctgaaatgactatcatgccctttgacattcattagatgacgacaggagaactggggcccacacacctactccctcattgacaaaactacccttatccccctgacatcttcctttcattggctgattctttctagctctgcccaacaccttcggaagcttctatattttctcttgtgtgtttcccaagttcattggtttggaagtggcaaagagttataagctatatttggtttttaattaatcaaaattattataataatttgataagaacaagaattaaacaaaatcattggtcatatctcagtttgacaccttaaccactactcatggagcccactttgtttaaaggtcaaccggatgagagaatcaggaccctttgatctgtctatttcaacgaatatacatctacatagtggacggttatgatcgcagtttgtttaaggataataatgtacctaatggattaattatgttaattttgaattttagagttgatcagtcgtatgttatgttctagaagttaaaatttatattgcagatataccaacttttcctttttaattcctaacatcttaacctttgaccggaggatagagattgtagccttcttttttttttgtaatctttggtatagcttacaacaaaaatattactgcaatatcttattacacaactttttatttttattattattcttttttaaaaaacaaaaaagaaagaaaagaaaattgataaacgtgaaatgctttgtagttgtacaactaattttatcattattttttctaaatgatgtgatttatggtgtcactatcatactagaggacagacataaatccgggcaagaaaaggccttcacgtacatacatacatggcatggataaagttgcatctctcttgtgtttactatgtgatgatttccgtcacagcgtaatatagctggaattctttgtaatttagttacttatttggtattaaaatatagagtcaaatcgcttcttggaagagttcaatttcgggcttgaaggcttattgtggaggaaaggaatagaaagccatgaatcgtgaagtacaattattatgccttcaaataatacgttccaataggtaaaagacagagatttttattaatttaatttaaccttaaagccattaaaaagtcaaggagggtaggcatgtcatttttctaggaaccaactatgtggacttattacgcgttacccatcaatcaaaacataaaataataccccaaaatccataatataattcaaaaacgagtcgaaagaaaaaccatgctatataaaggagagggaactgcaaagaatgattaacataagtacaaaaacatcaatcggctctctcccaatataaaaaaagggttggaaccctttttcccatttgtctagtttggaattcatatatttttttttccaatcccattttatagaagatcaaagaccaaaaaggttgtatcttagaagtgaagaagaagaagaccaaagaaacaataaaaagattgttgtttaaaaatggcagtcaagaaaagcacatggagatctttagtcacgagttgttacacggccgattgcgcccccacgaagcctaaaaaaactgtaacgaaaacgtcgtcgtttcagagactttctatgtcggatttgagtaatcccagctcgacactttcggaagatctctccatatctcttgccggttctaatctctacgcgttcacatttgccgagttaaaggtcataacccaaagtttctcgtctagtaatttcatcggtgaaggtgggttcggcccggtccacaaaggattcctcgacgataagattaggcccggtttaaaggcccaatcggtagcagttaagaatttggacttggatggaactcaaggccataaggagtggttggtaagtataaccacccatgattaaaacacaacaattttattgaatggttaattaaaaaatatgtatatgtatttgatttgatttctgatgttctttttcatttcctgattaaacagaccgaggtgattcttcttggtcaattgaggcatccacaccttgtaaagcttattgggtattgctacgaagatgagcatagactactcgtctatgagtacatgccaagaggaagcttagagaatcaactattcagaagtatgttttgctttaccaacttttcttagattttgttagaaaacattctcatgaaaaaaaaacccacttgtatttatcacaatgaattaatctaacatgttatttttttggttgatatttacaggatatactgtttctctaccatggtcaacgcggatgaaaatagcccttggagctgcaaagggtcttgctttcctacacgaagctgaaaaatcagtcatatatcgtgactttaaggcttcaaacattctactagactcggtaagtttttattatttttatgatgtttaaattaatttcttatacacattttcttttattatcatattacaatatgctagttgattcaatattaatattgttttctttttcctttttggtctttccaggattacactccaaagctctctgattttgggctcgcaaaagatggtcccgaaggagatgacacccacgtgtcaactcgagttatgggcacccagggttatgctgctcctgaatatatcatgacaggtaagctaaatcatattatataaagaaaaccaattcacatttttttttattaaaaaaaaaaaagtaaaattacttagacatgttttaacattagtattattattgttttcaggtcacttaacagcaatgagcgatgtttatagcttcggcgtagtactgttggagctaatatcaggaagaaaatccttagacaaaagcaggccgaatagagaacataatttagtagattgggccaggcccatgttgatggaacccagaaagcttagcagagtaatggacccaagactggaaggcttatattccgaaactggagcaagaaaagctgcagcattggcttaccaatgtctgagccatcggcccaaacatcggcccacgatgagcacagtggtccaaactctggaaccactgaccgatttcgatgacgtgtcagcgccttttgtatacacagttccagctgagagtaaaaatgaagatggtactaaagaaaatgaagagaataaagaagtaaaaaaggataatgggcaaggtcaccatcataataaccatccacttcaccatggtcataacaggaatcgtataaggtcaccaaactctccaaaattttactcggaaaatggggtgagacagtaccatagaagtggtttgaactctccattacacggtcaccatagagcaaagggagtttagattactgtgattagaaaacgttcgtgacatatactgtaaatagagagaagatatatgtttatttttattattggctatatatgaagtgtaaatctgagttagctcttttgtgaagtaattttttttatctatttttttgaaaattgaaaaatacaattgaattgttcatggaaaatgtgattaatataatatttttttcaacgctgatagactttttcataagtgggaaaacaccaactcattgagatatcttgaaagggtatcatatcttgagaaattggagtgtcaaaatacagcctagcagtttgaactttgaaatatacaacgcggagatagctagcattagtatttttagagtttgtttaaagaaaattatataggaaattttagtgtgtatatatagcatgaggatcaaataggcctgccttggtctgctactgctaggctacttattataatagtaacactataaaaatgaacaacaaacacggtgtcgtttttgattactacaaatataatctacaactctactagcgtttagccgtatctcttggccaccttcgctcttaatttaaatctgcttgcacgatttttttttttaataaactttgcttgcacgattattaattacatgtctgtgtaagaacatttcaaacaattacaaataaaattaacaatatttttttttgaagttgtctgaaggttttatttaaataaatatttaaaaatatattttaaagaataaatgtaaaacatatgttggtaaatatataatctatatattatcaaataaaagacctatgtttgaaaattaatggacacacaaaatagaaggatttactttatttacaattttatttgtatacattgttcaatatctattgtctgatgttgcaattttcattgttaaaaaaaaaaggaatatttacagcataaatattttattttattttttaattttatacacttatatataacatgtttttttttcgacgaattaaatattatatataattttttttgttgcaatttttaatcttagtttcgttaaatcttattaaatctaactaaattaacacgtgcaaattgattaattgtccactatcaataaatatttggatttttttttaattatttttacacttcaaaacaattttttttttttatagaattacatagaaactttcatagcaactaactgagcaacttaaatcgcaaccaaaatccacatagcaacccacatagaaactatcggagaaactactgcagcaacttaaatcgtaaatttaaaaaaaattaaaaataatatatggggtaatttttctaaatattttattaaataatttcaaaattggaaaaaaattaaataataattatttaattataaaataaataaataaataatatatttctagttctttttttgatatttttaatttctactgttatttatttttaaattatttaatgattttttttaaaataaaaattagttggatcaataatatattgatatgtgatattttgcttaacatgatatttaaatatataaaattgtaaatataaaatatttatgccgcaagtatctcaaaaaaaaacatttaatgtattatattcagtgaggattcaaaatattttttctctataagagtttaattattataaaaatataaaaaatattcatgcatatttaacaaaaatatgtataatcacttttaataaatttatttaatttcagaaggcttaataaatataaaaatagtttttttagggcaattttattttatagcctaatagggcaataaaattacaaaaatacatttagtcgactaattatatttttatacaacctaaaaatattttattataaaatacctcttgctcttaaatcctagccgcactagaaacacaccttgaatatgaacccattcaaggcagttggtggttcagcaacagtgaaacaactttggcgatcaaaaaatcactattaattttaacgaatcaatttgagaaaaatgatatcataatcgagaatcaacctaaagtgatcgatcaaaaattttgtcgaaaaacggatttgaaacataaaactcaatcgtgaaaattaatttaaaatatgaaaactaattatcgtaaattaattttatagattgttaagaaaagtaagaagtagatcttgagttttcataccaatccaaatcaggtatcattcaaagtacttaccatgaaaatttctcaattataattgttgcattaacgttgtttttcaaaaaaataatgttgaaaatatcaacatctcgcaatataaggatcttatggctggtcgtaatataaagattttgtagttggtcgtaatacaaggatcttgtggcttatcgtaatataaagatcttgtgactggtcgtaatacaaagatcttgtagctggtcgtaatacaaggatcttgtggttggttgtaatacaaagatcttatttctagtcataatacaaagatcttacagctagtcgtaatacaagaatcttgtacttggacgtaatataaagatattacatctccttgtattacacagctaaaaactcgtgttacacagctagcaatgcatctcctattacacagttaggaatgcataccctcgtattgcacagttacgaattaatgcatctcctcgtattacaatcacaaatacatctcctcgtcgtacacactcgagaatatatcttcttgtattacacactcaacaatgcatctcttcgtattacatagtcgtcaatacatccccttgtattacacagtcatcaatacatctccttgtattacacagacaggaatacatctcctcatattaaacagtcagtaatgcacctcctcgtattacacagtcaagaatgtatctcctcgtattacatagtcaagaatgtatctcctcgtaatatatgctcagtaatgcatcttttcgtaatacaagctcattaatgcatatactcgtaatacatgctcatcaatgcttctgctcacaaataacatagtttgaccgagtcaaagatcactttttgtaatttaaatataaacaattatttacatttatccaaacgttaattgaacgtgaaatgtgggtattaatcatcactactacaatttggccttttagtgacactatatagcgactcgtagaaaagtgcgtgtcactaaagagt

SEQ ID NO: 77227 - DNA, 1717 bp, Cannabis sativa
  modified_base (344)..(354): a, c, t, g, unknown or other
  modified_base (1577)..(1603): a, c, t, g, unknown or other
  modified_base (1649)..(1667): a, c, t, g, unknown or other
ggtgtccttttgatccacgtgtcatacgcagccgcagccacgtattttgagaaaaatcccaggcaacagttatcaaaagtagatttaccacggggtgccagatgcagaagttgtggcacgaacggaagttgttgagccaattttaaatgatggagatgacgagatgattcccatggttgaagatttcattcgaccaacaactgaagaagtattcgaccaacaactgaagaagttcagaccaacaactgaagaagttcaaaacaacaactgaagaagttcaaaacaaccttcacacttttcaatatcacgatgagttatttgaagagattgaagctgaattgtannnnnnnnnnnattggatttcttcacttaactttctagcaaagttactgcatttgaaagttcgtggaaaaattcctataagcgtatttgatgaattattgaaattgttgaatcttatttttctgaagagaaataaaattctatcaacatactacgagacaaaaaagactaaaaaaaattagaattggactatgagtcaattcatgtgtcggagtatgattaatatttatttttatttaaataaatatatattttttaaaattatacaattttattgtttaattaatattcatatatatatatatatgtaatttaaaatttttataaataaccgcacccgaagcgttatctgattactagttaataataatatattaaacattagctagctagatgatttgacattagaaataatgaatatatgacctaataatggctataggttcttcaaacaccaaaacacgaagtgtaataacagtttggagaccatgacattaaggaaggtgaagttggaggtgacctattagacgaacaagaggaatacgacgacgtattactagtattgatcatattgttgttggtagagccagagggattaagaatcgtgagtggcaccatatcttgaagcaacccttggttggtcctttcttcatgggaagattcttgatggtagcccatagaagcactggttgtatccaagcccaataggtccaattcttgggcccattcttgagtttgttgggcttcattgtcttggacatggaaggtgctcttcttgggctttttagttgctgctggattggagacttgtgattgacccgatacgaagaatgggtaagtaaaatgcaagtggagcccttcatatgtgatgatgagtgtgtctgggtcttccattgacctctccacttgcttctttgcattacaccttgggtttgtgcatctgtaatagctcctgttttttcaataatagactcatcaataatcaagacttgataatattgggccttcttttgtaaactaaaaaagttgttggtattctagaaaaaatattttgattattcttgcattacattgcattattttattttaattttagctactccttagttttataaaattatatagtaatttaaagaacaaaaaacagggtaatataatataatatatatagttgagattgtagttaattttgtggttgagtaaagttggcattttgaataataataataataatnnnnnnnnnnnnnnnnnnnnnnnnnnnaataataataataataatagaccttttcatttttacacttcaaaannnnnnnnnnnnnnnnnnntttttacgaaattttacataaaaaattcctactgcaactagcgctgcaac

SEQ ID NO: 77228 - DNA, 912 bp, Cannabis sativa
tatttttataaatatttgtatgtggactgtataaatgtttaatgggccggcccaaagtatttttgtaattttttttccttttttgtatttttttgtttttttcccatttatatatgttattttatttactatttaacatataatataatattaaattaaaatgtaatatagtatatattaatatgagattaatatatattatgtgttagagattaaattgtaatatttgaaggagttataagtttgaaaagattagtaacttataaatcacgtaagtaagggagtaattacttgtggaggtttttttttttttttttgaaagagaattacttgtggaggttatgtgaaggtttttagatattataaattgttacaaaatactataaagtccttttttgacaaagaatcggattactaagaggttgtttggctttacagtttgttgaattgtttttttttaaaaaaatctattttcttcctttattaataaaactagtaaagagaataaaaaaaatagaaagaattggtcaggaaaaaaaaagagaaaatatatattattattattaataaataataatatagatccacttttctctctaacttctcacttctcactcttatcacttttcacataacttaaaaaaaattagaatttataaaaagaagaaaatcagacaaaaaaggaggaggaagggagtatcgcatttggcaaagaaaaaatagagaaagaaataacatagagaaagagataaaatagtcattgccatttgttgttcttccaagtattcaagaccttcaagagtaagaattcattcatgcatgcattcctctttctctctccctctctctcttttactttgtatttgttcttttctctactcatttatggaatgccctcattctgtaaatgaa

SEQ ID NO: 77229 - DNA, 718 bp, Cannabis sativa
  modified_base (278)..(285): a, c, t, g, unknown or other
ttgtcaactcctatatttgtgggatcatggaagttaggatccgtcgccattggatcatgtagctcgattgatgagaacattcttgtcaaaaatattgttagaccatctccaatggaagatataaaaattgtgctgtatttggcacaaaaagtagttttgtggtagatttacaccaaattttagcattgtgctccaatgcacaattgtaaaactttgatgtaaaattttatatctaattaatatttttattaaaaaaaataaaactaataactttattnnnnnnnntattattattttaatatgtaagataattaaaaaataatatagatgcttcataatttaatgccatagttgattatactaataaaaaaatacaaatagtataaatataaataaaaaaaagtagtgcatttattgtgatgtaaattttacatcatagcaaatgttgtgccaaatttggtacaaaatttactatgtgctaaatttacatcacttttggcacactattggagcataatttttgttatatgagctatattttagctttccactacttatttgcatctccattggagatgctcttagccaaatcaaaggtgtaaattggtgttgacaatcgaaactcgtcaactatcctttggtcggattatcaaactatgagttcaaaatttagcgttaagatgaagatgaaacaaaaattcaaacatgaattggtatt

SEQ ID NO: 77230 - DNA, 862 bp, Cannabis sativa
cccaccggacccagacccaaacccagacctgtaccccaaacttgggtccgaggccgagtctttgtttgagttcaagaactagaatctcactacgacccaaacccaaacctgggcttagatcaggacctaggactcgaacctggattggggacttggacctaggacacgggcatcagaactgggactgagacccggaatccgaccccagagacggaccaggacctgggaaccaaagtggaactagactgagacccgagaccgtgatccacatctacactcggggcttggacctgacccgtagtcagtgtttggatctaggacccatacccggacacaaacccaaacccagactcggacccagacccagacccgtaccccaaacttgggtccgagtccgagtcttggttagagttcgagaacgagaatctgactacgacccagacccaaacctggattgggacgcggacttacatcaaaactcggatcgggactcgagacacgaacgcgaactgaaacacagacttggaccttgacccaaaccaggattggagactcaaacctagacccaggacccagacctagattggggaccaaaacccaaaattagaacaacaattaggacccaggactaggactgagacccaagacctaaccccggtcttgatcccagacccggacccagacacggacacagaccgggacctaagatttgaattgaaatgagactgggacccaagattgggatctgaatcttgaccaacgacccggagcttggaaccaacccgtcgtcggtgtttggatcttggaatcataccaagacccgaacttggaaccatttccagaccaggacctaaaccctgac

SEQ ID NO: 77231 - DNA, 981 bp, Cannabis sativa
agataatagcaagagacaaggctcatcttgattcaccctctcttattattacgtattgaataagagcctttattcaacgaaggtcttcgtgtgataggatctctcgtgtgaatgagatcatgtgtgcgataggaagaccccctccttgggtcaggatgtgaggagagaccccctctctgtgggtcgtggtgtggtacgaagagacgcccccttgttgggggctgtggtgtgacacgagaagaggcccactcattggcgtcgtggaatggcgtgaggggcccctcgttggggctcgaggacccttcttcgtctttaaaattctcgtttcttatagcccaagctttcgagcaagttttttcttcaatcgatcaacataagtaatttgggaatcttggtctcattaatgcgcctcattttttgataattagagcattaatttctcgtatcaaatatgcattgaagcacaatagtaaaaagtgcattgaatatagcatctactaattttttgtgccaaatttagcatatattttacctcttgcatcagagatggtctcatgtactacttttttgttttttattttagaggcggagatataaattatacacaatcttaatacacacttatatatcaaaaaaattaaatcaattgtctttatttaagatggatctcacttattaaaatgacttcccacataaatctgtctaagtttgtgtataatttatgtgtgtattttattattaattttagattaaatcagttaagtgaatttttactatatttataagtaaaaatatcattatttttttattagaaagctttactttataaaattaaacacaaaactaatattagaaaaaataaaataaaatgttacttcattatcagactattcttttagatggacatcatttttgtttacataaagacatttatattttccatacataaaagaattataaaccaaacgtgtttatataaaa

SEQ ID NO: 77232 - DNA, 4508 bp, Cannabis sativa
  modified_base (2520)..(2532): a, c, t, g, unknown or other
taaaatcaaaaaaattgtaaaaatgtttaaaattctgtgaaaccgtatttttgttgttttttgttatttttgtgcatttgtgaaattaacccttgatattaatgagcttatttaagaaaaagcccaaaacatatagcccacttaaagaaagggcctaatcttcattctcacacattaaaagtcatttcactctctttccctattggggagcaaaaggctatcttgatgaatatatattatgataaaactaagctagatttacaatttcaatatatacattatctaatttcccaatatctaatccaaacatatcattcttattatgtgcaattaatgaattgagacagtccatttttatttttcccttctaaaaattcatgacaaaacacttcaatcttcccttttcaaattcatgacaagaaacttcacttcacaaattattatatttgacaattagtccaaattcgacaatatattttgtcgattaagaaattaattaacatgtgcatatatatgcatgatatacaaaagaagcatcctcttttaatgtaataaaaaagtattaaacactactgataactaataataatactgtatacaaatggctctgcttacactcactaataatattgtgaaaggtgcaaagtctccatacttagtcaacaatgaaagtattggaggaagaaaaagataagaaaaaaagaatgaataaagaaggaaaagcaataaaagtttcgtactaaaatgaatggtttttagaagacttgaagtcataatgtccaatatctttattatacttagtacagtactgttggaccaaaggcttcttttgaaatattaaccacatattatacaaactcataatgaaaatgttgaacttatttgtactgtgttgtttgtttgtattgcaaatgtgggtatgtatgtatgtatgtattacacattgatacaattaatggaataatggaatttggcccaaaataattgattttggtttattgtattgtcgatacatttatcattattattattatgacatttgaaagaggttatgttttggagttactttaatgaacctttttgccgaggccatgacttctgttggcttcaatttttgaagacattacatcgaaatgtgtcttttgcgtcggtaaatactgaatagtgttaaccaacacaattgactttggttcgagttaggtagttaacaaccgtgttacttataatttaagaacacaatagtgttgttgaaataatgtgtttcattactctcatatatgtcacttataaaccgatcctatatataatgtcaaatgtgttggttaagcaatgttgatcgattagtggccatttctccaaacttaatccctagagaaggctcttttaaaatgaatgtggatgctgcttcgattccaatcaatgtaaaatgggatttagaacagtagtttgaaattatcagcatggtaaatttttagaaacttcgactaatttgtatacgtataagaagattcaaaatttatagttcatagacttaagaattgcaaaacattactcaattctgtgtgatttaattaagaattacaaaactctttatttcatttccataggtttattctttccttttttaccgagacatgcggaaaaacatggcaataatttaacaaagaggagcctagggcaagataaagagttaattagtgtgcttgtaatctcacttgttctattaatgaaattataaatttgaaaaattaaatatatatacatacaagtttttataaatatttaataaatttcaagataaatttttctttgaaattttttaatatgacttatgtttggtatggaagaaatgtggaaggagggaaaatgtagaagagaaaagtggaatgaaagaaagaaaataaaaatgaagaaaaaaaagagagttaacaaatattttgaatgtttctttcaaaaaaaaaaaaaatatattttgaatgggtccaccaatttcgttcccatcctaattgggaagaaaagtaaagaaaaaaagtcttctataattaaaagagaagttttataatttgcaccaaacaattaataaaagcacttcaattttaataatttttattttatataaaatatacatattttttattaattataaactttattttaattattaagacaaaagatttaaaataaaaaatatatatatacaactttactcgaaagaaaaattgaaaataatgtaaaaaaaatttaaaatatatatattaaaagtaatttttaaaattaatttaagtttattttttcttttattgggatgtatatgtgcaaataaaactctcctaattataatgagtataaaattactaaattattttttcctacaaaaaaattatattaattatataaaaagaaaatataataatttcatattaattcattttttcactcttcttacacctaccaaacaattatgaagacaatatattttcctttctatctttatgcaaatgacaataataataataatannnnnnnnnnnnntaataataataataataaattcagatataccaaagttgtcccataaacatttatgatcagtatccatgcatgcccatctaatcagaattggagaagtgaagttattacttaatagtagtatagtactgttgaggcatacatgttatttagggataatcatcaaataatatatattaaaaaatgctatttaataatatatatttatataatttgtaactatatgaaaatctatatatacacaataaataacggtaccaactaatctaacacccaaagtagggtcccctcattacccatctcaattaataataccaatattggaagcttaatttgtgaaccaacttttggccccttctacctctttcaattttatttttcttttattatattttatttataattaaatgtccaaaagattcaatacatatgaatagaagacctgtccaaagagttttttttttttttttcttaaataataataataataataatggaaaatatctctaaaactaaaatcaaaataggaaggtaataaatgagtgtagtgtgggagcccccagttcctgcttatcctcttttgtcaaagataacaagtatttatgtttttatttggctcattgtgtgtgtcaatggtcacttattaatatagagtttctagtttctagtaactatacctatatattaatatatatttatttatccatatttctgtagtttcctatatcaaataatttgtaattatataattttattttattttttttaataaaaataccagttatttattaaattgaaaaatctgttataagtgtggcaactaattcaggagaaagacagtgctcttgaaaaagtataacctggggaataataagaagcacgcacaagaatataagcggctttgttagcagatcacttaataaaacataaagaaacatggctagaaaattttaaaaaagacttttacaatctgatgaaacaaccaagtcaaattgagacatcatagaaataaaactagaaataatttgaaaacaaactaaactatctgtctccaagatcacatcaaaccacgtatgacgaacactccaagaaattgctagcactatcatgggcaacacaactcataccgaaccaaccttcatgctcaaagagtgcaccgtcaacattaaccttgatctaattattcactggtggaatccaatgctcacttcttttattagtagtcgaaactaatgaacaaagaatcattttgctttgactgagcattcaaatactgatcaagaacaccttttgctgactgaacaactgctcaagaagaagtcgacttcttatcccaaactaccttgttctgagctgcccaaattctccatgttaccattgcagcctcctagagcatgttcactccaaccttgcctgataaatctctccaccatgacttaaaatcagtctcaccccagcttcctatatccactgatgatcgaaaccagcgagaccgagcaaaagagcaacccaccaatacatggaaagtagtttcaacactattattacacatagggcaggtagtacttacgacaacatgtttaatcgcaagttgatcacaagacggcaacacgttggtctcccaaaggaatacagcaccttctggggaactttcaaactccatagctgcttccaaaaactagaaacatcatccgttgcaggaccattattcaactcatctaagtacctataggcactttttaccgtgtatatagccgacccctcaaaggaccaaaaccaaggatcatctcaaatagaagaactcaattgattagaaaaaataagctcctgatcacaacaagttgcgagccacctctatatcccatgcccgagagtccatcctgaaaagagaagccaattttttatcacctaatagggctgagtatcggtcggtttttttctatataaaaatccaaaattcagttttcggtctggattgg

SEQ ID NO: 77233 - DNA, 752 bp, Cannabis sativa
gtttaattgtattttaatttttttgagttttgtttaattttgttgggtctgtgatatgagaatatgcttcggcagtggtggtggtggtagtttccgtggttgtgaatggtggtgttgatagattgaagaagaagaagaagatgatgatttttgggttggagtttgtgggtgggggtttgtggcttaggggatcacggggttagggtttctgggttcatggctcgggggatcatgaggttggggtttctaggtggggttccgtggctcaagggatcacggggttggagtgtcatgggtgggggtttttgggttgccatcgggttaagggaagaagaagaagaagaaagaaaagaaaaagagaaagagaaagaaaaagaaaaagaaaaaaaaacataaaagaaaattaagaaataatatttttaaaatatttaaataaataaaatgatgtagactaataaaatcatgccacgtgcacatattgtcaagtttatttggtatttaacagttaaaaactaatagaataagtacagagcaaaacgattatagagattaatgaatttagtctaataatttttagtctagaggttgattttgtcaaacttcaaaattcatgaattttggccacaaattatcttatattttaattgaacattcaaattaagatatatagaatttaatatatttttttttaacaaatagaatttaatatttatgtacactaataataatatataaatatagatacactttag

SEQ ID NO: 77234 - DNA, 632 bp, Cannabis sativa
tggtcttactaactctactcatgcattgttacgggattgtcctctcagttgcacagatatatcctaatattaatgagccttagtccatatacattgattcattcatttcttgactaactcttacagccaatgtcttttaaccgttgggactaattgttgactaatctcgaaaatcaactttgtcaatttttggggttaacacttgcccccagtctacaagaatttttttaagtgtacttgtcggctgagtgagttggagaatctaccttgacgcagtgtgagaccctcttagttttcttcgaggcagtgccccctttgtattggggcttccctttcttgaaccttactttgcatcaatatgttagtgtaagggattttccttaccttggttggcccttttttctctcttccccccccccttttttttaccgagcgatctcatccctcatgcagtcgagcaacaattttactgacattggctgaatgactctgagggtcgttctttggcccaacaacttttgtaactggcgttggctaagcgactctggggtcactctttggccaagccatttttgtaattggcgttggccaagtgactctagggtcattctttggccaagctatttttgtaa

SEQ ID NO: 77235 - DNA, 582 bp, Cannabis sativa
aactggaaaggtacaattttgaatcacgttaccatatataagtaatcaaaattcaaaatggtctttaattgaatactaaagtattaacttggtcccaagacaaacaacaaagtacaaaactgatacaattgaatagagaatataggattatcactaaaaaaaataatattaagcaactacagtactagtatgttttttagattcctaggatttattatttgtttaacagatttataaataatattagtggtgttcgttatttttcagatcggaataaaattatacgtgtttagatttcctttctttaaaactgttgctttctcttttaaaatcatcttttatatccattgttccacttcactctaaatttctcgttctatcaattctttatatttttccctaatttctacatcagtttatgacactacatatatattatatatgttattgcttcatgatcaacaaaatcttagtgcagttatccaagaaaagattgcatttagctacatgaacatgcaacttcataagcaaaaccaggtcaatcctaggtaaagttttcacttagggtgcgtttggaaagcc

SEQ ID NO: 77236 - DNA, 800 bp, Cannabis sativa
tccctcggttgtgtttcagtgaaggtggtcttgttcatcttctcggttggatagcggaggaggcctccgccaactccttaactttacagagtaggaggccttcaacatcctctcgactttccagcgaacgaggccttcaacatcccctcggctttgcaacggaggagacctttatcatctcctccagctttacagcggaggaggtcttcgtcatctcctcggcttcacagcggagaatgtcttcttggcgactgtcaacgatgtagcattcgttggttgttctttggtcaattgaggatgtgaccaactcttgaattaatatgcccaagataagggtgatgttttccccgtctcgggtgcaccttagaatgattgcaggtgcagtctccattttttccttgttctttaaccttagaggtcttcatcgtccctttgtattcacaatggaagaggccttcttcctccccttggttgtcttgacagcaaaggtggtcttccacttccccttaactattcttgttatctcgatttttgttcacctgacgtggcatgtctacgtggacgatatcagcgccacgtcgcagtacagttcaccaacaagaaggccaagtcatctactcagcacttcaaccaacggggagtcccggcactcaaacgagatgacgaatgacagaccagccacctcaaggaggctggccggccagattctggacagcacaaggtcggtaagcttgcatcctgcaggtgcatgatttgccagaacttagcctggcaggactttggtgtacaacattacacgt

SEQ ID NO: 77237 - DNA, 548 bp, Cannabis sativa
ccaatgtagtttccttaaaagatagatggcacaaacgtttgggccatccatcaaatcgtgtcttgagtcatgtgttgagttttatcaatgtaaaaactgctatgaatgaaaagaaaagcttctgtgaagcatgtcaatttggaaaatctcatgctcttccctttactactaatcctgaccgtgctaaacacattttagacttgatccataccgatgtatgggggccagcacctattacctctagcagtaactacaaattctacatccactttgtggatgatcatagtagatatacttggatttaccctctcaaaaccaaagatgaagctcttgcagcttttatccaattcaaaacattggttgaaaaccaatttgagagaaaaattaaaacattcaagacagattggggaggggaattccaagcattttcgaactgtgtcattgagcatgggattgattttcaacattcatgtcctcatacctcagcccaaaatggtagagccgaaagaaaacatcgacatattgttgagatgggcttgacacttctt

SEQ ID NO: 77238 - DNA, 828 bp, Cannabis sativa
ataatatataaataacaataacaaattattatcattataatattaatcaatattaatattttacttaaaattgttctcaaatattaacattgtgtatatatattaagtatatataaaataattatacgaaatagttttgtttgaattgctatcgagatttataaaatcgtgaccgaattaggaaattttaaatggtctggatggaccaaatcattcacacagattaatcatttagtccggtctcaaatagtttagtctcaattaatttaagtttaacatcacaaattataaattatattaacacccctaccaaacatgatcaatagtatagaaagatgcttcttcttcatattataaaagatgtcatcactataactaaaattcgcaatcaaagacccatcaaaatattgaattcaaaatatatatatatgtatatatataaatctatatattcaataatcattataattgctataattatcaaactcgttgatttggaaattaacttcagtaattagagatttggaccaataaagataatacataattccaaatacagtaataatataatttctagcaaaaaccactgaatttacaaataacaaccgagaaaaactatgtacatatttttgagttttcttctctttaaattgtttatgtttgaatattgtgtaaatatatatagttttgaaaatgagtgtatatatattttctcctttttttttttatcagagtaaatatttttgatgtttcttattataactatatatcactctgtgattattttaattatttatttactaatacaatataggaaaggtaaaactc

SEQ ID NO: 77239 - DNA, 1715 bp, Cannabis sativa
ttttttttttaatatttttctctaattacttaaaaaatatattaaattttataatatttaaaatatttattatttgatttttttatataaaaatagagatacatgtccaacaatgctggacacgaaattacttcacgtctaacaatattggacttgaaaaacttcttctcataggtcccattatcacgtccaataataaatatttttttagtctaacaatattagattagaaaaatatctatttaatgtcttccgatataatattaaacacaaaatgaactggaaaaacttatctagtccatttatgatggacataaaaagaaattttagtagtagtatttcctttaccaaaagaaaactcatagcggtaatatcacatgataattaaacgaatatcacaatttttttttttggcaggggagaaagtttaggtaaaatctcataacaatataatataaatgaacttgaaattctaattaagctagtatttttctctccttactgggtcaggctacgtaaccccaacaatctcactcttatttatttatttttttttgagagaatcctactcttattttttgtaatcttcaataactaatttacagacactgaaaataagatttaatgagttgtatgcactttgaaaaatgaaaaataaacatgtagttgctgttgaaccattttgttgacatggtgaattgtttagttgtattcaaatactaatggattgactacaactataatgtactaaatatatttttagcagtgttttgaattttgtatgatgtattggttagtatatgatcattggactaaagatagccaccaatacataaaatataaggtacaatattattcttatacacatatttgattattttatacacataaactactactacaagatttaaaaaaaaaaattactacaaaatatttaatgtaagaatctgacatcttataactatgcttatgatgccttaaattattgtgcagacaaaatattttaaatgacgtggcttaaaaaaatatattatatggatcatgtttttcatttttcttttctactttttgtaggggatcatgtttttctctatttaccttttttcctttttgatattaaaagaggagtatgacttctaataatatgcgtgatgagcactcatgatgtctacgaattgcaaactatgggacaatcatatacagtacaaaacacaaattgtagtggaaaaaagaatgataagatgataattgtagagggtggaaaaaagagagcttcttttaatgcttatatatttctataaatatacatttttttaataaatatatagagatatacttaggtgaatgaaaaaggataagaggggattatataaatatatatccataacatcataattgacaagtcatttttgtctttttgttttggtttttttttttcctttaagtttgttttttacttttttttttgttcaattttgtttttaattctattttttagtaaataattttttttacttgttattggtattttaatatgtttaatgctatattaataatgtgctcaatgccatattgatatgataccattttttgtactcattttaaatttgttttaattttattttttggtaaataatttttactcttaatgtacttaatgtcatattatggtacttactaattagtttgtaattttttttgtggttttttttttt

SEQ ID NO: 77240 - DNA, 604 bp, Cannabis sativa
atagaaacaggtgttgtgttaagggtccttacaacaacaaaaaaaaagtgttgtgttaagagtatttgtttaatttaagtgaccagtagtggttttgtcttttatctccatttggctttattatgattagtttaactagacaataatggcattaggtgtttacaattattaggttctggtggaatgtttggagagaaatggagaagatttttctcgaaactgaaataataattatatagtaaagttcaaacaagggctgtttttgctcagtatagatggttgctaattattatataatccataaattatagatctgaaaccccttaatttgatgcatacaaaattatatattattataaagtagataaagacgaacccttgatgaaatcatatataccattaatagaacaaaatctctttatcaatataaaacacaaatattaagtgattaataaagagccgatcaaacaatataaaaaaggtgtttctatcggtagtttggtaccttccgtttttatcttcacactctctttttaaattgattaatatatttttttaaagtataaatttttataaattaaaaaaattacttattaatttttta

SEQ ID NO: 77241 - DNA, 552 bp, Cannabis sativa
tttgcaagagtaggtgatcttgttgagtgagtgataaataactaacaatcagacctaattaacgatttgatgaaatcaataatgtttatggatttaatttttattttgacgagaaaagttatttacataatctattgtagaaagtttagtgtgactttccaacttatagtatcaaagttaaaacgtaaacgttaacgtttgaataatcctcccaaaacttcatttattacatggaatggtatatgagaaataaattaaaaatgatatatgcatgcttctcggtagagaaattctaaacaataattatattgttattggtcaaatttaatattctacttgttttattttgataaatattattaaaaattgttatatcaattataaaataacaggtgaaactgaccactctaactaaaattattaagaccgatcttaaggtatttggaataattttttttggactttaatttatgtacaaatactatttggtctagtaatattaaataaggttatttggtatattagtaaagatcatttaaaatttaaggagat

SEQ ID NO: 77242 - DNA, 720 bp, Cannabis sativa
  modified_base (306)..(317): a, c, t, g, unknown or other
atatatatatataaatatgtcaaaactcaaaatgaatcaaaatagagataaaaattagttttgataccaactgttaatattattatataaaaaataaagtatgtataatgtaatgaccgctttagtaaattggattagtaaaggcaattaacactaatttctgttatttttataattatttatgaatttaattatttgtggactccattattagaaatggacattagagttataatttcttaattctggagattttattaaactctaagggtattatttgacttatatgtgaattatgtaattttnnnnnnnnnnnntcggcgacaacggaaaatgtgatggatggctagtttgatcacatgggtaaatttagaaccttatttcatagtggaatttatattggagaaaataaaataccgaggttaggcgtggttatggaatttgaccattttacccatagttttgaaaaatgcctaagtcataacctaaagggtattttagtaatttgttaatgaggggttaggtggctgcctaggttgttgacacctagcaagttttatttcagcaaggaaataattaggaaaatcctttttgcattttgagaaaaaccaagaaaaacctaaattaaagagtttatcattctctctctctttctttgttcggccaacccaaaaaccagaggaaaccatccaaattcttctcaaattctgaaatcaagct

SEQ ID NO: 77243 - DNA, 3208 bp, Cannabis sativa
aaatattgggtacttatgcagctaaaaataaacgtttatgccgcttacaaatataaaattttagatacttataccgctatttgaatgagacaaataatcctacgtgccccaatctcgttacacctatgcagttcttttgtgttttcaacatttaattttgagtataatttaaataaaattacatacgttagctattttattttgtgtgtatgaaactatatatatttttataattattttatatattattttttaatttatcgtgttttttatgtagattgttatataagttttagctacaatttaaattttgattacaatttagatttaagttaatatgttagttgctatgtgaatttttataaaaatataaaaaaaatatgataaattactttgaaaatcaatttttcaaaatttactgtaatatacaagaaattgaccatctatatctaccgaattccatttctccttcaataaattcccgccaatttctatatactaaaattaaagagcaagaattccctccaatttaccatcccaatagtttataaacaaatcgaaaatcaaaatcaaaacctcccaaggcacggcagccatggaagttgcaggtttacccatctcaccgtcgcagcgaggcaaactcatatcagctggctatactactatatcctcccttacttccctctctccccatcaccttgctcgaggtaacctcctcttccctttcataccatcgacgcaccaagtgttcgatgaatttactatgtgagatctcaactttaatagttttcttcgatatgccaacaattccacacctgggtctgtactgctaatcctaatttttaaactaaatgagttactattgaaaatgtcgaatgccatagccccgcctaatcctatccattgatccacggtccaccctatccctagtcaataatggtccataatttatttattttttcttcattacatgagctttagcctttctggtcccggctttttaatttaccgttttaatgatacatacttttttttagcagaccttaatattcctgaggaagaagctgttcaaattctgggggcagcagcatcacataatagtagattagacactagtgatggaggccactctatagttaatggtagttactttctttggacctcatttagttctatcacgagcattattggttggaaaacttatgtaatgtttagaaaatggatttatcttagtttagtttttatagcaagagcatttgaacaagtagtctccatttagagtttagtattgactattgtcaagttctataggcagggcagagccagaaattttgatccgggcaaaaactgtattttggttttttgtttatatgaattgcaataatagtcttccatgtatatttatgctttgcattatgggctaatatatttgctagtaagcttcttttttttggatcaattatttgctagaaaggttataaggctattaattaagcctatcctatttataggactttgataattttttccccatagttttagccccaacttgccttattcgtcctccgaccctacttataggtagtagttattccttcatgcatatttcgtgctatgaaaattgatgtgacaaatggctcggcatgatttgaattcttatatctcctcattgtgttgcttcaaatagtgtacaattttagtgtaaaagtgttttggggtttagtattactcttaagatgatgcttaaatggtgtgacgccttcatttttcattctctcttaatagacactagatcctttaccgtcaactacaagcattcacaaaaactggggtataaatttctgtcactgttttatgctactaggtttgctccattatctcattgaaactaaatggactttggtgtaaagtttgggacatatgaggtatgctaaaaagatttatgttctggcttttgggttgcaggtgcacagactgcatgggacatgtttcgggaggaacagtcttctctgcgcattactacttcttgtgcagattttgataacatccttggtggaggaataaactgcaaagaagtaactgaaattggttagttactgttgtctgcttcttttacaattataaatgttccacaatttgttttcatgaatggagaatctttattagatatgtttgtcgtaaatacttataggtggagtaccgggcattggtaaaacacagttggggtatgaattttttttgtttatttgtttgttagtttttaatgtttgctatagggagttgaacgcatgctttgatttacaggattcagcttgcagttaacgttcaaattccaatgggtttaggtggccttggtggaaaggcagtatatataggtcaagtgtcattgatctgttctttttttttgctatgattttgagttccacttcatattttgagtattatgcttgcatgattcttttagatacggaaggcagcttcatggtagagagggctacacaaattgctgaagcttcaatttctgacatgttggaatacaacaatcatttagctaaacaaaatcgtgtgtgccaagtcaaatttaagcctgctgatatcttggaaaacattttttattttcgagtctgcagttacactgagcaaatggctctgataaatcacttggaaaagttcatctcagaccataaagatgtaggtgttttaggcatattcttactctttacaatattcacaggtttttgtttttgtttgttctttctgttggaaagattgaaattaatatcttgttataacactttggtttgctgtcattttcttacttgggatctattttactgttgtgctattatactaaacatggtacattgatactaattttatcttgacaaactttccaggttaagatagtcattgttgacagtgttactttccatttccgccaagattttgaggacttagctctcaggactcgattacttaatggaatggccctaaagttgatgaaccttgcaaaaaccttcaatgtagcggtaatgcaatgaaatcattattatttctgaatagtttaatgtcacactttgtgatgtgaaacacttcattcctgacttaatacagcttcctatatctttaagcatttagctaaatggtttttgtttatcatggtttgcataggcctagcattattaattgaagtgatcattgcatctga

SEQ ID NO: 77244 - DNA, 1433 bp, Cannabis sativa
atcctttcttaacaaaaaaaaaaagcaacaaactgccggaaaagaaagtgcagtaaccaaacaagaaaaaaacagtagagcaaacaatcagccggcatccaccctccgacttggttgggaaacttaaacaattagacgcatcaaaactcccgaacagatgagattgaagagtcctttgagccacatcatgggccacaccattgtggatcctgggaatccagctgacctcccagaggtcaaagttagcagcctaaaccgtggaacttggagactatgtcttggatattgtaatttaagtccttaatggctttgttgtccttcaaaactacagcgattgccccagcagaatcacaccgaagaattacattattatggtcgagactgatagcattctcagctctacaacatagggcatgcagccagctcccctttaatttgggtcgtgtgaatgctagtgatgatctcccctttttcgtttctgaaaactgatgcaccagtcgtgtgaatagccacatcagtattgtagatgctccaacccgcgcagccattgtggcattgtggaagaatccaaactataggcatcgaaggcttcctgcaggcggttgttgatcagctgagtaaggatcgttatggggccgggtgccatgtccattatcaacaatcttgtttctctccctccatatcttctcaaagattattgcagctccttcatgaaaagcctggaagctgacttcttttggcctatggtcattgtgtttaaaccaacttatccattcctcccagttagagaaatgataaaattgttaattgaaataataataaaaaaaatagattatatttatatatttatatatttatatagattatattaaaattgttaatctaattattaattgaaataataataaaaaaaaataaatctaatacaattcttatattttttaaatatatatgtaaaatatagtttttaatttatttataaaaaaatatactaactaattttattaaacattaaaataaataaataaatttagatataatttataattaattaattgaattaacgtccaattcaaatttaaattaagatttaaataaaaataataatctaattttattgatacttttaaatatttatttaaattatatcttaataaatgaattaaatttaaaaaataataataaaaatatacttttaaatatatgtaagtagatttaaatttgaatgacaatatttaaaaaatagaaaaaaaaattaattcaaatttaaattaagatttatataaaaaaaataattatttaattttaggggaattaccgtatatactattttcttttaacttttttttttttcaaatttacggcgtgggtttctaaagtagttgcagcgctagttgcaatagtgatttttatacgatttttgttgcgattta

SEQ ID NO: 77245 - DNA, 1126 bp, Cannabis sativa
ctacaagaaaattaccctatctcggcagttaaacccacaagatagacctatctcggtggttatcaatcgtcgaggatctaactatcagcagttgggaaccactgagatagggtaccctatctcgacggaaccactgagatagggttgccacatgctctcatatatgtgcaatctcgacatctgaaactgccgagatagggtacgaatctcggtaatttaaaaggaattcccaagattgctatcctatctctgcggttaagaaccaacgagataagttaataacgataattttttgacaaccgctgtaattgatcttaggaggaaaaaaatatatattttttaaaattttttcccttcactgttattcacgatatatacaaagatatgttgcactacaatattatctaataaaattcataatatatcaatttacataagttttgtaaatagttataagtataacaactacatgttctaactataaatctagctaagattatacttactagtaaagaaaacaaaagtaaaactatgctagaaaatactcagtatagtagtttacccatttttcacgcacagtgttaatatcatccattgtatactcagttttactatcacactgcaacataagagtaaatcatatgttagtttctattaaatttaaaataatatgttaattactacttacgtgttttgaaagatattcatttagatcttttgtcatagttaaatctttcattaactgcatgataaactgcacacaatatcattaagttgtttaggagcctacatatacatataatatgtattaatatttaatttatatataaaaaaatatcaaatgaaacacttgtcaattttagcctcataattttggaaaccaaattattttcttacttttcttcttggattgaaagcgtcatttatgtcaaatgcctttaacaatgaaataaaaattcaattagacaatacaataatttattaacattgtaagatttgcgtcttagacaatttaatgtaaaacttatgttgtaaccacaatcatagcgtcctcccttgaatcactactagctggatcgtagaaatagcataccttgttaattggaaaaatgactatccccatcca

SEQ ID NO: 77246 - DNA, 705 bp, Cannabis sativa
aacattcagggacaaaaagtaatcctcgtccccgccccgttccccattaagacggggaatcctcgccccattagggacgggtccacgcggggccccatccccgtggagaaatgtgcatccctagttccaccacacaattttaattttttaatcttttataagtttttttcccaaatttcactctctatcaattttttttttttttttgtatttaggaaaattttgacaacataatatttatcattatttaaggtttctattttcatctttgatttacatcctacattgacttattttctgaagtctaggaaataaaaaaaaaagtataaaaatctatgagaaatttggcagcataacaattttttttgttaagatttctaccttcctctttgattatgcactcccatattgacttattttctgaagtatagggaatcaaagagaaacataaaaatctataaaaaattaggcagcataacaacatgaagacaataaattttcttattttctctttgactatatctcacttttgaaatcttttatggcctataaagcctagatcaaagtggaccaaagaaaaaataaaaaaaaaattattagagaaaaagagatgtttagattgatgaaaagaaaataaagataaccctaatacttacccgtagaaatttctctcgttgaagatgagggtacgtaatagtatttctt

SEQ ID NO: 77247 - DNA, 821 bp, Cannabis sativa
gtaagactatgaacaactatgttagcatcgtttaataaaaaattaaaaaaatattgtttaaagatataagaaatttatgaaattttttttataataactttaaaaaaagaaaagcataggtaatgaatttcgaatagcttgaactgctagcaaacaatctaactttaactgcagtttttaaagaatatccttaactaatagagtattaccgacacctaatagcaatactcaaaaaaacttcacatacaatcaaaatatatggtacaacgtattaagttattatactaaattatgttatatatcatatttcttttataatgtgatgttagtgttaatttatattatatgatcatattataatttatactaaaattaggtaacataactgtccttcgtgcagtggttttaaatatatcttttgaggtattttagatattttattttttttaaattatttataattatatttttttttgaattattatttatgaataaaatattttaaaattttaaaatgataaaataaaagtcaaaacttgaaattttaaaatatttatattactgagaaagaatatttaaaattaggtacaaattgttagatattttcaattaatacttattataaaattcaaattatatatcataaatattttaaataatatctattaaatcgagttaataattcaaatactttattattttcatatgtaaatttataacaaaactgtaacgtcccttcttcaagcctctattgggtccttacacccacggaatgaatgactcttatacacgagtatgtcactctggctgtttcatggact

SEQ ID NO: 77248 - DNA, 642 bp, Cannabis sativa
agaatttaatttaacatattaattatgtaaatataataaatacatcctatgcaaactgttctttggtttgtaaacacctgatctggaccttgtatgcattctatgcaaactgttctttccaggagcattgggacagccaacaaccaagggtagagtagctggagaggagatgatagcaggggaacccctgacatgttcttcagaggcaccagtaggtgttgattgagaagcatgttcactatgaacatcaacatcattgttcatgtatggctcagtgtgtgcaacatcagtaggagtgatttcctgcattttattaacctgtgcaataggtatatttgtgattgtggcagcagcaacgtcattcgaagattcacctacatcataaatagaaggctagctgggaaaccagttattagcagcaacaacaggttgatcatggttggggtgagaattatctgataaaacatgttggtgaatctctatttctggtgtatgtccagtgtcatcacaagtgttaggatggataagatcaactatagtgtagggttgtttataatgtggataggatagtatgatggtagatacaggagacacattgggctggttagatggaggttgagagtggcttggttggtgttcata

SEQ ID NO: 77249 - DNA, 630 bp, Cannabis sativa
ccaatcaaaataactagcaatcctaaaaaaatagaaaattatgcaagggaaatacttttgggtgtttctccaaaaggtggcagagtttctctagcgggggttctaggtttgatgggaaggggttggtgaaagagaaataagagaaagagaagagaagattgagatagaaaggggtcgggaaaagaaagaggcatggtggtggctggggtcttgaggagaggtgcggtggtcgctgaggtctcgaggcgaggcgttgtggtcgctgagatggaaaaagaagagatgacggagggaaagaggcgtgggctctctgaaattttcgtataaagctctgttattttttcgagctaattttcttttgtataaaatgaacctttcccaatagtttatgactgttgggaatactagtatttcccacagttataacatgttaactatacttattctcaacatttaaaaacgattagaattcattatttttttaaaagaaatcattatagtattgctcacagttctataccgttgtcaatagttatcccaatagtttttttccatcggtgtaaaactaatggaaaaaatctccaattacctttctcaacagttctcataattaaccctcttatcaacaga

SEQ ID NO: 77250 - DNA, 523 bp, Cannabis sativa
cataagtgttgcctcctagagtgttgccaaaagtataactataaagcaacacttgtaaaagtgttactaatgattgtaagttaatgaagagaaatagcaacccttctacaaaaaacgttgctatacatttataattataaaaaatatttaaaattaaaaaaaaaatattaccattaattaaatttgagttactacacaattccaatactaaaagttgcaacaaaaacaaatttattcttattctgtaaaaatacacaatattcattacagtacttgataaaagttctataaaaaaccttgtaataactatatacaaagttatgagagaaataagaaaaactaaatacaaagttaatatctattcctctaaaatttcattaactctttcaaatactagtaatccaagcaatttgtcatctccttccaacgaagattagttactacccgatgcatccatataagcatctcgtattgtttatttggagaagaaacatgcactacaagttaaacaaaaataaaaatt

SEQ ID NO: 77251 - DNA, 564 bp, Cannabis sativa
tagtttctttgagaaatatcatcaaacaccaggcatgcaacatttttatatgcatttttttatgatatctgaaaatacaatagaaataatatcactcagttcgtagtagcttttcaagcatttacttcatcgtttccactcttatattagcttagcataattcaatatatgaatcccataaccataaacttgataaattaaaaattttctctttatataatcaaaagaaataagtaatcaaaaaatataagaaaaaattacaaccaactcaatcatttaatatatgtgtgtggagaaaaattattataccaataatagagagaatttgagagtgaacccaatccctgagggcgacgaacaaagagaccaagagaaggttggtggatgaatgactaaagaaagaagtaaagtcaaaatattctagaaatgaaaataaaaaattaaaacattaaacctgggagagatccatcaacttttgggattgggattgagtcaacactgtcttgtgagagccgtcagcgacgagagagcaacaagaacctccgtttgtttgtgagtcttcaa

SEQ ID NO: 77252 - DNA, 731 bp, Cannabis sativa
tttttttgaggaaagataatttttattcaaacaataactctttgtagtatatattgaggcattattcattcaggcctagcaattctccaataataaggacaaattaaagcacattcgaggaccttctttgatcttttctgtctcttattattataaattatgtgttagtttacaaagacacttgtcatatatatatagtaataatttgtaaatttaaataattttagagattaaattgaaaaggacagtacggcactcggaaattattatcacaacgtatatgcatgtaaagtaatcttatttccttttaatatattaaaagtatgatcagctacagacctgcttttgctttgcttttgttttatttttatttttttttattagtaaccgataaaagttaagatttagaatatatgtatatacacatcatgtacttatttgattcataaattcttttgttaagttatttaccaaaattttgagaaactaaatataattattctaaagctaaagaaatagatcaaaataaagaataggacaattttttttacataaattattcattccatacaacacttaagttgctaaaattattgtaagagctttagagagatcaagaactttttagtttttctctcacaagtcaatacaacaaaaatgagagtagactattaccaccattacgagattgaacctctatagtaaattcgtgttcttattgcttaattatt

SEQ ID NO: 77253 - DNA, 974 bp, Cannabis sativa
  modified_base (53)..(55): a, c, t, g, unknown or other
acaaggccaaacaagccaaattgtttttaaaaacaattttctgtttttaaaannnaaaaacagttttttagttatgataccaaacatgcactaacattctctcaaaatggtatcttggctcactatctccgaattacaattggctcggctaccatgtttaatgtaggagtgtggttggtaaagtaagatatggtgatttggtaatgttgaggtttgacctcttgaatttggtctcactgtcagttttgacagttagcaacctctttcaactaacttaactgttgtgacagttaagttagttagttgctaaccgtgtatatatattgaaggcctcttattttttcttgagcgaggttgagacagaaaatggttgagtgaggattgagatagtcttttgagagctgtaattggcctctcttgagattgtaagagagagtcatttgagagacactttgtaaggagcaagtctccattgtttcaagggtttatccctgttttgtacctctgttcagattaataaaactcatcaccacagccatgctcaaggctgctttctcccgtggattaagctcatgatcatattgattgtgtagcccaacctagtaagttcttgttgtcttttattactttaattaagttgtttttactggattaagttctagtttctgttgctggttttatgctgaatgtgttcttgaccattgtgcgttatttttggtgttgtgttggttcttgtttggagttcaagcctcggcggataagatgtatgagcttccgtcttaaaattaattagcaatgagagaagtataactcatgtattttaattatggtattatgtttctacacattaataatgtgagactctctaacaaccttaaacgagaagagaattaatttatgaaatgttattcatgaacttggaaatgaaatgtcaattcttattacctgtagaacaagaaggccattctctgcta

SEQ ID NO: 77254 - DNA, 1486 bp, Cannabis sativa
gtaatgggttttatttagggcacaaaacccaacagccactgatctcgcaaatggcacttgtggtttaagaacggtgactcaagacttccatagtgtggttttggctactactatttggaggctaaaaggaaattttcaaccaaaaatggttgaagctcttgctttacgagatgcggttactcaatgcaacctgtttaggtttcacaacgttcatttgaatctgattccaaaagtctagttgataagcttaataatttttccaatttagatttgtctttgtggttagttctttatgatatcaaggcttcttgtagtctttttaatattgttagttttactttttattccataactgttaagggatattggcggctaaaccacctgaattttacggtttgtaacacttaaccacaaaaaccgaaattttggcggctaaactacctaaaccctggttctgtttttctctgcacacctccgtccaaaaatcacagttaagtgctacggtggactgtgcacgtgtacacacttgtacacgtggcaagtttttagtggtccacgtaatattaattttaaaaataattataaatattaaaaaaaattaaaaaatcagaaaataaaaaatgaaaaatattttttttactttttttttttctttctccttttcttttcttttttttttcctctttcttcttctttttctccagaatttccagccctctctttctctctctcgtctcatcagttaggggcagcaccaaaggtcaaaagccatggaaggagtgtgctgtgattgaggaagaagggcttttagaggcgaaagattgccagaagggtcttcctcgtcggtgttatgttctcgctttcgtccttggtttctttgttctcttctccttcttctcaggaaacttaaaacgtttttgtacaaccgaagtcaattccataattcttctttccttttcccctaatcacattcaaaatttccaccatttttacactctgagtcgcctccagccattactcgtctaagccgcctccaccacatccgtctcttatcccttccatcctcaacaactcttcccaccctctgagctctgttatttctcctttcgtttgagacgaaaatgcaggtttcaaactcatactcatggtttctctttgttatttctttacttttttctaattgcaaggtcacatccatggtttctctatgatttttcttcttattcaactatttgtgtacaacatttcagattttaaagtaatctaaccttttctttatttgtgaaaattttcggtaacatttgaatcttttgtttaattcagatttttgtatattcatgtgattgtatatatgtgttcagtataataatggcgtaaattttattttatgttgtgtttgtttcctctgtttggtttaaaaattgatgttgaaattaatatcaatatgtatgcctatttctaactttcttttataatatttataatt

SEQ ID NO: 77255 - DNA, 713 bp, Cannabis sativa
aaaagaggtatgtttcaattaaatttaaaattagaggtaaattttattaattgattaataaaagtggtatttttcaacttacccaaaaaagggtaaggacagcccataactgtgtgtgaattgtgaggcccatatgtgcctactttcaaaaatatcacaattattccatattccaaaaatattacaattctttcagctttttgtaaatactaatttatgaaaactcaatgaaatttaagaaaattcatagagtgatatagctgtacctattttaggccaacaataattttcaacattattctttttcctttttattaaggaacggaaaatttgaatttggaccttttttcgttttattttttataactatataaagtatatttaattatatttttttagtcatgactgcaatagagtagactagcctcattagatttaaaaaaattggttacaactctaaagaatcataataaaaatgtcaagacaaaacaaaatgcctcgaattggaatttggaatcgagaatattactaatatattattgtagaaaaatagtgtaatatatagtttatgcttgtttaaagtctcttataaacaatattataaatatacttattatttggatagtatagccgcttacataaaattctccatttaaattaattatataattttatatttattacgtatgagtcccttattattattattatta

SEQ ID NO: 77256 - DNA, 735 bp, Cannabis sativa
  modified_base (47)..(47): a, c, t, g, unknown or other
aaccatttaatagtaatccaatgacttaaaaaaatgtaaccatgatngttacaataaaaatgtaacaattgaaatctcttccatatatatatgatttatatagtttaagcaatatttgaaggggctcaccaattataattgtagcaggcagtactgctttaatgactattgtagtagctatatgtatttgtgttttggctctatatgcattattgttgattatatcacttgctattgttgttttgtttttttttttttttggtttatgatatctgacttttcatatattcatttctttacattcatcaccagcttttatatatacatgaaaataatgctatcactgttctttctgtaatccatcgctttatttgttttgtttattcgatttaatcaatataattgatctataggccgttcatgatattttgtttacgctttggcgatgttaattttatttatttttgttaaaatgaacatgtattcatgttcgtcttttaaatggcataatgtacactacatatatcttctacttcttcttctttttttttttgttttatataatacacatattttctctagctatgaaaatatttatatagacaaatgtgaattattttgatgttccattctcgttcaaagaatctttttgcagttattgatgagggcctgctatatgaattcaatttggaggaaattatgtatatatataatgagtattgttattggcaaaat

SEQ ID NO: 77257 - DNA, 1832 bp, Cannabis sativa
tcattttggatagctgattaaaaagaaacaaagaaagtataataatgtcggtacgtatagaattcgctagatagattccataaccaagaaacaagtgttataagtgaataagtaacacatatattatatttatatttatatagatacatgtatatatgatgttgaaagggaaatgataagacaccagtcacggaactaacagaagaaaaagaaagttttattaagaaaaaaaaggaaaagaaatgaaagatctacataggtgagtcagataatgaggattttgcagatatagacatgaagtaattgatataaataaatgaatgattatgtcgttcaactcaaaaaaataaatgaatgaatcatgcaaaagcatgggctctccataatatactatataacgtgggaggtcacagcatagcacaacacatgaaaggagaggtagggcatttatatattgattttgaatatggaaccgaccataggattaatggaccccacaaaatgcccccaaaaatcctcattgggaataattaaggtgaaaagcaacgacatgacataatcacttaaatagaaagttcaactgccattattttatatgtcacctaatgatttgttctgcttttttattttttttacgtcctcttatcttagattttggaatacttcttaattaaccctctccaaaaatatatctaaaaatttaaaattttataattactaatgtttcatcatagcaagctttgtctgttttaattctattggaatataactattattcaaagatacctttttttttgtttgttttccatttaattttttttttcaatggaccgatgtatggttgaggtttttcaatctatcactatctatgtaaaccataaataaacatatttgagaggaagactgagtgaggagggtttcctaggtatataattgaagacctgtttaattggggatctatatcttttcataaaattaaaccaattcaaagattgtgaattgactggtgagaaaacactagtcttacctgcttttataacagaagtggaacaagccttaagtaagggacgcgccatgactccgtcaagagtggtaactttttttttttaacatatattaatgtttctttttcttcttcttcacttttttgttatattattttttataggtaaatgagataagattatattacttccaaaacaatactatttacaaactaattagcacccaacaacaggcccaataatctaattatttacaatgaaacaaaccactctatgtctttttgtttagcctttgtttttctaacactactgaatctatttttgatattgtattttactgtttggatacatgaataaaaagtttgtattctataattcgtataacaatcatttctattccaccaaatttgatacacaagacctattaccattgctgcaaaaataatattatttattttttaacacaatatataatgttaaattaaaataagtgtaagatatataacatattatatattaatataaaatgtaacatgtataacatacatgttatcagtgatcaaaagactgaatattattaaatgagaatagtgtatttatacagagattaagaaccagagaatcattatatcaagctaaagcctaacagaaaaagaaataaatcactattttaatcataactaactctaacagaatgactaatctaaccatgacaaattcataagggggctctaatactctccctcaagatgaggtgtagagattgatgacactaatcttagacaaaagaaaatcgaattgagatggaaagagtgctttggtcatgat

SEQ ID NO: 77258 - DNA, 3512 bp, Cannabis sativa
tcctcacgcatctcctccgaacaaccatgaaacatctgagcatacttctttttctttttatttggtaaatttttcagtataggtttgttcttataggtctaccgattgatttgttttttaatctggtatttgatttaaatgaaaaattgatatcatgttttgagttttgggaatttattgttttaggtttatttaattttaagtttcagttttgttttatttaaattaaattttgaaatattacatttgatataattatatctgtttctcaaaattaatgcacattagttgtttgataaaatgcctcagaaagagatatgaaattgtaatgttttataaaatgcctcaaagactgaggcagcttatcttagtatgaatgtagtttacttttcagttcattgatttattaatttatttgtttattctttttttctagttgagtttgaagcatgatatgatcaaatgtattgtctttcttataacataattacactaatttcatttgtttaaaacagtttaatttgtttctgtcacctcagtttcaacttagttacttcaattttataatgcagaccaattattcgacgaaattccatcttgtattttaaattattgtgtttgttcaaaagaaacgaacttatcaagatttgaccaataatgattcattgtttagattttagatgaaaataacagttcattttttatctaaattgggtactctattgctgaatacaaagtgaaccattttctttgatgtggaagattgaatctaaattggatattttcacatgtcaaggtgtgtcatgcatatctaaacaattcttcctgtttggtattggaataggttttaatggggccaagatggaaaggaaaggggtcagaagccaaagctcttgctgaccccatgtcgaaaatagtgttacaacttcaatcttctctaatcaaatcagaggctcaaggattactttgtggctgcagtgttcttcttggtacagaagcacaagaagccgatctccttaatcgctcatgttttggtgtacccattactacagctgagaaaagtaagcaatggtttcagctgggcatggaggaagctttttaccttcattattctctcaagtgcctcatgatagttgacgaaaacaaacacttgatgaatgatgaacagctatggctttacatgaagtccaagaaagagactttccctgatttttacaaagcttattcgcatcttcgaatgaagaattgggttgtgatgtctggggttagatatggtgttgactttgtcacctaccgtcaccatccagctctgatccattctgagtttgctgtgcttgttttatcaccagaagaagaaaatggttgctggcatggaaactcaaggttgaggacttggtctgatattcattgcacaactcggctttgtggtggtgttgtcaagacattgttagtccttaatatcagtagaaatggtgataatgctatcactccatcatgcactgagaaattcactgtttatgagtacacaatagcaagatggcttccagaaagatgccgtgaagatcacatggtagttaaaagtaaaactagtgactgtacagtagccgaagatggaaccaagtaagagttattactctttttttcttagatattctgctagatttataaagatatattttactgaacttcacatgtttatcagttgctgattctttgtttatcgaaataatttcagtatgcaggttccttctaaagttttaggtacaccacctattgaggaaggatgaagttataggcagttatacaaccagtactcattacacaaatgtaagtttgtgaacatagtttacactttcaggaatattcatttctgttttcctatgctgtaattgactaatttattctcttgccaaatgaccagttgctctcaaattaaattattgaaattagattctttcatgtttgtgtacaaaattcttttctattgtgcatacatacatgggaaaatctgaaaaactagtgttgtacaaggattttgattttgaataaacacgatttctcccccttaactacgattcttgtagagttttgtcctcccaacttttttttttgttaaagtataaaaatcgctgcaaataaccccctacagttaagtgctgcaaattttcttaaacaatttgttgatgtaatactaatatgacattaatctgacccaactcaagagtccaagaaaaaaaatacatatatagtagtctaatgataaattatgagaatatgcgtatgggttcttagagttaatatttgtagcttaattgctaataagctgactaaagataacttaaaattgttaaatagactatcatattgcaacaatttgttcagggaaaaaatcctatttattccaaatatttaaaacacttaaattgacatttgtaaatatttagttatccaaatgtaacctatgcaacatatatggatatgtacaaacaaaactggaaaatcatgtcatgacatataatgttatgaaaaaagaagacaaactaaaagcatctcaacctgtttagattacaaatcattgacatgatcattacattacatcataccactcctataaattgattgccaaaaccttgtacataattcttgttcagttacaaacttaaaaatgaatcctactaggttgtgcctttgtcatccgagtttcaccggtggattcttcattgtcgatccttcgattgtttcgaaaagctgcacagccaatgacataaaagatgactaggaggataagcaccacaatgttgataacagagactttcctccagctcttcttgatgctaccgaggacaccagctttgcaagagtcgcaaccaaagcaaagctgaccttgatcgttgctccatctagtgcagtcggcaatagtccccgccaaccctcctcccggcgtccatatcgtctcattcacgtagccgtagccacattctgttgggggtttgcagcaaccagactgcagagtgaggaaatttcagtcattatagtatattccaatacaaacttaaccattatgtatgttttattttatggaataaaacaacaaaaccatcttatcaagtgattctgtgatttggggttactgtttatggtagtgtgttcttgttattttctacataaacttttgttgggatgagacctagtaatgatttaatccaaatatcaaactagtgaacacacaagaccatatatgtgaaaaagatggcaaaggagtaaacaaccctagttgaagaagtcaactctcacccatcttagcacaactcttaaaatatcatttaacattcaatgccaacatgtagtgcctaaaatgacccctaaggttatcaacttttattccataaatgtctacaaatatcttattattgttattctatttgaaaaaggaaaacttcataataaaactaaaatttgtcaagtaaagtagtgatcacactagagaaaataccaaaaattcattaaaaaaa

SEQ ID NO: 77259 - DNA, 945 bp, Cannabis sativa
  modified_base (183)..(212): a, c, t, g, unknown or other
ttattatcatcaatacatgtattctagatcaaattaataaagactactgcatagtatattggtatatatagatatataaaattatattacgtaatttgaacgatggtcatgataggttgttcattgaatatttttatatcatcaatggctgcttaccggccctataataataataataataannnnnnnnnnnnnnnnnnnnnnnnnnnnnntaataataataataataatgtgttggagctgttgttgagcttataaaggctttattattatcaattaataattcttattatatattagtagcttttgtatttaattcgacttttcaataattttcatataattattattggaaattataaattttttcagttcacactctttaactgcaaaatttacaagctcagctgtcatctttgaaggccgactacgtatactcttacatatatatatatatcttataaatattttgtggattattaattatctcactattattatatatttatatgacaatagggagagagagaatgcgaattttctagtgttcttaatcaccataaatatttttcatgacaattttatgaacttatctagaagtccattttaatttgacactggattgaagtatatatctaaaattttgagattgtaatcggtagaaatttaacaaatttttttagtgatataataaagtatttaatattagtaaaactataatatttcatcattataaattctgttagtgccttatgtgcaacacgcagattcttaattattggttgagtctaaataggaatgtgtagtatcaggttatttctaaattttcttttcaacaaacttaaaaattaagtctggttacaaatttaagacactaagggctcatttggtatgtcgtattagaacgtattgtattgtatagtattatattaaattatatttcat

SEQ ID NO: 77260 - DNA, 1724 bp, Cannabis sativa
tatatatattatcctattctcccacttatttaactctcaatacaatgactcatacacccttttatttatacccttctatcttgttctactcattttgggatctaacacatcacgggatcaccagccttatataatttcgggatcctaattttgtgttacaaacataactaaaatatttcttatacaagagtgtcacccgacgactagcaaaatctaagcctattgtcccaaagacctgaacactccaggcttaaccatcccaatatgtacgtacaatcttcattcagctctagactcactgttgttcagcattttccttgctcttacctacacatgtaaatatatttatgagtcgacaaactcaataagaaaaacataaaacataaacataaaatcgaaccgtgactaggcgcccatacacctaatcatgattctatatcccgcgtccaacgtgtataggtcacgaatgttcttaacaacagtatgattgactatactgtattgccaaacatatatccgtcgatattcagtgtatctttatgtacactaatatcactcttattgatgtgttatctaataggcatacataaaaatatgtacgctaaacatgtacgtatgtatatctattatactaattttatctcgattgccaattcaagtgtgtcggtcaactttagtagaaattgttgctcaacgattagaggccctttgattttctaaataatcaaccttcaaaatcctagttgaaatcccttgctttaagtccaaattttagcaaaaatggttggggttctttggcttagggtgaggcggagagagagcaaggagagagaaagaggttgctcctctttttgtgatatttatctactaactatttttttaaactatattcagcttataatataaggatatactctagaaaattcatttacaacataataatttgtctgaggcgaaaagatcaaaaataccctttttcttataatttaagtaatttaaatgtttaggggtaaaatagttaaaaactattaccttgtatacctaacatatttaatgtataactaactttacttgcttagtttcaagatattcaattgtatttaagtgactttaaaggtcaaatcgtcgcactccacgttaccaaacataaactatgaaaattgtaaaaattcatatataagagcatctccaatggggaaattcaaatttagtattaaatcaacaccaaaaaactactatttcaacactaaattttttttcaattccaaccacaacactaaaaattacacaaaattttatattctttattattttattaatataataagaatattttaatattaaatatatataatcatttactttctcttctttaaagtattatttaattattaaaaacttttttttaaaaaatagtgttgtctacagtgtcccactaaatttggtgggacactgtagacaatgccatttataaggataggtttagtgtcgtattggagtaaatatggtgtgaaactacactatatttggtgttttagtatcccattggagatggcctaacatatataatgcacctagaattcaataaaatatccgtaattgagaaattatttctttaaggcctatttcttataatagatcttactttccactaaaaagtaaaaatgttcatcaaacagctcaaattgcccgcaccgcagaaaaaatgcggtttcaaattcttt

SEQ ID NO: 77261 - DNA, 502 bp, Cannabis sativa
ttatagttttcaagagttaatttgagtcattcgattaaattaaataagttattgtatttattataaaggttttgttaatcacattttttttactaaaattctttgattaacaaaggtttgcacaataattaagaaatgcattgtagcacctttaagttagtaagacattataactgttcttttttgtttagtatatatatatatataatcaaaaatgtattttgatacttttttaggacataatcaggcccgaccatgggttgaggcgagctaggcccgtgcctaaggcccacccaaacccaaggcttaaaacatatatatgaactaaaaaaatcagttttatacaacccaaaatataatactcgtgacacatttccaaagtccattgcctcacttcagtagaagacaagaaatatatagttaatatatattataacttcaagtactttcttttactgttgggaatttctctcggtatttaatcattcgcataccaaaaatt

SEQ ID NO: 77262 - DNA, 1795 bp, Cannabis sativa
tttttattattattgtccttatatttttttatttgtcgtttacatttagagttttcattgattgatacaaagagaaattatttacctttttcatatacttttattgtagagactcctaaattcaatttcgcttagatttattggataatgtttatttttataggatattgatcaaattaggccttaaaaatgaccttaattattaagcagcttttgttcatattggccttttctggtgtgttgtcatttttggggtaacaatttatggttcttcttttacttaccaagttcttccaattaatatttgttttttaatttagaaacatcttaagctccaaaagactatttgtattaagcaatgtaaaacagaaagtttaatggaatgttaatttattgtctttcttataaaaatttgtacctttattctcttgacagcttgcaggcactccagtcccatggataggtgttgttatgcgtacatatccctatatccaacagtggctttggggtatctatcccttcttgaatggcgcagttgtgatggatgttagttgtggatttggcatactaaggtgagatggttggcatgtctctgccttgggttttatcattagatgtgtttgtgtgtatatatgggttctacctataggaaaatttttacctttcctccagtgctttagtgcttattttatgcatagtgcaatagtttggtctttactttgggcatgagaacccaatttttattatgtctttcgatattctagatgacttaagagccataatgagagagtaattaaggatggaaggttctttataaggggattgtttgtgtaatttttttggtatgttgtttgacgtatgtgtgtatctttcctattgctcattttgttttctggtaacaacacagatgcatacatataactattaaacaatatattacaaaactacaagattctaaggtggggtcaagaatattttagacatgactttctgtttgagtatgccaattaaagatctatgtgttgtttcagtaggtttttcatggtgctacaatttacaacatatgaagaactatggaaaattataattcactagaaagagcgtagagaagtctgcaagttctgatgcagttttggtaagttgccacttacttaaaaagtcttgtataattggtagatatatttgattattataacaacatttttgcatggtggtgagaagcttttatacagattttaatatgtataatttatctttgggttctttttctaggtgctttatgattttgttgtttacagtatattgtattcatgatgatttttatatctagctatttatgcagttgtaccaactaaaaatgagtatttctagcctttaagacaatagtttttatttatttttttgacataatatataaaatagtttctatttcatgacatttaaactttaaaatctttcaattacattaaggtagcattttatatttataggacccatttatgtttgtatgactcttgtttgtaattgattattgttttttatgtcattttgatctttttctaggtatgtgctctcagttacacgtatgttgttgaattttaaatttttttatttccttgtaatgcgttgatgtatttgaaatgtgcttaatgattatttattgtataactggggaactaagccgcgcttcgcgcggtggtgtccaacttttgtaaattatataaatatatattatacttattgagtgatataatctaaaatataacatttagatgtgtgtattataaacaaagta

SEQ ID NO: 77263 - DNA, 844 bp, Cannabis sativa
attatttggtatttgtgattatgaatgtattttgttgatttaaaaaataatataattgttatagttcaatattaaaagttaaattaaactggtattttggacgctatatatcaaataactatcatttttaaaatggccacaagtgttttcttgttgttcaacccattagttatttcaaacaaaatttttttgatataatatacatataaatatatatatatatatattaaattaatgtagtccaggtgggagaatgttagacttttatttgggcttacaataatttttattggttttagttttttgttgtattaacccataatgggcttagcatctgtgtgtataaaatctagttgaaacataaatgtggttttttttagttaactaaagcttttgattagtatgcctatgtccaactagagttatgtagctaagtcttttccttataaactctataaatacatattgtctcatcccaattatatacttttgataattaggtaaataaaaattatttataaatttaagaaagaagacttatttaatagtatgacactatagaattgagataattgtgatagatatgtatttgagggaaagagttggatttcatatgtatcaaaaaagaatgatgatgattaaaataaataattaaaaagaaaaaattgtaaataataaagtcactaacaatttcaatatatagtgttaattatttaataaacatggagaatgtcacagtactttagaaaagtatgcttctcttgtttggcagtaactgctattccaacaaaaagaagggttgcagtagtttacatagttaaacacacatatcatcaatatatat

SEQ ID NO: 77264 - DNA, 564 bp, Cannabis sativa
tacaataaaataaaggagcacagtaggtagataaattagctagaatccatcaaaacagaagcaacttgtgatttgtgatattcgtttgttcaacaagaacccatctttgacttcagtcaactctcgtctattggtgcttatcactgttttattggcagcttatgtacagttagttgtttttttcgcctcaaaatgtaatatatatatctttttattgtgatttttttgtacatacaattaaaatgatgaatggtcgggagaaaaaagtggggaccgtataggcatcttttcttttggttaagattaagcatcttccaacttccaagtgccatgtgatgtgagtaaattgtagagtgtgcacagttcacttcaggaaaaataaaataaaatgagataatttattaaacaaaccaaaaaagtagagattaataagtacgatcaatacttagactaattagaagagatagcgatgttgcgccacccaattggtcgacctgcattgcatgtacaccacatatacatattcctatcggcttggagatttttgtataattaaatacgtat

SEQ ID NO: 77265 - DNA, 825 bp, Cannabis sativa
gtgtcgatgtcatatcatcaatatataaatttaataattctttataaaagaatatataaatacaacttttctaaagttttgcatttataaaaaaatataattataaaattataaaaatatacttattttaataaaaaaaagtaaaaaattattgaagcacaacaaaatatcaacgctaaaataattataaattaactataataataaattataaaaaaatcaaaaaaataattaaatgataattataatgcaactataaataaattatgaaaaatatcattatttttaataaagaagtatttttataaataaaaaagttcaaagtgttaaaataaaaatttatccgtattgaagtagttttgtatttttttaaaaattttggtcatgtaatttttcttaaaaaaatatcaaataaaaaacttatttgatacgtcgtataatgatcatattttattaaataacaagtaacaatatattttgttaatactttgtattgtattaattattacgaagataaatttaatacaatgtaaatcgtattatttaatacataataaataatatgtattagcttgtattaaaatatttagaaatgattctaactccgacttgaaaaataaatttgtaccctgatccccgaacttcgaaggtcaggacttaggaatgagaccgggagttggggttgagtttattttaaaaataatataattttacataacctgctaatacaattgaatatcaaacataatattgtattaaataatattaatataatataatataatataatataataggtgtaccaaataaaatccaaagtgtaat

SEQ ID NO: 77266 - DNA, 851 bp, Cannabis sativa
aagttggaatatgaaagctttggaggaggaggtgatgagagtgcaggtagcagaagaagaggaggatgaggtagcgattgaggagagggatgaagacgatgggatcgatgcgagatggtgcttagtgggcagatttttatcagatagagacttcgattttgaaacaatgcagaatgtacttgcttcactatggaaaccaggcatgggcatgtttgtcaaggaactaccaccagacaggtatttgtttcaattttatcatgaggtggacatccaaagggtgattacagggagcccttggacatttaatcggatgcaattgatactggccagattgaaagagggggagaatccacaggagataatgttgaataagttagacatctgggttcaagttttcgatttgcaacctggttgtatgtcgaatagtgttcttcgtaatatagccaaagtaatggggcagtttgtggagtcggatcctaagaattttttgggcgtgtggagggattacttcagagtgcgggtgaccatcgacatcaataaaccattgagaaggcgtatgagactgacaaagcctgatggaacaacattttgggctactttcaagtatgaaagagcgccaaccttttgttttatatgtggaatcattggccattcagaaaggttttgtgtcaaactttttgacaagccactagaccaaattgttaagccttatggggagtttatgagagccaaattccagaaccgaaagcaaaacattggtgcgaaatggcttagaactcgagggtggactccaggggcggtggtcggagagagcagtggtggaccggtggagaatcatatgggagagacca

SEQ ID NO: 77267 - DNA, 743 bp, Cannabis sativa
gaaaggggactcctcgtcaaagtcctcatcttcccaattacagtctttggacccggctaaggctattcttcatcacaggtcttccatttctttgtctaactcctttatctacctagtcaatttctcccgtagatcagtggtggctggcttctccttcttctcctctcgaagagagactacaatcagcaagcgcttttcggctgtggccttttggtagagtttctcccttaagtctccctggacaaccttaaactttattttcttagatcgtgaggagggctcaagatttctccgagttgaaaccttacacggtgaggactcaagggtgttgtttgtcgagtatcttgaagccccttcgtccctcggcttgtccgttctccttctctccgcctttcgtgcttctcgcccgactaagggtatctcggagcggcctttaaggagttcctccaatgccatttgcatgtttgcgactgtctcttccagttgcaggttcctcagccttagttcactcatttcatcatcctgcaatcgggtccgtgaacccaaactcacagagtaggttcgcttcttctttcccaatcgatggcgagacgttcccgagtcttttgacccaagcgactgtgggtgtcttatcggagacagaaccttcgaccgtcgggctccgttgccttcttccagcgtgagggaggcggtcattccatcctggggatggttcaccagatcatcctcgcccacccattttc

SEQ ID NO: 77268 - DNA, 617 bp, Cannabis sativa
tatatatactttgattcatttgatgagtcattaaattattaccaaatagattttcatattttatatatttttacaaactcttgatttataataaccttatataatgcaactgtttattagttttagccatatgatataggaccagtatatataaaattataaaagataattaggccacaatataacaagaaatccaacttaaattatatttaattaatggaaaaaaaaaaaaaaaaaaaagctatatagctatgcctaatcatatataatcaatatatatataggctttgcggcttaaagaattttaaggaatattttcacgtacaactttgtttctttacctttatgaatatatatattacattttaaagaatttttactttatcttttcttacacagacaaccagcaaacatatatatatatatatataaacacataatgcaatcctatctaattatcgataattaattagttattttgaaaattgggagctagggcatggcgcctgccaatttataattaataagtatttaacttttactatgcataaccattttctttacctcaatcattgagacctctgaaatcatgtatatataattatatatgcatgcat

SEQ ID NO: 77269 - DNA, 574 bp, Cannabis sativa
  modified_base (322)..(328): a, c, t, g, unknown or other
gtccggcaatcgaattgttcgcatcgttggaaagtactttcccggtaaatcatcctaaacgaattttgatatgactgcgagggttttgttgatttcagtattttatttatttatttattgcttttaattttttgaaattggaggaaaacttttcagctgatatttcctaatttttgtatgaactgtggagaatttttaaaattttattagcaaaatcgaccaaaaatgagactgtgcggccataaaaagactattatgattgttttgcaactctaatttctaaattgatactgaattcaatgttgttattttgctaatttannnnnnntcatgttgttagtttggcaaatttggttttcgggaagagcaaaattctaacttaccatttaaatttgtgtactttgttgataataaccagaacaattattgatatgttattcagaacaatgtgatggtgaaagaagatttcactgaaaaaagtgtttttcatttttgtttgcagctccaattgtgagtgcagagcgtttgaagaggtacattgttcataaactatgcagtgaattgggtgaagggc

SEQ ID NO: 77270 - DNA, 1003 bp, Cannabis sativa
atagttttaaaaatcagtcgaggcgagctggtacacctcagctgctgtcattgaggcgtatcctcacattgatgaggcagacttttgaggcgatgcatactgaggcgcatgaggcgtggcctcaacaatgggcgttttttgtgtttttggtgggctgatttgggctattttttatagcttccctaatagctattttttcgttcttttaaatactctaatggactttagtttgggtcttttttaacagatttttaatagaaaggtaggaaaatatagtcctaagaaccctaaccctctcatatggaatctctcatctctctccttcttcgccaagtccctccttcctcactctcatatgaaatcgctcatctctctccttagccaagtccctccctccttggtcctcatcaacctcgcgcatatatgtcttcttcatatgtttagaactttcactacttatcaattgagttttgaaccttttatgaatttagacgagtcaccataagatactttaagtttccaatcaacgttctatatctctcaagatcttccattttttttttgaaaaaagaggaggagaccacttggcaggccacctgtattattaaagcctcacttgtggcggaggaaaaccttggtacataaattgtaaaacaatacaatgaattagcacattgattgaccaatcaaacaaaaagagagaattcttgagttttacaacaaaccactccaatccctgcttaaatctaggaaagaaaaagcctcaaagtgtttggttttaaagatccatgtggctgtccaaaattttattctctcccaaacaaagtttgctgatctctcttgcccttcgaaaattttgctatttcgctcattccacacagcccatagcagtgctaacattgtagtcatccaaagcttaacttttcttttgcttcccaccggtttacttagtagggactttgcttggaccaaaaccctgtggaaaggttgtgtactaattttt

SEQ ID NO: 77271 - DNA, 677 bp, Cannabis sativa
tgatgaataaaagaggcatttttcaacttaccccataaatataagtagttgaatatgaatttaaacccggaaaatgtattattttatggctctttaatcttttccaaattaatttgacttaatttatcatgtttataaaataaaacattagataagaataacaaaataaacaaagaaatgaatgaataataagatttgagatagggatattttgtgcaatattaatcttcatattgtattctttgagcctattatcagtctaactagatatcattatattacttacgatttatggtcaaacttatagttcaatataatttttttatcttaattaaaaaaaaatcttatcatcatttgatctttaaacaaaaccataaattcttcttaatcattttcacagcaagatcaataatacaaaaatttatcttctaacaaggttataaaagaaaatatttttaatagttctactcatatttgcacccgaaaatacggttgcaaattgtaccggattttccttcaccatatcctatacttcaaattctaaatataatctatcataattattaaagttttatttttatgatttttctaataattataagaatatatatgatttttcaaaattttgaattatcttaaatttaagtctgttttgtaaagttaaaaatctattatct

SEQ ID NO: 77272 - DNA, 1426 bp, Cannabis sativa
ttaaatagctataacgtacatggatatcaaaaaaaattagactaaattttttttttagatgccgaaacaagtagatggtgcatcagtatataccttttaagggggcattataaaatcacccaatagtatttatcctaaaaataacttacatttatttgatgagtactttatgataacgtcatagttttgttgtttgtagatgctgatgtcaaattttaatttggtagtgtattttggaaagataattggttatatttagatgaagacaaattagaggaggactctgttatattgtcattgtcaaatttaaaaaaggcagactatatatatgtgagcacgtgattttcattttatataaactcataactaaatcgtagcaatagcttgtattgtagtttaatctcgacctaacctacgaacaagcctacctaaactaatcaataatcattcaagtggaattgggctatcgagaaaatatatatgtaatatttatagaatagcattacctttacattaggtaagaaaaaaaaagtgtgtaaatatttgataaaaacaatatgatcatattttttttttccggtatattaacggtaaaattaagtgatttttttaatatttaattatataaattggtttttttttttaccataaaacctactaaatttatataactttttttttttttacatttttattcaaaagctttaattaaatgttaaagtaaattgctcacgtatatacaagtgacacattttagatgtccacgtaataatattaattaaaaaaatttaaaaattataaaaataaaacaattataaacaaaatatattattttattttatttttctttaaaactctaatcttttccaccttaacctatcttcttcttcttcttctccaaaaccaccaccacaccactacaaccaatatcaccaccaccaccatcacctatacacactattgcaccaaaacaaataaaatgtcttaacaaaataaaataccacattctatgaaaatctaaacctaaaatcaaataccgaactaaaagattatcgttgatgacctaatcgaacagtctaatgatgaatcgaacgatgcagatcctctaaaattgttgttcttttgattcatgactagccaaagcacaaaacaattggggtttttagtttcaggacctagggaacatgatctcgtggtcctgttaggccacccacgaccgtggacggctagctgtctagcttggctgtcattgcacaaggaaaatggaagagagggagtgagggaaaatggcgatggggagagaagaggtcgggttcttgggttttcagaattagaggacttggtttcagggtcaactgggaccatcgacgctggcaacaaccagttttcggtattaccataccggggagagagagagagagagaga

SEQ ID NO: 77273 - DNA, 1442 bp, Cannabis sativa
accctatgagcatgcaaatcataattcctctcactttcaaactttcgggtagcataaagattccaatcacgttgattatcacgataataaaatcttgaattgacagtttgagaaggagagatattaccatgagatgaactctgcataggctggttgcctttagcagcagcagaggctttggctgctgaagatgcaggaggaggtgttggagcagatttggtcaatggaggttcgggttcaagatcagattcttcactgtcagaggggactcctgcaagctctttttgagaagggatagacatggatttggtcttgaaatcatcagacaggacttccattggttcttcttcttcagaacttgaagaagctgaggggggattcaatttcagcttcttggcaggaggagttggtctgtcatgacttcgtttagtgcgaagttccttctcgagagacgcttgctgggcacaggtgcgagaggagggacctattggtgttgatgcagcaacaccctttcctgatgcagcaggaggcgacgcagttgcactaggaggagaccccttcgataatgaagatgatgaagtgcaaggtctgtggggtcgcacagattttcgagcaacttgtttgggaattcgttttggcttgggcttctcaggctgagatttacgctgaggaagcaatgaatcttctgggtttgatgcagttgcaacagcaagtagcgaaattggagcaacattcgagggggaaggatcaaattcttccatccttttttgatgccctaggttccttgtcttagccatgggaatctgaaagatagaaagaagaacaaagaagcagaaaaaaaaggaataggtttcgggtaggtggtgagaataaatgacaagagaaaattagttgaaataagcatgggagagtggagaaaaaaggaaaccaatttcaaattttgaataaccaccagcccacaaacattaaagaaaaccgctccactctttttccaaaattattttttaaaaaaaataaataaaagaaaactagaataaccaagatactttccaaaaataggcaaattaagaaaatccttcaagataaaaaacaaaatacaatgaatatgatatcaaacttcaaaaagtaacatatcaaaataaatcaatttagattaaatgttgatacttaccaaacaaagcacaaaattttcttagcccacaagccaagtcaccaacgcctctctctttttttttatttttatttttgaaaaaccggattaaatacacaaaaaaaaaattaaaatgtcacaataaatataaggtattctagagcaagcatttaaacaaatttcataacaactgaaaaaaaaaaaaaaaagatatgctttttaagaaaataagtaattagtatgtcaagaaccaaccatacttaattgatagatgttgagaaaaacgatatgc

SEQ ID NO: 77274 - DNA, 847 bp, Cannabis sativa
tgtggcagaacatatgctgttttatgctagtgaaaagtatcctttggaggacagttactcaaagtacattactgaggtgctcactctcaaaattcacagaatctttttgttcttatataattttatctactttttcactaggtgtatccggaaggcaataaattgttatgtctgtattttatttaaaatgataggcagtttgacttgtgaagactaaaacgttgtgattttagagatttgaaatgagattcatcagagaataggcatccagaacgaggtttcattgctaatgtagggtcatatatgcttactctttttagaacatgaaattctaggcgtcactaagttatccttttaaacagtgtgctagttatgaggtagttaaaatttaggtgtattatcgaaaatctaatggatattatttcttggaaggaattgctgtagtatgaagggggactttacaaaaatctgagtatgttagagcaaattaaggggactagttagaacgtctccaaagttactctattttttagctagaaagctaaaatatttagtaatttttgtgtgaaccactcatatcacactccacatagaatgtagcttattctaattggacttgctcatacattcttttttagttaaaatgtagagagattttgcgactacctgagtcttattttattaacaatgggacataaaataaaaagtaaattttattggataattacattacttaaaagtctacagtaatattaaaacaatctacattttacgaaaatagaggtgtgattgcagtgggtcatacaaaagtcactaactattttatttataaaatatagagagctac

SEQ ID NO: 77275 - DNA, 531 bp, Cannabis sativa
gtattttgggcaaaatcaggggcaacaaataccattatgaaaaaagtctgaattaaaatgcttaaataatgcaaatatttaggaacatttgtactatatatggagtgtattcttcacatgagtgcacttttaatgggtattacccatgaatcgttaatattataaaaaaattgagtttttataattaatttttctatttaattagaattttttttttcatttttacattatatgggttgggattgggattggttcatcagttgaaaaaaaaaattaataaagaaaaagtttttcggcaagaaaagtgataaaaaaaaagttgatttgttaataatttttgatatagtgtaaaaagaagtattttttgatattttctttaattaagtaactaattaagcataaaaattcaaatttctcgttatcggaccaaaggtatgtatatatatatatatatatatatatgaaaatttagtgtagaagtaaacttgattatatttttttttttaatttaagatgtcaagatcggaaagc

SEQ ID NO: 77276 - DNA, 843 bp, Cannabis sativa
gtgtaactgtatctgaatcccaatgcttagcaaccataccctctttcacttttcaggtcatttccagcatgagagtactcatgactgaggactccaataatgctgtcagtaattcctttttgttggatgacaattccaggttagtttttattatctcaatatacattctctttctcatatgtgaatgcttgtgcatgaataactggaatcggtatcgtgctataaagtgtatgaaagaaaaaaaaatcggattttgagggtcttttgcttcaaatgacagcatacccttctcggtcgacgacctatctacggcgctgcatgtgaaggatttttcagatgtaacaccagcagaggaacttcttgagcagccagccttcgaatttttacacgactgaggctaaaggaagctcctgttttcttttctctgtgtttcttttttaagttaaaggtaggctttacttataattctatagcaatttcattggttattgtaaatccttctttccccaaagctgaaaaaattaaaaaaaaaaaaacaaaacaaaattgcaaaagaacccttccccttatattcatgcctctgctgtaaaattatttatttattcttttctcgttttggcattgaaaggggcaccaatatattttgaggtgtgtatacagttttttttcttcttcttttctttctttttccagtggtttgttttttagggagttcaggtgaatttgttttgtagtttggtggagtgaggaattgctctctccacctcattttttgttgtaaaaagaaatttactatatattatttaaatatataagcacaaggacattgacattggtttgtga

SEQ ID NO: 77277 - DNA, 960 bp, Cannabis sativa
tgatcttgtttaaaagttatacatttacttttaataaatatatttttgacattgaattaactttatatgagataatggtatatttttgaaaaattgttattaatttataccaactagtttgagaagctccactcaatatttttttttttatgcagtgattaaaattatacatgattaatgatataacaattcataatcggcggcagtacctctttgaaccaggatagctcatcgtctaaccgaagaacatgctttaccaaaccaacatctgcaaaattcttatcgtgagccacatgagacaataaaactataacatcctcaaacagcacccccagctcattaaaaaaatacacttcatttgttgatagcttttaaaatccctgtatcttagcatgatcaagtgagtgaaataaaaatacacacatataagataaatatataaaatttaataaatacacaacttaatattaaattaaaaaaataagttttatctatatgttgaaaaatattttaaaatattattttgtaaagaaaaaaatttatctttgatatatatgaagcgaatcgagtatcaatactactatcaaattattttaggataaattcaaaacaaaccatcatatatgataccaaacaagctacattgagcacataaataatatactactaaaaatggtacaaaataagctacaacttacacaaaaataaatcaataacatgatacaacataattttcaaaagacatcaaaataaattaaacgattataaattaacctactcaaataacaaattgaagacaagactaatcaatttggctttacaaaagtgaaaaacaaaacataatgatagtcactatctaggacacccttccagaaggaacaactagccatccaaaactcttttccagaggactagacccaaagtggacacagggccggccctgacttttagtgggccata

SEQ ID NO: 77278 - DNA, 544 bp, Cannabis sativa
agagttaacctataattccatatataaagttattgctttcttgttatagattactaatatgagattattttctaatacacccctcatgttggttgtattggagtacagctataataaaatgaccttggtcacaatatttatttattattattatacttttatttggtttttttttttttttttttaaaaaaatatgttttaaaatagtataaatcggcttgttaaattaaacttaataataacttgatctaaaaatattatgatcaagctgattatatttttttatatttgtttgtgctagaattagttttaattcaagttaattatattaaaaaaaataacgaaaaattgagttcatgatattattttgtatcattttaaaaattataaaatacgatttatcatttaacaagagtttgattaataatttttgcaaaacacaaaattctgaatattatttgcttaaagttttttcttcttattttgtttagaccttgatcacagtataaccaaaagtcataaaaagattatttatttttttatt

SEQ ID NO: 77279 - DNA, 5037 bp, Cannabis sativa
  modified_base (1046)..(1060): a, c, t, g, unknown or other
tattagacaccataaaatatttgaagaataatattcaaaattgtatatggagattcatactagtaattggatagacttgtattcaattgatttggatttttcattttgaaataaatccgaatatgtaaatagaaaatataagttatatatgaacattttgaaggttgggataaatttgtaataaagcaatccaattctccttatctcgttagattagattgtcaatctcacaattcttaattccaaatttaagtaggaccctaataattataatacattggttaaagaatcatttgacaattcttggtttctttgggcaaattcttgtgacttgttagttacgggtcaaatttgagagcatgccattgctttccgttggcgattggcgactatacaatacaatgtgcttcataaatttcaagcacttttattatttattctcgtgtctctttgacactttagccatcatataattggaaataaatattcaatatgatctttgatatgatgtaaaataattttaaatttagaataaatttaaaaattaaatgaatgaatattcttttttattttaatttaataaaatatttaagtataataaattaattaataaaaattataaaaaaaataatttaatatatatcatttttcaaaaaatatatagaataattaaattaggttatataaatttttttagtattacatattaatatattattaaaaaaacgaataaatatattaaatcattatatatgtactacagtatttaatatatcgtatcactaaaaattaatatactgtaataataaaattatataccacaaaaaaaattataacaatacgaaaactagtatattaatactcaatatatatatatatatcatgctaacaaaattatttatatcactattaaaatatgtataccataccaaaaaaaattatagataagcattatatataataaaatagaaagtaaaaataattttaaataaatgatatacaatacacaacaaaagatatataccatacaacaaaatatatatacnnnnnnnnnnnnnnnaaataaaataatataatattattgtatatacaatattaacaaaattatatgcaatcataaaaaaaattataccatacttacaaaattatatactaccaatttatatataataaaataaaaattaaatataatctaaaataaaatgatatactatataataaaacttatataacatataacaaaaaatatatttcttacaaagttacaatagaaatatatataataacaataaataaaaataaatatgtatagcgtactaataaaattatatgtcacgttaacaaaagtgcaatagaaaatagaacttaaatattatcttaaaaaaatgatatatcgtataacaaaaaaaaaaatacatatactatttatcaaaacatatatactaacaataataagaaaaaatatattacaaatatatatatatttatatatacactatattaaccaaattatatatcacaaatgaaatatatatatcatgacaacaaaattatataccgctattatatataataaaatagaaactaattgataaatgcaatttaaatttaaaaataggtgtgtgattctctctctctctcctcccatggctcgaaagagaaagacggtctcgaagtcggcagaggtggtcttcggcatcaaagatccttcccctgaactccttttgatccaagaggagcatttagtggctgatactgagacgttccatgatccgtgcgatttactggagacagaagtcctagacctaggcgatggagaaggaactagtttatcttccaaaccagtgagttgggctgaagaggcgaaacgatggactttcagtagacagccaagaacatttggagcaaattcaactctaatcaagttagaacccatctttcccaattagaacacattgaacccctgaaagttggagatcagattaaattatggaagaatttgattgtttgtattgttcttggagcgcatcctccattccgtgtctttgaaggtttcgtgaaaagaatttggggaagttgggtattgagacaattgttaggatgcactctgggttcacattggtgagctttagagatgaggaaacaaggaatataatactggaaacaggtgtcgtacactttgacagcaaacctgtagtgttaagaccttggttgacagacatggatgctgccaatatggtcaaatctgtgcctatttggatgagactcaatggcctgggacttcaatactgggataagaagaaccttagtgctcttgttagcacagtgcgtaggccaataatggttgataaagtcacccaaaatagatcgatggtgatgtatgcaagggttcttgtggatatggaaattcagcgagatcctcctaagtctatagcctttataaatgagaagaaacaattggtggaacaggcagttgtatacgagtggctcccatctaaatgtgtatcatgtggtaatcttggtcacattgtggctaattgtaacaaagataagggagtggtttggaggaaaaaagaagcaccaaggggcaaaaatactgtcaaccagtaagagaagagcaagattcatgatggttcagtacattagcaagatggaatggtgacaatgggaaaggagaaagcagctacaacagggaatgaagtacaaaagtctactaaatctaataagcaacaacaggaggtgatggaactgaatgacaaggaatggagtactccaaagaggaaacaactgagacaagattctataaaagggaaaaatacaaatgaagtcaagtctaacaatggatatgaggctcttcgagatggggaaggcagtggtgacaactctcattacttgatctaatggagaactttaatgtgatagagtggaatattaggagtatgaataaaagagagaaatagatcactatcttagaggtttgtagagagaataagattggttttggtgctctttttgagaccaaaatcaaggagaataagggtagtagtgttaagaataatttccctaattggaaaatatattctagtgatgttatttctggtcgaattcttctgatttgacaagctaaatttttcaatgttgaagttcttgaagaggataaacaatttgttcattgtaaggtgaagatgtgcagtttgggaggagaattttttgtcacagttgtgtatggaagtaactcaagtgttgaaagaagagagctctaggatagacttgctgcaataggtaatcctaacttaccttggcttgtgtatggggatttcaatgccatgttctattttaacgatagaaatagaggaaaccaggtcaaggttaaagaaattgaggactcccaaaattggcttgctcatggccaattggtggagttcaaattcttggggtctttttatacatggactaataaacatgatgcaggagataacttttttctaaacttgacaaggtgtttgtgaatgagatttggcttaaggttttcacaagaattgaagcttgtttgaaatgggattcgtgctctgaccatagctatatatagtatcattaaatatcaagaccacaccaacacggggttcaaaccattttgatactgcaatcactggagcctccaaccgggttacaaacaagaagttttagcttgctggaatactgctcacaaccttactgatcttgttaaaaacatgttcagaaccaagcatgtccttaagaaatttaacaaggaagtagttggtgataatcattcaaaaaaatttgctgccagatctgatcttagcaggatgcaagaggagcttgctggtgatcccatgaacccgattctacagcagaaagaaaaggaaaagctgttgatttttactgaacacgggaagagttattcttgtttttttagacagtagagtaaaatcaagtggatcaaattgggagatgaaaatactaattttttccatgcttgttcgaagaaaagaaagctagaaaattgtatcacaacctatgtggagaaagacaaggtgattaaatgactaccctaaagtggttaatcattttttaaaccattttaaaaatataatgtggagaaaaagtttaatcactaaaagggttgagttggacacactgtcgtttggcaattgtctgaatttagtgcaatcaagctgattcgcccattcaacaagaaagatgttaaaaaaactttgttcagtattcataactcgaaaagtccaaggatgcatggttttggctccagtttcttcaaagggctttggggtgagatagtatatgacattacttatgtcgttttggattttttttcaaaatggtactcttccaaaggagttgaatgaaacagtgatctccctcattccaaaaactaaaaccccaatggatgctaaggactataggtcgattgcatgctgcaacactatttacaaatgcatctcgaaaatactttgttcagatggttagtgataaccaaggtgcttttgtgaagaatagactactggctcataatcttcttattttctaggacctgttaaaagcctatacgaggaagaacatctcaactagatgtattatgaaaatagatctcagcaaggcttatgacaatgtcgattggcagtttgtttatgatttattaataggtctttgttttctagctagattcattagatggattctaatctgcctccatggaacagactacaatctgcttctaaatgggaggatccaaggctccttcaaaggagaaaaaggtttgagaccaggagacccgatatctcctctcttgtttgttctggttatggactacctaaccagaattctcatgcaaatgccaactagaaaaggatttagtttccatcctctttgtaagtctcttcgtttaactagcttttgttttgttgatatataataaaataaaaactaaatatgcatgatctaaaataaaatgatatactatataataaaatttatataccatataacaaaaaatatata

SEQ ID NO: 77280 - DNA, 654 bp, Cannabis sativa
gatttttaaatatattctccacatttttaattgggctttttttaagaaagatgataagtttcaatttcatgaattgattatgacatgtcttttttatattttttattttttgaacgatgaaattcatgataattgttcctttcgatactaagttgtttgtttaggggcgatactagtgaagagaaccctattctgttgctggatatttctaccattgtattagttgtcatgatagattttcttctttttgtgggttttgtatatataggcttatttttttttgctcaaactgtatttcctattattaaagtaaaactgtatttcctcttcatctgagtcgctcatcttcaccagttcttcacgagcctcattgtaagcatcaagagcttcccctgataaagccatgacaaagggttgagacatgttttcacattcttctctagcagcaggactttcttgcattgagggatactttagtggactgattgagagctctccccaatttctacgttctgattctatcatttgtatttttctttggctgttctgaagtgctgtctcaagttcatttacacgttcttctagtcttgattgaataacctcatgcagacgcaagctaagctgcctgggagaaactgcataatttgcagagtg

SEQ ID NO: 77281 - DNA, 924 bp, Cannabis sativa
aattggagagtataattagaaccctcaattacttccaattacacagttacagtgtaatggtcagacaaacgtatcaaattgtgtaattacctcatattacacacaaatacaattaataatagatgttattcttaccgtgtacttgcacacatgtgattaatctaaacaaaccctaaacactaaacagccgctgcccgtggtcagcctcctcagacgaactcctcctaagcgcagtgtgcggcgacaaaaccgatccatcgcctcagacaaagacacaacctttaattttttttttgtaatgtaaacagttatttcagagttcgtagtttataattgtacatttcgtttctttcattttcatatatgtatttttgttataattccaaattttgagtataatgagcagaagaaatctgtgtatgatcttttcgtttctttcattttgtttgttttttaacttcttgaatctttgatttttataatgagtagaaccagtaataacttattatgaatataaacatttatttaatgttctctcttatttttgcagtctaaatcatatattattaaaagcacaaattcttggacaaggtaattttgatttttttttgttatttatatgtattatatatatattgtaggccatgtatgatttatgatttactgtaaagtttttttttttttttttgagaaagattaactgtgacatgccaactttatatctctgagaattttttgactttaatggaaattactcaagctttgctcatcaaatattgcaaacactaggctattgcagagttagtgtaaggagctttatgagaacaattaaaagaggagtgagtagcattgtattgcaaattattgagagctaatttggccaactttagtgactgccttttattttaaatattcttactcagt

SEQ ID NO: 77282 - DNA, 881 bp, Cannabis sativa
aagccaatctcgagatcctcatgtacaaggaggaaacctactggaagcaacgagcaaggactcaatggctggctcagggggacaagaacacaaaattttttcacagatttgcctcccataggaaaaaaatcaactctatccacaagctccagttgccaaatggtggtgttctttctaatgaggaggatattactcgggagatcgaatctcattttgcccaactcttctcttcctcccagcctgttgaagaggacatgcaaaaagccctggaaggcatctcttgttatttatctgatccggaaaaatctctcctgaatgaagagttttccagggacgagatcgaaaaagcttttttgcaacttcccctggacaaagcccccggcccggatggtttcaattctaacttttacaaagctaactggtcaacagtaaaaattgacgtccttaaagcggcctcaagttttctcaatggaaatggtgatgtggctcccctgaacaccactctcatcactttaatcccaaaagtcaagcaacccacttccatctctgagtatcgtcctattagcctttgcaatattgtttataagattatctcgaaagcaatagctaatagacttaaacttgtcctcaacagtttgatctctcccaaccagagtgctttcctccctggcagacttatttcggacaacatcatcatagcccaggaggtcgcgcactctattaagcttaaatcaaaagggaaatcgggttggatggctgttaagctcgatatggccaaagcttttgacagagttgagtggccatttattgtggccattcttcggaaattccaatttcccccccgtttcattcatttgatctttgcctgtatttccacggcc

SEQ ID NO: 77283 - DNA, 3631 bp, Cannabis sativa
tatgctggtaaggaaagggaagctatactggatttgcttccatatattcgattgggctatttatcagaaccttcagagatgcaatctgttatctcttctcagggtccagtttgtccagtaagtaaaaattactttcactttcaattaatgatttttgagttttcatgttactttgaaagataagtaatgcataaagattatgggaatttgatacatacaaacagcactctctagtaatgcttgcacatgaatgaacttgcaattttggatattttggcgaaacaaaccataccttggctattacatgacttatagttaaagtggtatcttatggttttcttttgttttcttgattcctttatgaaatcaatatagacaagcccttgtatggaacgagctgtgttggaccagcttgctgattattttaggactcgcctggatggctatccatcaactttgaaagaagacgagactttggtaattattgtccgtcaaactagaaacattagattctatattataaattattgtattactaatattgattgttacagttagcagatggtaatttgaatcctagaaagcaagttgctacacgtcttatcatatcggaaaagaaaatgcttcatgcatgcctgcaagcaaccattgactatataaaccagttaccagaccattctgtatctccctgcccagctccttatgcccctttattaaaataaaggtaatgtatcggacttgcctttcgtaacaatgcgtgagtatcatagacatgcaaatgtttttttttctcttgtttctgttcattttggttcagggttctctttgcagagatcacattttctttcaaaagtgtggaagttcttaaacacttgagccagttgatacaggttacagggttaacgggatttgtttcttaaaaatttcaggagctgtgaagtaaagctataaataacttgtatctgtttataggacaacggattgactgggcatagattatgaataacaaggttcaaatttacaaaatagttgtgtctacattttgaatttacagtataattctgaattgtgtttttatacgttcacagattctcattattgttttccaacaaagtgtttttggcagatcctaaacatgcacaatcttattattttgcaggtagagacacaaaaaaatctagcagccagttggattatcaagaacttgagagaaatcagccattacgtgatcatgggtgcttgtgtggataacaaatcgatcacacattccacccttaactccattctccaagccccattgatttgactggcattctgtgagtcctccaatctcaccatttacgtatcaaggatatttaatagttctgttcactataaaaatcttgttctatttttgtaaatgtaaaacaaaataattagtgctaattcaattgtattcatttacttctgtgtacatctttggttttccctttggatttggccatgctctttttcttttgagtattgtcagtaaagaatttgattttgatttgcagcctcatttacataatcttaataaaaacccgaaatttgtttatagcttaatgtttccttaaattgtttactgatattataatattattgaatataaaaaatgaattggagattgtgggctatacttctgtgaattataacaaaatacagagaccagagttataattggctaaagttctatgtataatttgacaaagaacatagcatatctactcgagaacaactttgtacaataagctattgtttgtattgaaggaaaatcttttgtattgtaacgaacaactgattctcatcttataccaaaaaaagaaaaagaagaaataagctcacaaactcaacttggttctccacatatctccaatgaccttccttggttgtggattgtctgggcctctgtcacgttgtccagatgtaaaatacaagtaaccattccaaaaaccagctaatgtagtctttactcgatatggaagctttccaatcactgaccatgtctgtttagtttaaggaaaaaaaacaagtatatctttctatgagcaacatttgaaaaaatatttatatatatataaagtagatcagttgaagtaaatatgatacataccagtgagtctagatgaaattggaagacctctccaacaaggatcattctcttggtgagtgggtgtttctctgttgtgcctccagtgattatgattgaattgttgactattacccaagcacattctatatgagaattaggctttggcataggtggtagagttttccacttcatttcatcatctagcatgtatacatcatcataaaccacctgggaaaaagatgtaactttttttttaatgataagccattgtagaaaagccaatgaatattatgtctttgtaagtatacctcgtgcctgcgtgagcatttgaaaattggtgaccctggtttggccatgaaatcaccttcctggccaccgataacaaaaagccgatcgttgaatacaacacaagccctgttaacaatattgaatcttagagaaactcttgtcatgataatgatgatggagataattcaaggatgagatcaaacacctatgaggtccgccacggggaataggaacttcgtttcgccattgtttctccaatacttttccatcttttacagcaatactccagtgatccaatcctggtgtgtgtcgattctctttactccctcccattacatgaagtctccctctccatatctgagttgctggagcatacctgcaactttgaaaatcttttaacaaaacaaataactcatatcatatcatatgtagcaaagcaatgggaatgtgtttaggaaacattacctagggaaaggtagaggaatcatagtactccatttcttggtctcagtatccaacacaaaagaacgagctatgggggctctacactgtggaccatactgtccagaaacaacatatatgtatctattaccatcagtgaccactcccaaatgtgaatgagccatttctttaggcatatcaaacctctctgtccacttgttatcagtgaaattgaacacatccacatgagaatgtaccttaaaaaaaacatcaaaaaccagaatagtagtagtggtgtcatgtcattgtcattgtcaatgttcaaattttgatttgctaacacattgtgaaattggaatttaataaaacaagaagagaattttacatgatcaagtgaggcatatcctgcaaaaacgtatagaagattgttgatctgtactgaagctccatcaagacgaggcactggggcttcaggcattatctcccatggtaaatcaggtgcatccaaatcagcaaaggttggtgaaataacactttctttctatatataaaaacaaaacaaaacaagggttcaaatccaatccattattactcataaaaacacacaaacacaaattgggggcatacctttgattgaagatggctaagttttgtagcattggtgtggataatcccttttttctgaagtgcccaatacgtggtagtggttttaataattgaagaagaagaaaaccataaacaatttgcaatgacagcaactgatagcagagttgttatggatatgaaaaagac

SEQ ID NO: 77284 - DNA, 733 bp, Cannabis sativa
agagtattattgggcctctttttataaaaatttcaaaaatattatttttttcaatgcaaaaaaatatactgtataaaaattttgagtcttgagtttaagtgggccctagacgcggacctagcccaccttagctcaaaattaagcctaggttaaatgggtatagaatgtagagagtagatacgaatttttaaataaatttacatgaatacactctaatattttaatatattaatcataacgatttgtttttattattttagaatgcgtgtaccgagagtctctactctcttaatcttcttctatttattttttttcaactgtttgactcttttttttaacatattttattgtgagtctctatttactttaatctatattttaaagtaatcattttcagaatatatacatattcgtcatatcactacaccatcagtactaataagattaatataaaaaaatgactttttcattattttttcttttttcatttaattaactacattttaaaatcaacaaaattagtgctttcaaaaaaaaaaaaaaaattaacaaaattagatatctcaattaatttctaatagattactaaaaaaattttgttactcatatttaaaaattagcttagagtattttagagaaattaattttattgaatcattttgatatacatatttaagaaacaaaatggtatcttaaatatcataaaataagttacattacataaaaaaatatc

SEQ ID NO: 77285 - DNA, 527 bp, Cannabis sativa
  modified_base (225)..(226): a, c, t, g, unknown or other
ctgaaaccgagtccgggtaatgctcggatccttcaccatgaagtactcatcagcaaaacgccctattttgttgatggccttgtcatccgtgtcggtcaaccacttaaagcctgcctgagagaaatagtagtaccctgacctgccttatttgtgggtggacttcaaatcgaagaacgaggcaacctcataaggagaaggagtaccccatccttgggaagcgtagannacgaagagggcagacaaatacttaatgcccttaggagtgattttagccaagcagagaccgaagaagtcagccacatccttgaagtacttatgcaagggcatcaacgctccttgctaatcatgggcccccgaccaggcgcacatccccttgttagggtttatggcacaattattgtgggcgggaatgtagcagtccagctcgcctaggtactcgtcttggtcaagagttcgaaggcgcgcctccgtaatcttggatggaggacttacccatctggcgcccaaggcaccctgccttctatgag

SEQ ID NO: 77286 - DNA, 818 bp, Cannabis sativa
attttctatacacatatatatttatataaacaaaatggagataaaaaaaataggagtggagagatccaaagaatttcaggtgaagaagcttcaaacacgcacttaaaaaagtatcatttataattctatacgtaactaatttatttgtttatttggatgattttagtctatatatctcaaattatacttattaatttttataattctctttagttcttcatttttttttttttttcattagtttcataattttctctactacttcaatttttaattatgagtattctttttaattaagtttgtagaattagtaaatctagatatgattttattaatgagaaggttgtgtaaattgttccccatctatttttttgtcaataactttatacttatgtgtcatataatttttttctatcattattttttctgttttttatttgtcaattatgttatactaatgtaacatatggtttatatgtttaagaacttattgattttgtgtacaaaatttaaagattgttgcaagcataaattatttttaaatgatttttatttttgagtacaacttcaataaagagactagaataataaataataaatattctaattaataaattttataggtgtgtattttattcaggatgttaattatggtaaagatgaaaaattgaacggtgaaaaaaaattaagtaatgagaagttttcaaagttgtaccgtcacattgggataaatgaatctataattttttttttattaaaaacactatacatctatatgtaatttattaggatcattatttaatatattggttattcaa

SEQ ID NO: 77287 - DNA, 1321 bp, Cannabis sativa
atatcaatggttgtgtgagcctggttttcttcaatacgaatttcatgcttttgaagcatgaattgatcatctacaagagtaactctttctcttgaagtcaagtttaccacaacagtttcatactctgtttcaaggccagcaagaatgtatagaataagttattcttctgtaattgggcttctaactgcacgaagaccgtctacaagacttttcatcttgagtagatattcatcaataggcaatgaaccattcttggtgaactgaagttgattcatcaagtgaattttttgagcttgagatgcagttccaaagagttgctcaaatgtgttccagatttcaaaggcagtagcacaattcaccacatgtccaatcatatattcagaaatggttgacattagccaagaaagaaggaattgatctaggtgcatccatctattgaatccaggattgcttaccattgttgtggattctagagcttgtcgaattcttggttgaggctaattttgattgagaagaattccttcaagatcatgagctgtgatcgcaaggagtacttgagatctccaaaagaagtagttatttgatttaattgaagaggtggaacaaacattattgttagtacaatgcattgatgtgttgtagtgtcagaggaggacgccattgatgttgaccgtgagttttgataccaagttgattattggtgaagcataatagaagaaagaagagaacactgtgtttattattcaatgaattaaaatgaatacaacaaagttatatttattgtaatcactttaatgagagctaactacctatgagacctgataacagaatttaactacatttctaactgttaattaaaaacaagaactcaaagtgtaaaaaccaaatctaactaaccattatcacttaatactattcacaatacatattgagcttgagcaacatagactgattataaattccaatcacgattgaatctttagaaacatgatggatgcatcaagaaaataatggtagtcgtcatgtaattaattatcagtctcacatcacaattgatcgtcgcaaactcaatgacggttttttttcttttcttctcgagggtatccgaattttaatatgaaatttaagagaaataagttggatagattatagtaatagtatcaagacaatcatatataccttattttagagaaatcggaataatataataaagacaatagaaaaaaaaataaatcaataaccagacataaaaatataaacaaaataatttttttcttggatatgtaaatataccaaaatgtttctccatccatgttctcct

SEQ ID NO: 77288 - DNA, 597 bp, Cannabis sativa
gcacatgggagatatgtcgatgtgtttagttgtaagttgaaggcaagtgggcagggtgtttgtcacggctctccacctgaaattcttcaccttaggaggtattttaaggtgcataacttatgccagaaccttaaattgtttgtaccattctgcactagtttgtgattctgaagcatgtcataagcacttctaattgaaaactcaccagatctttcctagtccaagaccaacagtcttcggccgcagaagaactcaaaggaataccaataatcagctcaacatctcgtttattaaacatatcattgactagaggagtatcccaagctttagaatgaatctctaggaggaaacttaccatttgattagcaagaccgatcttaggagaagtgacatatgggttcgtgggatcaagaagccaagaatgtttcaaaatgctggttgattcccctgttccaattgttctcctagcatcgagtttgacaaggctttgagcactctaaatactgttgctataatttataaacactacgcaagtatacgcaatcaagtagtaaaactcacacaggtgaggtcgatcccacgaggattgtagttaag

SEQ ID NO: 77289 - DNA, 702 bp, Cannabis sativa
tgtagtgatgcacataggatgggaaattggtagggagtgcactcccattcccatttccattccctttaagaatttttatccctttccctgcttattctccttcgagaatgaagtaagaaatcccctaatgagagcagagacggaacaggaatcccctaatagaaatatgtttagaataaaaatttaaatatataaaaatactaaactacataaaaattaaaataatatacattataataaactaactattatccaaaacacaacttaaaattcaaaaaaaaaaaaaattactaatatactaaaaattgtaaacataaattataaattataaaataaaatactaaacgaatcatcgtcgaggcaggaagtgtgatccccatccccacaccatttaatattcggagataaaaattaattcagtcaccgccccatttcctatttagatagaaaaatcttcctctcattaagagtgggtccccgcagaatccatcggaaatgtgcatccaagaagatgataaaatatagccatcaaaattacatcaggtcatatatctttacatatatatatgtaatgtggcgtcttctattgtccttaccaattccaatattatatcttcttccttagctattttgagtctcattttatttttttccagcttaatattgatatatttatatatatataggcagaataataatgga

SEQ ID NO: 77290 - DNA, 1056 bp, Cannabis sativa
ggcggtgaggggctaggtgttggggtccaggctaggtgctcggttgaggtcgtgctttgggccaacaaccgtgtcagggatctggtccaggcttgggtctttgtcccaatcagggtctgggttaaattcaaggctacaatccaagtctgggtccaggttagggtcgaggccatggtttggtctgggtccgagcaaatggctccaagttagagtcagggctagtgtccaattttgagggtcggggttcacggttattagggggttgcgacccaggttggggttcatgtccatgggtaagaagtcgaggtcagggcccaaatttaggctgaggtgtgagtcaaggctggggttgaggtctgggctagagtcgggagctagggttggggtcggggttggagtccaattgcgaggttagggttcaaaattgattaaagaaaattcaaatggagtataattaattaaagaaaaaaaaattgtttaaataaatttttaaataaagttttttttttcaaaaactttaagatttggatttgtctttaaaaaaattgaaaacagttttaccaatgatgttttttgaacatatttttacttctcaaattaaaaaaataaaaaaaaatacttaaaatattgttacacccttggcttttgttttatttataagttgacattaagtaaagtctcagaactagatagcgtttggttggaggtaataaaataaaataaaataattttcattctattcttttgtttagttggattttatagtattatcattctaatggaatgacctttacactaatttggtggattgactattttattttcaaatagaaaggaatttcattcaaatgcaagatttgaaaaaaatttaataaatttttttattaatttttttttttatatatttttaaattttatttcattctatttctattctaattcccattctcattcttatttttatatttttattcttcacaactaaacaccaccaaaattaaaagacacccacctaatattttcataatatccccgtattttatactagttaataat

SEQ ID NO: 77291 - DNA, 546 bp, Cannabis sativa
gtgttttcaggtgaaaaattgagagttctttgtttttgtttattttggtatctttcgagtcattttatgatgaaaatgatcaaatattgaaaaagagaatttcgacatataaagtaatgtttaggtacggttcctggtgcttaaaaatttaaaattcgtaattttcaactccaaaagtcgcggcccaaagtcaagagttaggctttctagaagaaaaataaagaaatggtaaaagtaaaaaaaaactacaatgaaagccgcgacatagcagagaatgtcgcgacattcattgattcgctggaagaaaataaaggaaaaaaaaaaaaaaaagtcgtgattgtgggaaacaagaggagtgctgggacattcaagactatgttgcgacatttgcaattttagggaaactttctcgtttttggtctataaaaggctgtggaaactttctcaagaccaattttgagcataagaggacagatggaagcagaagacactattagaggactccaattagtgttctttctcatctatctctatcttttatgtttt

SEQ ID NO: 77292 - DNA, 2121 bp, Cannabis sativa
aaaaaatggcactattcaacaaaatatttgcaataatacccaaaatatttgacttacacattgagtaaaagacattgctttgtagtcttgccatgtaagcatttcttcatcatcatcaccagaagtacaacttttcaagctctcttgttcatcctattaatcatcaaattttccaaattattattattattattattttattattattaatatcattattaattattaattataaggaatttttcgataaatcactctatctattacgacatctaaaaaagtattttaatctaattcttataatgtacgttatagttatttaaaatcacaatttctgtatgctgaaacgaataggggctctatcaaaaggtcaattttgcatatttatgtaacaagaaaaggaattagttaccagtaactgtttcaaagcttgtggagaatgagtaagaaaatagatagcaaaaagcatagttttagcagtggtttcatttccagcaaagagaagattgataatgaaatcagcaacagcttcatctggtaaactttcttcctctaataatcttgctaaaacaccattactcatactcacttccattgatccttcttctctatacatctttattgttctatttatcttcttaattatcttctctcttgcctataatatcaccaaaaaaaaagggtaaatttcgacatgtttcgataagatgttagggtaaaaatggacgaagaaagactttatttttttcgataaatttaattacactaaacataatatttatttaattaacataattttattatggagttaagtgtgatacaagctccacaaataatatttttaattgataattacatatcgaaatagtaaaaaaaatctcacaaaatttttattattttaactaggagtaattataatttttgctttaagtatgttaaataatttttttattacagctataggttattttctaaaataaatatatatatttaggaaaagaaaagtaaatactattttagattttgtgttttgtaaaagttatttattggaccttctgttttgtaaaatgataaatataatcctgtattttttaaaatagtattaaatagtaccctgaattgatttttatcaaaataaaacttaataataagttgatctaaatgtgttattacaaatttagttacgttttctgtatctatttatgctaagaatagtcttcaagttgctatactaaaaaaaattgtctaaaattgagtttaaggttcatttgtataattttaaaaaatataagatctattttatcatttaacaaaatagtaagtttaaatgataatttttacaaaatacagaatccaaaatagtattaactaaagtttctttttgaaacccaaaaaccatgagatactcccctaaaatgagtaacttgtaaccaaataattgaacttgtagtagaaattggtctttttttctttctaaaaatcttcccatatatgtcataataatcaaaattattgataaataccataaagaaaagaaaaattgtgttaccttcatagcaatgtgataagggcaacctggtaaatttataggtagagaaagacaaccatcaacaaagtgagagaacaaattagccatctcattaatctcactttcacttgttactcccaataattgattcaccattagattaatagccacctaaatcaaatcatatacattacatcaataaataatttctccataataaattttaattaatcataagagggaaaaaaatgtttagttaagccttaaaaaaatatttaatactattttaaactatgtattttttactaaatattatctcatgaataaactcgtaaagtttaataattatcgggtatatctacacattttcatagactcgtgtataaagtctttatgcaaaaatattttgagcaaaattaaacacatgcaactattttaaattaatttataatttataaagtttggaaaaatatattacaagcaaaattaaattcaagcaattattttgattttttattaatttttcttttaaaaaaaaaaaatataacctcaaaagagtaatatattcgtaaataaggtttttagacaaaaat

SEQ ID NO: 77293 - DNA, 969 bp, Cannabis sativa
gaaatgctcaacttctattaggattgcgtgatgcctgaagtaaatgagcaacttacaggggtagaggagattccagtggagctgttggttggtggagttctaaaggaggtcacctgagtgagtgctttgctttttattgtttttatacaggtttcgctatgtgtgagatttaactctgttttatcatgcaggttaatatgaagttggcatacacctattgttgagcaaaatttgctactctaaaagccataacaactaccagtgaattgaagaaggcactaaaagatgctaaaaaagaggctgagcaaaaacgttttcagttgggtgaagtaaacaagcaaattgttgttgcgaacaagcttattgaagatcttaggaaagagattaaggacatgccgtccacaaccaagcttgaggaggaccttaaggtgctgaccaaagaggtaaatactctgaaggatgaaagggaaagtcttcgtactctccttcaaaaccaagaagccaaggttatagagctaactggggagaaaacttccttccaagaaactcttgatgttgtgcgggtaacttttagtgccgagtgggaagcacacagaaggaatttgagagcttggaaatagtttccttggatgttttctatgagttctggaaggcaaatcctgaggccaactttgactatctcaaagaagatctctgtactagctttctcagcttgtttgaggcacaaaaagtttaggaagaagcaaggctggccaaaaaaaatactcgtctaccgtcgaagagcatgagaaccttgatgtcgctcaagtttcatccgatcaatacaaagaacctgggactcttttggagtaatattttgaaacttctttttatctatttggcctacaggcctttcctttagtacaatatggccgaccaagcagctttaaaacttgggaaaatgttttcattttgtttaggacaactggc

SEQ ID NO: 77294 - DNA, 653 bp, Cannabis sativa
  modified_base (609)..(621): a, c, t, g, unknown or other
gaataaaatataattgtttaagcaatattttgagctattaggccagataggtgagacccaattcctaaaagcaatttgccgtacgaaagtgtggtaatgttaaaagtgataggcgaggacgtgcaccttcgttggaaaaaggaatgtcaaaatggaggtgcacgccactaaaaggcaatctcctttctgcatcatgtgcctttttcgaaggttcgtagagggggcagttcctcagatttcttagaatcatgtcaaaggcgtgtcataagcaatttttaggattgtagatggtttcagacaccctttcagcttccactttcggattacccttgagggtagttatgtacacttaaagtttcttataagtttaagtaatcattcatggtattactggtatttgaaggatcatatggaatgtgcatatacgcagtccaaatttatctttattaatgaaaaaaactatctcgttggtcttcttgggcctactgatggactgaaatttattgagcctctgataaagaccatgtgtctttattcgaaaatacgaataagtttcaaaattcttactatcaattcaaacctaactatatatatatactagatgagagnnnnnnnnnnnnncacgtaaatattagttttatataagttctagt

SEQ ID NO: 77295 - DNA, 560 bp, Cannabis sativa
tttattctaatttagccgatcttagagatctagaacataacagtttagatgctcatgtaagttaggctatctacggtttaagtgttcacgaagatttgggttgcatcgcctttcattcctttggtcataattgctaaccgaccttattgcagagtaacattctaattgataactctgagaattactcatgctctcttgttcatcttgataatggtgacatgtatcttccccattccatgttttcctttcacatgcatgaattctggtcgatctactttaactaagcacccttgaccttgacccactaggaccagtgcttgatcttgtttcttggggttcctctcgcactggcatccgtctttgaaagagatttgacacacgtcctcaacttaagtaggtatgcatgctatctttgtcattttagtttggtctttgtgagtgtcttggtggatgacctaatccaggtcgtctccctacacccatcgcatcatgctaagtaaacccctggtctcgaggttgtgtttgcctagcatctttgttcatgcgagatgactctgggt

SEQ ID NO: 77296 - DNA, 1327 bp, Cannabis sativa
gaccaaaataccctctttccctttttctctattatcaaaaccactcaatttggtgccctagctaaccctagctcttcactactatatatatagctatttcaacccaaaaccctaatatcaaaactgaatccaaagcttaaacctttcattcttgctcttttcttatatgtgttttttccccctttttcttggtattggactcttaattgaaagctaaattagagtgataaatccaaccaaggtaccaatttgttttttttattattttattacaataaaatttcaatttttattggatcccttttctgggtttgttttttgtttgaataaagttatgatttttatgtatttttactgttgaagtttatacgtttgtttattttaaattattaattaaagcaggaattgtgtgtatcggcattgtgctaatttcagtgcatattctccgaaagtgtttcctgcaaaattaacttggggaaagtgggcagttgtgtttcatgttctttggttgaaattcaacaatcattttcctcatatccaattttcaacatattttgtttttgttataaatgtattgattgtgtttttacactcaatttattcttgatggttgtatagtgtaacttttggtcacttgtgtgatcatttgtaaaaatagcaaaatttttattagtaaaatgactttaaaataaaaaaaaattattaacaaaataaccttgtacaaatgaccattatggttaaattaagtgaggttattttataaattttagtatttcaaattgttattttgtcaaatttcactcgtacaatgttattttactaatacaatttgttatgaagttattttcctaaacaaatatgttcataaaggctatatttacaacaattttattgaattgtgtaatctgttgttttctttcttcttctttttggaatgtgttttgttttgcctgtgatggtttttaaatatactttgcagagatttatttatatatatctctatgaaaaatacttaaaatctgaggcttttgaaactaagtgtttttctgctcaaattagagtacaaatctttcattcattataataattgttatgaatgttcatctttttctttggattccttttctgggtatattaaagtttggatcttttttatgtatttgcatttcaatttcaattttgtatgttatgtttatgcaagtgatgataaaaatagacagggacatcagaacttccttaaagaagtgttgatgatttgtcgttgggaatctctctgatgcattattgaatatatatatatatatatatacaatcatgttttacattt

SEQ ID NO: 77297 - DNA, 872 bp, Cannabis sativa
agtggtttttttttgttgggtttatacttccttaaatcttttctcttcatctcaaacaaactctgaacttttgtattttgtgcttggggtcttgaggaacttggttttgggtatagtgcgaaggtgagaagaatatcaagcttgtgttaagttaggactcaaaaaaccctagcaaaaagaggttaaagttatttttataactttcttgatgatttatgtatatatttatggtgtaacaattttcctagactgcatatagtgtttgtaatgtaagttaaattttatcatgcattcatacggtttgatatcttttgttattttatttttgatgtaatatattgtattattgaaattgtaaaaaattttgggtgtgacctgacttcaaatgggtcagatattagaaaactgttctggactacctttaaaattatatggttgaaaattactcgaagagtacttgagttttagctttgaaattactctaaaagcttctgtaaaactcaagatatgagtgttcaaagtttggtgtgcaatctgagaaaattttggacagattaggatatccaaaattttgtcactatttgagcatgttttagtaggactgacaatttgtgtcacaacacgatgacatgacccgaaaataatacgaaacaaatgggtttgggtgacacatttgatttccgtgtcaaaattgagtctacatgtttattaaatgtgtcattttatggtcaacacgcttagcctgaaaaaatgacacgactataacacgtataagcatatataagtattttaaaaaatttgtattatgtaaaatgaaatataactctttaaaaaaaaactcataaaaatactttttttttaattttctttat

SEQ ID NO: 77298 - DNA, 764 bp, Cannabis sativa
  modified_base (186)..(195): a, c, t, g, unknown or other
  modified_base (473)..(479): a, c, t, g, unknown or other
gtacaggaggttttgcgagttgcatttttagctcttaaaatgcttttttgcattcctccgtccattcaaattgcttatttcctcgcaggatgctgaagaatataacacacttgtccgctgactttgaaataaatttgttgagtgtggcaatctgaccagtctaactttgaacttccttggtttttnnnnnnnnnntcatatccaggagggcttgaattttctctggattggcttcaattcctcgagcattaacgataaagcccaaaaacttacccaagctaactccaaaggagcactttaggggattgagtttcatgttgtacttcctgaggactttgaagcattcgtccaggtcatctatatgccccccagccttcctggatttgacgagcatgtcatccacgtatacttccatatttcatctgatctggttcttgaacattttatttaccaatctttggtatgtagttccnnnnnnnttgagaccaaatggcatgactttataacagtagagacccatatctgttcggaaacttgtattttcttggtctggtggatgcatcttgatttgattgtacccaaaataggcgtccacgaagcttaaaatctcgtgccctgctattgcatccacaagttaatctatcctcggaagtggaaagaagtcttttgggcacgccttgttgaggtcggtgaagtcaatacaaacttgccgttttttgttcggcttgggtactagtataggattagcaacccaggccgggtag

SEQ ID NO: 77299 - DNA, 500 bp, Cannabis sativa
tatgagctttgacaataagctagagagattaagctcactttttggtaacaataagtcctttaataactcttcaggcattgcttatcttgctaacaaaaatagatttggtggtggtaactatagtccaagaaacaatagcaatagaggaagaggaggcaataacaatggtaataattgacttggccaaatttagactctctctaatgatttgtcgcaatcttttgtaatgtactttgccaatctaattttcaaacaccaccaacaacgaactcccttcaactttcgaagtgtgcgtgcttacttcctctcgaagtaagtcttgtacaagttttctcccgaagacttcttctcttgttcaatggagctctttatcctattccaataacagtgaaagaacaatctcacaatgagcactcttcacacaaatatgaaaatatgaaataaaaaagacttgtagagatgaattcatttggctattctcactacaagaaatgtcactt

SEQ ID NO: 77300 - DNA, 935 bp, Cannabis sativa
ttgtttttagtttgttaattagtttatttgttgagagttgagctgtgtatttatttcataaacaggttttggggtaatttgggaattttcttctgtactcaatattaaagtcagtcaccgttgtgcatttaaacaagggaggattaattagacgggtgatttctataaaaatattaaattcagcgttaatttacggtcaaactctatgaataaaattcacctgacccaaactccctatccctttcctgtcccaacaatcaaaaattaacatttgtccattttatttattacatgttaaaaatttatgttagtttaagaatttttaagtcaaaaatcaataaatatcaatacattgggaaatacaaaacagtaatttattttctttaattgttttttaattttattttaggaaagtaaatatttattagtttatttgaaaaaagttaaatatttcttatcttaaaaatttatctcatatactttcttaaaaaagtattttggaagacttctttattattttggtatttataaaaaagaattaaatatatgttataattatttaaaattattcgtattttttaaaaaaaattaataatttataatatcaaaaataatgttcaaatattaccatacgtgtaagaaaaaatagttgtgagcacaacaaaatatttaaatcttattttcgtcattgtaaactactcaaaattttctaaaaatttacaaatagtgttaaataactattacgtacacggtcataaaaaaattagactaaaaaaatcttctgaatgttgaaacagattaaaaatctactgaaatatccttaggccccgtttggggaagctttttaaaaagctaaaatcacttttggaaaaagttatgagttaatatgtgtttggtaaaatttaaaaaatagttttttcaaaaatttaagtgaa

SEQ ID NO: 77301 - DNA, 693 bp, Cannabis sativa
attaccggcagtattattactggcgaaaaatacccgcctctattaaatagggtattaccggcggaataggcattccgccagtaataactattaaatatataaataaataaataatattttattttaaatatattaatactggcggattgggattaataccgacggaatcctgcttctaaaaaagagggcggtaaaataccgcccaaacgtttaaaacgtttattaaaggcagattaatgtcctgccggtattaattgtgattttgatcgttgaacattaataccggtgggtcctgcgggtattaaaagtctataaaaccccatttctatttcagaaatcacattttgcccatttctcttctcaaactcactctgccccttcgccattttcaaactccgttctccggccattcacttcccccagcaccgcctcttgcattagtgcaccgccaggtaatgctactggtttttttttttattattttttttacatattatgatttttttttcttaatatttatttttttctccatctttgaagtttgagataaaaaatcggtggggaaaaaaatctcagtaaaacaccggtcggagtatcattgtcgggagtctaaaaatttacaagttagttcttacaatatttgtgtatatatgttttcataaaaaataatttttttttcattttatatgtaaa

SEQ ID NO: 77302 - DNA, 583 bp, Cannabis sativa
atcttcttgaaagattatacgggtttataatgaactcttctctttccttagatgataatattgataaatttaatgaaataattgtgggtttagctaatattgatcatgaagtagacgaagaaagtcaagaaatcatattgctcatatcattgccaatggcatatcaagaagttaaagcagcaatcaagtatggcatggatgtgatctcgttggagggtgttcatgcggcattaaagtcaaagggctctaaattgcaacttgagaaggagactaggaaagaagaaacctatcttgcaagaggaagaagtccaaagagaggatgatcaaggaacaaccagtcgcgacaatgttaccaatgtggaaatattagccacattaaaagattctgcagtcaattgaagatgaaatttggtttcagatcaaactacaatgacaagagatgtaacagaaaccaaaaccagtctcaaaatctaatgttatatctcagaaaataaataatatataaatagacatattttattaaatatgtaattattttggtaacgaagtaagattatgatcttgcttagggtaattattgaga

SEQ ID NO: 77303 - DNA, 691 bp, Cannabis sativa
taattattcctaatttttacacaaacaacagtgatgtttaattattcttaatcagtaattaaaagtgatgtgatcttaataatataaatggttaatatttatgcacataatgtgtgcaatttgagtatctatccaggattactcttgaatatatttataaataggctaattatatcagggattaacatttttgtctctacagttggagcatctattttttatattttgaaaaattataataactaatttttttttatatatatacgacaatctttaattatagtacacatctcacccattttcaaggttcaaaaataatcacttgcatgtgtataaataatacttacaacatccagctgaccgtttaaagtcagttctccgtgcattgtaaattgttttaaaaaatttaaaaacaagtagagtgtttattataaataagaacaacacactaaaaaaaattgtgttctaagtaattgctaaaaataataacatccccagctataggaacaaaagtagcaacaaaattttccaatatataataatgtgtacccttttaggtggagaggtaattatgtggcactgctattctttctcattatggaagaactcctcttatgagtgtaactggtgggctttatcgagttaaaaattgccaataaagtaagggatcattaatattacaatacatgtt

SEQ ID NO: 77304 - DNA, 1723 bp, Cannabis sativa
aagccaagccataataagagtaaaattgaacaataatgttgcacctgctctgctcataaagtcaccttacctgttccattgggagtaatatattagtaacaccactggcaacaagatttgtgtgagcccattctgtagcttttaatattgattcatcagtagccagctccattatttgtgagaacaatcgaacttctccactgaaagctataatgttgaaactatcttggggattaaggttagaaagtgattccagtagagcattctttacattctcaatagggtctcctcgcatacttccacttgtatcaataacaaataccacttcctttctaaacacctatcaaatgtacagaaaatggacatagacagttaatgcttaaaccccaattttacagctaaagactaaagaagctataataaattttaacgattacaaaccttcctagtctgtttatttccaggatatagatacaagcaaaacatctgtctttcatcagcatcaagaagagatggagattgcaatagaacaccaccaaataagtcattagaagaaagctgtaacaacatcacaaaccaattttaatttcacattagcattggctcaatccaacttatgaaacaactaaattgttcgttgtcttacagtgtatgaaaaattgaagtttgcatttgaccatgcaactacttctgcttcgtatgagaaacataatttacctccttgacgcttcatgtcctagaaaaaatatatactaaaaacacatcagtttaaaaatttatacatgaagaagctgaacacaaaaagccaaaagtaatggacagtttttttaccttcaaaggatggctggcatttttgcatagaatttgtgtggctgtgcaaggattaacattcaacaaaatcttctctctctttgaaactttcttccccactggattgacatatgaaggaaaactaaaaggtacccggaggcagtactggtcaacctcatatactaatttctgagaccaattggctttaactgaaataaaggaaccaccttcaacctgaaagaaaagaaaatatagaatcatgttttttttggacagtaataactttagaggtggcaagagaagtaatactaatataacctttggaattttgaaggtgtatatttggcatctgagaaagcttccttcttgagctttagacactttttctactcttcctatatcgtctcttccgatcaattgagtacgatatgatcttccattaacttcaacctcaacacctagaagtgaaccctgttagaacatcatgggtttttttattgagaatttcgctaaaataaataatcttgaaagttttaagccaacaaaaaatatggttgtttcttcaatccaaatctaataatttgctataaagcccattttttcaggaaaagggagaaaaaaacagaggaagtcaaaaagtcaaaaggcgaaagttttaattcagtagtaatattataccttctctcccatgggcagagcaatacggcattcgcagcgcttagaggacattatgcaatgcacgcgccacgtgccggcgatggtgacgaacgctgtatctaaaaaagtatcgatttccatggttattccgtgcatgtgaagtggtaccaaagccggcggcacgcaacgcccgtgaacgtacggctggtagcttggcacgtcgggattgtccacgatcgccggctccggcaccacc

SEQ ID NO: 77305 - DNA, 1632 bp, Cannabis sativa
cgtggaacgtggagatggtccatggatggtttaaccgtagtgacgcgaaagcaatcttcaatatccaactaccggttgatgacacaagggatgcttggatgtggatgggagaacctagtggtctcttctcaattaaatcggcgtgccggagtgtcaaaggtatcacacatactacccaagcggatgcaaaatggaagtgtttatggatatccaaaatccatcctcgtcttaaactcatttggtggcagcttgagagggatgcattcccaacaagaggaaagatagctcaatttatggaactaaatgatgtgtactgtcctatatgtggggaggatgtcgagacaattttccatctgctatggaaatgcaatttggctaaagccatatggttcaactcacctatggggcttcgggctgaattggttgatgtgaactgttgggaacattggaaaaattggttcaaggaggacttcaatagacccccaaatctcactttccaagagattttgatcactgctctatgtgtggcagaaactgtgtggtctgaacgaaattctattgtgcattctcaatcgagatgcccgcctcagaaggtgttactgaatgctaacaataaaattagagatcatctgaaggtggcttgcaatgaggtgacggaattctgtgaatggcgccccccacccgactcgtggctttgctgcaattgtgatatttctgtggacaaggatgatgtgattcttgcaacggtggtccgagatgacaaaggcaacattgtcatcatcaaaactgagagaagcctctccactgacccgctgataggggaagggcttgcagtctgcatggcggccgagttaatgcataagatgagggtcaagaatgtgatctttcagagtgacaacatggaggtagctacagatctttccatggaatcaaggaaggatatcaacttcaaactcacggatatacgaaagcgcttccatcaggtgtgctctcagtttactgggtggggcattggtcatgtgaatcgaaggtgtaattatatggctcacaacgttgctgcttgggcgagggagacaaggaaaataggcttaacaacgcctacggatatggaccctcctgtgctttcagattacatcgaatggaggaagcacgcaggctaatctgctgcttctcatcttcctaattatgatttacttctgtagtttctttttgtatgctttatgtttggatgctcttgctggtttttgttgtcttttcctgtagctttacttcggcagtttgtactggttttttttaaccttgactattttgtttaattgaattgctttgagggtgttcacaccctctctttcatcaaaaaaaaaaaaaaaaatggtgctaggcattagtatttacttataaatttctaacagattatgaatttgctattgattaaactattatttaactctaaaaaaaaaattgaagaccaagacacaaaattaacatgttataaatttttaaaaatttatttaactatgggctcatgtgtgaagcacattaaaccccaactagttaaaaaaaaagggtaaattgcggcataaatacctaatatttcagattttttacatttaaatacctaatgtttatttt

SEQ ID NO: 77306 - DNA, 1245 bp, Cannabis sativa
attcatttttagctttttaattttttttctttgaatttgtagaagtttttgtgtaaatttagaaccatgcaaagcgtgaaaagtcaaaaaaatattttttttttcgaccactacagtggtcgcgactagcaaattctatcgtcgcgaccccagaggttacagagaaacaagaaaaattttgaccttccagtggtcgcgaccagactaatccatggttgtgacaaatttcctactcgcaaccaggccattatgaagtcgcgaccagggatcatgggtaaaaaaactcaattttggccaatacactatggtttcggccataatttttgtggtcgcgaccactgaatgcaagtgaaccctaaagagcctttaaaaatctaattaacccttaatcgcctcttaatctaattttaatctcataaccacttcccacacaattcttagctgtacaaccacctctctctgaaaatttcaaatttcttcatctcatcactaatctttaacttccattcaaacccaaacacattattcttcatcaaactttctctttccacaataatcacaccctaaatcactcatcttcactcaaatttgaaaattatcattcatcatcttcaatcttcaacttttcaagatttatcaataataatggttcattaatggtctcttcactagtaagtatcattatcaataactatttaattgatttagtgaattttctattagtttgaagattttaaagattatatttggggaaatgtgaatttatttgtagattttatgggctatatttgtgttattagtgttattggatattggtttattgtgactttgtgaagttttgtgacatcgggaagtggtgtcaaaatttctcgagaaattttggtgtgtgaaaaagtcaattggtgattgtgataatgggtctaaaaagatcaagggtgaatgaagcgggtggttcctcatccaatcctcctcgagccacctcaaggccagtgtttgataagaataggtttgttagtgaagaagctcaagataggttcctccttttcattaatgggccatatattgaagggattgattatactaatgtcccaatgaacagacaacctaagtttgagagtataaggctttaaatttaaaattggaattaggcttcatttgtcgatgtccatgaaagagccaatgttaccatggcttgtgaattcttagctaattaacctgaacgaaagaatgtgatggttaaggttt

SEQ ID NO: 77307 - DNA, 2522 bp, Cannabis sativa
ttaaaatcaccatccacaaccttccccactaaacaccccccatgataatgccaaaagctagtaaccgagtttcgacaaaacgcttccatcgacgaatcatcagtgtggttcgtcggcacaggagtccccaagaacatgaaatccctagcaccattatagtcagtgtacttaaatcggtccaacgaccgactcttcagcaaatccgctatctttctcgttgccctaacacaacgagagagatcagtcggatcagaaaagtagttgaacctaacacgcggtgtggcttcagcatcagttcctgaagccaaccagagcgaaccctgggacaagggccccacgattttttcgacaatgcttgctagactcaattgtggtggagataatggggtggagtagaagctaaatggtaatgaagttggagcaaatggtaagctataagagacagtttctatgtaataatcagtagtgattccaacaacttgggctgtggaagtatcgaatggaaatgggattatgagattaatgttgttacgtggattgtcagccatgaattttccaacattgggttggggtaagagtatgggaataaattgtgatgagaggtctgaatgtggaccaattccactaagtagcaaaatttgagggcttccgagtggacctgcacttagtattacttctcctttgttgcgtattattgccttgtgaaacattcctcttgcatctgtgtatacaactcccatagcagatggttctgtttattgaaaacaataattaaaaaagatactaattatatattaatgtcacactaatatatatagttaatttttatatgctacaattgtgttctattattaaaattacataatcgatatagaagactcgtacaatataattttgatcagctttacaacatttattaaccgttttagaatttttagtagagaaatgctgagagttaccttaagatgtcaagtactatatatttagtacaatttaatatccagtctcacaatcttaatttgataaataatttaaaaaatcactaaccaatcacaacatgggatgttaggcctgcctaataacaagactcttttatttatgaatgtttttacaaaaatactaaattttggacaaaaaatatttataattttactgttacacagatttttttacaaaaacactgtacaaacaaccatataataataaaatagaacaattaaaacaaaaaataaccgtagaacaaccgtgaaaacttaacataatatacagtaaactttcacagtatttttttaaaaaaaaaatttccccacaataaaaagagtaaaaaaataaaaaatgtatgtggtgtaaaaactcctttatttaatatatgatcttttattattattacgtgttatgtttttgtttagagagtcaaatatatggaagggatgagccaacttttctaaccagaaaaatattgccttacttatttaaaactctaattatgatctaaatgtaggtgtagttgagtcaaaacatttatatatgttgcactaaaaaaacagatcttattttaatttgttaaaaagagtcatattaatgaaattaagttatatatatttatgtaaactgaacttataacatacttgacattattgtagaggagaatataatcttcttgacagtggcatgaacagcaattcttaaatttttgaggtctcctttattaagcaactccacagctccatgtcttcttcccatatcatcaaaaatcgaacccgattgtttagctccaaccttatgttctaaagtgactccattgtcaggaccaacaccaacttctaaaaaagcttctttcaccacactttgccaaactgacaaattcgaactcgaaaaaactatactctcttccacccactcataagctttctcaacctcttcataatcccattccataccggatttcgaaagaaattcactatcggctctagaatagaatcccgcgtttatcatgcttgtccctcccaaaaccctacctctgacattttcaacgccatcctctgaagtgaacctttgagctggcgtatcgccattaatattgtcttgttgttggagattagctaaaaagcctgatgctttcaagacattagggtaagcattaggaatgttgcctctttcgaggacaagaactgagtacttttctgatagagtcgcggccaatggacaccccgccgtccctcctccaatcacgatgtagtcgtattcttctaatggtggcatgtcagttgcattgtataccgatttcatgtaactaaaatctgtttattggaaacaataatgaagggtaagacatttattttcgtctatttttcgatattcagtaactcctgttaaaaaataatcacaacaatctagtataataattaaacatacaatatatgtaatatataaatatattaacgtaccataatcagatgcatgtacatgcaattggtcaagaaatattgtgaaaatgattagaagaagagatagagaaacta

SEQ ID NO: 77308 - DNA, 513 bp, Cannabis sativa
tttgagagaattggaactcaaccagttgatctcagaaacaccttgaaccaccgaagagagcagagagatagggtaattcctccccacgtgtaacccatcaatgttgataactatgtgccagttgaagttcaaagaggacaacaggtgacatagaccggagccaagttgatggggtgcaagcccaaatagatcatcttaagagcatagtacaaagcctggccggaccaaaactcactgaccttcaacgagcatgaggttcaccatttactactcaaataattatacttcttctgctgcccaagttcaaaatgcctacctggaaggcatatacttgtaaagaggacccattgtcccacataaagaactttgagatgataatggatttgcatgcggtgcacgaagacgtgtgttgtagagtttttctagaaacattggcaaatgccacccaacaatggtatttcaaaataacaccagacaagtttgattcatggaatatcttcatatcagaattcc

SEQ ID NO: 77309 - DNA, 1167 bp, Cannabis sativa
ttttatagtttatttattgttattgtgaaattgatttttcttcgttgttttttttttttttttgcttttctgtttttagtaaaggttatttttataattttaaaactttacaagcgtatttttgtaactacaaattttagactgtaaaattataaagaaaaacataaaaattgagtatatattttaaaattctccataaatttttagaagttgcaaaaatgtaggccaggactctagcgtggtgttcacatcatcaaatatttcactaagggctcgtttggtacgccgtataagggtcgtattgtattaaataataaataacactatgtttggataaagcaatgtattgtattaattattacgaccaaattttttaatacaatgtatgttgtattattttaacataataaatggtccgtattagcttgtattataatatttacaaaaaatttggggtcaacaccaatctccgacccggactcgagactcagacccggactcgagactcagacccggactagagactcagacccggaccagactcggatctggacccagacccgacccgaccccaacccagccctgacccggacccagattcagactcagactcggactcgaacccagaccgaacccggacccgtagttggtgttgggatcgagtgtattaaaaatatattataattttacacaatcaattaatacaagtcaatgccaaacattatattgtattaaataatactaatacaatacaataaaatacaacacaatctaacacaatacaacaatacggcaaaccaaacgagtcttaatagttctattgatactagctaataaaactatgcaatgcaaccttcaaggcacctaaaaaaatgttgggagtggtatagctaatgatctatgaaaactttcaagtcagatacaaacaaatgcaccatcatttcaggaccacgatatatagcacatccttagagcaagtccaacgtacccctaaaacactaatttagtgttagtttgtcctccaacgttgtagcatcaaatggaacactgtaacatttctgttacatatatgtcatgcacagggccggccctgacttttagtgggccatagaaaaaaaaaaattattttgggcccttatttagaaaaaaaatatggtatttttcaaa

SEQ ID NO: 77310 - DNA, 1417 bp, Cannabis sativa
tttaattaatcacgtttttcattaatatcattgattagcaacgaactgcacaatatattaaaaatcacgctaacacgcctaaattagttaagatattaccagccagcaatactaacaatttctttgataggaagaattttttttaaattactaatttttttgaaaacaaaaaaagtcagtataattaaaactgtatattttatataaaataaaagaaaatgggagtgtaattaagatgactccgagcattattgcataaaaaacattattatacagtaactgtacacttggaagcaaaagagtagacgcttcgaaaaaaacaaaaaagaggtaaaaactaaaggagatattttagtggccgtataagatgacttgctctacctctatatataacctttgaagtcatagggtgaaaaccccatttcgaaaagaccaacagagagttaggtgagagactcattgaaatatcaccggaaaatatggttctgctagataaactgtgggacgacgtcgttgccgggccttcacctgagcgtgggcttggtaaactcaggaagatcaccaccaggccatcgcccttgatgattatcaaaggtccgtacgtaccatttatatcattatagatccctacatataattttatatatgtcgtaataattaacctttgtatgttcatatgtatatttatattatagagggcgaaggggaaacgagtaatatggtgtaccagagatcactgtcgatgccggttagtccagtgacaccagtcacaccaacgactcctctttcggcgtcgttggcgcgtagcaaagacaacgtgtggaggagcgtgtttaacccaggcagcaaccttgctaccaaaggcctaggcggcaccctctttgacaagcctgaaccaaactctccaactgtctacgactggtatgtgtgcatcttcacctcatatataccatactaatctcaataattttactccgagcgtgataatcacgcgctgtgcactatgtctatatatcattaaagtagatttcgctacttctactgatgctagaaatttttattttattttatgttattatttatttaaaaaaaatgagtgttttttgttaattacatggtagagcaattaaaagctactgatgtttgctcaaaaaaaaaaaaaaaagctgctgatgtttttctctttaatttttatttgggattttttattctatgtgcgcatatcagtttttagtattgcaattttttattattttttttttaaaataataaatatacaaaaataatgcaaaaactataaaaatatgatggtacaaatattttaaatatttttataatttttaagattttatttatagaaaatataatattttgatgttatttttatgttgcatttttattattttgttgttgtttt

SEQ ID NO: 77311 - DNA, 953 bp, Cannabis sativa
aggtatttttaccacaaaaaatatgacttaggtatttatctgctactcggtataaaacttaggtatttatgccgcaaattactcttttaaatttaatgtaaattttaatttcttgctttatttagtcacttttttttttaatataataactaattttattgttaagtgtcaaacaatacattagttattaaataaggaggaatttcttccaaccacgaaatcttattttttatctgtagtgcatattatactcaccatgctgtgatattaccatttcgcataatatattgaaaacatacacccggaaagacagataacaaaaacctaaacgatctaacaacaggcccactcgaagacaccagtagaaaaagaacggataaaaatcataacacctttagaatcactataaaagaaataaaaacccagcaacgaacaactctagacgggaggagatcgtctaagtagcatgaaggtgaggagcttgtgctcatgagaattgactccctcgaagaggaaattttttaactacaaataaacaaaatatacattagtgaggaaaaaataaaataataataatcataataaataaataaatattattgaaaattttacaatatattttcactaccaattaataattatattgaaaattattaaatattcattctatataaaaagagaaaatttatcttatcaaatgtagttgatgtcggcactagatcttggacagagactacttcaaataatttaataacttgaataacttaataactttacaattttattaataaccaagaactaaaattctccaaaaactaatgccactaatagtcataataaaatttacctcatatataattaataatttatacaatttagtatggaaatttaaaaactaacatagtaagctaatacaacaaaaactaacacctttaacaacaacaacaacaaca

SEQ ID NO: 77312 - DNA, 530 bp, Cannabis sativa
atttttgtaaaagttaactcaaatttcaatatttttgtaagtttcccaaaaaatattcttaatgaagcccaaatggaacagacccaacttccaaccattttccacacatgggctctactttgtgcgtcgtcctgaaactaattaggaaccacttaaacttatcattcggccatgtaaaaaactgttattgagtttgggaatcatgggttgctaataaaagcagtaaattaaatttagtataaattgtacgctatactttttttatattgtcttcttttatttttatcttccttttttaaaatctatcatttttacctctttttttaaacattgtaccaattttgaccctatcacttcaagatactctcgatgtgactctcttaagtcaggatatttttagtacaatgcatgtttcaattaaatataaaattaaaagtaaatttgattaattgattaataaaagtggtatttttcaacataccccttaaatttaatttgtggagttcattttccttgaactatattctttt

SEQ ID NO: 77313 - DNA, 630 bp, Cannabis sativa
ataataaattttgtagggtaatgttatttcaactcctccaacagctgggactattcttcctggtatcacaagaaaaagtatcattgaaattgctcgtgaccatggttacaaggttatatttatatatattcatatatattaatttttgttctcaatattattacgaataacatgagagtacttctggtagaatacgatcgtaaccattcatgaaattacaatatatattacggtaaggtatttggttatttctttaatggttacaatctaaataaaaatgtattttttcaaatttatagaaattttcttaatatttataattaattttatcttaccacaatggccttttttataaatataaatatccaaacaaataagttaaaatatttacagtttacttataaaaattaatttttcaggttgaggagcgtggtgttatggtggatgagctaagtgaagctgatgaagtgttctgtacaggaactgctgttggtgttgctcctgttggtagcattacatataagaatcaaaggtcatatattttacttctaatttctcaaaatttaatagttaatttattaatgatataataataaatcttaaatttattttagagttgtgacactaata

SEQ ID NO: 77314 - DNA, 632 bp, Cannabis sativa
atatatattggtttgcagatttgatttttattcaattttatggttgatgtactctgattcttatttagtatttcgaatagaaatcagggcttaagatggttcgagtatccaaatctatatttttatttctgtagttgagtgtcaattatgaactgatgtatatggtgtaatttatttatattgcgtcagttcaaaactgatggtactatttaatatcatcagttacgaactgacataatagagtaactatttgcgtctcctgtatatacgtggattactcgaactaatgcaattgttatatatgtcatttaaaaaatgacgctaataagcctttttgtagtagtgtatacatatttatacacaaaaatatctacataaaaaattacacaaataaacaatttaaaaattagaggttactttgactaagtgagggggaggcgtgccattggaggcgacttgggaaaagggttgcaggaggtgcacgatggcaggcggtggaggattttttgggagattagatttttgagtttataataatagatttttaggggttttaagggtggtagaggcgggtaggaggagaacacctatttgctgactatgatgacgaaaaatgagagagagagagagag

SEQ ID NO: 77315 - DNA, 654 bp, Cannabis sativa
ccctctccttttataggaacatttaaaataataaaaataaaaccccccaattagtggcggaccccatttttcgccgctaatagtaccattattagcagcggattttgtccgccgctaattaagaaaaatgttgtagtgtatcctatactccaatatatgttcagttttctttcgtgttgttccaatgttgttttttagttattctgcttcttttcatttttgatgccttctattatatgttctcttgttgtgccccagctccccacattttactgcatttgttatgttgtttcttttcccagctaacttccgtcttctttcttttggtcttctagattccatccttttttcccatccaacttcaatgggaggtaagactattattgtccatgattctttcattctagtggttggttaacttgtgtaatttgaaactaacatttgttagacatacgaaacaatagtggaacaactcaaaaatgacattaaaaaaactttgatagccccagtattaatagttttaatgtttctgcttcatctcaccagaatgaatggttattttctagttgttcaagtgttgctgtggtggctctacctgtgggtgtagaaaatggaggtcatgttttttttaggtatttatagtataaaagaaaa

SEQ ID NO: 77316 - DNA, 1024 bp, Cannabis sativa
aatatccattgatattatagaatgttgacatattatcaacatgacaacatgtgaatcatgtaaagcttcgccaaccactatcttttttatattaaggaaaaagaaacgtggatattatatcatatgattgattaaatgtggatagcaatgctattttggtattaaggaaaaagaaatgttgatattgttgatttgattctcaaatttaaacaaatttttgtccttttgcaattagccttgttcttatcaccatgccagatcatttggggatgaggtctaaagatatataattactacctaatcaataggactggcctttatcaataataggaaggaaatggaagtaagaatatatttatgatttttaaattttttacagacagataaatgataacactaattctggaaaacccatttgaaataacacttataagaacttacctattatgatcaaataaatgataaggcagccaagattggtgagaatgacacaaatttgaactgagaccgaacccaagcgcccaaatgactcggccaacaagccggcgtaggtttgagaattgcctgagcttgtgtaccttaacataaactctgcagtgatatcgaccgagagcgcaaccaatagaatgactaccaaaccagggactatcccaagaacctttatggtggccggaatcgacatgattccggctccgatcatggttgttgagatgttgaatactgcgcctgagaacgacgcgccgccctcggagattgggttttgatcctctaggagtggagcagcgagtgacccacctgccccctcactctgcttcccctcaagtgtcattattatagctagcttctgagttgtggtgagtgttgttcgtgtaaggagtgaggattgagaatccccccgtttcagttttgtaaccggacgggatagtactccttaatcttaaataggtgaggagagacttaccaaaaaaaaaaaaaagaaaacaaagggagataagttttctaagtgatggttctatttgtcaat

SEQ ID NO: 77317 - DNA, 712 bp, Cannabis sativa
gatctaagagactgggatacgttttagtttacttcgtgtttattgctacttgctagaaagaaatggggattttgtttattaggttttggcggaaattggcgggaatgttggttttggatttggcgggtgaatatgttttgggggtcataaaatttgaaggttaatcaaattaagttctaaaagatacatgtgcaatccgtaatttgaaaggaaaatttgataaatgaatatgttgtatgttctcttaatataccactccttttaaaatttacactctatacttctatgatcttttaattcaaaaatacttctaacatttcaaacaaaatttttctcactccagataacaaattgtatatataaggagattgagcttaaaaaacaaaaaatggagctctctagaatatgcaagagattggcatgtgttcctcccccggtaccctaaatgggtttttggtccattctcaatcgttgagtggtggtttccgatggctcctttttccccttccaagtaatcattccattacagagcacattaattgtgcatttaatgcatctagccttcttaacccccaaagtctacgcgtcttttcttcttcttattgtattaaatgaaatatcttccccatagatccgaaatcgcctccatttatctcttcatctctctattctcttttgttttcttctatccatcatataaaaaaaaaaaaaa

SEQ ID NO: 77318 - DNA, 854 bp, Cannabis sativa
cataaatcacttcgatctatcagatttgaactagtatatatcttgtgttgattttattagtttactgctttgattaatttctgattttttcatactctgttaatttttattttttcggattattgtttgtgatttgtttatcttgttattgttaattatttaattgtttaaagtttagttgatttgattctgaacttgaactttttaatggtaattttcccacataatttaacctcattaaattcttgtctcttctattattatgctacaataatatttcatagcatttttatgttatatcagttattttctgattattttattgccattatttagatattactgagttagtcttgaaattttatgttcttcattactcgattattctcaacaatattctgcaaagacaaacaaaaagaacttattttacacttatcaatacccagttcccaccgcctaataagtttgtatatatatgttctctcgaagttcaaccatataatttttttattctcactcttttgtagattcattttattcacatctaaacttttttccatggaaaataaatatgtttgttgagagaggaagagaaattaatatgcaagaaaaagaaaagtagtgagtgacaactactgcaagttatgtccatcttttttacacgacacaaaatcagcacaagctcggaatatacgagtataatctgataaaaaaaatataaatttgaacaaaacacgatataatattagttcaaaaatatagtaaagtacaacacaacacaaaaaaatagacttaatcacaacaccacaggtaagcacaaaagtaaactaatttaataataataataataataa

SEQ ID NO: 77319 - DNA, 831 bp, Cannabis sativa
aaggcccccctggagtcacagcactgttgcgttgctctggcaagtcggtctcaggactgtgtgtttgggcaagggcctccaagagatcatccaagggtttttctattcaaaaataaaaaaaggagtcacaatactatcaaaatccatgcatgcaagtataacacagtgaaactagtccaaccatgatggtctaattctgtcctataaaaagtacatattaaaaggctagtgtcgtcatcccctagaaagctatctgagggaaggaaccaacttgaagatatgtatgaagaatggtccaagaggatcggtgtgggaggaccagaacccatctgagaccgactcaaaaaatgacttgggttcgaaaaataaaagcttttggcattgtcaccccaccgtgaatggggcattcgaaacttatacaatcgattgtcaaattccactggccttaggccagcgtaatcttggacaaaagggatgtggtgaatagtcaaatgggacttacaagttccgaaagtgctggcaccaagagccctagagttgggaaccggaaaaggaaacttagaacgaatgggggttcgctccttcccagcttcctcccggagggtcctccccgaagcagcctatgcttgggcaaacgccagctcctgttccttcttgaatttgtacttattgtatttttctttcgcataagaaatgatgtccccccatagcgccttctcaatctcaagattccaaatatgaggacaaagaacctttgacagattaaagtcatccaccgattggttctccgagatcagcttggccctccggtagttgcggtcgtgaccgaat

SEQ ID NO: 77320 - DNA, 710 bp, Cannabis sativa
ttttttttaatgagaaaaatgtgtgtctactccacatgcggtgtaaactttgccttggaagcatgaaaagaagatgggaaaaggaaaaactaaaggcaaagtggtggggttgttaagtgaactctggatcgtacatctgtgtttaaaggcagtgagaaaagaaaagaagtagaaaagagaagtaggagccatgaccacaatttaatatcacttatgacttaaccccttacagctgtgattgctaaactcacaacacaattacagaatgtggaaaattctctttgaacaactccctccggaccatcccatactgttttagtttgagaaatcatatatatatattttttttatatataaaacattattacttttaaggcatctggtaaaattatagaatttgaaaatattaagagattaagcctgttgaaatcagaattcaaatttggtcatcataaaagaaattagaattgaaattttgttccacacgttaaatatatatataaataaaaagttaatgtaataacactgttttggcacgttaaaataatttttcttcttgcactattttgttcatagtgcatctaatctgcggattttattttttggattcaatccaatttgtacaatagatcaaatctaattcaaaaaagtgcggattggatcagttattttggattgattacttcttaatattaaattatttaatattt

SEQ ID NO: 77321 - DNA, 515 bp, Cannabis sativa
agttttagtgctcagggtgataatctttggcaaagaatcgtctacctttgggcatttgttcaaatatttctgaccggaggcatcaccagacctcttattcagagcatgcaatactctacgacatgactgcataaaaagaaagaacacttgttagaaaacataatcaagtaaggacaaaaaggttctgaagtaaaaataatctaccctgcacgtgaataggagcaccctctcgaataagcaatgaaggagcatcctcattagaagagtcctcttcttcttcatcgaccacaacatcctttccctttccttccacctagacgaaaggatgagcagtctcttcaggatcatctctgattctaatgggtcactcaacaggtacttggaaaaccttagggtgccttcttatttttctttttttgaagcttcttgcttgggtcaaacctcctcaatcacatgctcaacctcctagacttcatcagatggatagagcccgtacttaaaaattggcctttgtg

SEQ ID NO: 77322 - DNA, 569 bp, Cannabis sativa
gcattttagtgggaaattcagaaaaatttgaatttcgttgtatttttaaaatttatagtgttgagtttaggtttcatgggttttacatagtttggtatattgaaatggctttcattgatctattttggtttctaaagtaatcttccatatgggtttttcatagtggcaactgtactttctccgaatgtgagttaattgaaacttttcttgactctgttttcttctgaatttttgttgacttaaatcgttcatagtttatctatacagttgttctgtacttattataattattattttttctggaagttatgagatctgtagttctctattatgtaatttggattatgcttgtatatgggtcttatggcatgcatcccatgattggattcgaaaaggtttttttttttttttgatattctgtagaattattttttggacctagttcaaacacacgtggtttacttgggaactttctctcaatatgaattaataggataatgtctgccaatataaattgactcatttttctttgaagttttgctctagtgcatttcatggctgcacttggg

SEQ ID NO: 77323 - DNA, 539 bp, Cannabis sativa
tatattgtgactaaaaaattattactaaaaataacagttttttatttgtagtggaattattactacatattgttttatatcgcatgcctcaatcatagattaatattatcacatctttttaaattatacaagttttattgtgatattagccactaaatctcttattttttttcttctttatcaactgtggtgttttagttcagtcatttcattttttattttagcttatgcgtcaccaactgttttgacagtagttggtacccgagtttgttgtccaacaaacaaccaactatacctactataaatagaccttgtaatacactttttactcatgttgtatgatcagattttactaagaaatagagtgaaaaagagggatgtataagagaatcaagtgtgtttgatcttgattccccataggtgaggttatttgcaatttcttctcatccgttctccattgtattcaggacactgttgtactaatttcaacatcaataaaggtctatgtttatctactcttggtgttaattttctctttg

SEQ ID NO: 77324 - DNA, 1325 bp, Cannabis sativa
gcacctagggtttcacccaatgcctaggttgacattcccaactggggtttcagtttccttgatcgtctcagggaaaatgggtccaaattttcattagaatgtaaactagacatactccggacatatttgaggcatcaaaattagattcggagcaagttcattattgagcacccaggcacccagcgcctaggttaacaatttgtcaatctgaggccattcaagtattaaattgatggtcaaacttttgcaccatcttcatcttcaccagaaacggggaaataggtacttttgaggaagaaataacacttcctgagtgccaaggccaaacgcctaggtagacattttgtactagttgtaaaaatcggtcagttatggtcagtttttacaaatttataaccgatcggtcgcttacagtttttattttacgaaaatcgcaacccataattagaaattataattgtataaaacctatcgtactatttttggcagtttttagtggtttttggtttagcaattttggacagttttttgaagtttttggcgattttagcaattttttagtttcaccatttttttatttcaaaaaccaaaaccgatcaccatgtcaaaaaattgtaaccaaaatcgaccgccaaattcggtgatgacgtggaactgaaaattcaattacggtctggtcggtttgatggttagtttcaatttttatgagcactcttattttgtacacctgggccaattcaaatgatgtttttagagaactcttctaagcatcttctccatttatagaaaagattaagattcaactatttttggggaccaaatgaaacttctgaagggtcataacagggacccagcgccaaggttgacatcttgtcaacctaggctgtttccaatcaagttccaaaagaagtgttacgagaattttttttgtcataaaaaataatgaagattcaagcaaacttggggagaaaactacaaacttaagcacttggaaacaaggcccagtgcctaggttgacaattaacctggtgctctagtttcgatcactcaaatgccaaatttgatttgaccaatgaatctcgaatggtcaaatacagggtaggagacctcatcctcaaattcaagaaccttggtagtattaaaataacaacccgggagctcgggaacaagatacccaaggcccaagttgataaatggtctgatacactggcttctgcttatctgattatgattcagttacgaccgtttgtctagtttttcacaataactaagatccatgaagtcagaagtcaaattcacaacttcacatttctcatttccaacat

SEQ ID NO: 77325 - DNA, 1422 bp, Cannabis sativa
gacaaataagtgtgattaaaaaagtacaaacaaacattactaaaacactcttgagtttcatagtagtagtggtagcaaaaaccctattgatgcatgatgattggttgaaggtaaattctcatgagcattttgcttttgatgctctctcaccaaaaggatttattgaatggattgcaacaagaaggtttaccaaaatgcactagaaaagagaaggattaggacgccagttctagtctagtgattacatgttgcataactatgaaataaaacatgccctataaatatcaatgaggcaatgatacttcaagattcaggagaggctatatggaaactcaagccaacactttctaagatggaatgcctttggttccgaattttcttaaaatcgaagctaataaatgacctaaaaaatttaaactaaagagggggttttttttttttttttgtagtagtagtagtgtaaaataactcaaaacaaactatgtagttcgttataataaattaataaaatattttttgttattatctttttcgttctgaaaaattcagtaaaaatatgatttttttttggttaatttctaacaaaatttgtcattctatgatattataagtatatttcattacttttttaaaaagaggtaacaaatagtactaagaggaaaacatctcaaactaaacatgttatttttttgtttaatacttttatggatcttaataaaaaagactgtaaatatttctttagcttatatactcatgcatgattacttttgccattttctttatatatttatatatatttatatacttctatttattcatggagatcaataaaaatgttaggttgtagagagaattttttttaccgtatactataaaaattttgtacatagttttagtgttagttcttgtacatatttaattacatatatataattaaaagtaactattttttattttttatttaatttttttccgttggtaatttggttctggcagctcctccagcaccaccaccatccactgatatgcccgcgcaggttagtataatttttcataatatttttaatttggtatttatgataaaaattaatgcatgttttaataatttaagtgttaactaattctactaattacatagattttttagtgtgtcatagagaaaaaaatagatatttttgttatgtgtgttaaatatatgctaagatttttattttaattaattattctatattaatagaaataagatgttaattaaaacttgttaggatctaaaccacactaaaacacacttaagcaaggatcaaaaaatacagaaataagaatcaaagataaaccaaaattactcaaacagttagtaataaaaaacaatcactacaaaaaactgttatgtttagtgacaaccttttagtcacaacataaatt

SEQ ID NO: 77326 - DNA, 1825 bp, Cannabis sativa
atgatggacccttttagctatgaagccgattttgattgaaattgaaaagaagccagctatttatcttacatactgtgataaaatacatactattagtttatcaaattctcattattgaaaatcagtgttctctcctgtctactagaaagtgttcaccattgttaagtagtgttacagggtccatcatgctgtacttttcacagctaacacacaccaaagtagttacattctcacgcttaggtaaaatgcaaaaaggttatttgctttgaaaaagcaaattcagttttcttccttagtagacattgtagcatttgtttgtgttccagactagaaatgaaaggaactgatatattatgcagcagtcgtgcttttcttaatcttttgtgaattttggtgcagagtctgaagagagctaactggaaatttctcaagtagtcaaatcgtgagtgctctactagtgccattgaattattatgtattaagatttcatgatgtataacttggtcacagtctatttcttaatctgtagagtagttttagttttgtgagttccaagaaaatgctgctagtctgctttggtaaaactccaaggcaaaatccatgttttatataaatatattggagaattaatacatttctttatacagataaaaccagagttttagtagttaaaatttcataaaagggtgattcaaattcaaaggtatgaattgaggaaatagaaccaagagagttgagaattgtattgtgtacttagaagagttgtctctttgttgatttgtgattggagccattgatgtaatttcgttccaccattgtaaagttgtaaaggattcatcatctaataaagatcaagccactaaggttgttcccacactggatgttttactaattcatcctcatgacaaacttaagcttttgcttactgctgacccatgcagttgtgaaatttgtagagccttgcttactactaatccatcctcgtgacaaattattattttatttacatttaattttctaaatttaaatttgaacagtaatcattaaactgttaacaaatttaaagtatcatcctaactgtcaacatggctgccaacataggtgtttatgtatacaattttaaacacgtgttgtatttatattggtacacttatttaattatttaaaaaatatagaaagttattttaaaaactaaagttttaaataattaaattaggtgtactaatataaatgcgacacatgtttaaaattgtacatataagcagctatgttggcaatcgtgttggcagttaacaaaagtaaatagatgacatattaaatttactaacagtttaatagtttagtaggttttaccgtcaaaatttaagtttggagagttaaatgtaagtgaaatattaatttagaggatttaaccgcaaaaaactctacagataatcatttaatacttaatttcatcttgttaaaaaaaaagatattggtagtaaaatcacttaattctatattttttaataattaattacttataaatagattttttgatgaaaaactacccaaatcccttttctattagctatttatcccttttatctaaaaatctcaattaactgcgacggtagattgcttatgtatacacaaaaatatacgtagcaattcacgtaattttaattttaaatataataaaaataacttaaaaattattgaatatattaggggtgagcatcggttggtttgatcgatttttttctatataaaaatccaaaattcggttttccgtttggattggattggtgcaattcgaaaatcgaccgaccaatccagaacctat

SEQ ID NO: 77327 - DNA, 558 bp, Cannabis sativa
  modified_base (69)..(73): a, c, t, g, unknown or other
acaaccaaacacagtttacacatttctctataatcatattctccttcataatattccctataatcaaannnnnttgaacacctcataccaaacgcccagttagagataactaaacgcagcaccatattcttcactccttcacactctcccaaaactcatatctccttcttcatccaagatgaattctcagatttccagatctgctgctagagcctttaggtccttcctcgcttcttctaagaacgctcgttttcactctggtttgtatactttttctctatttcatttggtttttttggttatgttgattgattttacttttttttttagtgttatgtattgggtttttgttgtgattttgaaggtttatgatgatttttgaattgggtttatgtttgttttggtggaaaatgttttcattcttaaaaagttttaatcttgaattaagagttggtaagagctttagagagaaatgattggtagaaaggactttttcgtgttgtgattataattattattatcattagtttttaggattactgttcaatattttggttt

SEQ ID NO: 77328 - DNA, 901 bp, Cannabis sativa
gtggagacggactcttttgttgtgagttcttggattaattatccggataatattcttatgtttaaactaattgttggggagattatttctcttttagctgatgttcgtggtggttcttattgtgtcatttcgcgtaatgcaaatggtgtggctgtagactgatgcttgtcctcaatttattagtgctcctgtaacaattgatttgatttaaattaataacatactttctttcaaaaataaataaataaataaataaatgtggtagagggaggtgaaggagaacgaaatggcacctgtaattcatggaagtggaaataatacgatataataaagctaagctatcatttttaaggtccatggtggcgttgatacacgcgccattagaaggtgggacctggtgatttttggttagtttattctcatgcatttcacgctttcatccactaactaacaacctctgaccaattgctgatcacccataccgtacgaaaccaaactgagtaaattacccatttcctctcaagtctttttttacattaattattcgccccacaccctcagtttcataaattattaattacattatctcttttttaagattttttgaattaattttttattaaaataaaatttaataataattcaacctaaagaaattacgactaaattagttatattttcggttcgtattaaaaattgtcttaaaattagttatattaaaaaataaattgttaaagttaagatcaaagtcctatttttactattttaaaaaatataaagtctattttgtcatttaacaaaacaaaaaattcaattagtaatttttacaaaacacataattgaaaataattttttttttcttttttttaatgccataacccataattcataattccatatg

SEQ ID NO: 77329 - DNA, 2637 bp, Cannabis sativa
actttatttttagtggggatagccccccacactcttattagtgtgtccgtcactaactactggtgccttttaatatttctctttacatgtaccaaatcatgattatgatttttgtcctaataactttgacatgcactaaattatactctctaaactttttaagttattaatttttttttgaactactgagattattgaatttattttactaacgtggtgatgtgattgcccatgcacaaaatcggatcttttgaattttggtatatactaaattatgtgctctttacttttcataaacgttaagtgtctgttagttcgagagaaattttcaacattttaaaaaatttaaaagacacgatttaataaatatcaaaattgtaagactaaaaatcctaattaatttttattttgttactatatctgttttgtaccattcaattcagtgatgaaataaatatccctacctataagcaaattggagagagctaagtttaactgaaaccaaatttcaagaccccaccaccatcatcatcttaaaaaatggtgcggaactaaaaatctccaagatttatttatttatttttgaaatcaaattttccaagaacttaacaaataaaatgctatcttcttctcaaaaaattaatactattttaaactttatattttacaaacattatcgattgaacctttttttatataataacaaattagattttatatttattaaaatggtacaaaataatactctaaactcaatttttaattttttttttaatataactaacttgaaggaaatgtactcagttttattataataactttagattgtattattattaatttttattttgacaaaaaatcaactcaaggtattattttatactattttaaaaaatacaatatttaattttttatttaacagatagccaaatcaaacatttttacaaaacacaacatgaaaaactaaaataatatttaccaaaaaatgaaagggtattgttattacttattagtcacgacacttatcagtgagtcggttatagcatcatcaagctttataggattggttaccaaaagtgtcgtttctgacaattatattatacgacatgtcgttattaatatcatcttcttattgtattgtgcttgatgtgagttaccatgttacctttgatgctttttctttttacatctacatgtttaattttataaaggaaaatattttcaaaaaatttaatatagacttttttcaatatatttatttatatatatttgtaattattctaattttcataaaattatgctatactcaagtattaatttcttaaaaaaatcttaatttattgattcaatccatgaagaaaaagaaatcatttggattttatttattttcttccctcttaaaattcaaggtccaaacaagaatcttagtctctcatggaactttcaaagtcaacaaaaccatccaaaaggttgaaaagttgaagaacataacaaaaaaagagagttatttttccactaattattagtaacaactttcaaatcatttaccaaatttttcaacaaatacaaataaaaaatcatataaaattccaacaattgagttgtgagaaaaatcatgtctctcttcctataacattgttttgtcaccttaaagaaagaaaaaaaaaatgtctttccttatttttcaattgtttcttctaacattcatcaccattattaatgcttcaactcatggaaagatcccattaggttcatctctctcaacaaaagacactcacaacaacatgttttggtcatcagattcaagtgaatttgcctttggttttcatcaagttgaaaaagatggtgactttcttttagccatatggttcaacagcatacctgaaaaaaccattgtttggtcagcaaatggcaacactcttgtccaacaaggctcaacacttgaactaaccgaaaatggtttgcttgttctcaaaacccgaaaaggaaaacaggtatggattgttggtgttggtgatggtgatggtgttgcctatgcagctatgcttgacacagggaattttgtgcttgttgacaagaattctaactatctatgggagagttttgatgagccaacagatacattattaccattacaaactttgaatcaaggtaagaagcttgtagctcgatactcgaatacaaatttttccaaaggaagatttcagcttatgctgcagcaaagtggaaatcttaagctttacacaacaactttcccattggatgaggctaattctatgtattggtcaagtgaaacgacggctaatgaatctcgggtagtgtttaaccaatccgggttgatttatttgcaaggaaagaatggagaaatactaagtattttatcagcaaaaccttgttcaacacaaggtttttatcaaaggatgatacttgagtatgatggtgttttaaggcactatgtttaccccaaaaatgatggtgaagaatccataggatggagtaaggcttggactcattgttcaactcccatacctccaaatatttgtactaaacttatggaaccaacgggaagtggagcttgcggtttcaacagctactgcagcctagaaaaggagcaaagaccgagttgtaagtgcccga

SEQ ID NO: 77330 - DNA, 1736 bp, Cannabis sativa
gtgtttatttctttaattactttagccaaaaaaattctaattactacaagtttccattacaagaaaaaaccaataatgggcaaaattacaattttgccctcgcttcacacttaagaaactaaaggctttatgggtaaaatggtcaaatatcaccaccccgcctaaactcaatattcaaaatatctcttatgtttgtcccactaagaattaggttctaaacctatccatatgactctaatggtcatccatcgtatttttcatcgtcgctgagcaaatatcataaaaattgtatatttcatatttagcataaataatactcgtggagtttaataaaatctccaaaagtgagaaattataactataatggtcatttttgaaaatggggctcacaacataaatatatgtatataactataagataaagataattaatgttaattgccctactaatccatatttaagttatgcagtcattacaccaccaatgtcaatgggaaacatgaacatttggcatcgttgctaatcctcatgattatcataactctgttaaatctggacaaatgatcacttaggtttgtgtcgcccatgtacagagtcattttgggcattttgaagttctttgggagcttagcttctaatatatgtcttgcacaaggctctctatcctcacaattagactttgagttgtcaccatttttccttcgagagacccttgctatgtctttctagagaattacaagttcagccaaaattcctttgtttaatatactctcagaaaatggtgtaattttcttcctatgatcaaggcgtgtcctcagatctttgtgtttagcattgagcttctatcttagatcgatagaggatcccttcaggaagaaccctttggttttcttggctctttatgtacggacacgctccttcaatctcctcgatcttaggggctagtttttcccttgggaaacctatcccttgcggacctttccctttcaggagatcaaaatgaactgcccgtggatctttagccttattatttcttttgaggacaaccgtagggttctccttcgtagcaggttttcctagaggatacctgatgggactaggttccctacacttttgtttctgaccttctttgggctgagatggctctatctcgctccctttttgtacagatgggactgcatatgagtccacttgaatgctcgcattttccattgcccttttcatgacaatcaatatttcttgcatccttttattttgctctttttattctaccaactcaacctcgtggtcgacaaccttttgccttagtgcgactaactctgtatagttatcttcatcgtaaccttcatattcttcttggttagaatattctggatcattagtatccccttctccttcatcgttcaccctagatgtcacctcttcttcttaaggatccttggggtcatctgggtgttgtgggcgcgagatgtttctagtttttaccattattttactaggctacttatgacttcctacaactctcaatgaaagtaccaaaatattgaccgaagttttcggcaacaagtaactagaacagtgtgaagtacttaatgaatgttagaagagatgattttttttgtgtggttggggtattaatgagcgttagtccatgagtcactatattatatgagagtatttattacagagaattttccaaccctctcccatttatgtttatcattggggtatttata

SEQ ID NO: 77331 - DNA, 696 bp, Cannabis sativa
taaaataaaattgagatgaatactttcagtatatatggatgaaaagttccctaaaaattttagaatcaaatttgatatgagacttaaacacatactcccaaatgttaccccaaatgtaaagaatgcaaataattatttacactaagaaatgaaacctcctccatccatggaaagtcttaagaagactttttctgtttgaacttgatggctaagaatgtgaacaccaatgcatttaacaagctaagggctcccaaaagccaaaagaaataatcaagatgaccctcattcagattgtctggtatccatccactcttgccatcttttgttgtgaagtaagttacaatagtcaaaagaaaggagctcaaatagtaacctaatgaaagtgaaaaaagagctaatgcacagcatagactcctcatactatctggagcctgttcatagaagaactgaagttgaccaatataggtgaatatctctgcagttcccataaaaaggtattggggtatttgccataggatacttaatggtacagcctctttttcgtgaactaaatcgaggtccttggctagctgcaaccgaagagtttctaacactgcagcagctaacatgcataagactgaaatgaagaggccaattcccattcgctgcaactcgttgaaacctttctcttcgcctgtgaatttcctcacaattggg

SEQ ID NO: 77332 - DNA, 4332 bp, Cannabis sativa
ttaaataatcaaactgggaatattaaaatacggaatttcaaaaagtataatttttatttttctttcaaacaaatacgatattgaaattttttactggaacgtaattagtttcgaagatcgctcttaagaattcatatgaaaatatagtatttatttaaatacgttcgaatgacttatttttataattagaatatatataatcctattccatgtgttataaaatgaacttataatcaatggactattattgtttattttaactttaatatttgtattgttggagttgataattatcattattcttattttgataaattttgccaaatcaaaaactcaaaagggaattaaagtctaattaataagagggaaatttttggactcgataagtttatgatggacatttaaattggttttgtaagcaatttataaagtgcatctgtttcaaaaaaaaaaaaaaaaaaaaaagcaatttaagtgcattttataaatgatggaaaaactaaaaataaaactgttatcttcaaaactatagaatataagccaaataaaaacaaaaatatatatttgatcatgtggactatatatcatggtgagataactaggtgctacaataatttacttaaattccacaacacaaaaacatatcatatttattctgtccactagtttatatgaatagtcctttaattttattttatttttctcaatattatataaatatatatatttatatacataaacctttaacatgtagccgcgcgcgtacatcatcaaaaattgtgaatatggaagcaaaatcttcatcacagaagatataaaaacacaaagatattatttagagctaagaaagagctaattagcacagcagatatggaagcaaaatcatcatcatcatcattggaaagatcgaagcaaactaaagaagaggggttcaagaaaagatgcatagacatggcaaaagaaaaaaggtccagattttacattttgagaaggtgcattactatgttaatatgttggcacaaccacgaaacctagcaattacgggtgatgatgatgagttttatctatatatatatatatatatatatattcttatatctcttagaataattaattaatttcccctatatgtctttgagtgatcaagattactacatatgcaattatacttttggattttttttaagaatctctttttatatactcaaacttttatgtgttgtaactttcatatattttatgttggtttgttgaagagaaataaactaagcaaagatgttgaagaagagcaataaagaatctgtgaattagtgagctattagacaatgatcttcagactatttatagaaatatacaatataacagattgaaacacaacaatccaggaatctatgaacaaactataatactgacatgaaattcataatgaacctgaaaacaataaacgacacctgttgttatagtggtttgacccctcttagtcacttttttgtattagtaaaaaaagaaaaaacttcaactattaggatcactagatcgaacaagattctgataagttttctgaaagtgtccactaataatgaaagctttgagagtactcttatatagacttcacaaactgtgactcatgacccatgatcagggttgtacttgagaaaatggatctaagctggcataaaattatagggatcttaatatatttttttttaaaaaaagaaaaagagtaaattgacccttaaaatatttcactaaattaattacatgatttgtcttgaatttttcgatgcaaatgtactaattaaatttgtataattaagcaagcaagagaactttagtgaaagattatcgggtttatcgaaaaccaataataaataattttaaagcctaggaaagaaagatataagaattgaagacaataatttttacatagttcaggtgttaataaaatattagtttgcaagttactgtattgagcttaattttacgcattccgtaataatatggaacatacaaatttgtagggttttgactctatttataagcaggtacattcacttttgatggggtctttttaaaagaatgtactataaaatgccaaagttacatgtattgggcttggtggtgtggcccatcatccacctgatgtggccacaaattactgtgcatagtacaaagtgacactgactaccgcatgtggcttgccatttggaagcgttgagaaaagccgtgtcaaagtagtggtaggattgatccccaagacaatcgtaccttctgttgaatgcttctatacatgttggtaaagcggacacttacctaaattttgcgggatcatgttagagattaacacaccagttgtgtctgggatagtaaatggctgcagacagaatgatagatgttgctggagaaacttccgacttcgtgtactgtgatttatggtgtgaaggtaaaaggcctttacatcgttccagctatcacgacttgaccatccgggaggacgagatgaagctagatgccttagatagtgcaggaggtttaacattagccattcttagttattttgtcctagaacggggcaatctcttaattggagaaatatccatcgcctggatcattatatgtgtatgctcccaaactgcaggtccaggttcattctaaacttatactaatttaccctagttaggcctcaactaactcaaaatgagcatgattatttattgggcctcccagaggattccacatgtcttacaggtaaaaaacacaggaacatttacccttaagtctcaatctgaagttgggtggtggagacttacttgcctatccatccaggttcaatcctatttacggagatactcctagatgatgtctgcatccatgtatgtttgtatccttaattaattattagatatgccctttcaaagtcctacaatagtcaagcacgtgttatatggctagtggaaaccagacgtgtttcttgagcgagtgggacctcgtttatggcgttgacggctgacatgtgtcagcacacattctgaagtgtttccatcattacaaagggatgctttggtttctgagagggacatttaatacaccacttcaatttctcagacaattggatattatatttgtgtttcttttttattatcaaccaataggaactgttggatcaatgacacacggatctaggtcctttgagctcgtttattcgggactgttggattggtggggtgtgaattctggctctcttataattagaactttgaaaaacccattaccacttttgcgcttttgagctttcaaactagagagaaaataggaagagatacccgaactatcttctgtagctaacaatttacttaatcaccttctatcactccatcagaagatttttttcgaccaatccaccatttgttttcaagattttgctctttaacaaacttcaccagaggcattggagagctatctctgagacattcaacggttcaaatatattagatctgttgcagatgattcttacccatctccaatgacatcccgtttcgacagtaccatgtaagttagtatcatagcgagtgctttttagtctgtttcagtatcctttcttatttaccatgaatgcatgcccttagctctatatttatcaagtctgatgaattgtttaaggattttcactaacctctaggatggttctgagttattgtatgagtataaaaatgtctgttctaagtaacttttggctattagggccctatttaacttaatagaagtaatattgtgcccaaaatgttgtgggatttcttcggagactcatctaaataattcagttacggatctgcatcagggcgacatacttcaaatccagcgcgaaggatggtttgggaccatccttcctcttggactattatttttttgataaaattgtctttatcatgatgcctttctcaatagattttttttcattcctgacttggtgttttgggatcataatggttctggaaagccctatccagaggtaaattttccaggcaattctaagagatttctcgtacctaacaatttttattcgatttgggtattaaaaaaatggcttcgttttctcatctagatttttattcatggcggagatcactgttgtgttaatttgcaacacgcaagtatatgtattgttttaacaagtaatagactcaccatgagtgaggtcgatcccacgagaattgtagttgagtacgttaaaataaatttcttacttttatttggctaaataaaatttaagagaagattaaaactagaaaacaataatattttgaatatttaaggaataatgggtattaaaag

SEQ ID NO: 77333 - DNA, 522 bp, Cannabis sativa
ttttgtttttaagtaatttaataataaaatgaacgaattaaagaaaataaaaaacaaagaaaagaagcatgggtgctgaacataaacacccatgctaatgtttgtattgaaaaatcaaaattttatacgtggaaaagttccactttgctacaggcatctcctataggaattgcattagagattccttataagacttatccgttgtgcagcttgtggctgttggtggtggggcttccaatatgtataagatagtacattggcttcacttttcatttttctaatgaattataataattatgacatttatcattgcctttgactccatgaccagaaaaatattaatcaattaaatagttggtaaacaatacaaatcatccatgaacgacttcggaagatggctccttcagtttatattaaacgagtaatattgttatataggtttcattttaaactagagaactttatagccgtgttcaactgctttattatatgcctatatttggatttaatggacttaataat

SEQ ID NO: 77334 - DNA, 1408 bp, Cannabis sativa
ggcgatgggagttgaatttttctaaattcaaaagtctaaaactaaatgtatatagatctagtaaaaaatagtcgtaagaaaaagagagaaagaaaataacttaaaactaatagttataaaataaaacatgtataaattgaaatggatagtacaagtattattataatccttataaaattgaaacataagaaaataaagcaaaaaaaagaagaaaaaatgagagagagatagatgtgagcatacagatgagtgagattgatttttgtttgattatatagatgagagagagtaattttagtttgattatttaataaaaaaaattgtgaaaagggatatttttttaaacaaatgatgaatgcgagacttacgattacaatactttttttttttttaaaaaataattattataataatattcggaatttaaaaataatgaatttttttttatttatatttttttttttgaaacagataatgaatgagacttacgaatacaaattacaatacttgattttttaaaaaatttaattattataataatatttagattttaaaaataataaaaatttatatttttatttagaaaaaattagaaaatagataaatgaaagaatagaaagagttatttagagtaattttagaccgccacgtcaccggcttatactttctctttatatatatacactagcaaacaggcgcttcgcgtgcatcggttaaattattatataaatattaattaaataataaaatcagtgtcaaataattttaaatttattttatacatatttttttataaataatatatatttattaaaaaaataaatttatatagaaacctctaaagaatttaaaaagaaaaaaaattatcatacaatattttatataaataaaaaatgatgcattttttttaatatatacattatagtgaaaaaaaattgaaattgtacaattcttacacaaaatatagatctaaaatagaaagaatgtaacaaatttatagagaagtcatcatataatttcaaaacaactatcatcatcgtatctcatttatagtcaccactgtatttaaagttaatgtcatcaccgtatgtcacttgtaatcatcattaatatcttttctaataattttactctgtacataaaataaattaaacaacgataaatatttacttttattatgtgaggggaaaggtggtgataaatttaagtttaagattttgatatttttgatatgttagttaattatactttttttgataaattatattagttaatattaactatatctctctctaaaaaaaaagttatgtgtagattaattgtttaaggtatatatttatttattagttattatacaaatgtatagttataaatatttttttactttttctttgatatattattttta

SEQ ID NO: 77335 - DNA, 507 bp, Cannabis sativa
tttttacaaaaaatgataccttatataattatctcataaattttaagtatttttacagcataatattttttaattaattaccgatgctcattgaatagaaattaaaagtaaaatagtcaaatgtatggcaaaaattcatttaatcatcaactagagatgcatttgagatgattaatatatatgatgagaaaaaaaaaaaataccaattaagagaaattaaagttgaaaaaggacattagtatgtaacaacttcaatatcacgttcaattaaaaatagaaaacaatgagaccaagactaggtacctaattaatatgatcatggcctaaattaagtgtcaaagctagctttagcttcttctaaaaggaaaaagaaaaaagaaacaaagtcactcaaattcttagcaaaattacaagccaaattaagaagatccaaattcatcatgaacaaaatgtataagttgaattaattaatggtccaacttacaagtttttctaatcattctaaaa

SEQ ID NO: 77336 - DNA, 674 bp, Cannabis sativa
cattatgcagccaacaggatagatctggttttaataagtctgttgttttaaattctgtttttcttctttgatgcttagaattatttaaatttacatttaaggtggcagtttatgttggtattgaatttagatcattatagaatttcaaaaattatatattagctaggatatgataaataaaatgaaatatttgtatatatttgttcatttcagttcatataaaaaactatattgtagttttgtgtaaaaaaaaattgtgcaattcgggccggatctaaatacatataaaattgttgcaatatttactagaaattatgaagggggagaagagtaatagaataaatgtggtggagcttctcatgcaaagagtgccatggagattaatgctaaatatatattgtatatttctttcagtcattatttgtattcaacttcaatcttaagtttacctaacattggttataaaaatggatgccaaatgctaatcattcttcctggaaataaaattatatgatgtgatttgttactttcttggacatgcattcttacccaaatgagaagtaaactataataagtaaagatggccttctctttgtttgttggattcaatttgagatggagagggcctacttttattacctaataaaatagggaattgataggggtgacaattc

SEQ ID NO: 77337 - DNA, 3925 bp, Cannabis sativa
  modified_base (97)..(126): a, c, t, g, unknown or other
tgaatttataaatcaaataaataactaagattacatgaaccaaataacacattaaataagtgatgaaaataaatctatttctttattgataaatgannnnnnnnnnnnnnnnnnnnnnnnnnnnnnatttagggcacaaagcccaacattctaaacttgaggagggcatatcctatcccattttgaccattttgaactcaatggtcgcatcagttttggaatttgagcaattgaaggcagtgtcctaagttgattgtcaacttgggcgttgggccctgtttccaggggcttgtgtttgtggttttatccccaagtttgcttgaatcttcattatttttgatgatggaaaaaattctcaaagcactttttgataacttgatcaaaaatagaccaggttgacaatatgttaacctgggggactaggctcagttccaagtgtcaacttaggcgctgggtcccagtttcgccccttcaaaaattctgtttggtccccgacaatagttgaatctcaatattttctaaaaatgagtaagatgcttggaagtattcttgaaaactccattgaacatccaggttgacaaaatttcaacctaagcgcagggtcaacctcaaatgtcaacctgggtgctgggcccttttttggcacccatgaaatgttgtttcttcttcaaaaggacctatttcctcatttttgataaagacaaagacgatgcaaaagttggatctctaatatgatactttgaaggtgcctggattgacaaattgtcaacttgggcgttgggtggtcggggcctcagggccctaggtgctcaaaaatgaacttgctccgattctaattttgatgtctcaaatatgtccgtggtatgtctagttgatgtcccaatgtatgttttgagccttttgcactaagatagtcctaaaaactaaaaccctagttggatatgtcaacatgggcgacaggtgtaaccccaagtgcccaggttagcttccgggttgcaagtttatgtaatttcagctctcatggcttggattaggctgcttcctgtcttcatggtaaaaaatattaaaagatggtgagttggataaaagttattaaagtctgaatttccatccctaagatctcaaagtcaacttaggcgcagggctagggtcctttcccaagtcgactgctatgactcgggtctactcaactctgtgatgtcatccttcatgccacgtgtcaaacattgatgttcatatcactaggaaaagtttttgggttaacattacatttatcccacacttttaatatttaataataaaaacaattacatgaaaatcaaatatctactctatttcgagagatatttaagttttgaagtcttctagaagcatcatcttcgagagacaagttgaggatgtgctgaaggagcttctctcttagagaacttcattatgggcaagtactaacaccaaataagtgtccgttttaaggtaggggtcacttggtcgagtattggccttagagaggtgtcattaccggtgtgacatgttgttggggctccatccttggagaataatcaaccttagagagaactgaacatgcgtattgttggggctctatccttggaaagaatgaaccattggtgaatactaccactaaagtagagagttgaccaccaaagtagagacttgaccaccaaagtagagttgaccactaaagtagagagctgaccacggtagagtgtcagtacttctgtggcttctctacttgggcatcttgaattgtctttaataagtctatgaaggttggtagacattccctagggttttgagcttcaaaacaccaagaacctctttttccctatacgagtactgccacaaagagatggtcaatacttgtgtatgacacttgtacacccttttagaggcgtctctcacttgttaagtgattattgatgttggagagaaccacttggccaccattcttcttggtcttcacccttggcaagtactgacccttcttgagtgctagtactcgtgtgttatgggagtaccaccccttggggagtgtcaataatcgtgtagtactattttcttcatcttcttatgaaacatacactttacgttgaagtcttagtgcatgatgtgatatttttgcttaagtgttgattcttcttggaatttattgatgtgcgactacttaatgaccaatattcgtgtatgactcttcttttgtatttgatgatgccatcttgtcctttgtactcttgtattccaaacaagttatgtattttagctccttgttgggattaatctcgaattagggtttcgaggtgagttaccctttcttggattgttgagaagataaaccctaggggtgtgattactgatagccctttatgggcagtagtcgccaatgacttcttctgtgccttgtgatagtttgtttcgtcttctgtcgcttggtggaggtattttttgttgacctttatgtctttaaggtgtgttcttggtttgtgtgcccacataagagatgattgatactatttaattttttgtgaaaaattgagtataatataagagaaatgctaaagggtaccagtggtgcctagcaatctcttatgtttcaatatcgctattggtcaaactaagtatcgagtcctatatagtttaatataataacctttaaagagtatcgctagccaatcacaagacaatatgtctagatgtgctaagcaccactaatatccaataacaatggtcataatataaagatccatacattttcaaattttatatgacataattaggacaatgcaatcaaaattttgaataaaaaaaagtaatgttttagatttatttaataaataaattatttattaaatattattttgtgcataaatattttgctttcctttttatagaattgttttccttgtatttaagctaacagaaaacttagctaaacagaaaacttaacaagtttagcttgacaatgttgtttgagtattatcccaatttatattaaatattggatatcaaaaagggaaaaataataataataaaaaaatggcatgtattgtaaatttcttgacgaaaagggctaaaaccaaaacctacaatctcttttatctgtgtagttattctcacctttgccataacaatctctccaatccattccaatattattacaaatctttgcctttgtattgaagttgtccccattctttctctctttcaaaaattcaattcccagaaattaaaagaagaaaaagaagtcttgctctgtctgggtctgaatcttagacattcagagactcattttttcttacaaatttgataaaatccaactatctctgtagctccacagaagaaagaaagatagaataaagacaaaaacaaagaaataaaatccatgattttttaggacctatcctatatggttcatccttttcagagcttcaattccatcaagattttgtttccttccggtaattggacatcccttcttaaaagggtatctctggttttgctgttaatctttgtgaattcgttgtatatcattgctgaaaaccccattggcgtcacaacaacaaacaccatgaaggtccatcccatgcccaagaagcgaaacatcacaatccactacgagataaacaatcgaagagacaccgcttcggaatctcgggcgggtctgacccacaagaaactccggagactcccccatgtctttagtcgggttttggagctaccgtttcggtccgatgccgatgtctcggttgaggagagcgctgatttcttccgattcgtggccgagacggagggtttcggcgtcgatgtgagggcccacacggtcgaaatccatcctggggtgacgaagattgtggttagaggaagtgggtcaacggagttgtccttggacgagctcgaactcgacatgtgg

SEQ ID NO: 77338 - DNA, 1618 bp, Cannabis sativa
cctgatctgcgatagaattgtactctattgtgaccgctcggacagaatcaacaaactttcaatataaagccaagatcacaattttgattttatttcctgccataaaaagattacaaaatatgctatataattatactataaaaagactgctatctacttagcgtcagttcataactgaagcaaaaaaattactatttgcatctatggctataacgtcggttaccccaaccgaaaaaaattctttatatgtcactgaaaaactaaagcatttttttttttgtagtgtctcttaaaaaaaataattcctacaatacacaccagccatagatcacaatatacaacaagaaaattaatatttaattcacaataaattaaataatattttaataactaaattactaaaaataaaaaagaatttacaatatctaatctaattgttatgtaatgatattcattgtgtagtgggtagatatgtgtagatgttttctacaagaagcaaaatggtactacagtggatacacaccaacattggaagaatatattgaaaatggttggatttcagtgggagcaccagttcttattgtgcatgcttatttttctcattcaaataataataaagagatttttgaatgcttggaacatggttattatcctaccataattcgtcacagtgccataataatacgacttacaaatgacctagcaacatcatctgtaagttaactttaacattaatatatatttttttgcactttgtgttttacctacatcatattacccatttgaactcggtagttttaaaatacatgtcaatttttaaatcatgcatgtgttttgtaaaaatattggaaattaggtctctagatctgatttttgccaaactatttataaataggatgatcaatttttcttttcttttttttattcaattttgagcacattgacagtaaaaaaaaattaatttaattgtattaaaaaaattaaccaaaatcgaatctaaccattttacaaatatgaggtacgattttttttttttttaaaaaaaacaaaatacatgatattttttatcatgatcgatacaaaaatacaatcctcctataagtaacattatatatatatatattaattgaatattgctatacatatataggaggaactgaaaagaggtgatgctccgacgtcaattcaatgttacatgcaagaaaaaaatatatgtgaagaggaagctcgtgaacatattaagtttttaataagtgaagcgtggaaggagatgaatatcagtgaatctgatgatggattaatatatccaatctcattgattgaagatgcgagaaactttgctaggataggattattcatgtatcaacatggtgatggtcacagttctcaggataatctatccaaagaaagaatttcatcctttattattaaacctattcccctatagacacaattaattagctaattataagtgttaattgatcaataaatttaaatgtatattttgtctaatgtacttatgttatcaaataatataatgaaaataatgttgggttttatgccttaaataaaactctatttcaatgtaatctttatcttttaaatatcaataaagaaa

SEQ ID NO: 77339 - DNA, 3046 bp, Cannabis sativa
aaatcaaacttaacagatcttacaatgaggagttatccaatctctgttgattgatttgtctgtaacaatttttgaatccactttaattacatgaataggtaacttggtcactttgcaccattccaaagctttgtgaaggcctaaagcttctgcataagttgagcttaacaaactgggtacatgaatcaaagcaccctaccacaactttatccaaaaaatcccgtacaaccattcctaaaccaattttaccattgtgagtatattacaacatccacattaagtttgagagaatcttgtgaagtggactgataatagatttcagtaggctttagtgttagtcagtaagttggtcttttctattgtaactgtttactctgcttgttagttaagttcgttttgggttagttgattaattagcttctcaacttatcttctgttagctttcttgattcggctgttatctttcttgtactcactagctccttatataaagttgcctttcatactttgtatttgagagaattttgcttaatacaattcattacttctttctctcttcttcatccgtaatatgctattagagcgagaaaataatgctttcccttgatcctaattctttttctctcatcgtcgtgttctcttctctagcgacattcttctctcagcatcaagatctcgatactgcttcaaaggattcttttcatcatcgattcgactattcagaatctcttcccatctttaaacttctctacgatctatgatgtcttcagaagatcaaggttctcgtactggagatggagttacagctagacatttatcgacaaccctcgtgatccagttatgcaaggcaattagggaatgcaagttgtaagaaccaaaaatatacttgaagatcctacggatccgtacaatcttcaccatggagataatctaggaaacgttttggtgtcacaacctcttataggacaagacaattacattatgtggagtagagcaatgcagctggccatctctgtcaagaacaaactcaggttcttagacagttttattcctaaaccttcctcttctgatcatgttttatacaatgtttgggtttgaaataataacattgttatttcttggatattaaactctgtatctaaagaaatctctttaagtattctatatgatgaatttgctgcagctatatgtactgatctaaaagtgcgatttcaccaaagaaatggcctcacatcttcaatctaaggaaataactcatgaatttgaaataagacaatcaaatagtgagtatgtatttcactaaatttaaaactacatgggaacaactttcaaactataggcctacttcaacctgtaatggatgcacttgtggatgagtcaagaaacttcatgaacattatcatatggaatatataatgtctttcctcatgaaattgtctgatttctattcacaagtcaggagcagtatcttgatcatagatcctctttcagaagtcaacaaagtttttcatcttgttatccaagaagaaactcaaagaggacacctaaacactactgttgaccccaatcaaaatctggcctttgctttctagaaagaaaatccatccaataacaggcctaatttccaagcttcaaaattacatccacctaaaaggggtagacctttttgcacacattgtaacattcattgtcaaaccatttaaaagtgttacaagatacatagatatcctccacgatataacaagactaggaaggcaaaagatgttgtagcaaatcaagtggaaaccatcaatgaaggttgcaatcacactgtcgaaaacaacacccttttttcccaaatgacaacaacacagtatcaacaatcgctcaatcttctagcaacacaacatgctggtatgcccacctctgatccaaatacatcaggaggtaacactaatatggtattatcatgaaactctatattgccaaaatttaatgcttggattgtagattttggtgctacaaaacatatatgttctaacataaatatgtttcagtctattggtcctattattcctactaaattgttttttccaaacaatgataatttaatggtcaaacatagtgatataatgtttatctctgatcagctcattctcacagatgtactttatgtgccctcattcaaatataacgtaatctcagtgagctgtttaactaaatataaggatctttctgttctttttcataacaatattttttctatttaggaaacaactagcaaaaggatgattggcagaggtgaatctacaaatagcttttacatttttggatcccacaccaacatcttcttacgcttttactgtcttagctaaatttggtattcaagacttagtcatttgtctcataaatacttagatttatttagtgattcattgcaatgtaacactaaagccatcaataaaaaagaaccttgctatgtttgtcctatggcaaactaaaaaaagttacttttttttactcatcaaacttctgctgaaaatgtttttgatcttattcactgtgacatatggggtctatatatcacattacttctcattctaatcatatatattttctcacacttgttgatgatcactcatggttcacttagatatactttcttgaataaaaaatatgatgctactctcatcatatcttaatttttgtcttatgtccaaactcaatttcaatgtgtttaaatgttttagatcagataatgtacttgaacttgtgtttaaagattatttctgaagcgtcgtatattgcataatttttcttgcatagaaatttctgaacaaaatagacatgaaaagtcttaaagtagccttcaataagcaatccacgcgcatcacgagccactaaaccaatcccaaattgttggatctcaccaaacactactgcgtcaacattaaccttaacacgattttcttgtggagccaccaaaccaatcctaaattgtcgggtctcaccaaataaagtattgattaatttagaaacgtacttcttttttttttttttgaaggaa

SEQ ID NO: 77340 - DNA, 653 bp, Cannabis sativa
atatagattacatataaaaaaaataatgctccattagtatttgtgacaactagagaaaatattataaactagataggactaaaatataaggcaattttcaaaaatttatttttttttatatattttatatataattttacgatataaaatttttatttacaaaaatacattttttaaattacaaaaatacgattttcttaataaaaataaaaaaacaactgaaaataacaagacaataatcctgcgataactataaaataattataattacgctataaaacaactaaaaatacctagaaaaataacctcataacaattataatacaactataaataaaataaaaaataactaaaaaatatacatattttttaaacaaaaaagttcaaataaaaataattttattttcgtattaacaacatatttttgtaatttttttattattcaaatttctgatattttatgaaaaaaaaaaataataaaacatcaaaattatagaggttgcatccttcgaagttgaatgggtccaaaacatatcaacaattattaactcatttgtaattttgttgtcttcacataatgttagaatgacggcatgtgattgattggtgtggaaaaaaatgtataattttaggtttttaatagtaagattatt

SEQ ID NO: 77341 - DNA, 887 bp, Cannabis sativa
gtgggccacaattgccaattgctccctcattctctagtttcttcaactttacttgcggcccaactagaatctgaccaaagtccaaaccacccaaggcccgccaactccaccattctccaccaaattctaagtattttgtgccatgttctccattatatggtacaggaaaataccattttagagagcaaaatttcactataaatagcaccctttagcattgtaaatggtatcaaatttgtagagtaggaaagacacttatcatttaattgtttcactcttattaatattttatttttacttattttagtgacaaaaatgaatgaattagaatagtaatattggtgaagttagagtgtagctattgtactttgtatttttaatattgatattgatttttttgtgcttcatctatacatctcatttattatattgttcttcatcttctaatttttctttcaaatttaatagtcttttatataaattcagtcatgtttttcttatgtaagttaggctattaatattttagtatatttattatattgtatgtcttttattgcattctaccaatagtggtatttcatcaatttatgatatataatatgttatgttgtcaagttagtagtgagattcaatttatgcaagactaattaatttatacttttaacatatacatcttccagttgtaattaatagtatagtattgcaactgtattttagattattatcggtattaaaatagaacttacataactacatctctaccttaacaaactaatctttagtggtaattctcattcctgtggatacaacatagcccatttattaacgcatccgctgtataacaaattgggtgacatcaaagccctaagacaccataaaggatctac

SEQ ID NO: 77342 - DNA, 1099 bp, Cannabis sativa
  modified_base (42)..(43): a, c, t, g, unknown or other
tataataaaataataaaataaatctcattaatatttgaactnntatttgatgctaattattcgagagtcacaactttctttccttctttattcgagtaatatataggtaagttttgcgcccagaataatgattacattattgtttcttttttcctaagactgaagatgttgaatattcggatgtagggatctgattttgcctcaaaagcagttgatattgctgtagcaaaattacattcaattgcaacacctggacaaggttatctttccttccctttaatcttgtttccccttgtgtattttcttgggttctctttcttacttttccttgttatatttcagttacccaagtgcagcttaatcgtgctaaagagtccacaaaatctgcagttttaatgaatctggaatctagagtattatttcttatatatacatatcttgacatattttcatatagtttgataattttatcttcgagatgaatattcatttatggctgcatatgatacgttgagtattcaatcattcatatctatttcttattgaattgttgcagatgattgcatttgaagatatcggtaggcaagttttgacatatggagagaggtaaacttgagatgattttttattttctcagttaggaaacctgaagaaagttgacgaaattactctgaaggacatcacgaacattgcccagaagattatttcttcgcctctaaccatggcatcatatggggacggtaattgttatttttaagaattacatagtattaaaatttactgattagctagatagcgctgaatattaacaaatgattttgtttttccttggcccagttattaatgttcccagctacgaatctttgagctgcaagtttaattctcggtgagggcacttcggtcgtttcgccatcagccttaattatagagttcaaggttacttcttcccaaacacccttaccaaggaggtcaccgacaaggtaaaaacaatgacgagaatgaaaacaagaacggtagtgatgaaaagagagggccgaacgaggccattaacaccaaaagcggtggaaagaacagcagttacagcacccaaagtggaagc

SEQ ID NO: 77343 - DNA, 1541 bp, Cannabis sativa
aaatatggaaagggttgattcagaactttggctagtgatatgcaaaatataatacttttataaaattttacatataaaatggcatttttaaaacattgggaaacttttctaaagaaaaaaagatgatgggtgcgttttgtaaaatttcatttttaaatttaaatatagatatatattttttttattttctttaaaaataaaaacgtgttcgatgtttgtagttttaagaatgaaaaattcctcacaatatttttgtgttattttccaaggattattgtttgagatgatgttatcctaattttgcttaaaaactaatgaattaatgtacacactgaaaaataagggtttctattgtattagtataaatatgtaaagtgattcacaaataaataatcaatcaattaaaatgaattataattaagaacatttctattgggagatttacactgttttaaaaagtgtatttagagtttggcatgactcgaaaagtgcaacccaatactttgtatcattttaattttttagacaatgaggttttattagggccagtcttagggaagacaagtatagctaggttttattagggtcggtcttcaaaattatccccattttgaaaaacactatactatctacaattttataaaaatactataatttgtattagacctcataaagttcatatttgacccttatggttataagtggatataaattatatgtgtgactattcaatgtttatattaataatttaattatgatagttacattttttttatgatatgctataacaggttactaactggtaatcatatttaacaactagtgtttataaatattttttattttttatttatatgaaaataaataaaattaggttagtatcaaattataggtaatttattaactatttttataggtaattagtatcaggttagtattacacacttgagtatcctcttcgaggattattggaaccctgaggtggtcgataagctgtgtttcttgaatttccataaatcaaatttgcttgcatcttgacagtgatgtcatccatggcaatgtggtgatcaaggcgactatagtgaaataagaggagagcctgaacttctttgatggtaggattgttgcttcttgtcgtgatcccaaacatgacaaaatcatattcaggacccagaccattcagaagttgaagtatgagatcttgatctttaacgaaaatccaaaaacaacaagagaatcaacaagattctaaaccttgtcaacatagtcgaagatggagagattaccttttctgatattggaaactggcccttaagctggagaagataggaacgagactggcttgagaatttatgctccaaggctcgccataccgagaaagaagtggtgaagttcgcaacagaggcaagaactccctctgacattggcaatcgtaaccaagagagaagtagctggtctttctgtttccattagccatacatggatttggattcatcgttgagaagagtgagaggggaagggacacttgtgaagaggatgtt

SEQ ID NO: 77344 - DNA, 1939 bp, Cannabis sativa
  modified_base (1910)..(1913): a, c, t, g, unknown or other
tatttctccaaacatctaattttttaattaatgcatcaaaaatagtattttgtaaaataaggcaaaatattggggcgttacacaatatcatcccaataaatttttaaaattttctgaataattaaataaccaaaatatagttcttgattttccagtttacgtaccacacatgttgaaaaaacttcaaatctattttcgacatcgtaaactattcaaaagtttacaggaataatgttataactataacgaataccgccattaaatttatttgaaaaaaatattctggcatatatcttcgagaatggaggttaactaagagattgtcataggaggttcacggtagcattcctattgtataatattttaaaaaattatgtaaaaatttaataattttttactaaattataattaaaaataataatttatggtattcatattttaatctacacacagtaaattaaaattttattttatcgatacaaatatatataattattaacaaaataatgaaaaaaatgtcatgtatgttacagttgatatcctaattttcggtttatcttataaagtattttagatgtgtgttttacgtaattatattcactttgtctaggattatgcttgttttctacttatttcagatttacatggtaaaattcataatatgaattcaaaatgaagaaaaaaaacatgttaaatgagatgaatatgatgaattatcaagtaatttggagtttgaagatataattggtgaaaaattctaagttttaggatgcttagcatgctctgtttgtgatccaaaatcaagtctgaaacttcaagtcaatttttgactatgatgcgttcaatttaggaaaaatatcatgaatgaaaattctagatctctcttttacatcttaaatcgtctacctctcttattcttcctttcggagcaattttgaaagagttatgaccaaaacattattagtcgtcacattaggaagcttggtacccaaaaataggcttcatgggccacgacatggaggttcaatgttgcggcccgcctcatttaattagcaaaaattagggttttaaccctactggaaggcttatctcaaaaaataaaaaaaaaaaacctactggaaggctatataatgcacccttttgacacttttcaaagtaacaatcattagggacaacaattagaagcataaatcggctatggagagttttatcaatatttttcgacgacttctttcttccactttattttcttatgctcttaattaattgatgtcagttctttacgatgaatatgagtagctaaactttcaattaggattattaatggagtttgtttgacactttattttggtttaatgtgattcaattcttctagattttttatgtgaatctatttcattcgtacttaatcttttttaattgtctggacattaattaattgtttatgatatccgtataaaaactgagaagtgagtattaattatgttatagtgaaaaagacaaagattttgatataggacgagagtacctatatagtttgtgtagcatttaggatttttatacttaatgcctatgtgtttaaatttatcacgagagtagaaaatttttatataggtaataatttatatgtcctagcccgaatataagtttctttaataaattcgttatcgcatgaaaattagaatttgggaattgaattatactaaaccatataaagtagattcaattaaaattaattaccctaagctttaatcattgttaaattgcactttaatttatttttattttctttttcaatagatttaaactccttttctcaattattattgtggccaaatagaatttagaaatttaactatttggtaattaactacagtccttgtgggtagggccggccctaggcataggcnnnntaggcccgtgcctagggcccacactt

SEQ ID NO: 77345 - DNA, 515 bp, Cannabis sativa
  modified_base (388)..(395): a, c, t, g, unknown or other
aactgtaaaaaatagtatataaagtaattcagataaaaaaaaatttatataacagtgtacattacaattatttgaaatatattatcaacttatttatgataaattttcaagagaaaattgttacaaaaatttttactagtaattaatcttaaaaatttattttttactcgtaaaatttctcaaattcatttttttgttagcatttagccactatttttagttcatgttagtagtttatgtgtacatggatacaatattattgacccacataaataaatattttaattaaaattaaaaattaaaagtaaattaatttttttaaaaataaaaatatataaacaaattaaaattgggagaattacaatatatactattttttttaattttnnnnnnnnaatttacggtttgggtttctaaggcggttgcaacgctaattataataagagtttttatacgattttttgttgcaatttaggttgtagcgctagttgcaataagaatttctatgtaaaatt

SEQ ID NO: 77346 - DNA, 3339 bp, Cannabis sativa
aatttatatcttaaatttcctacatgtacaaatgttgattgggccggcccacagtttttttgtaatattttaccttttttgaaattttcttatttttttcccattaaagaatgtgtatttatgaagaataaaactaccaagtgtaatatggtgtattattcaaaagaacaatgtaatatggtgtaaaaagaaaaaaaaaacgtttctacatataataataaaaataaagaagaagatgaaaaagttaagagggcatcaaacgtctcttttatatatagtaataatagatgcaatcagttttatttatgtacccgatttatgaggtgattcacgttctgtattctctaattaagaaaggccaaagcaaatcttcattgcaaatggcaagacaacaagccttgatgaagtaaatttaatatttccattcggaatataatataataataagaaaaaagaaaaaccaaagaaaatttgaaccatccaatttacttgctattaataaatggtgatttcattcacaagaaaattggagaaaaagtcattttaccattcccaaaatactgatccgtctccatcaactggcggcgccacccatcaacgctacggccaccttcaccttcatctccactttccaaagactggtgtgtgcctttaatggaaagaacatctccattattgacaaatataatcgtctacgtctagccataaagaaacggctaacgctaaaaggtaattatattttataatttgttttacattgaacatgcatgcactgcacgtcctttataattgcaatgaaatgagatgagttcttctcagggaaacactctgttattatatagttatgaaggtaggccatggcggccatcgttaaggagattttggctaggccaatacaattagcggaccaagtgaccaaggctgcagaagatgcccaatcattcaaacaggactgcttcgagcttaagtccaaaacagagaagttggctgctctcctacgccaggcagcgagagccagcaacgacctctacgagcgccccactcggcgcattattgatgatacagagcaagtactcgacaaggcactcacccttgtcataaagtgtcgagccaatggcataatgaagcgtgtcttcaccataatccccactgcggccttcagaaaaacgtccacccagctcgagaattcaatcggggatgtctcttggctccttcgggtttctgcctctgcctgcgatcgagacgacgagtacctaggcttccccccaattgctgccaatgagccaatcctatgcctaatatgggaacagatagcaattctttacacggggtcattggaagaacgatcggatgctgctgcttcgttggcgtcgttggctaaagacaatgaacggtacggtaagcttattattgaggaaggtggggtggcgccacttctgaaattggcaaaagaaggccgaatggaaggccaggagaatgctgccacggcaattgggcgtctggggcgtgacccggaaagcgttgaacacattgtgaatgctggagtttgtaatgtgtttgcgaaaatccttaaagaaggtcacatgaaggttcaggtactagttgcttgggcagtctcagaattggcagggaatcatcccaaatgtcaagaccattttgctcaaaacaacgcaattcggcttcttgttagccatctggctttcgagaccattcaagagcatagtaagtatgccattgccactaaacaacagatgtccatacattcggtggtaatggcaagtaataacaataatcaagaacccaactccaaccctaaccccaacaccaacaagaaagagactgaagacgaagctagtcatgtgtcccacccgatggggaatcaaactccaagccagatgcacaatgtagtcaccaacactatggccatgagaaataatgctaatagtactccaaatcaaccaaagcagcagcaacaacatcaaccacagatgcctcctcataatagtcactcacaccaaggaaaagggagtcaaggttcgggcaacgctaagcaacaccaccaccacacgccagtctcattagcaggggctagtatcaaggggagggaattcgaagaccctgcaaccaaggctgagatgaaagcaatggcagccagagcactgtggaaactctcaaagggaaatgttgtcgtttgccgcagcataacagagtctagagcccttttatgctttgcggtactactcgaaaagggacaagaggatgttcaattgtattcagctaaagcattgatggaaatcacagccgtagcagagcaaaactctgatctaagacgctctgcttttaagcccacttcgcctgctgcaaaagcagtggtggaacaacttcttaaaatcattgaaaaggccgattcagaactcctcactccttgtatcaaagccattggtaacttagctaggactttcagggccacagagaccagaataattggacctttagttaagttactagatgaaagagatccggacactactatggaggctgtgattgctctgaataagtttgcttgtacagaaaactttcttcatgttaatcactgcaaggcaataatagatggaggagggactaagcatttgatacagttggtttattttggagaacaaatgattcaaataccagccttgattcttttgtgtttcattgctttacatgttcctgatagtgaggttcttgctcaagaagaagtgcttatagttcttgaatggtctacgaagcagggtcatttggttgaggagcctgtcatggaagctctgttacctgaagccaaaagtagattggaactttatcagtctagaggttcaagaggtttccattgatcattataactcaacaacagtttgtacaagattttttttttgttaatttcaactagttttacttttccttcttttgtgatttaatttctaaactctttaatataagaaagaaagtacataattagtctacctatttataaatgctatattagatgtggctagtgttattttttttttaaaaaaaatacaatttaaatttacaatcactatacatatatcatttatcttttatgttaaacaaattgtgtttcgtattttgttttataatttagtcataaaagcttattaaatttaaaattttaatatgttttttttttttttttataaagtggctaaatgtaattcttaatttaacattttatttttctattccgtcaaacgatcatttttaactttcacgttaactttcaaaaaataataaaaaaaataaaactttacgatgagagagtttgttatttaatttaaa

SEQ ID NO: 77347 - DNA, 634 bp, Cannabis sativa
aaaaacctaggtggagaaatacatattgtgacacgaagtgttgtcagaatatatgtaaatggcttatattttttatctgtcaacacataaaggtagtggtttaatagtccgagaaaagtgcaaatgttactatgataacaattattgtgaaaaaaaattaaatatgtgggttcataatgccatttgtcatattttgtataggcacaaaattggtgaagaagataagttaaaaattaaaaaaaaaaataatttgcatgacattctaaaaagggttgggaatctcttgtttggagtttggaccatccatgcctcgaatggtagttgcaaaattggatatttatataaaattttcctaatataattggtgacagcatttttttttttctcaattattttagtcctttcggttatatgataagagaatgacttttgttcttcaatcctaatcatacttcatagttcacacaactcacacggtgttgaaaaagttgacaagcaatcatagttcaattatataaatatatatcgaaaattatacgtattcattaaaatatatctatatatgtatcattttaaaaataaattgaaaatgggtaatggggtgagaaattctttagggtggcttgtcccaata

SEQ ID NO: 77348 - DNA, 5038 bp, Cannabis sativa
  modified_base (50)..(83): a, c, t, g, unknown or other
ggttttcttaaacccttatgtgttgattttattgttttagagaattcatnnnnnnnnnnnnnnnnnnnnnnnnnnnnnnnnnnatctagatcttggtaaaatattcccaacacatgtatcaactttcttcgagttgtaaatagatctctacacggtctttcacaattttatgagtattaccttgactagtgtgggatactcattcacttttggctttgtgtgataggaaaaattgagagagagagagagagagaggcgtgaaagagagatagatatatatatagagagacagagagaaagagaatagaaagttttatgttaagatttagttgtctgaattgatttgcgtactcactaatttctcttctctttctatttatatccatatactaggtttaggtttaataatattattttgatttagaaaaataaattaaatcttttatttatcaaataaagaatataatatatattctctgccaatcaaaaatactttttattattttttaaattaaactttaaattaattaataaaataaataaaagataaattggcccaaaaataccaagcttggtcgtgcaccctaattggaggctcattgtgatttttgctatttattttaaatcaagtgttgattaaaaataaatttatttttttccaatttcttttgttaactcagaattttgttaacattaatgagtcttccataattaatgcctgaaattaattatgtaataaattatatatattaagttgtaaataatagtgaagaaaaaaaaagattttacatggttttgtcatcaaaatctacatacttcatgagtctatattatttttgagtttctttgggttgagattacacattgccagagtttctctaagcctgaaattgtgtcatgtctttaccataatttcttagctacttataggattaagatacctttaatcttatctacataaccattcataaaacgtagacaatctctatgtttcatttaataaaatatgtaggaaataatatacaattacttatattcataataaaataaatgatatgtttgacttggtttgtgttttgtggcttgttatcgtcgagatgcttgattgttgaaatgtagtccttgacgaattcactgatattcaaaatgtgtgtttcaagtggcatactacttagagaacatcttgacttcaattacacattttccgaggttgtgagtaggagtaaccttaagcaagttaagccttttaacattaataatattgacactagaagttctccttaatactccttggagcttagcaccctcagtttaatatttggttcctgaggtgtctaccatgcatactctataatggtcatacacccaatattgcccatgataatttgccccgaggagatagtgcatgaccttcatattcaaaagaggtcattagtttcagtcttcttttcaaataagtaaatttattatcctcgttgtacacatgtcacataacttttcaaaaaattagtataacaattgcctcctcaaaagtcttttcaatttactatttgctctacacattgagtacaatttattgtggtggttttacttttccaataatttttctttgatttgcaactaattatgtcctttcatctaactcttgaattatccaccgttgattaatcatcattgatgatcacacagtggtcgcgagataacttataagtgggtatttttttacttctctcttcactttcaccattttcataaaaaaaccaagcttcagagaaggaaaactctcaaatttttaatctcacggtgcatgcccatctaattccttctatacttttttcgagtcacagtcatttttccagtcaatgattgcacgtcttttaggttctttgaagagggcattcgagcaatgcttttatcttcttagaattttcttctatacctcttgcatttactataaatcctaataattttcttgacgaaactccaaacaaacgtttcttggggtttgacttcattttatacttttctaaaattgtgaagcacttaatgaggtcgaagatgtgatcatcagtgttaatggattttgtctatgtatatcttcatattacgacctatttttccttcaaacattttcttgacaagttgttgagatgttaccccacaattctttaggataaagggcatgactttgtaataataaagtcccatgttagtcacaaaacttgtatgttcttgatctgggacattcattttaatttggttatgtctagagtattcatccataaaattcattagctcatgttctgtagtgacatcaacgagttggtcaatccttgtcaaaggaaaaaagtttttaggacaagccttattcaagtcagtgaagttgatacaagttctacagggttttgagactgaattgggtttgcaacccatatcagatagaatacttcccttatgaaatcgttaattagaagcttatcaacttcttctttcaaggcattttacctttcaagatcaagggtgcaccttttttgttgcctcagtgggtaagattgtcaatattcaaatgatggcaaatgaaattcgggttaatcccaaccatgtctaaatggctccacaaaaattgatcttggtttgccttcaaaaagaaaattgattgcaattttatttgttcccccaatcctttacctatttaaacaactttggtaggattaagtggatataaaataacttttttgagtttttcgatgggtttgagggttttttggtcatcagttatgtgaggatctgtatctccgtttttccttcaaaactaattttagctattatgaccaacgtttgatgttctaaggactttcctctcagttcagcattataacattacttttccattagttgatctccttaaacaattccaactcccgattgggtcgggaattttagtgataggtgttttatagagctaatttcccccactcctgtaagtgttggctgacccattataatgttttaaactgagggtaaatcaaccactaggaattcttacatctgagtcattgataagggggattctcccatagttatgggcagcttgattgtacctagacttgcaacactatcacatgtaaatccacataattttgcagtacaagacttcaactttacttttttcaatcccatcatttttaatttttctttgtataagatactgtcgttatcaaccaataccctgtttatccttttgtttgagagttgcaccatgattaccaattgatatgtatccagaaattgaacatgtgtcgcatcctcctcagtgaatgttataaggggagtctcaggttttgcacattttagaactttcgatgcaaatatcgagacctgattcttaacttgattaatatatcttttttgggcattattgcgggtactagcaatatgaggccctctagagacttttaatatatcctcaccatcaactgttgggagttggagattatgattttgattatggttattgggatgattctgctcattttgcctattttgaatatattgtcagatatatccactagaaataatattttcattttcatctttaagttctctgcattcctcactgatatattttatacccttatgaaatttttttgctcctcgcatttcacgtaggttcaggtttgcaaactgcaacccgattctcattggccaaaaagatattttcacgtgtttcattcaactcaatgtagaccaagtagaaaggcacatattttctatgcttttgtgcttctatttgctttttgatgaattcttaaaatcatcctttcttttccctttcaatcatgtgctccattagaatcacttgagacaatagtggttgtattggccatggaattactcgcgcttggtgttgcctcgttttttgttagaatttgtcttaagcaattttaactctgtacgagcctcttcttttcatacatagatttgagctcgttcattaaattcactgattgatctgagtggcattccctgtagatcatcccatatctcgcatcctgtagtaattccagtctataaagtggttagttgaatgttaatcattaaaattttaagcccttgttgttgctgtattagaaagacttaagtacatttttagcgactcgcctggttcttgtttcacattgatagcgaggaggctccaagccttatatcccttgaagcttggaattatttcttgaattcctaggataattgttcccatgatgtgatgtaatgtctagtgaacttgtcaagccaactcttagttacccctattaaagaggttgggaacaacatgcatcgtaggttcaatcctacattgatggctcacattgttgtgttaaaatttcttaagtaactcacatggtccgtagttccatcgtacggagccatatgtggatcttttaaatccttttgggtatggagtggttgttatattagggtgaaatggctgtaaatcctcgtctgagtcatacttaagaaaatttccatactctccattttgatacttgtgaaactactcttccaactaaataacccattaattgtattaggtctttaggcacacagttattcaatcgctcgcataggtcaggtgcattgaagtttagttgctcaagtatatcgagaatagtgctatttaactgctcgtgtaagtttagctatcttcgattcaaatgttcttagagattagattcattttcgtgaccgcggtgttggtctcatctagtattataattactgacttatcttgttggcaaggcgacttctaactagtaacttaaaggttactcagactagtttttctattgggattgtgacggtgagtttcattttctctttaatgagaggttgaaaattaatttttgaattaatttaagatcaacatgaattagaataattttttcagcatttttttttattttaataaccatttcaaaaatgtatttatttttaaatacattgaattttcgaatatattaatatatttatagaaaattaa

SEQ ID NO: 77349 - DNA, 1163 bp, Cannabis sativa
taagaaactggcattgacaacaggatatacccgattccaggtgctttaaagccacatgtattatggccttgtttaacatgcactgagttacatccagacaagtgtagtcttcccaaaatgtcaagcttgttgtcaaggcaaaaaaacagcatacactttataacactcattataatcttggcagataaaatttgatgaaacatatagattacaataacactagactgcgacttcatgagaaagaaacatcctttggtgtgaaatctgactcacacattacctatgagatgcctacaaacccatatacaaatgcagctgacaaatacgaatcaatcaaatggcatgtagaacaaagaaaaattgtagttggaagctaaaattaagcattgcatattcgaaatttcgaagtagaagaaaaaagttggtaaacccaaataagtgatttttagaaaccatgattcgaaagttgaaattacagaaaatgatgcaaatttcaaatttcagcaatgaaagcttaaaaattgtagagaggtcaatggatactgtgaggcattcaataagggaaaccaagtcagatttctctgataactttagttctccgagttcataaagcagctgggtacggctctctacaacctgtgtacatttgttggtaatctcataaaatctaatcaagtcccaaatactgtttaacataaatttactctgaaccagaagatcaacaagttcacaaactctctacaatcccttttctgttaatattattacttcaaattcgaatagccaaattaaaccaacagtagcacgaaacataatctatgaaaattgattggtagaatgtgaaatacttacatctgaagatttaatggcgtctaatatggtcttcaaatcgttggtcgacttctttgggtccattctcgtttttctctcttctctccctgtaacgatttgcagttcccgcctttttaagatttggtgaaatgaaagtgatgacccaaatttatttaaattcggattaggatatcaagatatcaaatttacattttggccccattttctttgggaaatttgaaaaactatactttaaaaaccctaatattttattcttaaaccaatacatttcaaactaaaaaatatatgacacttttatcaaaaacccaaaa

SEQ ID NO: 77350 - DNA, 813 bp, Cannabis sativa
aaaaaatctttttaaatataaaaaaaaatgaagaaagagaaaatattttgaatctaaatatttatcacatatatgtagagttaaaaaaaaaaaagttaggttgttaacaaaaaagaataaaaacaattaagcatacaggaaaagataattgatgcacatcacattactactccctaacgtcatcaatttctctcatcaatcccttcaccctcatcaatttctatcaatcccttcagcatgtttaagtagttttgttagatttaaggatttttgtctaattttaataaaaaagtctaacatagatgaaagttcaggagacatgatttagtatctgtcaaagttcgaaggacatgatttggtagatatcgaaggacatggtttagtacataaacaataactgaaatagttaaattgaataaaattagataaaagtccttaaatttaacaatctcgatagttaaggcatttttaacaaccttaaaaattcaagagacttgatttggtacatgccaaagttcagtgaacaaaaatcttaattagtccatcaccttgttatgagaattgaatggacaaacatatattcacatgtaaatttatcttcaataattttgtggcacatatatcgagaataagttttttttttattgattgaagtgacagagaaagcattttttaataataagattttttttttaacataataataagatttcattgatatgatgtatctttcctttaattttttgaaatatttttttaaaatttgcgaagcttttttttgagctattttcaaaaatatgggaaaaattatta

SEQ ID NO: 77351 - DNA, 1693 bp, Cannabis sativa
tgtagctcttgcgaattgaggaggagctcggttcaaaagctgtgtatgctggagctaagttccgcgtcccagttgagccctactaaattatgaagcgttgatatcttttgcgggatcctaaagcaatggaagttgactttccagtgattatgtagaacggtttagccttctgatttgatgatactcggatacttgttttttttcttgcaataatgctcagaaaagttttgttttgagagctttgaacaatgttcaactgatatttatgcggatgctatcagttattgagttgcattttgattattacagttactgagctgtttaaatccatttcaccatgccataaccttttgctttttttttacgatctttaatttgagtttgtatttctacagttcttaactatcattttgagggtataaaaatgaattataattttgagggtattaaaatgattccaaatggtgtagaatgtgattaacgcatacaactatctcatcatcttttcgaacaaagttagaacttatctggcctctaaggttagaaaaatcttgtagtggttttatttatttatttatttttcttttgtaaaataaaagtaaatgaaggtaaatttataaaaatactgtttttataaaataacagtagaatgaaaacagaaaaaaaattatgcctctcactgtctcacacgataaaagtaaattatcccgtaaatgaatgagctagacaaaaatttagtgaataaataataaaattgcaagctaaaatttcaccataatgttttacggttaatttatttgcctaaaaattttaccattatcgatgcaatgacatatttcattagaatttcaagtaacattttgatttcttaaaatactaaagcatattcttggtaagattgttacttggattaggtgtgccaatatttttctttttttgcagaaatttaggagtgttcttggtgaaggtggtgcagatttagattattttttcaaattaacccacacatgcggtttttctaattttcccaactacacctgcaccgcaaaaataaaaaaccgcataaattgcaccgcaaaaaatggtgcggtgcggtttttgcagtttaaattatcactaaatacaacaaagcttgagaaacacttgtcaaaaatacataagacttgaaaataaatatgaaaaaaaaattaagtttcaacaatacaataattagtggggtttgggttagacattcacatattggacctaaataaatataaaaattgttatttttataatgtgcggtgcggtgtggtttgaactgcatattaacaattcaaaaccgcaaactgcaccgaactgcgcagtttaggaaaaattcaaaccgcgactgcaccacaaaaaatttcaaaccgcattttttttttcagtgtggtgcggtgcgagcggtttgagcagtttgatgaacacccttagaaattactcttggaattttatgccctaaataaaacctattttaatgtaatcttatttgttatagattagaagtcatttatgttacgtgtagttttcatgtttatggtgaaatatacaatttctgttaaaatcagaacatatagtcatttacaattacagtgatgtcaatacaatagaaggtaattgtgattatatgcttcaaaagataatgtcctatgattcatcagtgcactggatt

SEQ ID NO: 77352 - DNA, 2117 bp, Cannabis sativa
  modified_base (1695)..(1700): a, c, t, g, unknown or other
cctcttggcaccgctctaaaagagaaattctgaatctggctaaataacattaatgatagcactcttaggaggcaatctaaattttattctgtattttagtattttatttacttttgtttagacacttataccagtaataataatttgttgccaattagaccttgtggaactaactttcattcgtgtacatatgtcatgtcacacatataaatatagatatacatgcggtttatgtgtttttttttaataatatcgtattgtcgttttagggttgactgggaggaagagtaacaattgtggggcccacattgaaatgatcccaaaaacgtgttaaatgttgattggcccttattggcttttcaattaaaaaagccaattgttgatgttttacttttgacaagtaccggaatgcgataactcacgtggtcttagccctaaataaattcaatctttctttctttatctttttaaacttttggtgctaaatgcatatatattcaacatttttttttttatatagatatgtctttcttttttgagttccatggaaaaatttttggaaccttcattattaaatattttgagtctctttgaaatggtacgataaacttatacctaactaacttgtttccattttccagttaaagaaacagccactacaaaaattgttacttttaatgataattttttaatcacaatataattttttttattaaatgtgatttttagtcacaacaaaaaattacttatgactaaaacatattgtcacaaatttagttttaatcacaataaatattgtgactaaaaacacatttagtcacaataaattttgtgactaatacttttagccacaaaccttttagtcacaacacaataatgataatttataattaatcataacgtttttatttttagtctcatattttattgtgactaaaagtaaaaaattttgtagctagcagttacacagcaggcaattaaaaaattactttgattaatgcatgtatttataagaaatttatttggtgagaacattagtttcactttcaccctagtggtattttttatatttgatatattaagaaattattataaattaatttttttttatgtgattgtatacattaatactagatctgttttctttcgggcggttctaaataatttagagtacaaaaaatagacattcagttgcaagtgtttggttttattttatatgtgtgcaaaattattttaaattttatttttgacataattagaattttttaaaaacatacaagatgcctactatacaatatcatataaaaaaaattgagatataatttcttaaaaagtataaaaaatagaaaacacccataagatatagtaaaatgatgcttttatgcctaagaagctccttatatttatatatgtactaggcaaatgtttatatgtttaggttcttttaggttatgttttgatttttaaaggtttgaataaaaatattaatttaattaaataaataatattattttagtagaaaaatatttaatttaaagctctataaacaaaatacaatagtatatttttgaaaaaagaaacatatgaatacaattgctcaaagtttttaacataatttatctcaaaaaaaactttaaggacaatgataacaatgataatgatgatgttttgtataataataattattattattannnnnnttattattattattaatttttataatagaattcatgatattaatattgtaaaataaggtaactaaaaaattgtgataataatgagacaaggtttttcttaaaaaagaaaaagaaaaagaaaaagaaaaatatgtggatctatatatatattttaaagttattttcgtatcatataaattatctacaattgttcaacattggtgatatacaaactagaccatgatgtgaatcactttcactataaaaaattattacttttagtggcaactttttaatcacaacataattttttgtaactaaatatgattttcaatcacgacaaaatgttacttgtgactaaaacatagtacgtatttagttaaaagttgtcactaatttagttttaatcacaataagtaatacatttagtcacaacaa

SEQ ID NO: 77353 - DNA, 4396 bp, Cannabis sativa
attccaacttcccttctcctttcaaacgtgaatactccctgaagctacaggcagaacacctggtagagagacccaatcttgagtgaaataaataccacgacttctatttttttcaataaaatcatcacatagtaatatttacacttttatatgttaatttggctattatataaaaaatacatgttaaaacagagttataaatacgtgcatattggattggtccgacttgtatattgaaaaacctgtaaaaatacgagtcatgatgcacataccataaaaaatataagttatgttgtgttgtaccaataattttatagggtagccccaactcgtagatgtttgagtcgtgctcgtatgtagtgctttacttgggccaacctgtatttttgtacgagcttgaattcatactccatgtttttatttttttatcacaattaatgagctaaccactaaactatttgtgttttttatagtttcagttacttctatataaattttcaataatagccacactatcatataaaaaaattattagaatttgagttgtgtttatacttcttaagcaagtgtcggtttggtactatgccaaaaagtctacccctacgttaaaataataaaaaactcttcatttcctttaccatttaaaatagcaatttgcttttttcaataatgttactttttccaaaatcaattcaagctcaatgttggatcagtaaaatttacaatatcaatttacttttttctctgaccagagaattaagtgacaaattacttttcactactaagtaaatttcaactcaataagctaaaaaagcaaacaaatatagtttcatggaagagtagcaaacatctgatgtagaataggagatagagttatgggcagtttgtgtctgaaataatatgtaacaacagaattgtcacgtgataactaagttgctcttcatatttcatgacatagctaagcaaatcaaaattaattgtcattttgttcgactgaaaattcaacaagatttgatttctacaaatttagtgaagatttaagaacaattagggacatcttcacgaaagtttgaatggacatcttaacatttattttagtttcccattccaaaatttgtatatagaatttaccctctcactacaattgtcatataatgcaaaagcaaatttttttttttttttgcagaaattgtcagcatccatgagtggctgtcatcaaagttgcagggaagttaaaacaaattgtaagaaattgtacccttgagatattagtggttgtaactattttcaataacaatatggttcgtttaacacacatactaatttgcaacaatacactcatctaaagatttggacgataaacttataaggtaaggctttcaattaaatcaaagaacagggaagaccaaatttttaagcacagaaacttatgaatacaaaactaatccaaaaagtgaagattaccaaatcaaatggcagttcttccaaacctcattgacagtgagtcctgtctgagaatcgtcatacaggccttacaaaacaagaaagcacatttgccaagcttccaagcatcgtaaaatgacaacctgcgtcaaaaatctctgactttgttcaccagtgcatcttcgaattcagatggccaaccttcttatcctctgaccatgagattgtgtaattaagattcttatgtaagcatgggttgtcttactgtgttgaagcagaagcaggagcaccacccaatcccattttttgacccaacaatgaaagctgctccacaaactcctctccggtcagtaattctgttgttccgtatataacgtgcttggcaggctgttgacgctgcacgagctcttgcaggctcccatattcaacataattaccaccaccaatcatgaatacaatagcttccttaaaaggtcctttcaaatggctgctagtagatccagaacttgattttggagcacgaggatcaaaaacaaggtaagaatcaacttctggatttggcttcccctccatcaaggcatccactgttcttgtcaacgccaactgcctatcatttgacaaaagattcttcacgcctgctgtcacagcactgattgactgcccatatagtttctcggcccagtcaacaatgttgcttctgctagcagaattggcagatgccaatgagacattcagtgatttgatcttctttacatactgaaatgcacaagtgtcaacttcagactccctaagggcagcttccacagcctccacttctgcttgattcatgctttctgaagaaataagatacatgatggcaaacctcagcttatccaacttagtccctttacctctaagtacacctagaagatcatgccgatcaattccccctctgacaatcatatcattctccttttttgcataagaatcaagagacctctccttgatctcacccaacaacacagttgcaatgtttgtgtgcttatcaattacctgcttcctctcagtcaattcaggaagtgagttcacagcattcatcaaatgtttagtgtttccaatcatgtcagtcccatcaaattcagctccatcagttccgccagttcttcgattgacatcatcaacatctttcttatacttgttcagctgggtctcaatctccactgcaacttctggaaactccagagatccatttgctacccaaaaaagatctgaagaatccaactcaaaagactttgttccacccttttcacccgggacagtcaacctatttagcttcaatccaagcacatcatgcactaaaggacggtacctaaaatcatgctgtatcccaacagacaactcaaaattccgatcaaatatgcacaaaattggacgctggaaagagctcgcgaagttcccaccttcagtaaataaattattcttagacaacaagtgatcacgaagcctctgatccaatgcagatgcaaccatctctgcaggacctccacgcggacaccttatgattggcaccactccaagagtggccaaaacacagaacaacccaccagctatcttctcaactatctcctcaatctctcgatcgcctgcagatggatcgttcagctggacataactggatttctgtgccaatgagaacaaattatcttccagtgttacaaattccaaatattgatcgtgcacctttgaaatccgatcaattgaatctgaattcagagtcccagaagccagatcctcgagtagctggcgaggaattgaagatgagaaatttaagtggaaactatcatagagtgatttagaggcatcagcaatgattctctggatattaaccggactgggttgaacgaagtagacagcaggaacatcaaggaccggttttcgatctttgtctatgagaaagtaaagggtgacaccatgtttgcgaagatctttaacatgaatcaatggtgaaaggatattttggcaaaatctatcatagatcaagatcttgtaaacctcttcgttagctgttcccgttgcgttcacgggttggttcatattcaacattcgaataatacattctgaattcaaaaattctcaaatcaaattcaatatctcaaacacacgaaattcataaccaatttaaaacaaactcaaaatacataacatatatacacataaacatgtaccgctaaaaatccatagcatttcataattgagtccttaattgacatgagttcaataataaaaaaaaactacagggtttttggtttaagttctgaaattgattccaaaacgagatctaaatcaagttagggaccaaaaaaagacccaaagaaagattcaaagctcacctgtttgtctttgacgaagattgagggccatttccggagatctgaaatctcagctagttcagttgaagacgaagcttgcttttccaaagctctcaaattttcgggagagaaccctctgaacgtcgaatcgaacggtcgaacctcgtgcaggacatagatgtaagaaaataatatgaggattatattcctatacggcaggtttctttacaaattatattattatccactcatgtaacgacacgtgtaattaaaaatggaaaaactactcggaattgactatggtaaacttttgagaaatatgattggtcagaaaacgtacgtgggttgaaacccaaccaatgaggaatgaatatttgatacatattatttctattgctgaagaagagcggagaaaaccgttctaagatttcggaagcgcatctgagtttagcttagttaagagtgaagaggacactgaaccggaatggaatcgacgacgtcgtttttgaaaaacagatactgggttttgaggcatggcaagagcattccaaacgagagaggcctcatcgtttcatctctggtatttttttttaataattatttat

SEQ ID NO: 77354 - DNA, 664 bp, Cannabis sativa
  modified_base (609)..(615): a, c, t, g, unknown or other
actcacaattaaaaatattatataaaaatatcaaaatttaaaattaatttaatataattttataacttaattatcattaaataaaatacaaccgcacgtaaaacgcggtttgttttctagttttattataatacgtataccgataaaaaaaaaatgtatatattttctttaatgttaactgacgcatacactttctttagttctttttttcttgttttttttgacattttattttctatctcgatgtatatgtattgagtcaccactttttttcttttttttttcctctctctgacatatcatcatattatatatatactgggtcaccaataattaatagattaattatattttttatttttattaattatatttaaataaatacaaataaaatatctaattaaattatcagattaaaagtaaaaaaaattaaaattctaatcaaaattactaaagataagtacatattaatattagtgtcaactaattattaggtaccaaaccaatatggtattgaaaactgtgacagtcagtagtccgtgatccgtaaggggaaatagcgggtatgttgtacaatctcatatcgcttggggaaggtcaagtgtgatnnnnnnnagactgtgtaggtatgagactacatagttaaagagagcttaaatagatt

SEQ ID NO: 77355 - DNA, 623 bp, Cannabis sativa
accactagtaaaagagtattattattggtactagtggtgctcgacactttttatagacaacaccgttaataatataattatatgagactggatactttacaatcctaaatacgaaaacgagtcctttgcaccagcagttcctttttaagagttcttttttttttcctttgtggtccattaaaagaaaccatcatcttcttctatggcgcgttaattccactccccaatccatatataccaacaactaactctcgtagatcatcaaattgtctccaacgtactctgtctcttgtgtttattactacctgagatacaaaacacaattctccttttgtgggttctcctttgactctctttttctccctttttccttcttattcttccttttttttttctcactttctttttttctctcgtgaattattattatcactcctcagtaaactgtcggtgggtgcaagcaagcatcctatgacaagttaacactcaatgcttccttccaccagtttaggctagttttcttttctttttgactttaattatctaaacgttatgatatgaacacttttctatgctccacctctgtttttaatcagcacataagttgattatgtttgtatttt

SEQ ID NO: 77356 - DNA, 750 bp, Cannabis sativa
atttgagttcttctctttgaatcaacaaatgtattctttagatatacacttataattatatgtaatatttttatttatggaattgaatcttattgttgcatattttatgaatgttaatgaattctaacaataattaatgacaataatgtttttgaaatactacaaaatatttataacgtatcacttcgtaatattagtattgaacactaccggtagtacttaataataaaattttaataaatagataaactagtacctaatatatcctttaactaattgatttagttacaagttaggcaatgctttcttaagcatactttaacggatgtcggtttttttttttattacgcgggcttcttgttcttttttttttttggtgctttttttgaatacttaagagcttcttgttctatccattccttttcttttttggtgtatgtatatagtgtggatgatgcgtgtacaaatccaaatatttgtatgtgctcttataaacaaattaaagtctcgagaacgtggtgtagttttcatgaagaatatccatccccatccccactaattaagtaatttctttaatagtgctttcgtgactcgaaactaggggcactactccaagttgcttaattaataatcactaaaaccaacactataataaatatatatcacaattttatttatttatttatttattttataatattggtactcttcgagttgttaatgtaagacaatttttttccatttatacga

SEQ ID NO: 77357 - DNA, 1182 bp, Cannabis sativa
gtacatgtcaaagtttagggggcaaaaatcctaattagcctattgaaactaatatgtttttttttatagtggttgatttgaactttaatttcaatttatatatattcgttttattattacaattaattaaaatgtaataattgaatgtaaataaaaaaaatattagtggtcggtttggatgggttaacccgaccaaactgactaattttattaggcgggttactattttcttttttcttaattaggtaggttgcacatagatttttgtaacccgatcttcatattggtttgaataaaatataacataaaccgactaaattgaccgacgtacacccctagtttgaatagtttaaccgccaataactcaaaaaaattaagtaattaaatatagattattactaaaaggcaccactagtgtttattagcactctcctcagtgtcataccgcgcgttattggtgtaattaagtatcgagaccactaactaattaatcgtaaaggaccacctatagcaaatattaagcaccactagtacacaataacaatattcttaaatacataatagtttaatgtttttatcacaaatatctcttaatattattattttactttgtagagaaaaataaacaagggcataattatatattaaactaacaattaataaataattaaaaaaaaaagtaatattatgtgagccgacaaagccagcgagatctcggctcctaaacagcttcatatcattaaggccttgtacctctccaccggacatctttcacaatagatttttatatgtttttcttttaaataaaaataaaaattaataataataattaaacattaatcagaatcaaattttaaaaaatgtcccctttatcatcatgatatctctctatacttttagtttttttgttttccttcattatataacatgtttagtttcatttccttaccttttgggtttcattattagtttaacacaaatgtacatttgatgattaattaatcaattaattagtttttttttttatatgttatgtacgttatcatgtgacattggttgaccatataaactaaactaaaatgtgctaagaataatgatattctcacttaaaatatacaataaaatattagggattataatgtgacaatttttttttttgtaactaatcacattaattttagt

SEQ ID NO: 77358 - DNA, 1946 bp, Cannabis sativa
tgtaaaccagaacacgtgtgtaaattccattagttagtttttctgctttctgttaagatagttgttcttgtaattagttttgtaacagattctgttacacctttcttgctttgtaactctcctcaatataaataagatcatagctaaccattttctggttaagctcttttggctaattctctgttcttgtgctctgcactttgctctcttgctctgcaatttttcttttagcctttgagcttctacatggtatcagatgcccttgaccgccgtcgttaatggcttcccctgataatgcctctgcttccgacattcaaacccctaacccaactcctgctcctgcaactaataccccagcaccatggaatcctttttctaattctctttcagcttccctcaccattaaacttgacagaaccaatttccttgcttggaaatctcaggtggttcccactgtaataggccatgaacttgacgacatcctctttgctggtatcccaccaccacagaacttggttacaggagcacccaaccccgcttaccagcaatggaaacgccgtgatcaactcctcctgtcatggcttcgatcctccatgactgaaggcgttcttggatctgttgcccaattcacaagctcatattctgtttggagatctttggaacagcgattttccagtcagtctcgagctcgtttgttgcaactcaaaggtcagttttctaacattcgtaaaggttctttatcaatctctgactatgttgataaagtgcagaccatcaccgattccctgggaattgctggttcatctgttgatgaacaagatgttattttacaactccttaatggcctcggacctgattatgactccgttgtttttgggattacctcaagaagtgaccaattatgtctcgaggaggttcaagctctccttcttgctcacgaaagtcgactcgagcatcatcattccatttctgatcttaccatcaaaatgcaagctaatcttgcgtacaacaattcaagatctggttctggttcttcccgtccttaccaaccacctggccgtggttctcttagtgatcccccaaatcgtatgcaaggcagaggtcgtggttctttccctccctctcgccttatctgtcaagtttgtctcaaatctgggcatacggcagctgtatgccactacagattcgacaagaattgggtcacacctaagcttccagcctctacacatcgtgcttttcttgttgaacatgactcagaagctgattctctcccctcatccaccactatactgcctgattttggtgatgattccatctggtttgctgatacgggagccaatgatcatgttacttccactctcacaaacatggattcggctattccatattctagccaagatactctagctattggagatggtaggagacttctcatttctcacattggttcagcttctttaccatcatctaataattgtcctttaaacttacaatctgttattcaagtaccatctattactaaaaatcttgtgagtgtctctaaactaactgcagacaacaatgtttttcttgaatttcacaaacattggtgctttgtaaaggacaaggatactggccaggttctacttcgagggaaggttagagatgggctttacatgcttggagatgagtctgcttcacaacccaaacaagccttactgtgtgaacttttttcactttccaattcttccaatttcaattctgatgtaaccaactcatgtacttcagatgatattaataataagactcctcattctccttatatgtctagcaatccatctatattccatactgcagttagtaaaaatattaacacatggcattgtaaacttggtcatcctaatgaccaagtcttgaccaagctattacaacatcttcctcatactggcactctaaaagatcttcat

SEQ ID NO: 77359 - DNA, 644 bp, Cannabis sativa
aatccaatctgtatagtacactatccttttctcaatatattacgaattttaccacactagcttgtaattattgtgctcaatatctcttctatgaaaaaatgttttcttttacgagtttcactttctaaatgatgagaggacatatgtatatttcaattaatctcaagaataggtgaatgcataggaaaaatctacagtgaacatctataaaagttggaattggtgtacaccctaatattcaaaatttattggcttttaattttgttagttgtttctaatagtgggatgcgcatccctggaataaaaattttgtgacatgttttctaatttaaatgtaactacaaatgcaatacacatcattttttaagaaagcgcggaaggtggtaattggtttggacttcaaccaatttggctctttaaattacactctatacccatttttttgtctcatattttaatttttaccttcattttactactctttaatttatacccacttttataagttatattcccattatatgcattaagaagtctaatttcgataagttttatgagattatatttggtactttgattataaaagagggtatttatcaattaaaattattttagagttatatttgattaatgtgtaatgaaaa

SEQ ID NO: 77360 - DNA, 689 bp, Cannabis sativa
  modified_base (28)..(31): a, c, t, g, unknown or other
  modified_base (57)..(60): a, c, t, g, unknown or other
  modified_base (88)..(91): a, c, t, g, unknown or other
  modified_base (120)..(123): a, c, t, g, unknown or other
  modified_base (150)..(153): a, c, t, g, unknown or other
gccctaggggtaaaatggtcttttgacnnnnaggggtaaaatggtcttttgaccttnnnngggtaaaatggtcttttgacctttattnnnntggtcttttgacctttattttctacaatnnnntgacctttattttctacaattaataannnntggaattttgagaaaaagcaaaggaaattttggtttattccaccccttgcccgaccgcccccccacctctctaaacccttttgattttcaattttgaaattgaagaaagctagcttggattaaagcttaattgttggaaaattgggttgaaagcttggatttgaggtagctttcctactgaattttaattgaattccttgctgaatatgattgtggaaaaagtatgaattaaatgaaatattcttgtttatgcatgtatgtaggaattgtaattttttttttagagattaaagtgtaaattccttcatttagttgtgatttatgtttgttgagcatggaataagattaaagggtattttatagattggaattcatgatttgtttggaatatttttgctggaaaaaaaatttgggtatgttgaaattaagctcaagttcaagagcttagattttatgagtttaagcaggattttgtgttgaattgtgggatttgtttttggtaaattcagagccgtttttagggtttcattgagttt

SEQ ID NO: 77361 - DNA, 1398 bp, Cannabis sativa
atccacataattattaatatttataacagcctcgacataaacttcaattttttagagacttttataataaattttcctatataaatctaagtattcaacacacccattgcataatatagacccattcttaaccaattataaatacacaaatagtaggggatttatgtaaatatatatatatatatatatatatatatatttgttgctaaatatgtaaatatgccttcaaagagtgtgtattgtagacattttctataatgtttggataagtagtgcatatatattgaaaaacaaaaagaattagttagacaatatcaaggagaaaaagatagggaaaaacgatggagaatagaattgaaaaagatcacatatggtatgaggcgagccttgaggtctttgtcttctaaagctatatagttcaataaattctgagccacaaaacttaacatctagtttgaaccgactatacttgaggctagctcaagtggctataggtgggtgtctgagtgttggaggtcttggattcgagtcacaaaacatattgtaatatataaatgcttgaataaataaaaaaaaagtttgaaccgactatactcatgaaaccacaaaattaaatcctctaaataaactatattatatttataggacaaattattgaacttgtctaatttctttctcaaatctgtgaggttattttaaataatttaatatgtggacgtataaattaagataatttattggaattttaataaaaatacttgatttttggcaaaaatttataattttactgttatataattttttttacaaaaatactgtttttttttttttataaatcaaccgtaaaacaataaaacagaacaattaaaacaatagtggaacaactaaaaaataaccgtagaataacagtgaaaacttaacacagtactataaagtataaaacctacacagtatttttgaagaaaaaaaaaaataaaataattaaaaatttcagtatgtagtataagtgatctaattaaataagcttaataaatatcttatttggtatggattttataatgtataatacttaatagtaatttgtgaaagaccgtatacccattatctcattcatatccagtggaatcagatatgtcttctattctattgattttcagaataattaatatgtattttaaatcatgagtttacttaattaatattaatttaaaaataaataacctttatataattggaatgtcgagtttaaaatatttgtaactgattcaaaatacttttttttttaataagtactgattcaaaatacttgatacaaaagttattgcatagcgactataaaaaatacagcctgttgtcctaaagatcgtacgctccaggcctagatcggaagagcggttc

SEQ ID NO: 77362 - DNA, 843 bp, Cannabis sativa
aagaaatcaatcattgatcaacaagatttacttaaataaaagaaaggatctttggatttaaaatgagtcaatctaagactctggaacagaacctggatgagttcttgaggttacacattgagttagcaaacttaggggagaatgaggccttaagtgatgagaatcaagcaattataattctcaattcactgccagaatcctactgaacagcaattaagtatggaagatctgagattactattgaagaagtaatctcagctctgaaatccaaagatttggagctaaaggttgaaagacctagacattctaatggggatttaaacctaagcaggggaaggcctacacaaaagaaaccttgggaaaatagaggcagaagcactagtagaggttctcataagggaaataatcaccataacaaagggagatcaaattcaaaaggcactaaagatcctaatgggtgtgatcactgtggaaagctagggcatttcaagagagaatgccattattataagagaaacaatgaaaaatcaaatacagatcatcaagaagaatcaaacaaacaaaacaagaccgagaatgactatcaaaatgcaaacctaagtgatggttatgatagtggagatgtctatgttgatgcatcatcttttaaagatgattggatcattgactcatgttgtacattttacatgactaaaaataagtcttatttgtttaattacaaggaatctacaggggcaaagtcattcttgggaatgagcaaatatgcaacattgaaggttcaggttctataaattttaaaatgtttgatggcattattagaaccttaactaatgttagatatgt

SEQ ID NO: 77363 - DNA, 1061 bp, Cannabis sativa
cagataagctttgccggcgcacaactgcgccggcaaagctttgccggagcaacaatgcaccggcaaaagatgattttcttgtagtgaacagatccaatggctatagatcccaatgtggaaactctagtgaatcagagagatccggtggggacggatcccgatccaaccattcctcaacctctaatataggtccccaaattagtaggacatgggatgacaacccttctgactggatttactttaggcacgcaggaagctggaacaactggcaagttagtaggacatgggatgacaacccttctgactggatttactttaggcacgcaggaagcatggaagaaagccgagttttcatctccataggatgcccaatttagcttagctttctgtgacatgaacatagaaaaggctttatgaacttcattataccttttgttggcttcttgctcagctgccatcaattgaaatgaaagtggattcttggtcattgcagcttgggctgctattagatcattccttgcaatcgtatcagctttttgaatatcagagaaaccctcttgatttatcaatttgagcaatggtttcagccgtctgagcttagataccattttgaacatccttgtaccagcaatgtctccttgccaacattggctaacttttgcattaaaatctggagctagtttccacatattgtaatatggaaaaggcttcttccccgagttccactctcgataaatagacacaagtatagggttgtgatcaaacgataattcaggaaggaacacagcttccgagtcaggcaaagcacaactccattttgaattaatcatggctctatctatcttcgaaaaaactctatcttcgggcttttgtttattattccaggtaaaaaaagatctagaatactttaaatccatcatatcacatgtctccatacagttccgaagtcgtgtggaaggaatactctgggctttcctaccaactctctcattagcaaacaagatctcattgaagtctcctagcacgatccagggctcctgaataccagcagctagcttctc

SEQ ID NO: 77364 - DNA, 1017 bp, Cannabis sativa
catggcacaaaagttgctattaatgatgaattatcatgatgcttctccaaacatgtaattatgctaaaaacattggattgatttggatatcaaatagggtataataattcttttgaaatagtatcaaaattactcttttattatactttcatgtcttctcttacggagttcactatagaacaatcagttacaatgccaaggcaatcaagcccaaaatgactgatcagtataatacacttcgataacaaaccagtgaatactgaatttatgaaacaactgactatctctacattttggctcatttaaatctcgatgaaaagacaagtttaaatgagtcaaaatttaagtaggggtagtttgaccaaacattaaactaccccgtacttataaatcctttacaaacttaatcacatatctatcgagatgagaaagtttctctcattaacaaagttcaatctcgccttaatacgttcattcaaaatttcatctatacactgtggaacaagacactttcgttcaaaaatacacaaattcctattcattcatattgccatattttgtacctgtttgcatagtacacttctgtcataagcctttttggcctcttggtattaactcactgagaatcagttcatcaaatatacttggccaaagatgactacttagtcattccccaattttacacattacttaccatgagtgaggacatgaaaagaacaaatgtgcatgatcttctatgtcaatctcacaaacaggacacatagcagaatctacaaagatttgcttctcgctgagattattacgagtaagaagattagtatgaataccctgccacaaaatgaagcgatgtttggaactgaaagtgaacaccaaacaaccttctcaaatgctatttgagagcactccgccaatagtgcatcatacaccttacttacctaaaaattgtttaaaaaaatttaaaagtgatttttcttttttcaaaatttgattctcaattgaaaattgaaaagtaaaaat

SEQ ID NO: 77365 - DNA, 604 bp, Cannabis sativa
caatcaatacaataataaaacaaatataataagaatttgtaagaaaaggaacctcagttaaatccattaatgtcatatgaaatgtagattcaccaaggggttctccctgaaaacagggtctcagcttcactacaactcaataaattggattgactcatcaatgtaaaacacagattataagaaaaataaaccaagaacagcctccatgagaataaacaaaatggctcaggttatataaacagctctatcaatcaagaattttctgaagcagaactggcataaaagctgaagtttacatcatcacagccaattagaaatcaaggagaggtaacaagtgaatgaataaatgaaataaactatttgtaaattggctcatattaagaaattcaaccataatttatttttgtacttcatggaatacactcagaagcgcggataaatattaatcattgccaaaaagaaataagaaattaaacaccaatcaaatttataacattacaaatcaaacacaaacaaattaatcaaaatcaaaagcacaatcaaatgtgacggacgtctttagagaaaaaatcattaaaaccatttaccaccacgtgtaacaccg

SEQ ID NO: 77366 - DNA, 746 bp, Cannabis sativa
gtgtgtgtgtgtgattttgattcagatcacatatgtagatagacatgtagtaaaggtgttgtgtataatttgattgtgcatggctgcttcgatatgcaataacatcttttatcaacaggtcgtttaccatgaaagtattattcatatcacaacggtgatcattagtatatcaatcttaatcctgactttaaatgaactcatatttttgttcattgagttctttgattcactcattaaagtttctcagataagatgattggctagaaacatgttatacaataatagaatccaagctttcctaacggatcgaatattagttcccttatagtgctaattctaggagtgtcagtagactggatccaaatttataataagttatagattaattgttcacattgaattaatggtacataaggagtcaagagataattagaagggtaaaatagtaattttgaccaactttatttatgaactaataattagagggaaaactacttatattgattatatcaatgacaagtaagaattctatgaatataattctatattgtcaaagagtgcaagtccatatttatagtagagtaataatggaattaataaaataaagtattttattgatgagatcgataataatcaagtatttattggagcttcgaaatgtaggttcatggtctccaagttacctctatacaacactgtacatggaaaagttttattcgatgagtaaatttgagtgagaattaatt

SEQ ID NO: 77367 - DNA, 642 bp, Cannabis sativa
  modified_base (50)..(50): a, c, t, g, unknown or other
tttctgatctttattaattagaaaatctaattatattgaaatggattttntttagggcataaatcccaacaaatgactcggtggccatctcttgattctcattcggaagctagttttgctatatttcaaaaggaatgtcgagtcttggaggatgtggtggtagttgttggttcaactaaggtctctagagtgtcggaaggtgagtttcgagctatctttcttgccttgcaagtggatttgaacaaaaggattaaaaatttggtgattgagactgatttggaaatggaggcaaggtcattcagtattggttccctcccatttggttggtgcacctatcctgtatttctagttttcttaatttatttaaggattttgagtttgtttctgttgtatgtatttctcattccgtgagctagtttgttgttcgtcttgctggttgggctagatcatctaagactgttggttgtttaaggaaagtggccccctttgtggtcactaatttgatttagttttgttttttatccaattgtttacttaaaaaaaaaaactcttttgtgaatacaatctttattataattatagtgttatattgtgtattaaatcaaaagatataattttttgacgcagaaatctggtcaacaa

SEQ ID NO: 77368 - DNA, 992 bp, Cannabis sativa
ctaaaaggtatcagtagtatttagcacatttctacgtgttaatattactattagtcaaattaagtatcaggtcctatatagtttaatgtaataacttttagataatattactaagaaattataatacgaaggtgttagacaccattaatactcaaagaatgcttctttttttcataaatatgtttgagaaaaataagaacacgtgtagctctctctaatatacacataaggaagatatagtttattatagagcactagggaataatatatattttttttttgaaaaggactagggaataatatttagacattagtttttgttataaaatatgtttaaaataaaaataaaaagtaaaatagaagtattacttttaaaggtcaagctcaaccaaatatcttaactttgatgttcttccaaatttcaaacttaatattgtttttaaattttctttaaaaagtgaaaaaaaacaaataatacaagggaaatttaattttttatgcttatatatacttaaattttttttttctaaattcataatattttatatttgtaagatatgacacattttataatattcttaaaataccccccatttacatcacccctctctttcttcttctctcttttatttcatagccatcggacccactatcgggcttattgggcctaccatcggcccactatcgaggacaccatcgggccatataaaattctagtttttctacacagccatcgggccccatcggactgatcatcgacccccatcagactgaccatcgggccccatcgcattgaccattgggccccatcggactgaccatcggactggccatcgggcctttgtcttcaacccagattcaatttttttcatcatgatgcatcgggcctgcatcggaccttcatcgggcctacctagaaaatgcattttctaacccagaaatcacaaattcaaaaacactaacctttcacattgggtctgtgggtcgcggtg

SEQ ID NO: 77369 - DNA, 1247 bp, Cannabis sativa
gtgttttatgatggatttatttatttgtatgaggggtgctaataagaaaactttttatactctcttttacactttttcttatggatattaacatttattgagttaagaaattgaaaatatacatataaatatattagaatatgaatatgaattttttcaccatcaaattcagtttggtattttagaatatgttagatgaatagaaactaagtagtcttccaacaaagtaattgtcaaaattgattcataagatcaaaacttatacaaagcatcaaaaattagaaatagggttctaagtttttcatttattaattatctagtttttttttaatgaatttagcttatcaaataacttggtttataatagataaattatcattattttatcgccttcacgaaatgattagagttaattaattaatttataatggatcattattataaaaaatgtgtatatagcagaaaaccaaagccatatcttataatgttagtatatataggatccatatcttataataaataaaatccatatatctaataaaaacttacaacaatcaaaatattgatatgcacaagtgtttgtactttctagctatagcactcaatgttatttcaatatttaaattataaggaattgaatagaactattaatatcaagaaaatgataattattaaatgcactatatatatttctcatatttgttaacactgactatattttaggaaaattttcaaaaatatttttttatgtttaatttatagtttaaagtttttatttataaaaaatactcttctaaaattataaaattacaaaaaatatatttttttttagcaagaagtaaaaaaataataagaaatcaacttcaccgtaattataaattaattataaataaatggtaaaactactaaaaaaactaccatgcaacaagtatataataaaattgtgaataaactataaaaaattttacgttcatggtatttttgtaaataaaattaacaaatcgtaaattttgtccgtattaaaataatttggtaaggtttttttaaacctttgatggaatatgtaaattttagggctgaacatctggcgagtttaccaggttatgggttggcgggtttcgggttcaaaaaattgaaaccgaacccggacccgaataggacacgggttggcaggttgggcgggttgaccgagttggcgggttgacccagtcaactcggtcaactaaattttttgtattattatttga

SEQ ID NO: 77370 - DNA, 950 bp, Cannabis sativa
cataggctcttcacattgtaaatggtgtgtcattgaagaacgaaatgcggaaaagaatgtcatcaagaccaagactgatcactcttgtaaacaacttgagatttccgtgccaagaagttcaattatttgagtttgataagtaatgatacgtgtaaaattatgtatagctttcatctcaaataaatataaattataattagttagaaaaaaacaaacgcgacaacatataatattttagtgcacatatcattagtcgagtatgattgtaagatgagagttccaagcttttttttttaacaaaaaaaataatagtaggtcttattttaaataaatgtaatcggttagagaaaattaacatcatattttgtaatattttagtgcacatatcattattcgagattttttgtaagttgagaattcattaagttaaaaaaaaaaattatatacataattattaaaattgagaattgaattaatatttcttaaaatcgttatattcattattagtaaatgtcttagattgaccctgaatagttaattaaagaaatctatttagagagaaaaacatcttaacaatcttttataaatttgttaagaagattgaatttttttaagatcgtcttcgtgactctatacggaagaaaccaatctacgtacacccgttactaattactaaaaatatttaatgaaacttgtgtttaataattggtgaaaaaaaaaaaagaaatgtattttcttgtggtgtattccttcgacttattaaccgataagagagtaaatgagaatgtaagtcatgcaaataaattcgaattaagaataatcacgtgttgtgtgctgtagtagtaggaatgcttttactagcatacttccttgcttgggtcaatagttcgaatctcatcacagctcctcgtgagaagaattatatttggccttttgggaagctagcatgt

SEQ ID NO: 77371 - DNA, 2184 bp, Cannabis sativa
aaataaaaaattaaaatattaaataaaactaacactacgtggcttagcacgtaacaatcacctagtatatatatatatatataactgttggtgtgcaactaaacgcctagtttgtaagtttttgtcatttaccaccagatgtactagagatctttttttagcactagtgggctggcaattagtcaagaactcaaaataacctttaattgggccaatgggtcaaaagatttggagatgagtttaggcgtttctcataaacaggattagtggtatttaactgggcccatgggtcggtgtatttggagatgagtttaggcgtttctcataaagatgaggaaaggaaacacttgaaatttaaaaaaaaaaaaatagttcttatcgtatggagagaaaaacaatttttttcatcttaattaattacaaaaataccgtctcatattaattacaataaaaactttgaaaaccatttcaaaagttattcctctctttctctcgttccactcttctagaattcaactccaccatcgctccctcggttagaatctagtggtaatatcaaaatttaatagtaaacattttgagatgcttgaagcatatatatattctataaatgttgccaaaaaaaaattatttaattacttaccataccaatcttatattcattagttgcctttctataaaagtcttgagttaacaactcaaatttatttttaaaatctagtttattgctttattttttttaaacataaaatatcaattttattgaaatttagcattaagcatacaaaatggctatcagctgggacattgtgatcatgaatactacaataagagaaaaattgagattgtctagctatataatgagctactcgatttactgatcgtctaataaaacttaaactagtagtttgtatagagcataacaaatttttacaatcattaataaccaacccgaaaacaaaaaatatttgttgattactaaaaattgcttgaacagtatgaaaagtatttttatagttctttctttaattttatttatatgtaagtaaaatttaactagagtctgaaaaatacctatttttagatacgattttaaaataattttaagtttccattttatttgattaatagatcgtaataccaatataatttacatattaaaaaaattgtgaatgacttaaacatgtatttttttaatactattactgtgcagtatgctaaatagatccattcaataaatatattaatatgttatattatttggctaataaatttctgagacaaacttaaaagttcaccgaaggtattttaaataattataagatcgatgagatttttttattttatacttcaaaatatttttttttattttgtatttttaccgaattctgcataaaaaccttattgtaactaacggaacaacttaaagcgtaacaaaaattcgtataacaacccacatagaaagcaccggagaaactactttaaaaacacaaattgtaaattaaaaaaaaaaaaaaaagttaacaaaatagtatataagatgatttcccttataagataccataatttaatttgaaaataatgaatagtatattaagatgtaagcaaatttttctattaagttatgaagtaagcttttatactttattgttaactcattagtttttttaaaattaaaaaagagaaaaaaaaatagatttaaaggtaacataaggttgctaaaaaataatcaaaaaatatcttcaacaataagactatataagtattatttaggactcgatgttttgcaaaaatattactatcgaaccttttaatttaataaatgacaattcaaattctgtatttatcaaaatagtacataataattttttttaaaatctaattttaatcaatttatatgtaaacaatttctagcacaaataaatttaatttgtaactaacctagtcgtaacacttccctattagagtattttgatgttctattttttgctcaaggtattatattattctattttaaaaactgtagggtccaaatattatcattcaataaaatagataaaccaattaataccttttactaaacacattcaccagtattaccctaatatatagcctaaaaataaattcatactttaaaaagtaagtaaccgaaataagaaacttaaaatattttttatcaatata

SEQ ID NO: 77372 - DNA, 666 bp, Cannabis sativa
tactagaaagccaaaggaaacatactgactaatctctaacaacatctttagacgtactaccaagtcagcctgatagtgtttgttggcatttaactcatggagatatacgagtcctcttgtggtccttatatgtctaccctactagttctagtgactagtattagctcacttagcaccaaggggccatgagatggtagagagctcacaccaggttctcccccttaaaaagcattatatgtatttagccttctatcgaaaatatatataatttttactctatagacatatgatcatcaacatatatcgattctcagagtttctcgaatttgattgtatcattgtattcctagacccaaataaatagcaaatcccaagtctcgtcttaatccagacattatttaagatatttacaaaaataccacggttatacaaacaaggcattataatgtcaccaacatgcactgtcacttcaccacaacttgaccaccttgtgagcatcacctaacttgtatcatgctatcttaattagcacgctacacggtacagtgtagataatatgaatttcgtagttatgcgaatattttactctcctcctaatataatataacatgccttttgtagacataatttattagttaaagccatcacaacaaataagctgtgata

SEQ ID NO: 77373 - DNA, 758 bp, Cannabis sativa
taaatttaggactaacgaacttacgaagagtgtgacattaagagctactattgctatttttcgaacttaaggactaatctgtaataaaataaattttttaaagactttcaccgcaaattttcattattattattattaactaactagctagttaaatcttatagctagctagtttaatcttttaactaaatttaggaaataataaaggatagaaatgaattgatttaaaatataaaatagttagaaatataatatatttttatgtttgattactaaatttgttagaaaggaaattaaaataattttattttgtgcatataattatgaaaggtaatggggatattttaatttgactttttatttgtaaatttttaaggaatttttttattttattttattaattaaaaacaaaatcaattagaaaggtatagtaaaagtataagacagtgacgtgacactctaaaatttttccaaacacttctttctattattttcttaattatttcattcttttaattttttattatatttataaaatattaattaattagaagatatttaattatttatgtcattatatcaatgaaataaaagaatttattaaacatataaaatatatatcttcctgaatggtacacagaaatttttgaaattttctttatttttttataaaataagggttttttttttaaaacttacaaaaaaatactagaattcaggttaatttttacaaaaatattgtcacacagaattttttt

SEQ ID NO: 77374 - DNA, 1178 bp, Cannabis sativa
acaacatctttaaggaattgaaccgtccctgggttcccaagcccatggcaattccaacttaaagtactcataatgattggcgagcccgatccttcgagcccgccgttaaatcgttttttgagtgagcacttttatcaaaccccatttccataaccaatccctccataggcccacttggcctattaaccatgcccaacccatcagtaggcccaatcggcccattaacctcttctttacccaatcttttccttttattatctaaaaaaagcaatccctcctcattttcaattatatcagtcgccacatgtgtattccccatatcacatatatttattccctccttagccgccacctgtctattccccatatcatatatatttactccctcattactcccagctatcacaccaacccgatcccccatatttctcccattaacatcaattaacccttcattcacccctgtacccgagaaactaggaataaaatttccatgtaatccctgattacttggaacagcatctcccccataactccctcctcccaccaccggcgccggacctccctgaactccagagctagaagagcccgatctcaaccacttcgcccccatagcatactgtgttcgacgaggaacaactttcatgaaggtaccatatggcttaacaatggtggatataggttgaataaaaagacgagaacaatattgctctgtatgaccaataataccacaaataaagcaaaaggtaggtacaaattcatacctaaaattgatccaaaaccagtccccaccgatttgttggagcttcattctccgcttcaatggcttctcaatatctatccgaacccgcacccgcaaataatctctccaaactccgttaaaatttttttcatcggacttcacaaagctgccaatgtaatttcccgcatccgtcaccagcttttcagttttaaaacccgacttaatatcgtgtagctgcacccagatttcgagatggtgtagtcgtactgccctaggaacgtcgcctggttttagtctctaaaaaatcagaggtgcatttttgaatgtccatggacttcgatcaacaactcgctgaacatctatctcatgatagaactgaaatatatatttattttcccccaaatctttcacgtacatacccatctctggtttccaa

SEQ ID NO: 77375 - DNA, 507 bp, Cannabis sativa
atatgttgattgaagatcatccaagaaaggtagcaagaatcgacagggaaacaacgaagaagaggggaagaccggatcgaagttcaagaaaaggtgttatgtatgcaacaaagtagatcatttcaagagggattgtcctatattgaaggattacaatcataaacatgaaaatgcttatgtggtttctgattcagaatgttgtttccgtatgggaatcatagggttccatttcaaaatcaattggtgatgagtggagtagctcatgttcttatatatggctcagtactttcacatttaatccatgtgggacaatattcttcaatagtcctgataggaattagttctaggagtaaggctaggagatgatcgagcatgtcacatagtaaggctggaagaatcaagttgaatcttgatggaggtactgttgttgagttgacacaggtcaggcatgtctcggacataagaggaacttcatctcagtagctatgttagatcaagttatcatga

SEQ ID NO: 77376 - DNA, 1368 bp, Cannabis sativa
ggtagggaggcaccgaacaaccgagactgaaggctggcgaaggttctgtcccttaacccactcagacttgtcaagaactggagctgacttgaggagagaagctgaggttgcagccatttttttctttctttctttcttttactttacttgagagaaagaagaatttttcttgttatcttatcttctctcctttggcaaagccacaaatgcattcactctcatatcactagtctgttttttttatagttgcctaggtgatgctgctctaaagaggatggccaatatgaggctgctgtgagctaaccagtcccgtttcgccaagtggatgataacttgctgacttggcagcctcaaagtaagtgtggttcatacatggggtttcttgctcacctcttaaaatgactttaatatattgattttggaaaaaaatgaaaaaaaaaaaattgtgatattatttttgggtcagttagagtagaagacaaatgtatcatactcaacctatataataatccaaacaaacaatagtttttgggagattcctctggaaaagtaaatatgaggctgtaatccttctttacttgttgtatctttgcttcttagtaacaaatggctatggtttaatcataagatttgagatgtaattttgttatgtaaacggttcttatgtagccatgtcatagtgtttatgattttttgtgccacataaccattgagtatatgacatgtcatgaattgggaccctttaataaatatttagtcttagactaatgcaaggtagattctttgtcaactagaagtggttgaaaattgaaatctatgtgtgtgttgttttaataatagaaccttagaagctcttattaggtggttgcagccactcttggctagttgttaaccaacatgaggctgaaaagaacttataaaagaattagacatggacgagaagaataaatttcaaacattaaaaatagtggtgggggtaaaaaatgaagttgttttcccaaaagaaaaaaaaaagagattttacaaaaatgttgaattttggacaaaaatttataattttactgccactcgaaaatttttacaaaaatactgcatttttataaaataactgtaaaacaataaaacagaacaattaaaatttatagtaaaacaactaaaagacaacagtgaaaacttaacacaatacagaatattttttttaaaaaatcttatcccacaataaaaaagaaaaaaaaaatagaaaacttcagtatgtggtatgaaaattccaataaaaaaaaaacacaaaaaagttatttcacaagaaaattcaaaaacaaagtgtagaggtaagtagtaacctcctagtaaccggttaccctaaattgt

SEQ ID NO: 77377 - DNA, 500 bp, Cannabis sativa
gaatgatcaaactaagcttttaattaaataaaacttttttattcataaaaaccgaatataataaaaaaaaaattcaagagcacaatatcaaaaaatctatcttaaagataaataaaaattacaaaaatttaaaattattataatagatacacaagtaaagtgagtagttgaccttaatttgtgtatgcttaagctcttcctcttcttccttttcaacctggtatttaacccaaataaattagaaacaaaaatgcatgtaatcaacaatggtgggtattaaattaagttaaaaggtgttggtttgaaaatagagtataatgaatcgattaatgtaaataaatttccaaaatcaattacttactcagcacttgtcttctcttcttcctcataccaaatacttataatataacattatcatttgcttgatagtgagtttcatagtgaaaattttgtgaagagggcaaaaggcagtagcagtggttagaagggatttggtcacc

SEQ ID NO: 77378 - DNA, 2857 bp, Cannabis sativa
  modified_base (1138)..(1144): a, c, t, g, unknown or other
gagctacaagtaacacaatgtgcaattttatttgcaatacccttaacaaaacattagaaaagattatatacggaagccaaaagatgtttacaatcagctacaaacaaattaccaaagaaagatggtgtagtaacggaactggtaataggttgaacaaccactaggctatcggtctccaccaaaacatgatgtcaccctttcgttttaatccaacttaaagcctccttaaatccaaatgcctctacaataacaggttgaattcagcatggcttactaacagacataaccttaatcaaatgaccaatgtgatcccaaactacacatccaacaccgaaaggacattttgtgtcaaaaattgattcatcagcattcatattaatcttattcatacataattttaataagaaaaacaacaattaaaaatacttaaataataatattatttttttataaactacaaaagtaaattatatttgaaaatttatttttaactcatgtttcacgatgaacctatgaaaatttaccattgttgatgtaaatttaaataatcaataaatatataaaattaaaaaaaaaattattaaaattatgataccactaaatattcataaatcaacaataaaatatactataaatactaaaatataaaaatgtgaggagctaaaattccctgtagctattatatgtatccgctagtatttattattttgtttcttcttttattattaatgtacatgaatataataaattaaagtattaaaatattaatattaatataatgaatgaaaaatattaatataattatttttctcaaagaaataaaattaaaaaatatatatataattatttgaatttcacacaaaaatataaattaaagtaagtaaaataaacaatataaatgacaatatatagtgagaatttaatgtgctaaagaaataaaagtttggggatcaatttatcaaaatataaagtttggggaccaacttgccaaaacttatatagtttgaagactaatttgtcaaaaataaaatttgagaattaatttaccaaaacatgtatagtttagggacctgtagtacaaataagccttattcaaatgagtaatagttattgaataatttaactataaatattaatnnnnnnnatattaaactattaaattttgattgagaataaaaaagaaatataagttataaactgtttttagttgtgttttcagatagatgtgactccaatattttattattttgtctcaatttttatttatttttgtattaataattcaaatatattttcatatataagtatgattacaatgctacacacgaacaacatcaaatacacttcctttttattatataatataataccaacatgcatatacatcttggtttttattcacagctacatcttcaaacatatatatatatatatttataagtaacgaaaaatgtagatataaatcatatataaatatatgacatgctcttacatgataagttacttttgataggtaaagtgaaactcatcttaaataaagataattgattgaaattacttgccacataaatgcgtatggaagtgtttatgtatatatattttaattggatggggttgtaggagtagcagtagtaggattattggtgttggtggttgtaaatgccggtggacgtcggccacgactgtaacggctgcggggcggtgaaacacgattgaaagggctgcgccggaacggtggtggtggtgatggtggaataccttgaaagggcccatcccaattttgagcaacacacataatattattattgctattggatacaccaataataacaataatcaacaacaaaaccaagtttctaatacacaacatatttctttctttctttctttcttttcaaatgataagaatgaataatatagtaatttgtaaactaatgagatgatatgtggagggagggagtgagtgaaggattagatttttataatgttgaggaaccaatctactcttgacacttgtcacttcttgattcggtgagattatatataataatataaaactttctatatccacttgacttgacttagccaattgcaataataatctaggtaggagctactctatttagtctacttgtcttgtgttatgtgtcacacaataattcaatcattgaaaagtcccttgttccaaaaaaattattgaaaagtataaaaaagtaatattccttactaatattcttgaaaattattatattcagttatatataatctattacttaattaaactaataataatattaatatataaaaaatattagacataactaatgctttttaatatttcaattaaataaattagtaaacaacattcatggtcttagttgatgaaaaaactacaaatatttttttgatgagcattgctattaagcatcagtggtgcctagcaccctcaagacatgttgtcttgcgattggttagcgatactctttaaaaattattatattaaactatatgagacctaatacttaattagacaaataacgatattaacacataggagaatgcttaacaccactgataccttttaccatttctccttttttattccatttacaattgcatgaacaatatacattttaacgtccaataaaaaaaatatttctaacttctcatagtccgtaaactaccacattaacaacattaatttgtataaatctcttgtcgaaatctagagtgtcaagcacctctttatccatttcaagcttttttccaaatcaaaactatatatgtggctatgggtttcatgactagctagtaagtattacataaaacacaagtatcattgttagtgataataaac

SEQ ID NO: 77379 - DNA, 1308 bp, Cannabis sativa
  modified_base (40)..(65): a, c, t, g, unknown or other
taaaataatttccaacacatatttagggtgttaatcaacnnnnnnnnnnnnnnnnnnnnnnnnnnggtaaaataatttccaacaattgaatctatagccacaatcattgagcttgaataatttcaaatttatctcaaagccatcattttagaaagtgaggaattcaggaacaaaatatttatcgtcctcctccatcttaggtgtaagatggtgcaagaaattattttctacagtatccttcttgttaagacaaataattaactagtgttcttttgtatataattagtttattattctattatatatttttgtgtgtacatagaccccacttggtctcctttgtatatatatagtggactctgtcctttgtaaacatatactaaaatatcaatacaaaaatacatcttctctctctatcttttctacttttcttcttggtaccagagcctttaacgctcctgccatggcatcagacactaccccacagtctggtatggtcactcctcaaccgacaatcccacctcacctctctgcttcttcttcttcctcaaataccccctcctttaattttccttctctcaatcaatctcttactgtgaagctcgataacaacaactacatgatctggaaaaaccagatcctcaatgttgttatcgcacaaggtctcgaagcttatctagacggaactcttcctgcaccagatcgatttcttgatcctcccctcaacagttctctcaatcctaattatgtttcttggcagcgatacaatcgcctcctgatgtcatggatctatgcctctctctctgaagatatgctcgcccacatcgtctccttcaacactgcttctgagatctgggactctctctctgaatattttgaggccatctccttgtcgaatctgagtgatttgcgcacttctctccagacattgaaaaagaacaatctcactatcattgcttatatccagaaattgaagacgatttgtaatggtctcgctgctataggtgagcctgtttcccgcaatgaccatattattgctctacttggtggtttgggtaaagattacaatgcctttgttacttctttcaaaatgagaactgatactccctctcttgctaccattcacagcttacttattagttttgataaaatgattcaatctcaaactatagttgagcaattggatctcactcaagctaatctcactcatacaaatcgtcctaaacgccctttctattccccaaaacctccttctcctacttacccccttccatattctcctcaatcccatgtaccttctcctagtgt

SEQ ID NO: 77380 - DNA, 1531 bp, Cannabis sativa
aattgaatgcttctactccatcaatgaataatgttaacatacattatttatatatgttatttttaaaaaattcaaaattttgcggctaacatatgtacgctcactcttatgggaattgtttttttttttttcgtatgctcatttatgcaaattattatctgcatgtttttctttggtgtttaaatttatttattatatttatatacatatatttaacgatatatatgttgataatatgtaactacgtacagttctttttcccatcaattattattttctttttaagagttttgtctaatttgtttttttttttttttttttttaaggcagcaaaatcccacaccgatcgaaacagttattgaaaatttgcatcttctgcattttgttttgttttgttttttttttttttttaatttttttaacggtttatttaattaattcacgaggcataaagttgcactatatgtttaattatttgaaactagctaaaattgtatttaattattattaaacttacaaatattttaactctaatatatatagtgaatgcgtgcagaagggaaacttatataatagttaggataattggagggagtttttagtgaaaaaacatttatcttatattttgtggcacgaatattagaatataatattttattaaattccatcactccttcatttatatatatatatatatgtgaattttaaattgaaggtggcccaatatcttaaattttaatcatggattgacacacacatacatatatatatatctatactgcatatatttataatttataaaaccaagtgtggcgcagaaatagttgtggccgagtatgatcgtacgtgtggtaaacgtgtaaaagctcatttgggatcatatattggctatgaagagttagattaccacacggactctgtcatacatatatatacagcaggaccatggtgctctcatctattcttatatatctagagcatgattaattgatcgacataaaaaaacaaaaataaatttgtttgacttataactttccatttaataatataacatggtcattctccactacttcctaagaattaaagtccaaattaatgagcctctttctctccatgcaaatcagtactatatatagatttaactcttggataagcagcaccaaaactgaagatatatatagagaattattgagctgagaaaatatcatgacaactacttataatcatttgaagttattatgggcatgtcttatcttgttattcattattgtcgtttcaaaggtggaaagtgggcgacccatatatgagccgatgagccctagaattgtagggatgaagaacgacactactaaaatgttaatgcgtgaactgattcaaaaagctgaccagctcatgaggcgtcaagaccattattatccgaaccgacgtagccctggtggacctgaccctaaacaccattaataataattctctgatcagctaattattagattgctccctcgactttctatcatatatgtagaaatataca

SEQ ID NO: 77381 - DNA, 1688 bp, Cannabis sativa
gagagagagagagagagtgttcataggaggaaggttttcgtgtaactcacttgtgttcttggttcattcaagattttgtaatccttgaaacttagtttgattaatgaagaggattaggtgtgtaagtcggtcaattttgtcgttatagcatatttttacctgcttaatataaatatcgggttacaaatgtttaattgtaatccgtctaattaaaaattagacaataatttcttcaatttggttgggttaacttgttcaaaccaatcttcacttttttttatataatcattacggttagtttttagtattcaaatattagattttttaaaaaataaaaatatattatttatgttttaagttaaaaaatattatagcttaaattagtgttcttaaaaagattaacataagataaatataatgaagtaaatataaaataattaaacaaatattcatcagaaataataataaaaaaattaacaatatagtgtagattttaaattttaataaatacaataaaaattattaactataaagtctaaattttaagttaatacataaaatagtttaacaaataaatataatttattaaaaaatatataaattaatttatttatgttaatgaaacggtttagaatagtttgtaaatgactctatatatttattgggtgatttagatttttgttgtagaaataaaaaaatcttggtattatttttttttttgatttctacacatattttctctagtttaatctctgttttattgtattcttctcgagctgctaatgattcgatcacaacaaaaaccttttaaaagtatgtttcataaagatgtaatagtaatgatatttgctccttttaataacaattatggactccatgatttttaataaagttgggttcataaagtttataagttggataaacatacctaatttgttgtcactaataaatcttgtagatatcttaaatttctatatttgtagaaagaaattttttaaatatatattttatttataattttacattttaaattttttaattataaaaatacatttataaaattataaaattataaacatatattttgttcagcaaaaagttaaaaccaataaaaaattaacatcgagataactgtaaatcacctataaaataacaaaaaataattagaaaaataacatcataacatctataatataactatacgtaaagtgtaaaacaactagaaaaatagtttattaattattttactaaaaatatatttttgtaaataaaaaatttaaagagtaaaaataaaaattaaaagtaacaaaaattaaaatagtatcataaacattggttgatcaattgaaaatattcaaaaggatcaatttatttaattacattttaaagtattataatattattttgattaatcaaatgattttttttatcattttagtggaatggtaactattctttctacaagataaaaaaaaaatcaaataatttttttttgacttttcttacacattcttatttttatctttccatttcattcaaatcccaatcaaacttacccttaaacttatttttaaaatttgtatgtgtagagtgataatttttaaattcgtgacactatttatcttaggcacaaatttaattgtaacatcagtttgccaaccatatctactaaatgcattaataatata

SEQ ID NO: 77382 - DNA, 595 bp, Cannabis sativa
  modified_base (29)..(35): a, c, t, g, unknown or other
aaagttcagggggcatgatttaatacatnnnnnnnttcggggagaaaaattactaatttgccttaaaataattatataaaagtaatgaattgcaatatttttcttttgaagataaacatatattctttcctgtaaccagggccggccttgagggtaggcgggctagacgtgcgcctcgagcccccgaacgctcagggccccgaaattgtaaaaaaaaaattaatacatagataaagtgttaaataagaagaaaatataataaaaattgtttggtgtagtggtaaaaggtcttactttaaagtaagaggttatgggagcaattcccaacctttaatttttaatttttttaaaaaatatttaatgtgtagttatgagagattgaacctttgatctcttaagagttttttaaaattttaccattacactaatcactagaactattatttttataatagttaaactatataggggccccaaaatttgaattcgccttaggccccatataccttaggatcggccctgcctgtaacattaagtttatgtttggttgtaatgaatgaaaatagtggaatgagaataagcgtgagaataggaa

SEQ ID NO: 77383 - DNA, 677 bp, Cannabis sativa
ttacaccattatcacaacccacaagactacaacctagaaaataatgatgtcaaaagtgttgggttttggaaacatcacccaaggttttcagtgtttagtttgaaaaacaattcatggaaaattaagatcatatcaaataaataaattaaaaaattatgatgttggtctaatattccattattaaaatttgctagacaatacaatataattttaagattagacccaaaatctatggtatggtccaagtatgtatgcaaatcttggctgttcaaaatggtgggtgtaacaagtagtgaagaattattagtttatagtatgaaaagaaattcatggaaaattatggtgttgccaaatctaatttctgatgatattacctttaataataaggtatctgttgttgttaatggctctattcattggtcattctctcttgtctgtattcaacttattagacaaaaacgtgtatatgtaatagttgttatgatcttcgtagggaggagtttaagccccttcatctttaaaagataataaattttgcatttatggtatttcaaacttgtgtggttacctatctatggtcgcttcactattattagaaaatttatgaccgtcatcgtgtattgagatatgggtgaggaaggaatatggtgtgtgtgattcttggaccaaatatcttt

SEQ ID NO: 77384 - DNA, 549 bp, Cannabis sativa
tgtcttactgatgattgcttaattcaatgaaatgaatcagttgcccaaattgttggaaattattggtcttggctatacagtttggttcacttcacgctatctgatattcaaggtaaaatattaaaatactcaaatgtttttgcattacgagcaatgttttacattttgagttatgtcaatgtttgatttcttgaccttgcagaaaagaagagaggagttagttgccaagattgaagagctgaaggaggaagttcttggatcaaaatgatacgtgattgattagggtaaatgcgttttgctaaaataattgtagagttcgacttgatgtaatgtatatctaaagggtaagttttctcttagattcctttggtaaagaaaagtgaaggaacagaaataaagaaagtgtagagcggaaaacgccactcaggattcgtgatcctgttttacgtctcttcttattcaatatttagtgttcttagcattatttttgttcttcagattgatacaaattcttactttttttgggggtcattttttactccataaata

SEQ ID NO: 77385 - DNA, 594 bp, Cannabis sativa
gattttcacattttggaaaaagacccaagtggtcggtggtgtggtgagctcgagagtggaggaaagaagagaagtaagcactaaaaataggttcgagtacttattaaagtatgctgtatttataggaatagagcgaaaatcattcccaatctttggtgtctccaaaccttactatcaaacgattcaaaccacaacaagttaacataaaaagcggcattcccaatccaaactaagcaccaaacagttcaaacaaaagttcactttgaatttaacttttaaatcatatttccctcatcacaataacgataatctaaatcaaacaaaagtaatctctggaatgtttataagtcgcaagcaagaactaacattcatattttaattctaaaaaaaagatatacatagctcaaatccgttagtctaagtgtaggaattttcttggtgaaattctaagattaccctacaccaactcaagtttacagtcaaaaacgacaaggacaaaattgtcctagaaaaattcaattaaaaacaatcaatccacacgacagagaaatctcagtcgtttttcacctgcacgacaatgaaacttgtcgttct

SEQ ID NO: 77386 - DNA, 1288 bp, Cannabis sativa
agcttctctctcgactcttcttgaaacccagcaaaaaaatcaaattaagcttgattactaaatttttggtgttttagcagaaatttgtaggattcaacttaaggtaagctcctacacccttttccctttattttgttaagttttaagttaggtttgtagcttagttgttgggttagggttgttgtatgatctgattaggtttgttggagttttttgatgtttgtgttggatgactttggtcaatttgagctggaattgatgctttgtgttttgtttgagcaaggtttgagtttagagctcaggctttgctcttctattgtgattggtgtttatgggatttgtacctagttttattgcttgaattttatttgttttttctaattaggtactctggaaggtttgcaatgagttaggattgatttaaattgtttttataggttttttgggttcctgcgctgaactggtcgaccaattcagtttggacctgtaggaatcaaaatttcgcttgatcctaattctaccaaatttttgccagcataatggctgtaattgaatggttcaaaaaatttgaaacatgcctatataataacaaataacacagatataacagttgtttattcatccatcccaccgcagcacatatatcgcagattctacttcactatgattgaatatttaggatattcaaactccacatcattaataattaatttataacaaaagttacctcgggttttccaattaggtatttaggccaaggaaggaacatgtttgctactttcttaacatatctacacccctcaattgagatcgagatttcagcatcctcttgcagcatttctgaaattagaacccagacatgtgaatcatcgtagtctttgtagtaaattttgattcgaccctcatgttcgtacagatacgcttgggccaccatgttgtcgatattgtcagagtagagatatactagctgatcaagggccctctgttcatcgaaattgtacaagagaggtggctcattatgggaacaaactcctcagcataaatttatggtcggccctcatcctcatgagtgtattgttgtggaacatacgcttgatcatacacctctccttcttcctcttgttgggaatattttacttctgtttaagggatttgatttcggctgttaatttgtcaatatccttttgtttttgagccacaacatcagaaacttccattttcttcctgccatagtaccgttctttatcatttagtttgagtgccattttttttccttggtccatcagct

SEQ ID NO: 77387 - DNA, 1525 bp, Cannabis sativa
ttcaacaagattaatactatcaaagacactcaaatcacaccaatttcctctccaacaactaactctttacagaaaagtcaattgttgcattgatttaactaactggtttataaatttttagaaactactagctgctagttacaaccaaattcaatataacagcaaaggaaacactaatttgcaaaactttagttatgttaacaaaattgaaacaaatttaagtttaactcagaacacaatttcatgtcattatttgattcaatccacaactacattatcaaatctaacaaaccagtaaaccaaccaaaacattaagctagtaaaagataagtaaaatgacctgtagaagctacccaaaggatcactaccaacacttccaaccaaggcaacattgagaggaggaggaggaggaggacccccaataggcttgttattaccaagccttgccaaggcaaccaaagtgttagaaagtgagccaccagctgcagccttgtagctacaaccatccattgccctcaaaactcttcctctctcttcatgattcacaaccttccttatccccttttccagtcccaacttctccaaaaactcatcatccaccatcccagaaaaatccacctaaaaaagattgaaactttgggggtaagtaaagttcaaaaatgaaaaaaggaagtaaatttgtagtaattaccatggcttggccaagacccaaaacatcccatttgtcaggtaagtgagaggaagaagacccatctgtcaattccaacacattagcttcttcttgtttcaaagctactaatacttcttcttcttcttcttcatcatcatcaaaatgggaaactccatcttgtttaggagtgaagctatgacaaaatgagagctttcttagtctgctaaagctgaggaaagaataagaagaagaagaggaagagggaagaagggtgttggtggtggtaagtgtaagggaatgaaaagaagaaggtgaaatgggaagaagggagagagacatgctcttctcttcaatggggtttctattctttattggaagagtaaaacggtggtggtgatggtggtgatgatggtggtggcggcctcatccacaagaggaagaaaagccagaccaacaacaaagggaacttgtccaagttttcaatgccaaatgtttttttttttctctcttttctttcttttttttggttaatacagttgtgttttgtaaaagttagaatatttgttttgttaaatgataatgtaaattatgtattatttaaaatgataaaaaaaaaaaaaacttaattttttataatttttttaatataattaatttaaagataatttttaataaaaaaatataaaaaacgtaattaattttatcataatatatttaaattaaataattattaagttttattttattaaatttggaggattatttagtattattttaaaaattatataattcaatttatcagagagtataacttttaaaaaaacacaatatcaaaaaatggtattaatttttttt

SEQ ID NO: 77388 - DNA, 881 bp, Cannabis sativa
gtcaaaagacaagaccctttactatcaatgaccggaaaagttgtggatactgactatttttagttagaggaatttcatgtaatttattccaattaatataatggtctttttctctaaaaaaaaaaaaaaagaaagaaaaattatgttttgccaaaattgcagtgtcatttttattgtatattgattttgctaaaattagagatgacatgttcatattttttcgcccaaaaaatgcgaaaagaagagcaaaagctcaaaagcaaaacaacccctgatacgtgggctgggaacgacgagacgactattttccaatagtctctcttctctgctactgctcttctatccttactccctcactccaccttcctaaacaacctatacggtaaactcacttaattttctttgtcccatattatacttcattttttctaacaacaataattatacttgttagtccttacaatgttataaattacccaacattttatacagaaagtcggtcagttgtttcaagatttaaggagactcacttttctagaaacttgttctatatgtataaatacgcgttttttttagtgttgggcagaagtgtgctaaggtatttgataccattttcatgttaaacttatgatattattttcatgttaaattttctttctgtgttgctttcattactctcttttcatccatggaaatgaaatcttactcagtaccattcctatccatagtgaagcatagcttttcatggtgataattattgattttgttgtctaatagtaagaatttgtaaaagaaaagaaaaaaaaattaaacttacacctagcttgactttgaaagtttgatttttatattcattcgttgtttcttactatattaaaaac

SEQ ID NO: 77389 - DNA, 653 bp, Cannabis sativa
gtcttgctagaaatcttcttcttaaatgaatctttgctggtttggggatgacaatgacggggttgtggtgtttctcgggttctggttctcttctaggaggttgggtgggggatcaaatggttaggcattgtcgatccgctgagtggttgatgggtagcaatcccttgctatggtcattgggtctagtgcgatggggtttagagactggggctagattctggtaattgtctaatgaagagggtttgtatattgcttttggtttgatgagtgtcgatcatgtgtggtagtttttcagtctttttttttttttgaagtaagcgtgtaatcattgattcaaataaagctagacctcatggtcattacataaaaggttctccggtaaaacagagactgggatagatccaaacatctgatgagcaaacgcccatctagccacattgtgagcggcaaaattacaagatcgactaataaaagaaaaattacagctaatcaaagagggagaagacttagaacaaaaagagacatagttttcaagtgcccagcgatactccttcccattgatagcgttgatcaccaccctcgagtcattctccactataacaaacttgcacccgatatctaaggctaccgacacagccaagcagcaggccgca

SEQ ID NO: 77390 - DNA, 1683 bp, Cannabis sativa
atggttccaattttgttgggggtgaaggtgcagctacttttgtacatttgggttctctgttttattttatttttcttatattttcatttatatttatttagagaaaggttaaggatgaaaacaaaccaacaagcaatgtggtcaatgaaaatatctgaatctaatgagttcatatatatatagagagagagagagttggaggagatctaagagagtgaggattgtgataaccacacgttaaagcaacccaatctacttgcgattagatgccacgtgtactctgtgggtctctagcttcgtgattgatattgtttggtcattgtggcacggaatctaaagaacaagatgagttctttggggacttgttttatcttttttatttttacataatatatcaaaaattaaaaaaaaaatacgtaaataacttaatacaaaaaaatatatattatttttacctgttaccaaaattttgacaatttctaaatcttgtattaaagaaattaattatatgcagagaaaaatattttaggtagttcatatattaatttagagaaatgttaaagggtatcagtagtgcctagcagcttcttatgtgtcaatatcgatattggtctaactaaatatcgggtcccatataatttaatgtaataatttttagggagtatcgttaaccaatcgcaacgcgacatgtcgtaaaggtgctcggcactactggtacctaatagcaatgctcattaattaattgtagtttacaaattacttttattgatgagtagtatttttattacttgaaagtatattttttcttacaattttagagttctttttttcttatgtttttcgaatctcccactctttttatattctctttgtatttataagttgagagggtgtgcataaatcgatcaaatttaatgacaaccgactaatctaattacaactggtcgtcaaacattagatatccaagtatgatcagatcggattggatgttatttttgaatatctaattagatcagatcagatgttaggtgggatatccaaaaatctaatacatccaacatccaatcgaactaattaatattttcatttagtttaaatgagtaattaaattttataatgttatacataaaatatatatatatgtatattaaaaattaacattaaaattttactctttttccttagattggatggatccaatccaatccaatacatactgaacctaaaatattagatggatacgatccgatctaaaaaaaaatattaggtctaaaatattgaataaagccaaattaaaccaagaaatatatatgaaatacatctaacgaataaaattgatccaattcaacataaaatagatgttggatcgacttcaatgttcttttggaaactagttgtgcactctcagacgcccttcataccttgaggagaatactaaaaacttattatgtcagtattgatcatccacgtgcttatgtggatcctatagacatgtggcttattcttcacttgccacatattttgataaaaaaaaaaatatatagataatatttaccctccaagttctggctggctcacaatattatattactccataatataatgtttgattgattaaataaaatgttgtgttacaaaattatttgatgagatattatttaatctagtgggagaatgttatat

SEQ ID NO: 77391 - DNA, 573 bp, Cannabis sativa
aatagttgtatatgcatctattccgattgatccataagctatagatcacagcagccaaaatggaaacatgaatcctctgcttcctgcttgttgacttccacgatagccaacaatgccatccttcaaaatttgtaggccaatacctgctgccaagccactcaaaaactaggtctgcaactcttctcgacagatatcaactaaagaacagatgctactgagattcatttgtcaaaccgcacacaagacactctttagtgtccaactcaatgttaaattgctcgagcttgtcacgagtcaagagttgactgttcacaacttgccaaagcatgaaccgatgcttgggcacgttcaaagaactccatatgccactgctatagtggaactgctgctgaggaactgagctattgtacagccaatttgttctaaaagtcccacttgctcaagttgccattatgtccttattagagaatttatcccttaagcgatataattttttccaataccaacttgaatcaagtttaagttcataggaccaaatggaagtattccttaaatacacattattgatccatt

SEQ ID NO: 77392 - DNA, 893 bp, Cannabis sativa
ttatattattgaaaagtttatttcgagcgttattatttagtctaatattagagtcttaaatatgaatattatgaaatgtgatattaagattaacctattgtgtgaaaccataaaattgtgattaaagatactgacacttgatcaaaatcacctgttggttcgagatttttccttatacattgaaaataggtaaaacagcgaacgaagcgcatagaatatagcgcagtgggacagtaatatgatatttgattgttattgtgaattcgcgacctagggttattaccttaagtgcgtattgttataagtgtgcaataatctattgattgaatatctgtaaagaataatgcgtgtacagcataacctggttagactcggtgattataaccgaaacaaactctagtaatgccttaaatgtaaaaagacgtacgagcgtaacacgtaaatctatattacataaatatttattatagtagaattattatatggaataatgtaatataaagtgtgatagcacagtatatatacgcagttgcgtactctatgaaatataattattattataattatcatactgtattattttctgtcttgctggactttggctcgtgagtgctctattgtccaggcaagagtaaagcattatcgagttagccatgagatcgaggactggggatgatatgtacatgttccagccatgctagacgacgagagtagggtccaatagaaaattatttgaaattctattttgccgcttagatcggtttgtacaaaataacttgtaatatttttgcaaataaattttacaggattctaaatatgtaattttaatattggttttaaatcacttgactttagtaatttttaatcacgacacgtgacgttcctctaagtag

SEQ ID NO: 77393 - DNA, 2030 bp, Cannabis sativa
taaaaaaaaatcattatatatagtagcattaaatgtaactaattaaatagacaactagccaactcgtcttaagtcaattagagtctttggataaaaaaatctaattgagcttttttatatgaattttttttttttggtatatatagtgctaaaaatttataatatagtattttgcaaatataatcatgctttttttttataaaatattaaatgtagtaaataaataaaatatatttttttaaaactagtaatatttttaataaataagtaaaaatacaaaaaaaaaatcgtatttttatataaaataaatttgggacctttttattaaagggttatataagccaggtgagggaccttggatgtcggtctctgctgccccacttttaagccggtcctgcaactaactaatctattagaccaataacattttgcttcaaaaagatacataaaatcaataatatatttttttttttcaatttaattagttatatgcaaatgtccttgtaacttagtatatagctccctttgccaacaatgaaatgtaaagaagggatggtttagatcatgatgacatataatatagtatcattatcctaattaaactaaactctatctcaactgaaaaaaccaacctcttacatggactcacatggtagcttaggtttgtttgtttatttttttgcaacataaatttgaaaatagaatattcaactacttgtggccctatcatattattatcataggaaaaattctcaatctttgtagaattttgctcaacaaaatcattttttttttaatttaggcgtttacatattacagtacataatttacacgtatcttataactacttgagctagcctcatatggtccaacaaaatcacttcaaactatagaaattatattataattatctctaattaatatggttcacttgtgagatcatctctaatttaaatcacttgttgtatttattcttggacactagattgggataaggcttgatataaagttccctaactgttcatgtaaggagagatttaacgtttatagaacaataatcattgagttttgctcaagtctattgagttttttttagttttttttttctttatgttcttaatttttttttcttgtgtaatcttattagagtgatattaagattcaattaaaaaaaataagtgaagagtcggggcgaggggctgagccaaagggggacacgtggggattatttgtccccctctcaatattttgttaattatattattacatacatatttttaaatattttacattttgtccccaaaaaattaatatttttttatatctttatagattttttattttatccctacaaatttatgatttttatttttatcctcataatatttatatttcttatttttaattacatatttttatttttattccactaaaaattatatttttctcaattaaacttatatttttcattattagtactctaatttttttctttactaaaatatgtggctagctccgctactggtcgaggcaggatggatctaactcgaagaaccgagtcaaagccatatatatacctaaaaattaattcgatcggccagagcggggccaccctatccggtgagagctccacccttgttttatcaaggttttttttttttttgacaaccctaattaaaaccaactcttattttttttaggataacaatatatatttaataataaaaatatatttaaggtacataataaaataataataattagtgaatgcatgtgtcgacgtacatatgtgaatatgtcacgtgaatatgaatgaggtcatgagtcttacaatttacataggatatgagatcctatcctatgtacaattattatttattaattattaagaatattcatgagttgcaagttggagaggcaactatacaaaagtatttacgtaaagtatatatcatattatatatatatatcacatcagatggggacttatttatataggataaataaagggatatatatatataatatat

SEQ ID NO: 77394 - DNA, 677 bp, Cannabis sativa
atatatatttggtgtgttatagcgtgtaacgccaaatacggatgttctcctcctgtcctctgccgtgcgtttaacgaggggaaagctcggctatattgtttgcctatcgaggttatactgttatagccatgtttctgtatatagttattttttaataaatatttatatgttataaattgtgtacactttttgaaacaagtccaaacaatagtgttcaaactttcaaatgcatacgaaaaatatattcactattgtggaaaagttacaattaatggtgcagaattaaaataattaaactttaaatcattaaataattagcaatgacaaaaataacaaatcatgatcaataatcggagaagaatagagattaacagagtataaaatttagaaataattaaagcagtaaaacgataaaattaacaccaaaatatatactggttcaagtccgataaatcgatgtaatatatgactctcctcaagttcttaggcaccatcgaattttctaattgagcaagaacatgtacaatacagttgacaaatattatttgatgagttctctcaaagtgtttcaactcttacactcttactcaagaatcttcttcatctacagaagattcttcatacaaaatccaaacataatctctctattttctcactacctctctctctctctctct

SEQ ID NO: 77395 - DNA, 730 bp, Cannabis sativa
gccacttgagccagccaaatattgcgtttgttttatacatatatattgcatatgtactaccggggatcttccgtagcagttaaaggggaaagagagccagttggcacctcttgttgccagttgtcctttttaatacagtttgttgttcataagaaaaaaaaaaaaaaagtggaaagagagcccctaataattgccacacctgtaagtgattaataatataataatttgttgctttcaataaaaaaaaacaataataatttgttatttggtaatggtacgaatactaagatggtgtgttataaagtaattaataatttttaatttattaatttaaaatatataaaatctaatattaaatttgacctttgttgggctgtttttttttaaggattctaatattaagatcacaaaatatgttgcaaaaatatactaatgaaattgggtagtggtagataattcaaaaaaaatcaatataattatatattagatttaagatggtggttgtatttacttattatattatttaaatattcgagctgttggattaggtgagcaacaaaactatattttcacaaatagatttaatggtgacattaattaatggaagagacgacaagatattcaactgtttaatcacgtccttgatcaaaattggagtaatcatttaatctaatttacactatttttctcataatatatctttatctgtattaaagtggcctttgattaa

SEQ ID NO: 77396 - DNA, 5788 bp, Cannabis sativa
ttttttttaagcaaatgttattgttttcttccacactaaaaaactatattctttttattttgaagtggaaagactcgaaacaccagaaataccattcccagactcccagtaaaagaatgctgtgagtaaagtaacgaaacaaggaaacagagagattgttgcattgcagcgtcacccagtggaagctacaaagcaaagcaaagcaaaaagggtgggtcggtgggagtttgccaagcgataaaagctggcttcggatatctggaaacgtcttttcccacgacgacgcagggctccgctcattccacatattcaaatcggctttgccccactatctttcctccctcccactatgcagatcaacgtctttacgctctgctccggccttaaattccttggctatcttatgattctattggttgccgccattatagccgtctcttactacgccgtcgttgtcttcatctgcggaaatcagctcctccgtggtggtcttcactcatttttcggtttctctgtcatcattatcttccatgctctggtaatactcactaactattcgcttcacaccaagttttaatttttcacttttgggttaaatgggaaattaggaattttgctgttcagattttaagttctggttttctgtgaaattggttgaatgatacattggtagttgtcacgtaatggctttctgaaggtgtgttttttaaattttgaattaattccttattaggatccagaaaagaaagtcataaaaataaattcgtaacatagtctcagtaattggaatgctttcagcaattgctattatttcactaacttgaatcgcgtttgattgttggattcacttcacacttattatttatttattttgctcatttattttgggaatagggtatggaattgactttatttaggactattttaggaagactgttaaacttatttgttcacaaaagagtctttatgagtaactggtttaaacaaaatcattatggatcaaaacacttgtgaatttcccctggtcagcatactccaattgtagtgaaatcgtctgtggtttttatctttttaacagtactaattacctacaaaaaaaaaaaaaaaacatttaaagcaggcttcttgtcactcacttatgagtgaggctttttgttttgcagcttatcttattattatggagctactttagggtagtttttaaaaacccaggtactgtccctgaaaattggaaaccttcagtggaggaagataatttgcaggctagtactcatcctacacattcagatcaggtagctcctgatgcttcttcttccacacagtctttagatggaatagaaagaagacagcctggctattgcactcgttgccaaattggcaagccgccacgttgtcatcattgttctgtttgtaagttagaccttttgatgatttgagagctgtttgtaagtaagcttatcgataggttgagaaattcctacgatgcttgaatcttggagttgatcatgttattgattccaaagttttatagttcttaaatattgtgtttttgtaggccaaagatgtgtgcttaagatggatcaccattgcatttgggtggtgaattgtgtaggagctcagaactataagtttttccttctttttttggtaagctcacatgctctattcaattcattacttaatcgataaggccgctaagtgtttcaagatttatattttatgcttatggaattctgtgtttgaagctaggaaaaaacccttcacacaaagacagagtgattggctcttttcttcaatttgttgtttgactattttatcctgcttttttttattttttattttttactttttggcataaagctttatacgttcctggagacgacattggatactttagttttgctgcctcattttgtcaaattctttggtgatgccaaaaatcgttccacttctgctggaaatcttgctattgtttttacagcttttggtaaatagttcccttattagttggtgttttttctctggatattaaccctgcttccactttttattcaagttgctaacgattgacaatgttttattgcagttcttaatttggccttttcattgagtcttctttgtttcattattatgcatgcatcccttgtatctagcaatactacatccgtagaggtaatatctacaaatttatactttatgtaactttgatcttgctgattatgctatctgtatatcccatttggaactccatacagcatgccctcttaactttgacatgctctgatgtgatttaatagattttattccatttttttagttaaatgcatgcttggtttgagtttgagtatggctaactgaaaaagaaaccacctcacacacttttgagacggctcattttcactaattattattgtacatggcagattgtctcaatattaatttatatgaaaacttctgtaggtttatgagaagaaaagagcagtaagatggcagtatgacctcggaaagaagaggaatttcgagcaggtttatttaatacaattatctttcacgttgtattaagcagcccatcgttttgcttcaaattttagatgcctcagtgatattgtcttctcgttaaccatattcattcttctacttatttcttttttttttttttgcctcaaggtttttggaaagaaaaaggcactctggttcttcccattgttctcaaaagacgatttggacaacatacctgcacttgaaggcctagaatttccaacacgtgctgatgttgaggtttgaggcctgcaagcttggaagcacacaagcttacaactgaccatccaatgcattatggaatgattttcatgtatgacaaggtgtgtgtcacaatttgttgccaaattactacttacaattaatgttgttgtgtgaagttgtatatacattggttttaattaattcatataaaattggcatatgttttggtgtgctaagttgaagtggaacatcatgataccataactgactagtgaaaaactgaattaatctttttagaatctatttcattgtcatatttaacatgatttaatgtgttaattatgttattattttttttatttattaatgtggggaggctgttaattttatattgacattatgtctgtattagctgggtggtatgctatgtctaggcacactttaccatgggcatagccattttgggggacataaaccgtgttttcttagtcacgcaatgctttctcatcctaattcaggatctctgtttttatctaatagccaatagggctgagttctggtttcaatctctattatttagttggaccatgttattaaattaataactataggcttttgaatcgaaaaaggcatggttatataactagatttttgaccaatttaattctgataattttgaaggcaacctgttgaattttcaaggggcaatagaaatgaaatttggggagggaatatgcactctcttgagtaatgttttttttccttgcagatactaaaaaccatgtctatgtgaatttgaatttgaaattaaagatgagttttttaaacgttgcacaccttatttatttcaccaataatctaattgtttattatatatttgtcaactggtttttttgctctaaaacagaggaacattattggctgactgaactgaaattttcatgtaaaattatacttgagtgattgtgttttgtatttgaggtggaaaaaataaggcaaggccaggcaggtgatgaaagaattagaaaaaaaaaatgaatatggagaatcatgtgagtgaatgagatttgggttaaagaaatgatgaaataaaacttttgattaaaatgattgctagtttgtgaaagtgtggaaacagaagttacactttagctaaatatcatcgtattaaatctgattttaattaggttataaacatgttttttgtttcaaatattaaagcacttggtatttattcttttaaaggttttcctcaggaccctgaactaataatagtggattagtcgtttgtgagtgagaatataatttggcagaattttcttaagctagaaatttggttgttccttctatattctttttactcttatttataggaataggataataattatttttttaatataatctttacaacagttatgaaatatgaagatttttcacgtttcatatatctaactaattaactacttcaattttaaatatacccccaagtaatgtaaagtaaaataaaatctttatgtcacttgagtaaatagaaattgtataaatgcttcaaattatattttatttaaaattaactaaaaatatggctttgattattcgttggtctaagtgttttttaccaacgatccattcgattcgattaacctaacttataaacgcctgatcctactttcgccttgattatgttgggttaaatacgcttggtgcaagatcttgaatattgagaaaaactcttcgcatgactaaatcacttatcttaaatagtctttctcgaaccctttaattaaaatgtctttcgattctttgttggtgtgcatcattgcgtatttgagactcatcttgttttttttttttcatctaatgattattgccacaattatgagttttgtcctagttgtaaagtttgtgcgtatgggttgcaatattaacttcaattggtagcattacttctgagtcaaatgctaataaaaatagtatgtgtcctgtcgcaattttctcagttgtctgatgtgtccacaatacttgtggcgattcagcaacccccctctcccagcaggtaaacaacccatgaggttaattccccatattccagacaagtagggggaagtcatcatgtgcaattctgtaggaagtactcgaagtatacgagagaatctctgacacttatcacacttttatttgtgtccttatttatcgtaggccaatagtactactgtcgaattatctatttagataagctttgccaactaacatgatttctacaaaagccctcatgtattttcttaattactctcgatttctactgggagtacacatcatagtaatggcattgagttacatcttcggtataattttcattccacaattgtgtatctcgggatcttgtacatcaaatttctagcctcatttttatcagatggaagttgaccaattgtgagatatttgaatattgaagtcattcaagttgggttcgcatttatcatctcgacattttggtcatatgtttcgtaaatgctttggtgctggagtctctcaatcggtactacgttgatgttatcattcttgaattgtgaagctaattttgtcagggcatcgacgtttgaattctgttctcttaagacttacttgattttataataatcaaacttccctaagttatgtcgaactttttctaagcatcttgtcattttagtcccttttgcttggtattctctccacatttatattacgacgagggacattggtcgacacaggttgagtttcatgtatctcaaccatttgggcttacaatttttttaaataaattgttagagttgaacagaaattaaatatataacgatatgctaaaggatataaagttatttgcaagcagttgttgtgtgtgttcatcacgtatttgttgttcttgtggtggaactattgtgactgggaatacaatttggtagaatttctttaagttagaaatttggtcgtccattctacattgttcttactgctatttatagggataggatagcagttattttttaatataatctttaca

SEQ ID NO: 77397 - DNA, 537 bp, Cannabis sativa
acataccaggtgctgtgatgggagctgatggctccttcgtaggggcacaacaatattactctgtttccccatatcatcagaatcctacttctccggcttatttcccagttgttcttcaatcagatatgattccaagtaacacacctgagtctatggttgatactggagcctcaattaggcctgatgtgaggggatcgaaacataacttcaattcaacttccggagcgttttctaactcaactaaatctacatcaaatatgaagaattcattgacaattatatcagaaggacaaaaatctagcgtgggacctagcaagcatgccacaagtaagggtgtttctaatagtaactatccatctccagcttcatcacatgttcttcaggtaatacttccatagatttttttttttctttctataaagtttattgagatgatatatttcaaaacaaatacaatttttgcatctttttttgggggcgctggaggtgttatgatggggcctagaactgggattcttgtttattctttcaagtcta

SEQ ID NO: 77398 - DNA, 2547 bp, Cannabis sativa
ggtcttgaaattgaagcatgagctttagtggtatgtttggctataggaatatgcttcttataagatccttattaggtgactcaagtctctatttatttgttatgttctcattttcatatactatgtttgtgttttctatttgttccttaattaattttattttaattttttttttagggttttgtttttttcctccttatactccatttgaagaagtcaacaagttcaaagtgaaatatacctaaataaaaaaaaaaaaaaaatagatgagtcacttttggtaatattttattttcattccatgttctctactctttatagtttcataagagtttttatgatttatttatttatttatttatttgtgtactatgcatgaacatgcttagtttgatattatcctctataggacattaaattttgagcattaattatcatagtgcatttaataatattagtggaagaacaattagtagatgaccctactaagcatttataattcatggaaataatttaatgtaattaacttatagtaaataaaaaaactgttacatttccaaacctcaaaacaatattgccttcaataatgacctaattttcctatttaggacatttaattgcttttatcaaacttaaaatcaaatctcataaacaacattagttttaatgaaaaagttgttatatgaggtcctatatatatctaacattaaattacatcaatattattataacgacttaaaaaatcataccaaattaaaatattacacattattttagacacaataatttataattaatcttaactacaaaattaaaagtaatgtggtattggcataaatttaaatatgacatagaaattgaataaaattaaatatgaatcaaatttaaaaaaaaaatgtgcacattttttgtaagtacttagcactactcaaaaaaatatgaaaacaagttttaaaagtcaataatttacacttgtaaattttactaaaaaaaaaataaaaatcttgaagactaattttcaaaacattttgttaaaaaaaagttgaagtaaaatgtggtcctaattgactataatttcttctaaattacccaagtgggattacacaaagccaataaatgtcatcaataaaaatttgaccaaataaatataatcaaaattaagctcaaattaatatagtacagttcaacaactaaatataatttttattatgattaatcttaacttggttggtaggtaagctaacaataaacctctcaacctcattgtattgaaatatgaatatagagggaaaattaggcccaataatgtttttacaaaaatagacacatttttattggcatttacaagttaatgacttttactaatcaatacattaacaaatatcaagtgggtgtttgttaaataataatgactcaattttcacacattcataattaatttgaagataggtaacaatcttcttcaatattctttcttatgagttatgacaacttttgctaacatcatgctaatgacatatttgcataatatataatttatttatggtaatggtgtttggtttttttttacctcacaaaaatggtgtgtataatatctagacatatgtaaaagagaaaattatataaaatattatttttggtaaaattttaatatttttacagtttttacagttaaatcagttaaataattttttttatatttttacaaaatattttttcaattttatgacttttactttatgttaattataattttacaattttctatgaaaataacaaaatacaagaaaaaaaatttacaaaaaataacataaaaattctaaaatttatatattttataataaacacttataaattgtaaaaatatttaaatttcatacaatcgtaattttgtaaattttttgatttcttttgagtacttaagaaatggaaaatggtataagttaaatgaaccattttattttatcaaacaataattttctcatcaagaagaaccactaatctatgtaaaataatagcactattaatatttttttttggatacaaataaagttgttttcttttcatatatatgaaaaagaactattcgaaaatatttaactaaaatcataagttgttgtatgttgagtctcatactcatagcttaatcaaaattctattgtgaacatttggatctgatacactcaaaaacatgataacccgccgccgaaaaagccagaaaagagaaaaagacaacccggagttgttcggttagattcgatccgaatatgcatattcggggtgtcgagttcaagtttaaagaacatggaactaagtgatgcagatgtaaaatataactcactttgtaagaagtctactccaatagtgtgttaaattgttatgtaaatttatcacataacaaaaagtgatttaaatttgaattacaatatagcataatacaaattacagtaaatgctacgtttttatatttatcattatgtcatttttaatattttattattaaattttaagtaaaatgttcatttgcattaaatgacttgtattatt

SEQ ID NO: 77399 - DNA, 1393 bp, Cannabis sativa
ttaaaaagaacatggagatacatgggcttgtcaagttatttaacaaatggcaaaatattgcttacaagtatgacaaagatttattactcatgactcacttcataaccaggaatattatagataatcaaggaaagaataagactacagtacacggttacttctcttgcattttccatggtggagtagatagtctagtcaacttgatgaacaagagctttcctgagttgggtattaaaaaaactgattgcaaagaattgagctggattgatacaaccatcttctacagtggtgttgtaaattataacactactaattttcaaaaggaaattttgcttgatagatcagctgggcagaaagtagctttctcagttaagttagactacgttaagaaaccaattccagaaactgcaattgtcaaaattttggagaaattgtatgaagaagatgtaggagttggggtgtatgtattgtacccttacggtggtataatggacaagatctcagaatcaacaattcctttccctcatcgagctggaatcatgtacgaagtttgatacgcagctacctgggagaagcaagaagataatgaaaagcatataaactgggtttgaagtgtttataatttcatgacgccttatgtgtcccaaaatccaagaatggcgtatctcaattatagggaccttgatttaggaaaaactgatcccaagagtcctaataattacacccaagcacgtatctggggtgaaaagtactttggtaaaaactttgacaagttagttaaggtgaaaaccaaagttgatcccaataatttttttagaaacgagcaaagcatcccacctcttccgccacgacgtcattaattatttttaaatatatctatttctcttatacataagttaatccttataccatacatgtatctgttatatatataatttgtttacctgtactatgtatgctcctaagtatgaacatctacagtacaactgtgtagacaatcataagatatatggaataaaataaattatctttcttatttaatggagaataaattaatattcttttaacttacatgtttatggaatagttttattttacatgcattagaaaattataatatattcattaataaaatattgggtacttgttattcttttacttgttattatagtaaaagagtgttgtgtagtgacttcctttaattataatctagagttacttttaaaattttgggtatatgtagttaagttataatcttattttactttcttaaagaatccttggttcaattagattaatcatacaaaagattgagatccacatatccctctgtaaagcccgcttagttaatttggaaatgagcagttgtttatgattcattatgaaattattt

SEQ ID NO: 77400 - DNA, 781 bp, Cannabis sativa
ttttaaaatataaatttacaaaaacatgacttttttctcaaaaattttatttatggaaaaattttagtaaaaatatatataaaaaatacctagttatcttcttataatagctggttactcctctagttacccttaccttttcccatattttaaaattttttcataaattttcctataaaataacatttttttttaaaaaaaaaaaaatatatttttgtcccaaatataaaaacccataaaatttataatttcctcaatcgaaataactttgctttcacactttttataatttgtaataatttagaatataagtattaagagtcatatgaatgtgtgagaggattgaattgaaaaatgtgagattgaaatagaaagaatgttgtaatttaggtaggagacccagtactggatcatcaatgttggatgcgacccgaaaatatggaaactccaagaacagtattgaagattgatgagaataaagcagggactgaaattgcagctgaaacttcagctgccatggctgcttcttccattgtctttagatcatttgatcgtacatatgctcgtcgtcttcttaataaagccaaattggtagttatttatttatttttaaattaatacatttcttattttaattaattttattttttttatttgactaacaatataatattattgtttttttttgggtacagctttttcaatttgctaaatcacacaaaggaacttttgatggagaatgtcccttctattgctcttactctggctacaatgtaattat

SEQ ID NO: 77401 - DNA, 658 bp, Cannabis sativa
tacatacatacagtgtaatacagcgtaccaaacgaatccatagtgtgtcaagtcaaataatagctaatcaaattattgaagtccacggtgtaaagcgcacctgaggatgtgtctttcactacgccaagacttctagacttttttttttttttttgctaaggcaagacttctagactttgttacagtctatgattatagtgatgtgacttcttccaaaattaacattaaagcagtcttctaatagttttttttttcgcttattttctgttaagatgagatccagctactcctggaaaatacatgtcatattgatagttacagtgatacaaagatcctcttgattatgattagaaagtaatagtaagtttggaactatgatttagacgattagcttttctttatatgctctctagtttgaaaataatctgcacaaaatttcttgaaaaactggacatactaattgaaaaactttggttgaatcatccatagtttcgactatggaatgagacatccaatggaatcacgttattggttttgatgtcacagaccttcataacaagacctaagattttcaaacaagaagttttgtctgtataggtttagtggtgcaaataactttgttcaacgttggaaagaaataaataaataaggctaatta

SEQ ID NO: 77402 - DNA, 2458 bp, Cannabis sativa
aaaaatattaaacactataatattttttatcaatgctctttccactctcattatgttcctccaaatgtaattctaacaaaatagataggaggacgaaattgggttaattataagaaagaaatatatgtataatttgtgtcaaattcatgtatcgtacgtggcctgaattagtagtctctggttagatatttttatagtatttattaaattaaaaaataatagttgatattttgatgtatattatatacgtatagtaattgccagctaagagtaagagtgtgatgtttgtactttgtatatgtatgtattaattgggaaatttgggagtatacagtatatatatatatagttgtagtatagtggagtactgtactatagtctacaggttttatcacctcgattggggtttaataattttgtagaaaatagtgtacgcctacaaatttccaattattatacttgcttttacgacaatgacacgttatatatatttttggatttttgccacgttctttgctgcatgcttatgctgctacgtacctatctacactcctacacccatcacacacacatatatatgtcatttttgttttttttttttgagaaatactaatattatttattggtgtaattgttagatgttggaatgaaagtgttgtgtataggggtttatctagggcgggtcctaaggtatatggggcttaaggtgaaattaaattttagggcccctatatatagtttaactattataaaaataatagttctagtgattagtgtaatgataaaattttaaaaaactatatattatatttatccaatgacctcttactttaaagtaagaccttttaccactacaccaaacaatttttattatattttttttcttatttaacactttatctatgtattaattttttttttttacaatttcggggcctgagcgttcgggggctcaaggcgcaagcgttcgagggctcgaggcgcacgtctagcccgtctaccctcagggccggccctgggtttatcttaattttaattagcaatgaaaggagtagtatatttctatatatattattttattttaacacatatatgtcttttaataccatattcttcaattgaataaaaaaaaaaccattttcaagaaagggaccttgaattattattttcatgtatatatttatttaatataataaattacaaacgacaccactttaaaaaaaacatagaaaacgacaataaagactgatatataagaaaaacgacagtagtaatgaaaactagatataactgactccattccataaaacgacatcaacaaaatgtaaaacgacaataaatgacaccatattacatgaaacgacaatgttttaacagacaacaataaataatggcggagctcttaaaacccgaaacctggcccattaattttcacgcggtacctccaaaacttggcccagttccttaaaaaaaagaaattattctctctttctccctcaaaataaaataaaataataataataataaaaccttcatacgtaaccaaaaattctgaatgaaaaaaaacataatacttgagtaaaaatgaaaacaaaaatagaataacagaatttaaaataaaaacgacaatataaacaaaaaaccacaattaagttccatcagtaaaaacgacaataataagaaaaggacaataaatgactgcacccaacaacaagaacaccaataaaaaatccatcagagaaaacaacaataacaagagctagaatgaacaacataaataacaaaaaacgacaataaatgacagcatccttgaaaaacgacaatattaaaaataaacgacaatatattttaacaaaaaccacggaaacccaaaactcggcccattagttttcattggattcccctcctctaaagaccatacaaacgctccatttttatattttttcaaagaaaatatttccttctatctctttccaaacaaaataaaaataagtaaatattaataataaattagggcctacacgtaaccaaaaactaataattcattaggaattattgaggaaaacgactataaccaaaagttctgaatataaaaatacataattcttgagtaaaaatataagaaaaaggaataacagagtttaaaataaagaaggcaccaaaccaactagaaaaaacgacaatagaattctatcagtaagtaacagtaacaaaggacacataataaaaacaacaacaaacgacaaaaataaagaaaaacgacaataaaaaagacaataaacgacacagataatgaaaaacgacaataaacgacacaaataatgaaaacgaaaataaacgacacaaataatgaaaaacgacaataaaagacacaaataataaaaaacgacaataaatgaagaaacgacagaaatattaaaaaaagaaaataaatgacacaaataataaaaaacgacaa

SEQ ID NO: 77403 - DNA, 1389 bp, Cannabis sativa
tgtttataattttgatattatatttaattaaaaaaaatcttattaaattataataattcatactaaaaatagataataaatatttattctttaattaaaaaaatttaactagtttatttttataaaaatatttattatttatttaattcatgttacgaaattgtttattttgagttttaataaacatattttattattaataatttttaaaacattaatatataaacgtaaggataagatattacaaaataatattataaatattaattacattaatctatttatggtaattagtttaagatttatattatttaatgattaaaatgtatgatttcatgtaatatgttttcaaaatatataagtttttaaaatatttttttttgtacattttttgtaattatattatttttgttgtatatttaaaaaaaaagcgctttatataaatagatagttattaacgtagttggatgtaagttaaaccaacaataaatttgaccaaaaacaaataatccaataataaaaactttccaaaaatatattcctaaactatagtttattaaaataaatgaagaaaacataaattaaaaaatgaaacaaacccatatttagtttataaaatatgttatttaatcaatacaatataatataattaataatagtaattgtcttattatagaaatttttatcaaaaaatatttattgatgtaactttttcctaaaactaatatttttttttttgttgaaaatcagctcattgtattttatctacactgttacatcctaacaatactagataaggtctgaattctttctataaatatatatatatgatcctaaaactaatattatctacattcaattactcttatacactacaaaaaatgttatttttgccggcttagtttgttattgcgctgctaaataaagtaacttttaccaacgcatctcgcaaactacactggtaaaaatgttaaatttttaccagtacacatttgtagtggtaaaaatttaacttttaccaatacatttttgtgttagggaaaaatcatttttgccagcatttttttttaaaactagtaaagattctaatatcaacgtttatttgccaatacattaaaagcaatattaaatttttaccagtgcaacaatgtacttgtaaaaataacattgatagtttgatttcttaattaaactaataggtatatgagatagtgcaggtgttttattgcatttcttatttacttaggatatatatgatgataagcataagaattgttacctccaacgttttctatttattaatgtaaacgtattataagactcttgatgattagcttatcctaaaagcataggagaaaagacacatctcattatcaattcattatgaaa

SEQ ID NO: 77404 - DNA, 3226 bp, Cannabis sativa
ttaaagattctattaactaatttccaacaataacaatataaatgtatattctatctcttcttgttaactatctcttctagcagacagaaagatatgccaaagtttcttatatgtatgatatatacatacttctatacatgcatgtttgattgtgtaagagaattgtgtataagatgatgagtaatatacctttatgatgatgacacctttaaatttagtgaggataaataaagctaatactttggtctgtcacaagctagctttttcaaaagaaagtgtacgtatatataaatatatttacatatttacgtatgtattttgtaatttaaatgttgttcttacctcataaaaggaagcttctgtgaaagccatgacaaagttattggtagtaccatcgatatttgtgctatcatatagctttgttttcatgttttggtgattaattaataaagatggtaacaaatatttgaggttgtgttatcaacaaaacgcatattgtgtttttctctctctctctctctatccaaatcttcaattcactttttcaaagaaaattataataagaatccatgattaaattaagggaatcatttcgcttcatttcagaaaagtaagtgttgattttaaggatttcttttaaaaaagaagacagacttattccaataacctttaaattttcaaaaaaggaagaggtggtttcctattgtagatttcaatattagaagttaatatgtctaccaattctggtaataaaggagaatgtgtgattacttttttagataattgggaagcggacattttaacgatacaacttatagtaaaacatcttaattacaaaagctgatttatatatttagtaatttacagccttttcttcttcagaatcattaattaattgttgaactagacacttgatattttaacttctgatcttgatggttttagttaccctttttataacacaaacccaataatgtttcaaaaacaaaataattattgcgagttatgtacgaattattagcatacgccattaaaaagacttatcatattaatgatcataaattttaggtataacttttctgtgttgctacattattcatgtgtacaatgggattttggggttagtttttatttagagtgtttttttagtttttttttttttttgtcaaatacatttggttaggtgacgtttggtaacacttttgttttaatttttaatcacaaaataaaagtaaaatttttgttttttgaaaaacaaaaatgcgttcagtaaccacttttgtttttcaattttaaaaacagtaaataaaagtgtattctataaaattcattttcctttttattttttgattttatttaagtcgggtctaggttcgggttcaggtcagaggccaagttcaacgctagggtcgtggggggaatttgtgtttaggactggttggggtccaaaatattgattaagaaaaaaaatttgtttaaaaaaatattgaaagtgactttattttattttaaaattttcattctcaattaaaaaattgaaatgtgaacagttttatagaacatatttttgaattttttttttcacttttctaattttaaaaaatagtaaattgactaaaaatgtattattaccaaacgctaccttagtttatttatccactcattgtaaagtagtttacctattttcaacaaatattacttgtatttcatattccattatatattgtggttctattgtacatcataatttcattattataaaaaaatacattttcatcggtcaaaacattagttttttttttttttttttcttcgaagagtccactattggagtcgagtgttggtgcaaaactgacattgatgaaaactcattagtgtcgatttataactaatgctagtaaacaaaacaaaaactaaataaaattgaacccaacccatatatcccaatcccaatatatataaaaccgtatattaacgcaaaaatttggacaaatatttggctacacccgctctctagattgatgagaatgtaatgagacataagtataagtaagagacacacaaaaaatttatagtagtgcagcccccgtgatgcgactgtaataaagctacgtctactttgagtatttatttctcacaagaattacaaagaattggctaagtgtggggctcgaaattctagagagagatgctttgacctttaagaaacttcgcaaaatgtaaaaaatgatctaaaggggttctcattttataagagaggaggtttattaaaataataattaaaaaaatacatataaaatatgaaaaaaaaattattttgggcttatcttggccattgatgatgatttaagatgatctaaggatgaacattgactcctggtaaaaatcgtcaatttttagacttgaatctcatcagttagatcatttcctagttatttgatggaaaaatcacaactttgttgaggacaaatttttggccaataatcttcagaatcgcaatgtggttgtgagacatgacttcatatatctttgaaatagcttggaaaaaatagttgaatcgcgtcaatcagattaatattgagtgagttatgaccattttactaaaggttattcagtaacctacggtttggttgacaacctagctcacatgttaacacccaatgcccatgttgacattctaatgtcaacctggacgccgggggagtgccaaaatgtccctgactttattttttatgcctaaatgatgtgttgacaccacttagtcagacttaatgttttggtgaagttgttcaccagttctcagagattttactgtttggtgaaagcaggatgactcgaaaatccccgattttgccgatatcccgccttgctgaaagggtgaatatcaaagtgtaaatttgacctgcataagttgtagctctcatttactatgaaaaaatagttgaatgctcaaaattgaataaattttattaagtagaatccaacgcacctagtctggtgtctaccgggtgctaggtgattctcgggctcgttttgatacttctatgacatttgagaatgcgaaagacatctcctaccccacgttcgactattttaagaagcatgcttagagtaaaatttatgtttgacgaccggaaacatgcaaaccaagttgcttatcaactagggtgcagggcccagtgccatgtccacctaggtgctaagaccgtattctggcttcctaaaa

SEQ ID NO: 77405 - DNA, 4742 bp, Cannabis sativa
ttaagacaggtcagaatagtagaaagattgtgacatagcaagataaataaggctttggtctgtggaagtcttaactatgagaattgggatgagtgtttaggacatctgtgaaattaccattaccaaaagagtgattgtatttgttggaatgagtaatgcagtagtggggcatccctgaaaaaagttaaactctaaccataccttccatctaagcatcatacgccatatgaccatttaatcctccaatcaacttgcttctttttgttttcatatttcatttggggcctacgattttccctaccacttcaggaatgttgacaggcacacagcatatcttgatttctgttcataaaacttgtcttcttccaaatctgattccaaattccctatatcatctcttttacacctctttaatcaactttagattattaagttgtttattcgttttgctttgggaaaaatggttcacattactatttctagtaagtattatccaccaagaaacataagaatagaatagtgaggccaatgagaataaactaaagattaaaagttttattaatggtatcatttgattcttcattttactctctctgcatcattcctaatcatgcatcttttttgtaaagaacatataaataacaatttggttctccattagactgtctgaatcttctttaaatacttcccttaatttattttctctattttattgtggggtaaaacctgtcaaaacataatgatttaaatttttaaatagagcttgtagaatgactagtcattttcatggagcctagatcattctaaaatatgtttggaccactgttttatgaatctataaataccactccattgctcaatctcaatgtgatttaattatttctcaaccaaattcttctcaaaccagtccatcatctcccgaaattacctccctcacacctcaaaagagaatattttatctctcgtcaaagacattccataactagggattcaaaagaggtcttaaacatatggtggggttacacctaataatttaatttttgtagttctcatactataattttattgaataaacaataattttcatctcaaaatgactatgaatgtaggatatcgaagcacaccagtcaaacacatgggaaggctttgtggattggagaaacagacctgccttaaaaggccatcatggtggcatggctgcagcctcctttgtgttaggttagtgaacctcatatcatcctagaaccattctttatttttctttctttcttttcttctccttaactgataatcatgcacatacctaagaactccattatcaaaaaacaaacatataacatctcttttctgcatgtgtagtgtgtttagcatttgtagcataagtttactcactttgctatgttacaaaccaaccacagctgtagagatattggagaacttagcattcttggctaatgcaagcaacctcgtgctatacctgtcaaggtttatgcacttttctccttcctctgctgccacaacggtgaccaatttcatgggcacagccttccttcttgctctccttggtggctttctagcagatgctttcttcaccacttactcaatctatctgataagtgctggaattgagtttatggtgagtaacaaacaaaggattgaacttgtattgcttttattattattattttttctcaattcactttcatatccagaaaatacaaaatggtaatactatatcaagcatgatattgttaatataagaatgtttcaaaaccaagttgcatgtgatacaggagatttgtggcatgtgttagacaagatttattagttagccattaactataataagaggtctcattcgagaacagtattattaagcaaatggtaggagtcctctttcataataaagatgaataagcatacaacaaaacaatttatccatggacggttggttataacaattttatggttgaggtatgctggtagtgaaagacatactgtagaaatatgatacaaattaaatttggcactatatctgatagcaatccttcctggcatcactatcatattactgtcattttccaaattaaaagtttgggaccagtaggaaggtattgaatgcagccaaatgatagtactagtagaaattggccaatcagaatttgtgggtatgacctgtcttgtcccacatgtagaattctagtcccgtcccactaactactaaagaagacaatatcatgctaagttgacatcttgagctagtggagtggaagtgaagaaaagaaagcttaggataataccaaataatcaagttggttaaagacaaacatatataactaataaatttgaccaatcctaacgtttacaagctagctagcatgaaactaccaatatgtcaaatgttatctgacactaaaaacaactttgatgaattgaaacagggactgttaatactcacaattcaagctcaaataccatctctgaagccctcaacatgtgcttcagtaaaaagcttcttcagtcattgccaggaagttgatgagtgggaaagagtgatgttgttcttaggcctttatttggtggcacttggagttgggggaataaaaggctcacttcctccacatggggctcagcagttcgatgaaagtaccccacaaggaaggaagcaaagatcagaattcttcaactattttatcttctgcctctcatgtggagctctaattgcagtgacttgggtcgtttggattgaagataacaaaggttggcaatggggtttcgggactgccactgtaacaatacttgtatctattccacttttcctcgtaggctccccattttacaggagcaaagttccaacaggaagccctatcacaaccatgttgaaggtaatatatccttacttaatatgattatttttatgaggggaaaaataacaaattattttgaccaaaatttactaaaacatcatacaagtaataatcactcaaaaacccaaagtattttccttttttttttataaacgaaactaacttagtcattttgtaaaacaggttctggtggcagctatatgcaattccatcaaaccccgaaactcaaacaatgccatcatgagcatgaacacaatcgaaaccaacgaaggaaataaagagaacactaccaacaaaaacatctcaactcaaacagagagccttaagttcctaaacagagctttgaaacacaacccttctcatccaaatctacaatgcacaataaaacaagtcgaagatgtgaagatagtgataagaattctaccaattttcatgtcagcaataatgctcaactgttgcctagctcaactctccaccttctcagtccaacaagcagccaccatgaacaccaagctcggctccttcaaaatcccaccagcctcactcccagtcttccccgtcctcttcatcatgatcctcgcccctgtatacaaccatatcctcacaccatgtttcagaaaactaaccaaaaccgaaatgggaatcactcacctccagcgcatcggaacagggctagttctttcgatcttggccatggcggttgctgctctagtcgaaatcaagcgaaagaacgtggcaattcaatccgggcttgtagattcgattcacaaacctttgcccattacttttctttgggtggcattacagtatttgtttctgggttcggctgatctctttactttagctggaatgatggagtttttcttcaccgaagctccttcggggatgagatctctggccacggctctctcgtgggcatcactcgctatgggatactatctcagttcagttctcgtaacagtcgttaatggagtcacaagtaaatatcgtcacggttctccatggctctctggtgcgaatttgaatcattattaccttgagaggttttactggtttttatgtatccttagtgcactcaatttcttgcactatctcttttgggcttctcgttacaagtacatatcaacaagctttcacacttaataactatagtagagagcgattaataatcttggtatttattactaattaaagaataaataatccaaggaaattaattttttttttatatctctaaaaatattctgaaatttatatgtatgtatcatcatgtatctaataatcacttttagctaattaatgaaaatattttctaataatttatatacatagatgatgaatgatgataatgatgatgacagtcatttggtggagataattttgcatgaaaatgcatgagccaaaagttcttggacgttagtcattaattagacttttagagggctgcatgagatgacatgacatgttgagcgagccaaaaaaagagtctcaaactaaccattgcactttaagctgatagttaatagatatttatttgtgattttcgtattgattgtacacgataaagtgcaagttgcaagagagatagtaggaatatagtttcccggcataccacggcaaaatgattggtgtacgggccgggctaagaaaaccttattataatgaaacacaaatttctgtaaggaaggatatgaacagtggtcagattgatacatggatataaaatacaatatagagtggggttggttgttgggaccattattagaatagcacagcataaattagatgaggggagagatggttttgttttacatgttattttagtattaataaaatcatatataaccaacaaaggggatgtagctcagatggtag

SEQ ID NO: 77406 - DNA, 4123 bp, Cannabis sativa
ttgaaatcttcgtctgatgcaaccttcggccaaccacggagcaaccaccttccaatcatcgtctgatgcaactaccgcgcaaccacgcagcaaccaccctgcaactattgtctgattgtgtaagtgatagtgtaaatggtattttggtaattgaaatcacataaaaggtataaatattgttcttaccttatggagatatttttataaataaaatgtcaatttatattttctatataataattccttttagttatacaattggaattgtatccgtttgtttgataagagaagttagaggaaataatagatttttttttttattttattattatttatctttaaagcaaacgatggatgaaaactatcaattcaattgggttgattaattctcaggtttcttgactcacaaaaaaaaaaaaaaaaaaactatacccttcctcaatacacggcagtgagaaagaaacataataattttatatgtattttttaggaaaatttgtactacaccatttttttttttttttttaataataaaaaatgaacaaaactttcattaaaaattaataagagtaaaatacattaagaaaaaatatagagaactatttaaaatagtttatcatccactttaaatgtatgtactactaatttatgattatgaacataaattaccttgaatgcatgtacatgtactactaatttatgattatgaatataaattaagaacgcttcagaaaaattaaaaaataaactagtactaccttataaaaaaatcctaattctatacaaataaatgatctcatggagaacgtaaaaaaaatctatttaatttatactacaccattttaaatgttatttctgtatatattttatgggtcttggagttttttagtctaaaattttttaatattacactacacatgtgcaaaaaaaatatttaagttccatttttacacatttacatacatttttaactaagtacaatatacattattataaaaaaaaaaaaaaattaaaaattgtagtagatatccaaacaaagtctattataaaagtacctaaatcattccattataaccacttgaagttagcgctataaaaagatatgtgtatattaaagattcttagttccaatcttaatttatgtattatgatatataaatatttaaataaaaaaaaattccattaattattttagaaaataataaataaaatattaaaataatatactatagtaaatatgctaataattatttataatatattttgttaatatttttttctttcattcaactaacaaaataaattctaagtatacacattactcaatctctattcatgtcttttcacaaatcatatatacaattaaatttgataaaataagtaaatggggaagtagaaagaactcttataggggaagataaaaaagataaagaaaatgggcattagcagtcagttttttccaagaaacaaattaaatctaaaagttgtatgattggtgctaaaaagtgagatgtatgtgtgtacgtatataatggttttattgaatcaagaggtttattgatattttaaaaataaaaacatgtacttgttgcgaaggccccactgaatgggatttttattttgttttcctgtcttgtactcttttttattttgctgaaaccggagggagtgttttcacttttcctttttctctctttatttcgacttttttacttattaaaaaactaatattggacggctacaaagaaaagagtagtttttgttttgagctttttttatttcttatttctcatttcttagcaagagtttcttattgtactcagttttctatttgctagtttaagactgtattttttattttttttgaatgggaatggataatttattagcaaaccaaatccgcaattataagagatttgagagtactgggaagagtactctccgaaaaactacgatcagaccaataacaagagctgcgagccaaatagtgggcggccttgttagcagatcgcttaacatgacaaatagaaacattagacaaaaaagatagaataactttgtagtcttgtattattaaatgatttattttgaaaaaaaaaaaaagtcataaaaaacaatgtcgaagttcccccataccgactgataatttagtcttgtaatattgtgctaaactataaaattaagacatgagtgtgaaatttgttagagagatgaatagattactcccttcattgtcaattagttttgagatggaatcgtatgcaccttatccaatcccaaaaaaaaaaactgatcgaagtagaatccaaaaataactgatcctagagccaaagtcaagaaagtcacttgtaattcggggatagtgagcccaaaaaaaaaaaagccaccaaaaattcaaaaatgttgatccaaaaagtagagcaaaagagtcacttgtgaccggggatagtgagccaaaaaaagatgtgcttatgatcgagttatccaagatggtgagcaaataaaatagctaccatcttggggggtgttagagagtttcacattgctgatatgtgaaaagataatagaatatataagatgaataagctactcctcccactgtcaattggttttgagattattccccatgcactttatatcattcacacttatctctactttcttaaccatacacttccacgtcctaacaaactttgaagagttcaaagagtccattgctaaaggtgagttaaaatcgtaagaaaattatcatggaggaaatttctagtcatattttttaaaatgacacgagttaaatgagtacattaatttacttactctgtatattagtttaatcattatatgtctatacataagtttcgttggctattctttgattaattgaggatgtgaccaactcttgaattaatattcctaagatgagggtgatgttttacccgtctcgggtgcactttaaagtgattgtaggtgctatctccattttatccttggcattaactttaaaggtcttcattgtcctttctacacaacggaagaaaccttctttgtccccttggctatctcgacagtgaaagaagtcttctacttttccttgactgctaacagaacagaggaggtcttcctcatcccctcggctatcacagtagaggaggtcttcgtggcgaactttaatgatgtgttgtaacattcacatgctactatttggttgccaaagagacgatctatataaattgatgttgagaacttaatagacaagtggtagatagttgagatggctcaaaggttgttaggtgttgaccttccaaggagacttggtgtcgattactatgaaagtattcatagtgatgtttcctacgaggtaattttgactgtgagtggtagtctgattttaccacagggagcgatgttggctcacctgaagccatacatgaactacttgcatggctccagatctcttagggagtgaccgactctgtttaaggcatgttttgattagaatagttggtgatgcttgatcattaactatcacctttattgctattatgtttgaaattttgttgatattatttgagctcaactgctcttgccccccatcgttgatctcttagtaactgcggtaaaaaactttaaagtcttgtatgttgaagctaatgctgtgagtgagatagaccactgtcaaagtgtagtgcagaaaaacccgctagaacttctgtataggggagaaatcacaggttgttgaagaacttagattgatgatttcaacttatataaccttcttaaaggtttaagaaaaaacatttttttaaaaactgagtttcaaaaaactataaaataaaaaacaagaaatatcaaaatgtagtttttaatttttaaaaatattttttttgtctaacatattatattttatatttttgctcacatacctgaacccaaaccctagaccctggacccagacccagaccaggaccccggagtccaacatgacccggacctagatccaaaccccaaatctcagacccgaaccccaaccccgactccgacctggaccccgaccccaacccagaatcgaaccccgaaccccacacacagaaatagacttagaccctgacctggacccggaccc

SEQ ID NO: 77407 - DNA, 610 bp, Cannabis sativa
ggggccgaacctctttaaatctggtgttcattttactttactgtttttgttttgttttatatcttatttgatcgctttattttgacttactgttattggctagaagggggatcaacaagaggagtagcttatagatcatatatatgatattctctttctcaaggtcgaccttgagtaataatgggcctaaatttttttttgagtgtgtgttatgtctaaagtaaaatatgagtattattgggtctcttttcacaaaattttacaaaaatactattttttttcaatgcaaaaaagtatacattataaaaaaatttgagccctgggtttgggtacgctctaggcatgggcctagctcaccttagcccaggttcaaacctgctcttttcacttattagtaatgtgagactacttttaataataataacctagttagttacatattttttacatttattcactctagaaattagttataaaagaaaattgtttgatcagtgtattatactattttaaaaaatacaaagttgatattattatttaaagatctaataatcattaatttttgtaaaatacaatccaaaatataaaatttagtttaaaattaatagat

SEQ ID NO: 77408 - DNA, 633 bp, Cannabis sativa
aagaaaatgaaaggaatttgcaaacaccactttatttaaatatatattttatatgagcattcctattaggcattagtggtacttagtactttcttgatatgtcgcgttgcgattggctaacgatactccttaaaaattattatattaaattatataggactcgatatttagttggaccaataagaatatttacacataaaaactgatgctctttagcatttttcattatataccgggccggtcctaaggtatatggggcctaaggcgaaattaaattttggagcccctatatatatagtttaactataatgaaaactatagatttggtgcttagtgtaatagcaaagttttggaaaaaacttaagagatctaaggttcaatccctcataaatcataactacacattaaatatttttttaaaaaaattaaaaagtaagagttgggaattgatccctaccttttaccactacaccaaataatttttattatattttcttcatatttaacattttatttatatattaatattttttttttcacaatttcggggccctgagcgttcgggggcccgaggcgcacgcctagcccgcctactcttagtaccggccctgattatatatatatttatatata

SEQ ID NO: 77409 - DNA, 4858 bp, Cannabis sativa
tttggtctagtggtatgattctcgcttagggtgcgagaggtcccgagttcaattctcggaatgccccagacttcttttttaaaacagtcgataataagaacacattaaaatcaaaaacgctcgaaggagggctcgaacctccgaccttgtggctaacagccacgctctggccatctgagctattccagccatactatatttctgcattaaatatttttatttttcccaaaaataccaaaaataatttcactagtactttctcagtatccaacaacaaaattccagaaaacaaaccaattatttgttatcaacaatggcagaggagaaagtccccacagttacttcggacgaatcatcacaaacaaggcaaaggtatgtaccctacccttaatcccctttcaattttcaaaccctaagttttagagtttatggaagtgtctcaatttcatttatttgtcaatattcattattggggattagtatttgcgtggaaatgtttcatctttaagggtttgaagttgatttatgatttttgccacaaaattttaatatttagcaattattttacagaaagaaaaggaaatgggatcagcctgcagagtcattggtttcagctgggtttacagttcctgggattgtgccattgggtgtaattggatctctgggtggtgggattacagttcctggtgcaactcctgtttcatctgctctattgatgaacccacttatggctagctgtagtaatgtaacccaggtcatttcaccccctttgatacagcaacatattgctgctatggtcccaaagatagttcaagtaagatcccagattttgttttccacctttcactttttaatttcttcatttgtaattgtggtgaattaacacctatcaagaatcaaaataaaacaagaattgtagtactaaaatgcaatgatcaagtaatgaacataaaaccagaatttaatcagttaaaactaaatgaatttgagacaaggtttaacgacatcactcttttttgtggtgactaatttccgggaggaacattgatgtcatttactttacaaatcaactcacatttgattgtatagtgatcaaacacacactagctctttagcatccctcctcacacaatacaatctgtttttcatctaaatccactctctaaatcgtcacctagagaagtaatacacaaagccttatataggcaaatcaatatgaggggtacccgagtagttaactaacttaactacctcgagagctgactagacatacctgttttaactaacaggcttctagatgagactaacagtacaacaagttactaaaaaactcccacaataagatacctgttgctttgaaacattgtaatttagtactgctcactcctctttttgtatttcatattggttgattatgtatgtaaattttggaaatagctaacacttaaccgtggttaattttacccagaaaagcaggttttttaggggttttagctagttaaatcatttgctgtaattgaatcctgagtgtgacttactttcttagttttgtgtgttttgaactttttaaataacattatgatagttacttctttggattttaccttattttctatttgtaccgtattgcatgtgttacatcaataaattttcagtatctattatatgaatgaaaacacacacacacacacacacataatatacatttttgtttatcttgagcgaatttcatatttgcaaatgctgtgctgctcagccttaattaattattcaaaactcttaacaatgttgctgttgaattttgtatttgtttctcaattatttatctgtttttaaatgggtttctatttagccaaaggtccaagatgagttaatagcacgagaaattgtaataaacgaggcagagtctactgttcgctacaagcttactaagcgtcaaacacaagaggaggtgattaattcaagctcttttcttgagattaagtgattcaccattataggtggtcttttgattcagttttgtcttttttgtgacactaattgatcatgatacttgacttgcagattcagaggtgcactggggctgtagtgataaccaggtttgtagttttcttagaagaccaaactctcatggtcatgtatcttgtgtgtaattaattcatctacttaattgcctttgcagaggcaagtatcgtccgccaaatgcacctagtgatggtgaaaagccattgtatcttcacatctctgctggggctcaagtatggatttatcacttttatatacagtataaatgagtatctgaaaattttattttttcgttatattgttcatctttttatggcaggggcttgtttatgattgtgcataatgttataagtagtagaaattgtttaagttttgatgggatgccgtctgcttatacccttgtttcatgtttaaccaacaacatatggtttaaaattttatttttgatacttataatgaaatgaatatgcttttggtttggttacaatgacgtcttttgcagttaaaagacatggctgagagaattttagctgttgatcgtgcagctgccatggtggaagaaatgctgaaaccggatcaaaatgtacaggcaataagttccactcttcatccattgagcaatggaacaaaggtacgtttgaatcaccttagcagcttttatatgctaatgtgtaatgatgactaatactcttctctttgaatcagggccctcatgcactgagcttgtccatatttttgggttttgatgcggacccttcattaaacattgctgctcgtattcgcggcccaaatgtaagttccccgtcaacccttcctctgtccattctccaaatcctataattttgaccataatttgatggatttggtagtgtcttctccatgattagaatatcagctatagtttccccgtcgatgtttctagaagctgataaaaatagattacctttttaaatactctactatgcaatttatgctagcagttgaggttctcttcagtcacacactgtttgagatctctgccataaggctgtctgtaacatttagtattttctgcattttcctgcatttttccttcgtattatgttttatagttataatgtacatgatgaagatgagagattctaatctttggagctttctctgacatctccatacaattgggaggattgtttttttttgtgttggtggtggttcggttttgtacatacaggaccagtatataaatcacattatgaatgaaacaggagctacggtcatcctcagaggtcgtggttcaggaagtaatggaagcctgcctattgaaggtgctaactcatgactttaatttgtactgttgctctggacctattatacttggtttaactagtgtttattattttttttcttctagaagaacaacaacagctgcatttgttcttgtcaagccacagttctaaaagtcttgaagatgctaggcgtttgtcagaaaaccttttggataccatcagcatagagtgtggtgtttccaggttagcatcttgtacaaatcagtaatgcattcgtgtattctgatcattgcatgggcttaagcttggtgtgtatattttcctcagtaaggtgcatttcacataacatcgagcattgtgtgtaagatttttgttgtatttatatgtatgaagcatttagctgtctttctaatatattttcatcaagtatctggttcacctactgcagagtgactcttctgtgggtactaaatttatgtttcaaggatccaatggtttgggttgttacaaagatattgctcatggctatcattttgtttttgccctatatttatttataccatgtatagaagataacttgtgatcatttttgtgctgttacagggtttcttcttctaaggtttatagtgctgttccaccaccacagcaggtatacagtgctgttcccccaccacagcagttgttggctggaattcagaattctgtgagtaatttagaagcaagtacaagctcaactgctggtttgaccacttcaacgacaatggttgtttctccaatatctccagtttcctcagttaggatcgctgggatcacttctgtctttcctcaagggaagacatctcaatctggagggttgttaaactgtggtcagtctcaggtagacccagttagccattccctgcctatgttatctggaggaacaagctatagtggatattgtgggatatatcctcaggccacacctttgcaacaagttgctctagcacttagacagtcaacttgtcctgtcagctctactgcttcccccacaatatcagaaccaaatgaatctatgctgcgcaattccaactttgagaaggagaaacggcttccccaaagacgaaagtttcaggaactaccaattggttcaaaaggttttgcaaagcccattcaggtaccttttcattttctgcatttgggtctttcagtgcagctatgaaatgcaagcataattgttagcattttaaagaccttttaaggaaaaatatggacgaagagtgaaaaggacaaaattttagaataaatatatatttaattcagtctactttgtcatagttaatatgctataatgtccttaaaagaatgcagctaaaaagctcctgtattaagtagcattgtttgatatttttgaacaacaaattggcattgaattttctgaaaagtttggattttgggagtttttatttatttatatattttttggtgatattagtaggacctactggatagtttactagcatacatgctatttgtcatcacaacaatatcaatattacgtccgcatataatcttataagtctctttagtcc

SEQ ID NO: 77410 - DNA, 778 bp, Cannabis sativa
  modified_base (648)..(677): a, c, t, g, unknown or other
agactttaaatatatttttttttcatagctaggttgttaaatttgtgcaaatacttcacatttgacaaaatagttatacatttaaggcatttgctgattactgtgattgaatagttgtttatatattattttcatgtattaaaatagttgcttaataatattaaaaaatttatacactagtttcaggtcggaacctctgctaaatctggtgcagagaaatattcaataagatgacaacaagcactatgttgattgaatcaagtggagaattaattgttaggctatttttagcctaagttccgggtcaaattaataagcattttctcagttgatgttgccttttagaacggttttacgcttgaatttccttgtttcaggttcccaacgcattatagttcaaattctgtcaattggcgaaagacgggataatttggtgaaaaaaatctactaaagctgccagtttgctccaatagtcgcgaccagcataagccataatcgtgacccttttctttggtcgcgactatggtcgtgactagggcatttggcagaaaaggtgatttttcccattttcctatggtcgcgactatccctttatgtagtcgtgaccaggtgtaatgtcctcacatcaagcctccattgggcccttannnnnnnnnnnnnnnnnnnnnnnnnnnnnnagtacgtcactctggctgctttctagactgacgactggtcctacagaccaacacgagtgtttttagcgtgctttgtcctcactcgcacgcttcttgagaaa

SEQ ID NO: 77411 - DNA, 1564 bp, Cannabis sativa
  modified_base (1103)..(1109): a, c, t, g, unknown or other
atatatatataccacaattttgtaaatatataccaacataattaagcaattatgtttaaaattatcaactgatcattgatgaattaagaaaacatcactagtgatcttcgttctgcaaagtctcataataagcaagaagaaaattaaatataagttaaagtaatttacggtataaataattaagtttaattttcggttgtaaataaatatttaagtttaatttttggcggtaataatacttaaattatattcttgaaactctctaagtaactagctagttgttaaatattaaatcattatccatgtgtttttttcttattggtatatttacacaaaaaaaattaaaaatttaaagacttggaccactcaaagattgtcacgtggcaatttacgctaaaaagtaaacttaaatatttatttataattaggagttaaacttaaatatttacaccattactcaataaattatgaaatttcggtacggacaataatatacataaacatatgttttcaagtatatattattataatttcacttatcaaaaaaaaatatatatattattataatttcaaaaaaagtatattatattattattgttccataaaaaaaaaatatgtattattattgtcaatttaattaaagaactaaaaaaaattcttacttttgaaatttctttgaaaataatatagataatttttatggtcacgcaatttaatttctttgtagtagcaattaaaatttaagtaataattattattggaataattaatttttttatgtttttataatttttcacactacctcacgtctcctaaaatatacggttttttaaaaaaatcctcaaatataatagttacataatcatggcccttctgttaggttatgtttcttttaccgttaaaaaataatatttttaccctttgaactttgaccatactaaattttgctcccttttatttaaaaaattaattttaaaaactataattttttataaattttgaaaaaaaaaataaaatctgataaaaatattaaattaatcaaaaaaaaaattaaatttacttaaaaaacctaaattattcctaaaaaatattttcaaactttnnnnnnnttataaacacgtatcttaaaaatttaaccaagattattgaaagtacaataaataatttaaacaaattaagattttgtgaagaaaaaatcaagcttatttatatttacaaactcatatcttaaaaataaagaaaaataattaagaatttaataaaaatataaaatcatttacataaaaataaattaaactaaaaaatgagtgtttatttaaaaaaattcaaatttttggagaaaaaatagattcaaattttaggaggcaaagttgttaattacaaagacacatcaatatttaaacagaataatgagacggaacctaacaggatgtataaatttatgtaaatatgtaaaagttcatgaggaatttttaacaagtcatatattttagggagtaggatcaggtaatgtcgaaagtttaggggaaaaattactaattattcttattattatacaataagg

SEQ ID NO: 77412 - DNA, 1914 bp, Cannabis sativa
acacttagtaacttccgggggtacaataatggccctaccaacacgagtacagagttggtactttagtgcatatggtacagtggtcgtacttctgttcagaacgttgttaaccacttgtgagcttgggtgttgagcccggaacggcttaagcataaagtcgatacaacattacctttatatatgttatgcatatcttactgagtctgtcgactcattagtttgctaccttgtgtaggtaagggaaaggctaagctggaggagcagtagtgagttgaagcttggcagtgcagcctggagggtttcggtctttcaaccttttgagctatattttgtagttgccttgtcgtttgtaaaaaaaaaaaaagataatatgaaactttatatttagtaaacgtaattttcaactgtattttttttaaaaaaacatcgggatcccgacctatgatatttacgtagttttgtagttaaatctacatagtttatgagtatttattatttctgggtgtttttgtgtaacggagtacataatttaaagaatgcacgcaataaatgatgaatttcttgcagggtcctccctaaatcaatttggtcgttccttgctttgactcggaaaattgccaactgactcagagtctaataaacgatgattaattaccaataaagagttaagaataataaataaatacaaaacactaggacttatagaggtccgaccctcttatatatgggtagtgacctactcactttttagttatattgattatgagataataccatgtagaatactaaagaagacaaagtgaattctaactacaactctcaaggttgcaaaatgctcttagaagtgagattatgattctaggtcctctccccttatgaattcatttcactatttataagggaaaggttgttacaattagctccgtaaaaggagtgatcaaagagtaaatatccctatattcgtgggtgcagttacgatctgttgaagctcctacaatcttgggtagattagctagattcacatttgtaagattcagttaaagatatttgtgaaagttgtttgagggagaaatcaagacttgtgtagctctgcccgacattcctagcatcgtttcttttggcagatatattgactacccaactagaccctccttgagacttgtctttttcgatgaagttacttacaaaatagtcctggaaggtacactgatcttctcttctctagcccacataacgatggctcggtgagatgctgccagtaaggctattcacagtccataggcaacagcctcatatgagatatgccaagcacgaatcctgttcggaggtcccttgttatattaaaaatcagctagattatgccacgtgtaagtgctagatgtgcaaactttgaataacacattcaaaaataaagaaattatgtatttttgtaagatatcgtatttttcatatacaatatatttttaaattagctcatttttgaaaattcgcctacaattatttgagaaatcaataccttataagtcttgacactacatacatataatacattatttatgtaataatgcattataaaaagtatagctaaacaacatacttttaaaagattatttaacatatatacaataacaattacatcctgtaatttttttgtataaaaaaatgtataattcaaataagtgactaaaattaataatctagaacagcaactgggtcaatatccacataggaaagaccttgaaaatattgtgccaagaatttggaaccaaaagtcacaaaagtcattagtcaatatcataaatacatatagggttccataacccttttttttttttttacaatttagttagaatcttctgtttttttagttagacatgaccagataaaaatatatacccaaaaaaaaaaaaaaaa

SEQ ID NO: 77413 - DNA, 1316 bp, Cannabis sativa
  modified_base (357)..(360): a, c, t, g, unknown or other
cgcctcacccctgtacccttatatatagatatctagtcaaacttatcaaccctcaataacactttggtttaaatttgaaaatcctaaaatatctctaatctatctaggctaagcatgcttttcaactaacgcatattcattcaactccttacactcatatcataatgaattccctattttatctctttttaaatttccaccgtaatacacaaatatctcataatttactccactatcaccaacaaacataaaccatgacttaaattaataatttatattaaactatcacatatatttaggcaacactataatttaaaataaaaattagctttcaaccacaacaacaacaacaacaannnnaataataataataataatatttgtgataaaacaacacaacaatgatcataataataataataataaggtacttgacacgtattaagaaaagaaaccaatttctataaatcaaccatccttattttacctttactaatttttaatctaaattgaaaataacagctatcataatttggccaacaataaaaattcaatattatctttcttttcttaaattactcacaatataatacacaaaacaatctataaattcttttaattattagtacttaaataatgtccaatacttgaatggactcttctataaggcctacctaaatgagttactccactcgtaagaataccagtttaattattttttttaattttaatttgacaactaatacaattttatttttctttagataagtagccaccaaattaaactctaataattatccctactcaccacccataacaataaatagatatttctttttcatacaattaatctatccataaatctttaaatactatttttttaaaccgggtttgacattctaccctccttaaaagaaatttcgtcctcgaaatttaactttctaaacactctgagtattgtctcatcattcccttttccacctactacatttttttttctatctatgttatgggcccaacatacagttatttaatgtttgccctaactgtaaaatcataacatatttaatatatactacttaatttaagaattattatgctaccattctttacttaacaacaaaacttacttcataataataacttacacatacactttaaatatacaagttttgcaattgcatgctcatgatattataacagttttcattctcttacgaacatccttacatgccattaagagtaaaatcctttattctcttatgaacatcttacatgccattaagagtaaaattatttattctcttgtgaacatc

SEQ ID NO: 77414 - DNA, 3708 bp, Cannabis sativa
tatatatatatatgattaacacctatttttcgctttagatgtatgcatgttgcaataaacgttggctatatgtatatatgtgtatgtatcatatggatagaaggatatgttgatttattttcgtaacattaacagatctttatctattaaaagatatcttactttgcaattaaagtgcaagaaatgaatgtagaaccgttaataattgtatttgatatttatttttcttttctcgttataaattctcttctaaacataaagctaattgctttaagtagatggtactttaaaagagtgttggacaaaaggagggaaactttaaaggtgtactgtgtattaataattttcaaacattgtgcaatggacacctcagaacaacccagggccaatatctactttttcacttgaaacagctttacaactttgtaattatacaagtgttttaaagggattccattctttattttcttcttttctttcaagcactcttgcacatgcttgtttagttggaaaacatacatagtttgtatcctacttaattattttaatgggatgttcaataattttttattttaattattttttcttttctcttctttattgaactttaattcttgggtattcctttttagccttgtttcccacgcccaaaattcatcaacaaaaaatcccattcataattataattattttatttaattatataaataattatctatattttcaaaaagcaaacttaactgatgcaaatctgactcaggctatagttttctttctatgatatgcctttatttttatttagtttcttaacgcacacagatatacaactagctaactagttactatgtaaacaaggattcgaccatattgctagaaattaaggagagcccaataagtcacaaaatattattatgtattcataatatatccctatattttattatagaactacatatattttttttaccttcccaagcaagtcttaccaatatataagctttctaaaaaaatacatatataaattataacatgtgtgaagatataaaaagagaaatgttaaaaggtattattggtacttagcacttttttcggtgtcatattgctattggtataattaattatcgagtctcatataatttatataatatcttttaaagagtatcgtaaactaattacaaagagataggtttagaatgtgctagacagacacaatatatcttgttcattaacatttcggaaatactccataattagagcagctatttggatttgaggaaaaaataaaatcaaccgcaaagaaatacgtttagaaggtcttagagtgtcgaatttaacaatgatcataaggaaatttatacatacaagtttcaataaccacgtttcaatattaaactctcaataataataaatggcatataaaaatccatgcaccctaagaaagtctatatatatatttatgagcatttatcgggcaccagtagtgcttagcacccttaagatgtgtcgttttatgattcgctagcaatactccataaaagctattatattaaactatatgggactcgatactaaattaaaccaatagcgatattgacacgtaggaaagtgtttaacactactagtgcgttttagctatttatatatataacattaaaattagctagccctagcgtatatcgtgatataacttaaatatgtatatatataggtgttgtaatgaatggtgagatttttgatacacataatgcatggaattgttgagcaccaataatgagaacccataaacaacacataccaattatttcacatattcctcatcaatctctttcatacaagtaagacccgggtttctgacagttaccgaccaatgacccatttccacataaggggctctattcaattgttccccataactagggcatctgggtcacatggggatccatgtgaccgaagagtttggggcactatctctataatctaataatccaataaattagaacaacaaaacccagaacccatcaaaaaaggacacatatatgtatacatgtatataatttattgtatatctaatttattaatagtattccaaaacaaataaaactgctacactattcgttgctcgaccctcaatgccgggaccattagtctaggccccacacgtgtaaaaaaaatctacttcacccattggctatgtactcaacacgtatgaccgtttgggccatcttttagccccacataaatgaaaattctgacaccgaaatgcatgccatgccgtaaataaattaatatatacatttatataattaagcctaataagtgattgtaggaatcacaagctagcatgtaataatcacagaacagtccggttaattgttaatatattggatacaaaaagaaaatgtacttgtatatatgtatttatttgaaggtttgggttggtgggaacaagagggatttatgcactaccaaatctacaatagattaaagacacggatcattgatctgtattaatatataatattataatatatatatgaggccggttaaaaatatacttatctttagaaacgagatctaaaaaagttggtacctttttccaaagttatgaaagaaggggaagattttatagtagctactatagctagctaaagagtaatgaaatgagagagtaacaattaattaatatataaaggcggggctgggggttggagccgggaagaggggccgggggatatattgatatattactttgggggtttttttctccaataattgaaggtggcaaagagacatagtttaattctgttaaggcaccaatgatgagagagtttttattttatgtagtggactccatctttccacgtccgaaagaaccgaggttgtcaaagctttggagccatgttactgtccctattccaaaaatccatgcattttaattttctcttcacatcaagaaccccttttaagtggattccaactcctcattcaaccatatatagattcccttaacaagtggtgggtttcactttcacaaacctaaccaaaaagtttatctttttctcctcccctcctttgatttattcatctcctcctcctcattattattttttatgtgtaaagctaattaacaaattaaatataaatataaattaattaatcatgatattaatgcagattccattctattattttatgtggggttccttcaaatctcggtacccaatgggtggacttgctgttttgtttgtgagcaatagggtaatggggctaacctacctaataggatctgacaggtaccagttatatatatacatattcttcaattttgtgtggattgcaataccatatatatttataattaagccacaataccatgcattatcagtagtaatatatatagagagagacaatataatattaacctctctcctttctccctagctgtgtagctcagatatatatatatataaattatatattagtttaattacttttattttttgctgttgcaaagaacaatgacagttttattgtatgtaaataaaaataatatccattagtcaattcacatataatttgtgctaattatatttttataatatttcccattaaaaaagaaaaaaaaaagcttttattatattaatttcttaacttatgtttgccaactcattttcctaccattatgaaagagaggaaaaaaaaaaaaaa

SEQ ID NO: 77415 - DNA, 582 bp, Cannabis sativa
  modified_base (385)..(385): a, c, t, g, unknown or other
actataacactgataataccatgtgccctttgaagttccctattctattaagacgagaaggcacggcaagaaatgatggatgaaatataaagctatggaaactatgcttaaagctttgttagttaaagtggagtgggtttccatagaaacaatgcttaagctatggggttatgtgatgtcaccaatagatagagcttatttattagtgttcatccaatccaattcaatccgcactattttgttcatagtgcattcgatctgcactaaattttatattttggatccaatccactccgcacaatagctcaaattcaatcaaattcaatccgcaaaagtgcgaattagatcagttattttagattagttacttttcaatattaaattntttaatatttatgaaaaaatatttttttttcccactaactagcgacaaaataaaacaaagtattgttattttatgtttccaacaacaaattaaagtaaacaaaataacaaataaaaaaatcaaaggaagaagaaaaattgtatgtataaaaaaatatttaattttagaataattagtatttttatctcctgaacttt

SEQ ID NO: 77416 - DNA, 3461 bp, Cannabis sativa
ttggacacgtttttggaaaatgactatttataatattctaatctcgctttgctagctagtctgttaaacgagacaagtctgtttttgacgtgtcaattgaaaattgtaaatgacgcacaaattgatgtgtcacttgattttattctaaagaaaaaatttattatgattataatattaatatactaaaaagaactatatttacttatttaggtctaacaataaaaacttcattttctttttttaataacaataaaaaattcgttgtagtaagataaaaactaaaagaaaagaaaaaaaatggttgtaataagcgaattaagtgaacaaataaagggaaatcgatggttgtgccgtgtgtgtatacttaaattggtgggtattagcttaagtttgcgagaaaaaagggagacatatttttttggttggtaagttattagttatatagtccgatatatatacgtgcgtactacgtgctcaattattatataaaaaaaaaaaagtcaatatacatgaccgattatttagaatattttaaaattgtgtctctaataatgaatggtttactttgttatggtctttttcttttataaggacccgcgtttaaaggtagtgtcagattttgtttgactttgacaaaaacaaaaaatggaaacttcgttgtatttttatttattaatttattttttggaaaaaggaaaaaattgttgtattgaacgatttacatatatggagatgggggctacttctacataaaatacagatccgacaacacaaatggaatgaaacactaacaagtgagtatttttgcatgtactggttttatcatcactattccttaagagcaatcttaaagctggcaactttggtggttagccaatgtaactaaaattaattatgttagttaacagtttgagctttagttagttttttttaacaattttctgtaataaacttgatgtttagttttgtttgtgtaacttgattcttgagcttcataaataaaagatagaggctcacaatttagttaattcattttttttgcttctctcttttttggtttgtactatggtatcagtaacttaaaatttagagagaatcggtttgtaaaaatacagctcaatgagcttctgcaattccattgtattttatagtcgtttggcattgttacaagaatattctagaccaatgacacctcatcacaaaataatgaaaataccctaacaacaatgagaatacactatgacacctattaccgaaaggagagagaaaacaaggtacatgattctccaatcattgcacataaaggtgctgacaaaaataaaaagaataaaacagagtacaatgataaattgtaacaaattagttactggtaacaaatattattttctaacacatccttttaaattaagtggggtggaaaccacatctagtttgtcaaccagaaaataaaattttgaacttgataaactcttagtgagacagtcaccaacttgatcgtgtgaaggcacatatgtaatgtctagagatttagccaacactttgtctctaacaaaatgaatgtccaactctatatgctttctcgagcatgatagaatgggtttgagacaagagcattaactcccgtgttgttataccatgtcatagggatgtctttaagagggaactggagttcttgaagaagagattggatccatgtaaatttggctgaggcttgagcaagagccttgtattcaaattcagttcttgagcgagacacaacaacttttttcttagaggatcatgagaccaaagtgtctccaaagtatacacagtagccacccacagacttcctgttatcagggcagcatgcccagtcaacatctgaaaaacctatcaaagctaatctttcactatatttcatgtgcagtccatgattgagagtaccttttaggtaccgaagaattcttttggttgcaaaccaatgacgacagtaagagctttcaagaactgactcaatttgttcacagcaaaactgagatcaggtcttgtatgagttaggtattagaccaccaattaggctcatgtattctgttgggttcttgagtagagtcccattttgtaatgggtagagtttttcctacaaccattggcgtaggccaaggctttaaatgtgtcatgttgttctttttcaataactctattatgtacttagcttaagataagtacgttggagacttatcttgtacacctcaatactaaggaaataattcagtgattcaagatccttcaaagcaaaaaccaggttctattgcctcagtttttcaaagttgtttccagtgacaattatatcatctacatagatgagtaccattaaaatttcatttgctatcttgtcgaaaaatagtgaggaatcaactttagaattgacaaatttccaactcattagggtctgttttagcttgtcaaaccaagctcttggtgcttgtctcagtccatacaaactctttgtcaatttgcacacataatctgggtgtactttgtcttaaaaaccaagtggctggttcatgtaaacatcctcactcaaggtgccattcagaaagacattatttatgttgagttgcctaacttcctaggaatttaccacagcaatgcttagcacaactctaattgtacaagctttgacaataggactaaaagtttcaccataatcgaccctaggtctttgattaaaccctatgacattgttccatccttcatgctctaaagcttcttaaagagagacaagtttagcatagtagtcactgaaatgagctttactcatgtaagttttgggtttgaaaattcatgctttggctctggttatcataggatgagtgggagccacttgaactactggttggctgttagttgttgcatctgattgcccttcaatagtttgatcattatcagtatgttgtactcctaattgttcagcattaacattaatgtccccttgattgagatcatgttcataaccctgagggatagagttgtggactaagaacctggtgatgctccagggacacttagatcgggatcttaatcagtttgaggattgatattgtgttgtggttgagtatgagggacaccaaaagagacatttataaaggttgaccaagaagaaatttggacgttaacattttgtttagcttgatatgtttttagaaaaccagttttgaaaggaaacttagcttcattgaaaattacatttcttgaaatgtagattctgcctgtgctacttaggcatttgtaacccttgaagctttcactatgccctaagttgacacactaagttgacacacttagttgaatggtactggaatttgtgggattaataggctctaagacaagggtaacaagctattccgaaggtttttaaaaacttataatctggttttcttttctatagcatttcaaatggtgaaattgttgggttttatgcc

SEQ ID NO: 77417 - DNA, 621 bp, Cannabis sativa
ctgataaccattgatgtaccccaaatcttccttatccaacatttgcctagacaaaacttctaaacacaaaatgaaaaggtaaggtgacaagggatctccttgcctaagacccttttgcggaataacaaatttggttaggcctccattcagtaacacctggaagctgacaatggagatgcaatgcataataagaccacaaaaccgatcatggaaaccaaaggccttgagagcattgttcaaaaatgaccattccaacttatcatacgttttcgacatatcacacttaatcccaacaaaagctttcttctcctacttccttcccacataatgaataatctcctgggcaataatcaagttctcagctatccatcttcctttaataaaggtagattggaaaggagatataattttattcgagataacgcgaagtttatcaactaatatttatagttaaatttatttagtaacaatgaatgagtagtacacattgagaagtgttccatatatatattgtgtttttatttgttgcttaaagttttgagttgtaccttttttatttttttattttcttatttatcattttatgtgttgttttgcttagagttgtaatattatttaatt

SEQ ID NO: 77418 - DNA, 1398 bp, Cannabis sativa
tgatttggaagggatgtatgaatgggaggtttttagccaaggggacaaagcaataggttttcagagaggaaagcaatgtggagtctcatatggggtaggagtattcatcctagactcagcatgttcctttggagagcgctgtctctggccttgcctactagaaattaataagcttccttttgctaccaaggtaagttgtcctttcaaaaatattgaactaaaactcttctacacctatttactcaacgtagtttggccagggccctgtggttaggggatccttggtctctgagaattaatgagtgccatggtgataccttggtggataagattggaaacttgatgcttcaggtcaatgctgactcaaaatttcacctgattatttatatagcctctctttttgagaccatttggtcatgtaggaatgcaagaatttttaggaatacaacttggtctattgaacaagtcaagtctttggttaattgtagattcttagagtttatggggtcaaattcttctagtactacataaaagctcagagagtttcctagttttgggatagagtatatgattcaaccacattggaagattttcattgatgcttcattcaaagatggatgattaaatcttgtttcagcaacctttgctcttgaggtagaatgtatgtctataaaaatggctcttgattgggccaaggacattggttgttgtaatgtttctttattctctgattgtcaggtggctgtacatgctttaaattctaataatcttcctgattggcgtattgcaaaaggattttatgacattgttaagctgaggaatacctttagttcttgtaattttcgttttgtcaaacgcaattgcatttcttttgtggacaatttagcttttatggttggattcaattacatttgtgagaatatttttattggggaggggtctcatcttgtggacctcactttctgctaatctatgagctatttgttctataaaaaaataaatattcgtcttgtacggaattatgaccaactcaaggaaaaaaaatcattgtacaattgtgttcttgactaagataaagtacggctagtatgaacccaatacccaaatatgcataagtattgtgttaaatcgctacaatcggccaccttgaaggatttttttttgtttgatttatctaattactaaaaccttatcatgtagttaagttttagtagctattttttgtttgttgataaatgccaccttgaagttatatacaggcggacctgagaatatatatgtaccataccattgtatataccattgtataatgtaccatataaacgcaaccaattaaactatgaatatttattgtgtgaattcacttaattttatttaaataaaatactaatgatatat

SEQ ID NO: 77419 - DNA, 897 bp, Cannabis sativa
gcataaaacccaacagctacttgccagacaagcaaatgcatatgttgcagcattgtgttctctagggattttccttatagtatagccttagagctgacttagtaagtcttggatcttgcttaagtaggtcattatttttcacctcgagctgtgtattcacctaggatttgattcacgattagttaagagtcactgaatatgtccaggtgttcagtccgtacttcatgcgctagcctgaggctggatattagggcttcatattccgcctcattgtttgagcctttgaagccaaatttgattgctctatatagttgttgccccaggtgttataagggcaatgcctacattgaataattggtcagtgcaacttccatcaatatggagtttccacgttgattcttcaggtttttgttgctgttcttgctctcgcttcttctctggctcttacttttctcttgaatcttgagagattttaagaggtgtgtttgtacgcttgtccacgaagtctggaagggcttaaccctttatggccattctttgttgatatgtgatgtcaaattggccaagtttaatggcccacttgagtagtcagccagatgcttcaggtttcaatgaaactttttgcaatggttaatcgatgtaaatctttattaggtgtgcttggaagtatggcctcaactttctggatgccaagagcaagctgtaggtaagcttctccatgagtgggtaccgaatttcaacgtcgattagtcttttgctaatgtagtgtacagggtgttgtacttttccttcttctcttgttaggactgcactcgcatcatgttttgtgactgctaggtacacgcctagctcttcactatctaggggttttgaaaacacaggtggttgagccaactt

SEQ ID NO: 77420 - DNA, 823 bp, Cannabis sativa
gaagtaacacattaagcaaaataaaattatattcaaatagagtaatgattcatgcacttaaaatataatacaataaattaatgtacttttttacacacaaaaatatccccaaaaattaaaaaaatatatcactttatatataaaaaataaagtaatactagatgcacacttaaattgtacacactaaaaatttaacacagtacacaatattttttttcgaaagaacatcatttttaattttatagttaaaattaattgcactgtaatttaagtgtgtctaaatcattattcataaaaatttggaatctcacccctcataaaatgtagataactttgtgaagaaaaaaaaattataatttagataaatataactggttgaaaattgacacattagcatatatttttagtgtgtaaattttaagctaattaaaatttttgtctcctgaattttaacatgtactaaatcatatcccttgaacttttaaggccgttaaagatggttagatttaaagacttttgtcaaatttcaataataaaagtttaacattaatcaaagtttgagaggtatgatttggtagatataaaagtctagagagcataatttagtatggacaatcatagaattagtaaacttgaataaaactagacaaaattctttaaatccaacaatctcaatagttcaatataaatttttaacagctaaaagagttcacggagtattattcagtacaggtcaaaattcatggaccacaaatcctaagggaaatttgattttctatacttagaaaataaaaaaaaaaattccctaaaccaaaaatttaaa

SEQ ID NO: 77421 - DNA, 1263 bp, Cannabis sativa
tcacttttaagacttgacgacaaaaatgtacccaactgttttacacggtcgagaattctctcttttatagtagtgatggaattcactcatacaacaaaagctacatagccagtttaggcatagctccttattatgagggcttatatggtagaccatatagatcgtcatgatgccgagtggaaccagatgagcatgtcactatgagacctctaattatcactaatagcactaagaagattcaggagatacaagagagacttaaggttgttcaaagtcatcagaaaagctatgccaatctccatcgatgagaagtatgatgttggtgtttatgtcatcttgaaagtaactcctatgtgtggtgtaacgatatgtggagtgaaggggtaggtagcactgaggtatgtttgaccattcaaggttatcgagagggttggggaggtcgcctatcgattaaacttacaaattctgttggggcatgttcataatatgttttatatgttgatgctaaggaaagtatactctagttctatcgcatgtgattgagtatgaggctattcctatacaagaagatataacttataaagaacaagttgttagaatcttggtgagagagtcaaaggtgttaaggagcacagtgattctggtagtgaaggtcttatggtagacccatagagaagacgatgatgcttgggaattagagtccgatatgtatatgaagtatcctcactagtttaattttcaatttgagtttgtactttaaaatttttggacaaactttctttaacgagagaagaatgtaaaatctcgatgaaaccaaaagaaaggtaaaaaaaaattatataaatgttgtgggatccacacttttatttaatttcggcatcttttcccctccctctctcatgcatggcactttctctcttctctctctccttctttctttcttttttagaaagaacccacaaataccaccactaatggagctccaacaaccactttatggtcaccgcctaaccttacacaatgcaccattcgaatctttgactatcaaggttctcaattcctaagcagtgctgccttatttgtcgtcattggcccaggattacaagtgaaagtcttgaggttcaaactttgaacgtattttttgctcacctcttatctctatttaacaaactatcttcaccatattagactcaactcctcaaggataaaaatctccaataagctattattcccagatccctactttttctggtgacgtttttg

SEQ ID NO: 77422 - DNA, 600 bp, Cannabis sativa
aatatagataaactaataatgatttagatcgccgaagtattcaaataactataattacagaggcaaatgttaacttaaagaagaaaaactcttttagaaactattatcacaagatgaagtgagaaatgaagacataccctgttggattatgtgatggagcccatagaacacatatcactaccaagataatataagcgagcaaagtccagaaagcagggatgatccatgctcttcgccacagttcgctcaatgggtcagtggcattgaagtacaactagagcaacaaagatcaatagtttaaacctcaattaggtaactcagagaataaatcacttttaagactgataaacaatagaaacaggattttcatatgcagaaacttacagaagtcattgtcaaacgaccccatttcattaaaatcgtattagaagtataaactccaacaaaatcaaaatatatatatattccttgctattatcttctttttagttataagacagtaaaaaggaaatatggtatcttaagaatataaccacttgctatttcctgctagctataaggtgtaatttggaaaaatgaaaattaaaggaaaaatatgca

SEQ ID NO: 77423 - DNA, 2438 bp, Cannabis sativa
agccctttccaagatgatttatctggcccccaggatccctttccatatcgcttaatcagaaggttttggtttaacaaaccaaaaggactcccaagaacaatacttttcctgaaaagcactagcccaaggcttctcaacattataggccatatcccaagccaatttagccaccaaagttctattgatatccttatacttcttgaatcctaaacctccctgctgtttaggttggcatagagagttctagttcttagttcccaagaaatgatacttctccaccccttccgttcatcagaacctatgaatcaaagcatcaagctgtctacacaaaaaagctagaagcatgaaagtggacatagaatagatatacaaagcaagagccattgaattaaaggcgaccactctcccaaaataagatatggctctcatcctacatccttccaatcttgctctcagcctctctttgaggaaaaagaagtcattgatacgatttctcgacaaaataagaagatttcccaggtaaaaaccagtcgcattagtcaattttattcgcaatgatttctcaatttctttttacctgccactagggaaattcttcgataaaaggatactcaacttattcttactacacaattggcctaaccacattccataacttgtaatgtaatgcctcaaggtcacaaccgcctatttattttctctcgcaaagatcattgtatcaactgcaaacataaggtaagaaatcaagatgacacctctcgcaatattaatgcctttgatttccctattatcatgagcatgttgtgacaacctttataaattatcattacataaaaggaataagaagggtgagataggatcaccttgacgcaaaccttaagacggcttgaaacgcttcaaaggcttaccattaaggagaactgcataagaagcactcgaaacgcaggtcataatcagtctaaaaaaatgctagtgaaaccatgtgcacgaagaatagttttgagaaacttccattcgatcttgtcataagccttgcgcatatcaattttaatcgccatcaactccccttaatttgcttctattattcctaatcgtatccgccacctctagagctaatagagtagcatttgcaatccatcttccaggcataaaagttgactagaaaggggatacaatcttatccacgatccatctcaatctatacgacaaaatacaaaatacaatcttacacgaaaaataacagaaacttatgggcgagaataaatccaccctatttgcattgttgaatttcaggataagagaattgcaattgaaatttaagtccgggtccatctaatcaccttatcacccacaatgtcccaacatttcctaaagagcacacctgacataccatcggaccaaaggccttaaggggatgcatttgaaaaatatagcttgagatctaatacactgagggaataacatacagggagtcattctcttcctaggaaggagaaggaacaaccaatctaatttttgagttttataaacccaaagtgtatgttgcatcaatagaaccactgacattgcaggataccttacagacccattgtcattcttagctacgctggataaaaacacagctttaaaacacaataaaacatgaactttggttccccttccataaggcagaaaggatattggttgcaaatggatttataagctcaaggaaaatccatatggtaggataaataagtacaaagcatggctagttgcaaaggagtttctccaaacctatggctttgattttcatgagacttttagtcatgtggtcaaccacactacaatcagatttattcttataataaatctcaccaacaactgggatttacatcaactagacattaataatgcatttctaaatgaatactttcaagaaaaagtatacatgatacaaccactaggttttgaagactcctccactccaaattcggtatgcaagttacataaatctctatatatgaattaagacaagctcctcaaacatggtatgacaaactaaatgctctactctctcatcacttaggtttcataatgcaaaatcacattagtctctattcataagactcactaatcaacacattacttatgtcttggtctatttagatgatataattataacatggagttctctctctctatagttaccgctcttatagtctcaattttctctcaatgatcttggaccactcacccatttctttggcatttaggttcattacattgatgatggaatcattctatcttaaaagaagtacattacagatatcctctgtcgtgccaagatgaaattttccaatcctttaacaacacccatgattggaggtgaaaaactttaagttgaaggcaatggtcccatactagtaccataattaaaaaaaaaaaaaaaaaaaaaaaaa

SEQ ID NO: 77424 - DNA, 7618 bp, Cannabis sativa
aaaatcttaaatgaaactagcaatacgtggttcggcacgtacattcacctagtatatatatatattataaataaaaataacccaggccaacaacatttaaatatagggataattacatgaaacaatattttttttttgtaaaaaacttatatttttatttaaagatttttttttttacagttttacaattttttttatagaaacaatacgaaaataacaaaaaaaaaaatacataaaaataacatccaaacaatattaaaataacaaaaaaaaaaataatatatagataacaaataattaacaacaaattaataagaatacaacataaaaagaccgtattttctaaaaataaaatcataaaaatatttaaaattctgtacaaccgtattttgtaattttctttggttatttttatgtatttgtgaaataatcccttaaatatatatgtactcttaattgaggtattaccataaattaattgatagtattaagaaaattgggatatgttgagaactatccatttttattacacattaactacttaaatatacctacaaaataattataattcataaatattatctttaatatataattaaaatactaaatataatctcacgtaacttattaaaaataatattgtatttaattagaaaattctctaatttttacaattcatatgggctaaggttcttctatcggctcaaaaagaaaataaaaataataatttttttttttatttagcaaaaaaaaaaaagagaaaaaaagaattgagtttgatttaaagattgtttataatttttttatatataatataaaaagatatatatgtttttatatttttgttattaagctaaattaaatatataattttaaatttttgctattacatcaaaattttatgatttaatatttttaaaatcaatattaacaattaaataagtataataatcattcggtaatgactattaagaagttttggttctgaatcaacttattattataggaacttagggtttcaagtatacctagaaagttgaataaccctaatgaattttccaccactacattgtccacttttttctttcttccttttttttcaaattaaatttattgtacgaccatatcctcctcaattgaaacaaaattaaagaagatgaaattattagtagatacaaaaccccagttgggaatttctcagacagattcacatgtacccgaacacaatttttccttttctttctttatttctctcatatatattttctcaagaaaatccaataaaaagatacaaatttatatgagctctatcgacatgatcattgccgatgcttggaagcatcttccaagaaccttttccatctttattgaaaaataggtgaaaataatagtagtttgctttccaccattttgacttctatataaatatatgtatacattaattatgtgtatatatattattatatatattattacattctgggcaacatagtccagctagcatttgactccatcctcaaaaagaaagaaaattgctactatagctctttatcaatcacctgaataatcataaatattcgctactagatgtcatgatatattttttcatcattactataggaatatgtatataaatatatatcaaattatatattctctggatttggaatatattcactgcagttggtccagggtccacaatttgctactcctctccacatggtaatcatagcaatccagcatatatgtgtgtgtatgacaatcatcttgatgtgcaacttaagttaattactattacttattaattaagcacatatatatgtgtaaagtgtaattaattatcaatgtattttttctgtttgatttattgctgtaattagatcaacagaaacgtattatatatctaaatttttgagcttatgatttttgagttttcatctagttaaaacaagcatatatatatatataatttacgtatctataattgtgtacaagagttcatggctcagtgcctataggaagctaatttacatgtataattttacatttagtgcatgttaaacacatacaaatatactcaatcaagaaaaaatttaatgaagagagaaagttattgttgagaatagctatagctctcagtaaaatatctgtgagatctatatagctcttaaattcaaacctgcagggcatctattgtacgtattatattagttacaacaactatgatgtatttatatatatatatatacataaataatatgtataaaagcaaaatattaaggaaatagtatatgaagaaaatattttacacaaaagaagagagagagagggaagaaaaaaaaagtcatcgtaaactccaaaaaaacaaaaatatgtctttacattaatcaaggctagctcctgaaaaatacaatgtctgtatatctgatattggcgcttgtatatatatttgtacatatgatatgaattaatatgaatcaagagtaagtagtgtgtaggtgccaaactcaacaaaaggggccccttaatagccagaaaaattaaaatttattgtctattgtgagttacagaccgaccaagtaactaaatagtaatatacatacaatattagtcggtccaaaatctatgaactcttgtacagaaacttcgaatcatagttttatttgatgagaaaccattgactttttttatttttatttgcagagacacacttaattactatttcattaataataataattccaataaaaatatatatataggggtaacacttgggctatactatataggccttaattagatatatcaaaatcatttcctatgaaatatataattaataagtcagtgtctaagttctctgtaatatttgccaatacaaatcatagaccccactagttctgcaaatctggacatgtccacttgtctttttttccctttcgtacgtacgttttccatcacataatacataatccaatttatcctataattactagatcattaatgcatgttatatatcttttaaatactaatcaatcgatcaattcatgacttatatataatattatatacaaaaacgtgcgtaggtgaataactgcaaggggtgctatatatattaagttattaatagatacgtaataattatagtagctagaaaatgaaagattgtgataatcaagttaattgctatagacccttaataataataaaatgttattgtttatagagtttgttagttaacacttgcttttatgggtgttcgatagagtttgagagggatgtgtggtgcttgttgaggtgtgaattgacctttggatgagtgagtgattcaagtaagtgtaagtgaaagctctctctttcttgtgtttcgtatttttgggcctttggacccagcaaccatgtgcctattctgacgctttattttctctctcttaagtcacaacaagacatggacacagtcacgaacacacaggaaaaaatctgtgttgagtacgtcgagagaaagaccctcatatatatatatatgactcgtcaccacaaccccacgcaattttccatacaccttgtaattagacaatcatacccttattcattaatttattatatacatatcagcaatttttattttctttaaattcattcagagtagttagtattattatataactgtatgatgagacatctctcctgcaaattatcattaggcaattaatggttcttctctggccatttcataaccaaccatgcctcttttccgatcctagtaatactatagctacggggaatttatttttgtgaatcaatattagtatataatatgtggagattaaataataataatatataatatgttactgttgattgtggaatttaattgatttcttaattatatagtttctattaactcaagaaagtaatgaaagtaataaaatatgatgtgatgatgtgaatgtaaaaggcaattaaattaattatatataagtatatcaatcatatatacatacccctttaatgttaacgttgctatacatttacacaatcaaaaatggataaaaagttgacaataattgtcggcaaaaaaaagcttttacataacagatttgtccacttctgaggaacgatcaaaaatatttcatcatatgtttatatagataattaaaattatttaaataataaataatcatgttgttctataattagtacctatagaatggaaaactaaaataattaaaacacataattaaccggctggcgtttggactaattcaactttatcttgacatattttatcacataattataacgaggcttaattaattacgtgtgggattagttcacagatcaataaatggatggttaggatctgttaggtatttccaggacattcaagataaaattcagtagcagaaatttgagaaaatgatcaattatatataattcaaatgcaaaactagcctaagatcaattaatcaatctacattttcaattaatatagtcataataatctttgttcaaacccgtcattcatacatatttcccattggcacggagagtcatagacagggccctttatatatatatatatatatggagttaactatatatataacatgtggctcttatgaaattgataaaaggggatgatgccctgggtggagtggagtgtttaacttgttcaaacttcatatatctacatggtgtacgtctcataaaaattgtaatatttttcaaaataaaatgtgttggcactctccttattttaattaaatactatatatatacatataaatgtgacctgtatgtctcaattagaatgtttataattagtgcattctttagttaatattaacgtattaaatattggtactattaacacctcattaaaactacttacatttattttcagtttaattgatccaaattttctaatttattgtatgaaatatttttaaaaactgaaaagattaatcgtattttactactactaaaaaatagttttagttgccaaaatccctaatcataaaacttcattgtatatgtacgtcccatatttacaatctaatcctaccgccacccttgctcatacattctttttcttatttctttatgaaaattaaaggaaaattgcaaaacttatcagaaaaaaaaaaaggataattgcaaaaaatacttaatatttaaaataagtaacacttaaatattcatattctttctaaaaagagaatactgaaagttggttaaacataacatataaatatttaatttttaacgaaaatatttttatttatttgcatgtttatatcacccaaataattttaaaaaagtttattttgaattataaaaaccatttgagttatagggaaaaaatcacctagctaatactaaaattaatacttgacatgacaataatttaaagggaaacttacacttaccccatatattattttttcagttttttttttttttcaaatttataatttgatgaattgctccaattatttctctaatagtttttatgtgggttgctatgtggattttagttacgatttgagttgttttgttaattgctattagaatttgtgtagaattccgtaaaaatacaaaaaaaaatattttgaaatataaaaataaaaaatcctaatttaaaatactgaatactatatattcaaagatcagactgaaaatcttcaaataataataataatatgatacaaaaatatgtaaagaaaaattaaagaaaacttgttaaataatgtcaccttatttgacactcacagataataaatttttcctaatttttataaaaaaaaataataataataaattgttttttttttttttaggaaaataataataaattgttagtccggtttaggcagaaaatctccaccctatttgttagggcagcaataccgtcctcacagaaaaaatttctatatttgtgtgtctaatagggccgactaggaaaaggttacccattttatttttctcctcaaatataaaaaagttagtattaattattactaaataataaataacaatcccaacatataatacaatgtatggtaagaatagatgacgttaagagttagctaggtcattgctaaagtgcatcacagattcacaaatatgattccccttttgtgtttgtcataaaagtgggacccagtaatagtcaaaactcccaaccccccacaataaaagcgacccatcaatcaaatttcgctgttcatcaaaagcggttttcttataagaaagacacaaaacacacaccctcctatcatatattgtgggcgctgcctgttgatttcacctcaccaccatcatccttattataacttcatttttattaaataaacatctaataattgcactagactaaagagagtctattattattattaatattattacaaaatagggatacacagctatatataaaataataataataaacatgacttacgtaggaaacgaaatcaatacctctctattctcgtcctcattctaaatttttcagagaaaaaccactgcctgcctttacgtttttcacatcgaaaaaccatggtttttgtattactctgtctcttagctatatatatataaatattaggtagatataatatatataggtggaccctctgtactcttcgtagtcttgtcacatgtgcaacaagaaccgatatgggaaaggagcttaagcttcttccaggtctaaatagatcgaatctctaattaagacatattttttctttaaaccatcatcatatcgatatatatatttttttcattgttatcaattcatttaatttaatgacatatatatttatatatttaaagctgtttcagtccagacgtgctacgtaggcagtgtcatgattttctcgaatagggaactcaactttgattaacaactttcaatcaaaagaatctcatagggaaaaaaaaggaaaaaaacttttcaagcaaaagaaatgtactgatcatgcatttaaatatatgtatatactagtaaatgtacgtatatgacgttatatatttatatgacatatcattatttatatttacaaaaatcattagcaataatatgatgaaaaagctgttaagtacaaatttagtaacctgatctaacatcaaatttatattactcaataattaattctttttcatcgatctaataaatttcctgccaaactattaatttttttctttttaaagggtaactaattattaataagtttacagatcctttagcttttcatattgagaaagaatcatcaattatttgcttccaatttagtgagttccttatattaactcatcatctttctctatagatttttatggtaattatataacttttgtgttacattttggttgattggttttttgtctaattttttgcaaagcatattttttcttttacccatacttaatagcttttctcatgattgatcagttttttttttttcttttttgtttttttttgtaaagcggtcagtattgttatacacatatgctttttgtatttagtaagaagtaagaacattgctataggcaccttgtgagttgtgacaacaccacagttttcctcgtattaaaataaaatatgtaatttaga

SEQ ID NO: 77425 - DNA, 1099 bp, Cannabis sativa
aaaaactaagtggtaatgaatagattagttcgtgctcttatatttggctccatatttttgcatttaattcatctaggataatattgtctaatacactcaattgatgagaattttttatcatgtttcttagtaaactaattagaaccccattaatcccaataaaatttactattgggtattacacattacaaatcacattctatatacactactacaaaagaactattctcgtctgtcctcgaatcggtttttctcgagaaccgttactaataaaagtaagtgactattagaaaccgtcaactatagttgagtattctcaacaattttaaagggttctttagtattcccgacggtgtgaaatagttacgagacaaaaagtgaaacaaagcattttaaaaggaatcctcgactgttttaaattgacagggattcctgtgtatatataagacccacttaaacgtttcagatctcacattcattctcactctcagatatctctctgctctttcatctgtgtgcaatcactggcacctcctctttcaccctgctcgctctctcattcaaacggagagcaaccactatcacctccttcttctccctctataatgatcgcatccttagaatatggattagagagacaattaacattaattatttataatataggattatatgtgattatatttattatgggtcctatttttatgaaataggaaatagggttataatttattaattctgcaaattttattaaactctaagtgtatggtttatgctatatgtgaaaattaatttttttatgatttttgctcggtaacgatgaaaactcaactgtttggccaaaatatcacagtagtttggattagtattctagaatttttggatagtgggtcctgaccattttatgataaaattagtggttacttagtagctaagtaagagttattagctatttaccatttaagctttatgtatttgattttagtggatttttatggatttttggagattataagctgagtgcatagaaaatccttgaagtaagtttaactcacaaatcaaacaactttatctctcttcaacctctctctctctctct

SEQ ID NO: 77426 - DNA, 1037 bp, Cannabis sativa
  modified_base (912)..(916): a, c, t, g, unknown or other
aacaattagacattgtctttccttttctgagtttttacaaattaatgctagttttatgattgtatgagattttttaattgggattcattctccctaattgttagcctcattacataactatagaaatgatatgtataatgtacaatcaaatattatacacaatgatatgataatctttttaatcaatcacattaaataaatcagtagttttaattatttcactaaaagtaatattatttgggtacatattaattacacataaatataacataaacatataattcaattataagaaaaaagaaagataaattttattagattattacaattggatgtagtaaaaatgatgtgtaataaataatattttttcaacatgaattgacatacaaaccagaacaataatttattggattaacttgtgtgttttgatcattaattatcatcacaagaagttgcaccaaacttaatttgcatgagatatataaagatagaagatgccaaaaatgatgttggggaccccatatatacatacacatatatacatattatatatatatatatatatgtttatatgagttagattaatggcagagcatgtaagccacattttacaaaacggttagagaaagcatgcaacacaacacagtcttttatctgaattagccgtaccacgaaacagtggcatccatactacacatacattcatttttgtttttaaattattaaacaaaaatgttaaaaatgcaatattgcagtgtctagtaccacctaatatattatattgtaattaagtgttatattccactactataaaaaaaaaaaaatatatatttttttgtcataataaaattagtgactaaaagtgaaaaaattgtgactaaaaaatatgtagttaaaagtattagtcacaannnnnacaatttgttgtgattaaatgtgtttttaatcaaaatacttagatgattaaagtgaaatttgtgacaacttatatctaaatactatgttagtcataattagtcacaaaaaatatatattgc

SEQ ID NO: 77427 - DNA, 1030 bp, Cannabis sativa
agagagagagagagagataaaccaacaagttaaacaattacaaaaacagagacaaattacatcaaatcctcacatgagggaagccatttcatgaatggacactccctttaacatccctccttgaactctcaagaaaactatgccttttagtttattcaatctctctctaagcaattaacaaatcatctcaaaaccagtaaaaaaaatcagtaggcaagaattctttttaaaggtgtaggcagcaaccgattttgaagccaactgaattagttggttaagtaagttggtgatgatgtggcaaactaacaattcacatgtggcttaattacaacatgatatggtagcaaatgtttggtggtaaactgtggagaagtgtttagtcttttgaagtcattttcaacttcattatggtggagtgtgttgatggcaaagtcaatctgagacacaaagtctctcagtgagtaattatgcacttaaaatctcttcagttgtgtattcattcctcacacctttgtgtgtggttgtcatgcctgctcttaaccaagtctctacccattgatcatgttctttatatttgtctttgaaatattttacatctctgatgtcataatcttccaacaaagcaatccatttctcatcaaattcttcgacggtgtagaatctatacatcaagtcataaaatgctgtcttgaatgaaggatccgtacatttcttagttatatttttttcgatgtgccacaaccatagtgatgaagtacacttgaaagcaacaacttaatagcaaatgccattcttgcatcaccattagtgagtactacaacatgctttttgttgaccatgcaatcaaggaacccttaacatctagagaaatgtatcttctgtctcatctaagagaattgcaaggccaaaaacacagtctgaaagtggttgttgacgccgacaaggatcgccaaaggcttatgatacttgttggtcctttaagtggtatcgaaagccagaacatcaccgaataacatgtaatcccagttgg

SEQ ID NO: 77428 - DNA, 688 bp, Cannabis sativa
agtctgtactgatgaaactgaaagaaaattataattttataaacattgggtacttatgccactaaaaaaattattgagattatgctgcttacaaacctaattgcctaagttatcaaggactaatcaaccattagtagggttagggaagtgaggatacaactttgcaaaatgtggtgaaacatgttcacattagagatgatgatgggatgtgagtcggggtggtgagagttttgattcacataacactaaagttcttctcttgctatatatatagatataaaaaaaaaacagaaaagaaaatatgaaaaaataataatatatatacatatatgtacaatcatagtattaaataaaataagagagaaaaaaaaggaagcacgtttgaggctaagtttggggtgtaccacccctaatcaaagaaaaatattgttgctttttctctctttatctagttggtttgaatatatatatatatatatattatacatttagcaagagagttggaattggatcgagttgtgggttgagaatgaaattttgggtgagcgcttgagaaaaaaaaaagtccttgataattgaggtaattaggtcatgagcctaaaaaatgtcatcctttatcaaacccaaacctaaacctcacattatttcaagcctattaaagtcgttttgatctaagttgtaaagctaa

SEQ ID NO: 77429 - DNA, 763 bp, Cannabis sativa
gtagctatgaaatctcaataattaaaaaggctcgatcatcaaagtagaaattatcaagtaatcctaattatatgatctaaaagcaaatatatatagttcctttttctggtgcttctctttgattgatctattgttagaatatcttttggcattttggcatttttttttttcaatgaagccttggtttttttttttttcccagtggccattccaaaacatcaacatctgcaccttcaaatctaaacttctttttaaatttaattatattttctattttatcaacgaaaaattcattaccattgaccttatttatccataaacaactgacagtcacaattaaggattagacaaaatacgagaaagatttgtcttctcaaatttgattgtttattcatctcttttctttttttggaagtaaacaaattggatggaagtatatgttggcaatgactttgtgaataaatctgtaagattgacatttgattgaatatgttggacatcaatatttactattttaaaatgtataaagaagaatttggtaaaatacgttttaaattatatctccttcaacgtacccctttttagttgagtgatgcaagtagtatatttttatagagaactgttagtgttgatacttctttattgagtgtaatatgtttcccggatatgctatgtcaatgatttcacttccacatattctctacttgcttcataaagtataagtatatatgttagtataatttaaagttgactcgttaaaaac

SEQ ID NO: 77430 - DNA, 5132 bp, Cannabis sativa
  modified_base (2876)..(2876): a, c, t, g, unknown or other
ctctcacactcatgcattttcccttttcactctaaacccccacttttttcgtttcaaggcttactctgccaaataccacaacagataactccttgtttggttcaacttttaaaaattgcttttcagtttttgaaactttaaaaacatttctgctgttggccggtttaagtacaaaacccagttttataatagctacctatatttcttgagctttcttacgaggcatgatcatatgtataatattttaatatcgagtctaatatataatacttggtaatatatattctacctattttatatatattatatccaattcaaccttgttctttcacagctcctttttgaactaagaggcgtgctaatttatgatcacgtcattcacccctcattaaaatctatttattatttttatttaatttatttttatatatatattattatagtgtgagttgtgacatatatatttataataattaataataatatttaaatattagaaccccgttcttggtgcatcatttccaccattcaccaacacaagacaacatcattagcacaaacctctacttgtccgtttctcagcctaattatataaaatatacactaaactcatttccaccatttctctctctctcctcttggtttttatcaaccaaaaaaaaatcatcatttggtttctctcttcaccttttcaccttttttttttaaaaaaaattaattttttttcttttttttttttcacaccaaataatggggtattgtttatataacacgcgcttaaataatatatatagaccaaaaagtaaaatatataagaaggtgttgtttaccaccaaatgagcttatgattatctctgataacacttgtcacctacataataatttggaagcttcatattattcctttttacacaaagttaaacttattgtgttctttttactttttttttttctttctcttctcttcttctcttatataagcttcacatggttatgatttaaggatgatgaaagtgaagaagtacttcttttgttcatgagtattaaattttggtgttgaatttgatgcagcatagtaaaaaaaaaaaaaaaacaacaacaacaacaaaggaataactttaatggagtccatggagtcaagtagtgtcccacctggattcagattccatcccacagatgaagaactcgttggatattatctcaggaaaaaaatagcttctcaaaagatcgatcttgatgttattagagatatcgatctttacagaatcgaaccatgggatcttcaaggtaagtactaattaatatatatatatatatatagtactctagctagggtataatgagatcatttctccgaatattaatattatttttttgatgatttgtatattaatatgagttagttagggtttcttatatatattgttgtgatgatgtatacagagagatgtcggatcggatatgaagagcagaatgagtggtatttctttagccataaagataagaagtatccaacaggaacaagaactaatagagcaacaatggctgggttttggaaagcaacaggaagagataaggcagtttatgataaggcaagactcattggaatgaggaaaactcttgttttttataaaggtagagcccctaatggacagaaaactgattggattatgcatgaatacagacttgaatccgatgagaatggtcctccacaggcaagttctctctattatagatctcatctatattaattatttccatatatatatcatcatcgatctatctatacaattttcttatagtactatagtaaatattgtgtttatttcttacgtagactagttgttaaccattaaaattgatccgcgttagaatgtttgaagaagacttccaccaactctctcttaagtcaaaaagtaaataatatatgcttttccatccatattatttcccttttcagtattaggtcttctttcttttcttcactcatttttttttgtcaaaaagaatagaaaaaaaaaattaaattaaaaaccgacacattcctatcttaattcatgcgtcactttttgacatctacttcttcttattctttaccaaaccctatagaaacattgttgactactttgacatataagtttaataataaataaaaaaaaagttacccatcaccttattttcctcaaaaactacatttaaaaaaaattatatcaaattattaaattaaaatatataagattttaattgcactaataactaataattcgattattttctcgatttcaggaagaaggatgggttgtatgcagagcattcaagaagagaacaacaagcaatggccaaactaaaaccatagaaggttgggaatcagcaggctacttctacgacgaatcgagcaatggagtgagctcagtggtcgccgatcatcatcgtcgtcatcatcatcatcatcatcatcaaatcgataattacatctcaaggcacaacaacaatcctcaacctcatcatcctcatcatcatcataaccaaagcttcatcatgtgtaaacaagaattagaaggagatagcttattaagcttcaacaatcttctgcaacaaaatcatcaatttgttcagcaacttcctcaacttgagagcccttctcttcccttaaagaggcctgcaagttcggtttctttggtaacagaaatagtcaacgaagaagatcaacataataatcaagaccaaagtgatgatcatattattaataacaataataacaataatattaacaagaagaagaaagttgttacaactgattggagagcgttggacaagtttgttgcttcacagttgagtcaagatgatcatgaagatcataataataataataatantaataatagtaataataatgagtcaatatttggagttagtagtcaggatcatcatcatcatcatgaagagacagatacgacgtcgtttatgttgttggctcagagtagtatagatgaagggaacagattgaatgccttcttgaactccagctcccttgattgtgactttgggatttgcatatttgagaaatgaattattggattaatattgctatatattggtacgtatatatatacgtataatgtacgtatatatatagtattgtgtagtaaattatatatcatgaggaggagttggtgatatatattgtgaatgagtgaaaaaattaacttgaagctctctctctcttccctctcgaataatatgcattaatttttctctctctatatatatactctcagcttggtgagggtgagactatatatctacctatgaatatataggtgtaatgtatatgtggcaatattgtaaaattgacacatgaccaaaaaagaaagaagaagaaggtggttcttattattttattaataatatatataagtgattatttcgtatcacaaaaatagtgtgtttatatttttaatatttatttataacattttttgttttaggaaacaaattatttaagatatcaatttcattgaaatgatgtggggtgaaacttaagaagttaaaattaatttactagtaatttaaattataatgtgtatatatataaatcaaaataaaattatatatagaaccataaaaatgtagcctaattattaagaaatatataccttaactgtgttaatatttattttaattcgaataagtataaattaaattagaacttaattggcccttatttttaaggggaattaattaccctataatatactattttttttttaaaatttacgttttgagtttttaaagtggttgcagcgctaattgcaataagggtttccacacaattccgtaaaaatgttaaaaaaaaaataaaaatctgaagtgtaaaaatgaaaaaaccctatttttaatataaatatctatttatacaaataaaaattatatataaatatatacatacatgtaaaaattattagctgttggcccctccaaagaattataggttggttctgctaacactagtaccattacaaagtatatgatgtaataattaacgatattttataaaaattattatattaaataaagtatagcattatttattctttggcatattatatatctaatctaatttaattaattagctaggcattatatatatggtattatatatttgctttaataataagtacaacttaaattagctaggcattatatatcattcaaatcgatatatttatatattatttatgaacacgtaataactataattaataaacttgcacacttattatatatataagcacaaaattttgtgctagctattaaggactaattatgtagattagcctttattcagaaaaaaaaaaatagacaatggatgggagaggataaattaggtactaattgtatataaccaattaaaacataattatttatttttgtgggataattatatacataattaggttgcagaagcgtttttgggatgttgaaccgttaacaaaaaaagaagtgaacattgtcgaataattaatcatcgcctctcatcactctttttctgagcttctaattataatcacctatttatttattgttaattactatacaatttattccctaggctatatacttaattaattattatatcatgtattatcattaatctcgatcggaaaaaaaattaaaatataacattttctactacgtatactgatttcaagatgaatcgacaaaaagctaacccgacaaaacaatgaaaatcattaatctcttacaatgctactaattcctatatatgtttctggtataggttctcttttctatcaacttcaattcatattgaacttcgaatttcatatataaaaatcaccttttaatatattaatttaagagtaatgatatacgtgcatacacacagatttatatatgtaataattttaaccaattatatttgaaaaatgctaaaaagcaaccgtggtgtctaacacctttgtgagatgtaatatcactatttgtataatttaatatcggtcccatttattttactttatttaagatattaaaaaaccgacaaccaattataagacgtcacctagctctagggatgcacattttcctatggggatggtgccccgcgggga

SEQ ID NO: 77431 - DNA, 832 bp, Cannabis sativa
tttttttagaataaatacatgttatcataaataaaaaagtaagtcattacaataactgagtaaataggtggaaagatattctccaactacaagcaaatttcatccacccgtaatgtaaatttaaccaaaccgtgagaagtcatattaatagaatccttgacatgagagatattcacatcaagaaaaaaatgaaagaagactagaaatatctacaattaagtcttgataagaaaaaattatagaagaaggagattgcaatgcattagcaactagcagtgcattagattcaatctgagcaattggtagttatcgctgagattaggactgaacattttgaccgagtttgacctggacccgaccaacccactcggacccgacctgctcaactaaaattttttaaaaaatggcccattctgtttgggcaggtcgggttcaacccggtacaccatcggacatgttcgcaggttggttttttgtgagtctccaaatagctatttttttatctcttctggaatatgatggcaacctcagatacttcttatgacacttgcaaatgggagagagctgtttgtggaaaaaaatttgggcagcaagaattatgttgggagagaaagacatcacagacttatatgggctaagaacttgacctaaagcgcggtggtagacatctaaaactctcttatttgcaaggcaagagttctcatttgcttgacaaacaaagagtctatcataggcaaatatcaagtgagagatttgggcagcaagatttatgttgggagagaaatgctaaaatatacttgtagtatcttagagcaccaactaattaaatatc

SEQ ID NO: 77432 - DNA, 643 bp, Cannabis sativa
gaggctatccaaaggtgcagttaaccgagaaatactgcacgaggaccctgaatgtaacctccaaagctcagccatgacacccatgcgcacacgggggagtatgcattgcacactcttaagatttggctttttttttttttttttttccattttttaacttctaaaaattattttccaatgaaataaaattcaaattttggtagaattttgtgtagaatcttattttcttaaataaaaatctaattatcaagttaaaattaattttattattaatttaaattgattttatatattagtaggctttaaatttgaaaaaattaatttctcagcaaacttactattttggttatttcgaaatttgattattttttttttgttttatttattaattttaattataagatcaaatacatacatatttaattaataaaatatgaaatgatcttattttgacattaaaatagtaataaaatttaaagataatctagataatttttaattgctaactataaatatcaatttttaaaatatttgttgttttagatatattttattaatttaaattataagattagataaatattatttatatggtattttattttattagaaatttattttattaaatttatattttgttaaa

SEQ ID NO: 77433 - DNA, 2204 bp, Cannabis sativa
ttattttttaaaaaatataataaataagtaaatatatttttagtacaaataaatttattattgcgtcttttaataaaaacagttttttctcaaaataagtttgtttattcttccacagaaaataagtaaataagtcattgctgaatttagcaagtggctgggagatattgagtggctgaagagaaccaaagagtgaattgtttagttttcaaaccctctcagatcattataagataaagtcgtgaatgcagtagtctcgacaactatttataacatttaaatgaatagaaattactgtgttttcgtttgtaattataaaacagtgttttatattagtaaaatcattaaaaatgttgtgaagtacagaatcatcagtcatgggttacacgagtataagtaagaatagttttgagatgcatatttaatgtaatatctaggtggtagtgtagcttggtccctgtgttgagcaatggctagttttgttggttgcttgtagtttgctttggttgatttttgaataaagatatcatttttaaaaaaaaaaaaataagttaggttatactagttttagtttttagatataactcctctataaattctttaataaattatttttgaattgtttactaaacactttttttatcacaatttttaacttttctaaaaactatagctaatgagccctatataaactgtaatagatagaactaaatgatttgatggagcaaatgattaatattaatataacaaatgatttgatggagcacattttttaactagtattatatatttaactctttatgactaatagagtatttttaatagtgagctataaatatagtatagtattattttttaaaatattttgttaaaattaaattcaaaaggtgatataaaatgtatgtcaaatttaatctaagttaaaaaattgtgttaaatttgacacaaaatatagcatgggctaaatttagcccctaataaatactaccttctttaattattatctcattattactatttattgacttttaataagatattaaaataatataaatgaaattgttttatatatttttaataagcattaatagtaatattgatttttataattaatttgcccattgtgtattaatagtatattatgagtcaaatttaatgtaaaatgtaaattatctattggagatggtcttagagtatctctattagaatatcaaaaaagtggtgtagtgttatattttagcacacttaaaaaatatttgttactctaatggtattctaaaaaatatgttgaatttagtacatgctaaaagttaaatcaaatttgacacaacatataatattgtgctaatttagccctcaataaatattatatttctttactataatgctactaattattaagatttattaattttcattcaactttatattctttatttactatattactattatttaaataataatttttgtatatctcaataaaatattaaatatctataaatataattaattatttttctttagaatgtaaataatagatcaaagaaaaaactcattttcattcacaaatttttaattttttttttattggagatgatcttatatacaaaacaataatagttatatataatatatatgttacgttatcttttgtccaacattcagaaatctatctctcacaaaatcatgatgaaaaagcctttgcttcttcattttctaaaaaaaaaaatagtcttcgcctctatatgaccacaaaacagcctcaaaatctagagagattatatatagtaccgttcatcagccatggcgttaccaagctcggctaaaacactagaagtttcccatgtcgcacctttaacgacctcaccagaatcaaacgtccacttcactctccctttaacctttttcgatataatatggttcaaattcgctccagtcgagcgtgtatttttctatgctcttcctgaaactaaacacactttcttcaactctgttctcccaaagctcaaacacaccctctctctcacactccaatattttctacctttagccggcaaaataacttggcctcaagattcccccaagcttgtccttcaatacaccccaggcgacgtcgtttcggtctccgtggccgagtccgatgctgattttgacctcatcgcctcaaaccgcgctttccatgcctccttggttcgtcctct

SEQ ID NO: 77434 - DNA, 3722 bp, Cannabis sativa
tatcttaaatagttataacgtacatggatatgaacaaaaattagattaaattttttttctggatgccgaaataagttaatggtgcataatacattacttttaagggggtgcatcgtataatcaccatatatttttttttggttgttaaaattattcagaatttattaaaagtaaaattatccaaatgtgtcactgtagagtttccataatgtttttatctgttttttttttttttttttcatcaatataatactattttcaaattgagtcgataagaaaggatattaacaaaggcaagccaagctagtggaagtggacagtgttgaggaaaggaagtaaataatggcactgttgaggaatactgcagtgcttctcaatcaccataactatgatggaccccttccatgggctgtttcttcttcttcttcttcttgtttccgtgtggtttgtgtcaatgggtcatggcgaaatacattcccatttcctatcttcaagtcttccactaaacgacctcccattcccaatgtcaactcacagaagcaccagcaaccacaacaagaggaagaagacgaagaatatcaagtactaacctcaattaaaagcaactacaacgacattatgattttggacactgcaaaatccagagttctacttcttgattcttcttgtaattggatttttttatttatttattgcaattattatttattatatgattttttgttatttgggtttgatcattattctaccttttattgttgatgcagataatgttcatagcattctttacaagcaccagaaatggaccaattcctactgggtatgacattttttttccttttctttttttttttctctcgaatgtatataagaacggatttggtttagagtgttttgttaaaatagcctgaaaattttattagcaaattaagtttattagcaaaataatcttcaatagttgcaaaaacgatcgtgagttatactgtgcgaccataaacaactattataatcgtaaaataaccataaatttacactgtgcaactattatgattgtatagagtaaattaagtgaggttattttgtaaattttagtatttcaaatagttagtggcaaatttcactttggttaaatgggtaatcttaaatctgttaattggattcgtgaaactctacttttagcaaaaatatttttagttatatctaattttactatgctctgtgaataaatgtttagtgaacttatcagtgcctgcttttagtggataaatgatcgggtttaaacaagtttaatggcattataatgagaagatggttctgtattgcttgtgtgtattaacattcactctttgtttcaaaatttattaatgttttcttgggtttctcaggatgaatttgctagcttgccacctattattccaaagggtcccattgccattcttggattggtaatatgagagtggtgatgacattttgttcaagttttactattttaaacattttttgagccaaacaggtgatgttgttaaatgttttcagggtggtggaactgctgctcatttgatgcttgatttgtggcctgaattacagctcgaaggctgggaaatcgatcaaatagtgaggactcacttgttatctctcttcagtaattccatgtgaaggttttgataaatatattgcttttgcttaatgatttgctctctcattgtcaaacttaatcctgatttcttttttgataaaaatgatactttgcactaatcaataggataacaatacaaatgatagttttatgtttaaaccattcaagtacaagcatgaaaacctgccaataagcataaatacatttatagaagacaaaaacaaacataatgattattactcaaaatttacaggaaattattccagtacagtctaactaaatattcgaaaaggactctctcatacaggaatttcacactgattttcagcagctctgtttctactcttaacaactttatgccaattactttaaatgcatcaatgtttgctggttcccatttgaggacacgatcaatatttgcttgaatgataccttagctgtcaaaccaatgtgttcaagatattttttattttgatcataagttttccacattttacccctgttctgtgatacatgcttactggttgggtattctagctgattgataaagcgagagaacattttgcactttctgatcttgagaagcatacaaatgctggtggtatacttacagttcatgttggtgatgccttttctccctcaattaatgtttctggaagatatgctggtgagatcattgtaccttatgcttctattttcaacacaatataatgtcaaaattaatactacagaacatgttccctttcaaaaaaataaaaaataaaaataagaacatgttatgcaccgatatagactagggaatatgccatttaagttgcaggtcttgtaaaaatggaatatttacactaaaattaataataaaaaggccatctctttgaatttttctggtatgtaattgttcatttatggccagaaattatttcaagtctctcccatgtttttctaactagttgttgcagtaaatgtcaggtgttattgttgacttgttttctaatggagaagttttggcacaattgcaagaggtgagtaaattttctcattttctgttgagcattcacattatgtagcttttgaggtttgatacacagataaaaacatgcctgaaataccaataaaccagcaaacattagctaagaaatactgttccattgagattgttgctactgtttgctggtttattggtatttcaggcaggtttttatcagtgtctcaataattgtaaaagaaaccaagtctctacaacgaattgaaagccgaggctctccatggatgctaagaaatacttagttcttgcataaccttttacacactcaaacacgctctatagagcagctcaccctacccaagagaattactaaaacacccttcgactcactctcacaaccagctagccaaacgaatccacttcccctgtagctgtatattctgtctattccccctccttgcatgagtaaatctcacactaggccctatcatgcctatcagatactctctttatttcatgatcatgctcaaagtttttggagaagaaaggtgtcatggcattgttagtcatctccatcctcctcacccaacttaactcttgcattgggagatgttgatggttgcaaagttgatattattttgtttgagttaaaaatcaatcaaatattatttaaatacgtaaaccaaatatacttcactgcggtcactatttttcctaagtaagcctagctattaacataaatagttcagtgttgaaatacttgaaaaaatggcctttcattcagaagaacttattctatctgagcccccttgtcactcatttggccttaaacccatggtacttttttcttcgaataattaaacccttgatactcaattgaaagcttgatggaaaactgactcgaggtgtgtctacaactaggttagagctagaaagaaagatgaagaacaagttttagcatttatgttcaatctagaatcttcaatgtacgtttattagggtgtgtttacacaatttgtcatgtttgtctgaccatgtaattacactgtaactgtgtaattagaagtaattgagggattctaattacactctccaattctc

SEQ ID NO: 77435 - DNA, 584 bp, Cannabis sativa
gttatttattagtatatatgtatatcatagtactatactaatactattatgtcaactagtatgtatataaagacttacccactcagcagcactggggtcaaggccgtcaatgagtagatccatggtccaggcattatcctcccacaacaatttttctctgttggcagtgaaagggtaagctaggcttccccaaatacacatcatgtgaatggcattgtggtgcacaactctgccttgagtgtcgatcacaacaagcataggcttcttaacaaagccccacttctctctgaagaatcttggggccactggggtcactgctgaaggatggtgaaccgagtgccattccatttgctcttttagcctatcaaacactctatacttctcatcattccatacatttgagattggaacccaaaccacttcgtattgactctcggatcttgtcatgctgtgcctcttttcagcgtacatttgttgtaagattgcatattcagaagaacgaatgagttcaggatcaacttctgtgatgaataaagccaccacctttctcttcaaatcctcaatgacaatctgttccaaacata

SEQ ID NO: 77436 - DNA, 516 bp, Cannabis sativa
aacagaacttaatgcatgccagagatagaaaccatttgattaattttgtggggacgatgatatacttggccttgttaaaagggactttagggcatcttttgtgtttttacgtatcttactttattattcaaactatcataatgatgaaccaaatcattacttttttattttagatatttaaaaaaccatacactatacaataaacatgcaaaaattaatccaatcttaaatgaaataacatttgctctcttctcttaactctacttgcccttaagacactacaagatatcccattttagatttgtcttttcttgtttttctttttccttataatgaaaaaccacttgatttacccttcgaaattcaaaatatgttatcaaaagttaataaatttgctacataattatgccaaaaaaaaaaaatcaaacaaaaagagagagatagagaataaaaaaaataaagttattaaaatctgtcacaaaaggagtagaaggaatatttagagttttcttttct

SEQ ID NO: 77437 - DNA, 3236 bp, Cannabis sativa
  modified_base (222)..(222): a, c, t, g, unknown or other
  modified_base (3176)..(3191): a, c, t, g, unknown or other
atatttttttatatttatattttgatttttttttttagtgtaactttatttagttataatctctcaataaaaatataatttgcttggtctaagtgtaggttctattgtataaccatttgtcttctacttcatatatattcaaattctatttatttttagagtaatttgcggtataaataattaagtttaactctccactgtaaataaatacctaagtttaanttttggcggtaataatacctaaattatatttctaaaactctgtaagtacttgggcattaaatgttaagtcattattcacgtgttattttcttattggtatatttaaactatttttttttttaaaaaaataaagacttagatcaattagagattgccatgtggtaatttacttaacatttaacattcagttacctaaagaagttccagaattataacttaagtattattaccactaaaaattaaacttaggtatttatttataactgggagttaaataagtatttatgccgcaaataactttttgtttttactttgtattttgttaaccacgtgaggctagctcaagtggctatgttagttatgttgttagttaggtgtgtggtcagtaatttgttagttcttgtgtaactgtacatagttatttatatctgtaattagttatttctgttattattctttcgctttctctcgctgtatataaattgacctattgctccgttaatgaacagagttcattttctccattcatttctctctttctctctcaatctaacatggtatcagaaccatatcttttgcaagcatggccttacaacaaacataagttggaatttaggtctgttcagtgtatgtttctaagatatagcctcaagcataaagggtataagtgtctctcattaacaggtagaatttacatctcaagagatgttatttttaatgagcatcaaattccatattctaccttgtttcccacaaccattgcttctttccctgctaccacttctacttcatctgctactgttcccatcagtctctccacacataatcaatccatatcaccttctccatccccacctacttctccatctctttccacctccaccaccaatctccaatccattggctctagttccagtcacataccaaacttaagttctggttctacagccactactcctattctaccaactatcactgaacaacctgcaccagccccttctattcttataaatcaacaccccatggtgacaagggcaaaggtaggggtgttaaagccaaaagctttattagcttccaaggagccactaaccttagttgctgctctcaaggaccccaagtggcttgctgctatgtagaatgaaataaaagctcttactcaaaagaaaacttgggtcaaggttcccttacctcctggtagaaaagctataggatgtaagtgagtctacaaagagaagcaaaattcagatgacagtgatacaaagtacaaagctaggttagtggccaaagggttcctccaacaatatggctttgacttcacagagacttatagtccagtggtgaagactgctatagttaaaattgttctcacaattgctttatctacaactagtctataagacaaccagatctgaacaatgcttttttaaatggggatctccaacaagaggtattaatggctcaacctcctagttttatttatccagaagctccccatctagtctgcaaactgaccaaggtaatttatggtctgagacaagctcccaaggcctggttcaacaagctaaaagatgctctgctgtcatttggttcttgttgtgccaaagctaatacttctttgttctacaaacacactacaactcattcaacatttcttttggtctatgtggatgacatcttggttactggcagttcccaagcagctgtcacaggactcatttctaatctctgtcatatgtttgccttgaaagacttgggcactatcaattacttctttggcattcaggtgtctcacactattgaagggttgcacttgtcccaaaagaaatacattatggacttgcttgccaaaactaaaatggacaatgccaaccccttaccaacaccaatgacaagaggtgagaaattgtctgcaactggtagtgacccttttgcagatccaacatatagaagcattgtgggtgctttgcagtatgctactataactaggctagaaatatcctatgtagtgaataacgtctctcaattcatgtaaacacccttagaggctcactagaagactgtcaaaaaaaattctaaggtatctgaatggaacactggactatagtttacacatgaagccatctgcctcactcaccttaacaggtttttatgatgtagtatgagcttcaaatccagatgataagcgctaaacctccgaattttgtgtctatctaggttctaacattgtcttatggtcctcaaagaaatagagaacaatttttaggtctagcacagaagttgagtaccacagcttagctcaaacaacaacagaagtcatctggatttaagctcttctttctgagattggagtcaagattccaaagccaccaactatatggtgtgacaatcaaagtattgtccttatggaagccaactccattctccatgctagaacaaagcatatcgaatttgacctccattttgttcgagaaagggtagtcaacaaacaactctttgttcaccacacaccagcttgtgatcaaatagctgacattctcacaaaggctctgtcaactacacagtttcatatgcttcgatccaaacttagtctggtgtccttatccacactaagtttgaggggggtgttagtgatgttgttagttaggtgtgtagtcagtagtttgttagctcttatgtaactgtatatagttatttataactgtaattaattaattctgttattattctttccctttcttttgctgtatataaactgagctatttctccattaatgaacagagtttatttttccattcatttctctctttctctcccaatctaataggctgtaggagggtgcatgtgtgttggaggtcctgggtttgagttccaagttatgcattgtaatatatacatgcttaaatcaaaaatattttgtattttatttataataacctgttggaaattattttannnnnnnnnnnnnnnnctaacaagtatgttggattaacagcctaatatgaattctaaaaca

SEQ ID NO: 77438 - DNA, 922 bp, Cannabis sativa
  modified_base (891)..(891): a, c, t, g, unknown or other
tccaatccaatccgtacaagtacggatatccgcactttgcggattggattgtgcggattggattggatcgactattttatgaacactcctataattaactccctcatcaattgggtgaatcattgtatgtctattatgttgaatagttgcctaattagtgatattcaaatgagaattcgtaaaggatattaatggtgttcaataacatcactagacaccatgtggcatattcctgcatatttccaataactattaaaaaaattgttagtcactcgtaaatgttgccttatagtagtattgagtattattaagactcataatcaagggcacaacaccacgtcaaaacacgagaaggacatgagacaaaagggtttgggtaacacatttaattttcgaaccaacacgcttagcacgaaaatagcacaattatatcatttatataaaaaaaaattataattagtttaaatttttaatgtctcgcgaagtaaacaaaatctctaaaaaaatatcctagctatataaagaaaaaaaccctacaaatttattttcttctcattctccttataaataaaaattaataaaactatgaatcttatgagtgatgttgtattttttatatataattatgttaatcgcgttaattttgtaaaatattataacatatttaatcgtgtattaaacatgcgagtattaaatttgtgtcgcacgacacatttatgtttgttaatacatgtcgcaacaataattctattgacctatagtttgttaaagcataccattagactaaatgatgattggaaaaaaaaatcctacgtctattgctaattaacaaaataattacgaaaaatgtgcaaaaaaaaattattttaaaaatttatacattttgaaaanttattacatgaaaccatacatttttaatatg

SEQ ID NO: 77439 - DNA, 1577 bp, Cannabis sativa
  modified_base (1520)..(1523): a, c, t, g, unknown or other
caatatgttacataaatacatcatgacatgaatcaatcaacaacataacattgtatatttctgttcagttactctttcattgtgagaagaaaaactcaccttggcaataacaggtctggccattgaagtacccaataagtattttctctcataaatagcaccagctcttaaacaagggaatatgtaatcacttacaaattcctcttgtaaatctttcactaccaactgacaagccccactagccttggccttctcttccaacccttccaattcctttataccctataaaaattccatgttcaagtacaggaaagcaatacagagaatcaaacccatcaattgttaattaataccatctaaacaacattccaatcaaaaaaaaaaaaaaaatcaaattagaaacacatacttgaccaacatcagcagtgaagcaaacaacttcacaaccatagttttccctgcatataattcaaagttcaaaacttcagatattttattccatagtttttaatgaaaacatacattattgtagaatacgattctttctttgttttttccaaattaaacatagtaccttagccatggaacaatgacagaagtgtccaagccaccactataagccagaaccaccttcgtcagtttacctcttaagcctctttgttcagtggccatttttacaatctctctctgttttctgaggaagaaaaagaatagggttttatgacaatgagtccaaacatgaaagctatatatttaatatataataggaatgtgtgaggagaggagagggtgtcgtttcaacctataatttcattgaatctctactataatatgcaggtggactagagcagtggaatccacctcttttttgatagaatatatttttccttgaaagaaaaaaaaaatataatcacgtgtgtaacatagaagctatttatgtatgtagaacttacatataacgacatgtgaggctatctcaagtggccataggggagtgtgtatgttggaggtcttgggttcgaatctcaggttatgcattgtaatatataaaaaaaaaaaaaaaacatataaaacttacatacgatttcattacaaaaggcaaaaatgttgttgtaacatgataaggtatgttgttcgatattcgagtcttaaattatatatagttgtaatatataaatgtttaaataaaaaaatatatgataaaggattcccatgataaatagttggacttcataataatgcatgactacatatttgggtgtgtattcaaataaaatgaaagttgttaataattcaatttttgtttttgtaaacaactacagatttataaatagtttttacaaatttataaacatttgttatatgtttctacattaaggaagcgttttgttgggaggaatgaaaatataagaatgagaatgagaataagaataggaatatgaatggaatggaataaaatttaaaatgcataaaaaaatttgatagtcatagtcattcttttttttttaaaatggaatagnnnntccaccaaaatggtagaaagagcattccattggaatgctattccaatacttcaa

SEQ ID NO: 77440 - DNA, 613 bp, Cannabis sativa
ttctactgttgtgtcttctgagcggtagataaaactaaatataggtgttcttaagtttaactatgatgttgcaatcattttcatcttattttttttttgtctccaacagaaaaaatattctaaatagattacatgctattattttagcttattgttattaataaatttacataatttattaaaaaaataaaaattatttcaacaaatgaatcgccctaataaatcaaatgcacttattttttttcttcatattatatataaattatactcttatttttttttttacaaaagaagaactaattgacctactatccagtgatctcttaaatctcttttcccctccacctcatgtctctaataataattattgattacgtccttttctcatatccaactaatttatcaaataaattctggcccaagtcatatatttaacacaagtatgaagataaaaatcaaacaggcctcacattttaaaacctagaaatatttgaattgacacaaaattattacgcttcggacaagtgttattaatatgtatgattgtgaatattagtgtaattaagtattaaataataaagatgttgttgtgcctaatagtaaatagcaatac

SEQ ID NO: 77441 - DNA, 4814 bp, Cannabis sativa
tatgaaatgaaaaatacaactttatgcaatttagctttctcttccaaagaggagaatggttttgtcttgcaatttcccctcctaggttagtcaatccaatatcctaactaaactactcttataaacacatactatatttcaacatataagttaaagaaccttcaaattaattacgtcttagaattttctcatcaacaaagtatgttcatcaatttgttggatcaaattgaatgatttattgtgttaattagcaatataagttagtaatatgatccataattagcaataaccaaaaaagaaaaaaagaaattttatggggtgagagaggctcgaactctcgacctcaggataactcagtagctatgagacctacgcgctagccaactgcgccaccaccccaattgtgttctcattctcaacatatttttatctaaacattttatatgaagagtaataaaagcacgtgtagggaagagaacgaaagcccttacaaaagtgcgagactcctggcctcgtgtctcgtctacaatcaaaccatcaccaccaccctcctctctctctctctctctctacaaattcttccattacaccaaaccaacaacaaggggacttctttctttggcttttgcccattaccaacctttctctcacttctttcaaggtatattattattattattattattattattattccattttggcattgtatatgtttgtgtatttgcgttttgttttcaaactttgaatgcgttatttttcgaaacagaaaacaaaaatctggtcttttgggtatctttgaaagcatctaaatttctcttttttcagccgaagttgcatttttttaaggaaagatttcatcagtttatatatgtaaagaaaaaaaatgcttgtaattatgtagttattacaaatatttacttttctgcgcttaattctaattctattacgaaaatggcaaaaaaagaaaatttttcttgggttagttattaatctgaataatctggagaattcttgttattgtttacatatttttgtagacttcccattttgagattagaaaaagtaaatatgtccaacattacctttttaccatatgtttctgtctaatgtagagttttagataagatcatctcatctcatcttagtcttgataattaatttatgtttaatgagctttgataaactttgcgatagtatatggattttaattgggaaaacagaactatagttttataaattgaaccctttaataattctccattaatgaatataggtctgatctttttggtagcagatggaaccatttaatcccatttgatcttgttatacttatttgaactcaataataaatttctctctcacatttatgttacaagtatatccccttaatgtaaatccaatgaggttaatttttcattttgtcaaaaagaaaaaagaaaaaaataaatcacatttccatgtttgtagttcagcaaatttcccttatggaaaaaatgtttgtagattatactgaaataaacttgtttggttttgagaactgatcatttaattgtaataaacactataaagggattagctaatacttttatagttcattgtatttctatacttatccacatgtgtttcaatacctctaaagcttatgttcaacatgttaaaatatttcagacaagatttttttgtgttaaaatcatctcaaaggatgaaattgataataaaaagaagtaagggaaaatggggttggacaattcatttatactataagtatattatatatggccattggattgttatctggtgatgttatttaaagaaaattatagcttagagagataaaagaattggttacagagtgttattgatggtattttttgtttagtaattttcttcttttgatctgtttaatgcaggttttggtttgctagaacagtttcgatcgttctcgaagtgaggagttattatgaactgaatgctgaatgcattaaatggtaagaagctgaagcatgttgtttgagttcctgaatgtggaagtttctttttcagctcacttaatcgattttgtgggcacaggttatagctttttatatcttgaatggaaaacggacaagattgtttaagcatggaagtagttaataatgaaagaggtgattccaagaatcacaatgacattgtgatgcgtcgaatgaagaatagagaacgccagcgtagatatagagcgaggaaacgtcttgaagaagatctaaagaaatcgagcatgcctagcagcatcattgaacagtcaattatagtgcaccagcttagtacttcaccaacattgcctgtagtggaacccgaaccacaatctaatgtcgttgttagcaactatagcgctcgcgtgctttgtagaaggaactggaaaaaagatgcaaggagggctcattcgtgtaaggatttacaagtttaccctaatgataatcttgtcactgctcctgttttgagcagcaacagtcagatatcagaattatcctcacaaagggtatcgcgttctgatatgtcccacggcgttgttagtcatgcaacaacgccaacaatgcagcgaaccggctctggtcgaagagactggaaagcagaagcaagaaggaagcaaaactgaaataggaaggtgcctcataatcctggctttgcccttttgattgtatgggaagtagattaggtatatggttttcgggaaacatttctttcgggttttttactgaagactttgatcttctgctgttatagatgtagatgtaatgaaggaatgaatttgtgcagaaaaaaaagtatgctgagattttagacatatatacattaaattaaattacagtaaaaaaccagtctttggcttgagtgaattttcctagaaaagtcaggtcatagtcttttcttcttcttcttctttaataatgtatggcaatgatgtaatactaatatatggtttggaaggttttgataacataaatgctctaactttaggtgttattctagttaaattttcataatacacattcttgttcaacaaggacaacaatgtctgtatttgtaattaaaaacttagtcttttttaacaccaactcctattataacaactaacattggagttgccctaataaaaattaactcctatgaaaatttggtcaagctaagattgatggaattgtagctgttttgaataaatttactaacataaagttactgatgtgcacacattattaacaacctcaagatcagttcatgaaatcaatgtagatgggggaccataaacaaataaaatagtgccccaatgctatttataaactattgacactgattagagaactagtaaataagtctcttttggattggaacttaaacaatttgatttcaacaacacatttttaaatggaatgttattagaaatagtattgtattgtatatgggtcatagaatctggcttttgtttggaagctcatttaggcattaatatatggcctaaataagttgaaacacagttttcctgtggggatttaatttataacactcactcactcactcttcattttctctcaactacattttttttaagcaaataaaaaaaaaaaaaaaactaagaatttattaaccttaaagttgtataagttggaacacgttttgaaatttgattattcagaaatactctagctaggaccactttagtctttcacactagtaagattagatagtatagtaaaatgcttacgataactacaatgttttgaaagtttgggaccaaaatgaaaattttgaagttttaagggatattttgcggcgaaagtcccttaatatttataatttttatacatatgaccctaattaaaaaaatagcggcaaaaatactttatcttacaattttattgtagtcgtagccttcttttttggtcattaagtgccaactcaaaaacacgtggcgacatattattagaccacgtattaaataagctaaagaaatatgctaccacgtgtttttgagctgacacttaatgagtttaattggcgcttaataactaaaaaaggtagtaacaaaatcgtaagataaaatacttttgttactaccctttttaattaggatcatatgtataataattataaatattaagaaagtttcgttgcaaatattttaaattttaataataacaaatagggagcaactgtatataatatggcctcacctatattttttttcgttattatttgtttttatttttattttgtttttttttgttttttgttttggagaaaacttaccagaattttaaaaaataagtaacattttagtccaaattgatctctttaatatatcttataacaaatttttgaaagaaaatcttattaaaacttataataatttgtaaatctaatacgctcattatttactatgtatacaacaacatagttgatgaaatgatgattttctcaaaattaagatttaaactatattttagtgctgtaacattacctaaattttcaaagtataaataatgatatgttgccattaatgcttgatttcctcacatttttataacttttcccacgtcgtctttgttcgagtgcaaatttttctcgcaaagaataacgacatgttactactacctaatttcttactctatcaccataaatattactctccagtaaaaatagataattaatttagtgtatcaattattatgacatgctaatgctgtcaattagagaacattgtccgacatagattaaatgtaaaagtattgagccatatataaagaacatgggctactccactcattgccaattggttt

SEQ ID NO: 77442 - DNA, 929 bp, Cannabis sativa
gttgctccacaaaaaactcaaataccagtgtcccattcattttctgttctcacttcatctgttggtcaattaactgaaccaattcccacgagtgtagctcctgcagtaccagttgtagctagaacaacaccaattgtgccatctgaactaccttcctagctctcatctgaggtttctgcacctagcacatccgctcttggtaaaacacatagcatgcaaactcgtggcaaaagtggcatcaaaaagccaaaagcttatttagctactcaagttcccacatctctacaacaagctcttcaatagttatagtggaacaaaatccttgtagaagagattcttgctttaaaaaggaacaaaacatacactcttgttaaattaccacctggtagaactgcaattggatgcaaatgggtgtataaaatcaaagaaatctctgatggcagtgttctcaagttcaaagccaaaatagtttcaaaaggtttccatcagtaacttggctttgattacacagagacttttagccctattgtcaagcctgtcactaccagagttgttcttactcttgctctatctaaaggttgggatattaaacaacttgatgttaacaatgcatttttaaatggtgaattgtaggaagaagtatacatgtttcatcctcttagttttgaacaactagattctcctaagcttatatgcaagttacataaggttttgtatggcctcaaaaaatcccctcgtgcaaagtttgagaaactccaccactgtctcctgtcattgggttttgtttcatcaaaatttgaccagtctcttcataaggcatactcattttggtgtatgttggtaatattatcatcacatgcagtaatcccaagctcatttctcatttcacatctgctctaaatgctaagttctctctcaatgatttaggg

SEQ ID NO: 77443 - DNA, 1643 bp, Cannabis sativa
aaaaagaagtcaaaagttgattagtggctgtccacaaagcaattgacattcttaaattacaagcaaagagagtcacgttaaagtcaagtggcatttttcgtaattaactcattaaaacaatggcatttccatattataatacactttatatatatatatataacttataacccccaaaatcaaaacctgacctctttcatttcattcaatttcttcactccatttttactatggcaacccttcgcttcatcgccatttgtgcgatcttagccgttaatttagcactggtttcatcctcagccatagattttactggcagccaccatctgagctggatttcatcgagatcggaatgcacaggcacaatcgcagagtgtctattagccggagacgatgatctggagatggagatggactcggagagcaaccggcgtattttagccactaggcgttatatcagctatggtgcgctcaggaggaacactgtcccttgttctcgccgtggagcttcctactacaactgccgacctggtgctcaggccaatccttacaagcgtggatgcagttccatttctcgctgccgaagataaatatatatattatataattttttatcattttttattttatttttttggtgtcttttaaaatatattattacatatgtatgaatctgatcgaagattgtgtgttatatacattaagaagaagagattggaataagttctaaaaaaaaattgaaaataatgcttattacatctatttttttcatttaatttattatcaaaatatacataattttgcctctgatttttgtcatttctatttttatatcaaaatttcattatgtggtttctttatattctgggcaggtttgatctaccaatttttaaaaatttcagaagacattgttttttaattaaattttattttcttcacttatttatttattttttttaaaaaaaaaattgtggctatgaaatttcgagttatctcactattttgttttgtccttgcaacttacaactgtgatcgttttttctttttcttttatcttcaattaattgatgtacacaaataagagggagggaccacatgcctcattgatatttggtagcccttttctcattacgtgtctttgtttttttcttttcataaatatattattattgagtattgagtaataatgggttaggcaaattcataacatattcgattttttaggggaaaaggccaaattccagctgagaatttaatgaagctatacaaatctagttagacaaagggctagtgtaatgccagattgccatgatccagcacattcccaatatcacttatttttttattttatagaaaagaaaagaaaagagaagaagaaataagtagtagaagaagaagaagcatattttgggggaatctgattatctggccatacaaatgaaaagaaagcccccacatgaatgtgatctcacattcattattatggcatctcatagtgcatatcataagtttatcttttccatacattttacatcatatttctttgtcgcattataatctacagaagaaacacaactttattcttctatttttgttttaacttttattatgcctttacctacagcaacatataggactcattt

SEQ ID NO: 77444 - DNA, 736 bp, Cannabis sativa
atatatatctcttttagttgaacttcctatccactctaagacttcatatggagacttctaattatccactccatatgaatgagttaattattcgacatattatttttttttctagtccattaatgttggactagaaatctccaaaaaaaaaaaaaaaagtctcttaattttaaacatattatgtcccacctatttttctactccaatattaatgggcatgatatttatttttttatagtctataaatattggactagaaatcttcctaaatatttttcatgtccaacacttttttttgttggacataaaagaggttatttgtagtagtgttaaagggacctggtagtctcatcagtcctgctttttgagatgcactatctcattaacccgaagggctagaaatattgcttgggatgatctttgtaaatctaagaagaaaggtggtttgggtgtcaaagacatagccttataatgttttacaccacagctttagacaagatagaaatttgagaccaataaaaattaatagatagcaaaatagagtcgataagaaccattcttctaattaacataaaatttttttagaactccaggtcttatttctagctatcatcttctctactagacccttaattacaatcagattttgaaatcctttttgaataaattgttagtccaaaagctcaagttttgatgaacatagagaaacaattgattgagtttgaggctgtaatat

SEQ ID NO: 77445 - DNA, 642 bp, Cannabis sativa
gataaccactccggcacgctcacacctatgaaactaaaaccacatatttaaatgataaccacattatcacactttatgtaaactaaagagtaataatacttttggctagtaaatttggttgttttttagcattttagtaatattgagcttgtgatttgggttgtgtgtgaaattctaagtttgtattttaatttttattttaaagattgtcattttaatataactatattttttagtttggtgttgttatgttttttcagttttgctacctctttgaggacaattattataataaggttttttttttcaatgtgacggggtatttttgaagatgttatagctttattgtctaaattatcgggggtagttttgtcccatgttgctcgcaataagaattctgcagctcatggtttgacaaaatatgcccttcggttagacgataagttatcctggtttgaggaggttctaccgtcgattgtagtttgctatattgttaatcatgtgtgactttgttcaccgcgtaaaaaaatagtttattatatgtataaaataataataaaagggttttttttttcattagtgtacaataaaaacaattttattacaaaaaatgtgcacaaaaaatcaattataaaaatgtac

SEQ ID NO: 77446 - DNA, 2438 bp, Cannabis sativa
aataatatttgatatgaaaaagtagaaagtttgtttgactaaataaataataagaaaatgaataaaaagggtgagatgagagggtgagagtgaagagagatgaaaggagaaggtgcgtccacgtctccctatgtttaaacctcgtacatcctatgcttgccgacatcaacctccttaaaaaggaaaccctaattgtacttctttttactttttttttaaggaaaaaaaacaacaacaacaacaacaattattattattaattaatccgaaaataaatatgtgatatatatgaatgattaatttatttacttaaatttaatttttaagggtgataatatttatattatatttttgtaatttcagtaaatatttatgtgttattttttattagtatatttaaataaattttttttaataatttggagattaaaaattgtcattgtatcatgtggtatgaattttgattataaaatttagttgtatatatttatatatttattaagatgaatataattatataattttaaaaataaatgtgcatttttttcattaaaattattgtcaattaaaatttttttataataatttaggagtcagttgcaactttacaatgacatttttttaagaaattgtgcaatttcattaatagcaatcatttaaaataataatctgcaattcaattgggatatttttcctcataagaaaaacgactgagatttgaatcagaaaaatgagctaactaattggtcgcctgatcccagatcatttgacaaaagaaactaaataaattcaaataaaaatattacaatatcacagttaactttagaagtatctattgttcggaatgggagataatatataaatccacattaatggagaaatgtcaaagatacaaaactaatatttttgttgaatttcttagaaataaaaaggttgattttagagagttgaaatgatgaaattttgaactcttaattaaactcatcctccaatgcatctctccaatgtgtttaataattagaaaaatacgttttctattactataaaaacagctactttagtgacaactttttagttacaatataaatttttgtaagtaaatgtgatttttagtcataataaaaaattacttgtgactaaaatatattatttagataccagctgtcactattttaattttaatcacaacaaatattgtgattaaaaacatatttaatcacaacaaattgtaatttttgtgactaatacatttagtcacgttttagccacaatataaaaataataatttataattagttacaattttttttatttttagtcacaatttttgttgtaactaaaagtaaattttttttatatagtataagccaattaaatatacatcacaatagaaaataaaagtacaatttggtggttttttattatatgtatgtgagtgcaatgtaagtgtgatatttcatgccataaccaaaactatgtttaatcttcttcccctatatgtgtgtgtgattccaaattataagaatgatgaaagtatgcttattgaccaattatattcgaatggaaatcttgtgtgtgatcttcttcatcaatagtaaatattttgatacaaacttttgtgtatatcaactcatgagagaattatttttagattttttgaattaaaaagtgagttgaaggcttgaagctatatgttggagatgatctttagagcaaagattccacatattaattttagcatatattgcactaaattgataacttttggagagatgcccttaatactacatttaaaataaataaataaaaatagcattgcacatatcttaaaattagctgtcaaacactacataagtaatatctccaatgtgaattaaatttggtgccaagagtatgttatatttgacccaatataatgcactaagtcatttgtttattgaaaaaaaaacctcaataagtcatttgtttattgaaaatagggaattttttacaatttttttcttatatctttttattatatttttataaatttaattttttaaaaatttaaaaattataaaaatatgattttttttattgaaaaaaaagtgtgaaaaataacgagaaattaatattgcaacaactataaataaataaaaaataacgagaaaatcaacctcatgacaaactaagtagaaaactactcgacaatcggaggtcctaagttacattaacgataaattgataagtgtctattctaaaacacttcctaatactcgtgcataaatctaggattttttttttaccgaattatgtggtaaaaaataccttaaaattaaacatatattttggctttaatttatgtaccataatgtagagcttttcacaagtttttaaacaatatatagaacgtctaaaacggatacttaagtgacaagttatggccaaaatacaaaaat

SEQ ID NO: 77447 - DNA, 2758 bp, Cannabis sativa
aacatcctcataaggttttcacatgttaatgtaaagcttcaattccgcttttatttttctcaattttctagatggaggcagctggataaatgttcaacactaactgtaaggattccatgatgaaatttgaactaacaaagtatatgaactacaagaactcggttttacagaattcaaaacacataatgaattaaaacatcaatcagtagagttaacgagaacaaaaaatcttggtgtgtgtgtttgtgtgatagagcgggataaaagaaaaaggccaaagtcactattgtaattacataaatgataaggttggcagggagaatggtgtgcacctgtatggtatagcctgtgagaaacatgtcccgttgatcactggcgaaatttatcatccaataattaaacaaaaacaaggaaattctatttatcccaaaaggaaaaacctctttctctaacaacacttcttgtctcaggttcgcgaagaaagtgtgtttgctgatcaattttctttgtgataggaatggttttcccgtatggctgtctagatcttaattgattgtcttctacgtccgccatctggtgctttccagtcacccatgcttggagcatttcctcagtcctgggctctggcaaatactgtctttccttcatttccatgtagtatttgtatgcttcctccaactgtccattcaggaaaagcccgtgtatcagcactatatacgaactgcgatcgggactaactccactatcaatcatctcattccacaacttaaagacattatccagctgcctccatctagaaaactttcttatcaacattatgtaagtatcagaagttggttcacagcccatttctttcatcttttccaagagcacaaaggcttcttccccggttcttaaaacacggaagaaggcatgataagtctgaacagaggttgaaattttgtgctgcaacatctcatcaaagatctgtttagcttcatcgatttttcgagccttacatagaggcttgatcagtgagttatatgtgacagcattcggagtaattcctttcccttccattgttctcaaaagattgatagcttctttcacaaacctacccttagcaagagcatgaatgattgcattataaactttcctatcaggaacaatctccattgctttcattttgttaaatagccttagaaccttattcaagttacctgatttcgaatagcaagatataatacttgcaaacgaaacaacatcgtgttgaacgcctctcttgctcatctcccaccaaattctctgtgcctcgcgtggactaccaattatattacaccatccattgaggacaatgttaaagctcttggtattaaaagggaaggtatctttgttgcaaaagagtaagtgttctgcatcttgaacgttcttgtaccggcaaagagcagaaagaagtccttggaattcacccattcccacaggaaacttaaactgtttgtaaccatagaaagtatttatagctctcccaacatcatggactgcacaatatctcctaatcatgatcaaaagtgtctgtggagtgacaagagattgaccatcttttcgagttctcatttcatcaatcaaggcccacgcggtgtcaaactttctcattttcccaagaatggaaatcatcgaatggtattcgcggagggaatgagaataacccggctgctttcctgcccacaaaaagaaggtgaatgatgcttcccaatcattgcgaacttgtgcaagaacctgcattactaactctgatgaggctgttataccacattcgtcgagctttgtcctcatttcacagcgagacagttcatcccgtagtatatgcacaagagtttttatatcttgagcaagaccctcatgttctaacgaattcaattgttgtaaatgaacatcttcacaatcactgtcatcctcatccttctcttcctcattgtcatcaccatcatcaatgagagcattttgactcaatcccactacagacaaatctaaactttcactttttgagtctgaagagacataagtacagaaaggcaagacttgccaattggaacatattggagctgaagatagagactgagtggcactattccacaggccaaaatgaacaacaataggagttaaacaccttacaggtgtaagtttattcagatggtctttaaccatgattgagcacaaggctccaactcttctcatgttgctagaactctcaatggactcagaaacaccaaaactctcataaaatcccaaagcaaccaaacaaagatgagcttaaagagtttataaaaataaataaacgaaaccccacaaacataaaggactcaaatcccacaaaaacatcaacttgagcagcctaacatcaatgaccataaggtgtttgtgaaaatgactgaatgaaaaaagcaatcacaaagcatagaagtgaattgtagagtcattaccaataacaaccaaagccaaattgagaaccaaagaatgaaaattagtggaaattctggttcataaccatatcaatgatatcatacctctgtccttgtcttcttctaagtccagtttttttaagttaactgctatggtaattggagctcatgaacttcgactcatgctcagcaaattgtataaaatcaaataaaaggaaggaaaagcttttgggctgtaatcttaaagcttatgggctcggggtttttcagtttgggcttcgttttaggcccaacaaggacttgttaagtaattaaaaggg

SEQ ID NO: 77448 - DNA, 2079 bp, Cannabis sativa
  modified_base (1776)..(1777): a, c, t, g, unknown or other
taccggagcttagatcgctaggttttaggttaaaaatcaaagaaaattgagtgaggaagataagattcgtcaaagggggagaatgagagttttgttctatttagttttactatttataacttataagatataatatattaataattatcctatcatttcttagccactaagaaatctctattcctagggcgctaagtcaaattccacgtactcctaattaacctaatatctacattattaacttatcacaatattctcctcgattttatcgattaaacctgttatgatatttttggcccaggatccagtctccaaggtcgccaaacttacaaatattttgattcaacatatagctcatattacactcacccatgctatattcatctcctaatctatatacgcttatttacccacttatagctgatttaaaatttttgctaagatatagttgtagaatcataatcctacttattacctgattaactcataatataaatataaaacctaattacttaccatttggcttattgggatattacaacaattccctccttatactaattttgtcctcaaaatttacctgaataatttggaaatacaactcccgcatctgcgactctaattcctaagtcgcttcctcataaaataagttgtctggggttcaatatcatcgtaactaaaaatatgtgtcggatatgacacatactttatcaacattgagatgtggaagacaatatgcatccccgacagcgtgggtggtaaggctaatcgataggccacctgggctatctgctccaatagctcaaaaggatcaatgtatctaaggcttagtcttctattctttccaaatatatgcacccctttcataggtgatactgaaagaaatactgagtctcccacttaaaatttaatatccctacgcgttaaataagcatagcttttctatataatcaatgaagcgagtatatatcttgaactcactctatgattttataagttccttggaacttttcggtctattgtgttcttttatcacctttgttactctagtaagcaggtgtctaatatctttatcgtaccagacttatcaaagtacctaaccaatggtacatttaattctcacttttaaacaaagactttgttaggggaaaaagattattctaagataatctaccctttatcaaatatgttcacaacatgtttctaatattccattgatcctcctagattacctatctttcaagaataaaacattatattattttcactttgagctccatggttctcaataaccttcattaattcttaccattatagccaaagatatcaactttaggattacataaggttagactatttctttgtatgaatttcatatcctcatttatcgtataaattgtttgcactgatagacagcatattaactcggtatgtctaaccattacaactcggttgaaaccataagatcccacagtacatagttcataactgtatttttctattcctcctacggaaccttctaataatataatattaacaaaaaaatttattattaataattatcttatcatttcttagccactaagaaatttctattcctaaggccctaagtcaaattctacatactcctaattaccccaataactacatttttaatttatcacaatattccccttgattttatcgattaaacctattctgacatttatggcccccgatcgagtctccaaggtagccaaacctgaaaatacttttattctacatataactcatatnncattcacacatgctatataaatctacataatttataaattacgcttatttacacacatataggagatttaaaatttttgctaagatatactagtaggatcataatcctacttattatctgattaacctataatagaaatctaaacccaaattacttaacatttgacttattgggatattacatctgatgccgagggagaaccttccactggcgcctcatactgaagtaatggccaacatggagcaaccccccagtaccacaacagcatctggtccctggtattatgctggacagacagggcc

SEQ ID NO: 77449 - DNA, 867 bp, Cannabis sativa
agttacttaatttcccaataaatagaaagatgtaatattatttatcttcctaataaatttctttttccattcaaacatgtatatatatgtagagaattttaggttcatttacccttaagataagtatgtgagacctgcaatttttttttttttttttttttgagtgggggataaattatcatatcacacatttttttgtttgaaataaataattctacacaaaatactagctgtgatagtattatttggagggcttaaattatttatatagtcctaagtacccaacataaaaatgacaaataatatattgattgatctaaaatcccattcccatgccccaaacagaccaaacaagattataaattgaatccaaattggcctctttaatttattttacttggtgaaaaaataaatttctatttttcaaatgacaaaaatacccctcactcaaacaaaattaactttaaaatgaagataaatgtttctataacaattgttttctttagagcttatttttatttggttacaagttcgaaacaggaataatattgttcatatgtcaattttgtcttagccaagtaaaatttgtactactaattcactaattcaaaagggcccctatgctattattatctgtaataattgagatttagcaattcttatatatttttttcttgtaattattccttggaatattggtagaataatgtaaagggattgattttattttatttttcaattttccttacatcaacatcatcaatttctttacaaagagcagagtacacaccttgtattccctactctgcaaccatctttttttctttctttctttgattgacaggtacatattgctacaatcaatct

SEQ ID NO: 77450 - DNA, 1304 bp, Cannabis sativa
ggtccgattgttgggtggtcatgagcgtcgttggggcagtggatcatcgtggatggtggtggatcgtgcgttagggcagtggattaaacgaagagagcgagagaaaatgaatgtaaagagagaggagaatttgaaaatgagaggagtatttttgagtttaatataaaagggatttattttttaaaaaaattatacacacaaaattcagaaattaattttccaccaatgtatgcatagataataaaaaaaaacacaaacgcatagatcatgattgatgtcgttcagttatatttttaattgtaacgacaacgacaacttatgaggtttcttgcaacaagatgtttctaaaacaagaaacgtttctaatttattttcattccatctgcctccgactgactcagtggcatttcccgggaacgttttgatttctgacaattttctgtttttgttttgaaaattacatccaatcaaaaagccatatgaagctcaaacgattcctttcaattccaatcctcggggtgtttctgctgttgggttttgtgtattacatcacgattttcattttcattgaagattggattgggttacagaactcttctggctctttaaacgctttgatcttcactttccttactgctttcagtattttctctttctctgtttgtgttctcactgacccaggtcaggtcccatcttcttatgcgcctgatgttgagcaaagtgggatctcagatgaagaaaccaagagaaaagtatgttctttttaatagttttttttttaaaaaagaattatgtctcttctatttggttgatgagatgattggggttaataaaaagaatttaaagttggtaattttaattgaaagtactgaaaattgattctttgattggtttgcatatgaatctttgtttgatattttgatggagaattgttttaatagtttgaattctgaggccccaacatgttactgatgaaagtatgtgaaaggataacagaattggaatattgaaaagttaatgctggttgttgaaattgagctggaagacctatttttggctctcagtggtttaattttgggattctttgctagctagtgtaatgtagtggacaatatgggtgatatagtgaggtaagtgagggaaaatattgagttatgaattatgattgattggtggaatgttgtaaagatttgtgatttaagcttgatctatttcaatgcataggagattgaaatgttgttgttttttctaaccttcaagactgtgaaattgagctcttcattatatggtttctttctgacaag

SEQ ID NO: 77451 - DNA, 1294 bp, Cannabis sativa
ctcttccatatatatatatacacatttatatatataaaaccgataagaaggtccccactaacataaaaaggaaattgtaggtatgtgatacccactactaggcaactctctctttgtctatcgttgtcttacaccttgattggacctattaatcaagaaaaccccaagcattatgaatcaaaggggtattctgcccttcctatagatctatactagagatgtggcacttgtcattttgggaggattatgacatcattcatgacatagcactcacttcctttgaatatcaacctcacaaaagggatggtaacaccaattatgatccccaccccaccttggggttacatgctttatttttattcactacaaaaaaacaaagaaaagctttcaattcgttcattaatctcatttttctttttgttcattttcatttacaaccttattattaacccaaaatcataaaaggttagcctactcactctacttagttcttttaaaccgtcactttctatattatatgttttcatttttttatagaatatttatataaatcaatcacttattttaatccttatattatttttacaattgcattgtaatttatcttataaagtctctaataatgttttcattttttttaatgtatatacatttatgagattgagaagatatcatttttacaattttataactatatgatacatcctatatttttaacatatgtaatgttcatattttgtgcaaaatagatagaatttatttttgaaaatgaaaaggaattatttttgaaaataagttcccacctggccattgacttagcatatttgtattacacatctccatatatatagaatatgtttcaaattcgaatttccttccatattatttttttttttttgacaaatccttctattttaataaattaataataaaaataaaaattattctatttttctaatacatatgtaaaaaaatcctttttttttttccaatgtgtttagatactaaaaaatatttgtgaaaaaagaaaaactacaaaaactattttgagtgagaaatagcttctcataagatttctatcctctcttgtcactttttattgtacctgaaacacttttaaaacaacttttttaattctaaaactaataatacaaaaataaaaacatctttttatcttgccattaataagatttggtagcctgagtatcgaatttttattcatgaactcattttgagggatgagcactcccaacaagtgatatataatatctaaaaggtaaaagaaaatagctaa

SEQ ID NO: 77452 - DNA, 2707 bp, Cannabis sativa
aaaaagtaaataaaaaattaataataattatgacacatttaaatcgcacacataattattaattttaactacataattaaaagtaatgtgatcttcatatataattatctatgataaaaattattaaatacatatccttgtgtgtaataaaagaaagtacgtgtaattcttcaaatttaatacaacttataacattatcaaatttggtgcatattttatacaatacccgataataaactattatttattttctttcaaaaatattgtaaaaaaataataattaatatataacattaatccattaaaatagatgctcttttggtttgttgcatgtattgtaaaattaattcataatcaatcgattcaaaaactatgtaatttagtgacctaccaaataatcattttcttattcacaatacatatctatatattattcacatttattattattttctttcaattataatattgatgatcgtatgagtaggattagtcgaccaccaatttgaataaaatattagtctcactcacaactagggaagattttgtaagttttgttgtattaaagatctggtgtatcactctatatagataaatagatatattatataatcaattaattattattttatttattggaaaagtatatagatcaattattttggtaggcatgcagctattattaattggacaaagtcattccttttatgaattattcccaaaataactaatccaaaaccactcctacaaatcacacaatctgcttacaaactataatgatcaccaaattatgaaactaacttacaaaataaatccttaagaatataaaggtttatttaaagatgatttttcaagggagtagattattaatcctaatcccatttttcaatataaacattttataagagtttctcgttcttaagtttaccgaccaagcccgccggccttctctaagcataggtgcagcttggttggagttatgttttgctattgtgattcaatttgtgaatctgtgacaagtcttgtttttgtgacatgattttgagtgttttagtcttgtttttgtgacatagttttgagtgtcttagtcttgtctatgtgacgattttgttttattttgttgctaatttttctttgttcttcgatggcttgtcattattgttagtaattgggaataacaagttatctgcgattgaaggggttgttagtagtgcagttacttaccttgcacaataattgagtgttcaaactacgagattgaatgaacctggagtaacaatttctattgttgtgtcttctgagtgatagatgaaactgaatataggttttcttaaggttaactgtgatgctgtaatttttttaatttgattttatttttaattcttttatcaaacgattttagaatttcacggctgattatttggctcttttttctaattctaattgtagtcgtgtctctaacagtgagatgtcatatttagattgcaaactattatttagttgattgctattaaaataaaattatatcatttattataagaaaaataataaaaataaataaatcctacaaataaataaagtaaattaacatggtaaatattgatgaagaataattctatttttttcttttttgttttttgcaaaagctagtttcaaaaaagagtaacacactcaaaagggacaaggagatatcattgaaatatggcatcagccaaacaatatttttctaaattttaattgtcaaaaagtgatttttttttttagttttttttttaattatttttttcttgcacattggtacaatagtattgagctaaatttatgatcaagattagacgtttttatttagtaaaatattttttgtcaaaaataataaactttttcactttgaagttgaagatgccttaataaattaatcattcttctcgagtgtgtgattagaatcttacccttacaagagcaaaagaatgtttcggcctcatttggtaggtgtaagagagagatgtgatttacaagaaatcaaaatcacaatcactcaagctccaaagtcaaaaatattgacaaaataagaatatctcttttacatttcttattccaaattgaaatatattgaaaagcttgtctacaaatattaatttaaagcatcttctagaacatgtgacatgttttttcaattaaatacatcaattattaagttatgctcattaatttcttgcatatgatattcgtatataccctagtttattgtcatcttttagtttgaacaagtgatagttaaggtggtttgagaccttgagctgaagaaactgaaagccaaggttcgagtagaacttttactcctgcatcatatgtttgtgtggtacattatattatgatgtgcctgaatagtaagtgatattatgatggtgtttgatgttagttgttcgatgtctcgagtagtgttgtaaatacatgtctcgctatatatatatagattgtgtcgtgctgtattataaaaaatatgaatcatgttgtattgtatcataaaaaaaatatgggtcgtgtcgtgtcgtgctttactcccagcatgttttcttatacgggcttgttatctgagtttccaaacaaaggacacgtgagtagatagaaggcgatgatctgggtgattaccaattaagtctccttaattacggaaggtcgtggaaggactacattggcctgggaaagg

SEQ ID NO: 77453 - DNA, 1771 bp, Cannabis sativa
  modified_base (48)..(49): a, c, t, g, unknown or other
tctttattgatattgaataaaataaattacattgaaatagagttttanntagggcataaaacccaacacccgcagctaggaaaactcccccaagactggctcaaattaaattgtgatgttaaagtaggaggggagcatatatgtgttgcagttgttgctaaatactacctgagtaaggtggcatgggtgtatacggccaagctggacttttttgatgctttttgtggtgaagctgcaacggtttgtttggctcttgagcagtggcggactagcacttactaggaggggggccgatgtacataataattttttttttaaaaaaagaaagcgattctaaagttgtgatcaattctctcaatgacgtagggtgtattttttttttttaagatctagacatttgagtttaaatgtacatctaaataataagatatcaactctgaatctgaatattaaaatatttagactgtctgttttttttttatatctgaaatatatattagtatttttaatttatataagattgacaaattcattaaattatattttattttaaaaaatatttgaatatatttaaaatacaatgtatcattagttttttttttttaaaaaaaataggtatcaactattttctcttgtttggattaactttggattagttctagggtaaatttattctttaaattgttcataaaataaaaaatttaaaatcattaatatcatatttatttaataaataattaaatttgattatacatataaaataatatctttttgctattcaatatcaaacctcataaaaaatgattttcttttgttatgttttgctgagttgtccaatcaatcacagtttatttataatttataatattatataaatatttacatacatatataaatgatatgaaagaaaaattatgagtgtgactttccataaagaaatagaaaaataaaaagtattatatcttaaaaattttaagaaccaaacggcaaacacgtctgaccgaatcagatgaattaagtgcaaaatagtggttcaaaaaaaataaaataaatgatattaataggtttaaatctgaacgaatcagattaattatatcattaagtataaacaaatgcacctttagacttcagatgggaaattgaaaactcttattttgtaaaagaatcgctccttccttcatttttttttgaagtaactgcaaagaaaataagacagttacaaagaggaggaggagaaacaattcctccaaatgatatccttatcctgcttgagggcttctcgagcattgttatgtactgcggtgttgtgaactcgagggatgtaatgaagagaaacaccagggtaagagaatagggacttcctgatcaactgcactacacttgataaggccgaattatcttgctaatgatttttaatccttgagattagttgctaggaatctgatttgatggcatcgagggggatcctagtagccatacaccaatgaatgccttctagtaaagcttgagcctctgcaaaaaggggtgtaaaagcaccctatctctgaatagattatcctgcaatgtggttttatttactgtcaagtatggtagcacccagccccgtttttaggttcttaggtccaaagcagcatcaacttgtagatcggatattgtctattctgaagggagtgagctgaaggatcttgctgagagagtaaggacggatctggagcagaggaatccaagtggtctgactaaaggggtgtagcttgggctgcctgatagtcct

SEQ ID NO: 77454 - DNA, 1563 bp, Cannabis sativa
ggatttaaactcttatgcggatagaattggatctaaaatatgaaatccgcacttattgcggattagatgttgtttgaccaaaaaagtgcggattgaatctaatgaacatccctaatctcgtgttgacaacagagatatacaagttcctatcgagtgtttgaagcgatctttatccagtacgtataaaaaatgaatcctaatcctccaaaaaaaaatgaataaaaaaattcctccggctattgtttaattttatcgaacgattttttctccaacctataaatattattgcaaaaaaataaacaaatattattgcaaaagtgtgaaataaatattatttttttcataaaaataataataaaagaaattaaaggggcaaaactctacaattacggaagaaatattagttgaccaaaaaaaaaaacagtacatttcaatgagaaaatggcaagtactagccatttggtgccaatgtcaggtcagaaaagaccatcagcttttaataatttgtacatgtgatcagcggcaataatgaagaaaccataaaaaataagtgcacctgctactagcattaccagagctaacatctactgaccacttcattcttactcttggatttgaactacactaaatatatatattcatacttgtatatgtatatgaatacatgaatatatatatatatttatatgcttctacttcttcagctaatcaccttcttcggcagctatcaaagtccatccaagcttgaaaaactttgcatgcaatttttatgtcagattgtgcaaaatatgcacggcagtacagacaggttatgcaattgcggcaagttcctgatacatcaaagatgggacaacgccataaggaactcacgtagatgagtttaaaaagaggctgctatgtctatacataaaaaccgcaatcatggccttataacctttttctcatagttcatggtaaagaaatgaagtggcagagcaatcatatgctgcaatattaatgctcttccatgacaacttggaaagaagactagatacatggaaagctcagtagactgaataagaaatggcgataagtcaaattaccttgtctccatcatttgatactgatgtaacactggttttgctctcaaacttttccttccaaattttccaagcagtcctaacttcatctaactctgtctctggaatgtttgtgttacgatccaaattctcaacccattccttccaaggggagcctgacgggtccaagaatttagaaacctggggaagcattacagttgtatagaactcatcaactcccctgagaatctcttcagattcgaccattgccaccatttctggtctagtgacatttcctggtctggttctcaaagaaaagttgtttccccttaagatcaggacttctgatggagcaagcggtacaacaattcgtgagaatttggctaatgacagagtcaatatatctctgggaagtaaattccgctttactgccacagcagtcccaatcattttgcgaatctaaataacaacaaactatattatgtaaattcaacaatataataag

SEQ ID NO: 77455 - DNA, 578 bp, Cannabis sativa
ttcatacatactcctcatcatcctcgacaccatccttgtactcttcttttaagaagagactcaatttctccattgatggacgagagaaacttgaaccagaagcatcgatgtaacaatggcttcctgttctaaaacatagactatttagcaataactcacctaatatatagcactacttttcacaagggttactaagttcaagtatgaagaacaaactattagacatgatttgacaatattgacttaaaagaactatcacaaatgacatacttttctagttcaaatctacaatatgggtactaaaattgacagcaattacactaacattatggtattcatgctctacaatatttcatctatgttacttagattgtaaagggatttacaagcaaaattacagagttttcattgaaactttcaccttgttatgaaaaaggaaagcactaagtgtccaatcaaaatctattttatactaaaaccaacttcacttccattaacacacataacaatgttatgttactcaaggaacatttaagggagtatgatcaatacctcatctgcctttggtcttttgcttg

SEQ ID NO: 77456 - DNA, 535 bp, Cannabis sativa
taggtggaactaggaacatgaaatgcaggtcagatggacaagaacaaccgtagcctggtatggttcaggtggaactagtagttcacatagaacctgagtcatgataggtggaaggaaacattgagaattatcagctaaccagagatagaaagaagagaatccccaagccaaattagaaatttagtttcaatgtttgggatgaagtaatggcatatgatttcctaagtgccatggagataaaatacactaaaccaaaatcctatgaaattgctataaaatgcaaagatgcagagcaatggaacaagactatgagtgaagagatgcgatctctgatgaagaataagacttagattgttgttaagagacctgatgggaagaacataatagcctgtaagtggttattcaaactcaaggaaggaattaaagaagaggacccgatgagatacaaggccagactagagctatgcatgaacttgctagggatcgatactggatggtgagtgacaccagactagagctaagaccctcagatcaa

SEQ ID NO: 77457 - DNA, 2223 bp, Cannabis sativa
gcaataatctcaaaaaggggctaaaagttacaagaggctctagttataataatacatatttcggtatttagtgttgtatgcataatttgcaagtcatactaatgaggaacaatcaggcctaaacagtcttgtaaggaacattagaaagcataatataggacaaaacatagtaatactgatgacagttatgaaatctacctccagtttgtcatctgaacaaatctctgcaacccagatcccacaacatgccatgtattggtactactgtcatgagaaatctcaaactcattgatcgatgcagttctctgcttacgcactgtagtagctacatggttcaaatcaacagcatctccccaacctaaatcaataagacttgtcaacagagtgtataaatactcataccagttcaaaagaaccacatgttgagcttgaaaggtagaattaaactaatgaaaagactttgaagattcaaaacaaaaataaaataaacttccaaccgtgtgattcctcctccatggttgcttttctttcttgaagaatcttgtaagcagcacagatcacttcatgagtgccatctcttagtactgcactaatacaaaatggttcaatgcctagagcttgtagatgttctttgaaggaaggccagttttcccgtgcctccggaaggtccattttgttaaaagcaacgacaaaaggcttttctgcaatttcaggactgaacatttcaagctccaaacgaactgcatcgaactcaaactctggttgtggtgatgaaccatcaacaacatgcacctacgcttccagataacaggttttattaacacactataatacataaaatacatgttgcaccaacacaattatgaagccactatatactgaagaaaattccagccaaaagatcacacaaacaacatattttatgatacaaaggaaatcattaattatcatataaagaaccttttgcatcacctttaagctatccagaaagatgtataatatataagtcagtcattttctctctcagcatcattaggtttaagtgtcttatattgctcttatcctattcctagataatatcaaacttacgtcttttgtaaaatcactccaatattattttgttctcttatctgccaatttggaaatgatattataaagaaaaactctacatgttaaatattttcatttttatatgttagttaaaagacagaagttcatttctaatggattgaaatgatgatcaatacaactaggggaactagaaagaaaaccataccagtgcagaacacctttcagtgtgccttagaaactcatgacctaaaccaaaccctcggtgtgctccttcaagtaaacctggcagatccgctacaaccatggtagaatcgtagtcaaaagaaactacacccaaattcggcaataaagttgtaaaggggtagtttgctattgttggctgcgctgcacttatcacactaaggagtgtgctctttcctgcatttggtgcaccaactattccaacatccgcaactaactttagctccagctccaaccacctgatcaacaatactgtgttacttcaactgctcataacctatgaatctatgattatctcccaaaagcgttaattgactctgggtaacctttaggagattcagcaaagtaattaggaggacagactattgcacatccgtacccattgttagctgaccaatttgtaaaatatgcaagctaccacatatggttcagcgagcctcatttcagcaaacatcaaattcttttaaatcttatcaactaagcggacatcaagtacttactttctttttcaagcaatatttttcacatagttaaattgcttttacaatggaaagtggaaacaaatgatgccaaagctcaataagctatcgatttcattttctaaaggaaggacaatgaaagaggtatacagtaacaaaaagccaaagggctcctgaggtaacctgttaagagttatcacacttctcgcaaacaaagagtacttatttttcatactgacaaaccaaagaatgctcctctcagaaagttagagttaacacagttttaagttttagcacattacttctcttctagcaaacaaagaatactgataagaataggcaaaactagatgcaagtaaaagaccacatagaaagctaagtaaaacaatagaaacaaaactattaacaattgacaataacagaagcagaaaag

SEQ ID NO: 77458 - DNA, 3707 bp, Cannabis sativa
attaaacgacatgttgtttaatttgcagcaaatcattcattcattctcataatccccccccaaatcaaaatggtattttatattgaataataaaatttttgtccttgaactatgatctttgtagagatttgtctcctaaatttttctctgttgcaaaatttttcttaaactatgtaaatcgttgtaaatatctccctccaattatatatccattttttaaaataatttagatacgtggttgagttacaagtataattgcaataagaatgtacatacatactctcataattcatcattagactgctatttatgtatttattttttgtttggacgctagatttttttttaaaaaaataaatgttcattagatagaaaaactagacctcgcggtcattacaaaagatgttcttaggaatggaaaaaatagataatcgaccaaaccggttatggataaaagtccacttaaccacattatgggccataaaattaccagttcttaaagtactacataacaaacagctagcaaaggaagaaatgattctattacaaaaaaaggagtggttctcagttttcaacctagggtctacaccattaaaagaattgattactaccttagaattgatttccacaatgataaacttgcaacctttttcctttgctacctccaatgccaagcaaacaacgacaacctcactgcaaagtgcatttgaaaaatccaattttgccgtagtagcccaaatcacctcacctaggtggttcctagctacaaccgcaatacgtacatatactccaaccccactttaacgtcacaattcagtttgagccaatcttgaggagggggcactagtcaatagagtggattgaaggaggagaagggatgcgggtagctctgtaatatgcaaaagagtgtagaatagagtcaatacaatgattcacactgtccatcttattattatgaaccttatcattttaaactcgccacattgtgtccataacaatagattcataaaggaagacctcatttgcattcacgcctttgtgcttaatgctccaaataaatttgacccaatcccacataccaatacctgtgtcagagacagggaagataccccacggggatgagcgccataagtgataggccaggaaaaaattgagaaaaaggtgctcaagagattcctccccaaccccacaaattgggtagcaattgtcaacaatatgaaatcatttcttagggtcaacctggttgggagcacgtcaaacaaaatgctccaccacatactttatgacgctcgaggatttggctgttctagagcttattatagagggaaggagcaacctcatagtgggggcactgttgaagggcttggattaggtaggcagacttgtaagagaagcgaccattactttccttagtccagaccaaatgatctttcccccaaccagaaggtctacccccctctaagatggcaacaatggtttcattatcaaataagtggtgaagtttatgaatatcctagtctccagtgtctgtcagcaggtcaaccacatttttgtaaccaagatttggcacaccattagacttcagagagaagtatttaccaagaggtatccaagaatcctcctaaatattcgtgactttaccatcaatgatcactttacacgcgcccttcctaagggtatcattggctttcaccacgtttttccaaaatcaagagtcaaaatgttagccttacacttcagaatatactttcctctaaggtatttatcttccagaatcttgtaatacaaagattggcatccagtaagcagtttccacccccacttagtcaagaaggcctaattcatttcttttgttttcggaagccaaggccaccacgggatttagggagacatagcttgtcccaagccttcaatggatcccatgatttcctttttcaaaaccccacaaaagatctcgaaccatgctatcaatctttacaacaaaacaattagagaggcttttttaagtttgcatggcataaacaggcatggccaaacccaccgattttataagagttgcacgatcggccttagatagcatttttgttttccacccttgcagtttagcagtaagggttatccagtttgaggttaaaatttacatccttatgtctagtttggaataaagggagacctaagtatttgatgttgcctttcggaccaccaatctgtaggacattctaatctcaaacttcatattctcagaggtatttttacggataaaaatagaagttttaagtttattgacttgttgaccagaccaatcataaaatttctcaagacaagcccacatacctttagcttccccaacattagcttttccaaccaagattaaatcatttgcaaaaaagatatgagaaatgattagcccaccacgactgattctaataccctttgtaacaccttttctcagggactcctcaataagccttgataacatttttgcaacccagttgaacagataaggagagagagggtcgtcctgccgaagactacaaaagggcctaattctaccaatttggccactgttaagacaaagattgagggtggtagttgagagacattgagaaatctatttgcagaatctattcagaaccccaagacacctcaacacatgatcaacaaagcttattataggctttcacaagatcaattttgatggcaaagaactcttcttttttacttttcctattaaaagtgtggacaatttcttaaactatcacaattttcagaactatcacattatttttcaaacactagattaacattatgttaagttatgttagtaatatattaacaaattattttaataaaaggagtagaatgcaattacaaaggatgtttgcgatgattttttataatttagggtgaatttttgcaggagataaaaattaaagggcaaaactctataaatgtcataattatggggataaatcctatttattgttttattttctttcttccacaatacttgccggggaaaggtcaattcttcagatacagcaagcaagattcattgatgtaagataaatgtttgcacttttaagtctgaaagtggagaaatagcgcagtcaaatggcctttaagaattttgcaacatgctattccattggtgttgcaatcgttgtcactctcattgctttcctcctcacattttacattaaacccaaacatcaacaggtcagagaagctttttcccctgtctgtaaatatatatgcttttcaattctgtctctgtttagctcatctgggttttgttttgaataaatttccctatgtgggtttcccaatttggaggcagaacatgaattgagtttctcgttttaaactggctccatttcaatggaagagattctactttgttgtctagaaaagaataaccttcgaaaatgcttttattggagcatagttgtttgaaaatctttttggttagctgatcctgaaagtctaatgcatttaaaccatctaaagctttactacataagatgaagtgtttactttttcggagcgattatattatatttaaggcaaaggttcatcttcatagatcattgcttaactggtgtgctttcgattcacagagattcttcagtgttcaagaactagctttgtacaatgggactgatgaagggttgccaatacttttaggaattcttgggtatgtattt

SEQ ID NO: 77459 - DNA, 575 bp, Cannabis sativa
aactcatattaggaactaaattctgacacaaagagaaaaggttaacatttcttgtaacttatagtactgcaatgaaccatttttcctatgactgcaaacagatgttgaaaagttattctcttgctattacaattcagttttaagtatataattaatagaagaaaaatatttcttataccccaaacatgcttcccaagttggccaatttatttatttatttatttattttgatcaagaaggaagaaacttcaataatcgacaaacaaatacaaccaaaaaagcactatataaaaaccggctccttacccagcagccaccttaatacaaaagaattctgttcaagtataccctttcccctctagaaacattcctgtgcttaacaatttgtaatccacaagtcattacacttttgacctctttaactatatgagagttggccaatttattaactactagctaaatagtcaaatttagaagtcaaacgggcatccagaaataatgatgggtgtgaggcaggcaaatataacgaatttgtacaatatgatgctgttatccctaacttagatgatgcattt
